United States Patent Application Publication US 2014/0004565 A1 - sequence listing, part 14

SEQ ID NO: 222070 - RNA, 19 nt, Artificial Sequence
  Description of Artificial Sequence: Synthetic oligonucleotide
cuguuaggaucauccaaag

SEQ ID NO: 222071 - RNA, 19 nt, Artificial Sequence
  Description of Artificial Sequence: Synthetic oligonucleotide
uccaaagacuaaaggcggu

SEQ ID NO: 222072 - RNA, 19 nt, Artificial Sequence
  Description of Artificial Sequence: Synthetic oligonucleotide
agccuaauuuuauuucccu

SEQ ID NO: 222073 - RNA, 19 nt, Artificial Sequence
  Description of Artificial Sequence: Synthetic oligonucleotide
aaaggcggucuugaauguc

SEQ ID NO: 222074 - RNA, 19 nt, Artificial Sequence
  Description of Artificial Sequence: Synthetic oligonucleotide
gcagccuaauuuuauuucc

SEQ ID NO: 222075 - RNA, 19 nt, Artificial Sequence
  Description of Artificial Sequence: Synthetic oligonucleotide
acgcgguaugccuugccac

SEQ ID NO: 222076 - RNA, 19 nt, Artificial Sequence
  Description of Artificial Sequence: Synthetic oligonucleotide
ugugugucugcucgugacu

SEQ ID NO: 222077 - RNA, 19 nt, Artificial Sequence
  Description of Artificial Sequence: Synthetic oligonucleotide
cuguuuugugacaggugag

SEQ ID NO: 222078 - RNA, 19 nt, Artificial Sequence
  Description of Artificial Sequence: Synthetic oligonucleotide
uacauauagcuuccauaau

SEQ ID NO: 222079 - RNA, 19 nt, Artificial Sequence
  Description of Artificial Sequence: Synthetic oligonucleotide
cuaaugggacacuucuguc

SEQ ID NO: 222080 - RNA, 19 nt, Artificial Sequence
  Description of Artificial Sequence: Synthetic oligonucleotide
uuaccccuggcuuaucguc

SEQ ID NO: 222081 - RNA, 19 nt, Artificial Sequence
  Description of Artificial Sequence: Synthetic oligonucleotide
gccguguugggucugacag

SEQ ID NO: 222082 - RNA, 19 nt, Artificial Sequence
  Description of Artificial Sequence: Synthetic oligonucleotide
uuuggaccuuugcuagagc

SEQ ID NO: 222083 - RNA, 19 nt, Artificial Sequence
  Description of Artificial Sequence: Synthetic oligonucleotide
agccaauuaguauuuuaua

SEQ ID NO: 222084 - RNA, 19 nt, Artificial Sequence
  Description of Artificial Sequence: Synthetic oligonucleotide
uaaaggcggucuugaaugu

SEQ ID NO: 222085 - RNA, 19 nt, Artificial Sequence
  Description of Artificial Sequence: Synthetic oligonucleotide
uaaggacaaacgguggcgu

SEQ ID NO: 222086 - RNA, 19 nt, Artificial Sequence
  Description of Artificial Sequence: Synthetic oligonucleotide
guggcguuccggcacaagc

SEQ ID NO: 222087 - RNA, 19 nt, Artificial Sequence
  Description of Artificial Sequence: Synthetic oligonucleotide
ccuaguuuagaguaguaga

SEQ ID NO: 222088 - RNA, 19 nt, Artificial Sequence
  Description of Artificial Sequence: Synthetic oligonucleotide
cagaguuugcacauaaacu

SEQ ID NO: 222089 - RNA, 19 nt, Artificial Sequence
  Description of Artificial Sequence: Synthetic oligonucleotide
gcgcaugaaagcugcaacg

SEQ ID NO: 222090 - RNA, 19 nt, Artificial Sequence
  Description of Artificial Sequence: Synthetic oligonucleotide
guucuuggaaagcgcauga

SEQ ID NO: 222091 - RNA, 19 nt, Artificial Sequence
  Description of Artificial Sequence: Synthetic oligonucleotide
cacggguaaaccucccuug

SEQ ID NO: 222092 - RNA, 19 nt, Artificial Sequence
  Description of Artificial Sequence: Synthetic oligonucleotide
caguggacagcuaccuagc

SEQ ID NO: 222093 - RNA, 19 nt, Artificial Sequence
  Description of Artificial Sequence: Synthetic oligonucleotide
acagcuaccuagccuggca

SEQ ID NO: 222094 - RNA, 19 nt, Artificial Sequence
  Description of Artificial Sequence: Synthetic oligonucleotide
agugaacgccugaggaggc

SEQ ID NO: 222095 - RNA, 19 nt, Artificial Sequence
  Description of Artificial Sequence: Synthetic oligonucleotide
guccauagacagugaacgc

SEQ ID NO: 222096 - RNA, 19 nt, Artificial Sequence
  Description of Artificial Sequence: Synthetic oligonucleotide
uuuggcucgggagcgcaag

SEQ ID NO: 222097 - RNA, 19 nt, Artificial Sequence
  Description of Artificial Sequence: Synthetic oligonucleotide
uaauugugugucugcucgu

SEQ ID NO: 222098 - RNA, 19 nt, Artificial Sequence
  Description of Artificial Sequence: Synthetic oligonucleotide
acgagcccgcucuuucggc

SEQ ID NO: 222099 - RNA, 19 nt, Artificial Sequence
  Description of Artificial Sequence: Synthetic oligonucleotide
cagagccggaaguugguac

SEQ ID NO: 222100 - RNA, 19 nt, Artificial Sequence
  Description of Artificial Sequence: Synthetic oligonucleotide
gagagacuagauacucacc

SEQ ID NO: 222101 - RNA, 19 nt, Artificial Sequence
  Description of Artificial Sequence: Synthetic oligonucleotide
aaacgguggcguuccggca

SEQ ID NO: 222102 - RNA, 19 nt, Artificial Sequence
  Description of Artificial Sequence: Synthetic oligonucleotide
acagaaguccucacauaag

SEQ ID NO: 222103 - RNA, 19 nt, Artificial Sequence
  Description of Artificial Sequence: Synthetic oligonucleotide
gggguaggucauuuaauug

SEQ ID NO: 222104 - RNA, 19 nt, Artificial Sequence
  Description of Artificial Sequence: Synthetic oligonucleotide
cugcuaaccucaugcuggc

SEQ ID NO: 222105 - RNA, 19 nt, Artificial Sequence
  Description of Artificial Sequence: Synthetic oligonucleotide
auuucucgcagggccacag

SEQ ID NO: 222106 - RNA, 19 nt, Artificial Sequence
  Description of Artificial Sequence: Synthetic oligonucleotide
cuggcuuaucguccguggc

SEQ ID NO: 222107 - RNA, 19 nt, Artificial Sequence
  Description of Artificial Sequence: Synthetic oligonucleotide
cuuaucguccguggccucc

SEQ ID NO: 222108 - RNA, 19 nt, Artificial Sequence
  Description of Artificial Sequence: Synthetic oligonucleotide
cauagacagugaacgccug

SEQ ID NO: 222109 - RNA, 19 nt, Artificial Sequence
  Description of Artificial Sequence: Synthetic oligonucleotide
gaggaauccucagaaucga

SEQ ID NO: 222110 - RNA, 19 nt, Artificial Sequence
  Description of Artificial Sequence: Synthetic oligonucleotide
aagcgcaugaaagcugcaa

SEQ ID NO: 222111 - RNA, 19 nt, Artificial Sequence
  Description of Artificial Sequence: Synthetic oligonucleotide
uggagcaaccacgugguuu

SEQ ID NO: 222112 - RNA, 19 nt, Artificial Sequence
  Description of Artificial Sequence: Synthetic oligonucleotide
cacgagcccgcucuuucgg

SEQ ID NO: 222113 - RNA, 19 nt, Artificial Sequence
  Description of Artificial Sequence: Synthetic oligonucleotide
gagccggaaguugguacgg

SEQ ID NO: 222114 - RNA, 19 nt, Artificial Sequence
  Description of Artificial Sequence: Synthetic oligonucleotide
ucuaccgcgcgugccacga

SEQ ID NO: 222115 - RNA, 19 nt, Artificial Sequence
  Description of Artificial Sequence: Synthetic oligonucleotide
uucaguggacagcuaccua

SEQ ID NO: 222116 - RNA, 19 nt, Artificial Sequence
  Description of Artificial Sequence: Synthetic oligonucleotide
agcuacgaagagacagaac

SEQ ID NO: 222117 - RNA, 19 nt, Artificial Sequence
  Description of Artificial Sequence: Synthetic oligonucleotide
uuaucguccguggccuccc

SEQ ID NO: 222118 - RNA, 19 nt, Artificial Sequence
  Description of Artificial Sequence: Synthetic oligonucleotide
gagcgcaaguuccucuuga

SEQ ID NO: 222119 - RNA, 19 nt, Artificial Sequence
  Description of Artificial Sequence: Synthetic oligonucleotide
cuuuuggagcaaccacgug

SEQ ID NO: 222120 - RNA, 19 nt, Artificial Sequence
  Description of Artificial Sequence: Synthetic oligonucleotide
uugcucucuaccgcgcgug

SEQ ID NO: 222121 - RNA, 19 nt, Artificial Sequence
  Description of Artificial Sequence: Synthetic oligonucleotide
ggguaaaccucccuugcuc

SEQ ID NO: 222122 - RNA, 19 nt, Artificial Sequence
  Description of Artificial Sequence: Synthetic oligonucleotide
aguugcuuugaaagacuca

SEQ ID NO: 222123 - RNA, 19 nt, Artificial Sequence
  Description of Artificial Sequence: Synthetic oligonucleotide
accguucuuggaaagcgca

SEQ ID NO: 222124 - RNA, 19 nt, Artificial Sequence
  Description of Artificial Sequence: Synthetic oligonucleotide
ggaaagcgcaugaaagcug

SEQ ID NO: 222125 - RNA, 19 nt, Artificial Sequence
  Description of Artificial Sequence: Synthetic oligonucleotide
ggagcaaccacgugguuua

SEQ ID NO: 222126 - RNA, 19 nt, Artificial Sequence
  Description of Artificial Sequence: Synthetic oligonucleotide
uucuuggaaagcgcaugaa

SEQ ID NO: 222127 - RNA, 19 nt, Artificial Sequence
  Description of Artificial Sequence: Synthetic oligonucleotide
cuugugugccgugaacauc

SEQ ID NO: 222128 - RNA, 19 nt, Artificial Sequence
  Description of Artificial Sequence: Synthetic oligonucleotide
gggucggguucucaggaag

SEQ ID NO: 222129 - RNA, 19 nt, Artificial Sequence
  Description of Artificial Sequence: Synthetic oligonucleotide
gaggcggcacggguaaacc

SEQ ID NO: 222130 - RNA, 19 nt, Artificial Sequence
  Description of Artificial Sequence: Synthetic oligonucleotide
uagaaggaaugguggucua

SEQ ID NO: 222131 - RNA, 19 nt, Artificial Sequence
  Description of Artificial Sequence: Synthetic oligonucleotide
cgugguuuaccuugcuagg

SEQ ID NO: 222132 - RNA, 19 nt, Artificial Sequence
  Description of Artificial Sequence: Synthetic oligonucleotide
gagcuacgaagagacagaa

SEQ ID NO: 222133 - RNA, 19 nt, Artificial Sequence
  Description of Artificial Sequence: Synthetic oligonucleotide
ggcguuccggcacaagcgc

SEQ ID NO: 222134 - RNA, 19 nt, Artificial Sequence
  Description of Artificial Sequence: Synthetic oligonucleotide
gaaucgaaguucacuugcu

SEQ ID NO: 222135 - RNA, 19 nt, Artificial Sequence
  Description of Artificial Sequence: Synthetic oligonucleotide
ggacaaacgguggcguucc

SEQ ID NO: 222136 - RNA, 19 nt, Artificial Sequence
  Description of Artificial Sequence: Synthetic oligonucleotide
gaaacgcgguaugccuugc

SEQ ID NO: 222137 - RNA, 19 nt, Artificial Sequence
  Description of Artificial Sequence: Synthetic oligonucleotide
aggcggcacggguaaaccu

SEQ ID NO: 222138 - RNA, 19 nt, Artificial Sequence
  Description of Artificial Sequence: Synthetic oligonucleotide
aggaucauccaaagcccca

SEQ ID NO: 222139 - RNA, 19 nt, Artificial Sequence
  Description of Artificial Sequence: Synthetic oligonucleotide
gugccaguugaaacaaguc

SEQ ID NO: 222140 - RNA, 19 nt, Artificial Sequence
  Description of Artificial Sequence: Synthetic oligonucleotide
ucgugacuccaaagacuaa

SEQ ID NO: 222141 - RNA, 19 nt, Artificial Sequence
  Description of Artificial Sequence: Synthetic oligonucleotide
gaugagcuacgaagagaca

SEQ ID NO: 222142 - RNA, 19 nt, Artificial Sequence
  Description of Artificial Sequence: Synthetic oligonucleotide
cucucuaccgcgcgugcca

SEQ ID NO: 222143 - RNA, 19 nt, Artificial Sequence
  Description of Artificial Sequence: Synthetic oligonucleotide
cuaaccucaugcuggcacu

SEQ ID NO: 222144 - RNA, 19 nt, Artificial Sequence
  Description of Artificial Sequence: Synthetic oligonucleotide
ugucugcucgugacuccaa

SEQ ID NO: 222145 - RNA, 19 nt, Artificial Sequence
  Description of Artificial Sequence: Synthetic oligonucleotide
agucucugaugagcuacga

SEQ ID NO: 222146 - RNA, 19 nt, Artificial Sequence
  Description of Artificial Sequence: Synthetic oligonucleotide
gggagagguucucugcuga

SEQ ID NO: 222147 - RNA, 19 nt, Artificial Sequence
  Description of Artificial Sequence: Synthetic oligonucleotide
ggcgauggguucuucaacu

SEQ ID NO: 222148 - RNA, 19 nt, Artificial Sequence
  Description of Artificial Sequence: Synthetic oligonucleotide
ucgugguugccuugcucua

SEQ ID NO: 222149 - RNA, 19 nt, Artificial Sequence
  Description of Artificial Sequence: Synthetic oligonucleotide
guucaguggacagcuaccu

SEQ ID NO: 222150 - RNA, 19 nt, Artificial Sequence
  Description of Artificial Sequence: Synthetic oligonucleotide
gacggguggugucucugaa

SEQ ID NO: 222151 - RNA, 19 nt, Artificial Sequence
  Description of Artificial Sequence: Synthetic oligonucleotide
aucuugggcaaggguggug

SEQ ID NO: 222152 - RNA, 19 nt, Artificial Sequence
  Description of Artificial Sequence: Synthetic oligonucleotide
uugguacggaaggcuuugu

SEQ ID NO: 222153 - RNA, 19 nt, Artificial Sequence
  Description of Artificial Sequence: Synthetic oligonucleotide
gcacaccguucuuggaaag

SEQ ID NO: 222154 - RNA, 19 nt, Artificial Sequence
  Description of Artificial Sequence: Synthetic oligonucleotide
uggugucgcuccagcugcu

SEQ ID NO: 222155 - RNA, 19 nt, Artificial Sequence
  Description of Artificial Sequence: Synthetic oligonucleotide
gcucgggagcgcaaguucc

SEQ ID NO: 222156 - RNA, 19 nt, Artificial Sequence
  Description of Artificial Sequence: Synthetic oligonucleotide
ggaaccaccaggccuaguu

SEQ ID NO: 222157 - RNA, 19 nt, Artificial Sequence
  Description of Artificial Sequence: Synthetic oligonucleotide
gcugcuuaccccuggcuua

SEQ ID NO: 222158 - RNA, 19 nt, Artificial Sequence
  Description of Artificial Sequence: Synthetic oligonucleotide
aggaauccucagaaucgaa

SEQ ID NO: 222159 - RNA, 19 nt, Artificial Sequence
  Description of Artificial Sequence: Synthetic oligonucleotide
ccacgagcccgcucuuucg

SEQ ID NO: 222160 - RNA, 19 nt, Artificial Sequence
  Description of Artificial Sequence: Synthetic oligonucleotide
caaugacaccugaguuuca

SEQ ID NO: 222161 - RNA, 19 nt, Artificial Sequence
  Description of Artificial Sequence: Synthetic oligonucleotide
ccauagacagugaacgccu

SEQ ID NO: 222162 - RNA, 19 nt, Artificial Sequence
  Description of Artificial Sequence: Synthetic oligonucleotide
ucgggagcgcaaguuccuc

SEQ ID NO: 222163 - RNA, 19 nt, Artificial Sequence
  Description of Artificial Sequence: Synthetic oligonucleotide
ccggggagaagaaccugag

SEQ ID NO: 222164 - RNA, 19 nt, Artificial Sequence
  Description of Artificial Sequence: Synthetic oligonucleotide
gggugcaucuuuaugugcu

SEQ ID NO: 222165 - RNA, 19 nt, Artificial Sequence
  Description of Artificial Sequence: Synthetic oligonucleotide
cacgugguuuaccuugcua

SEQ ID NO: 222166 - RNA, 19 nt, Artificial Sequence
  Description of Artificial Sequence: Synthetic oligonucleotide
gcuuagcauuacagaggcg

SEQ ID NO: 222167 - RNA, 19 nt, Artificial Sequence
  Description of Artificial Sequence: Synthetic oligonucleotide
uuccggcacaagcgcucgu

SEQ ID NO: 222168 - RNA, 19 nt, Artificial Sequence
  Description of Artificial Sequence: Synthetic oligonucleotide
cguucuuggaaagcgcaug

SEQ ID NO: 222169 - RNA, 19 nt, Artificial Sequence
  Description of Artificial Sequence: Synthetic oligonucleotide
ggcggcacggguaaaccuc

SEQ ID NO: 222170 - RNA, 19 nt, Artificial Sequence
  Description of Artificial Sequence: Synthetic oligonucleotide
gagaaacgcgguaugccuu

SEQ ID NO: 222171 - RNA, 19 nt, Artificial Sequence
  Description of Artificial Sequence: Synthetic oligonucleotide
ggugccgccagaugcugaa

SEQ ID NO: 222172 - RNA, 19 nt, Artificial Sequence
  Description of Artificial Sequence: Synthetic oligonucleotide
caccuggugccgccagaug

SEQ ID NO: 222173 - RNA, 19 nt, Artificial Sequence
  Description of Artificial Sequence: Synthetic oligonucleotide
cccuguuaggaucauccaa

SEQ ID NO: 222174 - RNA, 19 nt, Artificial Sequence
  Description of Artificial Sequence: Synthetic oligonucleotide
ugggcgcuuucaguucauc

SEQ ID NO: 222175 - RNA, 19 nt, Artificial Sequence
  Description of Artificial Sequence: Synthetic oligonucleotide
ggagagguucucugcugaa

SEQ ID NO: 222176 - RNA, 19 nt, Artificial Sequence
  Description of Artificial Sequence: Synthetic oligonucleotide
gaucuugggcaaggguggu

SEQ ID NO: 222177 - RNA, 19 nt, Artificial Sequence
  Description of Artificial Sequence: Synthetic oligonucleotide
gcggcacggguaaaccucc

SEQ ID NO: 222178 - RNA, 19 nt, Artificial Sequence
  Description of Artificial Sequence: Synthetic oligonucleotide
ggguaggacugcauuucuc

SEQ ID NO: 222179 - RNA, 19 nt, Artificial Sequence
  Description of Artificial Sequence: Synthetic oligonucleotide
cuaccgcgcgugccacgag

SEQ ID NO: 222180 - RNA, 19 nt, Artificial Sequence
  Description of Artificial Sequence: Synthetic oligonucleotide
ugccccuguuaggaucauc

SEQ ID NO: 222181 - RNA, 19 nt, Artificial Sequence
  Description of Artificial Sequence: Synthetic oligonucleotide
ugcugcgccucagcuuaau

SEQ ID NO: 222182 - RNA, 19 nt, Artificial Sequence
  Description of Artificial Sequence: Synthetic oligonucleotide
cucgggagcgcaaguuccu

SEQ ID NO: 222183 - RNA, 19 nt, Artificial Sequence
  Description of Artificial Sequence: Synthetic oligonucleotide
gcucucuaccgcgcgugcc

SEQ ID NO: 222184 - RNA, 19 nt, Artificial Sequence
  Description of Artificial Sequence: Synthetic oligonucleotide
gaccuuugcuagagcuuua

SEQ ID NO: 222185 - RNA, 19 nt, Artificial Sequence
  Description of Artificial Sequence: Synthetic oligonucleotide
cguuccggcacaagcgcuc

SEQ ID NO: 222186 - RNA, 19 nt, Artificial Sequence
  Description of Artificial Sequence: Synthetic oligonucleotide
gcgauggguucuucaacua

SEQ ID NO: 222187 - RNA, 19 nt, Artificial Sequence
  Description of Artificial Sequence: Synthetic oligonucleotide
cgcaugaaagcugcaacga

SEQ ID NO: 222188 - RNA, 19 nt, Artificial Sequence
  Description of Artificial Sequence: Synthetic oligonucleotide
cauuucucgcagggccaca

SEQ ID NO: 222189 - RNA, 19 nt, Artificial Sequence
  Description of Artificial Sequence: Synthetic oligonucleotide
ggcacuagcuucauucauu

SEQ ID NO: 222190 - RNA, 19 nt, Artificial Sequence
  Description of Artificial Sequence: Synthetic oligonucleotide
gcggucuugaauguccuau

SEQ ID NO: 222191 - RNA, 19 nt, Artificial Sequence
  Description of Artificial Sequence: Synthetic oligonucleotide
ugcuuaccccuggcuuauc

SEQ ID NO: 222192 - RNA, 19 nt, Artificial Sequence
  Description of Artificial Sequence: Synthetic oligonucleotide
ggugagagggguaggucau

SEQ ID NO: 222193 - RNA, 19 nt, Artificial Sequence
  Description of Artificial Sequence: Synthetic oligonucleotide
gcgcucgugguugccuugc

SEQ ID NO: 222194 - RNA, 19 nt, Artificial Sequence
  Description of Artificial Sequence: Synthetic oligonucleotide
cgcgcgugccacgagcccg

SEQ ID NO: 222195 - RNA, 19 nt, Artificial Sequence
  Description of Artificial Sequence: Synthetic oligonucleotide
gcgccucagcuuaaugauc

SEQ ID NO: 222196 - RNA, 19 nt, Artificial Sequence
  Description of Artificial Sequence: Synthetic oligonucleotide
gugaacgccugaggaggcu

SEQ ID NO: 222197 - RNA, 19 nt, Artificial Sequence
  Description of Artificial Sequence: Synthetic oligonucleotide
caccguugugguccagggu

SEQ ID NO: 222198 - RNA, 19 nt, Artificial Sequence
  Description of Artificial Sequence: Synthetic oligonucleotide
ggcagagaccaaacacugu

SEQ ID NO: 222199 - RNA, 19 nt, Artificial Sequence
  Description of Artificial Sequence: Synthetic oligonucleotide
gggagcgcaaguuccucuu

SEQ ID NO: 222200 - RNA, 19 nt, Artificial Sequence
  Description of Artificial Sequence: Synthetic oligonucleotide
gugugccgugaacaucuuu

SEQ ID NO: 222201 - RNA, 19 nt, Artificial Sequence
  Description of Artificial Sequence: Synthetic oligonucleotide
ggcggucuugaauguccua

SEQ ID NO: 222202 - RNA, 19 nt, Artificial Sequence
  Description of Artificial Sequence: Synthetic oligonucleotide
ggggaacuacucugucccu

SEQ ID NO: 222203 - RNA, 19 nt, Artificial Sequence
  Description of Artificial Sequence: Synthetic oligonucleotide
cugcuuaccccuggcuuau

SEQ ID NO: 222204 - RNA, 19 nt, Artificial Sequence
  Description of Artificial Sequence: Synthetic oligonucleotide
gcgcgugccacgagcccgc

SEQ ID NO: 222205 - RNA, 19 nt, Artificial Sequence
  Description of Artificial Sequence: Synthetic oligonucleotide
caguagcugcagccuaauu

SEQ ID NO: 222206 - RNA, 19 nt, Artificial Sequence
  Description of Artificial Sequence: Synthetic oligonucleotide
gcgugguagaagaggguau

SEQ ID NO: 222207 - RNA, 19 nt, Artificial Sequence
  Description of Artificial Sequence: Synthetic oligonucleotide
ccgcgcgugccacgagccc

SEQ ID NO: 222208 - RNA, 19 nt, Artificial Sequence
  Description of Artificial Sequence: Synthetic oligonucleotide
gcagacggguggugucucu

SEQ ID NO: 222209 - RNA, 19 nt, Artificial Sequence
  Description of Artificial Sequence: Synthetic oligonucleotide
ccguucuuggaaagcgcau

SEQ ID NO: 222210 - RNA, 19 nt, Artificial Sequence
  Description of Artificial Sequence: Synthetic oligonucleotide
cguccguggccucccuguc

SEQ ID NO: 222211 - RNA, 19 nt, Artificial Sequence
  Description of Artificial Sequence: Synthetic oligonucleotide
gcguuccggcacaagcgcu

SEQ ID NO: 222212 - RNA, 19 nt, Artificial Sequence
  Description of Artificial Sequence: Synthetic oligonucleotide
gcgugccacgagcccgcuc

SEQ ID NO: 222213 - RNA, 19 nt, Artificial Sequence
  Description of Artificial Sequence: Synthetic oligonucleotide
cggguaaaccucccuugcu

SEQ ID NO: 222214 - RNA, 19 nt, Artificial Sequence
  Description of Artificial Sequence: Synthetic oligonucleotide
cgccggggagaagaaccug

SEQ ID NO: 222215 - RNA, 19 nt, Artificial Sequence
  Description of Artificial Sequence: Synthetic oligonucleotide
gugccacgagcccgcucuu

SEQ ID NO: 222216 - RNA, 19 nt, Artificial Sequence
  Description of Artificial Sequence: Synthetic oligonucleotide
cgcgugccacgagcccgcu

SEQ ID NO: 222217 - RNA, 19 nt, Artificial Sequence
  Description of Artificial Sequence: Synthetic oligonucleotide
acuuacaugaauuuaauac

SEQ ID NO: 222218 - RNA, 19 nt, Artificial Sequence
  Description of Artificial Sequence: Synthetic oligonucleotide
aauagaaguaacauaaacc

SEQ ID NO: 222219 - RNA, 19 nt, Artificial Sequence
  Description of Artificial Sequence: Synthetic oligonucleotide
aaauagaagacuuugcuuu

SEQ ID NO: 222220 - RNA, 19 nt, Artificial Sequence
  Description of Artificial Sequence: Synthetic oligonucleotide
uuugcuuagacauggaagc

SEQ ID NO: 222221 - RNA, 19 nt, Artificial Sequence
  Description of Artificial Sequence: Synthetic oligonucleotide
ucgguuacagauuucaugc

SEQ ID NO: 222222 - RNA, 19 nt, Artificial Sequence
  Description of Artificial Sequence: Synthetic oligonucleotide
aaaacuauuugugggacag

SEQ ID NO: 222223 - RNA, 19 nt, Artificial Sequence
  Description of Artificial Sequence: Synthetic oligonucleotide
cuuaucagaguaaauuggg

SEQ ID NO: 222224 - RNA, 19 nt, Artificial Sequence
  Description of Artificial Sequence: Synthetic oligonucleotide
accaauuaucccuuuauuc

SEQ ID NO: 222225 - RNA, 19 nt, Artificial Sequence
  Description of Artificial Sequence: Synthetic oligonucleotide
uagaaaacgccguagacca

SEQ ID NO: 222226 - RNA, 19 nt, Artificial Sequence
  Description of Artificial Sequence: Synthetic oligonucleotide
gaacacauuaccuuuugcc

SEQ ID NO: 222227 - RNA, 19 nt, Artificial Sequence
  Description of Artificial Sequence: Synthetic oligonucleotide
aacacauuaccuuuugcca

SEQ ID NO: 222228 - RNA, 19 nt, Artificial Sequence
  Description of Artificial Sequence: Synthetic oligonucleotide
aaguuaacuggcucuacuc

SEQ ID NO: 222229 - RNA, 19 nt, Artificial Sequence
  Description of Artificial Sequence: Synthetic oligonucleotide
auuaaacaaagcuagccgu

SEQ ID NO: 222230 - RNA, 19 nt, Artificial Sequence
  Description of Artificial Sequence: Synthetic oligonucleotide
guaaaagcccauuagcugc

SEQ ID NO: 222231 - RNA, 19 nt, Artificial Sequence
  Description of Artificial Sequence: Synthetic oligonucleotide
uuccaaaagagacagcaca

SEQ ID NO: 222232 - RNA, 19 nt, Artificial Sequence
  Description of Artificial Sequence: Synthetic oligonucleotide
aaacauguauaacucgugu

SEQ ID NO: 222233 - RNA, 19 nt, Artificial Sequence
  Description of Artificial Sequence: Synthetic oligonucleotide
agauaacucagcuccuugc

SEQ ID NO: 222234 - RNA, 19 nt, Artificial Sequence
  Description of Artificial Sequence: Synthetic oligonucleotide
cuuugcuuagacauggaag

SEQ ID NO: 222235 - RNA, 19 nt, Artificial Sequence
  Description of Artificial Sequence: Synthetic oligonucleotide
uccuaaguuagaaaacgcc

SEQ ID NO: 222236 - RNA, 19 nt, Artificial Sequence
  Description of Artificial Sequence: Synthetic oligonucleotide
ugucauaaaucguaaacaa

SEQ ID NO: 222237 - RNA, 19 nt, Artificial Sequence
  Description of Artificial Sequence: Synthetic oligonucleotide
uacgacucuucacuuaagg

SEQ ID NO: 222238 - RNA, 19 nt, Artificial Sequence
  Description of Artificial Sequence: Synthetic oligonucleotide
aacucccuaaaguuaacug

SEQ ID NO: 222239 - RNA, 19 nt, Artificial Sequence
  Description of Artificial Sequence: Synthetic oligonucleotide
ugagcauuuacaguguacc

SEQ ID NO: 222240 - RNA, 19 nt, Artificial Sequence
  Description of Artificial Sequence: Synthetic oligonucleotide
agcgggguaucucagacac

SEQ ID NO: 222241 - RNA, 19 nt, Artificial Sequence
  Description of Artificial Sequence: Synthetic oligonucleotide
aaaguuaacuggcucuacu

SEQ ID NO: 222242 - RNA, 19 nt, Artificial Sequence
  Description of Artificial Sequence: Synthetic oligonucleotide
agaaguuaagggccagacc

SEQ ID NO: 222243 - RNA, 19 nt, Artificial Sequence
  Description of Artificial Sequence: Synthetic oligonucleotide
ugcauuauuagcgugcugu

SEQ ID NO: 222244 - RNA, 19 nt, Artificial Sequence
  Description of Artificial Sequence: Synthetic oligonucleotide
uuuuguuuaccgcugcgcu

SEQ ID NO: 222245 - RNA, 19 nt, Artificial Sequence
  Description of Artificial Sequence: Synthetic oligonucleotide
cuuuggguaugacugagcc

SEQ ID NO: 222246 - RNA, 19 nt, Artificial Sequence
  Description of Artificial Sequence: Synthetic oligonucleotide
uuaacacuggcccuucuga

SEQ ID NO: 222247 - RNA, 19 nt, Artificial Sequence
  Description of Artificial Sequence: Synthetic oligonucleotide
uuuauucccaccagcacaa

SEQ ID NO: 222248 - RNA, 19 nt, Artificial Sequence
  Description of Artificial Sequence: Synthetic oligonucleotide
aaaguuaaauacacggggu

SEQ ID NO: 222249 - RNA, 19 nt, Artificial Sequence
  Description of Artificial Sequence: Synthetic oligonucleotide
uuuagaggaaggauuuuaa

SEQ ID NO: 222250 - RNA, 19 nt, Artificial Sequence
  Description of Artificial Sequence: Synthetic oligonucleotide
ccaauuaucccuuuauucc

SEQ ID NO: 222251 - RNA, 19 nt, Artificial Sequence
  Description of Artificial Sequence: Synthetic oligonucleotide
aacuauuugugggacagca

SEQ ID NO: 222252 - RNA, 19 nt, Artificial Sequence
  Description of Artificial Sequence: Synthetic oligonucleotide
gagacaacccuccaagaug

SEQ ID NO: 222253 - RNA, 19 nt, Artificial Sequence
  Description of Artificial Sequence: Synthetic oligonucleotide
uuaaacaaagcuagccguc

SEQ ID NO: 222254 - RNA, 19 nt, Artificial Sequence
  Description of Artificial Sequence: Synthetic oligonucleotide
acauguauaacucguguaa

SEQ ID NO: 222255 - RNA, 19 nt, Artificial Sequence
  Description of Artificial Sequence: Synthetic oligonucleotide
gaucaugcggccuuucccc

SEQ ID NO: 222256 - RNA, 19 nt, Artificial Sequence
  Description of Artificial Sequence: Synthetic oligonucleotide
acgaguaacucccuaaagu

SEQ ID NO: 222257 - RNA, 19 nt, Artificial Sequence
  Description of Artificial Sequence: Synthetic oligonucleotide
aacgccguagaccaaaauu

SEQ ID NO: 222258 - RNA, 19 nt, Artificial Sequence
  Description of Artificial Sequence: Synthetic oligonucleotide
aauuuuagaaugaggcaga

SEQ ID NO: 222259 - RNA, 19 nt, Artificial Sequence
  Description of Artificial Sequence: Synthetic oligonucleotide
ugcgucuuuaacuuuuaca

SEQ ID NO: 222260 - RNA, 19 nt, Artificial Sequence
  Description of Artificial Sequence: Synthetic oligonucleotide
uguacgacucuucacuuaa

SEQ ID NO: 222261 - RNA, 19 nt, Artificial Sequence
  Description of Artificial Sequence: Synthetic oligonucleotide
aaguuaaauacacgggguu

SEQ ID NO: 222262 - RNA, 19 nt, Artificial Sequence
  Description of Artificial Sequence: Synthetic oligonucleotide
aacauguauaacucgugua

SEQ ID NO: 222263 - RNA, 19 nt, Artificial Sequence
  Description of Artificial Sequence: Synthetic oligonucleotide
uagggugugagcuuugggu

SEQ ID NO: 222264 - RNA, 19 nt, Artificial Sequence
  Description of Artificial Sequence: Synthetic oligonucleotide
aguuagaaaacgccguaga

SEQ ID NO: 222265 - RNA, 19 nt, Artificial Sequence
  Description of Artificial Sequence: Synthetic oligonucleotide
ggaauaaggacacaauuuc

SEQ ID NO: 222266 - RNA, 19 nt, Artificial Sequence
  Description of Artificial Sequence: Synthetic oligonucleotide
aauacacgggguuuuguuu

SEQ ID NO: 222267 - RNA, 19 nt, Artificial Sequence
  Description of Artificial Sequence: Synthetic oligonucleotide
agcaaccucggccagguag

SEQ ID NO: 222268 - RNA, 19 nt, Artificial Sequence
  Description of Artificial Sequence: Synthetic oligonucleotide
aaauacacgggguuuuguu

SEQ ID NO: 222269 - RNA, 19 nt, Artificial Sequence
  Description of Artificial Sequence: Synthetic oligonucleotide
cuguguuuacagcucaugc

SEQ ID NO: 222270 - RNA, 19 nt, Artificial Sequence
  Description of Artificial Sequence: Synthetic oligonucleotide
ccauuagcugccaagaggg

SEQ ID NO: 222271 - RNA, 19 nt, Artificial Sequence
  Description of Artificial Sequence: Synthetic oligonucleotide
gaggaaauacucgguaggg

SEQ ID NO: 222272 - RNA, 19 nt, Artificial Sequence
  Description of Artificial Sequence: Synthetic oligonucleotide
cucaagaugaaaacgagua

SEQ ID NO: 222273 - RNA, 19 nt, Artificial Sequence
  Description of Artificial Sequence: Synthetic oligonucleotide
guauccgauguccacaaug

SEQ ID NO: 222274 - RNA, 19 nt, Artificial Sequence
  Description of Artificial Sequence: Synthetic oligonucleotide
agccagagagaucaugcgg

SEQ ID NO: 222275 - RNA, 19 nt, Artificial Sequence
  Description of Artificial Sequence: Synthetic oligonucleotide
agcauuuacaguguaccag

SEQ ID NO: 222276 - RNA, 19 nt, Artificial Sequence
  Description of Artificial Sequence: Synthetic oligonucleotide
ggaaauacucgguagggug

SEQ ID NO: 222277 - RNA, 19 nt, Artificial Sequence
  Description of Artificial Sequence: Synthetic oligonucleotide
aaaccugucauaaaucgua

SEQ ID NO: 222278 - RNA, 19 nt, Artificial Sequence
  Description of Artificial Sequence: Synthetic oligonucleotide
aagcccauuagcugccaag

SEQ ID NO: 222279 - RNA, 19 nt, Artificial Sequence
  Description of Artificial Sequence: Synthetic oligonucleotide
uuagauugccuaaaacauu

SEQ ID NO: 222280 - RNA, 19 nt, Artificial Sequence
  Description of Artificial Sequence: Synthetic oligonucleotide
uguaagguacugaggaaau

SEQ ID NO: 222281 - RNA, 19 nt, Artificial Sequence
  Description of Artificial Sequence: Synthetic oligonucleotide
ugagacaacccuccaagau

SEQ ID NO: 222282 - RNA, 19 nt, Artificial Sequence
  Description of Artificial Sequence: Synthetic oligonucleotide
aaacuauuugugggacagc

SEQ ID NO: 222283 - RNA, 19 nt, Artificial Sequence
  Description of Artificial Sequence: Synthetic oligonucleotide
gguaaaagcccauuagcug

SEQ ID NO: 222284 - RNA, 19 nt, Artificial Sequence
  Description of Artificial Sequence: Synthetic oligonucleotide
acggugaacggccauucgg

SEQ ID NO: 222285 - RNA, 19 nt, Artificial Sequence
  Description of Artificial Sequence: Synthetic oligonucleotide
augaccuacgggcuccuac

SEQ ID NO: 222286 - RNA, 19 nt, Artificial Sequence
  Description of Artificial Sequence: Synthetic oligonucleotide
ccuuaucagaguaaauugg

SEQ ID NO: 222287 - RNA, 19 nt, Artificial Sequence
  Description of Artificial Sequence: Synthetic oligonucleotide
ugcuugcgaagcauugggg

SEQ ID NO: 222288 - RNA, 19 nt, Artificial Sequence
  Description of Artificial Sequence: Synthetic oligonucleotide
aaacacaggcucaaccgag

SEQ ID NO: 222289 - RNA, 19 nt, Artificial Sequence
  Description of Artificial Sequence: Synthetic oligonucleotide
agucugauaggauguguug

SEQ ID NO: 222290 - RNA, 19 nt, Artificial Sequence
  Description of Artificial Sequence: Synthetic oligonucleotide
acgauuaauuuacaugaaa

SEQ ID NO: 222291 - RNA, 19 nt, Artificial Sequence
  Description of Artificial Sequence: Synthetic oligonucleotide
uuguuuaccgcugcgcuug

SEQ ID NO: 222292 - RNA, 19 nt, Artificial Sequence
  Description of Artificial Sequence: Synthetic oligonucleotide
uuagcugccaagagggaau

SEQ ID NO: 222293 - RNA, 19 nt, Artificial Sequence
  Description of Artificial Sequence: Synthetic oligonucleotide
uuaccgcugcgcuugauac

SEQ ID NO: 222294 - RNA, 19 nt, Artificial Sequence
  Description of Artificial Sequence: Synthetic oligonucleotide
accuuaaaguacccacaac

SEQ ID NO: 222295 - RNA, 19 nt, Artificial Sequence
  Description of Artificial Sequence: Synthetic oligonucleotide
aaccacgauuaauuuacau

SEQ ID NO: 222296 - RNA, 19 nt, Artificial Sequence
  Description of Artificial Sequence: Synthetic oligonucleotide
cuuagauugccuaaaacau

SEQ ID NO: 222297 - RNA, 19 nt, Artificial Sequence
  Description of Artificial Sequence: Synthetic oligonucleotide
ugagccccgucuuuagagg

SEQ ID NO: 222298 - RNA, 19 nt, Artificial Sequence
  Description of Artificial Sequence: Synthetic oligonucleotide
gucguuucccuguuaacug

SEQ ID NO: 222299 - RNA, 19 nt, Artificial Sequence
  Description of Artificial Sequence: Synthetic oligonucleotide
ucuacuccccuaauauuaa

SEQ ID NO: 222300 - RNA, 19 nt, Artificial Sequence
  Description of Artificial Sequence: Synthetic oligonucleotide
agggagacggugaacggcc

SEQ ID NO: 222301 - RNA, 19 nt, Artificial Sequence
  Description of Artificial Sequence: Synthetic oligonucleotide
acaaagcuagccgucaucu

SEQ ID NO: 222302 - RNA, 19 nt, Artificial Sequence
  Description of Artificial Sequence: Synthetic oligonucleotide
aaauuccacuuccccauau

SEQ ID NO: 222303 - RNA, 19 nt, Artificial Sequence
  Description of Artificial Sequence: Synthetic oligonucleotide
ccacgauuaauuuacauga

SEQ ID NO: 222304 - RNA, 19 nt, Artificial Sequence
  Description of Artificial Sequence: Synthetic oligonucleotide
cuguagagaaaaguaguug

SEQ ID NO: 222305 - RNA, 19 nt, Artificial Sequence
  Description of Artificial Sequence: Synthetic oligonucleotide
accgcugcgcuugauacac

SEQ ID NO: 222306 - RNA, 19 nt, Artificial Sequence
  Description of Artificial Sequence: Synthetic oligonucleotide
cacgggguuuuguuuaccg

SEQ ID NO: 222307 - RNA, 19 nt, Artificial Sequence
  Description of Artificial Sequence: Synthetic oligonucleotide
cuuuagggaccacuuccgg

SEQ ID NO: 222308 - RNA, 19 nt, Artificial Sequence
  Description of Artificial Sequence: Synthetic oligonucleotide
uaauggaaugugaaccguu

SEQ ID NO: 222309 - RNA, 19 nt, Artificial Sequence
  Description of Artificial Sequence: Synthetic oligonucleotide
cacauuaccuuuugccaac

SEQ ID NO: 222310 - RNA, 19 nt, Artificial Sequence
  Description of Artificial Sequence: Synthetic oligonucleotide
gaucccgcgguguauccag

SEQ ID NO: 222311 - RNA, 19 nt, Artificial Sequence
  Description of Artificial Sequence: Synthetic oligonucleotide
uccuugcucgguuacagau

SEQ ID NO: 222312 - RNA, 19 nt, Artificial Sequence
  Description of Artificial Sequence: Synthetic oligonucleotide
ugaccuacgggcuccuaca

SEQ ID NO: 222313 - RNA, 19 nt, Artificial Sequence
  Description of Artificial Sequence: Synthetic oligonucleotide
auacacguggagcagugaa

SEQ ID NO: 222314 - RNA, 19 nt, Artificial Sequence
  Description of Artificial Sequence: Synthetic oligonucleotide
uuuaccgcugcgcuugaua

SEQ ID NO: 222315 - RNA, 19 nt, Artificial Sequence
  Description of Artificial Sequence: Synthetic oligonucleotide
caguuaaugcugcccauug

SEQ ID NO: 222316 - RNA, 19 nt, Artificial Sequence
  Description of Artificial Sequence: Synthetic oligonucleotide
ggaucaagaacuuuuccaa

SEQ ID NO: 222317 - RNA, 19 nt, Artificial Sequence
  Description of Artificial Sequence: Synthetic oligonucleotide
ccaaccuuaaaguacccac

SEQ ID NO: 222318 - RNA, 19 nt, Artificial Sequence
  Description of Artificial Sequence: Synthetic oligonucleotide
agacaacccuccaagauga

SEQ ID NO: 222319 - RNA, 19 nt, Artificial Sequence
  Description of Artificial Sequence: Synthetic oligonucleotide
gggaucaagaacuuuucca

SEQ ID NO: 222320 - RNA, 19 nt, Artificial Sequence
  Description of Artificial Sequence: Synthetic oligonucleotide
ugcgcuugauacacgugga

SEQ ID NO: 222321 - RNA, 19 nt, Artificial Sequence
  Description of Artificial Sequence: Synthetic oligonucleotide
aaagguccccgccacguuu

SEQ ID NO: 222322 - RNA, 19 nt, Artificial Sequence
  Description of Artificial Sequence: Synthetic oligonucleotide
auacacgggguuuuguuua

SEQ ID NO: 222323 - RNA, 19 nt, Artificial Sequence
  Description of Artificial Sequence: Synthetic oligonucleotide
caugcagacacgcgauccc

SEQ ID NO: 222324 - RNA, 19 nt, Artificial Sequence
  Description of Artificial Sequence: Synthetic oligonucleotide
auaauggaaugugaaccgu

SEQ ID NO: 222325 - RNA, 19 nt, Artificial Sequence
  Description of Artificial Sequence: Synthetic oligonucleotide
uaacucccuaaaguuaacu

SEQ ID NO: 222326 - RNA, 19 nt, Artificial Sequence
  Description of Artificial Sequence: Synthetic oligonucleotide
ggcuuccuaaguuagaaaa

SEQ ID NO: 222327 - RNA, 19 nt, Artificial Sequence
  Description of Artificial Sequence: Synthetic oligonucleotide
gcuugauacacguggagca

SEQ ID NO: 222328 - RNA, 19 nt, Artificial Sequence
  Description of Artificial Sequence: Synthetic oligonucleotide
cagaugucucucaacucug

SEQ ID NO: 222329 - RNA, 19 nt, Artificial Sequence
  Description of Artificial Sequence: Synthetic oligonucleotide
uuagcgugcugucuuugua

SEQ ID NO: 222330 - RNA, 19 nt, Artificial Sequence
  Description of Artificial Sequence: Synthetic oligonucleotide
uggguggcggcacacggac

SEQ ID NO: 222331 - RNA, 19 nt, Artificial Sequence
  Description of Artificial Sequence: Synthetic oligonucleotide
caaccuuaaaguacccaca

SEQ ID NO: 222332 - RNA, 19 nt, Artificial Sequence
  Description of Artificial Sequence: Synthetic oligonucleotide
uuuguuuaccgcugcgcuu

SEQ ID NO: 222333 - RNA, 19 nt, Artificial Sequence
  Description of Artificial Sequence: Synthetic oligonucleotide
acucgguagggugugagcu

SEQ ID NO: 222334 - RNA, 19 nt, Artificial Sequence
  Description of Artificial Sequence: Synthetic oligonucleotide
uaaauacacgggguuuugu

SEQ ID NO: 222335 - RNA, 19 nt, Artificial Sequence
  Description of Artificial Sequence: Synthetic oligonucleotide
gguuuuguuuaccgcugcg

SEQ ID NO: 222336 - RNA, 19 nt, Artificial Sequence
  Description of Artificial Sequence: Synthetic oligonucleotide
auuagcugccaagagggaa

SEQ ID NO: 222337 - RNA, 19 nt, Artificial Sequence
  Description of Artificial Sequence: Synthetic oligonucleotide
accuacgggcuccuacaac

SEQ ID NO: 222338 - RNA, 19 nt, Artificial Sequence
  Description of Artificial Sequence: Synthetic oligonucleotide
gacggugaacggccauucg

SEQ ID NO: 222339 - RNA, 19 nt, Artificial Sequence
  Description of Artificial Sequence: Synthetic oligonucleotide
gaaaacgccguagaccaaa

SEQ ID NO: 222340 - RNA, 19 nt, Artificial Sequence
  Description of Artificial Sequence: Synthetic oligonucleotide
uugcuuagacauggaagca

SEQ ID NO: 222341 - RNA, 19 nt, Artificial Sequence
  Description of Artificial Sequence: Synthetic oligonucleotide
uuagauaacucagcuccuu

SEQ ID NO: 222342 - RNA, 19 nt, Artificial Sequence
  Description of Artificial Sequence: Synthetic oligonucleotide
agacacgcgaucccgcggu

SEQ ID NO: 222343 - RNA, 19 nt, Artificial Sequence
  Description of Artificial Sequence: Synthetic oligonucleotide
uacucgguagggugugagc

SEQ ID NO: 222344 - RNA, 19 nt, Artificial Sequence
  Description of Artificial Sequence: Synthetic oligonucleotide
gacugagccccgucuuuag

SEQ ID NO: 222345 - RNA, 19 nt, Artificial Sequence
  Description of Artificial Sequence: Synthetic oligonucleotide
uccugacuggaaccaauua

SEQ ID NO: 222346 - RNA, 19 nt, Artificial Sequence
  Description of Artificial Sequence: Synthetic oligonucleotide
agacggugaacggccauuc

SEQ ID NO: 222347 - RNA, 19 nt, Artificial Sequence
  Description of Artificial Sequence: Synthetic oligonucleotide
ugcgaagcauuggggauca

SEQ ID NO: 222348 - RNA, 19 nt, Artificial Sequence
  Description of Artificial Sequence: Synthetic oligonucleotide
aaacgccguagaccaaaau

SEQ ID NO: 222349 - RNA, 19 nt, Artificial Sequence
  Description of Artificial Sequence: Synthetic oligonucleotide
aggaaauacucgguagggu

SEQ ID NO: 222350 - RNA, 19 nt, Artificial Sequence
  Description of Artificial Sequence: Synthetic oligonucleotide
aaccugucauaaaucguaa

SEQ ID NO: 222351 - RNA, 19 nt, Artificial Sequence
  Description of Artificial Sequence: Synthetic oligonucleotide
uacacgggguuuuguuuac

SEQ ID NO: 222352 - RNA, 19 nt, Artificial Sequence
  Description of Artificial Sequence: Synthetic oligonucleotide
uuguacgacucuucacuua

SEQ ID NO: 222353 - RNA, 19 nt, Artificial Sequence
  Description of Artificial Sequence: Synthetic oligonucleotide
acuaugccaaacauguaua

SEQ ID NO: 222354 - RNA, 19 nt, Artificial Sequence
  Description of Artificial Sequence: Synthetic oligonucleotide
acgccguagaccaaaauuu

SEQ ID NO: 222355 - RNA, 19 nt, Artificial Sequence
  Description of Artificial Sequence: Synthetic oligonucleotide
acccggucggcaguguccc

SEQ ID NO: 222356 - RNA, 19 nt, Artificial Sequence
  Description of Artificial Sequence: Synthetic oligonucleotide
aaaagguccccgccacguu

SEQ ID NO: 222357 - RNA, 19 nt, Artificial Sequence
  Description of Artificial Sequence: Synthetic oligonucleotide
gccagagagaucaugcggc

SEQ ID NO: 222358 - RNA, 19 nt, Artificial Sequence
  Description of Artificial Sequence: Synthetic oligonucleotide
auacucgguagggugugag

SEQ ID NO: 222359 - RNA, 19 nt, Artificial Sequence
  Description of Artificial Sequence: Synthetic oligonucleotide
agcccauuagcugccaaga

SEQ ID NO: 222360 - RNA, 19 nt, Artificial Sequence
  Description of Artificial Sequence: Synthetic oligonucleotide
uugcgaagcauuggggauc

SEQ ID NO: 222361 - RNA, 19 nt, Artificial Sequence
  Description of Artificial Sequence: Synthetic oligonucleotide
ugcaugcagacacgcgauc

SEQ ID NO: 222362 - RNA, 19 nt, Artificial Sequence
  Description of Artificial Sequence: Synthetic oligonucleotide
uccccgccacguuuggaag

SEQ ID NO: 222363 - RNA, 19 nt, Artificial Sequence
  Description of Artificial Sequence: Synthetic oligonucleotide
aauacucgguaggguguga

SEQ ID NO: 222364 - RNA, 19 nt, Artificial Sequence
  Description of Artificial Sequence: Synthetic oligonucleotide
cauguauaacucguguaaa

SEQ ID NO: 222365 - RNA, 19 nt, Artificial Sequence
  Description of Artificial Sequence: Synthetic oligonucleotide
aucaugcggccuuucccca

SEQ ID NO: 222366 - RNA, 19 nt, Artificial Sequence
  Description of Artificial Sequence: Synthetic oligonucleotide
caaagcuagccgucaucuc

SEQ ID NO: 222367 - RNA, 19 nt, Artificial Sequence
  Description of Artificial Sequence: Synthetic oligonucleotide
cacgauuaauuuacaugaa

SEQ ID NO: 222368 - RNA, 19 nt, Artificial Sequence
  Description of Artificial Sequence: Synthetic oligonucleotide
acugagccccgucuuuaga

SEQ ID NO: 222369 - RNA, 19 nt, Artificial Sequence
  Description of Artificial Sequence: Synthetic oligonucleotide
ucaagucguuucccuguua

SEQ ID NO: 222370 - RNA, 19 nt, Artificial Sequence
  Description of Artificial Sequence: Synthetic oligonucleotide
cagacacgcgaucccgcgg

SEQ ID NO: 222371 - RNA, 19 nt, Artificial Sequence
  Description of Artificial Sequence: Synthetic oligonucleotide
ugcaagagagcaggcuuuc

SEQ ID NO: 222372 - RNA, 19 nt, Artificial Sequence
  Description of Artificial Sequence: Synthetic oligonucleotide
gcagacacgcgaucccgcg

SEQ ID NO: 222373 - RNA, 19 nt, Artificial Sequence
  Description of Artificial Sequence: Synthetic oligonucleotide
aaaacgccguagaccaaaa

SEQ ID NO: 222374 - RNA, 19 nt, Artificial Sequence
  Description of Artificial Sequence: Synthetic oligonucleotide
acguuuggaaggagguaag

SEQ ID NO: 222375 - RNA, 19 nt, Artificial Sequence
  Description of Artificial Sequence: Synthetic oligonucleotide
uguuuaccgcugcgcuuga

SEQ ID NO: 222376 - RNA, 19 nt, Artificial Sequence
  Description of Artificial Sequence: Synthetic oligonucleotide
uaccgcugcgcuugauaca

SEQ ID NO: 222377 - RNA, 19 nt, Artificial Sequence
  Description of Artificial Sequence: Synthetic oligonucleotide
acccagucugauaggaugu

SEQ ID NO: 222378 - RNA, 19 nt, Artificial Sequence
  Description of Artificial Sequence: Synthetic oligonucleotide
cacuuccggagcuguggcc

SEQ ID NO: 222379 - RNA, 19 nt, Artificial Sequence
  Description of Artificial Sequence: Synthetic oligonucleotide
gucucaaaaccacgauuaa

SEQ ID NO: 222380 - RNA, 19 nt, Artificial Sequence
  Description of Artificial Sequence: Synthetic oligonucleotide
gcaugcagacacgcgaucc

SEQ ID NO: 222381 - RNA, 19 nt, Artificial Sequence
  Description of Artificial Sequence: Synthetic oligonucleotide
aaccaguauguaggcaguu

SEQ ID NO: 222382 - RNA, 19 nt, Artificial Sequence
  Description of Artificial Sequence: Synthetic oligonucleotide
guaugacugagccccgucu

SEQ ID NO: 222383 - RNA, 19 nt, Artificial Sequence
  Description of Artificial Sequence: Synthetic oligonucleotide
ccagagagaucaugcggcc

SEQ ID NO: 222384 - RNA, 19 nt, Artificial Sequence
  Description of Artificial Sequence: Synthetic oligonucleotide
ggcugguuaauuuuccccu

SEQ ID NO: 222385 - RNA, 19 nt, Artificial Sequence
  Description of Artificial Sequence: Synthetic oligonucleotide
gcauuauuagcgugcuguc

SEQ ID NO: 222386 - RNA, 19 nt, Artificial Sequence
  Description of Artificial Sequence: Synthetic oligonucleotide
ucgguagggugugagcuuu

SEQ ID NO: 222387 - RNA, 19 nt, Artificial Sequence
  Description of Artificial Sequence: Synthetic oligonucleotide
uacgggcuccuacaacauu

SEQ ID NO: 222388 - RNA, 19 nt, Artificial Sequence
  Description of Artificial Sequence: Synthetic oligonucleotide
ugguaugcuugcugugauu

SEQ ID NO: 222389 - RNA, 19 nt, Artificial Sequence
  Description of Artificial Sequence: Synthetic oligonucleotide
gauacacguggagcaguga

SEQ ID NO: 222390 - RNA, 19 nt, Artificial Sequence
  Description of Artificial Sequence: Synthetic oligonucleotide
ucaugcggccuuuccccaa

SEQ ID NO: 222391 - RNA, 19 nt, Artificial Sequence
  Description of Artificial Sequence: Synthetic oligonucleotide
ccguagaccaaaauuuuaa

SEQ ID NO: 222392 - RNA, 19 nt, Artificial Sequence
  Description of Artificial Sequence: Synthetic oligonucleotide
guacgacucuucacuuaag

SEQ ID NO: 222393 - RNA, 19 nt, Artificial Sequence
  Description of Artificial Sequence: Synthetic oligonucleotide
cauuagcugccaagaggga

SEQ ID NO: 222394 - RNA, 19 nt, Artificial Sequence
  Description of Artificial Sequence: Synthetic oligonucleotide
ucgucuccuuggguauccg

SEQ ID NO: 222395 - RNA, 19 nt, Artificial Sequence
  Description of Artificial Sequence: Synthetic oligonucleotide
guccccgccacguuuggaa

SEQ ID NO: 222396 - RNA, 19 nt, Artificial Sequence
  Description of Artificial Sequence: Synthetic oligonucleotide
ggcucuacuccccuaauau

SEQ ID NO: 222397 - RNA, 19 nt, Artificial Sequence
  Description of Artificial Sequence: Synthetic oligonucleotide
cuacuccccuaauauuaaa

SEQ ID NO: 222398 - RNA, 19 nt, Artificial Sequence
  Description of Artificial Sequence: Synthetic oligonucleotide
ugcggccuuuccccaaaua

SEQ ID NO: 222399 - RNA, 19 nt, Artificial Sequence
  Description of Artificial Sequence: Synthetic oligonucleotide
gggaauaaggacacaauuu

SEQ ID NO: 222400 - RNA, 19 nt, Artificial Sequence
  Description of Artificial Sequence: Synthetic oligonucleotide
agcgucaccagugcuccaa

SEQ ID NO: 222401 - RNA, 19 nt, Artificial Sequence
  Description of Artificial Sequence: Synthetic oligonucleotide
gcgcuugauacacguggag

SEQ ID NO: 222402 - RNA, 19 nt, Artificial Sequence
  Description of Artificial Sequence: Synthetic oligonucleotide
ggagggcugguuaauuuuc

SEQ ID NO: 222403 - RNA, 19 nt, Artificial Sequence
  Description of Artificial Sequence: Synthetic oligonucleotide
agguccccgccacguuugg

SEQ ID NO: 222404 - RNA, 19 nt, Artificial Sequence
  Description of Artificial Sequence: Synthetic oligonucleotide
caguuuuaacacuggcccu

SEQ ID NO: 222405 - RNA, 19 nt, Artificial Sequence
  Description of Artificial Sequence: Synthetic oligonucleotide
gacacgcgaucccgcggug

SEQ ID NO: 222406 - RNA, 19 nt, Artificial Sequence
  Description of Artificial Sequence: Synthetic oligonucleotide
gagggaauaaggacacaau

SEQ ID NO: 222407 - RNA, 19 nt, Artificial Sequence
  Description of Artificial Sequence: Synthetic oligonucleotide
ccaauccaaccuuaaagua

SEQ ID NO: 222408 - RNA, 19 nt, Artificial Sequence
  Description of Artificial Sequence: Synthetic oligonucleotide
uugcucgguuacagauuuc

SEQ ID NO: 222409 - RNA, 19 nt, Artificial Sequence
  Description of Artificial Sequence: Synthetic oligonucleotide
guaguuacauuagcguuuu

SEQ ID NO: 222410 - RNA, 19 nt, Artificial Sequence
  Description of Artificial Sequence: Synthetic oligonucleotide
cgucaucucaagucguuuc

SEQ ID NO: 222411 - RNA, 19 nt, Artificial Sequence
  Description of Artificial Sequence: Synthetic oligonucleotide
ggguauccgauguccacaa

SEQ ID NO: 222412 - RNA, 19 nt, Artificial Sequence
  Description of Artificial Sequence: Synthetic oligonucleotide
gacgagggagcugugggau

SEQ ID NO: 222413 - RNA, 19 nt, Artificial Sequence
  Description of Artificial Sequence: Synthetic oligonucleotide
ggccaccucaagaugaaaa

SEQ ID NO: 222414 - RNA, 19 nt, Artificial Sequence
  Description of Artificial Sequence: Synthetic oligonucleotide
gaacggccauucggggcag

SEQ ID NO: 222415 - RNA, 19 nt, Artificial Sequence
  Description of Artificial Sequence: Synthetic oligonucleotide
cggcccaacagcgauuugg

SEQ ID NO: 222416 - RNA, 19 nt, Artificial Sequence
  Description of Artificial Sequence: Synthetic oligonucleotide
uccccauauuggccaccuc

SEQ ID NO: 222417 - RNA, 19 nt, Artificial Sequence
  Description of Artificial Sequence: Synthetic oligonucleotide
agccgucaucucaagucgu

SEQ ID NO: 222418 - RNA, 19 nt, Artificial Sequence
  Description of Artificial Sequence: Synthetic oligonucleotide
cagaguaaauugggucaca

SEQ ID NO: 222419 - RNA, 19 nt, Artificial Sequence
  Description of Artificial Sequence: Synthetic oligonucleotide
cguuucccuguuaacugug

SEQ ID NO: 222420 - RNA, 19 nt, Artificial Sequence
  Description of Artificial Sequence: Synthetic oligonucleotide
cuuagacauggaagcaguu

SEQ ID NO: 222421 - RNA, 19 nt, Artificial Sequence
  Description of Artificial Sequence: Synthetic oligonucleotide
cccaaauacacggcccaac

SEQ ID NO: 222422 - RNA, 19 nt, Artificial Sequence
  Description of Artificial Sequence: Synthetic oligonucleotide
ccccuaauauuaaaacaua

SEQ ID NO: 222423 - RNA, 19 nt, Artificial Sequence
  Description of Artificial Sequence: Synthetic oligonucleotide
ccccgccacguuuggaagg

SEQ ID NO: 222424 - RNA, 19 nt, Artificial Sequence
  Description of Artificial Sequence: Synthetic oligonucleotide
aucccgcgguguauccagg

SEQ ID NO: 222425 - RNA, 19 nt, Artificial Sequence
  Description of Artificial Sequence: Synthetic oligonucleotide
ggcccaacagcgauuugga

SEQ ID NO: 222426 - RNA, 19 nt, Artificial Sequence
  Description of Artificial Sequence: Synthetic oligonucleotide
acacgcgaucccgcggugu

SEQ ID NO: 222427 - RNA, 19 nt, Artificial Sequence
  Description of Artificial Sequence: Synthetic oligonucleotide
gccccgucuuuagaggaag

SEQ ID NO: 222428 - RNA, 19 nt, Artificial Sequence
  Description of Artificial Sequence: Synthetic oligonucleotide
caugcggccuuuccccaaa

SEQ ID NO: 222429 - RNA, 19 nt, Artificial Sequence
  Description of Artificial Sequence: Synthetic oligonucleotide
caugcauguuaggcaagua

SEQ ID NO: 222430 - RNA, 19 nt, Artificial Sequence
  Description of Artificial Sequence: Synthetic oligonucleotide
cgcgguguauccaggggac

SEQ ID NO: 222431 - RNA, 19 nt, Artificial Sequence
  Description of Artificial Sequence: Synthetic oligonucleotide
gcgaucccgcgguguaucc

SEQ ID NO: 222432 - RNA, 19 nt, Artificial Sequence
  Description of Artificial Sequence: Synthetic oligonucleotide
acggcccaacagcgauuug

SEQ ID NO: 222433 - RNA, 19 nt, Artificial Sequence
  Description of Artificial Sequence: Synthetic oligonucleotide
gccguagaccaaaauuuua

SEQ ID NO: 222434 - RNA, 19 nt, Artificial Sequence
  Description of Artificial Sequence: Synthetic oligonucleotide
gagacggugaacggccauu

SEQ ID NO: 222435 - RNA, 19 nt, Artificial Sequence
  Description of Artificial Sequence: Synthetic oligonucleotide
gcugcgcuugauacacgug

SEQ ID NO: 222436 - RNA, 19 nt, Artificial Sequence
  Description of Artificial Sequence: Synthetic oligonucleotide
gcugugauugguccacaau

SEQ ID NO: 222437 - RNA, 19 nt, Artificial Sequence
  Description of Artificial Sequence: Synthetic oligonucleotide
cacgcgaucccgcggugua

SEQ ID NO: 222438 - RNA, 19 nt, Artificial Sequence
  Description of Artificial Sequence: Synthetic oligonucleotide
guuggagggcugguuaauu

SEQ ID NO: 222439 - RNA, 19 nt, Artificial Sequence
  Description of Artificial Sequence: Synthetic oligonucleotide
ccgcgguguauccagggga

SEQ ID NO: 222440 - RNA, 19 nt, Artificial Sequence
  Description of Artificial Sequence: Synthetic oligonucleotide
cccagucugauaggaugug

SEQ ID NO: 222441 - RNA, 19 nt, Artificial Sequence
  Description of Artificial Sequence: Synthetic oligonucleotide
cgggguuuuguuuaccgcu

SEQ ID NO: 222442 - RNA, 19 nt, Artificial Sequence
  Description of Artificial Sequence: Synthetic oligonucleotide
cagagagaucaugcggccu

SEQ ID NO: 222443 - RNA, 19 nt, Artificial Sequence
  Description of Artificial Sequence: Synthetic oligonucleotide
cucgguagggugugagcuu

SEQ ID NO: 222444 - RNA, 19 nt, Artificial Sequence
  Description of Artificial Sequence: Synthetic oligonucleotide
acgcgaucccgcgguguau

SEQ ID NO: 222445 - RNA, 19 nt, Artificial Sequence
  Description of Artificial Sequence: Synthetic oligonucleotide
ccggucggcagugucccug

SEQ ID NO: 222446 - RNA, 19 nt, Artificial Sequence
  Description of Artificial Sequence: Synthetic oligonucleotide
ccgcugcgcuugauacacg

SEQ ID NO: 222447 - RNA, 19 nt, Artificial Sequence
  Description of Artificial Sequence: Synthetic oligonucleotide
cacggcccaacagcgauuu

SEQ ID NO: 222448 - RNA, 19 nt, Artificial Sequence
  Description of Artificial Sequence: Synthetic oligonucleotide
gggagacggugaacggcca

SEQ ID NO: 222449 - RNA, 19 nt, Artificial Sequence
  Description of Artificial Sequence: Synthetic oligonucleotide
ggagacggugaacggccau

SEQ ID NO: 222450 - RNA, 19 nt, Artificial Sequence
  Description of Artificial Sequence: Synthetic oligonucleotide
cagcgucaccagugcucca

SEQ ID NO: 222451 - RNA, 19 nt, Artificial Sequence
  Description of Artificial Sequence: Synthetic oligonucleotide
gcggcacacggacccgguc

SEQ ID NO: 222452 - RNA, 19 nt, Artificial Sequence
  Description of Artificial Sequence: Synthetic oligonucleotide
ccgucuuuagaggaaggau

SEQ ID NO: 222453 - RNA, 19 nt, Artificial Sequence
  Description of Artificial Sequence: Synthetic oligonucleotide
gguuggagggcugguuaau

SEQ ID NO: 222454 - RNA, 19 nt, Artificial Sequence
  Description of Artificial Sequence: Synthetic oligonucleotide
gguauccgauguccacaau

SEQ ID NO: 222455 - RNA, 19 nt, Artificial Sequence
  Description of Artificial Sequence: Synthetic oligonucleotide
cgcgaucccgcgguguauc

SEQ ID NO: 222456 - RNA, 19 nt, Artificial Sequence
  Description of Artificial Sequence: Synthetic oligonucleotide
gguccccgccacguuugga

SEQ ID NO: 222457 - RNA, 19 nt, Artificial Sequence
  Description of Artificial Sequence: Synthetic oligonucleotide
guuuaccgcugcgcuugau

SEQ ID NO: 222458 - RNA, 19 nt, Artificial Sequence
  Description of Artificial Sequence: Synthetic oligonucleotide
cgcugcgcuugauacacgu

SEQ ID NO: 222459 - RNA, 19 nt, Artificial Sequence
  Description of Artificial Sequence: Synthetic oligonucleotide
ggguaugacugagccccgu

SEQ ID NO: 222460 - RNA, 19 nt, Artificial Sequence
  Description of Artificial Sequence: Synthetic oligonucleotide
gccgucaucucaagucguu

SEQ ID NO: 222461 - RNA, 19 nt, Artificial Sequence
  Description of Artificial Sequence: Synthetic oligonucleotide
gcgucaccagugcuccaau

SEQ ID NO: 222462 - RNA, 19 nt, Artificial Sequence
  Description of Artificial Sequence: Synthetic oligonucleotide
cgaucccgcgguguaucca

SEQ ID NO: 222463 - RNA, 19 nt, Artificial Sequence
  Description of Artificial Sequence: Synthetic oligonucleotide
ggcggcacacggacccggu

SEQ ID NO: 222464 - RNA, 19 nt, Artificial Sequence
  Description of Artificial Sequence: Synthetic oligonucleotide
ccgucaucucaagucguuu

SEQ ID NO: 222465 - RNA, 19 nt, Artificial Sequence
  Description of Artificial Sequence: Synthetic oligonucleotide
cgggcuccuacaacauuuu

SEQ ID NO: 222466 - RNA, 19 nt, Artificial Sequence
  Description of Artificial Sequence: Synthetic oligonucleotide
cccggucggcagugucccu

SEQ ID NO: 222467 - RNA, 19 nt, Artificial Sequence
  Description of Artificial Sequence: Synthetic oligonucleotide
aauaauaccauucuggugg

SEQ ID NO: 222468 - RNA, 19 nt, Artificial Sequence
  Description of Artificial Sequence: Synthetic oligonucleotide
auaucaaacugauaggccc

SEQ ID NO: 222469 - RNA, 19 nt, Artificial Sequence
  Description of Artificial Sequence: Synthetic oligonucleotide
aacguagcucccuucaucc

SEQ ID NO: 222470 - RNA, 19 nt, Artificial Sequence
  Description of Artificial Sequence: Synthetic oligonucleotide
guaauaacaacuucguucc

SEQ ID NO: 222471 - RNA, 19 nt, Artificial Sequence
  Description of Artificial Sequence: Synthetic oligonucleotide
aguacaacagaccaauagg

SEQ ID NO: 222472 - RNA, 19 nt, Artificial Sequence
  Description of Artificial Sequence: Synthetic oligonucleotide
uagugaauaaccaaauccc

SEQ ID NO: 222473 - RNA, 19 nt, Artificial Sequence
  Description of Artificial Sequence: Synthetic oligonucleotide
cauugaauuauaauggcag

SEQ ID NO: 222474 - RNA, 19 nt, Artificial Sequence
  Description of Artificial Sequence: Synthetic oligonucleotide
aaagcaaguuaguacaucu

SEQ ID NO: 222475 - RNA, 19 nt, Artificial Sequence
  Description of Artificial Sequence: Synthetic oligonucleotide
ugcccuaauaauaaguugc

SEQ ID NO: 222476 - RNA, 19 nt, Artificial Sequence
  Description of Artificial Sequence: Synthetic oligonucleotide
uucacauauaguacaacag

SEQ ID NO: 222477 - RNA, 19 nt, Artificial Sequence
  Description of Artificial Sequence: Synthetic oligonucleotide
ugcaguugaagcuuguagg

SEQ ID NO: 222478 - RNA, 19 nt, Artificial Sequence
  Description of Artificial Sequence: Synthetic oligonucleotide
uuaaaauauggucugacuu

SEQ ID NO: 222479 - RNA, 19 nt, Artificial Sequence
  Description of Artificial Sequence: Synthetic oligonucleotide
uuuguaccgguaauggugg

SEQ ID NO: 222480 - RNA, 19 nt, Artificial Sequence
  Description of Artificial Sequence: Synthetic oligonucleotide
uguuaacucauccaaguga

SEQ ID NO: 222481 - RNA, 19 nt, Artificial Sequence
  Description of Artificial Sequence: Synthetic oligonucleotide
uguuacagcauaauugcug

SEQ ID NO: 222482 - RNA, 19 nt, Artificial Sequence
  Description of Artificial Sequence: Synthetic oligonucleotide
uaguacaacagaccaauag

SEQ ID NO: 222483 - RNA, 19 nt, Artificial Sequence
  Description of Artificial Sequence: Synthetic oligonucleotide
aaaaguagcccgaguaugc

SEQ ID NO: 222484 - RNA, 19 nt, Artificial Sequence
  Description of Artificial Sequence: Synthetic oligonucleotide
guuauauucugacuuaaug

SEQ ID NO: 222485 - RNA, 19 nt, Artificial Sequence
  Description of Artificial Sequence: Synthetic oligonucleotide
caugaaugcuguuagaaug

SEQ ID NO: 222486 - RNA, 19 nt, Artificial Sequence
  Description of Artificial Sequence: Synthetic oligonucleotide
auugaauuauaauggcagg

SEQ ID NO: 222487 - RNA, 19 nt, Artificial Sequence
  Description of Artificial Sequence: Synthetic oligonucleotide
acaacuggaguauggagac

SEQ ID NO: 222488 - RNA, 19 nt, Artificial Sequence
  Description of Artificial Sequence: Synthetic oligonucleotide
uauaauggcagguaaaguu

SEQ ID NO: 222489 - RNA, 19 nt, Artificial Sequence
  Description of Artificial Sequence: Synthetic oligonucleotide
ugaauaauaccauucuggu

SEQ ID NO: 222490 - RNA, 19 nt, Artificial Sequence
  Description of Artificial Sequence: Synthetic oligonucleotide
cacugcuucgccaagauag

SEQ ID NO: 222491 - RNA, 19 nt, Artificial Sequence
  Description of Artificial Sequence: Synthetic oligonucleotide
acagaucucacuaaacacc

SEQ ID NO: 222492 - RNA, 19 nt, Artificial Sequence
  Description of Artificial Sequence: Synthetic oligonucleotide
gauacacuaaugcuugugc

SEQ ID NO: 222493 - RNA, 19 nt, Artificial Sequence
  Description of Artificial Sequence: Synthetic oligonucleotide
uggguaguggcauauggcg

SEQ ID NO: 222494 - RNA, 19 nt, Artificial Sequence
  Description of Artificial Sequence: Synthetic oligonucleotide
uuauauacuccugacaaga

SEQ ID NO: 222495 - RNA, 19 nt, Artificial Sequence
  Description of Artificial Sequence: Synthetic oligonucleotide
cuauaucaaacugauaggc

SEQ ID NO: 222496 - RNA, 19 nt, Artificial Sequence
  Description of Artificial Sequence: Synthetic oligonucleotide
ucauuaguccuccaucucc

SEQ ID NO: 222497 - RNA, 19 nt, Artificial Sequence
  Description of Artificial Sequence: Synthetic oligonucleotide
ugugcuuaucaccaaauaa

SEQ ID NO: 222498 - RNA, 19 nt, Artificial Sequence
  Description of Artificial Sequence: Synthetic oligonucleotide
uauggucugacuuuaauuu

SEQ ID NO: 222499 - RNA, 19 nt, Artificial Sequence
  Description of Artificial Sequence: Synthetic oligonucleotide
uccucaguaguacggaccg

SEQ ID NO: 222500 - RNA, 19 nt, Artificial Sequence
  Description of Artificial Sequence: Synthetic oligonucleotide
uauaucccugaauaaacug

SEQ ID NO: 222501 - RNA, 19 nt, Artificial Sequence
  Description of Artificial Sequence: Synthetic oligonucleotide
uguacuagcugccaccucu

SEQ ID NO: 222502 - RNA, 19 nt, Artificial Sequence
  Description of Artificial Sequence: Synthetic oligonucleotide
acauauaguacaacagacc

SEQ ID NO: 222503 - RNA, 19 nt, Artificial Sequence
  Description of Artificial Sequence: Synthetic oligonucleotide
aaguagcccgaguaugccc

SEQ ID NO: 222504 - RNA, 19 nt, Artificial Sequence
  Description of Artificial Sequence: Synthetic oligonucleotide
auacagaucucacuaaaca

SEQ ID NO: 222505 - RNA, 19 nt, Artificial Sequence
  Description of Artificial Sequence: Synthetic oligonucleotide
auaacaacuucguuccguc

SEQ ID NO: 222506 - RNA, 19 nt, Artificial Sequence
  Description of Artificial Sequence: Synthetic oligonucleotide
uguguuauuuggcuggaac

SEQ ID NO: 222507 - RNA, 19 nt, Artificial Sequence
  Description of Artificial Sequence: Synthetic oligonucleotide
ugcauagcaaugcacaaaa

SEQ ID NO: 222508 - RNA, 19 nt, Artificial Sequence
  Description of Artificial Sequence: Synthetic oligonucleotide
cucauugaauuauaauggc

SEQ ID NO: 222509 - RNA, 19 nt, Artificial Sequence
  Description of Artificial Sequence: Synthetic oligonucleotide
uguccaaaggagauagcag

SEQ ID NO: 222510 - RNA, 19 nt, Artificial Sequence
  Description of Artificial Sequence: Synthetic oligonucleotide
aaaguagcccgaguaugcc

SEQ ID NO: 222511 - RNA, 19 nt, Artificial Sequence
  Description of Artificial Sequence: Synthetic oligonucleotide
uaggcgucagaacaacugg

SEQ ID NO: 222512 - RNA, 19 nt, Artificial Sequence
  Description of Artificial Sequence: Synthetic oligonucleotide
gaauaauaccauucuggug

SEQ ID NO: 222513 - RNA, 19 nt, Artificial Sequence
  Description of Artificial Sequence: Synthetic oligonucleotide
ucaguuaugcuguuauugu

SEQ ID NO: 222514 - RNA, 19 nt, Artificial Sequence
  Description of Artificial Sequence: Synthetic oligonucleotide
gaucagguagugaauaacc

SEQ ID NO: 222515 - RNA, 19 nt, Artificial Sequence
  Description of Artificial Sequence: Synthetic oligonucleotide
aauaacaacuucguuccgu

SEQ ID NO: 222516 - RNA, 19 nt, Artificial Sequence
  Description of Artificial Sequence: Synthetic oligonucleotide
aauauggucugacuuuaau

SEQ ID NO: 222517 - RNA, 19 nt, Artificial Sequence
  Description of Artificial Sequence: Synthetic oligonucleotide
uuuguucugaucagguagu

SEQ ID NO: 222518 - RNA, 19 nt, Artificial Sequence
  Description of Artificial Sequence: Synthetic oligonucleotide
agaaagaguccucuucauc

SEQ ID NO: 222519 - RNA, 19 nt, Artificial Sequence
  Description of Artificial Sequence: Synthetic oligonucleotide
gaauaaccaaaucccauca

SEQ ID NO: 222520 - RNA, 19 nt, Artificial Sequence
  Description of Artificial Sequence: Synthetic oligonucleotide
auaucccugaauaaacugg

SEQ ID NO: 222521 - RNA, 19 nt, Artificial Sequence
  Description of Artificial Sequence: Synthetic oligonucleotide
agagugaacuugcauagca

SEQ ID NO: 222522 - RNA, 19 nt, Artificial Sequence
  Description of Artificial Sequence: Synthetic oligonucleotide
guuuguaccgguaauggug

SEQ ID NO: 222523 - RNA, 19 nt, Artificial Sequence
  Description of Artificial Sequence: Synthetic oligonucleotide
ugcuagaauuucuagaguu

SEQ ID NO: 222524 - RNA, 19 nt, Artificial Sequence
  Description of Artificial Sequence: Synthetic oligonucleotide
agcuauaaaugcaagguug

SEQ ID NO: 222525 - RNA, 19 nt, Artificial Sequence
  Description of Artificial Sequence: Synthetic oligonucleotide
aacuauuauuggcuguggu

SEQ ID NO: 222526 - RNA, 19 nt, Artificial Sequence
  Description of Artificial Sequence: Synthetic oligonucleotide
uugaauuauaauggcaggu

SEQ ID NO: 222527 - RNA, 19 nt, Artificial Sequence
  Description of Artificial Sequence: Synthetic oligonucleotide
cuuauauacuccugacaag

SEQ ID NO: 222528 - RNA, 19 nt, Artificial Sequence
  Description of Artificial Sequence: Synthetic oligonucleotide
aagucaaugcuacuauaaa

SEQ ID NO: 222529 - RNA, 19 nt, Artificial Sequence
  Description of Artificial Sequence: Synthetic oligonucleotide
uaauggcagguaaaguuga

SEQ ID NO: 222530 - RNA, 19 nt, Artificial Sequence
  Description of Artificial Sequence: Synthetic oligonucleotide
ugcuguccaaaggagauag

SEQ ID NO: 222531 - RNA, 19 nt, Artificial Sequence
  Description of Artificial Sequence: Synthetic oligonucleotide
uguucggcagcauaguguc

SEQ ID NO: 222532 - RNA, 19 nt, Artificial Sequence
  Description of Artificial Sequence: Synthetic oligonucleotide
auaauggcagguaaaguug

SEQ ID NO: 222533 - RNA, 19 nt, Artificial Sequence
  Description of Artificial Sequence: Synthetic oligonucleotide
ggaacagacaguaauauga

SEQ ID NO: 222534 - RNA, 19 nt, Artificial Sequence
  Description of Artificial Sequence: Synthetic oligonucleotide
uucacuaggacagcacucc

SEQ ID NO: 222535 - RNA, 19 nt, Artificial Sequence
  Description of Artificial Sequence: Synthetic oligonucleotide
uuucuagaguucauuuacu

SEQ ID NO: 222536 - RNA, 19 nt, Artificial Sequence
  Description of Artificial Sequence: Synthetic oligonucleotide
aagauauggaaucgcguuu

SEQ ID NO: 222537 - RNA, 19 nt, Artificial Sequence
  Description of Artificial Sequence: Synthetic oligonucleotide
uauggaaucgcguuucauu

SEQ ID NO: 222538 - RNA, 19 nt, Artificial Sequence
  Description of Artificial Sequence: Synthetic oligonucleotide
cagaacaacuggaguaugg

SEQ ID NO: 222539 - RNA, 19 nt, Artificial Sequence
  Description of Artificial Sequence: Synthetic oligonucleotide
aucucacaggauucguuac

SEQ ID NO: 222540 - RNA, 19 nt, Artificial Sequence
  Description of Artificial Sequence: Synthetic oligonucleotide
uaauaacaacuucguuccg

SEQ ID NO: 222541 - RNA, 19 nt, Artificial Sequence
  Description of Artificial Sequence: Synthetic oligonucleotide
uuccucaguaguacggacc

SEQ ID NO: 222542 - RNA, 19 nt, Artificial Sequence
  Description of Artificial Sequence: Synthetic oligonucleotide
uacaucacucuauaucccu

SEQ ID NO: 222543 - RNA, 19 nt, Artificial Sequence
  Description of Artificial Sequence: Synthetic oligonucleotide
auacacuaaugcuugugcu

SEQ ID NO: 222544 - RNA, 19 nt, Artificial Sequence
  Description of Artificial Sequence: Synthetic oligonucleotide
ccuugcaacacaaacguag

SEQ ID NO: 222545 - RNA, 19 nt, Artificial Sequence
  Description of Artificial Sequence: Synthetic oligonucleotide
aguauguuuguaccgguaa

SEQ ID NO: 222546 - RNA, 19 nt, Artificial Sequence
  Description of Artificial Sequence: Synthetic oligonucleotide
uuguucggcagcauagugu

SEQ ID NO: 222547 - RNA, 19 nt, Artificial Sequence
  Description of Artificial Sequence: Synthetic oligonucleotide
guucugaucagguagugaa

SEQ ID NO: 222548 - RNA, 19 nt, Artificial Sequence
  Description of Artificial Sequence: Synthetic oligonucleotide
ucugacgauacaucacucu

SEQ ID NO: 222549 - RNA, 19 nt, Artificial Sequence
  Description of Artificial Sequence: Synthetic oligonucleotide
aaucgcguuucauuuccca

SEQ ID NO: 222550 - RNA, 19 nt, Artificial Sequence
  Description of Artificial Sequence: Synthetic oligonucleotide
acuauugcuauuguuuacu

SEQ ID NO: 222551 - RNA, 19 nt, Artificial Sequence
  Description of Artificial Sequence: Synthetic oligonucleotide
acuauuauuggcugugguu

SEQ ID NO: 222552 - RNA, 19 nt, Artificial Sequence
  Description of Artificial Sequence: Synthetic oligonucleotide
auauggucugacuuuaauu

SEQ ID NO: 222553 - RNA, 19 nt, Artificial Sequence
  Description of Artificial Sequence: Synthetic oligonucleotide
agggaagauauggaaucgc

SEQ ID NO: 222554 - RNA, 19 nt, Artificial Sequence
  Description of Artificial Sequence: Synthetic oligonucleotide
gcuacuauaaauggcuccg

SEQ ID NO: 222555 - RNA, 19 nt, Artificial Sequence
  Description of Artificial Sequence: Synthetic oligonucleotide
acacauaaccuaagggugg

SEQ ID NO: 222556 - RNA, 19 nt, Artificial Sequence
  Description of Artificial Sequence: Synthetic oligonucleotide
acuugcauagcaaugcaca

SEQ ID NO: 222557 - RNA, 19 nt, Artificial Sequence
  Description of Artificial Sequence: Synthetic oligonucleotide
auaaccuaagggugggacu

SEQ ID NO: 222558 - RNA, 19 nt, Artificial Sequence
  Description of Artificial Sequence: Synthetic oligonucleotide
cacaggauucguuacacca

SEQ ID NO: 222559 - RNA, 19 nt, Artificial Sequence
  Description of Artificial Sequence: Synthetic oligonucleotide
augcccuaauaauaaguug

SEQ ID NO: 222560 - RNA, 19 nt, Artificial Sequence
  Description of Artificial Sequence: Synthetic oligonucleotide
auauacuccugacaagaaa

SEQ ID NO: 222561 - RNA, 19 nt, Artificial Sequence
  Description of Artificial Sequence: Synthetic oligonucleotide
uucggcagcauaguguccc

SEQ ID NO: 222562 - RNA, 19 nt, Artificial Sequence
  Description of Artificial Sequence: Synthetic oligonucleotide
auggaaucgcguuucauuu

SEQ ID NO: 222563 - RNA, 19 nt, Artificial Sequence
  Description of Artificial Sequence: Synthetic oligonucleotide
ugcuauuguuuacuggcaa

SEQ ID NO: 222564 - RNA, 19 nt, Artificial Sequence
  Description of Artificial Sequence: Synthetic oligonucleotide
uguuuguaccgguaauggu

SEQ ID NO: 222565 - RNA, 19 nt, Artificial Sequence
  Description of Artificial Sequence: Synthetic oligonucleotide
auuugcucaguuaugcugu

SEQ ID NO: 222566 - RNA, 19 nt, Artificial Sequence
  Description of Artificial Sequence: Synthetic oligonucleotide
cacucuauaucccugaaua

SEQ ID NO: 222567 - RNA, 19 nt, Artificial Sequence
  Description of Artificial Sequence: Synthetic oligonucleotide
aucgcguuucauuucccag

SEQ ID NO: 222568 - RNA, 19 nt, Artificial Sequence
  Description of Artificial Sequence: Synthetic oligonucleotide
uauuguuuacuggcaaacu

SEQ ID NO: 222569 - RNA, 19 nt, Artificial Sequence
  Description of Artificial Sequence: Synthetic oligonucleotide
caggguauaauugggauca

SEQ ID NO: 222570 - RNA, 19 nt, Artificial Sequence
  Description of Artificial Sequence: Synthetic oligonucleotide
caaccuaacuuacaguaca

SEQ ID NO: 222571 - RNA, 19 nt, Artificial Sequence
  Description of Artificial Sequence: Synthetic oligonucleotide
guacaacagaccaauagga

SEQ ID NO: 222572 - RNA, 19 nt, Artificial Sequence
  Description of Artificial Sequence: Synthetic oligonucleotide
cuaccagaauacuucaaca

SEQ ID NO: 222573 - RNA, 19 nt, Artificial Sequence
  Description of Artificial Sequence: Synthetic oligonucleotide
aauuggcucaauaucugau

SEQ ID NO: 222574 - RNA, 19 nt, Artificial Sequence
  Description of Artificial Sequence: Synthetic oligonucleotide
accgugacagacuggggag

SEQ ID NO: 222575 - RNA, 19 nt, Artificial Sequence
  Description of Artificial Sequence: Synthetic oligonucleotide
ugauaggcccuuguuaacu

SEQ ID NO: 222576 - RNA, 19 nt, Artificial Sequence
  Description of Artificial Sequence: Synthetic oligonucleotide
gcuguuauuguuuucagua

SEQ ID NO: 222577 - RNA, 19 nt, Artificial Sequence
  Description of Artificial Sequence: Synthetic oligonucleotide
ugggccacuauugcuauug

SEQ ID NO: 222578 - RNA, 19 nt, Artificial Sequence
  Description of Artificial Sequence: Synthetic oligonucleotide
gaagauauggaaucgcguu

SEQ ID NO: 222579 - RNA, 19 nt, Artificial Sequence
  Description of Artificial Sequence: Synthetic oligonucleotide
ucucacuaaacaccuugau

SEQ ID NO: 222580 - RNA, 19 nt, Artificial Sequence
  Description of Artificial Sequence: Synthetic oligonucleotide
uugcaacacaaacguagcu

SEQ ID NO: 222581 - RNA, 19 nt, Artificial Sequence
  Description of Artificial Sequence: Synthetic oligonucleotide
uuuagaagaccuggacggc

SEQ ID NO: 222582 - RNA, 19 nt, Artificial Sequence
  Description of Artificial Sequence: Synthetic oligonucleotide
auaaacugggguugacggu

SEQ ID NO: 222583 - RNA, 19 nt, Artificial Sequence
  Description of Artificial Sequence: Synthetic oligonucleotide
ggaaucgcguuucauuucc

SEQ ID NO: 222584 - RNA, 19 nt, Artificial Sequence
  Description of Artificial Sequence: Synthetic oligonucleotide
uuacagcauaauugcugag

SEQ ID NO: 222585 - RNA, 19 nt, Artificial Sequence
  Description of Artificial Sequence: Synthetic oligonucleotide
cauaaccuaagggugggac

SEQ ID NO: 222586 - RNA, 19 nt, Artificial Sequence
  Description of Artificial Sequence: Synthetic oligonucleotide
auucacuaggacagcacuc

SEQ ID NO: 222587 - RNA, 19 nt, Artificial Sequence
  Description of Artificial Sequence: Synthetic oligonucleotide
ugcuguuauuguuuucagu

SEQ ID NO: 222588 - RNA, 19 nt, Artificial Sequence
  Description of Artificial Sequence: Synthetic oligonucleotide
uaacaacuucguuccgucc

SEQ ID NO: 222589 - RNA, 19 nt, Artificial Sequence
  Description of Artificial Sequence: Synthetic oligonucleotide
caccacagcccauuaauuc

SEQ ID NO: 222590 - RNA, 19 nt, Artificial Sequence
  Description of Artificial Sequence: Synthetic oligonucleotide
guaggcgucagaacaacug

SEQ ID NO: 222591 - RNA, 19 nt, Artificial Sequence
  Description of Artificial Sequence: Synthetic oligonucleotide
ccuggugcaaguauguuug

SEQ ID NO: 222592 - RNA, 19 nt, Artificial Sequence
  Description of Artificial Sequence: Synthetic oligonucleotide
cuuguuaacucauccaagu

SEQ ID NO: 222593 - RNA, 19 nt, Artificial Sequence
  Description of Artificial Sequence: Synthetic oligonucleotide
cagguagugaauaaccaaa

SEQ ID NO: 222594 - RNA, 19 nt, Artificial Sequence
  Description of Artificial Sequence: Synthetic oligonucleotide
gauucacuaggacagcacu

SEQ ID NO: 222595 - RNA, 19 nt, Artificial Sequence
  Description of Artificial Sequence: Synthetic oligonucleotide
guuguucggcagcauagug

SEQ ID NO: 222596 - RNA, 19 nt, Artificial Sequence
  Description of Artificial Sequence: Synthetic oligonucleotide
gauaggcccuuguuaacuc

SEQ ID NO: 222597 - RNA, 19 nt, Artificial Sequence
  Description of Artificial Sequence: Synthetic oligonucleotide
gaacauuagcccaaguugu

SEQ ID NO: 222598 - RNA, 19 nt, Artificial Sequence
  Description of Artificial Sequence: Synthetic oligonucleotide
uguaggcgucagaacaacu

SEQ ID NO: 222599 - RNA, 19 nt, Artificial Sequence
  Description of Artificial Sequence: Synthetic oligonucleotide
gcuucgccaagauaguucc

SEQ ID NO: 222600 - RNA, 19 nt, Artificial Sequence
  Description of Artificial Sequence: Synthetic oligonucleotide
uugugcuuaucaccaaaua

SEQ ID NO: 222601 - RNA, 19 nt, Artificial Sequence
  Description of Artificial Sequence: Synthetic oligonucleotide
gguaguggcauauggcgug

SEQ ID NO: 222602 - RNA, 19 nt, Artificial Sequence
  Description of Artificial Sequence: Synthetic oligonucleotide
ggacacauaaccuaagggu

SEQ ID NO: 222603 - RNA, 19 nt, Artificial Sequence
  Description of Artificial Sequence: Synthetic oligonucleotide
cacauaaccuaaggguggg

SEQ ID NO: 222604 - RNA, 19 nt, Artificial Sequence
  Description of Artificial Sequence: Synthetic oligonucleotide
uccggacacauaaccuaag

SEQ ID NO: 222605 - RNA, 19 nt, Artificial Sequence
  Description of Artificial Sequence: Synthetic oligonucleotide
gacgauacaucacucuaua

SEQ ID NO: 222606 - RNA, 19 nt, Artificial Sequence
  Description of Artificial Sequence: Synthetic oligonucleotide
gggaagauauggaaucgcg

SEQ ID NO: 222607 - RNA, 19 nt, Artificial Sequence
  Description of Artificial Sequence: Synthetic oligonucleotide
uuaguacaucuuugcuacc

SEQ ID NO: 222608 - RNA, 19 nt, Artificial Sequence
  Description of Artificial Sequence: Synthetic oligonucleotide
uguaccgguaauggugggc

SEQ ID NO: 222609 - RNA, 19 nt, Artificial Sequence
  Description of Artificial Sequence: Synthetic oligonucleotide
aaacucguggcuggaccag

SEQ ID NO: 222610 - RNA, 19 nt, Artificial Sequence
  Description of Artificial Sequence: Synthetic oligonucleotide
uucugaucagguagugaau

SEQ ID NO: 222611 - RNA, 19 nt, Artificial Sequence
  Description of Artificial Sequence: Synthetic oligonucleotide
uccgacucacugcuucgcc

SEQ ID NO: 222612 - RNA, 19 nt, Artificial Sequence
  Description of Artificial Sequence: Synthetic oligonucleotide
ucgccaagauaguuccuug

SEQ ID NO: 222613 - RNA, 19 nt, Artificial Sequence
  Description of Artificial Sequence: Synthetic oligonucleotide
cauugcucauuaguccucc

SEQ ID NO: 222614 - RNA, 19 nt, Artificial Sequence
  Description of Artificial Sequence: Synthetic oligonucleotide
aacucguggcuggaccagg

SEQ ID NO: 222615 - RNA, 19 nt, Artificial Sequence
  Description of Artificial Sequence: Synthetic oligonucleotide
cagcauaauugcugagccc

SEQ ID NO: 222616 - RNA, 19 nt, Artificial Sequence
  Description of Artificial Sequence: Synthetic oligonucleotide
caguugaagcuuguaggcc

SEQ ID NO: 222617 - RNA, 19 nt, Artificial Sequence
  Description of Artificial Sequence: Synthetic oligonucleotide
caacuauuauuggcugugg

SEQ ID NO: 222618 - RNA, 19 nt, Artificial Sequence
  Description of Artificial Sequence: Synthetic oligonucleotide
uucguuacaccagcauuac

SEQ ID NO: 222619 - RNA, 19 nt, Artificial Sequence
  Description of Artificial Sequence: Synthetic oligonucleotide
gauucguuacaccagcauu

SEQ ID NO: 222620 - RNA, 19 nt, Artificial Sequence
  Description of Artificial Sequence: Synthetic oligonucleotide
gguagugaauaaccaaauc

SEQ ID NO: 222621 - RNA, 19 nt, Artificial Sequence
  Description of Artificial Sequence: Synthetic oligonucleotide
ucccuucacauucaaucuu

SEQ ID NO: 222622 - RNA, 19 nt, Artificial Sequence
  Description of Artificial Sequence: Synthetic oligonucleotide
guguuauuuggcuggaacu

SEQ ID NO: 222623 - RNA, 19 nt, Artificial Sequence
  Description of Artificial Sequence: Synthetic oligonucleotide
ucacuaggacagcacuccu

SEQ ID NO: 222624 - RNA, 19 nt, Artificial Sequence
  Description of Artificial Sequence: Synthetic oligonucleotide
uuguaccgguaaugguggg

SEQ ID NO: 222625 - RNA, 19 nt, Artificial Sequence
  Description of Artificial Sequence: Synthetic oligonucleotide
acgcccaaaauuugcaauu

SEQ ID NO: 222626 - RNA, 19 nt, Artificial Sequence
  Description of Artificial Sequence: Synthetic oligonucleotide
uugaacuguuguaggcguc

SEQ ID NO: 222627 - RNA, 19 nt, Artificial Sequence
  Description of Artificial Sequence: Synthetic oligonucleotide
ucuacccgguacugaauuc

SEQ ID NO: 222628 - RNA, 19 nt, Artificial Sequence
  Description of Artificial Sequence: Synthetic oligonucleotide
uggaaucgcguuucauuuc

SEQ ID NO: 222629 - RNA, 19 nt, Artificial Sequence
  Description of Artificial Sequence: Synthetic oligonucleotide
cgauacaucacucuauauc

SEQ ID NO: 222630 - RNA, 19 nt, Artificial Sequence
  Description of Artificial Sequence: Synthetic oligonucleotide
ccgguacugaauuccaggg

SEQ ID NO: 222631 - RNA, 19 nt, Artificial Sequence
  Description of Artificial Sequence: Synthetic oligonucleotide
uucgccaagauaguuccuu

SEQ ID NO: 222632 - RNA, 19 nt, Artificial Sequence
  Description of Artificial Sequence: Synthetic oligonucleotide
auauaguacaacagaccaa

SEQ ID NO: 222633 - RNA, 19 nt, Artificial Sequence
  Description of Artificial Sequence: Synthetic oligonucleotide
cuauaucccugaauaaacu

SEQ ID NO: 222634 - RNA, 19 nt, Artificial Sequence
  Description of Artificial Sequence: Synthetic oligonucleotide
caaacucguggcuggacca

SEQ ID NO: 222635 - RNA, 19 nt, Artificial Sequence
  Description of Artificial Sequence: Synthetic oligonucleotide
uaggcccuuguuaacucau

SEQ ID NO: 222636 - RNA, 19 nt, Artificial Sequence
  Description of Artificial Sequence: Synthetic oligonucleotide
ucaguaguacggaccguuu

SEQ ID NO: 222637 - RNA, 19 nt, Artificial Sequence
  Description of Artificial Sequence: Synthetic oligonucleotide
agaggaacauuagcccaag

SEQ ID NO: 222638 - RNA, 19 nt, Artificial Sequence
  Description of Artificial Sequence: Synthetic oligonucleotide
acagcccauuaauucacau

SEQ ID NO: 222639 - RNA, 19 nt, Artificial Sequence
  Description of Artificial Sequence: Synthetic oligonucleotide
acccaaccuaacuuacagu

SEQ ID NO: 222640 - RNA, 19 nt, Artificial Sequence
  Description of Artificial Sequence: Synthetic oligonucleotide
ccgucugaaagcaucguug

SEQ ID NO: 222641 - RNA, 19 nt, Artificial Sequence
  Description of Artificial Sequence: Synthetic oligonucleotide
aacauuagcccaaguuguu

SEQ ID NO: 222642 - RNA, 19 nt, Artificial Sequence
  Description of Artificial Sequence: Synthetic oligonucleotide
caaaauuacccagcaggca

SEQ ID NO: 222643 - RNA, 19 nt, Artificial Sequence
  Description of Artificial Sequence: Synthetic oligonucleotide
acgauacaucacucuauau

SEQ ID NO: 222644 - RNA, 19 nt, Artificial Sequence
  Description of Artificial Sequence: Synthetic oligonucleotide
uggacggcucccauugcuc

SEQ ID NO: 222645 - RNA, 19 nt, Artificial Sequence
  Description of Artificial Sequence: Synthetic oligonucleotide
guaguggcauauggcgugg

SEQ ID NO: 222646 - RNA, 19 nt, Artificial Sequence
  Description of Artificial Sequence: Synthetic oligonucleotide
gaacuguuguaggcgucag

SEQ ID NO: 222647 - RNA, 19 nt, Artificial Sequence
  Description of Artificial Sequence: Synthetic oligonucleotide
guaccgguaauggugggca

SEQ ID NO: 222648 - RNA, 19 nt, Artificial Sequence
  Description of Artificial Sequence: Synthetic oligonucleotide
uugcaucucuucccuugga

SEQ ID NO: 222649 - RNA, 19 nt, Artificial Sequence
  Description of Artificial Sequence: Synthetic oligonucleotide
auacuccugacaagaaaga

SEQ ID NO: 222650 - RNA, 19 nt, Artificial Sequence
  Description of Artificial Sequence: Synthetic oligonucleotide
guugacgguccacugucca

SEQ ID NO: 222651 - RNA, 19 nt, Artificial Sequence
  Description of Artificial Sequence: Synthetic oligonucleotide
cugacgauacaucacucua

SEQ ID NO: 222652 - RNA, 19 nt, Artificial Sequence
  Description of Artificial Sequence: Synthetic oligonucleotide
uguggaucggggagaucaa

SEQ ID NO: 222653 - RNA, 19 nt, Artificial Sequence
  Description of Artificial Sequence: Synthetic oligonucleotide
aucacucuauaucccugaa

SEQ ID NO: 222654 - RNA, 19 nt, Artificial Sequence
  Description of Artificial Sequence: Synthetic oligonucleotide
agcaucguugcuguuuuau

SEQ ID NO: 222655 - RNA, 19 nt, Artificial Sequence
  Description of Artificial Sequence: Synthetic oligonucleotide
aaguauguuuguaccggua

SEQ ID NO: 222656 - RNA, 19 nt, Artificial Sequence
  Description of Artificial Sequence: Synthetic oligonucleotide
agguagugaauaaccaaau

SEQ ID NO: 222657 - RNA, 19 nt, Artificial Sequence
  Description of Artificial Sequence: Synthetic oligonucleotide
ggaguauugcuuugaaugu

SEQ ID NO: 222658 - RNA, 19 nt, Artificial Sequence
  Description of Artificial Sequence: Synthetic oligonucleotide
cacaaacguagcucccuuc

SEQ ID NO: 222659 - RNA, 19 nt, Artificial Sequence
  Description of Artificial Sequence: Synthetic oligonucleotide
aagcaaguuaguacaucuu

SEQ ID NO: 222660 - RNA, 19 nt, Artificial Sequence
  Description of Artificial Sequence: Synthetic oligonucleotide
agcccaaguuguuaccuuu

SEQ ID NO: 222661 - RNA, 19 nt, Artificial Sequence
  Description of Artificial Sequence: Synthetic oligonucleotide
acggaguaagaguggcagu

SEQ ID NO: 222662 - RNA, 19 nt, Artificial Sequence
  Description of Artificial Sequence: Synthetic oligonucleotide
ccaacuauuauuggcugug

SEQ ID NO: 222663 - RNA, 19 nt, Artificial Sequence
  Description of Artificial Sequence: Synthetic oligonucleotide
cggacacauaaccuaaggg

SEQ ID NO: 222664 - RNA, 19 nt, Artificial Sequence
  Description of Artificial Sequence: Synthetic oligonucleotide
aauggcagguaaaguugau

SEQ ID NO: 222665 - RNA, 19 nt, Artificial Sequence
  Description of Artificial Sequence: Synthetic oligonucleotide
acacaaacguagcucccuu

SEQ ID NO: 222666 - RNA, 19 nt, Artificial Sequence
  Description of Artificial Sequence: Synthetic oligonucleotide
gaaucgcguuucauuuccc

SEQ ID NO: 222667 - RNA, 19 nt, Artificial Sequence
  Description of Artificial Sequence: Synthetic oligonucleotide
uugacgguccacuguccau

SEQ ID NO: 222668 - RNA, 19 nt, Artificial Sequence
  Description of Artificial Sequence: Synthetic oligonucleotide
ccaaccuaacuuacaguac

SEQ ID NO: 222669 - RNA, 19 nt, Artificial Sequence
  Description of Artificial Sequence: Synthetic oligonucleotide
uggggacccuaucaucguc

SEQ ID NO: 222670 - RNA, 19 nt, Artificial Sequence
  Description of Artificial Sequence: Synthetic oligonucleotide
uccuugcaacacaaacgua

SEQ ID NO: 222671 - RNA, 19 nt, Artificial Sequence
  Description of Artificial Sequence: Synthetic oligonucleotide
uggcucaauaucugauguu

SEQ ID NO: 222672 - RNA, 19 nt, Artificial Sequence
  Description of Artificial Sequence: Synthetic oligonucleotide
cgucugaaagcaucguugc

SEQ ID NO: 222673 - RNA, 19 nt, Artificial Sequence
  Description of Artificial Sequence: Synthetic oligonucleotide
ggcgucagaacaacuggag

SEQ ID NO: 222674 - RNA, 19 nt, Artificial Sequence
  Description of Artificial Sequence: Synthetic oligonucleotide
ggaguauggagacgaacaa

SEQ ID NO: 222675 - RNA, 19 nt, Artificial Sequence
  Description of Artificial Sequence: Synthetic oligonucleotide
uaguuccuugcaacacaaa

SEQ ID NO: 222676 - RNA, 19 nt, Artificial Sequence
  Description of Artificial Sequence: Synthetic oligonucleotide
ccggacacauaaccuaagg

SEQ ID NO: 222677 - RNA, 19 nt, Artificial Sequence
  Description of Artificial Sequence: Synthetic oligonucleotide
guuguaggcgucagaacaa

SEQ ID NO: 222678 - RNA, 19 nt, Artificial Sequence
  Description of Artificial Sequence: Synthetic oligonucleotide
caccagaucuuauauuccu

SEQ ID NO: 222679 - RNA, 19 nt, Artificial Sequence
  Description of Artificial Sequence: Synthetic oligonucleotide
cccaaccuaacuuacagua

SEQ ID NO: 222680 - RNA, 19 nt, Artificial Sequence
  Description of Artificial Sequence: Synthetic oligonucleotide
gaacuguuguagguggucu

SEQ ID NO: 222681 - RNA, 19 nt, Artificial Sequence
  Description of Artificial Sequence: Synthetic oligonucleotide
gcuauuguuuacuggcaaa

SEQ ID NO: 222682 - RNA, 19 nt, Artificial Sequence
  Description of Artificial Sequence: Synthetic oligonucleotide
ggguugacgguccacuguc

SEQ ID NO: 222683 - RNA, 19 nt, Artificial Sequence
  Description of Artificial Sequence: Synthetic oligonucleotide
ccaggguauaauugggauc

SEQ ID NO: 222684 - RNA, 19 nt, Artificial Sequence
  Description of Artificial Sequence: Synthetic oligonucleotide
cuccggacacauaaccuaa

SEQ ID NO: 222685 - RNA, 19 nt, Artificial Sequence
  Description of Artificial Sequence: Synthetic oligonucleotide
accgcgaacaggaggugug

SEQ ID NO: 222686 - RNA, 19 nt, Artificial Sequence
  Description of Artificial Sequence: Synthetic oligonucleotide
ccagcauuacccaaccuaa

SEQ ID NO: 222687 - RNA, 19 nt, Artificial Sequence
  Description of Artificial Sequence: Synthetic oligonucleotide
acugcuucgccaagauagu

SEQ ID NO: 222688 - RNA, 19 nt, Artificial Sequence
  Description of Artificial Sequence: Synthetic oligonucleotide
ucggcagcauaguguccca

SEQ ID NO: 222689 - RNA, 19 nt, Artificial Sequence
  Description of Artificial Sequence: Synthetic oligonucleotide
aggcgucagaacaacugga

SEQ ID NO: 222690 - RNA, 19 nt, Artificial Sequence
  Description of Artificial Sequence: Synthetic oligonucleotide
auauggcguggccuguguu

SEQ ID NO: 222691 - RNA, 19 nt, Artificial Sequence
  Description of Artificial Sequence: Synthetic oligonucleotide
cagcccauuaauucacaua

SEQ ID NO: 222692 - RNA, 19 nt, Artificial Sequence
  Description of Artificial Sequence: Synthetic oligonucleotide
gcaccagaucuuauauucc

SEQ ID NO: 222693 - RNA, 19 nt, Artificial Sequence
  Description of Artificial Sequence: Synthetic oligonucleotide
ccacaccgcgaacaggagg

SEQ ID NO: 222694 - RNA, 19 nt, Artificial Sequence
  Description of Artificial Sequence: Synthetic oligonucleotide
gucugacgauacaucacuc

SEQ ID NO: 222695 - RNA, 19 nt, Artificial Sequence
  Description of Artificial Sequence: Synthetic oligonucleotide
ggaacuguuguaggugguc

SEQ ID NO: 222696 - RNA, 19 nt, Artificial Sequence
  Description of Artificial Sequence: Synthetic oligonucleotide
acauaaccuaaggguggga

SEQ ID NO: 222697 - RNA, 19 nt, Artificial Sequence
  Description of Artificial Sequence: Synthetic oligonucleotide
agacggaguaagaguggca

SEQ ID NO: 222698 - RNA, 19 nt, Artificial Sequence
  Description of Artificial Sequence: Synthetic oligonucleotide
uccaaccccugcacuugua

SEQ ID NO: 222699 - RNA, 19 nt, Artificial Sequence
  Description of Artificial Sequence: Synthetic oligonucleotide
ggaagauauggaaucgcgu

SEQ ID NO: 222700 - RNA, 19 nt, Artificial Sequence
  Description of Artificial Sequence: Synthetic oligonucleotide
cacgcccaaaauuugcaau

SEQ ID NO: 222701 - RNA, 19 nt, Artificial Sequence
  Description of Artificial Sequence: Synthetic oligonucleotide
cgaguaugcccuaauaaua

SEQ ID NO: 222702 - RNA, 19 nt, Artificial Sequence
  Description of Artificial Sequence: Synthetic oligonucleotide
aggcggaguauugcuuuga

SEQ ID NO: 222703 - RNA, 19 nt, Artificial Sequence
  Description of Artificial Sequence: Synthetic oligonucleotide
uggcaaacucguggcugga

SEQ ID NO: 222704 - RNA, 19 nt, Artificial Sequence
  Description of Artificial Sequence: Synthetic oligonucleotide
gcauuacccaaccuaacuu

SEQ ID NO: 222705 - RNA, 19 nt, Artificial Sequence
  Description of Artificial Sequence: Synthetic oligonucleotide
guucggcagcauagugucc

SEQ ID NO: 222706 - RNA, 19 nt, Artificial Sequence
  Description of Artificial Sequence: Synthetic oligonucleotide
agcccgaguaugcccuaau

SEQ ID NO: 222707 - RNA, 19 nt, Artificial Sequence
  Description of Artificial Sequence: Synthetic oligonucleotide
gguugacgguccacugucc

SEQ ID NO: 222708 - RNA, 19 nt, Artificial Sequence
  Description of Artificial Sequence: Synthetic oligonucleotide
gguguggggacccuaucau

SEQ ID NO: 222709 - RNA, 19 nt, Artificial Sequence
  Description of Artificial Sequence: Synthetic oligonucleotide
caguggacugcuguccaaa

SEQ ID NO: 222710 - RNA, 19 nt, Artificial Sequence
  Description of Artificial Sequence: Synthetic oligonucleotide
agaucucacuaaacaccuu

SEQ ID NO: 222711 - RNA, 19 nt, Artificial Sequence
  Description of Artificial Sequence: Synthetic oligonucleotide
uucugcgcccaugcacaau

SEQ ID NO: 222712 - RNA, 19 nt, Artificial Sequence
  Description of Artificial Sequence: Synthetic oligonucleotide
ggcggaguauugcuuugaa

SEQ ID NO: 222713 - RNA, 19 nt, Artificial Sequence
  Description of Artificial Sequence: Synthetic oligonucleotide
uagcccgaguaugcccuaa

SEQ ID NO: 222714 - RNA, 19 nt, Artificial Sequence
  Description of Artificial Sequence: Synthetic oligonucleotide
cauauggcguggccugugu

SEQ ID NO: 222715 - RNA, 19 nt, Artificial Sequence
  Description of Artificial Sequence: Synthetic oligonucleotide
gcgucagaacaacuggagu

SEQ ID NO: 222716 - RNA, 19 nt, Artificial Sequence
  Description of Artificial Sequence: Synthetic oligonucleotide
cuucugcgcccaugcacaa

SEQ ID NO: 222717 - RNA, 19 nt, Artificial Sequence
  Description of Artificial Sequence: Synthetic oligonucleotide
guggggacccuaucaucgu

SEQ ID NO: 222718 - RNA, 19 nt, Artificial Sequence
  Description of Artificial Sequence: Synthetic oligonucleotide
aggguauaauugggaucau

SEQ ID NO: 222719 - RNA, 19 nt, Artificial Sequence
  Description of Artificial Sequence: Synthetic oligonucleotide
ggacccuaucaucgucuuc

SEQ ID NO: 222720 - RNA, 19 nt, Artificial Sequence
  Description of Artificial Sequence: Synthetic oligonucleotide
agcauggguugcaucucuu

SEQ ID NO: 222721 - RNA, 19 nt, Artificial Sequence
  Description of Artificial Sequence: Synthetic oligonucleotide
caguaguacggaccguuuu

SEQ ID NO: 222722 - RNA, 19 nt, Artificial Sequence
  Description of Artificial Sequence: Synthetic oligonucleotide
cucguggcuggaccaggaa

SEQ ID NO: 222723 - RNA, 19 nt, Artificial Sequence
  Description of Artificial Sequence: Synthetic oligonucleotide
ccagagaugcguuccgacu

SEQ ID NO: 222724 - RNA, 19 nt, Artificial Sequence
  Description of Artificial Sequence: Synthetic oligonucleotide
gcauagugucccagcucug

SEQ ID NO: 222725 - RNA, 19 nt, Artificial Sequence
  Description of Artificial Sequence: Synthetic oligonucleotide
cggggagaucaacugccag

SEQ ID NO: 222726 - RNA, 19 nt, Artificial Sequence
  Description of Artificial Sequence: Synthetic oligonucleotide
ccgcgaacaggaggugugg

SEQ ID NO: 222727 - RNA, 19 nt, Artificial Sequence
  Description of Artificial Sequence: Synthetic oligonucleotide
cuucgccaagauaguuccu

SEQ ID NO: 222728 - RNA, 19 nt, Artificial Sequence
  Description of Artificial Sequence: Synthetic oligonucleotide
cccaacuauuauuggcugu

SEQ ID NO: 222729 - RNA, 19 nt, Artificial Sequence
  Description of Artificial Sequence: Synthetic oligonucleotide
gcggaguauugcuuugaau

SEQ ID NO: 222730 - RNA, 19 nt, Artificial Sequence
  Description of Artificial Sequence: Synthetic oligonucleotide
cacuaaugcuugugcuguu

SEQ ID NO: 222731 - RNA, 19 nt, Artificial Sequence
  Description of Artificial Sequence: Synthetic oligonucleotide
cuccgucugaaagcaucgu

SEQ ID NO: 222732 - RNA, 19 nt, Artificial Sequence
  Description of Artificial Sequence: Synthetic oligonucleotide
ggcguggccuguguuauuu

SEQ ID NO: 222733 - RNA, 19 nt, Artificial Sequence
  Description of Artificial Sequence: Synthetic oligonucleotide
cugcuucgccaagauaguu

SEQ ID NO: 222734 - RNA, 19 nt, Artificial Sequence
  Description of Artificial Sequence: Synthetic oligonucleotide
gggacccuaucaucgucuu

SEQ ID NO: 222735 - RNA, 19 nt, Artificial Sequence
  Description of Artificial Sequence: Synthetic oligonucleotide
cccuaauaauaaguugcuu

SEQ ID NO: 222736 - RNA, 19 nt, Artificial Sequence
  Description of Artificial Sequence: Synthetic oligonucleotide
ggguugcaucucuucccuu

SEQ ID NO: 222737 - RNA, 19 nt, Artificial Sequence
  Description of Artificial Sequence: Synthetic oligonucleotide
ccucuacccgguacugaau

SEQ ID NO: 222738 - RNA, 19 nt, Artificial Sequence
  Description of Artificial Sequence: Synthetic oligonucleotide
uuagaagccauuuagaacc

SEQ ID NO: 222739 - RNA, 19 nt, Artificial Sequence
  Description of Artificial Sequence: Synthetic oligonucleotide
auugacaacagccucagcg

SEQ ID NO: 222740 - RNA, 19 nt, Artificial Sequence
  Description of Artificial Sequence: Synthetic oligonucleotide
guauuuagaucuuuaaugg

SEQ ID NO: 222741 - RNA, 19 nt, Artificial Sequence
  Description of Artificial Sequence: Synthetic oligonucleotide
caaauaaucaucuccacgc

SEQ ID NO: 222742 - RNA, 19 nt, Artificial Sequence
  Description of Artificial Sequence: Synthetic oligonucleotide
aaagccauuagguuuauga

SEQ ID NO: 222743 - RNA, 19 nt, Artificial Sequence
  Description of Artificial Sequence: Synthetic oligonucleotide
aagacuuugccccaugagg

SEQ ID NO: 222744 - RNA, 19 nt, Artificial Sequence
  Description of Artificial Sequence: Synthetic oligonucleotide
uaagcaaucaggcauggag

SEQ ID NO: 222745 - RNA, 19 nt, Artificial Sequence
  Description of Artificial Sequence: Synthetic oligonucleotide
aagaacuggggauuagugc

SEQ ID NO: 222746 - RNA, 19 nt, Artificial Sequence
  Description of Artificial Sequence: Synthetic oligonucleotide
uguuuaauauugaaggagc

SEQ ID NO: 222747 - RNA, 19 nt, Artificial Sequence
  Description of Artificial Sequence: Synthetic oligonucleotide
aaauaaucaucuccacgcc

SEQ ID NO: 222748 - RNA, 19 nt, Artificial Sequence
  Description of Artificial Sequence: Synthetic oligonucleotide
uaaccuguaagcaaucagg

SEQ ID NO: 222749 - RNA, 19 nt, Artificial Sequence
  Description of Artificial Sequence: Synthetic oligonucleotide
uuugaaugggacaucauca

SEQ ID NO: 222750 - RNA, 19 nt, Artificial Sequence
  Description of Artificial Sequence: Synthetic oligonucleotide
acucaaauugacaacagcc

SEQ ID NO: 222751 - RNA, 19 nt, Artificial Sequence
  Description of Artificial Sequence: Synthetic oligonucleotide
aaagauuacucaaauugac

SEQ ID NO: 222752 - RNA, 19 nt, Artificial Sequence
  Description of Artificial Sequence: Synthetic oligonucleotide
ugugguaggguuauaaagc

SEQ ID NO: 222753 - RNA, 19 nt, Artificial Sequence
  Description of Artificial Sequence: Synthetic oligonucleotide
ugugcaaagagauagucga

SEQ ID NO: 222754 - RNA, 19 nt, Artificial Sequence
  Description of Artificial Sequence: Synthetic oligonucleotide
uguauuauauccuuuguau

SEQ ID NO: 222755 - RNA, 19 nt, Artificial Sequence
  Description of Artificial Sequence: Synthetic oligonucleotide
ucaagacuguauuauaucc

SEQ ID NO: 222756 - RNA, 19 nt, Artificial Sequence
  Description of Artificial Sequence: Synthetic oligonucleotide
uguguaauagcaaaacuuc

SEQ ID NO: 222757 - RNA, 19 nt, Artificial Sequence
  Description of Artificial Sequence: Synthetic oligonucleotide
ugauauugcuuacuguagg

SEQ ID NO: 222758 - RNA, 19 nt, Artificial Sequence
  Description of Artificial Sequence: Synthetic oligonucleotide
uguaagcuggcaaggaugg

SEQ ID NO: 222759 - RNA, 19 nt, Artificial Sequence
  Description of Artificial Sequence: Synthetic oligonucleotide
ugggacaucaucaagguaa

SEQ ID NO: 222760 - RNA, 19 nt, Artificial Sequence
  Description of Artificial Sequence: Synthetic oligonucleotide
uucucaucgauucagugug

SEQ ID NO: 222761 - RNA, 19 nt, Artificial Sequence
  Description of Artificial Sequence: Synthetic oligonucleotide
ucaaguuuggggaaggaca

SEQ ID NO: 222762 - RNA, 19 nt, Artificial Sequence
  Description of Artificial Sequence: Synthetic oligonucleotide
aagugcaucuuuuguaccg

SEQ ID NO: 222763 - RNA, 19 nt, Artificial Sequence
  Description of Artificial Sequence: Synthetic oligonucleotide
aucaagguaacugaaaguc

SEQ ID NO: 222764 - RNA, 19 nt, Artificial Sequence
  Description of Artificial Sequence: Synthetic oligonucleotide
ugaaaucuaagguugcuug

SEQ ID NO: 222765 - RNA, 19 nt, Artificial Sequence
  Description of Artificial Sequence: Synthetic oligonucleotide
uguaauagcaaaacuuccu

SEQ ID NO: 222766 - RNA, 19 nt, Artificial Sequence
  Description of Artificial Sequence: Synthetic oligonucleotide
gaagccaauagguagacca

SEQ ID NO: 222767 - RNA, 19 nt, Artificial Sequence
  Description of Artificial Sequence: Synthetic oligonucleotide
uuuagaucuuuaauggugu

SEQ ID NO: 222768 - RNA, 19 nt, Artificial Sequence
  Description of Artificial Sequence: Synthetic oligonucleotide
aaauuuagaggggugacug

SEQ ID NO: 222769 - RNA, 19 nt, Artificial Sequence
  Description of Artificial Sequence: Synthetic oligonucleotide
aacucauuuuagcugucac

SEQ ID NO: 222770 - RNA, 19 nt, Artificial Sequence
  Description of Artificial Sequence: Synthetic oligonucleotide
aggauuauggucuaagcca

SEQ ID NO: 222771 - RNA, 19 nt, Artificial Sequence
  Description of Artificial Sequence: Synthetic oligonucleotide
ucuuggaucagcuuaacau

SEQ ID NO: 222772 - RNA, 19 nt, Artificial Sequence
  Description of Artificial Sequence: Synthetic oligonucleotide
agagauuugauauugcuua

SEQ ID NO: 222773 - RNA, 19 nt, Artificial Sequence
  Description of Artificial Sequence: Synthetic oligonucleotide
uuauaaagccauuagguuu

SEQ ID NO: 222774 - RNA, 19 nt, Artificial Sequence
  Description of Artificial Sequence: Synthetic oligonucleotide
ugggcuaagaaccuucugc

SEQ ID NO: 222775 - RNA, 19 nt, Artificial Sequence
  Description of Artificial Sequence: Synthetic oligonucleotide
aaggcuuuaggaaauuccg

SEQ ID NO: 222776 - RNA, 19 nt, Artificial Sequence
  Description of Artificial Sequence: Synthetic oligonucleotide
uuuugaaugggacaucauc

SEQ ID NO: 222777 - RNA, 19 nt, Artificial Sequence
  Description of Artificial Sequence: Synthetic oligonucleotide
gaggauuauggucuaagcc

SEQ ID NO: 222778 - RNA, 19 nt, Artificial Sequence
  Description of Artificial Sequence: Synthetic oligonucleotide
uauguuuaauauugaagga

SEQ ID NO: 222779 - RNA, 19 nt, Artificial Sequence
  Description of Artificial Sequence: Synthetic oligonucleotide
caagguaacugaaaguccc

SEQ ID NO: 222780 - RNA, 19 nt, Artificial Sequence
  Description of Artificial Sequence: Synthetic oligonucleotide
uuuuguaccguagagacau

SEQ ID NO: 222781 - RNA, 19 nt, Artificial Sequence
  Description of Artificial Sequence: Synthetic oligonucleotide
uuuagauucaagacuguau

SEQ ID NO: 222782 - RNA, 19 nt, Artificial Sequence
  Description of Artificial Sequence: Synthetic oligonucleotide
uauaaagccauuagguuua

SEQ ID NO: 222783 - RNA, 19 nt, Artificial Sequence
  Description of Artificial Sequence: Synthetic oligonucleotide
uguauuugacucagguuag

SEQ ID NO: 222784 - RNA, 19 nt, Artificial Sequence
  Description of Artificial Sequence: Synthetic oligonucleotide
uaugaguagcccauguuga

SEQ ID NO: 222785 - RNA, 19 nt, Artificial Sequence
  Description of Artificial Sequence: Synthetic oligonucleotide
aauaaucaucuccacgccu

SEQ ID NO: 222786 - RNA, 19 nt, Artificial Sequence
  Description of Artificial Sequence: Synthetic oligonucleotide
aaucuaagguugcuugcuc

SEQ ID NO: 222787 - RNA, 19 nt, Artificial Sequence
  Description of Artificial Sequence: Synthetic oligonucleotide
aucuaagguugcuugcucc

SEQ ID NO: 222788 - RNA, 19 nt, Artificial Sequence
  Description of Artificial Sequence: Synthetic oligonucleotide
auuacucaaauugacaaca

SEQ ID NO: 222789 - RNA, 19 nt, Artificial Sequence
  Description of Artificial Sequence: Synthetic oligonucleotide
guaacugagccauuauagg

SEQ ID NO: 222790 - RNA, 19 nt, Artificial Sequence
  Description of Artificial Sequence: Synthetic oligonucleotide
auaguuagcaaauuauuuu

SEQ ID NO: 222791 - RNA, 19 nt, Artificial Sequence
  Description of Artificial Sequence: Synthetic oligonucleotide
uuauuaguaguucucugaa

SEQ ID NO: 222792 - RNA, 19 nt, Artificial Sequence
  Description of Artificial Sequence: Synthetic oligonucleotide
auagucgagaaucugcuca

SEQ ID NO: 222793 - RNA, 19 nt, Artificial Sequence
  Description of Artificial Sequence: Synthetic oligonucleotide
ucucacuuguauuugacuc

SEQ ID NO: 222794 - RNA, 19 nt, Artificial Sequence
  Description of Artificial Sequence: Synthetic oligonucleotide
ugugcuaugaaaagugcuc

SEQ ID NO: 222795 - RNA, 19 nt, Artificial Sequence
  Description of Artificial Sequence: Synthetic oligonucleotide
aagaacuucucacuuguau

SEQ ID NO: 222796 - RNA, 19 nt, Artificial Sequence
  Description of Artificial Sequence: Synthetic oligonucleotide
ucuuagaauucacuuuagc

SEQ ID NO: 222797 - RNA, 19 nt, Artificial Sequence
  Description of Artificial Sequence: Synthetic oligonucleotide
auuguuguguaauagcaaa

SEQ ID NO: 222798 - RNA, 19 nt, Artificial Sequence
  Description of Artificial Sequence: Synthetic oligonucleotide
uccagauuaucaaaugggu

SEQ ID NO: 222799 - RNA, 19 nt, Artificial Sequence
  Description of Artificial Sequence: Synthetic oligonucleotide
auuuagaucuuuaauggug

SEQ ID NO: 222800 - RNA, 19 nt, Artificial Sequence
  Description of Artificial Sequence: Synthetic oligonucleotide
agccauuagguuuaugaag

SEQ ID NO: 222801 - RNA, 19 nt, Artificial Sequence
  Description of Artificial Sequence: Synthetic oligonucleotide
guaugaguagcccauguug

SEQ ID NO: 222802 - RNA, 19 nt, Artificial Sequence
  Description of Artificial Sequence: Synthetic oligonucleotide
cuagguguuacucauugug

SEQ ID NO: 222803 - RNA, 19 nt, Artificial Sequence
  Description of Artificial Sequence: Synthetic oligonucleotide
uaacugagccauuauaggu

SEQ ID NO: 222804 - RNA, 19 nt, Artificial Sequence
  Description of Artificial Sequence: Synthetic oligonucleotide
aguaguucucugaagaauc

SEQ ID NO: 222805 - RNA, 19 nt, Artificial Sequence
  Description of Artificial Sequence: Synthetic oligonucleotide
auaaccuguaagcaaucag

SEQ ID NO: 222806 - RNA, 19 nt, Artificial Sequence
  Description of Artificial Sequence: Synthetic oligonucleotide
gauccaaguauucuuucug

SEQ ID NO: 222807 - RNA, 19 nt, Artificial Sequence
  Description of Artificial Sequence: Synthetic oligonucleotide
ucugggugaguuacuaucc

SEQ ID NO: 222808 - RNA, 19 nt, Artificial Sequence
  Description of Artificial Sequence: Synthetic oligonucleotide
ucugauaaccuguaagcaa

SEQ ID NO: 222809 - RNA, 19 nt, Artificial Sequence
  Description of Artificial Sequence: Synthetic oligonucleotide
guaacugaaagucccauga

SEQ ID NO: 222810 - RNA, 19 nt, Artificial Sequence
  Description of Artificial Sequence: Synthetic oligonucleotide
gaaaucuaagguugcuugc

SEQ ID NO: 222811 - RNA, 19 nt, Artificial Sequence
  Description of Artificial Sequence: Synthetic oligonucleotide
uugacuacugucuccacac

SEQ ID NO: 222812 - RNA, 19 nt, Artificial Sequence
  Description of Artificial Sequence: Synthetic oligonucleotide
aauagguagaccaacuuua

SEQ ID NO: 222813 - RNA, 19 nt, Artificial Sequence
  Description of Artificial Sequence: Synthetic oligonucleotide
uuucucaucgauucagugu

SEQ ID NO: 222814 - RNA, 19 nt, Artificial Sequence
  Description of Artificial Sequence: Synthetic oligonucleotide
uauuuagaucuuuaauggu

SEQ ID NO: 222815 - RNA, 19 nt, Artificial Sequence
  Description of Artificial Sequence: Synthetic oligonucleotide
gguguuuugaauuugucuc

SEQ ID NO: 222816 - RNA, 19 nt, Artificial Sequence
  Description of Artificial Sequence: Synthetic oligonucleotide
uaacacuaaggaaugcugu

SEQ ID NO: 222817 - RNA, 19 nt, Artificial Sequence
  Description of Artificial Sequence: Synthetic oligonucleotide
gccauuuagaaccugaaug

SEQ ID NO: 222818 - RNA, 19 nt, Artificial Sequence
  Description of Artificial Sequence: Synthetic oligonucleotide
ugaaugggacaucaucaag

SEQ ID NO: 222819 - RNA, 19 nt, Artificial Sequence
  Description of Artificial Sequence: Synthetic oligonucleotide
ugagaaauuuagaggggug

SEQ ID NO: 222820 - RNA, 19 nt, Artificial Sequence
  Description of Artificial Sequence: Synthetic oligonucleotide
uauccuuuguauuuagauc

SEQ ID NO: 222821 - RNA, 19 nt, Artificial Sequence
  Description of Artificial Sequence: Synthetic oligonucleotide
cugugguaggguuauaaag

SEQ ID NO: 222822 - RNA, 19 nt, Artificial Sequence
  Description of Artificial Sequence: Synthetic oligonucleotide
aggguuauaaagccauuag

SEQ ID NO: 222823 - RNA, 19 nt, Artificial Sequence
  Description of Artificial Sequence: Synthetic oligonucleotide
auuuagaaccugaaugccg

SEQ ID NO: 222824 - RNA, 19 nt, Artificial Sequence
  Description of Artificial Sequence: Synthetic oligonucleotide
aggaaauuccgggaugugc

SEQ ID NO: 222825 - RNA, 19 nt, Artificial Sequence
  Description of Artificial Sequence: Synthetic oligonucleotide
gaaauaagagaccccagaa

SEQ ID NO: 222826 - RNA, 19 nt, Artificial Sequence
  Description of Artificial Sequence: Synthetic oligonucleotide
cuuggaucagcuuaacauc

SEQ ID NO: 222827 - RNA, 19 nt, Artificial Sequence
  Description of Artificial Sequence: Synthetic oligonucleotide
gaaggcuuuaggaaauucc

SEQ ID NO: 222828 - RNA, 19 nt, Artificial Sequence
  Description of Artificial Sequence: Synthetic oligonucleotide
uguaacacuaaggaaugcu

SEQ ID NO: 222829 - RNA, 19 nt, Artificial Sequence
  Description of Artificial Sequence: Synthetic oligonucleotide
acgccugaccuucuaaccc

SEQ ID NO: 222830 - RNA, 19 nt, Artificial Sequence
  Description of Artificial Sequence: Synthetic oligonucleotide
uuguaugcucaaaucuucc

SEQ ID NO: 222831 - RNA, 19 nt, Artificial Sequence
  Description of Artificial Sequence: Synthetic oligonucleotide
uccuauuuugaaugggaca

SEQ ID NO: 222832 - RNA, 19 nt, Artificial Sequence
  Description of Artificial Sequence: Synthetic oligonucleotide
aaauuccgggaugugccgc

SEQ ID NO: 222833 - RNA, 19 nt, Artificial Sequence
  Description of Artificial Sequence: Synthetic oligonucleotide
auggccuguuuucucaucg

SEQ ID NO: 222834 - RNA, 19 nt, Artificial Sequence
  Description of Artificial Sequence: Synthetic oligonucleotide
aaaucuaagguugcuugcu

SEQ ID NO: 222835 - RNA, 19 nt, Artificial Sequence
  Description of Artificial Sequence: Synthetic oligonucleotide
aagauuacucaaauugaca

SEQ ID NO: 222836 - RNA, 19 nt, Artificial Sequence
  Description of Artificial Sequence: Synthetic oligonucleotide
acaaucguaugaguagccc

SEQ ID NO: 222837 - RNA, 19 nt, Artificial Sequence
  Description of Artificial Sequence: Synthetic oligonucleotide
caaagauuacucaaauuga

SEQ ID NO: 222838 - RNA, 19 nt, Artificial Sequence
  Description of Artificial Sequence: Synthetic oligonucleotide
uauugcuuacuguagggau

SEQ ID NO: 222839 - RNA, 19 nt, Artificial Sequence
  Description of Artificial Sequence: Synthetic oligonucleotide
gagauagucgagaaucugc

SEQ ID NO: 222840 - RNA, 19 nt, Artificial Sequence
  Description of Artificial Sequence: Synthetic oligonucleotide
gaaauuccgggaugugccg

SEQ ID NO: 222841 - RNA, 19 nt, Artificial Sequence
  Description of Artificial Sequence: Synthetic oligonucleotide
ccauuuagaaccugaaugc

SEQ ID NO: 222842 - RNA, 19 nt, Artificial Sequence
  Description of Artificial Sequence: Synthetic oligonucleotide
ugaaagucccaugaaaauc

SEQ ID NO: 222843 - RNA, 19 nt, Artificial Sequence
  Description of Artificial Sequence: Synthetic oligonucleotide
uauuugacucagguuagag

SEQ ID NO: 222844 - RNA, 19 nt, Artificial Sequence
  Description of Artificial Sequence: Synthetic oligonucleotide
cugugggacauguauuugg

SEQ ID NO: 222845 - RNA, 19 nt, Artificial Sequence
  Description of Artificial Sequence: Synthetic oligonucleotide
ugucuccuauuuugaaugg

SEQ ID NO: 222846 - RNA, 19 nt, Artificial Sequence
  Description of Artificial Sequence: Synthetic oligonucleotide
caaagcauuguccugguca

SEQ ID NO: 222847 - RNA, 19 nt, Artificial Sequence
  Description of Artificial Sequence: Synthetic oligonucleotide
cuuagaauucacuuuagcu

SEQ ID NO: 222848 - RNA, 19 nt, Artificial Sequence
  Description of Artificial Sequence: Synthetic oligonucleotide
gaaugcugugggaaggugg

SEQ ID NO: 222849 - RNA, 19 nt, Artificial Sequence
  Description of Artificial Sequence: Synthetic oligonucleotide
agaucuuuaaugguguaga

SEQ ID NO: 222850 - RNA, 19 nt, Artificial Sequence
  Description of Artificial Sequence: Synthetic oligonucleotide
uuagguuuaugaagaggcu

SEQ ID NO: 222851 - RNA, 19 nt, Artificial Sequence
  Description of Artificial Sequence: Synthetic oligonucleotide
ugcaucuuuuguaccguag

SEQ ID NO: 222852 - RNA, 19 nt, Artificial Sequence
  Description of Artificial Sequence: Synthetic oligonucleotide
ugugggacauguauuugga

SEQ ID NO: 222853 - RNA, 19 nt, Artificial Sequence
  Description of Artificial Sequence: Synthetic oligonucleotide
ucugccuaugguauggcaa

SEQ ID NO: 222854 - RNA, 19 nt, Artificial Sequence
  Description of Artificial Sequence: Synthetic oligonucleotide
uuauagguccagugguucc

SEQ ID NO: 222855 - RNA, 19 nt, Artificial Sequence
  Description of Artificial Sequence: Synthetic oligonucleotide
uagguguuacucauugugu

SEQ ID NO: 222856 - RNA, 19 nt, Artificial Sequence
  Description of Artificial Sequence: Synthetic oligonucleotide
aauuuagaggggugacugu

SEQ ID NO: 222857 - RNA, 19 nt, Artificial Sequence
  Description of Artificial Sequence: Synthetic oligonucleotide
cagagacuagcaaauaauc

SEQ ID NO: 222858 - RNA, 19 nt, Artificial Sequence
  Description of Artificial Sequence: Synthetic oligonucleotide
guguuuugaauuugucucc

SEQ ID NO: 222859 - RNA, 19 nt, Artificial Sequence
  Description of Artificial Sequence: Synthetic oligonucleotide
gaggaaauaagagacccca

SEQ ID NO: 222860 - RNA, 19 nt, Artificial Sequence
  Description of Artificial Sequence: Synthetic oligonucleotide
agacuguucaagaacuggg

SEQ ID NO: 222861 - RNA, 19 nt, Artificial Sequence
  Description of Artificial Sequence: Synthetic oligonucleotide
uaagguugcuugcuccaag

SEQ ID NO: 222862 - RNA, 19 nt, Artificial Sequence
  Description of Artificial Sequence: Synthetic oligonucleotide
cuguaagcuggcaaggaug

SEQ ID NO: 222863 - RNA, 19 nt, Artificial Sequence
  Description of Artificial Sequence: Synthetic oligonucleotide
ucuaagguugcuugcucca

SEQ ID NO: 222864 - RNA, 19 nt, Artificial Sequence
  Description of Artificial Sequence: Synthetic oligonucleotide
uguaugcucaaaucuuccu

SEQ ID NO: 222865 - RNA, 19 nt, Artificial Sequence
  Description of Artificial Sequence: Synthetic oligonucleotide
uugcuuacuguagggauag

SEQ ID NO: 222866 - RNA, 19 nt, Artificial Sequence
  Description of Artificial Sequence: Synthetic oligonucleotide
ucacuuguauuugacucag

SEQ ID NO: 222867 - RNA, 19 nt, Artificial Sequence
  Description of Artificial Sequence: Synthetic oligonucleotide
uagaggauuauggucuaag

SEQ ID NO: 222868 - RNA, 19 nt, Artificial Sequence
  Description of Artificial Sequence: Synthetic oligonucleotide
cucaauauucucuccuuuc

SEQ ID NO: 222869 - RNA, 19 nt, Artificial Sequence
  Description of Artificial Sequence: Synthetic oligonucleotide
acuguucaagaacugggga

SEQ ID NO: 222870 - RNA, 19 nt, Artificial Sequence
  Description of Artificial Sequence: Synthetic oligonucleotide
gccauuauagguccagugg

SEQ ID NO: 222871 - RNA, 19 nt, Artificial Sequence
  Description of Artificial Sequence: Synthetic oligonucleotide
auuagugcugagugacuag

SEQ ID NO: 222872 - RNA, 19 nt, Artificial Sequence
  Description of Artificial Sequence: Synthetic oligonucleotide
ugaaaagugcucgcaagcu

SEQ ID NO: 222873 - RNA, 19 nt, Artificial Sequence
  Description of Artificial Sequence: Synthetic oligonucleotide
guauugugagucuuggaga

SEQ ID NO: 222874 - RNA, 19 nt, Artificial Sequence
  Description of Artificial Sequence: Synthetic oligonucleotide
ugauucuucuguacacaca

SEQ ID NO: 222875 - RNA, 19 nt, Artificial Sequence
  Description of Artificial Sequence: Synthetic oligonucleotide
acagcgacaucuuuucaca

SEQ ID NO: 222876 - RNA, 19 nt, Artificial Sequence
  Description of Artificial Sequence: Synthetic oligonucleotide
ugcucaaaucuuccuaccu

SEQ ID NO: 222877 - RNA, 19 nt, Artificial Sequence
  Description of Artificial Sequence: Synthetic oligonucleotide
ugacacugagaaauuuaga

SEQ ID NO: 222878 - RNA, 19 nt, Artificial Sequence
  Description of Artificial Sequence: Synthetic oligonucleotide
guaacacuaaggaaugcug

SEQ ID NO: 222879 - RNA, 19 nt, Artificial Sequence
  Description of Artificial Sequence: Synthetic oligonucleotide
gagacuagcaaauaaucau

SEQ ID NO: 222880 - RNA, 19 nt, Artificial Sequence
  Description of Artificial Sequence: Synthetic oligonucleotide
aguguaacacuaaggaaug

SEQ ID NO: 222881 - RNA, 19 nt, Artificial Sequence
  Description of Artificial Sequence: Synthetic oligonucleotide
uugaaugggacaucaucaa

SEQ ID NO: 222882 - RNA, 19 nt, Artificial Sequence
  Description of Artificial Sequence: Synthetic oligonucleotide
uuugaauuugucuccuauu

SEQ ID NO: 222883 - RNA, 19 nt, Artificial Sequence
  Description of Artificial Sequence: Synthetic oligonucleotide
uugcuugcuccaaggaugc

SEQ ID NO: 222884 - RNA, 19 nt, Artificial Sequence
  Description of Artificial Sequence: Synthetic oligonucleotide
agauucaagacuguauuau

SEQ ID NO: 222885 - RNA, 19 nt, Artificial Sequence
  Description of Artificial Sequence: Synthetic oligonucleotide
uguaccguagagacaucca

SEQ ID NO: 222886 - RNA, 19 nt, Artificial Sequence
  Description of Artificial Sequence: Synthetic oligonucleotide
agagacuagcaaauaauca

SEQ ID NO: 222887 - RNA, 19 nt, Artificial Sequence
  Description of Artificial Sequence: Synthetic oligonucleotide
gagauuugauauugcuuac

SEQ ID NO: 222888 - RNA, 19 nt, Artificial Sequence
  Description of Artificial Sequence: Synthetic oligonucleotide
ugggugaguuacuauccag

SEQ ID NO: 222889 - RNA, 19 nt, Artificial Sequence
  Description of Artificial Sequence: Synthetic oligonucleotide
agcuucuuggaucagcuua

SEQ ID NO: 222890 - RNA, 19 nt, Artificial Sequence
  Description of Artificial Sequence: Synthetic oligonucleotide
ugcuaugaaaagugcucgc

SEQ ID NO: 222891 - RNA, 19 nt, Artificial Sequence
  Description of Artificial Sequence: Synthetic oligonucleotide
ugggcaugggcacuuguga

SEQ ID NO: 222892 - RNA, 19 nt, Artificial Sequence
  Description of Artificial Sequence: Synthetic oligonucleotide
gguagaccaacuuuagcug

SEQ ID NO: 222893 - RNA, 19 nt, Artificial Sequence
  Description of Artificial Sequence: Synthetic oligonucleotide
agcccauuuccuuaaauuu

SEQ ID NO: 222894 - RNA, 19 nt, Artificial Sequence
  Description of Artificial Sequence: Synthetic oligonucleotide
uacugcugacccgaguugg

SEQ ID NO: 222895 - RNA, 19 nt, Artificial Sequence
  Description of Artificial Sequence: Synthetic oligonucleotide
ucauuuuagcugucacccc

SEQ ID NO: 222896 - RNA, 19 nt, Artificial Sequence
  Description of Artificial Sequence: Synthetic oligonucleotide
uucuuggaucagcuuaaca

SEQ ID NO: 222897 - RNA, 19 nt, Artificial Sequence
  Description of Artificial Sequence: Synthetic oligonucleotide
cugcaguuccaaauaggcc

SEQ ID NO: 222898 - RNA, 19 nt, Artificial Sequence
  Description of Artificial Sequence: Synthetic oligonucleotide
uuguaccguagagacaucc

SEQ ID NO: 222899 - RNA, 19 nt, Artificial Sequence
  Description of Artificial Sequence: Synthetic oligonucleotide
aaucguaugaguagcccau

SEQ ID NO: 222900 - RNA, 19 nt, Artificial Sequence
  Description of Artificial Sequence: Synthetic oligonucleotide
uccaaguauucuuucugaa

SEQ ID NO: 222901 - RNA, 19 nt, Artificial Sequence
  Description of Artificial Sequence: Synthetic oligonucleotide
aauuccgggaugugccgcu

SEQ ID NO: 222902 - RNA, 19 nt, Artificial Sequence
  Description of Artificial Sequence: Synthetic oligonucleotide
accguagagacauccaaaa

SEQ ID NO: 222903 - RNA, 19 nt, Artificial Sequence
  Description of Artificial Sequence: Synthetic oligonucleotide
uagauucaagacuguauua

SEQ ID NO: 222904 - RNA, 19 nt, Artificial Sequence
  Description of Artificial Sequence: Synthetic oligonucleotide
agcauuguccuggucauug

SEQ ID NO: 222905 - RNA, 19 nt, Artificial Sequence
  Description of Artificial Sequence: Synthetic oligonucleotide
ccugcaguuccaaauaggc

SEQ ID NO: 222906 - RNA, 19 nt, Artificial Sequence
  Description of Artificial Sequence: Synthetic oligonucleotide
agugacuagucauggccug

SEQ ID NO: 222907 - RNA, 19 nt, Artificial Sequence
  Description of Artificial Sequence: Synthetic oligonucleotide
caguguaacacuaaggaau

SEQ ID NO: 222908 - RNA, 19 nt, Artificial Sequence
  Description of Artificial Sequence: Synthetic oligonucleotide
ucguccuguaacacagacc

SEQ ID NO: 222909 - RNA, 19 nt, Artificial Sequence
  Description of Artificial Sequence: Synthetic oligonucleotide
ggaacugccuagcagaaga

SEQ ID NO: 222910 - RNA, 19 nt, Artificial Sequence
  Description of Artificial Sequence: Synthetic oligonucleotide
aaacucauuuuagcuguca

SEQ ID NO: 222911 - RNA, 19 nt, Artificial Sequence
  Description of Artificial Sequence: Synthetic oligonucleotide
ggaaauuccgggaugugcc

SEQ ID NO: 222912 - RNA, 19 nt, Artificial Sequence
  Description of Artificial Sequence: Synthetic oligonucleotide
cuuccacuaaaagaggguc

SEQ ID NO: 222913 - RNA, 19 nt, Artificial Sequence
  Description of Artificial Sequence: Synthetic oligonucleotide
gaauucacuuuagcuuccg

SEQ ID NO: 222914 - RNA, 19 nt, Artificial Sequence
  Description of Artificial Sequence: Synthetic oligonucleotide
agacuuugccccaugagga

SEQ ID NO: 222915 - RNA, 19 nt, Artificial Sequence
  Description of Artificial Sequence: Synthetic oligonucleotide
agccaauagguagaccaac

SEQ ID NO: 222916 - RNA, 19 nt, Artificial Sequence
  Description of Artificial Sequence: Synthetic oligonucleotide
uaccguagagacauccaaa

SEQ ID NO: 222917 - RNA, 19 nt, Artificial Sequence
  Description of Artificial Sequence: Synthetic oligonucleotide
ggcugaggaaauaagagac

SEQ ID NO: 222918 - RNA, 19 nt, Artificial Sequence
  Description of Artificial Sequence: Synthetic oligonucleotide
aacugugguaggguuauaa

SEQ ID NO: 222919 - RNA, 19 nt, Artificial Sequence
  Description of Artificial Sequence: Synthetic oligonucleotide
ucguaugaguagcccaugu

SEQ ID NO: 222920 - RNA, 19 nt, Artificial Sequence
  Description of Artificial Sequence: Synthetic oligonucleotide
uucugauugcugucaucag

SEQ ID NO: 222921 - RNA, 19 nt, Artificial Sequence
  Description of Artificial Sequence: Synthetic oligonucleotide
uccgggaugugccgcuucg

SEQ ID NO: 222922 - RNA, 19 nt, Artificial Sequence
  Description of Artificial Sequence: Synthetic oligonucleotide
uccacuaaaagagggucaa

SEQ ID NO: 222923 - RNA, 19 nt, Artificial Sequence
  Description of Artificial Sequence: Synthetic oligonucleotide
agauagucgagaaucugcu

SEQ ID NO: 222924 - RNA, 19 nt, Artificial Sequence
  Description of Artificial Sequence: Synthetic oligonucleotide
auauugaaggagccaguau

SEQ ID NO: 222925 - RNA, 19 nt, Artificial Sequence
  Description of Artificial Sequence: Synthetic oligonucleotide
gccgcugccguccagaaag

SEQ ID NO: 222926 - RNA, 19 nt, Artificial Sequence
  Description of Artificial Sequence: Synthetic oligonucleotide
gaagccauuuagaaccuga

SEQ ID NO: 222927 - RNA, 19 nt, Artificial Sequence
  Description of Artificial Sequence: Synthetic oligonucleotide
uuuuagcugucaccccucu

SEQ ID NO: 222928 - RNA, 19 nt, Artificial Sequence
  Description of Artificial Sequence: Synthetic oligonucleotide
caguagaggauuauggucu

SEQ ID NO: 222929 - RNA, 19 nt, Artificial Sequence
  Description of Artificial Sequence: Synthetic oligonucleotide
ucacuuuagcuuccgcauc

SEQ ID NO: 222930 - RNA, 19 nt, Artificial Sequence
  Description of Artificial Sequence: Synthetic oligonucleotide
auagguagaccaacuuuag

SEQ ID NO: 222931 - RNA, 19 nt, Artificial Sequence
  Description of Artificial Sequence: Synthetic oligonucleotide
agcgacaucuuuucacagu

SEQ ID NO: 222932 - RNA, 19 nt, Artificial Sequence
  Description of Artificial Sequence: Synthetic oligonucleotide
aaauaggccuggggacagc

SEQ ID NO: 222933 - RNA, 19 nt, Artificial Sequence
  Description of Artificial Sequence: Synthetic oligonucleotide
gaugugccgcuucggaggc

SEQ ID NO: 222934 - RNA, 19 nt, Artificial Sequence
  Description of Artificial Sequence: Synthetic oligonucleotide
cucaggacacaaucguaug

SEQ ID NO: 222935 - RNA, 19 nt, Artificial Sequence
  Description of Artificial Sequence: Synthetic oligonucleotide
ugaagaggcuugaaaucua

SEQ ID NO: 222936 - RNA, 19 nt, Artificial Sequence
  Description of Artificial Sequence: Synthetic oligonucleotide
gagucaaguuuggggaagg

SEQ ID NO: 222937 - RNA, 19 nt, Artificial Sequence
  Description of Artificial Sequence: Synthetic oligonucleotide
uucuaugccuagguguuac

SEQ ID NO: 222938 - RNA, 19 nt, Artificial Sequence
  Description of Artificial Sequence: Synthetic oligonucleotide
uuuagcugucaccccucug

SEQ ID NO: 222939 - RNA, 19 nt, Artificial Sequence
  Description of Artificial Sequence: Synthetic oligonucleotide
cacgccugaccuucuaacc

SEQ ID NO: 222940 - RNA, 19 nt, Artificial Sequence
  Description of Artificial Sequence: Synthetic oligonucleotide
cucacuuguauuugacuca

SEQ ID NO: 222941 - RNA, 19 nt, Artificial Sequence
  Description of Artificial Sequence: Synthetic oligonucleotide
caucgauucagugugcuga

SEQ ID NO: 222942 - RNA, 19 nt, Artificial Sequence
  Description of Artificial Sequence: Synthetic oligonucleotide
gcuuacuguagggauaggg

SEQ ID NO: 222943 - RNA, 19 nt, Artificial Sequence
  Description of Artificial Sequence: Synthetic oligonucleotide
cuuccucugggugaguuac

SEQ ID NO: 222944 - RNA, 19 nt, Artificial Sequence
  Description of Artificial Sequence: Synthetic oligonucleotide
cugaaugccgcugccgucc

SEQ ID NO: 222945 - RNA, 19 nt, Artificial Sequence
  Description of Artificial Sequence: Synthetic oligonucleotide
accaacuuuagcugguguu

SEQ ID NO: 222946 - RNA, 19 nt, Artificial Sequence
  Description of Artificial Sequence: Synthetic oligonucleotide
aggcuuuaggaaauuccgg

SEQ ID NO: 222947 - RNA, 19 nt, Artificial Sequence
  Description of Artificial Sequence: Synthetic oligonucleotide
gacagagauuugauauugc

SEQ ID NO: 222948 - RNA, 19 nt, Artificial Sequence
  Description of Artificial Sequence: Synthetic oligonucleotide
cauuguggcuguauuguga

SEQ ID NO: 222949 - RNA, 19 nt, Artificial Sequence
  Description of Artificial Sequence: Synthetic oligonucleotide
agaagccaauagguagacc

SEQ ID NO: 222950 - RNA, 19 nt, Artificial Sequence
  Description of Artificial Sequence: Synthetic oligonucleotide
ugacugugggacauguauu

SEQ ID NO: 222951 - RNA, 19 nt, Artificial Sequence
  Description of Artificial Sequence: Synthetic oligonucleotide
uuagaucuuuaauggugua

SEQ ID NO: 222952 - RNA, 19 nt, Artificial Sequence
  Description of Artificial Sequence: Synthetic oligonucleotide
auuuggaggugaugauucu

SEQ ID NO: 222953 - RNA, 19 nt, Artificial Sequence
  Description of Artificial Sequence: Synthetic oligonucleotide
cuugcgcucugcuucucgc

SEQ ID NO: 222954 - RNA, 19 nt, Artificial Sequence
  Description of Artificial Sequence: Synthetic oligonucleotide
ggagaaacucauuuuagcu

SEQ ID NO: 222955 - RNA, 19 nt, Artificial Sequence
  Description of Artificial Sequence: Synthetic oligonucleotide
cugaaagcccaagagcaug

SEQ ID NO: 222956 - RNA, 19 nt, Artificial Sequence
  Description of Artificial Sequence: Synthetic oligonucleotide
gacaggaccuagucucagc

SEQ ID NO: 222957 - RNA, 19 nt, Artificial Sequence
  Description of Artificial Sequence: Synthetic oligonucleotide
ggaugggguuaauuggagg

SEQ ID NO: 222958 - RNA, 19 nt, Artificial Sequence
  Description of Artificial Sequence: Synthetic oligonucleotide
ucucaucgauucagugugc

SEQ ID NO: 222959 - RNA, 19 nt, Artificial Sequence
  Description of Artificial Sequence: Synthetic oligonucleotide
auuauggucuaagccaaaa

SEQ ID NO: 222960 - RNA, 19 nt, Artificial Sequence
  Description of Artificial Sequence: Synthetic oligonucleotide
ggacagagauuugauauug

SEQ ID NO: 222961 - RNA, 19 nt, Artificial Sequence
  Description of Artificial Sequence: Synthetic oligonucleotide
gucuccuauuuugaauggg

SEQ ID NO: 222962 - RNA, 19 nt, Artificial Sequence
  Description of Artificial Sequence: Synthetic oligonucleotide
uagucgagaaucugcucaa

SEQ ID NO: 222963 - RNA, 19 nt, Artificial Sequence
  Description of Artificial Sequence: Synthetic oligonucleotide
aggacacaaucguaugagu

SEQ ID NO: 222964 - RNA, 19 nt, Artificial Sequence
  Description of Artificial Sequence: Synthetic oligonucleotide
aguauggcauuuguaugcu

SEQ ID NO: 222965 - RNA, 19 nt, Artificial Sequence
  Description of Artificial Sequence: Synthetic oligonucleotide
ggucauuguuguguaauag

SEQ ID NO: 222966 - RNA, 19 nt, Artificial Sequence
  Description of Artificial Sequence: Synthetic oligonucleotide
gauuagugcugagugacua

SEQ ID NO: 222967 - RNA, 19 nt, Artificial Sequence
  Description of Artificial Sequence: Synthetic oligonucleotide
uucaagaacuggggauuag

SEQ ID NO: 222968 - RNA, 19 nt, Artificial Sequence
  Description of Artificial Sequence: Synthetic oligonucleotide
cugccguccagaaagcuga

SEQ ID NO: 222969 - RNA, 19 nt, Artificial Sequence
  Description of Artificial Sequence: Synthetic oligonucleotide
ugugccgcuucggaggcag

SEQ ID NO: 222970 - RNA, 19 nt, Artificial Sequence
  Description of Artificial Sequence: Synthetic oligonucleotide
gguuucuaugccuaggugu

SEQ ID NO: 222971 - RNA, 19 nt, Artificial Sequence
  Description of Artificial Sequence: Synthetic oligonucleotide
uagaaccugaaugccgcug

SEQ ID NO: 222972 - RNA, 19 nt, Artificial Sequence
  Description of Artificial Sequence: Synthetic oligonucleotide
cuaugaaaagugcucgcaa

SEQ ID NO: 222973 - RNA, 19 nt, Artificial Sequence
  Description of Artificial Sequence: Synthetic oligonucleotide
augccuagguguuacucau

SEQ ID NO: 222974 - RNA, 19 nt, Artificial Sequence
  Description of Artificial Sequence: Synthetic oligonucleotide
gccauuagguuuaugaaga

SEQ ID NO: 222975 - RNA, 19 nt, Artificial Sequence
  Description of Artificial Sequence: Synthetic oligonucleotide
uuagaaccugaaugccgcu

SEQ ID NO: 222976 - RNA, 19 nt, Artificial Sequence
  Description of Artificial Sequence: Synthetic oligonucleotide
gcuguauugugagucuugg

SEQ ID NO: 222977 - RNA, 19 nt, Artificial Sequence
  Description of Artificial Sequence: Synthetic oligonucleotide
aggccaaugcgggaaggac

SEQ ID NO: 222978 - RNA, 19 nt, Artificial Sequence
  Description of Artificial Sequence: Synthetic oligonucleotide
uggucauuguuguguaaua

SEQ ID NO: 222979 - RNA, 19 nt, Artificial Sequence
  Description of Artificial Sequence: Synthetic oligonucleotide
gucauacugcaccucucug

SEQ ID NO: 222980 - RNA, 19 nt, Artificial Sequence
  Description of Artificial Sequence: Synthetic oligonucleotide
ccagauuaucaaauggguc

SEQ ID NO: 222981 - RNA, 19 nt, Artificial Sequence
  Description of Artificial Sequence: Synthetic oligonucleotide
cugauaaccuguaagcaau

SEQ ID NO: 222982 - RNA, 19 nt, Artificial Sequence
  Description of Artificial Sequence: Synthetic oligonucleotide
guaccguagagacauccaa

SEQ ID NO: 222983 - RNA, 19 nt, Artificial Sequence
  Description of Artificial Sequence: Synthetic oligonucleotide
caaauaggccuggggacag

SEQ ID NO: 222984 - RNA, 19 nt, Artificial Sequence
  Description of Artificial Sequence: Synthetic oligonucleotide
ccaaagagugguuucuaug

SEQ ID NO: 222985 - RNA, 19 nt, Artificial Sequence
  Description of Artificial Sequence: Synthetic oligonucleotide
gccuagguguuacucauug

SEQ ID NO: 222986 - RNA, 19 nt, Artificial Sequence
  Description of Artificial Sequence: Synthetic oligonucleotide
cucugauaaccuguaagca

SEQ ID NO: 222987 - RNA, 19 nt, Artificial Sequence
  Description of Artificial Sequence: Synthetic oligonucleotide
gaccuccucguccuguaac

SEQ ID NO: 222988 - RNA, 19 nt, Artificial Sequence
  Description of Artificial Sequence: Synthetic oligonucleotide
ugcuuuugugugggguggg

SEQ ID NO: 222989 - RNA, 19 nt, Artificial Sequence
  Description of Artificial Sequence: Synthetic oligonucleotide
aggaaauaagagaccccag

SEQ ID NO: 222990 - RNA, 19 nt, Artificial Sequence
  Description of Artificial Sequence: Synthetic oligonucleotide
cuaugccuagguguuacuc

SEQ ID NO: 222991 - RNA, 19 nt, Artificial Sequence
  Description of Artificial Sequence: Synthetic oligonucleotide
uguuacucauugugucauc

SEQ ID NO: 222992 - RNA, 19 nt, Artificial Sequence
  Description of Artificial Sequence: Synthetic oligonucleotide
augggguuaauuggaggug

SEQ ID NO: 222993 - RNA, 19 nt, Artificial Sequence
  Description of Artificial Sequence: Synthetic oligonucleotide
gaacuggggauuagugcug

SEQ ID NO: 222994 - RNA, 19 nt, Artificial Sequence
  Description of Artificial Sequence: Synthetic oligonucleotide
aguagaggauuauggucua

SEQ ID NO: 222995 - RNA, 19 nt, Artificial Sequence
  Description of Artificial Sequence: Synthetic oligonucleotide
ucuaugccuagguguuacu

SEQ ID NO: 222996 - RNA, 19 nt, Artificial Sequence
  Description of Artificial Sequence: Synthetic oligonucleotide
gaaauuuagaggggugacu

SEQ ID NO: 222997 - RNA, 19 nt, Artificial Sequence
  Description of Artificial Sequence: Synthetic oligonucleotide
gucaccguagccuccgcca

SEQ ID NO: 222998 - RNA, 19 nt, Artificial Sequence
  Description of Artificial Sequence: Synthetic oligonucleotide
cagcgacaucuuuucacag

SEQ ID NO: 222999 - RNA, 19 nt, Artificial Sequence
  Description of Artificial Sequence: Synthetic oligonucleotide
guaguucucugaagaauca

SEQ ID NO: 223000 - RNA, 19 nt, Artificial Sequence
  Description of Artificial Sequence: Synthetic oligonucleotide
aagccaauagguagaccaa

SEQ ID NO: 223001 - RNA, 19 nt, Artificial Sequence
  Description of Artificial Sequence: Synthetic oligonucleotide
uuugccccaugaggaaaag

SEQ ID NO: 223002 - RNA, 19 nt, Artificial Sequence
  Description of Artificial Sequence: Synthetic oligonucleotide
acugugggacauguauuug

SEQ ID NO: 223003 - RNA, 19 nt, Artificial Sequence
  Description of Artificial Sequence: Synthetic oligonucleotide
auugcuuacuguagggaua

SEQ ID NO: 223004 - RNA, 19 nt, Artificial Sequence
  Description of Artificial Sequence: Synthetic oligonucleotide
ggcaggaugugcuaugaaa

SEQ ID NO: 223005 - RNA, 19 nt, Artificial Sequence
  Description of Artificial Sequence: Synthetic oligonucleotide
uccacgccugaccuucuaa

SEQ ID NO: 223006 - RNA, 19 nt, Artificial Sequence
  Description of Artificial Sequence: Synthetic oligonucleotide
cacucaaugguuuucuuuu

SEQ ID NO: 223007 - RNA, 19 nt, Artificial Sequence
  Description of Artificial Sequence: Synthetic oligonucleotide
acucauugugucauccuaa

SEQ ID NO: 223008 - RNA, 19 nt, Artificial Sequence
  Description of Artificial Sequence: Synthetic oligonucleotide
caacucuauccaccccggg

SEQ ID NO: 223009 - RNA, 19 nt, Artificial Sequence
  Description of Artificial Sequence: Synthetic oligonucleotide
gggacauguauuuggaggu

SEQ ID NO: 223010 - RNA, 19 nt, Artificial Sequence
  Description of Artificial Sequence: Synthetic oligonucleotide
cugccuaugguauggcaaa

SEQ ID NO: 223011 - RNA, 19 nt, Artificial Sequence
  Description of Artificial Sequence: Synthetic oligonucleotide
gacuuugccccaugaggaa

SEQ ID NO: 223012 - RNA, 19 nt, Artificial Sequence
  Description of Artificial Sequence: Synthetic oligonucleotide
caucaagguaacugaaagu

SEQ ID NO: 223013 - RNA, 19 nt, Artificial Sequence
  Description of Artificial Sequence: Synthetic oligonucleotide
ggugaguuacuauccagua

SEQ ID NO: 223014 - RNA, 19 nt, Artificial Sequence
  Description of Artificial Sequence: Synthetic oligonucleotide
gaacugccuagcagaagac

SEQ ID NO: 223015 - RNA, 19 nt, Artificial Sequence
  Description of Artificial Sequence: Synthetic oligonucleotide
cauugccgcucacucggag

SEQ ID NO: 223016 - RNA, 19 nt, Artificial Sequence
  Description of Artificial Sequence: Synthetic oligonucleotide
caggaccuagucucagcug

SEQ ID NO: 223017 - RNA, 19 nt, Artificial Sequence
  Description of Artificial Sequence: Synthetic oligonucleotide
gguuagaguucagucugcc

SEQ ID NO: 223018 - RNA, 19 nt, Artificial Sequence
  Description of Artificial Sequence: Synthetic oligonucleotide
uaaagccauuagguuuaug

SEQ ID NO: 223019 - RNA, 19 nt, Artificial Sequence
  Description of Artificial Sequence: Synthetic oligonucleotide
uuuguaccguagagacauc

SEQ ID NO: 223020 - RNA, 19 nt, Artificial Sequence
  Description of Artificial Sequence: Synthetic oligonucleotide
guguaacacuaaggaaugc

SEQ ID NO: 223021 - RNA, 19 nt, Artificial Sequence
  Description of Artificial Sequence: Synthetic oligonucleotide
ccgaguuggagugaggaug

SEQ ID NO: 223022 - RNA, 19 nt, Artificial Sequence
  Description of Artificial Sequence: Synthetic oligonucleotide
caguaacugagccauuaua

SEQ ID NO: 223023 - RNA, 19 nt, Artificial Sequence
  Description of Artificial Sequence: Synthetic oligonucleotide
gucgagaaucugcucaaua

SEQ ID NO: 223024 - RNA, 19 nt, Artificial Sequence
  Description of Artificial Sequence: Synthetic oligonucleotide
agcccacucaaugguuuuc

SEQ ID NO: 223025 - RNA, 19 nt, Artificial Sequence
  Description of Artificial Sequence: Synthetic oligonucleotide
cuguucaagaacuggggau

SEQ ID NO: 223026 - RNA, 19 nt, Artificial Sequence
  Description of Artificial Sequence: Synthetic oligonucleotide
auccaccccgggccagacc

SEQ ID NO: 223027 - RNA, 19 nt, Artificial Sequence
  Description of Artificial Sequence: Synthetic oligonucleotide
ccaacucuauccaccccgg

SEQ ID NO: 223028 - RNA, 19 nt, Artificial Sequence
  Description of Artificial Sequence: Synthetic oligonucleotide
auggagaagccaauaggua

SEQ ID NO: 223029 - RNA, 19 nt, Artificial Sequence
  Description of Artificial Sequence: Synthetic oligonucleotide
gcuaugaaaagugcucgca

SEQ ID NO: 223030 - RNA, 19 nt, Artificial Sequence
  Description of Artificial Sequence: Synthetic oligonucleotide
aucguaugaguagcccaug

SEQ ID NO: 223031 - RNA, 19 nt, Artificial Sequence
  Description of Artificial Sequence: Synthetic oligonucleotide
gcgggaaggacacuucuca

SEQ ID NO: 223032 - RNA, 19 nt, Artificial Sequence
  Description of Artificial Sequence: Synthetic oligonucleotide
gcauuguggcuguauugug

SEQ ID NO: 223033 - RNA, 19 nt, Artificial Sequence
  Description of Artificial Sequence: Synthetic oligonucleotide
cugagaaauuuagaggggu

SEQ ID NO: 223034 - RNA, 19 nt, Artificial Sequence
  Description of Artificial Sequence: Synthetic oligonucleotide
ucgcaagcuugacugucuu

SEQ ID NO: 223035 - RNA, 19 nt, Artificial Sequence
  Description of Artificial Sequence: Synthetic oligonucleotide
cuguauugugagucuugga

SEQ ID NO: 223036 - RNA, 19 nt, Artificial Sequence
  Description of Artificial Sequence: Synthetic oligonucleotide
guuagaguucagucugccu

SEQ ID NO: 223037 - RNA, 19 nt, Artificial Sequence
  Description of Artificial Sequence: Synthetic oligonucleotide
gaggcaggaugugcuauga

SEQ ID NO: 223038 - RNA, 19 nt, Artificial Sequence
  Description of Artificial Sequence: Synthetic oligonucleotide
ggcacuacugcugacccga

SEQ ID NO: 223039 - RNA, 19 nt, Artificial Sequence
  Description of Artificial Sequence: Synthetic oligonucleotide
cugggugaguuacuaucca

SEQ ID NO: 223040 - RNA, 19 nt, Artificial Sequence
  Description of Artificial Sequence: Synthetic oligonucleotide
ccuguaagcaaucaggcau

SEQ ID NO: 223041 - RNA, 19 nt, Artificial Sequence
  Description of Artificial Sequence: Synthetic oligonucleotide
auuuugaaugggacaucau

SEQ ID NO: 223042 - RNA, 19 nt, Artificial Sequence
  Description of Artificial Sequence: Synthetic oligonucleotide
uuucuaugccuagguguua

SEQ ID NO: 223043 - RNA, 19 nt, Artificial Sequence
  Description of Artificial Sequence: Synthetic oligonucleotide
ggcaugggcacuugugaca

SEQ ID NO: 223044 - RNA, 19 nt, Artificial Sequence
  Description of Artificial Sequence: Synthetic oligonucleotide
ugcuuacuguagggauagg

SEQ ID NO: 223045 - RNA, 19 nt, Artificial Sequence
  Description of Artificial Sequence: Synthetic oligonucleotide
augucaugguuggcacuuc

SEQ ID NO: 223046 - RNA, 19 nt, Artificial Sequence
  Description of Artificial Sequence: Synthetic oligonucleotide
ugacuagucauggccuguu

SEQ ID NO: 223047 - RNA, 19 nt, Artificial Sequence
  Description of Artificial Sequence: Synthetic oligonucleotide
gguaggguuauaaagccau

SEQ ID NO: 223048 - RNA, 19 nt, Artificial Sequence
  Description of Artificial Sequence: Synthetic oligonucleotide
guauuugacucagguuaga

SEQ ID NO: 223049 - RNA, 19 nt, Artificial Sequence
  Description of Artificial Sequence: Synthetic oligonucleotide
agaguucagucugccuaug

SEQ ID NO: 223050 - RNA, 19 nt, Artificial Sequence
  Description of Artificial Sequence: Synthetic oligonucleotide
gcuaagaaccuucugcuuu

SEQ ID NO: 223051 - RNA, 19 nt, Artificial Sequence
  Description of Artificial Sequence: Synthetic oligonucleotide
ggcagagacuguucaagaa

SEQ ID NO: 223052 - RNA, 19 nt, Artificial Sequence
  Description of Artificial Sequence: Synthetic oligonucleotide
gauuauggucuaagccaaa

SEQ ID NO: 223053 - RNA, 19 nt, Artificial Sequence
  Description of Artificial Sequence: Synthetic oligonucleotide
uugccccaugaggaaaagu

SEQ ID NO: 223054 - RNA, 19 nt, Artificial Sequence
  Description of Artificial Sequence: Synthetic oligonucleotide
gaccaacuuuagcuggugu

SEQ ID NO: 223055 - RNA, 19 nt, Artificial Sequence
  Description of Artificial Sequence: Synthetic oligonucleotide
ggggauuagugcugaguga

SEQ ID NO: 223056 - RNA, 19 nt, Artificial Sequence
  Description of Artificial Sequence: Synthetic oligonucleotide
gaguuacuauccaguaacu

SEQ ID NO: 223057 - RNA, 19 nt, Artificial Sequence
  Description of Artificial Sequence: Synthetic oligonucleotide
cauuauagguccagugguu

SEQ ID NO: 223058 - RNA, 19 nt, Artificial Sequence
  Description of Artificial Sequence: Synthetic oligonucleotide
uuccgggaugugccgcuuc

SEQ ID NO: 223059 - RNA, 19 nt, Artificial Sequence
  Description of Artificial Sequence: Synthetic oligonucleotide
agcccgggccaugaggucu

SEQ ID NO: 223060 - RNA, 19 nt, Artificial Sequence
  Description of Artificial Sequence: Synthetic oligonucleotide
agaccccagaaagauccaa

SEQ ID NO: 223061 - RNA, 19 nt, Artificial Sequence
  Description of Artificial Sequence: Synthetic oligonucleotide
ucuccacgccugaccuucu

SEQ ID NO: 223062 - RNA, 19 nt, Artificial Sequence
  Description of Artificial Sequence: Synthetic oligonucleotide
ccauuauagguccaguggu

SEQ ID NO: 223063 - RNA, 19 nt, Artificial Sequence
  Description of Artificial Sequence: Synthetic oligonucleotide
ggccagaccgucaccguag

SEQ ID NO: 223064 - RNA, 19 nt, Artificial Sequence
  Description of Artificial Sequence: Synthetic oligonucleotide
cagaccgucaccguagccu

SEQ ID NO: 223065 - RNA, 19 nt, Artificial Sequence
  Description of Artificial Sequence: Synthetic oligonucleotide
ggcauuguggcuguauugu

SEQ ID NO: 223066 - RNA, 19 nt, Artificial Sequence
  Description of Artificial Sequence: Synthetic oligonucleotide
ccguagagacauccaaaac

SEQ ID NO: 223067 - RNA, 19 nt, Artificial Sequence
  Description of Artificial Sequence: Synthetic oligonucleotide
guguuacucauugugucau

SEQ ID NO: 223068 - RNA, 19 nt, Artificial Sequence
  Description of Artificial Sequence: Synthetic oligonucleotide
ccgccaguaccacagccgc

SEQ ID NO: 223069 - RNA, 19 nt, Artificial Sequence
  Description of Artificial Sequence: Synthetic oligonucleotide
ugguuccuaccagaauguu

SEQ ID NO: 223070 - RNA, 19 nt, Artificial Sequence
  Description of Artificial Sequence: Synthetic oligonucleotide
ugccguccagaaagcugaa

SEQ ID NO: 223071 - RNA, 19 nt, Artificial Sequence
  Description of Artificial Sequence: Synthetic oligonucleotide
cuggucauuguuguguaau

SEQ ID NO: 223072 - RNA, 19 nt, Artificial Sequence
  Description of Artificial Sequence: Synthetic oligonucleotide
ggccaaugcgggaaggaca

SEQ ID NO: 223073 - RNA, 19 nt, Artificial Sequence
  Description of Artificial Sequence: Synthetic oligonucleotide
cuaagguugcuugcuccaa

SEQ ID NO: 223074 - RNA, 19 nt, Artificial Sequence
  Description of Artificial Sequence: Synthetic oligonucleotide
cgccugaccuucuaacccc

SEQ ID NO: 223075 - RNA, 19 nt, Artificial Sequence
  Description of Artificial Sequence: Synthetic oligonucleotide
uauccaccccgggccagac

SEQ ID NO: 223076 - RNA, 19 nt, Artificial Sequence
  Description of Artificial Sequence: Synthetic oligonucleotide
uugggccggggcucacaga

SEQ ID NO: 223077 - RNA, 19 nt, Artificial Sequence
  Description of Artificial Sequence: Synthetic oligonucleotide
auaggccuggggacagcug

SEQ ID NO: 223078 - RNA, 19 nt, Artificial Sequence
  Description of Artificial Sequence: Synthetic oligonucleotide
gagaccccagaaagaucca

SEQ ID NO: 223079 - RNA, 19 nt, Artificial Sequence
  Description of Artificial Sequence: Synthetic oligonucleotide
gugcaucuuuuguaccgua

SEQ ID NO: 223080 - RNA, 19 nt, Artificial Sequence
  Description of Artificial Sequence: Synthetic oligonucleotide
cacuugugacacugagaaa

SEQ ID NO: 223081 - RNA, 19 nt, Artificial Sequence
  Description of Artificial Sequence: Synthetic oligonucleotide
ccccuagggagaacgaaca

SEQ ID NO: 223082 - RNA, 19 nt, Artificial Sequence
  Description of Artificial Sequence: Synthetic oligonucleotide
caguccccgccuagcuccc

SEQ ID NO: 223083 - RNA, 19 nt, Artificial Sequence
  Description of Artificial Sequence: Synthetic oligonucleotide
cucgcugagcuucuuggau

SEQ ID NO: 223084 - RNA, 19 nt, Artificial Sequence
  Description of Artificial Sequence: Synthetic oligonucleotide
ugucaccccucugggccac

SEQ ID NO: 223085 - RNA, 19 nt, Artificial Sequence
  Description of Artificial Sequence: Synthetic oligonucleotide
gccccuagggagaacgaac

SEQ ID NO: 223086 - RNA, 19 nt, Artificial Sequence
  Description of Artificial Sequence: Synthetic oligonucleotide
ggaccuagucucagcuggc

SEQ ID NO: 223087 - RNA, 19 nt, Artificial Sequence
  Description of Artificial Sequence: Synthetic oligonucleotide
gcuguaagcuggcaaggau

SEQ ID NO: 223088 - RNA, 19 nt, Artificial Sequence
  Description of Artificial Sequence: Synthetic oligonucleotide
cccuagggagaacgaacac

SEQ ID NO: 223089 - RNA, 19 nt, Artificial Sequence
  Description of Artificial Sequence: Synthetic oligonucleotide
ccaacuucuuagaagccau

SEQ ID NO: 223090 - RNA, 19 nt, Artificial Sequence
  Description of Artificial Sequence: Synthetic oligonucleotide
gccagaccgucaccguagc

SEQ ID NO: 223091 - RNA, 19 nt, Artificial Sequence
  Description of Artificial Sequence: Synthetic oligonucleotide
caaugcgggaaggacacuu

SEQ ID NO: 223092 - RNA, 19 nt, Artificial Sequence
  Description of Artificial Sequence: Synthetic oligonucleotide
cccgccuagcucccgcugc

SEQ ID NO: 223093 - RNA, 19 nt, Artificial Sequence
  Description of Artificial Sequence: Synthetic oligonucleotide
cucagcgcagggacuccaa

SEQ ID NO: 223094 - RNA, 19 nt, Artificial Sequence
  Description of Artificial Sequence: Synthetic oligonucleotide
ccgcuucggaggcaggaug

SEQ ID NO: 223095 - RNA, 19 nt, Artificial Sequence
  Description of Artificial Sequence: Synthetic oligonucleotide
acauugccgcucacucgga

SEQ ID NO: 223096 - RNA, 19 nt, Artificial Sequence
  Description of Artificial Sequence: Synthetic oligonucleotide
gugacuagucauggccugu

SEQ ID NO: 223097 - RNA, 19 nt, Artificial Sequence
  Description of Artificial Sequence: Synthetic oligonucleotide
cuauccaccccgggccaga

SEQ ID NO: 223098 - RNA, 19 nt, Artificial Sequence
  Description of Artificial Sequence: Synthetic oligonucleotide
gguuccuaccagaauguuu

SEQ ID NO: 223099 - RNA, 19 nt, Artificial Sequence
  Description of Artificial Sequence: Synthetic oligonucleotide
gggccacucuuagaauuca

SEQ ID NO: 223100 - RNA, 19 nt, Artificial Sequence
  Description of Artificial Sequence: Synthetic oligonucleotide
cacuggcacugcuuugggu

SEQ ID NO: 223101 - RNA, 19 nt, Artificial Sequence
  Description of Artificial Sequence: Synthetic oligonucleotide
ccgggcuuccucuggguga

SEQ ID NO: 223102 - RNA, 19 nt, Artificial Sequence
  Description of Artificial Sequence: Synthetic oligonucleotide
ccgccuagcucccgcugcc

SEQ ID NO: 223103 - RNA, 19 nt, Artificial Sequence
  Description of Artificial Sequence: Synthetic oligonucleotide
cgucaccguagccuccgcc

SEQ ID NO: 223104 - RNA, 19 nt, Artificial Sequence
  Description of Artificial Sequence: Synthetic oligonucleotide
cuagcucccgcugccccua

SEQ ID NO: 223105 - RNA, 19 nt, Artificial Sequence
  Description of Artificial Sequence: Synthetic oligonucleotide
gcucaguccccgccuagcu

SEQ ID NO: 223106 - RNA, 19 nt, Artificial Sequence
  Description of Artificial Sequence: Synthetic oligonucleotide
ccaacuuuagcugguguuu

SEQ ID NO: 223107 - RNA, 19 nt, Artificial Sequence
  Description of Artificial Sequence: Synthetic oligonucleotide
augugccgcuucggaggca

SEQ ID NO: 223108 - RNA, 19 nt, Artificial Sequence
  Description of Artificial Sequence: Synthetic oligonucleotide
ccgggaugugccgcuucgg

SEQ ID NO: 223109 - RNA, 19 nt, Artificial Sequence
  Description of Artificial Sequence: Synthetic oligonucleotide
ccuagguguuacucauugu

SEQ ID NO: 223110 - RNA, 19 nt, Artificial Sequence
  Description of Artificial Sequence: Synthetic oligonucleotide
cagcccacucaaugguuuu

SEQ ID NO: 223111 - RNA, 19 nt, Artificial Sequence
  Description of Artificial Sequence: Synthetic oligonucleotide
cuccacgccugaccuucua

SEQ ID NO: 223112 - RNA, 19 nt, Artificial Sequence
  Description of Artificial Sequence: Synthetic oligonucleotide
gcacuucugugccacuguu

SEQ ID NO: 223113 - RNA, 19 nt, Artificial Sequence
  Description of Artificial Sequence: Synthetic oligonucleotide
cgggaaggacacuucucaa

SEQ ID NO: 223114 - RNA, 19 nt, Artificial Sequence
  Description of Artificial Sequence: Synthetic oligonucleotide
gccguccagaaagcugaaa

SEQ ID NO: 223115 - RNA, 19 nt, Artificial Sequence
  Description of Artificial Sequence: Synthetic oligonucleotide
ccccgccuagcucccgcug

SEQ ID NO: 223116 - RNA, 19 nt, Artificial Sequence
  Description of Artificial Sequence: Synthetic oligonucleotide
cguaugaguagcccauguu

SEQ ID NO: 223117 - RNA, 19 nt, Artificial Sequence
  Description of Artificial Sequence: Synthetic oligonucleotide
caacugugguaggguuaua

SEQ ID NO: 223118 - RNA, 19 nt, Artificial Sequence
  Description of Artificial Sequence: Synthetic oligonucleotide
ccucagcgcagggacucca

SEQ ID NO: 223119 - RNA, 19 nt, Artificial Sequence
  Description of Artificial Sequence: Synthetic oligonucleotide
ggggugggcuaagaaccuu

SEQ ID NO: 223120 - RNA, 19 nt, Artificial Sequence
  Description of Artificial Sequence: Synthetic oligonucleotide
gccgcuucggaggcaggau

SEQ ID NO: 223121 - RNA, 19 nt, Artificial Sequence
  Description of Artificial Sequence: Synthetic oligonucleotide
gcccugcacaguagaggau

SEQ ID NO: 223122 - RNA, 19 nt, Artificial Sequence
  Description of Artificial Sequence: Synthetic oligonucleotide
ccaaugcgggaaggacacu

SEQ ID NO: 223123 - RNA, 19 nt, Artificial Sequence
  Description of Artificial Sequence: Synthetic oligonucleotide
cccgggccaugaggucuuc

SEQ ID NO: 223124 - RNA, 19 nt, Artificial Sequence
  Description of Artificial Sequence: Synthetic oligonucleotide
aauaugaccgcugugauac

SEQ ID NO: 223125 - RNA, 19 nt, Artificial Sequence
  Description of Artificial Sequence: Synthetic oligonucleotide
uaauauacggauaauguug

SEQ ID NO: 223126 - RNA, 19 nt, Artificial Sequence
  Description of Artificial Sequence: Synthetic oligonucleotide
aaugauacaguacacggca

SEQ ID NO: 223127 - RNA, 19 nt, Artificial Sequence
  Description of Artificial Sequence: Synthetic oligonucleotide
agacgaacaaaguucagcc

SEQ ID NO: 223128 - RNA, 19 nt, Artificial Sequence
  Description of Artificial Sequence: Synthetic oligonucleotide
acuuauuugcgcuuauucc

SEQ ID NO: 223129 - RNA, 19 nt, Artificial Sequence
  Description of Artificial Sequence: Synthetic oligonucleotide
auaauguugagcccagacc

SEQ ID NO: 223130 - RNA, 19 nt, Artificial Sequence
  Description of Artificial Sequence: Synthetic oligonucleotide
ucgacuuucuaucacaagc

SEQ ID NO: 223131 - RNA, 19 nt, Artificial Sequence
  Description of Artificial Sequence: Synthetic oligonucleotide
auaccaaagguccucuucc

SEQ ID NO: 223132 - RNA, 19 nt, Artificial Sequence
  Description of Artificial Sequence: Synthetic oligonucleotide
uuaucaaugacuccaggcu

SEQ ID NO: 223133 - RNA, 19 nt, Artificial Sequence
  Description of Artificial Sequence: Synthetic oligonucleotide
gcaguaauaaauuagcgcc

SEQ ID NO: 223134 - RNA, 19 nt, Artificial Sequence
  Description of Artificial Sequence: Synthetic oligonucleotide
ucguuguagauauaaaucu

SEQ ID NO: 223135 - RNA, 19 nt, Artificial Sequence
  Description of Artificial Sequence: Synthetic oligonucleotide
aaacugcgcagucaggaac

SEQ ID NO: 223136 - RNA, 19 nt, Artificial Sequence
  Description of Artificial Sequence: Synthetic oligonucleotide
aucauaucaaacucucgac

SEQ ID NO: 223137 - RNA, 19 nt, Artificial Sequence
  Description of Artificial Sequence: Synthetic oligonucleotide
cuuucuaucacaagcucgc

SEQ ID NO: 223138 - RNA, 19 nt, Artificial Sequence
  Description of Artificial Sequence: Synthetic oligonucleotide
aacaaaguucagccgucgc

SEQ ID NO: 223139 - RNA, 19 nt, Artificial Sequence
  Description of Artificial Sequence: Synthetic oligonucleotide
auuaauauacggauaaugu

SEQ ID NO: 223140 - RNA, 19 nt, Artificial Sequence
  Description of Artificial Sequence: Synthetic oligonucleotide
uaagguaucauuccagcaa

SEQ ID NO: 223141 - RNA, 19 nt, Artificial Sequence
  Description of Artificial Sequence: Synthetic oligonucleotide
acuguuucggcucuucagg

SEQ ID NO: 223142 - RNA, 19 nt, Artificial Sequence
  Description of Artificial Sequence: Synthetic oligonucleotide
ugcgcuuauucccugagcc

SEQ ID NO: 223143 - RNA, 19 nt, Artificial Sequence
  Description of Artificial Sequence: Synthetic oligonucleotide
ucauaucaaacucucgacu

SEQ ID NO: 223144 - RNA, 19 nt, Artificial Sequence
  Description of Artificial Sequence: Synthetic oligonucleotide
uguuuaggaaacuucgaac

SEQ ID NO: 223145 - RNA, 19 nt, Artificial Sequence
  Description of Artificial Sequence: Synthetic oligonucleotide
uguaaauuccuuuccacau

SEQ ID NO: 223146 - RNA, 19 nt, Artificial Sequence
  Description of Artificial Sequence: Synthetic oligonucleotide
uuuaggaaacuucgaacca

SEQ ID NO: 223147 - RNA, 19 nt, Artificial Sequence
  Description of Artificial Sequence: Synthetic oligonucleotide
uuaauauacggauaauguu

SEQ ID NO: 223148 - RNA, 19 nt, Artificial Sequence
  Description of Artificial Sequence: Synthetic oligonucleotide
acugauguaacucggcuca

SEQ ID NO: 223149 - RNA, 19 nt, Artificial Sequence
  Description of Artificial Sequence: Synthetic oligonucleotide
uuuaaccacagguaguccu

SEQ ID NO: 223150 - RNA, 19 nt, Artificial Sequence
  Description of Artificial Sequence: Synthetic oligonucleotide
aauauacggauaauguuga

SEQ ID NO: 223151 - RNA, 19 nt, Artificial Sequence
  Description of Artificial Sequence: Synthetic oligonucleotide
gauaauguugagcccagac

SEQ ID NO: 223152 - RNA, 19 nt, Artificial Sequence
  Description of Artificial Sequence: Synthetic oligonucleotide
aauaccacaucugucauuu

SEQ ID NO: 223153 - RNA, 19 nt, Artificial Sequence
  Description of Artificial Sequence: Synthetic oligonucleotide
uauacggauaauguugagc

SEQ ID NO: 223154 - RNA, 19 nt, Artificial Sequence
  Description of Artificial Sequence: Synthetic oligonucleotide
uucaaaaguggucgcagca

SEQ ID NO: 223155 - RNA, 19 nt, Artificial Sequence
  Description of Artificial Sequence: Synthetic oligonucleotide
gaugccuugacauccgcug

SEQ ID NO: 223156 - RNA, 19 nt, Artificial Sequence
  Description of Artificial Sequence: Synthetic oligonucleotide
ugggaugugcgugugaggg

SEQ ID NO: 223157 - RNA, 19 nt, Artificial Sequence
  Description of Artificial Sequence: Synthetic oligonucleotide
ucagccgucgcaugcaggg

SEQ ID NO: 223158 - RNA, 19 nt, Artificial Sequence
  Description of Artificial Sequence: Synthetic oligonucleotide
ugucaaguccccgugaacc

SEQ ID NO: 223159 - RNA, 19 nt, Artificial Sequence
  Description of Artificial Sequence: Synthetic oligonucleotide
uuagcgcccagacaggaug

SEQ ID NO: 223160 - RNA, 19 nt, Artificial Sequence
  Description of Artificial Sequence: Synthetic oligonucleotide
acgaacaaaguucagccgu

SEQ ID NO: 223161 - RNA, 19 nt, Artificial Sequence
  Description of Artificial Sequence: Synthetic oligonucleotide
cuuauagggaucuguguug

SEQ ID NO: 223162 - RNA, 19 nt, Artificial Sequence
  Description of Artificial Sequence: Synthetic oligonucleotide
gauaugucaaguccccgug

SEQ ID NO: 223163 - RNA, 19 nt, Artificial Sequence
  Description of Artificial Sequence: Synthetic oligonucleotide
aucucugcgacagaugaac

SEQ ID NO: 223164 - RNA, 19 nt, Artificial Sequence
  Description of Artificial Sequence: Synthetic oligonucleotide
gugauuaauauacggauaa

SEQ ID NO: 223165 - RNA, 19 nt, Artificial Sequence
  Description of Artificial Sequence: Synthetic oligonucleotide
gacgaacaaaguucagccg

SEQ ID NO: 223166 - RNA, 19 nt, Artificial Sequence
  Description of Artificial Sequence: Synthetic oligonucleotide
ucuauccuugcuauucaug

SEQ ID NO: 223167 - RNA, 19 nt, Artificial Sequence
  Description of Artificial Sequence: Synthetic oligonucleotide
ucggugaugucacaccugc

SEQ ID NO: 223168 - RNA, 19 nt, Artificial Sequence
  Description of Artificial Sequence: Synthetic oligonucleotide
acgugauuaauauacggau

SEQ ID NO: 223169 - RNA, 19 nt, Artificial Sequence
  Description of Artificial Sequence: Synthetic oligonucleotide
uguggaagcucggagauac

SEQ ID NO: 223170 - RNA, 19 nt, Artificial Sequence
  Description of Artificial Sequence: Synthetic oligonucleotide
cacuuaauucaugaggacc

SEQ ID NO: 223171 - RNA, 19 nt, Artificial Sequence
  Description of Artificial Sequence: Synthetic oligonucleotide
acuuaauucaugaggaccu

SEQ ID NO: 223172 - RNA, 19 nt, Artificial Sequence
  Description of Artificial Sequence: Synthetic oligonucleotide
uugagccucuuaaacuggg

SEQ ID NO: 223173 - RNA, 19 nt, Artificial Sequence
  Description of Artificial Sequence: Synthetic oligonucleotide
acacggcacgcuuauaggg

SEQ ID NO: 223174 - RNA, 19 nt, Artificial Sequence
  Description of Artificial Sequence: Synthetic oligonucleotide
ucaaacugcgcagucagga

SEQ ID NO: 223175 - RNA, 19 nt, Artificial Sequence
  Description of Artificial Sequence: Synthetic oligonucleotide
uuauaacucugcucaaggu

SEQ ID NO: 223176 - RNA, 19 nt, Artificial Sequence
  Description of Artificial Sequence: Synthetic oligonucleotide
auagggaucuguguuguuc

SEQ ID NO: 223177 - RNA, 19 nt, Artificial Sequence
  Description of Artificial Sequence: Synthetic oligonucleotide
aaugacuccaggcuuucua

SEQ ID NO: 223178 - RNA, 19 nt, Artificial Sequence
  Description of Artificial Sequence: Synthetic oligonucleotide
uccgucauucucuaguuuc

SEQ ID NO: 223179 - RNA, 19 nt, Artificial Sequence
  Description of Artificial Sequence: Synthetic oligonucleotide
cucggagauaccuucaguc

SEQ ID NO: 223180 - RNA, 19 nt, Artificial Sequence
  Description of Artificial Sequence: Synthetic oligonucleotide
caucgauucucgaugguac

SEQ ID NO: 223181 - RNA, 19 nt, Artificial Sequence
  Description of Artificial Sequence: Synthetic oligonucleotide
acuuuguugauaauuggcu

SEQ ID NO: 223182 - RNA, 19 nt, Artificial Sequence
  Description of Artificial Sequence: Synthetic oligonucleotide
auugucggugaugucacac

SEQ ID NO: 223183 - RNA, 19 nt, Artificial Sequence
  Description of Artificial Sequence: Synthetic oligonucleotide
ggcaguuuaauguuuagga

SEQ ID NO: 223184 - RNA, 19 nt, Artificial Sequence
  Description of Artificial Sequence: Synthetic oligonucleotide
auguuuaggaaacuucgaa

SEQ ID NO: 223185 - RNA, 19 nt, Artificial Sequence
  Description of Artificial Sequence: Synthetic oligonucleotide
ucaaugacucgcuggggcc

SEQ ID NO: 223186 - RNA, 19 nt, Artificial Sequence
  Description of Artificial Sequence: Synthetic oligonucleotide
aggaucauaucaaacucuc

SEQ ID NO: 223187 - RNA, 19 nt, Artificial Sequence
  Description of Artificial Sequence: Synthetic oligonucleotide
uuugcgcuuauucccugag

SEQ ID NO: 223188 - RNA, 19 nt, Artificial Sequence
  Description of Artificial Sequence: Synthetic oligonucleotide
ucgacugacgacuugugau

SEQ ID NO: 223189 - RNA, 19 nt, Artificial Sequence
  Description of Artificial Sequence: Synthetic oligonucleotide
acuucgcucugauugucgg

SEQ ID NO: 223190 - RNA, 19 nt, Artificial Sequence
  Description of Artificial Sequence: Synthetic oligonucleotide
aacucucgacuuucuauca

SEQ ID NO: 223191 - RNA, 19 nt, Artificial Sequence
  Description of Artificial Sequence: Synthetic oligonucleotide
uacuucgcucugauugucg

SEQ ID NO: 223192 - RNA, 19 nt, Artificial Sequence
  Description of Artificial Sequence: Synthetic oligonucleotide
cugaggacuuuaaaagcag

SEQ ID NO: 223193 - RNA, 19 nt, Artificial Sequence
  Description of Artificial Sequence: Synthetic oligonucleotide
guugauaauuggcuuugug

SEQ ID NO: 223194 - RNA, 19 nt, Artificial Sequence
  Description of Artificial Sequence: Synthetic oligonucleotide
uucaagcggucaaugauau

SEQ ID NO: 223195 - RNA, 19 nt, Artificial Sequence
  Description of Artificial Sequence: Synthetic oligonucleotide
guauccauuggagaugcag

SEQ ID NO: 223196 - RNA, 19 nt, Artificial Sequence
  Description of Artificial Sequence: Synthetic oligonucleotide
augcaguaauaaauuagcg

SEQ ID NO: 223197 - RNA, 19 nt, Artificial Sequence
  Description of Artificial Sequence: Synthetic oligonucleotide
cuugagccucuuaaacugg

SEQ ID NO: 223198 - RNA, 19 nt, Artificial Sequence
  Description of Artificial Sequence: Synthetic oligonucleotide
augugggauaugucaaguc

SEQ ID NO: 223199 - RNA, 19 nt, Artificial Sequence
  Description of Artificial Sequence: Synthetic oligonucleotide
aaaaguggucgcagcacuc

SEQ ID NO: 223200 - RNA, 19 nt, Artificial Sequence
  Description of Artificial Sequence: Synthetic oligonucleotide
ugucggugaugucacaccu

SEQ ID NO: 223201 - RNA, 19 nt, Artificial Sequence
  Description of Artificial Sequence: Synthetic oligonucleotide
acucucgacuuucuaucac

SEQ ID NO: 223202 - RNA, 19 nt, Artificial Sequence
  Description of Artificial Sequence: Synthetic oligonucleotide
gagccucuuaaacugggug

SEQ ID NO: 223203 - RNA, 19 nt, Artificial Sequence
  Description of Artificial Sequence: Synthetic oligonucleotide
ucuacacuguuucggcucu

SEQ ID NO: 223204 - RNA, 19 nt, Artificial Sequence
  Description of Artificial Sequence: Synthetic oligonucleotide
aaauuagcgcccagacagg

SEQ ID NO: 223205 - RNA, 19 nt, Artificial Sequence
  Description of Artificial Sequence: Synthetic oligonucleotide
cacuucuacacuguuucgg

SEQ ID NO: 223206 - RNA, 19 nt, Artificial Sequence
  Description of Artificial Sequence: Synthetic oligonucleotide
aagguaucccaaggccugc

SEQ ID NO: 223207 - RNA, 19 nt, Artificial Sequence
  Description of Artificial Sequence: Synthetic oligonucleotide
cacgugauuaauauacgga

SEQ ID NO: 223208 - RNA, 19 nt, Artificial Sequence
  Description of Artificial Sequence: Synthetic oligonucleotide
gucaaguccccgugaaccg

SEQ ID NO: 223209 - RNA, 19 nt, Artificial Sequence
  Description of Artificial Sequence: Synthetic oligonucleotide
uccccgugaaccgagaaga

SEQ ID NO: 223210 - RNA, 19 nt, Artificial Sequence
  Description of Artificial Sequence: Synthetic oligonucleotide
uuauagggaucuguguugu

SEQ ID NO: 223211 - RNA, 19 nt, Artificial Sequence
  Description of Artificial Sequence: Synthetic oligonucleotide
ggucgcagcacucagacuc

SEQ ID NO: 223212 - RNA, 19 nt, Artificial Sequence
  Description of Artificial Sequence: Synthetic oligonucleotide
caugcgcacuucuacacug

SEQ ID NO: 223213 - RNA, 19 nt, Artificial Sequence
  Description of Artificial Sequence: Synthetic oligonucleotide
gaacaaaguucagccgucg

SEQ ID NO: 223214 - RNA, 19 nt, Artificial Sequence
  Description of Artificial Sequence: Synthetic oligonucleotide
uucgcucugauugucggug

SEQ ID NO: 223215 - RNA, 19 nt, Artificial Sequence
  Description of Artificial Sequence: Synthetic oligonucleotide
aaguggucgcagcacucag

SEQ ID NO: 223216 - RNA, 19 nt, Artificial Sequence
  Description of Artificial Sequence: Synthetic oligonucleotide
uguagagcaugagcagacg

SEQ ID NO: 223217 - RNA, 19 nt, Artificial Sequence
  Description of Artificial Sequence: Synthetic oligonucleotide
aauuagcgcccagacagga

SEQ ID NO: 223218 - RNA, 19 nt, Artificial Sequence
  Description of Artificial Sequence: Synthetic oligonucleotide
gauaacagggcauugucuu

SEQ ID NO: 223219 - RNA, 19 nt, Artificial Sequence
  Description of Artificial Sequence: Synthetic oligonucleotide
ccgugaaccgagaagaacc

SEQ ID NO: 223220 - RNA, 19 nt, Artificial Sequence
  Description of Artificial Sequence: Synthetic oligonucleotide
ucucgacuuucuaucacaa

SEQ ID NO: 223221 - RNA, 19 nt, Artificial Sequence
  Description of Artificial Sequence: Synthetic oligonucleotide
aaacccuucaguauccauu

SEQ ID NO: 223222 - RNA, 19 nt, Artificial Sequence
  Description of Artificial Sequence: Synthetic oligonucleotide
gaaccugaugccuugacau

SEQ ID NO: 223223 - RNA, 19 nt, Artificial Sequence
  Description of Artificial Sequence: Synthetic oligonucleotide
gacuucggaguugagaguc

SEQ ID NO: 223224 - RNA, 19 nt, Artificial Sequence
  Description of Artificial Sequence: Synthetic oligonucleotide
guaagguaucauuccagca

SEQ ID NO: 223225 - RNA, 19 nt, Artificial Sequence
  Description of Artificial Sequence: Synthetic oligonucleotide
auauacggauaauguugag

SEQ ID NO: 223226 - RNA, 19 nt, Artificial Sequence
  Description of Artificial Sequence: Synthetic oligonucleotide
uccaugcgcacuucuacac

SEQ ID NO: 223227 - RNA, 19 nt, Artificial Sequence
  Description of Artificial Sequence: Synthetic oligonucleotide
uggugccaauaccacaucu

SEQ ID NO: 223228 - RNA, 19 nt, Artificial Sequence
  Description of Artificial Sequence: Synthetic oligonucleotide
gccgucaucaucaaaacac

SEQ ID NO: 223229 - RNA, 19 nt, Artificial Sequence
  Description of Artificial Sequence: Synthetic oligonucleotide
ugacgacuugugaugcagc

SEQ ID NO: 223230 - RNA, 19 nt, Artificial Sequence
  Description of Artificial Sequence: Synthetic oligonucleotide
cugauugucggugauguca

SEQ ID NO: 223231 - RNA, 19 nt, Artificial Sequence
  Description of Artificial Sequence: Synthetic oligonucleotide
cuuccgggacucuucaaug

SEQ ID NO: 223232 - RNA, 19 nt, Artificial Sequence
  Description of Artificial Sequence: Synthetic oligonucleotide
accgcaugcaguaauaaau

SEQ ID NO: 223233 - RNA, 19 nt, Artificial Sequence
  Description of Artificial Sequence: Synthetic oligonucleotide
uuaguguccccagacguuc

SEQ ID NO: 223234 - RNA, 19 nt, Artificial Sequence
  Description of Artificial Sequence: Synthetic oligonucleotide
gacgacuugugaugcagca

SEQ ID NO: 223235 - RNA, 19 nt, Artificial Sequence
  Description of Artificial Sequence: Synthetic oligonucleotide
ugauaagucccaggcacac

SEQ ID NO: 223236 - RNA, 19 nt, Artificial Sequence
  Description of Artificial Sequence: Synthetic oligonucleotide
cuauccuugcuauucaugu

SEQ ID NO: 223237 - RNA, 19 nt, Artificial Sequence
  Description of Artificial Sequence: Synthetic oligonucleotide
cugaaggagcucaccaaac

SEQ ID NO: 223238 - RNA, 19 nt, Artificial Sequence
  Description of Artificial Sequence: Synthetic oligonucleotide
auaauuggcuuugugucau

SEQ ID NO: 223239 - RNA, 19 nt, Artificial Sequence
  Description of Artificial Sequence: Synthetic oligonucleotide
uugugccugauuucgucac

SEQ ID NO: 223240 - RNA, 19 nt, Artificial Sequence
  Description of Artificial Sequence: Synthetic oligonucleotide
ccacgugauuaauauacgg

SEQ ID NO: 223241 - RNA, 19 nt, Artificial Sequence
  Description of Artificial Sequence: Synthetic oligonucleotide
uaguguccccagacguucg

SEQ ID NO: 223242 - RNA, 19 nt, Artificial Sequence
  Description of Artificial Sequence: Synthetic oligonucleotide
uucagccgucgcaugcagg

SEQ ID NO: 223243 - RNA, 19 nt, Artificial Sequence
  Description of Artificial Sequence: Synthetic oligonucleotide
caauggcagauaacagggc

SEQ ID NO: 223244 - RNA, 19 nt, Artificial Sequence
  Description of Artificial Sequence: Synthetic oligonucleotide
gacugacgacuugugaugc

SEQ ID NO: 223245 - RNA, 19 nt, Artificial Sequence
  Description of Artificial Sequence: Synthetic oligonucleotide
aacugcgcagucaggaaca

SEQ ID NO: 223246 - RNA, 19 nt, Artificial Sequence
  Description of Artificial Sequence: Synthetic oligonucleotide
uggcccacgugauuaauau

SEQ ID NO: 223247 - RNA, 19 nt, Artificial Sequence
  Description of Artificial Sequence: Synthetic oligonucleotide
gauuucgucacugaaguuu

SEQ ID NO: 223248 - RNA, 19 nt, Artificial Sequence
  Description of Artificial Sequence: Synthetic oligonucleotide
guagagcaugagcagacga

SEQ ID NO: 223249 - RNA, 19 nt, Artificial Sequence
  Description of Artificial Sequence: Synthetic oligonucleotide
cugauuucgucacugaagu

SEQ ID NO: 223250 - RNA, 19 nt, Artificial Sequence
  Description of Artificial Sequence: Synthetic oligonucleotide
agagcuucgaccaggugga

SEQ ID NO: 223251 - RNA, 19 nt, Artificial Sequence
  Description of Artificial Sequence: Synthetic oligonucleotide
guggucgcagcacucagac

SEQ ID NO: 223252 - RNA, 19 nt, Artificial Sequence
  Description of Artificial Sequence: Synthetic oligonucleotide
agcuucgaccagguggacc

SEQ ID NO: 223253 - RNA, 19 nt, Artificial Sequence
  Description of Artificial Sequence: Synthetic oligonucleotide
agagcgugagccugucuug

SEQ ID NO: 223254 - RNA, 19 nt, Artificial Sequence
  Description of Artificial Sequence: Synthetic oligonucleotide
ucucgaugguacuccucag

SEQ ID NO: 223255 - RNA, 19 nt, Artificial Sequence
  Description of Artificial Sequence: Synthetic oligonucleotide
gaucuguguuguuccugag

SEQ ID NO: 223256 - RNA, 19 nt, Artificial Sequence
  Description of Artificial Sequence: Synthetic oligonucleotide
aucgauucucgaugguacu

SEQ ID NO: 223257 - RNA, 19 nt, Artificial Sequence
  Description of Artificial Sequence: Synthetic oligonucleotide
acagcgcagaaacauguuu

SEQ ID NO: 223258 - RNA, 19 nt, Artificial Sequence
  Description of Artificial Sequence: Synthetic oligonucleotide
ugauuaauauacggauaau

SEQ ID NO: 223259 - RNA, 19 nt, Artificial Sequence
  Description of Artificial Sequence: Synthetic oligonucleotide
ugagccucuuaaacugggu

SEQ ID NO: 223260 - RNA, 19 nt, Artificial Sequence
  Description of Artificial Sequence: Synthetic oligonucleotide
gagcauaggccauacucaa

SEQ ID NO: 223261 - RNA, 19 nt, Artificial Sequence
  Description of Artificial Sequence: Synthetic oligonucleotide
aucugccgagcauaggcca

SEQ ID NO: 223262 - RNA, 19 nt, Artificial Sequence
  Description of Artificial Sequence: Synthetic oligonucleotide
aguguccccagacguucgg

SEQ ID NO: 223263 - RNA, 19 nt, Artificial Sequence
  Description of Artificial Sequence: Synthetic oligonucleotide
cugacgacuugugaugcag

SEQ ID NO: 223264 - RNA, 19 nt, Artificial Sequence
  Description of Artificial Sequence: Synthetic oligonucleotide
augauacaguacacggcac

SEQ ID NO: 223265 - RNA, 19 nt, Artificial Sequence
  Description of Artificial Sequence: Synthetic oligonucleotide
cucgacuuucuaucacaag

SEQ ID NO: 223266 - RNA, 19 nt, Artificial Sequence
  Description of Artificial Sequence: Synthetic oligonucleotide
gguucaaaaguggucgcag

SEQ ID NO: 223267 - RNA, 19 nt, Artificial Sequence
  Description of Artificial Sequence: Synthetic oligonucleotide
guugugccugauuucguca

SEQ ID NO: 223268 - RNA, 19 nt, Artificial Sequence
  Description of Artificial Sequence: Synthetic oligonucleotide
ucgaaccagcugauaaguc

SEQ ID NO: 223269 - RNA, 19 nt, Artificial Sequence
  Description of Artificial Sequence: Synthetic oligonucleotide
cucugcgguagugaagccg

SEQ ID NO: 223270 - RNA, 19 nt, Artificial Sequence
  Description of Artificial Sequence: Synthetic oligonucleotide
gaagccggagcuuguuuuc

SEQ ID NO: 223271 - RNA, 19 nt, Artificial Sequence
  Description of Artificial Sequence: Synthetic oligonucleotide
ugggacucgccauagucuu

SEQ ID NO: 223272 - RNA, 19 nt, Artificial Sequence
  Description of Artificial Sequence: Synthetic oligonucleotide
augaccgcugugauacucg

SEQ ID NO: 223273 - RNA, 19 nt, Artificial Sequence
  Description of Artificial Sequence: Synthetic oligonucleotide
gcccacgugauuaauauac

SEQ ID NO: 223274 - RNA, 19 nt, Artificial Sequence
  Description of Artificial Sequence: Synthetic oligonucleotide
ucccaaggaucauaucaaa

SEQ ID NO: 223275 - RNA, 19 nt, Artificial Sequence
  Description of Artificial Sequence: Synthetic oligonucleotide
ugugaggguacgggaacgc

SEQ ID NO: 223276 - RNA, 19 nt, Artificial Sequence
  Description of Artificial Sequence: Synthetic oligonucleotide
cgaaccagcugauaagucc

SEQ ID NO: 223277 - RNA, 19 nt, Artificial Sequence
  Description of Artificial Sequence: Synthetic oligonucleotide
guaucccaaggccugccug

SEQ ID NO: 223278 - RNA, 19 nt, Artificial Sequence
  Description of Artificial Sequence: Synthetic oligonucleotide
cagacguucgguaagguau

SEQ ID NO: 223279 - RNA, 19 nt, Artificial Sequence
  Description of Artificial Sequence: Synthetic oligonucleotide
caaguccccgugaaccgag

SEQ ID NO: 223280 - RNA, 19 nt, Artificial Sequence
  Description of Artificial Sequence: Synthetic oligonucleotide
agacguucgguaagguauc

SEQ ID NO: 223281 - RNA, 19 nt, Artificial Sequence
  Description of Artificial Sequence: Synthetic oligonucleotide
ugacuucggaguugagagu

SEQ ID NO: 223282 - RNA, 19 nt, Artificial Sequence
  Description of Artificial Sequence: Synthetic oligonucleotide
uucccuugagccucuuaaa

SEQ ID NO: 223283 - RNA, 19 nt, Artificial Sequence
  Description of Artificial Sequence: Synthetic oligonucleotide
cuucaaugacucgcugggg

SEQ ID NO: 223284 - RNA, 19 nt, Artificial Sequence
  Description of Artificial Sequence: Synthetic oligonucleotide
guaaaaguacuggagugcu

SEQ ID NO: 223285 - RNA, 19 nt, Artificial Sequence
  Description of Artificial Sequence: Synthetic oligonucleotide
ggcucugcgguagugaagc

SEQ ID NO: 223286 - RNA, 19 nt, Artificial Sequence
  Description of Artificial Sequence: Synthetic oligonucleotide
agccgucgcaugcagggug

SEQ ID NO: 223287 - RNA, 19 nt, Artificial Sequence
  Description of Artificial Sequence: Synthetic oligonucleotide
ugauguaacucggcucacu

SEQ ID NO: 223288 - RNA, 19 nt, Artificial Sequence
  Description of Artificial Sequence: Synthetic oligonucleotide
ccgagcauaggccauacuc

SEQ ID NO: 223289 - RNA, 19 nt, Artificial Sequence
  Description of Artificial Sequence: Synthetic oligonucleotide
ucaaguccccgugaaccga

SEQ ID NO: 223290 - RNA, 19 nt, Artificial Sequence
  Description of Artificial Sequence: Synthetic oligonucleotide
cuugcggguguagagcaug

SEQ ID NO: 223291 - RNA, 19 nt, Artificial Sequence
  Description of Artificial Sequence: Synthetic oligonucleotide
acgcuuauagggaucugug

SEQ ID NO: 223292 - RNA, 19 nt, Artificial Sequence
  Description of Artificial Sequence: Synthetic oligonucleotide
guccccgugaaccgagaag

SEQ ID NO: 223293 - RNA, 19 nt, Artificial Sequence
  Description of Artificial Sequence: Synthetic oligonucleotide
uuucuaucacaagcucgcu

SEQ ID NO: 223294 - RNA, 19 nt, Artificial Sequence
  Description of Artificial Sequence: Synthetic oligonucleotide
ugcgguagugaagccggag

SEQ ID NO: 223295 - RNA, 19 nt, Artificial Sequence
  Description of Artificial Sequence: Synthetic oligonucleotide
augccuugacauccgcugu

SEQ ID NO: 223296 - RNA, 19 nt, Artificial Sequence
  Description of Artificial Sequence: Synthetic oligonucleotide
caagagguucaaaaguggu

SEQ ID NO: 223297 - RNA, 19 nt, Artificial Sequence
  Description of Artificial Sequence: Synthetic oligonucleotide
cguuguagauauaaaucug

SEQ ID NO: 223298 - RNA, 19 nt, Artificial Sequence
  Description of Artificial Sequence: Synthetic oligonucleotide
gauguaacucggcucacuu

SEQ ID NO: 223299 - RNA, 19 nt, Artificial Sequence
  Description of Artificial Sequence: Synthetic oligonucleotide
agcacuucagagagguugu

SEQ ID NO: 223300 - RNA, 19 nt, Artificial Sequence
  Description of Artificial Sequence: Synthetic oligonucleotide
gguggcgagaagcacuuca

SEQ ID NO: 223301 - RNA, 19 nt, Artificial Sequence
  Description of Artificial Sequence: Synthetic oligonucleotide
ggugccaauaccacaucug

SEQ ID NO: 223302 - RNA, 19 nt, Artificial Sequence
  Description of Artificial Sequence: Synthetic oligonucleotide
guucagccgucgcaugcag

SEQ ID NO: 223303 - RNA, 19 nt, Artificial Sequence
  Description of Artificial Sequence: Synthetic oligonucleotide
agguucaaaaguggucgca

SEQ ID NO: 223304 - RNA, 19 nt, Artificial Sequence
  Description of Artificial Sequence: Synthetic oligonucleotide
aagccggagcuuguuuuca

SEQ ID NO: 223305 - RNA, 19 nt, Artificial Sequence
  Description of Artificial Sequence: Synthetic oligonucleotide
aagugggacucgccauagu

SEQ ID NO: 223306 - RNA, 19 nt, Artificial Sequence
  Description of Artificial Sequence: Synthetic oligonucleotide
cccacgugauuaauauacg

SEQ ID NO: 223307 - RNA, 19 nt, Artificial Sequence
  Description of Artificial Sequence: Synthetic oligonucleotide
acggcacgcuuauagggau

SEQ ID NO: 223308 - RNA, 19 nt, Artificial Sequence
  Description of Artificial Sequence: Synthetic oligonucleotide
gcucaagagguucaaaagu

SEQ ID NO: 223309 - RNA, 19 nt, Artificial Sequence
  Description of Artificial Sequence: Synthetic oligonucleotide
gcgugagccugucuugugg

SEQ ID NO: 223310 - RNA, 19 nt, Artificial Sequence
  Description of Artificial Sequence: Synthetic oligonucleotide
gagagcgugagccugucuu

SEQ ID NO: 223311 - RNA, 19 nt, Artificial Sequence
  Description of Artificial Sequence: Synthetic oligonucleotide
cacggcacgcuuauaggga

SEQ ID NO: 223312 - RNA, 19 nt, Artificial Sequence
  Description of Artificial Sequence: Synthetic oligonucleotide
gcggguguagagcaugagc

SEQ ID NO: 223313 - RNA, 19 nt, Artificial Sequence
  Description of Artificial Sequence: Synthetic oligonucleotide
gcgcucacccgcuugcugg

SEQ ID NO: 223314 - RNA, 19 nt, Artificial Sequence
  Description of Artificial Sequence: Synthetic oligonucleotide
ucgaccagguggacccaca

SEQ ID NO: 223315 - RNA, 19 nt, Artificial Sequence
  Description of Artificial Sequence: Synthetic oligonucleotide
cuucgccauccugaagucc

SEQ ID NO: 223316 - RNA, 19 nt, Artificial Sequence
  Description of Artificial Sequence: Synthetic oligonucleotide
ggacucgccauagucuucc

SEQ ID NO: 223317 - RNA, 19 nt, Artificial Sequence
  Description of Artificial Sequence: Synthetic oligonucleotide
gucgcaugcaggguggguc

SEQ ID NO: 223318 - RNA, 19 nt, Artificial Sequence
  Description of Artificial Sequence: Synthetic oligonucleotide
gauucucgaugguacuccu

SEQ ID NO: 223319 - RNA, 19 nt, Artificial Sequence
  Description of Artificial Sequence: Synthetic oligonucleotide
ugagagcgugagccugucu

SEQ ID NO: 223320 - RNA, 19 nt, Artificial Sequence
  Description of Artificial Sequence: Synthetic oligonucleotide
gguguagagcaugagcaga

SEQ ID NO: 223321 - RNA, 19 nt, Artificial Sequence
  Description of Artificial Sequence: Synthetic oligonucleotide
gcaaagguaaucagagcuc

SEQ ID NO: 223322 - RNA, 19 nt, Artificial Sequence
  Description of Artificial Sequence: Synthetic oligonucleotide
gugagccugucuuguggug

SEQ ID NO: 223323 - RNA, 19 nt, Artificial Sequence
  Description of Artificial Sequence: Synthetic oligonucleotide
ucaagcggucaaugauauc

SEQ ID NO: 223324 - RNA, 19 nt, Artificial Sequence
  Description of Artificial Sequence: Synthetic oligonucleotide
cucgacugacgacuuguga

SEQ ID NO: 223325 - RNA, 19 nt, Artificial Sequence
  Description of Artificial Sequence: Synthetic oligonucleotide
agcccagacccaucaaaua

SEQ ID NO: 223326 - RNA, 19 nt, Artificial Sequence
  Description of Artificial Sequence: Synthetic oligonucleotide
gauugucggugaugucaca

SEQ ID NO: 223327 - RNA, 19 nt, Artificial Sequence
  Description of Artificial Sequence: Synthetic oligonucleotide
aacuccaugcgcacuucua

SEQ ID NO: 223328 - RNA, 19 nt, Artificial Sequence
  Description of Artificial Sequence: Synthetic oligonucleotide
gaagaaccugaugccuuga

SEQ ID NO: 223329 - RNA, 19 nt, Artificial Sequence
  Description of Artificial Sequence: Synthetic oligonucleotide
caauaugaccgcugugaua

SEQ ID NO: 223330 - RNA, 19 nt, Artificial Sequence
  Description of Artificial Sequence: Synthetic oligonucleotide
ugcggguguagagcaugag

SEQ ID NO: 223331 - RNA, 19 nt, Artificial Sequence
  Description of Artificial Sequence: Synthetic oligonucleotide
gcuuauagggaucuguguu

SEQ ID NO: 223332 - RNA, 19 nt, Artificial Sequence
  Description of Artificial Sequence: Synthetic oligonucleotide
gugaaccgagaagaaccug

SEQ ID NO: 223333 - RNA, 19 nt, Artificial Sequence
  Description of Artificial Sequence: Synthetic oligonucleotide
auaugaccgcugugauacu

SEQ ID NO: 223334 - RNA, 19 nt, Artificial Sequence
  Description of Artificial Sequence: Synthetic oligonucleotide
aguccccgugaaccgagaa

SEQ ID NO: 223335 - RNA, 19 nt, Artificial Sequence
  Description of Artificial Sequence: Synthetic oligonucleotide
gcgcuuauucccugagccc

SEQ ID NO: 223336 - RNA, 19 nt, Artificial Sequence
  Description of Artificial Sequence: Synthetic oligonucleotide
gucggugaugucacaccug

SEQ ID NO: 223337 - RNA, 19 nt, Artificial Sequence
  Description of Artificial Sequence: Synthetic oligonucleotide
cgguaagguaucauuccag

SEQ ID NO: 223338 - RNA, 19 nt, Artificial Sequence
  Description of Artificial Sequence: Synthetic oligonucleotide
caccgcaugcaguaauaaa

SEQ ID NO: 223339 - RNA, 19 nt, Artificial Sequence
  Description of Artificial Sequence: Synthetic oligonucleotide
acaccgcaugcaguaauaa

SEQ ID NO: 223340 - RNA, 19 nt, Artificial Sequence
  Description of Artificial Sequence: Synthetic oligonucleotide
uacgggaacgcaggcgcuc

SEQ ID NO: 223341 - RNA, 19 nt, Artificial Sequence
  Description of Artificial Sequence: Synthetic oligonucleotide
gacguucgguaagguauca

SEQ ID NO: 223342 - RNA, 19 nt, Artificial Sequence
  Description of Artificial Sequence: Synthetic oligonucleotide
uggucgcagcacucagacu

SEQ ID NO: 223343 - RNA, 19 nt, Artificial Sequence
  Description of Artificial Sequence: Synthetic oligonucleotide
aguggucgcagcacucaga

SEQ ID NO: 223344 - RNA, 19 nt, Artificial Sequence
  Description of Artificial Sequence: Synthetic oligonucleotide
cgacugacgacuugugaug

SEQ ID NO: 223345 - RNA, 19 nt, Artificial Sequence
  Description of Artificial Sequence: Synthetic oligonucleotide
acgacuugugaugcagcaa

SEQ ID NO: 223346 - RNA, 19 nt, Artificial Sequence
  Description of Artificial Sequence: Synthetic oligonucleotide
gguuggguuguaggugucc

SEQ ID NO: 223347 - RNA, 19 nt, Artificial Sequence
  Description of Artificial Sequence: Synthetic oligonucleotide
cgauucucgaugguacucc

SEQ ID NO: 223348 - RNA, 19 nt, Artificial Sequence
  Description of Artificial Sequence: Synthetic oligonucleotide
agcgugugcaggauucuuu

SEQ ID NO: 223349 - RNA, 19 nt, Artificial Sequence
  Description of Artificial Sequence: Synthetic oligonucleotide
cacaccgcaugcaguaaua

SEQ ID NO: 223350 - RNA, 19 nt, Artificial Sequence
  Description of Artificial Sequence: Synthetic oligonucleotide
auuagcgcccagacaggau

SEQ ID NO: 223351 - RNA, 19 nt, Artificial Sequence
  Description of Artificial Sequence: Synthetic oligonucleotide
cgaacaaaguucagccguc

SEQ ID NO: 223352 - RNA, 19 nt, Artificial Sequence
  Description of Artificial Sequence: Synthetic oligonucleotide
guguuguuccugagggcuc

SEQ ID NO: 223353 - RNA, 19 nt, Artificial Sequence
  Description of Artificial Sequence: Synthetic oligonucleotide
gcacugaucugugggacca

SEQ ID NO: 223354 - RNA, 19 nt, Artificial Sequence
  Description of Artificial Sequence: Synthetic oligonucleotide
cuggcccacgugauuaaua

SEQ ID NO: 223355 - RNA, 19 nt, Artificial Sequence
  Description of Artificial Sequence: Synthetic oligonucleotide
gcuacuucgcucugauugu

SEQ ID NO: 223356 - RNA, 19 nt, Artificial Sequence
  Description of Artificial Sequence: Synthetic oligonucleotide
ggaugugcgugugagggua

SEQ ID NO: 223357 - RNA, 19 nt, Artificial Sequence
  Description of Artificial Sequence: Synthetic oligonucleotide
acgggaacgcaggcgcuca

SEQ ID NO: 223358 - RNA, 19 nt, Artificial Sequence
  Description of Artificial Sequence: Synthetic oligonucleotide
ccguggacucaaacuugcg

SEQ ID NO: 223359 - RNA, 19 nt, Artificial Sequence
  Description of Artificial Sequence: Synthetic oligonucleotide
cgugauuaauauacggaua

SEQ ID NO: 223360 - RNA, 19 nt, Artificial Sequence
  Description of Artificial Sequence: Synthetic oligonucleotide
cggauaauguugagcccag

SEQ ID NO: 223361 - RNA, 19 nt, Artificial Sequence
  Description of Artificial Sequence: Synthetic oligonucleotide
aaguccccgugaaccgaga

SEQ ID NO: 223362 - RNA, 19 nt, Artificial Sequence
  Description of Artificial Sequence: Synthetic oligonucleotide
gcagacgaacaaaguucag

SEQ ID NO: 223363 - RNA, 19 nt, Artificial Sequence
  Description of Artificial Sequence: Synthetic oligonucleotide
ggcccacauaucagaaaug

SEQ ID NO: 223364 - RNA, 19 nt, Artificial Sequence
  Description of Artificial Sequence: Synthetic oligonucleotide
agcuggcaguuuaauguuu

SEQ ID NO: 223365 - RNA, 19 nt, Artificial Sequence
  Description of Artificial Sequence: Synthetic oligonucleotide
acguucgguaagguaucau

SEQ ID NO: 223366 - RNA, 19 nt, Artificial Sequence
  Description of Artificial Sequence: Synthetic oligonucleotide
gccgucgcaugcagggugg

SEQ ID NO: 223367 - RNA, 19 nt, Artificial Sequence
  Description of Artificial Sequence: Synthetic oligonucleotide
cccgugaaccgagaagaac

SEQ ID NO: 223368 - RNA, 19 nt, Artificial Sequence
  Description of Artificial Sequence: Synthetic oligonucleotide
gagcgugagccugucuugu

SEQ ID NO: 223369 - RNA, 19 nt, Artificial Sequence
  Description of Artificial Sequence: Synthetic oligonucleotide
cuucgcucugauugucggu

SEQ ID NO: 223370 - RNA, 19 nt, Artificial Sequence
  Description of Artificial Sequence: Synthetic oligonucleotide
gcugggcucgacugacgac

SEQ ID NO: 223371 - RNA, 19 nt, Artificial Sequence
  Description of Artificial Sequence: Synthetic oligonucleotide
ccccagacguucgguaagg

SEQ ID NO: 223372 - RNA, 19 nt, Artificial Sequence
  Description of Artificial Sequence: Synthetic oligonucleotide
ggcacgcuuauagggaucu

SEQ ID NO: 223373 - RNA, 19 nt, Artificial Sequence
  Description of Artificial Sequence: Synthetic oligonucleotide
ccgggacucuucaauggca

SEQ ID NO: 223374 - RNA, 19 nt, Artificial Sequence
  Description of Artificial Sequence: Synthetic oligonucleotide
caaugacucgcuggggccu

SEQ ID NO: 223375 - RNA, 19 nt, Artificial Sequence
  Description of Artificial Sequence: Synthetic oligonucleotide
caguacacggcacgcuuau

SEQ ID NO: 223376 - RNA, 19 nt, Artificial Sequence
  Description of Artificial Sequence: Synthetic oligonucleotide
ggaacccaccccagcuggc

SEQ ID NO: 223377 - RNA, 19 nt, Artificial Sequence
  Description of Artificial Sequence: Synthetic oligonucleotide
ggcucgacugacgacuugu

SEQ ID NO: 223378 - RNA, 19 nt, Artificial Sequence
  Description of Artificial Sequence: Synthetic oligonucleotide
ccagacguucgguaaggua

SEQ ID NO: 223379 - RNA, 19 nt, Artificial Sequence
  Description of Artificial Sequence: Synthetic oligonucleotide
ggcccacgugauuaauaua

SEQ ID NO: 223380 - RNA, 19 nt, Artificial Sequence
  Description of Artificial Sequence: Synthetic oligonucleotide
gucgcagcacucagacucu

SEQ ID NO: 223381 - RNA, 19 nt, Artificial Sequence
  Description of Artificial Sequence: Synthetic oligonucleotide
cgaugguacuccucagcca

SEQ ID NO: 223382 - RNA, 19 nt, Artificial Sequence
  Description of Artificial Sequence: Synthetic oligonucleotide
ccgcaugcaguaauaaauu

SEQ ID NO: 223383 - RNA, 19 nt, Artificial Sequence
  Description of Artificial Sequence: Synthetic oligonucleotide
cuucgaccagguggaccca

SEQ ID NO: 223384 - RNA, 19 nt, Artificial Sequence
  Description of Artificial Sequence: Synthetic oligonucleotide
cgugaaccgagaagaaccu

SEQ ID NO: 223385 - RNA, 19 nt, Artificial Sequence
  Description of Artificial Sequence: Synthetic oligonucleotide
gccauccugaaguccuggu

SEQ ID NO: 223386 - RNA, 19 nt, Artificial Sequence
  Description of Artificial Sequence: Synthetic oligonucleotide
cguucgguaagguaucauu

SEQ ID NO: 223387 - RNA, 19 nt, Artificial Sequence
  Description of Artificial Sequence: Synthetic oligonucleotide
guacgggaacgcaggcgcu

SEQ ID NO: 223388 - RNA, 19 nt, Artificial Sequence
  Description of Artificial Sequence: Synthetic oligonucleotide
gcacgcuuauagggaucug

SEQ ID NO: 223389 - RNA, 19 nt, Artificial Sequence
  Description of Artificial Sequence: Synthetic oligonucleotide
cugccacggaagcaacuuu

SEQ ID NO: 223390 - RNA, 19 nt, Artificial Sequence
  Description of Artificial Sequence: Synthetic oligonucleotide
cgcuuauucccugagcccu

SEQ ID NO: 223391 - RNA, 19 nt, Artificial Sequence
  Description of Artificial Sequence: Synthetic oligonucleotide
gccuugacauccgcugucu

SEQ ID NO: 223392 - RNA, 19 nt, Artificial Sequence
  Description of Artificial Sequence: Synthetic oligonucleotide
ccaugcgcacuucuacacu

SEQ ID NO: 223393 - RNA, 19 nt, Artificial Sequence
  Description of Artificial Sequence: Synthetic oligonucleotide
ccgucgcaugcaggguggg

SEQ ID NO: 223394 - RNA, 19 nt, Artificial Sequence
  Description of Artificial Sequence: Synthetic oligonucleotide
cugcuacuucgcucugauu

SEQ ID NO: 223395 - RNA, 19 nt, Artificial Sequence
  Description of Artificial Sequence: Synthetic oligonucleotide
ccgcugugauacucgucaa

SEQ ID NO: 223396 - RNA, 19 nt, Artificial Sequence
  Description of Artificial Sequence: Synthetic oligonucleotide
cagccgucgcaugcagggu

SEQ ID NO: 223397 - RNA, 19 nt, Artificial Sequence
  Description of Artificial Sequence: Synthetic oligonucleotide
gccgagcauaggccauacu

SEQ ID NO: 223398 - RNA, 19 nt, Artificial Sequence
  Description of Artificial Sequence: Synthetic oligonucleotide
cgggaacgcaggcgcucac

SEQ ID NO: 223399 - RNA, 19 nt, Artificial Sequence
  Description of Artificial Sequence: Synthetic oligonucleotide
ccauaccaaagguccucuu

SEQ ID NO: 223400 - RNA, 19 nt, Artificial Sequence
  Description of Artificial Sequence: Synthetic oligonucleotide
cccagacguucgguaaggu

SEQ ID NO: 223401 - RNA, 19 nt, Artificial Sequence
  Description of Artificial Sequence: Synthetic oligonucleotide
cgucgcaugcagggugggu

SEQ ID NO: 223402 - RNA, 19 nt, Artificial Sequence
  Description of Artificial Sequence: Synthetic oligonucleotide
gauacuaucaccuagcuug

SEQ ID NO: 223403 - RNA, 19 nt, Artificial Sequence
  Description of Artificial Sequence: Synthetic oligonucleotide
aguauugucgacuacagcc

SEQ ID NO: 223404 - RNA, 19 nt, Artificial Sequence
  Description of Artificial Sequence: Synthetic oligonucleotide
aaaacaguguaucugacac

SEQ ID NO: 223405 - RNA, 19 nt, Artificial Sequence
  Description of Artificial Sequence: Synthetic oligonucleotide
aacauauuaucucccgucc

SEQ ID NO: 223406 - RNA, 19 nt, Artificial Sequence
  Description of Artificial Sequence: Synthetic oligonucleotide
ucuauaaagggucuucagg

SEQ ID NO: 223407 - RNA, 19 nt, Artificial Sequence
  Description of Artificial Sequence: Synthetic oligonucleotide
uguacuuaugauaaugccc

SEQ ID NO: 223408 - RNA, 19 nt, Artificial Sequence
  Description of Artificial Sequence: Synthetic oligonucleotide
aaguaaauggccaaacgac

SEQ ID NO: 223409 - RNA, 19 nt, Artificial Sequence
  Description of Artificial Sequence: Synthetic oligonucleotide
cuguuauacuacuagaggg

SEQ ID NO: 223410 - RNA, 19 nt, Artificial Sequence
  Description of Artificial Sequence: Synthetic oligonucleotide
cuauaaagggucuucaggc

SEQ ID NO: 223411 - RNA, 19 nt, Artificial Sequence
  Description of Artificial Sequence: Synthetic oligonucleotide
uaugcaacaaggcuaaaac

SEQ ID NO: 223412 - RNA, 19 nt, Artificial Sequence
  Description of Artificial Sequence: Synthetic oligonucleotide
uguaaagaguauuacuugc

SEQ ID NO: 223413 - RNA, 19 nt, Artificial Sequence
  Description of Artificial Sequence: Synthetic oligonucleotide
uuggauaaagaaaucuucc

SEQ ID NO: 223414 - RNA, 19 nt, Artificial Sequence
  Description of Artificial Sequence: Synthetic oligonucleotide
uuaagcuacaaauauguaa

SEQ ID NO: 223415 - RNA, 19 nt, Artificial Sequence
  Description of Artificial Sequence: Synthetic oligonucleotide
aaauaugcaggguuuacgu

SEQ ID NO: 223416 - RNA, 19 nt, Artificial Sequence
  Description of Artificial Sequence: Synthetic oligonucleotide
uuagaacuagaaaaggucu

SEQ ID NO: 223417 - RNA, 19 nt, Artificial Sequence
  Description of Artificial Sequence: Synthetic oligonucleotide
uguugguuuccuaugacag

SEQ ID NO: 223418 - RNA, 19 nt, Artificial Sequence
  Description of Artificial Sequence: Synthetic oligonucleotide
ugguuaacuaauaacauau

SEQ ID NO: 223419 - RNA, 19 nt, Artificial Sequence
  Description of Artificial Sequence: Synthetic oligonucleotide
aguuauauaacuaaaacua

SEQ ID NO: 223420 - RNA, 19 nt, Artificial Sequence
  Description of Artificial Sequence: Synthetic oligonucleotide
augauaaugcccuauuaag

SEQ ID NO: 223421 - RNA, 19 nt, Artificial Sequence
  Description of Artificial Sequence: Synthetic oligonucleotide
aaagccaucgcuuacuuua

SEQ ID NO: 223422 - RNA, 19 nt, Artificial Sequence
  Description of Artificial Sequence: Synthetic oligonucleotide
uuacguuuuguacuuauga

SEQ ID NO: 223423 - RNA, 19 nt, Artificial Sequence
  Description of Artificial Sequence: Synthetic oligonucleotide
uuuaaccuagauacuauca

SEQ ID NO: 223424 - RNA, 19 nt, Artificial Sequence
  Description of Artificial Sequence: Synthetic oligonucleotide
uuacaacacgaauaaagag

SEQ ID NO: 223425 - RNA, 19 nt, Artificial Sequence
  Description of Artificial Sequence: Synthetic oligonucleotide
uauacuacuagagggaccc

SEQ ID NO: 223426 - RNA, 19 nt, Artificial Sequence
  Description of Artificial Sequence: Synthetic oligonucleotide
ugaguuacaguauugucga

SEQ ID NO: 223427 - RNA, 19 nt, Artificial Sequence
  Description of Artificial Sequence: Synthetic oligonucleotide
aggauuuauucuuugcgcg

SEQ ID NO: 223428 - RNA, 19 nt, Artificial Sequence
  Description of Artificial Sequence: Synthetic oligonucleotide
uguuauacuacuagaggga

SEQ ID NO: 223429 - RNA, 19 nt, Artificial Sequence
  Description of Artificial Sequence: Synthetic oligonucleotide
cuguaaguaaguaaauggc

SEQ ID NO: 223430 - RNA, 19 nt, Artificial Sequence
  Description of Artificial Sequence: Synthetic oligonucleotide
agcaccauccaauuaagag

SEQ ID NO: 223431 - RNA, 19 nt, Artificial Sequence
  Description of Artificial Sequence: Synthetic oligonucleotide
aagaguauuacuugcuuaa

SEQ ID NO: 223432 - RNA, 19 nt, Artificial Sequence
  Description of Artificial Sequence: Synthetic oligonucleotide
agcauuaugcuuucuuugg

SEQ ID NO: 223433 - RNA, 19 nt, Artificial Sequence
  Description of Artificial Sequence: Synthetic oligonucleotide
ugaucaggcaguaagaguu

SEQ ID NO: 223434 - RNA, 19 nt, Artificial Sequence
  Description of Artificial Sequence: Synthetic oligonucleotide
uuuacaggaucuacaacgc

SEQ ID NO: 223435 - RNA, 19 nt, Artificial Sequence
  Description of Artificial Sequence: Synthetic oligonucleotide
aauuagaacuagaaaaggu

SEQ ID NO: 223436 - RNA, 19 nt, Artificial Sequence
  Description of Artificial Sequence: Synthetic oligonucleotide
uccaguaccguaaaagcca

SEQ ID NO: 223437 - RNA, 19 nt, Artificial Sequence
  Description of Artificial Sequence: Synthetic oligonucleotide
cauacgcugaccaaacucc

SEQ ID NO: 223438 - RNA, 19 nt, Artificial Sequence
  Description of Artificial Sequence: Synthetic oligonucleotide
aguaccguaaaagccaucg

SEQ ID NO: 223439 - RNA, 19 nt, Artificial Sequence
  Description of Artificial Sequence: Synthetic oligonucleotide
uauucuuugcgcgacauga

SEQ ID NO: 223440 - RNA, 19 nt, Artificial Sequence
  Description of Artificial Sequence: Synthetic oligonucleotide
aguaucucaaucccauuuc

SEQ ID NO: 223441 - RNA, 19 nt, Artificial Sequence
  Description of Artificial Sequence: Synthetic oligonucleotide
cuagauacuaucaccuagc

SEQ ID NO: 223442 - RNA, 19 nt, Artificial Sequence
  Description of Artificial Sequence: Synthetic oligonucleotide
uggggaaguaucuagacuc

SEQ ID NO: 223443 - RNA, 19 nt, Artificial Sequence
  Description of Artificial Sequence: Synthetic oligonucleotide
cauauaguuucucagaaga

SEQ ID NO: 223444 - RNA, 19 nt, Artificial Sequence
  Description of Artificial Sequence: Synthetic oligonucleotide
uaaccuagauacuaucacc

SEQ ID NO: 223445 - RNA, 19 nt, Artificial Sequence
  Description of Artificial Sequence: Synthetic oligonucleotide
uuuuacaagaauggcuccg

SEQ ID NO: 223446 - RNA, 19 nt, Artificial Sequence
  Description of Artificial Sequence: Synthetic oligonucleotide
accaagucuacugaguuac

SEQ ID NO: 223447 - RNA, 19 nt, Artificial Sequence
  Description of Artificial Sequence: Synthetic oligonucleotide
agauaacucgaauugaaaa

SEQ ID NO: 223448 - RNA, 19 nt, Artificial Sequence
  Description of Artificial Sequence: Synthetic oligonucleotide
uuguacuuaugauaaugcc

SEQ ID NO: 223449 - RNA, 19 nt, Artificial Sequence
  Description of Artificial Sequence: Synthetic oligonucleotide
ucugacuuagcagccaacg

SEQ ID NO: 223450 - RNA, 19 nt, Artificial Sequence
  Description of Artificial Sequence: Synthetic oligonucleotide
ucccaaacguuuuacaaga

SEQ ID NO: 223451 - RNA, 19 nt, Artificial Sequence
  Description of Artificial Sequence: Synthetic oligonucleotide
ugagauaacucgaauugaa

SEQ ID NO: 223452 - RNA, 19 nt, Artificial Sequence
  Description of Artificial Sequence: Synthetic oligonucleotide
uucccaaacguuuuacaag

SEQ ID NO: 223453 - RNA, 19 nt, Artificial Sequence
  Description of Artificial Sequence: Synthetic oligonucleotide
uagugaauuagaacuagaa

SEQ ID NO: 223454 - RNA, 19 nt, Artificial Sequence
  Description of Artificial Sequence: Synthetic oligonucleotide
aacuacuuaagccaccaua

SEQ ID NO: 223455 - RNA, 19 nt, Artificial Sequence
  Description of Artificial Sequence: Synthetic oligonucleotide
aguaaauggccaaacgacg

SEQ ID NO: 223456 - RNA, 19 nt, Artificial Sequence
  Description of Artificial Sequence: Synthetic oligonucleotide
caccauccaauuaagagac

SEQ ID NO: 223457 - RNA, 19 nt, Artificial Sequence
  Description of Artificial Sequence: Synthetic oligonucleotide
aacaccagauuuugauuag

SEQ ID NO: 223458 - RNA, 19 nt, Artificial Sequence
  Description of Artificial Sequence: Synthetic oligonucleotide
ucuuugcgcgacaugaagc

SEQ ID NO: 223459 - RNA, 19 nt, Artificial Sequence
  Description of Artificial Sequence: Synthetic oligonucleotide
aaauggccaaacgacggac

SEQ ID NO: 223460 - RNA, 19 nt, Artificial Sequence
  Description of Artificial Sequence: Synthetic oligonucleotide
aaagacaauaacacugcug

SEQ ID NO: 223461 - RNA, 19 nt, Artificial Sequence
  Description of Artificial Sequence: Synthetic oligonucleotide
uaacauaugccacuuugaa

SEQ ID NO: 223462 - RNA, 19 nt, Artificial Sequence
  Description of Artificial Sequence: Synthetic oligonucleotide
uaccguaaaagccaucgcu

SEQ ID NO: 223463 - RNA, 19 nt, Artificial Sequence
  Description of Artificial Sequence: Synthetic oligonucleotide
caggauuuauucuuugcgc

SEQ ID NO: 223464 - RNA, 19 nt, Artificial Sequence
  Description of Artificial Sequence: Synthetic oligonucleotide
uaaugcccuauuaagcuac

SEQ ID NO: 223465 - RNA, 19 nt, Artificial Sequence
  Description of Artificial Sequence: Synthetic oligonucleotide
uuguaguugaauccauuac

SEQ ID NO: 223466 - RNA, 19 nt, Artificial Sequence
  Description of Artificial Sequence: Synthetic oligonucleotide
aacauaugccacuuugaaa

SEQ ID NO: 223467 - RNA, 19 nt, Artificial Sequence
  Description of Artificial Sequence: Synthetic oligonucleotide
uuaagagacugagauaacu

SEQ ID NO: 223468 - RNA, 19 nt, Artificial Sequence
  Description of Artificial Sequence: Synthetic oligonucleotide
cucccguccacuuaaagac

SEQ ID NO: 223469 - RNA, 19 nt, Artificial Sequence
  Description of Artificial Sequence: Synthetic oligonucleotide
guaaauggccaaacgacgg

SEQ ID NO: 223470 - RNA, 19 nt, Artificial Sequence
  Description of Artificial Sequence: Synthetic oligonucleotide
aagucuacugaguuacagu

SEQ ID NO: 223471 - RNA, 19 nt, Artificial Sequence
  Description of Artificial Sequence: Synthetic oligonucleotide
uggcacacguauaacagca

SEQ ID NO: 223472 - RNA, 19 nt, Artificial Sequence
  Description of Artificial Sequence: Synthetic oligonucleotide
aggguuuacguuuuguacu

SEQ ID NO: 223473 - RNA, 19 nt, Artificial Sequence
  Description of Artificial Sequence: Synthetic oligonucleotide
uacaagaauggcuccgucc

SEQ ID NO: 223474 - RNA, 19 nt, Artificial Sequence
  Description of Artificial Sequence: Synthetic oligonucleotide
uucuuugcgcgacaugaag

SEQ ID NO: 223475 - RNA, 19 nt, Artificial Sequence
  Description of Artificial Sequence: Synthetic oligonucleotide
aacgacggacgugaaaacg

SEQ ID NO: 223476 - RNA, 19 nt, Artificial Sequence
  Description of Artificial Sequence: Synthetic oligonucleotide
acgcugaccaaacuccacc

SEQ ID NO: 223477 - RNA, 19 nt, Artificial Sequence
  Description of Artificial Sequence: Synthetic oligonucleotide
uuuacguuuuguacuuaug

SEQ ID NO: 223478 - RNA, 19 nt, Artificial Sequence
  Description of Artificial Sequence: Synthetic oligonucleotide
aaacccgcauaucaugugu

SEQ ID NO: 223479 - RNA, 19 nt, Artificial Sequence
  Description of Artificial Sequence: Synthetic oligonucleotide
uauucuaccuguucacugu

SEQ ID NO: 223480 - RNA, 19 nt, Artificial Sequence
  Description of Artificial Sequence: Synthetic oligonucleotide
aaccuagauacuaucaccu

SEQ ID NO: 223481 - RNA, 19 nt, Artificial Sequence
  Description of Artificial Sequence: Synthetic oligonucleotide
aagugcuauaagcaaccug

SEQ ID NO: 223482 - RNA, 19 nt, Artificial Sequence
  Description of Artificial Sequence: Synthetic oligonucleotide
gaaaacgcaaaugacaugu

SEQ ID NO: 223483 - RNA, 19 nt, Artificial Sequence
  Description of Artificial Sequence: Synthetic oligonucleotide
ucuacaacgcuugugugga

SEQ ID NO: 223484 - RNA, 19 nt, Artificial Sequence
  Description of Artificial Sequence: Synthetic oligonucleotide
uuagaaagugugugauucc

SEQ ID NO: 223485 - RNA, 19 nt, Artificial Sequence
  Description of Artificial Sequence: Synthetic oligonucleotide
acuguaaaacaguguaucu

SEQ ID NO: 223486 - RNA, 19 nt, Artificial Sequence
  Description of Artificial Sequence: Synthetic oligonucleotide
ucgacuacagccuccgccc

SEQ ID NO: 223487 - RNA, 19 nt, Artificial Sequence
  Description of Artificial Sequence: Synthetic oligonucleotide
auagccgcuaguuuauucu

SEQ ID NO: 223488 - RNA, 19 nt, Artificial Sequence
  Description of Artificial Sequence: Synthetic oligonucleotide
ugcuuaguaagcuuuucaa

SEQ ID NO: 223489 - RNA, 19 nt, Artificial Sequence
  Description of Artificial Sequence: Synthetic oligonucleotide
acuugacagaagcuugcac

SEQ ID NO: 223490 - RNA, 19 nt, Artificial Sequence
  Description of Artificial Sequence: Synthetic oligonucleotide
augucuuggauaaagaaau

SEQ ID NO: 223491 - RNA, 19 nt, Artificial Sequence
  Description of Artificial Sequence: Synthetic oligonucleotide
uaaagaguauuacuugcuu

SEQ ID NO: 223492 - RNA, 19 nt, Artificial Sequence
  Description of Artificial Sequence: Synthetic oligonucleotide
uuaugauaaugcccuauua

SEQ ID NO: 223493 - RNA, 19 nt, Artificial Sequence
  Description of Artificial Sequence: Synthetic oligonucleotide
aaacgaugccccguguuuc

SEQ ID NO: 223494 - RNA, 19 nt, Artificial Sequence
  Description of Artificial Sequence: Synthetic oligonucleotide
ucucccguccacuuaaaga

SEQ ID NO: 223495 - RNA, 19 nt, Artificial Sequence
  Description of Artificial Sequence: Synthetic oligonucleotide
uaaauggccaaacgacgga

SEQ ID NO: 223496 - RNA, 19 nt, Artificial Sequence
  Description of Artificial Sequence: Synthetic oligonucleotide
cauauuaucucccguccac

SEQ ID NO: 223497 - RNA, 19 nt, Artificial Sequence
  Description of Artificial Sequence: Synthetic oligonucleotide
uagaaagugugugauuccc

SEQ ID NO: 223498 - RNA, 19 nt, Artificial Sequence
  Description of Artificial Sequence: Synthetic oligonucleotide
uaguaagcuuuucaaucug

SEQ ID NO: 223499 - RNA, 19 nt, Artificial Sequence
  Description of Artificial Sequence: Synthetic oligonucleotide
ucccuauauuauauuauaa

SEQ ID NO: 223500 - RNA, 19 nt, Artificial Sequence
  Description of Artificial Sequence: Synthetic oligonucleotide
gacgcuaaugguuaacuaa

SEQ ID NO: 223501 - RNA, 19 nt, Artificial Sequence
  Description of Artificial Sequence: Synthetic oligonucleotide
uuaucucccguccacuuaa

SEQ ID NO: 223502 - RNA, 19 nt, Artificial Sequence
  Description of Artificial Sequence: Synthetic oligonucleotide
auaugcaggguuuacguuu

SEQ ID NO: 223503 - RNA, 19 nt, Artificial Sequence
  Description of Artificial Sequence: Synthetic oligonucleotide
uaucaccuagcuuguaaug

SEQ ID NO: 223504 - RNA, 19 nt, Artificial Sequence
  Description of Artificial Sequence: Synthetic oligonucleotide
uuguaaugagagcuauaca

SEQ ID NO: 223505 - RNA, 19 nt, Artificial Sequence
  Description of Artificial Sequence: Synthetic oligonucleotide
acuuaagccaccauaugug

SEQ ID NO: 223506 - RNA, 19 nt, Artificial Sequence
  Description of Artificial Sequence: Synthetic oligonucleotide
ugccauaauggcuuauugu

SEQ ID NO: 223507 - RNA, 19 nt, Artificial Sequence
  Description of Artificial Sequence: Synthetic oligonucleotide
gucauuaccugggucacgg

SEQ ID NO: 223508 - RNA, 19 nt, Artificial Sequence
  Description of Artificial Sequence: Synthetic oligonucleotide
uucuuggaacggcagacgu

SEQ ID NO: 223509 - RNA, 19 nt, Artificial Sequence
  Description of Artificial Sequence: Synthetic oligonucleotide
acgacggacgugaaaacgc

SEQ ID NO: 223510 - RNA, 19 nt, Artificial Sequence
  Description of Artificial Sequence: Synthetic oligonucleotide
aauaugcaggguuuacguu

SEQ ID NO: 223511 - RNA, 19 nt, Artificial Sequence
  Description of Artificial Sequence: Synthetic oligonucleotide
agcuguuauacuacuagag

SEQ ID NO: 223512 - RNA, 19 nt, Artificial Sequence
  Description of Artificial Sequence: Synthetic oligonucleotide
aauggccaaacgacggacg

SEQ ID NO: 223513 - RNA, 19 nt, Artificial Sequence
  Description of Artificial Sequence: Synthetic oligonucleotide
aggagauauucuuuuggca

SEQ ID NO: 223514 - RNA, 19 nt, Artificial Sequence
  Description of Artificial Sequence: Synthetic oligonucleotide
caggguuuacguuuuguac

SEQ ID NO: 223515 - RNA, 19 nt, Artificial Sequence
  Description of Artificial Sequence: Synthetic oligonucleotide
ugcuagugcaccgaagacc

SEQ ID NO: 223516 - RNA, 19 nt, Artificial Sequence
  Description of Artificial Sequence: Synthetic oligonucleotide
gacgaguguugccauaaug

SEQ ID NO: 223517 - RNA, 19 nt, Artificial Sequence
  Description of Artificial Sequence: Synthetic oligonucleotide
aacgcaaaugacaugugaa

SEQ ID NO: 223518 - RNA, 19 nt, Artificial Sequence
  Description of Artificial Sequence: Synthetic oligonucleotide
uagaacuagaaaaggucua

SEQ ID NO: 223519 - RNA, 19 nt, Artificial Sequence
  Description of Artificial Sequence: Synthetic oligonucleotide
guuuuacaagaauggcucc

SEQ ID NO: 223520 - RNA, 19 nt, Artificial Sequence
  Description of Artificial Sequence: Synthetic oligonucleotide
uuggggaaguaucuagacu

SEQ ID NO: 223521 - RNA, 19 nt, Artificial Sequence
  Description of Artificial Sequence: Synthetic oligonucleotide
acccgcauaucaugugugc

SEQ ID NO: 223522 - RNA, 19 nt, Artificial Sequence
  Description of Artificial Sequence: Synthetic oligonucleotide
gauuuauucuuugcgcgac

SEQ ID NO: 223523 - RNA, 19 nt, Artificial Sequence
  Description of Artificial Sequence: Synthetic oligonucleotide
ugugauucccaaacguuuu

SEQ ID NO: 223524 - RNA, 19 nt, Artificial Sequence
  Description of Artificial Sequence: Synthetic oligonucleotide
uugcgcgacaugaagcucu

SEQ ID NO: 223525 - RNA, 19 nt, Artificial Sequence
  Description of Artificial Sequence: Synthetic oligonucleotide
ugcccuauuaagcuacaaa

SEQ ID NO: 223526 - RNA, 19 nt, Artificial Sequence
  Description of Artificial Sequence: Synthetic oligonucleotide
acuaucaccuagcuuguaa

SEQ ID NO: 223527 - RNA, 19 nt, Artificial Sequence
  Description of Artificial Sequence: Synthetic oligonucleotide
ugaaaacaugcgcccaaac

SEQ ID NO: 223528 - RNA, 19 nt, Artificial Sequence
  Description of Artificial Sequence: Synthetic oligonucleotide
aacagagcaccauccaauu

SEQ ID NO: 223529 - RNA, 19 nt, Artificial Sequence
  Description of Artificial Sequence: Synthetic oligonucleotide
augcuagugcaccgaagac

SEQ ID NO: 223530 - RNA, 19 nt, Artificial Sequence
  Description of Artificial Sequence: Synthetic oligonucleotide
acauuuaaccuagauacua

SEQ ID NO: 223531 - RNA, 19 nt, Artificial Sequence
  Description of Artificial Sequence: Synthetic oligonucleotide
gagauugaacugacgagug

SEQ ID NO: 223532 - RNA, 19 nt, Artificial Sequence
  Description of Artificial Sequence: Synthetic oligonucleotide
augcuuaguaagcuuuuca

SEQ ID NO: 223533 - RNA, 19 nt, Artificial Sequence
  Description of Artificial Sequence: Synthetic oligonucleotide
cagaagauauagccgcuag

SEQ ID NO: 223534 - RNA, 19 nt, Artificial Sequence
  Description of Artificial Sequence: Synthetic oligonucleotide
uacuacuagagggacccag

SEQ ID NO: 223535 - RNA, 19 nt, Artificial Sequence
  Description of Artificial Sequence: Synthetic oligonucleotide
acaccagauuuugauuagc

SEQ ID NO: 223536 - RNA, 19 nt, Artificial Sequence
  Description of Artificial Sequence: Synthetic oligonucleotide
cucgaauugaaaauguggu

SEQ ID NO: 223537 - RNA, 19 nt, Artificial Sequence
  Description of Artificial Sequence: Synthetic oligonucleotide
acauauuaucucccgucca

SEQ ID NO: 223538 - RNA, 19 nt, Artificial Sequence
  Description of Artificial Sequence: Synthetic oligonucleotide
ugacucggugaagacaucc

SEQ ID NO: 223539 - RNA, 19 nt, Artificial Sequence
  Description of Artificial Sequence: Synthetic oligonucleotide
uuacaggaucuacaacgcu

SEQ ID NO: 223540 - RNA, 19 nt, Artificial Sequence
  Description of Artificial Sequence: Synthetic oligonucleotide
uccgcucagguuugggccg

SEQ ID NO: 223541 - RNA, 19 nt, Artificial Sequence
  Description of Artificial Sequence: Synthetic oligonucleotide
uauagccgcuaguuuauuc

SEQ ID NO: 223542 - RNA, 19 nt, Artificial Sequence
  Description of Artificial Sequence: Synthetic oligonucleotide
guuacaguauugucgacua

SEQ ID NO: 223543 - RNA, 19 nt, Artificial Sequence
  Description of Artificial Sequence: Synthetic oligonucleotide
caagucuacugaguuacag

SEQ ID NO: 223544 - RNA, 19 nt, Artificial Sequence
  Description of Artificial Sequence: Synthetic oligonucleotide
cuagcuuguaaugagagcu

SEQ ID NO: 223545 - RNA, 19 nt, Artificial Sequence
  Description of Artificial Sequence: Synthetic oligonucleotide
cuacuagagggacccaggc

SEQ ID NO: 223546 - RNA, 19 nt, Artificial Sequence
  Description of Artificial Sequence: Synthetic oligonucleotide
acguauaacagcaggauuu

SEQ ID NO: 223547 - RNA, 19 nt, Artificial Sequence
  Description of Artificial Sequence: Synthetic oligonucleotide
uugucgacuacagccuccg

SEQ ID NO: 223548 - RNA, 19 nt, Artificial Sequence
  Description of Artificial Sequence: Synthetic oligonucleotide
aucaccuagcuuguaauga

SEQ ID NO: 223549 - RNA, 19 nt, Artificial Sequence
  Description of Artificial Sequence: Synthetic oligonucleotide
agguccaaccaaaugucac

SEQ ID NO: 223550 - RNA, 19 nt, Artificial Sequence
  Description of Artificial Sequence: Synthetic oligonucleotide
ugaucucccauucccuggu

SEQ ID NO: 223551 - RNA, 19 nt, Artificial Sequence
  Description of Artificial Sequence: Synthetic oligonucleotide
uuggucggaaaguuucaga

SEQ ID NO: 223552 - RNA, 19 nt, Artificial Sequence
  Description of Artificial Sequence: Synthetic oligonucleotide
uguauuuggggaguuggua

SEQ ID NO: 223553 - RNA, 19 nt, Artificial Sequence
  Description of Artificial Sequence: Synthetic oligonucleotide
agccaacgauuguaccucc

SEQ ID NO: 223554 - RNA, 19 nt, Artificial Sequence
  Description of Artificial Sequence: Synthetic oligonucleotide
acgcaaaugacaugugaau

SEQ ID NO: 223555 - RNA, 19 nt, Artificial Sequence
  Description of Artificial Sequence: Synthetic oligonucleotide
aacgaugccccguguuucu

SEQ ID NO: 223556 - RNA, 19 nt, Artificial Sequence
  Description of Artificial Sequence: Synthetic oligonucleotide
uuuauucuuugcgcgacau

SEQ ID NO: 223557 - RNA, 19 nt, Artificial Sequence
  Description of Artificial Sequence: Synthetic oligonucleotide
caccuuugucaacucaacc

SEQ ID NO: 223558 - RNA, 19 nt, Artificial Sequence
  Description of Artificial Sequence: Synthetic oligonucleotide
auuaagagacugagauaac

SEQ ID NO: 223559 - RNA, 19 nt, Artificial Sequence
  Description of Artificial Sequence: Synthetic oligonucleotide
agagcuauacacagacgag

SEQ ID NO: 223560 - RNA, 19 nt, Artificial Sequence
  Description of Artificial Sequence: Synthetic oligonucleotide
uggcggaagaugcuuagua

SEQ ID NO: 223561 - RNA, 19 nt, Artificial Sequence
  Description of Artificial Sequence: Synthetic oligonucleotide
ccuagauacuaucaccuag

SEQ ID NO: 223562 - RNA, 19 nt, Artificial Sequence
  Description of Artificial Sequence: Synthetic oligonucleotide
acgauuguaccuccaucug

SEQ ID NO: 223563 - RNA, 19 nt, Artificial Sequence
  Description of Artificial Sequence: Synthetic oligonucleotide
accuagcuuguaaugagag

SEQ ID NO: 223564 - RNA, 19 nt, Artificial Sequence
  Description of Artificial Sequence: Synthetic oligonucleotide
agauugaacugacgagugu

SEQ ID NO: 223565 - RNA, 19 nt, Artificial Sequence
  Description of Artificial Sequence: Synthetic oligonucleotide
ugccauacgcugaccaaac

SEQ ID NO: 223566 - RNA, 19 nt, Artificial Sequence
  Description of Artificial Sequence: Synthetic oligonucleotide
auuuauucuuugcgcgaca

SEQ ID NO: 223567 - RNA, 19 nt, Artificial Sequence
  Description of Artificial Sequence: Synthetic oligonucleotide
uaugcaggguuuacguuuu

SEQ ID NO: 223568 - RNA, 19 nt, Artificial Sequence
  Description of Artificial Sequence: Synthetic oligonucleotide
guccgcucagguuugggcc

SEQ ID NO: 223569 - RNA, 19 nt, Artificial Sequence
  Description of Artificial Sequence: Synthetic oligonucleotide
gguccaaccaaaugucacc

SEQ ID NO: 223570 - RNA, 19 nt, Artificial Sequence
  Description of Artificial Sequence: Synthetic oligonucleotide
cuaaaaccgagagcacugc

SEQ ID NO: 223571 - RNA, 19 nt, Artificial Sequence
  Description of Artificial Sequence: Synthetic oligonucleotide
cuacuuaagccaccauaug

SEQ ID NO: 223572 - RNA, 19 nt, Artificial Sequence
  Description of Artificial Sequence: Synthetic oligonucleotide
cacacguauaacagcagga

SEQ ID NO: 223573 - RNA, 19 nt, Artificial Sequence
  Description of Artificial Sequence: Synthetic oligonucleotide
ucagguuugggccgacguc

SEQ ID NO: 223574 - RNA, 19 nt, Artificial Sequence
  Description of Artificial Sequence: Synthetic oligonucleotide
uaucuagacucuucccaaa

SEQ ID NO: 223575 - RNA, 19 nt, Artificial Sequence
  Description of Artificial Sequence: Synthetic oligonucleotide
uggccuuuaugaucaaaau

SEQ ID NO: 223576 - RNA, 19 nt, Artificial Sequence
  Description of Artificial Sequence: Synthetic oligonucleotide
uuuaaauggcucggaugcu

SEQ ID NO: 223577 - RNA, 19 nt, Artificial Sequence
  Description of Artificial Sequence: Synthetic oligonucleotide
cucggaugcuagugcaccg

SEQ ID NO: 223578 - RNA, 19 nt, Artificial Sequence
  Description of Artificial Sequence: Synthetic oligonucleotide
auggccaaacgacggacgu

SEQ ID NO: 223579 - RNA, 19 nt, Artificial Sequence
  Description of Artificial Sequence: Synthetic oligonucleotide
uacaacgcuuguguggaac

SEQ ID NO: 223580 - RNA, 19 nt, Artificial Sequence
  Description of Artificial Sequence: Synthetic oligonucleotide
ucauuaccugggucacggg

SEQ ID NO: 223581 - RNA, 19 nt, Artificial Sequence
  Description of Artificial Sequence: Synthetic oligonucleotide
caguauugucgacuacagc

SEQ ID NO: 223582 - RNA, 19 nt, Artificial Sequence
  Description of Artificial Sequence: Synthetic oligonucleotide
acacguauaacagcaggau

SEQ ID NO: 223583 - RNA, 19 nt, Artificial Sequence
  Description of Artificial Sequence: Synthetic oligonucleotide
ccgacguccugcuaaaacc

SEQ ID NO: 223584 - RNA, 19 nt, Artificial Sequence
  Description of Artificial Sequence: Synthetic oligonucleotide
acuuaugauaaugcccuau

SEQ ID NO: 223585 - RNA, 19 nt, Artificial Sequence
  Description of Artificial Sequence: Synthetic oligonucleotide
auauuaucucccguccacu

SEQ ID NO: 223586 - RNA, 19 nt, Artificial Sequence
  Description of Artificial Sequence: Synthetic oligonucleotide
caaacccgcauaucaugug

SEQ ID NO: 223587 - RNA, 19 nt, Artificial Sequence
  Description of Artificial Sequence: Synthetic oligonucleotide
ugucauuaccugggucacg

SEQ ID NO: 223588 - RNA, 19 nt, Artificial Sequence
  Description of Artificial Sequence: Synthetic oligonucleotide
agagcagacgcuaaugguu

SEQ ID NO: 223589 - RNA, 19 nt, Artificial Sequence
  Description of Artificial Sequence: Synthetic oligonucleotide
aacccgcauaucaugugug

SEQ ID NO: 223590 - RNA, 19 nt, Artificial Sequence
  Description of Artificial Sequence: Synthetic oligonucleotide
caacgauuguaccuccauc

SEQ ID NO: 223591 - RNA, 19 nt, Artificial Sequence
  Description of Artificial Sequence: Synthetic oligonucleotide
uagcuuguaaugagagcua

SEQ ID NO: 223592 - RNA, 19 nt, Artificial Sequence
  Description of Artificial Sequence: Synthetic oligonucleotide
guagccgaugguucuuggc

SEQ ID NO: 223593 - RNA, 19 nt, Artificial Sequence
  Description of Artificial Sequence: Synthetic oligonucleotide
auaagcagguccaaccaaa

SEQ ID NO: 223594 - RNA, 19 nt, Artificial Sequence
  Description of Artificial Sequence: Synthetic oligonucleotide
ugccaaucagacuucucuu

SEQ ID NO: 223595 - RNA, 19 nt, Artificial Sequence
  Description of Artificial Sequence: Synthetic oligonucleotide
guaccguaaaagccaucgc

SEQ ID NO: 223596 - RNA, 19 nt, Artificial Sequence
  Description of Artificial Sequence: Synthetic oligonucleotide
aucucccguccacuuaaag

SEQ ID NO: 223597 - RNA, 19 nt, Artificial Sequence
  Description of Artificial Sequence: Synthetic oligonucleotide
aggaucuacaacgcuugug

SEQ ID NO: 223598 - RNA, 19 nt, Artificial Sequence
  Description of Artificial Sequence: Synthetic oligonucleotide
auauaguuucucagaagaa

SEQ ID NO: 223599 - RNA, 19 nt, Artificial Sequence
  Description of Artificial Sequence: Synthetic oligonucleotide
ggauuuauucuuugcgcga

SEQ ID NO: 223600 - RNA, 19 nt, Artificial Sequence
  Description of Artificial Sequence: Synthetic oligonucleotide
cuuuguccgcucagguuug

SEQ ID NO: 223601 - RNA, 19 nt, Artificial Sequence
  Description of Artificial Sequence: Synthetic oligonucleotide
gagauccccaucaagccaa

SEQ ID NO: 223602 - RNA, 19 nt, Artificial Sequence
  Description of Artificial Sequence: Synthetic oligonucleotide
gagacugagauaacucgaa

SEQ ID NO: 223603 - RNA, 19 nt, Artificial Sequence
  Description of Artificial Sequence: Synthetic oligonucleotide
uccaccgccaaaugcuaau

SEQ ID NO: 223604 - RNA, 19 nt, Artificial Sequence
  Description of Artificial Sequence: Synthetic oligonucleotide
agaaugcuguagugaauua

SEQ ID NO: 223605 - RNA, 19 nt, Artificial Sequence
  Description of Artificial Sequence: Synthetic oligonucleotide
agccgcuaguuuauucuac

SEQ ID NO: 223606 - RNA, 19 nt, Artificial Sequence
  Description of Artificial Sequence: Synthetic oligonucleotide
agacgcuaaugguuaacua

SEQ ID NO: 223607 - RNA, 19 nt, Artificial Sequence
  Description of Artificial Sequence: Synthetic oligonucleotide
auaagcaaccuggcaguca

SEQ ID NO: 223608 - RNA, 19 nt, Artificial Sequence
  Description of Artificial Sequence: Synthetic oligonucleotide
guaugcaacaaggcuaaaa

SEQ ID NO: 223609 - RNA, 19 nt, Artificial Sequence
  Description of Artificial Sequence: Synthetic oligonucleotide
agaaagugugugauuccca

SEQ ID NO: 223610 - RNA, 19 nt, Artificial Sequence
  Description of Artificial Sequence: Synthetic oligonucleotide
caccauauguggcugguaa

SEQ ID NO: 223611 - RNA, 19 nt, Artificial Sequence
  Description of Artificial Sequence: Synthetic oligonucleotide
ugcgcgacaugaagcucug

SEQ ID NO: 223612 - RNA, 19 nt, Artificial Sequence
  Description of Artificial Sequence: Synthetic oligonucleotide
cuuugcgcgacaugaagcu

SEQ ID NO: 223613 - RNA, 19 nt, Artificial Sequence
  Description of Artificial Sequence: Synthetic oligonucleotide
uuugggccgacguccugcu

SEQ ID NO: 223614 - RNA, 19 nt, Artificial Sequence
  Description of Artificial Sequence: Synthetic oligonucleotide
uaccccaaguacacugcuc

SEQ ID NO: 223615 - RNA, 19 nt, Artificial Sequence
  Description of Artificial Sequence: Synthetic oligonucleotide
accgagagcacugcauuca

SEQ ID NO: 223616 - RNA, 19 nt, Artificial Sequence
  Description of Artificial Sequence: Synthetic oligonucleotide
accuagauacuaucaccua

SEQ ID NO: 223617 - RNA, 19 nt, Artificial Sequence
  Description of Artificial Sequence: Synthetic oligonucleotide
ccuauuaagcuacaaauau

SEQ ID NO: 223618 - RNA, 19 nt, Artificial Sequence
  Description of Artificial Sequence: Synthetic oligonucleotide
cugacuuagcagccaacga

SEQ ID NO: 223619 - RNA, 19 nt, Artificial Sequence
  Description of Artificial Sequence: Synthetic oligonucleotide
aaugcccuauuaagcuaca

SEQ ID NO: 223620 - RNA, 19 nt, Artificial Sequence
  Description of Artificial Sequence: Synthetic oligonucleotide
accggcgugucuaagccug

SEQ ID NO: 223621 - RNA, 19 nt, Artificial Sequence
  Description of Artificial Sequence: Synthetic oligonucleotide
gauauagccgcuaguuuau

SEQ ID NO: 223622 - RNA, 19 nt, Artificial Sequence
  Description of Artificial Sequence: Synthetic oligonucleotide
uuggaacggcagacguccc

SEQ ID NO: 223623 - RNA, 19 nt, Artificial Sequence
  Description of Artificial Sequence: Synthetic oligonucleotide
gaaacgaugccccguguuu

SEQ ID NO: 223624 - RNA, 19 nt, Artificial Sequence
  Description of Artificial Sequence: Synthetic oligonucleotide
uacuuaugauaaugcccua

SEQ ID NO: 223625 - RNA, 19 nt, Artificial Sequence
  Description of Artificial Sequence: Synthetic oligonucleotide
aagugauaagcagguccaa

SEQ ID NO: 223626 - RNA, 19 nt, Artificial Sequence
  Description of Artificial Sequence: Synthetic oligonucleotide
gcuuaauauauuacaucca

SEQ ID NO: 223627 - RNA, 19 nt, Artificial Sequence
  Description of Artificial Sequence: Synthetic oligonucleotide
cauuuccucaauaccccaa

SEQ ID NO: 223628 - RNA, 19 nt, Artificial Sequence
  Description of Artificial Sequence: Synthetic oligonucleotide
ucggaugcuagugcaccga

SEQ ID NO: 223629 - RNA, 19 nt, Artificial Sequence
  Description of Artificial Sequence: Synthetic oligonucleotide
ccucaauaccccaaguaca

SEQ ID NO: 223630 - RNA, 19 nt, Artificial Sequence
  Description of Artificial Sequence: Synthetic oligonucleotide
gcccuauuaagcuacaaau

SEQ ID NO: 223631 - RNA, 19 nt, Artificial Sequence
  Description of Artificial Sequence: Synthetic oligonucleotide
auacuaucaccuagcuugu

SEQ ID NO: 223632 - RNA, 19 nt, Artificial Sequence
  Description of Artificial Sequence: Synthetic oligonucleotide
guauugucgacuacagccu

SEQ ID NO: 223633 - RNA, 19 nt, Artificial Sequence
  Description of Artificial Sequence: Synthetic oligonucleotide
gagcagacgcuaaugguua

SEQ ID NO: 223634 - RNA, 19 nt, Artificial Sequence
  Description of Artificial Sequence: Synthetic oligonucleotide
aacuaucuuuaaacaucaa

SEQ ID NO: 223635 - RNA, 19 nt, Artificial Sequence
  Description of Artificial Sequence: Synthetic oligonucleotide
caccuagcuuguaaugaga

SEQ ID NO: 223636 - RNA, 19 nt, Artificial Sequence
  Description of Artificial Sequence: Synthetic oligonucleotide
cacgaauaaagagaaugcu

SEQ ID NO: 223637 - RNA, 19 nt, Artificial Sequence
  Description of Artificial Sequence: Synthetic oligonucleotide
ucggcuuuugcuggagcaa

SEQ ID NO: 223638 - RNA, 19 nt, Artificial Sequence
  Description of Artificial Sequence: Synthetic oligonucleotide
acggcagacgucccuuccu

SEQ ID NO: 223639 - RNA, 19 nt, Artificial Sequence
  Description of Artificial Sequence: Synthetic oligonucleotide
uuugcgcgacaugaagcuc

SEQ ID NO: 223640 - RNA, 19 nt, Artificial Sequence
  Description of Artificial Sequence: Synthetic oligonucleotide
caaucagacuucucuucaa

SEQ ID NO: 223641 - RNA, 19 nt, Artificial Sequence
  Description of Artificial Sequence: Synthetic oligonucleotide
ugucgacuacagccuccgc

SEQ ID NO: 223642 - RNA, 19 nt, Artificial Sequence
  Description of Artificial Sequence: Synthetic oligonucleotide
cuaucaccuagcuuguaau

SEQ ID NO: 223643 - RNA, 19 nt, Artificial Sequence
  Description of Artificial Sequence: Synthetic oligonucleotide
ugacgaguguugccauaau

SEQ ID NO: 223644 - RNA, 19 nt, Artificial Sequence
  Description of Artificial Sequence: Synthetic oligonucleotide
uggccaaacgacggacgug

SEQ ID NO: 223645 - RNA, 19 nt, Artificial Sequence
  Description of Artificial Sequence: Synthetic oligonucleotide
aggaaacgaugccccgugu

SEQ ID NO: 223646 - RNA, 19 nt, Artificial Sequence
  Description of Artificial Sequence: Synthetic oligonucleotide
acggacgugaaaacgcaaa

SEQ ID NO: 223647 - RNA, 19 nt, Artificial Sequence
  Description of Artificial Sequence: Synthetic oligonucleotide
ccgcauaucaugugugcug

SEQ ID NO: 223648 - RNA, 19 nt, Artificial Sequence
  Description of Artificial Sequence: Synthetic oligonucleotide
uaucucccguccacuuaaa

SEQ ID NO: 223649 - RNA, 19 nt, Artificial Sequence
  Description of Artificial Sequence: Synthetic oligonucleotide
acgucccuuccugacaacu

SEQ ID NO: 223650 - RNA, 19 nt, Artificial Sequence
  Description of Artificial Sequence: Synthetic oligonucleotide
gcgacaugaagcucugaga

SEQ ID NO: 223651 - RNA, 19 nt, Artificial Sequence
  Description of Artificial Sequence: Synthetic oligonucleotide
guaccuccaucugacugac

SEQ ID NO: 223652 - RNA, 19 nt, Artificial Sequence
  Description of Artificial Sequence: Synthetic oligonucleotide
gaacggcagacgucccuuc

SEQ ID NO: 223653 - RNA, 19 nt, Artificial Sequence
  Description of Artificial Sequence: Synthetic oligonucleotide
ggucacggguucucgaguc

SEQ ID NO: 223654 - RNA, 19 nt, Artificial Sequence
  Description of Artificial Sequence: Synthetic oligonucleotide
ggccaaacgacggacguga

SEQ ID NO: 223655 - RNA, 19 nt, Artificial Sequence
  Description of Artificial Sequence: Synthetic oligonucleotide
cgcgacaugaagcucugag

SEQ ID NO: 223656 - RNA, 19 nt, Artificial Sequence
  Description of Artificial Sequence: Synthetic oligonucleotide
agcagacgcuaaugguuaa

SEQ ID NO: 223657 - RNA, 19 nt, Artificial Sequence
  Description of Artificial Sequence: Synthetic oligonucleotide
agaugcuuaguaagcuuuu

SEQ ID NO: 223658 - RNA, 19 nt, Artificial Sequence
  Description of Artificial Sequence: Synthetic oligonucleotide
gcuuaguaagcuuuucaau

SEQ ID NO: 223659 - RNA, 19 nt, Artificial Sequence
  Description of Artificial Sequence: Synthetic oligonucleotide
caccgccaaaugcuaauga

SEQ ID NO: 223660 - RNA, 19 nt, Artificial Sequence
  Description of Artificial Sequence: Synthetic oligonucleotide
gccgacguccugcuaaaac

SEQ ID NO: 223661 - RNA, 19 nt, Artificial Sequence
  Description of Artificial Sequence: Synthetic oligonucleotide
auucuuugcgcgacaugaa

SEQ ID NO: 223662 - RNA, 19 nt, Artificial Sequence
  Description of Artificial Sequence: Synthetic oligonucleotide
ccaaggacgcauccgaaga

SEQ ID NO: 223663 - RNA, 19 nt, Artificial Sequence
  Description of Artificial Sequence: Synthetic oligonucleotide
aucaagccaaagggcaaau

SEQ ID NO: 223664 - RNA, 19 nt, Artificial Sequence
  Description of Artificial Sequence: Synthetic oligonucleotide
cccuauuaagcuacaaaua

SEQ ID NO: 223665 - RNA, 19 nt, Artificial Sequence
  Description of Artificial Sequence: Synthetic oligonucleotide
gcaggguuuacguuuugua

SEQ ID NO: 223666 - RNA, 19 nt, Artificial Sequence
  Description of Artificial Sequence: Synthetic oligonucleotide
cucgugccgugcuucccug

SEQ ID NO: 223667 - RNA, 19 nt, Artificial Sequence
  Description of Artificial Sequence: Synthetic oligonucleotide
uccugacaacugaucuauu

SEQ ID NO: 223668 - RNA, 19 nt, Artificial Sequence
  Description of Artificial Sequence: Synthetic oligonucleotide
ggaugcuagugcaccgaag

SEQ ID NO: 223669 - RNA, 19 nt, Artificial Sequence
  Description of Artificial Sequence: Synthetic oligonucleotide
augcaggguuuacguuuug

SEQ ID NO: 223670 - RNA, 19 nt, Artificial Sequence
  Description of Artificial Sequence: Synthetic oligonucleotide
agccaucgcuuacuuuaaa

SEQ ID NO: 223671 - RNA, 19 nt, Artificial Sequence
  Description of Artificial Sequence: Synthetic oligonucleotide
agccugucauuguucuaua

SEQ ID NO: 223672 - RNA, 19 nt, Artificial Sequence
  Description of Artificial Sequence: Synthetic oligonucleotide
ccgcccuuucacaagagca

SEQ ID NO: 223673 - RNA, 19 nt, Artificial Sequence
  Description of Artificial Sequence: Synthetic oligonucleotide
gugugauucccaaacguuu

SEQ ID NO: 223674 - RNA, 19 nt, Artificial Sequence
  Description of Artificial Sequence: Synthetic oligonucleotide
cugccauacgcugaccaaa

SEQ ID NO: 223675 - RNA, 19 nt, Artificial Sequence
  Description of Artificial Sequence: Synthetic oligonucleotide
cacuugacagaagcuugca

SEQ ID NO: 223676 - RNA, 19 nt, Artificial Sequence
  Description of Artificial Sequence: Synthetic oligonucleotide
ggcacacguauaacagcag

SEQ ID NO: 223677 - RNA, 19 nt, Artificial Sequence
  Description of Artificial Sequence: Synthetic oligonucleotide
gacggacgugaaaacgcaa

SEQ ID NO: 223678 - RNA, 19 nt, Artificial Sequence
  Description of Artificial Sequence: Synthetic oligonucleotide
cagacgcuaaugguuaacu

SEQ ID NO: 223679 - RNA, 19 nt, Artificial Sequence
  Description of Artificial Sequence: Synthetic oligonucleotide
gcauaucaugugugcugug

SEQ ID NO: 223680 - RNA, 19 nt, Artificial Sequence
  Description of Artificial Sequence: Synthetic oligonucleotide
cacguauaacagcaggauu

SEQ ID NO: 223681 - RNA, 19 nt, Artificial Sequence
  Description of Artificial Sequence: Synthetic oligonucleotide
ucgugccgugcuucccugu

SEQ ID NO: 223682 - RNA, 19 nt, Artificial Sequence
  Description of Artificial Sequence: Synthetic oligonucleotide
auacuacuagagggaccca

SEQ ID NO: 223683 - RNA, 19 nt, Artificial Sequence
  Description of Artificial Sequence: Synthetic oligonucleotide
uacuaucaccuagcuugua

SEQ ID NO: 223684 - RNA, 19 nt, Artificial Sequence
  Description of Artificial Sequence: Synthetic oligonucleotide
auauagccgcuaguuuauu

SEQ ID NO: 223685 - RNA, 19 nt, Artificial Sequence
  Description of Artificial Sequence: Synthetic oligonucleotide
ccucccggauaggagagag

SEQ ID NO: 223686 - RNA, 19 nt, Artificial Sequence
  Description of Artificial Sequence: Synthetic oligonucleotide
augcccuauuaagcuacaa

SEQ ID NO: 223687 - RNA, 19 nt, Artificial Sequence
  Description of Artificial Sequence: Synthetic oligonucleotide
cauauguggcugguaauuu

SEQ ID NO: 223688 - RNA, 19 nt, Artificial Sequence
  Description of Artificial Sequence: Synthetic oligonucleotide
gugccgugcuucccuguuc

SEQ ID NO: 223689 - RNA, 19 nt, Artificial Sequence
  Description of Artificial Sequence: Synthetic oligonucleotide
uggcuccguccaugguuga

SEQ ID NO: 223690 - RNA, 19 nt, Artificial Sequence
  Description of Artificial Sequence: Synthetic oligonucleotide
gcugccauacgcugaccaa

SEQ ID NO: 223691 - RNA, 19 nt, Artificial Sequence
  Description of Artificial Sequence: Synthetic oligonucleotide
ccaaacccgcauaucaugu

SEQ ID NO: 223692 - RNA, 19 nt, Artificial Sequence
  Description of Artificial Sequence: Synthetic oligonucleotide
gcagacgcuaaugguuaac

SEQ ID NO: 223693 - RNA, 19 nt, Artificial Sequence
  Description of Artificial Sequence: Synthetic oligonucleotide
ccgagagcacugcauucac

SEQ ID NO: 223694 - RNA, 19 nt, Artificial Sequence
  Description of Artificial Sequence: Synthetic oligonucleotide
cuccaccgccaaaugcuaa

SEQ ID NO: 223695 - RNA, 19 nt, Artificial Sequence
  Description of Artificial Sequence: Synthetic oligonucleotide
ccguaaaagccaucgcuua

SEQ ID NO: 223696 - RNA, 19 nt, Artificial Sequence
  Description of Artificial Sequence: Synthetic oligonucleotide
gggaguugguaugcaacaa

SEQ ID NO: 223697 - RNA, 19 nt, Artificial Sequence
  Description of Artificial Sequence: Synthetic oligonucleotide
cgcccaaacccgcauauca

SEQ ID NO: 223698 - RNA, 19 nt, Artificial Sequence
  Description of Artificial Sequence: Synthetic oligonucleotide
gucuucaggcucgugccgu

SEQ ID NO: 223699 - RNA, 19 nt, Artificial Sequence
  Description of Artificial Sequence: Synthetic oligonucleotide
ggguagccgaugguucuug

SEQ ID NO: 223700 - RNA, 19 nt, Artificial Sequence
  Description of Artificial Sequence: Synthetic oligonucleotide
gucacggguucucgagucu

SEQ ID NO: 223701 - RNA, 19 nt, Artificial Sequence
  Description of Artificial Sequence: Synthetic oligonucleotide
ccgccaaaugcuaaugagu

SEQ ID NO: 223702 - RNA, 19 nt, Artificial Sequence
  Description of Artificial Sequence: Synthetic oligonucleotide
ggaaacgaugccccguguu

SEQ ID NO: 223703 - RNA, 19 nt, Artificial Sequence
  Description of Artificial Sequence: Synthetic oligonucleotide
guucuuggcggaagaugcu

SEQ ID NO: 223704 - RNA, 19 nt, Artificial Sequence
  Description of Artificial Sequence: Synthetic oligonucleotide
gugcaccgaagacccuguc

SEQ ID NO: 223705 - RNA, 19 nt, Artificial Sequence
  Description of Artificial Sequence: Synthetic oligonucleotide
uugggccgacguccugcua

SEQ ID NO: 223706 - RNA, 19 nt, Artificial Sequence
  Description of Artificial Sequence: Synthetic oligonucleotide
ccaccgccaaaugcuaaug

SEQ ID NO: 223707 - RNA, 19 nt, Artificial Sequence
  Description of Artificial Sequence: Synthetic oligonucleotide
cacuuagguuuggucggaa

SEQ ID NO: 223708 - RNA, 19 nt, Artificial Sequence
  Description of Artificial Sequence: Synthetic oligonucleotide
cgacggacgugaaaacgca

SEQ ID NO: 223709 - RNA, 19 nt, Artificial Sequence
  Description of Artificial Sequence: Synthetic oligonucleotide
caugcgcccaaacccgcau

SEQ ID NO: 223710 - RNA, 19 nt, Artificial Sequence
  Description of Artificial Sequence: Synthetic oligonucleotide
cccaaacguuuuacaagaa

SEQ ID NO: 223711 - RNA, 19 nt, Artificial Sequence
  Description of Artificial Sequence: Synthetic oligonucleotide
guccgucacugucuuuaau

SEQ ID NO: 223712 - RNA, 19 nt, Artificial Sequence
  Description of Artificial Sequence: Synthetic oligonucleotide
cacuguuuuggaggccacu

SEQ ID NO: 223713 - RNA, 19 nt, Artificial Sequence
  Description of Artificial Sequence: Synthetic oligonucleotide
cggcagacgucccuuccug

SEQ ID NO: 223714 - RNA, 19 nt, Artificial Sequence
  Description of Artificial Sequence: Synthetic oligonucleotide
ccaacgauuguaccuccau

SEQ ID NO: 223715 - RNA, 19 nt, Artificial Sequence
  Description of Artificial Sequence: Synthetic oligonucleotide
gccauacgcugaccaaacu

SEQ ID NO: 223716 - RNA, 19 nt, Artificial Sequence
  Description of Artificial Sequence: Synthetic oligonucleotide
caccggcgugucuaagccu

SEQ ID NO: 223717 - RNA, 19 nt, Artificial Sequence
  Description of Artificial Sequence: Synthetic oligonucleotide
gggccgacguccugcuaaa

SEQ ID NO: 223718 - RNA, 19 nt, Artificial Sequence
  Description of Artificial Sequence: Synthetic oligonucleotide
gggaaguaucuagacucuu

SEQ ID NO: 223719 - RNA, 19 nt, Artificial Sequence
  Description of Artificial Sequence: Synthetic oligonucleotide
cgcaaaugacaugugaauu

SEQ ID NO: 223720 - RNA, 19 nt, Artificial Sequence
  Description of Artificial Sequence: Synthetic oligonucleotide
gcccaaacccgcauaucau

SEQ ID NO: 223721 - RNA, 19 nt, Artificial Sequence
  Description of Artificial Sequence: Synthetic oligonucleotide
cccgcauaucaugugugcu

SEQ ID NO: 223722 - RNA, 19 nt, Artificial Sequence
  Description of Artificial Sequence: Synthetic oligonucleotide
gcgcccaaacccgcauauc

SEQ ID NO: 223723 - RNA, 19 nt, Artificial Sequence
  Description of Artificial Sequence: Synthetic oligonucleotide
cggacgugaaaacgcaaau

SEQ ID NO: 223724 - RNA, 19 nt, Artificial Sequence
  Description of Artificial Sequence: Synthetic oligonucleotide
gccaaacgacggacgugaa

SEQ ID NO: 223725 - RNA, 19 nt, Artificial Sequence
  Description of Artificial Sequence: Synthetic oligonucleotide
ccgaugguucuuggcggaa

SEQ ID NO: 223726 - RNA, 19 nt, Artificial Sequence
  Description of Artificial Sequence: Synthetic oligonucleotide
gcaccgacuccgguccccu

SEQ ID NO: 223727 - RNA, 19 nt, Artificial Sequence
  Description of Artificial Sequence: Synthetic oligonucleotide
ggccgacguccugcuaaaa

SEQ ID NO: 223728 - RNA, 19 nt, Artificial Sequence
  Description of Artificial Sequence: Synthetic oligonucleotide
gcgcgacaugaagcucuga

SEQ ID NO: 223729 - RNA, 19 nt, Artificial Sequence
  Description of Artificial Sequence: Synthetic oligonucleotide
ccgcucagguuugggccga

SEQ ID NO: 223730 - RNA, 19 nt, Artificial Sequence
  Description of Artificial Sequence: Synthetic oligonucleotide
ccggcgugucuaagccugu

SEQ ID NO: 223731 - RNA, 19 nt, Artificial Sequence
  Description of Artificial Sequence: Synthetic oligonucleotide
cgcucagguuugggccgac

SEQ ID NO: 223732 - RNA, 19 nt, Artificial Sequence
  Description of Artificial Sequence: Synthetic oligonucleotide
ugaguauucgcuaugaggg

SEQ ID NO: 223733 - RNA, 19 nt, Artificial Sequence
  Description of Artificial Sequence: Synthetic oligonucleotide
uuuacuuaaaucugggagg

SEQ ID NO: 223734 - RNA, 19 nt, Artificial Sequence
  Description of Artificial Sequence: Synthetic oligonucleotide
uugauuaucguaaugauuc

SEQ ID NO: 223735 - RNA, 19 nt, Artificial Sequence
  Description of Artificial Sequence: Synthetic oligonucleotide
uuuggcauaacucugagaa

SEQ ID NO: 223736 - RNA, 19 nt, Artificial Sequence
  Description of Artificial Sequence: Synthetic oligonucleotide
uguaagcccagcaaaaccg

SEQ ID NO: 223737 - RNA, 19 nt, Artificial Sequence
  Description of Artificial Sequence: Synthetic oligonucleotide
acuaauugugcuuagucuc

SEQ ID NO: 223738 - RNA, 19 nt, Artificial Sequence
  Description of Artificial Sequence: Synthetic oligonucleotide
aaacaguccaaggaaaggc

SEQ ID NO: 223739 - RNA, 19 nt, Artificial Sequence
  Description of Artificial Sequence: Synthetic oligonucleotide
gcugauaaaggcuagaacg

SEQ ID NO: 223740 - RNA, 19 nt, Artificial Sequence
  Description of Artificial Sequence: Synthetic oligonucleotide
auauguaucaggcuaguag

SEQ ID NO: 223741 - RNA, 19 nt, Artificial Sequence
  Description of Artificial Sequence: Synthetic oligonucleotide
ugugcuuagucucugaucu

SEQ ID NO: 223742 - RNA, 19 nt, Artificial Sequence
  Description of Artificial Sequence: Synthetic oligonucleotide
uccaauuuaucuuaaagaa

SEQ ID NO: 223743 - RNA, 19 nt, Artificial Sequence
  Description of Artificial Sequence: Synthetic oligonucleotide
aaagugacccucaacauuc

SEQ ID NO: 223744 - RNA, 19 nt, Artificial Sequence
  Description of Artificial Sequence: Synthetic oligonucleotide
gcuaguauugccuagauug

SEQ ID NO: 223745 - RNA, 19 nt, Artificial Sequence
  Description of Artificial Sequence: Synthetic oligonucleotide
gauuauaccuucgauuugg

SEQ ID NO: 223746 - RNA, 19 nt, Artificial Sequence
  Description of Artificial Sequence: Synthetic oligonucleotide
uuagugguuacacauuuug

SEQ ID NO: 223747 - RNA, 19 nt, Artificial Sequence
  Description of Artificial Sequence: Synthetic oligonucleotide
aauucuucgaaugugagua

SEQ ID NO: 223748 - RNA, 19 nt, Artificial Sequence
  Description of Artificial Sequence: Synthetic oligonucleotide
acuaguacauccaugaauc

SEQ ID NO: 223749 - RNA, 19 nt, Artificial Sequence
  Description of Artificial Sequence: Synthetic oligonucleotide
aucguaaugauucugcugu

SEQ ID NO: 223750 - RNA, 19 nt, Artificial Sequence
  Description of Artificial Sequence: Synthetic oligonucleotide
agaguaugguuauucagac

SEQ ID NO: 223751 - RNA, 19 nt, Artificial Sequence
  Description of Artificial Sequence: Synthetic oligonucleotide
auuaucguaaugauucugc

SEQ ID NO: 223752 - RNA, 19 nt, Artificial Sequence
  Description of Artificial Sequence: Synthetic oligonucleotide
aaaccugauaaauugcccu

SEQ ID NO: 223753 - RNA, 19 nt, Artificial Sequence
  Description of Artificial Sequence: Synthetic oligonucleotide
uauguaucaggcuaguaga

SEQ ID NO: 223754 - RNA, 19 nt, Artificial Sequence
  Description of Artificial Sequence: Synthetic oligonucleotide
cauaagugcaucccaaugg

SEQ ID NO: 223755 - RNA, 19 nt, Artificial Sequence
  Description of Artificial Sequence: Synthetic oligonucleotide
aagcauaguuggaagagcc

SEQ ID NO: 223756 - RNA, 19 nt, Artificial Sequence
  Description of Artificial Sequence: Synthetic oligonucleotide
aaaguuuugaacagggcug

SEQ ID NO: 223757 - RNA, 19 nt, Artificial Sequence
  Description of Artificial Sequence: Synthetic oligonucleotide
agacuaauugugcuuaguc

SEQ ID NO: 223758 - RNA, 19 nt, Artificial Sequence
  Description of Artificial Sequence: Synthetic oligonucleotide
aaucugggaggucugagug

SEQ ID NO: 223759 - RNA, 19 nt, Artificial Sequence
  Description of Artificial Sequence: Synthetic oligonucleotide
ucgaaugugaguauucgcu

SEQ ID NO: 223760 - RNA, 19 nt, Artificial Sequence
  Description of Artificial Sequence: Synthetic oligonucleotide
agaauaggacauccgaggg

SEQ ID NO: 223761 - RNA, 19 nt, Artificial Sequence
  Description of Artificial Sequence: Synthetic oligonucleotide
gaagaguaugguuauucag

SEQ ID NO: 223762 - RNA, 19 nt, Artificial Sequence
  Description of Artificial Sequence: Synthetic oligonucleotide
gugaguauucgcuaugagg

SEQ ID NO: 223763 - RNA, 19 nt, Artificial Sequence
  Description of Artificial Sequence: Synthetic oligonucleotide
ugaguagaauuguuggcgg

SEQ ID NO: 223764 - RNA, 19 nt, Artificial Sequence
  Description of Artificial Sequence: Synthetic oligonucleotide
caacuuagaguguuuauag

SEQ ID NO: 223765 - RNA, 19 nt, Artificial Sequence
  Description of Artificial Sequence: Synthetic oligonucleotide
gauaauuuggcucaucaua

SEQ ID NO: 223766 - RNA, 19 nt, Artificial Sequence
  Description of Artificial Sequence: Synthetic oligonucleotide
augaguagaauuguuggcg

SEQ ID NO: 223767 - RNA, 19 nt, Artificial Sequence
  Description of Artificial Sequence: Synthetic oligonucleotide
uuaacaccgcuauaaaaca

SEQ ID NO: 223768 - RNA, 19 nt, Artificial Sequence
  Description of Artificial Sequence: Synthetic oligonucleotide
cugauaaaggcuagaacgc

SEQ ID NO: 223769 - RNA, 19 nt, Artificial Sequence
  Description of Artificial Sequence: Synthetic oligonucleotide
uuaccaucuaauccaguag

SEQ ID NO: 223770 - RNA, 19 nt, Artificial Sequence
  Description of Artificial Sequence: Synthetic oligonucleotide
aauuuggcucaucauagaa

SEQ ID NO: 223771 - RNA, 19 nt, Artificial Sequence
  Description of Artificial Sequence: Synthetic oligonucleotide
aacggcagugguguaagcc

SEQ ID NO: 223772 - RNA, 19 nt, Artificial Sequence
  Description of Artificial Sequence: Synthetic oligonucleotide
ugaauucuucgaaugugag

SEQ ID NO: 223773 - RNA, 19 nt, Artificial Sequence
  Description of Artificial Sequence: Synthetic oligonucleotide
gauaguagguagcugauaa

SEQ ID NO: 223774 - RNA, 19 nt, Artificial Sequence
  Description of Artificial Sequence: Synthetic oligonucleotide
ucaauuacuugcagaaacu

SEQ ID NO: 223775 - RNA, 19 nt, Artificial Sequence
  Description of Artificial Sequence: Synthetic oligonucleotide
aguuggaagagcccacagc

SEQ ID NO: 223776 - RNA, 19 nt, Artificial Sequence
  Description of Artificial Sequence: Synthetic oligonucleotide
uagugguuacacauuuugg

SEQ ID NO: 223777 - RNA, 19 nt, Artificial Sequence
  Description of Artificial Sequence: Synthetic oligonucleotide
aaauccuucguggucggcg

SEQ ID NO: 223778 - RNA, 19 nt, Artificial Sequence
  Description of Artificial Sequence: Synthetic oligonucleotide
cacccgauaacuuucuucc

SEQ ID NO: 223779 - RNA, 19 nt, Artificial Sequence
  Description of Artificial Sequence: Synthetic oligonucleotide
ugaguuaacaccgcuauaa

SEQ ID NO: 223780 - RNA, 19 nt, Artificial Sequence
  Description of Artificial Sequence: Synthetic oligonucleotide
aaugugaguauucgcuaug

SEQ ID NO: 223781 - RNA, 19 nt, Artificial Sequence
  Description of Artificial Sequence: Synthetic oligonucleotide
cuagauuggggauaccaag

SEQ ID NO: 223782 - RNA, 19 nt, Artificial Sequence
  Description of Artificial Sequence: Synthetic oligonucleotide
aaccugauaaauugcccug

SEQ ID NO: 223783 - RNA, 19 nt, Artificial Sequence
  Description of Artificial Sequence: Synthetic oligonucleotide
aucuguaccacccgauaac

SEQ ID NO: 223784 - RNA, 19 nt, Artificial Sequence
  Description of Artificial Sequence: Synthetic oligonucleotide
agcugauaaaggcuagaac

SEQ ID NO: 223785 - RNA, 19 nt, Artificial Sequence
  Description of Artificial Sequence: Synthetic oligonucleotide
uuugauuaucguaaugauu

SEQ ID NO: 223786 - RNA, 19 nt, Artificial Sequence
  Description of Artificial Sequence: Synthetic oligonucleotide
uucaaaucaaacggcagug

SEQ ID NO: 223787 - RNA, 19 nt, Artificial Sequence
  Description of Artificial Sequence: Synthetic oligonucleotide
aagugcauuauaaaccuga

SEQ ID NO: 223788 - RNA, 19 nt, Artificial Sequence
  Description of Artificial Sequence: Synthetic oligonucleotide
caugaguagaauuguuggc

SEQ ID NO: 223789 - RNA, 19 nt, Artificial Sequence
  Description of Artificial Sequence: Synthetic oligonucleotide
aaucuguaccacccgauaa

SEQ ID NO: 223790 - RNA, 19 nt, Artificial Sequence
  Description of Artificial Sequence: Synthetic oligonucleotide
ugaccggcauaaaugcugg

SEQ ID NO: 223791 - RNA, 19 nt, Artificial Sequence
  Description of Artificial Sequence: Synthetic oligonucleotide
ucuguauugcugaucugug

SEQ ID NO: 223792 - RNA, 19 nt, Artificial Sequence
  Description of Artificial Sequence: Synthetic oligonucleotide
uauauuucaguauggcaua

SEQ ID NO: 223793 - RNA, 19 nt, Artificial Sequence
  Description of Artificial Sequence: Synthetic oligonucleotide
ucgauuuggccuaaauaga

SEQ ID NO: 223794 - RNA, 19 nt, Artificial Sequence
  Description of Artificial Sequence: Synthetic oligonucleotide
ccuuacauguguuaaacag

SEQ ID NO: 223795 - RNA, 19 nt, Artificial Sequence
  Description of Artificial Sequence: Synthetic oligonucleotide
uagauuggggauaccaagu

SEQ ID NO: 223796 - RNA, 19 nt, Artificial Sequence
  Description of Artificial Sequence: Synthetic oligonucleotide
aaacaacucgcucacuuuu

SEQ ID NO: 223797 - RNA, 19 nt, Artificial Sequence
  Description of Artificial Sequence: Synthetic oligonucleotide
auuugauuaucguaaugau

SEQ ID NO: 223798 - RNA, 19 nt, Artificial Sequence
  Description of Artificial Sequence: Synthetic oligonucleotide
aggaguuucauucugccua

SEQ ID NO: 223799 - RNA, 19 nt, Artificial Sequence
  Description of Artificial Sequence: Synthetic oligonucleotide
gaauaggacauccgagggc

SEQ ID NO: 223800 - RNA, 19 nt, Artificial Sequence
  Description of Artificial Sequence: Synthetic oligonucleotide
uuacuuaaaucugggaggu

SEQ ID NO: 223801 - RNA, 19 nt, Artificial Sequence
  Description of Artificial Sequence: Synthetic oligonucleotide
uggggauuaguauuucuac

SEQ ID NO: 223802 - RNA, 19 nt, Artificial Sequence
  Description of Artificial Sequence: Synthetic oligonucleotide
aaggcaugauagugcagag

SEQ ID NO: 223803 - RNA, 19 nt, Artificial Sequence
  Description of Artificial Sequence: Synthetic oligonucleotide
uaaagugacccucaacauu

SEQ ID NO: 223804 - RNA, 19 nt, Artificial Sequence
  Description of Artificial Sequence: Synthetic oligonucleotide
gauucugcagggucaauca

SEQ ID NO: 223805 - RNA, 19 nt, Artificial Sequence
  Description of Artificial Sequence: Synthetic oligonucleotide
uucgaaugugaguauucgc

SEQ ID NO: 223806 - RNA, 19 nt, Artificial Sequence
  Description of Artificial Sequence: Synthetic oligonucleotide
gaguauucgcuaugagggg

SEQ ID NO: 223807 - RNA, 19 nt, Artificial Sequence
  Description of Artificial Sequence: Synthetic oligonucleotide
ugugaguauucgcuaugag

SEQ ID NO: 223808 - RNA, 19 nt, Artificial Sequence
  Description of Artificial Sequence: Synthetic oligonucleotide
aauucauaccgugcugaag

SEQ ID NO: 223809 - RNA, 19 nt, Artificial Sequence
  Description of Artificial Sequence: Synthetic oligonucleotide
gggacaauuacaaugaaga

SEQ ID NO: 223810 - RNA, 19 nt, Artificial Sequence
  Description of Artificial Sequence: Synthetic oligonucleotide
cuugucuuaccucuccgag

SEQ ID NO: 223811 - RNA, 19 nt, Artificial Sequence
  Description of Artificial Sequence: Synthetic oligonucleotide
uucauucugccuaaauuua

SEQ ID NO: 223812 - RNA, 19 nt, Artificial Sequence
  Description of Artificial Sequence: Synthetic oligonucleotide
ugcagaaacucuguauugc

SEQ ID NO: 223813 - RNA, 19 nt, Artificial Sequence
  Description of Artificial Sequence: Synthetic oligonucleotide
aguauugccuagauugggg

SEQ ID NO: 223814 - RNA, 19 nt, Artificial Sequence
  Description of Artificial Sequence: Synthetic oligonucleotide
uuauaccuucgauuuggcc

SEQ ID NO: 223815 - RNA, 19 nt, Artificial Sequence
  Description of Artificial Sequence: Synthetic oligonucleotide
cuaguacauccaugaaucg

SEQ ID NO: 223816 - RNA, 19 nt, Artificial Sequence
  Description of Artificial Sequence: Synthetic oligonucleotide
agauuggggauaccaagug

SEQ ID NO: 223817 - RNA, 19 nt, Artificial Sequence
  Description of Artificial Sequence: Synthetic oligonucleotide
gauuaucguaaugauucug

SEQ ID NO: 223818 - RNA, 19 nt, Artificial Sequence
  Description of Artificial Sequence: Synthetic oligonucleotide
gaugcuaaacguuuccucu

SEQ ID NO: 223819 - RNA, 19 nt, Artificial Sequence
  Description of Artificial Sequence: Synthetic oligonucleotide
ugcuuagucucugaucucc

SEQ ID NO: 223820 - RNA, 19 nt, Artificial Sequence
  Description of Artificial Sequence: Synthetic oligonucleotide
cuucgaaugugaguauucg

SEQ ID NO: 223821 - RNA, 19 nt, Artificial Sequence
  Description of Artificial Sequence: Synthetic oligonucleotide
uugucagauauacacugua

SEQ ID NO: 223822 - RNA, 19 nt, Artificial Sequence
  Description of Artificial Sequence: Synthetic oligonucleotide
ugauaaaggcuagaacgca

SEQ ID NO: 223823 - RNA, 19 nt, Artificial Sequence
  Description of Artificial Sequence: Synthetic oligonucleotide
gguuaugaauuucaauuac

SEQ ID NO: 223824 - RNA, 19 nt, Artificial Sequence
  Description of Artificial Sequence: Synthetic oligonucleotide
guguaagcccagcaaaacc

SEQ ID NO: 223825 - RNA, 19 nt, Artificial Sequence
  Description of Artificial Sequence: Synthetic oligonucleotide
uggaauucauaccgugcug

SEQ ID NO: 223826 - RNA, 19 nt, Artificial Sequence
  Description of Artificial Sequence: Synthetic oligonucleotide
aauccuucguggucggcgu

SEQ ID NO: 223827 - RNA, 19 nt, Artificial Sequence
  Description of Artificial Sequence: Synthetic oligonucleotide
cuuuggaaccuuuuaacaa

SEQ ID NO: 223828 - RNA, 19 nt, Artificial Sequence
  Description of Artificial Sequence: Synthetic oligonucleotide
aaacggcagugguguaagc

SEQ ID NO: 223829 - RNA, 19 nt, Artificial Sequence
  Description of Artificial Sequence: Synthetic oligonucleotide
uggcacaccgaggauacgg

SEQ ID NO: 223830 - RNA, 19 nt, Artificial Sequence
  Description of Artificial Sequence: Synthetic oligonucleotide
ugauuaucguaaugauucu

SEQ ID NO: 223831 - RNA, 19 nt, Artificial Sequence
  Description of Artificial Sequence: Synthetic oligonucleotide
uuagucucugaucuccaau

SEQ ID NO: 223832 - RNA, 19 nt, Artificial Sequence
  Description of Artificial Sequence: Synthetic oligonucleotide
ccaucuuacaaagucaugc

SEQ ID NO: 223833 - RNA, 19 nt, Artificial Sequence
  Description of Artificial Sequence: Synthetic oligonucleotide
ugacaauauguaucaggcu

SEQ ID NO: 223834 - RNA, 19 nt, Artificial Sequence
  Description of Artificial Sequence: Synthetic oligonucleotide
gaagcauaguuggaagagc

SEQ ID NO: 223835 - RNA, 19 nt, Artificial Sequence
  Description of Artificial Sequence: Synthetic oligonucleotide
ucaucgggaugugucacgg

SEQ ID NO: 223836 - RNA, 19 nt, Artificial Sequence
  Description of Artificial Sequence: Synthetic oligonucleotide
ugaggccgaggcaugaaga

SEQ ID NO: 223837 - RNA, 19 nt, Artificial Sequence
  Description of Artificial Sequence: Synthetic oligonucleotide
uaauuuggcucaucauaga

SEQ ID NO: 223838 - RNA, 19 nt, Artificial Sequence
  Description of Artificial Sequence: Synthetic oligonucleotide
auagacuaauugugcuuag

SEQ ID NO: 223839 - RNA, 19 nt, Artificial Sequence
  Description of Artificial Sequence: Synthetic oligonucleotide
auuauaccuucgauuuggc

SEQ ID NO: 223840 - RNA, 19 nt, Artificial Sequence
  Description of Artificial Sequence: Synthetic oligonucleotide
uuggcauaacucugagaag

SEQ ID NO: 223841 - RNA, 19 nt, Artificial Sequence
  Description of Artificial Sequence: Synthetic oligonucleotide
gacuaauugugcuuagucu

SEQ ID NO: 223842 - RNA, 19 nt, Artificial Sequence
  Description of Artificial Sequence: Synthetic oligonucleotide
uggguggaaaucagaauau

SEQ ID NO: 223843 - RNA, 19 nt, Artificial Sequence
  Description of Artificial Sequence: Synthetic oligonucleotide
accggcauaaaugcuggac

SEQ ID NO: 223844 - RNA, 19 nt, Artificial Sequence
  Description of Artificial Sequence: Synthetic oligonucleotide
gaguaugguuauucagacc

SEQ ID NO: 223845 - RNA, 19 nt, Artificial Sequence
  Description of Artificial Sequence: Synthetic oligonucleotide
cuuaccaucuaauccagua

SEQ ID NO: 223846 - RNA, 19 nt, Artificial Sequence
  Description of Artificial Sequence: Synthetic oligonucleotide
uucauaccgugcugaagcc

SEQ ID NO: 223847 - RNA, 19 nt, Artificial Sequence
  Description of Artificial Sequence: Synthetic oligonucleotide
uccuuacauguguuaaaca

SEQ ID NO: 223848 - RNA, 19 nt, Artificial Sequence
  Description of Artificial Sequence: Synthetic oligonucleotide
uggucggcguugcuguugg

SEQ ID NO: 223849 - RNA, 19 nt, Artificial Sequence
  Description of Artificial Sequence: Synthetic oligonucleotide
auugucagacggcaucugu

SEQ ID NO: 223850 - RNA, 19 nt, Artificial Sequence
  Description of Artificial Sequence: Synthetic oligonucleotide
guaggacaucuguuguugg

SEQ ID NO: 223851 - RNA, 19 nt, Artificial Sequence
  Description of Artificial Sequence: Synthetic oligonucleotide
gauuggggauaccaaguga

SEQ ID NO: 223852 - RNA, 19 nt, Artificial Sequence
  Description of Artificial Sequence: Synthetic oligonucleotide
aagauucaaacaacucgcu

SEQ ID NO: 223853 - RNA, 19 nt, Artificial Sequence
  Description of Artificial Sequence: Synthetic oligonucleotide
agcauaguuggaagagccc

SEQ ID NO: 223854 - RNA, 19 nt, Artificial Sequence
  Description of Artificial Sequence: Synthetic oligonucleotide
ucauaccgugcugaagccg

SEQ ID NO: 223855 - RNA, 19 nt, Artificial Sequence
  Description of Artificial Sequence: Synthetic oligonucleotide
cauaguuggaagagcccac

SEQ ID NO: 223856 - RNA, 19 nt, Artificial Sequence
  Description of Artificial Sequence: Synthetic oligonucleotide
auaccuucgauuuggccua

SEQ ID NO: 223857 - RNA, 19 nt, Artificial Sequence
  Description of Artificial Sequence: Synthetic oligonucleotide
gaagccgauaguagguagc

SEQ ID NO: 223858 - RNA, 19 nt, Artificial Sequence
  Description of Artificial Sequence: Synthetic oligonucleotide
cagauuaaguccucaacaa

SEQ ID NO: 223859 - RNA, 19 nt, Artificial Sequence
  Description of Artificial Sequence: Synthetic oligonucleotide
ugcuuaacagggccugcug

SEQ ID NO: 223860 - RNA, 19 nt, Artificial Sequence
  Description of Artificial Sequence: Synthetic oligonucleotide
cagauugucagacggcauc

SEQ ID NO: 223861 - RNA, 19 nt, Artificial Sequence
  Description of Artificial Sequence: Synthetic oligonucleotide
ggaagcauaguuggaagag

SEQ ID NO: 223862 - RNA, 19 nt, Artificial Sequence
  Description of Artificial Sequence: Synthetic oligonucleotide
aguauucgcuaugagggga

SEQ ID NO: 223863 - RNA, 19 nt, Artificial Sequence
  Description of Artificial Sequence: Synthetic oligonucleotide
auuggggauaccaagugau

SEQ ID NO: 223864 - RNA, 19 nt, Artificial Sequence
  Description of Artificial Sequence: Synthetic oligonucleotide
augaccggcauaaaugcug

SEQ ID NO: 223865 - RNA, 19 nt, Artificial Sequence
  Description of Artificial Sequence: Synthetic oligonucleotide
ucuaagccugaaucugcug

SEQ ID NO: 223866 - RNA, 19 nt, Artificial Sequence
  Description of Artificial Sequence: Synthetic oligonucleotide
agaguguuuauagacuaau

SEQ ID NO: 223867 - RNA, 19 nt, Artificial Sequence
  Description of Artificial Sequence: Synthetic oligonucleotide
aagccgauaguagguagcu

SEQ ID NO: 223868 - RNA, 19 nt, Artificial Sequence
  Description of Artificial Sequence: Synthetic oligonucleotide
guuggcuaguauugccuag

SEQ ID NO: 223869 - RNA, 19 nt, Artificial Sequence
  Description of Artificial Sequence: Synthetic oligonucleotide
ucgggaugugucacgggcc

SEQ ID NO: 223870 - RNA, 19 nt, Artificial Sequence
  Description of Artificial Sequence: Synthetic oligonucleotide
guauugccuagauugggga

SEQ ID NO: 223871 - RNA, 19 nt, Artificial Sequence
  Description of Artificial Sequence: Synthetic oligonucleotide
ugucugcuuaacagggccu

SEQ ID NO: 223872 - RNA, 19 nt, Artificial Sequence
  Description of Artificial Sequence: Synthetic oligonucleotide
agcccauuauauucuaaau

SEQ ID NO: 223873 - RNA, 19 nt, Artificial Sequence
  Description of Artificial Sequence: Synthetic oligonucleotide
uaagugcaucccaaugguc

SEQ ID NO: 223874 - RNA, 19 nt, Artificial Sequence
  Description of Artificial Sequence: Synthetic oligonucleotide
uggggauaccaagugauau

SEQ ID NO: 223875 - RNA, 19 nt, Artificial Sequence
  Description of Artificial Sequence: Synthetic oligonucleotide
ucaugggcugaaugaccgg

SEQ ID NO: 223876 - RNA, 19 nt, Artificial Sequence
  Description of Artificial Sequence: Synthetic oligonucleotide
auaaaggcuagaacgcacu

SEQ ID NO: 223877 - RNA, 19 nt, Artificial Sequence
  Description of Artificial Sequence: Synthetic oligonucleotide
caaggcaugauagugcaga

SEQ ID NO: 223878 - RNA, 19 nt, Artificial Sequence
  Description of Artificial Sequence: Synthetic oligonucleotide
uucgcuaugaggggauucu

SEQ ID NO: 223879 - RNA, 19 nt, Artificial Sequence
  Description of Artificial Sequence: Synthetic oligonucleotide
uauugccuagauuggggau

SEQ ID NO: 223880 - RNA, 19 nt, Artificial Sequence
  Description of Artificial Sequence: Synthetic oligonucleotide
uguuggcuaguauugccua

SEQ ID NO: 223881 - RNA, 19 nt, Artificial Sequence
  Description of Artificial Sequence: Synthetic oligonucleotide
cacaccgaggauacgggug

SEQ ID NO: 223882 - RNA, 19 nt, Artificial Sequence
  Description of Artificial Sequence: Synthetic oligonucleotide
cugauaaauugcccugaug

SEQ ID NO: 223883 - RNA, 19 nt, Artificial Sequence
  Description of Artificial Sequence: Synthetic oligonucleotide
uuaauaacuuuggcauaac

SEQ ID NO: 223884 - RNA, 19 nt, Artificial Sequence
  Description of Artificial Sequence: Synthetic oligonucleotide
gaauuguuggcgguagaga

SEQ ID NO: 223885 - RNA, 19 nt, Artificial Sequence
  Description of Artificial Sequence: Synthetic oligonucleotide
aaugaccggcauaaaugcu

SEQ ID NO: 223886 - RNA, 19 nt, Artificial Sequence
  Description of Artificial Sequence: Synthetic oligonucleotide
gaauucuucgaaugugagu

SEQ ID NO: 223887 - RNA, 19 nt, Artificial Sequence
  Description of Artificial Sequence: Synthetic oligonucleotide
caugggcugaaugaccggc

SEQ ID NO: 223888 - RNA, 19 nt, Artificial Sequence
  Description of Artificial Sequence: Synthetic oligonucleotide
uagaauuguuggcgguaga

SEQ ID NO: 223889 - RNA, 19 nt, Artificial Sequence
  Description of Artificial Sequence: Synthetic oligonucleotide
uuggcuaguauugccuaga

SEQ ID NO: 223890 - RNA, 19 nt, Artificial Sequence
  Description of Artificial Sequence: Synthetic oligonucleotide
ugaucaggaugaguauuca

SEQ ID NO: 223891 - RNA, 19 nt, Artificial Sequence
  Description of Artificial Sequence: Synthetic oligonucleotide
auucgcuaugaggggauuc

SEQ ID NO: 223892 - RNA, 19 nt, Artificial Sequence
  Description of Artificial Sequence: Synthetic oligonucleotide
aauauguaucaggcuagua

SEQ ID NO: 223893 - RNA, 19 nt, Artificial Sequence
  Description of Artificial Sequence: Synthetic oligonucleotide
agauugucagacggcaucu

SEQ ID NO: 223894 - RNA, 19 nt, Artificial Sequence
  Description of Artificial Sequence: Synthetic oligonucleotide
auaguagguagcugauaaa

SEQ ID NO: 223895 - RNA, 19 nt, Artificial Sequence
  Description of Artificial Sequence: Synthetic oligonucleotide
gacuuguuccaauuaggcu

SEQ ID NO: 223896 - RNA, 19 nt, Artificial Sequence
  Description of Artificial Sequence: Synthetic oligonucleotide
ugugucacgggccgugaau

SEQ ID NO: 223897 - RNA, 19 nt, Artificial Sequence
  Description of Artificial Sequence: Synthetic oligonucleotide
ucaaacggcagugguguaa

SEQ ID NO: 223898 - RNA, 19 nt, Artificial Sequence
  Description of Artificial Sequence: Synthetic oligonucleotide
gaauucauaccgugcugaa

SEQ ID NO: 223899 - RNA, 19 nt, Artificial Sequence
  Description of Artificial Sequence: Synthetic oligonucleotide
ggaaccuuuuaacaacauc

SEQ ID NO: 223900 - RNA, 19 nt, Artificial Sequence
  Description of Artificial Sequence: Synthetic oligonucleotide
cuucgauuuggccuaaaua

SEQ ID NO: 223901 - RNA, 19 nt, Artificial Sequence
  Description of Artificial Sequence: Synthetic oligonucleotide
uccuccgaucuuuaaggau

SEQ ID NO: 223902 - RNA, 19 nt, Artificial Sequence
  Description of Artificial Sequence: Synthetic oligonucleotide
gugguguaagcccagcaaa

SEQ ID NO: 223903 - RNA, 19 nt, Artificial Sequence
  Description of Artificial Sequence: Synthetic oligonucleotide
ggaagaguaugguuauuca

SEQ ID NO: 223904 - RNA, 19 nt, Artificial Sequence
  Description of Artificial Sequence: Synthetic oligonucleotide
uagacuaauugugcuuagu

SEQ ID NO: 223905 - RNA, 19 nt, Artificial Sequence
  Description of Artificial Sequence: Synthetic oligonucleotide
caugaaucgcaccagaauu

SEQ ID NO: 223906 - RNA, 19 nt, Artificial Sequence
  Description of Artificial Sequence: Synthetic oligonucleotide
gaaucuguaccacccgaua

SEQ ID NO: 223907 - RNA, 19 nt, Artificial Sequence
  Description of Artificial Sequence: Synthetic oligonucleotide
ggugcuccacucgagagcc

SEQ ID NO: 223908 - RNA, 19 nt, Artificial Sequence
  Description of Artificial Sequence: Synthetic oligonucleotide
uugccuagauuggggauac

SEQ ID NO: 223909 - RNA, 19 nt, Artificial Sequence
  Description of Artificial Sequence: Synthetic oligonucleotide
auugccuagauuggggaua

SEQ ID NO: 223910 - RNA, 19 nt, Artificial Sequence
  Description of Artificial Sequence: Synthetic oligonucleotide
uaccacccgauaacuuucu

SEQ ID NO: 223911 - RNA, 19 nt, Artificial Sequence
  Description of Artificial Sequence: Synthetic oligonucleotide
ggaauucauaccgugcuga

SEQ ID NO: 223912 - RNA, 19 nt, Artificial Sequence
  Description of Artificial Sequence: Synthetic oligonucleotide
ggcuagaacgcacugcaga

SEQ ID NO: 223913 - RNA, 19 nt, Artificial Sequence
  Description of Artificial Sequence: Synthetic oligonucleotide
gcaaaaccgggacaauuac

SEQ ID NO: 223914 - RNA, 19 nt, Artificial Sequence
  Description of Artificial Sequence: Synthetic oligonucleotide
uguacucuuguuggcuagu

SEQ ID NO: 223915 - RNA, 19 nt, Artificial Sequence
  Description of Artificial Sequence: Synthetic oligonucleotide
ucagaccauugaagcauau

SEQ ID NO: 223916 - RNA, 19 nt, Artificial Sequence
  Description of Artificial Sequence: Synthetic oligonucleotide
accugauaaauugcccuga

SEQ ID NO: 223917 - RNA, 19 nt, Artificial Sequence
  Description of Artificial Sequence: Synthetic oligonucleotide
ucgucugacuccuccccac

SEQ ID NO: 223918 - RNA, 19 nt, Artificial Sequence
  Description of Artificial Sequence: Synthetic oligonucleotide
auucugcagggucaaucaa

SEQ ID NO: 223919 - RNA, 19 nt, Artificial Sequence
  Description of Artificial Sequence: Synthetic oligonucleotide
gauugucagacggcaucug

SEQ ID NO: 223920 - RNA, 19 nt, Artificial Sequence
  Description of Artificial Sequence: Synthetic oligonucleotide
augaaucgcaccagaauua

SEQ ID NO: 223921 - RNA, 19 nt, Artificial Sequence
  Description of Artificial Sequence: Synthetic oligonucleotide
gucugcuuaacagggccug

SEQ ID NO: 223922 - RNA, 19 nt, Artificial Sequence
  Description of Artificial Sequence: Synthetic oligonucleotide
cugccuaaauuuacuagua

SEQ ID NO: 223923 - RNA, 19 nt, Artificial Sequence
  Description of Artificial Sequence: Synthetic oligonucleotide
ccuuuggaaccuuuuaaca

SEQ ID NO: 223924 - RNA, 19 nt, Artificial Sequence
  Description of Artificial Sequence: Synthetic oligonucleotide
gcauuauaaaccugauaaa

SEQ ID NO: 223925 - RNA, 19 nt, Artificial Sequence
  Description of Artificial Sequence: Synthetic oligonucleotide
caucgggaugugucacggg

SEQ ID NO: 223926 - RNA, 19 nt, Artificial Sequence
  Description of Artificial Sequence: Synthetic oligonucleotide
ggacaagcaucaugggcug

SEQ ID NO: 223927 - RNA, 19 nt, Artificial Sequence
  Description of Artificial Sequence: Synthetic oligonucleotide
cuuugauuauaccuucgau

SEQ ID NO: 223928 - RNA, 19 nt, Artificial Sequence
  Description of Artificial Sequence: Synthetic oligonucleotide
ggggauaccaagugauauc

SEQ ID NO: 223929 - RNA, 19 nt, Artificial Sequence
  Description of Artificial Sequence: Synthetic oligonucleotide
gaacuucaguccggcacug

SEQ ID NO: 223930 - RNA, 19 nt, Artificial Sequence
  Description of Artificial Sequence: Synthetic oligonucleotide
uccuucguggucggcguug

SEQ ID NO: 223931 - RNA, 19 nt, Artificial Sequence
  Description of Artificial Sequence: Synthetic oligonucleotide
cuacugaugcuaaacguuu

SEQ ID NO: 223932 - RNA, 19 nt, Artificial Sequence
  Description of Artificial Sequence: Synthetic oligonucleotide
aguauucacuggggauuag

SEQ ID NO: 223933 - RNA, 19 nt, Artificial Sequence
  Description of Artificial Sequence: Synthetic oligonucleotide
ucacgggccgugaauucuu

SEQ ID NO: 223934 - RNA, 19 nt, Artificial Sequence
  Description of Artificial Sequence: Synthetic oligonucleotide
cugccugacaagauucaaa

SEQ ID NO: 223935 - RNA, 19 nt, Artificial Sequence
  Description of Artificial Sequence: Synthetic oligonucleotide
ucgcuaugaggggauucug

SEQ ID NO: 223936 - RNA, 19 nt, Artificial Sequence
  Description of Artificial Sequence: Synthetic oligonucleotide
guagcugauaaaggcuaga

SEQ ID NO: 223937 - RNA, 19 nt, Artificial Sequence
  Description of Artificial Sequence: Synthetic oligonucleotide
cagaccauugaagcauauc

SEQ ID NO: 223938 - RNA, 19 nt, Artificial Sequence
  Description of Artificial Sequence: Synthetic oligonucleotide
ucuaauccaguagcccauu

SEQ ID NO: 223939 - RNA, 19 nt, Artificial Sequence
  Description of Artificial Sequence: Synthetic oligonucleotide
cgggacaauuacaaugaag

SEQ ID NO: 223940 - RNA, 19 nt, Artificial Sequence
  Description of Artificial Sequence: Synthetic oligonucleotide
guuccgccggaaucuguac

SEQ ID NO: 223941 - RNA, 19 nt, Artificial Sequence
  Description of Artificial Sequence: Synthetic oligonucleotide
ggcauaacucugagaagug

SEQ ID NO: 223942 - RNA, 19 nt, Artificial Sequence
  Description of Artificial Sequence: Synthetic oligonucleotide
ggcacaccgaggauacggg

SEQ ID NO: 223943 - RNA, 19 nt, Artificial Sequence
  Description of Artificial Sequence: Synthetic oligonucleotide
agccacggcaucugagaaa

SEQ ID NO: 223944 - RNA, 19 nt, Artificial Sequence
  Description of Artificial Sequence: Synthetic oligonucleotide
uacuuaaaucugggagguc

SEQ ID NO: 223945 - RNA, 19 nt, Artificial Sequence
  Description of Artificial Sequence: Synthetic oligonucleotide
gccuagauuggggauacca

SEQ ID NO: 223946 - RNA, 19 nt, Artificial Sequence
  Description of Artificial Sequence: Synthetic oligonucleotide
gugagucuacugaugcuaa

SEQ ID NO: 223947 - RNA, 19 nt, Artificial Sequence
  Description of Artificial Sequence: Synthetic oligonucleotide
gaccauugaagcauaucuu

SEQ ID NO: 223948 - RNA, 19 nt, Artificial Sequence
  Description of Artificial Sequence: Synthetic oligonucleotide
aguuuccaacuuagagugu

SEQ ID NO: 223949 - RNA, 19 nt, Artificial Sequence
  Description of Artificial Sequence: Synthetic oligonucleotide
ccgaucuuuaaggauucug

SEQ ID NO: 223950 - RNA, 19 nt, Artificial Sequence
  Description of Artificial Sequence: Synthetic oligonucleotide
acuuaccaucuaauccagu

SEQ ID NO: 223951 - RNA, 19 nt, Artificial Sequence
  Description of Artificial Sequence: Synthetic oligonucleotide
cacaaaucuagcccuggau

SEQ ID NO: 223952 - RNA, 19 nt, Artificial Sequence
  Description of Artificial Sequence: Synthetic oligonucleotide
agccgauaguagguagcug

SEQ ID NO: 223953 - RNA, 19 nt, Artificial Sequence
  Description of Artificial Sequence: Synthetic oligonucleotide
gugcuuagucucugaucuc

SEQ ID NO: 223954 - RNA, 19 nt, Artificial Sequence
  Description of Artificial Sequence: Synthetic oligonucleotide
gcccauuauauucuaaauu

SEQ ID NO: 223955 - RNA, 19 nt, Artificial Sequence
  Description of Artificial Sequence: Synthetic oligonucleotide
ccuagauuggggauaccaa

SEQ ID NO: 223956 - RNA, 19 nt, Artificial Sequence
  Description of Artificial Sequence: Synthetic oligonucleotide
uauucgcuaugaggggauu

SEQ ID NO: 223957 - RNA, 19 nt, Artificial Sequence
  Description of Artificial Sequence: Synthetic oligonucleotide
gcuagaacgcacugcagau

SEQ ID NO: 223958 - RNA, 19 nt, Artificial Sequence
  Description of Artificial Sequence: Synthetic oligonucleotide
aucaaacggcaguggugua

SEQ ID NO: 223959 - RNA, 19 nt, Artificial Sequence
  Description of Artificial Sequence: Synthetic oligonucleotide
cccaucuuacaaagucaug

SEQ ID NO: 223960 - RNA, 19 nt, Artificial Sequence
  Description of Artificial Sequence: Synthetic oligonucleotide
cacgggccgugaauucuuc

SEQ ID NO: 223961 - RNA, 19 nt, Artificial Sequence
  Description of Artificial Sequence: Synthetic oligonucleotide
auaggacauccgagggcug

SEQ ID NO: 223962 - RNA, 19 nt, Artificial Sequence
  Description of Artificial Sequence: Synthetic oligonucleotide
cuagaacgcacugcagaua

SEQ ID NO: 223963 - RNA, 19 nt, Artificial Sequence
  Description of Artificial Sequence: Synthetic oligonucleotide
accacccgauaacuuucuu

SEQ ID NO: 223964 - RNA, 19 nt, Artificial Sequence
  Description of Artificial Sequence: Synthetic oligonucleotide
cacugaucaggaugaguau

SEQ ID NO: 223965 - RNA, 19 nt, Artificial Sequence
  Description of Artificial Sequence: Synthetic oligonucleotide
guauucgcuaugaggggau

SEQ ID NO: 223966 - RNA, 19 nt, Artificial Sequence
  Description of Artificial Sequence: Synthetic oligonucleotide
ggcauaaaugcuggacuua

SEQ ID NO: 223967 - RNA, 19 nt, Artificial Sequence
  Description of Artificial Sequence: Synthetic oligonucleotide
ccacagauuaaguccucaa

SEQ ID NO: 223968 - RNA, 19 nt, Artificial Sequence
  Description of Artificial Sequence: Synthetic oligonucleotide
ccggcauaaaugcuggacu

SEQ ID NO: 223969 - RNA, 19 nt, Artificial Sequence
  Description of Artificial Sequence: Synthetic oligonucleotide
cgaaugugaguauucgcua

SEQ ID NO: 223970 - RNA, 19 nt, Artificial Sequence
  Description of Artificial Sequence: Synthetic oligonucleotide
agaacgcacugcagauaaa

SEQ ID NO: 223971 - RNA, 19 nt, Artificial Sequence
  Description of Artificial Sequence: Synthetic oligonucleotide
auccuucguggucggcguu

SEQ ID NO: 223972 - RNA, 19 nt, Artificial Sequence
  Description of Artificial Sequence: Synthetic oligonucleotide
uaccuucgauuuggccuaa

SEQ ID NO: 223973 - RNA, 19 nt, Artificial Sequence
  Description of Artificial Sequence: Synthetic oligonucleotide
ggaaucuguaccacccgau

SEQ ID NO: 223974 - RNA, 19 nt, Artificial Sequence
  Description of Artificial Sequence: Synthetic oligonucleotide
gugucacgggccgugaauu

SEQ ID NO: 223975 - RNA, 19 nt, Artificial Sequence
  Description of Artificial Sequence: Synthetic oligonucleotide
auaccgugcugaagccgau

SEQ ID NO: 223976 - RNA, 19 nt, Artificial Sequence
  Description of Artificial Sequence: Synthetic oligonucleotide
cggaaucuguaccacccga

SEQ ID NO: 223977 - RNA, 19 nt, Artificial Sequence
  Description of Artificial Sequence: Synthetic oligonucleotide
caccagaauuaggacaauu

SEQ ID NO: 223978 - RNA, 19 nt, Artificial Sequence
  Description of Artificial Sequence: Synthetic oligonucleotide
cccacagauuaaguccuca

SEQ ID NO: 223979 - RNA, 19 nt, Artificial Sequence
  Description of Artificial Sequence: Synthetic oligonucleotide
gggcugaaugaccggcaua

SEQ ID NO: 223980 - RNA, 19 nt, Artificial Sequence
  Description of Artificial Sequence: Synthetic oligonucleotide
gcacaccgaggauacgggu

SEQ ID NO: 223981 - RNA, 19 nt, Artificial Sequence
  Description of Artificial Sequence: Synthetic oligonucleotide
ccgaggauacgggugagcu

SEQ ID NO: 223982 - RNA, 19 nt, Artificial Sequence
  Description of Artificial Sequence: Synthetic oligonucleotide
accuucgauuuggccuaaa

SEQ ID NO: 223983 - RNA, 19 nt, Artificial Sequence
  Description of Artificial Sequence: Synthetic oligonucleotide
ccugauaaauugcccugau

SEQ ID NO: 223984 - RNA, 19 nt, Artificial Sequence
  Description of Artificial Sequence: Synthetic oligonucleotide
ccuucgauuuggccuaaau

SEQ ID NO: 223985 - RNA, 19 nt, Artificial Sequence
  Description of Artificial Sequence: Synthetic oligonucleotide
ccgauaguagguagcugau

SEQ ID NO: 223986 - RNA, 19 nt, Artificial Sequence
  Description of Artificial Sequence: Synthetic oligonucleotide
ccagauugucagacggcau

SEQ ID NO: 223987 - RNA, 19 nt, Artificial Sequence
  Description of Artificial Sequence: Synthetic oligonucleotide
ccgccggaaucuguaccac

SEQ ID NO: 223988 - RNA, 19 nt, Artificial Sequence
  Description of Artificial Sequence: Synthetic oligonucleotide
gugcuccacucgagagcca

SEQ ID NO: 223989 - RNA, 19 nt, Artificial Sequence
  Description of Artificial Sequence: Synthetic oligonucleotide
cgagagccacggcaucuga

SEQ ID NO: 223990 - RNA, 19 nt, Artificial Sequence
  Description of Artificial Sequence: Synthetic oligonucleotide
cggcaucugucugcuuaac

SEQ ID NO: 223991 - RNA, 19 nt, Artificial Sequence
  Description of Artificial Sequence: Synthetic oligonucleotide
ggauacgggugagcugcuu

SEQ ID NO: 223992 - RNA, 19 nt, Artificial Sequence
  Description of Artificial Sequence: Synthetic oligonucleotide
gccgaggcaugaagacacu

SEQ ID NO: 223993 - RNA, 19 nt, Artificial Sequence
  Description of Artificial Sequence: Synthetic oligonucleotide
cgucugacuccuccccacu

SEQ ID NO: 223994 - RNA, 19 nt, Artificial Sequence
  Description of Artificial Sequence: Synthetic oligonucleotide
aauucguucauauagcugu

SEQ ID NO: 223995 - RNA, 19 nt, Artificial Sequence
  Description of Artificial Sequence: Synthetic oligonucleotide
aaucuuaauaaucugccag

SEQ ID NO: 223996 - RNA, 19 nt, Artificial Sequence
  Description of Artificial Sequence: Synthetic oligonucleotide
uaacauaugaucuugagaa

SEQ ID NO: 223997 - RNA, 19 nt, Artificial Sequence
  Description of Artificial Sequence: Synthetic oligonucleotide
agagaguucauccaguuac

SEQ ID NO: 223998 - RNA, 19 nt, Artificial Sequence
  Description of Artificial Sequence: Synthetic oligonucleotide
uauuaaagagguuagcuac

SEQ ID NO: 223999 - RNA, 19 nt, Artificial Sequence
  Description of Artificial Sequence: Synthetic oligonucleotide
agagguuagcuacaaaggc

SEQ ID NO: 224000 - RNA, 19 nt, Artificial Sequence
  Description of Artificial Sequence: Synthetic oligonucleotide
uuuuauuaugcaaaugccu

SEQ ID NO: 224001 - RNA, 19 nt, Artificial Sequence
  Description of Artificial Sequence: Synthetic oligonucleotide
ucuaguauauucugcacag

SEQ ID NO: 224002 - RNA, 19 nt, Artificial Sequence
  Description of Artificial Sequence: Synthetic oligonucleotide
agaguuuugugauaaagug

SEQ ID NO: 224003 - RNA, 19 nt, Artificial Sequence
  Description of Artificial Sequence: Synthetic oligonucleotide
auagagaugguuuacguga

SEQ ID NO: 224004 - RNA, 19 nt, Artificial Sequence
  Description of Artificial Sequence: Synthetic oligonucleotide
uucuaaaagucuuuccccg

SEQ ID NO: 224005 - RNA, 19 nt, Artificial Sequence
  Description of Artificial Sequence: Synthetic oligonucleotide
uuuagaucaaaugagaguu

SEQ ID NO: 224006 - RNA, 19 nt, Artificial Sequence
  Description of Artificial Sequence: Synthetic oligonucleotide
aaauucugagcccacucuc

SEQ ID NO: 224007 - RNA, 19 nt, Artificial Sequence
  Description of Artificial Sequence: Synthetic oligonucleotide
cauacuacagccaagguca

SEQ ID NO: 224008 - RNA, 19 nt, Artificial Sequence
  Description of Artificial Sequence: Synthetic oligonucleotide
ucugcaaccuaauuuaucu

SEQ ID NO: 224009 - RNA, 19 nt, Artificial Sequence
  Description of Artificial Sequence: Synthetic oligonucleotide
uuaacauaugaucuugaga

SEQ ID NO: 224010 - RNA, 19 nt, Artificial Sequence
  Description of Artificial Sequence: Synthetic oligonucleotide
aaugccuuuauuuggagua

SEQ ID NO: 224011 - RNA, 19 nt, Artificial Sequence
  Description of Artificial Sequence: Synthetic oligonucleotide
aacauaugaucuugagaac

SEQ ID NO: 224012 - RNA, 19 nt, Artificial Sequence
  Description of Artificial Sequence: Synthetic oligonucleotide
uuaagaguauaucuucuca

SEQ ID NO: 224013 - RNA, 19 nt, Artificial Sequence
  Description of Artificial Sequence: Synthetic oligonucleotide
uugaucuuuugccagcccg

SEQ ID NO: 224014 - RNA, 19 nt, Artificial Sequence
  Description of Artificial Sequence: Synthetic oligonucleotide
uuuauaucccggcaguggc

SEQ ID NO: 224015 - RNA, 19 nt, Artificial Sequence
  Description of Artificial Sequence: Synthetic oligonucleotide
guuaacuuuacuccagucc

SEQ ID NO: 224016 - RNA, 19 nt, Artificial Sequence
  Description of Artificial Sequence: Synthetic oligonucleotide
guuaaugcagccuggcugg

SEQ ID NO: 224017 - RNA, 19 nt, Artificial Sequence
  Description of Artificial Sequence: Synthetic oligonucleotide
aguuaaugcagccuggcug

SEQ ID NO: 224018 - RNA, 19 nt, Artificial Sequence
  Description of Artificial Sequence: Synthetic oligonucleotide
aagauucccgcucuuaaca

SEQ ID NO: 224019 - RNA, 19 nt, Artificial Sequence
  Description of Artificial Sequence: Synthetic oligonucleotide
uauuguacacuuagcauac

SEQ ID NO: 224020 - RNA, 19 nt, Artificial Sequence
  Description of Artificial Sequence: Synthetic oligonucleotide
auguucacaacaugacacc

SEQ ID NO: 224021 - RNA, 19 nt, Artificial Sequence
  Description of Artificial Sequence: Synthetic oligonucleotide
uugagucccaucuaaauuc

SEQ ID NO: 224022 - RNA, 19 nt, Artificial Sequence
  Description of Artificial Sequence: Synthetic oligonucleotide
aaucuauuguacacuuagc

SEQ ID NO: 224023 - RNA, 19 nt, Artificial Sequence
  Description of Artificial Sequence: Synthetic oligonucleotide
ugaaaguuggcccaucuua

SEQ ID NO: 224024 - RNA, 19 nt, Artificial Sequence
  Description of Artificial Sequence: Synthetic oligonucleotide
uuauuaaagagguuagcua

SEQ ID NO: 224025 - RNA, 19 nt, Artificial Sequence
  Description of Artificial Sequence: Synthetic oligonucleotide
aucuaagcaagucucaaga

SEQ ID NO: 224026 - RNA, 19 nt, Artificial Sequence
  Description of Artificial Sequence: Synthetic oligonucleotide
aaggugucauauucaacag

SEQ ID NO: 224027 - RNA, 19 nt, Artificial Sequence
  Description of Artificial Sequence: Synthetic oligonucleotide
uauacucuggcuccaauuc

SEQ ID NO: 224028 - RNA, 19 nt, Artificial Sequence
  Description of Artificial Sequence: Synthetic oligonucleotide
ugagaguuuugugauaaag

SEQ ID NO: 224029 - RNA, 19 nt, Artificial Sequence
  Description of Artificial Sequence: Synthetic oligonucleotide
uuuucgugaccacaucucc

SEQ ID NO: 224030 - RNA, 19 nt, Artificial Sequence
  Description of Artificial Sequence: Synthetic oligonucleotide
caacaugacacccaauggc

SEQ ID NO: 224031 - RNA, 19 nt, Artificial Sequence
  Description of Artificial Sequence: Synthetic oligonucleotide
acgaaagguccuuucuucc

SEQ ID NO: 224032 - RNA, 19 nt, Artificial Sequence
  Description of Artificial Sequence: Synthetic oligonucleotide
aacuuaggguccauuuucc

SEQ ID NO: 224033 - RNA, 19 nt, Artificial Sequence
  Description of Artificial Sequence: Synthetic oligonucleotide
uugggauuuccacugacga

SEQ ID NO: 224034 - RNA, 19 nt, Artificial Sequence
  Description of Artificial Sequence: Synthetic oligonucleotide
agagguaauacacaagcau

SEQ ID NO: 224035 - RNA, 19 nt, Artificial Sequence
  Description of Artificial Sequence: Synthetic oligonucleotide
aauaaucugccagagcagu

SEQ ID NO: 224036 - RNA, 19 nt, Artificial Sequence
  Description of Artificial Sequence: Synthetic oligonucleotide
cacaacaugacacccaaug

SEQ ID NO: 224037 - RNA, 19 nt, Artificial Sequence
  Description of Artificial Sequence: Synthetic oligonucleotide
aaacaugcaaacacgguca

SEQ ID NO: 224038 - RNA, 19 nt, Artificial Sequence
  Description of Artificial Sequence: Synthetic oligonucleotide
uguuagaugcguuaauuua

SEQ ID NO: 224039 - RNA, 19 nt, Artificial Sequence
  Description of Artificial Sequence: Synthetic oligonucleotide
uuuagugagugcuggauau

SEQ ID NO: 224040 - RNA, 19 nt, Artificial Sequence
  Description of Artificial Sequence: Synthetic oligonucleotide
uaaauucugagcccacucu

SEQ ID NO: 224041 - RNA, 19 nt, Artificial Sequence
  Description of Artificial Sequence: Synthetic oligonucleotide
aguaucugaccacaguucu

SEQ ID NO: 224042 - RNA, 19 nt, Artificial Sequence
  Description of Artificial Sequence: Synthetic oligonucleotide
aaguuaauacuauggcuau

SEQ ID NO: 224043 - RNA, 19 nt, Artificial Sequence
  Description of Artificial Sequence: Synthetic oligonucleotide
uaagccaugagcacuucac

SEQ ID NO: 224044 - RNA, 19 nt, Artificial Sequence
  Description of Artificial Sequence: Synthetic oligonucleotide
uauguugcuaccagauuac

SEQ ID NO: 224045 - RNA, 19 nt, Artificial Sequence
  Description of Artificial Sequence: Synthetic oligonucleotide
auacuauggcuaucuaccg

SEQ ID NO: 224046 - RNA, 19 nt, Artificial Sequence
  Description of Artificial Sequence: Synthetic oligonucleotide
ugauugagcagauggaaau

SEQ ID NO: 224047 - RNA, 19 nt, Artificial Sequence
  Description of Artificial Sequence: Synthetic oligonucleotide
gaucuaagcaagucucaag

SEQ ID NO: 224048 - RNA, 19 nt, Artificial Sequence
  Description of Artificial Sequence: Synthetic oligonucleotide
aucuuaauaaucugccaga

SEQ ID NO: 224049 - RNA, 19 nt, Artificial Sequence
  Description of Artificial Sequence: Synthetic oligonucleotide
caaguuaauacuauggcua

SEQ ID NO: 224050 - RNA, 19 nt, Artificial Sequence
  Description of Artificial Sequence: Synthetic oligonucleotide
auaguuaaugcagccuggc

SEQ ID NO: 224051 - RNA, 19 nt, Artificial Sequence
  Description of Artificial Sequence: Synthetic oligonucleotide
auaguaucugaccacaguu

SEQ ID NO: 224052 - RNA, 19 nt, Artificial Sequence
  Description of Artificial Sequence: Synthetic oligonucleotide
aauagcugacuugccaauc

SEQ ID NO: 224053 - RNA, 19 nt, Artificial Sequence
  Description of Artificial Sequence: Synthetic oligonucleotide
ugacacugcauacuuggca

SEQ ID NO: 224054 - RNA, 19 nt, Artificial Sequence
  Description of Artificial Sequence: Synthetic oligonucleotide
gaauucuuuaagccaugag

SEQ ID NO: 224055 - RNA, 19 nt, Artificial Sequence
  Description of Artificial Sequence: Synthetic oligonucleotide
ucgucuuguccuuaaaacu

SEQ ID NO: 224056 - RNA, 19 nt, Artificial Sequence
  Description of Artificial Sequence: Synthetic oligonucleotide
auacuuucggcucucuuca

SEQ ID NO: 224057 - RNA, 19 nt, Artificial Sequence
  Description of Artificial Sequence: Synthetic oligonucleotide
auauagcuguaagaugacc

SEQ ID NO: 224058 - RNA, 19 nt, Artificial Sequence
  Description of Artificial Sequence: Synthetic oligonucleotide
aguuacgaaagguccuuuc

SEQ ID NO: 224059 - RNA, 19 nt, Artificial Sequence
  Description of Artificial Sequence: Synthetic oligonucleotide
uccgacauacauacuuucc

SEQ ID NO: 224060 - RNA, 19 nt, Artificial Sequence
  Description of Artificial Sequence: Synthetic oligonucleotide
agauuaacauaugaucuug

SEQ ID NO: 224061 - RNA, 19 nt, Artificial Sequence
  Description of Artificial Sequence: Synthetic oligonucleotide
uucacaacaugacacccaa

SEQ ID NO: 224062 - RNA, 19 nt, Artificial Sequence
  Description of Artificial Sequence: Synthetic oligonucleotide
guaacgaacugucugcaac

SEQ ID NO: 224063 - RNA, 19 nt, Artificial Sequence
  Description of Artificial Sequence: Synthetic oligonucleotide
uugaagcauacuuucggcu

SEQ ID NO: 224064 - RNA, 19 nt, Artificial Sequence
  Description of Artificial Sequence: Synthetic oligonucleotide
aguuuugugauaaaguguu

SEQ ID NO: 224065 - RNA, 19 nt, Artificial Sequence
  Description of Artificial Sequence: Synthetic oligonucleotide
aaucaugcaccugugagua

SEQ ID NO: 224066 - RNA, 19 nt, Artificial Sequence
  Description of Artificial Sequence: Synthetic oligonucleotide
uagagaugguuuacgugag

SEQ ID NO: 224067 - RNA, 19 nt, Artificial Sequence
  Description of Artificial Sequence: Synthetic oligonucleotide
agggguaacgaacugucug

SEQ ID NO: 224068 - RNA, 19 nt, Artificial Sequence
  Description of Artificial Sequence: Synthetic oligonucleotide
cuuuauaucccggcagugg

SEQ ID NO: 224069 - RNA, 19 nt, Artificial Sequence
  Description of Artificial Sequence: Synthetic oligonucleotide
uucuauucagauugguuau

SEQ ID NO: 224070 - RNA, 19 nt, Artificial Sequence
  Description of Artificial Sequence: Synthetic oligonucleotide
accguaaucaaaauauucu

SEQ ID NO: 224071 - RNA, 19 nt, Artificial Sequence
  Description of Artificial Sequence: Synthetic oligonucleotide
uauugagucccaucuaaau

SEQ ID NO: 224072 - RNA, 19 nt, Artificial Sequence
  Description of Artificial Sequence: Synthetic oligonucleotide
acuauggcuaucuaccgau

SEQ ID NO: 224073 - RNA, 19 nt, Artificial Sequence
  Description of Artificial Sequence: Synthetic oligonucleotide
ugaugagcuagucuuguua

SEQ ID NO: 224074 - RNA, 19 nt, Artificial Sequence
  Description of Artificial Sequence: Synthetic oligonucleotide
ugugaguaaggaugguucu

SEQ ID NO: 224075 - RNA, 19 nt, Artificial Sequence
  Description of Artificial Sequence: Synthetic oligonucleotide
auagucacaaauguaucca

SEQ ID NO: 224076 - RNA, 19 nt, Artificial Sequence
  Description of Artificial Sequence: Synthetic oligonucleotide
ucaugcaccugugaguaag

SEQ ID NO: 224077 - RNA, 19 nt, Artificial Sequence
  Description of Artificial Sequence: Synthetic oligonucleotide
uguucacaacaugacaccc

SEQ ID NO: 224078 - RNA, 19 nt, Artificial Sequence
  Description of Artificial Sequence: Synthetic oligonucleotide
ucaugaugagcuagucuug

SEQ ID NO: 224079 - RNA, 19 nt, Artificial Sequence
  Description of Artificial Sequence: Synthetic oligonucleotide
acugacgacaucagcaggg

SEQ ID NO: 224080 - RNA, 19 nt, Artificial Sequence
  Description of Artificial Sequence: Synthetic oligonucleotide
uaccgaucuaagcaagucu

SEQ ID NO: 224081 - RNA, 19 nt, Artificial Sequence
  Description of Artificial Sequence: Synthetic oligonucleotide
ggcaaguuaauacuauggc

SEQ ID NO: 224082 - RNA, 19 nt, Artificial Sequence
  Description of Artificial Sequence: Synthetic oligonucleotide
uacgaaagguccuuucuuc

SEQ ID NO: 224083 - RNA, 19 nt, Artificial Sequence
  Description of Artificial Sequence: Synthetic oligonucleotide
gaugagcuagucuuguuaa

SEQ ID NO: 224084 - RNA, 19 nt, Artificial Sequence
  Description of Artificial Sequence: Synthetic oligonucleotide
accgaucuaagcaagucuc

SEQ ID NO: 224085 - RNA, 19 nt, Artificial Sequence
  Description of Artificial Sequence: Synthetic oligonucleotide
agccugacauguuaauguc

SEQ ID NO: 224086 - RNA, 19 nt, Artificial Sequence
  Description of Artificial Sequence: Synthetic oligonucleotide
cagaguuagauuaacauau

SEQ ID NO: 224087 - RNA, 19 nt, Artificial Sequence
  Description of Artificial Sequence: Synthetic oligonucleotide
gauucccgcucuuaacaag

SEQ ID NO: 224088 - RNA, 19 nt, Artificial Sequence
  Description of Artificial Sequence: Synthetic oligonucleotide
ggaaauaggcuuuggaauc

SEQ ID NO: 224089 - RNA, 19 nt, Artificial Sequence
  Description of Artificial Sequence: Synthetic oligonucleotide
ugucgaacugauucauuga

SEQ ID NO: 224090 - RNA, 19 nt, Artificial Sequence
  Description of Artificial Sequence: Synthetic oligonucleotide
uaagauucccgcucuuaac

SEQ ID NO: 224091 - RNA, 19 nt, Artificial Sequence
  Description of Artificial Sequence: Synthetic oligonucleotide
uuacuuacuugaagucccc

SEQ ID NO: 224092 - RNA, 19 nt, Artificial Sequence
  Description of Artificial Sequence: Synthetic oligonucleotide
cuuuucgugaccacaucuc

SEQ ID NO: 224093 - RNA, 19 nt, Artificial Sequence
  Description of Artificial Sequence: Synthetic oligonucleotide
cuauccgugguucaccuuc

SEQ ID NO: 224094 - RNA, 19 nt, Artificial Sequence
  Description of Artificial Sequence: Synthetic oligonucleotide
uguugcuaccagauuacau

SEQ ID NO: 224095 - RNA, 19 nt, Artificial Sequence
  Description of Artificial Sequence: Synthetic oligonucleotide
cuauguugcuaccagauua

SEQ ID NO: 224096 - RNA, 19 nt, Artificial Sequence
  Description of Artificial Sequence: Synthetic oligonucleotide
ugagucccaucuaaauucu

SEQ ID NO: 224097 - RNA, 19 nt, Artificial Sequence
  Description of Artificial Sequence: Synthetic oligonucleotide
gaccguaaucaaaauauuc

SEQ ID NO: 224098 - RNA, 19 nt, Artificial Sequence
  Description of Artificial Sequence: Synthetic oligonucleotide
gagugcuggauauuuauua

SEQ ID NO: 224099 - RNA, 19 nt, Artificial Sequence
  Description of Artificial Sequence: Synthetic oligonucleotide
agguaauacacaagcauca

SEQ ID NO: 224100 - RNA, 19 nt, Artificial Sequence
  Description of Artificial Sequence: Synthetic oligonucleotide
uuacgaaagguccuuucuu

SEQ ID NO: 224101 - RNA, 19 nt, Artificial Sequence
  Description of Artificial Sequence: Synthetic oligonucleotide
caccugugaguaaggaugg

SEQ ID NO: 224102 - RNA, 19 nt, Artificial Sequence
  Description of Artificial Sequence: Synthetic oligonucleotide
ugagcuagucuuguuaauc

SEQ ID NO: 224103 - RNA, 19 nt, Artificial Sequence
  Description of Artificial Sequence: Synthetic oligonucleotide
ucaagguuggauucccauc

SEQ ID NO: 224104 - RNA, 19 nt, Artificial Sequence
  Description of Artificial Sequence: Synthetic oligonucleotide
aaagguccuuucuucccga

SEQ ID NO: 224105 - RNA, 19 nt, Artificial Sequence
  Description of Artificial Sequence: Synthetic oligonucleotide
ucuaccgaucuaagcaagu

SEQ ID NO: 224106 - RNA, 19 nt, Artificial Sequence
  Description of Artificial Sequence: Synthetic oligonucleotide
uuaaagagguuagcuacaa

SEQ ID NO: 224107 - RNA, 19 nt, Artificial Sequence
  Description of Artificial Sequence: Synthetic oligonucleotide
ugguucaccuuccuucugu

SEQ ID NO: 224108 - RNA, 19 nt, Artificial Sequence
  Description of Artificial Sequence: Synthetic oligonucleotide
gaaggguguaagcuucaug

SEQ ID NO: 224109 - RNA, 19 nt, Artificial Sequence
  Description of Artificial Sequence: Synthetic oligonucleotide
uaguuaaugcagccuggcu

SEQ ID NO: 224110 - RNA, 19 nt, Artificial Sequence
  Description of Artificial Sequence: Synthetic oligonucleotide
guuaauacuauggcuaucu

SEQ ID NO: 224111 - RNA, 19 nt, Artificial Sequence
  Description of Artificial Sequence: Synthetic oligonucleotide
uuacgugaggguugacacc

SEQ ID NO: 224112 - RNA, 19 nt, Artificial Sequence
  Description of Artificial Sequence: Synthetic oligonucleotide
uuagaucaaaugagaguuu

SEQ ID NO: 224113 - RNA, 19 nt, Artificial Sequence
  Description of Artificial Sequence: Synthetic oligonucleotide
ugaguaaggaugguucuau

SEQ ID NO: 224114 - RNA, 19 nt, Artificial Sequence
  Description of Artificial Sequence: Synthetic oligonucleotide
uugacacugcauacuuggc

SEQ ID NO: 224115 - RNA, 19 nt, Artificial Sequence
  Description of Artificial Sequence: Synthetic oligonucleotide
gucaugaugagcuagucuu

SEQ ID NO: 224116 - RNA, 19 nt, Artificial Sequence
  Description of Artificial Sequence: Synthetic oligonucleotide
cauguuaaugucuauccgu

SEQ ID NO: 224117 - RNA, 19 nt, Artificial Sequence
  Description of Artificial Sequence: Synthetic oligonucleotide
aggucaagguuggauuccc

SEQ ID NO: 224118 - RNA, 19 nt, Artificial Sequence
  Description of Artificial Sequence: Synthetic oligonucleotide
guuggauucccaucauuca

SEQ ID NO: 224119 - RNA, 19 nt, Artificial Sequence
  Description of Artificial Sequence: Synthetic oligonucleotide
uucaaaucaucuguuucau

SEQ ID NO: 224120 - RNA, 19 nt, Artificial Sequence
  Description of Artificial Sequence: Synthetic oligonucleotide
uuaauacuauggcuaucua

SEQ ID NO: 224121 - RNA, 19 nt, Artificial Sequence
  Description of Artificial Sequence: Synthetic oligonucleotide
auuaaagagguuagcuaca

SEQ ID NO: 224122 - RNA, 19 nt, Artificial Sequence
  Description of Artificial Sequence: Synthetic oligonucleotide
ucccuaauucaacugcaua

SEQ ID NO: 224123 - RNA, 19 nt, Artificial Sequence
  Description of Artificial Sequence: Synthetic oligonucleotide
guuaaugucuauccguggu

SEQ ID NO: 224124 - RNA, 19 nt, Artificial Sequence
  Description of Artificial Sequence: Synthetic oligonucleotide
acagccuaagaggaaaaga

SEQ ID NO: 224125 - RNA, 19 nt, Artificial Sequence
  Description of Artificial Sequence: Synthetic oligonucleotide
gccuaagaggaaaagauac

SEQ ID NO: 224126 - RNA, 19 nt, Artificial Sequence
  Description of Artificial Sequence: Synthetic oligonucleotide
ccaaucaugcaccugugag

SEQ ID NO: 224127 - RNA, 19 nt, Artificial Sequence
  Description of Artificial Sequence: Synthetic oligonucleotide
ggggagagcauauacucug

SEQ ID NO: 224128 - RNA, 19 nt, Artificial Sequence
  Description of Artificial Sequence: Synthetic oligonucleotide
gcaccugugaguaaggaug

SEQ ID NO: 224129 - RNA, 19 nt, Artificial Sequence
  Description of Artificial Sequence: Synthetic oligonucleotide
agcauacuuugcuuauuga

SEQ ID NO: 224130 - RNA, 19 nt, Artificial Sequence
  Description of Artificial Sequence: Synthetic oligonucleotide
uuccugcuuaauucaauau

SEQ ID NO: 224131 - RNA, 19 nt, Artificial Sequence
  Description of Artificial Sequence: Synthetic oligonucleotide
ggguguaagcuucaugagc

SEQ ID NO: 224132 - RNA, 19 nt, Artificial Sequence
  Description of Artificial Sequence: Synthetic oligonucleotide
ugggauuuccacugacgac

SEQ ID NO: 224133 - RNA, 19 nt, Artificial Sequence
  Description of Artificial Sequence: Synthetic oligonucleotide
uaaagagguuagcuacaaa

SEQ ID NO: 224134 - RNA, 19 nt, Artificial Sequence
  Description of Artificial Sequence: Synthetic oligonucleotide
aacgaacugucugcaaccu

SEQ ID NO: 224135 - RNA, 19 nt, Artificial Sequence
  Description of Artificial Sequence: Synthetic oligonucleotide
guaagauucccgcucuuaa

SEQ ID NO: 224136 - RNA, 19 nt, Artificial Sequence
  Description of Artificial Sequence: Synthetic oligonucleotide
caugcaccugugaguaagg

SEQ ID NO: 224137 - RNA, 19 nt, Artificial Sequence
  Description of Artificial Sequence: Synthetic oligonucleotide
ugucuauccgugguucacc

SEQ ID NO: 224138 - RNA, 19 nt, Artificial Sequence
  Description of Artificial Sequence: Synthetic oligonucleotide
agagauggacagccuaaga

SEQ ID NO: 224139 - RNA, 19 nt, Artificial Sequence
  Description of Artificial Sequence: Synthetic oligonucleotide
gcuaucuaccgaucuaagc

SEQ ID NO: 224140 - RNA, 19 nt, Artificial Sequence
  Description of Artificial Sequence: Synthetic oligonucleotide
guugaccguaaucaaaaua

SEQ ID NO: 224141 - RNA, 19 nt, Artificial Sequence
  Description of Artificial Sequence: Synthetic oligonucleotide
gagaguuuugugauaaagu

SEQ ID NO: 224142 - RNA, 19 nt, Artificial Sequence
  Description of Artificial Sequence: Synthetic oligonucleotide
ccaauguucacaacaugac

SEQ ID NO: 224143 - RNA, 19 nt, Artificial Sequence
  Description of Artificial Sequence: Synthetic oligonucleotide
agaauucuuuaagccauga

SEQ ID NO: 224144 - RNA, 19 nt, Artificial Sequence
  Description of Artificial Sequence: Synthetic oligonucleotide
gggguaacgaacugucugc

SEQ ID NO: 224145 - RNA, 19 nt, Artificial Sequence
  Description of Artificial Sequence: Synthetic oligonucleotide
ccgacauacauacuuuccc

SEQ ID NO: 224146 - RNA, 19 nt, Artificial Sequence
  Description of Artificial Sequence: Synthetic oligonucleotide
agucccaucuaaauucuga

SEQ ID NO: 224147 - RNA, 19 nt, Artificial Sequence
  Description of Artificial Sequence: Synthetic oligonucleotide
uuucggcucucuucaaauc

SEQ ID NO: 224148 - RNA, 19 nt, Artificial Sequence
  Description of Artificial Sequence: Synthetic oligonucleotide
guuuacgugaggguugaca

SEQ ID NO: 224149 - RNA, 19 nt, Artificial Sequence
  Description of Artificial Sequence: Synthetic oligonucleotide
agauucccgcucuuaacaa

SEQ ID NO: 224150 - RNA, 19 nt, Artificial Sequence
  Description of Artificial Sequence: Synthetic oligonucleotide
uggcuaucuaccgaucuaa

SEQ ID NO: 224151 - RNA, 19 nt, Artificial Sequence
  Description of Artificial Sequence: Synthetic oligonucleotide
gggauuuccacugacgaca

SEQ ID NO: 224152 - RNA, 19 nt, Artificial Sequence
  Description of Artificial Sequence: Synthetic oligonucleotide
acuuuauaucccggcagug

SEQ ID NO: 224153 - RNA, 19 nt, Artificial Sequence
  Description of Artificial Sequence: Synthetic oligonucleotide
uguaagauucccgcucuua

SEQ ID NO: 224154 - RNA, 19 nt, Artificial Sequence
  Description of Artificial Sequence: Synthetic oligonucleotide
gagagguaauacacaagca

SEQ ID NO: 224155 - RNA, 19 nt, Artificial Sequence
  Description of Artificial Sequence: Synthetic oligonucleotide
uguugaccguaaucaaaau

SEQ ID NO: 224156 - RNA, 19 nt, Artificial Sequence
  Description of Artificial Sequence: Synthetic oligonucleotide
gguaauacacaagcaucag

SEQ ID NO: 224157 - RNA, 19 nt, Artificial Sequence
  Description of Artificial Sequence: Synthetic oligonucleotide
uauaucccggcaguggcau

SEQ ID NO: 224158 - RNA, 19 nt, Artificial Sequence
  Description of Artificial Sequence: Synthetic oligonucleotide
guuacgaaagguccuuucu

SEQ ID NO: 224159 - RNA, 19 nt, Artificial Sequence
  Description of Artificial Sequence: Synthetic oligonucleotide
gugguugccaucucaucca

SEQ ID NO: 224160 - RNA, 19 nt, Artificial Sequence
  Description of Artificial Sequence: Synthetic oligonucleotide
agagcagauggccggcugu

SEQ ID NO: 224161 - RNA, 19 nt, Artificial Sequence
  Description of Artificial Sequence: Synthetic oligonucleotide
cagcccgcaaaucuucggc

SEQ ID NO: 224162 - RNA, 19 nt, Artificial Sequence
  Description of Artificial Sequence: Synthetic oligonucleotide
augguuuacgugaggguug

SEQ ID NO: 224163 - RNA, 19 nt, Artificial Sequence
  Description of Artificial Sequence: Synthetic oligonucleotide
agagaacaucaaguccgac

SEQ ID NO: 224164 - RNA, 19 nt, Artificial Sequence
  Description of Artificial Sequence: Synthetic oligonucleotide
agguuagcuacaaaggcua

SEQ ID NO: 224165 - RNA, 19 nt, Artificial Sequence
  Description of Artificial Sequence: Synthetic oligonucleotide
agauggccggcugugagca

SEQ ID NO: 224166 - RNA, 19 nt, Artificial Sequence
  Description of Artificial Sequence: Synthetic oligonucleotide
gagguuagcuacaaaggcu

SEQ ID NO: 224167 - RNA, 19 nt, Artificial Sequence
  Description of Artificial Sequence: Synthetic oligonucleotide
ugguuuacgugaggguuga

SEQ ID NO: 224168 - RNA, 19 nt, Artificial Sequence
  Description of Artificial Sequence: Synthetic oligonucleotide
aucuaccgaucuaagcaag

SEQ ID NO: 224169 - RNA, 19 nt, Artificial Sequence
  Description of Artificial Sequence: Synthetic oligonucleotide
aaagccgccagugcuucau

SEQ ID NO: 224170 - RNA, 19 nt, Artificial Sequence
  Description of Artificial Sequence: Synthetic oligonucleotide
cuaccgaucuaagcaaguc

SEQ ID NO: 224171 - RNA, 19 nt, Artificial Sequence
  Description of Artificial Sequence: Synthetic oligonucleotide
aggaaaagauacacagaga

SEQ ID NO: 224172 - RNA, 19 nt, Artificial Sequence
  Description of Artificial Sequence: Synthetic oligonucleotide
gaguugcuuguuucuaaaa

SEQ ID NO: 224173 - RNA, 19 nt, Artificial Sequence
  Description of Artificial Sequence: Synthetic oligonucleotide
guccgacauacauacuuuc

SEQ ID NO: 224174 - RNA, 19 nt, Artificial Sequence
  Description of Artificial Sequence: Synthetic oligonucleotide
ugaucgucuuguccuuaaa

SEQ ID NO: 224175 - RNA, 19 nt, Artificial Sequence
  Description of Artificial Sequence: Synthetic oligonucleotide
cagccuaagaggaaaagau

SEQ ID NO: 224176 - RNA, 19 nt, Artificial Sequence
  Description of Artificial Sequence: Synthetic oligonucleotide
cacaacugccagacuggag

SEQ ID NO: 224177 - RNA, 19 nt, Artificial Sequence
  Description of Artificial Sequence: Synthetic oligonucleotide
augaaaguuggcccaucuu

SEQ ID NO: 224178 - RNA, 19 nt, Artificial Sequence
  Description of Artificial Sequence: Synthetic oligonucleotide
aguauucuaggaggagaga

SEQ ID NO: 224179 - RNA, 19 nt, Artificial Sequence
  Description of Artificial Sequence: Synthetic oligonucleotide
ucuauucagauugguuauu

SEQ ID NO: 224180 - RNA, 19 nt, Artificial Sequence
  Description of Artificial Sequence: Synthetic oligonucleotide
uucguucauauagcuguaa

SEQ ID NO: 224181 - RNA, 19 nt, Artificial Sequence
  Description of Artificial Sequence: Synthetic oligonucleotide
ucccgcucuuaacaagguc

SEQ ID NO: 224182 - RNA, 19 nt, Artificial Sequence
  Description of Artificial Sequence: Synthetic oligonucleotide
caccaagagaguucaucca

SEQ ID NO: 224183 - RNA, 19 nt, Artificial Sequence
  Description of Artificial Sequence: Synthetic oligonucleotide
cccgcucuuaacaagguca

SEQ ID NO: 224184 - RNA, 19 nt, Artificial Sequence
  Description of Artificial Sequence: Synthetic oligonucleotide
acgacaucagcagggguaa

SEQ ID NO: 224185 - RNA, 19 nt, Artificial Sequence
  Description of Artificial Sequence: Synthetic oligonucleotide
gugagugcuggauauuuau

SEQ ID NO: 224186 - RNA, 19 nt, Artificial Sequence
  Description of Artificial Sequence: Synthetic oligonucleotide
gcccgaguuuuccagauga

SEQ ID NO: 224187 - RNA, 19 nt, Artificial Sequence
  Description of Artificial Sequence: Synthetic oligonucleotide
augugucgaacugauucau

SEQ ID NO: 224188 - RNA, 19 nt, Artificial Sequence
  Description of Artificial Sequence: Synthetic oligonucleotide
ucacaacaugacacccaau

SEQ ID NO: 224189 - RNA, 19 nt, Artificial Sequence
  Description of Artificial Sequence: Synthetic oligonucleotide
guccuuuaaaugacugaga

SEQ ID NO: 224190 - RNA, 19 nt, Artificial Sequence
  Description of Artificial Sequence: Synthetic oligonucleotide
cuuugcuuauugaguccca

SEQ ID NO: 224191 - RNA, 19 nt, Artificial Sequence
  Description of Artificial Sequence: Synthetic oligonucleotide
gucugcaaccuaauuuauc

SEQ ID NO: 224192 - RNA, 19 nt, Artificial Sequence
  Description of Artificial Sequence: Synthetic oligonucleotide
augagaguuuugugauaaa

SEQ ID NO: 224193 - RNA, 19 nt, Artificial Sequence
  Description of Artificial Sequence: Synthetic oligonucleotide
gggagagcauauacucugg

SEQ ID NO: 224194 - RNA, 19 nt, Artificial Sequence
  Description of Artificial Sequence: Synthetic oligonucleotide
agguuggauucccaucauu

SEQ ID NO: 224195 - RNA, 19 nt, Artificial Sequence
  Description of Artificial Sequence: Synthetic oligonucleotide
aguccgacauacauacuuu

SEQ ID NO: 224196 - RNA, 19 nt, Artificial Sequence
  Description of Artificial Sequence: Synthetic oligonucleotide
auguugcuaccagauuaca

SEQ ID NO: 224197 - RNA, 19 nt, Artificial Sequence
  Description of Artificial Sequence: Synthetic oligonucleotide
uuagugagugcuggauauu

SEQ ID NO: 224198 - RNA, 19 nt, Artificial Sequence
  Description of Artificial Sequence: Synthetic oligonucleotide
gagucccaucuaaauucug

SEQ ID NO: 224199 - RNA, 19 nt, Artificial Sequence
  Description of Artificial Sequence: Synthetic oligonucleotide
cacuuuauaucccggcagu

SEQ ID NO: 224200 - RNA, 19 nt, Artificial Sequence
  Description of Artificial Sequence: Synthetic oligonucleotide
ugccagcccgaguuuucca

SEQ ID NO: 224201 - RNA, 19 nt, Artificial Sequence
  Description of Artificial Sequence: Synthetic oligonucleotide
cuuguuagaugcguuaauu

SEQ ID NO: 224202 - RNA, 19 nt, Artificial Sequence
  Description of Artificial Sequence: Synthetic oligonucleotide
guaucugaccacaguucuc

SEQ ID NO: 224203 - RNA, 19 nt, Artificial Sequence
  Description of Artificial Sequence: Synthetic oligonucleotide
gccagcccgaguuuuccag

SEQ ID NO: 224204 - RNA, 19 nt, Artificial Sequence
  Description of Artificial Sequence: Synthetic oligonucleotide
cguucauauagcuguaaga

SEQ ID NO: 224205 - RNA, 19 nt, Artificial Sequence
  Description of Artificial Sequence: Synthetic oligonucleotide
cuucuguaagauucccgcu

SEQ ID NO: 224206 - RNA, 19 nt, Artificial Sequence
  Description of Artificial Sequence: Synthetic oligonucleotide
ucuauccgugguucaccuu

SEQ ID NO: 224207 - RNA, 19 nt, Artificial Sequence
  Description of Artificial Sequence: Synthetic oligonucleotide
gccgccagugcuucauucc

SEQ ID NO: 224208 - RNA, 19 nt, Artificial Sequence
  Description of Artificial Sequence: Synthetic oligonucleotide
gucuauccgugguucaccu

SEQ ID NO: 224209 - RNA, 19 nt, Artificial Sequence
  Description of Artificial Sequence: Synthetic oligonucleotide
gcagggguaacgaacuguc

SEQ ID NO: 224210 - RNA, 19 nt, Artificial Sequence
  Description of Artificial Sequence: Synthetic oligonucleotide
cccgaguuucuccuucuag

SEQ ID NO: 224211 - RNA, 19 nt, Artificial Sequence
  Description of Artificial Sequence: Synthetic oligonucleotide
ggcuaucuaccgaucuaag

SEQ ID NO: 224212 - RNA, 19 nt, Artificial Sequence
  Description of Artificial Sequence: Synthetic oligonucleotide
gguaacgaacugucugcaa

SEQ ID NO: 224213 - RNA, 19 nt, Artificial Sequence
  Description of Artificial Sequence: Synthetic oligonucleotide
auucguucauauagcugua

SEQ ID NO: 224214 - RNA, 19 nt, Artificial Sequence
  Description of Artificial Sequence: Synthetic oligonucleotide
gugaguaaggaugguucua

SEQ ID NO: 224215 - RNA, 19 nt, Artificial Sequence
  Description of Artificial Sequence: Synthetic oligonucleotide
aagccgccagugcuucauu

SEQ ID NO: 224216 - RNA, 19 nt, Artificial Sequence
  Description of Artificial Sequence: Synthetic oligonucleotide
ccagcccgcaaaucuucgg

SEQ ID NO: 224217 - RNA, 19 nt, Artificial Sequence
  Description of Artificial Sequence: Synthetic oligonucleotide
cccgcaaaucuucggcacc

SEQ ID NO: 224218 - RNA, 19 nt, Artificial Sequence
  Description of Artificial Sequence: Synthetic oligonucleotide
cuauucagauugguuauuu

SEQ ID NO: 224219 - RNA, 19 nt, Artificial Sequence
  Description of Artificial Sequence: Synthetic oligonucleotide
gcuuauugagucccaucua

SEQ ID NO: 224220 - RNA, 19 nt, Artificial Sequence
  Description of Artificial Sequence: Synthetic oligonucleotide
gcccgcaaaucuucggcac

SEQ ID NO: 224221 - RNA, 19 nt, Artificial Sequence
  Description of Artificial Sequence: Synthetic oligonucleotide
ggguaacgaacugucugca

SEQ ID NO: 224222 - RNA, 19 nt, Artificial Sequence
  Description of Artificial Sequence: Synthetic oligonucleotide
ccuuuucgugaccacaucu

SEQ ID NO: 224223 - RNA, 19 nt, Artificial Sequence
  Description of Artificial Sequence: Synthetic oligonucleotide
gguucuauucagauugguu

SEQ ID NO: 224224 - RNA, 19 nt, Artificial Sequence
  Description of Artificial Sequence: Synthetic oligonucleotide
ccgaucuaagcaagucuca

SEQ ID NO: 224225 - RNA, 19 nt, Artificial Sequence
  Description of Artificial Sequence: Synthetic oligonucleotide
auaucccggcaguggcaua

SEQ ID NO: 224226 - RNA, 19 nt, Artificial Sequence
  Description of Artificial Sequence: Synthetic oligonucleotide
ggaugguucuauucagauu

SEQ ID NO: 224227 - RNA, 19 nt, Artificial Sequence
  Description of Artificial Sequence: Synthetic oligonucleotide
gguuagcuacaaaggcuaa

SEQ ID NO: 224228 - RNA, 19 nt, Artificial Sequence
  Description of Artificial Sequence: Synthetic oligonucleotide
gguugacaccaagagaguu

SEQ ID NO: 224229 - RNA, 19 nt, Artificial Sequence
  Description of Artificial Sequence: Synthetic oligonucleotide
cauugaagccugacauguu

SEQ ID NO: 224230 - RNA, 19 nt, Artificial Sequence
  Description of Artificial Sequence: Synthetic oligonucleotide
gcagacuuguugaccguaa

SEQ ID NO: 224231 - RNA, 19 nt, Artificial Sequence
  Description of Artificial Sequence: Synthetic oligonucleotide
cagacuuguugaccguaau

SEQ ID NO: 224232 - RNA, 19 nt, Artificial Sequence
  Description of Artificial Sequence: Synthetic oligonucleotide
cccuuuucgugaccacauc

SEQ ID NO: 224233 - RNA, 19 nt, Artificial Sequence
  Description of Artificial Sequence: Synthetic oligonucleotide
cagugccaaguucaaguuu

SEQ ID NO: 224234 - RNA, 19 nt, Artificial Sequence
  Description of Artificial Sequence: Synthetic oligonucleotide
ccagcccgaguuuuccaga

SEQ ID NO: 224235 - RNA, 19 nt, Artificial Sequence
  Description of Artificial Sequence: Synthetic oligonucleotide
gccugacauguuaaugucu

SEQ ID NO: 224236 - RNA, 19 nt, Artificial Sequence
  Description of Artificial Sequence: Synthetic oligonucleotide
ccgcaaaucuucggcacca

SEQ ID NO: 224237 - RNA, 19 nt, Artificial Sequence
  Description of Artificial Sequence: Synthetic oligonucleotide
cagcagacuuguugaccgu

SEQ ID NO: 224238 - RNA, 19 nt, Artificial Sequence
  Description of Artificial Sequence: Synthetic oligonucleotide
ggauuuccacugacgacau

SEQ ID NO: 224239 - RNA, 19 nt, Artificial Sequence
  Description of Artificial Sequence: Synthetic oligonucleotide
gguuuacgugaggguugac

SEQ ID NO: 224240 - RNA, 19 nt, Artificial Sequence
  Description of Artificial Sequence: Synthetic oligonucleotide
ccccuauaguuuaugcuuu

SEQ ID NO: 224241 - RNA, 19 nt, Artificial Sequence
  Description of Artificial Sequence: Synthetic oligonucleotide
cccgaguuuuccagaugaa

SEQ ID NO: 224242 - RNA, 19 nt, Artificial Sequence
  Description of Artificial Sequence: Synthetic oligonucleotide
ccuuguuagaugcguuaau

SEQ ID NO: 224243 - RNA, 19 nt, Artificial Sequence
  Description of Artificial Sequence: Synthetic oligonucleotide
acgugaggguugacaccaa

SEQ ID NO: 224244 - RNA, 19 nt, Artificial Sequence
  Description of Artificial Sequence: Synthetic oligonucleotide
gcauacuuucggcucucuu

SEQ ID NO: 224245 - RNA, 19 nt, Artificial Sequence
  Description of Artificial Sequence: Synthetic oligonucleotide
cuguaagauucccgcucuu

SEQ ID NO: 224246 - RNA, 19 nt, Artificial Sequence
  Description of Artificial Sequence: Synthetic oligonucleotide
ccccuuuucgugaccacau

SEQ ID NO: 224247 - RNA, 19 nt, Artificial Sequence
  Description of Artificial Sequence: Synthetic oligonucleotide
gauggccggcugugagcau

SEQ ID NO: 224248 - RNA, 19 nt, Artificial Sequence
  Description of Artificial Sequence: Synthetic oligonucleotide
ccgccagugcuucauuccu

SEQ ID NO: 224249 - RNA, 19 nt, Artificial Sequence
  Description of Artificial Sequence: Synthetic oligonucleotide
cccuauaguuuaugcuuuu

SEQ ID NO: 224250 - RNA, 19 nt, Artificial Sequence
  Description of Artificial Sequence: Synthetic oligonucleotide
cggcaccaauguucacaac

SEQ ID NO: 224251 - RNA, 19 nt, Artificial Sequence
  Description of Artificial Sequence: Synthetic oligonucleotide
cgcaaaucuucggcaccaa

SEQ ID NO: 224252 - RNA, 19 nt, Artificial Sequence
  Description of Artificial Sequence: Synthetic oligonucleotide
aaagaugugcuguagcugc

SEQ ID NO: 224253 - RNA, 19 nt, Artificial Sequence
  Description of Artificial Sequence: Synthetic oligonucleotide
aaaacuaauaacagcaacc

SEQ ID NO: 224254 - RNA, 19 nt, Artificial Sequence
  Description of Artificial Sequence: Synthetic oligonucleotide
ucacauaucacccaaaaga

SEQ ID NO: 224255 - RNA, 19 nt, Artificial Sequence
  Description of Artificial Sequence: Synthetic oligonucleotide
ucuaguuugcagcagauag

SEQ ID NO: 224256 - RNA, 19 nt, Artificial Sequence
  Description of Artificial Sequence: Synthetic oligonucleotide
uauuuagucugcuucaugg

SEQ ID NO: 224257 - RNA, 19 nt, Artificial Sequence
  Description of Artificial Sequence: Synthetic oligonucleotide
uuaguguaaagcuacagcc

SEQ ID NO: 224258 - RNA, 19 nt, Artificial Sequence
  Description of Artificial Sequence: Synthetic oligonucleotide
acauuggccucccagaacc

SEQ ID NO: 224259 - RNA, 19 nt, Artificial Sequence
  Description of Artificial Sequence: Synthetic oligonucleotide
aaagcuugacauugaggcc

SEQ ID NO: 224260 - RNA, 19 nt, Artificial Sequence
  Description of Artificial Sequence: Synthetic oligonucleotide
acuauaagacgugacagcc

SEQ ID NO: 224261 - RNA, 19 nt, Artificial Sequence
  Description of Artificial Sequence: Synthetic oligonucleotide
agacagcucaaguauaacc

SEQ ID NO: 224262 - RNA, 19 nt, Artificial Sequence
  Description of Artificial Sequence: Synthetic oligonucleotide
uguugauuaguguaaagcu

SEQ ID NO: 224263 - RNA, 19 nt, Artificial Sequence
  Description of Artificial Sequence: Synthetic oligonucleotide
ucuguuacucacacuaccg

SEQ ID NO: 224264 - RNA, 19 nt, Artificial Sequence
  Description of Artificial Sequence: Synthetic oligonucleotide
ucaaguauaaccagucaca

SEQ ID NO: 224265 - RNA, 19 nt, Artificial Sequence
  Description of Artificial Sequence: Synthetic oligonucleotide
aacuaauaacagcaaccac

SEQ ID NO: 224266 - RNA, 19 nt, Artificial Sequence
  Description of Artificial Sequence: Synthetic oligonucleotide
aucacuuucaccucaggag

SEQ ID NO: 224267 - RNA, 19 nt, Artificial Sequence
  Description of Artificial Sequence: Synthetic oligonucleotide
uauaagacgugacagccca

SEQ ID NO: 224268 - RNA, 19 nt, Artificial Sequence
  Description of Artificial Sequence: Synthetic oligonucleotide
gaguguuggauuuacagac

SEQ ID NO: 224269 - RNA, 19 nt, Artificial Sequence
  Description of Artificial Sequence: Synthetic oligonucleotide
ucccaauuuguuaaauacg

SEQ ID NO: 224270 - RNA, 19 nt, Artificial Sequence
  Description of Artificial Sequence: Synthetic oligonucleotide
uugucuauguacaauauuu

SEQ ID NO: 224271 - RNA, 19 nt, Artificial Sequence
  Description of Artificial Sequence: Synthetic oligonucleotide
aguguaaagcuacagccuc

SEQ ID NO: 224272 - RNA, 19 nt, Artificial Sequence
  Description of Artificial Sequence: Synthetic oligonucleotide
aaacuaauaacagcaacca

SEQ ID NO: 224273 - RNA, 19 nt, Artificial Sequence
  Description of Artificial Sequence: Synthetic oligonucleotide
aguacaacccaccacaccu

SEQ ID NO: 224274 - RNA, 19 nt, Artificial Sequence
  Description of Artificial Sequence: Synthetic oligonucleotide
aagccggguaucuagccgc

SEQ ID NO: 224275 - RNA, 19 nt, Artificial Sequence
  Description of Artificial Sequence: Synthetic oligonucleotide
aaagauggcuucccacccc

SEQ ID NO: 224276 - RNA, 19 nt, Artificial Sequence
  Description of Artificial Sequence: Synthetic oligonucleotide
acaucgaguguaaauaugc

SEQ ID NO: 224277 - RNA, 19 nt, Artificial Sequence
  Description of Artificial Sequence: Synthetic oligonucleotide
ucgguauugggacugaugu

SEQ ID NO: 224278 - RNA, 19 nt, Artificial Sequence
  Description of Artificial Sequence: Synthetic oligonucleotide
guuugcagcagauagcagc

SEQ ID NO: 224279 - RNA, 19 nt, Artificial Sequence
  Description of Artificial Sequence: Synthetic oligonucleotide
uuacagacaguaaccaggc

SEQ ID NO: 224280 - RNA, 19 nt, Artificial Sequence
  Description of Artificial Sequence: Synthetic oligonucleotide
uggucuagaauccaggcuc

SEQ ID NO: 224281 - RNA, 19 nt, Artificial Sequence
  Description of Artificial Sequence: Synthetic oligonucleotide
uccacuauaagacgugaca

SEQ ID NO: 224282 - RNA, 19 nt, Artificial Sequence
  Description of Artificial Sequence: Synthetic oligonucleotide
aagccgucaauccacagga

SEQ ID NO: 224283 - RNA, 19 nt, Artificial Sequence
  Description of Artificial Sequence: Synthetic oligonucleotide
agacagaccacauuggccu

SEQ ID NO: 224284 - RNA, 19 nt, Artificial Sequence
  Description of Artificial Sequence: Synthetic oligonucleotide
aacggguccacauugcgca

SEQ ID NO: 224285 - RNA, 19 nt, Artificial Sequence
  Description of Artificial Sequence: Synthetic oligonucleotide
aaagccggguaucuagccg

SEQ ID NO: 224286 - RNA, 19 nt, Artificial Sequence
  Description of Artificial Sequence: Synthetic oligonucleotide
cauaucacccaaaagauaa

SEQ ID NO: 224287 - RNA, 19 nt, Artificial Sequence
  Description of Artificial Sequence: Synthetic oligonucleotide
ucgaguguaaauaugccau

SEQ ID NO: 224288 - RNA, 19 nt, Artificial Sequence
  Description of Artificial Sequence: Synthetic oligonucleotide
uguugaaguggaaacuccc

SEQ ID NO: 224289 - RNA, 19 nt, Artificial Sequence
  Description of Artificial Sequence: Synthetic oligonucleotide
gaaucucacugccacaaag

SEQ ID NO: 224290 - RNA, 19 nt, Artificial Sequence
  Description of Artificial Sequence: Synthetic oligonucleotide
ugugagaguguccaguacu

SEQ ID NO: 224291 - RNA, 19 nt, Artificial Sequence
  Description of Artificial Sequence: Synthetic oligonucleotide
aaucucacugccacaaagg

SEQ ID NO: 224292 - RNA, 19 nt, Artificial Sequence
  Description of Artificial Sequence: Synthetic oligonucleotide
uucacauaucacccaaaag

SEQ ID NO: 224293 - RNA, 19 nt, Artificial Sequence
  Description of Artificial Sequence: Synthetic oligonucleotide
cauacuaagagacucuuca

SEQ ID NO: 224294 - RNA, 19 nt, Artificial Sequence
  Description of Artificial Sequence: Synthetic oligonucleotide
cucaaguauaaccagucac

SEQ ID NO: 224295 - RNA, 19 nt, Artificial Sequence
  Description of Artificial Sequence: Synthetic oligonucleotide
aucaagagggcccagcuca

SEQ ID NO: 224296 - RNA, 19 nt, Artificial Sequence
  Description of Artificial Sequence: Synthetic oligonucleotide
gaaacucccacacugaugu

SEQ ID NO: 224297 - RNA, 19 nt, Artificial Sequence
  Description of Artificial Sequence: Synthetic oligonucleotide
gagaaagccggguaucuag

SEQ ID NO: 224298 - RNA, 19 nt, Artificial Sequence
  Description of Artificial Sequence: Synthetic oligonucleotide
accacauacuaagagacuc

SEQ ID NO: 224299 - RNA, 19 nt, Artificial Sequence
  Description of Artificial Sequence: Synthetic oligonucleotide
aaucaagagggcccagcuc

SEQ ID NO: 224300 - RNA, 19 nt, Artificial Sequence
  Description of Artificial Sequence: Synthetic oligonucleotide
uaagcaagccgucaaucca

SEQ ID NO: 224301 - RNA, 19 nt, Artificial Sequence
  Description of Artificial Sequence: Synthetic oligonucleotide
ugugagcucgcacuuagga

SEQ ID NO: 224302 - RNA, 19 nt, Artificial Sequence
  Description of Artificial Sequence: Synthetic oligonucleotide
uuccccuacagcaagucug

SEQ ID NO: 224303 - RNA, 19 nt, Artificial Sequence
  Description of Artificial Sequence: Synthetic oligonucleotide
ugagcucgcacuuaggaaa

SEQ ID NO: 224304 - RNA, 19 nt, Artificial Sequence
  Description of Artificial Sequence: Synthetic oligonucleotide
uaaauacggugugagcucg

SEQ ID NO: 224305 - RNA, 19 nt, Artificial Sequence
  Description of Artificial Sequence: Synthetic oligonucleotide
guuacugcgccucagagaa

SEQ ID NO: 224306 - RNA, 19 nt, Artificial Sequence
  Description of Artificial Sequence: Synthetic oligonucleotide
acuauguuaacuugcuuaa

SEQ ID NO: 224307 - RNA, 19 nt, Artificial Sequence
  Description of Artificial Sequence: Synthetic oligonucleotide
agaaauugaugggacuccc

SEQ ID NO: 224308 - RNA, 19 nt, Artificial Sequence
  Description of Artificial Sequence: Synthetic oligonucleotide
ucuacuuggagagugcgga

SEQ ID NO: 224309 - RNA, 19 nt, Artificial Sequence
  Description of Artificial Sequence: Synthetic oligonucleotide
auuaggguggucuaggcuu

SEQ ID NO: 224310 - RNA, 19 nt, Artificial Sequence
  Description of Artificial Sequence: Synthetic oligonucleotide
ugagucccgggucaggccg

SEQ ID NO: 224311 - RNA, 19 nt, Artificial Sequence
  Description of Artificial Sequence: Synthetic oligonucleotide
uguuaaauacggugugagc

SEQ ID NO: 224312 - RNA, 19 nt, Artificial Sequence
  Description of Artificial Sequence: Synthetic oligonucleotide
guuaaucgcauccuccacc

SEQ ID NO: 224313 - RNA, 19 nt, Artificial Sequence
  Description of Artificial Sequence: Synthetic oligonucleotide
guaggguuggcuuauucug

SEQ ID NO: 224314 - RNA, 19 nt, Artificial Sequence
  Description of Artificial Sequence: Synthetic oligonucleotide
uuaaauacggugugagcuc

SEQ ID NO: 224315 - RNA, 19 nt, Artificial Sequence
  Description of Artificial Sequence: Synthetic oligonucleotide
ucacacuaccgcuugaagu

SEQ ID NO: 224316 - RNA, 19 nt, Artificial Sequence
  Description of Artificial Sequence: Synthetic oligonucleotide
uuaaucgcauccuccaccu

SEQ ID NO: 224317 - RNA, 19 nt, Artificial Sequence
  Description of Artificial Sequence: Synthetic oligonucleotide
acacaaguacagucuacac

SEQ ID NO: 224318 - RNA, 19 nt, Artificial Sequence
  Description of Artificial Sequence: Synthetic oligonucleotide
agugaccgcuuguugagac

SEQ ID NO: 224319 - RNA, 19 nt, Artificial Sequence
  Description of Artificial Sequence: Synthetic oligonucleotide
aggagaaaucaccacuguc

SEQ ID NO: 224320 - RNA, 19 nt, Artificial Sequence
  Description of Artificial Sequence: Synthetic oligonucleotide
uguuacucacacuaccgcu

SEQ ID NO: 224321 - RNA, 19 nt, Artificial Sequence
  Description of Artificial Sequence: Synthetic oligonucleotide
cagacaguaaccaggcccc

SEQ ID NO: 224322 - RNA, 19 nt, Artificial Sequence
  Description of Artificial Sequence: Synthetic oligonucleotide
acauuaggguggucuaggc

SEQ ID NO: 224323 - RNA, 19 nt, Artificial Sequence
  Description of Artificial Sequence: Synthetic oligonucleotide
gauuaguguaaagcuacag

SEQ ID NO: 224324 - RNA, 19 nt, Artificial Sequence
  Description of Artificial Sequence: Synthetic oligonucleotide
guaaccaggccccagcacc

SEQ ID NO: 224325 - RNA, 19 nt, Artificial Sequence
  Description of Artificial Sequence: Synthetic oligonucleotide
aucgaguguaaauaugcca

SEQ ID NO: 224326 - RNA, 19 nt, Artificial Sequence
  Description of Artificial Sequence: Synthetic oligonucleotide
uuuugugagugaccgcuug

SEQ ID NO: 224327 - RNA, 19 nt, Artificial Sequence
  Description of Artificial Sequence: Synthetic oligonucleotide
ucauaugcuuugaaggcuc

SEQ ID NO: 224328 - RNA, 19 nt, Artificial Sequence
  Description of Artificial Sequence: Synthetic oligonucleotide
cacacuaccgcuugaaguc

SEQ ID NO: 224329 - RNA, 19 nt, Artificial Sequence
  Description of Artificial Sequence: Synthetic oligonucleotide
ugagugaccgcuuguugag

SEQ ID NO: 224330 - RNA, 19 nt, Artificial Sequence
  Description of Artificial Sequence: Synthetic oligonucleotide
uccacauugcgcaggaagu

SEQ ID NO: 224331 - RNA, 19 nt, Artificial Sequence
  Description of Artificial Sequence: Synthetic oligonucleotide
ugcggaauguccccuugcg

SEQ ID NO: 224332 - RNA, 19 nt, Artificial Sequence
  Description of Artificial Sequence: Synthetic oligonucleotide
uuaauuuauuuagucugcu

SEQ ID NO: 224333 - RNA, 19 nt, Artificial Sequence
  Description of Artificial Sequence: Synthetic oligonucleotide
acauacuaaagaugugcug

SEQ ID NO: 224334 - RNA, 19 nt, Artificial Sequence
  Description of Artificial Sequence: Synthetic oligonucleotide
ucucaguucuguuacucac

SEQ ID NO: 224335 - RNA, 19 nt, Artificial Sequence
  Description of Artificial Sequence: Synthetic oligonucleotide
uguucgaucagcagcugaa

SEQ ID NO: 224336 - RNA, 19 nt, Artificial Sequence
  Description of Artificial Sequence: Synthetic oligonucleotide
agaguguccaguacucugc

SEQ ID NO: 224337 - RNA, 19 nt, Artificial Sequence
  Description of Artificial Sequence: Synthetic oligonucleotide
ucgcacuuaggaaauggca

SEQ ID NO: 224338 - RNA, 19 nt, Artificial Sequence
  Description of Artificial Sequence: Synthetic oligonucleotide
guguuggauuuacagacag

SEQ ID NO: 224339 - RNA, 19 nt, Artificial Sequence
  Description of Artificial Sequence: Synthetic oligonucleotide
cugguuaaucgcauccucc

SEQ ID NO: 224340 - RNA, 19 nt, Artificial Sequence
  Description of Artificial Sequence: Synthetic oligonucleotide
uaaagaugugcuguagcug

SEQ ID NO: 224341 - RNA, 19 nt, Artificial Sequence
  Description of Artificial Sequence: Synthetic oligonucleotide
gguauugggacugaugugc

SEQ ID NO: 224342 - RNA, 19 nt, Artificial Sequence
  Description of Artificial Sequence: Synthetic oligonucleotide
uccaguaggguuuccuacc

SEQ ID NO: 224343 - RNA, 19 nt, Artificial Sequence
  Description of Artificial Sequence: Synthetic oligonucleotide
uuucucucuccacuauaag

SEQ ID NO: 224344 - RNA, 19 nt, Artificial Sequence
  Description of Artificial Sequence: Synthetic oligonucleotide
aguaggguuuccuaccaca

SEQ ID NO: 224345 - RNA, 19 nt, Artificial Sequence
  Description of Artificial Sequence: Synthetic oligonucleotide
gugcuuuugugagugaccg

SEQ ID NO: 224346 - RNA, 19 nt, Artificial Sequence
  Description of Artificial Sequence: Synthetic oligonucleotide
uaugccauuccagaagaga

SEQ ID NO: 224347 - RNA, 19 nt, Artificial Sequence
  Description of Artificial Sequence: Synthetic oligonucleotide
gguaucuagccgcagcugg

SEQ ID NO: 224348 - RNA, 19 nt, Artificial Sequence
  Description of Artificial Sequence: Synthetic oligonucleotide
aauggucccuaguaacaga

SEQ ID NO: 224349 - RNA, 19 nt, Artificial Sequence
  Description of Artificial Sequence: Synthetic oligonucleotide
uuacucacacuaccgcuug

SEQ ID NO: 224350 - RNA, 19 nt, Artificial Sequence
  Description of Artificial Sequence: Synthetic oligonucleotide
auguugaaguggaaacucc

SEQ ID NO: 224351 - RNA, 19 nt, Artificial Sequence
  Description of Artificial Sequence: Synthetic oligonucleotide
cuauaagacgugacagccc

SEQ ID NO: 224352 - RNA, 19 nt, Artificial Sequence
  Description of Artificial Sequence: Synthetic oligonucleotide
gaucucacagagaacaauc

SEQ ID NO: 224353 - RNA, 19 nt, Artificial Sequence
  Description of Artificial Sequence: Synthetic oligonucleotide
cagacccaaagucugagac

SEQ ID NO: 224354 - RNA, 19 nt, Artificial Sequence
  Description of Artificial Sequence: Synthetic oligonucleotide
ugugagugaccgcuuguug

SEQ ID NO: 224355 - RNA, 19 nt, Artificial Sequence
  Description of Artificial Sequence: Synthetic oligonucleotide
caucgaguguaaauaugcc

SEQ ID NO: 224356 - RNA, 19 nt, Artificial Sequence
  Description of Artificial Sequence: Synthetic oligonucleotide
cuucgcaucacuuucaccu

SEQ ID NO: 224357 - RNA, 19 nt, Artificial Sequence
  Description of Artificial Sequence: Synthetic oligonucleotide
uacggugugagcucgcacu

SEQ ID NO: 224358 - RNA, 19 nt, Artificial Sequence
  Description of Artificial Sequence: Synthetic oligonucleotide
ugcacaucgaguguaaaua

SEQ ID NO: 224359 - RNA, 19 nt, Artificial Sequence
  Description of Artificial Sequence: Synthetic oligonucleotide
ugauuaguguaaagcuaca

SEQ ID NO: 224360 - RNA, 19 nt, Artificial Sequence
  Description of Artificial Sequence: Synthetic oligonucleotide
uggucuaggcuucgcauca

SEQ ID NO: 224361 - RNA, 19 nt, Artificial Sequence
  Description of Artificial Sequence: Synthetic oligonucleotide
ugugaguucaggucucggu

SEQ ID NO: 224362 - RNA, 19 nt, Artificial Sequence
  Description of Artificial Sequence: Synthetic oligonucleotide
uugggacugaugugcaucc

SEQ ID NO: 224363 - RNA, 19 nt, Artificial Sequence
  Description of Artificial Sequence: Synthetic oligonucleotide
uucgguauugggacugaug

SEQ ID NO: 224364 - RNA, 19 nt, Artificial Sequence
  Description of Artificial Sequence: Synthetic oligonucleotide
gaugggacuccccuuuccc

SEQ ID NO: 224365 - RNA, 19 nt, Artificial Sequence
  Description of Artificial Sequence: Synthetic oligonucleotide
ucuugucuauguacaauau

SEQ ID NO: 224366 - RNA, 19 nt, Artificial Sequence
  Description of Artificial Sequence: Synthetic oligonucleotide
ucugguuaaucgcauccuc

SEQ ID NO: 224367 - RNA, 19 nt, Artificial Sequence
  Description of Artificial Sequence: Synthetic oligonucleotide
uguccaguacucugcaugu

SEQ ID NO: 224368 - RNA, 19 nt, Artificial Sequence
  Description of Artificial Sequence: Synthetic oligonucleotide
ugcggggcaggcaaucagg

SEQ ID NO: 224369 - RNA, 19 nt, Artificial Sequence
  Description of Artificial Sequence: Synthetic oligonucleotide
gugaguucaggucucggug

SEQ ID NO: 224370 - RNA, 19 nt, Artificial Sequence
  Description of Artificial Sequence: Synthetic oligonucleotide
aaccggucuagcaucggac

SEQ ID NO: 224371 - RNA, 19 nt, Artificial Sequence
  Description of Artificial Sequence: Synthetic oligonucleotide
agcuaguccugcucauagc

SEQ ID NO: 224372 - RNA, 19 nt, Artificial Sequence
  Description of Artificial Sequence: Synthetic oligonucleotide
ggcauuucgguauugggac

SEQ ID NO: 224373 - RNA, 19 nt, Artificial Sequence
  Description of Artificial Sequence: Synthetic oligonucleotide
cacuauguuaacuugcuua

SEQ ID NO: 224374 - RNA, 19 nt, Artificial Sequence
  Description of Artificial Sequence: Synthetic oligonucleotide
agggcuaggguggugaguc

SEQ ID NO: 224375 - RNA, 19 nt, Artificial Sequence
  Description of Artificial Sequence: Synthetic oligonucleotide
auggucccuaguaacagac

SEQ ID NO: 224376 - RNA, 19 nt, Artificial Sequence
  Description of Artificial Sequence: Synthetic oligonucleotide
ucagcauacaccugcccaa

SEQ ID NO: 224377 - RNA, 19 nt, Artificial Sequence
  Description of Artificial Sequence: Synthetic oligonucleotide
aacaagggagguagaauca

SEQ ID NO: 224378 - RNA, 19 nt, Artificial Sequence
  Description of Artificial Sequence: Synthetic oligonucleotide
agaaagccggguaucuagc

SEQ ID NO: 224379 - RNA, 19 nt, Artificial Sequence
  Description of Artificial Sequence: Synthetic oligonucleotide
ugcgccucagagaacgucu

SEQ ID NO: 224380 - RNA, 19 nt, Artificial Sequence
  Description of Artificial Sequence: Synthetic oligonucleotide
aggaagccuagcuaguccu

SEQ ID NO: 224381 - RNA, 19 nt, Artificial Sequence
  Description of Artificial Sequence: Synthetic oligonucleotide
guagccaccaauuccuguc

SEQ ID NO: 224382 - RNA, 19 nt, Artificial Sequence
  Description of Artificial Sequence: Synthetic oligonucleotide
cuugcguuucuugugguug

SEQ ID NO: 224383 - RNA, 19 nt, Artificial Sequence
  Description of Artificial Sequence: Synthetic oligonucleotide
uccccuacagcaagucugc

SEQ ID NO: 224384 - RNA, 19 nt, Artificial Sequence
  Description of Artificial Sequence: Synthetic oligonucleotide
ucuaagcaagccgucaauc

SEQ ID NO: 224385 - RNA, 19 nt, Artificial Sequence
  Description of Artificial Sequence: Synthetic oligonucleotide
cucgcacuuaggaaauggc

SEQ ID NO: 224386 - RNA, 19 nt, Artificial Sequence
  Description of Artificial Sequence: Synthetic oligonucleotide
gcgaguguuggauuuacag

SEQ ID NO: 224387 - RNA, 19 nt, Artificial Sequence
  Description of Artificial Sequence: Synthetic oligonucleotide
cacaucgaguguaaauaug

SEQ ID NO: 224388 - RNA, 19 nt, Artificial Sequence
  Description of Artificial Sequence: Synthetic oligonucleotide
uguuggauuuacagacagu

SEQ ID NO: 224389 - RNA, 19 nt, Artificial Sequence
  Description of Artificial Sequence: Synthetic oligonucleotide
cucuacuuggagagugcgg

SEQ ID NO: 224390 - RNA, 19 nt, Artificial Sequence
  Description of Artificial Sequence: Synthetic oligonucleotide
aaauacggugugagcucgc

SEQ ID NO: 224391 - RNA, 19 nt, Artificial Sequence
  Description of Artificial Sequence: Synthetic oligonucleotide
acacuaccgcuugaagucc

SEQ ID NO: 224392 - RNA, 19 nt, Artificial Sequence
  Description of Artificial Sequence: Synthetic oligonucleotide
aggcuggugagcagaaacc

SEQ ID NO: 224393 - RNA, 19 nt, Artificial Sequence
  Description of Artificial Sequence: Synthetic oligonucleotide
cauacuaaagaugugcugu

SEQ ID NO: 224394 - RNA, 19 nt, Artificial Sequence
  Description of Artificial Sequence: Synthetic oligonucleotide
ucccuaguaacagacuccu

SEQ ID NO: 224395 - RNA, 19 nt, Artificial Sequence
  Description of Artificial Sequence: Synthetic oligonucleotide
agagaacgucuccucagug

SEQ ID NO: 224396 - RNA, 19 nt, Artificial Sequence
  Description of Artificial Sequence: Synthetic oligonucleotide
uugcguuucuugugguugc

SEQ ID NO: 224397 - RNA, 19 nt, Artificial Sequence
  Description of Artificial Sequence: Synthetic oligonucleotide
cuagcaucggacaaugucu

SEQ ID NO: 224398 - RNA, 19 nt, Artificial Sequence
  Description of Artificial Sequence: Synthetic oligonucleotide
aacccaccacaccuuauau

SEQ ID NO: 224399 - RNA, 19 nt, Artificial Sequence
  Description of Artificial Sequence: Synthetic oligonucleotide
auacggugugagcucgcac

SEQ ID NO: 224400 - RNA, 19 nt, Artificial Sequence
  Description of Artificial Sequence: Synthetic oligonucleotide
ugguugccuucucuacugg

SEQ ID NO: 224401 - RNA, 19 nt, Artificial Sequence
  Description of Artificial Sequence: Synthetic oligonucleotide
cuucccaccccacaauuuc

SEQ ID NO: 224402 - RNA, 19 nt, Artificial Sequence
  Description of Artificial Sequence: Synthetic oligonucleotide
uucuaagcaagccgucaau

SEQ ID NO: 224403 - RNA, 19 nt, Artificial Sequence
  Description of Artificial Sequence: Synthetic oligonucleotide
agcagauagcagccagggg

SEQ ID NO: 224404 - RNA, 19 nt, Artificial Sequence
  Description of Artificial Sequence: Synthetic oligonucleotide
aucacuauguuaacuugcu

SEQ ID NO: 224405 - RNA, 19 nt, Artificial Sequence
  Description of Artificial Sequence: Synthetic oligonucleotide
gaucagcauacaccugccc

SEQ ID NO: 224406 - RNA, 19 nt, Artificial Sequence
  Description of Artificial Sequence: Synthetic oligonucleotide
ucgcaucacuuucaccuca

SEQ ID NO: 224407 - RNA, 19 nt, Artificial Sequence
  Description of Artificial Sequence: Synthetic oligonucleotide
guaggguuuccuaccacag

SEQ ID NO: 224408 - RNA, 19 nt, Artificial Sequence
  Description of Artificial Sequence: Synthetic oligonucleotide
cagaaccggucuagcaucg

SEQ ID NO: 224409 - RNA, 19 nt, Artificial Sequence
  Description of Artificial Sequence: Synthetic oligonucleotide
ugugugaguucaggucucg

SEQ ID NO: 224410 - RNA, 19 nt, Artificial Sequence
  Description of Artificial Sequence: Synthetic oligonucleotide
aauacggugugagcucgca

SEQ ID NO: 224411 - RNA, 19 nt, Artificial Sequence
  Description of Artificial Sequence: Synthetic oligonucleotide
auacuaaagaugugcugua

SEQ ID NO: 224412 - RNA, 19 nt, Artificial Sequence
  Description of Artificial Sequence: Synthetic oligonucleotide
uuaggguggucuaggcuuc

SEQ ID NO: 224413 - RNA, 19 nt, Artificial Sequence
  Description of Artificial Sequence: Synthetic oligonucleotide
gaccagacauacuaaagau

SEQ ID NO: 224414 - RNA, 19 nt, Artificial Sequence
  Description of Artificial Sequence: Synthetic oligonucleotide
gacuccuggucuagaaucc

SEQ ID NO: 224415 - RNA, 19 nt, Artificial Sequence
  Description of Artificial Sequence: Synthetic oligonucleotide
cauuucgguauugggacug

SEQ ID NO: 224416 - RNA, 19 nt, Artificial Sequence
  Description of Artificial Sequence: Synthetic oligonucleotide
agagcucucuuuguaucuc

SEQ ID NO: 224417 - RNA, 19 nt, Artificial Sequence
  Description of Artificial Sequence: Synthetic oligonucleotide
acacugauguggucccuag

SEQ ID NO: 224418 - RNA, 19 nt, Artificial Sequence
  Description of Artificial Sequence: Synthetic oligonucleotide
ggaauguccccuugcgggg

SEQ ID NO: 224419 - RNA, 19 nt, Artificial Sequence
  Description of Artificial Sequence: Synthetic oligonucleotide
cucuccacuauaagacgug

SEQ ID NO: 224420 - RNA, 19 nt, Artificial Sequence
  Description of Artificial Sequence: Synthetic oligonucleotide
aagccuagcuaguccugcu

SEQ ID NO: 224421 - RNA, 19 nt, Artificial Sequence
  Description of Artificial Sequence: Synthetic oligonucleotide
acauacuaagagacucuuc

SEQ ID NO: 224422 - RNA, 19 nt, Artificial Sequence
  Description of Artificial Sequence: Synthetic oligonucleotide
ugaugcacaucgaguguaa

SEQ ID NO: 224423 - RNA, 19 nt, Artificial Sequence
  Description of Artificial Sequence: Synthetic oligonucleotide
agccuagcuaguccugcuc

SEQ ID NO: 224424 - RNA, 19 nt, Artificial Sequence
  Description of Artificial Sequence: Synthetic oligonucleotide
cagacauacuaaagaugug

SEQ ID NO: 224425 - RNA, 19 nt, Artificial Sequence
  Description of Artificial Sequence: Synthetic oligonucleotide
ggugugagcucgcacuuag

SEQ ID NO: 224426 - RNA, 19 nt, Artificial Sequence
  Description of Artificial Sequence: Synthetic oligonucleotide
ucaggcgaguguuggauuu

SEQ ID NO: 224427 - RNA, 19 nt, Artificial Sequence
  Description of Artificial Sequence: Synthetic oligonucleotide
gaacggguccacauugcgc

SEQ ID NO: 224428 - RNA, 19 nt, Artificial Sequence
  Description of Artificial Sequence: Synthetic oligonucleotide
cucacacuaccgcuugaag

SEQ ID NO: 224429 - RNA, 19 nt, Artificial Sequence
  Description of Artificial Sequence: Synthetic oligonucleotide
cacauaucacccaaaagau

SEQ ID NO: 224430 - RNA, 19 nt, Artificial Sequence
  Description of Artificial Sequence: Synthetic oligonucleotide
ggaacggguccacauugcg

SEQ ID NO: 224431 - RNA, 19 nt, Artificial Sequence
  Description of Artificial Sequence: Synthetic oligonucleotide
gccauuccagaagagaugc

SEQ ID NO: 224432 - RNA, 19 nt, Artificial Sequence
  Description of Artificial Sequence: Synthetic oligonucleotide
auguucgaucagcagcuga

SEQ ID NO: 224433 - RNA, 19 nt, Artificial Sequence
  Description of Artificial Sequence: Synthetic oligonucleotide
ccgucaauccacaggaagc

SEQ ID NO: 224434 - RNA, 19 nt, Artificial Sequence
  Description of Artificial Sequence: Synthetic oligonucleotide
gggacugaugugcauccgg

SEQ ID NO: 224435 - RNA, 19 nt, Artificial Sequence
  Description of Artificial Sequence: Synthetic oligonucleotide
uaccgcuugaaguccugca

SEQ ID NO: 224436 - RNA, 19 nt, Artificial Sequence
  Description of Artificial Sequence: Synthetic oligonucleotide
caggguggauggcauuucg

SEQ ID NO: 224437 - RNA, 19 nt, Artificial Sequence
  Description of Artificial Sequence: Synthetic oligonucleotide
cuccacuauaagacgugac

SEQ ID NO: 224438 - RNA, 19 nt, Artificial Sequence
  Description of Artificial Sequence: Synthetic oligonucleotide
uguugccaggggaacgggu

SEQ ID NO: 224439 - RNA, 19 nt, Artificial Sequence
  Description of Artificial Sequence: Synthetic oligonucleotide
uggacaccugguagccagg

SEQ ID NO: 224440 - RNA, 19 nt, Artificial Sequence
  Description of Artificial Sequence: Synthetic oligonucleotide
cacuuaggaaauggcaaac

SEQ ID NO: 224441 - RNA, 19 nt, Artificial Sequence
  Description of Artificial Sequence: Synthetic oligonucleotide
ggcuauguugauuagugua

SEQ ID NO: 224442 - RNA, 19 nt, Artificial Sequence
  Description of Artificial Sequence: Synthetic oligonucleotide
caguacaacccaccacacc

SEQ ID NO: 224443 - RNA, 19 nt, Artificial Sequence
  Description of Artificial Sequence: Synthetic oligonucleotide
accggucuagcaucggaca

SEQ ID NO: 224444 - RNA, 19 nt, Artificial Sequence
  Description of Artificial Sequence: Synthetic oligonucleotide
uggugcuuuugugagugac

SEQ ID NO: 224445 - RNA, 19 nt, Artificial Sequence
  Description of Artificial Sequence: Synthetic oligonucleotide
uaacagacuccuggucuag

SEQ ID NO: 224446 - RNA, 19 nt, Artificial Sequence
  Description of Artificial Sequence: Synthetic oligonucleotide
ccacuauaagacgugacag

SEQ ID NO: 224447 - RNA, 19 nt, Artificial Sequence
  Description of Artificial Sequence: Synthetic oligonucleotide
uucgcaucacuuucaccuc

SEQ ID NO: 224448 - RNA, 19 nt, Artificial Sequence
  Description of Artificial Sequence: Synthetic oligonucleotide
ucacuauguuaacuugcuu

SEQ ID NO: 224449 - RNA, 19 nt, Artificial Sequence
  Description of Artificial Sequence: Synthetic oligonucleotide
acagacuccuggucuagaa

SEQ ID NO: 224450 - RNA, 19 nt, Artificial Sequence
  Description of Artificial Sequence: Synthetic oligonucleotide
guucaggguuccccuacag

SEQ ID NO: 224451 - RNA, 19 nt, Artificial Sequence
  Description of Artificial Sequence: Synthetic oligonucleotide
cggaauguccccuugcggg

SEQ ID NO: 224452 - RNA, 19 nt, Artificial Sequence
  Description of Artificial Sequence: Synthetic oligonucleotide
guagaaucaagagggccca

SEQ ID NO: 224453 - RNA, 19 nt, Artificial Sequence
  Description of Artificial Sequence: Synthetic oligonucleotide
auaugcuuugaaggcucuc

SEQ ID NO: 224454 - RNA, 19 nt, Artificial Sequence
  Description of Artificial Sequence: Synthetic oligonucleotide
cuugcggucacucuugcgu

SEQ ID NO: 224455 - RNA, 19 nt, Artificial Sequence
  Description of Artificial Sequence: Synthetic oligonucleotide
agacucuucaaaaccugcu

SEQ ID NO: 224456 - RNA, 19 nt, Artificial Sequence
  Description of Artificial Sequence: Synthetic oligonucleotide
gccgucaauccacaggaag

SEQ ID NO: 224457 - RNA, 19 nt, Artificial Sequence
  Description of Artificial Sequence: Synthetic oligonucleotide
ugcuuuugugagugaccgc

SEQ ID NO: 224458 - RNA, 19 nt, Artificial Sequence
  Description of Artificial Sequence: Synthetic oligonucleotide
cauuggccucccagaaccg

SEQ ID NO: 224459 - RNA, 19 nt, Artificial Sequence
  Description of Artificial Sequence: Synthetic oligonucleotide
cuccucuacuuggagagug

SEQ ID NO: 224460 - RNA, 19 nt, Artificial Sequence
  Description of Artificial Sequence: Synthetic oligonucleotide
uugagaacgccggucugcu

SEQ ID NO: 224461 - RNA, 19 nt, Artificial Sequence
  Description of Artificial Sequence: Synthetic oligonucleotide
ggcuugucugguuaaucgc

SEQ ID NO: 224462 - RNA, 19 nt, Artificial Sequence
  Description of Artificial Sequence: Synthetic oligonucleotide
aacgccggucugcucucag

SEQ ID NO: 224463 - RNA, 19 nt, Artificial Sequence
  Description of Artificial Sequence: Synthetic oligonucleotide
cuggcugcggaaugucccc

SEQ ID NO: 224464 - RNA, 19 nt, Artificial Sequence
  Description of Artificial Sequence: Synthetic oligonucleotide
cccaaauacagggacagug

SEQ ID NO: 224465 - RNA, 19 nt, Artificial Sequence
  Description of Artificial Sequence: Synthetic oligonucleotide
gaaccggucuagcaucgga

SEQ ID NO: 224466 - RNA, 19 nt, Artificial Sequence
  Description of Artificial Sequence: Synthetic oligonucleotide
uggucccuaggcuggugag

SEQ ID NO: 224467 - RNA, 19 nt, Artificial Sequence
  Description of Artificial Sequence: Synthetic oligonucleotide
uguagcgcuucuugcgguc

SEQ ID NO: 224468 - RNA, 19 nt, Artificial Sequence
  Description of Artificial Sequence: Synthetic oligonucleotide
gagaagacauccacggucu

SEQ ID NO: 224469 - RNA, 19 nt, Artificial Sequence
  Description of Artificial Sequence: Synthetic oligonucleotide
gucccuaguaacagacucc

SEQ ID NO: 224470 - RNA, 19 nt, Artificial Sequence
  Description of Artificial Sequence: Synthetic oligonucleotide
guggucuaggcuucgcauc

SEQ ID NO: 224471 - RNA, 19 nt, Artificial Sequence
  Description of Artificial Sequence: Synthetic oligonucleotide
gacaguaaccaggccccag

SEQ ID NO: 224472 - RNA, 19 nt, Artificial Sequence
  Description of Artificial Sequence: Synthetic oligonucleotide
guucgaucagcagcugaag

SEQ ID NO: 224473 - RNA, 19 nt, Artificial Sequence
  Description of Artificial Sequence: Synthetic oligonucleotide
guaacagacuccuggucua

SEQ ID NO: 224474 - RNA, 19 nt, Artificial Sequence
  Description of Artificial Sequence: Synthetic oligonucleotide
aggcgaguguuggauuuac

SEQ ID NO: 224475 - RNA, 19 nt, Artificial Sequence
  Description of Artificial Sequence: Synthetic oligonucleotide
cuacuuggagagugcggac

SEQ ID NO: 224476 - RNA, 19 nt, Artificial Sequence
  Description of Artificial Sequence: Synthetic oligonucleotide
aguguuggauuuacagaca

SEQ ID NO: 224477 - RNA, 19 nt, Artificial Sequence
  Description of Artificial Sequence: Synthetic oligonucleotide
ggucauguucgaucagcag

SEQ ID NO: 224478 - RNA, 19 nt, Artificial Sequence
  Description of Artificial Sequence: Synthetic oligonucleotide
cuagggccaggagacuugg

SEQ ID NO: 224479 - RNA, 19 nt, Artificial Sequence
  Description of Artificial Sequence: Synthetic oligonucleotide
ggggaacggguccacauug

SEQ ID NO: 224480 - RNA, 19 nt, Artificial Sequence
  Description of Artificial Sequence: Synthetic oligonucleotide
aggccaguucauucuguca

SEQ ID NO: 224481 - RNA, 19 nt, Artificial Sequence
  Description of Artificial Sequence: Synthetic oligonucleotide
uauugggacugaugugcau

SEQ ID NO: 224482 - RNA, 19 nt, Artificial Sequence
  Description of Artificial Sequence: Synthetic oligonucleotide
agcaucggacaaugucuug

SEQ ID NO: 224483 - RNA, 19 nt, Artificial Sequence
  Description of Artificial Sequence: Synthetic oligonucleotide
gagagugcggacagggguc

SEQ ID NO: 224484 - RNA, 19 nt, Artificial Sequence
  Description of Artificial Sequence: Synthetic oligonucleotide
augaugcacaucgagugua

SEQ ID NO: 224485 - RNA, 19 nt, Artificial Sequence
  Description of Artificial Sequence: Synthetic oligonucleotide
gucccaaguugcugccugg

SEQ ID NO: 224486 - RNA, 19 nt, Artificial Sequence
  Description of Artificial Sequence: Synthetic oligonucleotide
gcauguggggagaaagccg

SEQ ID NO: 224487 - RNA, 19 nt, Artificial Sequence
  Description of Artificial Sequence: Synthetic oligonucleotide
uacucacacuaccgcuuga

SEQ ID NO: 224488 - RNA, 19 nt, Artificial Sequence
  Description of Artificial Sequence: Synthetic oligonucleotide
cacuuucaccucaggagca

SEQ ID NO: 224489 - RNA, 19 nt, Artificial Sequence
  Description of Artificial Sequence: Synthetic oligonucleotide
ugggacugaugugcauccg

SEQ ID NO: 224490 - RNA, 19 nt, Artificial Sequence
  Description of Artificial Sequence: Synthetic oligonucleotide
cagaaucucacugccacaa

SEQ ID NO: 224491 - RNA, 19 nt, Artificial Sequence
  Description of Artificial Sequence: Synthetic oligonucleotide
gugagcucgcacuuaggaa

SEQ ID NO: 224492 - RNA, 19 nt, Artificial Sequence
  Description of Artificial Sequence: Synthetic oligonucleotide
gcuauguugauuaguguaa

SEQ ID NO: 224493 - RNA, 19 nt, Artificial Sequence
  Description of Artificial Sequence: Synthetic oligonucleotide
acucucagugucaucacua

SEQ ID NO: 224494 - RNA, 19 nt, Artificial Sequence
  Description of Artificial Sequence: Synthetic oligonucleotide
gggagcuagggccaggaga

SEQ ID NO: 224495 - RNA, 19 nt, Artificial Sequence
  Description of Artificial Sequence: Synthetic oligonucleotide
acauaucacccaaaagaua

SEQ ID NO: 224496 - RNA, 19 nt, Artificial Sequence
  Description of Artificial Sequence: Synthetic oligonucleotide
caggccguacuccacgcuc

SEQ ID NO: 224497 - RNA, 19 nt, Artificial Sequence
  Description of Artificial Sequence: Synthetic oligonucleotide
guugccaggggaacggguc

SEQ ID NO: 224498 - RNA, 19 nt, Artificial Sequence
  Description of Artificial Sequence: Synthetic oligonucleotide
uucaggcgaguguuggauu

SEQ ID NO: 224499 - RNA, 19 nt, Artificial Sequence
  Description of Artificial Sequence: Synthetic oligonucleotide
uugugagugaccgcuuguu

SEQ ID NO: 224500 - RNA, 19 nt, Artificial Sequence
  Description of Artificial Sequence: Synthetic oligonucleotide
gagagagcucucuuuguau

SEQ ID NO: 224501 - RNA, 19 nt, Artificial Sequence
  Description of Artificial Sequence: Synthetic oligonucleotide
acauugcgcaggaaguccu

SEQ ID NO: 224502 - RNA, 19 nt, Artificial Sequence
  Description of Artificial Sequence: Synthetic oligonucleotide
ucccgggucaggccguacu

SEQ ID NO: 224503 - RNA, 19 nt, Artificial Sequence
  Description of Artificial Sequence: Synthetic oligonucleotide
uagaaucaagagggcccag

SEQ ID NO: 224504 - RNA, 19 nt, Artificial Sequence
  Description of Artificial Sequence: Synthetic oligonucleotide
gugugagaguguccaguac

SEQ ID NO: 224505 - RNA, 19 nt, Artificial Sequence
  Description of Artificial Sequence: Synthetic oligonucleotide
cugcggaauguccccuugc

SEQ ID NO: 224506 - RNA, 19 nt, Artificial Sequence
  Description of Artificial Sequence: Synthetic oligonucleotide
ugaugugcauccgguugac

SEQ ID NO: 224507 - RNA, 19 nt, Artificial Sequence
  Description of Artificial Sequence: Synthetic oligonucleotide
acgccggucugcucucagg

SEQ ID NO: 224508 - RNA, 19 nt, Artificial Sequence
  Description of Artificial Sequence: Synthetic oligonucleotide
ccgaggguuuccaaugccc

SEQ ID NO: 224509 - RNA, 19 nt, Artificial Sequence
  Description of Artificial Sequence: Synthetic oligonucleotide
ggaaacucccacacugaug

SEQ ID NO: 224510 - RNA, 19 nt, Artificial Sequence
  Description of Artificial Sequence: Synthetic oligonucleotide
gcggaauguccccuugcgg

SEQ ID NO: 224511 - RNA, 19 nt, Artificial Sequence
  Description of Artificial Sequence: Synthetic oligonucleotide
ggccagcucucccaaauac

SEQ ID NO: 224512 - RNA, 19 nt, Artificial Sequence
  Description of Artificial Sequence: Synthetic oligonucleotide
gugugaguucaggucucgg

SEQ ID NO: 224513 - RNA, 19 nt, Artificial Sequence
  Description of Artificial Sequence: Synthetic oligonucleotide
ggcaaucaggaucagcaua

SEQ ID NO: 224514 - RNA, 19 nt, Artificial Sequence
  Description of Artificial Sequence: Synthetic oligonucleotide
cuaccgcuugaaguccugc

SEQ ID NO: 224515 - RNA, 19 nt, Artificial Sequence
  Description of Artificial Sequence: Synthetic oligonucleotide
uaggguggucuaggcuucg

SEQ ID NO: 224516 - RNA, 19 nt, Artificial Sequence
  Description of Artificial Sequence: Synthetic oligonucleotide
gcacuuaggaaauggcaaa

SEQ ID NO: 224517 - RNA, 19 nt, Artificial Sequence
  Description of Artificial Sequence: Synthetic oligonucleotide
agaaccggucuagcaucgg

SEQ ID NO: 224518 - RNA, 19 nt, Artificial Sequence
  Description of Artificial Sequence: Synthetic oligonucleotide
gugcggggcaggcaaucag

SEQ ID NO: 224519 - RNA, 19 nt, Artificial Sequence
  Description of Artificial Sequence: Synthetic oligonucleotide
cccaccaguacaacccacc

SEQ ID NO: 224520 - RNA, 19 nt, Artificial Sequence
  Description of Artificial Sequence: Synthetic oligonucleotide
aggguggucuaggcuucgc

SEQ ID NO: 224521 - RNA, 19 nt, Artificial Sequence
  Description of Artificial Sequence: Synthetic oligonucleotide
ggucccaaauggucccuag

SEQ ID NO: 224522 - RNA, 19 nt, Artificial Sequence
  Description of Artificial Sequence: Synthetic oligonucleotide
uuggugcuuuugugaguga

SEQ ID NO: 224523 - RNA, 19 nt, Artificial Sequence
  Description of Artificial Sequence: Synthetic oligonucleotide
caaaccucggugagcugga

SEQ ID NO: 224524 - RNA, 19 nt, Artificial Sequence
  Description of Artificial Sequence: Synthetic oligonucleotide
auaucacccaaaagauaaa

SEQ ID NO: 224525 - RNA, 19 nt, Artificial Sequence
  Description of Artificial Sequence: Synthetic oligonucleotide
cuugcuggagacagcucaa

SEQ ID NO: 224526 - RNA, 19 nt, Artificial Sequence
  Description of Artificial Sequence: Synthetic oligonucleotide
agucugcuaccaccacugu

SEQ ID NO: 224527 - RNA, 19 nt, Artificial Sequence
  Description of Artificial Sequence: Synthetic oligonucleotide
auacagggacagugccuca

SEQ ID NO: 224528 - RNA, 19 nt, Artificial Sequence
  Description of Artificial Sequence: Synthetic oligonucleotide
cuuugggacucaguagcca

SEQ ID NO: 224529 - RNA, 19 nt, Artificial Sequence
  Description of Artificial Sequence: Synthetic oligonucleotide
guggucccuaggcugguga

SEQ ID NO: 224530 - RNA, 19 nt, Artificial Sequence
  Description of Artificial Sequence: Synthetic oligonucleotide
gagccaugcugggaguuca

SEQ ID NO: 224531 - RNA, 19 nt, Artificial Sequence
  Description of Artificial Sequence: Synthetic oligonucleotide
acggugugagcucgcacuu

SEQ ID NO: 224532 - RNA, 19 nt, Artificial Sequence
  Description of Artificial Sequence: Synthetic oligonucleotide
auuucgguauugggacuga

SEQ ID NO: 224533 - RNA, 19 nt, Artificial Sequence
  Description of Artificial Sequence: Synthetic oligonucleotide
acgugacagcccaaagucu

SEQ ID NO: 224534 - RNA, 19 nt, Artificial Sequence
  Description of Artificial Sequence: Synthetic oligonucleotide
gcuggcugcggaauguccc

SEQ ID NO: 224535 - RNA, 19 nt, Artificial Sequence
  Description of Artificial Sequence: Synthetic oligonucleotide
gcaucggacaaugucuuga

SEQ ID NO: 224536 - RNA, 19 nt, Artificial Sequence
  Description of Artificial Sequence: Synthetic oligonucleotide
ccucuacuuggagagugcg

SEQ ID NO: 224537 - RNA, 19 nt, Artificial Sequence
  Description of Artificial Sequence: Synthetic oligonucleotide
uuucgguauugggacugau

SEQ ID NO: 224538 - RNA, 19 nt, Artificial Sequence
  Description of Artificial Sequence: Synthetic oligonucleotide
gauggaccagggcuagggu

SEQ ID NO: 224539 - RNA, 19 nt, Artificial Sequence
  Description of Artificial Sequence: Synthetic oligonucleotide
guuccccugcacccgcaug

SEQ ID NO: 224540 - RNA, 19 nt, Artificial Sequence
  Description of Artificial Sequence: Synthetic oligonucleotide
cauuaggguggucuaggcu

SEQ ID NO: 224541 - RNA, 19 nt, Artificial Sequence
  Description of Artificial Sequence: Synthetic oligonucleotide
cagugugcggggcaggcaa

SEQ ID NO: 224542 - RNA, 19 nt, Artificial Sequence
  Description of Artificial Sequence: Synthetic oligonucleotide
gugaccgcuuguugagaca

SEQ ID NO: 224543 - RNA, 19 nt, Artificial Sequence
  Description of Artificial Sequence: Synthetic oligonucleotide
gcuucgcaucacuuucacc

SEQ ID NO: 224544 - RNA, 19 nt, Artificial Sequence
  Description of Artificial Sequence: Synthetic oligonucleotide
caccacaccuuauauuuau

SEQ ID NO: 224545 - RNA, 19 nt, Artificial Sequence
  Description of Artificial Sequence: Synthetic oligonucleotide
agcuagggccaggagacuu

SEQ ID NO: 224546 - RNA, 19 nt, Artificial Sequence
  Description of Artificial Sequence: Synthetic oligonucleotide
gccuagcuaguccugcuca

SEQ ID NO: 224547 - RNA, 19 nt, Artificial Sequence
  Description of Artificial Sequence: Synthetic oligonucleotide
cauguucgaucagcagcug

SEQ ID NO: 224548 - RNA, 19 nt, Artificial Sequence
  Description of Artificial Sequence: Synthetic oligonucleotide
ggcuaggguggugaguccc

SEQ ID NO: 224549 - RNA, 19 nt, Artificial Sequence
  Description of Artificial Sequence: Synthetic oligonucleotide
guuacucacacuaccgcuu

SEQ ID NO: 224550 - RNA, 19 nt, Artificial Sequence
  Description of Artificial Sequence: Synthetic oligonucleotide
cuccagcuuugagaacgcc

SEQ ID NO: 224551 - RNA, 19 nt, Artificial Sequence
  Description of Artificial Sequence: Synthetic oligonucleotide
agcaagccgucaauccaca

SEQ ID NO: 224552 - RNA, 19 nt, Artificial Sequence
  Description of Artificial Sequence: Synthetic oligonucleotide
gcuaggguggugagucccg

SEQ ID NO: 224553 - RNA, 19 nt, Artificial Sequence
  Description of Artificial Sequence: Synthetic oligonucleotide
agucugagacagaccacau

SEQ ID NO: 224554 - RNA, 19 nt, Artificial Sequence
  Description of Artificial Sequence: Synthetic oligonucleotide
acuaccgcuugaaguccug

SEQ ID NO: 224555 - RNA, 19 nt, Artificial Sequence
  Description of Artificial Sequence: Synthetic oligonucleotide
cuaggcuucgcaucacuuu

SEQ ID NO: 224556 - RNA, 19 nt, Artificial Sequence
  Description of Artificial Sequence: Synthetic oligonucleotide
cuuucccugcucagaccca

SEQ ID NO: 224557 - RNA, 19 nt, Artificial Sequence
  Description of Artificial Sequence: Synthetic oligonucleotide
gcaagccgucaauccacag

SEQ ID NO: 224558 - RNA, 19 nt, Artificial Sequence
  Description of Artificial Sequence: Synthetic oligonucleotide
ccggguaucuagccgcagc

SEQ ID NO: 224559 - RNA, 19 nt, Artificial Sequence
  Description of Artificial Sequence: Synthetic oligonucleotide
cccucaggccaguucauuc

SEQ ID NO: 224560 - RNA, 19 nt, Artificial Sequence
  Description of Artificial Sequence: Synthetic oligonucleotide
gagugaccgcuuguugaga

SEQ ID NO: 224561 - RNA, 19 nt, Artificial Sequence
  Description of Artificial Sequence: Synthetic oligonucleotide
cuuuggugcuuuugugagu

SEQ ID NO: 224562 - RNA, 19 nt, Artificial Sequence
  Description of Artificial Sequence: Synthetic oligonucleotide
guagcgcuucuugcgguca

SEQ ID NO: 224563 - RNA, 19 nt, Artificial Sequence
  Description of Artificial Sequence: Synthetic oligonucleotide
gcugcggaauguccccuug

SEQ ID NO: 224564 - RNA, 19 nt, Artificial Sequence
  Description of Artificial Sequence: Synthetic oligonucleotide
gggucauguucgaucagca

SEQ ID NO: 224565 - RNA, 19 nt, Artificial Sequence
  Description of Artificial Sequence: Synthetic oligonucleotide
agacaguaaccaggcccca

SEQ ID NO: 224566 - RNA, 19 nt, Artificial Sequence
  Description of Artificial Sequence: Synthetic oligonucleotide
caaucaggaucagcauaca

SEQ ID NO: 224567 - RNA, 19 nt, Artificial Sequence
  Description of Artificial Sequence: Synthetic oligonucleotide
uggcugcggaauguccccu

SEQ ID NO: 224568 - RNA, 19 nt, Artificial Sequence
  Description of Artificial Sequence: Synthetic oligonucleotide
agcucgcacuuaggaaaug

SEQ ID NO: 224569 - RNA, 19 nt, Artificial Sequence
  Description of Artificial Sequence: Synthetic oligonucleotide
ggucccuaggcuggugagc

SEQ ID NO: 224570 - RNA, 19 nt, Artificial Sequence
  Description of Artificial Sequence: Synthetic oligonucleotide
gcacaucgaguguaaauau

SEQ ID NO: 224571 - RNA, 19 nt, Artificial Sequence
  Description of Artificial Sequence: Synthetic oligonucleotide
gguggucuaggcuucgcau

SEQ ID NO: 224572 - RNA, 19 nt, Artificial Sequence
  Description of Artificial Sequence: Synthetic oligonucleotide
gcuagggccaggagacuug

SEQ ID NO: 224573 - RNA, 19 nt, Artificial Sequence
  Description of Artificial Sequence: Synthetic oligonucleotide
gggaacggguccacauugc

SEQ ID NO: 224574 - RNA, 19 nt, Artificial Sequence
  Description of Artificial Sequence: Synthetic oligonucleotide
ggguggucuaggcuucgca

SEQ ID NO: 224575 - RNA, 19 nt, Artificial Sequence
  Description of Artificial Sequence: Synthetic oligonucleotide
guaucuagccgcagcuggu

SEQ ID NO: 224576 - RNA, 19 nt, Artificial Sequence
  Description of Artificial Sequence: Synthetic oligonucleotide
aguucaggucucgguggau

SEQ ID NO: 224577 - RNA, 19 nt, Artificial Sequence
  Description of Artificial Sequence: Synthetic oligonucleotide
cucuaguuugcagcagaua

SEQ ID NO: 224578 - RNA, 19 nt, Artificial Sequence
  Description of Artificial Sequence: Synthetic oligonucleotide
cacugucauuucauaugcu

SEQ ID NO: 224579 - RNA, 19 nt, Artificial Sequence
  Description of Artificial Sequence: Synthetic oligonucleotide
ccccgaggguuuccaaugc

SEQ ID NO: 224580 - RNA, 19 nt, Artificial Sequence
  Description of Artificial Sequence: Synthetic oligonucleotide
cgccggucugcucucaggc

SEQ ID NO: 224581 - RNA, 19 nt, Artificial Sequence
  Description of Artificial Sequence: Synthetic oligonucleotide
cccaggcuauguugauuag

SEQ ID NO: 224582 - RNA, 19 nt, Artificial Sequence
  Description of Artificial Sequence: Synthetic oligonucleotide
gagugcggacagggguccc

SEQ ID NO: 224583 - RNA, 19 nt, Artificial Sequence
  Description of Artificial Sequence: Synthetic oligonucleotide
ugagcacauuagggugguc

SEQ ID NO: 224584 - RNA, 19 nt, Artificial Sequence
  Description of Artificial Sequence: Synthetic oligonucleotide
cacuaccgcuugaaguccu

SEQ ID NO: 224585 - RNA, 19 nt, Artificial Sequence
  Description of Artificial Sequence: Synthetic oligonucleotide
ggcccuggaguguggcuca

SEQ ID NO: 224586 - RNA, 19 nt, Artificial Sequence
  Description of Artificial Sequence: Synthetic oligonucleotide
gggcuaggguggugagucc

SEQ ID NO: 224587 - RNA, 19 nt, Artificial Sequence
  Description of Artificial Sequence: Synthetic oligonucleotide
cucgguggaugaugcacau

SEQ ID NO: 224588 - RNA, 19 nt, Artificial Sequence
  Description of Artificial Sequence: Synthetic oligonucleotide
agccggguaucuagccgca

SEQ ID NO: 224589 - RNA, 19 nt, Artificial Sequence
  Description of Artificial Sequence: Synthetic oligonucleotide
gcauuucgguauugggacu

SEQ ID NO: 224590 - RNA, 19 nt, Artificial Sequence
  Description of Artificial Sequence: Synthetic oligonucleotide
augcgguccccagggugga

SEQ ID NO: 224591 - RNA, 19 nt, Artificial Sequence
  Description of Artificial Sequence: Synthetic oligonucleotide
ggccguacuccacgcucac

SEQ ID NO: 224592 - RNA, 19 nt, Artificial Sequence
  Description of Artificial Sequence: Synthetic oligonucleotide
ccgggucaggccguacucc

SEQ ID NO: 224593 - RNA, 19 nt, Artificial Sequence
  Description of Artificial Sequence: Synthetic oligonucleotide
ggucuaggcuucgcaucac

SEQ ID NO: 224594 - RNA, 19 nt, Artificial Sequence
  Description of Artificial Sequence: Synthetic oligonucleotide
ccucaggccaguucauucu

SEQ ID NO: 224595 - RNA, 19 nt, Artificial Sequence
  Description of Artificial Sequence: Synthetic oligonucleotide
ccaacuugaugagacaguu

SEQ ID NO: 224596 - RNA, 19 nt, Artificial Sequence
  Description of Artificial Sequence: Synthetic oligonucleotide
agccgucaauccacaggaa

SEQ ID NO: 224597 - RNA, 19 nt, Artificial Sequence
  Description of Artificial Sequence: Synthetic oligonucleotide
guacaacccaccacaccuu

SEQ ID NO: 224598 - RNA, 19 nt, Artificial Sequence
  Description of Artificial Sequence: Synthetic oligonucleotide
ggcgaguguuggauuuaca

SEQ ID NO: 224599 - RNA, 19 nt, Artificial Sequence
  Description of Artificial Sequence: Synthetic oligonucleotide
gcggggcaggcaaucagga

SEQ ID NO: 224600 - RNA, 19 nt, Artificial Sequence
  Description of Artificial Sequence: Synthetic oligonucleotide
ccggucuagcaucggacaa

SEQ ID NO: 224601 - RNA, 19 nt, Artificial Sequence
  Description of Artificial Sequence: Synthetic oligonucleotide
cccuaggcuggugagcaga

SEQ ID NO: 224602 - RNA, 19 nt, Artificial Sequence
  Description of Artificial Sequence: Synthetic oligonucleotide
caggcgaguguuggauuua

SEQ ID NO: 224603 - RNA, 19 nt, Artificial Sequence
  Description of Artificial Sequence: Synthetic oligonucleotide
gcgccucagagaacgucuc

SEQ ID NO: 224604 - RNA, 19 nt, Artificial Sequence
  Description of Artificial Sequence: Synthetic oligonucleotide
gccggguaucuagccgcag

SEQ ID NO: 224605 - RNA, 19 nt, Artificial Sequence
  Description of Artificial Sequence: Synthetic oligonucleotide
ugcgguccccaggguggau

SEQ ID NO: 224606 - RNA, 19 nt, Artificial Sequence
  Description of Artificial Sequence: Synthetic oligonucleotide
gagcuagggccaggagacu

SEQ ID NO: 224607 - RNA, 19 nt, Artificial Sequence
  Description of Artificial Sequence: Synthetic oligonucleotide
gcucuaguuugcagcagau

SEQ ID NO: 224608 - RNA, 19 nt, Artificial Sequence
  Description of Artificial Sequence: Synthetic oligonucleotide
guaguaggguuggcuuauu

SEQ ID NO: 224609 - RNA, 19 nt, Artificial Sequence
  Description of Artificial Sequence: Synthetic oligonucleotide
gucccgggucaggccguac

SEQ ID NO: 224610 - RNA, 19 nt, Artificial Sequence
  Description of Artificial Sequence: Synthetic oligonucleotide
cgaguguaaauaugccauu

SEQ ID NO: 224611 - RNA, 19 nt, Artificial Sequence
  Description of Artificial Sequence: Synthetic oligonucleotide
gccguacuccacgcucaca

SEQ ID NO: 224612 - RNA, 19 nt, Artificial Sequence
  Description of Artificial Sequence: Synthetic oligonucleotide
ggcugcggaauguccccuu

SEQ ID NO: 224613 - RNA, 19 nt, Artificial Sequence
  Description of Artificial Sequence: Synthetic oligonucleotide
ccccugcacccgcaugccu

SEQ ID NO: 224614 - RNA, 19 nt, Artificial Sequence
  Description of Artificial Sequence: Synthetic oligonucleotide
cggugugagcucgcacuua

SEQ ID NO: 224615 - RNA, 19 nt, Artificial Sequence
  Description of Artificial Sequence: Synthetic oligonucleotide
aaaagugucauauugcgca

SEQ ID NO: 224616 - RNA, 19 nt, Artificial Sequence
  Description of Artificial Sequence: Synthetic oligonucleotide
aucggauccaaauucaccc

SEQ ID NO: 224617 - RNA, 19 nt, Artificial Sequence
  Description of Artificial Sequence: Synthetic oligonucleotide
ucuuucucccggaagaugg

SEQ ID NO: 224618 - RNA, 19 nt, Artificial Sequence
  Description of Artificial Sequence: Synthetic oligonucleotide
uucaaaaccuuuauugggc

SEQ ID NO: 224619 - RNA, 19 nt, Artificial Sequence
  Description of Artificial Sequence: Synthetic oligonucleotide
ucugaucugacauaggaaa

SEQ ID NO: 224620 - RNA, 19 nt, Artificial Sequence
  Description of Artificial Sequence: Synthetic oligonucleotide
uuuauugggccauugggug

SEQ ID NO: 224621 - RNA, 19 nt, Artificial Sequence
  Description of Artificial Sequence: Synthetic oligonucleotide
gauacucucagagcuaucg

SEQ ID NO: 224622 - RNA, 19 nt, Artificial Sequence
  Description of Artificial Sequence: Synthetic oligonucleotide
gagguucucacucucaugc

SEQ ID NO: 224623 - RNA, 19 nt, Artificial Sequence
  Description of Artificial Sequence: Synthetic oligonucleotide
ugucauauugcgcaccugc

SEQ ID NO: 224624 - RNA, 19 nt, Artificial Sequence
  Description of Artificial Sequence: Synthetic oligonucleotide
cacgcuaacagauccaacg

SEQ ID NO: 224625 - RNA, 19 nt, Artificial Sequence
  Description of Artificial Sequence: Synthetic oligonucleotide
caagguucagguaggaugg

SEQ ID NO: 224626 - RNA, 19 nt, Artificial Sequence
  Description of Artificial Sequence: Synthetic oligonucleotide
uugguaagcacauccaugu

SEQ ID NO: 224627 - RNA, 19 nt, Artificial Sequence
  Description of Artificial Sequence: Synthetic oligonucleotide
uuccgagccauccagcagg

SEQ ID NO: 224628 - RNA, 19 nt, Artificial Sequence
  Description of Artificial Sequence: Synthetic oligonucleotide
ugauuguaggcaaacuuga

SEQ ID NO: 224629 - RNA, 19 nt, Artificial Sequence
  Description of Artificial Sequence: Synthetic oligonucleotide
ucaaguuguaggucagugg

SEQ ID NO: 224630 - RNA, 19 nt, Artificial Sequence
  Description of Artificial Sequence: Synthetic oligonucleotide
agagcuaucgaugacgaag

SEQ ID NO: 224631 - RNA, 19 nt, Artificial Sequence
  Description of Artificial Sequence: Synthetic oligonucleotide
ucguucgucgucuagccgg

SEQ ID NO: 224632 - RNA, 19 nt, Artificial Sequence
  Description of Artificial Sequence: Synthetic oligonucleotide
uauagcucuguuuggcagg

SEQ ID NO: 224633 - RNA, 19 nt, Artificial Sequence
  Description of Artificial Sequence: Synthetic oligonucleotide
uccguuguugccuugauau

SEQ ID NO: 224634 - RNA, 19 nt, Artificial Sequence
  Description of Artificial Sequence: Synthetic oligonucleotide
aacacccgagucuucuggc

SEQ ID NO: 224635 - RNA, 19 nt, Artificial Sequence
  Description of Artificial Sequence: Synthetic oligonucleotide
guagccgauacucucagag

SEQ ID NO: 224636 - RNA, 19 nt, Artificial Sequence
  Description of Artificial Sequence: Synthetic oligonucleotide
acauauagcucuguuuggc

SEQ ID NO: 224637 - RNA, 19 nt, Artificial Sequence
  Description of Artificial Sequence: Synthetic oligonucleotide
cugauuguaggcaaacuug

SEQ ID NO: 224638 - RNA, 19 nt, Artificial Sequence
  Description of Artificial Sequence: Synthetic oligonucleotide
uguacugcaccacaccuac

SEQ ID NO: 224639 - RNA, 19 nt, Artificial Sequence
  Description of Artificial Sequence: Synthetic oligonucleotide
ucugcagaagacucaagug

SEQ ID NO: 224640 - RNA, 19 nt, Artificial Sequence
  Description of Artificial Sequence: Synthetic oligonucleotide
ucaaaaccuuuauugggcc

SEQ ID NO: 224641 - RNA, 19 nt, Artificial Sequence
  Description of Artificial Sequence: Synthetic oligonucleotide
acaucucgaucacacagcg

SEQ ID NO: 224642 - RNA, 19 nt, Artificial Sequence
  Description of Artificial Sequence: Synthetic oligonucleotide
caugacgucacauuccgug

SEQ ID NO: 224643 - RNA, 19 nt, Artificial Sequence
  Description of Artificial Sequence: Synthetic oligonucleotide
auauagcucuguuuggcag

SEQ ID NO: 224644 - RNA, 19 nt, Artificial Sequence
  Description of Artificial Sequence: Synthetic oligonucleotide
auggacaagggaugggugg

SEQ ID NO: 224645 - RNA, 19 nt, Artificial Sequence
  Description of Artificial Sequence: Synthetic oligonucleotide
gucaugacgucacauuccg

SEQ ID NO: 224646 - RNA, 19 nt, Artificial Sequence
  Description of Artificial Sequence: Synthetic oligonucleotide
acucguucgucgucuagcc

SEQ ID NO: 224647 - RNA, 19 nt, Artificial Sequence
  Description of Artificial Sequence: Synthetic oligonucleotide
aguucugcucacccaaccg

SEQ ID NO: 224648 - RNA, 19 nt, Artificial Sequence
  Description of Artificial Sequence: Synthetic oligonucleotide
ucauauugcgcaccugcug

SEQ ID NO: 224649 - RNA, 19 nt, Artificial Sequence
  Description of Artificial Sequence: Synthetic oligonucleotide
acgcuaacagauccaacgg

SEQ ID NO: 224650 - RNA, 19 nt, Artificial Sequence
  Description of Artificial Sequence: Synthetic oligonucleotide
ugugacacggggcucucag

SEQ ID NO: 224651 - RNA, 19 nt, Artificial Sequence
  Description of Artificial Sequence: Synthetic oligonucleotide
acgugugccugucucagac

SEQ ID NO: 224652 - RNA, 19 nt, Artificial Sequence
  Description of Artificial Sequence: Synthetic oligonucleotide
ucaugcgucucauggaaca

SEQ ID NO: 224653 - RNA, 19 nt, Artificial Sequence
  Description of Artificial Sequence: Synthetic oligonucleotide
agccgauacucucagagcu

SEQ ID NO: 224654 - RNA, 19 nt, Artificial Sequence
  Description of Artificial Sequence: Synthetic oligonucleotide
ggaaauaaugggcagagaa

SEQ ID NO: 224655 - RNA, 19 nt, Artificial Sequence
  Description of Artificial Sequence: Synthetic oligonucleotide
gguaagcacauccaugucc

SEQ ID NO: 224656 - RNA, 19 nt, Artificial Sequence
  Description of Artificial Sequence: Synthetic oligonucleotide
ucucaugcgucucauggaa

SEQ ID NO: 224657 - RNA, 19 nt, Artificial Sequence
  Description of Artificial Sequence: Synthetic oligonucleotide
gguaggauggagaagcagg

SEQ ID NO: 224658 - RNA, 19 nt, Artificial Sequence
  Description of Artificial Sequence: Synthetic oligonucleotide
agauccaacggaugaaccu

SEQ ID NO: 224659 - RNA, 19 nt, Artificial Sequence
  Description of Artificial Sequence: Synthetic oligonucleotide
gaaaagugucauauugcgc

SEQ ID NO: 224660 - RNA, 19 nt, Artificial Sequence
  Description of Artificial Sequence: Synthetic oligonucleotide
agccggauggcuucaaaag

SEQ ID NO: 224661 - RNA, 19 nt, Artificial Sequence
  Description of Artificial Sequence: Synthetic oligonucleotide
aauccaauggggccuucga

SEQ ID NO: 224662 - RNA, 19 nt, Artificial Sequence
  Description of Artificial Sequence: Synthetic oligonucleotide
gaccaucggauccaaauuc

SEQ ID NO: 224663 - RNA, 19 nt, Artificial Sequence
  Description of Artificial Sequence: Synthetic oligonucleotide
guugagugggucgucaucc

SEQ ID NO: 224664 - RNA, 19 nt, Artificial Sequence
  Description of Artificial Sequence: Synthetic oligonucleotide
cauugggugugugacacgg

SEQ ID NO: 224665 - RNA, 19 nt, Artificial Sequence
  Description of Artificial Sequence: Synthetic oligonucleotide
uugcgcauggagugcaccg

SEQ ID NO: 224666 - RNA, 19 nt, Artificial Sequence
  Description of Artificial Sequence: Synthetic oligonucleotide
cugccguacugcaacaggg

SEQ ID NO: 224667 - RNA, 19 nt, Artificial Sequence
  Description of Artificial Sequence: Synthetic oligonucleotide
ugcgucucauggaacaugu

SEQ ID NO: 224668 - RNA, 19 nt, Artificial Sequence
  Description of Artificial Sequence: Synthetic oligonucleotide
uuccgugagaccagggucu

SEQ ID NO: 224669 - RNA, 19 nt, Artificial Sequence
  Description of Artificial Sequence: Synthetic oligonucleotide
cacccaaccguuccgagcc

SEQ ID NO: 224670 - RNA, 19 nt, Artificial Sequence
  Description of Artificial Sequence: Synthetic oligonucleotide
cuaacagauccaacggaug

SEQ ID NO: 224671 - RNA, 19 nt, Artificial Sequence
  Description of Artificial Sequence: Synthetic oligonucleotide
ugacacggggcucucaggu

SEQ ID NO: 224672 - RNA, 19 nt, Artificial Sequence
  Description of Artificial Sequence: Synthetic oligonucleotide
aggguauccaucggggccc

SEQ ID NO: 224673 - RNA, 19 nt, Artificial Sequence
  Description of Artificial Sequence: Synthetic oligonucleotide
ugggucgucauccuuucgu

SEQ ID NO: 224674 - RNA, 19 nt, Artificial Sequence
  Description of Artificial Sequence: Synthetic oligonucleotide
uguccaucaguuccauucu

SEQ ID NO: 224675 - RNA, 19 nt, Artificial Sequence
  Description of Artificial Sequence: Synthetic oligonucleotide
aauugagguaggcgguccu

SEQ ID NO: 224676 - RNA, 19 nt, Artificial Sequence
  Description of Artificial Sequence: Synthetic oligonucleotide
gugaaguugguguagccga

SEQ ID NO: 224677 - RNA, 19 nt, Artificial Sequence
  Description of Artificial Sequence: Synthetic oligonucleotide
augcacgaagaggagaggg

SEQ ID NO: 224678 - RNA, 19 nt, Artificial Sequence
  Description of Artificial Sequence: Synthetic oligonucleotide
uccuguucugaccucggga

SEQ ID NO: 224679 - RNA, 19 nt, Artificial Sequence
  Description of Artificial Sequence: Synthetic oligonucleotide
gucgucauccuuucgugcc

SEQ ID NO: 224680 - RNA, 19 nt, Artificial Sequence
  Description of Artificial Sequence: Synthetic oligonucleotide
caucaguuccauucuugcc

SEQ ID NO: 224681 - RNA, 19 nt, Artificial Sequence
  Description of Artificial Sequence: Synthetic oligonucleotide
ucgugccagagucaggcgc

SEQ ID NO: 224682 - RNA, 19 nt, Artificial Sequence
  Description of Artificial Sequence: Synthetic oligonucleotide
agugucauauugcgcaccu

SEQ ID NO: 224683 - RNA, 19 nt, Artificial Sequence
  Description of Artificial Sequence: Synthetic oligonucleotide
ugggcacacgcuaacagau

SEQ ID NO: 224684 - RNA, 19 nt, Artificial Sequence
  Description of Artificial Sequence: Synthetic oligonucleotide
aacggaugaaccugucgaa

SEQ ID NO: 224685 - RNA, 19 nt, Artificial Sequence
  Description of Artificial Sequence: Synthetic oligonucleotide
ucgaugaacuucucagcca

SEQ ID NO: 224686 - RNA, 19 nt, Artificial Sequence
  Description of Artificial Sequence: Synthetic oligonucleotide
ugcaccgacuccuccaggc

SEQ ID NO: 224687 - RNA, 19 nt, Artificial Sequence
  Description of Artificial Sequence: Synthetic oligonucleotide
uuauugggccauugggugu

SEQ ID NO: 224688 - RNA, 19 nt, Artificial Sequence
  Description of Artificial Sequence: Synthetic oligonucleotide
ucacauuccgugagaccag

SEQ ID NO: 224689 - RNA, 19 nt, Artificial Sequence
  Description of Artificial Sequence: Synthetic oligonucleotide
ugaaacuggacagggaguu

SEQ ID NO: 224690 - RNA, 19 nt, Artificial Sequence
  Description of Artificial Sequence: Synthetic oligonucleotide
gacaucucgaucacacagc

SEQ ID NO: 224691 - RNA, 19 nt, Artificial Sequence
  Description of Artificial Sequence: Synthetic oligonucleotide
cacaacgcuucucacaguc

SEQ ID NO: 224692 - RNA, 19 nt, Artificial Sequence
  Description of Artificial Sequence: Synthetic oligonucleotide
agugggucgucauccuuuc

SEQ ID NO: 224693 - RNA, 19 nt, Artificial Sequence
  Description of Artificial Sequence: Synthetic oligonucleotide
aagacuggugcaggccggc

SEQ ID NO: 224694 - RNA, 19 nt, Artificial Sequence
  Description of Artificial Sequence: Synthetic oligonucleotide
cagauccaacggaugaacc

SEQ ID NO: 224695 - RNA, 19 nt, Artificial Sequence
  Description of Artificial Sequence: Synthetic oligonucleotide
gaagcgccgugccuugugg

SEQ ID NO: 224696 - RNA, 19 nt, Artificial Sequence
  Description of Artificial Sequence: Synthetic oligonucleotide
ugcgccccgaaccacguug

SEQ ID NO: 224697 - RNA, 19 nt, Artificial Sequence
  Description of Artificial Sequence: Synthetic oligonucleotide
agguuucccucacauaggu

SEQ ID NO: 224698 - RNA, 19 nt, Artificial Sequence
  Description of Artificial Sequence: Synthetic oligonucleotide
caacggaugaaccugucga

SEQ ID NO: 224699 - RNA, 19 nt, Artificial Sequence
  Description of Artificial Sequence: Synthetic oligonucleotide
uucuugccagcuaggccgg

SEQ ID NO: 224700 - RNA, 19 nt, Artificial Sequence
  Description of Artificial Sequence: Synthetic oligonucleotide
acaggcaauggaguagagg

SEQ ID NO: 224701 - RNA, 19 nt, Artificial Sequence
  Description of Artificial Sequence: Synthetic oligonucleotide
caugcgggcguugaguggg

SEQ ID NO: 224702 - RNA, 19 nt, Artificial Sequence
  Description of Artificial Sequence: Synthetic oligonucleotide
ugcucacccaaccguuccg

SEQ ID NO: 224703 - RNA, 19 nt, Artificial Sequence
  Description of Artificial Sequence: Synthetic oligonucleotide
acccgagucuucuggcgcc

SEQ ID NO: 224704 - RNA, 19 nt, Artificial Sequence
  Description of Artificial Sequence: Synthetic oligonucleotide
auagcucuguuuggcaggg

SEQ ID NO: 224705 - RNA, 19 nt, Artificial Sequence
  Description of Artificial Sequence: Synthetic oligonucleotide
gaaggguuuucacucugca

SEQ ID NO: 224706 - RNA, 19 nt, Artificial Sequence
  Description of Artificial Sequence: Synthetic oligonucleotide
uauugcgcaccugcugugg

SEQ ID NO: 224707 - RNA, 19 nt, Artificial Sequence
  Description of Artificial Sequence: Synthetic oligonucleotide
aguucuggacacacgaucu

SEQ ID NO: 224708 - RNA, 19 nt, Artificial Sequence
  Description of Artificial Sequence: Synthetic oligonucleotide
uaggcgguccucuccagug

SEQ ID NO: 224709 - RNA, 19 nt, Artificial Sequence
  Description of Artificial Sequence: Synthetic oligonucleotide
uauugggccauugggugug

SEQ ID NO: 224710 - RNA, 19 nt, Artificial Sequence
  Description of Artificial Sequence: Synthetic oligonucleotide
ugccguacugcaacagggc

SEQ ID NO: 224711 - RNA, 19 nt, Artificial Sequence
  Description of Artificial Sequence: Synthetic oligonucleotide
agugcaccgacuccuccag

SEQ ID NO: 224712 - RNA, 19 nt, Artificial Sequence
  Description of Artificial Sequence: Synthetic oligonucleotide
gaggaaacgccaagggagc

SEQ ID NO: 224713 - RNA, 19 nt, Artificial Sequence
  Description of Artificial Sequence: Synthetic oligonucleotide
acacccgagucuucuggcg

SEQ ID NO: 224714 - RNA, 19 nt, Artificial Sequence
  Description of Artificial Sequence: Synthetic oligonucleotide
ucccuugaagccagguaca

SEQ ID NO: 224715 - RNA, 19 nt, Artificial Sequence
  Description of Artificial Sequence: Synthetic oligonucleotide
aacgccaagggagcugaag

SEQ ID NO: 224716 - RNA, 19 nt, Artificial Sequence
  Description of Artificial Sequence: Synthetic oligonucleotide
ggucugaucugacauagga

SEQ ID NO: 224717 - RNA, 19 nt, Artificial Sequence
  Description of Artificial Sequence: Synthetic oligonucleotide
cuuuauugggccauugggu

SEQ ID NO: 224718 - RNA, 19 nt, Artificial Sequence
  Description of Artificial Sequence: Synthetic oligonucleotide
agcuaucgaugacgaagac

SEQ ID NO: 224719 - RNA, 19 nt, Artificial Sequence
  Description of Artificial Sequence: Synthetic oligonucleotide
gacucguucgucgucuagc

SEQ ID NO: 224720 - RNA, 19 nt, Artificial Sequence
  Description of Artificial Sequence: Synthetic oligonucleotide
augacgucacauuccguga

SEQ ID NO: 224721 - RNA, 19 nt, Artificial Sequence
  Description of Artificial Sequence: Synthetic oligonucleotide
uucgucgucuagccggaug

SEQ ID NO: 224722 - RNA, 19 nt, Artificial Sequence
  Description of Artificial Sequence: Synthetic oligonucleotide
ucacccaaccguuccgagc

SEQ ID NO: 224723 - RNA, 19 nt, Artificial Sequence
  Description of Artificial Sequence: Synthetic oligonucleotide
gaauugagguaggcggucc

SEQ ID NO: 224724 - RNA, 19 nt, Artificial Sequence
  Description of Artificial Sequence: Synthetic oligonucleotide
cuugcaaccaggaggccca

SEQ ID NO: 224725 - RNA, 19 nt, Artificial Sequence
  Description of Artificial Sequence: Synthetic oligonucleotide
ucucgaucacacagcgccc

SEQ ID NO: 224726 - RNA, 19 nt, Artificial Sequence
  Description of Artificial Sequence: Synthetic oligonucleotide
agcugaauccaggccuucc

SEQ ID NO: 224727 - RNA, 19 nt, Artificial Sequence
  Description of Artificial Sequence: Synthetic oligonucleotide
aguuccauucuugccagcu

SEQ ID NO: 224728 - RNA, 19 nt, Artificial Sequence
  Description of Artificial Sequence: Synthetic oligonucleotide
ugguguagccgauacucuc

SEQ ID NO: 224729 - RNA, 19 nt, Artificial Sequence
  Description of Artificial Sequence: Synthetic oligonucleotide
augagcugauuguaggcaa

SEQ ID NO: 224730 - RNA, 19 nt, Artificial Sequence
  Description of Artificial Sequence: Synthetic oligonucleotide
acgucacauuccgugagac

SEQ ID NO: 224731 - RNA, 19 nt, Artificial Sequence
  Description of Artificial Sequence: Synthetic oligonucleotide
ugauaucccuugcuucccu

SEQ ID NO: 224732 - RNA, 19 nt, Artificial Sequence
  Description of Artificial Sequence: Synthetic oligonucleotide
cauauagcucuguuuggca

SEQ ID NO: 224733 - RNA, 19 nt, Artificial Sequence
  Description of Artificial Sequence: Synthetic oligonucleotide
ugggugugugacacggggc

SEQ ID NO: 224734 - RNA, 19 nt, Artificial Sequence
  Description of Artificial Sequence: Synthetic oligonucleotide
aucgaugacgaagaccaca

SEQ ID NO: 224735 - RNA, 19 nt, Artificial Sequence
  Description of Artificial Sequence: Synthetic oligonucleotide
cugaauccaggccuuccag

SEQ ID NO: 224736 - RNA, 19 nt, Artificial Sequence
  Description of Artificial Sequence: Synthetic oligonucleotide
uccccuagaucccuguuuu

SEQ ID NO: 224737 - RNA, 19 nt, Artificial Sequence
  Description of Artificial Sequence: Synthetic oligonucleotide
ucggauccaaauucacccu

SEQ ID NO: 224738 - RNA, 19 nt, Artificial Sequence
  Description of Artificial Sequence: Synthetic oligonucleotide
uugauaucccuugcuuccc

SEQ ID NO: 224739 - RNA, 19 nt, Artificial Sequence
  Description of Artificial Sequence: Synthetic oligonucleotide
ugcacccacgugagaaaag

SEQ ID NO: 224740 - RNA, 19 nt, Artificial Sequence
  Description of Artificial Sequence: Synthetic oligonucleotide
ugagcugauuguaggcaaa

SEQ ID NO: 224741 - RNA, 19 nt, Artificial Sequence
  Description of Artificial Sequence: Synthetic oligonucleotide
ggaugcacgaagaggagag

SEQ ID NO: 224742 - RNA, 19 nt, Artificial Sequence
  Description of Artificial Sequence: Synthetic oligonucleotide
gagcuaucgaugacgaaga

SEQ ID NO: 224743 - RNA, 19 nt, Artificial Sequence
  Description of Artificial Sequence: Synthetic oligonucleotide
cacgugagaaaaggaauug

SEQ ID NO: 224744 - RNA, 19 nt, Artificial Sequence
  Description of Artificial Sequence: Synthetic oligonucleotide
uaggucaugacgucacauu

SEQ ID NO: 224745 - RNA, 19 nt, Artificial Sequence
  Description of Artificial Sequence: Synthetic oligonucleotide
gaugcacgaagaggagagg

SEQ ID NO: 224746 - RNA, 19 nt, Artificial Sequence
  Description of Artificial Sequence: Synthetic oligonucleotide
auauugcgcaccugcugug

SEQ ID NO: 224747 - RNA, 19 nt, Artificial Sequence
  Description of Artificial Sequence: Synthetic oligonucleotide
auggcaugcacgaugccug

SEQ ID NO: 224748 - RNA, 19 nt, Artificial Sequence
  Description of Artificial Sequence: Synthetic oligonucleotide
ucgucauccuuucgugcca

SEQ ID NO: 224749 - RNA, 19 nt, Artificial Sequence
  Description of Artificial Sequence: Synthetic oligonucleotide
cuuucacucccggacuucc

SEQ ID NO: 224750 - RNA, 19 nt, Artificial Sequence
  Description of Artificial Sequence: Synthetic oligonucleotide
ucccuugccuccuuucacu

SEQ ID NO: 224751 - RNA, 19 nt, Artificial Sequence
  Description of Artificial Sequence: Synthetic oligonucleotide
gguccgauuagcaccacag

SEQ ID NO: 224752 - RNA, 19 nt, Artificial Sequence
  Description of Artificial Sequence: Synthetic oligonucleotide
cacugcaaacacccgaguc

SEQ ID NO: 224753 - RNA, 19 nt, Artificial Sequence
  Description of Artificial Sequence: Synthetic oligonucleotide
gauuagcaccacagagggg

SEQ ID NO: 224754 - RNA, 19 nt, Artificial Sequence
  Description of Artificial Sequence: Synthetic oligonucleotide
ugucauugcccgugacgcc

SEQ ID NO: 224755 - RNA, 19 nt, Artificial Sequence
  Description of Artificial Sequence: Synthetic oligonucleotide
agggaaugugggaugcacg

SEQ ID NO: 224756 - RNA, 19 nt, Artificial Sequence
  Description of Artificial Sequence: Synthetic oligonucleotide
ugacucguucgucgucuag

SEQ ID NO: 224757 - RNA, 19 nt, Artificial Sequence
  Description of Artificial Sequence: Synthetic oligonucleotide
cucgaucacacagcgcccg

SEQ ID NO: 224758 - RNA, 19 nt, Artificial Sequence
  Description of Artificial Sequence: Synthetic oligonucleotide
acggaugaaccugucgaag

SEQ ID NO: 224759 - RNA, 19 nt, Artificial Sequence
  Description of Artificial Sequence: Synthetic oligonucleotide
guguagccgauacucucag

SEQ ID NO: 224760 - RNA, 19 nt, Artificial Sequence
  Description of Artificial Sequence: Synthetic oligonucleotide
ugcaggccggcagacagcc

SEQ ID NO: 224761 - RNA, 19 nt, Artificial Sequence
  Description of Artificial Sequence: Synthetic oligonucleotide
aaccguuccgagccaucca

SEQ ID NO: 224762 - RNA, 19 nt, Artificial Sequence
  Description of Artificial Sequence: Synthetic oligonucleotide
guucuggacacacgaucug

SEQ ID NO: 224763 - RNA, 19 nt, Artificial Sequence
  Description of Artificial Sequence: Synthetic oligonucleotide
aaagugccuucguggcugu

SEQ ID NO: 224764 - RNA, 19 nt, Artificial Sequence
  Description of Artificial Sequence: Synthetic oligonucleotide
ucgucuagccggauggcuu

SEQ ID NO: 224765 - RNA, 19 nt, Artificial Sequence
  Description of Artificial Sequence: Synthetic oligonucleotide
uccaucggggccccgacuu

SEQ ID NO: 224766 - RNA, 19 nt, Artificial Sequence
  Description of Artificial Sequence: Synthetic oligonucleotide
cuagaucccuguuuuccca

SEQ ID NO: 224767 - RNA, 19 nt, Artificial Sequence
  Description of Artificial Sequence: Synthetic oligonucleotide
ucgggagaaggguuuucac

SEQ ID NO: 224768 - RNA, 19 nt, Artificial Sequence
  Description of Artificial Sequence: Synthetic oligonucleotide
ugggccauuggguguguga

SEQ ID NO: 224769 - RNA, 19 nt, Artificial Sequence
  Description of Artificial Sequence: Synthetic oligonucleotide
acgugagaaaaggaauuga

SEQ ID NO: 224770 - RNA, 19 nt, Artificial Sequence
  Description of Artificial Sequence: Synthetic oligonucleotide
cugggccagacugucaaag

SEQ ID NO: 224771 - RNA, 19 nt, Artificial Sequence
  Description of Artificial Sequence: Synthetic oligonucleotide
cauauugcgcaccugcugu

SEQ ID NO: 224772 - RNA, 19 nt, Artificial Sequence
  Description of Artificial Sequence: Synthetic oligonucleotide
caucgcugcccacagcgac

SEQ ID NO: 224773 - RNA, 19 nt, Artificial Sequence
  Description of Artificial Sequence: Synthetic oligonucleotide
agccagguacacccuuggg

SEQ ID NO: 224774 - RNA, 19 nt, Artificial Sequence
  Description of Artificial Sequence: Synthetic oligonucleotide
uugagguaggcgguccucu

SEQ ID NO: 224775 - RNA, 19 nt, Artificial Sequence
  Description of Artificial Sequence: Synthetic oligonucleotide
caaccguuccgagccaucc

SEQ ID NO: 224776 - RNA, 19 nt, Artificial Sequence
  Description of Artificial Sequence: Synthetic oligonucleotide
ugguaagcacauccauguc

SEQ ID NO: 224777 - RNA, 19 nt, Artificial Sequence
  Description of Artificial Sequence: Synthetic oligonucleotide
agguaggauggagaagcag

SEQ ID NO: 224778 - RNA, 19 nt, Artificial Sequence
  Description of Artificial Sequence: Synthetic oligonucleotide
caauggccgucacagugac

SEQ ID NO: 224779 - RNA, 19 nt, Artificial Sequence
  Description of Artificial Sequence: Synthetic oligonucleotide
gguagagacugugggaagc

SEQ ID NO: 224780 - RNA, 19 nt, Artificial Sequence
  Description of Artificial Sequence: Synthetic oligonucleotide
gauggcaugcacgaugccu

SEQ ID NO: 224781 - RNA, 19 nt, Artificial Sequence
  Description of Artificial Sequence: Synthetic oligonucleotide
ugggccagacugucaaagu

SEQ ID NO: 224782 - RNA, 19 nt, Artificial Sequence
  Description of Artificial Sequence: Synthetic oligonucleotide
ccuagaucccuguuuuccc

SEQ ID NO: 224783 - RNA, 19 nt, Artificial Sequence
  Description of Artificial Sequence: Synthetic oligonucleotide
uauccaucggggccccgac

SEQ ID NO: 224784 - RNA, 19 nt, Artificial Sequence
  Description of Artificial Sequence: Synthetic oligonucleotide
acgcuucucacagucgcag

SEQ ID NO: 224785 - RNA, 19 nt, Artificial Sequence
  Description of Artificial Sequence: Synthetic oligonucleotide
uaucgaugacgaagaccac

SEQ ID NO: 224786 - RNA, 19 nt, Artificial Sequence
  Description of Artificial Sequence: Synthetic oligonucleotide
cacccgagucuucuggcgc

SEQ ID NO: 224787 - RNA, 19 nt, Artificial Sequence
  Description of Artificial Sequence: Synthetic oligonucleotide
auaggucaugacgucacau

SEQ ID NO: 224788 - RNA, 19 nt, Artificial Sequence
  Description of Artificial Sequence: Synthetic oligonucleotide
ucaugacgucacauuccgu

SEQ ID NO: 224789 - RNA, 19 nt, Artificial Sequence
  Description of Artificial Sequence: Synthetic oligonucleotide
aggaauugagguaggcggu

SEQ ID NO: 224790 - RNA, 19 nt, Artificial Sequence
  Description of Artificial Sequence: Synthetic oligonucleotide
cucguucgucgucuagccg

SEQ ID NO: 224791 - RNA, 19 nt, Artificial Sequence
  Description of Artificial Sequence: Synthetic oligonucleotide
aggucagagaaaaguguca

SEQ ID NO: 224792 - RNA, 19 nt, Artificial Sequence
  Description of Artificial Sequence: Synthetic oligonucleotide
cacauuccgugagaccagg

SEQ ID NO: 224793 - RNA, 19 nt, Artificial Sequence
  Description of Artificial Sequence: Synthetic oligonucleotide
gccgccagcaauccacucg

SEQ ID NO: 224794 - RNA, 19 nt, Artificial Sequence
  Description of Artificial Sequence: Synthetic oligonucleotide
ccggauggcuucaaaagug

SEQ ID NO: 224795 - RNA, 19 nt, Artificial Sequence
  Description of Artificial Sequence: Synthetic oligonucleotide
gcugccguacugcaacagg

SEQ ID NO: 224796 - RNA, 19 nt, Artificial Sequence
  Description of Artificial Sequence: Synthetic oligonucleotide
auccaauggggccuucgau

SEQ ID NO: 224797 - RNA, 19 nt, Artificial Sequence
  Description of Artificial Sequence: Synthetic oligonucleotide
accaucggauccaaauuca

SEQ ID NO: 224798 - RNA, 19 nt, Artificial Sequence
  Description of Artificial Sequence: Synthetic oligonucleotide
aagcgccgugccuugugga

SEQ ID NO: 224799 - RNA, 19 nt, Artificial Sequence
  Description of Artificial Sequence: Synthetic oligonucleotide
cugauucuggcugccguac

SEQ ID NO: 224800 - RNA, 19 nt, Artificial Sequence
  Description of Artificial Sequence: Synthetic oligonucleotide
gacgucacauuccgugaga

SEQ ID NO: 224801 - RNA, 19 nt, Artificial Sequence
  Description of Artificial Sequence: Synthetic oligonucleotide
augcggcccaguuugcccu

SEQ ID NO: 224802 - RNA, 19 nt, Artificial Sequence
  Description of Artificial Sequence: Synthetic oligonucleotide
gugggcacacgcuaacaga

SEQ ID NO: 224803 - RNA, 19 nt, Artificial Sequence
  Description of Artificial Sequence: Synthetic oligonucleotide
uguagccgauacucucaga

SEQ ID NO: 224804 - RNA, 19 nt, Artificial Sequence
  Description of Artificial Sequence: Synthetic oligonucleotide
aggagcuccguuguugccu

SEQ ID NO: 224805 - RNA, 19 nt, Artificial Sequence
  Description of Artificial Sequence: Synthetic oligonucleotide
ccuuccgaccaucggaucc

SEQ ID NO: 224806 - RNA, 19 nt, Artificial Sequence
  Description of Artificial Sequence: Synthetic oligonucleotide
accagguguuccucggggu

SEQ ID NO: 224807 - RNA, 19 nt, Artificial Sequence
  Description of Artificial Sequence: Synthetic oligonucleotide
ggucaugacgucacauucc

SEQ ID NO: 224808 - RNA, 19 nt, Artificial Sequence
  Description of Artificial Sequence: Synthetic oligonucleotide
caggcugucauugcccgug

SEQ ID NO: 224809 - RNA, 19 nt, Artificial Sequence
  Description of Artificial Sequence: Synthetic oligonucleotide
cucccuuccgaccaucgga

SEQ ID NO: 224810 - RNA, 19 nt, Artificial Sequence
  Description of Artificial Sequence: Synthetic oligonucleotide
uuccgggaucuccccugcg

SEQ ID NO: 224811 - RNA, 19 nt, Artificial Sequence
  Description of Artificial Sequence: Synthetic oligonucleotide
cuccuguucugaccucggg

SEQ ID NO: 224812 - RNA, 19 nt, Artificial Sequence
  Description of Artificial Sequence: Synthetic oligonucleotide
uggcaugcacgaugccugc

SEQ ID NO: 224813 - RNA, 19 nt, Artificial Sequence
  Description of Artificial Sequence: Synthetic oligonucleotide
cuugcgcauggagugcacc

SEQ ID NO: 224814 - RNA, 19 nt, Artificial Sequence
  Description of Artificial Sequence: Synthetic oligonucleotide
cucugcguggcgccgugcc

SEQ ID NO: 224815 - RNA, 19 nt, Artificial Sequence
  Description of Artificial Sequence: Synthetic oligonucleotide
ucgaucacacagcgcccga

SEQ ID NO: 224816 - RNA, 19 nt, Artificial Sequence
  Description of Artificial Sequence: Synthetic oligonucleotide
acacgcuaacagauccaac

SEQ ID NO: 224817 - RNA, 19 nt, Artificial Sequence
  Description of Artificial Sequence: Synthetic oligonucleotide
auggaacaugucaccaaug

SEQ ID NO: 224818 - RNA, 19 nt, Artificial Sequence
  Description of Artificial Sequence: Synthetic oligonucleotide
acacagcgcccgaagauug

SEQ ID NO: 224819 - RNA, 19 nt, Artificial Sequence
  Description of Artificial Sequence: Synthetic oligonucleotide
acagcgcccgaagauugag

SEQ ID NO: 224820 - RNA, 19 nt, Artificial Sequence
  Description of Artificial Sequence: Synthetic oligonucleotide
ccaacggaugaaccugucg

SEQ ID NO: 224821 - RNA, 19 nt, Artificial Sequence
  Description of Artificial Sequence: Synthetic oligonucleotide
cagcgcccgaagauugagg

SEQ ID NO: 224822 - RNA, 19 nt, Artificial Sequence
  Description of Artificial Sequence: Synthetic oligonucleotide
ggucgucauccuuucgugc

SEQ ID NO: 224823 - RNA, 19 nt, Artificial Sequence
  Description of Artificial Sequence: Synthetic oligonucleotide
agcugauuguaggcaaacu

SEQ ID NO: 224824 - RNA, 19 nt, Artificial Sequence
  Description of Artificial Sequence: Synthetic oligonucleotide
cucccuugccuccuuucac

SEQ ID NO: 224825 - RNA, 19 nt, Artificial Sequence
  Description of Artificial Sequence: Synthetic oligonucleotide
uccaacggaugaaccuguc

SEQ ID NO: 224826 - RNA, 19 nt, Artificial Sequence
  Description of Artificial Sequence: Synthetic oligonucleotide
cucucaugcgucucaugga

SEQ ID NO: 224827 - RNA, 19 nt, Artificial Sequence
  Description of Artificial Sequence: Synthetic oligonucleotide
caccgacuccuccaggcug

SEQ ID NO: 224828 - RNA, 19 nt, Artificial Sequence
  Description of Artificial Sequence: Synthetic oligonucleotide
cuugccagcuaggccgggg

SEQ ID NO: 224829 - RNA, 19 nt, Artificial Sequence
  Description of Artificial Sequence: Synthetic oligonucleotide
auugggugugugacacggg

SEQ ID NO: 224830 - RNA, 19 nt, Artificial Sequence
  Description of Artificial Sequence: Synthetic oligonucleotide
caggcugaucuugguaagc

SEQ ID NO: 224831 - RNA, 19 nt, Artificial Sequence
  Description of Artificial Sequence: Synthetic oligonucleotide
ggcaaggggccuugggucc

SEQ ID NO: 224832 - RNA, 19 nt, Artificial Sequence
  Description of Artificial Sequence: Synthetic oligonucleotide
ugcgcauggagugcaccga

SEQ ID NO: 224833 - RNA, 19 nt, Artificial Sequence
  Description of Artificial Sequence: Synthetic oligonucleotide
caaugcggcccaguuugcc

SEQ ID NO: 224834 - RNA, 19 nt, Artificial Sequence
  Description of Artificial Sequence: Synthetic oligonucleotide
ucauggcgcccaucuguga

SEQ ID NO: 224835 - RNA, 19 nt, Artificial Sequence
  Description of Artificial Sequence: Synthetic oligonucleotide
gggucgucauccuuucgug

SEQ ID NO: 224836 - RNA, 19 nt, Artificial Sequence
  Description of Artificial Sequence: Synthetic oligonucleotide
accuacacgugugccuguc

SEQ ID NO: 224837 - RNA, 19 nt, Artificial Sequence
  Description of Artificial Sequence: Synthetic oligonucleotide
cccuagaucccuguuuucc

SEQ ID NO: 224838 - RNA, 19 nt, Artificial Sequence
  Description of Artificial Sequence: Synthetic oligonucleotide
aaaccuuuauugggccauu

SEQ ID NO: 224839 - RNA, 19 nt, Artificial Sequence
  Description of Artificial Sequence: Synthetic oligonucleotide
gucagagaaaagugucaua

SEQ ID NO: 224840 - RNA, 19 nt, Artificial Sequence
  Description of Artificial Sequence: Synthetic oligonucleotide
acgaugccugcacccacgu

SEQ ID NO: 224841 - RNA, 19 nt, Artificial Sequence
  Description of Artificial Sequence: Synthetic oligonucleotide
aggaaauaaugggcagaga

SEQ ID NO: 224842 - RNA, 19 nt, Artificial Sequence
  Description of Artificial Sequence: Synthetic oligonucleotide
gccaugcgggcguugagug

SEQ ID NO: 224843 - RNA, 19 nt, Artificial Sequence
  Description of Artificial Sequence: Synthetic oligonucleotide
caucggggccccgacuucc

SEQ ID NO: 224844 - RNA, 19 nt, Artificial Sequence
  Description of Artificial Sequence: Synthetic oligonucleotide
gugggucgucauccuuucg

SEQ ID NO: 224845 - RNA, 19 nt, Artificial Sequence
  Description of Artificial Sequence: Synthetic oligonucleotide
ccuuucgugccagagucag

SEQ ID NO: 224846 - RNA, 19 nt, Artificial Sequence
  Description of Artificial Sequence: Synthetic oligonucleotide
ugcguggcgccgugccccg

SEQ ID NO: 224847 - RNA, 19 nt, Artificial Sequence
  Description of Artificial Sequence: Synthetic oligonucleotide
cuggcgccggcucucuuug

SEQ ID NO: 224848 - RNA, 19 nt, Artificial Sequence
  Description of Artificial Sequence: Synthetic oligonucleotide
auccaacggaugaaccugu

SEQ ID NO: 224849 - RNA, 19 nt, Artificial Sequence
  Description of Artificial Sequence: Synthetic oligonucleotide
ggcugaucuugguaagcac

SEQ ID NO: 224850 - RNA, 19 nt, Artificial Sequence
  Description of Artificial Sequence: Synthetic oligonucleotide
guugacucguucgucgucu

SEQ ID NO: 224851 - RNA, 19 nt, Artificial Sequence
  Description of Artificial Sequence: Synthetic oligonucleotide
ugcgucccggcucuccuuu

SEQ ID NO: 224852 - RNA, 19 nt, Artificial Sequence
  Description of Artificial Sequence: Synthetic oligonucleotide
aggaaacgccaagggagcu

SEQ ID NO: 224853 - RNA, 19 nt, Artificial Sequence
  Description of Artificial Sequence: Synthetic oligonucleotide
uccuugcucgcccgggguu

SEQ ID NO: 224854 - RNA, 19 nt, Artificial Sequence
  Description of Artificial Sequence: Synthetic oligonucleotide
agcgccgugccuuguggaa

SEQ ID NO: 224855 - RNA, 19 nt, Artificial Sequence
  Description of Artificial Sequence: Synthetic oligonucleotide
ccaucggauccaaauucac

SEQ ID NO: 224856 - RNA, 19 nt, Artificial Sequence
  Description of Artificial Sequence: Synthetic oligonucleotide
cacgaagcgccgugccuug

SEQ ID NO: 224857 - RNA, 19 nt, Artificial Sequence
  Description of Artificial Sequence: Synthetic oligonucleotide
ucccggcucuccuuugguc

SEQ ID NO: 224858 - RNA, 19 nt, Artificial Sequence
  Description of Artificial Sequence: Synthetic oligonucleotide
cgucucauggaacauguca

SEQ ID NO: 224859 - RNA, 19 nt, Artificial Sequence
  Description of Artificial Sequence: Synthetic oligonucleotide
cugaucugacauaggaaau

SEQ ID NO: 224860 - RNA, 19 nt, Artificial Sequence
  Description of Artificial Sequence: Synthetic oligonucleotide
ggcaagacuggugcaggcc

SEQ ID NO: 224861 - RNA, 19 nt, Artificial Sequence
  Description of Artificial Sequence: Synthetic oligonucleotide
aucugacauaggaaauaau

SEQ ID NO: 224862 - RNA, 19 nt, Artificial Sequence
  Description of Artificial Sequence: Synthetic oligonucleotide
caguuccauucuugccagc

SEQ ID NO: 224863 - RNA, 19 nt, Artificial Sequence
  Description of Artificial Sequence: Synthetic oligonucleotide
cacacgcuaacagauccaa

SEQ ID NO: 224864 - RNA, 19 nt, Artificial Sequence
  Description of Artificial Sequence: Synthetic oligonucleotide
cuuccgaccaucggaucca

SEQ ID NO: 224865 - RNA, 19 nt, Artificial Sequence
  Description of Artificial Sequence: Synthetic oligonucleotide
uugacucguucgucgucua

SEQ ID NO: 224866 - RNA, 19 nt, Artificial Sequence
  Description of Artificial Sequence: Synthetic oligonucleotide
gcgggcguugagugggucg

SEQ ID NO: 224867 - RNA, 19 nt, Artificial Sequence
  Description of Artificial Sequence: Synthetic oligonucleotide
ccccgaaccacguuguuga

SEQ ID NO: 224868 - RNA, 19 nt, Artificial Sequence
  Description of Artificial Sequence: Synthetic oligonucleotide
ggaaacgccaagggagcug

SEQ ID NO: 224869 - RNA, 19 nt, Artificial Sequence
  Description of Artificial Sequence: Synthetic oligonucleotide
ucuugccagcuaggccggg

SEQ ID NO: 224870 - RNA, 19 nt, Artificial Sequence
  Description of Artificial Sequence: Synthetic oligonucleotide
ggaauugagguaggcgguc

SEQ ID NO: 224871 - RNA, 19 nt, Artificial Sequence
  Description of Artificial Sequence: Synthetic oligonucleotide
aguuugcccuucuguccau

SEQ ID NO: 224872 - RNA, 19 nt, Artificial Sequence
  Description of Artificial Sequence: Synthetic oligonucleotide
gcucccuuccgaccaucgg

SEQ ID NO: 224873 - RNA, 19 nt, Artificial Sequence
  Description of Artificial Sequence: Synthetic oligonucleotide
agcuccguuguugccuuga

SEQ ID NO: 224874 - RNA, 19 nt, Artificial Sequence
  Description of Artificial Sequence: Synthetic oligonucleotide
accgacuccuccaggcugu

SEQ ID NO: 224875 - RNA, 19 nt, Artificial Sequence
  Description of Artificial Sequence: Synthetic oligonucleotide
auccaucggggccccgacu

SEQ ID NO: 224876 - RNA, 19 nt, Artificial Sequence
  Description of Artificial Sequence: Synthetic oligonucleotide
cuugcucgcccgggguucc

SEQ ID NO: 224877 - RNA, 19 nt, Artificial Sequence
  Description of Artificial Sequence: Synthetic oligonucleotide
cacguucugcuugcgcaug

SEQ ID NO: 224878 - RNA, 19 nt, Artificial Sequence
  Description of Artificial Sequence: Synthetic oligonucleotide
gugacgccaucggugagga

SEQ ID NO: 224879 - RNA, 19 nt, Artificial Sequence
  Description of Artificial Sequence: Synthetic oligonucleotide
guauccaucggggccccga

SEQ ID NO: 224880 - RNA, 19 nt, Artificial Sequence
  Description of Artificial Sequence: Synthetic oligonucleotide
uggaccgggcucuccuuuu

SEQ ID NO: 224881 - RNA, 19 nt, Artificial Sequence
  Description of Artificial Sequence: Synthetic oligonucleotide
aauggccgucacagugaca

SEQ ID NO: 224882 - RNA, 19 nt, Artificial Sequence
  Description of Artificial Sequence: Synthetic oligonucleotide
cauccuuucgugccagagu

SEQ ID NO: 224883 - RNA, 19 nt, Artificial Sequence
  Description of Artificial Sequence: Synthetic oligonucleotide
gucauauugcgcaccugcu

SEQ ID NO: 224884 - RNA, 19 nt, Artificial Sequence
  Description of Artificial Sequence: Synthetic oligonucleotide
gcuaacagauccaacggau

SEQ ID NO: 224885 - RNA, 19 nt, Artificial Sequence
  Description of Artificial Sequence: Synthetic oligonucleotide
gugucauauugcgcaccug

SEQ ID NO: 224886 - RNA, 19 nt, Artificial Sequence
  Description of Artificial Sequence: Synthetic oligonucleotide
uccgaccaucggauccaaa

SEQ ID NO: 224887 - RNA, 19 nt, Artificial Sequence
  Description of Artificial Sequence: Synthetic oligonucleotide
caaugccaauggccgucac

SEQ ID NO: 224888 - RNA, 19 nt, Artificial Sequence
  Description of Artificial Sequence: Synthetic oligonucleotide
guacacccuuggguccugg

SEQ ID NO: 224889 - RNA, 19 nt, Artificial Sequence
  Description of Artificial Sequence: Synthetic oligonucleotide
ggccucgaggucccucagg

SEQ ID NO: 224890 - RNA, 19 nt, Artificial Sequence
  Description of Artificial Sequence: Synthetic oligonucleotide
gggaugcacgaagaggaga

SEQ ID NO: 224891 - RNA, 19 nt, Artificial Sequence
  Description of Artificial Sequence: Synthetic oligonucleotide
gagggccggguucucccuc

SEQ ID NO: 224892 - RNA, 19 nt, Artificial Sequence
  Description of Artificial Sequence: Synthetic oligonucleotide
ccaugcgggcguugagugg

SEQ ID NO: 224893 - RNA, 19 nt, Artificial Sequence
  Description of Artificial Sequence: Synthetic oligonucleotide
ugccgccagcaauccacuc

SEQ ID NO: 224894 - RNA, 19 nt, Artificial Sequence
  Description of Artificial Sequence: Synthetic oligonucleotide
cgucacauuccgugagacc

SEQ ID NO: 224895 - RNA, 19 nt, Artificial Sequence
  Description of Artificial Sequence: Synthetic oligonucleotide
ggcgccgugacaccuccuc

SEQ ID NO: 224896 - RNA, 19 nt, Artificial Sequence
  Description of Artificial Sequence: Synthetic oligonucleotide
uagcugaauccaggccuuc

SEQ ID NO: 224897 - RNA, 19 nt, Artificial Sequence
  Description of Artificial Sequence: Synthetic oligonucleotide
cacagcgcccgaagauuga

SEQ ID NO: 224898 - RNA, 19 nt, Artificial Sequence
  Description of Artificial Sequence: Synthetic oligonucleotide
ccggcucucuuugaugagc

SEQ ID NO: 224899 - RNA, 19 nt, Artificial Sequence
  Description of Artificial Sequence: Synthetic oligonucleotide
cugaccucgggagaagggu

SEQ ID NO: 224900 - RNA, 19 nt, Artificial Sequence
  Description of Artificial Sequence: Synthetic oligonucleotide
cauggcgcccaucugugau

SEQ ID NO: 224901 - RNA, 19 nt, Artificial Sequence
  Description of Artificial Sequence: Synthetic oligonucleotide
ccguacugcaacagggcca

SEQ ID NO: 224902 - RNA, 19 nt, Artificial Sequence
  Description of Artificial Sequence: Synthetic oligonucleotide
guuugcccuucuguccauc

SEQ ID NO: 224903 - RNA, 19 nt, Artificial Sequence
  Description of Artificial Sequence: Synthetic oligonucleotide
gagcuccguuguugccuug

SEQ ID NO: 224904 - RNA, 19 nt, Artificial Sequence
  Description of Artificial Sequence: Synthetic oligonucleotide
gggaguugacucguucguc

SEQ ID NO: 224905 - RNA, 19 nt, Artificial Sequence
  Description of Artificial Sequence: Synthetic oligonucleotide
ggcacccagccuguugacc

SEQ ID NO: 224906 - RNA, 19 nt, Artificial Sequence
  Description of Artificial Sequence: Synthetic oligonucleotide
ccgaagauugaggucguca

SEQ ID NO: 224907 - RNA, 19 nt, Artificial Sequence
  Description of Artificial Sequence: Synthetic oligonucleotide
cgugacgccaucggugagg

SEQ ID NO: 224908 - RNA, 19 nt, Artificial Sequence
  Description of Artificial Sequence: Synthetic oligonucleotide
gccacauauagcucuguuu

SEQ ID NO: 224909 - RNA, 19 nt, Artificial Sequence
  Description of Artificial Sequence: Synthetic oligonucleotide
gcgcauggagugcaccgac

SEQ ID NO: 224910 - RNA, 19 nt, Artificial Sequence
  Description of Artificial Sequence: Synthetic oligonucleotide
gcugauucuggcugccgua

SEQ ID NO: 224911 - RNA, 19 nt, Artificial Sequence
  Description of Artificial Sequence: Synthetic oligonucleotide
agacuggugcaggccggca

SEQ ID NO: 224912 - RNA, 19 nt, Artificial Sequence
  Description of Artificial Sequence: Synthetic oligonucleotide
gugugugacacggggcucu

SEQ ID NO: 224913 - RNA, 19 nt, Artificial Sequence
  Description of Artificial Sequence: Synthetic oligonucleotide
uugcucgcccgggguuccg

SEQ ID NO: 224914 - RNA, 19 nt, Artificial Sequence
  Description of Artificial Sequence: Synthetic oligonucleotide
cagcugguucucccuuguc

SEQ ID NO: 224915 - RNA, 19 nt, Artificial Sequence
  Description of Artificial Sequence: Synthetic oligonucleotide
gccggguucucccucaggu

SEQ ID NO: 224916 - RNA, 19 nt, Artificial Sequence
  Description of Artificial Sequence: Synthetic oligonucleotide
uuccgaccaucggauccaa

SEQ ID NO: 224917 - RNA, 19 nt, Artificial Sequence
  Description of Artificial Sequence: Synthetic oligonucleotide
gccccgaaccacguuguug

SEQ ID NO: 224918 - RNA, 19 nt, Artificial Sequence
  Description of Artificial Sequence: Synthetic oligonucleotide
ggcugccguacugcaacag

SEQ ID NO: 224919 - RNA, 19 nt, Artificial Sequence
  Description of Artificial Sequence: Synthetic oligonucleotide
ccguuguugccuugauauc

SEQ ID NO: 224920 - RNA, 19 nt, Artificial Sequence
  Description of Artificial Sequence: Synthetic oligonucleotide
cagagcuaucgaugacgaa

SEQ ID NO: 224921 - RNA, 19 nt, Artificial Sequence
  Description of Artificial Sequence: Synthetic oligonucleotide
cuccguuguugccuugaua

SEQ ID NO: 224922 - RNA, 19 nt, Artificial Sequence
  Description of Artificial Sequence: Synthetic oligonucleotide
ccgugacaccuccuccacg

SEQ ID NO: 224923 - RNA, 19 nt, Artificial Sequence
  Description of Artificial Sequence: Synthetic oligonucleotide
ccguuccgagccauccagc

SEQ ID NO: 224924 - RNA, 19 nt, Artificial Sequence
  Description of Artificial Sequence: Synthetic oligonucleotide
cccgugacgccaucgguga

SEQ ID NO: 224925 - RNA, 19 nt, Artificial Sequence
  Description of Artificial Sequence: Synthetic oligonucleotide
cacgugugccugucucaga

SEQ ID NO: 224926 - RNA, 19 nt, Artificial Sequence
  Description of Artificial Sequence: Synthetic oligonucleotide
gucgucuagccggauggcu

SEQ ID NO: 224927 - RNA, 19 nt, Artificial Sequence
  Description of Artificial Sequence: Synthetic oligonucleotide
ggguccgauuagcaccaca

SEQ ID NO: 224928 - RNA, 19 nt, Artificial Sequence
  Description of Artificial Sequence: Synthetic oligonucleotide
guagcugaauccaggccuu

SEQ ID NO: 224929 - RNA, 19 nt, Artificial Sequence
  Description of Artificial Sequence: Synthetic oligonucleotide
ggccggguucucccucagg

SEQ ID NO: 224930 - RNA, 19 nt, Artificial Sequence
  Description of Artificial Sequence: Synthetic oligonucleotide
ugcguccugggcggccaga

SEQ ID NO: 224931 - RNA, 19 nt, Artificial Sequence
  Description of Artificial Sequence: Synthetic oligonucleotide
aaacgccaagggagcugaa

SEQ ID NO: 224932 - RNA, 19 nt, Artificial Sequence
  Description of Artificial Sequence: Synthetic oligonucleotide
cgcuaacagauccaacgga

SEQ ID NO: 224933 - RNA, 19 nt, Artificial Sequence
  Description of Artificial Sequence: Synthetic oligonucleotide
cauugcccgugacgccauc

SEQ ID NO: 224934 - RNA, 19 nt, Artificial Sequence
  Description of Artificial Sequence: Synthetic oligonucleotide
ggugugugacacggggcuc

SEQ ID NO: 224935 - RNA, 19 nt, Artificial Sequence
  Description of Artificial Sequence: Synthetic oligonucleotide
ccgaccaucggauccaaau

SEQ ID NO: 224936 - RNA, 19 nt, Artificial Sequence
  Description of Artificial Sequence: Synthetic oligonucleotide
gcgccgugccuuguggaag

SEQ ID NO: 224937 - RNA, 19 nt, Artificial Sequence
  Description of Artificial Sequence: Synthetic oligonucleotide
guggcgccgugccccgccc

SEQ ID NO: 224938 - RNA, 19 nt, Artificial Sequence
  Description of Artificial Sequence: Synthetic oligonucleotide
caggccggcagacagccuu

SEQ ID NO: 224939 - RNA, 19 nt, Artificial Sequence
  Description of Artificial Sequence: Synthetic oligonucleotide
cguugagugggucgucauc

SEQ ID NO: 224940 - RNA, 19 nt, Artificial Sequence
  Description of Artificial Sequence: Synthetic oligonucleotide
cagcacccacagguuuccc

SEQ ID NO: 224941 - RNA, 19 nt, Artificial Sequence
  Description of Artificial Sequence: Synthetic oligonucleotide
ugcgggcguugaguggguc

SEQ ID NO: 224942 - RNA, 19 nt, Artificial Sequence
  Description of Artificial Sequence: Synthetic oligonucleotide
gcucacccaaccguuccga

SEQ ID NO: 224943 - RNA, 19 nt, Artificial Sequence
  Description of Artificial Sequence: Synthetic oligonucleotide
cugcguccugggcggccag

SEQ ID NO: 224944 - RNA, 19 nt, Artificial Sequence
  Description of Artificial Sequence: Synthetic oligonucleotide
gucaggcgccgugacaccu

SEQ ID NO: 224945 - RNA, 19 nt, Artificial Sequence
  Description of Artificial Sequence: Synthetic oligonucleotide
gugugcacugggccacaua

SEQ ID NO: 224946 - RNA, 19 nt, Artificial Sequence
  Description of Artificial Sequence: Synthetic oligonucleotide
cgaagauugaggucgucau

SEQ ID NO: 224947 - RNA, 19 nt, Artificial Sequence
  Description of Artificial Sequence: Synthetic oligonucleotide
aggcccaaugcggcccagu

SEQ ID NO: 224948 - RNA, 19 nt, Artificial Sequence
  Description of Artificial Sequence: Synthetic oligonucleotide
cacacagcgcccgaagauu

SEQ ID NO: 224949 - RNA, 19 nt, Artificial Sequence
  Description of Artificial Sequence: Synthetic oligonucleotide
gccuguugaccacauugau

SEQ ID NO: 224950 - RNA, 19 nt, Artificial Sequence
  Description of Artificial Sequence: Synthetic oligonucleotide
cgucccggcucuccuuugg

SEQ ID NO: 224951 - RNA, 19 nt, Artificial Sequence
  Description of Artificial Sequence: Synthetic oligonucleotide
acgaagcgccgugccuugu

SEQ ID NO: 224952 - RNA, 19 nt, Artificial Sequence
  Description of Artificial Sequence: Synthetic oligonucleotide
ggucugggcaaaggacauc

SEQ ID NO: 224953 - RNA, 19 nt, Artificial Sequence
  Description of Artificial Sequence: Synthetic oligonucleotide
gcgaccacggugggcacca

SEQ ID NO: 224954 - RNA, 19 nt, Artificial Sequence
  Description of Artificial Sequence: Synthetic oligonucleotide
ccugggcaagacuggugca

SEQ ID NO: 224955 - RNA, 19 nt, Artificial Sequence
  Description of Artificial Sequence: Synthetic oligonucleotide
caugcgucucauggaacau

SEQ ID NO: 224956 - RNA, 19 nt, Artificial Sequence
  Description of Artificial Sequence: Synthetic oligonucleotide
gguauccaucggggccccg

SEQ ID NO: 224957 - RNA, 19 nt, Artificial Sequence
  Description of Artificial Sequence: Synthetic oligonucleotide
gucccggcucuccuuuggu

SEQ ID NO: 224958 - RNA, 19 nt, Artificial Sequence
  Description of Artificial Sequence: Synthetic oligonucleotide
ccccuagaucccuguuuuc

SEQ ID NO: 224959 - RNA, 19 nt, Artificial Sequence
  Description of Artificial Sequence: Synthetic oligonucleotide
ccuugcucgcccgggguuc

SEQ ID NO: 224960 - RNA, 19 nt, Artificial Sequence
  Description of Artificial Sequence: Synthetic oligonucleotide
gccgucacagugacaucuc

SEQ ID NO: 224961 - RNA, 19 nt, Artificial Sequence
  Description of Artificial Sequence: Synthetic oligonucleotide
ccgugccccgccccgugcg

SEQ ID NO: 224962 - RNA, 19 nt, Artificial Sequence
  Description of Artificial Sequence: Synthetic oligonucleotide
guggaccgggcucuccuuu

SEQ ID NO: 224963 - RNA, 19 nt, Artificial Sequence
  Description of Artificial Sequence: Synthetic oligonucleotide
ggguauccaucggggcccc

SEQ ID NO: 224964 - RNA, 19 nt, Artificial Sequence
  Description of Artificial Sequence: Synthetic oligonucleotide
ggccgcccuugguuccggg

SEQ ID NO: 224965 - RNA, 19 nt, Artificial Sequence
  Description of Artificial Sequence: Synthetic oligonucleotide
ggagcuccguuguugccuu

SEQ ID NO: 224966 - RNA, 19 nt, Artificial Sequence
  Description of Artificial Sequence: Synthetic oligonucleotide
ggcaugcacgaugccugca

SEQ ID NO: 224967 - RNA, 19 nt, Artificial Sequence
  Description of Artificial Sequence: Synthetic oligonucleotide
cgaagcgccgugccuugug

SEQ ID NO: 224968 - RNA, 19 nt, Artificial Sequence
  Description of Artificial Sequence: Synthetic oligonucleotide
cccuuccgaccaucggauc

SEQ ID NO: 224969 - RNA, 19 nt, Artificial Sequence
  Description of Artificial Sequence: Synthetic oligonucleotide
gccgauacucucagagcua

SEQ ID NO: 224970 - RNA, 19 nt, Artificial Sequence
  Description of Artificial Sequence: Synthetic oligonucleotide
cgauacucucagagcuauc

SEQ ID NO: 224971 - RNA, 19 nt, Artificial Sequence
  Description of Artificial Sequence: Synthetic oligonucleotide
cguucgucgucuagccgga

SEQ ID NO: 224972 - RNA, 19 nt, Artificial Sequence
  Description of Artificial Sequence: Synthetic oligonucleotide
augcgggcguugagugggu

SEQ ID NO: 224973 - RNA, 19 nt, Artificial Sequence
  Description of Artificial Sequence: Synthetic oligonucleotide
gcuugcgcauggagugcac

SEQ ID NO: 224974 - RNA, 19 nt, Artificial Sequence
  Description of Artificial Sequence: Synthetic oligonucleotide
ccgugacgccaucggugag

SEQ ID NO: 224975 - RNA, 19 nt, Artificial Sequence
  Description of Artificial Sequence: Synthetic oligonucleotide
ccaucggggccccgacuuc

SEQ ID NO: 224976 - RNA, 19 nt, Artificial Sequence
  Description of Artificial Sequence: Synthetic oligonucleotide
gagcucugcguggcgccgu

SEQ ID NO: 224977 - RNA, 19 nt, Artificial Sequence
  Description of Artificial Sequence: Synthetic oligonucleotide
gugccgccagcaauccacu

SEQ ID NO: 224978 - RNA, 19 nt, Artificial Sequence
  Description of Artificial Sequence: Synthetic oligonucleotide
cccgagggccagguucacc

SEQ ID NO: 224979 - RNA, 19 nt, Artificial Sequence
  Description of Artificial Sequence: Synthetic oligonucleotide
ggcaagguucagguaggau

SEQ ID NO: 224980 - RNA, 19 nt, Artificial Sequence
  Description of Artificial Sequence: Synthetic oligonucleotide
cguggcgccgugccccgcc

SEQ ID NO: 224981 - RNA, 19 nt, Artificial Sequence
  Description of Artificial Sequence: Synthetic oligonucleotide
ggcgccggcucucuuugau

SEQ ID NO: 224982 - RNA, 19 nt, Artificial Sequence
  Description of Artificial Sequence: Synthetic oligonucleotide
cgucgucuagccggauggc

SEQ ID NO: 224983 - RNA, 19 nt, Artificial Sequence
  Description of Artificial Sequence: Synthetic oligonucleotide
gcgucucauggaacauguc

SEQ ID NO: 224984 - RNA, 19 nt, Artificial Sequence
  Description of Artificial Sequence: Synthetic oligonucleotide
ccgauacucucagagcuau

SEQ ID NO: 224985 - RNA, 19 nt, Artificial Sequence
  Description of Artificial Sequence: Synthetic oligonucleotide
ccacguucugcuugcgcau

SEQ ID NO: 224986 - RNA, 19 nt, Artificial Sequence
  Description of Artificial Sequence: Synthetic oligonucleotide
gguggaccgggcucuccuu

SEQ ID NO: 224987 - RNA, 19 nt, Artificial Sequence
  Description of Artificial Sequence: Synthetic oligonucleotide
aggcgccgugacaccuccu

SEQ ID NO: 224988 - RNA, 19 nt, Artificial Sequence
  Description of Artificial Sequence: Synthetic oligonucleotide
cccgaagauugaggucguc

SEQ ID NO: 224989 - RNA, 19 nt, Artificial Sequence
  Description of Artificial Sequence: Synthetic oligonucleotide
cgaccaucggauccaaauu

SEQ ID NO: 224990 - RNA, 19 nt, Artificial Sequence
  Description of Artificial Sequence: Synthetic oligonucleotide
ccuacacgugugccugucu

SEQ ID NO: 224991 - RNA, 19 nt, Artificial Sequence
  Description of Artificial Sequence: Synthetic oligonucleotide
ccugcguccugggcggcca

SEQ ID NO: 224992 - RNA, 19 nt, Artificial Sequence
  Description of Artificial Sequence: Synthetic oligonucleotide
ccugcgucccggcucuccu

SEQ ID NO: 224993 - RNA, 19 nt, Artificial Sequence
  Description of Artificial Sequence: Synthetic oligonucleotide
gggguccgauuagcaccac

SEQ ID NO: 224994 - RNA, 19 nt, Artificial Sequence
  Description of Artificial Sequence: Synthetic oligonucleotide
cugcgucccggcucuccuu

SEQ ID NO: 224995 - RNA, 19 nt, Artificial Sequence
  Description of Artificial Sequence: Synthetic oligonucleotide
ccacgaagcgccgugccuu

SEQ ID NO: 224996 - RNA, 19 nt, Artificial Sequence
  Description of Artificial Sequence: Synthetic oligonucleotide
guucgucgucuagccggau

SEQ ID NO: 224997 - RNA, 19 nt, Artificial Sequence
  Description of Artificial Sequence: Synthetic oligonucleotide
cgcauggagugcaccgacu

SEQ ID NO: 224998 - RNA, 19 nt, Artificial Sequence
  Description of Artificial Sequence: Synthetic oligonucleotide
gcgccccgaaccacguugu

SEQ ID NO: 224999 - RNA, 19 nt, Artificial Sequence
  Description of Artificial Sequence: Synthetic oligonucleotide
cgccgugccuuguggaagu

SEQ ID NO: 225000 - RNA, 19 nt, Artificial Sequence
  Description of Artificial Sequence: Synthetic oligonucleotide
cccggaagauggccgcccu

SEQ ID NO: 225001 - RNA, 19 nt, Artificial Sequence
  Description of Artificial Sequence: Synthetic oligonucleotide
cgccaucggugaggaagac

SEQ ID NO: 225002 - RNA, 19 nt, Artificial Sequence
  Description of Artificial Sequence: Synthetic oligonucleotide
cccggacuuccaggagcuc

SEQ ID NO: 225003 - RNA, 19 nt, Artificial Sequence
  Description of Artificial Sequence: Synthetic oligonucleotide
gugcgccccgaaccacguu

SEQ ID NO: 225004 - RNA, 19 nt, Artificial Sequence
  Description of Artificial Sequence: Synthetic oligonucleotide
cccaaccguuccgagccau

SEQ ID NO: 225005 - RNA, 19 nt, Artificial Sequence
  Description of Artificial Sequence: Synthetic oligonucleotide
gcguggcgccgugccccgc

SEQ ID NO: 225006 - RNA, 19 nt, Artificial Sequence
  Description of Artificial Sequence: Synthetic oligonucleotide
ccacggugggcaccacguu

SEQ ID NO: 225007 - RNA, 19 nt, Artificial Sequence
  Description of Artificial Sequence: Synthetic oligonucleotide
ccgcccugucacccaggcu

SEQ ID NO: 225008 - RNA, 19 nt, Artificial Sequence
  Description of Artificial Sequence: Synthetic oligonucleotide
gcccgggguuccggcuucu

SEQ ID NO: 225009 - RNA, 19 nt, Artificial Sequence
  Description of Artificial Sequence: Synthetic oligonucleotide
cgccccgaaccacguuguu

SEQ ID NO: 225010 - RNA, 19 nt, Artificial Sequence
  Description of Artificial Sequence: Synthetic oligonucleotide
aauauaugguaucaccugc

SEQ ID NO: 225011 - RNA, 19 nt, Artificial Sequence
  Description of Artificial Sequence: Synthetic oligonucleotide
uuuacaacaugaauuacgg

SEQ ID NO: 225012 - RNA, 19 nt, Artificial Sequence
  Description of Artificial Sequence: Synthetic oligonucleotide
aauaugagcacuuuguaca

SEQ ID NO: 225013 - RNA, 19 nt, Artificial Sequence
  Description of Artificial Sequence: Synthetic oligonucleotide
ucaaagucgaugauggacg

SEQ ID NO: 225014 - RNA, 19 nt, Artificial Sequence
  Description of Artificial Sequence: Synthetic oligonucleotide
augaauauaugguaucacc

SEQ ID NO: 225015 - RNA, 19 nt, Artificial Sequence
  Description of Artificial Sequence: Synthetic oligonucleotide
aguagguaaauucaagccg

SEQ ID NO: 225016 - RNA, 19 nt, Artificial Sequence
  Description of Artificial Sequence: Synthetic oligonucleotide
aauaaugaacugaucgucc

SEQ ID NO: 225017 - RNA, 19 nt, Artificial Sequence
  Description of Artificial Sequence: Synthetic oligonucleotide
uuagauucuaaagacgugg

SEQ ID NO: 225018 - RNA, 19 nt, Artificial Sequence
  Description of Artificial Sequence: Synthetic oligonucleotide
uguugugucacacaacaag

SEQ ID NO: 225019 - RNA, 19 nt, Artificial Sequence
  Description of Artificial Sequence: Synthetic oligonucleotide
uggggagaaauuaagaccc

SEQ ID NO: 225020 - RNA, 19 nt, Artificial Sequence
  Description of Artificial Sequence: Synthetic oligonucleotide
uuaaacaguagguaaauuc

SEQ ID NO: 225021 - RNA, 19 nt, Artificial Sequence
  Description of Artificial Sequence: Synthetic oligonucleotide
uuaguaacugaauguaagg

SEQ ID NO: 225022 - RNA, 19 nt, Artificial Sequence
  Description of Artificial Sequence: Synthetic oligonucleotide
uguaagggcucauaaagag

SEQ ID NO: 225023 - RNA, 19 nt, Artificial Sequence
  Description of Artificial Sequence: Synthetic oligonucleotide
auuacauuccgcuugcuug

SEQ ID NO: 225024 - RNA, 19 nt, Artificial Sequence
  Description of Artificial Sequence: Synthetic oligonucleotide
uaaucgaaauccccaaggg

SEQ ID NO: 225025 - RNA, 19 nt, Artificial Sequence
  Description of Artificial Sequence: Synthetic oligonucleotide
ucccauuaugacuugaucc

SEQ ID NO: 225026 - RNA, 19 nt, Artificial Sequence
  Description of Artificial Sequence: Synthetic oligonucleotide
uggagucugauuuacaaca

SEQ ID NO: 225027 - RNA, 19 nt, Artificial Sequence
  Description of Artificial Sequence: Synthetic oligonucleotide
uacaacaugaauuacgguu

SEQ ID NO: 225028 - RNA, 19 nt, Artificial Sequence
  Description of Artificial Sequence: Synthetic oligonucleotide
uuaucauugauagugauuu

SEQ ID NO: 225029 - RNA, 19 nt, Artificial Sequence
  Description of Artificial Sequence: Synthetic oligonucleotide
aaccucuuagauucuaaag

SEQ ID NO: 225030 - RNA, 19 nt, Artificial Sequence
  Description of Artificial Sequence: Synthetic oligonucleotide
gguaaauucaagccgaugc

SEQ ID NO: 225031 - RNA, 19 nt, Artificial Sequence
  Description of Artificial Sequence: Synthetic oligonucleotide
gaauauaugguaucaccug

SEQ ID NO: 225032 - RNA, 19 nt, Artificial Sequence
  Description of Artificial Sequence: Synthetic oligonucleotide
guaaucgaaauccccaagg

SEQ ID NO: 225033 - RNA, 19 nt, Artificial Sequence
  Description of Artificial Sequence: Synthetic oligonucleotide
ugugaucuaacaaaugcuc

SEQ ID NO: 225034 - RNA, 19 nt, Artificial Sequence
  Description of Artificial Sequence: Synthetic oligonucleotide
aaaugcucccauuaugacu

SEQ ID NO: 225035 - RNA, 19 nt, Artificial Sequence
  Description of Artificial Sequence: Synthetic oligonucleotide
aguguuaggauugccaaac

SEQ ID NO: 225036 - RNA, 19 nt, Artificial Sequence
  Description of Artificial Sequence: Synthetic oligonucleotide
uagauucuaaagacguggg

SEQ ID NO: 225037 - RNA, 19 nt, Artificial Sequence
  Description of Artificial Sequence: Synthetic oligonucleotide
accaaucacagccguaugc

SEQ ID NO: 225038 - RNA, 19 nt, Artificial Sequence
  Description of Artificial Sequence: Synthetic oligonucleotide
agaugaucggcuuuuacca

SEQ ID NO: 225039 - RNA, 19 nt, Artificial Sequence
  Description of Artificial Sequence: Synthetic oligonucleotide
auuguaaacggcuucaauu

SEQ ID NO: 225040 - RNA, 19 nt, Artificial Sequence
  Description of Artificial Sequence: Synthetic oligonucleotide
aaagacgugggucaauuaa

SEQ ID NO: 225041 - RNA, 19 nt, Artificial Sequence
  Description of Artificial Sequence: Synthetic oligonucleotide
uuguuuguuaaaccaagcu

SEQ ID NO: 225042 - RNA, 19 nt, Artificial Sequence
  Description of Artificial Sequence: Synthetic oligonucleotide
cugcuuaccaguuaguaac

SEQ ID NO: 225043 - RNA, 19 nt, Artificial Sequence
  Description of Artificial Sequence: Synthetic oligonucleotide
caguagguaaauucaagcc

SEQ ID NO: 225044 - RNA, 19 nt, Artificial Sequence
  Description of Artificial Sequence: Synthetic oligonucleotide
acuauaucuguugugucac

SEQ ID NO: 225045 - RNA, 19 nt, Artificial Sequence
  Description of Artificial Sequence: Synthetic oligonucleotide
ucuaucauaguguuaggau

SEQ ID NO: 225046 - RNA, 19 nt, Artificial Sequence
  Description of Artificial Sequence: Synthetic oligonucleotide
gagucuggaucucacaaag

SEQ ID NO: 225047 - RNA, 19 nt, Artificial Sequence
  Description of Artificial Sequence: Synthetic oligonucleotide
acgugggucaauuaaaagu

SEQ ID NO: 225048 - RNA, 19 nt, Artificial Sequence
  Description of Artificial Sequence: Synthetic oligonucleotide
aggaacuacgcguacauga

SEQ ID NO: 225049 - RNA, 19 nt, Artificial Sequence
  Description of Artificial Sequence: Synthetic oligonucleotide
uuaccaguuaguaacugaa

SEQ ID NO: 225050 - RNA, 19 nt, Artificial Sequence
  Description of Artificial Sequence: Synthetic oligonucleotide
ugaucuaacaaaugcucac

SEQ ID NO: 225051 - RNA, 19 nt, Artificial Sequence
  Description of Artificial Sequence: Synthetic oligonucleotide
uaaaccaagcuuuauugau

SEQ ID NO: 225052 - RNA, 19 nt, Artificial Sequence
  Description of Artificial Sequence: Synthetic oligonucleotide
gauucuaaagacguggguc

SEQ ID NO: 225053 - RNA, 19 nt, Artificial Sequence
  Description of Artificial Sequence: Synthetic oligonucleotide
uaucuguugugucacacaa

SEQ ID NO: 225054 - RNA, 19 nt, Artificial Sequence
  Description of Artificial Sequence: Synthetic oligonucleotide
aauacccgaagacugcgga

SEQ ID NO: 225055 - RNA, 19 nt, Artificial Sequence
  Description of Artificial Sequence: Synthetic oligonucleotide
uguugacccacuucuaucu

SEQ ID NO: 225056 - RNA, 19 nt, Artificial Sequence
  Description of Artificial Sequence: Synthetic oligonucleotide
uugugucacacaacaagcc

SEQ ID NO: 225057 - RNA, 19 nt, Artificial Sequence
  Description of Artificial Sequence: Synthetic oligonucleotide
ucuaacaaaugcucacagc

SEQ ID NO: 225058 - RNA, 19 nt, Artificial Sequence
  Description of Artificial Sequence: Synthetic oligonucleotide
ugggucaauuaaaaguuac

SEQ ID NO: 225059 - RNA, 19 nt, Artificial Sequence
  Description of Artificial Sequence: Synthetic oligonucleotide
uuaagaggaacuacgcgua

SEQ ID NO: 225060 - RNA, 19 nt, Artificial Sequence
  Description of Artificial Sequence: Synthetic oligonucleotide
agcaugacuauaucuguug

SEQ ID NO: 225061 - RNA, 19 nt, Artificial Sequence
  Description of Artificial Sequence: Synthetic oligonucleotide
uauguuggggagaaauuaa

SEQ ID NO: 225062 - RNA, 19 nt, Artificial Sequence
  Description of Artificial Sequence: Synthetic oligonucleotide
aauuacauuccgcuugcuu

SEQ ID NO: 225063 - RNA, 19 nt, Artificial Sequence
  Description of Artificial Sequence: Synthetic oligonucleotide
ucauucgggcguuggagcg

SEQ ID NO: 225064 - RNA, 19 nt, Artificial Sequence
  Description of Artificial Sequence: Synthetic oligonucleotide
auaguguuaggauugccaa

SEQ ID NO: 225065 - RNA, 19 nt, Artificial Sequence
  Description of Artificial Sequence: Synthetic oligonucleotide
uacgcguacaugauuaaau

SEQ ID NO: 225066 - RNA, 19 nt, Artificial Sequence
  Description of Artificial Sequence: Synthetic oligonucleotide
guaaggauucagucuauug

SEQ ID NO: 225067 - RNA, 19 nt, Artificial Sequence
  Description of Artificial Sequence: Synthetic oligonucleotide
augacuauaucuguugugu

SEQ ID NO: 225068 - RNA, 19 nt, Artificial Sequence
  Description of Artificial Sequence: Synthetic oligonucleotide
uguaaacggcuucaauuac

SEQ ID NO: 225069 - RNA, 19 nt, Artificial Sequence
  Description of Artificial Sequence: Synthetic oligonucleotide
guuaagaggaacuacgcgu

SEQ ID NO: 225070 - RNA, 19 nt, Artificial Sequence
  Description of Artificial Sequence: Synthetic oligonucleotide
aaaccaaucacagccguau

SEQ ID NO: 225071 - RNA, 19 nt, Artificial Sequence
  Description of Artificial Sequence: Synthetic oligonucleotide
cuacuguguaggaagcugc

SEQ ID NO: 225072 - RNA, 19 nt, Artificial Sequence
  Description of Artificial Sequence: Synthetic oligonucleotide
aacugaucguccucuucag

SEQ ID NO: 225073 - RNA, 19 nt, Artificial Sequence
  Description of Artificial Sequence: Synthetic oligonucleotide
aucggcuuuuaccacaugu

SEQ ID NO: 225074 - RNA, 19 nt, Artificial Sequence
  Description of Artificial Sequence: Synthetic oligonucleotide
auugauacucucaugaaua

SEQ ID NO: 225075 - RNA, 19 nt, Artificial Sequence
  Description of Artificial Sequence: Synthetic oligonucleotide
gguuaagaggaacuacgcg

SEQ ID NO: 225076 - RNA, 19 nt, Artificial Sequence
  Description of Artificial Sequence: Synthetic oligonucleotide
uccucuauccggagcagcc

SEQ ID NO: 225077 - RNA, 19 nt, Artificial Sequence
  Description of Artificial Sequence: Synthetic oligonucleotide
cauaaucacgugcacauga

SEQ ID NO: 225078 - RNA, 19 nt, Artificial Sequence
  Description of Artificial Sequence: Synthetic oligonucleotide
cauaguguuaggauugcca

SEQ ID NO: 225079 - RNA, 19 nt, Artificial Sequence
  Description of Artificial Sequence: Synthetic oligonucleotide
gaucauucgggcguuggag

SEQ ID NO: 225080 - RNA, 19 nt, Artificial Sequence
  Description of Artificial Sequence: Synthetic oligonucleotide
ucgagucuggaucucacaa

SEQ ID NO: 225081 - RNA, 19 nt, Artificial Sequence
  Description of Artificial Sequence: Synthetic oligonucleotide
ucaccuaugccguaccccu

SEQ ID NO: 225082 - RNA, 19 nt, Artificial Sequence
  Description of Artificial Sequence: Synthetic oligonucleotide
acgcugaaucaucacagag

SEQ ID NO: 225083 - RNA, 19 nt, Artificial Sequence
  Description of Artificial Sequence: Synthetic oligonucleotide
ucccuuauacaaacaggug

SEQ ID NO: 225084 - RNA, 19 nt, Artificial Sequence
  Description of Artificial Sequence: Synthetic oligonucleotide
gacgugggucaauuaaaag

SEQ ID NO: 225085 - RNA, 19 nt, Artificial Sequence
  Description of Artificial Sequence: Synthetic oligonucleotide
uuaaccucuuagauucuaa

SEQ ID NO: 225086 - RNA, 19 nt, Artificial Sequence
  Description of Artificial Sequence: Synthetic oligonucleotide
uguuaggauugccaaacuu

SEQ ID NO: 225087 - RNA, 19 nt, Artificial Sequence
  Description of Artificial Sequence: Synthetic oligonucleotide
uucaacucgccaaccuugc

SEQ ID NO: 225088 - RNA, 19 nt, Artificial Sequence
  Description of Artificial Sequence: Synthetic oligonucleotide
cauccuagagacagguaag

SEQ ID NO: 225089 - RNA, 19 nt, Artificial Sequence
  Description of Artificial Sequence: Synthetic oligonucleotide
uaucaacaugcuauauuuc

SEQ ID NO: 225090 - RNA, 19 nt, Artificial Sequence
  Description of Artificial Sequence: Synthetic oligonucleotide
ugcauugggaaaacagauc

SEQ ID NO: 225091 - RNA, 19 nt, Artificial Sequence
  Description of Artificial Sequence: Synthetic oligonucleotide
ugcuuaagccauaucgcaa

SEQ ID NO: 225092 - RNA, 19 nt, Artificial Sequence
  Description of Artificial Sequence: Synthetic oligonucleotide
ucuuagcccaaaauugaua

SEQ ID NO: 225093 - RNA, 19 nt, Artificial Sequence
  Description of Artificial Sequence: Synthetic oligonucleotide
aaucacagccguaugcgca

SEQ ID NO: 225094 - RNA, 19 nt, Artificial Sequence
  Description of Artificial Sequence: Synthetic oligonucleotide
aaaauugcuggagucugau

SEQ ID NO: 225095 - RNA, 19 nt, Artificial Sequence
  Description of Artificial Sequence: Synthetic oligonucleotide
gacuaagucugggacgccg

SEQ ID NO: 225096 - RNA, 19 nt, Artificial Sequence
  Description of Artificial Sequence: Synthetic oligonucleotide
ucggcuuuuaccacauguc

SEQ ID NO: 225097 - RNA, 19 nt, Artificial Sequence
  Description of Artificial Sequence: Synthetic oligonucleotide
ugcucacagcaguauuugg

SEQ ID NO: 225098 - RNA, 19 nt, Artificial Sequence
  Description of Artificial Sequence: Synthetic oligonucleotide
agauucuaaagacgugggu

SEQ ID NO: 225099 - RNA, 19 nt, Artificial Sequence
  Description of Artificial Sequence: Synthetic oligonucleotide
aacuacgcguacaugauua

SEQ ID NO: 225100 - RNA, 19 nt, Artificial Sequence
  Description of Artificial Sequence: Synthetic oligonucleotide
caucuuagcccaaaauuga

SEQ ID NO: 225101 - RNA, 19 nt, Artificial Sequence
  Description of Artificial Sequence: Synthetic oligonucleotide
gagcaucuagcuauguggc

SEQ ID NO: 225102 - RNA, 19 nt, Artificial Sequence
  Description of Artificial Sequence: Synthetic oligonucleotide
ggcuaauguacgcaucacg

SEQ ID NO: 225103 - RNA, 19 nt, Artificial Sequence
  Description of Artificial Sequence: Synthetic oligonucleotide
gggguuaagaggaacuacg

SEQ ID NO: 225104 - RNA, 19 nt, Artificial Sequence
  Description of Artificial Sequence: Synthetic oligonucleotide
gaugaucggcuuuuaccac

SEQ ID NO: 225105 - RNA, 19 nt, Artificial Sequence
  Description of Artificial Sequence: Synthetic oligonucleotide
aauguacgcaucacgugga

SEQ ID NO: 225106 - RNA, 19 nt, Artificial Sequence
  Description of Artificial Sequence: Synthetic oligonucleotide
augaucggcuuuuaccaca

SEQ ID NO: 225107 - RNA, 19 nt, Artificial Sequence
  Description of Artificial Sequence: Synthetic oligonucleotide
agccaaucaugauaggaaa

SEQ ID NO: 225108 - RNA, 19 nt, Artificial Sequence
  Description of Artificial Sequence: Synthetic oligonucleotide
uacgguuugaaaucacguu

SEQ ID NO: 225109 - RNA, 19 nt, Artificial Sequence
  Description of Artificial Sequence: Synthetic oligonucleotide
uguuccagcgcugaagcuc

SEQ ID NO: 225110 - RNA, 19 nt, Artificial Sequence
  Description of Artificial Sequence: Synthetic oligonucleotide
uuagcccaaaauugauacu

SEQ ID NO: 225111 - RNA, 19 nt, Artificial Sequence
  Description of Artificial Sequence: Synthetic oligonucleotide
cuuaccaguuaguaacuga

SEQ ID NO: 225112 - RNA, 19 nt, Artificial Sequence
  Description of Artificial Sequence: Synthetic oligonucleotide
accuaugccguaccccuuc

SEQ ID NO: 225113 - RNA, 19 nt, Artificial Sequence
  Description of Artificial Sequence: Synthetic oligonucleotide
aaaccaagcuuuauugaua

SEQ ID NO: 225114 - RNA, 19 nt, Artificial Sequence
  Description of Artificial Sequence: Synthetic oligonucleotide
aaauccguucugggcuagc

SEQ ID NO: 225115 - RNA, 19 nt, Artificial Sequence
  Description of Artificial Sequence: Synthetic oligonucleotide
uuauuggugaugugaucua

SEQ ID NO: 225116 - RNA, 19 nt, Artificial Sequence
  Description of Artificial Sequence: Synthetic oligonucleotide
auguacgcaucacguggac

SEQ ID NO: 225117 - RNA, 19 nt, Artificial Sequence
  Description of Artificial Sequence: Synthetic oligonucleotide
gaauacccgaagacugcgg

SEQ ID NO: 225118 - RNA, 19 nt, Artificial Sequence
  Description of Artificial Sequence: Synthetic oligonucleotide
auaugguaucaccugcaau

SEQ ID NO: 225119 - RNA, 19 nt, Artificial Sequence
  Description of Artificial Sequence: Synthetic oligonucleotide
acaugaauuacgguuugaa

SEQ ID NO: 225120 - RNA, 19 nt, Artificial Sequence
  Description of Artificial Sequence: Synthetic oligonucleotide
aagacgugggucaauuaaa

SEQ ID NO: 225121 - RNA, 19 nt, Artificial Sequence
  Description of Artificial Sequence: Synthetic oligonucleotide
aagccacccgaauacccga

SEQ ID NO: 225122 - RNA, 19 nt, Artificial Sequence
  Description of Artificial Sequence: Synthetic oligonucleotide
caugaauuacgguuugaaa

SEQ ID NO: 225123 - RNA, 19 nt, Artificial Sequence
  Description of Artificial Sequence: Synthetic oligonucleotide
aucgcaacccauuccccug

SEQ ID NO: 225124 - RNA, 19 nt, Artificial Sequence
  Description of Artificial Sequence: Synthetic oligonucleotide
ggcgaaggugaauccaugg

SEQ ID NO: 225125 - RNA, 19 nt, Artificial Sequence
  Description of Artificial Sequence: Synthetic oligonucleotide
aguugacguagaaucagug

SEQ ID NO: 225126 - RNA, 19 nt, Artificial Sequence
  Description of Artificial Sequence: Synthetic oligonucleotide
gcuuaagccauaucgcaac

SEQ ID NO: 225127 - RNA, 19 nt, Artificial Sequence
  Description of Artificial Sequence: Synthetic oligonucleotide
cugcuuaagccauaucgca

SEQ ID NO: 225128 - RNA, 19 nt, Artificial Sequence
  Description of Artificial Sequence: Synthetic oligonucleotide
cucuauccggagcagccgc

SEQ ID NO: 225129 - RNA, 19 nt, Artificial Sequence
  Description of Artificial Sequence: Synthetic oligonucleotide
aaggcaucuuagcccaaaa

SEQ ID NO: 225130 - RNA, 19 nt, Artificial Sequence
  Description of Artificial Sequence: Synthetic oligonucleotide
cagucuauuguaaacggcu

SEQ ID NO: 225131 - RNA, 19 nt, Artificial Sequence
  Description of Artificial Sequence: Synthetic oligonucleotide
guacgcaucacguggacua

SEQ ID NO: 225132 - RNA, 19 nt, Artificial Sequence
  Description of Artificial Sequence: Synthetic oligonucleotide
cauaacucccuggauguuc

SEQ ID NO: 225133 - RNA, 19 nt, Artificial Sequence
  Description of Artificial Sequence: Synthetic oligonucleotide
ucauaguguuaggauugcc

SEQ ID NO: 225134 - RNA, 19 nt, Artificial Sequence
  Description of Artificial Sequence: Synthetic oligonucleotide
uaguguuaggauugccaaa

SEQ ID NO: 225135 - RNA, 19 nt, Artificial Sequence
  Description of Artificial Sequence: Synthetic oligonucleotide
ugaucggcuuuuaccacau

SEQ ID NO: 225136 - RNA, 19 nt, Artificial Sequence
  Description of Artificial Sequence: Synthetic oligonucleotide
aaauugcuggagucugauu

SEQ ID NO: 225137 - RNA, 19 nt, Artificial Sequence
  Description of Artificial Sequence: Synthetic oligonucleotide
gcaaacuuucucaagguca

SEQ ID NO: 225138 - RNA, 19 nt, Artificial Sequence
  Description of Artificial Sequence: Synthetic oligonucleotide
auucaagccgaugcacauc

SEQ ID NO: 225139 - RNA, 19 nt, Artificial Sequence
  Description of Artificial Sequence: Synthetic oligonucleotide
ucuuaaccucuuagauucu

SEQ ID NO: 225140 - RNA, 19 nt, Artificial Sequence
  Description of Artificial Sequence: Synthetic oligonucleotide
cacccgaauacccgaagac

SEQ ID NO: 225141 - RNA, 19 nt, Artificial Sequence
  Description of Artificial Sequence: Synthetic oligonucleotide
agaucauucgggcguugga

SEQ ID NO: 225142 - RNA, 19 nt, Artificial Sequence
  Description of Artificial Sequence: Synthetic oligonucleotide
caugucaucaguugacgua

SEQ ID NO: 225143 - RNA, 19 nt, Artificial Sequence
  Description of Artificial Sequence: Synthetic oligonucleotide
auuaugacuugauccucua

SEQ ID NO: 225144 - RNA, 19 nt, Artificial Sequence
  Description of Artificial Sequence: Synthetic oligonucleotide
agccuuuaaaauccugguu

SEQ ID NO: 225145 - RNA, 19 nt, Artificial Sequence
  Description of Artificial Sequence: Synthetic oligonucleotide
uuacacgcugaaucaucac

SEQ ID NO: 225146 - RNA, 19 nt, Artificial Sequence
  Description of Artificial Sequence: Synthetic oligonucleotide
caucacguggacuaagucu

SEQ ID NO: 225147 - RNA, 19 nt, Artificial Sequence
  Description of Artificial Sequence: Synthetic oligonucleotide
auguaagggcucauaaaga

SEQ ID NO: 225148 - RNA, 19 nt, Artificial Sequence
  Description of Artificial Sequence: Synthetic oligonucleotide
acucaucgcuugccgcccc

SEQ ID NO: 225149 - RNA, 19 nt, Artificial Sequence
  Description of Artificial Sequence: Synthetic oligonucleotide
agcaucuagcuauguggcu

SEQ ID NO: 225150 - RNA, 19 nt, Artificial Sequence
  Description of Artificial Sequence: Synthetic oligonucleotide
uagguaaauucaagccgau

SEQ ID NO: 225151 - RNA, 19 nt, Artificial Sequence
  Description of Artificial Sequence: Synthetic oligonucleotide
ucgcaacccauuccccugc

SEQ ID NO: 225152 - RNA, 19 nt, Artificial Sequence
  Description of Artificial Sequence: Synthetic oligonucleotide
cccgaauacccgaagacug

SEQ ID NO: 225153 - RNA, 19 nt, Artificial Sequence
  Description of Artificial Sequence: Synthetic oligonucleotide
cugaaucaucacagagccc

SEQ ID NO: 225154 - RNA, 19 nt, Artificial Sequence
  Description of Artificial Sequence: Synthetic oligonucleotide
guugacguagaaucagugu

SEQ ID NO: 225155 - RNA, 19 nt, Artificial Sequence
  Description of Artificial Sequence: Synthetic oligonucleotide
cucccauuaugacuugauc

SEQ ID NO: 225156 - RNA, 19 nt, Artificial Sequence
  Description of Artificial Sequence: Synthetic oligonucleotide
uaaagacgugggucaauua

SEQ ID NO: 225157 - RNA, 19 nt, Artificial Sequence
  Description of Artificial Sequence: Synthetic oligonucleotide
acuggcuaauguacgcauc

SEQ ID NO: 225158 - RNA, 19 nt, Artificial Sequence
  Description of Artificial Sequence: Synthetic oligonucleotide
guugacccacuucuaucug

SEQ ID NO: 225159 - RNA, 19 nt, Artificial Sequence
  Description of Artificial Sequence: Synthetic oligonucleotide
aucacagccguaugcgcau

SEQ ID NO: 225160 - RNA, 19 nt, Artificial Sequence
  Description of Artificial Sequence: Synthetic oligonucleotide
ggacucaucgcuugccgcc

SEQ ID NO: 225161 - RNA, 19 nt, Artificial Sequence
  Description of Artificial Sequence: Synthetic oligonucleotide
uguacgcaucacguggacu

SEQ ID NO: 225162 - RNA, 19 nt, Artificial Sequence
  Description of Artificial Sequence: Synthetic oligonucleotide
acguagaaucagugucauc

SEQ ID NO: 225163 - RNA, 19 nt, Artificial Sequence
  Description of Artificial Sequence: Synthetic oligonucleotide
aggcgccgaggacucaucg

SEQ ID NO: 225164 - RNA, 19 nt, Artificial Sequence
  Description of Artificial Sequence: Synthetic oligonucleotide
ccugcaauacucugggcug

SEQ ID NO: 225165 - RNA, 19 nt, Artificial Sequence
  Description of Artificial Sequence: Synthetic oligonucleotide
acccgaauacccgaagacu

SEQ ID NO: 225166 - RNA, 19 nt, Artificial Sequence
  Description of Artificial Sequence: Synthetic oligonucleotide
gcaucuagcuauguggcug

SEQ ID NO: 225167 - RNA, 19 nt, Artificial Sequence
  Description of Artificial Sequence: Synthetic oligonucleotide
cucuucguuucccaugaca

SEQ ID NO: 225168 - RNA, 19 nt, Artificial Sequence
  Description of Artificial Sequence: Synthetic oligonucleotide
cagaucauucgggcguugg

SEQ ID NO: 225169 - RNA, 19 nt, Artificial Sequence
  Description of Artificial Sequence: Synthetic oligonucleotide
ucuagcuauguggcugcug

SEQ ID NO: 225170 - RNA, 19 nt, Artificial Sequence
  Description of Artificial Sequence: Synthetic oligonucleotide
auucgggcguuggagcggg

SEQ ID NO: 225171 - RNA, 19 nt, Artificial Sequence
  Description of Artificial Sequence: Synthetic oligonucleotide
cauuaugacuugauccucu

SEQ ID NO: 225172 - RNA, 19 nt, Artificial Sequence
  Description of Artificial Sequence: Synthetic oligonucleotide
gcgaaggugaauccauggc

SEQ ID NO: 225173 - RNA, 19 nt, Artificial Sequence
  Description of Artificial Sequence: Synthetic oligonucleotide
aaaccuguucugaucccau

SEQ ID NO: 225174 - RNA, 19 nt, Artificial Sequence
  Description of Artificial Sequence: Synthetic oligonucleotide
cucgcggcucagaucauuc

SEQ ID NO: 225175 - RNA, 19 nt, Artificial Sequence
  Description of Artificial Sequence: Synthetic oligonucleotide
uucuaaagacgugggucaa

SEQ ID NO: 225176 - RNA, 19 nt, Artificial Sequence
  Description of Artificial Sequence: Synthetic oligonucleotide
ggguuaagaggaacuacgc

SEQ ID NO: 225177 - RNA, 19 nt, Artificial Sequence
  Description of Artificial Sequence: Synthetic oligonucleotide
acuacgcguacaugauuaa

SEQ ID NO: 225178 - RNA, 19 nt, Artificial Sequence
  Description of Artificial Sequence: Synthetic oligonucleotide
cugcaauacucugggcugc

SEQ ID NO: 225179 - RNA, 19 nt, Artificial Sequence
  Description of Artificial Sequence: Synthetic oligonucleotide
gacucaucgcuugccgccc

SEQ ID NO: 225180 - RNA, 19 nt, Artificial Sequence
  Description of Artificial Sequence: Synthetic oligonucleotide
ucuaaagacgugggucaau

SEQ ID NO: 225181 - RNA, 19 nt, Artificial Sequence
  Description of Artificial Sequence: Synthetic oligonucleotide
acguuuacauaaguuucaa

SEQ ID NO: 225182 - RNA, 19 nt, Artificial Sequence
  Description of Artificial Sequence: Synthetic oligonucleotide
uacauuccgcuugcuugcc

SEQ ID NO: 225183 - RNA, 19 nt, Artificial Sequence
  Description of Artificial Sequence: Synthetic oligonucleotide
gcagucuccuacuguguag

SEQ ID NO: 225184 - RNA, 19 nt, Artificial Sequence
  Description of Artificial Sequence: Synthetic oligonucleotide
cugcuuucccuaucccaac

SEQ ID NO: 225185 - RNA, 19 nt, Artificial Sequence
  Description of Artificial Sequence: Synthetic oligonucleotide
agacgugggucaauuaaaa

SEQ ID NO: 225186 - RNA, 19 nt, Artificial Sequence
  Description of Artificial Sequence: Synthetic oligonucleotide
uccuacuguguaggaagcu

SEQ ID NO: 225187 - RNA, 19 nt, Artificial Sequence
  Description of Artificial Sequence: Synthetic oligonucleotide
gaggaacuacgcguacaug

SEQ ID NO: 225188 - RNA, 19 nt, Artificial Sequence
  Description of Artificial Sequence: Synthetic oligonucleotide
ugcaauacucugggcugca

SEQ ID NO: 225189 - RNA, 19 nt, Artificial Sequence
  Description of Artificial Sequence: Synthetic oligonucleotide
cuaagucugggacgccguc

SEQ ID NO: 225190 - RNA, 19 nt, Artificial Sequence
  Description of Artificial Sequence: Synthetic oligonucleotide
ccaagccacccgaauaccc

SEQ ID NO: 225191 - RNA, 19 nt, Artificial Sequence
  Description of Artificial Sequence: Synthetic oligonucleotide
agcccaaaauugauacucu

SEQ ID NO: 225192 - RNA, 19 nt, Artificial Sequence
  Description of Artificial Sequence: Synthetic oligonucleotide
aagccauaucgcaacccau

SEQ ID NO: 225193 - RNA, 19 nt, Artificial Sequence
  Description of Artificial Sequence: Synthetic oligonucleotide
cauucgggcguuggagcgg

SEQ ID NO: 225194 - RNA, 19 nt, Artificial Sequence
  Description of Artificial Sequence: Synthetic oligonucleotide
ugacucucauguguucauc

SEQ ID NO: 225195 - RNA, 19 nt, Artificial Sequence
  Description of Artificial Sequence: Synthetic oligonucleotide
ccgaauacccgaagacugc

SEQ ID NO: 225196 - RNA, 19 nt, Artificial Sequence
  Description of Artificial Sequence: Synthetic oligonucleotide
gcugcuuaccaguuaguaa

SEQ ID NO: 225197 - RNA, 19 nt, Artificial Sequence
  Description of Artificial Sequence: Synthetic oligonucleotide
gcaagaauaaugaacugau

SEQ ID NO: 225198 - RNA, 19 nt, Artificial Sequence
  Description of Artificial Sequence: Synthetic oligonucleotide
cauuccgcuugcuugccaa

SEQ ID NO: 225199 - RNA, 19 nt, Artificial Sequence
  Description of Artificial Sequence: Synthetic oligonucleotide
acuaagucugggacgccgu

SEQ ID NO: 225200 - RNA, 19 nt, Artificial Sequence
  Description of Artificial Sequence: Synthetic oligonucleotide
cccuuauacaaacaggugu

SEQ ID NO: 225201 - RNA, 19 nt, Artificial Sequence
  Description of Artificial Sequence: Synthetic oligonucleotide
acauuccgcuugcuugcca

SEQ ID NO: 225202 - RNA, 19 nt, Artificial Sequence
  Description of Artificial Sequence: Synthetic oligonucleotide
cggguuacuugguuugugg

SEQ ID NO: 225203 - RNA, 19 nt, Artificial Sequence
  Description of Artificial Sequence: Synthetic oligonucleotide
ccaguuaguaacugaaugu

SEQ ID NO: 225204 - RNA, 19 nt, Artificial Sequence
  Description of Artificial Sequence: Synthetic oligonucleotide
gucgacuacuucauugcaa

SEQ ID NO: 225205 - RNA, 19 nt, Artificial Sequence
  Description of Artificial Sequence: Synthetic oligonucleotide
ucagaucauucgggcguug

SEQ ID NO: 225206 - RNA, 19 nt, Artificial Sequence
  Description of Artificial Sequence: Synthetic oligonucleotide
aggugaauccauggcuaga

SEQ ID NO: 225207 - RNA, 19 nt, Artificial Sequence
  Description of Artificial Sequence: Synthetic oligonucleotide
gacccacuucuaucugcac

SEQ ID NO: 225208 - RNA, 19 nt, Artificial Sequence
  Description of Artificial Sequence: Synthetic oligonucleotide
uuccagcggguuacuuggu

SEQ ID NO: 225209 - RNA, 19 nt, Artificial Sequence
  Description of Artificial Sequence: Synthetic oligonucleotide
cuuaaccucuuagauucua

SEQ ID NO: 225210 - RNA, 19 nt, Artificial Sequence
  Description of Artificial Sequence: Synthetic oligonucleotide
ggacacauuuguaaucgaa

SEQ ID NO: 225211 - RNA, 19 nt, Artificial Sequence
  Description of Artificial Sequence: Synthetic oligonucleotide
uacgcaucacguggacuaa

SEQ ID NO: 225212 - RNA, 19 nt, Artificial Sequence
  Description of Artificial Sequence: Synthetic oligonucleotide
gcuuaccaguuaguaacug

SEQ ID NO: 225213 - RNA, 19 nt, Artificial Sequence
  Description of Artificial Sequence: Synthetic oligonucleotide
cacaucuaucauaguguua

SEQ ID NO: 225214 - RNA, 19 nt, Artificial Sequence
  Description of Artificial Sequence: Synthetic oligonucleotide
cgaauacccgaagacugcg

SEQ ID NO: 225215 - RNA, 19 nt, Artificial Sequence
  Description of Artificial Sequence: Synthetic oligonucleotide
gggcggggucccuuggacg

SEQ ID NO: 225216 - RNA, 19 nt, Artificial Sequence
  Description of Artificial Sequence: Synthetic oligonucleotide
gaacuacgcguacaugauu

SEQ ID NO: 225217 - RNA, 19 nt, Artificial Sequence
  Description of Artificial Sequence: Synthetic oligonucleotide
gacguagaaucagugucau

SEQ ID NO: 225218 - RNA, 19 nt, Artificial Sequence
  Description of Artificial Sequence: Synthetic oligonucleotide
cuuggacggccggggaggc

SEQ ID NO: 225219 - RNA, 19 nt, Artificial Sequence
  Description of Artificial Sequence: Synthetic oligonucleotide
cuaaagacgugggucaauu

SEQ ID NO: 225220 - RNA, 19 nt, Artificial Sequence
  Description of Artificial Sequence: Synthetic oligonucleotide
cuacgcguacaugauuaaa

SEQ ID NO: 225221 - RNA, 19 nt, Artificial Sequence
  Description of Artificial Sequence: Synthetic oligonucleotide
gcaugacuauaucuguugu

SEQ ID NO: 225222 - RNA, 19 nt, Artificial Sequence
  Description of Artificial Sequence: Synthetic oligonucleotide
gugggucaauuaaaaguua

SEQ ID NO: 225223 - RNA, 19 nt, Artificial Sequence
  Description of Artificial Sequence: Synthetic oligonucleotide
agcggguuacuugguuugu

SEQ ID NO: 225224 - RNA, 19 nt, Artificial Sequence
  Description of Artificial Sequence: Synthetic oligonucleotide
agagagccauuuacacgcu

SEQ ID NO: 225225 - RNA, 19 nt, Artificial Sequence
  Description of Artificial Sequence: Synthetic oligonucleotide
ccauuaugacuugauccuc

SEQ ID NO: 225226 - RNA, 19 nt, Artificial Sequence
  Description of Artificial Sequence: Synthetic oligonucleotide
ggucccuuggacggccggg

SEQ ID NO: 225227 - RNA, 19 nt, Artificial Sequence
  Description of Artificial Sequence: Synthetic oligonucleotide
ccgaugcacaucuuacuga

SEQ ID NO: 225228 - RNA, 19 nt, Artificial Sequence
  Description of Artificial Sequence: Synthetic oligonucleotide
ggguuacuugguuuguggu

SEQ ID NO: 225229 - RNA, 19 nt, Artificial Sequence
  Description of Artificial Sequence: Synthetic oligonucleotide
gcaaaccaaucacagccgu

SEQ ID NO: 225230 - RNA, 19 nt, Artificial Sequence
  Description of Artificial Sequence: Synthetic oligonucleotide
gacugcggccggggcacgg

SEQ ID NO: 225231 - RNA, 19 nt, Artificial Sequence
  Description of Artificial Sequence: Synthetic oligonucleotide
ccucuauccggagcagccg

SEQ ID NO: 225232 - RNA, 19 nt, Artificial Sequence
  Description of Artificial Sequence: Synthetic oligonucleotide
aggugucgacuacuucauu

SEQ ID NO: 225233 - RNA, 19 nt, Artificial Sequence
  Description of Artificial Sequence: Synthetic oligonucleotide
gcuguacucuuggaggcga

SEQ ID NO: 225234 - RNA, 19 nt, Artificial Sequence
  Description of Artificial Sequence: Synthetic oligonucleotide
caggugucgacuacuucau

SEQ ID NO: 225235 - RNA, 19 nt, Artificial Sequence
  Description of Artificial Sequence: Synthetic oligonucleotide
cgugggucaauuaaaaguu

SEQ ID NO: 225236 - RNA, 19 nt, Artificial Sequence
  Description of Artificial Sequence: Synthetic oligonucleotide
cgugcacaugagcaucuag

SEQ ID NO: 225237 - RNA, 19 nt, Artificial Sequence
  Description of Artificial Sequence: Synthetic oligonucleotide
aucuagcuauguggcugcu

SEQ ID NO: 225238 - RNA, 19 nt, Artificial Sequence
  Description of Artificial Sequence: Synthetic oligonucleotide
gggcauuaugcuuuuccau

SEQ ID NO: 225239 - RNA, 19 nt, Artificial Sequence
  Description of Artificial Sequence: Synthetic oligonucleotide
gcaggugcggcaagguuga

SEQ ID NO: 225240 - RNA, 19 nt, Artificial Sequence
  Description of Artificial Sequence: Synthetic oligonucleotide
gugcggcaagguugagcug

SEQ ID NO: 225241 - RNA, 19 nt, Artificial Sequence
  Description of Artificial Sequence: Synthetic oligonucleotide
ggcucauaaagaggugcaa

SEQ ID NO: 225242 - RNA, 19 nt, Artificial Sequence
  Description of Artificial Sequence: Synthetic oligonucleotide
ggaacuacgcguacaugau

SEQ ID NO: 225243 - RNA, 19 nt, Artificial Sequence
  Description of Artificial Sequence: Synthetic oligonucleotide
gcggguuacuugguuugug

SEQ ID NO: 225244 - RNA, 19 nt, Artificial Sequence
  Description of Artificial Sequence: Synthetic oligonucleotide
agggcccuugacacagcca

SEQ ID NO: 225245 - RNA, 19 nt, Artificial Sequence
  Description of Artificial Sequence: Synthetic oligonucleotide
cucaucgcuugccgcccca

SEQ ID NO: 225246 - RNA, 19 nt, Artificial Sequence
  Description of Artificial Sequence: Synthetic oligonucleotide
gacugcggacccggccggc

SEQ ID NO: 225247 - RNA, 19 nt, Artificial Sequence
  Description of Artificial Sequence: Synthetic oligonucleotide
gacccggccggcgcggaga

SEQ ID NO: 225248 - RNA, 19 nt, Artificial Sequence
  Description of Artificial Sequence: Synthetic oligonucleotide
ccacccgaauacccgaaga

SEQ ID NO: 225249 - RNA, 19 nt, Artificial Sequence
  Description of Artificial Sequence: Synthetic oligonucleotide
cgggguuaagaggaacuac

SEQ ID NO: 225250 - RNA, 19 nt, Artificial Sequence
  Description of Artificial Sequence: Synthetic oligonucleotide
gaggcgccgaggacucauc

SEQ ID NO: 225251 - RNA, 19 nt, Artificial Sequence
  Description of Artificial Sequence: Synthetic oligonucleotide
ccugcauucugaauucguu

SEQ ID NO: 225252 - RNA, 19 nt, Artificial Sequence
  Description of Artificial Sequence: Synthetic oligonucleotide
acgugcacaugagcaucua

SEQ ID NO: 225253 - RNA, 19 nt, Artificial Sequence
  Description of Artificial Sequence: Synthetic oligonucleotide
ggcuagaugaucggcuuuu

SEQ ID NO: 225254 - RNA, 19 nt, Artificial Sequence
  Description of Artificial Sequence: Synthetic oligonucleotide
cucgccaaccuugcaugcu

SEQ ID NO: 225255 - RNA, 19 nt, Artificial Sequence
  Description of Artificial Sequence: Synthetic oligonucleotide
cgaagacugcggacccggc

SEQ ID NO: 225256 - RNA, 19 nt, Artificial Sequence
  Description of Artificial Sequence: Synthetic oligonucleotide
gccgggguuaagaggaacu

SEQ ID NO: 225257 - RNA, 19 nt, Artificial Sequence
  Description of Artificial Sequence: Synthetic oligonucleotide
cacggcguucuggcuccug

SEQ ID NO: 225258 - RNA, 19 nt, Artificial Sequence
  Description of Artificial Sequence: Synthetic oligonucleotide
gcccgggcgaaggagggga

SEQ ID NO: 225259 - RNA, 19 nt, Artificial Sequence
  Description of Artificial Sequence: Synthetic oligonucleotide
cuuggaggcgaaggugaau

SEQ ID NO: 225260 - RNA, 19 nt, Artificial Sequence
  Description of Artificial Sequence: Synthetic oligonucleotide
gcuagaugaucggcuuuua

SEQ ID NO: 225261 - RNA, 19 nt, Artificial Sequence
  Description of Artificial Sequence: Synthetic oligonucleotide
gucccucaccuaugccgua

SEQ ID NO: 225262 - RNA, 19 nt, Artificial Sequence
  Description of Artificial Sequence: Synthetic oligonucleotide
cucagaucauucgggcguu

SEQ ID NO: 225263 - RNA, 19 nt, Artificial Sequence
  Description of Artificial Sequence: Synthetic oligonucleotide
cccgggcgaaggaggggag

SEQ ID NO: 225264 - RNA, 19 nt, Artificial Sequence
  Description of Artificial Sequence: Synthetic oligonucleotide
ccggccggcgcggagacca

SEQ ID NO: 225265 - RNA, 19 nt, Artificial Sequence
  Description of Artificial Sequence: Synthetic oligonucleotide
ccgggguuaagaggaacua

SEQ ID NO: 225266 - RNA, 19 nt, Artificial Sequence
  Description of Artificial Sequence: Synthetic oligonucleotide
caccuaugccguaccccuu

SEQ ID NO: 225267 - RNA, 19 nt, Artificial Sequence
  Description of Artificial Sequence: Synthetic oligonucleotide
ggaggcgccgaggacucau

SEQ ID NO: 225268 - RNA, 19 nt, Artificial Sequence
  Description of Artificial Sequence: Synthetic oligonucleotide
cggcaagguugagcuguac

SEQ ID NO: 225269 - RNA, 19 nt, Artificial Sequence
  Description of Artificial Sequence: Synthetic oligonucleotide
cgacugcggccggggcacg

SEQ ID NO: 225270 - RNA, 19 nt, Artificial Sequence
  Description of Artificial Sequence: Synthetic oligonucleotide
gcgcggagaccacggcguu

SEQ ID NO: 225271 - RNA, 19 nt, Artificial Sequence
  Description of Artificial Sequence: Synthetic oligonucleotide
cgccgaggacucaucgcuu

SEQ ID NO: 225272 - RNA, 19 nt, Artificial Sequence
  Description of Artificial Sequence: Synthetic oligonucleotide
uauacaaucagaaugauac

SEQ ID NO: 225273 - RNA, 19 nt, Artificial Sequence
  Description of Artificial Sequence: Synthetic oligonucleotide
uguucuaacuucuaaaugc

SEQ ID NO: 225274 - RNA, 19 nt, Artificial Sequence
  Description of Artificial Sequence: Synthetic oligonucleotide
cuauguuucuucuugaugg

SEQ ID NO: 225275 - RNA, 19 nt, Artificial Sequence
  Description of Artificial Sequence: Synthetic oligonucleotide
aaucauugcacccacaagu

SEQ ID NO: 225276 - RNA, 19 nt, Artificial Sequence
  Description of Artificial Sequence: Synthetic oligonucleotide
uuugguaagagccacagaa

SEQ ID NO: 225277 - RNA, 19 nt, Artificial Sequence
  Description of Artificial Sequence: Synthetic oligonucleotide
uucauugucacgaauguac

SEQ ID NO: 225278 - RNA, 19 nt, Artificial Sequence
  Description of Artificial Sequence: Synthetic oligonucleotide
uauaauaugauuucaucau

SEQ ID NO: 225279 - RNA, 19 nt, Artificial Sequence
  Description of Artificial Sequence: Synthetic oligonucleotide
agaaucaaucuucauuggc

SEQ ID NO: 225280 - RNA, 19 nt, Artificial Sequence
  Description of Artificial Sequence: Synthetic oligonucleotide
gagauauuaagaucccucg

SEQ ID NO: 225281 - RNA, 19 nt, Artificial Sequence
  Description of Artificial Sequence: Synthetic oligonucleotide
uauaguacacuuuccauga

SEQ ID NO: 225282 - RNA, 19 nt, Artificial Sequence
  Description of Artificial Sequence: Synthetic oligonucleotide
ucaggguaaaauuaguuga

SEQ ID NO: 225283 - RNA, 19 nt, Artificial Sequence
  Description of Artificial Sequence: Synthetic oligonucleotide
aaucccuuuauacguugcc

SEQ ID NO: 225284 - RNA, 19 nt, Artificial Sequence
  Description of Artificial Sequence: Synthetic oligonucleotide
uuuauagggguuaaaauuu

SEQ ID NO: 225285 - RNA, 19 nt, Artificial Sequence
  Description of Artificial Sequence: Synthetic oligonucleotide
uuuaucaaccucacugagg

SEQ ID NO: 225286 - RNA, 19 nt, Artificial Sequence
  Description of Artificial Sequence: Synthetic oligonucleotide
augacaaagucucuacccc

SEQ ID NO: 225287 - RNA, 19 nt, Artificial Sequence
  Description of Artificial Sequence: Synthetic oligonucleotide
acaagcauuaaauauagua

SEQ ID NO: 225288 - RNA, 19 nt, Artificial Sequence
  Description of Artificial Sequence: Synthetic oligonucleotide
auauaguacacuuuccaug

SEQ ID NO: 225289 - RNA, 19 nt, Artificial Sequence
  Description of Artificial Sequence: Synthetic oligonucleotide
aaguggauggcauauuuca

SEQ ID NO: 225290 - RNA, 19 nt, Artificial Sequence
  Description of Artificial Sequence: Synthetic oligonucleotide
cuuggguagagucugaagc

SEQ ID NO: 225291 - RNA, 19 nt, Artificial Sequence
  Description of Artificial Sequence: Synthetic oligonucleotide
aaagcgaaggaagagggag

SEQ ID NO: 225292 - RNA, 19 nt, Artificial Sequence
  Description of Artificial Sequence: Synthetic oligonucleotide
gauagcaaugcccaguaac

SEQ ID NO: 225293 - RNA, 19 nt, Artificial Sequence
  Description of Artificial Sequence: Synthetic oligonucleotide
uaagaucccucgaagagug

SEQ ID NO: 225294 - RNA, 19 nt, Artificial Sequence
  Description of Artificial Sequence: Synthetic oligonucleotide
agaaugauacugcaaagga

SEQ ID NO: 225295 - RNA, 19 nt, Artificial Sequence
  Description of Artificial Sequence: Synthetic oligonucleotide
ugcacuacuuuucggaaag

SEQ ID NO: 225296 - RNA, 19 nt, Artificial Sequence
  Description of Artificial Sequence: Synthetic oligonucleotide
uacaaucagaaugauacug

SEQ ID NO: 225297 - RNA, 19 nt, Artificial Sequence
  Description of Artificial Sequence: Synthetic oligonucleotide
uuaacuacuccaaggccag

SEQ ID NO: 225298 - RNA, 19 nt, Artificial Sequence
  Description of Artificial Sequence: Synthetic oligonucleotide
uugccacugacuuuaaaag

SEQ ID NO: 225299 - RNA, 19 nt, Artificial Sequence
  Description of Artificial Sequence: Synthetic oligonucleotide
cauccuaccacacaguaug

SEQ ID NO: 225300 - RNA, 19 nt, Artificial Sequence
  Description of Artificial Sequence: Synthetic oligonucleotide
aucagaaugauacugcaaa

SEQ ID NO: 225301 - RNA, 19 nt, Artificial Sequence
  Description of Artificial Sequence: Synthetic oligonucleotide
uauacguugccacugacuu

SEQ ID NO: 225302 - RNA, 19 nt, Artificial Sequence
  Description of Artificial Sequence: Synthetic oligonucleotide
cucuaggucaaacaugggg

SEQ ID NO: 225303 - RNA, 19 nt, Artificial Sequence
  Description of Artificial Sequence: Synthetic oligonucleotide
uucggaguuacaaucagaa

SEQ ID NO: 225304 - RNA, 19 nt, Artificial Sequence
  Description of Artificial Sequence: Synthetic oligonucleotide
ucaagcaccugcuuacagg

SEQ ID NO: 225305 - RNA, 19 nt, Artificial Sequence
  Description of Artificial Sequence: Synthetic oligonucleotide
agugagagaaucaaucuuc

SEQ ID NO: 225306 - RNA, 19 nt, Artificial Sequence
  Description of Artificial Sequence: Synthetic oligonucleotide
uuucccugagauauuaaga

SEQ ID NO: 225307 - RNA, 19 nt, Artificial Sequence
  Description of Artificial Sequence: Synthetic oligonucleotide
gcuaaaaugguacaccuag

SEQ ID NO: 225308 - RNA, 19 nt, Artificial Sequence
  Description of Artificial Sequence: Synthetic oligonucleotide
agguaaugcagcauuaugg

SEQ ID NO: 225309 - RNA, 19 nt, Artificial Sequence
  Description of Artificial Sequence: Synthetic oligonucleotide
ugcuaauuguucaacuaug

SEQ ID NO: 225310 - RNA, 19 nt, Artificial Sequence
  Description of Artificial Sequence: Synthetic oligonucleotide
guauccagugaaaagagag

SEQ ID NO: 225311 - RNA, 19 nt, Artificial Sequence
  Description of Artificial Sequence: Synthetic oligonucleotide
aucaagagagcccucuagg

SEQ ID NO: 225312 - RNA, 19 nt, Artificial Sequence
  Description of Artificial Sequence: Synthetic oligonucleotide
aagaaacauguguaggacu

SEQ ID NO: 225313 - RNA, 19 nt, Artificial Sequence
  Description of Artificial Sequence: Synthetic oligonucleotide
uaugcgagcauagucaucu

SEQ ID NO: 225314 - RNA, 19 nt, Artificial Sequence
  Description of Artificial Sequence: Synthetic oligonucleotide
gguaaugcagcauuauggg

SEQ ID NO: 225315 - RNA, 19 nt, Artificial Sequence
  Description of Artificial Sequence: Synthetic oligonucleotide
ugacaaagucucuaccccg

SEQ ID NO: 225316 - RNA, 19 nt, Artificial Sequence
  Description of Artificial Sequence: Synthetic oligonucleotide
auuaucauacuguccacca

SEQ ID NO: 225317 - RNA, 19 nt, Artificial Sequence
  Description of Artificial Sequence: Synthetic oligonucleotide
uagggguuaaaauuuuggc

SEQ ID NO: 225318 - RNA, 19 nt, Artificial Sequence
  Description of Artificial Sequence: Synthetic oligonucleotide
uguucaacuauguuucuuc

SEQ ID NO: 225319 - RNA, 19 nt, Artificial Sequence
  Description of Artificial Sequence: Synthetic oligonucleotide
gagcgcuuaaccuggaugc

SEQ ID NO: 225320 - RNA, 19 nt, Artificial Sequence
  Description of Artificial Sequence: Synthetic oligonucleotide
uccuaguugccccucauca

SEQ ID NO: 225321 - RNA, 19 nt, Artificial Sequence
  Description of Artificial Sequence: Synthetic oligonucleotide
aguucggauagcaaugccc

SEQ ID NO: 225322 - RNA, 19 nt, Artificial Sequence
  Description of Artificial Sequence: Synthetic oligonucleotide
ucagaaugauacugcaaag

SEQ ID NO: 225323 - RNA, 19 nt, Artificial Sequence
  Description of Artificial Sequence: Synthetic oligonucleotide
cacaucugcccaaagacag

SEQ ID NO: 225324 - RNA, 19 nt, Artificial Sequence
  Description of Artificial Sequence: Synthetic oligonucleotide
agggguuaaaauuuuggca

SEQ ID NO: 225325 - RNA, 19 nt, Artificial Sequence
  Description of Artificial Sequence: Synthetic oligonucleotide
gaugcagugggaugucugg

SEQ ID NO: 225326 - RNA, 19 nt, Artificial Sequence
  Description of Artificial Sequence: Synthetic oligonucleotide
ucguauccagugaaaagag

SEQ ID NO: 225327 - RNA, 19 nt, Artificial Sequence
  Description of Artificial Sequence: Synthetic oligonucleotide
guauuuauccaggaccugg

SEQ ID NO: 225328 - RNA, 19 nt, Artificial Sequence
  Description of Artificial Sequence: Synthetic oligonucleotide
acauguguaggacucagga

SEQ ID NO: 225329 - RNA, 19 nt, Artificial Sequence
  Description of Artificial Sequence: Synthetic oligonucleotide
aucauugucaccccaugug

SEQ ID NO: 225330 - RNA, 19 nt, Artificial Sequence
  Description of Artificial Sequence: Synthetic oligonucleotide
cacugacuuuaaaagaugc

SEQ ID NO: 225331 - RNA, 19 nt, Artificial Sequence
  Description of Artificial Sequence: Synthetic oligonucleotide
aaccauaguugcuugcacu

SEQ ID NO: 225332 - RNA, 19 nt, Artificial Sequence
  Description of Artificial Sequence: Synthetic oligonucleotide
acuauguuucuucuugaug

SEQ ID NO: 225333 - RNA, 19 nt, Artificial Sequence
  Description of Artificial Sequence: Synthetic oligonucleotide
uagguaaugcagcauuaug

SEQ ID NO: 225334 - RNA, 19 nt, Artificial Sequence
  Description of Artificial Sequence: Synthetic oligonucleotide
ugcuuacaggaauaccugg

SEQ ID NO: 225335 - RNA, 19 nt, Artificial Sequence
  Description of Artificial Sequence: Synthetic oligonucleotide
cuaaaaugguacaccuagg

SEQ ID NO: 225336 - RNA, 19 nt, Artificial Sequence
  Description of Artificial Sequence: Synthetic oligonucleotide
uugucacgaauguacauga

SEQ ID NO: 225337 - RNA, 19 nt, Artificial Sequence
  Description of Artificial Sequence: Synthetic oligonucleotide
uucaacagguaacagucuc

SEQ ID NO: 225338 - RNA, 19 nt, Artificial Sequence
  Description of Artificial Sequence: Synthetic oligonucleotide
aggaacucaucuuagcaca

SEQ ID NO: 225339 - RNA, 19 nt, Artificial Sequence
  Description of Artificial Sequence: Synthetic oligonucleotide
uccauuuuguagcuccuca

SEQ ID NO: 225340 - RNA, 19 nt, Artificial Sequence
  Description of Artificial Sequence: Synthetic oligonucleotide
auagggguuaaaauuuugg

SEQ ID NO: 225341 - RNA, 19 nt, Artificial Sequence
  Description of Artificial Sequence: Synthetic oligonucleotide
cagaaugauacugcaaagg

SEQ ID NO: 225342 - RNA, 19 nt, Artificial Sequence
  Description of Artificial Sequence: Synthetic oligonucleotide
uauuuauccaggaccugga

SEQ ID NO: 225343 - RNA, 19 nt, Artificial Sequence
  Description of Artificial Sequence: Synthetic oligonucleotide
cauaguguuccucaugcac

SEQ ID NO: 225344 - RNA, 19 nt, Artificial Sequence
  Description of Artificial Sequence: Synthetic oligonucleotide
augcuggcggucucgaacc

SEQ ID NO: 225345 - RNA, 19 nt, Artificial Sequence
  Description of Artificial Sequence: Synthetic oligonucleotide
aaucgaggucucugaauag

SEQ ID NO: 225346 - RNA, 19 nt, Artificial Sequence
  Description of Artificial Sequence: Synthetic oligonucleotide
uugcuaauuguucaacuau

SEQ ID NO: 225347 - RNA, 19 nt, Artificial Sequence
  Description of Artificial Sequence: Synthetic oligonucleotide
uggagaaagacuccaucac

SEQ ID NO: 225348 - RNA, 19 nt, Artificial Sequence
  Description of Artificial Sequence: Synthetic oligonucleotide
ucgaagagugucaaaccca

SEQ ID NO: 225349 - RNA, 19 nt, Artificial Sequence
  Description of Artificial Sequence: Synthetic oligonucleotide
caccuuuacuucuggagcg

SEQ ID NO: 225350 - RNA, 19 nt, Artificial Sequence
  Description of Artificial Sequence: Synthetic oligonucleotide
uuaaaagaugcagugggau

SEQ ID NO: 225351 - RNA, 19 nt, Artificial Sequence
  Description of Artificial Sequence: Synthetic oligonucleotide
auacucugcacgguugucc

SEQ ID NO: 225352 - RNA, 19 nt, Artificial Sequence
  Description of Artificial Sequence: Synthetic oligonucleotide
uuauacguugccacugacu

SEQ ID NO: 225353 - RNA, 19 nt, Artificial Sequence
  Description of Artificial Sequence: Synthetic oligonucleotide
auaccugggcaacuuuagc

SEQ ID NO: 225354 - RNA, 19 nt, Artificial Sequence
  Description of Artificial Sequence: Synthetic oligonucleotide
acagguacgacucgggcca

SEQ ID NO: 225355 - RNA, 19 nt, Artificial Sequence
  Description of Artificial Sequence: Synthetic oligonucleotide
uacagguacgacucgggcc

SEQ ID NO: 225356 - RNA, 19 nt, Artificial Sequence
  Description of Artificial Sequence: Synthetic oligonucleotide
auacacagugcagggagcc

SEQ ID NO: 225357 - RNA, 19 nt, Artificial Sequence
  Description of Artificial Sequence: Synthetic oligonucleotide
ugucuauggacuugcagaa

SEQ ID NO: 225358 - RNA, 19 nt, Artificial Sequence
  Description of Artificial Sequence: Synthetic oligonucleotide
cuguaguaaacacuggguc

SEQ ID NO: 225359 - RNA, 19 nt, Artificial Sequence
  Description of Artificial Sequence: Synthetic oligonucleotide
gaaucauugcacccacaag

SEQ ID NO: 225360 - RNA, 19 nt, Artificial Sequence
  Description of Artificial Sequence: Synthetic oligonucleotide
augcuaaaaugguacaccu

SEQ ID NO: 225361 - RNA, 19 nt, Artificial Sequence
  Description of Artificial Sequence: Synthetic oligonucleotide
uccuauagguaaugcagca

SEQ ID NO: 225362 - RNA, 19 nt, Artificial Sequence
  Description of Artificial Sequence: Synthetic oligonucleotide
auggacucgcuguagccac

SEQ ID NO: 225363 - RNA, 19 nt, Artificial Sequence
  Description of Artificial Sequence: Synthetic oligonucleotide
ugugcagcauacacagugc

SEQ ID NO: 225364 - RNA, 19 nt, Artificial Sequence
  Description of Artificial Sequence: Synthetic oligonucleotide
ucaagagagcccucuaggu

SEQ ID NO: 225365 - RNA, 19 nt, Artificial Sequence
  Description of Artificial Sequence: Synthetic oligonucleotide
auaauaugauuucaucauu

SEQ ID NO: 225366 - RNA, 19 nt, Artificial Sequence
  Description of Artificial Sequence: Synthetic oligonucleotide
aagcgaaggaagagggagc

SEQ ID NO: 225367 - RNA, 19 nt, Artificial Sequence
  Description of Artificial Sequence: Synthetic oligonucleotide
ucuuagcacacaucugccc

SEQ ID NO: 225368 - RNA, 19 nt, Artificial Sequence
  Description of Artificial Sequence: Synthetic oligonucleotide
aacuauguuucuucuugau

SEQ ID NO: 225369 - RNA, 19 nt, Artificial Sequence
  Description of Artificial Sequence: Synthetic oligonucleotide
accaacaaacuugacuuuc

SEQ ID NO: 225370 - RNA, 19 nt, Artificial Sequence
  Description of Artificial Sequence: Synthetic oligonucleotide
ucaucuuagcacacaucug

SEQ ID NO: 225371 - RNA, 19 nt, Artificial Sequence
  Description of Artificial Sequence: Synthetic oligonucleotide
ugcauaugcuaaaauggua

SEQ ID NO: 225372 - RNA, 19 nt, Artificial Sequence
  Description of Artificial Sequence: Synthetic oligonucleotide
acagcaguacucuugcuaa

SEQ ID NO: 225373 - RNA, 19 nt, Artificial Sequence
  Description of Artificial Sequence: Synthetic oligonucleotide
uggcauauacaugacacaa

SEQ ID NO: 225374 - RNA, 19 nt, Artificial Sequence
  Description of Artificial Sequence: Synthetic oligonucleotide
aucucugcuauggacucgc

SEQ ID NO: 225375 - RNA, 19 nt, Artificial Sequence
  Description of Artificial Sequence: Synthetic oligonucleotide
ucccuuuauacguugccac

SEQ ID NO: 225376 - RNA, 19 nt, Artificial Sequence
  Description of Artificial Sequence: Synthetic oligonucleotide
gguccuauagguaaugcag

SEQ ID NO: 225377 - RNA, 19 nt, Artificial Sequence
  Description of Artificial Sequence: Synthetic oligonucleotide
aagcgccccauaguguucc

SEQ ID NO: 225378 - RNA, 19 nt, Artificial Sequence
  Description of Artificial Sequence: Synthetic oligonucleotide
cuuagggcaaugaugggga

SEQ ID NO: 225379 - RNA, 19 nt, Artificial Sequence
  Description of Artificial Sequence: Synthetic oligonucleotide
uuuauacguugccacugac

SEQ ID NO: 225380 - RNA, 19 nt, Artificial Sequence
  Description of Artificial Sequence: Synthetic oligonucleotide
ugaauagcauuuguuguuc

SEQ ID NO: 225381 - RNA, 19 nt, Artificial Sequence
  Description of Artificial Sequence: Synthetic oligonucleotide
cccucuaggucaaacaugg

SEQ ID NO: 225382 - RNA, 19 nt, Artificial Sequence
  Description of Artificial Sequence: Synthetic oligonucleotide
caccaaaaugccucaauuc

SEQ ID NO: 225383 - RNA, 19 nt, Artificial Sequence
  Description of Artificial Sequence: Synthetic oligonucleotide
uuauggggaagaagcgccc

SEQ ID NO: 225384 - RNA, 19 nt, Artificial Sequence
  Description of Artificial Sequence: Synthetic oligonucleotide
agggguacagguacgacuc

SEQ ID NO: 225385 - RNA, 19 nt, Artificial Sequence
  Description of Artificial Sequence: Synthetic oligonucleotide
ucggaguuacaaucagaag

SEQ ID NO: 225386 - RNA, 19 nt, Artificial Sequence
  Description of Artificial Sequence: Synthetic oligonucleotide
cacgaauguacaugagccc

SEQ ID NO: 225387 - RNA, 19 nt, Artificial Sequence
  Description of Artificial Sequence: Synthetic oligonucleotide
uuuuauuuauagggguuaa

SEQ ID NO: 225388 - RNA, 19 nt, Artificial Sequence
  Description of Artificial Sequence: Synthetic oligonucleotide
cucaucuuagcacacaucu

SEQ ID NO: 225389 - RNA, 19 nt, Artificial Sequence
  Description of Artificial Sequence: Synthetic oligonucleotide
agaaguggauggcauauuu

SEQ ID NO: 225390 - RNA, 19 nt, Artificial Sequence
  Description of Artificial Sequence: Synthetic oligonucleotide
caugacacaagcauuaaau

SEQ ID NO: 225391 - RNA, 19 nt, Artificial Sequence
  Description of Artificial Sequence: Synthetic oligonucleotide
guucaaucccuuuauacgu

SEQ ID NO: 225392 - RNA, 19 nt, Artificial Sequence
  Description of Artificial Sequence: Synthetic oligonucleotide
gaauguacaugagcccagg

SEQ ID NO: 225393 - RNA, 19 nt, Artificial Sequence
  Description of Artificial Sequence: Synthetic oligonucleotide
gcgagauucaggcucagag

SEQ ID NO: 225394 - RNA, 19 nt, Artificial Sequence
  Description of Artificial Sequence: Synthetic oligonucleotide
aacccaccuuuacuucugg

SEQ ID NO: 225395 - RNA, 19 nt, Artificial Sequence
  Description of Artificial Sequence: Synthetic oligonucleotide
uugccagccggacauacuc

SEQ ID NO: 225396 - RNA, 19 nt, Artificial Sequence
  Description of Artificial Sequence: Synthetic oligonucleotide
caucaagagagcccucuag

SEQ ID NO: 225397 - RNA, 19 nt, Artificial Sequence
  Description of Artificial Sequence: Synthetic oligonucleotide
acgaauguacaugagccca

SEQ ID NO: 225398 - RNA, 19 nt, Artificial Sequence
  Description of Artificial Sequence: Synthetic oligonucleotide
gaagagggagcguuccgug

SEQ ID NO: 225399 - RNA, 19 nt, Artificial Sequence
  Description of Artificial Sequence: Synthetic oligonucleotide
uuaucauacuguccaccaa

SEQ ID NO: 225400 - RNA, 19 nt, Artificial Sequence
  Description of Artificial Sequence: Synthetic oligonucleotide
cucguauccagugaaaaga

SEQ ID NO: 225401 - RNA, 19 nt, Artificial Sequence
  Description of Artificial Sequence: Synthetic oligonucleotide
cauucggaguuacaaucag

SEQ ID NO: 225402 - RNA, 19 nt, Artificial Sequence
  Description of Artificial Sequence: Synthetic oligonucleotide
auacgucuccauccucccc

SEQ ID NO: 225403 - RNA, 19 nt, Artificial Sequence
  Description of Artificial Sequence: Synthetic oligonucleotide
uacguugccacugacuuua

SEQ ID NO: 225404 - RNA, 19 nt, Artificial Sequence
  Description of Artificial Sequence: Synthetic oligonucleotide
caucaaaugcacuugacau

SEQ ID NO: 225405 - RNA, 19 nt, Artificial Sequence
  Description of Artificial Sequence: Synthetic oligonucleotide
ugucacgaauguacaugag

SEQ ID NO: 225406 - RNA, 19 nt, Artificial Sequence
  Description of Artificial Sequence: Synthetic oligonucleotide
caaguaaucuuggguagag

SEQ ID NO: 225407 - RNA, 19 nt, Artificial Sequence
  Description of Artificial Sequence: Synthetic oligonucleotide
ucccaguucggauagcaau

SEQ ID NO: 225408 - RNA, 19 nt, Artificial Sequence
  Description of Artificial Sequence: Synthetic oligonucleotide
cugcuuacaggaauaccug

SEQ ID NO: 225409 - RNA, 19 nt, Artificial Sequence
  Description of Artificial Sequence: Synthetic oligonucleotide
acuguaguaaacacugggu

SEQ ID NO: 225410 - RNA, 19 nt, Artificial Sequence
  Description of Artificial Sequence: Synthetic oligonucleotide
agcuaugcgagcauaguca

SEQ ID NO: 225411 - RNA, 19 nt, Artificial Sequence
  Description of Artificial Sequence: Synthetic oligonucleotide
uauggacucgcuguagcca

SEQ ID NO: 225412 - RNA, 19 nt, Artificial Sequence
  Description of Artificial Sequence: Synthetic oligonucleotide
gagcuaugcgagcauaguc

SEQ ID NO: 225413 - RNA, 19 nt, Artificial Sequence
  Description of Artificial Sequence: Synthetic oligonucleotide
gcauaugcuaaaaugguac

SEQ ID NO: 225414 - RNA, 19 nt, Artificial Sequence
  Description of Artificial Sequence: Synthetic oligonucleotide
ugcgagcauagucaucugu

SEQ ID NO: 225415 - RNA, 19 nt, Artificial Sequence
  Description of Artificial Sequence: Synthetic oligonucleotide
ucauugcacccacaaguaa

SEQ ID NO: 225416 - RNA, 19 nt, Artificial Sequence
  Description of Artificial Sequence: Synthetic oligonucleotide
uccucaucaaaugcacuug

SEQ ID NO: 225417 - RNA, 19 nt, Artificial Sequence
  Description of Artificial Sequence: Synthetic oligonucleotide
caugcuggcggucucgaac

SEQ ID NO: 225418 - RNA, 19 nt, Artificial Sequence
  Description of Artificial Sequence: Synthetic oligonucleotide
aagagggagcguuccgugu

SEQ ID NO: 225419 - RNA, 19 nt, Artificial Sequence
  Description of Artificial Sequence: Synthetic oligonucleotide
auugucaccccauguguaa

SEQ ID NO: 225420 - RNA, 19 nt, Artificial Sequence
  Description of Artificial Sequence: Synthetic oligonucleotide
uggggauacagggacaaaa

SEQ ID NO: 225421 - RNA, 19 nt, Artificial Sequence
  Description of Artificial Sequence: Synthetic oligonucleotide
ucaaugcaggguauuccuc

SEQ ID NO: 225422 - RNA, 19 nt, Artificial Sequence
  Description of Artificial Sequence: Synthetic oligonucleotide
cauacgucuccauccuccc

SEQ ID NO: 225423 - RNA, 19 nt, Artificial Sequence
  Description of Artificial Sequence: Synthetic oligonucleotide
uuuacuucuggagcgcuua

SEQ ID NO: 225424 - RNA, 19 nt, Artificial Sequence
  Description of Artificial Sequence: Synthetic oligonucleotide
ggucucgaaccauaguugc

SEQ ID NO: 225425 - RNA, 19 nt, Artificial Sequence
  Description of Artificial Sequence: Synthetic oligonucleotide
guucuaacuucuaaaugca

SEQ ID NO: 225426 - RNA, 19 nt, Artificial Sequence
  Description of Artificial Sequence: Synthetic oligonucleotide
augcauaugcuaaaauggu

SEQ ID NO: 225427 - RNA, 19 nt, Artificial Sequence
  Description of Artificial Sequence: Synthetic oligonucleotide
gauaaucaccuuugcccca

SEQ ID NO: 225428 - RNA, 19 nt, Artificial Sequence
  Description of Artificial Sequence: Synthetic oligonucleotide
uucaaucccuuuauacguu

SEQ ID NO: 225429 - RNA, 19 nt, Artificial Sequence
  Description of Artificial Sequence: Synthetic oligonucleotide
cauugcacccacaaguaaa

SEQ ID NO: 225430 - RNA, 19 nt, Artificial Sequence
  Description of Artificial Sequence: Synthetic oligonucleotide
auaaacagcuccagauuug

SEQ ID NO: 225431 - RNA, 19 nt, Artificial Sequence
  Description of Artificial Sequence: Synthetic oligonucleotide
gguucuaccaaucgagguc

SEQ ID NO: 225432 - RNA, 19 nt, Artificial Sequence
  Description of Artificial Sequence: Synthetic oligonucleotide
ucauccuaccacacaguau

SEQ ID NO: 225433 - RNA, 19 nt, Artificial Sequence
  Description of Artificial Sequence: Synthetic oligonucleotide
gcugguucuaccaaucgag

SEQ ID NO: 225434 - RNA, 19 nt, Artificial Sequence
  Description of Artificial Sequence: Synthetic oligonucleotide
caagugguuguacuccaug

SEQ ID NO: 225435 - RNA, 19 nt, Artificial Sequence
  Description of Artificial Sequence: Synthetic oligonucleotide
gaggccuccgaacaugguc

SEQ ID NO: 225436 - RNA, 19 nt, Artificial Sequence
  Description of Artificial Sequence: Synthetic oligonucleotide
cuugcuaauuguucaacua

SEQ ID NO: 225437 - RNA, 19 nt, Artificial Sequence
  Description of Artificial Sequence: Synthetic oligonucleotide
auacaugacacaagcauua

SEQ ID NO: 225438 - RNA, 19 nt, Artificial Sequence
  Description of Artificial Sequence: Synthetic oligonucleotide
ugcuaaaaugguacaccua

SEQ ID NO: 225439 - RNA, 19 nt, Artificial Sequence
  Description of Artificial Sequence: Synthetic oligonucleotide
guccuauagguaaugcagc

SEQ ID NO: 225440 - RNA, 19 nt, Artificial Sequence
  Description of Artificial Sequence: Synthetic oligonucleotide
gagagcuaugcgagcauag

SEQ ID NO: 225441 - RNA, 19 nt, Artificial Sequence
  Description of Artificial Sequence: Synthetic oligonucleotide
ucgaaccauaguugcuugc

SEQ ID NO: 225442 - RNA, 19 nt, Artificial Sequence
  Description of Artificial Sequence: Synthetic oligonucleotide
caaggaugcagaagguuca

SEQ ID NO: 225443 - RNA, 19 nt, Artificial Sequence
  Description of Artificial Sequence: Synthetic oligonucleotide
guacagguacgacucgggc

SEQ ID NO: 225444 - RNA, 19 nt, Artificial Sequence
  Description of Artificial Sequence: Synthetic oligonucleotide
cuuggagcuuagcuggaug

SEQ ID NO: 225445 - RNA, 19 nt, Artificial Sequence
  Description of Artificial Sequence: Synthetic oligonucleotide
ugaccgcuggcacuuggca

SEQ ID NO: 225446 - RNA, 19 nt, Artificial Sequence
  Description of Artificial Sequence: Synthetic oligonucleotide
uucggauagcaaugcccag

SEQ ID NO: 225447 - RNA, 19 nt, Artificial Sequence
  Description of Artificial Sequence: Synthetic oligonucleotide
caaucgaggucucugaaua

SEQ ID NO: 225448 - RNA, 19 nt, Artificial Sequence
  Description of Artificial Sequence: Synthetic oligonucleotide
uucaacuauguuucuucuu

SEQ ID NO: 225449 - RNA, 19 nt, Artificial Sequence
  Description of Artificial Sequence: Synthetic oligonucleotide
agcccucuaggucaaacau

SEQ ID NO: 225450 - RNA, 19 nt, Artificial Sequence
  Description of Artificial Sequence: Synthetic oligonucleotide
acucgucccugccauucgg

SEQ ID NO: 225451 - RNA, 19 nt, Artificial Sequence
  Description of Artificial Sequence: Synthetic oligonucleotide
ccguguuggagaaagacuc

SEQ ID NO: 225452 - RNA, 19 nt, Artificial Sequence
  Description of Artificial Sequence: Synthetic oligonucleotide
agagcccucuaggucaaac

SEQ ID NO: 225453 - RNA, 19 nt, Artificial Sequence
  Description of Artificial Sequence: Synthetic oligonucleotide
caugagcccaggaauaaaa

SEQ ID NO: 225454 - RNA, 19 nt, Artificial Sequence
  Description of Artificial Sequence: Synthetic oligonucleotide
agacucgucccugccauuc

SEQ ID NO: 225455 - RNA, 19 nt, Artificial Sequence
  Description of Artificial Sequence: Synthetic oligonucleotide
gcuuacaggaauaccuggg

SEQ ID NO: 225456 - RNA, 19 nt, Artificial Sequence
  Description of Artificial Sequence: Synthetic oligonucleotide
gaaguggauggcauauuuc

SEQ ID NO: 225457 - RNA, 19 nt, Artificial Sequence
  Description of Artificial Sequence: Synthetic oligonucleotide
acugacuuuaaaagaugca

SEQ ID NO: 225458 - RNA, 19 nt, Artificial Sequence
  Description of Artificial Sequence: Synthetic oligonucleotide
caucagggccagcuaaccc

SEQ ID NO: 225459 - RNA, 19 nt, Artificial Sequence
  Description of Artificial Sequence: Synthetic oligonucleotide
ugucaccccauguguaaac

SEQ ID NO: 225460 - RNA, 19 nt, Artificial Sequence
  Description of Artificial Sequence: Synthetic oligonucleotide
agugucaaacccaacugaa

SEQ ID NO: 225461 - RNA, 19 nt, Artificial Sequence
  Description of Artificial Sequence: Synthetic oligonucleotide
cuuaaccuggaugcgguuc

SEQ ID NO: 225462 - RNA, 19 nt, Artificial Sequence
  Description of Artificial Sequence: Synthetic oligonucleotide
cucaagcaccugcuuacag

SEQ ID NO: 225463 - RNA, 19 nt, Artificial Sequence
  Description of Artificial Sequence: Synthetic oligonucleotide
aaguaaucuuggguagagu

SEQ ID NO: 225464 - RNA, 19 nt, Artificial Sequence
  Description of Artificial Sequence: Synthetic oligonucleotide
cucgaaccauaguugcuug

SEQ ID NO: 225465 - RNA, 19 nt, Artificial Sequence
  Description of Artificial Sequence: Synthetic oligonucleotide
uauggggaagaagcgcccc

SEQ ID NO: 225466 - RNA, 19 nt, Artificial Sequence
  Description of Artificial Sequence: Synthetic oligonucleotide
cuaccaaucgaggucucug

SEQ ID NO: 225467 - RNA, 19 nt, Artificial Sequence
  Description of Artificial Sequence: Synthetic oligonucleotide
gaagguucaaucccuuuau

SEQ ID NO: 225468 - RNA, 19 nt, Artificial Sequence
  Description of Artificial Sequence: Synthetic oligonucleotide
agcucugagaugugaugca

SEQ ID NO: 225469 - RNA, 19 nt, Artificial Sequence
  Description of Artificial Sequence: Synthetic oligonucleotide
gacucgucccugccauucg

SEQ ID NO: 225470 - RNA, 19 nt, Artificial Sequence
  Description of Artificial Sequence: Synthetic oligonucleotide
ucgucccugccauucggag

SEQ ID NO: 225471 - RNA, 19 nt, Artificial Sequence
  Description of Artificial Sequence: Synthetic oligonucleotide
uagcaaugcccaguaacac

SEQ ID NO: 225472 - RNA, 19 nt, Artificial Sequence
  Description of Artificial Sequence: Synthetic oligonucleotide
aguacucuugcuaauuguu

SEQ ID NO: 225473 - RNA, 19 nt, Artificial Sequence
  Description of Artificial Sequence: Synthetic oligonucleotide
gccauucggaguuacaauc

SEQ ID NO: 225474 - RNA, 19 nt, Artificial Sequence
  Description of Artificial Sequence: Synthetic oligonucleotide
cuuaguguccugucaagua

SEQ ID NO: 225475 - RNA, 19 nt, Artificial Sequence
  Description of Artificial Sequence: Synthetic oligonucleotide
ccauacgucuccauccucc

SEQ ID NO: 225476 - RNA, 19 nt, Artificial Sequence
  Description of Artificial Sequence: Synthetic oligonucleotide
cuuuauacguugccacuga

SEQ ID NO: 225477 - RNA, 19 nt, Artificial Sequence
  Description of Artificial Sequence: Synthetic oligonucleotide
accccacacaaagcgaagg

SEQ ID NO: 225478 - RNA, 19 nt, Artificial Sequence
  Description of Artificial Sequence: Synthetic oligonucleotide
ugccauucggaguuacaau

SEQ ID NO: 225479 - RNA, 19 nt, Artificial Sequence
  Description of Artificial Sequence: Synthetic oligonucleotide
aagagcucugagaugugau

SEQ ID NO: 225480 - RNA, 19 nt, Artificial Sequence
  Description of Artificial Sequence: Synthetic oligonucleotide
ucaucaagagagcccucua

SEQ ID NO: 225481 - RNA, 19 nt, Artificial Sequence
  Description of Artificial Sequence: Synthetic oligonucleotide
ugggcucccacauaccauu

SEQ ID NO: 225482 - RNA, 19 nt, Artificial Sequence
  Description of Artificial Sequence: Synthetic oligonucleotide
cuucauuggcacuuugcaa

SEQ ID NO: 225483 - RNA, 19 nt, Artificial Sequence
  Description of Artificial Sequence: Synthetic oligonucleotide
uuggcacuuugcaaccauc

SEQ ID NO: 225484 - RNA, 19 nt, Artificial Sequence
  Description of Artificial Sequence: Synthetic oligonucleotide
ccuuagggcaaugaugggg

SEQ ID NO: 225485 - RNA, 19 nt, Artificial Sequence
  Description of Artificial Sequence: Synthetic oligonucleotide
caggcgguuccuuagggca

SEQ ID NO: 225486 - RNA, 19 nt, Artificial Sequence
  Description of Artificial Sequence: Synthetic oligonucleotide
cuugcacuacuuuucggaa

SEQ ID NO: 225487 - RNA, 19 nt, Artificial Sequence
  Description of Artificial Sequence: Synthetic oligonucleotide
caggguaaaauuaguugaa

SEQ ID NO: 225488 - RNA, 19 nt, Artificial Sequence
  Description of Artificial Sequence: Synthetic oligonucleotide
ugcuauggacucgcuguag

SEQ ID NO: 225489 - RNA, 19 nt, Artificial Sequence
  Description of Artificial Sequence: Synthetic oligonucleotide
cacuggguccuauagguaa

SEQ ID NO: 225490 - RNA, 19 nt, Artificial Sequence
  Description of Artificial Sequence: Synthetic oligonucleotide
uggguccuauagguaaugc

SEQ ID NO: 225491 - RNA, 19 nt, Artificial Sequence
  Description of Artificial Sequence: Synthetic oligonucleotide
gguuguacuccaugggcac

SEQ ID NO: 225492 - RNA, 19 nt, Artificial Sequence
  Description of Artificial Sequence: Synthetic oligonucleotide
cccaaagacagacuuggug

SEQ ID NO: 225493 - RNA, 19 nt, Artificial Sequence
  Description of Artificial Sequence: Synthetic oligonucleotide
aggagugaguccauuuugu

SEQ ID NO: 225494 - RNA, 19 nt, Artificial Sequence
  Description of Artificial Sequence: Synthetic oligonucleotide
caugcacaggcugaucuuc

SEQ ID NO: 225495 - RNA, 19 nt, Artificial Sequence
  Description of Artificial Sequence: Synthetic oligonucleotide
agcgcuuaaccuggaugcg

SEQ ID NO: 225496 - RNA, 19 nt, Artificial Sequence
  Description of Artificial Sequence: Synthetic oligonucleotide
gagcccucuaggucaaaca

SEQ ID NO: 225497 - RNA, 19 nt, Artificial Sequence
  Description of Artificial Sequence: Synthetic oligonucleotide
ggagcuuagcuggaugucc

SEQ ID NO: 225498 - RNA, 19 nt, Artificial Sequence
  Description of Artificial Sequence: Synthetic oligonucleotide
aggguaaaauuaguugaaa

SEQ ID NO: 225499 - RNA, 19 nt, Artificial Sequence
  Description of Artificial Sequence: Synthetic oligonucleotide
ggggauacagggacaaaag

SEQ ID NO: 225500 - RNA, 19 nt, Artificial Sequence
  Description of Artificial Sequence: Synthetic oligonucleotide
ccaacugaaggcccgaguc

SEQ ID NO: 225501 - RNA, 19 nt, Artificial Sequence
  Description of Artificial Sequence: Synthetic oligonucleotide
uccucacaaaucucugcua

SEQ ID NO: 225502 - RNA, 19 nt, Artificial Sequence
  Description of Artificial Sequence: Synthetic oligonucleotide
cucugcuauggacucgcug

SEQ ID NO: 225503 - RNA, 19 nt, Artificial Sequence
  Description of Artificial Sequence: Synthetic oligonucleotide
agagcuaugcgagcauagu

SEQ ID NO: 225504 - RNA, 19 nt, Artificial Sequence
  Description of Artificial Sequence: Synthetic oligonucleotide
ucuaccaaucgaggucucu

SEQ ID NO: 225505 - RNA, 19 nt, Artificial Sequence
  Description of Artificial Sequence: Synthetic oligonucleotide
caguucggauagcaaugcc

SEQ ID NO: 225506 - RNA, 19 nt, Artificial Sequence
  Description of Artificial Sequence: Synthetic oligonucleotide
cugcccaaagacagacuug

SEQ ID NO: 225507 - RNA, 19 nt, Artificial Sequence
  Description of Artificial Sequence: Synthetic oligonucleotide
gucauccuaccacacagua

SEQ ID NO: 225508 - RNA, 19 nt, Artificial Sequence
  Description of Artificial Sequence: Synthetic oligonucleotide
gcagaaagaaacaugugua

SEQ ID NO: 225509 - RNA, 19 nt, Artificial Sequence
  Description of Artificial Sequence: Synthetic oligonucleotide
cuauagguaaugcagcauu

SEQ ID NO: 225510 - RNA, 19 nt, Artificial Sequence
  Description of Artificial Sequence: Synthetic oligonucleotide
cagcauuauggggaagaag

SEQ ID NO: 225511 - RNA, 19 nt, Artificial Sequence
  Description of Artificial Sequence: Synthetic oligonucleotide
gguacagguacgacucggg

SEQ ID NO: 225512 - RNA, 19 nt, Artificial Sequence
  Description of Artificial Sequence: Synthetic oligonucleotide
agaugcagugggaugucug

SEQ ID NO: 225513 - RNA, 19 nt, Artificial Sequence
  Description of Artificial Sequence: Synthetic oligonucleotide
aaguggucaggaggguugu

SEQ ID NO: 225514 - RNA, 19 nt, Artificial Sequence
  Description of Artificial Sequence: Synthetic oligonucleotide
cugaccgcuggcacuuggc

SEQ ID NO: 225515 - RNA, 19 nt, Artificial Sequence
  Description of Artificial Sequence: Synthetic oligonucleotide
gaucccucgaagaguguca

SEQ ID NO: 225516 - RNA, 19 nt, Artificial Sequence
  Description of Artificial Sequence: Synthetic oligonucleotide
guucuaccaaucgaggucu

SEQ ID NO: 225517 - RNA, 19 nt, Artificial Sequence
  Description of Artificial Sequence: Synthetic oligonucleotide
ugccagccggacauacucu

SEQ ID NO: 225518 - RNA, 19 nt, Artificial Sequence
  Description of Artificial Sequence: Synthetic oligonucleotide
auaaucaccuuugccccau

SEQ ID NO: 225519 - RNA, 19 nt, Artificial Sequence
  Description of Artificial Sequence: Synthetic oligonucleotide
agcucguauccagugaaaa

SEQ ID NO: 225520 - RNA, 19 nt, Artificial Sequence
  Description of Artificial Sequence: Synthetic oligonucleotide
agcguuccguguuggagaa

SEQ ID NO: 225521 - RNA, 19 nt, Artificial Sequence
  Description of Artificial Sequence: Synthetic oligonucleotide
ccggugauaaucaccuuug

SEQ ID NO: 225522 - RNA, 19 nt, Artificial Sequence
  Description of Artificial Sequence: Synthetic oligonucleotide
auucggaguuacaaucaga

SEQ ID NO: 225523 - RNA, 19 nt, Artificial Sequence
  Description of Artificial Sequence: Synthetic oligonucleotide
ugagagcuaugcgagcaua

SEQ ID NO: 225524 - RNA, 19 nt, Artificial Sequence
  Description of Artificial Sequence: Synthetic oligonucleotide
aggguucaacagguaacag

SEQ ID NO: 225525 - RNA, 19 nt, Artificial Sequence
  Description of Artificial Sequence: Synthetic oligonucleotide
ggacucccaguucggauag

SEQ ID NO: 225526 - RNA, 19 nt, Artificial Sequence
  Description of Artificial Sequence: Synthetic oligonucleotide
caggcgcucucuuccacac

SEQ ID NO: 225527 - RNA, 19 nt, Artificial Sequence
  Description of Artificial Sequence: Synthetic oligonucleotide
aaucuuggguagagucuga

SEQ ID NO: 225528 - RNA, 19 nt, Artificial Sequence
  Description of Artificial Sequence: Synthetic oligonucleotide
caggguucaacagguaaca

SEQ ID NO: 225529 - RNA, 19 nt, Artificial Sequence
  Description of Artificial Sequence: Synthetic oligonucleotide
uccuaccacacaguauguc

SEQ ID NO: 225530 - RNA, 19 nt, Artificial Sequence
  Description of Artificial Sequence: Synthetic oligonucleotide
uuguccgaccccacacaaa

SEQ ID NO: 225531 - RNA, 19 nt, Artificial Sequence
  Description of Artificial Sequence: Synthetic oligonucleotide
gucuauggacuugcagaag

SEQ ID NO: 225532 - RNA, 19 nt, Artificial Sequence
  Description of Artificial Sequence: Synthetic oligonucleotide
ggagcguuccguguuggag

SEQ ID NO: 225533 - RNA, 19 nt, Artificial Sequence
  Description of Artificial Sequence: Synthetic oligonucleotide
aggcucagcgagauucagg

SEQ ID NO: 225534 - RNA, 19 nt, Artificial Sequence
  Description of Artificial Sequence: Synthetic oligonucleotide
ggguaaaauuaguugaaau

SEQ ID NO: 225535 - RNA, 19 nt, Artificial Sequence
  Description of Artificial Sequence: Synthetic oligonucleotide
cuaugcgagcauagucauc

SEQ ID NO: 225536 - RNA, 19 nt, Artificial Sequence
  Description of Artificial Sequence: Synthetic oligonucleotide
cuccgaacauggucaucag

SEQ ID NO: 225537 - RNA, 19 nt, Artificial Sequence
  Description of Artificial Sequence: Synthetic oligonucleotide
uuagggcaaugauggggau

SEQ ID NO: 225538 - RNA, 19 nt, Artificial Sequence
  Description of Artificial Sequence: Synthetic oligonucleotide
guuccaucuccuaguugcc

SEQ ID NO: 225539 - RNA, 19 nt, Artificial Sequence
  Description of Artificial Sequence: Synthetic oligonucleotide
gaagagugucaaacccaac

SEQ ID NO: 225540 - RNA, 19 nt, Artificial Sequence
  Description of Artificial Sequence: Synthetic oligonucleotide
ggguccuauagguaaugca

SEQ ID NO: 225541 - RNA, 19 nt, Artificial Sequence
  Description of Artificial Sequence: Synthetic oligonucleotide
ccuuuauacguugccacug

SEQ ID NO: 225542 - RNA, 19 nt, Artificial Sequence
  Description of Artificial Sequence: Synthetic oligonucleotide
uaucaaccucacugagguc

SEQ ID NO: 225543 - RNA, 19 nt, Artificial Sequence
  Description of Artificial Sequence: Synthetic oligonucleotide
uggagcuuagcuggauguc

SEQ ID NO: 225544 - RNA, 19 nt, Artificial Sequence
  Description of Artificial Sequence: Synthetic oligonucleotide
agacucggugaggaaggag

SEQ ID NO: 225545 - RNA, 19 nt, Artificial Sequence
  Description of Artificial Sequence: Synthetic oligonucleotide
ggguacagguacgacucgg

SEQ ID NO: 225546 - RNA, 19 nt, Artificial Sequence
  Description of Artificial Sequence: Synthetic oligonucleotide
gaccccacacaaagcgaag

SEQ ID NO: 225547 - RNA, 19 nt, Artificial Sequence
  Description of Artificial Sequence: Synthetic oligonucleotide
auaguugcuugcacuacuu

SEQ ID NO: 225548 - RNA, 19 nt, Artificial Sequence
  Description of Artificial Sequence: Synthetic oligonucleotide
uugucaccccauguguaaa

SEQ ID NO: 225549 - RNA, 19 nt, Artificial Sequence
  Description of Artificial Sequence: Synthetic oligonucleotide
auacguugccacugacuuu

SEQ ID NO: 225550 - RNA, 19 nt, Artificial Sequence
  Description of Artificial Sequence: Synthetic oligonucleotide
agcuccagauuugguaaga

SEQ ID NO: 225551 - RNA, 19 nt, Artificial Sequence
  Description of Artificial Sequence: Synthetic oligonucleotide
guacaugagcccaggaaua

SEQ ID NO: 225552 - RNA, 19 nt, Artificial Sequence
  Description of Artificial Sequence: Synthetic oligonucleotide
aggaauaccugggcaacuu

SEQ ID NO: 225553 - RNA, 19 nt, Artificial Sequence
  Description of Artificial Sequence: Synthetic oligonucleotide
cuuguccgaccccacacaa

SEQ ID NO: 225554 - RNA, 19 nt, Artificial Sequence
  Description of Artificial Sequence: Synthetic oligonucleotide
uucuaccaaucgaggucuc

SEQ ID NO: 225555 - RNA, 19 nt, Artificial Sequence
  Description of Artificial Sequence: Synthetic oligonucleotide
augagcccaggaauaaaau

SEQ ID NO: 225556 - RNA, 19 nt, Artificial Sequence
  Description of Artificial Sequence: Synthetic oligonucleotide
gucaucggcagcuggcucu

SEQ ID NO: 225557 - RNA, 19 nt, Artificial Sequence
  Description of Artificial Sequence: Synthetic oligonucleotide
ccagauuugguaagagcca

SEQ ID NO: 225558 - RNA, 19 nt, Artificial Sequence
  Description of Artificial Sequence: Synthetic oligonucleotide
cugccauucggaguuacaa

SEQ ID NO: 225559 - RNA, 19 nt, Artificial Sequence
  Description of Artificial Sequence: Synthetic oligonucleotide
gguacgacucgggccaucc

SEQ ID NO: 225560 - RNA, 19 nt, Artificial Sequence
  Description of Artificial Sequence: Synthetic oligonucleotide
ggggaaucauugcacccac

SEQ ID NO: 225561 - RNA, 19 nt, Artificial Sequence
  Description of Artificial Sequence: Synthetic oligonucleotide
cuccuaguugccccucauc

SEQ ID NO: 225562 - RNA, 19 nt, Artificial Sequence
  Description of Artificial Sequence: Synthetic oligonucleotide
ugaguccauuuuguagcuc

SEQ ID NO: 225563 - RNA, 19 nt, Artificial Sequence
  Description of Artificial Sequence: Synthetic oligonucleotide
cuaggucaaacauggggau

SEQ ID NO: 225564 - RNA, 19 nt, Artificial Sequence
  Description of Artificial Sequence: Synthetic oligonucleotide
uggcaccagacucgucccu

SEQ ID NO: 225565 - RNA, 19 nt, Artificial Sequence
  Description of Artificial Sequence: Synthetic oligonucleotide
uggagcgcuuaaccuggau

SEQ ID NO: 225566 - RNA, 19 nt, Artificial Sequence
  Description of Artificial Sequence: Synthetic oligonucleotide
cuggguccuauagguaaug

SEQ ID NO: 225567 - RNA, 19 nt, Artificial Sequence
  Description of Artificial Sequence: Synthetic oligonucleotide
aguccauuuuguagcuccu

SEQ ID NO: 225568 - RNA, 19 nt, Artificial Sequence
  Description of Artificial Sequence: Synthetic oligonucleotide
augcgagcauagucaucug

SEQ ID NO: 225569 - RNA, 19 nt, Artificial Sequence
  Description of Artificial Sequence: Synthetic oligonucleotide
ccauucggaguuacaauca

SEQ ID NO: 225570 - RNA, 19 nt, Artificial Sequence
  Description of Artificial Sequence: Synthetic oligonucleotide
gagucugcauccucauuau

SEQ ID NO: 225571 - RNA, 19 nt, Artificial Sequence
  Description of Artificial Sequence: Synthetic oligonucleotide
cugccgaggccuccgaaca

SEQ ID NO: 225572 - RNA, 19 nt, Artificial Sequence
  Description of Artificial Sequence: Synthetic oligonucleotide
gugaguccauuuuguagcu

SEQ ID NO: 225573 - RNA, 19 nt, Artificial Sequence
  Description of Artificial Sequence: Synthetic oligonucleotide
gcgcuuaaccuggaugcgg

SEQ ID NO: 225574 - RNA, 19 nt, Artificial Sequence
  Description of Artificial Sequence: Synthetic oligonucleotide
aucuuggguagagucugaa

SEQ ID NO: 225575 - RNA, 19 nt, Artificial Sequence
  Description of Artificial Sequence: Synthetic oligonucleotide
cgaauguacaugagcccag

SEQ ID NO: 225576 - RNA, 19 nt, Artificial Sequence
  Description of Artificial Sequence: Synthetic oligonucleotide
gcuaauuguucaacuaugu

SEQ ID NO: 225577 - RNA, 19 nt, Artificial Sequence
  Description of Artificial Sequence: Synthetic oligonucleotide
uuccagacucggugaggaa

SEQ ID NO: 225578 - RNA, 19 nt, Artificial Sequence
  Description of Artificial Sequence: Synthetic oligonucleotide
uccccacggaccagacagu

SEQ ID NO: 225579 - RNA, 19 nt, Artificial Sequence
  Description of Artificial Sequence: Synthetic oligonucleotide
gggguacagguacgacucg

SEQ ID NO: 225580 - RNA, 19 nt, Artificial Sequence
  Description of Artificial Sequence: Synthetic oligonucleotide
guacgacucgggccauccc

SEQ ID NO: 225581 - RNA, 19 nt, Artificial Sequence
  Description of Artificial Sequence: Synthetic oligonucleotide
cuaguugccccucaucauu

SEQ ID NO: 225582 - RNA, 19 nt, Artificial Sequence
  Description of Artificial Sequence: Synthetic oligonucleotide
ucaucggcagcuggcucuc

SEQ ID NO: 225583 - RNA, 19 nt, Artificial Sequence
  Description of Artificial Sequence: Synthetic oligonucleotide
aagaucccucgaagagugu

SEQ ID NO: 225584 - RNA, 19 nt, Artificial Sequence
  Description of Artificial Sequence: Synthetic oligonucleotide
ugccgaggccuccgaacau

SEQ ID NO: 225585 - RNA, 19 nt, Artificial Sequence
  Description of Artificial Sequence: Synthetic oligonucleotide
ggagugaguccauuuugua

SEQ ID NO: 225586 - RNA, 19 nt, Artificial Sequence
  Description of Artificial Sequence: Synthetic oligonucleotide
ccgaggccuccgaacaugg

SEQ ID NO: 225587 - RNA, 19 nt, Artificial Sequence
  Description of Artificial Sequence: Synthetic oligonucleotide
uaacuacuccaaggccagu

SEQ ID NO: 225588 - RNA, 19 nt, Artificial Sequence
  Description of Artificial Sequence: Synthetic oligonucleotide
cggucucgaaccauaguug

SEQ ID NO: 225589 - RNA, 19 nt, Artificial Sequence
  Description of Artificial Sequence: Synthetic oligonucleotide
cucgucccugccauucgga

SEQ ID NO: 225590 - RNA, 19 nt, Artificial Sequence
  Description of Artificial Sequence: Synthetic oligonucleotide
cuggaccaaggaugcagaa

SEQ ID NO: 225591 - RNA, 19 nt, Artificial Sequence
  Description of Artificial Sequence: Synthetic oligonucleotide
ccucuaggucaaacauggg

SEQ ID NO: 225592 - RNA, 19 nt, Artificial Sequence
  Description of Artificial Sequence: Synthetic oligonucleotide
gcggucucgaaccauaguu

SEQ ID NO: 225593 - RNA, 19 nt, Artificial Sequence
  Description of Artificial Sequence: Synthetic oligonucleotide
gggaugucugggcucccac

SEQ ID NO: 225594 - RNA, 19 nt, Artificial Sequence
  Description of Artificial Sequence: Synthetic oligonucleotide
guccgaccccacacaaagc

SEQ ID NO: 225595 - RNA, 19 nt, Artificial Sequence
  Description of Artificial Sequence: Synthetic oligonucleotide
gcaccagacucgucccugc

SEQ ID NO: 225596 - RNA, 19 nt, Artificial Sequence
  Description of Artificial Sequence: Synthetic oligonucleotide
gugugugcuuggagcuuag

SEQ ID NO: 225597 - RNA, 19 nt, Artificial Sequence
  Description of Artificial Sequence: Synthetic oligonucleotide
cgaagagugucaaacccaa

SEQ ID NO: 225598 - RNA, 19 nt, Artificial Sequence
  Description of Artificial Sequence: Synthetic oligonucleotide
cugugucuauggacuugca

SEQ ID NO: 225599 - RNA, 19 nt, Artificial Sequence
  Description of Artificial Sequence: Synthetic oligonucleotide
gcuaugcgagcauagucau

SEQ ID NO: 225600 - RNA, 19 nt, Artificial Sequence
  Description of Artificial Sequence: Synthetic oligonucleotide
gaaggcccgaguccaguuu

SEQ ID NO: 225601 - RNA, 19 nt, Artificial Sequence
  Description of Artificial Sequence: Synthetic oligonucleotide
cugcuauggacucgcugua

SEQ ID NO: 225602 - RNA, 19 nt, Artificial Sequence
  Description of Artificial Sequence: Synthetic oligonucleotide
cauugucuccagcucguau

SEQ ID NO: 225603 - RNA, 19 nt, Artificial Sequence
  Description of Artificial Sequence: Synthetic oligonucleotide
gacucccaguucggauagc

SEQ ID NO: 225604 - RNA, 19 nt, Artificial Sequence
  Description of Artificial Sequence: Synthetic oligonucleotide
gucaccccauguguaaacu

SEQ ID NO: 225605 - RNA, 19 nt, Artificial Sequence
  Description of Artificial Sequence: Synthetic oligonucleotide
agagagcccucuaggucaa

SEQ ID NO: 225606 - RNA, 19 nt, Artificial Sequence
  Description of Artificial Sequence: Synthetic oligonucleotide
cagcucguauccagugaaa

SEQ ID NO: 225607 - RNA, 19 nt, Artificial Sequence
  Description of Artificial Sequence: Synthetic oligonucleotide
guuccguguuggagaaaga

SEQ ID NO: 225608 - RNA, 19 nt, Artificial Sequence
  Description of Artificial Sequence: Synthetic oligonucleotide
cuuuacuucuggagcgcuu

SEQ ID NO: 225609 - RNA, 19 nt, Artificial Sequence
  Description of Artificial Sequence: Synthetic oligonucleotide
gccaagccuugcccauacg

SEQ ID NO: 225610 - RNA, 19 nt, Artificial Sequence
  Description of Artificial Sequence: Synthetic oligonucleotide
gucucgaaccauaguugcu

SEQ ID NO: 225611 - RNA, 19 nt, Artificial Sequence
  Description of Artificial Sequence: Synthetic oligonucleotide
cguauccagugaaaagaga

SEQ ID NO: 225612 - RNA, 19 nt, Artificial Sequence
  Description of Artificial Sequence: Synthetic oligonucleotide
gggcagccuuguccgaccc

SEQ ID NO: 225613 - RNA, 19 nt, Artificial Sequence
  Description of Artificial Sequence: Synthetic oligonucleotide
ggacauacucugcacgguu

SEQ ID NO: 225614 - RNA, 19 nt, Artificial Sequence
  Description of Artificial Sequence: Synthetic oligonucleotide
ggauagcaaugcccaguaa

SEQ ID NO: 225615 - RNA, 19 nt, Artificial Sequence
  Description of Artificial Sequence: Synthetic oligonucleotide
ccucacaaaucucugcuau

SEQ ID NO: 225616 - RNA, 19 nt, Artificial Sequence
  Description of Artificial Sequence: Synthetic oligonucleotide
aggcgguuccuuagggcaa

SEQ ID NO: 225617 - RNA, 19 nt, Artificial Sequence
  Description of Artificial Sequence: Synthetic oligonucleotide
ccaagccuugcccauacgu

SEQ ID NO: 225618 - RNA, 19 nt, Artificial Sequence
  Description of Artificial Sequence: Synthetic oligonucleotide
agcgccccauaguguuccu

SEQ ID NO: 225619 - RNA, 19 nt, Artificial Sequence
  Description of Artificial Sequence: Synthetic oligonucleotide
gccgaggccuccgaacaug

SEQ ID NO: 225620 - RNA, 19 nt, Artificial Sequence
  Description of Artificial Sequence: Synthetic oligonucleotide
cgaaccauaguugcuugca

SEQ ID NO: 225621 - RNA, 19 nt, Artificial Sequence
  Description of Artificial Sequence: Synthetic oligonucleotide
gcggaacaugcugcagugc

SEQ ID NO: 225622 - RNA, 19 nt, Artificial Sequence
  Description of Artificial Sequence: Synthetic oligonucleotide
cugucaucggcagcuggcu

SEQ ID NO: 225623 - RNA, 19 nt, Artificial Sequence
  Description of Artificial Sequence: Synthetic oligonucleotide
cagcgagauucaggcucag

SEQ ID NO: 225624 - RNA, 19 nt, Artificial Sequence
  Description of Artificial Sequence: Synthetic oligonucleotide
cagacucggugaggaagga

SEQ ID NO: 225625 - RNA, 19 nt, Artificial Sequence
  Description of Artificial Sequence: Synthetic oligonucleotide
cccagccggugauaaucac

SEQ ID NO: 225626 - RNA, 19 nt, Artificial Sequence
  Description of Artificial Sequence: Synthetic oligonucleotide
cgaccccacacaaagcgaa

SEQ ID NO: 225627 - RNA, 19 nt, Artificial Sequence
  Description of Artificial Sequence: Synthetic oligonucleotide
ccaccaaaaugccucaauu

SEQ ID NO: 225628 - RNA, 19 nt, Artificial Sequence
  Description of Artificial Sequence: Synthetic oligonucleotide
cccuuuauacguugccacu

SEQ ID NO: 225629 - RNA, 19 nt, Artificial Sequence
  Description of Artificial Sequence: Synthetic oligonucleotide
caucggcagcuggcucucc

SEQ ID NO: 225630 - RNA, 19 nt, Artificial Sequence
  Description of Artificial Sequence: Synthetic oligonucleotide
ccugccauucggaguuaca

SEQ ID NO: 225631 - RNA, 19 nt, Artificial Sequence
  Description of Artificial Sequence: Synthetic oligonucleotide
ccccucccggacagcagcc

SEQ ID NO: 225632 - RNA, 19 nt, Artificial Sequence
  Description of Artificial Sequence: Synthetic oligonucleotide
gggagcguuccguguugga

SEQ ID NO: 225633 - RNA, 19 nt, Artificial Sequence
  Description of Artificial Sequence: Synthetic oligonucleotide
gcccauacgucuccauccu

SEQ ID NO: 225634 - RNA, 19 nt, Artificial Sequence
  Description of Artificial Sequence: Synthetic oligonucleotide
gccccucaucauugucacc

SEQ ID NO: 225635 - RNA, 19 nt, Artificial Sequence
  Description of Artificial Sequence: Synthetic oligonucleotide
gcccagccggugauaauca

SEQ ID NO: 225636 - RNA, 19 nt, Artificial Sequence
  Description of Artificial Sequence: Synthetic oligonucleotide
ccaaucgaggucucugaau

SEQ ID NO: 225637 - RNA, 19 nt, Artificial Sequence
  Description of Artificial Sequence: Synthetic oligonucleotide
cagcaguacucuugcuaau

SEQ ID NO: 225638 - RNA, 19 nt, Artificial Sequence
  Description of Artificial Sequence: Synthetic oligonucleotide
cggauagcaaugcccagua

SEQ ID NO: 225639 - RNA, 19 nt, Artificial Sequence
  Description of Artificial Sequence: Synthetic oligonucleotide
ccggguggcaggguucaac

SEQ ID NO: 225640 - RNA, 19 nt, Artificial Sequence
  Description of Artificial Sequence: Synthetic oligonucleotide
ggcggucucgaaccauagu

SEQ ID NO: 225641 - RNA, 19 nt, Artificial Sequence
  Description of Artificial Sequence: Synthetic oligonucleotide
ccuaguugccccucaucau

SEQ ID NO: 225642 - RNA, 19 nt, Artificial Sequence
  Description of Artificial Sequence: Synthetic oligonucleotide
gcucagcgagauucaggcu

SEQ ID NO: 225643 - RNA, 19 nt, Artificial Sequence
  Description of Artificial Sequence: Synthetic oligonucleotide
cgcuuaaccuggaugcggu

SEQ ID NO: 225644 - RNA, 19 nt, Artificial Sequence
  Description of Artificial Sequence: Synthetic oligonucleotide
ccuauagguaaugcagcau

SEQ ID NO: 225645 - RNA, 19 nt, Artificial Sequence
  Description of Artificial Sequence: Synthetic oligonucleotide
acguugccacugacuuuaa

SEQ ID NO: 225646 - RNA, 19 nt, Artificial Sequence
  Description of Artificial Sequence: Synthetic oligonucleotide
ccaucuccuaguugccccu

SEQ ID NO: 225647 - RNA, 19 nt, Artificial Sequence
  Description of Artificial Sequence: Synthetic oligonucleotide
caaugguccugggcagccu

SEQ ID NO: 225648 - RNA, 19 nt, Artificial Sequence
  Description of Artificial Sequence: Synthetic oligonucleotide
gcuuaaccuggaugcgguu

SEQ ID NO: 225649 - RNA, 19 nt, Artificial Sequence
  Description of Artificial Sequence: Synthetic oligonucleotide
cccaacugaaggcccgagu

SEQ ID NO: 225650 - RNA, 19 nt, Artificial Sequence
  Description of Artificial Sequence: Synthetic oligonucleotide
cugcacgguuguccagggu

SEQ ID NO: 225651 - RNA, 19 nt, Artificial Sequence
  Description of Artificial Sequence: Synthetic oligonucleotide
gcaagugguuguacuccau

SEQ ID NO: 225652 - RNA, 19 nt, Artificial Sequence
  Description of Artificial Sequence: Synthetic oligonucleotide
gcgccccauaguguuccuc

SEQ ID NO: 225653 - RNA, 19 nt, Artificial Sequence
  Description of Artificial Sequence: Synthetic oligonucleotide
cagacucgucccugccauu

SEQ ID NO: 225654 - RNA, 19 nt, Artificial Sequence
  Description of Artificial Sequence: Synthetic oligonucleotide
ccccacggaccagacagua

SEQ ID NO: 225655 - RNA, 19 nt, Artificial Sequence
  Description of Artificial Sequence: Synthetic oligonucleotide
ggcucuccugugagagcua

SEQ ID NO: 225656 - RNA, 19 nt, Artificial Sequence
  Description of Artificial Sequence: Synthetic oligonucleotide
cugcgauggucaggcucau

SEQ ID NO: 225657 - RNA, 19 nt, Artificial Sequence
  Description of Artificial Sequence: Synthetic oligonucleotide
cggacauacucugcacggu

SEQ ID NO: 225658 - RNA, 19 nt, Artificial Sequence
  Description of Artificial Sequence: Synthetic oligonucleotide
cagguacgacucgggccau

SEQ ID NO: 225659 - RNA, 19 nt, Artificial Sequence
  Description of Artificial Sequence: Synthetic oligonucleotide
gcguuccguguuggagaaa

SEQ ID NO: 225660 - RNA, 19 nt, Artificial Sequence
  Description of Artificial Sequence: Synthetic oligonucleotide
aauuaaguuacauugauac

SEQ ID NO: 225661 - RNA, 19 nt, Artificial Sequence
  Description of Artificial Sequence: Synthetic oligonucleotide
uguaauuagacuuauacag

SEQ ID NO: 225662 - RNA, 19 nt, Artificial Sequence
  Description of Artificial Sequence: Synthetic oligonucleotide
uguaauagacauuacaucc

SEQ ID NO: 225663 - RNA, 19 nt, Artificial Sequence
  Description of Artificial Sequence: Synthetic oligonucleotide
ugaaucaacaguaauacac

SEQ ID NO: 225664 - RNA, 19 nt, Artificial Sequence
  Description of Artificial Sequence: Synthetic oligonucleotide
uguaacauaggucuugagg

SEQ ID NO: 225665 - RNA, 19 nt, Artificial Sequence
  Description of Artificial Sequence: Synthetic oligonucleotide
agaguaacauauuaauacc

SEQ ID NO: 225666 - RNA, 19 nt, Artificial Sequence
  Description of Artificial Sequence: Synthetic oligonucleotide
agucauuggauuuauaaag

SEQ ID NO: 225667 - RNA, 19 nt, Artificial Sequence
  Description of Artificial Sequence: Synthetic oligonucleotide
aagauuauauuccagacuu

SEQ ID NO: 225668 - RNA, 19 nt, Artificial Sequence
  Description of Artificial Sequence: Synthetic oligonucleotide
aaguuacauugauacaucc

SEQ ID NO: 225669 - RNA, 19 nt, Artificial Sequence
  Description of Artificial Sequence: Synthetic oligonucleotide
uaauuucugucccugacgg

SEQ ID NO: 225670 - RNA, 19 nt, Artificial Sequence
  Description of Artificial Sequence: Synthetic oligonucleotide
aagaguaaaacuguucaac

SEQ ID NO: 225671 - RNA, 19 nt, Artificial Sequence
  Description of Artificial Sequence: Synthetic oligonucleotide
cuagagagaaauacuaucg

SEQ ID NO: 225672 - RNA, 19 nt, Artificial Sequence
  Description of Artificial Sequence: Synthetic oligonucleotide
agugaaucaacaguaauac

SEQ ID NO: 225673 - RNA, 19 nt, Artificial Sequence
  Description of Artificial Sequence: Synthetic oligonucleotide
aacagacggggauuuaugc

SEQ ID NO: 225674 - RNA, 19 nt, Artificial Sequence
  Description of Artificial Sequence: Synthetic oligonucleotide
uucuauucccaccuggugg

SEQ ID NO: 225675 - RNA, 19 nt, Artificial Sequence
  Description of Artificial Sequence: Synthetic oligonucleotide
aaggcuaaauaacaacuag

SEQ ID NO: 225676 - RNA, 19 nt, Artificial Sequence
  Description of Artificial Sequence: Synthetic oligonucleotide
aacuaugccacugggaugg

SEQ ID NO: 225677 - RNA, 19 nt, Artificial Sequence
  Description of Artificial Sequence: Synthetic oligonucleotide
uaguuaaucaccuaauuuc

SEQ ID NO: 225678 - RNA, 19 nt, Artificial Sequence
  Description of Artificial Sequence: Synthetic oligonucleotide
acaguaguuacaaugacac

SEQ ID NO: 225679 - RNA, 19 nt, Artificial Sequence
  Description of Artificial Sequence: Synthetic oligonucleotide
ugcuaauagaguaacauau

SEQ ID NO: 225680 - RNA, 19 nt, Artificial Sequence
  Description of Artificial Sequence: Synthetic oligonucleotide
ucaaacguuuguaucauug

SEQ ID NO: 225681 - RNA, 19 nt, Artificial Sequence
  Description of Artificial Sequence: Synthetic oligonucleotide
aacguuuguaucauugagc

SEQ ID NO: 225682 - RNA, 19 nt, Artificial Sequence
  Description of Artificial Sequence: Synthetic oligonucleotide
guagcaucgaaguaaaagc

SEQ ID NO: 225683 - RNA, 19 nt, Artificial Sequence
  Description of Artificial Sequence: Synthetic oligonucleotide
aguaagauuauauuccaga

SEQ ID NO: 225684 - RNA, 19 nt, Artificial Sequence
  Description of Artificial Sequence: Synthetic oligonucleotide
uguagcaucgaaguaaaag

SEQ ID NO: 225685 - RNA, 19 nt, Artificial Sequence
  Description of Artificial Sequence: Synthetic oligonucleotide
uguguuuuggugaguaucc

SEQ ID NO: 225686 - RNA, 19 nt, Artificial Sequence
  Description of Artificial Sequence: Synthetic oligonucleotide
aaugguuggggaugguaac

SEQ ID NO: 225687 - RNA, 19 nt, Artificial Sequence
  Description of Artificial Sequence: Synthetic oligonucleotide
aguggcaaucguuauauag

SEQ ID NO: 225688 - RNA, 19 nt, Artificial Sequence
  Description of Artificial Sequence: Synthetic oligonucleotide
uucucaagugucuacaaug

SEQ ID NO: 225689 - RNA, 19 nt, Artificial Sequence
  Description of Artificial Sequence: Synthetic oligonucleotide
aaaguuaagucaagccugc

SEQ ID NO: 225690 - RNA, 19 nt, Artificial Sequence
  Description of Artificial Sequence: Synthetic oligonucleotide
agcauguaauuucuguccc

SEQ ID NO: 225691 - RNA, 19 nt, Artificial Sequence
  Description of Artificial Sequence: Synthetic oligonucleotide
agauauuguaaguuggaug

SEQ ID NO: 225692 - RNA, 19 nt, Artificial Sequence
  Description of Artificial Sequence: Synthetic oligonucleotide
aaauccaguauaugcaggu

SEQ ID NO: 225693 - RNA, 19 nt, Artificial Sequence
  Description of Artificial Sequence: Synthetic oligonucleotide
ugggauauugguauucugc

SEQ ID NO: 225694 - RNA, 19 nt, Artificial Sequence
  Description of Artificial Sequence: Synthetic oligonucleotide
aaaacgaguacuacaaugu

SEQ ID NO: 225695 - RNA, 19 nt, Artificial Sequence
  Description of Artificial Sequence: Synthetic oligonucleotide
aaucaacaguaauacacca

SEQ ID NO: 225696 - RNA, 19 nt, Artificial Sequence
  Description of Artificial Sequence: Synthetic oligonucleotide
uaagauuauauuccagacu

SEQ ID NO: 225697 - RNA, 19 nt, Artificial Sequence
  Description of Artificial Sequence: Synthetic oligonucleotide
ugcuaguaagauuauauuc

SEQ ID NO: 225698 - RNA, 19 nt, Artificial Sequence
  Description of Artificial Sequence: Synthetic oligonucleotide
uuaaucaccuaauuucaca

SEQ ID NO: 225699 - RNA, 19 nt, Artificial Sequence
  Description of Artificial Sequence: Synthetic oligonucleotide
uaauagaguaacauauuaa

SEQ ID NO: 225700 - RNA, 19 nt, Artificial Sequence
  Description of Artificial Sequence: Synthetic oligonucleotide
uuauauagcagcuuaucua

SEQ ID NO: 225701 - RNA, 19 nt, Artificial Sequence
  Description of Artificial Sequence: Synthetic oligonucleotide
auccgaucaauauucaaag

SEQ ID NO: 225702 - RNA, 19 nt, Artificial Sequence
  Description of Artificial Sequence: Synthetic oligonucleotide
acaguaauacaccauaaau

SEQ ID NO: 225703 - RNA, 19 nt, Artificial Sequence
  Description of Artificial Sequence: Synthetic oligonucleotide
aaggugcguauuuccagcc

SEQ ID NO: 225704 - RNA, 19 nt, Artificial Sequence
  Description of Artificial Sequence: Synthetic oligonucleotide
gacggaauguauuaaauaa

SEQ ID NO: 225705 - RNA, 19 nt, Artificial Sequence
  Description of Artificial Sequence: Synthetic oligonucleotide
uuuuauaugcagugaugag

SEQ ID NO: 225706 - RNA, 19 nt, Artificial Sequence
  Description of Artificial Sequence: Synthetic oligonucleotide
aauggguuacugguaacac

SEQ ID NO: 225707 - RNA, 19 nt, Artificial Sequence
  Description of Artificial Sequence: Synthetic oligonucleotide
uuuauaaagggaucauuaa

SEQ ID NO: 225708 - RNA, 19 nt, Artificial Sequence
  Description of Artificial Sequence: Synthetic oligonucleotide
acagacggggauuuaugcc

SEQ ID NO: 225709 - RNA, 19 nt, Artificial Sequence
  Description of Artificial Sequence: Synthetic oligonucleotide
agucaagccugcaagauac

SEQ ID NO: 225710 - RNA, 19 nt, Artificial Sequence
  Description of Artificial Sequence: Synthetic oligonucleotide
uuugcuaauagaguaacau

SEQ ID NO: 225711 - RNA, 19 nt, Artificial Sequence
  Description of Artificial Sequence: Synthetic oligonucleotide
guaagauuauauuccagac

SEQ ID NO: 225712 - RNA, 19 nt, Artificial Sequence
  Description of Artificial Sequence: Synthetic oligonucleotide
uaucguuuauuccaguaaa

SEQ ID NO: 225713 - RNA, 19 nt, Artificial Sequence
  Description of Artificial Sequence: Synthetic oligonucleotide
ugcucaucgacauucaauc

SEQ ID NO: 225714 - RNA, 19 nt, Artificial Sequence
  Description of Artificial Sequence: Synthetic oligonucleotide
aauaucguuuauuccagua

SEQ ID NO: 225715 - RNA, 19 nt, Artificial Sequence
  Description of Artificial Sequence: Synthetic oligonucleotide
ucuaucucguguaauuaga

SEQ ID NO: 225716 - RNA, 19 nt, Artificial Sequence
  Description of Artificial Sequence: Synthetic oligonucleotide
uucuaucucguguaauuag

SEQ ID NO: 225717 - RNA, 19 nt, Artificial Sequence
  Description of Artificial Sequence: Synthetic oligonucleotide
uuagaaggcuaaauaacaa

SEQ ID NO: 225718 - RNA, 19 nt, Artificial Sequence
  Description of Artificial Sequence: Synthetic oligonucleotide
guaauuucugucccugacg

SEQ ID NO: 225719 - RNA, 19 nt, Artificial Sequence
  Description of Artificial Sequence: Synthetic oligonucleotide
aauauaugcuuguugucuu

SEQ ID NO: 225720 - RNA, 19 nt, Artificial Sequence
  Description of Artificial Sequence: Synthetic oligonucleotide
uacaauacaguaguuacaa

SEQ ID NO: 225721 - RNA, 19 nt, Artificial Sequence
  Description of Artificial Sequence: Synthetic oligonucleotide
guaucauugagcuuccuca

SEQ ID NO: 225722 - RNA, 19 nt, Artificial Sequence
  Description of Artificial Sequence: Synthetic oligonucleotide
acuuucuauucccaccugg

SEQ ID NO: 225723 - RNA, 19 nt, Artificial Sequence
  Description of Artificial Sequence: Synthetic oligonucleotide
gaugguuugccgcuguuug

SEQ ID NO: 225724 - RNA, 19 nt, Artificial Sequence
  Description of Artificial Sequence: Synthetic oligonucleotide
aaauaagucuaaacuacca

SEQ ID NO: 225725 - RNA, 19 nt, Artificial Sequence
  Description of Artificial Sequence: Synthetic oligonucleotide
ucagagugcuaucaggacu

SEQ ID NO: 225726 - RNA, 19 nt, Artificial Sequence
  Description of Artificial Sequence: Synthetic oligonucleotide
uuuauuccaguaaaugcua

SEQ ID NO: 225727 - RNA, 19 nt, Artificial Sequence
  Description of Artificial Sequence: Synthetic oligonucleotide
cuaaagugaaucaacagua

SEQ ID NO: 225728 - RNA, 19 nt, Artificial Sequence
  Description of Artificial Sequence: Synthetic oligonucleotide
uaguaggaauauaugcuug

SEQ ID NO: 225729 - RNA, 19 nt, Artificial Sequence
  Description of Artificial Sequence: Synthetic oligonucleotide
uacauggcaaacuagugua

SEQ ID NO: 225730 - RNA, 19 nt, Artificial Sequence
  Description of Artificial Sequence: Synthetic oligonucleotide
uagaaggcuaaauaacaac

SEQ ID NO: 225731 - RNA, 19 nt, Artificial Sequence
  Description of Artificial Sequence: Synthetic oligonucleotide
aaacuaagucauuggauuu

SEQ ID NO: 225732 - RNA, 19 nt, Artificial Sequence
  Description of Artificial Sequence: Synthetic oligonucleotide
uauaugcuuguugucuucg

SEQ ID NO: 225733 - RNA, 19 nt, Artificial Sequence
  Description of Artificial Sequence: Synthetic oligonucleotide
aacaacuaguuaaucaccu

SEQ ID NO: 225734 - RNA, 19 nt, Artificial Sequence
  Description of Artificial Sequence: Synthetic oligonucleotide
uggcaaucguuauauagca

SEQ ID NO: 225735 - RNA, 19 nt, Artificial Sequence
  Description of Artificial Sequence: Synthetic oligonucleotide
aucucguguaauuagacuu

SEQ ID NO: 225736 - RNA, 19 nt, Artificial Sequence
  Description of Artificial Sequence: Synthetic oligonucleotide
uuaaaucacugagaacuag

SEQ ID NO: 225737 - RNA, 19 nt, Artificial Sequence
  Description of Artificial Sequence: Synthetic oligonucleotide
guaaguuggaugcuguaac

SEQ ID NO: 225738 - RNA, 19 nt, Artificial Sequence
  Description of Artificial Sequence: Synthetic oligonucleotide
uaauagacauuacauccau

SEQ ID NO: 225739 - RNA, 19 nt, Artificial Sequence
  Description of Artificial Sequence: Synthetic oligonucleotide
uaaguuacauugauacauc

SEQ ID NO: 225740 - RNA, 19 nt, Artificial Sequence
  Description of Artificial Sequence: Synthetic oligonucleotide
ugaaguucaaaugcugcug

SEQ ID NO: 225741 - RNA, 19 nt, Artificial Sequence
  Description of Artificial Sequence: Synthetic oligonucleotide
gaaauccaguauaugcagg

SEQ ID NO: 225742 - RNA, 19 nt, Artificial Sequence
  Description of Artificial Sequence: Synthetic oligonucleotide
ugagugaacacauccgauc

SEQ ID NO: 225743 - RNA, 19 nt, Artificial Sequence
  Description of Artificial Sequence: Synthetic oligonucleotide
uauuguaaguuggaugcug

SEQ ID NO: 225744 - RNA, 19 nt, Artificial Sequence
  Description of Artificial Sequence: Synthetic oligonucleotide
uguaagaauguggagggaa

SEQ ID NO: 225745 - RNA, 19 nt, Artificial Sequence
  Description of Artificial Sequence: Synthetic oligonucleotide
cuaucgcaaacuguaauag

SEQ ID NO: 225746 - RNA, 19 nt, Artificial Sequence
  Description of Artificial Sequence: Synthetic oligonucleotide
uugucuucgaugcccgaag

SEQ ID NO: 225747 - RNA, 19 nt, Artificial Sequence
  Description of Artificial Sequence: Synthetic oligonucleotide
cuuaaauuccaccucuaca

SEQ ID NO: 225748 - RNA, 19 nt, Artificial Sequence
  Description of Artificial Sequence: Synthetic oligonucleotide
agaacucacaucuuuucaa

SEQ ID NO: 225749 - RNA, 19 nt, Artificial Sequence
  Description of Artificial Sequence: Synthetic oligonucleotide
aucguuauauagcagcuua

SEQ ID NO: 225750 - RNA, 19 nt, Artificial Sequence
  Description of Artificial Sequence: Synthetic oligonucleotide
ggaaauccaguauaugcag

SEQ ID NO: 225751 - RNA, 19 nt, Artificial Sequence
  Description of Artificial Sequence: Synthetic oligonucleotide
auacuugaggucuaugcaa

SEQ ID NO: 225752 - RNA, 19 nt, Artificial Sequence
  Description of Artificial Sequence: Synthetic oligonucleotide
aagugaaucaacaguaaua

SEQ ID NO: 225753 - RNA, 19 nt, Artificial Sequence
  Description of Artificial Sequence: Synthetic oligonucleotide
auaucguuuauuccaguaa

SEQ ID NO: 225754 - RNA, 19 nt, Artificial Sequence
  Description of Artificial Sequence: Synthetic oligonucleotide
aguuaaucaccuaauuuca

SEQ ID NO: 225755 - RNA, 19 nt, Artificial Sequence
  Description of Artificial Sequence: Synthetic oligonucleotide
aaggcuuggucacauuuaa

SEQ ID NO: 225756 - RNA, 19 nt, Artificial Sequence
  Description of Artificial Sequence: Synthetic oligonucleotide
uaacagacggggauuuaug

SEQ ID NO: 225757 - RNA, 19 nt, Artificial Sequence
  Description of Artificial Sequence: Synthetic oligonucleotide
aaauuuucccaguccuuau

SEQ ID NO: 225758 - RNA, 19 nt, Artificial Sequence
  Description of Artificial Sequence: Synthetic oligonucleotide
uaucucguguaauuagacu

SEQ ID NO: 225759 - RNA, 19 nt, Artificial Sequence
  Description of Artificial Sequence: Synthetic oligonucleotide
cuaucucguguaauuagac

SEQ ID NO: 225760 - RNA, 19 nt, Artificial Sequence
  Description of Artificial Sequence: Synthetic oligonucleotide
gggauuuaugcccacuggg

SEQ ID NO: 225761 - RNA, 19 nt, Artificial Sequence
  Description of Artificial Sequence: Synthetic oligonucleotide
aaacgaguacuacaaugua

SEQ ID NO: 225762 - RNA, 19 nt, Artificial Sequence
  Description of Artificial Sequence: Synthetic oligonucleotide
uccaaggugcguauuucca

SEQ ID NO: 225763 - RNA, 19 nt, Artificial Sequence
  Description of Artificial Sequence: Synthetic oligonucleotide
ugacggaauguauuaaaua

SEQ ID NO: 225764 - RNA, 19 nt, Artificial Sequence
  Description of Artificial Sequence: Synthetic oligonucleotide
uaucgcaaacuguaauaga

SEQ ID NO: 225765 - RNA, 19 nt, Artificial Sequence
  Description of Artificial Sequence: Synthetic oligonucleotide
uugagucugaugaaugguu

SEQ ID NO: 225766 - RNA, 19 nt, Artificial Sequence
  Description of Artificial Sequence: Synthetic oligonucleotide
uacuaucgcaaacuguaau

SEQ ID NO: 225767 - RNA, 19 nt, Artificial Sequence
  Description of Artificial Sequence: Synthetic oligonucleotide
uugcuaauagaguaacaua

SEQ ID NO: 225768 - RNA, 19 nt, Artificial Sequence
  Description of Artificial Sequence: Synthetic oligonucleotide
uguaaguuggaugcuguaa

SEQ ID NO: 225769 - RNA, 19 nt, Artificial Sequence
  Description of Artificial Sequence: Synthetic oligonucleotide
gguauggaaguagaguagg

SEQ ID NO: 225770 - RNA, 19 nt, Artificial Sequence
  Description of Artificial Sequence: Synthetic oligonucleotide
acggaauguauuaaauaag

SEQ ID NO: 225771 - RNA, 19 nt, Artificial Sequence
  Description of Artificial Sequence: Synthetic oligonucleotide
aacgaguacuacaauguaa

SEQ ID NO: 225772 - RNA, 19 nt, Artificial Sequence
  Description of Artificial Sequence: Synthetic oligonucleotide
ucucguguaauuagacuua

SEQ ID NO: 225773 - RNA, 19 nt, Artificial Sequence
  Description of Artificial Sequence: Synthetic oligonucleotide
ccgaucaauauucaaagug

SEQ ID NO: 225774 - RNA, 19 nt, Artificial Sequence
  Description of Artificial Sequence: Synthetic oligonucleotide
ugaucacacucacggcagg

SEQ ID NO: 225775 - RNA, 19 nt, Artificial Sequence
  Description of Artificial Sequence: Synthetic oligonucleotide
gaaguuuccauuccacucu

SEQ ID NO: 225776 - RNA, 19 nt, Artificial Sequence
  Description of Artificial Sequence: Synthetic oligonucleotide
gucuacaaugccaguauag

SEQ ID NO: 225777 - RNA, 19 nt, Artificial Sequence
  Description of Artificial Sequence: Synthetic oligonucleotide
ucaucggugucacuacuaa

SEQ ID NO: 225778 - RNA, 19 nt, Artificial Sequence
  Description of Artificial Sequence: Synthetic oligonucleotide
cauccgaucaauauucaaa

SEQ ID NO: 225779 - RNA, 19 nt, Artificial Sequence
  Description of Artificial Sequence: Synthetic oligonucleotide
ccuuauuguaauauugcac

SEQ ID NO: 225780 - RNA, 19 nt, Artificial Sequence
  Description of Artificial Sequence: Synthetic oligonucleotide
agcuaaaacacagccuuug

SEQ ID NO: 225781 - RNA, 19 nt, Artificial Sequence
  Description of Artificial Sequence: Synthetic oligonucleotide
aacuaguuaaucaccuaau

SEQ ID NO: 225782 - RNA, 19 nt, Artificial Sequence
  Description of Artificial Sequence: Synthetic oligonucleotide
auaugcagugaugagcaca

SEQ ID NO: 225783 - RNA, 19 nt, Artificial Sequence
  Description of Artificial Sequence: Synthetic oligonucleotide
ugcuguaacauaggucuug

SEQ ID NO: 225784 - RNA, 19 nt, Artificial Sequence
  Description of Artificial Sequence: Synthetic oligonucleotide
gggagauauuguaaguugg

SEQ ID NO: 225785 - RNA, 19 nt, Artificial Sequence
  Description of Artificial Sequence: Synthetic oligonucleotide
ggaucauuaaaaugaaucu

SEQ ID NO: 225786 - RNA, 19 nt, Artificial Sequence
  Description of Artificial Sequence: Synthetic oligonucleotide
cacaaaacugcucucugca

SEQ ID NO: 225787 - RNA, 19 nt, Artificial Sequence
  Description of Artificial Sequence: Synthetic oligonucleotide
gggaugguaacagacgggg

SEQ ID NO: 225788 - RNA, 19 nt, Artificial Sequence
  Description of Artificial Sequence: Synthetic oligonucleotide
auugagucugaugaauggu

SEQ ID NO: 225789 - RNA, 19 nt, Artificial Sequence
  Description of Artificial Sequence: Synthetic oligonucleotide
acgaguacuacaauguaaa

SEQ ID NO: 225790 - RNA, 19 nt, Artificial Sequence
  Description of Artificial Sequence: Synthetic oligonucleotide
uccgaucaauauucaaagu

SEQ ID NO: 225791 - RNA, 19 nt, Artificial Sequence
  Description of Artificial Sequence: Synthetic oligonucleotide
auggguauggaaguagagu

SEQ ID NO: 225792 - RNA, 19 nt, Artificial Sequence
  Description of Artificial Sequence: Synthetic oligonucleotide
caacuaguuaaucaccuaa

SEQ ID NO: 225793 - RNA, 19 nt, Artificial Sequence
  Description of Artificial Sequence: Synthetic oligonucleotide
uccucaacgucuuucccau

SEQ ID NO: 225794 - RNA, 19 nt, Artificial Sequence
  Description of Artificial Sequence: Synthetic oligonucleotide
ugaacacauccgaucaaua

SEQ ID NO: 225795 - RNA, 19 nt, Artificial Sequence
  Description of Artificial Sequence: Synthetic oligonucleotide
augcuaguaagauuauauu

SEQ ID NO: 225796 - RNA, 19 nt, Artificial Sequence
  Description of Artificial Sequence: Synthetic oligonucleotide
uaacauaggucuugaggua

SEQ ID NO: 225797 - RNA, 19 nt, Artificial Sequence
  Description of Artificial Sequence: Synthetic oligonucleotide
ggaugauuuaagucuuuug

SEQ ID NO: 225798 - RNA, 19 nt, Artificial Sequence
  Description of Artificial Sequence: Synthetic oligonucleotide
auggguuacugguaacacu

SEQ ID NO: 225799 - RNA, 19 nt, Artificial Sequence
  Description of Artificial Sequence: Synthetic oligonucleotide
uggugaguauccuccacaa

SEQ ID NO: 225800 - RNA, 19 nt, Artificial Sequence
  Description of Artificial Sequence: Synthetic oligonucleotide
aacuaccaccaacaagcaa

SEQ ID NO: 225801 - RNA, 19 nt, Artificial Sequence
  Description of Artificial Sequence: Synthetic oligonucleotide
ucguuauauagcagcuuau

SEQ ID NO: 225802 - RNA, 19 nt, Artificial Sequence
  Description of Artificial Sequence: Synthetic oligonucleotide
ucggacagacgcuuccuga

SEQ ID NO: 225803 - RNA, 19 nt, Artificial Sequence
  Description of Artificial Sequence: Synthetic oligonucleotide
uuuaugcccacugggacuu

SEQ ID NO: 225804 - RNA, 19 nt, Artificial Sequence
  Description of Artificial Sequence: Synthetic oligonucleotide
acgucuuucccauuugauu

SEQ ID NO: 225805 - RNA, 19 nt, Artificial Sequence
  Description of Artificial Sequence: Synthetic oligonucleotide
cucagagugcuaucaggac

SEQ ID NO: 225806 - RNA, 19 nt, Artificial Sequence
  Description of Artificial Sequence: Synthetic oligonucleotide
guuaaucaccuaauuucac

SEQ ID NO: 225807 - RNA, 19 nt, Artificial Sequence
  Description of Artificial Sequence: Synthetic oligonucleotide
aucgacauucaauccacuu

SEQ ID NO: 225808 - RNA, 19 nt, Artificial Sequence
  Description of Artificial Sequence: Synthetic oligonucleotide
ggugcguauuuccagccag

SEQ ID NO: 225809 - RNA, 19 nt, Artificial Sequence
  Description of Artificial Sequence: Synthetic oligonucleotide
gaaggcuaaauaacaacua

SEQ ID NO: 225810 - RNA, 19 nt, Artificial Sequence
  Description of Artificial Sequence: Synthetic oligonucleotide
ugguuuguauugagucuga

SEQ ID NO: 225811 - RNA, 19 nt, Artificial Sequence
  Description of Artificial Sequence: Synthetic oligonucleotide
ccauuugauuaucuuuugg

SEQ ID NO: 225812 - RNA, 19 nt, Artificial Sequence
  Description of Artificial Sequence: Synthetic oligonucleotide
accucuacacuacaauaua

SEQ ID NO: 225813 - RNA, 19 nt, Artificial Sequence
  Description of Artificial Sequence: Synthetic oligonucleotide
ccagacuaccuuuacacuc

SEQ ID NO: 225814 - RNA, 19 nt, Artificial Sequence
  Description of Artificial Sequence: Synthetic oligonucleotide
ugugcucaucgacauucaa

SEQ ID NO: 225815 - RNA, 19 nt, Artificial Sequence
  Description of Artificial Sequence: Synthetic oligonucleotide
guauggaaguagaguaggc

SEQ ID NO: 225816 - RNA, 19 nt, Artificial Sequence
  Description of Artificial Sequence: Synthetic oligonucleotide
accaaauagucaccuggaa

SEQ ID NO: 225817 - RNA, 19 nt, Artificial Sequence
  Description of Artificial Sequence: Synthetic oligonucleotide
ggggauuuaugcccacugg

SEQ ID NO: 225818 - RNA, 19 nt, Artificial Sequence
  Description of Artificial Sequence: Synthetic oligonucleotide
aaacuaccaccaacaagca

SEQ ID NO: 225819 - RNA, 19 nt, Artificial Sequence
  Description of Artificial Sequence: Synthetic oligonucleotide
guauuuccagccagauggg

SEQ ID NO: 225820 - RNA, 19 nt, Artificial Sequence
  Description of Artificial Sequence: Synthetic oligonucleotide
cuaccuuuacacucucuga

SEQ ID NO: 225821 - RNA, 19 nt, Artificial Sequence
  Description of Artificial Sequence: Synthetic oligonucleotide
ggaauguauuaaauaaguc

SEQ ID NO: 225822 - RNA, 19 nt, Artificial Sequence
  Description of Artificial Sequence: Synthetic oligonucleotide
acaacuaguuaaucaccua

SEQ ID NO: 225823 - RNA, 19 nt, Artificial Sequence
  Description of Artificial Sequence: Synthetic oligonucleotide
uauaugcagugaugagcac

SEQ ID NO: 225824 - RNA, 19 nt, Artificial Sequence
  Description of Artificial Sequence: Synthetic oligonucleotide
cuguugggucucuugcaag

SEQ ID NO: 225825 - RNA, 19 nt, Artificial Sequence
  Description of Artificial Sequence: Synthetic oligonucleotide
gucccgaggagucugaugu

SEQ ID NO: 225826 - RNA, 19 nt, Artificial Sequence
  Description of Artificial Sequence: Synthetic oligonucleotide
gacacucaccaaauaguca

SEQ ID NO: 225827 - RNA, 19 nt, Artificial Sequence
  Description of Artificial Sequence: Synthetic oligonucleotide
gugaaucaacaguaauaca

SEQ ID NO: 225828 - RNA, 19 nt, Artificial Sequence
  Description of Artificial Sequence: Synthetic oligonucleotide
aguguaugauuuaacuuuu

SEQ ID NO: 225829 - RNA, 19 nt, Artificial Sequence
  Description of Artificial Sequence: Synthetic oligonucleotide
ucccugacggaauguauua

SEQ ID NO: 225830 - RNA, 19 nt, Artificial Sequence
  Description of Artificial Sequence: Synthetic oligonucleotide
caagaguaaaacuguucaa

SEQ ID NO: 225831 - RNA, 19 nt, Artificial Sequence
  Description of Artificial Sequence: Synthetic oligonucleotide
gacugucaugucccgagga

SEQ ID NO: 225832 - RNA, 19 nt, Artificial Sequence
  Description of Artificial Sequence: Synthetic oligonucleotide
gguaacacuaguaggaaua

SEQ ID NO: 225833 - RNA, 19 nt, Artificial Sequence
  Description of Artificial Sequence: Synthetic oligonucleotide
ugacauacuguugggucuc

SEQ ID NO: 225834 - RNA, 19 nt, Artificial Sequence
  Description of Artificial Sequence: Synthetic oligonucleotide
agugaacacauccgaucaa

SEQ ID NO: 225835 - RNA, 19 nt, Artificial Sequence
  Description of Artificial Sequence: Synthetic oligonucleotide
uccuccaaggugcguauuu

SEQ ID NO: 225836 - RNA, 19 nt, Artificial Sequence
  Description of Artificial Sequence: Synthetic oligonucleotide
agcuaucugaaguggcaau

SEQ ID NO: 225837 - RNA, 19 nt, Artificial Sequence
  Description of Artificial Sequence: Synthetic oligonucleotide
ucgucaucggugucacuac

SEQ ID NO: 225838 - RNA, 19 nt, Artificial Sequence
  Description of Artificial Sequence: Synthetic oligonucleotide
auauuguaaguuggaugcu

SEQ ID NO: 225839 - RNA, 19 nt, Artificial Sequence
  Description of Artificial Sequence: Synthetic oligonucleotide
gccgcuguuugucugaaac

SEQ ID NO: 225840 - RNA, 19 nt, Artificial Sequence
  Description of Artificial Sequence: Synthetic oligonucleotide
cuguaacauaggucuugag

SEQ ID NO: 225841 - RNA, 19 nt, Artificial Sequence
  Description of Artificial Sequence: Synthetic oligonucleotide
ugucccgaggagucugaug

SEQ ID NO: 225842 - RNA, 19 nt, Artificial Sequence
  Description of Artificial Sequence: Synthetic oligonucleotide
agcacuacugaggguagcu

SEQ ID NO: 225843 - RNA, 19 nt, Artificial Sequence
  Description of Artificial Sequence: Synthetic oligonucleotide
acauggcaaacuaguguag

SEQ ID NO: 225844 - RNA, 19 nt, Artificial Sequence
  Description of Artificial Sequence: Synthetic oligonucleotide
augguuugccgcuguuugu

SEQ ID NO: 225845 - RNA, 19 nt, Artificial Sequence
  Description of Artificial Sequence: Synthetic oligonucleotide
caaucguuauauagcagcu

SEQ ID NO: 225846 - RNA, 19 nt, Artificial Sequence
  Description of Artificial Sequence: Synthetic oligonucleotide
gcugaaugugggauauugg

SEQ ID NO: 225847 - RNA, 19 nt, Artificial Sequence
  Description of Artificial Sequence: Synthetic oligonucleotide
gugcucagagugcuaucag

SEQ ID NO: 225848 - RNA, 19 nt, Artificial Sequence
  Description of Artificial Sequence: Synthetic oligonucleotide
ccaaggugcguauuuccag

SEQ ID NO: 225849 - RNA, 19 nt, Artificial Sequence
  Description of Artificial Sequence: Synthetic oligonucleotide
ugcguauuuccagccagau

SEQ ID NO: 225850 - RNA, 19 nt, Artificial Sequence
  Description of Artificial Sequence: Synthetic oligonucleotide
ggguauggaaguagaguag

SEQ ID NO: 225851 - RNA, 19 nt, Artificial Sequence
  Description of Artificial Sequence: Synthetic oligonucleotide
uuacuuugccuggaagcua

SEQ ID NO: 225852 - RNA, 19 nt, Artificial Sequence
  Description of Artificial Sequence: Synthetic oligonucleotide
aucguuuauuccaguaaau

SEQ ID NO: 225853 - RNA, 19 nt, Artificial Sequence
  Description of Artificial Sequence: Synthetic oligonucleotide
ggauuuaugcccacuggga

SEQ ID NO: 225854 - RNA, 19 nt, Artificial Sequence
  Description of Artificial Sequence: Synthetic oligonucleotide
ucguguaauuagacuuaua

SEQ ID NO: 225855 - RNA, 19 nt, Artificial Sequence
  Description of Artificial Sequence: Synthetic oligonucleotide
gagauauuguaaguuggau

SEQ ID NO: 225856 - RNA, 19 nt, Artificial Sequence
  Description of Artificial Sequence: Synthetic oligonucleotide
ggagauauuguaaguugga

SEQ ID NO: 225857 - RNA, 19 nt, Artificial Sequence
  Description of Artificial Sequence: Synthetic oligonucleotide
uaacacuaguaggaauaua

SEQ ID NO: 225858 - RNA, 19 nt, Artificial Sequence
  Description of Artificial Sequence: Synthetic oligonucleotide
cuaccaccaacaagcaaaa

SEQ ID NO: 225859 - RNA, 19 nt, Artificial Sequence
  Description of Artificial Sequence: Synthetic oligonucleotide
aggugcguauuuccagcca

SEQ ID NO: 225860 - RNA, 19 nt, Artificial Sequence
  Description of Artificial Sequence: Synthetic oligonucleotide
gaucacacucacggcagga

SEQ ID NO: 225861 - RNA, 19 nt, Artificial Sequence
  Description of Artificial Sequence: Synthetic oligonucleotide
cagacuaccuuuacacucu

SEQ ID NO: 225862 - RNA, 19 nt, Artificial Sequence
  Description of Artificial Sequence: Synthetic oligonucleotide
aaguggcaaucguuauaua

SEQ ID NO: 225863 - RNA, 19 nt, Artificial Sequence
  Description of Artificial Sequence: Synthetic oligonucleotide
gugacgauuguccuguguu

SEQ ID NO: 225864 - RNA, 19 nt, Artificial Sequence
  Description of Artificial Sequence: Synthetic oligonucleotide
caaacuaguguagcaucga

SEQ ID NO: 225865 - RNA, 19 nt, Artificial Sequence
  Description of Artificial Sequence: Synthetic oligonucleotide
ggacugucaugucccgagg

SEQ ID NO: 225866 - RNA, 19 nt, Artificial Sequence
  Description of Artificial Sequence: Synthetic oligonucleotide
auacuaucgcaaacuguaa

SEQ ID NO: 225867 - RNA, 19 nt, Artificial Sequence
  Description of Artificial Sequence: Synthetic oligonucleotide
cuucuaucucguguaauua

SEQ ID NO: 225868 - RNA, 19 nt, Artificial Sequence
  Description of Artificial Sequence: Synthetic oligonucleotide
ucgaugcccgaaguuucca

SEQ ID NO: 225869 - RNA, 19 nt, Artificial Sequence
  Description of Artificial Sequence: Synthetic oligonucleotide
gcucagagugcuaucagga

SEQ ID NO: 225870 - RNA, 19 nt, Artificial Sequence
  Description of Artificial Sequence: Synthetic oligonucleotide
ggcuaaauaacaacuaguu

SEQ ID NO: 225871 - RNA, 19 nt, Artificial Sequence
  Description of Artificial Sequence: Synthetic oligonucleotide
caccuaauuucacagcuau

SEQ ID NO: 225872 - RNA, 19 nt, Artificial Sequence
  Description of Artificial Sequence: Synthetic oligonucleotide
cucggagagucugcgauga

SEQ ID NO: 225873 - RNA, 19 nt, Artificial Sequence
  Description of Artificial Sequence: Synthetic oligonucleotide
uggcugaguuuuguuggac

SEQ ID NO: 225874 - RNA, 19 nt, Artificial Sequence
  Description of Artificial Sequence: Synthetic oligonucleotide
ggcaaucguuauauagcag

SEQ ID NO: 225875 - RNA, 19 nt, Artificial Sequence
  Description of Artificial Sequence: Synthetic oligonucleotide
acaauauacuugaggucua

SEQ ID NO: 225876 - RNA, 19 nt, Artificial Sequence
  Description of Artificial Sequence: Synthetic oligonucleotide
cauugagcuuccucaauau

SEQ ID NO: 225877 - RNA, 19 nt, Artificial Sequence
  Description of Artificial Sequence: Synthetic oligonucleotide
ggggaugguaacagacggg

SEQ ID NO: 225878 - RNA, 19 nt, Artificial Sequence
  Description of Artificial Sequence: Synthetic oligonucleotide
uccugucggacagacgcuu

SEQ ID NO: 225879 - RNA, 19 nt, Artificial Sequence
  Description of Artificial Sequence: Synthetic oligonucleotide
guaacagacggggauuuau

SEQ ID NO: 225880 - RNA, 19 nt, Artificial Sequence
  Description of Artificial Sequence: Synthetic oligonucleotide
gcguauuuccagccagaug

SEQ ID NO: 225881 - RNA, 19 nt, Artificial Sequence
  Description of Artificial Sequence: Synthetic oligonucleotide
guaacacuaguaggaauau

SEQ ID NO: 225882 - RNA, 19 nt, Artificial Sequence
  Description of Artificial Sequence: Synthetic oligonucleotide
gacggggauuuaugcccac

SEQ ID NO: 225883 - RNA, 19 nt, Artificial Sequence
  Description of Artificial Sequence: Synthetic oligonucleotide
cggaauguauuaaauaagu

SEQ ID NO: 225884 - RNA, 19 nt, Artificial Sequence
  Description of Artificial Sequence: Synthetic oligonucleotide
cguuauauagcagcuuauc

SEQ ID NO: 225885 - RNA, 19 nt, Artificial Sequence
  Description of Artificial Sequence: Synthetic oligonucleotide
gugaacacauccgaucaau

SEQ ID NO: 225886 - RNA, 19 nt, Artificial Sequence
  Description of Artificial Sequence: Synthetic oligonucleotide
uuguaucauugagcuuccu

SEQ ID NO: 225887 - RNA, 19 nt, Artificial Sequence
  Description of Artificial Sequence: Synthetic oligonucleotide
ggguuacugguaacacuag

SEQ ID NO: 225888 - RNA, 19 nt, Artificial Sequence
  Description of Artificial Sequence: Synthetic oligonucleotide
ccugacggaauguauuaaa

SEQ ID NO: 225889 - RNA, 19 nt, Artificial Sequence
  Description of Artificial Sequence: Synthetic oligonucleotide
gcuucuaucucguguaauu

SEQ ID NO: 225890 - RNA, 19 nt, Artificial Sequence
  Description of Artificial Sequence: Synthetic oligonucleotide
cagcacuacugaggguagc

SEQ ID NO: 225891 - RNA, 19 nt, Artificial Sequence
  Description of Artificial Sequence: Synthetic oligonucleotide
acggggauuuaugcccacu

SEQ ID NO: 225892 - RNA, 19 nt, Artificial Sequence
  Description of Artificial Sequence: Synthetic oligonucleotide
ucggagagucugcgaugau

SEQ ID NO: 225893 - RNA, 19 nt, Artificial Sequence
  Description of Artificial Sequence: Synthetic oligonucleotide
gucaucggugucacuacua

SEQ ID NO: 225894 - RNA, 19 nt, Artificial Sequence
  Description of Artificial Sequence: Synthetic oligonucleotide
gugcucaucgacauucaau

SEQ ID NO: 225895 - RNA, 19 nt, Artificial Sequence
  Description of Artificial Sequence: Synthetic oligonucleotide
gcagcacuacugaggguag

SEQ ID NO: 225896 - RNA, 19 nt, Artificial Sequence
  Description of Artificial Sequence: Synthetic oligonucleotide
gcuaucaggacugcugagu

SEQ ID NO: 225897 - RNA, 19 nt, Artificial Sequence
  Description of Artificial Sequence: Synthetic oligonucleotide
ccaguauaugcaggugaug

SEQ ID NO: 225898 - RNA, 19 nt, Artificial Sequence
  Description of Artificial Sequence: Synthetic oligonucleotide
caucgacauucaauccacu

SEQ ID NO: 225899 - RNA, 19 nt, Artificial Sequence
  Description of Artificial Sequence: Synthetic oligonucleotide
cuaugccacugggauggga

SEQ ID NO: 225900 - RNA, 19 nt, Artificial Sequence
  Description of Artificial Sequence: Synthetic oligonucleotide
cucguguaauuagacuuau

SEQ ID NO: 225901 - RNA, 19 nt, Artificial Sequence
  Description of Artificial Sequence: Synthetic oligonucleotide
ccgaaguuuccauuccacu

SEQ ID NO: 225902 - RNA, 19 nt, Artificial Sequence
  Description of Artificial Sequence: Synthetic oligonucleotide
cgaguacuacaauguaaaa

SEQ ID NO: 225903 - RNA, 19 nt, Artificial Sequence
  Description of Artificial Sequence: Synthetic oligonucleotide
ccuugcaguguaugauuua

SEQ ID NO: 225904 - RNA, 19 nt, Artificial Sequence
  Description of Artificial Sequence: Synthetic oligonucleotide
ccgcuguuugucugaaacu

SEQ ID NO: 225905 - RNA, 19 nt, Artificial Sequence
  Description of Artificial Sequence: Synthetic oligonucleotide
cccugacggaauguauuaa

SEQ ID NO: 225906 - RNA, 19 nt, Artificial Sequence
  Description of Artificial Sequence: Synthetic oligonucleotide
cgauuguccuguguuucua

SEQ ID NO: 225907 - RNA, 19 nt, Artificial Sequence
  Description of Artificial Sequence: Synthetic oligonucleotide
ccgccccgaggaacuggug

SEQ ID NO: 225908 - RNA, 19 nt, Artificial Sequence
  Description of Artificial Sequence: Synthetic oligonucleotide
cgaugcccgaaguuuccau

SEQ ID NO: 225909 - RNA, 19 nt, Artificial Sequence
  Description of Artificial Sequence: Synthetic oligonucleotide
uuugcagugacucucggcg

SEQ ID NO: 225910 - RNA, 19 nt, Artificial Sequence
  Description of Artificial Sequence: Synthetic oligonucleotide
agugcauagcaucaggggc

SEQ ID NO: 225911 - RNA, 19 nt, Artificial Sequence
  Description of Artificial Sequence: Synthetic oligonucleotide
uucaauaaggaauuuccag

SEQ ID NO: 225912 - RNA, 19 nt, Artificial Sequence
  Description of Artificial Sequence: Synthetic oligonucleotide
aaguuuguuaggaaaggcc

SEQ ID NO: 225913 - RNA, 19 nt, Artificial Sequence
  Description of Artificial Sequence: Synthetic oligonucleotide
gauagguuagcccagggac

SEQ ID NO: 225914 - RNA, 19 nt, Artificial Sequence
  Description of Artificial Sequence: Synthetic oligonucleotide
accuuuaguggguagauuc

SEQ ID NO: 225915 - RNA, 19 nt, Artificial Sequence
  Description of Artificial Sequence: Synthetic oligonucleotide
gauuagaugacugggaaug

SEQ ID NO: 225916 - RNA, 19 nt, Artificial Sequence
  Description of Artificial Sequence: Synthetic oligonucleotide
uucuguauggaccagccca

SEQ ID NO: 225917 - RNA, 19 nt, Artificial Sequence
  Description of Artificial Sequence: Synthetic oligonucleotide
uguucugaaggaaugagaa

SEQ ID NO: 225918 - RNA, 19 nt, Artificial Sequence
  Description of Artificial Sequence: Synthetic oligonucleotide
acacgaauggcccucaggg

SEQ ID NO: 225919 - RNA, 19 nt, Artificial Sequence
  Description of Artificial Sequence: Synthetic oligonucleotide
gacaggugaaguuuguuag

SEQ ID NO: 225920 - RNA, 19 nt, Artificial Sequence
  Description of Artificial Sequence: Synthetic oligonucleotide
cauguagacacgaauggcc

SEQ ID NO: 225921 - RNA, 19 nt, Artificial Sequence
  Description of Artificial Sequence: Synthetic oligonucleotide
uaaggaauuuccaggacca

SEQ ID NO: 225922 - RNA, 19 nt, Artificial Sequence
  Description of Artificial Sequence: Synthetic oligonucleotide
uuuaaaagcucaucugaug

SEQ ID NO: 225923 - RNA, 19 nt, Artificial Sequence
  Description of Artificial Sequence: Synthetic oligonucleotide
cuuuagcucaccauggggc

SEQ ID NO: 225924 - RNA, 19 nt, Artificial Sequence
  Description of Artificial Sequence: Synthetic oligonucleotide
ugagugcauagcaucaggg

SEQ ID NO: 225925 - RNA, 19 nt, Artificial Sequence
  Description of Artificial Sequence: Synthetic oligonucleotide
ucuuuagcucaccaugggg

SEQ ID NO: 225926 - RNA, 19 nt, Artificial Sequence
  Description of Artificial Sequence: Synthetic oligonucleotide
ucaagacuauguuugcggg

SEQ ID NO: 225927 - RNA, 19 nt, Artificial Sequence
  Description of Artificial Sequence: Synthetic oligonucleotide
gauggauguauucucuaag

SEQ ID NO: 225928 - RNA, 19 nt, Artificial Sequence
  Description of Artificial Sequence: Synthetic oligonucleotide
gucaagacuauguuugcgg

SEQ ID NO: 225929 - RNA, 19 nt, Artificial Sequence
  Description of Artificial Sequence: Synthetic oligonucleotide
aaagguuugugaucuccag

SEQ ID NO: 225930 - RNA, 19 nt, Artificial Sequence
  Description of Artificial Sequence: Synthetic oligonucleotide
uauguuugcgggaaggggu

SEQ ID NO: 225931 - RNA, 19 nt, Artificial Sequence
  Description of Artificial Sequence: Synthetic oligonucleotide
ucggcguucagcucgaucc

SEQ ID NO: 225932 - RNA, 19 nt, Artificial Sequence
  Description of Artificial Sequence: Synthetic oligonucleotide
uauuacacaggugagugca

SEQ ID NO: 225933 - RNA, 19 nt, Artificial Sequence
  Description of Artificial Sequence: Synthetic oligonucleotide
aacugugguuuccaaaucu

SEQ ID NO: 225934 - RNA, 19 nt, Artificial Sequence
  Description of Artificial Sequence: Synthetic oligonucleotide
gaggagaucgaggagagag

SEQ ID NO: 225935 - RNA, 19 nt, Artificial Sequence
  Description of Artificial Sequence: Synthetic oligonucleotide
uucuuuagaucccuauuca

SEQ ID NO: 225936 - RNA, 19 nt, Artificial Sequence
  Description of Artificial Sequence: Synthetic oligonucleotide
guguuguugauaucgauac

SEQ ID NO: 225937 - RNA, 19 nt, Artificial Sequence
  Description of Artificial Sequence: Synthetic oligonucleotide
aucgauaccuuguuuccac

SEQ ID NO: 225938 - RNA, 19 nt, Artificial Sequence
  Description of Artificial Sequence: Synthetic oligonucleotide
ucccuauucaagaaagugu

SEQ ID NO: 225939 - RNA, 19 nt, Artificial Sequence
  Description of Artificial Sequence: Synthetic oligonucleotide
aggugugguguucugaagg

SEQ ID NO: 225940 - RNA, 19 nt, Artificial Sequence
  Description of Artificial Sequence: Synthetic oligonucleotide
ugagaguacaggacccugg

SEQ ID NO: 225941 - RNA, 19 nt, Artificial Sequence
  Description of Artificial Sequence: Synthetic oligonucleotide
gagucuacuucccggauag

SEQ ID NO: 225942 - RNA, 19 nt, Artificial Sequence
  Description of Artificial Sequence: Synthetic oligonucleotide
gaccucaccaaguggauag

SEQ ID NO: 225943 - RNA, 19 nt, Artificial Sequence
  Description of Artificial Sequence: Synthetic oligonucleotide
ugagugcaaacccaacugc

SEQ ID NO: 225944 - RNA, 19 nt, Artificial Sequence
  Description of Artificial Sequence: Synthetic oligonucleotide
gaagagcugggacaaagug

SEQ ID NO: 225945 - RNA, 19 nt, Artificial Sequence
  Description of Artificial Sequence: Synthetic oligonucleotide
gagugcauagcaucagggg

SEQ ID NO: 225946 - RNA, 19 nt, Artificial Sequence
  Description of Artificial Sequence: Synthetic oligonucleotide
ucaugagacagguucuuug

SEQ ID NO: 225947 - RNA, 19 nt, Artificial Sequence
  Description of Artificial Sequence: Synthetic oligonucleotide
uguugauaucgauaccuug

SEQ ID NO: 225948 - RNA, 19 nt, Artificial Sequence
  Description of Artificial Sequence: Synthetic oligonucleotide
gagucacccauguagacac

SEQ ID NO: 225949 - RNA, 19 nt, Artificial Sequence
  Description of Artificial Sequence: Synthetic oligonucleotide
aaacccaacugcuauguuu

SEQ ID NO: 225950 - RNA, 19 nt, Artificial Sequence
  Description of Artificial Sequence: Synthetic oligonucleotide
uaacuuaccccuccuguug

SEQ ID NO: 225951 - RNA, 19 nt, Artificial Sequence
  Description of Artificial Sequence: Synthetic oligonucleotide
uaugaccccugucaauagg

SEQ ID NO: 225952 - RNA, 19 nt, Artificial Sequence
  Description of Artificial Sequence: Synthetic oligonucleotide
ucucuaaggguguuguuga

SEQ ID NO: 225953 - RNA, 19 nt, Artificial Sequence
  Description of Artificial Sequence: Synthetic oligonucleotide
aaaagcucaucugaugcca

SEQ ID NO: 225954 - RNA, 19 nt, Artificial Sequence
  Description of Artificial Sequence: Synthetic oligonucleotide
ucuaggaggguguauuaca

SEQ ID NO: 225955 - RNA, 19 nt, Artificial Sequence
  Description of Artificial Sequence: Synthetic oligonucleotide
uucucuauagaguccccag

SEQ ID NO: 225956 - RNA, 19 nt, Artificial Sequence
  Description of Artificial Sequence: Synthetic oligonucleotide
uucucuaaggguguuguug

SEQ ID NO: 225957 - RNA, 19 nt, Artificial Sequence
  Description of Artificial Sequence: Synthetic oligonucleotide
uggauuagaugacugggaa

SEQ ID NO: 225958 - RNA, 19 nt, Artificial Sequence
  Description of Artificial Sequence: Synthetic oligonucleotide
uacccgguagcccugagga

SEQ ID NO: 225959 - RNA, 19 nt, Artificial Sequence
  Description of Artificial Sequence: Synthetic oligonucleotide
cucuauagaguccccagag

SEQ ID NO: 225960 - RNA, 19 nt, Artificial Sequence
  Description of Artificial Sequence: Synthetic oligonucleotide
ucagugucgucuucugagg

SEQ ID NO: 225961 - RNA, 19 nt, Artificial Sequence
  Description of Artificial Sequence: Synthetic oligonucleotide
gucuggaccuucaauaagg

SEQ ID NO: 225962 - RNA, 19 nt, Artificial Sequence
  Description of Artificial Sequence: Synthetic oligonucleotide
uguauggaccagcccaugc

SEQ ID NO: 225963 - RNA, 19 nt, Artificial Sequence
  Description of Artificial Sequence: Synthetic oligonucleotide
gaaguuuguuaggaaaggc

SEQ ID NO: 225964 - RNA, 19 nt, Artificial Sequence
  Description of Artificial Sequence: Synthetic oligonucleotide
guagacaucugagucaccc

SEQ ID NO: 225965 - RNA, 19 nt, Artificial Sequence
  Description of Artificial Sequence: Synthetic oligonucleotide
acccauaacuuaccccucc

SEQ ID NO: 225966 - RNA, 19 nt, Artificial Sequence
  Description of Artificial Sequence: Synthetic oligonucleotide
uuuagcucaccauggggca

SEQ ID NO: 225967 - RNA, 19 nt, Artificial Sequence
  Description of Artificial Sequence: Synthetic oligonucleotide
uggaggacccauaacuuac

SEQ ID NO: 225968 - RNA, 19 nt, Artificial Sequence
  Description of Artificial Sequence: Synthetic oligonucleotide
ucuauagaguccccagaga

SEQ ID NO: 225969 - RNA, 19 nt, Artificial Sequence
  Description of Artificial Sequence: Synthetic oligonucleotide
ugucuggaccuucaauaag

SEQ ID NO: 225970 - RNA, 19 nt, Artificial Sequence
  Description of Artificial Sequence: Synthetic oligonucleotide
gcugggcccacuuugaugg

SEQ ID NO: 225971 - RNA, 19 nt, Artificial Sequence
  Description of Artificial Sequence: Synthetic oligonucleotide
aggucaagacuauguuugc

SEQ ID NO: 225972 - RNA, 19 nt, Artificial Sequence
  Description of Artificial Sequence: Synthetic oligonucleotide
cuagacguacucaggcugg

SEQ ID NO: 225973 - RNA, 19 nt, Artificial Sequence
  Description of Artificial Sequence: Synthetic oligonucleotide
auagcaucaggggcuaccc

SEQ ID NO: 225974 - RNA, 19 nt, Artificial Sequence
  Description of Artificial Sequence: Synthetic oligonucleotide
acauucagacucccauagc

SEQ ID NO: 225975 - RNA, 19 nt, Artificial Sequence
  Description of Artificial Sequence: Synthetic oligonucleotide
ugggccuagacguacucag

SEQ ID NO: 225976 - RNA, 19 nt, Artificial Sequence
  Description of Artificial Sequence: Synthetic oligonucleotide
ucaccaaguggauagguua

SEQ ID NO: 225977 - RNA, 19 nt, Artificial Sequence
  Description of Artificial Sequence: Synthetic oligonucleotide
agaucccuauucaagaaag

SEQ ID NO: 225978 - RNA, 19 nt, Artificial Sequence
  Description of Artificial Sequence: Synthetic oligonucleotide
ggguguauuacacagguga

SEQ ID NO: 225979 - RNA, 19 nt, Artificial Sequence
  Description of Artificial Sequence: Synthetic oligonucleotide
aagacuauguuugcgggaa

SEQ ID NO: 225980 - RNA, 19 nt, Artificial Sequence
  Description of Artificial Sequence: Synthetic oligonucleotide
uuugccuggagaccucacc

SEQ ID NO: 225981 - RNA, 19 nt, Artificial Sequence
  Description of Artificial Sequence: Synthetic oligonucleotide
gugagugcaaacccaacug

SEQ ID NO: 225982 - RNA, 19 nt, Artificial Sequence
  Description of Artificial Sequence: Synthetic oligonucleotide
caaguggauagguuagccc

SEQ ID NO: 225983 - RNA, 19 nt, Artificial Sequence
  Description of Artificial Sequence: Synthetic oligonucleotide
gacuauguuugcgggaagg

SEQ ID NO: 225984 - RNA, 19 nt, Artificial Sequence
  Description of Artificial Sequence: Synthetic oligonucleotide
ucucuauagaguccccaga

SEQ ID NO: 225985 - RNA, 19 nt, Artificial Sequence
  Description of Artificial Sequence: Synthetic oligonucleotide
aggaauuuccaggaccacg

SEQ ID NO: 225986 - RNA, 19 nt, Artificial Sequence
  Description of Artificial Sequence: Synthetic oligonucleotide
uuagaucccuauucaagaa

SEQ ID NO: 225987 - RNA, 19 nt, Artificial Sequence
  Description of Artificial Sequence: Synthetic oligonucleotide
aggaaugagaagggaaagg

SEQ ID NO: 225988 - RNA, 19 nt, Artificial Sequence
  Description of Artificial Sequence: Synthetic oligonucleotide
ugacuugcgucguggagag

SEQ ID NO: 225989 - RNA, 19 nt, Artificial Sequence
  Description of Artificial Sequence: Synthetic oligonucleotide
cuacugaucuccucagggc

SEQ ID NO: 225990 - RNA, 19 nt, Artificial Sequence
  Description of Artificial Sequence: Synthetic oligonucleotide
cuaggaggguguauuacac

SEQ ID NO: 225991 - RNA, 19 nt, Artificial Sequence
  Description of Artificial Sequence: Synthetic oligonucleotide
uggagagcgguauuggcgu

SEQ ID NO: 225992 - RNA, 19 nt, Artificial Sequence
  Description of Artificial Sequence: Synthetic oligonucleotide
uuuugcagugacucucggc

SEQ ID NO: 225993 - RNA, 19 nt, Artificial Sequence
  Description of Artificial Sequence: Synthetic oligonucleotide
aacuuaccccuccuguugu

SEQ ID NO: 225994 - RNA, 19 nt, Artificial Sequence
  Description of Artificial Sequence: Synthetic oligonucleotide
ugacucucggcguucagcu

SEQ ID NO: 225995 - RNA, 19 nt, Artificial Sequence
  Description of Artificial Sequence: Synthetic oligonucleotide
uuguucacauucagacucc

SEQ ID NO: 225996 - RNA, 19 nt, Artificial Sequence
  Description of Artificial Sequence: Synthetic oligonucleotide
aucccuauucaagaaagug

SEQ ID NO: 225997 - RNA, 19 nt, Artificial Sequence
  Description of Artificial Sequence: Synthetic oligonucleotide
gacacgaauggcccucagg

SEQ ID NO: 225998 - RNA, 19 nt, Artificial Sequence
  Description of Artificial Sequence: Synthetic oligonucleotide
uagaucccuauucaagaaa

SEQ ID NO: 225999 - RNA, 19 nt, Artificial Sequence
  Description of Artificial Sequence: Synthetic oligonucleotide
ugugguguacaguguagac

SEQ ID NO: 226000 - RNA, 19 nt, Artificial Sequence
  Description of Artificial Sequence: Synthetic oligonucleotide
ugaugaauucccucccacu

SEQ ID NO: 226001 - RNA, 19 nt, Artificial Sequence
  Description of Artificial Sequence: Synthetic oligonucleotide
cugguagcuuccucaaagg

SEQ ID NO: 226002 - RNA, 19 nt, Artificial Sequence
  Description of Artificial Sequence: Synthetic oligonucleotide
ugauggauguauucucuaa

SEQ ID NO: 226003 - RNA, 19 nt, Artificial Sequence
  Description of Artificial Sequence: Synthetic oligonucleotide
ugaaccuuuaguggguaga

SEQ ID NO: 226004 - RNA, 19 nt, Artificial Sequence
  Description of Artificial Sequence: Synthetic oligonucleotide
cacucuugggccgugagag

SEQ ID NO: 226005 - RNA, 19 nt, Artificial Sequence
  Description of Artificial Sequence: Synthetic oligonucleotide
aguccaggaacuucuauuu

SEQ ID NO: 226006 - RNA, 19 nt, Artificial Sequence
  Description of Artificial Sequence: Synthetic oligonucleotide
uaguggguagauucuggcc

SEQ ID NO: 226007 - RNA, 19 nt, Artificial Sequence
  Description of Artificial Sequence: Synthetic oligonucleotide
ugguagcuuccucaaaggu

SEQ ID NO: 226008 - RNA, 19 nt, Artificial Sequence
  Description of Artificial Sequence: Synthetic oligonucleotide
ggacuugugggccuagacg

SEQ ID NO: 226009 - RNA, 19 nt, Artificial Sequence
  Description of Artificial Sequence: Synthetic oligonucleotide
guggagagcgguauuggcg

SEQ ID NO: 226010 - RNA, 19 nt, Artificial Sequence
  Description of Artificial Sequence: Synthetic oligonucleotide
aaggaauuuccaggaccac

SEQ ID NO: 226011 - RNA, 19 nt, Artificial Sequence
  Description of Artificial Sequence: Synthetic oligonucleotide
uguggaggacccauaacuu

SEQ ID NO: 226012 - RNA, 19 nt, Artificial Sequence
  Description of Artificial Sequence: Synthetic oligonucleotide
ugagucacccauguagaca

SEQ ID NO: 226013 - RNA, 19 nt, Artificial Sequence
  Description of Artificial Sequence: Synthetic oligonucleotide
caccaaguggauagguuag

SEQ ID NO: 226014 - RNA, 19 nt, Artificial Sequence
  Description of Artificial Sequence: Synthetic oligonucleotide
ugccggagggucccaaggg

SEQ ID NO: 226015 - RNA, 19 nt, Artificial Sequence
  Description of Artificial Sequence: Synthetic oligonucleotide
ucuguauggaccagcccau

SEQ ID NO: 226016 - RNA, 19 nt, Artificial Sequence
  Description of Artificial Sequence: Synthetic oligonucleotide
auaacuuaccccuccuguu

SEQ ID NO: 226017 - RNA, 19 nt, Artificial Sequence
  Description of Artificial Sequence: Synthetic oligonucleotide
guauuacacaggugagugc

SEQ ID NO: 226018 - RNA, 19 nt, Artificial Sequence
  Description of Artificial Sequence: Synthetic oligonucleotide
agggguuaacuucuucuca

SEQ ID NO: 226019 - RNA, 19 nt, Artificial Sequence
  Description of Artificial Sequence: Synthetic oligonucleotide
aguaugaccccugucaaua

SEQ ID NO: 226020 - RNA, 19 nt, Artificial Sequence
  Description of Artificial Sequence: Synthetic oligonucleotide
uguagacacgaauggcccu

SEQ ID NO: 226021 - RNA, 19 nt, Artificial Sequence
  Description of Artificial Sequence: Synthetic oligonucleotide
agcgguauuggcguuggag

SEQ ID NO: 226022 - RNA, 19 nt, Artificial Sequence
  Description of Artificial Sequence: Synthetic oligonucleotide
gagcuugggugccagacca

SEQ ID NO: 226023 - RNA, 19 nt, Artificial Sequence
  Description of Artificial Sequence: Synthetic oligonucleotide
ugaccccugucaauaggcc

SEQ ID NO: 226024 - RNA, 19 nt, Artificial Sequence
  Description of Artificial Sequence: Synthetic oligonucleotide
gggguuaacuucuucucag

SEQ ID NO: 226025 - RNA, 19 nt, Artificial Sequence
  Description of Artificial Sequence: Synthetic oligonucleotide
uguauguccagagcccgca

SEQ ID NO: 226026 - RNA, 19 nt, Artificial Sequence
  Description of Artificial Sequence: Synthetic oligonucleotide
cacuuugauggauguauuc

SEQ ID NO: 226027 - RNA, 19 nt, Artificial Sequence
  Description of Artificial Sequence: Synthetic oligonucleotide
accaaguggauagguuagc

SEQ ID NO: 226028 - RNA, 19 nt, Artificial Sequence
  Description of Artificial Sequence: Synthetic oligonucleotide
aggugacuguggcuucucc

SEQ ID NO: 226029 - RNA, 19 nt, Artificial Sequence
  Description of Artificial Sequence: Synthetic oligonucleotide
cccuauucaagaaaguguc

SEQ ID NO: 226030 - RNA, 19 nt, Artificial Sequence
  Description of Artificial Sequence: Synthetic oligonucleotide
guagggcaaaguucugaag

SEQ ID NO: 226031 - RNA, 19 nt, Artificial Sequence
  Description of Artificial Sequence: Synthetic oligonucleotide
gaugacaaggagcgguuaa

SEQ ID NO: 226032 - RNA, 19 nt, Artificial Sequence
  Description of Artificial Sequence: Synthetic oligonucleotide
gccguguauguccagagcc

SEQ ID NO: 226033 - RNA, 19 nt, Artificial Sequence
  Description of Artificial Sequence: Synthetic oligonucleotide
acccauguagacacgaaug

SEQ ID NO: 226034 - RNA, 19 nt, Artificial Sequence
  Description of Artificial Sequence: Synthetic oligonucleotide
auaggccugagaguacagg

SEQ ID NO: 226035 - RNA, 19 nt, Artificial Sequence
  Description of Artificial Sequence: Synthetic oligonucleotide
uguagccgaagcagacuug

SEQ ID NO: 226036 - RNA, 19 nt, Artificial Sequence
  Description of Artificial Sequence: Synthetic oligonucleotide
acccugacgaagccccgcc

SEQ ID NO: 226037 - RNA, 19 nt, Artificial Sequence
  Description of Artificial Sequence: Synthetic oligonucleotide
gucaccugacacaucaggc

SEQ ID NO: 226038 - RNA, 19 nt, Artificial Sequence
  Description of Artificial Sequence: Synthetic oligonucleotide
ugaggucacccugacgaag

SEQ ID NO: 226039 - RNA, 19 nt, Artificial Sequence
  Description of Artificial Sequence: Synthetic oligonucleotide
aaccuaguaugaccccugu

SEQ ID NO: 226040 - RNA, 19 nt, Artificial Sequence
  Description of Artificial Sequence: Synthetic oligonucleotide
aguccugaugcuguuguug

SEQ ID NO: 226041 - RNA, 19 nt, Artificial Sequence
  Description of Artificial Sequence: Synthetic oligonucleotide
cagggugaagccauacuuc

SEQ ID NO: 226042 - RNA, 19 nt, Artificial Sequence
  Description of Artificial Sequence: Synthetic oligonucleotide
cuacgcacagcuaggucac

SEQ ID NO: 226043 - RNA, 19 nt, Artificial Sequence
  Description of Artificial Sequence: Synthetic oligonucleotide
cuggagaccucaccaagug

SEQ ID NO: 226044 - RNA, 19 nt, Artificial Sequence
  Description of Artificial Sequence: Synthetic oligonucleotide
cccauguagacacgaaugg

SEQ ID NO: 226045 - RNA, 19 nt, Artificial Sequence
  Description of Artificial Sequence: Synthetic oligonucleotide
augacaaggagcgguuaag

SEQ ID NO: 226046 - RNA, 19 nt, Artificial Sequence
  Description of Artificial Sequence: Synthetic oligonucleotide
guaugaccccugucaauag

SEQ ID NO: 226047 - RNA, 19 nt, Artificial Sequence
  Description of Artificial Sequence: Synthetic oligonucleotide
caugccacaccauguggug

SEQ ID NO: 226048 - RNA, 19 nt, Artificial Sequence
  Description of Artificial Sequence: Synthetic oligonucleotide
uuuguauuucuaggagggu

SEQ ID NO: 226049 - RNA, 19 nt, Artificial Sequence
  Description of Artificial Sequence: Synthetic oligonucleotide
cagagcaacugguagggca

SEQ ID NO: 226050 - RNA, 19 nt, Artificial Sequence
  Description of Artificial Sequence: Synthetic oligonucleotide
uucuaggaggguguauuac

SEQ ID NO: 226051 - RNA, 19 nt, Artificial Sequence
  Description of Artificial Sequence: Synthetic oligonucleotide
ucguggagagcgguauugg

SEQ ID NO: 226052 - RNA, 19 nt, Artificial Sequence
  Description of Artificial Sequence: Synthetic oligonucleotide
cuuccucaaagguuuguga

SEQ ID NO: 226053 - RNA, 19 nt, Artificial Sequence
  Description of Artificial Sequence: Synthetic oligonucleotide
guauggaccagcccaugca

SEQ ID NO: 226054 - RNA, 19 nt, Artificial Sequence
  Description of Artificial Sequence: Synthetic oligonucleotide
cuuaccccuccuguugugg

SEQ ID NO: 226055 - RNA, 19 nt, Artificial Sequence
  Description of Artificial Sequence: Synthetic oligonucleotide
cuaaggguguuguugauau

SEQ ID NO: 226056 - RNA, 19 nt, Artificial Sequence
  Description of Artificial Sequence: Synthetic oligonucleotide
ccauguagagagcugggcc

SEQ ID NO: 226057 - RNA, 19 nt, Artificial Sequence
  Description of Artificial Sequence: Synthetic oligonucleotide
gaccauguagagagcuggg

SEQ ID NO: 226058 - RNA, 19 nt, Artificial Sequence
  Description of Artificial Sequence: Synthetic oligonucleotide
ugcgggaagggguuaacuu

SEQ ID NO: 226059 - RNA, 19 nt, Artificial Sequence
  Description of Artificial Sequence: Synthetic oligonucleotide
gaaccuaguaugaccccug

SEQ ID NO: 226060 - RNA, 19 nt, Artificial Sequence
  Description of Artificial Sequence: Synthetic oligonucleotide
ggagaucgaggagagaggc

SEQ ID NO: 226061 - RNA, 19 nt, Artificial Sequence
  Description of Artificial Sequence: Synthetic oligonucleotide
uuccggaacagggagcuuc

SEQ ID NO: 226062 - RNA, 19 nt, Artificial Sequence
  Description of Artificial Sequence: Synthetic oligonucleotide
aggaccacguuccuggcuu

SEQ ID NO: 226063 - RNA, 19 nt, Artificial Sequence
  Description of Artificial Sequence: Synthetic oligonucleotide
gaugccagugccaaguccu

SEQ ID NO: 226064 - RNA, 19 nt, Artificial Sequence
  Description of Artificial Sequence: Synthetic oligonucleotide
cugagucacccauguagac

SEQ ID NO: 226065 - RNA, 19 nt, Artificial Sequence
  Description of Artificial Sequence: Synthetic oligonucleotide
gguguauuacacaggugag

SEQ ID NO: 226066 - RNA, 19 nt, Artificial Sequence
  Description of Artificial Sequence: Synthetic oligonucleotide
ucuaaggguguuguugaua

SEQ ID NO: 226067 - RNA, 19 nt, Artificial Sequence
  Description of Artificial Sequence: Synthetic oligonucleotide
ggggaaccuaguaugaccc

SEQ ID NO: 226068 - RNA, 19 nt, Artificial Sequence
  Description of Artificial Sequence: Synthetic oligonucleotide
auggauuagaugacuggga

SEQ ID NO: 226069 - RNA, 19 nt, Artificial Sequence
  Description of Artificial Sequence: Synthetic oligonucleotide
auagguuagcccagggaca

SEQ ID NO: 226070 - RNA, 19 nt, Artificial Sequence
  Description of Artificial Sequence: Synthetic oligonucleotide
uugacggggcgaguggugc

SEQ ID NO: 226071 - RNA, 19 nt, Artificial Sequence
  Description of Artificial Sequence: Synthetic oligonucleotide
aggagaucgaggagagagg

SEQ ID NO: 226072 - RNA, 19 nt, Artificial Sequence
  Description of Artificial Sequence: Synthetic oligonucleotide
cauaacuuaccccuccugu

SEQ ID NO: 226073 - RNA, 19 nt, Artificial Sequence
  Description of Artificial Sequence: Synthetic oligonucleotide
ggccuagacguacucaggc

SEQ ID NO: 226074 - RNA, 19 nt, Artificial Sequence
  Description of Artificial Sequence: Synthetic oligonucleotide
cugaaccuuuaguggguag

SEQ ID NO: 226075 - RNA, 19 nt, Artificial Sequence
  Description of Artificial Sequence: Synthetic oligonucleotide
agagcgguauuggcguugg

SEQ ID NO: 226076 - RNA, 19 nt, Artificial Sequence
  Description of Artificial Sequence: Synthetic oligonucleotide
guagcugccuuuccgagcu

SEQ ID NO: 226077 - RNA, 19 nt, Artificial Sequence
  Description of Artificial Sequence: Synthetic oligonucleotide
agacuauguuugcgggaag

SEQ ID NO: 226078 - RNA, 19 nt, Artificial Sequence
  Description of Artificial Sequence: Synthetic oligonucleotide
ugugcguggaggugcugga

SEQ ID NO: 226079 - RNA, 19 nt, Artificial Sequence
  Description of Artificial Sequence: Synthetic oligonucleotide
cacugagugcauagcauca

SEQ ID NO: 226080 - RNA, 19 nt, Artificial Sequence
  Description of Artificial Sequence: Synthetic oligonucleotide
ugacggggcgaguggugcg

SEQ ID NO: 226081 - RNA, 19 nt, Artificial Sequence
  Description of Artificial Sequence: Synthetic oligonucleotide
cugugcguggaggugcugg

SEQ ID NO: 226082 - RNA, 19 nt, Artificial Sequence
  Description of Artificial Sequence: Synthetic oligonucleotide
caagacuauguuugcggga

SEQ ID NO: 226083 - RNA, 19 nt, Artificial Sequence
  Description of Artificial Sequence: Synthetic oligonucleotide
cuugugggccuagacguac

SEQ ID NO: 226084 - RNA, 19 nt, Artificial Sequence
  Description of Artificial Sequence: Synthetic oligonucleotide
cuacccgguagcccugagg

SEQ ID NO: 226085 - RNA, 19 nt, Artificial Sequence
  Description of Artificial Sequence: Synthetic oligonucleotide
ucacccauguagacacgaa

SEQ ID NO: 226086 - RNA, 19 nt, Artificial Sequence
  Description of Artificial Sequence: Synthetic oligonucleotide
acgaagccccgccucacug

SEQ ID NO: 226087 - RNA, 19 nt, Artificial Sequence
  Description of Artificial Sequence: Synthetic oligonucleotide
aguggugcgcuucucuaua

SEQ ID NO: 226088 - RNA, 19 nt, Artificial Sequence
  Description of Artificial Sequence: Synthetic oligonucleotide
cugacuugcgucguggaga

SEQ ID NO: 226089 - RNA, 19 nt, Artificial Sequence
  Description of Artificial Sequence: Synthetic oligonucleotide
ccaguggucguucagcgac

SEQ ID NO: 226090 - RNA, 19 nt, Artificial Sequence
  Description of Artificial Sequence: Synthetic oligonucleotide
ccuagacguacucaggcug

SEQ ID NO: 226091 - RNA, 19 nt, Artificial Sequence
  Description of Artificial Sequence: Synthetic oligonucleotide
ccuacgcacagcuagguca

SEQ ID NO: 226092 - RNA, 19 nt, Artificial Sequence
  Description of Artificial Sequence: Synthetic oligonucleotide
gugguguacaguguagaca

SEQ ID NO: 226093 - RNA, 19 nt, Artificial Sequence
  Description of Artificial Sequence: Synthetic oligonucleotide
gccgaagcagacuugauua

SEQ ID NO: 226094 - RNA, 19 nt, Artificial Sequence
  Description of Artificial Sequence: Synthetic oligonucleotide
guagccgaagcagacuuga

SEQ ID NO: 226095 - RNA, 19 nt, Artificial Sequence
  Description of Artificial Sequence: Synthetic oligonucleotide
ugugggccuagacguacuc

SEQ ID NO: 226096 - RNA, 19 nt, Artificial Sequence
  Description of Artificial Sequence: Synthetic oligonucleotide
uguugacggggcgaguggu

SEQ ID NO: 226097 - RNA, 19 nt, Artificial Sequence
  Description of Artificial Sequence: Synthetic oligonucleotide
aggugaaguuuguuaggaa

SEQ ID NO: 226098 - RNA, 19 nt, Artificial Sequence
  Description of Artificial Sequence: Synthetic oligonucleotide
auguauucucuaagggugu

SEQ ID NO: 226099 - RNA, 19 nt, Artificial Sequence
  Description of Artificial Sequence: Synthetic oligonucleotide
cugccggagggucccaagg

SEQ ID NO: 226100 - RNA, 19 nt, Artificial Sequence
  Description of Artificial Sequence: Synthetic oligonucleotide
uguggccuccgagggaugc

SEQ ID NO: 226101 - RNA, 19 nt, Artificial Sequence
  Description of Artificial Sequence: Synthetic oligonucleotide
gucguggagagcgguauug

SEQ ID NO: 226102 - RNA, 19 nt, Artificial Sequence
  Description of Artificial Sequence: Synthetic oligonucleotide
uaccccuccuguuguggcc

SEQ ID NO: 226103 - RNA, 19 nt, Artificial Sequence
  Description of Artificial Sequence: Synthetic oligonucleotide
uccaguggucguucagcga

SEQ ID NO: 226104 - RNA, 19 nt, Artificial Sequence
  Description of Artificial Sequence: Synthetic oligonucleotide
gauccugccggaggguccc

SEQ ID NO: 226105 - RNA, 19 nt, Artificial Sequence
  Description of Artificial Sequence: Synthetic oligonucleotide
guggugcgcuucucuauag

SEQ ID NO: 226106 - RNA, 19 nt, Artificial Sequence
  Description of Artificial Sequence: Synthetic oligonucleotide
uccgagggaugcuacugau

SEQ ID NO: 226107 - RNA, 19 nt, Artificial Sequence
  Description of Artificial Sequence: Synthetic oligonucleotide
cuuggguguuagcuggcuc

SEQ ID NO: 226108 - RNA, 19 nt, Artificial Sequence
  Description of Artificial Sequence: Synthetic oligonucleotide
aggggcuacccgguagccc

SEQ ID NO: 226109 - RNA, 19 nt, Artificial Sequence
  Description of Artificial Sequence: Synthetic oligonucleotide
caggugugguguucugaag

SEQ ID NO: 226110 - RNA, 19 nt, Artificial Sequence
  Description of Artificial Sequence: Synthetic oligonucleotide
acccucuuaagcaguggag

SEQ ID NO: 226111 - RNA, 19 nt, Artificial Sequence
  Description of Artificial Sequence: Synthetic oligonucleotide
acuuaccccuccuguugug

SEQ ID NO: 226112 - RNA, 19 nt, Artificial Sequence
  Description of Artificial Sequence: Synthetic oligonucleotide
aucugaugccagugccaag

SEQ ID NO: 226113 - RNA, 19 nt, Artificial Sequence
  Description of Artificial Sequence: Synthetic oligonucleotide
aguggucguucagcgacag

SEQ ID NO: 226114 - RNA, 19 nt, Artificial Sequence
  Description of Artificial Sequence: Synthetic oligonucleotide
gagaguacaggacccuggu

SEQ ID NO: 226115 - RNA, 19 nt, Artificial Sequence
  Description of Artificial Sequence: Synthetic oligonucleotide
ucuuggguguuagcuggcu

SEQ ID NO: 226116 - RNA, 19 nt, Artificial Sequence
  Description of Artificial Sequence: Synthetic oligonucleotide
gagagcgguauuggcguug

SEQ ID NO: 226117 - RNA, 19 nt, Artificial Sequence
  Description of Artificial Sequence: Synthetic oligonucleotide
cugagaguacaggacccug

SEQ ID NO: 226118 - RNA, 19 nt, Artificial Sequence
  Description of Artificial Sequence: Synthetic oligonucleotide
cuugggccgugagagcugc

SEQ ID NO: 226119 - RNA, 19 nt, Artificial Sequence
  Description of Artificial Sequence: Synthetic oligonucleotide
guguguagcaaggaggccu

SEQ ID NO: 226120 - RNA, 19 nt, Artificial Sequence
  Description of Artificial Sequence: Synthetic oligonucleotide
agugacucucggcguucag

SEQ ID NO: 226121 - RNA, 19 nt, Artificial Sequence
  Description of Artificial Sequence: Synthetic oligonucleotide
ggauagguuagcccaggga

SEQ ID NO: 226122 - RNA, 19 nt, Artificial Sequence
  Description of Artificial Sequence: Synthetic oligonucleotide
aaguccugaugcuguuguu

SEQ ID NO: 226123 - RNA, 19 nt, Artificial Sequence
  Description of Artificial Sequence: Synthetic oligonucleotide
ccuaccuaguggaggagac

SEQ ID NO: 226124 - RNA, 19 nt, Artificial Sequence
  Description of Artificial Sequence: Synthetic oligonucleotide
aaccuuuaguggguagauu

SEQ ID NO: 226125 - RNA, 19 nt, Artificial Sequence
  Description of Artificial Sequence: Synthetic oligonucleotide
gguguuagcuggcucaacu

SEQ ID NO: 226126 - RNA, 19 nt, Artificial Sequence
  Description of Artificial Sequence: Synthetic oligonucleotide
gcaggcucggcaugcaaug

SEQ ID NO: 226127 - RNA, 19 nt, Artificial Sequence
  Description of Artificial Sequence: Synthetic oligonucleotide
ugacagugggaugcugccu

SEQ ID NO: 226128 - RNA, 19 nt, Artificial Sequence
  Description of Artificial Sequence: Synthetic oligonucleotide
ugggccguguauguccaga

SEQ ID NO: 226129 - RNA, 19 nt, Artificial Sequence
  Description of Artificial Sequence: Synthetic oligonucleotide
uugcgggaagggguuaacu

SEQ ID NO: 226130 - RNA, 19 nt, Artificial Sequence
  Description of Artificial Sequence: Synthetic oligonucleotide
ccacugagugcauagcauc

SEQ ID NO: 226131 - RNA, 19 nt, Artificial Sequence
  Description of Artificial Sequence: Synthetic oligonucleotide
ccauguagacacgaauggc

SEQ ID NO: 226132 - RNA, 19 nt, Artificial Sequence
  Description of Artificial Sequence: Synthetic oligonucleotide
ccaaguggauagguuagcc

SEQ ID NO: 226133 - RNA, 19 nt, Artificial Sequence
  Description of Artificial Sequence: Synthetic oligonucleotide
agacacgaauggcccucag

SEQ ID NO: 226134 - RNA, 19 nt, Artificial Sequence
  Description of Artificial Sequence: Synthetic oligonucleotide
ucuugucaccugacacauc

SEQ ID NO: 226135 - RNA, 19 nt, Artificial Sequence
  Description of Artificial Sequence: Synthetic oligonucleotide
gagugcaaacccaacugcu

SEQ ID NO: 226136 - RNA, 19 nt, Artificial Sequence
  Description of Artificial Sequence: Synthetic oligonucleotide
gcgggaagggguuaacuuc

SEQ ID NO: 226137 - RNA, 19 nt, Artificial Sequence
  Description of Artificial Sequence: Synthetic oligonucleotide
accucaccaaguggauagg

SEQ ID NO: 226138 - RNA, 19 nt, Artificial Sequence
  Description of Artificial Sequence: Synthetic oligonucleotide
uggggaugcccugucugga

SEQ ID NO: 226139 - RNA, 19 nt, Artificial Sequence
  Description of Artificial Sequence: Synthetic oligonucleotide
ccguguauguccagagccc

SEQ ID NO: 226140 - RNA, 19 nt, Artificial Sequence
  Description of Artificial Sequence: Synthetic oligonucleotide
augaggucacccugacgaa

SEQ ID NO: 226141 - RNA, 19 nt, Artificial Sequence
  Description of Artificial Sequence: Synthetic oligonucleotide
uagacacgaauggcccuca

SEQ ID NO: 226142 - RNA, 19 nt, Artificial Sequence
  Description of Artificial Sequence: Synthetic oligonucleotide
gaaaggcuucggcuggugu

SEQ ID NO: 226143 - RNA, 19 nt, Artificial Sequence
  Description of Artificial Sequence: Synthetic oligonucleotide
gagcgguuaagggaagaaa

SEQ ID NO: 226144 - RNA, 19 nt, Artificial Sequence
  Description of Artificial Sequence: Synthetic oligonucleotide
auucucuaaggguguuguu

SEQ ID NO: 226145 - RNA, 19 nt, Artificial Sequence
  Description of Artificial Sequence: Synthetic oligonucleotide
aggagucuacuucccggau

SEQ ID NO: 226146 - RNA, 19 nt, Artificial Sequence
  Description of Artificial Sequence: Synthetic oligonucleotide
ccggugacgagcccuacgc

SEQ ID NO: 226147 - RNA, 19 nt, Artificial Sequence
  Description of Artificial Sequence: Synthetic oligonucleotide
agcccuacgcacagcuagg

SEQ ID NO: 226148 - RNA, 19 nt, Artificial Sequence
  Description of Artificial Sequence: Synthetic oligonucleotide
cauccuugccccgguuccg

SEQ ID NO: 226149 - RNA, 19 nt, Artificial Sequence
  Description of Artificial Sequence: Synthetic oligonucleotide
gucccuggaggauggauua

SEQ ID NO: 226150 - RNA, 19 nt, Artificial Sequence
  Description of Artificial Sequence: Synthetic oligonucleotide
gaccccugucaauaggccu

SEQ ID NO: 226151 - RNA, 19 nt, Artificial Sequence
  Description of Artificial Sequence: Synthetic oligonucleotide
gccuggagaccucaccaag

SEQ ID NO: 226152 - RNA, 19 nt, Artificial Sequence
  Description of Artificial Sequence: Synthetic oligonucleotide
ugcauagcaucaggggcua

SEQ ID NO: 226153 - RNA, 19 nt, Artificial Sequence
  Description of Artificial Sequence: Synthetic oligonucleotide
cagugucgucuucugagga

SEQ ID NO: 226154 - RNA, 19 nt, Artificial Sequence
  Description of Artificial Sequence: Synthetic oligonucleotide
gugcaaacccaacugcuau

SEQ ID NO: 226155 - RNA, 19 nt, Artificial Sequence
  Description of Artificial Sequence: Synthetic oligonucleotide
gggaaccuaguaugacccc

SEQ ID NO: 226156 - RNA, 19 nt, Artificial Sequence
  Description of Artificial Sequence: Synthetic oligonucleotide
uggguguuagcuggcucaa

SEQ ID NO: 226157 - RNA, 19 nt, Artificial Sequence
  Description of Artificial Sequence: Synthetic oligonucleotide
guguauuacacaggugagu

SEQ ID NO: 226158 - RNA, 19 nt, Artificial Sequence
  Description of Artificial Sequence: Synthetic oligonucleotide
ccguuugcuccuucgggcc

SEQ ID NO: 226159 - RNA, 19 nt, Artificial Sequence
  Description of Artificial Sequence: Synthetic oligonucleotide
gaaccuuuaguggguagau

SEQ ID NO: 226160 - RNA, 19 nt, Artificial Sequence
  Description of Artificial Sequence: Synthetic oligonucleotide
guguauguccagagcccgc

SEQ ID NO: 226161 - RNA, 19 nt, Artificial Sequence
  Description of Artificial Sequence: Synthetic oligonucleotide
uucggcugguguguagcaa

SEQ ID NO: 226162 - RNA, 19 nt, Artificial Sequence
  Description of Artificial Sequence: Synthetic oligonucleotide
guugacggggcgaguggug

SEQ ID NO: 226163 - RNA, 19 nt, Artificial Sequence
  Description of Artificial Sequence: Synthetic oligonucleotide
ugccuaccuaguggaggag

SEQ ID NO: 226164 - RNA, 19 nt, Artificial Sequence
  Description of Artificial Sequence: Synthetic oligonucleotide
ggaggacccauaacuuacc

SEQ ID NO: 226165 - RNA, 19 nt, Artificial Sequence
  Description of Artificial Sequence: Synthetic oligonucleotide
gaucccuauucaagaaagu

SEQ ID NO: 226166 - RNA, 19 nt, Artificial Sequence
  Description of Artificial Sequence: Synthetic oligonucleotide
gacucucggcguucagcuc

SEQ ID NO: 226167 - RNA, 19 nt, Artificial Sequence
  Description of Artificial Sequence: Synthetic oligonucleotide
aggguguauuacacaggug

SEQ ID NO: 226168 - RNA, 19 nt, Artificial Sequence
  Description of Artificial Sequence: Synthetic oligonucleotide
gacccauaacuuaccccuc

SEQ ID NO: 226169 - RNA, 19 nt, Artificial Sequence
  Description of Artificial Sequence: Synthetic oligonucleotide
cagcuaggucacugauggc

SEQ ID NO: 226170 - RNA, 19 nt, Artificial Sequence
  Description of Artificial Sequence: Synthetic oligonucleotide
guucacauucagacuccca

SEQ ID NO: 226171 - RNA, 19 nt, Artificial Sequence
  Description of Artificial Sequence: Synthetic oligonucleotide
augaugcucagggccggcu

SEQ ID NO: 226172 - RNA, 19 nt, Artificial Sequence
  Description of Artificial Sequence: Synthetic oligonucleotide
cguguauguccagagcccg

SEQ ID NO: 226173 - RNA, 19 nt, Artificial Sequence
  Description of Artificial Sequence: Synthetic oligonucleotide
ugcccauccuugccccggu

SEQ ID NO: 226174 - RNA, 19 nt, Artificial Sequence
  Description of Artificial Sequence: Synthetic oligonucleotide
gcuucggcugguguguagc

SEQ ID NO: 226175 - RNA, 19 nt, Artificial Sequence
  Description of Artificial Sequence: Synthetic oligonucleotide
uuguggccuccgagggaug

SEQ ID NO: 226176 - RNA, 19 nt, Artificial Sequence
  Description of Artificial Sequence: Synthetic oligonucleotide
ccgaagcagacuugauuac

SEQ ID NO: 226177 - RNA, 19 nt, Artificial Sequence
  Description of Artificial Sequence: Synthetic oligonucleotide
ggaccacucucuccugaug

SEQ ID NO: 226178 - RNA, 19 nt, Artificial Sequence
  Description of Artificial Sequence: Synthetic oligonucleotide
ggccguguauguccagagc

SEQ ID NO: 226179 - RNA, 19 nt, Artificial Sequence
  Description of Artificial Sequence: Synthetic oligonucleotide
uuccgagcugggcccacuu

SEQ ID NO: 226180 - RNA, 19 nt, Artificial Sequence
  Description of Artificial Sequence: Synthetic oligonucleotide
aggagcgguuaagggaaga

SEQ ID NO: 226181 - RNA, 19 nt, Artificial Sequence
  Description of Artificial Sequence: Synthetic oligonucleotide
gccggagggucccaagggc

SEQ ID NO: 226182 - RNA, 19 nt, Artificial Sequence
  Description of Artificial Sequence: Synthetic oligonucleotide
caacugguagggcaaaguu

SEQ ID NO: 226183 - RNA, 19 nt, Artificial Sequence
  Description of Artificial Sequence: Synthetic oligonucleotide
cuguauggaccagcccaug

SEQ ID NO: 226184 - RNA, 19 nt, Artificial Sequence
  Description of Artificial Sequence: Synthetic oligonucleotide
gguucuuuagaucccuauu

SEQ ID NO: 226185 - RNA, 19 nt, Artificial Sequence
  Description of Artificial Sequence: Synthetic oligonucleotide
agaccucaccaaguggaua

SEQ ID NO: 226186 - RNA, 19 nt, Artificial Sequence
  Description of Artificial Sequence: Synthetic oligonucleotide
ccgagcugggcccacuuug

SEQ ID NO: 226187 - RNA, 19 nt, Artificial Sequence
  Description of Artificial Sequence: Synthetic oligonucleotide
ugggcccacuuugauggau

SEQ ID NO: 226188 - RNA, 19 nt, Artificial Sequence
  Description of Artificial Sequence: Synthetic oligonucleotide
ggaugcuacugaucuccuc

SEQ ID NO: 226189 - RNA, 19 nt, Artificial Sequence
  Description of Artificial Sequence: Synthetic oligonucleotide
ggccgugagagcugccuac

SEQ ID NO: 226190 - RNA, 19 nt, Artificial Sequence
  Description of Artificial Sequence: Synthetic oligonucleotide
gguguguagcaaggaggcc

SEQ ID NO: 226191 - RNA, 19 nt, Artificial Sequence
  Description of Artificial Sequence: Synthetic oligonucleotide
gccggugacgagcccuacg

SEQ ID NO: 226192 - RNA, 19 nt, Artificial Sequence
  Description of Artificial Sequence: Synthetic oligonucleotide
ggagucuacuucccggaua

SEQ ID NO: 226193 - RNA, 19 nt, Artificial Sequence
  Description of Artificial Sequence: Synthetic oligonucleotide
uuuccgagcugggcccacu

SEQ ID NO: 226194 - RNA, 19 nt, Artificial Sequence
  Description of Artificial Sequence: Synthetic oligonucleotide
cacccugacgaagccccgc

SEQ ID NO: 226195 - RNA, 19 nt, Artificial Sequence
  Description of Artificial Sequence: Synthetic oligonucleotide
cagcacuccuuuuccugga

SEQ ID NO: 226196 - RNA, 19 nt, Artificial Sequence
  Description of Artificial Sequence: Synthetic oligonucleotide
gggccuagacguacucagg

SEQ ID NO: 226197 - RNA, 19 nt, Artificial Sequence
  Description of Artificial Sequence: Synthetic oligonucleotide
cucuugucaccugacacau

SEQ ID NO: 226198 - RNA, 19 nt, Artificial Sequence
  Description of Artificial Sequence: Synthetic oligonucleotide
uugccccgguuccguuugc

SEQ ID NO: 226199 - RNA, 19 nt, Artificial Sequence
  Description of Artificial Sequence: Synthetic oligonucleotide
agcugccuaccuaguggag

SEQ ID NO: 226200 - RNA, 19 nt, Artificial Sequence
  Description of Artificial Sequence: Synthetic oligonucleotide
caguggucguucagcgaca

SEQ ID NO: 226201 - RNA, 19 nt, Artificial Sequence
  Description of Artificial Sequence: Synthetic oligonucleotide
cgauaccuuguuuccacuc

SEQ ID NO: 226202 - RNA, 19 nt, Artificial Sequence
  Description of Artificial Sequence: Synthetic oligonucleotide
cucaccaaguggauagguu

SEQ ID NO: 226203 - RNA, 19 nt, Artificial Sequence
  Description of Artificial Sequence: Synthetic oligonucleotide
ggggcuacccgguagcccu

SEQ ID NO: 226204 - RNA, 19 nt, Artificial Sequence
  Description of Artificial Sequence: Synthetic oligonucleotide
caggggcuacccgguagcc

SEQ ID NO: 226205 - RNA, 19 nt, Artificial Sequence
  Description of Artificial Sequence: Synthetic oligonucleotide
ggaaccuaguaugaccccu

SEQ ID NO: 226206 - RNA, 19 nt, Artificial Sequence
  Description of Artificial Sequence: Synthetic oligonucleotide
cccucuuaagcaguggaga

SEQ ID NO: 226207 - RNA, 19 nt, Artificial Sequence
  Description of Artificial Sequence: Synthetic oligonucleotide
gugggccuagacguacuca

SEQ ID NO: 226208 - RNA, 19 nt, Artificial Sequence
  Description of Artificial Sequence: Synthetic oligonucleotide
cauggggcuggccaauggu

SEQ ID NO: 226209 - RNA, 19 nt, Artificial Sequence
  Description of Artificial Sequence: Synthetic oligonucleotide
agcccgcaggggaacuggg

SEQ ID NO: 226210 - RNA, 19 nt, Artificial Sequence
  Description of Artificial Sequence: Synthetic oligonucleotide
gacgagcccuacgcacagc

SEQ ID NO: 226211 - RNA, 19 nt, Artificial Sequence
  Description of Artificial Sequence: Synthetic oligonucleotide
cagggccggcucuucuuuc

SEQ ID NO: 226212 - RNA, 19 nt, Artificial Sequence
  Description of Artificial Sequence: Synthetic oligonucleotide
cacccauguagacacgaau

SEQ ID NO: 226213 - RNA, 19 nt, Artificial Sequence
  Description of Artificial Sequence: Synthetic oligonucleotide
gagaucgaggagagaggcu

SEQ ID NO: 226214 - RNA, 19 nt, Artificial Sequence
  Description of Artificial Sequence: Synthetic oligonucleotide
gaucgaggagagaggcugu

SEQ ID NO: 226215 - RNA, 19 nt, Artificial Sequence
  Description of Artificial Sequence: Synthetic oligonucleotide
gggugccagaccauguaga

SEQ ID NO: 226216 - RNA, 19 nt, Artificial Sequence
  Description of Artificial Sequence: Synthetic oligonucleotide
ccugucaauaggccugaga

SEQ ID NO: 226217 - RNA, 19 nt, Artificial Sequence
  Description of Artificial Sequence: Synthetic oligonucleotide
gacgaagccccgccucacu

SEQ ID NO: 226218 - RNA, 19 nt, Artificial Sequence
  Description of Artificial Sequence: Synthetic oligonucleotide
ccugaugacaaggagcggu

SEQ ID NO: 226219 - RNA, 19 nt, Artificial Sequence
  Description of Artificial Sequence: Synthetic oligonucleotide
ggagcgguuaagggaagaa

SEQ ID NO: 226220 - RNA, 19 nt, Artificial Sequence
  Description of Artificial Sequence: Synthetic oligonucleotide
ugccccgguuccguuugcu

SEQ ID NO: 226221 - RNA, 19 nt, Artificial Sequence
  Description of Artificial Sequence: Synthetic oligonucleotide
gcacucuugggccgugaga

SEQ ID NO: 226222 - RNA, 19 nt, Artificial Sequence
  Description of Artificial Sequence: Synthetic oligonucleotide
uugcuccuucgggccaucu

SEQ ID NO: 226223 - RNA, 19 nt, Artificial Sequence
  Description of Artificial Sequence: Synthetic oligonucleotide
ccuuuaguggguagauucu

SEQ ID NO: 226224 - RNA, 19 nt, Artificial Sequence
  Description of Artificial Sequence: Synthetic oligonucleotide
acuugugggccuagacgua

SEQ ID NO: 226225 - RNA, 19 nt, Artificial Sequence
  Description of Artificial Sequence: Synthetic oligonucleotide
cuuuccgagcugggcccac

SEQ ID NO: 226226 - RNA, 19 nt, Artificial Sequence
  Description of Artificial Sequence: Synthetic oligonucleotide
ggcaggucaagacuauguu

SEQ ID NO: 226227 - RNA, 19 nt, Artificial Sequence
  Description of Artificial Sequence: Synthetic oligonucleotide
ccgagggaugcuacugauc

SEQ ID NO: 226228 - RNA, 19 nt, Artificial Sequence
  Description of Artificial Sequence: Synthetic oligonucleotide
uccuugccccgguuccguu

SEQ ID NO: 226229 - RNA, 19 nt, Artificial Sequence
  Description of Artificial Sequence: Synthetic oligonucleotide
ccaacugcuauguuugcuu

SEQ ID NO: 226230 - RNA, 19 nt, Artificial Sequence
  Description of Artificial Sequence: Synthetic oligonucleotide
gccuaccuaguggaggaga

SEQ ID NO: 226231 - RNA, 19 nt, Artificial Sequence
  Description of Artificial Sequence: Synthetic oligonucleotide
gcgcuucucuauagagucc

SEQ ID NO: 226232 - RNA, 19 nt, Artificial Sequence
  Description of Artificial Sequence: Synthetic oligonucleotide
gaauucccucccacugagu

SEQ ID NO: 226233 - RNA, 19 nt, Artificial Sequence
  Description of Artificial Sequence: Synthetic oligonucleotide
gccuagacguacucaggcu

SEQ ID NO: 226234 - RNA, 19 nt, Artificial Sequence
  Description of Artificial Sequence: Synthetic oligonucleotide
gacuugcgucguggagagc

SEQ ID NO: 226235 - RNA, 19 nt, Artificial Sequence
  Description of Artificial Sequence: Synthetic oligonucleotide
agcucaccauggggcaggu

SEQ ID NO: 226236 - RNA, 19 nt, Artificial Sequence
  Description of Artificial Sequence: Synthetic oligonucleotide
gcaacugguagggcaaagu

SEQ ID NO: 226237 - RNA, 19 nt, Artificial Sequence
  Description of Artificial Sequence: Synthetic oligonucleotide
guagagagcugggccgugu

SEQ ID NO: 226238 - RNA, 19 nt, Artificial Sequence
  Description of Artificial Sequence: Synthetic oligonucleotide
gagcgguauuggcguugga

SEQ ID NO: 226239 - RNA, 19 nt, Artificial Sequence
  Description of Artificial Sequence: Synthetic oligonucleotide
cccgguuucugggcugagg

SEQ ID NO: 226240 - RNA, 19 nt, Artificial Sequence
  Description of Artificial Sequence: Synthetic oligonucleotide
cguucagcgacaggcccag

SEQ ID NO: 226241 - RNA, 19 nt, Artificial Sequence
  Description of Artificial Sequence: Synthetic oligonucleotide
gcuacccgguagcccugag

SEQ ID NO: 226242 - RNA, 19 nt, Artificial Sequence
  Description of Artificial Sequence: Synthetic oligonucleotide
ccggauagccucuuguuuu

SEQ ID NO: 226243 - RNA, 19 nt, Artificial Sequence
  Description of Artificial Sequence: Synthetic oligonucleotide
cccuacgcacagcuagguc

SEQ ID NO: 226244 - RNA, 19 nt, Artificial Sequence
  Description of Artificial Sequence: Synthetic oligonucleotide
ccgguagcccugaggagga

SEQ ID NO: 226245 - RNA, 19 nt, Artificial Sequence
  Description of Artificial Sequence: Synthetic oligonucleotide
gcgaguggugcgcuucucu

SEQ ID NO: 226246 - RNA, 19 nt, Artificial Sequence
  Description of Artificial Sequence: Synthetic oligonucleotide
ggggcgaguggugcgcuuc

SEQ ID NO: 226247 - RNA, 19 nt, Artificial Sequence
  Description of Artificial Sequence: Synthetic oligonucleotide
ccacguuccuggcuuucca

SEQ ID NO: 226248 - RNA, 19 nt, Artificial Sequence
  Description of Artificial Sequence: Synthetic oligonucleotide
gccccgguuccguuugcuc

SEQ ID NO: 226249 - RNA, 19 nt, Artificial Sequence
  Description of Artificial Sequence: Synthetic oligonucleotide
guucagcgacaggcccagc

SEQ ID NO: 226250 - RNA, 19 nt, Artificial Sequence
  Description of Artificial Sequence: Synthetic oligonucleotide
ggccaaucuuggcucuugu

SEQ ID NO: 226251 - RNA, 19 nt, Artificial Sequence
  Description of Artificial Sequence: Synthetic oligonucleotide
ggguguuagcuggcucaac

SEQ ID NO: 226252 - RNA, 19 nt, Artificial Sequence
  Description of Artificial Sequence: Synthetic oligonucleotide
cgggaagggguuaacuucu

SEQ ID NO: 226253 - RNA, 19 nt, Artificial Sequence
  Description of Artificial Sequence: Synthetic oligonucleotide
cucagggccggcucuucuu

SEQ ID NO: 226254 - RNA, 19 nt, Artificial Sequence
  Description of Artificial Sequence: Synthetic oligonucleotide
agcacacuucuggguccaa

SEQ ID NO: 226255 - RNA, 19 nt, Artificial Sequence
  Description of Artificial Sequence: Synthetic oligonucleotide
cuuuguugacggggcgagu

SEQ ID NO: 226256 - RNA, 19 nt, Artificial Sequence
  Description of Artificial Sequence: Synthetic oligonucleotide
ggccuccgagggaugcuac

SEQ ID NO: 226257 - RNA, 19 nt, Artificial Sequence
  Description of Artificial Sequence: Synthetic oligonucleotide
ggcaugcaauguccugccu

SEQ ID NO: 226258 - RNA, 19 nt, Artificial Sequence
  Description of Artificial Sequence: Synthetic oligonucleotide
cccauaacuuaccccuccu

SEQ ID NO: 226259 - RNA, 19 nt, Artificial Sequence
  Description of Artificial Sequence: Synthetic oligonucleotide
caggcucggcaugcaaugu

SEQ ID NO: 226260 - RNA, 19 nt, Artificial Sequence
  Description of Artificial Sequence: Synthetic oligonucleotide
ggagagcgggguggcucug

SEQ ID NO: 226261 - RNA, 19 nt, Artificial Sequence
  Description of Artificial Sequence: Synthetic oligonucleotide
cgaguggugcgcuucucua

SEQ ID NO: 226262 - RNA, 19 nt, Artificial Sequence
  Description of Artificial Sequence: Synthetic oligonucleotide
gggaugcuacugaucuccu

SEQ ID NO: 226263 - RNA, 19 nt, Artificial Sequence
  Description of Artificial Sequence: Synthetic oligonucleotide
gccuccgagggaugcuacu

SEQ ID NO: 226264 - RNA, 19 nt, Artificial Sequence
  Description of Artificial Sequence: Synthetic oligonucleotide
ggagagcgguauuggcguu

SEQ ID NO: 226265 - RNA, 19 nt, Artificial Sequence
  Description of Artificial Sequence: Synthetic oligonucleotide
gcgucguggagagcgguau

SEQ ID NO: 226266 - RNA, 19 nt, Artificial Sequence
  Description of Artificial Sequence: Synthetic oligonucleotide
ccccugucaauaggccuga

SEQ ID NO: 226267 - RNA, 19 nt, Artificial Sequence
  Description of Artificial Sequence: Synthetic oligonucleotide
ggcuggcaagucucugcuu

SEQ ID NO: 226268 - RNA, 19 nt, Artificial Sequence
  Description of Artificial Sequence: Synthetic oligonucleotide
ggaccacguuccuggcuuu

SEQ ID NO: 226269 - RNA, 19 nt, Artificial Sequence
  Description of Artificial Sequence: Synthetic oligonucleotide
ccgugagagcugccuaccu

SEQ ID NO: 226270 - RNA, 19 nt, Artificial Sequence
  Description of Artificial Sequence: Synthetic oligonucleotide
gcucaccauggggcagguc

SEQ ID NO: 226271 - RNA, 19 nt, Artificial Sequence
  Description of Artificial Sequence: Synthetic oligonucleotide
gggccggcucuucuuucuu

SEQ ID NO: 226272 - RNA, 19 nt, Artificial Sequence
  Description of Artificial Sequence: Synthetic oligonucleotide
cgagcccuacgcacagcua

SEQ ID NO: 226273 - RNA, 19 nt, Artificial Sequence
  Description of Artificial Sequence: Synthetic oligonucleotide
cggcguucagcucgauccu

SEQ ID NO: 226274 - RNA, 19 nt, Artificial Sequence
  Description of Artificial Sequence: Synthetic oligonucleotide
ggggccaaucuuggcucuu

SEQ ID NO: 226275 - RNA, 19 nt, Artificial Sequence
  Description of Artificial Sequence: Synthetic oligonucleotide
cgucguggagagcgguauu

SEQ ID NO: 226276 - RNA, 19 nt, Artificial Sequence
  Description of Artificial Sequence: Synthetic oligonucleotide
aaggauguaaacuuaaaac

SEQ ID NO: 226277 - RNA, 19 nt, Artificial Sequence
  Description of Artificial Sequence: Synthetic oligonucleotide
uccuauaaaauacaggggc

SEQ ID NO: 226278 - RNA, 19 nt, Artificial Sequence
  Description of Artificial Sequence: Synthetic oligonucleotide
uuaaauacaggacugagau

SEQ ID NO: 226279 - RNA, 19 nt, Artificial Sequence
  Description of Artificial Sequence: Synthetic oligonucleotide
gaagguacuaaucaggcag

SEQ ID NO: 226280 - RNA, 19 nt, Artificial Sequence
  Description of Artificial Sequence: Synthetic oligonucleotide
uccuaagucauuuagaagu

SEQ ID NO: 226281 - RNA, 19 nt, Artificial Sequence
  Description of Artificial Sequence: Synthetic oligonucleotide
aacaccagcaaacaugcuc

SEQ ID NO: 226282 - RNA, 19 nt, Artificial Sequence
  Description of Artificial Sequence: Synthetic oligonucleotide
ucaagugugagguaacugg

SEQ ID NO: 226283 - RNA, 19 nt, Artificial Sequence
  Description of Artificial Sequence: Synthetic oligonucleotide
uaaggaaauagucauggcc

SEQ ID NO: 226284 - RNA, 19 nt, Artificial Sequence
  Description of Artificial Sequence: Synthetic oligonucleotide
ugagguuucucuaacaucu

SEQ ID NO: 226285 - RNA, 19 nt, Artificial Sequence
  Description of Artificial Sequence: Synthetic oligonucleotide
agaaguuuguaguuugggc

SEQ ID NO: 226286 - RNA, 19 nt, Artificial Sequence
  Description of Artificial Sequence: Synthetic oligonucleotide
guacuaaucaggcagaggc

SEQ ID NO: 226287 - RNA, 19 nt, Artificial Sequence
  Description of Artificial Sequence: Synthetic oligonucleotide
uucaagucccacaaaaugc

SEQ ID NO: 226288 - RNA, 19 nt, Artificial Sequence
  Description of Artificial Sequence: Synthetic oligonucleotide
acugguaggauucugaacu

SEQ ID NO: 226289 - RNA, 19 nt, Artificial Sequence
  Description of Artificial Sequence: Synthetic oligonucleotide
aggauguaaacuuaaaacu

SEQ ID NO: 226290 - RNA, 19 nt, Artificial Sequence
  Description of Artificial Sequence: Synthetic oligonucleotide
gaauaggcaggccauaagg

SEQ ID NO: 226291 - RNA, 19 nt, Artificial Sequence
  Description of Artificial Sequence: Synthetic oligonucleotide
guugacucuacccugaacc

SEQ ID NO: 226292 - RNA, 19 nt, Artificial Sequence
  Description of Artificial Sequence: Synthetic oligonucleotide
ugauccuauaaaauacagg

SEQ ID NO: 226293 - RNA, 19 nt, Artificial Sequence
  Description of Artificial Sequence: Synthetic oligonucleotide
cuaacaucuccacugaucc

SEQ ID NO: 226294 - RNA, 19 nt, Artificial Sequence
  Description of Artificial Sequence: Synthetic oligonucleotide
gaaacagggaguuaagcug

SEQ ID NO: 226295 - RNA, 19 nt, Artificial Sequence
  Description of Artificial Sequence: Synthetic oligonucleotide
cauaaggaaauagucaugg

SEQ ID NO: 226296 - RNA, 19 nt, Artificial Sequence
  Description of Artificial Sequence: Synthetic oligonucleotide
uaggauucugaacuggagg

SEQ ID NO: 226297 - RNA, 19 nt, Artificial Sequence
  Description of Artificial Sequence: Synthetic oligonucleotide
aacacagccagucaacugu

SEQ ID NO: 226298 - RNA, 19 nt, Artificial Sequence
  Description of Artificial Sequence: Synthetic oligonucleotide
gagguuuauaccuauuccc

SEQ ID NO: 226299 - RNA, 19 nt, Artificial Sequence
  Description of Artificial Sequence: Synthetic oligonucleotide
ugugccuuuaccaagggaa

SEQ ID NO: 226300 - RNA, 19 nt, Artificial Sequence
  Description of Artificial Sequence: Synthetic oligonucleotide
gacucgaaggaacuggucg

SEQ ID NO: 226301 - RNA, 19 nt, Artificial Sequence
  Description of Artificial Sequence: Synthetic oligonucleotide
uuuaaauacaggacugaga

SEQ ID NO: 226302 - RNA, 19 nt, Artificial Sequence
  Description of Artificial Sequence: Synthetic oligonucleotide
uauaccuauucccacauaa

SEQ ID NO: 226303 - RNA, 19 nt, Artificial Sequence
  Description of Artificial Sequence: Synthetic oligonucleotide
uaccuauucccacauaaag

SEQ ID NO: 226304 - RNA, 19 nt, Artificial Sequence
  Description of Artificial Sequence: Synthetic oligonucleotide
accgggauuguccagaagg

SEQ ID NO: 226305 - RNA, 19 nt, Artificial Sequence
  Description of Artificial Sequence: Synthetic oligonucleotide
uuuaacugguguuuggcug

SEQ ID NO: 226306 - RNA, 19 nt, Artificial Sequence
  Description of Artificial Sequence: Synthetic oligonucleotide
gaagcggacacauaaacuc

SEQ ID NO: 226307 - RNA, 19 nt, Artificial Sequence
  Description of Artificial Sequence: Synthetic oligonucleotide
acguugauggcaaacagcc

SEQ ID NO: 226308 - RNA, 19 nt, Artificial Sequence
  Description of Artificial Sequence: Synthetic oligonucleotide
uccacugaaaccacaugcg

SEQ ID NO: 226309 - RNA, 19 nt, Artificial Sequence
  Description of Artificial Sequence: Synthetic oligonucleotide
ugaaacagggaguuaagcu

SEQ ID NO: 226310 - RNA, 19 nt, Artificial Sequence
  Description of Artificial Sequence: Synthetic oligonucleotide
aaggaaauagucauggccu

SEQ ID NO: 226311 - RNA, 19 nt, Artificial Sequence
  Description of Artificial Sequence: Synthetic oligonucleotide
uauugcacgaaguuccugc

SEQ ID NO: 226312 - RNA, 19 nt, Artificial Sequence
  Description of Artificial Sequence: Synthetic oligonucleotide
aagccugccuaccuauucc

SEQ ID NO: 226313 - RNA, 19 nt, Artificial Sequence
  Description of Artificial Sequence: Synthetic oligonucleotide
agugcgaugauuccaaaca

SEQ ID NO: 226314 - RNA, 19 nt, Artificial Sequence
  Description of Artificial Sequence: Synthetic oligonucleotide
ucccacaaaaugcuguagg

SEQ ID NO: 226315 - RNA, 19 nt, Artificial Sequence
  Description of Artificial Sequence: Synthetic oligonucleotide
uuagaaguuuguaguuugg

SEQ ID NO: 226316 - RNA, 19 nt, Artificial Sequence
  Description of Artificial Sequence: Synthetic oligonucleotide
auaaggaaauagucauggc

SEQ ID NO: 226317 - RNA, 19 nt, Artificial Sequence
  Description of Artificial Sequence: Synthetic oligonucleotide
ucuacccugaaccaguccu

SEQ ID NO: 226318 - RNA, 19 nt, Artificial Sequence
  Description of Artificial Sequence: Synthetic oligonucleotide
agaaacacgguguaaggca

SEQ ID NO: 226319 - RNA, 19 nt, Artificial Sequence
  Description of Artificial Sequence: Synthetic oligonucleotide
ucaagucccacaaaaugcu

SEQ ID NO: 226320 - RNA, 19 nt, Artificial Sequence
  Description of Artificial Sequence: Synthetic oligonucleotide
acuaccaugaagauuagca

SEQ ID NO: 226321 - RNA, 19 nt, Artificial Sequence
  Description of Artificial Sequence: Synthetic oligonucleotide
ugaaauacacguugauggc

SEQ ID NO: 226322 - RNA, 19 nt, Artificial Sequence
  Description of Artificial Sequence: Synthetic oligonucleotide
auagucacguugcucacuc

SEQ ID NO: 226323 - RNA, 19 nt, Artificial Sequence
  Description of Artificial Sequence: Synthetic oligonucleotide
agaaaggaggaccuccagg

SEQ ID NO: 226324 - RNA, 19 nt, Artificial Sequence
  Description of Artificial Sequence: Synthetic oligonucleotide
aggaccacaacauuagaca

SEQ ID NO: 226325 - RNA, 19 nt, Artificial Sequence
  Description of Artificial Sequence: Synthetic oligonucleotide
accuauucccacauaaagc

SEQ ID NO: 226326 - RNA, 19 nt, Artificial Sequence
  Description of Artificial Sequence: Synthetic oligonucleotide
gauuuuaccuucaauuuuc

SEQ ID NO: 226327 - RNA, 19 nt, Artificial Sequence
  Description of Artificial Sequence: Synthetic oligonucleotide
uacuaaucaggcagaggcg

SEQ ID NO: 226328 - RNA, 19 nt, Artificial Sequence
  Description of Artificial Sequence: Synthetic oligonucleotide
ugccacaugaggcagguac

SEQ ID NO: 226329 - RNA, 19 nt, Artificial Sequence
  Description of Artificial Sequence: Synthetic oligonucleotide
gcaagcaacagccucaggg

SEQ ID NO: 226330 - RNA, 19 nt, Artificial Sequence
  Description of Artificial Sequence: Synthetic oligonucleotide
uguaaggcaauguuagaaa

SEQ ID NO: 226331 - RNA, 19 nt, Artificial Sequence
  Description of Artificial Sequence: Synthetic oligonucleotide
cauggcauuacuacucccc

SEQ ID NO: 226332 - RNA, 19 nt, Artificial Sequence
  Description of Artificial Sequence: Synthetic oligonucleotide
cuaccaugaagauuagcag

SEQ ID NO: 226333 - RNA, 19 nt, Artificial Sequence
  Description of Artificial Sequence: Synthetic oligonucleotide
gaaaugguggcgucggggc

SEQ ID NO: 226334 - RNA, 19 nt, Artificial Sequence
  Description of Artificial Sequence: Synthetic oligonucleotide
uugguaaggcaucacaaau

SEQ ID NO: 226335 - RNA, 19 nt, Artificial Sequence
  Description of Artificial Sequence: Synthetic oligonucleotide
agguagugucaauauaguc

SEQ ID NO: 226336 - RNA, 19 nt, Artificial Sequence
  Description of Artificial Sequence: Synthetic oligonucleotide
gaaguuuguaguuugggcu

SEQ ID NO: 226337 - RNA, 19 nt, Artificial Sequence
  Description of Artificial Sequence: Synthetic oligonucleotide
cuuaggggagcucucacgc

SEQ ID NO: 226338 - RNA, 19 nt, Artificial Sequence
  Description of Artificial Sequence: Synthetic oligonucleotide
uuuauaccuauucccacau

SEQ ID NO: 226339 - RNA, 19 nt, Artificial Sequence
  Description of Artificial Sequence: Synthetic oligonucleotide
uuuuaacugguguuuggcu

SEQ ID NO: 226340 - RNA, 19 nt, Artificial Sequence
  Description of Artificial Sequence: Synthetic oligonucleotide
gacgacaagagucaaagcu

SEQ ID NO: 226341 - RNA, 19 nt, Artificial Sequence
  Description of Artificial Sequence: Synthetic oligonucleotide
auagaccuggggaaggucc

SEQ ID NO: 226342 - RNA, 19 nt, Artificial Sequence
  Description of Artificial Sequence: Synthetic oligonucleotide
cacaggguaccuuucaccc

SEQ ID NO: 226343 - RNA, 19 nt, Artificial Sequence
  Description of Artificial Sequence: Synthetic oligonucleotide
guaccuuucacccaguaaa

SEQ ID NO: 226344 - RNA, 19 nt, Artificial Sequence
  Description of Artificial Sequence: Synthetic oligonucleotide
aaacacagccagucaacug

SEQ ID NO: 226345 - RNA, 19 nt, Artificial Sequence
  Description of Artificial Sequence: Synthetic oligonucleotide
agaacuuccccacccugac

SEQ ID NO: 226346 - RNA, 19 nt, Artificial Sequence
  Description of Artificial Sequence: Synthetic oligonucleotide
agaucaaauugguaaggca

SEQ ID NO: 226347 - RNA, 19 nt, Artificial Sequence
  Description of Artificial Sequence: Synthetic oligonucleotide
ugcgaugauuccaaacagc

SEQ ID NO: 226348 - RNA, 19 nt, Artificial Sequence
  Description of Artificial Sequence: Synthetic oligonucleotide
uauagaccgggauugucca

SEQ ID NO: 226349 - RNA, 19 nt, Artificial Sequence
  Description of Artificial Sequence: Synthetic oligonucleotide
gauuagcaggaccacaaca

SEQ ID NO: 226350 - RNA, 19 nt, Artificial Sequence
  Description of Artificial Sequence: Synthetic oligonucleotide
aaguuuguaguuugggcua

SEQ ID NO: 226351 - RNA, 19 nt, Artificial Sequence
  Description of Artificial Sequence: Synthetic oligonucleotide
aagugaaggagggucauga

SEQ ID NO: 226352 - RNA, 19 nt, Artificial Sequence
  Description of Artificial Sequence: Synthetic oligonucleotide
agaggcgugccacaugagg

SEQ ID NO: 226353 - RNA, 19 nt, Artificial Sequence
  Description of Artificial Sequence: Synthetic oligonucleotide
uuuuaccuucaauuuucag

SEQ ID NO: 226354 - RNA, 19 nt, Artificial Sequence
  Description of Artificial Sequence: Synthetic oligonucleotide
aacuaaaggggaaauuggu

SEQ ID NO: 226355 - RNA, 19 nt, Artificial Sequence
  Description of Artificial Sequence: Synthetic oligonucleotide
caguacaacuugaagcccc

SEQ ID NO: 226356 - RNA, 19 nt, Artificial Sequence
  Description of Artificial Sequence: Synthetic oligonucleotide
aggaggagcccaauuaccc

SEQ ID NO: 226357 - RNA, 19 nt, Artificial Sequence
  Description of Artificial Sequence: Synthetic oligonucleotide
cauggguuuauagaccggg

SEQ ID NO: 226358 - RNA, 19 nt, Artificial Sequence
  Description of Artificial Sequence: Synthetic oligonucleotide
aauacaggggcagaagcaa

SEQ ID NO: 226359 - RNA, 19 nt, Artificial Sequence
  Description of Artificial Sequence: Synthetic oligonucleotide
auagccuaccacugucuac

SEQ ID NO: 226360 - RNA, 19 nt, Artificial Sequence
  Description of Artificial Sequence: Synthetic oligonucleotide
aauggcuacuaggaucauc

SEQ ID NO: 226361 - RNA, 19 nt, Artificial Sequence
  Description of Artificial Sequence: Synthetic oligonucleotide
aucaaauugguaaggcauc

SEQ ID NO: 226362 - RNA, 19 nt, Artificial Sequence
  Description of Artificial Sequence: Synthetic oligonucleotide
ucaaauugguaaggcauca

SEQ ID NO: 226363 - RNA, 19 nt, Artificial Sequence
  Description of Artificial Sequence: Synthetic oligonucleotide
cugccuacccagcugaugc

SEQ ID NO: 226364 - RNA, 19 nt, Artificial Sequence
  Description of Artificial Sequence: Synthetic oligonucleotide
accguccuaagucauuuag

SEQ ID NO: 226365 - RNA, 19 nt, Artificial Sequence
  Description of Artificial Sequence: Synthetic oligonucleotide
aauugguuugaaugauaaa

SEQ ID NO: 226366 - RNA, 19 nt, Artificial Sequence
  Description of Artificial Sequence: Synthetic oligonucleotide
agagccaugaaaauucaca

SEQ ID NO: 226367 - RNA, 19 nt, Artificial Sequence
  Description of Artificial Sequence: Synthetic oligonucleotide
agacgacaagagucaaagc

SEQ ID NO: 226368 - RNA, 19 nt, Artificial Sequence
  Description of Artificial Sequence: Synthetic oligonucleotide
guuuauaccuauucccaca

SEQ ID NO: 226369 - RNA, 19 nt, Artificial Sequence
  Description of Artificial Sequence: Synthetic oligonucleotide
aauagaccuggggaagguc

SEQ ID NO: 226370 - RNA, 19 nt, Artificial Sequence
  Description of Artificial Sequence: Synthetic oligonucleotide
gaccgggacagucagacuc

SEQ ID NO: 226371 - RNA, 19 nt, Artificial Sequence
  Description of Artificial Sequence: Synthetic oligonucleotide
gagaaacacgguguaaggc

SEQ ID NO: 226372 - RNA, 19 nt, Artificial Sequence
  Description of Artificial Sequence: Synthetic oligonucleotide
aaggucaagugugagguaa

SEQ ID NO: 226373 - RNA, 19 nt, Artificial Sequence
  Description of Artificial Sequence: Synthetic oligonucleotide
aacaucuccacugauccua

SEQ ID NO: 226374 - RNA, 19 nt, Artificial Sequence
  Description of Artificial Sequence: Synthetic oligonucleotide
auccuauaaaauacagggg

SEQ ID NO: 226375 - RNA, 19 nt, Artificial Sequence
  Description of Artificial Sequence: Synthetic oligonucleotide
acacguugauggcaaacag

SEQ ID NO: 226376 - RNA, 19 nt, Artificial Sequence
  Description of Artificial Sequence: Synthetic oligonucleotide
gcaggauugacccaaggug

SEQ ID NO: 226377 - RNA, 19 nt, Artificial Sequence
  Description of Artificial Sequence: Synthetic oligonucleotide
auggcuacuaggaucauca

SEQ ID NO: 226378 - RNA, 19 nt, Artificial Sequence
  Description of Artificial Sequence: Synthetic oligonucleotide
cacaaaaugcuguaggcaa

SEQ ID NO: 226379 - RNA, 19 nt, Artificial Sequence
  Description of Artificial Sequence: Synthetic oligonucleotide
ggcauuacuacuccccagg

SEQ ID NO: 226380 - RNA, 19 nt, Artificial Sequence
  Description of Artificial Sequence: Synthetic oligonucleotide
cacguugauggcaaacagc

SEQ ID NO: 226381 - RNA, 19 nt, Artificial Sequence
  Description of Artificial Sequence: Synthetic oligonucleotide
uugacucuacccugaacca

SEQ ID NO: 226382 - RNA, 19 nt, Artificial Sequence
  Description of Artificial Sequence: Synthetic oligonucleotide
ggcguugaaauacacguug

SEQ ID NO: 226383 - RNA, 19 nt, Artificial Sequence
  Description of Artificial Sequence: Synthetic oligonucleotide
uggcuaaggaaugaccacc

SEQ ID NO: 226384 - RNA, 19 nt, Artificial Sequence
  Description of Artificial Sequence: Synthetic oligonucleotide
gaaauacacguugauggca

SEQ ID NO: 226385 - RNA, 19 nt, Artificial Sequence
  Description of Artificial Sequence: Synthetic oligonucleotide
gaacuggucggcgaagucc

SEQ ID NO: 226386 - RNA, 19 nt, Artificial Sequence
  Description of Artificial Sequence: Synthetic oligonucleotide
uccaaguugcauguacugc

SEQ ID NO: 226387 - RNA, 19 nt, Artificial Sequence
  Description of Artificial Sequence: Synthetic oligonucleotide
aggaaauagucauggccug

SEQ ID NO: 226388 - RNA, 19 nt, Artificial Sequence
  Description of Artificial Sequence: Synthetic oligonucleotide
uucugagcgggacucugcc

SEQ ID NO: 226389 - RNA, 19 nt, Artificial Sequence
  Description of Artificial Sequence: Synthetic oligonucleotide
ugucuguuaccacucuuuc

SEQ ID NO: 226390 - RNA, 19 nt, Artificial Sequence
  Description of Artificial Sequence: Synthetic oligonucleotide
acuaaucaggcagaggcgu

SEQ ID NO: 226391 - RNA, 19 nt, Artificial Sequence
  Description of Artificial Sequence: Synthetic oligonucleotide
agcugcacccagcagagca

SEQ ID NO: 226392 - RNA, 19 nt, Artificial Sequence
  Description of Artificial Sequence: Synthetic oligonucleotide
uugagguuucucuaacauc

SEQ ID NO: 226393 - RNA, 19 nt, Artificial Sequence
  Description of Artificial Sequence: Synthetic oligonucleotide
guaaggcaauguuagaaaa

SEQ ID NO: 226394 - RNA, 19 nt, Artificial Sequence
  Description of Artificial Sequence: Synthetic oligonucleotide
uauccuagcugcacccagc

SEQ ID NO: 226395 - RNA, 19 nt, Artificial Sequence
  Description of Artificial Sequence: Synthetic oligonucleotide
ucuccacugauccuauaaa

SEQ ID NO: 226396 - RNA, 19 nt, Artificial Sequence
  Description of Artificial Sequence: Synthetic oligonucleotide
aauugucugcagugcgaug

SEQ ID NO: 226397 - RNA, 19 nt, Artificial Sequence
  Description of Artificial Sequence: Synthetic oligonucleotide
ugucuacucaaagccuugg

SEQ ID NO: 226398 - RNA, 19 nt, Artificial Sequence
  Description of Artificial Sequence: Synthetic oligonucleotide
aauuuucaggugucugcaa

SEQ ID NO: 226399 - RNA, 19 nt, Artificial Sequence
  Description of Artificial Sequence: Synthetic oligonucleotide
acacauaaacucuggcagu

SEQ ID NO: 226400 - RNA, 19 nt, Artificial Sequence
  Description of Artificial Sequence: Synthetic oligonucleotide
aagucauauuucaggaagu

SEQ ID NO: 226401 - RNA, 19 nt, Artificial Sequence
  Description of Artificial Sequence: Synthetic oligonucleotide
auuagcaggaccacaacau

SEQ ID NO: 226402 - RNA, 19 nt, Artificial Sequence
  Description of Artificial Sequence: Synthetic oligonucleotide
aagucauuuagaaguuugu

SEQ ID NO: 226403 - RNA, 19 nt, Artificial Sequence
  Description of Artificial Sequence: Synthetic oligonucleotide
uuggugacucgaaggaacu

SEQ ID NO: 226404 - RNA, 19 nt, Artificial Sequence
  Description of Artificial Sequence: Synthetic oligonucleotide
ucaauuacuugggccagca

SEQ ID NO: 226405 - RNA, 19 nt, Artificial Sequence
  Description of Artificial Sequence: Synthetic oligonucleotide
auacacguugauggcaaac

SEQ ID NO: 226406 - RNA, 19 nt, Artificial Sequence
  Description of Artificial Sequence: Synthetic oligonucleotide
uagccuaccacugucuacu

SEQ ID NO: 226407 - RNA, 19 nt, Artificial Sequence
  Description of Artificial Sequence: Synthetic oligonucleotide
agaagguacuaaucaggca

SEQ ID NO: 226408 - RNA, 19 nt, Artificial Sequence
  Description of Artificial Sequence: Synthetic oligonucleotide
ucuaagccugccuaccuau

SEQ ID NO: 226409 - RNA, 19 nt, Artificial Sequence
  Description of Artificial Sequence: Synthetic oligonucleotide
gucaugcauggguuuauag

SEQ ID NO: 226410 - RNA, 19 nt, Artificial Sequence
  Description of Artificial Sequence: Synthetic oligonucleotide
acgacaagagucaaagcug

SEQ ID NO: 226411 - RNA, 19 nt, Artificial Sequence
  Description of Artificial Sequence: Synthetic oligonucleotide
gugcgaugauuccaaacag

SEQ ID NO: 226412 - RNA, 19 nt, Artificial Sequence
  Description of Artificial Sequence: Synthetic oligonucleotide
uagcaggaccacaacauua

SEQ ID NO: 226413 - RNA, 19 nt, Artificial Sequence
  Description of Artificial Sequence: Synthetic oligonucleotide
ugagguaacuggguugagc

SEQ ID NO: 226414 - RNA, 19 nt, Artificial Sequence
  Description of Artificial Sequence: Synthetic oligonucleotide
gauugacccaaggugacuc

SEQ ID NO: 226415 - RNA, 19 nt, Artificial Sequence
  Description of Artificial Sequence: Synthetic oligonucleotide
aaacgagcugccagcuccc

SEQ ID NO: 226416 - RNA, 19 nt, Artificial Sequence
  Description of Artificial Sequence: Synthetic oligonucleotide
ggugucuucaguacugggg

SEQ ID NO: 226417 - RNA, 19 nt, Artificial Sequence
  Description of Artificial Sequence: Synthetic oligonucleotide
cuagcggcugccacguagg

SEQ ID NO: 226418 - RNA, 19 nt, Artificial Sequence
  Description of Artificial Sequence: Synthetic oligonucleotide
ggcaauugucugcagugcg

SEQ ID NO: 226419 - RNA, 19 nt, Artificial Sequence
  Description of Artificial Sequence: Synthetic oligonucleotide
aggcaauugucugcagugc

SEQ ID NO: 226420 - RNA, 19 nt, Artificial Sequence
  Description of Artificial Sequence: Synthetic oligonucleotide
uuacccucguggcacuacc

SEQ ID NO: 226421 - RNA, 19 nt, Artificial Sequence
  Description of Artificial Sequence: Synthetic oligonucleotide
ggugaaacgagcugccagc

SEQ ID NO: 226422 - RNA, 19 nt, Artificial Sequence
  Description of Artificial Sequence: Synthetic oligonucleotide
gagcucucacgcauggugg

SEQ ID NO: 226423 - RNA, 19 nt, Artificial Sequence
  Description of Artificial Sequence: Synthetic oligonucleotide
agguuuauaccuauuccca

SEQ ID NO: 226424 - RNA, 19 nt, Artificial Sequence
  Description of Artificial Sequence: Synthetic oligonucleotide
auggcauuacuacucccca

SEQ ID NO: 226425 - RNA, 19 nt, Artificial Sequence
  Description of Artificial Sequence: Synthetic oligonucleotide
aucaauuacuugggccagc

SEQ ID NO: 226426 - RNA, 19 nt, Artificial Sequence
  Description of Artificial Sequence: Synthetic oligonucleotide
cagguuccucaucagaaac

SEQ ID NO: 226427 - RNA, 19 nt, Artificial Sequence
  Description of Artificial Sequence: Synthetic oligonucleotide
cugccuaccuauucccucc

SEQ ID NO: 226428 - RNA, 19 nt, Artificial Sequence
  Description of Artificial Sequence: Synthetic oligonucleotide
ugcucacuccacugaaacc

SEQ ID NO: 226429 - RNA, 19 nt, Artificial Sequence
  Description of Artificial Sequence: Synthetic oligonucleotide
cugcagaacauggacuggg

SEQ ID NO: 226430 - RNA, 19 nt, Artificial Sequence
  Description of Artificial Sequence: Synthetic oligonucleotide
gaggccauagccuaccacu

SEQ ID NO: 226431 - RNA, 19 nt, Artificial Sequence
  Description of Artificial Sequence: Synthetic oligonucleotide
accaaaacacagccaguca

SEQ ID NO: 226432 - RNA, 19 nt, Artificial Sequence
  Description of Artificial Sequence: Synthetic oligonucleotide
ugacucuacccugaaccag

SEQ ID NO: 226433 - RNA, 19 nt, Artificial Sequence
  Description of Artificial Sequence: Synthetic oligonucleotide
ccuauucccuccaauagac

SEQ ID NO: 226434 - RNA, 19 nt, Artificial Sequence
  Description of Artificial Sequence: Synthetic oligonucleotide
agaaaccauuuugccaaac

SEQ ID NO: 226435 - RNA, 19 nt, Artificial Sequence
  Description of Artificial Sequence: Synthetic oligonucleotide
auugcacgaaguuccugcu

SEQ ID NO: 226436 - RNA, 19 nt, Artificial Sequence
  Description of Artificial Sequence: Synthetic oligonucleotide
cuauucccuccaauagacc

SEQ ID NO: 226437 - RNA, 19 nt, Artificial Sequence
  Description of Artificial Sequence: Synthetic oligonucleotide
ucacguugcucacuccacu

SEQ ID NO: 226438 - RNA, 19 nt, Artificial Sequence
  Description of Artificial Sequence: Synthetic oligonucleotide
guauccuagcugcacccag

SEQ ID NO: 226439 - RNA, 19 nt, Artificial Sequence
  Description of Artificial Sequence: Synthetic oligonucleotide
cccacauaaggaaauaguc

SEQ ID NO: 226440 - RNA, 19 nt, Artificial Sequence
  Description of Artificial Sequence: Synthetic oligonucleotide
cauaaggcugcagaacaug

SEQ ID NO: 226441 - RNA, 19 nt, Artificial Sequence
  Description of Artificial Sequence: Synthetic oligonucleotide
aagguacuaaucaggcaga

SEQ ID NO: 226442 - RNA, 19 nt, Artificial Sequence
  Description of Artificial Sequence: Synthetic oligonucleotide
cuuaaaggggccgcgccgc

SEQ ID NO: 226443 - RNA, 19 nt, Artificial Sequence
  Description of Artificial Sequence: Synthetic oligonucleotide
aagccuuaaaggggccgcg

SEQ ID NO: 226444 - RNA, 19 nt, Artificial Sequence
  Description of Artificial Sequence: Synthetic oligonucleotide
uguacugcuuaggggagcu

SEQ ID NO: 226445 - RNA, 19 nt, Artificial Sequence
  Description of Artificial Sequence: Synthetic oligonucleotide
uguugacucuacccugaac

SEQ ID NO: 226446 - RNA, 19 nt, Artificial Sequence
  Description of Artificial Sequence: Synthetic oligonucleotide
gguuuauaccuauucccac

SEQ ID NO: 226447 - RNA, 19 nt, Artificial Sequence
  Description of Artificial Sequence: Synthetic oligonucleotide
aauacacguugauggcaaa

SEQ ID NO: 226448 - RNA, 19 nt, Artificial Sequence
  Description of Artificial Sequence: Synthetic oligonucleotide
aggauugacccaaggugac

SEQ ID NO: 226449 - RNA, 19 nt, Artificial Sequence
  Description of Artificial Sequence: Synthetic oligonucleotide
cacugaaaccacaugcgga

SEQ ID NO: 226450 - RNA, 19 nt, Artificial Sequence
  Description of Artificial Sequence: Synthetic oligonucleotide
uccagguagugucaauaua

SEQ ID NO: 226451 - RNA, 19 nt, Artificial Sequence
  Description of Artificial Sequence: Synthetic oligonucleotide
ucgaaggaacuggucggcg

SEQ ID NO: 226452 - RNA, 19 nt, Artificial Sequence
  Description of Artificial Sequence: Synthetic oligonucleotide
ucguggcacuaccaugaag

SEQ ID NO: 226453 - RNA, 19 nt, Artificial Sequence
  Description of Artificial Sequence: Synthetic oligonucleotide
acuuaaaacuaaaggggaa

SEQ ID NO: 226454 - RNA, 19 nt, Artificial Sequence
  Description of Artificial Sequence: Synthetic oligonucleotide
agguacugcuuggugacuc

SEQ ID NO: 226455 - RNA, 19 nt, Artificial Sequence
  Description of Artificial Sequence: Synthetic oligonucleotide
ugccauuauuuauuuugau

SEQ ID NO: 226456 - RNA, 19 nt, Artificial Sequence
  Description of Artificial Sequence: Synthetic oligonucleotide
uggggaaaacucagccuga

SEQ ID NO: 226457 - RNA, 19 nt, Artificial Sequence
  Description of Artificial Sequence: Synthetic oligonucleotide
acauaaggaaauagucaug

SEQ ID NO: 226458 - RNA, 19 nt, Artificial Sequence
  Description of Artificial Sequence: Synthetic oligonucleotide
auguacugcuuaggggagc

SEQ ID NO: 226459 - RNA, 19 nt, Artificial Sequence
  Description of Artificial Sequence: Synthetic oligonucleotide
gucuacucaaagccuuggc

SEQ ID NO: 226460 - RNA, 19 nt, Artificial Sequence
  Description of Artificial Sequence: Synthetic oligonucleotide
gguaacuggguugagccug

SEQ ID NO: 226461 - RNA, 19 nt, Artificial Sequence
  Description of Artificial Sequence: Synthetic oligonucleotide
guguaaggcaauguuagaa

SEQ ID NO: 226462 - RNA, 19 nt, Artificial Sequence
  Description of Artificial Sequence: Synthetic oligonucleotide
agguuuuaacugguguuug

SEQ ID NO: 226463 - RNA, 19 nt, Artificial Sequence
  Description of Artificial Sequence: Synthetic oligonucleotide
uggugggaacaccagcaaa

SEQ ID NO: 226464 - RNA, 19 nt, Artificial Sequence
  Description of Artificial Sequence: Synthetic oligonucleotide
ugguccucggcgcucgcgc

SEQ ID NO: 226465 - RNA, 19 nt, Artificial Sequence
  Description of Artificial Sequence: Synthetic oligonucleotide
uucccacauaaagcuaaag

SEQ ID NO: 226466 - RNA, 19 nt, Artificial Sequence
  Description of Artificial Sequence: Synthetic oligonucleotide
aacuugguuuuaaaaccaa

SEQ ID NO: 226467 - RNA, 19 nt, Artificial Sequence
  Description of Artificial Sequence: Synthetic oligonucleotide
ggaaaugguggcgucgggg

SEQ ID NO: 226468 - RNA, 19 nt, Artificial Sequence
  Description of Artificial Sequence: Synthetic oligonucleotide
cuucugagcgggacucugc

SEQ ID NO: 226469 - RNA, 19 nt, Artificial Sequence
  Description of Artificial Sequence: Synthetic oligonucleotide
ggauguaaacuuaaaacua

SEQ ID NO: 226470 - RNA, 19 nt, Artificial Sequence
  Description of Artificial Sequence: Synthetic oligonucleotide
gcaggcauauugcacgaag

SEQ ID NO: 226471 - RNA, 19 nt, Artificial Sequence
  Description of Artificial Sequence: Synthetic oligonucleotide
cagugcgaugauuccaaac

SEQ ID NO: 226472 - RNA, 19 nt, Artificial Sequence
  Description of Artificial Sequence: Synthetic oligonucleotide
caagccuuaaaggggccgc

SEQ ID NO: 226473 - RNA, 19 nt, Artificial Sequence
  Description of Artificial Sequence: Synthetic oligonucleotide
uuaggggagcucucacgca

SEQ ID NO: 226474 - RNA, 19 nt, Artificial Sequence
  Description of Artificial Sequence: Synthetic oligonucleotide
gggaagcggacacauaaac

SEQ ID NO: 226475 - RNA, 19 nt, Artificial Sequence
  Description of Artificial Sequence: Synthetic oligonucleotide
cuaccuauucccuccaaua

SEQ ID NO: 226476 - RNA, 19 nt, Artificial Sequence
  Description of Artificial Sequence: Synthetic oligonucleotide
uaacaucuccacugauccu

SEQ ID NO: 226477 - RNA, 19 nt, Artificial Sequence
  Description of Artificial Sequence: Synthetic oligonucleotide
uuaaaggggccgcgccgcc

SEQ ID NO: 226478 - RNA, 19 nt, Artificial Sequence
  Description of Artificial Sequence: Synthetic oligonucleotide
gaaacacgguguaaggcaa

SEQ ID NO: 226479 - RNA, 19 nt, Artificial Sequence
  Description of Artificial Sequence: Synthetic oligonucleotide
cccacaaaaugcuguaggc

SEQ ID NO: 226480 - RNA, 19 nt, Artificial Sequence
  Description of Artificial Sequence: Synthetic oligonucleotide
agccagucaacugucccag

SEQ ID NO: 226481 - RNA, 19 nt, Artificial Sequence
  Description of Artificial Sequence: Synthetic oligonucleotide
agacuguuuccaaagcaga

SEQ ID NO: 226482 - RNA, 19 nt, Artificial Sequence
  Description of Artificial Sequence: Synthetic oligonucleotide
gaagcaauacuggggccac

SEQ ID NO: 226483 - RNA, 19 nt, Artificial Sequence
  Description of Artificial Sequence: Synthetic oligonucleotide
ugcuuaggggagcucucac

SEQ ID NO: 226484 - RNA, 19 nt, Artificial Sequence
  Description of Artificial Sequence: Synthetic oligonucleotide
gucaagugugagguaacug

SEQ ID NO: 226485 - RNA, 19 nt, Artificial Sequence
  Description of Artificial Sequence: Synthetic oligonucleotide
accgggacagucagacucc

SEQ ID NO: 226486 - RNA, 19 nt, Artificial Sequence
  Description of Artificial Sequence: Synthetic oligonucleotide
auagaccgggauuguccag

SEQ ID NO: 226487 - RNA, 19 nt, Artificial Sequence
  Description of Artificial Sequence: Synthetic oligonucleotide
uuucaggugucugcaaaua

SEQ ID NO: 226488 - RNA, 19 nt, Artificial Sequence
  Description of Artificial Sequence: Synthetic oligonucleotide
caggcauagcccacauaag

SEQ ID NO: 226489 - RNA, 19 nt, Artificial Sequence
  Description of Artificial Sequence: Synthetic oligonucleotide
cuuuaccaagggaagggaa

SEQ ID NO: 226490 - RNA, 19 nt, Artificial Sequence
  Description of Artificial Sequence: Synthetic oligonucleotide
ggaauaggcaggccauaag

SEQ ID NO: 226491 - RNA, 19 nt, Artificial Sequence
  Description of Artificial Sequence: Synthetic oligonucleotide
acauaaagcuaaagcauuu

SEQ ID NO: 226492 - RNA, 19 nt, Artificial Sequence
  Description of Artificial Sequence: Synthetic oligonucleotide
gccuuuaccaagggaaggg

SEQ ID NO: 226493 - RNA, 19 nt, Artificial Sequence
  Description of Artificial Sequence: Synthetic oligonucleotide
gguacugcuuggugacucg

SEQ ID NO: 226494 - RNA, 19 nt, Artificial Sequence
  Description of Artificial Sequence: Synthetic oligonucleotide
guaacuggguugagccugg

SEQ ID NO: 226495 - RNA, 19 nt, Artificial Sequence
  Description of Artificial Sequence: Synthetic oligonucleotide
cgguguaaggcaauguuag

SEQ ID NO: 226496 - RNA, 19 nt, Artificial Sequence
  Description of Artificial Sequence: Synthetic oligonucleotide
aaacagcccaaagcaggca

SEQ ID NO: 226497 - RNA, 19 nt, Artificial Sequence
  Description of Artificial Sequence: Synthetic oligonucleotide
uguccagaaggcguugaaa

SEQ ID NO: 226498 - RNA, 19 nt, Artificial Sequence
  Description of Artificial Sequence: Synthetic oligonucleotide
agguacuaaucaggcagag

SEQ ID NO: 226499 - RNA, 19 nt, Artificial Sequence
  Description of Artificial Sequence: Synthetic oligonucleotide
uuauaccuauucccacaua

SEQ ID NO: 226500 - RNA, 19 nt, Artificial Sequence
  Description of Artificial Sequence: Synthetic oligonucleotide
gaccacaacauuagacauc

SEQ ID NO: 226501 - RNA, 19 nt, Artificial Sequence
  Description of Artificial Sequence: Synthetic oligonucleotide
gguacuaaucaggcagagg

SEQ ID NO: 226502 - RNA, 19 nt, Artificial Sequence
  Description of Artificial Sequence: Synthetic oligonucleotide
gagcaagcaacagccucag

SEQ ID NO: 226503 - RNA, 19 nt, Artificial Sequence
  Description of Artificial Sequence: Synthetic oligonucleotide
caagccugagaggaucagc

SEQ ID NO: 226504 - RNA, 19 nt, Artificial Sequence
  Description of Artificial Sequence: Synthetic oligonucleotide
aaugagguuuauaccuauu

SEQ ID NO: 226505 - RNA, 19 nt, Artificial Sequence
  Description of Artificial Sequence: Synthetic oligonucleotide
uggcuacuaggaucaucag

SEQ ID NO: 226506 - RNA, 19 nt, Artificial Sequence
  Description of Artificial Sequence: Synthetic oligonucleotide
auagcccacauaaggaaau

SEQ ID NO: 226507 - RNA, 19 nt, Artificial Sequence
  Description of Artificial Sequence: Synthetic oligonucleotide
uacccugaaccaguccuug

SEQ ID NO: 226508 - RNA, 19 nt, Artificial Sequence
  Description of Artificial Sequence: Synthetic oligonucleotide
agguaacuggguugagccu

SEQ ID NO: 226509 - RNA, 19 nt, Artificial Sequence
  Description of Artificial Sequence: Synthetic oligonucleotide
agggguucuaagccugccu

SEQ ID NO: 226510 - RNA, 19 nt, Artificial Sequence
  Description of Artificial Sequence: Synthetic oligonucleotide
auguucuggacgauggaaa

SEQ ID NO: 226511 - RNA, 19 nt, Artificial Sequence
  Description of Artificial Sequence: Synthetic oligonucleotide
gauuguccagaaggcguug

SEQ ID NO: 226512 - RNA, 19 nt, Artificial Sequence
  Description of Artificial Sequence: Synthetic oligonucleotide
aggucaagugugagguaac

SEQ ID NO: 226513 - RNA, 19 nt, Artificial Sequence
  Description of Artificial Sequence: Synthetic oligonucleotide
cuacuccccaggcugguuc

SEQ ID NO: 226514 - RNA, 19 nt, Artificial Sequence
  Description of Artificial Sequence: Synthetic oligonucleotide
guuggugggccaucccaug

SEQ ID NO: 226515 - RNA, 19 nt, Artificial Sequence
  Description of Artificial Sequence: Synthetic oligonucleotide
ggccccauggcauuacuac

SEQ ID NO: 226516 - RNA, 19 nt, Artificial Sequence
  Description of Artificial Sequence: Synthetic oligonucleotide
aggagcccaauuacccucg

SEQ ID NO: 226517 - RNA, 19 nt, Artificial Sequence
  Description of Artificial Sequence: Synthetic oligonucleotide
aaccaauguguagaccauu

SEQ ID NO: 226518 - RNA, 19 nt, Artificial Sequence
  Description of Artificial Sequence: Synthetic oligonucleotide
gcgucggggcuguugaugg

SEQ ID NO: 226519 - RNA, 19 nt, Artificial Sequence
  Description of Artificial Sequence: Synthetic oligonucleotide
ggcuacuaggaucaucaga

SEQ ID NO: 226520 - RNA, 19 nt, Artificial Sequence
  Description of Artificial Sequence: Synthetic oligonucleotide
uccuuggugguuggugggc

SEQ ID NO: 226521 - RNA, 19 nt, Artificial Sequence
  Description of Artificial Sequence: Synthetic oligonucleotide
cauuuagaaguuuguaguu

SEQ ID NO: 226522 - RNA, 19 nt, Artificial Sequence
  Description of Artificial Sequence: Synthetic oligonucleotide
agccuaccacugucuacuc

SEQ ID NO: 226523 - RNA, 19 nt, Artificial Sequence
  Description of Artificial Sequence: Synthetic oligonucleotide
cccaguaaacagcauucag

SEQ ID NO: 226524 - RNA, 19 nt, Artificial Sequence
  Description of Artificial Sequence: Synthetic oligonucleotide
ugccuaccuauucccucca

SEQ ID NO: 226525 - RNA, 19 nt, Artificial Sequence
  Description of Artificial Sequence: Synthetic oligonucleotide
aacgcacauggggaggaau

SEQ ID NO: 226526 - RNA, 19 nt, Artificial Sequence
  Description of Artificial Sequence: Synthetic oligonucleotide
aauacaggacugagaucaa

SEQ ID NO: 226527 - RNA, 19 nt, Artificial Sequence
  Description of Artificial Sequence: Synthetic oligonucleotide
auaccuauucccacauaaa

SEQ ID NO: 226528 - RNA, 19 nt, Artificial Sequence
  Description of Artificial Sequence: Synthetic oligonucleotide
cucuacccugaaccagucc

SEQ ID NO: 226529 - RNA, 19 nt, Artificial Sequence
  Description of Artificial Sequence: Synthetic oligonucleotide
aguauccuagcugcaccca

SEQ ID NO: 226530 - RNA, 19 nt, Artificial Sequence
  Description of Artificial Sequence: Synthetic oligonucleotide
guuugggcuaaggauguaa

SEQ ID NO: 226531 - RNA, 19 nt, Artificial Sequence
  Description of Artificial Sequence: Synthetic oligonucleotide
cacuaccaugaagauuagc

SEQ ID NO: 226532 - RNA, 19 nt, Artificial Sequence
  Description of Artificial Sequence: Synthetic oligonucleotide
cugagcgggacucugccaa

SEQ ID NO: 226533 - RNA, 19 nt, Artificial Sequence
  Description of Artificial Sequence: Synthetic oligonucleotide
ggccaagccuuaaaggggc

SEQ ID NO: 226534 - RNA, 19 nt, Artificial Sequence
  Description of Artificial Sequence: Synthetic oligonucleotide
caaugcuggaacgcacaug

SEQ ID NO: 226535 - RNA, 19 nt, Artificial Sequence
  Description of Artificial Sequence: Synthetic oligonucleotide
acccaguaaacagcauuca

SEQ ID NO: 226536 - RNA, 19 nt, Artificial Sequence
  Description of Artificial Sequence: Synthetic oligonucleotide
ugugccgcggcggcucuag

SEQ ID NO: 226537 - RNA, 19 nt, Artificial Sequence
  Description of Artificial Sequence: Synthetic oligonucleotide
acgguguaaggcaauguua

SEQ ID NO: 226538 - RNA, 19 nt, Artificial Sequence
  Description of Artificial Sequence: Synthetic oligonucleotide
cuaggaucaucagagcugu

SEQ ID NO: 226539 - RNA, 19 nt, Artificial Sequence
  Description of Artificial Sequence: Synthetic oligonucleotide
cuauucccacauaaagcua

SEQ ID NO: 226540 - RNA, 19 nt, Artificial Sequence
  Description of Artificial Sequence: Synthetic oligonucleotide
ggggagcucucacgcaugg

SEQ ID NO: 226541 - RNA, 19 nt, Artificial Sequence
  Description of Artificial Sequence: Synthetic oligonucleotide
ccgggauuguccagaaggc

SEQ ID NO: 226542 - RNA, 19 nt, Artificial Sequence
  Description of Artificial Sequence: Synthetic oligonucleotide
ccaauagaccuggggaagg

SEQ ID NO: 226543 - RNA, 19 nt, Artificial Sequence
  Description of Artificial Sequence: Synthetic oligonucleotide
caccaagccugagaggauc

SEQ ID NO: 226544 - RNA, 19 nt, Artificial Sequence
  Description of Artificial Sequence: Synthetic oligonucleotide
guggcgucggggcuguuga

SEQ ID NO: 226545 - RNA, 19 nt, Artificial Sequence
  Description of Artificial Sequence: Synthetic oligonucleotide
gguguaaggcaauguuaga

SEQ ID NO: 226546 - RNA, 19 nt, Artificial Sequence
  Description of Artificial Sequence: Synthetic oligonucleotide
gaccgggauuguccagaag

SEQ ID NO: 226547 - RNA, 19 nt, Artificial Sequence
  Description of Artificial Sequence: Synthetic oligonucleotide
guguugagaaguggauuca

SEQ ID NO: 226548 - RNA, 19 nt, Artificial Sequence
  Description of Artificial Sequence: Synthetic oligonucleotide
uucaguacuggggcuccuc

SEQ ID NO: 226549 - RNA, 19 nt, Artificial Sequence
  Description of Artificial Sequence: Synthetic oligonucleotide
cccuccaauagaccugggg

SEQ ID NO: 226550 - RNA, 19 nt, Artificial Sequence
  Description of Artificial Sequence: Synthetic oligonucleotide
cacgcauggugggaacacc

SEQ ID NO: 226551 - RNA, 19 nt, Artificial Sequence
  Description of Artificial Sequence: Synthetic oligonucleotide
uggaccguccuaagucauu

SEQ ID NO: 226552 - RNA, 19 nt, Artificial Sequence
  Description of Artificial Sequence: Synthetic oligonucleotide
acgcauggugggaacacca

SEQ ID NO: 226553 - RNA, 19 nt, Artificial Sequence
  Description of Artificial Sequence: Synthetic oligonucleotide
gucuguuaccacucuuucu

SEQ ID NO: 226554 - RNA, 19 nt, Artificial Sequence
  Description of Artificial Sequence: Synthetic oligonucleotide
ucccuccaauagaccuggg

SEQ ID NO: 226555 - RNA, 19 nt, Artificial Sequence
  Description of Artificial Sequence: Synthetic oligonucleotide
gguaccuuucacccaguaa

SEQ ID NO: 226556 - RNA, 19 nt, Artificial Sequence
  Description of Artificial Sequence: Synthetic oligonucleotide
gucacguugcucacuccac

SEQ ID NO: 226557 - RNA, 19 nt, Artificial Sequence
  Description of Artificial Sequence: Synthetic oligonucleotide
ccaagggugaaacgagcug

SEQ ID NO: 226558 - RNA, 19 nt, Artificial Sequence
  Description of Artificial Sequence: Synthetic oligonucleotide
guucuaagccugccuaccu

SEQ ID NO: 226559 - RNA, 19 nt, Artificial Sequence
  Description of Artificial Sequence: Synthetic oligonucleotide
cagguagugucaauauagu

SEQ ID NO: 226560 - RNA, 19 nt, Artificial Sequence
  Description of Artificial Sequence: Synthetic oligonucleotide
gccauagccuaccacuguc

SEQ ID NO: 226561 - RNA, 19 nt, Artificial Sequence
  Description of Artificial Sequence: Synthetic oligonucleotide
cauagccuaccacugucua

SEQ ID NO: 226562 - RNA, 19 nt, Artificial Sequence
  Description of Artificial Sequence: Synthetic oligonucleotide
gcggacacauaaacucugg

SEQ ID NO: 226563 - RNA, 19 nt, Artificial Sequence
  Description of Artificial Sequence: Synthetic oligonucleotide
ccaaguugcauguacugcu

SEQ ID NO: 226564 - RNA, 19 nt, Artificial Sequence
  Description of Artificial Sequence: Synthetic oligonucleotide
ccaacagguagccacagcu

SEQ ID NO: 226565 - RNA, 19 nt, Artificial Sequence
  Description of Artificial Sequence: Synthetic oligonucleotide
gacugaggccauagccuac

SEQ ID NO: 226566 - RNA, 19 nt, Artificial Sequence
  Description of Artificial Sequence: Synthetic oligonucleotide
cacugucuacucaaagccu

SEQ ID NO: 226567 - RNA, 19 nt, Artificial Sequence
  Description of Artificial Sequence: Synthetic oligonucleotide
cagggguucuaagccugcc

SEQ ID NO: 226568 - RNA, 19 nt, Artificial Sequence
  Description of Artificial Sequence: Synthetic oligonucleotide
uacuacuccccaggcuggu

SEQ ID NO: 226569 - RNA, 19 nt, Artificial Sequence
  Description of Artificial Sequence: Synthetic oligonucleotide
ggugguuggugggccaucc

SEQ ID NO: 226570 - RNA, 19 nt, Artificial Sequence
  Description of Artificial Sequence: Synthetic oligonucleotide
aggcaauguuagaaaacuu

SEQ ID NO: 226571 - RNA, 19 nt, Artificial Sequence
  Description of Artificial Sequence: Synthetic oligonucleotide
agaccgggacagucagacu

SEQ ID NO: 226572 - RNA, 19 nt, Artificial Sequence
  Description of Artificial Sequence: Synthetic oligonucleotide
ccauggcauuacuacuccc

SEQ ID NO: 226573 - RNA, 19 nt, Artificial Sequence
  Description of Artificial Sequence: Synthetic oligonucleotide
gggguucuaagccugccua

SEQ ID NO: 226574 - RNA, 19 nt, Artificial Sequence
  Description of Artificial Sequence: Synthetic oligonucleotide
ggccauaaggcugcagaac

SEQ ID NO: 226575 - RNA, 19 nt, Artificial Sequence
  Description of Artificial Sequence: Synthetic oligonucleotide
auggcggcggcggcggcgg

SEQ ID NO: 226576 - RNA, 19 nt, Artificial Sequence
  Description of Artificial Sequence: Synthetic oligonucleotide
cugugccuuuaccaaggga

SEQ ID NO: 226577 - RNA, 19 nt, Artificial Sequence
  Description of Artificial Sequence: Synthetic oligonucleotide
auucugaacuggagguuuu

SEQ ID NO: 226578 - RNA, 19 nt, Artificial Sequence
  Description of Artificial Sequence: Synthetic oligonucleotide
gcaaacagccagacgacaa

SEQ ID NO: 226579 - RNA, 19 nt, Artificial Sequence
  Description of Artificial Sequence: Synthetic oligonucleotide
acgcacauggggaggaaua

SEQ ID NO: 226580 - RNA, 19 nt, Artificial Sequence
  Description of Artificial Sequence: Synthetic oligonucleotide
agucaugcauggguuuaua

SEQ ID NO: 226581 - RNA, 19 nt, Artificial Sequence
  Description of Artificial Sequence: Synthetic oligonucleotide
gcgggacucugccaagagc

SEQ ID NO: 226582 - RNA, 19 nt, Artificial Sequence
  Description of Artificial Sequence: Synthetic oligonucleotide
agggaagcggacacauaaa

SEQ ID NO: 226583 - RNA, 19 nt, Artificial Sequence
  Description of Artificial Sequence: Synthetic oligonucleotide
ccagaaaggaggaccucca

SEQ ID NO: 226584 - RNA, 19 nt, Artificial Sequence
  Description of Artificial Sequence: Synthetic oligonucleotide
gcauggguuuauagaccgg

SEQ ID NO: 226585 - RNA, 19 nt, Artificial Sequence
  Description of Artificial Sequence: Synthetic oligonucleotide
guuuauagaccgggauugu

SEQ ID NO: 226586 - RNA, 19 nt, Artificial Sequence
  Description of Artificial Sequence: Synthetic oligonucleotide
cggacacauaaacucuggc

SEQ ID NO: 226587 - RNA, 19 nt, Artificial Sequence
  Description of Artificial Sequence: Synthetic oligonucleotide
ggaacgcacauggggagga

SEQ ID NO: 226588 - RNA, 19 nt, Artificial Sequence
  Description of Artificial Sequence: Synthetic oligonucleotide
ggaagcggacacauaaacu

SEQ ID NO: 226589 - RNA, 19 nt, Artificial Sequence
  Description of Artificial Sequence: Synthetic oligonucleotide
guucucuaggcuugagguu

SEQ ID NO: 226590 - RNA, 19 nt, Artificial Sequence
  Description of Artificial Sequence: Synthetic oligonucleotide
cuccagguagugucaauau

SEQ ID NO: 226591 - RNA, 19 nt, Artificial Sequence
  Description of Artificial Sequence: Synthetic oligonucleotide
gugagguaacuggguugag

SEQ ID NO: 226592 - RNA, 19 nt, Artificial Sequence
  Description of Artificial Sequence: Synthetic oligonucleotide
gaggaauaggcaggccaua

SEQ ID NO: 226593 - RNA, 19 nt, Artificial Sequence
  Description of Artificial Sequence: Synthetic oligonucleotide
gguguuuggcuggaccguc

SEQ ID NO: 226594 - RNA, 19 nt, Artificial Sequence
  Description of Artificial Sequence: Synthetic oligonucleotide
uccugccuacccagcugau

SEQ ID NO: 226595 - RNA, 19 nt, Artificial Sequence
  Description of Artificial Sequence: Synthetic oligonucleotide
aggcguugaaauacacguu

SEQ ID NO: 226596 - RNA, 19 nt, Artificial Sequence
  Description of Artificial Sequence: Synthetic oligonucleotide
ggcgugccacaugaggcag

SEQ ID NO: 226597 - RNA, 19 nt, Artificial Sequence
  Description of Artificial Sequence: Synthetic oligonucleotide
gaccguccuaagucauuua

SEQ ID NO: 226598 - RNA, 19 nt, Artificial Sequence
  Description of Artificial Sequence: Synthetic oligonucleotide
gcguugaaauacacguuga

SEQ ID NO: 226599 - RNA, 19 nt, Artificial Sequence
  Description of Artificial Sequence: Synthetic oligonucleotide
ggaggagcccaauuacccu

SEQ ID NO: 226600 - RNA, 19 nt, Artificial Sequence
  Description of Artificial Sequence: Synthetic oligonucleotide
ggaccuccaggacucugca

SEQ ID NO: 226601 - RNA, 19 nt, Artificial Sequence
  Description of Artificial Sequence: Synthetic oligonucleotide
ccguccuaagucauuuaga

SEQ ID NO: 226602 - RNA, 19 nt, Artificial Sequence
  Description of Artificial Sequence: Synthetic oligonucleotide
caauugucugcagugcgau

SEQ ID NO: 226603 - RNA, 19 nt, Artificial Sequence
  Description of Artificial Sequence: Synthetic oligonucleotide
caaguugcauguacugcuu

SEQ ID NO: 226604 - RNA, 19 nt, Artificial Sequence
  Description of Artificial Sequence: Synthetic oligonucleotide
cgggauuguccagaaggcg

SEQ ID NO: 226605 - RNA, 19 nt, Artificial Sequence
  Description of Artificial Sequence: Synthetic oligonucleotide
ggcgucggggcuguugaug

SEQ ID NO: 226606 - RNA, 19 nt, Artificial Sequence
  Description of Artificial Sequence: Synthetic oligonucleotide
caugaggcagguacugcuu

SEQ ID NO: 226607 - RNA, 19 nt, Artificial Sequence
  Description of Artificial Sequence: Synthetic oligonucleotide
cuaagucauuuagaaguuu

SEQ ID NO: 226608 - RNA, 19 nt, Artificial Sequence
  Description of Artificial Sequence: Synthetic oligonucleotide
ggacugagaucaaauuggu

SEQ ID NO: 226609 - RNA, 19 nt, Artificial Sequence
  Description of Artificial Sequence: Synthetic oligonucleotide
agcaggcauauugcacgaa

SEQ ID NO: 226610 - RNA, 19 nt, Artificial Sequence
  Description of Artificial Sequence: Synthetic oligonucleotide
caauuacccucguggcacu

SEQ ID NO: 226611 - RNA, 19 nt, Artificial Sequence
  Description of Artificial Sequence: Synthetic oligonucleotide
gcugccaacuugguuuuaa

SEQ ID NO: 226612 - RNA, 19 nt, Artificial Sequence
  Description of Artificial Sequence: Synthetic oligonucleotide
caucaaagugaaggagggu

SEQ ID NO: 226613 - RNA, 19 nt, Artificial Sequence
  Description of Artificial Sequence: Synthetic oligonucleotide
augguggcgucggggcugu

SEQ ID NO: 226614 - RNA, 19 nt, Artificial Sequence
  Description of Artificial Sequence: Synthetic oligonucleotide
aguuugggcuaaggaugua

SEQ ID NO: 226615 - RNA, 19 nt, Artificial Sequence
  Description of Artificial Sequence: Synthetic oligonucleotide
ccuaagucauuuagaaguu

SEQ ID NO: 226616 - RNA, 19 nt, Artificial Sequence
  Description of Artificial Sequence: Synthetic oligonucleotide
gaacgcacauggggaggaa

SEQ ID NO: 226617 - RNA, 19 nt, Artificial Sequence
  Description of Artificial Sequence: Synthetic oligonucleotide
cugggccccauggcauuac

SEQ ID NO: 226618 - RNA, 19 nt, Artificial Sequence
  Description of Artificial Sequence: Synthetic oligonucleotide
ggucaagugugagguaacu

SEQ ID NO: 226619 - RNA, 19 nt, Artificial Sequence
  Description of Artificial Sequence: Synthetic oligonucleotide
uggcgucggggcuguugau

SEQ ID NO: 226620 - RNA, 19 nt, Artificial Sequence
  Description of Artificial Sequence: Synthetic oligonucleotide
gccuacccagcugaugcca

SEQ ID NO: 226621 - RNA, 19 nt, Artificial Sequence
  Description of Artificial Sequence: Synthetic oligonucleotide
gcgugccacaugaggcagg

SEQ ID NO: 226622 - RNA, 19 nt, Artificial Sequence
  Description of Artificial Sequence: Synthetic oligonucleotide
cuaagccugccuaccuauu

SEQ ID NO: 226623 - RNA, 19 nt, Artificial Sequence
  Description of Artificial Sequence: Synthetic oligonucleotide
aggguaccuuucacccagu

SEQ ID NO: 226624 - RNA, 19 nt, Artificial Sequence
  Description of Artificial Sequence: Synthetic oligonucleotide
ccaguccuugugccucagc

SEQ ID NO: 226625 - RNA, 19 nt, Artificial Sequence
  Description of Artificial Sequence: Synthetic oligonucleotide
caggucguucuggcccaug

SEQ ID NO: 226626 - RNA, 19 nt, Artificial Sequence
  Description of Artificial Sequence: Synthetic oligonucleotide
ggccagaccgggacaguca

SEQ ID NO: 226627 - RNA, 19 nt, Artificial Sequence
  Description of Artificial Sequence: Synthetic oligonucleotide
ggauuguccagaaggcguu

SEQ ID NO: 226628 - RNA, 19 nt, Artificial Sequence
  Description of Artificial Sequence: Synthetic oligonucleotide
agcccaaagcaggcauauu

SEQ ID NO: 226629 - RNA, 19 nt, Artificial Sequence
  Description of Artificial Sequence: Synthetic oligonucleotide
ggguaccuuucacccagua

SEQ ID NO: 226630 - RNA, 19 nt, Artificial Sequence
  Description of Artificial Sequence: Synthetic oligonucleotide
gcagugcgaugauuccaaa

SEQ ID NO: 226631 - RNA, 19 nt, Artificial Sequence
  Description of Artificial Sequence: Synthetic oligonucleotide
uggcggcggcggcggcggg

SEQ ID NO: 226632 - RNA, 19 nt, Artificial Sequence
  Description of Artificial Sequence: Synthetic oligonucleotide
ccauagccuaccacugucu

SEQ ID NO: 226633 - RNA, 19 nt, Artificial Sequence
  Description of Artificial Sequence: Synthetic oligonucleotide
ggaccguccuaagucauuu

SEQ ID NO: 226634 - RNA, 19 nt, Artificial Sequence
  Description of Artificial Sequence: Synthetic oligonucleotide
gugccgcggcggcucuagc

SEQ ID NO: 226635 - RNA, 19 nt, Artificial Sequence
  Description of Artificial Sequence: Synthetic oligonucleotide
gcucuagcggcugccacgu

SEQ ID NO: 226636 - RNA, 19 nt, Artificial Sequence
  Description of Artificial Sequence: Synthetic oligonucleotide
ccuaccuauucccuccaau

SEQ ID NO: 226637 - RNA, 19 nt, Artificial Sequence
  Description of Artificial Sequence: Synthetic oligonucleotide
ccauaaggcugcagaacau

SEQ ID NO: 226638 - RNA, 19 nt, Artificial Sequence
  Description of Artificial Sequence: Synthetic oligonucleotide
gccagacgacaagagucaa

SEQ ID NO: 226639 - RNA, 19 nt, Artificial Sequence
  Description of Artificial Sequence: Synthetic oligonucleotide
gccuaccuauucccuccaa

SEQ ID NO: 226640 - RNA, 19 nt, Artificial Sequence
  Description of Artificial Sequence: Synthetic oligonucleotide
ccacguaggccaagccuua

SEQ ID NO: 226641 - RNA, 19 nt, Artificial Sequence
  Description of Artificial Sequence: Synthetic oligonucleotide
cuucaguacuggggcuccu

SEQ ID NO: 226642 - RNA, 19 nt, Artificial Sequence
  Description of Artificial Sequence: Synthetic oligonucleotide
ggagcccaauuacccucgu

SEQ ID NO: 226643 - RNA, 19 nt, Artificial Sequence
  Description of Artificial Sequence: Synthetic oligonucleotide
gcggcucuagcggcugcca

SEQ ID NO: 226644 - RNA, 19 nt, Artificial Sequence
  Description of Artificial Sequence: Synthetic oligonucleotide
gccugccuaccuauucccu

SEQ ID NO: 226645 - RNA, 19 nt, Artificial Sequence
  Description of Artificial Sequence: Synthetic oligonucleotide
ggcggcggcggcggcgggc

SEQ ID NO: 226646 - RNA, 19 nt, Artificial Sequence
  Description of Artificial Sequence: Synthetic oligonucleotide
cucuagcggcugccacgua

SEQ ID NO: 226647 - RNA, 19 nt, Artificial Sequence
  Description of Artificial Sequence: Synthetic oligonucleotide
ggcaggccauaaggcugca

SEQ ID NO: 226648 - RNA, 19 nt, Artificial Sequence
  Description of Artificial Sequence: Synthetic oligonucleotide
ccgggacagucagacucca

SEQ ID NO: 226649 - RNA, 19 nt, Artificial Sequence
  Description of Artificial Sequence: Synthetic oligonucleotide
gggagcucucacgcauggu

SEQ ID NO: 226650 - RNA, 19 nt, Artificial Sequence
  Description of Artificial Sequence: Synthetic oligonucleotide
gcugugccgcggcggcucu

SEQ ID NO: 226651 - RNA, 19 nt, Artificial Sequence
  Description of Artificial Sequence: Synthetic oligonucleotide
ccucacuucugggccccau

SEQ ID NO: 226652 - RNA, 19 nt, Artificial Sequence
  Description of Artificial Sequence: Synthetic oligonucleotide
uuaaguuucaagaaagagg

SEQ ID NO: 226653 - RNA, 19 nt, Artificial Sequence
  Description of Artificial Sequence: Synthetic oligonucleotide
ugagauaagacauuaacag

SEQ ID NO: 226654 - RNA, 19 nt, Artificial Sequence
  Description of Artificial Sequence: Synthetic oligonucleotide
aaaucguucaacuuaaaug

SEQ ID NO: 226655 - RNA, 19 nt, Artificial Sequence
  Description of Artificial Sequence: Synthetic oligonucleotide
aguugaaaauauuaggggc

SEQ ID NO: 226656 - RNA, 19 nt, Artificial Sequence
  Description of Artificial Sequence: Synthetic oligonucleotide
agcaacauaaaacucacac

SEQ ID NO: 226657 - RNA, 19 nt, Artificial Sequence
  Description of Artificial Sequence: Synthetic oligonucleotide
auacauacuuacuucaugc

SEQ ID NO: 226658 - RNA, 19 nt, Artificial Sequence
  Description of Artificial Sequence: Synthetic oligonucleotide
aaaauauuguacugauagc

SEQ ID NO: 226659 - RNA, 19 nt, Artificial Sequence
  Description of Artificial Sequence: Synthetic oligonucleotide
cuuaugguuacuuacauug

SEQ ID NO: 226660 - RNA, 19 nt, Artificial Sequence
  Description of Artificial Sequence: Synthetic oligonucleotide
aaaacuuauggggaaacgc

SEQ ID NO: 226661 - RNA, 19 nt, Artificial Sequence
  Description of Artificial Sequence: Synthetic oligonucleotide
aacuuagcaacauaaaacu

SEQ ID NO: 226662 - RNA, 19 nt, Artificial Sequence
  Description of Artificial Sequence: Synthetic oligonucleotide
uugguuuaagaccaaauag

SEQ ID NO: 226663 - RNA, 19 nt, Artificial Sequence
  Description of Artificial Sequence: Synthetic oligonucleotide
ugauaaaaugcauuggucc

SEQ ID NO: 226664 - RNA, 19 nt, Artificial Sequence
  Description of Artificial Sequence: Synthetic oligonucleotide
acaacaugauucuucagcc

SEQ ID NO: 226665 - RNA, 19 nt, Artificial Sequence
  Description of Artificial Sequence: Synthetic oligonucleotide
ugauauucaacucacaaau

SEQ ID NO: 226666 - RNA, 19 nt, Artificial Sequence
  Description of Artificial Sequence: Synthetic oligonucleotide
guuacuuugguuuaagacc

SEQ ID NO: 226667 - RNA, 19 nt, Artificial Sequence
  Description of Artificial Sequence: Synthetic oligonucleotide
aaaugcaugaaacugacua

SEQ ID NO: 226668 - RNA, 19 nt, Artificial Sequence
  Description of Artificial Sequence: Synthetic oligonucleotide
ucuacuaggaacacagccg

SEQ ID NO: 226669 - RNA, 19 nt, Artificial Sequence
  Description of Artificial Sequence: Synthetic oligonucleotide
uguauuacaacuucaacuc

SEQ ID NO: 226670 - RNA, 19 nt, Artificial Sequence
  Description of Artificial Sequence: Synthetic oligonucleotide
acaacuucaacucagacaa

SEQ ID NO: 226671 - RNA, 19 nt, Artificial Sequence
  Description of Artificial Sequence: Synthetic oligonucleotide
cuugacuaaacacuaaagg

SEQ ID NO: 226672 - RNA, 19 nt, Artificial Sequence
  Description of Artificial Sequence: Synthetic oligonucleotide
uuugagauaagacauuaac

SEQ ID NO: 226673 - RNA, 19 nt, Artificial Sequence
  Description of Artificial Sequence: Synthetic oligonucleotide
aucuccuugacauauaaag

SEQ ID NO: 226674 - RNA, 19 nt, Artificial Sequence
  Description of Artificial Sequence: Synthetic oligonucleotide
uaacuuagcaacauaaaac

SEQ ID NO: 226675 - RNA, 19 nt, Artificial Sequence
  Description of Artificial Sequence: Synthetic oligonucleotide
aauauuguacugauagccc

SEQ ID NO: 226676 - RNA, 19 nt, Artificial Sequence
  Description of Artificial Sequence: Synthetic oligonucleotide
uauagaugauguuauuugg

SEQ ID NO: 226677 - RNA, 19 nt, Artificial Sequence
  Description of Artificial Sequence: Synthetic oligonucleotide
uuguauuacaacuucaacu

SEQ ID NO: 226678 - RNA, 19 nt, Artificial Sequence
  Description of Artificial Sequence: Synthetic oligonucleotide
agacaaaagucucugggcc

SEQ ID NO: 226679 - RNA, 19 nt, Artificial Sequence
  Description of Artificial Sequence: Synthetic oligonucleotide
uaguugaaaauauuagggg

SEQ ID NO: 226680 - RNA, 19 nt, Artificial Sequence
  Description of Artificial Sequence: Synthetic oligonucleotide
uauguauuagccaaacuac

SEQ ID NO: 226681 - RNA, 19 nt, Artificial Sequence
  Description of Artificial Sequence: Synthetic oligonucleotide
uucgcuauguucaacaucu

SEQ ID NO: 226682 - RNA, 19 nt, Artificial Sequence
  Description of Artificial Sequence: Synthetic oligonucleotide
auauuugcagaccacuccc

SEQ ID NO: 226683 - RNA, 19 nt, Artificial Sequence
  Description of Artificial Sequence: Synthetic oligonucleotide
aaccacuucaguuuagguc

SEQ ID NO: 226684 - RNA, 19 nt, Artificial Sequence
  Description of Artificial Sequence: Synthetic oligonucleotide
cagagaaugauuuacaauc

SEQ ID NO: 226685 - RNA, 19 nt, Artificial Sequence
  Description of Artificial Sequence: Synthetic oligonucleotide
cagacuaggagcaacauag

SEQ ID NO: 226686 - RNA, 19 nt, Artificial Sequence
  Description of Artificial Sequence: Synthetic oligonucleotide
uauuacuacacauaccaug

SEQ ID NO: 226687 - RNA, 19 nt, Artificial Sequence
  Description of Artificial Sequence: Synthetic oligonucleotide
ugaucauaacacuagagcu

SEQ ID NO: 226688 - RNA, 19 nt, Artificial Sequence
  Description of Artificial Sequence: Synthetic oligonucleotide
uugacuaaacacuaaaggu

SEQ ID NO: 226689 - RNA, 19 nt, Artificial Sequence
  Description of Artificial Sequence: Synthetic oligonucleotide
uuucuaaucagauguaucu

SEQ ID NO: 226690 - RNA, 19 nt, Artificial Sequence
  Description of Artificial Sequence: Synthetic oligonucleotide
uuuauucuagguuugagau

SEQ ID NO: 226691 - RNA, 19 nt, Artificial Sequence
  Description of Artificial Sequence: Synthetic oligonucleotide
aacccuuaugguuacuuac

SEQ ID NO: 226692 - RNA, 19 nt, Artificial Sequence
  Description of Artificial Sequence: Synthetic oligonucleotide
aaaguagucaagugaccac

SEQ ID NO: 226693 - RNA, 19 nt, Artificial Sequence
  Description of Artificial Sequence: Synthetic oligonucleotide
uugagauaagacauuaaca

SEQ ID NO: 226694 - RNA, 19 nt, Artificial Sequence
  Description of Artificial Sequence: Synthetic oligonucleotide
caaacuacaucuuggaaag

SEQ ID NO: 226695 - RNA, 19 nt, Artificial Sequence
  Description of Artificial Sequence: Synthetic oligonucleotide
agccauaguaaccaugacc

SEQ ID NO: 226696 - RNA, 19 nt, Artificial Sequence
  Description of Artificial Sequence: Synthetic oligonucleotide
uauuaagcauuauauacac

SEQ ID NO: 226697 - RNA, 19 nt, Artificial Sequence
  Description of Artificial Sequence: Synthetic oligonucleotide
cauaacaacaucuggaauc

SEQ ID NO: 226698 - RNA, 19 nt, Artificial Sequence
  Description of Artificial Sequence: Synthetic oligonucleotide
auauucaacucacaaaucu

SEQ ID NO: 226699 - RNA, 19 nt, Artificial Sequence
  Description of Artificial Sequence: Synthetic oligonucleotide
aacuuaagcaucucccuag

SEQ ID NO: 226700 - RNA, 19 nt, Artificial Sequence
  Description of Artificial Sequence: Synthetic oligonucleotide
uucuacuaggaacacagcc

SEQ ID NO: 226701 - RNA, 19 nt, Artificial Sequence
  Description of Artificial Sequence: Synthetic oligonucleotide
uuugguauguucuuaaaau

SEQ ID NO: 226702 - RNA, 19 nt, Artificial Sequence
  Description of Artificial Sequence: Synthetic oligonucleotide
aguuuuccuagagagagcc

SEQ ID NO: 226703 - RNA, 19 nt, Artificial Sequence
  Description of Artificial Sequence: Synthetic oligonucleotide
guaaccaugaccuaucuca

SEQ ID NO: 226704 - RNA, 19 nt, Artificial Sequence
  Description of Artificial Sequence: Synthetic oligonucleotide
cagaagauauguauuagcc

SEQ ID NO: 226705 - RNA, 19 nt, Artificial Sequence
  Description of Artificial Sequence: Synthetic oligonucleotide
uaucugaaagcgcagagcu

SEQ ID NO: 226706 - RNA, 19 nt, Artificial Sequence
  Description of Artificial Sequence: Synthetic oligonucleotide
gaagauauguauuagccaa

SEQ ID NO: 226707 - RNA, 19 nt, Artificial Sequence
  Description of Artificial Sequence: Synthetic oligonucleotide
ugguuuaagaccaaauagu

SEQ ID NO: 226708 - RNA, 19 nt, Artificial Sequence
  Description of Artificial Sequence: Synthetic oligonucleotide
uuacugaccauauuuugag

SEQ ID NO: 226709 - RNA, 19 nt, Artificial Sequence
  Description of Artificial Sequence: Synthetic oligonucleotide
aacauaacaacaucuggaa

SEQ ID NO: 226710 - RNA, 19 nt, Artificial Sequence
  Description of Artificial Sequence: Synthetic oligonucleotide
uucaguuuaggucucaaaa

SEQ ID NO: 226711 - RNA, 19 nt, Artificial Sequence
  Description of Artificial Sequence: Synthetic oligonucleotide
aagagguugaauguuacug

SEQ ID NO: 226712 - RNA, 19 nt, Artificial Sequence
  Description of Artificial Sequence: Synthetic oligonucleotide
ucucaaaggauuagaaaug

SEQ ID NO: 226713 - RNA, 19 nt, Artificial Sequence
  Description of Artificial Sequence: Synthetic oligonucleotide
aaauauuaggggcccaugu

SEQ ID NO: 226714 - RNA, 19 nt, Artificial Sequence
  Description of Artificial Sequence: Synthetic oligonucleotide
uuugucagaagauauguau

SEQ ID NO: 226715 - RNA, 19 nt, Artificial Sequence
  Description of Artificial Sequence: Synthetic oligonucleotide
cuagagcuuauuaagcagg

SEQ ID NO: 226716 - RNA, 19 nt, Artificial Sequence
  Description of Artificial Sequence: Synthetic oligonucleotide
uuaaaugcaugaaacugac

SEQ ID NO: 226717 - RNA, 19 nt, Artificial Sequence
  Description of Artificial Sequence: Synthetic oligonucleotide
uagguuugagauaagacau

SEQ ID NO: 226718 - RNA, 19 nt, Artificial Sequence
  Description of Artificial Sequence: Synthetic oligonucleotide
aacucagacaacuuuuggu

SEQ ID NO: 226719 - RNA, 19 nt, Artificial Sequence
  Description of Artificial Sequence: Synthetic oligonucleotide
uggacaucuguacauaucu

SEQ ID NO: 226720 - RNA, 19 nt, Artificial Sequence
  Description of Artificial Sequence: Synthetic oligonucleotide
ugauaaaaggacuuugaaa

SEQ ID NO: 226721 - RNA, 19 nt, Artificial Sequence
  Description of Artificial Sequence: Synthetic oligonucleotide
aaaaucguucaacuuaaau

SEQ ID NO: 226722 - RNA, 19 nt, Artificial Sequence
  Description of Artificial Sequence: Synthetic oligonucleotide
gaaauuguauuacaacuuc

SEQ ID NO: 226723 - RNA, 19 nt, Artificial Sequence
  Description of Artificial Sequence: Synthetic oligonucleotide
ugacuaaacacuaaagguu

SEQ ID NO: 226724 - RNA, 19 nt, Artificial Sequence
  Description of Artificial Sequence: Synthetic oligonucleotide
gaugaaaucaugauaauua

SEQ ID NO: 226725 - RNA, 19 nt, Artificial Sequence
  Description of Artificial Sequence: Synthetic oligonucleotide
ugagguaaauguaccuugg

SEQ ID NO: 226726 - RNA, 19 nt, Artificial Sequence
  Description of Artificial Sequence: Synthetic oligonucleotide
ucagaagauauguauuagc

SEQ ID NO: 226727 - RNA, 19 nt, Artificial Sequence
  Description of Artificial Sequence: Synthetic oligonucleotide
uucaugauauucaacucac

SEQ ID NO: 226728 - RNA, 19 nt, Artificial Sequence
  Description of Artificial Sequence: Synthetic oligonucleotide
ugcauguuaaugcuuguca

SEQ ID NO: 226729 - RNA, 19 nt, Artificial Sequence
  Description of Artificial Sequence: Synthetic oligonucleotide
uacccaaugacucaaggaa

SEQ ID NO: 226730 - RNA, 19 nt, Artificial Sequence
  Description of Artificial Sequence: Synthetic oligonucleotide
aagggucaaauguguaugg

SEQ ID NO: 226731 - RNA, 19 nt, Artificial Sequence
  Description of Artificial Sequence: Synthetic oligonucleotide
cuauucagagcuaacauca

SEQ ID NO: 226732 - RNA, 19 nt, Artificial Sequence
  Description of Artificial Sequence: Synthetic oligonucleotide
auuuauucuagguuugaga

SEQ ID NO: 226733 - RNA, 19 nt, Artificial Sequence
  Description of Artificial Sequence: Synthetic oligonucleotide
uacaacuucaacucagaca

SEQ ID NO: 226734 - RNA, 19 nt, Artificial Sequence
  Description of Artificial Sequence: Synthetic oligonucleotide
aaagcagaccuaucaguag

SEQ ID NO: 226735 - RNA, 19 nt, Artificial Sequence
  Description of Artificial Sequence: Synthetic oligonucleotide
acuuacuucaugcucucuc

SEQ ID NO: 226736 - RNA, 19 nt, Artificial Sequence
  Description of Artificial Sequence: Synthetic oligonucleotide
uguacauaucugaaagcgc

SEQ ID NO: 226737 - RNA, 19 nt, Artificial Sequence
  Description of Artificial Sequence: Synthetic oligonucleotide
auguguauggacugcaaag

SEQ ID NO: 226738 - RNA, 19 nt, Artificial Sequence
  Description of Artificial Sequence: Synthetic oligonucleotide
aacaaacccuuaugguuac

SEQ ID NO: 226739 - RNA, 19 nt, Artificial Sequence
  Description of Artificial Sequence: Synthetic oligonucleotide
uaacaugucauucauccua

SEQ ID NO: 226740 - RNA, 19 nt, Artificial Sequence
  Description of Artificial Sequence: Synthetic oligonucleotide
auugacaagaugauguauc

SEQ ID NO: 226741 - RNA, 19 nt, Artificial Sequence
  Description of Artificial Sequence: Synthetic oligonucleotide
aaagggucaaauguguaug

SEQ ID NO: 226742 - RNA, 19 nt, Artificial Sequence
  Description of Artificial Sequence: Synthetic oligonucleotide
guuaggacguaacuuaagc

SEQ ID NO: 226743 - RNA, 19 nt, Artificial Sequence
  Description of Artificial Sequence: Synthetic oligonucleotide
uuuugguauguucuuaaaa

SEQ ID NO: 226744 - RNA, 19 nt, Artificial Sequence
  Description of Artificial Sequence: Synthetic oligonucleotide
cuagguuugagauaagaca

SEQ ID NO: 226745 - RNA, 19 nt, Artificial Sequence
  Description of Artificial Sequence: Synthetic oligonucleotide
acguaacuuaagcaucucc

SEQ ID NO: 226746 - RNA, 19 nt, Artificial Sequence
  Description of Artificial Sequence: Synthetic oligonucleotide
acuagagcuuauuaagcag

SEQ ID NO: 226747 - RNA, 19 nt, Artificial Sequence
  Description of Artificial Sequence: Synthetic oligonucleotide
aaaguauagaugauguuau

SEQ ID NO: 226748 - RNA, 19 nt, Artificial Sequence
  Description of Artificial Sequence: Synthetic oligonucleotide
ucugaaagcgcagagcuca

SEQ ID NO: 226749 - RNA, 19 nt, Artificial Sequence
  Description of Artificial Sequence: Synthetic oligonucleotide
uguaaacucaauugagaac

SEQ ID NO: 226750 - RNA, 19 nt, Artificial Sequence
  Description of Artificial Sequence: Synthetic oligonucleotide
auauuaggggcccauguug

SEQ ID NO: 226751 - RNA, 19 nt, Artificial Sequence
  Description of Artificial Sequence: Synthetic oligonucleotide
cuacuaggaacacagccgg

SEQ ID NO: 226752 - RNA, 19 nt, Artificial Sequence
  Description of Artificial Sequence: Synthetic oligonucleotide
aaaggauuagaaauggaaa

SEQ ID NO: 226753 - RNA, 19 nt, Artificial Sequence
  Description of Artificial Sequence: Synthetic oligonucleotide
uuuaucugggaauugguuu

SEQ ID NO: 226754 - RNA, 19 nt, Artificial Sequence
  Description of Artificial Sequence: Synthetic oligonucleotide
uuuucuaaucagauguauc

SEQ ID NO: 226755 - RNA, 19 nt, Artificial Sequence
  Description of Artificial Sequence: Synthetic oligonucleotide
aaccaugaccuaucucagc

SEQ ID NO: 226756 - RNA, 19 nt, Artificial Sequence
  Description of Artificial Sequence: Synthetic oligonucleotide
aaugcaugaaacugacuau

SEQ ID NO: 226757 - RNA, 19 nt, Artificial Sequence
  Description of Artificial Sequence: Synthetic oligonucleotide
aacaucuugccucaagcaa

SEQ ID NO: 226758 - RNA, 19 nt, Artificial Sequence
  Description of Artificial Sequence: Synthetic oligonucleotide
uuaggacguaacuuaagca

SEQ ID NO: 226759 - RNA, 19 nt, Artificial Sequence
  Description of Artificial Sequence: Synthetic oligonucleotide
uuaagcaucucccuaguuu

SEQ ID NO: 226760 - RNA, 19 nt, Artificial Sequence
  Description of Artificial Sequence: Synthetic oligonucleotide
gauaacauuuuccccucag

SEQ ID NO: 226761 - RNA, 19 nt, Artificial Sequence
  Description of Artificial Sequence: Synthetic oligonucleotide
cauauuugcagaccacucc

SEQ ID NO: 226762 - RNA, 19 nt, Artificial Sequence
  Description of Artificial Sequence: Synthetic oligonucleotide
auguaaacucaauugagaa

SEQ ID NO: 226763 - RNA, 19 nt, Artificial Sequence
  Description of Artificial Sequence: Synthetic oligonucleotide
agaagauauguauuagcca

SEQ ID NO: 226764 - RNA, 19 nt, Artificial Sequence
  Description of Artificial Sequence: Synthetic oligonucleotide
uaggacguaacuuaagcau

SEQ ID NO: 226765 - RNA, 19 nt, Artificial Sequence
  Description of Artificial Sequence: Synthetic oligonucleotide
cucaaaggauuagaaaugg

SEQ ID NO: 226766 - RNA, 19 nt, Artificial Sequence
  Description of Artificial Sequence: Synthetic oligonucleotide
auagaugauguuauuuggg

SEQ ID NO: 226767 - RNA, 19 nt, Artificial Sequence
  Description of Artificial Sequence: Synthetic oligonucleotide
aauguguauggacugcaaa

SEQ ID NO: 226768 - RNA, 19 nt, Artificial Sequence
  Description of Artificial Sequence: Synthetic oligonucleotide
augauguaucauuugucag

SEQ ID NO: 226769 - RNA, 19 nt, Artificial Sequence
  Description of Artificial Sequence: Synthetic oligonucleotide
cuuacuguacuguaagcuc

SEQ ID NO: 226770 - RNA, 19 nt, Artificial Sequence
  Description of Artificial Sequence: Synthetic oligonucleotide
aaugacucaaggaaaugga

SEQ ID NO: 226771 - RNA, 19 nt, Artificial Sequence
  Description of Artificial Sequence: Synthetic oligonucleotide
ucuguacauaucugaaagc

SEQ ID NO: 226772 - RNA, 19 nt, Artificial Sequence
  Description of Artificial Sequence: Synthetic oligonucleotide
auguuaaugcuugucauug

SEQ ID NO: 226773 - RNA, 19 nt, Artificial Sequence
  Description of Artificial Sequence: Synthetic oligonucleotide
ucuauggacaucuguacau

SEQ ID NO: 226774 - RNA, 19 nt, Artificial Sequence
  Description of Artificial Sequence: Synthetic oligonucleotide
uacuaaacuuacuguacug

SEQ ID NO: 226775 - RNA, 19 nt, Artificial Sequence
  Description of Artificial Sequence: Synthetic oligonucleotide
agugcauggagugaaaaca

SEQ ID NO: 226776 - RNA, 19 nt, Artificial Sequence
  Description of Artificial Sequence: Synthetic oligonucleotide
aauauuaggggcccauguu

SEQ ID NO: 226777 - RNA, 19 nt, Artificial Sequence
  Description of Artificial Sequence: Synthetic oligonucleotide
ucugaguaacuuagcaaca

SEQ ID NO: 226778 - RNA, 19 nt, Artificial Sequence
  Description of Artificial Sequence: Synthetic oligonucleotide
uauggggaaacgcaguuua

SEQ ID NO: 226779 - RNA, 19 nt, Artificial Sequence
  Description of Artificial Sequence: Synthetic oligonucleotide
uugaaaauauuaggggccc

SEQ ID NO: 226780 - RNA, 19 nt, Artificial Sequence
  Description of Artificial Sequence: Synthetic oligonucleotide
uuuugaugggcaauauaaa

SEQ ID NO: 226781 - RNA, 19 nt, Artificial Sequence
  Description of Artificial Sequence: Synthetic oligonucleotide
ucucaacacacugacaugu

SEQ ID NO: 226782 - RNA, 19 nt, Artificial Sequence
  Description of Artificial Sequence: Synthetic oligonucleotide
aacuccugcugccaucuag

SEQ ID NO: 226783 - RNA, 19 nt, Artificial Sequence
  Description of Artificial Sequence: Synthetic oligonucleotide
uaaccaugaccuaucucag

SEQ ID NO: 226784 - RNA, 19 nt, Artificial Sequence
  Description of Artificial Sequence: Synthetic oligonucleotide
uacuggguagauuuugaug

SEQ ID NO: 226785 - RNA, 19 nt, Artificial Sequence
  Description of Artificial Sequence: Synthetic oligonucleotide
uauuaggggcccauguugu

SEQ ID NO: 226786 - RNA, 19 nt, Artificial Sequence
  Description of Artificial Sequence: Synthetic oligonucleotide
uguuaggacguaacuuaag

SEQ ID NO: 226787 - RNA, 19 nt, Artificial Sequence
  Description of Artificial Sequence: Synthetic oligonucleotide
auuucaacauccaacacau

SEQ ID NO: 226788 - RNA, 19 nt, Artificial Sequence
  Description of Artificial Sequence: Synthetic oligonucleotide
agagguugaauguuacuga

SEQ ID NO: 226789 - RNA, 19 nt, Artificial Sequence
  Description of Artificial Sequence: Synthetic oligonucleotide
aacuuauggggaaacgcag

SEQ ID NO: 226790 - RNA, 19 nt, Artificial Sequence
  Description of Artificial Sequence: Synthetic oligonucleotide
acuaggagcaacauaguug

SEQ ID NO: 226791 - RNA, 19 nt, Artificial Sequence
  Description of Artificial Sequence: Synthetic oligonucleotide
cugacuauguaacauguca

SEQ ID NO: 226792 - RNA, 19 nt, Artificial Sequence
  Description of Artificial Sequence: Synthetic oligonucleotide
augauauucaacucacaaa

SEQ ID NO: 226793 - RNA, 19 nt, Artificial Sequence
  Description of Artificial Sequence: Synthetic oligonucleotide
cacuuaaaucuguagugag

SEQ ID NO: 226794 - RNA, 19 nt, Artificial Sequence
  Description of Artificial Sequence: Synthetic oligonucleotide
uacauaucugaaagcgcag

SEQ ID NO: 226795 - RNA, 19 nt, Artificial Sequence
  Description of Artificial Sequence: Synthetic oligonucleotide
ucauauucauauuggccac

SEQ ID NO: 226796 - RNA, 19 nt, Artificial Sequence
  Description of Artificial Sequence: Synthetic oligonucleotide
uggggauuaucaaaguauc

SEQ ID NO: 226797 - RNA, 19 nt, Artificial Sequence
  Description of Artificial Sequence: Synthetic oligonucleotide
augagaagcuucuucagaa

SEQ ID NO: 226798 - RNA, 19 nt, Artificial Sequence
  Description of Artificial Sequence: Synthetic oligonucleotide
ucuacuggguagauuuuga

SEQ ID NO: 226799 - RNA, 19 nt, Artificial Sequence
  Description of Artificial Sequence: Synthetic oligonucleotide
uguacugauagcccucagu

SEQ ID NO: 226800 - RNA, 19 nt, Artificial Sequence
  Description of Artificial Sequence: Synthetic oligonucleotide
ucaaaguaucccuggacaa

SEQ ID NO: 226801 - RNA, 19 nt, Artificial Sequence
  Description of Artificial Sequence: Synthetic oligonucleotide
ugaauguuacugaccauau

SEQ ID NO: 226802 - RNA, 19 nt, Artificial Sequence
  Description of Artificial Sequence: Synthetic oligonucleotide
aaguagucaagugaccacu

SEQ ID NO: 226803 - RNA, 19 nt, Artificial Sequence
  Description of Artificial Sequence: Synthetic oligonucleotide
uuacaacuucaacucagac

SEQ ID NO: 226804 - RNA, 19 nt, Artificial Sequence
  Description of Artificial Sequence: Synthetic oligonucleotide
agcauuauauacacaauga

SEQ ID NO: 226805 - RNA, 19 nt, Artificial Sequence
  Description of Artificial Sequence: Synthetic oligonucleotide
gguugaauguuacugacca

SEQ ID NO: 226806 - RNA, 19 nt, Artificial Sequence
  Description of Artificial Sequence: Synthetic oligonucleotide
uuugagugcauaacaggau

SEQ ID NO: 226807 - RNA, 19 nt, Artificial Sequence
  Description of Artificial Sequence: Synthetic oligonucleotide
auauaaacaauagacuaua

SEQ ID NO: 226808 - RNA, 19 nt, Artificial Sequence
  Description of Artificial Sequence: Synthetic oligonucleotide
uaucucagcucuuaaguua

SEQ ID NO: 226809 - RNA, 19 nt, Artificial Sequence
  Description of Artificial Sequence: Synthetic oligonucleotide
agcuuauuaagcaggugac

SEQ ID NO: 226810 - RNA, 19 nt, Artificial Sequence
  Description of Artificial Sequence: Synthetic oligonucleotide
auaacacuagagcuuauua

SEQ ID NO: 226811 - RNA, 19 nt, Artificial Sequence
  Description of Artificial Sequence: Synthetic oligonucleotide
uguguauggacugcaaagu

SEQ ID NO: 226812 - RNA, 19 nt, Artificial Sequence
  Description of Artificial Sequence: Synthetic oligonucleotide
acuuacuguacuguaagcu

SEQ ID NO: 226813 - RNA, 19 nt, Artificial Sequence
  Description of Artificial Sequence: Synthetic oligonucleotide
cauguaaacucaauugaga

SEQ ID NO: 226814 - RNA, 19 nt, Artificial Sequence
  Description of Artificial Sequence: Synthetic oligonucleotide
aaaguaucccuggacaaaa

SEQ ID NO: 226815 - RNA, 19 nt, Artificial Sequence
  Description of Artificial Sequence: Synthetic oligonucleotide
ggggaaacgcaguuuaugg

SEQ ID NO: 226816 - RNA, 19 nt, Artificial Sequence
  Description of Artificial Sequence: Synthetic oligonucleotide
uucuacuguaguguuagga

SEQ ID NO: 226817 - RNA, 19 nt, Artificial Sequence
  Description of Artificial Sequence: Synthetic oligonucleotide
ugcaugaaacugacuaugu

SEQ ID NO: 226818 - RNA, 19 nt, Artificial Sequence
  Description of Artificial Sequence: Synthetic oligonucleotide
ugucauugguuuuauguuu

SEQ ID NO: 226819 - RNA, 19 nt, Artificial Sequence
  Description of Artificial Sequence: Synthetic oligonucleotide
aguaaccaugaccuaucuc

SEQ ID NO: 226820 - RNA, 19 nt, Artificial Sequence
  Description of Artificial Sequence: Synthetic oligonucleotide
uacauacuuacuucaugcu

SEQ ID NO: 226821 - RNA, 19 nt, Artificial Sequence
  Description of Artificial Sequence: Synthetic oligonucleotide
augauguuauuugggguac

SEQ ID NO: 226822 - RNA, 19 nt, Artificial Sequence
  Description of Artificial Sequence: Synthetic oligonucleotide
aagggauuaucaaaacaca

SEQ ID NO: 226823 - RNA, 19 nt, Artificial Sequence
  Description of Artificial Sequence: Synthetic oligonucleotide
cagcuauaaacauguaaac

SEQ ID NO: 226824 - RNA, 19 nt, Artificial Sequence
  Description of Artificial Sequence: Synthetic oligonucleotide
auacaguaccaucugagua

SEQ ID NO: 226825 - RNA, 19 nt, Artificial Sequence
  Description of Artificial Sequence: Synthetic oligonucleotide
auaguaaccaugaccuauc

SEQ ID NO: 226826 - RNA, 19 nt, Artificial Sequence
  Description of Artificial Sequence: Synthetic oligonucleotide
ucccugauucaucaauagc

SEQ ID NO: 226827 - RNA, 19 nt, Artificial Sequence
  Description of Artificial Sequence: Synthetic oligonucleotide
agagcucacgccaacagag

SEQ ID NO: 226828 - RNA, 19 nt, Artificial Sequence
  Description of Artificial Sequence: Synthetic oligonucleotide
acuaggaacacagccgguc

SEQ ID NO: 226829 - RNA, 19 nt, Artificial Sequence
  Description of Artificial Sequence: Synthetic oligonucleotide
ucacaaucucuucuugacu

SEQ ID NO: 226830 - RNA, 19 nt, Artificial Sequence
  Description of Artificial Sequence: Synthetic oligonucleotide
ucaguaggggcaucccagg

SEQ ID NO: 226831 - RNA, 19 nt, Artificial Sequence
  Description of Artificial Sequence: Synthetic oligonucleotide
auauuggccacuuggggau

SEQ ID NO: 226832 - RNA, 19 nt, Artificial Sequence
  Description of Artificial Sequence: Synthetic oligonucleotide
auacuuacuucaugcucuc

SEQ ID NO: 226833 - RNA, 19 nt, Artificial Sequence
  Description of Artificial Sequence: Synthetic oligonucleotide
aagcgcagagcucacgcca

SEQ ID NO: 226834 - RNA, 19 nt, Artificial Sequence
  Description of Artificial Sequence: Synthetic oligonucleotide
ucacccuacucucuauuca

SEQ ID NO: 226835 - RNA, 19 nt, Artificial Sequence
  Description of Artificial Sequence: Synthetic oligonucleotide
gguaaauguaccuuggucu

SEQ ID NO: 226836 - RNA, 19 nt, Artificial Sequence
  Description of Artificial Sequence: Synthetic oligonucleotide
uauuguacugauagcccuc

SEQ ID NO: 226837 - RNA, 19 nt, Artificial Sequence
  Description of Artificial Sequence: Synthetic oligonucleotide
uaacuuaagcaucucccua

SEQ ID NO: 226838 - RNA, 19 nt, Artificial Sequence
  Description of Artificial Sequence: Synthetic oligonucleotide
uaucaguaggggcauccca

SEQ ID NO: 226839 - RNA, 19 nt, Artificial Sequence
  Description of Artificial Sequence: Synthetic oligonucleotide
ugggaauugguuucgcuau

SEQ ID NO: 226840 - RNA, 19 nt, Artificial Sequence
  Description of Artificial Sequence: Synthetic oligonucleotide
uccuagagagagcccacag

SEQ ID NO: 226841 - RNA, 19 nt, Artificial Sequence
  Description of Artificial Sequence: Synthetic oligonucleotide
accacaccgggccucaagg

SEQ ID NO: 226842 - RNA, 19 nt, Artificial Sequence
  Description of Artificial Sequence: Synthetic oligonucleotide
acuuagcaacauaaaacuc

SEQ ID NO: 226843 - RNA, 19 nt, Artificial Sequence
  Description of Artificial Sequence: Synthetic oligonucleotide
aguagaaggauuacaggcu

SEQ ID NO: 226844 - RNA, 19 nt, Artificial Sequence
  Description of Artificial Sequence: Synthetic oligonucleotide
cacuaaagguuauuuugac

SEQ ID NO: 226845 - RNA, 19 nt, Artificial Sequence
  Description of Artificial Sequence: Synthetic oligonucleotide
caagaugauguaucauuug

SEQ ID NO: 226846 - RNA, 19 nt, Artificial Sequence
  Description of Artificial Sequence: Synthetic oligonucleotide
acuacuguaguagaaggau

SEQ ID NO: 226847 - RNA, 19 nt, Artificial Sequence
  Description of Artificial Sequence: Synthetic oligonucleotide
uguugucuaugccucagua

SEQ ID NO: 226848 - RNA, 19 nt, Artificial Sequence
  Description of Artificial Sequence: Synthetic oligonucleotide
uuucgcuauguucaacauc

SEQ ID NO: 226849 - RNA, 19 nt, Artificial Sequence
  Description of Artificial Sequence: Synthetic oligonucleotide
uaucauuugucagaagaua

SEQ ID NO: 226850 - RNA, 19 nt, Artificial Sequence
  Description of Artificial Sequence: Synthetic oligonucleotide
agaccuaucaguaggggca

SEQ ID NO: 226851 - RNA, 19 nt, Artificial Sequence
  Description of Artificial Sequence: Synthetic oligonucleotide
accuaucucagcucuuaag

SEQ ID NO: 226852 - RNA, 19 nt, Artificial Sequence
  Description of Artificial Sequence: Synthetic oligonucleotide
caacucagacaacuuuugg

SEQ ID NO: 226853 - RNA, 19 nt, Artificial Sequence
  Description of Artificial Sequence: Synthetic oligonucleotide
aaacgcaguuuaugguucu

SEQ ID NO: 226854 - RNA, 19 nt, Artificial Sequence
  Description of Artificial Sequence: Synthetic oligonucleotide
caaauagucuucaaauuua

SEQ ID NO: 226855 - RNA, 19 nt, Artificial Sequence
  Description of Artificial Sequence: Synthetic oligonucleotide
cauacuuacuucaugcucu

SEQ ID NO: 226856 - RNA, 19 nt, Artificial Sequence
  Description of Artificial Sequence: Synthetic oligonucleotide
agugauaaaaggacuuuga

SEQ ID NO: 226857 - RNA, 19 nt, Artificial Sequence
  Description of Artificial Sequence: Synthetic oligonucleotide
aggacguaacuuaagcauc

SEQ ID NO: 226858 - RNA, 19 nt, Artificial Sequence
  Description of Artificial Sequence: Synthetic oligonucleotide
ucccaugaccaaagaacag

SEQ ID NO: 226859 - RNA, 19 nt, Artificial Sequence
  Description of Artificial Sequence: Synthetic oligonucleotide
auuugcagaccacucccug

SEQ ID NO: 226860 - RNA, 19 nt, Artificial Sequence
  Description of Artificial Sequence: Synthetic oligonucleotide
acugcaaaccuggaggaug

SEQ ID NO: 226861 - RNA, 19 nt, Artificial Sequence
  Description of Artificial Sequence: Synthetic oligonucleotide
auagacuauauuacaaaau

SEQ ID NO: 226862 - RNA, 19 nt, Artificial Sequence
  Description of Artificial Sequence: Synthetic oligonucleotide
acuacacauaccauguaca

SEQ ID NO: 226863 - RNA, 19 nt, Artificial Sequence
  Description of Artificial Sequence: Synthetic oligonucleotide
cucccuaguuucuauuuac

SEQ ID NO: 226864 - RNA, 19 nt, Artificial Sequence
  Description of Artificial Sequence: Synthetic oligonucleotide
aucauuugucagaagauau

SEQ ID NO: 226865 - RNA, 19 nt, Artificial Sequence
  Description of Artificial Sequence: Synthetic oligonucleotide
gacaagaugauguaucauu

SEQ ID NO: 226866 - RNA, 19 nt, Artificial Sequence
  Description of Artificial Sequence: Synthetic oligonucleotide
uuugcagaccacucccugu

SEQ ID NO: 226867 - RNA, 19 nt, Artificial Sequence
  Description of Artificial Sequence: Synthetic oligonucleotide
acgccaacagagucaaaag

SEQ ID NO: 226868 - RNA, 19 nt, Artificial Sequence
  Description of Artificial Sequence: Synthetic oligonucleotide
ugauacccaaugacucaag

SEQ ID NO: 226869 - RNA, 19 nt, Artificial Sequence
  Description of Artificial Sequence: Synthetic oligonucleotide
gaccacuuaaaucuguagu

SEQ ID NO: 226870 - RNA, 19 nt, Artificial Sequence
  Description of Artificial Sequence: Synthetic oligonucleotide
gguauugacaagaugaugu

SEQ ID NO: 226871 - RNA, 19 nt, Artificial Sequence
  Description of Artificial Sequence: Synthetic oligonucleotide
ugccaucuagcugucaccc

SEQ ID NO: 226872 - RNA, 19 nt, Artificial Sequence
  Description of Artificial Sequence: Synthetic oligonucleotide
caaaguagucaagugacca

SEQ ID NO: 226873 - RNA, 19 nt, Artificial Sequence
  Description of Artificial Sequence: Synthetic oligonucleotide
uuacaaaaguucccugauu

SEQ ID NO: 226874 - RNA, 19 nt, Artificial Sequence
  Description of Artificial Sequence: Synthetic oligonucleotide
uuuccccucagaauaugau

SEQ ID NO: 226875 - RNA, 19 nt, Artificial Sequence
  Description of Artificial Sequence: Synthetic oligonucleotide
aguaccaucugaguaacuu

SEQ ID NO: 226876 - RNA, 19 nt, Artificial Sequence
  Description of Artificial Sequence: Synthetic oligonucleotide
acauaacaacaucuggaau

SEQ ID NO: 226877 - RNA, 19 nt, Artificial Sequence
  Description of Artificial Sequence: Synthetic oligonucleotide
acucaauugagaacaaaau

SEQ ID NO: 226878 - RNA, 19 nt, Artificial Sequence
  Description of Artificial Sequence: Synthetic oligonucleotide
aaguauagaugauguuauu

SEQ ID NO: 226879 - RNA, 19 nt, Artificial Sequence
  Description of Artificial Sequence: Synthetic oligonucleotide
gaaacgcaguuuaugguuc

SEQ ID NO: 226880 - RNA, 19 nt, Artificial Sequence
  Description of Artificial Sequence: Synthetic oligonucleotide
cacaaucucuucuugacua

SEQ ID NO: 226881 - RNA, 19 nt, Artificial Sequence
  Description of Artificial Sequence: Synthetic oligonucleotide
aucaguaggggcaucccag

SEQ ID NO: 226882 - RNA, 19 nt, Artificial Sequence
  Description of Artificial Sequence: Synthetic oligonucleotide
auuaggggcccauguuguc

SEQ ID NO: 226883 - RNA, 19 nt, Artificial Sequence
  Description of Artificial Sequence: Synthetic oligonucleotide
ggauuacaggcucaacucc

SEQ ID NO: 226884 - RNA, 19 nt, Artificial Sequence
  Description of Artificial Sequence: Synthetic oligonucleotide
ucaacucacaaaucucguu

SEQ ID NO: 226885 - RNA, 19 nt, Artificial Sequence
  Description of Artificial Sequence: Synthetic oligonucleotide
aauguaccuuggucucuug

SEQ ID NO: 226886 - RNA, 19 nt, Artificial Sequence
  Description of Artificial Sequence: Synthetic oligonucleotide
cccugauucaucaauagca

SEQ ID NO: 226887 - RNA, 19 nt, Artificial Sequence
  Description of Artificial Sequence: Synthetic oligonucleotide
ugauaacauuuuccccuca

SEQ ID NO: 226888 - RNA, 19 nt, Artificial Sequence
  Description of Artificial Sequence: Synthetic oligonucleotide
cagugcauggagugaaaac

SEQ ID NO: 226889 - RNA, 19 nt, Artificial Sequence
  Description of Artificial Sequence: Synthetic oligonucleotide
ucugggaauugguuucgcu

SEQ ID NO: 226890 - RNA, 19 nt, Artificial Sequence
  Description of Artificial Sequence: Synthetic oligonucleotide
acuuaagcaucucccuagu

SEQ ID NO: 226891 - RNA, 19 nt, Artificial Sequence
  Description of Artificial Sequence: Synthetic oligonucleotide
gaaagggucaaauguguau

SEQ ID NO: 226892 - RNA, 19 nt, Artificial Sequence
  Description of Artificial Sequence: Synthetic oligonucleotide
gguuucgcuauguucaaca

SEQ ID NO: 226893 - RNA, 19 nt, Artificial Sequence
  Description of Artificial Sequence: Synthetic oligonucleotide
uacugaccauauuuugagu

SEQ ID NO: 226894 - RNA, 19 nt, Artificial Sequence
  Description of Artificial Sequence: Synthetic oligonucleotide
acaagaugauguaucauuu

SEQ ID NO: 226895 - RNA, 19 nt, Artificial Sequence
  Description of Artificial Sequence: Synthetic oligonucleotide
auuacaacuucaacucaga

SEQ ID NO: 226896 - RNA, 19 nt, Artificial Sequence
  Description of Artificial Sequence: Synthetic oligonucleotide
uaggaacacagccggucac

SEQ ID NO: 226897 - RNA, 19 nt, Artificial Sequence
  Description of Artificial Sequence: Synthetic oligonucleotide
ccaaacuacaucuuggaaa

SEQ ID NO: 226898 - RNA, 19 nt, Artificial Sequence
  Description of Artificial Sequence: Synthetic oligonucleotide
acuuggggauuaucaaagu

SEQ ID NO: 226899 - RNA, 19 nt, Artificial Sequence
  Description of Artificial Sequence: Synthetic oligonucleotide
ugucuaugccucaguaaua

SEQ ID NO: 226900 - RNA, 19 nt, Artificial Sequence
  Description of Artificial Sequence: Synthetic oligonucleotide
ccaugaccaaagaacagag

SEQ ID NO: 226901 - RNA, 19 nt, Artificial Sequence
  Description of Artificial Sequence: Synthetic oligonucleotide
caucugaguaacuuagcaa

SEQ ID NO: 226902 - RNA, 19 nt, Artificial Sequence
  Description of Artificial Sequence: Synthetic oligonucleotide
ugaaaauauuaggggccca

SEQ ID NO: 226903 - RNA, 19 nt, Artificial Sequence
  Description of Artificial Sequence: Synthetic oligonucleotide
acauaucugaaagcgcaga

SEQ ID NO: 226904 - RNA, 19 nt, Artificial Sequence
  Description of Artificial Sequence: Synthetic oligonucleotide
acugacuauguaacauguc

SEQ ID NO: 226905 - RNA, 19 nt, Artificial Sequence
  Description of Artificial Sequence: Synthetic oligonucleotide
uuaggggcccauguugucu

SEQ ID NO: 226906 - RNA, 19 nt, Artificial Sequence
  Description of Artificial Sequence: Synthetic oligonucleotide
auuguacugauagcccuca

SEQ ID NO: 226907 - RNA, 19 nt, Artificial Sequence
  Description of Artificial Sequence: Synthetic oligonucleotide
aaauuucuauggacaucug

SEQ ID NO: 226908 - RNA, 19 nt, Artificial Sequence
  Description of Artificial Sequence: Synthetic oligonucleotide
acaaucucuucuugacuaa

SEQ ID NO: 226909 - RNA, 19 nt, Artificial Sequence
  Description of Artificial Sequence: Synthetic oligonucleotide
guugucuaugccucaguaa

SEQ ID NO: 226910 - RNA, 19 nt, Artificial Sequence
  Description of Artificial Sequence: Synthetic oligonucleotide
aagugaccacuuaaaucug

SEQ ID NO: 226911 - RNA, 19 nt, Artificial Sequence
  Description of Artificial Sequence: Synthetic oligonucleotide
ugauagcccucaguuuucc

SEQ ID NO: 226912 - RNA, 19 nt, Artificial Sequence
  Description of Artificial Sequence: Synthetic oligonucleotide
uccuacaguuacuuugguu

SEQ ID NO: 226913 - RNA, 19 nt, Artificial Sequence
  Description of Artificial Sequence: Synthetic oligonucleotide
cucaauugagaacaaaauu

SEQ ID NO: 226914 - RNA, 19 nt, Artificial Sequence
  Description of Artificial Sequence: Synthetic oligonucleotide
guauugacaagaugaugua

SEQ ID NO: 226915 - RNA, 19 nt, Artificial Sequence
  Description of Artificial Sequence: Synthetic oligonucleotide
auguaccuuggucucuuga

SEQ ID NO: 226916 - RNA, 19 nt, Artificial Sequence
  Description of Artificial Sequence: Synthetic oligonucleotide
cuaugccucaguaauacau

SEQ ID NO: 226917 - RNA, 19 nt, Artificial Sequence
  Description of Artificial Sequence: Synthetic oligonucleotide
ggauuaucaaaguaucccu

SEQ ID NO: 226918 - RNA, 19 nt, Artificial Sequence
  Description of Artificial Sequence: Synthetic oligonucleotide
cucucuauucagagcuaac

SEQ ID NO: 226919 - RNA, 19 nt, Artificial Sequence
  Description of Artificial Sequence: Synthetic oligonucleotide
gauguuauuugggguacaa

SEQ ID NO: 226920 - RNA, 19 nt, Artificial Sequence
  Description of Artificial Sequence: Synthetic oligonucleotide
guacugauagcccucaguu

SEQ ID NO: 226921 - RNA, 19 nt, Artificial Sequence
  Description of Artificial Sequence: Synthetic oligonucleotide
guugggugggagacaaaag

SEQ ID NO: 226922 - RNA, 19 nt, Artificial Sequence
  Description of Artificial Sequence: Synthetic oligonucleotide
acaccgggccucaaggcac

SEQ ID NO: 226923 - RNA, 19 nt, Artificial Sequence
  Description of Artificial Sequence: Synthetic oligonucleotide
gauuacaggcucaacuccu

SEQ ID NO: 226924 - RNA, 19 nt, Artificial Sequence
  Description of Artificial Sequence: Synthetic oligonucleotide
cuaggaacacagccgguca

SEQ ID NO: 226925 - RNA, 19 nt, Artificial Sequence
  Description of Artificial Sequence: Synthetic oligonucleotide
acuuauggggaaacgcagu

SEQ ID NO: 226926 - RNA, 19 nt, Artificial Sequence
  Description of Artificial Sequence: Synthetic oligonucleotide
uugguuucgcuauguucaa

SEQ ID NO: 226927 - RNA, 19 nt, Artificial Sequence
  Description of Artificial Sequence: Synthetic oligonucleotide
ccuuguaugaaaguaagaa

SEQ ID NO: 226928 - RNA, 19 nt, Artificial Sequence
  Description of Artificial Sequence: Synthetic oligonucleotide
gucacccuacucucuauuc

SEQ ID NO: 226929 - RNA, 19 nt, Artificial Sequence
  Description of Artificial Sequence: Synthetic oligonucleotide
acauaccauguacaauuuu

SEQ ID NO: 226930 - RNA, 19 nt, Artificial Sequence
  Description of Artificial Sequence: Synthetic oligonucleotide
ugucacccuacucucuauu

SEQ ID NO: 226931 - RNA, 19 nt, Artificial Sequence
  Description of Artificial Sequence: Synthetic oligonucleotide
uacuguacuguaagcucuu

SEQ ID NO: 226932 - RNA, 19 nt, Artificial Sequence
  Description of Artificial Sequence: Synthetic oligonucleotide
ugacaagaugauguaucau

SEQ ID NO: 226933 - RNA, 19 nt, Artificial Sequence
  Description of Artificial Sequence: Synthetic oligonucleotide
agagcuuauuaagcaggug

SEQ ID NO: 226934 - RNA, 19 nt, Artificial Sequence
  Description of Artificial Sequence: Synthetic oligonucleotide
cuaucaguaggggcauccc

SEQ ID NO: 226935 - RNA, 19 nt, Artificial Sequence
  Description of Artificial Sequence: Synthetic oligonucleotide
uucagugcauggagugaaa

SEQ ID NO: 226936 - RNA, 19 nt, Artificial Sequence
  Description of Artificial Sequence: Synthetic oligonucleotide
acucacaaaucucguugaa

SEQ ID NO: 226937 - RNA, 19 nt, Artificial Sequence
  Description of Artificial Sequence: Synthetic oligonucleotide
caaauguguauggacugca

SEQ ID NO: 226938 - RNA, 19 nt, Artificial Sequence
  Description of Artificial Sequence: Synthetic oligonucleotide
auauucauauuggccacuu

SEQ ID NO: 226939 - RNA, 19 nt, Artificial Sequence
  Description of Artificial Sequence: Synthetic oligonucleotide
gggcaauauaaacaauaga

SEQ ID NO: 226940 - RNA, 19 nt, Artificial Sequence
  Description of Artificial Sequence: Synthetic oligonucleotide
ugaccuaucucagcucuua

SEQ ID NO: 226941 - RNA, 19 nt, Artificial Sequence
  Description of Artificial Sequence: Synthetic oligonucleotide
ugauguuauuugggguaca

SEQ ID NO: 226942 - RNA, 19 nt, Artificial Sequence
  Description of Artificial Sequence: Synthetic oligonucleotide
guaccaucugaguaacuua

SEQ ID NO: 226943 - RNA, 19 nt, Artificial Sequence
  Description of Artificial Sequence: Synthetic oligonucleotide
acccuuaugguuacuuaca

SEQ ID NO: 226944 - RNA, 19 nt, Artificial Sequence
  Description of Artificial Sequence: Synthetic oligonucleotide
auguugucuaugccucagu

SEQ ID NO: 226945 - RNA, 19 nt, Artificial Sequence
  Description of Artificial Sequence: Synthetic oligonucleotide
agugcauaacaggauugaa

SEQ ID NO: 226946 - RNA, 19 nt, Artificial Sequence
  Description of Artificial Sequence: Synthetic oligonucleotide
ucucucagccaggguauug

SEQ ID NO: 226947 - RNA, 19 nt, Artificial Sequence
  Description of Artificial Sequence: Synthetic oligonucleotide
cacgccaacagagucaaaa

SEQ ID NO: 226948 - RNA, 19 nt, Artificial Sequence
  Description of Artificial Sequence: Synthetic oligonucleotide
aggcaagaacaacaugauu

SEQ ID NO: 226949 - RNA, 19 nt, Artificial Sequence
  Description of Artificial Sequence: Synthetic oligonucleotide
acucucuauucagagcuaa

SEQ ID NO: 226950 - RNA, 19 nt, Artificial Sequence
  Description of Artificial Sequence: Synthetic oligonucleotide
caugaccuaucucagcucu

SEQ ID NO: 226951 - RNA, 19 nt, Artificial Sequence
  Description of Artificial Sequence: Synthetic oligonucleotide
aggccuuacuguucuacua

SEQ ID NO: 226952 - RNA, 19 nt, Artificial Sequence
  Description of Artificial Sequence: Synthetic oligonucleotide
guaccugaucauaacacua

SEQ ID NO: 226953 - RNA, 19 nt, Artificial Sequence
  Description of Artificial Sequence: Synthetic oligonucleotide
ggggauuaucaaaguaucc

SEQ ID NO: 226954 - RNA, 19 nt, Artificial Sequence
  Description of Artificial Sequence: Synthetic oligonucleotide
aaguucccugauucaucaa

SEQ ID NO: 226955 - RNA, 19 nt, Artificial Sequence
  Description of Artificial Sequence: Synthetic oligonucleotide
auauuacuacacauaccau

SEQ ID NO: 226956 - RNA, 19 nt, Artificial Sequence
  Description of Artificial Sequence: Synthetic oligonucleotide
uuauggggaaacgcaguuu

SEQ ID NO: 226957 - RNA, 19 nt, Artificial Sequence
  Description of Artificial Sequence: Synthetic oligonucleotide
auagcacauuuuaucuacu

SEQ ID NO: 226958 - RNA, 19 nt, Artificial Sequence
  Description of Artificial Sequence: Synthetic oligonucleotide
accauauuuugagugcaua

SEQ ID NO: 226959 - RNA, 19 nt, Artificial Sequence
  Description of Artificial Sequence: Synthetic oligonucleotide
aggguauugacaagaugau

SEQ ID NO: 226960 - RNA, 19 nt, Artificial Sequence
  Description of Artificial Sequence: Synthetic oligonucleotide
ggccucaaggcacuucuug

SEQ ID NO: 226961 - RNA, 19 nt, Artificial Sequence
  Description of Artificial Sequence: Synthetic oligonucleotide
cuucuugacuaaacacuaa

SEQ ID NO: 226962 - RNA, 19 nt, Artificial Sequence
  Description of Artificial Sequence: Synthetic oligonucleotide
ggguauugacaagaugaug

SEQ ID NO: 226963 - RNA, 19 nt, Artificial Sequence
  Description of Artificial Sequence: Synthetic oligonucleotide
guaucauuugucagaagau

SEQ ID NO: 226964 - RNA, 19 nt, Artificial Sequence
  Description of Artificial Sequence: Synthetic oligonucleotide
cugaaagcgcagagcucac

SEQ ID NO: 226965 - RNA, 19 nt, Artificial Sequence
  Description of Artificial Sequence: Synthetic oligonucleotide
aggaacacagccggucacu

SEQ ID NO: 226966 - RNA, 19 nt, Artificial Sequence
  Description of Artificial Sequence: Synthetic oligonucleotide
cacagugauaaaaggacuu

SEQ ID NO: 226967 - RNA, 19 nt, Artificial Sequence
  Description of Artificial Sequence: Synthetic oligonucleotide
ccuaucaguaggggcaucc

SEQ ID NO: 226968 - RNA, 19 nt, Artificial Sequence
  Description of Artificial Sequence: Synthetic oligonucleotide
gugcauggagugaaaacaa

SEQ ID NO: 226969 - RNA, 19 nt, Artificial Sequence
  Description of Artificial Sequence: Synthetic oligonucleotide
gguuacuuacauugaugaa

SEQ ID NO: 226970 - RNA, 19 nt, Artificial Sequence
  Description of Artificial Sequence: Synthetic oligonucleotide
aucguucaacuuaaaugaa

SEQ ID NO: 226971 - RNA, 19 nt, Artificial Sequence
  Description of Artificial Sequence: Synthetic oligonucleotide
caacuucaacucagacaac

SEQ ID NO: 226972 - RNA, 19 nt, Artificial Sequence
  Description of Artificial Sequence: Synthetic oligonucleotide
ggugggagacaaaagucuc

SEQ ID NO: 226973 - RNA, 19 nt, Artificial Sequence
  Description of Artificial Sequence: Synthetic oligonucleotide
ccauauuuugagugcauaa

SEQ ID NO: 226974 - RNA, 19 nt, Artificial Sequence
  Description of Artificial Sequence: Synthetic oligonucleotide
auuagccaaacuacaucuu

SEQ ID NO: 226975 - RNA, 19 nt, Artificial Sequence
  Description of Artificial Sequence: Synthetic oligonucleotide
cacaccgggccucaaggca

SEQ ID NO: 226976 - RNA, 19 nt, Artificial Sequence
  Description of Artificial Sequence: Synthetic oligonucleotide
gacguaacuuaagcaucuc

SEQ ID NO: 226977 - RNA, 19 nt, Artificial Sequence
  Description of Artificial Sequence: Synthetic oligonucleotide
gguauguucuuaaaauuau

SEQ ID NO: 226978 - RNA, 19 nt, Artificial Sequence
  Description of Artificial Sequence: Synthetic oligonucleotide
uacuuacuucaugcucucu

SEQ ID NO: 226979 - RNA, 19 nt, Artificial Sequence
  Description of Artificial Sequence: Synthetic oligonucleotide
cuaucucagcucuuaaguu

SEQ ID NO: 226980 - RNA, 19 nt, Artificial Sequence
  Description of Artificial Sequence: Synthetic oligonucleotide
cauguuaaugcuugucauu

SEQ ID NO: 226981 - RNA, 19 nt, Artificial Sequence
  Description of Artificial Sequence: Synthetic oligonucleotide
gaccuaucucagcucuuaa

SEQ ID NO: 226982 - RNA, 19 nt, Artificial Sequence
  Description of Artificial Sequence: Synthetic oligonucleotide
ccuaucucagcucuuaagu

SEQ ID NO: 226983 - RNA, 19 nt, Artificial Sequence
  Description of Artificial Sequence: Synthetic oligonucleotide
ugguuucgcuauguucaac

SEQ ID NO: 226984 - RNA, 19 nt, Artificial Sequence
  Description of Artificial Sequence: Synthetic oligonucleotide
gguugggugggagacaaaa

SEQ ID NO: 226985 - RNA, 19 nt, Artificial Sequence
  Description of Artificial Sequence: Synthetic oligonucleotide
aaucagcuauaaacaugua

SEQ ID NO: 226986 - RNA, 19 nt, Artificial Sequence
  Description of Artificial Sequence: Synthetic oligonucleotide
gcaacauaguugaaaauau

SEQ ID NO: 226987 - RNA, 19 nt, Artificial Sequence
  Description of Artificial Sequence: Synthetic oligonucleotide
gcuuauuaagcaggugaca

SEQ ID NO: 226988 - RNA, 19 nt, Artificial Sequence
  Description of Artificial Sequence: Synthetic oligonucleotide
cucacgccaacagagucaa

SEQ ID NO: 226989 - RNA, 19 nt, Artificial Sequence
  Description of Artificial Sequence: Synthetic oligonucleotide
cuuauggggaaacgcaguu

SEQ ID NO: 226990 - RNA, 19 nt, Artificial Sequence
  Description of Artificial Sequence: Synthetic oligonucleotide
gaauugguuucgcuauguu

SEQ ID NO: 226991 - RNA, 19 nt, Artificial Sequence
  Description of Artificial Sequence: Synthetic oligonucleotide
guuucgcuauguucaacau

SEQ ID NO: 226992 - RNA, 19 nt, Artificial Sequence
  Description of Artificial Sequence: Synthetic oligonucleotide
cuguaagcucuuuuccccu

SEQ ID NO: 226993 - RNA, 19 nt, Artificial Sequence
  Description of Artificial Sequence: Synthetic oligonucleotide
cauugguccccuggauuuc

SEQ ID NO: 226994 - RNA, 19 nt, Artificial Sequence
  Description of Artificial Sequence: Synthetic oligonucleotide
gcauguuaaugcuugucau

SEQ ID NO: 226995 - RNA, 19 nt, Artificial Sequence
  Description of Artificial Sequence: Synthetic oligonucleotide
gaugugcauguuaaugcuu

SEQ ID NO: 226996 - RNA, 19 nt, Artificial Sequence
  Description of Artificial Sequence: Synthetic oligonucleotide
acccuacucucuauucaga

SEQ ID NO: 226997 - RNA, 19 nt, Artificial Sequence
  Description of Artificial Sequence: Synthetic oligonucleotide
cccaugaccaaagaacaga

SEQ ID NO: 226998 - RNA, 19 nt, Artificial Sequence
  Description of Artificial Sequence: Synthetic oligonucleotide
gcccauguugucuaugccu

SEQ ID NO: 226999 - RNA, 19 nt, Artificial Sequence
  Description of Artificial Sequence: Synthetic oligonucleotide
ccaaugacucaaggaaaug

SEQ ID NO: 227000 - RNA, 19 nt, Artificial Sequence
  Description of Artificial Sequence: Synthetic oligonucleotide
guugaauguuacugaccau

SEQ ID NO: 227001 - RNA, 19 nt, Artificial Sequence
  Description of Artificial Sequence: Synthetic oligonucleotide
caccaaccacuucaguuua

SEQ ID NO: 227002 - RNA, 19 nt, Artificial Sequence
  Description of Artificial Sequence: Synthetic oligonucleotide
cuacuggguagauuuugau

SEQ ID NO: 227003 - RNA, 19 nt, Artificial Sequence
  Description of Artificial Sequence: Synthetic oligonucleotide
gugacacaacacaacugua

SEQ ID NO: 227004 - RNA, 19 nt, Artificial Sequence
  Description of Artificial Sequence: Synthetic oligonucleotide
gcagacuaggagcaacaua

SEQ ID NO: 227005 - RNA, 19 nt, Artificial Sequence
  Description of Artificial Sequence: Synthetic oligonucleotide
cugaguaacuuagcaacau

SEQ ID NO: 227006 - RNA, 19 nt, Artificial Sequence
  Description of Artificial Sequence: Synthetic oligonucleotide
ggacguaacuuaagcaucu

SEQ ID NO: 227007 - RNA, 19 nt, Artificial Sequence
  Description of Artificial Sequence: Synthetic oligonucleotide
acaaacccuuaugguuacu

SEQ ID NO: 227008 - RNA, 19 nt, Artificial Sequence
  Description of Artificial Sequence: Synthetic oligonucleotide
acuguacuguaagcucuuu

SEQ ID NO: 227009 - RNA, 19 nt, Artificial Sequence
  Description of Artificial Sequence: Synthetic oligonucleotide
ccucaagcaaugauaacau

SEQ ID NO: 227010 - RNA, 19 nt, Artificial Sequence
  Description of Artificial Sequence: Synthetic oligonucleotide
ccaaaaguaccugaucaua

SEQ ID NO: 227011 - RNA, 19 nt, Artificial Sequence
  Description of Artificial Sequence: Synthetic oligonucleotide
cauaacacuagagcuuauu

SEQ ID NO: 227012 - RNA, 19 nt, Artificial Sequence
  Description of Artificial Sequence: Synthetic oligonucleotide
uauuggccacuuggggauu

SEQ ID NO: 227013 - RNA, 19 nt, Artificial Sequence
  Description of Artificial Sequence: Synthetic oligonucleotide
auggggaaacgcaguuuau

SEQ ID NO: 227014 - RNA, 19 nt, Artificial Sequence
  Description of Artificial Sequence: Synthetic oligonucleotide
gcucacgccaacagaguca

SEQ ID NO: 227015 - RNA, 19 nt, Artificial Sequence
  Description of Artificial Sequence: Synthetic oligonucleotide
aucuguagucauagccaua

SEQ ID NO: 227016 - RNA, 19 nt, Artificial Sequence
  Description of Artificial Sequence: Synthetic oligonucleotide
uggccacuuggggauuauc

SEQ ID NO: 227017 - RNA, 19 nt, Artificial Sequence
  Description of Artificial Sequence: Synthetic oligonucleotide
gaccauauuuugagugcau

SEQ ID NO: 227018 - RNA, 19 nt, Artificial Sequence
  Description of Artificial Sequence: Synthetic oligonucleotide
cucaagcaaugauaacauu

SEQ ID NO: 227019 - RNA, 19 nt, Artificial Sequence
  Description of Artificial Sequence: Synthetic oligonucleotide
ccaaaggcuggagguuggg

SEQ ID NO: 227020 - RNA, 19 nt, Artificial Sequence
  Description of Artificial Sequence: Synthetic oligonucleotide
cuuaagcaucucccuaguu

SEQ ID NO: 227021 - RNA, 19 nt, Artificial Sequence
  Description of Artificial Sequence: Synthetic oligonucleotide
uuggccacuuggggauuau

SEQ ID NO: 227022 - RNA, 19 nt, Artificial Sequence
  Description of Artificial Sequence: Synthetic oligonucleotide
ucacgccaacagagucaaa

SEQ ID NO: 227023 - RNA, 19 nt, Artificial Sequence
  Description of Artificial Sequence: Synthetic oligonucleotide
cccaaugacucaaggaaau

SEQ ID NO: 227024 - RNA, 19 nt, Artificial Sequence
  Description of Artificial Sequence: Synthetic oligonucleotide
gaccuaucaguaggggcau

SEQ ID NO: 227025 - RNA, 19 nt, Artificial Sequence
  Description of Artificial Sequence: Synthetic oligonucleotide
agcaucuccuugacauaua

SEQ ID NO: 227026 - RNA, 19 nt, Artificial Sequence
  Description of Artificial Sequence: Synthetic oligonucleotide
augaccuaucucagcucuu

SEQ ID NO: 227027 - RNA, 19 nt, Artificial Sequence
  Description of Artificial Sequence: Synthetic oligonucleotide
cucaacuccucaggccuua

SEQ ID NO: 227028 - RNA, 19 nt, Artificial Sequence
  Description of Artificial Sequence: Synthetic oligonucleotide
cccauauuugcagaccacu

SEQ ID NO: 227029 - RNA, 19 nt, Artificial Sequence
  Description of Artificial Sequence: Synthetic oligonucleotide
cccaaaaguaccugaucau

SEQ ID NO: 227030 - RNA, 19 nt, Artificial Sequence
  Description of Artificial Sequence: Synthetic oligonucleotide
cccuuaugguuacuuacau

SEQ ID NO: 227031 - RNA, 19 nt, Artificial Sequence
  Description of Artificial Sequence: Synthetic oligonucleotide
gcgcagagcucacgccaac

SEQ ID NO: 227032 - RNA, 19 nt, Artificial Sequence
  Description of Artificial Sequence: Synthetic oligonucleotide
ggccccaaaaguaccugau

SEQ ID NO: 227033 - RNA, 19 nt, Artificial Sequence
  Description of Artificial Sequence: Synthetic oligonucleotide
ggcagacuaggagcaacau

SEQ ID NO: 227034 - RNA, 19 nt, Artificial Sequence
  Description of Artificial Sequence: Synthetic oligonucleotide
caccgggccucaaggcacu

SEQ ID NO: 227035 - RNA, 19 nt, Artificial Sequence
  Description of Artificial Sequence: Synthetic oligonucleotide
gggcaucccaggccccaua

SEQ ID NO: 227036 - RNA, 19 nt, Artificial Sequence
  Description of Artificial Sequence: Synthetic oligonucleotide
ccgggccucaaggcacuuc

SEQ ID NO: 227037 - RNA, 19 nt, Artificial Sequence
  Description of Artificial Sequence: Synthetic oligonucleotide
cucucucagccaggguauu

SEQ ID NO: 227038 - RNA, 19 nt, Artificial Sequence
  Description of Artificial Sequence: Synthetic oligonucleotide
aauaaugugaucugaggcc

SEQ ID NO: 227039 - RNA, 19 nt, Artificial Sequence
  Description of Artificial Sequence: Synthetic oligonucleotide
uuauacuaaacuuuaauug

SEQ ID NO: 227040 - RNA, 19 nt, Artificial Sequence
  Description of Artificial Sequence: Synthetic oligonucleotide
aauucaaacaaccacugga

SEQ ID NO: 227041 - RNA, 19 nt, Artificial Sequence
  Description of Artificial Sequence: Synthetic oligonucleotide
uuaauugauagacuaaucu

SEQ ID NO: 227042 - RNA, 19 nt, Artificial Sequence
  Description of Artificial Sequence: Synthetic oligonucleotide
ucucauuugacagugaagg

SEQ ID NO: 227043 - RNA, 19 nt, Artificial Sequence
  Description of Artificial Sequence: Synthetic oligonucleotide
ucaaauuaagcuaacggug

SEQ ID NO: 227044 - RNA, 19 nt, Artificial Sequence
  Description of Artificial Sequence: Synthetic oligonucleotide
ugauagacuaaucuuacag

SEQ ID NO: 227045 - RNA, 19 nt, Artificial Sequence
  Description of Artificial Sequence: Synthetic oligonucleotide
uauuauacaugccagacaa

SEQ ID NO: 227046 - RNA, 19 nt, Artificial Sequence
  Description of Artificial Sequence: Synthetic oligonucleotide
uauacuaaacuuuaauuga

SEQ ID NO: 227047 - RNA, 19 nt, Artificial Sequence
  Description of Artificial Sequence: Synthetic oligonucleotide
ugugaugcuaccuaauggg

SEQ ID NO: 227048 - RNA, 19 nt, Artificial Sequence
  Description of Artificial Sequence: Synthetic oligonucleotide
guucaaauuaagcuaacgg

SEQ ID NO: 227049 - RNA, 19 nt, Artificial Sequence
  Description of Artificial Sequence: Synthetic oligonucleotide
auagauuuaaucaguauac

SEQ ID NO: 227050 - RNA, 19 nt, Artificial Sequence
  Description of Artificial Sequence: Synthetic oligonucleotide
uauaaagacugcucaaggg

SEQ ID NO: 227051 - RNA, 19 nt, Artificial Sequence
  Description of Artificial Sequence: Synthetic oligonucleotide
uaauugaggagccaaagcu

SEQ ID NO: 227052 - RNA, 19 nt, Artificial Sequence
  Description of Artificial Sequence: Synthetic oligonucleotide
gaucugaacacuuauuccc

SEQ ID NO: 227053 - RNA, 19 nt, Artificial Sequence
  Description of Artificial Sequence: Synthetic oligonucleotide
uguugugaaagaaagugca

SEQ ID NO: 227054 - RNA, 19 nt, Artificial Sequence
  Description of Artificial Sequence: Synthetic oligonucleotide
aauguagcaaaguuaauuu

SEQ ID NO: 227055 - RNA, 19 nt, Artificial Sequence
  Description of Artificial Sequence: Synthetic oligonucleotide
agaucugaacacuuauucc

SEQ ID NO: 227056 - RNA, 19 nt, Artificial Sequence
  Description of Artificial Sequence: Synthetic oligonucleotide
uguacagaaauaauccuga

SEQ ID NO: 227057 - RNA, 19 nt, Artificial Sequence
  Description of Artificial Sequence: Synthetic oligonucleotide
uuauuaauuuccaccauac

SEQ ID NO: 227058 - RNA, 19 nt, Artificial Sequence
  Description of Artificial Sequence: Synthetic oligonucleotide
auuuauaguagagccaacc

SEQ ID NO: 227059 - RNA, 19 nt, Artificial Sequence
  Description of Artificial Sequence: Synthetic oligonucleotide
ucaagauuacacaaaauua

SEQ ID NO: 227060 - RNA, 19 nt, Artificial Sequence
  Description of Artificial Sequence: Synthetic oligonucleotide
aacuuuaauugauagacua

SEQ ID NO: 227061 - RNA, 19 nt, Artificial Sequence
  Description of Artificial Sequence: Synthetic oligonucleotide
ugaguuggaacccaguaca

SEQ ID NO: 227062 - RNA, 19 nt, Artificial Sequence
  Description of Artificial Sequence: Synthetic oligonucleotide
uuuaaaaugguaagcugac

SEQ ID NO: 227063 - RNA, 19 nt, Artificial Sequence
  Description of Artificial Sequence: Synthetic oligonucleotide
auagacuaaucuuacagga

SEQ ID NO: 227064 - RNA, 19 nt, Artificial Sequence
  Description of Artificial Sequence: Synthetic oligonucleotide
agcaaaguuaauuucuuug

SEQ ID NO: 227065 - RNA, 19 nt, Artificial Sequence
  Description of Artificial Sequence: Synthetic oligonucleotide
uauauaaagacugcucaag

SEQ ID NO: 227066 - RNA, 19 nt, Artificial Sequence
  Description of Artificial Sequence: Synthetic oligonucleotide
accacaucaccucagauug

SEQ ID NO: 227067 - RNA, 19 nt, Artificial Sequence
  Description of Artificial Sequence: Synthetic oligonucleotide
uauacaugccagacaaggg

SEQ ID NO: 227068 - RNA, 19 nt, Artificial Sequence
  Description of Artificial Sequence: Synthetic oligonucleotide
uuauaguagagccaaccac

SEQ ID NO: 227069 - RNA, 19 nt, Artificial Sequence
  Description of Artificial Sequence: Synthetic oligonucleotide
acacccaguaguaagaggc

SEQ ID NO: 227070 - RNA, 19 nt, Artificial Sequence
  Description of Artificial Sequence: Synthetic oligonucleotide
auaaagacugcucaaggga

SEQ ID NO: 227071 - RNA, 19 nt, Artificial Sequence
  Description of Artificial Sequence: Synthetic oligonucleotide
uuagucuuguuccaaauua

SEQ ID NO: 227072 - RNA, 19 nt, Artificial Sequence
  Description of Artificial Sequence: Synthetic oligonucleotide
cuacuuaggacuuuaccag

SEQ ID NO: 227073 - RNA, 19 nt, Artificial Sequence
  Description of Artificial Sequence: Synthetic oligonucleotide
ucaaaccuaauugaggagc

SEQ ID NO: 227074 - RNA, 19 nt, Artificial Sequence
  Description of Artificial Sequence: Synthetic oligonucleotide
gaugauuguguacaacacc

SEQ ID NO: 227075 - RNA, 19 nt, Artificial Sequence
  Description of Artificial Sequence: Synthetic oligonucleotide
auuucacccagccuggccg

SEQ ID NO: 227076 - RNA, 19 nt, Artificial Sequence
  Description of Artificial Sequence: Synthetic oligonucleotide
ugagacguggcaauguagc

SEQ ID NO: 227077 - RNA, 19 nt, Artificial Sequence
  Description of Artificial Sequence: Synthetic oligonucleotide
aggacacuugaacugaacg

SEQ ID NO: 227078 - RNA, 19 nt, Artificial Sequence
  Description of Artificial Sequence: Synthetic oligonucleotide
gaugcuaccuaaugggaag

SEQ ID NO: 227079 - RNA, 19 nt, Artificial Sequence
  Description of Artificial Sequence: Synthetic oligonucleotide
auuaagcuaacggugaaag

SEQ ID NO: 227080 - RNA, 19 nt, Artificial Sequence
  Description of Artificial Sequence: Synthetic oligonucleotide
agcuacuuaggacuuuacc

SEQ ID NO: 227081 - RNA, 19 nt, Artificial Sequence
  Description of Artificial Sequence: Synthetic oligonucleotide
acguuuuaucuucaggaac

SEQ ID NO: 227082 - RNA, 19 nt, Artificial Sequence
  Description of Artificial Sequence: Synthetic oligonucleotide
aacugaaacgccaucaugu

SEQ ID NO: 227083 - RNA, 19 nt, Artificial Sequence
  Description of Artificial Sequence: Synthetic oligonucleotide
agauauggcaacuuuucug

SEQ ID NO: 227084 - RNA, 19 nt, Artificial Sequence
  Description of Artificial Sequence: Synthetic oligonucleotide
uaacggugaaaguacauca

SEQ ID NO: 227085 - RNA, 19 nt, Artificial Sequence
  Description of Artificial Sequence: Synthetic oligonucleotide
uuauuauacaugccagaca

SEQ ID NO: 227086 - RNA, 19 nt, Artificial Sequence
  Description of Artificial Sequence: Synthetic oligonucleotide
aguagagccaaccaccaug

SEQ ID NO: 227087 - RNA, 19 nt, Artificial Sequence
  Description of Artificial Sequence: Synthetic oligonucleotide
ugaacgcaugagcagaaag

SEQ ID NO: 227088 - RNA, 19 nt, Artificial Sequence
  Description of Artificial Sequence: Synthetic oligonucleotide
aauugauagacuaaucuua

SEQ ID NO: 227089 - RNA, 19 nt, Artificial Sequence
  Description of Artificial Sequence: Synthetic oligonucleotide
ugaucugaggccauauggc

SEQ ID NO: 227090 - RNA, 19 nt, Artificial Sequence
  Description of Artificial Sequence: Synthetic oligonucleotide
aauaagacagcuagucaag

SEQ ID NO: 227091 - RNA, 19 nt, Artificial Sequence
  Description of Artificial Sequence: Synthetic oligonucleotide
auugauagacuaaucuuac

SEQ ID NO: 227092 - RNA, 19 nt, Artificial Sequence
  Description of Artificial Sequence: Synthetic oligonucleotide
uuuaauugauagacuaauc

SEQ ID NO: 227093 - RNA, 19 nt, Artificial Sequence
  Description of Artificial Sequence: Synthetic oligonucleotide
ugaugacaagccuaggagc

SEQ ID NO: 227094 - RNA, 19 nt, Artificial Sequence
  Description of Artificial Sequence: Synthetic oligonucleotide
uaguaagaggcuuccgugg

SEQ ID NO: 227095 - RNA, 19 nt, Artificial Sequence
  Description of Artificial Sequence: Synthetic oligonucleotide
ugggagaacagcccuuucg

SEQ ID NO: 227096 - RNA, 19 nt, Artificial Sequence
  Description of Artificial Sequence: Synthetic oligonucleotide
uucgguggcuacaugauga

SEQ ID NO: 227097 - RNA, 19 nt, Artificial Sequence
  Description of Artificial Sequence: Synthetic oligonucleotide
aacagccccuaauuucacc

SEQ ID NO: 227098 - RNA, 19 nt, Artificial Sequence
  Description of Artificial Sequence: Synthetic oligonucleotide
aaccggugauuuuaaguuc

SEQ ID NO: 227099 - RNA, 19 nt, Artificial Sequence
  Description of Artificial Sequence: Synthetic oligonucleotide
uggggaguuucucaguccg

SEQ ID NO: 227100 - RNA, 19 nt, Artificial Sequence
  Description of Artificial Sequence: Synthetic oligonucleotide
aagcuaacggugaaaguac

SEQ ID NO: 227101 - RNA, 19 nt, Artificial Sequence
  Description of Artificial Sequence: Synthetic oligonucleotide
gagguuucuauggagaccc

SEQ ID NO: 227102 - RNA, 19 nt, Artificial Sequence
  Description of Artificial Sequence: Synthetic oligonucleotide
auagacagagcuucaaagu

SEQ ID NO: 227103 - RNA, 19 nt, Artificial Sequence
  Description of Artificial Sequence: Synthetic oligonucleotide
auuguacagaaauaauccu

SEQ ID NO: 227104 - RNA, 19 nt, Artificial Sequence
  Description of Artificial Sequence: Synthetic oligonucleotide
uaagcuaacggugaaagua

SEQ ID NO: 227105 - RNA, 19 nt, Artificial Sequence
  Description of Artificial Sequence: Synthetic oligonucleotide
caagauuacacaaaauuaa

SEQ ID NO: 227106 - RNA, 19 nt, Artificial Sequence
  Description of Artificial Sequence: Synthetic oligonucleotide
agagccaaccaccaugauc

SEQ ID NO: 227107 - RNA, 19 nt, Artificial Sequence
  Description of Artificial Sequence: Synthetic oligonucleotide
uuaggacuuuaccaggccc

SEQ ID NO: 227108 - RNA, 19 nt, Artificial Sequence
  Description of Artificial Sequence: Synthetic oligonucleotide
uuaaggagcuacuuaggac

SEQ ID NO: 227109 - RNA, 19 nt, Artificial Sequence
  Description of Artificial Sequence: Synthetic oligonucleotide
uuuagugccgauccacagc

SEQ ID NO: 227110 - RNA, 19 nt, Artificial Sequence
  Description of Artificial Sequence: Synthetic oligonucleotide
uucugggugagauauggca

SEQ ID NO: 227111 - RNA, 19 nt, Artificial Sequence
  Description of Artificial Sequence: Synthetic oligonucleotide
aguaagaggcuuccguggg

SEQ ID NO: 227112 - RNA, 19 nt, Artificial Sequence
  Description of Artificial Sequence: Synthetic oligonucleotide
accauacugacuuuuaaaa

SEQ ID NO: 227113 - RNA, 19 nt, Artificial Sequence
  Description of Artificial Sequence: Synthetic oligonucleotide
auacaugccagacaagggu

SEQ ID NO: 227114 - RNA, 19 nt, Artificial Sequence
  Description of Artificial Sequence: Synthetic oligonucleotide
ugggagaccuguaauggag

SEQ ID NO: 227115 - RNA, 19 nt, Artificial Sequence
  Description of Artificial Sequence: Synthetic oligonucleotide
ccuaauuucacccagccug

SEQ ID NO: 227116 - RNA, 19 nt, Artificial Sequence
  Description of Artificial Sequence: Synthetic oligonucleotide
ugaugauuguguacaacac

SEQ ID NO: 227117 - RNA, 19 nt, Artificial Sequence
  Description of Artificial Sequence: Synthetic oligonucleotide
cuaauuucacccagccugg

SEQ ID NO: 227118 - RNA, 19 nt, Artificial Sequence
  Description of Artificial Sequence: Synthetic oligonucleotide
aacgccaucaugugguagu

SEQ ID NO: 227119 - RNA, 19 nt, Artificial Sequence
  Description of Artificial Sequence: Synthetic oligonucleotide
agaaaccugaccuuggcau

SEQ ID NO: 227120 - RNA, 19 nt, Artificial Sequence
  Description of Artificial Sequence: Synthetic oligonucleotide
agacuaaucuuacaggaau

SEQ ID NO: 227121 - RNA, 19 nt, Artificial Sequence
  Description of Artificial Sequence: Synthetic oligonucleotide
aacguuuuaucuucaggaa

SEQ ID NO: 227122 - RNA, 19 nt, Artificial Sequence
  Description of Artificial Sequence: Synthetic oligonucleotide
cuaauugaggagccaaagc

SEQ ID NO: 227123 - RNA, 19 nt, Artificial Sequence
  Description of Artificial Sequence: Synthetic oligonucleotide
gacugagugacaaaauagc

SEQ ID NO: 227124 - RNA, 19 nt, Artificial Sequence
  Description of Artificial Sequence: Synthetic oligonucleotide
caacguuuuaucuucagga

SEQ ID NO: 227125 - RNA, 19 nt, Artificial Sequence
  Description of Artificial Sequence: Synthetic oligonucleotide
agacagagcuucaaagucc

SEQ ID NO: 227126 - RNA, 19 nt, Artificial Sequence
  Description of Artificial Sequence: Synthetic oligonucleotide
caaagggaccuucacgucg

SEQ ID NO: 227127 - RNA, 19 nt, Artificial Sequence
  Description of Artificial Sequence: Synthetic oligonucleotide
uaggacuuuaccaggcccc

SEQ ID NO: 227128 - RNA, 19 nt, Artificial Sequence
  Description of Artificial Sequence: Synthetic oligonucleotide
uugaguuggaacccaguac

SEQ ID NO: 227129 - RNA, 19 nt, Artificial Sequence
  Description of Artificial Sequence: Synthetic oligonucleotide
gauuguguacaacacccac

SEQ ID NO: 227130 - RNA, 19 nt, Artificial Sequence
  Description of Artificial Sequence: Synthetic oligonucleotide
uccuucuauagguucacug

SEQ ID NO: 227131 - RNA, 19 nt, Artificial Sequence
  Description of Artificial Sequence: Synthetic oligonucleotide
ugauugcauccacauauug

SEQ ID NO: 227132 - RNA, 19 nt, Artificial Sequence
  Description of Artificial Sequence: Synthetic oligonucleotide
cagugaaggaauuguacag

SEQ ID NO: 227133 - RNA, 19 nt, Artificial Sequence
  Description of Artificial Sequence: Synthetic oligonucleotide
cugugaugcuaccuaaugg

SEQ ID NO: 227134 - RNA, 19 nt, Artificial Sequence
  Description of Artificial Sequence: Synthetic oligonucleotide
auacaugaccuucugcaug

SEQ ID NO: 227135 - RNA, 19 nt, Artificial Sequence
  Description of Artificial Sequence: Synthetic oligonucleotide
acaauaagacagcuaguca

SEQ ID NO: 227136 - RNA, 19 nt, Artificial Sequence
  Description of Artificial Sequence: Synthetic oligonucleotide
ccagacuuauuauacaugc

SEQ ID NO: 227137 - RNA, 19 nt, Artificial Sequence
  Description of Artificial Sequence: Synthetic oligonucleotide
aacggugaaaguacaucac

SEQ ID NO: 227138 - RNA, 19 nt, Artificial Sequence
  Description of Artificial Sequence: Synthetic oligonucleotide
guaguaagaggcuuccgug

SEQ ID NO: 227139 - RNA, 19 nt, Artificial Sequence
  Description of Artificial Sequence: Synthetic oligonucleotide
aagauuacacaaaauuaaa

SEQ ID NO: 227140 - RNA, 19 nt, Artificial Sequence
  Description of Artificial Sequence: Synthetic oligonucleotide
acccuuaacagauggcauc

SEQ ID NO: 227141 - RNA, 19 nt, Artificial Sequence
  Description of Artificial Sequence: Synthetic oligonucleotide
auaauucaaacaaccacug

SEQ ID NO: 227142 - RNA, 19 nt, Artificial Sequence
  Description of Artificial Sequence: Synthetic oligonucleotide
uucucucaacguuuuaucu

SEQ ID NO: 227143 - RNA, 19 nt, Artificial Sequence
  Description of Artificial Sequence: Synthetic oligonucleotide
cuaucuaucccuucccuuc

SEQ ID NO: 227144 - RNA, 19 nt, Artificial Sequence
  Description of Artificial Sequence: Synthetic oligonucleotide
uaaucaguauacuccacau

SEQ ID NO: 227145 - RNA, 19 nt, Artificial Sequence
  Description of Artificial Sequence: Synthetic oligonucleotide
cuuauacaugaccuucugc

SEQ ID NO: 227146 - RNA, 19 nt, Artificial Sequence
  Description of Artificial Sequence: Synthetic oligonucleotide
aaauacugcugugacccag

SEQ ID NO: 227147 - RNA, 19 nt, Artificial Sequence
  Description of Artificial Sequence: Synthetic oligonucleotide
ucuuuagugccgauccaca

SEQ ID NO: 227148 - RNA, 19 nt, Artificial Sequence
  Description of Artificial Sequence: Synthetic oligonucleotide
cagcuagucaagauuacac

SEQ ID NO: 227149 - RNA, 19 nt, Artificial Sequence
  Description of Artificial Sequence: Synthetic oligonucleotide
gaacugaacgcaugagcag

SEQ ID NO: 227150 - RNA, 19 nt, Artificial Sequence
  Description of Artificial Sequence: Synthetic oligonucleotide
aaugggaagagaauuucaa

SEQ ID NO: 227151 - RNA, 19 nt, Artificial Sequence
  Description of Artificial Sequence: Synthetic oligonucleotide
cagauggguggaaagaaac

SEQ ID NO: 227152 - RNA, 19 nt, Artificial Sequence
  Description of Artificial Sequence: Synthetic oligonucleotide
gcucacauagauuuaauca

SEQ ID NO: 227153 - RNA, 19 nt, Artificial Sequence
  Description of Artificial Sequence: Synthetic oligonucleotide
acccgugcuguccaaaggg

SEQ ID NO: 227154 - RNA, 19 nt, Artificial Sequence
  Description of Artificial Sequence: Synthetic oligonucleotide
uccgaaccugggauaaagg

SEQ ID NO: 227155 - RNA, 19 nt, Artificial Sequence
  Description of Artificial Sequence: Synthetic oligonucleotide
agggaaagcagcaauuaag

SEQ ID NO: 227156 - RNA, 19 nt, Artificial Sequence
  Description of Artificial Sequence: Synthetic oligonucleotide
auguucgaaacuuggauuu

SEQ ID NO: 227157 - RNA, 19 nt, Artificial Sequence
  Description of Artificial Sequence: Synthetic oligonucleotide
cagacaaggguaccguugg

SEQ ID NO: 227158 - RNA, 19 nt, Artificial Sequence
  Description of Artificial Sequence: Synthetic oligonucleotide
agcuagucaagauuacaca

SEQ ID NO: 227159 - RNA, 19 nt, Artificial Sequence
  Description of Artificial Sequence: Synthetic oligonucleotide
uugugaaagaaagugcauc

SEQ ID NO: 227160 - RNA, 19 nt, Artificial Sequence
  Description of Artificial Sequence: Synthetic oligonucleotide
auaaugugaucugaggcca

SEQ ID NO: 227161 - RNA, 19 nt, Artificial Sequence
  Description of Artificial Sequence: Synthetic oligonucleotide
aacccaguacacccaguag

SEQ ID NO: 227162 - RNA, 19 nt, Artificial Sequence
  Description of Artificial Sequence: Synthetic oligonucleotide
uucacgucgugcuuagucu

SEQ ID NO: 227163 - RNA, 19 nt, Artificial Sequence
  Description of Artificial Sequence: Synthetic oligonucleotide
ucgaaacuuggauuuauua

SEQ ID NO: 227164 - RNA, 19 nt, Artificial Sequence
  Description of Artificial Sequence: Synthetic oligonucleotide
cuaccuaaugggaagagaa

SEQ ID NO: 227165 - RNA, 19 nt, Artificial Sequence
  Description of Artificial Sequence: Synthetic oligonucleotide
guuuacugcuaaaacauca

SEQ ID NO: 227166 - RNA, 19 nt, Artificial Sequence
  Description of Artificial Sequence: Synthetic oligonucleotide
acugaaacgccaucaugug

SEQ ID NO: 227167 - RNA, 19 nt, Artificial Sequence
  Description of Artificial Sequence: Synthetic oligonucleotide
caguacacccaguaguaag

SEQ ID NO: 227168 - RNA, 19 nt, Artificial Sequence
  Description of Artificial Sequence: Synthetic oligonucleotide
uguccaaaacuuuccugug

SEQ ID NO: 227169 - RNA, 19 nt, Artificial Sequence
  Description of Artificial Sequence: Synthetic oligonucleotide
caaacaaccacuggacuac

SEQ ID NO: 227170 - RNA, 19 nt, Artificial Sequence
  Description of Artificial Sequence: Synthetic oligonucleotide
ugauuguguacaacaccca

SEQ ID NO: 227171 - RNA, 19 nt, Artificial Sequence
  Description of Artificial Sequence: Synthetic oligonucleotide
uggcauuuaucuaucuauc

SEQ ID NO: 227172 - RNA, 19 nt, Artificial Sequence
  Description of Artificial Sequence: Synthetic oligonucleotide
uguuuacugcuaaaacauc

SEQ ID NO: 227173 - RNA, 19 nt, Artificial Sequence
  Description of Artificial Sequence: Synthetic oligonucleotide
cugaaacgccaucaugugg

SEQ ID NO: 227174 - RNA, 19 nt, Artificial Sequence
  Description of Artificial Sequence: Synthetic oligonucleotide
acccaguacacccaguagu

SEQ ID NO: 227175 - RNA, 19 nt, Artificial Sequence
  Description of Artificial Sequence: Synthetic oligonucleotide
auugaguuggaacccagua

SEQ ID NO: 227176 - RNA, 19 nt, Artificial Sequence
  Description of Artificial Sequence: Synthetic oligonucleotide
ugugaucugaggccauaug

SEQ ID NO: 227177 - RNA, 19 nt, Artificial Sequence
  Description of Artificial Sequence: Synthetic oligonucleotide
gaacacuuauucccagggc

SEQ ID NO: 227178 - RNA, 19 nt, Artificial Sequence
  Description of Artificial Sequence: Synthetic oligonucleotide
uugauagacuaaucuuaca

SEQ ID NO: 227179 - RNA, 19 nt, Artificial Sequence
  Description of Artificial Sequence: Synthetic oligonucleotide
ugcucacauagauuuaauc

SEQ ID NO: 227180 - RNA, 19 nt, Artificial Sequence
  Description of Artificial Sequence: Synthetic oligonucleotide
cuucuaugagaaaggcagc

SEQ ID NO: 227181 - RNA, 19 nt, Artificial Sequence
  Description of Artificial Sequence: Synthetic oligonucleotide
cagacuuauuauacaugcc

SEQ ID NO: 227182 - RNA, 19 nt, Artificial Sequence
  Description of Artificial Sequence: Synthetic oligonucleotide
uuuaucuaucuaucccuuc

SEQ ID NO: 227183 - RNA, 19 nt, Artificial Sequence
  Description of Artificial Sequence: Synthetic oligonucleotide
gguggaaagaaaccugacc

SEQ ID NO: 227184 - RNA, 19 nt, Artificial Sequence
  Description of Artificial Sequence: Synthetic oligonucleotide
uggcaauguagcaaaguua

SEQ ID NO: 227185 - RNA, 19 nt, Artificial Sequence
  Description of Artificial Sequence: Synthetic oligonucleotide
ggugaaagugcuuucaaaa

SEQ ID NO: 227186 - RNA, 19 nt, Artificial Sequence
  Description of Artificial Sequence: Synthetic oligonucleotide
uauugaguuggaacccagu

SEQ ID NO: 227187 - RNA, 19 nt, Artificial Sequence
  Description of Artificial Sequence: Synthetic oligonucleotide
aauuaagcuaacggugaaa

SEQ ID NO: 227188 - RNA, 19 nt, Artificial Sequence
  Description of Artificial Sequence: Synthetic oligonucleotide
uggaacccaguacacccag

SEQ ID NO: 227189 - RNA, 19 nt, Artificial Sequence
  Description of Artificial Sequence: Synthetic oligonucleotide
acugagugacaaaauagca

SEQ ID NO: 227190 - RNA, 19 nt, Artificial Sequence
  Description of Artificial Sequence: Synthetic oligonucleotide
ucucucaacguuuuaucuu

SEQ ID NO: 227191 - RNA, 19 nt, Artificial Sequence
  Description of Artificial Sequence: Synthetic oligonucleotide
guuucuauggagacccgcc

SEQ ID NO: 227192 - RNA, 19 nt, Artificial Sequence
  Description of Artificial Sequence: Synthetic oligonucleotide
uuacugcuaaaacaucauu

SEQ ID NO: 227193 - RNA, 19 nt, Artificial Sequence
  Description of Artificial Sequence: Synthetic oligonucleotide
uacaacacccaccgcuccc

SEQ ID NO: 227194 - RNA, 19 nt, Artificial Sequence
  Description of Artificial Sequence: Synthetic oligonucleotide
cuaacggugaaaguacauc

SEQ ID NO: 227195 - RNA, 19 nt, Artificial Sequence
  Description of Artificial Sequence: Synthetic oligonucleotide
auuucucucaacguuuuau

SEQ ID NO: 227196 - RNA, 19 nt, Artificial Sequence
  Description of Artificial Sequence: Synthetic oligonucleotide
acuaaucuuacaggaauaa

SEQ ID NO: 227197 - RNA, 19 nt, Artificial Sequence
  Description of Artificial Sequence: Synthetic oligonucleotide
caugugguagucuucaugu

SEQ ID NO: 227198 - RNA, 19 nt, Artificial Sequence
  Description of Artificial Sequence: Synthetic oligonucleotide
ggacugagugacaaaauag

SEQ ID NO: 227199 - RNA, 19 nt, Artificial Sequence
  Description of Artificial Sequence: Synthetic oligonucleotide
agcauaauucaaacaacca

SEQ ID NO: 227200 - RNA, 19 nt, Artificial Sequence
  Description of Artificial Sequence: Synthetic oligonucleotide
caguccgcucuuuagugcc

SEQ ID NO: 227201 - RNA, 19 nt, Artificial Sequence
  Description of Artificial Sequence: Synthetic oligonucleotide
gacguggcaauguagcaaa

SEQ ID NO: 227202 - RNA, 19 nt, Artificial Sequence
  Description of Artificial Sequence: Synthetic oligonucleotide
uuccguggggcccaacuga

SEQ ID NO: 227203 - RNA, 19 nt, Artificial Sequence
  Description of Artificial Sequence: Synthetic oligonucleotide
aucuaucuaucccuucccu

SEQ ID NO: 227204 - RNA, 19 nt, Artificial Sequence
  Description of Artificial Sequence: Synthetic oligonucleotide
agacaaggguaccguuggc

SEQ ID NO: 227205 - RNA, 19 nt, Artificial Sequence
  Description of Artificial Sequence: Synthetic oligonucleotide
ucugagacguggcaaugua

SEQ ID NO: 227206 - RNA, 19 nt, Artificial Sequence
  Description of Artificial Sequence: Synthetic oligonucleotide
ugcccagucaaaccuaauu

SEQ ID NO: 227207 - RNA, 19 nt, Artificial Sequence
  Description of Artificial Sequence: Synthetic oligonucleotide
ggaaacuucccaaguaaag

SEQ ID NO: 227208 - RNA, 19 nt, Artificial Sequence
  Description of Artificial Sequence: Synthetic oligonucleotide
cuagucaagauuacacaaa

SEQ ID NO: 227209 - RNA, 19 nt, Artificial Sequence
  Description of Artificial Sequence: Synthetic oligonucleotide
cugagacguggcaauguag

SEQ ID NO: 227210 - RNA, 19 nt, Artificial Sequence
  Description of Artificial Sequence: Synthetic oligonucleotide
agaccuguaauggagugaa

SEQ ID NO: 227211 - RNA, 19 nt, Artificial Sequence
  Description of Artificial Sequence: Synthetic oligonucleotide
caacugaaacgccaucaug

SEQ ID NO: 227212 - RNA, 19 nt, Artificial Sequence
  Description of Artificial Sequence: Synthetic oligonucleotide
uaccuaaugggaagagaau

SEQ ID NO: 227213 - RNA, 19 nt, Artificial Sequence
  Description of Artificial Sequence: Synthetic oligonucleotide
gacccagacagaucugaac

SEQ ID NO: 227214 - RNA, 19 nt, Artificial Sequence
  Description of Artificial Sequence: Synthetic oligonucleotide
ucggccuccguguccaugc

SEQ ID NO: 227215 - RNA, 19 nt, Artificial Sequence
  Description of Artificial Sequence: Synthetic oligonucleotide
caccucagagaggaaaagg

SEQ ID NO: 227216 - RNA, 19 nt, Artificial Sequence
  Description of Artificial Sequence: Synthetic oligonucleotide
gcagcaauuaaggagcuac

SEQ ID NO: 227217 - RNA, 19 nt, Artificial Sequence
  Description of Artificial Sequence: Synthetic oligonucleotide
uggggcccaacugaaacgc

SEQ ID NO: 227218 - RNA, 19 nt, Artificial Sequence
  Description of Artificial Sequence: Synthetic oligonucleotide
accaacagcggaacucccc

SEQ ID NO: 227219 - RNA, 19 nt, Artificial Sequence
  Description of Artificial Sequence: Synthetic oligonucleotide
aaacgccaucaugugguag

SEQ ID NO: 227220 - RNA, 19 nt, Artificial Sequence
  Description of Artificial Sequence: Synthetic oligonucleotide
guuggcagacgcuccuggg

SEQ ID NO: 227221 - RNA, 19 nt, Artificial Sequence
  Description of Artificial Sequence: Synthetic oligonucleotide
accuaaugggaagagaauu

SEQ ID NO: 227222 - RNA, 19 nt, Artificial Sequence
  Description of Artificial Sequence: Synthetic oligonucleotide
aguacacccaguaguaaga

SEQ ID NO: 227223 - RNA, 19 nt, Artificial Sequence
  Description of Artificial Sequence: Synthetic oligonucleotide
gacagagcuucaaagucca

SEQ ID NO: 227224 - RNA, 19 nt, Artificial Sequence
  Description of Artificial Sequence: Synthetic oligonucleotide
gcccagucaaaccuaauug

SEQ ID NO: 227225 - RNA, 19 nt, Artificial Sequence
  Description of Artificial Sequence: Synthetic oligonucleotide
agccccuaauuucacccag

SEQ ID NO: 227226 - RNA, 19 nt, Artificial Sequence
  Description of Artificial Sequence: Synthetic oligonucleotide
aauacucaccaaaguccug

SEQ ID NO: 227227 - RNA, 19 nt, Artificial Sequence
  Description of Artificial Sequence: Synthetic oligonucleotide
uucgaaacuuggauuuauu

SEQ ID NO: 227228 - RNA, 19 nt, Artificial Sequence
  Description of Artificial Sequence: Synthetic oligonucleotide
gcuagucaagauuacacaa

SEQ ID NO: 227229 - RNA, 19 nt, Artificial Sequence
  Description of Artificial Sequence: Synthetic oligonucleotide
guggcuacaugaugacaag

SEQ ID NO: 227230 - RNA, 19 nt, Artificial Sequence
  Description of Artificial Sequence: Synthetic oligonucleotide
uguguacaacacccaccgc

SEQ ID NO: 227231 - RNA, 19 nt, Artificial Sequence
  Description of Artificial Sequence: Synthetic oligonucleotide
cauccuugcccagucaaac

SEQ ID NO: 227232 - RNA, 19 nt, Artificial Sequence
  Description of Artificial Sequence: Synthetic oligonucleotide
ggugaaaguacaucaccuc

SEQ ID NO: 227233 - RNA, 19 nt, Artificial Sequence
  Description of Artificial Sequence: Synthetic oligonucleotide
caugaugauuguguacaac

SEQ ID NO: 227234 - RNA, 19 nt, Artificial Sequence
  Description of Artificial Sequence: Synthetic oligonucleotide
gaccuuggcauuuaucuau

SEQ ID NO: 227235 - RNA, 19 nt, Artificial Sequence
  Description of Artificial Sequence: Synthetic oligonucleotide
gacaaggguaccguuggca

SEQ ID NO: 227236 - RNA, 19 nt, Artificial Sequence
  Description of Artificial Sequence: Synthetic oligonucleotide
auauugaguuggaacccag

SEQ ID NO: 227237 - RNA, 19 nt, Artificial Sequence
  Description of Artificial Sequence: Synthetic oligonucleotide
ugcuaccuaaugggaagag

SEQ ID NO: 227238 - RNA, 19 nt, Artificial Sequence
  Description of Artificial Sequence: Synthetic oligonucleotide
ugcugugacccagacagau

SEQ ID NO: 227239 - RNA, 19 nt, Artificial Sequence
  Description of Artificial Sequence: Synthetic oligonucleotide
gaacccaguacacccagua

SEQ ID NO: 227240 - RNA, 19 nt, Artificial Sequence
  Description of Artificial Sequence: Synthetic oligonucleotide
uccaccauacugacuuuua

SEQ ID NO: 227241 - RNA, 19 nt, Artificial Sequence
  Description of Artificial Sequence: Synthetic oligonucleotide
cuagcuuaaaagugagucu

SEQ ID NO: 227242 - RNA, 19 nt, Artificial Sequence
  Description of Artificial Sequence: Synthetic oligonucleotide
gcugcuucguccuccacgc

SEQ ID NO: 227243 - RNA, 19 nt, Artificial Sequence
  Description of Artificial Sequence: Synthetic oligonucleotide
ucggaacccgugcugucca

SEQ ID NO: 227244 - RNA, 19 nt, Artificial Sequence
  Description of Artificial Sequence: Synthetic oligonucleotide
accggugauuuuaaguuca

SEQ ID NO: 227245 - RNA, 19 nt, Artificial Sequence
  Description of Artificial Sequence: Synthetic oligonucleotide
ucuaucccuucccuucuua

SEQ ID NO: 227246 - RNA, 19 nt, Artificial Sequence
  Description of Artificial Sequence: Synthetic oligonucleotide
gagauauggcaacuuuucu

SEQ ID NO: 227247 - RNA, 19 nt, Artificial Sequence
  Description of Artificial Sequence: Synthetic oligonucleotide
aaaccugaccuuggcauuu

SEQ ID NO: 227248 - RNA, 19 nt, Artificial Sequence
  Description of Artificial Sequence: Synthetic oligonucleotide
cuccgaaccugggauaaag

SEQ ID NO: 227249 - RNA, 19 nt, Artificial Sequence
  Description of Artificial Sequence: Synthetic oligonucleotide
uucugagacguggcaaugu

SEQ ID NO: 227250 - RNA, 19 nt, Artificial Sequence
  Description of Artificial Sequence: Synthetic oligonucleotide
gucgugcuuagucuuguuc

SEQ ID NO: 227251 - RNA, 19 nt, Artificial Sequence
  Description of Artificial Sequence: Synthetic oligonucleotide
cuauccgcaaagcccacca

SEQ ID NO: 227252 - RNA, 19 nt, Artificial Sequence
  Description of Artificial Sequence: Synthetic oligonucleotide
agcaauuaaggagcuacuu

SEQ ID NO: 227253 - RNA, 19 nt, Artificial Sequence
  Description of Artificial Sequence: Synthetic oligonucleotide
ugaccgaggccugagccac

SEQ ID NO: 227254 - RNA, 19 nt, Artificial Sequence
  Description of Artificial Sequence: Synthetic oligonucleotide
agaccaaauggagaagcau

SEQ ID NO: 227255 - RNA, 19 nt, Artificial Sequence
  Description of Artificial Sequence: Synthetic oligonucleotide
accaugaucuuggcuccac

SEQ ID NO: 227256 - RNA, 19 nt, Artificial Sequence
  Description of Artificial Sequence: Synthetic oligonucleotide
caccauacugacuuuuaaa

SEQ ID NO: 227257 - RNA, 19 nt, Artificial Sequence
  Description of Artificial Sequence: Synthetic oligonucleotide
guacaacacccaccgcucc

SEQ ID NO: 227258 - RNA, 19 nt, Artificial Sequence
  Description of Artificial Sequence: Synthetic oligonucleotide
ucccuccagacuuauuaua

SEQ ID NO: 227259 - RNA, 19 nt, Artificial Sequence
  Description of Artificial Sequence: Synthetic oligonucleotide
uaaugugaucugaggccau

SEQ ID NO: 227260 - RNA, 19 nt, Artificial Sequence
  Description of Artificial Sequence: Synthetic oligonucleotide
cuuuggcccucuuaaggga

SEQ ID NO: 227261 - RNA, 19 nt, Artificial Sequence
  Description of Artificial Sequence: Synthetic oligonucleotide
aaacaaccacuggacuacu

SEQ ID NO: 227262 - RNA, 19 nt, Artificial Sequence
  Description of Artificial Sequence: Synthetic oligonucleotide
augggagaacagcccuuuc

SEQ ID NO: 227263 - RNA, 19 nt, Artificial Sequence
  Description of Artificial Sequence: Synthetic oligonucleotide
aagugcauccuugcccagu

SEQ ID NO: 227264 - RNA, 19 nt, Artificial Sequence
  Description of Artificial Sequence: Synthetic oligonucleotide
ucgccguugcugaccgagg

SEQ ID NO: 227265 - RNA, 19 nt, Artificial Sequence
  Description of Artificial Sequence: Synthetic oligonucleotide
cauauugaguuggaaccca

SEQ ID NO: 227266 - RNA, 19 nt, Artificial Sequence
  Description of Artificial Sequence: Synthetic oligonucleotide
gacuaaucuuacaggaaua

SEQ ID NO: 227267 - RNA, 19 nt, Artificial Sequence
  Description of Artificial Sequence: Synthetic oligonucleotide
ucgguggcuacaugaugac

SEQ ID NO: 227268 - RNA, 19 nt, Artificial Sequence
  Description of Artificial Sequence: Synthetic oligonucleotide
uaauuucacccagccuggc

SEQ ID NO: 227269 - RNA, 19 nt, Artificial Sequence
  Description of Artificial Sequence: Synthetic oligonucleotide
ccuucuauagguucacuga

SEQ ID NO: 227270 - RNA, 19 nt, Artificial Sequence
  Description of Artificial Sequence: Synthetic oligonucleotide
cucgccguugcugaccgag

SEQ ID NO: 227271 - RNA, 19 nt, Artificial Sequence
  Description of Artificial Sequence: Synthetic oligonucleotide
cuuccguggggcccaacug

SEQ ID NO: 227272 - RNA, 19 nt, Artificial Sequence
  Description of Artificial Sequence: Synthetic oligonucleotide
ccuaauugaggagccaaag

SEQ ID NO: 227273 - RNA, 19 nt, Artificial Sequence
  Description of Artificial Sequence: Synthetic oligonucleotide
ccugccacgcuuuagcauc

SEQ ID NO: 227274 - RNA, 19 nt, Artificial Sequence
  Description of Artificial Sequence: Synthetic oligonucleotide
guaagcugacugcaagaaa

SEQ ID NO: 227275 - RNA, 19 nt, Artificial Sequence
  Description of Artificial Sequence: Synthetic oligonucleotide
agauugaauaguagauuuu

SEQ ID NO: 227276 - RNA, 19 nt, Artificial Sequence
  Description of Artificial Sequence: Synthetic oligonucleotide
caguauacuccacauggua

SEQ ID NO: 227277 - RNA, 19 nt, Artificial Sequence
  Description of Artificial Sequence: Synthetic oligonucleotide
cugcaugcccucucauuug

SEQ ID NO: 227278 - RNA, 19 nt, Artificial Sequence
  Description of Artificial Sequence: Synthetic oligonucleotide
uccguggggcccaacugaa

SEQ ID NO: 227279 - RNA, 19 nt, Artificial Sequence
  Description of Artificial Sequence: Synthetic oligonucleotide
ggaucagucuccugggcca

SEQ ID NO: 227280 - RNA, 19 nt, Artificial Sequence
  Description of Artificial Sequence: Synthetic oligonucleotide
guaccguuggcagacgcuc

SEQ ID NO: 227281 - RNA, 19 nt, Artificial Sequence
  Description of Artificial Sequence: Synthetic oligonucleotide
cagaggugaaagugcuuuc

SEQ ID NO: 227282 - RNA, 19 nt, Artificial Sequence
  Description of Artificial Sequence: Synthetic oligonucleotide
cgcucuuuagugccgaucc

SEQ ID NO: 227283 - RNA, 19 nt, Artificial Sequence
  Description of Artificial Sequence: Synthetic oligonucleotide
cuaaucuuacaggaauaaa

SEQ ID NO: 227284 - RNA, 19 nt, Artificial Sequence
  Description of Artificial Sequence: Synthetic oligonucleotide
cgaaccugggauaaaggac

SEQ ID NO: 227285 - RNA, 19 nt, Artificial Sequence
  Description of Artificial Sequence: Synthetic oligonucleotide
uaguagagccaaccaccau

SEQ ID NO: 227286 - RNA, 19 nt, Artificial Sequence
  Description of Artificial Sequence: Synthetic oligonucleotide
agcuuaaaagugagucuca

SEQ ID NO: 227287 - RNA, 19 nt, Artificial Sequence
  Description of Artificial Sequence: Synthetic oligonucleotide
cauguucgaaacuuggauu

SEQ ID NO: 227288 - RNA, 19 nt, Artificial Sequence
  Description of Artificial Sequence: Synthetic oligonucleotide
uguucgaaacuuggauuua

SEQ ID NO: 227289 - RNA, 19 nt, Artificial Sequence
  Description of Artificial Sequence: Synthetic oligonucleotide
ucuuagcuccuggcaaaga

SEQ ID NO: 227290 - RNA, 19 nt, Artificial Sequence
  Description of Artificial Sequence: Synthetic oligonucleotide
gcucuagcuuaaaagugag

SEQ ID NO: 227291 - RNA, 19 nt, Artificial Sequence
  Description of Artificial Sequence: Synthetic oligonucleotide
gugaugcuaccuaauggga

SEQ ID NO: 227292 - RNA, 19 nt, Artificial Sequence
  Description of Artificial Sequence: Synthetic oligonucleotide
cacgucgugcuuagucuug

SEQ ID NO: 227293 - RNA, 19 nt, Artificial Sequence
  Description of Artificial Sequence: Synthetic oligonucleotide
gcaacagccccuaauuuca

SEQ ID NO: 227294 - RNA, 19 nt, Artificial Sequence
  Description of Artificial Sequence: Synthetic oligonucleotide
gguuucuauggagacccgc

SEQ ID NO: 227295 - RNA, 19 nt, Artificial Sequence
  Description of Artificial Sequence: Synthetic oligonucleotide
gugggagaccuguaaugga

SEQ ID NO: 227296 - RNA, 19 nt, Artificial Sequence
  Description of Artificial Sequence: Synthetic oligonucleotide
acaugguaagaaauauaua

SEQ ID NO: 227297 - RNA, 19 nt, Artificial Sequence
  Description of Artificial Sequence: Synthetic oligonucleotide
uggcccucuuaagggaaag

SEQ ID NO: 227298 - RNA, 19 nt, Artificial Sequence
  Description of Artificial Sequence: Synthetic oligonucleotide
uauccgcaaagcccaccau

SEQ ID NO: 227299 - RNA, 19 nt, Artificial Sequence
  Description of Artificial Sequence: Synthetic oligonucleotide
cacuuauucccagggcuuc

SEQ ID NO: 227300 - RNA, 19 nt, Artificial Sequence
  Description of Artificial Sequence: Synthetic oligonucleotide
aucuccgaaccugggauaa

SEQ ID NO: 227301 - RNA, 19 nt, Artificial Sequence
  Description of Artificial Sequence: Synthetic oligonucleotide
acgccaucaugugguaguc

SEQ ID NO: 227302 - RNA, 19 nt, Artificial Sequence
  Description of Artificial Sequence: Synthetic oligonucleotide
cacaaugcuccuccaggca

SEQ ID NO: 227303 - RNA, 19 nt, Artificial Sequence
  Description of Artificial Sequence: Synthetic oligonucleotide
augcuaccuaaugggaaga

SEQ ID NO: 227304 - RNA, 19 nt, Artificial Sequence
  Description of Artificial Sequence: Synthetic oligonucleotide
ccuuucgguggcuacauga

SEQ ID NO: 227305 - RNA, 19 nt, Artificial Sequence
  Description of Artificial Sequence: Synthetic oligonucleotide
ccuuauacaugaccuucug

SEQ ID NO: 227306 - RNA, 19 nt, Artificial Sequence
  Description of Artificial Sequence: Synthetic oligonucleotide
ugccauccggggcuccggc

SEQ ID NO: 227307 - RNA, 19 nt, Artificial Sequence
  Description of Artificial Sequence: Synthetic oligonucleotide
augacaagccuaggagccu

SEQ ID NO: 227308 - RNA, 19 nt, Artificial Sequence
  Description of Artificial Sequence: Synthetic oligonucleotide
aggacuuuaccaggcccca

SEQ ID NO: 227309 - RNA, 19 nt, Artificial Sequence
  Description of Artificial Sequence: Synthetic oligonucleotide
caaggguaccguuggcaga

SEQ ID NO: 227310 - RNA, 19 nt, Artificial Sequence
  Description of Artificial Sequence: Synthetic oligonucleotide
ugccucgcgcgucgcagga

SEQ ID NO: 227311 - RNA, 19 nt, Artificial Sequence
  Description of Artificial Sequence: Synthetic oligonucleotide
aguccgcucuuuagugccg

SEQ ID NO: 227312 - RNA, 19 nt, Artificial Sequence
  Description of Artificial Sequence: Synthetic oligonucleotide
ugcagaccucucccggcaa

SEQ ID NO: 227313 - RNA, 19 nt, Artificial Sequence
  Description of Artificial Sequence: Synthetic oligonucleotide
ugccgauccacagcugguc

SEQ ID NO: 227314 - RNA, 19 nt, Artificial Sequence
  Description of Artificial Sequence: Synthetic oligonucleotide
gaaacgccaucauguggua

SEQ ID NO: 227315 - RNA, 19 nt, Artificial Sequence
  Description of Artificial Sequence: Synthetic oligonucleotide
cccagacagaucugaacac

SEQ ID NO: 227316 - RNA, 19 nt, Artificial Sequence
  Description of Artificial Sequence: Synthetic oligonucleotide
uucguccuccacgcaguug

SEQ ID NO: 227317 - RNA, 19 nt, Artificial Sequence
  Description of Artificial Sequence: Synthetic oligonucleotide
gcuacaugaugacaagccu

SEQ ID NO: 227318 - RNA, 19 nt, Artificial Sequence
  Description of Artificial Sequence: Synthetic oligonucleotide
gcauguucgaaacuuggau

SEQ ID NO: 227319 - RNA, 19 nt, Artificial Sequence
  Description of Artificial Sequence: Synthetic oligonucleotide
ccgaaccugggauaaagga

SEQ ID NO: 227320 - RNA, 19 nt, Artificial Sequence
  Description of Artificial Sequence: Synthetic oligonucleotide
cccaguaguaagaggcuuc

SEQ ID NO: 227321 - RNA, 19 nt, Artificial Sequence
  Description of Artificial Sequence: Synthetic oligonucleotide
accuaauugaggagccaaa

SEQ ID NO: 227322 - RNA, 19 nt, Artificial Sequence
  Description of Artificial Sequence: Synthetic oligonucleotide
gagcuacuuaggacuuuac

SEQ ID NO: 227323 - RNA, 19 nt, Artificial Sequence
  Description of Artificial Sequence: Synthetic oligonucleotide
cgcaacagccccuaauuuc

SEQ ID NO: 227324 - RNA, 19 nt, Artificial Sequence
  Description of Artificial Sequence: Synthetic oligonucleotide
accgaggccugagccacag

SEQ ID NO: 227325 - RNA, 19 nt, Artificial Sequence
  Description of Artificial Sequence: Synthetic oligonucleotide
uugcccagucaaaccuaau

SEQ ID NO: 227326 - RNA, 19 nt, Artificial Sequence
  Description of Artificial Sequence: Synthetic oligonucleotide
agaccucucccggcaaugu

SEQ ID NO: 227327 - RNA, 19 nt, Artificial Sequence
  Description of Artificial Sequence: Synthetic oligonucleotide
uagagccaaccaccaugau

SEQ ID NO: 227328 - RNA, 19 nt, Artificial Sequence
  Description of Artificial Sequence: Synthetic oligonucleotide
agcuauccgcaaagcccac

SEQ ID NO: 227329 - RNA, 19 nt, Artificial Sequence
  Description of Artificial Sequence: Synthetic oligonucleotide
ucgcgcgucgcaggagucc

SEQ ID NO: 227330 - RNA, 19 nt, Artificial Sequence
  Description of Artificial Sequence: Synthetic oligonucleotide
agguuucuauggagacccg

SEQ ID NO: 227331 - RNA, 19 nt, Artificial Sequence
  Description of Artificial Sequence: Synthetic oligonucleotide
ccacuggacuacuuaagga

SEQ ID NO: 227332 - RNA, 19 nt, Artificial Sequence
  Description of Artificial Sequence: Synthetic oligonucleotide
guugugaaagaaagugcau

SEQ ID NO: 227333 - RNA, 19 nt, Artificial Sequence
  Description of Artificial Sequence: Synthetic oligonucleotide
gcagcccuacagaagggcc

SEQ ID NO: 227334 - RNA, 19 nt, Artificial Sequence
  Description of Artificial Sequence: Synthetic oligonucleotide
acgucgugcuuagucuugu

SEQ ID NO: 227335 - RNA, 19 nt, Artificial Sequence
  Description of Artificial Sequence: Synthetic oligonucleotide
uagguucacugaccacguu

SEQ ID NO: 227336 - RNA, 19 nt, Artificial Sequence
  Description of Artificial Sequence: Synthetic oligonucleotide
caacacccaccgcucccgc

SEQ ID NO: 227337 - RNA, 19 nt, Artificial Sequence
  Description of Artificial Sequence: Synthetic oligonucleotide
gccggaaacagguggaggu

SEQ ID NO: 227338 - RNA, 19 nt, Artificial Sequence
  Description of Artificial Sequence: Synthetic oligonucleotide
aggccccaacuauguccac

SEQ ID NO: 227339 - RNA, 19 nt, Artificial Sequence
  Description of Artificial Sequence: Synthetic oligonucleotide
cugcagaccucucccggca

SEQ ID NO: 227340 - RNA, 19 nt, Artificial Sequence
  Description of Artificial Sequence: Synthetic oligonucleotide
gaccuucacgucgugcuua

SEQ ID NO: 227341 - RNA, 19 nt, Artificial Sequence
  Description of Artificial Sequence: Synthetic oligonucleotide
ccggccgccgccaugauga

SEQ ID NO: 227342 - RNA, 19 nt, Artificial Sequence
  Description of Artificial Sequence: Synthetic oligonucleotide
ccauauggcaagccagcuc

SEQ ID NO: 227343 - RNA, 19 nt, Artificial Sequence
  Description of Artificial Sequence: Synthetic oligonucleotide
gugagauauggcaacuuuu

SEQ ID NO: 227344 - RNA, 19 nt, Artificial Sequence
  Description of Artificial Sequence: Synthetic oligonucleotide
acaagccuaggagccugca

SEQ ID NO: 227345 - RNA, 19 nt, Artificial Sequence
  Description of Artificial Sequence: Synthetic oligonucleotide
cagccccuaauuucaccca

SEQ ID NO: 227346 - RNA, 19 nt, Artificial Sequence
  Description of Artificial Sequence: Synthetic oligonucleotide
gaugggagaacagcccuuu

SEQ ID NO: 227347 - RNA, 19 nt, Artificial Sequence
  Description of Artificial Sequence: Synthetic oligonucleotide
gucgccgccgccgccgccg

SEQ ID NO: 227348 - RNA, 19 nt, Artificial Sequence
  Description of Artificial Sequence: Synthetic oligonucleotide
gcuaccuaaugggaagaga

SEQ ID NO: 227349 - RNA, 19 nt, Artificial Sequence
  Description of Artificial Sequence: Synthetic oligonucleotide
guucgaaacuuggauuuau

SEQ ID NO: 227350 - RNA, 19 nt, Artificial Sequence
  Description of Artificial Sequence: Synthetic oligonucleotide
cuggacuacuuaaggaguu

SEQ ID NO: 227351 - RNA, 19 nt, Artificial Sequence
  Description of Artificial Sequence: Synthetic oligonucleotide
ccaacagcggaacucccca

SEQ ID NO: 227352 - RNA, 19 nt, Artificial Sequence
  Description of Artificial Sequence: Synthetic oligonucleotide
cauccggggcuccggccgc

SEQ ID NO: 227353 - RNA, 19 nt, Artificial Sequence
  Description of Artificial Sequence: Synthetic oligonucleotide
cagcaauuaaggagcuacu

SEQ ID NO: 227354 - RNA, 19 nt, Artificial Sequence
  Description of Artificial Sequence: Synthetic oligonucleotide
auauggcaagccagcuccu

SEQ ID NO: 227355 - RNA, 19 nt, Artificial Sequence
  Description of Artificial Sequence: Synthetic oligonucleotide
caucuccgaaccugggaua

SEQ ID NO: 227356 - RNA, 19 nt, Artificial Sequence
  Description of Artificial Sequence: Synthetic oligonucleotide
caccuguagaugggagaac

SEQ ID NO: 227357 - RNA, 19 nt, Artificial Sequence
  Description of Artificial Sequence: Synthetic oligonucleotide
gcaucuccgaaccugggau

SEQ ID NO: 227358 - RNA, 19 nt, Artificial Sequence
  Description of Artificial Sequence: Synthetic oligonucleotide
cacccaccgcucccgcagg

SEQ ID NO: 227359 - RNA, 19 nt, Artificial Sequence
  Description of Artificial Sequence: Synthetic oligonucleotide
acguggcaauguagcaaag

SEQ ID NO: 227360 - RNA, 19 nt, Artificial Sequence
  Description of Artificial Sequence: Synthetic oligonucleotide
ccucucauuugacagugaa

SEQ ID NO: 227361 - RNA, 19 nt, Artificial Sequence
  Description of Artificial Sequence: Synthetic oligonucleotide
cucuagcuuaaaagugagu

SEQ ID NO: 227362 - RNA, 19 nt, Artificial Sequence
  Description of Artificial Sequence: Synthetic oligonucleotide
ggcacccuuaacagauggc

SEQ ID NO: 227363 - RNA, 19 nt, Artificial Sequence
  Description of Artificial Sequence: Synthetic oligonucleotide
agcccaccaugaauuaaaa

SEQ ID NO: 227364 - RNA, 19 nt, Artificial Sequence
  Description of Artificial Sequence: Synthetic oligonucleotide
cuucuggcgcugccugguc

SEQ ID NO: 227365 - RNA, 19 nt, Artificial Sequence
  Description of Artificial Sequence: Synthetic oligonucleotide
ucuccgaaccugggauaaa

SEQ ID NO: 227366 - RNA, 19 nt, Artificial Sequence
  Description of Artificial Sequence: Synthetic oligonucleotide
cccuuaacagauggcauca

SEQ ID NO: 227367 - RNA, 19 nt, Artificial Sequence
  Description of Artificial Sequence: Synthetic oligonucleotide
cacccuuaacagauggcau

SEQ ID NO: 227368 - RNA, 19 nt, Artificial Sequence
  Description of Artificial Sequence: Synthetic oligonucleotide
gugugugaacaaaguccca

SEQ ID NO: 227369 - RNA, 19 nt, Artificial Sequence
  Description of Artificial Sequence: Synthetic oligonucleotide
uccgcucuuuagugccgau

SEQ ID NO: 227370 - RNA, 19 nt, Artificial Sequence
  Description of Artificial Sequence: Synthetic oligonucleotide
gccgccaugaugauugugu

SEQ ID NO: 227371 - RNA, 19 nt, Artificial Sequence
  Description of Artificial Sequence: Synthetic oligonucleotide
cucgcgcgucgcaggaguc

SEQ ID NO: 227372 - RNA, 19 nt, Artificial Sequence
  Description of Artificial Sequence: Synthetic oligonucleotide
cacccaguaguaagaggcu

SEQ ID NO: 227373 - RNA, 19 nt, Artificial Sequence
  Description of Artificial Sequence: Synthetic oligonucleotide
acgcaguugaggggccgug

SEQ ID NO: 227374 - RNA, 19 nt, Artificial Sequence
  Description of Artificial Sequence: Synthetic oligonucleotide
gcuauccgcaaagcccacc

SEQ ID NO: 227375 - RNA, 19 nt, Artificial Sequence
  Description of Artificial Sequence: Synthetic oligonucleotide
gccaucaugugguagucuu

SEQ ID NO: 227376 - RNA, 19 nt, Artificial Sequence
  Description of Artificial Sequence: Synthetic oligonucleotide
gcucuuuagugccgaucca

SEQ ID NO: 227377 - RNA, 19 nt, Artificial Sequence
  Description of Artificial Sequence: Synthetic oligonucleotide
cccaguacacccaguagua

SEQ ID NO: 227378 - RNA, 19 nt, Artificial Sequence
  Description of Artificial Sequence: Synthetic oligonucleotide
gccaacuccaagagcucac

SEQ ID NO: 227379 - RNA, 19 nt, Artificial Sequence
  Description of Artificial Sequence: Synthetic oligonucleotide
gggcccaacugaaacgcca

SEQ ID NO: 227380 - RNA, 19 nt, Artificial Sequence
  Description of Artificial Sequence: Synthetic oligonucleotide
ggggaguuucucaguccgc

SEQ ID NO: 227381 - RNA, 19 nt, Artificial Sequence
  Description of Artificial Sequence: Synthetic oligonucleotide
gccccuaauuucacccagc

SEQ ID NO: 227382 - RNA, 19 nt, Artificial Sequence
  Description of Artificial Sequence: Synthetic oligonucleotide
ccaccauacugacuuuuaa

SEQ ID NO: 227383 - RNA, 19 nt, Artificial Sequence
  Description of Artificial Sequence: Synthetic oligonucleotide
cugaacgcaugagcagaaa

SEQ ID NO: 227384 - RNA, 19 nt, Artificial Sequence
  Description of Artificial Sequence: Synthetic oligonucleotide
cggugaaaguacaucaccu

SEQ ID NO: 227385 - RNA, 19 nt, Artificial Sequence
  Description of Artificial Sequence: Synthetic oligonucleotide
ggccccaacuauguccaca

SEQ ID NO: 227386 - RNA, 19 nt, Artificial Sequence
  Description of Artificial Sequence: Synthetic oligonucleotide
gcuuccguggggcccaacu

SEQ ID NO: 227387 - RNA, 19 nt, Artificial Sequence
  Description of Artificial Sequence: Synthetic oligonucleotide
gccauccggggcuccggcc

SEQ ID NO: 227388 - RNA, 19 nt, Artificial Sequence
  Description of Artificial Sequence: Synthetic oligonucleotide
cccuuauacaugaccuucu

SEQ ID NO: 227389 - RNA, 19 nt, Artificial Sequence
  Description of Artificial Sequence: Synthetic oligonucleotide
ggggcccaacugaaacgcc

SEQ ID NO: 227390 - RNA, 19 nt, Artificial Sequence
  Description of Artificial Sequence: Synthetic oligonucleotide
ccgccgggaagaagcgagc

SEQ ID NO: 227391 - RNA, 19 nt, Artificial Sequence
  Description of Artificial Sequence: Synthetic oligonucleotide
ucgccgccgccgccgccgc

SEQ ID NO: 227392 - RNA, 19 nt, Artificial Sequence
  Description of Artificial Sequence: Synthetic oligonucleotide
gccgauccacagcuggucu

SEQ ID NO: 227393 - RNA, 19 nt, Artificial Sequence
  Description of Artificial Sequence: Synthetic oligonucleotide
cccuacagaagggccacca

SEQ ID NO: 227394 - RNA, 19 nt, Artificial Sequence
  Description of Artificial Sequence: Synthetic oligonucleotide
gcuaacggugaaaguacau

SEQ ID NO: 227395 - RNA, 19 nt, Artificial Sequence
  Description of Artificial Sequence: Synthetic oligonucleotide
ccaacugaaacgccaucau

SEQ ID NO: 227396 - RNA, 19 nt, Artificial Sequence
  Description of Artificial Sequence: Synthetic oligonucleotide
ggccgugcgggcgccucgg

SEQ ID NO: 227397 - RNA, 19 nt, Artificial Sequence
  Description of Artificial Sequence: Synthetic oligonucleotide
ccuugcccagucaaaccua

SEQ ID NO: 227398 - RNA, 19 nt, Artificial Sequence
  Description of Artificial Sequence: Synthetic oligonucleotide
gccauauggcaagccagcu

SEQ ID NO: 227399 - RNA, 19 nt, Artificial Sequence
  Description of Artificial Sequence: Synthetic oligonucleotide
cugcuucguccuccacgca

SEQ ID NO: 227400 - RNA, 19 nt, Artificial Sequence
  Description of Artificial Sequence: Synthetic oligonucleotide
gugccgauccacagcuggu

SEQ ID NO: 227401 - RNA, 19 nt, Artificial Sequence
  Description of Artificial Sequence: Synthetic oligonucleotide
gcccaccaugaauuaaaau

SEQ ID NO: 227402 - RNA, 19 nt, Artificial Sequence
  Description of Artificial Sequence: Synthetic oligonucleotide
gaccgaggccugagccaca

SEQ ID NO: 227403 - RNA, 19 nt, Artificial Sequence
  Description of Artificial Sequence: Synthetic oligonucleotide
ccgcucuuuagugccgauc

SEQ ID NO: 227404 - RNA, 19 nt, Artificial Sequence
  Description of Artificial Sequence: Synthetic oligonucleotide
ccgccaugaugauugugua

SEQ ID NO: 227405 - RNA, 19 nt, Artificial Sequence
  Description of Artificial Sequence: Synthetic oligonucleotide
ccaguacacccaguaguaa

SEQ ID NO: 227406 - RNA, 19 nt, Artificial Sequence
  Description of Artificial Sequence: Synthetic oligonucleotide
cccuuucgguggcuacaug

SEQ ID NO: 227407 - RNA, 19 nt, Artificial Sequence
  Description of Artificial Sequence: Synthetic oligonucleotide
gaccuguaauggagugaau

SEQ ID NO: 227408 - RNA, 19 nt, Artificial Sequence
  Description of Artificial Sequence: Synthetic oligonucleotide
cccgcaacagccccuaauu

SEQ ID NO: 227409 - RNA, 19 nt, Artificial Sequence
  Description of Artificial Sequence: Synthetic oligonucleotide
ggacuuuaccaggccccaa

SEQ ID NO: 227410 - RNA, 19 nt, Artificial Sequence
  Description of Artificial Sequence: Synthetic oligonucleotide
ccguugcugaccgaggccu

SEQ ID NO: 227411 - RNA, 19 nt, Artificial Sequence
  Description of Artificial Sequence: Synthetic oligonucleotide
gccuggccggaaacaggug

SEQ ID NO: 227412 - RNA, 19 nt, Artificial Sequence
  Description of Artificial Sequence: Synthetic oligonucleotide
cuucguccuccacgcaguu

SEQ ID NO: 227413 - RNA, 19 nt, Artificial Sequence
  Description of Artificial Sequence: Synthetic oligonucleotide
cacgcaguugaggggccgu

SEQ ID NO: 227414 - RNA, 19 nt, Artificial Sequence
  Description of Artificial Sequence: Synthetic oligonucleotide
cccucucauuugacaguga

SEQ ID NO: 227415 - RNA, 19 nt, Artificial Sequence
  Description of Artificial Sequence: Synthetic oligonucleotide
ggaacccaguacacccagu

SEQ ID NO: 227416 - RNA, 19 nt, Artificial Sequence
  Description of Artificial Sequence: Synthetic oligonucleotide
ugcgggcgccucggugguc

SEQ ID NO: 227417 - RNA, 19 nt, Artificial Sequence
  Description of Artificial Sequence: Synthetic oligonucleotide
gccgccgccgccgccgcug

SEQ ID NO: 227418 - RNA, 19 nt, Artificial Sequence
  Description of Artificial Sequence: Synthetic oligonucleotide
gccucgcgcgucgcaggag

SEQ ID NO: 227419 - RNA, 19 nt, Artificial Sequence
  Description of Artificial Sequence: Synthetic oligonucleotide
cgggccggccccugccacg

SEQ ID NO: 227420 - RNA, 19 nt, Artificial Sequence
  Description of Artificial Sequence: Synthetic oligonucleotide
ccucgcgcgucgcaggagu

SEQ ID NO: 227421 - RNA, 19 nt, Artificial Sequence
  Description of Artificial Sequence: Synthetic oligonucleotide
gcgccucgguggucacagc

SEQ ID NO: 227422 - RNA, 19 nt, Artificial Sequence
  Description of Artificial Sequence: Synthetic oligonucleotide
gcccuuucgguggcuacau

SEQ ID NO: 227423 - RNA, 19 nt, Artificial Sequence
  Description of Artificial Sequence: Synthetic oligonucleotide
aggggccgugcgggcgccu

SEQ ID NO: 227424 - RNA, 19 nt, Artificial Sequence
  Description of Artificial Sequence: Synthetic oligonucleotide
cccugcccgcaccgccgcc

SEQ ID NO: 227425 - RNA, 19 nt, Artificial Sequence
  Description of Artificial Sequence: Synthetic oligonucleotide
ccccgcaacagccccuaau

SEQ ID NO: 227426 - RNA, 19 nt, Artificial Sequence
  Description of Artificial Sequence: Synthetic oligonucleotide
cucucccggcaauguccuu

SEQ ID NO: 227427 - RNA, 19 nt, Artificial Sequence
  Description of Artificial Sequence: Synthetic oligonucleotide
cggaacccgugcuguccaa

SEQ ID NO: 227428 - RNA, 19 nt, Artificial Sequence
  Description of Artificial Sequence: Synthetic oligonucleotide
ccucgccguugcugaccga

SEQ ID NO: 227429 - RNA, 19 nt, Artificial Sequence
  Description of Artificial Sequence: Synthetic oligonucleotide
cgcgcgucgcaggaguccu

SEQ ID NO: 227430 - RNA, 19 nt, Artificial Sequence
  Description of Artificial Sequence: Synthetic oligonucleotide
cgccaucaugugguagucu

SEQ ID NO: 227431 - RNA, 19 nt, Artificial Sequence
  Description of Artificial Sequence: Synthetic oligonucleotide
ccuucacgucgugcuuagu

SEQ ID NO: 227432 - RNA, 19 nt, Artificial Sequence
  Description of Artificial Sequence: Synthetic oligonucleotide
cgucgugcuuagucuuguu

SEQ ID NO: 227433 - RNA, 19 nt, Artificial Sequence
  Description of Artificial Sequence: Synthetic oligonucleotide
cuccggccgccgccaugau

SEQ ID NO: 227434 - RNA, 19 nt, Artificial Sequence
  Description of Artificial Sequence: Synthetic oligonucleotide
cggccgccgccaugaugau

SEQ ID NO: 227435 - RNA, 19 nt, Artificial Sequence
  Description of Artificial Sequence: Synthetic oligonucleotide
cgccgccgccgccgccgcu

SEQ ID NO: 227436 - RNA, 19 nt, Artificial Sequence
  Description of Artificial Sequence: Synthetic oligonucleotide
uauacucuaggcuauaagg

SEQ ID NO: 227437 - RNA, 19 nt, Artificial Sequence
  Description of Artificial Sequence: Synthetic oligonucleotide
cuugauuaggguuucauag

SEQ ID NO: 227438 - RNA, 19 nt, Artificial Sequence
  Description of Artificial Sequence: Synthetic oligonucleotide
aaacugaauauacucuagg

SEQ ID NO: 227439 - RNA, 19 nt, Artificial Sequence
  Description of Artificial Sequence: Synthetic oligonucleotide
ucuagcaucaagaauggca

SEQ ID NO: 227440 - RNA, 19 nt, Artificial Sequence
  Description of Artificial Sequence: Synthetic oligonucleotide
cuugauaugaggcuugggg

SEQ ID NO: 227441 - RNA, 19 nt, Artificial Sequence
  Description of Artificial Sequence: Synthetic oligonucleotide
uagguaaggauuuccaagg

SEQ ID NO: 227442 - RNA, 19 nt, Artificial Sequence
  Description of Artificial Sequence: Synthetic oligonucleotide
uuuauuuugucugguaggg

SEQ ID NO: 227443 - RNA, 19 nt, Artificial Sequence
  Description of Artificial Sequence: Synthetic oligonucleotide
auuaggguuucauaguagg

SEQ ID NO: 227444 - RNA, 19 nt, Artificial Sequence
  Description of Artificial Sequence: Synthetic oligonucleotide
aaaagaguuuuauuguagu

SEQ ID NO: 227445 - RNA, 19 nt, Artificial Sequence
  Description of Artificial Sequence: Synthetic oligonucleotide
uuaaacguuguguugaggu

SEQ ID NO: 227446 - RNA, 19 nt, Artificial Sequence
  Description of Artificial Sequence: Synthetic oligonucleotide
uaugugacaaauaccuaag

SEQ ID NO: 227447 - RNA, 19 nt, Artificial Sequence
  Description of Artificial Sequence: Synthetic oligonucleotide
agggcuaagauucuuagca

SEQ ID NO: 227448 - RNA, 19 nt, Artificial Sequence
  Description of Artificial Sequence: Synthetic oligonucleotide
aaacaaucugacuuccuca

SEQ ID NO: 227449 - RNA, 19 nt, Artificial Sequence
  Description of Artificial Sequence: Synthetic oligonucleotide
aagggaacaaacugaauau

SEQ ID NO: 227450 - RNA, 19 nt, Artificial Sequence
  Description of Artificial Sequence: Synthetic oligonucleotide
agcacgaucucacagagga

SEQ ID NO: 227451 - RNA, 19 nt, Artificial Sequence
  Description of Artificial Sequence: Synthetic oligonucleotide
agcuguugaagguacugcc

SEQ ID NO: 227452 - RNA, 19 nt, Artificial Sequence
  Description of Artificial Sequence: Synthetic oligonucleotide
uuuauuguaguaguaugug

SEQ ID NO: 227453 - RNA, 19 nt, Artificial Sequence
  Description of Artificial Sequence: Synthetic oligonucleotide
ucuggguauacacaaacaa

SEQ ID NO: 227454 - RNA, 19 nt, Artificial Sequence
  Description of Artificial Sequence: Synthetic oligonucleotide
caugacuuguaccagggcc

SEQ ID NO: 227455 - RNA, 19 nt, Artificial Sequence
  Description of Artificial Sequence: Synthetic oligonucleotide
aguaucaguaucaggaggg

SEQ ID NO: 227456 - RNA, 19 nt, Artificial Sequence
  Description of Artificial Sequence: Synthetic oligonucleotide
aaaaggacuguguggguug

SEQ ID NO: 227457 - RNA, 19 nt, Artificial Sequence
  Description of Artificial Sequence: Synthetic oligonucleotide
ggaaagaacagagaguugg

SEQ ID NO: 227458 - RNA, 19 nt, Artificial Sequence
  Description of Artificial Sequence: Synthetic oligonucleotide
gucccuaacacacucagcc

SEQ ID NO: 227459 - RNA, 19 nt, Artificial Sequence
  Description of Artificial Sequence: Synthetic oligonucleotide
uaaacaaucugacuuccuc

SEQ ID NO: 227460 - RNA, 19 nt, Artificial Sequence
  Description of Artificial Sequence: Synthetic oligonucleotide
ucugcauuagccagcacga

SEQ ID NO: 227461 - RNA, 19 nt, Artificial Sequence
  Description of Artificial Sequence: Synthetic oligonucleotide
aagucugguucucugaaga

SEQ ID NO: 227462 - RNA, 19 nt, Artificial Sequence
  Description of Artificial Sequence: Synthetic oligonucleotide
gcuauaagggacaugaagg

SEQ ID NO: 227463 - RNA, 19 nt, Artificial Sequence
  Description of Artificial Sequence: Synthetic oligonucleotide
aagucccuaacacacucag

SEQ ID NO: 227464 - RNA, 19 nt, Artificial Sequence
  Description of Artificial Sequence: Synthetic oligonucleotide
ucuaacuugcgguggagcc

SEQ ID NO: 227465 - RNA, 19 nt, Artificial Sequence
  Description of Artificial Sequence: Synthetic oligonucleotide
agucauguugcccacggag

SEQ ID NO: 227466 - RNA, 19 nt, Artificial Sequence
  Description of Artificial Sequence: Synthetic oligonucleotide
uuauuguaguaguauguga

SEQ ID NO: 227467 - RNA, 19 nt, Artificial Sequence
  Description of Artificial Sequence: Synthetic oligonucleotide
cuuaggaagucccuaacac

SEQ ID NO: 227468 - RNA, 19 nt, Artificial Sequence
  Description of Artificial Sequence: Synthetic oligonucleotide
uucaaggcguccacaauag

SEQ ID NO: 227469 - RNA, 19 nt, Artificial Sequence
  Description of Artificial Sequence: Synthetic oligonucleotide
cugaagaacaaacaccaug

SEQ ID NO: 227470 - RNA, 19 nt, Artificial Sequence
  Description of Artificial Sequence: Synthetic oligonucleotide
uuucauaguagguaaggau

SEQ ID NO: 227471 - RNA, 19 nt, Artificial Sequence
  Description of Artificial Sequence: Synthetic oligonucleotide
gaaggguuggucuugauua

SEQ ID NO: 227472 - RNA, 19 nt, Artificial Sequence
  Description of Artificial Sequence: Synthetic oligonucleotide
cuacagaggaguuugacca

SEQ ID NO: 227473 - RNA, 19 nt, Artificial Sequence
  Description of Artificial Sequence: Synthetic oligonucleotide
auacucuaggcuauaaggg

SEQ ID NO: 227474 - RNA, 19 nt, Artificial Sequence
  Description of Artificial Sequence: Synthetic oligonucleotide
caaggcguccacaauaggc

SEQ ID NO: 227475 - RNA, 19 nt, Artificial Sequence
  Description of Artificial Sequence: Synthetic oligonucleotide
gguguagagaacuuugucc

SEQ ID NO: 227476 - RNA, 19 nt, Artificial Sequence
  Description of Artificial Sequence: Synthetic oligonucleotide
uuagaguugaugacuucca

SEQ ID NO: 227477 - RNA, 19 nt, Artificial Sequence
  Description of Artificial Sequence: Synthetic oligonucleotide
ucuuaggaagucccuaaca

SEQ ID NO: 227478 - RNA, 19 nt, Artificial Sequence
  Description of Artificial Sequence: Synthetic oligonucleotide
caggauacuggucaaacug

SEQ ID NO: 227479 - RNA, 19 nt, Artificial Sequence
  Description of Artificial Sequence: Synthetic oligonucleotide
agguaaggauuuccaaggc

SEQ ID NO: 227480 - RNA, 19 nt, Artificial Sequence
  Description of Artificial Sequence: Synthetic oligonucleotide
uucgcccagaugaugauca

SEQ ID NO: 227481 - RNA, 19 nt, Artificial Sequence
  Description of Artificial Sequence: Synthetic oligonucleotide
aaacguuguguugaggucu

SEQ ID NO: 227482 - RNA, 19 nt, Artificial Sequence
  Description of Artificial Sequence: Synthetic oligonucleotide
uacucuaggcuauaaggga

SEQ ID NO: 227483 - RNA, 19 nt, Artificial Sequence
  Description of Artificial Sequence: Synthetic oligonucleotide
ugaaaacccuccaaguaaa

SEQ ID NO: 227484 - RNA, 19 nt, Artificial Sequence
  Description of Artificial Sequence: Synthetic oligonucleotide
uuguugaucuucuguagca

SEQ ID NO: 227485 - RNA, 19 nt, Artificial Sequence
  Description of Artificial Sequence: Synthetic oligonucleotide
uuagccagcacgaucucac

SEQ ID NO: 227486 - RNA, 19 nt, Artificial Sequence
  Description of Artificial Sequence: Synthetic oligonucleotide
augguagggagucauguug

SEQ ID NO: 227487 - RNA, 19 nt, Artificial Sequence
  Description of Artificial Sequence: Synthetic oligonucleotide
ugauuaggguuucauagua

SEQ ID NO: 227488 - RNA, 19 nt, Artificial Sequence
  Description of Artificial Sequence: Synthetic oligonucleotide
agagagcuuacauaucuca

SEQ ID NO: 227489 - RNA, 19 nt, Artificial Sequence
  Description of Artificial Sequence: Synthetic oligonucleotide
ccuguuguuaacaaggcag

SEQ ID NO: 227490 - RNA, 19 nt, Artificial Sequence
  Description of Artificial Sequence: Synthetic oligonucleotide
uugagcaagggaacaaacu

SEQ ID NO: 227491 - RNA, 19 nt, Artificial Sequence
  Description of Artificial Sequence: Synthetic oligonucleotide
uaagggacaugaaggagcu

SEQ ID NO: 227492 - RNA, 19 nt, Artificial Sequence
  Description of Artificial Sequence: Synthetic oligonucleotide
uaaggauuuccaaggccag

SEQ ID NO: 227493 - RNA, 19 nt, Artificial Sequence
  Description of Artificial Sequence: Synthetic oligonucleotide
aauguagcacauuuccaua

SEQ ID NO: 227494 - RNA, 19 nt, Artificial Sequence
  Description of Artificial Sequence: Synthetic oligonucleotide
ucauaguagguaaggauuu

SEQ ID NO: 227495 - RNA, 19 nt, Artificial Sequence
  Description of Artificial Sequence: Synthetic oligonucleotide
guaugugacaaauaccuaa

SEQ ID NO: 227496 - RNA, 19 nt, Artificial Sequence
  Description of Artificial Sequence: Synthetic oligonucleotide
guguagagaacuuugucca

SEQ ID NO: 227497 - RNA, 19 nt, Artificial Sequence
  Description of Artificial Sequence: Synthetic oligonucleotide
aggauacuggucaaacugc

SEQ ID NO: 227498 - RNA, 19 nt, Artificial Sequence
  Description of Artificial Sequence: Synthetic oligonucleotide
uugauuaggguuucauagu

SEQ ID NO: 227499 - RNA, 19 nt, Artificial Sequence
  Description of Artificial Sequence: Synthetic oligonucleotide
uaauuuguccccugacagc

SEQ ID NO: 227500 - RNA, 19 nt, Artificial Sequence
  Description of Artificial Sequence: Synthetic oligonucleotide
ucauaauuuguccccugac

SEQ ID NO: 227501 - RNA, 19 nt, Artificial Sequence
  Description of Artificial Sequence: Synthetic oligonucleotide
aaaauguagcacauuucca

SEQ ID NO: 227502 - RNA, 19 nt, Artificial Sequence
  Description of Artificial Sequence: Synthetic oligonucleotide
gacacugcgggaaauggag

SEQ ID NO: 227503 - RNA, 19 nt, Artificial Sequence
  Description of Artificial Sequence: Synthetic oligonucleotide
cagacaaccuguccgagag

SEQ ID NO: 227504 - RNA, 19 nt, Artificial Sequence
  Description of Artificial Sequence: Synthetic oligonucleotide
caaggcaugacuuguacca

SEQ ID NO: 227505 - RNA, 19 nt, Artificial Sequence
  Description of Artificial Sequence: Synthetic oligonucleotide
guuaacaaggcaggcaacc

SEQ ID NO: 227506 - RNA, 19 nt, Artificial Sequence
  Description of Artificial Sequence: Synthetic oligonucleotide
uaacaaggcaggcaaccca

SEQ ID NO: 227507 - RNA, 19 nt, Artificial Sequence
  Description of Artificial Sequence: Synthetic oligonucleotide
ugauaugaggcuuggggau

SEQ ID NO: 227508 - RNA, 19 nt, Artificial Sequence
  Description of Artificial Sequence: Synthetic oligonucleotide
uuaggguuucauaguaggu

SEQ ID NO: 227509 - RNA, 19 nt, Artificial Sequence
  Description of Artificial Sequence: Synthetic oligonucleotide
aaccugacugcauccagga

SEQ ID NO: 227510 - RNA, 19 nt, Artificial Sequence
  Description of Artificial Sequence: Synthetic oligonucleotide
gacaaccuguccgagaggc

SEQ ID NO: 227511 - RNA, 19 nt, Artificial Sequence
  Description of Artificial Sequence: Synthetic oligonucleotide
aaggccccugucauuaagc

SEQ ID NO: 227512 - RNA, 19 nt, Artificial Sequence
  Description of Artificial Sequence: Synthetic oligonucleotide
cacgaucucacagaggagc

SEQ ID NO: 227513 - RNA, 19 nt, Artificial Sequence
  Description of Artificial Sequence: Synthetic oligonucleotide
gucagacugucacacagcc

SEQ ID NO: 227514 - RNA, 19 nt, Artificial Sequence
  Description of Artificial Sequence: Synthetic oligonucleotide
aggcaguaagaaucugagc

SEQ ID NO: 227515 - RNA, 19 nt, Artificial Sequence
  Description of Artificial Sequence: Synthetic oligonucleotide
ggcuauaagggacaugaag

SEQ ID NO: 227516 - RNA, 19 nt, Artificial Sequence
  Description of Artificial Sequence: Synthetic oligonucleotide
acucuaggcuauaagggac

SEQ ID NO: 227517 - RNA, 19 nt, Artificial Sequence
  Description of Artificial Sequence: Synthetic oligonucleotide
agaacaugacagaacaucu

SEQ ID NO: 227518 - RNA, 19 nt, Artificial Sequence
  Description of Artificial Sequence: Synthetic oligonucleotide
cuauaagggacaugaagga

SEQ ID NO: 227519 - RNA, 19 nt, Artificial Sequence
  Description of Artificial Sequence: Synthetic oligonucleotide
accagaaagcccuugcuaa

SEQ ID NO: 227520 - RNA, 19 nt, Artificial Sequence
  Description of Artificial Sequence: Synthetic oligonucleotide
gauuaggguuucauaguag

SEQ ID NO: 227521 - RNA, 19 nt, Artificial Sequence
  Description of Artificial Sequence: Synthetic oligonucleotide
gaucaagucugguucucug

SEQ ID NO: 227522 - RNA, 19 nt, Artificial Sequence
  Description of Artificial Sequence: Synthetic oligonucleotide
uguucucagcucuaggcuc

SEQ ID NO: 227523 - RNA, 19 nt, Artificial Sequence
  Description of Artificial Sequence: Synthetic oligonucleotide
uguaguaguaugugacaaa

SEQ ID NO: 227524 - RNA, 19 nt, Artificial Sequence
  Description of Artificial Sequence: Synthetic oligonucleotide
guagcacauuuccauauac

SEQ ID NO: 227525 - RNA, 19 nt, Artificial Sequence
  Description of Artificial Sequence: Synthetic oligonucleotide
uccauauaccgguccaucu

SEQ ID NO: 227526 - RNA, 19 nt, Artificial Sequence
  Description of Artificial Sequence: Synthetic oligonucleotide
guuuguucucagcucuagg

SEQ ID NO: 227527 - RNA, 19 nt, Artificial Sequence
  Description of Artificial Sequence: Synthetic oligonucleotide
acaaucugacuuccucagg

SEQ ID NO: 227528 - RNA, 19 nt, Artificial Sequence
  Description of Artificial Sequence: Synthetic oligonucleotide
uaaacguuguguugagguc

SEQ ID NO: 227529 - RNA, 19 nt, Artificial Sequence
  Description of Artificial Sequence: Synthetic oligonucleotide
aggauugcccacauccacc

SEQ ID NO: 227530 - RNA, 19 nt, Artificial Sequence
  Description of Artificial Sequence: Synthetic oligonucleotide
guaucaaccugacugcauc

SEQ ID NO: 227531 - RNA, 19 nt, Artificial Sequence
  Description of Artificial Sequence: Synthetic oligonucleotide
aguagguaaggauuuccaa

SEQ ID NO: 227532 - RNA, 19 nt, Artificial Sequence
  Description of Artificial Sequence: Synthetic oligonucleotide
uccgagaggcccuuuggcc

SEQ ID NO: 227533 - RNA, 19 nt, Artificial Sequence
  Description of Artificial Sequence: Synthetic oligonucleotide
aaucugacuuccucaggau

SEQ ID NO: 227534 - RNA, 19 nt, Artificial Sequence
  Description of Artificial Sequence: Synthetic oligonucleotide
ccaaccauccauaggaagc

SEQ ID NO: 227535 - RNA, 19 nt, Artificial Sequence
  Description of Artificial Sequence: Synthetic oligonucleotide
uggcaagacaaacuccuuc

SEQ ID NO: 227536 - RNA, 19 nt, Artificial Sequence
  Description of Artificial Sequence: Synthetic oligonucleotide
gcuccaaccauccauagga

SEQ ID NO: 227537 - RNA, 19 nt, Artificial Sequence
  Description of Artificial Sequence: Synthetic oligonucleotide
aauacuccuccaagcccgc

SEQ ID NO: 227538 - RNA, 19 nt, Artificial Sequence
  Description of Artificial Sequence: Synthetic oligonucleotide
uaacuugcgguggagccag

SEQ ID NO: 227539 - RNA, 19 nt, Artificial Sequence
  Description of Artificial Sequence: Synthetic oligonucleotide
gaauggcaagacaaacucc

SEQ ID NO: 227540 - RNA, 19 nt, Artificial Sequence
  Description of Artificial Sequence: Synthetic oligonucleotide
ucaaggcguccacaauagg

SEQ ID NO: 227541 - RNA, 19 nt, Artificial Sequence
  Description of Artificial Sequence: Synthetic oligonucleotide
cauauaccgguccaucuuc

SEQ ID NO: 227542 - RNA, 19 nt, Artificial Sequence
  Description of Artificial Sequence: Synthetic oligonucleotide
accgaguaucaguaucagg

SEQ ID NO: 227543 - RNA, 19 nt, Artificial Sequence
  Description of Artificial Sequence: Synthetic oligonucleotide
ggacuguguggguugaugg

SEQ ID NO: 227544 - RNA, 19 nt, Artificial Sequence
  Description of Artificial Sequence: Synthetic oligonucleotide
gacugcauccaggauacug

SEQ ID NO: 227545 - RNA, 19 nt, Artificial Sequence
  Description of Artificial Sequence: Synthetic oligonucleotide
acaugacagaacaucuggg

SEQ ID NO: 227546 - RNA, 19 nt, Artificial Sequence
  Description of Artificial Sequence: Synthetic oligonucleotide
caaucugacuuccucagga

SEQ ID NO: 227547 - RNA, 19 nt, Artificial Sequence
  Description of Artificial Sequence: Synthetic oligonucleotide
accguuuccagcaaacuca

SEQ ID NO: 227548 - RNA, 19 nt, Artificial Sequence
  Description of Artificial Sequence: Synthetic oligonucleotide
aagcugguuaaacguugug

SEQ ID NO: 227549 - RNA, 19 nt, Artificial Sequence
  Description of Artificial Sequence: Synthetic oligonucleotide
auuggcuucaagggucugg

SEQ ID NO: 227550 - RNA, 19 nt, Artificial Sequence
  Description of Artificial Sequence: Synthetic oligonucleotide
ccgaguaucaguaucagga

SEQ ID NO: 227551 - RNA, 19 nt, Artificial Sequence
  Description of Artificial Sequence: Synthetic oligonucleotide
auguagcacauuuccauau

SEQ ID NO: 227552 - RNA, 19 nt, Artificial Sequence
  Description of Artificial Sequence: Synthetic oligonucleotide
ucaguaccucaucaggcuc

SEQ ID NO: 227553 - RNA, 19 nt, Artificial Sequence
  Description of Artificial Sequence: Synthetic oligonucleotide
uaucaguaucaggaggggc

SEQ ID NO: 227554 - RNA, 19 nt, Artificial Sequence
  Description of Artificial Sequence: Synthetic oligonucleotide
agaaagcccuugcuaaaca

SEQ ID NO: 227555 - RNA, 19 nt, Artificial Sequence
  Description of Artificial Sequence: Synthetic oligonucleotide
uguaucaaccugacugcau

SEQ ID NO: 227556 - RNA, 19 nt, Artificial Sequence
  Description of Artificial Sequence: Synthetic oligonucleotide
caguaccucaucaggcucc

SEQ ID NO: 227557 - RNA, 19 nt, Artificial Sequence
  Description of Artificial Sequence: Synthetic oligonucleotide
uacuggucaaacugcuaca

SEQ ID NO: 227558 - RNA, 19 nt, Artificial Sequence
  Description of Artificial Sequence: Synthetic oligonucleotide
agucagacuuugucaacug

SEQ ID NO: 227559 - RNA, 19 nt, Artificial Sequence
  Description of Artificial Sequence: Synthetic oligonucleotide
cacaagauccuugcugucc

SEQ ID NO: 227560 - RNA, 19 nt, Artificial Sequence
  Description of Artificial Sequence: Synthetic oligonucleotide
aaggcaugacuuguaccag

SEQ ID NO: 227561 - RNA, 19 nt, Artificial Sequence
  Description of Artificial Sequence: Synthetic oligonucleotide
ggucaagcagaucaccugc

SEQ ID NO: 227562 - RNA, 19 nt, Artificial Sequence
  Description of Artificial Sequence: Synthetic oligonucleotide
augugacaaauaccuaaga

SEQ ID NO: 227563 - RNA, 19 nt, Artificial Sequence
  Description of Artificial Sequence: Synthetic oligonucleotide
uguagcacauuuccauaua

SEQ ID NO: 227564 - RNA, 19 nt, Artificial Sequence
  Description of Artificial Sequence: Synthetic oligonucleotide
agcucucaaggaaagaaca

SEQ ID NO: 227565 - RNA, 19 nt, Artificial Sequence
  Description of Artificial Sequence: Synthetic oligonucleotide
agucagacugucacacagc

SEQ ID NO: 227566 - RNA, 19 nt, Artificial Sequence
  Description of Artificial Sequence: Synthetic oligonucleotide
guuaaacguuguguugagg

SEQ ID NO: 227567 - RNA, 19 nt, Artificial Sequence
  Description of Artificial Sequence: Synthetic oligonucleotide
uggucuaacuugcggugga

SEQ ID NO: 227568 - RNA, 19 nt, Artificial Sequence
  Description of Artificial Sequence: Synthetic oligonucleotide
uuauuuugucugguaggga

SEQ ID NO: 227569 - RNA, 19 nt, Artificial Sequence
  Description of Artificial Sequence: Synthetic oligonucleotide
guaucaguaucaggagggg

SEQ ID NO: 227570 - RNA, 19 nt, Artificial Sequence
  Description of Artificial Sequence: Synthetic oligonucleotide
gaaagcccuugcuaaacaa

SEQ ID NO: 227571 - RNA, 19 nt, Artificial Sequence
  Description of Artificial Sequence: Synthetic oligonucleotide
aggcaacccacucaucuga

SEQ ID NO: 227572 - RNA, 19 nt, Artificial Sequence
  Description of Artificial Sequence: Synthetic oligonucleotide
caguauagucauuuccuca

SEQ ID NO: 227573 - RNA, 19 nt, Artificial Sequence
  Description of Artificial Sequence: Synthetic oligonucleotide
gucacaagauccuugcugu

SEQ ID NO: 227574 - RNA, 19 nt, Artificial Sequence
  Description of Artificial Sequence: Synthetic oligonucleotide
ugcuugauaugaggcuugg

SEQ ID NO: 227575 - RNA, 19 nt, Artificial Sequence
  Description of Artificial Sequence: Synthetic oligonucleotide
uucaagggucuggaggaag

SEQ ID NO: 227576 - RNA, 19 nt, Artificial Sequence
  Description of Artificial Sequence: Synthetic oligonucleotide
accuguuguuaacaaggca

SEQ ID NO: 227577 - RNA, 19 nt, Artificial Sequence
  Description of Artificial Sequence: Synthetic oligonucleotide
gccaauacuccuccaagcc

SEQ ID NO: 227578 - RNA, 19 nt, Artificial Sequence
  Description of Artificial Sequence: Synthetic oligonucleotide
gaucaccugcuugauauga

SEQ ID NO: 227579 - RNA, 19 nt, Artificial Sequence
  Description of Artificial Sequence: Synthetic oligonucleotide
cccgcauuggcuucaaggg

SEQ ID NO: 227580 - RNA, 19 nt, Artificial Sequence
  Description of Artificial Sequence: Synthetic oligonucleotide
uuccugaggacuacaccaa

SEQ ID NO: 227581 - RNA, 19 nt, Artificial Sequence
  Description of Artificial Sequence: Synthetic oligonucleotide
gaccuguuguuaacaaggc

SEQ ID NO: 227582 - RNA, 19 nt, Artificial Sequence
  Description of Artificial Sequence: Synthetic oligonucleotide
uaguaguaugugacaaaua

SEQ ID NO: 227583 - RNA, 19 nt, Artificial Sequence
  Description of Artificial Sequence: Synthetic oligonucleotide
aagaaccuucgcccagaug

SEQ ID NO: 227584 - RNA, 19 nt, Artificial Sequence
  Description of Artificial Sequence: Synthetic oligonucleotide
caccacaacuucuggguac

SEQ ID NO: 227585 - RNA, 19 nt, Artificial Sequence
  Description of Artificial Sequence: Synthetic oligonucleotide
ucccuaacacacucagcca

SEQ ID NO: 227586 - RNA, 19 nt, Artificial Sequence
  Description of Artificial Sequence: Synthetic oligonucleotide
ccaaaagagcagcaacugg

SEQ ID NO: 227587 - RNA, 19 nt, Artificial Sequence
  Description of Artificial Sequence: Synthetic oligonucleotide
agcucuaggcucugaagaa

SEQ ID NO: 227588 - RNA, 19 nt, Artificial Sequence
  Description of Artificial Sequence: Synthetic oligonucleotide
uaggccgccccacauguuc

SEQ ID NO: 227589 - RNA, 19 nt, Artificial Sequence
  Description of Artificial Sequence: Synthetic oligonucleotide
caaacucaagaucaagucu

SEQ ID NO: 227590 - RNA, 19 nt, Artificial Sequence
  Description of Artificial Sequence: Synthetic oligonucleotide
gguuaaacguuguguugag

SEQ ID NO: 227591 - RNA, 19 nt, Artificial Sequence
  Description of Artificial Sequence: Synthetic oligonucleotide
gaggacuacaccaaggcau

SEQ ID NO: 227592 - RNA, 19 nt, Artificial Sequence
  Description of Artificial Sequence: Synthetic oligonucleotide
agaacuuuguccagacagu

SEQ ID NO: 227593 - RNA, 19 nt, Artificial Sequence
  Description of Artificial Sequence: Synthetic oligonucleotide
agugccaagauuggucaca

SEQ ID NO: 227594 - RNA, 19 nt, Artificial Sequence
  Description of Artificial Sequence: Synthetic oligonucleotide
accauguuggagggauagc

SEQ ID NO: 227595 - RNA, 19 nt, Artificial Sequence
  Description of Artificial Sequence: Synthetic oligonucleotide
ugacagaaggguuggucuu

SEQ ID NO: 227596 - RNA, 19 nt, Artificial Sequence
  Description of Artificial Sequence: Synthetic oligonucleotide
agguacugccauuccugag

SEQ ID NO: 227597 - RNA, 19 nt, Artificial Sequence
  Description of Artificial Sequence: Synthetic oligonucleotide
agucccuaacacacucagc

SEQ ID NO: 227598 - RNA, 19 nt, Artificial Sequence
  Description of Artificial Sequence: Synthetic oligonucleotide
acaauaggccgccccacau

SEQ ID NO: 227599 - RNA, 19 nt, Artificial Sequence
  Description of Artificial Sequence: Synthetic oligonucleotide
aguuggagcuccugggcaa

SEQ ID NO: 227600 - RNA, 19 nt, Artificial Sequence
  Description of Artificial Sequence: Synthetic oligonucleotide
agcaagggaacaaacugaa

SEQ ID NO: 227601 - RNA, 19 nt, Artificial Sequence
  Description of Artificial Sequence: Synthetic oligonucleotide
agacaaccuguccgagagg

SEQ ID NO: 227602 - RNA, 19 nt, Artificial Sequence
  Description of Artificial Sequence: Synthetic oligonucleotide
agaucaccugcuugauaug

SEQ ID NO: 227603 - RNA, 19 nt, Artificial Sequence
  Description of Artificial Sequence: Synthetic oligonucleotide
agcgggaauggggagcagg

SEQ ID NO: 227604 - RNA, 19 nt, Artificial Sequence
  Description of Artificial Sequence: Synthetic oligonucleotide
uaacacacucagccaguuc

SEQ ID NO: 227605 - RNA, 19 nt, Artificial Sequence
  Description of Artificial Sequence: Synthetic oligonucleotide
guagagaacuuuguccaga

SEQ ID NO: 227606 - RNA, 19 nt, Artificial Sequence
  Description of Artificial Sequence: Synthetic oligonucleotide
ccugaggacuacaccaagg

SEQ ID NO: 227607 - RNA, 19 nt, Artificial Sequence
  Description of Artificial Sequence: Synthetic oligonucleotide
aggacuacaccaaggcaug

SEQ ID NO: 227608 - RNA, 19 nt, Artificial Sequence
  Description of Artificial Sequence: Synthetic oligonucleotide
gacuacaccaaggcaugac

SEQ ID NO: 227609 - RNA, 19 nt, Artificial Sequence
  Description of Artificial Sequence: Synthetic oligonucleotide
ugaagcuguccaggagccg

SEQ ID NO: 227610 - RNA, 19 nt, Artificial Sequence
  Description of Artificial Sequence: Synthetic oligonucleotide
uaagcacucugcugguuuu

SEQ ID NO: 227611 - RNA, 19 nt, Artificial Sequence
  Description of Artificial Sequence: Synthetic oligonucleotide
agccggcacaagcugaaga

SEQ ID NO: 227612 - RNA, 19 nt, Artificial Sequence
  Description of Artificial Sequence: Synthetic oligonucleotide
guguggguugaugguaggg

SEQ ID NO: 227613 - RNA, 19 nt, Artificial Sequence
  Description of Artificial Sequence: Synthetic oligonucleotide
cccuaacacacucagccag

SEQ ID NO: 227614 - RNA, 19 nt, Artificial Sequence
  Description of Artificial Sequence: Synthetic oligonucleotide
uagccggcaccucacacuu

SEQ ID NO: 227615 - RNA, 19 nt, Artificial Sequence
  Description of Artificial Sequence: Synthetic oligonucleotide
gaagagcagcgggaauggg

SEQ ID NO: 227616 - RNA, 19 nt, Artificial Sequence
  Description of Artificial Sequence: Synthetic oligonucleotide
uacaacagcucuggcugca

SEQ ID NO: 227617 - RNA, 19 nt, Artificial Sequence
  Description of Artificial Sequence: Synthetic oligonucleotide
caauaggccgccccacaug

SEQ ID NO: 227618 - RNA, 19 nt, Artificial Sequence
  Description of Artificial Sequence: Synthetic oligonucleotide
cacggagaagaacacaucu

SEQ ID NO: 227619 - RNA, 19 nt, Artificial Sequence
  Description of Artificial Sequence: Synthetic oligonucleotide
guaguaguaugugacaaau

SEQ ID NO: 227620 - RNA, 19 nt, Artificial Sequence
  Description of Artificial Sequence: Synthetic oligonucleotide
caagauuggucacagcuau

SEQ ID NO: 227621 - RNA, 19 nt, Artificial Sequence
  Description of Artificial Sequence: Synthetic oligonucleotide
caaggccccugucauuaag

SEQ ID NO: 227622 - RNA, 19 nt, Artificial Sequence
  Description of Artificial Sequence: Synthetic oligonucleotide
agaucaagucugguucucu

SEQ ID NO: 227623 - RNA, 19 nt, Artificial Sequence
  Description of Artificial Sequence: Synthetic oligonucleotide
ucuaggcuauaagggacau

SEQ ID NO: 227624 - RNA, 19 nt, Artificial Sequence
  Description of Artificial Sequence: Synthetic oligonucleotide
ugacuuguaccagggccac

SEQ ID NO: 227625 - RNA, 19 nt, Artificial Sequence
  Description of Artificial Sequence: Synthetic oligonucleotide
ugcccacggagaagaacac

SEQ ID NO: 227626 - RNA, 19 nt, Artificial Sequence
  Description of Artificial Sequence: Synthetic oligonucleotide
ggcuccaaccauccauagg

SEQ ID NO: 227627 - RNA, 19 nt, Artificial Sequence
  Description of Artificial Sequence: Synthetic oligonucleotide
gagugccaagauuggucac

SEQ ID NO: 227628 - RNA, 19 nt, Artificial Sequence
  Description of Artificial Sequence: Synthetic oligonucleotide
gaauggggagcagguuugc

SEQ ID NO: 227629 - RNA, 19 nt, Artificial Sequence
  Description of Artificial Sequence: Synthetic oligonucleotide
ggauugcccacauccacca

SEQ ID NO: 227630 - RNA, 19 nt, Artificial Sequence
  Description of Artificial Sequence: Synthetic oligonucleotide
uuccaguccuccacacguc

SEQ ID NO: 227631 - RNA, 19 nt, Artificial Sequence
  Description of Artificial Sequence: Synthetic oligonucleotide
gaagucccuaacacacuca

SEQ ID NO: 227632 - RNA, 19 nt, Artificial Sequence
  Description of Artificial Sequence: Synthetic oligonucleotide
gauaugaggcuuggggaua

SEQ ID NO: 227633 - RNA, 19 nt, Artificial Sequence
  Description of Artificial Sequence: Synthetic oligonucleotide
agggaacaaacugaauaua

SEQ ID NO: 227634 - RNA, 19 nt, Artificial Sequence
  Description of Artificial Sequence: Synthetic oligonucleotide
gcaagcugguuaaacguug

SEQ ID NO: 227635 - RNA, 19 nt, Artificial Sequence
  Description of Artificial Sequence: Synthetic oligonucleotide
cccauacccuucaugggcc

SEQ ID NO: 227636 - RNA, 19 nt, Artificial Sequence
  Description of Artificial Sequence: Synthetic oligonucleotide
ggguguagagaacuuuguc

SEQ ID NO: 227637 - RNA, 19 nt, Artificial Sequence
  Description of Artificial Sequence: Synthetic oligonucleotide
gcccuugcuaaacaaucug

SEQ ID NO: 227638 - RNA, 19 nt, Artificial Sequence
  Description of Artificial Sequence: Synthetic oligonucleotide
ccgagaggcccuuuggccc

SEQ ID NO: 227639 - RNA, 19 nt, Artificial Sequence
  Description of Artificial Sequence: Synthetic oligonucleotide
agcagcucaaaaggacugu

SEQ ID NO: 227640 - RNA, 19 nt, Artificial Sequence
  Description of Artificial Sequence: Synthetic oligonucleotide
caguuacaacagcucuggc

SEQ ID NO: 227641 - RNA, 19 nt, Artificial Sequence
  Description of Artificial Sequence: Synthetic oligonucleotide
caaaugggcugggaaugug

SEQ ID NO: 227642 - RNA, 19 nt, Artificial Sequence
  Description of Artificial Sequence: Synthetic oligonucleotide
gggagcauggccaugauau

SEQ ID NO: 227643 - RNA, 19 nt, Artificial Sequence
  Description of Artificial Sequence: Synthetic oligonucleotide
aguaugugacaaauaccua

SEQ ID NO: 227644 - RNA, 19 nt, Artificial Sequence
  Description of Artificial Sequence: Synthetic oligonucleotide
gagcagcgggaauggggag

SEQ ID NO: 227645 - RNA, 19 nt, Artificial Sequence
  Description of Artificial Sequence: Synthetic oligonucleotide
gagaaacuggaaagcucuc

SEQ ID NO: 227646 - RNA, 19 nt, Artificial Sequence
  Description of Artificial Sequence: Synthetic oligonucleotide
cuaacuugcgguggagcca

SEQ ID NO: 227647 - RNA, 19 nt, Artificial Sequence
  Description of Artificial Sequence: Synthetic oligonucleotide
uuccugccaccgaguauca

SEQ ID NO: 227648 - RNA, 19 nt, Artificial Sequence
  Description of Artificial Sequence: Synthetic oligonucleotide
acucaagaucaagucuggu

SEQ ID NO: 227649 - RNA, 19 nt, Artificial Sequence
  Description of Artificial Sequence: Synthetic oligonucleotide
caaacaagguuuccugagu

SEQ ID NO: 227650 - RNA, 19 nt, Artificial Sequence
  Description of Artificial Sequence: Synthetic oligonucleotide
caccgaguaucaguaucag

SEQ ID NO: 227651 - RNA, 19 nt, Artificial Sequence
  Description of Artificial Sequence: Synthetic oligonucleotide
ggaguuugaccacauggcu

SEQ ID NO: 227652 - RNA, 19 nt, Artificial Sequence
  Description of Artificial Sequence: Synthetic oligonucleotide
augugggucacaagauccu

SEQ ID NO: 227653 - RNA, 19 nt, Artificial Sequence
  Description of Artificial Sequence: Synthetic oligonucleotide
acagaaggguuggucuuga

SEQ ID NO: 227654 - RNA, 19 nt, Artificial Sequence
  Description of Artificial Sequence: Synthetic oligonucleotide
caccgacuguaucaaccug

SEQ ID NO: 227655 - RNA, 19 nt, Artificial Sequence
  Description of Artificial Sequence: Synthetic oligonucleotide
gaaucugagccaggaaccu

SEQ ID NO: 227656 - RNA, 19 nt, Artificial Sequence
  Description of Artificial Sequence: Synthetic oligonucleotide
uccagucuagcuggucuaa

SEQ ID NO: 227657 - RNA, 19 nt, Artificial Sequence
  Description of Artificial Sequence: Synthetic oligonucleotide
gggcucgcagaccuccugg

SEQ ID NO: 227658 - RNA, 19 nt, Artificial Sequence
  Description of Artificial Sequence: Synthetic oligonucleotide
gguuuggcgccucuccuca

SEQ ID NO: 227659 - RNA, 19 nt, Artificial Sequence
  Description of Artificial Sequence: Synthetic oligonucleotide
gccaccgaguaucaguauc

SEQ ID NO: 227660 - RNA, 19 nt, Artificial Sequence
  Description of Artificial Sequence: Synthetic oligonucleotide
cugccaccgaguaucagua

SEQ ID NO: 227661 - RNA, 19 nt, Artificial Sequence
  Description of Artificial Sequence: Synthetic oligonucleotide
ggcucgcagaccuccuggg

SEQ ID NO: 227662 - RNA, 19 nt, Artificial Sequence
  Description of Artificial Sequence: Synthetic oligonucleotide
cuaaacaaucugacuuccu

SEQ ID NO: 227663 - RNA, 19 nt, Artificial Sequence
  Description of Artificial Sequence: Synthetic oligonucleotide
agcagguuugcagccaaua

SEQ ID NO: 227664 - RNA, 19 nt, Artificial Sequence
  Description of Artificial Sequence: Synthetic oligonucleotide
cuaggcuauaagggacaug

SEQ ID NO: 227665 - RNA, 19 nt, Artificial Sequence
  Description of Artificial Sequence: Synthetic oligonucleotide
aaccuguccgagaggcccu

SEQ ID NO: 227666 - RNA, 19 nt, Artificial Sequence
  Description of Artificial Sequence: Synthetic oligonucleotide
cccagaugaugaucagugc

SEQ ID NO: 227667 - RNA, 19 nt, Artificial Sequence
  Description of Artificial Sequence: Synthetic oligonucleotide
guagccggcaccucacacu

SEQ ID NO: 227668 - RNA, 19 nt, Artificial Sequence
  Description of Artificial Sequence: Synthetic oligonucleotide
cacaauaggccgccccaca

SEQ ID NO: 227669 - RNA, 19 nt, Artificial Sequence
  Description of Artificial Sequence: Synthetic oligonucleotide
guuuggcgccucuccucag

SEQ ID NO: 227670 - RNA, 19 nt, Artificial Sequence
  Description of Artificial Sequence: Synthetic oligonucleotide
gguagccggcaccucacac

SEQ ID NO: 227671 - RNA, 19 nt, Artificial Sequence
  Description of Artificial Sequence: Synthetic oligonucleotide
cuucgcccagaugaugauc

SEQ ID NO: 227672 - RNA, 19 nt, Artificial Sequence
  Description of Artificial Sequence: Synthetic oligonucleotide
acggagaagaacacaucuu

SEQ ID NO: 227673 - RNA, 19 nt, Artificial Sequence
  Description of Artificial Sequence: Synthetic oligonucleotide
cuguaucaaccugacugca

SEQ ID NO: 227674 - RNA, 19 nt, Artificial Sequence
  Description of Artificial Sequence: Synthetic oligonucleotide
gggcccaccgacuguauca

SEQ ID NO: 227675 - RNA, 19 nt, Artificial Sequence
  Description of Artificial Sequence: Synthetic oligonucleotide
gucugguagggagaggucu

SEQ ID NO: 227676 - RNA, 19 nt, Artificial Sequence
  Description of Artificial Sequence: Synthetic oligonucleotide
gcucgcagaccuccugggg

SEQ ID NO: 227677 - RNA, 19 nt, Artificial Sequence
  Description of Artificial Sequence: Synthetic oligonucleotide
ccuccaagcccgcauuggc

SEQ ID NO: 227678 - RNA, 19 nt, Artificial Sequence
  Description of Artificial Sequence: Synthetic oligonucleotide
gguauauggcuuuggcccu

SEQ ID NO: 227679 - RNA, 19 nt, Artificial Sequence
  Description of Artificial Sequence: Synthetic oligonucleotide
ccgacuguaucaaccugac

SEQ ID NO: 227680 - RNA, 19 nt, Artificial Sequence
  Description of Artificial Sequence: Synthetic oligonucleotide
ccacauggcuccaaccauc

SEQ ID NO: 227681 - RNA, 19 nt, Artificial Sequence
  Description of Artificial Sequence: Synthetic oligonucleotide
ccaccgaguaucaguauca

SEQ ID NO: 227682 - RNA, 19 nt, Artificial Sequence
  Description of Artificial Sequence: Synthetic oligonucleotide
cuacaccaaggcaugacuu

SEQ ID NO: 227683 - RNA, 19 nt, Artificial Sequence
  Description of Artificial Sequence: Synthetic oligonucleotide
gaauccccugugguuucac

SEQ ID NO: 227684 - RNA, 19 nt, Artificial Sequence
  Description of Artificial Sequence: Synthetic oligonucleotide
gcuugauaugaggcuuggg

SEQ ID NO: 227685 - RNA, 19 nt, Artificial Sequence
  Description of Artificial Sequence: Synthetic oligonucleotide
cauagcauuccagggucaa

SEQ ID NO: 227686 - RNA, 19 nt, Artificial Sequence
  Description of Artificial Sequence: Synthetic oligonucleotide
ccagaugaugaucagugcu

SEQ ID NO: 227687 - RNA, 19 nt, Artificial Sequence
  Description of Artificial Sequence: Synthetic oligonucleotide
gacuuguaccagggccacc

SEQ ID NO: 227688 - RNA, 19 nt, Artificial Sequence
  Description of Artificial Sequence: Synthetic oligonucleotide
cuccaaccauccauaggaa

SEQ ID NO: 227689 - RNA, 19 nt, Artificial Sequence
  Description of Artificial Sequence: Synthetic oligonucleotide
cugugguuucacgggguuc

SEQ ID NO: 227690 - RNA, 19 nt, Artificial Sequence
  Description of Artificial Sequence: Synthetic oligonucleotide
cagucagacuuugucaacu

SEQ ID NO: 227691 - RNA, 19 nt, Artificial Sequence
  Description of Artificial Sequence: Synthetic oligonucleotide
ugccaccgaguaucaguau

SEQ ID NO: 227692 - RNA, 19 nt, Artificial Sequence
  Description of Artificial Sequence: Synthetic oligonucleotide
ggucuaacuugcgguggag

SEQ ID NO: 227693 - RNA, 19 nt, Artificial Sequence
  Description of Artificial Sequence: Synthetic oligonucleotide
ggguauacacaaacaaggu

SEQ ID NO: 227694 - RNA, 19 nt, Artificial Sequence
  Description of Artificial Sequence: Synthetic oligonucleotide
gccggcaccucacacuuga

SEQ ID NO: 227695 - RNA, 19 nt, Artificial Sequence
  Description of Artificial Sequence: Synthetic oligonucleotide
cagcucaaaaggacugugu

SEQ ID NO: 227696 - RNA, 19 nt, Artificial Sequence
  Description of Artificial Sequence: Synthetic oligonucleotide
ccaagauuggucacagcua

SEQ ID NO: 227697 - RNA, 19 nt, Artificial Sequence
  Description of Artificial Sequence: Synthetic oligonucleotide
caccaugaaacugguauau

SEQ ID NO: 227698 - RNA, 19 nt, Artificial Sequence
  Description of Artificial Sequence: Synthetic oligonucleotide
gagccggcacaagcugaag

SEQ ID NO: 227699 - RNA, 19 nt, Artificial Sequence
  Description of Artificial Sequence: Synthetic oligonucleotide
aaggacuguguggguugau

SEQ ID NO: 227700 - RNA, 19 nt, Artificial Sequence
  Description of Artificial Sequence: Synthetic oligonucleotide
cuuguguuucugugaacuu

SEQ ID NO: 227701 - RNA, 19 nt, Artificial Sequence
  Description of Artificial Sequence: Synthetic oligonucleotide
cacgucagaaguuguugau

SEQ ID NO: 227702 - RNA, 19 nt, Artificial Sequence
  Description of Artificial Sequence: Synthetic oligonucleotide
cuccaagcccgcauuggcu

SEQ ID NO: 227703 - RNA, 19 nt, Artificial Sequence
  Description of Artificial Sequence: Synthetic oligonucleotide
ccuuguguuucugugaacu

SEQ ID NO: 227704 - RNA, 19 nt, Artificial Sequence
  Description of Artificial Sequence: Synthetic oligonucleotide
caucaccguuuccagcaaa

SEQ ID NO: 227705 - RNA, 19 nt, Artificial Sequence
  Description of Artificial Sequence: Synthetic oligonucleotide
aggcuccaaaagagcagca

SEQ ID NO: 227706 - RNA, 19 nt, Artificial Sequence
  Description of Artificial Sequence: Synthetic oligonucleotide
ggcguccacaauaggccgc

SEQ ID NO: 227707 - RNA, 19 nt, Artificial Sequence
  Description of Artificial Sequence: Synthetic oligonucleotide
ccacggagaagaacacauc

SEQ ID NO: 227708 - RNA, 19 nt, Artificial Sequence
  Description of Artificial Sequence: Synthetic oligonucleotide
auggcaagacaaacuccuu

SEQ ID NO: 227709 - RNA, 19 nt, Artificial Sequence
  Description of Artificial Sequence: Synthetic oligonucleotide
ggcccaggggcccaccgac

SEQ ID NO: 227710 - RNA, 19 nt, Artificial Sequence
  Description of Artificial Sequence: Synthetic oligonucleotide
agcccgcauuggcuucaag

SEQ ID NO: 227711 - RNA, 19 nt, Artificial Sequence
  Description of Artificial Sequence: Synthetic oligonucleotide
ccggcacaagcugaagagc

SEQ ID NO: 227712 - RNA, 19 nt, Artificial Sequence
  Description of Artificial Sequence: Synthetic oligonucleotide
gcguccacaauaggccgcc

SEQ ID NO: 227713 - RNA, 19 nt, Artificial Sequence
  Description of Artificial Sequence: Synthetic oligonucleotide
caccaaggcaugacuugua

SEQ ID NO: 227714 - RNA, 19 nt, Artificial Sequence
  Description of Artificial Sequence: Synthetic oligonucleotide
caggcgggccacagagguc

SEQ ID NO: 227715 - RNA, 19 nt, Artificial Sequence
  Description of Artificial Sequence: Synthetic oligonucleotide
auacuccuccaagcccgca

SEQ ID NO: 227716 - RNA, 19 nt, Artificial Sequence
  Description of Artificial Sequence: Synthetic oligonucleotide
cauguuccccagucagacu

SEQ ID NO: 227717 - RNA, 19 nt, Artificial Sequence
  Description of Artificial Sequence: Synthetic oligonucleotide
gaaccuucgcccagaugau

SEQ ID NO: 227718 - RNA, 19 nt, Artificial Sequence
  Description of Artificial Sequence: Synthetic oligonucleotide
aggcuauaagggacaugaa

SEQ ID NO: 227719 - RNA, 19 nt, Artificial Sequence
  Description of Artificial Sequence: Synthetic oligonucleotide
ccaagcccgcauuggcuuc

SEQ ID NO: 227720 - RNA, 19 nt, Artificial Sequence
  Description of Artificial Sequence: Synthetic oligonucleotide
gguugaugguagggaguca

SEQ ID NO: 227721 - RNA, 19 nt, Artificial Sequence
  Description of Artificial Sequence: Synthetic oligonucleotide
cccuuguguuucugugaac

SEQ ID NO: 227722 - RNA, 19 nt, Artificial Sequence
  Description of Artificial Sequence: Synthetic oligonucleotide
ccguuuccagcaaacucaa

SEQ ID NO: 227723 - RNA, 19 nt, Artificial Sequence
  Description of Artificial Sequence: Synthetic oligonucleotide
ggacuacaccaaggcauga

SEQ ID NO: 227724 - RNA, 19 nt, Artificial Sequence
  Description of Artificial Sequence: Synthetic oligonucleotide
gcgggaaauggagcagcac

SEQ ID NO: 227725 - RNA, 19 nt, Artificial Sequence
  Description of Artificial Sequence: Synthetic oligonucleotide
ggggcccaccgacuguauc

SEQ ID NO: 227726 - RNA, 19 nt, Artificial Sequence
  Description of Artificial Sequence: Synthetic oligonucleotide
guagcaggguuuggcgccu

SEQ ID NO: 227727 - RNA, 19 nt, Artificial Sequence
  Description of Artificial Sequence: Synthetic oligonucleotide
ggaauccccugugguuuca

SEQ ID NO: 227728 - RNA, 19 nt, Artificial Sequence
  Description of Artificial Sequence: Synthetic oligonucleotide
uagcaggguuuggcgccuc

SEQ ID NO: 227729 - RNA, 19 nt, Artificial Sequence
  Description of Artificial Sequence: Synthetic oligonucleotide
guauauggcuuuggcccuu

SEQ ID NO: 227730 - RNA, 19 nt, Artificial Sequence
  Description of Artificial Sequence: Synthetic oligonucleotide
ccauauaccgguccaucuu

SEQ ID NO: 227731 - RNA, 19 nt, Artificial Sequence
  Description of Artificial Sequence: Synthetic oligonucleotide
agccggcaccucacacuug

SEQ ID NO: 227732 - RNA, 19 nt, Artificial Sequence
  Description of Artificial Sequence: Synthetic oligonucleotide
ggcccaccgacuguaucaa

SEQ ID NO: 227733 - RNA, 19 nt, Artificial Sequence
  Description of Artificial Sequence: Synthetic oligonucleotide
cuuggacaugcuggcaguu

SEQ ID NO: 227734 - RNA, 19 nt, Artificial Sequence
  Description of Artificial Sequence: Synthetic oligonucleotide
gcccaccgacuguaucaac

SEQ ID NO: 227735 - RNA, 19 nt, Artificial Sequence
  Description of Artificial Sequence: Synthetic oligonucleotide
ccucaggauugcccacauc

SEQ ID NO: 227736 - RNA, 19 nt, Artificial Sequence
  Description of Artificial Sequence: Synthetic oligonucleotide
ccgcauuggcuucaagggu

SEQ ID NO: 227737 - RNA, 19 nt, Artificial Sequence
  Description of Artificial Sequence: Synthetic oligonucleotide
ccgccccacauguucccca

SEQ ID NO: 227738 - RNA, 19 nt, Artificial Sequence
  Description of Artificial Sequence: Synthetic oligonucleotide
ccacacgucagaaguuguu

SEQ ID NO: 227739 - RNA, 19 nt, Artificial Sequence
  Description of Artificial Sequence: Synthetic oligonucleotide
ccuucgcccagaugaugau

SEQ ID NO: 227740 - RNA, 19 nt, Artificial Sequence
  Description of Artificial Sequence: Synthetic oligonucleotide
cgggguucauuaggcagcu

SEQ ID NO: 227741 - RNA, 19 nt, Artificial Sequence
  Description of Artificial Sequence: Synthetic oligonucleotide
ccucagggcuaagauucuu

SEQ ID NO: 227742 - RNA, 19 nt, Artificial Sequence
  Description of Artificial Sequence: Synthetic oligonucleotide
uauauaagcagaauggaca

SEQ ID NO: 227743 - RNA, 19 nt, Artificial Sequence
  Description of Artificial Sequence: Synthetic oligonucleotide
aguucagucgguuagugcc

SEQ ID NO: 227744 - RNA, 19 nt, Artificial Sequence
  Description of Artificial Sequence: Synthetic oligonucleotide
cuauccagggcuuagaugc

SEQ ID NO: 227745 - RNA, 19 nt, Artificial Sequence
  Description of Artificial Sequence: Synthetic oligonucleotide
uucuaaugcaccuaaaacu

SEQ ID NO: 227746 - RNA, 19 nt, Artificial Sequence
  Description of Artificial Sequence: Synthetic oligonucleotide
ucuagcguguagcugaagg

SEQ ID NO: 227747 - RNA, 19 nt, Artificial Sequence
  Description of Artificial Sequence: Synthetic oligonucleotide
gauaguaacacuccgcuga

SEQ ID NO: 227748 - RNA, 19 nt, Artificial Sequence
  Description of Artificial Sequence: Synthetic oligonucleotide
ugagccaugaauugggcag

SEQ ID NO: 227749 - RNA, 19 nt, Artificial Sequence
  Description of Artificial Sequence: Synthetic oligonucleotide
gaaaauauguguccccugc

SEQ ID NO: 227750 - RNA, 19 nt, Artificial Sequence
  Description of Artificial Sequence: Synthetic oligonucleotide
guuguaagccuccagguag

SEQ ID NO: 227751 - RNA, 19 nt, Artificial Sequence
  Description of Artificial Sequence: Synthetic oligonucleotide
uuacaauuccaccacuagc

SEQ ID NO: 227752 - RNA, 19 nt, Artificial Sequence
  Description of Artificial Sequence: Synthetic oligonucleotide
ugucauacgggucaccuca

SEQ ID NO: 227753 - RNA, 19 nt, Artificial Sequence
  Description of Artificial Sequence: Synthetic oligonucleotide
augaccuuaggguggauac

SEQ ID NO: 227754 - RNA, 19 nt, Artificial Sequence
  Description of Artificial Sequence: Synthetic oligonucleotide
aucgcuaggguuguaagcc

SEQ ID NO: 227755 - RNA, 19 nt, Artificial Sequence
  Description of Artificial Sequence: Synthetic oligonucleotide
accuaaaacugacaagacg

SEQ ID NO: 227756 - RNA, 19 nt, Artificial Sequence
  Description of Artificial Sequence: Synthetic oligonucleotide
acagacgggcuucaaauac

SEQ ID NO: 227757 - RNA, 19 nt, Artificial Sequence
  Description of Artificial Sequence: Synthetic oligonucleotide
agaauugaucaccaaguug

SEQ ID NO: 227758 - RNA, 19 nt, Artificial Sequence
  Description of Artificial Sequence: Synthetic oligonucleotide
aucgcuguaaucauccgcc

SEQ ID NO: 227759 - RNA, 19 nt, Artificial Sequence
  Description of Artificial Sequence: Synthetic oligonucleotide
gacaaguuacaauuccacc

SEQ ID NO: 227760 - RNA, 19 nt, Artificial Sequence
  Description of Artificial Sequence: Synthetic oligonucleotide
ugacaaguuacaauuccac

SEQ ID NO: 227761 - RNA, 19 nt, Artificial Sequence
  Description of Artificial Sequence: Synthetic oligonucleotide
ucaacauuggugccacuag

SEQ ID NO: 227762 - RNA, 19 nt, Artificial Sequence
  Description of Artificial Sequence: Synthetic oligonucleotide
auaagcagaauggacaaug

SEQ ID NO: 227763 - RNA, 19 nt, Artificial Sequence
  Description of Artificial Sequence: Synthetic oligonucleotide
uuccaaaugcucucugagg

SEQ ID NO: 227764 - RNA, 19 nt, Artificial Sequence
  Description of Artificial Sequence: Synthetic oligonucleotide
uacaauuguaaucccagua

SEQ ID NO: 227765 - RNA, 19 nt, Artificial Sequence
  Description of Artificial Sequence: Synthetic oligonucleotide
ucgguauugccaucgggcg

SEQ ID NO: 227766 - RNA, 19 nt, Artificial Sequence
  Description of Artificial Sequence: Synthetic oligonucleotide
aggauaguaacacuccgcu

SEQ ID NO: 227767 - RNA, 19 nt, Artificial Sequence
  Description of Artificial Sequence: Synthetic oligonucleotide
uccucuagcguguagcuga

SEQ ID NO: 227768 - RNA, 19 nt, Artificial Sequence
  Description of Artificial Sequence: Synthetic oligonucleotide
cccuauauaagcagaaugg

SEQ ID NO: 227769 - RNA, 19 nt, Artificial Sequence
  Description of Artificial Sequence: Synthetic oligonucleotide
cugcggaugguguucaucg

SEQ ID NO: 227770 - RNA, 19 nt, Artificial Sequence
  Description of Artificial Sequence: Synthetic oligonucleotide
acacccaccccacugcggc

SEQ ID NO: 227771 - RNA, 19 nt, Artificial Sequence
  Description of Artificial Sequence: Synthetic oligonucleotide
uaaucccaagugcacuccg

SEQ ID NO: 227772 - RNA, 19 nt, Artificial Sequence
  Description of Artificial Sequence: Synthetic oligonucleotide
gaucaauuugcuuccgaca

SEQ ID NO: 227773 - RNA, 19 nt, Artificial Sequence
  Description of Artificial Sequence: Synthetic oligonucleotide
auagccuccgaggacauag

SEQ ID NO: 227774 - RNA, 19 nt, Artificial Sequence
  Description of Artificial Sequence: Synthetic oligonucleotide
cacuaggugccacucaucc

SEQ ID NO: 227775 - RNA, 19 nt, Artificial Sequence
  Description of Artificial Sequence: Synthetic oligonucleotide
ucauuggcuucuaaugcac

SEQ ID NO: 227776 - RNA, 19 nt, Artificial Sequence
  Description of Artificial Sequence: Synthetic oligonucleotide
acacuuccgacucgcagcg

SEQ ID NO: 227777 - RNA, 19 nt, Artificial Sequence
  Description of Artificial Sequence: Synthetic oligonucleotide
agcccauuggugaacaugg

SEQ ID NO: 227778 - RNA, 19 nt, Artificial Sequence
  Description of Artificial Sequence: Synthetic oligonucleotide
aguuaaaggguugcuuaac

SEQ ID NO: 227779 - RNA, 19 nt, Artificial Sequence
  Description of Artificial Sequence: Synthetic oligonucleotide
ugcauagauacaguuguac

SEQ ID NO: 227780 - RNA, 19 nt, Artificial Sequence
  Description of Artificial Sequence: Synthetic oligonucleotide
augccaaaagccugcuugg

SEQ ID NO: 227781 - RNA, 19 nt, Artificial Sequence
  Description of Artificial Sequence: Synthetic oligonucleotide
uacaugacugcaccauuca

SEQ ID NO: 227782 - RNA, 19 nt, Artificial Sequence
  Description of Artificial Sequence: Synthetic oligonucleotide
uggugguauacaauuguaa

SEQ ID NO: 227783 - RNA, 19 nt, Artificial Sequence
  Description of Artificial Sequence: Synthetic oligonucleotide
uacaucaccgcguccccgg

SEQ ID NO: 227784 - RNA, 19 nt, Artificial Sequence
  Description of Artificial Sequence: Synthetic oligonucleotide
uccccuagaauugaucacc

SEQ ID NO: 227785 - RNA, 19 nt, Artificial Sequence
  Description of Artificial Sequence: Synthetic oligonucleotide
ucuaugaccccuaccccga

SEQ ID NO: 227786 - RNA, 19 nt, Artificial Sequence
  Description of Artificial Sequence: Synthetic oligonucleotide
auaguaacacuccgcugag

SEQ ID NO: 227787 - RNA, 19 nt, Artificial Sequence
  Description of Artificial Sequence: Synthetic oligonucleotide
cuagaauugaucaccaagu

SEQ ID NO: 227788 - RNA, 19 nt, Artificial Sequence
  Description of Artificial Sequence: Synthetic oligonucleotide
acguucaggucaucgcggc

SEQ ID NO: 227789 - RNA, 19 nt, Artificial Sequence
  Description of Artificial Sequence: Synthetic oligonucleotide
caggauaguaacacuccgc

SEQ ID NO: 227790 - RNA, 19 nt, Artificial Sequence
  Description of Artificial Sequence: Synthetic oligonucleotide
caacauuggugccacuagg

SEQ ID NO: 227791 - RNA, 19 nt, Artificial Sequence
  Description of Artificial Sequence: Synthetic oligonucleotide
cacaguaaucccaagugca

SEQ ID NO: 227792 - RNA, 19 nt, Artificial Sequence
  Description of Artificial Sequence: Synthetic oligonucleotide
aauccuccgagucaacauu

SEQ ID NO: 227793 - RNA, 19 nt, Artificial Sequence
  Description of Artificial Sequence: Synthetic oligonucleotide
aucaccgcguccccggccc

SEQ ID NO: 227794 - RNA, 19 nt, Artificial Sequence
  Description of Artificial Sequence: Synthetic oligonucleotide
uagaauugaucaccaaguu

SEQ ID NO: 227795 - RNA, 19 nt, Artificial Sequence
  Description of Artificial Sequence: Synthetic oligonucleotide
agguagucuuugcagcgcg

SEQ ID NO: 227796 - RNA, 19 nt, Artificial Sequence
  Description of Artificial Sequence: Synthetic oligonucleotide
gacugucggaaguagccgc

SEQ ID NO: 227797 - RNA, 19 nt, Artificial Sequence
  Description of Artificial Sequence: Synthetic oligonucleotide
ccuagaauugaucaccaag

SEQ ID NO: 227798 - RNA, 19 nt, Artificial Sequence
  Description of Artificial Sequence: Synthetic oligonucleotide
uggauaccuucaauggaca

SEQ ID NO: 227799 - RNA, 19 nt, Artificial Sequence
  Description of Artificial Sequence: Synthetic oligonucleotide
ugggauuguagcaguccag

SEQ ID NO: 227800 - RNA, 19 nt, Artificial Sequence
  Description of Artificial Sequence: Synthetic oligonucleotide
auaacuauccagggcuuag

SEQ ID NO: 227801 - RNA, 19 nt, Artificial Sequence
  Description of Artificial Sequence: Synthetic oligonucleotide
agauauacucccgggcacg

SEQ ID NO: 227802 - RNA, 19 nt, Artificial Sequence
  Description of Artificial Sequence: Synthetic oligonucleotide
augggauuguagcagucca

SEQ ID NO: 227803 - RNA, 19 nt, Artificial Sequence
  Description of Artificial Sequence: Synthetic oligonucleotide
guuugcaggaagcgcggcg

SEQ ID NO: 227804 - RNA, 19 nt, Artificial Sequence
  Description of Artificial Sequence: Synthetic oligonucleotide
ucccgaagcccauugguga

SEQ ID NO: 227805 - RNA, 19 nt, Artificial Sequence
  Description of Artificial Sequence: Synthetic oligonucleotide
guggauaccuucaauggac

SEQ ID NO: 227806 - RNA, 19 nt, Artificial Sequence
  Description of Artificial Sequence: Synthetic oligonucleotide
agucgguauugccaucggg

SEQ ID NO: 227807 - RNA, 19 nt, Artificial Sequence
  Description of Artificial Sequence: Synthetic oligonucleotide
ugagacucgagggaggauc

SEQ ID NO: 227808 - RNA, 19 nt, Artificial Sequence
  Description of Artificial Sequence: Synthetic oligonucleotide
caaugguaagcagagaaga

SEQ ID NO: 227809 - RNA, 19 nt, Artificial Sequence
  Description of Artificial Sequence: Synthetic oligonucleotide
ugucggaaguagccgcccg

SEQ ID NO: 227810 - RNA, 19 nt, Artificial Sequence
  Description of Artificial Sequence: Synthetic oligonucleotide
gugugcaagacacuaaucu

SEQ ID NO: 227811 - RNA, 19 nt, Artificial Sequence
  Description of Artificial Sequence: Synthetic oligonucleotide
cuagcaguuaggguccccg

SEQ ID NO: 227812 - RNA, 19 nt, Artificial Sequence
  Description of Artificial Sequence: Synthetic oligonucleotide
uggucggguaacccaagug

SEQ ID NO: 227813 - RNA, 19 nt, Artificial Sequence
  Description of Artificial Sequence: Synthetic oligonucleotide
ugcaagacacuaaucuguu

SEQ ID NO: 227814 - RNA, 19 nt, Artificial Sequence
  Description of Artificial Sequence: Synthetic oligonucleotide
caucgggcgaauuguugcg

SEQ ID NO: 227815 - RNA, 19 nt, Artificial Sequence
  Description of Artificial Sequence: Synthetic oligonucleotide
cauuggcuucuaaugcacc

SEQ ID NO: 227816 - RNA, 19 nt, Artificial Sequence
  Description of Artificial Sequence: Synthetic oligonucleotide
cagacgggcuucaaauacc

SEQ ID NO: 227817 - RNA, 19 nt, Artificial Sequence
  Description of Artificial Sequence: Synthetic oligonucleotide
cagucgguuagugccaucg

SEQ ID NO: 227818 - RNA, 19 nt, Artificial Sequence
  Description of Artificial Sequence: Synthetic oligonucleotide
guggaggcguacaucaccg

SEQ ID NO: 227819 - RNA, 19 nt, Artificial Sequence
  Description of Artificial Sequence: Synthetic oligonucleotide
gcccuauauaagcagaaug

SEQ ID NO: 227820 - RNA, 19 nt, Artificial Sequence
  Description of Artificial Sequence: Synthetic oligonucleotide
uuugacgacaggggcagga

SEQ ID NO: 227821 - RNA, 19 nt, Artificial Sequence
  Description of Artificial Sequence: Synthetic oligonucleotide
uuaggguggauaccuucaa

SEQ ID NO: 227822 - RNA, 19 nt, Artificial Sequence
  Description of Artificial Sequence: Synthetic oligonucleotide
cugagggcagucauacuug

SEQ ID NO: 227823 - RNA, 19 nt, Artificial Sequence
  Description of Artificial Sequence: Synthetic oligonucleotide
cuuaggguggauaccuuca

SEQ ID NO: 227824 - RNA, 19 nt, Artificial Sequence
  Description of Artificial Sequence: Synthetic oligonucleotide
caagacgacuguguggccc

SEQ ID NO: 227825 - RNA, 19 nt, Artificial Sequence
  Description of Artificial Sequence: Synthetic oligonucleotide
caugggauuguagcagucc

SEQ ID NO: 227826 - RNA, 19 nt, Artificial Sequence
  Description of Artificial Sequence: Synthetic oligonucleotide
agguacacuucuguugauc

SEQ ID NO: 227827 - RNA, 19 nt, Artificial Sequence
  Description of Artificial Sequence: Synthetic oligonucleotide
ggaggcguacaucaccgcg

SEQ ID NO: 227828 - RNA, 19 nt, Artificial Sequence
  Description of Artificial Sequence: Synthetic oligonucleotide
acugcguagauguggccgu

SEQ ID NO: 227829 - RNA, 19 nt, Artificial Sequence
  Description of Artificial Sequence: Synthetic oligonucleotide
cagugcgacagguugaaga

SEQ ID NO: 227830 - RNA, 19 nt, Artificial Sequence
  Description of Artificial Sequence: Synthetic oligonucleotide
ggggcuacaaaaguccagg

SEQ ID NO: 227831 - RNA, 19 nt, Artificial Sequence
  Description of Artificial Sequence: Synthetic oligonucleotide
aauaacuauccagggcuua

SEQ ID NO: 227832 - RNA, 19 nt, Artificial Sequence
  Description of Artificial Sequence: Synthetic oligonucleotide
uuccccuagaauugaucac

SEQ ID NO: 227833 - RNA, 19 nt, Artificial Sequence
  Description of Artificial Sequence: Synthetic oligonucleotide
aggcguacaucaccgcguc

SEQ ID NO: 227834 - RNA, 19 nt, Artificial Sequence
  Description of Artificial Sequence: Synthetic oligonucleotide
gucaucgcggcugaugagc

SEQ ID NO: 227835 - RNA, 19 nt, Artificial Sequence
  Description of Artificial Sequence: Synthetic oligonucleotide
ucgaugcacgcguggaaca

SEQ ID NO: 227836 - RNA, 19 nt, Artificial Sequence
  Description of Artificial Sequence: Synthetic oligonucleotide
agcguagagcagcccgccc

SEQ ID NO: 227837 - RNA, 19 nt, Artificial Sequence
  Description of Artificial Sequence: Synthetic oligonucleotide
ccugagggauuccaaaugc

SEQ ID NO: 227838 - RNA, 19 nt, Artificial Sequence
  Description of Artificial Sequence: Synthetic oligonucleotide
gauauacucccgggcacgc

SEQ ID NO: 227839 - RNA, 19 nt, Artificial Sequence
  Description of Artificial Sequence: Synthetic oligonucleotide
gcggccagaugucauacgg

SEQ ID NO: 227840 - RNA, 19 nt, Artificial Sequence
  Description of Artificial Sequence: Synthetic oligonucleotide
guaacccaagugcuucagc

SEQ ID NO: 227841 - RNA, 19 nt, Artificial Sequence
  Description of Artificial Sequence: Synthetic oligonucleotide
agcgaaguuggcaaugcca

SEQ ID NO: 227842 - RNA, 19 nt, Artificial Sequence
  Description of Artificial Sequence: Synthetic oligonucleotide
aggaccugugugcaagaca

SEQ ID NO: 227843 - RNA, 19 nt, Artificial Sequence
  Description of Artificial Sequence: Synthetic oligonucleotide
ggagccaucgcuaggguug

SEQ ID NO: 227844 - RNA, 19 nt, Artificial Sequence
  Description of Artificial Sequence: Synthetic oligonucleotide
ugacccagucgaugcacgc

SEQ ID NO: 227845 - RNA, 19 nt, Artificial Sequence
  Description of Artificial Sequence: Synthetic oligonucleotide
uucccuugucaguggucgg

SEQ ID NO: 227846 - RNA, 19 nt, Artificial Sequence
  Description of Artificial Sequence: Synthetic oligonucleotide
ucgggcgaauuguugcggc

SEQ ID NO: 227847 - RNA, 19 nt, Artificial Sequence
  Description of Artificial Sequence: Synthetic oligonucleotide
uugccguccugggagggcg

SEQ ID NO: 227848 - RNA, 19 nt, Artificial Sequence
  Description of Artificial Sequence: Synthetic oligonucleotide
gguuagugccaucgaagcc

SEQ ID NO: 227849 - RNA, 19 nt, Artificial Sequence
  Description of Artificial Sequence: Synthetic oligonucleotide
caguagugccugcacguag

SEQ ID NO: 227850 - RNA, 19 nt, Artificial Sequence
  Description of Artificial Sequence: Synthetic oligonucleotide
acgacuguguggcccaaga

SEQ ID NO: 227851 - RNA, 19 nt, Artificial Sequence
  Description of Artificial Sequence: Synthetic oligonucleotide
cauugcuaggguccagcug

SEQ ID NO: 227852 - RNA, 19 nt, Artificial Sequence
  Description of Artificial Sequence: Synthetic oligonucleotide
gacccagucgaugcacgcg

SEQ ID NO: 227853 - RNA, 19 nt, Artificial Sequence
  Description of Artificial Sequence: Synthetic oligonucleotide
acaucaccgcguccccggc

SEQ ID NO: 227854 - RNA, 19 nt, Artificial Sequence
  Description of Artificial Sequence: Synthetic oligonucleotide
cacgccaauccuccgaguc

SEQ ID NO: 227855 - RNA, 19 nt, Artificial Sequence
  Description of Artificial Sequence: Synthetic oligonucleotide
acccagucgaugcacgcgu

SEQ ID NO: 227856 - RNA, 19 nt, Artificial Sequence
  Description of Artificial Sequence: Synthetic oligonucleotide
ugcacuccgccgaugcuuc

SEQ ID NO: 227857 - RNA, 19 nt, Artificial Sequence
  Description of Artificial Sequence: Synthetic oligonucleotide
guaaucauccgccacucau

SEQ ID NO: 227858 - RNA, 19 nt, Artificial Sequence
  Description of Artificial Sequence: Synthetic oligonucleotide
uaacuauccagggcuuaga

SEQ ID NO: 227859 - RNA, 19 nt, Artificial Sequence
  Description of Artificial Sequence: Synthetic oligonucleotide
ugaccuuaggguggauacc

SEQ ID NO: 227860 - RNA, 19 nt, Artificial Sequence
  Description of Artificial Sequence: Synthetic oligonucleotide
caauuguaaucccaguacu

SEQ ID NO: 227861 - RNA, 19 nt, Artificial Sequence
  Description of Artificial Sequence: Synthetic oligonucleotide
cacuuugacgacaggggca

SEQ ID NO: 227862 - RNA, 19 nt, Artificial Sequence
  Description of Artificial Sequence: Synthetic oligonucleotide
ucauacgggucaccucacu

SEQ ID NO: 227863 - RNA, 19 nt, Artificial Sequence
  Description of Artificial Sequence: Synthetic oligonucleotide
ugcggccagaugucauacg

SEQ ID NO: 227864 - RNA, 19 nt, Artificial Sequence
  Description of Artificial Sequence: Synthetic oligonucleotide
guaaucccaagugcacucc

SEQ ID NO: 227865 - RNA, 19 nt, Artificial Sequence
  Description of Artificial Sequence: Synthetic oligonucleotide
gggaaaguuaaaggguugc

SEQ ID NO: 227866 - RNA, 19 nt, Artificial Sequence
  Description of Artificial Sequence: Synthetic oligonucleotide
agcgugagcuccuggaaua

SEQ ID NO: 227867 - RNA, 19 nt, Artificial Sequence
  Description of Artificial Sequence: Synthetic oligonucleotide
gguggauaccuucaaugga

SEQ ID NO: 227868 - RNA, 19 nt, Artificial Sequence
  Description of Artificial Sequence: Synthetic oligonucleotide
guuccgggugacaaguuac

SEQ ID NO: 227869 - RNA, 19 nt, Artificial Sequence
  Description of Artificial Sequence: Synthetic oligonucleotide
ccaucgggcgaauuguugc

SEQ ID NO: 227870 - RNA, 19 nt, Artificial Sequence
  Description of Artificial Sequence: Synthetic oligonucleotide
gagccaugaauugggcagc

SEQ ID NO: 227871 - RNA, 19 nt, Artificial Sequence
  Description of Artificial Sequence: Synthetic oligonucleotide
auacagcaagcgguugagg

SEQ ID NO: 227872 - RNA, 19 nt, Artificial Sequence
  Description of Artificial Sequence: Synthetic oligonucleotide
ugcggaugguguucaucgc

SEQ ID NO: 227873 - RNA, 19 nt, Artificial Sequence
  Description of Artificial Sequence: Synthetic oligonucleotide
guagccgcccgcuguguag

SEQ ID NO: 227874 - RNA, 19 nt, Artificial Sequence
  Description of Artificial Sequence: Synthetic oligonucleotide
auggccgcgcuccgccucc

SEQ ID NO: 227875 - RNA, 19 nt, Artificial Sequence
  Description of Artificial Sequence: Synthetic oligonucleotide
aaucaagaucugagagugu

SEQ ID NO: 227876 - RNA, 19 nt, Artificial Sequence
  Description of Artificial Sequence: Synthetic oligonucleotide
ggauaguaacacuccgcug

SEQ ID NO: 227877 - RNA, 19 nt, Artificial Sequence
  Description of Artificial Sequence: Synthetic oligonucleotide
ucgcagcgcacguucaggu

SEQ ID NO: 227878 - RNA, 19 nt, Artificial Sequence
  Description of Artificial Sequence: Synthetic oligonucleotide
aucgggcgaauuguugcgg

SEQ ID NO: 227879 - RNA, 19 nt, Artificial Sequence
  Description of Artificial Sequence: Synthetic oligonucleotide
acgcguggaacacuuccga

SEQ ID NO: 227880 - RNA, 19 nt, Artificial Sequence
  Description of Artificial Sequence: Synthetic oligonucleotide
acgccaauccuccgaguca

SEQ ID NO: 227881 - RNA, 19 nt, Artificial Sequence
  Description of Artificial Sequence: Synthetic oligonucleotide
acucgcagcgcacguucag

SEQ ID NO: 227882 - RNA, 19 nt, Artificial Sequence
  Description of Artificial Sequence: Synthetic oligonucleotide
ggcgaacucaauaagccuc

SEQ ID NO: 227883 - RNA, 19 nt, Artificial Sequence
  Description of Artificial Sequence: Synthetic oligonucleotide
ucgcuaggguuguaagccu

SEQ ID NO: 227884 - RNA, 19 nt, Artificial Sequence
  Description of Artificial Sequence: Synthetic oligonucleotide
gcauguagauauacucccg

SEQ ID NO: 227885 - RNA, 19 nt, Artificial Sequence
  Description of Artificial Sequence: Synthetic oligonucleotide
agacacuaaucuguuuuaa

SEQ ID NO: 227886 - RNA, 19 nt, Artificial Sequence
  Description of Artificial Sequence: Synthetic oligonucleotide
ucgcuguaaucauccgcca

SEQ ID NO: 227887 - RNA, 19 nt, Artificial Sequence
  Description of Artificial Sequence: Synthetic oligonucleotide
aucccgaucuggcucguau

SEQ ID NO: 227888 - RNA, 19 nt, Artificial Sequence
  Description of Artificial Sequence: Synthetic oligonucleotide
gucgaugcacgcguggaac

SEQ ID NO: 227889 - RNA, 19 nt, Artificial Sequence
  Description of Artificial Sequence: Synthetic oligonucleotide
gacagacgggcuucaaaua

SEQ ID NO: 227890 - RNA, 19 nt, Artificial Sequence
  Description of Artificial Sequence: Synthetic oligonucleotide
agcugggauguccucguau

SEQ ID NO: 227891 - RNA, 19 nt, Artificial Sequence
  Description of Artificial Sequence: Synthetic oligonucleotide
ucggguaacccaagugcuu

SEQ ID NO: 227892 - RNA, 19 nt, Artificial Sequence
  Description of Artificial Sequence: Synthetic oligonucleotide
gcacgcguggaacacuucc

SEQ ID NO: 227893 - RNA, 19 nt, Artificial Sequence
  Description of Artificial Sequence: Synthetic oligonucleotide
cuugucaguggucggguaa

SEQ ID NO: 227894 - RNA, 19 nt, Artificial Sequence
  Description of Artificial Sequence: Synthetic oligonucleotide
gcggcacgcucauagaggc

SEQ ID NO: 227895 - RNA, 19 nt, Artificial Sequence
  Description of Artificial Sequence: Synthetic oligonucleotide
gaccuuaggguggauaccu

SEQ ID NO: 227896 - RNA, 19 nt, Artificial Sequence
  Description of Artificial Sequence: Synthetic oligonucleotide
gauacaugacugcaccauu

SEQ ID NO: 227897 - RNA, 19 nt, Artificial Sequence
  Description of Artificial Sequence: Synthetic oligonucleotide
gucgguuagugccaucgaa

SEQ ID NO: 227898 - RNA, 19 nt, Artificial Sequence
  Description of Artificial Sequence: Synthetic oligonucleotide
cucgcagcgcacguucagg

SEQ ID NO: 227899 - RNA, 19 nt, Artificial Sequence
  Description of Artificial Sequence: Synthetic oligonucleotide
agucgguuagugccaucga

SEQ ID NO: 227900 - RNA, 19 nt, Artificial Sequence
  Description of Artificial Sequence: Synthetic oligonucleotide
acuccgccgaugcuucaug

SEQ ID NO: 227901 - RNA, 19 nt, Artificial Sequence
  Description of Artificial Sequence: Synthetic oligonucleotide
uggaggcguacaucaccgc

SEQ ID NO: 227902 - RNA, 19 nt, Artificial Sequence
  Description of Artificial Sequence: Synthetic oligonucleotide
agucgaugcacgcguggaa

SEQ ID NO: 227903 - RNA, 19 nt, Artificial Sequence
  Description of Artificial Sequence: Synthetic oligonucleotide
gcguacaucaccgcguccc

SEQ ID NO: 227904 - RNA, 19 nt, Artificial Sequence
  Description of Artificial Sequence: Synthetic oligonucleotide
uccagguagcugagcgacu

SEQ ID NO: 227905 - RNA, 19 nt, Artificial Sequence
  Description of Artificial Sequence: Synthetic oligonucleotide
ugcccuauauaagcagaau

SEQ ID NO: 227906 - RNA, 19 nt, Artificial Sequence
  Description of Artificial Sequence: Synthetic oligonucleotide
ggguacaaaaggacaagca

SEQ ID NO: 227907 - RNA, 19 nt, Artificial Sequence
  Description of Artificial Sequence: Synthetic oligonucleotide
cuagcguguagcugaaggu

SEQ ID NO: 227908 - RNA, 19 nt, Artificial Sequence
  Description of Artificial Sequence: Synthetic oligonucleotide
ugguuggucaugggauugu

SEQ ID NO: 227909 - RNA, 19 nt, Artificial Sequence
  Description of Artificial Sequence: Synthetic oligonucleotide
cacggcccgcaguagugcc

SEQ ID NO: 227910 - RNA, 19 nt, Artificial Sequence
  Description of Artificial Sequence: Synthetic oligonucleotide
uuuugcugcuuggguacaa

SEQ ID NO: 227911 - RNA, 19 nt, Artificial Sequence
  Description of Artificial Sequence: Synthetic oligonucleotide
cagcaagcgguugaggaca

SEQ ID NO: 227912 - RNA, 19 nt, Artificial Sequence
  Description of Artificial Sequence: Synthetic oligonucleotide
acgacaggggcaggaacug

SEQ ID NO: 227913 - RNA, 19 nt, Artificial Sequence
  Description of Artificial Sequence: Synthetic oligonucleotide
ccgacugcguagauguggc

SEQ ID NO: 227914 - RNA, 19 nt, Artificial Sequence
  Description of Artificial Sequence: Synthetic oligonucleotide
gcagcgcacguucagguca

SEQ ID NO: 227915 - RNA, 19 nt, Artificial Sequence
  Description of Artificial Sequence: Synthetic oligonucleotide
aacacuccgcugaguucag

SEQ ID NO: 227916 - RNA, 19 nt, Artificial Sequence
  Description of Artificial Sequence: Synthetic oligonucleotide
uugacgacaggggcaggaa

SEQ ID NO: 227917 - RNA, 19 nt, Artificial Sequence
  Description of Artificial Sequence: Synthetic oligonucleotide
cacgcucauagaggcacag

SEQ ID NO: 227918 - RNA, 19 nt, Artificial Sequence
  Description of Artificial Sequence: Synthetic oligonucleotide
auggugacggcaacaccca

SEQ ID NO: 227919 - RNA, 19 nt, Artificial Sequence
  Description of Artificial Sequence: Synthetic oligonucleotide
gaggaccugugugcaagac

SEQ ID NO: 227920 - RNA, 19 nt, Artificial Sequence
  Description of Artificial Sequence: Synthetic oligonucleotide
caaagugcauguagauaua

SEQ ID NO: 227921 - RNA, 19 nt, Artificial Sequence
  Description of Artificial Sequence: Synthetic oligonucleotide
ccuuaggguggauaccuuc

SEQ ID NO: 227922 - RNA, 19 nt, Artificial Sequence
  Description of Artificial Sequence: Synthetic oligonucleotide
gguauugccaucgggcgaa

SEQ ID NO: 227923 - RNA, 19 nt, Artificial Sequence
  Description of Artificial Sequence: Synthetic oligonucleotide
ugagcguggccagcuggca

SEQ ID NO: 227924 - RNA, 19 nt, Artificial Sequence
  Description of Artificial Sequence: Synthetic oligonucleotide
acggagauggaggccgugu

SEQ ID NO: 227925 - RNA, 19 nt, Artificial Sequence
  Description of Artificial Sequence: Synthetic oligonucleotide
ugcgcggcacgcucauaga

SEQ ID NO: 227926 - RNA, 19 nt, Artificial Sequence
  Description of Artificial Sequence: Synthetic oligonucleotide
ugccaucgggcgaauuguu

SEQ ID NO: 227927 - RNA, 19 nt, Artificial Sequence
  Description of Artificial Sequence: Synthetic oligonucleotide
cacguagaagcgccgcuga

SEQ ID NO: 227928 - RNA, 19 nt, Artificial Sequence
  Description of Artificial Sequence: Synthetic oligonucleotide
ggaagucgcugcaggcucg

SEQ ID NO: 227929 - RNA, 19 nt, Artificial Sequence
  Description of Artificial Sequence: Synthetic oligonucleotide
ugcguagauguggccgucu

SEQ ID NO: 227930 - RNA, 19 nt, Artificial Sequence
  Description of Artificial Sequence: Synthetic oligonucleotide
caguggucggguaacccaa

SEQ ID NO: 227931 - RNA, 19 nt, Artificial Sequence
  Description of Artificial Sequence: Synthetic oligonucleotide
accccuaccccgaugcggu

SEQ ID NO: 227932 - RNA, 19 nt, Artificial Sequence
  Description of Artificial Sequence: Synthetic oligonucleotide
cugcggccagaugucauac

SEQ ID NO: 227933 - RNA, 19 nt, Artificial Sequence
  Description of Artificial Sequence: Synthetic oligonucleotide
cugagggauuccaaaugcu

SEQ ID NO: 227934 - RNA, 19 nt, Artificial Sequence
  Description of Artificial Sequence: Synthetic oligonucleotide
ccucguauuugaccugcag

SEQ ID NO: 227935 - RNA, 19 nt, Artificial Sequence
  Description of Artificial Sequence: Synthetic oligonucleotide
cguggaggcguacaucacc

SEQ ID NO: 227936 - RNA, 19 nt, Artificial Sequence
  Description of Artificial Sequence: Synthetic oligonucleotide
uagccgcccgcuguguaga

SEQ ID NO: 227937 - RNA, 19 nt, Artificial Sequence
  Description of Artificial Sequence: Synthetic oligonucleotide
gcuaggguuguaagccucc

SEQ ID NO: 227938 - RNA, 19 nt, Artificial Sequence
  Description of Artificial Sequence: Synthetic oligonucleotide
guccucuagcguguagcug

SEQ ID NO: 227939 - RNA, 19 nt, Artificial Sequence
  Description of Artificial Sequence: Synthetic oligonucleotide
gcgaaguuggcaaugccaa

SEQ ID NO: 227940 - RNA, 19 nt, Artificial Sequence
  Description of Artificial Sequence: Synthetic oligonucleotide
cgaauuguugcggccaccc

SEQ ID NO: 227941 - RNA, 19 nt, Artificial Sequence
  Description of Artificial Sequence: Synthetic oligonucleotide
gcgcggcacgcucauagag

SEQ ID NO: 227942 - RNA, 19 nt, Artificial Sequence
  Description of Artificial Sequence: Synthetic oligonucleotide
uggagucgguauugccauc

SEQ ID NO: 227943 - RNA, 19 nt, Artificial Sequence
  Description of Artificial Sequence: Synthetic oligonucleotide
auauacucccgggcacgcu

SEQ ID NO: 227944 - RNA, 19 nt, Artificial Sequence
  Description of Artificial Sequence: Synthetic oligonucleotide
ccagucgaugcacgcgugg

SEQ ID NO: 227945 - RNA, 19 nt, Artificial Sequence
  Description of Artificial Sequence: Synthetic oligonucleotide
ugcacgcguggaacacuuc

SEQ ID NO: 227946 - RNA, 19 nt, Artificial Sequence
  Description of Artificial Sequence: Synthetic oligonucleotide
ggcgaauuguugcggccac

SEQ ID NO: 227947 - RNA, 19 nt, Artificial Sequence
  Description of Artificial Sequence: Synthetic oligonucleotide
ggugccacucaucccgauc

SEQ ID NO: 227948 - RNA, 19 nt, Artificial Sequence
  Description of Artificial Sequence: Synthetic oligonucleotide
cauacuugacccagucgau

SEQ ID NO: 227949 - RNA, 19 nt, Artificial Sequence
  Description of Artificial Sequence: Synthetic oligonucleotide
gugcgacagguugaagaac

SEQ ID NO: 227950 - RNA, 19 nt, Artificial Sequence
  Description of Artificial Sequence: Synthetic oligonucleotide
ccgacaggguuccauggug

SEQ ID NO: 227951 - RNA, 19 nt, Artificial Sequence
  Description of Artificial Sequence: Synthetic oligonucleotide
cuuugacgacaggggcagg

SEQ ID NO: 227952 - RNA, 19 nt, Artificial Sequence
  Description of Artificial Sequence: Synthetic oligonucleotide
gcgcacguucaggucaucg

SEQ ID NO: 227953 - RNA, 19 nt, Artificial Sequence
  Description of Artificial Sequence: Synthetic oligonucleotide
ccuaccccgaugcgguugc

SEQ ID NO: 227954 - RNA, 19 nt, Artificial Sequence
  Description of Artificial Sequence: Synthetic oligonucleotide
agcgccgcugagggcaguc

SEQ ID NO: 227955 - RNA, 19 nt, Artificial Sequence
  Description of Artificial Sequence: Synthetic oligonucleotide
cgcggcacgcucauagagg

SEQ ID NO: 227956 - RNA, 19 nt, Artificial Sequence
  Description of Artificial Sequence: Synthetic oligonucleotide
uggccgucuaugaccccua

SEQ ID NO: 227957 - RNA, 19 nt, Artificial Sequence
  Description of Artificial Sequence: Synthetic oligonucleotide
gguagucuuugcagcgcgc

SEQ ID NO: 227958 - RNA, 19 nt, Artificial Sequence
  Description of Artificial Sequence: Synthetic oligonucleotide
cuugggcgcacggcagggc

SEQ ID NO: 227959 - RNA, 19 nt, Artificial Sequence
  Description of Artificial Sequence: Synthetic oligonucleotide
gucauacgggucaccucac

SEQ ID NO: 227960 - RNA, 19 nt, Artificial Sequence
  Description of Artificial Sequence: Synthetic oligonucleotide
cauggccgcgcuccgccuc

SEQ ID NO: 227961 - RNA, 19 nt, Artificial Sequence
  Description of Artificial Sequence: Synthetic oligonucleotide
ggaaaguuaaaggguugcu

SEQ ID NO: 227962 - RNA, 19 nt, Artificial Sequence
  Description of Artificial Sequence: Synthetic oligonucleotide
gccgucuaugaccccuacc

SEQ ID NO: 227963 - RNA, 19 nt, Artificial Sequence
  Description of Artificial Sequence: Synthetic oligonucleotide
gaugcacgcguggaacacu

SEQ ID NO: 227964 - RNA, 19 nt, Artificial Sequence
  Description of Artificial Sequence: Synthetic oligonucleotide
ccgcuguguagaugaggcg

SEQ ID NO: 227965 - RNA, 19 nt, Artificial Sequence
  Description of Artificial Sequence: Synthetic oligonucleotide
ggcccaagagggugcaaga

SEQ ID NO: 227966 - RNA, 19 nt, Artificial Sequence
  Description of Artificial Sequence: Synthetic oligonucleotide
augcacgcguggaacacuu

SEQ ID NO: 227967 - RNA, 19 nt, Artificial Sequence
  Description of Artificial Sequence: Synthetic oligonucleotide
gacucgcagcgcacguuca

SEQ ID NO: 227968 - RNA, 19 nt, Artificial Sequence
  Description of Artificial Sequence: Synthetic oligonucleotide
uauugccaucgggcgaauu

SEQ ID NO: 227969 - RNA, 19 nt, Artificial Sequence
  Description of Artificial Sequence: Synthetic oligonucleotide
cacucaucccgaucuggcu

SEQ ID NO: 227970 - RNA, 19 nt, Artificial Sequence
  Description of Artificial Sequence: Synthetic oligonucleotide
gccaucgggcgaauuguug

SEQ ID NO: 227971 - RNA, 19 nt, Artificial Sequence
  Description of Artificial Sequence: Synthetic oligonucleotide
cccaagugcacuccgccga

SEQ ID NO: 227972 - RNA, 19 nt, Artificial Sequence
  Description of Artificial Sequence: Synthetic oligonucleotide
cucuagcguguagcugaag

SEQ ID NO: 227973 - RNA, 19 nt, Artificial Sequence
  Description of Artificial Sequence: Synthetic oligonucleotide
cggccagaugucauacggg

SEQ ID NO: 227974 - RNA, 19 nt, Artificial Sequence
  Description of Artificial Sequence: Synthetic oligonucleotide
cugcauacagcaagcgguu

SEQ ID NO: 227975 - RNA, 19 nt, Artificial Sequence
  Description of Artificial Sequence: Synthetic oligonucleotide
cgacugucggaaguagccg

SEQ ID NO: 227976 - RNA, 19 nt, Artificial Sequence
  Description of Artificial Sequence: Synthetic oligonucleotide
gggcgaauuguugcggcca

SEQ ID NO: 227977 - RNA, 19 nt, Artificial Sequence
  Description of Artificial Sequence: Synthetic oligonucleotide
ggggcacuuugacgacagg

SEQ ID NO: 227978 - RNA, 19 nt, Artificial Sequence
  Description of Artificial Sequence: Synthetic oligonucleotide
ccgcccgcuguguagauga

SEQ ID NO: 227979 - RNA, 19 nt, Artificial Sequence
  Description of Artificial Sequence: Synthetic oligonucleotide
ggagggcgucaccucggcc

SEQ ID NO: 227980 - RNA, 19 nt, Artificial Sequence
  Description of Artificial Sequence: Synthetic oligonucleotide
cacugucaaucugauacau

SEQ ID NO: 227981 - RNA, 19 nt, Artificial Sequence
  Description of Artificial Sequence: Synthetic oligonucleotide
ggacugcgugggcuugugc

SEQ ID NO: 227982 - RNA, 19 nt, Artificial Sequence
  Description of Artificial Sequence: Synthetic oligonucleotide
guggccgucuaugaccccu

SEQ ID NO: 227983 - RNA, 19 nt, Artificial Sequence
  Description of Artificial Sequence: Synthetic oligonucleotide
ucaucccgaucuggcucgu

SEQ ID NO: 227984 - RNA, 19 nt, Artificial Sequence
  Description of Artificial Sequence: Synthetic oligonucleotide
gcggaugguguucaucgcu

SEQ ID NO: 227985 - RNA, 19 nt, Artificial Sequence
  Description of Artificial Sequence: Synthetic oligonucleotide
ccaccuugggcgcacggca

SEQ ID NO: 227986 - RNA, 19 nt, Artificial Sequence
  Description of Artificial Sequence: Synthetic oligonucleotide
cacuccguggaggcguaca

SEQ ID NO: 227987 - RNA, 19 nt, Artificial Sequence
  Description of Artificial Sequence: Synthetic oligonucleotide
ccccgaugcgguugcgcgg

SEQ ID NO: 227988 - RNA, 19 nt, Artificial Sequence
  Description of Artificial Sequence: Synthetic oligonucleotide
cguguaggcgaacucaaua

SEQ ID NO: 227989 - RNA, 19 nt, Artificial Sequence
  Description of Artificial Sequence: Synthetic oligonucleotide
gccacuaggugccacucau

SEQ ID NO: 227990 - RNA, 19 nt, Artificial Sequence
  Description of Artificial Sequence: Synthetic oligonucleotide
ccaauccuccgagucaaca

SEQ ID NO: 227991 - RNA, 19 nt, Artificial Sequence
  Description of Artificial Sequence: Synthetic oligonucleotide
cuaccccgaugcgguugcg

SEQ ID NO: 227992 - RNA, 19 nt, Artificial Sequence
  Description of Artificial Sequence: Synthetic oligonucleotide
acggacugcgugggcuugu

SEQ ID NO: 227993 - RNA, 19 nt, Artificial Sequence
  Description of Artificial Sequence: Synthetic oligonucleotide
cgcguggcagcgcacggcc

SEQ ID NO: 227994 - RNA, 19 nt, Artificial Sequence
  Description of Artificial Sequence: Synthetic oligonucleotide
gcauugcuaggguccagcu

SEQ ID NO: 227995 - RNA, 19 nt, Artificial Sequence
  Description of Artificial Sequence: Synthetic oligonucleotide
gggcuacaaaaguccaggu

SEQ ID NO: 227996 - RNA, 19 nt, Artificial Sequence
  Description of Artificial Sequence: Synthetic oligonucleotide
cggguaacccaagugcuuc

SEQ ID NO: 227997 - RNA, 19 nt, Artificial Sequence
  Description of Artificial Sequence: Synthetic oligonucleotide
gcgaacucaauaagccucu

SEQ ID NO: 227998 - RNA, 19 nt, Artificial Sequence
  Description of Artificial Sequence: Synthetic oligonucleotide
cgcguggaacacuuccgac

SEQ ID NO: 227999 - RNA, 19 nt, Artificial Sequence
  Description of Artificial Sequence: Synthetic oligonucleotide
ggcgucaccucggccuugc

SEQ ID NO: 228000 - RNA, 19 nt, Artificial Sequence
  Description of Artificial Sequence: Synthetic oligonucleotide
acacuccgcugaguucagu

SEQ ID NO: 228001 - RNA, 19 nt, Artificial Sequence
  Description of Artificial Sequence: Synthetic oligonucleotide
cagcgugagcuccuggaau

SEQ ID NO: 228002 - RNA, 19 nt, Artificial Sequence
  Description of Artificial Sequence: Synthetic oligonucleotide
agggugcaagaugcccuau

SEQ ID NO: 228003 - RNA, 19 nt, Artificial Sequence
  Description of Artificial Sequence: Synthetic oligonucleotide
cgggcgaauuguugcggcc

SEQ ID NO: 228004 - RNA, 19 nt, Artificial Sequence
  Description of Artificial Sequence: Synthetic oligonucleotide
gcgaauuguugcggccacc

SEQ ID NO: 228005 - RNA, 19 nt, Artificial Sequence
  Description of Artificial Sequence: Synthetic oligonucleotide
cccaccuugggcgcacggc

SEQ ID NO: 228006 - RNA, 19 nt, Artificial Sequence
  Description of Artificial Sequence: Synthetic oligonucleotide
gcgguugcgcggcacgcuc

SEQ ID NO: 228007 - RNA, 19 nt, Artificial Sequence
  Description of Artificial Sequence: Synthetic oligonucleotide
gccaucgcuaggguuguaa

SEQ ID NO: 228008 - RNA, 19 nt, Artificial Sequence
  Description of Artificial Sequence: Synthetic oligonucleotide
gcccaccuugggcgcacgg

SEQ ID NO: 228009 - RNA, 19 nt, Artificial Sequence
  Description of Artificial Sequence: Synthetic oligonucleotide
cccagucgaugcacgcgug

SEQ ID NO: 228010 - RNA, 19 nt, Artificial Sequence
  Description of Artificial Sequence: Synthetic oligonucleotide
cccaaagugcauguagaua

SEQ ID NO: 228011 - RNA, 19 nt, Artificial Sequence
  Description of Artificial Sequence: Synthetic oligonucleotide
gccguguaggcgaacucaa

SEQ ID NO: 228012 - RNA, 19 nt, Artificial Sequence
  Description of Artificial Sequence: Synthetic oligonucleotide
ggccgucuaugaccccuac

SEQ ID NO: 228013 - RNA, 19 nt, Artificial Sequence
  Description of Artificial Sequence: Synthetic oligonucleotide
agccgcccgcuguguagau

SEQ ID NO: 228014 - RNA, 19 nt, Artificial Sequence
  Description of Artificial Sequence: Synthetic oligonucleotide
ggcuucuaaugcaccuaaa

SEQ ID NO: 228015 - RNA, 19 nt, Artificial Sequence
  Description of Artificial Sequence: Synthetic oligonucleotide
aagcgccgcugagggcagu

SEQ ID NO: 228016 - RNA, 19 nt, Artificial Sequence
  Description of Artificial Sequence: Synthetic oligonucleotide
cccuaccccgaugcgguug

SEQ ID NO: 228017 - RNA, 19 nt, Artificial Sequence
  Description of Artificial Sequence: Synthetic oligonucleotide
caguuaggguccccgccau

SEQ ID NO: 228018 - RNA, 19 nt, Artificial Sequence
  Description of Artificial Sequence: Synthetic oligonucleotide
ccgggugacaaguuacaau

SEQ ID NO: 228019 - RNA, 19 nt, Artificial Sequence
  Description of Artificial Sequence: Synthetic oligonucleotide
cgguauugccaucgggcga

SEQ ID NO: 228020 - RNA, 19 nt, Artificial Sequence
  Description of Artificial Sequence: Synthetic oligonucleotide
cuaugaccccuaccccgau

SEQ ID NO: 228021 - RNA, 19 nt, Artificial Sequence
  Description of Artificial Sequence: Synthetic oligonucleotide
cauagccuccgaggacaua

SEQ ID NO: 228022 - RNA, 19 nt, Artificial Sequence
  Description of Artificial Sequence: Synthetic oligonucleotide
ccucuagcguguagcugaa

SEQ ID NO: 228023 - RNA, 19 nt, Artificial Sequence
  Description of Artificial Sequence: Synthetic oligonucleotide
gcggcgugagcgcguggca

SEQ ID NO: 228024 - RNA, 19 nt, Artificial Sequence
  Description of Artificial Sequence: Synthetic oligonucleotide
gccaauccuccgagucaac

SEQ ID NO: 228025 - RNA, 19 nt, Artificial Sequence
  Description of Artificial Sequence: Synthetic oligonucleotide
gccgcccgcuguguagaug

SEQ ID NO: 228026 - RNA, 19 nt, Artificial Sequence
  Description of Artificial Sequence: Synthetic oligonucleotide
cucggaccacacugucaau

SEQ ID NO: 228027 - RNA, 19 nt, Artificial Sequence
  Description of Artificial Sequence: Synthetic oligonucleotide
ccccgacugcguagaugug

SEQ ID NO: 228028 - RNA, 19 nt, Artificial Sequence
  Description of Artificial Sequence: Synthetic oligonucleotide
cguauuugaccugcagggu

SEQ ID NO: 228029 - RNA, 19 nt, Artificial Sequence
  Description of Artificial Sequence: Synthetic oligonucleotide
ggcccaccuugggcgcacg

SEQ ID NO: 228030 - RNA, 19 nt, Artificial Sequence
  Description of Artificial Sequence: Synthetic oligonucleotide
guggcccaagagggugcaa

SEQ ID NO: 228031 - RNA, 19 nt, Artificial Sequence
  Description of Artificial Sequence: Synthetic oligonucleotide
guauugccaucgggcgaau

SEQ ID NO: 228032 - RNA, 19 nt, Artificial Sequence
  Description of Artificial Sequence: Synthetic oligonucleotide
agccaucgcuaggguugua

SEQ ID NO: 228033 - RNA, 19 nt, Artificial Sequence
  Description of Artificial Sequence: Synthetic oligonucleotide
gcgcggcgugagcgcgugg

SEQ ID NO: 228034 - RNA, 19 nt, Artificial Sequence
  Description of Artificial Sequence: Synthetic oligonucleotide
caucccgaucuggcucgua

SEQ ID NO: 228035 - RNA, 19 nt, Artificial Sequence
  Description of Artificial Sequence: Synthetic oligonucleotide
ccaagugcacuccgccgau

SEQ ID NO: 228036 - RNA, 19 nt, Artificial Sequence
  Description of Artificial Sequence: Synthetic oligonucleotide
gccccgcuaggccuggguu

SEQ ID NO: 228037 - RNA, 19 nt, Artificial Sequence
  Description of Artificial Sequence: Synthetic oligonucleotide
gcgccgcugagggcaguca

SEQ ID NO: 228038 - RNA, 19 nt, Artificial Sequence
  Description of Artificial Sequence: Synthetic oligonucleotide
gcgucaccucggccuugca

SEQ ID NO: 228039 - RNA, 19 nt, Artificial Sequence
  Description of Artificial Sequence: Synthetic oligonucleotide
ccguguaggcgaacucaau

SEQ ID NO: 228040 - RNA, 19 nt, Artificial Sequence
  Description of Artificial Sequence: Synthetic oligonucleotide
cccggagaaguggcacaga

SEQ ID NO: 228041 - RNA, 19 nt, Artificial Sequence
  Description of Artificial Sequence: Synthetic oligonucleotide
cggcacgcucauagaggca

SEQ ID NO: 228042 - RNA, 19 nt, Artificial Sequence
  Description of Artificial Sequence: Synthetic oligonucleotide
gcggcccaccuugggcgca

SEQ ID NO: 228043 - RNA, 19 nt, Artificial Sequence
  Description of Artificial Sequence: Synthetic oligonucleotide
ccguccugggagggcguca

SEQ ID NO: 228044 - RNA, 19 nt, Artificial Sequence
  Description of Artificial Sequence: Synthetic oligonucleotide
ccgacucgcagcgcacguu

SEQ ID NO: 228045 - RNA, 19 nt, Artificial Sequence
  Description of Artificial Sequence: Synthetic oligonucleotide
ccccuaccccgaugcgguu

SEQ ID NO: 228046 - RNA, 19 nt, Artificial Sequence
  Description of Artificial Sequence: Synthetic oligonucleotide
aacauuacuuuauuagucc

SEQ ID NO: 228047 - RNA, 19 nt, Artificial Sequence
  Description of Artificial Sequence: Synthetic oligonucleotide
aauaguucaggccaccagc

SEQ ID NO: 228048 - RNA, 19 nt, Artificial Sequence
  Description of Artificial Sequence: Synthetic oligonucleotide
uucgauucaauauacaucc

SEQ ID NO: 228049 - RNA, 19 nt, Artificial Sequence
  Description of Artificial Sequence: Synthetic oligonucleotide
agaaaagacaucuagaggu

SEQ ID NO: 228050 - RNA, 19 nt, Artificial Sequence
  Description of Artificial Sequence: Synthetic oligonucleotide
uuagaaacugcacagaauc

SEQ ID NO: 228051 - RNA, 19 nt, Artificial Sequence
  Description of Artificial Sequence: Synthetic oligonucleotide
aauaggaacgagguuaugg

SEQ ID NO: 228052 - RNA, 19 nt, Artificial Sequence
  Description of Artificial Sequence: Synthetic oligonucleotide
uucauuagaaacugcacag

SEQ ID NO: 228053 - RNA, 19 nt, Artificial Sequence
  Description of Artificial Sequence: Synthetic oligonucleotide
guaagcauaggcuaaagug

SEQ ID NO: 228054 - RNA, 19 nt, Artificial Sequence
  Description of Artificial Sequence: Synthetic oligonucleotide
uuuauuucgauucaauaua

SEQ ID NO: 228055 - RNA, 19 nt, Artificial Sequence
  Description of Artificial Sequence: Synthetic oligonucleotide
uuuagcuguaagcauaggc

SEQ ID NO: 228056 - RNA, 19 nt, Artificial Sequence
  Description of Artificial Sequence: Synthetic oligonucleotide
acggaguuacacuugaccc

SEQ ID NO: 228057 - RNA, 19 nt, Artificial Sequence
  Description of Artificial Sequence: Synthetic oligonucleotide
uguaacuuaaauaguucag

SEQ ID NO: 228058 - RNA, 19 nt, Artificial Sequence
  Description of Artificial Sequence: Synthetic oligonucleotide
auauaucaaacaacgaacc

SEQ ID NO: 228059 - RNA, 19 nt, Artificial Sequence
  Description of Artificial Sequence: Synthetic oligonucleotide
auuuauuucgauucaauau

SEQ ID NO: 228060 - RNA, 19 nt, Artificial Sequence
  Description of Artificial Sequence: Synthetic oligonucleotide
acauuacuuuauuaguccc

SEQ ID NO: 228061 - RNA, 19 nt, Artificial Sequence
  Description of Artificial Sequence: Synthetic oligonucleotide
cuagguagauucuagauuc

SEQ ID NO: 228062 - RNA, 19 nt, Artificial Sequence
  Description of Artificial Sequence: Synthetic oligonucleotide
aauauguacuagugcaaag

SEQ ID NO: 228063 - RNA, 19 nt, Artificial Sequence
  Description of Artificial Sequence: Synthetic oligonucleotide
uccuuuuaagaaacuacgg

SEQ ID NO: 228064 - RNA, 19 nt, Artificial Sequence
  Description of Artificial Sequence: Synthetic oligonucleotide
uaaaauuuggacucgucgu

SEQ ID NO: 228065 - RNA, 19 nt, Artificial Sequence
  Description of Artificial Sequence: Synthetic oligonucleotide
aauaacaccguaauagucu

SEQ ID NO: 228066 - RNA, 19 nt, Artificial Sequence
  Description of Artificial Sequence: Synthetic oligonucleotide
aacgagguuauggucaagc

SEQ ID NO: 228067 - RNA, 19 nt, Artificial Sequence
  Description of Artificial Sequence: Synthetic oligonucleotide
aaggcuaauauguacuagu

SEQ ID NO: 228068 - RNA, 19 nt, Artificial Sequence
  Description of Artificial Sequence: Synthetic oligonucleotide
aauaauuagcugacgaaug

SEQ ID NO: 228069 - RNA, 19 nt, Artificial Sequence
  Description of Artificial Sequence: Synthetic oligonucleotide
aaauaauuagcugacgaau

SEQ ID NO: 228070 - RNA, 19 nt, Artificial Sequence
  Description of Artificial Sequence: Synthetic oligonucleotide
uuauuucgauucaauauac

SEQ ID NO: 228071 - RNA, 19 nt, Artificial Sequence
  Description of Artificial Sequence: Synthetic oligonucleotide
uuguuaugagaccugcuag

SEQ ID NO: 228072 - RNA, 19 nt, Artificial Sequence
  Description of Artificial Sequence: Synthetic oligonucleotide
aauucugacaucgaucgca

SEQ ID NO: 228073 - RNA, 19 nt, Artificial Sequence
  Description of Artificial Sequence: Synthetic oligonucleotide
guagauucuagauucagca

SEQ ID NO: 228074 - RNA, 19 nt, Artificial Sequence
  Description of Artificial Sequence: Synthetic oligonucleotide
uguacuagugcaaagucua

SEQ ID NO: 228075 - RNA, 19 nt, Artificial Sequence
  Description of Artificial Sequence: Synthetic oligonucleotide
aauuggacuguugugacca

SEQ ID NO: 228076 - RNA, 19 nt, Artificial Sequence
  Description of Artificial Sequence: Synthetic oligonucleotide
ugaccaauaggaacgaggu

SEQ ID NO: 228077 - RNA, 19 nt, Artificial Sequence
  Description of Artificial Sequence: Synthetic oligonucleotide
uucaauugaugucauucug

SEQ ID NO: 228078 - RNA, 19 nt, Artificial Sequence
  Description of Artificial Sequence: Synthetic oligonucleotide
aggauggauacacguaacc

SEQ ID NO: 228079 - RNA, 19 nt, Artificial Sequence
  Description of Artificial Sequence: Synthetic oligonucleotide
uguugugaccaauaggaac

SEQ ID NO: 228080 - RNA, 19 nt, Artificial Sequence
  Description of Artificial Sequence: Synthetic oligonucleotide
uuugcaagaugccaacaca

SEQ ID NO: 228081 - RNA, 19 nt, Artificial Sequence
  Description of Artificial Sequence: Synthetic oligonucleotide
ucagcguggaauaugguaa

SEQ ID NO: 228082 - RNA, 19 nt, Artificial Sequence
  Description of Artificial Sequence: Synthetic oligonucleotide
uuggacucgucguagggcg

SEQ ID NO: 228083 - RNA, 19 nt, Artificial Sequence
  Description of Artificial Sequence: Synthetic oligonucleotide
ucgaucgcagccaauauaa

SEQ ID NO: 228084 - RNA, 19 nt, Artificial Sequence
  Description of Artificial Sequence: Synthetic oligonucleotide
gacacgcugagcucuaagg

SEQ ID NO: 228085 - RNA, 19 nt, Artificial Sequence
  Description of Artificial Sequence: Synthetic oligonucleotide
auaggcuaaagugacaucu

SEQ ID NO: 228086 - RNA, 19 nt, Artificial Sequence
  Description of Artificial Sequence: Synthetic oligonucleotide
aaaauuuggacucgucgua

SEQ ID NO: 228087 - RNA, 19 nt, Artificial Sequence
  Description of Artificial Sequence: Synthetic oligonucleotide
ugccacaauaguaaagcca

SEQ ID NO: 228088 - RNA, 19 nt, Artificial Sequence
  Description of Artificial Sequence: Synthetic oligonucleotide
ucucgauuaggugacacgc

SEQ ID NO: 228089 - RNA, 19 nt, Artificial Sequence
  Description of Artificial Sequence: Synthetic oligonucleotide
acggccuugauccaauuag

SEQ ID NO: 228090 - RNA, 19 nt, Artificial Sequence
  Description of Artificial Sequence: Synthetic oligonucleotide
aaauuggccaagaauacaa

SEQ ID NO: 228091 - RNA, 19 nt, Artificial Sequence
  Description of Artificial Sequence: Synthetic oligonucleotide
aagacaucuagaggucgcc

SEQ ID NO: 228092 - RNA, 19 nt, Artificial Sequence
  Description of Artificial Sequence: Synthetic oligonucleotide
uacacuugaccccauagua

SEQ ID NO: 228093 - RNA, 19 nt, Artificial Sequence
  Description of Artificial Sequence: Synthetic oligonucleotide
ugguuacacacaaucauuc

SEQ ID NO: 228094 - RNA, 19 nt, Artificial Sequence
  Description of Artificial Sequence: Synthetic oligonucleotide
auaacaccguaauagucug

SEQ ID NO: 228095 - RNA, 19 nt, Artificial Sequence
  Description of Artificial Sequence: Synthetic oligonucleotide
auaggauggauacacguaa

SEQ ID NO: 228096 - RNA, 19 nt, Artificial Sequence
  Description of Artificial Sequence: Synthetic oligonucleotide
auaggaacgagguuauggu

SEQ ID NO: 228097 - RNA, 19 nt, Artificial Sequence
  Description of Artificial Sequence: Synthetic oligonucleotide
ucgauuaggugacacgcug

SEQ ID NO: 228098 - RNA, 19 nt, Artificial Sequence
  Description of Artificial Sequence: Synthetic oligonucleotide
accacuuacuuaucccagc

SEQ ID NO: 228099 - RNA, 19 nt, Artificial Sequence
  Description of Artificial Sequence: Synthetic oligonucleotide
agcugcgugauggugaagc

SEQ ID NO: 228100 - RNA, 19 nt, Artificial Sequence
  Description of Artificial Sequence: Synthetic oligonucleotide
uguaagcauaggcuaaagu

SEQ ID NO: 228101 - RNA, 19 nt, Artificial Sequence
  Description of Artificial Sequence: Synthetic oligonucleotide
aguaacggcaguuaucaaa

SEQ ID NO: 228102 - RNA, 19 nt, Artificial Sequence
  Description of Artificial Sequence: Synthetic oligonucleotide
uguaaggagcguagcaccc

SEQ ID NO: 228103 - RNA, 19 nt, Artificial Sequence
  Description of Artificial Sequence: Synthetic oligonucleotide
acgagguuauggucaagcc

SEQ ID NO: 228104 - RNA, 19 nt, Artificial Sequence
  Description of Artificial Sequence: Synthetic oligonucleotide
guugauucccaguugugug

SEQ ID NO: 228105 - RNA, 19 nt, Artificial Sequence
  Description of Artificial Sequence: Synthetic oligonucleotide
uuagcugacgaaugagggc

SEQ ID NO: 228106 - RNA, 19 nt, Artificial Sequence
  Description of Artificial Sequence: Synthetic oligonucleotide
uauuucgauucaauauaca

SEQ ID NO: 228107 - RNA, 19 nt, Artificial Sequence
  Description of Artificial Sequence: Synthetic oligonucleotide
uauaggauggauacacgua

SEQ ID NO: 228108 - RNA, 19 nt, Artificial Sequence
  Description of Artificial Sequence: Synthetic oligonucleotide
uguacuucaccuacaggaa

SEQ ID NO: 228109 - RNA, 19 nt, Artificial Sequence
  Description of Artificial Sequence: Synthetic oligonucleotide
uagggcgucuugcagauac

SEQ ID NO: 228110 - RNA, 19 nt, Artificial Sequence
  Description of Artificial Sequence: Synthetic oligonucleotide
gauacaguacagccgggug

SEQ ID NO: 228111 - RNA, 19 nt, Artificial Sequence
  Description of Artificial Sequence: Synthetic oligonucleotide
cgaaucuccauuuauuucg

SEQ ID NO: 228112 - RNA, 19 nt, Artificial Sequence
  Description of Artificial Sequence: Synthetic oligonucleotide
uaugagaccugcuagccuu

SEQ ID NO: 228113 - RNA, 19 nt, Artificial Sequence
  Description of Artificial Sequence: Synthetic oligonucleotide
uguguccuaaagacucccg

SEQ ID NO: 228114 - RNA, 19 nt, Artificial Sequence
  Description of Artificial Sequence: Synthetic oligonucleotide
aacaccguaauagucuggu

SEQ ID NO: 228115 - RNA, 19 nt, Artificial Sequence
  Description of Artificial Sequence: Synthetic oligonucleotide
uauucaaggcaacgaaguc

SEQ ID NO: 228116 - RNA, 19 nt, Artificial Sequence
  Description of Artificial Sequence: Synthetic oligonucleotide
uagcugacgaaugagggca

SEQ ID NO: 228117 - RNA, 19 nt, Artificial Sequence
  Description of Artificial Sequence: Synthetic oligonucleotide
agaguaaaugacaauuugu

SEQ ID NO: 228118 - RNA, 19 nt, Artificial Sequence
  Description of Artificial Sequence: Synthetic oligonucleotide
acuagguagauucuagauu

SEQ ID NO: 228119 - RNA, 19 nt, Artificial Sequence
  Description of Artificial Sequence: Synthetic oligonucleotide
auucaaggcaacgaagucu

SEQ ID NO: 228120 - RNA, 19 nt, Artificial Sequence
  Description of Artificial Sequence: Synthetic oligonucleotide
accguaauagucuggugca

SEQ ID NO: 228121 - RNA, 19 nt, Artificial Sequence
  Description of Artificial Sequence: Synthetic oligonucleotide
uccguuggacaaaauuggc

SEQ ID NO: 228122 - RNA, 19 nt, Artificial Sequence
  Description of Artificial Sequence: Synthetic oligonucleotide
ucaaauagauuuugcucau

SEQ ID NO: 228123 - RNA, 19 nt, Artificial Sequence
  Description of Artificial Sequence: Synthetic oligonucleotide
accaauucugacaucgauc

SEQ ID NO: 228124 - RNA, 19 nt, Artificial Sequence
  Description of Artificial Sequence: Synthetic oligonucleotide
auacaguacagccgggugu

SEQ ID NO: 228125 - RNA, 19 nt, Artificial Sequence
  Description of Artificial Sequence: Synthetic oligonucleotide
uuacuuaucccagccuucc

SEQ ID NO: 228126 - RNA, 19 nt, Artificial Sequence
  Description of Artificial Sequence: Synthetic oligonucleotide
uacuacacaucugaacggc

SEQ ID NO: 228127 - RNA, 19 nt, Artificial Sequence
  Description of Artificial Sequence: Synthetic oligonucleotide
gaucgcagccaauauaaaa

SEQ ID NO: 228128 - RNA, 19 nt, Artificial Sequence
  Description of Artificial Sequence: Synthetic oligonucleotide
uuaugagaccugcuagccu

SEQ ID NO: 228129 - RNA, 19 nt, Artificial Sequence
  Description of Artificial Sequence: Synthetic oligonucleotide
ucuagaggucgccuuguac

SEQ ID NO: 228130 - RNA, 19 nt, Artificial Sequence
  Description of Artificial Sequence: Synthetic oligonucleotide
guaauagucuggugcauca

SEQ ID NO: 228131 - RNA, 19 nt, Artificial Sequence
  Description of Artificial Sequence: Synthetic oligonucleotide
guuaugagaccugcuagcc

SEQ ID NO: 228132 - RNA, 19 nt, Artificial Sequence
  Description of Artificial Sequence: Synthetic oligonucleotide
uuugcguuucuuugccgcc

SEQ ID NO: 228133 - RNA, 19 nt, Artificial Sequence
  Description of Artificial Sequence: Synthetic oligonucleotide
uccaauuagcccuguggga

SEQ ID NO: 228134 - RNA, 19 nt, Artificial Sequence
  Description of Artificial Sequence: Synthetic oligonucleotide
uccugcaagcuucaucugu

SEQ ID NO: 228135 - RNA, 19 nt, Artificial Sequence
  Description of Artificial Sequence: Synthetic oligonucleotide
uaacaccguaauagucugg

SEQ ID NO: 228136 - RNA, 19 nt, Artificial Sequence
  Description of Artificial Sequence: Synthetic oligonucleotide
agacucccgccauauuggc

SEQ ID NO: 228137 - RNA, 19 nt, Artificial Sequence
  Description of Artificial Sequence: Synthetic oligonucleotide
gagcguagcacccucuuca

SEQ ID NO: 228138 - RNA, 19 nt, Artificial Sequence
  Description of Artificial Sequence: Synthetic oligonucleotide
gucucgauuaggugacacg

SEQ ID NO: 228139 - RNA, 19 nt, Artificial Sequence
  Description of Artificial Sequence: Synthetic oligonucleotide
gaccugcuagccuugaauc

SEQ ID NO: 228140 - RNA, 19 nt, Artificial Sequence
  Description of Artificial Sequence: Synthetic oligonucleotide
acaucuagaggucgccuug

SEQ ID NO: 228141 - RNA, 19 nt, Artificial Sequence
  Description of Artificial Sequence: Synthetic oligonucleotide
ggucauaucugccacgaac

SEQ ID NO: 228142 - RNA, 19 nt, Artificial Sequence
  Description of Artificial Sequence: Synthetic oligonucleotide
uaccaauucugacaucgau

SEQ ID NO: 228143 - RNA, 19 nt, Artificial Sequence
  Description of Artificial Sequence: Synthetic oligonucleotide
gacucuaaacagcuucuuc

SEQ ID NO: 228144 - RNA, 19 nt, Artificial Sequence
  Description of Artificial Sequence: Synthetic oligonucleotide
acuacacaucugaacggcc

SEQ ID NO: 228145 - RNA, 19 nt, Artificial Sequence
  Description of Artificial Sequence: Synthetic oligonucleotide
aacauguggcuguaacuua

SEQ ID NO: 228146 - RNA, 19 nt, Artificial Sequence
  Description of Artificial Sequence: Synthetic oligonucleotide
aucgcagccaauauaaaau

SEQ ID NO: 228147 - RNA, 19 nt, Artificial Sequence
  Description of Artificial Sequence: Synthetic oligonucleotide
ucgcguuugcguuucuuug

SEQ ID NO: 228148 - RNA, 19 nt, Artificial Sequence
  Description of Artificial Sequence: Synthetic oligonucleotide
uggguuuacuacacaucug

SEQ ID NO: 228149 - RNA, 19 nt, Artificial Sequence
  Description of Artificial Sequence: Synthetic oligonucleotide
agucuaggaacaucugcga

SEQ ID NO: 228150 - RNA, 19 nt, Artificial Sequence
  Description of Artificial Sequence: Synthetic oligonucleotide
ucugucgacuggcacugug

SEQ ID NO: 228151 - RNA, 19 nt, Artificial Sequence
  Description of Artificial Sequence: Synthetic oligonucleotide
agccgggugucuuucuugg

SEQ ID NO: 228152 - RNA, 19 nt, Artificial Sequence
  Description of Artificial Sequence: Synthetic oligonucleotide
ucauuuagccuggugcaga

SEQ ID NO: 228153 - RNA, 19 nt, Artificial Sequence
  Description of Artificial Sequence: Synthetic oligonucleotide
aggaacgagguuaugguca

SEQ ID NO: 228154 - RNA, 19 nt, Artificial Sequence
  Description of Artificial Sequence: Synthetic oligonucleotide
uaggauggauacacguaac

SEQ ID NO: 228155 - RNA, 19 nt, Artificial Sequence
  Description of Artificial Sequence: Synthetic oligonucleotide
ggccaagccaucuuauggg

SEQ ID NO: 228156 - RNA, 19 nt, Artificial Sequence
  Description of Artificial Sequence: Synthetic oligonucleotide
uggucaagccuugucagga

SEQ ID NO: 228157 - RNA, 19 nt, Artificial Sequence
  Description of Artificial Sequence: Synthetic oligonucleotide
guguccuaaagacucccgc

SEQ ID NO: 228158 - RNA, 19 nt, Artificial Sequence
  Description of Artificial Sequence: Synthetic oligonucleotide
ggguuuacuacacaucuga

SEQ ID NO: 228159 - RNA, 19 nt, Artificial Sequence
  Description of Artificial Sequence: Synthetic oligonucleotide
uacacguaaccagggcugg

SEQ ID NO: 228160 - RNA, 19 nt, Artificial Sequence
  Description of Artificial Sequence: Synthetic oligonucleotide
auacacguaaccagggcug

SEQ ID NO: 228161 - RNA, 19 nt, Artificial Sequence
  Description of Artificial Sequence: Synthetic oligonucleotide
ucucucucucucuucauuu

SEQ ID NO: 228162 - RNA, 19 nt, Artificial Sequence
  Description of Artificial Sequence: Synthetic oligonucleotide
guuauggucaagccuuguc

SEQ ID NO: 228163 - RNA, 19 nt, Artificial Sequence
  Description of Artificial Sequence: Synthetic oligonucleotide
augucucucucucucuuca

SEQ ID NO: 228164 - RNA, 19 nt, Artificial Sequence
  Description of Artificial Sequence: Synthetic oligonucleotide
gagcagacguggcauuucc

SEQ ID NO: 228165 - RNA, 19 nt, Artificial Sequence
  Description of Artificial Sequence: Synthetic oligonucleotide
ugacacgcugagcucuaag

SEQ ID NO: 228166 - RNA, 19 nt, Artificial Sequence
  Description of Artificial Sequence: Synthetic oligonucleotide
gaauacaauuggacuguug

SEQ ID NO: 228167 - RNA, 19 nt, Artificial Sequence
  Description of Artificial Sequence: Synthetic oligonucleotide
ugccaugucucucucucuc

SEQ ID NO: 228168 - RNA, 19 nt, Artificial Sequence
  Description of Artificial Sequence: Synthetic oligonucleotide
uaggaacgagguuaugguc

SEQ ID NO: 228169 - RNA, 19 nt, Artificial Sequence
  Description of Artificial Sequence: Synthetic oligonucleotide
gucccuuuagcuguaagca

SEQ ID NO: 228170 - RNA, 19 nt, Artificial Sequence
  Description of Artificial Sequence: Synthetic oligonucleotide
gaccacuuacuuaucccag

SEQ ID NO: 228171 - RNA, 19 nt, Artificial Sequence
  Description of Artificial Sequence: Synthetic oligonucleotide
uccauuuauuucgauucaa

SEQ ID NO: 228172 - RNA, 19 nt, Artificial Sequence
  Description of Artificial Sequence: Synthetic oligonucleotide
ugaagccucagcguggaau

SEQ ID NO: 228173 - RNA, 19 nt, Artificial Sequence
  Description of Artificial Sequence: Synthetic oligonucleotide
cuagaggucgccuuguacu

SEQ ID NO: 228174 - RNA, 19 nt, Artificial Sequence
  Description of Artificial Sequence: Synthetic oligonucleotide
gacaaggcuaauauguacu

SEQ ID NO: 228175 - RNA, 19 nt, Artificial Sequence
  Description of Artificial Sequence: Synthetic oligonucleotide
ucgcagccaauauaaaauu

SEQ ID NO: 228176 - RNA, 19 nt, Artificial Sequence
  Description of Artificial Sequence: Synthetic oligonucleotide
ucucgcugugucucgauua

SEQ ID NO: 228177 - RNA, 19 nt, Artificial Sequence
  Description of Artificial Sequence: Synthetic oligonucleotide
uucaagcccucauagucuu

SEQ ID NO: 228178 - RNA, 19 nt, Artificial Sequence
  Description of Artificial Sequence: Synthetic oligonucleotide
aggcuaauauguacuagug

SEQ ID NO: 228179 - RNA, 19 nt, Artificial Sequence
  Description of Artificial Sequence: Synthetic oligonucleotide
acgaagucuguaguccagg

SEQ ID NO: 228180 - RNA, 19 nt, Artificial Sequence
  Description of Artificial Sequence: Synthetic oligonucleotide
auuagaaacugcacagaau

SEQ ID NO: 228181 - RNA, 19 nt, Artificial Sequence
  Description of Artificial Sequence: Synthetic oligonucleotide
ggacaaggcuaauauguac

SEQ ID NO: 228182 - RNA, 19 nt, Artificial Sequence
  Description of Artificial Sequence: Synthetic oligonucleotide
guauucaaggcaacgaagu

SEQ ID NO: 228183 - RNA, 19 nt, Artificial Sequence
  Description of Artificial Sequence: Synthetic oligonucleotide
cuucugucgacuggcacug

SEQ ID NO: 228184 - RNA, 19 nt, Artificial Sequence
  Description of Artificial Sequence: Synthetic oligonucleotide
cagcguggaauaugguaag

SEQ ID NO: 228185 - RNA, 19 nt, Artificial Sequence
  Description of Artificial Sequence: Synthetic oligonucleotide
acgggauguugcuuucgag

SEQ ID NO: 228186 - RNA, 19 nt, Artificial Sequence
  Description of Artificial Sequence: Synthetic oligonucleotide
aucgaucgcagccaauaua

SEQ ID NO: 228187 - RNA, 19 nt, Artificial Sequence
  Description of Artificial Sequence: Synthetic oligonucleotide
ugugaccaauaggaacgag

SEQ ID NO: 228188 - RNA, 19 nt, Artificial Sequence
  Description of Artificial Sequence: Synthetic oligonucleotide
ugacaucgaucgcagccaa

SEQ ID NO: 228189 - RNA, 19 nt, Artificial Sequence
  Description of Artificial Sequence: Synthetic oligonucleotide
cucauuuagccuggugcag

SEQ ID NO: 228190 - RNA, 19 nt, Artificial Sequence
  Description of Artificial Sequence: Synthetic oligonucleotide
acuucaccuacaggaauca

SEQ ID NO: 228191 - RNA, 19 nt, Artificial Sequence
  Description of Artificial Sequence: Synthetic oligonucleotide
agcguggaauaugguaagg

SEQ ID NO: 228192 - RNA, 19 nt, Artificial Sequence
  Description of Artificial Sequence: Synthetic oligonucleotide
ccguuggacaaaauuggcc

SEQ ID NO: 228193 - RNA, 19 nt, Artificial Sequence
  Description of Artificial Sequence: Synthetic oligonucleotide
ggauacacguaaccagggc

SEQ ID NO: 228194 - RNA, 19 nt, Artificial Sequence
  Description of Artificial Sequence: Synthetic oligonucleotide
ucgucguagggcgucuugc

SEQ ID NO: 228195 - RNA, 19 nt, Artificial Sequence
  Description of Artificial Sequence: Synthetic oligonucleotide
gacgggauguugcuuucga

SEQ ID NO: 228196 - RNA, 19 nt, Artificial Sequence
  Description of Artificial Sequence: Synthetic oligonucleotide
ggaccacuuacuuauccca

SEQ ID NO: 228197 - RNA, 19 nt, Artificial Sequence
  Description of Artificial Sequence: Synthetic oligonucleotide
gcucauuuagccuggugca

SEQ ID NO: 228198 - RNA, 19 nt, Artificial Sequence
  Description of Artificial Sequence: Synthetic oligonucleotide
uagaggucgccuuguacuu

SEQ ID NO: 228199 - RNA, 19 nt, Artificial Sequence
  Description of Artificial Sequence: Synthetic oligonucleotide
caugucucucucucucuuc

SEQ ID NO: 228200 - RNA, 19 nt, Artificial Sequence
  Description of Artificial Sequence: Synthetic oligonucleotide
ugagcucuaaggagcugua

SEQ ID NO: 228201 - RNA, 19 nt, Artificial Sequence
  Description of Artificial Sequence: Synthetic oligonucleotide
caacgaagucuguagucca

SEQ ID NO: 228202 - RNA, 19 nt, Artificial Sequence
  Description of Artificial Sequence: Synthetic oligonucleotide
gugguaccaauucugacau

SEQ ID NO: 228203 - RNA, 19 nt, Artificial Sequence
  Description of Artificial Sequence: Synthetic oligonucleotide
gcagacguggcauuuccac

SEQ ID NO: 228204 - RNA, 19 nt, Artificial Sequence
  Description of Artificial Sequence: Synthetic oligonucleotide
uaggaacaucugcgaaucu

SEQ ID NO: 228205 - RNA, 19 nt, Artificial Sequence
  Description of Artificial Sequence: Synthetic oligonucleotide
ccacuuacuuaucccagcc

SEQ ID NO: 228206 - RNA, 19 nt, Artificial Sequence
  Description of Artificial Sequence: Synthetic oligonucleotide
cuagugcaaagucuaggaa

SEQ ID NO: 228207 - RNA, 19 nt, Artificial Sequence
  Description of Artificial Sequence: Synthetic oligonucleotide
agagaacugccaacuguug

SEQ ID NO: 228208 - RNA, 19 nt, Artificial Sequence
  Description of Artificial Sequence: Synthetic oligonucleotide
aguuucaauugaugucauu

SEQ ID NO: 228209 - RNA, 19 nt, Artificial Sequence
  Description of Artificial Sequence: Synthetic oligonucleotide
ggcaacgaagucuguaguc

SEQ ID NO: 228210 - RNA, 19 nt, Artificial Sequence
  Description of Artificial Sequence: Synthetic oligonucleotide
ggaaucaugauaagguaua

SEQ ID NO: 228211 - RNA, 19 nt, Artificial Sequence
  Description of Artificial Sequence: Synthetic oligonucleotide
agaggucgccuuguacuuc

SEQ ID NO: 228212 - RNA, 19 nt, Artificial Sequence
  Description of Artificial Sequence: Synthetic oligonucleotide
uuucgagcugcgugauggu

SEQ ID NO: 228213 - RNA, 19 nt, Artificial Sequence
  Description of Artificial Sequence: Synthetic oligonucleotide
acauguggcuguaacuuaa

SEQ ID NO: 228214 - RNA, 19 nt, Artificial Sequence
  Description of Artificial Sequence: Synthetic oligonucleotide
ucgcugugucucgauuagg

SEQ ID NO: 228215 - RNA, 19 nt, Artificial Sequence
  Description of Artificial Sequence: Synthetic oligonucleotide
cgggauguugcuuucgagc

SEQ ID NO: 228216 - RNA, 19 nt, Artificial Sequence
  Description of Artificial Sequence: Synthetic oligonucleotide
gacgaaugagggcagcaau

SEQ ID NO: 228217 - RNA, 19 nt, Artificial Sequence
  Description of Artificial Sequence: Synthetic oligonucleotide
agacaucuagaggucgccu

SEQ ID NO: 228218 - RNA, 19 nt, Artificial Sequence
  Description of Artificial Sequence: Synthetic oligonucleotide
cuacacaucugaacggccu

SEQ ID NO: 228219 - RNA, 19 nt, Artificial Sequence
  Description of Artificial Sequence: Synthetic oligonucleotide
cugacaucgaucgcagcca

SEQ ID NO: 228220 - RNA, 19 nt, Artificial Sequence
  Description of Artificial Sequence: Synthetic oligonucleotide
gcguuugcguuucuuugcc

SEQ ID NO: 228221 - RNA, 19 nt, Artificial Sequence
  Description of Artificial Sequence: Synthetic oligonucleotide
ccaagccaucuuaugggcc

SEQ ID NO: 228222 - RNA, 19 nt, Artificial Sequence
  Description of Artificial Sequence: Synthetic oligonucleotide
uuuguccguuggacaaaau

SEQ ID NO: 228223 - RNA, 19 nt, Artificial Sequence
  Description of Artificial Sequence: Synthetic oligonucleotide
agaugccaacacagcgccc

SEQ ID NO: 228224 - RNA, 19 nt, Artificial Sequence
  Description of Artificial Sequence: Synthetic oligonucleotide
gagagaacugccaacuguu

SEQ ID NO: 228225 - RNA, 19 nt, Artificial Sequence
  Description of Artificial Sequence: Synthetic oligonucleotide
uaucugccacgaacucugu

SEQ ID NO: 228226 - RNA, 19 nt, Artificial Sequence
  Description of Artificial Sequence: Synthetic oligonucleotide
acgaaccaaccaaccauug

SEQ ID NO: 228227 - RNA, 19 nt, Artificial Sequence
  Description of Artificial Sequence: Synthetic oligonucleotide
caaaauugcaagagccaau

SEQ ID NO: 228228 - RNA, 19 nt, Artificial Sequence
  Description of Artificial Sequence: Synthetic oligonucleotide
ugucucucucucucuucau

SEQ ID NO: 228229 - RNA, 19 nt, Artificial Sequence
  Description of Artificial Sequence: Synthetic oligonucleotide
cgugguaccaauucugaca

SEQ ID NO: 228230 - RNA, 19 nt, Artificial Sequence
  Description of Artificial Sequence: Synthetic oligonucleotide
uggacucgucguagggcgu

SEQ ID NO: 228231 - RNA, 19 nt, Artificial Sequence
  Description of Artificial Sequence: Synthetic oligonucleotide
acgaaugagggcagcaaua

SEQ ID NO: 228232 - RNA, 19 nt, Artificial Sequence
  Description of Artificial Sequence: Synthetic oligonucleotide
cuaccggcucaaggaaagg

SEQ ID NO: 228233 - RNA, 19 nt, Artificial Sequence
  Description of Artificial Sequence: Synthetic oligonucleotide
gacaucuagaggucgccuu

SEQ ID NO: 228234 - RNA, 19 nt, Artificial Sequence
  Description of Artificial Sequence: Synthetic oligonucleotide
ugggccuguaaggagcgua

SEQ ID NO: 228235 - RNA, 19 nt, Artificial Sequence
  Description of Artificial Sequence: Synthetic oligonucleotide
gacguggcauuuccacgga

SEQ ID NO: 228236 - RNA, 19 nt, Artificial Sequence
  Description of Artificial Sequence: Synthetic oligonucleotide
acguaaccagggcuggauu

SEQ ID NO: 228237 - RNA, 19 nt, Artificial Sequence
  Description of Artificial Sequence: Synthetic oligonucleotide
gguuacacacaaucauucu

SEQ ID NO: 228238 - RNA, 19 nt, Artificial Sequence
  Description of Artificial Sequence: Synthetic oligonucleotide
agaauacaauuggacuguu

SEQ ID NO: 228239 - RNA, 19 nt, Artificial Sequence
  Description of Artificial Sequence: Synthetic oligonucleotide
aaggagcguagcacccucu

SEQ ID NO: 228240 - RNA, 19 nt, Artificial Sequence
  Description of Artificial Sequence: Synthetic oligonucleotide
gucuaccaugaccaauaaa

SEQ ID NO: 228241 - RNA, 19 nt, Artificial Sequence
  Description of Artificial Sequence: Synthetic oligonucleotide
cucgucguagggcgucuug

SEQ ID NO: 228242 - RNA, 19 nt, Artificial Sequence
  Description of Artificial Sequence: Synthetic oligonucleotide
guacuucaccuacaggaau

SEQ ID NO: 228243 - RNA, 19 nt, Artificial Sequence
  Description of Artificial Sequence: Synthetic oligonucleotide
guugugggguggcccgcag

SEQ ID NO: 228244 - RNA, 19 nt, Artificial Sequence
  Description of Artificial Sequence: Synthetic oligonucleotide
aggagcguagcacccucuu

SEQ ID NO: 228245 - RNA, 19 nt, Artificial Sequence
  Description of Artificial Sequence: Synthetic oligonucleotide
gaacgagguuauggucaag

SEQ ID NO: 228246 - RNA, 19 nt, Artificial Sequence
  Description of Artificial Sequence: Synthetic oligonucleotide
agacucuaaacagcuucuu

SEQ ID NO: 228247 - RNA, 19 nt, Artificial Sequence
  Description of Artificial Sequence: Synthetic oligonucleotide
ggaacgagguuauggucaa

SEQ ID NO: 228248 - RNA, 19 nt, Artificial Sequence
  Description of Artificial Sequence: Synthetic oligonucleotide
cuuuguccguuggacaaaa

SEQ ID NO: 228249 - RNA, 19 nt, Artificial Sequence
  Description of Artificial Sequence: Synthetic oligonucleotide
cgcguuugcguuucuuugc

SEQ ID NO: 228250 - RNA, 19 nt, Artificial Sequence
  Description of Artificial Sequence: Synthetic oligonucleotide
ggucuaccggcucaaggaa

SEQ ID NO: 228251 - RNA, 19 nt, Artificial Sequence
  Description of Artificial Sequence: Synthetic oligonucleotide
ugguaccaauucugacauc

SEQ ID NO: 228252 - RNA, 19 nt, Artificial Sequence
  Description of Artificial Sequence: Synthetic oligonucleotide
guccaggaccacuuacuua

SEQ ID NO: 228253 - RNA, 19 nt, Artificial Sequence
  Description of Artificial Sequence: Synthetic oligonucleotide
gagccaaugcaaacucucu

SEQ ID NO: 228254 - RNA, 19 nt, Artificial Sequence
  Description of Artificial Sequence: Synthetic oligonucleotide
cucgauuaggugacacgcu

SEQ ID NO: 228255 - RNA, 19 nt, Artificial Sequence
  Description of Artificial Sequence: Synthetic oligonucleotide
ucuucgcguuugcguuucu

SEQ ID NO: 228256 - RNA, 19 nt, Artificial Sequence
  Description of Artificial Sequence: Synthetic oligonucleotide
gggccuguaaggagcguag

SEQ ID NO: 228257 - RNA, 19 nt, Artificial Sequence
  Description of Artificial Sequence: Synthetic oligonucleotide
ggcuaaagugacaucuuua

SEQ ID NO: 228258 - RNA, 19 nt, Artificial Sequence
  Description of Artificial Sequence: Synthetic oligonucleotide
gagaccugcuagccuugaa

SEQ ID NO: 228259 - RNA, 19 nt, Artificial Sequence
  Description of Artificial Sequence: Synthetic oligonucleotide
uggaggucguggagaucau

SEQ ID NO: 228260 - RNA, 19 nt, Artificial Sequence
  Description of Artificial Sequence: Synthetic oligonucleotide
gguuucuaaaggguuuugu

SEQ ID NO: 228261 - RNA, 19 nt, Artificial Sequence
  Description of Artificial Sequence: Synthetic oligonucleotide
auuagucccuuuagcugua

SEQ ID NO: 228262 - RNA, 19 nt, Artificial Sequence
  Description of Artificial Sequence: Synthetic oligonucleotide
ggacgggauguugcuuucg

SEQ ID NO: 228263 - RNA, 19 nt, Artificial Sequence
  Description of Artificial Sequence: Synthetic oligonucleotide
ggagcguagcacccucuuc

SEQ ID NO: 228264 - RNA, 19 nt, Artificial Sequence
  Description of Artificial Sequence: Synthetic oligonucleotide
uggggucuaccggcucaag

SEQ ID NO: 228265 - RNA, 19 nt, Artificial Sequence
  Description of Artificial Sequence: Synthetic oligonucleotide
gucuaccggcucaaggaaa

SEQ ID NO: 228266 - RNA, 19 nt, Artificial Sequence
  Description of Artificial Sequence: Synthetic oligonucleotide
cacuuacuuaucccagccu

SEQ ID NO: 228267 - RNA, 19 nt, Artificial Sequence
  Description of Artificial Sequence: Synthetic oligonucleotide
acacguaaccagggcugga

SEQ ID NO: 228268 - RNA, 19 nt, Artificial Sequence
  Description of Artificial Sequence: Synthetic oligonucleotide
caacacagcgcccguggua

SEQ ID NO: 228269 - RNA, 19 nt, Artificial Sequence
  Description of Artificial Sequence: Synthetic oligonucleotide
guaaggagcguagcacccu

SEQ ID NO: 228270 - RNA, 19 nt, Artificial Sequence
  Description of Artificial Sequence: Synthetic oligonucleotide
gaguuucaauugaugucau

SEQ ID NO: 228271 - RNA, 19 nt, Artificial Sequence
  Description of Artificial Sequence: Synthetic oligonucleotide
ccggcucaaggaaaggcca

SEQ ID NO: 228272 - RNA, 19 nt, Artificial Sequence
  Description of Artificial Sequence: Synthetic oligonucleotide
gucucucucucucuucauu

SEQ ID NO: 228273 - RNA, 19 nt, Artificial Sequence
  Description of Artificial Sequence: Synthetic oligonucleotide
ggauuguaguaacggcagu

SEQ ID NO: 228274 - RNA, 19 nt, Artificial Sequence
  Description of Artificial Sequence: Synthetic oligonucleotide
caucgaucgcagccaauau

SEQ ID NO: 228275 - RNA, 19 nt, Artificial Sequence
  Description of Artificial Sequence: Synthetic oligonucleotide
ggccuguaaggagcguagc

SEQ ID NO: 228276 - RNA, 19 nt, Artificial Sequence
  Description of Artificial Sequence: Synthetic oligonucleotide
cucucucucucuucauuuu

SEQ ID NO: 228277 - RNA, 19 nt, Artificial Sequence
  Description of Artificial Sequence: Synthetic oligonucleotide
cgauuaggugacacgcuga

SEQ ID NO: 228278 - RNA, 19 nt, Artificial Sequence
  Description of Artificial Sequence: Synthetic oligonucleotide
agggcgucuugcagauaca

SEQ ID NO: 228279 - RNA, 19 nt, Artificial Sequence
  Description of Artificial Sequence: Synthetic oligonucleotide
caucuagaggucgccuugu

SEQ ID NO: 228280 - RNA, 19 nt, Artificial Sequence
  Description of Artificial Sequence: Synthetic oligonucleotide
ggacucgucguagggcguc

SEQ ID NO: 228281 - RNA, 19 nt, Artificial Sequence
  Description of Artificial Sequence: Synthetic oligonucleotide
ggaggucguggagaucauc

SEQ ID NO: 228282 - RNA, 19 nt, Artificial Sequence
  Description of Artificial Sequence: Synthetic oligonucleotide
cacguaaccagggcuggau

SEQ ID NO: 228283 - RNA, 19 nt, Artificial Sequence
  Description of Artificial Sequence: Synthetic oligonucleotide
ccugcuagccuugaauccu

SEQ ID NO: 228284 - RNA, 19 nt, Artificial Sequence
  Description of Artificial Sequence: Synthetic oligonucleotide
gccaugucucucucucucu

SEQ ID NO: 228285 - RNA, 19 nt, Artificial Sequence
  Description of Artificial Sequence: Synthetic oligonucleotide
gacucgucguagggcgucu

SEQ ID NO: 228286 - RNA, 19 nt, Artificial Sequence
  Description of Artificial Sequence: Synthetic oligonucleotide
ggucaagccuugucaggau

SEQ ID NO: 228287 - RNA, 19 nt, Artificial Sequence
  Description of Artificial Sequence: Synthetic oligonucleotide
gguugugggguggcccgca

SEQ ID NO: 228288 - RNA, 19 nt, Artificial Sequence
  Description of Artificial Sequence: Synthetic oligonucleotide
acucgucguagggcgucuu

SEQ ID NO: 228289 - RNA, 19 nt, Artificial Sequence
  Description of Artificial Sequence: Synthetic oligonucleotide
ggcgucuugcagauacagu

SEQ ID NO: 228290 - RNA, 19 nt, Artificial Sequence
  Description of Artificial Sequence: Synthetic oligonucleotide
caccuacaggaaucaugau

SEQ ID NO: 228291 - RNA, 19 nt, Artificial Sequence
  Description of Artificial Sequence: Synthetic oligonucleotide
cuucaccuacaggaaucau

SEQ ID NO: 228292 - RNA, 19 nt, Artificial Sequence
  Description of Artificial Sequence: Synthetic oligonucleotide
cgaaccaaccaaccauugu

SEQ ID NO: 228293 - RNA, 19 nt, Artificial Sequence
  Description of Artificial Sequence: Synthetic oligonucleotide
cuucgcguuugcguuucuu

SEQ ID NO: 228294 - RNA, 19 nt, Artificial Sequence
  Description of Artificial Sequence: Synthetic oligonucleotide
cgaucgcagccaauauaaa

SEQ ID NO: 228295 - RNA, 19 nt, Artificial Sequence
  Description of Artificial Sequence: Synthetic oligonucleotide
ccaugucucucucucucuu

SEQ ID NO: 228296 - RNA, 19 nt, Artificial Sequence
  Description of Artificial Sequence: Synthetic oligonucleotide
guagggcgucuugcagaua

SEQ ID NO: 228297 - RNA, 19 nt, Artificial Sequence
  Description of Artificial Sequence: Synthetic oligonucleotide
ccaacacagcgcccguggu

SEQ ID NO: 228298 - RNA, 19 nt, Artificial Sequence
  Description of Artificial Sequence: Synthetic oligonucleotide
cagcgcccgugguaccaau

SEQ ID NO: 228299 - RNA, 19 nt, Artificial Sequence
  Description of Artificial Sequence: Synthetic oligonucleotide
cgcccgugguaccaauucu

SEQ ID NO: 228300 - RNA, 19 nt, Artificial Sequence
  Description of Artificial Sequence: Synthetic oligonucleotide
uuggauauugcucaugucg

SEQ ID NO: 228301 - RNA, 19 nt, Artificial Sequence
  Description of Artificial Sequence: Synthetic oligonucleotide
aguuauaugugauuaugcc

SEQ ID NO: 228302 - RNA, 19 nt, Artificial Sequence
  Description of Artificial Sequence: Synthetic oligonucleotide
aauagguagaguguguggc

SEQ ID NO: 228303 - RNA, 19 nt, Artificial Sequence
  Description of Artificial Sequence: Synthetic oligonucleotide
accacuauguacuaacucc

SEQ ID NO: 228304 - RNA, 19 nt, Artificial Sequence
  Description of Artificial Sequence: Synthetic oligonucleotide
ugugauuaugccaaaauga

SEQ ID NO: 228305 - RNA, 19 nt, Artificial Sequence
  Description of Artificial Sequence: Synthetic oligonucleotide
cuacauacaucauaggucg

SEQ ID NO: 228306 - RNA, 19 nt, Artificial Sequence
  Description of Artificial Sequence: Synthetic oligonucleotide
aagacaggaauauuaauga

SEQ ID NO: 228307 - RNA, 19 nt, Artificial Sequence
  Description of Artificial Sequence: Synthetic oligonucleotide
aaugagcauccauuaaggc

SEQ ID NO: 228308 - RNA, 19 nt, Artificial Sequence
  Description of Artificial Sequence: Synthetic oligonucleotide
aaaguagucagcauugcac

SEQ ID NO: 228309 - RNA, 19 nt, Artificial Sequence
  Description of Artificial Sequence: Synthetic oligonucleotide
aaugauugugccugucccc

SEQ ID NO: 228310 - RNA, 19 nt, Artificial Sequence
  Description of Artificial Sequence: Synthetic oligonucleotide
aaagcgagcggcugaacgc

SEQ ID NO: 228311 - RNA, 19 nt, Artificial Sequence
  Description of Artificial Sequence: Synthetic oligonucleotide
auguacuaacuccugaggc

SEQ ID NO: 228312 - RNA, 19 nt, Artificial Sequence
  Description of Artificial Sequence: Synthetic oligonucleotide
aggaauauuaaugagcauc

SEQ ID NO: 228313 - RNA, 19 nt, Artificial Sequence
  Description of Artificial Sequence: Synthetic oligonucleotide
uguuaucaggcuaaccugg

SEQ ID NO: 228314 - RNA, 19 nt, Artificial Sequence
  Description of Artificial Sequence: Synthetic oligonucleotide
acuacuguuguuaaugacc

SEQ ID NO: 228315 - RNA, 19 nt, Artificial Sequence
  Description of Artificial Sequence: Synthetic oligonucleotide
uggauauaaggccuaagag

SEQ ID NO: 228316 - RNA, 19 nt, Artificial Sequence
  Description of Artificial Sequence: Synthetic oligonucleotide
cauagagaugacaucaucc

SEQ ID NO: 228317 - RNA, 19 nt, Artificial Sequence
  Description of Artificial Sequence: Synthetic oligonucleotide
aauauuaaugagcauccau

SEQ ID NO: 228318 - RNA, 19 nt, Artificial Sequence
  Description of Artificial Sequence: Synthetic oligonucleotide
uccugcaugaucaauaggu

SEQ ID NO: 228319 - RNA, 19 nt, Artificial Sequence
  Description of Artificial Sequence: Synthetic oligonucleotide
guauuuagcacuaauggcc

SEQ ID NO: 228320 - RNA, 19 nt, Artificial Sequence
  Description of Artificial Sequence: Synthetic oligonucleotide
aacgcacaccuuuagcagc

SEQ ID NO: 228321 - RNA, 19 nt, Artificial Sequence
  Description of Artificial Sequence: Synthetic oligonucleotide
uauguacuaacuccugagg

SEQ ID NO: 228322 - RNA, 19 nt, Artificial Sequence
  Description of Artificial Sequence: Synthetic oligonucleotide
aaugguggugcauuuaaga

SEQ ID NO: 228323 - RNA, 19 nt, Artificial Sequence
  Description of Artificial Sequence: Synthetic oligonucleotide
agcacgacagcucagaaug

SEQ ID NO: 228324 - RNA, 19 nt, Artificial Sequence
  Description of Artificial Sequence: Synthetic oligonucleotide
uuuaccaugcuucaagaaa

SEQ ID NO: 228325 - RNA, 19 nt, Artificial Sequence
  Description of Artificial Sequence: Synthetic oligonucleotide
ucgacuucauuaaaaguag

SEQ ID NO: 228326 - RNA, 19 nt, Artificial Sequence
  Description of Artificial Sequence: Synthetic oligonucleotide
uuguuugagaacauuugcc

SEQ ID NO: 228327 - RNA, 19 nt, Artificial Sequence
  Description of Artificial Sequence: Synthetic oligonucleotide
uauuuagcacuaauggccc

SEQ ID NO: 228328 - RNA, 19 nt, Artificial Sequence
  Description of Artificial Sequence: Synthetic oligonucleotide
ugcauuuacaacaggcugc

SEQ ID NO: 228329 - RNA, 19 nt, Artificial Sequence
  Description of Artificial Sequence: Synthetic oligonucleotide
uaguauacuguuacugggg

SEQ ID NO: 228330 - RNA, 19 nt, Artificial Sequence
  Description of Artificial Sequence: Synthetic oligonucleotide
uuuaguuacaaguuccgaa

SEQ ID NO: 228331 - RNA, 19 nt, Artificial Sequence
  Description of Artificial Sequence: Synthetic oligonucleotide
guaguauacuguuacuggg

SEQ ID NO: 228332 - RNA, 19 nt, Artificial Sequence
  Description of Artificial Sequence: Synthetic oligonucleotide
ugaacgcacaccuuuagca

SEQ ID NO: 228333 - RNA, 19 nt, Artificial Sequence
  Description of Artificial Sequence: Synthetic oligonucleotide
ggguauuuagcacuaaugg

SEQ ID NO: 228334 - RNA, 19 nt, Artificial Sequence
  Description of Artificial Sequence: Synthetic oligonucleotide
ugacccacugccaugauga

SEQ ID NO: 228335 - RNA, 19 nt, Artificial Sequence
  Description of Artificial Sequence: Synthetic oligonucleotide
ucugaguggguauagcugc

SEQ ID NO: 228336 - RNA, 19 nt, Artificial Sequence
  Description of Artificial Sequence: Synthetic oligonucleotide
ugcaugaucaauagguaga

SEQ ID NO: 228337 - RNA, 19 nt, Artificial Sequence
  Description of Artificial Sequence: Synthetic oligonucleotide
uacaccacuucuuugguug

SEQ ID NO: 228338 - RNA, 19 nt, Artificial Sequence
  Description of Artificial Sequence: Synthetic oligonucleotide
ggauauaaggccuaagagc

SEQ ID NO: 228339 - RNA, 19 nt, Artificial Sequence
  Description of Artificial Sequence: Synthetic oligonucleotide
uauugcagaaacugguuug

SEQ ID NO: 228340 - RNA, 19 nt, Artificial Sequence
  Description of Artificial Sequence: Synthetic oligonucleotide
cauaggucgaacuuccacc

SEQ ID NO: 228341 - RNA, 19 nt, Artificial Sequence
  Description of Artificial Sequence: Synthetic oligonucleotide
gaaagcgagcggcugaacg

SEQ ID NO: 228342 - RNA, 19 nt, Artificial Sequence
  Description of Artificial Sequence: Synthetic oligonucleotide
ucuuggauauugcucaugu

SEQ ID NO: 228343 - RNA, 19 nt, Artificial Sequence
  Description of Artificial Sequence: Synthetic oligonucleotide
ugcucuaagugaaaacaag

SEQ ID NO: 228344 - RNA, 19 nt, Artificial Sequence
  Description of Artificial Sequence: Synthetic oligonucleotide
gacucuuggaucuucuacc

SEQ ID NO: 228345 - RNA, 19 nt, Artificial Sequence
  Description of Artificial Sequence: Synthetic oligonucleotide
aauuccaaugauugugccu

SEQ ID NO: 228346 - RNA, 19 nt, Artificial Sequence
  Description of Artificial Sequence: Synthetic oligonucleotide
uuaccaugcuucaagaaau

SEQ ID NO: 228347 - RNA, 19 nt, Artificial Sequence
  Description of Artificial Sequence: Synthetic oligonucleotide
augugauuaugccaaaaug

SEQ ID NO: 228348 - RNA, 19 nt, Artificial Sequence
  Description of Artificial Sequence: Synthetic oligonucleotide
aagcgaacacugaagacac

SEQ ID NO: 228349 - RNA, 19 nt, Artificial Sequence
  Description of Artificial Sequence: Synthetic oligonucleotide
aaucggucucuuuaaauau

SEQ ID NO: 228350 - RNA, 19 nt, Artificial Sequence
  Description of Artificial Sequence: Synthetic oligonucleotide
gguaguauacuguuacugg

SEQ ID NO: 228351 - RNA, 19 nt, Artificial Sequence
  Description of Artificial Sequence: Synthetic oligonucleotide
ggaacgucucccuagaggg

SEQ ID NO: 228352 - RNA, 19 nt, Artificial Sequence
  Description of Artificial Sequence: Synthetic oligonucleotide
uggauauugcucaugucga

SEQ ID NO: 228353 - RNA, 19 nt, Artificial Sequence
  Description of Artificial Sequence: Synthetic oligonucleotide
auuccaaugauugugccug

SEQ ID NO: 228354 - RNA, 19 nt, Artificial Sequence
  Description of Artificial Sequence: Synthetic oligonucleotide
uuaagaagcaaugcagggc

SEQ ID NO: 228355 - RNA, 19 nt, Artificial Sequence
  Description of Artificial Sequence: Synthetic oligonucleotide
uauuaaugagcauccauua

SEQ ID NO: 228356 - RNA, 19 nt, Artificial Sequence
  Description of Artificial Sequence: Synthetic oligonucleotide
gaaggcaagagagugacac

SEQ ID NO: 228357 - RNA, 19 nt, Artificial Sequence
  Description of Artificial Sequence: Synthetic oligonucleotide
aaaacaagcccuagaacug

SEQ ID NO: 228358 - RNA, 19 nt, Artificial Sequence
  Description of Artificial Sequence: Synthetic oligonucleotide
uauacuguuacuggggaga

SEQ ID NO: 228359 - RNA, 19 nt, Artificial Sequence
  Description of Artificial Sequence: Synthetic oligonucleotide
cuauguacuaacuccugag

SEQ ID NO: 228360 - RNA, 19 nt, Artificial Sequence
  Description of Artificial Sequence: Synthetic oligonucleotide
auugcagaaacugguuugc

SEQ ID NO: 228361 - RNA, 19 nt, Artificial Sequence
  Description of Artificial Sequence: Synthetic oligonucleotide
uguacuaacuccugaggcu

SEQ ID NO: 228362 - RNA, 19 nt, Artificial Sequence
  Description of Artificial Sequence: Synthetic oligonucleotide
augucgacuucauuaaaag

SEQ ID NO: 228363 - RNA, 19 nt, Artificial Sequence
  Description of Artificial Sequence: Synthetic oligonucleotide
uucgccugcauccaauacc

SEQ ID NO: 228364 - RNA, 19 nt, Artificial Sequence
  Description of Artificial Sequence: Synthetic oligonucleotide
uucaccacuauguacuaac

SEQ ID NO: 228365 - RNA, 19 nt, Artificial Sequence
  Description of Artificial Sequence: Synthetic oligonucleotide
uccaaagauagaaauucaa

SEQ ID NO: 228366 - RNA, 19 nt, Artificial Sequence
  Description of Artificial Sequence: Synthetic oligonucleotide
uuacuugccuuuuaccaug

SEQ ID NO: 228367 - RNA, 19 nt, Artificial Sequence
  Description of Artificial Sequence: Synthetic oligonucleotide
uccuaaaggucuaggagga

SEQ ID NO: 228368 - RNA, 19 nt, Artificial Sequence
  Description of Artificial Sequence: Synthetic oligonucleotide
agaagcgaacacugaagac

SEQ ID NO: 228369 - RNA, 19 nt, Artificial Sequence
  Description of Artificial Sequence: Synthetic oligonucleotide
uuacaaguuccgaauggug

SEQ ID NO: 228370 - RNA, 19 nt, Artificial Sequence
  Description of Artificial Sequence: Synthetic oligonucleotide
ugccauuugcuggugaugg

SEQ ID NO: 228371 - RNA, 19 nt, Artificial Sequence
  Description of Artificial Sequence: Synthetic oligonucleotide
caucauaggucgaacuucc

SEQ ID NO: 228372 - RNA, 19 nt, Artificial Sequence
  Description of Artificial Sequence: Synthetic oligonucleotide
gguauuuagcacuaauggc

SEQ ID NO: 228373 - RNA, 19 nt, Artificial Sequence
  Description of Artificial Sequence: Synthetic oligonucleotide
gaagcgaacacugaagaca

SEQ ID NO: 228374 - RNA, 19 nt, Artificial Sequence
  Description of Artificial Sequence: Synthetic oligonucleotide
uuacauagugcucuggcuu

SEQ ID NO: 228375 - RNA, 19 nt, Artificial Sequence
  Description of Artificial Sequence: Synthetic oligonucleotide
uuuagcgggagcagcacca

SEQ ID NO: 228376 - RNA, 19 nt, Artificial Sequence
  Description of Artificial Sequence: Synthetic oligonucleotide
cugaugucaauauaaucuc

SEQ ID NO: 228377 - RNA, 19 nt, Artificial Sequence
  Description of Artificial Sequence: Synthetic oligonucleotide
aaccgcaacacugauguca

SEQ ID NO: 228378 - RNA, 19 nt, Artificial Sequence
  Description of Artificial Sequence: Synthetic oligonucleotide
gaagaaaauugucuuugca

SEQ ID NO: 228379 - RNA, 19 nt, Artificial Sequence
  Description of Artificial Sequence: Synthetic oligonucleotide
gaagaagcgaacacugaag

SEQ ID NO: 228380 - RNA, 19 nt, Artificial Sequence
  Description of Artificial Sequence: Synthetic oligonucleotide
caaugauugugccuguccc

SEQ ID NO: 228381 - RNA, 19 nt, Artificial Sequence
  Description of Artificial Sequence: Synthetic oligonucleotide
gaacgcacaccuuuagcag

SEQ ID NO: 228382 - RNA, 19 nt, Artificial Sequence
  Description of Artificial Sequence: Synthetic oligonucleotide
aaguugugagggugagggc

SEQ ID NO: 228383 - RNA, 19 nt, Artificial Sequence
  Description of Artificial Sequence: Synthetic oligonucleotide
agacaggaauauuaaugag

SEQ ID NO: 228384 - RNA, 19 nt, Artificial Sequence
  Description of Artificial Sequence: Synthetic oligonucleotide
aguauacuguuacugggga

SEQ ID NO: 228385 - RNA, 19 nt, Artificial Sequence
  Description of Artificial Sequence: Synthetic oligonucleotide
aggcaagagagugacacac

SEQ ID NO: 228386 - RNA, 19 nt, Artificial Sequence
  Description of Artificial Sequence: Synthetic oligonucleotide
ucaauagguagagugugug

SEQ ID NO: 228387 - RNA, 19 nt, Artificial Sequence
  Description of Artificial Sequence: Synthetic oligonucleotide
ggaauauuaaugagcaucc

SEQ ID NO: 228388 - RNA, 19 nt, Artificial Sequence
  Description of Artificial Sequence: Synthetic oligonucleotide
ugauuaugccaaaaugaau

SEQ ID NO: 228389 - RNA, 19 nt, Artificial Sequence
  Description of Artificial Sequence: Synthetic oligonucleotide
ugggguuugaacuguaauc

SEQ ID NO: 228390 - RNA, 19 nt, Artificial Sequence
  Description of Artificial Sequence: Synthetic oligonucleotide
cugcaugaucaauagguag

SEQ ID NO: 228391 - RNA, 19 nt, Artificial Sequence
  Description of Artificial Sequence: Synthetic oligonucleotide
guagagaggcaccaugaag

SEQ ID NO: 228392 - RNA, 19 nt, Artificial Sequence
  Description of Artificial Sequence: Synthetic oligonucleotide
ucugaacgcacaccuuuag

SEQ ID NO: 228393 - RNA, 19 nt, Artificial Sequence
  Description of Artificial Sequence: Synthetic oligonucleotide
agggcuacauacaucauag

SEQ ID NO: 228394 - RNA, 19 nt, Artificial Sequence
  Description of Artificial Sequence: Synthetic oligonucleotide
uauaaucucuguacaccac

SEQ ID NO: 228395 - RNA, 19 nt, Artificial Sequence
  Description of Artificial Sequence: Synthetic oligonucleotide
acuguuacuggggagaaga

SEQ ID NO: 228396 - RNA, 19 nt, Artificial Sequence
  Description of Artificial Sequence: Synthetic oligonucleotide
caauagguagagugugugg

SEQ ID NO: 228397 - RNA, 19 nt, Artificial Sequence
  Description of Artificial Sequence: Synthetic oligonucleotide
ucuaggaggaggacucuug

SEQ ID NO: 228398 - RNA, 19 nt, Artificial Sequence
  Description of Artificial Sequence: Synthetic oligonucleotide
acuuaagagcucuugcuaa

SEQ ID NO: 228399 - RNA, 19 nt, Artificial Sequence
  Description of Artificial Sequence: Synthetic oligonucleotide
agaagacugguuuucaguu

SEQ ID NO: 228400 - RNA, 19 nt, Artificial Sequence
  Description of Artificial Sequence: Synthetic oligonucleotide
uucauaccuuguuacuugc

SEQ ID NO: 228401 - RNA, 19 nt, Artificial Sequence
  Description of Artificial Sequence: Synthetic oligonucleotide
ucgaacuuccaccuugccu

SEQ ID NO: 228402 - RNA, 19 nt, Artificial Sequence
  Description of Artificial Sequence: Synthetic oligonucleotide
gauaauggguguuccaaaa

SEQ ID NO: 228403 - RNA, 19 nt, Artificial Sequence
  Description of Artificial Sequence: Synthetic oligonucleotide
aaggguauuuagcacuaau

SEQ ID NO: 228404 - RNA, 19 nt, Artificial Sequence
  Description of Artificial Sequence: Synthetic oligonucleotide
auaggucgaacuuccaccu

SEQ ID NO: 228405 - RNA, 19 nt, Artificial Sequence
  Description of Artificial Sequence: Synthetic oligonucleotide
uacaucauaggucgaacuu

SEQ ID NO: 228406 - RNA, 19 nt, Artificial Sequence
  Description of Artificial Sequence: Synthetic oligonucleotide
aguggguauagcugcuacg

SEQ ID NO: 228407 - RNA, 19 nt, Artificial Sequence
  Description of Artificial Sequence: Synthetic oligonucleotide
uugguaugaccacaguuau

SEQ ID NO: 228408 - RNA, 19 nt, Artificial Sequence
  Description of Artificial Sequence: Synthetic oligonucleotide
ucagccgguggucauaggu

SEQ ID NO: 228409 - RNA, 19 nt, Artificial Sequence
  Description of Artificial Sequence: Synthetic oligonucleotide
ugucgacuucauuaaaagu

SEQ ID NO: 228410 - RNA, 19 nt, Artificial Sequence
  Description of Artificial Sequence: Synthetic oligonucleotide
aucaccugagaaugugcac

SEQ ID NO: 228411 - RNA, 19 nt, Artificial Sequence
  Description of Artificial Sequence: Synthetic oligonucleotide
auacaucauaggucgaacu

SEQ ID NO: 228412 - RNA, 19 nt, Artificial Sequence
  Description of Artificial Sequence: Synthetic oligonucleotide
ugacaucucccucuguaac

SEQ ID NO: 228413 - RNA, 19 nt, Artificial Sequence
  Description of Artificial Sequence: Synthetic oligonucleotide
aaagucugcucuaagugaa

SEQ ID NO: 228414 - RNA, 19 nt, Artificial Sequence
  Description of Artificial Sequence: Synthetic oligonucleotide
uuuuaguuacaaguuccga

SEQ ID NO: 228415 - RNA, 19 nt, Artificial Sequence
  Description of Artificial Sequence: Synthetic oligonucleotide
ucgccugcauccaauaccu

SEQ ID NO: 228416 - RNA, 19 nt, Artificial Sequence
  Description of Artificial Sequence: Synthetic oligonucleotide
cuaauggugaaaguaccac

SEQ ID NO: 228417 - RNA, 19 nt, Artificial Sequence
  Description of Artificial Sequence: Synthetic oligonucleotide
accacgagaccccuugggg

SEQ ID NO: 228418 - RNA, 19 nt, Artificial Sequence
  Description of Artificial Sequence: Synthetic oligonucleotide
cuuaagagcucuugcuaac

SEQ ID NO: 228419 - RNA, 19 nt, Artificial Sequence
  Description of Artificial Sequence: Synthetic oligonucleotide
aagagccuagaaagaacac

SEQ ID NO: 228420 - RNA, 19 nt, Artificial Sequence
  Description of Artificial Sequence: Synthetic oligonucleotide
aacugggaaggguugguau

SEQ ID NO: 228421 - RNA, 19 nt, Artificial Sequence
  Description of Artificial Sequence: Synthetic oligonucleotide
uuaagagcucuugcuaacc

SEQ ID NO: 228422 - RNA, 19 nt, Artificial Sequence
  Description of Artificial Sequence: Synthetic oligonucleotide
uuuuaccaugcuucaagaa

SEQ ID NO: 228423 - RNA, 19 nt, Artificial Sequence
  Description of Artificial Sequence: Synthetic oligonucleotide
agguuauguuucuucagga

SEQ ID NO: 228424 - RNA, 19 nt, Artificial Sequence
  Description of Artificial Sequence: Synthetic oligonucleotide
uccuccuaaaggucuagga

SEQ ID NO: 228425 - RNA, 19 nt, Artificial Sequence
  Description of Artificial Sequence: Synthetic oligonucleotide
auacuggccucuccccucc

SEQ ID NO: 228426 - RNA, 19 nt, Artificial Sequence
  Description of Artificial Sequence: Synthetic oligonucleotide
agaaagagccuagaaagaa

SEQ ID NO: 228427 - RNA, 19 nt, Artificial Sequence
  Description of Artificial Sequence: Synthetic oligonucleotide
gcaaguucguucuuucggg

SEQ ID NO: 228428 - RNA, 19 nt, Artificial Sequence
  Description of Artificial Sequence: Synthetic oligonucleotide
cuuacaauggagccuguga

SEQ ID NO: 228429 - RNA, 19 nt, Artificial Sequence
  Description of Artificial Sequence: Synthetic oligonucleotide
gauggaaccugcacagaag

SEQ ID NO: 228430 - RNA, 19 nt, Artificial Sequence
  Description of Artificial Sequence: Synthetic oligonucleotide
aggucgaacuuccaccuug

SEQ ID NO: 228431 - RNA, 19 nt, Artificial Sequence
  Description of Artificial Sequence: Synthetic oligonucleotide
gguuacauagugcucuggc

SEQ ID NO: 228432 - RNA, 19 nt, Artificial Sequence
  Description of Artificial Sequence: Synthetic oligonucleotide
uggugaaaguaccaccguc

SEQ ID NO: 228433 - RNA, 19 nt, Artificial Sequence
  Description of Artificial Sequence: Synthetic oligonucleotide
uccauuucaccacuaugua

SEQ ID NO: 228434 - RNA, 19 nt, Artificial Sequence
  Description of Artificial Sequence: Synthetic oligonucleotide
uuaacaggcucugacccac

SEQ ID NO: 228435 - RNA, 19 nt, Artificial Sequence
  Description of Artificial Sequence: Synthetic oligonucleotide
gaaaagaggaguuccuccu

SEQ ID NO: 228436 - RNA, 19 nt, Artificial Sequence
  Description of Artificial Sequence: Synthetic oligonucleotide
gauguucugaacgcacacc

SEQ ID NO: 228437 - RNA, 19 nt, Artificial Sequence
  Description of Artificial Sequence: Synthetic oligonucleotide
aacgucucccuagagggca

SEQ ID NO: 228438 - RNA, 19 nt, Artificial Sequence
  Description of Artificial Sequence: Synthetic oligonucleotide
gccaucucggacuuaagag

SEQ ID NO: 228439 - RNA, 19 nt, Artificial Sequence
  Description of Artificial Sequence: Synthetic oligonucleotide
accauagguuauccucccc

SEQ ID NO: 228440 - RNA, 19 nt, Artificial Sequence
  Description of Artificial Sequence: Synthetic oligonucleotide
uuaucaggcuaaccuggga

SEQ ID NO: 228441 - RNA, 19 nt, Artificial Sequence
  Description of Artificial Sequence: Synthetic oligonucleotide
aauggcccuuugucaauug

SEQ ID NO: 228442 - RNA, 19 nt, Artificial Sequence
  Description of Artificial Sequence: Synthetic oligonucleotide
auugccggugcuuccagcu

SEQ ID NO: 228443 - RNA, 19 nt, Artificial Sequence
  Description of Artificial Sequence: Synthetic oligonucleotide
aggguauuuagcacuaaug

SEQ ID NO: 228444 - RNA, 19 nt, Artificial Sequence
  Description of Artificial Sequence: Synthetic oligonucleotide
gccgguuuggcuuuagcgg

SEQ ID NO: 228445 - RNA, 19 nt, Artificial Sequence
  Description of Artificial Sequence: Synthetic oligonucleotide
ggccuaagagcuuucauac

SEQ ID NO: 228446 - RNA, 19 nt, Artificial Sequence
  Description of Artificial Sequence: Synthetic oligonucleotide
gcagccguggguuuuauug

SEQ ID NO: 228447 - RNA, 19 nt, Artificial Sequence
  Description of Artificial Sequence: Synthetic oligonucleotide
caucaaucacugcauuuac

SEQ ID NO: 228448 - RNA, 19 nt, Artificial Sequence
  Description of Artificial Sequence: Synthetic oligonucleotide
cauagguuauccuccccug

SEQ ID NO: 228449 - RNA, 19 nt, Artificial Sequence
  Description of Artificial Sequence: Synthetic oligonucleotide
agagccuagaaagaacacu

SEQ ID NO: 228450 - RNA, 19 nt, Artificial Sequence
  Description of Artificial Sequence: Synthetic oligonucleotide
cauuaaggcucucacucuc

SEQ ID NO: 228451 - RNA, 19 nt, Artificial Sequence
  Description of Artificial Sequence: Synthetic oligonucleotide
ugagcuaaagucugcucua

SEQ ID NO: 228452 - RNA, 19 nt, Artificial Sequence
  Description of Artificial Sequence: Synthetic oligonucleotide
agcacuaauggcccuuugu

SEQ ID NO: 228453 - RNA, 19 nt, Artificial Sequence
  Description of Artificial Sequence: Synthetic oligonucleotide
caggcacucaauacuggcc

SEQ ID NO: 228454 - RNA, 19 nt, Artificial Sequence
  Description of Artificial Sequence: Synthetic oligonucleotide
caaguucguucuuucgggc

SEQ ID NO: 228455 - RNA, 19 nt, Artificial Sequence
  Description of Artificial Sequence: Synthetic oligonucleotide
uugugccgaguucucaucu

SEQ ID NO: 228456 - RNA, 19 nt, Artificial Sequence
  Description of Artificial Sequence: Synthetic oligonucleotide
ugaagcacgacagcucaga

SEQ ID NO: 228457 - RNA, 19 nt, Artificial Sequence
  Description of Artificial Sequence: Synthetic oligonucleotide
gguagcaaccgcaacacug

SEQ ID NO: 228458 - RNA, 19 nt, Artificial Sequence
  Description of Artificial Sequence: Synthetic oligonucleotide
guuaucaggcuaaccuggg

SEQ ID NO: 228459 - RNA, 19 nt, Artificial Sequence
  Description of Artificial Sequence: Synthetic oligonucleotide
gugauuaugccaaaaugaa

SEQ ID NO: 228460 - RNA, 19 nt, Artificial Sequence
  Description of Artificial Sequence: Synthetic oligonucleotide
ucuuucgggccuucucucc

SEQ ID NO: 228461 - RNA, 19 nt, Artificial Sequence
  Description of Artificial Sequence: Synthetic oligonucleotide
ggugaaaguaccaccgucc

SEQ ID NO: 228462 - RNA, 19 nt, Artificial Sequence
  Description of Artificial Sequence: Synthetic oligonucleotide
aagcacgacagcucagaau

SEQ ID NO: 228463 - RNA, 19 nt, Artificial Sequence
  Description of Artificial Sequence: Synthetic oligonucleotide
gaccccuugggguagcaac

SEQ ID NO: 228464 - RNA, 19 nt, Artificial Sequence
  Description of Artificial Sequence: Synthetic oligonucleotide
gaauggugaagauguagua

SEQ ID NO: 228465 - RNA, 19 nt, Artificial Sequence
  Description of Artificial Sequence: Synthetic oligonucleotide
agcuaaagucugcucuaag

SEQ ID NO: 228466 - RNA, 19 nt, Artificial Sequence
  Description of Artificial Sequence: Synthetic oligonucleotide
aaaaggguauuuagcacua

SEQ ID NO: 228467 - RNA, 19 nt, Artificial Sequence
  Description of Artificial Sequence: Synthetic oligonucleotide
cuuuagcgggagcagcacc

SEQ ID NO: 228468 - RNA, 19 nt, Artificial Sequence
  Description of Artificial Sequence: Synthetic oligonucleotide
cugaacgcacaccuuuagc

SEQ ID NO: 228469 - RNA, 19 nt, Artificial Sequence
  Description of Artificial Sequence: Synthetic oligonucleotide
auagguuauccuccccugu

SEQ ID NO: 228470 - RNA, 19 nt, Artificial Sequence
  Description of Artificial Sequence: Synthetic oligonucleotide
cagacgcugggcaaugcgc

SEQ ID NO: 228471 - RNA, 19 nt, Artificial Sequence
  Description of Artificial Sequence: Synthetic oligonucleotide
gaaugguggugcauuuaag

SEQ ID NO: 228472 - RNA, 19 nt, Artificial Sequence
  Description of Artificial Sequence: Synthetic oligonucleotide
caggguucuacucccaauc

SEQ ID NO: 228473 - RNA, 19 nt, Artificial Sequence
  Description of Artificial Sequence: Synthetic oligonucleotide
agguagaguguguggcuuc

SEQ ID NO: 228474 - RNA, 19 nt, Artificial Sequence
  Description of Artificial Sequence: Synthetic oligonucleotide
gcuacauacaucauagguc

SEQ ID NO: 228475 - RNA, 19 nt, Artificial Sequence
  Description of Artificial Sequence: Synthetic oligonucleotide
acuaagaccugggaaggcu

SEQ ID NO: 228476 - RNA, 19 nt, Artificial Sequence
  Description of Artificial Sequence: Synthetic oligonucleotide
auccauuaaggcucucacu

SEQ ID NO: 228477 - RNA, 19 nt, Artificial Sequence
  Description of Artificial Sequence: Synthetic oligonucleotide
gcucuaagugaaaacaagc

SEQ ID NO: 228478 - RNA, 19 nt, Artificial Sequence
  Description of Artificial Sequence: Synthetic oligonucleotide
uagguuauccuccccugua

SEQ ID NO: 228479 - RNA, 19 nt, Artificial Sequence
  Description of Artificial Sequence: Synthetic oligonucleotide
ccaucucggacuuaagagc

SEQ ID NO: 228480 - RNA, 19 nt, Artificial Sequence
  Description of Artificial Sequence: Synthetic oligonucleotide
guugauaauggguguucca

SEQ ID NO: 228481 - RNA, 19 nt, Artificial Sequence
  Description of Artificial Sequence: Synthetic oligonucleotide
ucaugucgacuucauuaaa

SEQ ID NO: 228482 - RNA, 19 nt, Artificial Sequence
  Description of Artificial Sequence: Synthetic oligonucleotide
ugccugccuguuaucaggc

SEQ ID NO: 228483 - RNA, 19 nt, Artificial Sequence
  Description of Artificial Sequence: Synthetic oligonucleotide
uggcccuuugucaauuguc

SEQ ID NO: 228484 - RNA, 19 nt, Artificial Sequence
  Description of Artificial Sequence: Synthetic oligonucleotide
ucggacuuaagagcucuug

SEQ ID NO: 228485 - RNA, 19 nt, Artificial Sequence
  Description of Artificial Sequence: Synthetic oligonucleotide
ucucggacuuaagagcucu

SEQ ID NO: 228486 - RNA, 19 nt, Artificial Sequence
  Description of Artificial Sequence: Synthetic oligonucleotide
guucucaucucuuggauau

SEQ ID NO: 228487 - RNA, 19 nt, Artificial Sequence
  Description of Artificial Sequence: Synthetic oligonucleotide
cacuaauggcccuuuguca

SEQ ID NO: 228488 - RNA, 19 nt, Artificial Sequence
  Description of Artificial Sequence: Synthetic oligonucleotide
cacuauguacuaacuccug

SEQ ID NO: 228489 - RNA, 19 nt, Artificial Sequence
  Description of Artificial Sequence: Synthetic oligonucleotide
aggguucuacucccaaucu

SEQ ID NO: 228490 - RNA, 19 nt, Artificial Sequence
  Description of Artificial Sequence: Synthetic oligonucleotide
gaaccacgagaccccuugg

SEQ ID NO: 228491 - RNA, 19 nt, Artificial Sequence
  Description of Artificial Sequence: Synthetic oligonucleotide
ugaugccauuugcugguga

SEQ ID NO: 228492 - RNA, 19 nt, Artificial Sequence
  Description of Artificial Sequence: Synthetic oligonucleotide
ggaaccacgagaccccuug

SEQ ID NO: 228493 - RNA, 19 nt, Artificial Sequence
  Description of Artificial Sequence: Synthetic oligonucleotide
uauccuccccuguaucugu

SEQ ID NO: 228494 - RNA, 19 nt, Artificial Sequence
  Description of Artificial Sequence: Synthetic oligonucleotide
cugaucuggucagagucag

SEQ ID NO: 228495 - RNA, 19 nt, Artificial Sequence
  Description of Artificial Sequence: Synthetic oligonucleotide
cucccaaucuugccugucc

SEQ ID NO: 228496 - RNA, 19 nt, Artificial Sequence
  Description of Artificial Sequence: Synthetic oligonucleotide
gggguuugaacuguaauca

SEQ ID NO: 228497 - RNA, 19 nt, Artificial Sequence
  Description of Artificial Sequence: Synthetic oligonucleotide
cagcucagaaugguggugc

SEQ ID NO: 228498 - RNA, 19 nt, Artificial Sequence
  Description of Artificial Sequence: Synthetic oligonucleotide
uuugugccgaguucucauc

SEQ ID NO: 228499 - RNA, 19 nt, Artificial Sequence
  Description of Artificial Sequence: Synthetic oligonucleotide
augauugugccugucccca

SEQ ID NO: 228500 - RNA, 19 nt, Artificial Sequence
  Description of Artificial Sequence: Synthetic oligonucleotide
caccauagguuauccuccc

SEQ ID NO: 228501 - RNA, 19 nt, Artificial Sequence
  Description of Artificial Sequence: Synthetic oligonucleotide
gcaaccgcaacacugaugu

SEQ ID NO: 228502 - RNA, 19 nt, Artificial Sequence
  Description of Artificial Sequence: Synthetic oligonucleotide
agccugaucccugacauaa

SEQ ID NO: 228503 - RNA, 19 nt, Artificial Sequence
  Description of Artificial Sequence: Synthetic oligonucleotide
uucugaacgcacaccuuua

SEQ ID NO: 228504 - RNA, 19 nt, Artificial Sequence
  Description of Artificial Sequence: Synthetic oligonucleotide
gugaaaguaccaccgucca

SEQ ID NO: 228505 - RNA, 19 nt, Artificial Sequence
  Description of Artificial Sequence: Synthetic oligonucleotide
cuugaggccaacaguaugu

SEQ ID NO: 228506 - RNA, 19 nt, Artificial Sequence
  Description of Artificial Sequence: Synthetic oligonucleotide
gaauauuaaugagcaucca

SEQ ID NO: 228507 - RNA, 19 nt, Artificial Sequence
  Description of Artificial Sequence: Synthetic oligonucleotide
auuuagcacuaauggcccu

SEQ ID NO: 228508 - RNA, 19 nt, Artificial Sequence
  Description of Artificial Sequence: Synthetic oligonucleotide
uuccuccuaaaggucuagg

SEQ ID NO: 228509 - RNA, 19 nt, Artificial Sequence
  Description of Artificial Sequence: Synthetic oligonucleotide
accccuugggguagcaacc

SEQ ID NO: 228510 - RNA, 19 nt, Artificial Sequence
  Description of Artificial Sequence: Synthetic oligonucleotide
ccuccuaaaggucuaggag

SEQ ID NO: 228511 - RNA, 19 nt, Artificial Sequence
  Description of Artificial Sequence: Synthetic oligonucleotide
ugguuacauagugcucugg

SEQ ID NO: 228512 - RNA, 19 nt, Artificial Sequence
  Description of Artificial Sequence: Synthetic oligonucleotide
cucucacucucucucucag

SEQ ID NO: 228513 - RNA, 19 nt, Artificial Sequence
  Description of Artificial Sequence: Synthetic oligonucleotide
cuuggauauugcucauguc

SEQ ID NO: 228514 - RNA, 19 nt, Artificial Sequence
  Description of Artificial Sequence: Synthetic oligonucleotide
auggugaaaguaccaccgu

SEQ ID NO: 228515 - RNA, 19 nt, Artificial Sequence
  Description of Artificial Sequence: Synthetic oligonucleotide
ugguaccccgguaguauac

SEQ ID NO: 228516 - RNA, 19 nt, Artificial Sequence
  Description of Artificial Sequence: Synthetic oligonucleotide
aacuuccaccuugccuccc

SEQ ID NO: 228517 - RNA, 19 nt, Artificial Sequence
  Description of Artificial Sequence: Synthetic oligonucleotide
ccaccauagguuauccucc

SEQ ID NO: 228518 - RNA, 19 nt, Artificial Sequence
  Description of Artificial Sequence: Synthetic oligonucleotide
ucagaaugguggugcauuu

SEQ ID NO: 228519 - RNA, 19 nt, Artificial Sequence
  Description of Artificial Sequence: Synthetic oligonucleotide
guucuacucccaaucuugc

SEQ ID NO: 228520 - RNA, 19 nt, Artificial Sequence
  Description of Artificial Sequence: Synthetic oligonucleotide
guagcaaccgcaacacuga

SEQ ID NO: 228521 - RNA, 19 nt, Artificial Sequence
  Description of Artificial Sequence: Synthetic oligonucleotide
ccgguuuggcuuuagcggg

SEQ ID NO: 228522 - RNA, 19 nt, Artificial Sequence
  Description of Artificial Sequence: Synthetic oligonucleotide
ggcuacauacaucauaggu

SEQ ID NO: 228523 - RNA, 19 nt, Artificial Sequence
  Description of Artificial Sequence: Synthetic oligonucleotide
gcucuugcuaaccugaucu

SEQ ID NO: 228524 - RNA, 19 nt, Artificial Sequence
  Description of Artificial Sequence: Synthetic oligonucleotide
guuacauagugcucuggcu

SEQ ID NO: 228525 - RNA, 19 nt, Artificial Sequence
  Description of Artificial Sequence: Synthetic oligonucleotide
ccugagugugaaaagagga

SEQ ID NO: 228526 - RNA, 19 nt, Artificial Sequence
  Description of Artificial Sequence: Synthetic oligonucleotide
ccugacauaaggagacccc

SEQ ID NO: 228527 - RNA, 19 nt, Artificial Sequence
  Description of Artificial Sequence: Synthetic oligonucleotide
ugccgcaggcacucaauac

SEQ ID NO: 228528 - RNA, 19 nt, Artificial Sequence
  Description of Artificial Sequence: Synthetic oligonucleotide
caucucggacuuaagagcu

SEQ ID NO: 228529 - RNA, 19 nt, Artificial Sequence
  Description of Artificial Sequence: Synthetic oligonucleotide
caauggagccugugagggc

SEQ ID NO: 228530 - RNA, 19 nt, Artificial Sequence
  Description of Artificial Sequence: Synthetic oligonucleotide
auuucaccacuauguacua

SEQ ID NO: 228531 - RNA, 19 nt, Artificial Sequence
  Description of Artificial Sequence: Synthetic oligonucleotide
ccauuucaccacuauguac

SEQ ID NO: 228532 - RNA, 19 nt, Artificial Sequence
  Description of Artificial Sequence: Synthetic oligonucleotide
aucaauagguagagugugu

SEQ ID NO: 228533 - RNA, 19 nt, Artificial Sequence
  Description of Artificial Sequence: Synthetic oligonucleotide
agguuauccuccccuguau

SEQ ID NO: 228534 - RNA, 19 nt, Artificial Sequence
  Description of Artificial Sequence: Synthetic oligonucleotide
cccgguaguauacuguuac

SEQ ID NO: 228535 - RNA, 19 nt, Artificial Sequence
  Description of Artificial Sequence: Synthetic oligonucleotide
uggcuuuagcgggagcagc

SEQ ID NO: 228536 - RNA, 19 nt, Artificial Sequence
  Description of Artificial Sequence: Synthetic oligonucleotide
ugugccgaguucucaucuc

SEQ ID NO: 228537 - RNA, 19 nt, Artificial Sequence
  Description of Artificial Sequence: Synthetic oligonucleotide
guaccccgguaguauacug

SEQ ID NO: 228538 - RNA, 19 nt, Artificial Sequence
  Description of Artificial Sequence: Synthetic oligonucleotide
cagagucagucccuuuaac

SEQ ID NO: 228539 - RNA, 19 nt, Artificial Sequence
  Description of Artificial Sequence: Synthetic oligonucleotide
cuucgccugcauccaauac

SEQ ID NO: 228540 - RNA, 19 nt, Artificial Sequence
  Description of Artificial Sequence: Synthetic oligonucleotide
auuaaggcucucacucucu

SEQ ID NO: 228541 - RNA, 19 nt, Artificial Sequence
  Description of Artificial Sequence: Synthetic oligonucleotide
ucuucgccugcauccaaua

SEQ ID NO: 228542 - RNA, 19 nt, Artificial Sequence
  Description of Artificial Sequence: Synthetic oligonucleotide
ugguaugaccacaguuaua

SEQ ID NO: 228543 - RNA, 19 nt, Artificial Sequence
  Description of Artificial Sequence: Synthetic oligonucleotide
uguguggcuuccuccuaaa

SEQ ID NO: 228544 - RNA, 19 nt, Artificial Sequence
  Description of Artificial Sequence: Synthetic oligonucleotide
caucugaguggguauagcu

SEQ ID NO: 228545 - RNA, 19 nt, Artificial Sequence
  Description of Artificial Sequence: Synthetic oligonucleotide
ggauauugcucaugucgac

SEQ ID NO: 228546 - RNA, 19 nt, Artificial Sequence
  Description of Artificial Sequence: Synthetic oligonucleotide
guuugaacuguaaucacuu

SEQ ID NO: 228547 - RNA, 19 nt, Artificial Sequence
  Description of Artificial Sequence: Synthetic oligonucleotide
gaagcacgacagcucagaa

SEQ ID NO: 228548 - RNA, 19 nt, Artificial Sequence
  Description of Artificial Sequence: Synthetic oligonucleotide
cugacccacugccaugaug

SEQ ID NO: 228549 - RNA, 19 nt, Artificial Sequence
  Description of Artificial Sequence: Synthetic oligonucleotide
caggguagccugaucccug

SEQ ID NO: 228550 - RNA, 19 nt, Artificial Sequence
  Description of Artificial Sequence: Synthetic oligonucleotide
gccaucaaucagccggugg

SEQ ID NO: 228551 - RNA, 19 nt, Artificial Sequence
  Description of Artificial Sequence: Synthetic oligonucleotide
cagccgguggucauagguc

SEQ ID NO: 228552 - RNA, 19 nt, Artificial Sequence
  Description of Artificial Sequence: Synthetic oligonucleotide
aaaggguauuuagcacuaa

SEQ ID NO: 228553 - RNA, 19 nt, Artificial Sequence
  Description of Artificial Sequence: Synthetic oligonucleotide
uuacaacaggcugcuccug

SEQ ID NO: 228554 - RNA, 19 nt, Artificial Sequence
  Description of Artificial Sequence: Synthetic oligonucleotide
gcuaaagucugcucuaagu

SEQ ID NO: 228555 - RNA, 19 nt, Artificial Sequence
  Description of Artificial Sequence: Synthetic oligonucleotide
cauugccggugcuuccagc

SEQ ID NO: 228556 - RNA, 19 nt, Artificial Sequence
  Description of Artificial Sequence: Synthetic oligonucleotide
ucccaccugacaucucccu

SEQ ID NO: 228557 - RNA, 19 nt, Artificial Sequence
  Description of Artificial Sequence: Synthetic oligonucleotide
uuucaccacuauguacuaa

SEQ ID NO: 228558 - RNA, 19 nt, Artificial Sequence
  Description of Artificial Sequence: Synthetic oligonucleotide
agacacuacuguuguuaau

SEQ ID NO: 228559 - RNA, 19 nt, Artificial Sequence
  Description of Artificial Sequence: Synthetic oligonucleotide
uagguagaguguguggcuu

SEQ ID NO: 228560 - RNA, 19 nt, Artificial Sequence
  Description of Artificial Sequence: Synthetic oligonucleotide
agaaagcgagcggcugaac

SEQ ID NO: 228561 - RNA, 19 nt, Artificial Sequence
  Description of Artificial Sequence: Synthetic oligonucleotide
uggcaucaccugagaaugu

SEQ ID NO: 228562 - RNA, 19 nt, Artificial Sequence
  Description of Artificial Sequence: Synthetic oligonucleotide
aguaugugccugccuguua

SEQ ID NO: 228563 - RNA, 19 nt, Artificial Sequence
  Description of Artificial Sequence: Synthetic oligonucleotide
acgacagcucagaauggug

SEQ ID NO: 228564 - RNA, 19 nt, Artificial Sequence
  Description of Artificial Sequence: Synthetic oligonucleotide
cuugggguagcaaccgcaa

SEQ ID NO: 228565 - RNA, 19 nt, Artificial Sequence
  Description of Artificial Sequence: Synthetic oligonucleotide
gccugugagggcaagucag

SEQ ID NO: 228566 - RNA, 19 nt, Artificial Sequence
  Description of Artificial Sequence: Synthetic oligonucleotide
auacuguuacuggggagaa

SEQ ID NO: 228567 - RNA, 19 nt, Artificial Sequence
  Description of Artificial Sequence: Synthetic oligonucleotide
caucaaucagccggugguc

SEQ ID NO: 228568 - RNA, 19 nt, Artificial Sequence
  Description of Artificial Sequence: Synthetic oligonucleotide
gucgaacuuccaccuugcc

SEQ ID NO: 228569 - RNA, 19 nt, Artificial Sequence
  Description of Artificial Sequence: Synthetic oligonucleotide
gggaaggguugguaugacc

SEQ ID NO: 228570 - RNA, 19 nt, Artificial Sequence
  Description of Artificial Sequence: Synthetic oligonucleotide
ccuaagagcuuucauaccu

SEQ ID NO: 228571 - RNA, 19 nt, Artificial Sequence
  Description of Artificial Sequence: Synthetic oligonucleotide
ucccgauguucugaacgca

SEQ ID NO: 228572 - RNA, 19 nt, Artificial Sequence
  Description of Artificial Sequence: Synthetic oligonucleotide
uacucccaaucuugccugu

SEQ ID NO: 228573 - RNA, 19 nt, Artificial Sequence
  Description of Artificial Sequence: Synthetic oligonucleotide
uucagacgcugggcaaugc

SEQ ID NO: 228574 - RNA, 19 nt, Artificial Sequence
  Description of Artificial Sequence: Synthetic oligonucleotide
ccgugguuuggaagaagcg

SEQ ID NO: 228575 - RNA, 19 nt, Artificial Sequence
  Description of Artificial Sequence: Synthetic oligonucleotide
cagggcuacauacaucaua

SEQ ID NO: 228576 - RNA, 19 nt, Artificial Sequence
  Description of Artificial Sequence: Synthetic oligonucleotide
uccaaugauugugccuguc

SEQ ID NO: 228577 - RNA, 19 nt, Artificial Sequence
  Description of Artificial Sequence: Synthetic oligonucleotide
agcaaccgcaacacugaug

SEQ ID NO: 228578 - RNA, 19 nt, Artificial Sequence
  Description of Artificial Sequence: Synthetic oligonucleotide
aucucggacuuaagagcuc

SEQ ID NO: 228579 - RNA, 19 nt, Artificial Sequence
  Description of Artificial Sequence: Synthetic oligonucleotide
ccgaauggugaagauguag

SEQ ID NO: 228580 - RNA, 19 nt, Artificial Sequence
  Description of Artificial Sequence: Synthetic oligonucleotide
ucccuggugguaccccggu

SEQ ID NO: 228581 - RNA, 19 nt, Artificial Sequence
  Description of Artificial Sequence: Synthetic oligonucleotide
gccuaagagcuuucauacc

SEQ ID NO: 228582 - RNA, 19 nt, Artificial Sequence
  Description of Artificial Sequence: Synthetic oligonucleotide
agaugccgcaggcacucaa

SEQ ID NO: 228583 - RNA, 19 nt, Artificial Sequence
  Description of Artificial Sequence: Synthetic oligonucleotide
gccgugguuuggaagaagc

SEQ ID NO: 228584 - RNA, 19 nt, Artificial Sequence
  Description of Artificial Sequence: Synthetic oligonucleotide
cugggaaggguugguauga

SEQ ID NO: 228585 - RNA, 19 nt, Artificial Sequence
  Description of Artificial Sequence: Synthetic oligonucleotide
cgccgguuuggcuuuagcg

SEQ ID NO: 228586 - RNA, 19 nt, Artificial Sequence
  Description of Artificial Sequence: Synthetic oligonucleotide
uucuaccgcugccuugauu

SEQ ID NO: 228587 - RNA, 19 nt, Artificial Sequence
  Description of Artificial Sequence: Synthetic oligonucleotide
accgcaacacugaugucaa

SEQ ID NO: 228588 - RNA, 19 nt, Artificial Sequence
  Description of Artificial Sequence: Synthetic oligonucleotide
cccuguaucuguguccugc

SEQ ID NO: 228589 - RNA, 19 nt, Artificial Sequence
  Description of Artificial Sequence: Synthetic oligonucleotide
aagccuaguuugagguuau

SEQ ID NO: 228590 - RNA, 19 nt, Artificial Sequence
  Description of Artificial Sequence: Synthetic oligonucleotide
acgcacaccuuuagcagcu

SEQ ID NO: 228591 - RNA, 19 nt, Artificial Sequence
  Description of Artificial Sequence: Synthetic oligonucleotide
ccccauagagaugacauca

SEQ ID NO: 228592 - RNA, 19 nt, Artificial Sequence
  Description of Artificial Sequence: Synthetic oligonucleotide
aucggucucuuuaaauauu

SEQ ID NO: 228593 - RNA, 19 nt, Artificial Sequence
  Description of Artificial Sequence: Synthetic oligonucleotide
cuuugugccgaguucucau

SEQ ID NO: 228594 - RNA, 19 nt, Artificial Sequence
  Description of Artificial Sequence: Synthetic oligonucleotide
cccgauguucugaacgcac

SEQ ID NO: 228595 - RNA, 19 nt, Artificial Sequence
  Description of Artificial Sequence: Synthetic oligonucleotide
ccaagcuuguccuggauua

SEQ ID NO: 228596 - RNA, 19 nt, Artificial Sequence
  Description of Artificial Sequence: Synthetic oligonucleotide
gguugguaugaccacaguu

SEQ ID NO: 228597 - RNA, 19 nt, Artificial Sequence
  Description of Artificial Sequence: Synthetic oligonucleotide
uccuugcuugaggccaaca

SEQ ID NO: 228598 - RNA, 19 nt, Artificial Sequence
  Description of Artificial Sequence: Synthetic oligonucleotide
cacgagaccccuuggggua

SEQ ID NO: 228599 - RNA, 19 nt, Artificial Sequence
  Description of Artificial Sequence: Synthetic oligonucleotide
aguccccggccagugcuuc

SEQ ID NO: 228600 - RNA, 19 nt, Artificial Sequence
  Description of Artificial Sequence: Synthetic oligonucleotide
ucccuuuaacaggcucuga

SEQ ID NO: 228601 - RNA, 19 nt, Artificial Sequence
  Description of Artificial Sequence: Synthetic oligonucleotide
ggucgaacuuccaccuugc

SEQ ID NO: 228602 - RNA, 19 nt, Artificial Sequence
  Description of Artificial Sequence: Synthetic oligonucleotide
agccuagaaagaacacuaa

SEQ ID NO: 228603 - RNA, 19 nt, Artificial Sequence
  Description of Artificial Sequence: Synthetic oligonucleotide
cgguaguauacuguuacug

SEQ ID NO: 228604 - RNA, 19 nt, Artificial Sequence
  Description of Artificial Sequence: Synthetic oligonucleotide
gcccgggacacgcagcgag

SEQ ID NO: 228605 - RNA, 19 nt, Artificial Sequence
  Description of Artificial Sequence: Synthetic oligonucleotide
acgagaccccuugggguag

SEQ ID NO: 228606 - RNA, 19 nt, Artificial Sequence
  Description of Artificial Sequence: Synthetic oligonucleotide
agcgggagcagcaccaguu

SEQ ID NO: 228607 - RNA, 19 nt, Artificial Sequence
  Description of Artificial Sequence: Synthetic oligonucleotide
cccaaucuugccugucccc

SEQ ID NO: 228608 - RNA, 19 nt, Artificial Sequence
  Description of Artificial Sequence: Synthetic oligonucleotide
ccgcaggcacucaauacug

SEQ ID NO: 228609 - RNA, 19 nt, Artificial Sequence
  Description of Artificial Sequence: Synthetic oligonucleotide
agccgugguuuggaagaag

SEQ ID NO: 228610 - RNA, 19 nt, Artificial Sequence
  Description of Artificial Sequence: Synthetic oligonucleotide
auauaaggccuaagagcuu

SEQ ID NO: 228611 - RNA, 19 nt, Artificial Sequence
  Description of Artificial Sequence: Synthetic oligonucleotide
ugccaucaaucagccggug

SEQ ID NO: 228612 - RNA, 19 nt, Artificial Sequence
  Description of Artificial Sequence: Synthetic oligonucleotide
aucauaggucgaacuucca

SEQ ID NO: 228613 - RNA, 19 nt, Artificial Sequence
  Description of Artificial Sequence: Synthetic oligonucleotide
caauacuggccucuccccu

SEQ ID NO: 228614 - RNA, 19 nt, Artificial Sequence
  Description of Artificial Sequence: Synthetic oligonucleotide
gucccuggugguaccccgg

SEQ ID NO: 228615 - RNA, 19 nt, Artificial Sequence
  Description of Artificial Sequence: Synthetic oligonucleotide
agcuuccgccgguuuggcu

SEQ ID NO: 228616 - RNA, 19 nt, Artificial Sequence
  Description of Artificial Sequence: Synthetic oligonucleotide
gcgaacacugaagacacua

SEQ ID NO: 228617 - RNA, 19 nt, Artificial Sequence
  Description of Artificial Sequence: Synthetic oligonucleotide
ucuucccagugagcuuaca

SEQ ID NO: 228618 - RNA, 19 nt, Artificial Sequence
  Description of Artificial Sequence: Synthetic oligonucleotide
agcuggauauaaggccuaa

SEQ ID NO: 228619 - RNA, 19 nt, Artificial Sequence
  Description of Artificial Sequence: Synthetic oligonucleotide
gcauccauuaaggcucuca

SEQ ID NO: 228620 - RNA, 19 nt, Artificial Sequence
  Description of Artificial Sequence: Synthetic oligonucleotide
gugccgaguucucaucucu

SEQ ID NO: 228621 - RNA, 19 nt, Artificial Sequence
  Description of Artificial Sequence: Synthetic oligonucleotide
cacugaagacacuacuguu

SEQ ID NO: 228622 - RNA, 19 nt, Artificial Sequence
  Description of Artificial Sequence: Synthetic oligonucleotide
ggcuuuagcgggagcagca

SEQ ID NO: 228623 - RNA, 19 nt, Artificial Sequence
  Description of Artificial Sequence: Synthetic oligonucleotide
ccuaguuugagguuauguu

SEQ ID NO: 228624 - RNA, 19 nt, Artificial Sequence
  Description of Artificial Sequence: Synthetic oligonucleotide
cugggguuugaacuguaau

SEQ ID NO: 228625 - RNA, 19 nt, Artificial Sequence
  Description of Artificial Sequence: Synthetic oligonucleotide
gccgcaggcacucaauacu

SEQ ID NO: 228626 - RNA, 19 nt, Artificial Sequence
  Description of Artificial Sequence: Synthetic oligonucleotide
gugguaccccgguaguaua

SEQ ID NO: 228627 - RNA, 19 nt, Artificial Sequence
  Description of Artificial Sequence: Synthetic oligonucleotide
gcauugccggugcuuccag

SEQ ID NO: 228628 - RNA, 19 nt, Artificial Sequence
  Description of Artificial Sequence: Synthetic oligonucleotide
ggcucucacucucucucuc

SEQ ID NO: 228629 - RNA, 19 nt, Artificial Sequence
  Description of Artificial Sequence: Synthetic oligonucleotide
cgaauggugaagauguagu

SEQ ID NO: 228630 - RNA, 19 nt, Artificial Sequence
  Description of Artificial Sequence: Synthetic oligonucleotide
gcucucacucucucucuca

SEQ ID NO: 228631 - RNA, 19 nt, Artificial Sequence
  Description of Artificial Sequence: Synthetic oligonucleotide
gagcuuccgccgguuuggc

SEQ ID NO: 228632 - RNA, 19 nt, Artificial Sequence
  Description of Artificial Sequence: Synthetic oligonucleotide
caaccgcaacacugauguc

SEQ ID NO: 228633 - RNA, 19 nt, Artificial Sequence
  Description of Artificial Sequence: Synthetic oligonucleotide
ccugcaugaucaauaggua

SEQ ID NO: 228634 - RNA, 19 nt, Artificial Sequence
  Description of Artificial Sequence: Synthetic oligonucleotide
cugccaucaaucagccggu

SEQ ID NO: 228635 - RNA, 19 nt, Artificial Sequence
  Description of Artificial Sequence: Synthetic oligonucleotide
cagaaagcgagcggcugaa

SEQ ID NO: 228636 - RNA, 19 nt, Artificial Sequence
  Description of Artificial Sequence: Synthetic oligonucleotide
ccuagaacugggaaggguu

SEQ ID NO: 228637 - RNA, 19 nt, Artificial Sequence
  Description of Artificial Sequence: Synthetic oligonucleotide
acgucucccuagagggcag

SEQ ID NO: 228638 - RNA, 19 nt, Artificial Sequence
  Description of Artificial Sequence: Synthetic oligonucleotide
gccuguuaucaggcuaacc

SEQ ID NO: 228639 - RNA, 19 nt, Artificial Sequence
  Description of Artificial Sequence: Synthetic oligonucleotide
uccgccgguuuggcuuuag

SEQ ID NO: 228640 - RNA, 19 nt, Artificial Sequence
  Description of Artificial Sequence: Synthetic oligonucleotide
cugaguggguauagcugcu

SEQ ID NO: 228641 - RNA, 19 nt, Artificial Sequence
  Description of Artificial Sequence: Synthetic oligonucleotide
gcuuuagcgggagcagcac

SEQ ID NO: 228642 - RNA, 19 nt, Artificial Sequence
  Description of Artificial Sequence: Synthetic oligonucleotide
ccauagguuauccuccccu

SEQ ID NO: 228643 - RNA, 19 nt, Artificial Sequence
  Description of Artificial Sequence: Synthetic oligonucleotide
cacgacagcucagaauggu

SEQ ID NO: 228644 - RNA, 19 nt, Artificial Sequence
  Description of Artificial Sequence: Synthetic oligonucleotide
augcgcugccgcauccugu

SEQ ID NO: 228645 - RNA, 19 nt, Artificial Sequence
  Description of Artificial Sequence: Synthetic oligonucleotide
gaugccgcaggcacucaau

SEQ ID NO: 228646 - RNA, 19 nt, Artificial Sequence
  Description of Artificial Sequence: Synthetic oligonucleotide
gcggcugaacgcccgggac

SEQ ID NO: 228647 - RNA, 19 nt, Artificial Sequence
  Description of Artificial Sequence: Synthetic oligonucleotide
caacagcuuucucccaccu

SEQ ID NO: 228648 - RNA, 19 nt, Artificial Sequence
  Description of Artificial Sequence: Synthetic oligonucleotide
agcgaacacugaagacacu

SEQ ID NO: 228649 - RNA, 19 nt, Artificial Sequence
  Description of Artificial Sequence: Synthetic oligonucleotide
ccgcauccuguucauuuuc

SEQ ID NO: 228650 - RNA, 19 nt, Artificial Sequence
  Description of Artificial Sequence: Synthetic oligonucleotide
cagaaugguggugcauuua

SEQ ID NO: 228651 - RNA, 19 nt, Artificial Sequence
  Description of Artificial Sequence: Synthetic oligonucleotide
cucuucgccugcauccaau

SEQ ID NO: 228652 - RNA, 19 nt, Artificial Sequence
  Description of Artificial Sequence: Synthetic oligonucleotide
ccaaguccccggccagugc

SEQ ID NO: 228653 - RNA, 19 nt, Artificial Sequence
  Description of Artificial Sequence: Synthetic oligonucleotide
ggugguaccccgguaguau

SEQ ID NO: 228654 - RNA, 19 nt, Artificial Sequence
  Description of Artificial Sequence: Synthetic oligonucleotide
cccuugggguagcaaccgc

SEQ ID NO: 228655 - RNA, 19 nt, Artificial Sequence
  Description of Artificial Sequence: Synthetic oligonucleotide
ccauuaaggcucucacucu

SEQ ID NO: 228656 - RNA, 19 nt, Artificial Sequence
  Description of Artificial Sequence: Synthetic oligonucleotide
ccaccugacaucucccucu

SEQ ID NO: 228657 - RNA, 19 nt, Artificial Sequence
  Description of Artificial Sequence: Synthetic oligonucleotide
cguggguuuuauugcagaa

SEQ ID NO: 228658 - RNA, 19 nt, Artificial Sequence
  Description of Artificial Sequence: Synthetic oligonucleotide
agaccccuugggguagcaa

SEQ ID NO: 228659 - RNA, 19 nt, Artificial Sequence
  Description of Artificial Sequence: Synthetic oligonucleotide
agcuuacaauggagccugu

SEQ ID NO: 228660 - RNA, 19 nt, Artificial Sequence
  Description of Artificial Sequence: Synthetic oligonucleotide
gagaccccuugggguagca

SEQ ID NO: 228661 - RNA, 19 nt, Artificial Sequence
  Description of Artificial Sequence: Synthetic oligonucleotide
ggguucuacucccaaucuu

SEQ ID NO: 228662 - RNA, 19 nt, Artificial Sequence
  Description of Artificial Sequence: Synthetic oligonucleotide
cgcaacacugaugucaaua

SEQ ID NO: 228663 - RNA, 19 nt, Artificial Sequence
  Description of Artificial Sequence: Synthetic oligonucleotide
gguaccccgguaguauacu

SEQ ID NO: 228664 - RNA, 19 nt, Artificial Sequence
  Description of Artificial Sequence: Synthetic oligonucleotide
ggcuaaccugggacuggug

SEQ ID NO: 228665 - RNA, 19 nt, Artificial Sequence
  Description of Artificial Sequence: Synthetic oligonucleotide
ccuuguuacuugccuuuua

SEQ ID NO: 228666 - RNA, 19 nt, Artificial Sequence
  Description of Artificial Sequence: Synthetic oligonucleotide
ggccugucaaagaugccau

SEQ ID NO: 228667 - RNA, 19 nt, Artificial Sequence
  Description of Artificial Sequence: Synthetic oligonucleotide
ccgccgguuuggcuuuagc

SEQ ID NO: 228668 - RNA, 19 nt, Artificial Sequence
  Description of Artificial Sequence: Synthetic oligonucleotide
ggguugguaugaccacagu

SEQ ID NO: 228669 - RNA, 19 nt, Artificial Sequence
  Description of Artificial Sequence: Synthetic oligonucleotide
agggcaagucaggguucua

SEQ ID NO: 228670 - RNA, 19 nt, Artificial Sequence
  Description of Artificial Sequence: Synthetic oligonucleotide
ccgguaguauacuguuacu

SEQ ID NO: 228671 - RNA, 19 nt, Artificial Sequence
  Description of Artificial Sequence: Synthetic oligonucleotide
cucggacuuaagagcucuu

SEQ ID NO: 228672 - RNA, 19 nt, Artificial Sequence
  Description of Artificial Sequence: Synthetic oligonucleotide
gccgcauccuguucauuuu

SEQ ID NO: 228673 - RNA, 19 nt, Artificial Sequence
  Description of Artificial Sequence: Synthetic oligonucleotide
ggucuaggaggaggacucu

SEQ ID NO: 228674 - RNA, 19 nt, Artificial Sequence
  Description of Artificial Sequence: Synthetic oligonucleotide
uuccgccgguuuggcuuua

SEQ ID NO: 228675 - RNA, 19 nt, Artificial Sequence
  Description of Artificial Sequence: Synthetic oligonucleotide
cccgggacacgcagcgaga

SEQ ID NO: 228676 - RNA, 19 nt, Artificial Sequence
  Description of Artificial Sequence: Synthetic oligonucleotide
cccaagcuuguccuggauu

SEQ ID NO: 228677 - RNA, 19 nt, Artificial Sequence
  Description of Artificial Sequence: Synthetic oligonucleotide
ccccgguaguauacuguua

SEQ ID NO: 228678 - RNA, 19 nt, Artificial Sequence
  Description of Artificial Sequence: Synthetic oligonucleotide
gcgggagcagcaccaguuu

SEQ ID NO: 228679 - RNA, 19 nt, Artificial Sequence
  Description of Artificial Sequence: Synthetic oligonucleotide
gcucagaaugguggugcau

SEQ ID NO: 228680 - RNA, 19 nt, Artificial Sequence
  Description of Artificial Sequence: Synthetic oligonucleotide
ccggugcuuccagcucugc

SEQ ID NO: 228681 - RNA, 19 nt, Artificial Sequence
  Description of Artificial Sequence: Synthetic oligonucleotide
cgagaccccuugggguagc

SEQ ID NO: 228682 - RNA, 19 nt, Artificial Sequence
  Description of Artificial Sequence: Synthetic oligonucleotide
cgcacaccuuuagcagcuc

SEQ ID NO: 228683 - RNA, 19 nt, Artificial Sequence
  Description of Artificial Sequence: Synthetic oligonucleotide
ccgcaacacugaugucaau

SEQ ID NO: 228684 - RNA, 19 nt, Artificial Sequence
  Description of Artificial Sequence: Synthetic oligonucleotide
gggcagccguggguuuuau

SEQ ID NO: 228685 - RNA, 19 nt, Artificial Sequence
  Description of Artificial Sequence: Synthetic oligonucleotide
cgcugacaugaagccuagu

SEQ ID NO: 228686 - RNA, 19 nt, Artificial Sequence
  Description of Artificial Sequence: Synthetic oligonucleotide
uuaauuaacccgaagagaa

SEQ ID NO: 228687 - RNA, 19 nt, Artificial Sequence
  Description of Artificial Sequence: Synthetic oligonucleotide
aacauccuuaauuaacccg

SEQ ID NO: 228688 - RNA, 19 nt, Artificial Sequence
  Description of Artificial Sequence: Synthetic oligonucleotide
agaguagccacucuccgcc

SEQ ID NO: 228689 - RNA, 19 nt, Artificial Sequence
  Description of Artificial Sequence: Synthetic oligonucleotide
uccuuaauuaacccgaaga

SEQ ID NO: 228690 - RNA, 19 nt, Artificial Sequence
  Description of Artificial Sequence: Synthetic oligonucleotide
caugguaaagcaaccagcg

SEQ ID NO: 228691 - RNA, 19 nt, Artificial Sequence
  Description of Artificial Sequence: Synthetic oligonucleotide
ugguaaagcaaccagcgug

SEQ ID NO: 228692 - RNA, 19 nt, Artificial Sequence
  Description of Artificial Sequence: Synthetic oligonucleotide
aauaacccgaagugauggc

SEQ ID NO: 228693 - RNA, 19 nt, Artificial Sequence
  Description of Artificial Sequence: Synthetic oligonucleotide
guacaagcaaucuucauac

SEQ ID NO: 228694 - RNA, 19 nt, Artificial Sequence
  Description of Artificial Sequence: Synthetic oligonucleotide
auaugguaccgguuggugg

SEQ ID NO: 228695 - RNA, 19 nt, Artificial Sequence
  Description of Artificial Sequence: Synthetic oligonucleotide
uguccggucaggaacacca

SEQ ID NO: 228696 - RNA, 19 nt, Artificial Sequence
  Description of Artificial Sequence: Synthetic oligonucleotide
ugcugauaggcccaggcug

SEQ ID NO: 228697 - RNA, 19 nt, Artificial Sequence
  Description of Artificial Sequence: Synthetic oligonucleotide
gaagaguagccacucuccg

SEQ ID NO: 228698 - RNA, 19 nt, Artificial Sequence
  Description of Artificial Sequence: Synthetic oligonucleotide
cagugcauaaagcuguucc

SEQ ID NO: 228699 - RNA, 19 nt, Artificial Sequence
  Description of Artificial Sequence: Synthetic oligonucleotide
ucgagcaacauccuuaauu

SEQ ID NO: 228700 - RNA, 19 nt, Artificial Sequence
  Description of Artificial Sequence: Synthetic oligonucleotide
agaagaguagccacucucc

SEQ ID NO: 228701 - RNA, 19 nt, Artificial Sequence
  Description of Artificial Sequence: Synthetic oligonucleotide
uguagcggagaacgguucg

SEQ ID NO: 228702 - RNA, 19 nt, Artificial Sequence
  Description of Artificial Sequence: Synthetic oligonucleotide
aagugcaucaggucgugga

SEQ ID NO: 228703 - RNA, 19 nt, Artificial Sequence
  Description of Artificial Sequence: Synthetic oligonucleotide
cacgcuguagcuugcaagg

SEQ ID NO: 228704 - RNA, 19 nt, Artificial Sequence
  Description of Artificial Sequence: Synthetic oligonucleotide
auacccuucuuuguguagc

SEQ ID NO: 228705 - RNA, 19 nt, Artificial Sequence
  Description of Artificial Sequence: Synthetic oligonucleotide
caaggucggguucagagag

SEQ ID NO: 228706 - RNA, 19 nt, Artificial Sequence
  Description of Artificial Sequence: Synthetic oligonucleotide
aaucgagcaacauccuuaa

SEQ ID NO: 228707 - RNA, 19 nt, Artificial Sequence
  Description of Artificial Sequence: Synthetic oligonucleotide
aaaauaacccgaagugaug

SEQ ID NO: 228708 - RNA, 19 nt, Artificial Sequence
  Description of Artificial Sequence: Synthetic oligonucleotide
cucaugguaaagcaaccag

SEQ ID NO: 228709 - RNA, 19 nt, Artificial Sequence
  Description of Artificial Sequence: Synthetic oligonucleotide
uguguacacauugagcaga

SEQ ID NO: 228710 - RNA, 19 nt, Artificial Sequence
  Description of Artificial Sequence: Synthetic oligonucleotide
cuugcgcacacgaauguag

SEQ ID NO: 228711 - RNA, 19 nt, Artificial Sequence
  Description of Artificial Sequence: Synthetic oligonucleotide
caagccaacuuccacgcgc

SEQ ID NO: 228712 - RNA, 19 nt, Artificial Sequence
  Description of Artificial Sequence: Synthetic oligonucleotide
uaacccgaagagaaugucu

SEQ ID NO: 228713 - RNA, 19 nt, Artificial Sequence
  Description of Artificial Sequence: Synthetic oligonucleotide
ggaucugaacuguacaaag

SEQ ID NO: 228714 - RNA, 19 nt, Artificial Sequence
  Description of Artificial Sequence: Synthetic oligonucleotide
uguagccaaccucauuccc

SEQ ID NO: 228715 - RNA, 19 nt, Artificial Sequence
  Description of Artificial Sequence: Synthetic oligonucleotide
aacccgaagagaaugucug

SEQ ID NO: 228716 - RNA, 19 nt, Artificial Sequence
  Description of Artificial Sequence: Synthetic oligonucleotide
gaacgguucgcucugaugu

SEQ ID NO: 228717 - RNA, 19 nt, Artificial Sequence
  Description of Artificial Sequence: Synthetic oligonucleotide
ccuuaauuaacccgaagag

SEQ ID NO: 228718 - RNA, 19 nt, Artificial Sequence
  Description of Artificial Sequence: Synthetic oligonucleotide
gguaaagcaaccagcgugg

SEQ ID NO: 228719 - RNA, 19 nt, Artificial Sequence
  Description of Artificial Sequence: Synthetic oligonucleotide
uacuugagcucccugcgcu

SEQ ID NO: 228720 - RNA, 19 nt, Artificial Sequence
  Description of Artificial Sequence: Synthetic oligonucleotide
ugagcgacguuucugcgau

SEQ ID NO: 228721 - RNA, 19 nt, Artificial Sequence
  Description of Artificial Sequence: Synthetic oligonucleotide
cucgccuucgaugaugagg

SEQ ID NO: 228722 - RNA, 19 nt, Artificial Sequence
  Description of Artificial Sequence: Synthetic oligonucleotide
uaacccgaagugauggccu

SEQ ID NO: 228723 - RNA, 19 nt, Artificial Sequence
  Description of Artificial Sequence: Synthetic oligonucleotide
aucgaagaagguggaaaac

SEQ ID NO: 228724 - RNA, 19 nt, Artificial Sequence
  Description of Artificial Sequence: Synthetic oligonucleotide
cucgagcucgugcugauag

SEQ ID NO: 228725 - RNA, 19 nt, Artificial Sequence
  Description of Artificial Sequence: Synthetic oligonucleotide
uaauuaacccgaagagaau

SEQ ID NO: 228726 - RNA, 19 nt, Artificial Sequence
  Description of Artificial Sequence: Synthetic oligonucleotide
ucacaggcggccucaaucu

SEQ ID NO: 228727 - RNA, 19 nt, Artificial Sequence
  Description of Artificial Sequence: Synthetic oligonucleotide
uugagcucgggucggaauc

SEQ ID NO: 228728 - RNA, 19 nt, Artificial Sequence
  Description of Artificial Sequence: Synthetic oligonucleotide
cuccgagucagccucgcgg

SEQ ID NO: 228729 - RNA, 19 nt, Artificial Sequence
  Description of Artificial Sequence: Synthetic oligonucleotide
aacgguucgcucugaugug

SEQ ID NO: 228730 - RNA, 19 nt, Artificial Sequence
  Description of Artificial Sequence: Synthetic oligonucleotide
cacgaauguagucuccuug

SEQ ID NO: 228731 - RNA, 19 nt, Artificial Sequence
  Description of Artificial Sequence: Synthetic oligonucleotide
uugccagguacucgcggcg

SEQ ID NO: 228732 - RNA, 19 nt, Artificial Sequence
  Description of Artificial Sequence: Synthetic oligonucleotide
gcaacauccuuaauuaacc

SEQ ID NO: 228733 - RNA, 19 nt, Artificial Sequence
  Description of Artificial Sequence: Synthetic oligonucleotide
caaagcggaugcuguagcc

SEQ ID NO: 228734 - RNA, 19 nt, Artificial Sequence
  Description of Artificial Sequence: Synthetic oligonucleotide
uucuuaucugaucgcucca

SEQ ID NO: 228735 - RNA, 19 nt, Artificial Sequence
  Description of Artificial Sequence: Synthetic oligonucleotide
auccuuaauuaacccgaag

SEQ ID NO: 228736 - RNA, 19 nt, Artificial Sequence
  Description of Artificial Sequence: Synthetic oligonucleotide
uugggcauaugguaccggu

SEQ ID NO: 228737 - RNA, 19 nt, Artificial Sequence
  Description of Artificial Sequence: Synthetic oligonucleotide
ucgacgcuuguacuugagc

SEQ ID NO: 228738 - RNA, 19 nt, Artificial Sequence
  Description of Artificial Sequence: Synthetic oligonucleotide
ucguggaucccuaggcucu

SEQ ID NO: 228739 - RNA, 19 nt, Artificial Sequence
  Description of Artificial Sequence: Synthetic oligonucleotide
aucuuagacagcaugggau

SEQ ID NO: 228740 - RNA, 19 nt, Artificial Sequence
  Description of Artificial Sequence: Synthetic oligonucleotide
aacccagacggcggcaacg

SEQ ID NO: 228741 - RNA, 19 nt, Artificial Sequence
  Description of Artificial Sequence: Synthetic oligonucleotide
gcgucaucgaagaaggugg

SEQ ID NO: 228742 - RNA, 19 nt, Artificial Sequence
  Description of Artificial Sequence: Synthetic oligonucleotide
ccagggauucggaagacgg

SEQ ID NO: 228743 - RNA, 19 nt, Artificial Sequence
  Description of Artificial Sequence: Synthetic oligonucleotide
uuuucuuagcauggggauc

SEQ ID NO: 228744 - RNA, 19 nt, Artificial Sequence
  Description of Artificial Sequence: Synthetic oligonucleotide
cucacaggcggccucaauc

SEQ ID NO: 228745 - RNA, 19 nt, Artificial Sequence
  Description of Artificial Sequence: Synthetic oligonucleotide
gaaaccugcguccagggau

SEQ ID NO: 228746 - RNA, 19 nt, Artificial Sequence
  Description of Artificial Sequence: Synthetic oligonucleotide
ugagcucgggucggaaucg

SEQ ID NO: 228747 - RNA, 19 nt, Artificial Sequence
  Description of Artificial Sequence: Synthetic oligonucleotide
ucugaucgcuccaggacau

SEQ ID NO: 228748 - RNA, 19 nt, Artificial Sequence
  Description of Artificial Sequence: Synthetic oligonucleotide
agaacgguucgcucugaug

SEQ ID NO: 228749 - RNA, 19 nt, Artificial Sequence
  Description of Artificial Sequence: Synthetic oligonucleotide
uucgaccagacgugguaag

SEQ ID NO: 228750 - RNA, 19 nt, Artificial Sequence
  Description of Artificial Sequence: Synthetic oligonucleotide
ggaccuugagcucgggucg

SEQ ID NO: 228751 - RNA, 19 nt, Artificial Sequence
  Description of Artificial Sequence: Synthetic oligonucleotide
accuagccgggccuccucc

SEQ ID NO: 228752 - RNA, 19 nt, Artificial Sequence
  Description of Artificial Sequence: Synthetic oligonucleotide
uggaacugacgacggcucc

SEQ ID NO: 228753 - RNA, 19 nt, Artificial Sequence
  Description of Artificial Sequence: Synthetic oligonucleotide
gguacaagcaaucuucaua

SEQ ID NO: 228754 - RNA, 19 nt, Artificial Sequence
  Description of Artificial Sequence: Synthetic oligonucleotide
cauacccuucuuuguguag

SEQ ID NO: 228755 - RNA, 19 nt, Artificial Sequence
  Description of Artificial Sequence: Synthetic oligonucleotide
acgguucgcucugaugugc

SEQ ID NO: 228756 - RNA, 19 nt, Artificial Sequence
  Description of Artificial Sequence: Synthetic oligonucleotide
gaccagacgugguaaguuc

SEQ ID NO: 228757 - RNA, 19 nt, Artificial Sequence
  Description of Artificial Sequence: Synthetic oligonucleotide
ucccguagcagcaucccau

SEQ ID NO: 228758 - RNA, 19 nt, Artificial Sequence
  Description of Artificial Sequence: Synthetic oligonucleotide
ucgauggugagcgacguuu

SEQ ID NO: 228759 - RNA, 19 nt, Artificial Sequence
  Description of Artificial Sequence: Synthetic oligonucleotide
auuaacccgaagagaaugu

SEQ ID NO: 228760 - RNA, 19 nt, Artificial Sequence
  Description of Artificial Sequence: Synthetic oligonucleotide
cugugcgguagccacuccg

SEQ ID NO: 228761 - RNA, 19 nt, Artificial Sequence
  Description of Artificial Sequence: Synthetic oligonucleotide
augguaaagcaaccagcgu

SEQ ID NO: 228762 - RNA, 19 nt, Artificial Sequence
  Description of Artificial Sequence: Synthetic oligonucleotide
uuaacccgaagagaauguc

SEQ ID NO: 228763 - RNA, 19 nt, Artificial Sequence
  Description of Artificial Sequence: Synthetic oligonucleotide
ucuuucgaccagacguggu

SEQ ID NO: 228764 - RNA, 19 nt, Artificial Sequence
  Description of Artificial Sequence: Synthetic oligonucleotide
gacgaacucgauggucucg

SEQ ID NO: 228765 - RNA, 19 nt, Artificial Sequence
  Description of Artificial Sequence: Synthetic oligonucleotide
ucgagcucgugcugauagg

SEQ ID NO: 228766 - RNA, 19 nt, Artificial Sequence
  Description of Artificial Sequence: Synthetic oligonucleotide
uggccuugcgcacacgaau

SEQ ID NO: 228767 - RNA, 19 nt, Artificial Sequence
  Description of Artificial Sequence: Synthetic oligonucleotide
agcggcucggacgaacucg

SEQ ID NO: 228768 - RNA, 19 nt, Artificial Sequence
  Description of Artificial Sequence: Synthetic oligonucleotide
ugcgauguuuguugccaca

SEQ ID NO: 228769 - RNA, 19 nt, Artificial Sequence
  Description of Artificial Sequence: Synthetic oligonucleotide
agugcaucaggucguggau

SEQ ID NO: 228770 - RNA, 19 nt, Artificial Sequence
  Description of Artificial Sequence: Synthetic oligonucleotide
cauaugguaccgguuggug

SEQ ID NO: 228771 - RNA, 19 nt, Artificial Sequence
  Description of Artificial Sequence: Synthetic oligonucleotide
cuguagcuugcaaggucgg

SEQ ID NO: 228772 - RNA, 19 nt, Artificial Sequence
  Description of Artificial Sequence: Synthetic oligonucleotide
uuucgaccagacgugguaa

SEQ ID NO: 228773 - RNA, 19 nt, Artificial Sequence
  Description of Artificial Sequence: Synthetic oligonucleotide
cucgcggcgagacuucuug

SEQ ID NO: 228774 - RNA, 19 nt, Artificial Sequence
  Description of Artificial Sequence: Synthetic oligonucleotide
gaagagguacugcgggauc

SEQ ID NO: 228775 - RNA, 19 nt, Artificial Sequence
  Description of Artificial Sequence: Synthetic oligonucleotide
guagucggccucuggggcc

SEQ ID NO: 228776 - RNA, 19 nt, Artificial Sequence
  Description of Artificial Sequence: Synthetic oligonucleotide
agaggaguugggaugaaua

SEQ ID NO: 228777 - RNA, 19 nt, Artificial Sequence
  Description of Artificial Sequence: Synthetic oligonucleotide
gaaccguggucuccucgag

SEQ ID NO: 228778 - RNA, 19 nt, Artificial Sequence
  Description of Artificial Sequence: Synthetic oligonucleotide
guacuugagcucccugcgc

SEQ ID NO: 228779 - RNA, 19 nt, Artificial Sequence
  Description of Artificial Sequence: Synthetic oligonucleotide
uccuuggcaggacgucaag

SEQ ID NO: 228780 - RNA, 19 nt, Artificial Sequence
  Description of Artificial Sequence: Synthetic oligonucleotide
agcgacguuucugcgaugu

SEQ ID NO: 228781 - RNA, 19 nt, Artificial Sequence
  Description of Artificial Sequence: Synthetic oligonucleotide
uugucggcauggaccaccu

SEQ ID NO: 228782 - RNA, 19 nt, Artificial Sequence
  Description of Artificial Sequence: Synthetic oligonucleotide
cauccgucauguagcggag

SEQ ID NO: 228783 - RNA, 19 nt, Artificial Sequence
  Description of Artificial Sequence: Synthetic oligonucleotide
cucgcgcuuugccagguac

SEQ ID NO: 228784 - RNA, 19 nt, Artificial Sequence
  Description of Artificial Sequence: Synthetic oligonucleotide
aguccguuugucauccacu

SEQ ID NO: 228785 - RNA, 19 nt, Artificial Sequence
  Description of Artificial Sequence: Synthetic oligonucleotide
caguccguuugucauccac

SEQ ID NO: 228786 - RNA, 19 nt, Artificial Sequence
  Description of Artificial Sequence: Synthetic oligonucleotide
guacugcgggaucugugug

SEQ ID NO: 228787 - RNA, 19 nt, Artificial Sequence
  Description of Artificial Sequence: Synthetic oligonucleotide
cugacgacggcuccucguc

SEQ ID NO: 228788 - RNA, 19 nt, Artificial Sequence
  Description of Artificial Sequence: Synthetic oligonucleotide
ccuucgauggugagcgacg

SEQ ID NO: 228789 - RNA, 19 nt, Artificial Sequence
  Description of Artificial Sequence: Synthetic oligonucleotide
aacccgaagugauggccuu

SEQ ID NO: 228790 - RNA, 19 nt, Artificial Sequence
  Description of Artificial Sequence: Synthetic oligonucleotide
ggugagcgacguuucugcg

SEQ ID NO: 228791 - RNA, 19 nt, Artificial Sequence
  Description of Artificial Sequence: Synthetic oligonucleotide
ugacgacggcuccucgucu

SEQ ID NO: 228792 - RNA, 19 nt, Artificial Sequence
  Description of Artificial Sequence: Synthetic oligonucleotide
acccgaagagaaugucugu

SEQ ID NO: 228793 - RNA, 19 nt, Artificial Sequence
  Description of Artificial Sequence: Synthetic oligonucleotide
ggccaagaucaucuuagac

SEQ ID NO: 228794 - RNA, 19 nt, Artificial Sequence
  Description of Artificial Sequence: Synthetic oligonucleotide
cuugggcauaugguaccgg

SEQ ID NO: 228795 - RNA, 19 nt, Artificial Sequence
  Description of Artificial Sequence: Synthetic oligonucleotide
agcaucccauccgucaugu

SEQ ID NO: 228796 - RNA, 19 nt, Artificial Sequence
  Description of Artificial Sequence: Synthetic oligonucleotide
gcgguagccacuccgaguc

SEQ ID NO: 228797 - RNA, 19 nt, Artificial Sequence
  Description of Artificial Sequence: Synthetic oligonucleotide
uccuggggcgcccgauucc

SEQ ID NO: 228798 - RNA, 19 nt, Artificial Sequence
  Description of Artificial Sequence: Synthetic oligonucleotide
cucgacgcuuguacuugag

SEQ ID NO: 228799 - RNA, 19 nt, Artificial Sequence
  Description of Artificial Sequence: Synthetic oligonucleotide
ccauccgucauguagcgga

SEQ ID NO: 228800 - RNA, 19 nt, Artificial Sequence
  Description of Artificial Sequence: Synthetic oligonucleotide
ucgaccagacgugguaagu

SEQ ID NO: 228801 - RNA, 19 nt, Artificial Sequence
  Description of Artificial Sequence: Synthetic oligonucleotide
aaaccugcguccagggauu

SEQ ID NO: 228802 - RNA, 19 nt, Artificial Sequence
  Description of Artificial Sequence: Synthetic oligonucleotide
gugagcgacguuucugcga

SEQ ID NO: 228803 - RNA, 19 nt, Artificial Sequence
  Description of Artificial Sequence: Synthetic oligonucleotide
cacucgacgcuuguacuug

SEQ ID NO: 228804 - RNA, 19 nt, Artificial Sequence
  Description of Artificial Sequence: Synthetic oligonucleotide
gagcucgugcugauaggcc

SEQ ID NO: 228805 - RNA, 19 nt, Artificial Sequence
  Description of Artificial Sequence: Synthetic oligonucleotide
cuuucgaccagacguggua

SEQ ID NO: 228806 - RNA, 19 nt, Artificial Sequence
  Description of Artificial Sequence: Synthetic oligonucleotide
guagcggagaacgguucgc

SEQ ID NO: 228807 - RNA, 19 nt, Artificial Sequence
  Description of Artificial Sequence: Synthetic oligonucleotide
gacacgggcguugucggca

SEQ ID NO: 228808 - RNA, 19 nt, Artificial Sequence
  Description of Artificial Sequence: Synthetic oligonucleotide
ucggacgaacucgaugguc

SEQ ID NO: 228809 - RNA, 19 nt, Artificial Sequence
  Description of Artificial Sequence: Synthetic oligonucleotide
ggacgucaagccaacuucc

SEQ ID NO: 228810 - RNA, 19 nt, Artificial Sequence
  Description of Artificial Sequence: Synthetic oligonucleotide
uagcggagaacgguucgcu

SEQ ID NO: 228811 - RNA, 19 nt, Artificial Sequence
  Description of Artificial Sequence: Synthetic oligonucleotide
acucgacgcuuguacuuga

SEQ ID NO: 228812 - RNA, 19 nt, Artificial Sequence
  Description of Artificial Sequence: Synthetic oligonucleotide
cguagcagcaucccauccg

SEQ ID NO: 228813 - RNA, 19 nt, Artificial Sequence
  Description of Artificial Sequence: Synthetic oligonucleotide
gacgucaagccaacuucca

SEQ ID NO: 228814 - RNA, 19 nt, Artificial Sequence
  Description of Artificial Sequence: Synthetic oligonucleotide
ggaaccguggucuccucga

SEQ ID NO: 228815 - RNA, 19 nt, Artificial Sequence
  Description of Artificial Sequence: Synthetic oligonucleotide
gugcgguagccacuccgag

SEQ ID NO: 228816 - RNA, 19 nt, Artificial Sequence
  Description of Artificial Sequence: Synthetic oligonucleotide
ucgggucggaaucgagcaa

SEQ ID NO: 228817 - RNA, 19 nt, Artificial Sequence
  Description of Artificial Sequence: Synthetic oligonucleotide
gggaacacgggcaggcugc

SEQ ID NO: 228818 - RNA, 19 nt, Artificial Sequence
  Description of Artificial Sequence: Synthetic oligonucleotide
caucucccgggccacucug

SEQ ID NO: 228819 - RNA, 19 nt, Artificial Sequence
  Description of Artificial Sequence: Synthetic oligonucleotide
ggcggcaacgguccuggag

SEQ ID NO: 228820 - RNA, 19 nt, Artificial Sequence
  Description of Artificial Sequence: Synthetic oligonucleotide
gccggucucgccuucgaug

SEQ ID NO: 228821 - RNA, 19 nt, Artificial Sequence
  Description of Artificial Sequence: Synthetic oligonucleotide
gguacugcgggaucugugu

SEQ ID NO: 228822 - RNA, 19 nt, Artificial Sequence
  Description of Artificial Sequence: Synthetic oligonucleotide
agcggaugcuguagccaac

SEQ ID NO: 228823 - RNA, 19 nt, Artificial Sequence
  Description of Artificial Sequence: Synthetic oligonucleotide
ggggaccauggcuuuccgg

SEQ ID NO: 228824 - RNA, 19 nt, Artificial Sequence
  Description of Artificial Sequence: Synthetic oligonucleotide
gcguugucggcauggacca

SEQ ID NO: 228825 - RNA, 19 nt, Artificial Sequence
  Description of Artificial Sequence: Synthetic oligonucleotide
uccgcccacuguguguaca

SEQ ID NO: 228826 - RNA, 19 nt, Artificial Sequence
  Description of Artificial Sequence: Synthetic oligonucleotide
cauguagcggagaacgguu

SEQ ID NO: 228827 - RNA, 19 nt, Artificial Sequence
  Description of Artificial Sequence: Synthetic oligonucleotide
gaacacgggcaggcugcgg

SEQ ID NO: 228828 - RNA, 19 nt, Artificial Sequence
  Description of Artificial Sequence: Synthetic oligonucleotide
ucgccggccgcccgguacu

SEQ ID NO: 228829 - RNA, 19 nt, Artificial Sequence
  Description of Artificial Sequence: Synthetic oligonucleotide
ucucgggaaccguggucuc

SEQ ID NO: 228830 - RNA, 19 nt, Artificial Sequence
  Description of Artificial Sequence: Synthetic oligonucleotide
gugugacggugagagacuc

SEQ ID NO: 228831 - RNA, 19 nt, Artificial Sequence
  Description of Artificial Sequence: Synthetic oligonucleotide
ccagacggcggcaacgguc

SEQ ID NO: 228832 - RNA, 19 nt, Artificial Sequence
  Description of Artificial Sequence: Synthetic oligonucleotide
gcggaagcacuuccccgcg

SEQ ID NO: 228833 - RNA, 19 nt, Artificial Sequence
  Description of Artificial Sequence: Synthetic oligonucleotide
ggucucgccuucgaugaug

SEQ ID NO: 228834 - RNA, 19 nt, Artificial Sequence
  Description of Artificial Sequence: Synthetic oligonucleotide
cacuuccccgcggcgaccc

SEQ ID NO: 228835 - RNA, 19 nt, Artificial Sequence
  Description of Artificial Sequence: Synthetic oligonucleotide
ucggcgcauggaucugaac

SEQ ID NO: 228836 - RNA, 19 nt, Artificial Sequence
  Description of Artificial Sequence: Synthetic oligonucleotide
gggucucguaggguggagg

SEQ ID NO: 228837 - RNA, 19 nt, Artificial Sequence
  Description of Artificial Sequence: Synthetic oligonucleotide
aucgagcaacauccuuaau

SEQ ID NO: 228838 - RNA, 19 nt, Artificial Sequence
  Description of Artificial Sequence: Synthetic oligonucleotide
cccggauuuuggaacccag

SEQ ID NO: 228839 - RNA, 19 nt, Artificial Sequence
  Description of Artificial Sequence: Synthetic oligonucleotide
gcucaugguaaagcaacca

SEQ ID NO: 228840 - RNA, 19 nt, Artificial Sequence
  Description of Artificial Sequence: Synthetic oligonucleotide
aggucccgcacucgacgcu

SEQ ID NO: 228841 - RNA, 19 nt, Artificial Sequence
  Description of Artificial Sequence: Synthetic oligonucleotide
ucgugcugauaggcccagg

SEQ ID NO: 228842 - RNA, 19 nt, Artificial Sequence
  Description of Artificial Sequence: Synthetic oligonucleotide
agguacucgcggcgagacu

SEQ ID NO: 228843 - RNA, 19 nt, Artificial Sequence
  Description of Artificial Sequence: Synthetic oligonucleotide
cacaggcggccucaaucuc

SEQ ID NO: 228844 - RNA, 19 nt, Artificial Sequence
  Description of Artificial Sequence: Synthetic oligonucleotide
cucgccggccgcccgguac

SEQ ID NO: 228845 - RNA, 19 nt, Artificial Sequence
  Description of Artificial Sequence: Synthetic oligonucleotide
acgcuguagcuugcaaggu

SEQ ID NO: 228846 - RNA, 19 nt, Artificial Sequence
  Description of Artificial Sequence: Synthetic oligonucleotide
cuguccggucaggaacacc

SEQ ID NO: 228847 - RNA, 19 nt, Artificial Sequence
  Description of Artificial Sequence: Synthetic oligonucleotide
uacucgcggcgagacuucu

SEQ ID NO: 228848 - RNA, 19 nt, Artificial Sequence
  Description of Artificial Sequence: Synthetic oligonucleotide
gagcggcucggacgaacuc

SEQ ID NO: 228849 - RNA, 19 nt, Artificial Sequence
  Description of Artificial Sequence: Synthetic oligonucleotide
agcguggcuguuguucaaa

SEQ ID NO: 228850 - RNA, 19 nt, Artificial Sequence
  Description of Artificial Sequence: Synthetic oligonucleotide
cacgacguccacagcucga

SEQ ID NO: 228851 - RNA, 19 nt, Artificial Sequence
  Description of Artificial Sequence: Synthetic oligonucleotide
ccacgacguccacagcucg

SEQ ID NO: 228852 - RNA, 19 nt, Artificial Sequence
  Description of Artificial Sequence: Synthetic oligonucleotide
ggacgaacucgauggucuc

SEQ ID NO: 228853 - RNA, 19 nt, Artificial Sequence
  Description of Artificial Sequence: Synthetic oligonucleotide
cgagcucgugcugauaggc

SEQ ID NO: 228854 - RNA, 19 nt, Artificial Sequence
  Description of Artificial Sequence: Synthetic oligonucleotide
ggguccguucaugagcuuc

SEQ ID NO: 228855 - RNA, 19 nt, Artificial Sequence
  Description of Artificial Sequence: Synthetic oligonucleotide
agcucgggucggaaucgag

SEQ ID NO: 228856 - RNA, 19 nt, Artificial Sequence
  Description of Artificial Sequence: Synthetic oligonucleotide
ccggucucgccuucgauga

SEQ ID NO: 228857 - RNA, 19 nt, Artificial Sequence
  Description of Artificial Sequence: Synthetic oligonucleotide
gagcgacguuucugcgaug

SEQ ID NO: 228858 - RNA, 19 nt, Artificial Sequence
  Description of Artificial Sequence: Synthetic oligonucleotide
agccucgcggugugguaaa

SEQ ID NO: 228859 - RNA, 19 nt, Artificial Sequence
  Description of Artificial Sequence: Synthetic oligonucleotide
gcggagaacgguucgcucu

SEQ ID NO: 228860 - RNA, 19 nt, Artificial Sequence
  Description of Artificial Sequence: Synthetic oligonucleotide
aaccagcguggcuguuguu

SEQ ID NO: 228861 - RNA, 19 nt, Artificial Sequence
  Description of Artificial Sequence: Synthetic oligonucleotide
ccguagcagcaucccaucc

SEQ ID NO: 228862 - RNA, 19 nt, Artificial Sequence
  Description of Artificial Sequence: Synthetic oligonucleotide
gagaacgguucgcucugau

SEQ ID NO: 228863 - RNA, 19 nt, Artificial Sequence
  Description of Artificial Sequence: Synthetic oligonucleotide
cuggggccuugguauagaa

SEQ ID NO: 228864 - RNA, 19 nt, Artificial Sequence
  Description of Artificial Sequence: Synthetic oligonucleotide
cuugagcucgggucggaau

SEQ ID NO: 228865 - RNA, 19 nt, Artificial Sequence
  Description of Artificial Sequence: Synthetic oligonucleotide
agccggucucgccuucgau

SEQ ID NO: 228866 - RNA, 19 nt, Artificial Sequence
  Description of Artificial Sequence: Synthetic oligonucleotide
ccagcguggcuguuguuca

SEQ ID NO: 228867 - RNA, 19 nt, Artificial Sequence
  Description of Artificial Sequence: Synthetic oligonucleotide
gcggcgagacuucuugcga

SEQ ID NO: 228868 - RNA, 19 nt, Artificial Sequence
  Description of Artificial Sequence: Synthetic oligonucleotide
gcgcuuugccagguacucg

SEQ ID NO: 228869 - RNA, 19 nt, Artificial Sequence
  Description of Artificial Sequence: Synthetic oligonucleotide
caacuuccacgcgcuccag

SEQ ID NO: 228870 - RNA, 19 nt, Artificial Sequence
  Description of Artificial Sequence: Synthetic oligonucleotide
ugcggggauuguagcucuu

SEQ ID NO: 228871 - RNA, 19 nt, Artificial Sequence
  Description of Artificial Sequence: Synthetic oligonucleotide
gguacucgcggcgagacuu

SEQ ID NO: 228872 - RNA, 19 nt, Artificial Sequence
  Description of Artificial Sequence: Synthetic oligonucleotide
cccgugcggggauuguagc

SEQ ID NO: 228873 - RNA, 19 nt, Artificial Sequence
  Description of Artificial Sequence: Synthetic oligonucleotide
gugcggggauuguagcucu

SEQ ID NO: 228874 - RNA, 19 nt, Artificial Sequence
  Description of Artificial Sequence: Synthetic oligonucleotide
ggucguggaucccuaggcu

SEQ ID NO: 228875 - RNA, 19 nt, Artificial Sequence
  Description of Artificial Sequence: Synthetic oligonucleotide
gacccggccugcacggcca

SEQ ID NO: 228876 - RNA, 19 nt, Artificial Sequence
  Description of Artificial Sequence: Synthetic oligonucleotide
ccuagccgggccuccuccc

SEQ ID NO: 228877 - RNA, 19 nt, Artificial Sequence
  Description of Artificial Sequence: Synthetic oligonucleotide
guacucgcggcgagacuuc

SEQ ID NO: 228878 - RNA, 19 nt, Artificial Sequence
  Description of Artificial Sequence: Synthetic oligonucleotide
gcccgugcggggauuguag

SEQ ID NO: 228879 - RNA, 19 nt, Artificial Sequence
  Description of Artificial Sequence: Synthetic oligonucleotide
ggagccggucucgccuucg

SEQ ID NO: 228880 - RNA, 19 nt, Artificial Sequence
  Description of Artificial Sequence: Synthetic oligonucleotide
cgacgcuuguacuugagcu

SEQ ID NO: 228881 - RNA, 19 nt, Artificial Sequence
  Description of Artificial Sequence: Synthetic oligonucleotide
cucggcgcauggaucugaa

SEQ ID NO: 228882 - RNA, 19 nt, Artificial Sequence
  Description of Artificial Sequence: Synthetic oligonucleotide
ccccgaacuugagggaugc

SEQ ID NO: 228883 - RNA, 19 nt, Artificial Sequence
  Description of Artificial Sequence: Synthetic oligonucleotide
cuucgauggugagcgacgu

SEQ ID NO: 228884 - RNA, 19 nt, Artificial Sequence
  Description of Artificial Sequence: Synthetic oligonucleotide
ugcccgugcggggauugua

SEQ ID NO: 228885 - RNA, 19 nt, Artificial Sequence
  Description of Artificial Sequence: Synthetic oligonucleotide
uucuuagcauggggaucuu

SEQ ID NO: 228886 - RNA, 19 nt, Artificial Sequence
  Description of Artificial Sequence: Synthetic oligonucleotide
gagcucgggucggaaucga

SEQ ID NO: 228887 - RNA, 19 nt, Artificial Sequence
  Description of Artificial Sequence: Synthetic oligonucleotide
caccuagccgggccuccuc

SEQ ID NO: 228888 - RNA, 19 nt, Artificial Sequence
  Description of Artificial Sequence: Synthetic oligonucleotide
cucggggaccauggcuuuc

SEQ ID NO: 228889 - RNA, 19 nt, Artificial Sequence
  Description of Artificial Sequence: Synthetic oligonucleotide
gggcucggcgcauggaucu

SEQ ID NO: 228890 - RNA, 19 nt, Artificial Sequence
  Description of Artificial Sequence: Synthetic oligonucleotide
ggaacugacgacggcuccu

SEQ ID NO: 228891 - RNA, 19 nt, Artificial Sequence
  Description of Artificial Sequence: Synthetic oligonucleotide
ggugugacggugagagacu

SEQ ID NO: 228892 - RNA, 19 nt, Artificial Sequence
  Description of Artificial Sequence: Synthetic oligonucleotide
cggacgaacucgauggucu

SEQ ID NO: 228893 - RNA, 19 nt, Artificial Sequence
  Description of Artificial Sequence: Synthetic oligonucleotide
cggcgcauggaucugaacu

SEQ ID NO: 228894 - RNA, 19 nt, Artificial Sequence
  Description of Artificial Sequence: Synthetic oligonucleotide
gggucggaaucgagcaaca

SEQ ID NO: 228895 - RNA, 19 nt, Artificial Sequence
  Description of Artificial Sequence: Synthetic oligonucleotide
gguccagcacguaaaugau

SEQ ID NO: 228896 - RNA, 19 nt, Artificial Sequence
  Description of Artificial Sequence: Synthetic oligonucleotide
cagcaccuagccgggccuc

SEQ ID NO: 228897 - RNA, 19 nt, Artificial Sequence
  Description of Artificial Sequence: Synthetic oligonucleotide
cucgugucuugccuacuuu

SEQ ID NO: 228898 - RNA, 19 nt, Artificial Sequence
  Description of Artificial Sequence: Synthetic oligonucleotide
cucggacgaacucgauggu

SEQ ID NO: 228899 - RNA, 19 nt, Artificial Sequence
  Description of Artificial Sequence: Synthetic oligonucleotide
cagcguggcuguuguucaa

SEQ ID NO: 228900 - RNA, 19 nt, Artificial Sequence
  Description of Artificial Sequence: Synthetic oligonucleotide
cacgggcguugucggcaug

SEQ ID NO: 228901 - RNA, 19 nt, Artificial Sequence
  Description of Artificial Sequence: Synthetic oligonucleotide
gccccgaacuugagggaug

SEQ ID NO: 228902 - RNA, 19 nt, Artificial Sequence
  Description of Artificial Sequence: Synthetic oligonucleotide
ccucucggaaggggaacac

SEQ ID NO: 228903 - RNA, 19 nt, Artificial Sequence
  Description of Artificial Sequence: Synthetic oligonucleotide
gcggcucggacgaacucga

SEQ ID NO: 228904 - RNA, 19 nt, Artificial Sequence
  Description of Artificial Sequence: Synthetic oligonucleotide
gccuugcgcacacgaaugu

SEQ ID NO: 228905 - RNA, 19 nt, Artificial Sequence
  Description of Artificial Sequence: Synthetic oligonucleotide
gccgcccgguacucccggg

SEQ ID NO: 228906 - RNA, 19 nt, Artificial Sequence
  Description of Artificial Sequence: Synthetic oligonucleotide
gcucggcgcauggaucuga

SEQ ID NO: 228907 - RNA, 19 nt, Artificial Sequence
  Description of Artificial Sequence: Synthetic oligonucleotide
ggcucggcgcauggaucug

SEQ ID NO: 228908 - RNA, 19 nt, Artificial Sequence
  Description of Artificial Sequence: Synthetic oligonucleotide
ccuguccggucaggaacac

SEQ ID NO: 228909 - RNA, 19 nt, Artificial Sequence
  Description of Artificial Sequence: Synthetic oligonucleotide
cggcgagacuucuugcgaa

SEQ ID NO: 228910 - RNA, 19 nt, Artificial Sequence
  Description of Artificial Sequence: Synthetic oligonucleotide
cgguucgcucugaugugca

SEQ ID NO: 228911 - RNA, 19 nt, Artificial Sequence
  Description of Artificial Sequence: Synthetic oligonucleotide
ccuugcgcacacgaaugua

SEQ ID NO: 228912 - RNA, 19 nt, Artificial Sequence
  Description of Artificial Sequence: Synthetic oligonucleotide
ggucggaaucgagcaacau

SEQ ID NO: 228913 - RNA, 19 nt, Artificial Sequence
  Description of Artificial Sequence: Synthetic oligonucleotide
ccgugcggggauuguagcu

SEQ ID NO: 228914 - RNA, 19 nt, Artificial Sequence
  Description of Artificial Sequence: Synthetic oligonucleotide
agcccuccucgaagaggua

SEQ ID NO: 228915 - RNA, 19 nt, Artificial Sequence
  Description of Artificial Sequence: Synthetic oligonucleotide
gcugauuggcagaggccuu

SEQ ID NO: 228916 - RNA, 19 nt, Artificial Sequence
  Description of Artificial Sequence: Synthetic oligonucleotide
acccuggguccagcacgua

SEQ ID NO: 228917 - RNA, 19 nt, Artificial Sequence
  Description of Artificial Sequence: Synthetic oligonucleotide
cgacguuucugcgauguuu

SEQ ID NO: 228918 - RNA, 19 nt, Artificial Sequence
  Description of Artificial Sequence: Synthetic oligonucleotide
gcucgcgcuuugccaggua

SEQ ID NO: 228919 - RNA, 19 nt, Artificial Sequence
  Description of Artificial Sequence: Synthetic oligonucleotide
cugaucgcuccaggacauu

SEQ ID NO: 228920 - RNA, 19 nt, Artificial Sequence
  Description of Artificial Sequence: Synthetic oligonucleotide
gcgacguuucugcgauguu

SEQ ID NO: 228921 - RNA, 19 nt, Artificial Sequence
  Description of Artificial Sequence: Synthetic oligonucleotide
cccgaacuugagggaugca

SEQ ID NO: 228922 - RNA, 19 nt, Artificial Sequence
  Description of Artificial Sequence: Synthetic oligonucleotide
gccucgcggugugguaaaa

SEQ ID NO: 228923 - RNA, 19 nt, Artificial Sequence
  Description of Artificial Sequence: Synthetic oligonucleotide
cgaccagacgugguaaguu

SEQ ID NO: 228924 - RNA, 19 nt, Artificial Sequence
  Description of Artificial Sequence: Synthetic oligonucleotide
ccucgagcucgugcugaua

SEQ ID NO: 228925 - RNA, 19 nt, Artificial Sequence
  Description of Artificial Sequence: Synthetic oligonucleotide
ccggagccggucucgccuu

SEQ ID NO: 228926 - RNA, 19 nt, Artificial Sequence
  Description of Artificial Sequence: Synthetic oligonucleotide
cggucucgccuucgaugau

SEQ ID NO: 228927 - RNA, 19 nt, Artificial Sequence
  Description of Artificial Sequence: Synthetic oligonucleotide
acuaauuuguuauagcacc

SEQ ID NO: 228928 - RNA, 19 nt, Artificial Sequence
  Description of Artificial Sequence: Synthetic oligonucleotide
aggaauuuugauuuagucc

SEQ ID NO: 228929 - RNA, 19 nt, Artificial Sequence
  Description of Artificial Sequence: Synthetic oligonucleotide
uguuauagcaccaaacugc

SEQ ID NO: 228930 - RNA, 19 nt, Artificial Sequence
  Description of Artificial Sequence: Synthetic oligonucleotide
aaaugugaggauguaaugc

SEQ ID NO: 228931 - RNA, 19 nt, Artificial Sequence
  Description of Artificial Sequence: Synthetic oligonucleotide
aauucagugauucuguggu

SEQ ID NO: 228932 - RNA, 19 nt, Artificial Sequence
  Description of Artificial Sequence: Synthetic oligonucleotide
auuauaggcaacuucuugg

SEQ ID NO: 228933 - RNA, 19 nt, Artificial Sequence
  Description of Artificial Sequence: Synthetic oligonucleotide
ugaaauggguggaugaugg

SEQ ID NO: 228934 - RNA, 19 nt, Artificial Sequence
  Description of Artificial Sequence: Synthetic oligonucleotide
ucuauuaagcgcuuugggg

SEQ ID NO: 228935 - RNA, 19 nt, Artificial Sequence
  Description of Artificial Sequence: Synthetic oligonucleotide
uuaguuauauaaacaauga

SEQ ID NO: 228936 - RNA, 19 nt, Artificial Sequence
  Description of Artificial Sequence: Synthetic oligonucleotide
uguuaaaacacucagcgua

SEQ ID NO: 228937 - RNA, 19 nt, Artificial Sequence
  Description of Artificial Sequence: Synthetic oligonucleotide
aagauuauaggugaaacca

SEQ ID NO: 228938 - RNA, 19 nt, Artificial Sequence
  Description of Artificial Sequence: Synthetic oligonucleotide
cuuuguaagauccauuccg

SEQ ID NO: 228939 - RNA, 19 nt, Artificial Sequence
  Description of Artificial Sequence: Synthetic oligonucleotide
uugauuauaggcaacuucu

SEQ ID NO: 228940 - RNA, 19 nt, Artificial Sequence
  Description of Artificial Sequence: Synthetic oligonucleotide
uuagauacaaucuaauaau

SEQ ID NO: 228941 - RNA, 19 nt, Artificial Sequence
  Description of Artificial Sequence: Synthetic oligonucleotide
uccaguaucccugagauag

SEQ ID NO: 228942 - RNA, 19 nt, Artificial Sequence
  Description of Artificial Sequence: Synthetic oligonucleotide
uaacuaauuuguuauagca

SEQ ID NO: 228943 - RNA, 19 nt, Artificial Sequence
  Description of Artificial Sequence: Synthetic oligonucleotide
cucucaagaauaaacgucg

SEQ ID NO: 228944 - RNA, 19 nt, Artificial Sequence
  Description of Artificial Sequence: Synthetic oligonucleotide
aaacccacggaaccggucc

SEQ ID NO: 228945 - RNA, 19 nt, Artificial Sequence
  Description of Artificial Sequence: Synthetic oligonucleotide
uguguauauuauaugaacu

SEQ ID NO: 228946 - RNA, 19 nt, Artificial Sequence
  Description of Artificial Sequence: Synthetic oligonucleotide
aacuaccuuuguaagaucc

SEQ ID NO: 228947 - RNA, 19 nt, Artificial Sequence
  Description of Artificial Sequence: Synthetic oligonucleotide
uguaaaugaagcaugggau

SEQ ID NO: 228948 - RNA, 19 nt, Artificial Sequence
  Description of Artificial Sequence: Synthetic oligonucleotide
ugagcauugaauuguaucu

SEQ ID NO: 228949 - RNA, 19 nt, Artificial Sequence
  Description of Artificial Sequence: Synthetic oligonucleotide
aguuuaguuauauaaacaa

SEQ ID NO: 228950 - RNA, 19 nt, Artificial Sequence
  Description of Artificial Sequence: Synthetic oligonucleotide
guaagauccauuccgagcc

SEQ ID NO: 228951 - RNA, 19 nt, Artificial Sequence
  Description of Artificial Sequence: Synthetic oligonucleotide
uguauauuauaugaacuag

SEQ ID NO: 228952 - RNA, 19 nt, Artificial Sequence
  Description of Artificial Sequence: Synthetic oligonucleotide
ugacuuacacaacugagca

SEQ ID NO: 228953 - RNA, 19 nt, Artificial Sequence
  Description of Artificial Sequence: Synthetic oligonucleotide
ugugauaagaggugcauga

SEQ ID NO: 228954 - RNA, 19 nt, Artificial Sequence
  Description of Artificial Sequence: Synthetic oligonucleotide
auaauuauacuaauccagg

SEQ ID NO: 228955 - RNA, 19 nt, Artificial Sequence
  Description of Artificial Sequence: Synthetic oligonucleotide
ucgauuguugcuuaguuac

SEQ ID NO: 228956 - RNA, 19 nt, Artificial Sequence
  Description of Artificial Sequence: Synthetic oligonucleotide
uaaaaggcugaaaugggug

SEQ ID NO: 228957 - RNA, 19 nt, Artificial Sequence
  Description of Artificial Sequence: Synthetic oligonucleotide
auuauacuaauccagguuu

SEQ ID NO: 228958 - RNA, 19 nt, Artificial Sequence
  Description of Artificial Sequence: Synthetic oligonucleotide
agaauuguaacugccacag

SEQ ID NO: 228959 - RNA, 19 nt, Artificial Sequence
  Description of Artificial Sequence: Synthetic oligonucleotide
aaaccaugaaauuuccuaa

SEQ ID NO: 228960 - RNA, 19 nt, Artificial Sequence
  Description of Artificial Sequence: Synthetic oligonucleotide
uguauuuccgccucaguca

SEQ ID NO: 228961 - RNA, 19 nt, Artificial Sequence
  Description of Artificial Sequence: Synthetic oligonucleotide
uguaagauccauuccgagc

SEQ ID NO: 228962 - RNA, 19 nt, Artificial Sequence
  Description of Artificial Sequence: Synthetic oligonucleotide
guauauuauaugaacuagg

SEQ ID NO: 228963 - RNA, 19 nt, Artificial Sequence
  Description of Artificial Sequence: Synthetic oligonucleotide
auuguugcuuaguuacgcc

SEQ ID NO: 228964 - RNA, 19 nt, Artificial Sequence
  Description of Artificial Sequence: Synthetic oligonucleotide
uuaguuacgccuacugccc

SEQ ID NO: 228965 - RNA, 19 nt, Artificial Sequence
  Description of Artificial Sequence: Synthetic oligonucleotide
ugacuguaaaugaagcaug

SEQ ID NO: 228966 - RNA, 19 nt, Artificial Sequence
  Description of Artificial Sequence: Synthetic oligonucleotide
ugcucuaauuuucuaaaac

SEQ ID NO: 228967 - RNA, 19 nt, Artificial Sequence
  Description of Artificial Sequence: Synthetic oligonucleotide
ucaagaauaaacgucggaa

SEQ ID NO: 228968 - RNA, 19 nt, Artificial Sequence
  Description of Artificial Sequence: Synthetic oligonucleotide
ucucucaagaauaaacguc

SEQ ID NO: 228969 - RNA, 19 nt, Artificial Sequence
  Description of Artificial Sequence: Synthetic oligonucleotide
acuguaacccguuuuggag

SEQ ID NO: 228970 - RNA, 19 nt, Artificial Sequence
  Description of Artificial Sequence: Synthetic oligonucleotide
uauaugaacuaggagaaaa

SEQ ID NO: 228971 - RNA, 19 nt, Artificial Sequence
  Description of Artificial Sequence: Synthetic oligonucleotide
aucuauuaagcgcuuuggg

SEQ ID NO: 228972 - RNA, 19 nt, Artificial Sequence
  Description of Artificial Sequence: Synthetic oligonucleotide
gauggaauucaucagcauc

SEQ ID NO: 228973 - RNA, 19 nt, Artificial Sequence
  Description of Artificial Sequence: Synthetic oligonucleotide
uguaccccaauagacaucc

SEQ ID NO: 228974 - RNA, 19 nt, Artificial Sequence
  Description of Artificial Sequence: Synthetic oligonucleotide
uguugcauauuuugcauac

SEQ ID NO: 228975 - RNA, 19 nt, Artificial Sequence
  Description of Artificial Sequence: Synthetic oligonucleotide
gaagacgauauuugcacug

SEQ ID NO: 228976 - RNA, 19 nt, Artificial Sequence
  Description of Artificial Sequence: Synthetic oligonucleotide
aagaacuaccuuuguaaga

SEQ ID NO: 228977 - RNA, 19 nt, Artificial Sequence
  Description of Artificial Sequence: Synthetic oligonucleotide
cugacuuacacaacugagc

SEQ ID NO: 228978 - RNA, 19 nt, Artificial Sequence
  Description of Artificial Sequence: Synthetic oligonucleotide
uaacuugugauaagaggug

SEQ ID NO: 228979 - RNA, 19 nt, Artificial Sequence
  Description of Artificial Sequence: Synthetic oligonucleotide
uguuguguaccccaauaga

SEQ ID NO: 228980 - RNA, 19 nt, Artificial Sequence
  Description of Artificial Sequence: Synthetic oligonucleotide
uacuaauccagguuuagau

SEQ ID NO: 228981 - RNA, 19 nt, Artificial Sequence
  Description of Artificial Sequence: Synthetic oligonucleotide
aauaauaguucaauucuaa

SEQ ID NO: 228982 - RNA, 19 nt, Artificial Sequence
  Description of Artificial Sequence: Synthetic oligonucleotide
uaguuauauaaacaaugaa

SEQ ID NO: 228983 - RNA, 19 nt, Artificial Sequence
  Description of Artificial Sequence: Synthetic oligonucleotide
guaacuaauuuguuauagc

SEQ ID NO: 228984 - RNA, 19 nt, Artificial Sequence
  Description of Artificial Sequence: Synthetic oligonucleotide
gucgcuaaugcucacaaac

SEQ ID NO: 228985 - RNA, 19 nt, Artificial Sequence
  Description of Artificial Sequence: Synthetic oligonucleotide
agugaauauugcauucucc

SEQ ID NO: 228986 - RNA, 19 nt, Artificial Sequence
  Description of Artificial Sequence: Synthetic oligonucleotide
ugcacuguaacccguuuug

SEQ ID NO: 228987 - RNA, 19 nt, Artificial Sequence
  Description of Artificial Sequence: Synthetic oligonucleotide
cuauuaagcgcuuugggga

SEQ ID NO: 228988 - RNA, 19 nt, Artificial Sequence
  Description of Artificial Sequence: Synthetic oligonucleotide
ucucaagaauaaacgucgg

SEQ ID NO: 228989 - RNA, 19 nt, Artificial Sequence
  Description of Artificial Sequence: Synthetic oligonucleotide
guguguauauuauaugaac

SEQ ID NO: 228990 - RNA, 19 nt, Artificial Sequence
  Description of Artificial Sequence: Synthetic oligonucleotide
cuugauuauaggcaacuuc

SEQ ID NO: 228991 - RNA, 19 nt, Artificial Sequence
  Description of Artificial Sequence: Synthetic oligonucleotide
gaaccauucgaucccuggg

SEQ ID NO: 228992 - RNA, 19 nt, Artificial Sequence
  Description of Artificial Sequence: Synthetic oligonucleotide
ugugccuacauguaacuaa

SEQ ID NO: 228993 - RNA, 19 nt, Artificial Sequence
  Description of Artificial Sequence: Synthetic oligonucleotide
  modified_base (8)..(8): a, c, u, g, unknown or other
ucugaggnggagaacccag

SEQ ID NO: 228994 - RNA, 19 nt, Artificial Sequence
  Description of Artificial Sequence: Synthetic oligonucleotide
uuauaggcaacuucuuggu

SEQ ID NO: 228995 - RNA, 19 nt, Artificial Sequence
  Description of Artificial Sequence: Synthetic oligonucleotide
auaggcaacuucuugguau

SEQ ID NO: 228996 - RNA, 19 nt, Artificial Sequence
  Description of Artificial Sequence: Synthetic oligonucleotide
cuaacuugugauaagaggu

SEQ ID NO: 228997 - RNA, 19 nt, Artificial Sequence
  Description of Artificial Sequence: Synthetic oligonucleotide
auugauucuaccaugcuau

SEQ ID NO: 228998 - RNA, 19 nt, Artificial Sequence
  Description of Artificial Sequence: Synthetic oligonucleotide
aaacgucggaagaacuacc

SEQ ID NO: 228999 - RNA, 19 nt, Artificial Sequence
  Description of Artificial Sequence: Synthetic oligonucleotide
gauuguugcuuaguuacgc

SEQ ID NO: 229000 - RNA, 19 nt, Artificial Sequence
  Description of Artificial Sequence: Synthetic oligonucleotide
gaaccgguccuucugaaac

SEQ ID NO: 229001 - RNA, 19 nt, Artificial Sequence
  Description of Artificial Sequence: Synthetic oligonucleotide
uuauaggugaaaccaugaa

SEQ ID NO: 229002 - RNA, 19 nt, Artificial Sequence
  Description of Artificial Sequence: Synthetic oligonucleotide
auguuguguaccccaauag

SEQ ID NO: 229003 - RNA, 19 nt, Artificial Sequence
  Description of Artificial Sequence: Synthetic oligonucleotide
auacauugcucuaauuuuc

SEQ ID NO: 229004 - RNA, 19 nt, Artificial Sequence
  Description of Artificial Sequence: Synthetic oligonucleotide
  modified_base (11)..(11): a, c, u, g, unknown or other
uccucugaggnggagaacc

SEQ ID NO: 229005 - RNA, 19 nt, Artificial Sequence
  Description of Artificial Sequence: Synthetic oligonucleotide
uucuaaaagagaucuucuc

SEQ ID NO: 229006 - RNA, 19 nt, Artificial Sequence
  Description of Artificial Sequence: Synthetic oligonucleotide
aauaaacgucggaagaacu

SEQ ID NO: 229007 - RNA, 19 nt, Artificial Sequence
  Description of Artificial Sequence: Synthetic oligonucleotide
aguccaguaucccugagau

SEQ ID NO: 229008 - RNA, 19 nt, Artificial Sequence
  Description of Artificial Sequence: Synthetic oligonucleotide
uauacuaauccagguuuag

SEQ ID NO: 229009 - RNA, 19 nt, Artificial Sequence
  Description of Artificial Sequence: Synthetic oligonucleotide
gaagaaucuauuaagcgcu

SEQ ID NO: 229010 - RNA, 19 nt, Artificial Sequence
  Description of Artificial Sequence: Synthetic oligonucleotide
cuguaaaugaagcauggga

SEQ ID NO: 229011 - RNA, 19 nt, Artificial Sequence
  Description of Artificial Sequence: Synthetic oligonucleotide
uugauuuaguccagauaug

SEQ ID NO: 229012 - RNA, 19 nt, Artificial Sequence
  Description of Artificial Sequence: Synthetic oligonucleotide
aaccaugaaauuuccuaau

SEQ ID NO: 229013 - RNA, 19 nt, Artificial Sequence
  Description of Artificial Sequence: Synthetic oligonucleotide
gcguaaaaggcugaaaugg

SEQ ID NO: 229014 - RNA, 19 nt, Artificial Sequence
  Description of Artificial Sequence: Synthetic oligonucleotide
uccggaugugcgaagaagu

SEQ ID NO: 229015 - RNA, 19 nt, Artificial Sequence
  Description of Artificial Sequence: Synthetic oligonucleotide
uguaacccguuuuggagca

SEQ ID NO: 229016 - RNA, 19 nt, Artificial Sequence
  Description of Artificial Sequence: Synthetic oligonucleotide
agguaagacagucugggaa

SEQ ID NO: 229017 - RNA, 19 nt, Artificial Sequence
  Description of Artificial Sequence: Synthetic oligonucleotide
aauuguucgucugugucau

SEQ ID NO: 229018 - RNA, 19 nt, Artificial Sequence
  Description of Artificial Sequence: Synthetic oligonucleotide
uaaacgucggaagaacuac

SEQ ID NO: 229019 - RNA, 19 nt, Artificial Sequence
  Description of Artificial Sequence: Synthetic oligonucleotide
aaacagguccggaugugcg

SEQ ID NO: 229020 - RNA, 19 nt, Artificial Sequence
  Description of Artificial Sequence: Synthetic oligonucleotide
ucgcuaaugcucacaaaca

SEQ ID NO: 229021 - RNA, 19 nt, Artificial Sequence
  Description of Artificial Sequence: Synthetic oligonucleotide
ugcuucacagcaccaagac

SEQ ID NO: 229022 - RNA, 19 nt, Artificial Sequence
  Description of Artificial Sequence: Synthetic oligonucleotide
gaauaaacgucggaagaac

SEQ ID NO: 229023 - RNA, 19 nt, Artificial Sequence
  Description of Artificial Sequence: Synthetic oligonucleotide
auacuugauuuccauacau

SEQ ID NO: 229024 - RNA, 19 nt, Artificial Sequence
  Description of Artificial Sequence: Synthetic oligonucleotide
aagaucgauuguugcuuag

SEQ ID NO: 229025 - RNA, 19 nt, Artificial Sequence
  Description of Artificial Sequence: Synthetic oligonucleotide
ugcgaagaagucugcauac

SEQ ID NO: 229026 - RNA, 19 nt, Artificial Sequence
  Description of Artificial Sequence: Synthetic oligonucleotide
agccuuaagaagcacugca

SEQ ID NO: 229027 - RNA, 19 nt, Artificial Sequence
  Description of Artificial Sequence: Synthetic oligonucleotide
cuucuggucgcuaaugcuc

SEQ ID NO: 229028 - RNA, 19 nt, Artificial Sequence
  Description of Artificial Sequence: Synthetic oligonucleotide
guauuuccgccucagucag

SEQ ID NO: 229029 - RNA, 19 nt, Artificial Sequence
  Description of Artificial Sequence: Synthetic oligonucleotide
  modified_base (2)..(2): a, c, u, g, unknown or other
gnggagaacccaguucucg

SEQ ID NO: 229030 - RNA, 19 nt, Artificial Sequence
  Description of Artificial Sequence: Synthetic oligonucleotide
uuauacuaauccagguuua

SEQ ID NO: 229031 - RNA, 19 nt, Artificial Sequence
  Description of Artificial Sequence: Synthetic oligonucleotide
ggcgcuuuaggcuauuucc

SEQ ID NO: 229032 - RNA, 19 nt, Artificial Sequence
  Description of Artificial Sequence: Synthetic oligonucleotide
gaugugaugccugaaccac

SEQ ID NO: 229033 - RNA, 19 nt, Artificial Sequence
  Description of Artificial Sequence: Synthetic oligonucleotide
aauuuugauuuaguccaga

SEQ ID NO: 229034 - RNA, 19 nt, Artificial Sequence
  Description of Artificial Sequence: Synthetic oligonucleotide
guaaggaagauggacgcug

SEQ ID NO: 229035 - RNA, 19 nt, Artificial Sequence
  Description of Artificial Sequence: Synthetic oligonucleotide
agucugggaagguuuagca

SEQ ID NO: 229036 - RNA, 19 nt, Artificial Sequence
  Description of Artificial Sequence: Synthetic oligonucleotide
cuaaugcucacaaacaggu

SEQ ID NO: 229037 - RNA, 19 nt, Artificial Sequence
  Description of Artificial Sequence: Synthetic oligonucleotide
uuguuaaaacacucagcgu

SEQ ID NO: 229038 - RNA, 19 nt, Artificial Sequence
  Description of Artificial Sequence: Synthetic oligonucleotide
cagucuaaugcuucacagc

SEQ ID NO: 229039 - RNA, 19 nt, Artificial Sequence
  Description of Artificial Sequence: Synthetic oligonucleotide
ucgcuugugccauuggaca

SEQ ID NO: 229040 - RNA, 19 nt, Artificial Sequence
  Description of Artificial Sequence: Synthetic oligonucleotide
uuguucgucugugucauca

SEQ ID NO: 229041 - RNA, 19 nt, Artificial Sequence
  Description of Artificial Sequence: Synthetic oligonucleotide
auuuacaggaggguguacu

SEQ ID NO: 229042 - RNA, 19 nt, Artificial Sequence
  Description of Artificial Sequence: Synthetic oligonucleotide
uguugcuuaguuacgccua

SEQ ID NO: 229043 - RNA, 19 nt, Artificial Sequence
  Description of Artificial Sequence: Synthetic oligonucleotide
ucugucgucaugggaauca

SEQ ID NO: 229044 - RNA, 19 nt, Artificial Sequence
  Description of Artificial Sequence: Synthetic oligonucleotide
acuguaaaugaagcauggg

SEQ ID NO: 229045 - RNA, 19 nt, Artificial Sequence
  Description of Artificial Sequence: Synthetic oligonucleotide
uaagcgucagccucuguaa

SEQ ID NO: 229046 - RNA, 19 nt, Artificial Sequence
  Description of Artificial Sequence: Synthetic oligonucleotide
auuauaggugaaaccauga

SEQ ID NO: 229047 - RNA, 19 nt, Artificial Sequence
  Description of Artificial Sequence: Synthetic oligonucleotide
uggccuauguuguguaccc

SEQ ID NO: 229048 - RNA, 19 nt, Artificial Sequence
  Description of Artificial Sequence: Synthetic oligonucleotide
uguaacugccacagaggac

SEQ ID NO: 229049 - RNA, 19 nt, Artificial Sequence
  Description of Artificial Sequence: Synthetic oligonucleotide
aagacgauauuugcacugu

SEQ ID NO: 229050 - RNA, 19 nt, Artificial Sequence
  Description of Artificial Sequence: Synthetic oligonucleotide
cacuuuaauuguucgucug

SEQ ID NO: 229051 - RNA, 19 nt, Artificial Sequence
  Description of Artificial Sequence: Synthetic oligonucleotide
uauuugcacuguaacccgu

SEQ ID NO: 229052 - RNA, 19 nt, Artificial Sequence
  Description of Artificial Sequence: Synthetic oligonucleotide
gaugucccaagguagcuaa

SEQ ID NO: 229053 - RNA, 19 nt, Artificial Sequence
  Description of Artificial Sequence: Synthetic oligonucleotide
auacucguuuugaucuucc

SEQ ID NO: 229054 - RNA, 19 nt, Artificial Sequence
  Description of Artificial Sequence: Synthetic oligonucleotide
ugcgaagugaguugccagu

SEQ ID NO: 229055 - RNA, 19 nt, Artificial Sequence
  Description of Artificial Sequence: Synthetic oligonucleotide
gacgcuucaguagugguuc

SEQ ID NO: 229056 - RNA, 19 nt, Artificial Sequence
  Description of Artificial Sequence: Synthetic oligonucleotide
auagccauugggaaaugug

SEQ ID NO: 229057 - RNA, 19 nt, Artificial Sequence
  Description of Artificial Sequence: Synthetic oligonucleotide
agguggugaauucccacug

SEQ ID NO: 229058 - RNA, 19 nt, Artificial Sequence
  Description of Artificial Sequence: Synthetic oligonucleotide
aauccagguuuagauacaa

SEQ ID NO: 229059 - RNA, 19 nt, Artificial Sequence
  Description of Artificial Sequence: Synthetic oligonucleotide
caaucuaauaauaguucaa

SEQ ID NO: 229060 - RNA, 19 nt, Artificial Sequence
  Description of Artificial Sequence: Synthetic oligonucleotide
uggugaauucccacugccu

SEQ ID NO: 229061 - RNA, 19 nt, Artificial Sequence
  Description of Artificial Sequence: Synthetic oligonucleotide
aaccgguccuucugaaaca

SEQ ID NO: 229062 - RNA, 19 nt, Artificial Sequence
  Description of Artificial Sequence: Synthetic oligonucleotide
auccauuccgagccuaacu

SEQ ID NO: 229063 - RNA, 19 nt, Artificial Sequence
  Description of Artificial Sequence: Synthetic oligonucleotide
auggacgcugcucugacuu

SEQ ID NO: 229064 - RNA, 19 nt, Artificial Sequence
  Description of Artificial Sequence: Synthetic oligonucleotide
caauagacaucccaaggaa

SEQ ID NO: 229065 - RNA, 19 nt, Artificial Sequence
  Description of Artificial Sequence: Synthetic oligonucleotide
uugcucuaauuuucuaaaa

SEQ ID NO: 229066 - RNA, 19 nt, Artificial Sequence
  Description of Artificial Sequence: Synthetic oligonucleotide
accaugaaauuuccuaaua

SEQ ID NO: 229067 - RNA, 19 nt, Artificial Sequence
  Description of Artificial Sequence: Synthetic oligonucleotide
uaugagcauugaauuguau

SEQ ID NO: 229068 - RNA, 19 nt, Artificial Sequence
  Description of Artificial Sequence: Synthetic oligonucleotide
aguagugguucaucauaca

SEQ ID NO: 229069 - RNA, 19 nt, Artificial Sequence
  Description of Artificial Sequence: Synthetic oligonucleotide
uauaggcaacuucuuggua

SEQ ID NO: 229070 - RNA, 19 nt, Artificial Sequence
  Description of Artificial Sequence: Synthetic oligonucleotide
caucauacuccagacaaga

SEQ ID NO: 229071 - RNA, 19 nt, Artificial Sequence
  Description of Artificial Sequence: Synthetic oligonucleotide
gugaguugccagucuaaug

SEQ ID NO: 229072 - RNA, 19 nt, Artificial Sequence
  Description of Artificial Sequence: Synthetic oligonucleotide
aggugaaaccaugaaauuu

SEQ ID NO: 229073 - RNA, 19 nt, Artificial Sequence
  Description of Artificial Sequence: Synthetic oligonucleotide
aucgauuguugcuuaguua

SEQ ID NO: 229074 - RNA, 19 nt, Artificial Sequence
  Description of Artificial Sequence: Synthetic oligonucleotide
  modified_base (6)..(6): a, c, u, g, unknown or other
ugaggnggagaacccaguu

SEQ ID NO: 229075 - RNA, 19 nt, Artificial Sequence
  Description of Artificial Sequence: Synthetic oligonucleotide
uaagauccauuccgagccu

SEQ ID NO: 229076 - RNA, 19 nt, Artificial Sequence
  Description of Artificial Sequence: Synthetic oligonucleotide
gugaaaccaugaaauuucc

SEQ ID NO: 229077 - RNA, 19 nt, Artificial Sequence
  Description of Artificial Sequence: Synthetic oligonucleotide
uaggugaaaccaugaaauu

SEQ ID NO: 229078 - RNA, 19 nt, Artificial Sequence
  Description of Artificial Sequence: Synthetic oligonucleotide
gaagugaguugccagucua

SEQ ID NO: 229079 - RNA, 19 nt, Artificial Sequence
  Description of Artificial Sequence: Synthetic oligonucleotide
guaagcgucagccucugua

SEQ ID NO: 229080 - RNA, 19 nt, Artificial Sequence
  Description of Artificial Sequence: Synthetic oligonucleotide
auacuaauccagguuuaga

SEQ ID NO: 229081 - RNA, 19 nt, Artificial Sequence
  Description of Artificial Sequence: Synthetic oligonucleotide
cuggccuauguuguguacc

SEQ ID NO: 229082 - RNA, 19 nt, Artificial Sequence
  Description of Artificial Sequence: Synthetic oligonucleotide
gugcgaagugaguugccag

SEQ ID NO: 229083 - RNA, 19 nt, Artificial Sequence
  Description of Artificial Sequence: Synthetic oligonucleotide
cagaauuguaacugccaca

SEQ ID NO: 229084 - RNA, 19 nt, Artificial Sequence
  Description of Artificial Sequence: Synthetic oligonucleotide
cuaauacuugauuuccaua

SEQ ID NO: 229085 - RNA, 19 nt, Artificial Sequence
  Description of Artificial Sequence: Synthetic oligonucleotide
cacaaccugaaccauucga

SEQ ID NO: 229086 - RNA, 19 nt, Artificial Sequence
  Description of Artificial Sequence: Synthetic oligonucleotide
ucggaagaacuaccuuugu

SEQ ID NO: 229087 - RNA, 19 nt, Artificial Sequence
  Description of Artificial Sequence: Synthetic oligonucleotide
agauuauaggugaaaccau

SEQ ID NO: 229088 - RNA, 19 nt, Artificial Sequence
  Description of Artificial Sequence: Synthetic oligonucleotide
auguaacuaauuuguuaua

SEQ ID NO: 229089 - RNA, 19 nt, Artificial Sequence
  Description of Artificial Sequence: Synthetic oligonucleotide
guucucgugugccuacaug

SEQ ID NO: 229090 - RNA, 19 nt, Artificial Sequence
  Description of Artificial Sequence: Synthetic oligonucleotide
uaccuuuguaagauccauu

SEQ ID NO: 229091 - RNA, 19 nt, Artificial Sequence
  Description of Artificial Sequence: Synthetic oligonucleotide
aguccagauaugagcauug

SEQ ID NO: 229092 - RNA, 19 nt, Artificial Sequence
  Description of Artificial Sequence: Synthetic oligonucleotide
gcuucacagcaccaagacg

SEQ ID NO: 229093 - RNA, 19 nt, Artificial Sequence
  Description of Artificial Sequence: Synthetic oligonucleotide
agcgucagccucuguaagu

SEQ ID NO: 229094 - RNA, 19 nt, Artificial Sequence
  Description of Artificial Sequence: Synthetic oligonucleotide
auaaacgucggaagaacua

SEQ ID NO: 229095 - RNA, 19 nt, Artificial Sequence
  Description of Artificial Sequence: Synthetic oligonucleotide
aguuacgccuacugcccug

SEQ ID NO: 229096 - RNA, 19 nt, Artificial Sequence
  Description of Artificial Sequence: Synthetic oligonucleotide
gguguacugguggaaaacc

SEQ ID NO: 229097 - RNA, 19 nt, Artificial Sequence
  Description of Artificial Sequence: Synthetic oligonucleotide
ugauucuaccaugcuauuu

SEQ ID NO: 229098 - RNA, 19 nt, Artificial Sequence
  Description of Artificial Sequence: Synthetic oligonucleotide
cucaagaauaaacgucgga

SEQ ID NO: 229099 - RNA, 19 nt, Artificial Sequence
  Description of Artificial Sequence: Synthetic oligonucleotide
cucugacuuacacaacuga

SEQ ID NO: 229100 - RNA, 19 nt, Artificial Sequence
  Description of Artificial Sequence: Synthetic oligonucleotide
gaagaucgauuguugcuua

SEQ ID NO: 229101 - RNA, 19 nt, Artificial Sequence
  Description of Artificial Sequence: Synthetic oligonucleotide
uaguuacgccuacugcccu

SEQ ID NO: 229102 - RNA, 19 nt, Artificial Sequence
  Description of Artificial Sequence: Synthetic oligonucleotide
caugcuauuuguugugucu

SEQ ID NO: 229103 - RNA, 19 nt, Artificial Sequence
  Description of Artificial Sequence: Synthetic oligonucleotide
ucucgugugccuacaugua

SEQ ID NO: 229104 - RNA, 19 nt, Artificial Sequence
  Description of Artificial Sequence: Synthetic oligonucleotide
agaugguauuuuccccugu

SEQ ID NO: 229105 - RNA, 19 nt, Artificial Sequence
  Description of Artificial Sequence: Synthetic oligonucleotide
cacuguaacccguuuugga

SEQ ID NO: 229106 - RNA, 19 nt, Artificial Sequence
  Description of Artificial Sequence: Synthetic oligonucleotide
gcugagagauaccauuuca

SEQ ID NO: 229107 - RNA, 19 nt, Artificial Sequence
  Description of Artificial Sequence: Synthetic oligonucleotide
ucucugucgucaugggaau

SEQ ID NO: 229108 - RNA, 19 nt, Artificial Sequence
  Description of Artificial Sequence: Synthetic oligonucleotide
caggugcgaagugaguugc

SEQ ID NO: 229109 - RNA, 19 nt, Artificial Sequence
  Description of Artificial Sequence: Synthetic oligonucleotide
gagguaagacagucuggga

SEQ ID NO: 229110 - RNA, 19 nt, Artificial Sequence
  Description of Artificial Sequence: Synthetic oligonucleotide
acuugugauaagaggugca

SEQ ID NO: 229111 - RNA, 19 nt, Artificial Sequence
  Description of Artificial Sequence: Synthetic oligonucleotide
auuaagcgcuuuggggaag

SEQ ID NO: 229112 - RNA, 19 nt, Artificial Sequence
  Description of Artificial Sequence: Synthetic oligonucleotide
ucagcguaaaaggcugaaa

SEQ ID NO: 229113 - RNA, 19 nt, Artificial Sequence
  Description of Artificial Sequence: Synthetic oligonucleotide
ccaauagacaucccaagga

SEQ ID NO: 229114 - RNA, 19 nt, Artificial Sequence
  Description of Artificial Sequence: Synthetic oligonucleotide
uguucgucugugucaucaa

SEQ ID NO: 229115 - RNA, 19 nt, Artificial Sequence
  Description of Artificial Sequence: Synthetic oligonucleotide
acuaccuuuguaagaucca

SEQ ID NO: 229116 - RNA, 19 nt, Artificial Sequence
  Description of Artificial Sequence: Synthetic oligonucleotide
gaucgauuguugcuuaguu

SEQ ID NO: 229117 - RNA, 19 nt, Artificial Sequence
  Description of Artificial Sequence: Synthetic oligonucleotide
agugaguugccagucuaau

SEQ ID NO: 229118 - RNA, 19 nt, Artificial Sequence
  Description of Artificial Sequence: Synthetic oligonucleotide
auuguucgucugugucauc

SEQ ID NO: 229119 - RNA, 19 nt, Artificial Sequence
  Description of Artificial Sequence: Synthetic oligonucleotide
uggguggaugaugggaaac

SEQ ID NO: 229120 - RNA, 19 nt, Artificial Sequence
  Description of Artificial Sequence: Synthetic oligonucleotide
agcacugcauauaauuaua

SEQ ID NO: 229121 - RNA, 19 nt, Artificial Sequence
  Description of Artificial Sequence: Synthetic oligonucleotide
gguggugaauucccacugc

SEQ ID NO: 229122 - RNA, 19 nt, Artificial Sequence
  Description of Artificial Sequence: Synthetic oligonucleotide
uugauucuaccaugcuauu

SEQ ID NO: 229123 - RNA, 19 nt, Artificial Sequence
  Description of Artificial Sequence: Synthetic oligonucleotide
uacgccuacugcccugguc

SEQ ID NO: 229124 - RNA, 19 nt, Artificial Sequence
  Description of Artificial Sequence: Synthetic oligonucleotide
aucucacccaaaauaggau

SEQ ID NO: 229125 - RNA, 19 nt, Artificial Sequence
  Description of Artificial Sequence: Synthetic oligonucleotide
uauuuccgccucagucaga

SEQ ID NO: 229126 - RNA, 19 nt, Artificial Sequence
  Description of Artificial Sequence: Synthetic oligonucleotide
gauccauuccgagccuaac

SEQ ID NO: 229127 - RNA, 19 nt, Artificial Sequence
  Description of Artificial Sequence: Synthetic oligonucleotide
cauuccgagccuaacuugu

SEQ ID NO: 229128 - RNA, 19 nt, Artificial Sequence
  Description of Artificial Sequence: Synthetic oligonucleotide
caucgcuugugccauugga

SEQ ID NO: 229129 - RNA, 19 nt, Artificial Sequence
  Description of Artificial Sequence: Synthetic oligonucleotide
ggcuuaguguggaagacga

SEQ ID NO: 229130 - RNA, 19 nt, Artificial Sequence
  Description of Artificial Sequence: Synthetic oligonucleotide
ugaugucccaagguagcua

SEQ ID NO: 229131 - RNA, 19 nt, Artificial Sequence
  Description of Artificial Sequence: Synthetic oligonucleotide
cagcguaaaaggcugaaau

SEQ ID NO: 229132 - RNA, 19 nt, Artificial Sequence
  Description of Artificial Sequence: Synthetic oligonucleotide
ggaagguuuagcaaucugu

SEQ ID NO: 229133 - RNA, 19 nt, Artificial Sequence
  Description of Artificial Sequence: Synthetic oligonucleotide
auugaggacaggacacuaa

SEQ ID NO: 229134 - RNA, 19 nt, Artificial Sequence
  Description of Artificial Sequence: Synthetic oligonucleotide
agcaucgcuugugccauug

SEQ ID NO: 229135 - RNA, 19 nt, Artificial Sequence
  Description of Artificial Sequence: Synthetic oligonucleotide
gggaagguuuagcaaucug

SEQ ID NO: 229136 - RNA, 19 nt, Artificial Sequence
  Description of Artificial Sequence: Synthetic oligonucleotide
aguucucgugugccuacau

SEQ ID NO: 229137 - RNA, 19 nt, Artificial Sequence
  Description of Artificial Sequence: Synthetic oligonucleotide
auggguggaugaugggaaa

SEQ ID NO: 229138 - RNA, 19 nt, Artificial Sequence
  Description of Artificial Sequence: Synthetic oligonucleotide
gggacucauacucguuuug

SEQ ID NO: 229139 - RNA, 19 nt, Artificial Sequence
  Description of Artificial Sequence: Synthetic oligonucleotide
caaguugacauggcuggga

SEQ ID NO: 229140 - RNA, 19 nt, Artificial Sequence
  Description of Artificial Sequence: Synthetic oligonucleotide
aggugcgaagugaguugcc

SEQ ID NO: 229141 - RNA, 19 nt, Artificial Sequence
  Description of Artificial Sequence: Synthetic oligonucleotide
gaaacccacggaaccgguc

SEQ ID NO: 229142 - RNA, 19 nt, Artificial Sequence
  Description of Artificial Sequence: Synthetic oligonucleotide
cagagguugccaaauuggu

SEQ ID NO: 229143 - RNA, 19 nt, Artificial Sequence
  Description of Artificial Sequence: Synthetic oligonucleotide
gguuuccaaguuuaguuau

SEQ ID NO: 229144 - RNA, 19 nt, Artificial Sequence
  Description of Artificial Sequence: Synthetic oligonucleotide
cgauuguugcuuaguuacg

SEQ ID NO: 229145 - RNA, 19 nt, Artificial Sequence
  Description of Artificial Sequence: Synthetic oligonucleotide
uugcuucgguugcugcauc

SEQ ID NO: 229146 - RNA, 19 nt, Artificial Sequence
  Description of Artificial Sequence: Synthetic oligonucleotide
acagguccggaugugcgaa

SEQ ID NO: 229147 - RNA, 19 nt, Artificial Sequence
  Description of Artificial Sequence: Synthetic oligonucleotide
ccauuccgagccuaacuug

SEQ ID NO: 229148 - RNA, 19 nt, Artificial Sequence
  Description of Artificial Sequence: Synthetic oligonucleotide
ggcugagagauaccauuuc

SEQ ID NO: 229149 - RNA, 19 nt, Artificial Sequence
  Description of Artificial Sequence: Synthetic oligonucleotide
ccauagaaaggcuuagugu

SEQ ID NO: 229150 - RNA, 19 nt, Artificial Sequence
  Description of Artificial Sequence: Synthetic oligonucleotide
ggagacaaguugacauggc

SEQ ID NO: 229151 - RNA, 19 nt, Artificial Sequence
  Description of Artificial Sequence: Synthetic oligonucleotide
aguaucccugagauaggaa

SEQ ID NO: 229152 - RNA, 19 nt, Artificial Sequence
  Description of Artificial Sequence: Synthetic oligonucleotide
cgcuuuaggcuauuuccag

SEQ ID NO: 229153 - RNA, 19 nt, Artificial Sequence
  Description of Artificial Sequence: Synthetic oligonucleotide
cugcuagaguaagagaacu

SEQ ID NO: 229154 - RNA, 19 nt, Artificial Sequence
  Description of Artificial Sequence: Synthetic oligonucleotide
ggaagacgauauuugcacu

SEQ ID NO: 229155 - RNA, 19 nt, Artificial Sequence
  Description of Artificial Sequence: Synthetic oligonucleotide
agguccggaugugcgaaga

SEQ ID NO: 229156 - RNA, 19 nt, Artificial Sequence
  Description of Artificial Sequence: Synthetic oligonucleotide
cagguccggaugugcgaag

SEQ ID NO: 229157 - RNA, 19 nt, Artificial Sequence
  Description of Artificial Sequence: Synthetic oligonucleotide
ggugcgaagugaguugcca

SEQ ID NO: 229158 - RNA, 19 nt, Artificial Sequence
  Description of Artificial Sequence: Synthetic oligonucleotide
ggguguacugguggaaaac

SEQ ID NO: 229159 - RNA, 19 nt, Artificial Sequence
  Description of Artificial Sequence: Synthetic oligonucleotide
cuugugauaagaggugcau

SEQ ID NO: 229160 - RNA, 19 nt, Artificial Sequence
  Description of Artificial Sequence: Synthetic oligonucleotide
uggacgcugcucugacuua

SEQ ID NO: 229161 - RNA, 19 nt, Artificial Sequence
  Description of Artificial Sequence: Synthetic oligonucleotide
caaacugcccuguuuuguu

SEQ ID NO: 229162 - RNA, 19 nt, Artificial Sequence
  Description of Artificial Sequence: Synthetic oligonucleotide
gcaucgcuugugccauugg

SEQ ID NO: 229163 - RNA, 19 nt, Artificial Sequence
  Description of Artificial Sequence: Synthetic oligonucleotide
guccagauaugagcauuga

SEQ ID NO: 229164 - RNA, 19 nt, Artificial Sequence
  Description of Artificial Sequence: Synthetic oligonucleotide
gggcgcuuuaggcuauuuc

SEQ ID NO: 229165 - RNA, 19 nt, Artificial Sequence
  Description of Artificial Sequence: Synthetic oligonucleotide
gcgcuuuaggcuauuucca

SEQ ID NO: 229166 - RNA, 19 nt, Artificial Sequence
  Description of Artificial Sequence: Synthetic oligonucleotide
guguaccccaauagacauc

SEQ ID NO: 229167 - RNA, 19 nt, Artificial Sequence
  Description of Artificial Sequence: Synthetic oligonucleotide
gugccuacauguaacuaau

SEQ ID NO: 229168 - RNA, 19 nt, Artificial Sequence
  Description of Artificial Sequence: Synthetic oligonucleotide
cucugucgucaugggaauc

SEQ ID NO: 229169 - RNA, 19 nt, Artificial Sequence
  Description of Artificial Sequence: Synthetic oligonucleotide
aggcagcgggacucauacu

SEQ ID NO: 229170 - RNA, 19 nt, Artificial Sequence
  Description of Artificial Sequence: Synthetic oligonucleotide
gugauaagaggugcaugau

SEQ ID NO: 229171 - RNA, 19 nt, Artificial Sequence
  Description of Artificial Sequence: Synthetic oligonucleotide
cgacccugccuccccaucg

SEQ ID NO: 229172 - RNA, 19 nt, Artificial Sequence
  Description of Artificial Sequence: Synthetic oligonucleotide
ggccuauguuguguacccc

SEQ ID NO: 229173 - RNA, 19 nt, Artificial Sequence
  Description of Artificial Sequence: Synthetic oligonucleotide
  modified_base (3)..(3): a, c, u, g, unknown or other
ggnggagaacccaguucuc

SEQ ID NO: 229174 - RNA, 19 nt, Artificial Sequence
  Description of Artificial Sequence: Synthetic oligonucleotide
cgagccuaacuugugauaa

SEQ ID NO: 229175 - RNA, 19 nt, Artificial Sequence
  Description of Artificial Sequence: Synthetic oligonucleotide
ugggcgcuuuaggcuauuu

SEQ ID NO: 229176 - RNA, 19 nt, Artificial Sequence
  Description of Artificial Sequence: Synthetic oligonucleotide
gguccggaugugcgaagaa

SEQ ID NO: 229177 - RNA, 19 nt, Artificial Sequence
  Description of Artificial Sequence: Synthetic oligonucleotide
caguucucgugugccuaca

SEQ ID NO: 229178 - RNA, 19 nt, Artificial Sequence
  Description of Artificial Sequence: Synthetic oligonucleotide
ccaaacugcccuguuuugu

SEQ ID NO: 229179 - RNA, 19 nt, Artificial Sequence
  Description of Artificial Sequence: Synthetic oligonucleotide
acccacggaaccgguccuu

SEQ ID NO: 229180 - RNA, 19 nt, Artificial Sequence
  Description of Artificial Sequence: Synthetic oligonucleotide
ccgagccuaacuugugaua

SEQ ID NO: 229181 - RNA, 19 nt, Artificial Sequence
  Description of Artificial Sequence: Synthetic oligonucleotide
cccacggaaccgguccuuc

SEQ ID NO: 229182 - RNA, 19 nt, Artificial Sequence
  Description of Artificial Sequence: Synthetic oligonucleotide
gcgucagccucuguaaguu

SEQ ID NO: 229183 - RNA, 19 nt, Artificial Sequence
  Description of Artificial Sequence: Synthetic oligonucleotide
ccgacccugccuccccauc

SEQ ID NO: 229184 - RNA, 19 nt, Artificial Sequence
  Description of Artificial Sequence: Synthetic oligonucleotide
ccccauagaaaggcuuagu

SEQ ID NO: 229185 - RNA, 19 nt, Artificial Sequence
  Description of Artificial Sequence: Synthetic oligonucleotide
ccuccccaucgucaucucu

SEQ ID NO: 229186 - RNA, 19 nt, Artificial Sequence
  Description of Artificial Sequence: Synthetic oligonucleotide
cgggacucauacucguuuu

SEQ ID NO: 229187 - RNA, 19 nt, Artificial Sequence
  Description of Artificial Sequence: Synthetic oligonucleotide
cagcaucgcuugugccauu

SEQ ID NO: 229188 - RNA, 19 nt, Artificial Sequence
  Description of Artificial Sequence: Synthetic oligonucleotide
aguaguucaaaauagguuc

SEQ ID NO: 229189 - RNA, 19 nt, Artificial Sequence
  Description of Artificial Sequence: Synthetic oligonucleotide
aacauuauagaaaugaauc

SEQ ID NO: 229190 - RNA, 19 nt, Artificial Sequence
  Description of Artificial Sequence: Synthetic oligonucleotide
auauaauagauacuacucc

SEQ ID NO: 229191 - RNA, 19 nt, Artificial Sequence
  Description of Artificial Sequence: Synthetic oligonucleotide
uuagauuauucuaagcugg

SEQ ID NO: 229192 - RNA, 19 nt, Artificial Sequence
  Description of Artificial Sequence: Synthetic oligonucleotide
aauuguaauuaucugaugu

SEQ ID NO: 229193 - RNA, 19 nt, Artificial Sequence
  Description of Artificial Sequence: Synthetic oligonucleotide
uuuagaaucugucugagga

SEQ ID NO: 229194 - RNA, 19 nt, Artificial Sequence
  Description of Artificial Sequence: Synthetic oligonucleotide
uaaguuggcuuuaagaccg

SEQ ID NO: 229195 - RNA, 19 nt, Artificial Sequence
  Description of Artificial Sequence: Synthetic oligonucleotide
aaauuggccauuuugaagu

SEQ ID NO: 229196 - RNA, 19 nt, Artificial Sequence
  Description of Artificial Sequence: Synthetic oligonucleotide
agauauaagaauaagcuac

SEQ ID NO: 229197 - RNA, 19 nt, Artificial Sequence
  Description of Artificial Sequence: Synthetic oligonucleotide
uguuauagucauaaugugg

SEQ ID NO: 229198 - RNA, 19 nt, Artificial Sequence
  Description of Artificial Sequence: Synthetic oligonucleotide
guaucgaagauccaaacgg

SEQ ID NO: 229199 - RNA, 19 nt, Artificial Sequence
  Description of Artificial Sequence: Synthetic oligonucleotide
aauagguaucucucaauac

SEQ ID NO: 229200 - RNA, 19 nt, Artificial Sequence
  Description of Artificial Sequence: Synthetic oligonucleotide
gauuauucuaagcuggucc

SEQ ID NO: 229201 - RNA, 19 nt, Artificial Sequence
  Description of Artificial Sequence: Synthetic oligonucleotide
guuaauguaucgaagaucc

SEQ ID NO: 229202 - RNA, 19 nt, Artificial Sequence
  Description of Artificial Sequence: Synthetic oligonucleotide
guuauagucauaauguggg

SEQ ID NO: 229203 - RNA, 19 nt, Artificial Sequence
  Description of Artificial Sequence: Synthetic oligonucleotide
uccucaaaauuacagagcc

SEQ ID NO: 229204 - RNA, 19 nt, Artificial Sequence
  Description of Artificial Sequence: Synthetic oligonucleotide
uauauugugcuuuucauaa

SEQ ID NO: 229205 - RNA, 19 nt, Artificial Sequence
  Description of Artificial Sequence: Synthetic oligonucleotide
uuuagaacccauuuggaca

SEQ ID NO: 229206 - RNA, 19 nt, Artificial Sequence
  Description of Artificial Sequence: Synthetic oligonucleotide
auuuagaacccauuuggac

SEQ ID NO: 229207 - RNA, 19 nt, Artificial Sequence
  Description of Artificial Sequence: Synthetic oligonucleotide
acguuuaacaauuuaaaca

SEQ ID NO: 229208 - RNA, 19 nt, Artificial Sequence
  Description of Artificial Sequence: Synthetic oligonucleotide
uguaucgaagauccaaacg

SEQ ID NO: 229209 - RNA, 19 nt, Artificial Sequence
  Description of Artificial Sequence: Synthetic oligonucleotide
guuguugugaaauaucgcc

SEQ ID NO: 229210 - RNA, 19 nt, Artificial Sequence
  Description of Artificial Sequence: Synthetic oligonucleotide
uauaauagauacuacuccu

SEQ ID NO: 229211 - RNA, 19 nt, Artificial Sequence
  Description of Artificial Sequence: Synthetic oligonucleotide
uugauuaugaaaauaggua

SEQ ID NO: 229212 - RNA, 19 nt, Artificial Sequence
  Description of Artificial Sequence: Synthetic oligonucleotide
cuaguaauccuccuggugg

SEQ ID NO: 229213 - RNA, 19 nt, Artificial Sequence
  Description of Artificial Sequence: Synthetic oligonucleotide
auagauacuacuccugguc

SEQ ID NO: 229214 - RNA, 19 nt, Artificial Sequence
  Description of Artificial Sequence: Synthetic oligonucleotide
agauauuggugagugaucc

SEQ ID NO: 229215 - RNA, 19 nt, Artificial Sequence
  Description of Artificial Sequence: Synthetic oligonucleotide
uaaguuaaugccaucauuu

SEQ ID NO: 229216 - RNA, 19 nt, Artificial Sequence
  Description of Artificial Sequence: Synthetic oligonucleotide
ugcauauguagauauaaga

SEQ ID NO: 229217 - RNA, 19 nt, Artificial Sequence
  Description of Artificial Sequence: Synthetic oligonucleotide
uuauugaaaauagagugca

SEQ ID NO: 229218 - RNA, 19 nt, Artificial Sequence
  Description of Artificial Sequence: Synthetic oligonucleotide
agaauaaugaagacaugcc

SEQ ID NO: 229219 - RNA, 19 nt, Artificial Sequence
  Description of Artificial Sequence: Synthetic oligonucleotide
uucaagauuagcacagcag

SEQ ID NO: 229220 - RNA, 19 nt, Artificial Sequence
  Description of Artificial Sequence: Synthetic oligonucleotide
uaaauuggccauuuugaag

SEQ ID NO: 229221 - RNA, 19 nt, Artificial Sequence
  Description of Artificial Sequence: Synthetic oligonucleotide
ucguaaaccaagaugguac

SEQ ID NO: 229222 - RNA, 19 nt, Artificial Sequence
  Description of Artificial Sequence: Synthetic oligonucleotide
aaugaguuguccaugacgu

SEQ ID NO: 229223 - RNA, 19 nt, Artificial Sequence
  Description of Artificial Sequence: Synthetic oligonucleotide
uagguguucgaucagugag

SEQ ID NO: 229224 - RNA, 19 nt, Artificial Sequence
  Description of Artificial Sequence: Synthetic oligonucleotide
uaucgaagauccaaacggg

SEQ ID NO: 229225 - RNA, 19 nt, Artificial Sequence
  Description of Artificial Sequence: Synthetic oligonucleotide
auuagcacccucuaaguug

SEQ ID NO: 229226 - RNA, 19 nt, Artificial Sequence
  Description of Artificial Sequence: Synthetic oligonucleotide
aaauagguaucucucaaua

SEQ ID NO: 229227 - RNA, 19 nt, Artificial Sequence
  Description of Artificial Sequence: Synthetic oligonucleotide
uauucauacuuuauaguuc

SEQ ID NO: 229228 - RNA, 19 nt, Artificial Sequence
  Description of Artificial Sequence: Synthetic oligonucleotide
gauagggauuugaagaggg

SEQ ID NO: 229229 - RNA, 19 nt, Artificial Sequence
  Description of Artificial Sequence: Synthetic oligonucleotide
auaucuacgccuuucagau

SEQ ID NO: 229230 - RNA, 19 nt, Artificial Sequence
  Description of Artificial Sequence: Synthetic oligonucleotide
ugauucacuaccucaagcu

SEQ ID NO: 229231 - RNA, 19 nt, Artificial Sequence
  Description of Artificial Sequence: Synthetic oligonucleotide
uuguugugaaauaucgccc

SEQ ID NO: 229232 - RNA, 19 nt, Artificial Sequence
  Description of Artificial Sequence: Synthetic oligonucleotide
ugacugacugauaaugcag

SEQ ID NO: 229233 - RNA, 19 nt, Artificial Sequence
  Description of Artificial Sequence: Synthetic oligonucleotide
ugcgccagcauacugucgg

SEQ ID NO: 229234 - RNA, 19 nt, Artificial Sequence
  Description of Artificial Sequence: Synthetic oligonucleotide
uuagaacccauuuggacac

SEQ ID NO: 229235 - RNA, 19 nt, Artificial Sequence
  Description of Artificial Sequence: Synthetic oligonucleotide
uuagaagagccacaauuac

SEQ ID NO: 229236 - RNA, 19 nt, Artificial Sequence
  Description of Artificial Sequence: Synthetic oligonucleotide
uauacuagccgaaugcuua

SEQ ID NO: 229237 - RNA, 19 nt, Artificial Sequence
  Description of Artificial Sequence: Synthetic oligonucleotide
uaucucucaauacaauacu

SEQ ID NO: 229238 - RNA, 19 nt, Artificial Sequence
  Description of Artificial Sequence: Synthetic oligonucleotide
ugggacauauguaauggug

SEQ ID NO: 229239 - RNA, 19 nt, Artificial Sequence
  Description of Artificial Sequence: Synthetic oligonucleotide
acgcccaguaaguuaaugc

SEQ ID NO: 229240 - RNA, 19 nt, Artificial Sequence
  Description of Artificial Sequence: Synthetic oligonucleotide
aaagcuuugcauauguaga

SEQ ID NO: 229241 - RNA, 19 nt, Artificial Sequence
  Description of Artificial Sequence: Synthetic oligonucleotide
caauuguuuccccuuaugc

SEQ ID NO: 229242 - RNA, 19 nt, Artificial Sequence
  Description of Artificial Sequence: Synthetic oligonucleotide
caaugaguuguccaugacg

SEQ ID NO: 229243 - RNA, 19 nt, Artificial Sequence
  Description of Artificial Sequence: Synthetic oligonucleotide
cacaauuacugacugacug

SEQ ID NO: 229244 - RNA, 19 nt, Artificial Sequence
  Description of Artificial Sequence: Synthetic oligonucleotide
auaagcuacagaauaauga

SEQ ID NO: 229245 - RNA, 19 nt, Artificial Sequence
  Description of Artificial Sequence: Synthetic oligonucleotide
uuugaaguuaauguaucga

SEQ ID NO: 229246 - RNA, 19 nt, Artificial Sequence
  Description of Artificial Sequence: Synthetic oligonucleotide
auuauucuaagcugguccu

SEQ ID NO: 229247 - RNA, 19 nt, Artificial Sequence
  Description of Artificial Sequence: Synthetic oligonucleotide
cagauuagcacccucuaag

SEQ ID NO: 229248 - RNA, 19 nt, Artificial Sequence
  Description of Artificial Sequence: Synthetic oligonucleotide
cauacuuuauaguuccaac

SEQ ID NO: 229249 - RNA, 19 nt, Artificial Sequence
  Description of Artificial Sequence: Synthetic oligonucleotide
uuaaacauccuuacugcau

SEQ ID NO: 229250 - RNA, 19 nt, Artificial Sequence
  Description of Artificial Sequence: Synthetic oligonucleotide
uuuuaagguggcaacucga

SEQ ID NO: 229251 - RNA, 19 nt, Artificial Sequence
  Description of Artificial Sequence: Synthetic oligonucleotide
aaacagaguguucuucugu

SEQ ID NO: 229252 - RNA, 19 nt, Artificial Sequence
  Description of Artificial Sequence: Synthetic oligonucleotide
uguuguugugaaauaucgc

SEQ ID NO: 229253 - RNA, 19 nt, Artificial Sequence
  Description of Artificial Sequence: Synthetic oligonucleotide
uguaaaggagcacucuccu

SEQ ID NO: 229254 - RNA, 19 nt, Artificial Sequence
  Description of Artificial Sequence: Synthetic oligonucleotide
uaacgcaaagaaaauaauu

SEQ ID NO: 229255 - RNA, 19 nt, Artificial Sequence
  Description of Artificial Sequence: Synthetic oligonucleotide
auguaucgaagauccaaac

SEQ ID NO: 229256 - RNA, 19 nt, Artificial Sequence
  Description of Artificial Sequence: Synthetic oligonucleotide
uguugugaaauaucgcccu

SEQ ID NO: 229257 - RNA, 19 nt, Artificial Sequence
  Description of Artificial Sequence: Synthetic oligonucleotide
uccucuagacaauuggaug

SEQ ID NO: 229258 - RNA, 19 nt, Artificial Sequence
  Description of Artificial Sequence: Synthetic oligonucleotide
guuaauuccugucaucuga

SEQ ID NO: 229259 - RNA, 19 nt, Artificial Sequence
  Description of Artificial Sequence: Synthetic oligonucleotide
aaguuuaaggcccguggca

SEQ ID NO: 229260 - RNA, 19 nt, Artificial Sequence
  Description of Artificial Sequence: Synthetic oligonucleotide
ucacguuggaaccucucag

SEQ ID NO: 229261 - RNA, 19 nt, Artificial Sequence
  Description of Artificial Sequence: Synthetic oligonucleotide
acgaacacagucuauaauu

SEQ ID NO: 229262 - RNA, 19 nt, Artificial Sequence
  Description of Artificial Sequence: Synthetic oligonucleotide
uuccuuucgagauauuggu

SEQ ID NO: 229263 - RNA, 19 nt, Artificial Sequence
  Description of Artificial Sequence: Synthetic oligonucleotide
caagauuagcacagcagag

SEQ ID NO: 229264 - RNA, 19 nt, Artificial Sequence
  Description of Artificial Sequence: Synthetic oligonucleotide
auauguaauggugucagca

SEQ ID NO: 229265 - RNA, 19 nt, Artificial Sequence
  Description of Artificial Sequence: Synthetic oligonucleotide
uuaauuccugucaucugac

SEQ ID NO: 229266 - RNA, 19 nt, Artificial Sequence
  Description of Artificial Sequence: Synthetic oligonucleotide
uucuagcacgcccaguaag

SEQ ID NO: 229267 - RNA, 19 nt, Artificial Sequence
  Description of Artificial Sequence: Synthetic oligonucleotide
ucaaaauuacagagccuca

SEQ ID NO: 229268 - RNA, 19 nt, Artificial Sequence
  Description of Artificial Sequence: Synthetic oligonucleotide
ucaauuguuuccccuuaug

SEQ ID NO: 229269 - RNA, 19 nt, Artificial Sequence
  Description of Artificial Sequence: Synthetic oligonucleotide
auuccuuucgagauauugg

SEQ ID NO: 229270 - RNA, 19 nt, Artificial Sequence
  Description of Artificial Sequence: Synthetic oligonucleotide
ucuguaggguuuuaauugu

SEQ ID NO: 229271 - RNA, 19 nt, Artificial Sequence
  Description of Artificial Sequence: Synthetic oligonucleotide
aagguggcaacucgaaggu

SEQ ID NO: 229272 - RNA, 19 nt, Artificial Sequence
  Description of Artificial Sequence: Synthetic oligonucleotide
aagauuagcacagcagaga

SEQ ID NO: 229273 - RNA, 19 nt, Artificial Sequence
  Description of Artificial Sequence: Synthetic oligonucleotide
auaugagcccuuuacugug

SEQ ID NO: 229274 - RNA, 19 nt, Artificial Sequence
  Description of Artificial Sequence: Synthetic oligonucleotide
aggaucaauaaaugguucu

SEQ ID NO: 229275 - RNA, 19 nt, Artificial Sequence
  Description of Artificial Sequence: Synthetic oligonucleotide
uuaaugucagccagucugu

SEQ ID NO: 229276 - RNA, 19 nt, Artificial Sequence
  Description of Artificial Sequence: Synthetic oligonucleotide
ucuagguguucgaucagug

SEQ ID NO: 229277 - RNA, 19 nt, Artificial Sequence
  Description of Artificial Sequence: Synthetic oligonucleotide
cuguaaaggagcacucucc

SEQ ID NO: 229278 - RNA, 19 nt, Artificial Sequence
  Description of Artificial Sequence: Synthetic oligonucleotide
uuuaagguggcaacucgaa

SEQ ID NO: 229279 - RNA, 19 nt, Artificial Sequence
  Description of Artificial Sequence: Synthetic oligonucleotide
ugcauaugagcccuuuacu

SEQ ID NO: 229280 - RNA, 19 nt, Artificial Sequence
  Description of Artificial Sequence: Synthetic oligonucleotide
cuuauaucccugcucuuag

SEQ ID NO: 229281 - RNA, 19 nt, Artificial Sequence
  Description of Artificial Sequence: Synthetic oligonucleotide
uuaaugccaucauuuacaa

SEQ ID NO: 229282 - RNA, 19 nt, Artificial Sequence
  Description of Artificial Sequence: Synthetic oligonucleotide
acguaaguaguucaaaaua

SEQ ID NO: 229283 - RNA, 19 nt, Artificial Sequence
  Description of Artificial Sequence: Synthetic oligonucleotide
ugauagggauuugaagagg

SEQ ID NO: 229284 - RNA, 19 nt, Artificial Sequence
  Description of Artificial Sequence: Synthetic oligonucleotide
aacucgaagguuaauuccu

SEQ ID NO: 229285 - RNA, 19 nt, Artificial Sequence
  Description of Artificial Sequence: Synthetic oligonucleotide
uauguaauggugucagcau

SEQ ID NO: 229286 - RNA, 19 nt, Artificial Sequence
  Description of Artificial Sequence: Synthetic oligonucleotide
ucuagcacgcccaguaagu

SEQ ID NO: 229287 - RNA, 19 nt, Artificial Sequence
  Description of Artificial Sequence: Synthetic oligonucleotide
uuuaaggcccguggcagcg

SEQ ID NO: 229288 - RNA, 19 nt, Artificial Sequence
  Description of Artificial Sequence: Synthetic oligonucleotide
aaguuaaugccaucauuua

SEQ ID NO: 229289 - RNA, 19 nt, Artificial Sequence
  Description of Artificial Sequence: Synthetic oligonucleotide
aaguacucaggacuucggu

SEQ ID NO: 229290 - RNA, 19 nt, Artificial Sequence
  Description of Artificial Sequence: Synthetic oligonucleotide
uuugcaugugcgagguugc

SEQ ID NO: 229291 - RNA, 19 nt, Artificial Sequence
  Description of Artificial Sequence: Synthetic oligonucleotide
cuguuauagucauaaugug

SEQ ID NO: 229292 - RNA, 19 nt, Artificial Sequence
  Description of Artificial Sequence: Synthetic oligonucleotide
gauccuaguaauccuccug

SEQ ID NO: 229293 - RNA, 19 nt, Artificial Sequence
  Description of Artificial Sequence: Synthetic oligonucleotide
uucccguacaauguuaucu

SEQ ID NO: 229294 - RNA, 19 nt, Artificial Sequence
  Description of Artificial Sequence: Synthetic oligonucleotide
aauguaucgaagauccaaa

SEQ ID NO: 229295 - RNA, 19 nt, Artificial Sequence
  Description of Artificial Sequence: Synthetic oligonucleotide
ugugaaauaucgcccuccu

SEQ ID NO: 229296 - RNA, 19 nt, Artificial Sequence
  Description of Artificial Sequence: Synthetic oligonucleotide
uucacguuggaaccucuca

SEQ ID NO: 229297 - RNA, 19 nt, Artificial Sequence
  Description of Artificial Sequence: Synthetic oligonucleotide
aacgaacacagucuauaau

SEQ ID NO: 229298 - RNA, 19 nt, Artificial Sequence
  Description of Artificial Sequence: Synthetic oligonucleotide
uacgccuuucagauuagca

SEQ ID NO: 229299 - RNA, 19 nt, Artificial Sequence
  Description of Artificial Sequence: Synthetic oligonucleotide
aaugcaucguaaaccaaga

SEQ ID NO: 229300 - RNA, 19 nt, Artificial Sequence
  Description of Artificial Sequence: Synthetic oligonucleotide
aaaguacucaggacuucgg

SEQ ID NO: 229301 - RNA, 19 nt, Artificial Sequence
  Description of Artificial Sequence: Synthetic oligonucleotide
cacuaggacacccacuaag

SEQ ID NO: 229302 - RNA, 19 nt, Artificial Sequence
  Description of Artificial Sequence: Synthetic oligonucleotide
uaauaacgcaaagaaaaua

SEQ ID NO: 229303 - RNA, 19 nt, Artificial Sequence
  Description of Artificial Sequence: Synthetic oligonucleotide
agauuagcacccucuaagu

SEQ ID NO: 229304 - RNA, 19 nt, Artificial Sequence
  Description of Artificial Sequence: Synthetic oligonucleotide
cucuaaguuggcuuuaaga

SEQ ID NO: 229305 - RNA, 19 nt, Artificial Sequence
  Description of Artificial Sequence: Synthetic oligonucleotide
agauuugcgcagucgagca

SEQ ID NO: 229306 - RNA, 19 nt, Artificial Sequence
  Description of Artificial Sequence: Synthetic oligonucleotide
uuaugcaccucugggaaca

SEQ ID NO: 229307 - RNA, 19 nt, Artificial Sequence
  Description of Artificial Sequence: Synthetic oligonucleotide
agguuaauuccugucaucu

SEQ ID NO: 229308 - RNA, 19 nt, Artificial Sequence
  Description of Artificial Sequence: Synthetic oligonucleotide
aauaucgcccuccuacauu

SEQ ID NO: 229309 - RNA, 19 nt, Artificial Sequence
  Description of Artificial Sequence: Synthetic oligonucleotide
aaauaucgcccuccuacau

SEQ ID NO: 229310 - RNA, 19 nt, Artificial Sequence
  Description of Artificial Sequence: Synthetic oligonucleotide
ugaacgaacacagucuaua

SEQ ID NO: 229311 - RNA, 19 nt, Artificial Sequence
  Description of Artificial Sequence: Synthetic oligonucleotide
gacugacugauaaugcagc

SEQ ID NO: 229312 - RNA, 19 nt, Artificial Sequence
  Description of Artificial Sequence: Synthetic oligonucleotide
gaaauaucgcccuccuaca

SEQ ID NO: 229313 - RNA, 19 nt, Artificial Sequence
  Description of Artificial Sequence: Synthetic oligonucleotide
cacguuggaaccucucagg

SEQ ID NO: 229314 - RNA, 19 nt, Artificial Sequence
  Description of Artificial Sequence: Synthetic oligonucleotide
uuauacuagccgaaugcuu

SEQ ID NO: 229315 - RNA, 19 nt, Artificial Sequence
  Description of Artificial Sequence: Synthetic oligonucleotide
gagauuugcgcagucgagc

SEQ ID NO: 229316 - RNA, 19 nt, Artificial Sequence
  Description of Artificial Sequence: Synthetic oligonucleotide
agugcagugaaaugaguua

SEQ ID NO: 229317 - RNA, 19 nt, Artificial Sequence
  Description of Artificial Sequence: Synthetic oligonucleotide
cuuuauucacuaaagugcu

SEQ ID NO: 229318 - RNA, 19 nt, Artificial Sequence
  Description of Artificial Sequence: Synthetic oligonucleotide
uuagaaucugucugaggau

SEQ ID NO: 229319 - RNA, 19 nt, Artificial Sequence
  Description of Artificial Sequence: Synthetic oligonucleotide
gcauaugagcccuuuacug

SEQ ID NO: 229320 - RNA, 19 nt, Artificial Sequence
  Description of Artificial Sequence: Synthetic oligonucleotide
agauuauucuaagcugguc

SEQ ID NO: 229321 - RNA, 19 nt, Artificial Sequence
  Description of Artificial Sequence: Synthetic oligonucleotide
ucgaucagugagucaauac

SEQ ID NO: 229322 - RNA, 19 nt, Artificial Sequence
  Description of Artificial Sequence: Synthetic oligonucleotide
uugugaaauaucgcccucc

SEQ ID NO: 229323 - RNA, 19 nt, Artificial Sequence
  Description of Artificial Sequence: Synthetic oligonucleotide
ucagauuagcacccucuaa

SEQ ID NO: 229324 - RNA, 19 nt, Artificial Sequence
  Description of Artificial Sequence: Synthetic oligonucleotide
uuaauguaucgaagaucca

SEQ ID NO: 229325 - RNA, 19 nt, Artificial Sequence
  Description of Artificial Sequence: Synthetic oligonucleotide
accccgacaaaucacaguu

SEQ ID NO: 229326 - RNA, 19 nt, Artificial Sequence
  Description of Artificial Sequence: Synthetic oligonucleotide
gugcauaugagcccuuuac

SEQ ID NO: 229327 - RNA, 19 nt, Artificial Sequence
  Description of Artificial Sequence: Synthetic oligonucleotide
cauagggagucuuacccuc

SEQ ID NO: 229328 - RNA, 19 nt, Artificial Sequence
  Description of Artificial Sequence: Synthetic oligonucleotide
caguggauuuagauuauuc

SEQ ID NO: 229329 - RNA, 19 nt, Artificial Sequence
  Description of Artificial Sequence: Synthetic oligonucleotide
agugauccucuguucuagg

SEQ ID NO: 229330 - RNA, 19 nt, Artificial Sequence
  Description of Artificial Sequence: Synthetic oligonucleotide
ucgaagguuaauuccuguc

SEQ ID NO: 229331 - RNA, 19 nt, Artificial Sequence
  Description of Artificial Sequence: Synthetic oligonucleotide
uccuuacugcaucuaggug

SEQ ID NO: 229332 - RNA, 19 nt, Artificial Sequence
  Description of Artificial Sequence: Synthetic oligonucleotide
gcugcuguuguacagauaa

SEQ ID NO: 229333 - RNA, 19 nt, Artificial Sequence
  Description of Artificial Sequence: Synthetic oligonucleotide
ugcucuuagaaaacacaua

SEQ ID NO: 229334 - RNA, 19 nt, Artificial Sequence
  Description of Artificial Sequence: Synthetic oligonucleotide
uucagauuagcacccucua

SEQ ID NO: 229335 - RNA, 19 nt, Artificial Sequence
  Description of Artificial Sequence: Synthetic oligonucleotide
gccauagggagucuuaccc

SEQ ID NO: 229336 - RNA, 19 nt, Artificial Sequence
  Description of Artificial Sequence: Synthetic oligonucleotide
auaauaacgcaaagaaaau

SEQ ID NO: 229337 - RNA, 19 nt, Artificial Sequence
  Description of Artificial Sequence: Synthetic oligonucleotide
uccuuccauaucuacgccu

SEQ ID NO: 229338 - RNA, 19 nt, Artificial Sequence
  Description of Artificial Sequence: Synthetic oligonucleotide
auaucgcccuccuacauuu

SEQ ID NO: 229339 - RNA, 19 nt, Artificial Sequence
  Description of Artificial Sequence: Synthetic oligonucleotide
ucuuacccucaccacacuc

SEQ ID NO: 229340 - RNA, 19 nt, Artificial Sequence
  Description of Artificial Sequence: Synthetic oligonucleotide
ugacgagucuguaggauuu

SEQ ID NO: 229341 - RNA, 19 nt, Artificial Sequence
  Description of Artificial Sequence: Synthetic oligonucleotide
uaauucccguacaauguua

SEQ ID NO: 229342 - RNA, 19 nt, Artificial Sequence
  Description of Artificial Sequence: Synthetic oligonucleotide
ucccguacaauguuaucuc

SEQ ID NO: 229343 - RNA, 19 nt, Artificial Sequence
  Description of Artificial Sequence: Synthetic oligonucleotide
ccacacucacauaugauag

SEQ ID NO: 229344 - RNA, 19 nt, Artificial Sequence
  Description of Artificial Sequence: Synthetic oligonucleotide
gagccacaauuacugacug

SEQ ID NO: 229345 - RNA, 19 nt, Artificial Sequence
  Description of Artificial Sequence: Synthetic oligonucleotide
gguuuuagaaucugucuga

SEQ ID NO: 229346 - RNA, 19 nt, Artificial Sequence
  Description of Artificial Sequence: Synthetic oligonucleotide
uaugagcccuuuacuguga

SEQ ID NO: 229347 - RNA, 19 nt, Artificial Sequence
  Description of Artificial Sequence: Synthetic oligonucleotide
cacuaagaaggcccaacug

SEQ ID NO: 229348 - RNA, 19 nt, Artificial Sequence
  Description of Artificial Sequence: Synthetic oligonucleotide
uuauucuaagcugguccug

SEQ ID NO: 229349 - RNA, 19 nt, Artificial Sequence
  Description of Artificial Sequence: Synthetic oligonucleotide
auaaaccucaacaacucuu

SEQ ID NO: 229350 - RNA, 19 nt, Artificial Sequence
  Description of Artificial Sequence: Synthetic oligonucleotide
cuuacccucaccacacuca

SEQ ID NO: 229351 - RNA, 19 nt, Artificial Sequence
  Description of Artificial Sequence: Synthetic oligonucleotide
cagucgagcacugauccag

SEQ ID NO: 229352 - RNA, 19 nt, Artificial Sequence
  Description of Artificial Sequence: Synthetic oligonucleotide
auuugcgcagucgagcacu

SEQ ID NO: 229353 - RNA, 19 nt, Artificial Sequence
  Description of Artificial Sequence: Synthetic oligonucleotide
ugcguuugagcagagcauc

SEQ ID NO: 229354 - RNA, 19 nt, Artificial Sequence
  Description of Artificial Sequence: Synthetic oligonucleotide
ucacaccccgacaaaucac

SEQ ID NO: 229355 - RNA, 19 nt, Artificial Sequence
  Description of Artificial Sequence: Synthetic oligonucleotide
ggauccucaaaauuacaga

SEQ ID NO: 229356 - RNA, 19 nt, Artificial Sequence
  Description of Artificial Sequence: Synthetic oligonucleotide
agcggcuuaaauuggccau

SEQ ID NO: 229357 - RNA, 19 nt, Artificial Sequence
  Description of Artificial Sequence: Synthetic oligonucleotide
ugcgcagucgagcacugau

SEQ ID NO: 229358 - RNA, 19 nt, Artificial Sequence
  Description of Artificial Sequence: Synthetic oligonucleotide
uaccucaagcugacgaguc

SEQ ID NO: 229359 - RNA, 19 nt, Artificial Sequence
  Description of Artificial Sequence: Synthetic oligonucleotide
aggaccauucagugaacga

SEQ ID NO: 229360 - RNA, 19 nt, Artificial Sequence
  Description of Artificial Sequence: Synthetic oligonucleotide
ucuacgccuuucagauuag

SEQ ID NO: 229361 - RNA, 19 nt, Artificial Sequence
  Description of Artificial Sequence: Synthetic oligonucleotide
acuaggacacccacuaaga

SEQ ID NO: 229362 - RNA, 19 nt, Artificial Sequence
  Description of Artificial Sequence: Synthetic oligonucleotide
cuuaugcaccucugggaac

SEQ ID NO: 229363 - RNA, 19 nt, Artificial Sequence
  Description of Artificial Sequence: Synthetic oligonucleotide
uccaugacguaaguaguuc

SEQ ID NO: 229364 - RNA, 19 nt, Artificial Sequence
  Description of Artificial Sequence: Synthetic oligonucleotide
gaagguuaauuccugucau

SEQ ID NO: 229365 - RNA, 19 nt, Artificial Sequence
  Description of Artificial Sequence: Synthetic oligonucleotide
gccacaauuacugacugac

SEQ ID NO: 229366 - RNA, 19 nt, Artificial Sequence
  Description of Artificial Sequence: Synthetic oligonucleotide
uucuagguguucgaucagu

SEQ ID NO: 229367 - RNA, 19 nt, Artificial Sequence
  Description of Artificial Sequence: Synthetic oligonucleotide
caaauauggcacccuucac

SEQ ID NO: 229368 - RNA, 19 nt, Artificial Sequence
  Description of Artificial Sequence: Synthetic oligonucleotide
ucccugaucagagcaauau

SEQ ID NO: 229369 - RNA, 19 nt, Artificial Sequence
  Description of Artificial Sequence: Synthetic oligonucleotide
auaacgcaaagaaaauaau

SEQ ID NO: 229370 - RNA, 19 nt, Artificial Sequence
  Description of Artificial Sequence: Synthetic oligonucleotide
ugguggcuguaaucaaacc

SEQ ID NO: 229371 - RNA, 19 nt, Artificial Sequence
  Description of Artificial Sequence: Synthetic oligonucleotide
acuagccgaaugcuuaauu

SEQ ID NO: 229372 - RNA, 19 nt, Artificial Sequence
  Description of Artificial Sequence: Synthetic oligonucleotide
cauaugagcccuuuacugu

SEQ ID NO: 229373 - RNA, 19 nt, Artificial Sequence
  Description of Artificial Sequence: Synthetic oligonucleotide
gacuuuguuggaguagcca

SEQ ID NO: 229374 - RNA, 19 nt, Artificial Sequence
  Description of Artificial Sequence: Synthetic oligonucleotide
uuugcgcagucgagcacug

SEQ ID NO: 229375 - RNA, 19 nt, Artificial Sequence
  Description of Artificial Sequence: Synthetic oligonucleotide
gauacuacuccuggucaga

SEQ ID NO: 229376 - RNA, 19 nt, Artificial Sequence
  Description of Artificial Sequence: Synthetic oligonucleotide
cagugccuauauaaaagca

SEQ ID NO: 229377 - RNA, 19 nt, Artificial Sequence
  Description of Artificial Sequence: Synthetic oligonucleotide
ccuuucgagauauugguga

SEQ ID NO: 229378 - RNA, 19 nt, Artificial Sequence
  Description of Artificial Sequence: Synthetic oligonucleotide
auacuagccgaaugcuuaa

SEQ ID NO: 229379 - RNA, 19 nt, Artificial Sequence
  Description of Artificial Sequence: Synthetic oligonucleotide
ucaagacguuuaacaauuu

SEQ ID NO: 229380 - RNA, 19 nt, Artificial Sequence
  Description of Artificial Sequence: Synthetic oligonucleotide
agacacguuucaucaggga

SEQ ID NO: 229381 - RNA, 19 nt, Artificial Sequence
  Description of Artificial Sequence: Synthetic oligonucleotide
caugacguaaguaguucaa

SEQ ID NO: 229382 - RNA, 19 nt, Artificial Sequence
  Description of Artificial Sequence: Synthetic oligonucleotide
gauuugcgcagucgagcac

SEQ ID NO: 229383 - RNA, 19 nt, Artificial Sequence
  Description of Artificial Sequence: Synthetic oligonucleotide
cuggaggucacaccccgac

SEQ ID NO: 229384 - RNA, 19 nt, Artificial Sequence
  Description of Artificial Sequence: Synthetic oligonucleotide
ucgagauauuggugaguga

SEQ ID NO: 229385 - RNA, 19 nt, Artificial Sequence
  Description of Artificial Sequence: Synthetic oligonucleotide
cacgaucuacuuucccuac

SEQ ID NO: 229386 - RNA, 19 nt, Artificial Sequence
  Description of Artificial Sequence: Synthetic oligonucleotide
uagggagucuuacccucac

SEQ ID NO: 229387 - RNA, 19 nt, Artificial Sequence
  Description of Artificial Sequence: Synthetic oligonucleotide
aucguaaaccaagauggua

SEQ ID NO: 229388 - RNA, 19 nt, Artificial Sequence
  Description of Artificial Sequence: Synthetic oligonucleotide
guaaaggagcacucuccuc

SEQ ID NO: 229389 - RNA, 19 nt, Artificial Sequence
  Description of Artificial Sequence: Synthetic oligonucleotide
guugugaaauaucgcccuc

SEQ ID NO: 229390 - RNA, 19 nt, Artificial Sequence
  Description of Artificial Sequence: Synthetic oligonucleotide
acgaucuacuuucccuaca

SEQ ID NO: 229391 - RNA, 19 nt, Artificial Sequence
  Description of Artificial Sequence: Synthetic oligonucleotide
auacugucgggcucuuuau

SEQ ID NO: 229392 - RNA, 19 nt, Artificial Sequence
  Description of Artificial Sequence: Synthetic oligonucleotide
cuagguguucgaucaguga

SEQ ID NO: 229393 - RNA, 19 nt, Artificial Sequence
  Description of Artificial Sequence: Synthetic oligonucleotide
agggaugcgccuucugcgu

SEQ ID NO: 229394 - RNA, 19 nt, Artificial Sequence
  Description of Artificial Sequence: Synthetic oligonucleotide
cugaggauacagguuggug

SEQ ID NO: 229395 - RNA, 19 nt, Artificial Sequence
  Description of Artificial Sequence: Synthetic oligonucleotide
ggaucaauaaaugguucuc

SEQ ID NO: 229396 - RNA, 19 nt, Artificial Sequence
  Description of Artificial Sequence: Synthetic oligonucleotide
cagagauuugcaugugcga

SEQ ID NO: 229397 - RNA, 19 nt, Artificial Sequence
  Description of Artificial Sequence: Synthetic oligonucleotide
agaguguucuucuguuaua

SEQ ID NO: 229398 - RNA, 19 nt, Artificial Sequence
  Description of Artificial Sequence: Synthetic oligonucleotide
cccuccuacauuuaauguc

SEQ ID NO: 229399 - RNA, 19 nt, Artificial Sequence
  Description of Artificial Sequence: Synthetic oligonucleotide
agcacgcccaguaaguuaa

SEQ ID NO: 229400 - RNA, 19 nt, Artificial Sequence
  Description of Artificial Sequence: Synthetic oligonucleotide
cagcuuauaucccugcucu

SEQ ID NO: 229401 - RNA, 19 nt, Artificial Sequence
  Description of Artificial Sequence: Synthetic oligonucleotide
gagccauagggagucuuac

SEQ ID NO: 229402 - RNA, 19 nt, Artificial Sequence
  Description of Artificial Sequence: Synthetic oligonucleotide
augcaucguaaaccaagau

SEQ ID NO: 229403 - RNA, 19 nt, Artificial Sequence
  Description of Artificial Sequence: Synthetic oligonucleotide
cgcccaguaaguuaaugcc

SEQ ID NO: 229404 - RNA, 19 nt, Artificial Sequence
  Description of Artificial Sequence: Synthetic oligonucleotide
uucgaucagugagucaaua

SEQ ID NO: 229405 - RNA, 19 nt, Artificial Sequence
  Description of Artificial Sequence: Synthetic oligonucleotide
augacguaaguaguucaaa

SEQ ID NO: 229406 - RNA, 19 nt, Artificial Sequence
  Description of Artificial Sequence: Synthetic oligonucleotide
ugcauauauugugcuuuuc

SEQ ID NO: 229407 - RNA, 19 nt, Artificial Sequence
  Description of Artificial Sequence: Synthetic oligonucleotide
uagcacgcccaguaaguua

SEQ ID NO: 229408 - RNA, 19 nt, Artificial Sequence
  Description of Artificial Sequence: Synthetic oligonucleotide
gaaccucucagguuggcuu

SEQ ID NO: 229409 - RNA, 19 nt, Artificial Sequence
  Description of Artificial Sequence: Synthetic oligonucleotide
cuuauacuagccgaaugcu

SEQ ID NO: 229410 - RNA, 19 nt, Artificial Sequence
  Description of Artificial Sequence: Synthetic oligonucleotide
agcugacgagucuguagga

SEQ ID NO: 229411 - RNA, 19 nt, Artificial Sequence
  Description of Artificial Sequence: Synthetic oligonucleotide
agguguucgaucagugagu

SEQ ID NO: 229412 - RNA, 19 nt, Artificial Sequence
  Description of Artificial Sequence: Synthetic oligonucleotide
ccuaguaauccuccuggug

SEQ ID NO: 229413 - RNA, 19 nt, Artificial Sequence
  Description of Artificial Sequence: Synthetic oligonucleotide
uaagaccggaaggauccuc

SEQ ID NO: 229414 - RNA, 19 nt, Artificial Sequence
  Description of Artificial Sequence: Synthetic oligonucleotide
ggagauuugcgcagucgag

SEQ ID NO: 229415 - RNA, 19 nt, Artificial Sequence
  Description of Artificial Sequence: Synthetic oligonucleotide
cacucacauaugauaggga

SEQ ID NO: 229416 - RNA, 19 nt, Artificial Sequence
  Description of Artificial Sequence: Synthetic oligonucleotide
ggaccauucagugaacgaa

SEQ ID NO: 229417 - RNA, 19 nt, Artificial Sequence
  Description of Artificial Sequence: Synthetic oligonucleotide
cagcggcuuaaauuggcca

SEQ ID NO: 229418 - RNA, 19 nt, Artificial Sequence
  Description of Artificial Sequence: Synthetic oligonucleotide
auacuacuccuggucagaa

SEQ ID NO: 229419 - RNA, 19 nt, Artificial Sequence
  Description of Artificial Sequence: Synthetic oligonucleotide
gugagaacagaaugggauu

SEQ ID NO: 229420 - RNA, 19 nt, Artificial Sequence
  Description of Artificial Sequence: Synthetic oligonucleotide
gaugcgccuucugcguuug

SEQ ID NO: 229421 - RNA, 19 nt, Artificial Sequence
  Description of Artificial Sequence: Synthetic oligonucleotide
uucugcguuugagcagagc

SEQ ID NO: 229422 - RNA, 19 nt, Artificial Sequence
  Description of Artificial Sequence: Synthetic oligonucleotide
guuggcuuuaagaccggaa

SEQ ID NO: 229423 - RNA, 19 nt, Artificial Sequence
  Description of Artificial Sequence: Synthetic oligonucleotide
ucaagcugacgagucugua

SEQ ID NO: 229424 - RNA, 19 nt, Artificial Sequence
  Description of Artificial Sequence: Synthetic oligonucleotide
auagggagucuuacccuca

SEQ ID NO: 229425 - RNA, 19 nt, Artificial Sequence
  Description of Artificial Sequence: Synthetic oligonucleotide
cuacuuucccuacaucuau

SEQ ID NO: 229426 - RNA, 19 nt, Artificial Sequence
  Description of Artificial Sequence: Synthetic oligonucleotide
agaccggaaggauccucaa

SEQ ID NO: 229427 - RNA, 19 nt, Artificial Sequence
  Description of Artificial Sequence: Synthetic oligonucleotide
aguuggcuuuaagaccgga

SEQ ID NO: 229428 - RNA, 19 nt, Artificial Sequence
  Description of Artificial Sequence: Synthetic oligonucleotide
agcuuauaucccugcucuu

SEQ ID NO: 229429 - RNA, 19 nt, Artificial Sequence
  Description of Artificial Sequence: Synthetic oligonucleotide
cagaguguucuucuguuau

SEQ ID NO: 229430 - RNA, 19 nt, Artificial Sequence
  Description of Artificial Sequence: Synthetic oligonucleotide
gguggcaacucgaagguua

SEQ ID NO: 229431 - RNA, 19 nt, Artificial Sequence
  Description of Artificial Sequence: Synthetic oligonucleotide
acucuacgacaauuucauu

SEQ ID NO: 229432 - RNA, 19 nt, Artificial Sequence
  Description of Artificial Sequence: Synthetic oligonucleotide
aguagccagcagaaaucga

SEQ ID NO: 229433 - RNA, 19 nt, Artificial Sequence
  Description of Artificial Sequence: Synthetic oligonucleotide
cucacauaugauagggauu

SEQ ID NO: 229434 - RNA, 19 nt, Artificial Sequence
  Description of Artificial Sequence: Synthetic oligonucleotide
uacuagccgaaugcuuaau

SEQ ID NO: 229435 - RNA, 19 nt, Artificial Sequence
  Description of Artificial Sequence: Synthetic oligonucleotide
ccaugacguaaguaguuca

SEQ ID NO: 229436 - RNA, 19 nt, Artificial Sequence
  Description of Artificial Sequence: Synthetic oligonucleotide
cucugacuuuguuggagua

SEQ ID NO: 229437 - RNA, 19 nt, Artificial Sequence
  Description of Artificial Sequence: Synthetic oligonucleotide
caucguaaaccaagauggu

SEQ ID NO: 229438 - RNA, 19 nt, Artificial Sequence
  Description of Artificial Sequence: Synthetic oligonucleotide
cucgaagguuaauuccugu

SEQ ID NO: 229439 - RNA, 19 nt, Artificial Sequence
  Description of Artificial Sequence: Synthetic oligonucleotide
ugcgagguugcagcggcuu

SEQ ID NO: 229440 - RNA, 19 nt, Artificial Sequence
  Description of Artificial Sequence: Synthetic oligonucleotide
gcagcggcuuaaauuggcc

SEQ ID NO: 229441 - RNA, 19 nt, Artificial Sequence
  Description of Artificial Sequence: Synthetic oligonucleotide
ccucaagcugacgagucug

SEQ ID NO: 229442 - RNA, 19 nt, Artificial Sequence
  Description of Artificial Sequence: Synthetic oligonucleotide
gcuuauaucccugcucuua

SEQ ID NO: 229443 - RNA, 19 nt, Artificial Sequence
  Description of Artificial Sequence: Synthetic oligonucleotide
agucgagcacugauccaga

SEQ ID NO: 229444 - RNA, 19 nt, Artificial Sequence
  Description of Artificial Sequence: Synthetic oligonucleotide
ccucuaaguuggcuuuaag

SEQ ID NO: 229445 - RNA, 19 nt, Artificial Sequence
  Description of Artificial Sequence: Synthetic oligonucleotide
guguucgaucagugaguca

SEQ ID NO: 229446 - RNA, 19 nt, Artificial Sequence
  Description of Artificial Sequence: Synthetic oligonucleotide
acccuucacguuggaaccu

SEQ ID NO: 229447 - RNA, 19 nt, Artificial Sequence
  Description of Artificial Sequence: Synthetic oligonucleotide
aguaauccuccuggugguu

SEQ ID NO: 229448 - RNA, 19 nt, Artificial Sequence
  Description of Artificial Sequence: Synthetic oligonucleotide
cugacgagucuguaggauu

SEQ ID NO: 229449 - RNA, 19 nt, Artificial Sequence
  Description of Artificial Sequence: Synthetic oligonucleotide
aaauuccuuucgagauauu

SEQ ID NO: 229450 - RNA, 19 nt, Artificial Sequence
  Description of Artificial Sequence: Synthetic oligonucleotide
guggcaacucgaagguuaa

SEQ ID NO: 229451 - RNA, 19 nt, Artificial Sequence
  Description of Artificial Sequence: Synthetic oligonucleotide
gcauuacaugaacugugcu

SEQ ID NO: 229452 - RNA, 19 nt, Artificial Sequence
  Description of Artificial Sequence: Synthetic oligonucleotide
ccuucugcguuugagcaga

SEQ ID NO: 229453 - RNA, 19 nt, Artificial Sequence
  Description of Artificial Sequence: Synthetic oligonucleotide
gauuagcacagcagagauu

SEQ ID NO: 229454 - RNA, 19 nt, Artificial Sequence
  Description of Artificial Sequence: Synthetic oligonucleotide
cugcguuugagcagagcau

SEQ ID NO: 229455 - RNA, 19 nt, Artificial Sequence
  Description of Artificial Sequence: Synthetic oligonucleotide
ccgacaaaucacaguucuc

SEQ ID NO: 229456 - RNA, 19 nt, Artificial Sequence
  Description of Artificial Sequence: Synthetic oligonucleotide
gacugauaaugcagcuuau

SEQ ID NO: 229457 - RNA, 19 nt, Artificial Sequence
  Description of Artificial Sequence: Synthetic oligonucleotide
guaaaccaagaugguacuu

SEQ ID NO: 229458 - RNA, 19 nt, Artificial Sequence
  Description of Artificial Sequence: Synthetic oligonucleotide
uugcgcagucgagcacuga

SEQ ID NO: 229459 - RNA, 19 nt, Artificial Sequence
  Description of Artificial Sequence: Synthetic oligonucleotide
uggcaacucgaagguuaau

SEQ ID NO: 229460 - RNA, 19 nt, Artificial Sequence
  Description of Artificial Sequence: Synthetic oligonucleotide
cccaguaaguuaaugccau

SEQ ID NO: 229461 - RNA, 19 nt, Artificial Sequence
  Description of Artificial Sequence: Synthetic oligonucleotide
cacguuucaucagggacau

SEQ ID NO: 229462 - RNA, 19 nt, Artificial Sequence
  Description of Artificial Sequence: Synthetic oligonucleotide
caccccgacaaaucacagu

SEQ ID NO: 229463 - RNA, 19 nt, Artificial Sequence
  Description of Artificial Sequence: Synthetic oligonucleotide
gcagucgagcacugaucca

SEQ ID NO: 229464 - RNA, 19 nt, Artificial Sequence
  Description of Artificial Sequence: Synthetic oligonucleotide
gcccuccuacauuuaaugu

SEQ ID NO: 229465 - RNA, 19 nt, Artificial Sequence
  Description of Artificial Sequence: Synthetic oligonucleotide
ccccgacaaaucacaguuc

SEQ ID NO: 229466 - RNA, 19 nt, Artificial Sequence
  Description of Artificial Sequence: Synthetic oligonucleotide
cgagucuguaggauuuaga

SEQ ID NO: 229467 - RNA, 19 nt, Artificial Sequence
  Description of Artificial Sequence: Synthetic oligonucleotide
cagcauacugucgggcucu

SEQ ID NO: 229468 - RNA, 19 nt, Artificial Sequence
  Description of Artificial Sequence: Synthetic oligonucleotide
aucccugaucagagcaaua

SEQ ID NO: 229469 - RNA, 19 nt, Artificial Sequence
  Description of Artificial Sequence: Synthetic oligonucleotide
gcacccucuaaguuggcuu

SEQ ID NO: 229470 - RNA, 19 nt, Artificial Sequence
  Description of Artificial Sequence: Synthetic oligonucleotide
acccacuaagaaggcccaa

SEQ ID NO: 229471 - RNA, 19 nt, Artificial Sequence
  Description of Artificial Sequence: Synthetic oligonucleotide
ccauagggagucuuacccu

SEQ ID NO: 229472 - RNA, 19 nt, Artificial Sequence
  Description of Artificial Sequence: Synthetic oligonucleotide
ccuggugguuuuagaaucu

SEQ ID NO: 229473 - RNA, 19 nt, Artificial Sequence
  Description of Artificial Sequence: Synthetic oligonucleotide
gcgcagucgagcacugauc

SEQ ID NO: 229474 - RNA, 19 nt, Artificial Sequence
  Description of Artificial Sequence: Synthetic oligonucleotide
cuagcacgcccaguaaguu

SEQ ID NO: 229475 - RNA, 19 nt, Artificial Sequence
  Description of Artificial Sequence: Synthetic oligonucleotide
cagcuuauacuagccgaau

SEQ ID NO: 229476 - RNA, 19 nt, Artificial Sequence
  Description of Artificial Sequence: Synthetic oligonucleotide
ggcacccuucacguuggaa

SEQ ID NO: 229477 - RNA, 19 nt, Artificial Sequence
  Description of Artificial Sequence: Synthetic oligonucleotide
gcgagguugcagcggcuua

SEQ ID NO: 229478 - RNA, 19 nt, Artificial Sequence
  Description of Artificial Sequence: Synthetic oligonucleotide
ggcuuaaauuggccauuuu

SEQ ID NO: 229479 - RNA, 19 nt, Artificial Sequence
  Description of Artificial Sequence: Synthetic oligonucleotide
cagcagcacgaucuacuuu

SEQ ID NO: 229480 - RNA, 19 nt, Artificial Sequence
  Description of Artificial Sequence: Synthetic oligonucleotide
ggaugcgccuucugcguuu

SEQ ID NO: 229481 - RNA, 19 nt, Artificial Sequence
  Description of Artificial Sequence: Synthetic oligonucleotide
ccggaaggauccucaaaau

SEQ ID NO: 229482 - RNA, 19 nt, Artificial Sequence
  Description of Artificial Sequence: Synthetic oligonucleotide
ccuggaggucacaccccga

SEQ ID NO: 229483 - RNA, 19 nt, Artificial Sequence
  Description of Artificial Sequence: Synthetic oligonucleotide
ccauuuggacacagcuuau

SEQ ID NO: 229484 - RNA, 19 nt, Artificial Sequence
  Description of Artificial Sequence: Synthetic oligonucleotide
gggaugcgccuucugcguu

SEQ ID NO: 229485 - RNA, 19 nt, Artificial Sequence
  Description of Artificial Sequence: Synthetic oligonucleotide
gcggcuuaaauuggccauu

SEQ ID NO: 229486 - RNA, 19 nt, Artificial Sequence
  Description of Artificial Sequence: Synthetic oligonucleotide
gcacgcccaguaaguuaau

SEQ ID NO: 229487 - RNA, 19 nt, Artificial Sequence
  Description of Artificial Sequence: Synthetic oligonucleotide
uuuauaaugagacaaaaca

SEQ ID NO: 229488 - RNA, 19 nt, Artificial Sequence
  Description of Artificial Sequence: Synthetic oligonucleotide
aauauauugcauaauuggc

SEQ ID NO: 229489 - RNA, 19 nt, Artificial Sequence
  Description of Artificial Sequence: Synthetic oligonucleotide
uuauaaugagacaaaacag

SEQ ID NO: 229490 - RNA, 19 nt, Artificial Sequence
  Description of Artificial Sequence: Synthetic oligonucleotide
aagaaguugaucgaauucc

SEQ ID NO: 229491 - RNA, 19 nt, Artificial Sequence
  Description of Artificial Sequence: Synthetic oligonucleotide
aguuauguuagcucuaagc

SEQ ID NO: 229492 - RNA, 19 nt, Artificial Sequence
  Description of Artificial Sequence: Synthetic oligonucleotide
uauuguguugcgaaaaugc

SEQ ID NO: 229493 - RNA, 19 nt, Artificial Sequence
  Description of Artificial Sequence: Synthetic oligonucleotide
ugacauugcauuaaauucc

SEQ ID NO: 229494 - RNA, 19 nt, Artificial Sequence
  Description of Artificial Sequence: Synthetic oligonucleotide
aaggguuuaacauuuggca

SEQ ID NO: 229495 - RNA, 19 nt, Artificial Sequence
  Description of Artificial Sequence: Synthetic oligonucleotide
uuaucaugccaacauaaag

SEQ ID NO: 229496 - RNA, 19 nt, Artificial Sequence
  Description of Artificial Sequence: Synthetic oligonucleotide
ugaucgaauuccuugauug

SEQ ID NO: 229497 - RNA, 19 nt, Artificial Sequence
  Description of Artificial Sequence: Synthetic oligonucleotide
uggcaugcaaguaaggagg

SEQ ID NO: 229498 - RNA, 19 nt, Artificial Sequence
  Description of Artificial Sequence: Synthetic oligonucleotide
ugcgaaaaugcaaucacag

SEQ ID NO: 229499 - RNA, 19 nt, Artificial Sequence
  Description of Artificial Sequence: Synthetic oligonucleotide
uuuuaagaacccuguaggg

SEQ ID NO: 229500 - RNA, 19 nt, Artificial Sequence
  Description of Artificial Sequence: Synthetic oligonucleotide
uaauuguaaagugucaucc

SEQ ID NO: 229501 - RNA, 19 nt, Artificial Sequence
  Description of Artificial Sequence: Synthetic oligonucleotide
aacucauuggcauucuuug

SEQ ID NO: 229502 - RNA, 19 nt, Artificial Sequence
  Description of Artificial Sequence: Synthetic oligonucleotide
ugauauuggaauaggguca

SEQ ID NO: 229503 - RNA, 19 nt, Artificial Sequence
  Description of Artificial Sequence: Synthetic oligonucleotide
aauaagacgaucaugguua

SEQ ID NO: 229504 - RNA, 19 nt, Artificial Sequence
  Description of Artificial Sequence: Synthetic oligonucleotide
uuauaugccgagaauauau

SEQ ID NO: 229505 - RNA, 19 nt, Artificial Sequence
  Description of Artificial Sequence: Synthetic oligonucleotide
cauucagagaacaauccgg

SEQ ID NO: 229506 - RNA, 19 nt, Artificial Sequence
  Description of Artificial Sequence: Synthetic oligonucleotide
uaugccgagaauauauugc

SEQ ID NO: 229507 - RNA, 19 nt, Artificial Sequence
  Description of Artificial Sequence: Synthetic oligonucleotide
aaucuaaguuugcuaagag

SEQ ID NO: 229508 - RNA, 19 nt, Artificial Sequence
  Description of Artificial Sequence: Synthetic oligonucleotide
uuaugugaaagcccgaccu

SEQ ID NO: 229509 - RNA, 19 nt, Artificial Sequence
  Description of Artificial Sequence: Synthetic oligonucleotide
gacgaucaugguuagaugc

SEQ ID NO: 229510 - RNA, 19 nt, Artificial Sequence
  Description of Artificial Sequence: Synthetic oligonucleotide
ucauaggacauuaaccucu

SEQ ID NO: 229511 - RNA, 19 nt, Artificial Sequence
  Description of Artificial Sequence: Synthetic oligonucleotide
ugaaggguuuaacauuugg

SEQ ID NO: 229512 - RNA, 19 nt, Artificial Sequence
  Description of Artificial Sequence: Synthetic oligonucleotide
uuagaugcgaccuauguuu

SEQ ID NO: 229513 - RNA, 19 nt, Artificial Sequence
  Description of Artificial Sequence: Synthetic oligonucleotide
acauauuuccaucugacau

SEQ ID NO: 229514 - RNA, 19 nt, Artificial Sequence
  Description of Artificial Sequence: Synthetic oligonucleotide
uguuacauauuacacucga

SEQ ID NO: 229515 - RNA, 19 nt, Artificial Sequence
  Description of Artificial Sequence: Synthetic oligonucleotide
aaauaagacuacagagugc

SEQ ID NO: 229516 - RNA, 19 nt, Artificial Sequence
  Description of Artificial Sequence: Synthetic oligonucleotide
ugcaguacauauucugugg

SEQ ID NO: 229517 - RNA, 19 nt, Artificial Sequence
  Description of Artificial Sequence: Synthetic oligonucleotide
auagugaaguuaucaugcc

SEQ ID NO: 229518 - RNA, 19 nt, Artificial Sequence
  Description of Artificial Sequence: Synthetic oligonucleotide
aucuaaguuugcuaagagg

SEQ ID NO: 229519 - RNA, 19 nt, Artificial Sequence
  Description of Artificial Sequence: Synthetic oligonucleotide
uuaacggaagccauuugug

SEQ ID NO: 229520 - RNA, 19 nt, Artificial Sequence
  Description of Artificial Sequence: Synthetic oligonucleotide
uguguugcgaaaaugcaau

SEQ ID NO: 229521 - RNA, 19 nt, Artificial Sequence
  Description of Artificial Sequence: Synthetic oligonucleotide
uuaacauugauuagaugua

SEQ ID NO: 229522 - RNA, 19 nt, Artificial Sequence
  Description of Artificial Sequence: Synthetic oligonucleotide
uaagcuauguauacaugga

SEQ ID NO: 229523 - RNA, 19 nt, Artificial Sequence
  Description of Artificial Sequence: Synthetic oligonucleotide
uucgaagacaagcaucccc

SEQ ID NO: 229524 - RNA, 19 nt, Artificial Sequence
  Description of Artificial Sequence: Synthetic oligonucleotide
aguaccagcaaccaucccu

SEQ ID NO: 229525 - RNA, 19 nt, Artificial Sequence
  Description of Artificial Sequence: Synthetic oligonucleotide
gaaacguugaucuugcgua

SEQ ID NO: 229526 - RNA, 19 nt, Artificial Sequence
  Description of Artificial Sequence: Synthetic oligonucleotide
caugauuguauuguguugc

SEQ ID NO: 229527 - RNA, 19 nt, Artificial Sequence
  Description of Artificial Sequence: Synthetic oligonucleotide
guacacuuggcuugcaacg

SEQ ID NO: 229528 - RNA, 19 nt, Artificial Sequence
  Description of Artificial Sequence: Synthetic oligonucleotide
ucauccaacacaaacucua

SEQ ID NO: 229529 - RNA, 19 nt, Artificial Sequence
  Description of Artificial Sequence: Synthetic oligonucleotide
ugacucuaacauuaaauaa

SEQ ID NO: 229530 - RNA, 19 nt, Artificial Sequence
  Description of Artificial Sequence: Synthetic oligonucleotide
uuuaagaacccuguaggga

SEQ ID NO: 229531 - RNA, 19 nt, Artificial Sequence
  Description of Artificial Sequence: Synthetic oligonucleotide
aaacaacugaagaagguga

SEQ ID NO: 229532 - RNA, 19 nt, Artificial Sequence
  Description of Artificial Sequence: Synthetic oligonucleotide
ucucuacuggaauugauuc

SEQ ID NO: 229533 - RNA, 19 nt, Artificial Sequence
  Description of Artificial Sequence: Synthetic oligonucleotide
aacaacugaagaaggugac

SEQ ID NO: 229534 - RNA, 19 nt, Artificial Sequence
  Description of Artificial Sequence: Synthetic oligonucleotide
aaggcuaguuaucaaaaua

SEQ ID NO: 229535 - RNA, 19 nt, Artificial Sequence
  Description of Artificial Sequence: Synthetic oligonucleotide
auagcaaggccugacugcc

SEQ ID NO: 229536 - RNA, 19 nt, Artificial Sequence
  Description of Artificial Sequence: Synthetic oligonucleotide
uauugguuuaggugcaccc

SEQ ID NO: 229537 - RNA, 19 nt, Artificial Sequence
  Description of Artificial Sequence: Synthetic oligonucleotide
uuaauuguaaagugucauc

SEQ ID NO: 229538 - RNA, 19 nt, Artificial Sequence
  Description of Artificial Sequence: Synthetic oligonucleotide
aagucaaccacggccacuc

SEQ ID NO: 229539 - RNA, 19 nt, Artificial Sequence
  Description of Artificial Sequence: Synthetic oligonucleotide
aagucuugggauauaaaca

SEQ ID NO: 229540 - RNA, 19 nt, Artificial Sequence
  Description of Artificial Sequence: Synthetic oligonucleotide
gauuguauuguguugcgaa

SEQ ID NO: 229541 - RNA, 19 nt, Artificial Sequence
  Description of Artificial Sequence: Synthetic oligonucleotide
ucaccauucaagcaguaua

SEQ ID NO: 229542 - RNA, 19 nt, Artificial Sequence
  Description of Artificial Sequence: Synthetic oligonucleotide
uaauggcccucguagaaag

SEQ ID NO: 229543 - RNA, 19 nt, Artificial Sequence
  Description of Artificial Sequence: Synthetic oligonucleotide
aagggcgacauguccuccc

SEQ ID NO: 229544 - RNA, 19 nt, Artificial Sequence
  Description of Artificial Sequence: Synthetic oligonucleotide
ucuugcguaagccuaccca

SEQ ID NO: 229545 - RNA, 19 nt, Artificial Sequence
  Description of Artificial Sequence: Synthetic oligonucleotide
gaaggguuuaacauuuggc

SEQ ID NO: 229546 - RNA, 19 nt, Artificial Sequence
  Description of Artificial Sequence: Synthetic oligonucleotide
auaugccgagaauauauug

SEQ ID NO: 229547 - RNA, 19 nt, Artificial Sequence
  Description of Artificial Sequence: Synthetic oligonucleotide
aacaauccggaccuugcca

SEQ ID NO: 229548 - RNA, 19 nt, Artificial Sequence
  Description of Artificial Sequence: Synthetic oligonucleotide
ugcguaagccuacccaagg

SEQ ID NO: 229549 - RNA, 19 nt, Artificial Sequence
  Description of Artificial Sequence: Synthetic oligonucleotide
aauccaguaagacuccgua

SEQ ID NO: 229550 - RNA, 19 nt, Artificial Sequence
  Description of Artificial Sequence: Synthetic oligonucleotide
uaaucuaaguuugcuaaga

SEQ ID NO: 229551 - RNA, 19 nt, Artificial Sequence
  Description of Artificial Sequence: Synthetic oligonucleotide
uaaugguagagugugacau

SEQ ID NO: 229552 - RNA, 19 nt, Artificial Sequence
  Description of Artificial Sequence: Synthetic oligonucleotide
aacggaagccauuugugaa

SEQ ID NO: 229553 - RNA, 19 nt, Artificial Sequence
  Description of Artificial Sequence: Synthetic oligonucleotide
acauauuacacucgauccu

SEQ ID NO: 229554 - RNA, 19 nt, Artificial Sequence
  Description of Artificial Sequence: Synthetic oligonucleotide
auuacacucgauccucauc

SEQ ID NO: 229555 - RNA, 19 nt, Artificial Sequence
  Description of Artificial Sequence: Synthetic oligonucleotide
uuuagucccgccacugcag

SEQ ID NO: 229556 - RNA, 19 nt, Artificial Sequence
  Description of Artificial Sequence: Synthetic oligonucleotide
guugcgaaaaugcaaucac

SEQ ID NO: 229557 - RNA, 19 nt, Artificial Sequence
  Description of Artificial Sequence: Synthetic oligonucleotide
gaaagcccgaccuacagaa

SEQ ID NO: 229558 - RNA, 19 nt, Artificial Sequence
  Description of Artificial Sequence: Synthetic oligonucleotide
aagcuauguauacauggaa

SEQ ID NO: 229559 - RNA, 19 nt, Artificial Sequence
  Description of Artificial Sequence: Synthetic oligonucleotide
cucuacuggaauugauucg

SEQ ID NO: 229560 - RNA, 19 nt, Artificial Sequence
  Description of Artificial Sequence: Synthetic oligonucleotide
cuccguagaaggaacauuc

SEQ ID NO: 229561 - RNA, 19 nt, Artificial Sequence
  Description of Artificial Sequence: Synthetic oligonucleotide
guggcaugcaaguaaggag

SEQ ID NO: 229562 - RNA, 19 nt, Artificial Sequence
  Description of Artificial Sequence: Synthetic oligonucleotide
uagcaauaaaguuuugcau

SEQ ID NO: 229563 - RNA, 19 nt, Artificial Sequence
  Description of Artificial Sequence: Synthetic oligonucleotide
ucgauccucaucaaauuaa

SEQ ID NO: 229564 - RNA, 19 nt, Artificial Sequence
  Description of Artificial Sequence: Synthetic oligonucleotide
aucaaaauaagacgaucau

SEQ ID NO: 229565 - RNA, 19 nt, Artificial Sequence
  Description of Artificial Sequence: Synthetic oligonucleotide
augauuguauuguguugcg

SEQ ID NO: 229566 - RNA, 19 nt, Artificial Sequence
  Description of Artificial Sequence: Synthetic oligonucleotide
ucuaauggcccucguagaa

SEQ ID NO: 229567 - RNA, 19 nt, Artificial Sequence
  Description of Artificial Sequence: Synthetic oligonucleotide
uguugcgaaaaugcaauca

SEQ ID NO: 229568 - RNA, 19 nt, Artificial Sequence
  Description of Artificial Sequence: Synthetic oligonucleotide
uuguguugcgaaaaugcaa

SEQ ID NO: 229569 - RNA, 19 nt, Artificial Sequence
  Description of Artificial Sequence: Synthetic oligonucleotide
uaacggaagccauuuguga

SEQ ID NO: 229570 - RNA, 19 nt, Artificial Sequence
  Description of Artificial Sequence: Synthetic oligonucleotide
uuccuugacguguggagag

SEQ ID NO: 229571 - RNA, 19 nt, Artificial Sequence
  Description of Artificial Sequence: Synthetic oligonucleotide
uuacaguagggaauaucac

SEQ ID NO: 229572 - RNA, 19 nt, Artificial Sequence
  Description of Artificial Sequence: Synthetic oligonucleotide
cucguagaaagucugucug

SEQ ID NO: 229573 - RNA, 19 nt, Artificial Sequence
  Description of Artificial Sequence: Synthetic oligonucleotide
cauugauuagauguaauga

SEQ ID NO: 229574 - RNA, 19 nt, Artificial Sequence
  Description of Artificial Sequence: Synthetic oligonucleotide
uguauuguguugcgaaaau

SEQ ID NO: 229575 - RNA, 19 nt, Artificial Sequence
  Description of Artificial Sequence: Synthetic oligonucleotide
aaagcuuuauaugccgaga

SEQ ID NO: 229576 - RNA, 19 nt, Artificial Sequence
  Description of Artificial Sequence: Synthetic oligonucleotide
ucagcucaaguaauacucu

SEQ ID NO: 229577 - RNA, 19 nt, Artificial Sequence
  Description of Artificial Sequence: Synthetic oligonucleotide
uugcgaaaaugcaaucaca

SEQ ID NO: 229578 - RNA, 19 nt, Artificial Sequence
  Description of Artificial Sequence: Synthetic oligonucleotide
uacuggaauugauucgaag

SEQ ID NO: 229579 - RNA, 19 nt, Artificial Sequence
  Description of Artificial Sequence: Synthetic oligonucleotide
aguugguuuauaugaauua

SEQ ID NO: 229580 - RNA, 19 nt, Artificial Sequence
  Description of Artificial Sequence: Synthetic oligonucleotide
uugauucgaagacaagcau

SEQ ID NO: 229581 - RNA, 19 nt, Artificial Sequence
  Description of Artificial Sequence: Synthetic oligonucleotide
uggaauugauucgaagaca

SEQ ID NO: 229582 - RNA, 19 nt, Artificial Sequence
  Description of Artificial Sequence: Synthetic oligonucleotide
aggguuuaacauuuggcaa

SEQ ID NO: 229583 - RNA, 19 nt, Artificial Sequence
  Description of Artificial Sequence: Synthetic oligonucleotide
gaaguaccagcaaccaucc

SEQ ID NO: 229584 - RNA, 19 nt, Artificial Sequence
  Description of Artificial Sequence: Synthetic oligonucleotide
ugugaucaucaauacugcu

SEQ ID NO: 229585 - RNA, 19 nt, Artificial Sequence
  Description of Artificial Sequence: Synthetic oligonucleotide
cauauuacacucgauccuc

SEQ ID NO: 229586 - RNA, 19 nt, Artificial Sequence
  Description of Artificial Sequence: Synthetic oligonucleotide
cuguuacauauuacacucg

SEQ ID NO: 229587 - RNA, 19 nt, Artificial Sequence
  Description of Artificial Sequence: Synthetic oligonucleotide
uuuaucacuugugaucauc

SEQ ID NO: 229588 - RNA, 19 nt, Artificial Sequence
  Description of Artificial Sequence: Synthetic oligonucleotide
aaguaccagcaaccauccc

SEQ ID NO: 229589 - RNA, 19 nt, Artificial Sequence
  Description of Artificial Sequence: Synthetic oligonucleotide
ugaucuugcguaagccuac

SEQ ID NO: 229590 - RNA, 19 nt, Artificial Sequence
  Description of Artificial Sequence: Synthetic oligonucleotide
auaagacgaucaugguuag

SEQ ID NO: 229591 - RNA, 19 nt, Artificial Sequence
  Description of Artificial Sequence: Synthetic oligonucleotide
aaacguugaucuugcguaa

SEQ ID NO: 229592 - RNA, 19 nt, Artificial Sequence
  Description of Artificial Sequence: Synthetic oligonucleotide
ugaaagcccgaccuacaga

SEQ ID NO: 229593 - RNA, 19 nt, Artificial Sequence
  Description of Artificial Sequence: Synthetic oligonucleotide
auccaguaagacuccguag

SEQ ID NO: 229594 - RNA, 19 nt, Artificial Sequence
  Description of Artificial Sequence: Synthetic oligonucleotide
uauaugccgagaauauauu

SEQ ID NO: 229595 - RNA, 19 nt, Artificial Sequence
  Description of Artificial Sequence: Synthetic oligonucleotide
ccgcagaacagcuuuaacg

SEQ ID NO: 229596 - RNA, 19 nt, Artificial Sequence
  Description of Artificial Sequence: Synthetic oligonucleotide
auuguauuguguugcgaaa

SEQ ID NO: 229597 - RNA, 19 nt, Artificial Sequence
  Description of Artificial Sequence: Synthetic oligonucleotide
uaacauugauuagauguaa

SEQ ID NO: 229598 - RNA, 19 nt, Artificial Sequence
  Description of Artificial Sequence: Synthetic oligonucleotide
gaggcauuaauuguaaagu

SEQ ID NO: 229599 - RNA, 19 nt, Artificial Sequence
  Description of Artificial Sequence: Synthetic oligonucleotide
aacaccgucaggacagcag

SEQ ID NO: 229600 - RNA, 19 nt, Artificial Sequence
  Description of Artificial Sequence: Synthetic oligonucleotide
uugcguaagccuacccaag

SEQ ID NO: 229601 - RNA, 19 nt, Artificial Sequence
  Description of Artificial Sequence: Synthetic oligonucleotide
auucagagaacaauccgga

SEQ ID NO: 229602 - RNA, 19 nt, Artificial Sequence
  Description of Artificial Sequence: Synthetic oligonucleotide
uuguauuguguugcgaaaa

SEQ ID NO: 229603 - RNA, 19 nt, Artificial Sequence
  Description of Artificial Sequence: Synthetic oligonucleotide
uuuccgguugcggacuccg

SEQ ID NO: 229604 - RNA, 19 nt, Artificial Sequence
  Description of Artificial Sequence: Synthetic oligonucleotide
acgaucaugguuagaugcg

SEQ ID NO: 229605 - RNA, 19 nt, Artificial Sequence
  Description of Artificial Sequence: Synthetic oligonucleotide
uccguagaaggaacauuca

SEQ ID NO: 229606 - RNA, 19 nt, Artificial Sequence
  Description of Artificial Sequence: Synthetic oligonucleotide
uuccauaguaaguuauguu

SEQ ID NO: 229607 - RNA, 19 nt, Artificial Sequence
  Description of Artificial Sequence: Synthetic oligonucleotide
ggaauagggucauauucug

SEQ ID NO: 229608 - RNA, 19 nt, Artificial Sequence
  Description of Artificial Sequence: Synthetic oligonucleotide
auagcacggaagugauuuc

SEQ ID NO: 229609 - RNA, 19 nt, Artificial Sequence
  Description of Artificial Sequence: Synthetic oligonucleotide
cauaggacauuaaccucug

SEQ ID NO: 229610 - RNA, 19 nt, Artificial Sequence
  Description of Artificial Sequence: Synthetic oligonucleotide
aacaugauuccagccuucu

SEQ ID NO: 229611 - RNA, 19 nt, Artificial Sequence
  Description of Artificial Sequence: Synthetic oligonucleotide
ggaaguaccagcaaccauc

SEQ ID NO: 229612 - RNA, 19 nt, Artificial Sequence
  Description of Artificial Sequence: Synthetic oligonucleotide
uccgucgagaagcccagca

SEQ ID NO: 229613 - RNA, 19 nt, Artificial Sequence
  Description of Artificial Sequence: Synthetic oligonucleotide
uucagagaacaauccggac

SEQ ID NO: 229614 - RNA, 19 nt, Artificial Sequence
  Description of Artificial Sequence: Synthetic oligonucleotide
cuaaguuugcuaagaggca

SEQ ID NO: 229615 - RNA, 19 nt, Artificial Sequence
  Description of Artificial Sequence: Synthetic oligonucleotide
uaugugaaagcccgaccua

SEQ ID NO: 229616 - RNA, 19 nt, Artificial Sequence
  Description of Artificial Sequence: Synthetic oligonucleotide
agugugacauugcauuaaa

SEQ ID NO: 229617 - RNA, 19 nt, Artificial Sequence
  Description of Artificial Sequence: Synthetic oligonucleotide
gaauugauucgaagacaag

SEQ ID NO: 229618 - RNA, 19 nt, Artificial Sequence
  Description of Artificial Sequence: Synthetic oligonucleotide
caguaggaaacguugaucu

SEQ ID NO: 229619 - RNA, 19 nt, Artificial Sequence
  Description of Artificial Sequence: Synthetic oligonucleotide
auauucugcuacuguacaa

SEQ ID NO: 229620 - RNA, 19 nt, Artificial Sequence
  Description of Artificial Sequence: Synthetic oligonucleotide
gcgaaaaugcaaucacagg

SEQ ID NO: 229621 - RNA, 19 nt, Artificial Sequence
  Description of Artificial Sequence: Synthetic oligonucleotide
gggaauaucacaggcuucc

SEQ ID NO: 229622 - RNA, 19 nt, Artificial Sequence
  Description of Artificial Sequence: Synthetic oligonucleotide
gcuaucguugcagacacag

SEQ ID NO: 229623 - RNA, 19 nt, Artificial Sequence
  Description of Artificial Sequence: Synthetic oligonucleotide
cagcuaucguugcagacac

SEQ ID NO: 229624 - RNA, 19 nt, Artificial Sequence
  Description of Artificial Sequence: Synthetic oligonucleotide
gaagccauuugugaaguaa

SEQ ID NO: 229625 - RNA, 19 nt, Artificial Sequence
  Description of Artificial Sequence: Synthetic oligonucleotide
auucgaagacaagcauccc

SEQ ID NO: 229626 - RNA, 19 nt, Artificial Sequence
  Description of Artificial Sequence: Synthetic oligonucleotide
guauuguguugcgaaaaug

SEQ ID NO: 229627 - RNA, 19 nt, Artificial Sequence
  Description of Artificial Sequence: Synthetic oligonucleotide
uugaucgaauuccuugauu

SEQ ID NO: 229628 - RNA, 19 nt, Artificial Sequence
  Description of Artificial Sequence: Synthetic oligonucleotide
cauaauuggccacagaguu

SEQ ID NO: 229629 - RNA, 19 nt, Artificial Sequence
  Description of Artificial Sequence: Synthetic oligonucleotide
agacuccuuucuuucauau

SEQ ID NO: 229630 - RNA, 19 nt, Artificial Sequence
  Description of Artificial Sequence: Synthetic oligonucleotide
aagccuaagggagccauaa

SEQ ID NO: 229631 - RNA, 19 nt, Artificial Sequence
  Description of Artificial Sequence: Synthetic oligonucleotide
aaauccaguaagacuccgu

SEQ ID NO: 229632 - RNA, 19 nt, Artificial Sequence
  Description of Artificial Sequence: Synthetic oligonucleotide
cuugcguaagccuacccaa

SEQ ID NO: 229633 - RNA, 19 nt, Artificial Sequence
  Description of Artificial Sequence: Synthetic oligonucleotide
ugguagagugugacauugc

SEQ ID NO: 229634 - RNA, 19 nt, Artificial Sequence
  Description of Artificial Sequence: Synthetic oligonucleotide
uacccaaggcgauacuuuc

SEQ ID NO: 229635 - RNA, 19 nt, Artificial Sequence
  Description of Artificial Sequence: Synthetic oligonucleotide
ugauuguauuguguugcga

SEQ ID NO: 229636 - RNA, 19 nt, Artificial Sequence
  Description of Artificial Sequence: Synthetic oligonucleotide
agaaguugaucgaauuccu

SEQ ID NO: 229637 - RNA, 19 nt, Artificial Sequence
  Description of Artificial Sequence: Synthetic oligonucleotide
uguuugugaagggcgacau

SEQ ID NO: 229638 - RNA, 19 nt, Artificial Sequence
  Description of Artificial Sequence: Synthetic oligonucleotide
uaagccuacccaaggcgau

SEQ ID NO: 229639 - RNA, 19 nt, Artificial Sequence
  Description of Artificial Sequence: Synthetic oligonucleotide
ucacaguagccgugaucgg

SEQ ID NO: 229640 - RNA, 19 nt, Artificial Sequence
  Description of Artificial Sequence: Synthetic oligonucleotide
caccauucaagcaguauaa

SEQ ID NO: 229641 - RNA, 19 nt, Artificial Sequence
  Description of Artificial Sequence: Synthetic oligonucleotide
aucugauuuugagugcaug

SEQ ID NO: 229642 - RNA, 19 nt, Artificial Sequence
  Description of Artificial Sequence: Synthetic oligonucleotide
gguagagugugacauugca

SEQ ID NO: 229643 - RNA, 19 nt, Artificial Sequence
  Description of Artificial Sequence: Synthetic oligonucleotide
agagugugacauugcauua

SEQ ID NO: 229644 - RNA, 19 nt, Artificial Sequence
  Description of Artificial Sequence: Synthetic oligonucleotide
cuuuagucccgccacugca

SEQ ID NO: 229645 - RNA, 19 nt, Artificial Sequence
  Description of Artificial Sequence: Synthetic oligonucleotide
ggaauugauucgaagacaa

SEQ ID NO: 229646 - RNA, 19 nt, Artificial Sequence
  Description of Artificial Sequence: Synthetic oligonucleotide
agccuacccaaggcgauac

SEQ ID NO: 229647 - RNA, 19 nt, Artificial Sequence
  Description of Artificial Sequence: Synthetic oligonucleotide
ugguuagaugcgaccuaug

SEQ ID NO: 229648 - RNA, 19 nt, Artificial Sequence
  Description of Artificial Sequence: Synthetic oligonucleotide
uuacagcugccaugauuug

SEQ ID NO: 229649 - RNA, 19 nt, Artificial Sequence
  Description of Artificial Sequence: Synthetic oligonucleotide
ugcucucuccgucgagaag

SEQ ID NO: 229650 - RNA, 19 nt, Artificial Sequence
  Description of Artificial Sequence: Synthetic oligonucleotide
aggaaacguugaucuugcg

SEQ ID NO: 229651 - RNA, 19 nt, Artificial Sequence
  Description of Artificial Sequence: Synthetic oligonucleotide
ugccgagaauauauugcau

SEQ ID NO: 229652 - RNA, 19 nt, Artificial Sequence
  Description of Artificial Sequence: Synthetic oligonucleotide
gagagguguuuccgguugc

SEQ ID NO: 229653 - RNA, 19 nt, Artificial Sequence
  Description of Artificial Sequence: Synthetic oligonucleotide
uagaugcgaccuauguuuu

SEQ ID NO: 229654 - RNA, 19 nt, Artificial Sequence
  Description of Artificial Sequence: Synthetic oligonucleotide
gccauuugugaaguaaacc

SEQ ID NO: 229655 - RNA, 19 nt, Artificial Sequence
  Description of Artificial Sequence: Synthetic oligonucleotide
ugcaaggguuugccuuuag

SEQ ID NO: 229656 - RNA, 19 nt, Artificial Sequence
  Description of Artificial Sequence: Synthetic oligonucleotide
aguaggaaacguugaucuu

SEQ ID NO: 229657 - RNA, 19 nt, Artificial Sequence
  Description of Artificial Sequence: Synthetic oligonucleotide
acgaggacacuagcuguac

SEQ ID NO: 229658 - RNA, 19 nt, Artificial Sequence
  Description of Artificial Sequence: Synthetic oligonucleotide
gaucgaauuccuugauugu

SEQ ID NO: 229659 - RNA, 19 nt, Artificial Sequence
  Description of Artificial Sequence: Synthetic oligonucleotide
cacaguacacuuggcuugc

SEQ ID NO: 229660 - RNA, 19 nt, Artificial Sequence
  Description of Artificial Sequence: Synthetic oligonucleotide
cuugacguguggagaggug

SEQ ID NO: 229661 - RNA, 19 nt, Artificial Sequence
  Description of Artificial Sequence: Synthetic oligonucleotide
ugcaaguaaggaggcauua

SEQ ID NO: 229662 - RNA, 19 nt, Artificial Sequence
  Description of Artificial Sequence: Synthetic oligonucleotide
acaggcuguagagaaaauu

SEQ ID NO: 229663 - RNA, 19 nt, Artificial Sequence
  Description of Artificial Sequence: Synthetic oligonucleotide
cuuuauuaucagaaggcuu

SEQ ID NO: 229664 - RNA, 19 nt, Artificial Sequence
  Description of Artificial Sequence: Synthetic oligonucleotide
cugcuacuguacaaccgug

SEQ ID NO: 229665 - RNA, 19 nt, Artificial Sequence
  Description of Artificial Sequence: Synthetic oligonucleotide
augguuagaugcgaccuau

SEQ ID NO: 229666 - RNA, 19 nt, Artificial Sequence
  Description of Artificial Sequence: Synthetic oligonucleotide
gaucuugcguaagccuacc

SEQ ID NO: 229667 - RNA, 19 nt, Artificial Sequence
  Description of Artificial Sequence: Synthetic oligonucleotide
ggggugaagaauuuuauuu

SEQ ID NO: 229668 - RNA, 19 nt, Artificial Sequence
  Description of Artificial Sequence: Synthetic oligonucleotide
aaagcccgaccuacagaag

SEQ ID NO: 229669 - RNA, 19 nt, Artificial Sequence
  Description of Artificial Sequence: Synthetic oligonucleotide
ugggaucauaggacauuaa

SEQ ID NO: 229670 - RNA, 19 nt, Artificial Sequence
  Description of Artificial Sequence: Synthetic oligonucleotide
caauccggaccuugccagc

SEQ ID NO: 229671 - RNA, 19 nt, Artificial Sequence
  Description of Artificial Sequence: Synthetic oligonucleotide
uuccgguugcggacuccgg

SEQ ID NO: 229672 - RNA, 19 nt, Artificial Sequence
  Description of Artificial Sequence: Synthetic oligonucleotide
auauuacacucgauccuca

SEQ ID NO: 229673 - RNA, 19 nt, Artificial Sequence
  Description of Artificial Sequence: Synthetic oligonucleotide
aacgaggacacuagcugua

SEQ ID NO: 229674 - RNA, 19 nt, Artificial Sequence
  Description of Artificial Sequence: Synthetic oligonucleotide
agcccgaccuacagaaggg

SEQ ID NO: 229675 - RNA, 19 nt, Artificial Sequence
  Description of Artificial Sequence: Synthetic oligonucleotide
ccguagaaggaacauucag

SEQ ID NO: 229676 - RNA, 19 nt, Artificial Sequence
  Description of Artificial Sequence: Synthetic oligonucleotide
cucuaauggcccucguaga

SEQ ID NO: 229677 - RNA, 19 nt, Artificial Sequence
  Description of Artificial Sequence: Synthetic oligonucleotide
caaaagaaguugaucgaau

SEQ ID NO: 229678 - RNA, 19 nt, Artificial Sequence
  Description of Artificial Sequence: Synthetic oligonucleotide
aggugucuaucagagcacu

SEQ ID NO: 229679 - RNA, 19 nt, Artificial Sequence
  Description of Artificial Sequence: Synthetic oligonucleotide
uaagccuaagggagccaua

SEQ ID NO: 229680 - RNA, 19 nt, Artificial Sequence
  Description of Artificial Sequence: Synthetic oligonucleotide
gugaucggggcugccacag

SEQ ID NO: 229681 - RNA, 19 nt, Artificial Sequence
  Description of Artificial Sequence: Synthetic oligonucleotide
gagugugacauugcauuaa

SEQ ID NO: 229682 - RNA, 19 nt, Artificial Sequence
  Description of Artificial Sequence: Synthetic oligonucleotide
aguuugcuaagaggcaaaa

SEQ ID NO: 229683 - RNA, 19 nt, Artificial Sequence
  Description of Artificial Sequence: Synthetic oligonucleotide
guaagacuccguagaagga

SEQ ID NO: 229684 - RNA, 19 nt, Artificial Sequence
  Description of Artificial Sequence: Synthetic oligonucleotide
auaggacauuaaccucugu

SEQ ID NO: 229685 - RNA, 19 nt, Artificial Sequence
  Description of Artificial Sequence: Synthetic oligonucleotide
caaacucuaccuccuugga

SEQ ID NO: 229686 - RNA, 19 nt, Artificial Sequence
  Description of Artificial Sequence: Synthetic oligonucleotide
gcacauagcacggaaguga

SEQ ID NO: 229687 - RNA, 19 nt, Artificial Sequence
  Description of Artificial Sequence: Synthetic oligonucleotide
guguugcgaaaaugcaauc

SEQ ID NO: 229688 - RNA, 19 nt, Artificial Sequence
  Description of Artificial Sequence: Synthetic oligonucleotide
gccacuugggacauugccc

SEQ ID NO: 229689 - RNA, 19 nt, Artificial Sequence
  Description of Artificial Sequence: Synthetic oligonucleotide
ggaaacguugaucuugcgu

SEQ ID NO: 229690 - RNA, 19 nt, Artificial Sequence
  Description of Artificial Sequence: Synthetic oligonucleotide
gguuagaugcgaccuaugu

SEQ ID NO: 229691 - RNA, 19 nt, Artificial Sequence
  Description of Artificial Sequence: Synthetic oligonucleotide
guuagaugcgaccuauguu

SEQ ID NO: 229692 - RNA, 19 nt, Artificial Sequence
  Description of Artificial Sequence: Synthetic oligonucleotide
acugcagcgugguguuugu

SEQ ID NO: 229693 - RNA, 19 nt, Artificial Sequence
  Description of Artificial Sequence: Synthetic oligonucleotide
gcgacauguccucccaucc

SEQ ID NO: 229694 - RNA, 19 nt, Artificial Sequence
  Description of Artificial Sequence: Synthetic oligonucleotide
aauggcccucguagaaagu

SEQ ID NO: 229695 - RNA, 19 nt, Artificial Sequence
  Description of Artificial Sequence: Synthetic oligonucleotide
agggcgacauguccuccca

SEQ ID NO: 229696 - RNA, 19 nt, Artificial Sequence
  Description of Artificial Sequence: Synthetic oligonucleotide
cccaaggcgauacuuucug

SEQ ID NO: 229697 - RNA, 19 nt, Artificial Sequence
  Description of Artificial Sequence: Synthetic oligonucleotide
caacgaggacacuagcugu

SEQ ID NO: 229698 - RNA, 19 nt, Artificial Sequence
  Description of Artificial Sequence: Synthetic oligonucleotide
ggcaugcaaguaaggaggc

SEQ ID NO: 229699 - RNA, 19 nt, Artificial Sequence
  Description of Artificial Sequence: Synthetic oligonucleotide
ccgaccuacagaagggcug

SEQ ID NO: 229700 - RNA, 19 nt, Artificial Sequence
  Description of Artificial Sequence: Synthetic oligonucleotide
cgucgagaagcccagcaag

SEQ ID NO: 229701 - RNA, 19 nt, Artificial Sequence
  Description of Artificial Sequence: Synthetic oligonucleotide
ggaauaucacaggcuuccc

SEQ ID NO: 229702 - RNA, 19 nt, Artificial Sequence
  Description of Artificial Sequence: Synthetic oligonucleotide
ggacgugcaaggguuugcc

SEQ ID NO: 229703 - RNA, 19 nt, Artificial Sequence
  Description of Artificial Sequence: Synthetic oligonucleotide
ccaaggcgauacuuucugc

SEQ ID NO: 229704 - RNA, 19 nt, Artificial Sequence
  Description of Artificial Sequence: Synthetic oligonucleotide
cuacuggaauugauucgaa

SEQ ID NO: 229705 - RNA, 19 nt, Artificial Sequence
  Description of Artificial Sequence: Synthetic oligonucleotide
ccgccauggacgugcaagg

SEQ ID NO: 229706 - RNA, 19 nt, Artificial Sequence
  Description of Artificial Sequence: Synthetic oligonucleotide
ggcgacauguccucccauc

SEQ ID NO: 229707 - RNA, 19 nt, Artificial Sequence
  Description of Artificial Sequence: Synthetic oligonucleotide
caugguuagaugcgaccua

SEQ ID NO: 229708 - RNA, 19 nt, Artificial Sequence
  Description of Artificial Sequence: Synthetic oligonucleotide
ccaguaggaaacguugauc

SEQ ID NO: 229709 - RNA, 19 nt, Artificial Sequence
  Description of Artificial Sequence: Synthetic oligonucleotide
ggguuugccuuuagucccg

SEQ ID NO: 229710 - RNA, 19 nt, Artificial Sequence
  Description of Artificial Sequence: Synthetic oligonucleotide
gugaagggcgacauguccu

SEQ ID NO: 229711 - RNA, 19 nt, Artificial Sequence
  Description of Artificial Sequence: Synthetic oligonucleotide
aagccuacccaaggcgaua

SEQ ID NO: 229712 - RNA, 19 nt, Artificial Sequence
  Description of Artificial Sequence: Synthetic oligonucleotide
gcaguacauauucuguggu

SEQ ID NO: 229713 - RNA, 19 nt, Artificial Sequence
  Description of Artificial Sequence: Synthetic oligonucleotide
augcaguacuuaacauuga

SEQ ID NO: 229714 - RNA, 19 nt, Artificial Sequence
  Description of Artificial Sequence: Synthetic oligonucleotide
augcaaguaaggaggcauu

SEQ ID NO: 229715 - RNA, 19 nt, Artificial Sequence
  Description of Artificial Sequence: Synthetic oligonucleotide
guagagugugacauugcau

SEQ ID NO: 229716 - RNA, 19 nt, Artificial Sequence
  Description of Artificial Sequence: Synthetic oligonucleotide
guacaaccguggcaugcaa

SEQ ID NO: 229717 - RNA, 19 nt, Artificial Sequence
  Description of Artificial Sequence: Synthetic oligonucleotide
gacgugcaaggguuugccu

SEQ ID NO: 229718 - RNA, 19 nt, Artificial Sequence
  Description of Artificial Sequence: Synthetic oligonucleotide
gcuugcaacgaggacacua

SEQ ID NO: 229719 - RNA, 19 nt, Artificial Sequence
  Description of Artificial Sequence: Synthetic oligonucleotide
cuaucagagcacuggcaau

SEQ ID NO: 229720 - RNA, 19 nt, Artificial Sequence
  Description of Artificial Sequence: Synthetic oligonucleotide
caguacacuuggcuugcaa

SEQ ID NO: 229721 - RNA, 19 nt, Artificial Sequence
  Description of Artificial Sequence: Synthetic oligonucleotide
uugggacauugcccacuua

SEQ ID NO: 229722 - RNA, 19 nt, Artificial Sequence
  Description of Artificial Sequence: Synthetic oligonucleotide
gaagucaaccacggccacu

SEQ ID NO: 229723 - RNA, 19 nt, Artificial Sequence
  Description of Artificial Sequence: Synthetic oligonucleotide
gggauauaaacaguugguu

SEQ ID NO: 229724 - RNA, 19 nt, Artificial Sequence
  Description of Artificial Sequence: Synthetic oligonucleotide
agaacccuguagggauuca

SEQ ID NO: 229725 - RNA, 19 nt, Artificial Sequence
  Description of Artificial Sequence: Synthetic oligonucleotide
gcucacccugaagucaacc

SEQ ID NO: 229726 - RNA, 19 nt, Artificial Sequence
  Description of Artificial Sequence: Synthetic oligonucleotide
cagaaucauugggcucacc

SEQ ID NO: 229727 - RNA, 19 nt, Artificial Sequence
  Description of Artificial Sequence: Synthetic oligonucleotide
cagcccucucuagguaagc

SEQ ID NO: 229728 - RNA, 19 nt, Artificial Sequence
  Description of Artificial Sequence: Synthetic oligonucleotide
gacuccguagaaggaacau

SEQ ID NO: 229729 - RNA, 19 nt, Artificial Sequence
  Description of Artificial Sequence: Synthetic oligonucleotide
uagccgugaucggggcugc

SEQ ID NO: 229730 - RNA, 19 nt, Artificial Sequence
  Description of Artificial Sequence: Synthetic oligonucleotide
cuaagccuaagggagccau

SEQ ID NO: 229731 - RNA, 19 nt, Artificial Sequence
  Description of Artificial Sequence: Synthetic oligonucleotide
cgccugacgauccccuugg

SEQ ID NO: 229732 - RNA, 19 nt, Artificial Sequence
  Description of Artificial Sequence: Synthetic oligonucleotide
guggggcgccugacgaucc

SEQ ID NO: 229733 - RNA, 19 nt, Artificial Sequence
  Description of Artificial Sequence: Synthetic oligonucleotide
auguuagcucuaagccuaa

SEQ ID NO: 229734 - RNA, 19 nt, Artificial Sequence
  Description of Artificial Sequence: Synthetic oligonucleotide
ccaguaagacuccguagaa

SEQ ID NO: 229735 - RNA, 19 nt, Artificial Sequence
  Description of Artificial Sequence: Synthetic oligonucleotide
agccgugaucggggcugcc

SEQ ID NO: 229736 - RNA, 19 nt, Artificial Sequence
  Description of Artificial Sequence: Synthetic oligonucleotide
guagggauucauggugggu

SEQ ID NO: 229737 - RNA, 19 nt, Artificial Sequence
  Description of Artificial Sequence: Synthetic oligonucleotide
gguggggcgccugacgauc

SEQ ID NO: 229738 - RNA, 19 nt, Artificial Sequence
  Description of Artificial Sequence: Synthetic oligonucleotide
auauuggaauagggucaua

SEQ ID NO: 229739 - RNA, 19 nt, Artificial Sequence
  Description of Artificial Sequence: Synthetic oligonucleotide
ccgugaucggggcugccac

SEQ ID NO: 229740 - RNA, 19 nt, Artificial Sequence
  Description of Artificial Sequence: Synthetic oligonucleotide
gguuugccuuuagucccgc

SEQ ID NO: 229741 - RNA, 19 nt, Artificial Sequence
  Description of Artificial Sequence: Synthetic oligonucleotide
gccauggacgugcaagggu

SEQ ID NO: 229742 - RNA, 19 nt, Artificial Sequence
  Description of Artificial Sequence: Synthetic oligonucleotide
ggcaaagccugacauucuu

SEQ ID NO: 229743 - RNA, 19 nt, Artificial Sequence
  Description of Artificial Sequence: Synthetic oligonucleotide
cuccgcuccuacuuccagu

SEQ ID NO: 229744 - RNA, 19 nt, Artificial Sequence
  Description of Artificial Sequence: Synthetic oligonucleotide
gcccgaccuacagaagggc

SEQ ID NO: 229745 - RNA, 19 nt, Artificial Sequence
  Description of Artificial Sequence: Synthetic oligonucleotide
cuccgucgagaagcccagc

SEQ ID NO: 229746 - RNA, 19 nt, Artificial Sequence
  Description of Artificial Sequence: Synthetic oligonucleotide
gcaugcaaguaaggaggca

SEQ ID NO: 229747 - RNA, 19 nt, Artificial Sequence
  Description of Artificial Sequence: Synthetic oligonucleotide
cugcagcgugguguuugug

SEQ ID NO: 229748 - RNA, 19 nt, Artificial Sequence
  Description of Artificial Sequence: Synthetic oligonucleotide
ccauggacgugcaaggguu

SEQ ID NO: 229749 - RNA, 19 nt, Artificial Sequence
  Description of Artificial Sequence: Synthetic oligonucleotide
cauggacgugcaaggguuu

SEQ ID NO: 229750 - RNA, 19 nt, Artificial Sequence
  Description of Artificial Sequence: Synthetic oligonucleotide
gcucacccggaagccacug

SEQ ID NO: 229751 - RNA, 19 nt, Artificial Sequence
  Description of Artificial Sequence: Synthetic oligonucleotide
gcccacuuacagggaacug

SEQ ID NO: 229752 - RNA, 19 nt, Artificial Sequence
  Description of Artificial Sequence: Synthetic oligonucleotide
ccugacgauccccuuggua

SEQ ID NO: 229753 - RNA, 19 nt, Artificial Sequence
  Description of Artificial Sequence: Synthetic oligonucleotide
cgaggacacuagcuguaca

SEQ ID NO: 229754 - RNA, 19 nt, Artificial Sequence
  Description of Artificial Sequence: Synthetic oligonucleotide
ccuugacguguggagaggu

SEQ ID NO: 229755 - RNA, 19 nt, Artificial Sequence
  Description of Artificial Sequence: Synthetic oligonucleotide
ccgcuccuacuuccaguuc

SEQ ID NO: 229756 - RNA, 19 nt, Artificial Sequence
  Description of Artificial Sequence: Synthetic oligonucleotide
gcgauacuuucugcugugu

SEQ ID NO: 229757 - RNA, 19 nt, Artificial Sequence
  Description of Artificial Sequence: Synthetic oligonucleotide
ccuacccaaggcgauacuu

SEQ ID NO: 229758 - RNA, 19 nt, Artificial Sequence
  Description of Artificial Sequence: Synthetic oligonucleotide
ccaaaccccacaggcugua

SEQ ID NO: 229759 - RNA, 19 nt, Artificial Sequence
  Description of Artificial Sequence: Synthetic oligonucleotide
gggcgacauguccucccau

SEQ ID NO: 229760 - RNA, 19 nt, Artificial Sequence
  Description of Artificial Sequence: Synthetic oligonucleotide
gccugacgauccccuuggu

SEQ ID NO: 229761 - RNA, 19 nt, Artificial Sequence
  Description of Artificial Sequence: Synthetic oligonucleotide
uuuaaauugaucuacaugc

SEQ ID NO: 229762 - RNA, 19 nt, Artificial Sequence
  Description of Artificial Sequence: Synthetic oligonucleotide
uucaauaacacuuaguugg

SEQ ID NO: 229763 - RNA, 19 nt, Artificial Sequence
  Description of Artificial Sequence: Synthetic oligonucleotide
auuacauuuacucagggac

SEQ ID NO: 229764 - RNA, 19 nt, Artificial Sequence
  Description of Artificial Sequence: Synthetic oligonucleotide
aaaucaagcuucuugaauc

SEQ ID NO: 229765 - RNA, 19 nt, Artificial Sequence
  Description of Artificial Sequence: Synthetic oligonucleotide
aauuguacaaucuucuauc

SEQ ID NO: 229766 - RNA, 19 nt, Artificial Sequence
  Description of Artificial Sequence: Synthetic oligonucleotide
ugugaaauaaaaguaaggg

SEQ ID NO: 229767 - RNA, 19 nt, Artificial Sequence
  Description of Artificial Sequence: Synthetic oligonucleotide
aacagauagggauuaaacg

SEQ ID NO: 229768 - RNA, 19 nt, Artificial Sequence
  Description of Artificial Sequence: Synthetic oligonucleotide
aauuaugcaaauuauguaa

SEQ ID NO: 229769 - RNA, 19 nt, Artificial Sequence
  Description of Artificial Sequence: Synthetic oligonucleotide
agauauagaaagcauuugc

SEQ ID NO: 229770 - RNA, 19 nt, Artificial Sequence
  Description of Artificial Sequence: Synthetic oligonucleotide
ucgaauaugucuauuaccc

SEQ ID NO: 229771 - RNA, 19 nt, Artificial Sequence
  Description of Artificial Sequence: Synthetic oligonucleotide
aaagacaccaagcaccggg

SEQ ID NO: 229772 - RNA, 19 nt, Artificial Sequence
  Description of Artificial Sequence: Synthetic oligonucleotide
uauucagagauauaaauaa

SEQ ID NO: 229773 - RNA, 19 nt, Artificial Sequence
  Description of Artificial Sequence: Synthetic oligonucleotide
uuugcuaaaauauuuguaa

SEQ ID NO: 229774 - RNA, 19 nt, Artificial Sequence
  Description of Artificial Sequence: Synthetic oligonucleotide
uuauccauaucacuaauca

SEQ ID NO: 229775 - RNA, 19 nt, Artificial Sequence
  Description of Artificial Sequence: Synthetic oligonucleotide
uuauccgcauuuauuaugg

SEQ ID NO: 229776 - RNA, 19 nt, Artificial Sequence
  Description of Artificial Sequence: Synthetic oligonucleotide
gaagcaaagauauucuaag

SEQ ID NO: 229777 - RNA, 19 nt, Artificial Sequence
  Description of Artificial Sequence: Synthetic oligonucleotide
ugugugaaauaaaaguaag

SEQ ID NO: 229778 - RNA, 19 nt, Artificial Sequence
  Description of Artificial Sequence: Synthetic oligonucleotide
auauaaauaaaguuacaga

SEQ ID NO: 229779 - RNA, 19 nt, Artificial Sequence
  Description of Artificial Sequence: Synthetic oligonucleotide
acuuguaaaguauaaauau

SEQ ID NO: 229780 - RNA, 19 nt, Artificial Sequence
  Description of Artificial Sequence: Synthetic oligonucleotide
aaccaauuguaauagaaaa

SEQ ID NO: 229781 - RNA, 19 nt, Artificial Sequence
  Description of Artificial Sequence: Synthetic oligonucleotide
aaaacuauguagggaagac

SEQ ID NO: 229782 - RNA, 19 nt, Artificial Sequence
  Description of Artificial Sequence: Synthetic oligonucleotide
gaauaugucuauuacccgc

SEQ ID NO: 229783 - RNA, 19 nt, Artificial Sequence
  Description of Artificial Sequence: Synthetic oligonucleotide
ugcaaauuauguaaacaag

SEQ ID NO: 229784 - RNA, 19 nt, Artificial Sequence
  Description of Artificial Sequence: Synthetic oligonucleotide
aguucaauaacacuuaguu

SEQ ID NO: 229785 - RNA, 19 nt, Artificial Sequence
  Description of Artificial Sequence: Synthetic oligonucleotide
aauaaaguuacagacucgu

SEQ ID NO: 229786 - RNA, 19 nt, Artificial Sequence
  Description of Artificial Sequence: Synthetic oligonucleotide
aaaccuuaaagugcuacac

SEQ ID NO: 229787 - RNA, 19 nt, Artificial Sequence
  Description of Artificial Sequence: Synthetic oligonucleotide
auuauaugauuucuuuggg

SEQ ID NO: 229788 - RNA, 19 nt, Artificial Sequence
  Description of Artificial Sequence: Synthetic oligonucleotide
uugaucuacaugcaaaacu

SEQ ID NO: 229789 - RNA, 19 nt, Artificial Sequence
  Description of Artificial Sequence: Synthetic oligonucleotide
accuuaaagugcuacacgg

SEQ ID NO: 229790 - RNA, 19 nt, Artificial Sequence
  Description of Artificial Sequence: Synthetic oligonucleotide
uuguguauaaugaagcaaa

SEQ ID NO: 229791 - RNA, 19 nt, Artificial Sequence
  Description of Artificial Sequence: Synthetic oligonucleotide
aaguaaggguguuugaugu

SEQ ID NO: 229792 - RNA, 19 nt, Artificial Sequence
  Description of Artificial Sequence: Synthetic oligonucleotide
caaagaaccggaauugucc

SEQ ID NO: 229793 - RNA, 19 nt, Artificial Sequence
  Description of Artificial Sequence: Synthetic oligonucleotide
auucuaagccauuauauga

SEQ ID NO: 229794 - RNA, 19 nt, Artificial Sequence
  Description of Artificial Sequence: Synthetic oligonucleotide
uaauagggcauuaacaaau

SEQ ID NO: 229795 - RNA, 19 nt, Artificial Sequence
  Description of Artificial Sequence: Synthetic oligonucleotide
uguaaaguauaaauauaga

SEQ ID NO: 229796 - RNA, 19 nt, Artificial Sequence
  Description of Artificial Sequence: Synthetic oligonucleotide
aacgccagccaagauaugc

SEQ ID NO: 229797 - RNA, 19 nt, Artificial Sequence
  Description of Artificial Sequence: Synthetic oligonucleotide
gaaauagcuggccuaaccc

SEQ ID NO: 229798 - RNA, 19 nt, Artificial Sequence
  Description of Artificial Sequence: Synthetic oligonucleotide
uauaaaaccacaacugcua

SEQ ID NO: 229799 - RNA, 19 nt, Artificial Sequence
  Description of Artificial Sequence: Synthetic oligonucleotide
aguaccuuugcagaaaagg

SEQ ID NO: 229800 - RNA, 19 nt, Artificial Sequence
  Description of Artificial Sequence: Synthetic oligonucleotide
uauuaagucauuauccaua

SEQ ID NO: 229801 - RNA, 19 nt, Artificial Sequence
  Description of Artificial Sequence: Synthetic oligonucleotide
uauucuaagccauuauaug

SEQ ID NO: 229802 - RNA, 19 nt, Artificial Sequence
  Description of Artificial Sequence: Synthetic oligonucleotide
aauugaucuacaugcaaaa

SEQ ID NO: 229803 - RNA, 19 nt, Artificial Sequence
  Description of Artificial Sequence: Synthetic oligonucleotide
ugcauauagauuagcaaga

SEQ ID NO: 229804 - RNA, 19 nt, Artificial Sequence
  Description of Artificial Sequence: Synthetic oligonucleotide
uacacggaguuauugagag

SEQ ID NO: 229805 - RNA, 19 nt, Artificial Sequence
  Description of Artificial Sequence: Synthetic oligonucleotide
auauagauuagcaagauuu

SEQ ID NO: 229806 - RNA, 19 nt, Artificial Sequence
  Description of Artificial Sequence: Synthetic oligonucleotide
aauguuuuacuuccagcca

SEQ ID NO: 229807 - RNA, 19 nt, Artificial Sequence
  Description of Artificial Sequence: Synthetic oligonucleotide
aagccaaccuacuaaauau

SEQ ID NO: 229808 - RNA, 19 nt, Artificial Sequence
  Description of Artificial Sequence: Synthetic oligonucleotide
uaucaaucucucaaaggag

SEQ ID NO: 229809 - RNA, 19 nt, Artificial Sequence
  Description of Artificial Sequence: Synthetic oligonucleotide
auuaaagccaaccuacuaa

SEQ ID NO: 229810 - RNA, 19 nt, Artificial Sequence
  Description of Artificial Sequence: Synthetic oligonucleotide
ucuucuaucuacauauaaa

SEQ ID NO: 229811 - RNA, 19 nt, Artificial Sequence
  Description of Artificial Sequence: Synthetic oligonucleotide
agagauauaaauaaaguua

SEQ ID NO: 229812 - RNA, 19 nt, Artificial Sequence
  Description of Artificial Sequence: Synthetic oligonucleotide
auaacacuuaguuggcuuc

SEQ ID NO: 229813 - RNA, 19 nt, Artificial Sequence
  Description of Artificial Sequence: Synthetic oligonucleotide
gauaaugucaagugguaga

SEQ ID NO: 229814 - RNA, 19 nt, Artificial Sequence
  Description of Artificial Sequence: Synthetic oligonucleotide
uauguagggaagacuauca

SEQ ID NO: 229815 - RNA, 19 nt, Artificial Sequence
  Description of Artificial Sequence: Synthetic oligonucleotide
uuaaauugaucuacaugca

SEQ ID NO: 229816 - RNA, 19 nt, Artificial Sequence
  Description of Artificial Sequence: Synthetic oligonucleotide
cuuaguuggcuucaugagg

SEQ ID NO: 229817 - RNA, 19 nt, Artificial Sequence
  Description of Artificial Sequence: Synthetic oligonucleotide
aacugcguaucuuucaggu

SEQ ID NO: 229818 - RNA, 19 nt, Artificial Sequence
  Description of Artificial Sequence: Synthetic oligonucleotide
auagggcauuaacaaaugc

SEQ ID NO: 229819 - RNA, 19 nt, Artificial Sequence
  Description of Artificial Sequence: Synthetic oligonucleotide
aaaguguugggugguauuc

SEQ ID NO: 229820 - RNA, 19 nt, Artificial Sequence
  Description of Artificial Sequence: Synthetic oligonucleotide
aaagaaccggaauugucca

SEQ ID NO: 229821 - RNA, 19 nt, Artificial Sequence
  Description of Artificial Sequence: Synthetic oligonucleotide
uuuuguggauaucuaggcc

SEQ ID NO: 229822 - RNA, 19 nt, Artificial Sequence
  Description of Artificial Sequence: Synthetic oligonucleotide
uguguauaaugaagcaaag

SEQ ID NO: 229823 - RNA, 19 nt, Artificial Sequence
  Description of Artificial Sequence: Synthetic oligonucleotide
auaacagcgacuauaaagu

SEQ ID NO: 229824 - RNA, 19 nt, Artificial Sequence
  Description of Artificial Sequence: Synthetic oligonucleotide
auagauacggaaagcaaac

SEQ ID NO: 229825 - RNA, 19 nt, Artificial Sequence
  Description of Artificial Sequence: Synthetic oligonucleotide
agaucaaaccacuggcugg

SEQ ID NO: 229826 - RNA, 19 nt, Artificial Sequence
  Description of Artificial Sequence: Synthetic oligonucleotide
uuacccgcuguacuaaagg

SEQ ID NO: 229827 - RNA, 19 nt, Artificial Sequence
  Description of Artificial Sequence: Synthetic oligonucleotide
auagauacuuucuuguuau

SEQ ID NO: 229828 - RNA, 19 nt, Artificial Sequence
  Description of Artificial Sequence: Synthetic oligonucleotide
caaagagucacacauccac

SEQ ID NO: 229829 - RNA, 19 nt, Artificial Sequence
  Description of Artificial Sequence: Synthetic oligonucleotide
accuacuaaauauauagaa

SEQ ID NO: 229830 - RNA, 19 nt, Artificial Sequence
  Description of Artificial Sequence: Synthetic oligonucleotide
accggaauuguccaaauca

SEQ ID NO: 229831 - RNA, 19 nt, Artificial Sequence
  Description of Artificial Sequence: Synthetic oligonucleotide
ugugcucaauuuaauauuc

SEQ ID NO: 229832 - RNA, 19 nt, Artificial Sequence
  Description of Artificial Sequence: Synthetic oligonucleotide
uauagauacuuucuuguua

SEQ ID NO: 229833 - RNA, 19 nt, Artificial Sequence
  Description of Artificial Sequence: Synthetic oligonucleotide
aagaguuccccauuggaaa

SEQ ID NO: 229834 - RNA, 19 nt, Artificial Sequence
  Description of Artificial Sequence: Synthetic oligonucleotide
gauuucacaacaugacgug

SEQ ID NO: 229835 - RNA, 19 nt, Artificial Sequence
  Description of Artificial Sequence: Synthetic oligonucleotide
aaucaugugggcaaaacaa

SEQ ID NO: 229836 - RNA, 19 nt, Artificial Sequence
  Description of Artificial Sequence: Synthetic oligonucleotide
ggugguauucuucaaagag

SEQ ID NO: 229837 - RNA, 19 nt, Artificial Sequence
  Description of Artificial Sequence: Synthetic oligonucleotide
aaagccaaccuacuaaaua

SEQ ID NO: 229838 - RNA, 19 nt, Artificial Sequence
  Description of Artificial Sequence: Synthetic oligonucleotide
uuaugucacacaaauuuau

SEQ ID NO: 229839 - RNA, 19 nt, Artificial Sequence
  Description of Artificial Sequence: Synthetic oligonucleotide
uuauaugauuucuuugggu

SEQ ID NO: 229840 - RNA, 19 nt, Artificial Sequence
  Description of Artificial Sequence: Synthetic oligonucleotide
uuaaacgcugcucagcaau

SEQ ID NO: 229841 - RNA, 19 nt, Artificial Sequence
  Description of Artificial Sequence: Synthetic oligonucleotide
uuacauuuacucagggaca

SEQ ID NO: 229842 - RNA, 19 nt, Artificial Sequence
  Description of Artificial Sequence: Synthetic oligonucleotide
aagacuaguucccucuuga

SEQ ID NO: 229843 - RNA, 19 nt, Artificial Sequence
  Description of Artificial Sequence: Synthetic oligonucleotide
ucuucuaugcauauagauu

SEQ ID NO: 229844 - RNA, 19 nt, Artificial Sequence
  Description of Artificial Sequence: Synthetic oligonucleotide
uccgcauuuauuaugguuu

SEQ ID NO: 229845 - RNA, 19 nt, Artificial Sequence
  Description of Artificial Sequence: Synthetic oligonucleotide
uaaauugaucuacaugcaa

SEQ ID NO: 229846 - RNA, 19 nt, Artificial Sequence
  Description of Artificial Sequence: Synthetic oligonucleotide
uuaaagccaaccuacuaaa

SEQ ID NO: 229847 - RNA, 19 nt, Artificial Sequence
  Description of Artificial Sequence: Synthetic oligonucleotide
ugagcagaucuucagagau

SEQ ID NO: 229848 - RNA, 19 nt, Artificial Sequence
  Description of Artificial Sequence: Synthetic oligonucleotide
acauacuuuuaugucacac

SEQ ID NO: 229849 - RNA, 19 nt, Artificial Sequence
  Description of Artificial Sequence: Synthetic oligonucleotide
agauacggaaagcaaaccu

SEQ ID NO: 229850 - RNA, 19 nt, Artificial Sequence
  Description of Artificial Sequence: Synthetic oligonucleotide
uuguacucuaacauuuugu

SEQ ID NO: 229851 - RNA, 19 nt, Artificial Sequence
  Description of Artificial Sequence: Synthetic oligonucleotide
auucaacccgcccuuuacc

SEQ ID NO: 229852 - RNA, 19 nt, Artificial Sequence
  Description of Artificial Sequence: Synthetic oligonucleotide
gauuguaagccacguacug

SEQ ID NO: 229853 - RNA, 19 nt, Artificial Sequence
  Description of Artificial Sequence: Synthetic oligonucleotide
ugucgaauaugucuauuac

SEQ ID NO: 229854 - RNA, 19 nt, Artificial Sequence
  Description of Artificial Sequence: Synthetic oligonucleotide
aaaaguaaggguguuugau

SEQ ID NO: 229855 - RNA, 19 nt, Artificial Sequence
  Description of Artificial Sequence: Synthetic oligonucleotide
guaauuaagguaaauaaua

SEQ ID NO: 229856 - RNA, 19 nt, Artificial Sequence
  Description of Artificial Sequence: Synthetic oligonucleotide
aguaucagccugaagcagc

SEQ ID NO: 229857 - RNA, 19 nt, Artificial Sequence
  Description of Artificial Sequence: Synthetic oligonucleotide
caacagauagggauuaaac

SEQ ID NO: 229858 - RNA, 19 nt, Artificial Sequence
  Description of Artificial Sequence: Synthetic oligonucleotide
agggauuaaacgcugcuca

SEQ ID NO: 229859 - RNA, 19 nt, Artificial Sequence
  Description of Artificial Sequence: Synthetic oligonucleotide
aaaacuaaccagaauguuu

SEQ ID NO: 229860 - RNA, 19 nt, Artificial Sequence
  Description of Artificial Sequence: Synthetic oligonucleotide
ugggugguauucuucaaag

SEQ ID NO: 229861 - RNA, 19 nt, Artificial Sequence
  Description of Artificial Sequence: Synthetic oligonucleotide
gagaguaggaguucaauaa

SEQ ID NO: 229862 - RNA, 19 nt, Artificial Sequence
  Description of Artificial Sequence: Synthetic oligonucleotide
aaacuaaccagaauguuuu

SEQ ID NO: 229863 - RNA, 19 nt, Artificial Sequence
  Description of Artificial Sequence: Synthetic oligonucleotide
acagcgacuauaaaguauc

SEQ ID NO: 229864 - RNA, 19 nt, Artificial Sequence
  Description of Artificial Sequence: Synthetic oligonucleotide
aaauugaucuacaugcaaa

SEQ ID NO: 229865 - RNA, 19 nt, Artificial Sequence
  Description of Artificial Sequence: Synthetic oligonucleotide
uuaccuugauucaacccgc

SEQ ID NO: 229866 - RNA, 19 nt, Artificial Sequence
  Description of Artificial Sequence: Synthetic oligonucleotide
uguacucuaacauuuuguu

SEQ ID NO: 229867 - RNA, 19 nt, Artificial Sequence
  Description of Artificial Sequence: Synthetic oligonucleotide
aguaggaguucaauaacac

SEQ ID NO: 229868 - RNA, 19 nt, Artificial Sequence
  Description of Artificial Sequence: Synthetic oligonucleotide
gucgaauaugucuauuacc

SEQ ID NO: 229869 - RNA, 19 nt, Artificial Sequence
  Description of Artificial Sequence: Synthetic oligonucleotide
caugacauacuuuuauguc

SEQ ID NO: 229870 - RNA, 19 nt, Artificial Sequence
  Description of Artificial Sequence: Synthetic oligonucleotide
ucuauggacacagaaucca

SEQ ID NO: 229871 - RNA, 19 nt, Artificial Sequence
  Description of Artificial Sequence: Synthetic oligonucleotide
cuuauccgcauuuauuaug

SEQ ID NO: 229872 - RNA, 19 nt, Artificial Sequence
  Description of Artificial Sequence: Synthetic oligonucleotide
auaacugccucagaaaacu

SEQ ID NO: 229873 - RNA, 19 nt, Artificial Sequence
  Description of Artificial Sequence: Synthetic oligonucleotide
aacuauguagggaagacua

SEQ ID NO: 229874 - RNA, 19 nt, Artificial Sequence
  Description of Artificial Sequence: Synthetic oligonucleotide
aagugguagaacaugacau

SEQ ID NO: 229875 - RNA, 19 nt, Artificial Sequence
  Description of Artificial Sequence: Synthetic oligonucleotide
acuaaccagaauguuuuac

SEQ ID NO: 229876 - RNA, 19 nt, Artificial Sequence
  Description of Artificial Sequence: Synthetic oligonucleotide
acuccuguuauaaaaccac

SEQ ID NO: 229877 - RNA, 19 nt, Artificial Sequence
  Description of Artificial Sequence: Synthetic oligonucleotide
ccuggaaauauauucagag

SEQ ID NO: 229878 - RNA, 19 nt, Artificial Sequence
  Description of Artificial Sequence: Synthetic oligonucleotide
gauacuuucuuguuauaaa

SEQ ID NO: 229879 - RNA, 19 nt, Artificial Sequence
  Description of Artificial Sequence: Synthetic oligonucleotide
uuacauguaguggagauuu

SEQ ID NO: 229880 - RNA, 19 nt, Artificial Sequence
  Description of Artificial Sequence: Synthetic oligonucleotide
uggaaaauguggcuucaca

SEQ ID NO: 229881 - RNA, 19 nt, Artificial Sequence
  Description of Artificial Sequence: Synthetic oligonucleotide
aguuguguauaaugaagca

SEQ ID NO: 229882 - RNA, 19 nt, Artificial Sequence
  Description of Artificial Sequence: Synthetic oligonucleotide
uaagccauuauaugauuuc

SEQ ID NO: 229883 - RNA, 19 nt, Artificial Sequence
  Description of Artificial Sequence: Synthetic oligonucleotide
ugcucagcaauaagacacg

SEQ ID NO: 229884 - RNA, 19 nt, Artificial Sequence
  Description of Artificial Sequence: Synthetic oligonucleotide
auuggaaauauagccaucu

SEQ ID NO: 229885 - RNA, 19 nt, Artificial Sequence
  Description of Artificial Sequence: Synthetic oligonucleotide
uucuaugcauauagauuag

SEQ ID NO: 229886 - RNA, 19 nt, Artificial Sequence
  Description of Artificial Sequence: Synthetic oligonucleotide
uuacuuccagccaauagua

SEQ ID NO: 229887 - RNA, 19 nt, Artificial Sequence
  Description of Artificial Sequence: Synthetic oligonucleotide
uauagauuagcaagauuuu

SEQ ID NO: 229888 - RNA, 19 nt, Artificial Sequence
  Description of Artificial Sequence: Synthetic oligonucleotide
caugacguguaucaugcag

SEQ ID NO: 229889 - RNA, 19 nt, Artificial Sequence
  Description of Artificial Sequence: Synthetic oligonucleotide
agaccuccaacagauaggg

SEQ ID NO: 229890 - RNA, 19 nt, Artificial Sequence
  Description of Artificial Sequence: Synthetic oligonucleotide
aacuuguaaaguauaaaua

SEQ ID NO: 229891 - RNA, 19 nt, Artificial Sequence
  Description of Artificial Sequence: Synthetic oligonucleotide
gugugaaauaaaaguaagg

SEQ ID NO: 229892 - RNA, 19 nt, Artificial Sequence
  Description of Artificial Sequence: Synthetic oligonucleotide
aauaugucuauuacccgcu

SEQ ID NO: 229893 - RNA, 19 nt, Artificial Sequence
  Description of Artificial Sequence: Synthetic oligonucleotide
aacuagaccuccaacagau

SEQ ID NO: 229894 - RNA, 19 nt, Artificial Sequence
  Description of Artificial Sequence: Synthetic oligonucleotide
gcgacuauaaaguaucagc

SEQ ID NO: 229895 - RNA, 19 nt, Artificial Sequence
  Description of Artificial Sequence: Synthetic oligonucleotide
guaagccacguacugaccc

SEQ ID NO: 229896 - RNA, 19 nt, Artificial Sequence
  Description of Artificial Sequence: Synthetic oligonucleotide
uguuguaacucaggcagag

SEQ ID NO: 229897 - RNA, 19 nt, Artificial Sequence
  Description of Artificial Sequence: Synthetic oligonucleotide
ucuauuacccgcuguacua

SEQ ID NO: 229898 - RNA, 19 nt, Artificial Sequence
  Description of Artificial Sequence: Synthetic oligonucleotide
auugaucuacaugcaaaac

SEQ ID NO: 229899 - RNA, 19 nt, Artificial Sequence
  Description of Artificial Sequence: Synthetic oligonucleotide
uacccgcuguacuaaaggg

SEQ ID NO: 229900 - RNA, 19 nt, Artificial Sequence
  Description of Artificial Sequence: Synthetic oligonucleotide
ugauaugcucuuuuccugu

SEQ ID NO: 229901 - RNA, 19 nt, Artificial Sequence
  Description of Artificial Sequence: Synthetic oligonucleotide
uagguuucgagggacgcgg

SEQ ID NO: 229902 - RNA, 19 nt, Artificial Sequence
  Description of Artificial Sequence: Synthetic oligonucleotide
uccuguuauaaaaccacaa

SEQ ID NO: 229903 - RNA, 19 nt, Artificial Sequence
  Description of Artificial Sequence: Synthetic oligonucleotide
aaccggaauuguccaaauc

SEQ ID NO: 229904 - RNA, 19 nt, Artificial Sequence
  Description of Artificial Sequence: Synthetic oligonucleotide
agaaguuguguauaaugaa

SEQ ID NO: 229905 - RNA, 19 nt, Artificial Sequence
  Description of Artificial Sequence: Synthetic oligonucleotide
ucauuaaaauaucgauagu

SEQ ID NO: 229906 - RNA, 19 nt, Artificial Sequence
  Description of Artificial Sequence: Synthetic oligonucleotide
agggaagacuaucauauaa

SEQ ID NO: 229907 - RNA, 19 nt, Artificial Sequence
  Description of Artificial Sequence: Synthetic oligonucleotide
ucuacaugcaaaacuccau

SEQ ID NO: 229908 - RNA, 19 nt, Artificial Sequence
  Description of Artificial Sequence: Synthetic oligonucleotide
guacuaaaggguucuguug

SEQ ID NO: 229909 - RNA, 19 nt, Artificial Sequence
  Description of Artificial Sequence: Synthetic oligonucleotide
aauagggcauuaacaaaug

SEQ ID NO: 229910 - RNA, 19 nt, Artificial Sequence
  Description of Artificial Sequence: Synthetic oligonucleotide
gaauuguccaaaucaagcu

SEQ ID NO: 229911 - RNA, 19 nt, Artificial Sequence
  Description of Artificial Sequence: Synthetic oligonucleotide
cuacaugcaaaacuccaug

SEQ ID NO: 229912 - RNA, 19 nt, Artificial Sequence
  Description of Artificial Sequence: Synthetic oligonucleotide
ucaaaccuuaaagugcuac

SEQ ID NO: 229913 - RNA, 19 nt, Artificial Sequence
  Description of Artificial Sequence: Synthetic oligonucleotide
acuuacauguaguggagau

SEQ ID NO: 229914 - RNA, 19 nt, Artificial Sequence
  Description of Artificial Sequence: Synthetic oligonucleotide
uaaaaguaaggguguuuga

SEQ ID NO: 229915 - RNA, 19 nt, Artificial Sequence
  Description of Artificial Sequence: Synthetic oligonucleotide
auuauccauaucacuaauc

SEQ ID NO: 229916 - RNA, 19 nt, Artificial Sequence
  Description of Artificial Sequence: Synthetic oligonucleotide
uuucacaacaugacgugua

SEQ ID NO: 229917 - RNA, 19 nt, Artificial Sequence
  Description of Artificial Sequence: Synthetic oligonucleotide
ggaauuguccaaaucaagc

SEQ ID NO: 229918 - RNA, 19 nt, Artificial Sequence
  Description of Artificial Sequence: Synthetic oligonucleotide
uaaaccaugcccuccccac

SEQ ID NO: 229919 - RNA, 19 nt, Artificial Sequence
  Description of Artificial Sequence: Synthetic oligonucleotide
gggauuguaagccacguac

SEQ ID NO: 229920 - RNA, 19 nt, Artificial Sequence
  Description of Artificial Sequence: Synthetic oligonucleotide
augucaugcaaagacacca

SEQ ID NO: 229921 - RNA, 19 nt, Artificial Sequence
  Description of Artificial Sequence: Synthetic oligonucleotide
uaaaggguucuguuguaac

SEQ ID NO: 229922 - RNA, 19 nt, Artificial Sequence
  Description of Artificial Sequence: Synthetic oligonucleotide
augucacacaaauuuauua

SEQ ID NO: 229923 - RNA, 19 nt, Artificial Sequence
  Description of Artificial Sequence: Synthetic oligonucleotide
aagccauuauaugauuucu

SEQ ID NO: 229924 - RNA, 19 nt, Artificial Sequence
  Description of Artificial Sequence: Synthetic oligonucleotide
cuuaucgccuuugacacug

SEQ ID NO: 229925 - RNA, 19 nt, Artificial Sequence
  Description of Artificial Sequence: Synthetic oligonucleotide
agagucacacauccaccac

SEQ ID NO: 229926 - RNA, 19 nt, Artificial Sequence
  Description of Artificial Sequence: Synthetic oligonucleotide
aucaugugggcaaaacaac

SEQ ID NO: 229927 - RNA, 19 nt, Artificial Sequence
  Description of Artificial Sequence: Synthetic oligonucleotide
aaacuauguagggaagacu

SEQ ID NO: 229928 - RNA, 19 nt, Artificial Sequence
  Description of Artificial Sequence: Synthetic oligonucleotide
uccaccauacugauaugcu

SEQ ID NO: 229929 - RNA, 19 nt, Artificial Sequence
  Description of Artificial Sequence: Synthetic oligonucleotide
accuugauucaacccgccc

SEQ ID NO: 229930 - RNA, 19 nt, Artificial Sequence
  Description of Artificial Sequence: Synthetic oligonucleotide
aagguaaauaauagggcau

SEQ ID NO: 229931 - RNA, 19 nt, Artificial Sequence
  Description of Artificial Sequence: Synthetic oligonucleotide
gcggcuauagguuucgagg

SEQ ID NO: 229932 - RNA, 19 nt, Artificial Sequence
  Description of Artificial Sequence: Synthetic oligonucleotide
ugucaagugguagaacaug

SEQ ID NO: 229933 - RNA, 19 nt, Artificial Sequence
  Description of Artificial Sequence: Synthetic oligonucleotide
aucacuaaucaugugggca

SEQ ID NO: 229934 - RNA, 19 nt, Artificial Sequence
  Description of Artificial Sequence: Synthetic oligonucleotide
aacuccuguuauaaaacca

SEQ ID NO: 229935 - RNA, 19 nt, Artificial Sequence
  Description of Artificial Sequence: Synthetic oligonucleotide
cuauagguuucgagggacg

SEQ ID NO: 229936 - RNA, 19 nt, Artificial Sequence
  Description of Artificial Sequence: Synthetic oligonucleotide
aucuucuaucuacauauaa

SEQ ID NO: 229937 - RNA, 19 nt, Artificial Sequence
  Description of Artificial Sequence: Synthetic oligonucleotide
uaucacuaaucaugugggc

SEQ ID NO: 229938 - RNA, 19 nt, Artificial Sequence
  Description of Artificial Sequence: Synthetic oligonucleotide
cacguacugacccagagga

SEQ ID NO: 229939 - RNA, 19 nt, Artificial Sequence
  Description of Artificial Sequence: Synthetic oligonucleotide
auagggauuaaacgcugcu

SEQ ID NO: 229940 - RNA, 19 nt, Artificial Sequence
  Description of Artificial Sequence: Synthetic oligonucleotide
uccacgcucaaagaaccgg

SEQ ID NO: 229941 - RNA, 19 nt, Artificial Sequence
  Description of Artificial Sequence: Synthetic oligonucleotide
agagaguaggaguucaaua

SEQ ID NO: 229942 - RNA, 19 nt, Artificial Sequence
  Description of Artificial Sequence: Synthetic oligonucleotide
uauagguuucgagggacgc

SEQ ID NO: 229943 - RNA, 19 nt, Artificial Sequence
  Description of Artificial Sequence: Synthetic oligonucleotide
ucaaagagucacacaucca

SEQ ID NO: 229944 - RNA, 19 nt, Artificial Sequence
  Description of Artificial Sequence: Synthetic oligonucleotide
auaucuaggccaccuacaa

SEQ ID NO: 229945 - RNA, 19 nt, Artificial Sequence
  Description of Artificial Sequence: Synthetic oligonucleotide
cacuuaguuggcuucauga

SEQ ID NO: 229946 - RNA, 19 nt, Artificial Sequence
  Description of Artificial Sequence: Synthetic oligonucleotide
agaauccauucuuggcaac

SEQ ID NO: 229947 - RNA, 19 nt, Artificial Sequence
  Description of Artificial Sequence: Synthetic oligonucleotide
caucaugugcuaucuugcc

SEQ ID NO: 229948 - RNA, 19 nt, Artificial Sequence
  Description of Artificial Sequence: Synthetic oligonucleotide
aaguuacagacucguuaca

SEQ ID NO: 229949 - RNA, 19 nt, Artificial Sequence
  Description of Artificial Sequence: Synthetic oligonucleotide
aagugcuacacggaguuau

SEQ ID NO: 229950 - RNA, 19 nt, Artificial Sequence
  Description of Artificial Sequence: Synthetic oligonucleotide
ggauuuuacauaaauaugu

SEQ ID NO: 229951 - RNA, 19 nt, Artificial Sequence
  Description of Artificial Sequence: Synthetic oligonucleotide
uuguggauaucuaggccac

SEQ ID NO: 229952 - RNA, 19 nt, Artificial Sequence
  Description of Artificial Sequence: Synthetic oligonucleotide
aucaaucucucaaaggaga

SEQ ID NO: 229953 - RNA, 19 nt, Artificial Sequence
  Description of Artificial Sequence: Synthetic oligonucleotide
auauagauacuuucuuguu

SEQ ID NO: 229954 - RNA, 19 nt, Artificial Sequence
  Description of Artificial Sequence: Synthetic oligonucleotide
ugcaaaacuccaugucaug

SEQ ID NO: 229955 - RNA, 19 nt, Artificial Sequence
  Description of Artificial Sequence: Synthetic oligonucleotide
cuauaaaguaucagccuga

SEQ ID NO: 229956 - RNA, 19 nt, Artificial Sequence
  Description of Artificial Sequence: Synthetic oligonucleotide
cgacuauaaaguaucagcc

SEQ ID NO: 229957 - RNA, 19 nt, Artificial Sequence
  Description of Artificial Sequence: Synthetic oligonucleotide
auuaugguuuugucuacaa

SEQ ID NO: 229958 - RNA, 19 nt, Artificial Sequence
  Description of Artificial Sequence: Synthetic oligonucleotide
cagagagcauugcuggacg

SEQ ID NO: 229959 - RNA, 19 nt, Artificial Sequence
  Description of Artificial Sequence: Synthetic oligonucleotide
uccaaaggguaacucgccu

SEQ ID NO: 229960 - RNA, 19 nt, Artificial Sequence
  Description of Artificial Sequence: Synthetic oligonucleotide
agauaugcacaagcaagag

SEQ ID NO: 229961 - RNA, 19 nt, Artificial Sequence
  Description of Artificial Sequence: Synthetic oligonucleotide
agauauucuaagccauuau

SEQ ID NO: 229962 - RNA, 19 nt, Artificial Sequence
  Description of Artificial Sequence: Synthetic oligonucleotide
auugagagaguaggaguuc

SEQ ID NO: 229963 - RNA, 19 nt, Artificial Sequence
  Description of Artificial Sequence: Synthetic oligonucleotide
aucaugugcuaucuugccu

SEQ ID NO: 229964 - RNA, 19 nt, Artificial Sequence
  Description of Artificial Sequence: Synthetic oligonucleotide
uauuaugguuuugucuaca

SEQ ID NO: 229965 - RNA, 19 nt, Artificial Sequence
  Description of Artificial Sequence: Synthetic oligonucleotide
uugggugguauucuucaaa

SEQ ID NO: 229966 - RNA, 19 nt, Artificial Sequence
  Description of Artificial Sequence: Synthetic oligonucleotide
uucacaacaugacguguau

SEQ ID NO: 229967 - RNA, 19 nt, Artificial Sequence
  Description of Artificial Sequence: Synthetic oligonucleotide
auaguaccuuugcagaaaa

SEQ ID NO: 229968 - RNA, 19 nt, Artificial Sequence
  Description of Artificial Sequence: Synthetic oligonucleotide
uguaagccacguacugacc

SEQ ID NO: 229969 - RNA, 19 nt, Artificial Sequence
  Description of Artificial Sequence: Synthetic oligonucleotide
uuccacgcucaaagaaccg

SEQ ID NO: 229970 - RNA, 19 nt, Artificial Sequence
  Description of Artificial Sequence: Synthetic oligonucleotide
uagauacggaaagcaaacc

SEQ ID NO: 229971 - RNA, 19 nt, Artificial Sequence
  Description of Artificial Sequence: Synthetic oligonucleotide
uauaaaguaucagccugaa

SEQ ID NO: 229972 - RNA, 19 nt, Artificial Sequence
  Description of Artificial Sequence: Synthetic oligonucleotide
ugacguguaucaugcagaa

SEQ ID NO: 229973 - RNA, 19 nt, Artificial Sequence
  Description of Artificial Sequence: Synthetic oligonucleotide
uaucuaggccaccuacaac

SEQ ID NO: 229974 - RNA, 19 nt, Artificial Sequence
  Description of Artificial Sequence: Synthetic oligonucleotide
aagacacggucccuggaaa

SEQ ID NO: 229975 - RNA, 19 nt, Artificial Sequence
  Description of Artificial Sequence: Synthetic oligonucleotide
agcauuugcuaaaauauuu

SEQ ID NO: 229976 - RNA, 19 nt, Artificial Sequence
  Description of Artificial Sequence: Synthetic oligonucleotide
gacggcggcaggcuguccg

SEQ ID NO: 229977 - RNA, 19 nt, Artificial Sequence
  Description of Artificial Sequence: Synthetic oligonucleotide
uucuuuuaccuugauucaa

SEQ ID NO: 229978 - RNA, 19 nt, Artificial Sequence
  Description of Artificial Sequence: Synthetic oligonucleotide
acucagggacacuuaauaa

SEQ ID NO: 229979 - RNA, 19 nt, Artificial Sequence
  Description of Artificial Sequence: Synthetic oligonucleotide
acaacgccagccaagauau

SEQ ID NO: 229980 - RNA, 19 nt, Artificial Sequence
  Description of Artificial Sequence: Synthetic oligonucleotide
cuauguagggaagacuauc

SEQ ID NO: 229981 - RNA, 19 nt, Artificial Sequence
  Description of Artificial Sequence: Synthetic oligonucleotide
gaacuagaccuccaacaga

SEQ ID NO: 229982 - RNA, 19 nt, Artificial Sequence
  Description of Artificial Sequence: Synthetic oligonucleotide
uaagccacguacugaccca

SEQ ID NO: 229983 - RNA, 19 nt, Artificial Sequence
  Description of Artificial Sequence: Synthetic oligonucleotide
ucuugccucuggcaaagaa

SEQ ID NO: 229984 - RNA, 19 nt, Artificial Sequence
  Description of Artificial Sequence: Synthetic oligonucleotide
caaaccuuaaagugcuaca

SEQ ID NO: 229985 - RNA, 19 nt, Artificial Sequence
  Description of Artificial Sequence: Synthetic oligonucleotide
gauaucuaggccaccuaca

SEQ ID NO: 229986 - RNA, 19 nt, Artificial Sequence
  Description of Artificial Sequence: Synthetic oligonucleotide
guagggaagacuaucauau

SEQ ID NO: 229987 - RNA, 19 nt, Artificial Sequence
  Description of Artificial Sequence: Synthetic oligonucleotide
ugcuaucuugccucuggca

SEQ ID NO: 229988 - RNA, 19 nt, Artificial Sequence
  Description of Artificial Sequence: Synthetic oligonucleotide
augcacaagcaagagauau

SEQ ID NO: 229989 - RNA, 19 nt, Artificial Sequence
  Description of Artificial Sequence: Synthetic oligonucleotide
agcgacuauaaaguaucag

SEQ ID NO: 229990 - RNA, 19 nt, Artificial Sequence
  Description of Artificial Sequence: Synthetic oligonucleotide
cauacaguaugaaguucuc

SEQ ID NO: 229991 - RNA, 19 nt, Artificial Sequence
  Description of Artificial Sequence: Synthetic oligonucleotide
uggcgcaaauuguacaauc

SEQ ID NO: 229992 - RNA, 19 nt, Artificial Sequence
  Description of Artificial Sequence: Synthetic oligonucleotide
ucuccguucccaucugugu

SEQ ID NO: 229993 - RNA, 19 nt, Artificial Sequence
  Description of Artificial Sequence: Synthetic oligonucleotide
aguuacagacucguuacaa

SEQ ID NO: 229994 - RNA, 19 nt, Artificial Sequence
  Description of Artificial Sequence: Synthetic oligonucleotide
auaugucuauuacccgcug

SEQ ID NO: 229995 - RNA, 19 nt, Artificial Sequence
  Description of Artificial Sequence: Synthetic oligonucleotide
guaaggguguuugauguuc

SEQ ID NO: 229996 - RNA, 19 nt, Artificial Sequence
  Description of Artificial Sequence: Synthetic oligonucleotide
guuguguauaaugaagcaa

SEQ ID NO: 229997 - RNA, 19 nt, Artificial Sequence
  Description of Artificial Sequence: Synthetic oligonucleotide
agagcauugcuggacgucu

SEQ ID NO: 229998 - RNA, 19 nt, Artificial Sequence
  Description of Artificial Sequence: Synthetic oligonucleotide
cagagauauaaauaaaguu

SEQ ID NO: 229999 - RNA, 19 nt, Artificial Sequence
  Description of Artificial Sequence: Synthetic oligonucleotide
gacacuggaacagaucaaa

SEQ ID NO: 230000 - RNA, 19 nt, Artificial Sequence
  Description of Artificial Sequence: Synthetic oligonucleotide
guacuuacauguaguggag

SEQ ID NO: 230001 - RNA, 19 nt, Artificial Sequence
  Description of Artificial Sequence: Synthetic oligonucleotide
aagucauaacugccucaga

SEQ ID NO: 230002 - RNA, 19 nt, Artificial Sequence
  Description of Artificial Sequence: Synthetic oligonucleotide
ggauaucuaggccaccuac

SEQ ID NO: 230003 - RNA, 19 nt, Artificial Sequence
  Description of Artificial Sequence: Synthetic oligonucleotide
aggguaacucgccucauuu

SEQ ID NO: 230004 - RNA, 19 nt, Artificial Sequence
  Description of Artificial Sequence: Synthetic oligonucleotide
uaacagcgacuauaaagua

SEQ ID NO: 230005 - RNA, 19 nt, Artificial Sequence
  Description of Artificial Sequence: Synthetic oligonucleotide
aagaaccggaauuguccaa

SEQ ID NO: 230006 - RNA, 19 nt, Artificial Sequence
  Description of Artificial Sequence: Synthetic oligonucleotide
caaaggguaacucgccuca

SEQ ID NO: 230007 - RNA, 19 nt, Artificial Sequence
  Description of Artificial Sequence: Synthetic oligonucleotide
uaaacgcugcucagcaaua

SEQ ID NO: 230008 - RNA, 19 nt, Artificial Sequence
  Description of Artificial Sequence: Synthetic oligonucleotide
caaaagacuaguucccucu

SEQ ID NO: 230009 - RNA, 19 nt, Artificial Sequence
  Description of Artificial Sequence: Synthetic oligonucleotide
guaaauaauagggcauuaa

SEQ ID NO: 230010 - RNA, 19 nt, Artificial Sequence
  Description of Artificial Sequence: Synthetic oligonucleotide
ugagagaguaggaguucaa

SEQ ID NO: 230011 - RNA, 19 nt, Artificial Sequence
  Description of Artificial Sequence: Synthetic oligonucleotide
uaccuugauucaacccgcc

SEQ ID NO: 230012 - RNA, 19 nt, Artificial Sequence
  Description of Artificial Sequence: Synthetic oligonucleotide
cauuggaaauauagccauc

SEQ ID NO: 230013 - RNA, 19 nt, Artificial Sequence
  Description of Artificial Sequence: Synthetic oligonucleotide
gucaagugguagaacauga

SEQ ID NO: 230014 - RNA, 19 nt, Artificial Sequence
  Description of Artificial Sequence: Synthetic oligonucleotide
aacuaaccagaauguuuua

SEQ ID NO: 230015 - RNA, 19 nt, Artificial Sequence
  Description of Artificial Sequence: Synthetic oligonucleotide
uagggauuaaacgcugcuc

SEQ ID NO: 230016 - RNA, 19 nt, Artificial Sequence
  Description of Artificial Sequence: Synthetic oligonucleotide
uuucgagggacgcggcgac

SEQ ID NO: 230017 - RNA, 19 nt, Artificial Sequence
  Description of Artificial Sequence: Synthetic oligonucleotide
ucgagggacgcggcgacgg

SEQ ID NO: 230018 - RNA, 19 nt, Artificial Sequence
  Description of Artificial Sequence: Synthetic oligonucleotide
uacuuacauguaguggaga

SEQ ID NO: 230019 - RNA, 19 nt, Artificial Sequence
  Description of Artificial Sequence: Synthetic oligonucleotide
aagccaaccccuucccuuu

SEQ ID NO: 230020 - RNA, 19 nt, Artificial Sequence
  Description of Artificial Sequence: Synthetic oligonucleotide
auguagggaagacuaucau

SEQ ID NO: 230021 - RNA, 19 nt, Artificial Sequence
  Description of Artificial Sequence: Synthetic oligonucleotide
auacaguaugaaguucucu

SEQ ID NO: 230022 - RNA, 19 nt, Artificial Sequence
  Description of Artificial Sequence: Synthetic oligonucleotide
uaugcacaagcaagagaua

SEQ ID NO: 230023 - RNA, 19 nt, Artificial Sequence
  Description of Artificial Sequence: Synthetic oligonucleotide
aagccacguacugacccag

SEQ ID NO: 230024 - RNA, 19 nt, Artificial Sequence
  Description of Artificial Sequence: Synthetic oligonucleotide
gguucuguuguaacucagg

SEQ ID NO: 230025 - RNA, 19 nt, Artificial Sequence
  Description of Artificial Sequence: Synthetic oligonucleotide
aggugugcucaauuuaaua

SEQ ID NO: 230026 - RNA, 19 nt, Artificial Sequence
  Description of Artificial Sequence: Synthetic oligonucleotide
agguaaauaauagggcauu

SEQ ID NO: 230027 - RNA, 19 nt, Artificial Sequence
  Description of Artificial Sequence: Synthetic oligonucleotide
acaccaagcaccgggauuu

SEQ ID NO: 230028 - RNA, 19 nt, Artificial Sequence
  Description of Artificial Sequence: Synthetic oligonucleotide
aagacaccaagcaccggga

SEQ ID NO: 230029 - RNA, 19 nt, Artificial Sequence
  Description of Artificial Sequence: Synthetic oligonucleotide
cuacacggaguuauugaga

SEQ ID NO: 230030 - RNA, 19 nt, Artificial Sequence
  Description of Artificial Sequence: Synthetic oligonucleotide
gugucgaauaugucuauua

SEQ ID NO: 230031 - RNA, 19 nt, Artificial Sequence
  Description of Artificial Sequence: Synthetic oligonucleotide
caaccccuucccuuucucc

SEQ ID NO: 230032 - RNA, 19 nt, Artificial Sequence
  Description of Artificial Sequence: Synthetic oligonucleotide
auuaaacgcugcucagcaa

SEQ ID NO: 230033 - RNA, 19 nt, Artificial Sequence
  Description of Artificial Sequence: Synthetic oligonucleotide
guaacucgccucauuuccc

SEQ ID NO: 230034 - RNA, 19 nt, Artificial Sequence
  Description of Artificial Sequence: Synthetic oligonucleotide
caccauacugauaugcucu

SEQ ID NO: 230035 - RNA, 19 nt, Artificial Sequence
  Description of Artificial Sequence: Synthetic oligonucleotide
agaaccggaauuguccaaa

SEQ ID NO: 230036 - RNA, 19 nt, Artificial Sequence
  Description of Artificial Sequence: Synthetic oligonucleotide
agagagcauugcuggacgu

SEQ ID NO: 230037 - RNA, 19 nt, Artificial Sequence
  Description of Artificial Sequence: Synthetic oligonucleotide
gggauuaaacgcugcucag

SEQ ID NO: 230038 - RNA, 19 nt, Artificial Sequence
  Description of Artificial Sequence: Synthetic oligonucleotide
auuacccgcuguacuaaag

SEQ ID NO: 230039 - RNA, 19 nt, Artificial Sequence
  Description of Artificial Sequence: Synthetic oligonucleotide
ggugugcucaauuuaauau

SEQ ID NO: 230040 - RNA, 19 nt, Artificial Sequence
  Description of Artificial Sequence: Synthetic oligonucleotide
gcuggccuaacccuggcgc

SEQ ID NO: 230041 - RNA, 19 nt, Artificial Sequence
  Description of Artificial Sequence: Synthetic oligonucleotide
cucuucuaugcauauagau

SEQ ID NO: 230042 - RNA, 19 nt, Artificial Sequence
  Description of Artificial Sequence: Synthetic oligonucleotide
ggauuaaacgcugcucagc

SEQ ID NO: 230043 - RNA, 19 nt, Artificial Sequence
  Description of Artificial Sequence: Synthetic oligonucleotide
uggauaucuaggccaccua

SEQ ID NO: 230044 - RNA, 19 nt, Artificial Sequence
  Description of Artificial Sequence: Synthetic oligonucleotide
cuccguucccaucuguguc

SEQ ID NO: 230045 - RNA, 19 nt, Artificial Sequence
  Description of Artificial Sequence: Synthetic oligonucleotide
agcuggccuaacccuggcg

SEQ ID NO: 230046 - RNA, 19 nt, Artificial Sequence
  Description of Artificial Sequence: Synthetic oligonucleotide
cgaauaugucuauuacccg

SEQ ID NO: 230047 - RNA, 19 nt, Artificial Sequence
  Description of Artificial Sequence: Synthetic oligonucleotide
aguaaggguguuugauguu

SEQ ID NO: 230048 - RNA, 19 nt, Artificial Sequence
  Description of Artificial Sequence: Synthetic oligonucleotide
cacaacgccagccaagaua

SEQ ID NO: 230049 - RNA, 19 nt, Artificial Sequence
  Description of Artificial Sequence: Synthetic oligonucleotide
ucuugcucggcgggcggcg

SEQ ID NO: 230050 - RNA, 19 nt, Artificial Sequence
  Description of Artificial Sequence: Synthetic oligonucleotide
uaucgccuuugacacugaa

SEQ ID NO: 230051 - RNA, 19 nt, Artificial Sequence
  Description of Artificial Sequence: Synthetic oligonucleotide
ugccucuggcaaagaaacu

SEQ ID NO: 230052 - RNA, 19 nt, Artificial Sequence
  Description of Artificial Sequence: Synthetic oligonucleotide
gagguacauuuuaaauuga

SEQ ID NO: 230053 - RNA, 19 nt, Artificial Sequence
  Description of Artificial Sequence: Synthetic oligonucleotide
ucaacccgcccuuuaccau

SEQ ID NO: 230054 - RNA, 19 nt, Artificial Sequence
  Description of Artificial Sequence: Synthetic oligonucleotide
cccauuggaaauauagcca

SEQ ID NO: 230055 - RNA, 19 nt, Artificial Sequence
  Description of Artificial Sequence: Synthetic oligonucleotide
gguuucgagggacgcggcg

SEQ ID NO: 230056 - RNA, 19 nt, Artificial Sequence
  Description of Artificial Sequence: Synthetic oligonucleotide
ggaacagaucaaaccacug

SEQ ID NO: 230057 - RNA, 19 nt, Artificial Sequence
  Description of Artificial Sequence: Synthetic oligonucleotide
uggcacuuuuguacucuaa

SEQ ID NO: 230058 - RNA, 19 nt, Artificial Sequence
  Description of Artificial Sequence: Synthetic oligonucleotide
gacguguaucaugcagaag

SEQ ID NO: 230059 - RNA, 19 nt, Artificial Sequence
  Description of Artificial Sequence: Synthetic oligonucleotide
uguggauaucuaggccacc

SEQ ID NO: 230060 - RNA, 19 nt, Artificial Sequence
  Description of Artificial Sequence: Synthetic oligonucleotide
uagauacuuucuuguuaua

SEQ ID NO: 230061 - RNA, 19 nt, Artificial Sequence
  Description of Artificial Sequence: Synthetic oligonucleotide
uagggaagacuaucauaua

SEQ ID NO: 230062 - RNA, 19 nt, Artificial Sequence
  Description of Artificial Sequence: Synthetic oligonucleotide
agacacggucccuggaaau

SEQ ID NO: 230063 - RNA, 19 nt, Artificial Sequence
  Description of Artificial Sequence: Synthetic oligonucleotide
ccagccaauaguaccuuug

SEQ ID NO: 230064 - RNA, 19 nt, Artificial Sequence
  Description of Artificial Sequence: Synthetic oligonucleotide
cggcuauagguuucgaggg

SEQ ID NO: 230065 - RNA, 19 nt, Artificial Sequence
  Description of Artificial Sequence: Synthetic oligonucleotide
ugcagaaguuguguauaau

SEQ ID NO: 230066 - RNA, 19 nt, Artificial Sequence
  Description of Artificial Sequence: Synthetic oligonucleotide
aggaguucaauaacacuua

SEQ ID NO: 230067 - RNA, 19 nt, Artificial Sequence
  Description of Artificial Sequence: Synthetic oligonucleotide
cuaucuugccucuggcaaa

SEQ ID NO: 230068 - RNA, 19 nt, Artificial Sequence
  Description of Artificial Sequence: Synthetic oligonucleotide
ugugucgaauaugucuauu

SEQ ID NO: 230069 - RNA, 19 nt, Artificial Sequence
  Description of Artificial Sequence: Synthetic oligonucleotide
gagggacgcggcgacggcg

SEQ ID NO: 230070 - RNA, 19 nt, Artificial Sequence
  Description of Artificial Sequence: Synthetic oligonucleotide
ggcggcuauagguuucgag

SEQ ID NO: 230071 - RNA, 19 nt, Artificial Sequence
  Description of Artificial Sequence: Synthetic oligonucleotide
acccuggcgcaaauuguac

SEQ ID NO: 230072 - RNA, 19 nt, Artificial Sequence
  Description of Artificial Sequence: Synthetic oligonucleotide
uuaucgccuuugacacuga

SEQ ID NO: 230073 - RNA, 19 nt, Artificial Sequence
  Description of Artificial Sequence: Synthetic oligonucleotide
gagagcauugcuggacguc

SEQ ID NO: 230074 - RNA, 19 nt, Artificial Sequence
  Description of Artificial Sequence: Synthetic oligonucleotide
auccuuauccgcauuuauu

SEQ ID NO: 230075 - RNA, 19 nt, Artificial Sequence
  Description of Artificial Sequence: Synthetic oligonucleotide
aggcagagacaugaacucu

SEQ ID NO: 230076 - RNA, 19 nt, Artificial Sequence
  Description of Artificial Sequence: Synthetic oligonucleotide
acuauguagggaagacuau

SEQ ID NO: 230077 - RNA, 19 nt, Artificial Sequence
  Description of Artificial Sequence: Synthetic oligonucleotide
cguacugacccagaggaag

SEQ ID NO: 230078 - RNA, 19 nt, Artificial Sequence
  Description of Artificial Sequence: Synthetic oligonucleotide
agaacaugacauacuuuua

SEQ ID NO: 230079 - RNA, 19 nt, Artificial Sequence
  Description of Artificial Sequence: Synthetic oligonucleotide
acaugacguguaucaugca

SEQ ID NO: 230080 - RNA, 19 nt, Artificial Sequence
  Description of Artificial Sequence: Synthetic oligonucleotide
guuucgagggacgcggcga

SEQ ID NO: 230081 - RNA, 19 nt, Artificial Sequence
  Description of Artificial Sequence: Synthetic oligonucleotide
acccgcuguacuaaagggu

SEQ ID NO: 230082 - RNA, 19 nt, Artificial Sequence
  Description of Artificial Sequence: Synthetic oligonucleotide
caaagacaccaagcaccgg

SEQ ID NO: 230083 - RNA, 19 nt, Artificial Sequence
  Description of Artificial Sequence: Synthetic oligonucleotide
ccaccauacugauaugcuc

SEQ ID NO: 230084 - RNA, 19 nt, Artificial Sequence
  Description of Artificial Sequence: Synthetic oligonucleotide
cggaauuguccaaaucaag

SEQ ID NO: 230085 - RNA, 19 nt, Artificial Sequence
  Description of Artificial Sequence: Synthetic oligonucleotide
agguuucgagggacgcggc

SEQ ID NO: 230086 - RNA, 19 nt, Artificial Sequence
  Description of Artificial Sequence: Synthetic oligonucleotide
ccaaaggguaacucgccuc

SEQ ID NO: 230087 - RNA, 19 nt, Artificial Sequence
  Description of Artificial Sequence: Synthetic oligonucleotide
cuucagagauggagaagaa

SEQ ID NO: 230088 - RNA, 19 nt, Artificial Sequence
  Description of Artificial Sequence: Synthetic oligonucleotide
uucgagggacgcggcgacg

SEQ ID NO: 230089 - RNA, 19 nt, Artificial Sequence
  Description of Artificial Sequence: Synthetic oligonucleotide
ccacguacugacccagagg

SEQ ID NO: 230090 - RNA, 19 nt, Artificial Sequence
  Description of Artificial Sequence: Synthetic oligonucleotide
agccauuauaugauuucuu

SEQ ID NO: 230091 - RNA, 19 nt, Artificial Sequence
  Description of Artificial Sequence: Synthetic oligonucleotide
ccaucugugucgaauaugu

SEQ ID NO: 230092 - RNA, 19 nt, Artificial Sequence
  Description of Artificial Sequence: Synthetic oligonucleotide
caacugcuaauuacauuua

SEQ ID NO: 230093 - RNA, 19 nt, Artificial Sequence
  Description of Artificial Sequence: Synthetic oligonucleotide
cuauuacccgcuguacuaa

SEQ ID NO: 230094 - RNA, 19 nt, Artificial Sequence
  Description of Artificial Sequence: Synthetic oligonucleotide
guugggugguauucuucaa

SEQ ID NO: 230095 - RNA, 19 nt, Artificial Sequence
  Description of Artificial Sequence: Synthetic oligonucleotide
cuuuuaugucacacaaauu

SEQ ID NO: 230096 - RNA, 19 nt, Artificial Sequence
  Description of Artificial Sequence: Synthetic oligonucleotide
acgccagccaagauaugca

SEQ ID NO: 230097 - RNA, 19 nt, Artificial Sequence
  Description of Artificial Sequence: Synthetic oligonucleotide
cuugauucaacccgcccuu

SEQ ID NO: 230098 - RNA, 19 nt, Artificial Sequence
  Description of Artificial Sequence: Synthetic oligonucleotide
ccuuaaagugcuacacgga

SEQ ID NO: 230099 - RNA, 19 nt, Artificial Sequence
  Description of Artificial Sequence: Synthetic oligonucleotide
gggugguauucuucaaaga

SEQ ID NO: 230100 - RNA, 19 nt, Artificial Sequence
  Description of Artificial Sequence: Synthetic oligonucleotide
cagcgacuauaaaguauca

SEQ ID NO: 230101 - RNA, 19 nt, Artificial Sequence
  Description of Artificial Sequence: Synthetic oligonucleotide
ccgcccuuuaccauucaug

SEQ ID NO: 230102 - RNA, 19 nt, Artificial Sequence
  Description of Artificial Sequence: Synthetic oligonucleotide
ggguaacucgccucauuuc

SEQ ID NO: 230103 - RNA, 19 nt, Artificial Sequence
  Description of Artificial Sequence: Synthetic oligonucleotide
cuauggacacagaauccau

SEQ ID NO: 230104 - RNA, 19 nt, Artificial Sequence
  Description of Artificial Sequence: Synthetic oligonucleotide
acggucccuggaaauauau

SEQ ID NO: 230105 - RNA, 19 nt, Artificial Sequence
  Description of Artificial Sequence: Synthetic oligonucleotide
cagccaagauaugcacaag

SEQ ID NO: 230106 - RNA, 19 nt, Artificial Sequence
  Description of Artificial Sequence: Synthetic oligonucleotide
agccaaccuacuaaauaua

SEQ ID NO: 230107 - RNA, 19 nt, Artificial Sequence
  Description of Artificial Sequence: Synthetic oligonucleotide
cccaguaaggaaauaauuu

SEQ ID NO: 230108 - RNA, 19 nt, Artificial Sequence
  Description of Artificial Sequence: Synthetic oligonucleotide
gcaggugugcucaauuuaa

SEQ ID NO: 230109 - RNA, 19 nt, Artificial Sequence
  Description of Artificial Sequence: Synthetic oligonucleotide
gaaccggaauuguccaaau

SEQ ID NO: 230110 - RNA, 19 nt, Artificial Sequence
  Description of Artificial Sequence: Synthetic oligonucleotide
caccuggaagaguucccca

SEQ ID NO: 230111 - RNA, 19 nt, Artificial Sequence
  Description of Artificial Sequence: Synthetic oligonucleotide
ggacacagaauccauucuu

SEQ ID NO: 230112 - RNA, 19 nt, Artificial Sequence
  Description of Artificial Sequence: Synthetic oligonucleotide
ccauuggaaauauagccau

SEQ ID NO: 230113 - RNA, 19 nt, Artificial Sequence
  Description of Artificial Sequence: Synthetic oligonucleotide
uggccuaacccuggcgcaa

SEQ ID NO: 230114 - RNA, 19 nt, Artificial Sequence
  Description of Artificial Sequence: Synthetic oligonucleotide
ccuggcgcaaauuguacaa

SEQ ID NO: 230115 - RNA, 19 nt, Artificial Sequence
  Description of Artificial Sequence: Synthetic oligonucleotide
uugcucggcgggcggcgcu

SEQ ID NO: 230116 - RNA, 19 nt, Artificial Sequence
  Description of Artificial Sequence: Synthetic oligonucleotide
agugcuacacggaguuauu

SEQ ID NO: 230117 - RNA, 19 nt, Artificial Sequence
  Description of Artificial Sequence: Synthetic oligonucleotide
ggauuguaagccacguacu

SEQ ID NO: 230118 - RNA, 19 nt, Artificial Sequence
  Description of Artificial Sequence: Synthetic oligonucleotide
ccuugauucaacccgcccu

SEQ ID NO: 230119 - RNA, 19 nt, Artificial Sequence
  Description of Artificial Sequence: Synthetic oligonucleotide
caugugcuaucuugccucu

SEQ ID NO: 230120 - RNA, 19 nt, Artificial Sequence
  Description of Artificial Sequence: Synthetic oligonucleotide
cuugcucggcgggcggcgc

SEQ ID NO: 230121 - RNA, 19 nt, Artificial Sequence
  Description of Artificial Sequence: Synthetic oligonucleotide
ggaacagcgguggcaggca

SEQ ID NO: 230122 - RNA, 19 nt, Artificial Sequence
  Description of Artificial Sequence: Synthetic oligonucleotide
gccauagcauaugcaguuc

SEQ ID NO: 230123 - RNA, 19 nt, Artificial Sequence
  Description of Artificial Sequence: Synthetic oligonucleotide
acuagaccuccaacagaua

SEQ ID NO: 230124 - RNA, 19 nt, Artificial Sequence
  Description of Artificial Sequence: Synthetic oligonucleotide
gccaaccuacuaaauauau

SEQ ID NO: 230125 - RNA, 19 nt, Artificial Sequence
  Description of Artificial Sequence: Synthetic oligonucleotide
caggugugcucaauuuaau

SEQ ID NO: 230126 - RNA, 19 nt, Artificial Sequence
  Description of Artificial Sequence: Synthetic oligonucleotide
cuggacgucuugagcagau

SEQ ID NO: 230127 - RNA, 19 nt, Artificial Sequence
  Description of Artificial Sequence: Synthetic oligonucleotide
ggcggcgggcggcuauagg

SEQ ID NO: 230128 - RNA, 19 nt, Artificial Sequence
  Description of Artificial Sequence: Synthetic oligonucleotide
gcgcaaauuguacaaucuu

SEQ ID NO: 230129 - RNA, 19 nt, Artificial Sequence
  Description of Artificial Sequence: Synthetic oligonucleotide
ccgcuguacuaaaggguuc

SEQ ID NO: 230130 - RNA, 19 nt, Artificial Sequence
  Description of Artificial Sequence: Synthetic oligonucleotide
cccuggcgcaaauuguaca

SEQ ID NO: 230131 - RNA, 19 nt, Artificial Sequence
  Description of Artificial Sequence: Synthetic oligonucleotide
ucgccucauuucccaucuu

SEQ ID NO: 230132 - RNA, 19 nt, Artificial Sequence
  Description of Artificial Sequence: Synthetic oligonucleotide
caacccgcccuuuaccauu

SEQ ID NO: 230133 - RNA, 19 nt, Artificial Sequence
  Description of Artificial Sequence: Synthetic oligonucleotide
gccucuggcaaagaaacuu

SEQ ID NO: 230134 - RNA, 19 nt, Artificial Sequence
  Description of Artificial Sequence: Synthetic oligonucleotide
cugugucgaauaugucuau

SEQ ID NO: 230135 - RNA, 19 nt, Artificial Sequence
  Description of Artificial Sequence: Synthetic oligonucleotide
agccacguacugacccaga

SEQ ID NO: 230136 - RNA, 19 nt, Artificial Sequence
  Description of Artificial Sequence: Synthetic oligonucleotide
ccuuauccgcauuuauuau

SEQ ID NO: 230137 - RNA, 19 nt, Artificial Sequence
  Description of Artificial Sequence: Synthetic oligonucleotide
cccgcuguacuaaaggguu

SEQ ID NO: 230138 - RNA, 19 nt, Artificial Sequence
  Description of Artificial Sequence: Synthetic oligonucleotide
uguccggcgccgggcgggu

SEQ ID NO: 230139 - RNA, 19 nt, Artificial Sequence
  Description of Artificial Sequence: Synthetic oligonucleotide
gcuggacgucuugagcaga

SEQ ID NO: 230140 - RNA, 19 nt, Artificial Sequence
  Description of Artificial Sequence: Synthetic oligonucleotide
ccccaguaaggaaauaauu

SEQ ID NO: 230141 - RNA, 19 nt, Artificial Sequence
  Description of Artificial Sequence: Synthetic oligonucleotide
cgccgggcggguugcagcg

SEQ ID NO: 230142 - RNA, 19 nt, Artificial Sequence
  Description of Artificial Sequence: Synthetic oligonucleotide
cuggcgcaaauuguacaau

SEQ ID NO: 230143 - RNA, 19 nt, Artificial Sequence
  Description of Artificial Sequence: Synthetic oligonucleotide
gagcauugcuggacgucuu

SEQ ID NO: 230144 - RNA, 19 nt, Artificial Sequence
  Description of Artificial Sequence: Synthetic oligonucleotide
gcccuuuaccauucaugau

SEQ ID NO: 230145 - RNA, 19 nt, Artificial Sequence
  Description of Artificial Sequence: Synthetic oligonucleotide
ccgcauuuauuaugguuuu

SEQ ID NO: 230146 - RNA, 19 nt, Artificial Sequence
  Description of Artificial Sequence: Synthetic oligonucleotide
ggccuaacccuggcgcaaa

SEQ ID NO: 230147 - RNA, 19 nt, Artificial Sequence
  Description of Artificial Sequence: Synthetic oligonucleotide
gcgggcggcuauagguuuc

SEQ ID NO: 230148 - RNA, 19 nt, Artificial Sequence
  Description of Artificial Sequence: Synthetic oligonucleotide
ggcgggcggcuauagguuu

SEQ ID NO: 230149 - RNA, 19 nt, Artificial Sequence
  Description of Artificial Sequence: Synthetic oligonucleotide
cgagggacgcggcgacggc

SEQ ID NO: 230150 - RNA, 19 nt, Artificial Sequence
  Description of Artificial Sequence: Synthetic oligonucleotide
ggguugcagcggggccugg

SEQ ID NO: 230151 - RNA, 19 nt, Artificial Sequence
  Description of Artificial Sequence: Synthetic oligonucleotide
ccguucccaucugugucga

SEQ ID NO: 230152 - RNA, 19 nt, Artificial Sequence
  Description of Artificial Sequence: Synthetic oligonucleotide
gggcggcuauagguuucga

SEQ ID NO: 230153 - RNA, 19 nt, Artificial Sequence
  Description of Artificial Sequence: Synthetic oligonucleotide
gccuaacccuggcgcaaau

SEQ ID NO: 230154 - RNA, 19 nt, Artificial Sequence
  Description of Artificial Sequence: Synthetic oligonucleotide
ccggcgccgggcggguugc

SEQ ID NO: 230155 - RNA, 19 nt, Artificial Sequence
  Description of Artificial Sequence: Synthetic oligonucleotide
ccuaacccuggcgcaaauu

SEQ ID NO: 230156 - RNA, 19 nt, Artificial Sequence
  Description of Artificial Sequence: Synthetic oligonucleotide
ccuucccuuucuccaccau

SEQ ID NO: 230157 - RNA, 19 nt, Artificial Sequence
  Description of Artificial Sequence: Synthetic oligonucleotide
cguucccaucugugucgaa

SEQ ID NO: 230158 - RNA, 19 nt, Artificial Sequence
  Description of Artificial Sequence: Synthetic oligonucleotide
guccggcgccgggcggguu

SEQ ID NO: 230159 - RNA, 19 nt, Artificial Sequence
  Description of Artificial Sequence: Synthetic oligonucleotide
auuaccaucacucuggugc

SEQ ID NO: 230160 - RNA, 19 nt, Artificial Sequence
  Description of Artificial Sequence: Synthetic oligonucleotide
auaggaaacaccuucauuc

SEQ ID NO: 230161 - RNA, 19 nt, Artificial Sequence
  Description of Artificial Sequence: Synthetic oligonucleotide
aaucccacagaguuaaugg

SEQ ID NO: 230162 - RNA, 19 nt, Artificial Sequence
  Description of Artificial Sequence: Synthetic oligonucleotide
ucuaugguauugaagaccc

SEQ ID NO: 230163 - RNA, 19 nt, Artificial Sequence
  Description of Artificial Sequence: Synthetic oligonucleotide
ucuuguauccauaaauccc

SEQ ID NO: 230164 - RNA, 19 nt, Artificial Sequence
  Description of Artificial Sequence: Synthetic oligonucleotide
ucuacaucugccacgaugc

SEQ ID NO: 230165 - RNA, 19 nt, Artificial Sequence
  Description of Artificial Sequence: Synthetic oligonucleotide
acugguccacuuuagaagc

SEQ ID NO: 230166 - RNA, 19 nt, Artificial Sequence
  Description of Artificial Sequence: Synthetic oligonucleotide
aacugguccacuuuagaag

SEQ ID NO: 230167 - RNA, 19 nt, Artificial Sequence
  Description of Artificial Sequence: Synthetic oligonucleotide
gagacugucacauagaugu

SEQ ID NO: 230168 - RNA, 19 nt, Artificial Sequence
  Description of Artificial Sequence: Synthetic oligonucleotide
uguuauuauuccugaaggg

SEQ ID NO: 230169 - RNA, 19 nt, Artificial Sequence
  Description of Artificial Sequence: Synthetic oligonucleotide
acuagagaugcuucgaggg

SEQ ID NO: 230170 - RNA, 19 nt, Artificial Sequence
  Description of Artificial Sequence: Synthetic oligonucleotide
uucuuguauccauaaaucc

SEQ ID NO: 230171 - RNA, 19 nt, Artificial Sequence
  Description of Artificial Sequence: Synthetic oligonucleotide
uuauuauuccugaagggaa

SEQ ID NO: 230172 - RNA, 19 nt, Artificial Sequence
  Description of Artificial Sequence: Synthetic oligonucleotide
agauaaugauuguugaucu

SEQ ID NO: 230173 - RNA, 19 nt, Artificial Sequence
  Description of Artificial Sequence: Synthetic oligonucleotide
aguuaaugguuccuucugg

SEQ ID NO: 230174 - RNA, 19 nt, Artificial Sequence
  Description of Artificial Sequence: Synthetic oligonucleotide
guauugaagacccacucug

SEQ ID NO: 230175 - RNA, 19 nt, Artificial Sequence
  Description of Artificial Sequence: Synthetic oligonucleotide
ugcuccauggcucaaggug

SEQ ID NO: 230176 - RNA, 19 nt, Artificial Sequence
  Description of Artificial Sequence: Synthetic oligonucleotide
gaugcguugcuggagaggg

SEQ ID NO: 230177 - RNA, 19 nt, Artificial Sequence
  Description of Artificial Sequence: Synthetic oligonucleotide
aguacuugcuaguggcacc

SEQ ID NO: 230178 - RNA, 19 nt, Artificial Sequence
  Description of Artificial Sequence: Synthetic oligonucleotide
agugcguggaacuugaaau

SEQ ID NO: 230179 - RNA, 19 nt, Artificial Sequence
  Description of Artificial Sequence: Synthetic oligonucleotide
uuguugaucugcaauugug

SEQ ID NO: 230180 - RNA, 19 nt, Artificial Sequence
  Description of Artificial Sequence: Synthetic oligonucleotide
ugauacugcugggagaugg

SEQ ID NO: 230181 - RNA, 19 nt, Artificial Sequence
  Description of Artificial Sequence: Synthetic oligonucleotide
aaguacuugcuaguggcac

SEQ ID NO: 230182 - RNA, 19 nt, Artificial Sequence
  Description of Artificial Sequence: Synthetic oligonucleotide
ugagcaacuuccuccgugg

SEQ ID NO: 230183 - RNA, 19 nt, Artificial Sequence
  Description of Artificial Sequence: Synthetic oligonucleotide
acuagguuggaccagucca

SEQ ID NO: 230184 - RNA, 19 nt, Artificial Sequence
  Description of Artificial Sequence: Synthetic oligonucleotide
cuuugggugagcuucgggc

SEQ ID NO: 230185 - RNA, 19 nt, Artificial Sequence
  Description of Artificial Sequence: Synthetic oligonucleotide
  modified_base (8)..(8): a, c, u, g, unknown or other
ucacuucncugccagcugg

SEQ ID NO: 230186 - RNA, 19 nt, Artificial Sequence
  Description of Artificial Sequence: Synthetic oligonucleotide
guaucgauaccacugucag

SEQ ID NO: 230187 - RNA, 19 nt, Artificial Sequence
  Description of Artificial Sequence: Synthetic oligonucleotide
cuuuagaagccagaguggg

SEQ ID NO: 230188 - RNA, 19 nt, Artificial Sequence
  Description of Artificial Sequence: Synthetic oligonucleotide
gagaacaccacugggcugg

SEQ ID NO: 230189 - RNA, 19 nt, Artificial Sequence
  Description of Artificial Sequence: Synthetic oligonucleotide
gugacuuggggagagacgg

SEQ ID NO: 230190 - RNA, 19 nt, Artificial Sequence
  Description of Artificial Sequence: Synthetic oligonucleotide
uucggcucaccccaaaccc

SEQ ID NO: 230191 - RNA, 19 nt, Artificial Sequence
  Description of Artificial Sequence: Synthetic oligonucleotide
ucugugauucgggaguugg

SEQ ID NO: 230192 - RNA, 19 nt, Artificial Sequence
  Description of Artificial Sequence: Synthetic oligonucleotide
uaggaggugguaucgauac

SEQ ID NO: 230193 - RNA, 19 nt, Artificial Sequence
  Description of Artificial Sequence: Synthetic oligonucleotide
uagaagugaagcccuggag

SEQ ID NO: 230194 - RNA, 19 nt, Artificial Sequence
  Description of Artificial Sequence: Synthetic oligonucleotide
uuugauacugcugggagau

SEQ ID NO: 230195 - RNA, 19 nt, Artificial Sequence
  Description of Artificial Sequence: Synthetic oligonucleotide
uuccauccgaucaaguacu

SEQ ID NO: 230196 - RNA, 19 nt, Artificial Sequence
  Description of Artificial Sequence: Synthetic oligonucleotide
ggagcuaugccacaggggc

SEQ ID NO: 230197 - RNA, 19 nt, Artificial Sequence
  Description of Artificial Sequence: Synthetic oligonucleotide
cagauaaugauuguugauc

SEQ ID NO: 230198 - RNA, 19 nt, Artificial Sequence
  Description of Artificial Sequence: Synthetic oligonucleotide
agaguuaaugguuccuucu

SEQ ID NO: 230199 - RNA, 19 nt, Artificial Sequence
  Description of Artificial Sequence: Synthetic oligonucleotide
aucauuuaugcugaaggug

SEQ ID NO: 230200 - RNA, 19 nt, Artificial Sequence
  Description of Artificial Sequence: Synthetic oligonucleotide
gacuccuuacugcuguagg

SEQ ID NO: 230201 - RNA, 19 nt, Artificial Sequence
  Description of Artificial Sequence: Synthetic oligonucleotide
cuguaaaugcucucgucag

SEQ ID NO: 230202 - RNA, 19 nt, Artificial Sequence
  Description of Artificial Sequence: Synthetic oligonucleotide
auugaagacccacucugug

SEQ ID NO: 230203 - RNA, 19 nt, Artificial Sequence
  Description of Artificial Sequence: Synthetic oligonucleotide
uuugggugagcuucgggca

SEQ ID NO: 230204 - RNA, 19 nt, Artificial Sequence
  Description of Artificial Sequence: Synthetic oligonucleotide
acauagaugucugaaccag

SEQ ID NO: 230205 - RNA, 19 nt, Artificial Sequence
  Description of Artificial Sequence: Synthetic oligonucleotide
guuguccucacgcaagugc

SEQ ID NO: 230206 - RNA, 19 nt, Artificial Sequence
  Description of Artificial Sequence: Synthetic oligonucleotide
caucccuuccaacuggucc

SEQ ID NO: 230207 - RNA, 19 nt, Artificial Sequence
  Description of Artificial Sequence: Synthetic oligonucleotide
uaggaaacaccuucauuca

SEQ ID NO: 230208 - RNA, 19 nt, Artificial Sequence
  Description of Artificial Sequence: Synthetic oligonucleotide
auaggcuuuggcggcaucc

SEQ ID NO: 230209 - RNA, 19 nt, Artificial Sequence
  Description of Artificial Sequence: Synthetic oligonucleotide
acugugggcacuugaugcg

SEQ ID NO: 230210 - RNA, 19 nt, Artificial Sequence
  Description of Artificial Sequence: Synthetic oligonucleotide
cauagaugucugaaccagg

SEQ ID NO: 230211 - RNA, 19 nt, Artificial Sequence
  Description of Artificial Sequence: Synthetic oligonucleotide
cuucgagggauguugccgg

SEQ ID NO: 230212 - RNA, 19 nt, Artificial Sequence
  Description of Artificial Sequence: Synthetic oligonucleotide
aauacuuuccaaggccuga

SEQ ID NO: 230213 - RNA, 19 nt, Artificial Sequence
  Description of Artificial Sequence: Synthetic oligonucleotide
uguaaaugcucucgucaga

SEQ ID NO: 230214 - RNA, 19 nt, Artificial Sequence
  Description of Artificial Sequence: Synthetic oligonucleotide
ugguauugaagacccacuc

SEQ ID NO: 230215 - RNA, 19 nt, Artificial Sequence
  Description of Artificial Sequence: Synthetic oligonucleotide
acuagugacggauguucuc

SEQ ID NO: 230216 - RNA, 19 nt, Artificial Sequence
  Description of Artificial Sequence: Synthetic oligonucleotide
ugguggacuuggaaguggg

SEQ ID NO: 230217 - RNA, 19 nt, Artificial Sequence
  Description of Artificial Sequence: Synthetic oligonucleotide
aaaggcagauaaugauugu

SEQ ID NO: 230218 - RNA, 19 nt, Artificial Sequence
  Description of Artificial Sequence: Synthetic oligonucleotide
ugaagggauggugagggcc

SEQ ID NO: 230219 - RNA, 19 nt, Artificial Sequence
  Description of Artificial Sequence: Synthetic oligonucleotide
aaacccuucgggcauggau

SEQ ID NO: 230220 - RNA, 19 nt, Artificial Sequence
  Description of Artificial Sequence: Synthetic oligonucleotide
cauuaggccagggucaggg

SEQ ID NO: 230221 - RNA, 19 nt, Artificial Sequence
  Description of Artificial Sequence: Synthetic oligonucleotide
cacuagagaugcuucgagg

SEQ ID NO: 230222 - RNA, 19 nt, Artificial Sequence
  Description of Artificial Sequence: Synthetic oligonucleotide
cuuugccuggccccgaacg

SEQ ID NO: 230223 - RNA, 19 nt, Artificial Sequence
  Description of Artificial Sequence: Synthetic oligonucleotide
ugucgauggaggcugggga

SEQ ID NO: 230224 - RNA, 19 nt, Artificial Sequence
  Description of Artificial Sequence: Synthetic oligonucleotide
cuagugacggauguucucc

SEQ ID NO: 230225 - RNA, 19 nt, Artificial Sequence
  Description of Artificial Sequence: Synthetic oligonucleotide
agcuaugccacaggggcgc

SEQ ID NO: 230226 - RNA, 19 nt, Artificial Sequence
  Description of Artificial Sequence: Synthetic oligonucleotide
caauguguaagauggccuc

SEQ ID NO: 230227 - RNA, 19 nt, Artificial Sequence
  Description of Artificial Sequence: Synthetic oligonucleotide
aucggacugaguguucugc

SEQ ID NO: 230228 - RNA, 19 nt, Artificial Sequence
  Description of Artificial Sequence: Synthetic oligonucleotide
ucgaugaguuucuuuagau

SEQ ID NO: 230229 - RNA, 19 nt, Artificial Sequence
  Description of Artificial Sequence: Synthetic oligonucleotide
caugggacucugcagcugg

SEQ ID NO: 230230 - RNA, 19 nt, Artificial Sequence
  Description of Artificial Sequence: Synthetic oligonucleotide
gaaggugcuguucucccug

SEQ ID NO: 230231 - RNA, 19 nt, Artificial Sequence
  Description of Artificial Sequence: Synthetic oligonucleotide
cuaggguccgaucugccag

SEQ ID NO: 230232 - RNA, 19 nt, Artificial Sequence
  Description of Artificial Sequence: Synthetic oligonucleotide
gauccugccggauuaaucu

SEQ ID NO: 230233 - RNA, 19 nt, Artificial Sequence
  Description of Artificial Sequence: Synthetic oligonucleotide
uguugaguucagauucugu

SEQ ID NO: 230234 - RNA, 19 nt, Artificial Sequence
  Description of Artificial Sequence: Synthetic oligonucleotide
gucuaugguauugaagacc

SEQ ID NO: 230235 - RNA, 19 nt, Artificial Sequence
  Description of Artificial Sequence: Synthetic oligonucleotide
aacgaggcucucuggaccu

SEQ ID NO: 230236 - RNA, 19 nt, Artificial Sequence
  Description of Artificial Sequence: Synthetic oligonucleotide
ucaaggucgaugaguuucu

SEQ ID NO: 230237 - RNA, 19 nt, Artificial Sequence
  Description of Artificial Sequence: Synthetic oligonucleotide
ucagccgagaggucauggg

SEQ ID NO: 230238 - RNA, 19 nt, Artificial Sequence
  Description of Artificial Sequence: Synthetic oligonucleotide
gagugucgggagcucaugg

SEQ ID NO: 230239 - RNA, 19 nt, Artificial Sequence
  Description of Artificial Sequence: Synthetic oligonucleotide
uuagcucaugucuauggua

SEQ ID NO: 230240 - RNA, 19 nt, Artificial Sequence
  Description of Artificial Sequence: Synthetic oligonucleotide
gaucguucggcucacccca

SEQ ID NO: 230241 - RNA, 19 nt, Artificial Sequence
  Description of Artificial Sequence: Synthetic oligonucleotide
aguuacggcacugggaucu

SEQ ID NO: 230242 - RNA, 19 nt, Artificial Sequence
  Description of Artificial Sequence: Synthetic oligonucleotide
cauuuguuauuauuccuga

SEQ ID NO: 230243 - RNA, 19 nt, Artificial Sequence
  Description of Artificial Sequence: Synthetic oligonucleotide
ugcaauuguguugugcacu

SEQ ID NO: 230244 - RNA, 19 nt, Artificial Sequence
  Description of Artificial Sequence: Synthetic oligonucleotide
gaccaguccaagucugcgg

SEQ ID NO: 230245 - RNA, 19 nt, Artificial Sequence
  Description of Artificial Sequence: Synthetic oligonucleotide
ugccggauuaaucucccac

SEQ ID NO: 230246 - RNA, 19 nt, Artificial Sequence
  Description of Artificial Sequence: Synthetic oligonucleotide
guaggcuccaucuggucgc

SEQ ID NO: 230247 - RNA, 19 nt, Artificial Sequence
  Description of Artificial Sequence: Synthetic oligonucleotide
ucacuagugacggauguuc

SEQ ID NO: 230248 - RNA, 19 nt, Artificial Sequence
  Description of Artificial Sequence: Synthetic oligonucleotide
aucucauuaccaucacucu

SEQ ID NO: 230249 - RNA, 19 nt, Artificial Sequence
  Description of Artificial Sequence: Synthetic oligonucleotide
augguacuggugugugacc

SEQ ID NO: 230250 - RNA, 19 nt, Artificial Sequence
  Description of Artificial Sequence: Synthetic oligonucleotide
agccguagggcucuacauc

SEQ ID NO: 230251 - RNA, 19 nt, Artificial Sequence
  Description of Artificial Sequence: Synthetic oligonucleotide
cacuucucgucacuguggg

SEQ ID NO: 230252 - RNA, 19 nt, Artificial Sequence
  Description of Artificial Sequence: Synthetic oligonucleotide
guaggacuucaucuggacc

SEQ ID NO: 230253 - RNA, 19 nt, Artificial Sequence
  Description of Artificial Sequence: Synthetic oligonucleotide
gacggauguucuccaagag

SEQ ID NO: 230254 - RNA, 19 nt, Artificial Sequence
  Description of Artificial Sequence: Synthetic oligonucleotide
ugcgguccccaucauacca

SEQ ID NO: 230255 - RNA, 19 nt, Artificial Sequence
  Description of Artificial Sequence: Synthetic oligonucleotide
agguaguuauagcuguuga

SEQ ID NO: 230256 - RNA, 19 nt, Artificial Sequence
  Description of Artificial Sequence: Synthetic oligonucleotide
ugucgggagcucaugguac

SEQ ID NO: 230257 - RNA, 19 nt, Artificial Sequence
  Description of Artificial Sequence: Synthetic oligonucleotide
ugggagaggacuccuuacu

SEQ ID NO: 230258 - RNA, 19 nt, Artificial Sequence
  Description of Artificial Sequence: Synthetic oligonucleotide
augccuucauaguugacau

SEQ ID NO: 230259 - RNA, 19 nt, Artificial Sequence
  Description of Artificial Sequence: Synthetic oligonucleotide
aauaucggacugaguguuc

SEQ ID NO: 230260 - RNA, 19 nt, Artificial Sequence
  Description of Artificial Sequence: Synthetic oligonucleotide
aacuuccuccguggggugc

SEQ ID NO: 230261 - RNA, 19 nt, Artificial Sequence
  Description of Artificial Sequence: Synthetic oligonucleotide
uaccuuugauacugcuggg

SEQ ID NO: 230262 - RNA, 19 nt, Artificial Sequence
  Description of Artificial Sequence: Synthetic oligonucleotide
gaggguauugcugcuggag

SEQ ID NO: 230263 - RNA, 19 nt, Artificial Sequence
  Description of Artificial Sequence: Synthetic oligonucleotide
uacggcacugggaucuugc

SEQ ID NO: 230264 - RNA, 19 nt, Artificial Sequence
  Description of Artificial Sequence: Synthetic oligonucleotide
aaacuugaacucauaggaa

SEQ ID NO: 230265 - RNA, 19 nt, Artificial Sequence
  Description of Artificial Sequence: Synthetic oligonucleotide
ggcggcauccacuagguug

SEQ ID NO: 230266 - RNA, 19 nt, Artificial Sequence
  Description of Artificial Sequence: Synthetic oligonucleotide
aggcagauaaugauuguug

SEQ ID NO: 230267 - RNA, 19 nt, Artificial Sequence
  Description of Artificial Sequence: Synthetic oligonucleotide
aaggcagauaaugauuguu

SEQ ID NO: 230268 - RNA, 19 nt, Artificial Sequence
  Description of Artificial Sequence: Synthetic oligonucleotide
uuaaugguuccuucugguu

SEQ ID NO: 230269 - RNA, 19 nt, Artificial Sequence
  Description of Artificial Sequence: Synthetic oligonucleotide
gcuagggaugcccaaauac

SEQ ID NO: 230270 - RNA, 19 nt, Artificial Sequence
  Description of Artificial Sequence: Synthetic oligonucleotide
ugauucgggaguugggcuc

SEQ ID NO: 230271 - RNA, 19 nt, Artificial Sequence
  Description of Artificial Sequence: Synthetic oligonucleotide
aguaccuuugauacugcug

SEQ ID NO: 230272 - RNA, 19 nt, Artificial Sequence
  Description of Artificial Sequence: Synthetic oligonucleotide
ugccggcucuuucuggagg

SEQ ID NO: 230273 - RNA, 19 nt, Artificial Sequence
  Description of Artificial Sequence: Synthetic oligonucleotide
agagacggguaggugcugc

SEQ ID NO: 230274 - RNA, 19 nt, Artificial Sequence
  Description of Artificial Sequence: Synthetic oligonucleotide
ucggacugaguguucugcc

SEQ ID NO: 230275 - RNA, 19 nt, Artificial Sequence
  Description of Artificial Sequence: Synthetic oligonucleotide
cuaguggcacccuggcggg

SEQ ID NO: 230276 - RNA, 19 nt, Artificial Sequence
  Description of Artificial Sequence: Synthetic oligonucleotide
ggguagaaaguccuaggcc

SEQ ID NO: 230277 - RNA, 19 nt, Artificial Sequence
  Description of Artificial Sequence: Synthetic oligonucleotide
uguucugccugucgaugga

SEQ ID NO: 230278 - RNA, 19 nt, Artificial Sequence
  Description of Artificial Sequence: Synthetic oligonucleotide
  modified_base (7)..(7): a, c, u, g, unknown or other
cacuucncugccagcuggg

SEQ ID NO: 230279 - RNA, 19 nt, Artificial Sequence
  Description of Artificial Sequence: Synthetic oligonucleotide
ccuuagcucaugucuaugg

SEQ ID NO: 230280 - RNA, 19 nt, Artificial Sequence
  Description of Artificial Sequence: Synthetic oligonucleotide
ugaugcguugcuggagagg

SEQ ID NO: 230281 - RNA, 19 nt, Artificial Sequence
  Description of Artificial Sequence: Synthetic oligonucleotide
ugugugacccagcaucauu

SEQ ID NO: 230282 - RNA, 19 nt, Artificial Sequence
  Description of Artificial Sequence: Synthetic oligonucleotide
cagaguuaaugguuccuuc

SEQ ID NO: 230283 - RNA, 19 nt, Artificial Sequence
  Description of Artificial Sequence: Synthetic oligonucleotide
ugcguggaacuugaaauuc

SEQ ID NO: 230284 - RNA, 19 nt, Artificial Sequence
  Description of Artificial Sequence: Synthetic oligonucleotide
uagagaugcuucgagggau

SEQ ID NO: 230285 - RNA, 19 nt, Artificial Sequence
  Description of Artificial Sequence: Synthetic oligonucleotide
ggcagagaauucuccaugc

SEQ ID NO: 230286 - RNA, 19 nt, Artificial Sequence
  Description of Artificial Sequence: Synthetic oligonucleotide
auucugugcgguccccauc

SEQ ID NO: 230287 - RNA, 19 nt, Artificial Sequence
  Description of Artificial Sequence: Synthetic oligonucleotide
ucucuaggguccgaucugc

SEQ ID NO: 230288 - RNA, 19 nt, Artificial Sequence
  Description of Artificial Sequence: Synthetic oligonucleotide
cugagcaacuuccuccgug

SEQ ID NO: 230289 - RNA, 19 nt, Artificial Sequence
  Description of Artificial Sequence: Synthetic oligonucleotide
guccgaggcauucugggac

SEQ ID NO: 230290 - RNA, 19 nt, Artificial Sequence
  Description of Artificial Sequence: Synthetic oligonucleotide
aaggucgaugaguuucuuu

SEQ ID NO: 230291 - RNA, 19 nt, Artificial Sequence
  Description of Artificial Sequence: Synthetic oligonucleotide
agccgagaggucaugggac

SEQ ID NO: 230292 - RNA, 19 nt, Artificial Sequence
  Description of Artificial Sequence: Synthetic oligonucleotide
ccgaucaaguacuugcuag

SEQ ID NO: 230293 - RNA, 19 nt, Artificial Sequence
  Description of Artificial Sequence: Synthetic oligonucleotide
accccaaacccuucgggca

SEQ ID NO: 230294 - RNA, 19 nt, Artificial Sequence
  Description of Artificial Sequence: Synthetic oligonucleotide
cuuugauacugcugggaga

SEQ ID NO: 230295 - RNA, 19 nt, Artificial Sequence
  Description of Artificial Sequence: Synthetic oligonucleotide
uguuggaggccgcacucaa

SEQ ID NO: 230296 - RNA, 19 nt, Artificial Sequence
  Description of Artificial Sequence: Synthetic oligonucleotide
ucucgucagacaguguccu

SEQ ID NO: 230297 - RNA, 19 nt, Artificial Sequence
  Description of Artificial Sequence: Synthetic oligonucleotide
cucuggccgcuguaaaugc

SEQ ID NO: 230298 - RNA, 19 nt, Artificial Sequence
  Description of Artificial Sequence: Synthetic oligonucleotide
auaucggacugaguguucu

SEQ ID NO: 230299 - RNA, 19 nt, Artificial Sequence
  Description of Artificial Sequence: Synthetic oligonucleotide
ccucaaguuguccucacgc

SEQ ID NO: 230300 - RNA, 19 nt, Artificial Sequence
  Description of Artificial Sequence: Synthetic oligonucleotide
gauguugccggcucuuucu

SEQ ID NO: 230301 - RNA, 19 nt, Artificial Sequence
  Description of Artificial Sequence: Synthetic oligonucleotide
cacuagguuggaccagucc

SEQ ID NO: 230302 - RNA, 19 nt, Artificial Sequence
  Description of Artificial Sequence: Synthetic oligonucleotide
  modified_base (5)..(5): a, c, u, g, unknown or other
cuucncugccagcugggug

SEQ ID NO: 230303 - RNA, 19 nt, Artificial Sequence
  Description of Artificial Sequence: Synthetic oligonucleotide
uccgaucaaguacuugcua

SEQ ID NO: 230304 - RNA, 19 nt, Artificial Sequence
  Description of Artificial Sequence: Synthetic oligonucleotide
acuugcuaguggcacccug

SEQ ID NO: 230305 - RNA, 19 nt, Artificial Sequence
  Description of Artificial Sequence: Synthetic oligonucleotide
ggcagauaaugauuguuga

SEQ ID NO: 230306 - RNA, 19 nt, Artificial Sequence
  Description of Artificial Sequence: Synthetic oligonucleotide
guuaaugguuccuucuggu

SEQ ID NO: 230307 - RNA, 19 nt, Artificial Sequence
  Description of Artificial Sequence: Synthetic oligonucleotide
uccgaucugccagggagag

SEQ ID NO: 230308 - RNA, 19 nt, Artificial Sequence
  Description of Artificial Sequence: Synthetic oligonucleotide
gcaauuguguugugcacug

SEQ ID NO: 230309 - RNA, 19 nt, Artificial Sequence
  Description of Artificial Sequence: Synthetic oligonucleotide
gaguugggcucucaagguc

SEQ ID NO: 230310 - RNA, 19 nt, Artificial Sequence
  Description of Artificial Sequence: Synthetic oligonucleotide
aguguucugccugucgaug

SEQ ID NO: 230311 - RNA, 19 nt, Artificial Sequence
  Description of Artificial Sequence: Synthetic oligonucleotide
ccuuugauacugcugggag

SEQ ID NO: 230312 - RNA, 19 nt, Artificial Sequence
  Description of Artificial Sequence: Synthetic oligonucleotide
gcacguaggcuccaucugg

SEQ ID NO: 230313 - RNA, 19 nt, Artificial Sequence
  Description of Artificial Sequence: Synthetic oligonucleotide
guagccucaaguuguccuc

SEQ ID NO: 230314 - RNA, 19 nt, Artificial Sequence
  Description of Artificial Sequence: Synthetic oligonucleotide
cuagaagugaagcccugga

SEQ ID NO: 230315 - RNA, 19 nt, Artificial Sequence
  Description of Artificial Sequence: Synthetic oligonucleotide
caggccguggcccucaguc

SEQ ID NO: 230316 - RNA, 19 nt, Artificial Sequence
  Description of Artificial Sequence: Synthetic oligonucleotide
ugggcgcccgucacuagag

SEQ ID NO: 230317 - RNA, 19 nt, Artificial Sequence
  Description of Artificial Sequence: Synthetic oligonucleotide
uuagcauuccgcugccauu

SEQ ID NO: 230318 - RNA, 19 nt, Artificial Sequence
  Description of Artificial Sequence: Synthetic oligonucleotide
ugguaucgauaccacuguc

SEQ ID NO: 230319 - RNA, 19 nt, Artificial Sequence
  Description of Artificial Sequence: Synthetic oligonucleotide
ccagcauucagccgagagg

SEQ ID NO: 230320 - RNA, 19 nt, Artificial Sequence
  Description of Artificial Sequence: Synthetic oligonucleotide
ggguauugcugcuggagug

SEQ ID NO: 230321 - RNA, 19 nt, Artificial Sequence
  Description of Artificial Sequence: Synthetic oligonucleotide
gacggguaggugcugcuga

SEQ ID NO: 230322 - RNA, 19 nt, Artificial Sequence
  Description of Artificial Sequence: Synthetic oligonucleotide
gagcuaugccacaggggcg

SEQ ID NO: 230323 - RNA, 19 nt, Artificial Sequence
  Description of Artificial Sequence: Synthetic oligonucleotide
ucuggccgcuguaaaugcu

SEQ ID NO: 230324 - RNA, 19 nt, Artificial Sequence
  Description of Artificial Sequence: Synthetic oligonucleotide
cucaaguuguccucacgca

SEQ ID NO: 230325 - RNA, 19 nt, Artificial Sequence
  Description of Artificial Sequence: Synthetic oligonucleotide
gguuguggugggaugaagc

SEQ ID NO: 230326 - RNA, 19 nt, Artificial Sequence
  Description of Artificial Sequence: Synthetic oligonucleotide
cuagggaugcccaaauacu

SEQ ID NO: 230327 - RNA, 19 nt, Artificial Sequence
  Description of Artificial Sequence: Synthetic oligonucleotide
uaucggacugaguguucug

SEQ ID NO: 230328 - RNA, 19 nt, Artificial Sequence
  Description of Artificial Sequence: Synthetic oligonucleotide
gaggccgcacucaaagggc

SEQ ID NO: 230329 - RNA, 19 nt, Artificial Sequence
  Description of Artificial Sequence: Synthetic oligonucleotide
augcuucgagggauguugc

SEQ ID NO: 230330 - RNA, 19 nt, Artificial Sequence
  Description of Artificial Sequence: Synthetic oligonucleotide
uccuuagggguagugacuu

SEQ ID NO: 230331 - RNA, 19 nt, Artificial Sequence
  Description of Artificial Sequence: Synthetic oligonucleotide
ugccaccaauaucggacug

SEQ ID NO: 230332 - RNA, 19 nt, Artificial Sequence
  Description of Artificial Sequence: Synthetic oligonucleotide
guggaagcuagggaugccc

SEQ ID NO: 230333 - RNA, 19 nt, Artificial Sequence
  Description of Artificial Sequence: Synthetic oligonucleotide
cuagagaugcuucgaggga

SEQ ID NO: 230334 - RNA, 19 nt, Artificial Sequence
  Description of Artificial Sequence: Synthetic oligonucleotide
cacccuuguuagcauuccg

SEQ ID NO: 230335 - RNA, 19 nt, Artificial Sequence
  Description of Artificial Sequence: Synthetic oligonucleotide
gagauggcacguaggcucc

SEQ ID NO: 230336 - RNA, 19 nt, Artificial Sequence
  Description of Artificial Sequence: Synthetic oligonucleotide
uccgaggcauucugggacu

SEQ ID NO: 230337 - RNA, 19 nt, Artificial Sequence
  Description of Artificial Sequence: Synthetic oligonucleotide
uccgcugccauuuguuauu

SEQ ID NO: 230338 - RNA, 19 nt, Artificial Sequence
  Description of Artificial Sequence: Synthetic oligonucleotide
cuggccgcuguaaaugcuc

SEQ ID NO: 230339 - RNA, 19 nt, Artificial Sequence
  Description of Artificial Sequence: Synthetic oligonucleotide
gcagucgucauggggaggg

SEQ ID NO: 230340 - RNA, 19 nt, Artificial Sequence
  Description of Artificial Sequence: Synthetic oligonucleotide
  modified_base (9)..(9): a, c, u, g, unknown or other
cucacuucncugccagcug

SEQ ID NO: 230341 - RNA, 19 nt, Artificial Sequence
  Description of Artificial Sequence: Synthetic oligonucleotide
gcucucgucagacaguguc

SEQ ID NO: 230342 - RNA, 19 nt, Artificial Sequence
  Description of Artificial Sequence: Synthetic oligonucleotide
acguaggcuccaucugguc

SEQ ID NO: 230343 - RNA, 19 nt, Artificial Sequence
  Description of Artificial Sequence: Synthetic oligonucleotide
ggaucguucggcucacccc

SEQ ID NO: 230344 - RNA, 19 nt, Artificial Sequence
  Description of Artificial Sequence: Synthetic oligonucleotide
uggccgcuguaaaugcucu

SEQ ID NO: 230345 - RNA, 19 nt, Artificial Sequence
  Description of Artificial Sequence: Synthetic oligonucleotide
gugcagucgucauggggag

SEQ ID NO: 230346 - RNA, 19 nt, Artificial Sequence
  Description of Artificial Sequence: Synthetic oligonucleotide
gacagugcguggaacuuga

SEQ ID NO: 230347 - RNA, 19 nt, Artificial Sequence
  Description of Artificial Sequence: Synthetic oligonucleotide
gugagcuucgggcacugga

SEQ ID NO: 230348 - RNA, 19 nt, Artificial Sequence
  Description of Artificial Sequence: Synthetic oligonucleotide
ugcguugcuggagagggua

SEQ ID NO: 230349 - RNA, 19 nt, Artificial Sequence
  Description of Artificial Sequence: Synthetic oligonucleotide
uagccguagggcucuacau

SEQ ID NO: 230350 - RNA, 19 nt, Artificial Sequence
  Description of Artificial Sequence: Synthetic oligonucleotide
accuuugauacugcuggga

SEQ ID NO: 230351 - RNA, 19 nt, Artificial Sequence
  Description of Artificial Sequence: Synthetic oligonucleotide
ccuccuuagggguagugac

SEQ ID NO: 230352 - RNA, 19 nt, Artificial Sequence
  Description of Artificial Sequence: Synthetic oligonucleotide
cugucgauggaggcugggg

SEQ ID NO: 230353 - RNA, 19 nt, Artificial Sequence
  Description of Artificial Sequence: Synthetic oligonucleotide
aggggcauuaggccagggu

SEQ ID NO: 230354 - RNA, 19 nt, Artificial Sequence
  Description of Artificial Sequence: Synthetic oligonucleotide
aaggucccugguugaggcu

SEQ ID NO: 230355 - RNA, 19 nt, Artificial Sequence
  Description of Artificial Sequence: Synthetic oligonucleotide
uaugccacaggggcgccac

SEQ ID NO: 230356 - RNA, 19 nt, Artificial Sequence
  Description of Artificial Sequence: Synthetic oligonucleotide
aagcccgaaggucccuggu

SEQ ID NO: 230357 - RNA, 19 nt, Artificial Sequence
  Description of Artificial Sequence: Synthetic oligonucleotide
cauuaccaucacucuggug

SEQ ID NO: 230358 - RNA, 19 nt, Artificial Sequence
  Description of Artificial Sequence: Synthetic oligonucleotide
uucgagggauguugccggc

SEQ ID NO: 230359 - RNA, 19 nt, Artificial Sequence
  Description of Artificial Sequence: Synthetic oligonucleotide
gucgcaaugcuguccucac

SEQ ID NO: 230360 - RNA, 19 nt, Artificial Sequence
  Description of Artificial Sequence: Synthetic oligonucleotide
auuccgcugccauuuguua

SEQ ID NO: 230361 - RNA, 19 nt, Artificial Sequence
  Description of Artificial Sequence: Synthetic oligonucleotide
gguaucgauaccacuguca

SEQ ID NO: 230362 - RNA, 19 nt, Artificial Sequence
  Description of Artificial Sequence: Synthetic oligonucleotide
cucuaggguccgaucugcc

SEQ ID NO: 230363 - RNA, 19 nt, Artificial Sequence
  Description of Artificial Sequence: Synthetic oligonucleotide
cuagguuggaccaguccaa

SEQ ID NO: 230364 - RNA, 19 nt, Artificial Sequence
  Description of Artificial Sequence: Synthetic oligonucleotide
cuuacugcuguaggacuuc

SEQ ID NO: 230365 - RNA, 19 nt, Artificial Sequence
  Description of Artificial Sequence: Synthetic oligonucleotide
ggaguuacggcacugggau

SEQ ID NO: 230366 - RNA, 19 nt, Artificial Sequence
  Description of Artificial Sequence: Synthetic oligonucleotide
uguguaagauggccuccuu

SEQ ID NO: 230367 - RNA, 19 nt, Artificial Sequence
  Description of Artificial Sequence: Synthetic oligonucleotide
agguuggaccaguccaagu

SEQ ID NO: 230368 - RNA, 19 nt, Artificial Sequence
  Description of Artificial Sequence: Synthetic oligonucleotide
aaagggcgaugguuuucau

SEQ ID NO: 230369 - RNA, 19 nt, Artificial Sequence
  Description of Artificial Sequence: Synthetic oligonucleotide
cuggggaucguucggcuca

SEQ ID NO: 230370 - RNA, 19 nt, Artificial Sequence
  Description of Artificial Sequence: Synthetic oligonucleotide
aaggugcgaguugggaggu

SEQ ID NO: 230371 - RNA, 19 nt, Artificial Sequence
  Description of Artificial Sequence: Synthetic oligonucleotide
gaaagcaggcaguaccuuu

SEQ ID NO: 230372 - RNA, 19 nt, Artificial Sequence
  Description of Artificial Sequence: Synthetic oligonucleotide
gagcuucgggcacuggaga

SEQ ID NO: 230373 - RNA, 19 nt, Artificial Sequence
  Description of Artificial Sequence: Synthetic oligonucleotide
uaguggcugucagaauggc

SEQ ID NO: 230374 - RNA, 19 nt, Artificial Sequence
  Description of Artificial Sequence: Synthetic oligonucleotide
guguaaggcccgccgggag

SEQ ID NO: 230375 - RNA, 19 nt, Artificial Sequence
  Description of Artificial Sequence: Synthetic oligonucleotide
cccucagucucuagggucc

SEQ ID NO: 230376 - RNA, 19 nt, Artificial Sequence
  Description of Artificial Sequence: Synthetic oligonucleotide
guucagauucugugcgguc

SEQ ID NO: 230377 - RNA, 19 nt, Artificial Sequence
  Description of Artificial Sequence: Synthetic oligonucleotide
  modified_base (11)..(11): a, c, u, g, unknown or other
uccucacuucncugccagc

SEQ ID NO: 230378 - RNA, 19 nt, Artificial Sequence
  Description of Artificial Sequence: Synthetic oligonucleotide
gggaucguucggcucaccc

SEQ ID NO: 230379 - RNA, 19 nt, Artificial Sequence
  Description of Artificial Sequence: Synthetic oligonucleotide
ucgcaaugcuguccucacu

SEQ ID NO: 230380 - RNA, 19 nt, Artificial Sequence
  Description of Artificial Sequence: Synthetic oligonucleotide
ggaccaguccaagucugcg

SEQ ID NO: 230381 - RNA, 19 nt, Artificial Sequence
  Description of Artificial Sequence: Synthetic oligonucleotide
cagaccugccuugccaggc

SEQ ID NO: 230382 - RNA, 19 nt, Artificial Sequence
  Description of Artificial Sequence: Synthetic oligonucleotide
auccgaucaaguacuugcu

SEQ ID NO: 230383 - RNA, 19 nt, Artificial Sequence
  Description of Artificial Sequence: Synthetic oligonucleotide
cagcauucagccgagaggu

SEQ ID NO: 230384 - RNA, 19 nt, Artificial Sequence
  Description of Artificial Sequence: Synthetic oligonucleotide
ugcgaguugggagguugug

SEQ ID NO: 230385 - RNA, 19 nt, Artificial Sequence
  Description of Artificial Sequence: Synthetic oligonucleotide
aggccgcacucaaagggcg

SEQ ID NO: 230386 - RNA, 19 nt, Artificial Sequence
  Description of Artificial Sequence: Synthetic oligonucleotide
aaggcccgccgggagguag

SEQ ID NO: 230387 - RNA, 19 nt, Artificial Sequence
  Description of Artificial Sequence: Synthetic oligonucleotide
ugcagucgucauggggagg

SEQ ID NO: 230388 - RNA, 19 nt, Artificial Sequence
  Description of Artificial Sequence: Synthetic oligonucleotide
cucggagccuagugugggc

SEQ ID NO: 230389 - RNA, 19 nt, Artificial Sequence
  Description of Artificial Sequence: Synthetic oligonucleotide
guucugccugucgauggag

SEQ ID NO: 230390 - RNA, 19 nt, Artificial Sequence
  Description of Artificial Sequence: Synthetic oligonucleotide
uucacuagugacggauguu

SEQ ID NO: 230391 - RNA, 19 nt, Artificial Sequence
  Description of Artificial Sequence: Synthetic oligonucleotide
ggugccgcuuucuuguauc

SEQ ID NO: 230392 - RNA, 19 nt, Artificial Sequence
  Description of Artificial Sequence: Synthetic oligonucleotide
cuuagcucaugucuauggu

SEQ ID NO: 230393 - RNA, 19 nt, Artificial Sequence
  Description of Artificial Sequence: Synthetic oligonucleotide
guucuccaagagaucaauc

SEQ ID NO: 230394 - RNA, 19 nt, Artificial Sequence
  Description of Artificial Sequence: Synthetic oligonucleotide
ggagacagccuccuuucca

SEQ ID NO: 230395 - RNA, 19 nt, Artificial Sequence
  Description of Artificial Sequence: Synthetic oligonucleotide
ucgauggaggcuggggauc

SEQ ID NO: 230396 - RNA, 19 nt, Artificial Sequence
  Description of Artificial Sequence: Synthetic oligonucleotide
agaccugccuugccaggca

SEQ ID NO: 230397 - RNA, 19 nt, Artificial Sequence
  Description of Artificial Sequence: Synthetic oligonucleotide
aggcaguaccuuugauacu

SEQ ID NO: 230398 - RNA, 19 nt, Artificial Sequence
  Description of Artificial Sequence: Synthetic oligonucleotide
ugucggacaggagcagagu

SEQ ID NO: 230399 - RNA, 19 nt, Artificial Sequence
  Description of Artificial Sequence: Synthetic oligonucleotide
guguaagauggccuccuua

SEQ ID NO: 230400 - RNA, 19 nt, Artificial Sequence
  Description of Artificial Sequence: Synthetic oligonucleotide
ccuuguuagcauuccgcug

SEQ ID NO: 230401 - RNA, 19 nt, Artificial Sequence
  Description of Artificial Sequence: Synthetic oligonucleotide
aggccgugcugccauggcu

SEQ ID NO: 230402 - RNA, 19 nt, Artificial Sequence
  Description of Artificial Sequence: Synthetic oligonucleotide
gaggcucggagccuagugu

SEQ ID NO: 230403 - RNA, 19 nt, Artificial Sequence
  Description of Artificial Sequence: Synthetic oligonucleotide
ccggauuaaucucccacug

SEQ ID NO: 230404 - RNA, 19 nt, Artificial Sequence
  Description of Artificial Sequence: Synthetic oligonucleotide
gcgaguugggagguugugg

SEQ ID NO: 230405 - RNA, 19 nt, Artificial Sequence
  Description of Artificial Sequence: Synthetic oligonucleotide
gaguuacggcacugggauc

SEQ ID NO: 230406 - RNA, 19 nt, Artificial Sequence
  Description of Artificial Sequence: Synthetic oligonucleotide
agagugucgggagcucaug

SEQ ID NO: 230407 - RNA, 19 nt, Artificial Sequence
  Description of Artificial Sequence: Synthetic oligonucleotide
cagccgagaggucauggga

SEQ ID NO: 230408 - RNA, 19 nt, Artificial Sequence
  Description of Artificial Sequence: Synthetic oligonucleotide
ggugcgaguugggagguug

SEQ ID NO: 230409 - RNA, 19 nt, Artificial Sequence
  Description of Artificial Sequence: Synthetic oligonucleotide
agcugcccuuagcucaugu

SEQ ID NO: 230410 - RNA, 19 nt, Artificial Sequence
  Description of Artificial Sequence: Synthetic oligonucleotide
uguuagcauuccgcugcca

SEQ ID NO: 230411 - RNA, 19 nt, Artificial Sequence
  Description of Artificial Sequence: Synthetic oligonucleotide
uccauccgaucaaguacuu

SEQ ID NO: 230412 - RNA, 19 nt, Artificial Sequence
  Description of Artificial Sequence: Synthetic oligonucleotide
cauuuaugcugaaggugcu

SEQ ID NO: 230413 - RNA, 19 nt, Artificial Sequence
  Description of Artificial Sequence: Synthetic oligonucleotide
uggugccgcuuucuuguau

SEQ ID NO: 230414 - RNA, 19 nt, Artificial Sequence
  Description of Artificial Sequence: Synthetic oligonucleotide
cccagcauucagccgagag

SEQ ID NO: 230415 - RNA, 19 nt, Artificial Sequence
  Description of Artificial Sequence: Synthetic oligonucleotide
ggcgccacuuucucuuugc

SEQ ID NO: 230416 - RNA, 19 nt, Artificial Sequence
  Description of Artificial Sequence: Synthetic oligonucleotide
ucgggagcucaugguacug

SEQ ID NO: 230417 - RNA, 19 nt, Artificial Sequence
  Description of Artificial Sequence: Synthetic oligonucleotide
ccgaggcagagaauucucc

SEQ ID NO: 230418 - RNA, 19 nt, Artificial Sequence
  Description of Artificial Sequence: Synthetic oligonucleotide
agcuagggaugcccaaaua

SEQ ID NO: 230419 - RNA, 19 nt, Artificial Sequence
  Description of Artificial Sequence: Synthetic oligonucleotide
ucgguagguuucugagcaa

SEQ ID NO: 230420 - RNA, 19 nt, Artificial Sequence
  Description of Artificial Sequence: Synthetic oligonucleotide
cucgucagacaguguccug

SEQ ID NO: 230421 - RNA, 19 nt, Artificial Sequence
  Description of Artificial Sequence: Synthetic oligonucleotide
gccucaaguuguccucacg

SEQ ID NO: 230422 - RNA, 19 nt, Artificial Sequence
  Description of Artificial Sequence: Synthetic oligonucleotide
gacccacucugugaacuuc

SEQ ID NO: 230423 - RNA, 19 nt, Artificial Sequence
  Description of Artificial Sequence: Synthetic oligonucleotide
ugccucagaccugccuugc

SEQ ID NO: 230424 - RNA, 19 nt, Artificial Sequence
  Description of Artificial Sequence: Synthetic oligonucleotide
cagugcguggaacuugaaa

SEQ ID NO: 230425 - RNA, 19 nt, Artificial Sequence
  Description of Artificial Sequence: Synthetic oligonucleotide
gccguaggaggugguaucg

SEQ ID NO: 230426 - RNA, 19 nt, Artificial Sequence
  Description of Artificial Sequence: Synthetic oligonucleotide
uucgggcacuggagaacac

SEQ ID NO: 230427 - RNA, 19 nt, Artificial Sequence
  Description of Artificial Sequence: Synthetic oligonucleotide
uuacggcacugggaucuug

SEQ ID NO: 230428 - RNA, 19 nt, Artificial Sequence
  Description of Artificial Sequence: Synthetic oligonucleotide
  modified_base (3)..(3): a, c, u, g, unknown or other
ucncugccagcugggugug

SEQ ID NO: 230429 - RNA, 19 nt, Artificial Sequence
  Description of Artificial Sequence: Synthetic oligonucleotide
ccaccaauaucggacugag

SEQ ID NO: 230430 - RNA, 19 nt, Artificial Sequence
  Description of Artificial Sequence: Synthetic oligonucleotide
cggauuaaucucccacugg

SEQ ID NO: 230431 - RNA, 19 nt, Artificial Sequence
  Description of Artificial Sequence: Synthetic oligonucleotide
  modified_base (6)..(6): a, c, u, g, unknown or other
acuucncugccagcugggu

SEQ ID NO: 230432 - RNA, 19 nt, Artificial Sequence
  Description of Artificial Sequence: Synthetic oligonucleotide
ucgagggauguugccggcu

SEQ ID NO: 230433 - RNA, 19 nt, Artificial Sequence
  Description of Artificial Sequence: Synthetic oligonucleotide
gugcgguccccaucauacc

SEQ ID NO: 230434 - RNA, 19 nt, Artificial Sequence
  Description of Artificial Sequence: Synthetic oligonucleotide
uagugugggccaucucauu

SEQ ID NO: 230435 - RNA, 19 nt, Artificial Sequence
  Description of Artificial Sequence: Synthetic oligonucleotide
agugggcgcccgucacuag

SEQ ID NO: 230436 - RNA, 19 nt, Artificial Sequence
  Description of Artificial Sequence: Synthetic oligonucleotide
agcauucagccgagagguc

SEQ ID NO: 230437 - RNA, 19 nt, Artificial Sequence
  Description of Artificial Sequence: Synthetic oligonucleotide
ugcucucgucagacagugu

SEQ ID NO: 230438 - RNA, 19 nt, Artificial Sequence
  Description of Artificial Sequence: Synthetic oligonucleotide
acggguaggugcugcugaa

SEQ ID NO: 230439 - RNA, 19 nt, Artificial Sequence
  Description of Artificial Sequence: Synthetic oligonucleotide
gcucggagccuaguguggg

SEQ ID NO: 230440 - RNA, 19 nt, Artificial Sequence
  Description of Artificial Sequence: Synthetic oligonucleotide
ucguucggcucaccccaaa

SEQ ID NO: 230441 - RNA, 19 nt, Artificial Sequence
  Description of Artificial Sequence: Synthetic oligonucleotide
guaggaggugguaucgaua

SEQ ID NO: 230442 - RNA, 19 nt, Artificial Sequence
  Description of Artificial Sequence: Synthetic oligonucleotide
agcccgaaggucccugguu

SEQ ID NO: 230443 - RNA, 19 nt, Artificial Sequence
  Description of Artificial Sequence: Synthetic oligonucleotide
ccaagagaucaaucaucug

SEQ ID NO: 230444 - RNA, 19 nt, Artificial Sequence
  Description of Artificial Sequence: Synthetic oligonucleotide
ggggcauuuucccaucucu

SEQ ID NO: 230445 - RNA, 19 nt, Artificial Sequence
  Description of Artificial Sequence: Synthetic oligonucleotide
cagauucugugcggucccc

SEQ ID NO: 230446 - RNA, 19 nt, Artificial Sequence
  Description of Artificial Sequence: Synthetic oligonucleotide
caauaucggacugaguguu

SEQ ID NO: 230447 - RNA, 19 nt, Artificial Sequence
  Description of Artificial Sequence: Synthetic oligonucleotide
cauaccacuucucgucacu

SEQ ID NO: 230448 - RNA, 19 nt, Artificial Sequence
  Description of Artificial Sequence: Synthetic oligonucleotide
ggacagugcguggaacuug

SEQ ID NO: 230449 - RNA, 19 nt, Artificial Sequence
  Description of Artificial Sequence: Synthetic oligonucleotide
cgaucugccagggagagca

SEQ ID NO: 230450 - RNA, 19 nt, Artificial Sequence
  Description of Artificial Sequence: Synthetic oligonucleotide
gggccaucucauuaccauc

SEQ ID NO: 230451 - RNA, 19 nt, Artificial Sequence
  Description of Artificial Sequence: Synthetic oligonucleotide
ggagaugggccuuguccuc

SEQ ID NO: 230452 - RNA, 19 nt, Artificial Sequence
  Description of Artificial Sequence: Synthetic oligonucleotide
gugggcgcccgucacuaga

SEQ ID NO: 230453 - RNA, 19 nt, Artificial Sequence
  Description of Artificial Sequence: Synthetic oligonucleotide
gccguagggcucuacaucu

SEQ ID NO: 230454 - RNA, 19 nt, Artificial Sequence
  Description of Artificial Sequence: Synthetic oligonucleotide
guugaggcucggagccuag

SEQ ID NO: 230455 - RNA, 19 nt, Artificial Sequence
  Description of Artificial Sequence: Synthetic oligonucleotide
uaguggcacccuggcgggg

SEQ ID NO: 230456 - RNA, 19 nt, Artificial Sequence
  Description of Artificial Sequence: Synthetic oligonucleotide
ggucgcaaugcuguccuca

SEQ ID NO: 230457 - RNA, 19 nt, Artificial Sequence
  Description of Artificial Sequence: Synthetic oligonucleotide
cacuagugacggauguucu

SEQ ID NO: 230458 - RNA, 19 nt, Artificial Sequence
  Description of Artificial Sequence: Synthetic oligonucleotide
gcagauaaugauuguugau

SEQ ID NO: 230459 - RNA, 19 nt, Artificial Sequence
  Description of Artificial Sequence: Synthetic oligonucleotide
ccaauguguaagauggccu

SEQ ID NO: 230460 - RNA, 19 nt, Artificial Sequence
  Description of Artificial Sequence: Synthetic oligonucleotide
ggaguugggcucucaaggu

SEQ ID NO: 230461 - RNA, 19 nt, Artificial Sequence
  Description of Artificial Sequence: Synthetic oligonucleotide
ccgucacuagagaugcuuc

SEQ ID NO: 230462 - RNA, 19 nt, Artificial Sequence
  Description of Artificial Sequence: Synthetic oligonucleotide
gugcguggaacuugaaauu

SEQ ID NO: 230463 - RNA, 19 nt, Artificial Sequence
  Description of Artificial Sequence: Synthetic oligonucleotide
gagagacggguaggugcug

SEQ ID NO: 230464 - RNA, 19 nt, Artificial Sequence
  Description of Artificial Sequence: Synthetic oligonucleotide
cuccuuagggguagugacu

SEQ ID NO: 230465 - RNA, 19 nt, Artificial Sequence
  Description of Artificial Sequence: Synthetic oligonucleotide
gggaguuacggcacuggga

SEQ ID NO: 230466 - RNA, 19 nt, Artificial Sequence
  Description of Artificial Sequence: Synthetic oligonucleotide
gcacugucggacaggagca

SEQ ID NO: 230467 - RNA, 19 nt, Artificial Sequence
  Description of Artificial Sequence: Synthetic oligonucleotide
uacuugcuaguggcacccu

SEQ ID NO: 230468 - RNA, 19 nt, Artificial Sequence
  Description of Artificial Sequence: Synthetic oligonucleotide
gccggauuaaucucccacu

SEQ ID NO: 230469 - RNA, 19 nt, Artificial Sequence
  Description of Artificial Sequence: Synthetic oligonucleotide
cacguaggcuccaucuggu

SEQ ID NO: 230470 - RNA, 19 nt, Artificial Sequence
  Description of Artificial Sequence: Synthetic oligonucleotide
uggggugagugagcacccu

SEQ ID NO: 230471 - RNA, 19 nt, Artificial Sequence
  Description of Artificial Sequence: Synthetic oligonucleotide
uggggaucguucggcucac

SEQ ID NO: 230472 - RNA, 19 nt, Artificial Sequence
  Description of Artificial Sequence: Synthetic oligonucleotide
guugggcucucaaggucga

SEQ ID NO: 230473 - RNA, 19 nt, Artificial Sequence
  Description of Artificial Sequence: Synthetic oligonucleotide
gucgggagcucaugguacu

SEQ ID NO: 230474 - RNA, 19 nt, Artificial Sequence
  Description of Artificial Sequence: Synthetic oligonucleotide
cauagccguagggcucuac

SEQ ID NO: 230475 - RNA, 19 nt, Artificial Sequence
  Description of Artificial Sequence: Synthetic oligonucleotide
cagucgucauggggagggg

SEQ ID NO: 230476 - RNA, 19 nt, Artificial Sequence
  Description of Artificial Sequence: Synthetic oligonucleotide
gagacggguaggugcugcu

SEQ ID NO: 230477 - RNA, 19 nt, Artificial Sequence
  Description of Artificial Sequence: Synthetic oligonucleotide
acgaggcucucuggaccuc

SEQ ID NO: 230478 - RNA, 19 nt, Artificial Sequence
  Description of Artificial Sequence: Synthetic oligonucleotide
gauuucccacugccaccaa

SEQ ID NO: 230479 - RNA, 19 nt, Artificial Sequence
  Description of Artificial Sequence: Synthetic oligonucleotide
ucgucacugugggcacuug

SEQ ID NO: 230480 - RNA, 19 nt, Artificial Sequence
  Description of Artificial Sequence: Synthetic oligonucleotide
guccgaggcagagaauucu

SEQ ID NO: 230481 - RNA, 19 nt, Artificial Sequence
  Description of Artificial Sequence: Synthetic oligonucleotide
ccgaacgaggugaugaagu

SEQ ID NO: 230482 - RNA, 19 nt, Artificial Sequence
  Description of Artificial Sequence: Synthetic oligonucleotide
cgcccgucacuagagaugc

SEQ ID NO: 230483 - RNA, 19 nt, Artificial Sequence
  Description of Artificial Sequence: Synthetic oligonucleotide
cacucaaagggcgaugguu

SEQ ID NO: 230484 - RNA, 19 nt, Artificial Sequence
  Description of Artificial Sequence: Synthetic oligonucleotide
gcgccacuuucucuuugcc

SEQ ID NO: 230485 - RNA, 19 nt, Artificial Sequence
  Description of Artificial Sequence: Synthetic oligonucleotide
uggccccgaacgaggugau

SEQ ID NO: 230486 - RNA, 19 nt, Artificial Sequence
  Description of Artificial Sequence: Synthetic oligonucleotide
gccaccaauaucggacuga

SEQ ID NO: 230487 - RNA, 19 nt, Artificial Sequence
  Description of Artificial Sequence: Synthetic oligonucleotide
cgaggcagagaauucucca

SEQ ID NO: 230488 - RNA, 19 nt, Artificial Sequence
  Description of Artificial Sequence: Synthetic oligonucleotide
ccaucacuggcauucggua

SEQ ID NO: 230489 - RNA, 19 nt, Artificial Sequence
  Description of Artificial Sequence: Synthetic oligonucleotide
gccacgaugccuucauagu

SEQ ID NO: 230490 - RNA, 19 nt, Artificial Sequence
  Description of Artificial Sequence: Synthetic oligonucleotide
gcuggggaucguucggcuc

SEQ ID NO: 230491 - RNA, 19 nt, Artificial Sequence
  Description of Artificial Sequence: Synthetic oligonucleotide
guaaggcccgccgggaggu

SEQ ID NO: 230492 - RNA, 19 nt, Artificial Sequence
  Description of Artificial Sequence: Synthetic oligonucleotide
gaguaguggcugucagaau

SEQ ID NO: 230493 - RNA, 19 nt, Artificial Sequence
  Description of Artificial Sequence: Synthetic oligonucleotide
gggcgaugguuuucaucac

SEQ ID NO: 230494 - RNA, 19 nt, Artificial Sequence
  Description of Artificial Sequence: Synthetic oligonucleotide
cucaaagggcgaugguuuu

SEQ ID NO: 230495 - RNA, 19 nt, Artificial Sequence
  Description of Artificial Sequence: Synthetic oligonucleotide
gcgcccgucacuagagaug

SEQ ID NO: 230496 - RNA, 19 nt, Artificial Sequence
  Description of Artificial Sequence: Synthetic oligonucleotide
cccgaacgaggugaugaag

SEQ ID NO: 230497 - RNA, 19 nt, Artificial Sequence
  Description of Artificial Sequence: Synthetic oligonucleotide
ccuuagggguagugacuug

SEQ ID NO: 230498 - RNA, 19 nt, Artificial Sequence
  Description of Artificial Sequence: Synthetic oligonucleotide
gccgcuuucuuguauccau

SEQ ID NO: 230499 - RNA, 19 nt, Artificial Sequence
  Description of Artificial Sequence: Synthetic oligonucleotide
cugccggauuaaucuccca

SEQ ID NO: 230500 - RNA, 19 nt, Artificial Sequence
  Description of Artificial Sequence: Synthetic oligonucleotide
gguagguuucugagcaacu

SEQ ID NO: 230501 - RNA, 19 nt, Artificial Sequence
  Description of Artificial Sequence: Synthetic oligonucleotide
uggcggcauccacuagguu

SEQ ID NO: 230502 - RNA, 19 nt, Artificial Sequence
  Description of Artificial Sequence: Synthetic oligonucleotide
gagccuagugugggccauc

SEQ ID NO: 230503 - RNA, 19 nt, Artificial Sequence
  Description of Artificial Sequence: Synthetic oligonucleotide
ccauccgaucaaguacuug

SEQ ID NO: 230504 - RNA, 19 nt, Artificial Sequence
  Description of Artificial Sequence: Synthetic oligonucleotide
gcagagugucgggagcuca

SEQ ID NO: 230505 - RNA, 19 nt, Artificial Sequence
  Description of Artificial Sequence: Synthetic oligonucleotide
cuccguggggugcagucgu

SEQ ID NO: 230506 - RNA, 19 nt, Artificial Sequence
  Description of Artificial Sequence: Synthetic oligonucleotide
gcauuaggccagggucagg

SEQ ID NO: 230507 - RNA, 19 nt, Artificial Sequence
  Description of Artificial Sequence: Synthetic oligonucleotide
gggcgccacuuucucuuug

SEQ ID NO: 230508 - RNA, 19 nt, Artificial Sequence
  Description of Artificial Sequence: Synthetic oligonucleotide
cuuccuccguggggugcag

SEQ ID NO: 230509 - RNA, 19 nt, Artificial Sequence
  Description of Artificial Sequence: Synthetic oligonucleotide
ggcauucgguagguuucug

SEQ ID NO: 230510 - RNA, 19 nt, Artificial Sequence
  Description of Artificial Sequence: Synthetic oligonucleotide
uugggcucucaaggucgau

SEQ ID NO: 230511 - RNA, 19 nt, Artificial Sequence
  Description of Artificial Sequence: Synthetic oligonucleotide
cguucggcucaccccaaac

SEQ ID NO: 230512 - RNA, 19 nt, Artificial Sequence
  Description of Artificial Sequence: Synthetic oligonucleotide
ccguagggcucuacaucug

SEQ ID NO: 230513 - RNA, 19 nt, Artificial Sequence
  Description of Artificial Sequence: Synthetic oligonucleotide
augcguugcuggagagggu

SEQ ID NO: 230514 - RNA, 19 nt, Artificial Sequence
  Description of Artificial Sequence: Synthetic oligonucleotide
cccuuagcucaugucuaug

SEQ ID NO: 230515 - RNA, 19 nt, Artificial Sequence
  Description of Artificial Sequence: Synthetic oligonucleotide
cagagugucgggagcucau

SEQ ID NO: 230516 - RNA, 19 nt, Artificial Sequence
  Description of Artificial Sequence: Synthetic oligonucleotide
cgagggauguugccggcuc

SEQ ID NO: 230517 - RNA, 19 nt, Artificial Sequence
  Description of Artificial Sequence: Synthetic oligonucleotide
gccgagaggucaugggacu

SEQ ID NO: 230518 - RNA, 19 nt, Artificial Sequence
  Description of Artificial Sequence: Synthetic oligonucleotide
cgauaccacugucagcaga

SEQ ID NO: 230519 - RNA, 19 nt, Artificial Sequence
  Description of Artificial Sequence: Synthetic oligonucleotide
cgaucaaguacuugcuagu

SEQ ID NO: 230520 - RNA, 19 nt, Artificial Sequence
  Description of Artificial Sequence: Synthetic oligonucleotide
cuaugccacaggggcgcca

SEQ ID NO: 230521 - RNA, 19 nt, Artificial Sequence
  Description of Artificial Sequence: Synthetic oligonucleotide
caccaauaucggacugagu

SEQ ID NO: 230522 - RNA, 19 nt, Artificial Sequence
  Description of Artificial Sequence: Synthetic oligonucleotide
acagugcguggaacuugaa

SEQ ID NO: 230523 - RNA, 19 nt, Artificial Sequence
  Description of Artificial Sequence: Synthetic oligonucleotide
aucguucggcucaccccaa

SEQ ID NO: 230524 - RNA, 19 nt, Artificial Sequence
  Description of Artificial Sequence: Synthetic oligonucleotide
ccuaggcccagaggaggac

SEQ ID NO: 230525 - RNA, 19 nt, Artificial Sequence
  Description of Artificial Sequence: Synthetic oligonucleotide
gcuaugccacaggggcgcc

SEQ ID NO: 230526 - RNA, 19 nt, Artificial Sequence
  Description of Artificial Sequence: Synthetic oligonucleotide
gccugucgauggaggcugg

SEQ ID NO: 230527 - RNA, 19 nt, Artificial Sequence
  Description of Artificial Sequence: Synthetic oligonucleotide
ccgagaggucaugggacuc

SEQ ID NO: 230528 - RNA, 19 nt, Artificial Sequence
  Description of Artificial Sequence: Synthetic oligonucleotide
gugcgaguugggagguugu

SEQ ID NO: 230529 - RNA, 19 nt, Artificial Sequence
  Description of Artificial Sequence: Synthetic oligonucleotide
cgaugccuucauaguugac

SEQ ID NO: 230530 - RNA, 19 nt, Artificial Sequence
  Description of Artificial Sequence: Synthetic oligonucleotide
cccgccgggagguaggggu

SEQ ID NO: 230531 - RNA, 19 nt, Artificial Sequence
  Description of Artificial Sequence: Synthetic oligonucleotide
cgucauggggaggggauga

SEQ ID NO: 230532 - RNA, 19 nt, Artificial Sequence
  Description of Artificial Sequence: Synthetic oligonucleotide
ggccgcacucaaagggcga

SEQ ID NO: 230533 - RNA, 19 nt, Artificial Sequence
  Description of Artificial Sequence: Synthetic oligonucleotide
ccccgaacgaggugaugaa

SEQ ID NO: 230534 - RNA, 19 nt, Artificial Sequence
  Description of Artificial Sequence: Synthetic oligonucleotide
gcacuucacuggagcuaug

SEQ ID NO: 230535 - RNA, 19 nt, Artificial Sequence
  Description of Artificial Sequence: Synthetic oligonucleotide
ccgcacucaaagggcgaug

SEQ ID NO: 230536 - RNA, 19 nt, Artificial Sequence
  Description of Artificial Sequence: Synthetic oligonucleotide
ccgaucugccagggagagc

SEQ ID NO: 230537 - RNA, 19 nt, Artificial Sequence
  Description of Artificial Sequence: Synthetic oligonucleotide
caccgccaccuugcagauc

SEQ ID NO: 230538 - RNA, 19 nt, Artificial Sequence
  Description of Artificial Sequence: Synthetic oligonucleotide
ggggaucguucggcucacc

SEQ ID NO: 230539 - RNA, 19 nt, Artificial Sequence
  Description of Artificial Sequence: Synthetic oligonucleotide
ccgaggcauucugggacuc

SEQ ID NO: 230540 - RNA, 19 nt, Artificial Sequence
  Description of Artificial Sequence: Synthetic oligonucleotide
ccgcuguaaaugcucucgu

SEQ ID NO: 230541 - RNA, 19 nt, Artificial Sequence
  Description of Artificial Sequence: Synthetic oligonucleotide
ggccccgaacgaggugaug

SEQ ID NO: 230542 - RNA, 19 nt, Artificial Sequence
  Description of Artificial Sequence: Synthetic oligonucleotide
guuacggcacugggaucuu

SEQ ID NO: 230543 - RNA, 19 nt, Artificial Sequence
  Description of Artificial Sequence: Synthetic oligonucleotide
ccguaggaggugguaucga

SEQ ID NO: 230544 - RNA, 19 nt, Artificial Sequence
  Description of Artificial Sequence: Synthetic oligonucleotide
gcucccucuggccgcugua

SEQ ID NO: 230545 - RNA, 19 nt, Artificial Sequence
  Description of Artificial Sequence: Synthetic oligonucleotide
cucccuggucagugggcuu

SEQ ID NO: 230546 - RNA, 19 nt, Artificial Sequence
  Description of Artificial Sequence: Synthetic oligonucleotide
cccucuggccgcuguaaau

SEQ ID NO: 230547 - RNA, 19 nt, Artificial Sequence
  Description of Artificial Sequence: Synthetic oligonucleotide
gccgcacucaaagggcgau

SEQ ID NO: 230548 - RNA, 19 nt, Artificial Sequence
  Description of Artificial Sequence: Synthetic oligonucleotide
gccuucgggucuccuggau

SEQ ID NO: 230549 - RNA, 19 nt, Artificial Sequence
  Description of Artificial Sequence: Synthetic oligonucleotide
ccgcugccauuuguuauua

SEQ ID NO: 230550 - RNA, 19 nt, Artificial Sequence
  Description of Artificial Sequence: Synthetic oligonucleotide
gcucuacaucugccacgau

SEQ ID NO: 230551 - RNA, 19 nt, Artificial Sequence
  Description of Artificial Sequence: Synthetic oligonucleotide
ccgccgggagguagggguu

SEQ ID NO: 230552 - RNA, 19 nt, Artificial Sequence
  Description of Artificial Sequence: Synthetic oligonucleotide
aauaugauggcgcucuucg

SEQ ID NO: 230553 - RNA, 19 nt, Artificial Sequence
  Description of Artificial Sequence: Synthetic oligonucleotide
aaauaugccacauaagacu

SEQ ID NO: 230554 - RNA, 19 nt, Artificial Sequence
  Description of Artificial Sequence: Synthetic oligonucleotide
uguuuguugaagaagaaca

SEQ ID NO: 230555 - RNA, 19 nt, Artificial Sequence
  Description of Artificial Sequence: Synthetic oligonucleotide
aagucaaauacucucgagg

SEQ ID NO: 230556 - RNA, 19 nt, Artificial Sequence
  Description of Artificial Sequence: Synthetic oligonucleotide
ucuuaugucguuaauacgu

SEQ ID NO: 230557 - RNA, 19 nt, Artificial Sequence
  Description of Artificial Sequence: Synthetic oligonucleotide
ugcgacaucacauugcugg

SEQ ID NO: 230558 - RNA, 19 nt, Artificial Sequence
  Description of Artificial Sequence: Synthetic oligonucleotide
uucgcagcaauacauaagg

SEQ ID NO: 230559 - RNA, 19 nt, Artificial Sequence
  Description of Artificial Sequence: Synthetic oligonucleotide
aaauuagcgcgucugaaag

SEQ ID NO: 230560 - RNA, 19 nt, Artificial Sequence
  Description of Artificial Sequence: Synthetic oligonucleotide
uucguaugaaauauuauug

SEQ ID NO: 230561 - RNA, 19 nt, Artificial Sequence
  Description of Artificial Sequence: Synthetic oligonucleotide
agcuugauuauacauaguc

SEQ ID NO: 230562 - RNA, 19 nt, Artificial Sequence
  Description of Artificial Sequence: Synthetic oligonucleotide
uaauacguuuauuauagcc

SEQ ID NO: 230563 - RNA, 19 nt, Artificial Sequence
  Description of Artificial Sequence: Synthetic oligonucleotide
guagcaaauaaacagauuc

SEQ ID NO: 230564 - RNA, 19 nt, Artificial Sequence
  Description of Artificial Sequence: Synthetic oligonucleotide
aaucuaaaccaaugaaauc

SEQ ID NO: 230565 - RNA, 19 nt, Artificial Sequence
  Description of Artificial Sequence: Synthetic oligonucleotide
cugacgauaacucauacac

SEQ ID NO: 230566 - RNA, 19 nt, Artificial Sequence
  Description of Artificial Sequence: Synthetic oligonucleotide
uguacaaucauauccagua

SEQ ID NO: 230567 - RNA, 19 nt, Artificial Sequence
  Description of Artificial Sequence: Synthetic oligonucleotide
uguauuuagcaucccgugg

SEQ ID NO: 230568 - RNA, 19 nt, Artificial Sequence
  Description of Artificial Sequence: Synthetic oligonucleotide
aguaccaauugguauauag

SEQ ID NO: 230569 - RNA, 19 nt, Artificial Sequence
  Description of Artificial Sequence: Synthetic oligonucleotide
ucugaagagaaauuagcgc

SEQ ID NO: 230570 - RNA, 19 nt, Artificial Sequence
  Description of Artificial Sequence: Synthetic oligonucleotide
uuuguagacagcaugguau

SEQ ID NO: 230571 - RNA, 19 nt, Artificial Sequence
  Description of Artificial Sequence: Synthetic oligonucleotide
ugaugauugauucaucuuc

SEQ ID NO: 230572 - RNA, 19 nt, Artificial Sequence
  Description of Artificial Sequence: Synthetic oligonucleotide
ugugguaagacaaaacauc

SEQ ID NO: 230573 - RNA, 19 nt, Artificial Sequence
  Description of Artificial Sequence: Synthetic oligonucleotide
uguaaucuaaaccaaugaa

SEQ ID NO: 230574 - RNA, 19 nt, Artificial Sequence
  Description of Artificial Sequence: Synthetic oligonucleotide
uggguaaauucacaaaugc

SEQ ID NO: 230575 - RNA, 19 nt, Artificial Sequence
  Description of Artificial Sequence: Synthetic oligonucleotide
aauacguuuauuauagccu

SEQ ID NO: 230576 - RNA, 19 nt, Artificial Sequence
  Description of Artificial Sequence: Synthetic oligonucleotide
auacguuuauuauagccuc

SEQ ID NO: 230577 - RNA, 19 nt, Artificial Sequence
  Description of Artificial Sequence: Synthetic oligonucleotide
uauagacuuguaaugguug

SEQ ID NO: 230578 - RNA, 19 nt, Artificial Sequence
  Description of Artificial Sequence: Synthetic oligonucleotide
gaucacuaagaguacauug

SEQ ID NO: 230579 - RNA, 19 nt, Artificial Sequence
  Description of Artificial Sequence: Synthetic oligonucleotide
agauagauucugcacgagc

SEQ ID NO: 230580 - RNA, 19 nt, Artificial Sequence
  Description of Artificial Sequence: Synthetic oligonucleotide
uaccaauugguauauagac

SEQ ID NO: 230581 - RNA, 19 nt, Artificial Sequence
  Description of Artificial Sequence: Synthetic oligonucleotide
uguggguaaauucacaaau

SEQ ID NO: 230582 - RNA, 19 nt, Artificial Sequence
  Description of Artificial Sequence: Synthetic oligonucleotide
aauugauuuagugaagcgu

SEQ ID NO: 230583 - RNA, 19 nt, Artificial Sequence
  Description of Artificial Sequence: Synthetic oligonucleotide
uugcuuuacacuuagggaa

SEQ ID NO: 230584 - RNA, 19 nt, Artificial Sequence
  Description of Artificial Sequence: Synthetic oligonucleotide
caggaauucuuuaagucgg

SEQ ID NO: 230585 - RNA, 19 nt, Artificial Sequence
  Description of Artificial Sequence: Synthetic oligonucleotide
uuuaagucggucuucaaua

SEQ ID NO: 230586 - RNA, 19 nt, Artificial Sequence
  Description of Artificial Sequence: Synthetic oligonucleotide
uuucguaugaaauauuauu

SEQ ID NO: 230587 - RNA, 19 nt, Artificial Sequence
  Description of Artificial Sequence: Synthetic oligonucleotide
acguaguaccucuagugcc

SEQ ID NO: 230588 - RNA, 19 nt, Artificial Sequence
  Description of Artificial Sequence: Synthetic oligonucleotide
cuugugaugaaauaugcca

SEQ ID NO: 230589 - RNA, 19 nt, Artificial Sequence
  Description of Artificial Sequence: Synthetic oligonucleotide
aagagcuagcuuccaaagg

SEQ ID NO: 230590 - RNA, 19 nt, Artificial Sequence
  Description of Artificial Sequence: Synthetic oligonucleotide
aauuauggucauccuuuuc

SEQ ID NO: 230591 - RNA, 19 nt, Artificial Sequence
  Description of Artificial Sequence: Synthetic oligonucleotide
uccaacaauugauuuagug

SEQ ID NO: 230592 - RNA, 19 nt, Artificial Sequence
  Description of Artificial Sequence: Synthetic oligonucleotide
ucccagaccaccauguuug

SEQ ID NO: 230593 - RNA, 19 nt, Artificial Sequence
  Description of Artificial Sequence: Synthetic oligonucleotide
aggauauaccaucugaaga

SEQ ID NO: 230594 - RNA, 19 nt, Artificial Sequence
  Description of Artificial Sequence: Synthetic oligonucleotide
uugugaugaaauaugccac

SEQ ID NO: 230595 - RNA, 19 nt, Artificial Sequence
  Description of Artificial Sequence: Synthetic oligonucleotide
aacuaaggcaggaucaauc

SEQ ID NO: 230596 - RNA, 19 nt, Artificial Sequence
  Description of Artificial Sequence: Synthetic oligonucleotide
agugaagcguauuuccagg

SEQ ID NO: 230597 - RNA, 19 nt, Artificial Sequence
  Description of Artificial Sequence: Synthetic oligonucleotide
ucguaugaaauauuauugu

SEQ ID NO: 230598 - RNA, 19 nt, Artificial Sequence
  Description of Artificial Sequence: Synthetic oligonucleotide
guauuuagcaucccguggc

SEQ ID NO: 230599 - RNA, 19 nt, Artificial Sequence
  Description of Artificial Sequence: Synthetic oligonucleotide
ucauaguguuaacaaaaga

SEQ ID NO: 230600 - RNA, 19 nt, Artificial Sequence
  Description of Artificial Sequence: Synthetic oligonucleotide
caugguaugcguuucgcag

SEQ ID NO: 230601 - RNA, 19 nt, Artificial Sequence
  Description of Artificial Sequence: Synthetic oligonucleotide
augguaugcguuucgcagc

SEQ ID NO: 230602 - RNA, 19 nt, Artificial Sequence
  Description of Artificial Sequence: Synthetic oligonucleotide
gaagagcuagcuuccaaag

SEQ ID NO: 230603 - RNA, 19 nt, Artificial Sequence
  Description of Artificial Sequence: Synthetic oligonucleotide
cuaagugaagcuuuggaga

SEQ ID NO: 230604 - RNA, 19 nt, Artificial Sequence
  Description of Artificial Sequence: Synthetic oligonucleotide
caacaauugauuuagugaa

SEQ ID NO: 230605 - RNA, 19 nt, Artificial Sequence
  Description of Artificial Sequence: Synthetic oligonucleotide
ugcuuuacacuuagggaag

SEQ ID NO: 230606 - RNA, 19 nt, Artificial Sequence
  Description of Artificial Sequence: Synthetic oligonucleotide
caauugauuuagugaagcg

SEQ ID NO: 230607 - RNA, 19 nt, Artificial Sequence
  Description of Artificial Sequence: Synthetic oligonucleotide
ucggaaggauaaaauaaca

SEQ ID NO: 230608 - RNA, 19 nt, Artificial Sequence
  Description of Artificial Sequence: Synthetic oligonucleotide
uuucgcagcaauacauaag

SEQ ID NO: 230609 - RNA, 19 nt, Artificial Sequence
  Description of Artificial Sequence: Synthetic oligonucleotide
uaagcuauauggccauugc

SEQ ID NO: 230610 - RNA, 19 nt, Artificial Sequence
  Description of Artificial Sequence: Synthetic oligonucleotide
ucuauagcagggcuguacu

SEQ ID NO: 230611 - RNA, 19 nt, Artificial Sequence
  Description of Artificial Sequence: Synthetic oligonucleotide
uacguuuauuauagccucg

SEQ ID NO: 230612 - RNA, 19 nt, Artificial Sequence
  Description of Artificial Sequence: Synthetic oligonucleotide
aucggaaggauaaaauaac

SEQ ID NO: 230613 - RNA, 19 nt, Artificial Sequence
  Description of Artificial Sequence: Synthetic oligonucleotide
uaugucguuaauacguuua

SEQ ID NO: 230614 - RNA, 19 nt, Artificial Sequence
  Description of Artificial Sequence: Synthetic oligonucleotide
caacuugugaugaaauaug

SEQ ID NO: 230615 - RNA, 19 nt, Artificial Sequence
  Description of Artificial Sequence: Synthetic oligonucleotide
gaagucaaauacucucgag

SEQ ID NO: 230616 - RNA, 19 nt, Artificial Sequence
  Description of Artificial Sequence: Synthetic oligonucleotide
uacacuuguuagaagcucu

SEQ ID NO: 230617 - RNA, 19 nt, Artificial Sequence
  Description of Artificial Sequence: Synthetic oligonucleotide
uagugaagcguauuuccag

SEQ ID NO: 230618 - RNA, 19 nt, Artificial Sequence
  Description of Artificial Sequence: Synthetic oligonucleotide
auugaauguuaauucauuu

SEQ ID NO: 230619 - RNA, 19 nt, Artificial Sequence
  Description of Artificial Sequence: Synthetic oligonucleotide
acuugugaugaaauaugcc

SEQ ID NO: 230620 - RNA, 19 nt, Artificial Sequence
  Description of Artificial Sequence: Synthetic oligonucleotide
auuagcgcgucugaaagag

SEQ ID NO: 230621 - RNA, 19 nt, Artificial Sequence
  Description of Artificial Sequence: Synthetic oligonucleotide
ggugauaucgaucugcaca

SEQ ID NO: 230622 - RNA, 19 nt, Artificial Sequence
  Description of Artificial Sequence: Synthetic oligonucleotide
ucaguaaaguuuccaagua

SEQ ID NO: 230623 - RNA, 19 nt, Artificial Sequence
  Description of Artificial Sequence: Synthetic oligonucleotide
augcucuuacacuuguuag

SEQ ID NO: 230624 - RNA, 19 nt, Artificial Sequence
  Description of Artificial Sequence: Synthetic oligonucleotide
aaugaucggaaggauaaaa

SEQ ID NO: 230625 - RNA, 19 nt, Artificial Sequence
  Description of Artificial Sequence: Synthetic oligonucleotide
uucgucccgaaagagagag

SEQ ID NO: 230626 - RNA, 19 nt, Artificial Sequence
  Description of Artificial Sequence: Synthetic oligonucleotide
cauaguguuaacaaaagau

SEQ ID NO: 230627 - RNA, 19 nt, Artificial Sequence
  Description of Artificial Sequence: Synthetic oligonucleotide
uaucgaucugcacauaguu

SEQ ID NO: 230628 - RNA, 19 nt, Artificial Sequence
  Description of Artificial Sequence: Synthetic oligonucleotide
uucgacuugcuuuacacuu

SEQ ID NO: 230629 - RNA, 19 nt, Artificial Sequence
  Description of Artificial Sequence: Synthetic oligonucleotide
cucuuaugucguuaauacg

SEQ ID NO: 230630 - RNA, 19 nt, Artificial Sequence
  Description of Artificial Sequence: Synthetic oligonucleotide
uuuagcaucccguggcaca

SEQ ID NO: 230631 - RNA, 19 nt, Artificial Sequence
  Description of Artificial Sequence: Synthetic oligonucleotide
aagcuauauggccauugcu

SEQ ID NO: 230632 - RNA, 19 nt, Artificial Sequence
  Description of Artificial Sequence: Synthetic oligonucleotide
uuaagucggucuucaauac

SEQ ID NO: 230633 - RNA, 19 nt, Artificial Sequence
  Description of Artificial Sequence: Synthetic oligonucleotide
gucguuaauacguuuauua

SEQ ID NO: 230634 - RNA, 19 nt, Artificial Sequence
  Description of Artificial Sequence: Synthetic oligonucleotide
gaagcguauuuccagguga

SEQ ID NO: 230635 - RNA, 19 nt, Artificial Sequence
  Description of Artificial Sequence: Synthetic oligonucleotide
uuggaacauaauuuaugga

SEQ ID NO: 230636 - RNA, 19 nt, Artificial Sequence
  Description of Artificial Sequence: Synthetic oligonucleotide
uuguagacagcaugguaug

SEQ ID NO: 230637 - RNA, 19 nt, Artificial Sequence
  Description of Artificial Sequence: Synthetic oligonucleotide
aagacugcggucuccaaua

SEQ ID NO: 230638 - RNA, 19 nt, Artificial Sequence
  Description of Artificial Sequence: Synthetic oligonucleotide
ucguuaauacguuuauuau

SEQ ID NO: 230639 - RNA, 19 nt, Artificial Sequence
  Description of Artificial Sequence: Synthetic oligonucleotide
aauuagcgcgucugaaaga

SEQ ID NO: 230640 - RNA, 19 nt, Artificial Sequence
  Description of Artificial Sequence: Synthetic oligonucleotide
uuaauacguuuauuauagc

SEQ ID NO: 230641 - RNA, 19 nt, Artificial Sequence
  Description of Artificial Sequence: Synthetic oligonucleotide
ugucuaaguguuguguuug

SEQ ID NO: 230642 - RNA, 19 nt, Artificial Sequence
  Description of Artificial Sequence: Synthetic oligonucleotide
acuucgucccgaaagagag

SEQ ID NO: 230643 - RNA, 19 nt, Artificial Sequence
  Description of Artificial Sequence: Synthetic oligonucleotide
agucauauaugcucuuaca

SEQ ID NO: 230644 - RNA, 19 nt, Artificial Sequence
  Description of Artificial Sequence: Synthetic oligonucleotide
aaucuaccauuuucguaug

SEQ ID NO: 230645 - RNA, 19 nt, Artificial Sequence
  Description of Artificial Sequence: Synthetic oligonucleotide
gacgauaacucauacacau

SEQ ID NO: 230646 - RNA, 19 nt, Artificial Sequence
  Description of Artificial Sequence: Synthetic oligonucleotide
acuaguguaugccuguaau

SEQ ID NO: 230647 - RNA, 19 nt, Artificial Sequence
  Description of Artificial Sequence: Synthetic oligonucleotide
ugaagcguauuuccaggug

SEQ ID NO: 230648 - RNA, 19 nt, Artificial Sequence
  Description of Artificial Sequence: Synthetic oligonucleotide
ggaguaucuugacugagag

SEQ ID NO: 230649 - RNA, 19 nt, Artificial Sequence
  Description of Artificial Sequence: Synthetic oligonucleotide
ucgugugugcagcucauga

SEQ ID NO: 230650 - RNA, 19 nt, Artificial Sequence
  Description of Artificial Sequence: Synthetic oligonucleotide
acugcgacaucacauugcu

SEQ ID NO: 230651 - RNA, 19 nt, Artificial Sequence
  Description of Artificial Sequence: Synthetic oligonucleotide
uccgguuccccuuucuugc

SEQ ID NO: 230652 - RNA, 19 nt, Artificial Sequence
  Description of Artificial Sequence: Synthetic oligonucleotide
gaaauuagcgcgucugaaa

SEQ ID NO: 230653 - RNA, 19 nt, Artificial Sequence
  Description of Artificial Sequence: Synthetic oligonucleotide
aucaaucucacaugguaau

SEQ ID NO: 230654 - RNA, 19 nt, Artificial Sequence
  Description of Artificial Sequence: Synthetic oligonucleotide
ugacgauaacucauacaca

SEQ ID NO: 230655 - RNA, 19 nt, Artificial Sequence
  Description of Artificial Sequence: Synthetic oligonucleotide
agucauaguguuaacaaaa

SEQ ID NO: 230656 - RNA, 19 nt, Artificial Sequence
  Description of Artificial Sequence: Synthetic oligonucleotide
agcugacgauaacucauac

SEQ ID NO: 230657 - RNA, 19 nt, Artificial Sequence
  Description of Artificial Sequence: Synthetic oligonucleotide
augcguuucgcagcaauac

SEQ ID NO: 230658 - RNA, 19 nt, Artificial Sequence
  Description of Artificial Sequence: Synthetic oligonucleotide
guacaaucauauccaguag

SEQ ID NO: 230659 - RNA, 19 nt, Artificial Sequence
  Description of Artificial Sequence: Synthetic oligonucleotide
ucuccaauaugauggcgcu

SEQ ID NO: 230660 - RNA, 19 nt, Artificial Sequence
  Description of Artificial Sequence: Synthetic oligonucleotide
gaggaaaugcuauggagua

SEQ ID NO: 230661 - RNA, 19 nt, Artificial Sequence
  Description of Artificial Sequence: Synthetic oligonucleotide
auaagcuauauggccauug

SEQ ID NO: 230662 - RNA, 19 nt, Artificial Sequence
  Description of Artificial Sequence: Synthetic oligonucleotide
cuaguguaugccuguaauc

SEQ ID NO: 230663 - RNA, 19 nt, Artificial Sequence
  Description of Artificial Sequence: Synthetic oligonucleotide
uuaggcaguaacugaucac

SEQ ID NO: 230664 - RNA, 19 nt, Artificial Sequence
  Description of Artificial Sequence: Synthetic oligonucleotide
gauagauucugcacgagcu

SEQ ID NO: 230665 - RNA, 19 nt, Artificial Sequence
  Description of Artificial Sequence: Synthetic oligonucleotide
auaacuccgaaagugcagu

SEQ ID NO: 230666 - RNA, 19 nt, Artificial Sequence
  Description of Artificial Sequence: Synthetic oligonucleotide
gcaguaacugaucacuaag

SEQ ID NO: 230667 - RNA, 19 nt, Artificial Sequence
  Description of Artificial Sequence: Synthetic oligonucleotide
ugguaugcguuucgcagca

SEQ ID NO: 230668 - RNA, 19 nt, Artificial Sequence
  Description of Artificial Sequence: Synthetic oligonucleotide
uaagucggucuucaauacu

SEQ ID NO: 230669 - RNA, 19 nt, Artificial Sequence
  Description of Artificial Sequence: Synthetic oligonucleotide
uuggucacuaccagccugu

SEQ ID NO: 230670 - RNA, 19 nt, Artificial Sequence
  Description of Artificial Sequence: Synthetic oligonucleotide
ugcguuucgcagcaauaca

SEQ ID NO: 230671 - RNA, 19 nt, Artificial Sequence
  Description of Artificial Sequence: Synthetic oligonucleotide
gccgauuuucaguagacug

SEQ ID NO: 230672 - RNA, 19 nt, Artificial Sequence
  Description of Artificial Sequence: Synthetic oligonucleotide
ugcggucuccaauaugaug

SEQ ID NO: 230673 - RNA, 19 nt, Artificial Sequence
  Description of Artificial Sequence: Synthetic oligonucleotide
agcaugguaugcguuucgc

SEQ ID NO: 230674 - RNA, 19 nt, Artificial Sequence
  Description of Artificial Sequence: Synthetic oligonucleotide
auagccucgaauguuuaca

SEQ ID NO: 230675 - RNA, 19 nt, Artificial Sequence
  Description of Artificial Sequence: Synthetic oligonucleotide
aggaaucuaccauuuucgu

SEQ ID NO: 230676 - RNA, 19 nt, Artificial Sequence
  Description of Artificial Sequence: Synthetic oligonucleotide
uauagccucgaauguuuac

SEQ ID NO: 230677 - RNA, 19 nt, Artificial Sequence
  Description of Artificial Sequence: Synthetic oligonucleotide
cuaggauauaccaucugaa

SEQ ID NO: 230678 - RNA, 19 nt, Artificial Sequence
  Description of Artificial Sequence: Synthetic oligonucleotide
gguugguucuccaugacug

SEQ ID NO: 230679 - RNA, 19 nt, Artificial Sequence
  Description of Artificial Sequence: Synthetic oligonucleotide
accaauuauggucauccuu

SEQ ID NO: 230680 - RNA, 19 nt, Artificial Sequence
  Description of Artificial Sequence: Synthetic oligonucleotide
uuccgguuccccuuucuug

SEQ ID NO: 230681 - RNA, 19 nt, Artificial Sequence
  Description of Artificial Sequence: Synthetic oligonucleotide
cuuaggcaguaacugauca

SEQ ID NO: 230682 - RNA, 19 nt, Artificial Sequence
  Description of Artificial Sequence: Synthetic oligonucleotide
ccaacaauugauuuaguga

SEQ ID NO: 230683 - RNA, 19 nt, Artificial Sequence
  Description of Artificial Sequence: Synthetic oligonucleotide
cagucauauaugcucuuac

SEQ ID NO: 230684 - RNA, 19 nt, Artificial Sequence
  Description of Artificial Sequence: Synthetic oligonucleotide
gagaaauuagcgcgucuga

SEQ ID NO: 230685 - RNA, 19 nt, Artificial Sequence
  Description of Artificial Sequence: Synthetic oligonucleotide
acugucuaaguguuguguu

SEQ ID NO: 230686 - RNA, 19 nt, Artificial Sequence
  Description of Artificial Sequence: Synthetic oligonucleotide
auuuagcaucccguggcac

SEQ ID NO: 230687 - RNA, 19 nt, Artificial Sequence
  Description of Artificial Sequence: Synthetic oligonucleotide
aagucggucuucaauacuu

SEQ ID NO: 230688 - RNA, 19 nt, Artificial Sequence
  Description of Artificial Sequence: Synthetic oligonucleotide
caauugguauauagacuug

SEQ ID NO: 230689 - RNA, 19 nt, Artificial Sequence
  Description of Artificial Sequence: Synthetic oligonucleotide
uuucaguagacuggaggac

SEQ ID NO: 230690 - RNA, 19 nt, Artificial Sequence
  Description of Artificial Sequence: Synthetic oligonucleotide
caugaugauugauucaucu

SEQ ID NO: 230691 - RNA, 19 nt, Artificial Sequence
  Description of Artificial Sequence: Synthetic oligonucleotide
uucuugugccaaugaucgg

SEQ ID NO: 230692 - RNA, 19 nt, Artificial Sequence
  Description of Artificial Sequence: Synthetic oligonucleotide
ggagagauauucacaaggc

SEQ ID NO: 230693 - RNA, 19 nt, Artificial Sequence
  Description of Artificial Sequence: Synthetic oligonucleotide
aagauuccgucuaggauau

SEQ ID NO: 230694 - RNA, 19 nt, Artificial Sequence
  Description of Artificial Sequence: Synthetic oligonucleotide
uaugcguuucgcagcaaua

SEQ ID NO: 230695 - RNA, 19 nt, Artificial Sequence
  Description of Artificial Sequence: Synthetic oligonucleotide
uuaucaagguuggucacua

SEQ ID NO: 230696 - RNA, 19 nt, Artificial Sequence
  Description of Artificial Sequence: Synthetic oligonucleotide
agcucugauaaagaccuca

SEQ ID NO: 230697 - RNA, 19 nt, Artificial Sequence
  Description of Artificial Sequence: Synthetic oligonucleotide
aacuccgaaagugcagugu

SEQ ID NO: 230698 - RNA, 19 nt, Artificial Sequence
  Description of Artificial Sequence: Synthetic oligonucleotide
ugcauccaaggagagauau

SEQ ID NO: 230699 - RNA, 19 nt, Artificial Sequence
  Description of Artificial Sequence: Synthetic oligonucleotide
gagauauucacaaggcaua

SEQ ID NO: 230700 - RNA, 19 nt, Artificial Sequence
  Description of Artificial Sequence: Synthetic oligonucleotide
uccgucuaggauauaccau

SEQ ID NO: 230701 - RNA, 19 nt, Artificial Sequence
  Description of Artificial Sequence: Synthetic oligonucleotide
uguagacagcaugguaugc

SEQ ID NO: 230702 - RNA, 19 nt, Artificial Sequence
  Description of Artificial Sequence: Synthetic oligonucleotide
aacuucgucccgaaagaga

SEQ ID NO: 230703 - RNA, 19 nt, Artificial Sequence
  Description of Artificial Sequence: Synthetic oligonucleotide
ugauuccuguacaaucaua

SEQ ID NO: 230704 - RNA, 19 nt, Artificial Sequence
  Description of Artificial Sequence: Synthetic oligonucleotide
aaggcuaagugaagcuuug

SEQ ID NO: 230705 - RNA, 19 nt, Artificial Sequence
  Description of Artificial Sequence: Synthetic oligonucleotide
gacaugaugauugauucau

SEQ ID NO: 230706 - RNA, 19 nt, Artificial Sequence
  Description of Artificial Sequence: Synthetic oligonucleotide
ugccuguaaucuaaaccaa

SEQ ID NO: 230707 - RNA, 19 nt, Artificial Sequence
  Description of Artificial Sequence: Synthetic oligonucleotide
augauggcgcucuucggga

SEQ ID NO: 230708 - RNA, 19 nt, Artificial Sequence
  Description of Artificial Sequence: Synthetic oligonucleotide
ucucuauggacuggaguac

SEQ ID NO: 230709 - RNA, 19 nt, Artificial Sequence
  Description of Artificial Sequence: Synthetic oligonucleotide
uuaugucguuaauacguuu

SEQ ID NO: 230710 - RNA, 19 nt, Artificial Sequence
  Description of Artificial Sequence: Synthetic oligonucleotide
gcacguaguaccucuagug

SEQ ID NO: 230711 - RNA, 19 nt, Artificial Sequence
  Description of Artificial Sequence: Synthetic oligonucleotide
uagccucgaauguuuacaa

SEQ ID NO: 230712 - RNA, 19 nt, Artificial Sequence
  Description of Artificial Sequence: Synthetic oligonucleotide
uuaggaacuucaucccaua

SEQ ID NO: 230713 - RNA, 19 nt, Artificial Sequence
  Description of Artificial Sequence: Synthetic oligonucleotide
uaacuccgaaagugcagug

SEQ ID NO: 230714 - RNA, 19 nt, Artificial Sequence
  Description of Artificial Sequence: Synthetic oligonucleotide
ugacugucuaaguguugug

SEQ ID NO: 230715 - RNA, 19 nt, Artificial Sequence
  Description of Artificial Sequence: Synthetic oligonucleotide
ggguugagcauuguacugg

SEQ ID NO: 230716 - RNA, 19 nt, Artificial Sequence
  Description of Artificial Sequence: Synthetic oligonucleotide
agaaauuagcgcgucugaa

SEQ ID NO: 230717 - RNA, 19 nt, Artificial Sequence
  Description of Artificial Sequence: Synthetic oligonucleotide
guaauccagcagcugacga

SEQ ID NO: 230718 - RNA, 19 nt, Artificial Sequence
  Description of Artificial Sequence: Synthetic oligonucleotide
ucgacuugcuuuacacuua

SEQ ID NO: 230719 - RNA, 19 nt, Artificial Sequence
  Description of Artificial Sequence: Synthetic oligonucleotide
auauaugcucuuacacuug

SEQ ID NO: 230720 - RNA, 19 nt, Artificial Sequence
  Description of Artificial Sequence: Synthetic oligonucleotide
gaagcauaacuccgaaagu

SEQ ID NO: 230721 - RNA, 19 nt, Artificial Sequence
  Description of Artificial Sequence: Synthetic oligonucleotide
acguuuauuauagccucga

SEQ ID NO: 230722 - RNA, 19 nt, Artificial Sequence
  Description of Artificial Sequence: Synthetic oligonucleotide
augaucggaaggauaaaau

SEQ ID NO: 230723 - RNA, 19 nt, Artificial Sequence
  Description of Artificial Sequence: Synthetic oligonucleotide
gugauaucgaucugcacau

SEQ ID NO: 230724 - RNA, 19 nt, Artificial Sequence
  Description of Artificial Sequence: Synthetic oligonucleotide
uuagcgcgucugaaagaga

SEQ ID NO: 230725 - RNA, 19 nt, Artificial Sequence
  Description of Artificial Sequence: Synthetic oligonucleotide
auaucgaucugcacauagu

SEQ ID NO: 230726 - RNA, 19 nt, Artificial Sequence
  Description of Artificial Sequence: Synthetic oligonucleotide
ugaucacuaagaguacauu

SEQ ID NO: 230727 - RNA, 19 nt, Artificial Sequence
  Description of Artificial Sequence: Synthetic oligonucleotide
agacuuguaaugguugguu

SEQ ID NO: 230728 - RNA, 19 nt, Artificial Sequence
  Description of Artificial Sequence: Synthetic oligonucleotide
aguugccaguucuuucagu

SEQ ID NO: 230729 - RNA, 19 nt, Artificial Sequence
  Description of Artificial Sequence: Synthetic oligonucleotide
gcugacuugucucaguaaa

SEQ ID NO: 230730 - RNA, 19 nt, Artificial Sequence
  Description of Artificial Sequence: Synthetic oligonucleotide
agucggucuucaauacuuc

SEQ ID NO: 230731 - RNA, 19 nt, Artificial Sequence
  Description of Artificial Sequence: Synthetic oligonucleotide
ccgucuaggauauaccauc

SEQ ID NO: 230732 - RNA, 19 nt, Artificial Sequence
  Description of Artificial Sequence: Synthetic oligonucleotide
cauugagccagcaugugau

SEQ ID NO: 230733 - RNA, 19 nt, Artificial Sequence
  Description of Artificial Sequence: Synthetic oligonucleotide
gcuugauuauacauaguca

SEQ ID NO: 230734 - RNA, 19 nt, Artificial Sequence
  Description of Artificial Sequence: Synthetic oligonucleotide
gacugcggucuccaauaug

SEQ ID NO: 230735 - RNA, 19 nt, Artificial Sequence
  Description of Artificial Sequence: Synthetic oligonucleotide
aacuugcgccuuucucugu

SEQ ID NO: 230736 - RNA, 19 nt, Artificial Sequence
  Description of Artificial Sequence: Synthetic oligonucleotide
cugcacguaguaccucuag

SEQ ID NO: 230737 - RNA, 19 nt, Artificial Sequence
  Description of Artificial Sequence: Synthetic oligonucleotide
aucccauaugggccuagga

SEQ ID NO: 230738 - RNA, 19 nt, Artificial Sequence
  Description of Artificial Sequence: Synthetic oligonucleotide
cuuuaagucggucuucaau

SEQ ID NO: 230739 - RNA, 19 nt, Artificial Sequence
  Description of Artificial Sequence: Synthetic oligonucleotide
ugcugacuugucucaguaa

SEQ ID NO: 230740 - RNA, 19 nt, Artificial Sequence
  Description of Artificial Sequence: Synthetic oligonucleotide
ugauggcgcucuucgggac

SEQ ID NO: 230741 - RNA, 19 nt, Artificial Sequence
  Description of Artificial Sequence: Synthetic oligonucleotide
caaugcuuaggcaguaacu

SEQ ID NO: 230742 - RNA, 19 nt, Artificial Sequence
  Description of Artificial Sequence: Synthetic oligonucleotide
ggcaaacagauagauucug

SEQ ID NO: 230743 - RNA, 19 nt, Artificial Sequence
  Description of Artificial Sequence: Synthetic oligonucleotide
ugucguuaauacguuuauu

SEQ ID NO: 230744 - RNA, 19 nt, Artificial Sequence
  Description of Artificial Sequence: Synthetic oligonucleotide
aauaagcuauauggccauu

SEQ ID NO: 230745 - RNA, 19 nt, Artificial Sequence
  Description of Artificial Sequence: Synthetic oligonucleotide
ggguacaaauucuuccauc

SEQ ID NO: 230746 - RNA, 19 nt, Artificial Sequence
  Description of Artificial Sequence: Synthetic oligonucleotide
ucccguggcacagaauaaa

SEQ ID NO: 230747 - RNA, 19 nt, Artificial Sequence
  Description of Artificial Sequence: Synthetic oligonucleotide
gacugucuaaguguugugu

SEQ ID NO: 230748 - RNA, 19 nt, Artificial Sequence
  Description of Artificial Sequence: Synthetic oligonucleotide
aguagacuggaggacgcaa

SEQ ID NO: 230749 - RNA, 19 nt, Artificial Sequence
  Description of Artificial Sequence: Synthetic oligonucleotide
caauaugauggcgcucuuc

SEQ ID NO: 230750 - RNA, 19 nt, Artificial Sequence
  Description of Artificial Sequence: Synthetic oligonucleotide
guguagcuugauuauacau

SEQ ID NO: 230751 - RNA, 19 nt, Artificial Sequence
  Description of Artificial Sequence: Synthetic oligonucleotide
ggaaucuaccauuuucgua

SEQ ID NO: 230752 - RNA, 19 nt, Artificial Sequence
  Description of Artificial Sequence: Synthetic oligonucleotide
gaggacgcaagcgccagga

SEQ ID NO: 230753 - RNA, 19 nt, Artificial Sequence
  Description of Artificial Sequence: Synthetic oligonucleotide
aagcgccaggaauucuuua

SEQ ID NO: 230754 - RNA, 19 nt, Artificial Sequence
  Description of Artificial Sequence: Synthetic oligonucleotide
guacagucauauaugcucu

SEQ ID NO: 230755 - RNA, 19 nt, Artificial Sequence
  Description of Artificial Sequence: Synthetic oligonucleotide
cagauagauucugcacgag

SEQ ID NO: 230756 - RNA, 19 nt, Artificial Sequence
  Description of Artificial Sequence: Synthetic oligonucleotide
caucccauaugggccuagg

SEQ ID NO: 230757 - RNA, 19 nt, Artificial Sequence
  Description of Artificial Sequence: Synthetic oligonucleotide
cacauaagacucucacuua

SEQ ID NO: 230758 - RNA, 19 nt, Artificial Sequence
  Description of Artificial Sequence: Synthetic oligonucleotide
agccucgaauguuuacaaa

SEQ ID NO: 230759 - RNA, 19 nt, Artificial Sequence
  Description of Artificial Sequence: Synthetic oligonucleotide
acgcaagcgccaggaauuc

SEQ ID NO: 230760 - RNA, 19 nt, Artificial Sequence
  Description of Artificial Sequence: Synthetic oligonucleotide
cuguacugcgacaucacau

SEQ ID NO: 230761 - RNA, 19 nt, Artificial Sequence
  Description of Artificial Sequence: Synthetic oligonucleotide
cuggacuaauguugucuga

SEQ ID NO: 230762 - RNA, 19 nt, Artificial Sequence
  Description of Artificial Sequence: Synthetic oligonucleotide
cuuaugucguuaauacguu

SEQ ID NO: 230763 - RNA, 19 nt, Artificial Sequence
  Description of Artificial Sequence: Synthetic oligonucleotide
cugaucacuaagaguacau

SEQ ID NO: 230764 - RNA, 19 nt, Artificial Sequence
  Description of Artificial Sequence: Synthetic oligonucleotide
cccguggcacagaauaaag

SEQ ID NO: 230765 - RNA, 19 nt, Artificial Sequence
  Description of Artificial Sequence: Synthetic oligonucleotide
gugaagcguauuuccaggu

SEQ ID NO: 230766 - RNA, 19 nt, Artificial Sequence
  Description of Artificial Sequence: Synthetic oligonucleotide
ucgucccgaaagagagaga

SEQ ID NO: 230767 - RNA, 19 nt, Artificial Sequence
  Description of Artificial Sequence: Synthetic oligonucleotide
ggcaguaacugaucacuaa

SEQ ID NO: 230768 - RNA, 19 nt, Artificial Sequence
  Description of Artificial Sequence: Synthetic oligonucleotide
gcauaacuccgaaagugca

SEQ ID NO: 230769 - RNA, 19 nt, Artificial Sequence
  Description of Artificial Sequence: Synthetic oligonucleotide
gcgacaucacauugcuggc

SEQ ID NO: 230770 - RNA, 19 nt, Artificial Sequence
  Description of Artificial Sequence: Synthetic oligonucleotide
acgagcucauugaggacca

SEQ ID NO: 230771 - RNA, 19 nt, Artificial Sequence
  Description of Artificial Sequence: Synthetic oligonucleotide
agacugcggucuccaauau

SEQ ID NO: 230772 - RNA, 19 nt, Artificial Sequence
  Description of Artificial Sequence: Synthetic oligonucleotide
gccucgaauguuuacaaau

SEQ ID NO: 230773 - RNA, 19 nt, Artificial Sequence
  Description of Artificial Sequence: Synthetic oligonucleotide
gacgcaagcgccaggaauu

SEQ ID NO: 230774 - RNA, 19 nt, Artificial Sequence
  Description of Artificial Sequence: Synthetic oligonucleotide
cuucgacuugcuuuacacu

SEQ ID NO: 230775 - RNA, 19 nt, Artificial Sequence
  Description of Artificial Sequence: Synthetic oligonucleotide
cugcgacaucacauugcug

SEQ ID NO: 230776 - RNA, 19 nt, Artificial Sequence
  Description of Artificial Sequence: Synthetic oligonucleotide
cuuaucaagguuggucacu

SEQ ID NO: 230777 - RNA, 19 nt, Artificial Sequence
  Description of Artificial Sequence: Synthetic oligonucleotide
guaugcguuucgcagcaau

SEQ ID NO: 230778 - RNA, 19 nt, Artificial Sequence
  Description of Artificial Sequence: Synthetic oligonucleotide
gcuauggaguaucuugacu

SEQ ID NO: 230779 - RNA, 19 nt, Artificial Sequence
  Description of Artificial Sequence: Synthetic oligonucleotide
gcaugguaugcguuucgca

SEQ ID NO: 230780 - RNA, 19 nt, Artificial Sequence
  Description of Artificial Sequence: Synthetic oligonucleotide
gcuguacugcgacaucaca

SEQ ID NO: 230781 - RNA, 19 nt, Artificial Sequence
  Description of Artificial Sequence: Synthetic oligonucleotide
cuucgucccgaaagagaga

SEQ ID NO: 230782 - RNA, 19 nt, Artificial Sequence
  Description of Artificial Sequence: Synthetic oligonucleotide
ugauaucgaucugcacaua

SEQ ID NO: 230783 - RNA, 19 nt, Artificial Sequence
  Description of Artificial Sequence: Synthetic oligonucleotide
uugcaaccuucaugucagu

SEQ ID NO: 230784 - RNA, 19 nt, Artificial Sequence
  Description of Artificial Sequence: Synthetic oligonucleotide
gucuaaguguuguguuugu

SEQ ID NO: 230785 - RNA, 19 nt, Artificial Sequence
  Description of Artificial Sequence: Synthetic oligonucleotide
acgauaacucauacacauu

SEQ ID NO: 230786 - RNA, 19 nt, Artificial Sequence
  Description of Artificial Sequence: Synthetic oligonucleotide
cagcugacgauaacucaua

SEQ ID NO: 230787 - RNA, 19 nt, Artificial Sequence
  Description of Artificial Sequence: Synthetic oligonucleotide
gagagguacugcacguagu

SEQ ID NO: 230788 - RNA, 19 nt, Artificial Sequence
  Description of Artificial Sequence: Synthetic oligonucleotide
gggcuguacugcgacauca

SEQ ID NO: 230789 - RNA, 19 nt, Artificial Sequence
  Description of Artificial Sequence: Synthetic oligonucleotide
agcgcgucugaaagagacu

SEQ ID NO: 230790 - RNA, 19 nt, Artificial Sequence
  Description of Artificial Sequence: Synthetic oligonucleotide
caauuauggucauccuuuu

SEQ ID NO: 230791 - RNA, 19 nt, Artificial Sequence
  Description of Artificial Sequence: Synthetic oligonucleotide
aggacgcaagcgccaggaa

SEQ ID NO: 230792 - RNA, 19 nt, Artificial Sequence
  Description of Artificial Sequence: Synthetic oligonucleotide
gcuuaggcaguaacugauc

SEQ ID NO: 230793 - RNA, 19 nt, Artificial Sequence
  Description of Artificial Sequence: Synthetic oligonucleotide
caaugaucggaaggauaaa

SEQ ID NO: 230794 - RNA, 19 nt, Artificial Sequence
  Description of Artificial Sequence: Synthetic oligonucleotide
ucgaggcgugaaggugugc

SEQ ID NO: 230795 - RNA, 19 nt, Artificial Sequence
  Description of Artificial Sequence: Synthetic oligonucleotide
aucccguggcacagaauaa

SEQ ID NO: 230796 - RNA, 19 nt, Artificial Sequence
  Description of Artificial Sequence: Synthetic oligonucleotide
ggcuguacugcgacaucac

SEQ ID NO: 230797 - RNA, 19 nt, Artificial Sequence
  Description of Artificial Sequence: Synthetic oligonucleotide
ggacgcaagcgccaggaau

SEQ ID NO: 230798 - RNA, 19 nt, Artificial Sequence
  Description of Artificial Sequence: Synthetic oligonucleotide
caccaauuauggucauccu

SEQ ID NO: 230799 - RNA, 19 nt, Artificial Sequence
  Description of Artificial Sequence: Synthetic oligonucleotide
gccaaugaucggaaggaua

SEQ ID NO: 230800 - RNA, 19 nt, Artificial Sequence
  Description of Artificial Sequence: Synthetic oligonucleotide
uggucacuaccagccuguu

SEQ ID NO: 230801 - RNA, 19 nt, Artificial Sequence
  Description of Artificial Sequence: Synthetic oligonucleotide
caagcgccaggaauucuuu

SEQ ID NO: 230802 - RNA, 19 nt, Artificial Sequence
  Description of Artificial Sequence: Synthetic oligonucleotide
gguuggucacuaccagccu

SEQ ID NO: 230803 - RNA, 19 nt, Artificial Sequence
  Description of Artificial Sequence: Synthetic oligonucleotide
gccuguaaucuaaaccaau

SEQ ID NO: 230804 - RNA, 19 nt, Artificial Sequence
  Description of Artificial Sequence: Synthetic oligonucleotide
cguuuauuauagccucgaa

SEQ ID NO: 230805 - RNA, 19 nt, Artificial Sequence
  Description of Artificial Sequence: Synthetic oligonucleotide
ccgaaagugcagugugcaa

SEQ ID NO: 230806 - RNA, 19 nt, Artificial Sequence
  Description of Artificial Sequence: Synthetic oligonucleotide
ggccgauuuucaguagacu

SEQ ID NO: 230807 - RNA, 19 nt, Artificial Sequence
  Description of Artificial Sequence: Synthetic oligonucleotide
cugcggucuccaauaugau

SEQ ID NO: 230808 - RNA, 19 nt, Artificial Sequence
  Description of Artificial Sequence: Synthetic oligonucleotide
guaguaccucuagugccuu

SEQ ID NO: 230809 - RNA, 19 nt, Artificial Sequence
  Description of Artificial Sequence: Synthetic oligonucleotide
gccuaggagcucugauaaa

SEQ ID NO: 230810 - RNA, 19 nt, Artificial Sequence
  Description of Artificial Sequence: Synthetic oligonucleotide
cgucuaggauauaccaucu

SEQ ID NO: 230811 - RNA, 19 nt, Artificial Sequence
  Description of Artificial Sequence: Synthetic oligonucleotide
gcaagcgccaggaauucuu

SEQ ID NO: 230812 - RNA, 19 nt, Artificial Sequence
  Description of Artificial Sequence: Synthetic oligonucleotide
gcugaucagacaggacagu

SEQ ID NO: 230813 - RNA, 19 nt, Artificial Sequence
  Description of Artificial Sequence: Synthetic oligonucleotide
gcgugaaggugugcuccca

SEQ ID NO: 230814 - RNA, 19 nt, Artificial Sequence
  Description of Artificial Sequence: Synthetic oligonucleotide
gguaugcguuucgcagcaa

SEQ ID NO: 230815 - RNA, 19 nt, Artificial Sequence
  Description of Artificial Sequence: Synthetic oligonucleotide
ccaauaugauggcgcucuu

SEQ ID NO: 230816 - RNA, 19 nt, Artificial Sequence
  Description of Artificial Sequence: Synthetic oligonucleotide
cgcaagcgccaggaauucu

SEQ ID NO: 230817 - RNA, 19 nt, Artificial Sequence
  Description of Artificial Sequence: Synthetic oligonucleotide
ucugauuccaauaagagaa

SEQ ID NO: 230818 - RNA, 19 nt, Artificial Sequence
  Description of Artificial Sequence: Synthetic oligonucleotide
gaaaguuccacucacaagc

SEQ ID NO: 230819 - RNA, 19 nt, Artificial Sequence
  Description of Artificial Sequence: Synthetic oligonucleotide
augccuauauaacagaagc

SEQ ID NO: 230820 - RNA, 19 nt, Artificial Sequence
  Description of Artificial Sequence: Synthetic oligonucleotide
accauuaucagccagcauc

SEQ ID NO: 230821 - RNA, 19 nt, Artificial Sequence
  Description of Artificial Sequence: Synthetic oligonucleotide
ucuucaagcaaguaguuag

SEQ ID NO: 230822 - RNA, 19 nt, Artificial Sequence
  Description of Artificial Sequence: Synthetic oligonucleotide
ucuagauugacaucaggcg

SEQ ID NO: 230823 - RNA, 19 nt, Artificial Sequence
  Description of Artificial Sequence: Synthetic oligonucleotide
gauaguagggaauaggcug

SEQ ID NO: 230824 - RNA, 19 nt, Artificial Sequence
  Description of Artificial Sequence: Synthetic oligonucleotide
aaaucaacaaaucuugauu

SEQ ID NO: 230825 - RNA, 19 nt, Artificial Sequence
  Description of Artificial Sequence: Synthetic oligonucleotide
gaaucuugugucuuguagg

SEQ ID NO: 230826 - RNA, 19 nt, Artificial Sequence
  Description of Artificial Sequence: Synthetic oligonucleotide
uaacuucuaaacuucgggg

SEQ ID NO: 230827 - RNA, 19 nt, Artificial Sequence
  Description of Artificial Sequence: Synthetic oligonucleotide
aaguaguuaggguugacca

SEQ ID NO: 230828 - RNA, 19 nt, Artificial Sequence
  Description of Artificial Sequence: Synthetic oligonucleotide
agucucuugaauacgaacc

SEQ ID NO: 230829 - RNA, 19 nt, Artificial Sequence
  Description of Artificial Sequence: Synthetic oligonucleotide
ucaguaaccgaaaagcuuc

SEQ ID NO: 230830 - RNA, 19 nt, Artificial Sequence
  Description of Artificial Sequence: Synthetic oligonucleotide
ucuacuauacgccuugcga

SEQ ID NO: 230831 - RNA, 19 nt, Artificial Sequence
  Description of Artificial Sequence: Synthetic oligonucleotide
uggauaguagggaauaggc

SEQ ID NO: 230832 - RNA, 19 nt, Artificial Sequence
  Description of Artificial Sequence: Synthetic oligonucleotide
gauucggcaguacucagcg

SEQ ID NO: 230833 - RNA, 19 nt, Artificial Sequence
  Description of Artificial Sequence: Synthetic oligonucleotide
auauaacagaagcagcagg

SEQ ID NO: 230834 - RNA, 19 nt, Artificial Sequence
  Description of Artificial Sequence: Synthetic oligonucleotide
caauuaacaagcucacucc

SEQ ID NO: 230835 - RNA, 19 nt, Artificial Sequence
  Description of Artificial Sequence: Synthetic oligonucleotide
ugucuuaggaacaccacca

SEQ ID NO: 230836 - RNA, 19 nt, Artificial Sequence
  Description of Artificial Sequence: Synthetic oligonucleotide
ugagguuagagauucggca

SEQ ID NO: 230837 - RNA, 19 nt, Artificial Sequence
  Description of Artificial Sequence: Synthetic oligonucleotide
aaggguagacucuauagaa

SEQ ID NO: 230838 - RNA, 19 nt, Artificial Sequence
  Description of Artificial Sequence: Synthetic oligonucleotide
cuugcgauagcauaaucug

SEQ ID NO: 230839 - RNA, 19 nt, Artificial Sequence
  Description of Artificial Sequence: Synthetic oligonucleotide
ggugguagaaaguuguugg

SEQ ID NO: 230840 - RNA, 19 nt, Artificial Sequence
  Description of Artificial Sequence: Synthetic oligonucleotide
uaagacaccacguuuuacu

SEQ ID NO: 230841 - RNA, 19 nt, Artificial Sequence
  Description of Artificial Sequence: Synthetic oligonucleotide
uuauuagugucuagcagga

SEQ ID NO: 230842 - RNA, 19 nt, Artificial Sequence
  Description of Artificial Sequence: Synthetic oligonucleotide
gaucguagugcguuagacg

SEQ ID NO: 230843 - RNA, 19 nt, Artificial Sequence
  Description of Artificial Sequence: Synthetic oligonucleotide
aucguagugcguuagacga

SEQ ID NO: 230844 - RNA, 19 nt, Artificial Sequence
  Description of Artificial Sequence: Synthetic oligonucleotide
aguaguuaggguugaccac

SEQ ID NO: 230845 - RNA, 19 nt, Artificial Sequence
  Description of Artificial Sequence: Synthetic oligonucleotide
ugagaaauuggcucuuagc

SEQ ID NO: 230846 - RNA, 19 nt, Artificial Sequence
  Description of Artificial Sequence: Synthetic oligonucleotide
uuaaauuguuccaggucug

SEQ ID NO: 230847 - RNA, 19 nt, Artificial Sequence
  Description of Artificial Sequence: Synthetic oligonucleotide
ucuacguccuugaucacug

SEQ ID NO: 230848 - RNA, 19 nt, Artificial Sequence
  Description of Artificial Sequence: Synthetic oligonucleotide
auuuugaucugucguagug

SEQ ID NO: 230849 - RNA, 19 nt, Artificial Sequence
  Description of Artificial Sequence: Synthetic oligonucleotide
uuguuggugcaacauaaca

SEQ ID NO: 230850 - RNA, 19 nt, Artificial Sequence
  Description of Artificial Sequence: Synthetic oligonucleotide
aagucuacuauacgccuug

SEQ ID NO: 230851 - RNA, 19 nt, Artificial Sequence
  Description of Artificial Sequence: Synthetic oligonucleotide
guuaaauuguuccaggucu

SEQ ID NO: 230852 - RNA, 19 nt, Artificial Sequence
  Description of Artificial Sequence: Synthetic oligonucleotide
aaguccucggacucuuugg

SEQ ID NO: 230853 - RNA, 19 nt, Artificial Sequence
  Description of Artificial Sequence: Synthetic oligonucleotide
guuucuacacggaugauug

SEQ ID NO: 230854 - RNA, 19 nt, Artificial Sequence
  Description of Artificial Sequence: Synthetic oligonucleotide
gagaaauuggcucuuagcu

SEQ ID NO: 230855 - RNA, 19 nt, Artificial Sequence
  Description of Artificial Sequence: Synthetic oligonucleotide
uaucaucaagggaauaaac

SEQ ID NO: 230856 - RNA, 19 nt, Artificial Sequence
  Description of Artificial Sequence: Synthetic oligonucleotide
agugcguuagacgaugaac

SEQ ID NO: 230857 - RNA, 19 nt, Artificial Sequence
  Description of Artificial Sequence: Synthetic oligonucleotide
cacgauuggguucugauuc

SEQ ID NO: 230858 - RNA, 19 nt, Artificial Sequence
  Description of Artificial Sequence: Synthetic oligonucleotide
cacauguuuaggcuggacc

SEQ ID NO: 230859 - RNA, 19 nt, Artificial Sequence
  Description of Artificial Sequence: Synthetic oligonucleotide
uggauuucggcagauauuc

SEQ ID NO: 230860 - RNA, 19 nt, Artificial Sequence
  Description of Artificial Sequence: Synthetic oligonucleotide
uaagcucaaucaaaacaug

SEQ ID NO: 230861 - RNA, 19 nt, Artificial Sequence
  Description of Artificial Sequence: Synthetic oligonucleotide
uucaagcaaguaguuaggg

SEQ ID NO: 230862 - RNA, 19 nt, Artificial Sequence
  Description of Artificial Sequence: Synthetic oligonucleotide
ucguaguguccacugacag

SEQ ID NO: 230863 - RNA, 19 nt, Artificial Sequence
  Description of Artificial Sequence: Synthetic oligonucleotide
augagugcgcaccaccugg

SEQ ID NO: 230864 - RNA, 19 nt, Artificial Sequence
  Description of Artificial Sequence: Synthetic oligonucleotide
gguaagcucaaucaaaaca

SEQ ID NO: 230865 - RNA, 19 nt, Artificial Sequence
  Description of Artificial Sequence: Synthetic oligonucleotide
ugaauacgaaccuuuugaa

SEQ ID NO: 230866 - RNA, 19 nt, Artificial Sequence
  Description of Artificial Sequence: Synthetic oligonucleotide
agugauagauauggucugc

SEQ ID NO: 230867 - RNA, 19 nt, Artificial Sequence
  Description of Artificial Sequence: Synthetic oligonucleotide
agaaagaacacgauugggu

SEQ ID NO: 230868 - RNA, 19 nt, Artificial Sequence
  Description of Artificial Sequence: Synthetic oligonucleotide
uucaguaaccgaaaagcuu

SEQ ID NO: 230869 - RNA, 19 nt, Artificial Sequence
  Description of Artificial Sequence: Synthetic oligonucleotide
aacacgauuggguucugau

SEQ ID NO: 230870 - RNA, 19 nt, Artificial Sequence
  Description of Artificial Sequence: Synthetic oligonucleotide
cugcuguuaagccagcagc

SEQ ID NO: 230871 - RNA, 19 nt, Artificial Sequence
  Description of Artificial Sequence: Synthetic oligonucleotide
gugaguaacccaauccugg

SEQ ID NO: 230872 - RNA, 19 nt, Artificial Sequence
  Description of Artificial Sequence: Synthetic oligonucleotide
ucaagcaaguaguuagggu

SEQ ID NO: 230873 - RNA, 19 nt, Artificial Sequence
  Description of Artificial Sequence: Synthetic oligonucleotide
ugacucgggaguuaguuuc

SEQ ID NO: 230874 - RNA, 19 nt, Artificial Sequence
  Description of Artificial Sequence: Synthetic oligonucleotide
gaaugcaagucuacuauac

SEQ ID NO: 230875 - RNA, 19 nt, Artificial Sequence
  Description of Artificial Sequence: Synthetic oligonucleotide
ugucgcacagugauucucc

SEQ ID NO: 230876 - RNA, 19 nt, Artificial Sequence
  Description of Artificial Sequence: Synthetic oligonucleotide
aagaagauaccuccugaua

SEQ ID NO: 230877 - RNA, 19 nt, Artificial Sequence
  Description of Artificial Sequence: Synthetic oligonucleotide
ugaucuagauugacaucag

SEQ ID NO: 230878 - RNA, 19 nt, Artificial Sequence
  Description of Artificial Sequence: Synthetic oligonucleotide
guagacucuauagaacucc

SEQ ID NO: 230879 - RNA, 19 nt, Artificial Sequence
  Description of Artificial Sequence: Synthetic oligonucleotide
acgauuggguucugauucc

SEQ ID NO: 230880 - RNA, 19 nt, Artificial Sequence
  Description of Artificial Sequence: Synthetic oligonucleotide
guagggaauaggcugguac

SEQ ID NO: 230881 - RNA, 19 nt, Artificial Sequence
  Description of Artificial Sequence: Synthetic oligonucleotide
uagggaauaggcugguaca

SEQ ID NO: 230882 - RNA, 19 nt, Artificial Sequence
  Description of Artificial Sequence: Synthetic oligonucleotide
auggauaguagggaauagg

SEQ ID NO: 230883 - RNA, 19 nt, Artificial Sequence
  Description of Artificial Sequence: Synthetic oligonucleotide
ugauagauauggucugcug

SEQ ID NO: 230884 - RNA, 19 nt, Artificial Sequence
  Description of Artificial Sequence: Synthetic oligonucleotide
aacaugaucguagugcguu

SEQ ID NO: 230885 - RNA, 19 nt, Artificial Sequence
  Description of Artificial Sequence: Synthetic oligonucleotide
ucgggaguuaguuucugca

SEQ ID NO: 230886 - RNA, 19 nt, Artificial Sequence
  Description of Artificial Sequence: Synthetic oligonucleotide
uuucggucuuugacaaagg

SEQ ID NO: 230887 - RNA, 19 nt, Artificial Sequence
  Description of Artificial Sequence: Synthetic oligonucleotide
augagguuagagauucggc

SEQ ID NO: 230888 - RNA, 19 nt, Artificial Sequence
  Description of Artificial Sequence: Synthetic oligonucleotide
ccaauuaacaagcucacuc

SEQ ID NO: 230889 - RNA, 19 nt, Artificial Sequence
  Description of Artificial Sequence: Synthetic oligonucleotide
uuaggcuggaccucgucac

SEQ ID NO: 230890 - RNA, 19 nt, Artificial Sequence
  Description of Artificial Sequence: Synthetic oligonucleotide
cguuagacgaugaacaacc

SEQ ID NO: 230891 - RNA, 19 nt, Artificial Sequence
  Description of Artificial Sequence: Synthetic oligonucleotide
agcugucgcacagugauuc

SEQ ID NO: 230892 - RNA, 19 nt, Artificial Sequence
  Description of Artificial Sequence: Synthetic oligonucleotide
ugaguaacccaauccugga

SEQ ID NO: 230893 - RNA, 19 nt, Artificial Sequence
  Description of Artificial Sequence: Synthetic oligonucleotide
uuucaguccggccugggua

SEQ ID NO: 230894 - RNA, 19 nt, Artificial Sequence
  Description of Artificial Sequence: Synthetic oligonucleotide
ucuuaggaacaccaccaaa

SEQ ID NO: 230895 - RNA, 19 nt, Artificial Sequence
  Description of Artificial Sequence: Synthetic oligonucleotide
uugcgauagcauaaucugu

SEQ ID NO: 230896 - RNA, 19 nt, Artificial Sequence
  Description of Artificial Sequence: Synthetic oligonucleotide
ucucaggauaacuucuaaa

SEQ ID NO: 230897 - RNA, 19 nt, Artificial Sequence
  Description of Artificial Sequence: Synthetic oligonucleotide
gguggagccuuucaguccg

SEQ ID NO: 230898 - RNA, 19 nt, Artificial Sequence
  Description of Artificial Sequence: Synthetic oligonucleotide
cacuaugaaguccucggac

SEQ ID NO: 230899 - RNA, 19 nt, Artificial Sequence
  Description of Artificial Sequence: Synthetic oligonucleotide
aauuggcucuuagcuguac

SEQ ID NO: 230900 - RNA, 19 nt, Artificial Sequence
  Description of Artificial Sequence: Synthetic oligonucleotide
cugauuccaauaagagaag

SEQ ID NO: 230901 - RNA, 19 nt, Artificial Sequence
  Description of Artificial Sequence: Synthetic oligonucleotide
uuagacgaugaacaaccuu

SEQ ID NO: 230902 - RNA, 19 nt, Artificial Sequence
  Description of Artificial Sequence: Synthetic oligonucleotide
gagauugugguacagguuu

SEQ ID NO: 230903 - RNA, 19 nt, Artificial Sequence
  Description of Artificial Sequence: Synthetic oligonucleotide
aucaguaagacaccacguu

SEQ ID NO: 230904 - RNA, 19 nt, Artificial Sequence
  Description of Artificial Sequence: Synthetic oligonucleotide
aaaccauccucaagcacug

SEQ ID NO: 230905 - RNA, 19 nt, Artificial Sequence
  Description of Artificial Sequence: Synthetic oligonucleotide
ugaaugcaagucuacuaua

SEQ ID NO: 230906 - RNA, 19 nt, Artificial Sequence
  Description of Artificial Sequence: Synthetic oligonucleotide
ugaucguagugcguuagac

SEQ ID NO: 230907 - RNA, 19 nt, Artificial Sequence
  Description of Artificial Sequence: Synthetic oligonucleotide
gucuacuauacgccuugcg

SEQ ID NO: 230908 - RNA, 19 nt, Artificial Sequence
  Description of Artificial Sequence: Synthetic oligonucleotide
aggguagacucuauagaac

SEQ ID NO: 230909 - RNA, 19 nt, Artificial Sequence
  Description of Artificial Sequence: Synthetic oligonucleotide
aaaguuccacucacaagcu

SEQ ID NO: 230910 - RNA, 19 nt, Artificial Sequence
  Description of Artificial Sequence: Synthetic oligonucleotide
ucggcagauauucggcugu

SEQ ID NO: 230911 - RNA, 19 nt, Artificial Sequence
  Description of Artificial Sequence: Synthetic oligonucleotide
uauacgccuugcgauagca

SEQ ID NO: 230912 - RNA, 19 nt, Artificial Sequence
  Description of Artificial Sequence: Synthetic oligonucleotide
uucuacacggaugauugau

SEQ ID NO: 230913 - RNA, 19 nt, Artificial Sequence
  Description of Artificial Sequence: Synthetic oligonucleotide
ucuacacggaugauugauu

SEQ ID NO: 230914 - RNA, 19 nt, Artificial Sequence
  Description of Artificial Sequence: Synthetic oligonucleotide
acuauacgccuugcgauag

SEQ ID NO: 230915 - RNA, 19 nt, Artificial Sequence
  Description of Artificial Sequence: Synthetic oligonucleotide
agcuaaaauggauguccug

SEQ ID NO: 230916 - RNA, 19 nt, Artificial Sequence
  Description of Artificial Sequence: Synthetic oligonucleotide
ucggcuguguguauuugaa

SEQ ID NO: 230917 - RNA, 19 nt, Artificial Sequence
  Description of Artificial Sequence: Synthetic oligonucleotide
acacggaugauugauuuau

SEQ ID NO: 230918 - RNA, 19 nt, Artificial Sequence
  Description of Artificial Sequence: Synthetic oligonucleotide
guaagcucaaucaaaacau

SEQ ID NO: 230919 - RNA, 19 nt, Artificial Sequence
  Description of Artificial Sequence: Synthetic oligonucleotide
agauauucggcugugugua

SEQ ID NO: 230920 - RNA, 19 nt, Artificial Sequence
  Description of Artificial Sequence: Synthetic oligonucleotide
uacgccuugcgauagcaua

SEQ ID NO: 230921 - RNA, 19 nt, Artificial Sequence
  Description of Artificial Sequence: Synthetic oligonucleotide
gugcguuagacgaugaaca

SEQ ID NO: 230922 - RNA, 19 nt, Artificial Sequence
  Description of Artificial Sequence: Synthetic oligonucleotide
uuccccuguugucuuagga

SEQ ID NO: 230923 - RNA, 19 nt, Artificial Sequence
  Description of Artificial Sequence: Synthetic oligonucleotide
caucaacuccacugacucg

SEQ ID NO: 230924 - RNA, 19 nt, Artificial Sequence
  Description of Artificial Sequence: Synthetic oligonucleotide
uucggcuguguguauuuga

SEQ ID NO: 230925 - RNA, 19 nt, Artificial Sequence
  Description of Artificial Sequence: Synthetic oligonucleotide
ugcguuagacgaugaacaa

SEQ ID NO: 230926 - RNA, 19 nt, Artificial Sequence
  Description of Artificial Sequence: Synthetic oligonucleotide
uccccuguugucuuaggaa

SEQ ID NO: 230927 - RNA, 19 nt, Artificial Sequence
  Description of Artificial Sequence: Synthetic oligonucleotide
uucuacguccuugaucacu

SEQ ID NO: 230928 - RNA, 19 nt, Artificial Sequence
  Description of Artificial Sequence: Synthetic oligonucleotide
agcgaaacccagccucagg

SEQ ID NO: 230929 - RNA, 19 nt, Artificial Sequence
  Description of Artificial Sequence: Synthetic oligonucleotide
cagcgauuuugaucugucg

SEQ ID NO: 230930 - RNA, 19 nt, Artificial Sequence
  Description of Artificial Sequence: Synthetic oligonucleotide
gguagaaaguuguugguua

SEQ ID NO: 230931 - RNA, 19 nt, Artificial Sequence
  Description of Artificial Sequence: Synthetic oligonucleotide
ugagugcgcaccaccuggc

SEQ ID NO: 230932 - RNA, 19 nt, Artificial Sequence
  Description of Artificial Sequence: Synthetic oligonucleotide
uggcucuuagcuguacuug

SEQ ID NO: 230933 - RNA, 19 nt, Artificial Sequence
  Description of Artificial Sequence: Synthetic oligonucleotide
uccccucgaagagaggucc

SEQ ID NO: 230934 - RNA, 19 nt, Artificial Sequence
  Description of Artificial Sequence: Synthetic oligonucleotide
cuagauugacaucaggcgu

SEQ ID NO: 230935 - RNA, 19 nt, Artificial Sequence
  Description of Artificial Sequence: Synthetic oligonucleotide
uuauguccccucgaagaga

SEQ ID NO: 230936 - RNA, 19 nt, Artificial Sequence
  Description of Artificial Sequence: Synthetic oligonucleotide
ugaugcgggugaguaaccc

SEQ ID NO: 230937 - RNA, 19 nt, Artificial Sequence
  Description of Artificial Sequence: Synthetic oligonucleotide
ggcguuucuacacggauga

SEQ ID NO: 230938 - RNA, 19 nt, Artificial Sequence
  Description of Artificial Sequence: Synthetic oligonucleotide
gaugcgggugaguaaccca

SEQ ID NO: 230939 - RNA, 19 nt, Artificial Sequence
  Description of Artificial Sequence: Synthetic oligonucleotide
agucuacuauacgccuugc

SEQ ID NO: 230940 - RNA, 19 nt, Artificial Sequence
  Description of Artificial Sequence: Synthetic oligonucleotide
caugaucguagugcguuag

SEQ ID NO: 230941 - RNA, 19 nt, Artificial Sequence
  Description of Artificial Sequence: Synthetic oligonucleotide
cauggauaguagggaauag

SEQ ID NO: 230942 - RNA, 19 nt, Artificial Sequence
  Description of Artificial Sequence: Synthetic oligonucleotide
cucgggaguuaguuucugc

SEQ ID NO: 230943 - RNA, 19 nt, Artificial Sequence
  Description of Artificial Sequence: Synthetic oligonucleotide
caucaggcacaacuaucag

SEQ ID NO: 230944 - RNA, 19 nt, Artificial Sequence
  Description of Artificial Sequence: Synthetic oligonucleotide
gaccucgucacagcagugc

SEQ ID NO: 230945 - RNA, 19 nt, Artificial Sequence
  Description of Artificial Sequence: Synthetic oligonucleotide
gaaguuccgcuugagucuc

SEQ ID NO: 230946 - RNA, 19 nt, Artificial Sequence
  Description of Artificial Sequence: Synthetic oligonucleotide
ugucagcaugaccauugau

SEQ ID NO: 230947 - RNA, 19 nt, Artificial Sequence
  Description of Artificial Sequence: Synthetic oligonucleotide
uccgcuugagucucuugaa

SEQ ID NO: 230948 - RNA, 19 nt, Artificial Sequence
  Description of Artificial Sequence: Synthetic oligonucleotide
cuauagaacuccuccugaa

SEQ ID NO: 230949 - RNA, 19 nt, Artificial Sequence
  Description of Artificial Sequence: Synthetic oligonucleotide
aggcucgacacagguaagg

SEQ ID NO: 230950 - RNA, 19 nt, Artificial Sequence
  Description of Artificial Sequence: Synthetic oligonucleotide
cagcaugaccauugaugcc

SEQ ID NO: 230951 - RNA, 19 nt, Artificial Sequence
  Description of Artificial Sequence: Synthetic oligonucleotide
aaacaugaucguagugcgu

SEQ ID NO: 230952 - RNA, 19 nt, Artificial Sequence
  Description of Artificial Sequence: Synthetic oligonucleotide
ggucuuacagaaagaacac

SEQ ID NO: 230953 - RNA, 19 nt, Artificial Sequence
  Description of Artificial Sequence: Synthetic oligonucleotide
uacacggaugauugauuua

SEQ ID NO: 230954 - RNA, 19 nt, Artificial Sequence
  Description of Artificial Sequence: Synthetic oligonucleotide
ucagcgucccugugaaguc

SEQ ID NO: 230955 - RNA, 19 nt, Artificial Sequence
  Description of Artificial Sequence: Synthetic oligonucleotide
acacgauuggguucugauu

SEQ ID NO: 230956 - RNA, 19 nt, Artificial Sequence
  Description of Artificial Sequence: Synthetic oligonucleotide
gacgaugaacaaccuucuc

SEQ ID NO: 230957 - RNA, 19 nt, Artificial Sequence
  Description of Artificial Sequence: Synthetic oligonucleotide
cuaucagcgucccugugaa

SEQ ID NO: 230958 - RNA, 19 nt, Artificial Sequence
  Description of Artificial Sequence: Synthetic oligonucleotide
uagugcguuagacgaugaa

SEQ ID NO: 230959 - RNA, 19 nt, Artificial Sequence
  Description of Artificial Sequence: Synthetic oligonucleotide
augaucguagugcguuaga

SEQ ID NO: 230960 - RNA, 19 nt, Artificial Sequence
  Description of Artificial Sequence: Synthetic oligonucleotide
ccuauaagacagaucucug

SEQ ID NO: 230961 - RNA, 19 nt, Artificial Sequence
  Description of Artificial Sequence: Synthetic oligonucleotide
cuacuauacgccuugcgau

SEQ ID NO: 230962 - RNA, 19 nt, Artificial Sequence
  Description of Artificial Sequence: Synthetic oligonucleotide
agacgaugaacaaccuucu

SEQ ID NO: 230963 - RNA, 19 nt, Artificial Sequence
  Description of Artificial Sequence: Synthetic oligonucleotide
gcauccgggccauugauuc

SEQ ID NO: 230964 - RNA, 19 nt, Artificial Sequence
  Description of Artificial Sequence: Synthetic oligonucleotide
ccaccaaacaacaucagua

SEQ ID NO: 230965 - RNA, 19 nt, Artificial Sequence
  Description of Artificial Sequence: Synthetic oligonucleotide
gaauaggcugguacagaga

SEQ ID NO: 230966 - RNA, 19 nt, Artificial Sequence
  Description of Artificial Sequence: Synthetic oligonucleotide
ucggcaguacucagcgaaa

SEQ ID NO: 230967 - RNA, 19 nt, Artificial Sequence
  Description of Artificial Sequence: Synthetic oligonucleotide
gaguuaguuucugcacgug

SEQ ID NO: 230968 - RNA, 19 nt, Artificial Sequence
  Description of Artificial Sequence: Synthetic oligonucleotide
caaucaaaacaugaucgua

SEQ ID NO: 230969 - RNA, 19 nt, Artificial Sequence
  Description of Artificial Sequence: Synthetic oligonucleotide
uagcuguacuuggaucacc

SEQ ID NO: 230970 - RNA, 19 nt, Artificial Sequence
  Description of Artificial Sequence: Synthetic oligonucleotide
cuauacgccuugcgauagc

SEQ ID NO: 230971 - RNA, 19 nt, Artificial Sequence
  Description of Artificial Sequence: Synthetic oligonucleotide
cagagccaucccucugucg

SEQ ID NO: 230972 - RNA, 19 nt, Artificial Sequence
  Description of Artificial Sequence: Synthetic oligonucleotide
ggcaguacucagcgaaacc

SEQ ID NO: 230973 - RNA, 19 nt, Artificial Sequence
  Description of Artificial Sequence: Synthetic oligonucleotide
acgugcuccugguauacua

SEQ ID NO: 230974 - RNA, 19 nt, Artificial Sequence
  Description of Artificial Sequence: Synthetic oligonucleotide
ucguagugcguuagacgau

SEQ ID NO: 230975 - RNA, 19 nt, Artificial Sequence
  Description of Artificial Sequence: Synthetic oligonucleotide
ugcauccgggccauugauu

SEQ ID NO: 230976 - RNA, 19 nt, Artificial Sequence
  Description of Artificial Sequence: Synthetic oligonucleotide
cagauauucggcugugugu

SEQ ID NO: 230977 - RNA, 19 nt, Artificial Sequence
  Description of Artificial Sequence: Synthetic oligonucleotide
guacuuggaucaccaacaa

SEQ ID NO: 230978 - RNA, 19 nt, Artificial Sequence
  Description of Artificial Sequence: Synthetic oligonucleotide
uaucagcgucccugugaag

SEQ ID NO: 230979 - RNA, 19 nt, Artificial Sequence
  Description of Artificial Sequence: Synthetic oligonucleotide
uaccuccugauaucaucaa

SEQ ID NO: 230980 - RNA, 19 nt, Artificial Sequence
  Description of Artificial Sequence: Synthetic oligonucleotide
aaggcucgacacagguaag

SEQ ID NO: 230981 - RNA, 19 nt, Artificial Sequence
  Description of Artificial Sequence: Synthetic oligonucleotide
caucaguaagacaccacgu

SEQ ID NO: 230982 - RNA, 19 nt, Artificial Sequence
  Description of Artificial Sequence: Synthetic oligonucleotide
aggcguuucuacacggaug

SEQ ID NO: 230983 - RNA, 19 nt, Artificial Sequence
  Description of Artificial Sequence: Synthetic oligonucleotide
cuguugucuuaggaacacc

SEQ ID NO: 230984 - RNA, 19 nt, Artificial Sequence
  Description of Artificial Sequence: Synthetic oligonucleotide
aggcguuuguacugcucca

SEQ ID NO: 230985 - RNA, 19 nt, Artificial Sequence
  Description of Artificial Sequence: Synthetic oligonucleotide
acucagcgaaacccagccu

SEQ ID NO: 230986 - RNA, 19 nt, Artificial Sequence
  Description of Artificial Sequence: Synthetic oligonucleotide
ggauuucggcagauauucg

SEQ ID NO: 230987 - RNA, 19 nt, Artificial Sequence
  Description of Artificial Sequence: Synthetic oligonucleotide
gggugaguaacccaauccu

SEQ ID NO: 230988 - RNA, 19 nt, Artificial Sequence
  Description of Artificial Sequence: Synthetic oligonucleotide
cuuuagugauagauauggu

SEQ ID NO: 230989 - RNA, 19 nt, Artificial Sequence
  Description of Artificial Sequence: Synthetic oligonucleotide
caucccucugucggaggcg

SEQ ID NO: 230990 - RNA, 19 nt, Artificial Sequence
  Description of Artificial Sequence: Synthetic oligonucleotide
uacuaagcuuggagacauc

SEQ ID NO: 230991 - RNA, 19 nt, Artificial Sequence
  Description of Artificial Sequence: Synthetic oligonucleotide
cuacacggaugauugauuu

SEQ ID NO: 230992 - RNA, 19 nt, Artificial Sequence
  Description of Artificial Sequence: Synthetic oligonucleotide
cuggggcuaaauucaucca

SEQ ID NO: 230993 - RNA, 19 nt, Artificial Sequence
  Description of Artificial Sequence: Synthetic oligonucleotide
cacugaggccguugacccc

SEQ ID NO: 230994 - RNA, 19 nt, Artificial Sequence
  Description of Artificial Sequence: Synthetic oligonucleotide
caccacguuuuacuucauc

SEQ ID NO: 230995 - RNA, 19 nt, Artificial Sequence
  Description of Artificial Sequence: Synthetic oligonucleotide
gcgauuuugaucugucgua

SEQ ID NO: 230996 - RNA, 19 nt, Artificial Sequence
  Description of Artificial Sequence: Synthetic oligonucleotide
augcgggugaguaacccaa

SEQ ID NO: 230997 - RNA, 19 nt, Artificial Sequence
  Description of Artificial Sequence: Synthetic oligonucleotide
ugcgggugaguaacccaau

SEQ ID NO: 230998 - RNA, 19 nt, Artificial Sequence
  Description of Artificial Sequence: Synthetic oligonucleotide
acgaaucuugugucuugua

SEQ ID NO: 230999 - RNA, 19 nt, Artificial Sequence
  Description of Artificial Sequence: Synthetic oligonucleotide
cgggugaguaacccaaucc

SEQ ID NO: 231000 - RNA, 19 nt, Artificial Sequence
  Description of Artificial Sequence: Synthetic oligonucleotide
agauugacaucaggcguuu

SEQ ID NO: 231001 - RNA, 19 nt, Artificial Sequence
  Description of Artificial Sequence: Synthetic oligonucleotide
caagcucacuccucuuuaa

SEQ ID NO: 231002 - RNA, 19 nt, Artificial Sequence
  Description of Artificial Sequence: Synthetic oligonucleotide
cgauuuugaucugucguag

SEQ ID NO: 231003 - RNA, 19 nt, Artificial Sequence
  Description of Artificial Sequence: Synthetic oligonucleotide
gcgauagcauaaucuguca

SEQ ID NO: 231004 - RNA, 19 nt, Artificial Sequence
  Description of Artificial Sequence: Synthetic oligonucleotide
ccuugcgauagcauaaucu

SEQ ID NO: 231005 - RNA, 19 nt, Artificial Sequence
  Description of Artificial Sequence: Synthetic oligonucleotide
acgccuugcgauagcauaa

SEQ ID NO: 231006 - RNA, 19 nt, Artificial Sequence
  Description of Artificial Sequence: Synthetic oligonucleotide
cccucgaaugccuucuguc

SEQ ID NO: 231007 - RNA, 19 nt, Artificial Sequence
  Description of Artificial Sequence: Synthetic oligonucleotide
gaacacgauuggguucuga

SEQ ID NO: 231008 - RNA, 19 nt, Artificial Sequence
  Description of Artificial Sequence: Synthetic oligonucleotide
gcguuagacgaugaacaac

SEQ ID NO: 231009 - RNA, 19 nt, Artificial Sequence
  Description of Artificial Sequence: Synthetic oligonucleotide
aguaaccgaaaagcuucuu

SEQ ID NO: 231010 - RNA, 19 nt, Artificial Sequence
  Description of Artificial Sequence: Synthetic oligonucleotide
agauugugguacagguuuu

SEQ ID NO: 231011 - RNA, 19 nt, Artificial Sequence
  Description of Artificial Sequence: Synthetic oligonucleotide
gauauucggcuguguguau

SEQ ID NO: 231012 - RNA, 19 nt, Artificial Sequence
  Description of Artificial Sequence: Synthetic oligonucleotide
ggauaguagggaauaggcu

SEQ ID NO: 231013 - RNA, 19 nt, Artificial Sequence
  Description of Artificial Sequence: Synthetic oligonucleotide
ggauaaagaagaggucaaa

SEQ ID NO: 231014 - RNA, 19 nt, Artificial Sequence
  Description of Artificial Sequence: Synthetic oligonucleotide
gauugacaucaggcguuuc

SEQ ID NO: 231015 - RNA, 19 nt, Artificial Sequence
  Description of Artificial Sequence: Synthetic oligonucleotide
guucuacguccuugaucac

SEQ ID NO: 231016 - RNA, 19 nt, Artificial Sequence
  Description of Artificial Sequence: Synthetic oligonucleotide
cugucguaguguccacuga

SEQ ID NO: 231017 - RNA, 19 nt, Artificial Sequence
  Description of Artificial Sequence: Synthetic oligonucleotide
guagugcguuagacgauga

SEQ ID NO: 231018 - RNA, 19 nt, Artificial Sequence
  Description of Artificial Sequence: Synthetic oligonucleotide
guuagacgaugaacaaccu

SEQ ID NO: 231019 - RNA, 19 nt, Artificial Sequence
  Description of Artificial Sequence: Synthetic oligonucleotide
cguagugcguuagacgaug

SEQ ID NO: 231020 - RNA, 19 nt, Artificial Sequence
  Description of Artificial Sequence: Synthetic oligonucleotide
agaacacgauuggguucug

SEQ ID NO: 231021 - RNA, 19 nt, Artificial Sequence
  Description of Artificial Sequence: Synthetic oligonucleotide
cuuucaguccggccugggu

SEQ ID NO: 231022 - RNA, 19 nt, Artificial Sequence
  Description of Artificial Sequence: Synthetic oligonucleotide
cugagaggcggaucaugcu

SEQ ID NO: 231023 - RNA, 19 nt, Artificial Sequence
  Description of Artificial Sequence: Synthetic oligonucleotide
gcgggugaguaacccaauc

SEQ ID NO: 231024 - RNA, 19 nt, Artificial Sequence
  Description of Artificial Sequence: Synthetic oligonucleotide
cauaaucugucaccucauu

SEQ ID NO: 231025 - RNA, 19 nt, Artificial Sequence
  Description of Artificial Sequence: Synthetic oligonucleotide
auacgccuugcgauagcau

SEQ ID NO: 231026 - RNA, 19 nt, Artificial Sequence
  Description of Artificial Sequence: Synthetic oligonucleotide
auaggcugguacagagauu

SEQ ID NO: 231027 - RNA, 19 nt, Artificial Sequence
  Description of Artificial Sequence: Synthetic oligonucleotide
cguugaccccauucauagg

SEQ ID NO: 231028 - RNA, 19 nt, Artificial Sequence
  Description of Artificial Sequence: Synthetic oligonucleotide
gcuuaaacuggcgggcaaa

SEQ ID NO: 231029 - RNA, 19 nt, Artificial Sequence
  Description of Artificial Sequence: Synthetic oligonucleotide
cgguggagccuuucagucc

SEQ ID NO: 231030 - RNA, 19 nt, Artificial Sequence
  Description of Artificial Sequence: Synthetic oligonucleotide
cacgaaucuugugucuugu

SEQ ID NO: 231031 - RNA, 19 nt, Artificial Sequence
  Description of Artificial Sequence: Synthetic oligonucleotide
gggauacuuccucggggaa

SEQ ID NO: 231032 - RNA, 19 nt, Artificial Sequence
  Description of Artificial Sequence: Synthetic oligonucleotide
gccuugcgauagcauaauc

SEQ ID NO: 231033 - RNA, 19 nt, Artificial Sequence
  Description of Artificial Sequence: Synthetic oligonucleotide
cugacucgggaguuaguuu

SEQ ID NO: 231034 - RNA, 19 nt, Artificial Sequence
  Description of Artificial Sequence: Synthetic oligonucleotide
agguaaggguagacucuau

SEQ ID NO: 231035 - RNA, 19 nt, Artificial Sequence
  Description of Artificial Sequence: Synthetic oligonucleotide
ggguuccugauuggcaucu

SEQ ID NO: 231036 - RNA, 19 nt, Artificial Sequence
  Description of Artificial Sequence: Synthetic oligonucleotide
ucccucugucggaggcguu

SEQ ID NO: 231037 - RNA, 19 nt, Artificial Sequence
  Description of Artificial Sequence: Synthetic oligonucleotide
cacggaugauugauuuauu

SEQ ID NO: 231038 - RNA, 19 nt, Artificial Sequence
  Description of Artificial Sequence: Synthetic oligonucleotide
ccucugucggaggcguuug

SEQ ID NO: 231039 - RNA, 19 nt, Artificial Sequence
  Description of Artificial Sequence: Synthetic oligonucleotide
gccguugaccccauucaua

SEQ ID NO: 231040 - RNA, 19 nt, Artificial Sequence
  Description of Artificial Sequence: Synthetic oligonucleotide
cacaacuaucagcgucccu

SEQ ID NO: 231041 - RNA, 19 nt, Artificial Sequence
  Description of Artificial Sequence: Synthetic oligonucleotide
ggcagauauucggcugugu

SEQ ID NO: 231042 - RNA, 19 nt, Artificial Sequence
  Description of Artificial Sequence: Synthetic oligonucleotide
ccuuucggucuuugacaaa

SEQ ID NO: 231043 - RNA, 19 nt, Artificial Sequence
  Description of Artificial Sequence: Synthetic oligonucleotide
cgccuugcgauagcauaau

SEQ ID NO: 231044 - RNA, 19 nt, Artificial Sequence
  Description of Artificial Sequence: Synthetic oligonucleotide
uguuaaauaacuaaaguug

SEQ ID NO: 231045 - RNA, 19 nt, Artificial Sequence
  Description of Artificial Sequence: Synthetic oligonucleotide
agcaacauaauuccaaccc

SEQ ID NO: 231046 - RNA, 19 nt, Artificial Sequence
  Description of Artificial Sequence: Synthetic oligonucleotide
uguaaaguaggcuggaagg

SEQ ID NO: 231047 - RNA, 19 nt, Artificial Sequence
  Description of Artificial Sequence: Synthetic oligonucleotide
aacgacaucaaguaguuga

SEQ ID NO: 231048 - RNA, 19 nt, Artificial Sequence
  Description of Artificial Sequence: Synthetic oligonucleotide
gaaaugaccuguuugcugg

SEQ ID NO: 231049 - RNA, 19 nt, Artificial Sequence
  Description of Artificial Sequence: Synthetic oligonucleotide
uuaugaaucgugaaggacu

SEQ ID NO: 231050 - RNA, 19 nt, Artificial Sequence
  Description of Artificial Sequence: Synthetic oligonucleotide
ucuaauuaugagauguuca

SEQ ID NO: 231051 - RNA, 19 nt, Artificial Sequence
  Description of Artificial Sequence: Synthetic oligonucleotide
ugaauagagaucuauuugu

SEQ ID NO: 231052 - RNA, 19 nt, Artificial Sequence
  Description of Artificial Sequence: Synthetic oligonucleotide
uucaccuuugcauacuugg

SEQ ID NO: 231053 - RNA, 19 nt, Artificial Sequence
  Description of Artificial Sequence: Synthetic oligonucleotide
uaaucgaucaucauccaga

SEQ ID NO: 231054 - RNA, 19 nt, Artificial Sequence
  Description of Artificial Sequence: Synthetic oligonucleotide
uguuugacguacaacagca

SEQ ID NO: 231055 - RNA, 19 nt, Artificial Sequence
  Description of Artificial Sequence: Synthetic oligonucleotide
cuggauguagguauaaucc

SEQ ID NO: 231056 - RNA, 19 nt, Artificial Sequence
  Description of Artificial Sequence: Synthetic oligonucleotide
cuuauaugcucaaauuccg

SEQ ID NO: 231057 - RNA, 19 nt, Artificial Sequence
  Description of Artificial Sequence: Synthetic oligonucleotide
uccuguuugacguacaaca

SEQ ID NO: 231058 - RNA, 19 nt, Artificial Sequence
  Description of Artificial Sequence: Synthetic oligonucleotide
auugguucccucaugaagc

SEQ ID NO: 231059 - RNA, 19 nt, Artificial Sequence
  Description of Artificial Sequence: Synthetic oligonucleotide
aguagaaaugaccuguuug

SEQ ID NO: 231060 - RNA, 19 nt, Artificial Sequence
  Description of Artificial Sequence: Synthetic oligonucleotide
cauaauuccaacccagccg

SEQ ID NO: 231061 - RNA, 19 nt, Artificial Sequence
  Description of Artificial Sequence: Synthetic oligonucleotide
aaguugaacauugaauguc

SEQ ID NO: 231062 - RNA, 19 nt, Artificial Sequence
  Description of Artificial Sequence: Synthetic oligonucleotide
aauagagaucuauuugugu

SEQ ID NO: 231063 - RNA, 19 nt, Artificial Sequence
  Description of Artificial Sequence: Synthetic oligonucleotide
ucuauuuguguuaaauaac

SEQ ID NO: 231064 - RNA, 19 nt, Artificial Sequence
  Description of Artificial Sequence: Synthetic oligonucleotide
agaucgagcuccuggaacc

SEQ ID NO: 231065 - RNA, 19 nt, Artificial Sequence
  Description of Artificial Sequence: Synthetic oligonucleotide
cauuccaguauccaaacag

SEQ ID NO: 231066 - RNA, 19 nt, Artificial Sequence
  Description of Artificial Sequence: Synthetic oligonucleotide
augaauagagaucuauuug

SEQ ID NO: 231067 - RNA, 19 nt, Artificial Sequence
  Description of Artificial Sequence: Synthetic oligonucleotide
uguucagucagggauacag

SEQ ID NO: 231068 - RNA, 19 nt, Artificial Sequence
  Description of Artificial Sequence: Synthetic oligonucleotide
uguguaauugccagaacac

SEQ ID NO: 231069 - RNA, 19 nt, Artificial Sequence
  Description of Artificial Sequence: Synthetic oligonucleotide
uguaauugccagaacacuc

SEQ ID NO: 231070 - RNA, 19 nt, Artificial Sequence
  Description of Artificial Sequence: Synthetic oligonucleotide
  modified_base (14)..(14): a, c, u, g, unknown or other
aacgcagaugcucnguugu

SEQ ID NO: 231071 - RNA, 19 nt, Artificial Sequence
  Description of Artificial Sequence: Synthetic oligonucleotide
aaaacagaacucccgcuug

SEQ ID NO: 231072 - RNA, 19 nt, Artificial Sequence
  Description of Artificial Sequence: Synthetic oligonucleotide
uuugaguaaggcaauguau

SEQ ID NO: 231073 - RNA, 19 nt, Artificial Sequence
  Description of Artificial Sequence: Synthetic oligonucleotide
  modified_base (6)..(6): a, c, u, g, unknown or other
ugcucnguugugcagcugg

SEQ ID NO: 231074 - RNA, 19 nt, Artificial Sequence
  Description of Artificial Sequence: Synthetic oligonucleotide
uauacaguugggaggacug

SEQ ID NO: 231075 - RNA, 19 nt, Artificial Sequence
  Description of Artificial Sequence: Synthetic oligonucleotide
uguaccgucacaucagagc

SEQ ID NO: 231076 - RNA, 19 nt, Artificial Sequence
  Description of Artificial Sequence: Synthetic oligonucleotide
uuugacguacaacagcaac

SEQ ID NO: 231077 - RNA, 19 nt, Artificial Sequence
  Description of Artificial Sequence: Synthetic oligonucleotide
cacaauguaugaaugggag

SEQ ID NO: 231078 - RNA, 19 nt, Artificial Sequence
  Description of Artificial Sequence: Synthetic oligonucleotide
aguauauacauguccucag

SEQ ID NO: 231079 - RNA, 19 nt, Artificial Sequence
  Description of Artificial Sequence: Synthetic oligonucleotide
auucacaacccucaccccg

SEQ ID NO: 231080 - RNA, 19 nt, Artificial Sequence
  Description of Artificial Sequence: Synthetic oligonucleotide
guugaugaauucaaauugg

SEQ ID NO: 231081 - RNA, 19 nt, Artificial Sequence
  Description of Artificial Sequence: Synthetic oligonucleotide
aaugggagacccgaaacag

SEQ ID NO: 231082 - RNA, 19 nt, Artificial Sequence
  Description of Artificial Sequence: Synthetic oligonucleotide
uucuauacagguaaucgau

SEQ ID NO: 231083 - RNA, 19 nt, Artificial Sequence
  Description of Artificial Sequence: Synthetic oligonucleotide
aguuaguccaaauaucuaa

SEQ ID NO: 231084 - RNA, 19 nt, Artificial Sequence
  Description of Artificial Sequence: Synthetic oligonucleotide
uucacaaggcagcauagga

SEQ ID NO: 231085 - RNA, 19 nt, Artificial Sequence
  Description of Artificial Sequence: Synthetic oligonucleotide
aaacagaacucccgcuugg

SEQ ID NO: 231086 - RNA, 19 nt, Artificial Sequence
  Description of Artificial Sequence: Synthetic oligonucleotide
uccaguauccaaacagucc

SEQ ID NO: 231087 - RNA, 19 nt, Artificial Sequence
  Description of Artificial Sequence: Synthetic oligonucleotide
ucuauuauuguggauuugu

SEQ ID NO: 231088 - RNA, 19 nt, Artificial Sequence
  Description of Artificial Sequence: Synthetic oligonucleotide
uuggccauuaugaaucgug

SEQ ID NO: 231089 - RNA, 19 nt, Artificial Sequence
  Description of Artificial Sequence: Synthetic oligonucleotide
ugaaucgugaaggacucgg

SEQ ID NO: 231090 - RNA, 19 nt, Artificial Sequence
  Description of Artificial Sequence: Synthetic oligonucleotide
uggacuacagaggaauugg

SEQ ID NO: 231091 - RNA, 19 nt, Artificial Sequence
  Description of Artificial Sequence: Synthetic oligonucleotide
cucaacgugagaaucuggc

SEQ ID NO: 231092 - RNA, 19 nt, Artificial Sequence
  Description of Artificial Sequence: Synthetic oligonucleotide
auagagaucuauuuguguu

SEQ ID NO: 231093 - RNA, 19 nt, Artificial Sequence
  Description of Artificial Sequence: Synthetic oligonucleotide
uggguuucggagcaguaag

SEQ ID NO: 231094 - RNA, 19 nt, Artificial Sequence
  Description of Artificial Sequence: Synthetic oligonucleotide
uucuaucucaacgugagaa

SEQ ID NO: 231095 - RNA, 19 nt, Artificial Sequence
  Description of Artificial Sequence: Synthetic oligonucleotide
acucagaucgagcuccugg

SEQ ID NO: 231096 - RNA, 19 nt, Artificial Sequence
  Description of Artificial Sequence: Synthetic oligonucleotide
uaugaaucgugaaggacuc

SEQ ID NO: 231097 - RNA, 19 nt, Artificial Sequence
  Description of Artificial Sequence: Synthetic oligonucleotide
uaugguaggcacuguaaca

SEQ ID NO: 231098 - RNA, 19 nt, Artificial Sequence
  Description of Artificial Sequence: Synthetic oligonucleotide
ugaaugggagacccgaaac

SEQ ID NO: 231099 - RNA, 19 nt, Artificial Sequence
  Description of Artificial Sequence: Synthetic oligonucleotide
  modified_base (16)..(16): a, c, u, g, unknown or other
aaaacgcagaugcucnguu

SEQ ID NO: 231100 - RNA, 19 nt, Artificial Sequence
  Description of Artificial Sequence: Synthetic oligonucleotide
  modified_base (9)..(9): a, c, u, g, unknown or other
agaugcucnguugugcagc

SEQ ID NO: 231101 - RNA, 19 nt, Artificial Sequence
  Description of Artificial Sequence: Synthetic oligonucleotide
  modified_base (3)..(3): a, c, u, g, unknown or other
ucnguugugcagcuggaac

SEQ ID NO: 231102 - RNA, 19 nt, Artificial Sequence
  Description of Artificial Sequence: Synthetic oligonucleotide
ugccccaguauauacaugu

SEQ ID NO: 231103 - RNA, 19 nt, Artificial Sequence
  Description of Artificial Sequence: Synthetic oligonucleotide
uaguccaaauaucuaauua

SEQ ID NO: 231104 - RNA, 19 nt, Artificial Sequence
  Description of Artificial Sequence: Synthetic oligonucleotide
ggaucggacaauuuccucg

SEQ ID NO: 231105 - RNA, 19 nt, Artificial Sequence
  Description of Artificial Sequence: Synthetic oligonucleotide
acaacccucaccccgaugu

SEQ ID NO: 231106 - RNA, 19 nt, Artificial Sequence
  Description of Artificial Sequence: Synthetic oligonucleotide
ucaguucuauuauugugga

SEQ ID NO: 231107 - RNA, 19 nt, Artificial Sequence
  Description of Artificial Sequence: Synthetic oligonucleotide
uugcuaacagucuccagug

SEQ ID NO: 231108 - RNA, 19 nt, Artificial Sequence
  Description of Artificial Sequence: Synthetic oligonucleotide
uuauaugcucaaauuccgu

SEQ ID NO: 231109 - RNA, 19 nt, Artificial Sequence
  Description of Artificial Sequence: Synthetic oligonucleotide
guaagcucaacccuccgug

SEQ ID NO: 231110 - RNA, 19 nt, Artificial Sequence
  Description of Artificial Sequence: Synthetic oligonucleotide
agcacgacacuucucacug

SEQ ID NO: 231111 - RNA, 19 nt, Artificial Sequence
  Description of Artificial Sequence: Synthetic oligonucleotide
  modified_base (2)..(2): a, c, u, g, unknown or other
cnguugugcagcuggaacc

SEQ ID NO: 231112 - RNA, 19 nt, Artificial Sequence
  Description of Artificial Sequence: Synthetic oligonucleotide
ugcguguuccuguuugacg

SEQ ID NO: 231113 - RNA, 19 nt, Artificial Sequence
  Description of Artificial Sequence: Synthetic oligonucleotide
ucuauacagguaaucgauc

SEQ ID NO: 231114 - RNA, 19 nt, Artificial Sequence
  Description of Artificial Sequence: Synthetic oligonucleotide
cagggaucggacaauuucc

SEQ ID NO: 231115 - RNA, 19 nt, Artificial Sequence
  Description of Artificial Sequence: Synthetic oligonucleotide
gaaggacucgguuugcaac

SEQ ID NO: 231116 - RNA, 19 nt, Artificial Sequence
  Description of Artificial Sequence: Synthetic oligonucleotide
gauaugugcugcguguucc

SEQ ID NO: 231117 - RNA, 19 nt, Artificial Sequence
  Description of Artificial Sequence: Synthetic oligonucleotide
ugaguuuuguggccguagc

SEQ ID NO: 231118 - RNA, 19 nt, Artificial Sequence
  Description of Artificial Sequence: Synthetic oligonucleotide
uaacucagcugagagaugu

SEQ ID NO: 231119 - RNA, 19 nt, Artificial Sequence
  Description of Artificial Sequence: Synthetic oligonucleotide
uggguaaaacaggagagga

SEQ ID NO: 231120 - RNA, 19 nt, Artificial Sequence
  Description of Artificial Sequence: Synthetic oligonucleotide
caacccuccgugaaaacgc

SEQ ID NO: 231121 - RNA, 19 nt, Artificial Sequence
  Description of Artificial Sequence: Synthetic oligonucleotide
  modified_base (15)..(15): a, c, u, g, unknown or other
aaacgcagaugcucnguug

SEQ ID NO: 231122 - RNA, 19 nt, Artificial Sequence
  Description of Artificial Sequence: Synthetic oligonucleotide
guaauugccagaacacucc

SEQ ID NO: 231123 - RNA, 19 nt, Artificial Sequence
  Description of Artificial Sequence: Synthetic oligonucleotide
uuacacauaugagagggaa

SEQ ID NO: 231124 - RNA, 19 nt, Artificial Sequence
  Description of Artificial Sequence: Synthetic oligonucleotide
aaauuccguccucaggccu

SEQ ID NO: 231125 - RNA, 19 nt, Artificial Sequence
  Description of Artificial Sequence: Synthetic oligonucleotide
cuguuugacguacaacagc

SEQ ID NO: 231126 - RNA, 19 nt, Artificial Sequence
  Description of Artificial Sequence: Synthetic oligonucleotide
ggaggauugagguucaaac

SEQ ID NO: 231127 - RNA, 19 nt, Artificial Sequence
  Description of Artificial Sequence: Synthetic oligonucleotide
uaagauugguucccucaug

SEQ ID NO: 231128 - RNA, 19 nt, Artificial Sequence
  Description of Artificial Sequence: Synthetic oligonucleotide
ucaccuuugcauacuuggc

SEQ ID NO: 231129 - RNA, 19 nt, Artificial Sequence
  Description of Artificial Sequence: Synthetic oligonucleotide
ccauuaugaaucgugaagg

SEQ ID NO: 231130 - RNA, 19 nt, Artificial Sequence
  Description of Artificial Sequence: Synthetic oligonucleotide
ucaacgugagaaucuggca

SEQ ID NO: 231131 - RNA, 19 nt, Artificial Sequence
  Description of Artificial Sequence: Synthetic oligonucleotide
agaucuauuuguguuaaau

SEQ ID NO: 231132 - RNA, 19 nt, Artificial Sequence
  Description of Artificial Sequence: Synthetic oligonucleotide
ugguugcuagcgcagaggu

SEQ ID NO: 231133 - RNA, 19 nt, Artificial Sequence
  Description of Artificial Sequence: Synthetic oligonucleotide
aguaauccuuuccccguuc

SEQ ID NO: 231134 - RNA, 19 nt, Artificial Sequence
  Description of Artificial Sequence: Synthetic oligonucleotide
aaucgugaaggacucgguu

SEQ ID NO: 231135 - RNA, 19 nt, Artificial Sequence
  Description of Artificial Sequence: Synthetic oligonucleotide
uggccauuaugaaucguga

SEQ ID NO: 231136 - RNA, 19 nt, Artificial Sequence
  Description of Artificial Sequence: Synthetic oligonucleotide
acggaaugguugcuagcgc

SEQ ID NO: 231137 - RNA, 19 nt, Artificial Sequence
  Description of Artificial Sequence: Synthetic oligonucleotide
agcgcagagguuaucaauc

SEQ ID NO: 231138 - RNA, 19 nt, Artificial Sequence
  Description of Artificial Sequence: Synthetic oligonucleotide
ucuaucucaacgugagaau

SEQ ID NO: 231139 - RNA, 19 nt, Artificial Sequence
  Description of Artificial Sequence: Synthetic oligonucleotide
agauacgucgucuccugug

SEQ ID NO: 231140 - RNA, 19 nt, Artificial Sequence
  Description of Artificial Sequence: Synthetic oligonucleotide
gaguuuuguggccguagcc

SEQ ID NO: 231141 - RNA, 19 nt, Artificial Sequence
  Description of Artificial Sequence: Synthetic oligonucleotide
ucuuauccagggaucggac

SEQ ID NO: 231142 - RNA, 19 nt, Artificial Sequence
  Description of Artificial Sequence: Synthetic oligonucleotide
acccgaaacagcugggcag

SEQ ID NO: 231143 - RNA, 19 nt, Artificial Sequence
  Description of Artificial Sequence: Synthetic oligonucleotide
aguugaacauugaauguca

SEQ ID NO: 231144 - RNA, 19 nt, Artificial Sequence
  Description of Artificial Sequence: Synthetic oligonucleotide
uaucuaauuaugagauguu

SEQ ID NO: 231145 - RNA, 19 nt, Artificial Sequence
  Description of Artificial Sequence: Synthetic oligonucleotide
uccaucuuauccagggauc

SEQ ID NO: 231146 - RNA, 19 nt, Artificial Sequence
  Description of Artificial Sequence: Synthetic oligonucleotide
caguaucguacuuguaaag

SEQ ID NO: 231147 - RNA, 19 nt, Artificial Sequence
  Description of Artificial Sequence: Synthetic oligonucleotide
cuggaauggcuaaaacuug

SEQ ID NO: 231148 - RNA, 19 nt, Artificial Sequence
  Description of Artificial Sequence: Synthetic oligonucleotide
caaacaccgagcugacggg

SEQ ID NO: 231149 - RNA, 19 nt, Artificial Sequence
  Description of Artificial Sequence: Synthetic oligonucleotide
caaauuccguccucaggcc

SEQ ID NO: 231150 - RNA, 19 nt, Artificial Sequence
  Description of Artificial Sequence: Synthetic oligonucleotide
gauacgucgucuccuguga

SEQ ID NO: 231151 - RNA, 19 nt, Artificial Sequence
  Description of Artificial Sequence: Synthetic oligonucleotide
gagcucaccaucuggggac

SEQ ID NO: 231152 - RNA, 19 nt, Artificial Sequence
  Description of Artificial Sequence: Synthetic oligonucleotide
gaucggacaauuuccucga

SEQ ID NO: 231153 - RNA, 19 nt, Artificial Sequence
  Description of Artificial Sequence: Synthetic oligonucleotide
uccaguuguaccgucacau

SEQ ID NO: 231154 - RNA, 19 nt, Artificial Sequence
  Description of Artificial Sequence: Synthetic oligonucleotide
cuuuguuuacccacuccuc

SEQ ID NO: 231155 - RNA, 19 nt, Artificial Sequence
  Description of Artificial Sequence: Synthetic oligonucleotide
ugacguacaacagcaacau

SEQ ID NO: 231156 - RNA, 19 nt, Artificial Sequence
  Description of Artificial Sequence: Synthetic oligonucleotide
ugugucucgcagcgaaccc

SEQ ID NO: 231157 - RNA, 19 nt, Artificial Sequence
  Description of Artificial Sequence: Synthetic oligonucleotide
cuaucucaacgugagaauc

SEQ ID NO: 231158 - RNA, 19 nt, Artificial Sequence
  Description of Artificial Sequence: Synthetic oligonucleotide
uugaguuuuguggccguag

SEQ ID NO: 231159 - RNA, 19 nt, Artificial Sequence
  Description of Artificial Sequence: Synthetic oligonucleotide
aguuguaccgucacaucag

SEQ ID NO: 231160 - RNA, 19 nt, Artificial Sequence
  Description of Artificial Sequence: Synthetic oligonucleotide
ugucucgcagcgaacccug

SEQ ID NO: 231161 - RNA, 19 nt, Artificial Sequence
  Description of Artificial Sequence: Synthetic oligonucleotide
guuucggagcaguaagcug

SEQ ID NO: 231162 - RNA, 19 nt, Artificial Sequence
  Description of Artificial Sequence: Synthetic oligonucleotide
ugauuucaccauugugucu

SEQ ID NO: 231163 - RNA, 19 nt, Artificial Sequence
  Description of Artificial Sequence: Synthetic oligonucleotide
uaagcucaacccuccguga

SEQ ID NO: 231164 - RNA, 19 nt, Artificial Sequence
  Description of Artificial Sequence: Synthetic oligonucleotide
uaugaaugggagacccgaa

SEQ ID NO: 231165 - RNA, 19 nt, Artificial Sequence
  Description of Artificial Sequence: Synthetic oligonucleotide
cucgagugucuuccgauag

SEQ ID NO: 231166 - RNA, 19 nt, Artificial Sequence
  Description of Artificial Sequence: Synthetic oligonucleotide
aguuugaguaaggcaaugu

SEQ ID NO: 231167 - RNA, 19 nt, Artificial Sequence
  Description of Artificial Sequence: Synthetic oligonucleotide
guugcuagcgcagagguua

SEQ ID NO: 231168 - RNA, 19 nt, Artificial Sequence
  Description of Artificial Sequence: Synthetic oligonucleotide
caaagaccuuccaugcuuc

SEQ ID NO: 231169 - RNA, 19 nt, Artificial Sequence
  Description of Artificial Sequence: Synthetic oligonucleotide
guuugaguaaggcaaugua

SEQ ID NO: 231170 - RNA, 19 nt, Artificial Sequence
  Description of Artificial Sequence: Synthetic oligonucleotide
  modified_base (10)..(10): a, c, u, g, unknown or other
cagaugcucnguugugcag

SEQ ID NO: 231171 - RNA, 19 nt, Artificial Sequence
  Description of Artificial Sequence: Synthetic oligonucleotide
auuccaguauccaaacagu

SEQ ID NO: 231172 - RNA, 19 nt, Artificial Sequence
  Description of Artificial Sequence: Synthetic oligonucleotide
gguuaaguuggaauacaag

SEQ ID NO: 231173 - RNA, 19 nt, Artificial Sequence
  Description of Artificial Sequence: Synthetic oligonucleotide
acauuguauguacccacaa

SEQ ID NO: 231174 - RNA, 19 nt, Artificial Sequence
  Description of Artificial Sequence: Synthetic oligonucleotide
uggccguagccuuauuuac

SEQ ID NO: 231175 - RNA, 19 nt, Artificial Sequence
  Description of Artificial Sequence: Synthetic oligonucleotide
auauacaguugggaggacu

SEQ ID NO: 231176 - RNA, 19 nt, Artificial Sequence
  Description of Artificial Sequence: Synthetic oligonucleotide
agauuggacaguggaagca

SEQ ID NO: 231177 - RNA, 19 nt, Artificial Sequence
  Description of Artificial Sequence: Synthetic oligonucleotide
aagcucaacccuccgugaa

SEQ ID NO: 231178 - RNA, 19 nt, Artificial Sequence
  Description of Artificial Sequence: Synthetic oligonucleotide
ucgagugucuuccgauaga

SEQ ID NO: 231179 - RNA, 19 nt, Artificial Sequence
  Description of Artificial Sequence: Synthetic oligonucleotide
guucagucagggauacagg

SEQ ID NO: 231180 - RNA, 19 nt, Artificial Sequence
  Description of Artificial Sequence: Synthetic oligonucleotide
uguggccguagccuuauuu

SEQ ID NO: 231181 - RNA, 19 nt, Artificial Sequence
  Description of Artificial Sequence: Synthetic oligonucleotide
cacauaugagagggaaugc

SEQ ID NO: 231182 - RNA, 19 nt, Artificial Sequence
  Description of Artificial Sequence: Synthetic oligonucleotide
ucagagccaguaucguacu

SEQ ID NO: 231183 - RNA, 19 nt, Artificial Sequence
  Description of Artificial Sequence: Synthetic oligonucleotide
aggguacuuggccauuaug

SEQ ID NO: 231184 - RNA, 19 nt, Artificial Sequence
  Description of Artificial Sequence: Synthetic oligonucleotide
uucuauuauuguggauuug

SEQ ID NO: 231185 - RNA, 19 nt, Artificial Sequence
  Description of Artificial Sequence: Synthetic oligonucleotide
aaguaguugaagacauuuu

SEQ ID NO: 231186 - RNA, 19 nt, Artificial Sequence
  Description of Artificial Sequence: Synthetic oligonucleotide
agguaagcucaacccuccg

SEQ ID NO: 231187 - RNA, 19 nt, Artificial Sequence
  Description of Artificial Sequence: Synthetic oligonucleotide
uagcgcagagguuaucaau

SEQ ID NO: 231188 - RNA, 19 nt, Artificial Sequence
  Description of Artificial Sequence: Synthetic oligonucleotide
caccuuugcauacuuggca

SEQ ID NO: 231189 - RNA, 19 nt, Artificial Sequence
  Description of Artificial Sequence: Synthetic oligonucleotide
gccaguaucguacuuguaa

SEQ ID NO: 231190 - RNA, 19 nt, Artificial Sequence
  Description of Artificial Sequence: Synthetic oligonucleotide
gacccgaaacagcugggca

SEQ ID NO: 231191 - RNA, 19 nt, Artificial Sequence
  Description of Artificial Sequence: Synthetic oligonucleotide
uuuuguggccguagccuua

SEQ ID NO: 231192 - RNA, 19 nt, Artificial Sequence
  Description of Artificial Sequence: Synthetic oligonucleotide
cauccuccgguguguauac

SEQ ID NO: 231193 - RNA, 19 nt, Artificial Sequence
  Description of Artificial Sequence: Synthetic oligonucleotide
guuguaccgucacaucaga

SEQ ID NO: 231194 - RNA, 19 nt, Artificial Sequence
  Description of Artificial Sequence: Synthetic oligonucleotide
aucgccacuccucccuuug

SEQ ID NO: 231195 - RNA, 19 nt, Artificial Sequence
  Description of Artificial Sequence: Synthetic oligonucleotide
gccuacaaaaucccacuug

SEQ ID NO: 231196 - RNA, 19 nt, Artificial Sequence
  Description of Artificial Sequence: Synthetic oligonucleotide
auugugucucgcagcgaac

SEQ ID NO: 231197 - RNA, 19 nt, Artificial Sequence
  Description of Artificial Sequence: Synthetic oligonucleotide
accucgaucgccacuccuc

SEQ ID NO: 231198 - RNA, 19 nt, Artificial Sequence
  Description of Artificial Sequence: Synthetic oligonucleotide
auaugagagggaaugcauu

SEQ ID NO: 231199 - RNA, 19 nt, Artificial Sequence
  Description of Artificial Sequence: Synthetic oligonucleotide
auauacuagcuagaauauu

SEQ ID NO: 231200 - RNA, 19 nt, Artificial Sequence
  Description of Artificial Sequence: Synthetic oligonucleotide
gaauggcuaaaacuuguuu

SEQ ID NO: 231201 - RNA, 19 nt, Artificial Sequence
  Description of Artificial Sequence: Synthetic oligonucleotide
guguguauacaggaagaga

SEQ ID NO: 231202 - RNA, 19 nt, Artificial Sequence
  Description of Artificial Sequence: Synthetic oligonucleotide
uguguccaguuguaccguc

SEQ ID NO: 231203 - RNA, 19 nt, Artificial Sequence
  Description of Artificial Sequence: Synthetic oligonucleotide
cagcgaacccuggacaggc

SEQ ID NO: 231204 - RNA, 19 nt, Artificial Sequence
  Description of Artificial Sequence: Synthetic oligonucleotide
cuccgguguguauacagga

SEQ ID NO: 231205 - RNA, 19 nt, Artificial Sequence
  Description of Artificial Sequence: Synthetic oligonucleotide
uggguuuggcagucagcca

SEQ ID NO: 231206 - RNA, 19 nt, Artificial Sequence
  Description of Artificial Sequence: Synthetic oligonucleotide
uccucccuuuguuuaccca

SEQ ID NO: 231207 - RNA, 19 nt, Artificial Sequence
  Description of Artificial Sequence: Synthetic oligonucleotide
augaaucgugaaggacucg

SEQ ID NO: 231208 - RNA, 19 nt, Artificial Sequence
  Description of Artificial Sequence: Synthetic oligonucleotide
auuacacauaugagaggga

SEQ ID NO: 231209 - RNA, 19 nt, Artificial Sequence
  Description of Artificial Sequence: Synthetic oligonucleotide
gcauuauauacaguuggga

SEQ ID NO: 231210 - RNA, 19 nt, Artificial Sequence
  Description of Artificial Sequence: Synthetic oligonucleotide
cauaugagagggaaugcau

SEQ ID NO: 231211 - RNA, 19 nt, Artificial Sequence
  Description of Artificial Sequence: Synthetic oligonucleotide
agguuaaguuggaauacaa

SEQ ID NO: 231212 - RNA, 19 nt, Artificial Sequence
  Description of Artificial Sequence: Synthetic oligonucleotide
uccuggugugugaaccaaa

SEQ ID NO: 231213 - RNA, 19 nt, Artificial Sequence
  Description of Artificial Sequence: Synthetic oligonucleotide
ugucaagcuuuuggcgacc

SEQ ID NO: 231214 - RNA, 19 nt, Artificial Sequence
  Description of Artificial Sequence: Synthetic oligonucleotide
caaggaguguagagcucac

SEQ ID NO: 231215 - RNA, 19 nt, Artificial Sequence
  Description of Artificial Sequence: Synthetic oligonucleotide
guggccguagccuuauuua

SEQ ID NO: 231216 - RNA, 19 nt, Artificial Sequence
  Description of Artificial Sequence: Synthetic oligonucleotide
ggaaugguugcuagcgcag

SEQ ID NO: 231217 - RNA, 19 nt, Artificial Sequence
  Description of Artificial Sequence: Synthetic oligonucleotide
ccagggaucggacaauuuc

SEQ ID NO: 231218 - RNA, 19 nt, Artificial Sequence
  Description of Artificial Sequence: Synthetic oligonucleotide
caguaagcugccaaauaua

SEQ ID NO: 231219 - RNA, 19 nt, Artificial Sequence
  Description of Artificial Sequence: Synthetic oligonucleotide
auuccguccucaggccugg

SEQ ID NO: 231220 - RNA, 19 nt, Artificial Sequence
  Description of Artificial Sequence: Synthetic oligonucleotide
uuuguggccguagccuuau

SEQ ID NO: 231221 - RNA, 19 nt, Artificial Sequence
  Description of Artificial Sequence: Synthetic oligonucleotide
agcucaacccuccgugaaa

SEQ ID NO: 231222 - RNA, 19 nt, Artificial Sequence
  Description of Artificial Sequence: Synthetic oligonucleotide
uauauacaguugggaggac

SEQ ID NO: 231223 - RNA, 19 nt, Artificial Sequence
  Description of Artificial Sequence: Synthetic oligonucleotide
agggaucggacaauuuccu

SEQ ID NO: 231224 - RNA, 19 nt, Artificial Sequence
  Description of Artificial Sequence: Synthetic oligonucleotide
ggcaauguauaguuacuua

SEQ ID NO: 231225 - RNA, 19 nt, Artificial Sequence
  Description of Artificial Sequence: Synthetic oligonucleotide
  modified_base (8)..(8): a, c, u, g, unknown or other
gaugcucnguugugcagcu

SEQ ID NO: 231226 - RNA, 19 nt, Artificial Sequence
  Description of Artificial Sequence: Synthetic oligonucleotide
gaaccucgaucgccacucc

SEQ ID NO: 231227 - RNA, 19 nt, Artificial Sequence
  Description of Artificial Sequence: Synthetic oligonucleotide
gagcacgacacuucucacu

SEQ ID NO: 231228 - RNA, 19 nt, Artificial Sequence
  Description of Artificial Sequence: Synthetic oligonucleotide
guaucccagucgucagagc

SEQ ID NO: 231229 - RNA, 19 nt, Artificial Sequence
  Description of Artificial Sequence: Synthetic oligonucleotide
ccaguauauacauguccuc

SEQ ID NO: 231230 - RNA, 19 nt, Artificial Sequence
  Description of Artificial Sequence: Synthetic oligonucleotide
caguuaguccaaauaucua

SEQ ID NO: 231231 - RNA, 19 nt, Artificial Sequence
  Description of Artificial Sequence: Synthetic oligonucleotide
auacgucgucuccugugau

SEQ ID NO: 231232 - RNA, 19 nt, Artificial Sequence
  Description of Artificial Sequence: Synthetic oligonucleotide
guguaauugccagaacacu

SEQ ID NO: 231233 - RNA, 19 nt, Artificial Sequence
  Description of Artificial Sequence: Synthetic oligonucleotide
ggaacguggggagaguaga

SEQ ID NO: 231234 - RNA, 19 nt, Artificial Sequence
  Description of Artificial Sequence: Synthetic oligonucleotide
uccaacccagccggaugag

SEQ ID NO: 231235 - RNA, 19 nt, Artificial Sequence
  Description of Artificial Sequence: Synthetic oligonucleotide
cuagcgcagagguuaucaa

SEQ ID NO: 231236 - RNA, 19 nt, Artificial Sequence
  Description of Artificial Sequence: Synthetic oligonucleotide
gcuagcgcagagguuauca

SEQ ID NO: 231237 - RNA, 19 nt, Artificial Sequence
  Description of Artificial Sequence: Synthetic oligonucleotide
gccguagccuuauuuacaa

SEQ ID NO: 231238 - RNA, 19 nt, Artificial Sequence
  Description of Artificial Sequence: Synthetic oligonucleotide
ccaguaucguacuuguaaa

SEQ ID NO: 231239 - RNA, 19 nt, Artificial Sequence
  Description of Artificial Sequence: Synthetic oligonucleotide
gccaaauauacuagcuaga

SEQ ID NO: 231240 - RNA, 19 nt, Artificial Sequence
  Description of Artificial Sequence: Synthetic oligonucleotide
ucgccacuccucccuuugu

SEQ ID NO: 231241 - RNA, 19 nt, Artificial Sequence
  Description of Artificial Sequence: Synthetic oligonucleotide
guaaggcaauguauaguua

SEQ ID NO: 231242 - RNA, 19 nt, Artificial Sequence
  Description of Artificial Sequence: Synthetic oligonucleotide
uacucagaucgagcuccug

SEQ ID NO: 231243 - RNA, 19 nt, Artificial Sequence
  Description of Artificial Sequence: Synthetic oligonucleotide
ccucgaucgccacuccucc

SEQ ID NO: 231244 - RNA, 19 nt, Artificial Sequence
  Description of Artificial Sequence: Synthetic oligonucleotide
guuuuguggccguagccuu

SEQ ID NO: 231245 - RNA, 19 nt, Artificial Sequence
  Description of Artificial Sequence: Synthetic oligonucleotide
cccuacacaguacacaucu

SEQ ID NO: 231246 - RNA, 19 nt, Artificial Sequence
  Description of Artificial Sequence: Synthetic oligonucleotide
gguccagagauacgucguc

SEQ ID NO: 231247 - RNA, 19 nt, Artificial Sequence
  Description of Artificial Sequence: Synthetic oligonucleotide
cccuuuguuuacccacucc

SEQ ID NO: 231248 - RNA, 19 nt, Artificial Sequence
  Description of Artificial Sequence: Synthetic oligonucleotide
ccaaagguuaaguuggaau

SEQ ID NO: 231249 - RNA, 19 nt, Artificial Sequence
  Description of Artificial Sequence: Synthetic oligonucleotide
ggguuucggagcaguaagc

SEQ ID NO: 231250 - RNA, 19 nt, Artificial Sequence
  Description of Artificial Sequence: Synthetic oligonucleotide
agucccuuauaugcucaaa

SEQ ID NO: 231251 - RNA, 19 nt, Artificial Sequence
  Description of Artificial Sequence: Synthetic oligonucleotide
  modified_base (13)..(13): a, c, u, g, unknown or other
acgcagaugcucnguugug

SEQ ID NO: 231252 - RNA, 19 nt, Artificial Sequence
  Description of Artificial Sequence: Synthetic oligonucleotide
ggaacccuacacaguacac

SEQ ID NO: 231253 - RNA, 19 nt, Artificial Sequence
  Description of Artificial Sequence: Synthetic oligonucleotide
gaaucgugaaggacucggu

SEQ ID NO: 231254 - RNA, 19 nt, Artificial Sequence
  Description of Artificial Sequence: Synthetic oligonucleotide
ggcuucggcuacggaaugg

SEQ ID NO: 231255 - RNA, 19 nt, Artificial Sequence
  Description of Artificial Sequence: Synthetic oligonucleotide
caggagcacgacacuucuc

SEQ ID NO: 231256 - RNA, 19 nt, Artificial Sequence
  Description of Artificial Sequence: Synthetic oligonucleotide
guuugacguacaacagcaa

SEQ ID NO: 231257 - RNA, 19 nt, Artificial Sequence
  Description of Artificial Sequence: Synthetic oligonucleotide
gucaagcuuuuggcgacca

SEQ ID NO: 231258 - RNA, 19 nt, Artificial Sequence
  Description of Artificial Sequence: Synthetic oligonucleotide
ccaaggaguguagagcuca

SEQ ID NO: 231259 - RNA, 19 nt, Artificial Sequence
  Description of Artificial Sequence: Synthetic oligonucleotide
gagauacgucgucuccugu

SEQ ID NO: 231260 - RNA, 19 nt, Artificial Sequence
  Description of Artificial Sequence: Synthetic oligonucleotide
caacccucaccccgauguc

SEQ ID NO: 231261 - RNA, 19 nt, Artificial Sequence
  Description of Artificial Sequence: Synthetic oligonucleotide
acaccgagcugacgggcuu

SEQ ID NO: 231262 - RNA, 19 nt, Artificial Sequence
  Description of Artificial Sequence: Synthetic oligonucleotide
gguaagcucaacccuccgu

SEQ ID NO: 231263 - RNA, 19 nt, Artificial Sequence
  Description of Artificial Sequence: Synthetic oligonucleotide
gguuucggagcaguaagcu

SEQ ID NO: 231264 - RNA, 19 nt, Artificial Sequence
  Description of Artificial Sequence: Synthetic oligonucleotide
  modified_base (7)..(7): a, c, u, g, unknown or other
augcucnguugugcagcug

SEQ ID NO: 231265 - RNA, 19 nt, Artificial Sequence
  Description of Artificial Sequence: Synthetic oligonucleotide
uggcacuaucugguccaga

SEQ ID NO: 231266 - RNA, 19 nt, Artificial Sequence
  Description of Artificial Sequence: Synthetic oligonucleotide
  modified_base (4)..(4): a, c, u, g, unknown or other
cucnguugugcagcuggaa

SEQ ID NO: 231267 - RNA, 19 nt, Artificial Sequence
  Description of Artificial Sequence: Synthetic oligonucleotide
acgugagaaucuggcagua

SEQ ID NO: 231268 - RNA, 19 nt, Artificial Sequence
  Description of Artificial Sequence: Synthetic oligonucleotide
gucucgcagcgaacccugg

SEQ ID NO: 231269 - RNA, 19 nt, Artificial Sequence
  Description of Artificial Sequence: Synthetic oligonucleotide
gcgaacccuggacaggcuc

SEQ ID NO: 231270 - RNA, 19 nt, Artificial Sequence
  Description of Artificial Sequence: Synthetic oligonucleotide
acccucaccccgaugucaa

SEQ ID NO: 231271 - RNA, 19 nt, Artificial Sequence
  Description of Artificial Sequence: Synthetic oligonucleotide
ggccguagccuuauuuaca

SEQ ID NO: 231272 - RNA, 19 nt, Artificial Sequence
  Description of Artificial Sequence: Synthetic oligonucleotide
cggaaugguugcuagcgca

SEQ ID NO: 231273 - RNA, 19 nt, Artificial Sequence
  Description of Artificial Sequence: Synthetic oligonucleotide
gcucaacccuccgugaaaa

SEQ ID NO: 231274 - RNA, 19 nt, Artificial Sequence
  Description of Artificial Sequence: Synthetic oligonucleotide
caccgagcugacgggcuug

SEQ ID NO: 231275 - RNA, 19 nt, Artificial Sequence
  Description of Artificial Sequence: Synthetic oligonucleotide
ugcuagcgcagagguuauc

SEQ ID NO: 231276 - RNA, 19 nt, Artificial Sequence
  Description of Artificial Sequence: Synthetic oligonucleotide
auguucagucagggauaca

SEQ ID NO: 231277 - RNA, 19 nt, Artificial Sequence
  Description of Artificial Sequence: Synthetic oligonucleotide
gugucucgcagcgaacccu

SEQ ID NO: 231278 - RNA, 19 nt, Artificial Sequence
  Description of Artificial Sequence: Synthetic oligonucleotide
acgacacuucucacuggua

SEQ ID NO: 231279 - RNA, 19 nt, Artificial Sequence
  Description of Artificial Sequence: Synthetic oligonucleotide
auccuccgguguguauaca

SEQ ID NO: 231280 - RNA, 19 nt, Artificial Sequence
  Description of Artificial Sequence: Synthetic oligonucleotide
gucuccugugauggccauc

SEQ ID NO: 231281 - RNA, 19 nt, Artificial Sequence
  Description of Artificial Sequence: Synthetic oligonucleotide
agcgaacccuggacaggcu

SEQ ID NO: 231282 - RNA, 19 nt, Artificial Sequence
  Description of Artificial Sequence: Synthetic oligonucleotide
ggacuacagaggaauuggu

SEQ ID NO: 231283 - RNA, 19 nt, Artificial Sequence
  Description of Artificial Sequence: Synthetic oligonucleotide
  modified_base (5)..(5): a, c, u, g, unknown or other
gcucnguugugcagcugga

SEQ ID NO: 231284 - RNA, 19 nt, Artificial Sequence
  Description of Artificial Sequence: Synthetic oligonucleotide
gaggaacauccuggugugu

SEQ ID NO: 231285 - RNA, 19 nt, Artificial Sequence
  Description of Artificial Sequence: Synthetic oligonucleotide
cuuggccauuaugaaucgu

SEQ ID NO: 231286 - RNA, 19 nt, Artificial Sequence
  Description of Artificial Sequence: Synthetic oligonucleotide
ggcuacggaaugguugcua

SEQ ID NO: 231287 - RNA, 19 nt, Artificial Sequence
  Description of Artificial Sequence: Synthetic oligonucleotide
gccccaguauauacauguc

SEQ ID NO: 231288 - RNA, 19 nt, Artificial Sequence
  Description of Artificial Sequence: Synthetic oligonucleotide
ccucgagugucuuccgaua

SEQ ID NO: 231289 - RNA, 19 nt, Artificial Sequence
  Description of Artificial Sequence: Synthetic oligonucleotide
ccauccuccgguguguaua

SEQ ID NO: 231290 - RNA, 19 nt, Artificial Sequence
  Description of Artificial Sequence: Synthetic oligonucleotide
cgucgucuccugugauggc

SEQ ID NO: 231291 - RNA, 19 nt, Artificial Sequence
  Description of Artificial Sequence: Synthetic oligonucleotide
cgucagagccaguaucgua

SEQ ID NO: 231292 - RNA, 19 nt, Artificial Sequence
  Description of Artificial Sequence: Synthetic oligonucleotide
ccuccgugaaaacgcagau

SEQ ID NO: 231293 - RNA, 19 nt, Artificial Sequence
  Description of Artificial Sequence: Synthetic oligonucleotide
caguuaugguaggcacugu

SEQ ID NO: 231294 - RNA, 19 nt, Artificial Sequence
  Description of Artificial Sequence: Synthetic oligonucleotide
cagagccaguaucguacuu

SEQ ID NO: 231295 - RNA, 19 nt, Artificial Sequence
  Description of Artificial Sequence: Synthetic oligonucleotide
gggauacagggaacucacu

SEQ ID NO: 231296 - RNA, 19 nt, Artificial Sequence
  Description of Artificial Sequence: Synthetic oligonucleotide
gggacacuucuuccagcau

SEQ ID NO: 231297 - RNA, 19 nt, Artificial Sequence
  Description of Artificial Sequence: Synthetic oligonucleotide
ccguagccuuauuuacaaa

SEQ ID NO: 231298 - RNA, 19 nt, Artificial Sequence
  Description of Artificial Sequence: Synthetic oligonucleotide
gguugcuagcgcagagguu

SEQ ID NO: 231299 - RNA, 19 nt, Artificial Sequence
  Description of Artificial Sequence: Synthetic oligonucleotide
gccauccuccgguguguau

SEQ ID NO: 231300 - RNA, 19 nt, Artificial Sequence
  Description of Artificial Sequence: Synthetic oligonucleotide
cgaucgccacuccucccuu

SEQ ID NO: 231301 - RNA, 19 nt, Artificial Sequence
  Description of Artificial Sequence: Synthetic oligonucleotide
cggcuacggaaugguugcu

SEQ ID NO: 231302 - RNA, 19 nt, Artificial Sequence
  Description of Artificial Sequence: Synthetic oligonucleotide
uuaauauccauucaguugc

SEQ ID NO: 231303 - RNA, 19 nt, Artificial Sequence
  Description of Artificial Sequence: Synthetic oligonucleotide
ugcuauuccauuuagaccc

SEQ ID NO: 231304 - RNA, 19 nt, Artificial Sequence
  Description of Artificial Sequence: Synthetic oligonucleotide
ucagauaaaauguaauccg

SEQ ID NO: 231305 - RNA, 19 nt, Artificial Sequence
  Description of Artificial Sequence: Synthetic oligonucleotide
ugcauaaacaaacauucgg

SEQ ID NO: 231306 - RNA, 19 nt, Artificial Sequence
  Description of Artificial Sequence: Synthetic oligonucleotide
agaaauaagaagaaaaguc

SEQ ID NO: 231307 - RNA, 19 nt, Artificial Sequence
  Description of Artificial Sequence: Synthetic oligonucleotide
uguaagacaaugcuuauac

SEQ ID NO: 231308 - RNA, 19 nt, Artificial Sequence
  Description of Artificial Sequence: Synthetic oligonucleotide
uauugcaaugauauaaugc

SEQ ID NO: 231309 - RNA, 19 nt, Artificial Sequence
  Description of Artificial Sequence: Synthetic oligonucleotide
uaagacaaugcuuauaccu

SEQ ID NO: 231310 - RNA, 19 nt, Artificial Sequence
  Description of Artificial Sequence: Synthetic oligonucleotide
agugcauaaacaaacauuc

SEQ ID NO: 231311 - RNA, 19 nt, Artificial Sequence
  Description of Artificial Sequence: Synthetic oligonucleotide
uguccuuacaagcuguacg

SEQ ID NO: 231312 - RNA, 19 nt, Artificial Sequence
  Description of Artificial Sequence: Synthetic oligonucleotide
acuauuuugccuugaaguc

SEQ ID NO: 231313 - RNA, 19 nt, Artificial Sequence
  Description of Artificial Sequence: Synthetic oligonucleotide
gauggcucgauauauagac

SEQ ID NO: 231314 - RNA, 19 nt, Artificial Sequence
  Description of Artificial Sequence: Synthetic oligonucleotide
aaagucuauaguuugggaa

SEQ ID NO: 231315 - RNA, 19 nt, Artificial Sequence
  Description of Artificial Sequence: Synthetic oligonucleotide
uguuguaagacaaugcuua

SEQ ID NO: 231316 - RNA, 19 nt, Artificial Sequence
  Description of Artificial Sequence: Synthetic oligonucleotide
cuucuuuugacgaaccacg

SEQ ID NO: 231317 - RNA, 19 nt, Artificial Sequence
  Description of Artificial Sequence: Synthetic oligonucleotide
ucuacuauucaaguaacag

SEQ ID NO: 231318 - RNA, 19 nt, Artificial Sequence
  Description of Artificial Sequence: Synthetic oligonucleotide
ugcauaauuuuccuagucc

SEQ ID NO: 231319 - RNA, 19 nt, Artificial Sequence
  Description of Artificial Sequence: Synthetic oligonucleotide
aguaauagaaaacuacuau

SEQ ID NO: 231320 - RNA, 19 nt, Artificial Sequence
  Description of Artificial Sequence: Synthetic oligonucleotide
aaugcuuauaccucaacuu

SEQ ID NO: 231321 - RNA, 19 nt, Artificial Sequence
  Description of Artificial Sequence: Synthetic oligonucleotide
gguuaugucacuuccauag

SEQ ID NO: 231322 - RNA, 19 nt, Artificial Sequence
  Description of Artificial Sequence: Synthetic oligonucleotide
auauaucgauuuaacaucc

SEQ ID NO: 231323 - RNA, 19 nt, Artificial Sequence
  Description of Artificial Sequence: Synthetic oligonucleotide
uauugcuuaauauuucaga

SEQ ID NO: 231324 - RNA, 19 nt, Artificial Sequence
  Description of Artificial Sequence: Synthetic oligonucleotide
aacaccacuacacguaucu

SEQ ID NO: 231325 - RNA, 19 nt, Artificial Sequence
  Description of Artificial Sequence: Synthetic oligonucleotide
uguacauuuaguagccuug

SEQ ID NO: 231326 - RNA, 19 nt, Artificial Sequence
  Description of Artificial Sequence: Synthetic oligonucleotide
aaauucaagugcaaaagca

SEQ ID NO: 231327 - RNA, 19 nt, Artificial Sequence
  Description of Artificial Sequence: Synthetic oligonucleotide
ucuagucaaauugugaaca

SEQ ID NO: 231328 - RNA, 19 nt, Artificial Sequence
  Description of Artificial Sequence: Synthetic oligonucleotide
acguaucuaauuuacaaga

SEQ ID NO: 231329 - RNA, 19 nt, Artificial Sequence
  Description of Artificial Sequence: Synthetic oligonucleotide
uacaagaauucauuccuag

SEQ ID NO: 231330 - RNA, 19 nt, Artificial Sequence
  Description of Artificial Sequence: Synthetic oligonucleotide
uuuagacccaaucuuucug

SEQ ID NO: 231331 - RNA, 19 nt, Artificial Sequence
  Description of Artificial Sequence: Synthetic oligonucleotide
aagacaaugcuuauaccuc

SEQ ID NO: 231332 - RNA, 19 nt, Artificial Sequence
  Description of Artificial Sequence: Synthetic oligonucleotide
uuuccaacccguuacuugc

SEQ ID NO: 231333 - RNA, 19 nt, Artificial Sequence
  Description of Artificial Sequence: Synthetic oligonucleotide
uuuagacauacagucagag

SEQ ID NO: 231334 - RNA, 19 nt, Artificial Sequence
  Description of Artificial Sequence: Synthetic oligonucleotide
auuuacaagaaccguauaa

SEQ ID NO: 231335 - RNA, 19 nt, Artificial Sequence
  Description of Artificial Sequence: Synthetic oligonucleotide
gauauugcuuaauauuuca

SEQ ID NO: 231336 - RNA, 19 nt, Artificial Sequence
  Description of Artificial Sequence: Synthetic oligonucleotide
auuuaguagccuuggcugg

SEQ ID NO: 231337 - RNA, 19 nt, Artificial Sequence
  Description of Artificial Sequence: Synthetic oligonucleotide
cacaguuuaaaugugcuag

SEQ ID NO: 231338 - RNA, 19 nt, Artificial Sequence
  Description of Artificial Sequence: Synthetic oligonucleotide
uacacuaugaaggugucca

SEQ ID NO: 231339 - RNA, 19 nt, Artificial Sequence
  Description of Artificial Sequence: Synthetic oligonucleotide
uccgauauacuguagucca

SEQ ID NO: 231340 - RNA, 19 nt, Artificial Sequence
  Description of Artificial Sequence: Synthetic oligonucleotide
uuauaccucaacuuaucca

SEQ ID NO: 231341 - RNA, 19 nt, Artificial Sequence
  Description of Artificial Sequence: Synthetic oligonucleotide
acugguauuauaaauagaa

SEQ ID NO: 231342 - RNA, 19 nt, Artificial Sequence
  Description of Artificial Sequence: Synthetic oligonucleotide
ugagguacauucuucauua

SEQ ID NO: 231343 - RNA, 19 nt, Artificial Sequence
  Description of Artificial Sequence: Synthetic oligonucleotide
ucggaaacaccacuacacg

SEQ ID NO: 231344 - RNA, 19 nt, Artificial Sequence
  Description of Artificial Sequence: Synthetic oligonucleotide
aaagcccgccuucugaaag

SEQ ID NO: 231345 - RNA, 19 nt, Artificial Sequence
  Description of Artificial Sequence: Synthetic oligonucleotide
acuguagucgacaugaucu

SEQ ID NO: 231346 - RNA, 19 nt, Artificial Sequence
  Description of Artificial Sequence: Synthetic oligonucleotide
ugguccgagagaaauaaga

SEQ ID NO: 231347 - RNA, 19 nt, Artificial Sequence
  Description of Artificial Sequence: Synthetic oligonucleotide
uauauagacuuccaauaau

SEQ ID NO: 231348 - RNA, 19 nt, Artificial Sequence
  Description of Artificial Sequence: Synthetic oligonucleotide
aacauucggaaacaccacu

SEQ ID NO: 231349 - RNA, 19 nt, Artificial Sequence
  Description of Artificial Sequence: Synthetic oligonucleotide
uuuuguauuccgcuggaau

SEQ ID NO: 231350 - RNA, 19 nt, Artificial Sequence
  Description of Artificial Sequence: Synthetic oligonucleotide
guccuuacaagcuguacgg

SEQ ID NO: 231351 - RNA, 19 nt, Artificial Sequence
  Description of Artificial Sequence: Synthetic oligonucleotide
ugugcuagaugcauaauuu

SEQ ID NO: 231352 - RNA, 19 nt, Artificial Sequence
  Description of Artificial Sequence: Synthetic oligonucleotide
aaguacacuaaaacacuac

SEQ ID NO: 231353 - RNA, 19 nt, Artificial Sequence
  Description of Artificial Sequence: Synthetic oligonucleotide
uuuaugugguguguuacag

SEQ ID NO: 231354 - RNA, 19 nt, Artificial Sequence
  Description of Artificial Sequence: Synthetic oligonucleotide
uauaucgauuuaacauccg

SEQ ID NO: 231355 - RNA, 19 nt, Artificial Sequence
  Description of Artificial Sequence: Synthetic oligonucleotide
cuagcuaugaaucuuaacu

SEQ ID NO: 231356 - RNA, 19 nt, Artificial Sequence
  Description of Artificial Sequence: Synthetic oligonucleotide
aaccaagugaaaacuuuac

SEQ ID NO: 231357 - RNA, 19 nt, Artificial Sequence
  Description of Artificial Sequence: Synthetic oligonucleotide
ucgauuuaacauccgauau

SEQ ID NO: 231358 - RNA, 19 nt, Artificial Sequence
  Description of Artificial Sequence: Synthetic oligonucleotide
cuuauaccucaacuuaucc

SEQ ID NO: 231359 - RNA, 19 nt, Artificial Sequence
  Description of Artificial Sequence: Synthetic oligonucleotide
cuuuugacgaaccacguca

SEQ ID NO: 231360 - RNA, 19 nt, Artificial Sequence
  Description of Artificial Sequence: Synthetic oligonucleotide
auccgauauacuguagucc

SEQ ID NO: 231361 - RNA, 19 nt, Artificial Sequence
  Description of Artificial Sequence: Synthetic oligonucleotide
uacugauaugccauucuug

SEQ ID NO: 231362 - RNA, 19 nt, Artificial Sequence
  Description of Artificial Sequence: Synthetic oligonucleotide
auagacuuccaauaauuau

SEQ ID NO: 231363 - RNA, 19 nt, Artificial Sequence
  Description of Artificial Sequence: Synthetic oligonucleotide
uaucuacuauucaaguaac

SEQ ID NO: 231364 - RNA, 19 nt, Artificial Sequence
  Description of Artificial Sequence: Synthetic oligonucleotide
uaucgauuuaacauccgau

SEQ ID NO: 231365 - RNA, 19 nt, Artificial Sequence
  Description of Artificial Sequence: Synthetic oligonucleotide
acacguaucuaauuuacaa

SEQ ID NO: 231366 - RNA, 19 nt, Artificial Sequence
  Description of Artificial Sequence: Synthetic oligonucleotide
uccaucuagucaaauugug

SEQ ID NO: 231367 - RNA, 19 nt, Artificial Sequence
  Description of Artificial Sequence: Synthetic oligonucleotide
acuaugaagguguccaaca

SEQ ID NO: 231368 - RNA, 19 nt, Artificial Sequence
  Description of Artificial Sequence: Synthetic oligonucleotide
ucgacaugaucugauauug

SEQ ID NO: 231369 - RNA, 19 nt, Artificial Sequence
  Description of Artificial Sequence: Synthetic oligonucleotide
aaacauucggaaacaccac

SEQ ID NO: 231370 - RNA, 19 nt, Artificial Sequence
  Description of Artificial Sequence: Synthetic oligonucleotide
ugcacaguuuaaaugugcu

SEQ ID NO: 231371 - RNA, 19 nt, Artificial Sequence
  Description of Artificial Sequence: Synthetic oligonucleotide
auuaugacccuuccaccuc

SEQ ID NO: 231372 - RNA, 19 nt, Artificial Sequence
  Description of Artificial Sequence: Synthetic oligonucleotide
agauagucgguccauuaug

SEQ ID NO: 231373 - RNA, 19 nt, Artificial Sequence
  Description of Artificial Sequence: Synthetic oligonucleotide
aguguaaaugccacuaaag

SEQ ID NO: 231374 - RNA, 19 nt, Artificial Sequence
  Description of Artificial Sequence: Synthetic oligonucleotide
gacgaaccacgucagaagc

SEQ ID NO: 231375 - RNA, 19 nt, Artificial Sequence
  Description of Artificial Sequence: Synthetic oligonucleotide
acggcugaaaucccugcgc

SEQ ID NO: 231376 - RNA, 19 nt, Artificial Sequence
  Description of Artificial Sequence: Synthetic oligonucleotide
acaguaauagaaaacuacu

SEQ ID NO: 231377 - RNA, 19 nt, Artificial Sequence
  Description of Artificial Sequence: Synthetic oligonucleotide
aaagugaguuacuccauua

SEQ ID NO: 231378 - RNA, 19 nt, Artificial Sequence
  Description of Artificial Sequence: Synthetic oligonucleotide
uaguacacaaaguuggauu

SEQ ID NO: 231379 - RNA, 19 nt, Artificial Sequence
  Description of Artificial Sequence: Synthetic oligonucleotide
uguaaacauggcaaauaaa

SEQ ID NO: 231380 - RNA, 19 nt, Artificial Sequence
  Description of Artificial Sequence: Synthetic oligonucleotide
cugcuauuccauuuagacc

SEQ ID NO: 231381 - RNA, 19 nt, Artificial Sequence
  Description of Artificial Sequence: Synthetic oligonucleotide
uuagguuaugucacuucca

SEQ ID NO: 231382 - RNA, 19 nt, Artificial Sequence
  Description of Artificial Sequence: Synthetic oligonucleotide
ugcuuaaugucacucuuau

SEQ ID NO: 231383 - RNA, 19 nt, Artificial Sequence
  Description of Artificial Sequence: Synthetic oligonucleotide
ucgauauauagacuuccaa

SEQ ID NO: 231384 - RNA, 19 nt, Artificial Sequence
  Description of Artificial Sequence: Synthetic oligonucleotide
cucacugcgacuaggaaca

SEQ ID NO: 231385 - RNA, 19 nt, Artificial Sequence
  Description of Artificial Sequence: Synthetic oligonucleotide
aagugaguuacuccauuaa

SEQ ID NO: 231386 - RNA, 19 nt, Artificial Sequence
  Description of Artificial Sequence: Synthetic oligonucleotide
uacggcugaaaucccugcg

SEQ ID NO: 231387 - RNA, 19 nt, Artificial Sequence
  Description of Artificial Sequence: Synthetic oligonucleotide
auagucgguccauuaugac

SEQ ID NO: 231388 - RNA, 19 nt, Artificial Sequence
  Description of Artificial Sequence: Synthetic oligonucleotide
aucgauuuaacauccgaua

SEQ ID NO: 231389 - RNA, 19 nt, Artificial Sequence
  Description of Artificial Sequence: Synthetic oligonucleotide
agaguguugccuuuuguau

SEQ ID NO: 231390 - RNA, 19 nt, Artificial Sequence
  Description of Artificial Sequence: Synthetic oligonucleotide
uccuauacaucuucuugga

SEQ ID NO: 231391 - RNA, 19 nt, Artificial Sequence
  Description of Artificial Sequence: Synthetic oligonucleotide
ugguuuguaguaguguggc

SEQ ID NO: 231392 - RNA, 19 nt, Artificial Sequence
  Description of Artificial Sequence: Synthetic oligonucleotide
acauccgauauacuguagu

SEQ ID NO: 231393 - RNA, 19 nt, Artificial Sequence
  Description of Artificial Sequence: Synthetic oligonucleotide
aggaauuguucaugggaag

SEQ ID NO: 231394 - RNA, 19 nt, Artificial Sequence
  Description of Artificial Sequence: Synthetic oligonucleotide
ugcuuauaccucaacuuau

SEQ ID NO: 231395 - RNA, 19 nt, Artificial Sequence
  Description of Artificial Sequence: Synthetic oligonucleotide
guuacuccauuaaauuugc

SEQ ID NO: 231396 - RNA, 19 nt, Artificial Sequence
  Description of Artificial Sequence: Synthetic oligonucleotide
acaguuuaaaugugcuaga

SEQ ID NO: 231397 - RNA, 19 nt, Artificial Sequence
  Description of Artificial Sequence: Synthetic oligonucleotide
uuaugacccuuccaccucu

SEQ ID NO: 231398 - RNA, 19 nt, Artificial Sequence
  Description of Artificial Sequence: Synthetic oligonucleotide
uucuuuugacgaaccacgu

SEQ ID NO: 231399 - RNA, 19 nt, Artificial Sequence
  Description of Artificial Sequence: Synthetic oligonucleotide
uucgugcaaauccuauaca

SEQ ID NO: 231400 - RNA, 19 nt, Artificial Sequence
  Description of Artificial Sequence: Synthetic oligonucleotide
acauaccugguaaauaucu

SEQ ID NO: 231401 - RNA, 19 nt, Artificial Sequence
  Description of Artificial Sequence: Synthetic oligonucleotide
guaagacaaugcuuauacc

SEQ ID NO: 231402 - RNA, 19 nt, Artificial Sequence
  Description of Artificial Sequence: Synthetic oligonucleotide
auaccugguaaauaucuuu

SEQ ID NO: 231403 - RNA, 19 nt, Artificial Sequence
  Description of Artificial Sequence: Synthetic oligonucleotide
auauugcuuaauauuucag

SEQ ID NO: 231404 - RNA, 19 nt, Artificial Sequence
  Description of Artificial Sequence: Synthetic oligonucleotide
auucggaaacaccacuaca

SEQ ID NO: 231405 - RNA, 19 nt, Artificial Sequence
  Description of Artificial Sequence: Synthetic oligonucleotide
cugaacuagugcauaaaca

SEQ ID NO: 231406 - RNA, 19 nt, Artificial Sequence
  Description of Artificial Sequence: Synthetic oligonucleotide
uggccaacuguccuuacaa

SEQ ID NO: 231407 - RNA, 19 nt, Artificial Sequence
  Description of Artificial Sequence: Synthetic oligonucleotide
augcuuauaccucaacuua

SEQ ID NO: 231408 - RNA, 19 nt, Artificial Sequence
  Description of Artificial Sequence: Synthetic oligonucleotide
uaccugguaaauaucuuuu

SEQ ID NO: 231409 - RNA, 19 nt, Artificial Sequence
  Description of Artificial Sequence: Synthetic oligonucleotide
uagauagucgguccauuau

SEQ ID NO: 231410 - RNA, 19 nt, Artificial Sequence
  Description of Artificial Sequence: Synthetic oligonucleotide
gaucaagugguuuguagua

SEQ ID NO: 231411 - RNA, 19 nt, Artificial Sequence
  Description of Artificial Sequence: Synthetic oligonucleotide
acaagguuuacuggaagca

SEQ ID NO: 231412 - RNA, 19 nt, Artificial Sequence
  Description of Artificial Sequence: Synthetic oligonucleotide
ucuuuuaugugguguguua

SEQ ID NO: 231413 - RNA, 19 nt, Artificial Sequence
  Description of Artificial Sequence: Synthetic oligonucleotide
uuagaugguccugaaggcu

SEQ ID NO: 231414 - RNA, 19 nt, Artificial Sequence
  Description of Artificial Sequence: Synthetic oligonucleotide
gauagucgguccauuauga

SEQ ID NO: 231415 - RNA, 19 nt, Artificial Sequence
  Description of Artificial Sequence: Synthetic oligonucleotide
uuacaagaauucauuccua

SEQ ID NO: 231416 - RNA, 19 nt, Artificial Sequence
  Description of Artificial Sequence: Synthetic oligonucleotide
cauccgauauacuguaguc

SEQ ID NO: 231417 - RNA, 19 nt, Artificial Sequence
  Description of Artificial Sequence: Synthetic oligonucleotide
agucguauuugacagugua

SEQ ID NO: 231418 - RNA, 19 nt, Artificial Sequence
  Description of Artificial Sequence: Synthetic oligonucleotide
guaauagaaaacuacuauu

SEQ ID NO: 231419 - RNA, 19 nt, Artificial Sequence
  Description of Artificial Sequence: Synthetic oligonucleotide
gaaaucccugcgcuggaug

SEQ ID NO: 231420 - RNA, 19 nt, Artificial Sequence
  Description of Artificial Sequence: Synthetic oligonucleotide
uacauaccugguaaauauc

SEQ ID NO: 231421 - RNA, 19 nt, Artificial Sequence
  Description of Artificial Sequence: Synthetic oligonucleotide
gaagcauugguccgagaga

SEQ ID NO: 231422 - RNA, 19 nt, Artificial Sequence
  Description of Artificial Sequence: Synthetic oligonucleotide
auugguccgagagaaauaa

SEQ ID NO: 231423 - RNA, 19 nt, Artificial Sequence
  Description of Artificial Sequence: Synthetic oligonucleotide
acacguaugguuagcuugg

SEQ ID NO: 231424 - RNA, 19 nt, Artificial Sequence
  Description of Artificial Sequence: Synthetic oligonucleotide
agucgacaugaucugauau

SEQ ID NO: 231425 - RNA, 19 nt, Artificial Sequence
  Description of Artificial Sequence: Synthetic oligonucleotide
aagugguuuguaguagugu

SEQ ID NO: 231426 - RNA, 19 nt, Artificial Sequence
  Description of Artificial Sequence: Synthetic oligonucleotide
cauucggaaacaccacuac

SEQ ID NO: 231427 - RNA, 19 nt, Artificial Sequence
  Description of Artificial Sequence: Synthetic oligonucleotide
uaccucaacuuauccaggu

SEQ ID NO: 231428 - RNA, 19 nt, Artificial Sequence
  Description of Artificial Sequence: Synthetic oligonucleotide
gauaccucacugcgacuag

SEQ ID NO: 231429 - RNA, 19 nt, Artificial Sequence
  Description of Artificial Sequence: Synthetic oligonucleotide
uuaguacacaaaguuggau

SEQ ID NO: 231430 - RNA, 19 nt, Artificial Sequence
  Description of Artificial Sequence: Synthetic oligonucleotide
guaugguuagcuuggucca

SEQ ID NO: 231431 - RNA, 19 nt, Artificial Sequence
  Description of Artificial Sequence: Synthetic oligonucleotide
uuuuaaggcuguuggcgau

SEQ ID NO: 231432 - RNA, 19 nt, Artificial Sequence
  Description of Artificial Sequence: Synthetic oligonucleotide
uuccuagcuaugaaucuua

SEQ ID NO: 231433 - RNA, 19 nt, Artificial Sequence
  Description of Artificial Sequence: Synthetic oligonucleotide
uccguguauugauaugcac

SEQ ID NO: 231434 - RNA, 19 nt, Artificial Sequence
  Description of Artificial Sequence: Synthetic oligonucleotide
acuacuauuuugccuugaa

SEQ ID NO: 231435 - RNA, 19 nt, Artificial Sequence
  Description of Artificial Sequence: Synthetic oligonucleotide
aacugguauuauaaauaga

SEQ ID NO: 231436 - RNA, 19 nt, Artificial Sequence
  Description of Artificial Sequence: Synthetic oligonucleotide
ugaaguccguguauugaua

SEQ ID NO: 231437 - RNA, 19 nt, Artificial Sequence
  Description of Artificial Sequence: Synthetic oligonucleotide
uaccucacugcgacuagga

SEQ ID NO: 231438 - RNA, 19 nt, Artificial Sequence
  Description of Artificial Sequence: Synthetic oligonucleotide
caggaauuguucaugggaa

SEQ ID NO: 231439 - RNA, 19 nt, Artificial Sequence
  Description of Artificial Sequence: Synthetic oligonucleotide
uguuacugauaugccauuc

SEQ ID NO: 231440 - RNA, 19 nt, Artificial Sequence
  Description of Artificial Sequence: Synthetic oligonucleotide
gacaguguaaaugccacua

SEQ ID NO: 231441 - RNA, 19 nt, Artificial Sequence
  Description of Artificial Sequence: Synthetic oligonucleotide
gcauguaucgauccauccc

SEQ ID NO: 231442 - RNA, 19 nt, Artificial Sequence
  Description of Artificial Sequence: Synthetic oligonucleotide
uugguccgagagaaauaag

SEQ ID NO: 231443 - RNA, 19 nt, Artificial Sequence
  Description of Artificial Sequence: Synthetic oligonucleotide
uguagucgacaugaucuga

SEQ ID NO: 231444 - RNA, 19 nt, Artificial Sequence
  Description of Artificial Sequence: Synthetic oligonucleotide
cuguagucgacaugaucug

SEQ ID NO: 231445 - RNA, 19 nt, Artificial Sequence
  Description of Artificial Sequence: Synthetic oligonucleotide
caguaauagaaaacuacua

SEQ ID NO: 231446 - RNA, 19 nt, Artificial Sequence
  Description of Artificial Sequence: Synthetic oligonucleotide
acgaaccacgucagaagcc

SEQ ID NO: 231447 - RNA, 19 nt, Artificial Sequence
  Description of Artificial Sequence: Synthetic oligonucleotide
uucacacguaugguuagcu

SEQ ID NO: 231448 - RNA, 19 nt, Artificial Sequence
  Description of Artificial Sequence: Synthetic oligonucleotide
acguaugguuagcuugguc

SEQ ID NO: 231449 - RNA, 19 nt, Artificial Sequence
  Description of Artificial Sequence: Synthetic oligonucleotide
caacccguuacuugccuug

SEQ ID NO: 231450 - RNA, 19 nt, Artificial Sequence
  Description of Artificial Sequence: Synthetic oligonucleotide
ucaagugcaaaagcaugau

SEQ ID NO: 231451 - RNA, 19 nt, Artificial Sequence
  Description of Artificial Sequence: Synthetic oligonucleotide
cauguaucgauccaucccu

SEQ ID NO: 231452 - RNA, 19 nt, Artificial Sequence
  Description of Artificial Sequence: Synthetic oligonucleotide
uagacccaaucuuucuggu

SEQ ID NO: 231453 - RNA, 19 nt, Artificial Sequence
  Description of Artificial Sequence: Synthetic oligonucleotide
uguauuccgcuggaauaug

SEQ ID NO: 231454 - RNA, 19 nt, Artificial Sequence
  Description of Artificial Sequence: Synthetic oligonucleotide
uuccaacccguuacuugcc

SEQ ID NO: 231455 - RNA, 19 nt, Artificial Sequence
  Description of Artificial Sequence: Synthetic oligonucleotide
gaugcauaauuuuccuagu

SEQ ID NO: 231456 - RNA, 19 nt, Artificial Sequence
  Description of Artificial Sequence: Synthetic oligonucleotide
aacauccgauauacuguag

SEQ ID NO: 231457 - RNA, 19 nt, Artificial Sequence
  Description of Artificial Sequence: Synthetic oligonucleotide
auaccucaacuuauccagg

SEQ ID NO: 231458 - RNA, 19 nt, Artificial Sequence
  Description of Artificial Sequence: Synthetic oligonucleotide
cauuaugacccuuccaccu

SEQ ID NO: 231459 - RNA, 19 nt, Artificial Sequence
  Description of Artificial Sequence: Synthetic oligonucleotide
cucgauauauagacuucca

SEQ ID NO: 231460 - RNA, 19 nt, Artificial Sequence
  Description of Artificial Sequence: Synthetic oligonucleotide
acaacaccauucauguugu

SEQ ID NO: 231461 - RNA, 19 nt, Artificial Sequence
  Description of Artificial Sequence: Synthetic oligonucleotide
acuacacuaugaagguguc

SEQ ID NO: 231462 - RNA, 19 nt, Artificial Sequence
  Description of Artificial Sequence: Synthetic oligonucleotide
guuuacuggaagcauuggu

SEQ ID NO: 231463 - RNA, 19 nt, Artificial Sequence
  Description of Artificial Sequence: Synthetic oligonucleotide
uuccauagcuacuguuguc

SEQ ID NO: 231464 - RNA, 19 nt, Artificial Sequence
  Description of Artificial Sequence: Synthetic oligonucleotide
uccuagcuaugaaucuuaa

SEQ ID NO: 231465 - RNA, 19 nt, Artificial Sequence
  Description of Artificial Sequence: Synthetic oligonucleotide
uccaacccguuacuugccu

SEQ ID NO: 231466 - RNA, 19 nt, Artificial Sequence
  Description of Artificial Sequence: Synthetic oligonucleotide
ccaacucuaaauuuucaca

SEQ ID NO: 231467 - RNA, 19 nt, Artificial Sequence
  Description of Artificial Sequence: Synthetic oligonucleotide
uccuuacaagcuguacggc

SEQ ID NO: 231468 - RNA, 19 nt, Artificial Sequence
  Description of Artificial Sequence: Synthetic oligonucleotide
ucgauccaucccuuucccc

SEQ ID NO: 231469 - RNA, 19 nt, Artificial Sequence
  Description of Artificial Sequence: Synthetic oligonucleotide
cacuaugaagguguccaac

SEQ ID NO: 231470 - RNA, 19 nt, Artificial Sequence
  Description of Artificial Sequence: Synthetic oligonucleotide
caaugcuuauaccucaacu

SEQ ID NO: 231471 - RNA, 19 nt, Artificial Sequence
  Description of Artificial Sequence: Synthetic oligonucleotide
uccauuaaauuugcaugua

SEQ ID NO: 231472 - RNA, 19 nt, Artificial Sequence
  Description of Artificial Sequence: Synthetic oligonucleotide
guacggcugaaaucccugc

SEQ ID NO: 231473 - RNA, 19 nt, Artificial Sequence
  Description of Artificial Sequence: Synthetic oligonucleotide
augauacaaauaaacuauu

SEQ ID NO: 231474 - RNA, 19 nt, Artificial Sequence
  Description of Artificial Sequence: Synthetic oligonucleotide
guagauagucgguccauua

SEQ ID NO: 231475 - RNA, 19 nt, Artificial Sequence
  Description of Artificial Sequence: Synthetic oligonucleotide
gggacagucuauuuucaca

SEQ ID NO: 231476 - RNA, 19 nt, Artificial Sequence
  Description of Artificial Sequence: Synthetic oligonucleotide
caccacuacacguaucuaa

SEQ ID NO: 231477 - RNA, 19 nt, Artificial Sequence
  Description of Artificial Sequence: Synthetic oligonucleotide
cuacacuaugaaggugucc

SEQ ID NO: 231478 - RNA, 19 nt, Artificial Sequence
  Description of Artificial Sequence: Synthetic oligonucleotide
gcucgauauauagacuucc

SEQ ID NO: 231479 - RNA, 19 nt, Artificial Sequence
  Description of Artificial Sequence: Synthetic oligonucleotide
aaugugcuagaugcauaau

SEQ ID NO: 231480 - RNA, 19 nt, Artificial Sequence
  Description of Artificial Sequence: Synthetic oligonucleotide
ggcaggaauuguucauggg

SEQ ID NO: 231481 - RNA, 19 nt, Artificial Sequence
  Description of Artificial Sequence: Synthetic oligonucleotide
cugccaauucgccuucgug

SEQ ID NO: 231482 - RNA, 19 nt, Artificial Sequence
  Description of Artificial Sequence: Synthetic oligonucleotide
gauauacuguaguccauuu

SEQ ID NO: 231483 - RNA, 19 nt, Artificial Sequence
  Description of Artificial Sequence: Synthetic oligonucleotide
gacguuauugaggugcacu

SEQ ID NO: 231484 - RNA, 19 nt, Artificial Sequence
  Description of Artificial Sequence: Synthetic oligonucleotide
gcgacuaggaacaggagca

SEQ ID NO: 231485 - RNA, 19 nt, Artificial Sequence
  Description of Artificial Sequence: Synthetic oligonucleotide
accacuacacguaucuaau

SEQ ID NO: 231486 - RNA, 19 nt, Artificial Sequence
  Description of Artificial Sequence: Synthetic oligonucleotide
aucuacuauucaaguaaca

SEQ ID NO: 231487 - RNA, 19 nt, Artificial Sequence
  Description of Artificial Sequence: Synthetic oligonucleotide
uagucgacaugaucugaua

SEQ ID NO: 231488 - RNA, 19 nt, Artificial Sequence
  Description of Artificial Sequence: Synthetic oligonucleotide
caagaacaaguaacaggga

SEQ ID NO: 231489 - RNA, 19 nt, Artificial Sequence
  Description of Artificial Sequence: Synthetic oligonucleotide
ggaucaagugguuuguagu

SEQ ID NO: 231490 - RNA, 19 nt, Artificial Sequence
  Description of Artificial Sequence: Synthetic oligonucleotide
uggaacuguaaguguugua

SEQ ID NO: 231491 - RNA, 19 nt, Artificial Sequence
  Description of Artificial Sequence: Synthetic oligonucleotide
gcaaugucucaggaguggg

SEQ ID NO: 231492 - RNA, 19 nt, Artificial Sequence
  Description of Artificial Sequence: Synthetic oligonucleotide
gguuuacuggaagcauugg

SEQ ID NO: 231493 - RNA, 19 nt, Artificial Sequence
  Description of Artificial Sequence: Synthetic oligonucleotide
cugacguuauugaggugca

SEQ ID NO: 231494 - RNA, 19 nt, Artificial Sequence
  Description of Artificial Sequence: Synthetic oligonucleotide
acacuaugaagguguccaa

SEQ ID NO: 231495 - RNA, 19 nt, Artificial Sequence
  Description of Artificial Sequence: Synthetic oligonucleotide
gccgagucaaguguuuuag

SEQ ID NO: 231496 - RNA, 19 nt, Artificial Sequence
  Description of Artificial Sequence: Synthetic oligonucleotide
gaaaguugucugaacuagu

SEQ ID NO: 231497 - RNA, 19 nt, Artificial Sequence
  Description of Artificial Sequence: Synthetic oligonucleotide
aagucguauuugacagugu

SEQ ID NO: 231498 - RNA, 19 nt, Artificial Sequence
  Description of Artificial Sequence: Synthetic oligonucleotide
caagcuguacggcugaaau

SEQ ID NO: 231499 - RNA, 19 nt, Artificial Sequence
  Description of Artificial Sequence: Synthetic oligonucleotide
gccaauucgccuucgugca

SEQ ID NO: 231500 - RNA, 19 nt, Artificial Sequence
  Description of Artificial Sequence: Synthetic oligonucleotide
cccguuacuugccuuguag

SEQ ID NO: 231501 - RNA, 19 nt, Artificial Sequence
  Description of Artificial Sequence: Synthetic oligonucleotide
ucccugcgcuggaugauaa

SEQ ID NO: 231502 - RNA, 19 nt, Artificial Sequence
  Description of Artificial Sequence: Synthetic oligonucleotide
cugcgacuaggaacaggag

SEQ ID NO: 231503 - RNA, 19 nt, Artificial Sequence
  Description of Artificial Sequence: Synthetic oligonucleotide
ccaucuagucaaauuguga

SEQ ID NO: 231504 - RNA, 19 nt, Artificial Sequence
  Description of Artificial Sequence: Synthetic oligonucleotide
cacuacacguaucuaauuu

SEQ ID NO: 231505 - RNA, 19 nt, Artificial Sequence
  Description of Artificial Sequence: Synthetic oligonucleotide
cacugcgacuaggaacagg

SEQ ID NO: 231506 - RNA, 19 nt, Artificial Sequence
  Description of Artificial Sequence: Synthetic oligonucleotide
gguccgagagaaauaagaa

SEQ ID NO: 231507 - RNA, 19 nt, Artificial Sequence
  Description of Artificial Sequence: Synthetic oligonucleotide
guuguaagacaaugcuuau

SEQ ID NO: 231508 - RNA, 19 nt, Artificial Sequence
  Description of Artificial Sequence: Synthetic oligonucleotide
gccguugcauuugaacuag

SEQ ID NO: 231509 - RNA, 19 nt, Artificial Sequence
  Description of Artificial Sequence: Synthetic oligonucleotide
gaggacugcuugugcacaa

SEQ ID NO: 231510 - RNA, 19 nt, Artificial Sequence
  Description of Artificial Sequence: Synthetic oligonucleotide
auggcucgauauauagacu

SEQ ID NO: 231511 - RNA, 19 nt, Artificial Sequence
  Description of Artificial Sequence: Synthetic oligonucleotide
cauugguccgagagaaaua

SEQ ID NO: 231512 - RNA, 19 nt, Artificial Sequence
  Description of Artificial Sequence: Synthetic oligonucleotide
ugacguuauugaggugcac

SEQ ID NO: 231513 - RNA, 19 nt, Artificial Sequence
  Description of Artificial Sequence: Synthetic oligonucleotide
cauuggucaggcaggaauu

SEQ ID NO: 231514 - RNA, 19 nt, Artificial Sequence
  Description of Artificial Sequence: Synthetic oligonucleotide
ggauaccucacugcgacua

SEQ ID NO: 231515 - RNA, 19 nt, Artificial Sequence
  Description of Artificial Sequence: Synthetic oligonucleotide
gcacuggccgagucaagug

SEQ ID NO: 231516 - RNA, 19 nt, Artificial Sequence
  Description of Artificial Sequence: Synthetic oligonucleotide
guccguguauugauaugca

SEQ ID NO: 231517 - RNA, 19 nt, Artificial Sequence
  Description of Artificial Sequence: Synthetic oligonucleotide
ucacugcgacuaggaacag

SEQ ID NO: 231518 - RNA, 19 nt, Artificial Sequence
  Description of Artificial Sequence: Synthetic oligonucleotide
guagucgacaugaucugau

SEQ ID NO: 231519 - RNA, 19 nt, Artificial Sequence
  Description of Artificial Sequence: Synthetic oligonucleotide
ccuguuacugauaugccau

SEQ ID NO: 231520 - RNA, 19 nt, Artificial Sequence
  Description of Artificial Sequence: Synthetic oligonucleotide
cauaccugguaaauaucuu

SEQ ID NO: 231521 - RNA, 19 nt, Artificial Sequence
  Description of Artificial Sequence: Synthetic oligonucleotide
ccccuguuacugauaugcc

SEQ ID NO: 231522 - RNA, 19 nt, Artificial Sequence
  Description of Artificial Sequence: Synthetic oligonucleotide
gcugcggaggagcuaucac

SEQ ID NO: 231523 - RNA, 19 nt, Artificial Sequence
  Description of Artificial Sequence: Synthetic oligonucleotide
cccgccuucugaaagcaca

SEQ ID NO: 231524 - RNA, 19 nt, Artificial Sequence
  Description of Artificial Sequence: Synthetic oligonucleotide
caaagcccgccuucugaaa

SEQ ID NO: 231525 - RNA, 19 nt, Artificial Sequence
  Description of Artificial Sequence: Synthetic oligonucleotide
cuguacggcugaaaucccu

SEQ ID NO: 231526 - RNA, 19 nt, Artificial Sequence
  Description of Artificial Sequence: Synthetic oligonucleotide
gagguacauucuucauuau

SEQ ID NO: 231527 - RNA, 19 nt, Artificial Sequence
  Description of Artificial Sequence: Synthetic oligonucleotide
cauacagucagaggugcuu

SEQ ID NO: 231528 - RNA, 19 nt, Artificial Sequence
  Description of Artificial Sequence: Synthetic oligonucleotide
auguaucgauccaucccuu

SEQ ID NO: 231529 - RNA, 19 nt, Artificial Sequence
  Description of Artificial Sequence: Synthetic oligonucleotide
gcauugguccgagagaaau

SEQ ID NO: 231530 - RNA, 19 nt, Artificial Sequence
  Description of Artificial Sequence: Synthetic oligonucleotide
cuugguccaaagcccgccu

SEQ ID NO: 231531 - RNA, 19 nt, Artificial Sequence
  Description of Artificial Sequence: Synthetic oligonucleotide
acaccacuacacguaucua

SEQ ID NO: 231532 - RNA, 19 nt, Artificial Sequence
  Description of Artificial Sequence: Synthetic oligonucleotide
acccguuacuugccuugua

SEQ ID NO: 231533 - RNA, 19 nt, Artificial Sequence
  Description of Artificial Sequence: Synthetic oligonucleotide
cgauuuaacauccgauaua

SEQ ID NO: 231534 - RNA, 19 nt, Artificial Sequence
  Description of Artificial Sequence: Synthetic oligonucleotide
gguaccuguggaaauucau

SEQ ID NO: 231535 - RNA, 19 nt, Artificial Sequence
  Description of Artificial Sequence: Synthetic oligonucleotide
guguggccaacuguccuua

SEQ ID NO: 231536 - RNA, 19 nt, Artificial Sequence
  Description of Artificial Sequence: Synthetic oligonucleotide
agcauugguccgagagaaa

SEQ ID NO: 231537 - RNA, 19 nt, Artificial Sequence
  Description of Artificial Sequence: Synthetic oligonucleotide
cuguuacugauaugccauu

SEQ ID NO: 231538 - RNA, 19 nt, Artificial Sequence
  Description of Artificial Sequence: Synthetic oligonucleotide
ccguugcauuugaacuagc

SEQ ID NO: 231539 - RNA, 19 nt, Artificial Sequence
  Description of Artificial Sequence: Synthetic oligonucleotide
ggccgagucaaguguuuua

SEQ ID NO: 231540 - RNA, 19 nt, Artificial Sequence
  Description of Artificial Sequence: Synthetic oligonucleotide
ccgagucaaguguuuuaga

SEQ ID NO: 231541 - RNA, 19 nt, Artificial Sequence
  Description of Artificial Sequence: Synthetic oligonucleotide
ggcugcggaggagcuauca

SEQ ID NO: 231542 - RNA, 19 nt, Artificial Sequence
  Description of Artificial Sequence: Synthetic oligonucleotide
cggaaacaccacuacacgu

SEQ ID NO: 231543 - RNA, 19 nt, Artificial Sequence
  Description of Artificial Sequence: Synthetic oligonucleotide
cacguaugguuagcuuggu

SEQ ID NO: 231544 - RNA, 19 nt, Artificial Sequence
  Description of Artificial Sequence: Synthetic oligonucleotide
cgaaccacgucagaagccu

SEQ ID NO: 231545 - RNA, 19 nt, Artificial Sequence
  Description of Artificial Sequence: Synthetic oligonucleotide
ccacuacacguaucuaauu

SEQ ID NO: 231546 - RNA, 19 nt, Artificial Sequence
  Description of Artificial Sequence: Synthetic oligonucleotide
ccgauauacuguaguccau

SEQ ID NO: 231547 - RNA, 19 nt, Artificial Sequence
  Description of Artificial Sequence: Synthetic oligonucleotide
cgauauacuguaguccauu

SEQ ID NO: 231548 - RNA, 19 nt, Artificial Sequence
  Description of Artificial Sequence: Synthetic oligonucleotide
gcccgccuucugaaagcac

SEQ ID NO: 231549 - RNA, 19 nt, Artificial Sequence
  Description of Artificial Sequence: Synthetic oligonucleotide
ccaacccguuacuugccuu

SEQ ID NO: 231550 - RNA, 19 nt, Artificial Sequence
  Description of Artificial Sequence: Synthetic oligonucleotide
cccugcgcuggaugauaaa

SEQ ID NO: 231551 - RNA, 19 nt, Artificial Sequence
  Description of Artificial Sequence: Synthetic oligonucleotide
aauagaugaaauuuguauc

SEQ ID NO: 231552 - RNA, 19 nt, Artificial Sequence
  Description of Artificial Sequence: Synthetic oligonucleotide
aaucgaagcaguccuaacc

SEQ ID NO: 231553 - RNA, 19 nt, Artificial Sequence
  Description of Artificial Sequence: Synthetic oligonucleotide
uguuauguuguucagagca

SEQ ID NO: 231554 - RNA, 19 nt, Artificial Sequence
  Description of Artificial Sequence: Synthetic oligonucleotide
aacaacgaucauuaggagc

SEQ ID NO: 231555 - RNA, 19 nt, Artificial Sequence
  Description of Artificial Sequence: Synthetic oligonucleotide
auaaacuuccccgagaugc

SEQ ID NO: 231556 - RNA, 19 nt, Artificial Sequence
  Description of Artificial Sequence: Synthetic oligonucleotide
aggaaaguuauacaagggc

SEQ ID NO: 231557 - RNA, 19 nt, Artificial Sequence
  Description of Artificial Sequence: Synthetic oligonucleotide
uuuaguaaucuuuauguug

SEQ ID NO: 231558 - RNA, 19 nt, Artificial Sequence
  Description of Artificial Sequence: Synthetic oligonucleotide
uuuauacaauucaucaagg

SEQ ID NO: 231559 - RNA, 19 nt, Artificial Sequence
  Description of Artificial Sequence: Synthetic oligonucleotide
acaacgaucauuaggagcc

SEQ ID NO: 231560 - RNA, 19 nt, Artificial Sequence
  Description of Artificial Sequence: Synthetic oligonucleotide
uuuacgauaggcacuuugg

SEQ ID NO: 231561 - RNA, 19 nt, Artificial Sequence
  Description of Artificial Sequence: Synthetic oligonucleotide
uaaggauauacgcauauga

SEQ ID NO: 231562 - RNA, 19 nt, Artificial Sequence
  Description of Artificial Sequence: Synthetic oligonucleotide
aaccauaaggccacgaagc

SEQ ID NO: 231563 - RNA, 19 nt, Artificial Sequence
  Description of Artificial Sequence: Synthetic oligonucleotide
aauugcaaugcauuuagau

SEQ ID NO: 231564 - RNA, 19 nt, Artificial Sequence
  Description of Artificial Sequence: Synthetic oligonucleotide
caaauuuuacgauaggcac

SEQ ID NO: 231565 - RNA, 19 nt, Artificial Sequence
  Description of Artificial Sequence: Synthetic oligonucleotide
gauuuaguccucgaaagcg

SEQ ID NO: 231566 - RNA, 19 nt, Artificial Sequence
  Description of Artificial Sequence: Synthetic oligonucleotide
aaaccauaaggccacgaag

SEQ ID NO: 231567 - RNA, 19 nt, Artificial Sequence
  Description of Artificial Sequence: Synthetic oligonucleotide
aaugaaugccuucauaaua

SEQ ID NO: 231568 - RNA, 19 nt, Artificial Sequence
  Description of Artificial Sequence: Synthetic oligonucleotide
ugauaucaccuucuaaucc

SEQ ID NO: 231569 - RNA, 19 nt, Artificial Sequence
  Description of Artificial Sequence: Synthetic oligonucleotide
aggauauacgcauaugaag

SEQ ID NO: 231570 - RNA, 19 nt, Artificial Sequence
  Description of Artificial Sequence: Synthetic oligonucleotide
agccaauuaaaauuugcuc

SEQ ID NO: 231571 - RNA, 19 nt, Artificial Sequence
  Description of Artificial Sequence: Synthetic oligonucleotide
uaggguaauaaaauagaug

SEQ ID NO: 231572 - RNA, 19 nt, Artificial Sequence
  Description of Artificial Sequence: Synthetic oligonucleotide
uguuaauacucucgaauca

SEQ ID NO: 231573 - RNA, 19 nt, Artificial Sequence
  Description of Artificial Sequence: Synthetic oligonucleotide
uuccauucaaguuugaaua

SEQ ID NO: 231574 - RNA, 19 nt, Artificial Sequence
  Description of Artificial Sequence: Synthetic oligonucleotide
gacugucuaguccuuaugg

SEQ ID NO: 231575 - RNA, 19 nt, Artificial Sequence
  Description of Artificial Sequence: Synthetic oligonucleotide
auacucucgaaucaaaaga

SEQ ID NO: 231576 - RNA, 19 nt, Artificial Sequence
  Description of Artificial Sequence: Synthetic oligonucleotide
ucaaaaguggucacgaaua

SEQ ID NO: 231577 - RNA, 19 nt, Artificial Sequence
  Description of Artificial Sequence: Synthetic oligonucleotide
guaacugacacugagguac

SEQ ID NO: 231578 - RNA, 19 nt, Artificial Sequence
  Description of Artificial Sequence: Synthetic oligonucleotide
aggauuuaguccucgaaag

SEQ ID NO: 231579 - RNA, 19 nt, Artificial Sequence
  Description of Artificial Sequence: Synthetic oligonucleotide
acgauaggcacuuuggcag

SEQ ID NO: 231580 - RNA, 19 nt, Artificial Sequence
  Description of Artificial Sequence: Synthetic oligonucleotide
aagcuaucuaaacaugugu

SEQ ID NO: 231581 - RNA, 19 nt, Artificial Sequence
  Description of Artificial Sequence: Synthetic oligonucleotide
uaaaucaggaccugauuug

SEQ ID NO: 231582 - RNA, 19 nt, Artificial Sequence
  Description of Artificial Sequence: Synthetic oligonucleotide
ucugaagacugucuagucc

SEQ ID NO: 231583 - RNA, 19 nt, Artificial Sequence
  Description of Artificial Sequence: Synthetic oligonucleotide
aaauaugaugcugggauca

SEQ ID NO: 231584 - RNA, 19 nt, Artificial Sequence
  Description of Artificial Sequence: Synthetic oligonucleotide
aacuauaguucauauuuau

SEQ ID NO: 231585 - RNA, 19 nt, Artificial Sequence
  Description of Artificial Sequence: Synthetic oligonucleotide
ugaauuacccacugcacca

SEQ ID NO: 231586 - RNA, 19 nt, Artificial Sequence
  Description of Artificial Sequence: Synthetic oligonucleotide
uuuuacgauaggcacuuug

SEQ ID NO: 231587 - RNA, 19 nt, Artificial Sequence
  Description of Artificial Sequence: Synthetic oligonucleotide
aggaauagcgguugguugg

SEQ ID NO: 231588 - RNA, 19 nt, Artificial Sequence
  Description of Artificial Sequence: Synthetic oligonucleotide
uauagaaucgaagcagucc

SEQ ID NO: 231589 - RNA, 19 nt, Artificial Sequence
  Description of Artificial Sequence: Synthetic oligonucleotide
uguuguucagagcaaggug

SEQ ID NO: 231590 - RNA, 19 nt, Artificial Sequence
  Description of Artificial Sequence: Synthetic oligonucleotide
auagacugauaucaccuuc

SEQ ID NO: 231591 - RNA, 19 nt, Artificial Sequence
  Description of Artificial Sequence: Synthetic oligonucleotide
ugcauacuaaaucaaguau

SEQ ID NO: 231592 - RNA, 19 nt, Artificial Sequence
  Description of Artificial Sequence: Synthetic oligonucleotide
ucgaaucaaaagaaguacu

SEQ ID NO: 231593 - RNA, 19 nt, Artificial Sequence
  Description of Artificial Sequence: Synthetic oligonucleotide
acucauuuuagugauacca

SEQ ID NO: 231594 - RNA, 19 nt, Artificial Sequence
  Description of Artificial Sequence: Synthetic oligonucleotide
uuuuagugauaccaguaaa

SEQ ID NO: 231595 - RNA, 19 nt, Artificial Sequence
  Description of Artificial Sequence: Synthetic oligonucleotide
uuauacaagggcaucugaa

SEQ ID NO: 231596 - RNA, 19 nt, Artificial Sequence
  Description of Artificial Sequence: Synthetic oligonucleotide
ucucgaaucaaaagaagua

SEQ ID NO: 231597 - RNA, 19 nt, Artificial Sequence
  Description of Artificial Sequence: Synthetic oligonucleotide
guacggauacccuugaaac

SEQ ID NO: 231598 - RNA, 19 nt, Artificial Sequence
  Description of Artificial Sequence: Synthetic oligonucleotide
aagauaaacuuccccgaga

SEQ ID NO: 231599 - RNA, 19 nt, Artificial Sequence
  Description of Artificial Sequence: Synthetic oligonucleotide
accauaaggauauacgcau

SEQ ID NO: 231600 - RNA, 19 nt, Artificial Sequence
  Description of Artificial Sequence: Synthetic oligonucleotide
uuacgauaggcacuuuggc

SEQ ID NO: 231601 - RNA, 19 nt, Artificial Sequence
  Description of Artificial Sequence: Synthetic oligonucleotide
uuggcaauagucccauacc

SEQ ID NO: 231602 - RNA, 19 nt, Artificial Sequence
  Description of Artificial Sequence: Synthetic oligonucleotide
cuguuaauacucucgaauc

SEQ ID NO: 231603 - RNA, 19 nt, Artificial Sequence
  Description of Artificial Sequence: Synthetic oligonucleotide
aaauuuuacgauaggcacu

SEQ ID NO: 231604 - RNA, 19 nt, Artificial Sequence
  Description of Artificial Sequence: Synthetic oligonucleotide
ugagguacggauacccuug

SEQ ID NO: 231605 - RNA, 19 nt, Artificial Sequence
  Description of Artificial Sequence: Synthetic oligonucleotide
auuuuagugauaccaguaa

SEQ ID NO: 231606 - RNA, 19 nt, Artificial Sequence
  Description of Artificial Sequence: Synthetic oligonucleotide
uacgauaggcacuuuggca

SEQ ID NO: 231607 - RNA, 19 nt, Artificial Sequence
  Description of Artificial Sequence: Synthetic oligonucleotide
aucacuaucacggaaucca

SEQ ID NO: 231608 - RNA, 19 nt, Artificial Sequence
  Description of Artificial Sequence: Synthetic oligonucleotide
agcauugggccaugaaugg

SEQ ID NO: 231609 - RNA, 19 nt, Artificial Sequence
  Description of Artificial Sequence: Synthetic oligonucleotide
auauagacugauaucaccu

SEQ ID NO: 231610 - RNA, 19 nt, Artificial Sequence
  Description of Artificial Sequence: Synthetic oligonucleotide
caagcuuaggcugggaucc

SEQ ID NO: 231611 - RNA, 19 nt, Artificial Sequence
  Description of Artificial Sequence: Synthetic oligonucleotide
uagacugauaucaccuucu

SEQ ID NO: 231612 - RNA, 19 nt, Artificial Sequence
  Description of Artificial Sequence: Synthetic oligonucleotide
gauuacauacuccuugaaa

SEQ ID NO: 231613 - RNA, 19 nt, Artificial Sequence
  Description of Artificial Sequence: Synthetic oligonucleotide
agaucacuaucacggaauc

SEQ ID NO: 231614 - RNA, 19 nt, Artificial Sequence
  Description of Artificial Sequence: Synthetic oligonucleotide
cauugggccaugaaugggc

SEQ ID NO: 231615 - RNA, 19 nt, Artificial Sequence
  Description of Artificial Sequence: Synthetic oligonucleotide
ucacucauuuuagugauac

SEQ ID NO: 231616 - RNA, 19 nt, Artificial Sequence
  Description of Artificial Sequence: Synthetic oligonucleotide
acuaucacggaauccaaau

SEQ ID NO: 231617 - RNA, 19 nt, Artificial Sequence
  Description of Artificial Sequence: Synthetic oligonucleotide
uacaauucaucaagguuaa

SEQ ID NO: 231618 - RNA, 19 nt, Artificial Sequence
  Description of Artificial Sequence: Synthetic oligonucleotide
aguccuuauggacugguca

SEQ ID NO: 231619 - RNA, 19 nt, Artificial Sequence
  Description of Artificial Sequence: Synthetic oligonucleotide
uugcauacuaaaucaagua

SEQ ID NO: 231620 - RNA, 19 nt, Artificial Sequence
  Description of Artificial Sequence: Synthetic oligonucleotide
acaguuuaauuucucugca

SEQ ID NO: 231621 - RNA, 19 nt, Artificial Sequence
  Description of Artificial Sequence: Synthetic oligonucleotide
ucgucuauguucaaauuuu

SEQ ID NO: 231622 - RNA, 19 nt, Artificial Sequence
  Description of Artificial Sequence: Synthetic oligonucleotide
cucgaaucaaaagaaguac

SEQ ID NO: 231623 - RNA, 19 nt, Artificial Sequence
  Description of Artificial Sequence: Synthetic oligonucleotide
aagagcuagggauugccau

SEQ ID NO: 231624 - RNA, 19 nt, Artificial Sequence
  Description of Artificial Sequence: Synthetic oligonucleotide
uuuaaaucaggaccugauu

SEQ ID NO: 231625 - RNA, 19 nt, Artificial Sequence
  Description of Artificial Sequence: Synthetic oligonucleotide
uggcaguaguuauaggcag

SEQ ID NO: 231626 - RNA, 19 nt, Artificial Sequence
  Description of Artificial Sequence: Synthetic oligonucleotide
uggugauugaggaaaguua

SEQ ID NO: 231627 - RNA, 19 nt, Artificial Sequence
  Description of Artificial Sequence: Synthetic oligonucleotide
aaguuauacaagggcaucu

SEQ ID NO: 231628 - RNA, 19 nt, Artificial Sequence
  Description of Artificial Sequence: Synthetic oligonucleotide
uuccuuccguuaaugaaug

SEQ ID NO: 231629 - RNA, 19 nt, Artificial Sequence
  Description of Artificial Sequence: Synthetic oligonucleotide
aggagaauaagauggugaa

SEQ ID NO: 231630 - RNA, 19 nt, Artificial Sequence
  Description of Artificial Sequence: Synthetic oligonucleotide
acuucgucuauguucaaau

SEQ ID NO: 231631 - RNA, 19 nt, Artificial Sequence
  Description of Artificial Sequence: Synthetic oligonucleotide
uacgcauaugaagauaaac

SEQ ID NO: 231632 - RNA, 19 nt, Artificial Sequence
  Description of Artificial Sequence: Synthetic oligonucleotide
uaacugacacugagguacg

SEQ ID NO: 231633 - RNA, 19 nt, Artificial Sequence
  Description of Artificial Sequence: Synthetic oligonucleotide
ucuuuccaagugaagguaa

SEQ ID NO: 231634 - RNA, 19 nt, Artificial Sequence
  Description of Artificial Sequence: Synthetic oligonucleotide
acgcauaugaagauaaacu

SEQ ID NO: 231635 - RNA, 19 nt, Artificial Sequence
  Description of Artificial Sequence: Synthetic oligonucleotide
uuucggacuagcugggcug

SEQ ID NO: 231636 - RNA, 19 nt, Artificial Sequence
  Description of Artificial Sequence: Synthetic oligonucleotide
gaggauuuaguccucgaaa

SEQ ID NO: 231637 - RNA, 19 nt, Artificial Sequence
  Description of Artificial Sequence: Synthetic oligonucleotide
ugggccaagcuuaggcugg

SEQ ID NO: 231638 - RNA, 19 nt, Artificial Sequence
  Description of Artificial Sequence: Synthetic oligonucleotide
aaggauauacgcauaugaa

SEQ ID NO: 231639 - RNA, 19 nt, Artificial Sequence
  Description of Artificial Sequence: Synthetic oligonucleotide
caucaugagaagagcuagg

SEQ ID NO: 231640 - RNA, 19 nt, Artificial Sequence
  Description of Artificial Sequence: Synthetic oligonucleotide
gaggagaauaagaugguga

SEQ ID NO: 231641 - RNA, 19 nt, Artificial Sequence
  Description of Artificial Sequence: Synthetic oligonucleotide
aagcaaccaaaguaugaau

SEQ ID NO: 231642 - RNA, 19 nt, Artificial Sequence
  Description of Artificial Sequence: Synthetic oligonucleotide
uauaucccagguacuguac

SEQ ID NO: 231643 - RNA, 19 nt, Artificial Sequence
  Description of Artificial Sequence: Synthetic oligonucleotide
ugaauacagcuaauagaaa

SEQ ID NO: 231644 - RNA, 19 nt, Artificial Sequence
  Description of Artificial Sequence: Synthetic oligonucleotide
gagcauugacaagauuucg

SEQ ID NO: 231645 - RNA, 19 nt, Artificial Sequence
  Description of Artificial Sequence: Synthetic oligonucleotide
ugagaagagcuagggauug

SEQ ID NO: 231646 - RNA, 19 nt, Artificial Sequence
  Description of Artificial Sequence: Synthetic oligonucleotide
uacagcgacggguagcaca

SEQ ID NO: 231647 - RNA, 19 nt, Artificial Sequence
  Description of Artificial Sequence: Synthetic oligonucleotide
gcaacaacgaucauuagga

SEQ ID NO: 231648 - RNA, 19 nt, Artificial Sequence
  Description of Artificial Sequence: Synthetic oligonucleotide
acggguagcacaucugucu

SEQ ID NO: 231649 - RNA, 19 nt, Artificial Sequence
  Description of Artificial Sequence: Synthetic oligonucleotide
uccaucaugagaagagcua

SEQ ID NO: 231650 - RNA, 19 nt, Artificial Sequence
  Description of Artificial Sequence: Synthetic oligonucleotide
ucuacagcgacggguagca

SEQ ID NO: 231651 - RNA, 19 nt, Artificial Sequence
  Description of Artificial Sequence: Synthetic oligonucleotide
gacaagauuucggacuagc

SEQ ID NO: 231652 - RNA, 19 nt, Artificial Sequence
  Description of Artificial Sequence: Synthetic oligonucleotide
uacaaauauccagaucacu

SEQ ID NO: 231653 - RNA, 19 nt, Artificial Sequence
  Description of Artificial Sequence: Synthetic oligonucleotide
auuucggacuagcugggcu

SEQ ID NO: 231654 - RNA, 19 nt, Artificial Sequence
  Description of Artificial Sequence: Synthetic oligonucleotide
uacuccgacacauuuccuc

SEQ ID NO: 231655 - RNA, 19 nt, Artificial Sequence
  Description of Artificial Sequence: Synthetic oligonucleotide
ugaggagaauaagauggug

SEQ ID NO: 231656 - RNA, 19 nt, Artificial Sequence
  Description of Artificial Sequence: Synthetic oligonucleotide
ccaucuguuaauacucucg

SEQ ID NO: 231657 - RNA, 19 nt, Artificial Sequence
  Description of Artificial Sequence: Synthetic oligonucleotide
ugcuauuccucugucgggc

SEQ ID NO: 231658 - RNA, 19 nt, Artificial Sequence
  Description of Artificial Sequence: Synthetic oligonucleotide
gauaaacuuccccgagaug

SEQ ID NO: 231659 - RNA, 19 nt, Artificial Sequence
  Description of Artificial Sequence: Synthetic oligonucleotide
ugcauguucccauggaauu

SEQ ID NO: 231660 - RNA, 19 nt, Artificial Sequence
  Description of Artificial Sequence: Synthetic oligonucleotide
aguuauacaagggcaucug

SEQ ID NO: 231661 - RNA, 19 nt, Artificial Sequence
  Description of Artificial Sequence: Synthetic oligonucleotide
uauagacugauaucaccuu

SEQ ID NO: 231662 - RNA, 19 nt, Artificial Sequence
  Description of Artificial Sequence: Synthetic oligonucleotide
ugauuacauacuccuugaa

SEQ ID NO: 231663 - RNA, 19 nt, Artificial Sequence
  Description of Artificial Sequence: Synthetic oligonucleotide
guccuuauggacuggucac

SEQ ID NO: 231664 - RNA, 19 nt, Artificial Sequence
  Description of Artificial Sequence: Synthetic oligonucleotide
uucccgacgcacauguccu

SEQ ID NO: 231665 - RNA, 19 nt, Artificial Sequence
  Description of Artificial Sequence: Synthetic oligonucleotide
cauuuuagugauaccagua

SEQ ID NO: 231666 - RNA, 19 nt, Artificial Sequence
  Description of Artificial Sequence: Synthetic oligonucleotide
caucaaccauucucugugg

SEQ ID NO: 231667 - RNA, 19 nt, Artificial Sequence
  Description of Artificial Sequence: Synthetic oligonucleotide
uuggaggauuuaguccucg

SEQ ID NO: 231668 - RNA, 19 nt, Artificial Sequence
  Description of Artificial Sequence: Synthetic oligonucleotide
aacgaucauuaggagccag

SEQ ID NO: 231669 - RNA, 19 nt, Artificial Sequence
  Description of Artificial Sequence: Synthetic oligonucleotide
gaacauucugaagacuguc

SEQ ID NO: 231670 - RNA, 19 nt, Artificial Sequence
  Description of Artificial Sequence: Synthetic oligonucleotide
uccguuaaugaaugccuuc

SEQ ID NO: 231671 - RNA, 19 nt, Artificial Sequence
  Description of Artificial Sequence: Synthetic oligonucleotide
ugggcuggcauuacuccga

SEQ ID NO: 231672 - RNA, 19 nt, Artificial Sequence
  Description of Artificial Sequence: Synthetic oligonucleotide
gaucacuaucacggaaucc

SEQ ID NO: 231673 - RNA, 19 nt, Artificial Sequence
  Description of Artificial Sequence: Synthetic oligonucleotide
ucuuucauguaaugaccua

SEQ ID NO: 231674 - RNA, 19 nt, Artificial Sequence
  Description of Artificial Sequence: Synthetic oligonucleotide
auuuaguccucgaaagcgu

SEQ ID NO: 231675 - RNA, 19 nt, Artificial Sequence
  Description of Artificial Sequence: Synthetic oligonucleotide
cuuuggcaguaguuauagg

SEQ ID NO: 231676 - RNA, 19 nt, Artificial Sequence
  Description of Artificial Sequence: Synthetic oligonucleotide
aucaaccauucucugugga

SEQ ID NO: 231677 - RNA, 19 nt, Artificial Sequence
  Description of Artificial Sequence: Synthetic oligonucleotide
uggcauuacuccgacacau

SEQ ID NO: 231678 - RNA, 19 nt, Artificial Sequence
  Description of Artificial Sequence: Synthetic oligonucleotide
agacugucuaguccuuaug

SEQ ID NO: 231679 - RNA, 19 nt, Artificial Sequence
  Description of Artificial Sequence: Synthetic oligonucleotide
aacuuccccgagaugcauc

SEQ ID NO: 231680 - RNA, 19 nt, Artificial Sequence
  Description of Artificial Sequence: Synthetic oligonucleotide
uguaacugacacugaggua

SEQ ID NO: 231681 - RNA, 19 nt, Artificial Sequence
  Description of Artificial Sequence: Synthetic oligonucleotide
agcgacggguagcacaucu

SEQ ID NO: 231682 - RNA, 19 nt, Artificial Sequence
  Description of Artificial Sequence: Synthetic oligonucleotide
ccaugaaugggccaugaug

SEQ ID NO: 231683 - RNA, 19 nt, Artificial Sequence
  Description of Artificial Sequence: Synthetic oligonucleotide
cugcuauuccucugucggg

SEQ ID NO: 231684 - RNA, 19 nt, Artificial Sequence
  Description of Artificial Sequence: Synthetic oligonucleotide
aguacgaggccagugucca

SEQ ID NO: 231685 - RNA, 19 nt, Artificial Sequence
  Description of Artificial Sequence: Synthetic oligonucleotide
gaauacugagcugguggug

SEQ ID NO: 231686 - RNA, 19 nt, Artificial Sequence
  Description of Artificial Sequence: Synthetic oligonucleotide
uuccguuaaugaaugccuu

SEQ ID NO: 231687 - RNA, 19 nt, Artificial Sequence
  Description of Artificial Sequence: Synthetic oligonucleotide
acgcucucuacagcgacgg

SEQ ID NO: 231688 - RNA, 19 nt, Artificial Sequence
  Description of Artificial Sequence: Synthetic oligonucleotide
cuuccguuaaugaaugccu

SEQ ID NO: 231689 - RNA, 19 nt, Artificial Sequence
  Description of Artificial Sequence: Synthetic oligonucleotide
ccugaugcaugaaauuuug

SEQ ID NO: 231690 - RNA, 19 nt, Artificial Sequence
  Description of Artificial Sequence: Synthetic oligonucleotide
ucuaguccuuauggacugg

SEQ ID NO: 231691 - RNA, 19 nt, Artificial Sequence
  Description of Artificial Sequence: Synthetic oligonucleotide
ugccaaugaguggauaaaa

SEQ ID NO: 231692 - RNA, 19 nt, Artificial Sequence
  Description of Artificial Sequence: Synthetic oligonucleotide
agaaucgaagcaguccuaa

SEQ ID NO: 231693 - RNA, 19 nt, Artificial Sequence
  Description of Artificial Sequence: Synthetic oligonucleotide
acuauaguucauauuuaua

SEQ ID NO: 231694 - RNA, 19 nt, Artificial Sequence
  Description of Artificial Sequence: Synthetic oligonucleotide
acaagauuucggacuagcu

SEQ ID NO: 231695 - RNA, 19 nt, Artificial Sequence
  Description of Artificial Sequence: Synthetic oligonucleotide
ucgaaagcguggcucugaa

SEQ ID NO: 231696 - RNA, 19 nt, Artificial Sequence
  Description of Artificial Sequence: Synthetic oligonucleotide
uaccaugcaugggagaaua

SEQ ID NO: 231697 - RNA, 19 nt, Artificial Sequence
  Description of Artificial Sequence: Synthetic oligonucleotide
auauacgcauaugaagaua

SEQ ID NO: 231698 - RNA, 19 nt, Artificial Sequence
  Description of Artificial Sequence: Synthetic oligonucleotide
auuuagauguccacugcuu

SEQ ID NO: 231699 - RNA, 19 nt, Artificial Sequence
  Description of Artificial Sequence: Synthetic oligonucleotide
gguacggauacccuugaaa

SEQ ID NO: 231700 - RNA, 19 nt, Artificial Sequence
  Description of Artificial Sequence: Synthetic oligonucleotide
uagaaucgaagcaguccua

SEQ ID NO: 231701 - RNA, 19 nt, Artificial Sequence
  Description of Artificial Sequence: Synthetic oligonucleotide
uuacuccgacacauuuccu

SEQ ID NO: 231702 - RNA, 19 nt, Artificial Sequence
  Description of Artificial Sequence: Synthetic oligonucleotide
gaauagcgguugguugggg

SEQ ID NO: 231703 - RNA, 19 nt, Artificial Sequence
  Description of Artificial Sequence: Synthetic oligonucleotide
ccaucaugagaagagcuag

SEQ ID NO: 231704 - RNA, 19 nt, Artificial Sequence
  Description of Artificial Sequence: Synthetic oligonucleotide
uucggacuagcugggcugc

SEQ ID NO: 231705 - RNA, 19 nt, Artificial Sequence
  Description of Artificial Sequence: Synthetic oligonucleotide
aaguaugaauacagcuaau

SEQ ID NO: 231706 - RNA, 19 nt, Artificial Sequence
  Description of Artificial Sequence: Synthetic oligonucleotide
gaagagcuagggauugcca

SEQ ID NO: 231707 - RNA, 19 nt, Artificial Sequence
  Description of Artificial Sequence: Synthetic oligonucleotide
cugaggugggccaagcuua

SEQ ID NO: 231708 - RNA, 19 nt, Artificial Sequence
  Description of Artificial Sequence: Synthetic oligonucleotide
aaacuuccccgagaugcau

SEQ ID NO: 231709 - RNA, 19 nt, Artificial Sequence
  Description of Artificial Sequence: Synthetic oligonucleotide
ggaauagcgguugguuggg

SEQ ID NO: 231710 - RNA, 19 nt, Artificial Sequence
  Description of Artificial Sequence: Synthetic oligonucleotide
ccaaaguaugaauacagcu

SEQ ID NO: 231711 - RNA, 19 nt, Artificial Sequence
  Description of Artificial Sequence: Synthetic oligonucleotide
agacugauaucaccuucua

SEQ ID NO: 231712 - RNA, 19 nt, Artificial Sequence
  Description of Artificial Sequence: Synthetic oligonucleotide
ugggacaaucuuucaugua

SEQ ID NO: 231713 - RNA, 19 nt, Artificial Sequence
  Description of Artificial Sequence: Synthetic oligonucleotide
augagaagagcuagggauu

SEQ ID NO: 231714 - RNA, 19 nt, Artificial Sequence
  Description of Artificial Sequence: Synthetic oligonucleotide
guuauguuguucagagcaa

SEQ ID NO: 231715 - RNA, 19 nt, Artificial Sequence
  Description of Artificial Sequence: Synthetic oligonucleotide
cagguacuguacucuagga

SEQ ID NO: 231716 - RNA, 19 nt, Artificial Sequence
  Description of Artificial Sequence: Synthetic oligonucleotide
ggacuagcugggcugcugc

SEQ ID NO: 231717 - RNA, 19 nt, Artificial Sequence
  Description of Artificial Sequence: Synthetic oligonucleotide
cagaucacuaucacggaau

SEQ ID NO: 231718 - RNA, 19 nt, Artificial Sequence
  Description of Artificial Sequence: Synthetic oligonucleotide
ccaagcuuaggcugggauc

SEQ ID NO: 231719 - RNA, 19 nt, Artificial Sequence
  Description of Artificial Sequence: Synthetic oligonucleotide
agccaauguguuauauaga

SEQ ID NO: 231720 - RNA, 19 nt, Artificial Sequence
  Description of Artificial Sequence: Synthetic oligonucleotide
acagcgacggguagcacau

SEQ ID NO: 231721 - RNA, 19 nt, Artificial Sequence
  Description of Artificial Sequence: Synthetic oligonucleotide
gucccauaccaugcauggg

SEQ ID NO: 231722 - RNA, 19 nt, Artificial Sequence
  Description of Artificial Sequence: Synthetic oligonucleotide
acgaucauuaggagccagu

SEQ ID NO: 231723 - RNA, 19 nt, Artificial Sequence
  Description of Artificial Sequence: Synthetic oligonucleotide
ggagcauugggccaugaau

SEQ ID NO: 231724 - RNA, 19 nt, Artificial Sequence
  Description of Artificial Sequence: Synthetic oligonucleotide
ccuuauggacuggucaccc

SEQ ID NO: 231725 - RNA, 19 nt, Artificial Sequence
  Description of Artificial Sequence: Synthetic oligonucleotide
gcuauuccucugucgggcc

SEQ ID NO: 231726 - RNA, 19 nt, Artificial Sequence
  Description of Artificial Sequence: Synthetic oligonucleotide
caaaagaaguacucagcuu

SEQ ID NO: 231727 - RNA, 19 nt, Artificial Sequence
  Description of Artificial Sequence: Synthetic oligonucleotide
cacuaucacggaauccaaa

SEQ ID NO: 231728 - RNA, 19 nt, Artificial Sequence
  Description of Artificial Sequence: Synthetic oligonucleotide
ggguagcacaucugucugc

SEQ ID NO: 231729 - RNA, 19 nt, Artificial Sequence
  Description of Artificial Sequence: Synthetic oligonucleotide
cuauuccucugucgggcca

SEQ ID NO: 231730 - RNA, 19 nt, Artificial Sequence
  Description of Artificial Sequence: Synthetic oligonucleotide
ggucacgaauacugauuac

SEQ ID NO: 231731 - RNA, 19 nt, Artificial Sequence
  Description of Artificial Sequence: Synthetic oligonucleotide
auaugaugcugggaucauu

SEQ ID NO: 231732 - RNA, 19 nt, Artificial Sequence
  Description of Artificial Sequence: Synthetic oligonucleotide
ggacaacgcucucuacagc

SEQ ID NO: 231733 - RNA, 19 nt, Artificial Sequence
  Description of Artificial Sequence: Synthetic oligonucleotide
ucccgacgcacauguccug

SEQ ID NO: 231734 - RNA, 19 nt, Artificial Sequence
  Description of Artificial Sequence: Synthetic oligonucleotide
cuggcauuacuccgacaca

SEQ ID NO: 231735 - RNA, 19 nt, Artificial Sequence
  Description of Artificial Sequence: Synthetic oligonucleotide
cacuuuggcaguaguuaua

SEQ ID NO: 231736 - RNA, 19 nt, Artificial Sequence
  Description of Artificial Sequence: Synthetic oligonucleotide
guacagcaccauaaggaua

SEQ ID NO: 231737 - RNA, 19 nt, Artificial Sequence
  Description of Artificial Sequence: Synthetic oligonucleotide
auacgcauaugaagauaaa

SEQ ID NO: 231738 - RNA, 19 nt, Artificial Sequence
  Description of Artificial Sequence: Synthetic oligonucleotide
agguacggauacccuugaa

SEQ ID NO: 231739 - RNA, 19 nt, Artificial Sequence
  Description of Artificial Sequence: Synthetic oligonucleotide
gcuagcauucuuguguugu

SEQ ID NO: 231740 - RNA, 19 nt, Artificial Sequence
  Description of Artificial Sequence: Synthetic oligonucleotide
guggugauugaggaaaguu

SEQ ID NO: 231741 - RNA, 19 nt, Artificial Sequence
  Description of Artificial Sequence: Synthetic oligonucleotide
gcaguccuaaccaaagacu

SEQ ID NO: 231742 - RNA, 19 nt, Artificial Sequence
  Description of Artificial Sequence: Synthetic oligonucleotide
ccguuaaugaaugccuuca

SEQ ID NO: 231743 - RNA, 19 nt, Artificial Sequence
  Description of Artificial Sequence: Synthetic oligonucleotide
gaauuacccacugcaccau

SEQ ID NO: 231744 - RNA, 19 nt, Artificial Sequence
  Description of Artificial Sequence: Synthetic oligonucleotide
cauucccgacgcacauguc

SEQ ID NO: 231745 - RNA, 19 nt, Artificial Sequence
  Description of Artificial Sequence: Synthetic oligonucleotide
cuuauggacuggucacccu

SEQ ID NO: 231746 - RNA, 19 nt, Artificial Sequence
  Description of Artificial Sequence: Synthetic oligonucleotide
gguagcacaucugucugcu

SEQ ID NO: 231747 - RNA, 19 nt, Artificial Sequence
  Description of Artificial Sequence: Synthetic oligonucleotide
cacuucgucuauguucaaa

SEQ ID NO: 231748 - RNA, 19 nt, Artificial Sequence
  Description of Artificial Sequence: Synthetic oligonucleotide
cauaguaaacugggcacau

SEQ ID NO: 231749 - RNA, 19 nt, Artificial Sequence
  Description of Artificial Sequence: Synthetic oligonucleotide
cuucgucuauguucaaauu

SEQ ID NO: 231750 - RNA, 19 nt, Artificial Sequence
  Description of Artificial Sequence: Synthetic oligonucleotide
gcauuacuccgacacauuu

SEQ ID NO: 231751 - RNA, 19 nt, Artificial Sequence
  Description of Artificial Sequence: Synthetic oligonucleotide
gggauaacugguggcuuuc

SEQ ID NO: 231752 - RNA, 19 nt, Artificial Sequence
  Description of Artificial Sequence: Synthetic oligonucleotide
ugcucccuguuauguuguu

SEQ ID NO: 231753 - RNA, 19 nt, Artificial Sequence
  Description of Artificial Sequence: Synthetic oligonucleotide
guggucacgaauacugauu

SEQ ID NO: 231754 - RNA, 19 nt, Artificial Sequence
  Description of Artificial Sequence: Synthetic oligonucleotide
ccagaucacuaucacggaa

SEQ ID NO: 231755 - RNA, 19 nt, Artificial Sequence
  Description of Artificial Sequence: Synthetic oligonucleotide
cuaguccuuauggacuggu

SEQ ID NO: 231756 - RNA, 19 nt, Artificial Sequence
  Description of Artificial Sequence: Synthetic oligonucleotide
caacgaucauuaggagcca

SEQ ID NO: 231757 - RNA, 19 nt, Artificial Sequence
  Description of Artificial Sequence: Synthetic oligonucleotide
gcacuacaagguucuguaa

SEQ ID NO: 231758 - RNA, 19 nt, Artificial Sequence
  Description of Artificial Sequence: Synthetic oligonucleotide
ucggacuagcugggcugcu

SEQ ID NO: 231759 - RNA, 19 nt, Artificial Sequence
  Description of Artificial Sequence: Synthetic oligonucleotide
auuuuacgauaggcacuuu

SEQ ID NO: 231760 - RNA, 19 nt, Artificial Sequence
  Description of Artificial Sequence: Synthetic oligonucleotide
gcucucuacagcgacgggu

SEQ ID NO: 231761 - RNA, 19 nt, Artificial Sequence
  Description of Artificial Sequence: Synthetic oligonucleotide
cugucgggccaucuugacu

SEQ ID NO: 231762 - RNA, 19 nt, Artificial Sequence
  Description of Artificial Sequence: Synthetic oligonucleotide
ccauaaggauauacgcaua

SEQ ID NO: 231763 - RNA, 19 nt, Artificial Sequence
  Description of Artificial Sequence: Synthetic oligonucleotide
ccuagugauucuguguucu

SEQ ID NO: 231764 - RNA, 19 nt, Artificial Sequence
  Description of Artificial Sequence: Synthetic oligonucleotide
cuagugauucuguguucuu

SEQ ID NO: 231765 - RNA, 19 nt, Artificial Sequence
  Description of Artificial Sequence: Synthetic oligonucleotide
cuacagcgacggguagcac

SEQ ID NO: 231766 - RNA, 19 nt, Artificial Sequence
  Description of Artificial Sequence: Synthetic oligonucleotide
gcucccuguuauguuguuc

SEQ ID NO: 231767 - RNA, 19 nt, Artificial Sequence
  Description of Artificial Sequence: Synthetic oligonucleotide
gcgacggguagcacaucug

SEQ ID NO: 231768 - RNA, 19 nt, Artificial Sequence
  Description of Artificial Sequence: Synthetic oligonucleotide
ccaugcaugggagaauacu

SEQ ID NO: 231769 - RNA, 19 nt, Artificial Sequence
  Description of Artificial Sequence: Synthetic oligonucleotide
cggcaacaacgaucauuag

SEQ ID NO: 231770 - RNA, 19 nt, Artificial Sequence
  Description of Artificial Sequence: Synthetic oligonucleotide
ccgacgcacauguccugca

SEQ ID NO: 231771 - RNA, 19 nt, Artificial Sequence
  Description of Artificial Sequence: Synthetic oligonucleotide
uggggacguggugcauguu

SEQ ID NO: 231772 - RNA, 19 nt, Artificial Sequence
  Description of Artificial Sequence: Synthetic oligonucleotide
cgcucucuacagcgacggg

SEQ ID NO: 231773 - RNA, 19 nt, Artificial Sequence
  Description of Artificial Sequence: Synthetic oligonucleotide
cagcgacggguagcacauc

SEQ ID NO: 231774 - RNA, 19 nt, Artificial Sequence
  Description of Artificial Sequence: Synthetic oligonucleotide
ggcauuacuccgacacauu

SEQ ID NO: 231775 - RNA, 19 nt, Artificial Sequence
  Description of Artificial Sequence: Synthetic oligonucleotide
cgaucauuaggagccaguu

SEQ ID NO: 231776 - RNA, 19 nt, Artificial Sequence
  Description of Artificial Sequence: Synthetic oligonucleotide
ccccgagaugcaucuccaa

SEQ ID NO: 231777 - RNA, 19 nt, Artificial Sequence
  Description of Artificial Sequence: Synthetic oligonucleotide
cgacgcacauguccugcau

SEQ ID NO: 231778 - RNA, 19 nt, Artificial Sequence
  Description of Artificial Sequence: Synthetic oligonucleotide
aaaaucuagucccugauuc

SEQ ID NO: 231779 - RNA, 19 nt, Artificial Sequence
  Description of Artificial Sequence: Synthetic oligonucleotide
aauagcauaaauuccuccg

SEQ ID NO: 231780 - RNA, 19 nt, Artificial Sequence
  Description of Artificial Sequence: Synthetic oligonucleotide
aaaaugauugcccuugggg

SEQ ID NO: 231781 - RNA, 19 nt, Artificial Sequence
  Description of Artificial Sequence: Synthetic oligonucleotide
gauauauccagacagggag

SEQ ID NO: 231782 - RNA, 19 nt, Artificial Sequence
  Description of Artificial Sequence: Synthetic oligonucleotide
guagaugucagcaauagcg

SEQ ID NO: 231783 - RNA, 19 nt, Artificial Sequence
  Description of Artificial Sequence: Synthetic oligonucleotide
ugugugguaucccagaucc

SEQ ID NO: 231784 - RNA, 19 nt, Artificial Sequence
  Description of Artificial Sequence: Synthetic oligonucleotide
ucugacaaugagaucaagg

SEQ ID NO: 231785 - RNA, 19 nt, Artificial Sequence
  Description of Artificial Sequence: Synthetic oligonucleotide
aacuaauagcauaaauucc

SEQ ID NO: 231786 - RNA, 19 nt, Artificial Sequence
  Description of Artificial Sequence: Synthetic oligonucleotide
guaauugauauguccaucg

SEQ ID NO: 231787 - RNA, 19 nt, Artificial Sequence
  Description of Artificial Sequence: Synthetic oligonucleotide
aaaugauugcccuuggggu

SEQ ID NO: 231788 - RNA, 19 nt, Artificial Sequence
  Description of Artificial Sequence: Synthetic oligonucleotide
aaaugagugcuaucgggac

SEQ ID NO: 231789 - RNA, 19 nt, Artificial Sequence
  Description of Artificial Sequence: Synthetic oligonucleotide
aaugggaccucgcagugac

SEQ ID NO: 231790 - RNA, 19 nt, Artificial Sequence
  Description of Artificial Sequence: Synthetic oligonucleotide
aaugauugcccuugggguc

SEQ ID NO: 231791 - RNA, 19 nt, Artificial Sequence
  Description of Artificial Sequence: Synthetic oligonucleotide
uuaucgauauuccucagga

SEQ ID NO: 231792 - RNA, 19 nt, Artificial Sequence
  Description of Artificial Sequence: Synthetic oligonucleotide
aauugauauguccaucgug

SEQ ID NO: 231793 - RNA, 19 nt, Artificial Sequence
  Description of Artificial Sequence: Synthetic oligonucleotide
ucuugcaugggaaaggaga

SEQ ID NO: 231794 - RNA, 19 nt, Artificial Sequence
  Description of Artificial Sequence: Synthetic oligonucleotide
acuaaguguccacacguac

SEQ ID NO: 231795 - RNA, 19 nt, Artificial Sequence
  Description of Artificial Sequence: Synthetic oligonucleotide
ucgauauuccucaggauga

SEQ ID NO: 231796 - RNA, 19 nt, Artificial Sequence
  Description of Artificial Sequence: Synthetic oligonucleotide
uguagaacccacugggugc

SEQ ID NO: 231797 - RNA, 19 nt, Artificial Sequence
  Description of Artificial Sequence: Synthetic oligonucleotide
aacaugacuuacaccaugg

SEQ ID NO: 231798 - RNA, 19 nt, Artificial Sequence
  Description of Artificial Sequence: Synthetic oligonucleotide
cuaugaagggcacuacucg

SEQ ID NO: 231799 - RNA, 19 nt, Artificial Sequence
  Description of Artificial Sequence: Synthetic oligonucleotide
gacgcguacagacauagac

SEQ ID NO: 231800 - RNA, 19 nt, Artificial Sequence
  Description of Artificial Sequence: Synthetic oligonucleotide
agcaauagcgggguuaucg

SEQ ID NO: 231801 - RNA, 19 nt, Artificial Sequence
  Description of Artificial Sequence: Synthetic oligonucleotide
uucggaaucccaguaauug

SEQ ID NO: 231802 - RNA, 19 nt, Artificial Sequence
  Description of Artificial Sequence: Synthetic oligonucleotide
uaaaugaauaucuggccau

SEQ ID NO: 231803 - RNA, 19 nt, Artificial Sequence
  Description of Artificial Sequence: Synthetic oligonucleotide
acacuuugguugaacaucc

SEQ ID NO: 231804 - RNA, 19 nt, Artificial Sequence
  Description of Artificial Sequence: Synthetic oligonucleotide
guuaucgauauuccucagg

SEQ ID NO: 231805 - RNA, 19 nt, Artificial Sequence
  Description of Artificial Sequence: Synthetic oligonucleotide
uaugaagggcacuacucgc

SEQ ID NO: 231806 - RNA, 19 nt, Artificial Sequence
  Description of Artificial Sequence: Synthetic oligonucleotide
uaucaucgcucccaguugc

SEQ ID NO: 231807 - RNA, 19 nt, Artificial Sequence
  Description of Artificial Sequence: Synthetic oligonucleotide
uuugaaaggagggcccucg

SEQ ID NO: 231808 - RNA, 19 nt, Artificial Sequence
  Description of Artificial Sequence: Synthetic oligonucleotide
cuagcgaaaaccuucuuga

SEQ ID NO: 231809 - RNA, 19 nt, Artificial Sequence
  Description of Artificial Sequence: Synthetic oligonucleotide
caugguacugucagcacgc

SEQ ID NO: 231810 - RNA, 19 nt, Artificial Sequence
  Description of Artificial Sequence: Synthetic oligonucleotide
aaugagugcuaucgggacu

SEQ ID NO: 231811 - RNA, 19 nt, Artificial Sequence
  Description of Artificial Sequence: Synthetic oligonucleotide
acuuugguugaacauccag

SEQ ID NO: 231812 - RNA, 19 nt, Artificial Sequence
  Description of Artificial Sequence: Synthetic oligonucleotide
aguaauugauauguccauc

SEQ ID NO: 231813 - RNA, 19 nt, Artificial Sequence
  Description of Artificial Sequence: Synthetic oligonucleotide
guugguguaccgcacagug

SEQ ID NO: 231814 - RNA, 19 nt, Artificial Sequence
  Description of Artificial Sequence: Synthetic oligonucleotide
gaauagauguaggacuugc

SEQ ID NO: 231815 - RNA, 19 nt, Artificial Sequence
  Description of Artificial Sequence: Synthetic oligonucleotide
guugcuagucgguagggcc

SEQ ID NO: 231816 - RNA, 19 nt, Artificial Sequence
  Description of Artificial Sequence: Synthetic oligonucleotide
cuccgaguagucaucagcc

SEQ ID NO: 231817 - RNA, 19 nt, Artificial Sequence
  Description of Artificial Sequence: Synthetic oligonucleotide
acgacuucgggcucauagc

SEQ ID NO: 231818 - RNA, 19 nt, Artificial Sequence
  Description of Artificial Sequence: Synthetic oligonucleotide
agcaaaugagugcuaucgg

SEQ ID NO: 231819 - RNA, 19 nt, Artificial Sequence
  Description of Artificial Sequence: Synthetic oligonucleotide
uuuagcguggagcccagga

SEQ ID NO: 231820 - RNA, 19 nt, Artificial Sequence
  Description of Artificial Sequence: Synthetic oligonucleotide
uguguggccuuuuccagag

SEQ ID NO: 231821 - RNA, 19 nt, Artificial Sequence
  Description of Artificial Sequence: Synthetic oligonucleotide
uuaucaucgcucccaguug

SEQ ID NO: 231822 - RNA, 19 nt, Artificial Sequence
  Description of Artificial Sequence: Synthetic oligonucleotide
auagcauaaauuccuccgu

SEQ ID NO: 231823 - RNA, 19 nt, Artificial Sequence
  Description of Artificial Sequence: Synthetic oligonucleotide
ugcucuacccagaaugcug

SEQ ID NO: 231824 - RNA, 19 nt, Artificial Sequence
  Description of Artificial Sequence: Synthetic oligonucleotide
ucagucuggcuaugaaggg

SEQ ID NO: 231825 - RNA, 19 nt, Artificial Sequence
  Description of Artificial Sequence: Synthetic oligonucleotide
cagaaggacgcguacagac

SEQ ID NO: 231826 - RNA, 19 nt, Artificial Sequence
  Description of Artificial Sequence: Synthetic oligonucleotide
cucgcagugaccgagcccg

SEQ ID NO: 231827 - RNA, 19 nt, Artificial Sequence
  Description of Artificial Sequence: Synthetic oligonucleotide
agcgggguuaucgauauuc

SEQ ID NO: 231828 - RNA, 19 nt, Artificial Sequence
  Description of Artificial Sequence: Synthetic oligonucleotide
uaauugauauguccaucgu

SEQ ID NO: 231829 - RNA, 19 nt, Artificial Sequence
  Description of Artificial Sequence: Synthetic oligonucleotide
auagcaaaugagugcuauc

SEQ ID NO: 231830 - RNA, 19 nt, Artificial Sequence
  Description of Artificial Sequence: Synthetic oligonucleotide
gcaaaugagugcuaucggg

SEQ ID NO: 231831 - RNA, 19 nt, Artificial Sequence
  Description of Artificial Sequence: Synthetic oligonucleotide
caaugugugcucauccagc

SEQ ID NO: 231832 - RNA, 19 nt, Artificial Sequence
  Description of Artificial Sequence: Synthetic oligonucleotide
aguagacaccugcucuacc

SEQ ID NO: 231833 - RNA, 19 nt, Artificial Sequence
  Description of Artificial Sequence: Synthetic oligonucleotide
acuacucgccuagacaugg

SEQ ID NO: 231834 - RNA, 19 nt, Artificial Sequence
  Description of Artificial Sequence: Synthetic oligonucleotide
gucacuaaguguccacacg

SEQ ID NO: 231835 - RNA, 19 nt, Artificial Sequence
  Description of Artificial Sequence: Synthetic oligonucleotide
cauugaagcauggugauca

SEQ ID NO: 231836 - RNA, 19 nt, Artificial Sequence
  Description of Artificial Sequence: Synthetic oligonucleotide
acuuacaccauggaguaga

SEQ ID NO: 231837 - RNA, 19 nt, Artificial Sequence
  Description of Artificial Sequence: Synthetic oligonucleotide
agcauaaauuccuccguca

SEQ ID NO: 231838 - RNA, 19 nt, Artificial Sequence
  Description of Artificial Sequence: Synthetic oligonucleotide
uggaauguuccacacucuc

SEQ ID NO: 231839 - RNA, 19 nt, Artificial Sequence
  Description of Artificial Sequence: Synthetic oligonucleotide
auccucgcccacuuguuac

SEQ ID NO: 231840 - RNA, 19 nt, Artificial Sequence
  Description of Artificial Sequence: Synthetic oligonucleotide
uugauauguccaucguggc

SEQ ID NO: 231841 - RNA, 19 nt, Artificial Sequence
  Description of Artificial Sequence: Synthetic oligonucleotide
ucguacggcauccucgccc

SEQ ID NO: 231842 - RNA, 19 nt, Artificial Sequence
  Description of Artificial Sequence: Synthetic oligonucleotide
ucgcccacuuguuacggcg

SEQ ID NO: 231843 - RNA, 19 nt, Artificial Sequence
  Description of Artificial Sequence: Synthetic oligonucleotide
uucuuuagcguggagccca

SEQ ID NO: 231844 - RNA, 19 nt, Artificial Sequence
  Description of Artificial Sequence: Synthetic oligonucleotide
augaagggcacuacucgcc

SEQ ID NO: 231845 - RNA, 19 nt, Artificial Sequence
  Description of Artificial Sequence: Synthetic oligonucleotide
uguuucggaaucccaguaa

SEQ ID NO: 231846 - RNA, 19 nt, Artificial Sequence
  Description of Artificial Sequence: Synthetic oligonucleotide
ucggaaucccaguaauuga

SEQ ID NO: 231847 - RNA, 19 nt, Artificial Sequence
  Description of Artificial Sequence: Synthetic oligonucleotide
uagcauaaauuccuccguc

SEQ ID NO: 231848 - RNA, 19 nt, Artificial Sequence
  Description of Artificial Sequence: Synthetic oligonucleotide
caguaaguuuucagguacg

SEQ ID NO: 231849 - RNA, 19 nt, Artificial Sequence
  Description of Artificial Sequence: Synthetic oligonucleotide
caaaugagugcuaucggga

SEQ ID NO: 231850 - RNA, 19 nt, Artificial Sequence
  Description of Artificial Sequence: Synthetic oligonucleotide
cuuccggaauagauguagg

SEQ ID NO: 231851 - RNA, 19 nt, Artificial Sequence
  Description of Artificial Sequence: Synthetic oligonucleotide
acuuguuacggcgcagcgc

SEQ ID NO: 231852 - RNA, 19 nt, Artificial Sequence
  Description of Artificial Sequence: Synthetic oligonucleotide
uuccggaauagauguagga

SEQ ID NO: 231853 - RNA, 19 nt, Artificial Sequence
  Description of Artificial Sequence: Synthetic oligonucleotide
acaguuaucaucgcuccca

SEQ ID NO: 231854 - RNA, 19 nt, Artificial Sequence
  Description of Artificial Sequence: Synthetic oligonucleotide
uguuacggcgcagcgcucg

SEQ ID NO: 231855 - RNA, 19 nt, Artificial Sequence
  Description of Artificial Sequence: Synthetic oligonucleotide
cacguugacaucccaaauc

SEQ ID NO: 231856 - RNA, 19 nt, Artificial Sequence
  Description of Artificial Sequence: Synthetic oligonucleotide
guugucgauacugaagcac

SEQ ID NO: 231857 - RNA, 19 nt, Artificial Sequence
  Description of Artificial Sequence: Synthetic oligonucleotide
gggagcguuacagaaauag

SEQ ID NO: 231858 - RNA, 19 nt, Artificial Sequence
  Description of Artificial Sequence: Synthetic oligonucleotide
uuucagaaggacgcguaca

SEQ ID NO: 231859 - RNA, 19 nt, Artificial Sequence
  Description of Artificial Sequence: Synthetic oligonucleotide
cuagucccugauucggucc

SEQ ID NO: 231860 - RNA, 19 nt, Artificial Sequence
  Description of Artificial Sequence: Synthetic oligonucleotide
aaagcggcugugaucacca

SEQ ID NO: 231861 - RNA, 19 nt, Artificial Sequence
  Description of Artificial Sequence: Synthetic oligonucleotide
cucgaaugggaccucgcag

SEQ ID NO: 231862 - RNA, 19 nt, Artificial Sequence
  Description of Artificial Sequence: Synthetic oligonucleotide
cagauaguugauauaucca

SEQ ID NO: 231863 - RNA, 19 nt, Artificial Sequence
  Description of Artificial Sequence: Synthetic oligonucleotide
cccaguaauugauaugucc

SEQ ID NO: 231864 - RNA, 19 nt, Artificial Sequence
  Description of Artificial Sequence: Synthetic oligonucleotide
acgcacuugccauuggugu

SEQ ID NO: 231865 - RNA, 19 nt, Artificial Sequence
  Description of Artificial Sequence: Synthetic oligonucleotide
aucucguacggcauccucg

SEQ ID NO: 231866 - RNA, 19 nt, Artificial Sequence
  Description of Artificial Sequence: Synthetic oligonucleotide
uugcuagucgguagggccu

SEQ ID NO: 231867 - RNA, 19 nt, Artificial Sequence
  Description of Artificial Sequence: Synthetic oligonucleotide
auagcgggguuaucgauau

SEQ ID NO: 231868 - RNA, 19 nt, Artificial Sequence
  Description of Artificial Sequence: Synthetic oligonucleotide
uugaucucguacggcaucc

SEQ ID NO: 231869 - RNA, 19 nt, Artificial Sequence
  Description of Artificial Sequence: Synthetic oligonucleotide
aggggagcguuacagaaau

SEQ ID NO: 231870 - RNA, 19 nt, Artificial Sequence
  Description of Artificial Sequence: Synthetic oligonucleotide
uggccaucggcacuagcug

SEQ ID NO: 231871 - RNA, 19 nt, Artificial Sequence
  Description of Artificial Sequence: Synthetic oligonucleotide
ugcaaacuguuacugucua

SEQ ID NO: 231872 - RNA, 19 nt, Artificial Sequence
  Description of Artificial Sequence: Synthetic oligonucleotide
acggcgauccucuuacugu

SEQ ID NO: 231873 - RNA, 19 nt, Artificial Sequence
  Description of Artificial Sequence: Synthetic oligonucleotide
uccagauaguugauauauc

SEQ ID NO: 231874 - RNA, 19 nt, Artificial Sequence
  Description of Artificial Sequence: Synthetic oligonucleotide
acucgccuagacaugguac

SEQ ID NO: 231875 - RNA, 19 nt, Artificial Sequence
  Description of Artificial Sequence: Synthetic oligonucleotide
gcuagcgaaaaccuucuug

SEQ ID NO: 231876 - RNA, 19 nt, Artificial Sequence
  Description of Artificial Sequence: Synthetic oligonucleotide
uaacuccagggagacagcc

SEQ ID NO: 231877 - RNA, 19 nt, Artificial Sequence
  Description of Artificial Sequence: Synthetic oligonucleotide
accucgcagugaccgagcc

SEQ ID NO: 231878 - RNA, 19 nt, Artificial Sequence
  Description of Artificial Sequence: Synthetic oligonucleotide
uccucgcccacuuguuacg

SEQ ID NO: 231879 - RNA, 19 nt, Artificial Sequence
  Description of Artificial Sequence: Synthetic oligonucleotide
uuugcaugguguccauaaa

SEQ ID NO: 231880 - RNA, 19 nt, Artificial Sequence
  Description of Artificial Sequence: Synthetic oligonucleotide
aggacgcguacagacauag

SEQ ID NO: 231881 - RNA, 19 nt, Artificial Sequence
  Description of Artificial Sequence: Synthetic oligonucleotide
aauagcgggguuaucgaua

SEQ ID NO: 231882 - RNA, 19 nt, Artificial Sequence
  Description of Artificial Sequence: Synthetic oligonucleotide
cuagcuguggcaaaccugu

SEQ ID NO: 231883 - RNA, 19 nt, Artificial Sequence
  Description of Artificial Sequence: Synthetic oligonucleotide
ugcuaucgggacuccaacu

SEQ ID NO: 231884 - RNA, 19 nt, Artificial Sequence
  Description of Artificial Sequence: Synthetic oligonucleotide
uccuccgucaugagccuug

SEQ ID NO: 231885 - RNA, 19 nt, Artificial Sequence
  Description of Artificial Sequence: Synthetic oligonucleotide
uguucuccgaguagucauc

SEQ ID NO: 231886 - RNA, 19 nt, Artificial Sequence
  Description of Artificial Sequence: Synthetic oligonucleotide
ggguuaucgauauuccuca

SEQ ID NO: 231887 - RNA, 19 nt, Artificial Sequence
  Description of Artificial Sequence: Synthetic oligonucleotide
ccaguaauugauaugucca

SEQ ID NO: 231888 - RNA, 19 nt, Artificial Sequence
  Description of Artificial Sequence: Synthetic oligonucleotide
cuacccagcuuccugauaa

SEQ ID NO: 231889 - RNA, 19 nt, Artificial Sequence
  Description of Artificial Sequence: Synthetic oligonucleotide
cuuguuacggcgcagcgcu

SEQ ID NO: 231890 - RNA, 19 nt, Artificial Sequence
  Description of Artificial Sequence: Synthetic oligonucleotide
aucggcacuagcuguggca

SEQ ID NO: 231891 - RNA, 19 nt, Artificial Sequence
  Description of Artificial Sequence: Synthetic oligonucleotide
uuucggaaucccaguaauu

SEQ ID NO: 231892 - RNA, 19 nt, Artificial Sequence
  Description of Artificial Sequence: Synthetic oligonucleotide
ucuuuagcguggagcccag

SEQ ID NO: 231893 - RNA, 19 nt, Artificial Sequence
  Description of Artificial Sequence: Synthetic oligonucleotide
cuugaucucguacggcauc

SEQ ID NO: 231894 - RNA, 19 nt, Artificial Sequence
  Description of Artificial Sequence: Synthetic oligonucleotide
uugguguaccgcacagugu

SEQ ID NO: 231895 - RNA, 19 nt, Artificial Sequence
  Description of Artificial Sequence: Synthetic oligonucleotide
uaucgauauuccucaggau

SEQ ID NO: 231896 - RNA, 19 nt, Artificial Sequence
  Description of Artificial Sequence: Synthetic oligonucleotide
uaguuaagagaagggugcu

SEQ ID NO: 231897 - RNA, 19 nt, Artificial Sequence
  Description of Artificial Sequence: Synthetic oligonucleotide
cacuuguuacggcgcagcg

SEQ ID NO: 231898 - RNA, 19 nt, Artificial Sequence
  Description of Artificial Sequence: Synthetic oligonucleotide
agcguuacagaaauaguua

SEQ ID NO: 231899 - RNA, 19 nt, Artificial Sequence
  Description of Artificial Sequence: Synthetic oligonucleotide
aggaggacaaucuguccaa

SEQ ID NO: 231900 - RNA, 19 nt, Artificial Sequence
  Description of Artificial Sequence: Synthetic oligonucleotide
aaucugacaaugagaucaa

SEQ ID NO: 231901 - RNA, 19 nt, Artificial Sequence
  Description of Artificial Sequence: Synthetic oligonucleotide
uucauugucuggugaccaa

SEQ ID NO: 231902 - RNA, 19 nt, Artificial Sequence
  Description of Artificial Sequence: Synthetic oligonucleotide
ggauggauuuacugugacc

SEQ ID NO: 231903 - RNA, 19 nt, Artificial Sequence
  Description of Artificial Sequence: Synthetic oligonucleotide
caguuaucaucgcucccag

SEQ ID NO: 231904 - RNA, 19 nt, Artificial Sequence
  Description of Artificial Sequence: Synthetic oligonucleotide
ugcacacgaccacaguaua

SEQ ID NO: 231905 - RNA, 19 nt, Artificial Sequence
  Description of Artificial Sequence: Synthetic oligonucleotide
agaggcgucaugggaagug

SEQ ID NO: 231906 - RNA, 19 nt, Artificial Sequence
  Description of Artificial Sequence: Synthetic oligonucleotide
augggaucuggggauaacu

SEQ ID NO: 231907 - RNA, 19 nt, Artificial Sequence
  Description of Artificial Sequence: Synthetic oligonucleotide
uacucgccuagacauggua

SEQ ID NO: 231908 - RNA, 19 nt, Artificial Sequence
  Description of Artificial Sequence: Synthetic oligonucleotide
cacauguccccaugggauc

SEQ ID NO: 231909 - RNA, 19 nt, Artificial Sequence
  Description of Artificial Sequence: Synthetic oligonucleotide
gucgguagggccuguucug

SEQ ID NO: 231910 - RNA, 19 nt, Artificial Sequence
  Description of Artificial Sequence: Synthetic oligonucleotide
gaucucguacggcauccuc

SEQ ID NO: 231911 - RNA, 19 nt, Artificial Sequence
  Description of Artificial Sequence: Synthetic oligonucleotide
cacggcgauccucuuacug

SEQ ID NO: 231912 - RNA, 19 nt, Artificial Sequence
  Description of Artificial Sequence: Synthetic oligonucleotide
ccucaguaggugauugucc

SEQ ID NO: 231913 - RNA, 19 nt, Artificial Sequence
  Description of Artificial Sequence: Synthetic oligonucleotide
augguacugucagcacgcc

SEQ ID NO: 231914 - RNA, 19 nt, Artificial Sequence
  Description of Artificial Sequence: Synthetic oligonucleotide
gagcguuacagaaauaguu

SEQ ID NO: 231915 - RNA, 19 nt, Artificial Sequence
  Description of Artificial Sequence: Synthetic oligonucleotide
acgcguacagacauagacu

SEQ ID NO: 231916 - RNA, 19 nt, Artificial Sequence
  Description of Artificial Sequence: Synthetic oligonucleotide
aguuaucaucgcucccagu

SEQ ID NO: 231917 - RNA, 19 nt, Artificial Sequence
  Description of Artificial Sequence: Synthetic oligonucleotide
ggucacuaaguguccacac

SEQ ID NO: 231918 - RNA, 19 nt, Artificial Sequence
  Description of Artificial Sequence: Synthetic oligonucleotide
cguuacagaaauaguuaag

SEQ ID NO: 231919 - RNA, 19 nt, Artificial Sequence
  Description of Artificial Sequence: Synthetic oligonucleotide
gaguagacaccugcucuac

SEQ ID NO: 231920 - RNA, 19 nt, Artificial Sequence
  Description of Artificial Sequence: Synthetic oligonucleotide
acaaagcggcugugaucac

SEQ ID NO: 231921 - RNA, 19 nt, Artificial Sequence
  Description of Artificial Sequence: Synthetic oligonucleotide
gguuaucgauauuccucag

SEQ ID NO: 231922 - RNA, 19 nt, Artificial Sequence
  Description of Artificial Sequence: Synthetic oligonucleotide
uaucuggccaucggcacua

SEQ ID NO: 231923 - RNA, 19 nt, Artificial Sequence
  Description of Artificial Sequence: Synthetic oligonucleotide
ugcucccuacccagcuucc

SEQ ID NO: 231924 - RNA, 19 nt, Artificial Sequence
  Description of Artificial Sequence: Synthetic oligonucleotide
acgcacuuugccauccgag

SEQ ID NO: 231925 - RNA, 19 nt, Artificial Sequence
  Description of Artificial Sequence: Synthetic oligonucleotide
ugaccaaugugugcucauc

SEQ ID NO: 231926 - RNA, 19 nt, Artificial Sequence
  Description of Artificial Sequence: Synthetic oligonucleotide
cgcguacagacauagacuc

SEQ ID NO: 231927 - RNA, 19 nt, Artificial Sequence
  Description of Artificial Sequence: Synthetic oligonucleotide
gcuaugaagggcacuacuc

SEQ ID NO: 231928 - RNA, 19 nt, Artificial Sequence
  Description of Artificial Sequence: Synthetic oligonucleotide
cugugugguaucccagauc

SEQ ID NO: 231929 - RNA, 19 nt, Artificial Sequence
  Description of Artificial Sequence: Synthetic oligonucleotide
cuacacacuuugguugaac

SEQ ID NO: 231930 - RNA, 19 nt, Artificial Sequence
  Description of Artificial Sequence: Synthetic oligonucleotide
gaugggcauguucugugua

SEQ ID NO: 231931 - RNA, 19 nt, Artificial Sequence
  Description of Artificial Sequence: Synthetic oligonucleotide
gcguuacagaaauaguuaa

SEQ ID NO: 231932 - RNA, 19 nt, Artificial Sequence
  Description of Artificial Sequence: Synthetic oligonucleotide
cacuacucgccuagacaug

SEQ ID NO: 231933 - RNA, 19 nt, Artificial Sequence
  Description of Artificial Sequence: Synthetic oligonucleotide
agaaugcugcacaguuauc

SEQ ID NO: 231934 - RNA, 19 nt, Artificial Sequence
  Description of Artificial Sequence: Synthetic oligonucleotide
gacuuacaccauggaguag

SEQ ID NO: 231935 - RNA, 19 nt, Artificial Sequence
  Description of Artificial Sequence: Synthetic oligonucleotide
aucguggcuuccggaauag

SEQ ID NO: 231936 - RNA, 19 nt, Artificial Sequence
  Description of Artificial Sequence: Synthetic oligonucleotide
guagaacccacugggugca

SEQ ID NO: 231937 - RNA, 19 nt, Artificial Sequence
  Description of Artificial Sequence: Synthetic oligonucleotide
cagacauagacucccugua

SEQ ID NO: 231938 - RNA, 19 nt, Artificial Sequence
  Description of Artificial Sequence: Synthetic oligonucleotide
ugcuagucgguagggccug

SEQ ID NO: 231939 - RNA, 19 nt, Artificial Sequence
  Description of Artificial Sequence: Synthetic oligonucleotide
agcggcugugaucaccaau

SEQ ID NO: 231940 - RNA, 19 nt, Artificial Sequence
  Description of Artificial Sequence: Synthetic oligonucleotide
uggugggcaguaaguuuuc

SEQ ID NO: 231941 - RNA, 19 nt, Artificial Sequence
  Description of Artificial Sequence: Synthetic oligonucleotide
uggaguaaacacgcacuuu

SEQ ID NO: 231942 - RNA, 19 nt, Artificial Sequence
  Description of Artificial Sequence: Synthetic oligonucleotide
aucuugcaugggaaaggag

SEQ ID NO: 231943 - RNA, 19 nt, Artificial Sequence
  Description of Artificial Sequence: Synthetic oligonucleotide
gugcacggccacgacuucg

SEQ ID NO: 231944 - RNA, 19 nt, Artificial Sequence
  Description of Artificial Sequence: Synthetic oligonucleotide
gcaauagcgggguuaucga

SEQ ID NO: 231945 - RNA, 19 nt, Artificial Sequence
  Description of Artificial Sequence: Synthetic oligonucleotide
caucggcacuagcuguggc

SEQ ID NO: 231946 - RNA, 19 nt, Artificial Sequence
  Description of Artificial Sequence: Synthetic oligonucleotide
gggauaacuccagggagac

SEQ ID NO: 231947 - RNA, 19 nt, Artificial Sequence
  Description of Artificial Sequence: Synthetic oligonucleotide
ccgcacacaguugacaaag

SEQ ID NO: 231948 - RNA, 19 nt, Artificial Sequence
  Description of Artificial Sequence: Synthetic oligonucleotide
aggguauucgcaggcccug

SEQ ID NO: 231949 - RNA, 19 nt, Artificial Sequence
  Description of Artificial Sequence: Synthetic oligonucleotide
ggaauguuccacacucuca

SEQ ID NO: 231950 - RNA, 19 nt, Artificial Sequence
  Description of Artificial Sequence: Synthetic oligonucleotide
ggaauagauguaggacuug

SEQ ID NO: 231951 - RNA, 19 nt, Artificial Sequence
  Description of Artificial Sequence: Synthetic oligonucleotide
uacggcauccucgcccacu

SEQ ID NO: 231952 - RNA, 19 nt, Artificial Sequence
  Description of Artificial Sequence: Synthetic oligonucleotide
ucgcagugaccgagcccgg

SEQ ID NO: 231953 - RNA, 19 nt, Artificial Sequence
  Description of Artificial Sequence: Synthetic oligonucleotide
gucuccgccgaggaucuug

SEQ ID NO: 231954 - RNA, 19 nt, Artificial Sequence
  Description of Artificial Sequence: Synthetic oligonucleotide
ggccccuuggcuucuagga

SEQ ID NO: 231955 - RNA, 19 nt, Artificial Sequence
  Description of Artificial Sequence: Synthetic oligonucleotide
cucgccuagacaugguacu

SEQ ID NO: 231956 - RNA, 19 nt, Artificial Sequence
  Description of Artificial Sequence: Synthetic oligonucleotide
cgacuucgggcucauagcc

SEQ ID NO: 231957 - RNA, 19 nt, Artificial Sequence
  Description of Artificial Sequence: Synthetic oligonucleotide
ggcaucacacacagccagg

SEQ ID NO: 231958 - RNA, 19 nt, Artificial Sequence
  Description of Artificial Sequence: Synthetic oligonucleotide
auucgguccguggggugag

SEQ ID NO: 231959 - RNA, 19 nt, Artificial Sequence
  Description of Artificial Sequence: Synthetic oligonucleotide
gaaugggaccucgcaguga

SEQ ID NO: 231960 - RNA, 19 nt, Artificial Sequence
  Description of Artificial Sequence: Synthetic oligonucleotide
gcacuacucgccuagacau

SEQ ID NO: 231961 - RNA, 19 nt, Artificial Sequence
  Description of Artificial Sequence: Synthetic oligonucleotide
gcagcgcucgaaugggacc

SEQ ID NO: 231962 - RNA, 19 nt, Artificial Sequence
  Description of Artificial Sequence: Synthetic oligonucleotide
cacuauagucccucagugu

SEQ ID NO: 231963 - RNA, 19 nt, Artificial Sequence
  Description of Artificial Sequence: Synthetic oligonucleotide
ugaucucguacggcauccu

SEQ ID NO: 231964 - RNA, 19 nt, Artificial Sequence
  Description of Artificial Sequence: Synthetic oligonucleotide
uggcuaugaagggcacuac

SEQ ID NO: 231965 - RNA, 19 nt, Artificial Sequence
  Description of Artificial Sequence: Synthetic oligonucleotide
caaaucuuagagguuuuau

SEQ ID NO: 231966 - RNA, 19 nt, Artificial Sequence
  Description of Artificial Sequence: Synthetic oligonucleotide
agggcccucgaagaaugcu

SEQ ID NO: 231967 - RNA, 19 nt, Artificial Sequence
  Description of Artificial Sequence: Synthetic oligonucleotide
ggaccucgcagugaccgag

SEQ ID NO: 231968 - RNA, 19 nt, Artificial Sequence
  Description of Artificial Sequence: Synthetic oligonucleotide
ggcgcagcgcucgaauggg

SEQ ID NO: 231969 - RNA, 19 nt, Artificial Sequence
  Description of Artificial Sequence: Synthetic oligonucleotide
ggcccucgaagaaugcugc

SEQ ID NO: 231970 - RNA, 19 nt, Artificial Sequence
  Description of Artificial Sequence: Synthetic oligonucleotide
gaccucgcagugaccgagc

SEQ ID NO: 231971 - RNA, 19 nt, Artificial Sequence
  Description of Artificial Sequence: Synthetic oligonucleotide
cuuuagcguggagcccagg

SEQ ID NO: 231972 - RNA, 19 nt, Artificial Sequence
  Description of Artificial Sequence: Synthetic oligonucleotide
gaagggcacuacucgccua

SEQ ID NO: 231973 - RNA, 19 nt, Artificial Sequence
  Description of Artificial Sequence: Synthetic oligonucleotide
gcagccggugagcaucuug

SEQ ID NO: 231974 - RNA, 19 nt, Artificial Sequence
  Description of Artificial Sequence: Synthetic oligonucleotide
gacagacaacagucaagau

SEQ ID NO: 231975 - RNA, 19 nt, Artificial Sequence
  Description of Artificial Sequence: Synthetic oligonucleotide
caguugacaaagcggcugu

SEQ ID NO: 231976 - RNA, 19 nt, Artificial Sequence
  Description of Artificial Sequence: Synthetic oligonucleotide
agcggcguccucaguaggu

SEQ ID NO: 231977 - RNA, 19 nt, Artificial Sequence
  Description of Artificial Sequence: Synthetic oligonucleotide
cacuuugguugaacaucca

SEQ ID NO: 231978 - RNA, 19 nt, Artificial Sequence
  Description of Artificial Sequence: Synthetic oligonucleotide
uuguuacggcgcagcgcuc

SEQ ID NO: 231979 - RNA, 19 nt, Artificial Sequence
  Description of Artificial Sequence: Synthetic oligonucleotide
gaggguauucgcaggcccu

SEQ ID NO: 231980 - RNA, 19 nt, Artificial Sequence
  Description of Artificial Sequence: Synthetic oligonucleotide
cacgcacuuugccauccga

SEQ ID NO: 231981 - RNA, 19 nt, Artificial Sequence
  Description of Artificial Sequence: Synthetic oligonucleotide
ccacuuguuacggcgcagc

SEQ ID NO: 231982 - RNA, 19 nt, Artificial Sequence
  Description of Artificial Sequence: Synthetic oligonucleotide
gcgggguuaucgauauucc

SEQ ID NO: 231983 - RNA, 19 nt, Artificial Sequence
  Description of Artificial Sequence: Synthetic oligonucleotide
gagggcccucgaagaaugc

SEQ ID NO: 231984 - RNA, 19 nt, Artificial Sequence
  Description of Artificial Sequence: Synthetic oligonucleotide
guuacggcgcagcgcucga

SEQ ID NO: 231985 - RNA, 19 nt, Artificial Sequence
  Description of Artificial Sequence: Synthetic oligonucleotide
aaggacgcguacagacaua

SEQ ID NO: 231986 - RNA, 19 nt, Artificial Sequence
  Description of Artificial Sequence: Synthetic oligonucleotide
gggucacuaaguguccaca

SEQ ID NO: 231987 - RNA, 19 nt, Artificial Sequence
  Description of Artificial Sequence: Synthetic oligonucleotide
caauagcgggguuaucgau

SEQ ID NO: 231988 - RNA, 19 nt, Artificial Sequence
  Description of Artificial Sequence: Synthetic oligonucleotide
gaccacggcgauccucuua

SEQ ID NO: 231989 - RNA, 19 nt, Artificial Sequence
  Description of Artificial Sequence: Synthetic oligonucleotide
agcgcucgaaugggaccuc

SEQ ID NO: 231990 - RNA, 19 nt, Artificial Sequence
  Description of Artificial Sequence: Synthetic oligonucleotide
cacuagcuguggcaaaccu

SEQ ID NO: 231991 - RNA, 19 nt, Artificial Sequence
  Description of Artificial Sequence: Synthetic oligonucleotide
ggagacagccauguaacau

SEQ ID NO: 231992 - RNA, 19 nt, Artificial Sequence
  Description of Artificial Sequence: Synthetic oligonucleotide
aucccaaaucuuagagguu

SEQ ID NO: 231993 - RNA, 19 nt, Artificial Sequence
  Description of Artificial Sequence: Synthetic oligonucleotide
gccaucggcacuagcugug

SEQ ID NO: 231994 - RNA, 19 nt, Artificial Sequence
  Description of Artificial Sequence: Synthetic oligonucleotide
agaacccacugggugcaua

SEQ ID NO: 231995 - RNA, 19 nt, Artificial Sequence
  Description of Artificial Sequence: Synthetic oligonucleotide
ggagcguuacagaaauagu

SEQ ID NO: 231996 - RNA, 19 nt, Artificial Sequence
  Description of Artificial Sequence: Synthetic oligonucleotide
cuccaacuaauagcauaaa

SEQ ID NO: 231997 - RNA, 19 nt, Artificial Sequence
  Description of Artificial Sequence: Synthetic oligonucleotide
uuacggcgcagcgcucgaa

SEQ ID NO: 231998 - RNA, 19 nt, Artificial Sequence
  Description of Artificial Sequence: Synthetic oligonucleotide
ccaucggcacuagcugugg

SEQ ID NO: 231999 - RNA, 19 nt, Artificial Sequence
  Description of Artificial Sequence: Synthetic oligonucleotide
ggguauucgcaggcccugc

SEQ ID NO: 232000 - RNA, 19 nt, Artificial Sequence
  Description of Artificial Sequence: Synthetic oligonucleotide
agucccugauucgguccgu

SEQ ID NO: 232001 - RNA, 19 nt, Artificial Sequence
  Description of Artificial Sequence: Synthetic oligonucleotide
ccucgcccacuuguuacgg

SEQ ID NO: 232002 - RNA, 19 nt, Artificial Sequence
  Description of Artificial Sequence: Synthetic oligonucleotide
ccucgcagugaccgagccc

SEQ ID NO: 232003 - RNA, 19 nt, Artificial Sequence
  Description of Artificial Sequence: Synthetic oligonucleotide
gguauucgcaggcccugcu

SEQ ID NO: 232004 - RNA, 19 nt, Artificial Sequence
  Description of Artificial Sequence: Synthetic oligonucleotide
gcggcguccucaguaggug

SEQ ID NO: 232005 - RNA, 19 nt, Artificial Sequence
  Description of Artificial Sequence: Synthetic oligonucleotide
cguccucaguaggugauug

SEQ ID NO: 232006 - RNA, 19 nt, Artificial Sequence
  Description of Artificial Sequence: Synthetic oligonucleotide
cagcgcucgaaugggaccu

SEQ ID NO: 232007 - RNA, 19 nt, Artificial Sequence
  Description of Artificial Sequence: Synthetic oligonucleotide
ggccaucggcacuagcugu

SEQ ID NO: 232008 - RNA, 19 nt, Artificial Sequence
  Description of Artificial Sequence: Synthetic oligonucleotide
uagcgggguuaucgauauu

SEQ ID NO: 232009 - RNA, 19 nt, Artificial Sequence
  Description of Artificial Sequence: Synthetic oligonucleotide
gcccacuuguuacggcgca

SEQ ID NO: 232010 - RNA, 19 nt, Artificial Sequence
  Description of Artificial Sequence: Synthetic oligonucleotide
cgcccacuuguuacggcgc

SEQ ID NO: 232011 - RNA, 19 nt, Artificial Sequence
  Description of Artificial Sequence: Synthetic oligonucleotide
aggcgggaaggggagcguu

SEQ ID NO: 232012 - RNA, 19 nt, Artificial Sequence
  Description of Artificial Sequence: Synthetic oligonucleotide
cuacucgccuagacauggu

SEQ ID NO: 232013 - RNA, 19 nt, Artificial Sequence
  Description of Artificial Sequence: Synthetic oligonucleotide
cccacuuguuacggcgcag

SEQ ID NO: 232014 - RNA, 19 nt, Artificial Sequence
  Description of Artificial Sequence: Synthetic oligonucleotide
ccuccgucaugagccuugc

SEQ ID NO: 232015 - RNA, 19 nt, Artificial Sequence
  Description of Artificial Sequence: Synthetic oligonucleotide
ccaaaucuuagagguuuua

SEQ ID NO: 232016 - RNA, 19 nt, Artificial Sequence
  Description of Artificial Sequence: Synthetic oligonucleotide
acggucuggugggcaguaa

SEQ ID NO: 232017 - RNA, 19 nt, Artificial Sequence
  Description of Artificial Sequence: Synthetic oligonucleotide
ccagauccuuagcuuccca

SEQ ID NO: 232018 - RNA, 19 nt, Artificial Sequence
  Description of Artificial Sequence: Synthetic oligonucleotide
cggaauagauguaggacuu

SEQ ID NO: 232019 - RNA, 19 nt, Artificial Sequence
  Description of Artificial Sequence: Synthetic oligonucleotide
ggaugacgcacuugccauu

SEQ ID NO: 232020 - RNA, 19 nt, Artificial Sequence
  Description of Artificial Sequence: Synthetic oligonucleotide
ggacgcguacagacauaga

SEQ ID NO: 232021 - RNA, 19 nt, Artificial Sequence
  Description of Artificial Sequence: Synthetic oligonucleotide
gugugguaucccagauccu

SEQ ID NO: 232022 - RNA, 19 nt, Artificial Sequence
  Description of Artificial Sequence: Synthetic oligonucleotide
ggaggcuagcgaaaaccuu

SEQ ID NO: 232023 - RNA, 19 nt, Artificial Sequence
  Description of Artificial Sequence: Synthetic oligonucleotide
gcacacgaccacaguauau

SEQ ID NO: 232024 - RNA, 19 nt, Artificial Sequence
  Description of Artificial Sequence: Synthetic oligonucleotide
ggcguccucaguaggugau

SEQ ID NO: 232025 - RNA, 19 nt, Artificial Sequence
  Description of Artificial Sequence: Synthetic oligonucleotide
cgggguuaucgauauuccu

SEQ ID NO: 232026 - RNA, 19 nt, Artificial Sequence
  Description of Artificial Sequence: Synthetic oligonucleotide
cagaggcgucaugggaagu

SEQ ID NO: 232027 - RNA, 19 nt, Artificial Sequence
  Description of Artificial Sequence: Synthetic oligonucleotide
cuccgucaugagccuugcu

SEQ ID NO: 232028 - RNA, 19 nt, Artificial Sequence
  Description of Artificial Sequence: Synthetic oligonucleotide
ccaugggaucuggggauaa

SEQ ID NO: 232029 - RNA, 19 nt, Artificial Sequence
  Description of Artificial Sequence: Synthetic oligonucleotide
ggcuagcgaaaaccuucuu

SEQ ID NO: 232030 - RNA, 19 nt, Artificial Sequence
  Description of Artificial Sequence: Synthetic oligonucleotide
ggugagcggcguccucagu

SEQ ID NO: 232031 - RNA, 19 nt, Artificial Sequence
  Description of Artificial Sequence: Synthetic oligonucleotide
cuagucgguagggccuguu

SEQ ID NO: 232032 - RNA, 19 nt, Artificial Sequence
  Description of Artificial Sequence: Synthetic oligonucleotide
cuuccccgaccacggcgau

SEQ ID NO: 232033 - RNA, 19 nt, Artificial Sequence
  Description of Artificial Sequence: Synthetic oligonucleotide
ggggagcguuacagaaaua

SEQ ID NO: 232034 - RNA, 19 nt, Artificial Sequence
  Description of Artificial Sequence: Synthetic oligonucleotide
ccguggggugagcggcguc

SEQ ID NO: 232035 - RNA, 19 nt, Artificial Sequence
  Description of Artificial Sequence: Synthetic oligonucleotide
ccacggcgauccucuuacu

SEQ ID NO: 232036 - RNA, 19 nt, Artificial Sequence
  Description of Artificial Sequence: Synthetic oligonucleotide
ccccgaccacggcgauccu

SEQ ID NO: 232037 - RNA, 19 nt, Artificial Sequence
  Description of Artificial Sequence: Synthetic oligonucleotide
ucaucagugagcuugaaag

SEQ ID NO: 232038 - RNA, 19 nt, Artificial Sequence
  Description of Artificial Sequence: Synthetic oligonucleotide
auaauauaggucuccaugg

SEQ ID NO: 232039 - RNA, 19 nt, Artificial Sequence
  Description of Artificial Sequence: Synthetic oligonucleotide
aguucgaacacccagcugg

SEQ ID NO: 232040 - RNA, 19 nt, Artificial Sequence
  Description of Artificial Sequence: Synthetic oligonucleotide
aaagcgauucauucggcgc

SEQ ID NO: 232041 - RNA, 19 nt, Artificial Sequence
  Description of Artificial Sequence: Synthetic oligonucleotide
aguaaagcgauucauucgg

SEQ ID NO: 232042 - RNA, 19 nt, Artificial Sequence
  Description of Artificial Sequence: Synthetic oligonucleotide
aucagauagaucuccaggc

SEQ ID NO: 232043 - RNA, 19 nt, Artificial Sequence
  Description of Artificial Sequence: Synthetic oligonucleotide
uuagauauggacacggugu

SEQ ID NO: 232044 - RNA, 19 nt, Artificial Sequence
  Description of Artificial Sequence: Synthetic oligonucleotide
auggcaaucagccaugggg

SEQ ID NO: 232045 - RNA, 19 nt, Artificial Sequence
  Description of Artificial Sequence: Synthetic oligonucleotide
aacacguccccauaaagug

SEQ ID NO: 232046 - RNA, 19 nt, Artificial Sequence
  Description of Artificial Sequence: Synthetic oligonucleotide
auauaaagcccagacauac

SEQ ID NO: 232047 - RNA, 19 nt, Artificial Sequence
  Description of Artificial Sequence: Synthetic oligonucleotide
uguucuagcacaaugccgu

SEQ ID NO: 232048 - RNA, 19 nt, Artificial Sequence
  Description of Artificial Sequence: Synthetic oligonucleotide
aaauccuuaguucaucaga

SEQ ID NO: 232049 - RNA, 19 nt, Artificial Sequence
  Description of Artificial Sequence: Synthetic oligonucleotide
aacaggugcucccaugggc

SEQ ID NO: 232050 - RNA, 19 nt, Artificial Sequence
  Description of Artificial Sequence: Synthetic oligonucleotide
uuuagauauggacacggug

SEQ ID NO: 232051 - RNA, 19 nt, Artificial Sequence
  Description of Artificial Sequence: Synthetic oligonucleotide
cauaauauaggucuccaug

SEQ ID NO: 232052 - RNA, 19 nt, Artificial Sequence
  Description of Artificial Sequence: Synthetic oligonucleotide
aggacucuucaucagaugg

SEQ ID NO: 232053 - RNA, 19 nt, Artificial Sequence
  Description of Artificial Sequence: Synthetic oligonucleotide
caucucuacaacaucaggc

SEQ ID NO: 232054 - RNA, 19 nt, Artificial Sequence
  Description of Artificial Sequence: Synthetic oligonucleotide
ugaaccaagagcuuagggu

SEQ ID NO: 232055 - RNA, 19 nt, Artificial Sequence
  Description of Artificial Sequence: Synthetic oligonucleotide
cuugaggugaaccaagagc

SEQ ID NO: 232056 - RNA, 19 nt, Artificial Sequence
  Description of Artificial Sequence: Synthetic oligonucleotide
agaugguucuaauucuccc

SEQ ID NO: 232057 - RNA, 19 nt, Artificial Sequence
  Description of Artificial Sequence: Synthetic oligonucleotide
uccuauuuccgccaguuug

SEQ ID NO: 232058 - RNA, 19 nt, Artificial Sequence
  Description of Artificial Sequence: Synthetic oligonucleotide
uucagauuuggguaggaug

SEQ ID NO: 232059 - RNA, 19 nt, Artificial Sequence
  Description of Artificial Sequence: Synthetic oligonucleotide
auaucaaucuuccccaucu

SEQ ID NO: 232060 - RNA, 19 nt, Artificial Sequence
  Description of Artificial Sequence: Synthetic oligonucleotide
agagcuuaggguccugugc

SEQ ID NO: 232061 - RNA, 19 nt, Artificial Sequence
  Description of Artificial Sequence: Synthetic oligonucleotide
aauacagugaacagcugag

SEQ ID NO: 232062 - RNA, 19 nt, Artificial Sequence
  Description of Artificial Sequence: Synthetic oligonucleotide
ugcgcuuaaaacaccagug

SEQ ID NO: 232063 - RNA, 19 nt, Artificial Sequence
  Description of Artificial Sequence: Synthetic oligonucleotide
aaaugacaagccuagggaa

SEQ ID NO: 232064 - RNA, 19 nt, Artificial Sequence
  Description of Artificial Sequence: Synthetic oligonucleotide
uaaagcgauucauucggcg

SEQ ID NO: 232065 - RNA, 19 nt, Artificial Sequence
  Description of Artificial Sequence: Synthetic oligonucleotide
cuucuuucgguuacgacgc

SEQ ID NO: 232066 - RNA, 19 nt, Artificial Sequence
  Description of Artificial Sequence: Synthetic oligonucleotide
aauuugaauuccuuguauu

SEQ ID NO: 232067 - RNA, 19 nt, Artificial Sequence
  Description of Artificial Sequence: Synthetic oligonucleotide
uugggaaacagcuuuauuu

SEQ ID NO: 232068 - RNA, 19 nt, Artificial Sequence
  Description of Artificial Sequence: Synthetic oligonucleotide
gaugguucuaauucucccc

SEQ ID NO: 232069 - RNA, 19 nt, Artificial Sequence
  Description of Artificial Sequence: Synthetic oligonucleotide
uaaugccacaggcucaccg

SEQ ID NO: 232070 - RNA, 19 nt, Artificial Sequence
  Description of Artificial Sequence: Synthetic oligonucleotide
uacucgaggucccagagga

SEQ ID NO: 232071 - RNA, 19 nt, Artificial Sequence
  Description of Artificial Sequence: Synthetic oligonucleotide
caucagaugguucuaauuc

SEQ ID NO: 232072 - RNA, 19 nt, Artificial Sequence
  Description of Artificial Sequence: Synthetic oligonucleotide
auaaauguggguggauccc

SEQ ID NO: 232073 - RNA, 19 nt, Artificial Sequence
  Description of Artificial Sequence: Synthetic oligonucleotide
auaaaguggcuucccaguc

SEQ ID NO: 232074 - RNA, 19 nt, Artificial Sequence
  Description of Artificial Sequence: Synthetic oligonucleotide
aaugccugugcguuugaug

SEQ ID NO: 232075 - RNA, 19 nt, Artificial Sequence
  Description of Artificial Sequence: Synthetic oligonucleotide
aacaccaguggcguggcac

SEQ ID NO: 232076 - RNA, 19 nt, Artificial Sequence
  Description of Artificial Sequence: Synthetic oligonucleotide
ggaauaggagaauucagcc

SEQ ID NO: 232077 - RNA, 19 nt, Artificial Sequence
  Description of Artificial Sequence: Synthetic oligonucleotide
caguaaagcgauucauucg

SEQ ID NO: 232078 - RNA, 19 nt, Artificial Sequence
  Description of Artificial Sequence: Synthetic oligonucleotide
gaucggagcuccuauuucc

SEQ ID NO: 232079 - RNA, 19 nt, Artificial Sequence
  Description of Artificial Sequence: Synthetic oligonucleotide
gacaaagccuaaaggauag

SEQ ID NO: 232080 - RNA, 19 nt, Artificial Sequence
  Description of Artificial Sequence: Synthetic oligonucleotide
cuugucucgaacuccuugc

SEQ ID NO: 232081 - RNA, 19 nt, Artificial Sequence
  Description of Artificial Sequence: Synthetic oligonucleotide
augagaacccuccaggagu

SEQ ID NO: 232082 - RNA, 19 nt, Artificial Sequence
  Description of Artificial Sequence: Synthetic oligonucleotide
gaaauccuuaguucaucag

SEQ ID NO: 232083 - RNA, 19 nt, Artificial Sequence
  Description of Artificial Sequence: Synthetic oligonucleotide
ucucgcaucuccugaaugc

SEQ ID NO: 232084 - RNA, 19 nt, Artificial Sequence
  Description of Artificial Sequence: Synthetic oligonucleotide
gaggaguucgaacacccag

SEQ ID NO: 232085 - RNA, 19 nt, Artificial Sequence
  Description of Artificial Sequence: Synthetic oligonucleotide
ucgguuacgacgcuugcga

SEQ ID NO: 232086 - RNA, 19 nt, Artificial Sequence
  Description of Artificial Sequence: Synthetic oligonucleotide
aagcgauucauucggcgca

SEQ ID NO: 232087 - RNA, 19 nt, Artificial Sequence
  Description of Artificial Sequence: Synthetic oligonucleotide
aaaacaccaguggcguggc

SEQ ID NO: 232088 - RNA, 19 nt, Artificial Sequence
  Description of Artificial Sequence: Synthetic oligonucleotide
cucgagaacgagcugauuc

SEQ ID NO: 232089 - RNA, 19 nt, Artificial Sequence
  Description of Artificial Sequence: Synthetic oligonucleotide
ugggaaacagcuuuauuua

SEQ ID NO: 232090 - RNA, 19 nt, Artificial Sequence
  Description of Artificial Sequence: Synthetic oligonucleotide
ucgaacacccagcuggccc

SEQ ID NO: 232091 - RNA, 19 nt, Artificial Sequence
  Description of Artificial Sequence: Synthetic oligonucleotide
aaacacguccccauaaagu

SEQ ID NO: 232092 - RNA, 19 nt, Artificial Sequence
  Description of Artificial Sequence: Synthetic oligonucleotide
aaagccuaaaggauagcca

SEQ ID NO: 232093 - RNA, 19 nt, Artificial Sequence
  Description of Artificial Sequence: Synthetic oligonucleotide
ugugcguuugaugaagucu

SEQ ID NO: 232094 - RNA, 19 nt, Artificial Sequence
  Description of Artificial Sequence: Synthetic oligonucleotide
aacuccucaggugccagcg

SEQ ID NO: 232095 - RNA, 19 nt, Artificial Sequence
  Description of Artificial Sequence: Synthetic oligonucleotide
ucccuaaggaaauccuuag

SEQ ID NO: 232096 - RNA, 19 nt, Artificial Sequence
  Description of Artificial Sequence: Synthetic oligonucleotide
uugcgcuuaaaacaccagu

SEQ ID NO: 232097 - RNA, 19 nt, Artificial Sequence
  Description of Artificial Sequence: Synthetic oligonucleotide
aucauguaguuucugguaa

SEQ ID NO: 232098 - RNA, 19 nt, Artificial Sequence
  Description of Artificial Sequence: Synthetic oligonucleotide
caucagugagcuugaaagc

SEQ ID NO: 232099 - RNA, 19 nt, Artificial Sequence
  Description of Artificial Sequence: Synthetic oligonucleotide
ucuacuugagccugcugcu

SEQ ID NO: 232100 - RNA, 19 nt, Artificial Sequence
  Description of Artificial Sequence: Synthetic oligonucleotide
aaaggauagccagcaaugu

SEQ ID NO: 232101 - RNA, 19 nt, Artificial Sequence
  Description of Artificial Sequence: Synthetic oligonucleotide
ggaccuaaaauuugaauuc

SEQ ID NO: 232102 - RNA, 19 nt, Artificial Sequence
  Description of Artificial Sequence: Synthetic oligonucleotide
uugcccucauaauauaggu

SEQ ID NO: 232103 - RNA, 19 nt, Artificial Sequence
  Description of Artificial Sequence: Synthetic oligonucleotide
ucgagaacgagcugauucu

SEQ ID NO: 232104 - RNA, 19 nt, Artificial Sequence
  Description of Artificial Sequence: Synthetic oligonucleotide
gugaaccaagagcuuaggg

SEQ ID NO: 232105 - RNA, 19 nt, Artificial Sequence
  Description of Artificial Sequence: Synthetic oligonucleotide
cuuucgguuacgacgcuug

SEQ ID NO: 232106 - RNA, 19 nt, Artificial Sequence
  Description of Artificial Sequence: Synthetic oligonucleotide
ucauaaauguggguggauc

SEQ ID NO: 232107 - RNA, 19 nt, Artificial Sequence
  Description of Artificial Sequence: Synthetic oligonucleotide
augguucuaauucucccca

SEQ ID NO: 232108 - RNA, 19 nt, Artificial Sequence
  Description of Artificial Sequence: Synthetic oligonucleotide
uucucgauaccccguuugc

SEQ ID NO: 232109 - RNA, 19 nt, Artificial Sequence
  Description of Artificial Sequence: Synthetic oligonucleotide
uccgccacaguaaagcgau

SEQ ID NO: 232110 - RNA, 19 nt, Artificial Sequence
  Description of Artificial Sequence: Synthetic oligonucleotide
gacacgguguccucuucgg

SEQ ID NO: 232111 - RNA, 19 nt, Artificial Sequence
  Description of Artificial Sequence: Synthetic oligonucleotide
cauaguggccuggaggugg

SEQ ID NO: 232112 - RNA, 19 nt, Artificial Sequence
  Description of Artificial Sequence: Synthetic oligonucleotide
ugcguuugaugaagucugg

SEQ ID NO: 232113 - RNA, 19 nt, Artificial Sequence
  Description of Artificial Sequence: Synthetic oligonucleotide
ucuuagggacugcagaguu

SEQ ID NO: 232114 - RNA, 19 nt, Artificial Sequence
  Description of Artificial Sequence: Synthetic oligonucleotide
cugcuuagcagcaugcuca

SEQ ID NO: 232115 - RNA, 19 nt, Artificial Sequence
  Description of Artificial Sequence: Synthetic oligonucleotide
ucuacaacaucaggccgag

SEQ ID NO: 232116 - RNA, 19 nt, Artificial Sequence
  Description of Artificial Sequence: Synthetic oligonucleotide
acgagcgaguaucugucuc

SEQ ID NO: 232117 - RNA, 19 nt, Artificial Sequence
  Description of Artificial Sequence: Synthetic oligonucleotide
accccguuugccuugcaag

SEQ ID NO: 232118 - RNA, 19 nt, Artificial Sequence
  Description of Artificial Sequence: Synthetic oligonucleotide
ugcauggcaaucagccaug

SEQ ID NO: 232119 - RNA, 19 nt, Artificial Sequence
  Description of Artificial Sequence: Synthetic oligonucleotide
gaagggaccuaaaauuuga

SEQ ID NO: 232120 - RNA, 19 nt, Artificial Sequence
  Description of Artificial Sequence: Synthetic oligonucleotide
uagcacaaugccgucugcg

SEQ ID NO: 232121 - RNA, 19 nt, Artificial Sequence
  Description of Artificial Sequence: Synthetic oligonucleotide
uucgguuacgacgcuugcg

SEQ ID NO: 232122 - RNA, 19 nt, Artificial Sequence
  Description of Artificial Sequence: Synthetic oligonucleotide
agcauugguuccaaacacg

SEQ ID NO: 232123 - RNA, 19 nt, Artificial Sequence
  Description of Artificial Sequence: Synthetic oligonucleotide
auacagugaacagcugagg

SEQ ID NO: 232124 - RNA, 19 nt, Artificial Sequence
  Description of Artificial Sequence: Synthetic oligonucleotide
ucaucagaugguucuaauu

SEQ ID NO: 232125 - RNA, 19 nt, Artificial Sequence
  Description of Artificial Sequence: Synthetic oligonucleotide
ucgcgacuccccuggaucg

SEQ ID NO: 232126 - RNA, 19 nt, Artificial Sequence
  Description of Artificial Sequence: Synthetic oligonucleotide
uaaauguggguggauccca

SEQ ID NO: 232127 - RNA, 19 nt, Artificial Sequence
  Description of Artificial Sequence: Synthetic oligonucleotide
aacaucaggccgagccacc

SEQ ID NO: 232128 - RNA, 19 nt, Artificial Sequence
  Description of Artificial Sequence: Synthetic oligonucleotide
ccuauuuccgccaguuugg

SEQ ID NO: 232129 - RNA, 19 nt, Artificial Sequence
  Description of Artificial Sequence: Synthetic oligonucleotide
agaguuagcuuucgggcau

SEQ ID NO: 232130 - RNA, 19 nt, Artificial Sequence
  Description of Artificial Sequence: Synthetic oligonucleotide
ggcacguuccucuugcugc

SEQ ID NO: 232131 - RNA, 19 nt, Artificial Sequence
  Description of Artificial Sequence: Synthetic oligonucleotide
ugcuuagcagcaugcucag

SEQ ID NO: 232132 - RNA, 19 nt, Artificial Sequence
  Description of Artificial Sequence: Synthetic oligonucleotide
cuucucgauaccccguuug

SEQ ID NO: 232133 - RNA, 19 nt, Artificial Sequence
  Description of Artificial Sequence: Synthetic oligonucleotide
gcgcuuaaaacaccagugg

SEQ ID NO: 232134 - RNA, 19 nt, Artificial Sequence
  Description of Artificial Sequence: Synthetic oligonucleotide
uuccgccacaguaaagcga

SEQ ID NO: 232135 - RNA, 19 nt, Artificial Sequence
  Description of Artificial Sequence: Synthetic oligonucleotide
cuaauucuccccaaggggu

SEQ ID NO: 232136 - RNA, 19 nt, Artificial Sequence
  Description of Artificial Sequence: Synthetic oligonucleotide
gcaauucuccuuugggagg

SEQ ID NO: 232137 - RNA, 19 nt, Artificial Sequence
  Description of Artificial Sequence: Synthetic oligonucleotide
aucgcugcauggcaaucag

SEQ ID NO: 232138 - RNA, 19 nt, Artificial Sequence
  Description of Artificial Sequence: Synthetic oligonucleotide
agggaccuaaaauuugaau

SEQ ID NO: 232139 - RNA, 19 nt, Artificial Sequence
  Description of Artificial Sequence: Synthetic oligonucleotide
uuucgguuacgacgcuugc

SEQ ID NO: 232140 - RNA, 19 nt, Artificial Sequence
  Description of Artificial Sequence: Synthetic oligonucleotide
agacgagcgaguaucuguc

SEQ ID NO: 232141 - RNA, 19 nt, Artificial Sequence
  Description of Artificial Sequence: Synthetic oligonucleotide
uauuuccgccaguuuggcc

SEQ ID NO: 232142 - RNA, 19 nt, Artificial Sequence
  Description of Artificial Sequence: Synthetic oligonucleotide
cuugcgcuuaaaacaccag

SEQ ID NO: 232143 - RNA, 19 nt, Artificial Sequence
  Description of Artificial Sequence: Synthetic oligonucleotide
agaagggaccuaaaauuug

SEQ ID NO: 232144 - RNA, 19 nt, Artificial Sequence
  Description of Artificial Sequence: Synthetic oligonucleotide
acugcagaguucuccauuu

SEQ ID NO: 232145 - RNA, 19 nt, Artificial Sequence
  Description of Artificial Sequence: Synthetic oligonucleotide
uacuugcgcuuaaaacacc

SEQ ID NO: 232146 - RNA, 19 nt, Artificial Sequence
  Description of Artificial Sequence: Synthetic oligonucleotide
ugcccucauaauauagguc

SEQ ID NO: 232147 - RNA, 19 nt, Artificial Sequence
  Description of Artificial Sequence: Synthetic oligonucleotide
cauccacauauaaagccca

SEQ ID NO: 232148 - RNA, 19 nt, Artificial Sequence
  Description of Artificial Sequence: Synthetic oligonucleotide
agaguucaucucuuccuga

SEQ ID NO: 232149 - RNA, 19 nt, Artificial Sequence
  Description of Artificial Sequence: Synthetic oligonucleotide
cagcaugguauccaaagga

SEQ ID NO: 232150 - RNA, 19 nt, Artificial Sequence
  Description of Artificial Sequence: Synthetic oligonucleotide
acaaagccuaaaggauagc

SEQ ID NO: 232151 - RNA, 19 nt, Artificial Sequence
  Description of Artificial Sequence: Synthetic oligonucleotide
agccuaaaggauagccagc

SEQ ID NO: 232152 - RNA, 19 nt, Artificial Sequence
  Description of Artificial Sequence: Synthetic oligonucleotide
auucggcgcaacuucuucu

SEQ ID NO: 232153 - RNA, 19 nt, Artificial Sequence
  Description of Artificial Sequence: Synthetic oligonucleotide
ucaaugaguucaggggucu

SEQ ID NO: 232154 - RNA, 19 nt, Artificial Sequence
  Description of Artificial Sequence: Synthetic oligonucleotide
uggaucggagcuccuauuu

SEQ ID NO: 232155 - RNA, 19 nt, Artificial Sequence
  Description of Artificial Sequence: Synthetic oligonucleotide
uaucgcugcauggcaauca

SEQ ID NO: 232156 - RNA, 19 nt, Artificial Sequence
  Description of Artificial Sequence: Synthetic oligonucleotide
aagccuagggaaguacaga

SEQ ID NO: 232157 - RNA, 19 nt, Artificial Sequence
  Description of Artificial Sequence: Synthetic oligonucleotide
uucgggcauccacauauaa

SEQ ID NO: 232158 - RNA, 19 nt, Artificial Sequence
  Description of Artificial Sequence: Synthetic oligonucleotide
acgagcugauucuuucucu

SEQ ID NO: 232159 - RNA, 19 nt, Artificial Sequence
  Description of Artificial Sequence: Synthetic oligonucleotide
auauggacacgguguccuc

SEQ ID NO: 232160 - RNA, 19 nt, Artificial Sequence
  Description of Artificial Sequence: Synthetic oligonucleotide
uccacauauaaagcccaga

SEQ ID NO: 232161 - RNA, 19 nt, Artificial Sequence
  Description of Artificial Sequence: Synthetic oligonucleotide
acgguguccucuucggucu

SEQ ID NO: 232162 - RNA, 19 nt, Artificial Sequence
  Description of Artificial Sequence: Synthetic oligonucleotide
cacaggcucaccgacucgg

SEQ ID NO: 232163 - RNA, 19 nt, Artificial Sequence
  Description of Artificial Sequence: Synthetic oligonucleotide
cuacucgaggucccagagg

SEQ ID NO: 232164 - RNA, 19 nt, Artificial Sequence
  Description of Artificial Sequence: Synthetic oligonucleotide
acgucgugcaucucuacaa

SEQ ID NO: 232165 - RNA, 19 nt, Artificial Sequence
  Description of Artificial Sequence: Synthetic oligonucleotide
ugaacagcugaggugucuc

SEQ ID NO: 232166 - RNA, 19 nt, Artificial Sequence
  Description of Artificial Sequence: Synthetic oligonucleotide
aaccguggacaugucauaa

SEQ ID NO: 232167 - RNA, 19 nt, Artificial Sequence
  Description of Artificial Sequence: Synthetic oligonucleotide
acuugcgcuuaaaacacca

SEQ ID NO: 232168 - RNA, 19 nt, Artificial Sequence
  Description of Artificial Sequence: Synthetic oligonucleotide
uguggguggaucccaucau

SEQ ID NO: 232169 - RNA, 19 nt, Artificial Sequence
  Description of Artificial Sequence: Synthetic oligonucleotide
gcccuuccgacucauaacc

SEQ ID NO: 232170 - RNA, 19 nt, Artificial Sequence
  Description of Artificial Sequence: Synthetic oligonucleotide
cauaaaguggcuucccagu

SEQ ID NO: 232171 - RNA, 19 nt, Artificial Sequence
  Description of Artificial Sequence: Synthetic oligonucleotide
gaacagcucucaggaauag

SEQ ID NO: 232172 - RNA, 19 nt, Artificial Sequence
  Description of Artificial Sequence: Synthetic oligonucleotide
aggcucaccgacucggaga

SEQ ID NO: 232173 - RNA, 19 nt, Artificial Sequence
  Description of Artificial Sequence: Synthetic oligonucleotide
gggaccuaaaauuugaauu

SEQ ID NO: 232174 - RNA, 19 nt, Artificial Sequence
  Description of Artificial Sequence: Synthetic oligonucleotide
ucgcaucuccugaaugccu

SEQ ID NO: 232175 - RNA, 19 nt, Artificial Sequence
  Description of Artificial Sequence: Synthetic oligonucleotide
gcccucauaauauaggucu

SEQ ID NO: 232176 - RNA, 19 nt, Artificial Sequence
  Description of Artificial Sequence: Synthetic oligonucleotide
aucggagcuccuauuuccg

SEQ ID NO: 232177 - RNA, 19 nt, Artificial Sequence
  Description of Artificial Sequence: Synthetic oligonucleotide
ucggagcuccuauuuccgc

SEQ ID NO: 232178 - RNA, 19 nt, Artificial Sequence
  Description of Artificial Sequence: Synthetic oligonucleotide
caucauguaguuucuggua

SEQ ID NO: 232179 - RNA, 19 nt, Artificial Sequence
  Description of Artificial Sequence: Synthetic oligonucleotide
agcaugguauccaaaggaa

SEQ ID NO: 232180 - RNA, 19 nt, Artificial Sequence
  Description of Artificial Sequence: Synthetic oligonucleotide
uccugaaugccugugcguu

SEQ ID NO: 232181 - RNA, 19 nt, Artificial Sequence
  Description of Artificial Sequence: Synthetic oligonucleotide
cuccucgcgacuccccugg

SEQ ID NO: 232182 - RNA, 19 nt, Artificial Sequence
  Description of Artificial Sequence: Synthetic oligonucleotide
aggugaaccaagagcuuag

SEQ ID NO: 232183 - RNA, 19 nt, Artificial Sequence
  Description of Artificial Sequence: Synthetic oligonucleotide
cuacuggcaucccuaagga

SEQ ID NO: 232184 - RNA, 19 nt, Artificial Sequence
  Description of Artificial Sequence: Synthetic oligonucleotide
aagaugcugcccgcacccg

SEQ ID NO: 232185 - RNA, 19 nt, Artificial Sequence
  Description of Artificial Sequence: Synthetic oligonucleotide
cucauaaccguggacaugu

SEQ ID NO: 232186 - RNA, 19 nt, Artificial Sequence
  Description of Artificial Sequence: Synthetic oligonucleotide
auaucgcugcauggcaauc

SEQ ID NO: 232187 - RNA, 19 nt, Artificial Sequence
  Description of Artificial Sequence: Synthetic oligonucleotide
ggcucaccgacucggagag

SEQ ID NO: 232188 - RNA, 19 nt, Artificial Sequence
  Description of Artificial Sequence: Synthetic oligonucleotide
cugaaugccugugcguuug

SEQ ID NO: 232189 - RNA, 19 nt, Artificial Sequence
  Description of Artificial Sequence: Synthetic oligonucleotide
guaaagcgauucauucggc

SEQ ID NO: 232190 - RNA, 19 nt, Artificial Sequence
  Description of Artificial Sequence: Synthetic oligonucleotide
cuauuuccgccaguuuggc

SEQ ID NO: 232191 - RNA, 19 nt, Artificial Sequence
  Description of Artificial Sequence: Synthetic oligonucleotide
cauauaaagcccagacaua

SEQ ID NO: 232192 - RNA, 19 nt, Artificial Sequence
  Description of Artificial Sequence: Synthetic oligonucleotide
ggcaauacagugaacagcu

SEQ ID NO: 232193 - RNA, 19 nt, Artificial Sequence
  Description of Artificial Sequence: Synthetic oligonucleotide
cucgcgacuccccuggauc

SEQ ID NO: 232194 - RNA, 19 nt, Artificial Sequence
  Description of Artificial Sequence: Synthetic oligonucleotide
cauucggcgcaacuucuuc

SEQ ID NO: 232195 - RNA, 19 nt, Artificial Sequence
  Description of Artificial Sequence: Synthetic oligonucleotide
uaaccguggacaugucaua

SEQ ID NO: 232196 - RNA, 19 nt, Artificial Sequence
  Description of Artificial Sequence: Synthetic oligonucleotide
ggacacgguguccucuucg

SEQ ID NO: 232197 - RNA, 19 nt, Artificial Sequence
  Description of Artificial Sequence: Synthetic oligonucleotide
ucggcgcaacuucuucuug

SEQ ID NO: 232198 - RNA, 19 nt, Artificial Sequence
  Description of Artificial Sequence: Synthetic oligonucleotide
ugacggcucuccuucaguu

SEQ ID NO: 232199 - RNA, 19 nt, Artificial Sequence
  Description of Artificial Sequence: Synthetic oligonucleotide
acaagccuagggaaguaca

SEQ ID NO: 232200 - RNA, 19 nt, Artificial Sequence
  Description of Artificial Sequence: Synthetic oligonucleotide
aaaaggcaucauguaguuu

SEQ ID NO: 232201 - RNA, 19 nt, Artificial Sequence
  Description of Artificial Sequence: Synthetic oligonucleotide
agcuacucgaggucccaga

SEQ ID NO: 232202 - RNA, 19 nt, Artificial Sequence
  Description of Artificial Sequence: Synthetic oligonucleotide
gcuacucgaggucccagag

SEQ ID NO: 232203 - RNA, 19 nt, Artificial Sequence
  Description of Artificial Sequence: Synthetic oligonucleotide
caucgccuccucuaucuuc

SEQ ID NO: 232204 - RNA, 19 nt, Artificial Sequence
  Description of Artificial Sequence: Synthetic oligonucleotide
aagggaccuaaaauuugaa

SEQ ID NO: 232205 - RNA, 19 nt, Artificial Sequence
  Description of Artificial Sequence: Synthetic oligonucleotide
auaaugccacaggcucacc

SEQ ID NO: 232206 - RNA, 19 nt, Artificial Sequence
  Description of Artificial Sequence: Synthetic oligonucleotide
uucggcgcaacuucuucuu

SEQ ID NO: 232207 - RNA, 19 nt, Artificial Sequence
  Description of Artificial Sequence: Synthetic oligonucleotide
caccgacucggagaggagg

SEQ ID NO: 232208 - RNA, 19 nt, Artificial Sequence
  Description of Artificial Sequence: Synthetic oligonucleotide
cccaugggcaaaacagugg

SEQ ID NO: 232209 - RNA, 19 nt, Artificial Sequence
  Description of Artificial Sequence: Synthetic oligonucleotide
ugaaugccugugcguuuga

SEQ ID NO: 232210 - RNA, 19 nt, Artificial Sequence
  Description of Artificial Sequence: Synthetic oligonucleotide
agggguccgaucaaucucu

SEQ ID NO: 232211 - RNA, 19 nt, Artificial Sequence
  Description of Artificial Sequence: Synthetic oligonucleotide
augaguucaggggucucca

SEQ ID NO: 232212 - RNA, 19 nt, Artificial Sequence
  Description of Artificial Sequence: Synthetic oligonucleotide
ugcagucacgucgugcauc

SEQ ID NO: 232213 - RNA, 19 nt, Artificial Sequence
  Description of Artificial Sequence: Synthetic oligonucleotide
uacuggcaucccuaaggaa

SEQ ID NO: 232214 - RNA, 19 nt, Artificial Sequence
  Description of Artificial Sequence: Synthetic oligonucleotide
ugguucuaauucuccccaa

SEQ ID NO: 232215 - RNA, 19 nt, Artificial Sequence
  Description of Artificial Sequence: Synthetic oligonucleotide
acucauaaccguggacaug

SEQ ID NO: 232216 - RNA, 19 nt, Artificial Sequence
  Description of Artificial Sequence: Synthetic oligonucleotide
cucaccgacucggagagga

SEQ ID NO: 232217 - RNA, 19 nt, Artificial Sequence
  Description of Artificial Sequence: Synthetic oligonucleotide
ucgauaccccguuugccuu

SEQ ID NO: 232218 - RNA, 19 nt, Artificial Sequence
  Description of Artificial Sequence: Synthetic oligonucleotide
cuagcacaaugccgucugc

SEQ ID NO: 232219 - RNA, 19 nt, Artificial Sequence
  Description of Artificial Sequence: Synthetic oligonucleotide
cacagggacggaguuccgg

SEQ ID NO: 232220 - RNA, 19 nt, Artificial Sequence
  Description of Artificial Sequence: Synthetic oligonucleotide
cccacgacuguccuggggc

SEQ ID NO: 232221 - RNA, 19 nt, Artificial Sequence
  Description of Artificial Sequence: Synthetic oligonucleotide
ucauucggcgcaacuucuu

SEQ ID NO: 232222 - RNA, 19 nt, Artificial Sequence
  Description of Artificial Sequence: Synthetic oligonucleotide
uaccccguuugccuugcaa

SEQ ID NO: 232223 - RNA, 19 nt, Artificial Sequence
  Description of Artificial Sequence: Synthetic oligonucleotide
agcuuucgggcauccacau

SEQ ID NO: 232224 - RNA, 19 nt, Artificial Sequence
  Description of Artificial Sequence: Synthetic oligonucleotide
ucgaggucccagaggaguu

SEQ ID NO: 232225 - RNA, 19 nt, Artificial Sequence
  Description of Artificial Sequence: Synthetic oligonucleotide
gauaccccguuugccuugc

SEQ ID NO: 232226 - RNA, 19 nt, Artificial Sequence
  Description of Artificial Sequence: Synthetic oligonucleotide
uuggggcccacagagggau

SEQ ID NO: 232227 - RNA, 19 nt, Artificial Sequence
  Description of Artificial Sequence: Synthetic oligonucleotide
gguguaggucugcagccgc

SEQ ID NO: 232228 - RNA, 19 nt, Artificial Sequence
  Description of Artificial Sequence: Synthetic oligonucleotide
gacucauaaccguggacau

SEQ ID NO: 232229 - RNA, 19 nt, Artificial Sequence
  Description of Artificial Sequence: Synthetic oligonucleotide
ccagagacgagcgaguauc

SEQ ID NO: 232230 - RNA, 19 nt, Artificial Sequence
  Description of Artificial Sequence: Synthetic oligonucleotide
agggacuuugugggcauug

SEQ ID NO: 232231 - RNA, 19 nt, Artificial Sequence
  Description of Artificial Sequence: Synthetic oligonucleotide
auccuuaguucaucagaua

SEQ ID NO: 232232 - RNA, 19 nt, Artificial Sequence
  Description of Artificial Sequence: Synthetic oligonucleotide
gauucauucggcgcaacuu

SEQ ID NO: 232233 - RNA, 19 nt, Artificial Sequence
  Description of Artificial Sequence: Synthetic oligonucleotide
cuguuuggcacguuccucu

SEQ ID NO: 232234 - RNA, 19 nt, Artificial Sequence
  Description of Artificial Sequence: Synthetic oligonucleotide
gaacgagcugauucuuucu

SEQ ID NO: 232235 - RNA, 19 nt, Artificial Sequence
  Description of Artificial Sequence: Synthetic oligonucleotide
cugccuguuuggcacguuc

SEQ ID NO: 232236 - RNA, 19 nt, Artificial Sequence
  Description of Artificial Sequence: Synthetic oligonucleotide
cucgauaccccguuugccu

SEQ ID NO: 232237 - RNA, 19 nt, Artificial Sequence
  Description of Artificial Sequence: Synthetic oligonucleotide
uuucgggcauccacauaua

SEQ ID NO: 232238 - RNA, 19 nt, Artificial Sequence
  Description of Artificial Sequence: Synthetic oligonucleotide
aaugccgucugcgggugua

SEQ ID NO: 232239 - RNA, 19 nt, Artificial Sequence
  Description of Artificial Sequence: Synthetic oligonucleotide
ggugaaccaagagcuuagg

SEQ ID NO: 232240 - RNA, 19 nt, Artificial Sequence
  Description of Artificial Sequence: Synthetic oligonucleotide
uucgaacacccagcuggcc

SEQ ID NO: 232241 - RNA, 19 nt, Artificial Sequence
  Description of Artificial Sequence: Synthetic oligonucleotide
aaacaccaguggcguggca

SEQ ID NO: 232242 - RNA, 19 nt, Artificial Sequence
  Description of Artificial Sequence: Synthetic oligonucleotide
accguggacaugucauaaa

SEQ ID NO: 232243 - RNA, 19 nt, Artificial Sequence
  Description of Artificial Sequence: Synthetic oligonucleotide
gcccauaucuugaggaggc

SEQ ID NO: 232244 - RNA, 19 nt, Artificial Sequence
  Description of Artificial Sequence: Synthetic oligonucleotide
uccggguggccuugaggug

SEQ ID NO: 232245 - RNA, 19 nt, Artificial Sequence
  Description of Artificial Sequence: Synthetic oligonucleotide
aagaugaaguugggcucau

SEQ ID NO: 232246 - RNA, 19 nt, Artificial Sequence
  Description of Artificial Sequence: Synthetic oligonucleotide
guuacgacgcuugcgauuu

SEQ ID NO: 232247 - RNA, 19 nt, Artificial Sequence
  Description of Artificial Sequence: Synthetic oligonucleotide
acaaugccgucugcgggug

SEQ ID NO: 232248 - RNA, 19 nt, Artificial Sequence
  Description of Artificial Sequence: Synthetic oligonucleotide
agaacccuccaggagugau

SEQ ID NO: 232249 - RNA, 19 nt, Artificial Sequence
  Description of Artificial Sequence: Synthetic oligonucleotide
ccuugucucgaacuccuug

SEQ ID NO: 232250 - RNA, 19 nt, Artificial Sequence
  Description of Artificial Sequence: Synthetic oligonucleotide
ucuuucgguuacgacgcuu

SEQ ID NO: 232251 - RNA, 19 nt, Artificial Sequence
  Description of Artificial Sequence: Synthetic oligonucleotide
guggcguggcacagggacg

SEQ ID NO: 232252 - RNA, 19 nt, Artificial Sequence
  Description of Artificial Sequence: Synthetic oligonucleotide
cacgucgugcaucucuaca

SEQ ID NO: 232253 - RNA, 19 nt, Artificial Sequence
  Description of Artificial Sequence: Synthetic oligonucleotide
gagcgaguaucugucucca

SEQ ID NO: 232254 - RNA, 19 nt, Artificial Sequence
  Description of Artificial Sequence: Synthetic oligonucleotide
accgacucggagaggaggu

SEQ ID NO: 232255 - RNA, 19 nt, Artificial Sequence
  Description of Artificial Sequence: Synthetic oligonucleotide
caagggguccgaucaaucu

SEQ ID NO: 232256 - RNA, 19 nt, Artificial Sequence
  Description of Artificial Sequence: Synthetic oligonucleotide
caucaggccgagccaccag

SEQ ID NO: 232257 - RNA, 19 nt, Artificial Sequence
  Description of Artificial Sequence: Synthetic oligonucleotide
ugccgucugcggguguagg

SEQ ID NO: 232258 - RNA, 19 nt, Artificial Sequence
  Description of Artificial Sequence: Synthetic oligonucleotide
gccuaaaggauagccagca

SEQ ID NO: 232259 - RNA, 19 nt, Artificial Sequence
  Description of Artificial Sequence: Synthetic oligonucleotide
ggaucggagcuccuauuuc

SEQ ID NO: 232260 - RNA, 19 nt, Artificial Sequence
  Description of Artificial Sequence: Synthetic oligonucleotide
cacaguaaagcgauucauu

SEQ ID NO: 232261 - RNA, 19 nt, Artificial Sequence
  Description of Artificial Sequence: Synthetic oligonucleotide
gcaucauguaguuucuggu

SEQ ID NO: 232262 - RNA, 19 nt, Artificial Sequence
  Description of Artificial Sequence: Synthetic oligonucleotide
ucugcggguguaggucugc

SEQ ID NO: 232263 - RNA, 19 nt, Artificial Sequence
  Description of Artificial Sequence: Synthetic oligonucleotide
caucuccugaaugccugug

SEQ ID NO: 232264 - RNA, 19 nt, Artificial Sequence
  Description of Artificial Sequence: Synthetic oligonucleotide
acggaguuccggguggccu

SEQ ID NO: 232265 - RNA, 19 nt, Artificial Sequence
  Description of Artificial Sequence: Synthetic oligonucleotide
cgagcgaguaucugucucc

SEQ ID NO: 232266 - RNA, 19 nt, Artificial Sequence
  Description of Artificial Sequence: Synthetic oligonucleotide
uuggcacguuccucuugcu

SEQ ID NO: 232267 - RNA, 19 nt, Artificial Sequence
  Description of Artificial Sequence: Synthetic oligonucleotide
cgccauaguggccuggagg

SEQ ID NO: 232268 - RNA, 19 nt, Artificial Sequence
  Description of Artificial Sequence: Synthetic oligonucleotide
uggacacgguguccucuuc

SEQ ID NO: 232269 - RNA, 19 nt, Artificial Sequence
  Description of Artificial Sequence: Synthetic oligonucleotide
cccuuccgacucauaaccg

SEQ ID NO: 232270 - RNA, 19 nt, Artificial Sequence
  Description of Artificial Sequence: Synthetic oligonucleotide
cuuccucagcucaaugagu

SEQ ID NO: 232271 - RNA, 19 nt, Artificial Sequence
  Description of Artificial Sequence: Synthetic oligonucleotide
gcccauaucgcugcauggc

SEQ ID NO: 232272 - RNA, 19 nt, Artificial Sequence
  Description of Artificial Sequence: Synthetic oligonucleotide
ccuaaggaaauccuuaguu

SEQ ID NO: 232273 - RNA, 19 nt, Artificial Sequence
  Description of Artificial Sequence: Synthetic oligonucleotide
cucuggcaauacagugaac

SEQ ID NO: 232274 - RNA, 19 nt, Artificial Sequence
  Description of Artificial Sequence: Synthetic oligonucleotide
gagccucgagaacgagcug

SEQ ID NO: 232275 - RNA, 19 nt, Artificial Sequence
  Description of Artificial Sequence: Synthetic oligonucleotide
agaggaguucgaacaccca

SEQ ID NO: 232276 - RNA, 19 nt, Artificial Sequence
  Description of Artificial Sequence: Synthetic oligonucleotide
ggaguucgaacacccagcu

SEQ ID NO: 232277 - RNA, 19 nt, Artificial Sequence
  Description of Artificial Sequence: Synthetic oligonucleotide
ggcgcaacuucuucuugga

SEQ ID NO: 232278 - RNA, 19 nt, Artificial Sequence
  Description of Artificial Sequence: Synthetic oligonucleotide
cgacucauaaccguggaca

SEQ ID NO: 232279 - RNA, 19 nt, Artificial Sequence
  Description of Artificial Sequence: Synthetic oligonucleotide
gacggaguuccggguggcc

SEQ ID NO: 232280 - RNA, 19 nt, Artificial Sequence
  Description of Artificial Sequence: Synthetic oligonucleotide
gaguuagcuuucgggcauc

SEQ ID NO: 232281 - RNA, 19 nt, Artificial Sequence
  Description of Artificial Sequence: Synthetic oligonucleotide
cauaucgcugcauggcaau

SEQ ID NO: 232282 - RNA, 19 nt, Artificial Sequence
  Description of Artificial Sequence: Synthetic oligonucleotide
gccuugcaaguacuugcgc

SEQ ID NO: 232283 - RNA, 19 nt, Artificial Sequence
  Description of Artificial Sequence: Synthetic oligonucleotide
gcguuugaugaagucuggc

SEQ ID NO: 232284 - RNA, 19 nt, Artificial Sequence
  Description of Artificial Sequence: Synthetic oligonucleotide
ccucagcucaaugaguuca

SEQ ID NO: 232285 - RNA, 19 nt, Artificial Sequence
  Description of Artificial Sequence: Synthetic oligonucleotide
agcgaguaucugucuccau

SEQ ID NO: 232286 - RNA, 19 nt, Artificial Sequence
  Description of Artificial Sequence: Synthetic oligonucleotide
gacgagcgaguaucugucu

SEQ ID NO: 232287 - RNA, 19 nt, Artificial Sequence
  Description of Artificial Sequence: Synthetic oligonucleotide
agcgauucauucggcgcaa

SEQ ID NO: 232288 - RNA, 19 nt, Artificial Sequence
  Description of Artificial Sequence: Synthetic oligonucleotide
caaugaguucaggggucuc

SEQ ID NO: 232289 - RNA, 19 nt, Artificial Sequence
  Description of Artificial Sequence: Synthetic oligonucleotide
gcauugguuccaaacacgu

SEQ ID NO: 232290 - RNA, 19 nt, Artificial Sequence
  Description of Artificial Sequence: Synthetic oligonucleotide
ucgguccccagagcucucu

SEQ ID NO: 232291 - RNA, 19 nt, Artificial Sequence
  Description of Artificial Sequence: Synthetic oligonucleotide
ccuugcaaguacuugcgcu

SEQ ID NO: 232292 - RNA, 19 nt, Artificial Sequence
  Description of Artificial Sequence: Synthetic oligonucleotide
cagcuacucgaggucccag

SEQ ID NO: 232293 - RNA, 19 nt, Artificial Sequence
  Description of Artificial Sequence: Synthetic oligonucleotide
uggcaucccuaaggaaauc

SEQ ID NO: 232294 - RNA, 19 nt, Artificial Sequence
  Description of Artificial Sequence: Synthetic oligonucleotide
ggcggcaacugcaauucuc

SEQ ID NO: 232295 - RNA, 19 nt, Artificial Sequence
  Description of Artificial Sequence: Synthetic oligonucleotide
gaugcugcccgcacccgcu

SEQ ID NO: 232296 - RNA, 19 nt, Artificial Sequence
  Description of Artificial Sequence: Synthetic oligonucleotide
cacgacuguccuggggcug

SEQ ID NO: 232297 - RNA, 19 nt, Artificial Sequence
  Description of Artificial Sequence: Synthetic oligonucleotide
cuacaacaucaggccgagc

SEQ ID NO: 232298 - RNA, 19 nt, Artificial Sequence
  Description of Artificial Sequence: Synthetic oligonucleotide
uccucgcgacuccccugga

SEQ ID NO: 232299 - RNA, 19 nt, Artificial Sequence
  Description of Artificial Sequence: Synthetic oligonucleotide
cccauaucgcugcauggca

SEQ ID NO: 232300 - RNA, 19 nt, Artificial Sequence
  Description of Artificial Sequence: Synthetic oligonucleotide
gggguggcccauaucgcug

SEQ ID NO: 232301 - RNA, 19 nt, Artificial Sequence
  Description of Artificial Sequence: Synthetic oligonucleotide
gcggcggcaacugcaauuc

SEQ ID NO: 232302 - RNA, 19 nt, Artificial Sequence
  Description of Artificial Sequence: Synthetic oligonucleotide
gucugcggguguaggucug

SEQ ID NO: 232303 - RNA, 19 nt, Artificial Sequence
  Description of Artificial Sequence: Synthetic oligonucleotide
augugagaagggaccuaaa

SEQ ID NO: 232304 - RNA, 19 nt, Artificial Sequence
  Description of Artificial Sequence: Synthetic oligonucleotide
uuacgacgcuugcgauuuu

SEQ ID NO: 232305 - RNA, 19 nt, Artificial Sequence
  Description of Artificial Sequence: Synthetic oligonucleotide
gcaaugugagaagggaccu

SEQ ID NO: 232306 - RNA, 19 nt, Artificial Sequence
  Description of Artificial Sequence: Synthetic oligonucleotide
cgucgugcaucucuacaac

SEQ ID NO: 232307 - RNA, 19 nt, Artificial Sequence
  Description of Artificial Sequence: Synthetic oligonucleotide
cagagacgagcgaguaucu

SEQ ID NO: 232308 - RNA, 19 nt, Artificial Sequence
  Description of Artificial Sequence: Synthetic oligonucleotide
ccauaucgcugcauggcaa

SEQ ID NO: 232309 - RNA, 19 nt, Artificial Sequence
  Description of Artificial Sequence: Synthetic oligonucleotide
cugcccgcacccgcugggg

SEQ ID NO: 232310 - RNA, 19 nt, Artificial Sequence
  Description of Artificial Sequence: Synthetic oligonucleotide
gcgaguaucugucuccauu

SEQ ID NO: 232311 - RNA, 19 nt, Artificial Sequence
  Description of Artificial Sequence: Synthetic oligonucleotide
caaugugagaagggaccua

SEQ ID NO: 232312 - RNA, 19 nt, Artificial Sequence
  Description of Artificial Sequence: Synthetic oligonucleotide
ggacucuucaucagauggu

SEQ ID NO: 232313 - RNA, 19 nt, Artificial Sequence
  Description of Artificial Sequence: Synthetic oligonucleotide
gucauaaauguggguggau

SEQ ID NO: 232314 - RNA, 19 nt, Artificial Sequence
  Description of Artificial Sequence: Synthetic oligonucleotide
gguuacgacgcuugcgauu

SEQ ID NO: 232315 - RNA, 19 nt, Artificial Sequence
  Description of Artificial Sequence: Synthetic oligonucleotide
ccagcgcuacuuccacacc

SEQ ID NO: 232316 - RNA, 19 nt, Artificial Sequence
  Description of Artificial Sequence: Synthetic oligonucleotide
auaccccguuugccuugca

SEQ ID NO: 232317 - RNA, 19 nt, Artificial Sequence
  Description of Artificial Sequence: Synthetic oligonucleotide
cuuccugacggcucuccuu

SEQ ID NO: 232318 - RNA, 19 nt, Artificial Sequence
  Description of Artificial Sequence: Synthetic oligonucleotide
ggguccgaucaaucucuuc

SEQ ID NO: 232319 - RNA, 19 nt, Artificial Sequence
  Description of Artificial Sequence: Synthetic oligonucleotide
cauccaucgccuccucuau

SEQ ID NO: 232320 - RNA, 19 nt, Artificial Sequence
  Description of Artificial Sequence: Synthetic oligonucleotide
ccacaggcucaccgacucg

SEQ ID NO: 232321 - RNA, 19 nt, Artificial Sequence
  Description of Artificial Sequence: Synthetic oligonucleotide
gaaugccugugcguuugau

SEQ ID NO: 232322 - RNA, 19 nt, Artificial Sequence
  Description of Artificial Sequence: Synthetic oligonucleotide
cgccacaguaaagcgauuc

SEQ ID NO: 232323 - RNA, 19 nt, Artificial Sequence
  Description of Artificial Sequence: Synthetic oligonucleotide
gcaaguacuugcgcuuaaa

SEQ ID NO: 232324 - RNA, 19 nt, Artificial Sequence
  Description of Artificial Sequence: Synthetic oligonucleotide
ccuuccgacucauaaccgu

SEQ ID NO: 232325 - RNA, 19 nt, Artificial Sequence
  Description of Artificial Sequence: Synthetic oligonucleotide
ugggaaccacagggccuac

SEQ ID NO: 232326 - RNA, 19 nt, Artificial Sequence
  Description of Artificial Sequence: Synthetic oligonucleotide
cucgguccccagagcucuc

SEQ ID NO: 232327 - RNA, 19 nt, Artificial Sequence
  Description of Artificial Sequence: Synthetic oligonucleotide
uccgccaguuuggccugaa

SEQ ID NO: 232328 - RNA, 19 nt, Artificial Sequence
  Description of Artificial Sequence: Synthetic oligonucleotide
cccgagggcgaggaacagg

SEQ ID NO: 232329 - RNA, 19 nt, Artificial Sequence
  Description of Artificial Sequence: Synthetic oligonucleotide
gcaucccuaaggaaauccu

SEQ ID NO: 232330 - RNA, 19 nt, Artificial Sequence
  Description of Artificial Sequence: Synthetic oligonucleotide
ggacggaguuccggguggc

SEQ ID NO: 232331 - RNA, 19 nt, Artificial Sequence
  Description of Artificial Sequence: Synthetic oligonucleotide
ccgucugcggguguagguc

SEQ ID NO: 232332 - RNA, 19 nt, Artificial Sequence
  Description of Artificial Sequence: Synthetic oligonucleotide
ccuaaaggauagccagcaa

SEQ ID NO: 232333 - RNA, 19 nt, Artificial Sequence
  Description of Artificial Sequence: Synthetic oligonucleotide
ggcgccauaguggccugga

SEQ ID NO: 232334 - RNA, 19 nt, Artificial Sequence
  Description of Artificial Sequence: Synthetic oligonucleotide
caaccagcuccucgcgacu

SEQ ID NO: 232335 - RNA, 19 nt, Artificial Sequence
  Description of Artificial Sequence: Synthetic oligonucleotide
cuggaucggagcuccuauu

SEQ ID NO: 232336 - RNA, 19 nt, Artificial Sequence
  Description of Artificial Sequence: Synthetic oligonucleotide
gguggcccauaucgcugca

SEQ ID NO: 232337 - RNA, 19 nt, Artificial Sequence
  Description of Artificial Sequence: Synthetic oligonucleotide
ccggguggccuugagguga

SEQ ID NO: 232338 - RNA, 19 nt, Artificial Sequence
  Description of Artificial Sequence: Synthetic oligonucleotide
gaguuccggguggccuuga

SEQ ID NO: 232339 - RNA, 19 nt, Artificial Sequence
  Description of Artificial Sequence: Synthetic oligonucleotide
gcuccuauuuccgccaguu

SEQ ID NO: 232340 - RNA, 19 nt, Artificial Sequence
  Description of Artificial Sequence: Synthetic oligonucleotide
ggaucccaucauggcuccc

SEQ ID NO: 232341 - RNA, 19 nt, Artificial Sequence
  Description of Artificial Sequence: Synthetic oligonucleotide
ccccguuugccuugcaagu

SEQ ID NO: 232342 - RNA, 19 nt, Artificial Sequence
  Description of Artificial Sequence: Synthetic oligonucleotide
gcucaccgacucggagagg

SEQ ID NO: 232343 - RNA, 19 nt, Artificial Sequence
  Description of Artificial Sequence: Synthetic oligonucleotide
ccacaguaaagcgauucau

SEQ ID NO: 232344 - RNA, 19 nt, Artificial Sequence
  Description of Artificial Sequence: Synthetic oligonucleotide
ccgccaguuuggccugaag

SEQ ID NO: 232345 - RNA, 19 nt, Artificial Sequence
  Description of Artificial Sequence: Synthetic oligonucleotide
cugcagaguucuccauuuu

SEQ ID NO: 232346 - RNA, 19 nt, Artificial Sequence
  Description of Artificial Sequence: Synthetic oligonucleotide
gcgauucauucggcgcaac

SEQ ID NO: 232347 - RNA, 19 nt, Artificial Sequence
  Description of Artificial Sequence: Synthetic oligonucleotide
cgacuccccuggaucggag

SEQ ID NO: 232348 - RNA, 19 nt, Artificial Sequence
  Description of Artificial Sequence: Synthetic oligonucleotide
ccuggaucggagcuccuau

SEQ ID NO: 232349 - RNA, 19 nt, Artificial Sequence
  Description of Artificial Sequence: Synthetic oligonucleotide
ccgacucggagaggaggug

SEQ ID NO: 232350 - RNA, 19 nt, Artificial Sequence
  Description of Artificial Sequence: Synthetic oligonucleotide
cucaggugccagcgcuacu

SEQ ID NO: 232351 - RNA, 19 nt, Artificial Sequence
  Description of Artificial Sequence: Synthetic oligonucleotide
gcgacuccccuggaucgga

SEQ ID NO: 232352 - RNA, 19 nt, Artificial Sequence
  Description of Artificial Sequence: Synthetic oligonucleotide
cagugcccaucuuggcaau

SEQ ID NO: 232353 - RNA, 19 nt, Artificial Sequence
  Description of Artificial Sequence: Synthetic oligonucleotide
cgagggcgaggaacaggug

SEQ ID NO: 232354 - RNA, 19 nt, Artificial Sequence
  Description of Artificial Sequence: Synthetic oligonucleotide
cccguuugccuugcaagua

SEQ ID NO: 232355 - RNA, 19 nt, Artificial Sequence
  Description of Artificial Sequence: Synthetic oligonucleotide
cgauucauucggcgcaacu

SEQ ID NO: 232356 - RNA, 19 nt, Artificial Sequence
  Description of Artificial Sequence: Synthetic oligonucleotide
caaugccgucugcgggugu

SEQ ID NO: 232357 - RNA, 19 nt, Artificial Sequence
  Description of Artificial Sequence: Synthetic oligonucleotide
guggcccauaucgcugcau

SEQ ID NO: 232358 - RNA, 19 nt, Artificial Sequence
  Description of Artificial Sequence: Synthetic oligonucleotide
ccuugggaaacagcuuuau

SEQ ID NO: 232359 - RNA, 19 nt, Artificial Sequence
  Description of Artificial Sequence: Synthetic oligonucleotide
cgucugcggguguaggucu

SEQ ID NO: 232360 - RNA, 19 nt, Artificial Sequence
  Description of Artificial Sequence: Synthetic oligonucleotide
gggcuucucgauaccccgu

SEQ ID NO: 232361 - RNA, 19 nt, Artificial Sequence
  Description of Artificial Sequence: Synthetic oligonucleotide
ccugaaugccugugcguuu

SEQ ID NO: 232362 - RNA, 19 nt, Artificial Sequence
  Description of Artificial Sequence: Synthetic oligonucleotide
ccccgagggcgaggaacag

SEQ ID NO: 232363 - RNA, 19 nt, Artificial Sequence
  Description of Artificial Sequence: Synthetic oligonucleotide
gccucgagaacgagcugau

SEQ ID NO: 232364 - RNA, 19 nt, Artificial Sequence
  Description of Artificial Sequence: Synthetic oligonucleotide
ggacagcuuaggggcuucu

SEQ ID NO: 232365 - RNA, 19 nt, Artificial Sequence
  Description of Artificial Sequence: Synthetic oligonucleotide
ggaccccgagggcgaggaa

SEQ ID NO: 232366 - RNA, 19 nt, Artificial Sequence
  Description of Artificial Sequence: Synthetic oligonucleotide
ccccaacaguggcuguucu

SEQ ID NO: 232367 - RNA, 19 nt, Artificial Sequence
  Description of Artificial Sequence: Synthetic oligonucleotide
cgacucggagaggaggugu

SEQ ID NO: 232368 - RNA, 19 nt, Artificial Sequence
  Description of Artificial Sequence: Synthetic oligonucleotide
ggguggccuugaggugaac

SEQ ID NO: 232369 - RNA, 19 nt, Artificial Sequence
  Description of Artificial Sequence: Synthetic oligonucleotide
cgguuacgacgcuugcgau

SEQ ID NO: 232370 - RNA, 19 nt, Artificial Sequence
  Description of Artificial Sequence: Synthetic oligonucleotide
ccucgcgacuccccuggau

SEQ ID NO: 232371 - RNA, 19 nt, Artificial Sequence
  Description of Artificial Sequence: Synthetic oligonucleotide
gggguccgaucaaucucuu

SEQ ID NO: 232372 - RNA, 19 nt, Artificial Sequence
  Description of Artificial Sequence: Synthetic oligonucleotide
ccguuccucuucugauaau

SEQ ID NO: 232373 - RNA, 19 nt, Artificial Sequence
  Description of Artificial Sequence: Synthetic oligonucleotide
ccucgagaacgagcugauu

SEQ ID NO: 232374 - RNA, 19 nt, Artificial Sequence
  Description of Artificial Sequence: Synthetic oligonucleotide
cggcggcaacugcaauucu

SEQ ID NO: 232375 - RNA, 19 nt, Artificial Sequence
  Description of Artificial Sequence: Synthetic oligonucleotide
ccgccacaguaaagcgauu

SEQ ID NO: 232376 - RNA, 19 nt, Artificial Sequence
  Description of Artificial Sequence: Synthetic oligonucleotide
aaggcgaugaguuaguccc

SEQ ID NO: 232377 - RNA, 19 nt, Artificial Sequence
  Description of Artificial Sequence: Synthetic oligonucleotide
agaguuaucaaaccgcucc

SEQ ID NO: 232378 - RNA, 19 nt, Artificial Sequence
  Description of Artificial Sequence: Synthetic oligonucleotide
aaaugcuugaaguugaaca

SEQ ID NO: 232379 - RNA, 19 nt, Artificial Sequence
  Description of Artificial Sequence: Synthetic oligonucleotide
aacagcgacgcguugagac

SEQ ID NO: 232380 - RNA, 19 nt, Artificial Sequence
  Description of Artificial Sequence: Synthetic oligonucleotide
uauggcuacaaucugaagu

SEQ ID NO: 232381 - RNA, 19 nt, Artificial Sequence
  Description of Artificial Sequence: Synthetic oligonucleotide
ugagguaaggaguggaucg

SEQ ID NO: 232382 - RNA, 19 nt, Artificial Sequence
  Description of Artificial Sequence: Synthetic oligonucleotide
aagagagagagagagagag

SEQ ID NO: 232383 - RNA, 19 nt, Artificial Sequence
  Description of Artificial Sequence: Synthetic oligonucleotide
ugaguuagucccaugaagc

SEQ ID NO: 232384 - RNA, 19 nt, Artificial Sequence
  Description of Artificial Sequence: Synthetic oligonucleotide
aaaggacuaugauacauug

SEQ ID NO: 232385 - RNA, 19 nt, Artificial Sequence
  Description of Artificial Sequence: Synthetic oligonucleotide
uuuaauccuauuuugucca

SEQ ID NO: 232386 - RNA, 19 nt, Artificial Sequence
  Description of Artificial Sequence: Synthetic oligonucleotide
gauacauugacaggcaggg

SEQ ID NO: 232387 - RNA, 19 nt, Artificial Sequence
  Description of Artificial Sequence: Synthetic oligonucleotide
uguuuuguagccaggagca

SEQ ID NO: 232388 - RNA, 19 nt, Artificial Sequence
  Description of Artificial Sequence: Synthetic oligonucleotide
ugucgguugagaaauuccg

SEQ ID NO: 232389 - RNA, 19 nt, Artificial Sequence
  Description of Artificial Sequence: Synthetic oligonucleotide
gaagacaggacauagaacu

SEQ ID NO: 232390 - RNA, 19 nt, Artificial Sequence
  Description of Artificial Sequence: Synthetic oligonucleotide
aaaagguucacaaacgcga

SEQ ID NO: 232391 - RNA, 19 nt, Artificial Sequence
  Description of Artificial Sequence: Synthetic oligonucleotide
agagacaacuucuacaacu

SEQ ID NO: 232392 - RNA, 19 nt, Artificial Sequence
  Description of Artificial Sequence: Synthetic oligonucleotide
agaacuaauagggaggauc

SEQ ID NO: 232393 - RNA, 19 nt, Artificial Sequence
  Description of Artificial Sequence: Synthetic oligonucleotide
ucacaaacgcgacagaacu

SEQ ID NO: 232394 - RNA, 19 nt, Artificial Sequence
  Description of Artificial Sequence: Synthetic oligonucleotide
gagagagagagagagagag

SEQ ID NO: 232395 - RNA, 19 nt, Artificial Sequence
  Description of Artificial Sequence: Synthetic oligonucleotide
uuagacuucgcucuccgca

SEQ ID NO: 232396 - RNA, 19 nt, Artificial Sequence
  Description of Artificial Sequence: Synthetic oligonucleotide
aacaagacucaccauauuu

SEQ ID NO: 232397 - RNA, 19 nt, Artificial Sequence
  Description of Artificial Sequence: Synthetic oligonucleotide
aaguaugcaagggaaggcg

SEQ ID NO: 232398 - RNA, 19 nt, Artificial Sequence
  Description of Artificial Sequence: Synthetic oligonucleotide
agagggaagagagagagag

SEQ ID NO: 232399 - RNA, 19 nt, Artificial Sequence
  Description of Artificial Sequence: Synthetic oligonucleotide
uccgcuacugcuuuggcag

SEQ ID NO: 232400 - RNA, 19 nt, Artificial Sequence
  Description of Artificial Sequence: Synthetic oligonucleotide
uacagagacgugaacacug

SEQ ID NO: 232401 - RNA, 19 nt, Artificial Sequence
  Description of Artificial Sequence: Synthetic oligonucleotide
acuaugauacauugacagg

SEQ ID NO: 232402 - RNA, 19 nt, Artificial Sequence
  Description of Artificial Sequence: Synthetic oligonucleotide
gacgcguugagacacuccg

SEQ ID NO: 232403 - RNA, 19 nt, Artificial Sequence
  Description of Artificial Sequence: Synthetic oligonucleotide
ugagaaauuccgcuacugc

SEQ ID NO: 232404 - RNA, 19 nt, Artificial Sequence
  Description of Artificial Sequence: Synthetic oligonucleotide
uggauuucuaaguaaguaa

SEQ ID NO: 232405 - RNA, 19 nt, Artificial Sequence
  Description of Artificial Sequence: Synthetic oligonucleotide
augaguuagucccaugaag

SEQ ID NO: 232406 - RNA, 19 nt, Artificial Sequence
  Description of Artificial Sequence: Synthetic oligonucleotide
guuagucccaugaagcucg

SEQ ID NO: 232407 - RNA, 19 nt, Artificial Sequence
  Description of Artificial Sequence: Synthetic oligonucleotide
gaacuaauagggaggaucc

SEQ ID NO: 232408 - RNA, 19 nt, Artificial Sequence
  Description of Artificial Sequence: Synthetic oligonucleotide
aauguugucgguugagaaa

SEQ ID NO: 232409 - RNA, 19 nt, Artificial Sequence
  Description of Artificial Sequence: Synthetic oligonucleotide
cacuaaugauguaagcagg

SEQ ID NO: 232410 - RNA, 19 nt, Artificial Sequence
  Description of Artificial Sequence: Synthetic oligonucleotide
cagagcaaguucaaguggg

SEQ ID NO: 232411 - RNA, 19 nt, Artificial Sequence
  Description of Artificial Sequence: Synthetic oligonucleotide
aggagaguuaucaaaccgc

SEQ ID NO: 232412 - RNA, 19 nt, Artificial Sequence
  Description of Artificial Sequence: Synthetic oligonucleotide
ucuuagacuucgcucuccg

SEQ ID NO: 232413 - RNA, 19 nt, Artificial Sequence
  Description of Artificial Sequence: Synthetic oligonucleotide
uaugauacauugacaggca

SEQ ID NO: 232414 - RNA, 19 nt, Artificial Sequence
  Description of Artificial Sequence: Synthetic oligonucleotide
aacgcgacagaacuuuucu

SEQ ID NO: 232415 - RNA, 19 nt, Artificial Sequence
  Description of Artificial Sequence: Synthetic oligonucleotide
uucccuuauagaagugugg

SEQ ID NO: 232416 - RNA, 19 nt, Artificial Sequence
  Description of Artificial Sequence: Synthetic oligonucleotide
agggaagagagagagagag

SEQ ID NO: 232417 - RNA, 19 nt, Artificial Sequence
  Description of Artificial Sequence: Synthetic oligonucleotide
uaaagaucguccuccauuc

SEQ ID NO: 232418 - RNA, 19 nt, Artificial Sequence
  Description of Artificial Sequence: Synthetic oligonucleotide
uucucuuaaagaucguccu

SEQ ID NO: 232419 - RNA, 19 nt, Artificial Sequence
  Description of Artificial Sequence: Synthetic oligonucleotide
cacaauaccaggugguccc

SEQ ID NO: 232420 - RNA, 19 nt, Artificial Sequence
  Description of Artificial Sequence: Synthetic oligonucleotide
uuuauucacaauacugaua

SEQ ID NO: 232421 - RNA, 19 nt, Artificial Sequence
  Description of Artificial Sequence: Synthetic oligonucleotide
aauuccgcuacugcuuugg

SEQ ID NO: 232422 - RNA, 19 nt, Artificial Sequence
  Description of Artificial Sequence: Synthetic oligonucleotide
aaagguucacaaacgcgac

SEQ ID NO: 232423 - RNA, 19 nt, Artificial Sequence
  Description of Artificial Sequence: Synthetic oligonucleotide
agguacauuuuguccaugg

SEQ ID NO: 232424 - RNA, 19 nt, Artificial Sequence
  Description of Artificial Sequence: Synthetic oligonucleotide
ucauuaucaucacccaaac

SEQ ID NO: 232425 - RNA, 19 nt, Artificial Sequence
  Description of Artificial Sequence: Synthetic oligonucleotide
aaucccuaacccuugguuu

SEQ ID NO: 232426 - RNA, 19 nt, Artificial Sequence
  Description of Artificial Sequence: Synthetic oligonucleotide
gacgugaacacugauuccc

SEQ ID NO: 232427 - RNA, 19 nt, Artificial Sequence
  Description of Artificial Sequence: Synthetic oligonucleotide
ggaagagagagagagagag

SEQ ID NO: 232428 - RNA, 19 nt, Artificial Sequence
  Description of Artificial Sequence: Synthetic oligonucleotide
acaaucugaaguaugcaag

SEQ ID NO: 232429 - RNA, 19 nt, Artificial Sequence
  Description of Artificial Sequence: Synthetic oligonucleotide
uuaggcuccacaagagggc

SEQ ID NO: 232430 - RNA, 19 nt, Artificial Sequence
  Description of Artificial Sequence: Synthetic oligonucleotide
aaaucccuaacccuugguu

SEQ ID NO: 232431 - RNA, 19 nt, Artificial Sequence
  Description of Artificial Sequence: Synthetic oligonucleotide
gauguuaauacccgggucu

SEQ ID NO: 232432 - RNA, 19 nt, Artificial Sequence
  Description of Artificial Sequence: Synthetic oligonucleotide
gagagagagagagagagga

SEQ ID NO: 232433 - RNA, 19 nt, Artificial Sequence
  Description of Artificial Sequence: Synthetic oligonucleotide
uugucgguugagaaauucc

SEQ ID NO: 232434 - RNA, 19 nt, Artificial Sequence
  Description of Artificial Sequence: Synthetic oligonucleotide
acuucguugggguucacca

SEQ ID NO: 232435 - RNA, 19 nt, Artificial Sequence
  Description of Artificial Sequence: Synthetic oligonucleotide
acacaauaccagguggucc

SEQ ID NO: 232436 - RNA, 19 nt, Artificial Sequence
  Description of Artificial Sequence: Synthetic oligonucleotide
uguuguuagauuugauuua

SEQ ID NO: 232437 - RNA, 19 nt, Artificial Sequence
  Description of Artificial Sequence: Synthetic oligonucleotide
ggaguaaggaucuugcgac

SEQ ID NO: 232438 - RNA, 19 nt, Artificial Sequence
  Description of Artificial Sequence: Synthetic oligonucleotide
agacgugaacacugauucc

SEQ ID NO: 232439 - RNA, 19 nt, Artificial Sequence
  Description of Artificial Sequence: Synthetic oligonucleotide
agaaaucccuaacccuugg

SEQ ID NO: 232440 - RNA, 19 nt, Artificial Sequence
  Description of Artificial Sequence: Synthetic oligonucleotide
guaggggucguugacgugg

SEQ ID NO: 232441 - RNA, 19 nt, Artificial Sequence
  Description of Artificial Sequence: Synthetic oligonucleotide
aguuagucccaugaagcuc

SEQ ID NO: 232442 - RNA, 19 nt, Artificial Sequence
  Description of Artificial Sequence: Synthetic oligonucleotide
ucccuuauagaagugugga

SEQ ID NO: 232443 - RNA, 19 nt, Artificial Sequence
  Description of Artificial Sequence: Synthetic oligonucleotide
uagacuucgcucuccgcag

SEQ ID NO: 232444 - RNA, 19 nt, Artificial Sequence
  Description of Artificial Sequence: Synthetic oligonucleotide
acuuccgccaccgugaccu

SEQ ID NO: 232445 - RNA, 19 nt, Artificial Sequence
  Description of Artificial Sequence: Synthetic oligonucleotide
uguugauagggauggcgga

SEQ ID NO: 232446 - RNA, 19 nt, Artificial Sequence
  Description of Artificial Sequence: Synthetic oligonucleotide
gggagaucgguccugagcc

SEQ ID NO: 232447 - RNA, 19 nt, Artificial Sequence
  Description of Artificial Sequence: Synthetic oligonucleotide
uucuacaugcgggacgucc

SEQ ID NO: 232448 - RNA, 19 nt, Artificial Sequence
  Description of Artificial Sequence: Synthetic oligonucleotide
uucgcacacguacccaaag

SEQ ID NO: 232449 - RNA, 19 nt, Artificial Sequence
  Description of Artificial Sequence: Synthetic oligonucleotide
ucuucuacaugcgggacgu

SEQ ID NO: 232450 - RNA, 19 nt, Artificial Sequence
  Description of Artificial Sequence: Synthetic oligonucleotide
uaauagggaggauccaaaa

SEQ ID NO: 232451 - RNA, 19 nt, Artificial Sequence
  Description of Artificial Sequence: Synthetic oligonucleotide
agucgagagagagcagucc

SEQ ID NO: 232452 - RNA, 19 nt, Artificial Sequence
  Description of Artificial Sequence: Synthetic oligonucleotide
gagagagagagagaggaga

SEQ ID NO: 232453 - RNA, 19 nt, Artificial Sequence
  Description of Artificial Sequence: Synthetic oligonucleotide
aaacgcgacagaacuuuuc

SEQ ID NO: 232454 - RNA, 19 nt, Artificial Sequence
  Description of Artificial Sequence: Synthetic oligonucleotide
uaauacccgggucuucuac

SEQ ID NO: 232455 - RNA, 19 nt, Artificial Sequence
  Description of Artificial Sequence: Synthetic oligonucleotide
gagagagagaggagaaaag

SEQ ID NO: 232456 - RNA, 19 nt, Artificial Sequence
  Description of Artificial Sequence: Synthetic oligonucleotide
gucgagagagagcaguccc

SEQ ID NO: 232457 - RNA, 19 nt, Artificial Sequence
  Description of Artificial Sequence: Synthetic oligonucleotide
cauucuuagacuucgcucu

SEQ ID NO: 232458 - RNA, 19 nt, Artificial Sequence
  Description of Artificial Sequence: Synthetic oligonucleotide
agagagagagaggagaaaa

SEQ ID NO: 232459 - RNA, 19 nt, Artificial Sequence
  Description of Artificial Sequence: Synthetic oligonucleotide
aacccuggauuucuaagua

SEQ ID NO: 232460 - RNA, 19 nt, Artificial Sequence
  Description of Artificial Sequence: Synthetic oligonucleotide
augaagcucguauuaacuu

SEQ ID NO: 232461 - RNA, 19 nt, Artificial Sequence
  Description of Artificial Sequence: Synthetic oligonucleotide
gacacuccggcggugagag

SEQ ID NO: 232462 - RNA, 19 nt, Artificial Sequence
  Description of Artificial Sequence: Synthetic oligonucleotide
acacugauucccuuauaga

SEQ ID NO: 232463 - RNA, 19 nt, Artificial Sequence
  Description of Artificial Sequence: Synthetic oligonucleotide
agcacuccgcccaacagcg

SEQ ID NO: 232464 - RNA, 19 nt, Artificial Sequence
  Description of Artificial Sequence: Synthetic oligonucleotide
uucacgaccuguucuguuc

SEQ ID NO: 232465 - RNA, 19 nt, Artificial Sequence
  Description of Artificial Sequence: Synthetic oligonucleotide
auguugucgguugagaaau

SEQ ID NO: 232466 - RNA, 19 nt, Artificial Sequence
  Description of Artificial Sequence: Synthetic oligonucleotide
gcuacaaucugaaguaugc

SEQ ID NO: 232467 - RNA, 19 nt, Artificial Sequence
  Description of Artificial Sequence: Synthetic oligonucleotide
gggaucggaauguugucgg

SEQ ID NO: 232468 - RNA, 19 nt, Artificial Sequence
  Description of Artificial Sequence: Synthetic oligonucleotide
gggauugaccuacagugcc

SEQ ID NO: 232469 - RNA, 19 nt, Artificial Sequence
  Description of Artificial Sequence: Synthetic oligonucleotide
ugggccgugcaggagaucc

SEQ ID NO: 232470 - RNA, 19 nt, Artificial Sequence
  Description of Artificial Sequence: Synthetic oligonucleotide
gagguaaggaguggaucgg

SEQ ID NO: 232471 - RNA, 19 nt, Artificial Sequence
  Description of Artificial Sequence: Synthetic oligonucleotide
cucggugagauaguucugc

SEQ ID NO: 232472 - RNA, 19 nt, Artificial Sequence
  Description of Artificial Sequence: Synthetic oligonucleotide
ugggucaagcaacucugga

SEQ ID NO: 232473 - RNA, 19 nt, Artificial Sequence
  Description of Artificial Sequence: Synthetic oligonucleotide
gaugaguuagucccaugaa

SEQ ID NO: 232474 - RNA, 19 nt, Artificial Sequence
  Description of Artificial Sequence: Synthetic oligonucleotide
ugcuggcagauuuaauccu

SEQ ID NO: 232475 - RNA, 19 nt, Artificial Sequence
  Description of Artificial Sequence: Synthetic oligonucleotide
uugacgugggaguaaggau

SEQ ID NO: 232476 - RNA, 19 nt, Artificial Sequence
  Description of Artificial Sequence: Synthetic oligonucleotide
agagaaaucccuaacccuu

SEQ ID NO: 232477 - RNA, 19 nt, Artificial Sequence
  Description of Artificial Sequence: Synthetic oligonucleotide
aaauuccgcuacugcuuug

SEQ ID NO: 232478 - RNA, 19 nt, Artificial Sequence
  Description of Artificial Sequence: Synthetic oligonucleotide
ucccaugaagcucguauua

SEQ ID NO: 232479 - RNA, 19 nt, Artificial Sequence
  Description of Artificial Sequence: Synthetic oligonucleotide
agcgcaacucaacacagua

SEQ ID NO: 232480 - RNA, 19 nt, Artificial Sequence
  Description of Artificial Sequence: Synthetic oligonucleotide
acuaauagggaggauccaa

SEQ ID NO: 232481 - RNA, 19 nt, Artificial Sequence
  Description of Artificial Sequence: Synthetic oligonucleotide
uggcuucacgaccuguucu

SEQ ID NO: 232482 - RNA, 19 nt, Artificial Sequence
  Description of Artificial Sequence: Synthetic oligonucleotide
aagacucaccauauuuaca

SEQ ID NO: 232483 - RNA, 19 nt, Artificial Sequence
  Description of Artificial Sequence: Synthetic oligonucleotide
cacgccaccgaagagguug

SEQ ID NO: 232484 - RNA, 19 nt, Artificial Sequence
  Description of Artificial Sequence: Synthetic oligonucleotide
gagaaaucccuaacccuug

SEQ ID NO: 232485 - RNA, 19 nt, Artificial Sequence
  Description of Artificial Sequence: Synthetic oligonucleotide
acaaacgcgacagaacuuu

SEQ ID NO: 232486 - RNA, 19 nt, Artificial Sequence
  Description of Artificial Sequence: Synthetic oligonucleotide
guagauaggcugguagggc

SEQ ID NO: 232487 - RNA, 19 nt, Artificial Sequence
  Description of Artificial Sequence: Synthetic oligonucleotide
agugucccaauaucacugu

SEQ ID NO: 232488 - RNA, 19 nt, Artificial Sequence
  Description of Artificial Sequence: Synthetic oligonucleotide
uuugcgucucccugcuggc

SEQ ID NO: 232489 - RNA, 19 nt, Artificial Sequence
  Description of Artificial Sequence: Synthetic oligonucleotide
uuccgcuacugcuuuggca

SEQ ID NO: 232490 - RNA, 19 nt, Artificial Sequence
  Description of Artificial Sequence: Synthetic oligonucleotide
aaggacuaugauacauuga

SEQ ID NO: 232491 - RNA, 19 nt, Artificial Sequence
  Description of Artificial Sequence: Synthetic oligonucleotide
ucguugacgugggaguaag

SEQ ID NO: 232492 - RNA, 19 nt, Artificial Sequence
  Description of Artificial Sequence: Synthetic oligonucleotide
cuaauagggaggauccaaa

SEQ ID NO: 232493 - RNA, 19 nt, Artificial Sequence
  Description of Artificial Sequence: Synthetic oligonucleotide
gagauccucgugccgccgg

SEQ ID NO: 232494 - RNA, 19 nt, Artificial Sequence
  Description of Artificial Sequence: Synthetic oligonucleotide
auguggccggugaagacac

SEQ ID NO: 232495 - RNA, 19 nt, Artificial Sequence
  Description of Artificial Sequence: Synthetic oligonucleotide
aacuaauagggaggaucca

SEQ ID NO: 232496 - RNA, 19 nt, Artificial Sequence
  Description of Artificial Sequence: Synthetic oligonucleotide
cuuagacuucgcucuccgc

SEQ ID NO: 232497 - RNA, 19 nt, Artificial Sequence
  Description of Artificial Sequence: Synthetic oligonucleotide
acugccagcgcaacucaac

SEQ ID NO: 232498 - RNA, 19 nt, Artificial Sequence
  Description of Artificial Sequence: Synthetic oligonucleotide
uacaugcgggacguccucg

SEQ ID NO: 232499 - RNA, 19 nt, Artificial Sequence
  Description of Artificial Sequence: Synthetic oligonucleotide
acaagacucaccauauuua

SEQ ID NO: 232500 - RNA, 19 nt, Artificial Sequence
  Description of Artificial Sequence: Synthetic oligonucleotide
gagaucgguccugagccag

SEQ ID NO: 232501 - RNA, 19 nt, Artificial Sequence
  Description of Artificial Sequence: Synthetic oligonucleotide
agagagagagagagagagg

SEQ ID NO: 232502 - RNA, 19 nt, Artificial Sequence
  Description of Artificial Sequence: Synthetic oligonucleotide
gauugaccuacagugccca

SEQ ID NO: 232503 - RNA, 19 nt, Artificial Sequence
  Description of Artificial Sequence: Synthetic oligonucleotide
auaggguugggccgcgagu

SEQ ID NO: 232504 - RNA, 19 nt, Artificial Sequence
  Description of Artificial Sequence: Synthetic oligonucleotide
gagagagagcagucccgag

SEQ ID NO: 232505 - RNA, 19 nt, Artificial Sequence
  Description of Artificial Sequence: Synthetic oligonucleotide
guauggcuacaaucugaag

SEQ ID NO: 232506 - RNA, 19 nt, Artificial Sequence
  Description of Artificial Sequence: Synthetic oligonucleotide
cucgauggcgugagguaag

SEQ ID NO: 232507 - RNA, 19 nt, Artificial Sequence
  Description of Artificial Sequence: Synthetic oligonucleotide
aucccuaacccuugguuua

SEQ ID NO: 232508 - RNA, 19 nt, Artificial Sequence
  Description of Artificial Sequence: Synthetic oligonucleotide
gaguuagucccaugaagcu

SEQ ID NO: 232509 - RNA, 19 nt, Artificial Sequence
  Description of Artificial Sequence: Synthetic oligonucleotide
accauaggagaguuaucaa

SEQ ID NO: 232510 - RNA, 19 nt, Artificial Sequence
  Description of Artificial Sequence: Synthetic oligonucleotide
gucgguugagaaauuccgc

SEQ ID NO: 232511 - RNA, 19 nt, Artificial Sequence
  Description of Artificial Sequence: Synthetic oligonucleotide
accgccgggcugccgaagc

SEQ ID NO: 232512 - RNA, 19 nt, Artificial Sequence
  Description of Artificial Sequence: Synthetic oligonucleotide
uuucgcacacguacccaaa

SEQ ID NO: 232513 - RNA, 19 nt, Artificial Sequence
  Description of Artificial Sequence: Synthetic oligonucleotide
acagcgacgcguugagaca

SEQ ID NO: 232514 - RNA, 19 nt, Artificial Sequence
  Description of Artificial Sequence: Synthetic oligonucleotide
acacacaauaccagguggu

SEQ ID NO: 232515 - RNA, 19 nt, Artificial Sequence
  Description of Artificial Sequence: Synthetic oligonucleotide
gauucccuuauagaagugu

SEQ ID NO: 232516 - RNA, 19 nt, Artificial Sequence
  Description of Artificial Sequence: Synthetic oligonucleotide
aggagcgacaggcgacccg

SEQ ID NO: 232517 - RNA, 19 nt, Artificial Sequence
  Description of Artificial Sequence: Synthetic oligonucleotide
gcuuuuggcgcuguugucc

SEQ ID NO: 232518 - RNA, 19 nt, Artificial Sequence
  Description of Artificial Sequence: Synthetic oligonucleotide
agagagagagagaggagaa

SEQ ID NO: 232519 - RNA, 19 nt, Artificial Sequence
  Description of Artificial Sequence: Synthetic oligonucleotide
guugucgguugagaaauuc

SEQ ID NO: 232520 - RNA, 19 nt, Artificial Sequence
  Description of Artificial Sequence: Synthetic oligonucleotide
agggcggugaccgcugcac

SEQ ID NO: 232521 - RNA, 19 nt, Artificial Sequence
  Description of Artificial Sequence: Synthetic oligonucleotide
ugagacacuccggcgguga

SEQ ID NO: 232522 - RNA, 19 nt, Artificial Sequence
  Description of Artificial Sequence: Synthetic oligonucleotide
aguacaucuagaacugcuu

SEQ ID NO: 232523 - RNA, 19 nt, Artificial Sequence
  Description of Artificial Sequence: Synthetic oligonucleotide
gcgacagaacuuuucuuug

SEQ ID NO: 232524 - RNA, 19 nt, Artificial Sequence
  Description of Artificial Sequence: Synthetic oligonucleotide
agagagagagagagaggag

SEQ ID NO: 232525 - RNA, 19 nt, Artificial Sequence
  Description of Artificial Sequence: Synthetic oligonucleotide
guuucgcacacguacccaa

SEQ ID NO: 232526 - RNA, 19 nt, Artificial Sequence
  Description of Artificial Sequence: Synthetic oligonucleotide
cacuccgcccaacagcgac

SEQ ID NO: 232527 - RNA, 19 nt, Artificial Sequence
  Description of Artificial Sequence: Synthetic oligonucleotide
ggauguuaauacccggguc

SEQ ID NO: 232528 - RNA, 19 nt, Artificial Sequence
  Description of Artificial Sequence: Synthetic oligonucleotide
augcgggacguccucgaug

SEQ ID NO: 232529 - RNA, 19 nt, Artificial Sequence
  Description of Artificial Sequence: Synthetic oligonucleotide
gaagagagagagagagaga

SEQ ID NO: 232530 - RNA, 19 nt, Artificial Sequence
  Description of Artificial Sequence: Synthetic oligonucleotide
cguugagacacuccggcgg

SEQ ID NO: 232531 - RNA, 19 nt, Artificial Sequence
  Description of Artificial Sequence: Synthetic oligonucleotide
ggagcgacaggcgacccgg

SEQ ID NO: 232532 - RNA, 19 nt, Artificial Sequence
  Description of Artificial Sequence: Synthetic oligonucleotide
uggccggugaagacacaca

SEQ ID NO: 232533 - RNA, 19 nt, Artificial Sequence
  Description of Artificial Sequence: Synthetic oligonucleotide
gccgguacgucccugcgag

SEQ ID NO: 232534 - RNA, 19 nt, Artificial Sequence
  Description of Artificial Sequence: Synthetic oligonucleotide
agagacgugaacacugauu

SEQ ID NO: 232535 - RNA, 19 nt, Artificial Sequence
  Description of Artificial Sequence: Synthetic oligonucleotide
gagacacuccggcggugag

SEQ ID NO: 232536 - RNA, 19 nt, Artificial Sequence
  Description of Artificial Sequence: Synthetic oligonucleotide
cacacaauaccaggugguc

SEQ ID NO: 232537 - RNA, 19 nt, Artificial Sequence
  Description of Artificial Sequence: Synthetic oligonucleotide
gaaauuccgcuacugcuuu

SEQ ID NO: 232538 - RNA, 19 nt, Artificial Sequence
  Description of Artificial Sequence: Synthetic oligonucleotide
agaucgguccugagccagc

SEQ ID NO: 232539 - RNA, 19 nt, Artificial Sequence
  Description of Artificial Sequence: Synthetic oligonucleotide
gagaguuaucaaaccgcuc

SEQ ID NO: 232540 - RNA, 19 nt, Artificial Sequence
  Description of Artificial Sequence: Synthetic oligonucleotide
uggaucgggagguccccga

SEQ ID NO: 232541 - RNA, 19 nt, Artificial Sequence
  Description of Artificial Sequence: Synthetic oligonucleotide
uaggguugggccgcgaguu

SEQ ID NO: 232542 - RNA, 19 nt, Artificial Sequence
  Description of Artificial Sequence: Synthetic oligonucleotide
aguuucgcacacguaccca

SEQ ID NO: 232543 - RNA, 19 nt, Artificial Sequence
  Description of Artificial Sequence: Synthetic oligonucleotide
acaugcgggacguccucga

SEQ ID NO: 232544 - RNA, 19 nt, Artificial Sequence
  Description of Artificial Sequence: Synthetic oligonucleotide
aggguugggccgcgaguuc

SEQ ID NO: 232545 - RNA, 19 nt, Artificial Sequence
  Description of Artificial Sequence: Synthetic oligonucleotide
gccagcgcaacucaacaca

SEQ ID NO: 232546 - RNA, 19 nt, Artificial Sequence
  Description of Artificial Sequence: Synthetic oligonucleotide
gaaaucccuaacccuuggu

SEQ ID NO: 232547 - RNA, 19 nt, Artificial Sequence
  Description of Artificial Sequence: Synthetic oligonucleotide
agagagagagagagagaga

SEQ ID NO: 232548 - RNA, 19 nt, Artificial Sequence
  Description of Artificial Sequence: Synthetic oligonucleotide
gccaccgugaccuuguacu

SEQ ID NO: 232549 - RNA, 19 nt, Artificial Sequence
  Description of Artificial Sequence: Synthetic oligonucleotide
gaagcucguauuaacuuuu

SEQ ID NO: 232550 - RNA, 19 nt, Artificial Sequence
  Description of Artificial Sequence: Synthetic oligonucleotide
gcguugagacacuccggcg

SEQ ID NO: 232551 - RNA, 19 nt, Artificial Sequence
  Description of Artificial Sequence: Synthetic oligonucleotide
cagcgacgcguugagacac

SEQ ID NO: 232552 - RNA, 19 nt, Artificial Sequence
  Description of Artificial Sequence: Synthetic oligonucleotide
cugccagcgcaacucaaca

SEQ ID NO: 232553 - RNA, 19 nt, Artificial Sequence
  Description of Artificial Sequence: Synthetic oligonucleotide
gaguaaggaucuugcgacu

SEQ ID NO: 232554 - RNA, 19 nt, Artificial Sequence
  Description of Artificial Sequence: Synthetic oligonucleotide
ggcggcgcagcguagcagc

SEQ ID NO: 232555 - RNA, 19 nt, Artificial Sequence
  Description of Artificial Sequence: Synthetic oligonucleotide
gagagagagagaggagaaa

SEQ ID NO: 232556 - RNA, 19 nt, Artificial Sequence
  Description of Artificial Sequence: Synthetic oligonucleotide
ggggucguugacgugggag

SEQ ID NO: 232557 - RNA, 19 nt, Artificial Sequence
  Description of Artificial Sequence: Synthetic oligonucleotide
caggcccgacagcuggugg

SEQ ID NO: 232558 - RNA, 19 nt, Artificial Sequence
  Description of Artificial Sequence: Synthetic oligonucleotide
ucgugccgccgguacgucc

SEQ ID NO: 232559 - RNA, 19 nt, Artificial Sequence
  Description of Artificial Sequence: Synthetic oligonucleotide
acuugcucauugggaucgg

SEQ ID NO: 232560 - RNA, 19 nt, Artificial Sequence
  Description of Artificial Sequence: Synthetic oligonucleotide
guugagacacuccggcggu

SEQ ID NO: 232561 - RNA, 19 nt, Artificial Sequence
  Description of Artificial Sequence: Synthetic oligonucleotide
ggggauugaccuacagugc

SEQ ID NO: 232562 - RNA, 19 nt, Artificial Sequence
  Description of Artificial Sequence: Synthetic oligonucleotide
guacuuccgccaccgugac

SEQ ID NO: 232563 - RNA, 19 nt, Artificial Sequence
  Description of Artificial Sequence: Synthetic oligonucleotide
acgcgacagaacuuuucuu

SEQ ID NO: 232564 - RNA, 19 nt, Artificial Sequence
  Description of Artificial Sequence: Synthetic oligonucleotide
cuccgcccaacagcgacgc

SEQ ID NO: 232565 - RNA, 19 nt, Artificial Sequence
  Description of Artificial Sequence: Synthetic oligonucleotide
cuuguacuucgagguggag

SEQ ID NO: 232566 - RNA, 19 nt, Artificial Sequence
  Description of Artificial Sequence: Synthetic oligonucleotide
ggacuaugauacauugaca

SEQ ID NO: 232567 - RNA, 19 nt, Artificial Sequence
  Description of Artificial Sequence: Synthetic oligonucleotide
gagggaagagagagagaga

SEQ ID NO: 232568 - RNA, 19 nt, Artificial Sequence
  Description of Artificial Sequence: Synthetic oligonucleotide
ggaguggaucgggaggucc

SEQ ID NO: 232569 - RNA, 19 nt, Artificial Sequence
  Description of Artificial Sequence: Synthetic oligonucleotide
acgcguugagacacuccgg

SEQ ID NO: 232570 - RNA, 19 nt, Artificial Sequence
  Description of Artificial Sequence: Synthetic oligonucleotide
auguaagcagggugacguu

SEQ ID NO: 232571 - RNA, 19 nt, Artificial Sequence
  Description of Artificial Sequence: Synthetic oligonucleotide
uugagacacuccggcggug

SEQ ID NO: 232572 - RNA, 19 nt, Artificial Sequence
  Description of Artificial Sequence: Synthetic oligonucleotide
cuguaggggucguugacgu

SEQ ID NO: 232573 - RNA, 19 nt, Artificial Sequence
  Description of Artificial Sequence: Synthetic oligonucleotide
gcgacccggaacugaacag

SEQ ID NO: 232574 - RNA, 19 nt, Artificial Sequence
  Description of Artificial Sequence: Synthetic oligonucleotide
gaacacugauucccuuaua

SEQ ID NO: 232575 - RNA, 19 nt, Artificial Sequence
  Description of Artificial Sequence: Synthetic oligonucleotide
ugcucagaggacgcuuuua

SEQ ID NO: 232576 - RNA, 19 nt, Artificial Sequence
  Description of Artificial Sequence: Synthetic oligonucleotide
ggagaguuaucaaaccgcu

SEQ ID NO: 232577 - RNA, 19 nt, Artificial Sequence
  Description of Artificial Sequence: Synthetic oligonucleotide
gggauguuaauacccgggu

SEQ ID NO: 232578 - RNA, 19 nt, Artificial Sequence
  Description of Artificial Sequence: Synthetic oligonucleotide
cuacugccagcgcaacuca

SEQ ID NO: 232579 - RNA, 19 nt, Artificial Sequence
  Description of Artificial Sequence: Synthetic oligonucleotide
uccgcccaacagcgacgcg

SEQ ID NO: 232580 - RNA, 19 nt, Artificial Sequence
  Description of Artificial Sequence: Synthetic oligonucleotide
gcuaaauguaauacuaauu

SEQ ID NO: 232581 - RNA, 19 nt, Artificial Sequence
  Description of Artificial Sequence: Synthetic oligonucleotide
ggaucgggagguccccgag

SEQ ID NO: 232582 - RNA, 19 nt, Artificial Sequence
  Description of Artificial Sequence: Synthetic oligonucleotide
cgaugaguuagucccauga

SEQ ID NO: 232583 - RNA, 19 nt, Artificial Sequence
  Description of Artificial Sequence: Synthetic oligonucleotide
aggauaggguugggccgcg

SEQ ID NO: 232584 - RNA, 19 nt, Artificial Sequence
  Description of Artificial Sequence: Synthetic oligonucleotide
agacacuccggcggugaga

SEQ ID NO: 232585 - RNA, 19 nt, Artificial Sequence
  Description of Artificial Sequence: Synthetic oligonucleotide
cacaccgccgggcugccga

SEQ ID NO: 232586 - RNA, 19 nt, Artificial Sequence
  Description of Artificial Sequence: Synthetic oligonucleotide
gcgacaggcgacccggaac

SEQ ID NO: 232587 - RNA, 19 nt, Artificial Sequence
  Description of Artificial Sequence: Synthetic oligonucleotide
ggccgcgaguuccccaggg

SEQ ID NO: 232588 - RNA, 19 nt, Artificial Sequence
  Description of Artificial Sequence: Synthetic oligonucleotide
gaucggaauguugucgguu

SEQ ID NO: 232589 - RNA, 19 nt, Artificial Sequence
  Description of Artificial Sequence: Synthetic oligonucleotide
gccgcuguacuuccgccac

SEQ ID NO: 232590 - RNA, 19 nt, Artificial Sequence
  Description of Artificial Sequence: Synthetic oligonucleotide
ccgggucuucuacaugcgg

SEQ ID NO: 232591 - RNA, 19 nt, Artificial Sequence
  Description of Artificial Sequence: Synthetic oligonucleotide
gggucaagcaacucuggau

SEQ ID NO: 232592 - RNA, 19 nt, Artificial Sequence
  Description of Artificial Sequence: Synthetic oligonucleotide
gacaggcgacccggaacug

SEQ ID NO: 232593 - RNA, 19 nt, Artificial Sequence
  Description of Artificial Sequence: Synthetic oligonucleotide
guacuucgagguggagcug

SEQ ID NO: 232594 - RNA, 19 nt, Artificial Sequence
  Description of Artificial Sequence: Synthetic oligonucleotide
aggacgcuuuuaagggaga

SEQ ID NO: 232595 - RNA, 19 nt, Artificial Sequence
  Description of Artificial Sequence: Synthetic oligonucleotide
aggcgacccggaacugaac

SEQ ID NO: 232596 - RNA, 19 nt, Artificial Sequence
  Description of Artificial Sequence: Synthetic oligonucleotide
cuggcagauuuaauccuau

SEQ ID NO: 232597 - RNA, 19 nt, Artificial Sequence
  Description of Artificial Sequence: Synthetic oligonucleotide
cgugccgccgguacguccc

SEQ ID NO: 232598 - RNA, 19 nt, Artificial Sequence
  Description of Artificial Sequence: Synthetic oligonucleotide
gcgcaacucaacacaguac

SEQ ID NO: 232599 - RNA, 19 nt, Artificial Sequence
  Description of Artificial Sequence: Synthetic oligonucleotide
gcgaugaguuagucccaug

SEQ ID NO: 232600 - RNA, 19 nt, Artificial Sequence
  Description of Artificial Sequence: Synthetic oligonucleotide
gcagucgagagagagcagu

SEQ ID NO: 232601 - RNA, 19 nt, Artificial Sequence
  Description of Artificial Sequence: Synthetic oligonucleotide
ggaaggcgaugaguuaguc

SEQ ID NO: 232602 - RNA, 19 nt, Artificial Sequence
  Description of Artificial Sequence: Synthetic oligonucleotide
guuguccguguggcuguug

SEQ ID NO: 232603 - RNA, 19 nt, Artificial Sequence
  Description of Artificial Sequence: Synthetic oligonucleotide
gucguugacgugggaguaa

SEQ ID NO: 232604 - RNA, 19 nt, Artificial Sequence
  Description of Artificial Sequence: Synthetic oligonucleotide
gggaagagagagagagaga

SEQ ID NO: 232605 - RNA, 19 nt, Artificial Sequence
  Description of Artificial Sequence: Synthetic oligonucleotide
gccgugcaggagauccucg

SEQ ID NO: 232606 - RNA, 19 nt, Artificial Sequence
  Description of Artificial Sequence: Synthetic oligonucleotide
uggcggagacggcguugcu

SEQ ID NO: 232607 - RNA, 19 nt, Artificial Sequence
  Description of Artificial Sequence: Synthetic oligonucleotide
ccgcuacugcuuuggcagg

SEQ ID NO: 232608 - RNA, 19 nt, Artificial Sequence
  Description of Artificial Sequence: Synthetic oligonucleotide
cacaaacgcgacagaacuu

SEQ ID NO: 232609 - RNA, 19 nt, Artificial Sequence
  Description of Artificial Sequence: Synthetic oligonucleotide
ccaaacccuggauuucuaa

SEQ ID NO: 232610 - RNA, 19 nt, Artificial Sequence
  Description of Artificial Sequence: Synthetic oligonucleotide
ccucggugagauaguucug

SEQ ID NO: 232611 - RNA, 19 nt, Artificial Sequence
  Description of Artificial Sequence: Synthetic oligonucleotide
uguuguccguguggcuguu

SEQ ID NO: 232612 - RNA, 19 nt, Artificial Sequence
  Description of Artificial Sequence: Synthetic oligonucleotide
gccgccgguacgucccugc

SEQ ID NO: 232613 - RNA, 19 nt, Artificial Sequence
  Description of Artificial Sequence: Synthetic oligonucleotide
acgccaccgaagagguugu

SEQ ID NO: 232614 - RNA, 19 nt, Artificial Sequence
  Description of Artificial Sequence: Synthetic oligonucleotide
aggggucguugacguggga

SEQ ID NO: 232615 - RNA, 19 nt, Artificial Sequence
  Description of Artificial Sequence: Synthetic oligonucleotide
agggccucggugagauagu

SEQ ID NO: 232616 - RNA, 19 nt, Artificial Sequence
  Description of Artificial Sequence: Synthetic oligonucleotide
cuugcgacugaggguagau

SEQ ID NO: 232617 - RNA, 19 nt, Artificial Sequence
  Description of Artificial Sequence: Synthetic oligonucleotide
caaacgcgacagaacuuuu

SEQ ID NO: 232618 - RNA, 19 nt, Artificial Sequence
  Description of Artificial Sequence: Synthetic oligonucleotide
ccggagcugucaccugccg

SEQ ID NO: 232619 - RNA, 19 nt, Artificial Sequence
  Description of Artificial Sequence: Synthetic oligonucleotide
cuucuacaugcgggacguc

SEQ ID NO: 232620 - RNA, 19 nt, Artificial Sequence
  Description of Artificial Sequence: Synthetic oligonucleotide
acaccgccgggcugccgaa

SEQ ID NO: 232621 - RNA, 19 nt, Artificial Sequence
  Description of Artificial Sequence: Synthetic oligonucleotide
uagucccaugaagcucgua

SEQ ID NO: 232622 - RNA, 19 nt, Artificial Sequence
  Description of Artificial Sequence: Synthetic oligonucleotide
agcgacgcguugagacacu

SEQ ID NO: 232623 - RNA, 19 nt, Artificial Sequence
  Description of Artificial Sequence: Synthetic oligonucleotide
cuccggggacgaggggcgg

SEQ ID NO: 232624 - RNA, 19 nt, Artificial Sequence
  Description of Artificial Sequence: Synthetic oligonucleotide
ggucguugacgugggagua

SEQ ID NO: 232625 - RNA, 19 nt, Artificial Sequence
  Description of Artificial Sequence: Synthetic oligonucleotide
cgacgcguugagacacucc

SEQ ID NO: 232626 - RNA, 19 nt, Artificial Sequence
  Description of Artificial Sequence: Synthetic oligonucleotide
cagagacgugaacacugau

SEQ ID NO: 232627 - RNA, 19 nt, Artificial Sequence
  Description of Artificial Sequence: Synthetic oligonucleotide
gauccucgugccgccggua

SEQ ID NO: 232628 - RNA, 19 nt, Artificial Sequence
  Description of Artificial Sequence: Synthetic oligonucleotide
gcuuugcgucucccugcug

SEQ ID NO: 232629 - RNA, 19 nt, Artificial Sequence
  Description of Artificial Sequence: Synthetic oligonucleotide
caacagcgacgcguugaga

SEQ ID NO: 232630 - RNA, 19 nt, Artificial Sequence
  Description of Artificial Sequence: Synthetic oligonucleotide
gguacgucccugcgagggu

SEQ ID NO: 232631 - RNA, 19 nt, Artificial Sequence
  Description of Artificial Sequence: Synthetic oligonucleotide
ugccgccgguacgucccug

SEQ ID NO: 232632 - RNA, 19 nt, Artificial Sequence
  Description of Artificial Sequence: Synthetic oligonucleotide
gcagggcggugaccgcugc

SEQ ID NO: 232633 - RNA, 19 nt, Artificial Sequence
  Description of Artificial Sequence: Synthetic oligonucleotide
caccugccgggugggcggc

SEQ ID NO: 232634 - RNA, 19 nt, Artificial Sequence
  Description of Artificial Sequence: Synthetic oligonucleotide
gggccgcgaguuccccagg

SEQ ID NO: 232635 - RNA, 19 nt, Artificial Sequence
  Description of Artificial Sequence: Synthetic oligonucleotide
cgcgacagaacuuuucuuu

SEQ ID NO: 232636 - RNA, 19 nt, Artificial Sequence
  Description of Artificial Sequence: Synthetic oligonucleotide
ggcggcgcggcggcggcgg

SEQ ID NO: 232637 - RNA, 19 nt, Artificial Sequence
  Description of Artificial Sequence: Synthetic oligonucleotide
ccgccgguacgucccugcg

SEQ ID NO: 232638 - RNA, 19 nt, Artificial Sequence
  Description of Artificial Sequence: Synthetic oligonucleotide
gagcgacaggcgacccgga

SEQ ID NO: 232639 - RNA, 19 nt, Artificial Sequence
  Description of Artificial Sequence: Synthetic oligonucleotide
cagggcggugaccgcugca

SEQ ID NO: 232640 - RNA, 19 nt, Artificial Sequence
  Description of Artificial Sequence: Synthetic oligonucleotide
gcccaacagcgacgcguug

SEQ ID NO: 232641 - RNA, 19 nt, Artificial Sequence
  Description of Artificial Sequence: Synthetic oligonucleotide
gcgacgcguugagacacuc

SEQ ID NO: 232642 - RNA, 19 nt, Artificial Sequence
  Description of Artificial Sequence: Synthetic oligonucleotide
caugcgggacguccucgau

SEQ ID NO: 232643 - RNA, 19 nt, Artificial Sequence
  Description of Artificial Sequence: Synthetic oligonucleotide
ggcgaugaguuagucccau

SEQ ID NO: 232644 - RNA, 19 nt, Artificial Sequence
  Description of Artificial Sequence: Synthetic oligonucleotide
ggcgcggcggcggcggcgc

SEQ ID NO: 232645 - RNA, 19 nt, Artificial Sequence
  Description of Artificial Sequence: Synthetic oligonucleotide
ggcgcggggcgggaggaga

SEQ ID NO: 232646 - RNA, 19 nt, Artificial Sequence
  Description of Artificial Sequence: Synthetic oligonucleotide
cgccaccgugaccuuguac

SEQ ID NO: 232647 - RNA, 19 nt, Artificial Sequence
  Description of Artificial Sequence: Synthetic oligonucleotide
cacgaccuguucuguucuu

SEQ ID NO: 232648 - RNA, 19 nt, Artificial Sequence
  Description of Artificial Sequence: Synthetic oligonucleotide
gcgggacguccucgauggc

SEQ ID NO: 232649 - RNA, 19 nt, Artificial Sequence
  Description of Artificial Sequence: Synthetic oligonucleotide
gcgcagcguagcagcagca

SEQ ID NO: 232650 - RNA, 19 nt, Artificial Sequence
  Description of Artificial Sequence: Synthetic oligonucleotide
gugccgccgguacgucccu

SEQ ID NO: 232651 - RNA, 19 nt, Artificial Sequence
  Description of Artificial Sequence: Synthetic oligonucleotide
gcacuccgcccaacagcga

SEQ ID NO: 232652 - RNA, 19 nt, Artificial Sequence
  Description of Artificial Sequence: Synthetic oligonucleotide
cgauggcgugagguaagga

SEQ ID NO: 232653 - RNA, 19 nt, Artificial Sequence
  Description of Artificial Sequence: Synthetic oligonucleotide
cgccgguacgucccugcga

SEQ ID NO: 232654 - RNA, 19 nt, Artificial Sequence
  Description of Artificial Sequence: Synthetic oligonucleotide
gggcggcgcggcggcggcg

SEQ ID NO: 232655 - RNA, 19 nt, Artificial Sequence
  Description of Artificial Sequence: Synthetic oligonucleotide
gcggcgcggcggcggcggc

SEQ ID NO: 232656 - RNA, 19 nt, Artificial Sequence
  Description of Artificial Sequence: Synthetic oligonucleotide
cggcgcggcggcggcggcg

SEQ ID NO: 232657 - RNA, 19 nt, Artificial Sequence
  Description of Artificial Sequence: Synthetic oligonucleotide
cgccaccgaagagguuguc

SEQ ID NO: 232658 - RNA, 19 nt, Artificial Sequence
  Description of Artificial Sequence: Synthetic oligonucleotide
ccgccaccgugaccuugua

SEQ ID NO: 232659 - RNA, 19 nt, Artificial Sequence
  Description of Artificial Sequence: Synthetic oligonucleotide
aguaauauaaucuuucuac

SEQ ID NO: 232660 - RNA, 19 nt, Artificial Sequence
  Description of Artificial Sequence: Synthetic oligonucleotide
uguaguauuaaucaguuga

SEQ ID NO: 232661 - RNA, 19 nt, Artificial Sequence
  Description of Artificial Sequence: Synthetic oligonucleotide
aacuauagaauccuuguag

SEQ ID NO: 232662 - RNA, 19 nt, Artificial Sequence
  Description of Artificial Sequence: Synthetic oligonucleotide
uuuagugaguaccagacag

SEQ ID NO: 232663 - RNA, 19 nt, Artificial Sequence
  Description of Artificial Sequence: Synthetic oligonucleotide
aauaaauugauauuacaau

SEQ ID NO: 232664 - RNA, 19 nt, Artificial Sequence
  Description of Artificial Sequence: Synthetic oligonucleotide
uuuacuuugacacacuaga

SEQ ID NO: 232665 - RNA, 19 nt, Artificial Sequence
  Description of Artificial Sequence: Synthetic oligonucleotide
agcgauuugaugcaaacgc

SEQ ID NO: 232666 - RNA, 19 nt, Artificial Sequence
  Description of Artificial Sequence: Synthetic oligonucleotide
uguuauaaacucaagaguc

SEQ ID NO: 232667 - RNA, 19 nt, Artificial Sequence
  Description of Artificial Sequence: Synthetic oligonucleotide
aaauuguuguaacaauugg

SEQ ID NO: 232668 - RNA, 19 nt, Artificial Sequence
  Description of Artificial Sequence: Synthetic oligonucleotide
acaaaguuuagguuuagac

SEQ ID NO: 232669 - RNA, 19 nt, Artificial Sequence
  Description of Artificial Sequence: Synthetic oligonucleotide
aauucuuacagccaaugca

SEQ ID NO: 232670 - RNA, 19 nt, Artificial Sequence
  Description of Artificial Sequence: Synthetic oligonucleotide
ucugcuaagugcaucaagg

SEQ ID NO: 232671 - RNA, 19 nt, Artificial Sequence
  Description of Artificial Sequence: Synthetic oligonucleotide
acuaguagcauuugauugc

SEQ ID NO: 232672 - RNA, 19 nt, Artificial Sequence
  Description of Artificial Sequence: Synthetic oligonucleotide
aaagaggauacuuuaauaa

SEQ ID NO: 232673 - RNA, 19 nt, Artificial Sequence
  Description of Artificial Sequence: Synthetic oligonucleotide
aguugcuugcuauagacac

SEQ ID NO: 232674 - RNA, 19 nt, Artificial Sequence
  Description of Artificial Sequence: Synthetic oligonucleotide
uuuaaaauuggugagcuca

SEQ ID NO: 232675 - RNA, 19 nt, Artificial Sequence
  Description of Artificial Sequence: Synthetic oligonucleotide
aacugagugacauacugag

SEQ ID NO: 232676 - RNA, 19 nt, Artificial Sequence
  Description of Artificial Sequence: Synthetic oligonucleotide
ugaguuguaguauuaauca

SEQ ID NO: 232677 - RNA, 19 nt, Artificial Sequence
  Description of Artificial Sequence: Synthetic oligonucleotide
aauaacggaauccucuuug

SEQ ID NO: 232678 - RNA, 19 nt, Artificial Sequence
  Description of Artificial Sequence: Synthetic oligonucleotide
uacuagaauaguauaaaug

SEQ ID NO: 232679 - RNA, 19 nt, Artificial Sequence
  Description of Artificial Sequence: Synthetic oligonucleotide
ugcaauuagaauuaacaca

SEQ ID NO: 232680 - RNA, 19 nt, Artificial Sequence
  Description of Artificial Sequence: Synthetic oligonucleotide
aagguaaccuuacaaaaug

SEQ ID NO: 232681 - RNA, 19 nt, Artificial Sequence
  Description of Artificial Sequence: Synthetic oligonucleotide
aauguaaauggcaauuuuc

SEQ ID NO: 232682 - RNA, 19 nt, Artificial Sequence
  Description of Artificial Sequence: Synthetic oligonucleotide
uaaaauuagaguugcuugc

SEQ ID NO: 232683 - RNA, 19 nt, Artificial Sequence
  Description of Artificial Sequence: Synthetic oligonucleotide
ugauuuauucuucuguccc

SEQ ID NO: 232684 - RNA, 19 nt, Artificial Sequence
  Description of Artificial Sequence: Synthetic oligonucleotide
auuauuagagaacacacau

SEQ ID NO: 232685 - RNA, 19 nt, Artificial Sequence
  Description of Artificial Sequence: Synthetic oligonucleotide
auagaauccuuguaggagg

SEQ ID NO: 232686 - RNA, 19 nt, Artificial Sequence
  Description of Artificial Sequence: Synthetic oligonucleotide
gaugaauauuauuuugucc

SEQ ID NO: 232687 - RNA, 19 nt, Artificial Sequence
  Description of Artificial Sequence: Synthetic oligonucleotide
uuaugaauguacuuuguca

SEQ ID NO: 232688 - RNA, 19 nt, Artificial Sequence
  Description of Artificial Sequence: Synthetic oligonucleotide
uugcuauagacacauauga

SEQ ID NO: 232689 - RNA, 19 nt, Artificial Sequence
  Description of Artificial Sequence: Synthetic oligonucleotide
auuacaauagguuccuaag

SEQ ID NO: 232690 - RNA, 19 nt, Artificial Sequence
  Description of Artificial Sequence: Synthetic oligonucleotide
uacuuuaauaaauaacgga

SEQ ID NO: 232691 - RNA, 19 nt, Artificial Sequence
  Description of Artificial Sequence: Synthetic oligonucleotide
acuuugacacacuagacug

SEQ ID NO: 232692 - RNA, 19 nt, Artificial Sequence
  Description of Artificial Sequence: Synthetic oligonucleotide
acaauagguuccuaagagc

SEQ ID NO: 232693 - RNA, 19 nt, Artificial Sequence
  Description of Artificial Sequence: Synthetic oligonucleotide
auauuauaguuucaggucu

SEQ ID NO: 232694 - RNA, 19 nt, Artificial Sequence
  Description of Artificial Sequence: Synthetic oligonucleotide
caaaagguuguuuagugag

SEQ ID NO: 232695 - RNA, 19 nt, Artificial Sequence
  Description of Artificial Sequence: Synthetic oligonucleotide
caauuauuagagaacacac

SEQ ID NO: 232696 - RNA, 19 nt, Artificial Sequence
  Description of Artificial Sequence: Synthetic oligonucleotide
uuucuucuuacuagaauag

SEQ ID NO: 232697 - RNA, 19 nt, Artificial Sequence
  Description of Artificial Sequence: Synthetic oligonucleotide
aauuaugccauugaaugga

SEQ ID NO: 232698 - RNA, 19 nt, Artificial Sequence
  Description of Artificial Sequence: Synthetic oligonucleotide
acuaagauuuaaaauguac

SEQ ID NO: 232699 - RNA, 19 nt, Artificial Sequence
  Description of Artificial Sequence: Synthetic oligonucleotide
acacacuagacugaggugc

SEQ ID NO: 232700 - RNA, 19 nt, Artificial Sequence
  Description of Artificial Sequence: Synthetic oligonucleotide
uguacuuugucaauggaau

SEQ ID NO: 232701 - RNA, 19 nt, Artificial Sequence
  Description of Artificial Sequence: Synthetic oligonucleotide
gggucuguaacacagaggg

SEQ ID NO: 232702 - RNA, 19 nt, Artificial Sequence
  Description of Artificial Sequence: Synthetic oligonucleotide
uccaguaaaauuagaguug

SEQ ID NO: 232703 - RNA, 19 nt, Artificial Sequence
  Description of Artificial Sequence: Synthetic oligonucleotide
ugcuuuacuauuaauuggu

SEQ ID NO: 232704 - RNA, 19 nt, Artificial Sequence
  Description of Artificial Sequence: Synthetic oligonucleotide
ugacaauuauuguaaaaca

SEQ ID NO: 232705 - RNA, 19 nt, Artificial Sequence
  Description of Artificial Sequence: Synthetic oligonucleotide
uaacaauugguacaauuac

SEQ ID NO: 232706 - RNA, 19 nt, Artificial Sequence
  Description of Artificial Sequence: Synthetic oligonucleotide
uuauuuuguccuuuuagac

SEQ ID NO: 232707 - RNA, 19 nt, Artificial Sequence
  Description of Artificial Sequence: Synthetic oligonucleotide
uauagaauccuuguaggag

SEQ ID NO: 232708 - RNA, 19 nt, Artificial Sequence
  Description of Artificial Sequence: Synthetic oligonucleotide
auugauauuacaauaauuu

SEQ ID NO: 232709 - RNA, 19 nt, Artificial Sequence
  Description of Artificial Sequence: Synthetic oligonucleotide
uuugggauguaaauagggc

SEQ ID NO: 232710 - RNA, 19 nt, Artificial Sequence
  Description of Artificial Sequence: Synthetic oligonucleotide
ucaaguaucauccgcucug

SEQ ID NO: 232711 - RNA, 19 nt, Artificial Sequence
  Description of Artificial Sequence: Synthetic oligonucleotide
ugacacacuagacugaggu

SEQ ID NO: 232712 - RNA, 19 nt, Artificial Sequence
  Description of Artificial Sequence: Synthetic oligonucleotide
gaugcaaacgccuaauaca

SEQ ID NO: 232713 - RNA, 19 nt, Artificial Sequence
  Description of Artificial Sequence: Synthetic oligonucleotide
uagacacauaugaagacug

SEQ ID NO: 232714 - RNA, 19 nt, Artificial Sequence
  Description of Artificial Sequence: Synthetic oligonucleotide
aacuugaugaauauuauuu

SEQ ID NO: 232715 - RNA, 19 nt, Artificial Sequence
  Description of Artificial Sequence: Synthetic oligonucleotide
uacaacuauagaauccuug

SEQ ID NO: 232716 - RNA, 19 nt, Artificial Sequence
  Description of Artificial Sequence: Synthetic oligonucleotide
aauuauguaccgaacccuc

SEQ ID NO: 232717 - RNA, 19 nt, Artificial Sequence
  Description of Artificial Sequence: Synthetic oligonucleotide
uaaccuuacaaaaugccuc

SEQ ID NO: 232718 - RNA, 19 nt, Artificial Sequence
  Description of Artificial Sequence: Synthetic oligonucleotide
agaacaucuaauucuuaag

SEQ ID NO: 232719 - RNA, 19 nt, Artificial Sequence
  Description of Artificial Sequence: Synthetic oligonucleotide
auaacggaauccucuuugc

SEQ ID NO: 232720 - RNA, 19 nt, Artificial Sequence
  Description of Artificial Sequence: Synthetic oligonucleotide
cauacaguuuuaauuacug

SEQ ID NO: 232721 - RNA, 19 nt, Artificial Sequence
  Description of Artificial Sequence: Synthetic oligonucleotide
auaagcauaugcuauuagu

SEQ ID NO: 232722 - RNA, 19 nt, Artificial Sequence
  Description of Artificial Sequence: Synthetic oligonucleotide
uacuuugacacacuagacu

SEQ ID NO: 232723 - RNA, 19 nt, Artificial Sequence
  Description of Artificial Sequence: Synthetic oligonucleotide
ugauuuagguuaauuugug

SEQ ID NO: 232724 - RNA, 19 nt, Artificial Sequence
  Description of Artificial Sequence: Synthetic oligonucleotide
acaacuauagaauccuugu

SEQ ID NO: 232725 - RNA, 19 nt, Artificial Sequence
  Description of Artificial Sequence: Synthetic oligonucleotide
uacugcauaucccacauuc

SEQ ID NO: 232726 - RNA, 19 nt, Artificial Sequence
  Description of Artificial Sequence: Synthetic oligonucleotide
uaaaguuacugcacuauaa

SEQ ID NO: 232727 - RNA, 19 nt, Artificial Sequence
  Description of Artificial Sequence: Synthetic oligonucleotide
ugaauggaagccuugccug

SEQ ID NO: 232728 - RNA, 19 nt, Artificial Sequence
  Description of Artificial Sequence: Synthetic oligonucleotide
agcucauguagcuauuaac

SEQ ID NO: 232729 - RNA, 19 nt, Artificial Sequence
  Description of Artificial Sequence: Synthetic oligonucleotide
uaagcauaugcuauuaguu

SEQ ID NO: 232730 - RNA, 19 nt, Artificial Sequence
  Description of Artificial Sequence: Synthetic oligonucleotide
aacauguuagccauuccuc

SEQ ID NO: 232731 - RNA, 19 nt, Artificial Sequence
  Description of Artificial Sequence: Synthetic oligonucleotide
aauuguuguaacaauuggu

SEQ ID NO: 232732 - RNA, 19 nt, Artificial Sequence
  Description of Artificial Sequence: Synthetic oligonucleotide
acaauugguacaauuacag

SEQ ID NO: 232733 - RNA, 19 nt, Artificial Sequence
  Description of Artificial Sequence: Synthetic oligonucleotide
uaauuuaugaauguacuuu

SEQ ID NO: 232734 - RNA, 19 nt, Artificial Sequence
  Description of Artificial Sequence: Synthetic oligonucleotide
uauuuucggcuuaaaagcu

SEQ ID NO: 232735 - RNA, 19 nt, Artificial Sequence
  Description of Artificial Sequence: Synthetic oligonucleotide
ugaugcaaacgccuaauac

SEQ ID NO: 232736 - RNA, 19 nt, Artificial Sequence
  Description of Artificial Sequence: Synthetic oligonucleotide
uugaauggaagccuugccu

SEQ ID NO: 232737 - RNA, 19 nt, Artificial Sequence
  Description of Artificial Sequence: Synthetic oligonucleotide
uguucgaggcuucuuagca

SEQ ID NO: 232738 - RNA, 19 nt, Artificial Sequence
  Description of Artificial Sequence: Synthetic oligonucleotide
aaggucuuucguuccgggc

SEQ ID NO: 232739 - RNA, 19 nt, Artificial Sequence
  Description of Artificial Sequence: Synthetic oligonucleotide
gauuuagguuaauuugugc

SEQ ID NO: 232740 - RNA, 19 nt, Artificial Sequence
  Description of Artificial Sequence: Synthetic oligonucleotide
gaugacgcucaucagacac

SEQ ID NO: 232741 - RNA, 19 nt, Artificial Sequence
  Description of Artificial Sequence: Synthetic oligonucleotide
uucuuagcaaucuguacug

SEQ ID NO: 232742 - RNA, 19 nt, Artificial Sequence
  Description of Artificial Sequence: Synthetic oligonucleotide
uauuacaauagguuccuaa

SEQ ID NO: 232743 - RNA, 19 nt, Artificial Sequence
  Description of Artificial Sequence: Synthetic oligonucleotide
aaacuaguagcauuugauu

SEQ ID NO: 232744 - RNA, 19 nt, Artificial Sequence
  Description of Artificial Sequence: Synthetic oligonucleotide
ucuacuuugggauguaaau

SEQ ID NO: 232745 - RNA, 19 nt, Artificial Sequence
  Description of Artificial Sequence: Synthetic oligonucleotide
cugcuuuacuauuaauugg

SEQ ID NO: 232746 - RNA, 19 nt, Artificial Sequence
  Description of Artificial Sequence: Synthetic oligonucleotide
aacuaucuucuagaaaguc

SEQ ID NO: 232747 - RNA, 19 nt, Artificial Sequence
  Description of Artificial Sequence: Synthetic oligonucleotide
uuauguaccgaacccuccc

SEQ ID NO: 232748 - RNA, 19 nt, Artificial Sequence
  Description of Artificial Sequence: Synthetic oligonucleotide
cuugcuauagacacauaug

SEQ ID NO: 232749 - RNA, 19 nt, Artificial Sequence
  Description of Artificial Sequence: Synthetic oligonucleotide
agaaagucaaguguuccgg

SEQ ID NO: 232750 - RNA, 19 nt, Artificial Sequence
  Description of Artificial Sequence: Synthetic oligonucleotide
aguuacacguggcuucagc

SEQ ID NO: 232751 - RNA, 19 nt, Artificial Sequence
  Description of Artificial Sequence: Synthetic oligonucleotide
cugaguuguaguauuaauc

SEQ ID NO: 232752 - RNA, 19 nt, Artificial Sequence
  Description of Artificial Sequence: Synthetic oligonucleotide
uagaauccuuguaggaggg

SEQ ID NO: 232753 - RNA, 19 nt, Artificial Sequence
  Description of Artificial Sequence: Synthetic oligonucleotide
aaaauuagaguugcuugcu

SEQ ID NO: 232754 - RNA, 19 nt, Artificial Sequence
  Description of Artificial Sequence: Synthetic oligonucleotide
acuuacuacauacaacuau

SEQ ID NO: 232755 - RNA, 19 nt, Artificial Sequence
  Description of Artificial Sequence: Synthetic oligonucleotide
ucgucagcaagucugagau

SEQ ID NO: 232756 - RNA, 19 nt, Artificial Sequence
  Description of Artificial Sequence: Synthetic oligonucleotide
uuaaacuaucuucuagaaa

SEQ ID NO: 232757 - RNA, 19 nt, Artificial Sequence
  Description of Artificial Sequence: Synthetic oligonucleotide
ugaauguacuuugucaaug

SEQ ID NO: 232758 - RNA, 19 nt, Artificial Sequence
  Description of Artificial Sequence: Synthetic oligonucleotide
aauggcaauuuuccuccuc

SEQ ID NO: 232759 - RNA, 19 nt, Artificial Sequence
  Description of Artificial Sequence: Synthetic oligonucleotide
aacggaauccucuuugcau

SEQ ID NO: 232760 - RNA, 19 nt, Artificial Sequence
  Description of Artificial Sequence: Synthetic oligonucleotide
agugccuauaccuuucaug

SEQ ID NO: 232761 - RNA, 19 nt, Artificial Sequence
  Description of Artificial Sequence: Synthetic oligonucleotide
aauguacuuugucaaugga

SEQ ID NO: 232762 - RNA, 19 nt, Artificial Sequence
  Description of Artificial Sequence: Synthetic oligonucleotide
uuagaguugcuugcuauag

SEQ ID NO: 232763 - RNA, 19 nt, Artificial Sequence
  Description of Artificial Sequence: Synthetic oligonucleotide
caauagguuccuaagagca

SEQ ID NO: 232764 - RNA, 19 nt, Artificial Sequence
  Description of Artificial Sequence: Synthetic oligonucleotide
uaacuguugggucuguaac

SEQ ID NO: 232765 - RNA, 19 nt, Artificial Sequence
  Description of Artificial Sequence: Synthetic oligonucleotide
aagaaugucugcacuaucu

SEQ ID NO: 232766 - RNA, 19 nt, Artificial Sequence
  Description of Artificial Sequence: Synthetic oligonucleotide
gaguuguaguauuaaucag

SEQ ID NO: 232767 - RNA, 19 nt, Artificial Sequence
  Description of Artificial Sequence: Synthetic oligonucleotide
aacuguugggucuguaaca

SEQ ID NO: 232768 - RNA, 19 nt, Artificial Sequence
  Description of Artificial Sequence: Synthetic oligonucleotide
uacuacauacaacuauaga

SEQ ID NO: 232769 - RNA, 19 nt, Artificial Sequence
  Description of Artificial Sequence: Synthetic oligonucleotide
uuguuguaacaauugguac

SEQ ID NO: 232770 - RNA, 19 nt, Artificial Sequence
  Description of Artificial Sequence: Synthetic oligonucleotide
uggaauuaugccauugaau

SEQ ID NO: 232771 - RNA, 19 nt, Artificial Sequence
  Description of Artificial Sequence: Synthetic oligonucleotide
uuauuagagaacacacauc

SEQ ID NO: 232772 - RNA, 19 nt, Artificial Sequence
  Description of Artificial Sequence: Synthetic oligonucleotide
auaggcagaauuaacuaag

SEQ ID NO: 232773 - RNA, 19 nt, Artificial Sequence
  Description of Artificial Sequence: Synthetic oligonucleotide
uguuccaaauuguuguaac

SEQ ID NO: 232774 - RNA, 19 nt, Artificial Sequence
  Description of Artificial Sequence: Synthetic oligonucleotide
aauugauauuacaauaauu

SEQ ID NO: 232775 - RNA, 19 nt, Artificial Sequence
  Description of Artificial Sequence: Synthetic oligonucleotide
aacaauugguacaauuaca

SEQ ID NO: 232776 - RNA, 19 nt, Artificial Sequence
  Description of Artificial Sequence: Synthetic oligonucleotide
gguacaauuacaguuguug

SEQ ID NO: 232777 - RNA, 19 nt, Artificial Sequence
  Description of Artificial Sequence: Synthetic oligonucleotide
ucccuuaauauuuuguuuu

SEQ ID NO: 232778 - RNA, 19 nt, Artificial Sequence
  Description of Artificial Sequence: Synthetic oligonucleotide
uguugcaaaacucuccauu

SEQ ID NO: 232779 - RNA, 19 nt, Artificial Sequence
  Description of Artificial Sequence: Synthetic oligonucleotide
aagcaaugccaucauacau

SEQ ID NO: 232780 - RNA, 19 nt, Artificial Sequence
  Description of Artificial Sequence: Synthetic oligonucleotide
uuuucuguacaguccacgu

SEQ ID NO: 232781 - RNA, 19 nt, Artificial Sequence
  Description of Artificial Sequence: Synthetic oligonucleotide
guuauaaacucaagagucc

SEQ ID NO: 232782 - RNA, 19 nt, Artificial Sequence
  Description of Artificial Sequence: Synthetic oligonucleotide
uaguaauauaaucuuucua

SEQ ID NO: 232783 - RNA, 19 nt, Artificial Sequence
  Description of Artificial Sequence: Synthetic oligonucleotide
caauauuauaguuucaggu

SEQ ID NO: 232784 - RNA, 19 nt, Artificial Sequence
  Description of Artificial Sequence: Synthetic oligonucleotide
ucuagaaagucaaguguuc

SEQ ID NO: 232785 - RNA, 19 nt, Artificial Sequence
  Description of Artificial Sequence: Synthetic oligonucleotide
agaacauguuagccauucc

SEQ ID NO: 232786 - RNA, 19 nt, Artificial Sequence
  Description of Artificial Sequence: Synthetic oligonucleotide
ugugcaggaguuagcagug

SEQ ID NO: 232787 - RNA, 19 nt, Artificial Sequence
  Description of Artificial Sequence: Synthetic oligonucleotide
uuacuuugacacacuagac

SEQ ID NO: 232788 - RNA, 19 nt, Artificial Sequence
  Description of Artificial Sequence: Synthetic oligonucleotide
ugaguaccagacagggagg

SEQ ID NO: 232789 - RNA, 19 nt, Artificial Sequence
  Description of Artificial Sequence: Synthetic oligonucleotide
uuagcaaucuguacuguuu

SEQ ID NO: 232790 - RNA, 19 nt, Artificial Sequence
  Description of Artificial Sequence: Synthetic oligonucleotide
acgcucaucagacaccguc

SEQ ID NO: 232791 - RNA, 19 nt, Artificial Sequence
  Description of Artificial Sequence: Synthetic oligonucleotide
uguucagcgauuugaugca

SEQ ID NO: 232792 - RNA, 19 nt, Artificial Sequence
  Description of Artificial Sequence: Synthetic oligonucleotide
uggauuccuaucaaggcau

SEQ ID NO: 232793 - RNA, 19 nt, Artificial Sequence
  Description of Artificial Sequence: Synthetic oligonucleotide
aacgccuaauacaaaaggu

SEQ ID NO: 232794 - RNA, 19 nt, Artificial Sequence
  Description of Artificial Sequence: Synthetic oligonucleotide
aauggugcaauuagaauua

SEQ ID NO: 232795 - RNA, 19 nt, Artificial Sequence
  Description of Artificial Sequence: Synthetic oligonucleotide
uuguuuagugaguaccaga

SEQ ID NO: 232796 - RNA, 19 nt, Artificial Sequence
  Description of Artificial Sequence: Synthetic oligonucleotide
uccccaaauaaucuuuuaa

SEQ ID NO: 232797 - RNA, 19 nt, Artificial Sequence
  Description of Artificial Sequence: Synthetic oligonucleotide
aaguacugcauaucccaca

SEQ ID NO: 232798 - RNA, 19 nt, Artificial Sequence
  Description of Artificial Sequence: Synthetic oligonucleotide
aagagcauacaguuuuaau

SEQ ID NO: 232799 - RNA, 19 nt, Artificial Sequence
  Description of Artificial Sequence: Synthetic oligonucleotide
uauuauaguuucaggucuc

SEQ ID NO: 232800 - RNA, 19 nt, Artificial Sequence
  Description of Artificial Sequence: Synthetic oligonucleotide
acacuugaguugucugucc

SEQ ID NO: 232801 - RNA, 19 nt, Artificial Sequence
  Description of Artificial Sequence: Synthetic oligonucleotide
uacacguggcuucagcuac

SEQ ID NO: 232802 - RNA, 19 nt, Artificial Sequence
  Description of Artificial Sequence: Synthetic oligonucleotide
uaucuacauuuaaaguuac

SEQ ID NO: 232803 - RNA, 19 nt, Artificial Sequence
  Description of Artificial Sequence: Synthetic oligonucleotide
uuccuaucaaggcaugccu

SEQ ID NO: 232804 - RNA, 19 nt, Artificial Sequence
  Description of Artificial Sequence: Synthetic oligonucleotide
agaguccuauuacaauagg

SEQ ID NO: 232805 - RNA, 19 nt, Artificial Sequence
  Description of Artificial Sequence: Synthetic oligonucleotide
gauggaauuaugccauuga

SEQ ID NO: 232806 - RNA, 19 nt, Artificial Sequence
  Description of Artificial Sequence: Synthetic oligonucleotide
uccacgugcagcuuuugug

SEQ ID NO: 232807 - RNA, 19 nt, Artificial Sequence
  Description of Artificial Sequence: Synthetic oligonucleotide
uuaaaauuggugagcucau

SEQ ID NO: 232808 - RNA, 19 nt, Artificial Sequence
  Description of Artificial Sequence: Synthetic oligonucleotide
agguaaccuuacaaaaugc

SEQ ID NO: 232809 - RNA, 19 nt, Artificial Sequence
  Description of Artificial Sequence: Synthetic oligonucleotide
auuauguaccgaacccucc

SEQ ID NO: 232810 - RNA, 19 nt, Artificial Sequence
  Description of Artificial Sequence: Synthetic oligonucleotide
auuaauuucuagugccuau

SEQ ID NO: 232811 - RNA, 19 nt, Artificial Sequence
  Description of Artificial Sequence: Synthetic oligonucleotide
acauguuagccauuccuca

SEQ ID NO: 232812 - RNA, 19 nt, Artificial Sequence
  Description of Artificial Sequence: Synthetic oligonucleotide
cuaucuacauuuaaaguua

SEQ ID NO: 232813 - RNA, 19 nt, Artificial Sequence
  Description of Artificial Sequence: Synthetic oligonucleotide
ugacgcucaucagacaccg

SEQ ID NO: 232814 - RNA, 19 nt, Artificial Sequence
  Description of Artificial Sequence: Synthetic oligonucleotide
auuguuguaacaauuggua

SEQ ID NO: 232815 - RNA, 19 nt, Artificial Sequence
  Description of Artificial Sequence: Synthetic oligonucleotide
aaacuuauugcagucuuuu

SEQ ID NO: 232816 - RNA, 19 nt, Artificial Sequence
  Description of Artificial Sequence: Synthetic oligonucleotide
aauguuccaaauuguugua

SEQ ID NO: 232817 - RNA, 19 nt, Artificial Sequence
  Description of Artificial Sequence: Synthetic oligonucleotide
ucccuuguuauaaacucaa

SEQ ID NO: 232818 - RNA, 19 nt, Artificial Sequence
  Description of Artificial Sequence: Synthetic oligonucleotide
uucuuacuagaauaguaua

SEQ ID NO: 232819 - RNA, 19 nt, Artificial Sequence
  Description of Artificial Sequence: Synthetic oligonucleotide
ugcauaucccacauucccu

SEQ ID NO: 232820 - RNA, 19 nt, Artificial Sequence
  Description of Artificial Sequence: Synthetic oligonucleotide
ggugcaauuagaauuaaca

SEQ ID NO: 232821 - RNA, 19 nt, Artificial Sequence
  Description of Artificial Sequence: Synthetic oligonucleotide
gguuccuaagagcauacag

SEQ ID NO: 232822 - RNA, 19 nt, Artificial Sequence
  Description of Artificial Sequence: Synthetic oligonucleotide
acucaagaguccuauuaca

SEQ ID NO: 232823 - RNA, 19 nt, Artificial Sequence
  Description of Artificial Sequence: Synthetic oligonucleotide
uauguaccgaacccucccc

SEQ ID NO: 232824 - RNA, 19 nt, Artificial Sequence
  Description of Artificial Sequence: Synthetic oligonucleotide
ugggauguaaauagggcuu

SEQ ID NO: 232825 - RNA, 19 nt, Artificial Sequence
  Description of Artificial Sequence: Synthetic oligonucleotide
ucaagaguccuauuacaau

SEQ ID NO: 232826 - RNA, 19 nt, Artificial Sequence
  Description of Artificial Sequence: Synthetic oligonucleotide
ugcaaagaugagcuucgug

SEQ ID NO: 232827 - RNA, 19 nt, Artificial Sequence
  Description of Artificial Sequence: Synthetic oligonucleotide
aggugcuaagaaugucugc

SEQ ID NO: 232828 - RNA, 19 nt, Artificial Sequence
  Description of Artificial Sequence: Synthetic oligonucleotide
uaucuucuagaaagucaag

SEQ ID NO: 232829 - RNA, 19 nt, Artificial Sequence
  Description of Artificial Sequence: Synthetic oligonucleotide
aucaaggucuuucguuccg

SEQ ID NO: 232830 - RNA, 19 nt, Artificial Sequence
  Description of Artificial Sequence: Synthetic oligonucleotide
ugacuuugacaauuauugu

SEQ ID NO: 232831 - RNA, 19 nt, Artificial Sequence
  Description of Artificial Sequence: Synthetic oligonucleotide
uacaauugcaggguuuucu

SEQ ID NO: 232832 - RNA, 19 nt, Artificial Sequence
  Description of Artificial Sequence: Synthetic oligonucleotide
uugguacaauuacaguugu

SEQ ID NO: 232833 - RNA, 19 nt, Artificial Sequence
  Description of Artificial Sequence: Synthetic oligonucleotide
acaguaauuguuaaacuau

SEQ ID NO: 232834 - RNA, 19 nt, Artificial Sequence
  Description of Artificial Sequence: Synthetic oligonucleotide
uucuacuuugggauguaaa

SEQ ID NO: 232835 - RNA, 19 nt, Artificial Sequence
  Description of Artificial Sequence: Synthetic oligonucleotide
aguaauuguuaaacuaucu

SEQ ID NO: 232836 - RNA, 19 nt, Artificial Sequence
  Description of Artificial Sequence: Synthetic oligonucleotide
uaggcagaauuaacuaaga

SEQ ID NO: 232837 - RNA, 19 nt, Artificial Sequence
  Description of Artificial Sequence: Synthetic oligonucleotide
acauaggcagaauuaacua

SEQ ID NO: 232838 - RNA, 19 nt, Artificial Sequence
  Description of Artificial Sequence: Synthetic oligonucleotide
guaccagacagggaggagg

SEQ ID NO: 232839 - RNA, 19 nt, Artificial Sequence
  Description of Artificial Sequence: Synthetic oligonucleotide
ucagcgauuugaugcaaac

SEQ ID NO: 232840 - RNA, 19 nt, Artificial Sequence
  Description of Artificial Sequence: Synthetic oligonucleotide
ugaagacugcuguaacuga

SEQ ID NO: 232841 - RNA, 19 nt, Artificial Sequence
  Description of Artificial Sequence: Synthetic oligonucleotide
caauguuccaaauuguugu

SEQ ID NO: 232842 - RNA, 19 nt, Artificial Sequence
  Description of Artificial Sequence: Synthetic oligonucleotide
uuugugcaauuauuagaga

SEQ ID NO: 232843 - RNA, 19 nt, Artificial Sequence
  Description of Artificial Sequence: Synthetic oligonucleotide
uaacggaauccucuuugca

SEQ ID NO: 232844 - RNA, 19 nt, Artificial Sequence
  Description of Artificial Sequence: Synthetic oligonucleotide
aaauaacggaauccucuuu

SEQ ID NO: 232845 - RNA, 19 nt, Artificial Sequence
  Description of Artificial Sequence: Synthetic oligonucleotide
auucuuacagccaaugcau

SEQ ID NO: 232846 - RNA, 19 nt, Artificial Sequence
  Description of Artificial Sequence: Synthetic oligonucleotide
auggaauuaugccauugaa

SEQ ID NO: 232847 - RNA, 19 nt, Artificial Sequence
  Description of Artificial Sequence: Synthetic oligonucleotide
gaacauguuagccauuccu

SEQ ID NO: 232848 - RNA, 19 nt, Artificial Sequence
  Description of Artificial Sequence: Synthetic oligonucleotide
guaguauuaaucaguugac

SEQ ID NO: 232849 - RNA, 19 nt, Artificial Sequence
  Description of Artificial Sequence: Synthetic oligonucleotide
agacugcuguaacugagug

SEQ ID NO: 232850 - RNA, 19 nt, Artificial Sequence
  Description of Artificial Sequence: Synthetic oligonucleotide
uuguaguauuaaucaguug

SEQ ID NO: 232851 - RNA, 19 nt, Artificial Sequence
  Description of Artificial Sequence: Synthetic oligonucleotide
ugauugcaccuucaaauuu

SEQ ID NO: 232852 - RNA, 19 nt, Artificial Sequence
  Description of Artificial Sequence: Synthetic oligonucleotide
auacaaaagguuguuuagu

SEQ ID NO: 232853 - RNA, 19 nt, Artificial Sequence
  Description of Artificial Sequence: Synthetic oligonucleotide
uaccggauguuccaguaaa

SEQ ID NO: 232854 - RNA, 19 nt, Artificial Sequence
  Description of Artificial Sequence: Synthetic oligonucleotide
ugugccgacgguccgacuc

SEQ ID NO: 232855 - RNA, 19 nt, Artificial Sequence
  Description of Artificial Sequence: Synthetic oligonucleotide
ugauggaauuaugccauug

SEQ ID NO: 232856 - RNA, 19 nt, Artificial Sequence
  Description of Artificial Sequence: Synthetic oligonucleotide
aaacuaucuucuagaaagu

SEQ ID NO: 232857 - RNA, 19 nt, Artificial Sequence
  Description of Artificial Sequence: Synthetic oligonucleotide
agacacauaugaagacugc

SEQ ID NO: 232858 - RNA, 19 nt, Artificial Sequence
  Description of Artificial Sequence: Synthetic oligonucleotide
cuauagaauccuuguagga

SEQ ID NO: 232859 - RNA, 19 nt, Artificial Sequence
  Description of Artificial Sequence: Synthetic oligonucleotide
agaauaguauaaauguuua

SEQ ID NO: 232860 - RNA, 19 nt, Artificial Sequence
  Description of Artificial Sequence: Synthetic oligonucleotide
aguccuauuacaauagguu

SEQ ID NO: 232861 - RNA, 19 nt, Artificial Sequence
  Description of Artificial Sequence: Synthetic oligonucleotide
aacaaaguuuagguuuaga

SEQ ID NO: 232862 - RNA, 19 nt, Artificial Sequence
  Description of Artificial Sequence: Synthetic oligonucleotide
ucaaaacuaguagcauuug

SEQ ID NO: 232863 - RNA, 19 nt, Artificial Sequence
  Description of Artificial Sequence: Synthetic oligonucleotide
ucuuacagccaaugcauuu

SEQ ID NO: 232864 - RNA, 19 nt, Artificial Sequence
  Description of Artificial Sequence: Synthetic oligonucleotide
gguggugacacuugaguug

SEQ ID NO: 232865 - RNA, 19 nt, Artificial Sequence
  Description of Artificial Sequence: Synthetic oligonucleotide
uuaauuucuagugccuaua

SEQ ID NO: 232866 - RNA, 19 nt, Artificial Sequence
  Description of Artificial Sequence: Synthetic oligonucleotide
uuccggaaccuuaaguuuu

SEQ ID NO: 232867 - RNA, 19 nt, Artificial Sequence
  Description of Artificial Sequence: Synthetic oligonucleotide
aucuuucuacuuugggaug

SEQ ID NO: 232868 - RNA, 19 nt, Artificial Sequence
  Description of Artificial Sequence: Synthetic oligonucleotide
cagacaccguccaaacucc

SEQ ID NO: 232869 - RNA, 19 nt, Artificial Sequence
  Description of Artificial Sequence: Synthetic oligonucleotide
acuagacugaggugcuaag

SEQ ID NO: 232870 - RNA, 19 nt, Artificial Sequence
  Description of Artificial Sequence: Synthetic oligonucleotide
guuguaacaauugguacaa

SEQ ID NO: 232871 - RNA, 19 nt, Artificial Sequence
  Description of Artificial Sequence: Synthetic oligonucleotide
uucgaggcuucuuagcaau

SEQ ID NO: 232872 - RNA, 19 nt, Artificial Sequence
  Description of Artificial Sequence: Synthetic oligonucleotide
ucuguacaguccacgugca

SEQ ID NO: 232873 - RNA, 19 nt, Artificial Sequence
  Description of Artificial Sequence: Synthetic oligonucleotide
acugagugacauacugagc

SEQ ID NO: 232874 - RNA, 19 nt, Artificial Sequence
  Description of Artificial Sequence: Synthetic oligonucleotide
guuguuuagugaguaccag

SEQ ID NO: 232875 - RNA, 19 nt, Artificial Sequence
  Description of Artificial Sequence: Synthetic oligonucleotide
aggcaugccuuuuauugcu

SEQ ID NO: 232876 - RNA, 19 nt, Artificial Sequence
  Description of Artificial Sequence: Synthetic oligonucleotide
gcaguuacacccuuugcug

SEQ ID NO: 232877 - RNA, 19 nt, Artificial Sequence
  Description of Artificial Sequence: Synthetic oligonucleotide
aacaagggcugaauuaaaa

SEQ ID NO: 232878 - RNA, 19 nt, Artificial Sequence
  Description of Artificial Sequence: Synthetic oligonucleotide
ugcuauuaguuagcaagga

SEQ ID NO: 232879 - RNA, 19 nt, Artificial Sequence
  Description of Artificial Sequence: Synthetic oligonucleotide
aguuuacuuugacacacua

SEQ ID NO: 232880 - RNA, 19 nt, Artificial Sequence
  Description of Artificial Sequence: Synthetic oligonucleotide
uaaaauuggugagcucaug

SEQ ID NO: 232881 - RNA, 19 nt, Artificial Sequence
  Description of Artificial Sequence: Synthetic oligonucleotide
cauaggcagaauuaacuaa

SEQ ID NO: 232882 - RNA, 19 nt, Artificial Sequence
  Description of Artificial Sequence: Synthetic oligonucleotide
agcuucgugaucacuggac

SEQ ID NO: 232883 - RNA, 19 nt, Artificial Sequence
  Description of Artificial Sequence: Synthetic oligonucleotide
uagguuccuaagagcauac

SEQ ID NO: 232884 - RNA, 19 nt, Artificial Sequence
  Description of Artificial Sequence: Synthetic oligonucleotide
auuagaguugcuugcuaua

SEQ ID NO: 232885 - RNA, 19 nt, Artificial Sequence
  Description of Artificial Sequence: Synthetic oligonucleotide
ggauguuccaguaaaauua

SEQ ID NO: 232886 - RNA, 19 nt, Artificial Sequence
  Description of Artificial Sequence: Synthetic oligonucleotide
ugugaugacugguggugac

SEQ ID NO: 232887 - RNA, 19 nt, Artificial Sequence
  Description of Artificial Sequence: Synthetic oligonucleotide
ucuuaaaacaagggcugaa

SEQ ID NO: 232888 - RNA, 19 nt, Artificial Sequence
  Description of Artificial Sequence: Synthetic oligonucleotide
agccaaugcauuugcagau

SEQ ID NO: 232889 - RNA, 19 nt, Artificial Sequence
  Description of Artificial Sequence: Synthetic oligonucleotide
caaaacuaguagcauuuga

SEQ ID NO: 232890 - RNA, 19 nt, Artificial Sequence
  Description of Artificial Sequence: Synthetic oligonucleotide
caauggaaucagaaggaca

SEQ ID NO: 232891 - RNA, 19 nt, Artificial Sequence
  Description of Artificial Sequence: Synthetic oligonucleotide
uucuucuuacuagaauagu

SEQ ID NO: 232892 - RNA, 19 nt, Artificial Sequence
  Description of Artificial Sequence: Synthetic oligonucleotide
uggugcaauuagaauuaac

SEQ ID NO: 232893 - RNA, 19 nt, Artificial Sequence
  Description of Artificial Sequence: Synthetic oligonucleotide
gcuauuaacuuuguucagc

SEQ ID NO: 232894 - RNA, 19 nt, Artificial Sequence
  Description of Artificial Sequence: Synthetic oligonucleotide
cucaagaguccuauuacaa

SEQ ID NO: 232895 - RNA, 19 nt, Artificial Sequence
  Description of Artificial Sequence: Synthetic oligonucleotide
caaggaggcaguuacacgu

SEQ ID NO: 232896 - RNA, 19 nt, Artificial Sequence
  Description of Artificial Sequence: Synthetic oligonucleotide
uccgucugucccuuaauau

SEQ ID NO: 232897 - RNA, 19 nt, Artificial Sequence
  Description of Artificial Sequence: Synthetic oligonucleotide
uccggugacugcuuuacua

SEQ ID NO: 232898 - RNA, 19 nt, Artificial Sequence
  Description of Artificial Sequence: Synthetic oligonucleotide
augacgcucaucagacacc

SEQ ID NO: 232899 - RNA, 19 nt, Artificial Sequence
  Description of Artificial Sequence: Synthetic oligonucleotide
agaaugucugcacuaucua

SEQ ID NO: 232900 - RNA, 19 nt, Artificial Sequence
  Description of Artificial Sequence: Synthetic oligonucleotide
cugcccauccgucuguccc

SEQ ID NO: 232901 - RNA, 19 nt, Artificial Sequence
  Description of Artificial Sequence: Synthetic oligonucleotide
ugguguucgaggcuucuua

SEQ ID NO: 232902 - RNA, 19 nt, Artificial Sequence
  Description of Artificial Sequence: Synthetic oligonucleotide
uuacacguggcuucagcua

SEQ ID NO: 232903 - RNA, 19 nt, Artificial Sequence
  Description of Artificial Sequence: Synthetic oligonucleotide
ccaguaaaauuagaguugc

SEQ ID NO: 232904 - RNA, 19 nt, Artificial Sequence
  Description of Artificial Sequence: Synthetic oligonucleotide
acggaauccucuuugcauu

SEQ ID NO: 232905 - RNA, 19 nt, Artificial Sequence
  Description of Artificial Sequence: Synthetic oligonucleotide
guacuuugucaauggaauc

SEQ ID NO: 232906 - RNA, 19 nt, Artificial Sequence
  Description of Artificial Sequence: Synthetic oligonucleotide
uugaugcaaacgccuaaua

SEQ ID NO: 232907 - RNA, 19 nt, Artificial Sequence
  Description of Artificial Sequence: Synthetic oligonucleotide
uaucaaggcaugccuuuua

SEQ ID NO: 232908 - RNA, 19 nt, Artificial Sequence
  Description of Artificial Sequence: Synthetic oligonucleotide
uucggcuuaaaagcuucug

SEQ ID NO: 232909 - RNA, 19 nt, Artificial Sequence
  Description of Artificial Sequence: Synthetic oligonucleotide
aggauuuaagguaaccuua

SEQ ID NO: 232910 - RNA, 19 nt, Artificial Sequence
  Description of Artificial Sequence: Synthetic oligonucleotide
aggcagaauuaacuaagau

SEQ ID NO: 232911 - RNA, 19 nt, Artificial Sequence
  Description of Artificial Sequence: Synthetic oligonucleotide
uucagcgauuugaugcaaa

SEQ ID NO: 232912 - RNA, 19 nt, Artificial Sequence
  Description of Artificial Sequence: Synthetic oligonucleotide
auaugcuauuaguuagcaa

SEQ ID NO: 232913 - RNA, 19 nt, Artificial Sequence
  Description of Artificial Sequence: Synthetic oligonucleotide
uuucggcuuaaaagcuucu

SEQ ID NO: 232914 - RNA, 19 nt, Artificial Sequence
  Description of Artificial Sequence: Synthetic oligonucleotide
gaaguacugcauaucccac

SEQ ID NO: 232915 - RNA, 19 nt, Artificial Sequence
  Description of Artificial Sequence: Synthetic oligonucleotide
ugccaucauacauaaucua

SEQ ID NO: 232916 - RNA, 19 nt, Artificial Sequence
  Description of Artificial Sequence: Synthetic oligonucleotide
aaaacuuauugcagucuuu

SEQ ID NO: 232917 - RNA, 19 nt, Artificial Sequence
  Description of Artificial Sequence: Synthetic oligonucleotide
cagcgauuugaugcaaacg

SEQ ID NO: 232918 - RNA, 19 nt, Artificial Sequence
  Description of Artificial Sequence: Synthetic oligonucleotide
uucguuccgggcuuucuuc

SEQ ID NO: 232919 - RNA, 19 nt, Artificial Sequence
  Description of Artificial Sequence: Synthetic oligonucleotide
gccuauaccuuucauguuc

SEQ ID NO: 232920 - RNA, 19 nt, Artificial Sequence
  Description of Artificial Sequence: Synthetic oligonucleotide
gauaccggauguuccagua

SEQ ID NO: 232921 - RNA, 19 nt, Artificial Sequence
  Description of Artificial Sequence: Synthetic oligonucleotide
uccuaucaaggcaugccuu

SEQ ID NO: 232922 - RNA, 19 nt, Artificial Sequence
  Description of Artificial Sequence: Synthetic oligonucleotide
guuuagugaguaccagaca

SEQ ID NO: 232923 - RNA, 19 nt, Artificial Sequence
  Description of Artificial Sequence: Synthetic oligonucleotide
uuugugcacacuguauaua

SEQ ID NO: 232924 - RNA, 19 nt, Artificial Sequence
  Description of Artificial Sequence: Synthetic oligonucleotide
agcaaugccaucauacaua

SEQ ID NO: 232925 - RNA, 19 nt, Artificial Sequence
  Description of Artificial Sequence: Synthetic oligonucleotide
ccuuguuauaaacucaaga

SEQ ID NO: 232926 - RNA, 19 nt, Artificial Sequence
  Description of Artificial Sequence: Synthetic oligonucleotide
caaguaucauccgcucugc

SEQ ID NO: 232927 - RNA, 19 nt, Artificial Sequence
  Description of Artificial Sequence: Synthetic oligonucleotide
uguccggugacugcuuuac

SEQ ID NO: 232928 - RNA, 19 nt, Artificial Sequence
  Description of Artificial Sequence: Synthetic oligonucleotide
ucagcaagucugagaucug

SEQ ID NO: 232929 - RNA, 19 nt, Artificial Sequence
  Description of Artificial Sequence: Synthetic oligonucleotide
guaaccuuacaaaaugccu

SEQ ID NO: 232930 - RNA, 19 nt, Artificial Sequence
  Description of Artificial Sequence: Synthetic oligonucleotide
uccuaagagcauacaguuu

SEQ ID NO: 232931 - RNA, 19 nt, Artificial Sequence
  Description of Artificial Sequence: Synthetic oligonucleotide
uaacuuuguucagcgauuu

SEQ ID NO: 232932 - RNA, 19 nt, Artificial Sequence
  Description of Artificial Sequence: Synthetic oligonucleotide
ggauuuaagguaaccuuac

SEQ ID NO: 232933 - RNA, 19 nt, Artificial Sequence
  Description of Artificial Sequence: Synthetic oligonucleotide
aaguuuacuuugacacacu

SEQ ID NO: 232934 - RNA, 19 nt, Artificial Sequence
  Description of Artificial Sequence: Synthetic oligonucleotide
gcuucgugaucacuggacc

SEQ ID NO: 232935 - RNA, 19 nt, Artificial Sequence
  Description of Artificial Sequence: Synthetic oligonucleotide
uuguccuuuuagacuaauu

SEQ ID NO: 232936 - RNA, 19 nt, Artificial Sequence
  Description of Artificial Sequence: Synthetic oligonucleotide
ucuuagcaaucuguacugu

SEQ ID NO: 232937 - RNA, 19 nt, Artificial Sequence
  Description of Artificial Sequence: Synthetic oligonucleotide
cuucgugaucacuggacca

SEQ ID NO: 232938 - RNA, 19 nt, Artificial Sequence
  Description of Artificial Sequence: Synthetic oligonucleotide
ucguuccgggcuuucuuca

SEQ ID NO: 232939 - RNA, 19 nt, Artificial Sequence
  Description of Artificial Sequence: Synthetic oligonucleotide
guuacacguggcuucagcu

SEQ ID NO: 232940 - RNA, 19 nt, Artificial Sequence
  Description of Artificial Sequence: Synthetic oligonucleotide
uuccgggcuuucuucaaaa

SEQ ID NO: 232941 - RNA, 19 nt, Artificial Sequence
  Description of Artificial Sequence: Synthetic oligonucleotide
cauuuauacaaaguuuacu

SEQ ID NO: 232942 - RNA, 19 nt, Artificial Sequence
  Description of Artificial Sequence: Synthetic oligonucleotide
gauuugaugcaaacgccua

SEQ ID NO: 232943 - RNA, 19 nt, Artificial Sequence
  Description of Artificial Sequence: Synthetic oligonucleotide
ggcagaauuaacuaagauu

SEQ ID NO: 232944 - RNA, 19 nt, Artificial Sequence
  Description of Artificial Sequence: Synthetic oligonucleotide
gguaauaagcauaugcuau

SEQ ID NO: 232945 - RNA, 19 nt, Artificial Sequence
  Description of Artificial Sequence: Synthetic oligonucleotide
cuaguagcauuugauugca

SEQ ID NO: 232946 - RNA, 19 nt, Artificial Sequence
  Description of Artificial Sequence: Synthetic oligonucleotide
cacuaucuacauuuaaagu

SEQ ID NO: 232947 - RNA, 19 nt, Artificial Sequence
  Description of Artificial Sequence: Synthetic oligonucleotide
acgccuaauacaaaagguu

SEQ ID NO: 232948 - RNA, 19 nt, Artificial Sequence
  Description of Artificial Sequence: Synthetic oligonucleotide
cgccuaauacaaaagguug

SEQ ID NO: 232949 - RNA, 19 nt, Artificial Sequence
  Description of Artificial Sequence: Synthetic oligonucleotide
gaguccuauuacaauaggu

SEQ ID NO: 232950 - RNA, 19 nt, Artificial Sequence
  Description of Artificial Sequence: Synthetic oligonucleotide
acacccuuugcugugccga

SEQ ID NO: 232951 - RNA, 19 nt, Artificial Sequence
  Description of Artificial Sequence: Synthetic oligonucleotide
uaguagcauuugauugcac

SEQ ID NO: 232952 - RNA, 19 nt, Artificial Sequence
  Description of Artificial Sequence: Synthetic oligonucleotide
gagcucauguagcuauuaa

SEQ ID NO: 232953 - RNA, 19 nt, Artificial Sequence
  Description of Artificial Sequence: Synthetic oligonucleotide
guuguaguauuaaucaguu

SEQ ID NO: 232954 - RNA, 19 nt, Artificial Sequence
  Description of Artificial Sequence: Synthetic oligonucleotide
cucgucagcaagucugaga

SEQ ID NO: 232955 - RNA, 19 nt, Artificial Sequence
  Description of Artificial Sequence: Synthetic oligonucleotide
auguuccaaauuguuguaa

SEQ ID NO: 232956 - RNA, 19 nt, Artificial Sequence
  Description of Artificial Sequence: Synthetic oligonucleotide
auaccggauguuccaguaa

SEQ ID NO: 232957 - RNA, 19 nt, Artificial Sequence
  Description of Artificial Sequence: Synthetic oligonucleotide
gcaaugccaucauacauaa

SEQ ID NO: 232958 - RNA, 19 nt, Artificial Sequence
  Description of Artificial Sequence: Synthetic oligonucleotide
gaauggaagccuugccugu

SEQ ID NO: 232959 - RNA, 19 nt, Artificial Sequence
  Description of Artificial Sequence: Synthetic oligonucleotide
gaguaccagacagggagga

SEQ ID NO: 232960 - RNA, 19 nt, Artificial Sequence
  Description of Artificial Sequence: Synthetic oligonucleotide
gguuguuuagugaguacca

SEQ ID NO: 232961 - RNA, 19 nt, Artificial Sequence
  Description of Artificial Sequence: Synthetic oligonucleotide
guacaguccacgugcagcu

SEQ ID NO: 232962 - RNA, 19 nt, Artificial Sequence
  Description of Artificial Sequence: Synthetic oligonucleotide
uuauaguuucaggucucuu

SEQ ID NO: 232963 - RNA, 19 nt, Artificial Sequence
  Description of Artificial Sequence: Synthetic oligonucleotide
ugagcucauguagcuauua

SEQ ID NO: 232964 - RNA, 19 nt, Artificial Sequence
  Description of Artificial Sequence: Synthetic oligonucleotide
gcaaggauuuaagguaacc

SEQ ID NO: 232965 - RNA, 19 nt, Artificial Sequence
  Description of Artificial Sequence: Synthetic oligonucleotide
cuuaagacauccugaccgu

SEQ ID NO: 232966 - RNA, 19 nt, Artificial Sequence
  Description of Artificial Sequence: Synthetic oligonucleotide
uuaagacauccugaccguu

SEQ ID NO: 232967 - RNA, 19 nt, Artificial Sequence
  Description of Artificial Sequence: Synthetic oligonucleotide
ugguacaauuacaguuguu

SEQ ID NO: 232968 - RNA, 19 nt, Artificial Sequence
  Description of Artificial Sequence: Synthetic oligonucleotide
auuuucggcuuaaaagcuu

SEQ ID NO: 232969 - RNA, 19 nt, Artificial Sequence
  Description of Artificial Sequence: Synthetic oligonucleotide
caacuauagaauccuugua

SEQ ID NO: 232970 - RNA, 19 nt, Artificial Sequence
  Description of Artificial Sequence: Synthetic oligonucleotide
gaggcaguuacacguggcu

SEQ ID NO: 232971 - RNA, 19 nt, Artificial Sequence
  Description of Artificial Sequence: Synthetic oligonucleotide
ccuuuuagacuaauuuaca

SEQ ID NO: 232972 - RNA, 19 nt, Artificial Sequence
  Description of Artificial Sequence: Synthetic oligonucleotide
gaauauuauuuuguccuuu

SEQ ID NO: 232973 - RNA, 19 nt, Artificial Sequence
  Description of Artificial Sequence: Synthetic oligonucleotide
ggccucgucagcaagucug

SEQ ID NO: 232974 - RNA, 19 nt, Artificial Sequence
  Description of Artificial Sequence: Synthetic oligonucleotide
auuaugccauugaauggaa

SEQ ID NO: 232975 - RNA, 19 nt, Artificial Sequence
  Description of Artificial Sequence: Synthetic oligonucleotide
gcgauuugaugcaaacgcc

SEQ ID NO: 232976 - RNA, 19 nt, Artificial Sequence
  Description of Artificial Sequence: Synthetic oligonucleotide
ucgaggcuucuuagcaauc

SEQ ID NO: 232977 - RNA, 19 nt, Artificial Sequence
  Description of Artificial Sequence: Synthetic oligonucleotide
gugcauggcacaaggguca

SEQ ID NO: 232978 - RNA, 19 nt, Artificial Sequence
  Description of Artificial Sequence: Synthetic oligonucleotide
guucgaggcuucuuagcaa

SEQ ID NO: 232979 - RNA, 19 nt, Artificial Sequence
  Description of Artificial Sequence: Synthetic oligonucleotide
gcuugcuauagacacauau

SEQ ID NO: 232980 - RNA, 19 nt, Artificial Sequence
  Description of Artificial Sequence: Synthetic oligonucleotide
uuggccucgucagcaaguc

SEQ ID NO: 232981 - RNA, 19 nt, Artificial Sequence
  Description of Artificial Sequence: Synthetic oligonucleotide
uccgggcuuucuucaaaau

SEQ ID NO: 232982 - RNA, 19 nt, Artificial Sequence
  Description of Artificial Sequence: Synthetic oligonucleotide
guaggaggguaauaagcau

SEQ ID NO: 232983 - RNA, 19 nt, Artificial Sequence
  Description of Artificial Sequence: Synthetic oligonucleotide
cugaggugcuaagaauguc

SEQ ID NO: 232984 - RNA, 19 nt, Artificial Sequence
  Description of Artificial Sequence: Synthetic oligonucleotide
gacaccguccaaacuccuc

SEQ ID NO: 232985 - RNA, 19 nt, Artificial Sequence
  Description of Artificial Sequence: Synthetic oligonucleotide
cacgugcagcuuuugugca

SEQ ID NO: 232986 - RNA, 19 nt, Artificial Sequence
  Description of Artificial Sequence: Synthetic oligonucleotide
gguuucaccucuggccucc

SEQ ID NO: 232987 - RNA, 19 nt, Artificial Sequence
  Description of Artificial Sequence: Synthetic oligonucleotide
uugcaaagaugagcuucgu

SEQ ID NO: 232988 - RNA, 19 nt, Artificial Sequence
  Description of Artificial Sequence: Synthetic oligonucleotide
uggccucgucagcaagucu

SEQ ID NO: 232989 - RNA, 19 nt, Artificial Sequence
  Description of Artificial Sequence: Synthetic oligonucleotide
cacuuacuacauacaacua

SEQ ID NO: 232990 - RNA, 19 nt, Artificial Sequence
  Description of Artificial Sequence: Synthetic oligonucleotide
cauguuagccauuccucau

SEQ ID NO: 232991 - RNA, 19 nt, Artificial Sequence
  Description of Artificial Sequence: Synthetic oligonucleotide
uccuuguaggaggguaaua

SEQ ID NO: 232992 - RNA, 19 nt, Artificial Sequence
  Description of Artificial Sequence: Synthetic oligonucleotide
caguuacacccuuugcugu

SEQ ID NO: 232993 - RNA, 19 nt, Artificial Sequence
  Description of Artificial Sequence: Synthetic oligonucleotide
cccuuguuauaaacucaag

SEQ ID NO: 232994 - RNA, 19 nt, Artificial Sequence
  Description of Artificial Sequence: Synthetic oligonucleotide
auccuuguaggaggguaau

SEQ ID NO: 232995 - RNA, 19 nt, Artificial Sequence
  Description of Artificial Sequence: Synthetic oligonucleotide
gcuauuaguuagcaaggau

SEQ ID NO: 232996 - RNA, 19 nt, Artificial Sequence
  Description of Artificial Sequence: Synthetic oligonucleotide
ggcuuaaaagcuucuggau

SEQ ID NO: 232997 - RNA, 19 nt, Artificial Sequence
  Description of Artificial Sequence: Synthetic oligonucleotide
gugaugacugguggugaca

SEQ ID NO: 232998 - RNA, 19 nt, Artificial Sequence
  Description of Artificial Sequence: Synthetic oligonucleotide
aggcaguuacacguggcuu

SEQ ID NO: 232999 - RNA, 19 nt, Artificial Sequence
  Description of Artificial Sequence: Synthetic oligonucleotide
guuccgggcuuucuucaaa

SEQ ID NO: 233000 - RNA, 19 nt, Artificial Sequence
  Description of Artificial Sequence: Synthetic oligonucleotide
ugccgcagccuuugacuuc

SEQ ID NO: 233001 - RNA, 19 nt, Artificial Sequence
  Description of Artificial Sequence: Synthetic oligonucleotide
gagguugguguucgaggcu

SEQ ID NO: 233002 - RNA, 19 nt, Artificial Sequence
  Description of Artificial Sequence: Synthetic oligonucleotide
agguuccuaagagcauaca

SEQ ID NO: 233003 - RNA, 19 nt, Artificial Sequence
  Description of Artificial Sequence: Synthetic oligonucleotide
ggaggcaguuacacguggc

SEQ ID NO: 233004 - RNA, 19 nt, Artificial Sequence
  Description of Artificial Sequence: Synthetic oligonucleotide
auggugcaauuagaauuaa

SEQ ID NO: 233005 - RNA, 19 nt, Artificial Sequence
  Description of Artificial Sequence: Synthetic oligonucleotide
ggugacugcuuuacuauua

SEQ ID NO: 233006 - RNA, 19 nt, Artificial Sequence
  Description of Artificial Sequence: Synthetic oligonucleotide
gccgcagccuuugacuucc

SEQ ID NO: 233007 - RNA, 19 nt, Artificial Sequence
  Description of Artificial Sequence: Synthetic oligonucleotide
ccugugucuggauaccgga

SEQ ID NO: 233008 - RNA, 19 nt, Artificial Sequence
  Description of Artificial Sequence: Synthetic oligonucleotide
caccaaugacagguuucac

SEQ ID NO: 233009 - RNA, 19 nt, Artificial Sequence
  Description of Artificial Sequence: Synthetic oligonucleotide
gcugaguuguaguauuaau

SEQ ID NO: 233010 - RNA, 19 nt, Artificial Sequence
  Description of Artificial Sequence: Synthetic oligonucleotide
ggauuccuaucaaggcaug

SEQ ID NO: 233011 - RNA, 19 nt, Artificial Sequence
  Description of Artificial Sequence: Synthetic oligonucleotide
cauaucccacauucccugu

SEQ ID NO: 233012 - RNA, 19 nt, Artificial Sequence
  Description of Artificial Sequence: Synthetic oligonucleotide
cucaucagacaccguccaa

SEQ ID NO: 233013 - RNA, 19 nt, Artificial Sequence
  Description of Artificial Sequence: Synthetic oligonucleotide
accggauguuccaguaaaa

SEQ ID NO: 233014 - RNA, 19 nt, Artificial Sequence
  Description of Artificial Sequence: Synthetic oligonucleotide
ugccgacgguccgacuccc

SEQ ID NO: 233015 - RNA, 19 nt, Artificial Sequence
  Description of Artificial Sequence: Synthetic oligonucleotide
ggaggguaauaagcauaug

SEQ ID NO: 233016 - RNA, 19 nt, Artificial Sequence
  Description of Artificial Sequence: Synthetic oligonucleotide
guccgacuccccuccuuuc

SEQ ID NO: 233017 - RNA, 19 nt, Artificial Sequence
  Description of Artificial Sequence: Synthetic oligonucleotide
cuuucccuauuuucggcuu

SEQ ID NO: 233018 - RNA, 19 nt, Artificial Sequence
  Description of Artificial Sequence: Synthetic oligonucleotide
gggauguaaauagggcuua

SEQ ID NO: 233019 - RNA, 19 nt, Artificial Sequence
  Description of Artificial Sequence: Synthetic oligonucleotide
caguuacacguggcuucag

SEQ ID NO: 233020 - RNA, 19 nt, Artificial Sequence
  Description of Artificial Sequence: Synthetic oligonucleotide
gcaguuacacguggcuuca

SEQ ID NO: 233021 - RNA, 19 nt, Artificial Sequence
  Description of Artificial Sequence: Synthetic oligonucleotide
guuggccucgucagcaagu

SEQ ID NO: 233022 - RNA, 19 nt, Artificial Sequence
  Description of Artificial Sequence: Synthetic oligonucleotide
cugcuguaacugagugaca

SEQ ID NO: 233023 - RNA, 19 nt, Artificial Sequence
  Description of Artificial Sequence: Synthetic oligonucleotide
ccucaauuccaacacaguu

SEQ ID NO: 233024 - RNA, 19 nt, Artificial Sequence
  Description of Artificial Sequence: Synthetic oligonucleotide
acacguggcuucagcuacu

SEQ ID NO: 233025 - RNA, 19 nt, Artificial Sequence
  Description of Artificial Sequence: Synthetic oligonucleotide
cgauuugaugcaaacgccu

SEQ ID NO: 233026 - RNA, 19 nt, Artificial Sequence
  Description of Artificial Sequence: Synthetic oligonucleotide
guccacgugcagcuuuugu

SEQ ID NO: 233027 - RNA, 19 nt, Artificial Sequence
  Description of Artificial Sequence: Synthetic oligonucleotide
ccuauuacaauagguuccu

SEQ ID NO: 233028 - RNA, 19 nt, Artificial Sequence
  Description of Artificial Sequence: Synthetic oligonucleotide
cuuucuacuuugggaugua

SEQ ID NO: 233029 - RNA, 19 nt, Artificial Sequence
  Description of Artificial Sequence: Synthetic oligonucleotide
cuauuacaauagguuccua

SEQ ID NO: 233030 - RNA, 19 nt, Artificial Sequence
  Description of Artificial Sequence: Synthetic oligonucleotide
cacugcccauccgucuguc

SEQ ID NO: 233031 - RNA, 19 nt, Artificial Sequence
  Description of Artificial Sequence: Synthetic oligonucleotide
ccgaacccuccccaaauaa

SEQ ID NO: 233032 - RNA, 19 nt, Artificial Sequence
  Description of Artificial Sequence: Synthetic oligonucleotide
gccucccuccaaugguaac

SEQ ID NO: 233033 - RNA, 19 nt, Artificial Sequence
  Description of Artificial Sequence: Synthetic oligonucleotide
acgguccgacuccccuccu

SEQ ID NO: 233034 - RNA, 19 nt, Artificial Sequence
  Description of Artificial Sequence: Synthetic oligonucleotide
cuaucaaggcaugccuuuu

SEQ ID NO: 233035 - RNA, 19 nt, Artificial Sequence
  Description of Artificial Sequence: Synthetic oligonucleotide
cugccgcagccuuugacuu

SEQ ID NO: 233036 - RNA, 19 nt, Artificial Sequence
  Description of Artificial Sequence: Synthetic oligonucleotide
ccuaucaaggcaugccuuu

SEQ ID NO: 233037 - RNA, 19 nt, Artificial Sequence
  Description of Artificial Sequence: Synthetic oligonucleotide
ccucgucagcaagucugag

SEQ ID NO: 233038 - RNA, 19 nt, Artificial Sequence
  Description of Artificial Sequence: Synthetic oligonucleotide
ccgucugucccuuaauauu

SEQ ID NO: 233039 - RNA, 19 nt, Artificial Sequence
  Description of Artificial Sequence: Synthetic oligonucleotide
ccggugacugcuuuacuau

SEQ ID NO: 233040 - RNA, 19 nt, Artificial Sequence
  Description of Artificial Sequence: Synthetic oligonucleotide
gguccgacuccccuccuuu

SEQ ID NO: 233041 - RNA, 19 nt, Artificial Sequence
  Description of Artificial Sequence: Synthetic oligonucleotide
ccgacuggcagacucugau

SEQ ID NO: 233042 - RNA, 19 nt, Artificial Sequence
  Description of Artificial Sequence: Synthetic oligonucleotide
cgacgguccgacuccccuc

SEQ ID NO: 233043 - RNA, 19 nt, Artificial Sequence
  Description of Artificial Sequence: Synthetic oligonucleotide
gacgcucaucagacaccgu

SEQ ID NO: 233044 - RNA, 19 nt, Artificial Sequence
  Description of Artificial Sequence: Synthetic oligonucleotide
ccggauguuccaguaaaau

SEQ ID NO: 233045 - RNA, 19 nt, Artificial Sequence
  Description of Artificial Sequence: Synthetic oligonucleotide
ggccucccuccaaugguaa

SEQ ID NO: 233046 - RNA, 19 nt, Artificial Sequence
  Description of Artificial Sequence: Synthetic oligonucleotide
gccgacuggcagacucuga

SEQ ID NO: 233047 - RNA, 19 nt, Artificial Sequence
  Description of Artificial Sequence: Synthetic oligonucleotide
gccgacgguccgacucccc

SEQ ID NO: 233048 - RNA, 19 nt, Artificial Sequence
  Description of Artificial Sequence: Synthetic oligonucleotide
cguuccgggcuuucuucaa

SEQ ID NO: 233049 - RNA, 19 nt, Artificial Sequence
  Description of Artificial Sequence: Synthetic oligonucleotide
ccgcagccuuugacuuccc

SEQ ID NO: 233050 - RNA, 19 nt, Artificial Sequence
  Description of Artificial Sequence: Synthetic oligonucleotide
ccgacgguccgacuccccu

SEQ ID NO: 233051 - RNA, 19 nt, Artificial Sequence
  Description of Artificial Sequence: Synthetic oligonucleotide
gggccgacuggcagacucu

SEQ ID NO: 233052 - RNA, 19 nt, Artificial Sequence
  Description of Artificial Sequence: Synthetic oligonucleotide
cugugccgacgguccgacu

SEQ ID NO: 233053 - RNA, 19 nt, Artificial Sequence
  Description of Artificial Sequence: Synthetic oligonucleotide
cccauccgucugucccuua

SEQ ID NO: 233054 - RNA, 19 nt, Artificial Sequence
  Description of Artificial Sequence: Synthetic oligonucleotide
gcccauccgucugucccuu

SEQ ID NO: 233055 - RNA, 19 nt, Artificial Sequence
  Description of Artificial Sequence: Synthetic oligonucleotide
cgguccgacuccccuccuu

SEQ ID NO: 233056 - RNA, 19 nt, Artificial Sequence
  Description of Artificial Sequence: Synthetic oligonucleotide
aaggcuaucgucuugaauc

SEQ ID NO: 233057 - RNA, 19 nt, Artificial Sequence
  Description of Artificial Sequence: Synthetic oligonucleotide
uuuguauaaacaaacaaaa

SEQ ID NO: 233058 - RNA, 19 nt, Artificial Sequence
  Description of Artificial Sequence: Synthetic oligonucleotide
uuaaugagcaugauaaacu

SEQ ID NO: 233059 - RNA, 19 nt, Artificial Sequence
  Description of Artificial Sequence: Synthetic oligonucleotide
augauaaacuuauugcugg

SEQ ID NO: 233060 - RNA, 19 nt, Artificial Sequence
  Description of Artificial Sequence: Synthetic oligonucleotide
aaaugcuuaaucugccgac

SEQ ID NO: 233061 - RNA, 19 nt, Artificial Sequence
  Description of Artificial Sequence: Synthetic oligonucleotide
auuaaugagcaugauaaac

SEQ ID NO: 233062 - RNA, 19 nt, Artificial Sequence
  Description of Artificial Sequence: Synthetic oligonucleotide
cuuucuauugacuugggac

SEQ ID NO: 233063 - RNA, 19 nt, Artificial Sequence
  Description of Artificial Sequence: Synthetic oligonucleotide
auaaacuuauugcuggcac

SEQ ID NO: 233064 - RNA, 19 nt, Artificial Sequence
  Description of Artificial Sequence: Synthetic oligonucleotide
aaguagcacugucugaccc

SEQ ID NO: 233065 - RNA, 19 nt, Artificial Sequence
  Description of Artificial Sequence: Synthetic oligonucleotide
aacugcuaaaaccccuucc

SEQ ID NO: 233066 - RNA, 19 nt, Artificial Sequence
  Description of Artificial Sequence: Synthetic oligonucleotide
uuauaggcugacaucagag

SEQ ID NO: 233067 - RNA, 19 nt, Artificial Sequence
  Description of Artificial Sequence: Synthetic oligonucleotide
gaagcgguuagcuggaagg

SEQ ID NO: 233068 - RNA, 19 nt, Artificial Sequence
  Description of Artificial Sequence: Synthetic oligonucleotide
aaaaugcuuaaucugccga

SEQ ID NO: 233069 - RNA, 19 nt, Artificial Sequence
  Description of Artificial Sequence: Synthetic oligonucleotide
aagccugcaacuuaagaca

SEQ ID NO: 233070 - RNA, 19 nt, Artificial Sequence
  Description of Artificial Sequence: Synthetic oligonucleotide
acuuaagacaggaagaaag

SEQ ID NO: 233071 - RNA, 19 nt, Artificial Sequence
  Description of Artificial Sequence: Synthetic oligonucleotide
augggaagcgguuagcugg

SEQ ID NO: 233072 - RNA, 19 nt, Artificial Sequence
  Description of Artificial Sequence: Synthetic oligonucleotide
ucagaguaguggcucaugg

SEQ ID NO: 233073 - RNA, 19 nt, Artificial Sequence
  Description of Artificial Sequence: Synthetic oligonucleotide
uuaagugacuaccaaacua

SEQ ID NO: 233074 - RNA, 19 nt, Artificial Sequence
  Description of Artificial Sequence: Synthetic oligonucleotide
agacuaggaagccugagag

SEQ ID NO: 233075 - RNA, 19 nt, Artificial Sequence
  Description of Artificial Sequence: Synthetic oligonucleotide
auaugaccagagcaggacc

SEQ ID NO: 233076 - RNA, 19 nt, Artificial Sequence
  Description of Artificial Sequence: Synthetic oligonucleotide
aauacuagaggugggguug

SEQ ID NO: 233077 - RNA, 19 nt, Artificial Sequence
  Description of Artificial Sequence: Synthetic oligonucleotide
aaguccagaugucugccac

SEQ ID NO: 233078 - RNA, 19 nt, Artificial Sequence
  Description of Artificial Sequence: Synthetic oligonucleotide
gauggcgacaugcacuugg

SEQ ID NO: 233079 - RNA, 19 nt, Artificial Sequence
  Description of Artificial Sequence: Synthetic oligonucleotide
cuugugacccaucaggacc

SEQ ID NO: 233080 - RNA, 19 nt, Artificial Sequence
  Description of Artificial Sequence: Synthetic oligonucleotide
uuagcucccacuagagggg

SEQ ID NO: 233081 - RNA, 19 nt, Artificial Sequence
  Description of Artificial Sequence: Synthetic oligonucleotide
uuaaucugccgacucagga

SEQ ID NO: 233082 - RNA, 19 nt, Artificial Sequence
  Description of Artificial Sequence: Synthetic oligonucleotide
aaacaugugugcuggccag

SEQ ID NO: 233083 - RNA, 19 nt, Artificial Sequence
  Description of Artificial Sequence: Synthetic oligonucleotide
aucugcguuguuugaagcc

SEQ ID NO: 233084 - RNA, 19 nt, Artificial Sequence
  Description of Artificial Sequence: Synthetic oligonucleotide
ugacccucuacucugaguc

SEQ ID NO: 233085 - RNA, 19 nt, Artificial Sequence
  Description of Artificial Sequence: Synthetic oligonucleotide
ucccaaauuaaugagcaug

SEQ ID NO: 233086 - RNA, 19 nt, Artificial Sequence
  Description of Artificial Sequence: Synthetic oligonucleotide
cuggaggaaggcaauauag

SEQ ID NO: 233087 - RNA, 19 nt, Artificial Sequence
  Description of Artificial Sequence: Synthetic oligonucleotide
uuuaagugacuaccaaacu

SEQ ID NO: 233088 - RNA, 19 nt, Artificial Sequence
  Description of Artificial Sequence: Synthetic oligonucleotide
uuaucugcguuguuugaag

SEQ ID NO: 233089 - RNA, 19 nt, Artificial Sequence
  Description of Artificial Sequence: Synthetic oligonucleotide
ugguuauaggcugacauca

SEQ ID NO: 233090 - RNA, 19 nt, Artificial Sequence
  Description of Artificial Sequence: Synthetic oligonucleotide
uaaucugccgacucaggag

SEQ ID NO: 233091 - RNA, 19 nt, Artificial Sequence
  Description of Artificial Sequence: Synthetic oligonucleotide
ucuuuaagugacuaccaaa

SEQ ID NO: 233092 - RNA, 19 nt, Artificial Sequence
  Description of Artificial Sequence: Synthetic oligonucleotide
uuuaccccaaguagcacug

SEQ ID NO: 233093 - RNA, 19 nt, Artificial Sequence
  Description of Artificial Sequence: Synthetic oligonucleotide
cauuuaucugcguuguuug

SEQ ID NO: 233094 - RNA, 19 nt, Artificial Sequence
  Description of Artificial Sequence: Synthetic oligonucleotide
ucucuaggcaacuuagcug

SEQ ID NO: 233095 - RNA, 19 nt, Artificial Sequence
  Description of Artificial Sequence: Synthetic oligonucleotide
aaacugcuaaaaccccuuc

SEQ ID NO: 233096 - RNA, 19 nt, Artificial Sequence
  Description of Artificial Sequence: Synthetic oligonucleotide
aaaugcaagacugcuggug

SEQ ID NO: 233097 - RNA, 19 nt, Artificial Sequence
  Description of Artificial Sequence: Synthetic oligonucleotide
aaccuaucaaccagcugcc

SEQ ID NO: 233098 - RNA, 19 nt, Artificial Sequence
  Description of Artificial Sequence: Synthetic oligonucleotide
cucguucugauaagaaggg

SEQ ID NO: 233099 - RNA, 19 nt, Artificial Sequence
  Description of Artificial Sequence: Synthetic oligonucleotide
aagugacuaccaaacuacc

SEQ ID NO: 233100 - RNA, 19 nt, Artificial Sequence
  Description of Artificial Sequence: Synthetic oligonucleotide
acagaagcuaagcucacca

SEQ ID NO: 233101 - RNA, 19 nt, Artificial Sequence
  Description of Artificial Sequence: Synthetic oligonucleotide
guuugaagccuugugaccc

SEQ ID NO: 233102 - RNA, 19 nt, Artificial Sequence
  Description of Artificial Sequence: Synthetic oligonucleotide
gaaaccaccagccccugug

SEQ ID NO: 233103 - RNA, 19 nt, Artificial Sequence
  Description of Artificial Sequence: Synthetic oligonucleotide
gucugaucacauuacuggg

SEQ ID NO: 233104 - RNA, 19 nt, Artificial Sequence
  Description of Artificial Sequence: Synthetic oligonucleotide
agguuccugccccucaucc

SEQ ID NO: 233105 - RNA, 19 nt, Artificial Sequence
  Description of Artificial Sequence: Synthetic oligonucleotide
agugacuaccaaacuaccc

SEQ ID NO: 233106 - RNA, 19 nt, Artificial Sequence
  Description of Artificial Sequence: Synthetic oligonucleotide
ugauaaacuuauugcuggc

SEQ ID NO: 233107 - RNA, 19 nt, Artificial Sequence
  Description of Artificial Sequence: Synthetic oligonucleotide
ccaaaugcaagacugcugg

SEQ ID NO: 233108 - RNA, 19 nt, Artificial Sequence
  Description of Artificial Sequence: Synthetic oligonucleotide
gaucacauuacugggcugc

SEQ ID NO: 233109 - RNA, 19 nt, Artificial Sequence
  Description of Artificial Sequence: Synthetic oligonucleotide
aucacagugcaaguaaguc

SEQ ID NO: 233110 - RNA, 19 nt, Artificial Sequence
  Description of Artificial Sequence: Synthetic oligonucleotide
aaaccaccagccccugugg

SEQ ID NO: 233111 - RNA, 19 nt, Artificial Sequence
  Description of Artificial Sequence: Synthetic oligonucleotide
uaggcccuagacaaggagc

SEQ ID NO: 233112 - RNA, 19 nt, Artificial Sequence
  Description of Artificial Sequence: Synthetic oligonucleotide
ucuaggaggccaaaugcaa

SEQ ID NO: 233113 - RNA, 19 nt, Artificial Sequence
  Description of Artificial Sequence: Synthetic oligonucleotide
aggcaauauaggcacagug

SEQ ID NO: 233114 - RNA, 19 nt, Artificial Sequence
  Description of Artificial Sequence: Synthetic oligonucleotide
ccucguucugauaagaagg

SEQ ID NO: 233115 - RNA, 19 nt, Artificial Sequence
  Description of Artificial Sequence: Synthetic oligonucleotide
ucuacucugaguccuuggu

SEQ ID NO: 233116 - RNA, 19 nt, Artificial Sequence
  Description of Artificial Sequence: Synthetic oligonucleotide
aagcaggguuucugcaccc

SEQ ID NO: 233117 - RNA, 19 nt, Artificial Sequence
  Description of Artificial Sequence: Synthetic oligonucleotide
caccucuccgucuaggagg

SEQ ID NO: 233118 - RNA, 19 nt, Artificial Sequence
  Description of Artificial Sequence: Synthetic oligonucleotide
uccuauugguuaauguuuc

SEQ ID NO: 233119 - RNA, 19 nt, Artificial Sequence
  Description of Artificial Sequence: Synthetic oligonucleotide
aguaguggcucaugggaag

SEQ ID NO: 233120 - RNA, 19 nt, Artificial Sequence
  Description of Artificial Sequence: Synthetic oligonucleotide
caauccuccccuaaucccc

SEQ ID NO: 233121 - RNA, 19 nt, Artificial Sequence
  Description of Artificial Sequence: Synthetic oligonucleotide
cuuagcugggacuuagcug

SEQ ID NO: 233122 - RNA, 19 nt, Artificial Sequence
  Description of Artificial Sequence: Synthetic oligonucleotide
agggucauaugaccagagc

SEQ ID NO: 233123 - RNA, 19 nt, Artificial Sequence
  Description of Artificial Sequence: Synthetic oligonucleotide
gaugcggaucuguggaggg

SEQ ID NO: 233124 - RNA, 19 nt, Artificial Sequence
  Description of Artificial Sequence: Synthetic oligonucleotide
acugucugacccucuacuc

SEQ ID NO: 233125 - RNA, 19 nt, Artificial Sequence
  Description of Artificial Sequence: Synthetic oligonucleotide
cuaauccccacccuuuccc

SEQ ID NO: 233126 - RNA, 19 nt, Artificial Sequence
  Description of Artificial Sequence: Synthetic oligonucleotide
uucccacaauacuagaggu

SEQ ID NO: 233127 - RNA, 19 nt, Artificial Sequence
  Description of Artificial Sequence: Synthetic oligonucleotide
uucuauugacuugggacag

SEQ ID NO: 233128 - RNA, 19 nt, Artificial Sequence
  Description of Artificial Sequence: Synthetic oligonucleotide
ucauaugaccagagcagga

SEQ ID NO: 233129 - RNA, 19 nt, Artificial Sequence
  Description of Artificial Sequence: Synthetic oligonucleotide
agaagcuaagcucaccaaa

SEQ ID NO: 233130 - RNA, 19 nt, Artificial Sequence
  Description of Artificial Sequence: Synthetic oligonucleotide
agugcaacccauggcagac

SEQ ID NO: 233131 - RNA, 19 nt, Artificial Sequence
  Description of Artificial Sequence: Synthetic oligonucleotide
augcuuaaucugccgacuc

SEQ ID NO: 233132 - RNA, 19 nt, Artificial Sequence
  Description of Artificial Sequence: Synthetic oligonucleotide
uaucugcguuguuugaagc

SEQ ID NO: 233133 - RNA, 19 nt, Artificial Sequence
  Description of Artificial Sequence: Synthetic oligonucleotide
cugucugaucacauuacug

SEQ ID NO: 233134 - RNA, 19 nt, Artificial Sequence
  Description of Artificial Sequence: Synthetic oligonucleotide
uguccuuagcucccacuag

SEQ ID NO: 233135 - RNA, 19 nt, Artificial Sequence
  Description of Artificial Sequence: Synthetic oligonucleotide
cugcauaccagccucguuc

SEQ ID NO: 233136 - RNA, 19 nt, Artificial Sequence
  Description of Artificial Sequence: Synthetic oligonucleotide
cuuaaucugccgacucagg

SEQ ID NO: 233137 - RNA, 19 nt, Artificial Sequence
  Description of Artificial Sequence: Synthetic oligonucleotide
aagcgguuagcuggaaggg

SEQ ID NO: 233138 - RNA, 19 nt, Artificial Sequence
  Description of Artificial Sequence: Synthetic oligonucleotide
gacucaggagcccacggug

SEQ ID NO: 233139 - RNA, 19 nt, Artificial Sequence
  Description of Artificial Sequence: Synthetic oligonucleotide
cacaauacuagaggugggg

SEQ ID NO: 233140 - RNA, 19 nt, Artificial Sequence
  Description of Artificial Sequence: Synthetic oligonucleotide
ugcuuaaucugccgacuca

SEQ ID NO: 233141 - RNA, 19 nt, Artificial Sequence
  Description of Artificial Sequence: Synthetic oligonucleotide
cuauugacuugggacagcc

SEQ ID NO: 233142 - RNA, 19 nt, Artificial Sequence
  Description of Artificial Sequence: Synthetic oligonucleotide
uugguuauaggcugacauc

SEQ ID NO: 233143 - RNA, 19 nt, Artificial Sequence
  Description of Artificial Sequence: Synthetic oligonucleotide
uagggucauaugaccagag

SEQ ID NO: 233144 - RNA, 19 nt, Artificial Sequence
  Description of Artificial Sequence: Synthetic oligonucleotide
gagggauaaggcgaagugc

SEQ ID NO: 233145 - RNA, 19 nt, Artificial Sequence
  Description of Artificial Sequence: Synthetic oligonucleotide
aagcuaagcucaccaaaau

SEQ ID NO: 233146 - RNA, 19 nt, Artificial Sequence
  Description of Artificial Sequence: Synthetic oligonucleotide
uggccaacccucuugcuga

SEQ ID NO: 233147 - RNA, 19 nt, Artificial Sequence
  Description of Artificial Sequence: Synthetic oligonucleotide
accaaacuacccuuucuca

SEQ ID NO: 233148 - RNA, 19 nt, Artificial Sequence
  Description of Artificial Sequence: Synthetic oligonucleotide
ggagcacccugauugaggg

SEQ ID NO: 233149 - RNA, 19 nt, Artificial Sequence
  Description of Artificial Sequence: Synthetic oligonucleotide
gauaaacuuauugcuggca

SEQ ID NO: 233150 - RNA, 19 nt, Artificial Sequence
  Description of Artificial Sequence: Synthetic oligonucleotide
ucugcguuguuugaagccu

SEQ ID NO: 233151 - RNA, 19 nt, Artificial Sequence
  Description of Artificial Sequence: Synthetic oligonucleotide
cagaguaguggcucauggg

SEQ ID NO: 233152 - RNA, 19 nt, Artificial Sequence
  Description of Artificial Sequence: Synthetic oligonucleotide
gacccaucaggacccaaag

SEQ ID NO: 233153 - RNA, 19 nt, Artificial Sequence
  Description of Artificial Sequence: Synthetic oligonucleotide
gaaaccuaucaaccagcug

SEQ ID NO: 233154 - RNA, 19 nt, Artificial Sequence
  Description of Artificial Sequence: Synthetic oligonucleotide
guggguaggcccuagacaa

SEQ ID NO: 233155 - RNA, 19 nt, Artificial Sequence
  Description of Artificial Sequence: Synthetic oligonucleotide
ucuucggguugggagaucc

SEQ ID NO: 233156 - RNA, 19 nt, Artificial Sequence
  Description of Artificial Sequence: Synthetic oligonucleotide
cacauuacugggcugccug

SEQ ID NO: 233157 - RNA, 19 nt, Artificial Sequence
  Description of Artificial Sequence: Synthetic oligonucleotide
agggauaaggcgaagugca

SEQ ID NO: 233158 - RNA, 19 nt, Artificial Sequence
  Description of Artificial Sequence: Synthetic oligonucleotide
agcaaaccugucugguagg

SEQ ID NO: 233159 - RNA, 19 nt, Artificial Sequence
  Description of Artificial Sequence: Synthetic oligonucleotide
gacuaggaagccugagagc

SEQ ID NO: 233160 - RNA, 19 nt, Artificial Sequence
  Description of Artificial Sequence: Synthetic oligonucleotide
cauaugaccagagcaggac

SEQ ID NO: 233161 - RNA, 19 nt, Artificial Sequence
  Description of Artificial Sequence: Synthetic oligonucleotide
ggaaagacuaggaagccug

SEQ ID NO: 233162 - RNA, 19 nt, Artificial Sequence
  Description of Artificial Sequence: Synthetic oligonucleotide
agggacuugacaggaagag

SEQ ID NO: 233163 - RNA, 19 nt, Artificial Sequence
  Description of Artificial Sequence: Synthetic oligonucleotide
acuggcuuuaccccaagua

SEQ ID NO: 233164 - RNA, 19 nt, Artificial Sequence
  Description of Artificial Sequence: Synthetic oligonucleotide
aaaguacacugugggcagg

SEQ ID NO: 233165 - RNA, 19 nt, Artificial Sequence
  Description of Artificial Sequence: Synthetic oligonucleotide
auuuaucugcguuguuuga

SEQ ID NO: 233166 - RNA, 19 nt, Artificial Sequence
  Description of Artificial Sequence: Synthetic oligonucleotide
cugcugguagaguuggggc

SEQ ID NO: 233167 - RNA, 19 nt, Artificial Sequence
  Description of Artificial Sequence: Synthetic oligonucleotide
ugugcccacucccaaacau

SEQ ID NO: 233168 - RNA, 19 nt, Artificial Sequence
  Description of Artificial Sequence: Synthetic oligonucleotide
uuuaagugauggcgacaug

SEQ ID NO: 233169 - RNA, 19 nt, Artificial Sequence
  Description of Artificial Sequence: Synthetic oligonucleotide
ggcaauauaggcacagugc

SEQ ID NO: 233170 - RNA, 19 nt, Artificial Sequence
  Description of Artificial Sequence: Synthetic oligonucleotide
aguccagaugucugccacg

SEQ ID NO: 233171 - RNA, 19 nt, Artificial Sequence
  Description of Artificial Sequence: Synthetic oligonucleotide
ugcauaccagccucguucu

SEQ ID NO: 233172 - RNA, 19 nt, Artificial Sequence
  Description of Artificial Sequence: Synthetic oligonucleotide
guuauaggcugacaucaga

SEQ ID NO: 233173 - RNA, 19 nt, Artificial Sequence
  Description of Artificial Sequence: Synthetic oligonucleotide
ccaaccagaaaccaccagc

SEQ ID NO: 233174 - RNA, 19 nt, Artificial Sequence
  Description of Artificial Sequence: Synthetic oligonucleotide
cugcuacaccagcagagcg

SEQ ID NO: 233175 - RNA, 19 nt, Artificial Sequence
  Description of Artificial Sequence: Synthetic oligonucleotide
gaagcuaagcucaccaaaa

SEQ ID NO: 233176 - RNA, 19 nt, Artificial Sequence
  Description of Artificial Sequence: Synthetic oligonucleotide
gugacuaccaaacuacccu

SEQ ID NO: 233177 - RNA, 19 nt, Artificial Sequence
  Description of Artificial Sequence: Synthetic oligonucleotide
uauugacuugggacagccc

SEQ ID NO: 233178 - RNA, 19 nt, Artificial Sequence
  Description of Artificial Sequence: Synthetic oligonucleotide
agcgguuagcuggaagggc

SEQ ID NO: 233179 - RNA, 19 nt, Artificial Sequence
  Description of Artificial Sequence: Synthetic oligonucleotide
ucaauggaacuuacuuuua

SEQ ID NO: 233180 - RNA, 19 nt, Artificial Sequence
  Description of Artificial Sequence: Synthetic oligonucleotide
ugcacccuucuccacagaa

SEQ ID NO: 233181 - RNA, 19 nt, Artificial Sequence
  Description of Artificial Sequence: Synthetic oligonucleotide
uuugaagccuugugaccca

SEQ ID NO: 233182 - RNA, 19 nt, Artificial Sequence
  Description of Artificial Sequence: Synthetic oligonucleotide
guaggcccuagacaaggag

SEQ ID NO: 233183 - RNA, 19 nt, Artificial Sequence
  Description of Artificial Sequence: Synthetic oligonucleotide
caccagggagacuggaugc

SEQ ID NO: 233184 - RNA, 19 nt, Artificial Sequence
  Description of Artificial Sequence: Synthetic oligonucleotide
aggcuaucgucuugaauca

SEQ ID NO: 233185 - RNA, 19 nt, Artificial Sequence
  Description of Artificial Sequence: Synthetic oligonucleotide
gagucucugcucaccaggg

SEQ ID NO: 233186 - RNA, 19 nt, Artificial Sequence
  Description of Artificial Sequence: Synthetic oligonucleotide
acaaggagcuagcagccaa

SEQ ID NO: 233187 - RNA, 19 nt, Artificial Sequence
  Description of Artificial Sequence: Synthetic oligonucleotide
ugacccaucaggacccaaa

SEQ ID NO: 233188 - RNA, 19 nt, Artificial Sequence
  Description of Artificial Sequence: Synthetic oligonucleotide
uccuuugguuauaggcuga

SEQ ID NO: 233189 - RNA, 19 nt, Artificial Sequence
  Description of Artificial Sequence: Synthetic oligonucleotide
ugacuaccaaacuacccuu

SEQ ID NO: 233190 - RNA, 19 nt, Artificial Sequence
  Description of Artificial Sequence: Synthetic oligonucleotide
aaggcgaagugcaugggaa

SEQ ID NO: 233191 - RNA, 19 nt, Artificial Sequence
  Description of Artificial Sequence: Synthetic oligonucleotide
caugggaagcgguuagcug

SEQ ID NO: 233192 - RNA, 19 nt, Artificial Sequence
  Description of Artificial Sequence: Synthetic oligonucleotide
aguccuugguagguucccc

SEQ ID NO: 233193 - RNA, 19 nt, Artificial Sequence
  Description of Artificial Sequence: Synthetic oligonucleotide
ugcguuguuugaagccuug

SEQ ID NO: 233194 - RNA, 19 nt, Artificial Sequence
  Description of Artificial Sequence: Synthetic oligonucleotide
aggagcuagcagccaacuc

SEQ ID NO: 233195 - RNA, 19 nt, Artificial Sequence
  Description of Artificial Sequence: Synthetic oligonucleotide
uggcgacaugcacuugggg

SEQ ID NO: 233196 - RNA, 19 nt, Artificial Sequence
  Description of Artificial Sequence: Synthetic oligonucleotide
guggccaacccucuugcug

SEQ ID NO: 233197 - RNA, 19 nt, Artificial Sequence
  Description of Artificial Sequence: Synthetic oligonucleotide
cacagugcucaucuacuac

SEQ ID NO: 233198 - RNA, 19 nt, Artificial Sequence
  Description of Artificial Sequence: Synthetic oligonucleotide
aagucaggucguucccucu

SEQ ID NO: 233199 - RNA, 19 nt, Artificial Sequence
  Description of Artificial Sequence: Synthetic oligonucleotide
cacucccaaacaugugugc

SEQ ID NO: 233200 - RNA, 19 nt, Artificial Sequence
  Description of Artificial Sequence: Synthetic oligonucleotide
gauaggguguugccuccug

SEQ ID NO: 233201 - RNA, 19 nt, Artificial Sequence
  Description of Artificial Sequence: Synthetic oligonucleotide
aggcugucugaucacauua

SEQ ID NO: 233202 - RNA, 19 nt, Artificial Sequence
  Description of Artificial Sequence: Synthetic oligonucleotide
caggguauggcagggcagg

SEQ ID NO: 233203 - RNA, 19 nt, Artificial Sequence
  Description of Artificial Sequence: Synthetic oligonucleotide
ugggaagcgguuagcugga

SEQ ID NO: 233204 - RNA, 19 nt, Artificial Sequence
  Description of Artificial Sequence: Synthetic oligonucleotide
auacuagaggugggguugg

SEQ ID NO: 233205 - RNA, 19 nt, Artificial Sequence
  Description of Artificial Sequence: Synthetic oligonucleotide
gaacuuacuuuuaagugau

SEQ ID NO: 233206 - RNA, 19 nt, Artificial Sequence
  Description of Artificial Sequence: Synthetic oligonucleotide
agaaaccuaucaaccagcu

SEQ ID NO: 233207 - RNA, 19 nt, Artificial Sequence
  Description of Artificial Sequence: Synthetic oligonucleotide
ugcguacucugccucccgc

SEQ ID NO: 233208 - RNA, 19 nt, Artificial Sequence
  Description of Artificial Sequence: Synthetic oligonucleotide
ucuauugacuugggacagc

SEQ ID NO: 233209 - RNA, 19 nt, Artificial Sequence
  Description of Artificial Sequence: Synthetic oligonucleotide
cuaucgucuugaaucacaa

SEQ ID NO: 233210 - RNA, 19 nt, Artificial Sequence
  Description of Artificial Sequence: Synthetic oligonucleotide
gcgacaugcacuuggggug

SEQ ID NO: 233211 - RNA, 19 nt, Artificial Sequence
  Description of Artificial Sequence: Synthetic oligonucleotide
ugggaaggcuaucgucuug

SEQ ID NO: 233212 - RNA, 19 nt, Artificial Sequence
  Description of Artificial Sequence: Synthetic oligonucleotide
ugucugguagggagccacc

SEQ ID NO: 233213 - RNA, 19 nt, Artificial Sequence
  Description of Artificial Sequence: Synthetic oligonucleotide
gccucguucugauaagaag

SEQ ID NO: 233214 - RNA, 19 nt, Artificial Sequence
  Description of Artificial Sequence: Synthetic oligonucleotide
aggaugcggaucuguggag

SEQ ID NO: 233215 - RNA, 19 nt, Artificial Sequence
  Description of Artificial Sequence: Synthetic oligonucleotide
caaggagcuagcagccaac

SEQ ID NO: 233216 - RNA, 19 nt, Artificial Sequence
  Description of Artificial Sequence: Synthetic oligonucleotide
gacccucuacucugagucc

SEQ ID NO: 233217 - RNA, 19 nt, Artificial Sequence
  Description of Artificial Sequence: Synthetic oligonucleotide
uaccccaaguagcacuguc

SEQ ID NO: 233218 - RNA, 19 nt, Artificial Sequence
  Description of Artificial Sequence: Synthetic oligonucleotide
cagacaauccaggaggcga

SEQ ID NO: 233219 - RNA, 19 nt, Artificial Sequence
  Description of Artificial Sequence: Synthetic oligonucleotide
cacagugggcggagcaagg

SEQ ID NO: 233220 - RNA, 19 nt, Artificial Sequence
  Description of Artificial Sequence: Synthetic oligonucleotide
ucguucugauaagaaggga

SEQ ID NO: 233221 - RNA, 19 nt, Artificial Sequence
  Description of Artificial Sequence: Synthetic oligonucleotide
cagcagauaggguguugcc

SEQ ID NO: 233222 - RNA, 19 nt, Artificial Sequence
  Description of Artificial Sequence: Synthetic oligonucleotide
gcuuaaucugccgacucag

SEQ ID NO: 233223 - RNA, 19 nt, Artificial Sequence
  Description of Artificial Sequence: Synthetic oligonucleotide
agcgagacugcagggugcg

SEQ ID NO: 233224 - RNA, 19 nt, Artificial Sequence
  Description of Artificial Sequence: Synthetic oligonucleotide
agccugcaacuuaagacag

SEQ ID NO: 233225 - RNA, 19 nt, Artificial Sequence
  Description of Artificial Sequence: Synthetic oligonucleotide
cuuuaccccaaguagcacu

SEQ ID NO: 233226 - RNA, 19 nt, Artificial Sequence
  Description of Artificial Sequence: Synthetic oligonucleotide
cccaaauuaaugagcauga

SEQ ID NO: 233227 - RNA, 19 nt, Artificial Sequence
  Description of Artificial Sequence: Synthetic oligonucleotide
cucugcguacucugccucc

SEQ ID NO: 233228 - RNA, 19 nt, Artificial Sequence
  Description of Artificial Sequence: Synthetic oligonucleotide
ucaggucguucccucugcu

SEQ ID NO: 233229 - RNA, 19 nt, Artificial Sequence
  Description of Artificial Sequence: Synthetic oligonucleotide
uccccuaauccccacccuu

SEQ ID NO: 233230 - RNA, 19 nt, Artificial Sequence
  Description of Artificial Sequence: Synthetic oligonucleotide
ggcaggcgaaaguacacug

SEQ ID NO: 233231 - RNA, 19 nt, Artificial Sequence
  Description of Artificial Sequence: Synthetic oligonucleotide
aacuuacuuuuaagugaug

SEQ ID NO: 233232 - RNA, 19 nt, Artificial Sequence
  Description of Artificial Sequence: Synthetic oligonucleotide
aauccuccccuaaucccca

SEQ ID NO: 233233 - RNA, 19 nt, Artificial Sequence
  Description of Artificial Sequence: Synthetic oligonucleotide
guaguggcucaugggaagc

SEQ ID NO: 233234 - RNA, 19 nt, Artificial Sequence
  Description of Artificial Sequence: Synthetic oligonucleotide
gauuuccaagccaaagccu

SEQ ID NO: 233235 - RNA, 19 nt, Artificial Sequence
  Description of Artificial Sequence: Synthetic oligonucleotide
uaucgucuugaaucacaau

SEQ ID NO: 233236 - RNA, 19 nt, Artificial Sequence
  Description of Artificial Sequence: Synthetic oligonucleotide
aggcccuagacaaggagcu

SEQ ID NO: 233237 - RNA, 19 nt, Artificial Sequence
  Description of Artificial Sequence: Synthetic oligonucleotide
cuacccuuucucaauuaaa

SEQ ID NO: 233238 - RNA, 19 nt, Artificial Sequence
  Description of Artificial Sequence: Synthetic oligonucleotide
caggguuucugcacccuuc

SEQ ID NO: 233239 - RNA, 19 nt, Artificial Sequence
  Description of Artificial Sequence: Synthetic oligonucleotide
gucaggucguucccucugc

SEQ ID NO: 233240 - RNA, 19 nt, Artificial Sequence
  Description of Artificial Sequence: Synthetic oligonucleotide
aucugccgacucaggagcc

SEQ ID NO: 233241 - RNA, 19 nt, Artificial Sequence
  Description of Artificial Sequence: Synthetic oligonucleotide
ggggauuuccaagccaaag

SEQ ID NO: 233242 - RNA, 19 nt, Artificial Sequence
  Description of Artificial Sequence: Synthetic oligonucleotide
auggcgacaugcacuuggg

SEQ ID NO: 233243 - RNA, 19 nt, Artificial Sequence
  Description of Artificial Sequence: Synthetic oligonucleotide
ggaagcgguuagcuggaag

SEQ ID NO: 233244 - RNA, 19 nt, Artificial Sequence
  Description of Artificial Sequence: Synthetic oligonucleotide
gcgaaaguacacugugggc

SEQ ID NO: 233245 - RNA, 19 nt, Artificial Sequence
  Description of Artificial Sequence: Synthetic oligonucleotide
cauaccagccucguucuga

SEQ ID NO: 233246 - RNA, 19 nt, Artificial Sequence
  Description of Artificial Sequence: Synthetic oligonucleotide
ggcgaagugcaugggaaag

SEQ ID NO: 233247 - RNA, 19 nt, Artificial Sequence
  Description of Artificial Sequence: Synthetic oligonucleotide
gcucaugggaagcgguuag

SEQ ID NO: 233248 - RNA, 19 nt, Artificial Sequence
  Description of Artificial Sequence: Synthetic oligonucleotide
gaguaguggcucaugggaa

SEQ ID NO: 233249 - RNA, 19 nt, Artificial Sequence
  Description of Artificial Sequence: Synthetic oligonucleotide
cuauugguuaauguuucua

SEQ ID NO: 233250 - RNA, 19 nt, Artificial Sequence
  Description of Artificial Sequence: Synthetic oligonucleotide
caugccaaucacaguggga

SEQ ID NO: 233251 - RNA, 19 nt, Artificial Sequence
  Description of Artificial Sequence: Synthetic oligonucleotide
aucagaguaguggcucaug

SEQ ID NO: 233252 - RNA, 19 nt, Artificial Sequence
  Description of Artificial Sequence: Synthetic oligonucleotide
uagaaggccccugguuuca

SEQ ID NO: 233253 - RNA, 19 nt, Artificial Sequence
  Description of Artificial Sequence: Synthetic oligonucleotide
uggggauuuccaagccaaa

SEQ ID NO: 233254 - RNA, 19 nt, Artificial Sequence
  Description of Artificial Sequence: Synthetic oligonucleotide
acccucuacucugaguccu

SEQ ID NO: 233255 - RNA, 19 nt, Artificial Sequence
  Description of Artificial Sequence: Synthetic oligonucleotide
caaacuacccuuucucaau

SEQ ID NO: 233256 - RNA, 19 nt, Artificial Sequence
  Description of Artificial Sequence: Synthetic oligonucleotide
caagccucucucuccccac

SEQ ID NO: 233257 - RNA, 19 nt, Artificial Sequence
  Description of Artificial Sequence: Synthetic oligonucleotide
aucaggacccaaaggcugu

SEQ ID NO: 233258 - RNA, 19 nt, Artificial Sequence
  Description of Artificial Sequence: Synthetic oligonucleotide
cuaaaaccccuuccaugca

SEQ ID NO: 233259 - RNA, 19 nt, Artificial Sequence
  Description of Artificial Sequence: Synthetic oligonucleotide
gacaauccaggaggcgaug

SEQ ID NO: 233260 - RNA, 19 nt, Artificial Sequence
  Description of Artificial Sequence: Synthetic oligonucleotide
gguuauaggcugacaucag

SEQ ID NO: 233261 - RNA, 19 nt, Artificial Sequence
  Description of Artificial Sequence: Synthetic oligonucleotide
caccucuagaagcagcaaa

SEQ ID NO: 233262 - RNA, 19 nt, Artificial Sequence
  Description of Artificial Sequence: Synthetic oligonucleotide
gcaaaccugucugguaggg

SEQ ID NO: 233263 - RNA, 19 nt, Artificial Sequence
  Description of Artificial Sequence: Synthetic oligonucleotide
gggagcacccugauugagg

SEQ ID NO: 233264 - RNA, 19 nt, Artificial Sequence
  Description of Artificial Sequence: Synthetic oligonucleotide
aggcgaagugcaugggaaa

SEQ ID NO: 233265 - RNA, 19 nt, Artificial Sequence
  Description of Artificial Sequence: Synthetic oligonucleotide
cuagggcugugcccacucc

SEQ ID NO: 233266 - RNA, 19 nt, Artificial Sequence
  Description of Artificial Sequence: Synthetic oligonucleotide
cuguccuuagcucccacua

SEQ ID NO: 233267 - RNA, 19 nt, Artificial Sequence
  Description of Artificial Sequence: Synthetic oligonucleotide
ccacaauacuagagguggg

SEQ ID NO: 233268 - RNA, 19 nt, Artificial Sequence
  Description of Artificial Sequence: Synthetic oligonucleotide
auauaggcacagugcucau

SEQ ID NO: 233269 - RNA, 19 nt, Artificial Sequence
  Description of Artificial Sequence: Synthetic oligonucleotide
ccuaucaaccagcugccuc

SEQ ID NO: 233270 - RNA, 19 nt, Artificial Sequence
  Description of Artificial Sequence: Synthetic oligonucleotide
ccaggauccgucuccgggc

SEQ ID NO: 233271 - RNA, 19 nt, Artificial Sequence
  Description of Artificial Sequence: Synthetic oligonucleotide
uggcucaugggaagcgguu

SEQ ID NO: 233272 - RNA, 19 nt, Artificial Sequence
  Description of Artificial Sequence: Synthetic oligonucleotide
cuuuggccagagugagaug

SEQ ID NO: 233273 - RNA, 19 nt, Artificial Sequence
  Description of Artificial Sequence: Synthetic oligonucleotide
agacaauccaggaggcgau

SEQ ID NO: 233274 - RNA, 19 nt, Artificial Sequence
  Description of Artificial Sequence: Synthetic oligonucleotide
gguauggaaaggggaaauc

SEQ ID NO: 233275 - RNA, 19 nt, Artificial Sequence
  Description of Artificial Sequence: Synthetic oligonucleotide
cugcguacucugccucccg

SEQ ID NO: 233276 - RNA, 19 nt, Artificial Sequence
  Description of Artificial Sequence: Synthetic oligonucleotide
cagaagcuaagcucaccaa

SEQ ID NO: 233277 - RNA, 19 nt, Artificial Sequence
  Description of Artificial Sequence: Synthetic oligonucleotide
ccuaauccccacccuuucc

SEQ ID NO: 233278 - RNA, 19 nt, Artificial Sequence
  Description of Artificial Sequence: Synthetic oligonucleotide
gcuaucgucuugaaucaca

SEQ ID NO: 233279 - RNA, 19 nt, Artificial Sequence
  Description of Artificial Sequence: Synthetic oligonucleotide
caggucguucccucugcuc

SEQ ID NO: 233280 - RNA, 19 nt, Artificial Sequence
  Description of Artificial Sequence: Synthetic oligonucleotide
gcugguagaguuggggcug

SEQ ID NO: 233281 - RNA, 19 nt, Artificial Sequence
  Description of Artificial Sequence: Synthetic oligonucleotide
cuaccaaacuacccuuucu

SEQ ID NO: 233282 - RNA, 19 nt, Artificial Sequence
  Description of Artificial Sequence: Synthetic oligonucleotide
ccgucuaggaggccaaaug

SEQ ID NO: 233283 - RNA, 19 nt, Artificial Sequence
  Description of Artificial Sequence: Synthetic oligonucleotide
uccgucuaggaggccaaau

SEQ ID NO: 233284 - RNA, 19 nt, Artificial Sequence
  Description of Artificial Sequence: Synthetic oligonucleotide
ccuccccuaauccccaccc

SEQ ID NO: 233285 - RNA, 19 nt, Artificial Sequence
  Description of Artificial Sequence: Synthetic oligonucleotide
ccugauugaggggacugag

SEQ ID NO: 233286 - RNA, 19 nt, Artificial Sequence
  Description of Artificial Sequence: Synthetic oligonucleotide
cugucugacccucuacucu

SEQ ID NO: 233287 - RNA, 19 nt, Artificial Sequence
  Description of Artificial Sequence: Synthetic oligonucleotide
ccaaacuacccuuucucaa

SEQ ID NO: 233288 - RNA, 19 nt, Artificial Sequence
  Description of Artificial Sequence: Synthetic oligonucleotide
ugggccucuugaggaugcg

SEQ ID NO: 233289 - RNA, 19 nt, Artificial Sequence
  Description of Artificial Sequence: Synthetic oligonucleotide
uacuagaggugggguuggc

SEQ ID NO: 233290 - RNA, 19 nt, Artificial Sequence
  Description of Artificial Sequence: Synthetic oligonucleotide
uggugggccucuugaggau

SEQ ID NO: 233291 - RNA, 19 nt, Artificial Sequence
  Description of Artificial Sequence: Synthetic oligonucleotide
caauacuagaggugggguu

SEQ ID NO: 233292 - RNA, 19 nt, Artificial Sequence
  Description of Artificial Sequence: Synthetic oligonucleotide
cugccagcccaucccugag

SEQ ID NO: 233293 - RNA, 19 nt, Artificial Sequence
  Description of Artificial Sequence: Synthetic oligonucleotide
agaaggccccugguuucag

SEQ ID NO: 233294 - RNA, 19 nt, Artificial Sequence
  Description of Artificial Sequence: Synthetic oligonucleotide
gggaaggcuaucgucuuga

SEQ ID NO: 233295 - RNA, 19 nt, Artificial Sequence
  Description of Artificial Sequence: Synthetic oligonucleotide
ugccgacucaggagcccac

SEQ ID NO: 233296 - RNA, 19 nt, Artificial Sequence
  Description of Artificial Sequence: Synthetic oligonucleotide
gcccuugucaacaugccaa

SEQ ID NO: 233297 - RNA, 19 nt, Artificial Sequence
  Description of Artificial Sequence: Synthetic oligonucleotide
ccaaagccugcaacuuaag

SEQ ID NO: 233298 - RNA, 19 nt, Artificial Sequence
  Description of Artificial Sequence: Synthetic oligonucleotide
ugugacccaucaggaccca

SEQ ID NO: 233299 - RNA, 19 nt, Artificial Sequence
  Description of Artificial Sequence: Synthetic oligonucleotide
ugauggcgacaugcacuug

SEQ ID NO: 233300 - RNA, 19 nt, Artificial Sequence
  Description of Artificial Sequence: Synthetic oligonucleotide
gcugccucagcaaugcgaa

SEQ ID NO: 233301 - RNA, 19 nt, Artificial Sequence
  Description of Artificial Sequence: Synthetic oligonucleotide
ggcuagggacuugacagga

SEQ ID NO: 233302 - RNA, 19 nt, Artificial Sequence
  Description of Artificial Sequence: Synthetic oligonucleotide
cccuagggucauaugacca

SEQ ID NO: 233303 - RNA, 19 nt, Artificial Sequence
  Description of Artificial Sequence: Synthetic oligonucleotide
cugcaacuuaagacaggaa

SEQ ID NO: 233304 - RNA, 19 nt, Artificial Sequence
  Description of Artificial Sequence: Synthetic oligonucleotide
ccaccucuccgucuaggag

SEQ ID NO: 233305 - RNA, 19 nt, Artificial Sequence
  Description of Artificial Sequence: Synthetic oligonucleotide
ccagccucguucugauaag

SEQ ID NO: 233306 - RNA, 19 nt, Artificial Sequence
  Description of Artificial Sequence: Synthetic oligonucleotide
ccgacucaggagcccacgg

SEQ ID NO: 233307 - RNA, 19 nt, Artificial Sequence
  Description of Artificial Sequence: Synthetic oligonucleotide
accuaucaaccagcugccu

SEQ ID NO: 233308 - RNA, 19 nt, Artificial Sequence
  Description of Artificial Sequence: Synthetic oligonucleotide
gcaggguauggcagggcag

SEQ ID NO: 233309 - RNA, 19 nt, Artificial Sequence
  Description of Artificial Sequence: Synthetic oligonucleotide
gccugcaacuuaagacagg

SEQ ID NO: 233310 - RNA, 19 nt, Artificial Sequence
  Description of Artificial Sequence: Synthetic oligonucleotide
aggauccgucuccgggccu

SEQ ID NO: 233311 - RNA, 19 nt, Artificial Sequence
  Description of Artificial Sequence: Synthetic oligonucleotide
ccuuucuauugacuuggga

SEQ ID NO: 233312 - RNA, 19 nt, Artificial Sequence
  Description of Artificial Sequence: Synthetic oligonucleotide
aggguauggcagggcagga

SEQ ID NO: 233313 - RNA, 19 nt, Artificial Sequence
  Description of Artificial Sequence: Synthetic oligonucleotide
ggaagccugagagcaccug

SEQ ID NO: 233314 - RNA, 19 nt, Artificial Sequence
  Description of Artificial Sequence: Synthetic oligonucleotide
ggaggccaaaugcaagacu

SEQ ID NO: 233315 - RNA, 19 nt, Artificial Sequence
  Description of Artificial Sequence: Synthetic oligonucleotide
ccgugggaaggcuaucguc

SEQ ID NO: 233316 - RNA, 19 nt, Artificial Sequence
  Description of Artificial Sequence: Synthetic oligonucleotide
ccuuugguuauaggcugac

SEQ ID NO: 233317 - RNA, 19 nt, Artificial Sequence
  Description of Artificial Sequence: Synthetic oligonucleotide
cagccucguucugauaaga

SEQ ID NO: 233318 - RNA, 19 nt, Artificial Sequence
  Description of Artificial Sequence: Synthetic oligonucleotide
ccgucuccgggccucugcg

SEQ ID NO: 233319 - RNA, 19 nt, Artificial Sequence
  Description of Artificial Sequence: Synthetic oligonucleotide
gccaccucuccgucuagga

SEQ ID NO: 233320 - RNA, 19 nt, Artificial Sequence
  Description of Artificial Sequence: Synthetic oligonucleotide
ggccaacccucuugcugag

SEQ ID NO: 233321 - RNA, 19 nt, Artificial Sequence
  Description of Artificial Sequence: Synthetic oligonucleotide
cugagagcaccugguggga

SEQ ID NO: 233322 - RNA, 19 nt, Artificial Sequence
  Description of Artificial Sequence: Synthetic oligonucleotide
ggcaacuuagcugggacuu

SEQ ID NO: 233323 - RNA, 19 nt, Artificial Sequence
  Description of Artificial Sequence: Synthetic oligonucleotide
gccgacucaggagcccacg

SEQ ID NO: 233324 - RNA, 19 nt, Artificial Sequence
  Description of Artificial Sequence: Synthetic oligonucleotide
cugacccucuacucugagu

SEQ ID NO: 233325 - RNA, 19 nt, Artificial Sequence
  Description of Artificial Sequence: Synthetic oligonucleotide
ggcuaucgucuugaaucac

SEQ ID NO: 233326 - RNA, 19 nt, Artificial Sequence
  Description of Artificial Sequence: Synthetic oligonucleotide
gcauaccagccucguucug

SEQ ID NO: 233327 - RNA, 19 nt, Artificial Sequence
  Description of Artificial Sequence: Synthetic oligonucleotide
gcugagggauaaggcgaag

SEQ ID NO: 233328 - RNA, 19 nt, Artificial Sequence
  Description of Artificial Sequence: Synthetic oligonucleotide
gcgguuagcuggaagggcu

SEQ ID NO: 233329 - RNA, 19 nt, Artificial Sequence
  Description of Artificial Sequence: Synthetic oligonucleotide
gacuugggacagcccuugu

SEQ ID NO: 233330 - RNA, 19 nt, Artificial Sequence
  Description of Artificial Sequence: Synthetic oligonucleotide
ccuagacaaggagcuagca

SEQ ID NO: 233331 - RNA, 19 nt, Artificial Sequence
  Description of Artificial Sequence: Synthetic oligonucleotide
ggugcggcccucccuccca

SEQ ID NO: 233332 - RNA, 19 nt, Artificial Sequence
  Description of Artificial Sequence: Synthetic oligonucleotide
ggcugagggauaaggcgaa

SEQ ID NO: 233333 - RNA, 19 nt, Artificial Sequence
  Description of Artificial Sequence: Synthetic oligonucleotide
ccuauugguuaauguuucu

SEQ ID NO: 233334 - RNA, 19 nt, Artificial Sequence
  Description of Artificial Sequence: Synthetic oligonucleotide
ggguauggaaaggggaaau

SEQ ID NO: 233335 - RNA, 19 nt, Artificial Sequence
  Description of Artificial Sequence: Synthetic oligonucleotide
ggcucaugggaagcgguua

SEQ ID NO: 233336 - RNA, 19 nt, Artificial Sequence
  Description of Artificial Sequence: Synthetic oligonucleotide
cugcguuguuugaagccuu

SEQ ID NO: 233337 - RNA, 19 nt, Artificial Sequence
  Description of Artificial Sequence: Synthetic oligonucleotide
gcaggcgaaaguacacugu

SEQ ID NO: 233338 - RNA, 19 nt, Artificial Sequence
  Description of Artificial Sequence: Synthetic oligonucleotide
cuucggguugggagauccu

SEQ ID NO: 233339 - RNA, 19 nt, Artificial Sequence
  Description of Artificial Sequence: Synthetic oligonucleotide
cuccccuaauccccacccu

SEQ ID NO: 233340 - RNA, 19 nt, Artificial Sequence
  Description of Artificial Sequence: Synthetic oligonucleotide
gcguacucugccucccgcu

SEQ ID NO: 233341 - RNA, 19 nt, Artificial Sequence
  Description of Artificial Sequence: Synthetic oligonucleotide
gugacccaucaggacccaa

SEQ ID NO: 233342 - RNA, 19 nt, Artificial Sequence
  Description of Artificial Sequence: Synthetic oligonucleotide
gggcaggcgaaaguacacu

SEQ ID NO: 233343 - RNA, 19 nt, Artificial Sequence
  Description of Artificial Sequence: Synthetic oligonucleotide
gguggccaacccucuugcu

SEQ ID NO: 233344 - RNA, 19 nt, Artificial Sequence
  Description of Artificial Sequence: Synthetic oligonucleotide
gccucuugaggaugcggau

SEQ ID NO: 233345 - RNA, 19 nt, Artificial Sequence
  Description of Artificial Sequence: Synthetic oligonucleotide
gggacugagaagggcuggu

SEQ ID NO: 233346 - RNA, 19 nt, Artificial Sequence
  Description of Artificial Sequence: Synthetic oligonucleotide
gcaaguaagucaggucguu

SEQ ID NO: 233347 - RNA, 19 nt, Artificial Sequence
  Description of Artificial Sequence: Synthetic oligonucleotide
gggauaaggcgaagugcau

SEQ ID NO: 233348 - RNA, 19 nt, Artificial Sequence
  Description of Artificial Sequence: Synthetic oligonucleotide
cccuugucaacaugccaau

SEQ ID NO: 233349 - RNA, 19 nt, Artificial Sequence
  Description of Artificial Sequence: Synthetic oligonucleotide
cuccgucuaggaggccaaa

SEQ ID NO: 233350 - RNA, 19 nt, Artificial Sequence
  Description of Artificial Sequence: Synthetic oligonucleotide
cccuguggguaggcccuag

SEQ ID NO: 233351 - RNA, 19 nt, Artificial Sequence
  Description of Artificial Sequence: Synthetic oligonucleotide
ggccccgugggaaggcuau

SEQ ID NO: 233352 - RNA, 19 nt, Artificial Sequence
  Description of Artificial Sequence: Synthetic oligonucleotide
ccugcauaccagccucguu

SEQ ID NO: 233353 - RNA, 19 nt, Artificial Sequence
  Description of Artificial Sequence: Synthetic oligonucleotide
ggggccccgugggaaggcu

SEQ ID NO: 233354 - RNA, 19 nt, Artificial Sequence
  Description of Artificial Sequence: Synthetic oligonucleotide
cgucuccgggccucugcgu

SEQ ID NO: 233355 - RNA, 19 nt, Artificial Sequence
  Description of Artificial Sequence: Synthetic oligonucleotide
ccccuguggguaggcccua

SEQ ID NO: 233356 - RNA, 19 nt, Artificial Sequence
  Description of Artificial Sequence: Synthetic oligonucleotide
aacuuuacuaguuauaagg

SEQ ID NO: 233357 - RNA, 19 nt, Artificial Sequence
  Description of Artificial Sequence: Synthetic oligonucleotide
aaacauuggguccugagcc

SEQ ID NO: 233358 - RNA, 19 nt, Artificial Sequence
  Description of Artificial Sequence: Synthetic oligonucleotide
uguucaaaguuuaagauca

SEQ ID NO: 233359 - RNA, 19 nt, Artificial Sequence
  Description of Artificial Sequence: Synthetic oligonucleotide
caaagauugagccugaggg

SEQ ID NO: 233360 - RNA, 19 nt, Artificial Sequence
  Description of Artificial Sequence: Synthetic oligonucleotide
aaacguauuaucuugcuga

SEQ ID NO: 233361 - RNA, 19 nt, Artificial Sequence
  Description of Artificial Sequence: Synthetic oligonucleotide
ggcaauauaagauuaaagg

SEQ ID NO: 233362 - RNA, 19 nt, Artificial Sequence
  Description of Artificial Sequence: Synthetic oligonucleotide
uccuuuaagauuaggauac

SEQ ID NO: 233363 - RNA, 19 nt, Artificial Sequence
  Description of Artificial Sequence: Synthetic oligonucleotide
uuuacuaguuauaaggcaa

SEQ ID NO: 233364 - RNA, 19 nt, Artificial Sequence
  Description of Artificial Sequence: Synthetic oligonucleotide
uuaagauuaggauacucug

SEQ ID NO: 233365 - RNA, 19 nt, Artificial Sequence
  Description of Artificial Sequence: Synthetic oligonucleotide
aauauaagauuaaaggaca

SEQ ID NO: 233366 - RNA, 19 nt, Artificial Sequence
  Description of Artificial Sequence: Synthetic oligonucleotide
aaggcaacucuucagaugu

SEQ ID NO: 233367 - RNA, 19 nt, Artificial Sequence
  Description of Artificial Sequence: Synthetic oligonucleotide
uucuaguaaacuuuacuag

SEQ ID NO: 233368 - RNA, 19 nt, Artificial Sequence
  Description of Artificial Sequence: Synthetic oligonucleotide
aagggcaaaacguauuauc

SEQ ID NO: 233369 - RNA, 19 nt, Artificial Sequence
  Description of Artificial Sequence: Synthetic oligonucleotide
aaacaauaaucaucugacg

SEQ ID NO: 233370 - RNA, 19 nt, Artificial Sequence
  Description of Artificial Sequence: Synthetic oligonucleotide
acguauauuaacuguaauc

SEQ ID NO: 233371 - RNA, 19 nt, Artificial Sequence
  Description of Artificial Sequence: Synthetic oligonucleotide
auaauuagaagccaacuau

SEQ ID NO: 233372 - RNA, 19 nt, Artificial Sequence
  Description of Artificial Sequence: Synthetic oligonucleotide
aagacaaccgaaugaacug

SEQ ID NO: 233373 - RNA, 19 nt, Artificial Sequence
  Description of Artificial Sequence: Synthetic oligonucleotide
ugaccugcuagaaagaaac

SEQ ID NO: 233374 - RNA, 19 nt, Artificial Sequence
  Description of Artificial Sequence: Synthetic oligonucleotide
uauaucaauuugcaguaug

SEQ ID NO: 233375 - RNA, 19 nt, Artificial Sequence
  Description of Artificial Sequence: Synthetic oligonucleotide
aaccgaaugaacugcuuuc

SEQ ID NO: 233376 - RNA, 19 nt, Artificial Sequence
  Description of Artificial Sequence: Synthetic oligonucleotide
aaaacguauuaucuugcug

SEQ ID NO: 233377 - RNA, 19 nt, Artificial Sequence
  Description of Artificial Sequence: Synthetic oligonucleotide
uaagauuaggauacucugc

SEQ ID NO: 233378 - RNA, 19 nt, Artificial Sequence
  Description of Artificial Sequence: Synthetic oligonucleotide
acuuuacuaguuauaaggc

SEQ ID NO: 233379 - RNA, 19 nt, Artificial Sequence
  Description of Artificial Sequence: Synthetic oligonucleotide
acucacuuaaaugucauuc

SEQ ID NO: 233380 - RNA, 19 nt, Artificial Sequence
  Description of Artificial Sequence: Synthetic oligonucleotide
aaugauguuauggaauugu

SEQ ID NO: 233381 - RNA, 19 nt, Artificial Sequence
  Description of Artificial Sequence: Synthetic oligonucleotide
aacuauaugucauuuugua

SEQ ID NO: 233382 - RNA, 19 nt, Artificial Sequence
  Description of Artificial Sequence: Synthetic oligonucleotide
cacuauguggagaacaaag

SEQ ID NO: 233383 - RNA, 19 nt, Artificial Sequence
  Description of Artificial Sequence: Synthetic oligonucleotide
uuugagaaccuuucaaggu

SEQ ID NO: 233384 - RNA, 19 nt, Artificial Sequence
  Description of Artificial Sequence: Synthetic oligonucleotide
uccaguuacagucauuaaa

SEQ ID NO: 233385 - RNA, 19 nt, Artificial Sequence
  Description of Artificial Sequence: Synthetic oligonucleotide
aguucuaguaaacuuuacu

SEQ ID NO: 233386 - RNA, 19 nt, Artificial Sequence
  Description of Artificial Sequence: Synthetic oligonucleotide
agauuaaaggacaaggcug

SEQ ID NO: 233387 - RNA, 19 nt, Artificial Sequence
  Description of Artificial Sequence: Synthetic oligonucleotide
ucugacguauauuaacugu

SEQ ID NO: 233388 - RNA, 19 nt, Artificial Sequence
  Description of Artificial Sequence: Synthetic oligonucleotide
caguaugacauauacagca

SEQ ID NO: 233389 - RNA, 19 nt, Artificial Sequence
  Description of Artificial Sequence: Synthetic oligonucleotide
ucaucugacguauauuaac

SEQ ID NO: 233390 - RNA, 19 nt, Artificial Sequence
  Description of Artificial Sequence: Synthetic oligonucleotide
aagcauaagccaguugugg

SEQ ID NO: 233391 - RNA, 19 nt, Artificial Sequence
  Description of Artificial Sequence: Synthetic oligonucleotide
cauuaaaagugccuccccg

SEQ ID NO: 233392 - RNA, 19 nt, Artificial Sequence
  Description of Artificial Sequence: Synthetic oligonucleotide
gauacucugccuuugcuca

SEQ ID NO: 233393 - RNA, 19 nt, Artificial Sequence
  Description of Artificial Sequence: Synthetic oligonucleotide
uagagcuauggcaauauaa

SEQ ID NO: 233394 - RNA, 19 nt, Artificial Sequence
  Description of Artificial Sequence: Synthetic oligonucleotide
uucaaggugccccagugga

SEQ ID NO: 233395 - RNA, 19 nt, Artificial Sequence
  Description of Artificial Sequence: Synthetic oligonucleotide
auagcacgagcuuccaugg

SEQ ID NO: 233396 - RNA, 19 nt, Artificial Sequence
  Description of Artificial Sequence: Synthetic oligonucleotide
cauagcacgagcuuccaug

SEQ ID NO: 233397 - RNA, 19 nt, Artificial Sequence
  Description of Artificial Sequence: Synthetic oligonucleotide
uuccuuuaagauuaggaua

SEQ ID NO: 233398 - RNA, 19 nt, Artificial Sequence
  Description of Artificial Sequence: Synthetic oligonucleotide
uguaagcaauauuauuaug

SEQ ID NO: 233399 - RNA, 19 nt, Artificial Sequence
  Description of Artificial Sequence: Synthetic oligonucleotide
cucuugucaauuuauucac

SEQ ID NO: 233400 - RNA, 19 nt, Artificial Sequence
  Description of Artificial Sequence: Synthetic oligonucleotide
agagcuauggcaauauaag

SEQ ID NO: 233401 - RNA, 19 nt, Artificial Sequence
  Description of Artificial Sequence: Synthetic oligonucleotide
uuaguucuaguaaacuuua

SEQ ID NO: 233402 - RNA, 19 nt, Artificial Sequence
  Description of Artificial Sequence: Synthetic oligonucleotide
ucugcggugaguugaagga

SEQ ID NO: 233403 - RNA, 19 nt, Artificial Sequence
  Description of Artificial Sequence: Synthetic oligonucleotide
uggaauuguauuuccagau

SEQ ID NO: 233404 - RNA, 19 nt, Artificial Sequence
  Description of Artificial Sequence: Synthetic oligonucleotide
uguaugucuaagcaaugau

SEQ ID NO: 233405 - RNA, 19 nt, Artificial Sequence
  Description of Artificial Sequence: Synthetic oligonucleotide
uuucaaggugccccagugg

SEQ ID NO: 233406 - RNA, 19 nt, Artificial Sequence
  Description of Artificial Sequence: Synthetic oligonucleotide
auagcacgagccuccaugg

SEQ ID NO: 233407 - RNA, 19 nt, Artificial Sequence
  Description of Artificial Sequence: Synthetic oligonucleotide
aaagacucuagaaaguuuu

SEQ ID NO: 233408 - RNA, 19 nt, Artificial Sequence
  Description of Artificial Sequence: Synthetic oligonucleotide
aaaacgggugguaaaauau

SEQ ID NO: 233409 - RNA, 19 nt, Artificial Sequence
  Description of Artificial Sequence: Synthetic oligonucleotide
acuauguggagaacaaagg

SEQ ID NO: 233410 - RNA, 19 nt, Artificial Sequence
  Description of Artificial Sequence: Synthetic oligonucleotide
gaacaccuggccuacauca

SEQ ID NO: 233411 - RNA, 19 nt, Artificial Sequence
  Description of Artificial Sequence: Synthetic oligonucleotide
accguaacagacaaucuac

SEQ ID NO: 233412 - RNA, 19 nt, Artificial Sequence
  Description of Artificial Sequence: Synthetic oligonucleotide
cugcccauaauccuaacac

SEQ ID NO: 233413 - RNA, 19 nt, Artificial Sequence
  Description of Artificial Sequence: Synthetic oligonucleotide
aaccguaacagacaaucua

SEQ ID NO: 233414 - RNA, 19 nt, Artificial Sequence
  Description of Artificial Sequence: Synthetic oligonucleotide
ucuugauugguuacaguau

SEQ ID NO: 233415 - RNA, 19 nt, Artificial Sequence
  Description of Artificial Sequence: Synthetic oligonucleotide
ucugccauuaaaggucugg

SEQ ID NO: 233416 - RNA, 19 nt, Artificial Sequence
  Description of Artificial Sequence: Synthetic oligonucleotide
auacgaguucuccaccugg

SEQ ID NO: 233417 - RNA, 19 nt, Artificial Sequence
  Description of Artificial Sequence: Synthetic oligonucleotide
agacaaccgaaugaacugc

SEQ ID NO: 233418 - RNA, 19 nt, Artificial Sequence
  Description of Artificial Sequence: Synthetic oligonucleotide
aauggaccuccccucaugu

SEQ ID NO: 233419 - RNA, 19 nt, Artificial Sequence
  Description of Artificial Sequence: Synthetic oligonucleotide
auuaagaagaguaaacauu

SEQ ID NO: 233420 - RNA, 19 nt, Artificial Sequence
  Description of Artificial Sequence: Synthetic oligonucleotide
agacuugaaaauguaaagu

SEQ ID NO: 233421 - RNA, 19 nt, Artificial Sequence
  Description of Artificial Sequence: Synthetic oligonucleotide
guagguaguacuuggaaaa

SEQ ID NO: 233422 - RNA, 19 nt, Artificial Sequence
  Description of Artificial Sequence: Synthetic oligonucleotide
ugagacaucaaggguuagg

SEQ ID NO: 233423 - RNA, 19 nt, Artificial Sequence
  Description of Artificial Sequence: Synthetic oligonucleotide
uggauugggaccuuggauu

SEQ ID NO: 233424 - RNA, 19 nt, Artificial Sequence
  Description of Artificial Sequence: Synthetic oligonucleotide
ucccucgugcaucuaaucc

SEQ ID NO: 233425 - RNA, 19 nt, Artificial Sequence
  Description of Artificial Sequence: Synthetic oligonucleotide
acuauaugucauuuuguau

SEQ ID NO: 233426 - RNA, 19 nt, Artificial Sequence
  Description of Artificial Sequence: Synthetic oligonucleotide
acuaauuaccuuccaagua

SEQ ID NO: 233427 - RNA, 19 nt, Artificial Sequence
  Description of Artificial Sequence: Synthetic oligonucleotide
uggggaugaauuuugggau

SEQ ID NO: 233428 - RNA, 19 nt, Artificial Sequence
  Description of Artificial Sequence: Synthetic oligonucleotide
uugauugguuacaguauga

SEQ ID NO: 233429 - RNA, 19 nt, Artificial Sequence
  Description of Artificial Sequence: Synthetic oligonucleotide
cauagcacgagccuccaug

SEQ ID NO: 233430 - RNA, 19 nt, Artificial Sequence
  Description of Artificial Sequence: Synthetic oligonucleotide
uauuugucuggcgaugcag

SEQ ID NO: 233431 - RNA, 19 nt, Artificial Sequence
  Description of Artificial Sequence: Synthetic oligonucleotide
ucagcuaauggaccucccc

SEQ ID NO: 233432 - RNA, 19 nt, Artificial Sequence
  Description of Artificial Sequence: Synthetic oligonucleotide
cuuuacuaguuauaaggca

SEQ ID NO: 233433 - RNA, 19 nt, Artificial Sequence
  Description of Artificial Sequence: Synthetic oligonucleotide
ugucuggcgaugcagaauu

SEQ ID NO: 233434 - RNA, 19 nt, Artificial Sequence
  Description of Artificial Sequence: Synthetic oligonucleotide
uugucaauuuauucaccug

SEQ ID NO: 233435 - RNA, 19 nt, Artificial Sequence
  Description of Artificial Sequence: Synthetic oligonucleotide
ugacguauauuaacuguaa

SEQ ID NO: 233436 - RNA, 19 nt, Artificial Sequence
  Description of Artificial Sequence: Synthetic oligonucleotide
uuuugacuauucuccaggu

SEQ ID NO: 233437 - RNA, 19 nt, Artificial Sequence
  Description of Artificial Sequence: Synthetic oligonucleotide
gcacuaauuaccuuccaag

SEQ ID NO: 233438 - RNA, 19 nt, Artificial Sequence
  Description of Artificial Sequence: Synthetic oligonucleotide
uuugacauguaagcaauau

SEQ ID NO: 233439 - RNA, 19 nt, Artificial Sequence
  Description of Artificial Sequence: Synthetic oligonucleotide
ugucuaagcaaugauuuua

SEQ ID NO: 233440 - RNA, 19 nt, Artificial Sequence
  Description of Artificial Sequence: Synthetic oligonucleotide
auaagccaguuguggauuc

SEQ ID NO: 233441 - RNA, 19 nt, Artificial Sequence
  Description of Artificial Sequence: Synthetic oligonucleotide
uaguaaacuuuacuaguua

SEQ ID NO: 233442 - RNA, 19 nt, Artificial Sequence
  Description of Artificial Sequence: Synthetic oligonucleotide
aacguauuaucuugcugaa

SEQ ID NO: 233443 - RNA, 19 nt, Artificial Sequence
  Description of Artificial Sequence: Synthetic oligonucleotide
aucugacguauauuaacug

SEQ ID NO: 233444 - RNA, 19 nt, Artificial Sequence
  Description of Artificial Sequence: Synthetic oligonucleotide
auagcacgggccuccauag

SEQ ID NO: 233445 - RNA, 19 nt, Artificial Sequence
  Description of Artificial Sequence: Synthetic oligonucleotide
aaagcauaagccaguugug

SEQ ID NO: 233446 - RNA, 19 nt, Artificial Sequence
  Description of Artificial Sequence: Synthetic oligonucleotide
uuguaugucuaagcaauga

SEQ ID NO: 233447 - RNA, 19 nt, Artificial Sequence
  Description of Artificial Sequence: Synthetic oligonucleotide
ugauacgaguucuccaccu

SEQ ID NO: 233448 - RNA, 19 nt, Artificial Sequence
  Description of Artificial Sequence: Synthetic oligonucleotide
uguggaaaacuagugacuu

SEQ ID NO: 233449 - RNA, 19 nt, Artificial Sequence
  Description of Artificial Sequence: Synthetic oligonucleotide
agcauaagccaguugugga

SEQ ID NO: 233450 - RNA, 19 nt, Artificial Sequence
  Description of Artificial Sequence: Synthetic oligonucleotide
uccaggacuaaaagccacc

SEQ ID NO: 233451 - RNA, 19 nt, Artificial Sequence
  Description of Artificial Sequence: Synthetic oligonucleotide
uaguuauaaggcaacucuu

SEQ ID NO: 233452 - RNA, 19 nt, Artificial Sequence
  Description of Artificial Sequence: Synthetic oligonucleotide
cauuggauugggaccuugg

SEQ ID NO: 233453 - RNA, 19 nt, Artificial Sequence
  Description of Artificial Sequence: Synthetic oligonucleotide
agagaccacgaggaguugc

SEQ ID NO: 233454 - RNA, 19 nt, Artificial Sequence
  Description of Artificial Sequence: Synthetic oligonucleotide
ugccauuaaaggucugggc

SEQ ID NO: 233455 - RNA, 19 nt, Artificial Sequence
  Description of Artificial Sequence: Synthetic oligonucleotide
uggcgaugcagaauuuuca

SEQ ID NO: 233456 - RNA, 19 nt, Artificial Sequence
  Description of Artificial Sequence: Synthetic oligonucleotide
guaagcucuaggcucuacc

SEQ ID NO: 233457 - RNA, 19 nt, Artificial Sequence
  Description of Artificial Sequence: Synthetic oligonucleotide
ugcccauaauccuaacaca

SEQ ID NO: 233458 - RNA, 19 nt, Artificial Sequence
  Description of Artificial Sequence: Synthetic oligonucleotide
agaagccaacuauauguca

SEQ ID NO: 233459 - RNA, 19 nt, Artificial Sequence
  Description of Artificial Sequence: Synthetic oligonucleotide
gagacaucaaggguuagga

SEQ ID NO: 233460 - RNA, 19 nt, Artificial Sequence
  Description of Artificial Sequence: Synthetic oligonucleotide
uuuuacguucuuggaauga

SEQ ID NO: 233461 - RNA, 19 nt, Artificial Sequence
  Description of Artificial Sequence: Synthetic oligonucleotide
uaauggaccuccccucaug

SEQ ID NO: 233462 - RNA, 19 nt, Artificial Sequence
  Description of Artificial Sequence: Synthetic oligonucleotide
agcuauggcaauauaagau

SEQ ID NO: 233463 - RNA, 19 nt, Artificial Sequence
  Description of Artificial Sequence: Synthetic oligonucleotide
uugggauauuugucuggcg

SEQ ID NO: 233464 - RNA, 19 nt, Artificial Sequence
  Description of Artificial Sequence: Synthetic oligonucleotide
uuuacguucuuggaaugaa

SEQ ID NO: 233465 - RNA, 19 nt, Artificial Sequence
  Description of Artificial Sequence: Synthetic oligonucleotide
ggugauacgaguucuccac

SEQ ID NO: 233466 - RNA, 19 nt, Artificial Sequence
  Description of Artificial Sequence: Synthetic oligonucleotide
gauacgaguucuccaccug

SEQ ID NO: 233467 - RNA, 19 nt, Artificial Sequence
  Description of Artificial Sequence: Synthetic oligonucleotide
auuggauugggaccuugga

SEQ ID NO: 233468 - RNA, 19 nt, Artificial Sequence
  Description of Artificial Sequence: Synthetic oligonucleotide
gaaaacgggugguaaaaua

SEQ ID NO: 233469 - RNA, 19 nt, Artificial Sequence
  Description of Artificial Sequence: Synthetic oligonucleotide
uuacuaucuuggcauuccu

SEQ ID NO: 233470 - RNA, 19 nt, Artificial Sequence
  Description of Artificial Sequence: Synthetic oligonucleotide
ccaaguaagcucuaggcuc

SEQ ID NO: 233471 - RNA, 19 nt, Artificial Sequence
  Description of Artificial Sequence: Synthetic oligonucleotide
aggguugccugaaaucagc

SEQ ID NO: 233472 - RNA, 19 nt, Artificial Sequence
  Description of Artificial Sequence: Synthetic oligonucleotide
ugaucccuggggaacgaca

SEQ ID NO: 233473 - RNA, 19 nt, Artificial Sequence
  Description of Artificial Sequence: Synthetic oligonucleotide
ggagaaauggugauacgag

SEQ ID NO: 233474 - RNA, 19 nt, Artificial Sequence
  Description of Artificial Sequence: Synthetic oligonucleotide
ugcugaaugcaaacucaac

SEQ ID NO: 233475 - RNA, 19 nt, Artificial Sequence
  Description of Artificial Sequence: Synthetic oligonucleotide
aaaggguuauguauaucaa

SEQ ID NO: 233476 - RNA, 19 nt, Artificial Sequence
  Description of Artificial Sequence: Synthetic oligonucleotide
aacgggugguaaaauauau

SEQ ID NO: 233477 - RNA, 19 nt, Artificial Sequence
  Description of Artificial Sequence: Synthetic oligonucleotide
uuacguucuuggaaugaau

SEQ ID NO: 233478 - RNA, 19 nt, Artificial Sequence
  Description of Artificial Sequence: Synthetic oligonucleotide
uaguucuaguaaacuuuac

SEQ ID NO: 233479 - RNA, 19 nt, Artificial Sequence
  Description of Artificial Sequence: Synthetic oligonucleotide
gcuaccuagacagaagagc

SEQ ID NO: 233480 - RNA, 19 nt, Artificial Sequence
  Description of Artificial Sequence: Synthetic oligonucleotide
agauuaggauacucugccu

SEQ ID NO: 233481 - RNA, 19 nt, Artificial Sequence
  Description of Artificial Sequence: Synthetic oligonucleotide
gccaauggcacuaauuacc

SEQ ID NO: 233482 - RNA, 19 nt, Artificial Sequence
  Description of Artificial Sequence: Synthetic oligonucleotide
guuuaugaaugucugguau

SEQ ID NO: 233483 - RNA, 19 nt, Artificial Sequence
  Description of Artificial Sequence: Synthetic oligonucleotide
cugccauuaaaggucuggg

SEQ ID NO: 233484 - RNA, 19 nt, Artificial Sequence
  Description of Artificial Sequence: Synthetic oligonucleotide
agaaauggugauacgaguu

SEQ ID NO: 233485 - RNA, 19 nt, Artificial Sequence
  Description of Artificial Sequence: Synthetic oligonucleotide
cguauauuaacuguaauca

SEQ ID NO: 233486 - RNA, 19 nt, Artificial Sequence
  Description of Artificial Sequence: Synthetic oligonucleotide
agaaauacucaaguaucau

SEQ ID NO: 233487 - RNA, 19 nt, Artificial Sequence
  Description of Artificial Sequence: Synthetic oligonucleotide
uuuaauucaccugcccaua

SEQ ID NO: 233488 - RNA, 19 nt, Artificial Sequence
  Description of Artificial Sequence: Synthetic oligonucleotide
gagaaauggugauacgagu

SEQ ID NO: 233489 - RNA, 19 nt, Artificial Sequence
  Description of Artificial Sequence: Synthetic oligonucleotide
cauccaauccucuggccuc

SEQ ID NO: 233490 - RNA, 19 nt, Artificial Sequence
  Description of Artificial Sequence: Synthetic oligonucleotide
gcaaccguaacagacaauc

SEQ ID NO: 233491 - RNA, 19 nt, Artificial Sequence
  Description of Artificial Sequence: Synthetic oligonucleotide
uacuaguuauaaggcaacu

SEQ ID NO: 233492 - RNA, 19 nt, Artificial Sequence
  Description of Artificial Sequence: Synthetic oligonucleotide
guaaaguuggcuaccuaga

SEQ ID NO: 233493 - RNA, 19 nt, Artificial Sequence
  Description of Artificial Sequence: Synthetic oligonucleotide
uccuaacacagaggguagg

SEQ ID NO: 233494 - RNA, 19 nt, Artificial Sequence
  Description of Artificial Sequence: Synthetic oligonucleotide
cugacguauauuaacugua

SEQ ID NO: 233495 - RNA, 19 nt, Artificial Sequence
  Description of Artificial Sequence: Synthetic oligonucleotide
gugauacgaguucuccacc

SEQ ID NO: 233496 - RNA, 19 nt, Artificial Sequence
  Description of Artificial Sequence: Synthetic oligonucleotide
caucugacguauauuaacu

SEQ ID NO: 233497 - RNA, 19 nt, Artificial Sequence
  Description of Artificial Sequence: Synthetic oligonucleotide
gcccauaauccuaacacag

SEQ ID NO: 233498 - RNA, 19 nt, Artificial Sequence
  Description of Artificial Sequence: Synthetic oligonucleotide
aucuaauccucggggaucu

SEQ ID NO: 233499 - RNA, 19 nt, Artificial Sequence
  Description of Artificial Sequence: Synthetic oligonucleotide
gagaccacgaggaguugcc

SEQ ID NO: 233500 - RNA, 19 nt, Artificial Sequence
  Description of Artificial Sequence: Synthetic oligonucleotide
ugaaaacgggugguaaaau

SEQ ID NO: 233501 - RNA, 19 nt, Artificial Sequence
  Description of Artificial Sequence: Synthetic oligonucleotide
caccuugcaugcucgcucc

SEQ ID NO: 233502 - RNA, 19 nt, Artificial Sequence
  Description of Artificial Sequence: Synthetic oligonucleotide
aaacgggugguaaaauaua

SEQ ID NO: 233503 - RNA, 19 nt, Artificial Sequence
  Description of Artificial Sequence: Synthetic oligonucleotide
gaaggaccugcauaaucaa

SEQ ID NO: 233504 - RNA, 19 nt, Artificial Sequence
  Description of Artificial Sequence: Synthetic oligonucleotide
uaauccucggggaucucuu

SEQ ID NO: 233505 - RNA, 19 nt, Artificial Sequence
  Description of Artificial Sequence: Synthetic oligonucleotide
ggaccugcauaaucaaagc

SEQ ID NO: 233506 - RNA, 19 nt, Artificial Sequence
  Description of Artificial Sequence: Synthetic oligonucleotide
cucuagcauccaugggugg

SEQ ID NO: 233507 - RNA, 19 nt, Artificial Sequence
  Description of Artificial Sequence: Synthetic oligonucleotide
cuugcaugcucgcucccug

SEQ ID NO: 233508 - RNA, 19 nt, Artificial Sequence
  Description of Artificial Sequence: Synthetic oligonucleotide
aggcaaccguaacagacaa

SEQ ID NO: 233509 - RNA, 19 nt, Artificial Sequence
  Description of Artificial Sequence: Synthetic oligonucleotide
accgaaugaacugcuuuca

SEQ ID NO: 233510 - RNA, 19 nt, Artificial Sequence
  Description of Artificial Sequence: Synthetic oligonucleotide
aguaagcucuaggcucuac

SEQ ID NO: 233511 - RNA, 19 nt, Artificial Sequence
  Description of Artificial Sequence: Synthetic oligonucleotide
guugccugaaaucagcguu

SEQ ID NO: 233512 - RNA, 19 nt, Artificial Sequence
  Description of Artificial Sequence: Synthetic oligonucleotide
uggccuccaucccucgugc

SEQ ID NO: 233513 - RNA, 19 nt, Artificial Sequence
  Description of Artificial Sequence: Synthetic oligonucleotide
caaugauguuauggaauug

SEQ ID NO: 233514 - RNA, 19 nt, Artificial Sequence
  Description of Artificial Sequence: Synthetic oligonucleotide
gagcugaaagcuuugcaau

SEQ ID NO: 233515 - RNA, 19 nt, Artificial Sequence
  Description of Artificial Sequence: Synthetic oligonucleotide
cuaguaaacuuuacuaguu

SEQ ID NO: 233516 - RNA, 19 nt, Artificial Sequence
  Description of Artificial Sequence: Synthetic oligonucleotide
cagcguugggauauuuguc

SEQ ID NO: 233517 - RNA, 19 nt, Artificial Sequence
  Description of Artificial Sequence: Synthetic oligonucleotide
caucuaauccucggggauc

SEQ ID NO: 233518 - RNA, 19 nt, Artificial Sequence
  Description of Artificial Sequence: Synthetic oligonucleotide
ccauuaaaggucugggcuc

SEQ ID NO: 233519 - RNA, 19 nt, Artificial Sequence
  Description of Artificial Sequence: Synthetic oligonucleotide
gccauuaaaggucugggcu

SEQ ID NO: 233520 - RNA, 19 nt, Artificial Sequence
  Description of Artificial Sequence: Synthetic oligonucleotide
cucagcuaauggaccuccc

SEQ ID NO: 233521 - RNA, 19 nt, Artificial Sequence
  Description of Artificial Sequence: Synthetic oligonucleotide
aucaaggguuaggaugcag

SEQ ID NO: 233522 - RNA, 19 nt, Artificial Sequence
  Description of Artificial Sequence: Synthetic oligonucleotide
ugcuauaugcuugguccuc

SEQ ID NO: 233523 - RNA, 19 nt, Artificial Sequence
  Description of Artificial Sequence: Synthetic oligonucleotide
auccuaacacagaggguag

SEQ ID NO: 233524 - RNA, 19 nt, Artificial Sequence
  Description of Artificial Sequence: Synthetic oligonucleotide
uggcacuaauuaccuucca

SEQ ID NO: 233525 - RNA, 19 nt, Artificial Sequence
  Description of Artificial Sequence: Synthetic oligonucleotide
gacguauauuaacuguaau

SEQ ID NO: 233526 - RNA, 19 nt, Artificial Sequence
  Description of Artificial Sequence: Synthetic oligonucleotide
ccuaacacagaggguaggg

SEQ ID NO: 233527 - RNA, 19 nt, Artificial Sequence
  Description of Artificial Sequence: Synthetic oligonucleotide
caaguaagcucuaggcucu

SEQ ID NO: 233528 - RNA, 19 nt, Artificial Sequence
  Description of Artificial Sequence: Synthetic oligonucleotide
ccugaaaucagcguuggga

SEQ ID NO: 233529 - RNA, 19 nt, Artificial Sequence
  Description of Artificial Sequence: Synthetic oligonucleotide
ugggaccugucuugauccc

SEQ ID NO: 233530 - RNA, 19 nt, Artificial Sequence
  Description of Artificial Sequence: Synthetic oligonucleotide
gguauccauagcacgggcc

SEQ ID NO: 233531 - RNA, 19 nt, Artificial Sequence
  Description of Artificial Sequence: Synthetic oligonucleotide
caguggauuucuguaucug

SEQ ID NO: 233532 - RNA, 19 nt, Artificial Sequence
  Description of Artificial Sequence: Synthetic oligonucleotide
caaaacguauuaucuugcu

SEQ ID NO: 233533 - RNA, 19 nt, Artificial Sequence
  Description of Artificial Sequence: Synthetic oligonucleotide
aaugagccuuugggaaacu

SEQ ID NO: 233534 - RNA, 19 nt, Artificial Sequence
  Description of Artificial Sequence: Synthetic oligonucleotide
cauagcacgggccuccaua

SEQ ID NO: 233535 - RNA, 19 nt, Artificial Sequence
  Description of Artificial Sequence: Synthetic oligonucleotide
ugacugggaccugucuuga

SEQ ID NO: 233536 - RNA, 19 nt, Artificial Sequence
  Description of Artificial Sequence: Synthetic oligonucleotide
augauguuauggaauugua

SEQ ID NO: 233537 - RNA, 19 nt, Artificial Sequence
  Description of Artificial Sequence: Synthetic oligonucleotide
cuaagagaccacgaggagu

SEQ ID NO: 233538 - RNA, 19 nt, Artificial Sequence
  Description of Artificial Sequence: Synthetic oligonucleotide
agugucugcuaaacaacau

SEQ ID NO: 233539 - RNA, 19 nt, Artificial Sequence
  Description of Artificial Sequence: Synthetic oligonucleotide
accugcccauaauccuaac

SEQ ID NO: 233540 - RNA, 19 nt, Artificial Sequence
  Description of Artificial Sequence: Synthetic oligonucleotide
ggcacuaauuaccuuccaa

SEQ ID NO: 233541 - RNA, 19 nt, Artificial Sequence
  Description of Artificial Sequence: Synthetic oligonucleotide
ggguugccugaaaucagcg

SEQ ID NO: 233542 - RNA, 19 nt, Artificial Sequence
  Description of Artificial Sequence: Synthetic oligonucleotide
guaugucuaagcaaugauu

SEQ ID NO: 233543 - RNA, 19 nt, Artificial Sequence
  Description of Artificial Sequence: Synthetic oligonucleotide
aagagaccacgaggaguug

SEQ ID NO: 233544 - RNA, 19 nt, Artificial Sequence
  Description of Artificial Sequence: Synthetic oligonucleotide
aaucagcguugggauauuu

SEQ ID NO: 233545 - RNA, 19 nt, Artificial Sequence
  Description of Artificial Sequence: Synthetic oligonucleotide
cagauuuguugccagguau

SEQ ID NO: 233546 - RNA, 19 nt, Artificial Sequence
  Description of Artificial Sequence: Synthetic oligonucleotide
uuccuacugaugagugcuu

SEQ ID NO: 233547 - RNA, 19 nt, Artificial Sequence
  Description of Artificial Sequence: Synthetic oligonucleotide
agccaacuauaugucauuu

SEQ ID NO: 233548 - RNA, 19 nt, Artificial Sequence
  Description of Artificial Sequence: Synthetic oligonucleotide
gcuaauggaccuccccuca

SEQ ID NO: 233549 - RNA, 19 nt, Artificial Sequence
  Description of Artificial Sequence: Synthetic oligonucleotide
aggcucuaccucuccaguu

SEQ ID NO: 233550 - RNA, 19 nt, Artificial Sequence
  Description of Artificial Sequence: Synthetic oligonucleotide
ggcuaccuagacagaagag

SEQ ID NO: 233551 - RNA, 19 nt, Artificial Sequence
  Description of Artificial Sequence: Synthetic oligonucleotide
gacaaccgaaugaacugcu

SEQ ID NO: 233552 - RNA, 19 nt, Artificial Sequence
  Description of Artificial Sequence: Synthetic oligonucleotide
aggugacuuucaggcuagc

SEQ ID NO: 233553 - RNA, 19 nt, Artificial Sequence
  Description of Artificial Sequence: Synthetic oligonucleotide
cagcuaauggaccuccccu

SEQ ID NO: 233554 - RNA, 19 nt, Artificial Sequence
  Description of Artificial Sequence: Synthetic oligonucleotide
uugaucccuggggaacgac

SEQ ID NO: 233555 - RNA, 19 nt, Artificial Sequence
  Description of Artificial Sequence: Synthetic oligonucleotide
acguauuaucuugcugaau

SEQ ID NO: 233556 - RNA, 19 nt, Artificial Sequence
  Description of Artificial Sequence: Synthetic oligonucleotide
ggaacaccuggccuacauc

SEQ ID NO: 233557 - RNA, 19 nt, Artificial Sequence
  Description of Artificial Sequence: Synthetic oligonucleotide
gcucuaccucuccaguuac

SEQ ID NO: 233558 - RNA, 19 nt, Artificial Sequence
  Description of Artificial Sequence: Synthetic oligonucleotide
guacugggccucugguauc

SEQ ID NO: 233559 - RNA, 19 nt, Artificial Sequence
  Description of Artificial Sequence: Synthetic oligonucleotide
ggaccugucuugaucccug

SEQ ID NO: 233560 - RNA, 19 nt, Artificial Sequence
  Description of Artificial Sequence: Synthetic oligonucleotide
caaccguaacagacaaucu

SEQ ID NO: 233561 - RNA, 19 nt, Artificial Sequence
  Description of Artificial Sequence: Synthetic oligonucleotide
acgggugguaaaauauauu

SEQ ID NO: 233562 - RNA, 19 nt, Artificial Sequence
  Description of Artificial Sequence: Synthetic oligonucleotide
caaccgaaugaacugcuuu

SEQ ID NO: 233563 - RNA, 19 nt, Artificial Sequence
  Description of Artificial Sequence: Synthetic oligonucleotide
ccaccuugcaugcucgcuc

SEQ ID NO: 233564 - RNA, 19 nt, Artificial Sequence
  Description of Artificial Sequence: Synthetic oligonucleotide
agaccacgaggaguugcca

SEQ ID NO: 233565 - RNA, 19 nt, Artificial Sequence
  Description of Artificial Sequence: Synthetic oligonucleotide
aggcaacucuucagauguc

SEQ ID NO: 233566 - RNA, 19 nt, Artificial Sequence
  Description of Artificial Sequence: Synthetic oligonucleotide
ggugacuuucaggcuagca

SEQ ID NO: 233567 - RNA, 19 nt, Artificial Sequence
  Description of Artificial Sequence: Synthetic oligonucleotide
aaguaagcucuaggcucua

SEQ ID NO: 233568 - RNA, 19 nt, Artificial Sequence
  Description of Artificial Sequence: Synthetic oligonucleotide
gggauauuugucuggcgau

SEQ ID NO: 233569 - RNA, 19 nt, Artificial Sequence
  Description of Artificial Sequence: Synthetic oligonucleotide
gguugccugaaaucagcgu

SEQ ID NO: 233570 - RNA, 19 nt, Artificial Sequence
  Description of Artificial Sequence: Synthetic oligonucleotide
cuugaucccuggggaacga

SEQ ID NO: 233571 - RNA, 19 nt, Artificial Sequence
  Description of Artificial Sequence: Synthetic oligonucleotide
gcaucuaauccucggggau

SEQ ID NO: 233572 - RNA, 19 nt, Artificial Sequence
  Description of Artificial Sequence: Synthetic oligonucleotide
cccaaguaagcucuaggcu

SEQ ID NO: 233573 - RNA, 19 nt, Artificial Sequence
  Description of Artificial Sequence: Synthetic oligonucleotide
caucccucgugcaucuaau

SEQ ID NO: 233574 - RNA, 19 nt, Artificial Sequence
  Description of Artificial Sequence: Synthetic oligonucleotide
ggguuaggaugcagaaguc

SEQ ID NO: 233575 - RNA, 19 nt, Artificial Sequence
  Description of Artificial Sequence: Synthetic oligonucleotide
cuaauggaccuccccucau

SEQ ID NO: 233576 - RNA, 19 nt, Artificial Sequence
  Description of Artificial Sequence: Synthetic oligonucleotide
caucaaggguuaggaugca

SEQ ID NO: 233577 - RNA, 19 nt, Artificial Sequence
  Description of Artificial Sequence: Synthetic oligonucleotide
cccucgugcaucuaauccu

SEQ ID NO: 233578 - RNA, 19 nt, Artificial Sequence
  Description of Artificial Sequence: Synthetic oligonucleotide
cauccauggguggaccccu

SEQ ID NO: 233579 - RNA, 19 nt, Artificial Sequence
  Description of Artificial Sequence: Synthetic oligonucleotide
ccguaacagacaaucuacu

SEQ ID NO: 233580 - RNA, 19 nt, Artificial Sequence
  Description of Artificial Sequence: Synthetic oligonucleotide
gggaacaccuggccuacau

SEQ ID NO: 233581 - RNA, 19 nt, Artificial Sequence
  Description of Artificial Sequence: Synthetic oligonucleotide
cacucacuuaaaugucauu

SEQ ID NO: 233582 - RNA, 19 nt, Artificial Sequence
  Description of Artificial Sequence: Synthetic oligonucleotide
gccaacuauaugucauuuu

SEQ ID NO: 233583 - RNA, 19 nt, Artificial Sequence
  Description of Artificial Sequence: Synthetic oligonucleotide
caggcuagcacaggccaau

SEQ ID NO: 233584 - RNA, 19 nt, Artificial Sequence
  Description of Artificial Sequence: Synthetic oligonucleotide
uccaucccucgugcaucua

SEQ ID NO: 233585 - RNA, 19 nt, Artificial Sequence
  Description of Artificial Sequence: Synthetic oligonucleotide
ccuccccgugggucauugg

SEQ ID NO: 233586 - RNA, 19 nt, Artificial Sequence
  Description of Artificial Sequence: Synthetic oligonucleotide
ccacuauguggagaacaaa

SEQ ID NO: 233587 - RNA, 19 nt, Artificial Sequence
  Description of Artificial Sequence: Synthetic oligonucleotide
gcggugaguugaaggaccu

SEQ ID NO: 233588 - RNA, 19 nt, Artificial Sequence
  Description of Artificial Sequence: Synthetic oligonucleotide
gucuggcgaugcagaauuu

SEQ ID NO: 233589 - RNA, 19 nt, Artificial Sequence
  Description of Artificial Sequence: Synthetic oligonucleotide
aaauucgaaguauaccucc

SEQ ID NO: 233590 - RNA, 19 nt, Artificial Sequence
  Description of Artificial Sequence: Synthetic oligonucleotide
aaaaccuuagagcuggccg

SEQ ID NO: 233591 - RNA, 19 nt, Artificial Sequence
  Description of Artificial Sequence: Synthetic oligonucleotide
aacauggugcuuuuggggc

SEQ ID NO: 233592 - RNA, 19 nt, Artificial Sequence
  Description of Artificial Sequence: Synthetic oligonucleotide
aaaacuguggcagugggac

SEQ ID NO: 233593 - RNA, 19 nt, Artificial Sequence
  Description of Artificial Sequence: Synthetic oligonucleotide
augaaacugaguuuaagcg

SEQ ID NO: 233594 - RNA, 19 nt, Artificial Sequence
  Description of Artificial Sequence: Synthetic oligonucleotide
aauuguaccuaauacaaaa

SEQ ID NO: 233595 - RNA, 19 nt, Artificial Sequence
  Description of Artificial Sequence: Synthetic oligonucleotide
ugcaaggugaaauacacag

SEQ ID NO: 233596 - RNA, 19 nt, Artificial Sequence
  Description of Artificial Sequence: Synthetic oligonucleotide
uuuauuuagugccagucgc

SEQ ID NO: 233597 - RNA, 19 nt, Artificial Sequence
  Description of Artificial Sequence: Synthetic oligonucleotide
ugaaacugaguuuaagcgg

SEQ ID NO: 233598 - RNA, 19 nt, Artificial Sequence
  Description of Artificial Sequence: Synthetic oligonucleotide
aauuagaguagcuuuacaa

SEQ ID NO: 233599 - RNA, 19 nt, Artificial Sequence
  Description of Artificial Sequence: Synthetic oligonucleotide
uuuagugccagucgcauag

SEQ ID NO: 233600 - RNA, 19 nt, Artificial Sequence
  Description of Artificial Sequence: Synthetic oligonucleotide
uuuacuuuagcucuugcuc

SEQ ID NO: 233601 - RNA, 19 nt, Artificial Sequence
  Description of Artificial Sequence: Synthetic oligonucleotide
uuaaauuuugucuggcaag

SEQ ID NO: 233602 - RNA, 19 nt, Artificial Sequence
  Description of Artificial Sequence: Synthetic oligonucleotide
aaagaucaaggucagagau

SEQ ID NO: 233603 - RNA, 19 nt, Artificial Sequence
  Description of Artificial Sequence: Synthetic oligonucleotide
aaaccuuagagcuggccgg

SEQ ID NO: 233604 - RNA, 19 nt, Artificial Sequence
  Description of Artificial Sequence: Synthetic oligonucleotide
cacauuuuggcaaagauca

SEQ ID NO: 233605 - RNA, 19 nt, Artificial Sequence
  Description of Artificial Sequence: Synthetic oligonucleotide
gaaacugaguuuaagcggg

SEQ ID NO: 233606 - RNA, 19 nt, Artificial Sequence
  Description of Artificial Sequence: Synthetic oligonucleotide
uuguuucguguccagaugg

SEQ ID NO: 233607 - RNA, 19 nt, Artificial Sequence
  Description of Artificial Sequence: Synthetic oligonucleotide
uuaaacagagcccuaacau

SEQ ID NO: 233608 - RNA, 19 nt, Artificial Sequence
  Description of Artificial Sequence: Synthetic oligonucleotide
agaaaauccuauauagggc

SEQ ID NO: 233609 - RNA, 19 nt, Artificial Sequence
  Description of Artificial Sequence: Synthetic oligonucleotide
accaguaacggucccauac

SEQ ID NO: 233610 - RNA, 19 nt, Artificial Sequence
  Description of Artificial Sequence: Synthetic oligonucleotide
cuaaggagaagccacgggg

SEQ ID NO: 233611 - RNA, 19 nt, Artificial Sequence
  Description of Artificial Sequence: Synthetic oligonucleotide
agcacagucaaacuaagga

SEQ ID NO: 233612 - RNA, 19 nt, Artificial Sequence
  Description of Artificial Sequence: Synthetic oligonucleotide
agaucaaggucagagauag

SEQ ID NO: 233613 - RNA, 19 nt, Artificial Sequence
  Description of Artificial Sequence: Synthetic oligonucleotide
agugcagucacagaucugg

SEQ ID NO: 233614 - RNA, 19 nt, Artificial Sequence
  Description of Artificial Sequence: Synthetic oligonucleotide
uucgggcaaaauuuaauag

SEQ ID NO: 233615 - RNA, 19 nt, Artificial Sequence
  Description of Artificial Sequence: Synthetic oligonucleotide
aaaauucgaaguauaccuc

SEQ ID NO: 233616 - RNA, 19 nt, Artificial Sequence
  Description of Artificial Sequence: Synthetic oligonucleotide
aaguauaccuccacuuacc

SEQ ID NO: 233617 - RNA, 19 nt, Artificial Sequence
  Description of Artificial Sequence: Synthetic oligonucleotide
aauuccccgaauucaaacu

SEQ ID NO: 233618 - RNA, 19 nt, Artificial Sequence
  Description of Artificial Sequence: Synthetic oligonucleotide
uuuaagcggguauuaagug

SEQ ID NO: 233619 - RNA, 19 nt, Artificial Sequence
  Description of Artificial Sequence: Synthetic oligonucleotide
uuaagcggguauuaagugc

SEQ ID NO: 233620 - RNA, 19 nt, Artificial Sequence
  Description of Artificial Sequence: Synthetic oligonucleotide
gacacgauugaugacaggc

SEQ ID NO: 233621 - RNA, 19 nt, Artificial Sequence
  Description of Artificial Sequence: Synthetic oligonucleotide
aguuuaagcggguauuaag

SEQ ID NO: 233622 - RNA, 19 nt, Artificial Sequence
  Description of Artificial Sequence: Synthetic oligonucleotide
guuauugcguaccuuguag

SEQ ID NO: 233623 - RNA, 19 nt, Artificial Sequence
  Description of Artificial Sequence: Synthetic oligonucleotide
aaguauacccgggacuccc

SEQ ID NO: 233624 - RNA, 19 nt, Artificial Sequence
  Description of Artificial Sequence: Synthetic oligonucleotide
gaccgaauuaggcuuauug

SEQ ID NO: 233625 - RNA, 19 nt, Artificial Sequence
  Description of Artificial Sequence: Synthetic oligonucleotide
uuaucaacgugacggacgu

SEQ ID NO: 233626 - RNA, 19 nt, Artificial Sequence
  Description of Artificial Sequence: Synthetic oligonucleotide
uauauagggcccuuguuuc

SEQ ID NO: 233627 - RNA, 19 nt, Artificial Sequence
  Description of Artificial Sequence: Synthetic oligonucleotide
gaaguauaccuccacuuac

SEQ ID NO: 233628 - RNA, 19 nt, Artificial Sequence
  Description of Artificial Sequence: Synthetic oligonucleotide
cuugguacaccaguaacgg

SEQ ID NO: 233629 - RNA, 19 nt, Artificial Sequence
  Description of Artificial Sequence: Synthetic oligonucleotide
ugagacuugguacaccagu

SEQ ID NO: 233630 - RNA, 19 nt, Artificial Sequence
  Description of Artificial Sequence: Synthetic oligonucleotide
uagcuuuacaagcaaugug

SEQ ID NO: 233631 - RNA, 19 nt, Artificial Sequence
  Description of Artificial Sequence: Synthetic oligonucleotide
gaauuacugagcuuuccac

SEQ ID NO: 233632 - RNA, 19 nt, Artificial Sequence
  Description of Artificial Sequence: Synthetic oligonucleotide
uuuuaaggggacuguggag

SEQ ID NO: 233633 - RNA, 19 nt, Artificial Sequence
  Description of Artificial Sequence: Synthetic oligonucleotide
ugauuucuaagcugcacac

SEQ ID NO: 233634 - RNA, 19 nt, Artificial Sequence
  Description of Artificial Sequence: Synthetic oligonucleotide
uuauugcguaccuuguagc

SEQ ID NO: 233635 - RNA, 19 nt, Artificial Sequence
  Description of Artificial Sequence: Synthetic oligonucleotide
guuaucaacgugacggacg

SEQ ID NO: 233636 - RNA, 19 nt, Artificial Sequence
  Description of Artificial Sequence: Synthetic oligonucleotide
agaauuacugagcuuucca

SEQ ID NO: 233637 - RNA, 19 nt, Artificial Sequence
  Description of Artificial Sequence: Synthetic oligonucleotide
acagcagucuaucaaauuu

SEQ ID NO: 233638 - RNA, 19 nt, Artificial Sequence
  Description of Artificial Sequence: Synthetic oligonucleotide
uagaucuggcaaaauagaa

SEQ ID NO: 233639 - RNA, 19 nt, Artificial Sequence
  Description of Artificial Sequence: Synthetic oligonucleotide
aauaagaauuacugagcuu

SEQ ID NO: 233640 - RNA, 19 nt, Artificial Sequence
  Description of Artificial Sequence: Synthetic oligonucleotide
aaaguauacccgggacucc

SEQ ID NO: 233641 - RNA, 19 nt, Artificial Sequence
  Description of Artificial Sequence: Synthetic oligonucleotide
aacggucccauacaaagua

SEQ ID NO: 233642 - RNA, 19 nt, Artificial Sequence
  Description of Artificial Sequence: Synthetic oligonucleotide
ucaaacuaaggagaagcca

SEQ ID NO: 233643 - RNA, 19 nt, Artificial Sequence
  Description of Artificial Sequence: Synthetic oligonucleotide
caaacaguuauugcguacc

SEQ ID NO: 233644 - RNA, 19 nt, Artificial Sequence
  Description of Artificial Sequence: Synthetic oligonucleotide
accgaauuaggcuuauuga

SEQ ID NO: 233645 - RNA, 19 nt, Artificial Sequence
  Description of Artificial Sequence: Synthetic oligonucleotide
auuacugguugugaaaaug

SEQ ID NO: 233646 - RNA, 19 nt, Artificial Sequence
  Description of Artificial Sequence: Synthetic oligonucleotide
cucaguuagaugauagauc

SEQ ID NO: 233647 - RNA, 19 nt, Artificial Sequence
  Description of Artificial Sequence: Synthetic oligonucleotide
aggaguuacccauaaucug

SEQ ID NO: 233648 - RNA, 19 nt, Artificial Sequence
  Description of Artificial Sequence: Synthetic oligonucleotide
uaauuagaguagcuuuaca

SEQ ID NO: 233649 - RNA, 19 nt, Artificial Sequence
  Description of Artificial Sequence: Synthetic oligonucleotide
aaacaguuauugcguaccu

SEQ ID NO: 233650 - RNA, 19 nt, Artificial Sequence
  Description of Artificial Sequence: Synthetic oligonucleotide
aacgugacggacguaaccu

SEQ ID NO: 233651 - RNA, 19 nt, Artificial Sequence
  Description of Artificial Sequence: Synthetic oligonucleotide
uuguacuucgugaggguug

SEQ ID NO: 233652 - RNA, 19 nt, Artificial Sequence
  Description of Artificial Sequence: Synthetic oligonucleotide
ggcuuauugaguucaaccc

SEQ ID NO: 233653 - RNA, 19 nt, Artificial Sequence
  Description of Artificial Sequence: Synthetic oligonucleotide
uuacccauaaucugugcaa

SEQ ID NO: 233654 - RNA, 19 nt, Artificial Sequence
  Description of Artificial Sequence: Synthetic oligonucleotide
uucguguccagauggaaaa

SEQ ID NO: 233655 - RNA, 19 nt, Artificial Sequence
  Description of Artificial Sequence: Synthetic oligonucleotide
ucguaggagggucuuucgg

SEQ ID NO: 233656 - RNA, 19 nt, Artificial Sequence
  Description of Artificial Sequence: Synthetic oligonucleotide
ugucccucuuuaaauagaa

SEQ ID NO: 233657 - RNA, 19 nt, Artificial Sequence
  Description of Artificial Sequence: Synthetic oligonucleotide
auauagggcccuuguuucg

SEQ ID NO: 233658 - RNA, 19 nt, Artificial Sequence
  Description of Artificial Sequence: Synthetic oligonucleotide
uuuugauaaauuguaccua

SEQ ID NO: 233659 - RNA, 19 nt, Artificial Sequence
  Description of Artificial Sequence: Synthetic oligonucleotide
acuucgugaggguugcguc

SEQ ID NO: 233660 - RNA, 19 nt, Artificial Sequence
  Description of Artificial Sequence: Synthetic oligonucleotide
gggacucccacauuaaaag

SEQ ID NO: 233661 - RNA, 19 nt, Artificial Sequence
  Description of Artificial Sequence: Synthetic oligonucleotide
acggacguaaccuguuccg

SEQ ID NO: 233662 - RNA, 19 nt, Artificial Sequence
  Description of Artificial Sequence: Synthetic oligonucleotide
aaccuuagagcuggccggc

SEQ ID NO: 233663 - RNA, 19 nt, Artificial Sequence
  Description of Artificial Sequence: Synthetic oligonucleotide
aaucgagcagcuguaggug

SEQ ID NO: 233664 - RNA, 19 nt, Artificial Sequence
  Description of Artificial Sequence: Synthetic oligonucleotide
aacacggcguccgaaccac

SEQ ID NO: 233665 - RNA, 19 nt, Artificial Sequence
  Description of Artificial Sequence: Synthetic oligonucleotide
aguauaccuccacuuaccu

SEQ ID NO: 233666 - RNA, 19 nt, Artificial Sequence
  Description of Artificial Sequence: Synthetic oligonucleotide
gaaacacggcguccgaacc

SEQ ID NO: 233667 - RNA, 19 nt, Artificial Sequence
  Description of Artificial Sequence: Synthetic oligonucleotide
uccuauauagggcccuugu

SEQ ID NO: 233668 - RNA, 19 nt, Artificial Sequence
  Description of Artificial Sequence: Synthetic oligonucleotide
acacgauugaugacaggcc

SEQ ID NO: 233669 - RNA, 19 nt, Artificial Sequence
  Description of Artificial Sequence: Synthetic oligonucleotide
uugcugaccgaauuaggcu

SEQ ID NO: 233670 - RNA, 19 nt, Artificial Sequence
  Description of Artificial Sequence: Synthetic oligonucleotide
uacuuuagcucuugcucgc

SEQ ID NO: 233671 - RNA, 19 nt, Artificial Sequence
  Description of Artificial Sequence: Synthetic oligonucleotide
ugggaaaauucgaaguaua

SEQ ID NO: 233672 - RNA, 19 nt, Artificial Sequence
  Description of Artificial Sequence: Synthetic oligonucleotide
uucguucggccguuuaucc

SEQ ID NO: 233673 - RNA, 19 nt, Artificial Sequence
  Description of Artificial Sequence: Synthetic oligonucleotide
cacacgucuuucauuacug

SEQ ID NO: 233674 - RNA, 19 nt, Artificial Sequence
  Description of Artificial Sequence: Synthetic oligonucleotide
cauggauaaaggucuguuc

SEQ ID NO: 233675 - RNA, 19 nt, Artificial Sequence
  Description of Artificial Sequence: Synthetic oligonucleotide
aaacacggcguccgaacca

SEQ ID NO: 233676 - RNA, 19 nt, Artificial Sequence
  Description of Artificial Sequence: Synthetic oligonucleotide
acggggaaaacuguggcag

SEQ ID NO: 233677 - RNA, 19 nt, Artificial Sequence
  Description of Artificial Sequence: Synthetic oligonucleotide
uccacuuaccuuggcaucc

SEQ ID NO: 233678 - RNA, 19 nt, Artificial Sequence
  Description of Artificial Sequence: Synthetic oligonucleotide
acguaaccuguuccguugc

SEQ ID NO: 233679 - RNA, 19 nt, Artificial Sequence
  Description of Artificial Sequence: Synthetic oligonucleotide
gacggacguaaccuguucc

SEQ ID NO: 233680 - RNA, 19 nt, Artificial Sequence
  Description of Artificial Sequence: Synthetic oligonucleotide
gaugugggaacugcuagac

SEQ ID NO: 233681 - RNA, 19 nt, Artificial Sequence
  Description of Artificial Sequence: Synthetic oligonucleotide
ggaaaguacauaaacuuuc

SEQ ID NO: 233682 - RNA, 19 nt, Artificial Sequence
  Description of Artificial Sequence: Synthetic oligonucleotide
aggaccucaaguuuauuua

SEQ ID NO: 233683 - RNA, 19 nt, Artificial Sequence
  Description of Artificial Sequence: Synthetic oligonucleotide
cagucuaucaaauuugggu

SEQ ID NO: 233684 - RNA, 19 nt, Artificial Sequence
  Description of Artificial Sequence: Synthetic oligonucleotide
cuaccauggauaaaggucu

SEQ ID NO: 233685 - RNA, 19 nt, Artificial Sequence
  Description of Artificial Sequence: Synthetic oligonucleotide
aaauuuugucuggcaagca

SEQ ID NO: 233686 - RNA, 19 nt, Artificial Sequence
  Description of Artificial Sequence: Synthetic oligonucleotide
ucgccuaucuguugcccgg

SEQ ID NO: 233687 - RNA, 19 nt, Artificial Sequence
  Description of Artificial Sequence: Synthetic oligonucleotide
uccccgaauucaaacuuga

SEQ ID NO: 233688 - RNA, 19 nt, Artificial Sequence
  Description of Artificial Sequence: Synthetic oligonucleotide
uguuucguguccagaugga

SEQ ID NO: 233689 - RNA, 19 nt, Artificial Sequence
  Description of Artificial Sequence: Synthetic oligonucleotide
gcgacaaucaucguaggag

SEQ ID NO: 233690 - RNA, 19 nt, Artificial Sequence
  Description of Artificial Sequence: Synthetic oligonucleotide
cuuguuucguguccagaug

SEQ ID NO: 233691 - RNA, 19 nt, Artificial Sequence
  Description of Artificial Sequence: Synthetic oligonucleotide
acuggcgacaaucaucgua

SEQ ID NO: 233692 - RNA, 19 nt, Artificial Sequence
  Description of Artificial Sequence: Synthetic oligonucleotide
aucaacgugacggacguaa

SEQ ID NO: 233693 - RNA, 19 nt, Artificial Sequence
  Description of Artificial Sequence: Synthetic oligonucleotide
ggaccucaaguuuauuuag

SEQ ID NO: 233694 - RNA, 19 nt, Artificial Sequence
  Description of Artificial Sequence: Synthetic oligonucleotide
gcuccagucaaacagaucu

SEQ ID NO: 233695 - RNA, 19 nt, Artificial Sequence
  Description of Artificial Sequence: Synthetic oligonucleotide
acaaagagugucugguuuu

SEQ ID NO: 233696 - RNA, 19 nt, Artificial Sequence
  Description of Artificial Sequence: Synthetic oligonucleotide
uauuuagugccagucgcau

SEQ ID NO: 233697 - RNA, 19 nt, Artificial Sequence
  Description of Artificial Sequence: Synthetic oligonucleotide
ugaguucaacccucacacc

SEQ ID NO: 233698 - RNA, 19 nt, Artificial Sequence
  Description of Artificial Sequence: Synthetic oligonucleotide
caacgugacggacguaacc

SEQ ID NO: 233699 - RNA, 19 nt, Artificial Sequence
  Description of Artificial Sequence: Synthetic oligonucleotide
augagccccucacgcaagc

SEQ ID NO: 233700 - RNA, 19 nt, Artificial Sequence
  Description of Artificial Sequence: Synthetic oligonucleotide
ugcccguccgugaacuugc

SEQ ID NO: 233701 - RNA, 19 nt, Artificial Sequence
  Description of Artificial Sequence: Synthetic oligonucleotide
uugcguaccuuguagcaua

SEQ ID NO: 233702 - RNA, 19 nt, Artificial Sequence
  Description of Artificial Sequence: Synthetic oligonucleotide
agugcauaacuaauccuga

SEQ ID NO: 233703 - RNA, 19 nt, Artificial Sequence
  Description of Artificial Sequence: Synthetic oligonucleotide
ugaguuuaagcggguauua

SEQ ID NO: 233704 - RNA, 19 nt, Artificial Sequence
  Description of Artificial Sequence: Synthetic oligonucleotide
cguaccuuguagcauaugc

SEQ ID NO: 233705 - RNA, 19 nt, Artificial Sequence
  Description of Artificial Sequence: Synthetic oligonucleotide
acaaucaucguaggagggu

SEQ ID NO: 233706 - RNA, 19 nt, Artificial Sequence
  Description of Artificial Sequence: Synthetic oligonucleotide
uuucguucggccguuuauc

SEQ ID NO: 233707 - RNA, 19 nt, Artificial Sequence
  Description of Artificial Sequence: Synthetic oligonucleotide
uucaacgcgggcagcggcu

SEQ ID NO: 233708 - RNA, 19 nt, Artificial Sequence
  Description of Artificial Sequence: Synthetic oligonucleotide
ucaacgugacggacguaac

SEQ ID NO: 233709 - RNA, 19 nt, Artificial Sequence
  Description of Artificial Sequence: Synthetic oligonucleotide
agcuucaacgcgggcagcg

SEQ ID NO: 233710 - RNA, 19 nt, Artificial Sequence
  Description of Artificial Sequence: Synthetic oligonucleotide
ccguccgugaacuugcccg

SEQ ID NO: 233711 - RNA, 19 nt, Artificial Sequence
  Description of Artificial Sequence: Synthetic oligonucleotide
caaucaucguaggaggguc

SEQ ID NO: 233712 - RNA, 19 nt, Artificial Sequence
  Description of Artificial Sequence: Synthetic oligonucleotide
ucacgcaagcacagugcug

SEQ ID NO: 233713 - RNA, 19 nt, Artificial Sequence
  Description of Artificial Sequence: Synthetic oligonucleotide
aaucaucguaggagggucu

SEQ ID NO: 233714 - RNA, 19 nt, Artificial Sequence
  Description of Artificial Sequence: Synthetic oligonucleotide
uacuucgugaggguugcgu

SEQ ID NO: 233715 - RNA, 19 nt, Artificial Sequence
  Description of Artificial Sequence: Synthetic oligonucleotide
gcaaucgagcagcuguagg

SEQ ID NO: 233716 - RNA, 19 nt, Artificial Sequence
  Description of Artificial Sequence: Synthetic oligonucleotide
acgagucucuaugcaaauc

SEQ ID NO: 233717 - RNA, 19 nt, Artificial Sequence
  Description of Artificial Sequence: Synthetic oligonucleotide
cuucaacgcgggcagcggc

SEQ ID NO: 233718 - RNA, 19 nt, Artificial Sequence
  Description of Artificial Sequence: Synthetic oligonucleotide
cacgcaagcacagugcuga

SEQ ID NO: 233719 - RNA, 19 nt, Artificial Sequence
  Description of Artificial Sequence: Synthetic oligonucleotide
cacggcacgauguacucca

SEQ ID NO: 233720 - RNA, 19 nt, Artificial Sequence
  Description of Artificial Sequence: Synthetic oligonucleotide
uugguacaccaguaacggu

SEQ ID NO: 233721 - RNA, 19 nt, Artificial Sequence
  Description of Artificial Sequence: Synthetic oligonucleotide
acggcguccgaaccacacg

SEQ ID NO: 233722 - RNA, 19 nt, Artificial Sequence
  Description of Artificial Sequence: Synthetic oligonucleotide
uggcgacaaucaucguagg

SEQ ID NO: 233723 - RNA, 19 nt, Artificial Sequence
  Description of Artificial Sequence: Synthetic oligonucleotide
ugacggacguaaccuguuc

SEQ ID NO: 233724 - RNA, 19 nt, Artificial Sequence
  Description of Artificial Sequence: Synthetic oligonucleotide
ggaaacacggcguccgaac

SEQ ID NO: 233725 - RNA, 19 nt, Artificial Sequence
  Description of Artificial Sequence: Synthetic oligonucleotide
cuauauagggcccuuguuu

SEQ ID NO: 233726 - RNA, 19 nt, Artificial Sequence
  Description of Artificial Sequence: Synthetic oligonucleotide
uguugcccggucucccugc

SEQ ID NO: 233727 - RNA, 19 nt, Artificial Sequence
  Description of Artificial Sequence: Synthetic oligonucleotide
acgugacggacguaaccug

SEQ ID NO: 233728 - RNA, 19 nt, Artificial Sequence
  Description of Artificial Sequence: Synthetic oligonucleotide
acgauugaugacaggccag

SEQ ID NO: 233729 - RNA, 19 nt, Artificial Sequence
  Description of Artificial Sequence: Synthetic oligonucleotide
caaucgagcagcuguaggu

SEQ ID NO: 233730 - RNA, 19 nt, Artificial Sequence
  Description of Artificial Sequence: Synthetic oligonucleotide
gcauaacuaauccugauuu

SEQ ID NO: 233731 - RNA, 19 nt, Artificial Sequence
  Description of Artificial Sequence: Synthetic oligonucleotide
ucguguccagauggaaaag

SEQ ID NO: 233732 - RNA, 19 nt, Artificial Sequence
  Description of Artificial Sequence: Synthetic oligonucleotide
ggauuaacacacagaggcc

SEQ ID NO: 233733 - RNA, 19 nt, Artificial Sequence
  Description of Artificial Sequence: Synthetic oligonucleotide
caugagccccucacgcaag

SEQ ID NO: 233734 - RNA, 19 nt, Artificial Sequence
  Description of Artificial Sequence: Synthetic oligonucleotide
auuuagugccagucgcaua

SEQ ID NO: 233735 - RNA, 19 nt, Artificial Sequence
  Description of Artificial Sequence: Synthetic oligonucleotide
ucguucggccguuuauccu

SEQ ID NO: 233736 - RNA, 19 nt, Artificial Sequence
  Description of Artificial Sequence: Synthetic oligonucleotide
cacacgagucucuaugcaa

SEQ ID NO: 233737 - RNA, 19 nt, Artificial Sequence
  Description of Artificial Sequence: Synthetic oligonucleotide
acacgagucucuaugcaaa

SEQ ID NO: 233738 - RNA, 19 nt, Artificial Sequence
  Description of Artificial Sequence: Synthetic oligonucleotide
aauccuauauagggcccuu

SEQ ID NO: 233739 - RNA, 19 nt, Artificial Sequence
  Description of Artificial Sequence: Synthetic oligonucleotide
gcagucuaucaaauuuggg

SEQ ID NO: 233740 - RNA, 19 nt, Artificial Sequence
  Description of Artificial Sequence: Synthetic oligonucleotide
ugcuccagucaaacagauc

SEQ ID NO: 233741 - RNA, 19 nt, Artificial Sequence
  Description of Artificial Sequence: Synthetic oligonucleotide
ggucccauacaaaguauac

SEQ ID NO: 233742 - RNA, 19 nt, Artificial Sequence
  Description of Artificial Sequence: Synthetic oligonucleotide
cacggcguccgaaccacac

SEQ ID NO: 233743 - RNA, 19 nt, Artificial Sequence
  Description of Artificial Sequence: Synthetic oligonucleotide
guauacccgggacucccac

SEQ ID NO: 233744 - RNA, 19 nt, Artificial Sequence
  Description of Artificial Sequence: Synthetic oligonucleotide
gaguuuaagcggguauuaa

SEQ ID NO: 233745 - RNA, 19 nt, Artificial Sequence
  Description of Artificial Sequence: Synthetic oligonucleotide
uuagugccagucgcauagc

SEQ ID NO: 233746 - RNA, 19 nt, Artificial Sequence
  Description of Artificial Sequence: Synthetic oligonucleotide
agguuucuaauuggauaca

SEQ ID NO: 233747 - RNA, 19 nt, Artificial Sequence
  Description of Artificial Sequence: Synthetic oligonucleotide
ugcacacgucuuucauuac

SEQ ID NO: 233748 - RNA, 19 nt, Artificial Sequence
  Description of Artificial Sequence: Synthetic oligonucleotide
cugucccucuuuaaauaga

SEQ ID NO: 233749 - RNA, 19 nt, Artificial Sequence
  Description of Artificial Sequence: Synthetic oligonucleotide
caugcacggcacgauguac

SEQ ID NO: 233750 - RNA, 19 nt, Artificial Sequence
  Description of Artificial Sequence: Synthetic oligonucleotide
cgggcaaaauuuaauagca

SEQ ID NO: 233751 - RNA, 19 nt, Artificial Sequence
  Description of Artificial Sequence: Synthetic oligonucleotide
ccucacgcaagcacagugc

SEQ ID NO: 233752 - RNA, 19 nt, Artificial Sequence
  Description of Artificial Sequence: Synthetic oligonucleotide
augcacggcacgauguacu

SEQ ID NO: 233753 - RNA, 19 nt, Artificial Sequence
  Description of Artificial Sequence: Synthetic oligonucleotide
cacggggaaaacuguggca

SEQ ID NO: 233754 - RNA, 19 nt, Artificial Sequence
  Description of Artificial Sequence: Synthetic oligonucleotide
gguuaucaacgugacggac

SEQ ID NO: 233755 - RNA, 19 nt, Artificial Sequence
  Description of Artificial Sequence: Synthetic oligonucleotide
cagcggcuuggucugcccg

SEQ ID NO: 233756 - RNA, 19 nt, Artificial Sequence
  Description of Artificial Sequence: Synthetic oligonucleotide
accauggauaaaggucugu

SEQ ID NO: 233757 - RNA, 19 nt, Artificial Sequence
  Description of Artificial Sequence: Synthetic oligonucleotide
auccuauauagggcccuug

SEQ ID NO: 233758 - RNA, 19 nt, Artificial Sequence
  Description of Artificial Sequence: Synthetic oligonucleotide
ugguugugccacugucccu

SEQ ID NO: 233759 - RNA, 19 nt, Artificial Sequence
  Description of Artificial Sequence: Synthetic oligonucleotide
cacgucuuucauuacuggu

SEQ ID NO: 233760 - RNA, 19 nt, Artificial Sequence
  Description of Artificial Sequence: Synthetic oligonucleotide
augcaaggugaaauacaca

SEQ ID NO: 233761 - RNA, 19 nt, Artificial Sequence
  Description of Artificial Sequence: Synthetic oligonucleotide
gucugagacuugguacacc

SEQ ID NO: 233762 - RNA, 19 nt, Artificial Sequence
  Description of Artificial Sequence: Synthetic oligonucleotide
ccacggggaaaacuguggc

SEQ ID NO: 233763 - RNA, 19 nt, Artificial Sequence
  Description of Artificial Sequence: Synthetic oligonucleotide
agccacggggaaaacugug

SEQ ID NO: 233764 - RNA, 19 nt, Artificial Sequence
  Description of Artificial Sequence: Synthetic oligonucleotide
caagcaaugugagaggcuu

SEQ ID NO: 233765 - RNA, 19 nt, Artificial Sequence
  Description of Artificial Sequence: Synthetic oligonucleotide
guuucguguccagauggaa

SEQ ID NO: 233766 - RNA, 19 nt, Artificial Sequence
  Description of Artificial Sequence: Synthetic oligonucleotide
caccucgucgccuaucugu

SEQ ID NO: 233767 - RNA, 19 nt, Artificial Sequence
  Description of Artificial Sequence: Synthetic oligonucleotide
ggcgacaaucaucguagga

SEQ ID NO: 233768 - RNA, 19 nt, Artificial Sequence
  Description of Artificial Sequence: Synthetic oligonucleotide
ggucuuucgggcaaaauuu

SEQ ID NO: 233769 - RNA, 19 nt, Artificial Sequence
  Description of Artificial Sequence: Synthetic oligonucleotide
cugcccguccgugaacuug

SEQ ID NO: 233770 - RNA, 19 nt, Artificial Sequence
  Description of Artificial Sequence: Synthetic oligonucleotide
ggagagguugucagcggug

SEQ ID NO: 233771 - RNA, 19 nt, Artificial Sequence
  Description of Artificial Sequence: Synthetic oligonucleotide
aucaucguaggagggucuu

SEQ ID NO: 233772 - RNA, 19 nt, Artificial Sequence
  Description of Artificial Sequence: Synthetic oligonucleotide
ugccagucgcauagcuuuu

SEQ ID NO: 233773 - RNA, 19 nt, Artificial Sequence
  Description of Artificial Sequence: Synthetic oligonucleotide
aggaaacacggcguccgaa

SEQ ID NO: 233774 - RNA, 19 nt, Artificial Sequence
  Description of Artificial Sequence: Synthetic oligonucleotide
aguauacccgggacuccca

SEQ ID NO: 233775 - RNA, 19 nt, Artificial Sequence
  Description of Artificial Sequence: Synthetic oligonucleotide
gggucuuucgggcaaaauu

SEQ ID NO: 233776 - RNA, 19 nt, Artificial Sequence
  Description of Artificial Sequence: Synthetic oligonucleotide
cagucgcauagcuuuuaaa

SEQ ID NO: 233777 - RNA, 19 nt, Artificial Sequence
  Description of Artificial Sequence: Synthetic oligonucleotide
gucuuucgggcaaaauuua

SEQ ID NO: 233778 - RNA, 19 nt, Artificial Sequence
  Description of Artificial Sequence: Synthetic oligonucleotide
ugucagcggugggacagaa

SEQ ID NO: 233779 - RNA, 19 nt, Artificial Sequence
  Description of Artificial Sequence: Synthetic oligonucleotide
ggcaaucgagcagcuguag

SEQ ID NO: 233780 - RNA, 19 nt, Artificial Sequence
  Description of Artificial Sequence: Synthetic oligonucleotide
guaaccuguuccguugccu

SEQ ID NO: 233781 - RNA, 19 nt, Artificial Sequence
  Description of Artificial Sequence: Synthetic oligonucleotide
cauggugcuuuuggggcca

SEQ ID NO: 233782 - RNA, 19 nt, Artificial Sequence
  Description of Artificial Sequence: Synthetic oligonucleotide
ucaucguaggagggucuuu

SEQ ID NO: 233783 - RNA, 19 nt, Artificial Sequence
  Description of Artificial Sequence: Synthetic oligonucleotide
cauuacugguugugaaaau

SEQ ID NO: 233784 - RNA, 19 nt, Artificial Sequence
  Description of Artificial Sequence: Synthetic oligonucleotide
gcuucaacgcgggcagcgg

SEQ ID NO: 233785 - RNA, 19 nt, Artificial Sequence
  Description of Artificial Sequence: Synthetic oligonucleotide
gaggguugcgucggucaga

SEQ ID NO: 233786 - RNA, 19 nt, Artificial Sequence
  Description of Artificial Sequence: Synthetic oligonucleotide
ucgugaggguugcgucggu

SEQ ID NO: 233787 - RNA, 19 nt, Artificial Sequence
  Description of Artificial Sequence: Synthetic oligonucleotide
acggucccauacaaaguau

SEQ ID NO: 233788 - RNA, 19 nt, Artificial Sequence
  Description of Artificial Sequence: Synthetic oligonucleotide
cuaagcugcacacgucuuu

SEQ ID NO: 233789 - RNA, 19 nt, Artificial Sequence
  Description of Artificial Sequence: Synthetic oligonucleotide
ucaacgcgggcagcggcuu

SEQ ID NO: 233790 - RNA, 19 nt, Artificial Sequence
  Description of Artificial Sequence: Synthetic oligonucleotide
accucgucgccuaucuguu

SEQ ID NO: 233791 - RNA, 19 nt, Artificial Sequence
  Description of Artificial Sequence: Synthetic oligonucleotide
accaugcuugaggcuacaa

SEQ ID NO: 233792 - RNA, 19 nt, Artificial Sequence
  Description of Artificial Sequence: Synthetic oligonucleotide
agggucuuucgggcaaaau

SEQ ID NO: 233793 - RNA, 19 nt, Artificial Sequence
  Description of Artificial Sequence: Synthetic oligonucleotide
gcaucccaaucuuuauuua

SEQ ID NO: 233794 - RNA, 19 nt, Artificial Sequence
  Description of Artificial Sequence: Synthetic oligonucleotide
gccuaccauggauaaaggu

SEQ ID NO: 233795 - RNA, 19 nt, Artificial Sequence
  Description of Artificial Sequence: Synthetic oligonucleotide
cacuuaccuuggcauccca

SEQ ID NO: 233796 - RNA, 19 nt, Artificial Sequence
  Description of Artificial Sequence: Synthetic oligonucleotide
ccugcuagacaucuuugcu

SEQ ID NO: 233797 - RNA, 19 nt, Artificial Sequence
  Description of Artificial Sequence: Synthetic oligonucleotide
ugaccgaauuaggcuuauu

SEQ ID NO: 233798 - RNA, 19 nt, Artificial Sequence
  Description of Artificial Sequence: Synthetic oligonucleotide
uaucaacgugacggacgua

SEQ ID NO: 233799 - RNA, 19 nt, Artificial Sequence
  Description of Artificial Sequence: Synthetic oligonucleotide
cgaaguauaccuccacuua

SEQ ID NO: 233800 - RNA, 19 nt, Artificial Sequence
  Description of Artificial Sequence: Synthetic oligonucleotide
caacgcgggcagcggcuug

SEQ ID NO: 233801 - RNA, 19 nt, Artificial Sequence
  Description of Artificial Sequence: Synthetic oligonucleotide
cacgagucucuaugcaaau

SEQ ID NO: 233802 - RNA, 19 nt, Artificial Sequence
  Description of Artificial Sequence: Synthetic oligonucleotide
gucagcggugggacagaac

SEQ ID NO: 233803 - RNA, 19 nt, Artificial Sequence
  Description of Artificial Sequence: Synthetic oligonucleotide
uacccgggacucccacauu

SEQ ID NO: 233804 - RNA, 19 nt, Artificial Sequence
  Description of Artificial Sequence: Synthetic oligonucleotide
ccacuuaccuuggcauccc

SEQ ID NO: 233805 - RNA, 19 nt, Artificial Sequence
  Description of Artificial Sequence: Synthetic oligonucleotide
ggcguccgaaccacacgag

SEQ ID NO: 233806 - RNA, 19 nt, Artificial Sequence
  Description of Artificial Sequence: Synthetic oligonucleotide
acggcacgauguacuccag

SEQ ID NO: 233807 - RNA, 19 nt, Artificial Sequence
  Description of Artificial Sequence: Synthetic oligonucleotide
uucggccguuuauccugua

SEQ ID NO: 233808 - RNA, 19 nt, Artificial Sequence
  Description of Artificial Sequence: Synthetic oligonucleotide
ggccguuuauccuguaguu

SEQ ID NO: 233809 - RNA, 19 nt, Artificial Sequence
  Description of Artificial Sequence: Synthetic oligonucleotide
ggacguaaccuguuccguu

SEQ ID NO: 233810 - RNA, 19 nt, Artificial Sequence
  Description of Artificial Sequence: Synthetic oligonucleotide
uggcuuucguucggccguu

SEQ ID NO: 233811 - RNA, 19 nt, Artificial Sequence
  Description of Artificial Sequence: Synthetic oligonucleotide
cgggacucccacauuaaaa

SEQ ID NO: 233812 - RNA, 19 nt, Artificial Sequence
  Description of Artificial Sequence: Synthetic oligonucleotide
cgauggucucacagcccgg

SEQ ID NO: 233813 - RNA, 19 nt, Artificial Sequence
  Description of Artificial Sequence: Synthetic oligonucleotide
cccgugucguggagggcgc

SEQ ID NO: 233814 - RNA, 19 nt, Artificial Sequence
  Description of Artificial Sequence: Synthetic oligonucleotide
ccucgucgccuaucuguug

SEQ ID NO: 233815 - RNA, 19 nt, Artificial Sequence
  Description of Artificial Sequence: Synthetic oligonucleotide
gggcaaaauuuaauagcau

SEQ ID NO: 233816 - RNA, 19 nt, Artificial Sequence
  Description of Artificial Sequence: Synthetic oligonucleotide
guucggccguuuauccugu

SEQ ID NO: 233817 - RNA, 19 nt, Artificial Sequence
  Description of Artificial Sequence: Synthetic oligonucleotide
gcguccgaaccacacgagu

SEQ ID NO: 233818 - RNA, 19 nt, Artificial Sequence
  Description of Artificial Sequence: Synthetic oligonucleotide
ccagucgcauagcuuuuaa

SEQ ID NO: 233819 - RNA, 19 nt, Artificial Sequence
  Description of Artificial Sequence: Synthetic oligonucleotide
cggcacgauguacuccagc

SEQ ID NO: 233820 - RNA, 19 nt, Artificial Sequence
  Description of Artificial Sequence: Synthetic oligonucleotide
caaccacacacguguccau

SEQ ID NO: 233821 - RNA, 19 nt, Artificial Sequence
  Description of Artificial Sequence: Synthetic oligonucleotide
gaccuccaggaaaguacau

SEQ ID NO: 233822 - RNA, 19 nt, Artificial Sequence
  Description of Artificial Sequence: Synthetic oligonucleotide
ggucugcccguugggccgc

SEQ ID NO: 233823 - RNA, 19 nt, Artificial Sequence
  Description of Artificial Sequence: Synthetic oligonucleotide
cggcguccgaaccacacga

SEQ ID NO: 233824 - RNA, 19 nt, Artificial Sequence
  Description of Artificial Sequence: Synthetic oligonucleotide
caccaguaacggucccaua

SEQ ID NO: 233825 - RNA, 19 nt, Artificial Sequence
  Description of Artificial Sequence: Synthetic oligonucleotide
acacggcguccgaaccaca

SEQ ID NO: 233826 - RNA, 19 nt, Artificial Sequence
  Description of Artificial Sequence: Synthetic oligonucleotide
gugacggacguaaccuguu

SEQ ID NO: 233827 - RNA, 19 nt, Artificial Sequence
  Description of Artificial Sequence: Synthetic oligonucleotide
ccuauauagggcccuuguu

SEQ ID NO: 233828 - RNA, 19 nt, Artificial Sequence
  Description of Artificial Sequence: Synthetic oligonucleotide
gcguaccuuguagcauaug

SEQ ID NO: 233829 - RNA, 19 nt, Artificial Sequence
  Description of Artificial Sequence: Synthetic oligonucleotide
cggucccauacaaaguaua

SEQ ID NO: 233830 - RNA, 19 nt, Artificial Sequence
  Description of Artificial Sequence: Synthetic oligonucleotide
cgugucguggagggcgcgc

SEQ ID NO: 233831 - RNA, 19 nt, Artificial Sequence
  Description of Artificial Sequence: Synthetic oligonucleotide
ccgggacucccacauuaaa

SEQ ID NO: 233832 - RNA, 19 nt, Artificial Sequence
  Description of Artificial Sequence: Synthetic oligonucleotide
cggccguuuauccuguagu

SEQ ID NO: 233833 - RNA, 19 nt, Artificial Sequence
  Description of Artificial Sequence: Synthetic oligonucleotide
gccagucgcauagcuuuua

SEQ ID NO: 233834 - RNA, 19 nt, Artificial Sequence
  Description of Artificial Sequence: Synthetic oligonucleotide
cgugaggguugcgucgguc

SEQ ID NO: 233835 - RNA, 19 nt, Artificial Sequence
  Description of Artificial Sequence: Synthetic oligonucleotide
cacuggcgacaaucaucgu

SEQ ID NO: 233836 - RNA, 19 nt, Artificial Sequence
  Description of Artificial Sequence: Synthetic oligonucleotide
ccgugucguggagggcgcg

SEQ ID NO: 233837 - RNA, 19 nt, Artificial Sequence
  Description of Artificial Sequence: Synthetic oligonucleotide
gcccguccgugaacuugcc

SEQ ID NO: 233838 - RNA, 19 nt, Artificial Sequence
  Description of Artificial Sequence: Synthetic oligonucleotide
cgcaccucgucgccuaucu

SEQ ID NO: 233839 - RNA, 19 nt, Artificial Sequence
  Description of Artificial Sequence: Synthetic oligonucleotide
ccccgaauucaaacuugau

SEQ ID NO: 233840 - RNA, 19 nt, Artificial Sequence
  Description of Artificial Sequence: Synthetic oligonucleotide
gcgcaccucgucgccuauc

SEQ ID NO: 233841 - RNA, 19 nt, Artificial Sequence
  Description of Artificial Sequence: Synthetic oligonucleotide
cggggaaaacuguggcagu

SEQ ID NO: 233842 - RNA, 19 nt, Artificial Sequence
  Description of Artificial Sequence: Synthetic oligonucleotide
cggacguaaccuguuccgu

SEQ ID NO: 233843 - RNA, 19 nt, Artificial Sequence
  Description of Artificial Sequence: Synthetic oligonucleotide
gcugcccguccgugaacuu

SEQ ID NO: 233844 - RNA, 19 nt, Artificial Sequence
  Description of Artificial Sequence: Synthetic oligonucleotide
ccccucacgcaagcacagu

SEQ ID NO: 233845 - RNA, 19 nt, Artificial Sequence
  Description of Artificial Sequence: Synthetic oligonucleotide
cgcgcaccucgucgccuau

SEQ ID NO: 233846 - RNA, 19 nt, Artificial Sequence
  Description of Artificial Sequence: Synthetic oligonucleotide
aaauacuucuggcacacgc

SEQ ID NO: 233847 - RNA, 19 nt, Artificial Sequence
  Description of Artificial Sequence: Synthetic oligonucleotide
uuuacaucccacaagauau

SEQ ID NO: 233848 - RNA, 19 nt, Artificial Sequence
  Description of Artificial Sequence: Synthetic oligonucleotide
aaaacuaaccugucucacg

SEQ ID NO: 233849 - RNA, 19 nt, Artificial Sequence
  Description of Artificial Sequence: Synthetic oligonucleotide
ucuguauucguacugaaaa

SEQ ID NO: 233850 - RNA, 19 nt, Artificial Sequence
  Description of Artificial Sequence: Synthetic oligonucleotide
auaaacagguauugcgucc

SEQ ID NO: 233851 - RNA, 19 nt, Artificial Sequence
  Description of Artificial Sequence: Synthetic oligonucleotide
uuccguaccacucugggag

SEQ ID NO: 233852 - RNA, 19 nt, Artificial Sequence
  Description of Artificial Sequence: Synthetic oligonucleotide
aaacuaaccugucucacga

SEQ ID NO: 233853 - RNA, 19 nt, Artificial Sequence
  Description of Artificial Sequence: Synthetic oligonucleotide
cuuaaugaaccacugucgg

SEQ ID NO: 233854 - RNA, 19 nt, Artificial Sequence
  Description of Artificial Sequence: Synthetic oligonucleotide
cucacgacggucuaaaccc

SEQ ID NO: 233855 - RNA, 19 nt, Artificial Sequence
  Description of Artificial Sequence: Synthetic oligonucleotide
ugauaaacagguauugcgu

SEQ ID NO: 233856 - RNA, 19 nt, Artificial Sequence
  Description of Artificial Sequence: Synthetic oligonucleotide
uaaugaaccacugucggag

SEQ ID NO: 233857 - RNA, 19 nt, Artificial Sequence
  Description of Artificial Sequence: Synthetic oligonucleotide
uucguacugaaaaucaaga

SEQ ID NO: 233858 - RNA, 19 nt, Artificial Sequence
  Description of Artificial Sequence: Synthetic oligonucleotide
caugggauugauaaccugc

SEQ ID NO: 233859 - RNA, 19 nt, Artificial Sequence
  Description of Artificial Sequence: Synthetic oligonucleotide
ucccaguuaaccaaggccu

SEQ ID NO: 233860 - RNA, 19 nt, Artificial Sequence
  Description of Artificial Sequence: Synthetic oligonucleotide
gaucaagcgagcuuuugcc

SEQ ID NO: 233861 - RNA, 19 nt, Artificial Sequence
  Description of Artificial Sequence: Synthetic oligonucleotide
uauuccguaccacucuggg

SEQ ID NO: 233862 - RNA, 19 nt, Artificial Sequence
  Description of Artificial Sequence: Synthetic oligonucleotide
aaugauaggaagagccgac

SEQ ID NO: 233863 - RNA, 19 nt, Artificial Sequence
  Description of Artificial Sequence: Synthetic oligonucleotide
acuaaccugucucacgacg

SEQ ID NO: 233864 - RNA, 19 nt, Artificial Sequence
  Description of Artificial Sequence: Synthetic oligonucleotide
agacgaaccuuccuaaguc

SEQ ID NO: 233865 - RNA, 19 nt, Artificial Sequence
  Description of Artificial Sequence: Synthetic oligonucleotide
ggauugauaaccugcaugc

SEQ ID NO: 233866 - RNA, 19 nt, Artificial Sequence
  Description of Artificial Sequence: Synthetic oligonucleotide
ucacguucccuauuagugg

SEQ ID NO: 233867 - RNA, 19 nt, Artificial Sequence
  Description of Artificial Sequence: Synthetic oligonucleotide
uguaaauacuucuggcaca

SEQ ID NO: 233868 - RNA, 19 nt, Artificial Sequence
  Description of Artificial Sequence: Synthetic oligonucleotide
uaguagucuggcaaacagg

SEQ ID NO: 233869 - RNA, 19 nt, Artificial Sequence
  Description of Artificial Sequence: Synthetic oligonucleotide
aucaagcgagcuuuugccc

SEQ ID NO: 233870 - RNA, 19 nt, Artificial Sequence
  Description of Artificial Sequence: Synthetic oligonucleotide
aucuggugaaguuucaaug

SEQ ID NO: 233871 - RNA, 19 nt, Artificial Sequence
  Description of Artificial Sequence: Synthetic oligonucleotide
guaguagucuggcaaacag

SEQ ID NO: 233872 - RNA, 19 nt, Artificial Sequence
  Description of Artificial Sequence: Synthetic oligonucleotide
gauaaacagguauugcguc

SEQ ID NO: 233873 - RNA, 19 nt, Artificial Sequence
  Description of Artificial Sequence: Synthetic oligonucleotide
cacaagauauccuucucag

SEQ ID NO: 233874 - RNA, 19 nt, Artificial Sequence
  Description of Artificial Sequence: Synthetic oligonucleotide
uugauaaccugcaugccuc

SEQ ID NO: 233875 - RNA, 19 nt, Artificial Sequence
  Description of Artificial Sequence: Synthetic oligonucleotide
aacaccguuugaucuacug

SEQ ID NO: 233876 - RNA, 19 nt, Artificial Sequence
  Description of Artificial Sequence: Synthetic oligonucleotide
uggaccuaaaccucagcag

SEQ ID NO: 233877 - RNA, 19 nt, Artificial Sequence
  Description of Artificial Sequence: Synthetic oligonucleotide
uguauucguacugaaaauc

SEQ ID NO: 233878 - RNA, 19 nt, Artificial Sequence
  Description of Artificial Sequence: Synthetic oligonucleotide
uagaauuugggcuucgauu

SEQ ID NO: 233879 - RNA, 19 nt, Artificial Sequence
  Description of Artificial Sequence: Synthetic oligonucleotide
acggucuaaacccagcuca

SEQ ID NO: 233880 - RNA, 19 nt, Artificial Sequence
  Description of Artificial Sequence: Synthetic oligonucleotide
uuaucugucgaugccacca

SEQ ID NO: 233881 - RNA, 19 nt, Artificial Sequence
  Description of Artificial Sequence: Synthetic oligonucleotide
acaccguuugaucuacugg

SEQ ID NO: 233882 - RNA, 19 nt, Artificial Sequence
  Description of Artificial Sequence: Synthetic oligonucleotide
uccaaaugcaucccacccc

SEQ ID NO: 233883 - RNA, 19 nt, Artificial Sequence
  Description of Artificial Sequence: Synthetic oligonucleotide
aaacucacggcuguggaga

SEQ ID NO: 233884 - RNA, 19 nt, Artificial Sequence
  Description of Artificial Sequence: Synthetic oligonucleotide
uuauuccguaccacucugg

SEQ ID NO: 233885 - RNA, 19 nt, Artificial Sequence
  Description of Artificial Sequence: Synthetic oligonucleotide
uucgauuuaucauccucug

SEQ ID NO: 233886 - RNA, 19 nt, Artificial Sequence
  Description of Artificial Sequence: Synthetic oligonucleotide
aacuaaccugucucacgac

SEQ ID NO: 233887 - RNA, 19 nt, Artificial Sequence
  Description of Artificial Sequence: Synthetic oligonucleotide
uuaaugaaccacugucgga

SEQ ID NO: 233888 - RNA, 19 nt, Artificial Sequence
  Description of Artificial Sequence: Synthetic oligonucleotide
uauucguacugaaaaucaa

SEQ ID NO: 233889 - RNA, 19 nt, Artificial Sequence
  Description of Artificial Sequence: Synthetic oligonucleotide
uacuggaucccaguuaacc

SEQ ID NO: 233890 - RNA, 19 nt, Artificial Sequence
  Description of Artificial Sequence: Synthetic oligonucleotide
uagacgaaccuuccuaagu

SEQ ID NO: 233891 - RNA, 19 nt, Artificial Sequence
  Description of Artificial Sequence: Synthetic oligonucleotide
aaccguguugucagggacc

SEQ ID NO: 233892 - RNA, 19 nt, Artificial Sequence
  Description of Artificial Sequence: Synthetic oligonucleotide
ucuggaaccucgcaauggu

SEQ ID NO: 233893 - RNA, 19 nt, Artificial Sequence
  Description of Artificial Sequence: Synthetic oligonucleotide
cacguucccuauuaguggg

SEQ ID NO: 233894 - RNA, 19 nt, Artificial Sequence
  Description of Artificial Sequence: Synthetic oligonucleotide
ugugaaaugggugguuacc

SEQ ID NO: 233895 - RNA, 19 nt, Artificial Sequence
  Description of Artificial Sequence: Synthetic oligonucleotide
uagugggugaacaauccaa

SEQ ID NO: 233896 - RNA, 19 nt, Artificial Sequence
  Description of Artificial Sequence: Synthetic oligonucleotide
uguagacucguauguggcc

SEQ ID NO: 233897 - RNA, 19 nt, Artificial Sequence
  Description of Artificial Sequence: Synthetic oligonucleotide
acgcuuggccgccacaagc

SEQ ID NO: 233898 - RNA, 19 nt, Artificial Sequence
  Description of Artificial Sequence: Synthetic oligonucleotide
auucguacugaaaaucaag

SEQ ID NO: 233899 - RNA, 19 nt, Artificial Sequence
  Description of Artificial Sequence: Synthetic oligonucleotide
ucaagcgagcuuuugcccu

SEQ ID NO: 233900 - RNA, 19 nt, Artificial Sequence
  Description of Artificial Sequence: Synthetic oligonucleotide
gaggguguagacucguaug

SEQ ID NO: 233901 - RNA, 19 nt, Artificial Sequence
  Description of Artificial Sequence: Synthetic oligonucleotide
ucguagaguuugauaaaca

SEQ ID NO: 233902 - RNA, 19 nt, Artificial Sequence
  Description of Artificial Sequence: Synthetic oligonucleotide
uugaucuacuggaucccag

SEQ ID NO: 233903 - RNA, 19 nt, Artificial Sequence
  Description of Artificial Sequence: Synthetic oligonucleotide
uggaucccaguuaaccaag

SEQ ID NO: 233904 - RNA, 19 nt, Artificial Sequence
  Description of Artificial Sequence: Synthetic oligonucleotide
ucgcuaugaacgcuuggcc

SEQ ID NO: 233905 - RNA, 19 nt, Artificial Sequence
  Description of Artificial Sequence: Synthetic oligonucleotide
uguuaccucuaacuucucu

SEQ ID NO: 233906 - RNA, 19 nt, Artificial Sequence
  Description of Artificial Sequence: Synthetic oligonucleotide
uguacucccagagguuucg

SEQ ID NO: 233907 - RNA, 19 nt, Artificial Sequence
  Description of Artificial Sequence: Synthetic oligonucleotide
uugcaagagggcacuacug

SEQ ID NO: 233908 - RNA, 19 nt, Artificial Sequence
  Description of Artificial Sequence: Synthetic oligonucleotide
acaccguuguguuuggacu

SEQ ID NO: 233909 - RNA, 19 nt, Artificial Sequence
  Description of Artificial Sequence: Synthetic oligonucleotide
aaagcgacgucgcuaugaa

SEQ ID NO: 233910 - RNA, 19 nt, Artificial Sequence
  Description of Artificial Sequence: Synthetic oligonucleotide
ugucgaugccaccaauucu

SEQ ID NO: 233911 - RNA, 19 nt, Artificial Sequence
  Description of Artificial Sequence: Synthetic oligonucleotide
ucgauuuaucauccucuga

SEQ ID NO: 233912 - RNA, 19 nt, Artificial Sequence
  Description of Artificial Sequence: Synthetic oligonucleotide
ugaucuacuggaucccagu

SEQ ID NO: 233913 - RNA, 19 nt, Artificial Sequence
  Description of Artificial Sequence: Synthetic oligonucleotide
cauguuaccucuaacuucu

SEQ ID NO: 233914 - RNA, 19 nt, Artificial Sequence
  Description of Artificial Sequence: Synthetic oligonucleotide
gggauugauaaccugcaug

SEQ ID NO: 233915 - RNA, 19 nt, Artificial Sequence
  Description of Artificial Sequence: Synthetic oligonucleotide
gaucccaguuaaccaaggc

SEQ ID NO: 233916 - RNA, 19 nt, Artificial Sequence
  Description of Artificial Sequence: Synthetic oligonucleotide
guauucguacugaaaauca

SEQ ID NO: 233917 - RNA, 19 nt, Artificial Sequence
  Description of Artificial Sequence: Synthetic oligonucleotide
ugucggagguauuucuucu

SEQ ID NO: 233918 - RNA, 19 nt, Artificial Sequence
  Description of Artificial Sequence: Synthetic oligonucleotide
aguccuugccucgaugaac

SEQ ID NO: 233919 - RNA, 19 nt, Artificial Sequence
  Description of Artificial Sequence: Synthetic oligonucleotide
uacucccagagguuucggg

SEQ ID NO: 233920 - RNA, 19 nt, Artificial Sequence
  Description of Artificial Sequence: Synthetic oligonucleotide
aucuagacgaaccuuccua

SEQ ID NO: 233921 - RNA, 19 nt, Artificial Sequence
  Description of Artificial Sequence: Synthetic oligonucleotide
ugaggguguagacucguau

SEQ ID NO: 233922 - RNA, 19 nt, Artificial Sequence
  Description of Artificial Sequence: Synthetic oligonucleotide
agcaggauuaccauggcaa

SEQ ID NO: 233923 - RNA, 19 nt, Artificial Sequence
  Description of Artificial Sequence: Synthetic oligonucleotide
ucccugucccagcugaagc

SEQ ID NO: 233924 - RNA, 19 nt, Artificial Sequence
  Description of Artificial Sequence: Synthetic oligonucleotide
agagcguccucaaacucac

SEQ ID NO: 233925 - RNA, 19 nt, Artificial Sequence
  Description of Artificial Sequence: Synthetic oligonucleotide
gacaacgaugggaacuucc

SEQ ID NO: 233926 - RNA, 19 nt, Artificial Sequence
  Description of Artificial Sequence: Synthetic oligonucleotide
caccguuugaucuacugga

SEQ ID NO: 233927 - RNA, 19 nt, Artificial Sequence
  Description of Artificial Sequence: Synthetic oligonucleotide
gguccuugaacccugguca

SEQ ID NO: 233928 - RNA, 19 nt, Artificial Sequence
  Description of Artificial Sequence: Synthetic oligonucleotide
aaugggugguuaccugagu

SEQ ID NO: 233929 - RNA, 19 nt, Artificial Sequence
  Description of Artificial Sequence: Synthetic oligonucleotide
uuaccucuaacuucucuuu

SEQ ID NO: 233930 - RNA, 19 nt, Artificial Sequence
  Description of Artificial Sequence: Synthetic oligonucleotide
cuuuacaucccacaagaua

SEQ ID NO: 233931 - RNA, 19 nt, Artificial Sequence
  Description of Artificial Sequence: Synthetic oligonucleotide
gaaccguguugucagggac

SEQ ID NO: 233932 - RNA, 19 nt, Artificial Sequence
  Description of Artificial Sequence: Synthetic oligonucleotide
ucacggucuguauucguac

SEQ ID NO: 233933 - RNA, 19 nt, Artificial Sequence
  Description of Artificial Sequence: Synthetic oligonucleotide
aauuugggcuucgauuuau

SEQ ID NO: 233934 - RNA, 19 nt, Artificial Sequence
  Description of Artificial Sequence: Synthetic oligonucleotide
caaacucacggcuguggag

SEQ ID NO: 233935 - RNA, 19 nt, Artificial Sequence
  Description of Artificial Sequence: Synthetic oligonucleotide
uuugaucuacuggauccca

SEQ ID NO: 233936 - RNA, 19 nt, Artificial Sequence
  Description of Artificial Sequence: Synthetic oligonucleotide
gcuaugaacgcuuggccgc

SEQ ID NO: 233937 - RNA, 19 nt, Artificial Sequence
  Description of Artificial Sequence: Synthetic oligonucleotide
gacgaaccuuccuaaguca

SEQ ID NO: 233938 - RNA, 19 nt, Artificial Sequence
  Description of Artificial Sequence: Synthetic oligonucleotide
uuacaucccacaagauauc

SEQ ID NO: 233939 - RNA, 19 nt, Artificial Sequence
  Description of Artificial Sequence: Synthetic oligonucleotide
caucccaggcauaaugguc

SEQ ID NO: 233940 - RNA, 19 nt, Artificial Sequence
  Description of Artificial Sequence: Synthetic oligonucleotide
agcgcgucggucuuuacau

SEQ ID NO: 233941 - RNA, 19 nt, Artificial Sequence
  Description of Artificial Sequence: Synthetic oligonucleotide
aucacaccggcaucccagg

SEQ ID NO: 233942 - RNA, 19 nt, Artificial Sequence
  Description of Artificial Sequence: Synthetic oligonucleotide
agccaguuaucccuguggu

SEQ ID NO: 233943 - RNA, 19 nt, Artificial Sequence
  Description of Artificial Sequence: Synthetic oligonucleotide
cacaccguuguguuuggac

SEQ ID NO: 233944 - RNA, 19 nt, Artificial Sequence
  Description of Artificial Sequence: Synthetic oligonucleotide
aacgcuuggccgccacaag

SEQ ID NO: 233945 - RNA, 19 nt, Artificial Sequence
  Description of Artificial Sequence: Synthetic oligonucleotide
ccuaaaccucagcagaucc

SEQ ID NO: 233946 - RNA, 19 nt, Artificial Sequence
  Description of Artificial Sequence: Synthetic oligonucleotide
ugauaggccaguccagcuu

SEQ ID NO: 233947 - RNA, 19 nt, Artificial Sequence
  Description of Artificial Sequence: Synthetic oligonucleotide
gugguuaccugaguuauga

SEQ ID NO: 233948 - RNA, 19 nt, Artificial Sequence
  Description of Artificial Sequence: Synthetic oligonucleotide
gaagcaucacaccggcauc

SEQ ID NO: 233949 - RNA, 19 nt, Artificial Sequence
  Description of Artificial Sequence: Synthetic oligonucleotide
ucugugaaaugggugguua

SEQ ID NO: 233950 - RNA, 19 nt, Artificial Sequence
  Description of Artificial Sequence: Synthetic oligonucleotide
cugugaaaugggugguuac

SEQ ID NO: 233951 - RNA, 19 nt, Artificial Sequence
  Description of Artificial Sequence: Synthetic oligonucleotide
guguagacucguauguggc

SEQ ID NO: 233952 - RNA, 19 nt, Artificial Sequence
  Description of Artificial Sequence: Synthetic oligonucleotide
cugcaugccucucauuuuc

SEQ ID NO: 233953 - RNA, 19 nt, Artificial Sequence
  Description of Artificial Sequence: Synthetic oligonucleotide
uugaaucuagacgaaccuu

SEQ ID NO: 233954 - RNA, 19 nt, Artificial Sequence
  Description of Artificial Sequence: Synthetic oligonucleotide
agagccgacaucgaaggau

SEQ ID NO: 233955 - RNA, 19 nt, Artificial Sequence
  Description of Artificial Sequence: Synthetic oligonucleotide
gugaacaauccaacgcuug

SEQ ID NO: 233956 - RNA, 19 nt, Artificial Sequence
  Description of Artificial Sequence: Synthetic oligonucleotide
uugucagaggacaggcaua

SEQ ID NO: 233957 - RNA, 19 nt, Artificial Sequence
  Description of Artificial Sequence: Synthetic oligonucleotide
ucacgacggucuaaaccca

SEQ ID NO: 233958 - RNA, 19 nt, Artificial Sequence
  Description of Artificial Sequence: Synthetic oligonucleotide
ugucucacgacggucuaaa

SEQ ID NO: 233959 - RNA, 19 nt, Artificial Sequence
  Description of Artificial Sequence: Synthetic oligonucleotide
gacggucuaaacccagcuc

SEQ ID NO: 233960 - RNA, 19 nt, Artificial Sequence
  Description of Artificial Sequence: Synthetic oligonucleotide
aucuacuggaucccaguua

SEQ ID NO: 233961 - RNA, 19 nt, Artificial Sequence
  Description of Artificial Sequence: Synthetic oligonucleotide
augaacgcuuggccgccac

SEQ ID NO: 233962 - RNA, 19 nt, Artificial Sequence
  Description of Artificial Sequence: Synthetic oligonucleotide
gcuuucacggucuguauuc

SEQ ID NO: 233963 - RNA, 19 nt, Artificial Sequence
  Description of Artificial Sequence: Synthetic oligonucleotide
cuugaacccuggucacucc

SEQ ID NO: 233964 - RNA, 19 nt, Artificial Sequence
  Description of Artificial Sequence: Synthetic oligonucleotide
acgaaccuuccuaagucag

SEQ ID NO: 233965 - RNA, 19 nt, Artificial Sequence
  Description of Artificial Sequence: Synthetic oligonucleotide
ugcaugccucucauuuucu

SEQ ID NO: 233966 - RNA, 19 nt, Artificial Sequence
  Description of Artificial Sequence: Synthetic oligonucleotide
guguacuccuucguccacg

SEQ ID NO: 233967 - RNA, 19 nt, Artificial Sequence
  Description of Artificial Sequence: Synthetic oligonucleotide
ucgaguccuugccucgaug

SEQ ID NO: 233968 - RNA, 19 nt, Artificial Sequence
  Description of Artificial Sequence: Synthetic oligonucleotide
aacgccaugaacagccaua

SEQ ID NO: 233969 - RNA, 19 nt, Artificial Sequence
  Description of Artificial Sequence: Synthetic oligonucleotide
aggguaaaacuaaccuguc

SEQ ID NO: 233970 - RNA, 19 nt, Artificial Sequence
  Description of Artificial Sequence: Synthetic oligonucleotide
agguuucgggccuugguuu

SEQ ID NO: 233971 - RNA, 19 nt, Artificial Sequence
  Description of Artificial Sequence: Synthetic oligonucleotide
uggccaacaccguuugauc

SEQ ID NO: 233972 - RNA, 19 nt, Artificial Sequence
  Description of Artificial Sequence: Synthetic oligonucleotide
uuaucccugugguaacuuu

SEQ ID NO: 233973 - RNA, 19 nt, Artificial Sequence
  Description of Artificial Sequence: Synthetic oligonucleotide
ugggauugauaaccugcau

SEQ ID NO: 233974 - RNA, 19 nt, Artificial Sequence
  Description of Artificial Sequence: Synthetic oligonucleotide
acgacggucuaaacccagc

SEQ ID NO: 233975 - RNA, 19 nt, Artificial Sequence
  Description of Artificial Sequence: Synthetic oligonucleotide
uaccucuaacuucucuuuu

SEQ ID NO: 233976 - RNA, 19 nt, Artificial Sequence
  Description of Artificial Sequence: Synthetic oligonucleotide
cuugcacaaacaggggcug

SEQ ID NO: 233977 - RNA, 19 nt, Artificial Sequence
  Description of Artificial Sequence: Synthetic oligonucleotide
cuggaucccaguuaaccaa

SEQ ID NO: 233978 - RNA, 19 nt, Artificial Sequence
  Description of Artificial Sequence: Synthetic oligonucleotide
uuucggcaggcaauccaaa

SEQ ID NO: 233979 - RNA, 19 nt, Artificial Sequence
  Description of Artificial Sequence: Synthetic oligonucleotide
cucguacugagcaggauua

SEQ ID NO: 233980 - RNA, 19 nt, Artificial Sequence
  Description of Artificial Sequence: Synthetic oligonucleotide
aacucacggcuguggagaa

SEQ ID NO: 233981 - RNA, 19 nt, Artificial Sequence
  Description of Artificial Sequence: Synthetic oligonucleotide
gguuaccugaguuaugacu

SEQ ID NO: 233982 - RNA, 19 nt, Artificial Sequence
  Description of Artificial Sequence: Synthetic oligonucleotide
uggcaaacagguagugauu

SEQ ID NO: 233983 - RNA, 19 nt, Artificial Sequence
  Description of Artificial Sequence: Synthetic oligonucleotide
agcucacguucccuauuag

SEQ ID NO: 233984 - RNA, 19 nt, Artificial Sequence
  Description of Artificial Sequence: Synthetic oligonucleotide
cuaugaacgcuuggccgcc

SEQ ID NO: 233985 - RNA, 19 nt, Artificial Sequence
  Description of Artificial Sequence: Synthetic oligonucleotide
uguaugcugucaguuucuc

SEQ ID NO: 233986 - RNA, 19 nt, Artificial Sequence
  Description of Artificial Sequence: Synthetic oligonucleotide
gguaacuuuucugacaccu

SEQ ID NO: 233987 - RNA, 19 nt, Artificial Sequence
  Description of Artificial Sequence: Synthetic oligonucleotide
cuggaaccucgcaauggug

SEQ ID NO: 233988 - RNA, 19 nt, Artificial Sequence
  Description of Artificial Sequence: Synthetic oligonucleotide
ugaacgcuuggccgccaca

SEQ ID NO: 233989 - RNA, 19 nt, Artificial Sequence
  Description of Artificial Sequence: Synthetic oligonucleotide
cacgacggucuaaacccag

SEQ ID NO: 233990 - RNA, 19 nt, Artificial Sequence
  Description of Artificial Sequence: Synthetic oligonucleotide
ucauggacuuuguccuggu

SEQ ID NO: 233991 - RNA, 19 nt, Artificial Sequence
  Description of Artificial Sequence: Synthetic oligonucleotide
cugacccucgaguccuugc

SEQ ID NO: 233992 - RNA, 19 nt, Artificial Sequence
  Description of Artificial Sequence: Synthetic oligonucleotide
gagcgcgucggucuuuaca

SEQ ID NO: 233993 - RNA, 19 nt, Artificial Sequence
  Description of Artificial Sequence: Synthetic oligonucleotide
gagguuaugugaggagcca

SEQ ID NO: 233994 - RNA, 19 nt, Artificial Sequence
  Description of Artificial Sequence: Synthetic oligonucleotide
gccacaagccaguuauccc

SEQ ID NO: 233995 - RNA, 19 nt, Artificial Sequence
  Description of Artificial Sequence: Synthetic oligonucleotide
uccuucguccacgucccug

SEQ ID NO: 233996 - RNA, 19 nt, Artificial Sequence
  Description of Artificial Sequence: Synthetic oligonucleotide
aagcgagcuuuugcccuuc

SEQ ID NO: 233997 - RNA, 19 nt, Artificial Sequence
  Description of Artificial Sequence: Synthetic oligonucleotide
accugucucacgacggucu

SEQ ID NO: 233998 - RNA, 19 nt, Artificial Sequence
  Description of Artificial Sequence: Synthetic oligonucleotide
guagagccggacuguguca

SEQ ID NO: 233999 - RNA, 19 nt, Artificial Sequence
  Description of Artificial Sequence: Synthetic oligonucleotide
ccugugguuaggagaaaug

SEQ ID NO: 234000 - RNA, 19 nt, Artificial Sequence
  Description of Artificial Sequence: Synthetic oligonucleotide
acaucccacaagauauccu

SEQ ID NO: 234001 - RNA, 19 nt, Artificial Sequence
  Description of Artificial Sequence: Synthetic oligonucleotide
gaacgcuuggccgccacaa

SEQ ID NO: 234002 - RNA, 19 nt, Artificial Sequence
  Description of Artificial Sequence: Synthetic oligonucleotide
gaaccucgcaaugguguca

SEQ ID NO: 234003 - RNA, 19 nt, Artificial Sequence
  Description of Artificial Sequence: Synthetic oligonucleotide
cuacuggaucccaguuaac

SEQ ID NO: 234004 - RNA, 19 nt, Artificial Sequence
  Description of Artificial Sequence: Synthetic oligonucleotide
gugaaaugggugguuaccu

SEQ ID NO: 234005 - RNA, 19 nt, Artificial Sequence
  Description of Artificial Sequence: Synthetic oligonucleotide
aggccccgcuuucacgguc

SEQ ID NO: 234006 - RNA, 19 nt, Artificial Sequence
  Description of Artificial Sequence: Synthetic oligonucleotide
gagguuucgggccuugguu

SEQ ID NO: 234007 - RNA, 19 nt, Artificial Sequence
  Description of Artificial Sequence: Synthetic oligonucleotide
ucguacugagcaggauuac

SEQ ID NO: 234008 - RNA, 19 nt, Artificial Sequence
  Description of Artificial Sequence: Synthetic oligonucleotide
ggaucccaguuaaccaagg

SEQ ID NO: 234009 - RNA, 19 nt, Artificial Sequence
  Description of Artificial Sequence: Synthetic oligonucleotide
accugaguuaugacugagu

SEQ ID NO: 234010 - RNA, 19 nt, Artificial Sequence
  Description of Artificial Sequence: Synthetic oligonucleotide
cauggacuuuguccugguc

SEQ ID NO: 234011 - RNA, 19 nt, Artificial Sequence
  Description of Artificial Sequence: Synthetic oligonucleotide
guaguguguacuccuucgu

SEQ ID NO: 234012 - RNA, 19 nt, Artificial Sequence
  Description of Artificial Sequence: Synthetic oligonucleotide
guaugggaacauggagagc

SEQ ID NO: 234013 - RNA, 19 nt, Artificial Sequence
  Description of Artificial Sequence: Synthetic oligonucleotide
cuguauucguacugaaaau

SEQ ID NO: 234014 - RNA, 19 nt, Artificial Sequence
  Description of Artificial Sequence: Synthetic oligonucleotide
gucuguauucguacugaaa

SEQ ID NO: 234015 - RNA, 19 nt, Artificial Sequence
  Description of Artificial Sequence: Synthetic oligonucleotide
guacucccagagguuucgg

SEQ ID NO: 234016 - RNA, 19 nt, Artificial Sequence
  Description of Artificial Sequence: Synthetic oligonucleotide
cauagaauuugggcuucga

SEQ ID NO: 234017 - RNA, 19 nt, Artificial Sequence
  Description of Artificial Sequence: Synthetic oligonucleotide
ggcacuacugagucccauc

SEQ ID NO: 234018 - RNA, 19 nt, Artificial Sequence
  Description of Artificial Sequence: Synthetic oligonucleotide
ucuggacgccugcucuuuu

SEQ ID NO: 234019 - RNA, 19 nt, Artificial Sequence
  Description of Artificial Sequence: Synthetic oligonucleotide
uaugaacgcuuggccgcca

SEQ ID NO: 234020 - RNA, 19 nt, Artificial Sequence
  Description of Artificial Sequence: Synthetic oligonucleotide
gaucgugaggccccgcuuu

SEQ ID NO: 234021 - RNA, 19 nt, Artificial Sequence
  Description of Artificial Sequence: Synthetic oligonucleotide
caucacuggugugaggcaa

SEQ ID NO: 234022 - RNA, 19 nt, Artificial Sequence
  Description of Artificial Sequence: Synthetic oligonucleotide
accguuugaucuacuggau

SEQ ID NO: 234023 - RNA, 19 nt, Artificial Sequence
  Description of Artificial Sequence: Synthetic oligonucleotide
ccuauuagugggugaacaa

SEQ ID NO: 234024 - RNA, 19 nt, Artificial Sequence
  Description of Artificial Sequence: Synthetic oligonucleotide
ugacaacgaugggaacuuc

SEQ ID NO: 234025 - RNA, 19 nt, Artificial Sequence
  Description of Artificial Sequence: Synthetic oligonucleotide
gacucguauguggcccaug

SEQ ID NO: 234026 - RNA, 19 nt, Artificial Sequence
  Description of Artificial Sequence: Synthetic oligonucleotide
ggccaacaccguuugaucu

SEQ ID NO: 234027 - RNA, 19 nt, Artificial Sequence
  Description of Artificial Sequence: Synthetic oligonucleotide
gcuggaccuaaaccucagc

SEQ ID NO: 234028 - RNA, 19 nt, Artificial Sequence
  Description of Artificial Sequence: Synthetic oligonucleotide
ggucuguauucguacugaa

SEQ ID NO: 234029 - RNA, 19 nt, Artificial Sequence
  Description of Artificial Sequence: Synthetic oligonucleotide
cugauaggccaguccagcu

SEQ ID NO: 234030 - RNA, 19 nt, Artificial Sequence
  Description of Artificial Sequence: Synthetic oligonucleotide
cccaguuaaccaaggccuc

SEQ ID NO: 234031 - RNA, 19 nt, Artificial Sequence
  Description of Artificial Sequence: Synthetic oligonucleotide
agcgagcuuuugcccuucu

SEQ ID NO: 234032 - RNA, 19 nt, Artificial Sequence
  Description of Artificial Sequence: Synthetic oligonucleotide
cagcuugccagaaggguau

SEQ ID NO: 234033 - RNA, 19 nt, Artificial Sequence
  Description of Artificial Sequence: Synthetic oligonucleotide
cccucgaguccuugccucg

SEQ ID NO: 234034 - RNA, 19 nt, Artificial Sequence
  Description of Artificial Sequence: Synthetic oligonucleotide
gcuugcaagagggcacuac

SEQ ID NO: 234035 - RNA, 19 nt, Artificial Sequence
  Description of Artificial Sequence: Synthetic oligonucleotide
acgucgcuaugaacgcuug

SEQ ID NO: 234036 - RNA, 19 nt, Artificial Sequence
  Description of Artificial Sequence: Synthetic oligonucleotide
cccaacucacucuggagaa

SEQ ID NO: 234037 - RNA, 19 nt, Artificial Sequence
  Description of Artificial Sequence: Synthetic oligonucleotide
ggcuggaccuaaaccucag

SEQ ID NO: 234038 - RNA, 19 nt, Artificial Sequence
  Description of Artificial Sequence: Synthetic oligonucleotide
agcuugccagaaggguaug

SEQ ID NO: 234039 - RNA, 19 nt, Artificial Sequence
  Description of Artificial Sequence: Synthetic oligonucleotide
agggaacugcagccgugua

SEQ ID NO: 234040 - RNA, 19 nt, Artificial Sequence
  Description of Artificial Sequence: Synthetic oligonucleotide
gacgucgcuaugaacgcuu

SEQ ID NO: 234041 - RNA, 19 nt, Artificial Sequence
  Description of Artificial Sequence: Synthetic oligonucleotide
gcucacguucccuauuagu

SEQ ID NO: 234042 - RNA, 19 nt, Artificial Sequence
  Description of Artificial Sequence: Synthetic oligonucleotide
cacggucuguauucguacu

SEQ ID NO: 234043 - RNA, 19 nt, Artificial Sequence
  Description of Artificial Sequence: Synthetic oligonucleotide
gcgagcuuuugcccuucug

SEQ ID NO: 234044 - RNA, 19 nt, Artificial Sequence
  Description of Artificial Sequence: Synthetic oligonucleotide
caccguuguguuuggacuu

SEQ ID NO: 234045 - RNA, 19 nt, Artificial Sequence
  Description of Artificial Sequence: Synthetic oligonucleotide
cggucuaaacccagcucac

SEQ ID NO: 234046 - RNA, 19 nt, Artificial Sequence
  Description of Artificial Sequence: Synthetic oligonucleotide
gggcuggaccuaaaccuca

SEQ ID NO: 234047 - RNA, 19 nt, Artificial Sequence
  Description of Artificial Sequence: Synthetic oligonucleotide
cguucccuauuagugggug

SEQ ID NO: 234048 - RNA, 19 nt, Artificial Sequence
  Description of Artificial Sequence: Synthetic oligonucleotide
cccauguuaccucuaacuu

SEQ ID NO: 234049 - RNA, 19 nt, Artificial Sequence
  Description of Artificial Sequence: Synthetic oligonucleotide
ggugaacaauccaacgcuu

SEQ ID NO: 234050 - RNA, 19 nt, Artificial Sequence
  Description of Artificial Sequence: Synthetic oligonucleotide
caagcgagcuuuugcccuu

SEQ ID NO: 234051 - RNA, 19 nt, Artificial Sequence
  Description of Artificial Sequence: Synthetic oligonucleotide
gcucgccuuaggccccugc

SEQ ID NO: 234052 - RNA, 19 nt, Artificial Sequence
  Description of Artificial Sequence: Synthetic oligonucleotide
ccucgaugaaccguguugu

SEQ ID NO: 234053 - RNA, 19 nt, Artificial Sequence
  Description of Artificial Sequence: Synthetic oligonucleotide
ccucucguacugagcagga

SEQ ID NO: 234054 - RNA, 19 nt, Artificial Sequence
  Description of Artificial Sequence: Synthetic oligonucleotide
cggucuuuacaucccacaa

SEQ ID NO: 234055 - RNA, 19 nt, Artificial Sequence
  Description of Artificial Sequence: Synthetic oligonucleotide
cugucucacgacggucuaa

SEQ ID NO: 234056 - RNA, 19 nt, Artificial Sequence
  Description of Artificial Sequence: Synthetic oligonucleotide
cccugauguuugucucuuc

SEQ ID NO: 234057 - RNA, 19 nt, Artificial Sequence
  Description of Artificial Sequence: Synthetic oligonucleotide
gccgacaucgaaggaucaa

SEQ ID NO: 234058 - RNA, 19 nt, Artificial Sequence
  Description of Artificial Sequence: Synthetic oligonucleotide
cccgcuuucacggucugua

SEQ ID NO: 234059 - RNA, 19 nt, Artificial Sequence
  Description of Artificial Sequence: Synthetic oligonucleotide
gcgcgucggucuuuacauc

SEQ ID NO: 234060 - RNA, 19 nt, Artificial Sequence
  Description of Artificial Sequence: Synthetic oligonucleotide
ggccugcccagaguucuga

SEQ ID NO: 234061 - RNA, 19 nt, Artificial Sequence
  Description of Artificial Sequence: Synthetic oligonucleotide
ggagcgcgucggucuuuac

SEQ ID NO: 234062 - RNA, 19 nt, Artificial Sequence
  Description of Artificial Sequence: Synthetic oligonucleotide
cggucuguauucguacuga

SEQ ID NO: 234063 - RNA, 19 nt, Artificial Sequence
  Description of Artificial Sequence: Synthetic oligonucleotide
cucgaguccuugccucgau

SEQ ID NO: 234064 - RNA, 19 nt, Artificial Sequence
  Description of Artificial Sequence: Synthetic oligonucleotide
ccgccacaagccaguuauc

SEQ ID NO: 234065 - RNA, 19 nt, Artificial Sequence
  Description of Artificial Sequence: Synthetic oligonucleotide
gcgguuccucucguacuga

SEQ ID NO: 234066 - RNA, 19 nt, Artificial Sequence
  Description of Artificial Sequence: Synthetic oligonucleotide
cgacggucuaaacccagcu

SEQ ID NO: 234067 - RNA, 19 nt, Artificial Sequence
  Description of Artificial Sequence: Synthetic oligonucleotide
cagcuucguagaguuugau

SEQ ID NO: 234068 - RNA, 19 nt, Artificial Sequence
  Description of Artificial Sequence: Synthetic oligonucleotide
ccuugccucgaugaaccgu

SEQ ID NO: 234069 - RNA, 19 nt, Artificial Sequence
  Description of Artificial Sequence: Synthetic oligonucleotide
ccucgaguccuugccucga

SEQ ID NO: 234070 - RNA, 19 nt, Artificial Sequence
  Description of Artificial Sequence: Synthetic oligonucleotide
caccggcaucccaggcaua

SEQ ID NO: 234071 - RNA, 19 nt, Artificial Sequence
  Description of Artificial Sequence: Synthetic oligonucleotide
aaugacgcaauuuucaguc

SEQ ID NO: 234072 - RNA, 19 nt, Artificial Sequence
  Description of Artificial Sequence: Synthetic oligonucleotide
ugcaucaucaacuaaacga

SEQ ID NO: 234073 - RNA, 19 nt, Artificial Sequence
  Description of Artificial Sequence: Synthetic oligonucleotide
aauaaucccaacaaugacg

SEQ ID NO: 234074 - RNA, 19 nt, Artificial Sequence
  Description of Artificial Sequence: Synthetic oligonucleotide
cauaagaucaagaaguuug

SEQ ID NO: 234075 - RNA, 19 nt, Artificial Sequence
  Description of Artificial Sequence: Synthetic oligonucleotide
agcaaugcgaaccucauac

SEQ ID NO: 234076 - RNA, 19 nt, Artificial Sequence
  Description of Artificial Sequence: Synthetic oligonucleotide
ucaacuaggaaaucaaggc

SEQ ID NO: 234077 - RNA, 19 nt, Artificial Sequence
  Description of Artificial Sequence: Synthetic oligonucleotide
aagguuauuggaacgauac

SEQ ID NO: 234078 - RNA, 19 nt, Artificial Sequence
  Description of Artificial Sequence: Synthetic oligonucleotide
uugauaauaaucccaacaa

SEQ ID NO: 234079 - RNA, 19 nt, Artificial Sequence
  Description of Artificial Sequence: Synthetic oligonucleotide
auaaucccaacaaugacgc

SEQ ID NO: 234080 - RNA, 19 nt, Artificial Sequence
  Description of Artificial Sequence: Synthetic oligonucleotide
aaaugauugacccugugua

SEQ ID NO: 234081 - RNA, 19 nt, Artificial Sequence
  Description of Artificial Sequence: Synthetic oligonucleotide
ucaugguauguauagacug

SEQ ID NO: 234082 - RNA, 19 nt, Artificial Sequence
  Description of Artificial Sequence: Synthetic oligonucleotide
aaaacugcgaugugggcug

SEQ ID NO: 234083 - RNA, 19 nt, Artificial Sequence
  Description of Artificial Sequence: Synthetic oligonucleotide
aagugucuaacaguugugc

SEQ ID NO: 234084 - RNA, 19 nt, Artificial Sequence
  Description of Artificial Sequence: Synthetic oligonucleotide
augauacuaguuuucuccc

SEQ ID NO: 234085 - RNA, 19 nt, Artificial Sequence
  Description of Artificial Sequence: Synthetic oligonucleotide
uguaugaucaccaccugcu

SEQ ID NO: 234086 - RNA, 19 nt, Artificial Sequence
  Description of Artificial Sequence: Synthetic oligonucleotide
aaagucugcuggcuuaggg

SEQ ID NO: 234087 - RNA, 19 nt, Artificial Sequence
  Description of Artificial Sequence: Synthetic oligonucleotide
ucaacuaaacgaauuuucu

SEQ ID NO: 234088 - RNA, 19 nt, Artificial Sequence
  Description of Artificial Sequence: Synthetic oligonucleotide
uguaugauacuaauggaau

SEQ ID NO: 234089 - RNA, 19 nt, Artificial Sequence
  Description of Artificial Sequence: Synthetic oligonucleotide
aagagaauccugacuaccc

SEQ ID NO: 234090 - RNA, 19 nt, Artificial Sequence
  Description of Artificial Sequence: Synthetic oligonucleotide
aagaacuaaaacugcgaug

SEQ ID NO: 234091 - RNA, 19 nt, Artificial Sequence
  Description of Artificial Sequence: Synthetic oligonucleotide
uaaggagcaguugacaccg

SEQ ID NO: 234092 - RNA, 19 nt, Artificial Sequence
  Description of Artificial Sequence: Synthetic oligonucleotide
uuuagaugccaugagucgg

SEQ ID NO: 234093 - RNA, 19 nt, Artificial Sequence
  Description of Artificial Sequence: Synthetic oligonucleotide
cauuaugcagucuggagag

SEQ ID NO: 234094 - RNA, 19 nt, Artificial Sequence
  Description of Artificial Sequence: Synthetic oligonucleotide
uuuauaaggagcaguugac

SEQ ID NO: 234095 - RNA, 19 nt, Artificial Sequence
  Description of Artificial Sequence: Synthetic oligonucleotide
acucuaucaaguucacagc

SEQ ID NO: 234096 - RNA, 19 nt, Artificial Sequence
  Description of Artificial Sequence: Synthetic oligonucleotide
uaguuuacugccaauugca

SEQ ID NO: 234097 - RNA, 19 nt, Artificial Sequence
  Description of Artificial Sequence: Synthetic oligonucleotide
uugugcuaggacuugauga

SEQ ID NO: 234098 - RNA, 19 nt, Artificial Sequence
  Description of Artificial Sequence: Synthetic oligonucleotide
agagaauccugacuacccc

SEQ ID NO: 234099 - RNA, 19 nt, Artificial Sequence
  Description of Artificial Sequence: Synthetic oligonucleotide
uguaagauugacaauucuu

SEQ ID NO: 234100 - RNA, 19 nt, Artificial Sequence
  Description of Artificial Sequence: Synthetic oligonucleotide
uuagaugccaugagucggg

SEQ ID NO: 234101 - RNA, 19 nt, Artificial Sequence
  Description of Artificial Sequence: Synthetic oligonucleotide
uccacuaaucgcaucuggg

SEQ ID NO: 234102 - RNA, 19 nt, Artificial Sequence
  Description of Artificial Sequence: Synthetic oligonucleotide
acuaaucgcaucuggguag

SEQ ID NO: 234103 - RNA, 19 nt, Artificial Sequence
  Description of Artificial Sequence: Synthetic oligonucleotide
uuuucggcaaaagagggug

SEQ ID NO: 234104 - RNA, 19 nt, Artificial Sequence
  Description of Artificial Sequence: Synthetic oligonucleotide
gauacuaguuuucucccug

SEQ ID NO: 234105 - RNA, 19 nt, Artificial Sequence
  Description of Artificial Sequence: Synthetic oligonucleotide
augccgacuucccagaaac

SEQ ID NO: 234106 - RNA, 19 nt, Artificial Sequence
  Description of Artificial Sequence: Synthetic oligonucleotide
uaacaguugugcuaggacu

SEQ ID NO: 234107 - RNA, 19 nt, Artificial Sequence
  Description of Artificial Sequence: Synthetic oligonucleotide
ugauauuguuaguagauuu

SEQ ID NO: 234108 - RNA, 19 nt, Artificial Sequence
  Description of Artificial Sequence: Synthetic oligonucleotide
ugauaccuaaggaagggcu

SEQ ID NO: 234109 - RNA, 19 nt, Artificial Sequence
  Description of Artificial Sequence: Synthetic oligonucleotide
agugccugaagguaugauc

SEQ ID NO: 234110 - RNA, 19 nt, Artificial Sequence
  Description of Artificial Sequence: Synthetic oligonucleotide
caguugacaccgaagauag

SEQ ID NO: 234111 - RNA, 19 nt, Artificial Sequence
  Description of Artificial Sequence: Synthetic oligonucleotide
aacaaugacgcaauuuuca

SEQ ID NO: 234112 - RNA, 19 nt, Artificial Sequence
  Description of Artificial Sequence: Synthetic oligonucleotide
cuuuauaaggagcaguuga

SEQ ID NO: 234113 - RNA, 19 nt, Artificial Sequence
  Description of Artificial Sequence: Synthetic oligonucleotide
auugauaccuaaggaaggg

SEQ ID NO: 234114 - RNA, 19 nt, Artificial Sequence
  Description of Artificial Sequence: Synthetic oligonucleotide
aguuacuauaaguugcaga

SEQ ID NO: 234115 - RNA, 19 nt, Artificial Sequence
  Description of Artificial Sequence: Synthetic oligonucleotide
gacgaagguuauuggaacg

SEQ ID NO: 234116 - RNA, 19 nt, Artificial Sequence
  Description of Artificial Sequence: Synthetic oligonucleotide
acaaugacgcaauuuucag

SEQ ID NO: 234117 - RNA, 19 nt, Artificial Sequence
  Description of Artificial Sequence: Synthetic oligonucleotide
uuauuucguacaccauggg

SEQ ID NO: 234118 - RNA, 19 nt, Artificial Sequence
  Description of Artificial Sequence: Synthetic oligonucleotide
uggauacaagaccuggacc

SEQ ID NO: 234119 - RNA, 19 nt, Artificial Sequence
  Description of Artificial Sequence: Synthetic oligonucleotide
augcgaaccucauacaucu

SEQ ID NO: 234120 - RNA, 19 nt, Artificial Sequence
  Description of Artificial Sequence: Synthetic oligonucleotide
guaagauugacaauucuuc

SEQ ID NO: 234121 - RNA, 19 nt, Artificial Sequence
  Description of Artificial Sequence: Synthetic oligonucleotide
caugguauguauagacugc

SEQ ID NO: 234122 - RNA, 19 nt, Artificial Sequence
  Description of Artificial Sequence: Synthetic oligonucleotide
uaaaacugcgaugugggcu

SEQ ID NO: 234123 - RNA, 19 nt, Artificial Sequence
  Description of Artificial Sequence: Synthetic oligonucleotide
uuggaauucgugcaccgga

SEQ ID NO: 234124 - RNA, 19 nt, Artificial Sequence
  Description of Artificial Sequence: Synthetic oligonucleotide
gugauguuagaggagacag

SEQ ID NO: 234125 - RNA, 19 nt, Artificial Sequence
  Description of Artificial Sequence: Synthetic oligonucleotide
caugggauguaucugucag

SEQ ID NO: 234126 - RNA, 19 nt, Artificial Sequence
  Description of Artificial Sequence: Synthetic oligonucleotide
auaaguugcagagcuuugg

SEQ ID NO: 234127 - RNA, 19 nt, Artificial Sequence
  Description of Artificial Sequence: Synthetic oligonucleotide
uauaaguugcagagcuuug

SEQ ID NO: 234128 - RNA, 19 nt, Artificial Sequence
  Description of Artificial Sequence: Synthetic oligonucleotide
agggugauauuguuaguag

SEQ ID NO: 234129 - RNA, 19 nt, Artificial Sequence
  Description of Artificial Sequence: Synthetic oligonucleotide
acuuuucggcaaaagaggg

SEQ ID NO: 234130 - RNA, 19 nt, Artificial Sequence
  Description of Artificial Sequence: Synthetic oligonucleotide
cagcauugaagauaagaac

SEQ ID NO: 234131 - RNA, 19 nt, Artificial Sequence
  Description of Artificial Sequence: Synthetic oligonucleotide
auacuaguuuucucccugg

SEQ ID NO: 234132 - RNA, 19 nt, Artificial Sequence
  Description of Artificial Sequence: Synthetic oligonucleotide
ugcaccggaguuauaggcc

SEQ ID NO: 234133 - RNA, 19 nt, Artificial Sequence
  Description of Artificial Sequence: Synthetic oligonucleotide
aaccgcaaaggguugucug

SEQ ID NO: 234134 - RNA, 19 nt, Artificial Sequence
  Description of Artificial Sequence: Synthetic oligonucleotide
uuauaaggagcaguugaca

SEQ ID NO: 234135 - RNA, 19 nt, Artificial Sequence
  Description of Artificial Sequence: Synthetic oligonucleotide
aaggggucgacuccucgag

SEQ ID NO: 234136 - RNA, 19 nt, Artificial Sequence
  Description of Artificial Sequence: Synthetic oligonucleotide
cuaacaguugugcuaggac

SEQ ID NO: 234137 - RNA, 19 nt, Artificial Sequence
  Description of Artificial Sequence: Synthetic oligonucleotide
aucgcaucuggguagcuug

SEQ ID NO: 234138 - RNA, 19 nt, Artificial Sequence
  Description of Artificial Sequence: Synthetic oligonucleotide
aguuauaggccagcaagag

SEQ ID NO: 234139 - RNA, 19 nt, Artificial Sequence
  Description of Artificial Sequence: Synthetic oligonucleotide
auuaugggaauggaggaga

SEQ ID NO: 234140 - RNA, 19 nt, Artificial Sequence
  Description of Artificial Sequence: Synthetic oligonucleotide
ucugguaguuuacugccaa

SEQ ID NO: 234141 - RNA, 19 nt, Artificial Sequence
  Description of Artificial Sequence: Synthetic oligonucleotide
cugacaagcauccgcuggg

SEQ ID NO: 234142 - RNA, 19 nt, Artificial Sequence
  Description of Artificial Sequence: Synthetic oligonucleotide
auccacuaaucgcaucugg

SEQ ID NO: 234143 - RNA, 19 nt, Artificial Sequence
  Description of Artificial Sequence: Synthetic oligonucleotide
uccacgugcgaugacaucu

SEQ ID NO: 234144 - RNA, 19 nt, Artificial Sequence
  Description of Artificial Sequence: Synthetic oligonucleotide
agugucuaacaguugugcu

SEQ ID NO: 234145 - RNA, 19 nt, Artificial Sequence
  Description of Artificial Sequence: Synthetic oligonucleotide
ucgugcaguuacuauaagu

SEQ ID NO: 234146 - RNA, 19 nt, Artificial Sequence
  Description of Artificial Sequence: Synthetic oligonucleotide
uuuggaauucgugcaccgg

SEQ ID NO: 234147 - RNA, 19 nt, Artificial Sequence
  Description of Artificial Sequence: Synthetic oligonucleotide
uucauuagacgaagguuau

SEQ ID NO: 234148 - RNA, 19 nt, Artificial Sequence
  Description of Artificial Sequence: Synthetic oligonucleotide
ucgugcaccggaguuauag

SEQ ID NO: 234149 - RNA, 19 nt, Artificial Sequence
  Description of Artificial Sequence: Synthetic oligonucleotide
gguaaauuccaggagcucc

SEQ ID NO: 234150 - RNA, 19 nt, Artificial Sequence
  Description of Artificial Sequence: Synthetic oligonucleotide
caucaaucuuuugugacac

SEQ ID NO: 234151 - RNA, 19 nt, Artificial Sequence
  Description of Artificial Sequence: Synthetic oligonucleotide
ugagugcucaagagcuccg

SEQ ID NO: 234152 - RNA, 19 nt, Artificial Sequence
  Description of Artificial Sequence: Synthetic oligonucleotide
agacaguugaugauacuag

SEQ ID NO: 234153 - RNA, 19 nt, Artificial Sequence
  Description of Artificial Sequence: Synthetic oligonucleotide
ugacgcaauuuucagucuc

SEQ ID NO: 234154 - RNA, 19 nt, Artificial Sequence
  Description of Artificial Sequence: Synthetic oligonucleotide
ugcgaugacaucucaccac

SEQ ID NO: 234155 - RNA, 19 nt, Artificial Sequence
  Description of Artificial Sequence: Synthetic oligonucleotide
uccucgaguaguucgugca

SEQ ID NO: 234156 - RNA, 19 nt, Artificial Sequence
  Description of Artificial Sequence: Synthetic oligonucleotide
cuaaaacugcgaugugggc

SEQ ID NO: 234157 - RNA, 19 nt, Artificial Sequence
  Description of Artificial Sequence: Synthetic oligonucleotide
ucuaacaguugugcuagga

SEQ ID NO: 234158 - RNA, 19 nt, Artificial Sequence
  Description of Artificial Sequence: Synthetic oligonucleotide
ugauacuaauggaauugua

SEQ ID NO: 234159 - RNA, 19 nt, Artificial Sequence
  Description of Artificial Sequence: Synthetic oligonucleotide
acaaggguuggaugccgac

SEQ ID NO: 234160 - RNA, 19 nt, Artificial Sequence
  Description of Artificial Sequence: Synthetic oligonucleotide
ugauacuaguuuucucccu

SEQ ID NO: 234161 - RNA, 19 nt, Artificial Sequence
  Description of Artificial Sequence: Synthetic oligonucleotide
uccugacuaccccuccacg

SEQ ID NO: 234162 - RNA, 19 nt, Artificial Sequence
  Description of Artificial Sequence: Synthetic oligonucleotide
cacgaacuacccaggagcc

SEQ ID NO: 234163 - RNA, 19 nt, Artificial Sequence
  Description of Artificial Sequence: Synthetic oligonucleotide
guguaugaucaccaccugc

SEQ ID NO: 234164 - RNA, 19 nt, Artificial Sequence
  Description of Artificial Sequence: Synthetic oligonucleotide
gaagguacucugccguagc

SEQ ID NO: 234165 - RNA, 19 nt, Artificial Sequence
  Description of Artificial Sequence: Synthetic oligonucleotide
ucuacagguuuagaugcca

SEQ ID NO: 234166 - RNA, 19 nt, Artificial Sequence
  Description of Artificial Sequence: Synthetic oligonucleotide
uggagucccugucaguaga

SEQ ID NO: 234167 - RNA, 19 nt, Artificial Sequence
  Description of Artificial Sequence: Synthetic oligonucleotide
ggggcauaagaucaagaag

SEQ ID NO: 234168 - RNA, 19 nt, Artificial Sequence
  Description of Artificial Sequence: Synthetic oligonucleotide
ggcuacauccacuaaucgc

SEQ ID NO: 234169 - RNA, 19 nt, Artificial Sequence
  Description of Artificial Sequence: Synthetic oligonucleotide
uugauaccuaaggaagggc

SEQ ID NO: 234170 - RNA, 19 nt, Artificial Sequence
  Description of Artificial Sequence: Synthetic oligonucleotide
uccauauggagucccuguc

SEQ ID NO: 234171 - RNA, 19 nt, Artificial Sequence
  Description of Artificial Sequence: Synthetic oligonucleotide
gugcaccggaguuauaggc

SEQ ID NO: 234172 - RNA, 19 nt, Artificial Sequence
  Description of Artificial Sequence: Synthetic oligonucleotide
guguaugauacuaauggaa

SEQ ID NO: 234173 - RNA, 19 nt, Artificial Sequence
  Description of Artificial Sequence: Synthetic oligonucleotide
uguuuuccacgugcgauga

SEQ ID NO: 234174 - RNA, 19 nt, Artificial Sequence
  Description of Artificial Sequence: Synthetic oligonucleotide
aggagcaucaucuccccau

SEQ ID NO: 234175 - RNA, 19 nt, Artificial Sequence
  Description of Artificial Sequence: Synthetic oligonucleotide
gguuuagaugccaugaguc

SEQ ID NO: 234176 - RNA, 19 nt, Artificial Sequence
  Description of Artificial Sequence: Synthetic oligonucleotide
cucggagguaggcauagug

SEQ ID NO: 234177 - RNA, 19 nt, Artificial Sequence
  Description of Artificial Sequence: Synthetic oligonucleotide
caugagucggggcauaaga

SEQ ID NO: 234178 - RNA, 19 nt, Artificial Sequence
  Description of Artificial Sequence: Synthetic oligonucleotide
caugccuacacaccacuuc

SEQ ID NO: 234179 - RNA, 19 nt, Artificial Sequence
  Description of Artificial Sequence: Synthetic oligonucleotide
aggcauagugccugaaggu

SEQ ID NO: 234180 - RNA, 19 nt, Artificial Sequence
  Description of Artificial Sequence: Synthetic oligonucleotide
uuucggcaaaagaggguga

SEQ ID NO: 234181 - RNA, 19 nt, Artificial Sequence
  Description of Artificial Sequence: Synthetic oligonucleotide
uucgugcaguuacuauaag

SEQ ID NO: 234182 - RNA, 19 nt, Artificial Sequence
  Description of Artificial Sequence: Synthetic oligonucleotide
uaucaaguucacagccccu

SEQ ID NO: 234183 - RNA, 19 nt, Artificial Sequence
  Description of Artificial Sequence: Synthetic oligonucleotide
uaagaucaagaaguuuguc

SEQ ID NO: 234184 - RNA, 19 nt, Artificial Sequence
  Description of Artificial Sequence: Synthetic oligonucleotide
gcuaccaccaacccagaug

SEQ ID NO: 234185 - RNA, 19 nt, Artificial Sequence
  Description of Artificial Sequence: Synthetic oligonucleotide
cacgcucaugugcagugcg

SEQ ID NO: 234186 - RNA, 19 nt, Artificial Sequence
  Description of Artificial Sequence: Synthetic oligonucleotide
gauguuagaggagacaguu

SEQ ID NO: 234187 - RNA, 19 nt, Artificial Sequence
  Description of Artificial Sequence: Synthetic oligonucleotide
gugcguuugcuugaacacg

SEQ ID NO: 234188 - RNA, 19 nt, Artificial Sequence
  Description of Artificial Sequence: Synthetic oligonucleotide
ucggggcauaagaucaaga

SEQ ID NO: 234189 - RNA, 19 nt, Artificial Sequence
  Description of Artificial Sequence: Synthetic oligonucleotide
ugacaagcauccgcugggg

SEQ ID NO: 234190 - RNA, 19 nt, Artificial Sequence
  Description of Artificial Sequence: Synthetic oligonucleotide
aauucgugcaccggaguua

SEQ ID NO: 234191 - RNA, 19 nt, Artificial Sequence
  Description of Artificial Sequence: Synthetic oligonucleotide
acgauacuuuucaggauag

SEQ ID NO: 234192 - RNA, 19 nt, Artificial Sequence
  Description of Artificial Sequence: Synthetic oligonucleotide
gccaagauugccaaguaac

SEQ ID NO: 234193 - RNA, 19 nt, Artificial Sequence
  Description of Artificial Sequence: Synthetic oligonucleotide
cagugcguuugcuugaaca

SEQ ID NO: 234194 - RNA, 19 nt, Artificial Sequence
  Description of Artificial Sequence: Synthetic oligonucleotide
ugguaguuuacugccaauu

SEQ ID NO: 234195 - RNA, 19 nt, Artificial Sequence
  Description of Artificial Sequence: Synthetic oligonucleotide
acgaagguuauuggaacga

SEQ ID NO: 234196 - RNA, 19 nt, Artificial Sequence
  Description of Artificial Sequence: Synthetic oligonucleotide
cuaaucgcaucuggguagc

SEQ ID NO: 234197 - RNA, 19 nt, Artificial Sequence
  Description of Artificial Sequence: Synthetic oligonucleotide
gaacacgaacuacccagga

SEQ ID NO: 234198 - RNA, 19 nt, Artificial Sequence
  Description of Artificial Sequence: Synthetic oligonucleotide
acgcaauuuucagucucac

SEQ ID NO: 234199 - RNA, 19 nt, Artificial Sequence
  Description of Artificial Sequence: Synthetic oligonucleotide
ucuaggugcugaacacuau

SEQ ID NO: 234200 - RNA, 19 nt, Artificial Sequence
  Description of Artificial Sequence: Synthetic oligonucleotide
ugaugagacggugccgccc

SEQ ID NO: 234201 - RNA, 19 nt, Artificial Sequence
  Description of Artificial Sequence: Synthetic oligonucleotide
accggaguuauaggccagc

SEQ ID NO: 234202 - RNA, 19 nt, Artificial Sequence
  Description of Artificial Sequence: Synthetic oligonucleotide
gaaagucugcuggcuuagg

SEQ ID NO: 234203 - RNA, 19 nt, Artificial Sequence
  Description of Artificial Sequence: Synthetic oligonucleotide
ugccugaagguaugaucug

SEQ ID NO: 234204 - RNA, 19 nt, Artificial Sequence
  Description of Artificial Sequence: Synthetic oligonucleotide
uggaugccgacuucccaga

SEQ ID NO: 234205 - RNA, 19 nt, Artificial Sequence
  Description of Artificial Sequence: Synthetic oligonucleotide
agccucaugugguguauga

SEQ ID NO: 234206 - RNA, 19 nt, Artificial Sequence
  Description of Artificial Sequence: Synthetic oligonucleotide
agcaguugacaccgaagau

SEQ ID NO: 234207 - RNA, 19 nt, Artificial Sequence
  Description of Artificial Sequence: Synthetic oligonucleotide
cuccucgaguaguucgugc

SEQ ID NO: 234208 - RNA, 19 nt, Artificial Sequence
  Description of Artificial Sequence: Synthetic oligonucleotide
gagugcucaagagcuccgg

SEQ ID NO: 234209 - RNA, 19 nt, Artificial Sequence
  Description of Artificial Sequence: Synthetic oligonucleotide
guaguauguuaauggcauc

SEQ ID NO: 234210 - RNA, 19 nt, Artificial Sequence
  Description of Artificial Sequence: Synthetic oligonucleotide
augacgcaauuuucagucu

SEQ ID NO: 234211 - RNA, 19 nt, Artificial Sequence
  Description of Artificial Sequence: Synthetic oligonucleotide
ggcuucuagagcauggcug

SEQ ID NO: 234212 - RNA, 19 nt, Artificial Sequence
  Description of Artificial Sequence: Synthetic oligonucleotide
cuggaccuuaacacuguuc

SEQ ID NO: 234213 - RNA, 19 nt, Artificial Sequence
  Description of Artificial Sequence: Synthetic oligonucleotide
agacgcacuuccucuauuu

SEQ ID NO: 234214 - RNA, 19 nt, Artificial Sequence
  Description of Artificial Sequence: Synthetic oligonucleotide
ucggcaaaagagggugaag

SEQ ID NO: 234215 - RNA, 19 nt, Artificial Sequence
  Description of Artificial Sequence: Synthetic oligonucleotide
uucguacaccaugggaugu

SEQ ID NO: 234216 - RNA, 19 nt, Artificial Sequence
  Description of Artificial Sequence: Synthetic oligonucleotide
uucggcaaaagagggugaa

SEQ ID NO: 234217 - RNA, 19 nt, Artificial Sequence
  Description of Artificial Sequence: Synthetic oligonucleotide
cucguagucaucaaucuuu

SEQ ID NO: 234218 - RNA, 19 nt, Artificial Sequence
  Description of Artificial Sequence: Synthetic oligonucleotide
gacccuguguaugauacua

SEQ ID NO: 234219 - RNA, 19 nt, Artificial Sequence
  Description of Artificial Sequence: Synthetic oligonucleotide
aucaaucuuuugugacacu

SEQ ID NO: 234220 - RNA, 19 nt, Artificial Sequence
  Description of Artificial Sequence: Synthetic oligonucleotide
aaucgcaucuggguagcuu

SEQ ID NO: 234221 - RNA, 19 nt, Artificial Sequence
  Description of Artificial Sequence: Synthetic oligonucleotide
aaacugcgaugugggcugg

SEQ ID NO: 234222 - RNA, 19 nt, Artificial Sequence
  Description of Artificial Sequence: Synthetic oligonucleotide
gaauuguaagauugacaau

SEQ ID NO: 234223 - RNA, 19 nt, Artificial Sequence
  Description of Artificial Sequence: Synthetic oligonucleotide
ucgcaucuggguagcuuga

SEQ ID NO: 234224 - RNA, 19 nt, Artificial Sequence
  Description of Artificial Sequence: Synthetic oligonucleotide
cauugaagauaagaacuaa

SEQ ID NO: 234225 - RNA, 19 nt, Artificial Sequence
  Description of Artificial Sequence: Synthetic oligonucleotide
gggugauauuguuaguaga

SEQ ID NO: 234226 - RNA, 19 nt, Artificial Sequence
  Description of Artificial Sequence: Synthetic oligonucleotide
accaugggauguaucuguc

SEQ ID NO: 234227 - RNA, 19 nt, Artificial Sequence
  Description of Artificial Sequence: Synthetic oligonucleotide
uacucugccguagcauugu

SEQ ID NO: 234228 - RNA, 19 nt, Artificial Sequence
  Description of Artificial Sequence: Synthetic oligonucleotide
caguuacuauaaguugcag

SEQ ID NO: 234229 - RNA, 19 nt, Artificial Sequence
  Description of Artificial Sequence: Synthetic oligonucleotide
gaagguuauuggaacgaua

SEQ ID NO: 234230 - RNA, 19 nt, Artificial Sequence
  Description of Artificial Sequence: Synthetic oligonucleotide
caaggcuaccaccaaccca

SEQ ID NO: 234231 - RNA, 19 nt, Artificial Sequence
  Description of Artificial Sequence: Synthetic oligonucleotide
gaugagacggugccgcccu

SEQ ID NO: 234232 - RNA, 19 nt, Artificial Sequence
  Description of Artificial Sequence: Synthetic oligonucleotide
cacuaaucgcaucugggua

SEQ ID NO: 234233 - RNA, 19 nt, Artificial Sequence
  Description of Artificial Sequence: Synthetic oligonucleotide
aucggcaaugaaacaccuc

SEQ ID NO: 234234 - RNA, 19 nt, Artificial Sequence
  Description of Artificial Sequence: Synthetic oligonucleotide
cggagguaggcauagugcc

SEQ ID NO: 234235 - RNA, 19 nt, Artificial Sequence
  Description of Artificial Sequence: Synthetic oligonucleotide
auguuagaggagacaguug

SEQ ID NO: 234236 - RNA, 19 nt, Artificial Sequence
  Description of Artificial Sequence: Synthetic oligonucleotide
acgugcgaugacaucucac

SEQ ID NO: 234237 - RNA, 19 nt, Artificial Sequence
  Description of Artificial Sequence: Synthetic oligonucleotide
gcgaaccucauacaucuca

SEQ ID NO: 234238 - RNA, 19 nt, Artificial Sequence
  Description of Artificial Sequence: Synthetic oligonucleotide
gucuaacaguugugcuagg

SEQ ID NO: 234239 - RNA, 19 nt, Artificial Sequence
  Description of Artificial Sequence: Synthetic oligonucleotide
cugacugacaacccagaua

SEQ ID NO: 234240 - RNA, 19 nt, Artificial Sequence
  Description of Artificial Sequence: Synthetic oligonucleotide
gaugccgacuucccagaaa

SEQ ID NO: 234241 - RNA, 19 nt, Artificial Sequence
  Description of Artificial Sequence: Synthetic oligonucleotide
gaauucgugcaccggaguu

SEQ ID NO: 234242 - RNA, 19 nt, Artificial Sequence
  Description of Artificial Sequence: Synthetic oligonucleotide
caguugaugauacuaguuu

SEQ ID NO: 234243 - RNA, 19 nt, Artificial Sequence
  Description of Artificial Sequence: Synthetic oligonucleotide
ggagcaguugacaccgaag

SEQ ID NO: 234244 - RNA, 19 nt, Artificial Sequence
  Description of Artificial Sequence: Synthetic oligonucleotide
ugacuaccccuccacgcuu

SEQ ID NO: 234245 - RNA, 19 nt, Artificial Sequence
  Description of Artificial Sequence: Synthetic oligonucleotide
guaaacuuucacaggcuua

SEQ ID NO: 234246 - RNA, 19 nt, Artificial Sequence
  Description of Artificial Sequence: Synthetic oligonucleotide
cuaggugcugaacacuaua

SEQ ID NO: 234247 - RNA, 19 nt, Artificial Sequence
  Description of Artificial Sequence: Synthetic oligonucleotide
guacugacaagcauccgcu

SEQ ID NO: 234248 - RNA, 19 nt, Artificial Sequence
  Description of Artificial Sequence: Synthetic oligonucleotide
gguguaugaucaccaccug

SEQ ID NO: 234249 - RNA, 19 nt, Artificial Sequence
  Description of Artificial Sequence: Synthetic oligonucleotide
ggaagguacucugccguag

SEQ ID NO: 234250 - RNA, 19 nt, Artificial Sequence
  Description of Artificial Sequence: Synthetic oligonucleotide
gaacgauacuuuucaggau

SEQ ID NO: 234251 - RNA, 19 nt, Artificial Sequence
  Description of Artificial Sequence: Synthetic oligonucleotide
caaugacgcaauuuucagu

SEQ ID NO: 234252 - RNA, 19 nt, Artificial Sequence
  Description of Artificial Sequence: Synthetic oligonucleotide
cauccacuaaucgcaucug

SEQ ID NO: 234253 - RNA, 19 nt, Artificial Sequence
  Description of Artificial Sequence: Synthetic oligonucleotide
caaugcgaaccucauacau

SEQ ID NO: 234254 - RNA, 19 nt, Artificial Sequence
  Description of Artificial Sequence: Synthetic oligonucleotide
agguacugacaagcauccg

SEQ ID NO: 234255 - RNA, 19 nt, Artificial Sequence
  Description of Artificial Sequence: Synthetic oligonucleotide
cuccggcaccaaaggaagc

SEQ ID NO: 234256 - RNA, 19 nt, Artificial Sequence
  Description of Artificial Sequence: Synthetic oligonucleotide
gucggggcauaagaucaag

SEQ ID NO: 234257 - RNA, 19 nt, Artificial Sequence
  Description of Artificial Sequence: Synthetic oligonucleotide
ggugauguuagaggagaca

SEQ ID NO: 234258 - RNA, 19 nt, Artificial Sequence
  Description of Artificial Sequence: Synthetic oligonucleotide
aguugacaccgaagauagg

SEQ ID NO: 234259 - RNA, 19 nt, Artificial Sequence
  Description of Artificial Sequence: Synthetic oligonucleotide
aggaagguacucugccgua

SEQ ID NO: 234260 - RNA, 19 nt, Artificial Sequence
  Description of Artificial Sequence: Synthetic oligonucleotide
caccggaguuauaggccag

SEQ ID NO: 234261 - RNA, 19 nt, Artificial Sequence
  Description of Artificial Sequence: Synthetic oligonucleotide
gcaccggaguuauaggcca

SEQ ID NO: 234262 - RNA, 19 nt, Artificial Sequence
  Description of Artificial Sequence: Synthetic oligonucleotide
cucaagagcuccggcacca

SEQ ID NO: 234263 - RNA, 19 nt, Artificial Sequence
  Description of Artificial Sequence: Synthetic oligonucleotide
ugcagugcguuugcuugaa

SEQ ID NO: 234264 - RNA, 19 nt, Artificial Sequence
  Description of Artificial Sequence: Synthetic oligonucleotide
acuauaaguugcagagcuu

SEQ ID NO: 234265 - RNA, 19 nt, Artificial Sequence
  Description of Artificial Sequence: Synthetic oligonucleotide
ugcgaaccucauacaucuc

SEQ ID NO: 234266 - RNA, 19 nt, Artificial Sequence
  Description of Artificial Sequence: Synthetic oligonucleotide
uuccacgugcgaugacauc

SEQ ID NO: 234267 - RNA, 19 nt, Artificial Sequence
  Description of Artificial Sequence: Synthetic oligonucleotide
acuccucgaguaguucgug

SEQ ID NO: 234268 - RNA, 19 nt, Artificial Sequence
  Description of Artificial Sequence: Synthetic oligonucleotide
ccaacaaugacgcaauuuu

SEQ ID NO: 234269 - RNA, 19 nt, Artificial Sequence
  Description of Artificial Sequence: Synthetic oligonucleotide
ucguacaccaugggaugua

SEQ ID NO: 234270 - RNA, 19 nt, Artificial Sequence
  Description of Artificial Sequence: Synthetic oligonucleotide
ccuuuauaaggagcaguug

SEQ ID NO: 234271 - RNA, 19 nt, Artificial Sequence
  Description of Artificial Sequence: Synthetic oligonucleotide
guuuuccacgugcgaugac

SEQ ID NO: 234272 - RNA, 19 nt, Artificial Sequence
  Description of Artificial Sequence: Synthetic oligonucleotide
gugcagugcguuugcuuga

SEQ ID NO: 234273 - RNA, 19 nt, Artificial Sequence
  Description of Artificial Sequence: Synthetic oligonucleotide
gcaaugcgaaccucauaca

SEQ ID NO: 234274 - RNA, 19 nt, Artificial Sequence
  Description of Artificial Sequence: Synthetic oligonucleotide
acgaacuacccaggagcca

SEQ ID NO: 234275 - RNA, 19 nt, Artificial Sequence
  Description of Artificial Sequence: Synthetic oligonucleotide
cugacuaccccuccacgcu

SEQ ID NO: 234276 - RNA, 19 nt, Artificial Sequence
  Description of Artificial Sequence: Synthetic oligonucleotide
uaaucgcaucuggguagcu

SEQ ID NO: 234277 - RNA, 19 nt, Artificial Sequence
  Description of Artificial Sequence: Synthetic oligonucleotide
ggcuugggcauuauguaaa

SEQ ID NO: 234278 - RNA, 19 nt, Artificial Sequence
  Description of Artificial Sequence: Synthetic oligonucleotide
caaggcacuuuucggcaaa

SEQ ID NO: 234279 - RNA, 19 nt, Artificial Sequence
  Description of Artificial Sequence: Synthetic oligonucleotide
ccucgaguaguucgugcag

SEQ ID NO: 234280 - RNA, 19 nt, Artificial Sequence
  Description of Artificial Sequence: Synthetic oligonucleotide
cgugcaccggaguuauagg

SEQ ID NO: 234281 - RNA, 19 nt, Artificial Sequence
  Description of Artificial Sequence: Synthetic oligonucleotide
ccaagauugccaaguaacu

SEQ ID NO: 234282 - RNA, 19 nt, Artificial Sequence
  Description of Artificial Sequence: Synthetic oligonucleotide
guaaaccgcaaaggguugu

SEQ ID NO: 234283 - RNA, 19 nt, Artificial Sequence
  Description of Artificial Sequence: Synthetic oligonucleotide
aacugcgaugugggcugga

SEQ ID NO: 234284 - RNA, 19 nt, Artificial Sequence
  Description of Artificial Sequence: Synthetic oligonucleotide
cagccccugugucuauuuc

SEQ ID NO: 234285 - RNA, 19 nt, Artificial Sequence
  Description of Artificial Sequence: Synthetic oligonucleotide
augagacggugccgcccug

SEQ ID NO: 234286 - RNA, 19 nt, Artificial Sequence
  Description of Artificial Sequence: Synthetic oligonucleotide
acgcucaugugcagugcgu

SEQ ID NO: 234287 - RNA, 19 nt, Artificial Sequence
  Description of Artificial Sequence: Synthetic oligonucleotide
cggggcauaagaucaagaa

SEQ ID NO: 234288 - RNA, 19 nt, Artificial Sequence
  Description of Artificial Sequence: Synthetic oligonucleotide
cucgaguaguucgugcagu

SEQ ID NO: 234289 - RNA, 19 nt, Artificial Sequence
  Description of Artificial Sequence: Synthetic oligonucleotide
agucggggcauaagaucaa

SEQ ID NO: 234290 - RNA, 19 nt, Artificial Sequence
  Description of Artificial Sequence: Synthetic oligonucleotide
caaggguuggaugccgacu

SEQ ID NO: 234291 - RNA, 19 nt, Artificial Sequence
  Description of Artificial Sequence: Synthetic oligonucleotide
cugcaggcacuuauuucgu

SEQ ID NO: 234292 - RNA, 19 nt, Artificial Sequence
  Description of Artificial Sequence: Synthetic oligonucleotide
ccucuauccauggagauuu

SEQ ID NO: 234293 - RNA, 19 nt, Artificial Sequence
  Description of Artificial Sequence: Synthetic oligonucleotide
gccuuuauaaggagcaguu

SEQ ID NO: 234294 - RNA, 19 nt, Artificial Sequence
  Description of Artificial Sequence: Synthetic oligonucleotide
gguggggcaaaucggcaau

SEQ ID NO: 234295 - RNA, 19 nt, Artificial Sequence
  Description of Artificial Sequence: Synthetic oligonucleotide
ggcauaagaucaagaaguu

SEQ ID NO: 234296 - RNA, 19 nt, Artificial Sequence
  Description of Artificial Sequence: Synthetic oligonucleotide
cucggagggugauauuguu

SEQ ID NO: 234297 - RNA, 19 nt, Artificial Sequence
  Description of Artificial Sequence: Synthetic oligonucleotide
gcacgcucaugugcagugc

SEQ ID NO: 234298 - RNA, 19 nt, Artificial Sequence
  Description of Artificial Sequence: Synthetic oligonucleotide
ccggcaccaaaggaagcac

SEQ ID NO: 234299 - RNA, 19 nt, Artificial Sequence
  Description of Artificial Sequence: Synthetic oligonucleotide
gcagugcguuugcuugaac

SEQ ID NO: 234300 - RNA, 19 nt, Artificial Sequence
  Description of Artificial Sequence: Synthetic oligonucleotide
cugccguagcauugucugu

SEQ ID NO: 234301 - RNA, 19 nt, Artificial Sequence
  Description of Artificial Sequence: Synthetic oligonucleotide
gaacuccauuuuguagguu

SEQ ID NO: 234302 - RNA, 19 nt, Artificial Sequence
  Description of Artificial Sequence: Synthetic oligonucleotide
gucgacuccucgaguaguu

SEQ ID NO: 234303 - RNA, 19 nt, Artificial Sequence
  Description of Artificial Sequence: Synthetic oligonucleotide
cacaagcuccugacucuau

SEQ ID NO: 234304 - RNA, 19 nt, Artificial Sequence
  Description of Artificial Sequence: Synthetic oligonucleotide
agcauccgcuggggaugug

SEQ ID NO: 234305 - RNA, 19 nt, Artificial Sequence
  Description of Artificial Sequence: Synthetic oligonucleotide
cgaaccucauacaucucau

SEQ ID NO: 234306 - RNA, 19 nt, Artificial Sequence
  Description of Artificial Sequence: Synthetic oligonucleotide
cucuauccauggagauuuu

SEQ ID NO: 234307 - RNA, 19 nt, Artificial Sequence
  Description of Artificial Sequence: Synthetic oligonucleotide
cgaacuacccaggagccau

SEQ ID NO: 234308 - RNA, 19 nt, Artificial Sequence
  Description of Artificial Sequence: Synthetic oligonucleotide
gccaugagucggggcauaa

SEQ ID NO: 234309 - RNA, 19 nt, Artificial Sequence
  Description of Artificial Sequence: Synthetic oligonucleotide
gcguuugcuugaacacgaa

SEQ ID NO: 234310 - RNA, 19 nt, Artificial Sequence
  Description of Artificial Sequence: Synthetic oligonucleotide
gccucaugugguguaugau

SEQ ID NO: 234311 - RNA, 19 nt, Artificial Sequence
  Description of Artificial Sequence: Synthetic oligonucleotide
cgaagguuauuggaacgau

SEQ ID NO: 234312 - RNA, 19 nt, Artificial Sequence
  Description of Artificial Sequence: Synthetic oligonucleotide
cguacaccaugggauguau

SEQ ID NO: 234313 - RNA, 19 nt, Artificial Sequence
  Description of Artificial Sequence: Synthetic oligonucleotide
uuauuaaucacuaaaacag

SEQ ID NO: 234314 - RNA, 19 nt, Artificial Sequence
  Description of Artificial Sequence: Synthetic oligonucleotide
aaauauauagcccagguuu

SEQ ID NO: 234315 - RNA, 19 nt, Artificial Sequence
  Description of Artificial Sequence: Synthetic oligonucleotide
uuaagucauccaaacaucg

SEQ ID NO: 234316 - RNA, 19 nt, Artificial Sequence
  Description of Artificial Sequence: Synthetic oligonucleotide
uauuaaucacuaaaacagg

SEQ ID NO: 234317 - RNA, 19 nt, Artificial Sequence
  Description of Artificial Sequence: Synthetic oligonucleotide
gauaagauuuguuaguuca

SEQ ID NO: 234318 - RNA, 19 nt, Artificial Sequence
  Description of Artificial Sequence: Synthetic oligonucleotide
aauuauacccuugauaaga

SEQ ID NO: 234319 - RNA, 19 nt, Artificial Sequence
  Description of Artificial Sequence: Synthetic oligonucleotide
uuuuagaacaaaguccugg

SEQ ID NO: 234320 - RNA, 19 nt, Artificial Sequence
  Description of Artificial Sequence: Synthetic oligonucleotide
uauuauugaaagagaaccc

SEQ ID NO: 234321 - RNA, 19 nt, Artificial Sequence
  Description of Artificial Sequence: Synthetic oligonucleotide
cuacugacaaguauguugg

SEQ ID NO: 234322 - RNA, 19 nt, Artificial Sequence
  Description of Artificial Sequence: Synthetic oligonucleotide
ucuucuaggacuuuagagu

SEQ ID NO: 234323 - RNA, 19 nt, Artificial Sequence
  Description of Artificial Sequence: Synthetic oligonucleotide
uuucaagccaggcuugucg

SEQ ID NO: 234324 - RNA, 19 nt, Artificial Sequence
  Description of Artificial Sequence: Synthetic oligonucleotide
agauaauuuaucaaaauga

SEQ ID NO: 234325 - RNA, 19 nt, Artificial Sequence
  Description of Artificial Sequence: Synthetic oligonucleotide
cuuuaaaauauauagccca

SEQ ID NO: 234326 - RNA, 19 nt, Artificial Sequence
  Description of Artificial Sequence: Synthetic oligonucleotide
ugcacacuuauuuaguucc

SEQ ID NO: 234327 - RNA, 19 nt, Artificial Sequence
  Description of Artificial Sequence: Synthetic oligonucleotide
ugcaaugaaggcuucuugg

SEQ ID NO: 234328 - RNA, 19 nt, Artificial Sequence
  Description of Artificial Sequence: Synthetic oligonucleotide
agagguauggcccgaacac

SEQ ID NO: 234329 - RNA, 19 nt, Artificial Sequence
  Description of Artificial Sequence: Synthetic oligonucleotide
aacguugcagauuuuagaa

SEQ ID NO: 234330 - RNA, 19 nt, Artificial Sequence
  Description of Artificial Sequence: Synthetic oligonucleotide
ucuguuuaucacuugcucc

SEQ ID NO: 234331 - RNA, 19 nt, Artificial Sequence
  Description of Artificial Sequence: Synthetic oligonucleotide
acuaaaacaggacggaugu

SEQ ID NO: 234332 - RNA, 19 nt, Artificial Sequence
  Description of Artificial Sequence: Synthetic oligonucleotide
auagcgacaagccucuuuc

SEQ ID NO: 234333 - RNA, 19 nt, Artificial Sequence
  Description of Artificial Sequence: Synthetic oligonucleotide
auugcaacugguaaacacc

SEQ ID NO: 234334 - RNA, 19 nt, Artificial Sequence
  Description of Artificial Sequence: Synthetic oligonucleotide
cagauaauuuaucaaaaug

SEQ ID NO: 234335 - RNA, 19 nt, Artificial Sequence
  Description of Artificial Sequence: Synthetic oligonucleotide
agucucggaaucuacuggc

SEQ ID NO: 234336 - RNA, 19 nt, Artificial Sequence
  Description of Artificial Sequence: Synthetic oligonucleotide
cauagaacgaaucaaguca

SEQ ID NO: 234337 - RNA, 19 nt, Artificial Sequence
  Description of Artificial Sequence: Synthetic oligonucleotide
cagauuuuagaacaaaguc

SEQ ID NO: 234338 - RNA, 19 nt, Artificial Sequence
  Description of Artificial Sequence: Synthetic oligonucleotide
aagugcguuaaucuguucu

SEQ ID NO: 234339 - RNA, 19 nt, Artificial Sequence
  Description of Artificial Sequence: Synthetic oligonucleotide
uggagauucuccuuuuggg

SEQ ID NO: 234340 - RNA, 19 nt, Artificial Sequence
  Description of Artificial Sequence: Synthetic oligonucleotide
ugcucaauuccaaagcccc

SEQ ID NO: 234341 - RNA, 19 nt, Artificial Sequence
  Description of Artificial Sequence: Synthetic oligonucleotide
gagaguaggccucuugugg

SEQ ID NO: 234342 - RNA, 19 nt, Artificial Sequence
  Description of Artificial Sequence: Synthetic oligonucleotide
uuugguguaugacagcaac

SEQ ID NO: 234343 - RNA, 19 nt, Artificial Sequence
  Description of Artificial Sequence: Synthetic oligonucleotide
uuuagaacaaaguccugga

SEQ ID NO: 234344 - RNA, 19 nt, Artificial Sequence
  Description of Artificial Sequence: Synthetic oligonucleotide
acagguugagggcuaauac

SEQ ID NO: 234345 - RNA, 19 nt, Artificial Sequence
  Description of Artificial Sequence: Synthetic oligonucleotide
aaaaguuccauagaacgaa

SEQ ID NO: 234346 - RNA, 19 nt, Artificial Sequence
  Description of Artificial Sequence: Synthetic oligonucleotide
uauugcaacugguaaacac

SEQ ID NO: 234347 - RNA, 19 nt, Artificial Sequence
  Description of Artificial Sequence: Synthetic oligonucleotide
ucugccuauuucuucauug

SEQ ID NO: 234348 - RNA, 19 nt, Artificial Sequence
  Description of Artificial Sequence: Synthetic oligonucleotide
uuccugaauuaaaaucugg

SEQ ID NO: 234349 - RNA, 19 nt, Artificial Sequence
  Description of Artificial Sequence: Synthetic oligonucleotide
uagagcauagcgacaagcc

SEQ ID NO: 234350 - RNA, 19 nt, Artificial Sequence
  Description of Artificial Sequence: Synthetic oligonucleotide
ugugaaucuuugcaaaccu

SEQ ID NO: 234351 - RNA, 19 nt, Artificial Sequence
  Description of Artificial Sequence: Synthetic oligonucleotide
ugaauuuuagcuccacuau

SEQ ID NO: 234352 - RNA, 19 nt, Artificial Sequence
  Description of Artificial Sequence: Synthetic oligonucleotide
uuagaacaaaguccuggag

SEQ ID NO: 234353 - RNA, 19 nt, Artificial Sequence
  Description of Artificial Sequence: Synthetic oligonucleotide
gacccucucgcuuugacag

SEQ ID NO: 234354 - RNA, 19 nt, Artificial Sequence
  Description of Artificial Sequence: Synthetic oligonucleotide
ugcacguucacgucuuugg

SEQ ID NO: 234355 - RNA, 19 nt, Artificial Sequence
  Description of Artificial Sequence: Synthetic oligonucleotide
uaauacuugccacgucugg

SEQ ID NO: 234356 - RNA, 19 nt, Artificial Sequence
  Description of Artificial Sequence: Synthetic oligonucleotide
ucuagcggagcugagaagc

SEQ ID NO: 234357 - RNA, 19 nt, Artificial Sequence
  Description of Artificial Sequence: Synthetic oligonucleotide
augugaaucuuugcaaacc

SEQ ID NO: 234358 - RNA, 19 nt, Artificial Sequence
  Description of Artificial Sequence: Synthetic oligonucleotide
aaaccagugcuccagucgu

SEQ ID NO: 234359 - RNA, 19 nt, Artificial Sequence
  Description of Artificial Sequence: Synthetic oligonucleotide
auagaacgaaucaagucac

SEQ ID NO: 234360 - RNA, 19 nt, Artificial Sequence
  Description of Artificial Sequence: Synthetic oligonucleotide
ugaucagcccaucugaguc

SEQ ID NO: 234361 - RNA, 19 nt, Artificial Sequence
  Description of Artificial Sequence: Synthetic oligonucleotide
uggggugaauuuuagcucc

SEQ ID NO: 234362 - RNA, 19 nt, Artificial Sequence
  Description of Artificial Sequence: Synthetic oligonucleotide
ucccucuucugccagauca

SEQ ID NO: 234363 - RNA, 19 nt, Artificial Sequence
  Description of Artificial Sequence: Synthetic oligonucleotide
agucguacacuugaucucc

SEQ ID NO: 234364 - RNA, 19 nt, Artificial Sequence
  Description of Artificial Sequence: Synthetic oligonucleotide
ucuauugcaacugguaaac

SEQ ID NO: 234365 - RNA, 19 nt, Artificial Sequence
  Description of Artificial Sequence: Synthetic oligonucleotide
ugcacaacguugcagauuu

SEQ ID NO: 234366 - RNA, 19 nt, Artificial Sequence
  Description of Artificial Sequence: Synthetic oligonucleotide
gaucagcuugguuuaacag

SEQ ID NO: 234367 - RNA, 19 nt, Artificial Sequence
  Description of Artificial Sequence: Synthetic oligonucleotide
agaguaggccucuuguggg

SEQ ID NO: 234368 - RNA, 19 nt, Artificial Sequence
  Description of Artificial Sequence: Synthetic oligonucleotide
cacuuuucuagaacaaagc

SEQ ID NO: 234369 - RNA, 19 nt, Artificial Sequence
  Description of Artificial Sequence: Synthetic oligonucleotide
uggaauaauggguucagau

SEQ ID NO: 234370 - RNA, 19 nt, Artificial Sequence
  Description of Artificial Sequence: Synthetic oligonucleotide
agggcuaauacuugccacg

SEQ ID NO: 234371 - RNA, 19 nt, Artificial Sequence
  Description of Artificial Sequence: Synthetic oligonucleotide
aaacucaacagggcuguac

SEQ ID NO: 234372 - RNA, 19 nt, Artificial Sequence
  Description of Artificial Sequence: Synthetic oligonucleotide
uuucugcccucauucaagg

SEQ ID NO: 234373 - RNA, 19 nt, Artificial Sequence
  Description of Artificial Sequence: Synthetic oligonucleotide
auaauggguucagauacac

SEQ ID NO: 234374 - RNA, 19 nt, Artificial Sequence
  Description of Artificial Sequence: Synthetic oligonucleotide
ugaauucccaaauuuucuc

SEQ ID NO: 234375 - RNA, 19 nt, Artificial Sequence
  Description of Artificial Sequence: Synthetic oligonucleotide
ugacaaguauguugggucc

SEQ ID NO: 234376 - RNA, 19 nt, Artificial Sequence
  Description of Artificial Sequence: Synthetic oligonucleotide
cugagagucgucagcaucc

SEQ ID NO: 234377 - RNA, 19 nt, Artificial Sequence
  Description of Artificial Sequence: Synthetic oligonucleotide
cugacaaguauguuggguc

SEQ ID NO: 234378 - RNA, 19 nt, Artificial Sequence
  Description of Artificial Sequence: Synthetic oligonucleotide
gaugugaaucuuugcaaac

SEQ ID NO: 234379 - RNA, 19 nt, Artificial Sequence
  Description of Artificial Sequence: Synthetic oligonucleotide
uggggauucuggcaaagug

SEQ ID NO: 234380 - RNA, 19 nt, Artificial Sequence
  Description of Artificial Sequence: Synthetic oligonucleotide
aauuagcugcccugagaag

SEQ ID NO: 234381 - RNA, 19 nt, Artificial Sequence
  Description of Artificial Sequence: Synthetic oligonucleotide
agcuugguuuaacagcuuc

SEQ ID NO: 234382 - RNA, 19 nt, Artificial Sequence
  Description of Artificial Sequence: Synthetic oligonucleotide
caaaccagugcuccagucg

SEQ ID NO: 234383 - RNA, 19 nt, Artificial Sequence
  Description of Artificial Sequence: Synthetic oligonucleotide
uucauugaccaugucaacu

SEQ ID NO: 234384 - RNA, 19 nt, Artificial Sequence
  Description of Artificial Sequence: Synthetic oligonucleotide
acguugcagauuuuagaac

SEQ ID NO: 234385 - RNA, 19 nt, Artificial Sequence
  Description of Artificial Sequence: Synthetic oligonucleotide
uaguuuuccuuugaauucc

SEQ ID NO: 234386 - RNA, 19 nt, Artificial Sequence
  Description of Artificial Sequence: Synthetic oligonucleotide
uggcugaacacuagcuggg

SEQ ID NO: 234387 - RNA, 19 nt, Artificial Sequence
  Description of Artificial Sequence: Synthetic oligonucleotide
ugcuauugccaaagucucg

SEQ ID NO: 234388 - RNA, 19 nt, Artificial Sequence
  Description of Artificial Sequence: Synthetic oligonucleotide
cuugaggugagaguaggcc

SEQ ID NO: 234389 - RNA, 19 nt, Artificial Sequence
  Description of Artificial Sequence: Synthetic oligonucleotide
gaaggggucacugggaaug

SEQ ID NO: 234390 - RNA, 19 nt, Artificial Sequence
  Description of Artificial Sequence: Synthetic oligonucleotide
gaagcacucgacccucucg

SEQ ID NO: 234391 - RNA, 19 nt, Artificial Sequence
  Description of Artificial Sequence: Synthetic oligonucleotide
ucauucaaggaggauguca

SEQ ID NO: 234392 - RNA, 19 nt, Artificial Sequence
  Description of Artificial Sequence: Synthetic oligonucleotide
ugagggcuaauacuugcca

SEQ ID NO: 234393 - RNA, 19 nt, Artificial Sequence
  Description of Artificial Sequence: Synthetic oligonucleotide
gaucuagcuuauuaaucac

SEQ ID NO: 234394 - RNA, 19 nt, Artificial Sequence
  Description of Artificial Sequence: Synthetic oligonucleotide
auggcccgaacacugagag

SEQ ID NO: 234395 - RNA, 19 nt, Artificial Sequence
  Description of Artificial Sequence: Synthetic oligonucleotide
cuagccaguccacuggucc

SEQ ID NO: 234396 - RNA, 19 nt, Artificial Sequence
  Description of Artificial Sequence: Synthetic oligonucleotide
aaguauguuggguccacau

SEQ ID NO: 234397 - RNA, 19 nt, Artificial Sequence
  Description of Artificial Sequence: Synthetic oligonucleotide
ucucgcuuugacagcacag

SEQ ID NO: 234398 - RNA, 19 nt, Artificial Sequence
  Description of Artificial Sequence: Synthetic oligonucleotide
uuucuagaacaaagcagac

SEQ ID NO: 234399 - RNA, 19 nt, Artificial Sequence
  Description of Artificial Sequence: Synthetic oligonucleotide
gauuguuucucugaaugga

SEQ ID NO: 234400 - RNA, 19 nt, Artificial Sequence
  Description of Artificial Sequence: Synthetic oligonucleotide
cgagcaaaugcaaugaagg

SEQ ID NO: 234401 - RNA, 19 nt, Artificial Sequence
  Description of Artificial Sequence: Synthetic oligonucleotide
ucggaaucugccuucuccc

SEQ ID NO: 234402 - RNA, 19 nt, Artificial Sequence
  Description of Artificial Sequence: Synthetic oligonucleotide
gaacacacgagcaaaugca

SEQ ID NO: 234403 - RNA, 19 nt, Artificial Sequence
  Description of Artificial Sequence: Synthetic oligonucleotide
uugagggcuaauacuugcc

SEQ ID NO: 234404 - RNA, 19 nt, Artificial Sequence
  Description of Artificial Sequence: Synthetic oligonucleotide
ucauugaccaugucaacuu

SEQ ID NO: 234405 - RNA, 19 nt, Artificial Sequence
  Description of Artificial Sequence: Synthetic oligonucleotide
ugagaguaggccucuugug

SEQ ID NO: 234406 - RNA, 19 nt, Artificial Sequence
  Description of Artificial Sequence: Synthetic oligonucleotide
auauucuugaggugagagu

SEQ ID NO: 234407 - RNA, 19 nt, Artificial Sequence
  Description of Artificial Sequence: Synthetic oligonucleotide
uggcucaucaccucuuggc

SEQ ID NO: 234408 - RNA, 19 nt, Artificial Sequence
  Description of Artificial Sequence: Synthetic oligonucleotide
uugggcgucgugaugguga

SEQ ID NO: 234409 - RNA, 19 nt, Artificial Sequence
  Description of Artificial Sequence: Synthetic oligonucleotide
gaccagagaggguugcuag

SEQ ID NO: 234410 - RNA, 19 nt, Artificial Sequence
  Description of Artificial Sequence: Synthetic oligonucleotide
ugauaagauuuguuaguuc

SEQ ID NO: 234411 - RNA, 19 nt, Artificial Sequence
  Description of Artificial Sequence: Synthetic oligonucleotide
gugacuaaaacauguucuc

SEQ ID NO: 234412 - RNA, 19 nt, Artificial Sequence
  Description of Artificial Sequence: Synthetic oligonucleotide
acucucacaauaggggugg

SEQ ID NO: 234413 - RNA, 19 nt, Artificial Sequence
  Description of Artificial Sequence: Synthetic oligonucleotide
acugagaguggcuaguuua

SEQ ID NO: 234414 - RNA, 19 nt, Artificial Sequence
  Description of Artificial Sequence: Synthetic oligonucleotide
accagagaggguugcuagc

SEQ ID NO: 234415 - RNA, 19 nt, Artificial Sequence
  Description of Artificial Sequence: Synthetic oligonucleotide
ucuacuggcuucuuuugau

SEQ ID NO: 234416 - RNA, 19 nt, Artificial Sequence
  Description of Artificial Sequence: Synthetic oligonucleotide
uugugauuguuucucugaa

SEQ ID NO: 234417 - RNA, 19 nt, Artificial Sequence
  Description of Artificial Sequence: Synthetic oligonucleotide
gacuaaaacauguucuccu

SEQ ID NO: 234418 - RNA, 19 nt, Artificial Sequence
  Description of Artificial Sequence: Synthetic oligonucleotide
uauugccaaagucucggaa

SEQ ID NO: 234419 - RNA, 19 nt, Artificial Sequence
  Description of Artificial Sequence: Synthetic oligonucleotide
acguucacgucuuugggga

SEQ ID NO: 234420 - RNA, 19 nt, Artificial Sequence
  Description of Artificial Sequence: Synthetic oligonucleotide
cacguucacgucuuugggg

SEQ ID NO: 234421 - RNA, 19 nt, Artificial Sequence
  Description of Artificial Sequence: Synthetic oligonucleotide
cuugucgaagaacugccug

SEQ ID NO: 234422 - RNA, 19 nt, Artificial Sequence
  Description of Artificial Sequence: Synthetic oligonucleotide
cuaauacuugccacgucug

SEQ ID NO: 234423 - RNA, 19 nt, Artificial Sequence
  Description of Artificial Sequence: Synthetic oligonucleotide
uugauaagauuuguuaguu

SEQ ID NO: 234424 - RNA, 19 nt, Artificial Sequence
  Description of Artificial Sequence: Synthetic oligonucleotide
gucgugauggugaucagcc

SEQ ID NO: 234425 - RNA, 19 nt, Artificial Sequence
  Description of Artificial Sequence: Synthetic oligonucleotide
cuagaacaaagcagacacc

SEQ ID NO: 234426 - RNA, 19 nt, Artificial Sequence
  Description of Artificial Sequence: Synthetic oligonucleotide
aauauauagcccagguuua

SEQ ID NO: 234427 - RNA, 19 nt, Artificial Sequence
  Description of Artificial Sequence: Synthetic oligonucleotide
ugggaaugaccucccagug

SEQ ID NO: 234428 - RNA, 19 nt, Artificial Sequence
  Description of Artificial Sequence: Synthetic oligonucleotide
auauagcccagguuuauua

SEQ ID NO: 234429 - RNA, 19 nt, Artificial Sequence
  Description of Artificial Sequence: Synthetic oligonucleotide
ucugucgugcacguucacg

SEQ ID NO: 234430 - RNA, 19 nt, Artificial Sequence
  Description of Artificial Sequence: Synthetic oligonucleotide
gcaacucucacaauagggg

SEQ ID NO: 234431 - RNA, 19 nt, Artificial Sequence
  Description of Artificial Sequence: Synthetic oligonucleotide
ugccuauuucuucauugac

SEQ ID NO: 234432 - RNA, 19 nt, Artificial Sequence
  Description of Artificial Sequence: Synthetic oligonucleotide
auaaugucacauguguaca

SEQ ID NO: 234433 - RNA, 19 nt, Artificial Sequence
  Description of Artificial Sequence: Synthetic oligonucleotide
ugaggugagaguaggccuc

SEQ ID NO: 234434 - RNA, 19 nt, Artificial Sequence
  Description of Artificial Sequence: Synthetic oligonucleotide
augaacggagggcaggaug

SEQ ID NO: 234435 - RNA, 19 nt, Artificial Sequence
  Description of Artificial Sequence: Synthetic oligonucleotide
aacucucacaauaggggug

SEQ ID NO: 234436 - RNA, 19 nt, Artificial Sequence
  Description of Artificial Sequence: Synthetic oligonucleotide
cuggaagagguauggcccg

SEQ ID NO: 234437 - RNA, 19 nt, Artificial Sequence
  Description of Artificial Sequence: Synthetic oligonucleotide
uccaaauuauacccuugau

SEQ ID NO: 234438 - RNA, 19 nt, Artificial Sequence
  Description of Artificial Sequence: Synthetic oligonucleotide
caaagccgaagcuuucggc

SEQ ID NO: 234439 - RNA, 19 nt, Artificial Sequence
  Description of Artificial Sequence: Synthetic oligonucleotide
gaggaaugaacggagggca

SEQ ID NO: 234440 - RNA, 19 nt, Artificial Sequence
  Description of Artificial Sequence: Synthetic oligonucleotide
cuuguggggugaauuuuag

SEQ ID NO: 234441 - RNA, 19 nt, Artificial Sequence
  Description of Artificial Sequence: Synthetic oligonucleotide
aguggaacccguuguaaaa

SEQ ID NO: 234442 - RNA, 19 nt, Artificial Sequence
  Description of Artificial Sequence: Synthetic oligonucleotide
guagagcauagcgacaagc

SEQ ID NO: 234443 - RNA, 19 nt, Artificial Sequence
  Description of Artificial Sequence: Synthetic oligonucleotide
gcuauugccaaagucucgg

SEQ ID NO: 234444 - RNA, 19 nt, Artificial Sequence
  Description of Artificial Sequence: Synthetic oligonucleotide
uccuccaaaccagugcucc

SEQ ID NO: 234445 - RNA, 19 nt, Artificial Sequence
  Description of Artificial Sequence: Synthetic oligonucleotide
cugguucucggaaucugcc

SEQ ID NO: 234446 - RNA, 19 nt, Artificial Sequence
  Description of Artificial Sequence: Synthetic oligonucleotide
auuaaguguugcucuaguu

SEQ ID NO: 234447 - RNA, 19 nt, Artificial Sequence
  Description of Artificial Sequence: Synthetic oligonucleotide
uggggaccuguuucaaggg

SEQ ID NO: 234448 - RNA, 19 nt, Artificial Sequence
  Description of Artificial Sequence: Synthetic oligonucleotide
cuucuaggacuuuagagua

SEQ ID NO: 234449 - RNA, 19 nt, Artificial Sequence
  Description of Artificial Sequence: Synthetic oligonucleotide
aucacuaaaacaggacgga

SEQ ID NO: 234450 - RNA, 19 nt, Artificial Sequence
  Description of Artificial Sequence: Synthetic oligonucleotide
uuccgcguguuccacaauc

SEQ ID NO: 234451 - RNA, 19 nt, Artificial Sequence
  Description of Artificial Sequence: Synthetic oligonucleotide
ucaaggguaccuccauccu

SEQ ID NO: 234452 - RNA, 19 nt, Artificial Sequence
  Description of Artificial Sequence: Synthetic oligonucleotide
ucggcaaagccgaagcuuu

SEQ ID NO: 234453 - RNA, 19 nt, Artificial Sequence
  Description of Artificial Sequence: Synthetic oligonucleotide
uaauggguucagauacacu

SEQ ID NO: 234454 - RNA, 19 nt, Artificial Sequence
  Description of Artificial Sequence: Synthetic oligonucleotide
cuauuaaguguugcucuag

SEQ ID NO: 234455 - RNA, 19 nt, Artificial Sequence
  Description of Artificial Sequence: Synthetic oligonucleotide
guggcaauuagcugcccug

SEQ ID NO: 234456 - RNA, 19 nt, Artificial Sequence
  Description of Artificial Sequence: Synthetic oligonucleotide
acaaguauguuggguccac

SEQ ID NO: 234457 - RNA, 19 nt, Artificial Sequence
  Description of Artificial Sequence: Synthetic oligonucleotide
guggccauaaugucacaug

SEQ ID NO: 234458 - RNA, 19 nt, Artificial Sequence
  Description of Artificial Sequence: Synthetic oligonucleotide
agaccauacugaguucugg

SEQ ID NO: 234459 - RNA, 19 nt, Artificial Sequence
  Description of Artificial Sequence: Synthetic oligonucleotide
uauggcccgaacacugaga

SEQ ID NO: 234460 - RNA, 19 nt, Artificial Sequence
  Description of Artificial Sequence: Synthetic oligonucleotide
acgagcaaaugcaaugaag

SEQ ID NO: 234461 - RNA, 19 nt, Artificial Sequence
  Description of Artificial Sequence: Synthetic oligonucleotide
aggcguugaggcuucaccu

SEQ ID NO: 234462 - RNA, 19 nt, Artificial Sequence
  Description of Artificial Sequence: Synthetic oligonucleotide
aaugucacauguguacaua

SEQ ID NO: 234463 - RNA, 19 nt, Artificial Sequence
  Description of Artificial Sequence: Synthetic oligonucleotide
acugacaaguauguugggu

SEQ ID NO: 234464 - RNA, 19 nt, Artificial Sequence
  Description of Artificial Sequence: Synthetic oligonucleotide
augguggcaauuagcugcc

SEQ ID NO: 234465 - RNA, 19 nt, Artificial Sequence
  Description of Artificial Sequence: Synthetic oligonucleotide
uugcuagcuggaaaccacu

SEQ ID NO: 234466 - RNA, 19 nt, Artificial Sequence
  Description of Artificial Sequence: Synthetic oligonucleotide
agugcguuaaucuguucua

SEQ ID NO: 234467 - RNA, 19 nt, Artificial Sequence
  Description of Artificial Sequence: Synthetic oligonucleotide
uucaucggcaaagccgaag

SEQ ID NO: 234468 - RNA, 19 nt, Artificial Sequence
  Description of Artificial Sequence: Synthetic oligonucleotide
ggcccgaacacugagagug

SEQ ID NO: 234469 - RNA, 19 nt, Artificial Sequence
  Description of Artificial Sequence: Synthetic oligonucleotide
cucaacagggcuguacuug

SEQ ID NO: 234470 - RNA, 19 nt, Artificial Sequence
  Description of Artificial Sequence: Synthetic oligonucleotide
ggacggauguuuucaagcc

SEQ ID NO: 234471 - RNA, 19 nt, Artificial Sequence
  Description of Artificial Sequence: Synthetic oligonucleotide
uaguggaacccguuguaaa

SEQ ID NO: 234472 - RNA, 19 nt, Artificial Sequence
  Description of Artificial Sequence: Synthetic oligonucleotide
cacauugcccugcucuggg

SEQ ID NO: 234473 - RNA, 19 nt, Artificial Sequence
  Description of Artificial Sequence: Synthetic oligonucleotide
ugcguuaaucuguucuaaa

SEQ ID NO: 234474 - RNA, 19 nt, Artificial Sequence
  Description of Artificial Sequence: Synthetic oligonucleotide
aaccuuucucuuaagucau

SEQ ID NO: 234475 - RNA, 19 nt, Artificial Sequence
  Description of Artificial Sequence: Synthetic oligonucleotide
cucgcuuugacagcacagc

SEQ ID NO: 234476 - RNA, 19 nt, Artificial Sequence
  Description of Artificial Sequence: Synthetic oligonucleotide
cugcacacuuauuuaguuc

SEQ ID NO: 234477 - RNA, 19 nt, Artificial Sequence
  Description of Artificial Sequence: Synthetic oligonucleotide
caggcguugaggcuucacc

SEQ ID NO: 234478 - RNA, 19 nt, Artificial Sequence
  Description of Artificial Sequence: Synthetic oligonucleotide
cuuucugcgugucucuguc

SEQ ID NO: 234479 - RNA, 19 nt, Artificial Sequence
  Description of Artificial Sequence: Synthetic oligonucleotide
uagaacgaaucaagucacu

SEQ ID NO: 234480 - RNA, 19 nt, Artificial Sequence
  Description of Artificial Sequence: Synthetic oligonucleotide
uucuaggacuuuagaguaa

SEQ ID NO: 234481 - RNA, 19 nt, Artificial Sequence
  Description of Artificial Sequence: Synthetic oligonucleotide
cagcacagcauagacucgg

SEQ ID NO: 234482 - RNA, 19 nt, Artificial Sequence
  Description of Artificial Sequence: Synthetic oligonucleotide
cacuaucaggcgaucuagc

SEQ ID NO: 234483 - RNA, 19 nt, Artificial Sequence
  Description of Artificial Sequence: Synthetic oligonucleotide
gacggauguuuucaagcca

SEQ ID NO: 234484 - RNA, 19 nt, Artificial Sequence
  Description of Artificial Sequence: Synthetic oligonucleotide
ucgagcuaugccacugaac

SEQ ID NO: 234485 - RNA, 19 nt, Artificial Sequence
  Description of Artificial Sequence: Synthetic oligonucleotide
guggggugaauuuuagcuc

SEQ ID NO: 234486 - RNA, 19 nt, Artificial Sequence
  Description of Artificial Sequence: Synthetic oligonucleotide
cucaucaccucuuggcuca

SEQ ID NO: 234487 - RNA, 19 nt, Artificial Sequence
  Description of Artificial Sequence: Synthetic oligonucleotide
aagccccagccaucuauug

SEQ ID NO: 234488 - RNA, 19 nt, Artificial Sequence
  Description of Artificial Sequence: Synthetic oligonucleotide
cugagaagccuaguggaac

SEQ ID NO: 234489 - RNA, 19 nt, Artificial Sequence
  Description of Artificial Sequence: Synthetic oligonucleotide
acacgagcaaaugcaauga

SEQ ID NO: 234490 - RNA, 19 nt, Artificial Sequence
  Description of Artificial Sequence: Synthetic oligonucleotide
guauggcccgaacacugag

SEQ ID NO: 234491 - RNA, 19 nt, Artificial Sequence
  Description of Artificial Sequence: Synthetic oligonucleotide
uccgcguguuccacaaucu

SEQ ID NO: 234492 - RNA, 19 nt, Artificial Sequence
  Description of Artificial Sequence: Synthetic oligonucleotide
cuguuuaucacuugcuccu

SEQ ID NO: 234493 - RNA, 19 nt, Artificial Sequence
  Description of Artificial Sequence: Synthetic oligonucleotide
ggaauaauggguucagaua

SEQ ID NO: 234494 - RNA, 19 nt, Artificial Sequence
  Description of Artificial Sequence: Synthetic oligonucleotide
guauguuggguccacauuu

SEQ ID NO: 234495 - RNA, 19 nt, Artificial Sequence
  Description of Artificial Sequence: Synthetic oligonucleotide
gaucagcccaucugaguca

SEQ ID NO: 234496 - RNA, 19 nt, Artificial Sequence
  Description of Artificial Sequence: Synthetic oligonucleotide
aggcgaucuagcuuauuaa

SEQ ID NO: 234497 - RNA, 19 nt, Artificial Sequence
  Description of Artificial Sequence: Synthetic oligonucleotide
ugcuagcuggaaaccacuc

SEQ ID NO: 234498 - RNA, 19 nt, Artificial Sequence
  Description of Artificial Sequence: Synthetic oligonucleotide
agaacgaaucaagucacua

SEQ ID NO: 234499 - RNA, 19 nt, Artificial Sequence
  Description of Artificial Sequence: Synthetic oligonucleotide
agccuaguggaacccguug

SEQ ID NO: 234500 - RNA, 19 nt, Artificial Sequence
  Description of Artificial Sequence: Synthetic oligonucleotide
ugcaacugguaaacaccac

SEQ ID NO: 234501 - RNA, 19 nt, Artificial Sequence
  Description of Artificial Sequence: Synthetic oligonucleotide
agcgacaagccucuuucau

SEQ ID NO: 234502 - RNA, 19 nt, Artificial Sequence
  Description of Artificial Sequence: Synthetic oligonucleotide
uuauacccuugauaagauu

SEQ ID NO: 234503 - RNA, 19 nt, Artificial Sequence
  Description of Artificial Sequence: Synthetic oligonucleotide
aauucccagcacauuuccu

SEQ ID NO: 234504 - RNA, 19 nt, Artificial Sequence
  Description of Artificial Sequence: Synthetic oligonucleotide
gaacugccugugucugugg

SEQ ID NO: 234505 - RNA, 19 nt, Artificial Sequence
  Description of Artificial Sequence: Synthetic oligonucleotide
cagucguacacuugaucuc

SEQ ID NO: 234506 - RNA, 19 nt, Artificial Sequence
  Description of Artificial Sequence: Synthetic oligonucleotide
ugaccagauuuggucaaca

SEQ ID NO: 234507 - RNA, 19 nt, Artificial Sequence
  Description of Artificial Sequence: Synthetic oligonucleotide
gcaacugguaaacaccaca

SEQ ID NO: 234508 - RNA, 19 nt, Artificial Sequence
  Description of Artificial Sequence: Synthetic oligonucleotide
ucacuugcuccuuguucug

SEQ ID NO: 234509 - RNA, 19 nt, Artificial Sequence
  Description of Artificial Sequence: Synthetic oligonucleotide
gaaugaacggagggcagga

SEQ ID NO: 234510 - RNA, 19 nt, Artificial Sequence
  Description of Artificial Sequence: Synthetic oligonucleotide
aagucacuauuuucuucua

SEQ ID NO: 234511 - RNA, 19 nt, Artificial Sequence
  Description of Artificial Sequence: Synthetic oligonucleotide
acccucucgcuuugacagc

SEQ ID NO: 234512 - RNA, 19 nt, Artificial Sequence
  Description of Artificial Sequence: Synthetic oligonucleotide
ucggaaucuacuggcuucu

SEQ ID NO: 234513 - RNA, 19 nt, Artificial Sequence
  Description of Artificial Sequence: Synthetic oligonucleotide
ggguccauagcagucagug

SEQ ID NO: 234514 - RNA, 19 nt, Artificial Sequence
  Description of Artificial Sequence: Synthetic oligonucleotide
agguauggcccgaacacug

SEQ ID NO: 234515 - RNA, 19 nt, Artificial Sequence
  Description of Artificial Sequence: Synthetic oligonucleotide
ucgugauggugaucagccc

SEQ ID NO: 234516 - RNA, 19 nt, Artificial Sequence
  Description of Artificial Sequence: Synthetic oligonucleotide
uggcuaguuuauugggcgu

SEQ ID NO: 234517 - RNA, 19 nt, Artificial Sequence
  Description of Artificial Sequence: Synthetic oligonucleotide
ugaguguucucugcuuuuc

SEQ ID NO: 234518 - RNA, 19 nt, Artificial Sequence
  Description of Artificial Sequence: Synthetic oligonucleotide
uugcagauuuuagaacaaa

SEQ ID NO: 234519 - RNA, 19 nt, Artificial Sequence
  Description of Artificial Sequence: Synthetic oligonucleotide
gcaaagccgaagcuuucgg

SEQ ID NO: 234520 - RNA, 19 nt, Artificial Sequence
  Description of Artificial Sequence: Synthetic oligonucleotide
cauagacucggccgaggac

SEQ ID NO: 234521 - RNA, 19 nt, Artificial Sequence
  Description of Artificial Sequence: Synthetic oligonucleotide
gacucggccgaggacauca

SEQ ID NO: 234522 - RNA, 19 nt, Artificial Sequence
  Description of Artificial Sequence: Synthetic oligonucleotide
acgucuggcucaucaccuc

SEQ ID NO: 234523 - RNA, 19 nt, Artificial Sequence
  Description of Artificial Sequence: Synthetic oligonucleotide
cugcgugucucugucgugc

SEQ ID NO: 234524 - RNA, 19 nt, Artificial Sequence
  Description of Artificial Sequence: Synthetic oligonucleotide
ucgcugaagguggaccucc

SEQ ID NO: 234525 - RNA, 19 nt, Artificial Sequence
  Description of Artificial Sequence: Synthetic oligonucleotide
caacagggcuguacuuggg

SEQ ID NO: 234526 - RNA, 19 nt, Artificial Sequence
  Description of Artificial Sequence: Synthetic oligonucleotide
cugccuauuucuucauuga

SEQ ID NO: 234527 - RNA, 19 nt, Artificial Sequence
  Description of Artificial Sequence: Synthetic oligonucleotide
uagccaguccacugguccu

SEQ ID NO: 234528 - RNA, 19 nt, Artificial Sequence
  Description of Artificial Sequence: Synthetic oligonucleotide
cuaugccacugaacacacg

SEQ ID NO: 234529 - RNA, 19 nt, Artificial Sequence
  Description of Artificial Sequence: Synthetic oligonucleotide
auauauagcccagguuuau

SEQ ID NO: 234530 - RNA, 19 nt, Artificial Sequence
  Description of Artificial Sequence: Synthetic oligonucleotide
cgaucuagcuuauuaauca

SEQ ID NO: 234531 - RNA, 19 nt, Artificial Sequence
  Description of Artificial Sequence: Synthetic oligonucleotide
ggcugcacaacguugcaga

SEQ ID NO: 234532 - RNA, 19 nt, Artificial Sequence
  Description of Artificial Sequence: Synthetic oligonucleotide
gcuaguuuauugggcgucg

SEQ ID NO: 234533 - RNA, 19 nt, Artificial Sequence
  Description of Artificial Sequence: Synthetic oligonucleotide
ggaucagcuugguuuaaca

SEQ ID NO: 234534 - RNA, 19 nt, Artificial Sequence
  Description of Artificial Sequence: Synthetic oligonucleotide
uuccgggccugguucucgg

SEQ ID NO: 234535 - RNA, 19 nt, Artificial Sequence
  Description of Artificial Sequence: Synthetic oligonucleotide
guucucggaaucugccuuc

SEQ ID NO: 234536 - RNA, 19 nt, Artificial Sequence
  Description of Artificial Sequence: Synthetic oligonucleotide
ccaaauuauacccuugaua

SEQ ID NO: 234537 - RNA, 19 nt, Artificial Sequence
  Description of Artificial Sequence: Synthetic oligonucleotide
ucgacccucucgcuuugac

SEQ ID NO: 234538 - RNA, 19 nt, Artificial Sequence
  Description of Artificial Sequence: Synthetic oligonucleotide
gcgacaagccucuuucaug

SEQ ID NO: 234539 - RNA, 19 nt, Artificial Sequence
  Description of Artificial Sequence: Synthetic oligonucleotide
ggcaaagccgaagcuuucg

SEQ ID NO: 234540 - RNA, 19 nt, Artificial Sequence
  Description of Artificial Sequence: Synthetic oligonucleotide
ggcuugucgaagaacugcc

SEQ ID NO: 234541 - RNA, 19 nt, Artificial Sequence
  Description of Artificial Sequence: Synthetic oligonucleotide
cucuagcggagcugagaag

SEQ ID NO: 234542 - RNA, 19 nt, Artificial Sequence
  Description of Artificial Sequence: Synthetic oligonucleotide
ccacacagauaauuuauca

SEQ ID NO: 234543 - RNA, 19 nt, Artificial Sequence
  Description of Artificial Sequence: Synthetic oligonucleotide
agcccagguuuauuauuga

SEQ ID NO: 234544 - RNA, 19 nt, Artificial Sequence
  Description of Artificial Sequence: Synthetic oligonucleotide
caacucucacaauaggggu

SEQ ID NO: 234545 - RNA, 19 nt, Artificial Sequence
  Description of Artificial Sequence: Synthetic oligonucleotide
ggcgucgugauggugauca

SEQ ID NO: 234546 - RNA, 19 nt, Artificial Sequence
  Description of Artificial Sequence: Synthetic oligonucleotide
gugagaguaggccucuugu

SEQ ID NO: 234547 - RNA, 19 nt, Artificial Sequence
  Description of Artificial Sequence: Synthetic oligonucleotide
uuuucaagccaggcuuguc

SEQ ID NO: 234548 - RNA, 19 nt, Artificial Sequence
  Description of Artificial Sequence: Synthetic oligonucleotide
aaugaacggagggcaggau

SEQ ID NO: 234549 - RNA, 19 nt, Artificial Sequence
  Description of Artificial Sequence: Synthetic oligonucleotide
uagacucggccgaggacau

SEQ ID NO: 234550 - RNA, 19 nt, Artificial Sequence
  Description of Artificial Sequence: Synthetic oligonucleotide
caggcgaucuagcuuauua

SEQ ID NO: 234551 - RNA, 19 nt, Artificial Sequence
  Description of Artificial Sequence: Synthetic oligonucleotide
ugucgugcacguucacguc

SEQ ID NO: 234552 - RNA, 19 nt, Artificial Sequence
  Description of Artificial Sequence: Synthetic oligonucleotide
gggcuagccaguccacugg

SEQ ID NO: 234553 - RNA, 19 nt, Artificial Sequence
  Description of Artificial Sequence: Synthetic oligonucleotide
ugcgugucucugucgugca

SEQ ID NO: 234554 - RNA, 19 nt, Artificial Sequence
  Description of Artificial Sequence: Synthetic oligonucleotide
guacagcugagagucguca

SEQ ID NO: 234555 - RNA, 19 nt, Artificial Sequence
  Description of Artificial Sequence: Synthetic oligonucleotide
ugagagucgucagcauccu

SEQ ID NO: 234556 - RNA, 19 nt, Artificial Sequence
  Description of Artificial Sequence: Synthetic oligonucleotide
ccugguucucggaaucugc

SEQ ID NO: 234557 - RNA, 19 nt, Artificial Sequence
  Description of Artificial Sequence: Synthetic oligonucleotide
auggaauaauggguucaga

SEQ ID NO: 234558 - RNA, 19 nt, Artificial Sequence
  Description of Artificial Sequence: Synthetic oligonucleotide
cugucgugcacguucacgu

SEQ ID NO: 234559 - RNA, 19 nt, Artificial Sequence
  Description of Artificial Sequence: Synthetic oligonucleotide
ggugaucagcccaucugag

SEQ ID NO: 234560 - RNA, 19 nt, Artificial Sequence
  Description of Artificial Sequence: Synthetic oligonucleotide
acgaaucaagucacuauuu

SEQ ID NO: 234561 - RNA, 19 nt, Artificial Sequence
  Description of Artificial Sequence: Synthetic oligonucleotide
ggcaauuagcugcccugag

SEQ ID NO: 234562 - RNA, 19 nt, Artificial Sequence
  Description of Artificial Sequence: Synthetic oligonucleotide
ucuucaccugggagucugu

SEQ ID NO: 234563 - RNA, 19 nt, Artificial Sequence
  Description of Artificial Sequence: Synthetic oligonucleotide
aaacaucgcugaaggugga

SEQ ID NO: 234564 - RNA, 19 nt, Artificial Sequence
  Description of Artificial Sequence: Synthetic oligonucleotide
ucgugcacguucacgucuu

SEQ ID NO: 234565 - RNA, 19 nt, Artificial Sequence
  Description of Artificial Sequence: Synthetic oligonucleotide
uguuuaucacuugcuccuu

SEQ ID NO: 234566 - RNA, 19 nt, Artificial Sequence
  Description of Artificial Sequence: Synthetic oligonucleotide
ggcguugaggcuucaccug

SEQ ID NO: 234567 - RNA, 19 nt, Artificial Sequence
  Description of Artificial Sequence: Synthetic oligonucleotide
uucucggaaucugccuucu

SEQ ID NO: 234568 - RNA, 19 nt, Artificial Sequence
  Description of Artificial Sequence: Synthetic oligonucleotide
ugggagguuuugugauugu

SEQ ID NO: 234569 - RNA, 19 nt, Artificial Sequence
  Description of Artificial Sequence: Synthetic oligonucleotide
guguaugacagcaacuuuu

SEQ ID NO: 234570 - RNA, 19 nt, Artificial Sequence
  Description of Artificial Sequence: Synthetic oligonucleotide
uccccgccgugacuaaaac

SEQ ID NO: 234571 - RNA, 19 nt, Artificial Sequence
  Description of Artificial Sequence: Synthetic oligonucleotide
cccuugauaagauuuguua

SEQ ID NO: 234572 - RNA, 19 nt, Artificial Sequence
  Description of Artificial Sequence: Synthetic oligonucleotide
ugcaagccuuucugcgugu

SEQ ID NO: 234573 - RNA, 19 nt, Artificial Sequence
  Description of Artificial Sequence: Synthetic oligonucleotide
cacacuuauuuaguuccca

SEQ ID NO: 234574 - RNA, 19 nt, Artificial Sequence
  Description of Artificial Sequence: Synthetic oligonucleotide
ccaauucccagcacauuuc

SEQ ID NO: 234575 - RNA, 19 nt, Artificial Sequence
  Description of Artificial Sequence: Synthetic oligonucleotide
cuauugccaaagucucgga

SEQ ID NO: 234576 - RNA, 19 nt, Artificial Sequence
  Description of Artificial Sequence: Synthetic oligonucleotide
gaugaacaugucugucccu

SEQ ID NO: 234577 - RNA, 19 nt, Artificial Sequence
  Description of Artificial Sequence: Synthetic oligonucleotide
cacgucuuuggggauucug

SEQ ID NO: 234578 - RNA, 19 nt, Artificial Sequence
  Description of Artificial Sequence: Synthetic oligonucleotide
cacaauagggguggcuuca

SEQ ID NO: 234579 - RNA, 19 nt, Artificial Sequence
  Description of Artificial Sequence: Synthetic oligonucleotide
gaccuguuucaaggguacc

SEQ ID NO: 234580 - RNA, 19 nt, Artificial Sequence
  Description of Artificial Sequence: Synthetic oligonucleotide
gcgaucuagcuuauuaauc

SEQ ID NO: 234581 - RNA, 19 nt, Artificial Sequence
  Description of Artificial Sequence: Synthetic oligonucleotide
ccagucguacacuugaucu

SEQ ID NO: 234582 - RNA, 19 nt, Artificial Sequence
  Description of Artificial Sequence: Synthetic oligonucleotide
aggcugcacaacguugcag

SEQ ID NO: 234583 - RNA, 19 nt, Artificial Sequence
  Description of Artificial Sequence: Synthetic oligonucleotide
gguugagggcuaauacuug

SEQ ID NO: 234584 - RNA, 19 nt, Artificial Sequence
  Description of Artificial Sequence: Synthetic oligonucleotide
uuccuguaagugcguuaau

SEQ ID NO: 234585 - RNA, 19 nt, Artificial Sequence
  Description of Artificial Sequence: Synthetic oligonucleotide
gucaacauggaugcccucu

SEQ ID NO: 234586 - RNA, 19 nt, Artificial Sequence
  Description of Artificial Sequence: Synthetic oligonucleotide
uccugacuucaucggcaaa

SEQ ID NO: 234587 - RNA, 19 nt, Artificial Sequence
  Description of Artificial Sequence: Synthetic oligonucleotide
caucaggcguugaggcuuc

SEQ ID NO: 234588 - RNA, 19 nt, Artificial Sequence
  Description of Artificial Sequence: Synthetic oligonucleotide
gaugaauucccuggguauu

SEQ ID NO: 234589 - RNA, 19 nt, Artificial Sequence
  Description of Artificial Sequence: Synthetic oligonucleotide
cuuccgggccugguucucg

SEQ ID NO: 234590 - RNA, 19 nt, Artificial Sequence
  Description of Artificial Sequence: Synthetic oligonucleotide
auccuccaaaccagugcuc

SEQ ID NO: 234591 - RNA, 19 nt, Artificial Sequence
  Description of Artificial Sequence: Synthetic oligonucleotide
gcucaucaccucuuggcuc

SEQ ID NO: 234592 - RNA, 19 nt, Artificial Sequence
  Description of Artificial Sequence: Synthetic oligonucleotide
cuaguggaacccguuguaa

SEQ ID NO: 234593 - RNA, 19 nt, Artificial Sequence
  Description of Artificial Sequence: Synthetic oligonucleotide
gguuggcacccagaagggg

SEQ ID NO: 234594 - RNA, 19 nt, Artificial Sequence
  Description of Artificial Sequence: Synthetic oligonucleotide
ugggcgucgugauggugau

SEQ ID NO: 234595 - RNA, 19 nt, Artificial Sequence
  Description of Artificial Sequence: Synthetic oligonucleotide
ggccauaaugucacaugug

SEQ ID NO: 234596 - RNA, 19 nt, Artificial Sequence
  Description of Artificial Sequence: Synthetic oligonucleotide
aaaacucaacagggcugua

SEQ ID NO: 234597 - RNA, 19 nt, Artificial Sequence
  Description of Artificial Sequence: Synthetic oligonucleotide
gucgugcacguucacgucu

SEQ ID NO: 234598 - RNA, 19 nt, Artificial Sequence
  Description of Artificial Sequence: Synthetic oligonucleotide
cugagucaacauggaugcc

SEQ ID NO: 234599 - RNA, 19 nt, Artificial Sequence
  Description of Artificial Sequence: Synthetic oligonucleotide
caucgcugaagguggaccu

SEQ ID NO: 234600 - RNA, 19 nt, Artificial Sequence
  Description of Artificial Sequence: Synthetic oligonucleotide
gcauagacucggccgagga

SEQ ID NO: 234601 - RNA, 19 nt, Artificial Sequence
  Description of Artificial Sequence: Synthetic oligonucleotide
gugcacguucacgucuuug

SEQ ID NO: 234602 - RNA, 19 nt, Artificial Sequence
  Description of Artificial Sequence: Synthetic oligonucleotide
gcuaugccacugaacacac

SEQ ID NO: 234603 - RNA, 19 nt, Artificial Sequence
  Description of Artificial Sequence: Synthetic oligonucleotide
gcuugguuuaacagcuuca

SEQ ID NO: 234604 - RNA, 19 nt, Artificial Sequence
  Description of Artificial Sequence: Synthetic oligonucleotide
gaagccuaguggaacccgu

SEQ ID NO: 234605 - RNA, 19 nt, Artificial Sequence
  Description of Artificial Sequence: Synthetic oligonucleotide
ugggaccuuggggugccug

SEQ ID NO: 234606 - RNA, 19 nt, Artificial Sequence
  Description of Artificial Sequence: Synthetic oligonucleotide
uggcccgaacacugagagu

SEQ ID NO: 234607 - RNA, 19 nt, Artificial Sequence
  Description of Artificial Sequence: Synthetic oligonucleotide
ggcgaucuagcuuauuaau

SEQ ID NO: 234608 - RNA, 19 nt, Artificial Sequence
  Description of Artificial Sequence: Synthetic oligonucleotide
cagcugggccagaccauac

SEQ ID NO: 234609 - RNA, 19 nt, Artificial Sequence
  Description of Artificial Sequence: Synthetic oligonucleotide
gguccauagcagucaguga

SEQ ID NO: 234610 - RNA, 19 nt, Artificial Sequence
  Description of Artificial Sequence: Synthetic oligonucleotide
uuuccgcguguuccacaau

SEQ ID NO: 234611 - RNA, 19 nt, Artificial Sequence
  Description of Artificial Sequence: Synthetic oligonucleotide
cuaucaggcgaucuagcuu

SEQ ID NO: 234612 - RNA, 19 nt, Artificial Sequence
  Description of Artificial Sequence: Synthetic oligonucleotide
gugcguuaaucuguucuaa

SEQ ID NO: 234613 - RNA, 19 nt, Artificial Sequence
  Description of Artificial Sequence: Synthetic oligonucleotide
ggcuaguuuauugggcguc

SEQ ID NO: 234614 - RNA, 19 nt, Artificial Sequence
  Description of Artificial Sequence: Synthetic oligonucleotide
gagguauggcccgaacacu

SEQ ID NO: 234615 - RNA, 19 nt, Artificial Sequence
  Description of Artificial Sequence: Synthetic oligonucleotide
cucacaauagggguggcuu

SEQ ID NO: 234616 - RNA, 19 nt, Artificial Sequence
  Description of Artificial Sequence: Synthetic oligonucleotide
acccuugauaagauuuguu

SEQ ID NO: 234617 - RNA, 19 nt, Artificial Sequence
  Description of Artificial Sequence: Synthetic oligonucleotide
ugguggccauaaugucaca

SEQ ID NO: 234618 - RNA, 19 nt, Artificial Sequence
  Description of Artificial Sequence: Synthetic oligonucleotide
acaauagggguggcuucaa

SEQ ID NO: 234619 - RNA, 19 nt, Artificial Sequence
  Description of Artificial Sequence: Synthetic oligonucleotide
cacagguugagggcuaaua

SEQ ID NO: 234620 - RNA, 19 nt, Artificial Sequence
  Description of Artificial Sequence: Synthetic oligonucleotide
ccucccaguggcugaacac

SEQ ID NO: 234621 - RNA, 19 nt, Artificial Sequence
  Description of Artificial Sequence: Synthetic oligonucleotide
ugucuucaccugggagucu

SEQ ID NO: 234622 - RNA, 19 nt, Artificial Sequence
  Description of Artificial Sequence: Synthetic oligonucleotide
gccgaggacaucacuggug

SEQ ID NO: 234623 - RNA, 19 nt, Artificial Sequence
  Description of Artificial Sequence: Synthetic oligonucleotide
ggguugcuagcuggaaacc

SEQ ID NO: 234624 - RNA, 19 nt, Artificial Sequence
  Description of Artificial Sequence: Synthetic oligonucleotide
ccuauuaaguguugcucua

SEQ ID NO: 234625 - RNA, 19 nt, Artificial Sequence
  Description of Artificial Sequence: Synthetic oligonucleotide
caaguauguuggguccaca

SEQ ID NO: 234626 - RNA, 19 nt, Artificial Sequence
  Description of Artificial Sequence: Synthetic oligonucleotide
cccgccgugacuaaaacau

SEQ ID NO: 234627 - RNA, 19 nt, Artificial Sequence
  Description of Artificial Sequence: Synthetic oligonucleotide
gcagucagugacuggagau

SEQ ID NO: 234628 - RNA, 19 nt, Artificial Sequence
  Description of Artificial Sequence: Synthetic oligonucleotide
ccucuagcggagcugagaa

SEQ ID NO: 234629 - RNA, 19 nt, Artificial Sequence
  Description of Artificial Sequence: Synthetic oligonucleotide
gguggcaauuagcugcccu

SEQ ID NO: 234630 - RNA, 19 nt, Artificial Sequence
  Description of Artificial Sequence: Synthetic oligonucleotide
cucugucgugcacguucac

SEQ ID NO: 234631 - RNA, 19 nt, Artificial Sequence
  Description of Artificial Sequence: Synthetic oligonucleotide
ugguggcaauuagcugccc

SEQ ID NO: 234632 - RNA, 19 nt, Artificial Sequence
  Description of Artificial Sequence: Synthetic oligonucleotide
gguucucggaaucugccuu

SEQ ID NO: 234633 - RNA, 19 nt, Artificial Sequence
  Description of Artificial Sequence: Synthetic oligonucleotide
gucgaagaacugccugugu

SEQ ID NO: 234634 - RNA, 19 nt, Artificial Sequence
  Description of Artificial Sequence: Synthetic oligonucleotide
agccucuuucaugguggca

SEQ ID NO: 234635 - RNA, 19 nt, Artificial Sequence
  Description of Artificial Sequence: Synthetic oligonucleotide
ccaucugagucaacaugga

SEQ ID NO: 234636 - RNA, 19 nt, Artificial Sequence
  Description of Artificial Sequence: Synthetic oligonucleotide
cuccccgccgugacuaaaa

SEQ ID NO: 234637 - RNA, 19 nt, Artificial Sequence
  Description of Artificial Sequence: Synthetic oligonucleotide
cauagcgacaagccucuuu

SEQ ID NO: 234638 - RNA, 19 nt, Artificial Sequence
  Description of Artificial Sequence: Synthetic oligonucleotide
gguauggcccgaacacuga

SEQ ID NO: 234639 - RNA, 19 nt, Artificial Sequence
  Description of Artificial Sequence: Synthetic oligonucleotide
gggugaauuuuagcuccac

SEQ ID NO: 234640 - RNA, 19 nt, Artificial Sequence
  Description of Artificial Sequence: Synthetic oligonucleotide
gguguaugacagcaacuuu

SEQ ID NO: 234641 - RNA, 19 nt, Artificial Sequence
  Description of Artificial Sequence: Synthetic oligonucleotide
acaugggaccagagagggu

SEQ ID NO: 234642 - RNA, 19 nt, Artificial Sequence
  Description of Artificial Sequence: Synthetic oligonucleotide
gaggugagaguaggccucu

SEQ ID NO: 234643 - RNA, 19 nt, Artificial Sequence
  Description of Artificial Sequence: Synthetic oligonucleotide
caucggcaaagccgaagcu

SEQ ID NO: 234644 - RNA, 19 nt, Artificial Sequence
  Description of Artificial Sequence: Synthetic oligonucleotide
ucacgucuuuggggauucu

SEQ ID NO: 234645 - RNA, 19 nt, Artificial Sequence
  Description of Artificial Sequence: Synthetic oligonucleotide
gcccgaacacugagagugg

SEQ ID NO: 234646 - RNA, 19 nt, Artificial Sequence
  Description of Artificial Sequence: Synthetic oligonucleotide
gucucggaaucuacuggcu

SEQ ID NO: 234647 - RNA, 19 nt, Artificial Sequence
  Description of Artificial Sequence: Synthetic oligonucleotide
cugaguguucucugcuuuu

SEQ ID NO: 234648 - RNA, 19 nt, Artificial Sequence
  Description of Artificial Sequence: Synthetic oligonucleotide
gcuuuuccgcguguuccac

SEQ ID NO: 234649 - RNA, 19 nt, Artificial Sequence
  Description of Artificial Sequence: Synthetic oligonucleotide
ccgccgugacuaaaacaug

SEQ ID NO: 234650 - RNA, 19 nt, Artificial Sequence
  Description of Artificial Sequence: Synthetic oligonucleotide
cuaguuuauugggcgucgu

SEQ ID NO: 234651 - RNA, 19 nt, Artificial Sequence
  Description of Artificial Sequence: Synthetic oligonucleotide
cgaagcuuucggccacagg

SEQ ID NO: 234652 - RNA, 19 nt, Artificial Sequence
  Description of Artificial Sequence: Synthetic oligonucleotide
gcguugaggcuucaccugu

SEQ ID NO: 234653 - RNA, 19 nt, Artificial Sequence
  Description of Artificial Sequence: Synthetic oligonucleotide
ggggaccuguuucaagggu

SEQ ID NO: 234654 - RNA, 19 nt, Artificial Sequence
  Description of Artificial Sequence: Synthetic oligonucleotide
aggguccauagcagucagu

SEQ ID NO: 234655 - RNA, 19 nt, Artificial Sequence
  Description of Artificial Sequence: Synthetic oligonucleotide
gggcuaauacuugccacgu

SEQ ID NO: 234656 - RNA, 19 nt, Artificial Sequence
  Description of Artificial Sequence: Synthetic oligonucleotide
gguggccauaaugucacau

SEQ ID NO: 234657 - RNA, 19 nt, Artificial Sequence
  Description of Artificial Sequence: Synthetic oligonucleotide
ggaccagagaggguugcua

SEQ ID NO: 234658 - RNA, 19 nt, Artificial Sequence
  Description of Artificial Sequence: Synthetic oligonucleotide
ggggugaauuuuagcucca

SEQ ID NO: 234659 - RNA, 19 nt, Artificial Sequence
  Description of Artificial Sequence: Synthetic oligonucleotide
aucaggcgaucuagcuuau

SEQ ID NO: 234660 - RNA, 19 nt, Artificial Sequence
  Description of Artificial Sequence: Synthetic oligonucleotide
cucuuguggggugaauuuu

SEQ ID NO: 234661 - RNA, 19 nt, Artificial Sequence
  Description of Artificial Sequence: Synthetic oligonucleotide
gcgucgugauggugaucag

SEQ ID NO: 234662 - RNA, 19 nt, Artificial Sequence
  Description of Artificial Sequence: Synthetic oligonucleotide
cuccacuaucaggcgaucu

SEQ ID NO: 234663 - RNA, 19 nt, Artificial Sequence
  Description of Artificial Sequence: Synthetic oligonucleotide
cagucagugacuggagauu

SEQ ID NO: 234664 - RNA, 19 nt, Artificial Sequence
  Description of Artificial Sequence: Synthetic oligonucleotide
ggaagagguauggcccgaa

SEQ ID NO: 234665 - RNA, 19 nt, Artificial Sequence
  Description of Artificial Sequence: Synthetic oligonucleotide
gguggaccuccccgccgug

SEQ ID NO: 234666 - RNA, 19 nt, Artificial Sequence
  Description of Artificial Sequence: Synthetic oligonucleotide
gucguacacuugaucuccu

SEQ ID NO: 234667 - RNA, 19 nt, Artificial Sequence
  Description of Artificial Sequence: Synthetic oligonucleotide
gcgugucucugucgugcac

SEQ ID NO: 234668 - RNA, 19 nt, Artificial Sequence
  Description of Artificial Sequence: Synthetic oligonucleotide
cagguccucuagcggagcu

SEQ ID NO: 234669 - RNA, 19 nt, Artificial Sequence
  Description of Artificial Sequence: Synthetic oligonucleotide
ccuccaauucccagcacau

SEQ ID NO: 234670 - RNA, 19 nt, Artificial Sequence
  Description of Artificial Sequence: Synthetic oligonucleotide
cacugagaguggcuaguuu

SEQ ID NO: 234671 - RNA, 19 nt, Artificial Sequence
  Description of Artificial Sequence: Synthetic oligonucleotide
gcaagccuuucugcguguc

SEQ ID NO: 234672 - RNA, 19 nt, Artificial Sequence
  Description of Artificial Sequence: Synthetic oligonucleotide
cuccagucguacacuugau

SEQ ID NO: 234673 - RNA, 19 nt, Artificial Sequence
  Description of Artificial Sequence: Synthetic oligonucleotide
cccucucgcuuugacagca

SEQ ID NO: 234674 - RNA, 19 nt, Artificial Sequence
  Description of Artificial Sequence: Synthetic oligonucleotide
ccucucgcuuugacagcac

SEQ ID NO: 234675 - RNA, 19 nt, Artificial Sequence
  Description of Artificial Sequence: Synthetic oligonucleotide
cgccgugacuaaaacaugu

SEQ ID NO: 234676 - RNA, 19 nt, Artificial Sequence
  Description of Artificial Sequence: Synthetic oligonucleotide
gcuagccaguccacugguc

SEQ ID NO: 234677 - RNA, 19 nt, Artificial Sequence
  Description of Artificial Sequence: Synthetic oligonucleotide
ccgcuuccgcacugcauuc

SEQ ID NO: 234678 - RNA, 19 nt, Artificial Sequence
  Description of Artificial Sequence: Synthetic oligonucleotide
aucaggcguugaggcuuca

SEQ ID NO: 234679 - RNA, 19 nt, Artificial Sequence
  Description of Artificial Sequence: Synthetic oligonucleotide
cgaaucaagucacuauuuu

SEQ ID NO: 234680 - RNA, 19 nt, Artificial Sequence
  Description of Artificial Sequence: Synthetic oligonucleotide
cuugccacgucuggcucau

SEQ ID NO: 234681 - RNA, 19 nt, Artificial Sequence
  Description of Artificial Sequence: Synthetic oligonucleotide
ccccgccgugacuaaaaca

SEQ ID NO: 234682 - RNA, 19 nt, Artificial Sequence
  Description of Artificial Sequence: Synthetic oligonucleotide
ggccgaggacaucacuggu

SEQ ID NO: 234683 - RNA, 19 nt, Artificial Sequence
  Description of Artificial Sequence: Synthetic oligonucleotide
aggugagaguaggccucuu

SEQ ID NO: 234684 - RNA, 19 nt, Artificial Sequence
  Description of Artificial Sequence: Synthetic oligonucleotide
ggguggcuucaaaguugag

SEQ ID NO: 234685 - RNA, 19 nt, Artificial Sequence
  Description of Artificial Sequence: Synthetic oligonucleotide
cucgacccucucgcuuuga

SEQ ID NO: 234686 - RNA, 19 nt, Artificial Sequence
  Description of Artificial Sequence: Synthetic oligonucleotide
ccucuuggcucaucucccu

SEQ ID NO: 234687 - RNA, 19 nt, Artificial Sequence
  Description of Artificial Sequence: Synthetic oligonucleotide
gccgugacuaaaacauguu

SEQ ID NO: 234688 - RNA, 19 nt, Artificial Sequence
  Description of Artificial Sequence: Synthetic oligonucleotide
uugccacgucuggcucauc

SEQ ID NO: 234689 - RNA, 19 nt, Artificial Sequence
  Description of Artificial Sequence: Synthetic oligonucleotide
cgcguguuccacaaucuuu

SEQ ID NO: 234690 - RNA, 19 nt, Artificial Sequence
  Description of Artificial Sequence: Synthetic oligonucleotide
ggccugguucucggaaucu

SEQ ID NO: 234691 - RNA, 19 nt, Artificial Sequence
  Description of Artificial Sequence: Synthetic oligonucleotide
ggaccuccccgccgugacu

SEQ ID NO: 234692 - RNA, 19 nt, Artificial Sequence
  Description of Artificial Sequence: Synthetic oligonucleotide
gcccuuccgcuuccgcacu

SEQ ID NO: 234693 - RNA, 19 nt, Artificial Sequence
  Description of Artificial Sequence: Synthetic oligonucleotide
cgcuuccgcacugcauuca

SEQ ID NO: 234694 - RNA, 19 nt, Artificial Sequence
  Description of Artificial Sequence: Synthetic oligonucleotide
ccucagugguuggcaccca

SEQ ID NO: 234695 - RNA, 19 nt, Artificial Sequence
  Description of Artificial Sequence: Synthetic oligonucleotide
ccgcguguuccacaaucuu

SEQ ID NO: 234696 - RNA, 19 nt, Artificial Sequence
  Description of Artificial Sequence: Synthetic oligonucleotide
ggaugcccucuggaauuuu

SEQ ID NO: 234697 - RNA, 19 nt, Artificial Sequence
  Description of Artificial Sequence: Synthetic oligonucleotide
ccuccccgccgugacuaaa

SEQ ID NO: 234698 - RNA, 19 nt, Artificial Sequence
  Description of Artificial Sequence: Synthetic oligonucleotide
gcacaacguugcagauuuu

SEQ ID NO: 234699 - RNA, 19 nt, Artificial Sequence
  Description of Artificial Sequence: Synthetic oligonucleotide
cgugcacguucacgucuuu

SEQ ID NO: 234700 - RNA, 19 nt, Artificial Sequence
  Description of Artificial Sequence: Synthetic oligonucleotide
uguauaagcauacugaacc

SEQ ID NO: 234701 - RNA, 19 nt, Artificial Sequence
  Description of Artificial Sequence: Synthetic oligonucleotide
aaguaugaccaucauaucc

SEQ ID NO: 234702 - RNA, 19 nt, Artificial Sequence
  Description of Artificial Sequence: Synthetic oligonucleotide
uuagauuauaaucugagac

SEQ ID NO: 234703 - RNA, 19 nt, Artificial Sequence
  Description of Artificial Sequence: Synthetic oligonucleotide
aacacuaacauuuaaucca

SEQ ID NO: 234704 - RNA, 19 nt, Artificial Sequence
  Description of Artificial Sequence: Synthetic oligonucleotide
aaugugagguauuauuagc

SEQ ID NO: 234705 - RNA, 19 nt, Artificial Sequence
  Description of Artificial Sequence: Synthetic oligonucleotide
ucuacgaccacucauagug

SEQ ID NO: 234706 - RNA, 19 nt, Artificial Sequence
  Description of Artificial Sequence: Synthetic oligonucleotide
cauaguaugauuaguauag

SEQ ID NO: 234707 - RNA, 19 nt, Artificial Sequence
  Description of Artificial Sequence: Synthetic oligonucleotide
aaauaggguauugauaggc

SEQ ID NO: 234708 - RNA, 19 nt, Artificial Sequence
  Description of Artificial Sequence: Synthetic oligonucleotide
agagcuuguuauuuaaugc

SEQ ID NO: 234709 - RNA, 19 nt, Artificial Sequence
  Description of Artificial Sequence: Synthetic oligonucleotide
uguuacagacuauagauug

SEQ ID NO: 234710 - RNA, 19 nt, Artificial Sequence
  Description of Artificial Sequence: Synthetic oligonucleotide
acaucaauaaaugaucggc

SEQ ID NO: 234711 - RNA, 19 nt, Artificial Sequence
  Description of Artificial Sequence: Synthetic oligonucleotide
aaaugugagguauuauuag

SEQ ID NO: 234712 - RNA, 19 nt, Artificial Sequence
  Description of Artificial Sequence: Synthetic oligonucleotide
aaucugagacagcacauac

SEQ ID NO: 234713 - RNA, 19 nt, Artificial Sequence
  Description of Artificial Sequence: Synthetic oligonucleotide
ugaaaaugacaaaacagca

SEQ ID NO: 234714 - RNA, 19 nt, Artificial Sequence
  Description of Artificial Sequence: Synthetic oligonucleotide
auuaagugcauuuggauca

SEQ ID NO: 234715 - RNA, 19 nt, Artificial Sequence
  Description of Artificial Sequence: Synthetic oligonucleotide
auuaguaaaacaauugcag

SEQ ID NO: 234716 - RNA, 19 nt, Artificial Sequence
  Description of Artificial Sequence: Synthetic oligonucleotide
uauagauuguauaugcgac

SEQ ID NO: 234717 - RNA, 19 nt, Artificial Sequence
  Description of Artificial Sequence: Synthetic oligonucleotide
auagugccaauauggaucc

SEQ ID NO: 234718 - RNA, 19 nt, Artificial Sequence
  Description of Artificial Sequence: Synthetic oligonucleotide
gauaacuccauccaucgug

SEQ ID NO: 234719 - RNA, 19 nt, Artificial Sequence
  Description of Artificial Sequence: Synthetic oligonucleotide
aaaugagagaaucccuagg

SEQ ID NO: 234720 - RNA, 19 nt, Artificial Sequence
  Description of Artificial Sequence: Synthetic oligonucleotide
auaaguaugaccaucauau

SEQ ID NO: 234721 - RNA, 19 nt, Artificial Sequence
  Description of Artificial Sequence: Synthetic oligonucleotide
ugagcuauuguuugaaacc

SEQ ID NO: 234722 - RNA, 19 nt, Artificial Sequence
  Description of Artificial Sequence: Synthetic oligonucleotide
uagauaacuccauccaucg

SEQ ID NO: 234723 - RNA, 19 nt, Artificial Sequence
  Description of Artificial Sequence: Synthetic oligonucleotide
ucuagguuuuguuacgagg

SEQ ID NO: 234724 - RNA, 19 nt, Artificial Sequence
  Description of Artificial Sequence: Synthetic oligonucleotide
acuguuacagacuauagau

SEQ ID NO: 234725 - RNA, 19 nt, Artificial Sequence
  Description of Artificial Sequence: Synthetic oligonucleotide
caaacugaagucuacgacc

SEQ ID NO: 234726 - RNA, 19 nt, Artificial Sequence
  Description of Artificial Sequence: Synthetic oligonucleotide
accacauagaguuugucuc

SEQ ID NO: 234727 - RNA, 19 nt, Artificial Sequence
  Description of Artificial Sequence: Synthetic oligonucleotide
uagaguaccuuuaauaaaa

SEQ ID NO: 234728 - RNA, 19 nt, Artificial Sequence
  Description of Artificial Sequence: Synthetic oligonucleotide
aacguuaaugauuucuacu

SEQ ID NO: 234729 - RNA, 19 nt, Artificial Sequence
  Description of Artificial Sequence: Synthetic oligonucleotide
acaacauaaaguuuguuau

SEQ ID NO: 234730 - RNA, 19 nt, Artificial Sequence
  Description of Artificial Sequence: Synthetic oligonucleotide
ucaucaguaaacaucgaac

SEQ ID NO: 234731 - RNA, 19 nt, Artificial Sequence
  Description of Artificial Sequence: Synthetic oligonucleotide
uguaguuuguaguacauau

SEQ ID NO: 234732 - RNA, 19 nt, Artificial Sequence
  Description of Artificial Sequence: Synthetic oligonucleotide
aaugaucggccucauugac

SEQ ID NO: 234733 - RNA, 19 nt, Artificial Sequence
  Description of Artificial Sequence: Synthetic oligonucleotide
ucccacaacauaaaguuug

SEQ ID NO: 234734 - RNA, 19 nt, Artificial Sequence
  Description of Artificial Sequence: Synthetic oligonucleotide
auuauaaucugagacagca

SEQ ID NO: 234735 - RNA, 19 nt, Artificial Sequence
  Description of Artificial Sequence: Synthetic oligonucleotide
uugacugugcauauuaaac

SEQ ID NO: 234736 - RNA, 19 nt, Artificial Sequence
  Description of Artificial Sequence: Synthetic oligonucleotide
uguugcaacgcccacaccu

SEQ ID NO: 234737 - RNA, 19 nt, Artificial Sequence
  Description of Artificial Sequence: Synthetic oligonucleotide
agauuauaaucugagacag

SEQ ID NO: 234738 - RNA, 19 nt, Artificial Sequence
  Description of Artificial Sequence: Synthetic oligonucleotide
gucuuuuggacauaggagc

SEQ ID NO: 234739 - RNA, 19 nt, Artificial Sequence
  Description of Artificial Sequence: Synthetic oligonucleotide
cauagugccaauauggauc

SEQ ID NO: 234740 - RNA, 19 nt, Artificial Sequence
  Description of Artificial Sequence: Synthetic oligonucleotide
aacuggauuaaaacauucc

SEQ ID NO: 234741 - RNA, 19 nt, Artificial Sequence
  Description of Artificial Sequence: Synthetic oligonucleotide
ucccuaggcaguuugacgg

SEQ ID NO: 234742 - RNA, 19 nt, Artificial Sequence
  Description of Artificial Sequence: Synthetic oligonucleotide
uguucuuaccauuuacugc

SEQ ID NO: 234743 - RNA, 19 nt, Artificial Sequence
  Description of Artificial Sequence: Synthetic oligonucleotide
cauacuuuaugcugcaaag

SEQ ID NO: 234744 - RNA, 19 nt, Artificial Sequence
  Description of Artificial Sequence: Synthetic oligonucleotide
uuagauaacuccauccauc

SEQ ID NO: 234745 - RNA, 19 nt, Artificial Sequence
  Description of Artificial Sequence: Synthetic oligonucleotide
uaaugagagauucagugua

SEQ ID NO: 234746 - RNA, 19 nt, Artificial Sequence
  Description of Artificial Sequence: Synthetic oligonucleotide
agaguauuaauguauuuau

SEQ ID NO: 234747 - RNA, 19 nt, Artificial Sequence
  Description of Artificial Sequence: Synthetic oligonucleotide
caucaauaaaugaucggcc

SEQ ID NO: 234748 - RNA, 19 nt, Artificial Sequence
  Description of Artificial Sequence: Synthetic oligonucleotide
aaugacaaaacagcauuug

SEQ ID NO: 234749 - RNA, 19 nt, Artificial Sequence
  Description of Artificial Sequence: Synthetic oligonucleotide
uggagcaaugguuaggagc

SEQ ID NO: 234750 - RNA, 19 nt, Artificial Sequence
  Description of Artificial Sequence: Synthetic oligonucleotide
gguauugauaggcaaagag

SEQ ID NO: 234751 - RNA, 19 nt, Artificial Sequence
  Description of Artificial Sequence: Synthetic oligonucleotide
gcuaaugagagauucagug

SEQ ID NO: 234752 - RNA, 19 nt, Artificial Sequence
  Description of Artificial Sequence: Synthetic oligonucleotide
uguuccaugguauacuuau

SEQ ID NO: 234753 - RNA, 19 nt, Artificial Sequence
  Description of Artificial Sequence: Synthetic oligonucleotide
ugauuaguauagcaaauua

SEQ ID NO: 234754 - RNA, 19 nt, Artificial Sequence
  Description of Artificial Sequence: Synthetic oligonucleotide
uaaacauagccuauuggau

SEQ ID NO: 234755 - RNA, 19 nt, Artificial Sequence
  Description of Artificial Sequence: Synthetic oligonucleotide
guaguaguaccuuuagcag

SEQ ID NO: 234756 - RNA, 19 nt, Artificial Sequence
  Description of Artificial Sequence: Synthetic oligonucleotide
auaugcgacauuaugaugu

SEQ ID NO: 234757 - RNA, 19 nt, Artificial Sequence
  Description of Artificial Sequence: Synthetic oligonucleotide
uaguaugauuaguauagca

SEQ ID NO: 234758 - RNA, 19 nt, Artificial Sequence
  Description of Artificial Sequence: Synthetic oligonucleotide
ugacauaguaugauuagua

SEQ ID NO: 234759 - RNA, 19 nt, Artificial Sequence
  Description of Artificial Sequence: Synthetic oligonucleotide
auaggaggcaucacaagcc

SEQ ID NO: 234760 - RNA, 19 nt, Artificial Sequence
  Description of Artificial Sequence: Synthetic oligonucleotide
uaaacaucgaacuguuuuc

SEQ ID NO: 234761 - RNA, 19 nt, Artificial Sequence
  Description of Artificial Sequence: Synthetic oligonucleotide
uaugauuaguauagcaaau

SEQ ID NO: 234762 - RNA, 19 nt, Artificial Sequence
  Description of Artificial Sequence: Synthetic oligonucleotide
uugaccacgaaucacuuuu

SEQ ID NO: 234763 - RNA, 19 nt, Artificial Sequence
  Description of Artificial Sequence: Synthetic oligonucleotide
auuagauuauaaucugaga

SEQ ID NO: 234764 - RNA, 19 nt, Artificial Sequence
  Description of Artificial Sequence: Synthetic oligonucleotide
acuuaugugccacauucug

SEQ ID NO: 234765 - RNA, 19 nt, Artificial Sequence
  Description of Artificial Sequence: Synthetic oligonucleotide
cauacucucaacuguaauc

SEQ ID NO: 234766 - RNA, 19 nt, Artificial Sequence
  Description of Artificial Sequence: Synthetic oligonucleotide
uacccaaugcaugagagca

SEQ ID NO: 234767 - RNA, 19 nt, Artificial Sequence
  Description of Artificial Sequence: Synthetic oligonucleotide
uaccuguauaagcauacug

SEQ ID NO: 234768 - RNA, 19 nt, Artificial Sequence
  Description of Artificial Sequence: Synthetic oligonucleotide
cuuucuagguuuuguuacg

SEQ ID NO: 234769 - RNA, 19 nt, Artificial Sequence
  Description of Artificial Sequence: Synthetic oligonucleotide
cuauagauuguauaugcga

SEQ ID NO: 234770 - RNA, 19 nt, Artificial Sequence
  Description of Artificial Sequence: Synthetic oligonucleotide
ugaacguuaaugauuucua

SEQ ID NO: 234771 - RNA, 19 nt, Artificial Sequence
  Description of Artificial Sequence: Synthetic oligonucleotide
ucucaaugguaguaguacc

SEQ ID NO: 234772 - RNA, 19 nt, Artificial Sequence
  Description of Artificial Sequence: Synthetic oligonucleotide
ucugcaaguaacuguggug

SEQ ID NO: 234773 - RNA, 19 nt, Artificial Sequence
  Description of Artificial Sequence: Synthetic oligonucleotide
cauaccuguauaagcauac

SEQ ID NO: 234774 - RNA, 19 nt, Artificial Sequence
  Description of Artificial Sequence: Synthetic oligonucleotide
acgucuuuuggacauagga

SEQ ID NO: 234775 - RNA, 19 nt, Artificial Sequence
  Description of Artificial Sequence: Synthetic oligonucleotide
gagcuuguuauuuaaugca

SEQ ID NO: 234776 - RNA, 19 nt, Artificial Sequence
  Description of Artificial Sequence: Synthetic oligonucleotide
guaugauuaguauagcaaa

SEQ ID NO: 234777 - RNA, 19 nt, Artificial Sequence
  Description of Artificial Sequence: Synthetic oligonucleotide
aacaguauucaaauaagua

SEQ ID NO: 234778 - RNA, 19 nt, Artificial Sequence
  Description of Artificial Sequence: Synthetic oligonucleotide
acguuaaugauuucuacua

SEQ ID NO: 234779 - RNA, 19 nt, Artificial Sequence
  Description of Artificial Sequence: Synthetic oligonucleotide
uaacuggauuaaaacauuc

SEQ ID NO: 234780 - RNA, 19 nt, Artificial Sequence
  Description of Artificial Sequence: Synthetic oligonucleotide
uauaugcgacauuaugaug

SEQ ID NO: 234781 - RNA, 19 nt, Artificial Sequence
  Description of Artificial Sequence: Synthetic oligonucleotide
uagccuauuggauuucuca

SEQ ID NO: 234782 - RNA, 19 nt, Artificial Sequence
  Description of Artificial Sequence: Synthetic oligonucleotide
gauuguauaugcgacauua

SEQ ID NO: 234783 - RNA, 19 nt, Artificial Sequence
  Description of Artificial Sequence: Synthetic oligonucleotide
auuuuauaguaaugagucu

SEQ ID NO: 234784 - RNA, 19 nt, Artificial Sequence
  Description of Artificial Sequence: Synthetic oligonucleotide
aguaugaccaucauaucca

SEQ ID NO: 234785 - RNA, 19 nt, Artificial Sequence
  Description of Artificial Sequence: Synthetic oligonucleotide
auugcaguagcuaaugaga

SEQ ID NO: 234786 - RNA, 19 nt, Artificial Sequence
  Description of Artificial Sequence: Synthetic oligonucleotide
ugcgacauuaugauguuuu

SEQ ID NO: 234787 - RNA, 19 nt, Artificial Sequence
  Description of Artificial Sequence: Synthetic oligonucleotide
aaugagagauucaguguag

SEQ ID NO: 234788 - RNA, 19 nt, Artificial Sequence
  Description of Artificial Sequence: Synthetic oligonucleotide
aguaugauuaguauagcaa

SEQ ID NO: 234789 - RNA, 19 nt, Artificial Sequence
  Description of Artificial Sequence: Synthetic oligonucleotide
gaacguuaaugauuucuac

SEQ ID NO: 234790 - RNA, 19 nt, Artificial Sequence
  Description of Artificial Sequence: Synthetic oligonucleotide
ugaccuacccaaugcauga

SEQ ID NO: 234791 - RNA, 19 nt, Artificial Sequence
  Description of Artificial Sequence: Synthetic oligonucleotide
auaaccugugaaaaguuug

SEQ ID NO: 234792 - RNA, 19 nt, Artificial Sequence
  Description of Artificial Sequence: Synthetic oligonucleotide
augaacguuaaugauuucu

SEQ ID NO: 234793 - RNA, 19 nt, Artificial Sequence
  Description of Artificial Sequence: Synthetic oligonucleotide
aucaucaguaaacaucgaa

SEQ ID NO: 234794 - RNA, 19 nt, Artificial Sequence
  Description of Artificial Sequence: Synthetic oligonucleotide
uccauugacuugaggcagg

SEQ ID NO: 234795 - RNA, 19 nt, Artificial Sequence
  Description of Artificial Sequence: Synthetic oligonucleotide
aguuagugaacugaaaaua

SEQ ID NO: 234796 - RNA, 19 nt, Artificial Sequence
  Description of Artificial Sequence: Synthetic oligonucleotide
aauaggguauugauaggca

SEQ ID NO: 234797 - RNA, 19 nt, Artificial Sequence
  Description of Artificial Sequence: Synthetic oligonucleotide
auugacugugcauauuaaa

SEQ ID NO: 234798 - RNA, 19 nt, Artificial Sequence
  Description of Artificial Sequence: Synthetic oligonucleotide
acagacuauagauuguaua

SEQ ID NO: 234799 - RNA, 19 nt, Artificial Sequence
  Description of Artificial Sequence: Synthetic oligonucleotide
agcaacggcaucccgagga

SEQ ID NO: 234800 - RNA, 19 nt, Artificial Sequence
  Description of Artificial Sequence: Synthetic oligonucleotide
agaauuaagugcauuugga

SEQ ID NO: 234801 - RNA, 19 nt, Artificial Sequence
  Description of Artificial Sequence: Synthetic oligonucleotide
gaauuauagaauugacugu

SEQ ID NO: 234802 - RNA, 19 nt, Artificial Sequence
  Description of Artificial Sequence: Synthetic oligonucleotide
uaggguauugauaggcaaa

SEQ ID NO: 234803 - RNA, 19 nt, Artificial Sequence
  Description of Artificial Sequence: Synthetic oligonucleotide
ugacggaugaagcugcuuu

SEQ ID NO: 234804 - RNA, 19 nt, Artificial Sequence
  Description of Artificial Sequence: Synthetic oligonucleotide
agagacuccacuuguuagu

SEQ ID NO: 234805 - RNA, 19 nt, Artificial Sequence
  Description of Artificial Sequence: Synthetic oligonucleotide
cuguauaagcauacugaac

SEQ ID NO: 234806 - RNA, 19 nt, Artificial Sequence
  Description of Artificial Sequence: Synthetic oligonucleotide
uaucauugugcuucauacu

SEQ ID NO: 234807 - RNA, 19 nt, Artificial Sequence
  Description of Artificial Sequence: Synthetic oligonucleotide
accuguauaagcauacuga

SEQ ID NO: 234808 - RNA, 19 nt, Artificial Sequence
  Description of Artificial Sequence: Synthetic oligonucleotide
uuguguguugcaacgccca

SEQ ID NO: 234809 - RNA, 19 nt, Artificial Sequence
  Description of Artificial Sequence: Synthetic oligonucleotide
uuuguuacgagggcuuugu

SEQ ID NO: 234810 - RNA, 19 nt, Artificial Sequence
  Description of Artificial Sequence: Synthetic oligonucleotide
cagagacuccacuuguuag

SEQ ID NO: 234811 - RNA, 19 nt, Artificial Sequence
  Description of Artificial Sequence: Synthetic oligonucleotide
uugacauaguaugauuagu

SEQ ID NO: 234812 - RNA, 19 nt, Artificial Sequence
  Description of Artificial Sequence: Synthetic oligonucleotide
aggguauugauaggcaaag

SEQ ID NO: 234813 - RNA, 19 nt, Artificial Sequence
  Description of Artificial Sequence: Synthetic oligonucleotide
auaggguauugauaggcaa

SEQ ID NO: 234814 - RNA, 19 nt, Artificial Sequence
  Description of Artificial Sequence: Synthetic oligonucleotide
aaacuuaagagaagguguu

SEQ ID NO: 234815 - RNA, 19 nt, Artificial Sequence
  Description of Artificial Sequence: Synthetic oligonucleotide
agucuacgaccacucauag

SEQ ID NO: 234816 - RNA, 19 nt, Artificial Sequence
  Description of Artificial Sequence: Synthetic oligonucleotide
aaccauacuuuaugcugca

SEQ ID NO: 234817 - RNA, 19 nt, Artificial Sequence
  Description of Artificial Sequence: Synthetic oligonucleotide
cguaauuccauugacgucc

SEQ ID NO: 234818 - RNA, 19 nt, Artificial Sequence
  Description of Artificial Sequence: Synthetic oligonucleotide
guaaacaucgaacuguuuu

SEQ ID NO: 234819 - RNA, 19 nt, Artificial Sequence
  Description of Artificial Sequence: Synthetic oligonucleotide
ugagagcauggaaaauugu

SEQ ID NO: 234820 - RNA, 19 nt, Artificial Sequence
  Description of Artificial Sequence: Synthetic oligonucleotide
ucgcauucugaagaucagg

SEQ ID NO: 234821 - RNA, 19 nt, Artificial Sequence
  Description of Artificial Sequence: Synthetic oligonucleotide
uacuuaugugccacauucu

SEQ ID NO: 234822 - RNA, 19 nt, Artificial Sequence
  Description of Artificial Sequence: Synthetic oligonucleotide
uacauauguucuuaccauu

SEQ ID NO: 234823 - RNA, 19 nt, Artificial Sequence
  Description of Artificial Sequence: Synthetic oligonucleotide
uaccauuuacugcugggua

SEQ ID NO: 234824 - RNA, 19 nt, Artificial Sequence
  Description of Artificial Sequence: Synthetic oligonucleotide
cagcauaccuguauaagca

SEQ ID NO: 234825 - RNA, 19 nt, Artificial Sequence
  Description of Artificial Sequence: Synthetic oligonucleotide
aaugguaguaguaccuuua

SEQ ID NO: 234826 - RNA, 19 nt, Artificial Sequence
  Description of Artificial Sequence: Synthetic oligonucleotide
gagcuauuguuugaaacca

SEQ ID NO: 234827 - RNA, 19 nt, Artificial Sequence
  Description of Artificial Sequence: Synthetic oligonucleotide
gaauuaagugcauuuggau

SEQ ID NO: 234828 - RNA, 19 nt, Artificial Sequence
  Description of Artificial Sequence: Synthetic oligonucleotide
uucauacucucaacuguaa

SEQ ID NO: 234829 - RNA, 19 nt, Artificial Sequence
  Description of Artificial Sequence: Synthetic oligonucleotide
gauuauaaucugagacagc

SEQ ID NO: 234830 - RNA, 19 nt, Artificial Sequence
  Description of Artificial Sequence: Synthetic oligonucleotide
augugagguauuauuagcu

SEQ ID NO: 234831 - RNA, 19 nt, Artificial Sequence
  Description of Artificial Sequence: Synthetic oligonucleotide
acaucauuaguaaaacaau

SEQ ID NO: 234832 - RNA, 19 nt, Artificial Sequence
  Description of Artificial Sequence: Synthetic oligonucleotide
aguauuuagauaacuccau

SEQ ID NO: 234833 - RNA, 19 nt, Artificial Sequence
  Description of Artificial Sequence: Synthetic oligonucleotide
guagaguaccuuuaauaaa

SEQ ID NO: 234834 - RNA, 19 nt, Artificial Sequence
  Description of Artificial Sequence: Synthetic oligonucleotide
ugaagucuacgaccacuca

SEQ ID NO: 234835 - RNA, 19 nt, Artificial Sequence
  Description of Artificial Sequence: Synthetic oligonucleotide
caucguaugauucaacagu

SEQ ID NO: 234836 - RNA, 19 nt, Artificial Sequence
  Description of Artificial Sequence: Synthetic oligonucleotide
cuuaugaacguuaaugauu

SEQ ID NO: 234837 - RNA, 19 nt, Artificial Sequence
  Description of Artificial Sequence: Synthetic oligonucleotide
uaaguaugaccaucauauc

SEQ ID NO: 234838 - RNA, 19 nt, Artificial Sequence
  Description of Artificial Sequence: Synthetic oligonucleotide
cugggcgucuccaaaugag

SEQ ID NO: 234839 - RNA, 19 nt, Artificial Sequence
  Description of Artificial Sequence: Synthetic oligonucleotide
ucucucaguugcagcauac

SEQ ID NO: 234840 - RNA, 19 nt, Artificial Sequence
  Description of Artificial Sequence: Synthetic oligonucleotide
guauaugcgacauuaugau

SEQ ID NO: 234841 - RNA, 19 nt, Artificial Sequence
  Description of Artificial Sequence: Synthetic oligonucleotide
caguagaguaccuuuaaua

SEQ ID NO: 234842 - RNA, 19 nt, Artificial Sequence
  Description of Artificial Sequence: Synthetic oligonucleotide
ccaccguugacuuucuagg

SEQ ID NO: 234843 - RNA, 19 nt, Artificial Sequence
  Description of Artificial Sequence: Synthetic oligonucleotide
cacguaauuccauugacgu

SEQ ID NO: 234844 - RNA, 19 nt, Artificial Sequence
  Description of Artificial Sequence: Synthetic oligonucleotide
agcaaugguuaggagcagg

SEQ ID NO: 234845 - RNA, 19 nt, Artificial Sequence
  Description of Artificial Sequence: Synthetic oligonucleotide
guaguuuguaguacauaug

SEQ ID NO: 234846 - RNA, 19 nt, Artificial Sequence
  Description of Artificial Sequence: Synthetic oligonucleotide
agccuauuggauuucucau

SEQ ID NO: 234847 - RNA, 19 nt, Artificial Sequence
  Description of Artificial Sequence: Synthetic oligonucleotide
cagacuauagauuguauau

SEQ ID NO: 234848 - RNA, 19 nt, Artificial Sequence
  Description of Artificial Sequence: Synthetic oligonucleotide
ucuaacaguagaguaccuu

SEQ ID NO: 234849 - RNA, 19 nt, Artificial Sequence
  Description of Artificial Sequence: Synthetic oligonucleotide
acuuaagagaagguguuua

SEQ ID NO: 234850 - RNA, 19 nt, Artificial Sequence
  Description of Artificial Sequence: Synthetic oligonucleotide
aagucuacgaccacucaua

SEQ ID NO: 234851 - RNA, 19 nt, Artificial Sequence
  Description of Artificial Sequence: Synthetic oligonucleotide
cacucauagugccaauaug

SEQ ID NO: 234852 - RNA, 19 nt, Artificial Sequence
  Description of Artificial Sequence: Synthetic oligonucleotide
uucgccagaucucguugcc

SEQ ID NO: 234853 - RNA, 19 nt, Artificial Sequence
  Description of Artificial Sequence: Synthetic oligonucleotide
cauacagcaacggcauccc

SEQ ID NO: 234854 - RNA, 19 nt, Artificial Sequence
  Description of Artificial Sequence: Synthetic oligonucleotide
aauugacugugcauauuaa

SEQ ID NO: 234855 - RNA, 19 nt, Artificial Sequence
  Description of Artificial Sequence: Synthetic oligonucleotide
gccuuaugaacguuaauga

SEQ ID NO: 234856 - RNA, 19 nt, Artificial Sequence
  Description of Artificial Sequence: Synthetic oligonucleotide
cuacgaccacucauagugc

SEQ ID NO: 234857 - RNA, 19 nt, Artificial Sequence
  Description of Artificial Sequence: Synthetic oligonucleotide
acaguagaguaccuuuaau

SEQ ID NO: 234858 - RNA, 19 nt, Artificial Sequence
  Description of Artificial Sequence: Synthetic oligonucleotide
gcaguuagugaacugaaaa

SEQ ID NO: 234859 - RNA, 19 nt, Artificial Sequence
  Description of Artificial Sequence: Synthetic oligonucleotide
ccacguaauuccauugacg

SEQ ID NO: 234860 - RNA, 19 nt, Artificial Sequence
  Description of Artificial Sequence: Synthetic oligonucleotide
agcauaccuguauaagcau

SEQ ID NO: 234861 - RNA, 19 nt, Artificial Sequence
  Description of Artificial Sequence: Synthetic oligonucleotide
ucguaugauucaacaguau

SEQ ID NO: 234862 - RNA, 19 nt, Artificial Sequence
  Description of Artificial Sequence: Synthetic oligonucleotide
augaccuacccaaugcaug

SEQ ID NO: 234863 - RNA, 19 nt, Artificial Sequence
  Description of Artificial Sequence: Synthetic oligonucleotide
caaugguuaggagcagggg

SEQ ID NO: 234864 - RNA, 19 nt, Artificial Sequence
  Description of Artificial Sequence: Synthetic oligonucleotide
acugcccacuaccaaauuu

SEQ ID NO: 234865 - RNA, 19 nt, Artificial Sequence
  Description of Artificial Sequence: Synthetic oligonucleotide
uguguguugcaacgcccac

SEQ ID NO: 234866 - RNA, 19 nt, Artificial Sequence
  Description of Artificial Sequence: Synthetic oligonucleotide
cuuccaauguucaccggga

SEQ ID NO: 234867 - RNA, 19 nt, Artificial Sequence
  Description of Artificial Sequence: Synthetic oligonucleotide
gaguugacaugcuggccac

SEQ ID NO: 234868 - RNA, 19 nt, Artificial Sequence
  Description of Artificial Sequence: Synthetic oligonucleotide
caacugcaacuccaaacug

SEQ ID NO: 234869 - RNA, 19 nt, Artificial Sequence
  Description of Artificial Sequence: Synthetic oligonucleotide
agauaacuccauccaucgu

SEQ ID NO: 234870 - RNA, 19 nt, Artificial Sequence
  Description of Artificial Sequence: Synthetic oligonucleotide
aucguaugauucaacagua

SEQ ID NO: 234871 - RNA, 19 nt, Artificial Sequence
  Description of Artificial Sequence: Synthetic oligonucleotide
gaagucuacgaccacucau

SEQ ID NO: 234872 - RNA, 19 nt, Artificial Sequence
  Description of Artificial Sequence: Synthetic oligonucleotide
gcauacagcaacggcaucc

SEQ ID NO: 234873 - RNA, 19 nt, Artificial Sequence
  Description of Artificial Sequence: Synthetic oligonucleotide
cgucuuuuggacauaggag

SEQ ID NO: 234874 - RNA, 19 nt, Artificial Sequence
  Description of Artificial Sequence: Synthetic oligonucleotide
auagccuauuggauuucuc

SEQ ID NO: 234875 - RNA, 19 nt, Artificial Sequence
  Description of Artificial Sequence: Synthetic oligonucleotide
uuacgagggcuuugucagc

SEQ ID NO: 234876 - RNA, 19 nt, Artificial Sequence
  Description of Artificial Sequence: Synthetic oligonucleotide
ucgaacuguuuuccagauc

SEQ ID NO: 234877 - RNA, 19 nt, Artificial Sequence
  Description of Artificial Sequence: Synthetic oligonucleotide
cugcuggguaacaugauua

SEQ ID NO: 234878 - RNA, 19 nt, Artificial Sequence
  Description of Artificial Sequence: Synthetic oligonucleotide
cacgucuuuuggacauagg

SEQ ID NO: 234879 - RNA, 19 nt, Artificial Sequence
  Description of Artificial Sequence: Synthetic oligonucleotide
uuauuagcugggugagcua

SEQ ID NO: 234880 - RNA, 19 nt, Artificial Sequence
  Description of Artificial Sequence: Synthetic oligonucleotide
acauagccuauuggauuuc

SEQ ID NO: 234881 - RNA, 19 nt, Artificial Sequence
  Description of Artificial Sequence: Synthetic oligonucleotide
aguguaguuuguaguacau

SEQ ID NO: 234882 - RNA, 19 nt, Artificial Sequence
  Description of Artificial Sequence: Synthetic oligonucleotide
ccauucgucuuucugagca

SEQ ID NO: 234883 - RNA, 19 nt, Artificial Sequence
  Description of Artificial Sequence: Synthetic oligonucleotide
cccaccguugacuuucuag

SEQ ID NO: 234884 - RNA, 19 nt, Artificial Sequence
  Description of Artificial Sequence: Synthetic oligonucleotide
auaccuguauaagcauacu

SEQ ID NO: 234885 - RNA, 19 nt, Artificial Sequence
  Description of Artificial Sequence: Synthetic oligonucleotide
ucccaucuuucuacaguau

SEQ ID NO: 234886 - RNA, 19 nt, Artificial Sequence
  Description of Artificial Sequence: Synthetic oligonucleotide
ccucgcauucugaagauca

SEQ ID NO: 234887 - RNA, 19 nt, Artificial Sequence
  Description of Artificial Sequence: Synthetic oligonucleotide
cuuaagagaagguguuuau

SEQ ID NO: 234888 - RNA, 19 nt, Artificial Sequence
  Description of Artificial Sequence: Synthetic oligonucleotide
aggcccucgcauucugaag

SEQ ID NO: 234889 - RNA, 19 nt, Artificial Sequence
  Description of Artificial Sequence: Synthetic oligonucleotide
uuguuacgagggcuuuguc

SEQ ID NO: 234890 - RNA, 19 nt, Artificial Sequence
  Description of Artificial Sequence: Synthetic oligonucleotide
caccgggacuuccucauuc

SEQ ID NO: 234891 - RNA, 19 nt, Artificial Sequence
  Description of Artificial Sequence: Synthetic oligonucleotide
aguugacaugcuggccacg

SEQ ID NO: 234892 - RNA, 19 nt, Artificial Sequence
  Description of Artificial Sequence: Synthetic oligonucleotide
guucaccgggacuuccuca

SEQ ID NO: 234893 - RNA, 19 nt, Artificial Sequence
  Description of Artificial Sequence: Synthetic oligonucleotide
gccacguaauuccauugac

SEQ ID NO: 234894 - RNA, 19 nt, Artificial Sequence
  Description of Artificial Sequence: Synthetic oligonucleotide
ggcccucgcauucugaaga

SEQ ID NO: 234895 - RNA, 19 nt, Artificial Sequence
  Description of Artificial Sequence: Synthetic oligonucleotide
guugcaacgcccacaccuc

SEQ ID NO: 234896 - RNA, 19 nt, Artificial Sequence
  Description of Artificial Sequence: Synthetic oligonucleotide
auacugcccacuaccaaau

SEQ ID NO: 234897 - RNA, 19 nt, Artificial Sequence
  Description of Artificial Sequence: Synthetic oligonucleotide
ccaaugcaugagagcaugg

SEQ ID NO: 234898 - RNA, 19 nt, Artificial Sequence
  Description of Artificial Sequence: Synthetic oligonucleotide
ccaaaugagagaaucccua

SEQ ID NO: 234899 - RNA, 19 nt, Artificial Sequence
  Description of Artificial Sequence: Synthetic oligonucleotide
agcuucgccagaucucguu

SEQ ID NO: 234900 - RNA, 19 nt, Artificial Sequence
  Description of Artificial Sequence: Synthetic oligonucleotide
caaguauccauuguguguu

SEQ ID NO: 234901 - RNA, 19 nt, Artificial Sequence
  Description of Artificial Sequence: Synthetic oligonucleotide
agaauugacugugcauauu

SEQ ID NO: 234902 - RNA, 19 nt, Artificial Sequence
  Description of Artificial Sequence: Synthetic oligonucleotide
gaucaggcacaguuuguau

SEQ ID NO: 234903 - RNA, 19 nt, Artificial Sequence
  Description of Artificial Sequence: Synthetic oligonucleotide
acaugcuggccacguaauu

SEQ ID NO: 234904 - RNA, 19 nt, Artificial Sequence
  Description of Artificial Sequence: Synthetic oligonucleotide
gagcaaugguuaggagcag

SEQ ID NO: 234905 - RNA, 19 nt, Artificial Sequence
  Description of Artificial Sequence: Synthetic oligonucleotide
agcuauuguuugaaaccau

SEQ ID NO: 234906 - RNA, 19 nt, Artificial Sequence
  Description of Artificial Sequence: Synthetic oligonucleotide
acaaaccacaucagagauu

SEQ ID NO: 234907 - RNA, 19 nt, Artificial Sequence
  Description of Artificial Sequence: Synthetic oligonucleotide
gcuggguaacaugauuaug

SEQ ID NO: 234908 - RNA, 19 nt, Artificial Sequence
  Description of Artificial Sequence: Synthetic oligonucleotide
ggccacguaauuccauuga

SEQ ID NO: 234909 - RNA, 19 nt, Artificial Sequence
  Description of Artificial Sequence: Synthetic oligonucleotide
aguugaccacgaaucacuu

SEQ ID NO: 234910 - RNA, 19 nt, Artificial Sequence
  Description of Artificial Sequence: Synthetic oligonucleotide
caugaccuacccaaugcau

SEQ ID NO: 234911 - RNA, 19 nt, Artificial Sequence
  Description of Artificial Sequence: Synthetic oligonucleotide
gugcaacugaggcccucgc

SEQ ID NO: 234912 - RNA, 19 nt, Artificial Sequence
  Description of Artificial Sequence: Synthetic oligonucleotide
cugcccacuaccaaauuuu

SEQ ID NO: 234913 - RNA, 19 nt, Artificial Sequence
  Description of Artificial Sequence: Synthetic oligonucleotide
gcuauuguuugaaaccaua

SEQ ID NO: 234914 - RNA, 19 nt, Artificial Sequence
  Description of Artificial Sequence: Synthetic oligonucleotide
ccucccacaacauaaaguu

SEQ ID NO: 234915 - RNA, 19 nt, Artificial Sequence
  Description of Artificial Sequence: Synthetic oligonucleotide
guugacaugcuggccacgu

SEQ ID NO: 234916 - RNA, 19 nt, Artificial Sequence
  Description of Artificial Sequence: Synthetic oligonucleotide
auaccucccacagcauaaa

SEQ ID NO: 234917 - RNA, 19 nt, Artificial Sequence
  Description of Artificial Sequence: Synthetic oligonucleotide
gagucuaaacauagccuau

SEQ ID NO: 234918 - RNA, 19 nt, Artificial Sequence
  Description of Artificial Sequence: Synthetic oligonucleotide
ggugagcuauuguuugaaa

SEQ ID NO: 234919 - RNA, 19 nt, Artificial Sequence
  Description of Artificial Sequence: Synthetic oligonucleotide
guguaguuuguaguacaua

SEQ ID NO: 234920 - RNA, 19 nt, Artificial Sequence
  Description of Artificial Sequence: Synthetic oligonucleotide
uugacggaugaagcugcuu

SEQ ID NO: 234921 - RNA, 19 nt, Artificial Sequence
  Description of Artificial Sequence: Synthetic oligonucleotide
caacggcaucccgaggaac

SEQ ID NO: 234922 - RNA, 19 nt, Artificial Sequence
  Description of Artificial Sequence: Synthetic oligonucleotide
ugccuauucugagcaucau

SEQ ID NO: 234923 - RNA, 19 nt, Artificial Sequence
  Description of Artificial Sequence: Synthetic oligonucleotide
ucaccgggacuuccucauu

SEQ ID NO: 234924 - RNA, 19 nt, Artificial Sequence
  Description of Artificial Sequence: Synthetic oligonucleotide
ccacgucuuuuggacauag

SEQ ID NO: 234925 - RNA, 19 nt, Artificial Sequence
  Description of Artificial Sequence: Synthetic oligonucleotide
ccuuaugaacguuaaugau

SEQ ID NO: 234926 - RNA, 19 nt, Artificial Sequence
  Description of Artificial Sequence: Synthetic oligonucleotide
gucuacgaccacucauagu

SEQ ID NO: 234927 - RNA, 19 nt, Artificial Sequence
  Description of Artificial Sequence: Synthetic oligonucleotide
gcauaccuguauaagcaua

SEQ ID NO: 234928 - RNA, 19 nt, Artificial Sequence
  Description of Artificial Sequence: Synthetic oligonucleotide
uccacgucuuuuggacaua

SEQ ID NO: 234929 - RNA, 19 nt, Artificial Sequence
  Description of Artificial Sequence: Synthetic oligonucleotide
cauagccuauuggauuucu

SEQ ID NO: 234930 - RNA, 19 nt, Artificial Sequence
  Description of Artificial Sequence: Synthetic oligonucleotide
augcgacauuaugauguuu

SEQ ID NO: 234931 - RNA, 19 nt, Artificial Sequence
  Description of Artificial Sequence: Synthetic oligonucleotide
gccuauuggauuucucauu

SEQ ID NO: 234932 - RNA, 19 nt, Artificial Sequence
  Description of Artificial Sequence: Synthetic oligonucleotide
cguaugauucaacaguauu

SEQ ID NO: 234933 - RNA, 19 nt, Artificial Sequence
  Description of Artificial Sequence: Synthetic oligonucleotide
cagcuguaagagacaugcu

SEQ ID NO: 234934 - RNA, 19 nt, Artificial Sequence
  Description of Artificial Sequence: Synthetic oligonucleotide
cccucgcauucugaagauc

SEQ ID NO: 234935 - RNA, 19 nt, Artificial Sequence
  Description of Artificial Sequence: Synthetic oligonucleotide
gcccucgcauucugaagau

SEQ ID NO: 234936 - RNA, 19 nt, Artificial Sequence
  Description of Artificial Sequence: Synthetic oligonucleotide
ccccaccguugacuuucua

SEQ ID NO: 234937 - RNA, 19 nt, Artificial Sequence
  Description of Artificial Sequence: Synthetic oligonucleotide
aaauagagcuuccacaacc

SEQ ID NO: 234938 - RNA, 19 nt, Artificial Sequence
  Description of Artificial Sequence: Synthetic oligonucleotide
aaugacaaguauaaaaugc

SEQ ID NO: 234939 - RNA, 19 nt, Artificial Sequence
  Description of Artificial Sequence: Synthetic oligonucleotide
aaugagagugaaaagauac

SEQ ID NO: 234940 - RNA, 19 nt, Artificial Sequence
  Description of Artificial Sequence: Synthetic oligonucleotide
acuugaguaaucuaacuuc

SEQ ID NO: 234941 - RNA, 19 nt, Artificial Sequence
  Description of Artificial Sequence: Synthetic oligonucleotide
uguuauuguugcaacaucc

SEQ ID NO: 234942 - RNA, 19 nt, Artificial Sequence
  Description of Artificial Sequence: Synthetic oligonucleotide
uuuacgucagcagugaggg

SEQ ID NO: 234943 - RNA, 19 nt, Artificial Sequence
  Description of Artificial Sequence: Synthetic oligonucleotide
aagccccuggucuagaagc

SEQ ID NO: 234944 - RNA, 19 nt, Artificial Sequence
  Description of Artificial Sequence: Synthetic oligonucleotide
ucuagaagcaucagagagg

SEQ ID NO: 234945 - RNA, 19 nt, Artificial Sequence
  Description of Artificial Sequence: Synthetic oligonucleotide
ugaacgucauauccgagcg

SEQ ID NO: 234946 - RNA, 19 nt, Artificial Sequence
  Description of Artificial Sequence: Synthetic oligonucleotide
ugcaauauaguaugaagca

SEQ ID NO: 234947 - RNA, 19 nt, Artificial Sequence
  Description of Artificial Sequence: Synthetic oligonucleotide
caugauagaguuuccagcc

SEQ ID NO: 234948 - RNA, 19 nt, Artificial Sequence
  Description of Artificial Sequence: Synthetic oligonucleotide
aaacagugcauacugggug

SEQ ID NO: 234949 - RNA, 19 nt, Artificial Sequence
  Description of Artificial Sequence: Synthetic oligonucleotide
ugucauuccagcucgaaug

SEQ ID NO: 234950 - RNA, 19 nt, Artificial Sequence
  Description of Artificial Sequence: Synthetic oligonucleotide
agcauauucaccugacuac

SEQ ID NO: 234951 - RNA, 19 nt, Artificial Sequence
  Description of Artificial Sequence: Synthetic oligonucleotide
ucgaauaccagccagucaa

SEQ ID NO: 234952 - RNA, 19 nt, Artificial Sequence
  Description of Artificial Sequence: Synthetic oligonucleotide
uucacguaacauaacagca

SEQ ID NO: 234953 - RNA, 19 nt, Artificial Sequence
  Description of Artificial Sequence: Synthetic oligonucleotide
uuucuaaccaaucuaccac

SEQ ID NO: 234954 - RNA, 19 nt, Artificial Sequence
  Description of Artificial Sequence: Synthetic oligonucleotide
agaggauucccuuaacuuc

SEQ ID NO: 234955 - RNA, 19 nt, Artificial Sequence
  Description of Artificial Sequence: Synthetic oligonucleotide
agugagggcaucuaaaugu

SEQ ID NO: 234956 - RNA, 19 nt, Artificial Sequence
  Description of Artificial Sequence: Synthetic oligonucleotide
uauggauucccuucaacag

SEQ ID NO: 234957 - RNA, 19 nt, Artificial Sequence
  Description of Artificial Sequence: Synthetic oligonucleotide
ucgaauauucucaacuaca

SEQ ID NO: 234958 - RNA, 19 nt, Artificial Sequence
  Description of Artificial Sequence: Synthetic oligonucleotide
cucagugcugcguaaaucg

SEQ ID NO: 234959 - RNA, 19 nt, Artificial Sequence
  Description of Artificial Sequence: Synthetic oligonucleotide
aacgucauauccgagcggg

SEQ ID NO: 234960 - RNA, 19 nt, Artificial Sequence
  Description of Artificial Sequence: Synthetic oligonucleotide
ugacugaacgucauauccg

SEQ ID NO: 234961 - RNA, 19 nt, Artificial Sequence
  Description of Artificial Sequence: Synthetic oligonucleotide
uacuuucuaaccaaucuac

SEQ ID NO: 234962 - RNA, 19 nt, Artificial Sequence
  Description of Artificial Sequence: Synthetic oligonucleotide
aaaacaaggugagucauga

SEQ ID NO: 234963 - RNA, 19 nt, Artificial Sequence
  Description of Artificial Sequence: Synthetic oligonucleotide
auaccagccagucaaucac

SEQ ID NO: 234964 - RNA, 19 nt, Artificial Sequence
  Description of Artificial Sequence: Synthetic oligonucleotide
ugaguuaugacugaacguc

SEQ ID NO: 234965 - RNA, 19 nt, Artificial Sequence
  Description of Artificial Sequence: Synthetic oligonucleotide
ucgaaugagagugaaaaga

SEQ ID NO: 234966 - RNA, 19 nt, Artificial Sequence
  Description of Artificial Sequence: Synthetic oligonucleotide
auuacugacguccgaaucu

SEQ ID NO: 234967 - RNA, 19 nt, Artificial Sequence
  Description of Artificial Sequence: Synthetic oligonucleotide
uuccauguacucucuaggg

SEQ ID NO: 234968 - RNA, 19 nt, Artificial Sequence
  Description of Artificial Sequence: Synthetic oligonucleotide
aacuaaucuuccaaauccg

SEQ ID NO: 234969 - RNA, 19 nt, Artificial Sequence
  Description of Artificial Sequence: Synthetic oligonucleotide
aucacccggaaguaggccc

SEQ ID NO: 234970 - RNA, 19 nt, Artificial Sequence
  Description of Artificial Sequence: Synthetic oligonucleotide
uucuaaccaaucuaccacc

SEQ ID NO: 234971 - RNA, 19 nt, Artificial Sequence
  Description of Artificial Sequence: Synthetic oligonucleotide
ugacaaguauaaaaugcga

SEQ ID NO: 234972 - RNA, 19 nt, Artificial Sequence
  Description of Artificial Sequence: Synthetic oligonucleotide
uucucacuggcguuaauag

SEQ ID NO: 234973 - RNA, 19 nt, Artificial Sequence
  Description of Artificial Sequence: Synthetic oligonucleotide
auauucaccugacuaccac

SEQ ID NO: 234974 - RNA, 19 nt, Artificial Sequence
  Description of Artificial Sequence: Synthetic oligonucleotide
cuuuacgucagcagugagg

SEQ ID NO: 234975 - RNA, 19 nt, Artificial Sequence
  Description of Artificial Sequence: Synthetic oligonucleotide
uguauucugucucuauaca

SEQ ID NO: 234976 - RNA, 19 nt, Artificial Sequence
  Description of Artificial Sequence: Synthetic oligonucleotide
ugaguaaucuaacuucauc

SEQ ID NO: 234977 - RNA, 19 nt, Artificial Sequence
  Description of Artificial Sequence: Synthetic oligonucleotide
uucgaauauucucaacuac

SEQ ID NO: 234978 - RNA, 19 nt, Artificial Sequence
  Description of Artificial Sequence: Synthetic oligonucleotide
aaaguugguugagauauca

SEQ ID NO: 234979 - RNA, 19 nt, Artificial Sequence
  Description of Artificial Sequence: Synthetic oligonucleotide
uucuuaguaaaaccaucug

SEQ ID NO: 234980 - RNA, 19 nt, Artificial Sequence
  Description of Artificial Sequence: Synthetic oligonucleotide
gaguaaucuaacuucaucu

SEQ ID NO: 234981 - RNA, 19 nt, Artificial Sequence
  Description of Artificial Sequence: Synthetic oligonucleotide
uccguuccgagaaugcagg

SEQ ID NO: 234982 - RNA, 19 nt, Artificial Sequence
  Description of Artificial Sequence: Synthetic oligonucleotide
uaacauuagggucaugaua

SEQ ID NO: 234983 - RNA, 19 nt, Artificial Sequence
  Description of Artificial Sequence: Synthetic oligonucleotide
ucacguaacauaacagcac

SEQ ID NO: 234984 - RNA, 19 nt, Artificial Sequence
  Description of Artificial Sequence: Synthetic oligonucleotide
guugccguugcucaaauuc

SEQ ID NO: 234985 - RNA, 19 nt, Artificial Sequence
  Description of Artificial Sequence: Synthetic oligonucleotide
cuaagguccaauucgcuuc

SEQ ID NO: 234986 - RNA, 19 nt, Artificial Sequence
  Description of Artificial Sequence: Synthetic oligonucleotide
gauacuugaguaaucuaac

SEQ ID NO: 234987 - RNA, 19 nt, Artificial Sequence
  Description of Artificial Sequence: Synthetic oligonucleotide
cugaacgucauauccgagc

SEQ ID NO: 234988 - RNA, 19 nt, Artificial Sequence
  Description of Artificial Sequence: Synthetic oligonucleotide
gucuaauaggagcaucagg

SEQ ID NO: 234989 - RNA, 19 nt, Artificial Sequence
  Description of Artificial Sequence: Synthetic oligonucleotide
uuuacguccucaguuacac

SEQ ID NO: 234990 - RNA, 19 nt, Artificial Sequence
  Description of Artificial Sequence: Synthetic oligonucleotide
guauggauucccuucaaca

SEQ ID NO: 234991 - RNA, 19 nt, Artificial Sequence
  Description of Artificial Sequence: Synthetic oligonucleotide
uuucgaauauucucaacua

SEQ ID NO: 234992 - RNA, 19 nt, Artificial Sequence
  Description of Artificial Sequence: Synthetic oligonucleotide
uauaaaaugcgaugagguu

SEQ ID NO: 234993 - RNA, 19 nt, Artificial Sequence
  Description of Artificial Sequence: Synthetic oligonucleotide
ucuaaccaaucuaccacca

SEQ ID NO: 234994 - RNA, 19 nt, Artificial Sequence
  Description of Artificial Sequence: Synthetic oligonucleotide
gaggugaugaguuaugacu

SEQ ID NO: 234995 - RNA, 19 nt, Artificial Sequence
  Description of Artificial Sequence: Synthetic oligonucleotide
agguauggaggguauuuuc

SEQ ID NO: 234996 - RNA, 19 nt, Artificial Sequence
  Description of Artificial Sequence: Synthetic oligonucleotide
uuaugacugaacgucauau

SEQ ID NO: 234997 - RNA, 19 nt, Artificial Sequence
  Description of Artificial Sequence: Synthetic oligonucleotide
uucgcuuccauguacucuc

SEQ ID NO: 234998 - RNA, 19 nt, Artificial Sequence
  Description of Artificial Sequence: Synthetic oligonucleotide
ugaacuacaugguaauguu

SEQ ID NO: 234999 - RNA, 19 nt, Artificial Sequence
  Description of Artificial Sequence: Synthetic oligonucleotide
ugguugagauaucaaugca

SEQ ID NO: 235000 - RNA, 19 nt, Artificial Sequence
  Description of Artificial Sequence: Synthetic oligonucleotide
guauggaggguauuuuccc

SEQ ID NO: 235001 - RNA, 19 nt, Artificial Sequence
  Description of Artificial Sequence: Synthetic oligonucleotide
agagaacauacucauggau

SEQ ID NO: 235002 - RNA, 19 nt, Artificial Sequence
  Description of Artificial Sequence: Synthetic oligonucleotide
caucaaaccauccaggucu

SEQ ID NO: 235003 - RNA, 19 nt, Artificial Sequence
  Description of Artificial Sequence: Synthetic oligonucleotide
uguauggauucccuucaac

SEQ ID NO: 235004 - RNA, 19 nt, Artificial Sequence
  Description of Artificial Sequence: Synthetic oligonucleotide
ucacuuauuaaaagcugua

SEQ ID NO: 235005 - RNA, 19 nt, Artificial Sequence
  Description of Artificial Sequence: Synthetic oligonucleotide
auacuuucuaaccaaucua

SEQ ID NO: 235006 - RNA, 19 nt, Artificial Sequence
  Description of Artificial Sequence: Synthetic oligonucleotide
ugucgaaccagugagucuc

SEQ ID NO: 235007 - RNA, 19 nt, Artificial Sequence
  Description of Artificial Sequence: Synthetic oligonucleotide
aaccaaucuaccaccagcu

SEQ ID NO: 235008 - RNA, 19 nt, Artificial Sequence
  Description of Artificial Sequence: Synthetic oligonucleotide
auagauuucugcaauggaa

SEQ ID NO: 235009 - RNA, 19 nt, Artificial Sequence
  Description of Artificial Sequence: Synthetic oligonucleotide
gagaaugcaggaaauaucu

SEQ ID NO: 235010 - RNA, 19 nt, Artificial Sequence
  Description of Artificial Sequence: Synthetic oligonucleotide
ucgaagagugcuucaagaa

SEQ ID NO: 235011 - RNA, 19 nt, Artificial Sequence
  Description of Artificial Sequence: Synthetic oligonucleotide
uuuuaagguauggagggua

SEQ ID NO: 235012 - RNA, 19 nt, Artificial Sequence
  Description of Artificial Sequence: Synthetic oligonucleotide
uggggcuccacguuugugc

SEQ ID NO: 235013 - RNA, 19 nt, Artificial Sequence
  Description of Artificial Sequence: Synthetic oligonucleotide
ugcugggucgaauaccagc

SEQ ID NO: 235014 - RNA, 19 nt, Artificial Sequence
  Description of Artificial Sequence: Synthetic oligonucleotide
ucucacuggcguuaauagc

SEQ ID NO: 235015 - RNA, 19 nt, Artificial Sequence
  Description of Artificial Sequence: Synthetic oligonucleotide
caguaucuagggauggagc

SEQ ID NO: 235016 - RNA, 19 nt, Artificial Sequence
  Description of Artificial Sequence: Synthetic oligonucleotide
gacugaacgucauauccga

SEQ ID NO: 235017 - RNA, 19 nt, Artificial Sequence
  Description of Artificial Sequence: Synthetic oligonucleotide
agucgugccaguaucuagg

SEQ ID NO: 235018 - RNA, 19 nt, Artificial Sequence
  Description of Artificial Sequence: Synthetic oligonucleotide
aacagcacucagguuuacg

SEQ ID NO: 235019 - RNA, 19 nt, Artificial Sequence
  Description of Artificial Sequence: Synthetic oligonucleotide
ucacuggcguuaauagcag

SEQ ID NO: 235020 - RNA, 19 nt, Artificial Sequence
  Description of Artificial Sequence: Synthetic oligonucleotide
auauccgagcgggucaagc

SEQ ID NO: 235021 - RNA, 19 nt, Artificial Sequence
  Description of Artificial Sequence: Synthetic oligonucleotide
ucagugcugcguaaaucgc

SEQ ID NO: 235022 - RNA, 19 nt, Artificial Sequence
  Description of Artificial Sequence: Synthetic oligonucleotide
aggugaugaguuaugacug

SEQ ID NO: 235023 - RNA, 19 nt, Artificial Sequence
  Description of Artificial Sequence: Synthetic oligonucleotide
uaugacugaacgucauauc

SEQ ID NO: 235024 - RNA, 19 nt, Artificial Sequence
  Description of Artificial Sequence: Synthetic oligonucleotide
gguugagauaucaaugcag

SEQ ID NO: 235025 - RNA, 19 nt, Artificial Sequence
  Description of Artificial Sequence: Synthetic oligonucleotide
aaauccgucuguauggauu

SEQ ID NO: 235026 - RNA, 19 nt, Artificial Sequence
  Description of Artificial Sequence: Synthetic oligonucleotide
augcgaugagguuugugug

SEQ ID NO: 235027 - RNA, 19 nt, Artificial Sequence
  Description of Artificial Sequence: Synthetic oligonucleotide
acaacguuugcagagccgu

SEQ ID NO: 235028 - RNA, 19 nt, Artificial Sequence
  Description of Artificial Sequence: Synthetic oligonucleotide
ccauguacucucuagggag

SEQ ID NO: 235029 - RNA, 19 nt, Artificial Sequence
  Description of Artificial Sequence: Synthetic oligonucleotide
ggguauuuucccaauauac

SEQ ID NO: 235030 - RNA, 19 nt, Artificial Sequence
  Description of Artificial Sequence: Synthetic oligonucleotide
cugucuaauaggagcauca

SEQ ID NO: 235031 - RNA, 19 nt, Artificial Sequence
  Description of Artificial Sequence: Synthetic oligonucleotide
gaacgucauauccgagcgg

SEQ ID NO: 235032 - RNA, 19 nt, Artificial Sequence
  Description of Artificial Sequence: Synthetic oligonucleotide
gucgaagagugcuucaaga

SEQ ID NO: 235033 - RNA, 19 nt, Artificial Sequence
  Description of Artificial Sequence: Synthetic oligonucleotide
guauucugucucuauacaa

SEQ ID NO: 235034 - RNA, 19 nt, Artificial Sequence
  Description of Artificial Sequence: Synthetic oligonucleotide
ggacacuuccuauguaagg

SEQ ID NO: 235035 - RNA, 19 nt, Artificial Sequence
  Description of Artificial Sequence: Synthetic oligonucleotide
cauuacugacguccgaauc

SEQ ID NO: 235036 - RNA, 19 nt, Artificial Sequence
  Description of Artificial Sequence: Synthetic oligonucleotide
agugcugcguaaaucgcuc

SEQ ID NO: 235037 - RNA, 19 nt, Artificial Sequence
  Description of Artificial Sequence: Synthetic oligonucleotide
guuccgagaaugcaggaaa

SEQ ID NO: 235038 - RNA, 19 nt, Artificial Sequence
  Description of Artificial Sequence: Synthetic oligonucleotide
uugaguaaucuaacuucau

SEQ ID NO: 235039 - RNA, 19 nt, Artificial Sequence
  Description of Artificial Sequence: Synthetic oligonucleotide
gucuuaguaagcuucggcu

SEQ ID NO: 235040 - RNA, 19 nt, Artificial Sequence
  Description of Artificial Sequence: Synthetic oligonucleotide
cuaaccaaucuaccaccag

SEQ ID NO: 235041 - RNA, 19 nt, Artificial Sequence
  Description of Artificial Sequence: Synthetic oligonucleotide
ucugaacuacaugguaaug

SEQ ID NO: 235042 - RNA, 19 nt, Artificial Sequence
  Description of Artificial Sequence: Synthetic oligonucleotide
gcaauauaguaugaagcag

SEQ ID NO: 235043 - RNA, 19 nt, Artificial Sequence
  Description of Artificial Sequence: Synthetic oligonucleotide
auacacaaaugcucucgga

SEQ ID NO: 235044 - RNA, 19 nt, Artificial Sequence
  Description of Artificial Sequence: Synthetic oligonucleotide
ucauuacugacguccgaau

SEQ ID NO: 235045 - RNA, 19 nt, Artificial Sequence
  Description of Artificial Sequence: Synthetic oligonucleotide
cacaacguuugcagagccg

SEQ ID NO: 235046 - RNA, 19 nt, Artificial Sequence
  Description of Artificial Sequence: Synthetic oligonucleotide
gucgugccaguaucuaggg

SEQ ID NO: 235047 - RNA, 19 nt, Artificial Sequence
  Description of Artificial Sequence: Synthetic oligonucleotide
cuauguaaggcagcagcug

SEQ ID NO: 235048 - RNA, 19 nt, Artificial Sequence
  Description of Artificial Sequence: Synthetic oligonucleotide
ccagguacaguuuguggcg

SEQ ID NO: 235049 - RNA, 19 nt, Artificial Sequence
  Description of Artificial Sequence: Synthetic oligonucleotide
ugccaguaucuagggaugg

SEQ ID NO: 235050 - RNA, 19 nt, Artificial Sequence
  Description of Artificial Sequence: Synthetic oligonucleotide
caccuuuacacgguccucc

SEQ ID NO: 235051 - RNA, 19 nt, Artificial Sequence
  Description of Artificial Sequence: Synthetic oligonucleotide
caaccgucuucucacuggc

SEQ ID NO: 235052 - RNA, 19 nt, Artificial Sequence
  Description of Artificial Sequence: Synthetic oligonucleotide
cgcucguucauauuuauug

SEQ ID NO: 235053 - RNA, 19 nt, Artificial Sequence
  Description of Artificial Sequence: Synthetic oligonucleotide
guaaaaguugguugagaua

SEQ ID NO: 235054 - RNA, 19 nt, Artificial Sequence
  Description of Artificial Sequence: Synthetic oligonucleotide
auagagcuuccacaaccgu

SEQ ID NO: 235055 - RNA, 19 nt, Artificial Sequence
  Description of Artificial Sequence: Synthetic oligonucleotide
uccaauucgcuuccaugua

SEQ ID NO: 235056 - RNA, 19 nt, Artificial Sequence
  Description of Artificial Sequence: Synthetic oligonucleotide
aaacaaggugagucaugaa

SEQ ID NO: 235057 - RNA, 19 nt, Artificial Sequence
  Description of Artificial Sequence: Synthetic oligonucleotide
ugcugcguaaaucgcucgu

SEQ ID NO: 235058 - RNA, 19 nt, Artificial Sequence
  Description of Artificial Sequence: Synthetic oligonucleotide
gaacuacaugguaauguuc

SEQ ID NO: 235059 - RNA, 19 nt, Artificial Sequence
  Description of Artificial Sequence: Synthetic oligonucleotide
uccuuuacgucagcaguga

SEQ ID NO: 235060 - RNA, 19 nt, Artificial Sequence
  Description of Artificial Sequence: Synthetic oligonucleotide
agguuuacguccucaguua

SEQ ID NO: 235061 - RNA, 19 nt, Artificial Sequence
  Description of Artificial Sequence: Synthetic oligonucleotide
gucauuccagcucgaauga

SEQ ID NO: 235062 - RNA, 19 nt, Artificial Sequence
  Description of Artificial Sequence: Synthetic oligonucleotide
uuacugacguccgaaucuc

SEQ ID NO: 235063 - RNA, 19 nt, Artificial Sequence
  Description of Artificial Sequence: Synthetic oligonucleotide
gacaaguauaaaaugcgau

SEQ ID NO: 235064 - RNA, 19 nt, Artificial Sequence
  Description of Artificial Sequence: Synthetic oligonucleotide
gagucaugaagcggaggag

SEQ ID NO: 235065 - RNA, 19 nt, Artificial Sequence
  Description of Artificial Sequence: Synthetic oligonucleotide
gucauauccgagcggguca

SEQ ID NO: 235066 - RNA, 19 nt, Artificial Sequence
  Description of Artificial Sequence: Synthetic oligonucleotide
aggacguuguacauuuucu

SEQ ID NO: 235067 - RNA, 19 nt, Artificial Sequence
  Description of Artificial Sequence: Synthetic oligonucleotide
ugccgcuguuuuaagguau

SEQ ID NO: 235068 - RNA, 19 nt, Artificial Sequence
  Description of Artificial Sequence: Synthetic oligonucleotide
gaguuaugacugaacguca

SEQ ID NO: 235069 - RNA, 19 nt, Artificial Sequence
  Description of Artificial Sequence: Synthetic oligonucleotide
gguccaauucgcuuccaug

SEQ ID NO: 235070 - RNA, 19 nt, Artificial Sequence
  Description of Artificial Sequence: Synthetic oligonucleotide
cagucgugccaguaucuag

SEQ ID NO: 235071 - RNA, 19 nt, Artificial Sequence
  Description of Artificial Sequence: Synthetic oligonucleotide
ugugccggggagacuuccc

SEQ ID NO: 235072 - RNA, 19 nt, Artificial Sequence
  Description of Artificial Sequence: Synthetic oligonucleotide
caucuucacguaacauaac

SEQ ID NO: 235073 - RNA, 19 nt, Artificial Sequence
  Description of Artificial Sequence: Synthetic oligonucleotide
cuggucuagaagcaucaga

SEQ ID NO: 235074 - RNA, 19 nt, Artificial Sequence
  Description of Artificial Sequence: Synthetic oligonucleotide
guaaaucgcucguucauau

SEQ ID NO: 235075 - RNA, 19 nt, Artificial Sequence
  Description of Artificial Sequence: Synthetic oligonucleotide
gugcugcguaaaucgcucg

SEQ ID NO: 235076 - RNA, 19 nt, Artificial Sequence
  Description of Artificial Sequence: Synthetic oligonucleotide
aaucgcucguucauauuua

SEQ ID NO: 235077 - RNA, 19 nt, Artificial Sequence
  Description of Artificial Sequence: Synthetic oligonucleotide
ggucgaagagugcuucaag

SEQ ID NO: 235078 - RNA, 19 nt, Artificial Sequence
  Description of Artificial Sequence: Synthetic oligonucleotide
cuaugcaauauaguaugaa

SEQ ID NO: 235079 - RNA, 19 nt, Artificial Sequence
  Description of Artificial Sequence: Synthetic oligonucleotide
ggagacuucccuuccguuc

SEQ ID NO: 235080 - RNA, 19 nt, Artificial Sequence
  Description of Artificial Sequence: Synthetic oligonucleotide
gguuuacguccucaguuac

SEQ ID NO: 235081 - RNA, 19 nt, Artificial Sequence
  Description of Artificial Sequence: Synthetic oligonucleotide
caagccccuggucuagaag

SEQ ID NO: 235082 - RNA, 19 nt, Artificial Sequence
  Description of Artificial Sequence: Synthetic oligonucleotide
aaguugguugagauaucaa

SEQ ID NO: 235083 - RNA, 19 nt, Artificial Sequence
  Description of Artificial Sequence: Synthetic oligonucleotide
aguccaggcgucgcucggc

SEQ ID NO: 235084 - RNA, 19 nt, Artificial Sequence
  Description of Artificial Sequence: Synthetic oligonucleotide
cacguaacauaacagcacu

SEQ ID NO: 235085 - RNA, 19 nt, Artificial Sequence
  Description of Artificial Sequence: Synthetic oligonucleotide
gucauuacugacguccgaa

SEQ ID NO: 235086 - RNA, 19 nt, Artificial Sequence
  Description of Artificial Sequence: Synthetic oligonucleotide
ucgugccaguaucuaggga

SEQ ID NO: 235087 - RNA, 19 nt, Artificial Sequence
  Description of Artificial Sequence: Synthetic oligonucleotide
uggaggguauuuucccaau

SEQ ID NO: 235088 - RNA, 19 nt, Artificial Sequence
  Description of Artificial Sequence: Synthetic oligonucleotide
ucauauccgagcgggucaa

SEQ ID NO: 235089 - RNA, 19 nt, Artificial Sequence
  Description of Artificial Sequence: Synthetic oligonucleotide
gcguuaauagcagcaacug

SEQ ID NO: 235090 - RNA, 19 nt, Artificial Sequence
  Description of Artificial Sequence: Synthetic oligonucleotide
guuaugacugaacgucaua

SEQ ID NO: 235091 - RNA, 19 nt, Artificial Sequence
  Description of Artificial Sequence: Synthetic oligonucleotide
uuacacgguccuccucagu

SEQ ID NO: 235092 - RNA, 19 nt, Artificial Sequence
  Description of Artificial Sequence: Synthetic oligonucleotide
cguuaauagcagcaacugc

SEQ ID NO: 235093 - RNA, 19 nt, Artificial Sequence
  Description of Artificial Sequence: Synthetic oligonucleotide
uuacgucagcagugagggc

SEQ ID NO: 235094 - RNA, 19 nt, Artificial Sequence
  Description of Artificial Sequence: Synthetic oligonucleotide
auaacagcacucagguuua

SEQ ID NO: 235095 - RNA, 19 nt, Artificial Sequence
  Description of Artificial Sequence: Synthetic oligonucleotide
gucgaauaccagccaguca

SEQ ID NO: 235096 - RNA, 19 nt, Artificial Sequence
  Description of Artificial Sequence: Synthetic oligonucleotide
acugaacgucauauccgag

SEQ ID NO: 235097 - RNA, 19 nt, Artificial Sequence
  Description of Artificial Sequence: Synthetic oligonucleotide
ccaauucgcuuccauguac

SEQ ID NO: 235098 - RNA, 19 nt, Artificial Sequence
  Description of Artificial Sequence: Synthetic oligonucleotide
aguuacugucauccagguu

SEQ ID NO: 235099 - RNA, 19 nt, Artificial Sequence
  Description of Artificial Sequence: Synthetic oligonucleotide
uuaagguauggaggguauu

SEQ ID NO: 235100 - RNA, 19 nt, Artificial Sequence
  Description of Artificial Sequence: Synthetic oligonucleotide
agccguugugccucuucug

SEQ ID NO: 235101 - RNA, 19 nt, Artificial Sequence
  Description of Artificial Sequence: Synthetic oligonucleotide
uguacucucuagggaguuc

SEQ ID NO: 235102 - RNA, 19 nt, Artificial Sequence
  Description of Artificial Sequence: Synthetic oligonucleotide
ccaaucuaccaccagcuga

SEQ ID NO: 235103 - RNA, 19 nt, Artificial Sequence
  Description of Artificial Sequence: Synthetic oligonucleotide
aaaaugcgaugagguuugu

SEQ ID NO: 235104 - RNA, 19 nt, Artificial Sequence
  Description of Artificial Sequence: Synthetic oligonucleotide
caucacccggaaguaggcc

SEQ ID NO: 235105 - RNA, 19 nt, Artificial Sequence
  Description of Artificial Sequence: Synthetic oligonucleotide
gugccaguaucuagggaug

SEQ ID NO: 235106 - RNA, 19 nt, Artificial Sequence
  Description of Artificial Sequence: Synthetic oligonucleotide
aggauccaauucugugaca

SEQ ID NO: 235107 - RNA, 19 nt, Artificial Sequence
  Description of Artificial Sequence: Synthetic oligonucleotide
guuuacguccucaguuaca

SEQ ID NO: 235108 - RNA, 19 nt, Artificial Sequence
  Description of Artificial Sequence: Synthetic oligonucleotide
gggucauuacugacguccg

SEQ ID NO: 235109 - RNA, 19 nt, Artificial Sequence
  Description of Artificial Sequence: Synthetic oligonucleotide
caauucgcuuccauguacu

SEQ ID NO: 235110 - RNA, 19 nt, Artificial Sequence
  Description of Artificial Sequence: Synthetic oligonucleotide
ucgcucguucauauuuauu

SEQ ID NO: 235111 - RNA, 19 nt, Artificial Sequence
  Description of Artificial Sequence: Synthetic oligonucleotide
uagggucaugauagaguuu

SEQ ID NO: 235112 - RNA, 19 nt, Artificial Sequence
  Description of Artificial Sequence: Synthetic oligonucleotide
agguccaauucgcuuccau

SEQ ID NO: 235113 - RNA, 19 nt, Artificial Sequence
  Description of Artificial Sequence: Synthetic oligonucleotide
ccaaacgcugugaugagaa

SEQ ID NO: 235114 - RNA, 19 nt, Artificial Sequence
  Description of Artificial Sequence: Synthetic oligonucleotide
uaggcccacacugugucuu

SEQ ID NO: 235115 - RNA, 19 nt, Artificial Sequence
  Description of Artificial Sequence: Synthetic oligonucleotide
cagguuuacguccucaguu

SEQ ID NO: 235116 - RNA, 19 nt, Artificial Sequence
  Description of Artificial Sequence: Synthetic oligonucleotide
ccuuccguuccgagaaugc

SEQ ID NO: 235117 - RNA, 19 nt, Artificial Sequence
  Description of Artificial Sequence: Synthetic oligonucleotide
cuuccguuccgagaaugca

SEQ ID NO: 235118 - RNA, 19 nt, Artificial Sequence
  Description of Artificial Sequence: Synthetic oligonucleotide
ggauucccuuaacuucugc

SEQ ID NO: 235119 - RNA, 19 nt, Artificial Sequence
  Description of Artificial Sequence: Synthetic oligonucleotide
ccacaacguuugcagagcc

SEQ ID NO: 235120 - RNA, 19 nt, Artificial Sequence
  Description of Artificial Sequence: Synthetic oligonucleotide
guacucucuagggaguucu

SEQ ID NO: 235121 - RNA, 19 nt, Artificial Sequence
  Description of Artificial Sequence: Synthetic oligonucleotide
ucuucucacuggcguuaau

SEQ ID NO: 235122 - RNA, 19 nt, Artificial Sequence
  Description of Artificial Sequence: Synthetic oligonucleotide
ggucgaauaccagccaguc

SEQ ID NO: 235123 - RNA, 19 nt, Artificial Sequence
  Description of Artificial Sequence: Synthetic oligonucleotide
guggucgaagagugcuuca

SEQ ID NO: 235124 - RNA, 19 nt, Artificial Sequence
  Description of Artificial Sequence: Synthetic oligonucleotide
ucgcucggcucacuauuuu

SEQ ID NO: 235125 - RNA, 19 nt, Artificial Sequence
  Description of Artificial Sequence: Synthetic oligonucleotide
cugggugucuuaguaagcu

SEQ ID NO: 235126 - RNA, 19 nt, Artificial Sequence
  Description of Artificial Sequence: Synthetic oligonucleotide
ugugugccggggagacuuc

SEQ ID NO: 235127 - RNA, 19 nt, Artificial Sequence
  Description of Artificial Sequence: Synthetic oligonucleotide
cugugcuaugcaauauagu

SEQ ID NO: 235128 - RNA, 19 nt, Artificial Sequence
  Description of Artificial Sequence: Synthetic oligonucleotide
gggucaucuucacguaaca

SEQ ID NO: 235129 - RNA, 19 nt, Artificial Sequence
  Description of Artificial Sequence: Synthetic oligonucleotide
guuuuaagguauggagggu

SEQ ID NO: 235130 - RNA, 19 nt, Artificial Sequence
  Description of Artificial Sequence: Synthetic oligonucleotide
aggauucccuuaacuucug

SEQ ID NO: 235131 - RNA, 19 nt, Artificial Sequence
  Description of Artificial Sequence: Synthetic oligonucleotide
aagguccaauucgcuucca

SEQ ID NO: 235132 - RNA, 19 nt, Artificial Sequence
  Description of Artificial Sequence: Synthetic oligonucleotide
cagugcugcguaaaucgcu

SEQ ID NO: 235133 - RNA, 19 nt, Artificial Sequence
  Description of Artificial Sequence: Synthetic oligonucleotide
ccuuuacgucagcagugag

SEQ ID NO: 235134 - RNA, 19 nt, Artificial Sequence
  Description of Artificial Sequence: Synthetic oligonucleotide
ggagcugaauucauaugcu

SEQ ID NO: 235135 - RNA, 19 nt, Artificial Sequence
  Description of Artificial Sequence: Synthetic oligonucleotide
cauauccgagcgggucaag

SEQ ID NO: 235136 - RNA, 19 nt, Artificial Sequence
  Description of Artificial Sequence: Synthetic oligonucleotide
ggaaaucagagaacauacu

SEQ ID NO: 235137 - RNA, 19 nt, Artificial Sequence
  Description of Artificial Sequence: Synthetic oligonucleotide
gugugccggggagacuucc

SEQ ID NO: 235138 - RNA, 19 nt, Artificial Sequence
  Description of Artificial Sequence: Synthetic oligonucleotide
ggcaagcaaccuccaugug

SEQ ID NO: 235139 - RNA, 19 nt, Artificial Sequence
  Description of Artificial Sequence: Synthetic oligonucleotide
cauuaacauuagggucaug

SEQ ID NO: 235140 - RNA, 19 nt, Artificial Sequence
  Description of Artificial Sequence: Synthetic oligonucleotide
cugccgcuguuuuaaggua

SEQ ID NO: 235141 - RNA, 19 nt, Artificial Sequence
  Description of Artificial Sequence: Synthetic oligonucleotide
gccggggagacuucccuuc

SEQ ID NO: 235142 - RNA, 19 nt, Artificial Sequence
  Description of Artificial Sequence: Synthetic oligonucleotide
uccaggcgucgcucggcuc

SEQ ID NO: 235143 - RNA, 19 nt, Artificial Sequence
  Description of Artificial Sequence: Synthetic oligonucleotide
gccgcuguuuuaagguaug

SEQ ID NO: 235144 - RNA, 19 nt, Artificial Sequence
  Description of Artificial Sequence: Synthetic oligonucleotide
cuagcucuguaccuccauu

SEQ ID NO: 235145 - RNA, 19 nt, Artificial Sequence
  Description of Artificial Sequence: Synthetic oligonucleotide
acgucauauccgagcgggu

SEQ ID NO: 235146 - RNA, 19 nt, Artificial Sequence
  Description of Artificial Sequence: Synthetic oligonucleotide
gcguaaaucgcucguucau

SEQ ID NO: 235147 - RNA, 19 nt, Artificial Sequence
  Description of Artificial Sequence: Synthetic oligonucleotide
cgucauauccgagcggguc

SEQ ID NO: 235148 - RNA, 19 nt, Artificial Sequence
  Description of Artificial Sequence: Synthetic oligonucleotide
ccaggcgucgcucggcuca

SEQ ID NO: 235149 - RNA, 19 nt, Artificial Sequence
  Description of Artificial Sequence: Synthetic oligonucleotide
gugccggggagacuucccu

SEQ ID NO: 235150 - RNA, 19 nt, Artificial Sequence
  Description of Artificial Sequence: Synthetic oligonucleotide
cccuuccguuccgagaaug

SEQ ID NO: 235151 - RNA, 19 nt, Artificial Sequence
  Description of Artificial Sequence: Synthetic oligonucleotide
gccaguaucuagggaugga

SEQ ID NO: 235152 - RNA, 19 nt, Artificial Sequence
  Description of Artificial Sequence: Synthetic oligonucleotide
ccgagaaugcaggaaauau

SEQ ID NO: 235153 - RNA, 19 nt, Artificial Sequence
  Description of Artificial Sequence: Synthetic oligonucleotide
acccggaaguaggcccaca

SEQ ID NO: 235154 - RNA, 19 nt, Artificial Sequence
  Description of Artificial Sequence: Synthetic oligonucleotide
acaggacguuguacauuuu

SEQ ID NO: 235155 - RNA, 19 nt, Artificial Sequence
  Description of Artificial Sequence: Synthetic oligonucleotide
ggcguugcccugcuucagu

SEQ ID NO: 235156 - RNA, 19 nt, Artificial Sequence
  Description of Artificial Sequence: Synthetic oligonucleotide
gcgggucaagccccugguc

SEQ ID NO: 235157 - RNA, 19 nt, Artificial Sequence
  Description of Artificial Sequence: Synthetic oligonucleotide
gucgaaccagugagucucu

SEQ ID NO: 235158 - RNA, 19 nt, Artificial Sequence
  Description of Artificial Sequence: Synthetic oligonucleotide
cccaaacgcugugaugaga

SEQ ID NO: 235159 - RNA, 19 nt, Artificial Sequence
  Description of Artificial Sequence: Synthetic oligonucleotide
ccguuccgagaaugcagga

SEQ ID NO: 235160 - RNA, 19 nt, Artificial Sequence
  Description of Artificial Sequence: Synthetic oligonucleotide
gucgcucggcucacuauuu

SEQ ID NO: 235161 - RNA, 19 nt, Artificial Sequence
  Description of Artificial Sequence: Synthetic oligonucleotide
cguuccgagaaugcaggaa

SEQ ID NO: 235162 - RNA, 19 nt, Artificial Sequence
  Description of Artificial Sequence: Synthetic oligonucleotide
guguccggguagauugcuu

SEQ ID NO: 235163 - RNA, 19 nt, Artificial Sequence
  Description of Artificial Sequence: Synthetic oligonucleotide
cgaauaccagccagucaau

SEQ ID NO: 235164 - RNA, 19 nt, Artificial Sequence
  Description of Artificial Sequence: Synthetic oligonucleotide
cgucgcucggcucacuauu

SEQ ID NO: 235165 - RNA, 19 nt, Artificial Sequence
  Description of Artificial Sequence: Synthetic oligonucleotide
ccggggcaucagaggugau

SEQ ID NO: 235166 - RNA, 19 nt, Artificial Sequence
  Description of Artificial Sequence: Synthetic oligonucleotide
uuaagugacagcaagcagg

SEQ ID NO: 235167 - RNA, 19 nt, Artificial Sequence
  Description of Artificial Sequence: Synthetic oligonucleotide
cuuccaaugauauauauag

SEQ ID NO: 235168 - RNA, 19 nt, Artificial Sequence
  Description of Artificial Sequence: Synthetic oligonucleotide
agcaauaacggcaagaaac

SEQ ID NO: 235169 - RNA, 19 nt, Artificial Sequence
  Description of Artificial Sequence: Synthetic oligonucleotide
agaaucaggcugcagauac

SEQ ID NO: 235170 - RNA, 19 nt, Artificial Sequence
  Description of Artificial Sequence: Synthetic oligonucleotide
cauaacugggaaaagggcg

SEQ ID NO: 235171 - RNA, 19 nt, Artificial Sequence
  Description of Artificial Sequence: Synthetic oligonucleotide
aaagacguuauccauguau

SEQ ID NO: 235172 - RNA, 19 nt, Artificial Sequence
  Description of Artificial Sequence: Synthetic oligonucleotide
aguguuuaacagcacaggg

SEQ ID NO: 235173 - RNA, 19 nt, Artificial Sequence
  Description of Artificial Sequence: Synthetic oligonucleotide
uugaauagcuuccagcccc

SEQ ID NO: 235174 - RNA, 19 nt, Artificial Sequence
  Description of Artificial Sequence: Synthetic oligonucleotide
aagacgguaccacucgagc

SEQ ID NO: 235175 - RNA, 19 nt, Artificial Sequence
  Description of Artificial Sequence: Synthetic oligonucleotide
uuuccgcacacucagauga

SEQ ID NO: 235176 - RNA, 19 nt, Artificial Sequence
  Description of Artificial Sequence: Synthetic oligonucleotide
uguaagacgguaccacucg

SEQ ID NO: 235177 - RNA, 19 nt, Artificial Sequence
  Description of Artificial Sequence: Synthetic oligonucleotide
aaucaggcugcagauacgc

SEQ ID NO: 235178 - RNA, 19 nt, Artificial Sequence
  Description of Artificial Sequence: Synthetic oligonucleotide
aaccuguacagcaaagugc

SEQ ID NO: 235179 - RNA, 19 nt, Artificial Sequence
  Description of Artificial Sequence: Synthetic oligonucleotide
acggacucgaucaugaugc

SEQ ID NO: 235180 - RNA, 19 nt, Artificial Sequence
  Description of Artificial Sequence: Synthetic oligonucleotide
cauacacuccauaagcucc

SEQ ID NO: 235181 - RNA, 19 nt, Artificial Sequence
  Description of Artificial Sequence: Synthetic oligonucleotide
uguagucuaagugaggccc

SEQ ID NO: 235182 - RNA, 19 nt, Artificial Sequence
  Description of Artificial Sequence: Synthetic oligonucleotide
ugaaaacuggcccaaggca

SEQ ID NO: 235183 - RNA, 19 nt, Artificial Sequence
  Description of Artificial Sequence: Synthetic oligonucleotide
uuauguagcgagcagcaga

SEQ ID NO: 235184 - RNA, 19 nt, Artificial Sequence
  Description of Artificial Sequence: Synthetic oligonucleotide
auaacggcaagaaacuggc

SEQ ID NO: 235185 - RNA, 19 nt, Artificial Sequence
  Description of Artificial Sequence: Synthetic oligonucleotide
auugcggacaaccugugag

SEQ ID NO: 235186 - RNA, 19 nt, Artificial Sequence
  Description of Artificial Sequence: Synthetic oligonucleotide
uguacagcaaagugcuugg

SEQ ID NO: 235187 - RNA, 19 nt, Artificial Sequence
  Description of Artificial Sequence: Synthetic oligonucleotide
acugccugcauguaagacg

SEQ ID NO: 235188 - RNA, 19 nt, Artificial Sequence
  Description of Artificial Sequence: Synthetic oligonucleotide
guuaucacggacucgauca

SEQ ID NO: 235189 - RNA, 19 nt, Artificial Sequence
  Description of Artificial Sequence: Synthetic oligonucleotide
ucuauguggcugcauaacc

SEQ ID NO: 235190 - RNA, 19 nt, Artificial Sequence
  Description of Artificial Sequence: Synthetic oligonucleotide
auaagcuccaugauggugg

SEQ ID NO: 235191 - RNA, 19 nt, Artificial Sequence
  Description of Artificial Sequence: Synthetic oligonucleotide
ugacuuaagauaggcaagg

SEQ ID NO: 235192 - RNA, 19 nt, Artificial Sequence
  Description of Artificial Sequence: Synthetic oligonucleotide
aguacuucaucaaagacgu

SEQ ID NO: 235193 - RNA, 19 nt, Artificial Sequence
  Description of Artificial Sequence: Synthetic oligonucleotide
ugcucuaguaacauggcgu

SEQ ID NO: 235194 - RNA, 19 nt, Artificial Sequence
  Description of Artificial Sequence: Synthetic oligonucleotide
gagcgugguaauuugaggc

SEQ ID NO: 235195 - RNA, 19 nt, Artificial Sequence
  Description of Artificial Sequence: Synthetic oligonucleotide
ggaaggguuacucugacag

SEQ ID NO: 235196 - RNA, 19 nt, Artificial Sequence
  Description of Artificial Sequence: Synthetic oligonucleotide
ucaaagacguuauccaugu

SEQ ID NO: 235197 - RNA, 19 nt, Artificial Sequence
  Description of Artificial Sequence: Synthetic oligonucleotide
ucugccaguguucccaccg

SEQ ID NO: 235198 - RNA, 19 nt, Artificial Sequence
  Description of Artificial Sequence: Synthetic oligonucleotide
aguaaggccuuacuuugac

SEQ ID NO: 235199 - RNA, 19 nt, Artificial Sequence
  Description of Artificial Sequence: Synthetic oligonucleotide
accuauagugauccacucc

SEQ ID NO: 235200 - RNA, 19 nt, Artificial Sequence
  Description of Artificial Sequence: Synthetic oligonucleotide
agacgguaccacucgagcc

SEQ ID NO: 235201 - RNA, 19 nt, Artificial Sequence
  Description of Artificial Sequence: Synthetic oligonucleotide
aucuuacacagcaauaacg

SEQ ID NO: 235202 - RNA, 19 nt, Artificial Sequence
  Description of Artificial Sequence: Synthetic oligonucleotide
cagcagacgggcaagagcc

SEQ ID NO: 235203 - RNA, 19 nt, Artificial Sequence
  Description of Artificial Sequence: Synthetic oligonucleotide
gauguuaucacggacucga

SEQ ID NO: 235204 - RNA, 19 nt, Artificial Sequence
  Description of Artificial Sequence: Synthetic oligonucleotide
uugaguacuucaucaaaga

SEQ ID NO: 235205 - RNA, 19 nt, Artificial Sequence
  Description of Artificial Sequence: Synthetic oligonucleotide
cuauguggcugcauaaccc

SEQ ID NO: 235206 - RNA, 19 nt, Artificial Sequence
  Description of Artificial Sequence: Synthetic oligonucleotide
ugagcgugguaauuugagg

SEQ ID NO: 235207 - RNA, 19 nt, Artificial Sequence
  Description of Artificial Sequence: Synthetic oligonucleotide
gguaauuugaggcagguaa

SEQ ID NO: 235208 - RNA, 19 nt, Artificial Sequence
  Description of Artificial Sequence: Synthetic oligonucleotide
aagacguuauccauguaug

SEQ ID NO: 235209 - RNA, 19 nt, Artificial Sequence
  Description of Artificial Sequence: Synthetic oligonucleotide
ucaucuuacacagcaauaa

SEQ ID NO: 235210 - RNA, 19 nt, Artificial Sequence
  Description of Artificial Sequence: Synthetic oligonucleotide
agacguuauccauguaugg

SEQ ID NO: 235211 - RNA, 19 nt, Artificial Sequence
  Description of Artificial Sequence: Synthetic oligonucleotide
auaagcuccggaauguagg

SEQ ID NO: 235212 - RNA, 19 nt, Artificial Sequence
  Description of Artificial Sequence: Synthetic oligonucleotide
cuuacacagcaauaacggc

SEQ ID NO: 235213 - RNA, 19 nt, Artificial Sequence
  Description of Artificial Sequence: Synthetic oligonucleotide
cauguagcaggguagccag

SEQ ID NO: 235214 - RNA, 19 nt, Artificial Sequence
  Description of Artificial Sequence: Synthetic oligonucleotide
guaacauggcgucauacuc

SEQ ID NO: 235215 - RNA, 19 nt, Artificial Sequence
  Description of Artificial Sequence: Synthetic oligonucleotide
ucaugagccgcuuuccgca

SEQ ID NO: 235216 - RNA, 19 nt, Artificial Sequence
  Description of Artificial Sequence: Synthetic oligonucleotide
gaccuaguagcuuagggaa

SEQ ID NO: 235217 - RNA, 19 nt, Artificial Sequence
  Description of Artificial Sequence: Synthetic oligonucleotide
auacugaggcacaaugccc

SEQ ID NO: 235218 - RNA, 19 nt, Artificial Sequence
  Description of Artificial Sequence: Synthetic oligonucleotide
uuuacgcugguacgggagc

SEQ ID NO: 235219 - RNA, 19 nt, Artificial Sequence
  Description of Artificial Sequence: Synthetic oligonucleotide
uuacagugugaugucacag

SEQ ID NO: 235220 - RNA, 19 nt, Artificial Sequence
  Description of Artificial Sequence: Synthetic oligonucleotide
guacccugagaucucagag

SEQ ID NO: 235221 - RNA, 19 nt, Artificial Sequence
  Description of Artificial Sequence: Synthetic oligonucleotide
cugagcuuuaucagcagac

SEQ ID NO: 235222 - RNA, 19 nt, Artificial Sequence
  Description of Artificial Sequence: Synthetic oligonucleotide
aaggagcgaaggccugucc

SEQ ID NO: 235223 - RNA, 19 nt, Artificial Sequence
  Description of Artificial Sequence: Synthetic oligonucleotide
aaguugaagaggcaaccua

SEQ ID NO: 235224 - RNA, 19 nt, Artificial Sequence
  Description of Artificial Sequence: Synthetic oligonucleotide
gaacagccgagacacaaac

SEQ ID NO: 235225 - RNA, 19 nt, Artificial Sequence
  Description of Artificial Sequence: Synthetic oligonucleotide
cuugaauagcuuccagccc

SEQ ID NO: 235226 - RNA, 19 nt, Artificial Sequence
  Description of Artificial Sequence: Synthetic oligonucleotide
aaaagggcgugcagcaagg

SEQ ID NO: 235227 - RNA, 19 nt, Artificial Sequence
  Description of Artificial Sequence: Synthetic oligonucleotide
acaggccuuauguagcgag

SEQ ID NO: 235228 - RNA, 19 nt, Artificial Sequence
  Description of Artificial Sequence: Synthetic oligonucleotide
agaggcaaccuauagugau

SEQ ID NO: 235229 - RNA, 19 nt, Artificial Sequence
  Description of Artificial Sequence: Synthetic oligonucleotide
uggaacgcaaugacagcag

SEQ ID NO: 235230 - RNA, 19 nt, Artificial Sequence
  Description of Artificial Sequence: Synthetic oligonucleotide
gcugauauggggcuguaag

SEQ ID NO: 235231 - RNA, 19 nt, Artificial Sequence
  Description of Artificial Sequence: Synthetic oligonucleotide
ucagcgugcuguuuggcca

SEQ ID NO: 235232 - RNA, 19 nt, Artificial Sequence
  Description of Artificial Sequence: Synthetic oligonucleotide
gaauccccggauaagcucc

SEQ ID NO: 235233 - RNA, 19 nt, Artificial Sequence
  Description of Artificial Sequence: Synthetic oligonucleotide
uccagcgugcucuaguaac

SEQ ID NO: 235234 - RNA, 19 nt, Artificial Sequence
  Description of Artificial Sequence: Synthetic oligonucleotide
acguuauccauguauggaa

SEQ ID NO: 235235 - RNA, 19 nt, Artificial Sequence
  Description of Artificial Sequence: Synthetic oligonucleotide
cuuuacgcugguacgggag

SEQ ID NO: 235236 - RNA, 19 nt, Artificial Sequence
  Description of Artificial Sequence: Synthetic oligonucleotide
uguuaucacggacucgauc

SEQ ID NO: 235237 - RNA, 19 nt, Artificial Sequence
  Description of Artificial Sequence: Synthetic oligonucleotide
cugauuccaucauacugag

SEQ ID NO: 235238 - RNA, 19 nt, Artificial Sequence
  Description of Artificial Sequence: Synthetic oligonucleotide
aggaucaucuauguggcug

SEQ ID NO: 235239 - RNA, 19 nt, Artificial Sequence
  Description of Artificial Sequence: Synthetic oligonucleotide
acagauguuaucacggacu

SEQ ID NO: 235240 - RNA, 19 nt, Artificial Sequence
  Description of Artificial Sequence: Synthetic oligonucleotide
auagugauccacuccucca

SEQ ID NO: 235241 - RNA, 19 nt, Artificial Sequence
  Description of Artificial Sequence: Synthetic oligonucleotide
aacgcaaugacagcagcau

SEQ ID NO: 235242 - RNA, 19 nt, Artificial Sequence
  Description of Artificial Sequence: Synthetic oligonucleotide
uguguguucccuguaggca

SEQ ID NO: 235243 - RNA, 19 nt, Artificial Sequence
  Description of Artificial Sequence: Synthetic oligonucleotide
aucaaacagaaggaaggag

SEQ ID NO: 235244 - RNA, 19 nt, Artificial Sequence
  Description of Artificial Sequence: Synthetic oligonucleotide
gcaaaaggagaccuaguag

SEQ ID NO: 235245 - RNA, 19 nt, Artificial Sequence
  Description of Artificial Sequence: Synthetic oligonucleotide
ugugaggggucacccaggc

SEQ ID NO: 235246 - RNA, 19 nt, Artificial Sequence
  Description of Artificial Sequence: Synthetic oligonucleotide
uacgcaggagcuccggagc

SEQ ID NO: 235247 - RNA, 19 nt, Artificial Sequence
  Description of Artificial Sequence: Synthetic oligonucleotide
caucuuacacagcaauaac

SEQ ID NO: 235248 - RNA, 19 nt, Artificial Sequence
  Description of Artificial Sequence: Synthetic oligonucleotide
cugcauguaagacgguacc

SEQ ID NO: 235249 - RNA, 19 nt, Artificial Sequence
  Description of Artificial Sequence: Synthetic oligonucleotide
ucgaucaugaugcucccuu

SEQ ID NO: 235250 - RNA, 19 nt, Artificial Sequence
  Description of Artificial Sequence: Synthetic oligonucleotide
uguacccugagaucucaga

SEQ ID NO: 235251 - RNA, 19 nt, Artificial Sequence
  Description of Artificial Sequence: Synthetic oligonucleotide
ccuuacuuugacuuugacc

SEQ ID NO: 235252 - RNA, 19 nt, Artificial Sequence
  Description of Artificial Sequence: Synthetic oligonucleotide
aguagcuuagggaaguggu

SEQ ID NO: 235253 - RNA, 19 nt, Artificial Sequence
  Description of Artificial Sequence: Synthetic oligonucleotide
gugcucuaguaacauggcg

SEQ ID NO: 235254 - RNA, 19 nt, Artificial Sequence
  Description of Artificial Sequence: Synthetic oligonucleotide
accuguacagcaaagugcu

SEQ ID NO: 235255 - RNA, 19 nt, Artificial Sequence
  Description of Artificial Sequence: Synthetic oligonucleotide
gcuccuauggcgcucacag

SEQ ID NO: 235256 - RNA, 19 nt, Artificial Sequence
  Description of Artificial Sequence: Synthetic oligonucleotide
uacucugacaggccuuaug

SEQ ID NO: 235257 - RNA, 19 nt, Artificial Sequence
  Description of Artificial Sequence: Synthetic oligonucleotide
ucucccauuaacccugaua

SEQ ID NO: 235258 - RNA, 19 nt, Artificial Sequence
  Description of Artificial Sequence: Synthetic oligonucleotide
auguaagacgguaccacuc

SEQ ID NO: 235259 - RNA, 19 nt, Artificial Sequence
  Description of Artificial Sequence: Synthetic oligonucleotide
gacgguaccacucgagcca

SEQ ID NO: 235260 - RNA, 19 nt, Artificial Sequence
  Description of Artificial Sequence: Synthetic oligonucleotide
ugguacgggagcucgcucc

SEQ ID NO: 235261 - RNA, 19 nt, Artificial Sequence
  Description of Artificial Sequence: Synthetic oligonucleotide
cacacucagaugaggacac

SEQ ID NO: 235262 - RNA, 19 nt, Artificial Sequence
  Description of Artificial Sequence: Synthetic oligonucleotide
uugucagcgugcuguuugg

SEQ ID NO: 235263 - RNA, 19 nt, Artificial Sequence
  Description of Artificial Sequence: Synthetic oligonucleotide
cacgaucuguagcaguggg

SEQ ID NO: 235264 - RNA, 19 nt, Artificial Sequence
  Description of Artificial Sequence: Synthetic oligonucleotide
agagacaccccucguuaag

SEQ ID NO: 235265 - RNA, 19 nt, Artificial Sequence
  Description of Artificial Sequence: Synthetic oligonucleotide
ugcucugcaaguagaccca

SEQ ID NO: 235266 - RNA, 19 nt, Artificial Sequence
  Description of Artificial Sequence: Synthetic oligonucleotide
gccauaacugggaaaaggg

SEQ ID NO: 235267 - RNA, 19 nt, Artificial Sequence
  Description of Artificial Sequence: Synthetic oligonucleotide
agcgugguaauuugaggca

SEQ ID NO: 235268 - RNA, 19 nt, Artificial Sequence
  Description of Artificial Sequence: Synthetic oligonucleotide
auaacugggaaaagggcgu

SEQ ID NO: 235269 - RNA, 19 nt, Artificial Sequence
  Description of Artificial Sequence: Synthetic oligonucleotide
ccauuaacccugauaaggc

SEQ ID NO: 235270 - RNA, 19 nt, Artificial Sequence
  Description of Artificial Sequence: Synthetic oligonucleotide
ugagcuuuaucagcagaca

SEQ ID NO: 235271 - RNA, 19 nt, Artificial Sequence
  Description of Artificial Sequence: Synthetic oligonucleotide
aggauugacuuccaaugau

SEQ ID NO: 235272 - RNA, 19 nt, Artificial Sequence
  Description of Artificial Sequence: Synthetic oligonucleotide
caccguacagcucuguuuc

SEQ ID NO: 235273 - RNA, 19 nt, Artificial Sequence
  Description of Artificial Sequence: Synthetic oligonucleotide
auauagucuuuggugaggu

SEQ ID NO: 235274 - RNA, 19 nt, Artificial Sequence
  Description of Artificial Sequence: Synthetic oligonucleotide
ggagccuguagucuaagug

SEQ ID NO: 235275 - RNA, 19 nt, Artificial Sequence
  Description of Artificial Sequence: Synthetic oligonucleotide
ucauggacucucccauugc

SEQ ID NO: 235276 - RNA, 19 nt, Artificial Sequence
  Description of Artificial Sequence: Synthetic oligonucleotide
ugcuuuacgcugguacggg

SEQ ID NO: 235277 - RNA, 19 nt, Artificial Sequence
  Description of Artificial Sequence: Synthetic oligonucleotide
cucauggacucucccauug

SEQ ID NO: 235278 - RNA, 19 nt, Artificial Sequence
  Description of Artificial Sequence: Synthetic oligonucleotide
gacguuauccauguaugga

SEQ ID NO: 235279 - RNA, 19 nt, Artificial Sequence
  Description of Artificial Sequence: Synthetic oligonucleotide
caggaacccugcuuuacgc

SEQ ID NO: 235280 - RNA, 19 nt, Artificial Sequence
  Description of Artificial Sequence: Synthetic oligonucleotide
cagauguuaucacggacuc

SEQ ID NO: 235281 - RNA, 19 nt, Artificial Sequence
  Description of Artificial Sequence: Synthetic oligonucleotide
ggggcuguaaguuaucuga

SEQ ID NO: 235282 - RNA, 19 nt, Artificial Sequence
  Description of Artificial Sequence: Synthetic oligonucleotide
cagccgagacacaaacugg

SEQ ID NO: 235283 - RNA, 19 nt, Artificial Sequence
  Description of Artificial Sequence: Synthetic oligonucleotide
uucccuguaggcacugacu

SEQ ID NO: 235284 - RNA, 19 nt, Artificial Sequence
  Description of Artificial Sequence: Synthetic oligonucleotide
acaccccucguuaagugac

SEQ ID NO: 235285 - RNA, 19 nt, Artificial Sequence
  Description of Artificial Sequence: Synthetic oligonucleotide
aauggcuccuauggcgcuc

SEQ ID NO: 235286 - RNA, 19 nt, Artificial Sequence
  Description of Artificial Sequence: Synthetic oligonucleotide
gaacccugcuuuacgcugg

SEQ ID NO: 235287 - RNA, 19 nt, Artificial Sequence
  Description of Artificial Sequence: Synthetic oligonucleotide
agucaacaggaauccccgg

SEQ ID NO: 235288 - RNA, 19 nt, Artificial Sequence
  Description of Artificial Sequence: Synthetic oligonucleotide
acuccauaagcuccggaau

SEQ ID NO: 235289 - RNA, 19 nt, Artificial Sequence
  Description of Artificial Sequence: Synthetic oligonucleotide
agggcgugcagcaagggag

SEQ ID NO: 235290 - RNA, 19 nt, Artificial Sequence
  Description of Artificial Sequence: Synthetic oligonucleotide
ugcauguaagacgguacca

SEQ ID NO: 235291 - RNA, 19 nt, Artificial Sequence
  Description of Artificial Sequence: Synthetic oligonucleotide
gcgugcucuaguaacaugg

SEQ ID NO: 235292 - RNA, 19 nt, Artificial Sequence
  Description of Artificial Sequence: Synthetic oligonucleotide
gcugcauaaccccagcccc

SEQ ID NO: 235293 - RNA, 19 nt, Artificial Sequence
  Description of Artificial Sequence: Synthetic oligonucleotide
augagcgugguaauuugag

SEQ ID NO: 235294 - RNA, 19 nt, Artificial Sequence
  Description of Artificial Sequence: Synthetic oligonucleotide
aggcacaaugcccucggug

SEQ ID NO: 235295 - RNA, 19 nt, Artificial Sequence
  Description of Artificial Sequence: Synthetic oligonucleotide
gauauggggcuguaaguua

SEQ ID NO: 235296 - RNA, 19 nt, Artificial Sequence
  Description of Artificial Sequence: Synthetic oligonucleotide
uggcaaagaaaggagcgaa

SEQ ID NO: 235297 - RNA, 19 nt, Artificial Sequence
  Description of Artificial Sequence: Synthetic oligonucleotide
ugcucgagccagcacuccc

SEQ ID NO: 235298 - RNA, 19 nt, Artificial Sequence
  Description of Artificial Sequence: Synthetic oligonucleotide
gaaucaggcugcagauacg

SEQ ID NO: 235299 - RNA, 19 nt, Artificial Sequence
  Description of Artificial Sequence: Synthetic oligonucleotide
acggcaagaaacuggcaaa

SEQ ID NO: 235300 - RNA, 19 nt, Artificial Sequence
  Description of Artificial Sequence: Synthetic oligonucleotide
uccucgguguucugacagg

SEQ ID NO: 235301 - RNA, 19 nt, Artificial Sequence
  Description of Artificial Sequence: Synthetic oligonucleotide
agcuuuaucagcagacaga

SEQ ID NO: 235302 - RNA, 19 nt, Artificial Sequence
  Description of Artificial Sequence: Synthetic oligonucleotide
aaagggcgugcagcaaggg

SEQ ID NO: 235303 - RNA, 19 nt, Artificial Sequence
  Description of Artificial Sequence: Synthetic oligonucleotide
auuaccaccgggcguuccu

SEQ ID NO: 235304 - RNA, 19 nt, Artificial Sequence
  Description of Artificial Sequence: Synthetic oligonucleotide
ccuguagucuaagugaggc

SEQ ID NO: 235305 - RNA, 19 nt, Artificial Sequence
  Description of Artificial Sequence: Synthetic oligonucleotide
accacucgagccaaggcag

SEQ ID NO: 235306 - RNA, 19 nt, Artificial Sequence
  Description of Artificial Sequence: Synthetic oligonucleotide
ugacuuccaaugauauaua

SEQ ID NO: 235307 - RNA, 19 nt, Artificial Sequence
  Description of Artificial Sequence: Synthetic oligonucleotide
aggagcgaaggccuguccu

SEQ ID NO: 235308 - RNA, 19 nt, Artificial Sequence
  Description of Artificial Sequence: Synthetic oligonucleotide
cacggacucgaucaugaug

SEQ ID NO: 235309 - RNA, 19 nt, Artificial Sequence
  Description of Artificial Sequence: Synthetic oligonucleotide
uccgcacacucagaugagg

SEQ ID NO: 235310 - RNA, 19 nt, Artificial Sequence
  Description of Artificial Sequence: Synthetic oligonucleotide
uggggcuguaaguuaucug

SEQ ID NO: 235311 - RNA, 19 nt, Artificial Sequence
  Description of Artificial Sequence: Synthetic oligonucleotide
ccauaacugggaaaagggc

SEQ ID NO: 235312 - RNA, 19 nt, Artificial Sequence
  Description of Artificial Sequence: Synthetic oligonucleotide
agacaccccucguuaagug

SEQ ID NO: 235313 - RNA, 19 nt, Artificial Sequence
  Description of Artificial Sequence: Synthetic oligonucleotide
agauguuaucacggacucg

SEQ ID NO: 235314 - RNA, 19 nt, Artificial Sequence
  Description of Artificial Sequence: Synthetic oligonucleotide
agcauacacuccauaagcu

SEQ ID NO: 235315 - RNA, 19 nt, Artificial Sequence
  Description of Artificial Sequence: Synthetic oligonucleotide
ugcuccgcaccucuggguc

SEQ ID NO: 235316 - RNA, 19 nt, Artificial Sequence
  Description of Artificial Sequence: Synthetic oligonucleotide
auugacuuccaaugauaua

SEQ ID NO: 235317 - RNA, 19 nt, Artificial Sequence
  Description of Artificial Sequence: Synthetic oligonucleotide
cuuuccgcacacucagaug

SEQ ID NO: 235318 - RNA, 19 nt, Artificial Sequence
  Description of Artificial Sequence: Synthetic oligonucleotide
agccuguagucuaagugag

SEQ ID NO: 235319 - RNA, 19 nt, Artificial Sequence
  Description of Artificial Sequence: Synthetic oligonucleotide
ucccgggcaguguuuaaca

SEQ ID NO: 235320 - RNA, 19 nt, Artificial Sequence
  Description of Artificial Sequence: Synthetic oligonucleotide
auugcucgagccagcacuc

SEQ ID NO: 235321 - RNA, 19 nt, Artificial Sequence
  Description of Artificial Sequence: Synthetic oligonucleotide
uuaucacggacucgaucau

SEQ ID NO: 235322 - RNA, 19 nt, Artificial Sequence
  Description of Artificial Sequence: Synthetic oligonucleotide
ggagcugauuccaucauac

SEQ ID NO: 235323 - RNA, 19 nt, Artificial Sequence
  Description of Artificial Sequence: Synthetic oligonucleotide
ugccauuaccaccgggcgu

SEQ ID NO: 235324 - RNA, 19 nt, Artificial Sequence
  Description of Artificial Sequence: Synthetic oligonucleotide
aucacggacucgaucauga

SEQ ID NO: 235325 - RNA, 19 nt, Artificial Sequence
  Description of Artificial Sequence: Synthetic oligonucleotide
caguguucccaccgcaaag

SEQ ID NO: 235326 - RNA, 19 nt, Artificial Sequence
  Description of Artificial Sequence: Synthetic oligonucleotide
aggaacccugcuuuacgcu

SEQ ID NO: 235327 - RNA, 19 nt, Artificial Sequence
  Description of Artificial Sequence: Synthetic oligonucleotide
agucuaagugaggcccagc

SEQ ID NO: 235328 - RNA, 19 nt, Artificial Sequence
  Description of Artificial Sequence: Synthetic oligonucleotide
cuauagugauccacuccuc

SEQ ID NO: 235329 - RNA, 19 nt, Artificial Sequence
  Description of Artificial Sequence: Synthetic oligonucleotide
uaucacggacucgaucaug

SEQ ID NO: 235330 - RNA, 19 nt, Artificial Sequence
  Description of Artificial Sequence: Synthetic oligonucleotide
gagcaugcugcagagcuca

SEQ ID NO: 235331 - RNA, 19 nt, Artificial Sequence
  Description of Artificial Sequence: Synthetic oligonucleotide
gaacgcaaugacagcagca

SEQ ID NO: 235332 - RNA, 19 nt, Artificial Sequence
  Description of Artificial Sequence: Synthetic oligonucleotide
auggacucucccauugcuc

SEQ ID NO: 235333 - RNA, 19 nt, Artificial Sequence
  Description of Artificial Sequence: Synthetic oligonucleotide
gauugacuuccaaugauau

SEQ ID NO: 235334 - RNA, 19 nt, Artificial Sequence
  Description of Artificial Sequence: Synthetic oligonucleotide
gacaccccucguuaaguga

SEQ ID NO: 235335 - RNA, 19 nt, Artificial Sequence
  Description of Artificial Sequence: Synthetic oligonucleotide
ugguccgggguuugcuggg

SEQ ID NO: 235336 - RNA, 19 nt, Artificial Sequence
  Description of Artificial Sequence: Synthetic oligonucleotide
cagcauugcggacaaccug

SEQ ID NO: 235337 - RNA, 19 nt, Artificial Sequence
  Description of Artificial Sequence: Synthetic oligonucleotide
caggccuuauguagcgagc

SEQ ID NO: 235338 - RNA, 19 nt, Artificial Sequence
  Description of Artificial Sequence: Synthetic oligonucleotide
cuuauguagcgagcagcag

SEQ ID NO: 235339 - RNA, 19 nt, Artificial Sequence
  Description of Artificial Sequence: Synthetic oligonucleotide
ggauccuguugucuggcag

SEQ ID NO: 235340 - RNA, 19 nt, Artificial Sequence
  Description of Artificial Sequence: Synthetic oligonucleotide
cacuccauaagcuccggaa

SEQ ID NO: 235341 - RNA, 19 nt, Artificial Sequence
  Description of Artificial Sequence: Synthetic oligonucleotide
aggccuuacuuugacuuug

SEQ ID NO: 235342 - RNA, 19 nt, Artificial Sequence
  Description of Artificial Sequence: Synthetic oligonucleotide
gacagcaagcaggauugac

SEQ ID NO: 235343 - RNA, 19 nt, Artificial Sequence
  Description of Artificial Sequence: Synthetic oligonucleotide
agggcauguagcaggguag

SEQ ID NO: 235344 - RNA, 19 nt, Artificial Sequence
  Description of Artificial Sequence: Synthetic oligonucleotide
gcauucauagagaucuccc

SEQ ID NO: 235345 - RNA, 19 nt, Artificial Sequence
  Description of Artificial Sequence: Synthetic oligonucleotide
acacgaucuguagcagugg

SEQ ID NO: 235346 - RNA, 19 nt, Artificial Sequence
  Description of Artificial Sequence: Synthetic oligonucleotide
gcauacacuccauaagcuc

SEQ ID NO: 235347 - RNA, 19 nt, Artificial Sequence
  Description of Artificial Sequence: Synthetic oligonucleotide
uguacgugcagcgccgcaa

SEQ ID NO: 235348 - RNA, 19 nt, Artificial Sequence
  Description of Artificial Sequence: Synthetic oligonucleotide
guacgugcagcgccgcaag

SEQ ID NO: 235349 - RNA, 19 nt, Artificial Sequence
  Description of Artificial Sequence: Synthetic oligonucleotide
aacagccgagacacaaacu

SEQ ID NO: 235350 - RNA, 19 nt, Artificial Sequence
  Description of Artificial Sequence: Synthetic oligonucleotide
acgaucuguagcagugggg

SEQ ID NO: 235351 - RNA, 19 nt, Artificial Sequence
  Description of Artificial Sequence: Synthetic oligonucleotide
ggaacgcaaugacagcagc

SEQ ID NO: 235352 - RNA, 19 nt, Artificial Sequence
  Description of Artificial Sequence: Synthetic oligonucleotide
gacucucccauugcucgag

SEQ ID NO: 235353 - RNA, 19 nt, Artificial Sequence
  Description of Artificial Sequence: Synthetic oligonucleotide
ugggcugacugguagucuu

SEQ ID NO: 235354 - RNA, 19 nt, Artificial Sequence
  Description of Artificial Sequence: Synthetic oligonucleotide
caaccuauagugauccacu

SEQ ID NO: 235355 - RNA, 19 nt, Artificial Sequence
  Description of Artificial Sequence: Synthetic oligonucleotide
uauggggcuguaaguuauc

SEQ ID NO: 235356 - RNA, 19 nt, Artificial Sequence
  Description of Artificial Sequence: Synthetic oligonucleotide
auauggggcuguaaguuau

SEQ ID NO: 235357 - RNA, 19 nt, Artificial Sequence
  Description of Artificial Sequence: Synthetic oligonucleotide
gcucggaaggguuacucug

SEQ ID NO: 235358 - RNA, 19 nt, Artificial Sequence
  Description of Artificial Sequence: Synthetic oligonucleotide
aaguugucagcgugcuguu

SEQ ID NO: 235359 - RNA, 19 nt, Artificial Sequence
  Description of Artificial Sequence: Synthetic oligonucleotide
ggcaaaaggagaccuagua

SEQ ID NO: 235360 - RNA, 19 nt, Artificial Sequence
  Description of Artificial Sequence: Synthetic oligonucleotide
cucaucgaagaaggcauuc

SEQ ID NO: 235361 - RNA, 19 nt, Artificial Sequence
  Description of Artificial Sequence: Synthetic oligonucleotide
cucugcaaguagacccagc

SEQ ID NO: 235362 - RNA, 19 nt, Artificial Sequence
  Description of Artificial Sequence: Synthetic oligonucleotide
caugagcgugguaauuuga

SEQ ID NO: 235363 - RNA, 19 nt, Artificial Sequence
  Description of Artificial Sequence: Synthetic oligonucleotide
acgagguccucuucuuccu

SEQ ID NO: 235364 - RNA, 19 nt, Artificial Sequence
  Description of Artificial Sequence: Synthetic oligonucleotide
acaaccugugaggggucac

SEQ ID NO: 235365 - RNA, 19 nt, Artificial Sequence
  Description of Artificial Sequence: Synthetic oligonucleotide
gagcgaaggccuguccucc

SEQ ID NO: 235366 - RNA, 19 nt, Artificial Sequence
  Description of Artificial Sequence: Synthetic oligonucleotide
cacucagaugaggacacuc

SEQ ID NO: 235367 - RNA, 19 nt, Artificial Sequence
  Description of Artificial Sequence: Synthetic oligonucleotide
aggccuuauguagcgagca

SEQ ID NO: 235368 - RNA, 19 nt, Artificial Sequence
  Description of Artificial Sequence: Synthetic oligonucleotide
accuaguagcuuagggaag

SEQ ID NO: 235369 - RNA, 19 nt, Artificial Sequence
  Description of Artificial Sequence: Synthetic oligonucleotide
uuacgcugguacgggagcu

SEQ ID NO: 235370 - RNA, 19 nt, Artificial Sequence
  Description of Artificial Sequence: Synthetic oligonucleotide
ccugcauguaagacgguac

SEQ ID NO: 235371 - RNA, 19 nt, Artificial Sequence
  Description of Artificial Sequence: Synthetic oligonucleotide
guagcuuagggaagugguc

SEQ ID NO: 235372 - RNA, 19 nt, Artificial Sequence
  Description of Artificial Sequence: Synthetic oligonucleotide
cucggaaggguuacucuga

SEQ ID NO: 235373 - RNA, 19 nt, Artificial Sequence
  Description of Artificial Sequence: Synthetic oligonucleotide
uggagccuguagucuaagu

SEQ ID NO: 235374 - RNA, 19 nt, Artificial Sequence
  Description of Artificial Sequence: Synthetic oligonucleotide
gcaaccuauagugauccac

SEQ ID NO: 235375 - RNA, 19 nt, Artificial Sequence
  Description of Artificial Sequence: Synthetic oligonucleotide
cugaggcacaaugcccucg

SEQ ID NO: 235376 - RNA, 19 nt, Artificial Sequence
  Description of Artificial Sequence: Synthetic oligonucleotide
ccaaugauauauauagucu

SEQ ID NO: 235377 - RNA, 19 nt, Artificial Sequence
  Description of Artificial Sequence: Synthetic oligonucleotide
aggcgguucuucaguaagg

SEQ ID NO: 235378 - RNA, 19 nt, Artificial Sequence
  Description of Artificial Sequence: Synthetic oligonucleotide
agagcucacugaggcgccc

SEQ ID NO: 235379 - RNA, 19 nt, Artificial Sequence
  Description of Artificial Sequence: Synthetic oligonucleotide
aacccugcuuuacgcuggu

SEQ ID NO: 235380 - RNA, 19 nt, Artificial Sequence
  Description of Artificial Sequence: Synthetic oligonucleotide
cauuaacccugauaaggcu

SEQ ID NO: 235381 - RNA, 19 nt, Artificial Sequence
  Description of Artificial Sequence: Synthetic oligonucleotide
ggaauccccggauaagcuc

SEQ ID NO: 235382 - RNA, 19 nt, Artificial Sequence
  Description of Artificial Sequence: Synthetic oligonucleotide
gcaugagcgugguaauuug

SEQ ID NO: 235383 - RNA, 19 nt, Artificial Sequence
  Description of Artificial Sequence: Synthetic oligonucleotide
cauguaagacgguaccacu

SEQ ID NO: 235384 - RNA, 19 nt, Artificial Sequence
  Description of Artificial Sequence: Synthetic oligonucleotide
gcauguaagacgguaccac

SEQ ID NO: 235385 - RNA, 19 nt, Artificial Sequence
  Description of Artificial Sequence: Synthetic oligonucleotide
acgcugguacgggagcucg

SEQ ID NO: 235386 - RNA, 19 nt, Artificial Sequence
  Description of Artificial Sequence: Synthetic oligonucleotide
cucccuugccaggaggggc

SEQ ID NO: 235387 - RNA, 19 nt, Artificial Sequence
  Description of Artificial Sequence: Synthetic oligonucleotide
ccaggaacccugcuuuacg

SEQ ID NO: 235388 - RNA, 19 nt, Artificial Sequence
  Description of Artificial Sequence: Synthetic oligonucleotide
uggggacagcaaucuuugc

SEQ ID NO: 235389 - RNA, 19 nt, Artificial Sequence
  Description of Artificial Sequence: Synthetic oligonucleotide
ugcgccugggcugacuggu

SEQ ID NO: 235390 - RNA, 19 nt, Artificial Sequence
  Description of Artificial Sequence: Synthetic oligonucleotide
ggcaaagaaaggagcgaag

SEQ ID NO: 235391 - RNA, 19 nt, Artificial Sequence
  Description of Artificial Sequence: Synthetic oligonucleotide
cagcgugcuguuuggccag

SEQ ID NO: 235392 - RNA, 19 nt, Artificial Sequence
  Description of Artificial Sequence: Synthetic oligonucleotide
cuugagcaugcugcagagc

SEQ ID NO: 235393 - RNA, 19 nt, Artificial Sequence
  Description of Artificial Sequence: Synthetic oligonucleotide
uucccgggcaguguuuaac

SEQ ID NO: 235394 - RNA, 19 nt, Artificial Sequence
  Description of Artificial Sequence: Synthetic oligonucleotide
ccuuauguagcgagcagca

SEQ ID NO: 235395 - RNA, 19 nt, Artificial Sequence
  Description of Artificial Sequence: Synthetic oligonucleotide
agcagacgggcaagagccc

SEQ ID NO: 235396 - RNA, 19 nt, Artificial Sequence
  Description of Artificial Sequence: Synthetic oligonucleotide
cuguacccugagaucucag

SEQ ID NO: 235397 - RNA, 19 nt, Artificial Sequence
  Description of Artificial Sequence: Synthetic oligonucleotide
caugagccgcuuuccgcac

SEQ ID NO: 235398 - RNA, 19 nt, Artificial Sequence
  Description of Artificial Sequence: Synthetic oligonucleotide
auggcgcucacagccagcu

SEQ ID NO: 235399 - RNA, 19 nt, Artificial Sequence
  Description of Artificial Sequence: Synthetic oligonucleotide
ggcgguucuucaguaaggc

SEQ ID NO: 235400 - RNA, 19 nt, Artificial Sequence
  Description of Artificial Sequence: Synthetic oligonucleotide
ccuauagugauccacuccu

SEQ ID NO: 235401 - RNA, 19 nt, Artificial Sequence
  Description of Artificial Sequence: Synthetic oligonucleotide
acacuccauaagcuccgga

SEQ ID NO: 235402 - RNA, 19 nt, Artificial Sequence
  Description of Artificial Sequence: Synthetic oligonucleotide
ccuuuauuacagugugaug

SEQ ID NO: 235403 - RNA, 19 nt, Artificial Sequence
  Description of Artificial Sequence: Synthetic oligonucleotide
ccugauaaggcugcaaaca

SEQ ID NO: 235404 - RNA, 19 nt, Artificial Sequence
  Description of Artificial Sequence: Synthetic oligonucleotide
gggagcucgcuccuuuaag

SEQ ID NO: 235405 - RNA, 19 nt, Artificial Sequence
  Description of Artificial Sequence: Synthetic oligonucleotide
gagcuccggagccacaucu

SEQ ID NO: 235406 - RNA, 19 nt, Artificial Sequence
  Description of Artificial Sequence: Synthetic oligonucleotide
uugggcucggaaggguuac

SEQ ID NO: 235407 - RNA, 19 nt, Artificial Sequence
  Description of Artificial Sequence: Synthetic oligonucleotide
cuuagggaagugguccuga

SEQ ID NO: 235408 - RNA, 19 nt, Artificial Sequence
  Description of Artificial Sequence: Synthetic oligonucleotide
gcugacugguagucuuggg

SEQ ID NO: 235409 - RNA, 19 nt, Artificial Sequence
  Description of Artificial Sequence: Synthetic oligonucleotide
guagucuaagugaggccca

SEQ ID NO: 235410 - RNA, 19 nt, Artificial Sequence
  Description of Artificial Sequence: Synthetic oligonucleotide
acuuugggcccuagguucu

SEQ ID NO: 235411 - RNA, 19 nt, Artificial Sequence
  Description of Artificial Sequence: Synthetic oligonucleotide
accccucguuaagugacag

SEQ ID NO: 235412 - RNA, 19 nt, Artificial Sequence
  Description of Artificial Sequence: Synthetic oligonucleotide
cagccguggcaauggcucc

SEQ ID NO: 235413 - RNA, 19 nt, Artificial Sequence
  Description of Artificial Sequence: Synthetic oligonucleotide
cugcagauacgcaggagcu

SEQ ID NO: 235414 - RNA, 19 nt, Artificial Sequence
  Description of Artificial Sequence: Synthetic oligonucleotide
gcacacucagaugaggaca

SEQ ID NO: 235415 - RNA, 19 nt, Artificial Sequence
  Description of Artificial Sequence: Synthetic oligonucleotide
gcaauaacggcaagaaacu

SEQ ID NO: 235416 - RNA, 19 nt, Artificial Sequence
  Description of Artificial Sequence: Synthetic oligonucleotide
gcgugguaauuugaggcag

SEQ ID NO: 235417 - RNA, 19 nt, Artificial Sequence
  Description of Artificial Sequence: Synthetic oligonucleotide
cccucguuaagugacagca

SEQ ID NO: 235418 - RNA, 19 nt, Artificial Sequence
  Description of Artificial Sequence: Synthetic oligonucleotide
ccaugcucugcaaguagac

SEQ ID NO: 235419 - RNA, 19 nt, Artificial Sequence
  Description of Artificial Sequence: Synthetic oligonucleotide
uccggaauguagggcugca

SEQ ID NO: 235420 - RNA, 19 nt, Artificial Sequence
  Description of Artificial Sequence: Synthetic oligonucleotide
aauccccggauaagcucca

SEQ ID NO: 235421 - RNA, 19 nt, Artificial Sequence
  Description of Artificial Sequence: Synthetic oligonucleotide
accguacagcucuguuuca

SEQ ID NO: 235422 - RNA, 19 nt, Artificial Sequence
  Description of Artificial Sequence: Synthetic oligonucleotide
ucacggacucgaucaugau

SEQ ID NO: 235423 - RNA, 19 nt, Artificial Sequence
  Description of Artificial Sequence: Synthetic oligonucleotide
cuccggaauguagggcugc

SEQ ID NO: 235424 - RNA, 19 nt, Artificial Sequence
  Description of Artificial Sequence: Synthetic oligonucleotide
ggagcgaaggccuguccuc

SEQ ID NO: 235425 - RNA, 19 nt, Artificial Sequence
  Description of Artificial Sequence: Synthetic oligonucleotide
guaaggccuuacuuugacu

SEQ ID NO: 235426 - RNA, 19 nt, Artificial Sequence
  Description of Artificial Sequence: Synthetic oligonucleotide
ugaggcgcccagaggggua

SEQ ID NO: 235427 - RNA, 19 nt, Artificial Sequence
  Description of Artificial Sequence: Synthetic oligonucleotide
guauggaaggaaggccaca

SEQ ID NO: 235428 - RNA, 19 nt, Artificial Sequence
  Description of Artificial Sequence: Synthetic oligonucleotide
ggauugacuuccaaugaua

SEQ ID NO: 235429 - RNA, 19 nt, Artificial Sequence
  Description of Artificial Sequence: Synthetic oligonucleotide
augagccgcuuuccgcaca

SEQ ID NO: 235430 - RNA, 19 nt, Artificial Sequence
  Description of Artificial Sequence: Synthetic oligonucleotide
gcauguagcaggguagcca

SEQ ID NO: 235431 - RNA, 19 nt, Artificial Sequence
  Description of Artificial Sequence: Synthetic oligonucleotide
ggcuguaaguuaucugaaa

SEQ ID NO: 235432 - RNA, 19 nt, Artificial Sequence
  Description of Artificial Sequence: Synthetic oligonucleotide
ggcuguacgugcagcgccg

SEQ ID NO: 235433 - RNA, 19 nt, Artificial Sequence
  Description of Artificial Sequence: Synthetic oligonucleotide
cccuagguucuccacgaag

SEQ ID NO: 235434 - RNA, 19 nt, Artificial Sequence
  Description of Artificial Sequence: Synthetic oligonucleotide
ugcugauauggggcuguaa

SEQ ID NO: 235435 - RNA, 19 nt, Artificial Sequence
  Description of Artificial Sequence: Synthetic oligonucleotide
cagccauaacugggaaaag

SEQ ID NO: 235436 - RNA, 19 nt, Artificial Sequence
  Description of Artificial Sequence: Synthetic oligonucleotide
ccgccuuggugucugcugg

SEQ ID NO: 235437 - RNA, 19 nt, Artificial Sequence
  Description of Artificial Sequence: Synthetic oligonucleotide
gagacaccccucguuaagu

SEQ ID NO: 235438 - RNA, 19 nt, Artificial Sequence
  Description of Artificial Sequence: Synthetic oligonucleotide
gaauguagggcugcacuuu

SEQ ID NO: 235439 - RNA, 19 nt, Artificial Sequence
  Description of Artificial Sequence: Synthetic oligonucleotide
cguuaagugacagcaagca

SEQ ID NO: 235440 - RNA, 19 nt, Artificial Sequence
  Description of Artificial Sequence: Synthetic oligonucleotide
cuccggagccacaucugca

SEQ ID NO: 235441 - RNA, 19 nt, Artificial Sequence
  Description of Artificial Sequence: Synthetic oligonucleotide
auguggcugcauaacccca

SEQ ID NO: 235442 - RNA, 19 nt, Artificial Sequence
  Description of Artificial Sequence: Synthetic oligonucleotide
caacuggcccauggguggc

SEQ ID NO: 235443 - RNA, 19 nt, Artificial Sequence
  Description of Artificial Sequence: Synthetic oligonucleotide
ggcaagagccccacagaug

SEQ ID NO: 235444 - RNA, 19 nt, Artificial Sequence
  Description of Artificial Sequence: Synthetic oligonucleotide
ccuagguucuccacgaagu

SEQ ID NO: 235445 - RNA, 19 nt, Artificial Sequence
  Description of Artificial Sequence: Synthetic oligonucleotide
uacgcugguacgggagcuc

SEQ ID NO: 235446 - RNA, 19 nt, Artificial Sequence
  Description of Artificial Sequence: Synthetic oligonucleotide
ugcccucgguggaacgcaa

SEQ ID NO: 235447 - RNA, 19 nt, Artificial Sequence
  Description of Artificial Sequence: Synthetic oligonucleotide
gggcgugcagcaagggagg

SEQ ID NO: 235448 - RNA, 19 nt, Artificial Sequence
  Description of Artificial Sequence: Synthetic oligonucleotide
gggcauguagcaggguagc

SEQ ID NO: 235449 - RNA, 19 nt, Artificial Sequence
  Description of Artificial Sequence: Synthetic oligonucleotide
cugguacgggagcucgcuc

SEQ ID NO: 235450 - RNA, 19 nt, Artificial Sequence
  Description of Artificial Sequence: Synthetic oligonucleotide
aucaggcugcagauacgca

SEQ ID NO: 235451 - RNA, 19 nt, Artificial Sequence
  Description of Artificial Sequence: Synthetic oligonucleotide
ggcauguagcaggguagcc

SEQ ID NO: 235452 - RNA, 19 nt, Artificial Sequence
  Description of Artificial Sequence: Synthetic oligonucleotide
agcgugcuguuuggccagg

SEQ ID NO: 235453 - RNA, 19 nt, Artificial Sequence
  Description of Artificial Sequence: Synthetic oligonucleotide
cagacgggcaagagcccca

SEQ ID NO: 235454 - RNA, 19 nt, Artificial Sequence
  Description of Artificial Sequence: Synthetic oligonucleotide
uuacucugacaggccuuau

SEQ ID NO: 235455 - RNA, 19 nt, Artificial Sequence
  Description of Artificial Sequence: Synthetic oligonucleotide
gcuuuacgcugguacggga

SEQ ID NO: 235456 - RNA, 19 nt, Artificial Sequence
  Description of Artificial Sequence: Synthetic oligonucleotide
cgaucuguagcagugggga

SEQ ID NO: 235457 - RNA, 19 nt, Artificial Sequence
  Description of Artificial Sequence: Synthetic oligonucleotide
ccgcaagucaggaucaucu

SEQ ID NO: 235458 - RNA, 19 nt, Artificial Sequence
  Description of Artificial Sequence: Synthetic oligonucleotide
acacucagaugaggacacu

SEQ ID NO: 235459 - RNA, 19 nt, Artificial Sequence
  Description of Artificial Sequence: Synthetic oligonucleotide
gccuuacuuugacuuugac

SEQ ID NO: 235460 - RNA, 19 nt, Artificial Sequence
  Description of Artificial Sequence: Synthetic oligonucleotide
cuccgcaccucugggucug

SEQ ID NO: 235461 - RNA, 19 nt, Artificial Sequence
  Description of Artificial Sequence: Synthetic oligonucleotide
ccagcgugcucuaguaaca

SEQ ID NO: 235462 - RNA, 19 nt, Artificial Sequence
  Description of Artificial Sequence: Synthetic oligonucleotide
ggguacagugugacagccc

SEQ ID NO: 235463 - RNA, 19 nt, Artificial Sequence
  Description of Artificial Sequence: Synthetic oligonucleotide
gcuuuccgcacacucagau

SEQ ID NO: 235464 - RNA, 19 nt, Artificial Sequence
  Description of Artificial Sequence: Synthetic oligonucleotide
cgaucaugaugcucccuug

SEQ ID NO: 235465 - RNA, 19 nt, Artificial Sequence
  Description of Artificial Sequence: Synthetic oligonucleotide
auguuaucacggacucgau

SEQ ID NO: 235466 - RNA, 19 nt, Artificial Sequence
  Description of Artificial Sequence: Synthetic oligonucleotide
aguugucagcgugcuguuu

SEQ ID NO: 235467 - RNA, 19 nt, Artificial Sequence
  Description of Artificial Sequence: Synthetic oligonucleotide
guugggcucggaaggguua

SEQ ID NO: 235468 - RNA, 19 nt, Artificial Sequence
  Description of Artificial Sequence: Synthetic oligonucleotide
caccccucguuaagugaca

SEQ ID NO: 235469 - RNA, 19 nt, Artificial Sequence
  Description of Artificial Sequence: Synthetic oligonucleotide
ggcaaggagcaguggcauc

SEQ ID NO: 235470 - RNA, 19 nt, Artificial Sequence
  Description of Artificial Sequence: Synthetic oligonucleotide
ccgcacacucagaugagga

SEQ ID NO: 235471 - RNA, 19 nt, Artificial Sequence
  Description of Artificial Sequence: Synthetic oligonucleotide
aucucccauuaacccugau

SEQ ID NO: 235472 - RNA, 19 nt, Artificial Sequence
  Description of Artificial Sequence: Synthetic oligonucleotide
gcucccuugccaggagggg

SEQ ID NO: 235473 - RNA, 19 nt, Artificial Sequence
  Description of Artificial Sequence: Synthetic oligonucleotide
ggacucgaucaugaugcuc

SEQ ID NO: 235474 - RNA, 19 nt, Artificial Sequence
  Description of Artificial Sequence: Synthetic oligonucleotide
acgggagcucgcuccuuua

SEQ ID NO: 235475 - RNA, 19 nt, Artificial Sequence
  Description of Artificial Sequence: Synthetic oligonucleotide
ggugcgcagcaccccaguc

SEQ ID NO: 235476 - RNA, 19 nt, Artificial Sequence
  Description of Artificial Sequence: Synthetic oligonucleotide
ggaacagccgagacacaaa

SEQ ID NO: 235477 - RNA, 19 nt, Artificial Sequence
  Description of Artificial Sequence: Synthetic oligonucleotide
ggauaagcuccaugauggu

SEQ ID NO: 235478 - RNA, 19 nt, Artificial Sequence
  Description of Artificial Sequence: Synthetic oligonucleotide
ccccucguuaagugacagc

SEQ ID NO: 235479 - RNA, 19 nt, Artificial Sequence
  Description of Artificial Sequence: Synthetic oligonucleotide
gguccgggguuugcugggg

SEQ ID NO: 235480 - RNA, 19 nt, Artificial Sequence
  Description of Artificial Sequence: Synthetic oligonucleotide
ccggagccacaucugcaag

SEQ ID NO: 235481 - RNA, 19 nt, Artificial Sequence
  Description of Artificial Sequence: Synthetic oligonucleotide
cuguacgugcagcgccgca

SEQ ID NO: 235482 - RNA, 19 nt, Artificial Sequence
  Description of Artificial Sequence: Synthetic oligonucleotide
caaagacguuauccaugua

SEQ ID NO: 235483 - RNA, 19 nt, Artificial Sequence
  Description of Artificial Sequence: Synthetic oligonucleotide
ggcucggaaggguuacucu

SEQ ID NO: 235484 - RNA, 19 nt, Artificial Sequence
  Description of Artificial Sequence: Synthetic oligonucleotide
gcaaguagacccagcccaa

SEQ ID NO: 235485 - RNA, 19 nt, Artificial Sequence
  Description of Artificial Sequence: Synthetic oligonucleotide
ggaaaagggcgugcagcaa

SEQ ID NO: 235486 - RNA, 19 nt, Artificial Sequence
  Description of Artificial Sequence: Synthetic oligonucleotide
gguacgggagcucgcuccu

SEQ ID NO: 235487 - RNA, 19 nt, Artificial Sequence
  Description of Artificial Sequence: Synthetic oligonucleotide
gcacacgaucuguagcagu

SEQ ID NO: 235488 - RNA, 19 nt, Artificial Sequence
  Description of Artificial Sequence: Synthetic oligonucleotide
gccugcauguaagacggua

SEQ ID NO: 235489 - RNA, 19 nt, Artificial Sequence
  Description of Artificial Sequence: Synthetic oligonucleotide
gcacuuugggcccuagguu

SEQ ID NO: 235490 - RNA, 19 nt, Artificial Sequence
  Description of Artificial Sequence: Synthetic oligonucleotide
cgugcagcgccgcaaguca

SEQ ID NO: 235491 - RNA, 19 nt, Artificial Sequence
  Description of Artificial Sequence: Synthetic oligonucleotide
ggcgugcagcaagggaggc

SEQ ID NO: 235492 - RNA, 19 nt, Artificial Sequence
  Description of Artificial Sequence: Synthetic oligonucleotide
gcagcauugcggacaaccu

SEQ ID NO: 235493 - RNA, 19 nt, Artificial Sequence
  Description of Artificial Sequence: Synthetic oligonucleotide
caggaucaucuauguggcu

SEQ ID NO: 235494 - RNA, 19 nt, Artificial Sequence
  Description of Artificial Sequence: Synthetic oligonucleotide
ccucguuaagugacagcaa

SEQ ID NO: 235495 - RNA, 19 nt, Artificial Sequence
  Description of Artificial Sequence: Synthetic oligonucleotide
gcuguacgugcagcgccgc

SEQ ID NO: 235496 - RNA, 19 nt, Artificial Sequence
  Description of Artificial Sequence: Synthetic oligonucleotide
gccauuaccaccgggcguu

SEQ ID NO: 235497 - RNA, 19 nt, Artificial Sequence
  Description of Artificial Sequence: Synthetic oligonucleotide
ugguagucuuggggcccuc

SEQ ID NO: 235498 - RNA, 19 nt, Artificial Sequence
  Description of Artificial Sequence: Synthetic oligonucleotide
cuguagcaguggggacagc

SEQ ID NO: 235499 - RNA, 19 nt, Artificial Sequence
  Description of Artificial Sequence: Synthetic oligonucleotide
gcugcugauauggggcugu

SEQ ID NO: 235500 - RNA, 19 nt, Artificial Sequence
  Description of Artificial Sequence: Synthetic oligonucleotide
ccaucagcccaaucuccaa

SEQ ID NO: 235501 - RNA, 19 nt, Artificial Sequence
  Description of Artificial Sequence: Synthetic oligonucleotide
gccgcaagucaggaucauc

SEQ ID NO: 235502 - RNA, 19 nt, Artificial Sequence
  Description of Artificial Sequence: Synthetic oligonucleotide
caccgggcguuccuuuucu

SEQ ID NO: 235503 - RNA, 19 nt, Artificial Sequence
  Description of Artificial Sequence: Synthetic oligonucleotide
cuucaguggcagggcaugu

SEQ ID NO: 235504 - RNA, 19 nt, Artificial Sequence
  Description of Artificial Sequence: Synthetic oligonucleotide
ccaccgggcguuccuuuuc

SEQ ID NO: 235505 - RNA, 19 nt, Artificial Sequence
  Description of Artificial Sequence: Synthetic oligonucleotide
ggacaaccugugagggguc

SEQ ID NO: 235506 - RNA, 19 nt, Artificial Sequence
  Description of Artificial Sequence: Synthetic oligonucleotide
ccggaauguagggcugcac

SEQ ID NO: 235507 - RNA, 19 nt, Artificial Sequence
  Description of Artificial Sequence: Synthetic oligonucleotide
guccgggguuugcuggggu

SEQ ID NO: 235508 - RNA, 19 nt, Artificial Sequence
  Description of Artificial Sequence: Synthetic oligonucleotide
ggcaucacauggggacaga

SEQ ID NO: 235509 - RNA, 19 nt, Artificial Sequence
  Description of Artificial Sequence: Synthetic oligonucleotide
gcgccgcaagucaggauca

SEQ ID NO: 235510 - RNA, 19 nt, Artificial Sequence
  Description of Artificial Sequence: Synthetic oligonucleotide
ggcuccuauggcgcucaca

SEQ ID NO: 235511 - RNA, 19 nt, Artificial Sequence
  Description of Artificial Sequence: Synthetic oligonucleotide
cccaggcccuugcacacga

SEQ ID NO: 235512 - RNA, 19 nt, Artificial Sequence
  Description of Artificial Sequence: Synthetic oligonucleotide
cggacaaccugugaggggu

SEQ ID NO: 235513 - RNA, 19 nt, Artificial Sequence
  Description of Artificial Sequence: Synthetic oligonucleotide
cagcgugcucuaguaacau

SEQ ID NO: 235514 - RNA, 19 nt, Artificial Sequence
  Description of Artificial Sequence: Synthetic oligonucleotide
ccaccguacagcucuguuu

SEQ ID NO: 235515 - RNA, 19 nt, Artificial Sequence
  Description of Artificial Sequence: Synthetic oligonucleotide
gguagucuuggggcccucu

SEQ ID NO: 235516 - RNA, 19 nt, Artificial Sequence
  Description of Artificial Sequence: Synthetic oligonucleotide
gcccuugcacacgaucugu

SEQ ID NO: 235517 - RNA, 19 nt, Artificial Sequence
  Description of Artificial Sequence: Synthetic oligonucleotide
ccauaagcuccggaaugua

SEQ ID NO: 235518 - RNA, 19 nt, Artificial Sequence
  Description of Artificial Sequence: Synthetic oligonucleotide
gccaccguacagcucuguu

SEQ ID NO: 235519 - RNA, 19 nt, Artificial Sequence
  Description of Artificial Sequence: Synthetic oligonucleotide
cgggcguuccuuuucuccu

SEQ ID NO: 235520 - RNA, 19 nt, Artificial Sequence
  Description of Artificial Sequence: Synthetic oligonucleotide
gcccuagguucuccacgaa

SEQ ID NO: 235521 - RNA, 19 nt, Artificial Sequence
  Description of Artificial Sequence: Synthetic oligonucleotide
gcgucauacucugccuggu

SEQ ID NO: 235522 - RNA, 19 nt, Artificial Sequence
  Description of Artificial Sequence: Synthetic oligonucleotide
cagcgccgcaagucaggau

SEQ ID NO: 235523 - RNA, 19 nt, Artificial Sequence
  Description of Artificial Sequence: Synthetic oligonucleotide
ccucauggacucucccauu

SEQ ID NO: 235524 - RNA, 19 nt, Artificial Sequence
  Description of Artificial Sequence: Synthetic oligonucleotide
gcgcucacagccagcucuu

SEQ ID NO: 235525 - RNA, 19 nt, Artificial Sequence
  Description of Artificial Sequence: Synthetic oligonucleotide
gcccucgguggaacgcaau

SEQ ID NO: 235526 - RNA, 19 nt, Artificial Sequence
  Description of Artificial Sequence: Synthetic oligonucleotide
ccgcaccucugggucugcu

SEQ ID NO: 235527 - RNA, 19 nt, Artificial Sequence
  Description of Artificial Sequence: Synthetic oligonucleotide
aguaauaauggccaugucc

SEQ ID NO: 235528 - RNA, 19 nt, Artificial Sequence
  Description of Artificial Sequence: Synthetic oligonucleotide
aacuuuuguguucugaucg

SEQ ID NO: 235529 - RNA, 19 nt, Artificial Sequence
  Description of Artificial Sequence: Synthetic oligonucleotide
agauguaucuacuaacugc

SEQ ID NO: 235530 - RNA, 19 nt, Artificial Sequence
  Description of Artificial Sequence: Synthetic oligonucleotide
aauagguauuuacaggagg

SEQ ID NO: 235531 - RNA, 19 nt, Artificial Sequence
  Description of Artificial Sequence: Synthetic oligonucleotide
uucguaaccauuaacaacu

SEQ ID NO: 235532 - RNA, 19 nt, Artificial Sequence
  Description of Artificial Sequence: Synthetic oligonucleotide
uucaaaacguggaacaggg

SEQ ID NO: 235533 - RNA, 19 nt, Artificial Sequence
  Description of Artificial Sequence: Synthetic oligonucleotide
uacauauccucuuagcugg

SEQ ID NO: 235534 - RNA, 19 nt, Artificial Sequence
  Description of Artificial Sequence: Synthetic oligonucleotide
aaaccuuugcuucguaacc

SEQ ID NO: 235535 - RNA, 19 nt, Artificial Sequence
  Description of Artificial Sequence: Synthetic oligonucleotide
aacguuuccaaauguaauc

SEQ ID NO: 235536 - RNA, 19 nt, Artificial Sequence
  Description of Artificial Sequence: Synthetic oligonucleotide
auaguuaacuacuaaacgu

SEQ ID NO: 235537 - RNA, 19 nt, Artificial Sequence
  Description of Artificial Sequence: Synthetic oligonucleotide
aaauaguuagccauaaucu

SEQ ID NO: 235538 - RNA, 19 nt, Artificial Sequence
  Description of Artificial Sequence: Synthetic oligonucleotide
aaccauuaacaacuucugc

SEQ ID NO: 235539 - RNA, 19 nt, Artificial Sequence
  Description of Artificial Sequence: Synthetic oligonucleotide
uuagcaauagguauuuaca

SEQ ID NO: 235540 - RNA, 19 nt, Artificial Sequence
  Description of Artificial Sequence: Synthetic oligonucleotide
uguaucuacuaacugcagg

SEQ ID NO: 235541 - RNA, 19 nt, Artificial Sequence
  Description of Artificial Sequence: Synthetic oligonucleotide
guaucuacuaacugcaggg

SEQ ID NO: 235542 - RNA, 19 nt, Artificial Sequence
  Description of Artificial Sequence: Synthetic oligonucleotide
uaggucgcuaucaaaacgg

SEQ ID NO: 235543 - RNA, 19 nt, Artificial Sequence
  Description of Artificial Sequence: Synthetic oligonucleotide
aacggcuugacucacugag

SEQ ID NO: 235544 - RNA, 19 nt, Artificial Sequence
  Description of Artificial Sequence: Synthetic oligonucleotide
agugcuacagccauuaacg

SEQ ID NO: 235545 - RNA, 19 nt, Artificial Sequence
  Description of Artificial Sequence: Synthetic oligonucleotide
agugagguggcuuaaaacu

SEQ ID NO: 235546 - RNA, 19 nt, Artificial Sequence
  Description of Artificial Sequence: Synthetic oligonucleotide
aaacuuuuguguucugauc

SEQ ID NO: 235547 - RNA, 19 nt, Artificial Sequence
  Description of Artificial Sequence: Synthetic oligonucleotide
caaauaguuagccauaauc

SEQ ID NO: 235548 - RNA, 19 nt, Artificial Sequence
  Description of Artificial Sequence: Synthetic oligonucleotide
uguguagcagcucagguac

SEQ ID NO: 235549 - RNA, 19 nt, Artificial Sequence
  Description of Artificial Sequence: Synthetic oligonucleotide
uuaagauguaucuacuaac

SEQ ID NO: 235550 - RNA, 19 nt, Artificial Sequence
  Description of Artificial Sequence: Synthetic oligonucleotide
uaagauguaucuacuaacu

SEQ ID NO: 235551 - RNA, 19 nt, Artificial Sequence
  Description of Artificial Sequence: Synthetic oligonucleotide
ugaucaaccucgaaguuug

SEQ ID NO: 235552 - RNA, 19 nt, Artificial Sequence
  Description of Artificial Sequence: Synthetic oligonucleotide
ugaucgucagcucuuuugg

SEQ ID NO: 235553 - RNA, 19 nt, Artificial Sequence
  Description of Artificial Sequence: Synthetic oligonucleotide
uaaagagggcagcagaacc

SEQ ID NO: 235554 - RNA, 19 nt, Artificial Sequence
  Description of Artificial Sequence: Synthetic oligonucleotide
ucuugaacaugauaggacu

SEQ ID NO: 235555 - RNA, 19 nt, Artificial Sequence
  Description of Artificial Sequence: Synthetic oligonucleotide
acuaccaugugaucagcgc

SEQ ID NO: 235556 - RNA, 19 nt, Artificial Sequence
  Description of Artificial Sequence: Synthetic oligonucleotide
aauaguuagccauaaucua

SEQ ID NO: 235557 - RNA, 19 nt, Artificial Sequence
  Description of Artificial Sequence: Synthetic oligonucleotide
uguguaaaccuuugcuucg

SEQ ID NO: 235558 - RNA, 19 nt, Artificial Sequence
  Description of Artificial Sequence: Synthetic oligonucleotide
ucuauuuugacagggaauc

SEQ ID NO: 235559 - RNA, 19 nt, Artificial Sequence
  Description of Artificial Sequence: Synthetic oligonucleotide
uuaugucgcagcaagacuc

SEQ ID NO: 235560 - RNA, 19 nt, Artificial Sequence
  Description of Artificial Sequence: Synthetic oligonucleotide
ucuacuccauguuagcucc

SEQ ID NO: 235561 - RNA, 19 nt, Artificial Sequence
  Description of Artificial Sequence: Synthetic oligonucleotide
agaacauuuuacuggcaac

SEQ ID NO: 235562 - RNA, 19 nt, Artificial Sequence
  Description of Artificial Sequence: Synthetic oligonucleotide
gaugggaaugaccuguucc

SEQ ID NO: 235563 - RNA, 19 nt, Artificial Sequence
  Description of Artificial Sequence: Synthetic oligonucleotide
aagauguaucuacuaacug

SEQ ID NO: 235564 - RNA, 19 nt, Artificial Sequence
  Description of Artificial Sequence: Synthetic oligonucleotide
uuucccuuuugaaugaaga

SEQ ID NO: 235565 - RNA, 19 nt, Artificial Sequence
  Description of Artificial Sequence: Synthetic oligonucleotide
aagaacauuuuacuggcaa

SEQ ID NO: 235566 - RNA, 19 nt, Artificial Sequence
  Description of Artificial Sequence: Synthetic oligonucleotide
ugaucccuccauuugaugc

SEQ ID NO: 235567 - RNA, 19 nt, Artificial Sequence
  Description of Artificial Sequence: Synthetic oligonucleotide
ucaaccucgaaguuuguga

SEQ ID NO: 235568 - RNA, 19 nt, Artificial Sequence
  Description of Artificial Sequence: Synthetic oligonucleotide
ugguuaaaaugcauaaccu

SEQ ID NO: 235569 - RNA, 19 nt, Artificial Sequence
  Description of Artificial Sequence: Synthetic oligonucleotide
aaugugaccugcaagccag

SEQ ID NO: 235570 - RNA, 19 nt, Artificial Sequence
  Description of Artificial Sequence: Synthetic oligonucleotide
aguagcuuuaaacuuuugu

SEQ ID NO: 235571 - RNA, 19 nt, Artificial Sequence
  Description of Artificial Sequence: Synthetic oligonucleotide
uaaccauuaacaacuucug

SEQ ID NO: 235572 - RNA, 19 nt, Artificial Sequence
  Description of Artificial Sequence: Synthetic oligonucleotide
uugaacaugauaggacucg

SEQ ID NO: 235573 - RNA, 19 nt, Artificial Sequence
  Description of Artificial Sequence: Synthetic oligonucleotide
acguuuccaaauguaaucc

SEQ ID NO: 235574 - RNA, 19 nt, Artificial Sequence
  Description of Artificial Sequence: Synthetic oligonucleotide
uaguuaacuacuaaacgua

SEQ ID NO: 235575 - RNA, 19 nt, Artificial Sequence
  Description of Artificial Sequence: Synthetic oligonucleotide
aaccucgaaguuugugacc

SEQ ID NO: 235576 - RNA, 19 nt, Artificial Sequence
  Description of Artificial Sequence: Synthetic oligonucleotide
aacaauaggccaugugcug

SEQ ID NO: 235577 - RNA, 19 nt, Artificial Sequence
  Description of Artificial Sequence: Synthetic oligonucleotide
guacauauccucuuagcug

SEQ ID NO: 235578 - RNA, 19 nt, Artificial Sequence
  Description of Artificial Sequence: Synthetic oligonucleotide
caaaaugagcgcugguucg

SEQ ID NO: 235579 - RNA, 19 nt, Artificial Sequence
  Description of Artificial Sequence: Synthetic oligonucleotide
uuuugguuaucacacucac

SEQ ID NO: 235580 - RNA, 19 nt, Artificial Sequence
  Description of Artificial Sequence: Synthetic oligonucleotide
ucaagaauuuuguguagca

SEQ ID NO: 235581 - RNA, 19 nt, Artificial Sequence
  Description of Artificial Sequence: Synthetic oligonucleotide
uuuguguucugaucgucag

SEQ ID NO: 235582 - RNA, 19 nt, Artificial Sequence
  Description of Artificial Sequence: Synthetic oligonucleotide
uuuuguguucugaucguca

SEQ ID NO: 235583 - RNA, 19 nt, Artificial Sequence
  Description of Artificial Sequence: Synthetic oligonucleotide
aaaugugaccugcaagcca

SEQ ID NO: 235584 - RNA, 19 nt, Artificial Sequence
  Description of Artificial Sequence: Synthetic oligonucleotide
gaucucuauuuugacaggg

SEQ ID NO: 235585 - RNA, 19 nt, Artificial Sequence
  Description of Artificial Sequence: Synthetic oligonucleotide
uuggugaacagcaguaacu

SEQ ID NO: 235586 - RNA, 19 nt, Artificial Sequence
  Description of Artificial Sequence: Synthetic oligonucleotide
auaauggccauguccuagg

SEQ ID NO: 235587 - RNA, 19 nt, Artificial Sequence
  Description of Artificial Sequence: Synthetic oligonucleotide
uuuaugucgcagcaagacu

SEQ ID NO: 235588 - RNA, 19 nt, Artificial Sequence
  Description of Artificial Sequence: Synthetic oligonucleotide
uaugucgcagcaagacucg

SEQ ID NO: 235589 - RNA, 19 nt, Artificial Sequence
  Description of Artificial Sequence: Synthetic oligonucleotide
ucuaacaauaggccaugug

SEQ ID NO: 235590 - RNA, 19 nt, Artificial Sequence
  Description of Artificial Sequence: Synthetic oligonucleotide
aacuaacugccuuugcgga

SEQ ID NO: 235591 - RNA, 19 nt, Artificial Sequence
  Description of Artificial Sequence: Synthetic oligonucleotide
uguguugugguagucucgg

SEQ ID NO: 235592 - RNA, 19 nt, Artificial Sequence
  Description of Artificial Sequence: Synthetic oligonucleotide
cuucguaaccauuaacaac

SEQ ID NO: 235593 - RNA, 19 nt, Artificial Sequence
  Description of Artificial Sequence: Synthetic oligonucleotide
ucccuuuugaaugaagagc

SEQ ID NO: 235594 - RNA, 19 nt, Artificial Sequence
  Description of Artificial Sequence: Synthetic oligonucleotide
uuuggugaacagcaguaac

SEQ ID NO: 235595 - RNA, 19 nt, Artificial Sequence
  Description of Artificial Sequence: Synthetic oligonucleotide
guaggucgcuaucaaaacg

SEQ ID NO: 235596 - RNA, 19 nt, Artificial Sequence
  Description of Artificial Sequence: Synthetic oligonucleotide
ugcaggacuguguauacca

SEQ ID NO: 235597 - RNA, 19 nt, Artificial Sequence
  Description of Artificial Sequence: Synthetic oligonucleotide
uguguauaccaucuccgga

SEQ ID NO: 235598 - RNA, 19 nt, Artificial Sequence
  Description of Artificial Sequence: Synthetic oligonucleotide
acguauuuugguuaucaca

SEQ ID NO: 235599 - RNA, 19 nt, Artificial Sequence
  Description of Artificial Sequence: Synthetic oligonucleotide
cauaaccuuguauugcuac

SEQ ID NO: 235600 - RNA, 19 nt, Artificial Sequence
  Description of Artificial Sequence: Synthetic oligonucleotide
acagacgcaaaaugggaag

SEQ ID NO: 235601 - RNA, 19 nt, Artificial Sequence
  Description of Artificial Sequence: Synthetic oligonucleotide
aaaggaacuaacugccuuu

SEQ ID NO: 235602 - RNA, 19 nt, Artificial Sequence
  Description of Artificial Sequence: Synthetic oligonucleotide
uacuaccaugugaucagcg

SEQ ID NO: 235603 - RNA, 19 nt, Artificial Sequence
  Description of Artificial Sequence: Synthetic oligonucleotide
augcauaaccuuguauugc

SEQ ID NO: 235604 - RNA, 19 nt, Artificial Sequence
  Description of Artificial Sequence: Synthetic oligonucleotide
agguauuacuaccauguga

SEQ ID NO: 235605 - RNA, 19 nt, Artificial Sequence
  Description of Artificial Sequence: Synthetic oligonucleotide
ugcuggauugcaaacugca

SEQ ID NO: 235606 - RNA, 19 nt, Artificial Sequence
  Description of Artificial Sequence: Synthetic oligonucleotide
aaauccggggcucaagaau

SEQ ID NO: 235607 - RNA, 19 nt, Artificial Sequence
  Description of Artificial Sequence: Synthetic oligonucleotide
uaucuuaauuugaugcaaa

SEQ ID NO: 235608 - RNA, 19 nt, Artificial Sequence
  Description of Artificial Sequence: Synthetic oligonucleotide
uaacguuuccaaauguaau

SEQ ID NO: 235609 - RNA, 19 nt, Artificial Sequence
  Description of Artificial Sequence: Synthetic oligonucleotide
gaagguauuacuaccaugu

SEQ ID NO: 235610 - RNA, 19 nt, Artificial Sequence
  Description of Artificial Sequence: Synthetic oligonucleotide
agaaguguaacaggaaaca

SEQ ID NO: 235611 - RNA, 19 nt, Artificial Sequence
  Description of Artificial Sequence: Synthetic oligonucleotide
aauaaagagggcagcagaa

SEQ ID NO: 235612 - RNA, 19 nt, Artificial Sequence
  Description of Artificial Sequence: Synthetic oligonucleotide
ucugucuaaagcugguagu

SEQ ID NO: 235613 - RNA, 19 nt, Artificial Sequence
  Description of Artificial Sequence: Synthetic oligonucleotide
cccuuuugaaugaagagcc

SEQ ID NO: 235614 - RNA, 19 nt, Artificial Sequence
  Description of Artificial Sequence: Synthetic oligonucleotide
ggaggguuagacaaaauag

SEQ ID NO: 235615 - RNA, 19 nt, Artificial Sequence
  Description of Artificial Sequence: Synthetic oligonucleotide
ugaugcaaauaguuagcca

SEQ ID NO: 235616 - RNA, 19 nt, Artificial Sequence
  Description of Artificial Sequence: Synthetic oligonucleotide
auaaagagggcagcagaac

SEQ ID NO: 235617 - RNA, 19 nt, Artificial Sequence
  Description of Artificial Sequence: Synthetic oligonucleotide
ugaacaugauaggacucgg

SEQ ID NO: 235618 - RNA, 19 nt, Artificial Sequence
  Description of Artificial Sequence: Synthetic oligonucleotide
cuuuaugucgcagcaagac

SEQ ID NO: 235619 - RNA, 19 nt, Artificial Sequence
  Description of Artificial Sequence: Synthetic oligonucleotide
agagacuccaguggauucc

SEQ ID NO: 235620 - RNA, 19 nt, Artificial Sequence
  Description of Artificial Sequence: Synthetic oligonucleotide
acaauaggccaugugcugg

SEQ ID NO: 235621 - RNA, 19 nt, Artificial Sequence
  Description of Artificial Sequence: Synthetic oligonucleotide
ucuguacguauuuugguua

SEQ ID NO: 235622 - RNA, 19 nt, Artificial Sequence
  Description of Artificial Sequence: Synthetic oligonucleotide
agauggggaguaauaaugg

SEQ ID NO: 235623 - RNA, 19 nt, Artificial Sequence
  Description of Artificial Sequence: Synthetic oligonucleotide
uagcuaauggaagaaggug

SEQ ID NO: 235624 - RNA, 19 nt, Artificial Sequence
  Description of Artificial Sequence: Synthetic oligonucleotide
ucaaaacguggaacagggg

SEQ ID NO: 235625 - RNA, 19 nt, Artificial Sequence
  Description of Artificial Sequence: Synthetic oligonucleotide
agaugggaccugccaaugc

SEQ ID NO: 235626 - RNA, 19 nt, Artificial Sequence
  Description of Artificial Sequence: Synthetic oligonucleotide
gaucagcgcagccuguggg

SEQ ID NO: 235627 - RNA, 19 nt, Artificial Sequence
  Description of Artificial Sequence: Synthetic oligonucleotide
gcaauagguauuuacagga

SEQ ID NO: 235628 - RNA, 19 nt, Artificial Sequence
  Description of Artificial Sequence: Synthetic oligonucleotide
ugucgugagaaccagccuu

SEQ ID NO: 235629 - RNA, 19 nt, Artificial Sequence
  Description of Artificial Sequence: Synthetic oligonucleotide
ucuacuaacugcagggcuu

SEQ ID NO: 235630 - RNA, 19 nt, Artificial Sequence
  Description of Artificial Sequence: Synthetic oligonucleotide
uguaggucgcuaucaaaac

SEQ ID NO: 235631 - RNA, 19 nt, Artificial Sequence
  Description of Artificial Sequence: Synthetic oligonucleotide
cuguguauaccaucuccgg

SEQ ID NO: 235632 - RNA, 19 nt, Artificial Sequence
  Description of Artificial Sequence: Synthetic oligonucleotide
uuugcggacucaagucagg

SEQ ID NO: 235633 - RNA, 19 nt, Artificial Sequence
  Description of Artificial Sequence: Synthetic oligonucleotide
acuccaguggauuccgguc

SEQ ID NO: 235634 - RNA, 19 nt, Artificial Sequence
  Description of Artificial Sequence: Synthetic oligonucleotide
cuguacauauccucuuagc

SEQ ID NO: 235635 - RNA, 19 nt, Artificial Sequence
  Description of Artificial Sequence: Synthetic oligonucleotide
aaccuuguauugcuacuga

SEQ ID NO: 235636 - RNA, 19 nt, Artificial Sequence
  Description of Artificial Sequence: Synthetic oligonucleotide
cuagcugccccuaaggaca

SEQ ID NO: 235637 - RNA, 19 nt, Artificial Sequence
  Description of Artificial Sequence: Synthetic oligonucleotide
uaaccuuguauugcuacug

SEQ ID NO: 235638 - RNA, 19 nt, Artificial Sequence
  Description of Artificial Sequence: Synthetic oligonucleotide
cuuugcggacucaagucag

SEQ ID NO: 235639 - RNA, 19 nt, Artificial Sequence
  Description of Artificial Sequence: Synthetic oligonucleotide
agaaauccggggcucaaga

SEQ ID NO: 235640 - RNA, 19 nt, Artificial Sequence
  Description of Artificial Sequence: Synthetic oligonucleotide
cucaagaauuuuguguagc

SEQ ID NO: 235641 - RNA, 19 nt, Artificial Sequence
  Description of Artificial Sequence: Synthetic oligonucleotide
uucuguacguauuuugguu

SEQ ID NO: 235642 - RNA, 19 nt, Artificial Sequence
  Description of Artificial Sequence: Synthetic oligonucleotide
cugaucgucagcucuuuug

SEQ ID NO: 235643 - RNA, 19 nt, Artificial Sequence
  Description of Artificial Sequence: Synthetic oligonucleotide
auuuugacagggaauccag

SEQ ID NO: 235644 - RNA, 19 nt, Artificial Sequence
  Description of Artificial Sequence: Synthetic oligonucleotide
ucgcuaucaaaacggcuug

SEQ ID NO: 235645 - RNA, 19 nt, Artificial Sequence
  Description of Artificial Sequence: Synthetic oligonucleotide
acaggauuagcugccuucg

SEQ ID NO: 235646 - RNA, 19 nt, Artificial Sequence
  Description of Artificial Sequence: Synthetic oligonucleotide
aucuacuaacugcagggcu

SEQ ID NO: 235647 - RNA, 19 nt, Artificial Sequence
  Description of Artificial Sequence: Synthetic oligonucleotide
ugaucagcgcagccugugg

SEQ ID NO: 235648 - RNA, 19 nt, Artificial Sequence
  Description of Artificial Sequence: Synthetic oligonucleotide
gaggagucgucacuuuucc

SEQ ID NO: 235649 - RNA, 19 nt, Artificial Sequence
  Description of Artificial Sequence: Synthetic oligonucleotide
agcuaauggaagaagguga

SEQ ID NO: 235650 - RNA, 19 nt, Artificial Sequence
  Description of Artificial Sequence: Synthetic oligonucleotide
ugaccuuccauagugguua

SEQ ID NO: 235651 - RNA, 19 nt, Artificial Sequence
  Description of Artificial Sequence: Synthetic oligonucleotide
uccguggucaucuguauau

SEQ ID NO: 235652 - RNA, 19 nt, Artificial Sequence
  Description of Artificial Sequence: Synthetic oligonucleotide
cugucagguguucuguacg

SEQ ID NO: 235653 - RNA, 19 nt, Artificial Sequence
  Description of Artificial Sequence: Synthetic oligonucleotide
cuugaacaugauaggacuc

SEQ ID NO: 235654 - RNA, 19 nt, Artificial Sequence
  Description of Artificial Sequence: Synthetic oligonucleotide
ugccuuugcggacucaagu

SEQ ID NO: 235655 - RNA, 19 nt, Artificial Sequence
  Description of Artificial Sequence: Synthetic oligonucleotide
aggaggguuagacaaaaua

SEQ ID NO: 235656 - RNA, 19 nt, Artificial Sequence
  Description of Artificial Sequence: Synthetic oligonucleotide
cucugauucucuucagcag

SEQ ID NO: 235657 - RNA, 19 nt, Artificial Sequence
  Description of Artificial Sequence: Synthetic oligonucleotide
gguuaggaggcucuccugg

SEQ ID NO: 235658 - RNA, 19 nt, Artificial Sequence
  Description of Artificial Sequence: Synthetic oligonucleotide
aaaugggaagguauuacua

SEQ ID NO: 235659 - RNA, 19 nt, Artificial Sequence
  Description of Artificial Sequence: Synthetic oligonucleotide
auaaucuaaaauagauccu

SEQ ID NO: 235660 - RNA, 19 nt, Artificial Sequence
  Description of Artificial Sequence: Synthetic oligonucleotide
gacaggauuagcugccuuc

SEQ ID NO: 235661 - RNA, 19 nt, Artificial Sequence
  Description of Artificial Sequence: Synthetic oligonucleotide
ucacuguguaaaccuuugc

SEQ ID NO: 235662 - RNA, 19 nt, Artificial Sequence
  Description of Artificial Sequence: Synthetic oligonucleotide
aaccuuugcuucguaacca

SEQ ID NO: 235663 - RNA, 19 nt, Artificial Sequence
  Description of Artificial Sequence: Synthetic oligonucleotide
ugacuagguucucugcugu

SEQ ID NO: 235664 - RNA, 19 nt, Artificial Sequence
  Description of Artificial Sequence: Synthetic oligonucleotide
auaguuagccauaaucuaa

SEQ ID NO: 235665 - RNA, 19 nt, Artificial Sequence
  Description of Artificial Sequence: Synthetic oligonucleotide
agugguuaggaggcucucc

SEQ ID NO: 235666 - RNA, 19 nt, Artificial Sequence
  Description of Artificial Sequence: Synthetic oligonucleotide
cucuacuccauguuagcuc

SEQ ID NO: 235667 - RNA, 19 nt, Artificial Sequence
  Description of Artificial Sequence: Synthetic oligonucleotide
gucacaucugcuuuauguc

SEQ ID NO: 235668 - RNA, 19 nt, Artificial Sequence
  Description of Artificial Sequence: Synthetic oligonucleotide
uguugcaggacuguguaua

SEQ ID NO: 235669 - RNA, 19 nt, Artificial Sequence
  Description of Artificial Sequence: Synthetic oligonucleotide
uauugcuacugaugggagu

SEQ ID NO: 235670 - RNA, 19 nt, Artificial Sequence
  Description of Artificial Sequence: Synthetic oligonucleotide
gcggacucaagucaggucc

SEQ ID NO: 235671 - RNA, 19 nt, Artificial Sequence
  Description of Artificial Sequence: Synthetic oligonucleotide
uacguauuuugguuaucac

SEQ ID NO: 235672 - RNA, 19 nt, Artificial Sequence
  Description of Artificial Sequence: Synthetic oligonucleotide
uggucaucuguauaucuua

SEQ ID NO: 235673 - RNA, 19 nt, Artificial Sequence
  Description of Artificial Sequence: Synthetic oligonucleotide
auauccucuuagcuggggu

SEQ ID NO: 235674 - RNA, 19 nt, Artificial Sequence
  Description of Artificial Sequence: Synthetic oligonucleotide
acaccuucgagggccaugg

SEQ ID NO: 235675 - RNA, 19 nt, Artificial Sequence
  Description of Artificial Sequence: Synthetic oligonucleotide
uugccugucgugagaacca

SEQ ID NO: 235676 - RNA, 19 nt, Artificial Sequence
  Description of Artificial Sequence: Synthetic oligonucleotide
ucacauuguucacugugua

SEQ ID NO: 235677 - RNA, 19 nt, Artificial Sequence
  Description of Artificial Sequence: Synthetic oligonucleotide
cucucagccuugcaaaaug

SEQ ID NO: 235678 - RNA, 19 nt, Artificial Sequence
  Description of Artificial Sequence: Synthetic oligonucleotide
cagugcuacagccauuaac

SEQ ID NO: 235679 - RNA, 19 nt, Artificial Sequence
  Description of Artificial Sequence: Synthetic oligonucleotide
ugucuauuucucagugagu

SEQ ID NO: 235680 - RNA, 19 nt, Artificial Sequence
  Description of Artificial Sequence: Synthetic oligonucleotide
uuuaaggcuaaggcaacau

SEQ ID NO: 235681 - RNA, 19 nt, Artificial Sequence
  Description of Artificial Sequence: Synthetic oligonucleotide
uagauccuguacauauccu

SEQ ID NO: 235682 - RNA, 19 nt, Artificial Sequence
  Description of Artificial Sequence: Synthetic oligonucleotide
ggugggaaauccuucacca

SEQ ID NO: 235683 - RNA, 19 nt, Artificial Sequence
  Description of Artificial Sequence: Synthetic oligonucleotide
cuauuuugacagggaaucc

SEQ ID NO: 235684 - RNA, 19 nt, Artificial Sequence
  Description of Artificial Sequence: Synthetic oligonucleotide
auugcuacugaugggagua

SEQ ID NO: 235685 - RNA, 19 nt, Artificial Sequence
  Description of Artificial Sequence: Synthetic oligonucleotide
ugcauaaggaaggggcagc

SEQ ID NO: 235686 - RNA, 19 nt, Artificial Sequence
  Description of Artificial Sequence: Synthetic oligonucleotide
accucgaaguuugugaccu

SEQ ID NO: 235687 - RNA, 19 nt, Artificial Sequence
  Description of Artificial Sequence: Synthetic oligonucleotide
caggauagcuaauggaaga

SEQ ID NO: 235688 - RNA, 19 nt, Artificial Sequence
  Description of Artificial Sequence: Synthetic oligonucleotide
agccuuagcuccuguuccg

SEQ ID NO: 235689 - RNA, 19 nt, Artificial Sequence
  Description of Artificial Sequence: Synthetic oligonucleotide
cucggaagcugugucagcc

SEQ ID NO: 235690 - RNA, 19 nt, Artificial Sequence
  Description of Artificial Sequence: Synthetic oligonucleotide
gguucgugccaugaggucg

SEQ ID NO: 235691 - RNA, 19 nt, Artificial Sequence
  Description of Artificial Sequence: Synthetic oligonucleotide
cagacgcaaaaugggaagg

SEQ ID NO: 235692 - RNA, 19 nt, Artificial Sequence
  Description of Artificial Sequence: Synthetic oligonucleotide
gagacuccaguggauuccg

SEQ ID NO: 235693 - RNA, 19 nt, Artificial Sequence
  Description of Artificial Sequence: Synthetic oligonucleotide
cacucaguagugagguccc

SEQ ID NO: 235694 - RNA, 19 nt, Artificial Sequence
  Description of Artificial Sequence: Synthetic oligonucleotide
ucgggugugauggccgugg

SEQ ID NO: 235695 - RNA, 19 nt, Artificial Sequence
  Description of Artificial Sequence: Synthetic oligonucleotide
guacguauuuugguuauca

SEQ ID NO: 235696 - RNA, 19 nt, Artificial Sequence
  Description of Artificial Sequence: Synthetic oligonucleotide
uuggcgucucugucuaaag

SEQ ID NO: 235697 - RNA, 19 nt, Artificial Sequence
  Description of Artificial Sequence: Synthetic oligonucleotide
ggaagguauuacuaccaug

SEQ ID NO: 235698 - RNA, 19 nt, Artificial Sequence
  Description of Artificial Sequence: Synthetic oligonucleotide
gacauuucuggggaccgug

SEQ ID NO: 235699 - RNA, 19 nt, Artificial Sequence
  Description of Artificial Sequence: Synthetic oligonucleotide
aauccggggcucaagaauu

SEQ ID NO: 235700 - RNA, 19 nt, Artificial Sequence
  Description of Artificial Sequence: Synthetic oligonucleotide
ugcuacagccauuaacguu

SEQ ID NO: 235701 - RNA, 19 nt, Artificial Sequence
  Description of Artificial Sequence: Synthetic oligonucleotide
auuaacguuuccaaaugua

SEQ ID NO: 235702 - RNA, 19 nt, Artificial Sequence
  Description of Artificial Sequence: Synthetic oligonucleotide
ccugucgugagaaccagcc

SEQ ID NO: 235703 - RNA, 19 nt, Artificial Sequence
  Description of Artificial Sequence: Synthetic oligonucleotide
uauccucuuagcuggggua

SEQ ID NO: 235704 - RNA, 19 nt, Artificial Sequence
  Description of Artificial Sequence: Synthetic oligonucleotide
cacugaccuuccauagugg

SEQ ID NO: 235705 - RNA, 19 nt, Artificial Sequence
  Description of Artificial Sequence: Synthetic oligonucleotide
gucgaugaugggaaugacc

SEQ ID NO: 235706 - RNA, 19 nt, Artificial Sequence
  Description of Artificial Sequence: Synthetic oligonucleotide
gcacugaccuuccauagug

SEQ ID NO: 235707 - RNA, 19 nt, Artificial Sequence
  Description of Artificial Sequence: Synthetic oligonucleotide
ggaaugaccuguuccacca

SEQ ID NO: 235708 - RNA, 19 nt, Artificial Sequence
  Description of Artificial Sequence: Synthetic oligonucleotide
ggaucacccgugcugacag

SEQ ID NO: 235709 - RNA, 19 nt, Artificial Sequence
  Description of Artificial Sequence: Synthetic oligonucleotide
aaacggcuugacucacuga

SEQ ID NO: 235710 - RNA, 19 nt, Artificial Sequence
  Description of Artificial Sequence: Synthetic oligonucleotide
uggugaacucccauuucau

SEQ ID NO: 235711 - RNA, 19 nt, Artificial Sequence
  Description of Artificial Sequence: Synthetic oligonucleotide
ugugucagccuggaucccc

SEQ ID NO: 235712 - RNA, 19 nt, Artificial Sequence
  Description of Artificial Sequence: Synthetic oligonucleotide
gaggguuagacaaaauagu

SEQ ID NO: 235713 - RNA, 19 nt, Artificial Sequence
  Description of Artificial Sequence: Synthetic oligonucleotide
uuccgguccucuuuguauc

SEQ ID NO: 235714 - RNA, 19 nt, Artificial Sequence
  Description of Artificial Sequence: Synthetic oligonucleotide
cuggugaacucccauuuca

SEQ ID NO: 235715 - RNA, 19 nt, Artificial Sequence
  Description of Artificial Sequence: Synthetic oligonucleotide
ugcugacagcuucauguaa

SEQ ID NO: 235716 - RNA, 19 nt, Artificial Sequence
  Description of Artificial Sequence: Synthetic oligonucleotide
ugcccuuggcuguauuccc

SEQ ID NO: 235717 - RNA, 19 nt, Artificial Sequence
  Description of Artificial Sequence: Synthetic oligonucleotide
ugucuaaagcugguaguaa

SEQ ID NO: 235718 - RNA, 19 nt, Artificial Sequence
  Description of Artificial Sequence: Synthetic oligonucleotide
aggucgcuaucaaaacggc

SEQ ID NO: 235719 - RNA, 19 nt, Artificial Sequence
  Description of Artificial Sequence: Synthetic oligonucleotide
gugggaaauccuucaccag

SEQ ID NO: 235720 - RNA, 19 nt, Artificial Sequence
  Description of Artificial Sequence: Synthetic oligonucleotide
guauugcuacugaugggag

SEQ ID NO: 235721 - RNA, 19 nt, Artificial Sequence
  Description of Artificial Sequence: Synthetic oligonucleotide
aguguaggcccucugucua

SEQ ID NO: 235722 - RNA, 19 nt, Artificial Sequence
  Description of Artificial Sequence: Synthetic oligonucleotide
uuccauugucuugaacaug

SEQ ID NO: 235723 - RNA, 19 nt, Artificial Sequence
  Description of Artificial Sequence: Synthetic oligonucleotide
ugaccucggaagcuguguc

SEQ ID NO: 235724 - RNA, 19 nt, Artificial Sequence
  Description of Artificial Sequence: Synthetic oligonucleotide
aggguuagacaaaauaguu

SEQ ID NO: 235725 - RNA, 19 nt, Artificial Sequence
  Description of Artificial Sequence: Synthetic oligonucleotide
ggaccguggauucucuucc

SEQ ID NO: 235726 - RNA, 19 nt, Artificial Sequence
  Description of Artificial Sequence: Synthetic oligonucleotide
aguuagccauaaucuaaaa

SEQ ID NO: 235727 - RNA, 19 nt, Artificial Sequence
  Description of Artificial Sequence: Synthetic oligonucleotide
uaauaauggccauguccua

SEQ ID NO: 235728 - RNA, 19 nt, Artificial Sequence
  Description of Artificial Sequence: Synthetic oligonucleotide
gguauuacuaccaugugau

SEQ ID NO: 235729 - RNA, 19 nt, Artificial Sequence
  Description of Artificial Sequence: Synthetic oligonucleotide
uaggacucggggauuucaa

SEQ ID NO: 235730 - RNA, 19 nt, Artificial Sequence
  Description of Artificial Sequence: Synthetic oligonucleotide
ucaguagugagguccccuu

SEQ ID NO: 235731 - RNA, 19 nt, Artificial Sequence
  Description of Artificial Sequence: Synthetic oligonucleotide
auuuuguguagcagcucag

SEQ ID NO: 235732 - RNA, 19 nt, Artificial Sequence
  Description of Artificial Sequence: Synthetic oligonucleotide
uggaggaugcugcucccaa

SEQ ID NO: 235733 - RNA, 19 nt, Artificial Sequence
  Description of Artificial Sequence: Synthetic oligonucleotide
gucuguuagcaauagguau

SEQ ID NO: 235734 - RNA, 19 nt, Artificial Sequence
  Description of Artificial Sequence: Synthetic oligonucleotide
gauggcccucucauacugg

SEQ ID NO: 235735 - RNA, 19 nt, Artificial Sequence
  Description of Artificial Sequence: Synthetic oligonucleotide
gaaauccggggcucaagaa

SEQ ID NO: 235736 - RNA, 19 nt, Artificial Sequence
  Description of Artificial Sequence: Synthetic oligonucleotide
guuagccauaaucuaaaau

SEQ ID NO: 235737 - RNA, 19 nt, Artificial Sequence
  Description of Artificial Sequence: Synthetic oligonucleotide
ccuucgagggccauggaug

SEQ ID NO: 235738 - RNA, 19 nt, Artificial Sequence
  Description of Artificial Sequence: Synthetic oligonucleotide
gaccugcaagccaggauag

SEQ ID NO: 235739 - RNA, 19 nt, Artificial Sequence
  Description of Artificial Sequence: Synthetic oligonucleotide
uccggaucacccgugcuga

SEQ ID NO: 235740 - RNA, 19 nt, Artificial Sequence
  Description of Artificial Sequence: Synthetic oligonucleotide
ugagcgcugguucgugcca

SEQ ID NO: 235741 - RNA, 19 nt, Artificial Sequence
  Description of Artificial Sequence: Synthetic oligonucleotide
uccccuagcugccccuaag

SEQ ID NO: 235742 - RNA, 19 nt, Artificial Sequence
  Description of Artificial Sequence: Synthetic oligonucleotide
auuagcugccuucgguuua

SEQ ID NO: 235743 - RNA, 19 nt, Artificial Sequence
  Description of Artificial Sequence: Synthetic oligonucleotide
agccauaaucuaaaauaga

SEQ ID NO: 235744 - RNA, 19 nt, Artificial Sequence
  Description of Artificial Sequence: Synthetic oligonucleotide
gggaaugaccuguuccacc

SEQ ID NO: 235745 - RNA, 19 nt, Artificial Sequence
  Description of Artificial Sequence: Synthetic oligonucleotide
gugagaaccagccuuggau

SEQ ID NO: 235746 - RNA, 19 nt, Artificial Sequence
  Description of Artificial Sequence: Synthetic oligonucleotide
cuacuaacugcagggcuug

SEQ ID NO: 235747 - RNA, 19 nt, Artificial Sequence
  Description of Artificial Sequence: Synthetic oligonucleotide
aggauagcuaauggaagaa

SEQ ID NO: 235748 - RNA, 19 nt, Artificial Sequence
  Description of Artificial Sequence: Synthetic oligonucleotide
accuuguauugcuacugau

SEQ ID NO: 235749 - RNA, 19 nt, Artificial Sequence
  Description of Artificial Sequence: Synthetic oligonucleotide
caugauaggacucggggau

SEQ ID NO: 235750 - RNA, 19 nt, Artificial Sequence
  Description of Artificial Sequence: Synthetic oligonucleotide
cauagugguuaggaggcuc

SEQ ID NO: 235751 - RNA, 19 nt, Artificial Sequence
  Description of Artificial Sequence: Synthetic oligonucleotide
acgguggcacacucaguag

SEQ ID NO: 235752 - RNA, 19 nt, Artificial Sequence
  Description of Artificial Sequence: Synthetic oligonucleotide
auagugguuaggaggcucu

SEQ ID NO: 235753 - RNA, 19 nt, Artificial Sequence
  Description of Artificial Sequence: Synthetic oligonucleotide
acugaucaaccucgaaguu

SEQ ID NO: 235754 - RNA, 19 nt, Artificial Sequence
  Description of Artificial Sequence: Synthetic oligonucleotide
guauuacuaccaugugauc

SEQ ID NO: 235755 - RNA, 19 nt, Artificial Sequence
  Description of Artificial Sequence: Synthetic oligonucleotide
caggauuagcugccuucgg

SEQ ID NO: 235756 - RNA, 19 nt, Artificial Sequence
  Description of Artificial Sequence: Synthetic oligonucleotide
uagcugccccuaaggacag

SEQ ID NO: 235757 - RNA, 19 nt, Artificial Sequence
  Description of Artificial Sequence: Synthetic oligonucleotide
auaggacucggggauuuca

SEQ ID NO: 235758 - RNA, 19 nt, Artificial Sequence
  Description of Artificial Sequence: Synthetic oligonucleotide
gucgugagaaccagccuug

SEQ ID NO: 235759 - RNA, 19 nt, Artificial Sequence
  Description of Artificial Sequence: Synthetic oligonucleotide
agacgcaaaaugggaaggu

SEQ ID NO: 235760 - RNA, 19 nt, Artificial Sequence
  Description of Artificial Sequence: Synthetic oligonucleotide
gaccuuccauagugguuag

SEQ ID NO: 235761 - RNA, 19 nt, Artificial Sequence
  Description of Artificial Sequence: Synthetic oligonucleotide
ucgugagaaccagccuugg

SEQ ID NO: 235762 - RNA, 19 nt, Artificial Sequence
  Description of Artificial Sequence: Synthetic oligonucleotide
accguggauucucuuccug

SEQ ID NO: 235763 - RNA, 19 nt, Artificial Sequence
  Description of Artificial Sequence: Synthetic oligonucleotide
ucucccggugggaaauccu

SEQ ID NO: 235764 - RNA, 19 nt, Artificial Sequence
  Description of Artificial Sequence: Synthetic oligonucleotide
gagaugggaccugccaaug

SEQ ID NO: 235765 - RNA, 19 nt, Artificial Sequence
  Description of Artificial Sequence: Synthetic oligonucleotide
agaagaaguguaacaggaa

SEQ ID NO: 235766 - RNA, 19 nt, Artificial Sequence
  Description of Artificial Sequence: Synthetic oligonucleotide
ggagucgucacuuuucccu

SEQ ID NO: 235767 - RNA, 19 nt, Artificial Sequence
  Description of Artificial Sequence: Synthetic oligonucleotide
ugggaaugaccuguuccac

SEQ ID NO: 235768 - RNA, 19 nt, Artificial Sequence
  Description of Artificial Sequence: Synthetic oligonucleotide
acgcaaaaugggaagguau

SEQ ID NO: 235769 - RNA, 19 nt, Artificial Sequence
  Description of Artificial Sequence: Synthetic oligonucleotide
gaguaauaauggccauguc

SEQ ID NO: 235770 - RNA, 19 nt, Artificial Sequence
  Description of Artificial Sequence: Synthetic oligonucleotide
cagccauuaacguuuccaa

SEQ ID NO: 235771 - RNA, 19 nt, Artificial Sequence
  Description of Artificial Sequence: Synthetic oligonucleotide
gcuaauggaagaaggugac

SEQ ID NO: 235772 - RNA, 19 nt, Artificial Sequence
  Description of Artificial Sequence: Synthetic oligonucleotide
ugugaccugcaagccagga

SEQ ID NO: 235773 - RNA, 19 nt, Artificial Sequence
  Description of Artificial Sequence: Synthetic oligonucleotide
uugcaggacuguguauacc

SEQ ID NO: 235774 - RNA, 19 nt, Artificial Sequence
  Description of Artificial Sequence: Synthetic oligonucleotide
aucacccgugcugacagcu

SEQ ID NO: 235775 - RNA, 19 nt, Artificial Sequence
  Description of Artificial Sequence: Synthetic oligonucleotide
ggagccuuagcuccuguuc

SEQ ID NO: 235776 - RNA, 19 nt, Artificial Sequence
  Description of Artificial Sequence: Synthetic oligonucleotide
aggaaguguaggcccucug

SEQ ID NO: 235777 - RNA, 19 nt, Artificial Sequence
  Description of Artificial Sequence: Synthetic oligonucleotide
ccuguacauauccucuuag

SEQ ID NO: 235778 - RNA, 19 nt, Artificial Sequence
  Description of Artificial Sequence: Synthetic oligonucleotide
caaauguaauccuugcguu

SEQ ID NO: 235779 - RNA, 19 nt, Artificial Sequence
  Description of Artificial Sequence: Synthetic oligonucleotide
augggaccugccaaugcuc

SEQ ID NO: 235780 - RNA, 19 nt, Artificial Sequence
  Description of Artificial Sequence: Synthetic oligonucleotide
ugcggacucaagucagguc

SEQ ID NO: 235781 - RNA, 19 nt, Artificial Sequence
  Description of Artificial Sequence: Synthetic oligonucleotide
ccuagcugccccuaaggac

SEQ ID NO: 235782 - RNA, 19 nt, Artificial Sequence
  Description of Artificial Sequence: Synthetic oligonucleotide
ucguaaccauuaacaacuu

SEQ ID NO: 235783 - RNA, 19 nt, Artificial Sequence
  Description of Artificial Sequence: Synthetic oligonucleotide
uugcuacugaugggaguag

SEQ ID NO: 235784 - RNA, 19 nt, Artificial Sequence
  Description of Artificial Sequence: Synthetic oligonucleotide
ggugaacucccauuucauc

SEQ ID NO: 235785 - RNA, 19 nt, Artificial Sequence
  Description of Artificial Sequence: Synthetic oligonucleotide
uugcggacucaagucaggu

SEQ ID NO: 235786 - RNA, 19 nt, Artificial Sequence
  Description of Artificial Sequence: Synthetic oligonucleotide
gcauguuccuuccauuguc

SEQ ID NO: 235787 - RNA, 19 nt, Artificial Sequence
  Description of Artificial Sequence: Synthetic oligonucleotide
cauuaacguuuccaaaugu

SEQ ID NO: 235788 - RNA, 19 nt, Artificial Sequence
  Description of Artificial Sequence: Synthetic oligonucleotide
uacuccauguuagcucccu

SEQ ID NO: 235789 - RNA, 19 nt, Artificial Sequence
  Description of Artificial Sequence: Synthetic oligonucleotide
ugcuacugaugggaguagu

SEQ ID NO: 235790 - RNA, 19 nt, Artificial Sequence
  Description of Artificial Sequence: Synthetic oligonucleotide
uggcaacacugacuguauc

SEQ ID NO: 235791 - RNA, 19 nt, Artificial Sequence
  Description of Artificial Sequence: Synthetic oligonucleotide
ggcuaaggcaacauccgug

SEQ ID NO: 235792 - RNA, 19 nt, Artificial Sequence
  Description of Artificial Sequence: Synthetic oligonucleotide
ggaguaauaauggccaugu

SEQ ID NO: 235793 - RNA, 19 nt, Artificial Sequence
  Description of Artificial Sequence: Synthetic oligonucleotide
ccaaauguaauccuugcgu

SEQ ID NO: 235794 - RNA, 19 nt, Artificial Sequence
  Description of Artificial Sequence: Synthetic oligonucleotide
uguacguauuuugguuauc

SEQ ID NO: 235795 - RNA, 19 nt, Artificial Sequence
  Description of Artificial Sequence: Synthetic oligonucleotide
ucccggugggaaauccuuc

SEQ ID NO: 235796 - RNA, 19 nt, Artificial Sequence
  Description of Artificial Sequence: Synthetic oligonucleotide
uggucacaucugcuuuaug

SEQ ID NO: 235797 - RNA, 19 nt, Artificial Sequence
  Description of Artificial Sequence: Synthetic oligonucleotide
gacuagguucucugcuguc

SEQ ID NO: 235798 - RNA, 19 nt, Artificial Sequence
  Description of Artificial Sequence: Synthetic oligonucleotide
aggacucggggauuucaaa

SEQ ID NO: 235799 - RNA, 19 nt, Artificial Sequence
  Description of Artificial Sequence: Synthetic oligonucleotide
cauuugaugcugguccuga

SEQ ID NO: 235800 - RNA, 19 nt, Artificial Sequence
  Description of Artificial Sequence: Synthetic oligonucleotide
uccucaguguguggaguga

SEQ ID NO: 235801 - RNA, 19 nt, Artificial Sequence
  Description of Artificial Sequence: Synthetic oligonucleotide
ugccugucgugagaaccag

SEQ ID NO: 235802 - RNA, 19 nt, Artificial Sequence
  Description of Artificial Sequence: Synthetic oligonucleotide
cuacagccauuaacguuuc

SEQ ID NO: 235803 - RNA, 19 nt, Artificial Sequence
  Description of Artificial Sequence: Synthetic oligonucleotide
cuacuccauguuagcuccc

SEQ ID NO: 235804 - RNA, 19 nt, Artificial Sequence
  Description of Artificial Sequence: Synthetic oligonucleotide
cucuauuuugacagggaau

SEQ ID NO: 235805 - RNA, 19 nt, Artificial Sequence
  Description of Artificial Sequence: Synthetic oligonucleotide
ucugaucgucagcucuuuu

SEQ ID NO: 235806 - RNA, 19 nt, Artificial Sequence
  Description of Artificial Sequence: Synthetic oligonucleotide
gccauuaacguuuccaaau

SEQ ID NO: 235807 - RNA, 19 nt, Artificial Sequence
  Description of Artificial Sequence: Synthetic oligonucleotide
gucgcuaucaaaacggcuu

SEQ ID NO: 235808 - RNA, 19 nt, Artificial Sequence
  Description of Artificial Sequence: Synthetic oligonucleotide
caguuugaugaagucucuc

SEQ ID NO: 235809 - RNA, 19 nt, Artificial Sequence
  Description of Artificial Sequence: Synthetic oligonucleotide
gcuaucaaaacggcuugac

SEQ ID NO: 235810 - RNA, 19 nt, Artificial Sequence
  Description of Artificial Sequence: Synthetic oligonucleotide
ugaggucgaugaugggaau

SEQ ID NO: 235811 - RNA, 19 nt, Artificial Sequence
  Description of Artificial Sequence: Synthetic oligonucleotide
ucucugucuaaagcuggua

SEQ ID NO: 235812 - RNA, 19 nt, Artificial Sequence
  Description of Artificial Sequence: Synthetic oligonucleotide
gacuccaguggauuccggu

SEQ ID NO: 235813 - RNA, 19 nt, Artificial Sequence
  Description of Artificial Sequence: Synthetic oligonucleotide
gacgcaaaaugggaaggua

SEQ ID NO: 235814 - RNA, 19 nt, Artificial Sequence
  Description of Artificial Sequence: Synthetic oligonucleotide
cugucuaaagcugguagua

SEQ ID NO: 235815 - RNA, 19 nt, Artificial Sequence
  Description of Artificial Sequence: Synthetic oligonucleotide
gaucacccgugcugacagc

SEQ ID NO: 235816 - RNA, 19 nt, Artificial Sequence
  Description of Artificial Sequence: Synthetic oligonucleotide
gguggcacacucaguagug

SEQ ID NO: 235817 - RNA, 19 nt, Artificial Sequence
  Description of Artificial Sequence: Synthetic oligonucleotide
ccuaaggacaggauuagcu

SEQ ID NO: 235818 - RNA, 19 nt, Artificial Sequence
  Description of Artificial Sequence: Synthetic oligonucleotide
gccuuugcggacucaaguc

SEQ ID NO: 235819 - RNA, 19 nt, Artificial Sequence
  Description of Artificial Sequence: Synthetic oligonucleotide
gugaucagcgcagccugug

SEQ ID NO: 235820 - RNA, 19 nt, Artificial Sequence
  Description of Artificial Sequence: Synthetic oligonucleotide
cauagaaauccggggcuca

SEQ ID NO: 235821 - RNA, 19 nt, Artificial Sequence
  Description of Artificial Sequence: Synthetic oligonucleotide
cacccgugcugacagcuuc

SEQ ID NO: 235822 - RNA, 19 nt, Artificial Sequence
  Description of Artificial Sequence: Synthetic oligonucleotide
ggugacuagguucucugcu

SEQ ID NO: 235823 - RNA, 19 nt, Artificial Sequence
  Description of Artificial Sequence: Synthetic oligonucleotide
uggauuccccuagcugccc

SEQ ID NO: 235824 - RNA, 19 nt, Artificial Sequence
  Description of Artificial Sequence: Synthetic oligonucleotide
gggaccguggauucucuuc

SEQ ID NO: 235825 - RNA, 19 nt, Artificial Sequence
  Description of Artificial Sequence: Synthetic oligonucleotide
auccguggucaucuguaua

SEQ ID NO: 235826 - RNA, 19 nt, Artificial Sequence
  Description of Artificial Sequence: Synthetic oligonucleotide
gcuacagccauuaacguuu

SEQ ID NO: 235827 - RNA, 19 nt, Artificial Sequence
  Description of Artificial Sequence: Synthetic oligonucleotide
guucgugccaugaggucga

SEQ ID NO: 235828 - RNA, 19 nt, Artificial Sequence
  Description of Artificial Sequence: Synthetic oligonucleotide
gguccugcaccuuugcaua

SEQ ID NO: 235829 - RNA, 19 nt, Artificial Sequence
  Description of Artificial Sequence: Synthetic oligonucleotide
ccccuugagcaccaaacug

SEQ ID NO: 235830 - RNA, 19 nt, Artificial Sequence
  Description of Artificial Sequence: Synthetic oligonucleotide
uguccaucccuggccauuu

SEQ ID NO: 235831 - RNA, 19 nt, Artificial Sequence
  Description of Artificial Sequence: Synthetic oligonucleotide
gauaggacucggggauuuc

SEQ ID NO: 235832 - RNA, 19 nt, Artificial Sequence
  Description of Artificial Sequence: Synthetic oligonucleotide
agucgucacuuuucccuuu

SEQ ID NO: 235833 - RNA, 19 nt, Artificial Sequence
  Description of Artificial Sequence: Synthetic oligonucleotide
cuucgagggccauggaugu

SEQ ID NO: 235834 - RNA, 19 nt, Artificial Sequence
  Description of Artificial Sequence: Synthetic oligonucleotide
ggauuccccuagcugcccc

SEQ ID NO: 235835 - RNA, 19 nt, Artificial Sequence
  Description of Artificial Sequence: Synthetic oligonucleotide
uggagugagguggcuuaaa

SEQ ID NO: 235836 - RNA, 19 nt, Artificial Sequence
  Description of Artificial Sequence: Synthetic oligonucleotide
ccuuugcggacucaaguca

SEQ ID NO: 235837 - RNA, 19 nt, Artificial Sequence
  Description of Artificial Sequence: Synthetic oligonucleotide
ccccuccauacucugauuc

SEQ ID NO: 235838 - RNA, 19 nt, Artificial Sequence
  Description of Artificial Sequence: Synthetic oligonucleotide
cuuggcgucucugucuaaa

SEQ ID NO: 235839 - RNA, 19 nt, Artificial Sequence
  Description of Artificial Sequence: Synthetic oligonucleotide
caaugcucuccuccccuca

SEQ ID NO: 235840 - RNA, 19 nt, Artificial Sequence
  Description of Artificial Sequence: Synthetic oligonucleotide
ggucuguuagcaauaggua

SEQ ID NO: 235841 - RNA, 19 nt, Artificial Sequence
  Description of Artificial Sequence: Synthetic oligonucleotide
uucugaucgucagcucuuu

SEQ ID NO: 235842 - RNA, 19 nt, Artificial Sequence
  Description of Artificial Sequence: Synthetic oligonucleotide
uccucuuagcugggguaaa

SEQ ID NO: 235843 - RNA, 19 nt, Artificial Sequence
  Description of Artificial Sequence: Synthetic oligonucleotide
gcucuuuuggccuuccaau

SEQ ID NO: 235844 - RNA, 19 nt, Artificial Sequence
  Description of Artificial Sequence: Synthetic oligonucleotide
uuccccuagcugccccuaa

SEQ ID NO: 235845 - RNA, 19 nt, Artificial Sequence
  Description of Artificial Sequence: Synthetic oligonucleotide
uagugguuaggaggcucuc

SEQ ID NO: 235846 - RNA, 19 nt, Artificial Sequence
  Description of Artificial Sequence: Synthetic oligonucleotide
agguggcuuaaaacuauua

SEQ ID NO: 235847 - RNA, 19 nt, Artificial Sequence
  Description of Artificial Sequence: Synthetic oligonucleotide
gugcuacagccauuaacgu

SEQ ID NO: 235848 - RNA, 19 nt, Artificial Sequence
  Description of Artificial Sequence: Synthetic oligonucleotide
ucacccgugcugacagcuu

SEQ ID NO: 235849 - RNA, 19 nt, Artificial Sequence
  Description of Artificial Sequence: Synthetic oligonucleotide
gcuacugaugggaguaguc

SEQ ID NO: 235850 - RNA, 19 nt, Artificial Sequence
  Description of Artificial Sequence: Synthetic oligonucleotide
cuguacguauuuugguuau

SEQ ID NO: 235851 - RNA, 19 nt, Artificial Sequence
  Description of Artificial Sequence: Synthetic oligonucleotide
cagagcgggcaccgccacg

SEQ ID NO: 235852 - RNA, 19 nt, Artificial Sequence
  Description of Artificial Sequence: Synthetic oligonucleotide
ccaugugaucagcgcagcc

SEQ ID NO: 235853 - RNA, 19 nt, Artificial Sequence
  Description of Artificial Sequence: Synthetic oligonucleotide
ccggggcucaagaauuuug

SEQ ID NO: 235854 - RNA, 19 nt, Artificial Sequence
  Description of Artificial Sequence: Synthetic oligonucleotide
caugucugauuaagaugua

SEQ ID NO: 235855 - RNA, 19 nt, Artificial Sequence
  Description of Artificial Sequence: Synthetic oligonucleotide
ggccgugggguuguucacg

SEQ ID NO: 235856 - RNA, 19 nt, Artificial Sequence
  Description of Artificial Sequence: Synthetic oligonucleotide
gcuuuauccuagaaaccaa

SEQ ID NO: 235857 - RNA, 19 nt, Artificial Sequence
  Description of Artificial Sequence: Synthetic oligonucleotide
gcuguaggucgcuaucaaa

SEQ ID NO: 235858 - RNA, 19 nt, Artificial Sequence
  Description of Artificial Sequence: Synthetic oligonucleotide
cggucuguuagcaauaggu

SEQ ID NO: 235859 - RNA, 19 nt, Artificial Sequence
  Description of Artificial Sequence: Synthetic oligonucleotide
ucgugccaugaggucgaug

SEQ ID NO: 235860 - RNA, 19 nt, Artificial Sequence
  Description of Artificial Sequence: Synthetic oligonucleotide
cagacugaucaaccucgaa

SEQ ID NO: 235861 - RNA, 19 nt, Artificial Sequence
  Description of Artificial Sequence: Synthetic oligonucleotide
ggauguguugugguagucu

SEQ ID NO: 235862 - RNA, 19 nt, Artificial Sequence
  Description of Artificial Sequence: Synthetic oligonucleotide
uccggggcucaagaauuuu

SEQ ID NO: 235863 - RNA, 19 nt, Artificial Sequence
  Description of Artificial Sequence: Synthetic oligonucleotide
ccucaguguguggagugag

SEQ ID NO: 235864 - RNA, 19 nt, Artificial Sequence
  Description of Artificial Sequence: Synthetic oligonucleotide
gccccuaaggacaggauua

SEQ ID NO: 235865 - RNA, 19 nt, Artificial Sequence
  Description of Artificial Sequence: Synthetic oligonucleotide
agggagagugggaacucuu

SEQ ID NO: 235866 - RNA, 19 nt, Artificial Sequence
  Description of Artificial Sequence: Synthetic oligonucleotide
aggggcggucuguuagcaa

SEQ ID NO: 235867 - RNA, 19 nt, Artificial Sequence
  Description of Artificial Sequence: Synthetic oligonucleotide
gaccguggauucucuuccu

SEQ ID NO: 235868 - RNA, 19 nt, Artificial Sequence
  Description of Artificial Sequence: Synthetic oligonucleotide
gcuuuaugucgcagcaaga

SEQ ID NO: 235869 - RNA, 19 nt, Artificial Sequence
  Description of Artificial Sequence: Synthetic oligonucleotide
ccaggggcggucuguuagc

SEQ ID NO: 235870 - RNA, 19 nt, Artificial Sequence
  Description of Artificial Sequence: Synthetic oligonucleotide
guggucaucuguauaucuu

SEQ ID NO: 235871 - RNA, 19 nt, Artificial Sequence
  Description of Artificial Sequence: Synthetic oligonucleotide
ccccuaaggacaggauuag

SEQ ID NO: 235872 - RNA, 19 nt, Artificial Sequence
  Description of Artificial Sequence: Synthetic oligonucleotide
ggggcggucuguuagcaau

SEQ ID NO: 235873 - RNA, 19 nt, Artificial Sequence
  Description of Artificial Sequence: Synthetic oligonucleotide
aaggugcccuuggcuguau

SEQ ID NO: 235874 - RNA, 19 nt, Artificial Sequence
  Description of Artificial Sequence: Synthetic oligonucleotide
gggacugaucccuccauuu

SEQ ID NO: 235875 - RNA, 19 nt, Artificial Sequence
  Description of Artificial Sequence: Synthetic oligonucleotide
gcccuuggcuguauucccc

SEQ ID NO: 235876 - RNA, 19 nt, Artificial Sequence
  Description of Artificial Sequence: Synthetic oligonucleotide
gagguccccuugagcacca

SEQ ID NO: 235877 - RNA, 19 nt, Artificial Sequence
  Description of Artificial Sequence: Synthetic oligonucleotide
cggugacuagguucucugc

SEQ ID NO: 235878 - RNA, 19 nt, Artificial Sequence
  Description of Artificial Sequence: Synthetic oligonucleotide
ccucggaagcugugucagc

SEQ ID NO: 235879 - RNA, 19 nt, Artificial Sequence
  Description of Artificial Sequence: Synthetic oligonucleotide
cugggguaaagggcaugga

SEQ ID NO: 235880 - RNA, 19 nt, Artificial Sequence
  Description of Artificial Sequence: Synthetic oligonucleotide
gcaaggugcccuuggcugu

SEQ ID NO: 235881 - RNA, 19 nt, Artificial Sequence
  Description of Artificial Sequence: Synthetic oligonucleotide
cauccguggucaucuguau

SEQ ID NO: 235882 - RNA, 19 nt, Artificial Sequence
  Description of Artificial Sequence: Synthetic oligonucleotide
gagguggcuuaaaacuauu

SEQ ID NO: 235883 - RNA, 19 nt, Artificial Sequence
  Description of Artificial Sequence: Synthetic oligonucleotide
cugucgugagaaccagccu

SEQ ID NO: 235884 - RNA, 19 nt, Artificial Sequence
  Description of Artificial Sequence: Synthetic oligonucleotide
gcaaauaguuagccauaau

SEQ ID NO: 235885 - RNA, 19 nt, Artificial Sequence
  Description of Artificial Sequence: Synthetic oligonucleotide
gucgucacuuuucccuuuu

SEQ ID NO: 235886 - RNA, 19 nt, Artificial Sequence
  Description of Artificial Sequence: Synthetic oligonucleotide
caggggcggucuguuagca

SEQ ID NO: 235887 - RNA, 19 nt, Artificial Sequence
  Description of Artificial Sequence: Synthetic oligonucleotide
caucgggugugauggccgu

SEQ ID NO: 235888 - RNA, 19 nt, Artificial Sequence
  Description of Artificial Sequence: Synthetic oligonucleotide
ggucgcuaucaaaacggcu

SEQ ID NO: 235889 - RNA, 19 nt, Artificial Sequence
  Description of Artificial Sequence: Synthetic oligonucleotide
cucccggugggaaauccuu

SEQ ID NO: 235890 - RNA, 19 nt, Artificial Sequence
  Description of Artificial Sequence: Synthetic oligonucleotide
gccuugcaaaaugagcgcu

SEQ ID NO: 235891 - RNA, 19 nt, Artificial Sequence
  Description of Artificial Sequence: Synthetic oligonucleotide
aggugcccuuggcuguauu

SEQ ID NO: 235892 - RNA, 19 nt, Artificial Sequence
  Description of Artificial Sequence: Synthetic oligonucleotide
gcauaaggaaggggcagcu

SEQ ID NO: 235893 - RNA, 19 nt, Artificial Sequence
  Description of Artificial Sequence: Synthetic oligonucleotide
cucuaacaauaggccaugu

SEQ ID NO: 235894 - RNA, 19 nt, Artificial Sequence
  Description of Artificial Sequence: Synthetic oligonucleotide
gccugucgugagaaccagc

SEQ ID NO: 235895 - RNA, 19 nt, Artificial Sequence
  Description of Artificial Sequence: Synthetic oligonucleotide
cacggugacuagguucucu

SEQ ID NO: 235896 - RNA, 19 nt, Artificial Sequence
  Description of Artificial Sequence: Synthetic oligonucleotide
uucgugccaugaggucgau

SEQ ID NO: 235897 - RNA, 19 nt, Artificial Sequence
  Description of Artificial Sequence: Synthetic oligonucleotide
caaggugcccuuggcugua

SEQ ID NO: 235898 - RNA, 19 nt, Artificial Sequence
  Description of Artificial Sequence: Synthetic oligonucleotide
gggcuucauaacugugggu

SEQ ID NO: 235899 - RNA, 19 nt, Artificial Sequence
  Description of Artificial Sequence: Synthetic oligonucleotide
ccagagcgggcaccgccac

SEQ ID NO: 235900 - RNA, 19 nt, Artificial Sequence
  Description of Artificial Sequence: Synthetic oligonucleotide
ccguggucaucuguauauc

SEQ ID NO: 235901 - RNA, 19 nt, Artificial Sequence
  Description of Artificial Sequence: Synthetic oligonucleotide
gccgccccggacagaaaug

SEQ ID NO: 235902 - RNA, 19 nt, Artificial Sequence
  Description of Artificial Sequence: Synthetic oligonucleotide
guguggagugagguggcuu

SEQ ID NO: 235903 - RNA, 19 nt, Artificial Sequence
  Description of Artificial Sequence: Synthetic oligonucleotide
gagcgcugguucgugccau

SEQ ID NO: 235904 - RNA, 19 nt, Artificial Sequence
  Description of Artificial Sequence: Synthetic oligonucleotide
guuuagccuggaggaugcu

SEQ ID NO: 235905 - RNA, 19 nt, Artificial Sequence
  Description of Artificial Sequence: Synthetic oligonucleotide
caccuucgagggccaugga

SEQ ID NO: 235906 - RNA, 19 nt, Artificial Sequence
  Description of Artificial Sequence: Synthetic oligonucleotide
ccggaucacccgugcugac

SEQ ID NO: 235907 - RNA, 19 nt, Artificial Sequence
  Description of Artificial Sequence: Synthetic oligonucleotide
gcaccgccacggugacuag

SEQ ID NO: 235908 - RNA, 19 nt, Artificial Sequence
  Description of Artificial Sequence: Synthetic oligonucleotide
gggcggucuguuagcaaua

SEQ ID NO: 235909 - RNA, 19 nt, Artificial Sequence
  Description of Artificial Sequence: Synthetic oligonucleotide
gagcgggcaccgccacggu

SEQ ID NO: 235910 - RNA, 19 nt, Artificial Sequence
  Description of Artificial Sequence: Synthetic oligonucleotide
cgguggcacacucaguagu

SEQ ID NO: 235911 - RNA, 19 nt, Artificial Sequence
  Description of Artificial Sequence: Synthetic oligonucleotide
cgccccggacagaaauguc

SEQ ID NO: 235912 - RNA, 19 nt, Artificial Sequence
  Description of Artificial Sequence: Synthetic oligonucleotide
gucuagggucucagcugau

SEQ ID NO: 235913 - RNA, 19 nt, Artificial Sequence
  Description of Artificial Sequence: Synthetic oligonucleotide
gcaagccaggauagcuaau

SEQ ID NO: 235914 - RNA, 19 nt, Artificial Sequence
  Description of Artificial Sequence: Synthetic oligonucleotide
ggggaccguggauucucuu

SEQ ID NO: 235915 - RNA, 19 nt, Artificial Sequence
  Description of Artificial Sequence: Synthetic oligonucleotide
ccgccccggacagaaaugu

SEQ ID NO: 235916 - RNA, 19 nt, Artificial Sequence
  Description of Artificial Sequence: Synthetic oligonucleotide
cgagggccauggauguguu

SEQ ID NO: 235917 - RNA, 19 nt, Artificial Sequence
  Description of Artificial Sequence: Synthetic oligonucleotide
aaaacuauaauugugagau

SEQ ID NO: 235918 - RNA, 19 nt, Artificial Sequence
  Description of Artificial Sequence: Synthetic oligonucleotide
auaguuuuagcauaaacag

SEQ ID NO: 235919 - RNA, 19 nt, Artificial Sequence
  Description of Artificial Sequence: Synthetic oligonucleotide
aacagaaauacaaacggcc

SEQ ID NO: 235920 - RNA, 19 nt, Artificial Sequence
  Description of Artificial Sequence: Synthetic oligonucleotide
auucuauucacugagagac

SEQ ID NO: 235921 - RNA, 19 nt, Artificial Sequence
  Description of Artificial Sequence: Synthetic oligonucleotide
uguuugauaguuuaguuug

SEQ ID NO: 235922 - RNA, 19 nt, Artificial Sequence
  Description of Artificial Sequence: Synthetic oligonucleotide
uucaauacaugcaauaaug

SEQ ID NO: 235923 - RNA, 19 nt, Artificial Sequence
  Description of Artificial Sequence: Synthetic oligonucleotide
gauaguuuaguuugguacg

SEQ ID NO: 235924 - RNA, 19 nt, Artificial Sequence
  Description of Artificial Sequence: Synthetic oligonucleotide
ugagugaugaauuuagcag

SEQ ID NO: 235925 - RNA, 19 nt, Artificial Sequence
  Description of Artificial Sequence: Synthetic oligonucleotide
acaaacagaauuuagggcu

SEQ ID NO: 235926 - RNA, 19 nt, Artificial Sequence
  Description of Artificial Sequence: Synthetic oligonucleotide
ugaucuuucacauaggcuc

SEQ ID NO: 235927 - RNA, 19 nt, Artificial Sequence
  Description of Artificial Sequence: Synthetic oligonucleotide
ucaauacaugcaauaaugg

SEQ ID NO: 235928 - RNA, 19 nt, Artificial Sequence
  Description of Artificial Sequence: Synthetic oligonucleotide
uuaucauaugaccacacca

SEQ ID NO: 235929 - RNA, 19 nt, Artificial Sequence
  Description of Artificial Sequence: Synthetic oligonucleotide
ugauaguuuaguuugguac

SEQ ID NO: 235930 - RNA, 19 nt, Artificial Sequence
  Description of Artificial Sequence: Synthetic oligonucleotide
uauucgaucaucuuauaga

SEQ ID NO: 235931 - RNA, 19 nt, Artificial Sequence
  Description of Artificial Sequence: Synthetic oligonucleotide
uuguuaacuagcaaaauau

SEQ ID NO: 235932 - RNA, 19 nt, Artificial Sequence
  Description of Artificial Sequence: Synthetic oligonucleotide
cuacgauggacauauacgg

SEQ ID NO: 235933 - RNA, 19 nt, Artificial Sequence
  Description of Artificial Sequence: Synthetic oligonucleotide
aauuaagaccuggucaucg

SEQ ID NO: 235934 - RNA, 19 nt, Artificial Sequence
  Description of Artificial Sequence: Synthetic oligonucleotide
ugggaagauagcaauauca

SEQ ID NO: 235935 - RNA, 19 nt, Artificial Sequence
  Description of Artificial Sequence: Synthetic oligonucleotide
aucacacacacacaccugc

SEQ ID NO: 235936 - RNA, 19 nt, Artificial Sequence
  Description of Artificial Sequence: Synthetic oligonucleotide
uuauuuaucauaugaccac

SEQ ID NO: 235937 - RNA, 19 nt, Artificial Sequence
  Description of Artificial Sequence: Synthetic oligonucleotide
ugaauuuagcagcuaugcg

SEQ ID NO: 235938 - RNA, 19 nt, Artificial Sequence
  Description of Artificial Sequence: Synthetic oligonucleotide
aaguggaccaaggaaagac

SEQ ID NO: 235939 - RNA, 19 nt, Artificial Sequence
  Description of Artificial Sequence: Synthetic oligonucleotide
uugacuguauuacuaagca

SEQ ID NO: 235940 - RNA, 19 nt, Artificial Sequence
  Description of Artificial Sequence: Synthetic oligonucleotide
acauaugaguucuaggcag

SEQ ID NO: 235941 - RNA, 19 nt, Artificial Sequence
  Description of Artificial Sequence: Synthetic oligonucleotide
ugaaaacuauaauugugag

SEQ ID NO: 235942 - RNA, 19 nt, Artificial Sequence
  Description of Artificial Sequence: Synthetic oligonucleotide
ugauugacaauccuggauc

SEQ ID NO: 235943 - RNA, 19 nt, Artificial Sequence
  Description of Artificial Sequence: Synthetic oligonucleotide
uucuugaauauuaaacaga

SEQ ID NO: 235944 - RNA, 19 nt, Artificial Sequence
  Description of Artificial Sequence: Synthetic oligonucleotide
ugacauagcuauucgauca

SEQ ID NO: 235945 - RNA, 19 nt, Artificial Sequence
  Description of Artificial Sequence: Synthetic oligonucleotide
aauaaacguucaugcauag

SEQ ID NO: 235946 - RNA, 19 nt, Artificial Sequence
  Description of Artificial Sequence: Synthetic oligonucleotide
uuaaguaguagccggacau

SEQ ID NO: 235947 - RNA, 19 nt, Artificial Sequence
  Description of Artificial Sequence: Synthetic oligonucleotide
cuagcuacauugaaauucc

SEQ ID NO: 235948 - RNA, 19 nt, Artificial Sequence
  Description of Artificial Sequence: Synthetic oligonucleotide
uuaaauguagcagaauuaa

SEQ ID NO: 235949 - RNA, 19 nt, Artificial Sequence
  Description of Artificial Sequence: Synthetic oligonucleotide
uuuaucauaugaccacacc

SEQ ID NO: 235950 - RNA, 19 nt, Artificial Sequence
  Description of Artificial Sequence: Synthetic oligonucleotide
gaaugaguucuacugacug

SEQ ID NO: 235951 - RNA, 19 nt, Artificial Sequence
  Description of Artificial Sequence: Synthetic oligonucleotide
aguuacugaaucuugcaca

SEQ ID NO: 235952 - RNA, 19 nt, Artificial Sequence
  Description of Artificial Sequence: Synthetic oligonucleotide
caaaagacagugcuguagg

SEQ ID NO: 235953 - RNA, 19 nt, Artificial Sequence
  Description of Artificial Sequence: Synthetic oligonucleotide
ugagugacauagcuauucg

SEQ ID NO: 235954 - RNA, 19 nt, Artificial Sequence
  Description of Artificial Sequence: Synthetic oligonucleotide
auuggacuaccucauacag

SEQ ID NO: 235955 - RNA, 19 nt, Artificial Sequence
  Description of Artificial Sequence: Synthetic oligonucleotide
uugugagugacauagcuau

SEQ ID NO: 235956 - RNA, 19 nt, Artificial Sequence
  Description of Artificial Sequence: Synthetic oligonucleotide
uggauaguaugaaugacaa

SEQ ID NO: 235957 - RNA, 19 nt, Artificial Sequence
  Description of Artificial Sequence: Synthetic oligonucleotide
uuaaagcaacgucacagga

SEQ ID NO: 235958 - RNA, 19 nt, Artificial Sequence
  Description of Artificial Sequence: Synthetic oligonucleotide
augaguucuaggcaggcag

SEQ ID NO: 235959 - RNA, 19 nt, Artificial Sequence
  Description of Artificial Sequence: Synthetic oligonucleotide
auugaaauucccuugccaa

SEQ ID NO: 235960 - RNA, 19 nt, Artificial Sequence
  Description of Artificial Sequence: Synthetic oligonucleotide
uaucauaugaccacaccau

SEQ ID NO: 235961 - RNA, 19 nt, Artificial Sequence
  Description of Artificial Sequence: Synthetic oligonucleotide
uuuuggugcggguaacugg

SEQ ID NO: 235962 - RNA, 19 nt, Artificial Sequence
  Description of Artificial Sequence: Synthetic oligonucleotide
uguugaggcauuccuguag

SEQ ID NO: 235963 - RNA, 19 nt, Artificial Sequence
  Description of Artificial Sequence: Synthetic oligonucleotide
ugguacguucauuagaaac

SEQ ID NO: 235964 - RNA, 19 nt, Artificial Sequence
  Description of Artificial Sequence: Synthetic oligonucleotide
agaucacacacacacaccu

SEQ ID NO: 235965 - RNA, 19 nt, Artificial Sequence
  Description of Artificial Sequence: Synthetic oligonucleotide
ugggucauaucauauuacc

SEQ ID NO: 235966 - RNA, 19 nt, Artificial Sequence
  Description of Artificial Sequence: Synthetic oligonucleotide
aaugaguucuacugacuga

SEQ ID NO: 235967 - RNA, 19 nt, Artificial Sequence
  Description of Artificial Sequence: Synthetic oligonucleotide
augaguucuacugacugac

SEQ ID NO: 235968 - RNA, 19 nt, Artificial Sequence
  Description of Artificial Sequence: Synthetic oligonucleotide
uacgauggacauauacggg

SEQ ID NO: 235969 - RNA, 19 nt, Artificial Sequence
  Description of Artificial Sequence: Synthetic oligonucleotide
ucauaugaccacaccaugu

SEQ ID NO: 235970 - RNA, 19 nt, Artificial Sequence
  Description of Artificial Sequence: Synthetic oligonucleotide
aaucacuuauuuaucauau

SEQ ID NO: 235971 - RNA, 19 nt, Artificial Sequence
  Description of Artificial Sequence: Synthetic oligonucleotide
ggucauaucauauuaccug

SEQ ID NO: 235972 - RNA, 19 nt, Artificial Sequence
  Description of Artificial Sequence: Synthetic oligonucleotide
uuauuaaguaguagccgga

SEQ ID NO: 235973 - RNA, 19 nt, Artificial Sequence
  Description of Artificial Sequence: Synthetic oligonucleotide
ucuguaauuaagaccuggu

SEQ ID NO: 235974 - RNA, 19 nt, Artificial Sequence
  Description of Artificial Sequence: Synthetic oligonucleotide
uauacucuacuacauccac

SEQ ID NO: 235975 - RNA, 19 nt, Artificial Sequence
  Description of Artificial Sequence: Synthetic oligonucleotide
aacguggugucugacauug

SEQ ID NO: 235976 - RNA, 19 nt, Artificial Sequence
  Description of Artificial Sequence: Synthetic oligonucleotide
ucacaguuacauaugaguu

SEQ ID NO: 235977 - RNA, 19 nt, Artificial Sequence
  Description of Artificial Sequence: Synthetic oligonucleotide
uccguaaaugaucaaacuu

SEQ ID NO: 235978 - RNA, 19 nt, Artificial Sequence
  Description of Artificial Sequence: Synthetic oligonucleotide
aaauucccuugccaaguag

SEQ ID NO: 235979 - RNA, 19 nt, Artificial Sequence
  Description of Artificial Sequence: Synthetic oligonucleotide
ugaccuuccccuaaggcgu

SEQ ID NO: 235980 - RNA, 19 nt, Artificial Sequence
  Description of Artificial Sequence: Synthetic oligonucleotide
aauugugagaugcuuuaua

SEQ ID NO: 235981 - RNA, 19 nt, Artificial Sequence
  Description of Artificial Sequence: Synthetic oligonucleotide
cuauucgaucaucuuauag

SEQ ID NO: 235982 - RNA, 19 nt, Artificial Sequence
  Description of Artificial Sequence: Synthetic oligonucleotide
aaaggaaucuggaaugagu

SEQ ID NO: 235983 - RNA, 19 nt, Artificial Sequence
  Description of Artificial Sequence: Synthetic oligonucleotide
aggguuagggccuaaacaa

SEQ ID NO: 235984 - RNA, 19 nt, Artificial Sequence
  Description of Artificial Sequence: Synthetic oligonucleotide
accauuaccaguugucaug

SEQ ID NO: 235985 - RNA, 19 nt, Artificial Sequence
  Description of Artificial Sequence: Synthetic oligonucleotide
uuuaaacauaguagaacuu

SEQ ID NO: 235986 - RNA, 19 nt, Artificial Sequence
  Description of Artificial Sequence: Synthetic oligonucleotide
guaguaaagcaccugugac

SEQ ID NO: 235987 - RNA, 19 nt, Artificial Sequence
  Description of Artificial Sequence: Synthetic oligonucleotide
caguuuguagcauagccuc

SEQ ID NO: 235988 - RNA, 19 nt, Artificial Sequence
  Description of Artificial Sequence: Synthetic oligonucleotide
uuacacggcuuucauuugc

SEQ ID NO: 235989 - RNA, 19 nt, Artificial Sequence
  Description of Artificial Sequence: Synthetic oligonucleotide
aaauaaacguucaugcaua

SEQ ID NO: 235990 - RNA, 19 nt, Artificial Sequence
  Description of Artificial Sequence: Synthetic oligonucleotide
acgauggacauauacggga

SEQ ID NO: 235991 - RNA, 19 nt, Artificial Sequence
  Description of Artificial Sequence: Synthetic oligonucleotide
ucauaucauauuaccugug

SEQ ID NO: 235992 - RNA, 19 nt, Artificial Sequence
  Description of Artificial Sequence: Synthetic oligonucleotide
aaacacagauaccuauuau

SEQ ID NO: 235993 - RNA, 19 nt, Artificial Sequence
  Description of Artificial Sequence: Synthetic oligonucleotide
cuacaguuggccuuaagca

SEQ ID NO: 235994 - RNA, 19 nt, Artificial Sequence
  Description of Artificial Sequence: Synthetic oligonucleotide
ucaucguagccuucuaucu

SEQ ID NO: 235995 - RNA, 19 nt, Artificial Sequence
  Description of Artificial Sequence: Synthetic oligonucleotide
aagauaguguggcauggau

SEQ ID NO: 235996 - RNA, 19 nt, Artificial Sequence
  Description of Artificial Sequence: Synthetic oligonucleotide
uucuaggcaggcaggauga

SEQ ID NO: 235997 - RNA, 19 nt, Artificial Sequence
  Description of Artificial Sequence: Synthetic oligonucleotide
cuguagguauguaugcuag

SEQ ID NO: 235998 - RNA, 19 nt, Artificial Sequence
  Description of Artificial Sequence: Synthetic oligonucleotide
auaaacaaucaaagcaguc

SEQ ID NO: 235999 - RNA, 19 nt, Artificial Sequence
  Description of Artificial Sequence: Synthetic oligonucleotide
agguauguaugcuaggaaa

SEQ ID NO: 236000 - RNA, 19 nt, Artificial Sequence
  Description of Artificial Sequence: Synthetic oligonucleotide
aaacuauaauugugagaug

SEQ ID NO: 236001 - RNA, 19 nt, Artificial Sequence
  Description of Artificial Sequence: Synthetic oligonucleotide
aguuacauaugaguucuag

SEQ ID NO: 236002 - RNA, 19 nt, Artificial Sequence
  Description of Artificial Sequence: Synthetic oligonucleotide
auuuaucauaugaccacac

SEQ ID NO: 236003 - RNA, 19 nt, Artificial Sequence
  Description of Artificial Sequence: Synthetic oligonucleotide
uuugugagugacauagcua

SEQ ID NO: 236004 - RNA, 19 nt, Artificial Sequence
  Description of Artificial Sequence: Synthetic oligonucleotide
ucuauucacugagagacaa

SEQ ID NO: 236005 - RNA, 19 nt, Artificial Sequence
  Description of Artificial Sequence: Synthetic oligonucleotide
uaaggcguggucauagaaa

SEQ ID NO: 236006 - RNA, 19 nt, Artificial Sequence
  Description of Artificial Sequence: Synthetic oligonucleotide
auuaccugugugcucggag

SEQ ID NO: 236007 - RNA, 19 nt, Artificial Sequence
  Description of Artificial Sequence: Synthetic oligonucleotide
uagcuauucgaucaucuua

SEQ ID NO: 236008 - RNA, 19 nt, Artificial Sequence
  Description of Artificial Sequence: Synthetic oligonucleotide
ggagaucacacacacacac

SEQ ID NO: 236009 - RNA, 19 nt, Artificial Sequence
  Description of Artificial Sequence: Synthetic oligonucleotide
acaguuacugaaucuugca

SEQ ID NO: 236010 - RNA, 19 nt, Artificial Sequence
  Description of Artificial Sequence: Synthetic oligonucleotide
uuccguaaaugaucaaacu

SEQ ID NO: 236011 - RNA, 19 nt, Artificial Sequence
  Description of Artificial Sequence: Synthetic oligonucleotide
uaccuauuauuccuucaac

SEQ ID NO: 236012 - RNA, 19 nt, Artificial Sequence
  Description of Artificial Sequence: Synthetic oligonucleotide
ucgauuuuggugcggguaa

SEQ ID NO: 236013 - RNA, 19 nt, Artificial Sequence
  Description of Artificial Sequence: Synthetic oligonucleotide
gcuacgauggacauauacg

SEQ ID NO: 236014 - RNA, 19 nt, Artificial Sequence
  Description of Artificial Sequence: Synthetic oligonucleotide
uuuagcagcuaugcguacc

SEQ ID NO: 236015 - RNA, 19 nt, Artificial Sequence
  Description of Artificial Sequence: Synthetic oligonucleotide
auaugaccacaccauguug

SEQ ID NO: 236016 - RNA, 19 nt, Artificial Sequence
  Description of Artificial Sequence: Synthetic oligonucleotide
uuagggccuaaacaaugcu

SEQ ID NO: 236017 - RNA, 19 nt, Artificial Sequence
  Description of Artificial Sequence: Synthetic oligonucleotide
cucuguaauuaagaccugg

SEQ ID NO: 236018 - RNA, 19 nt, Artificial Sequence
  Description of Artificial Sequence: Synthetic oligonucleotide
guuaccgaggucaccaugc

SEQ ID NO: 236019 - RNA, 19 nt, Artificial Sequence
  Description of Artificial Sequence: Synthetic oligonucleotide
uacaaacggccaaaacucu

SEQ ID NO: 236020 - RNA, 19 nt, Artificial Sequence
  Description of Artificial Sequence: Synthetic oligonucleotide
aguguguuguccacuuagc

SEQ ID NO: 236021 - RNA, 19 nt, Artificial Sequence
  Description of Artificial Sequence: Synthetic oligonucleotide
cuguaauuaagaccugguc

SEQ ID NO: 236022 - RNA, 19 nt, Artificial Sequence
  Description of Artificial Sequence: Synthetic oligonucleotide
uuuugggcugaaacuggug

SEQ ID NO: 236023 - RNA, 19 nt, Artificial Sequence
  Description of Artificial Sequence: Synthetic oligonucleotide
aguaugaaugacaaauaau

SEQ ID NO: 236024 - RNA, 19 nt, Artificial Sequence
  Description of Artificial Sequence: Synthetic oligonucleotide
cugguggaucaguaaaagc

SEQ ID NO: 236025 - RNA, 19 nt, Artificial Sequence
  Description of Artificial Sequence: Synthetic oligonucleotide
acuuuguuaacuagcaaaa

SEQ ID NO: 236026 - RNA, 19 nt, Artificial Sequence
  Description of Artificial Sequence: Synthetic oligonucleotide
uagggccuaaacaaugcuc

SEQ ID NO: 236027 - RNA, 19 nt, Artificial Sequence
  Description of Artificial Sequence: Synthetic oligonucleotide
caaacggccaaaacucuuc

SEQ ID NO: 236028 - RNA, 19 nt, Artificial Sequence
  Description of Artificial Sequence: Synthetic oligonucleotide
auagaucucuuugacauua

SEQ ID NO: 236029 - RNA, 19 nt, Artificial Sequence
  Description of Artificial Sequence: Synthetic oligonucleotide
ucacacacacacaccugcc

SEQ ID NO: 236030 - RNA, 19 nt, Artificial Sequence
  Description of Artificial Sequence: Synthetic oligonucleotide
auaaacguucaugcauagg

SEQ ID NO: 236031 - RNA, 19 nt, Artificial Sequence
  Description of Artificial Sequence: Synthetic oligonucleotide
uugauaguuuaguuuggua

SEQ ID NO: 236032 - RNA, 19 nt, Artificial Sequence
  Description of Artificial Sequence: Synthetic oligonucleotide
ggacauauacgggaggagg

SEQ ID NO: 236033 - RNA, 19 nt, Artificial Sequence
  Description of Artificial Sequence: Synthetic oligonucleotide
accugugaccuuuacaaua

SEQ ID NO: 236034 - RNA, 19 nt, Artificial Sequence
  Description of Artificial Sequence: Synthetic oligonucleotide
augggucauaucauauuac

SEQ ID NO: 236035 - RNA, 19 nt, Artificial Sequence
  Description of Artificial Sequence: Synthetic oligonucleotide
acaguuuguagcauagccu

SEQ ID NO: 236036 - RNA, 19 nt, Artificial Sequence
  Description of Artificial Sequence: Synthetic oligonucleotide
acguucauuagaaacaguu

SEQ ID NO: 236037 - RNA, 19 nt, Artificial Sequence
  Description of Artificial Sequence: Synthetic oligonucleotide
ggauagaucucuuugacau

SEQ ID NO: 236038 - RNA, 19 nt, Artificial Sequence
  Description of Artificial Sequence: Synthetic oligonucleotide
gugacauagcuauucgauc

SEQ ID NO: 236039 - RNA, 19 nt, Artificial Sequence
  Description of Artificial Sequence: Synthetic oligonucleotide
ugucaugggucauaucaua

SEQ ID NO: 236040 - RNA, 19 nt, Artificial Sequence
  Description of Artificial Sequence: Synthetic oligonucleotide
agggccuaaacaaugcuca

SEQ ID NO: 236041 - RNA, 19 nt, Artificial Sequence
  Description of Artificial Sequence: Synthetic oligonucleotide
guaugcuaggaaaagugga

SEQ ID NO: 236042 - RNA, 19 nt, Artificial Sequence
  Description of Artificial Sequence: Synthetic oligonucleotide
agcuauucgaucaucuuau

SEQ ID NO: 236043 - RNA, 19 nt, Artificial Sequence
  Description of Artificial Sequence: Synthetic oligonucleotide
gucauaucauauuaccugu

SEQ ID NO: 236044 - RNA, 19 nt, Artificial Sequence
  Description of Artificial Sequence: Synthetic oligonucleotide
gaggcuagaagaucuguua

SEQ ID NO: 236045 - RNA, 19 nt, Artificial Sequence
  Description of Artificial Sequence: Synthetic oligonucleotide
uucacaggugugaacugau

SEQ ID NO: 236046 - RNA, 19 nt, Artificial Sequence
  Description of Artificial Sequence: Synthetic oligonucleotide
augaucaaacuuaaaggaa

SEQ ID NO: 236047 - RNA, 19 nt, Artificial Sequence
  Description of Artificial Sequence: Synthetic oligonucleotide
agauaguguggcauggaug

SEQ ID NO: 236048 - RNA, 19 nt, Artificial Sequence
  Description of Artificial Sequence: Synthetic oligonucleotide
aaccaguaauaggauguca

SEQ ID NO: 236049 - RNA, 19 nt, Artificial Sequence
  Description of Artificial Sequence: Synthetic oligonucleotide
ucauauuaccugugugcuc

SEQ ID NO: 236050 - RNA, 19 nt, Artificial Sequence
  Description of Artificial Sequence: Synthetic oligonucleotide
auggacauauacgggagga

SEQ ID NO: 236051 - RNA, 19 nt, Artificial Sequence
  Description of Artificial Sequence: Synthetic oligonucleotide
aggcuagaagaucuguuaa

SEQ ID NO: 236052 - RNA, 19 nt, Artificial Sequence
  Description of Artificial Sequence: Synthetic oligonucleotide
auuuuggugcggguaacug

SEQ ID NO: 236053 - RNA, 19 nt, Artificial Sequence
  Description of Artificial Sequence: Synthetic oligonucleotide
gagugacauagcuauucga

SEQ ID NO: 236054 - RNA, 19 nt, Artificial Sequence
  Description of Artificial Sequence: Synthetic oligonucleotide
auagcuauucgaucaucuu

SEQ ID NO: 236055 - RNA, 19 nt, Artificial Sequence
  Description of Artificial Sequence: Synthetic oligonucleotide
gugagugacauagcuauuc

SEQ ID NO: 236056 - RNA, 19 nt, Artificial Sequence
  Description of Artificial Sequence: Synthetic oligonucleotide
ggugcggguaacuggaagc

SEQ ID NO: 236057 - RNA, 19 nt, Artificial Sequence
  Description of Artificial Sequence: Synthetic oligonucleotide
gagaucacacacacacacc

SEQ ID NO: 236058 - RNA, 19 nt, Artificial Sequence
  Description of Artificial Sequence: Synthetic oligonucleotide
acauagcuauucgaucauc

SEQ ID NO: 236059 - RNA, 19 nt, Artificial Sequence
  Description of Artificial Sequence: Synthetic oligonucleotide
guaauaggaugucauggcu

SEQ ID NO: 236060 - RNA, 19 nt, Artificial Sequence
  Description of Artificial Sequence: Synthetic oligonucleotide
uaugaguucuaggcaggca

SEQ ID NO: 236061 - RNA, 19 nt, Artificial Sequence
  Description of Artificial Sequence: Synthetic oligonucleotide
guaauagguauaaauucua

SEQ ID NO: 236062 - RNA, 19 nt, Artificial Sequence
  Description of Artificial Sequence: Synthetic oligonucleotide
acacacacacaccugccaa

SEQ ID NO: 236063 - RNA, 19 nt, Artificial Sequence
  Description of Artificial Sequence: Synthetic oligonucleotide
gaauuuagggcuagggccu

SEQ ID NO: 236064 - RNA, 19 nt, Artificial Sequence
  Description of Artificial Sequence: Synthetic oligonucleotide
uauacgggaggaggcaaga

SEQ ID NO: 236065 - RNA, 19 nt, Artificial Sequence
  Description of Artificial Sequence: Synthetic oligonucleotide
agcaccugugaccuuuaca

SEQ ID NO: 236066 - RNA, 19 nt, Artificial Sequence
  Description of Artificial Sequence: Synthetic oligonucleotide
ucgggcuuggucagacuug

SEQ ID NO: 236067 - RNA, 19 nt, Artificial Sequence
  Description of Artificial Sequence: Synthetic oligonucleotide
caaguaguaaagcaccugu

SEQ ID NO: 236068 - RNA, 19 nt, Artificial Sequence
  Description of Artificial Sequence: Synthetic oligonucleotide
accaguaauaggaugucau

SEQ ID NO: 236069 - RNA, 19 nt, Artificial Sequence
  Description of Artificial Sequence: Synthetic oligonucleotide
caugaggcuagaagaucug

SEQ ID NO: 236070 - RNA, 19 nt, Artificial Sequence
  Description of Artificial Sequence: Synthetic oligonucleotide
ggcuacgauggacauauac

SEQ ID NO: 236071 - RNA, 19 nt, Artificial Sequence
  Description of Artificial Sequence: Synthetic oligonucleotide
uacguucauuagaaacagu

SEQ ID NO: 236072 - RNA, 19 nt, Artificial Sequence
  Description of Artificial Sequence: Synthetic oligonucleotide
uuaccgaggucaccaugcu

SEQ ID NO: 236073 - RNA, 19 nt, Artificial Sequence
  Description of Artificial Sequence: Synthetic oligonucleotide
guuacugaaucuugcacau

SEQ ID NO: 236074 - RNA, 19 nt, Artificial Sequence
  Description of Artificial Sequence: Synthetic oligonucleotide
acauauacgggaggaggca

SEQ ID NO: 236075 - RNA, 19 nt, Artificial Sequence
  Description of Artificial Sequence: Synthetic oligonucleotide
cauagcuauucgaucaucu

SEQ ID NO: 236076 - RNA, 19 nt, Artificial Sequence
  Description of Artificial Sequence: Synthetic oligonucleotide
ggauauguaauagguauaa

SEQ ID NO: 236077 - RNA, 19 nt, Artificial Sequence
  Description of Artificial Sequence: Synthetic oligonucleotide
gaucacacacacacaccug

SEQ ID NO: 236078 - RNA, 19 nt, Artificial Sequence
  Description of Artificial Sequence: Synthetic oligonucleotide
cagucgauuuuggugcggg

SEQ ID NO: 236079 - RNA, 19 nt, Artificial Sequence
  Description of Artificial Sequence: Synthetic oligonucleotide
uguuguccacuuagccaca

SEQ ID NO: 236080 - RNA, 19 nt, Artificial Sequence
  Description of Artificial Sequence: Synthetic oligonucleotide
cauuaccaguugucauggg

SEQ ID NO: 236081 - RNA, 19 nt, Artificial Sequence
  Description of Artificial Sequence: Synthetic oligonucleotide
gacuuguauuuggggacag

SEQ ID NO: 236082 - RNA, 19 nt, Artificial Sequence
  Description of Artificial Sequence: Synthetic oligonucleotide
ggcuagaagaucuguuaac

SEQ ID NO: 236083 - RNA, 19 nt, Artificial Sequence
  Description of Artificial Sequence: Synthetic oligonucleotide
auauacgggaggaggcaag

SEQ ID NO: 236084 - RNA, 19 nt, Artificial Sequence
  Description of Artificial Sequence: Synthetic oligonucleotide
ugacaucuauggcuacgau

SEQ ID NO: 236085 - RNA, 19 nt, Artificial Sequence
  Description of Artificial Sequence: Synthetic oligonucleotide
ccguaaaugaucaaacuua

SEQ ID NO: 236086 - RNA, 19 nt, Artificial Sequence
  Description of Artificial Sequence: Synthetic oligonucleotide
gaaagcacuagcauccuuu

SEQ ID NO: 236087 - RNA, 19 nt, Artificial Sequence
  Description of Artificial Sequence: Synthetic oligonucleotide
ccaguaauaggaugucaug

SEQ ID NO: 236088 - RNA, 19 nt, Artificial Sequence
  Description of Artificial Sequence: Synthetic oligonucleotide
agucuccgcaugacaauuc

SEQ ID NO: 236089 - RNA, 19 nt, Artificial Sequence
  Description of Artificial Sequence: Synthetic oligonucleotide
cggcgcaaggccuugaacg

SEQ ID NO: 236090 - RNA, 19 nt, Artificial Sequence
  Description of Artificial Sequence: Synthetic oligonucleotide
gcuuacacggcuuucauuu

SEQ ID NO: 236091 - RNA, 19 nt, Artificial Sequence
  Description of Artificial Sequence: Synthetic oligonucleotide
caaggcccaagugauugac

SEQ ID NO: 236092 - RNA, 19 nt, Artificial Sequence
  Description of Artificial Sequence: Synthetic oligonucleotide
gugauugacaauccuggau

SEQ ID NO: 236093 - RNA, 19 nt, Artificial Sequence
  Description of Artificial Sequence: Synthetic oligonucleotide
auaggggaugugguucaag

SEQ ID NO: 236094 - RNA, 19 nt, Artificial Sequence
  Description of Artificial Sequence: Synthetic oligonucleotide
gcugacaucuauggcuacg

SEQ ID NO: 236095 - RNA, 19 nt, Artificial Sequence
  Description of Artificial Sequence: Synthetic oligonucleotide
cuaaggcguggucauagaa

SEQ ID NO: 236096 - RNA, 19 nt, Artificial Sequence
  Description of Artificial Sequence: Synthetic oligonucleotide
ugcuuacacggcuuucauu

SEQ ID NO: 236097 - RNA, 19 nt, Artificial Sequence
  Description of Artificial Sequence: Synthetic oligonucleotide
augcuuacacggcuuucau

SEQ ID NO: 236098 - RNA, 19 nt, Artificial Sequence
  Description of Artificial Sequence: Synthetic oligonucleotide
agucgauuuuggugcgggu

SEQ ID NO: 236099 - RNA, 19 nt, Artificial Sequence
  Description of Artificial Sequence: Synthetic oligonucleotide
cauggauggauaguaugaa

SEQ ID NO: 236100 - RNA, 19 nt, Artificial Sequence
  Description of Artificial Sequence: Synthetic oligonucleotide
guagccggacaucauugaa

SEQ ID NO: 236101 - RNA, 19 nt, Artificial Sequence
  Description of Artificial Sequence: Synthetic oligonucleotide
cugacaucuauggcuacga

SEQ ID NO: 236102 - RNA, 19 nt, Artificial Sequence
  Description of Artificial Sequence: Synthetic oligonucleotide
agaagccguuggaauaaug

SEQ ID NO: 236103 - RNA, 19 nt, Artificial Sequence
  Description of Artificial Sequence: Synthetic oligonucleotide
cacacacacacaccugcca

SEQ ID NO: 236104 - RNA, 19 nt, Artificial Sequence
  Description of Artificial Sequence: Synthetic oligonucleotide
gacauagcuauucgaucau

SEQ ID NO: 236105 - RNA, 19 nt, Artificial Sequence
  Description of Artificial Sequence: Synthetic oligonucleotide
acgucugcuugacuguauu

SEQ ID NO: 236106 - RNA, 19 nt, Artificial Sequence
  Description of Artificial Sequence: Synthetic oligonucleotide
ugcugacaucuauggcuac

SEQ ID NO: 236107 - RNA, 19 nt, Artificial Sequence
  Description of Artificial Sequence: Synthetic oligonucleotide
cacaccugccaacauaccu

SEQ ID NO: 236108 - RNA, 19 nt, Artificial Sequence
  Description of Artificial Sequence: Synthetic oligonucleotide
gcuagaagaucuguuaacu

SEQ ID NO: 236109 - RNA, 19 nt, Artificial Sequence
  Description of Artificial Sequence: Synthetic oligonucleotide
ugcuguuaccgaggucacc

SEQ ID NO: 236110 - RNA, 19 nt, Artificial Sequence
  Description of Artificial Sequence: Synthetic oligonucleotide
gccccaauccaaauguaug

SEQ ID NO: 236111 - RNA, 19 nt, Artificial Sequence
  Description of Artificial Sequence: Synthetic oligonucleotide
ggcguggucauagaaaugu

SEQ ID NO: 236112 - RNA, 19 nt, Artificial Sequence
  Description of Artificial Sequence: Synthetic oligonucleotide
acaaacggccaaaacucuu

SEQ ID NO: 236113 - RNA, 19 nt, Artificial Sequence
  Description of Artificial Sequence: Synthetic oligonucleotide
gccaacauaccugggaaga

SEQ ID NO: 236114 - RNA, 19 nt, Artificial Sequence
  Description of Artificial Sequence: Synthetic oligonucleotide
acguucaugcauaggggau

SEQ ID NO: 236115 - RNA, 19 nt, Artificial Sequence
  Description of Artificial Sequence: Synthetic oligonucleotide
cuauucacugagagacaaa

SEQ ID NO: 236116 - RNA, 19 nt, Artificial Sequence
  Description of Artificial Sequence: Synthetic oligonucleotide
caaacgucugcuugacugu

SEQ ID NO: 236117 - RNA, 19 nt, Artificial Sequence
  Description of Artificial Sequence: Synthetic oligonucleotide
ccccaauccaaauguauga

SEQ ID NO: 236118 - RNA, 19 nt, Artificial Sequence
  Description of Artificial Sequence: Synthetic oligonucleotide
caggauucucuccaagacu

SEQ ID NO: 236119 - RNA, 19 nt, Artificial Sequence
  Description of Artificial Sequence: Synthetic oligonucleotide
gauuuuggugcggguaacu

SEQ ID NO: 236120 - RNA, 19 nt, Artificial Sequence
  Description of Artificial Sequence: Synthetic oligonucleotide
aacgucugcuugacuguau

SEQ ID NO: 236121 - RNA, 19 nt, Artificial Sequence
  Description of Artificial Sequence: Synthetic oligonucleotide
gucgauuuuggugcgggua

SEQ ID NO: 236122 - RNA, 19 nt, Artificial Sequence
  Description of Artificial Sequence: Synthetic oligonucleotide
cauauacgggaggaggcaa

SEQ ID NO: 236123 - RNA, 19 nt, Artificial Sequence
  Description of Artificial Sequence: Synthetic oligonucleotide
ccaaguaguaaagcaccug

SEQ ID NO: 236124 - RNA, 19 nt, Artificial Sequence
  Description of Artificial Sequence: Synthetic oligonucleotide
guucaugcauaggggaugu

SEQ ID NO: 236125 - RNA, 19 nt, Artificial Sequence
  Description of Artificial Sequence: Synthetic oligonucleotide
aaagcaccugugaccuuua

SEQ ID NO: 236126 - RNA, 19 nt, Artificial Sequence
  Description of Artificial Sequence: Synthetic oligonucleotide
caguaugucaccaguucuu

SEQ ID NO: 236127 - RNA, 19 nt, Artificial Sequence
  Description of Artificial Sequence: Synthetic oligonucleotide
cccuaaggcguggucauag

SEQ ID NO: 236128 - RNA, 19 nt, Artificial Sequence
  Description of Artificial Sequence: Synthetic oligonucleotide
ccaugaggcuagaagaucu

SEQ ID NO: 236129 - RNA, 19 nt, Artificial Sequence
  Description of Artificial Sequence: Synthetic oligonucleotide
gucaugggucauaucauau

SEQ ID NO: 236130 - RNA, 19 nt, Artificial Sequence
  Description of Artificial Sequence: Synthetic oligonucleotide
gaccuuccccuaaggcgug

SEQ ID NO: 236131 - RNA, 19 nt, Artificial Sequence
  Description of Artificial Sequence: Synthetic oligonucleotide
accuuccccuaaggcgugg

SEQ ID NO: 236132 - RNA, 19 nt, Artificial Sequence
  Description of Artificial Sequence: Synthetic oligonucleotide
ggcgcaaggccuugaacgu

SEQ ID NO: 236133 - RNA, 19 nt, Artificial Sequence
  Description of Artificial Sequence: Synthetic oligonucleotide
gugcggguaacuggaagcu

SEQ ID NO: 236134 - RNA, 19 nt, Artificial Sequence
  Description of Artificial Sequence: Synthetic oligonucleotide
ccacaguuuguagcauagc

SEQ ID NO: 236135 - RNA, 19 nt, Artificial Sequence
  Description of Artificial Sequence: Synthetic oligonucleotide
gcuauucgaucaucuuaua

SEQ ID NO: 236136 - RNA, 19 nt, Artificial Sequence
  Description of Artificial Sequence: Synthetic oligonucleotide
gaacguggugucugacauu

SEQ ID NO: 236137 - RNA, 19 nt, Artificial Sequence
  Description of Artificial Sequence: Synthetic oligonucleotide
gcucuguaauuaagaccug

SEQ ID NO: 236138 - RNA, 19 nt, Artificial Sequence
  Description of Artificial Sequence: Synthetic oligonucleotide
gcggaagcaaaacacccuu

SEQ ID NO: 236139 - RNA, 19 nt, Artificial Sequence
  Description of Artificial Sequence: Synthetic oligonucleotide
ggucaucguagccuucuau

SEQ ID NO: 236140 - RNA, 19 nt, Artificial Sequence
  Description of Artificial Sequence: Synthetic oligonucleotide
ccaagugauugacaauccu

SEQ ID NO: 236141 - RNA, 19 nt, Artificial Sequence
  Description of Artificial Sequence: Synthetic oligonucleotide
cccaauccaaauguaugaa

SEQ ID NO: 236142 - RNA, 19 nt, Artificial Sequence
  Description of Artificial Sequence: Synthetic oligonucleotide
ccuaaggcguggucauaga

SEQ ID NO: 236143 - RNA, 19 nt, Artificial Sequence
  Description of Artificial Sequence: Synthetic oligonucleotide
uggcuacgauggacauaua

SEQ ID NO: 236144 - RNA, 19 nt, Artificial Sequence
  Description of Artificial Sequence: Synthetic oligonucleotide
cagcuuugugagugacaua

SEQ ID NO: 236145 - RNA, 19 nt, Artificial Sequence
  Description of Artificial Sequence: Synthetic oligonucleotide
gggaugugguucaagucuu

SEQ ID NO: 236146 - RNA, 19 nt, Artificial Sequence
  Description of Artificial Sequence: Synthetic oligonucleotide
ccggcgcaaggccuugaac

SEQ ID NO: 236147 - RNA, 19 nt, Artificial Sequence
  Description of Artificial Sequence: Synthetic oligonucleotide
acguggugucugacauugu

SEQ ID NO: 236148 - RNA, 19 nt, Artificial Sequence
  Description of Artificial Sequence: Synthetic oligonucleotide
cgauuuuggugcggguaac

SEQ ID NO: 236149 - RNA, 19 nt, Artificial Sequence
  Description of Artificial Sequence: Synthetic oligonucleotide
ugccggcgcaaggccuuga

SEQ ID NO: 236150 - RNA, 19 nt, Artificial Sequence
  Description of Artificial Sequence: Synthetic oligonucleotide
ggcuagcuacauugaaauu

SEQ ID NO: 236151 - RNA, 19 nt, Artificial Sequence
  Description of Artificial Sequence: Synthetic oligonucleotide
ggguuagggccuaaacaau

SEQ ID NO: 236152 - RNA, 19 nt, Artificial Sequence
  Description of Artificial Sequence: Synthetic oligonucleotide
cggagaucacacacacaca

SEQ ID NO: 236153 - RNA, 19 nt, Artificial Sequence
  Description of Artificial Sequence: Synthetic oligonucleotide
cugccggcgcaaggccuug

SEQ ID NO: 236154 - RNA, 19 nt, Artificial Sequence
  Description of Artificial Sequence: Synthetic oligonucleotide
caucgggcuuggucagacu

SEQ ID NO: 236155 - RNA, 19 nt, Artificial Sequence
  Description of Artificial Sequence: Synthetic oligonucleotide
gcguggucauagaaaugua

SEQ ID NO: 236156 - RNA, 19 nt, Artificial Sequence
  Description of Artificial Sequence: Synthetic oligonucleotide
gccggcgcaaggccuugaa

SEQ ID NO: 236157 - RNA, 19 nt, Artificial Sequence
  Description of Artificial Sequence: Synthetic oligonucleotide
ccaacauaccugggaagau

SEQ ID NO: 236158 - RNA, 19 nt, Artificial Sequence
  Description of Artificial Sequence: Synthetic oligonucleotide
ggccuugaacguggugucu

SEQ ID NO: 236159 - RNA, 19 nt, Artificial Sequence
  Description of Artificial Sequence: Synthetic oligonucleotide
ccguuggaauaaugaucuu

SEQ ID NO: 236160 - RNA, 19 nt, Artificial Sequence
  Description of Artificial Sequence: Synthetic oligonucleotide
aaaaggauuuaucaacugc

SEQ ID NO: 236161 - RNA, 19 nt, Artificial Sequence
  Description of Artificial Sequence: Synthetic oligonucleotide
agugaagacaauuaacggc

SEQ ID NO: 236162 - RNA, 19 nt, Artificial Sequence
  Description of Artificial Sequence: Synthetic oligonucleotide
aagagaauuucuugaaggc

SEQ ID NO: 236163 - RNA, 19 nt, Artificial Sequence
  Description of Artificial Sequence: Synthetic oligonucleotide
uaacauaccagauacaaca

SEQ ID NO: 236164 - RNA, 19 nt, Artificial Sequence
  Description of Artificial Sequence: Synthetic oligonucleotide
agaucugucccuuugaagg

SEQ ID NO: 236165 - RNA, 19 nt, Artificial Sequence
  Description of Artificial Sequence: Synthetic oligonucleotide
aagagcaucauggacacgg

SEQ ID NO: 236166 - RNA, 19 nt, Artificial Sequence
  Description of Artificial Sequence: Synthetic oligonucleotide
agaaccagagcauuagggc

SEQ ID NO: 236167 - RNA, 19 nt, Artificial Sequence
  Description of Artificial Sequence: Synthetic oligonucleotide
ucuauuuagagccaaucac

SEQ ID NO: 236168 - RNA, 19 nt, Artificial Sequence
  Description of Artificial Sequence: Synthetic oligonucleotide
uuuggcucuagcaagacga

SEQ ID NO: 236169 - RNA, 19 nt, Artificial Sequence
  Description of Artificial Sequence: Synthetic oligonucleotide
cuggacucuauuuagagcc

SEQ ID NO: 236170 - RNA, 19 nt, Artificial Sequence
  Description of Artificial Sequence: Synthetic oligonucleotide
uuuagagccaaucacucca

SEQ ID NO: 236171 - RNA, 19 nt, Artificial Sequence
  Description of Artificial Sequence: Synthetic oligonucleotide
aaauuccguacaaacagcc

SEQ ID NO: 236172 - RNA, 19 nt, Artificial Sequence
  Description of Artificial Sequence: Synthetic oligonucleotide
agaagaguagucuuuugac

SEQ ID NO: 236173 - RNA, 19 nt, Artificial Sequence
  Description of Artificial Sequence: Synthetic oligonucleotide
gaggagacaaucuaauucc

SEQ ID NO: 236174 - RNA, 19 nt, Artificial Sequence
  Description of Artificial Sequence: Synthetic oligonucleotide
uguaaacauagguucaucc

SEQ ID NO: 236175 - RNA, 19 nt, Artificial Sequence
  Description of Artificial Sequence: Synthetic oligonucleotide
ugauugaugucaaaguugu

SEQ ID NO: 236176 - RNA, 19 nt, Artificial Sequence
  Description of Artificial Sequence: Synthetic oligonucleotide
ugcaaugcaaaguugguug

SEQ ID NO: 236177 - RNA, 19 nt, Artificial Sequence
  Description of Artificial Sequence: Synthetic oligonucleotide
aacccuaccagcuauaguu

SEQ ID NO: 236178 - RNA, 19 nt, Artificial Sequence
  Description of Artificial Sequence: Synthetic oligonucleotide
cagaggauuacauagugag

SEQ ID NO: 236179 - RNA, 19 nt, Artificial Sequence
  Description of Artificial Sequence: Synthetic oligonucleotide
uuaugggucaagccgaugc

SEQ ID NO: 236180 - RNA, 19 nt, Artificial Sequence
  Description of Artificial Sequence: Synthetic oligonucleotide
aacaacauccuuguggaag

SEQ ID NO: 236181 - RNA, 19 nt, Artificial Sequence
  Description of Artificial Sequence: Synthetic oligonucleotide
ucacccaacaagcugagug

SEQ ID NO: 236182 - RNA, 19 nt, Artificial Sequence
  Description of Artificial Sequence: Synthetic oligonucleotide
gagugaagacaauuaacgg

SEQ ID NO: 236183 - RNA, 19 nt, Artificial Sequence
  Description of Artificial Sequence: Synthetic oligonucleotide
cauugcgucgauaacauac

SEQ ID NO: 236184 - RNA, 19 nt, Artificial Sequence
  Description of Artificial Sequence: Synthetic oligonucleotide
agcaagacgaagcuacccc

SEQ ID NO: 236185 - RNA, 19 nt, Artificial Sequence
  Description of Artificial Sequence: Synthetic oligonucleotide
auuuagagccaaucacucc

SEQ ID NO: 236186 - RNA, 19 nt, Artificial Sequence
  Description of Artificial Sequence: Synthetic oligonucleotide
auaacuuaguuuauggguc

SEQ ID NO: 236187 - RNA, 19 nt, Artificial Sequence
  Description of Artificial Sequence: Synthetic oligonucleotide
uucaagauccggcuuacgc

SEQ ID NO: 236188 - RNA, 19 nt, Artificial Sequence
  Description of Artificial Sequence: Synthetic oligonucleotide
auuaacggcuuucggaagg

SEQ ID NO: 236189 - RNA, 19 nt, Artificial Sequence
  Description of Artificial Sequence: Synthetic oligonucleotide
acaauuaacggcuuucgga

SEQ ID NO: 236190 - RNA, 19 nt, Artificial Sequence
  Description of Artificial Sequence: Synthetic oligonucleotide
ucaguuuggcucuagcaag

SEQ ID NO: 236191 - RNA, 19 nt, Artificial Sequence
  Description of Artificial Sequence: Synthetic oligonucleotide
aauugggccucccagagaa

SEQ ID NO: 236192 - RNA, 19 nt, Artificial Sequence
  Description of Artificial Sequence: Synthetic oligonucleotide
gauaacuuaguuuaugggu

SEQ ID NO: 236193 - RNA, 19 nt, Artificial Sequence
  Description of Artificial Sequence: Synthetic oligonucleotide
aagacaauuaacggcuuuc

SEQ ID NO: 236194 - RNA, 19 nt, Artificial Sequence
  Description of Artificial Sequence: Synthetic oligonucleotide
agagccaaucacuccaggc

SEQ ID NO: 236195 - RNA, 19 nt, Artificial Sequence
  Description of Artificial Sequence: Synthetic oligonucleotide
uuaguuuaugggucaagcc

SEQ ID NO: 236196 - RNA, 19 nt, Artificial Sequence
  Description of Artificial Sequence: Synthetic oligonucleotide
ggagugaagacaauuaacg

SEQ ID NO: 236197 - RNA, 19 nt, Artificial Sequence
  Description of Artificial Sequence: Synthetic oligonucleotide
uauuuagagccaaucacuc

SEQ ID NO: 236198 - RNA, 19 nt, Artificial Sequence
  Description of Artificial Sequence: Synthetic oligonucleotide
ugugccauauuguugaaau

SEQ ID NO: 236199 - RNA, 19 nt, Artificial Sequence
  Description of Artificial Sequence: Synthetic oligonucleotide
aaggguagcucucugcuca

SEQ ID NO: 236200 - RNA, 19 nt, Artificial Sequence
  Description of Artificial Sequence: Synthetic oligonucleotide
agagcuguugcauacggug

SEQ ID NO: 236201 - RNA, 19 nt, Artificial Sequence
  Description of Artificial Sequence: Synthetic oligonucleotide
guugacaacaauccaguug

SEQ ID NO: 236202 - RNA, 19 nt, Artificial Sequence
  Description of Artificial Sequence: Synthetic oligonucleotide
gacaaucuaauuccuauga

SEQ ID NO: 236203 - RNA, 19 nt, Artificial Sequence
  Description of Artificial Sequence: Synthetic oligonucleotide
aauccuuguaauagccacc

SEQ ID NO: 236204 - RNA, 19 nt, Artificial Sequence
  Description of Artificial Sequence: Synthetic oligonucleotide
aggauuuaucaacugcuuc

SEQ ID NO: 236205 - RNA, 19 nt, Artificial Sequence
  Description of Artificial Sequence: Synthetic oligonucleotide
aauuaacggcuuucggaag

SEQ ID NO: 236206 - RNA, 19 nt, Artificial Sequence
  Description of Artificial Sequence: Synthetic oligonucleotide
acauagugaggauggauag

SEQ ID NO: 236207 - RNA, 19 nt, Artificial Sequence
  Description of Artificial Sequence: Synthetic oligonucleotide
gaggauuacauagugagga

SEQ ID NO: 236208 - RNA, 19 nt, Artificial Sequence
  Description of Artificial Sequence: Synthetic oligonucleotide
gauaacauaccagauacaa

SEQ ID NO: 236209 - RNA, 19 nt, Artificial Sequence
  Description of Artificial Sequence: Synthetic oligonucleotide
ucuaagagaauuucuugaa

SEQ ID NO: 236210 - RNA, 19 nt, Artificial Sequence
  Description of Artificial Sequence: Synthetic oligonucleotide
acauaccagauacaacaac

SEQ ID NO: 236211 - RNA, 19 nt, Artificial Sequence
  Description of Artificial Sequence: Synthetic oligonucleotide
aauuccguacaaacagccc

SEQ ID NO: 236212 - RNA, 19 nt, Artificial Sequence
  Description of Artificial Sequence: Synthetic oligonucleotide
gaugguaaaguucuccaca

SEQ ID NO: 236213 - RNA, 19 nt, Artificial Sequence
  Description of Artificial Sequence: Synthetic oligonucleotide
uucuggacucuauuuagag

SEQ ID NO: 236214 - RNA, 19 nt, Artificial Sequence
  Description of Artificial Sequence: Synthetic oligonucleotide
guagcuagggcaaauuccg

SEQ ID NO: 236215 - RNA, 19 nt, Artificial Sequence
  Description of Artificial Sequence: Synthetic oligonucleotide
ggauuuaucaacugcuucc

SEQ ID NO: 236216 - RNA, 19 nt, Artificial Sequence
  Description of Artificial Sequence: Synthetic oligonucleotide
cugauugaugucaaaguug

SEQ ID NO: 236217 - RNA, 19 nt, Artificial Sequence
  Description of Artificial Sequence: Synthetic oligonucleotide
ucgucgaaguacauggaag

SEQ ID NO: 236218 - RNA, 19 nt, Artificial Sequence
  Description of Artificial Sequence: Synthetic oligonucleotide
gacaauuaacggcuuucgg

SEQ ID NO: 236219 - RNA, 19 nt, Artificial Sequence
  Description of Artificial Sequence: Synthetic oligonucleotide
augguaaaguucuccacag

SEQ ID NO: 236220 - RNA, 19 nt, Artificial Sequence
  Description of Artificial Sequence: Synthetic oligonucleotide
auccaaaugccauguacuc

SEQ ID NO: 236221 - RNA, 19 nt, Artificial Sequence
  Description of Artificial Sequence: Synthetic oligonucleotide
ggugauaacugcucaaucc

SEQ ID NO: 236222 - RNA, 19 nt, Artificial Sequence
  Description of Artificial Sequence: Synthetic oligonucleotide
cuuaguuuaugggucaagc

SEQ ID NO: 236223 - RNA, 19 nt, Artificial Sequence
  Description of Artificial Sequence: Synthetic oligonucleotide
acuaccaguaccuuaggaa

SEQ ID NO: 236224 - RNA, 19 nt, Artificial Sequence
  Description of Artificial Sequence: Synthetic oligonucleotide
aguccgguuuguuaccagc

SEQ ID NO: 236225 - RNA, 19 nt, Artificial Sequence
  Description of Artificial Sequence: Synthetic oligonucleotide
aacaggcggaggcaugugg

SEQ ID NO: 236226 - RNA, 19 nt, Artificial Sequence
  Description of Artificial Sequence: Synthetic oligonucleotide
aagaaguugccaggggugg

SEQ ID NO: 236227 - RNA, 19 nt, Artificial Sequence
  Description of Artificial Sequence: Synthetic oligonucleotide
ugcucacccaacaagcuga

SEQ ID NO: 236228 - RNA, 19 nt, Artificial Sequence
  Description of Artificial Sequence: Synthetic oligonucleotide
caucuaagagaauuucuug

SEQ ID NO: 236229 - RNA, 19 nt, Artificial Sequence
  Description of Artificial Sequence: Synthetic oligonucleotide
gaaaaugggaucaccacuc

SEQ ID NO: 236230 - RNA, 19 nt, Artificial Sequence
  Description of Artificial Sequence: Synthetic oligonucleotide
cugagugacacccgaaacc

SEQ ID NO: 236231 - RNA, 19 nt, Artificial Sequence
  Description of Artificial Sequence: Synthetic oligonucleotide
augggaucaccacucgggc

SEQ ID NO: 236232 - RNA, 19 nt, Artificial Sequence
  Description of Artificial Sequence: Synthetic oligonucleotide
caggggauuaggaaagggg

SEQ ID NO: 236233 - RNA, 19 nt, Artificial Sequence
  Description of Artificial Sequence: Synthetic oligonucleotide
uucaggagugauccaaaug

SEQ ID NO: 236234 - RNA, 19 nt, Artificial Sequence
  Description of Artificial Sequence: Synthetic oligonucleotide
aaggacugacuaccaguac

SEQ ID NO: 236235 - RNA, 19 nt, Artificial Sequence
  Description of Artificial Sequence: Synthetic oligonucleotide
ugguugacgacacccuggg

SEQ ID NO: 236236 - RNA, 19 nt, Artificial Sequence
  Description of Artificial Sequence: Synthetic oligonucleotide
gacauucccaaugugggcc

SEQ ID NO: 236237 - RNA, 19 nt, Artificial Sequence
  Description of Artificial Sequence: Synthetic oligonucleotide
aauggugguccuuagucuu

SEQ ID NO: 236238 - RNA, 19 nt, Artificial Sequence
  Description of Artificial Sequence: Synthetic oligonucleotide
cuuacgcccucauggaugg

SEQ ID NO: 236239 - RNA, 19 nt, Artificial Sequence
  Description of Artificial Sequence: Synthetic oligonucleotide
ucgaaguacauggaagaag

SEQ ID NO: 236240 - RNA, 19 nt, Artificial Sequence
  Description of Artificial Sequence: Synthetic oligonucleotide
aagacgaagcuaccccuag

SEQ ID NO: 236241 - RNA, 19 nt, Artificial Sequence
  Description of Artificial Sequence: Synthetic oligonucleotide
auugcgucgauaacauacc

SEQ ID NO: 236242 - RNA, 19 nt, Artificial Sequence
  Description of Artificial Sequence: Synthetic oligonucleotide
uucccuaggauaucuugag

SEQ ID NO: 236243 - RNA, 19 nt, Artificial Sequence
  Description of Artificial Sequence: Synthetic oligonucleotide
caaucuaauuccuaugaga

SEQ ID NO: 236244 - RNA, 19 nt, Artificial Sequence
  Description of Artificial Sequence: Synthetic oligonucleotide
ucaauccuuguaauagcca

SEQ ID NO: 236245 - RNA, 19 nt, Artificial Sequence
  Description of Artificial Sequence: Synthetic oligonucleotide
auaacauaccagauacaac

SEQ ID NO: 236246 - RNA, 19 nt, Artificial Sequence
  Description of Artificial Sequence: Synthetic oligonucleotide
acaaggacugacuaccagu

SEQ ID NO: 236247 - RNA, 19 nt, Artificial Sequence
  Description of Artificial Sequence: Synthetic oligonucleotide
ugcgucgauaacauaccag

SEQ ID NO: 236248 - RNA, 19 nt, Artificial Sequence
  Description of Artificial Sequence: Synthetic oligonucleotide
aaggggaauggugauaacu

SEQ ID NO: 236249 - RNA, 19 nt, Artificial Sequence
  Description of Artificial Sequence: Synthetic oligonucleotide
guugcauacgguguagggg

SEQ ID NO: 236250 - RNA, 19 nt, Artificial Sequence
  Description of Artificial Sequence: Synthetic oligonucleotide
agacaaucuaauuccuaug

SEQ ID NO: 236251 - RNA, 19 nt, Artificial Sequence
  Description of Artificial Sequence: Synthetic oligonucleotide
ucaucaaaguuaguucuug

SEQ ID NO: 236252 - RNA, 19 nt, Artificial Sequence
  Description of Artificial Sequence: Synthetic oligonucleotide
uuuugaccugccuuggcac

SEQ ID NO: 236253 - RNA, 19 nt, Artificial Sequence
  Description of Artificial Sequence: Synthetic oligonucleotide
uuuaguggagaagcaaaga

SEQ ID NO: 236254 - RNA, 19 nt, Artificial Sequence
  Description of Artificial Sequence: Synthetic oligonucleotide
ugguaaaguucuccacagg

SEQ ID NO: 236255 - RNA, 19 nt, Artificial Sequence
  Description of Artificial Sequence: Synthetic oligonucleotide
aucugguaaaugcuuccuc

SEQ ID NO: 236256 - RNA, 19 nt, Artificial Sequence
  Description of Artificial Sequence: Synthetic oligonucleotide
uggaagcaucucaucaaag

SEQ ID NO: 236257 - RNA, 19 nt, Artificial Sequence
  Description of Artificial Sequence: Synthetic oligonucleotide
cugcuuauacaugaguggc

SEQ ID NO: 236258 - RNA, 19 nt, Artificial Sequence
  Description of Artificial Sequence: Synthetic oligonucleotide
ggaggagacaaucuaauuc

SEQ ID NO: 236259 - RNA, 19 nt, Artificial Sequence
  Description of Artificial Sequence: Synthetic oligonucleotide
caucaaaguuaguucuugc

SEQ ID NO: 236260 - RNA, 19 nt, Artificial Sequence
  Description of Artificial Sequence: Synthetic oligonucleotide
caaauugggccucccagag

SEQ ID NO: 236261 - RNA, 19 nt, Artificial Sequence
  Description of Artificial Sequence: Synthetic oligonucleotide
agccacauaguauuucugu

SEQ ID NO: 236262 - RNA, 19 nt, Artificial Sequence
  Description of Artificial Sequence: Synthetic oligonucleotide
agcaucucaucaaaguuag

SEQ ID NO: 236263 - RNA, 19 nt, Artificial Sequence
  Description of Artificial Sequence: Synthetic oligonucleotide
gcagucauauagcugauug

SEQ ID NO: 236264 - RNA, 19 nt, Artificial Sequence
  Description of Artificial Sequence: Synthetic oligonucleotide
ucccuaggauaucuugagg

SEQ ID NO: 236265 - RNA, 19 nt, Artificial Sequence
  Description of Artificial Sequence: Synthetic oligonucleotide
caauuaacggcuuucggaa

SEQ ID NO: 236266 - RNA, 19 nt, Artificial Sequence
  Description of Artificial Sequence: Synthetic oligonucleotide
uauagcugauugaugucaa

SEQ ID NO: 236267 - RNA, 19 nt, Artificial Sequence
  Description of Artificial Sequence: Synthetic oligonucleotide
gaaguggguuccuggaagc

SEQ ID NO: 236268 - RNA, 19 nt, Artificial Sequence
  Description of Artificial Sequence: Synthetic oligonucleotide
auguguucaagggaacaac

SEQ ID NO: 236269 - RNA, 19 nt, Artificial Sequence
  Description of Artificial Sequence: Synthetic oligonucleotide
ucggagugaagacaauuaa

SEQ ID NO: 236270 - RNA, 19 nt, Artificial Sequence
  Description of Artificial Sequence: Synthetic oligonucleotide
uuagggcuagccauggcaa

SEQ ID NO: 236271 - RNA, 19 nt, Artificial Sequence
  Description of Artificial Sequence: Synthetic oligonucleotide
cccuaggauaucuugaggg

SEQ ID NO: 236272 - RNA, 19 nt, Artificial Sequence
  Description of Artificial Sequence: Synthetic oligonucleotide
uuucugggaucacacgcug

SEQ ID NO: 236273 - RNA, 19 nt, Artificial Sequence
  Description of Artificial Sequence: Synthetic oligonucleotide
cuaccccuagucuugaauc

SEQ ID NO: 236274 - RNA, 19 nt, Artificial Sequence
  Description of Artificial Sequence: Synthetic oligonucleotide
uguccauccagggugaaaa

SEQ ID NO: 236275 - RNA, 19 nt, Artificial Sequence
  Description of Artificial Sequence: Synthetic oligonucleotide
ugcuuauacaugaguggcu

SEQ ID NO: 236276 - RNA, 19 nt, Artificial Sequence
  Description of Artificial Sequence: Synthetic oligonucleotide
gagccaaucacuccaggca

SEQ ID NO: 236277 - RNA, 19 nt, Artificial Sequence
  Description of Artificial Sequence: Synthetic oligonucleotide
uaugggucaagccgaugca

SEQ ID NO: 236278 - RNA, 19 nt, Artificial Sequence
  Description of Artificial Sequence: Synthetic oligonucleotide
cauuguggccauugcgucg

SEQ ID NO: 236279 - RNA, 19 nt, Artificial Sequence
  Description of Artificial Sequence: Synthetic oligonucleotide
uuuugacauuguuuggguc

SEQ ID NO: 236280 - RNA, 19 nt, Artificial Sequence
  Description of Artificial Sequence: Synthetic oligonucleotide
uuaacggcuuucggaaggg

SEQ ID NO: 236281 - RNA, 19 nt, Artificial Sequence
  Description of Artificial Sequence: Synthetic oligonucleotide
acacccgaaacccuaccag

SEQ ID NO: 236282 - RNA, 19 nt, Artificial Sequence
  Description of Artificial Sequence: Synthetic oligonucleotide
ccuuguaauagccaccugc

SEQ ID NO: 236283 - RNA, 19 nt, Artificial Sequence
  Description of Artificial Sequence: Synthetic oligonucleotide
uaccagacuggcuuggcac

SEQ ID NO: 236284 - RNA, 19 nt, Artificial Sequence
  Description of Artificial Sequence: Synthetic oligonucleotide
uucugggaucacacgcugg

SEQ ID NO: 236285 - RNA, 19 nt, Artificial Sequence
  Description of Artificial Sequence: Synthetic oligonucleotide
uuuaggacccgagggagcu

SEQ ID NO: 236286 - RNA, 19 nt, Artificial Sequence
  Description of Artificial Sequence: Synthetic oligonucleotide
cucuauuuagagccaauca

SEQ ID NO: 236287 - RNA, 19 nt, Artificial Sequence
  Description of Artificial Sequence: Synthetic oligonucleotide
ugcacugugccauauuguu

SEQ ID NO: 236288 - RNA, 19 nt, Artificial Sequence
  Description of Artificial Sequence: Synthetic oligonucleotide
cuuaggaagccacauagua

SEQ ID NO: 236289 - RNA, 19 nt, Artificial Sequence
  Description of Artificial Sequence: Synthetic oligonucleotide
guuuggcucuagcaagacg

SEQ ID NO: 236290 - RNA, 19 nt, Artificial Sequence
  Description of Artificial Sequence: Synthetic oligonucleotide
gaagcuaccccuagucuug

SEQ ID NO: 236291 - RNA, 19 nt, Artificial Sequence
  Description of Artificial Sequence: Synthetic oligonucleotide
gauuucggagugaagacaa

SEQ ID NO: 236292 - RNA, 19 nt, Artificial Sequence
  Description of Artificial Sequence: Synthetic oligonucleotide
gaaacccuaccagcuauag

SEQ ID NO: 236293 - RNA, 19 nt, Artificial Sequence
  Description of Artificial Sequence: Synthetic oligonucleotide
aguucuugccucagggugg

SEQ ID NO: 236294 - RNA, 19 nt, Artificial Sequence
  Description of Artificial Sequence: Synthetic oligonucleotide
uguuaccagccuccuuccg

SEQ ID NO: 236295 - RNA, 19 nt, Artificial Sequence
  Description of Artificial Sequence: Synthetic oligonucleotide
ugguagcuagggcaaauuc

SEQ ID NO: 236296 - RNA, 19 nt, Artificial Sequence
  Description of Artificial Sequence: Synthetic oligonucleotide
aaacccuaccagcuauagu

SEQ ID NO: 236297 - RNA, 19 nt, Artificial Sequence
  Description of Artificial Sequence: Synthetic oligonucleotide
uguuaccaguggcuggagc

SEQ ID NO: 236298 - RNA, 19 nt, Artificial Sequence
  Description of Artificial Sequence: Synthetic oligonucleotide
ucugucgucgaaguacaug

SEQ ID NO: 236299 - RNA, 19 nt, Artificial Sequence
  Description of Artificial Sequence: Synthetic oligonucleotide
uucucaguuuggcucuagc

SEQ ID NO: 236300 - RNA, 19 nt, Artificial Sequence
  Description of Artificial Sequence: Synthetic oligonucleotide
uuagucuuggcuugacaua

SEQ ID NO: 236301 - RNA, 19 nt, Artificial Sequence
  Description of Artificial Sequence: Synthetic oligonucleotide
agaggauuacauagugagg

SEQ ID NO: 236302 - RNA, 19 nt, Artificial Sequence
  Description of Artificial Sequence: Synthetic oligonucleotide
uuugaccugccuuggcaca

SEQ ID NO: 236303 - RNA, 19 nt, Artificial Sequence
  Description of Artificial Sequence: Synthetic oligonucleotide
ggaaguggguuccuggaag

SEQ ID NO: 236304 - RNA, 19 nt, Artificial Sequence
  Description of Artificial Sequence: Synthetic oligonucleotide
ugacuaccaguaccuuagg

SEQ ID NO: 236305 - RNA, 19 nt, Artificial Sequence
  Description of Artificial Sequence: Synthetic oligonucleotide
uggauagggccagagcugc

SEQ ID NO: 236306 - RNA, 19 nt, Artificial Sequence
  Description of Artificial Sequence: Synthetic oligonucleotide
ugauaacugcucaauccuu

SEQ ID NO: 236307 - RNA, 19 nt, Artificial Sequence
  Description of Artificial Sequence: Synthetic oligonucleotide
uacaccuugccagugcaga

SEQ ID NO: 236308 - RNA, 19 nt, Artificial Sequence
  Description of Artificial Sequence: Synthetic oligonucleotide
gugaagacaauuaacggcu

SEQ ID NO: 236309 - RNA, 19 nt, Artificial Sequence
  Description of Artificial Sequence: Synthetic oligonucleotide
uugcgucgauaacauacca

SEQ ID NO: 236310 - RNA, 19 nt, Artificial Sequence
  Description of Artificial Sequence: Synthetic oligonucleotide
aggauaucuugaggggacc

SEQ ID NO: 236311 - RNA, 19 nt, Artificial Sequence
  Description of Artificial Sequence: Synthetic oligonucleotide
ggcgacauucccaaugugg

SEQ ID NO: 236312 - RNA, 19 nt, Artificial Sequence
  Description of Artificial Sequence: Synthetic oligonucleotide
gguagcuagggcaaauucc

SEQ ID NO: 236313 - RNA, 19 nt, Artificial Sequence
  Description of Artificial Sequence: Synthetic oligonucleotide
uaccccuagucuugaaucu

SEQ ID NO: 236314 - RNA, 19 nt, Artificial Sequence
  Description of Artificial Sequence: Synthetic oligonucleotide
uccgagucuucaagauccg

SEQ ID NO: 236315 - RNA, 19 nt, Artificial Sequence
  Description of Artificial Sequence: Synthetic oligonucleotide
ucugccgcacccacuuugc

SEQ ID NO: 236316 - RNA, 19 nt, Artificial Sequence
  Description of Artificial Sequence: Synthetic oligonucleotide
ccuaggauaucuugagggg

SEQ ID NO: 236317 - RNA, 19 nt, Artificial Sequence
  Description of Artificial Sequence: Synthetic oligonucleotide
uggacucuauuuagagcca

SEQ ID NO: 236318 - RNA, 19 nt, Artificial Sequence
  Description of Artificial Sequence: Synthetic oligonucleotide
caaaggugguucaugggga

SEQ ID NO: 236319 - RNA, 19 nt, Artificial Sequence
  Description of Artificial Sequence: Synthetic oligonucleotide
ccugauugggccaaaggug

SEQ ID NO: 236320 - RNA, 19 nt, Artificial Sequence
  Description of Artificial Sequence: Synthetic oligonucleotide
aguaggaggucgaagggga

SEQ ID NO: 236321 - RNA, 19 nt, Artificial Sequence
  Description of Artificial Sequence: Synthetic oligonucleotide
ccggcuuacgcccucaugg

SEQ ID NO: 236322 - RNA, 19 nt, Artificial Sequence
  Description of Artificial Sequence: Synthetic oligonucleotide
uccgguuuguuaccagccu

SEQ ID NO: 236323 - RNA, 19 nt, Artificial Sequence
  Description of Artificial Sequence: Synthetic oligonucleotide
gugauaacugcucaauccu

SEQ ID NO: 236324 - RNA, 19 nt, Artificial Sequence
  Description of Artificial Sequence: Synthetic oligonucleotide
uagcaagacgaagcuaccc

SEQ ID NO: 236325 - RNA, 19 nt, Artificial Sequence
  Description of Artificial Sequence: Synthetic oligonucleotide
uggcgcagcagggauuucg

SEQ ID NO: 236326 - RNA, 19 nt, Artificial Sequence
  Description of Artificial Sequence: Synthetic oligonucleotide
caguaccuuaggaagccac

SEQ ID NO: 236327 - RNA, 19 nt, Artificial Sequence
  Description of Artificial Sequence: Synthetic oligonucleotide
agccaaucacuccaggcau

SEQ ID NO: 236328 - RNA, 19 nt, Artificial Sequence
  Description of Artificial Sequence: Synthetic oligonucleotide
ugggaucaccacucgggcc

SEQ ID NO: 236329 - RNA, 19 nt, Artificial Sequence
  Description of Artificial Sequence: Synthetic oligonucleotide
cuguguaaacauagguuca

SEQ ID NO: 236330 - RNA, 19 nt, Artificial Sequence
  Description of Artificial Sequence: Synthetic oligonucleotide
cuuguaauagccaccugcu

SEQ ID NO: 236331 - RNA, 19 nt, Artificial Sequence
  Description of Artificial Sequence: Synthetic oligonucleotide
acugacuaccaguaccuua

SEQ ID NO: 236332 - RNA, 19 nt, Artificial Sequence
  Description of Artificial Sequence: Synthetic oligonucleotide
uugacgacacccugggaua

SEQ ID NO: 236333 - RNA, 19 nt, Artificial Sequence
  Description of Artificial Sequence: Synthetic oligonucleotide
ggaucugucgucgaaguac

SEQ ID NO: 236334 - RNA, 19 nt, Artificial Sequence
  Description of Artificial Sequence: Synthetic oligonucleotide
aacggcuuucggaagggca

SEQ ID NO: 236335 - RNA, 19 nt, Artificial Sequence
  Description of Artificial Sequence: Synthetic oligonucleotide
ucuugccucaggguggcgc

SEQ ID NO: 236336 - RNA, 19 nt, Artificial Sequence
  Description of Artificial Sequence: Synthetic oligonucleotide
cuuagucuuggcuugacau

SEQ ID NO: 236337 - RNA, 19 nt, Artificial Sequence
  Description of Artificial Sequence: Synthetic oligonucleotide
gcgacauucccaauguggg

SEQ ID NO: 236338 - RNA, 19 nt, Artificial Sequence
  Description of Artificial Sequence: Synthetic oligonucleotide
guugacgacacccugggau

SEQ ID NO: 236339 - RNA, 19 nt, Artificial Sequence
  Description of Artificial Sequence: Synthetic oligonucleotide
uaucuugaggggaccuuuc

SEQ ID NO: 236340 - RNA, 19 nt, Artificial Sequence
  Description of Artificial Sequence: Synthetic oligonucleotide
uccauguguucaagggaac

SEQ ID NO: 236341 - RNA, 19 nt, Artificial Sequence
  Description of Artificial Sequence: Synthetic oligonucleotide
gacuaccaguaccuuagga

SEQ ID NO: 236342 - RNA, 19 nt, Artificial Sequence
  Description of Artificial Sequence: Synthetic oligonucleotide
acgaagcuaccccuagucu

SEQ ID NO: 236343 - RNA, 19 nt, Artificial Sequence
  Description of Artificial Sequence: Synthetic oligonucleotide
aaggauuuaucaacugcuu

SEQ ID NO: 236344 - RNA, 19 nt, Artificial Sequence
  Description of Artificial Sequence: Synthetic oligonucleotide
uuucggagugaagacaauu

SEQ ID NO: 236345 - RNA, 19 nt, Artificial Sequence
  Description of Artificial Sequence: Synthetic oligonucleotide
uccuucaguaggaggucga

SEQ ID NO: 236346 - RNA, 19 nt, Artificial Sequence
  Description of Artificial Sequence: Synthetic oligonucleotide
guggccauugcgucgauaa

SEQ ID NO: 236347 - RNA, 19 nt, Artificial Sequence
  Description of Artificial Sequence: Synthetic oligonucleotide
cacagguacagagcuggcg

SEQ ID NO: 236348 - RNA, 19 nt, Artificial Sequence
  Description of Artificial Sequence: Synthetic oligonucleotide
cuugcuccuuauugccucc

SEQ ID NO: 236349 - RNA, 19 nt, Artificial Sequence
  Description of Artificial Sequence: Synthetic oligonucleotide
gccacuuagccggacaugg

SEQ ID NO: 236350 - RNA, 19 nt, Artificial Sequence
  Description of Artificial Sequence: Synthetic oligonucleotide
acuuaguuuaugggucaag

SEQ ID NO: 236351 - RNA, 19 nt, Artificial Sequence
  Description of Artificial Sequence: Synthetic oligonucleotide
ggcaagacaugcuccgggg

SEQ ID NO: 236352 - RNA, 19 nt, Artificial Sequence
  Description of Artificial Sequence: Synthetic oligonucleotide
gcgucgauaacauaccaga

SEQ ID NO: 236353 - RNA, 19 nt, Artificial Sequence
  Description of Artificial Sequence: Synthetic oligonucleotide
ugacacccgaaacccuacc

SEQ ID NO: 236354 - RNA, 19 nt, Artificial Sequence
  Description of Artificial Sequence: Synthetic oligonucleotide
aggauuacauagugaggau

SEQ ID NO: 236355 - RNA, 19 nt, Artificial Sequence
  Description of Artificial Sequence: Synthetic oligonucleotide
ggauuacauagugaggaug

SEQ ID NO: 236356 - RNA, 19 nt, Artificial Sequence
  Description of Artificial Sequence: Synthetic oligonucleotide
cuuccgagucuucaagauc

SEQ ID NO: 236357 - RNA, 19 nt, Artificial Sequence
  Description of Artificial Sequence: Synthetic oligonucleotide
auaccagacuggcuuggca

SEQ ID NO: 236358 - RNA, 19 nt, Artificial Sequence
  Description of Artificial Sequence: Synthetic oligonucleotide
gaucugucgucgaaguaca

SEQ ID NO: 236359 - RNA, 19 nt, Artificial Sequence
  Description of Artificial Sequence: Synthetic oligonucleotide
ucaagccgaugcaaugcaa

SEQ ID NO: 236360 - RNA, 19 nt, Artificial Sequence
  Description of Artificial Sequence: Synthetic oligonucleotide
cagaaaccgcucugggcgg

SEQ ID NO: 236361 - RNA, 19 nt, Artificial Sequence
  Description of Artificial Sequence: Synthetic oligonucleotide
ugaagacaauuaacggcuu

SEQ ID NO: 236362 - RNA, 19 nt, Artificial Sequence
  Description of Artificial Sequence: Synthetic oligonucleotide
gacacccgaaacccuacca

SEQ ID NO: 236363 - RNA, 19 nt, Artificial Sequence
  Description of Artificial Sequence: Synthetic oligonucleotide
guacauggaagaaguugcc

SEQ ID NO: 236364 - RNA, 19 nt, Artificial Sequence
  Description of Artificial Sequence: Synthetic oligonucleotide
uaccagcuauaguuccucc

SEQ ID NO: 236365 - RNA, 19 nt, Artificial Sequence
  Description of Artificial Sequence: Synthetic oligonucleotide
uaaguggccaggggauuag

SEQ ID NO: 236366 - RNA, 19 nt, Artificial Sequence
  Description of Artificial Sequence: Synthetic oligonucleotide
gcuagggcaaauuccguac

SEQ ID NO: 236367 - RNA, 19 nt, Artificial Sequence
  Description of Artificial Sequence: Synthetic oligonucleotide
ccuagucuugaaucugugg

SEQ ID NO: 236368 - RNA, 19 nt, Artificial Sequence
  Description of Artificial Sequence: Synthetic oligonucleotide
auaccagauacaacaacaa

SEQ ID NO: 236369 - RNA, 19 nt, Artificial Sequence
  Description of Artificial Sequence: Synthetic oligonucleotide
ggggaauggugauaacugc

SEQ ID NO: 236370 - RNA, 19 nt, Artificial Sequence
  Description of Artificial Sequence: Synthetic oligonucleotide
acuuagccggacauggaug

SEQ ID NO: 236371 - RNA, 19 nt, Artificial Sequence
  Description of Artificial Sequence: Synthetic oligonucleotide
aguugcagucauauagcug

SEQ ID NO: 236372 - RNA, 19 nt, Artificial Sequence
  Description of Artificial Sequence: Synthetic oligonucleotide
ugauugggccaaagguggu

SEQ ID NO: 236373 - RNA, 19 nt, Artificial Sequence
  Description of Artificial Sequence: Synthetic oligonucleotide
caucuuuggaucugguaaa

SEQ ID NO: 236374 - RNA, 19 nt, Artificial Sequence
  Description of Artificial Sequence: Synthetic oligonucleotide
gaaggguagcucucugcuc

SEQ ID NO: 236375 - RNA, 19 nt, Artificial Sequence
  Description of Artificial Sequence: Synthetic oligonucleotide
acauucccaaugugggcca

SEQ ID NO: 236376 - RNA, 19 nt, Artificial Sequence
  Description of Artificial Sequence: Synthetic oligonucleotide
gaccaagacgcagccagug

SEQ ID NO: 236377 - RNA, 19 nt, Artificial Sequence
  Description of Artificial Sequence: Synthetic oligonucleotide
uuaaguggccaggggauua

SEQ ID NO: 236378 - RNA, 19 nt, Artificial Sequence
  Description of Artificial Sequence: Synthetic oligonucleotide
agcuagggcaaauuccgua

SEQ ID NO: 236379 - RNA, 19 nt, Artificial Sequence
  Description of Artificial Sequence: Synthetic oligonucleotide
cacaguccgguuuguuacc

SEQ ID NO: 236380 - RNA, 19 nt, Artificial Sequence
  Description of Artificial Sequence: Synthetic oligonucleotide
ucaaucagaucugucccuu

SEQ ID NO: 236381 - RNA, 19 nt, Artificial Sequence
  Description of Artificial Sequence: Synthetic oligonucleotide
cugcucacccaacaagcug

SEQ ID NO: 236382 - RNA, 19 nt, Artificial Sequence
  Description of Artificial Sequence: Synthetic oligonucleotide
uucugaucauggagcacau

SEQ ID NO: 236383 - RNA, 19 nt, Artificial Sequence
  Description of Artificial Sequence: Synthetic oligonucleotide
uugcccuuauccacugauc

SEQ ID NO: 236384 - RNA, 19 nt, Artificial Sequence
  Description of Artificial Sequence: Synthetic oligonucleotide
agaacaggcggaggcaugu

SEQ ID NO: 236385 - RNA, 19 nt, Artificial Sequence
  Description of Artificial Sequence: Synthetic oligonucleotide
aacuuaguuuaugggucaa

SEQ ID NO: 236386 - RNA, 19 nt, Artificial Sequence
  Description of Artificial Sequence: Synthetic oligonucleotide
aguaccuuaggaagccaca

SEQ ID NO: 236387 - RNA, 19 nt, Artificial Sequence
  Description of Artificial Sequence: Synthetic oligonucleotide
auuacauagugaggaugga

SEQ ID NO: 236388 - RNA, 19 nt, Artificial Sequence
  Description of Artificial Sequence: Synthetic oligonucleotide
ucucgggugaggucauagu

SEQ ID NO: 236389 - RNA, 19 nt, Artificial Sequence
  Description of Artificial Sequence: Synthetic oligonucleotide
ccaagacgcagccagugcc

SEQ ID NO: 236390 - RNA, 19 nt, Artificial Sequence
  Description of Artificial Sequence: Synthetic oligonucleotide
ggaaaaugggaucaccacu

SEQ ID NO: 236391 - RNA, 19 nt, Artificial Sequence
  Description of Artificial Sequence: Synthetic oligonucleotide
cacccaacaagcugaguga

SEQ ID NO: 236392 - RNA, 19 nt, Artificial Sequence
  Description of Artificial Sequence: Synthetic oligonucleotide
uuggcucuagcaagacgaa

SEQ ID NO: 236393 - RNA, 19 nt, Artificial Sequence
  Description of Artificial Sequence: Synthetic oligonucleotide
agggcuagccauggcaaag

SEQ ID NO: 236394 - RNA, 19 nt, Artificial Sequence
  Description of Artificial Sequence: Synthetic oligonucleotide
auggauagggccagagcug

SEQ ID NO: 236395 - RNA, 19 nt, Artificial Sequence
  Description of Artificial Sequence: Synthetic oligonucleotide
uuuaugggucaagccgaug

SEQ ID NO: 236396 - RNA, 19 nt, Artificial Sequence
  Description of Artificial Sequence: Synthetic oligonucleotide
cagucauauagcugauuga

SEQ ID NO: 236397 - RNA, 19 nt, Artificial Sequence
  Description of Artificial Sequence: Synthetic oligonucleotide
uagcuagggcaaauuccgu

SEQ ID NO: 236398 - RNA, 19 nt, Artificial Sequence
  Description of Artificial Sequence: Synthetic oligonucleotide
gucaagccgaugcaaugca

SEQ ID NO: 236399 - RNA, 19 nt, Artificial Sequence
  Description of Artificial Sequence: Synthetic oligonucleotide
cuuuugacauuguuugggu

SEQ ID NO: 236400 - RNA, 19 nt, Artificial Sequence
  Description of Artificial Sequence: Synthetic oligonucleotide
ucccaaugugggccaagac

SEQ ID NO: 236401 - RNA, 19 nt, Artificial Sequence
  Description of Artificial Sequence: Synthetic oligonucleotide
gggcaagacaugcuccggg

SEQ ID NO: 236402 - RNA, 19 nt, Artificial Sequence
  Description of Artificial Sequence: Synthetic oligonucleotide
cuguuccaaccccagagga

SEQ ID NO: 236403 - RNA, 19 nt, Artificial Sequence
  Description of Artificial Sequence: Synthetic oligonucleotide
uccuuguaauagccaccug

SEQ ID NO: 236404 - RNA, 19 nt, Artificial Sequence
  Description of Artificial Sequence: Synthetic oligonucleotide
auagcugauugaugucaaa

SEQ ID NO: 236405 - RNA, 19 nt, Artificial Sequence
  Description of Artificial Sequence: Synthetic oligonucleotide
gugcaagaucuuuucaucu

SEQ ID NO: 236406 - RNA, 19 nt, Artificial Sequence
  Description of Artificial Sequence: Synthetic oligonucleotide
cugggguuuaggacccgag

SEQ ID NO: 236407 - RNA, 19 nt, Artificial Sequence
  Description of Artificial Sequence: Synthetic oligonucleotide
agccuugguucuugugcuc

SEQ ID NO: 236408 - RNA, 19 nt, Artificial Sequence
  Description of Artificial Sequence: Synthetic oligonucleotide
agugcuugaugugcaagau

SEQ ID NO: 236409 - RNA, 19 nt, Artificial Sequence
  Description of Artificial Sequence: Synthetic oligonucleotide
gaggaacgggccauccgag

SEQ ID NO: 236410 - RNA, 19 nt, Artificial Sequence
  Description of Artificial Sequence: Synthetic oligonucleotide
uugggccaaaggugguuca

SEQ ID NO: 236411 - RNA, 19 nt, Artificial Sequence
  Description of Artificial Sequence: Synthetic oligonucleotide
ccaaacccaagaaggguag

SEQ ID NO: 236412 - RNA, 19 nt, Artificial Sequence
  Description of Artificial Sequence: Synthetic oligonucleotide
guccgguuuguuaccagcc

SEQ ID NO: 236413 - RNA, 19 nt, Artificial Sequence
  Description of Artificial Sequence: Synthetic oligonucleotide
aaccgcucugggcgggcag

SEQ ID NO: 236414 - RNA, 19 nt, Artificial Sequence
  Description of Artificial Sequence: Synthetic oligonucleotide
cagcuauaguuccuccaug

SEQ ID NO: 236415 - RNA, 19 nt, Artificial Sequence
  Description of Artificial Sequence: Synthetic oligonucleotide
gacauuguuuggguccuga

SEQ ID NO: 236416 - RNA, 19 nt, Artificial Sequence
  Description of Artificial Sequence: Synthetic oligonucleotide
gacccaugccuuccaugcc

SEQ ID NO: 236417 - RNA, 19 nt, Artificial Sequence
  Description of Artificial Sequence: Synthetic oligonucleotide
uccggcuuacgcccucaug

SEQ ID NO: 236418 - RNA, 19 nt, Artificial Sequence
  Description of Artificial Sequence: Synthetic oligonucleotide
agacgaagcuaccccuagu

SEQ ID NO: 236419 - RNA, 19 nt, Artificial Sequence
  Description of Artificial Sequence: Synthetic oligonucleotide
cauggaugguaaaguucuc

SEQ ID NO: 236420 - RNA, 19 nt, Artificial Sequence
  Description of Artificial Sequence: Synthetic oligonucleotide
cagagagcuguugcauacg

SEQ ID NO: 236421 - RNA, 19 nt, Artificial Sequence
  Description of Artificial Sequence: Synthetic oligonucleotide
gggagagucagcaggacca

SEQ ID NO: 236422 - RNA, 19 nt, Artificial Sequence
  Description of Artificial Sequence: Synthetic oligonucleotide
agccgaugcaaugcaaagu

SEQ ID NO: 236423 - RNA, 19 nt, Artificial Sequence
  Description of Artificial Sequence: Synthetic oligonucleotide
ggccugauugggccaaagg

SEQ ID NO: 236424 - RNA, 19 nt, Artificial Sequence
  Description of Artificial Sequence: Synthetic oligonucleotide
gcugagugacacccgaaac

SEQ ID NO: 236425 - RNA, 19 nt, Artificial Sequence
  Description of Artificial Sequence: Synthetic oligonucleotide
aggagacaaucuaauuccu

SEQ ID NO: 236426 - RNA, 19 nt, Artificial Sequence
  Description of Artificial Sequence: Synthetic oligonucleotide
gcuauaguuccuccaugac

SEQ ID NO: 236427 - RNA, 19 nt, Artificial Sequence
  Description of Artificial Sequence: Synthetic oligonucleotide
gugccauauuguugaaauc

SEQ ID NO: 236428 - RNA, 19 nt, Artificial Sequence
  Description of Artificial Sequence: Synthetic oligonucleotide
uggccauugcgucgauaac

SEQ ID NO: 236429 - RNA, 19 nt, Artificial Sequence
  Description of Artificial Sequence: Synthetic oligonucleotide
auacucgggcugguugacg

SEQ ID NO: 236430 - RNA, 19 nt, Artificial Sequence
  Description of Artificial Sequence: Synthetic oligonucleotide
cauaccagacuggcuuggc

SEQ ID NO: 236431 - RNA, 19 nt, Artificial Sequence
  Description of Artificial Sequence: Synthetic oligonucleotide
ugacgacacccugggauac

SEQ ID NO: 236432 - RNA, 19 nt, Artificial Sequence
  Description of Artificial Sequence: Synthetic oligonucleotide
uuccaaccccagaggauua

SEQ ID NO: 236433 - RNA, 19 nt, Artificial Sequence
  Description of Artificial Sequence: Synthetic oligonucleotide
uagggcuagccauggcaaa

SEQ ID NO: 236434 - RNA, 19 nt, Artificial Sequence
  Description of Artificial Sequence: Synthetic oligonucleotide
auauucagacagagagcug

SEQ ID NO: 236435 - RNA, 19 nt, Artificial Sequence
  Description of Artificial Sequence: Synthetic oligonucleotide
cauucugaucauggagcac

SEQ ID NO: 236436 - RNA, 19 nt, Artificial Sequence
  Description of Artificial Sequence: Synthetic oligonucleotide
cuucaagauccggcuuacg

SEQ ID NO: 236437 - RNA, 19 nt, Artificial Sequence
  Description of Artificial Sequence: Synthetic oligonucleotide
uaggaggucgaaggggaau

SEQ ID NO: 236438 - RNA, 19 nt, Artificial Sequence
  Description of Artificial Sequence: Synthetic oligonucleotide
uaggacccgagggagcuuc

SEQ ID NO: 236439 - RNA, 19 nt, Artificial Sequence
  Description of Artificial Sequence: Synthetic oligonucleotide
ggcuuugcgcucucgggug

SEQ ID NO: 236440 - RNA, 19 nt, Artificial Sequence
  Description of Artificial Sequence: Synthetic oligonucleotide
acccgaaacccuaccagcu

SEQ ID NO: 236441 - RNA, 19 nt, Artificial Sequence
  Description of Artificial Sequence: Synthetic oligonucleotide
gaagacaauuaacggcuuu

SEQ ID NO: 236442 - RNA, 19 nt, Artificial Sequence
  Description of Artificial Sequence: Synthetic oligonucleotide
accccuagucuugaaucug

SEQ ID NO: 236443 - RNA, 19 nt, Artificial Sequence
  Description of Artificial Sequence: Synthetic oligonucleotide
gcauuagggcuagccaugg

SEQ ID NO: 236444 - RNA, 19 nt, Artificial Sequence
  Description of Artificial Sequence: Synthetic oligonucleotide
gcaagacaugcuccggggc

SEQ ID NO: 236445 - RNA, 19 nt, Artificial Sequence
  Description of Artificial Sequence: Synthetic oligonucleotide
uggagcacaugguggcgau

SEQ ID NO: 236446 - RNA, 19 nt, Artificial Sequence
  Description of Artificial Sequence: Synthetic oligonucleotide
cggagugaagacaauuaac

SEQ ID NO: 236447 - RNA, 19 nt, Artificial Sequence
  Description of Artificial Sequence: Synthetic oligonucleotide
ggccauugcgucgauaaca

SEQ ID NO: 236448 - RNA, 19 nt, Artificial Sequence
  Description of Artificial Sequence: Synthetic oligonucleotide
uacgcccucauggauggua

SEQ ID NO: 236449 - RNA, 19 nt, Artificial Sequence
  Description of Artificial Sequence: Synthetic oligonucleotide
uaacggcuuucggaagggc

SEQ ID NO: 236450 - RNA, 19 nt, Artificial Sequence
  Description of Artificial Sequence: Synthetic oligonucleotide
auuaaguggccaggggauu

SEQ ID NO: 236451 - RNA, 19 nt, Artificial Sequence
  Description of Artificial Sequence: Synthetic oligonucleotide
ccuaugagaacaggcggag

SEQ ID NO: 236452 - RNA, 19 nt, Artificial Sequence
  Description of Artificial Sequence: Synthetic oligonucleotide
uuccuucaggagugaucca

SEQ ID NO: 236453 - RNA, 19 nt, Artificial Sequence
  Description of Artificial Sequence: Synthetic oligonucleotide
gcacggucaaugguggucc

SEQ ID NO: 236454 - RNA, 19 nt, Artificial Sequence
  Description of Artificial Sequence: Synthetic oligonucleotide
gggaggaacgggccauccg

SEQ ID NO: 236455 - RNA, 19 nt, Artificial Sequence
  Description of Artificial Sequence: Synthetic oligonucleotide
cucggccagcauaccagac

SEQ ID NO: 236456 - RNA, 19 nt, Artificial Sequence
  Description of Artificial Sequence: Synthetic oligonucleotide
aagcuaccccuagucuuga

SEQ ID NO: 236457 - RNA, 19 nt, Artificial Sequence
  Description of Artificial Sequence: Synthetic oligonucleotide
gccagcauaccagacuggc

SEQ ID NO: 236458 - RNA, 19 nt, Artificial Sequence
  Description of Artificial Sequence: Synthetic oligonucleotide
agggcaaauuccguacaaa

SEQ ID NO: 236459 - RNA, 19 nt, Artificial Sequence
  Description of Artificial Sequence: Synthetic oligonucleotide
gccugauugggccaaaggu

SEQ ID NO: 236460 - RNA, 19 nt, Artificial Sequence
  Description of Artificial Sequence: Synthetic oligonucleotide
gucgaaguacauggaagaa

SEQ ID NO: 236461 - RNA, 19 nt, Artificial Sequence
  Description of Artificial Sequence: Synthetic oligonucleotide
ggaggucgaaggggaaugg

SEQ ID NO: 236462 - RNA, 19 nt, Artificial Sequence
  Description of Artificial Sequence: Synthetic oligonucleotide
uccuuagucuuggcuugac

SEQ ID NO: 236463 - RNA, 19 nt, Artificial Sequence
  Description of Artificial Sequence: Synthetic oligonucleotide
acgacacccugggauacca

SEQ ID NO: 236464 - RNA, 19 nt, Artificial Sequence
  Description of Artificial Sequence: Synthetic oligonucleotide
cgcagcagggauuucggag

SEQ ID NO: 236465 - RNA, 19 nt, Artificial Sequence
  Description of Artificial Sequence: Synthetic oligonucleotide
aggaucugucgucgaagua

SEQ ID NO: 236466 - RNA, 19 nt, Artificial Sequence
  Description of Artificial Sequence: Synthetic oligonucleotide
gauagggccagagcugccu

SEQ ID NO: 236467 - RNA, 19 nt, Artificial Sequence
  Description of Artificial Sequence: Synthetic oligonucleotide
auggugguccuuagucuug

SEQ ID NO: 236468 - RNA, 19 nt, Artificial Sequence
  Description of Artificial Sequence: Synthetic oligonucleotide
gacgacacccugggauacc

SEQ ID NO: 236469 - RNA, 19 nt, Artificial Sequence
  Description of Artificial Sequence: Synthetic oligonucleotide
caagacgaagcuaccccua

SEQ ID NO: 236470 - RNA, 19 nt, Artificial Sequence
  Description of Artificial Sequence: Synthetic oligonucleotide
ggaauccagccagugcuug

SEQ ID NO: 236471 - RNA, 19 nt, Artificial Sequence
  Description of Artificial Sequence: Synthetic oligonucleotide
gcccuuauccacugaucug

SEQ ID NO: 236472 - RNA, 19 nt, Artificial Sequence
  Description of Artificial Sequence: Synthetic oligonucleotide
ggaucacacgcuggaagug

SEQ ID NO: 236473 - RNA, 19 nt, Artificial Sequence
  Description of Artificial Sequence: Synthetic oligonucleotide
ugcgcucucgggugagguc

SEQ ID NO: 236474 - RNA, 19 nt, Artificial Sequence
  Description of Artificial Sequence: Synthetic oligonucleotide
gggguggaacaguugacaa

SEQ ID NO: 236475 - RNA, 19 nt, Artificial Sequence
  Description of Artificial Sequence: Synthetic oligonucleotide
gcccucauggaugguaaag

SEQ ID NO: 236476 - RNA, 19 nt, Artificial Sequence
  Description of Artificial Sequence: Synthetic oligonucleotide
ggcgcagcagggauuucgg

SEQ ID NO: 236477 - RNA, 19 nt, Artificial Sequence
  Description of Artificial Sequence: Synthetic oligonucleotide
gaacaggcggaggcaugug

SEQ ID NO: 236478 - RNA, 19 nt, Artificial Sequence
  Description of Artificial Sequence: Synthetic oligonucleotide
gaaaccgcucugggcgggc

SEQ ID NO: 236479 - RNA, 19 nt, Artificial Sequence
  Description of Artificial Sequence: Synthetic oligonucleotide
aaaccgcucugggcgggca

SEQ ID NO: 236480 - RNA, 19 nt, Artificial Sequence
  Description of Artificial Sequence: Synthetic oligonucleotide
ugacauuguuuggguccug

SEQ ID NO: 236481 - RNA, 19 nt, Artificial Sequence
  Description of Artificial Sequence: Synthetic oligonucleotide
gcagaggaaugcucuggac

SEQ ID NO: 236482 - RNA, 19 nt, Artificial Sequence
  Description of Artificial Sequence: Synthetic oligonucleotide
uccguacaaacagccccaa

SEQ ID NO: 236483 - RNA, 19 nt, Artificial Sequence
  Description of Artificial Sequence: Synthetic oligonucleotide
cgucgaaguacauggaaga

SEQ ID NO: 236484 - RNA, 19 nt, Artificial Sequence
  Description of Artificial Sequence: Synthetic oligonucleotide
guuccaaccccagaggauu

SEQ ID NO: 236485 - RNA, 19 nt, Artificial Sequence
  Description of Artificial Sequence: Synthetic oligonucleotide
ccaggggauuaggaaaggg

SEQ ID NO: 236486 - RNA, 19 nt, Artificial Sequence
  Description of Artificial Sequence: Synthetic oligonucleotide
cuggcgacauucccaaugu

SEQ ID NO: 236487 - RNA, 19 nt, Artificial Sequence
  Description of Artificial Sequence: Synthetic oligonucleotide
caccaaauugggccuccca

SEQ ID NO: 236488 - RNA, 19 nt, Artificial Sequence
  Description of Artificial Sequence: Synthetic oligonucleotide
gcaagacgaagcuaccccu

SEQ ID NO: 236489 - RNA, 19 nt, Artificial Sequence
  Description of Artificial Sequence: Synthetic oligonucleotide
cacuuagccggacauggau

SEQ ID NO: 236490 - RNA, 19 nt, Artificial Sequence
  Description of Artificial Sequence: Synthetic oligonucleotide
caggcggaggcauguggca

SEQ ID NO: 236491 - RNA, 19 nt, Artificial Sequence
  Description of Artificial Sequence: Synthetic oligonucleotide
ccgguuuguuaccagccuc

SEQ ID NO: 236492 - RNA, 19 nt, Artificial Sequence
  Description of Artificial Sequence: Synthetic oligonucleotide
auuucggagugaagacaau

SEQ ID NO: 236493 - RNA, 19 nt, Artificial Sequence
  Description of Artificial Sequence: Synthetic oligonucleotide
gggauacuucugugccucc

SEQ ID NO: 236494 - RNA, 19 nt, Artificial Sequence
  Description of Artificial Sequence: Synthetic oligonucleotide
cuuaucauacuuggagauu

SEQ ID NO: 236495 - RNA, 19 nt, Artificial Sequence
  Description of Artificial Sequence: Synthetic oligonucleotide
gucgaaggggaauggugau

SEQ ID NO: 236496 - RNA, 19 nt, Artificial Sequence
  Description of Artificial Sequence: Synthetic oligonucleotide
ggagacaaucuaauuccua

SEQ ID NO: 236497 - RNA, 19 nt, Artificial Sequence
  Description of Artificial Sequence: Synthetic oligonucleotide
gccauccgagggucugugg

SEQ ID NO: 236498 - RNA, 19 nt, Artificial Sequence
  Description of Artificial Sequence: Synthetic oligonucleotide
ugccccuggcuuugcgcuc

SEQ ID NO: 236499 - RNA, 19 nt, Artificial Sequence
  Description of Artificial Sequence: Synthetic oligonucleotide
gauccggcuuacgcccuca

SEQ ID NO: 236500 - RNA, 19 nt, Artificial Sequence
  Description of Artificial Sequence: Synthetic oligonucleotide
gaggucgaaggggaauggu

SEQ ID NO: 236501 - RNA, 19 nt, Artificial Sequence
  Description of Artificial Sequence: Synthetic oligonucleotide
auucugccgcacccacuuu

SEQ ID NO: 236502 - RNA, 19 nt, Artificial Sequence
  Description of Artificial Sequence: Synthetic oligonucleotide
ccgagucuucaagauccgg

SEQ ID NO: 236503 - RNA, 19 nt, Artificial Sequence
  Description of Artificial Sequence: Synthetic oligonucleotide
agcuaccccuagucuugaa

SEQ ID NO: 236504 - RNA, 19 nt, Artificial Sequence
  Description of Artificial Sequence: Synthetic oligonucleotide
gauugggccaaaggugguu

SEQ ID NO: 236505 - RNA, 19 nt, Artificial Sequence
  Description of Artificial Sequence: Synthetic oligonucleotide
cuuauccacugaucuguuu

SEQ ID NO: 236506 - RNA, 19 nt, Artificial Sequence
  Description of Artificial Sequence: Synthetic oligonucleotide
guaggaggucgaaggggaa

SEQ ID NO: 236507 - RNA, 19 nt, Artificial Sequence
  Description of Artificial Sequence: Synthetic oligonucleotide
ccauguguucaagggaaca

SEQ ID NO: 236508 - RNA, 19 nt, Artificial Sequence
  Description of Artificial Sequence: Synthetic oligonucleotide
ccuuagucuuggcuugaca

SEQ ID NO: 236509 - RNA, 19 nt, Artificial Sequence
  Description of Artificial Sequence: Synthetic oligonucleotide
cgaaggggaauggugauaa

SEQ ID NO: 236510 - RNA, 19 nt, Artificial Sequence
  Description of Artificial Sequence: Synthetic oligonucleotide
guuuaugggucaagccgau

SEQ ID NO: 236511 - RNA, 19 nt, Artificial Sequence
  Description of Artificial Sequence: Synthetic oligonucleotide
auccggcuuacgcccucau

SEQ ID NO: 236512 - RNA, 19 nt, Artificial Sequence
  Description of Artificial Sequence: Synthetic oligonucleotide
uuaggacccgagggagcuu

SEQ ID NO: 236513 - RNA, 19 nt, Artificial Sequence
  Description of Artificial Sequence: Synthetic oligonucleotide
ggauaucuugaggggaccu

SEQ ID NO: 236514 - RNA, 19 nt, Artificial Sequence
  Description of Artificial Sequence: Synthetic oligonucleotide
gcuaccccuagucuugaau

SEQ ID NO: 236515 - RNA, 19 nt, Artificial Sequence
  Description of Artificial Sequence: Synthetic oligonucleotide
ggaaugcucuggacccaug

SEQ ID NO: 236516 - RNA, 19 nt, Artificial Sequence
  Description of Artificial Sequence: Synthetic oligonucleotide
cagcaggaucugucgucga

SEQ ID NO: 236517 - RNA, 19 nt, Artificial Sequence
  Description of Artificial Sequence: Synthetic oligonucleotide
ggauagggccagagcugcc

SEQ ID NO: 236518 - RNA, 19 nt, Artificial Sequence
  Description of Artificial Sequence: Synthetic oligonucleotide
ccagcuauaguuccuccau

SEQ ID NO: 236519 - RNA, 19 nt, Artificial Sequence
  Description of Artificial Sequence: Synthetic oligonucleotide
agccggacauggaugccuu

SEQ ID NO: 236520 - RNA, 19 nt, Artificial Sequence
  Description of Artificial Sequence: Synthetic oligonucleotide
acggucaauggugguccuu

SEQ ID NO: 236521 - RNA, 19 nt, Artificial Sequence
  Description of Artificial Sequence: Synthetic oligonucleotide
aucugucgucgaaguacau

SEQ ID NO: 236522 - RNA, 19 nt, Artificial Sequence
  Description of Artificial Sequence: Synthetic oligonucleotide
gcggaggcauguggcacag

SEQ ID NO: 236523 - RNA, 19 nt, Artificial Sequence
  Description of Artificial Sequence: Synthetic oligonucleotide
ggccauccgagggucugug

SEQ ID NO: 236524 - RNA, 19 nt, Artificial Sequence
  Description of Artificial Sequence: Synthetic oligonucleotide
gccauugcgucgauaacau

SEQ ID NO: 236525 - RNA, 19 nt, Artificial Sequence
  Description of Artificial Sequence: Synthetic oligonucleotide
cauucccaaugugggccaa

SEQ ID NO: 236526 - RNA, 19 nt, Artificial Sequence
  Description of Artificial Sequence: Synthetic oligonucleotide
ccacuuagccggacaugga

SEQ ID NO: 236527 - RNA, 19 nt, Artificial Sequence
  Description of Artificial Sequence: Synthetic oligonucleotide
ggcuuacgcccucauggau

SEQ ID NO: 236528 - RNA, 19 nt, Artificial Sequence
  Description of Artificial Sequence: Synthetic oligonucleotide
acgcuggaaguggguuccu

SEQ ID NO: 236529 - RNA, 19 nt, Artificial Sequence
  Description of Artificial Sequence: Synthetic oligonucleotide
cgaagcuaccccuagucuu

SEQ ID NO: 236530 - RNA, 19 nt, Artificial Sequence
  Description of Artificial Sequence: Synthetic oligonucleotide
cauggaaggugggcagccu

SEQ ID NO: 236531 - RNA, 19 nt, Artificial Sequence
  Description of Artificial Sequence: Synthetic oligonucleotide
gcgcagcagggauuucgga

SEQ ID NO: 236532 - RNA, 19 nt, Artificial Sequence
  Description of Artificial Sequence: Synthetic oligonucleotide
caacauccuuguggaaggu

SEQ ID NO: 236533 - RNA, 19 nt, Artificial Sequence
  Description of Artificial Sequence: Synthetic oligonucleotide
ccccuagucuugaaucugu

SEQ ID NO: 236534 - RNA, 19 nt, Artificial Sequence
  Description of Artificial Sequence: Synthetic oligonucleotide
ccgaaacccuaccagcuau

SEQ ID NO: 236535 - RNA, 19 nt, Artificial Sequence
  Description of Artificial Sequence: Synthetic oligonucleotide
cacggucaauggugguccu

SEQ ID NO: 236536 - RNA, 19 nt, Artificial Sequence
  Description of Artificial Sequence: Synthetic oligonucleotide
cccgaaacccuaccagcua

SEQ ID NO: 236537 - RNA, 19 nt, Artificial Sequence
  Description of Artificial Sequence: Synthetic oligonucleotide
gccggacauggaugccuuc

SEQ ID NO: 236538 - RNA, 19 nt, Artificial Sequence
  Description of Artificial Sequence: Synthetic oligonucleotide
gcaugguagcuagggcaaa

SEQ ID NO: 236539 - RNA, 19 nt, Artificial Sequence
  Description of Artificial Sequence: Synthetic oligonucleotide
cggcuuacgcccucaugga

SEQ ID NO: 236540 - RNA, 19 nt, Artificial Sequence
  Description of Artificial Sequence: Synthetic oligonucleotide
caaucacuccaggcauggu

SEQ ID NO: 236541 - RNA, 19 nt, Artificial Sequence
  Description of Artificial Sequence: Synthetic oligonucleotide
ccugggguuuaggacccga

SEQ ID NO: 236542 - RNA, 19 nt, Artificial Sequence
  Description of Artificial Sequence: Synthetic oligonucleotide
cgaaacccuaccagcuaua

SEQ ID NO: 236543 - RNA, 19 nt, Artificial Sequence
  Description of Artificial Sequence: Synthetic oligonucleotide
cucacccaacaagcugagu

SEQ ID NO: 236544 - RNA, 19 nt, Artificial Sequence
  Description of Artificial Sequence: Synthetic oligonucleotide
ccauugcgucgauaacaua

SEQ ID NO: 236545 - RNA, 19 nt, Artificial Sequence
  Description of Artificial Sequence: Synthetic oligonucleotide
cagacuggcuuggcacggu

SEQ ID NO: 236546 - RNA, 19 nt, Artificial Sequence
  Description of Artificial Sequence: Synthetic oligonucleotide
ccguacaaacagccccaaa

SEQ ID NO: 236547 - RNA, 19 nt, Artificial Sequence
  Description of Artificial Sequence: Synthetic oligonucleotide
ccuuauccacugaucuguu

SEQ ID NO: 236548 - RNA, 19 nt, Artificial Sequence
  Description of Artificial Sequence: Synthetic oligonucleotide
ggggccugauugggccaaa

SEQ ID NO: 236549 - RNA, 19 nt, Artificial Sequence
  Description of Artificial Sequence: Synthetic oligonucleotide
aaugguuaguccauuaggc

SEQ ID NO: 236550 - RNA, 19 nt, Artificial Sequence
  Description of Artificial Sequence: Synthetic oligonucleotide
uucgauacgcuuuagaucu

SEQ ID NO: 236551 - RNA, 19 nt, Artificial Sequence
  Description of Artificial Sequence: Synthetic oligonucleotide
aauggcaugacggaugucg

SEQ ID NO: 236552 - RNA, 19 nt, Artificial Sequence
  Description of Artificial Sequence: Synthetic oligonucleotide
uauaguguggccuuugugc

SEQ ID NO: 236553 - RNA, 19 nt, Artificial Sequence
  Description of Artificial Sequence: Synthetic oligonucleotide
ugauugggcagacagacag

SEQ ID NO: 236554 - RNA, 19 nt, Artificial Sequence
  Description of Artificial Sequence: Synthetic oligonucleotide
aguaacaugauuccgguca

SEQ ID NO: 236555 - RNA, 19 nt, Artificial Sequence
  Description of Artificial Sequence: Synthetic oligonucleotide
ugauguagggccuguaugg

SEQ ID NO: 236556 - RNA, 19 nt, Artificial Sequence
  Description of Artificial Sequence: Synthetic oligonucleotide
uuuagaucugcauccaccc

SEQ ID NO: 236557 - RNA, 19 nt, Artificial Sequence
  Description of Artificial Sequence: Synthetic oligonucleotide
acgcuuuagaucugcaucc

SEQ ID NO: 236558 - RNA, 19 nt, Artificial Sequence
  Description of Artificial Sequence: Synthetic oligonucleotide
aguacauguacccucgcuc

SEQ ID NO: 236559 - RNA, 19 nt, Artificial Sequence
  Description of Artificial Sequence: Synthetic oligonucleotide
aagucacagcuuucgauac

SEQ ID NO: 236560 - RNA, 19 nt, Artificial Sequence
  Description of Artificial Sequence: Synthetic oligonucleotide
augguuaguccauuaggcc

SEQ ID NO: 236561 - RNA, 19 nt, Artificial Sequence
  Description of Artificial Sequence: Synthetic oligonucleotide
acggaugucgcccaccugc

SEQ ID NO: 236562 - RNA, 19 nt, Artificial Sequence
  Description of Artificial Sequence: Synthetic oligonucleotide
uaugaaguugagaggcacg

SEQ ID NO: 236563 - RNA, 19 nt, Artificial Sequence
  Description of Artificial Sequence: Synthetic oligonucleotide
uggacgagcugcuagauga

SEQ ID NO: 236564 - RNA, 19 nt, Artificial Sequence
  Description of Artificial Sequence: Synthetic oligonucleotide
agaaccucacgcucggugc

SEQ ID NO: 236565 - RNA, 19 nt, Artificial Sequence
  Description of Artificial Sequence: Synthetic oligonucleotide
uagaugucaaugcugagau

SEQ ID NO: 236566 - RNA, 19 nt, Artificial Sequence
  Description of Artificial Sequence: Synthetic oligonucleotide
ugaucaggggagcagguag

SEQ ID NO: 236567 - RNA, 19 nt, Artificial Sequence
  Description of Artificial Sequence: Synthetic oligonucleotide
aacgcggcguuccaucacc

SEQ ID NO: 236568 - RNA, 19 nt, Artificial Sequence
  Description of Artificial Sequence: Synthetic oligonucleotide
cugggcaugagcaacgcgg

SEQ ID NO: 236569 - RNA, 19 nt, Artificial Sequence
  Description of Artificial Sequence: Synthetic oligonucleotide
gaucgguggauauagugug

SEQ ID NO: 236570 - RNA, 19 nt, Artificial Sequence
  Description of Artificial Sequence: Synthetic oligonucleotide
caaugguuaguccauuagg

SEQ ID NO: 236571 - RNA, 19 nt, Artificial Sequence
  Description of Artificial Sequence: Synthetic oligonucleotide
uacgcuuuagaucugcauc

SEQ ID NO: 236572 - RNA, 19 nt, Artificial Sequence
  Description of Artificial Sequence: Synthetic oligonucleotide
uacacguagcccuccagcg

SEQ ID NO: 236573 - RNA, 19 nt, Artificial Sequence
  Description of Artificial Sequence: Synthetic oligonucleotide
ugauuccggucauacaagg

SEQ ID NO: 236574 - RNA, 19 nt, Artificial Sequence
  Description of Artificial Sequence: Synthetic oligonucleotide
cauugucucgggcacaugg

SEQ ID NO: 236575 - RNA, 19 nt, Artificial Sequence
  Description of Artificial Sequence: Synthetic oligonucleotide
aagagaaccucacgcucgg

SEQ ID NO: 236576 - RNA, 19 nt, Artificial Sequence
  Description of Artificial Sequence: Synthetic oligonucleotide
gacccauccagauacgccc

SEQ ID NO: 236577 - RNA, 19 nt, Artificial Sequence
  Description of Artificial Sequence: Synthetic oligonucleotide
ucaggaucgguggauauag

SEQ ID NO: 236578 - RNA, 19 nt, Artificial Sequence
  Description of Artificial Sequence: Synthetic oligonucleotide
ggugacacggcccugaacc

SEQ ID NO: 236579 - RNA, 19 nt, Artificial Sequence
  Description of Artificial Sequence: Synthetic oligonucleotide
guugagaggcacgugaggg

SEQ ID NO: 236580 - RNA, 19 nt, Artificial Sequence
  Description of Artificial Sequence: Synthetic oligonucleotide
ucaaacuuuggcugggaga

SEQ ID NO: 236581 - RNA, 19 nt, Artificial Sequence
  Description of Artificial Sequence: Synthetic oligonucleotide
uuucgauacgcuuuagauc

SEQ ID NO: 236582 - RNA, 19 nt, Artificial Sequence
  Description of Artificial Sequence: Synthetic oligonucleotide
uggugaaguacauguaccc

SEQ ID NO: 236583 - RNA, 19 nt, Artificial Sequence
  Description of Artificial Sequence: Synthetic oligonucleotide
uccagauacgcccugcgga

SEQ ID NO: 236584 - RNA, 19 nt, Artificial Sequence
  Description of Artificial Sequence: Synthetic oligonucleotide
aucgcuggcacaucacucg

SEQ ID NO: 236585 - RNA, 19 nt, Artificial Sequence
  Description of Artificial Sequence: Synthetic oligonucleotide
aacugaucaggggagcagg

SEQ ID NO: 236586 - RNA, 19 nt, Artificial Sequence
  Description of Artificial Sequence: Synthetic oligonucleotide
acccuaguccgcuuguccc

SEQ ID NO: 236587 - RNA, 19 nt, Artificial Sequence
  Description of Artificial Sequence: Synthetic oligonucleotide
uacaaaguuuucccagccc

SEQ ID NO: 236588 - RNA, 19 nt, Artificial Sequence
  Description of Artificial Sequence: Synthetic oligonucleotide
cacgauguuggcaucuucc

SEQ ID NO: 236589 - RNA, 19 nt, Artificial Sequence
  Description of Artificial Sequence: Synthetic oligonucleotide
gauuucacacaugagcuca

SEQ ID NO: 236590 - RNA, 19 nt, Artificial Sequence
  Description of Artificial Sequence: Synthetic oligonucleotide
augauguagggccuguaug

SEQ ID NO: 236591 - RNA, 19 nt, Artificial Sequence
  Description of Artificial Sequence: Synthetic oligonucleotide
gguaccgucauccuuggcc

SEQ ID NO: 236592 - RNA, 19 nt, Artificial Sequence
  Description of Artificial Sequence: Synthetic oligonucleotide
aguccauuaggccaguaaa

SEQ ID NO: 236593 - RNA, 19 nt, Artificial Sequence
  Description of Artificial Sequence: Synthetic oligonucleotide
acagcaaugccaucggggu

SEQ ID NO: 236594 - RNA, 19 nt, Artificial Sequence
  Description of Artificial Sequence: Synthetic oligonucleotide
aaguacauguacccucgcu

SEQ ID NO: 236595 - RNA, 19 nt, Artificial Sequence
  Description of Artificial Sequence: Synthetic oligonucleotide
auaguguggccuuugugcu

SEQ ID NO: 236596 - RNA, 19 nt, Artificial Sequence
  Description of Artificial Sequence: Synthetic oligonucleotide
caaucaucugcuguuggcg

SEQ ID NO: 236597 - RNA, 19 nt, Artificial Sequence
  Description of Artificial Sequence: Synthetic oligonucleotide
guggguucaggaucggugg

SEQ ID NO: 236598 - RNA, 19 nt, Artificial Sequence
  Description of Artificial Sequence: Synthetic oligonucleotide
uucacaagugucugugcgc

SEQ ID NO: 236599 - RNA, 19 nt, Artificial Sequence
  Description of Artificial Sequence: Synthetic oligonucleotide
ucugaggguggcuuguuga

SEQ ID NO: 236600 - RNA, 19 nt, Artificial Sequence
  Description of Artificial Sequence: Synthetic oligonucleotide
ucgcuggcagacaaaguag

SEQ ID NO: 236601 - RNA, 19 nt, Artificial Sequence
  Description of Artificial Sequence: Synthetic oligonucleotide
accaggauucuuucgggag

SEQ ID NO: 236602 - RNA, 19 nt, Artificial Sequence
  Description of Artificial Sequence: Synthetic oligonucleotide
uucuuucagugacaggcga

SEQ ID NO: 236603 - RNA, 19 nt, Artificial Sequence
  Description of Artificial Sequence: Synthetic oligonucleotide
aguugagaggcacgugagg

SEQ ID NO: 236604 - RNA, 19 nt, Artificial Sequence
  Description of Artificial Sequence: Synthetic oligonucleotide
accaccuggggcuaugaag

SEQ ID NO: 236605 - RNA, 19 nt, Artificial Sequence
  Description of Artificial Sequence: Synthetic oligonucleotide
guagaccccgcccaugacg

SEQ ID NO: 236606 - RNA, 19 nt, Artificial Sequence
  Description of Artificial Sequence: Synthetic oligonucleotide
cuugguuugucacgguccc

SEQ ID NO: 236607 - RNA, 19 nt, Artificial Sequence
  Description of Artificial Sequence: Synthetic oligonucleotide
ugacccauccagauacgcc

SEQ ID NO: 236608 - RNA, 19 nt, Artificial Sequence
  Description of Artificial Sequence: Synthetic oligonucleotide
uguacccucgcucagcauu

SEQ ID NO: 236609 - RNA, 19 nt, Artificial Sequence
  Description of Artificial Sequence: Synthetic oligonucleotide
aggagcacgagguggacug

SEQ ID NO: 236610 - RNA, 19 nt, Artificial Sequence
  Description of Artificial Sequence: Synthetic oligonucleotide
ucacaagugucugugcgcc

SEQ ID NO: 236611 - RNA, 19 nt, Artificial Sequence
  Description of Artificial Sequence: Synthetic oligonucleotide
agcaccgucagacccacug

SEQ ID NO: 236612 - RNA, 19 nt, Artificial Sequence
  Description of Artificial Sequence: Synthetic oligonucleotide
aaauauuuacagggaggca

SEQ ID NO: 236613 - RNA, 19 nt, Artificial Sequence
  Description of Artificial Sequence: Synthetic oligonucleotide
guaccgucauccuuggccc

SEQ ID NO: 236614 - RNA, 19 nt, Artificial Sequence
  Description of Artificial Sequence: Synthetic oligonucleotide
caaugacuggcccaauggc

SEQ ID NO: 236615 - RNA, 19 nt, Artificial Sequence
  Description of Artificial Sequence: Synthetic oligonucleotide
gacaauggcaugacggaug

SEQ ID NO: 236616 - RNA, 19 nt, Artificial Sequence
  Description of Artificial Sequence: Synthetic oligonucleotide
gagaaccucacgcucggug

SEQ ID NO: 236617 - RNA, 19 nt, Artificial Sequence
  Description of Artificial Sequence: Synthetic oligonucleotide
auagcccgcaccucaauca

SEQ ID NO: 236618 - RNA, 19 nt, Artificial Sequence
  Description of Artificial Sequence: Synthetic oligonucleotide
augacuggcccaauggcac

SEQ ID NO: 236619 - RNA, 19 nt, Artificial Sequence
  Description of Artificial Sequence: Synthetic oligonucleotide
ucuuucagugacaggcgac

SEQ ID NO: 236620 - RNA, 19 nt, Artificial Sequence
  Description of Artificial Sequence: Synthetic oligonucleotide
uuccgggcgacccagucca

SEQ ID NO: 236621 - RNA, 19 nt, Artificial Sequence
  Description of Artificial Sequence: Synthetic oligonucleotide
acaauggcaugacggaugu

SEQ ID NO: 236622 - RNA, 19 nt, Artificial Sequence
  Description of Artificial Sequence: Synthetic oligonucleotide
agauacgcccugcggauag

SEQ ID NO: 236623 - RNA, 19 nt, Artificial Sequence
  Description of Artificial Sequence: Synthetic oligonucleotide
uggcggucgauccaguaga

SEQ ID NO: 236624 - RNA, 19 nt, Artificial Sequence
  Description of Artificial Sequence: Synthetic oligonucleotide
aggcucaccacacgucagc

SEQ ID NO: 236625 - RNA, 19 nt, Artificial Sequence
  Description of Artificial Sequence: Synthetic oligonucleotide
ucaaucucaccaguggcac

SEQ ID NO: 236626 - RNA, 19 nt, Artificial Sequence
  Description of Artificial Sequence: Synthetic oligonucleotide
acaagucacagcuuucgau

SEQ ID NO: 236627 - RNA, 19 nt, Artificial Sequence
  Description of Artificial Sequence: Synthetic oligonucleotide
cacgcaaacugaucagggg

SEQ ID NO: 236628 - RNA, 19 nt, Artificial Sequence
  Description of Artificial Sequence: Synthetic oligonucleotide
uagaccccgcccaugacga

SEQ ID NO: 236629 - RNA, 19 nt, Artificial Sequence
  Description of Artificial Sequence: Synthetic oligonucleotide
gauuccggucauacaaggg

SEQ ID NO: 236630 - RNA, 19 nt, Artificial Sequence
  Description of Artificial Sequence: Synthetic oligonucleotide
aggcuggguaccgucaucc

SEQ ID NO: 236631 - RNA, 19 nt, Artificial Sequence
  Description of Artificial Sequence: Synthetic oligonucleotide
agaguaaaacauguccaug

SEQ ID NO: 236632 - RNA, 19 nt, Artificial Sequence
  Description of Artificial Sequence: Synthetic oligonucleotide
ccucggaugauguagggcc

SEQ ID NO: 236633 - RNA, 19 nt, Artificial Sequence
  Description of Artificial Sequence: Synthetic oligonucleotide
gacgcagguccacacacug

SEQ ID NO: 236634 - RNA, 19 nt, Artificial Sequence
  Description of Artificial Sequence: Synthetic oligonucleotide
agcaacgcggcguuccauc

SEQ ID NO: 236635 - RNA, 19 nt, Artificial Sequence
  Description of Artificial Sequence: Synthetic oligonucleotide
guacccaugugcaggaucc

SEQ ID NO: 236636 - RNA, 19 nt, Artificial Sequence
  Description of Artificial Sequence: Synthetic oligonucleotide
agucacagcuuucgauacg

SEQ ID NO: 236637 - RNA, 19 nt, Artificial Sequence
  Description of Artificial Sequence: Synthetic oligonucleotide
uguccaguagagguuccgg

SEQ ID NO: 236638 - RNA, 19 nt, Artificial Sequence
  Description of Artificial Sequence: Synthetic oligonucleotide
aguaaaacauguccauguu

SEQ ID NO: 236639 - RNA, 19 nt, Artificial Sequence
  Description of Artificial Sequence: Synthetic oligonucleotide
cacguagcccuccagcggg

SEQ ID NO: 236640 - RNA, 19 nt, Artificial Sequence
  Description of Artificial Sequence: Synthetic oligonucleotide
guccaguagagguuccggg

SEQ ID NO: 236641 - RNA, 19 nt, Artificial Sequence
  Description of Artificial Sequence: Synthetic oligonucleotide
uguacccaugugcaggauc

SEQ ID NO: 236642 - RNA, 19 nt, Artificial Sequence
  Description of Artificial Sequence: Synthetic oligonucleotide
uuucagugacaggcgacgg

SEQ ID NO: 236643 - RNA, 19 nt, Artificial Sequence
  Description of Artificial Sequence: Synthetic oligonucleotide
guacacguagcccuccagc

SEQ ID NO: 236644 - RNA, 19 nt, Artificial Sequence
  Description of Artificial Sequence: Synthetic oligonucleotide
uggccuuugugcuggacga

SEQ ID NO: 236645 - RNA, 19 nt, Artificial Sequence
  Description of Artificial Sequence: Synthetic oligonucleotide
ggugcaacacaauggcccg

SEQ ID NO: 236646 - RNA, 19 nt, Artificial Sequence
  Description of Artificial Sequence: Synthetic oligonucleotide
cacgggacggaugaggccg

SEQ ID NO: 236647 - RNA, 19 nt, Artificial Sequence
  Description of Artificial Sequence: Synthetic oligonucleotide
ugggcaugagcaacgcggc

SEQ ID NO: 236648 - RNA, 19 nt, Artificial Sequence
  Description of Artificial Sequence: Synthetic oligonucleotide
uaucgcuggcacaucacuc

SEQ ID NO: 236649 - RNA, 19 nt, Artificial Sequence
  Description of Artificial Sequence: Synthetic oligonucleotide
auccagauacgcccugcgg

SEQ ID NO: 236650 - RNA, 19 nt, Artificial Sequence
  Description of Artificial Sequence: Synthetic oligonucleotide
guacauguacccucgcuca

SEQ ID NO: 236651 - RNA, 19 nt, Artificial Sequence
  Description of Artificial Sequence: Synthetic oligonucleotide
gagcgauccuggcagucgg

SEQ ID NO: 236652 - RNA, 19 nt, Artificial Sequence
  Description of Artificial Sequence: Synthetic oligonucleotide
cuaugaaguugagaggcac

SEQ ID NO: 236653 - RNA, 19 nt, Artificial Sequence
  Description of Artificial Sequence: Synthetic oligonucleotide
gagaucguguggcugucug

SEQ ID NO: 236654 - RNA, 19 nt, Artificial Sequence
  Description of Artificial Sequence: Synthetic oligonucleotide
cucuggucggcacacucgg

SEQ ID NO: 236655 - RNA, 19 nt, Artificial Sequence
  Description of Artificial Sequence: Synthetic oligonucleotide
agcgaugggucuguggccg

SEQ ID NO: 236656 - RNA, 19 nt, Artificial Sequence
  Description of Artificial Sequence: Synthetic oligonucleotide
gucacagcuuucgauacgc

SEQ ID NO: 236657 - RNA, 19 nt, Artificial Sequence
  Description of Artificial Sequence: Synthetic oligonucleotide
uggcccuugguuugucacg

SEQ ID NO: 236658 - RNA, 19 nt, Artificial Sequence
  Description of Artificial Sequence: Synthetic oligonucleotide
gauccaguagaggugccug

SEQ ID NO: 236659 - RNA, 19 nt, Artificial Sequence
  Description of Artificial Sequence: Synthetic oligonucleotide
cacacgcaaacugaucagg

SEQ ID NO: 236660 - RNA, 19 nt, Artificial Sequence
  Description of Artificial Sequence: Synthetic oligonucleotide
uguaucgcuggcacaucac

SEQ ID NO: 236661 - RNA, 19 nt, Artificial Sequence
  Description of Artificial Sequence: Synthetic oligonucleotide
acacgcaaacugaucaggg

SEQ ID NO: 236662 - RNA, 19 nt, Artificial Sequence
  Description of Artificial Sequence: Synthetic oligonucleotide
ugcaacacaauggcccgag

SEQ ID NO: 236663 - RNA, 19 nt, Artificial Sequence
  Description of Artificial Sequence: Synthetic oligonucleotide
acggcccugaacccuaguc

SEQ ID NO: 236664 - RNA, 19 nt, Artificial Sequence
  Description of Artificial Sequence: Synthetic oligonucleotide
ugucacgguccccucgaag

SEQ ID NO: 236665 - RNA, 19 nt, Artificial Sequence
  Description of Artificial Sequence: Synthetic oligonucleotide
gaagggaccgugcugggaa

SEQ ID NO: 236666 - RNA, 19 nt, Artificial Sequence
  Description of Artificial Sequence: Synthetic oligonucleotide
acgauguuggcaucuucca

SEQ ID NO: 236667 - RNA, 19 nt, Artificial Sequence
  Description of Artificial Sequence: Synthetic oligonucleotide
aauggcccuugguuuguca

SEQ ID NO: 236668 - RNA, 19 nt, Artificial Sequence
  Description of Artificial Sequence: Synthetic oligonucleotide
gauagcccgcaccucaauc

SEQ ID NO: 236669 - RNA, 19 nt, Artificial Sequence
  Description of Artificial Sequence: Synthetic oligonucleotide
agcgacuggugcuguaguc

SEQ ID NO: 236670 - RNA, 19 nt, Artificial Sequence
  Description of Artificial Sequence: Synthetic oligonucleotide
ucgguggauauaguguggc

SEQ ID NO: 236671 - RNA, 19 nt, Artificial Sequence
  Description of Artificial Sequence: Synthetic oligonucleotide
gucgauccaguagaggugc

SEQ ID NO: 236672 - RNA, 19 nt, Artificial Sequence
  Description of Artificial Sequence: Synthetic oligonucleotide
ugacggaugucgcccaccu

SEQ ID NO: 236673 - RNA, 19 nt, Artificial Sequence
  Description of Artificial Sequence: Synthetic oligonucleotide
ccaaugacuggcccaaugg

SEQ ID NO: 236674 - RNA, 19 nt, Artificial Sequence
  Description of Artificial Sequence: Synthetic oligonucleotide
cuuucgauacgcuuuagau

SEQ ID NO: 236675 - RNA, 19 nt, Artificial Sequence
  Description of Artificial Sequence: Synthetic oligonucleotide
acacguucaaucaucugcu

SEQ ID NO: 236676 - RNA, 19 nt, Artificial Sequence
  Description of Artificial Sequence: Synthetic oligonucleotide
gaaccucacgcucggugcc

SEQ ID NO: 236677 - RNA, 19 nt, Artificial Sequence
  Description of Artificial Sequence: Synthetic oligonucleotide
ggacggaugaggccggugg

SEQ ID NO: 236678 - RNA, 19 nt, Artificial Sequence
  Description of Artificial Sequence: Synthetic oligonucleotide
ggcauccccauccagccgg

SEQ ID NO: 236679 - RNA, 19 nt, Artificial Sequence
  Description of Artificial Sequence: Synthetic oligonucleotide
gggugcaacacaauggccc

SEQ ID NO: 236680 - RNA, 19 nt, Artificial Sequence
  Description of Artificial Sequence: Synthetic oligonucleotide
accacacgucagcagguuc

SEQ ID NO: 236681 - RNA, 19 nt, Artificial Sequence
  Description of Artificial Sequence: Synthetic oligonucleotide
auggcaugacggaugucgc

SEQ ID NO: 236682 - RNA, 19 nt, Artificial Sequence
  Description of Artificial Sequence: Synthetic oligonucleotide
cauccagauacgcccugcg

SEQ ID NO: 236683 - RNA, 19 nt, Artificial Sequence
  Description of Artificial Sequence: Synthetic oligonucleotide
ugaacccuaguccgcuugu

SEQ ID NO: 236684 - RNA, 19 nt, Artificial Sequence
  Description of Artificial Sequence: Synthetic oligonucleotide
auacgcccugcggauagcc

SEQ ID NO: 236685 - RNA, 19 nt, Artificial Sequence
  Description of Artificial Sequence: Synthetic oligonucleotide
agggccacgggacggauga

SEQ ID NO: 236686 - RNA, 19 nt, Artificial Sequence
  Description of Artificial Sequence: Synthetic oligonucleotide
auacgcuuuagaucugcau

SEQ ID NO: 236687 - RNA, 19 nt, Artificial Sequence
  Description of Artificial Sequence: Synthetic oligonucleotide
cacgggaugccugggaagg

SEQ ID NO: 236688 - RNA, 19 nt, Artificial Sequence
  Description of Artificial Sequence: Synthetic oligonucleotide
auguccacgguggaugaag

SEQ ID NO: 236689 - RNA, 19 nt, Artificial Sequence
  Description of Artificial Sequence: Synthetic oligonucleotide
ccauguuguacagcgaugg

SEQ ID NO: 236690 - RNA, 19 nt, Artificial Sequence
  Description of Artificial Sequence: Synthetic oligonucleotide
aguagaccccgcccaugac

SEQ ID NO: 236691 - RNA, 19 nt, Artificial Sequence
  Description of Artificial Sequence: Synthetic oligonucleotide
cuccacacguucaaucauc

SEQ ID NO: 236692 - RNA, 19 nt, Artificial Sequence
  Description of Artificial Sequence: Synthetic oligonucleotide
ggcgagucaccucaauccg

SEQ ID NO: 236693 - RNA, 19 nt, Artificial Sequence
  Description of Artificial Sequence: Synthetic oligonucleotide
gaaguacauguacccucgc

SEQ ID NO: 236694 - RNA, 19 nt, Artificial Sequence
  Description of Artificial Sequence: Synthetic oligonucleotide
ggugccaugccucggauga

SEQ ID NO: 236695 - RNA, 19 nt, Artificial Sequence
  Description of Artificial Sequence: Synthetic oligonucleotide
acucggggaagccaucaca

SEQ ID NO: 236696 - RNA, 19 nt, Artificial Sequence
  Description of Artificial Sequence: Synthetic oligonucleotide
gaucguguggcugucuguc

SEQ ID NO: 236697 - RNA, 19 nt, Artificial Sequence
  Description of Artificial Sequence: Synthetic oligonucleotide
agcgggucauagucgauga

SEQ ID NO: 236698 - RNA, 19 nt, Artificial Sequence
  Description of Artificial Sequence: Synthetic oligonucleotide
ucuggucggcacacucggg

SEQ ID NO: 236699 - RNA, 19 nt, Artificial Sequence
  Description of Artificial Sequence: Synthetic oligonucleotide
augauuccggucauacaag

SEQ ID NO: 236700 - RNA, 19 nt, Artificial Sequence
  Description of Artificial Sequence: Synthetic oligonucleotide
ugcacgggaugccugggaa

SEQ ID NO: 236701 - RNA, 19 nt, Artificial Sequence
  Description of Artificial Sequence: Synthetic oligonucleotide
agcugcuagaugaggcccc

SEQ ID NO: 236702 - RNA, 19 nt, Artificial Sequence
  Description of Artificial Sequence: Synthetic oligonucleotide
ugccucggaugauguaggg

SEQ ID NO: 236703 - RNA, 19 nt, Artificial Sequence
  Description of Artificial Sequence: Synthetic oligonucleotide
uguacagcgaugggucugu

SEQ ID NO: 236704 - RNA, 19 nt, Artificial Sequence
  Description of Artificial Sequence: Synthetic oligonucleotide
cucgcuggcagacaaagua

SEQ ID NO: 236705 - RNA, 19 nt, Artificial Sequence
  Description of Artificial Sequence: Synthetic oligonucleotide
ugaaguugagaggcacgug

SEQ ID NO: 236706 - RNA, 19 nt, Artificial Sequence
  Description of Artificial Sequence: Synthetic oligonucleotide
aucgcucuggucggcacac

SEQ ID NO: 236707 - RNA, 19 nt, Artificial Sequence
  Description of Artificial Sequence: Synthetic oligonucleotide
uggcaugacggaugucgcc

SEQ ID NO: 236708 - RNA, 19 nt, Artificial Sequence
  Description of Artificial Sequence: Synthetic oligonucleotide
uggguucaggaucggugga

SEQ ID NO: 236709 - RNA, 19 nt, Artificial Sequence
  Description of Artificial Sequence: Synthetic oligonucleotide
ugcgccugacccauccaga

SEQ ID NO: 236710 - RNA, 19 nt, Artificial Sequence
  Description of Artificial Sequence: Synthetic oligonucleotide
augacggaugucgcccacc

SEQ ID NO: 236711 - RNA, 19 nt, Artificial Sequence
  Description of Artificial Sequence: Synthetic oligonucleotide
ugagcaacgcggcguucca

SEQ ID NO: 236712 - RNA, 19 nt, Artificial Sequence
  Description of Artificial Sequence: Synthetic oligonucleotide
ggggucauugaucucugug

SEQ ID NO: 236713 - RNA, 19 nt, Artificial Sequence
  Description of Artificial Sequence: Synthetic oligonucleotide
ugacaauggcaugacggau

SEQ ID NO: 236714 - RNA, 19 nt, Artificial Sequence
  Description of Artificial Sequence: Synthetic oligonucleotide
caucgcagcgcagacgcag

SEQ ID NO: 236715 - RNA, 19 nt, Artificial Sequence
  Description of Artificial Sequence: Synthetic oligonucleotide
ugacauacucauggggaaa

SEQ ID NO: 236716 - RNA, 19 nt, Artificial Sequence
  Description of Artificial Sequence: Synthetic oligonucleotide
ccucuugauguucuggcgc

SEQ ID NO: 236717 - RNA, 19 nt, Artificial Sequence
  Description of Artificial Sequence: Synthetic oligonucleotide
agaggcacgugagggguuc

SEQ ID NO: 236718 - RNA, 19 nt, Artificial Sequence
  Description of Artificial Sequence: Synthetic oligonucleotide
aucgguggauauagugugg

SEQ ID NO: 236719 - RNA, 19 nt, Artificial Sequence
  Description of Artificial Sequence: Synthetic oligonucleotide
cugacauacucauggggaa

SEQ ID NO: 236720 - RNA, 19 nt, Artificial Sequence
  Description of Artificial Sequence: Synthetic oligonucleotide
cacgucagcagguucugca

SEQ ID NO: 236721 - RNA, 19 nt, Artificial Sequence
  Description of Artificial Sequence: Synthetic oligonucleotide
cugcaagguguuguugggg

SEQ ID NO: 236722 - RNA, 19 nt, Artificial Sequence
  Description of Artificial Sequence: Synthetic oligonucleotide
gucggccucaccaucgcag

SEQ ID NO: 236723 - RNA, 19 nt, Artificial Sequence
  Description of Artificial Sequence: Synthetic oligonucleotide
gaauaguguccggcuguag

SEQ ID NO: 236724 - RNA, 19 nt, Artificial Sequence
  Description of Artificial Sequence: Synthetic oligonucleotide
gacuugcugcacgggaugc

SEQ ID NO: 236725 - RNA, 19 nt, Artificial Sequence
  Description of Artificial Sequence: Synthetic oligonucleotide
gugcgccugacccauccag

SEQ ID NO: 236726 - RNA, 19 nt, Artificial Sequence
  Description of Artificial Sequence: Synthetic oligonucleotide
agaucguguggcugucugu

SEQ ID NO: 236727 - RNA, 19 nt, Artificial Sequence
  Description of Artificial Sequence: Synthetic oligonucleotide
cugacccauccagauacgc

SEQ ID NO: 236728 - RNA, 19 nt, Artificial Sequence
  Description of Artificial Sequence: Synthetic oligonucleotide
augccucggaugauguagg

SEQ ID NO: 236729 - RNA, 19 nt, Artificial Sequence
  Description of Artificial Sequence: Synthetic oligonucleotide
uggucggcacacucgggga

SEQ ID NO: 236730 - RNA, 19 nt, Artificial Sequence
  Description of Artificial Sequence: Synthetic oligonucleotide
uucuuucgggagguggcca

SEQ ID NO: 236731 - RNA, 19 nt, Artificial Sequence
  Description of Artificial Sequence: Synthetic oligonucleotide
caguaaaugucagagucua

SEQ ID NO: 236732 - RNA, 19 nt, Artificial Sequence
  Description of Artificial Sequence: Synthetic oligonucleotide
ggccccaguaacaugauuc

SEQ ID NO: 236733 - RNA, 19 nt, Artificial Sequence
  Description of Artificial Sequence: Synthetic oligonucleotide
ggcaugacggaugucgccc

SEQ ID NO: 236734 - RNA, 19 nt, Artificial Sequence
  Description of Artificial Sequence: Synthetic oligonucleotide
gugacacggcccugaaccc

SEQ ID NO: 236735 - RNA, 19 nt, Artificial Sequence
  Description of Artificial Sequence: Synthetic oligonucleotide
gguggacugggcaugagca

SEQ ID NO: 236736 - RNA, 19 nt, Artificial Sequence
  Description of Artificial Sequence: Synthetic oligonucleotide
uggggcuaugaaguugaga

SEQ ID NO: 236737 - RNA, 19 nt, Artificial Sequence
  Description of Artificial Sequence: Synthetic oligonucleotide
gauacgcuuuagaucugca

SEQ ID NO: 236738 - RNA, 19 nt, Artificial Sequence
  Description of Artificial Sequence: Synthetic oligonucleotide
ucgauccaguagaggugcc

SEQ ID NO: 236739 - RNA, 19 nt, Artificial Sequence
  Description of Artificial Sequence: Synthetic oligonucleotide
cacguucaaucaucugcug

SEQ ID NO: 236740 - RNA, 19 nt, Artificial Sequence
  Description of Artificial Sequence: Synthetic oligonucleotide
gccccaguaacaugauucc

SEQ ID NO: 236741 - RNA, 19 nt, Artificial Sequence
  Description of Artificial Sequence: Synthetic oligonucleotide
gcuggcacaucacucgcug

SEQ ID NO: 236742 - RNA, 19 nt, Artificial Sequence
  Description of Artificial Sequence: Synthetic oligonucleotide
uagcccgcaccucaaucau

SEQ ID NO: 236743 - RNA, 19 nt, Artificial Sequence
  Description of Artificial Sequence: Synthetic oligonucleotide
cagcgaugggucuguggcc

SEQ ID NO: 236744 - RNA, 19 nt, Artificial Sequence
  Description of Artificial Sequence: Synthetic oligonucleotide
caguggucuucuccacacg

SEQ ID NO: 236745 - RNA, 19 nt, Artificial Sequence
  Description of Artificial Sequence: Synthetic oligonucleotide
cauugaggcgagucaccuc

SEQ ID NO: 236746 - RNA, 19 nt, Artificial Sequence
  Description of Artificial Sequence: Synthetic oligonucleotide
gaccccgcccaugacgaag

SEQ ID NO: 236747 - RNA, 19 nt, Artificial Sequence
  Description of Artificial Sequence: Synthetic oligonucleotide
aucguguggcugucugucu

SEQ ID NO: 236748 - RNA, 19 nt, Artificial Sequence
  Description of Artificial Sequence: Synthetic oligonucleotide
uucaucgcucuggucggca

SEQ ID NO: 236749 - RNA, 19 nt, Artificial Sequence
  Description of Artificial Sequence: Synthetic oligonucleotide
cucgcucagcauugacagc

SEQ ID NO: 236750 - RNA, 19 nt, Artificial Sequence
  Description of Artificial Sequence: Synthetic oligonucleotide
ggcccuugguuugucacgg

SEQ ID NO: 236751 - RNA, 19 nt, Artificial Sequence
  Description of Artificial Sequence: Synthetic oligonucleotide
gcccaugacgaagagggag

SEQ ID NO: 236752 - RNA, 19 nt, Artificial Sequence
  Description of Artificial Sequence: Synthetic oligonucleotide
acccaugugcaggauccag

SEQ ID NO: 236753 - RNA, 19 nt, Artificial Sequence
  Description of Artificial Sequence: Synthetic oligonucleotide
gaccgugcugggaaccacc

SEQ ID NO: 236754 - RNA, 19 nt, Artificial Sequence
  Description of Artificial Sequence: Synthetic oligonucleotide
ugacacggcccugaacccu

SEQ ID NO: 236755 - RNA, 19 nt, Artificial Sequence
  Description of Artificial Sequence: Synthetic oligonucleotide
augccaucggggucauuga

SEQ ID NO: 236756 - RNA, 19 nt, Artificial Sequence
  Description of Artificial Sequence: Synthetic oligonucleotide
cuggacgagcugcuagaug

SEQ ID NO: 236757 - RNA, 19 nt, Artificial Sequence
  Description of Artificial Sequence: Synthetic oligonucleotide
cucgauccggggugcuucc

SEQ ID NO: 236758 - RNA, 19 nt, Artificial Sequence
  Description of Artificial Sequence: Synthetic oligonucleotide
ucacgcucggugccaucca

SEQ ID NO: 236759 - RNA, 19 nt, Artificial Sequence
  Description of Artificial Sequence: Synthetic oligonucleotide
cagguaggaggcucaccac

SEQ ID NO: 236760 - RNA, 19 nt, Artificial Sequence
  Description of Artificial Sequence: Synthetic oligonucleotide
gaggcccguucaaucuugg

SEQ ID NO: 236761 - RNA, 19 nt, Artificial Sequence
  Description of Artificial Sequence: Synthetic oligonucleotide
cugcccaauacagcuuuug

SEQ ID NO: 236762 - RNA, 19 nt, Artificial Sequence
  Description of Artificial Sequence: Synthetic oligonucleotide
guggccauugaggcgaguc

SEQ ID NO: 236763 - RNA, 19 nt, Artificial Sequence
  Description of Artificial Sequence: Synthetic oligonucleotide
acccacuggcugcacgaug

SEQ ID NO: 236764 - RNA, 19 nt, Artificial Sequence
  Description of Artificial Sequence: Synthetic oligonucleotide
cagcgggucauagucgaug

SEQ ID NO: 236765 - RNA, 19 nt, Artificial Sequence
  Description of Artificial Sequence: Synthetic oligonucleotide
acgugagggguuccacuga

SEQ ID NO: 236766 - RNA, 19 nt, Artificial Sequence
  Description of Artificial Sequence: Synthetic oligonucleotide
ugcccgcucgauccggggu

SEQ ID NO: 236767 - RNA, 19 nt, Artificial Sequence
  Description of Artificial Sequence: Synthetic oligonucleotide
aggcgguuggccccugaca

SEQ ID NO: 236768 - RNA, 19 nt, Artificial Sequence
  Description of Artificial Sequence: Synthetic oligonucleotide
cauccagggaggcccguuc

SEQ ID NO: 236769 - RNA, 19 nt, Artificial Sequence
  Description of Artificial Sequence: Synthetic oligonucleotide
ggucgauccaguagaggug

SEQ ID NO: 236770 - RNA, 19 nt, Artificial Sequence
  Description of Artificial Sequence: Synthetic oligonucleotide
aucgcagcgcagacgcagg

SEQ ID NO: 236771 - RNA, 19 nt, Artificial Sequence
  Description of Artificial Sequence: Synthetic oligonucleotide
gcuuucgauacgcuuuaga

SEQ ID NO: 236772 - RNA, 19 nt, Artificial Sequence
  Description of Artificial Sequence: Synthetic oligonucleotide
gaucuuccggguacugcca

SEQ ID NO: 236773 - RNA, 19 nt, Artificial Sequence
  Description of Artificial Sequence: Synthetic oligonucleotide
gcagucggccucaccaucg

SEQ ID NO: 236774 - RNA, 19 nt, Artificial Sequence
  Description of Artificial Sequence: Synthetic oligonucleotide
caaucuuggccgcgugguc

SEQ ID NO: 236775 - RNA, 19 nt, Artificial Sequence
  Description of Artificial Sequence: Synthetic oligonucleotide
caccucaauccggucagug

SEQ ID NO: 236776 - RNA, 19 nt, Artificial Sequence
  Description of Artificial Sequence: Synthetic oligonucleotide
agcgauccuggcagucggc

SEQ ID NO: 236777 - RNA, 19 nt, Artificial Sequence
  Description of Artificial Sequence: Synthetic oligonucleotide
cacgcucggugccauccag

SEQ ID NO: 236778 - RNA, 19 nt, Artificial Sequence
  Description of Artificial Sequence: Synthetic oligonucleotide
aaccucacgcucggugcca

SEQ ID NO: 236779 - RNA, 19 nt, Artificial Sequence
  Description of Artificial Sequence: Synthetic oligonucleotide
acacucggggaagccauca

SEQ ID NO: 236780 - RNA, 19 nt, Artificial Sequence
  Description of Artificial Sequence: Synthetic oligonucleotide
gauguagggccuguauggu

SEQ ID NO: 236781 - RNA, 19 nt, Artificial Sequence
  Description of Artificial Sequence: Synthetic oligonucleotide
cugauugggcagacagaca

SEQ ID NO: 236782 - RNA, 19 nt, Artificial Sequence
  Description of Artificial Sequence: Synthetic oligonucleotide
caugacggaugucgcccac

SEQ ID NO: 236783 - RNA, 19 nt, Artificial Sequence
  Description of Artificial Sequence: Synthetic oligonucleotide
gacggaugucgcccaccug

SEQ ID NO: 236784 - RNA, 19 nt, Artificial Sequence
  Description of Artificial Sequence: Synthetic oligonucleotide
uaguccgcuuguccccagu

SEQ ID NO: 236785 - RNA, 19 nt, Artificial Sequence
  Description of Artificial Sequence: Synthetic oligonucleotide
gcgugguccugcauguugg

SEQ ID NO: 236786 - RNA, 19 nt, Artificial Sequence
  Description of Artificial Sequence: Synthetic oligonucleotide
ugagaucguguggcugucu

SEQ ID NO: 236787 - RNA, 19 nt, Artificial Sequence
  Description of Artificial Sequence: Synthetic oligonucleotide
guaacaugauuccggucau

SEQ ID NO: 236788 - RNA, 19 nt, Artificial Sequence
  Description of Artificial Sequence: Synthetic oligonucleotide
cagcaaugccaucgggguc

SEQ ID NO: 236789 - RNA, 19 nt, Artificial Sequence
  Description of Artificial Sequence: Synthetic oligonucleotide
uuccggguacugccaucca

SEQ ID NO: 236790 - RNA, 19 nt, Artificial Sequence
  Description of Artificial Sequence: Synthetic oligonucleotide
caccaucgcagcgcagacg

SEQ ID NO: 236791 - RNA, 19 nt, Artificial Sequence
  Description of Artificial Sequence: Synthetic oligonucleotide
gauacgcccugcggauagc

SEQ ID NO: 236792 - RNA, 19 nt, Artificial Sequence
  Description of Artificial Sequence: Synthetic oligonucleotide
uggauauaguguggccuuu

SEQ ID NO: 236793 - RNA, 19 nt, Artificial Sequence
  Description of Artificial Sequence: Synthetic oligonucleotide
agucggccucaccaucgca

SEQ ID NO: 236794 - RNA, 19 nt, Artificial Sequence
  Description of Artificial Sequence: Synthetic oligonucleotide
cagucggccucaccaucgc

SEQ ID NO: 236795 - RNA, 19 nt, Artificial Sequence
  Description of Artificial Sequence: Synthetic oligonucleotide
caaucucaccaguggcaca

SEQ ID NO: 236796 - RNA, 19 nt, Artificial Sequence
  Description of Artificial Sequence: Synthetic oligonucleotide
caucccugcccgcucgauc

SEQ ID NO: 236797 - RNA, 19 nt, Artificial Sequence
  Description of Artificial Sequence: Synthetic oligonucleotide
acgcggcguuccaucaccc

SEQ ID NO: 236798 - RNA, 19 nt, Artificial Sequence
  Description of Artificial Sequence: Synthetic oligonucleotide
gcaacacaauggcccgagg

SEQ ID NO: 236799 - RNA, 19 nt, Artificial Sequence
  Description of Artificial Sequence: Synthetic oligonucleotide
gcgagucaccucaauccgg

SEQ ID NO: 236800 - RNA, 19 nt, Artificial Sequence
  Description of Artificial Sequence: Synthetic oligonucleotide
gcuagaugaggccccagua

SEQ ID NO: 236801 - RNA, 19 nt, Artificial Sequence
  Description of Artificial Sequence: Synthetic oligonucleotide
uugucacgguccccucgaa

SEQ ID NO: 236802 - RNA, 19 nt, Artificial Sequence
  Description of Artificial Sequence: Synthetic oligonucleotide
gggucaggcgguuggcccc

SEQ ID NO: 236803 - RNA, 19 nt, Artificial Sequence
  Description of Artificial Sequence: Synthetic oligonucleotide
cagcccaucacagggugca

SEQ ID NO: 236804 - RNA, 19 nt, Artificial Sequence
  Description of Artificial Sequence: Synthetic oligonucleotide
cuaguccgcuuguccccag

SEQ ID NO: 236805 - RNA, 19 nt, Artificial Sequence
  Description of Artificial Sequence: Synthetic oligonucleotide
uauguccacgguggaugaa

SEQ ID NO: 236806 - RNA, 19 nt, Artificial Sequence
  Description of Artificial Sequence: Synthetic oligonucleotide
gaacccuaguccgcuuguc

SEQ ID NO: 236807 - RNA, 19 nt, Artificial Sequence
  Description of Artificial Sequence: Synthetic oligonucleotide
cuggggcuaugaaguugag

SEQ ID NO: 236808 - RNA, 19 nt, Artificial Sequence
  Description of Artificial Sequence: Synthetic oligonucleotide
acgcucggugccauccagg

SEQ ID NO: 236809 - RNA, 19 nt, Artificial Sequence
  Description of Artificial Sequence: Synthetic oligonucleotide
gcugagaucguguggcugu

SEQ ID NO: 236810 - RNA, 19 nt, Artificial Sequence
  Description of Artificial Sequence: Synthetic oligonucleotide
gcggauagcccgcaccuca

SEQ ID NO: 236811 - RNA, 19 nt, Artificial Sequence
  Description of Artificial Sequence: Synthetic oligonucleotide
guacugccauccaucccug

SEQ ID NO: 236812 - RNA, 19 nt, Artificial Sequence
  Description of Artificial Sequence: Synthetic oligonucleotide
cccuaguccgcuugucccc

SEQ ID NO: 236813 - RNA, 19 nt, Artificial Sequence
  Description of Artificial Sequence: Synthetic oligonucleotide
gcacgggaugccugggaag

SEQ ID NO: 236814 - RNA, 19 nt, Artificial Sequence
  Description of Artificial Sequence: Synthetic oligonucleotide
cugcccgcucgauccgggg

SEQ ID NO: 236815 - RNA, 19 nt, Artificial Sequence
  Description of Artificial Sequence: Synthetic oligonucleotide
gagggguuccacugacaua

SEQ ID NO: 236816 - RNA, 19 nt, Artificial Sequence
  Description of Artificial Sequence: Synthetic oligonucleotide
cuucaucgcucuggucggc

SEQ ID NO: 236817 - RNA, 19 nt, Artificial Sequence
  Description of Artificial Sequence: Synthetic oligonucleotide
guauggucuggcuguggcu

SEQ ID NO: 236818 - RNA, 19 nt, Artificial Sequence
  Description of Artificial Sequence: Synthetic oligonucleotide
uacccaugugcaggaucca

SEQ ID NO: 236819 - RNA, 19 nt, Artificial Sequence
  Description of Artificial Sequence: Synthetic oligonucleotide
gccuguauggucuggcugu

SEQ ID NO: 236820 - RNA, 19 nt, Artificial Sequence
  Description of Artificial Sequence: Synthetic oligonucleotide
gacggaugaggccgguggu

SEQ ID NO: 236821 - RNA, 19 nt, Artificial Sequence
  Description of Artificial Sequence: Synthetic oligonucleotide
caggcgguuggccccugac

SEQ ID NO: 236822 - RNA, 19 nt, Artificial Sequence
  Description of Artificial Sequence: Synthetic oligonucleotide
guccucagauaccaggauu

SEQ ID NO: 236823 - RNA, 19 nt, Artificial Sequence
  Description of Artificial Sequence: Synthetic oligonucleotide
ggguacugccauccauccc

SEQ ID NO: 236824 - RNA, 19 nt, Artificial Sequence
  Description of Artificial Sequence: Synthetic oligonucleotide
cacgguccccucgaagcac

SEQ ID NO: 236825 - RNA, 19 nt, Artificial Sequence
  Description of Artificial Sequence: Synthetic oligonucleotide
ggcccgagguucauccagg

SEQ ID NO: 236826 - RNA, 19 nt, Artificial Sequence
  Description of Artificial Sequence: Synthetic oligonucleotide
guccauuaggccaguaaau

SEQ ID NO: 236827 - RNA, 19 nt, Artificial Sequence
  Description of Artificial Sequence: Synthetic oligonucleotide
guaggggucugagucugaa

SEQ ID NO: 236828 - RNA, 19 nt, Artificial Sequence
  Description of Artificial Sequence: Synthetic oligonucleotide
cacuaggcucauggaacuc

SEQ ID NO: 236829 - RNA, 19 nt, Artificial Sequence
  Description of Artificial Sequence: Synthetic oligonucleotide
ccugacccauccagauacg

SEQ ID NO: 236830 - RNA, 19 nt, Artificial Sequence
  Description of Artificial Sequence: Synthetic oligonucleotide
caagggcgcacugccccgc

SEQ ID NO: 236831 - RNA, 19 nt, Artificial Sequence
  Description of Artificial Sequence: Synthetic oligonucleotide
ucgauccggggugcuuccc

SEQ ID NO: 236832 - RNA, 19 nt, Artificial Sequence
  Description of Artificial Sequence: Synthetic oligonucleotide
cacagcuuucgauacgcuu

SEQ ID NO: 236833 - RNA, 19 nt, Artificial Sequence
  Description of Artificial Sequence: Synthetic oligonucleotide
ggacgagcugcuagaugag

SEQ ID NO: 236834 - RNA, 19 nt, Artificial Sequence
  Description of Artificial Sequence: Synthetic oligonucleotide
gcgacuggugcuguaguca

SEQ ID NO: 236835 - RNA, 19 nt, Artificial Sequence
  Description of Artificial Sequence: Synthetic oligonucleotide
ugcggauagcccgcaccuc

SEQ ID NO: 236836 - RNA, 19 nt, Artificial Sequence
  Description of Artificial Sequence: Synthetic oligonucleotide
gcacgagguggacugggca

SEQ ID NO: 236837 - RNA, 19 nt, Artificial Sequence
  Description of Artificial Sequence: Synthetic oligonucleotide
cugcggauagcccgcaccu

SEQ ID NO: 236838 - RNA, 19 nt, Artificial Sequence
  Description of Artificial Sequence: Synthetic oligonucleotide
acgggacggaugaggccgg

SEQ ID NO: 236839 - RNA, 19 nt, Artificial Sequence
  Description of Artificial Sequence: Synthetic oligonucleotide
acucgcuggcagacaaagu

SEQ ID NO: 236840 - RNA, 19 nt, Artificial Sequence
  Description of Artificial Sequence: Synthetic oligonucleotide
gaggcacgugagggguucc

SEQ ID NO: 236841 - RNA, 19 nt, Artificial Sequence
  Description of Artificial Sequence: Synthetic oligonucleotide
gccauugaggcgagucacc

SEQ ID NO: 236842 - RNA, 19 nt, Artificial Sequence
  Description of Artificial Sequence: Synthetic oligonucleotide
cucggaugauguagggccu

SEQ ID NO: 236843 - RNA, 19 nt, Artificial Sequence
  Description of Artificial Sequence: Synthetic oligonucleotide
gcuguuggcggucgaucca

SEQ ID NO: 236844 - RNA, 19 nt, Artificial Sequence
  Description of Artificial Sequence: Synthetic oligonucleotide
ccaguaaaugucagagucu

SEQ ID NO: 236845 - RNA, 19 nt, Artificial Sequence
  Description of Artificial Sequence: Synthetic oligonucleotide
ccaguaacaugauuccggu

SEQ ID NO: 236846 - RNA, 19 nt, Artificial Sequence
  Description of Artificial Sequence: Synthetic oligonucleotide
ggagcacgagguggacugg

SEQ ID NO: 236847 - RNA, 19 nt, Artificial Sequence
  Description of Artificial Sequence: Synthetic oligonucleotide
agagaaccucacgcucggu

SEQ ID NO: 236848 - RNA, 19 nt, Artificial Sequence
  Description of Artificial Sequence: Synthetic oligonucleotide
accccgcccaugacgaaga

SEQ ID NO: 236849 - RNA, 19 nt, Artificial Sequence
  Description of Artificial Sequence: Synthetic oligonucleotide
ggacagccuucuucaucgc

SEQ ID NO: 236850 - RNA, 19 nt, Artificial Sequence
  Description of Artificial Sequence: Synthetic oligonucleotide
cccucgcucagcauugaca

SEQ ID NO: 236851 - RNA, 19 nt, Artificial Sequence
  Description of Artificial Sequence: Synthetic oligonucleotide
caauggcccgagguucauc

SEQ ID NO: 236852 - RNA, 19 nt, Artificial Sequence
  Description of Artificial Sequence: Synthetic oligonucleotide
gccaucggggucauugauc

SEQ ID NO: 236853 - RNA, 19 nt, Artificial Sequence
  Description of Artificial Sequence: Synthetic oligonucleotide
gcaugacggaugucgccca

SEQ ID NO: 236854 - RNA, 19 nt, Artificial Sequence
  Description of Artificial Sequence: Synthetic oligonucleotide
acaauggcccgagguucau

SEQ ID NO: 236855 - RNA, 19 nt, Artificial Sequence
  Description of Artificial Sequence: Synthetic oligonucleotide
ccacgggacggaugaggcc

SEQ ID NO: 236856 - RNA, 19 nt, Artificial Sequence
  Description of Artificial Sequence: Synthetic oligonucleotide
gggcgcacugccccgcccc

SEQ ID NO: 236857 - RNA, 19 nt, Artificial Sequence
  Description of Artificial Sequence: Synthetic oligonucleotide
cugcuagaugaggccccag

SEQ ID NO: 236858 - RNA, 19 nt, Artificial Sequence
  Description of Artificial Sequence: Synthetic oligonucleotide
ggcacacucggggaagcca

SEQ ID NO: 236859 - RNA, 19 nt, Artificial Sequence
  Description of Artificial Sequence: Synthetic oligonucleotide
gcaccggaacugauugggc

SEQ ID NO: 236860 - RNA, 19 nt, Artificial Sequence
  Description of Artificial Sequence: Synthetic oligonucleotide
cggucgauccaguagaggu

SEQ ID NO: 236861 - RNA, 19 nt, Artificial Sequence
  Description of Artificial Sequence: Synthetic oligonucleotide
gcucgauccggggugcuuc

SEQ ID NO: 236862 - RNA, 19 nt, Artificial Sequence
  Description of Artificial Sequence: Synthetic oligonucleotide
guggccggugaugguggug

SEQ ID NO: 236863 - RNA, 19 nt, Artificial Sequence
  Description of Artificial Sequence: Synthetic oligonucleotide
ccaguacacguagcccucc

SEQ ID NO: 236864 - RNA, 19 nt, Artificial Sequence
  Description of Artificial Sequence: Synthetic oligonucleotide
gccucaccaucgcagcgca

SEQ ID NO: 236865 - RNA, 19 nt, Artificial Sequence
  Description of Artificial Sequence: Synthetic oligonucleotide
gugcaacacaauggcccga

SEQ ID NO: 236866 - RNA, 19 nt, Artificial Sequence
  Description of Artificial Sequence: Synthetic oligonucleotide
uccgggcgacccaguccac

SEQ ID NO: 236867 - RNA, 19 nt, Artificial Sequence
  Description of Artificial Sequence: Synthetic oligonucleotide
guacagcgaugggucugug

SEQ ID NO: 236868 - RNA, 19 nt, Artificial Sequence
  Description of Artificial Sequence: Synthetic oligonucleotide
cgcgugguccugcauguug

SEQ ID NO: 236869 - RNA, 19 nt, Artificial Sequence
  Description of Artificial Sequence: Synthetic oligonucleotide
ccccacuaggcucauggaa

SEQ ID NO: 236870 - RNA, 19 nt, Artificial Sequence
  Description of Artificial Sequence: Synthetic oligonucleotide
caucacucgcuggcagaca

SEQ ID NO: 236871 - RNA, 19 nt, Artificial Sequence
  Description of Artificial Sequence: Synthetic oligonucleotide
auguacccaugugcaggau

SEQ ID NO: 236872 - RNA, 19 nt, Artificial Sequence
  Description of Artificial Sequence: Synthetic oligonucleotide
ggcgggaagagguggcagu

SEQ ID NO: 236873 - RNA, 19 nt, Artificial Sequence
  Description of Artificial Sequence: Synthetic oligonucleotide
acacggcccugaacccuag

SEQ ID NO: 236874 - RNA, 19 nt, Artificial Sequence
  Description of Artificial Sequence: Synthetic oligonucleotide
cccgcccaugacgaagagg

SEQ ID NO: 236875 - RNA, 19 nt, Artificial Sequence
  Description of Artificial Sequence: Synthetic oligonucleotide
ccuguauggucuggcugug

SEQ ID NO: 236876 - RNA, 19 nt, Artificial Sequence
  Description of Artificial Sequence: Synthetic oligonucleotide
cucgggcgcaggggaacug

SEQ ID NO: 236877 - RNA, 19 nt, Artificial Sequence
  Description of Artificial Sequence: Synthetic oligonucleotide
agaccccgcccaugacgaa

SEQ ID NO: 236878 - RNA, 19 nt, Artificial Sequence
  Description of Artificial Sequence: Synthetic oligonucleotide
gucugugcgccugacccau

SEQ ID NO: 236879 - RNA, 19 nt, Artificial Sequence
  Description of Artificial Sequence: Synthetic oligonucleotide
accucacgcucggugccau

SEQ ID NO: 236880 - RNA, 19 nt, Artificial Sequence
  Description of Artificial Sequence: Synthetic oligonucleotide
agguggccauugaggcgag

SEQ ID NO: 236881 - RNA, 19 nt, Artificial Sequence
  Description of Artificial Sequence: Synthetic oligonucleotide
gcugcuagaugaggcccca

SEQ ID NO: 236882 - RNA, 19 nt, Artificial Sequence
  Description of Artificial Sequence: Synthetic oligonucleotide
gcacgugagggguuccacu

SEQ ID NO: 236883 - RNA, 19 nt, Artificial Sequence
  Description of Artificial Sequence: Synthetic oligonucleotide
cacaagugucugugcgccu

SEQ ID NO: 236884 - RNA, 19 nt, Artificial Sequence
  Description of Artificial Sequence: Synthetic oligonucleotide
ggguaccgucauccuuggc

SEQ ID NO: 236885 - RNA, 19 nt, Artificial Sequence
  Description of Artificial Sequence: Synthetic oligonucleotide
caggaucgguggauauagu

SEQ ID NO: 236886 - RNA, 19 nt, Artificial Sequence
  Description of Artificial Sequence: Synthetic oligonucleotide
ggaccgugcugggaaccac

SEQ ID NO: 236887 - RNA, 19 nt, Artificial Sequence
  Description of Artificial Sequence: Synthetic oligonucleotide
gggaccgugcugggaacca

SEQ ID NO: 236888 - RNA, 19 nt, Artificial Sequence
  Description of Artificial Sequence: Synthetic oligonucleotide
gggacggaugaggccggug

SEQ ID NO: 236889 - RNA, 19 nt, Artificial Sequence
  Description of Artificial Sequence: Synthetic oligonucleotide
ccagauacgcccugcggau

SEQ ID NO: 236890 - RNA, 19 nt, Artificial Sequence
  Description of Artificial Sequence: Synthetic oligonucleotide
ggugggugacacggcccug

SEQ ID NO: 236891 - RNA, 19 nt, Artificial Sequence
  Description of Artificial Sequence: Synthetic oligonucleotide
cgcucuggucggcacacuc

SEQ ID NO: 236892 - RNA, 19 nt, Artificial Sequence
  Description of Artificial Sequence: Synthetic oligonucleotide
cagauacgcccugcggaua

SEQ ID NO: 236893 - RNA, 19 nt, Artificial Sequence
  Description of Artificial Sequence: Synthetic oligonucleotide
gccgcgugguccugcaugu

SEQ ID NO: 236894 - RNA, 19 nt, Artificial Sequence
  Description of Artificial Sequence: Synthetic oligonucleotide
ccauugaggcgagucaccu

SEQ ID NO: 236895 - RNA, 19 nt, Artificial Sequence
  Description of Artificial Sequence: Synthetic oligonucleotide
ccuaguccgcuugucccca

SEQ ID NO: 236896 - RNA, 19 nt, Artificial Sequence
  Description of Artificial Sequence: Synthetic oligonucleotide
ggccucacagguccagaau

SEQ ID NO: 236897 - RNA, 19 nt, Artificial Sequence
  Description of Artificial Sequence: Synthetic oligonucleotide
cggucauacaagggcgcac

SEQ ID NO: 236898 - RNA, 19 nt, Artificial Sequence
  Description of Artificial Sequence: Synthetic oligonucleotide
gcggcguuccaucacccuu

SEQ ID NO: 236899 - RNA, 19 nt, Artificial Sequence
  Description of Artificial Sequence: Synthetic oligonucleotide
gcgccugacccauccagau

SEQ ID NO: 236900 - RNA, 19 nt, Artificial Sequence
  Description of Artificial Sequence: Synthetic oligonucleotide
ccggucauacaagggcgca

SEQ ID NO: 236901 - RNA, 19 nt, Artificial Sequence
  Description of Artificial Sequence: Synthetic oligonucleotide
ggauagcccgcaccucaau

SEQ ID NO: 236902 - RNA, 19 nt, Artificial Sequence
  Description of Artificial Sequence: Synthetic oligonucleotide
cccgcucgauccggggugc

SEQ ID NO: 236903 - RNA, 19 nt, Artificial Sequence
  Description of Artificial Sequence: Synthetic oligonucleotide
gagcaacgcggcguuccau

SEQ ID NO: 236904 - RNA, 19 nt, Artificial Sequence
  Description of Artificial Sequence: Synthetic oligonucleotide
gggaggcccguucaaucuu

SEQ ID NO: 236905 - RNA, 19 nt, Artificial Sequence
  Description of Artificial Sequence: Synthetic oligonucleotide
gccgguggacauugauggu

SEQ ID NO: 236906 - RNA, 19 nt, Artificial Sequence
  Description of Artificial Sequence: Synthetic oligonucleotide
ccccgcccaugacgaagag

SEQ ID NO: 236907 - RNA, 19 nt, Artificial Sequence
  Description of Artificial Sequence: Synthetic oligonucleotide
ccucacgcucggugccauc

SEQ ID NO: 236908 - RNA, 19 nt, Artificial Sequence
  Description of Artificial Sequence: Synthetic oligonucleotide
ccaugccucggaugaugua

SEQ ID NO: 236909 - RNA, 19 nt, Artificial Sequence
  Description of Artificial Sequence: Synthetic oligonucleotide
ccaucgcagcgcagacgca

SEQ ID NO: 236910 - RNA, 19 nt, Artificial Sequence
  Description of Artificial Sequence: Synthetic oligonucleotide
ggucaggcgguuggccccu

SEQ ID NO: 236911 - RNA, 19 nt, Artificial Sequence
  Description of Artificial Sequence: Synthetic oligonucleotide
cccugaacccuaguccgcu

SEQ ID NO: 236912 - RNA, 19 nt, Artificial Sequence
  Description of Artificial Sequence: Synthetic oligonucleotide
cacggcccugaacccuagu

SEQ ID NO: 236913 - RNA, 19 nt, Artificial Sequence
  Description of Artificial Sequence: Synthetic oligonucleotide
ggaugccugucaggugggu

SEQ ID NO: 236914 - RNA, 19 nt, Artificial Sequence
  Description of Artificial Sequence: Synthetic oligonucleotide
cgcuuguccccaguggucu

SEQ ID NO: 236915 - RNA, 19 nt, Artificial Sequence
  Description of Artificial Sequence: Synthetic oligonucleotide
cgauccuggcagucggccu

SEQ ID NO: 236916 - RNA, 19 nt, Artificial Sequence
  Description of Artificial Sequence: Synthetic oligonucleotide
gccggugaugguggugggu

SEQ ID NO: 236917 - RNA, 19 nt, Artificial Sequence
  Description of Artificial Sequence: Synthetic oligonucleotide
ccgggcgacccaguccaca

SEQ ID NO: 236918 - RNA, 19 nt, Artificial Sequence
  Description of Artificial Sequence: Synthetic oligonucleotide
cccugacaagucacagcuu

SEQ ID NO: 236919 - RNA, 19 nt, Artificial Sequence
  Description of Artificial Sequence: Synthetic oligonucleotide
gcaaugccaucggggucau

SEQ ID NO: 236920 - RNA, 19 nt, Artificial Sequence
  Description of Artificial Sequence: Synthetic oligonucleotide
gggaaccaccuggggcuau

SEQ ID NO: 236921 - RNA, 19 nt, Artificial Sequence
  Description of Artificial Sequence: Synthetic oligonucleotide
ccuuggcccucuugauguu

SEQ ID NO: 236922 - RNA, 19 nt, Artificial Sequence
  Description of Artificial Sequence: Synthetic oligonucleotide
cgcggcguuccaucacccu

SEQ ID NO: 236923 - RNA, 19 nt, Artificial Sequence
  Description of Artificial Sequence: Synthetic oligonucleotide
ccucgggcgcaggggaacu

SEQ ID NO: 236924 - RNA, 19 nt, Artificial Sequence
  Description of Artificial Sequence: Synthetic oligonucleotide
cggggucauugaucucugu

SEQ ID NO: 236925 - RNA, 19 nt, Artificial Sequence
  Description of Artificial Sequence: Synthetic oligonucleotide
ccgcucgauccggggugcu

SEQ ID NO: 236926 - RNA, 19 nt, Artificial Sequence
  Description of Artificial Sequence: Synthetic oligonucleotide
cgacggcgggcagcugucu

SEQ ID NO: 236927 - RNA, 19 nt, Artificial Sequence
  Description of Artificial Sequence: Synthetic oligonucleotide
cgggacggaugaggccggu

SEQ ID NO: 236928 - RNA, 19 nt, Artificial Sequence
  Description of Artificial Sequence: Synthetic oligonucleotide
aaugaucuauguuugguac

SEQ ID NO: 236929 - RNA, 19 nt, Artificial Sequence
  Description of Artificial Sequence: Synthetic oligonucleotide
guuauuacguauuuuacag

SEQ ID NO: 236930 - RNA, 19 nt, Artificial Sequence
  Description of Artificial Sequence: Synthetic oligonucleotide
uauacuauguaguaaguug

SEQ ID NO: 236931 - RNA, 19 nt, Artificial Sequence
  Description of Artificial Sequence: Synthetic oligonucleotide
aaguuaucuaauuucaaca

SEQ ID NO: 236932 - RNA, 19 nt, Artificial Sequence
  Description of Artificial Sequence: Synthetic oligonucleotide
uuagugaggaaccaaaaga

SEQ ID NO: 236933 - RNA, 19 nt, Artificial Sequence
  Description of Artificial Sequence: Synthetic oligonucleotide
aaugaaauuuguuacggau

SEQ ID NO: 236934 - RNA, 19 nt, Artificial Sequence
  Description of Artificial Sequence: Synthetic oligonucleotide
auuggguaugcacacaggc

SEQ ID NO: 236935 - RNA, 19 nt, Artificial Sequence
  Description of Artificial Sequence: Synthetic oligonucleotide
aaacuuaggacgcugauuu

SEQ ID NO: 236936 - RNA, 19 nt, Artificial Sequence
  Description of Artificial Sequence: Synthetic oligonucleotide
ugugguagaauaauccgag

SEQ ID NO: 236937 - RNA, 19 nt, Artificial Sequence
  Description of Artificial Sequence: Synthetic oligonucleotide
ucaaguagguagcugauga

SEQ ID NO: 236938 - RNA, 19 nt, Artificial Sequence
  Description of Artificial Sequence: Synthetic oligonucleotide
cauucgaucagccuguggg

SEQ ID NO: 236939 - RNA, 19 nt, Artificial Sequence
  Description of Artificial Sequence: Synthetic oligonucleotide
uuuguugagucacuaguag

SEQ ID NO: 236940 - RNA, 19 nt, Artificial Sequence
  Description of Artificial Sequence: Synthetic oligonucleotide
uacgauuuuguacugguca

SEQ ID NO: 236941 - RNA, 19 nt, Artificial Sequence
  Description of Artificial Sequence: Synthetic oligonucleotide
uauuacguauuuuacagaa

SEQ ID NO: 236942 - RNA, 19 nt, Artificial Sequence
  Description of Artificial Sequence: Synthetic oligonucleotide
aguuauuggacuguguaac

SEQ ID NO: 236943 - RNA, 19 nt, Artificial Sequence
  Description of Artificial Sequence: Synthetic oligonucleotide
auacuauguaguaaguugc

SEQ ID NO: 236944 - RNA, 19 nt, Artificial Sequence
  Description of Artificial Sequence: Synthetic oligonucleotide
auaugugugaccauguggg

SEQ ID NO: 236945 - RNA, 19 nt, Artificial Sequence
  Description of Artificial Sequence: Synthetic oligonucleotide
aagcgagcagacuucuucc

SEQ ID NO: 236946 - RNA, 19 nt, Artificial Sequence
  Description of Artificial Sequence: Synthetic oligonucleotide
uuauauucucaguaagaag

SEQ ID NO: 236947 - RNA, 19 nt, Artificial Sequence
  Description of Artificial Sequence: Synthetic oligonucleotide
agcauuuggguuuuagccg

SEQ ID NO: 236948 - RNA, 19 nt, Artificial Sequence
  Description of Artificial Sequence: Synthetic oligonucleotide
uuuaauuggguaugcacac

SEQ ID NO: 236949 - RNA, 19 nt, Artificial Sequence
  Description of Artificial Sequence: Synthetic oligonucleotide
ugaaaguucggacuccuug

SEQ ID NO: 236950 - RNA, 19 nt, Artificial Sequence
  Description of Artificial Sequence: Synthetic oligonucleotide
acuaucuacacaccuaugu

SEQ ID NO: 236951 - RNA, 19 nt, Artificial Sequence
  Description of Artificial Sequence: Synthetic oligonucleotide
aguuauuacguauuuuaca

SEQ ID NO: 236952 - RNA, 19 nt, Artificial Sequence
  Description of Artificial Sequence: Synthetic oligonucleotide
ucaugugcuuuccagaaac

SEQ ID NO: 236953 - RNA, 19 nt, Artificial Sequence
  Description of Artificial Sequence: Synthetic oligonucleotide
caaguuaucuaauuucaac

SEQ ID NO: 236954 - RNA, 19 nt, Artificial Sequence
  Description of Artificial Sequence: Synthetic oligonucleotide
aauccgaggugauggugcc

SEQ ID NO: 236955 - RNA, 19 nt, Artificial Sequence
  Description of Artificial Sequence: Synthetic oligonucleotide
agauagacccagcuuauag

SEQ ID NO: 236956 - RNA, 19 nt, Artificial Sequence
  Description of Artificial Sequence: Synthetic oligonucleotide
ucuaaacuuggugugaggc

SEQ ID NO: 236957 - RNA, 19 nt, Artificial Sequence
  Description of Artificial Sequence: Synthetic oligonucleotide
uuaguggaggaccucacca

SEQ ID NO: 236958 - RNA, 19 nt, Artificial Sequence
  Description of Artificial Sequence: Synthetic oligonucleotide
gucacauucgaucagccug

SEQ ID NO: 236959 - RNA, 19 nt, Artificial Sequence
  Description of Artificial Sequence: Synthetic oligonucleotide
uaauccgaggugauggugc

SEQ ID NO: 236960 - RNA, 19 nt, Artificial Sequence
  Description of Artificial Sequence: Synthetic oligonucleotide
uuacggauaaaacgcauuc

SEQ ID NO: 236961 - RNA, 19 nt, Artificial Sequence
  Description of Artificial Sequence: Synthetic oligonucleotide
auguacuuuugucaugagg

SEQ ID NO: 236962 - RNA, 19 nt, Artificial Sequence
  Description of Artificial Sequence: Synthetic oligonucleotide
ucugcuacagacugcaccu

SEQ ID NO: 236963 - RNA, 19 nt, Artificial Sequence
  Description of Artificial Sequence: Synthetic oligonucleotide
ucuuacgacuagcagcugc

SEQ ID NO: 236964 - RNA, 19 nt, Artificial Sequence
  Description of Artificial Sequence: Synthetic oligonucleotide
ucugaagucagggcggugg

SEQ ID NO: 236965 - RNA, 19 nt, Artificial Sequence
  Description of Artificial Sequence: Synthetic oligonucleotide
uguaaagcuauuucacagu

SEQ ID NO: 236966 - RNA, 19 nt, Artificial Sequence
  Description of Artificial Sequence: Synthetic oligonucleotide
cuuacgacuagcagcugcg

SEQ ID NO: 236967 - RNA, 19 nt, Artificial Sequence
  Description of Artificial Sequence: Synthetic oligonucleotide
aauaacaauucugguacga

SEQ ID NO: 236968 - RNA, 19 nt, Artificial Sequence
  Description of Artificial Sequence: Synthetic oligonucleotide
ugcacuguaaagcuauuuc

SEQ ID NO: 236969 - RNA, 19 nt, Artificial Sequence
  Description of Artificial Sequence: Synthetic oligonucleotide
gaacuagcauuuuggcucg

SEQ ID NO: 236970 - RNA, 19 nt, Artificial Sequence
  Description of Artificial Sequence: Synthetic oligonucleotide
aacugguaaauguaaugaa

SEQ ID NO: 236971 - RNA, 19 nt, Artificial Sequence
  Description of Artificial Sequence: Synthetic oligonucleotide
ucuacgauuuuguacuggu

SEQ ID NO: 236972 - RNA, 19 nt, Artificial Sequence
  Description of Artificial Sequence: Synthetic oligonucleotide
ucugacuugaagcgagcag

SEQ ID NO: 236973 - RNA, 19 nt, Artificial Sequence
  Description of Artificial Sequence: Synthetic oligonucleotide
uuagccgauucacagcuga

SEQ ID NO: 236974 - RNA, 19 nt, Artificial Sequence
  Description of Artificial Sequence: Synthetic oligonucleotide
uuauagacacggaggagac

SEQ ID NO: 236975 - RNA, 19 nt, Artificial Sequence
  Description of Artificial Sequence: Synthetic oligonucleotide
aguguuuaauuggguaugc

SEQ ID NO: 236976 - RNA, 19 nt, Artificial Sequence
  Description of Artificial Sequence: Synthetic oligonucleotide
ucuccguuuauuuggucag

SEQ ID NO: 236977 - RNA, 19 nt, Artificial Sequence
  Description of Artificial Sequence: Synthetic oligonucleotide
uuuuguugagucacuagua

SEQ ID NO: 236978 - RNA, 19 nt, Artificial Sequence
  Description of Artificial Sequence: Synthetic oligonucleotide
aggaccucaccagugaagc

SEQ ID NO: 236979 - RNA, 19 nt, Artificial Sequence
  Description of Artificial Sequence: Synthetic oligonucleotide
uuauuggacuguguaacag

SEQ ID NO: 236980 - RNA, 19 nt, Artificial Sequence
  Description of Artificial Sequence: Synthetic oligonucleotide
uucauaguagauagaccca

SEQ ID NO: 236981 - RNA, 19 nt, Artificial Sequence
  Description of Artificial Sequence: Synthetic oligonucleotide
uuauuacguauuuuacaga

SEQ ID NO: 236982 - RNA, 19 nt, Artificial Sequence
  Description of Artificial Sequence: Synthetic oligonucleotide
ugcuacagacugcaccucg

SEQ ID NO: 236983 - RNA, 19 nt, Artificial Sequence
  Description of Artificial Sequence: Synthetic oligonucleotide
uaucuacacaccuauguua

SEQ ID NO: 236984 - RNA, 19 nt, Artificial Sequence
  Description of Artificial Sequence: Synthetic oligonucleotide
ugaucuauguuugguacug

SEQ ID NO: 236985 - RNA, 19 nt, Artificial Sequence
  Description of Artificial Sequence: Synthetic oligonucleotide
uaaugaaauuuguuacgga

SEQ ID NO: 236986 - RNA, 19 nt, Artificial Sequence
  Description of Artificial Sequence: Synthetic oligonucleotide
uuuaguggaggaccucacc

SEQ ID NO: 236987 - RNA, 19 nt, Artificial Sequence
  Description of Artificial Sequence: Synthetic oligonucleotide
agaguuauuggacugugua

SEQ ID NO: 236988 - RNA, 19 nt, Artificial Sequence
  Description of Artificial Sequence: Synthetic oligonucleotide
guuuaauuggguaugcaca

SEQ ID NO: 236989 - RNA, 19 nt, Artificial Sequence
  Description of Artificial Sequence: Synthetic oligonucleotide
uuucuggacuguuugauuu

SEQ ID NO: 236990 - RNA, 19 nt, Artificial Sequence
  Description of Artificial Sequence: Synthetic oligonucleotide
acgauuuuguacuggucag

SEQ ID NO: 236991 - RNA, 19 nt, Artificial Sequence
  Description of Artificial Sequence: Synthetic oligonucleotide
uuuuaagcgaucugcuauc

SEQ ID NO: 236992 - RNA, 19 nt, Artificial Sequence
  Description of Artificial Sequence: Synthetic oligonucleotide
gguagaauaauccgaggug

SEQ ID NO: 236993 - RNA, 19 nt, Artificial Sequence
  Description of Artificial Sequence: Synthetic oligonucleotide
ugcguuuggagcugugcgg

SEQ ID NO: 236994 - RNA, 19 nt, Artificial Sequence
  Description of Artificial Sequence: Synthetic oligonucleotide
aauauacuauguaguaagu

SEQ ID NO: 236995 - RNA, 19 nt, Artificial Sequence
  Description of Artificial Sequence: Synthetic oligonucleotide
uggaugagagucucuacga

SEQ ID NO: 236996 - RNA, 19 nt, Artificial Sequence
  Description of Artificial Sequence: Synthetic oligonucleotide
acgacuagcagcugcgaag

SEQ ID NO: 236997 - RNA, 19 nt, Artificial Sequence
  Description of Artificial Sequence: Synthetic oligonucleotide
uuguuacggauaaaacgca

SEQ ID NO: 236998 - RNA, 19 nt, Artificial Sequence
  Description of Artificial Sequence: Synthetic oligonucleotide
gaagcgagcagacuucuuc

SEQ ID NO: 236999 - RNA, 19 nt, Artificial Sequence
  Description of Artificial Sequence: Synthetic oligonucleotide
aaggcugcauaauaacaau

SEQ ID NO: 237000 - RNA, 19 nt, Artificial Sequence
  Description of Artificial Sequence: Synthetic oligonucleotide
ggugaauccagcccaaacc

SEQ ID NO: 237001 - RNA, 19 nt, Artificial Sequence
  Description of Artificial Sequence: Synthetic oligonucleotide
acggauaaaacgcauucau

SEQ ID NO: 237002 - RNA, 19 nt, Artificial Sequence
  Description of Artificial Sequence: Synthetic oligonucleotide
ucacauucgaucagccugu

SEQ ID NO: 237003 - RNA, 19 nt, Artificial Sequence
  Description of Artificial Sequence: Synthetic oligonucleotide
aguucggacuccuugucug

SEQ ID NO: 237004 - RNA, 19 nt, Artificial Sequence
  Description of Artificial Sequence: Synthetic oligonucleotide
acaugucgucagcaggugc

SEQ ID NO: 237005 - RNA, 19 nt, Artificial Sequence
  Description of Artificial Sequence: Synthetic oligonucleotide
uuggguaugcacacaggca

SEQ ID NO: 237006 - RNA, 19 nt, Artificial Sequence
  Description of Artificial Sequence: Synthetic oligonucleotide
uguauguacccaccugugu

SEQ ID NO: 237007 - RNA, 19 nt, Artificial Sequence
  Description of Artificial Sequence: Synthetic oligonucleotide
aggcacuuuuguuagugag

SEQ ID NO: 237008 - RNA, 19 nt, Artificial Sequence
  Description of Artificial Sequence: Synthetic oligonucleotide
uacggcugucuaaacuugg

SEQ ID NO: 237009 - RNA, 19 nt, Artificial Sequence
  Description of Artificial Sequence: Synthetic oligonucleotide
aacuuaggacgcugauuuc

SEQ ID NO: 237010 - RNA, 19 nt, Artificial Sequence
  Description of Artificial Sequence: Synthetic oligonucleotide
ucccugcuauaccugaucc

SEQ ID NO: 237011 - RNA, 19 nt, Artificial Sequence
  Description of Artificial Sequence: Synthetic oligonucleotide
cuuauagacacggaggaga

SEQ ID NO: 237012 - RNA, 19 nt, Artificial Sequence
  Description of Artificial Sequence: Synthetic oligonucleotide
guagaauaauccgagguga

SEQ ID NO: 237013 - RNA, 19 nt, Artificial Sequence
  Description of Artificial Sequence: Synthetic oligonucleotide
gucucuacgauuuuguacu

SEQ ID NO: 237014 - RNA, 19 nt, Artificial Sequence
  Description of Artificial Sequence: Synthetic oligonucleotide
guuuuagccgauucacagc

SEQ ID NO: 237015 - RNA, 19 nt, Artificial Sequence
  Description of Artificial Sequence: Synthetic oligonucleotide
cuuaggacgcugauuucag

SEQ ID NO: 237016 - RNA, 19 nt, Artificial Sequence
  Description of Artificial Sequence: Synthetic oligonucleotide
ucgcucaccaguucgcucc

SEQ ID NO: 237017 - RNA, 19 nt, Artificial Sequence
  Description of Artificial Sequence: Synthetic oligonucleotide
uuauucaaugcaaguuauc

SEQ ID NO: 237018 - RNA, 19 nt, Artificial Sequence
  Description of Artificial Sequence: Synthetic oligonucleotide
uaaaacgcauucauuuauu

SEQ ID NO: 237019 - RNA, 19 nt, Artificial Sequence
  Description of Artificial Sequence: Synthetic oligonucleotide
uguccgucuccaccggucg

SEQ ID NO: 237020 - RNA, 19 nt, Artificial Sequence
  Description of Artificial Sequence: Synthetic oligonucleotide
agcgugucacauucgauca

SEQ ID NO: 237021 - RNA, 19 nt, Artificial Sequence
  Description of Artificial Sequence: Synthetic oligonucleotide
ugaguggcagccuucgccu

SEQ ID NO: 237022 - RNA, 19 nt, Artificial Sequence
  Description of Artificial Sequence: Synthetic oligonucleotide
uguuacggauaaaacgcau

SEQ ID NO: 237023 - RNA, 19 nt, Artificial Sequence
  Description of Artificial Sequence: Synthetic oligonucleotide
uggguuuuagccgauucac

SEQ ID NO: 237024 - RNA, 19 nt, Artificial Sequence
  Description of Artificial Sequence: Synthetic oligonucleotide
uuuuaguggaggaccucac

SEQ ID NO: 237025 - RNA, 19 nt, Artificial Sequence
  Description of Artificial Sequence: Synthetic oligonucleotide
augaucuauguuugguacu

SEQ ID NO: 237026 - RNA, 19 nt, Artificial Sequence
  Description of Artificial Sequence: Synthetic oligonucleotide
ugcucaugugcuuuccaga

SEQ ID NO: 237027 - RNA, 19 nt, Artificial Sequence
  Description of Artificial Sequence: Synthetic oligonucleotide
uccacuaucuacacaccua

SEQ ID NO: 237028 - RNA, 19 nt, Artificial Sequence
  Description of Artificial Sequence: Synthetic oligonucleotide
acuuaggacgcugauuuca

SEQ ID NO: 237029 - RNA, 19 nt, Artificial Sequence
  Description of Artificial Sequence: Synthetic oligonucleotide
uuuguuagugaggaaccaa

SEQ ID NO: 237030 - RNA, 19 nt, Artificial Sequence
  Description of Artificial Sequence: Synthetic oligonucleotide
aaacucacugugcuugguu

SEQ ID NO: 237031 - RNA, 19 nt, Artificial Sequence
  Description of Artificial Sequence: Synthetic oligonucleotide
cugauacaucuccagggag

SEQ ID NO: 237032 - RNA, 19 nt, Artificial Sequence
  Description of Artificial Sequence: Synthetic oligonucleotide
gugguagaauaauccgagg

SEQ ID NO: 237033 - RNA, 19 nt, Artificial Sequence
  Description of Artificial Sequence: Synthetic oligonucleotide
cagcgugucacauucgauc

SEQ ID NO: 237034 - RNA, 19 nt, Artificial Sequence
  Description of Artificial Sequence: Synthetic oligonucleotide
gagagaauggugcaugggu

SEQ ID NO: 237035 - RNA, 19 nt, Artificial Sequence
  Description of Artificial Sequence: Synthetic oligonucleotide
uauguacccaccuguguua

SEQ ID NO: 237036 - RNA, 19 nt, Artificial Sequence
  Description of Artificial Sequence: Synthetic oligonucleotide
uuuauuuggucaggugacu

SEQ ID NO: 237037 - RNA, 19 nt, Artificial Sequence
  Description of Artificial Sequence: Synthetic oligonucleotide
guuuuaagcgaucugcuau

SEQ ID NO: 237038 - RNA, 19 nt, Artificial Sequence
  Description of Artificial Sequence: Synthetic oligonucleotide
uacggauaaaacgcauuca

SEQ ID NO: 237039 - RNA, 19 nt, Artificial Sequence
  Description of Artificial Sequence: Synthetic oligonucleotide
uaguagauagacccagcuu

SEQ ID NO: 237040 - RNA, 19 nt, Artificial Sequence
  Description of Artificial Sequence: Synthetic oligonucleotide
agaauaauccgaggugaug

SEQ ID NO: 237041 - RNA, 19 nt, Artificial Sequence
  Description of Artificial Sequence: Synthetic oligonucleotide
acgauggcuagguuucuug

SEQ ID NO: 237042 - RNA, 19 nt, Artificial Sequence
  Description of Artificial Sequence: Synthetic oligonucleotide
gaaaguucggacuccuugu

SEQ ID NO: 237043 - RNA, 19 nt, Artificial Sequence
  Description of Artificial Sequence: Synthetic oligonucleotide
aagcgaucugcuaucuuug

SEQ ID NO: 237044 - RNA, 19 nt, Artificial Sequence
  Description of Artificial Sequence: Synthetic oligonucleotide
uuuaagcgaucugcuaucu

SEQ ID NO: 237045 - RNA, 19 nt, Artificial Sequence
  Description of Artificial Sequence: Synthetic oligonucleotide
auauacuauguaguaaguu

SEQ ID NO: 237046 - RNA, 19 nt, Artificial Sequence
  Description of Artificial Sequence: Synthetic oligonucleotide
auucgaucagccuguggga

SEQ ID NO: 237047 - RNA, 19 nt, Artificial Sequence
  Description of Artificial Sequence: Synthetic oligonucleotide
agaaacuuaggacgcugau

SEQ ID NO: 237048 - RNA, 19 nt, Artificial Sequence
  Description of Artificial Sequence: Synthetic oligonucleotide
aacuccgaacaugucguca

SEQ ID NO: 237049 - RNA, 19 nt, Artificial Sequence
  Description of Artificial Sequence: Synthetic oligonucleotide
gacagcgugucacauucga

SEQ ID NO: 237050 - RNA, 19 nt, Artificial Sequence
  Description of Artificial Sequence: Synthetic oligonucleotide
gccgauucacagcugaaag

SEQ ID NO: 237051 - RNA, 19 nt, Artificial Sequence
  Description of Artificial Sequence: Synthetic oligonucleotide
uuuagccgauucacagcug

SEQ ID NO: 237052 - RNA, 19 nt, Artificial Sequence
  Description of Artificial Sequence: Synthetic oligonucleotide
ucuacacaccuauguuaca

SEQ ID NO: 237053 - RNA, 19 nt, Artificial Sequence
  Description of Artificial Sequence: Synthetic oligonucleotide
caguucgcuccucucgucg

SEQ ID NO: 237054 - RNA, 19 nt, Artificial Sequence
  Description of Artificial Sequence: Synthetic oligonucleotide
ucucuacgauuuuguacug

SEQ ID NO: 237055 - RNA, 19 nt, Artificial Sequence
  Description of Artificial Sequence: Synthetic oligonucleotide
uacgacuagcagcugcgaa

SEQ ID NO: 237056 - RNA, 19 nt, Artificial Sequence
  Description of Artificial Sequence: Synthetic oligonucleotide
uuccccgauccccaacgag

SEQ ID NO: 237057 - RNA, 19 nt, Artificial Sequence
  Description of Artificial Sequence: Synthetic oligonucleotide
cuacggcugucuaaacuug

SEQ ID NO: 237058 - RNA, 19 nt, Artificial Sequence
  Description of Artificial Sequence: Synthetic oligonucleotide
uccguuuauuuggucaggu

SEQ ID NO: 237059 - RNA, 19 nt, Artificial Sequence
  Description of Artificial Sequence: Synthetic oligonucleotide
uuucaacaguauggcaccc

SEQ ID NO: 237060 - RNA, 19 nt, Artificial Sequence
  Description of Artificial Sequence: Synthetic oligonucleotide
ggugaguaaaugaucuaug

SEQ ID NO: 237061 - RNA, 19 nt, Artificial Sequence
  Description of Artificial Sequence: Synthetic oligonucleotide
cucuacgauuuuguacugg

SEQ ID NO: 237062 - RNA, 19 nt, Artificial Sequence
  Description of Artificial Sequence: Synthetic oligonucleotide
uagcauuuuggcucguguu

SEQ ID NO: 237063 - RNA, 19 nt, Artificial Sequence
  Description of Artificial Sequence: Synthetic oligonucleotide
aacgagcccuuagauuuug

SEQ ID NO: 237064 - RNA, 19 nt, Artificial Sequence
  Description of Artificial Sequence: Synthetic oligonucleotide
acgccuguccuuccaaugu

SEQ ID NO: 237065 - RNA, 19 nt, Artificial Sequence
  Description of Artificial Sequence: Synthetic oligonucleotide
cuacgauuuuguacugguc

SEQ ID NO: 237066 - RNA, 19 nt, Artificial Sequence
  Description of Artificial Sequence: Synthetic oligonucleotide
uuaggacgcugauuucagu

SEQ ID NO: 237067 - RNA, 19 nt, Artificial Sequence
  Description of Artificial Sequence: Synthetic oligonucleotide
ugcgguggggacacgcugu

SEQ ID NO: 237068 - RNA, 19 nt, Artificial Sequence
  Description of Artificial Sequence: Synthetic oligonucleotide
ugagaguuggugaccuguu

SEQ ID NO: 237069 - RNA, 19 nt, Artificial Sequence
  Description of Artificial Sequence: Synthetic oligonucleotide
uacccaccuguguuaaaac

SEQ ID NO: 237070 - RNA, 19 nt, Artificial Sequence
  Description of Artificial Sequence: Synthetic oligonucleotide
gauccacuaucuacacacc

SEQ ID NO: 237071 - RNA, 19 nt, Artificial Sequence
  Description of Artificial Sequence: Synthetic oligonucleotide
ggaaugacuagagaaugga

SEQ ID NO: 237072 - RNA, 19 nt, Artificial Sequence
  Description of Artificial Sequence: Synthetic oligonucleotide
auccccaacgagcccuuag

SEQ ID NO: 237073 - RNA, 19 nt, Artificial Sequence
  Description of Artificial Sequence: Synthetic oligonucleotide
guugcguuuggagcugugc

SEQ ID NO: 237074 - RNA, 19 nt, Artificial Sequence
  Description of Artificial Sequence: Synthetic oligonucleotide
uucgaucagccugugggaa

SEQ ID NO: 237075 - RNA, 19 nt, Artificial Sequence
  Description of Artificial Sequence: Synthetic oligonucleotide
gcauuuggguuuuagccga

SEQ ID NO: 237076 - RNA, 19 nt, Artificial Sequence
  Description of Artificial Sequence: Synthetic oligonucleotide
auaccugauccuuccccga

SEQ ID NO: 237077 - RNA, 19 nt, Artificial Sequence
  Description of Artificial Sequence: Synthetic oligonucleotide
uccuuccaauguuggugag

SEQ ID NO: 237078 - RNA, 19 nt, Artificial Sequence
  Description of Artificial Sequence: Synthetic oligonucleotide
agcgaucugcuaucuuugu

SEQ ID NO: 237079 - RNA, 19 nt, Artificial Sequence
  Description of Artificial Sequence: Synthetic oligonucleotide
ucgcuguggggcuucugug

SEQ ID NO: 237080 - RNA, 19 nt, Artificial Sequence
  Description of Artificial Sequence: Synthetic oligonucleotide
gauggcuagguuucuuggu

SEQ ID NO: 237081 - RNA, 19 nt, Artificial Sequence
  Description of Artificial Sequence: Synthetic oligonucleotide
ggacgcugauuucaguagc

SEQ ID NO: 237082 - RNA, 19 nt, Artificial Sequence
  Description of Artificial Sequence: Synthetic oligonucleotide
aguucgcuccucucgucgu

SEQ ID NO: 237083 - RNA, 19 nt, Artificial Sequence
  Description of Artificial Sequence: Synthetic oligonucleotide
cagaaacuuaggacgcuga

SEQ ID NO: 237084 - RNA, 19 nt, Artificial Sequence
  Description of Artificial Sequence: Synthetic oligonucleotide
cuacacaccuauguuacaa

SEQ ID NO: 237085 - RNA, 19 nt, Artificial Sequence
  Description of Artificial Sequence: Synthetic oligonucleotide
cugcuauaccugauccuuc

SEQ ID NO: 237086 - RNA, 19 nt, Artificial Sequence
  Description of Artificial Sequence: Synthetic oligonucleotide
uaccugauccuuccccgau

SEQ ID NO: 237087 - RNA, 19 nt, Artificial Sequence
  Description of Artificial Sequence: Synthetic oligonucleotide
gacgcugauuucaguagca

SEQ ID NO: 237088 - RNA, 19 nt, Artificial Sequence
  Description of Artificial Sequence: Synthetic oligonucleotide
gcugagagaauggugcaug

SEQ ID NO: 237089 - RNA, 19 nt, Artificial Sequence
  Description of Artificial Sequence: Synthetic oligonucleotide
guauguacccaccuguguu

SEQ ID NO: 237090 - RNA, 19 nt, Artificial Sequence
  Description of Artificial Sequence: Synthetic oligonucleotide
uucccucggaacagccugu

SEQ ID NO: 237091 - RNA, 19 nt, Artificial Sequence
  Description of Artificial Sequence: Synthetic oligonucleotide
acuagcauuuuggcucgug

SEQ ID NO: 237092 - RNA, 19 nt, Artificial Sequence
  Description of Artificial Sequence: Synthetic oligonucleotide
guacccaccuguguuaaaa

SEQ ID NO: 237093 - RNA, 19 nt, Artificial Sequence
  Description of Artificial Sequence: Synthetic oligonucleotide
uuacgacuagcagcugcga

SEQ ID NO: 237094 - RNA, 19 nt, Artificial Sequence
  Description of Artificial Sequence: Synthetic oligonucleotide
ugcggcucacccuggcaac

SEQ ID NO: 237095 - RNA, 19 nt, Artificial Sequence
  Description of Artificial Sequence: Synthetic oligonucleotide
aacgauggcuagguuucuu

SEQ ID NO: 237096 - RNA, 19 nt, Artificial Sequence
  Description of Artificial Sequence: Synthetic oligonucleotide
cccuucgcucaccaguucg

SEQ ID NO: 237097 - RNA, 19 nt, Artificial Sequence
  Description of Artificial Sequence: Synthetic oligonucleotide
cuagcauuuuggcucgugu

SEQ ID NO: 237098 - RNA, 19 nt, Artificial Sequence
  Description of Artificial Sequence: Synthetic oligonucleotide
gcuauaccugauccuuccc

SEQ ID NO: 237099 - RNA, 19 nt, Artificial Sequence
  Description of Artificial Sequence: Synthetic oligonucleotide
ccugggccgagcauuuggg

SEQ ID NO: 237100 - RNA, 19 nt, Artificial Sequence
  Description of Artificial Sequence: Synthetic oligonucleotide
cgauggcuagguuucuugg

SEQ ID NO: 237101 - RNA, 19 nt, Artificial Sequence
  Description of Artificial Sequence: Synthetic oligonucleotide
uagauagacccagcuuaua

SEQ ID NO: 237102 - RNA, 19 nt, Artificial Sequence
  Description of Artificial Sequence: Synthetic oligonucleotide
ccaacgagcccuuagauuu

SEQ ID NO: 237103 - RNA, 19 nt, Artificial Sequence
  Description of Artificial Sequence: Synthetic oligonucleotide
uguacccaccuguguuaaa

SEQ ID NO: 237104 - RNA, 19 nt, Artificial Sequence
  Description of Artificial Sequence: Synthetic oligonucleotide
gcccuuagauuuuguugag

SEQ ID NO: 237105 - RNA, 19 nt, Artificial Sequence
  Description of Artificial Sequence: Synthetic oligonucleotide
accggucgcccuucgcuca

SEQ ID NO: 237106 - RNA, 19 nt, Artificial Sequence
  Description of Artificial Sequence: Synthetic oligonucleotide
aggcugcauaauaacaauu

SEQ ID NO: 237107 - RNA, 19 nt, Artificial Sequence
  Description of Artificial Sequence: Synthetic oligonucleotide
ccuucgcucaccaguucgc

SEQ ID NO: 237108 - RNA, 19 nt, Artificial Sequence
  Description of Artificial Sequence: Synthetic oligonucleotide
ugucugcguuugauguuuu

SEQ ID NO: 237109 - RNA, 19 nt, Artificial Sequence
  Description of Artificial Sequence: Synthetic oligonucleotide
ccccgauccccaacgagcc

SEQ ID NO: 237110 - RNA, 19 nt, Artificial Sequence
  Description of Artificial Sequence: Synthetic oligonucleotide
auguacccaccuguguuaa

SEQ ID NO: 237111 - RNA, 19 nt, Artificial Sequence
  Description of Artificial Sequence: Synthetic oligonucleotide
caccggucgcccuucgcuc

SEQ ID NO: 237112 - RNA, 19 nt, Artificial Sequence
  Description of Artificial Sequence: Synthetic oligonucleotide
agcacgccuguccuuccaa

SEQ ID NO: 237113 - RNA, 19 nt, Artificial Sequence
  Description of Artificial Sequence: Synthetic oligonucleotide
ugccuacggcugucuaaac

SEQ ID NO: 237114 - RNA, 19 nt, Artificial Sequence
  Description of Artificial Sequence: Synthetic oligonucleotide
ccguuuauuuggucaggug

SEQ ID NO: 237115 - RNA, 19 nt, Artificial Sequence
  Description of Artificial Sequence: Synthetic oligonucleotide
guuacggauaaaacgcauu

SEQ ID NO: 237116 - RNA, 19 nt, Artificial Sequence
  Description of Artificial Sequence: Synthetic oligonucleotide
acgcugauuucaguagcau

SEQ ID NO: 237117 - RNA, 19 nt, Artificial Sequence
  Description of Artificial Sequence: Synthetic oligonucleotide
cugagaguuggugaccugu

SEQ ID NO: 237118 - RNA, 19 nt, Artificial Sequence
  Description of Artificial Sequence: Synthetic oligonucleotide
cucacuagaguuggaccaa

SEQ ID NO: 237119 - RNA, 19 nt, Artificial Sequence
  Description of Artificial Sequence: Synthetic oligonucleotide
guagauagacccagcuuau

SEQ ID NO: 237120 - RNA, 19 nt, Artificial Sequence
  Description of Artificial Sequence: Synthetic oligonucleotide
aacuagcauuuuggcucgu

SEQ ID NO: 237121 - RNA, 19 nt, Artificial Sequence
  Description of Artificial Sequence: Synthetic oligonucleotide
ggggaacacugggaacucg

SEQ ID NO: 237122 - RNA, 19 nt, Artificial Sequence
  Description of Artificial Sequence: Synthetic oligonucleotide
gccaggcgacagcugagag

SEQ ID NO: 237123 - RNA, 19 nt, Artificial Sequence
  Description of Artificial Sequence: Synthetic oligonucleotide
acagcgugucacauucgau

SEQ ID NO: 237124 - RNA, 19 nt, Artificial Sequence
  Description of Artificial Sequence: Synthetic oligonucleotide
gagcacgccuguccuucca

SEQ ID NO: 237125 - RNA, 19 nt, Artificial Sequence
  Description of Artificial Sequence: Synthetic oligonucleotide
ggguaugcacacaggcaug

SEQ ID NO: 237126 - RNA, 19 nt, Artificial Sequence
  Description of Artificial Sequence: Synthetic oligonucleotide
guccucaugcagaauuaua

SEQ ID NO: 237127 - RNA, 19 nt, Artificial Sequence
  Description of Artificial Sequence: Synthetic oligonucleotide
cacauucgaucagccugug

SEQ ID NO: 237128 - RNA, 19 nt, Artificial Sequence
  Description of Artificial Sequence: Synthetic oligonucleotide
ggaugagagucucuacgau

SEQ ID NO: 237129 - RNA, 19 nt, Artificial Sequence
  Description of Artificial Sequence: Synthetic oligonucleotide
ggacagcgugucacauucg

SEQ ID NO: 237130 - RNA, 19 nt, Artificial Sequence
  Description of Artificial Sequence: Synthetic oligonucleotide
cuuccccgauccccaacga

SEQ ID NO: 237131 - RNA, 19 nt, Artificial Sequence
  Description of Artificial Sequence: Synthetic oligonucleotide
gcugccuacggcugucuaa

SEQ ID NO: 237132 - RNA, 19 nt, Artificial Sequence
  Description of Artificial Sequence: Synthetic oligonucleotide
uggugccgguauuggccaa

SEQ ID NO: 237133 - RNA, 19 nt, Artificial Sequence
  Description of Artificial Sequence: Synthetic oligonucleotide
ccuacggcugucuaaacuu

SEQ ID NO: 237134 - RNA, 19 nt, Artificial Sequence
  Description of Artificial Sequence: Synthetic oligonucleotide
ccgagcauuuggguuuuag

SEQ ID NO: 237135 - RNA, 19 nt, Artificial Sequence
  Description of Artificial Sequence: Synthetic oligonucleotide
caccuguguuaaaacuggu

SEQ ID NO: 237136 - RNA, 19 nt, Artificial Sequence
  Description of Artificial Sequence: Synthetic oligonucleotide
guacuggcugggagucuac

SEQ ID NO: 237137 - RNA, 19 nt, Artificial Sequence
  Description of Artificial Sequence: Synthetic oligonucleotide
cugcaugagccagugaguu

SEQ ID NO: 237138 - RNA, 19 nt, Artificial Sequence
  Description of Artificial Sequence: Synthetic oligonucleotide
gccuacggcugucuaaacu

SEQ ID NO: 237139 - RNA, 19 nt, Artificial Sequence
  Description of Artificial Sequence: Synthetic oligonucleotide
gcguuugauguuuuccuuu

SEQ ID NO: 237140 - RNA, 19 nt, Artificial Sequence
  Description of Artificial Sequence: Synthetic oligonucleotide
guccgcugguugaagccaa

SEQ ID NO: 237141 - RNA, 19 nt, Artificial Sequence
  Description of Artificial Sequence: Synthetic oligonucleotide
ccaguucgcuccucucguc

SEQ ID NO: 237142 - RNA, 19 nt, Artificial Sequence
  Description of Artificial Sequence: Synthetic oligonucleotide
ggucgcccuucgcucacca

SEQ ID NO: 237143 - RNA, 19 nt, Artificial Sequence
  Description of Artificial Sequence: Synthetic oligonucleotide
gggccgagcauuuggguuu

SEQ ID NO: 237144 - RNA, 19 nt, Artificial Sequence
  Description of Artificial Sequence: Synthetic oligonucleotide
ggacuguguaacaguauuu

SEQ ID NO: 237145 - RNA, 19 nt, Artificial Sequence
  Description of Artificial Sequence: Synthetic oligonucleotide
ccugcuauaccugauccuu

SEQ ID NO: 237146 - RNA, 19 nt, Artificial Sequence
  Description of Artificial Sequence: Synthetic oligonucleotide
gugccgguauuggccaaaa

SEQ ID NO: 237147 - RNA, 19 nt, Artificial Sequence
  Description of Artificial Sequence: Synthetic oligonucleotide
cccgauccccaacgagccc

SEQ ID NO: 237148 - RNA, 19 nt, Artificial Sequence
  Description of Artificial Sequence: Synthetic oligonucleotide
ggucaaguagguagcugau

SEQ ID NO: 237149 - RNA, 19 nt, Artificial Sequence
  Description of Artificial Sequence: Synthetic oligonucleotide
caacgagcccuuagauuuu

SEQ ID NO: 237150 - RNA, 19 nt, Artificial Sequence
  Description of Artificial Sequence: Synthetic oligonucleotide
ggacucucagacaguuugu

SEQ ID NO: 237151 - RNA, 19 nt, Artificial Sequence
  Description of Artificial Sequence: Synthetic oligonucleotide
ggugccgguauuggccaaa

SEQ ID NO: 237152 - RNA, 19 nt, Artificial Sequence
  Description of Artificial Sequence: Synthetic oligonucleotide
gcgaucugcuaucuuuguu

SEQ ID NO: 237153 - RNA, 19 nt, Artificial Sequence
  Description of Artificial Sequence: Synthetic oligonucleotide
gauccccaacgagcccuua

SEQ ID NO: 237154 - RNA, 19 nt, Artificial Sequence
  Description of Artificial Sequence: Synthetic oligonucleotide
gcuggcggaugugcccagc

SEQ ID NO: 237155 - RNA, 19 nt, Artificial Sequence
  Description of Artificial Sequence: Synthetic oligonucleotide
gcccuucgcucaccaguuc

SEQ ID NO: 237156 - RNA, 19 nt, Artificial Sequence
  Description of Artificial Sequence: Synthetic oligonucleotide
cccaacgagcccuuagauu

SEQ ID NO: 237157 - RNA, 19 nt, Artificial Sequence
  Description of Artificial Sequence: Synthetic oligonucleotide
cccugcuauaccugauccu

SEQ ID NO: 237158 - RNA, 19 nt, Artificial Sequence
  Description of Artificial Sequence: Synthetic oligonucleotide
ccggucgcccuucgcucac

SEQ ID NO: 237159 - RNA, 19 nt, Artificial Sequence
  Description of Artificial Sequence: Synthetic oligonucleotide
ccgauccccaacgagcccu

SEQ ID NO: 237160 - RNA, 19 nt, Artificial Sequence
  Description of Artificial Sequence: Synthetic oligonucleotide
ccccaacgagcccuuagau

SEQ ID NO: 237161 - RNA, 19 nt, Artificial Sequence
  Description of Artificial Sequence: Synthetic oligonucleotide
cgagcccuuagauuuuguu

SEQ ID NO: 237162 - RNA, 19 nt, Artificial Sequence
  Description of Artificial Sequence: Synthetic oligonucleotide
gcccuccgagugugugucu

SEQ ID NO: 237163 - RNA, 19 nt, Artificial Sequence
  Description of Artificial Sequence: Synthetic oligonucleotide
cggucgcccuucgcucacc

SEQ ID NO: 237164 - RNA, 19 nt, Artificial Sequence
  Description of Artificial Sequence: Synthetic oligonucleotide
gccgagcauuuggguuuua

SEQ ID NO: 237165 - RNA, 19 nt, Artificial Sequence
  Description of Artificial Sequence: Synthetic oligonucleotide
aauaaggaggauuaauggc

SEQ ID NO: 237166 - RNA, 19 nt, Artificial Sequence
  Description of Artificial Sequence: Synthetic oligonucleotide
aaacuguuuagcaagagcc

SEQ ID NO: 237167 - RNA, 19 nt, Artificial Sequence
  Description of Artificial Sequence: Synthetic oligonucleotide
acuguuaggagguuggucc

SEQ ID NO: 237168 - RNA, 19 nt, Artificial Sequence
  Description of Artificial Sequence: Synthetic oligonucleotide
uucauaucaauuuuggaag

SEQ ID NO: 237169 - RNA, 19 nt, Artificial Sequence
  Description of Artificial Sequence: Synthetic oligonucleotide
aauauuuaguucaagucac

SEQ ID NO: 237170 - RNA, 19 nt, Artificial Sequence
  Description of Artificial Sequence: Synthetic oligonucleotide
acguuguuaauucucaucc

SEQ ID NO: 237171 - RNA, 19 nt, Artificial Sequence
  Description of Artificial Sequence: Synthetic oligonucleotide
aaugcaaugcacaauuagc

SEQ ID NO: 237172 - RNA, 19 nt, Artificial Sequence
  Description of Artificial Sequence: Synthetic oligonucleotide
aaagguuuguguuggguac

SEQ ID NO: 237173 - RNA, 19 nt, Artificial Sequence
  Description of Artificial Sequence: Synthetic oligonucleotide
aguagcauuacuuuacauc

SEQ ID NO: 237174 - RNA, 19 nt, Artificial Sequence
  Description of Artificial Sequence: Synthetic oligonucleotide
aguauuaugacacccacca

SEQ ID NO: 237175 - RNA, 19 nt, Artificial Sequence
  Description of Artificial Sequence: Synthetic oligonucleotide
ucauagaagauacaagucu

SEQ ID NO: 237176 - RNA, 19 nt, Artificial Sequence
  Description of Artificial Sequence: Synthetic oligonucleotide
uguuaagguaccuucagcc

SEQ ID NO: 237177 - RNA, 19 nt, Artificial Sequence
  Description of Artificial Sequence: Synthetic oligonucleotide
uauuuaugaacacuggagu

SEQ ID NO: 237178 - RNA, 19 nt, Artificial Sequence
  Description of Artificial Sequence: Synthetic oligonucleotide
uauaguuuucucaugcuac

SEQ ID NO: 237179 - RNA, 19 nt, Artificial Sequence
  Description of Artificial Sequence: Synthetic oligonucleotide
gaguuugaauuucauauag

SEQ ID NO: 237180 - RNA, 19 nt, Artificial Sequence
  Description of Artificial Sequence: Synthetic oligonucleotide
aacuacguggcuuagaaua

SEQ ID NO: 237181 - RNA, 19 nt, Artificial Sequence
  Description of Artificial Sequence: Synthetic oligonucleotide
aagacauucgauuugccaa

SEQ ID NO: 237182 - RNA, 19 nt, Artificial Sequence
  Description of Artificial Sequence: Synthetic oligonucleotide
auagaguauuaugacaccc

SEQ ID NO: 237183 - RNA, 19 nt, Artificial Sequence
  Description of Artificial Sequence: Synthetic oligonucleotide
aaagacauucgauuugcca

SEQ ID NO: 237184 - RNA, 19 nt, Artificial Sequence
  Description of Artificial Sequence: Synthetic oligonucleotide
cauguuaccugaaaaggcc

SEQ ID NO: 237185 - RNA, 19 nt, Artificial Sequence
  Description of Artificial Sequence: Synthetic oligonucleotide
agucugaaauccaacagcc

SEQ ID NO: 237186 - RNA, 19 nt, Artificial Sequence
  Description of Artificial Sequence: Synthetic oligonucleotide
aaaugcacggcucuucucu

SEQ ID NO: 237187 - RNA, 19 nt, Artificial Sequence
  Description of Artificial Sequence: Synthetic oligonucleotide
ugcaugucaaaacuuuaag

SEQ ID NO: 237188 - RNA, 19 nt, Artificial Sequence
  Description of Artificial Sequence: Synthetic oligonucleotide
aaaguauagcuuuaccgau

SEQ ID NO: 237189 - RNA, 19 nt, Artificial Sequence
  Description of Artificial Sequence: Synthetic oligonucleotide
cauagaagauacaagucug

SEQ ID NO: 237190 - RNA, 19 nt, Artificial Sequence
  Description of Artificial Sequence: Synthetic oligonucleotide
cauacacuugccauggugc

SEQ ID NO: 237191 - RNA, 19 nt, Artificial Sequence
  Description of Artificial Sequence: Synthetic oligonucleotide
uacguaauauucuacgcac

SEQ ID NO: 237192 - RNA, 19 nt, Artificial Sequence
  Description of Artificial Sequence: Synthetic oligonucleotide
acaugcauacguaauauuc

SEQ ID NO: 237193 - RNA, 19 nt, Artificial Sequence
  Description of Artificial Sequence: Synthetic oligonucleotide
agucuugagaacaagaaca

SEQ ID NO: 237194 - RNA, 19 nt, Artificial Sequence
  Description of Artificial Sequence: Synthetic oligonucleotide
cauacguaauauucuacgc

SEQ ID NO: 237195 - RNA, 19 nt, Artificial Sequence
  Description of Artificial Sequence: Synthetic oligonucleotide
ucagaaaagguccguaagu

SEQ ID NO: 237196 - RNA, 19 nt, Artificial Sequence
  Description of Artificial Sequence: Synthetic oligonucleotide
uguacaacacaguuaauuu

SEQ ID NO: 237197 - RNA, 19 nt, Artificial Sequence
  Description of Artificial Sequence: Synthetic oligonucleotide
uagguacagaacuuaaucu

SEQ ID NO: 237198 - RNA, 19 nt, Artificial Sequence
  Description of Artificial Sequence: Synthetic oligonucleotide
ucuauugguaaauucuuau

SEQ ID NO: 237199 - RNA, 19 nt, Artificial Sequence
  Description of Artificial Sequence: Synthetic oligonucleotide
ucaagcagaacgauacugu

SEQ ID NO: 237200 - RNA, 19 nt, Artificial Sequence
  Description of Artificial Sequence: Synthetic oligonucleotide
uguaccugagagcauugag

SEQ ID NO: 237201 - RNA, 19 nt, Artificial Sequence
  Description of Artificial Sequence: Synthetic oligonucleotide
ccaaaguauagcuuuaccg

SEQ ID NO: 237202 - RNA, 19 nt, Artificial Sequence
  Description of Artificial Sequence: Synthetic oligonucleotide
uucuacgcacacaucacag

SEQ ID NO: 237203 - RNA, 19 nt, Artificial Sequence
  Description of Artificial Sequence: Synthetic oligonucleotide
gacaaagccccuuccaaag

SEQ ID NO: 237204 - RNA, 19 nt, Artificial Sequence
  Description of Artificial Sequence: Synthetic oligonucleotide
uguguauaugcauuccaca

SEQ ID NO: 237205 - RNA, 19 nt, Artificial Sequence
  Description of Artificial Sequence: Synthetic oligonucleotide
cagcuauccguauuuaggg

SEQ ID NO: 237206 - RNA, 19 nt, Artificial Sequence
  Description of Artificial Sequence: Synthetic oligonucleotide
ugcacaauuagcugccuug

SEQ ID NO: 237207 - RNA, 19 nt, Artificial Sequence
  Description of Artificial Sequence: Synthetic oligonucleotide
uguuaauucucauccgacu

SEQ ID NO: 237208 - RNA, 19 nt, Artificial Sequence
  Description of Artificial Sequence: Synthetic oligonucleotide
uagaguauuaugacaccca

SEQ ID NO: 237209 - RNA, 19 nt, Artificial Sequence
  Description of Artificial Sequence: Synthetic oligonucleotide
auaaggaggauuaauggca

SEQ ID NO: 237210 - RNA, 19 nt, Artificial Sequence
  Description of Artificial Sequence: Synthetic oligonucleotide
uacgacucaccacucaccc

SEQ ID NO: 237211 - RNA, 19 nt, Artificial Sequence
  Description of Artificial Sequence: Synthetic oligonucleotide
ucgugaagaacacugccac

SEQ ID NO: 237212 - RNA, 19 nt, Artificial Sequence
  Description of Artificial Sequence: Synthetic oligonucleotide
aaaaugcacggcucuucuc

SEQ ID NO: 237213 - RNA, 19 nt, Artificial Sequence
  Description of Artificial Sequence: Synthetic oligonucleotide
ugaacaugcauacguaaua

SEQ ID NO: 237214 - RNA, 19 nt, Artificial Sequence
  Description of Artificial Sequence: Synthetic oligonucleotide
aacgauacugucucuucgu

SEQ ID NO: 237215 - RNA, 19 nt, Artificial Sequence
  Description of Artificial Sequence: Synthetic oligonucleotide
uuguuaauucucauccgac

SEQ ID NO: 237216 - RNA, 19 nt, Artificial Sequence
  Description of Artificial Sequence: Synthetic oligonucleotide
aaucacauguaauguguau

SEQ ID NO: 237217 - RNA, 19 nt, Artificial Sequence
  Description of Artificial Sequence: Synthetic oligonucleotide
gcauacguaauauucuacg

SEQ ID NO: 237218 - RNA, 19 nt, Artificial Sequence
  Description of Artificial Sequence: Synthetic oligonucleotide
agaacgauacugucucuuc

SEQ ID NO: 237219 - RNA, 19 nt, Artificial Sequence
  Description of Artificial Sequence: Synthetic oligonucleotide
uauuuagggacggugcaag

SEQ ID NO: 237220 - RNA, 19 nt, Artificial Sequence
  Description of Artificial Sequence: Synthetic oligonucleotide
cuauccguauuuagggacg

SEQ ID NO: 237221 - RNA, 19 nt, Artificial Sequence
  Description of Artificial Sequence: Synthetic oligonucleotide
aagguuuguguuggguacc

SEQ ID NO: 237222 - RNA, 19 nt, Artificial Sequence
  Description of Artificial Sequence: Synthetic oligonucleotide
guacauagacaaaaguaag

SEQ ID NO: 237223 - RNA, 19 nt, Artificial Sequence
  Description of Artificial Sequence: Synthetic oligonucleotide
aaugcacggcucuucucuc

SEQ ID NO: 237224 - RNA, 19 nt, Artificial Sequence
  Description of Artificial Sequence: Synthetic oligonucleotide
aaugucaagggaucgucuu

SEQ ID NO: 237225 - RNA, 19 nt, Artificial Sequence
  Description of Artificial Sequence: Synthetic oligonucleotide
ucuacgacucaccacucac

SEQ ID NO: 237226 - RNA, 19 nt, Artificial Sequence
  Description of Artificial Sequence: Synthetic oligonucleotide
uauucuacgcacacaucac

SEQ ID NO: 237227 - RNA, 19 nt, Artificial Sequence
  Description of Artificial Sequence: Synthetic oligonucleotide
uguuggguaccauuuguac

SEQ ID NO: 237228 - RNA, 19 nt, Artificial Sequence
  Description of Artificial Sequence: Synthetic oligonucleotide
gguuaaacacacaacauac

SEQ ID NO: 237229 - RNA, 19 nt, Artificial Sequence
  Description of Artificial Sequence: Synthetic oligonucleotide
uugauacaaccuuucauau

SEQ ID NO: 237230 - RNA, 19 nt, Artificial Sequence
  Description of Artificial Sequence: Synthetic oligonucleotide
aaacaugaacaugcauacg

SEQ ID NO: 237231 - RNA, 19 nt, Artificial Sequence
  Description of Artificial Sequence: Synthetic oligonucleotide
guuguuaauucucauccga

SEQ ID NO: 237232 - RNA, 19 nt, Artificial Sequence
  Description of Artificial Sequence: Synthetic oligonucleotide
ucgauuugccaacucauua

SEQ ID NO: 237233 - RNA, 19 nt, Artificial Sequence
  Description of Artificial Sequence: Synthetic oligonucleotide
ugcuuaggcugacugaaac

SEQ ID NO: 237234 - RNA, 19 nt, Artificial Sequence
  Description of Artificial Sequence: Synthetic oligonucleotide
auguguauaugcauuccac

SEQ ID NO: 237235 - RNA, 19 nt, Artificial Sequence
  Description of Artificial Sequence: Synthetic oligonucleotide
agaagucaauuaauggcac

SEQ ID NO: 237236 - RNA, 19 nt, Artificial Sequence
  Description of Artificial Sequence: Synthetic oligonucleotide
accuaaucugcuuggaggu

SEQ ID NO: 237237 - RNA, 19 nt, Artificial Sequence
  Description of Artificial Sequence: Synthetic oligonucleotide
ugcauacguaauauucuac

SEQ ID NO: 237238 - RNA, 19 nt, Artificial Sequence
  Description of Artificial Sequence: Synthetic oligonucleotide
cauucacuccauccaagcg

SEQ ID NO: 237239 - RNA, 19 nt, Artificial Sequence
  Description of Artificial Sequence: Synthetic oligonucleotide
guuugugagacgguuguag

SEQ ID NO: 237240 - RNA, 19 nt, Artificial Sequence
  Description of Artificial Sequence: Synthetic oligonucleotide
uaucagaaaagguccguaa

SEQ ID NO: 237241 - RNA, 19 nt, Artificial Sequence
  Description of Artificial Sequence: Synthetic oligonucleotide
auauaguuuucucaugcua

SEQ ID NO: 237242 - RNA, 19 nt, Artificial Sequence
  Description of Artificial Sequence: Synthetic oligonucleotide
uuuaauucacaggcuguug

SEQ ID NO: 237243 - RNA, 19 nt, Artificial Sequence
  Description of Artificial Sequence: Synthetic oligonucleotide
uauuccggcgucuccagca

SEQ ID NO: 237244 - RNA, 19 nt, Artificial Sequence
  Description of Artificial Sequence: Synthetic oligonucleotide
ugugagacgguuguagcca

SEQ ID NO: 237245 - RNA, 19 nt, Artificial Sequence
  Description of Artificial Sequence: Synthetic oligonucleotide
aggaggauuaauggcaauc

SEQ ID NO: 237246 - RNA, 19 nt, Artificial Sequence
  Description of Artificial Sequence: Synthetic oligonucleotide
ucuuauugcucacgguccu

SEQ ID NO: 237247 - RNA, 19 nt, Artificial Sequence
  Description of Artificial Sequence: Synthetic oligonucleotide
uguuaccugaaaaggccac

SEQ ID NO: 237248 - RNA, 19 nt, Artificial Sequence
  Description of Artificial Sequence: Synthetic oligonucleotide
gaaaauucguaaaacuucu

SEQ ID NO: 237249 - RNA, 19 nt, Artificial Sequence
  Description of Artificial Sequence: Synthetic oligonucleotide
uucuguauggcaggguuug

SEQ ID NO: 237250 - RNA, 19 nt, Artificial Sequence
  Description of Artificial Sequence: Synthetic oligonucleotide
acuaguggcacaaccgcac

SEQ ID NO: 237251 - RNA, 19 nt, Artificial Sequence
  Description of Artificial Sequence: Synthetic oligonucleotide
ugcauucccagucgugaag

SEQ ID NO: 237252 - RNA, 19 nt, Artificial Sequence
  Description of Artificial Sequence: Synthetic oligonucleotide
uccguaagugugaaguauc

SEQ ID NO: 237253 - RNA, 19 nt, Artificial Sequence
  Description of Artificial Sequence: Synthetic oligonucleotide
aaagcggcaguagaaaaua

SEQ ID NO: 237254 - RNA, 19 nt, Artificial Sequence
  Description of Artificial Sequence: Synthetic oligonucleotide
accuucuacacuguuagga

SEQ ID NO: 237255 - RNA, 19 nt, Artificial Sequence
  Description of Artificial Sequence: Synthetic oligonucleotide
uacuaguggcacaaccgca

SEQ ID NO: 237256 - RNA, 19 nt, Artificial Sequence
  Description of Artificial Sequence: Synthetic oligonucleotide
caagcgcuaacuuggcagc

SEQ ID NO: 237257 - RNA, 19 nt, Artificial Sequence
  Description of Artificial Sequence: Synthetic oligonucleotide
uuuaccgauuuuggcacag

SEQ ID NO: 237258 - RNA, 19 nt, Artificial Sequence
  Description of Artificial Sequence: Synthetic oligonucleotide
auucuacgcacacaucaca

SEQ ID NO: 237259 - RNA, 19 nt, Artificial Sequence
  Description of Artificial Sequence: Synthetic oligonucleotide
guaagugugaaguaucuau

SEQ ID NO: 237260 - RNA, 19 nt, Artificial Sequence
  Description of Artificial Sequence: Synthetic oligonucleotide
uccguauuuagggacggug

SEQ ID NO: 237261 - RNA, 19 nt, Artificial Sequence
  Description of Artificial Sequence: Synthetic oligonucleotide
ccuacuaguggcacaaccg

SEQ ID NO: 237262 - RNA, 19 nt, Artificial Sequence
  Description of Artificial Sequence: Synthetic oligonucleotide
uuccuucuacgacucacca

SEQ ID NO: 237263 - RNA, 19 nt, Artificial Sequence
  Description of Artificial Sequence: Synthetic oligonucleotide
aaaagcggcaguagaaaau

SEQ ID NO: 237264 - RNA, 19 nt, Artificial Sequence
  Description of Artificial Sequence: Synthetic oligonucleotide
uauccguauuuagggacgg

SEQ ID NO: 237265 - RNA, 19 nt, Artificial Sequence
  Description of Artificial Sequence: Synthetic oligonucleotide
aggauuaauggcaaucacu

SEQ ID NO: 237266 - RNA, 19 nt, Artificial Sequence
  Description of Artificial Sequence: Synthetic oligonucleotide
cucaagcagaacgauacug

SEQ ID NO: 237267 - RNA, 19 nt, Artificial Sequence
  Description of Artificial Sequence: Synthetic oligonucleotide
uccgcuggaugcuggauug

SEQ ID NO: 237268 - RNA, 19 nt, Artificial Sequence
  Description of Artificial Sequence: Synthetic oligonucleotide
acggugugcucgucaaggc

SEQ ID NO: 237269 - RNA, 19 nt, Artificial Sequence
  Description of Artificial Sequence: Synthetic oligonucleotide
uguauuccggcgucuccag

SEQ ID NO: 237270 - RNA, 19 nt, Artificial Sequence
  Description of Artificial Sequence: Synthetic oligonucleotide
aaauagcagaauaggcagu

SEQ ID NO: 237271 - RNA, 19 nt, Artificial Sequence
  Description of Artificial Sequence: Synthetic oligonucleotide
cguggcuuagaauagaaac

SEQ ID NO: 237272 - RNA, 19 nt, Artificial Sequence
  Description of Artificial Sequence: Synthetic oligonucleotide
auuuuggcuggacaugaaa

SEQ ID NO: 237273 - RNA, 19 nt, Artificial Sequence
  Description of Artificial Sequence: Synthetic oligonucleotide
uguguaccugagagcauug

SEQ ID NO: 237274 - RNA, 19 nt, Artificial Sequence
  Description of Artificial Sequence: Synthetic oligonucleotide
ugcagagcgugaaccaugu

SEQ ID NO: 237275 - RNA, 19 nt, Artificial Sequence
  Description of Artificial Sequence: Synthetic oligonucleotide
ucaacguccuucuguagua

SEQ ID NO: 237276 - RNA, 19 nt, Artificial Sequence
  Description of Artificial Sequence: Synthetic oligonucleotide
caagcagaacgauacuguc

SEQ ID NO: 237277 - RNA, 19 nt, Artificial Sequence
  Description of Artificial Sequence: Synthetic oligonucleotide
ccaugaggguuuuaaauag

SEQ ID NO: 237278 - RNA, 19 nt, Artificial Sequence
  Description of Artificial Sequence: Synthetic oligonucleotide
uaccgauuuuggcacagaa

SEQ ID NO: 237279 - RNA, 19 nt, Artificial Sequence
  Description of Artificial Sequence: Synthetic oligonucleotide
uacguggcuuagaauagaa

SEQ ID NO: 237280 - RNA, 19 nt, Artificial Sequence
  Description of Artificial Sequence: Synthetic oligonucleotide
cauucgauuugccaacuca

SEQ ID NO: 237281 - RNA, 19 nt, Artificial Sequence
  Description of Artificial Sequence: Synthetic oligonucleotide
cuacgacucaccacucacc

SEQ ID NO: 237282 - RNA, 19 nt, Artificial Sequence
  Description of Artificial Sequence: Synthetic oligonucleotide
gcagcuauccguauuuagg

SEQ ID NO: 237283 - RNA, 19 nt, Artificial Sequence
  Description of Artificial Sequence: Synthetic oligonucleotide
gaguauuaugacacccacc

SEQ ID NO: 237284 - RNA, 19 nt, Artificial Sequence
  Description of Artificial Sequence: Synthetic oligonucleotide
uucguugguaaaucugcuc

SEQ ID NO: 237285 - RNA, 19 nt, Artificial Sequence
  Description of Artificial Sequence: Synthetic oligonucleotide
acauucgauuugccaacuc

SEQ ID NO: 237286 - RNA, 19 nt, Artificial Sequence
  Description of Artificial Sequence: Synthetic oligonucleotide
ucauccgacucaacguccu

SEQ ID NO: 237287 - RNA, 19 nt, Artificial Sequence
  Description of Artificial Sequence: Synthetic oligonucleotide
augcauacguaauauucua

SEQ ID NO: 237288 - RNA, 19 nt, Artificial Sequence
  Description of Artificial Sequence: Synthetic oligonucleotide
ccagucgugaagaacacug

SEQ ID NO: 237289 - RNA, 19 nt, Artificial Sequence
  Description of Artificial Sequence: Synthetic oligonucleotide
gcuuuaccgauuuuggcac

SEQ ID NO: 237290 - RNA, 19 nt, Artificial Sequence
  Description of Artificial Sequence: Synthetic oligonucleotide
uucuacgacucaccacuca

SEQ ID NO: 237291 - RNA, 19 nt, Artificial Sequence
  Description of Artificial Sequence: Synthetic oligonucleotide
gcuaacuuggcagcuaucc

SEQ ID NO: 237292 - RNA, 19 nt, Artificial Sequence
  Description of Artificial Sequence: Synthetic oligonucleotide
caaacucucggccugcaca

SEQ ID NO: 237293 - RNA, 19 nt, Artificial Sequence
  Description of Artificial Sequence: Synthetic oligonucleotide
cuuaggcugacugaaacaa

SEQ ID NO: 237294 - RNA, 19 nt, Artificial Sequence
  Description of Artificial Sequence: Synthetic oligonucleotide
gcuauccguauuuagggac

SEQ ID NO: 237295 - RNA, 19 nt, Artificial Sequence
  Description of Artificial Sequence: Synthetic oligonucleotide
ccaagcgcuaacuuggcag

SEQ ID NO: 237296 - RNA, 19 nt, Artificial Sequence
  Description of Artificial Sequence: Synthetic oligonucleotide
agcuauccguauuuaggga

SEQ ID NO: 237297 - RNA, 19 nt, Artificial Sequence
  Description of Artificial Sequence: Synthetic oligonucleotide
caugaacaugcauacguaa

SEQ ID NO: 237298 - RNA, 19 nt, Artificial Sequence
  Description of Artificial Sequence: Synthetic oligonucleotide
cccucaagcagaacgauac

SEQ ID NO: 237299 - RNA, 19 nt, Artificial Sequence
  Description of Artificial Sequence: Synthetic oligonucleotide
ggauuaauggcaaucacua

SEQ ID NO: 237300 - RNA, 19 nt, Artificial Sequence
  Description of Artificial Sequence: Synthetic oligonucleotide
aaaucacauguaaugugua

SEQ ID NO: 237301 - RNA, 19 nt, Artificial Sequence
  Description of Artificial Sequence: Synthetic oligonucleotide
caugcauacguaauauucu

SEQ ID NO: 237302 - RNA, 19 nt, Artificial Sequence
  Description of Artificial Sequence: Synthetic oligonucleotide
caaagcggagugugaagug

SEQ ID NO: 237303 - RNA, 19 nt, Artificial Sequence
  Description of Artificial Sequence: Synthetic oligonucleotide
uggagguagucucaucauu

SEQ ID NO: 237304 - RNA, 19 nt, Artificial Sequence
  Description of Artificial Sequence: Synthetic oligonucleotide
uuucccuacuaguggcaca

SEQ ID NO: 237305 - RNA, 19 nt, Artificial Sequence
  Description of Artificial Sequence: Synthetic oligonucleotide
guaccugagagcauugaga

SEQ ID NO: 237306 - RNA, 19 nt, Artificial Sequence
  Description of Artificial Sequence: Synthetic oligonucleotide
ccuucuacacuguuaggag

SEQ ID NO: 237307 - RNA, 19 nt, Artificial Sequence
  Description of Artificial Sequence: Synthetic oligonucleotide
auugggguggccucagcau

SEQ ID NO: 237308 - RNA, 19 nt, Artificial Sequence
  Description of Artificial Sequence: Synthetic oligonucleotide
uggauggccuguugcgaag

SEQ ID NO: 237309 - RNA, 19 nt, Artificial Sequence
  Description of Artificial Sequence: Synthetic oligonucleotide
auucgauuugccaacucau

SEQ ID NO: 237310 - RNA, 19 nt, Artificial Sequence
  Description of Artificial Sequence: Synthetic oligonucleotide
uccaagcgcuaacuuggca

SEQ ID NO: 237311 - RNA, 19 nt, Artificial Sequence
  Description of Artificial Sequence: Synthetic oligonucleotide
gagacgguuguagccagug

SEQ ID NO: 237312 - RNA, 19 nt, Artificial Sequence
  Description of Artificial Sequence: Synthetic oligonucleotide
uaagaagauuccccauguu

SEQ ID NO: 237313 - RNA, 19 nt, Artificial Sequence
  Description of Artificial Sequence: Synthetic oligonucleotide
uccaaugucaagggaucgu

SEQ ID NO: 237314 - RNA, 19 nt, Artificial Sequence
  Description of Artificial Sequence: Synthetic oligonucleotide
uucccuacuaguggcacaa

SEQ ID NO: 237315 - RNA, 19 nt, Artificial Sequence
  Description of Artificial Sequence: Synthetic oligonucleotide
uuguguaccugagagcauu

SEQ ID NO: 237316 - RNA, 19 nt, Artificial Sequence
  Description of Artificial Sequence: Synthetic oligonucleotide
caccacucacccaagauua

SEQ ID NO: 237317 - RNA, 19 nt, Artificial Sequence
  Description of Artificial Sequence: Synthetic oligonucleotide
uagcauuacuuuacaucua

SEQ ID NO: 237318 - RNA, 19 nt, Artificial Sequence
  Description of Artificial Sequence: Synthetic oligonucleotide
ucuagccucugagaaaauu

SEQ ID NO: 237319 - RNA, 19 nt, Artificial Sequence
  Description of Artificial Sequence: Synthetic oligonucleotide
aaugcacaauuagcugccu

SEQ ID NO: 237320 - RNA, 19 nt, Artificial Sequence
  Description of Artificial Sequence: Synthetic oligonucleotide
gaaaaggccacaguagcau

SEQ ID NO: 237321 - RNA, 19 nt, Artificial Sequence
  Description of Artificial Sequence: Synthetic oligonucleotide
ccguauuuagggacggugc

SEQ ID NO: 237322 - RNA, 19 nt, Artificial Sequence
  Description of Artificial Sequence: Synthetic oligonucleotide
ggcagcuauccguauuuag

SEQ ID NO: 237323 - RNA, 19 nt, Artificial Sequence
  Description of Artificial Sequence: Synthetic oligonucleotide
auguuaccugaaaaggcca

SEQ ID NO: 237324 - RNA, 19 nt, Artificial Sequence
  Description of Artificial Sequence: Synthetic oligonucleotide
ggggaguacggugugcucg

SEQ ID NO: 237325 - RNA, 19 nt, Artificial Sequence
  Description of Artificial Sequence: Synthetic oligonucleotide
ggaggauuaauggcaauca

SEQ ID NO: 237326 - RNA, 19 nt, Artificial Sequence
  Description of Artificial Sequence: Synthetic oligonucleotide
gcaguuacacuuauguaca

SEQ ID NO: 237327 - RNA, 19 nt, Artificial Sequence
  Description of Artificial Sequence: Synthetic oligonucleotide
uaggcaguuuugccaugca

SEQ ID NO: 237328 - RNA, 19 nt, Artificial Sequence
  Description of Artificial Sequence: Synthetic oligonucleotide
cuggaggaaaaugcacggc

SEQ ID NO: 237329 - RNA, 19 nt, Artificial Sequence
  Description of Artificial Sequence: Synthetic oligonucleotide
aacuuggcagcuauccgua

SEQ ID NO: 237330 - RNA, 19 nt, Artificial Sequence
  Description of Artificial Sequence: Synthetic oligonucleotide
gcacaauuagcugccuugg

SEQ ID NO: 237331 - RNA, 19 nt, Artificial Sequence
  Description of Artificial Sequence: Synthetic oligonucleotide
gucgugaagaacacugcca

SEQ ID NO: 237332 - RNA, 19 nt, Artificial Sequence
  Description of Artificial Sequence: Synthetic oligonucleotide
ucccagucgugaagaacac

SEQ ID NO: 237333 - RNA, 19 nt, Artificial Sequence
  Description of Artificial Sequence: Synthetic oligonucleotide
ccucucguauuucauggcc

SEQ ID NO: 237334 - RNA, 19 nt, Artificial Sequence
  Description of Artificial Sequence: Synthetic oligonucleotide
auccaagcgcuaacuuggc

SEQ ID NO: 237335 - RNA, 19 nt, Artificial Sequence
  Description of Artificial Sequence: Synthetic oligonucleotide
gccgguacguuguuaauuc

SEQ ID NO: 237336 - RNA, 19 nt, Artificial Sequence
  Description of Artificial Sequence: Synthetic oligonucleotide
gucucuucguugguaaauc

SEQ ID NO: 237337 - RNA, 19 nt, Artificial Sequence
  Description of Artificial Sequence: Synthetic oligonucleotide
cuaggacucugcauuccca

SEQ ID NO: 237338 - RNA, 19 nt, Artificial Sequence
  Description of Artificial Sequence: Synthetic oligonucleotide
acgauacugucucuucguu

SEQ ID NO: 237339 - RNA, 19 nt, Artificial Sequence
  Description of Artificial Sequence: Synthetic oligonucleotide
acguaauauucuacgcaca

SEQ ID NO: 237340 - RNA, 19 nt, Artificial Sequence
  Description of Artificial Sequence: Synthetic oligonucleotide
uggaccuaaucugcuugga

SEQ ID NO: 237341 - RNA, 19 nt, Artificial Sequence
  Description of Artificial Sequence: Synthetic oligonucleotide
guuaccugaaaaggccaca

SEQ ID NO: 237342 - RNA, 19 nt, Artificial Sequence
  Description of Artificial Sequence: Synthetic oligonucleotide
ggcacaaccgcaccccaug

SEQ ID NO: 237343 - RNA, 19 nt, Artificial Sequence
  Description of Artificial Sequence: Synthetic oligonucleotide
acaaacuacguggcuuaga

SEQ ID NO: 237344 - RNA, 19 nt, Artificial Sequence
  Description of Artificial Sequence: Synthetic oligonucleotide
acucaccacucacccaaga

SEQ ID NO: 237345 - RNA, 19 nt, Artificial Sequence
  Description of Artificial Sequence: Synthetic oligonucleotide
cuucuacgacucaccacuc

SEQ ID NO: 237346 - RNA, 19 nt, Artificial Sequence
  Description of Artificial Sequence: Synthetic oligonucleotide
aagcgcuaacuuggcagcu

SEQ ID NO: 237347 - RNA, 19 nt, Artificial Sequence
  Description of Artificial Sequence: Synthetic oligonucleotide
acaugaacaugcauacgua

SEQ ID NO: 237348 - RNA, 19 nt, Artificial Sequence
  Description of Artificial Sequence: Synthetic oligonucleotide
ugagacgguuguagccagu

SEQ ID NO: 237349 - RNA, 19 nt, Artificial Sequence
  Description of Artificial Sequence: Synthetic oligonucleotide
cccuacuaguggcacaacc

SEQ ID NO: 237350 - RNA, 19 nt, Artificial Sequence
  Description of Artificial Sequence: Synthetic oligonucleotide
ggcacaaucacuggucauc

SEQ ID NO: 237351 - RNA, 19 nt, Artificial Sequence
  Description of Artificial Sequence: Synthetic oligonucleotide
cuauugguaaauucuuauu

SEQ ID NO: 237352 - RNA, 19 nt, Artificial Sequence
  Description of Artificial Sequence: Synthetic oligonucleotide
ugcauacacuugccauggu

SEQ ID NO: 237353 - RNA, 19 nt, Artificial Sequence
  Description of Artificial Sequence: Synthetic oligonucleotide
ugccgguacguuguuaauu

SEQ ID NO: 237354 - RNA, 19 nt, Artificial Sequence
  Description of Artificial Sequence: Synthetic oligonucleotide
guauuccggcgucuccagc

SEQ ID NO: 237355 - RNA, 19 nt, Artificial Sequence
  Description of Artificial Sequence: Synthetic oligonucleotide
uuaccgauuuuggcacaga

SEQ ID NO: 237356 - RNA, 19 nt, Artificial Sequence
  Description of Artificial Sequence: Synthetic oligonucleotide
ccuucuacgacucaccacu

SEQ ID NO: 237357 - RNA, 19 nt, Artificial Sequence
  Description of Artificial Sequence: Synthetic oligonucleotide
caacguccuucuguaguag

SEQ ID NO: 237358 - RNA, 19 nt, Artificial Sequence
  Description of Artificial Sequence: Synthetic oligonucleotide
gcuuaggcugacugaaaca

SEQ ID NO: 237359 - RNA, 19 nt, Artificial Sequence
  Description of Artificial Sequence: Synthetic oligonucleotide
guacggugugcucgucaag

SEQ ID NO: 237360 - RNA, 19 nt, Artificial Sequence
  Description of Artificial Sequence: Synthetic oligonucleotide
guauuuagggacggugcaa

SEQ ID NO: 237361 - RNA, 19 nt, Artificial Sequence
  Description of Artificial Sequence: Synthetic oligonucleotide
cuuuaccgauuuuggcaca

SEQ ID NO: 237362 - RNA, 19 nt, Artificial Sequence
  Description of Artificial Sequence: Synthetic oligonucleotide
cuuauugcucacgguccuc

SEQ ID NO: 237363 - RNA, 19 nt, Artificial Sequence
  Description of Artificial Sequence: Synthetic oligonucleotide
cggcaguagaaaauaaauc

SEQ ID NO: 237364 - RNA, 19 nt, Artificial Sequence
  Description of Artificial Sequence: Synthetic oligonucleotide
auaaauccaugaggguuuu

SEQ ID NO: 237365 - RNA, 19 nt, Artificial Sequence
  Description of Artificial Sequence: Synthetic oligonucleotide
gcuguuugugagacgguug

SEQ ID NO: 237366 - RNA, 19 nt, Artificial Sequence
  Description of Artificial Sequence: Synthetic oligonucleotide
gacggugcaagaacuuucu

SEQ ID NO: 237367 - RNA, 19 nt, Artificial Sequence
  Description of Artificial Sequence: Synthetic oligonucleotide
cuucguugguaaaucugcu

SEQ ID NO: 237368 - RNA, 19 nt, Artificial Sequence
  Description of Artificial Sequence: Synthetic oligonucleotide
acgguccuccaaugucaag

SEQ ID NO: 237369 - RNA, 19 nt, Artificial Sequence
  Description of Artificial Sequence: Synthetic oligonucleotide
cugcuucuagccucugaga

SEQ ID NO: 237370 - RNA, 19 nt, Artificial Sequence
  Description of Artificial Sequence: Synthetic oligonucleotide
gacucaccacucacccaag

SEQ ID NO: 237371 - RNA, 19 nt, Artificial Sequence
  Description of Artificial Sequence: Synthetic oligonucleotide
cuacgcacacaucacaguu

SEQ ID NO: 237372 - RNA, 19 nt, Artificial Sequence
  Description of Artificial Sequence: Synthetic oligonucleotide
aaguaucuaucaggcuguu

SEQ ID NO: 237373 - RNA, 19 nt, Artificial Sequence
  Description of Artificial Sequence: Synthetic oligonucleotide
acuuggcagcuauccguau

SEQ ID NO: 237374 - RNA, 19 nt, Artificial Sequence
  Description of Artificial Sequence: Synthetic oligonucleotide
ccaaugucaagggaucguc

SEQ ID NO: 237375 - RNA, 19 nt, Artificial Sequence
  Description of Artificial Sequence: Synthetic oligonucleotide
gggaucgucuugcuucuga

SEQ ID NO: 237376 - RNA, 19 nt, Artificial Sequence
  Description of Artificial Sequence: Synthetic oligonucleotide
cuacguggcuuagaauaga

SEQ ID NO: 237377 - RNA, 19 nt, Artificial Sequence
  Description of Artificial Sequence: Synthetic oligonucleotide
aguaucuaucaggcuguuu

SEQ ID NO: 237378 - RNA, 19 nt, Artificial Sequence
  Description of Artificial Sequence: Synthetic oligonucleotide
uccccauguuaagguaccu

SEQ ID NO: 237379 - RNA, 19 nt, Artificial Sequence
  Description of Artificial Sequence: Synthetic oligonucleotide
ggaucgucuugcuucugaa

SEQ ID NO: 237380 - RNA, 19 nt, Artificial Sequence
  Description of Artificial Sequence: Synthetic oligonucleotide
gccucucguauuucauggc

SEQ ID NO: 237381 - RNA, 19 nt, Artificial Sequence
  Description of Artificial Sequence: Synthetic oligonucleotide
gcacaaccgcaccccaugc

SEQ ID NO: 237382 - RNA, 19 nt, Artificial Sequence
  Description of Artificial Sequence: Synthetic oligonucleotide
acguggcuuagaauagaaa

SEQ ID NO: 237383 - RNA, 19 nt, Artificial Sequence
  Description of Artificial Sequence: Synthetic oligonucleotide
guguaccugagagcauuga

SEQ ID NO: 237384 - RNA, 19 nt, Artificial Sequence
  Description of Artificial Sequence: Synthetic oligonucleotide
cguauuuagggacggugca

SEQ ID NO: 237385 - RNA, 19 nt, Artificial Sequence
  Description of Artificial Sequence: Synthetic oligonucleotide
cucaccacucacccaagau

SEQ ID NO: 237386 - RNA, 19 nt, Artificial Sequence
  Description of Artificial Sequence: Synthetic oligonucleotide
gcggcaguagaaaauaaau

SEQ ID NO: 237387 - RNA, 19 nt, Artificial Sequence
  Description of Artificial Sequence: Synthetic oligonucleotide
auccguauuuagggacggu

SEQ ID NO: 237388 - RNA, 19 nt, Artificial Sequence
  Description of Artificial Sequence: Synthetic oligonucleotide
agcgcuaacuuggcagcua

SEQ ID NO: 237389 - RNA, 19 nt, Artificial Sequence
  Description of Artificial Sequence: Synthetic oligonucleotide
uucugccgguacguuguua

SEQ ID NO: 237390 - RNA, 19 nt, Artificial Sequence
  Description of Artificial Sequence: Synthetic oligonucleotide
ccacaaacuacguggcuua

SEQ ID NO: 237391 - RNA, 19 nt, Artificial Sequence
  Description of Artificial Sequence: Synthetic oligonucleotide
gucaagggaucgucuugcu

SEQ ID NO: 237392 - RNA, 19 nt, Artificial Sequence
  Description of Artificial Sequence: Synthetic oligonucleotide
gcucccacuggauggacgu

SEQ ID NO: 237393 - RNA, 19 nt, Artificial Sequence
  Description of Artificial Sequence: Synthetic oligonucleotide
ggcuuagaauagaaacuua

SEQ ID NO: 237394 - RNA, 19 nt, Artificial Sequence
  Description of Artificial Sequence: Synthetic oligonucleotide
ucccuacuaguggcacaac

SEQ ID NO: 237395 - RNA, 19 nt, Artificial Sequence
  Description of Artificial Sequence: Synthetic oligonucleotide
cuggauugccucucguauu

SEQ ID NO: 237396 - RNA, 19 nt, Artificial Sequence
  Description of Artificial Sequence: Synthetic oligonucleotide
acguggucauagaguauua

SEQ ID NO: 237397 - RNA, 19 nt, Artificial Sequence
  Description of Artificial Sequence: Synthetic oligonucleotide
cagaacgauacugucucuu

SEQ ID NO: 237398 - RNA, 19 nt, Artificial Sequence
  Description of Artificial Sequence: Synthetic oligonucleotide
ccccuuccaaaguauagcu

SEQ ID NO: 237399 - RNA, 19 nt, Artificial Sequence
  Description of Artificial Sequence: Synthetic oligonucleotide
gggaguacggugugcucgu

SEQ ID NO: 237400 - RNA, 19 nt, Artificial Sequence
  Description of Artificial Sequence: Synthetic oligonucleotide
ccguaagugugaaguaucu

SEQ ID NO: 237401 - RNA, 19 nt, Artificial Sequence
  Description of Artificial Sequence: Synthetic oligonucleotide
accgcaccccaugccuucu

SEQ ID NO: 237402 - RNA, 19 nt, Artificial Sequence
  Description of Artificial Sequence: Synthetic oligonucleotide
ggccuguugcgaaggacaa

SEQ ID NO: 237403 - RNA, 19 nt, Artificial Sequence
  Description of Artificial Sequence: Synthetic oligonucleotide
gcucgucaaggcucccaga

SEQ ID NO: 237404 - RNA, 19 nt, Artificial Sequence
  Description of Artificial Sequence: Synthetic oligonucleotide
ggcuguuugugagacgguu

SEQ ID NO: 237405 - RNA, 19 nt, Artificial Sequence
  Description of Artificial Sequence: Synthetic oligonucleotide
gcagaacgauacugucucu

SEQ ID NO: 237406 - RNA, 19 nt, Artificial Sequence
  Description of Artificial Sequence: Synthetic oligonucleotide
gggacggugcaagaacuuu

SEQ ID NO: 237407 - RNA, 19 nt, Artificial Sequence
  Description of Artificial Sequence: Synthetic oligonucleotide
cgcuaacuuggcagcuauc

SEQ ID NO: 237408 - RNA, 19 nt, Artificial Sequence
  Description of Artificial Sequence: Synthetic oligonucleotide
cugccgguacguuguuaau

SEQ ID NO: 237409 - RNA, 19 nt, Artificial Sequence
  Description of Artificial Sequence: Synthetic oligonucleotide
ggaguacggugugcucguc

SEQ ID NO: 237410 - RNA, 19 nt, Artificial Sequence
  Description of Artificial Sequence: Synthetic oligonucleotide
ccucaagcagaacgauacu

SEQ ID NO: 237411 - RNA, 19 nt, Artificial Sequence
  Description of Artificial Sequence: Synthetic oligonucleotide
cauccgacucaacguccuu

SEQ ID NO: 237412 - RNA, 19 nt, Artificial Sequence
  Description of Artificial Sequence: Synthetic oligonucleotide
ccgguacguuguuaauucu

SEQ ID NO: 237413 - RNA, 19 nt, Artificial Sequence
  Description of Artificial Sequence: Synthetic oligonucleotide
gccuguugcgaaggacaaa

SEQ ID NO: 237414 - RNA, 19 nt, Artificial Sequence
  Description of Artificial Sequence: Synthetic oligonucleotide
cuucugccgguacguuguu

SEQ ID NO: 237415 - RNA, 19 nt, Artificial Sequence
  Description of Artificial Sequence: Synthetic oligonucleotide
ggacguggucauagaguau

SEQ ID NO: 237416 - RNA, 19 nt, Artificial Sequence
  Description of Artificial Sequence: Synthetic oligonucleotide
gcgaaggacaaagccccuu

SEQ ID NO: 237417 - RNA, 19 nt, Artificial Sequence
  Description of Artificial Sequence: Synthetic oligonucleotide
cggugugcucgucaaggcu

SEQ ID NO: 237418 - RNA, 19 nt, Artificial Sequence
  Description of Artificial Sequence: Synthetic oligonucleotide
cgguuguagccagugcuua

SEQ ID NO: 237419 - RNA, 19 nt, Artificial Sequence
  Description of Artificial Sequence: Synthetic oligonucleotide
gcagagcgugaaccauguu

SEQ ID NO: 237420 - RNA, 19 nt, Artificial Sequence
  Description of Artificial Sequence: Synthetic oligonucleotide
acagcauguauuuacaagc

SEQ ID NO: 237421 - RNA, 19 nt, Artificial Sequence
  Description of Artificial Sequence: Synthetic oligonucleotide
ucguacauaagcuuggugg

SEQ ID NO: 237422 - RNA, 19 nt, Artificial Sequence
  Description of Artificial Sequence: Synthetic oligonucleotide
gaaucagagauccagaaug

SEQ ID NO: 237423 - RNA, 19 nt, Artificial Sequence
  Description of Artificial Sequence: Synthetic oligonucleotide
agaauguucagccuaugcc

SEQ ID NO: 237424 - RNA, 19 nt, Artificial Sequence
  Description of Artificial Sequence: Synthetic oligonucleotide
ugauauucaaucaacauua

SEQ ID NO: 237425 - RNA, 19 nt, Artificial Sequence
  Description of Artificial Sequence: Synthetic oligonucleotide
cuaaaguggacguugauag

SEQ ID NO: 237426 - RNA, 19 nt, Artificial Sequence
  Description of Artificial Sequence: Synthetic oligonucleotide
uuuucaaugcuaaagugga

SEQ ID NO: 237427 - RNA, 19 nt, Artificial Sequence
  Description of Artificial Sequence: Synthetic oligonucleotide
aacucauaaguauagggcu

SEQ ID NO: 237428 - RNA, 19 nt, Artificial Sequence
  Description of Artificial Sequence: Synthetic oligonucleotide
  modified_base (13)..(13): a, c, u, g, unknown or other
aaggaguuaucanaggggc

SEQ ID NO: 237429 - RNA, 19 nt, Artificial Sequence
  Description of Artificial Sequence: Synthetic oligonucleotide
ugaacagucggacaucagg

SEQ ID NO: 237430 - RNA, 19 nt, Artificial Sequence
  Description of Artificial Sequence: Synthetic oligonucleotide
uguauuuacaagcuaugac

SEQ ID NO: 237431 - RNA, 19 nt, Artificial Sequence
  Description of Artificial Sequence: Synthetic oligonucleotide
cuaaagugcacucacggcc

SEQ ID NO: 237432 - RNA, 19 nt, Artificial Sequence
  Description of Artificial Sequence: Synthetic oligonucleotide
uuucuauccagcuaucggc

SEQ ID NO: 237433 - RNA, 19 nt, Artificial Sequence
  Description of Artificial Sequence: Synthetic oligonucleotide
aaggugacgauuccauugg

SEQ ID NO: 237434 - RNA, 19 nt, Artificial Sequence
  Description of Artificial Sequence: Synthetic oligonucleotide
augaguugggguuaccagc

SEQ ID NO: 237435 - RNA, 19 nt, Artificial Sequence
  Description of Artificial Sequence: Synthetic oligonucleotide
aagcuaugacuucaacacc

SEQ ID NO: 237436 - RNA, 19 nt, Artificial Sequence
  Description of Artificial Sequence: Synthetic oligonucleotide
aaugcuaaaguggacguug

SEQ ID NO: 237437 - RNA, 19 nt, Artificial Sequence
  Description of Artificial Sequence: Synthetic oligonucleotide
uaaaugaacccguugguac

SEQ ID NO: 237438 - RNA, 19 nt, Artificial Sequence
  Description of Artificial Sequence: Synthetic oligonucleotide
ugugauagauaccuccaag

SEQ ID NO: 237439 - RNA, 19 nt, Artificial Sequence
  Description of Artificial Sequence: Synthetic oligonucleotide
uccauuggaagucuugugc

SEQ ID NO: 237440 - RNA, 19 nt, Artificial Sequence
  Description of Artificial Sequence: Synthetic oligonucleotide
agagggaagacugauacuc

SEQ ID NO: 237441 - RNA, 19 nt, Artificial Sequence
  Description of Artificial Sequence: Synthetic oligonucleotide
gaguagauagaccacgggc

SEQ ID NO: 237442 - RNA, 19 nt, Artificial Sequence
  Description of Artificial Sequence: Synthetic oligonucleotide
acaauccugugucacagac

SEQ ID NO: 237443 - RNA, 19 nt, Artificial Sequence
  Description of Artificial Sequence: Synthetic oligonucleotide
uagggcuucaaggagacgg

SEQ ID NO: 237444 - RNA, 19 nt, Artificial Sequence
  Description of Artificial Sequence: Synthetic oligonucleotide
caugaggugacucuacucc

SEQ ID NO: 237445 - RNA, 19 nt, Artificial Sequence
  Description of Artificial Sequence: Synthetic oligonucleotide
uacagcauguauuuacaag

SEQ ID NO: 237446 - RNA, 19 nt, Artificial Sequence
  Description of Artificial Sequence: Synthetic oligonucleotide
gauacucgugaccuugucg

SEQ ID NO: 237447 - RNA, 19 nt, Artificial Sequence
  Description of Artificial Sequence: Synthetic oligonucleotide
guuaccacagaccacaauc

SEQ ID NO: 237448 - RNA, 19 nt, Artificial Sequence
  Description of Artificial Sequence: Synthetic oligonucleotide
gacguggucgucuugacug

SEQ ID NO: 237449 - RNA, 19 nt, Artificial Sequence
  Description of Artificial Sequence: Synthetic oligonucleotide
gaauguucagccuaugcca

SEQ ID NO: 237450 - RNA, 19 nt, Artificial Sequence
  Description of Artificial Sequence: Synthetic oligonucleotide
augacugcaacccagugga

SEQ ID NO: 237451 - RNA, 19 nt, Artificial Sequence
  Description of Artificial Sequence: Synthetic oligonucleotide
gcaauagucaguuugcugc

SEQ ID NO: 237452 - RNA, 19 nt, Artificial Sequence
  Description of Artificial Sequence: Synthetic oligonucleotide
agcgguguuacuauaaaac

SEQ ID NO: 237453 - RNA, 19 nt, Artificial Sequence
  Description of Artificial Sequence: Synthetic oligonucleotide
  modified_base (7)..(7): a, c, u, g, unknown or other
uuaucanaggggcuucucu

SEQ ID NO: 237454 - RNA, 19 nt, Artificial Sequence
  Description of Artificial Sequence: Synthetic oligonucleotide
uuaccacagaccacaaucc

SEQ ID NO: 237455 - RNA, 19 nt, Artificial Sequence
  Description of Artificial Sequence: Synthetic oligonucleotide
agacuuaaggugcaaaaga

SEQ ID NO: 237456 - RNA, 19 nt, Artificial Sequence
  Description of Artificial Sequence: Synthetic oligonucleotide
acuuggacauauuuccggg

SEQ ID NO: 237457 - RNA, 19 nt, Artificial Sequence
  Description of Artificial Sequence: Synthetic oligonucleotide
ugcauaugauauucaauca

SEQ ID NO: 237458 - RNA, 19 nt, Artificial Sequence
  Description of Artificial Sequence: Synthetic oligonucleotide
cauauuuccggguuccagc

SEQ ID NO: 237459 - RNA, 19 nt, Artificial Sequence
  Description of Artificial Sequence: Synthetic oligonucleotide
uggaguagauagaccacgg

SEQ ID NO: 237460 - RNA, 19 nt, Artificial Sequence
  Description of Artificial Sequence: Synthetic oligonucleotide
auuuacaagcuaugacuuc

SEQ ID NO: 237461 - RNA, 19 nt, Artificial Sequence
  Description of Artificial Sequence: Synthetic oligonucleotide
uacuugaacagucggacau

SEQ ID NO: 237462 - RNA, 19 nt, Artificial Sequence
  Description of Artificial Sequence: Synthetic oligonucleotide
agcgaucugguccacgugg

SEQ ID NO: 237463 - RNA, 19 nt, Artificial Sequence
  Description of Artificial Sequence: Synthetic oligonucleotide
aucccuaaagugcacucac

SEQ ID NO: 237464 - RNA, 19 nt, Artificial Sequence
  Description of Artificial Sequence: Synthetic oligonucleotide
uguuacuauaaaaccguaa

SEQ ID NO: 237465 - RNA, 19 nt, Artificial Sequence
  Description of Artificial Sequence: Synthetic oligonucleotide
gacguugauagcgaucugg

SEQ ID NO: 237466 - RNA, 19 nt, Artificial Sequence
  Description of Artificial Sequence: Synthetic oligonucleotide
uggugaaaaccccaccgag

SEQ ID NO: 237467 - RNA, 19 nt, Artificial Sequence
  Description of Artificial Sequence: Synthetic oligonucleotide
aaugaacccguugguacgg

SEQ ID NO: 237468 - RNA, 19 nt, Artificial Sequence
  Description of Artificial Sequence: Synthetic oligonucleotide
ugcaaaagaugucaacuau

SEQ ID NO: 237469 - RNA, 19 nt, Artificial Sequence
  Description of Artificial Sequence: Synthetic oligonucleotide
ucagcgagccgugugauag

SEQ ID NO: 237470 - RNA, 19 nt, Artificial Sequence
  Description of Artificial Sequence: Synthetic oligonucleotide
ucaaugcuaaaguggacgu

SEQ ID NO: 237471 - RNA, 19 nt, Artificial Sequence
  Description of Artificial Sequence: Synthetic oligonucleotide
aguggaucagcagaggcuc

SEQ ID NO: 237472 - RNA, 19 nt, Artificial Sequence
  Description of Artificial Sequence: Synthetic oligonucleotide
aguaaaugaacccguuggu

SEQ ID NO: 237473 - RNA, 19 nt, Artificial Sequence
  Description of Artificial Sequence: Synthetic oligonucleotide
cauuccuacaaaugaugcc

SEQ ID NO: 237474 - RNA, 19 nt, Artificial Sequence
  Description of Artificial Sequence: Synthetic oligonucleotide
uugucggaggacuggaucc

SEQ ID NO: 237475 - RNA, 19 nt, Artificial Sequence
  Description of Artificial Sequence: Synthetic oligonucleotide
  modified_base (17)..(17): a, c, u, g, unknown or other
guucaaggaguuaucanag

SEQ ID NO: 237476 - RNA, 19 nt, Artificial Sequence
  Description of Artificial Sequence: Synthetic oligonucleotide
uucuauccagcuaucggca

SEQ ID NO: 237477 - RNA, 19 nt, Artificial Sequence
  Description of Artificial Sequence: Synthetic oligonucleotide
cuacaauacaugagcagac

SEQ ID NO: 237478 - RNA, 19 nt, Artificial Sequence
  Description of Artificial Sequence: Synthetic oligonucleotide
aacaugaggugacucuacu

SEQ ID NO: 237479 - RNA, 19 nt, Artificial Sequence
  Description of Artificial Sequence: Synthetic oligonucleotide
gaccuugugaucugccggg

SEQ ID NO: 237480 - RNA, 19 nt, Artificial Sequence
  Description of Artificial Sequence: Synthetic oligonucleotide
acaacuucguacauaagcu

SEQ ID NO: 237481 - RNA, 19 nt, Artificial Sequence
  Description of Artificial Sequence: Synthetic oligonucleotide
guugggguuaccagcaugg

SEQ ID NO: 237482 - RNA, 19 nt, Artificial Sequence
  Description of Artificial Sequence: Synthetic oligonucleotide
  modified_base (6)..(6): a, c, u, g, unknown or other
uaucanaggggcuucucuc

SEQ ID NO: 237483 - RNA, 19 nt, Artificial Sequence
  Description of Artificial Sequence: Synthetic oligonucleotide
auuaggagaaucagagauc

SEQ ID NO: 237484 - RNA, 19 nt, Artificial Sequence
  Description of Artificial Sequence: Synthetic oligonucleotide
aaacauuacaucaguuagu

SEQ ID NO: 237485 - RNA, 19 nt, Artificial Sequence
  Description of Artificial Sequence: Synthetic oligonucleotide
uacagguggaccuugugau

SEQ ID NO: 237486 - RNA, 19 nt, Artificial Sequence
  Description of Artificial Sequence: Synthetic oligonucleotide
acaugaggugacucuacuc

SEQ ID NO: 237487 - RNA, 19 nt, Artificial Sequence
  Description of Artificial Sequence: Synthetic oligonucleotide
agaauacugcuauccucac

SEQ ID NO: 237488 - RNA, 19 nt, Artificial Sequence
  Description of Artificial Sequence: Synthetic oligonucleotide
aaaccguaacuagggaauc

SEQ ID NO: 237489 - RNA, 19 nt, Artificial Sequence
  Description of Artificial Sequence: Synthetic oligonucleotide
guugguacgguaugacugc

SEQ ID NO: 237490 - RNA, 19 nt, Artificial Sequence
  Description of Artificial Sequence: Synthetic oligonucleotide
agugcgugguccugaaggg

SEQ ID NO: 237491 - RNA, 19 nt, Artificial Sequence
  Description of Artificial Sequence: Synthetic oligonucleotide
gacaguggaguagauagac

SEQ ID NO: 237492 - RNA, 19 nt, Artificial Sequence
  Description of Artificial Sequence: Synthetic oligonucleotide
uagaccacgggcaaucaau

SEQ ID NO: 237493 - RNA, 19 nt, Artificial Sequence
  Description of Artificial Sequence: Synthetic oligonucleotide
auaaaaccguaacuaggga

SEQ ID NO: 237494 - RNA, 19 nt, Artificial Sequence
  Description of Artificial Sequence: Synthetic oligonucleotide
guggaguagauagaccacg

SEQ ID NO: 237495 - RNA, 19 nt, Artificial Sequence
  Description of Artificial Sequence: Synthetic oligonucleotide
acgggcaaucaauggacac

SEQ ID NO: 237496 - RNA, 19 nt, Artificial Sequence
  Description of Artificial Sequence: Synthetic oligonucleotide
uucguacauaagcuuggug

SEQ ID NO: 237497 - RNA, 19 nt, Artificial Sequence
  Description of Artificial Sequence: Synthetic oligonucleotide
uauccagcuaucggcaucc

SEQ ID NO: 237498 - RNA, 19 nt, Artificial Sequence
  Description of Artificial Sequence: Synthetic oligonucleotide
ucccuaaagugcacucacg

SEQ ID NO: 237499 - RNA, 19 nt, Artificial Sequence
  Description of Artificial Sequence: Synthetic oligonucleotide
auagcgaucugguccacgu

SEQ ID NO: 237500 - RNA, 19 nt, Artificial Sequence
  Description of Artificial Sequence: Synthetic oligonucleotide
uaaaguggacguugauagc

SEQ ID NO: 237501 - RNA, 19 nt, Artificial Sequence
  Description of Artificial Sequence: Synthetic oligonucleotide
acugauacucgugaccuug

SEQ ID NO: 237502 - RNA, 19 nt, Artificial Sequence
  Description of Artificial Sequence: Synthetic oligonucleotide
uuucaaugcuaaaguggac

SEQ ID NO: 237503 - RNA, 19 nt, Artificial Sequence
  Description of Artificial Sequence: Synthetic oligonucleotide
aagcgguguuacuauaaaa

SEQ ID NO: 237504 - RNA, 19 nt, Artificial Sequence
  Description of Artificial Sequence: Synthetic oligonucleotide
aaucccuaaagugcacuca

SEQ ID NO: 237505 - RNA, 19 nt, Artificial Sequence
  Description of Artificial Sequence: Synthetic oligonucleotide
uuggacauauuuccggguu

SEQ ID NO: 237506 - RNA, 19 nt, Artificial Sequence
  Description of Artificial Sequence: Synthetic oligonucleotide
ucuaggugcuuguccacug

SEQ ID NO: 237507 - RNA, 19 nt, Artificial Sequence
  Description of Artificial Sequence: Synthetic oligonucleotide
aacccguugguacgguaug

SEQ ID NO: 237508 - RNA, 19 nt, Artificial Sequence
  Description of Artificial Sequence: Synthetic oligonucleotide
ugaugaguugggguuacca

SEQ ID NO: 237509 - RNA, 19 nt, Artificial Sequence
  Description of Artificial Sequence: Synthetic oligonucleotide
gaccacgggcaaucaaugg

SEQ ID NO: 237510 - RNA, 19 nt, Artificial Sequence
  Description of Artificial Sequence: Synthetic oligonucleotide
aguuagucuguacucuuaa

SEQ ID NO: 237511 - RNA, 19 nt, Artificial Sequence
  Description of Artificial Sequence: Synthetic oligonucleotide
uguguguucagggguacca

SEQ ID NO: 237512 - RNA, 19 nt, Artificial Sequence
  Description of Artificial Sequence: Synthetic oligonucleotide
uucagccgugcaaaugagc

SEQ ID NO: 237513 - RNA, 19 nt, Artificial Sequence
  Description of Artificial Sequence: Synthetic oligonucleotide
gugacucuacuccacugag

SEQ ID NO: 237514 - RNA, 19 nt, Artificial Sequence
  Description of Artificial Sequence: Synthetic oligonucleotide
agaugacuaucugacagcu

SEQ ID NO: 237515 - RNA, 19 nt, Artificial Sequence
  Description of Artificial Sequence: Synthetic oligonucleotide
gugaaaaccccaccgagaa

SEQ ID NO: 237516 - RNA, 19 nt, Artificial Sequence
  Description of Artificial Sequence: Synthetic oligonucleotide
uguucagccuaugccaucu

SEQ ID NO: 237517 - RNA, 19 nt, Artificial Sequence
  Description of Artificial Sequence: Synthetic oligonucleotide
gcgguguuacuauaaaacc

SEQ ID NO: 237518 - RNA, 19 nt, Artificial Sequence
  Description of Artificial Sequence: Synthetic oligonucleotide
uggcauuccuacaaaugau

SEQ ID NO: 237519 - RNA, 19 nt, Artificial Sequence
  Description of Artificial Sequence: Synthetic oligonucleotide
uacaauacaugagcagacu

SEQ ID NO: 237520 - RNA, 19 nt, Artificial Sequence
  Description of Artificial Sequence: Synthetic oligonucleotide
aguggaguagauagaccac

SEQ ID NO: 237521 - RNA, 19 nt, Artificial Sequence
  Description of Artificial Sequence: Synthetic oligonucleotide
uggacauauuuccggguuc

SEQ ID NO: 237522 - RNA, 19 nt, Artificial Sequence
  Description of Artificial Sequence: Synthetic oligonucleotide
ccaugcaauagucaguuug

SEQ ID NO: 237523 - RNA, 19 nt, Artificial Sequence
  Description of Artificial Sequence: Synthetic oligonucleotide
ggaggugaccagcaaacag

SEQ ID NO: 237524 - RNA, 19 nt, Artificial Sequence
  Description of Artificial Sequence: Synthetic oligonucleotide
uuagagcuaguguguuacc

SEQ ID NO: 237525 - RNA, 19 nt, Artificial Sequence
  Description of Artificial Sequence: Synthetic oligonucleotide
uguucagggguaccagccu

SEQ ID NO: 237526 - RNA, 19 nt, Artificial Sequence
  Description of Artificial Sequence: Synthetic oligonucleotide
ggaggguaugaugaguugg

SEQ ID NO: 237527 - RNA, 19 nt, Artificial Sequence
  Description of Artificial Sequence: Synthetic oligonucleotide
guacgguaugacugcaacc

SEQ ID NO: 237528 - RNA, 19 nt, Artificial Sequence
  Description of Artificial Sequence: Synthetic oligonucleotide
ggaccuugugaucugccgg

SEQ ID NO: 237529 - RNA, 19 nt, Artificial Sequence
  Description of Artificial Sequence: Synthetic oligonucleotide
cacgucaacucccagacaa

SEQ ID NO: 237530 - RNA, 19 nt, Artificial Sequence
  Description of Artificial Sequence: Synthetic oligonucleotide
cauggguagcaccaccuug

SEQ ID NO: 237531 - RNA, 19 nt, Artificial Sequence
  Description of Artificial Sequence: Synthetic oligonucleotide
gcuaucggcauccaguuga

SEQ ID NO: 237532 - RNA, 19 nt, Artificial Sequence
  Description of Artificial Sequence: Synthetic oligonucleotide
cuugucggaggacuggauc

SEQ ID NO: 237533 - RNA, 19 nt, Artificial Sequence
  Description of Artificial Sequence: Synthetic oligonucleotide
cgguguuacuauaaaaccg

SEQ ID NO: 237534 - RNA, 19 nt, Artificial Sequence
  Description of Artificial Sequence: Synthetic oligonucleotide
cacaagagagaccucucuc

SEQ ID NO: 237535 - RNA, 19 nt, Artificial Sequence
  Description of Artificial Sequence: Synthetic oligonucleotide
ucaguuagucuguacucuu

SEQ ID NO: 237536 - RNA, 19 nt, Artificial Sequence
  Description of Artificial Sequence: Synthetic oligonucleotide
uggucgucuugacugggga

SEQ ID NO: 237537 - RNA, 19 nt, Artificial Sequence
  Description of Artificial Sequence: Synthetic oligonucleotide
uccagcuaucggcauccag

SEQ ID NO: 237538 - RNA, 19 nt, Artificial Sequence
  Description of Artificial Sequence: Synthetic oligonucleotide
uugaacagucggacaucag

SEQ ID NO: 237539 - RNA, 19 nt, Artificial Sequence
  Description of Artificial Sequence: Synthetic oligonucleotide
acagucggacaucaggcaa

SEQ ID NO: 237540 - RNA, 19 nt, Artificial Sequence
  Description of Artificial Sequence: Synthetic oligonucleotide
cccuaaagugcacucacgg

SEQ ID NO: 237541 - RNA, 19 nt, Artificial Sequence
  Description of Artificial Sequence: Synthetic oligonucleotide
gcuacaauacaugagcaga

SEQ ID NO: 237542 - RNA, 19 nt, Artificial Sequence
  Description of Artificial Sequence: Synthetic oligonucleotide
acuugaacagucggacauc

SEQ ID NO: 237543 - RNA, 19 nt, Artificial Sequence
  Description of Artificial Sequence: Synthetic oligonucleotide
ggaguagauagaccacggg

SEQ ID NO: 237544 - RNA, 19 nt, Artificial Sequence
  Description of Artificial Sequence: Synthetic oligonucleotide
uccucgccuccuuaggagc

SEQ ID NO: 237545 - RNA, 19 nt, Artificial Sequence
  Description of Artificial Sequence: Synthetic oligonucleotide
caaucccuaaagugcacuc

SEQ ID NO: 237546 - RNA, 19 nt, Artificial Sequence
  Description of Artificial Sequence: Synthetic oligonucleotide
uccuuaggagcauguggca

SEQ ID NO: 237547 - RNA, 19 nt, Artificial Sequence
  Description of Artificial Sequence: Synthetic oligonucleotide
cucauaaguauagggcuuc

SEQ ID NO: 237548 - RNA, 19 nt, Artificial Sequence
  Description of Artificial Sequence: Synthetic oligonucleotide
gguacgguaugacugcaac

SEQ ID NO: 237549 - RNA, 19 nt, Artificial Sequence
  Description of Artificial Sequence: Synthetic oligonucleotide
ugcuaaugacaguggagua

SEQ ID NO: 237550 - RNA, 19 nt, Artificial Sequence
  Description of Artificial Sequence: Synthetic oligonucleotide
caauggacaccuugugauc

SEQ ID NO: 237551 - RNA, 19 nt, Artificial Sequence
  Description of Artificial Sequence: Synthetic oligonucleotide
agccgugcaaaugagcgca

SEQ ID NO: 237552 - RNA, 19 nt, Artificial Sequence
  Description of Artificial Sequence: Synthetic oligonucleotide
agugcauaugauauucaau

SEQ ID NO: 237553 - RNA, 19 nt, Artificial Sequence
  Description of Artificial Sequence: Synthetic oligonucleotide
accguaacuagggaaucug

SEQ ID NO: 237554 - RNA, 19 nt, Artificial Sequence
  Description of Artificial Sequence: Synthetic oligonucleotide
aggugacucuacuccacug

SEQ ID NO: 237555 - RNA, 19 nt, Artificial Sequence
  Description of Artificial Sequence: Synthetic oligonucleotide
cuaucggcauccaguugag

SEQ ID NO: 237556 - RNA, 19 nt, Artificial Sequence
  Description of Artificial Sequence: Synthetic oligonucleotide
acguggucgucuugacugg

SEQ ID NO: 237557 - RNA, 19 nt, Artificial Sequence
  Description of Artificial Sequence: Synthetic oligonucleotide
guguucagggguaccagcc

SEQ ID NO: 237558 - RNA, 19 nt, Artificial Sequence
  Description of Artificial Sequence: Synthetic oligonucleotide
ugauacucgugaccuuguc

SEQ ID NO: 237559 - RNA, 19 nt, Artificial Sequence
  Description of Artificial Sequence: Synthetic oligonucleotide
acaaucccuaaagugcacu

SEQ ID NO: 237560 - RNA, 19 nt, Artificial Sequence
  Description of Artificial Sequence: Synthetic oligonucleotide
aggacguggucgucuugac

SEQ ID NO: 237561 - RNA, 19 nt, Artificial Sequence
  Description of Artificial Sequence: Synthetic oligonucleotide
ccgugugauagauaccucc

SEQ ID NO: 237562 - RNA, 19 nt, Artificial Sequence
  Description of Artificial Sequence: Synthetic oligonucleotide
gcauuccuacaaaugaugc

SEQ ID NO: 237563 - RNA, 19 nt, Artificial Sequence
  Description of Artificial Sequence: Synthetic oligonucleotide
ucauaaguauagggcuuca

SEQ ID NO: 237564 - RNA, 19 nt, Artificial Sequence
  Description of Artificial Sequence: Synthetic oligonucleotide
cgagccgugugauagauac

SEQ ID NO: 237565 - RNA, 19 nt, Artificial Sequence
  Description of Artificial Sequence: Synthetic oligonucleotide
cuccucgccuccuuaggag

SEQ ID NO: 237566 - RNA, 19 nt, Artificial Sequence
  Description of Artificial Sequence: Synthetic oligonucleotide
gggacaggcaucuggcugc

SEQ ID NO: 237567 - RNA, 19 nt, Artificial Sequence
  Description of Artificial Sequence: Synthetic oligonucleotide
ggagguacuugaacagucg

SEQ ID NO: 237568 - RNA, 19 nt, Artificial Sequence
  Description of Artificial Sequence: Synthetic oligonucleotide
ccuaaagugcacucacggc

SEQ ID NO: 237569 - RNA, 19 nt, Artificial Sequence
  Description of Artificial Sequence: Synthetic oligonucleotide
gaggucagcgagccgugug

SEQ ID NO: 237570 - RNA, 19 nt, Artificial Sequence
  Description of Artificial Sequence: Synthetic oligonucleotide
ucuauccagcuaucggcau

SEQ ID NO: 237571 - RNA, 19 nt, Artificial Sequence
  Description of Artificial Sequence: Synthetic oligonucleotide
aaguggacguugauagcga

SEQ ID NO: 237572 - RNA, 19 nt, Artificial Sequence
  Description of Artificial Sequence: Synthetic oligonucleotide
ggcauuccuacaaaugaug

SEQ ID NO: 237573 - RNA, 19 nt, Artificial Sequence
  Description of Artificial Sequence: Synthetic oligonucleotide
cuauccagcuaucggcauc

SEQ ID NO: 237574 - RNA, 19 nt, Artificial Sequence
  Description of Artificial Sequence: Synthetic oligonucleotide
gaacacggacugcuugcug

SEQ ID NO: 237575 - RNA, 19 nt, Artificial Sequence
  Description of Artificial Sequence: Synthetic oligonucleotide
cagcuacaauacaugagca

SEQ ID NO: 237576 - RNA, 19 nt, Artificial Sequence
  Description of Artificial Sequence: Synthetic oligonucleotide
aggucagcgagccguguga

SEQ ID NO: 237577 - RNA, 19 nt, Artificial Sequence
  Description of Artificial Sequence: Synthetic oligonucleotide
caugguaugcaggugcaga

SEQ ID NO: 237578 - RNA, 19 nt, Artificial Sequence
  Description of Artificial Sequence: Synthetic oligonucleotide
accuugugaucugccgggc

SEQ ID NO: 237579 - RNA, 19 nt, Artificial Sequence
  Description of Artificial Sequence: Synthetic oligonucleotide
auaccuccaaggagcagag

SEQ ID NO: 237580 - RNA, 19 nt, Artificial Sequence
  Description of Artificial Sequence: Synthetic oligonucleotide
aguggacguugauagcgau

SEQ ID NO: 237581 - RNA, 19 nt, Artificial Sequence
  Description of Artificial Sequence: Synthetic oligonucleotide
cacaaucccuaaagugcac

SEQ ID NO: 237582 - RNA, 19 nt, Artificial Sequence
  Description of Artificial Sequence: Synthetic oligonucleotide
acguugauagcgaucuggu

SEQ ID NO: 237583 - RNA, 19 nt, Artificial Sequence
  Description of Artificial Sequence: Synthetic oligonucleotide
acgguaugacugcaaccca

SEQ ID NO: 237584 - RNA, 19 nt, Artificial Sequence
  Description of Artificial Sequence: Synthetic oligonucleotide
auagaccacgggcaaucaa

SEQ ID NO: 237585 - RNA, 19 nt, Artificial Sequence
  Description of Artificial Sequence: Synthetic oligonucleotide
acucacggccacucgggcu

SEQ ID NO: 237586 - RNA, 19 nt, Artificial Sequence
  Description of Artificial Sequence: Synthetic oligonucleotide
agaccacgggcaaucaaug

SEQ ID NO: 237587 - RNA, 19 nt, Artificial Sequence
  Description of Artificial Sequence: Synthetic oligonucleotide
ucgugaccuugucggagga

SEQ ID NO: 237588 - RNA, 19 nt, Artificial Sequence
  Description of Artificial Sequence: Synthetic oligonucleotide
ccuccuuuaugacugacca

SEQ ID NO: 237589 - RNA, 19 nt, Artificial Sequence
  Description of Artificial Sequence: Synthetic oligonucleotide
uuugugcucgcugcuggaa

SEQ ID NO: 237590 - RNA, 19 nt, Artificial Sequence
  Description of Artificial Sequence: Synthetic oligonucleotide
  modified_base (9)..(9): a, c, u, g, unknown or other
aguuaucanaggggcuucu

SEQ ID NO: 237591 - RNA, 19 nt, Artificial Sequence
  Description of Artificial Sequence: Synthetic oligonucleotide
augagcgcauggguagcac

SEQ ID NO: 237592 - RNA, 19 nt, Artificial Sequence
  Description of Artificial Sequence: Synthetic oligonucleotide
agcuaucggcauccaguug

SEQ ID NO: 237593 - RNA, 19 nt, Artificial Sequence
  Description of Artificial Sequence: Synthetic oligonucleotide
  modified_base (8)..(8): a, c, u, g, unknown or other
guuaucanaggggcuucuc

SEQ ID NO: 237594 - RNA, 19 nt, Artificial Sequence
  Description of Artificial Sequence: Synthetic oligonucleotide
  modified_base (12)..(12): a, c, u, g, unknown or other
aggaguuaucanaggggcu

SEQ ID NO: 237595 - RNA, 19 nt, Artificial Sequence
  Description of Artificial Sequence: Synthetic oligonucleotide
ugguacgguaugacugcaa

SEQ ID NO: 237596 - RNA, 19 nt, Artificial Sequence
  Description of Artificial Sequence: Synthetic oligonucleotide
acggacugcuugcugugga

SEQ ID NO: 237597 - RNA, 19 nt, Artificial Sequence
  Description of Artificial Sequence: Synthetic oligonucleotide
ccguaacuagggaaucugg

SEQ ID NO: 237598 - RNA, 19 nt, Artificial Sequence
  Description of Artificial Sequence: Synthetic oligonucleotide
agcguugggagggucaaaa

SEQ ID NO: 237599 - RNA, 19 nt, Artificial Sequence
  Description of Artificial Sequence: Synthetic oligonucleotide
uugguacgguaugacugca

SEQ ID NO: 237600 - RNA, 19 nt, Artificial Sequence
  Description of Artificial Sequence: Synthetic oligonucleotide
cgugcaaaugagcgcaugg

SEQ ID NO: 237601 - RNA, 19 nt, Artificial Sequence
  Description of Artificial Sequence: Synthetic oligonucleotide
agucaggacaccacccgca

SEQ ID NO: 237602 - RNA, 19 nt, Artificial Sequence
  Description of Artificial Sequence: Synthetic oligonucleotide
cuucaaggagacggucagc

SEQ ID NO: 237603 - RNA, 19 nt, Artificial Sequence
  Description of Artificial Sequence: Synthetic oligonucleotide
acgauuccauuggaagucu

SEQ ID NO: 237604 - RNA, 19 nt, Artificial Sequence
  Description of Artificial Sequence: Synthetic oligonucleotide
cuucccgcauacagcccag

SEQ ID NO: 237605 - RNA, 19 nt, Artificial Sequence
  Description of Artificial Sequence: Synthetic oligonucleotide
aggugacgauuccauugga

SEQ ID NO: 237606 - RNA, 19 nt, Artificial Sequence
  Description of Artificial Sequence: Synthetic oligonucleotide
cagcauguauuuacaagcu

SEQ ID NO: 237607 - RNA, 19 nt, Artificial Sequence
  Description of Artificial Sequence: Synthetic oligonucleotide
ugagugugugcugccucga

SEQ ID NO: 237608 - RNA, 19 nt, Artificial Sequence
  Description of Artificial Sequence: Synthetic oligonucleotide
guggucgucuugacugggg

SEQ ID NO: 237609 - RNA, 19 nt, Artificial Sequence
  Description of Artificial Sequence: Synthetic oligonucleotide
cucuucccgcauacagccc

SEQ ID NO: 237610 - RNA, 19 nt, Artificial Sequence
  Description of Artificial Sequence: Synthetic oligonucleotide
ugucuuccgguaguuguuu

SEQ ID NO: 237611 - RNA, 19 nt, Artificial Sequence
  Description of Artificial Sequence: Synthetic oligonucleotide
caagcgguguuacuauaaa

SEQ ID NO: 237612 - RNA, 19 nt, Artificial Sequence
  Description of Artificial Sequence: Synthetic oligonucleotide
ugaacccguugguacggua

SEQ ID NO: 237613 - RNA, 19 nt, Artificial Sequence
  Description of Artificial Sequence: Synthetic oligonucleotide
gggaaucuggaguguagga

SEQ ID NO: 237614 - RNA, 19 nt, Artificial Sequence
  Description of Artificial Sequence: Synthetic oligonucleotide
gagcccguccuacaguacu

SEQ ID NO: 237615 - RNA, 19 nt, Artificial Sequence
  Description of Artificial Sequence: Synthetic oligonucleotide
cacucacggccacucgggc

SEQ ID NO: 237616 - RNA, 19 nt, Artificial Sequence
  Description of Artificial Sequence: Synthetic oligonucleotide
agcccguccuacaguacuc

SEQ ID NO: 237617 - RNA, 19 nt, Artificial Sequence
  Description of Artificial Sequence: Synthetic oligonucleotide
aucugccgggcaucccaag

SEQ ID NO: 237618 - RNA, 19 nt, Artificial Sequence
  Description of Artificial Sequence: Synthetic oligonucleotide
gucggaggacuggauccgg

SEQ ID NO: 237619 - RNA, 19 nt, Artificial Sequence
  Description of Artificial Sequence: Synthetic oligonucleotide
caguggaucagcagaggcu

SEQ ID NO: 237620 - RNA, 19 nt, Artificial Sequence
  Description of Artificial Sequence: Synthetic oligonucleotide
cuuggacauauuuccgggu

SEQ ID NO: 237621 - RNA, 19 nt, Artificial Sequence
  Description of Artificial Sequence: Synthetic oligonucleotide
ccguccuacaguacucagc

SEQ ID NO: 237622 - RNA, 19 nt, Artificial Sequence
  Description of Artificial Sequence: Synthetic oligonucleotide
cguacauaagcuuggugga

SEQ ID NO: 237623 - RNA, 19 nt, Artificial Sequence
  Description of Artificial Sequence: Synthetic oligonucleotide
gagccgugugauagauacc

SEQ ID NO: 237624 - RNA, 19 nt, Artificial Sequence
  Description of Artificial Sequence: Synthetic oligonucleotide
caguuagucuguacucuua

SEQ ID NO: 237625 - RNA, 19 nt, Artificial Sequence
  Description of Artificial Sequence: Synthetic oligonucleotide
cuacaguacucagccccug

SEQ ID NO: 237626 - RNA, 19 nt, Artificial Sequence
  Description of Artificial Sequence: Synthetic oligonucleotide
cauaaguauagggcuucaa

SEQ ID NO: 237627 - RNA, 19 nt, Artificial Sequence
  Description of Artificial Sequence: Synthetic oligonucleotide
  modified_base (11)..(11): a, c, u, g, unknown or other
ggaguuaucanaggggcuu

SEQ ID NO: 237628 - RNA, 19 nt, Artificial Sequence
  Description of Artificial Sequence: Synthetic oligonucleotide
gcacucacggccacucggg

SEQ ID NO: 237629 - RNA, 19 nt, Artificial Sequence
  Description of Artificial Sequence: Synthetic oligonucleotide
cguaacuagggaaucugga

SEQ ID NO: 237630 - RNA, 19 nt, Artificial Sequence
  Description of Artificial Sequence: Synthetic oligonucleotide
agcgagccgugugauagau

SEQ ID NO: 237631 - RNA, 19 nt, Artificial Sequence
  Description of Artificial Sequence: Synthetic oligonucleotide
ccgagaacuggcagugcag

SEQ ID NO: 237632 - RNA, 19 nt, Artificial Sequence
  Description of Artificial Sequence: Synthetic oligonucleotide
guggacguugauagcgauc

SEQ ID NO: 237633 - RNA, 19 nt, Artificial Sequence
  Description of Artificial Sequence: Synthetic oligonucleotide
guguuacuauaaaaccgua

SEQ ID NO: 237634 - RNA, 19 nt, Artificial Sequence
  Description of Artificial Sequence: Synthetic oligonucleotide
cagguggaccuugugaucu

SEQ ID NO: 237635 - RNA, 19 nt, Artificial Sequence
  Description of Artificial Sequence: Synthetic oligonucleotide
ccagcuaucggcauccagu

SEQ ID NO: 237636 - RNA, 19 nt, Artificial Sequence
  Description of Artificial Sequence: Synthetic oligonucleotide
caacuucguacauaagcuu

SEQ ID NO: 237637 - RNA, 19 nt, Artificial Sequence
  Description of Artificial Sequence: Synthetic oligonucleotide
gaacccguugguacgguau

SEQ ID NO: 237638 - RNA, 19 nt, Artificial Sequence
  Description of Artificial Sequence: Synthetic oligonucleotide
acccguugguacgguauga

SEQ ID NO: 237639 - RNA, 19 nt, Artificial Sequence
  Description of Artificial Sequence: Synthetic oligonucleotide
accaugcaauagucaguuu

SEQ ID NO: 237640 - RNA, 19 nt, Artificial Sequence
  Description of Artificial Sequence: Synthetic oligonucleotide
cccugaguccuccuuuaug

SEQ ID NO: 237641 - RNA, 19 nt, Artificial Sequence
  Description of Artificial Sequence: Synthetic oligonucleotide
ugauagcgaucugguccac

SEQ ID NO: 237642 - RNA, 19 nt, Artificial Sequence
  Description of Artificial Sequence: Synthetic oligonucleotide
guucagccuaugccaucuc

SEQ ID NO: 237643 - RNA, 19 nt, Artificial Sequence
  Description of Artificial Sequence: Synthetic oligonucleotide
ccauuggaagucuugugcu

SEQ ID NO: 237644 - RNA, 19 nt, Artificial Sequence
  Description of Artificial Sequence: Synthetic oligonucleotide
cgggcaaucaauggacacc

SEQ ID NO: 237645 - RNA, 19 nt, Artificial Sequence
  Description of Artificial Sequence: Synthetic oligonucleotide
caucuccgacaaguccaag

SEQ ID NO: 237646 - RNA, 19 nt, Artificial Sequence
  Description of Artificial Sequence: Synthetic oligonucleotide
augaacccguugguacggu

SEQ ID NO: 237647 - RNA, 19 nt, Artificial Sequence
  Description of Artificial Sequence: Synthetic oligonucleotide
ccaagcgguguuacuauaa

SEQ ID NO: 237648 - RNA, 19 nt, Artificial Sequence
  Description of Artificial Sequence: Synthetic oligonucleotide
gaucugccgggcaucccaa

SEQ ID NO: 237649 - RNA, 19 nt, Artificial Sequence
  Description of Artificial Sequence: Synthetic oligonucleotide
ggacguugauagcgaucug

SEQ ID NO: 237650 - RNA, 19 nt, Artificial Sequence
  Description of Artificial Sequence: Synthetic oligonucleotide
cagcuaucggcauccaguu

SEQ ID NO: 237651 - RNA, 19 nt, Artificial Sequence
  Description of Artificial Sequence: Synthetic oligonucleotide
cccguccuacaguacucag

SEQ ID NO: 237652 - RNA, 19 nt, Artificial Sequence
  Description of Artificial Sequence: Synthetic oligonucleotide
cuucguacauaagcuuggu

SEQ ID NO: 237653 - RNA, 19 nt, Artificial Sequence
  Description of Artificial Sequence: Synthetic oligonucleotide
gacugauacucgugaccuu

SEQ ID NO: 237654 - RNA, 19 nt, Artificial Sequence
  Description of Artificial Sequence: Synthetic oligonucleotide
gucagcgagccgugugaua

SEQ ID NO: 237655 - RNA, 19 nt, Artificial Sequence
  Description of Artificial Sequence: Synthetic oligonucleotide
cccguugguacgguaugac

SEQ ID NO: 237656 - RNA, 19 nt, Artificial Sequence
  Description of Artificial Sequence: Synthetic oligonucleotide
guguuaccacagaccacaa

SEQ ID NO: 237657 - RNA, 19 nt, Artificial Sequence
  Description of Artificial Sequence: Synthetic oligonucleotide
cagcgagccgugugauaga

SEQ ID NO: 237658 - RNA, 19 nt, Artificial Sequence
  Description of Artificial Sequence: Synthetic oligonucleotide
ccccaccgagaacuggcag

SEQ ID NO: 237659 - RNA, 19 nt, Artificial Sequence
  Description of Artificial Sequence: Synthetic oligonucleotide
gugcagagggaagacugau

SEQ ID NO: 237660 - RNA, 19 nt, Artificial Sequence
  Description of Artificial Sequence: Synthetic oligonucleotide
ggacguggucgucuugacu

SEQ ID NO: 237661 - RNA, 19 nt, Artificial Sequence
  Description of Artificial Sequence: Synthetic oligonucleotide
ccgggcaucccaaggcaca

SEQ ID NO: 237662 - RNA, 19 nt, Artificial Sequence
  Description of Artificial Sequence: Synthetic oligonucleotide
ccuacaguacucagccccu

SEQ ID NO: 237663 - RNA, 19 nt, Artificial Sequence
  Description of Artificial Sequence: Synthetic oligonucleotide
cguggucgucuugacuggg

SEQ ID NO: 237664 - RNA, 19 nt, Artificial Sequence
  Description of Artificial Sequence: Synthetic oligonucleotide
ccgugcaaaugagcgcaug

SEQ ID NO: 237665 - RNA, 19 nt, Artificial Sequence
  Description of Artificial Sequence: Synthetic oligonucleotide
gccgugugauagauaccuc

SEQ ID NO: 237666 - RNA, 19 nt, Artificial Sequence
  Description of Artificial Sequence: Synthetic oligonucleotide
gcccguccuacaguacuca

SEQ ID NO: 237667 - RNA, 19 nt, Artificial Sequence
  Description of Artificial Sequence: Synthetic oligonucleotide
ccguugguacgguaugacu

SEQ ID NO: 237668 - RNA, 19 nt, Artificial Sequence
  Description of Artificial Sequence: Synthetic oligonucleotide
cccgcauggaccacagcgu

SEQ ID NO: 237669 - RNA, 19 nt, Artificial Sequence
  Description of Artificial Sequence: Synthetic oligonucleotide
gcuuguccacugauaggcu

SEQ ID NO: 237670 - RNA, 19 nt, Artificial Sequence
  Description of Artificial Sequence: Synthetic oligonucleotide
cccaagcgguguuacuaua

SEQ ID NO: 237671 - RNA, 19 nt, Artificial Sequence
  Description of Artificial Sequence: Synthetic oligonucleotide
gcuucuacagguggaccuu

SEQ ID NO: 237672 - RNA, 19 nt, Artificial Sequence
  Description of Artificial Sequence: Synthetic oligonucleotide
caccacccgcauggaccac

SEQ ID NO: 237673 - RNA, 19 nt, Artificial Sequence
  Description of Artificial Sequence: Synthetic oligonucleotide
ggucagcgagccgugugau

SEQ ID NO: 237674 - RNA, 19 nt, Artificial Sequence
  Description of Artificial Sequence: Synthetic oligonucleotide
cagcguugggagggucaaa

SEQ ID NO: 237675 - RNA, 19 nt, Artificial Sequence
  Description of Artificial Sequence: Synthetic oligonucleotide
ccuugucggaggacuggau

SEQ ID NO: 237676 - RNA, 19 nt, Artificial Sequence
  Description of Artificial Sequence: Synthetic oligonucleotide
gcgagccgugugauagaua

SEQ ID NO: 237677 - RNA, 19 nt, Artificial Sequence
  Description of Artificial Sequence: Synthetic oligonucleotide
gccgugcaaaugagcgcau

SEQ ID NO: 237678 - RNA, 19 nt, Artificial Sequence
  Description of Artificial Sequence: Synthetic oligonucleotide
aaauaugucagugucauag

SEQ ID NO: 237679 - RNA, 19 nt, Artificial Sequence
  Description of Artificial Sequence: Synthetic oligonucleotide
ucucuaaugauaaagcaag

SEQ ID NO: 237680 - RNA, 19 nt, Artificial Sequence
  Description of Artificial Sequence: Synthetic oligonucleotide
uaaugauaaagcaagguga

SEQ ID NO: 237681 - RNA, 19 nt, Artificial Sequence
  Description of Artificial Sequence: Synthetic oligonucleotide
uuagugagaacccagggcc

SEQ ID NO: 237682 - RNA, 19 nt, Artificial Sequence
  Description of Artificial Sequence: Synthetic oligonucleotide
gauucauaggaucugaccc

SEQ ID NO: 237683 - RNA, 19 nt, Artificial Sequence
  Description of Artificial Sequence: Synthetic oligonucleotide
agcauacucaauccgagcc

SEQ ID NO: 237684 - RNA, 19 nt, Artificial Sequence
  Description of Artificial Sequence: Synthetic oligonucleotide
aauuggccgaccccgagcc

SEQ ID NO: 237685 - RNA, 19 nt, Artificial Sequence
  Description of Artificial Sequence: Synthetic oligonucleotide
aacauagcggccucggugg

SEQ ID NO: 237686 - RNA, 19 nt, Artificial Sequence
  Description of Artificial Sequence: Synthetic oligonucleotide
guuuuagaggcucaggagg

SEQ ID NO: 237687 - RNA, 19 nt, Artificial Sequence
  Description of Artificial Sequence: Synthetic oligonucleotide
aacgucaugucucuaauga

SEQ ID NO: 237688 - RNA, 19 nt, Artificial Sequence
  Description of Artificial Sequence: Synthetic oligonucleotide
uuuuagaggcucaggaggg

SEQ ID NO: 237689 - RNA, 19 nt, Artificial Sequence
  Description of Artificial Sequence: Synthetic oligonucleotide
ucuaacuccaguuauaauu

SEQ ID NO: 237690 - RNA, 19 nt, Artificial Sequence
  Description of Artificial Sequence: Synthetic oligonucleotide
aaugauaaagcaaggugag

SEQ ID NO: 237691 - RNA, 19 nt, Artificial Sequence
  Description of Artificial Sequence: Synthetic oligonucleotide
uagcucaacauaauacugg

SEQ ID NO: 237692 - RNA, 19 nt, Artificial Sequence
  Description of Artificial Sequence: Synthetic oligonucleotide
uuaagcauacucaauccga

SEQ ID NO: 237693 - RNA, 19 nt, Artificial Sequence
  Description of Artificial Sequence: Synthetic oligonucleotide
ugucuuacuucuaugucag

SEQ ID NO: 237694 - RNA, 19 nt, Artificial Sequence
  Description of Artificial Sequence: Synthetic oligonucleotide
aacgguggcauuuggaaug

SEQ ID NO: 237695 - RNA, 19 nt, Artificial Sequence
  Description of Artificial Sequence: Synthetic oligonucleotide
aaugggcuaaggcuacagc

SEQ ID NO: 237696 - RNA, 19 nt, Artificial Sequence
  Description of Artificial Sequence: Synthetic oligonucleotide
aauguguuacccaaugaag

SEQ ID NO: 237697 - RNA, 19 nt, Artificial Sequence
  Description of Artificial Sequence: Synthetic oligonucleotide
uuagacgaaauguaguccu

SEQ ID NO: 237698 - RNA, 19 nt, Artificial Sequence
  Description of Artificial Sequence: Synthetic oligonucleotide
aagcauacucaauccgagc

SEQ ID NO: 237699 - RNA, 19 nt, Artificial Sequence
  Description of Artificial Sequence: Synthetic oligonucleotide
gagcuuuccgaauacaggc

SEQ ID NO: 237700 - RNA, 19 nt, Artificial Sequence
  Description of Artificial Sequence: Synthetic oligonucleotide
ucuuccgcucagaagacgg

SEQ ID NO: 237701 - RNA, 19 nt, Artificial Sequence
  Description of Artificial Sequence: Synthetic oligonucleotide
aucccuauucaccauaaag

SEQ ID NO: 237702 - RNA, 19 nt, Artificial Sequence
  Description of Artificial Sequence: Synthetic oligonucleotide
cuagugaccccuuagugag

SEQ ID NO: 237703 - RNA, 19 nt, Artificial Sequence
  Description of Artificial Sequence: Synthetic oligonucleotide
uuaagugagacauuuugua

SEQ ID NO: 237704 - RNA, 19 nt, Artificial Sequence
  Description of Artificial Sequence: Synthetic oligonucleotide
agaaauguuuuagaggcuc

SEQ ID NO: 237705 - RNA, 19 nt, Artificial Sequence
  Description of Artificial Sequence: Synthetic oligonucleotide
aaggcccuuaagcauacuc

SEQ ID NO: 237706 - RNA, 19 nt, Artificial Sequence
  Description of Artificial Sequence: Synthetic oligonucleotide
auaauacuggauuucacaa

SEQ ID NO: 237707 - RNA, 19 nt, Artificial Sequence
  Description of Artificial Sequence: Synthetic oligonucleotide
agagguuuguuccagauua

SEQ ID NO: 237708 - RNA, 19 nt, Artificial Sequence
  Description of Artificial Sequence: Synthetic oligonucleotide
cuaacuccaguuauaauuc

SEQ ID NO: 237709 - RNA, 19 nt, Artificial Sequence
  Description of Artificial Sequence: Synthetic oligonucleotide
uaugucaguaaauaaucaa

SEQ ID NO: 237710 - RNA, 19 nt, Artificial Sequence
  Description of Artificial Sequence: Synthetic oligonucleotide
ugaucuuauccaaacugug

SEQ ID NO: 237711 - RNA, 19 nt, Artificial Sequence
  Description of Artificial Sequence: Synthetic oligonucleotide
aggacggauaaccauuugg

SEQ ID NO: 237712 - RNA, 19 nt, Artificial Sequence
  Description of Artificial Sequence: Synthetic oligonucleotide
uccaugaugucacagcccu

SEQ ID NO: 237713 - RNA, 19 nt, Artificial Sequence
  Description of Artificial Sequence: Synthetic oligonucleotide
ucuccuuaucccaaaggcc

SEQ ID NO: 237714 - RNA, 19 nt, Artificial Sequence
  Description of Artificial Sequence: Synthetic oligonucleotide
agaguacuccuagugaccc

SEQ ID NO: 237715 - RNA, 19 nt, Artificial Sequence
  Description of Artificial Sequence: Synthetic oligonucleotide
uaaucccuugaguacauug

SEQ ID NO: 237716 - RNA, 19 nt, Artificial Sequence
  Description of Artificial Sequence: Synthetic oligonucleotide
ucuaaugauaaagcaaggu

SEQ ID NO: 237717 - RNA, 19 nt, Artificial Sequence
  Description of Artificial Sequence: Synthetic oligonucleotide
cucuccuuaucccaaaggc

SEQ ID NO: 237718 - RNA, 19 nt, Artificial Sequence
  Description of Artificial Sequence: Synthetic oligonucleotide
cuuagugagaacccagggc

SEQ ID NO: 237719 - RNA, 19 nt, Artificial Sequence
  Description of Artificial Sequence: Synthetic oligonucleotide
gaguuaguuguuuccuugg

SEQ ID NO: 237720 - RNA, 19 nt, Artificial Sequence
  Description of Artificial Sequence: Synthetic oligonucleotide
gacgacaucucucucaauc

SEQ ID NO: 237721 - RNA, 19 nt, Artificial Sequence
  Description of Artificial Sequence: Synthetic oligonucleotide
cuaccuuuagcccuccagg

SEQ ID NO: 237722 - RNA, 19 nt, Artificial Sequence
  Description of Artificial Sequence: Synthetic oligonucleotide
uuacaauaacugcuuugag

SEQ ID NO: 237723 - RNA, 19 nt, Artificial Sequence
  Description of Artificial Sequence: Synthetic oligonucleotide
uguacuuccacugacgcua

SEQ ID NO: 237724 - RNA, 19 nt, Artificial Sequence
  Description of Artificial Sequence: Synthetic oligonucleotide
ugucuaaagggguuugucu

SEQ ID NO: 237725 - RNA, 19 nt, Artificial Sequence
  Description of Artificial Sequence: Synthetic oligonucleotide
acuugaucccuauucacca

SEQ ID NO: 237726 - RNA, 19 nt, Artificial Sequence
  Description of Artificial Sequence: Synthetic oligonucleotide
uaacaugugacuugucccu

SEQ ID NO: 237727 - RNA, 19 nt, Artificial Sequence
  Description of Artificial Sequence: Synthetic oligonucleotide
gaacauagcggccucggug

SEQ ID NO: 237728 - RNA, 19 nt, Artificial Sequence
  Description of Artificial Sequence: Synthetic oligonucleotide
uguguuacccaaugaagaa

SEQ ID NO: 237729 - RNA, 19 nt, Artificial Sequence
  Description of Artificial Sequence: Synthetic oligonucleotide
aggauauccagagcgcugc

SEQ ID NO: 237730 - RNA, 19 nt, Artificial Sequence
  Description of Artificial Sequence: Synthetic oligonucleotide
uccagauuagcucaacaua

SEQ ID NO: 237731 - RNA, 19 nt, Artificial Sequence
  Description of Artificial Sequence: Synthetic oligonucleotide
aaacgucaugucucuaaug

SEQ ID NO: 237732 - RNA, 19 nt, Artificial Sequence
  Description of Artificial Sequence: Synthetic oligonucleotide
ucccauacgaagacaccgg

SEQ ID NO: 237733 - RNA, 19 nt, Artificial Sequence
  Description of Artificial Sequence: Synthetic oligonucleotide
agcacgggacaccaagacc

SEQ ID NO: 237734 - RNA, 19 nt, Artificial Sequence
  Description of Artificial Sequence: Synthetic oligonucleotide
aggacuguuaccaagagua

SEQ ID NO: 237735 - RNA, 19 nt, Artificial Sequence
  Description of Artificial Sequence: Synthetic oligonucleotide
augggcuaaggcuacagca

SEQ ID NO: 237736 - RNA, 19 nt, Artificial Sequence
  Description of Artificial Sequence: Synthetic oligonucleotide
cucuaaugauaaagcaagg

SEQ ID NO: 237737 - RNA, 19 nt, Artificial Sequence
  Description of Artificial Sequence: Synthetic oligonucleotide
ccaguuauaauucucucgc

SEQ ID NO: 237738 - RNA, 19 nt, Artificial Sequence
  Description of Artificial Sequence: Synthetic oligonucleotide
auucauaggaucugacccu

SEQ ID NO: 237739 - RNA, 19 nt, Artificial Sequence
  Description of Artificial Sequence: Synthetic oligonucleotide
uaccauauugguacaggga

SEQ ID NO: 237740 - RNA, 19 nt, Artificial Sequence
  Description of Artificial Sequence: Synthetic oligonucleotide
acggauaaccauuugggau

SEQ ID NO: 237741 - RNA, 19 nt, Artificial Sequence
  Description of Artificial Sequence: Synthetic oligonucleotide
aaaugacuugugaggacgg

SEQ ID NO: 237742 - RNA, 19 nt, Artificial Sequence
  Description of Artificial Sequence: Synthetic oligonucleotide
agaggcuuagacgaaaugu

SEQ ID NO: 237743 - RNA, 19 nt, Artificial Sequence
  Description of Artificial Sequence: Synthetic oligonucleotide
cacucuuccgcucagaaga

SEQ ID NO: 237744 - RNA, 19 nt, Artificial Sequence
  Description of Artificial Sequence: Synthetic oligonucleotide
uccuagugaccccuuagug

SEQ ID NO: 237745 - RNA, 19 nt, Artificial Sequence
  Description of Artificial Sequence: Synthetic oligonucleotide
gugucauaguauuuugcag

SEQ ID NO: 237746 - RNA, 19 nt, Artificial Sequence
  Description of Artificial Sequence: Synthetic oligonucleotide
cuuagacgaaauguagucc

SEQ ID NO: 237747 - RNA, 19 nt, Artificial Sequence
  Description of Artificial Sequence: Synthetic oligonucleotide
ugaccccuuagugagaacc

SEQ ID NO: 237748 - RNA, 19 nt, Artificial Sequence
  Description of Artificial Sequence: Synthetic oligonucleotide
cucgguacugguaaaggug

SEQ ID NO: 237749 - RNA, 19 nt, Artificial Sequence
  Description of Artificial Sequence: Synthetic oligonucleotide
cuuacuucuaugucagcuc

SEQ ID NO: 237750 - RNA, 19 nt, Artificial Sequence
  Description of Artificial Sequence: Synthetic oligonucleotide
gagggugauucucuccucg

SEQ ID NO: 237751 - RNA, 19 nt, Artificial Sequence
  Description of Artificial Sequence: Synthetic oligonucleotide
ucuaaagggguuugucucu

SEQ ID NO: 237752 - RNA, 19 nt, Artificial Sequence
  Description of Artificial Sequence: Synthetic oligonucleotide
uggauugucacuguauguc

SEQ ID NO: 237753 - RNA, 19 nt, Artificial Sequence
  Description of Artificial Sequence: Synthetic oligonucleotide
ucauccacgcuauaccgac

SEQ ID NO: 237754 - RNA, 19 nt, Artificial Sequence
  Description of Artificial Sequence: Synthetic oligonucleotide
uuaauuggccgaccccgag

SEQ ID NO: 237755 - RNA, 19 nt, Artificial Sequence
  Description of Artificial Sequence: Synthetic oligonucleotide
gagggaguuaguuguuucc

SEQ ID NO: 237756 - RNA, 19 nt, Artificial Sequence
  Description of Artificial Sequence: Synthetic oligonucleotide
aacauugagggaguuaguu

SEQ ID NO: 237757 - RNA, 19 nt, Artificial Sequence
  Description of Artificial Sequence: Synthetic oligonucleotide
cuggcaaaugggcuaaggc

SEQ ID NO: 237758 - RNA, 19 nt, Artificial Sequence
  Description of Artificial Sequence: Synthetic oligonucleotide
ucaauaccacaacaggaua

SEQ ID NO: 237759 - RNA, 19 nt, Artificial Sequence
  Description of Artificial Sequence: Synthetic oligonucleotide
agguuuguuccagauuagc

SEQ ID NO: 237760 - RNA, 19 nt, Artificial Sequence
  Description of Artificial Sequence: Synthetic oligonucleotide
cauacucaauccgagccgg

SEQ ID NO: 237761 - RNA, 19 nt, Artificial Sequence
  Description of Artificial Sequence: Synthetic oligonucleotide
gucccauacgaagacaccg

SEQ ID NO: 237762 - RNA, 19 nt, Artificial Sequence
  Description of Artificial Sequence: Synthetic oligonucleotide
ucgucccauacgaagacac

SEQ ID NO: 237763 - RNA, 19 nt, Artificial Sequence
  Description of Artificial Sequence: Synthetic oligonucleotide
aaaccgcuggaguggagug

SEQ ID NO: 237764 - RNA, 19 nt, Artificial Sequence
  Description of Artificial Sequence: Synthetic oligonucleotide
aaucuggcaugccacugga

SEQ ID NO: 237765 - RNA, 19 nt, Artificial Sequence
  Description of Artificial Sequence: Synthetic oligonucleotide
gucacauaagccauauccc

SEQ ID NO: 237766 - RNA, 19 nt, Artificial Sequence
  Description of Artificial Sequence: Synthetic oligonucleotide
aucugacccugacaaacuc

SEQ ID NO: 237767 - RNA, 19 nt, Artificial Sequence
  Description of Artificial Sequence: Synthetic oligonucleotide
uaauuggccgaccccgagc

SEQ ID NO: 237768 - RNA, 19 nt, Artificial Sequence
  Description of Artificial Sequence: Synthetic oligonucleotide
aguaggacgcagcgcgagc

SEQ ID NO: 237769 - RNA, 19 nt, Artificial Sequence
  Description of Artificial Sequence: Synthetic oligonucleotide
acaaacgucaugucucuaa

SEQ ID NO: 237770 - RNA, 19 nt, Artificial Sequence
  Description of Artificial Sequence: Synthetic oligonucleotide
ucugacccugacaaacucu

SEQ ID NO: 237771 - RNA, 19 nt, Artificial Sequence
  Description of Artificial Sequence: Synthetic oligonucleotide
auguguuacccaaugaaga

SEQ ID NO: 237772 - RNA, 19 nt, Artificial Sequence
  Description of Artificial Sequence: Synthetic oligonucleotide
gaucccuugguacaaacgu

SEQ ID NO: 237773 - RNA, 19 nt, Artificial Sequence
  Description of Artificial Sequence: Synthetic oligonucleotide
uaccuuuagcccuccagga

SEQ ID NO: 237774 - RNA, 19 nt, Artificial Sequence
  Description of Artificial Sequence: Synthetic oligonucleotide
ggauucauaggaucugacc

SEQ ID NO: 237775 - RNA, 19 nt, Artificial Sequence
  Description of Artificial Sequence: Synthetic oligonucleotide
acgacaucucucucaauca

SEQ ID NO: 237776 - RNA, 19 nt, Artificial Sequence
  Description of Artificial Sequence: Synthetic oligonucleotide
gaguggaguggauucugag

SEQ ID NO: 237777 - RNA, 19 nt, Artificial Sequence
  Description of Artificial Sequence: Synthetic oligonucleotide
acugacgcuaucaaaacaa

SEQ ID NO: 237778 - RNA, 19 nt, Artificial Sequence
  Description of Artificial Sequence: Synthetic oligonucleotide
cuuagcucagccaguguuc

SEQ ID NO: 237779 - RNA, 19 nt, Artificial Sequence
  Description of Artificial Sequence: Synthetic oligonucleotide
ugcacaaccaacgguggca

SEQ ID NO: 237780 - RNA, 19 nt, Artificial Sequence
  Description of Artificial Sequence: Synthetic oligonucleotide
gacggauaaccauuuggga

SEQ ID NO: 237781 - RNA, 19 nt, Artificial Sequence
  Description of Artificial Sequence: Synthetic oligonucleotide
aaguacugucuaaaggggu

SEQ ID NO: 237782 - RNA, 19 nt, Artificial Sequence
  Description of Artificial Sequence: Synthetic oligonucleotide
uaucccuaccauauuggua

SEQ ID NO: 237783 - RNA, 19 nt, Artificial Sequence
  Description of Artificial Sequence: Synthetic oligonucleotide
uugugaggacggauaacca

SEQ ID NO: 237784 - RNA, 19 nt, Artificial Sequence
  Description of Artificial Sequence: Synthetic oligonucleotide
cuuuccgaauacaggcggc

SEQ ID NO: 237785 - RNA, 19 nt, Artificial Sequence
  Description of Artificial Sequence: Synthetic oligonucleotide
ugaucccuauucaccauaa

SEQ ID NO: 237786 - RNA, 19 nt, Artificial Sequence
  Description of Artificial Sequence: Synthetic oligonucleotide
uuuccgaauacaggcggcc

SEQ ID NO: 237787 - RNA, 19 nt, Artificial Sequence
  Description of Artificial Sequence: Synthetic oligonucleotide
cacgcuauaccgacgaaca

SEQ ID NO: 237788 - RNA, 19 nt, Artificial Sequence
  Description of Artificial Sequence: Synthetic oligonucleotide
gcuuuccgaauacaggcgg

SEQ ID NO: 237789 - RNA, 19 nt, Artificial Sequence
  Description of Artificial Sequence: Synthetic oligonucleotide
acgaagacaccggcgagcg

SEQ ID NO: 237790 - RNA, 19 nt, Artificial Sequence
  Description of Artificial Sequence: Synthetic oligonucleotide
uggugcaaccaccauccac

SEQ ID NO: 237791 - RNA, 19 nt, Artificial Sequence
  Description of Artificial Sequence: Synthetic oligonucleotide
augacgacuccaugauguc

SEQ ID NO: 237792 - RNA, 19 nt, Artificial Sequence
  Description of Artificial Sequence: Synthetic oligonucleotide
gcuuagacgaaauguaguc

SEQ ID NO: 237793 - RNA, 19 nt, Artificial Sequence
  Description of Artificial Sequence: Synthetic oligonucleotide
auacgaagacaccggcgag

SEQ ID NO: 237794 - RNA, 19 nt, Artificial Sequence
  Description of Artificial Sequence: Synthetic oligonucleotide
agcaaggaagcuucuugga

SEQ ID NO: 237795 - RNA, 19 nt, Artificial Sequence
  Description of Artificial Sequence: Synthetic oligonucleotide
guacugguaaaggugggug

SEQ ID NO: 237796 - RNA, 19 nt, Artificial Sequence
  Description of Artificial Sequence: Synthetic oligonucleotide
auccacgcuauaccgacga

SEQ ID NO: 237797 - RNA, 19 nt, Artificial Sequence
  Description of Artificial Sequence: Synthetic oligonucleotide
cauaggaucugacccugac

SEQ ID NO: 237798 - RNA, 19 nt, Artificial Sequence
  Description of Artificial Sequence: Synthetic oligonucleotide
acugauuggccagcacggc

SEQ ID NO: 237799 - RNA, 19 nt, Artificial Sequence
  Description of Artificial Sequence: Synthetic oligonucleotide
aagccauaucccuaccaua

SEQ ID NO: 237800 - RNA, 19 nt, Artificial Sequence
  Description of Artificial Sequence: Synthetic oligonucleotide
gguucuggcgacccgcucg

SEQ ID NO: 237801 - RNA, 19 nt, Artificial Sequence
  Description of Artificial Sequence: Synthetic oligonucleotide
gauucugaggagggcgccg

SEQ ID NO: 237802 - RNA, 19 nt, Artificial Sequence
  Description of Artificial Sequence: Synthetic oligonucleotide
uccgaauacaggcggccgu

SEQ ID NO: 237803 - RNA, 19 nt, Artificial Sequence
  Description of Artificial Sequence: Synthetic oligonucleotide
aaaggugggugcccguaau

SEQ ID NO: 237804 - RNA, 19 nt, Artificial Sequence
  Description of Artificial Sequence: Synthetic oligonucleotide
gcauacucaauccgagccg

SEQ ID NO: 237805 - RNA, 19 nt, Artificial Sequence
  Description of Artificial Sequence: Synthetic oligonucleotide
uacgaagacaccggcgagc

SEQ ID NO: 237806 - RNA, 19 nt, Artificial Sequence
  Description of Artificial Sequence: Synthetic oligonucleotide
uuccgaauacaggcggccg

SEQ ID NO: 237807 - RNA, 19 nt, Artificial Sequence
  Description of Artificial Sequence: Synthetic oligonucleotide
ccgaguaggacgcagcgcg

SEQ ID NO: 237808 - RNA, 19 nt, Artificial Sequence
  Description of Artificial Sequence: Synthetic oligonucleotide
guacauuggauaaggaaaa

SEQ ID NO: 237809 - RNA, 19 nt, Artificial Sequence
  Description of Artificial Sequence: Synthetic oligonucleotide
guccgaguaggacgcagcg

SEQ ID NO: 237810 - RNA, 19 nt, Artificial Sequence
  Description of Artificial Sequence: Synthetic oligonucleotide
aggcccgucacgaagcgac

SEQ ID NO: 237811 - RNA, 19 nt, Artificial Sequence
  Description of Artificial Sequence: Synthetic oligonucleotide
cuccgcgggaacauagcgg

SEQ ID NO: 237812 - RNA, 19 nt, Artificial Sequence
  Description of Artificial Sequence: Synthetic oligonucleotide
aguacuccuagugaccccu

SEQ ID NO: 237813 - RNA, 19 nt, Artificial Sequence
  Description of Artificial Sequence: Synthetic oligonucleotide
ucuguggauugucacugua

SEQ ID NO: 237814 - RNA, 19 nt, Artificial Sequence
  Description of Artificial Sequence: Synthetic oligonucleotide
ccuuaauuggccgaccccg

SEQ ID NO: 237815 - RNA, 19 nt, Artificial Sequence
  Description of Artificial Sequence: Synthetic oligonucleotide
ugggauucauaggaucuga

SEQ ID NO: 237816 - RNA, 19 nt, Artificial Sequence
  Description of Artificial Sequence: Synthetic oligonucleotide
uaaaggugggugcccguaa

SEQ ID NO: 237817 - RNA, 19 nt, Artificial Sequence
  Description of Artificial Sequence: Synthetic oligonucleotide
aggauagcaagcaggaaaa

SEQ ID NO: 237818 - RNA, 19 nt, Artificial Sequence
  Description of Artificial Sequence: Synthetic oligonucleotide
uuccgcucagaagacggag

SEQ ID NO: 237819 - RNA, 19 nt, Artificial Sequence
  Description of Artificial Sequence: Synthetic oligonucleotide
uacucaauccgagccgggc

SEQ ID NO: 237820 - RNA, 19 nt, Artificial Sequence
  Description of Artificial Sequence: Synthetic oligonucleotide
agaggcguccgaguaggac

SEQ ID NO: 237821 - RNA, 19 nt, Artificial Sequence
  Description of Artificial Sequence: Synthetic oligonucleotide
gacuugugaggacggauaa

SEQ ID NO: 237822 - RNA, 19 nt, Artificial Sequence
  Description of Artificial Sequence: Synthetic oligonucleotide
ugacgacuccaugauguca

SEQ ID NO: 237823 - RNA, 19 nt, Artificial Sequence
  Description of Artificial Sequence: Synthetic oligonucleotide
agccauaucccuaccauau

SEQ ID NO: 237824 - RNA, 19 nt, Artificial Sequence
  Description of Artificial Sequence: Synthetic oligonucleotide
gaggcuuagacgaaaugua

SEQ ID NO: 237825 - RNA, 19 nt, Artificial Sequence
  Description of Artificial Sequence: Synthetic oligonucleotide
caaaggcccuuaagcauac

SEQ ID NO: 237826 - RNA, 19 nt, Artificial Sequence
  Description of Artificial Sequence: Synthetic oligonucleotide
auaaccauuugggauucau

SEQ ID NO: 237827 - RNA, 19 nt, Artificial Sequence
  Description of Artificial Sequence: Synthetic oligonucleotide
ccauaucccuaccauauug

SEQ ID NO: 237828 - RNA, 19 nt, Artificial Sequence
  Description of Artificial Sequence: Synthetic oligonucleotide
aggcguccgaguaggacgc

SEQ ID NO: 237829 - RNA, 19 nt, Artificial Sequence
  Description of Artificial Sequence: Synthetic oligonucleotide
gaaguguuucuuguccauc

SEQ ID NO: 237830 - RNA, 19 nt, Artificial Sequence
  Description of Artificial Sequence: Synthetic oligonucleotide
agggaguuaguuguuuccu

SEQ ID NO: 237831 - RNA, 19 nt, Artificial Sequence
  Description of Artificial Sequence: Synthetic oligonucleotide
ccuuagugagaacccaggg

SEQ ID NO: 237832 - RNA, 19 nt, Artificial Sequence
  Description of Artificial Sequence: Synthetic oligonucleotide
ggugggugcccguaauagg

SEQ ID NO: 237833 - RNA, 19 nt, Artificial Sequence
  Description of Artificial Sequence: Synthetic oligonucleotide
gaccccuuagugagaaccc

SEQ ID NO: 237834 - RNA, 19 nt, Artificial Sequence
  Description of Artificial Sequence: Synthetic oligonucleotide
auucaccauaaagaaucca

SEQ ID NO: 237835 - RNA, 19 nt, Artificial Sequence
  Description of Artificial Sequence: Synthetic oligonucleotide
auuggccgaccccgagccc

SEQ ID NO: 237836 - RNA, 19 nt, Artificial Sequence
  Description of Artificial Sequence: Synthetic oligonucleotide
caacugauggcaucaaagu

SEQ ID NO: 237837 - RNA, 19 nt, Artificial Sequence
  Description of Artificial Sequence: Synthetic oligonucleotide
caccacaggacuguuacca

SEQ ID NO: 237838 - RNA, 19 nt, Artificial Sequence
  Description of Artificial Sequence: Synthetic oligonucleotide
cauccacgcuauaccgacg

SEQ ID NO: 237839 - RNA, 19 nt, Artificial Sequence
  Description of Artificial Sequence: Synthetic oligonucleotide
aggcccuuaagcauacuca

SEQ ID NO: 237840 - RNA, 19 nt, Artificial Sequence
  Description of Artificial Sequence: Synthetic oligonucleotide
gaauacaggcggccguaga

SEQ ID NO: 237841 - RNA, 19 nt, Artificial Sequence
  Description of Artificial Sequence: Synthetic oligonucleotide
aucuaacuccaguuauaau

SEQ ID NO: 237842 - RNA, 19 nt, Artificial Sequence
  Description of Artificial Sequence: Synthetic oligonucleotide
aauuugcuaccaggguuaa

SEQ ID NO: 237843 - RNA, 19 nt, Artificial Sequence
  Description of Artificial Sequence: Synthetic oligonucleotide
accuuuagcccuccaggaa

SEQ ID NO: 237844 - RNA, 19 nt, Artificial Sequence
  Description of Artificial Sequence: Synthetic oligonucleotide
aaggugggugcccguaaua

SEQ ID NO: 237845 - RNA, 19 nt, Artificial Sequence
  Description of Artificial Sequence: Synthetic oligonucleotide
ccauacgaagacaccggcg

SEQ ID NO: 237846 - RNA, 19 nt, Artificial Sequence
  Description of Artificial Sequence: Synthetic oligonucleotide
cuuaauuggccgaccccga

SEQ ID NO: 237847 - RNA, 19 nt, Artificial Sequence
  Description of Artificial Sequence: Synthetic oligonucleotide
uccgcgaaguuccccuuaa

SEQ ID NO: 237848 - RNA, 19 nt, Artificial Sequence
  Description of Artificial Sequence: Synthetic oligonucleotide
agcgcgagcuuuccgaaua

SEQ ID NO: 237849 - RNA, 19 nt, Artificial Sequence
  Description of Artificial Sequence: Synthetic oligonucleotide
gaggacggauaaccauuug

SEQ ID NO: 237850 - RNA, 19 nt, Artificial Sequence
  Description of Artificial Sequence: Synthetic oligonucleotide
cugcacaaccaacgguggc

SEQ ID NO: 237851 - RNA, 19 nt, Artificial Sequence
  Description of Artificial Sequence: Synthetic oligonucleotide
acgaagcgacacugauugg

SEQ ID NO: 237852 - RNA, 19 nt, Artificial Sequence
  Description of Artificial Sequence: Synthetic oligonucleotide
cugucuaaagggguuuguc

SEQ ID NO: 237853 - RNA, 19 nt, Artificial Sequence
  Description of Artificial Sequence: Synthetic oligonucleotide
gcuauaccgacgaacauaa

SEQ ID NO: 237854 - RNA, 19 nt, Artificial Sequence
  Description of Artificial Sequence: Synthetic oligonucleotide
cacauaagccauaucccua

SEQ ID NO: 237855 - RNA, 19 nt, Artificial Sequence
  Description of Artificial Sequence: Synthetic oligonucleotide
uuuagcccuccaggaaggc

SEQ ID NO: 237856 - RNA, 19 nt, Artificial Sequence
  Description of Artificial Sequence: Synthetic oligonucleotide
cucgguucuggcgacccgc

SEQ ID NO: 237857 - RNA, 19 nt, Artificial Sequence
  Description of Artificial Sequence: Synthetic oligonucleotide
gacuguuaccaagaguacu

SEQ ID NO: 237858 - RNA, 19 nt, Artificial Sequence
  Description of Artificial Sequence: Synthetic oligonucleotide
gcacgggacaccaagacca

SEQ ID NO: 237859 - RNA, 19 nt, Artificial Sequence
  Description of Artificial Sequence: Synthetic oligonucleotide
cagucaaucugcaguggga

SEQ ID NO: 237860 - RNA, 19 nt, Artificial Sequence
  Description of Artificial Sequence: Synthetic oligonucleotide
cccuuagugagaacccagg

SEQ ID NO: 237861 - RNA, 19 nt, Artificial Sequence
  Description of Artificial Sequence: Synthetic oligonucleotide
uuccccuuaauuggccgac

SEQ ID NO: 237862 - RNA, 19 nt, Artificial Sequence
  Description of Artificial Sequence: Synthetic oligonucleotide
cucgguggauucccgcgcc

SEQ ID NO: 237863 - RNA, 19 nt, Artificial Sequence
  Description of Artificial Sequence: Synthetic oligonucleotide
uccagaggcuuagacgaaa

SEQ ID NO: 237864 - RNA, 19 nt, Artificial Sequence
  Description of Artificial Sequence: Synthetic oligonucleotide
gggugcccguaauagggcg

SEQ ID NO: 237865 - RNA, 19 nt, Artificial Sequence
  Description of Artificial Sequence: Synthetic oligonucleotide
cuacgccccggagaggacg

SEQ ID NO: 237866 - RNA, 19 nt, Artificial Sequence
  Description of Artificial Sequence: Synthetic oligonucleotide
uccgaguaggacgcagcgc

SEQ ID NO: 237867 - RNA, 19 nt, Artificial Sequence
  Description of Artificial Sequence: Synthetic oligonucleotide
ggguuggaucccuugguac

SEQ ID NO: 237868 - RNA, 19 nt, Artificial Sequence
  Description of Artificial Sequence: Synthetic oligonucleotide
ccuagugaccccuuaguga

SEQ ID NO: 237869 - RNA, 19 nt, Artificial Sequence
  Description of Artificial Sequence: Synthetic oligonucleotide
guuccccuuaauuggccga

SEQ ID NO: 237870 - RNA, 19 nt, Artificial Sequence
  Description of Artificial Sequence: Synthetic oligonucleotide
cccuauucaccauaaagaa

SEQ ID NO: 237871 - RNA, 19 nt, Artificial Sequence
  Description of Artificial Sequence: Synthetic oligonucleotide
guacaaacgucaugucucu

SEQ ID NO: 237872 - RNA, 19 nt, Artificial Sequence
  Description of Artificial Sequence: Synthetic oligonucleotide
acugucuaaagggguuugu

SEQ ID NO: 237873 - RNA, 19 nt, Artificial Sequence
  Description of Artificial Sequence: Synthetic oligonucleotide
cucuuccgcucagaagacg

SEQ ID NO: 237874 - RNA, 19 nt, Artificial Sequence
  Description of Artificial Sequence: Synthetic oligonucleotide
gcgagcuuuccgaauacag

SEQ ID NO: 237875 - RNA, 19 nt, Artificial Sequence
  Description of Artificial Sequence: Synthetic oligonucleotide
ucccuaccauauugguaca

SEQ ID NO: 237876 - RNA, 19 nt, Artificial Sequence
  Description of Artificial Sequence: Synthetic oligonucleotide
guucaggagggugauucuc

SEQ ID NO: 237877 - RNA, 19 nt, Artificial Sequence
  Description of Artificial Sequence: Synthetic oligonucleotide
ucgguucuggcgacccgcu

SEQ ID NO: 237878 - RNA, 19 nt, Artificial Sequence
  Description of Artificial Sequence: Synthetic oligonucleotide
gucuuacuucuaugucagc

SEQ ID NO: 237879 - RNA, 19 nt, Artificial Sequence
  Description of Artificial Sequence: Synthetic oligonucleotide
agacucuggcacacugggg

SEQ ID NO: 237880 - RNA, 19 nt, Artificial Sequence
  Description of Artificial Sequence: Synthetic oligonucleotide
gcggccguagagcugcgcg

SEQ ID NO: 237881 - RNA, 19 nt, Artificial Sequence
  Description of Artificial Sequence: Synthetic oligonucleotide
gggaacauagcggccucgg

SEQ ID NO: 237882 - RNA, 19 nt, Artificial Sequence
  Description of Artificial Sequence: Synthetic oligonucleotide
auacucaauccgagccggg

SEQ ID NO: 237883 - RNA, 19 nt, Artificial Sequence
  Description of Artificial Sequence: Synthetic oligonucleotide
ccuugaguacauuggauaa

SEQ ID NO: 237884 - RNA, 19 nt, Artificial Sequence
  Description of Artificial Sequence: Synthetic oligonucleotide
gccucgguggauucccgcg

SEQ ID NO: 237885 - RNA, 19 nt, Artificial Sequence
  Description of Artificial Sequence: Synthetic oligonucleotide
cgaagcgacacugauuggc

SEQ ID NO: 237886 - RNA, 19 nt, Artificial Sequence
  Description of Artificial Sequence: Synthetic oligonucleotide
caaccaacgguggcauuug

SEQ ID NO: 237887 - RNA, 19 nt, Artificial Sequence
  Description of Artificial Sequence: Synthetic oligonucleotide
ggcccuuaagcauacucaa

SEQ ID NO: 237888 - RNA, 19 nt, Artificial Sequence
  Description of Artificial Sequence: Synthetic oligonucleotide
aacugccgaggcgucacau

SEQ ID NO: 237889 - RNA, 19 nt, Artificial Sequence
  Description of Artificial Sequence: Synthetic oligonucleotide
agacggagcaguggccuug

SEQ ID NO: 237890 - RNA, 19 nt, Artificial Sequence
  Description of Artificial Sequence: Synthetic oligonucleotide
aggcgucacaucuguguau

SEQ ID NO: 237891 - RNA, 19 nt, Artificial Sequence
  Description of Artificial Sequence: Synthetic oligonucleotide
cccauacgaagacaccggc

SEQ ID NO: 237892 - RNA, 19 nt, Artificial Sequence
  Description of Artificial Sequence: Synthetic oligonucleotide
augcuuacugaaagacacu

SEQ ID NO: 237893 - RNA, 19 nt, Artificial Sequence
  Description of Artificial Sequence: Synthetic oligonucleotide
ccacugacgcuaucaaaac

SEQ ID NO: 237894 - RNA, 19 nt, Artificial Sequence
  Description of Artificial Sequence: Synthetic oligonucleotide
acgcuauaccgacgaacau

SEQ ID NO: 237895 - RNA, 19 nt, Artificial Sequence
  Description of Artificial Sequence: Synthetic oligonucleotide
ccagaggcguccgaguagg

SEQ ID NO: 237896 - RNA, 19 nt, Artificial Sequence
  Description of Artificial Sequence: Synthetic oligonucleotide
uccccuuaauuggccgacc

SEQ ID NO: 237897 - RNA, 19 nt, Artificial Sequence
  Description of Artificial Sequence: Synthetic oligonucleotide
uccacgcuauaccgacgaa

SEQ ID NO: 237898 - RNA, 19 nt, Artificial Sequence
  Description of Artificial Sequence: Synthetic oligonucleotide
accccuuagugagaaccca

SEQ ID NO: 237899 - RNA, 19 nt, Artificial Sequence
  Description of Artificial Sequence: Synthetic oligonucleotide
ucgguggauucccgcgccu

SEQ ID NO: 237900 - RNA, 19 nt, Artificial Sequence
  Description of Artificial Sequence: Synthetic oligonucleotide
uggcgacccgcucgucugc

SEQ ID NO: 237901 - RNA, 19 nt, Artificial Sequence
  Description of Artificial Sequence: Synthetic oligonucleotide
acauagcggccucggugga

SEQ ID NO: 237902 - RNA, 19 nt, Artificial Sequence
  Description of Artificial Sequence: Synthetic oligonucleotide
cagugaacuccaauuugcu

SEQ ID NO: 237903 - RNA, 19 nt, Artificial Sequence
  Description of Artificial Sequence: Synthetic oligonucleotide
cuuccgcucagaagacgga

SEQ ID NO: 237904 - RNA, 19 nt, Artificial Sequence
  Description of Artificial Sequence: Synthetic oligonucleotide
cccuuaauuggccgacccc

SEQ ID NO: 237905 - RNA, 19 nt, Artificial Sequence
  Description of Artificial Sequence: Synthetic oligonucleotide
ccccuuaauuggccgaccc

SEQ ID NO: 237906 - RNA, 19 nt, Artificial Sequence
  Description of Artificial Sequence: Synthetic oligonucleotide
uacaaacgucaugucucua

SEQ ID NO: 237907 - RNA, 19 nt, Artificial Sequence
  Description of Artificial Sequence: Synthetic oligonucleotide
caaacgucaugucucuaau

SEQ ID NO: 237908 - RNA, 19 nt, Artificial Sequence
  Description of Artificial Sequence: Synthetic oligonucleotide
gguguuccacagcacggga

SEQ ID NO: 237909 - RNA, 19 nt, Artificial Sequence
  Description of Artificial Sequence: Synthetic oligonucleotide
accgacgaacauaaacaua

SEQ ID NO: 237910 - RNA, 19 nt, Artificial Sequence
  Description of Artificial Sequence: Synthetic oligonucleotide
ugcccguaauagggcgccg

SEQ ID NO: 237911 - RNA, 19 nt, Artificial Sequence
  Description of Artificial Sequence: Synthetic oligonucleotide
uaggacgcagcgcgagcuu

SEQ ID NO: 237912 - RNA, 19 nt, Artificial Sequence
  Description of Artificial Sequence: Synthetic oligonucleotide
cugccgaggcgucacaucu

SEQ ID NO: 237913 - RNA, 19 nt, Artificial Sequence
  Description of Artificial Sequence: Synthetic oligonucleotide
guaaaggugggugcccgua

SEQ ID NO: 237914 - RNA, 19 nt, Artificial Sequence
  Description of Artificial Sequence: Synthetic oligonucleotide
cuacccucacucuuccgcu

SEQ ID NO: 237915 - RNA, 19 nt, Artificial Sequence
  Description of Artificial Sequence: Synthetic oligonucleotide
cauaaucccuugaguacau

SEQ ID NO: 237916 - RNA, 19 nt, Artificial Sequence
  Description of Artificial Sequence: Synthetic oligonucleotide
cacgcgcaggcccgucacg

SEQ ID NO: 237917 - RNA, 19 nt, Artificial Sequence
  Description of Artificial Sequence: Synthetic oligonucleotide
ggauucugaggagggcgcc

SEQ ID NO: 237918 - RNA, 19 nt, Artificial Sequence
  Description of Artificial Sequence: Synthetic oligonucleotide
ccacgcuauaccgacgaac

SEQ ID NO: 237919 - RNA, 19 nt, Artificial Sequence
  Description of Artificial Sequence: Synthetic oligonucleotide
gccuaaagugagagguuug

SEQ ID NO: 237920 - RNA, 19 nt, Artificial Sequence
  Description of Artificial Sequence: Synthetic oligonucleotide
caauccgagccgggccacg

SEQ ID NO: 237921 - RNA, 19 nt, Artificial Sequence
  Description of Artificial Sequence: Synthetic oligonucleotide
uccuggcaaaugggcuaag

SEQ ID NO: 237922 - RNA, 19 nt, Artificial Sequence
  Description of Artificial Sequence: Synthetic oligonucleotide
cuccuagugaccccuuagu

SEQ ID NO: 237923 - RNA, 19 nt, Artificial Sequence
  Description of Artificial Sequence: Synthetic oligonucleotide
ccucgucccauacgaagac

SEQ ID NO: 237924 - RNA, 19 nt, Artificial Sequence
  Description of Artificial Sequence: Synthetic oligonucleotide
guaggacgcagcgcgagcu

SEQ ID NO: 237925 - RNA, 19 nt, Artificial Sequence
  Description of Artificial Sequence: Synthetic oligonucleotide
ggugcccguaauagggcgc

SEQ ID NO: 237926 - RNA, 19 nt, Artificial Sequence
  Description of Artificial Sequence: Synthetic oligonucleotide
ggcuuagacgaaauguagu

SEQ ID NO: 237927 - RNA, 19 nt, Artificial Sequence
  Description of Artificial Sequence: Synthetic oligonucleotide
cccguaauagggcgccgcc

SEQ ID NO: 237928 - RNA, 19 nt, Artificial Sequence
  Description of Artificial Sequence: Synthetic oligonucleotide
auaaucccuugaguacauu

SEQ ID NO: 237929 - RNA, 19 nt, Artificial Sequence
  Description of Artificial Sequence: Synthetic oligonucleotide
ccauauugguacagggaaa

SEQ ID NO: 237930 - RNA, 19 nt, Artificial Sequence
  Description of Artificial Sequence: Synthetic oligonucleotide
ggcuacccucacucuuccg

SEQ ID NO: 237931 - RNA, 19 nt, Artificial Sequence
  Description of Artificial Sequence: Synthetic oligonucleotide
gcgagcgccgccaucaaga

SEQ ID NO: 237932 - RNA, 19 nt, Artificial Sequence
  Description of Artificial Sequence: Synthetic oligonucleotide
cuggcgcuacgccccggag

SEQ ID NO: 237933 - RNA, 19 nt, Artificial Sequence
  Description of Artificial Sequence: Synthetic oligonucleotide
ccucgguggauucccgcgc

SEQ ID NO: 237934 - RNA, 19 nt, Artificial Sequence
  Description of Artificial Sequence: Synthetic oligonucleotide
ccaauuugcuaccaggguu

SEQ ID NO: 237935 - RNA, 19 nt, Artificial Sequence
  Description of Artificial Sequence: Synthetic oligonucleotide
guucuggcgacccgcucgu

SEQ ID NO: 237936 - RNA, 19 nt, Artificial Sequence
  Description of Artificial Sequence: Synthetic oligonucleotide
cucgucccauacgaagaca

SEQ ID NO: 237937 - RNA, 19 nt, Artificial Sequence
  Description of Artificial Sequence: Synthetic oligonucleotide
ccgucacgaagcgacacug

SEQ ID NO: 237938 - RNA, 19 nt, Artificial Sequence
  Description of Artificial Sequence: Synthetic oligonucleotide
caacauugagggaguuagu

SEQ ID NO: 237939 - RNA, 19 nt, Artificial Sequence
  Description of Artificial Sequence: Synthetic oligonucleotide
caaaugggcuaaggcuaca

SEQ ID NO: 237940 - RNA, 19 nt, Artificial Sequence
  Description of Artificial Sequence: Synthetic oligonucleotide
gugaccccuuagugagaac

SEQ ID NO: 237941 - RNA, 19 nt, Artificial Sequence
  Description of Artificial Sequence: Synthetic oligonucleotide
cuauaccgacgaacauaaa

SEQ ID NO: 237942 - RNA, 19 nt, Artificial Sequence
  Description of Artificial Sequence: Synthetic oligonucleotide
cguccgaguaggacgcagc

SEQ ID NO: 237943 - RNA, 19 nt, Artificial Sequence
  Description of Artificial Sequence: Synthetic oligonucleotide
gaccccgagcccaccucac

SEQ ID NO: 237944 - RNA, 19 nt, Artificial Sequence
  Description of Artificial Sequence: Synthetic oligonucleotide
auccaacauugagggaguu

SEQ ID NO: 237945 - RNA, 19 nt, Artificial Sequence
  Description of Artificial Sequence: Synthetic oligonucleotide
gcccguaauagggcgccgc

SEQ ID NO: 237946 - RNA, 19 nt, Artificial Sequence
  Description of Artificial Sequence: Synthetic oligonucleotide
ggcgacccgcucgucugcg

SEQ ID NO: 237947 - RNA, 19 nt, Artificial Sequence
  Description of Artificial Sequence: Synthetic oligonucleotide
gcagcgcgagcuuuccgaa

SEQ ID NO: 237948 - RNA, 19 nt, Artificial Sequence
  Description of Artificial Sequence: Synthetic oligonucleotide
gcgcgagcuuuccgaauac

SEQ ID NO: 237949 - RNA, 19 nt, Artificial Sequence
  Description of Artificial Sequence: Synthetic oligonucleotide
gcguccgaguaggacgcag

SEQ ID NO: 237950 - RNA, 19 nt, Artificial Sequence
  Description of Artificial Sequence: Synthetic oligonucleotide
ggaacauagcggccucggu

SEQ ID NO: 237951 - RNA, 19 nt, Artificial Sequence
  Description of Artificial Sequence: Synthetic oligonucleotide
ccucgguucuggcgacccg

SEQ ID NO: 237952 - RNA, 19 nt, Artificial Sequence
  Description of Artificial Sequence: Synthetic oligonucleotide
cacggcuacccucacucuu

SEQ ID NO: 237953 - RNA, 19 nt, Artificial Sequence
  Description of Artificial Sequence: Synthetic oligonucleotide
cgcagcgcgagcuuuccga

SEQ ID NO: 237954 - RNA, 19 nt, Artificial Sequence
  Description of Artificial Sequence: Synthetic oligonucleotide
cagaggcguccgaguagga

SEQ ID NO: 237955 - RNA, 19 nt, Artificial Sequence
  Description of Artificial Sequence: Synthetic oligonucleotide
cacuuagcucagccagugu

SEQ ID NO: 237956 - RNA, 19 nt, Artificial Sequence
  Description of Artificial Sequence: Synthetic oligonucleotide
gcccgucacgaagcgacac

SEQ ID NO: 237957 - RNA, 19 nt, Artificial Sequence
  Description of Artificial Sequence: Synthetic oligonucleotide
cgcuauaccgacgaacaua

SEQ ID NO: 237958 - RNA, 19 nt, Artificial Sequence
  Description of Artificial Sequence: Synthetic oligonucleotide
ggacgcagcgcgagcuuuc

SEQ ID NO: 237959 - RNA, 19 nt, Artificial Sequence
  Description of Artificial Sequence: Synthetic oligonucleotide
cggcuacccucacucuucc

SEQ ID NO: 237960 - RNA, 19 nt, Artificial Sequence
  Description of Artificial Sequence: Synthetic oligonucleotide
ccgggccacggcuacccuc

SEQ ID NO: 237961 - RNA, 19 nt, Artificial Sequence
  Description of Artificial Sequence: Synthetic oligonucleotide
cgacccgcucgucugcgug

SEQ ID NO: 237962 - RNA, 19 nt, Artificial Sequence
  Description of Artificial Sequence: Synthetic oligonucleotide
guacuuccacugacgcuau

SEQ ID NO: 237963 - RNA, 19 nt, Artificial Sequence
  Description of Artificial Sequence: Synthetic oligonucleotide
cgucacgaagcgacacuga

SEQ ID NO: 237964 - RNA, 19 nt, Artificial Sequence
  Description of Artificial Sequence: Synthetic oligonucleotide
cgggaacauagcggccucg

SEQ ID NO: 237965 - RNA, 19 nt, Artificial Sequence
  Description of Artificial Sequence: Synthetic oligonucleotide
ccguaauagggcgccgcca

SEQ ID NO: 237966 - RNA, 19 nt, Artificial Sequence
  Description of Artificial Sequence: Synthetic oligonucleotide
aggcggccguagagcugcg

SEQ ID NO: 237967 - RNA, 19 nt, Artificial Sequence
  Description of Artificial Sequence: Synthetic oligonucleotide
ccgaccccgagcccaccuc

SEQ ID NO: 237968 - RNA, 19 nt, Artificial Sequence
  Description of Artificial Sequence: Synthetic oligonucleotide
gcgucacaucuguguaugu

SEQ ID NO: 237969 - RNA, 19 nt, Artificial Sequence
  Description of Artificial Sequence: Synthetic oligonucleotide
ccgaauacaggcggccgua

SEQ ID NO: 237970 - RNA, 19 nt, Artificial Sequence
  Description of Artificial Sequence: Synthetic oligonucleotide
ggcggccguagagcugcgc

SEQ ID NO: 237971 - RNA, 19 nt, Artificial Sequence
  Description of Artificial Sequence: Synthetic oligonucleotide
cagcgcgagcuuuccgaau

SEQ ID NO: 237972 - RNA, 19 nt, Artificial Sequence
  Description of Artificial Sequence: Synthetic oligonucleotide
gcuacgccccggagaggac

SEQ ID NO: 237973 - RNA, 19 nt, Artificial Sequence
  Description of Artificial Sequence: Synthetic oligonucleotide
cauagcggccucgguggau

SEQ ID NO: 237974 - RNA, 19 nt, Artificial Sequence
  Description of Artificial Sequence: Synthetic oligonucleotide
cgcgaaguuccccuuaauu

SEQ ID NO: 237975 - RNA, 19 nt, Artificial Sequence
  Description of Artificial Sequence: Synthetic oligonucleotide
cacaaccaacgguggcauu

SEQ ID NO: 237976 - RNA, 19 nt, Artificial Sequence
  Description of Artificial Sequence: Synthetic oligonucleotide
gcccuuaagcauacucaau

SEQ ID NO: 237977 - RNA, 19 nt, Artificial Sequence
  Description of Artificial Sequence: Synthetic oligonucleotide
ggcccgucacgaagcgaca

SEQ ID NO: 237978 - RNA, 19 nt, Artificial Sequence
  Description of Artificial Sequence: Synthetic oligonucleotide
cgguggauucccgcgccug

SEQ ID NO: 237979 - RNA, 19 nt, Artificial Sequence
  Description of Artificial Sequence: Synthetic oligonucleotide
cgaccccgagcccaccuca

SEQ ID NO: 237980 - RNA, 19 nt, Artificial Sequence
  Description of Artificial Sequence: Synthetic oligonucleotide
cccgucacgaagcgacacu

SEQ ID NO: 237981 - RNA, 19 nt, Artificial Sequence
  Description of Artificial Sequence: Synthetic oligonucleotide
gcgcuacgccccggagagg

SEQ ID NO: 237982 - RNA, 19 nt, Artificial Sequence
  Description of Artificial Sequence: Synthetic oligonucleotide
cccgcgccuggcgcuacgc

SEQ ID NO: 237983 - RNA, 19 nt, Artificial Sequence
  Description of Artificial Sequence: Synthetic oligonucleotide
gcgccagaggcguccgagu

SEQ ID NO: 237984 - RNA, 19 nt, Artificial Sequence
  Description of Artificial Sequence: Synthetic oligonucleotide
guacuccuagugaccccuu

SEQ ID NO: 237985 - RNA, 19 nt, Artificial Sequence
  Description of Artificial Sequence: Synthetic oligonucleotide
cgcgagcuuuccgaauaca

SEQ ID NO: 237986 - RNA, 19 nt, Artificial Sequence
  Description of Artificial Sequence: Synthetic oligonucleotide
ggcguccgaguaggacgca

SEQ ID NO: 237987 - RNA, 19 nt, Artificial Sequence
  Description of Artificial Sequence: Synthetic oligonucleotide
cgguucuggcgacccgcuc

SEQ ID NO: 237988 - RNA, 19 nt, Artificial Sequence
  Description of Artificial Sequence: Synthetic oligonucleotide
cgcacgcgcaggcccguca

SEQ ID NO: 237989 - RNA, 19 nt, Artificial Sequence
  Description of Artificial Sequence: Synthetic oligonucleotide
gcgacccgcucgucugcgu

SEQ ID NO: 237990 - RNA, 19 nt, Artificial Sequence
  Description of Artificial Sequence: Synthetic oligonucleotide
ccgcgaaguuccccuuaau

SEQ ID NO: 237991 - RNA, 19 nt, Artificial Sequence
  Description of Artificial Sequence: Synthetic oligonucleotide
caccggcgagcgccgccau

SEQ ID NO: 237992 - RNA, 19 nt, Artificial Sequence
  Description of Artificial Sequence: Synthetic oligonucleotide
cggcgccagaggcguccga

SEQ ID NO: 237993 - RNA, 19 nt, Artificial Sequence
  Description of Artificial Sequence: Synthetic oligonucleotide
ccgggccguccgcgaaguu

SEQ ID NO: 237994 - RNA, 19 nt, Artificial Sequence
  Description of Artificial Sequence: Synthetic oligonucleotide
aaagaagccaucuauaaag

SEQ ID NO: 237995 - RNA, 19 nt, Artificial Sequence
  Description of Artificial Sequence: Synthetic oligonucleotide
aauucuaaaucuugcgugc

SEQ ID NO: 237996 - RNA, 19 nt, Artificial Sequence
  Description of Artificial Sequence: Synthetic oligonucleotide
uauauuuauauauauauau

SEQ ID NO: 237997 - RNA, 19 nt, Artificial Sequence
  Description of Artificial Sequence: Synthetic oligonucleotide
uuaacuagugcaaauuagg

SEQ ID NO: 237998 - RNA, 19 nt, Artificial Sequence
  Description of Artificial Sequence: Synthetic oligonucleotide
uauauauauauauaauuug

SEQ ID NO: 237999 - RNA, 19 nt, Artificial Sequence
  Description of Artificial Sequence: Synthetic oligonucleotide
uauuuauauauauauauaa

SEQ ID NO: 238000 - RNA, 19 nt, Artificial Sequence
  Description of Artificial Sequence: Synthetic oligonucleotide
uuaacauucaggaagccug

SEQ ID NO: 238001 - RNA, 19 nt, Artificial Sequence
  Description of Artificial Sequence: Synthetic oligonucleotide
uuuggucuaaucuagaaga

SEQ ID NO: 238002 - RNA, 19 nt, Artificial Sequence
  Description of Artificial Sequence: Synthetic oligonucleotide
gugauuaacauucaggaag

SEQ ID NO: 238003 - RNA, 19 nt, Artificial Sequence
  Description of Artificial Sequence: Synthetic oligonucleotide
uuauauauauauauaauuu

SEQ ID NO: 238004 - RNA, 19 nt, Artificial Sequence
  Description of Artificial Sequence: Synthetic oligonucleotide
uucaacaagaaauaggaac

SEQ ID NO: 238005 - RNA, 19 nt, Artificial Sequence
  Description of Artificial Sequence: Synthetic oligonucleotide
uauauauauauaauuugug

SEQ ID NO: 238006 - RNA, 19 nt, Artificial Sequence
  Description of Artificial Sequence: Synthetic oligonucleotide
uuuauauauauauauaauu

SEQ ID NO: 238007 - RNA, 19 nt, Artificial Sequence
  Description of Artificial Sequence: Synthetic oligonucleotide
ucuucaagugacaaaauug

SEQ ID NO: 238008 - RNA, 19 nt, Artificial Sequence
  Description of Artificial Sequence: Synthetic oligonucleotide
ucuauaaaggccagaagag

SEQ ID NO: 238009 - RNA, 19 nt, Artificial Sequence
  Description of Artificial Sequence: Synthetic oligonucleotide
uguguagauauauauaugu

SEQ ID NO: 238010 - RNA, 19 nt, Artificial Sequence
  Description of Artificial Sequence: Synthetic oligonucleotide
caaauuagggauuagggac

SEQ ID NO: 238011 - RNA, 19 nt, Artificial Sequence
  Description of Artificial Sequence: Synthetic oligonucleotide
gaagcuauucuucuuaccc

SEQ ID NO: 238012 - RNA, 19 nt, Artificial Sequence
  Description of Artificial Sequence: Synthetic oligonucleotide
caucuaaucacacauuagg

SEQ ID NO: 238013 - RNA, 19 nt, Artificial Sequence
  Description of Artificial Sequence: Synthetic oligonucleotide
acaaucuaaaucuuccccg

SEQ ID NO: 238014 - RNA, 19 nt, Artificial Sequence
  Description of Artificial Sequence: Synthetic oligonucleotide
uaacuagugcaaauuaggg

SEQ ID NO: 238015 - RNA, 19 nt, Artificial Sequence
  Description of Artificial Sequence: Synthetic oligonucleotide
gauauauuuauauauauau

SEQ ID NO: 238016 - RNA, 19 nt, Artificial Sequence
  Description of Artificial Sequence: Synthetic oligonucleotide
aguaggaaauucuucacuc

SEQ ID NO: 238017 - RNA, 19 nt, Artificial Sequence
  Description of Artificial Sequence: Synthetic oligonucleotide
gaauucuaaaucuugcgug

SEQ ID NO: 238018 - RNA, 19 nt, Artificial Sequence
  Description of Artificial Sequence: Synthetic oligonucleotide
aagagauaggauaaccacc

SEQ ID NO: 238019 - RNA, 19 nt, Artificial Sequence
  Description of Artificial Sequence: Synthetic oligonucleotide
uacguauagagcuagaguc

SEQ ID NO: 238020 - RNA, 19 nt, Artificial Sequence
  Description of Artificial Sequence: Synthetic oligonucleotide
aauauggagaaagagggca

SEQ ID NO: 238021 - RNA, 19 nt, Artificial Sequence
  Description of Artificial Sequence: Synthetic oligonucleotide
ugauuaacauucaggaagc

SEQ ID NO: 238022 - RNA, 19 nt, Artificial Sequence
  Description of Artificial Sequence: Synthetic oligonucleotide
uccgugauuaacauucagg

SEQ ID NO: 238023 - RNA, 19 nt, Artificial Sequence
  Description of Artificial Sequence: Synthetic oligonucleotide
acuagugcaaauuagggau

SEQ ID NO: 238024 - RNA, 19 nt, Artificial Sequence
  Description of Artificial Sequence: Synthetic oligonucleotide
aauaugggaaauauccauc

SEQ ID NO: 238025 - RNA, 19 nt, Artificial Sequence
  Description of Artificial Sequence: Synthetic oligonucleotide
aaucacacauuagggaggc

SEQ ID NO: 238026 - RNA, 19 nt, Artificial Sequence
  Description of Artificial Sequence: Synthetic oligonucleotide
aaggugcuauuuuggaggc

SEQ ID NO: 238027 - RNA, 19 nt, Artificial Sequence
  Description of Artificial Sequence: Synthetic oligonucleotide
aauaaccgcaccuggcauc

SEQ ID NO: 238028 - RNA, 19 nt, Artificial Sequence
  Description of Artificial Sequence: Synthetic oligonucleotide
auagugaggaauuggcagg

SEQ ID NO: 238029 - RNA, 19 nt, Artificial Sequence
  Description of Artificial Sequence: Synthetic oligonucleotide
agagcuagagucuagaauu

SEQ ID NO: 238030 - RNA, 19 nt, Artificial Sequence
  Description of Artificial Sequence: Synthetic oligonucleotide
aacuagugcaaauuaggga

SEQ ID NO: 238031 - RNA, 19 nt, Artificial Sequence
  Description of Artificial Sequence: Synthetic oligonucleotide
gguaggaccauguugagag

SEQ ID NO: 238032 - RNA, 19 nt, Artificial Sequence
  Description of Artificial Sequence: Synthetic oligonucleotide
auauauauauauaauuugu

SEQ ID NO: 238033 - RNA, 19 nt, Artificial Sequence
  Description of Artificial Sequence: Synthetic oligonucleotide
cuugacaucacuaggucug

SEQ ID NO: 238034 - RNA, 19 nt, Artificial Sequence
  Description of Artificial Sequence: Synthetic oligonucleotide
acugcguagccaaagaccc

SEQ ID NO: 238035 - RNA, 19 nt, Artificial Sequence
  Description of Artificial Sequence: Synthetic oligonucleotide
caggauaaagcuagggugg

SEQ ID NO: 238036 - RNA, 19 nt, Artificial Sequence
  Description of Artificial Sequence: Synthetic oligonucleotide
ucauacuccucuaauuccc

SEQ ID NO: 238037 - RNA, 19 nt, Artificial Sequence
  Description of Artificial Sequence: Synthetic oligonucleotide
agaauucuaaaucuugcgu

SEQ ID NO: 238038 - RNA, 19 nt, Artificial Sequence
  Description of Artificial Sequence: Synthetic oligonucleotide
uguauggagugcuucauac

SEQ ID NO: 238039 - RNA, 19 nt, Artificial Sequence
  Description of Artificial Sequence: Synthetic oligonucleotide
uuagggaccauugaaaauc

SEQ ID NO: 238040 - RNA, 19 nt, Artificial Sequence
  Description of Artificial Sequence: Synthetic oligonucleotide
cauugaaaaucccugcacc

SEQ ID NO: 238041 - RNA, 19 nt, Artificial Sequence
  Description of Artificial Sequence: Synthetic oligonucleotide
auaaagcuaggguggaagg

SEQ ID NO: 238042 - RNA, 19 nt, Artificial Sequence
  Description of Artificial Sequence: Synthetic oligonucleotide
ucuccugacuuccucagag

SEQ ID NO: 238043 - RNA, 19 nt, Artificial Sequence
  Description of Artificial Sequence: Synthetic oligonucleotide
uuuggcuuagccccaaaga

SEQ ID NO: 238044 - RNA, 19 nt, Artificial Sequence
  Description of Artificial Sequence: Synthetic oligonucleotide
gaauuggaaacacacacaa

SEQ ID NO: 238045 - RNA, 19 nt, Artificial Sequence
  Description of Artificial Sequence: Synthetic oligonucleotide
aaucuuccccgcuggaagg

SEQ ID NO: 238046 - RNA, 19 nt, Artificial Sequence
  Description of Artificial Sequence: Synthetic oligonucleotide
uagugcucacccuacaucc

SEQ ID NO: 238047 - RNA, 19 nt, Artificial Sequence
  Description of Artificial Sequence: Synthetic oligonucleotide
auaugggaaauauccaucu

SEQ ID NO: 238048 - RNA, 19 nt, Artificial Sequence
  Description of Artificial Sequence: Synthetic oligonucleotide
auauugaaaccuuccagcu

SEQ ID NO: 238049 - RNA, 19 nt, Artificial Sequence
  Description of Artificial Sequence: Synthetic oligonucleotide
uuccccuacucccuuaggg

SEQ ID NO: 238050 - RNA, 19 nt, Artificial Sequence
  Description of Artificial Sequence: Synthetic oligonucleotide
gguuuauuggccuagagaa

SEQ ID NO: 238051 - RNA, 19 nt, Artificial Sequence
  Description of Artificial Sequence: Synthetic oligonucleotide
agaaagagggcacggacug

SEQ ID NO: 238052 - RNA, 19 nt, Artificial Sequence
  Description of Artificial Sequence: Synthetic oligonucleotide
aaucuggguccucacuacg

SEQ ID NO: 238053 - RNA, 19 nt, Artificial Sequence
  Description of Artificial Sequence: Synthetic oligonucleotide
guugccaaauucuggaagc

SEQ ID NO: 238054 - RNA, 19 nt, Artificial Sequence
  Description of Artificial Sequence: Synthetic oligonucleotide
uuggcuuagccccaaagaa

SEQ ID NO: 238055 - RNA, 19 nt, Artificial Sequence
  Description of Artificial Sequence: Synthetic oligonucleotide
gacaucacuaggucugggg

SEQ ID NO: 238056 - RNA, 19 nt, Artificial Sequence
  Description of Artificial Sequence: Synthetic oligonucleotide
ugaaaaucccugcacccca

SEQ ID NO: 238057 - RNA, 19 nt, Artificial Sequence
  Description of Artificial Sequence: Synthetic oligonucleotide
agugccagaaacaagauuu

SEQ ID NO: 238058 - RNA, 19 nt, Artificial Sequence
  Description of Artificial Sequence: Synthetic oligonucleotide
aaccauagugaggaauugg

SEQ ID NO: 238059 - RNA, 19 nt, Artificial Sequence
  Description of Artificial Sequence: Synthetic oligonucleotide
acucacaauauugaaaccu

SEQ ID NO: 238060 - RNA, 19 nt, Artificial Sequence
  Description of Artificial Sequence: Synthetic oligonucleotide
ucaccucccuccaaaagcc

SEQ ID NO: 238061 - RNA, 19 nt, Artificial Sequence
  Description of Artificial Sequence: Synthetic oligonucleotide
acaaacaaucuaaaucuuc

SEQ ID NO: 238062 - RNA, 19 nt, Artificial Sequence
  Description of Artificial Sequence: Synthetic oligonucleotide
gucacaacuuuauuuguug

SEQ ID NO: 238063 - RNA, 19 nt, Artificial Sequence
  Description of Artificial Sequence: Synthetic oligonucleotide
ucacacauuagggaggccc

SEQ ID NO: 238064 - RNA, 19 nt, Artificial Sequence
  Description of Artificial Sequence: Synthetic oligonucleotide
uaaaucuugcgugcugugg

SEQ ID NO: 238065 - RNA, 19 nt, Artificial Sequence
  Description of Artificial Sequence: Synthetic oligonucleotide
ugaggauucacugcguagc

SEQ ID NO: 238066 - RNA, 19 nt, Artificial Sequence
  Description of Artificial Sequence: Synthetic oligonucleotide
ucacaacuuuauuuguugc

SEQ ID NO: 238067 - RNA, 19 nt, Artificial Sequence
  Description of Artificial Sequence: Synthetic oligonucleotide
uggcuuagccccaaagaag

SEQ ID NO: 238068 - RNA, 19 nt, Artificial Sequence
  Description of Artificial Sequence: Synthetic oligonucleotide
cacaaauaaccgcaccugg

SEQ ID NO: 238069 - RNA, 19 nt, Artificial Sequence
  Description of Artificial Sequence: Synthetic oligonucleotide
uuuuggguucucucaaccc

SEQ ID NO: 238070 - RNA, 19 nt, Artificial Sequence
  Description of Artificial Sequence: Synthetic oligonucleotide
auuuauauauauauauaau

SEQ ID NO: 238071 - RNA, 19 nt, Artificial Sequence
  Description of Artificial Sequence: Synthetic oligonucleotide
acuacaggucucaggaucc

SEQ ID NO: 238072 - RNA, 19 nt, Artificial Sequence
  Description of Artificial Sequence: Synthetic oligonucleotide
guggggauaccccaaagcc

SEQ ID NO: 238073 - RNA, 19 nt, Artificial Sequence
  Description of Artificial Sequence: Synthetic oligonucleotide
gguauaaggugcuauuuug

SEQ ID NO: 238074 - RNA, 19 nt, Artificial Sequence
  Description of Artificial Sequence: Synthetic oligonucleotide
uagggauuagggaccauug

SEQ ID NO: 238075 - RNA, 19 nt, Artificial Sequence
  Description of Artificial Sequence: Synthetic oligonucleotide
auauaauuuguguguagau

SEQ ID NO: 238076 - RNA, 19 nt, Artificial Sequence
  Description of Artificial Sequence: Synthetic oligonucleotide
auaaccgcaccuggcaucc

SEQ ID NO: 238077 - RNA, 19 nt, Artificial Sequence
  Description of Artificial Sequence: Synthetic oligonucleotide
gguuccgcuguauauauag

SEQ ID NO: 238078 - RNA, 19 nt, Artificial Sequence
  Description of Artificial Sequence: Synthetic oligonucleotide
gaaggcaauguacaaaucu

SEQ ID NO: 238079 - RNA, 19 nt, Artificial Sequence
  Description of Artificial Sequence: Synthetic oligonucleotide
cauuuggauuaaaacaguc

SEQ ID NO: 238080 - RNA, 19 nt, Artificial Sequence
  Description of Artificial Sequence: Synthetic oligonucleotide
ugggaaauauccaucuaau

SEQ ID NO: 238081 - RNA, 19 nt, Artificial Sequence
  Description of Artificial Sequence: Synthetic oligonucleotide
gaccauugaaaaucccugc

SEQ ID NO: 238082 - RNA, 19 nt, Artificial Sequence
  Description of Artificial Sequence: Synthetic oligonucleotide
cacagguggguacacauag

SEQ ID NO: 238083 - RNA, 19 nt, Artificial Sequence
  Description of Artificial Sequence: Synthetic oligonucleotide
aaucuugggcuaaccacac

SEQ ID NO: 238084 - RNA, 19 nt, Artificial Sequence
  Description of Artificial Sequence: Synthetic oligonucleotide
uggggauaccccaaagccc

SEQ ID NO: 238085 - RNA, 19 nt, Artificial Sequence
  Description of Artificial Sequence: Synthetic oligonucleotide
gucauacuccucuaauucc

SEQ ID NO: 238086 - RNA, 19 nt, Artificial Sequence
  Description of Artificial Sequence: Synthetic oligonucleotide
uugcaaaaucccaaauuuc

SEQ ID NO: 238087 - RNA, 19 nt, Artificial Sequence
  Description of Artificial Sequence: Synthetic oligonucleotide
aaaucuggagauaaauaau

SEQ ID NO: 238088 - RNA, 19 nt, Artificial Sequence
  Description of Artificial Sequence: Synthetic oligonucleotide
uugucuugucgguuuauug

SEQ ID NO: 238089 - RNA, 19 nt, Artificial Sequence
  Description of Artificial Sequence: Synthetic oligonucleotide
ugcguagccaaagaccccg

SEQ ID NO: 238090 - RNA, 19 nt, Artificial Sequence
  Description of Artificial Sequence: Synthetic oligonucleotide
aaauaaccgcaccuggcau

SEQ ID NO: 238091 - RNA, 19 nt, Artificial Sequence
  Description of Artificial Sequence: Synthetic oligonucleotide
uagagcuagagucuagaau

SEQ ID NO: 238092 - RNA, 19 nt, Artificial Sequence
  Description of Artificial Sequence: Synthetic oligonucleotide
cacugcguagccaaagacc

SEQ ID NO: 238093 - RNA, 19 nt, Artificial Sequence
  Description of Artificial Sequence: Synthetic oligonucleotide
aaguugguggggauacccc

SEQ ID NO: 238094 - RNA, 19 nt, Artificial Sequence
  Description of Artificial Sequence: Synthetic oligonucleotide
gacuacaggucucaggauc

SEQ ID NO: 238095 - RNA, 19 nt, Artificial Sequence
  Description of Artificial Sequence: Synthetic oligonucleotide
uuauuggccuagagaauug

SEQ ID NO: 238096 - RNA, 19 nt, Artificial Sequence
  Description of Artificial Sequence: Synthetic oligonucleotide
gaacuugguacauucagua

SEQ ID NO: 238097 - RNA, 19 nt, Artificial Sequence
  Description of Artificial Sequence: Synthetic oligonucleotide
ucuaaaucuugcgugcugu

SEQ ID NO: 238098 - RNA, 19 nt, Artificial Sequence
  Description of Artificial Sequence: Synthetic oligonucleotide
uucuaaaucuugcgugcug

SEQ ID NO: 238099 - RNA, 19 nt, Artificial Sequence
  Description of Artificial Sequence: Synthetic oligonucleotide
augaccggguccuggagcg

SEQ ID NO: 238100 - RNA, 19 nt, Artificial Sequence
  Description of Artificial Sequence: Synthetic oligonucleotide
uuggccuagagaauuggaa

SEQ ID NO: 238101 - RNA, 19 nt, Artificial Sequence
  Description of Artificial Sequence: Synthetic oligonucleotide
auauccaucuaaucacaca

SEQ ID NO: 238102 - RNA, 19 nt, Artificial Sequence
  Description of Artificial Sequence: Synthetic oligonucleotide
gucuugucgguuuauuggc

SEQ ID NO: 238103 - RNA, 19 nt, Artificial Sequence
  Description of Artificial Sequence: Synthetic oligonucleotide
uugguaauaugggaaauau

SEQ ID NO: 238104 - RNA, 19 nt, Artificial Sequence
  Description of Artificial Sequence: Synthetic oligonucleotide
auaggauaaccaccaaaga

SEQ ID NO: 238105 - RNA, 19 nt, Artificial Sequence
  Description of Artificial Sequence: Synthetic oligonucleotide
aguuucgggagcuucggca

SEQ ID NO: 238106 - RNA, 19 nt, Artificial Sequence
  Description of Artificial Sequence: Synthetic oligonucleotide
ugguacauucaguaggaaa

SEQ ID NO: 238107 - RNA, 19 nt, Artificial Sequence
  Description of Artificial Sequence: Synthetic oligonucleotide
uguggagcaaggaaaccaa

SEQ ID NO: 238108 - RNA, 19 nt, Artificial Sequence
  Description of Artificial Sequence: Synthetic oligonucleotide
acuacguauagagcuagag

SEQ ID NO: 238109 - RNA, 19 nt, Artificial Sequence
  Description of Artificial Sequence: Synthetic oligonucleotide
ucuugucgguuuauuggcc

SEQ ID NO: 238110 - RNA, 19 nt, Artificial Sequence
  Description of Artificial Sequence: Synthetic oligonucleotide
caucccaccguaagcauag

SEQ ID NO: 238111 - RNA, 19 nt, Artificial Sequence
  Description of Artificial Sequence: Synthetic oligonucleotide
agaggguagccaucuuggc

SEQ ID NO: 238112 - RNA, 19 nt, Artificial Sequence
  Description of Artificial Sequence: Synthetic oligonucleotide
gcaauguacaaaucuuggg

SEQ ID NO: 238113 - RNA, 19 nt, Artificial Sequence
  Description of Artificial Sequence: Synthetic oligonucleotide
uugaaaaucccugcacccc

SEQ ID NO: 238114 - RNA, 19 nt, Artificial Sequence
  Description of Artificial Sequence: Synthetic oligonucleotide
auuaacauucaggaagccu

SEQ ID NO: 238115 - RNA, 19 nt, Artificial Sequence
  Description of Artificial Sequence: Synthetic oligonucleotide
gaaccaguggccuucccac

SEQ ID NO: 238116 - RNA, 19 nt, Artificial Sequence
  Description of Artificial Sequence: Synthetic oligonucleotide
accauugaaaaucccugca

SEQ ID NO: 238117 - RNA, 19 nt, Artificial Sequence
  Description of Artificial Sequence: Synthetic oligonucleotide
cugaaacucacaauauuga

SEQ ID NO: 238118 - RNA, 19 nt, Artificial Sequence
  Description of Artificial Sequence: Synthetic oligonucleotide
ugaaguuguaaggguaggc

SEQ ID NO: 238119 - RNA, 19 nt, Artificial Sequence
  Description of Artificial Sequence: Synthetic oligonucleotide
aaacucaccucccuccaaa

SEQ ID NO: 238120 - RNA, 19 nt, Artificial Sequence
  Description of Artificial Sequence: Synthetic oligonucleotide
gaaguuguaaggguaggca

SEQ ID NO: 238121 - RNA, 19 nt, Artificial Sequence
  Description of Artificial Sequence: Synthetic oligonucleotide
uuccgcuguauauauagau

SEQ ID NO: 238122 - RNA, 19 nt, Artificial Sequence
  Description of Artificial Sequence: Synthetic oligonucleotide
auauuuauauauauauaua

SEQ ID NO: 238123 - RNA, 19 nt, Artificial Sequence
  Description of Artificial Sequence: Synthetic oligonucleotide
uucacugcguagccaaaga

SEQ ID NO: 238124 - RNA, 19 nt, Artificial Sequence
  Description of Artificial Sequence: Synthetic oligonucleotide
acuagucccucauucccag

SEQ ID NO: 238125 - RNA, 19 nt, Artificial Sequence
  Description of Artificial Sequence: Synthetic oligonucleotide
gugacuuuggcaguccucc

SEQ ID NO: 238126 - RNA, 19 nt, Artificial Sequence
  Description of Artificial Sequence: Synthetic oligonucleotide
aauuagggauuagggacca

SEQ ID NO: 238127 - RNA, 19 nt, Artificial Sequence
  Description of Artificial Sequence: Synthetic oligonucleotide
guuucgggagcuucggcag

SEQ ID NO: 238128 - RNA, 19 nt, Artificial Sequence
  Description of Artificial Sequence: Synthetic oligonucleotide
ugaucaucuucaagugaca

SEQ ID NO: 238129 - RNA, 19 nt, Artificial Sequence
  Description of Artificial Sequence: Synthetic oligonucleotide
ucgguuuauuggccuagag

SEQ ID NO: 238130 - RNA, 19 nt, Artificial Sequence
  Description of Artificial Sequence: Synthetic oligonucleotide
ugguaauaugggaaauauc

SEQ ID NO: 238131 - RNA, 19 nt, Artificial Sequence
  Description of Artificial Sequence: Synthetic oligonucleotide
gagcgaagcaguuucggga

SEQ ID NO: 238132 - RNA, 19 nt, Artificial Sequence
  Description of Artificial Sequence: Synthetic oligonucleotide
auauauuuauauauauaua

SEQ ID NO: 238133 - RNA, 19 nt, Artificial Sequence
  Description of Artificial Sequence: Synthetic oligonucleotide
ucacuacguauagagcuag

SEQ ID NO: 238134 - RNA, 19 nt, Artificial Sequence
  Description of Artificial Sequence: Synthetic oligonucleotide
ucacugcguagccaaagac

SEQ ID NO: 238135 - RNA, 19 nt, Artificial Sequence
  Description of Artificial Sequence: Synthetic oligonucleotide
gcuaaccacacaucaaacc

SEQ ID NO: 238136 - RNA, 19 nt, Artificial Sequence
  Description of Artificial Sequence: Synthetic oligonucleotide
cacacauuagggaggcccc

SEQ ID NO: 238137 - RNA, 19 nt, Artificial Sequence
  Description of Artificial Sequence: Synthetic oligonucleotide
uccuugacaucacuagguc

SEQ ID NO: 238138 - RNA, 19 nt, Artificial Sequence
  Description of Artificial Sequence: Synthetic oligonucleotide
ucccacuagucccucauuc

SEQ ID NO: 238139 - RNA, 19 nt, Artificial Sequence
  Description of Artificial Sequence: Synthetic oligonucleotide
uuggguucucucaaccccu

SEQ ID NO: 238140 - RNA, 19 nt, Artificial Sequence
  Description of Artificial Sequence: Synthetic oligonucleotide
agaaccaguggccuuccca

SEQ ID NO: 238141 - RNA, 19 nt, Artificial Sequence
  Description of Artificial Sequence: Synthetic oligonucleotide
ugagcugguugguaauaug

SEQ ID NO: 238142 - RNA, 19 nt, Artificial Sequence
  Description of Artificial Sequence: Synthetic oligonucleotide
gcaaauuagggauuaggga

SEQ ID NO: 238143 - RNA, 19 nt, Artificial Sequence
  Description of Artificial Sequence: Synthetic oligonucleotide
uggaagcuauucuucuuac

SEQ ID NO: 238144 - RNA, 19 nt, Artificial Sequence
  Description of Artificial Sequence: Synthetic oligonucleotide
aaucccugcacuagagugu

SEQ ID NO: 238145 - RNA, 19 nt, Artificial Sequence
  Description of Artificial Sequence: Synthetic oligonucleotide
agauauauuuauauauaua

SEQ ID NO: 238146 - RNA, 19 nt, Artificial Sequence
  Description of Artificial Sequence: Synthetic oligonucleotide
gacacuggaggagacagga

SEQ ID NO: 238147 - RNA, 19 nt, Artificial Sequence
  Description of Artificial Sequence: Synthetic oligonucleotide
ggauaaccaccaaagaccc

SEQ ID NO: 238148 - RNA, 19 nt, Artificial Sequence
  Description of Artificial Sequence: Synthetic oligonucleotide
uuagggaggccccacuuuu

SEQ ID NO: 238149 - RNA, 19 nt, Artificial Sequence
  Description of Artificial Sequence: Synthetic oligonucleotide
caaagacccuucucagggg

SEQ ID NO: 238150 - RNA, 19 nt, Artificial Sequence
  Description of Artificial Sequence: Synthetic oligonucleotide
agaauuggaaacacacaca

SEQ ID NO: 238151 - RNA, 19 nt, Artificial Sequence
  Description of Artificial Sequence: Synthetic oligonucleotide
uugacaucacuaggucugg

SEQ ID NO: 238152 - RNA, 19 nt, Artificial Sequence
  Description of Artificial Sequence: Synthetic oligonucleotide
cuagagucuagaauucuaa

SEQ ID NO: 238153 - RNA, 19 nt, Artificial Sequence
  Description of Artificial Sequence: Synthetic oligonucleotide
cauagggacccugaccagg

SEQ ID NO: 238154 - RNA, 19 nt, Artificial Sequence
  Description of Artificial Sequence: Synthetic oligonucleotide
gauaccccaaagcccacca

SEQ ID NO: 238155 - RNA, 19 nt, Artificial Sequence
  Description of Artificial Sequence: Synthetic oligonucleotide
uacauucaguaggaaauuc

SEQ ID NO: 238156 - RNA, 19 nt, Artificial Sequence
  Description of Artificial Sequence: Synthetic oligonucleotide
caauaccugaaacucacaa

SEQ ID NO: 238157 - RNA, 19 nt, Artificial Sequence
  Description of Artificial Sequence: Synthetic oligonucleotide
uaugggaaauauccaucua

SEQ ID NO: 238158 - RNA, 19 nt, Artificial Sequence
  Description of Artificial Sequence: Synthetic oligonucleotide
gauuaacauucaggaagcc

SEQ ID NO: 238159 - RNA, 19 nt, Artificial Sequence
  Description of Artificial Sequence: Synthetic oligonucleotide
cccuccgugauuaacauuc

SEQ ID NO: 238160 - RNA, 19 nt, Artificial Sequence
  Description of Artificial Sequence: Synthetic oligonucleotide
auagagcuagagucuagaa

SEQ ID NO: 238161 - RNA, 19 nt, Artificial Sequence
  Description of Artificial Sequence: Synthetic oligonucleotide
ggggaucuggcuuuagugc

SEQ ID NO: 238162 - RNA, 19 nt, Artificial Sequence
  Description of Artificial Sequence: Synthetic oligonucleotide
agagaauuggaaacacaca

SEQ ID NO: 238163 - RNA, 19 nt, Artificial Sequence
  Description of Artificial Sequence: Synthetic oligonucleotide
cuagagaauuggaaacaca

SEQ ID NO: 238164 - RNA, 19 nt, Artificial Sequence
  Description of Artificial Sequence: Synthetic oligonucleotide
ugucgguuuauuggccuag

SEQ ID NO: 238165 - RNA, 19 nt, Artificial Sequence
  Description of Artificial Sequence: Synthetic oligonucleotide
ggcuuagccccaaagaagc

SEQ ID NO: 238166 - RNA, 19 nt, Artificial Sequence
  Description of Artificial Sequence: Synthetic oligonucleotide
auagggacccugaccaggg

SEQ ID NO: 238167 - RNA, 19 nt, Artificial Sequence
  Description of Artificial Sequence: Synthetic oligonucleotide
cugaaguuguaaggguagg

SEQ ID NO: 238168 - RNA, 19 nt, Artificial Sequence
  Description of Artificial Sequence: Synthetic oligonucleotide
uugugguuccgcuguauau

SEQ ID NO: 238169 - RNA, 19 nt, Artificial Sequence
  Description of Artificial Sequence: Synthetic oligonucleotide
ggagcgaagcaguuucggg

SEQ ID NO: 238170 - RNA, 19 nt, Artificial Sequence
  Description of Artificial Sequence: Synthetic oligonucleotide
caggggaacuccugcacag

SEQ ID NO: 238171 - RNA, 19 nt, Artificial Sequence
  Description of Artificial Sequence: Synthetic oligonucleotide
cuccacaguaggucagagg

SEQ ID NO: 238172 - RNA, 19 nt, Artificial Sequence
  Description of Artificial Sequence: Synthetic oligonucleotide
agggauuagggaccauuga

SEQ ID NO: 238173 - RNA, 19 nt, Artificial Sequence
  Description of Artificial Sequence: Synthetic oligonucleotide
uggucuaaucuagaagaaa

SEQ ID NO: 238174 - RNA, 19 nt, Artificial Sequence
  Description of Artificial Sequence: Synthetic oligonucleotide
cuauaaaggccagaagaga

SEQ ID NO: 238175 - RNA, 19 nt, Artificial Sequence
  Description of Artificial Sequence: Synthetic oligonucleotide
uuagggauuagggaccauu

SEQ ID NO: 238176 - RNA, 19 nt, Artificial Sequence
  Description of Artificial Sequence: Synthetic oligonucleotide
agacgaguggguaggguuc

SEQ ID NO: 238177 - RNA, 19 nt, Artificial Sequence
  Description of Artificial Sequence: Synthetic oligonucleotide
ggccuagagaauuggaaac

SEQ ID NO: 238178 - RNA, 19 nt, Artificial Sequence
  Description of Artificial Sequence: Synthetic oligonucleotide
ugaggacaccugcaucucu

SEQ ID NO: 238179 - RNA, 19 nt, Artificial Sequence
  Description of Artificial Sequence: Synthetic oligonucleotide
ugggcuaaccacacaucaa

SEQ ID NO: 238180 - RNA, 19 nt, Artificial Sequence
  Description of Artificial Sequence: Synthetic oligonucleotide
cuggcaucccaccguaagc

SEQ ID NO: 238181 - RNA, 19 nt, Artificial Sequence
  Description of Artificial Sequence: Synthetic oligonucleotide
agugcucacccuacauccc

SEQ ID NO: 238182 - RNA, 19 nt, Artificial Sequence
  Description of Artificial Sequence: Synthetic oligonucleotide
agacccuucucaggggugg

SEQ ID NO: 238183 - RNA, 19 nt, Artificial Sequence
  Description of Artificial Sequence: Synthetic oligonucleotide
ggaccauugaaaaucccug

SEQ ID NO: 238184 - RNA, 19 nt, Artificial Sequence
  Description of Artificial Sequence: Synthetic oligonucleotide
gguggggauaccccaaagc

SEQ ID NO: 238185 - RNA, 19 nt, Artificial Sequence
  Description of Artificial Sequence: Synthetic oligonucleotide
ccgugauuaacauucagga

SEQ ID NO: 238186 - RNA, 19 nt, Artificial Sequence
  Description of Artificial Sequence: Synthetic oligonucleotide
uuucgggagcuucggcagc

SEQ ID NO: 238187 - RNA, 19 nt, Artificial Sequence
  Description of Artificial Sequence: Synthetic oligonucleotide
guggggaacugagucaaag

SEQ ID NO: 238188 - RNA, 19 nt, Artificial Sequence
  Description of Artificial Sequence: Synthetic oligonucleotide
cuugggcuaaccacacauc

SEQ ID NO: 238189 - RNA, 19 nt, Artificial Sequence
  Description of Artificial Sequence: Synthetic oligonucleotide
gaccaggguuaacuagugc

SEQ ID NO: 238190 - RNA, 19 nt, Artificial Sequence
  Description of Artificial Sequence: Synthetic oligonucleotide
guaggcgaugacaggagug

SEQ ID NO: 238191 - RNA, 19 nt, Artificial Sequence
  Description of Artificial Sequence: Synthetic oligonucleotide
gguuaacuagugcaaauua

SEQ ID NO: 238192 - RNA, 19 nt, Artificial Sequence
  Description of Artificial Sequence: Synthetic oligonucleotide
uaccuggugcucaaauuuu

SEQ ID NO: 238193 - RNA, 19 nt, Artificial Sequence
  Description of Artificial Sequence: Synthetic oligonucleotide
acguauagagcuagagucu

SEQ ID NO: 238194 - RNA, 19 nt, Artificial Sequence
  Description of Artificial Sequence: Synthetic oligonucleotide
agcgacugggagagcagcc

SEQ ID NO: 238195 - RNA, 19 nt, Artificial Sequence
  Description of Artificial Sequence: Synthetic oligonucleotide
cuauuuggucuaaucuaga

SEQ ID NO: 238196 - RNA, 19 nt, Artificial Sequence
  Description of Artificial Sequence: Synthetic oligonucleotide
ugggguauaaggugcuauu

SEQ ID NO: 238197 - RNA, 19 nt, Artificial Sequence
  Description of Artificial Sequence: Synthetic oligonucleotide
uuccccgcuggaaggaaac

SEQ ID NO: 238198 - RNA, 19 nt, Artificial Sequence
  Description of Artificial Sequence: Synthetic oligonucleotide
uggguccucacuacguaua

SEQ ID NO: 238199 - RNA, 19 nt, Artificial Sequence
  Description of Artificial Sequence: Synthetic oligonucleotide
cuccgugauuaacauucag

SEQ ID NO: 238200 - RNA, 19 nt, Artificial Sequence
  Description of Artificial Sequence: Synthetic oligonucleotide
ucuugcgugcuguggcaca

SEQ ID NO: 238201 - RNA, 19 nt, Artificial Sequence
  Description of Artificial Sequence: Synthetic oligonucleotide
ugccucugcacaugucggc

SEQ ID NO: 238202 - RNA, 19 nt, Artificial Sequence
  Description of Artificial Sequence: Synthetic oligonucleotide
uggcaguccuccauccgcu

SEQ ID NO: 238203 - RNA, 19 nt, Artificial Sequence
  Description of Artificial Sequence: Synthetic oligonucleotide
gggaaauauccaucuaauc

SEQ ID NO: 238204 - RNA, 19 nt, Artificial Sequence
  Description of Artificial Sequence: Synthetic oligonucleotide
ucccgacugccuccuauca

SEQ ID NO: 238205 - RNA, 19 nt, Artificial Sequence
  Description of Artificial Sequence: Synthetic oligonucleotide
uagugcaaauuagggauua

SEQ ID NO: 238206 - RNA, 19 nt, Artificial Sequence
  Description of Artificial Sequence: Synthetic oligonucleotide
agggcacggacugacaaga

SEQ ID NO: 238207 - RNA, 19 nt, Artificial Sequence
  Description of Artificial Sequence: Synthetic oligonucleotide
gagaugaccggguccugga

SEQ ID NO: 238208 - RNA, 19 nt, Artificial Sequence
  Description of Artificial Sequence: Synthetic oligonucleotide
guauagagcuagagucuag

SEQ ID NO: 238209 - RNA, 19 nt, Artificial Sequence
  Description of Artificial Sequence: Synthetic oligonucleotide
auaccccaaagcccaccag

SEQ ID NO: 238210 - RNA, 19 nt, Artificial Sequence
  Description of Artificial Sequence: Synthetic oligonucleotide
ugcgugcuguggcacagaa

SEQ ID NO: 238211 - RNA, 19 nt, Artificial Sequence
  Description of Artificial Sequence: Synthetic oligonucleotide
uucccuccgugauuaacau

SEQ ID NO: 238212 - RNA, 19 nt, Artificial Sequence
  Description of Artificial Sequence: Synthetic oligonucleotide
cuguggagcaaggaaacca

SEQ ID NO: 238213 - RNA, 19 nt, Artificial Sequence
  Description of Artificial Sequence: Synthetic oligonucleotide
gggauuagggaccauugaa

SEQ ID NO: 238214 - RNA, 19 nt, Artificial Sequence
  Description of Artificial Sequence: Synthetic oligonucleotide
cacggacugacaagacuug

SEQ ID NO: 238215 - RNA, 19 nt, Artificial Sequence
  Description of Artificial Sequence: Synthetic oligonucleotide
auccgcucuccaucagagg

SEQ ID NO: 238216 - RNA, 19 nt, Artificial Sequence
  Description of Artificial Sequence: Synthetic oligonucleotide
gccauagacgaguggguag

SEQ ID NO: 238217 - RNA, 19 nt, Artificial Sequence
  Description of Artificial Sequence: Synthetic oligonucleotide
ccauugaaaaucccugcac

SEQ ID NO: 238218 - RNA, 19 nt, Artificial Sequence
  Description of Artificial Sequence: Synthetic oligonucleotide
aucccugcacuagagugug

SEQ ID NO: 238219 - RNA, 19 nt, Artificial Sequence
  Description of Artificial Sequence: Synthetic oligonucleotide
ggauucacugcguagccaa

SEQ ID NO: 238220 - RNA, 19 nt, Artificial Sequence
  Description of Artificial Sequence: Synthetic oligonucleotide
acugggagagcagccaagu

SEQ ID NO: 238221 - RNA, 19 nt, Artificial Sequence
  Description of Artificial Sequence: Synthetic oligonucleotide
cauagacgaguggguaggg

SEQ ID NO: 238222 - RNA, 19 nt, Artificial Sequence
  Description of Artificial Sequence: Synthetic oligonucleotide
ggguacacauagcugcccc

SEQ ID NO: 238223 - RNA, 19 nt, Artificial Sequence
  Description of Artificial Sequence: Synthetic oligonucleotide
cuacguauagagcuagagu

SEQ ID NO: 238224 - RNA, 19 nt, Artificial Sequence
  Description of Artificial Sequence: Synthetic oligonucleotide
gcacaugucggcucagggc

SEQ ID NO: 238225 - RNA, 19 nt, Artificial Sequence
  Description of Artificial Sequence: Synthetic oligonucleotide
guggggagacuacaaucac

SEQ ID NO: 238226 - RNA, 19 nt, Artificial Sequence
  Description of Artificial Sequence: Synthetic oligonucleotide
gcaaaguugguggggauac

SEQ ID NO: 238227 - RNA, 19 nt, Artificial Sequence
  Description of Artificial Sequence: Synthetic oligonucleotide
aggauaaagcuagggugga

SEQ ID NO: 238228 - RNA, 19 nt, Artificial Sequence
  Description of Artificial Sequence: Synthetic oligonucleotide
guaggaccauguugagagc

SEQ ID NO: 238229 - RNA, 19 nt, Artificial Sequence
  Description of Artificial Sequence: Synthetic oligonucleotide
uggagugacuggugaggac

SEQ ID NO: 238230 - RNA, 19 nt, Artificial Sequence
  Description of Artificial Sequence: Synthetic oligonucleotide
gacugccuccuaucagggc

SEQ ID NO: 238231 - RNA, 19 nt, Artificial Sequence
  Description of Artificial Sequence: Synthetic oligonucleotide
ccugaccaggguuaacuag

SEQ ID NO: 238232 - RNA, 19 nt, Artificial Sequence
  Description of Artificial Sequence: Synthetic oligonucleotide
uccauccgcucuccaucag

SEQ ID NO: 238233 - RNA, 19 nt, Artificial Sequence
  Description of Artificial Sequence: Synthetic oligonucleotide
ccguaagcauaguucauug

SEQ ID NO: 238234 - RNA, 19 nt, Artificial Sequence
  Description of Artificial Sequence: Synthetic oligonucleotide
ggagugacuggugaggaca

SEQ ID NO: 238235 - RNA, 19 nt, Artificial Sequence
  Description of Artificial Sequence: Synthetic oligonucleotide
auuggccuagagaauugga

SEQ ID NO: 238236 - RNA, 19 nt, Artificial Sequence
  Description of Artificial Sequence: Synthetic oligonucleotide
ugccuccccacucgaugag

SEQ ID NO: 238237 - RNA, 19 nt, Artificial Sequence
  Description of Artificial Sequence: Synthetic oligonucleotide
accguaagcauaguucauu

SEQ ID NO: 238238 - RNA, 19 nt, Artificial Sequence
  Description of Artificial Sequence: Synthetic oligonucleotide
gagcuucggcagcagcacc

SEQ ID NO: 238239 - RNA, 19 nt, Artificial Sequence
  Description of Artificial Sequence: Synthetic oligonucleotide
ccauagacgaguggguagg

SEQ ID NO: 238240 - RNA, 19 nt, Artificial Sequence
  Description of Artificial Sequence: Synthetic oligonucleotide
gggcuaaccacacaucaaa

SEQ ID NO: 238241 - RNA, 19 nt, Artificial Sequence
  Description of Artificial Sequence: Synthetic oligonucleotide
uugucgguuuauuggccua

SEQ ID NO: 238242 - RNA, 19 nt, Artificial Sequence
  Description of Artificial Sequence: Synthetic oligonucleotide
gacagaggaggaauggagu

SEQ ID NO: 238243 - RNA, 19 nt, Artificial Sequence
  Description of Artificial Sequence: Synthetic oligonucleotide
guuccccuacucccuuagg

SEQ ID NO: 238244 - RNA, 19 nt, Artificial Sequence
  Description of Artificial Sequence: Synthetic oligonucleotide
cacuagucccucauuccca

SEQ ID NO: 238245 - RNA, 19 nt, Artificial Sequence
  Description of Artificial Sequence: Synthetic oligonucleotide
cucacuacguauagagcua

SEQ ID NO: 238246 - RNA, 19 nt, Artificial Sequence
  Description of Artificial Sequence: Synthetic oligonucleotide
ggggauaccccaaagccca

SEQ ID NO: 238247 - RNA, 19 nt, Artificial Sequence
  Description of Artificial Sequence: Synthetic oligonucleotide
uucgggagcuucggcagca

SEQ ID NO: 238248 - RNA, 19 nt, Artificial Sequence
  Description of Artificial Sequence: Synthetic oligonucleotide
cagguaggaccauguugag

SEQ ID NO: 238249 - RNA, 19 nt, Artificial Sequence
  Description of Artificial Sequence: Synthetic oligonucleotide
cugcguagccaaagacccc

SEQ ID NO: 238250 - RNA, 19 nt, Artificial Sequence
  Description of Artificial Sequence: Synthetic oligonucleotide
ucccaccguaagcauaguu

SEQ ID NO: 238251 - RNA, 19 nt, Artificial Sequence
  Description of Artificial Sequence: Synthetic oligonucleotide
cucaggcuguggucaagac

SEQ ID NO: 238252 - RNA, 19 nt, Artificial Sequence
  Description of Artificial Sequence: Synthetic oligonucleotide
aucacacauuagggaggcc

SEQ ID NO: 238253 - RNA, 19 nt, Artificial Sequence
  Description of Artificial Sequence: Synthetic oligonucleotide
agacuacaggucucaggau

SEQ ID NO: 238254 - RNA, 19 nt, Artificial Sequence
  Description of Artificial Sequence: Synthetic oligonucleotide
ccaccguaagcauaguuca

SEQ ID NO: 238255 - RNA, 19 nt, Artificial Sequence
  Description of Artificial Sequence: Synthetic oligonucleotide
ugcuucauaccuggugcuc

SEQ ID NO: 238256 - RNA, 19 nt, Artificial Sequence
  Description of Artificial Sequence: Synthetic oligonucleotide
auagacgaguggguagggu

SEQ ID NO: 238257 - RNA, 19 nt, Artificial Sequence
  Description of Artificial Sequence: Synthetic oligonucleotide
ccucacuacguauagagcu

SEQ ID NO: 238258 - RNA, 19 nt, Artificial Sequence
  Description of Artificial Sequence: Synthetic oligonucleotide
auugucuugucgguuuauu

SEQ ID NO: 238259 - RNA, 19 nt, Artificial Sequence
  Description of Artificial Sequence: Synthetic oligonucleotide
ggguccucacuacguauag

SEQ ID NO: 238260 - RNA, 19 nt, Artificial Sequence
  Description of Artificial Sequence: Synthetic oligonucleotide
uggaaaccaucuggaguga

SEQ ID NO: 238261 - RNA, 19 nt, Artificial Sequence
  Description of Artificial Sequence: Synthetic oligonucleotide
cuuuauuuguugccaaauu

SEQ ID NO: 238262 - RNA, 19 nt, Artificial Sequence
  Description of Artificial Sequence: Synthetic oligonucleotide
agguggguacacauagcug

SEQ ID NO: 238263 - RNA, 19 nt, Artificial Sequence
  Description of Artificial Sequence: Synthetic oligonucleotide
caguuucgggagcuucggc

SEQ ID NO: 238264 - RNA, 19 nt, Artificial Sequence
  Description of Artificial Sequence: Synthetic oligonucleotide
cuugucgguuuauuggccu

SEQ ID NO: 238265 - RNA, 19 nt, Artificial Sequence
  Description of Artificial Sequence: Synthetic oligonucleotide
ggaaacauagggacccuga

SEQ ID NO: 238266 - RNA, 19 nt, Artificial Sequence
  Description of Artificial Sequence: Synthetic oligonucleotide
agguaggaccauguugaga

SEQ ID NO: 238267 - RNA, 19 nt, Artificial Sequence
  Description of Artificial Sequence: Synthetic oligonucleotide
agagugugauggggcuccc

SEQ ID NO: 238268 - RNA, 19 nt, Artificial Sequence
  Description of Artificial Sequence: Synthetic oligonucleotide
guacaaaucuugggcuaac

SEQ ID NO: 238269 - RNA, 19 nt, Artificial Sequence
  Description of Artificial Sequence: Synthetic oligonucleotide
aucuggguccucacuacgu

SEQ ID NO: 238270 - RNA, 19 nt, Artificial Sequence
  Description of Artificial Sequence: Synthetic oligonucleotide
guucaggguagaaggugac

SEQ ID NO: 238271 - RNA, 19 nt, Artificial Sequence
  Description of Artificial Sequence: Synthetic oligonucleotide
acggacugacaagacuuga

SEQ ID NO: 238272 - RNA, 19 nt, Artificial Sequence
  Description of Artificial Sequence: Synthetic oligonucleotide
ucuugugguuccgcuguau

SEQ ID NO: 238273 - RNA, 19 nt, Artificial Sequence
  Description of Artificial Sequence: Synthetic oligonucleotide
uguggggaacugagucaaa

SEQ ID NO: 238274 - RNA, 19 nt, Artificial Sequence
  Description of Artificial Sequence: Synthetic oligonucleotide
cacauuagggaggccccac

SEQ ID NO: 238275 - RNA, 19 nt, Artificial Sequence
  Description of Artificial Sequence: Synthetic oligonucleotide
guaggucagaggguagcca

SEQ ID NO: 238276 - RNA, 19 nt, Artificial Sequence
  Description of Artificial Sequence: Synthetic oligonucleotide
gacgaguggguaggguuca

SEQ ID NO: 238277 - RNA, 19 nt, Artificial Sequence
  Description of Artificial Sequence: Synthetic oligonucleotide
gaucccuguggagcaagga

SEQ ID NO: 238278 - RNA, 19 nt, Artificial Sequence
  Description of Artificial Sequence: Synthetic oligonucleotide
cucccgacugccuccuauc

SEQ ID NO: 238279 - RNA, 19 nt, Artificial Sequence
  Description of Artificial Sequence: Synthetic oligonucleotide
cuccauccgcucuccauca

SEQ ID NO: 238280 - RNA, 19 nt, Artificial Sequence
  Description of Artificial Sequence: Synthetic oligonucleotide
cuucauaccuggugcucaa

SEQ ID NO: 238281 - RNA, 19 nt, Artificial Sequence
  Description of Artificial Sequence: Synthetic oligonucleotide
gggaucuggcuuuagugcu

SEQ ID NO: 238282 - RNA, 19 nt, Artificial Sequence
  Description of Artificial Sequence: Synthetic oligonucleotide
ugguuccgcuguauauaua

SEQ ID NO: 238283 - RNA, 19 nt, Artificial Sequence
  Description of Artificial Sequence: Synthetic oligonucleotide
aggaccauguugagagcga

SEQ ID NO: 238284 - RNA, 19 nt, Artificial Sequence
  Description of Artificial Sequence: Synthetic oligonucleotide
cuuccagcucaaauacaua

SEQ ID NO: 238285 - RNA, 19 nt, Artificial Sequence
  Description of Artificial Sequence: Synthetic oligonucleotide
gugguuccgcuguauauau

SEQ ID NO: 238286 - RNA, 19 nt, Artificial Sequence
  Description of Artificial Sequence: Synthetic oligonucleotide
guuccgcuguauauauaga

SEQ ID NO: 238287 - RNA, 19 nt, Artificial Sequence
  Description of Artificial Sequence: Synthetic oligonucleotide
caaccccugccuguucccc

SEQ ID NO: 238288 - RNA, 19 nt, Artificial Sequence
  Description of Artificial Sequence: Synthetic oligonucleotide
caacgcugccuuuggagua

SEQ ID NO: 238289 - RNA, 19 nt, Artificial Sequence
  Description of Artificial Sequence: Synthetic oligonucleotide
aucuuccccgcuggaagga

SEQ ID NO: 238290 - RNA, 19 nt, Artificial Sequence
  Description of Artificial Sequence: Synthetic oligonucleotide
gugacccuucccuccguga

SEQ ID NO: 238291 - RNA, 19 nt, Artificial Sequence
  Description of Artificial Sequence: Synthetic oligonucleotide
ucuuccccgcuggaaggaa

SEQ ID NO: 238292 - RNA, 19 nt, Artificial Sequence
  Description of Artificial Sequence: Synthetic oligonucleotide
caucccuaggcugggaucu

SEQ ID NO: 238293 - RNA, 19 nt, Artificial Sequence
  Description of Artificial Sequence: Synthetic oligonucleotide
cacuacguauagagcuaga

SEQ ID NO: 238294 - RNA, 19 nt, Artificial Sequence
  Description of Artificial Sequence: Synthetic oligonucleotide
ggaacuugguacauucagu

SEQ ID NO: 238295 - RNA, 19 nt, Artificial Sequence
  Description of Artificial Sequence: Synthetic oligonucleotide
ucccuccgugauuaacauu

SEQ ID NO: 238296 - RNA, 19 nt, Artificial Sequence
  Description of Artificial Sequence: Synthetic oligonucleotide
ccuaucagggccaggggaa

SEQ ID NO: 238297 - RNA, 19 nt, Artificial Sequence
  Description of Artificial Sequence: Synthetic oligonucleotide
ccgcuguauauauagauau

SEQ ID NO: 238298 - RNA, 19 nt, Artificial Sequence
  Description of Artificial Sequence: Synthetic oligonucleotide
ggaucccuguggagcaagg

SEQ ID NO: 238299 - RNA, 19 nt, Artificial Sequence
  Description of Artificial Sequence: Synthetic oligonucleotide
ggaaaccaucuggagugac

SEQ ID NO: 238300 - RNA, 19 nt, Artificial Sequence
  Description of Artificial Sequence: Synthetic oligonucleotide
agugacuggugaggacagu

SEQ ID NO: 238301 - RNA, 19 nt, Artificial Sequence
  Description of Artificial Sequence: Synthetic oligonucleotide
ggauaccccaaagcccacc

SEQ ID NO: 238302 - RNA, 19 nt, Artificial Sequence
  Description of Artificial Sequence: Synthetic oligonucleotide
gcuagagucuagaauucua

SEQ ID NO: 238303 - RNA, 19 nt, Artificial Sequence
  Description of Artificial Sequence: Synthetic oligonucleotide
guacauucaguaggaaauu

SEQ ID NO: 238304 - RNA, 19 nt, Artificial Sequence
  Description of Artificial Sequence: Synthetic oligonucleotide
ggguauaaggugcuauuuu

SEQ ID NO: 238305 - RNA, 19 nt, Artificial Sequence
  Description of Artificial Sequence: Synthetic oligonucleotide
cgacugccuccuaucaggg

SEQ ID NO: 238306 - RNA, 19 nt, Artificial Sequence
  Description of Artificial Sequence: Synthetic oligonucleotide
cuaggguggaaggcaaugu

SEQ ID NO: 238307 - RNA, 19 nt, Artificial Sequence
  Description of Artificial Sequence: Synthetic oligonucleotide
ccagcucaaauacauauuu

SEQ ID NO: 238308 - RNA, 19 nt, Artificial Sequence
  Description of Artificial Sequence: Synthetic oligonucleotide
ggugacuuuggcaguccuc

SEQ ID NO: 238309 - RNA, 19 nt, Artificial Sequence
  Description of Artificial Sequence: Synthetic oligonucleotide
ggguucucucaaccccugc

SEQ ID NO: 238310 - RNA, 19 nt, Artificial Sequence
  Description of Artificial Sequence: Synthetic oligonucleotide
gucgguuuauuggccuaga

SEQ ID NO: 238311 - RNA, 19 nt, Artificial Sequence
  Description of Artificial Sequence: Synthetic oligonucleotide
ucccugcaccccaucccua

SEQ ID NO: 238312 - RNA, 19 nt, Artificial Sequence
  Description of Artificial Sequence: Synthetic oligonucleotide
aggugcuauuuuggaggca

SEQ ID NO: 238313 - RNA, 19 nt, Artificial Sequence
  Description of Artificial Sequence: Synthetic oligonucleotide
cgugauuaacauucaggaa

SEQ ID NO: 238314 - RNA, 19 nt, Artificial Sequence
  Description of Artificial Sequence: Synthetic oligonucleotide
gggagacuacaaucacaca

SEQ ID NO: 238315 - RNA, 19 nt, Artificial Sequence
  Description of Artificial Sequence: Synthetic oligonucleotide
ggcuuugucacaacuuuau

SEQ ID NO: 238316 - RNA, 19 nt, Artificial Sequence
  Description of Artificial Sequence: Synthetic oligonucleotide
ggcacggacugacaagacu

SEQ ID NO: 238317 - RNA, 19 nt, Artificial Sequence
  Description of Artificial Sequence: Synthetic oligonucleotide
ggaucuggcuuuagugcuc

SEQ ID NO: 238318 - RNA, 19 nt, Artificial Sequence
  Description of Artificial Sequence: Synthetic oligonucleotide
acgaguggguaggguucag

SEQ ID NO: 238319 - RNA, 19 nt, Artificial Sequence
  Description of Artificial Sequence: Synthetic oligonucleotide
gaggacaccugcaucucuu

SEQ ID NO: 238320 - RNA, 19 nt, Artificial Sequence
  Description of Artificial Sequence: Synthetic oligonucleotide
gaccauguugagagcgacu

SEQ ID NO: 238321 - RNA, 19 nt, Artificial Sequence
  Description of Artificial Sequence: Synthetic oligonucleotide
ugagagcgacugggagagc

SEQ ID NO: 238322 - RNA, 19 nt, Artificial Sequence
  Description of Artificial Sequence: Synthetic oligonucleotide
ccaucccuaggcugggauc

SEQ ID NO: 238323 - RNA, 19 nt, Artificial Sequence
  Description of Artificial Sequence: Synthetic oligonucleotide
auuagggauuagggaccau

SEQ ID NO: 238324 - RNA, 19 nt, Artificial Sequence
  Description of Artificial Sequence: Synthetic oligonucleotide
gaccggguccuggagcgaa

SEQ ID NO: 238325 - RNA, 19 nt, Artificial Sequence
  Description of Artificial Sequence: Synthetic oligonucleotide
gagugugauggggcuccca

SEQ ID NO: 238326 - RNA, 19 nt, Artificial Sequence
  Description of Artificial Sequence: Synthetic oligonucleotide
ccugcaccccaucccuagg

SEQ ID NO: 238327 - RNA, 19 nt, Artificial Sequence
  Description of Artificial Sequence: Synthetic oligonucleotide
ccuugacaucacuaggucu

SEQ ID NO: 238328 - RNA, 19 nt, Artificial Sequence
  Description of Artificial Sequence: Synthetic oligonucleotide
uaaccgcaccuggcauccc

SEQ ID NO: 238329 - RNA, 19 nt, Artificial Sequence
  Description of Artificial Sequence: Synthetic oligonucleotide
ugaccggguccuggagcga

SEQ ID NO: 238330 - RNA, 19 nt, Artificial Sequence
  Description of Artificial Sequence: Synthetic oligonucleotide
gccccacuuuucaacaaga

SEQ ID NO: 238331 - RNA, 19 nt, Artificial Sequence
  Description of Artificial Sequence: Synthetic oligonucleotide
gguugguaauaugggaaau

SEQ ID NO: 238332 - RNA, 19 nt, Artificial Sequence
  Description of Artificial Sequence: Synthetic oligonucleotide
ccuucccuccgugauuaac

SEQ ID NO: 238333 - RNA, 19 nt, Artificial Sequence
  Description of Artificial Sequence: Synthetic oligonucleotide
agcuaggguggaaggcaau

SEQ ID NO: 238334 - RNA, 19 nt, Artificial Sequence
  Description of Artificial Sequence: Synthetic oligonucleotide
caccuggcaucccaccgua

SEQ ID NO: 238335 - RNA, 19 nt, Artificial Sequence
  Description of Artificial Sequence: Synthetic oligonucleotide
accggguccuggagcgaag

SEQ ID NO: 238336 - RNA, 19 nt, Artificial Sequence
  Description of Artificial Sequence: Synthetic oligonucleotide
ggccauagacgagugggua

SEQ ID NO: 238337 - RNA, 19 nt, Artificial Sequence
  Description of Artificial Sequence: Synthetic oligonucleotide
gggacccugaccaggguua

SEQ ID NO: 238338 - RNA, 19 nt, Artificial Sequence
  Description of Artificial Sequence: Synthetic oligonucleotide
ggguagccaucuuggccuc

SEQ ID NO: 238339 - RNA, 19 nt, Artificial Sequence
  Description of Artificial Sequence: Synthetic oligonucleotide
ggcaguccuccauccgcuc

SEQ ID NO: 238340 - RNA, 19 nt, Artificial Sequence
  Description of Artificial Sequence: Synthetic oligonucleotide
gcgacugggagagcagcca

SEQ ID NO: 238341 - RNA, 19 nt, Artificial Sequence
  Description of Artificial Sequence: Synthetic oligonucleotide
caccguaagcauaguucau

SEQ ID NO: 238342 - RNA, 19 nt, Artificial Sequence
  Description of Artificial Sequence: Synthetic oligonucleotide
cugcacagguggguacaca

SEQ ID NO: 238343 - RNA, 19 nt, Artificial Sequence
  Description of Artificial Sequence: Synthetic oligonucleotide
ccauccgcucuccaucaga

SEQ ID NO: 238344 - RNA, 19 nt, Artificial Sequence
  Description of Artificial Sequence: Synthetic oligonucleotide
gagugacccuucccuccgu

SEQ ID NO: 238345 - RNA, 19 nt, Artificial Sequence
  Description of Artificial Sequence: Synthetic oligonucleotide
ccuccgugauuaacauuca

SEQ ID NO: 238346 - RNA, 19 nt, Artificial Sequence
  Description of Artificial Sequence: Synthetic oligonucleotide
aucccaccguaagcauagu

SEQ ID NO: 238347 - RNA, 19 nt, Artificial Sequence
  Description of Artificial Sequence: Synthetic oligonucleotide
cguauagagcuagagucua

SEQ ID NO: 238348 - RNA, 19 nt, Artificial Sequence
  Description of Artificial Sequence: Synthetic oligonucleotide
ccggguccuggagcgaagc

SEQ ID NO: 238349 - RNA, 19 nt, Artificial Sequence
  Description of Artificial Sequence: Synthetic oligonucleotide
cauugucuugucgguuuau

SEQ ID NO: 238350 - RNA, 19 nt, Artificial Sequence
  Description of Artificial Sequence: Synthetic oligonucleotide
aucccuaggcugggaucuu

SEQ ID NO: 238351 - RNA, 19 nt, Artificial Sequence
  Description of Artificial Sequence: Synthetic oligonucleotide
gggcacggacugacaagac

SEQ ID NO: 238352 - RNA, 19 nt, Artificial Sequence
  Description of Artificial Sequence: Synthetic oligonucleotide
gcucuccccuugugagcug

SEQ ID NO: 238353 - RNA, 19 nt, Artificial Sequence
  Description of Artificial Sequence: Synthetic oligonucleotide
accuggcaucccaccguaa

SEQ ID NO: 238354 - RNA, 19 nt, Artificial Sequence
  Description of Artificial Sequence: Synthetic oligonucleotide
caaagaccccgggcaggaa

SEQ ID NO: 238355 - RNA, 19 nt, Artificial Sequence
  Description of Artificial Sequence: Synthetic oligonucleotide
gcacagguggguacacaua

SEQ ID NO: 238356 - RNA, 19 nt, Artificial Sequence
  Description of Artificial Sequence: Synthetic oligonucleotide
gccuccuaucagggccagg

SEQ ID NO: 238357 - RNA, 19 nt, Artificial Sequence
  Description of Artificial Sequence: Synthetic oligonucleotide
cugccccacugggcucccg

SEQ ID NO: 238358 - RNA, 19 nt, Artificial Sequence
  Description of Artificial Sequence: Synthetic oligonucleotide
cccacucgaugaggacacc

SEQ ID NO: 238359 - RNA, 19 nt, Artificial Sequence
  Description of Artificial Sequence: Synthetic oligonucleotide
cucccacuagucccucauu

SEQ ID NO: 238360 - RNA, 19 nt, Artificial Sequence
  Description of Artificial Sequence: Synthetic oligonucleotide
cggacugacaagacuugau

SEQ ID NO: 238361 - RNA, 19 nt, Artificial Sequence
  Description of Artificial Sequence: Synthetic oligonucleotide
ggccggugaagggcacaga

SEQ ID NO: 238362 - RNA, 19 nt, Artificial Sequence
  Description of Artificial Sequence: Synthetic oligonucleotide
aaaguaacuaugcugaggg

SEQ ID NO: 238363 - RNA, 19 nt, Artificial Sequence
  Description of Artificial Sequence: Synthetic oligonucleotide
uuaacaaugacccuuaaca

SEQ ID NO: 238364 - RNA, 19 nt, Artificial Sequence
  Description of Artificial Sequence: Synthetic oligonucleotide
aaucugaugggcuuacugc

SEQ ID NO: 238365 - RNA, 19 nt, Artificial Sequence
  Description of Artificial Sequence: Synthetic oligonucleotide
uaguccguaagucugaugg

SEQ ID NO: 238366 - RNA, 19 nt, Artificial Sequence
  Description of Artificial Sequence: Synthetic oligonucleotide
guaacagucacacacaaag

SEQ ID NO: 238367 - RNA, 19 nt, Artificial Sequence
  Description of Artificial Sequence: Synthetic oligonucleotide
agaaacguggggcagaccc

SEQ ID NO: 238368 - RNA, 19 nt, Artificial Sequence
  Description of Artificial Sequence: Synthetic oligonucleotide
uauaauacccugcaguccc

SEQ ID NO: 238369 - RNA, 19 nt, Artificial Sequence
  Description of Artificial Sequence: Synthetic oligonucleotide
aaugagaugucagaaacag

SEQ ID NO: 238370 - RNA, 19 nt, Artificial Sequence
  Description of Artificial Sequence: Synthetic oligonucleotide
aauccuaucugccccauuc

SEQ ID NO: 238371 - RNA, 19 nt, Artificial Sequence
  Description of Artificial Sequence: Synthetic oligonucleotide
aacaauauccuccauacua

SEQ ID NO: 238372 - RNA, 19 nt, Artificial Sequence
  Description of Artificial Sequence: Synthetic oligonucleotide
uuaacucucaaucugccca

SEQ ID NO: 238373 - RNA, 19 nt, Artificial Sequence
  Description of Artificial Sequence: Synthetic oligonucleotide
gauugcaaugcucaugacg

SEQ ID NO: 238374 - RNA, 19 nt, Artificial Sequence
  Description of Artificial Sequence: Synthetic oligonucleotide
uucgauaacuguauccugg

SEQ ID NO: 238375 - RNA, 19 nt, Artificial Sequence
  Description of Artificial Sequence: Synthetic oligonucleotide
cagauuagagguaaggagg

SEQ ID NO: 238376 - RNA, 19 nt, Artificial Sequence
  Description of Artificial Sequence: Synthetic oligonucleotide
cuuagaaccguuacuaacc

SEQ ID NO: 238377 - RNA, 19 nt, Artificial Sequence
  Description of Artificial Sequence: Synthetic oligonucleotide
aaagauuguguaccccgcc

SEQ ID NO: 238378 - RNA, 19 nt, Artificial Sequence
  Description of Artificial Sequence: Synthetic oligonucleotide
aaucuaaaaccauaacaga

SEQ ID NO: 238379 - RNA, 19 nt, Artificial Sequence
  Description of Artificial Sequence: Synthetic oligonucleotide
acagauuagagguaaggag

SEQ ID NO: 238380 - RNA, 19 nt, Artificial Sequence
  Description of Artificial Sequence: Synthetic oligonucleotide
  modified_base (4)..(4): a, c, u, g, unknown or other
aaungcacuggauggggag

SEQ ID NO: 238381 - RNA, 19 nt, Artificial Sequence
  Description of Artificial Sequence: Synthetic oligonucleotide
ugauuaacugggaauagga

SEQ ID NO: 238382 - RNA, 19 nt, Artificial Sequence
  Description of Artificial Sequence: Synthetic oligonucleotide
  modified_base (16)..(16): a, c, u, g, unknown or other
uacaacaggcacaaungca

SEQ ID NO: 238383 - RNA, 19 nt, Artificial Sequence
  Description of Artificial Sequence: Synthetic oligonucleotide
cauacuaaauccagcagcc

SEQ ID NO: 238384 - RNA, 19 nt, Artificial Sequence
  Description of Artificial Sequence: Synthetic oligonucleotide
acaugaggaauccuugacc

SEQ ID NO: 238385 - RNA, 19 nt, Artificial Sequence
  Description of Artificial Sequence: Synthetic oligonucleotide
auuaauggagaccacucag

SEQ ID NO: 238386 - RNA, 19 nt, Artificial Sequence
  Description of Artificial Sequence: Synthetic oligonucleotide
cucaugacguccaagacag

SEQ ID NO: 238387 - RNA, 19 nt, Artificial Sequence
  Description of Artificial Sequence: Synthetic oligonucleotide
aaaaguaacuaugcugagg

SEQ ID NO: 238388 - RNA, 19 nt, Artificial Sequence
  Description of Artificial Sequence: Synthetic oligonucleotide
uuagaaccguuacuaaccg

SEQ ID NO: 238389 - RNA, 19 nt, Artificial Sequence
  Description of Artificial Sequence: Synthetic oligonucleotide
auaguuauaggucagggua

SEQ ID NO: 238390 - RNA, 19 nt, Artificial Sequence
  Description of Artificial Sequence: Synthetic oligonucleotide
auaugauaguuauagguca

SEQ ID NO: 238391 - RNA, 19 nt, Artificial Sequence
  Description of Artificial Sequence: Synthetic oligonucleotide
ugcuauaauacccugcagu

SEQ ID NO: 238392 - RNA, 19 nt, Artificial Sequence
  Description of Artificial Sequence: Synthetic oligonucleotide
aaccguuacuaaccgaaac

SEQ ID NO: 238393 - RNA, 19 nt, Artificial Sequence
  Description of Artificial Sequence: Synthetic oligonucleotide
auaugcucggccuugguuc

SEQ ID NO: 238394 - RNA, 19 nt, Artificial Sequence
  Description of Artificial Sequence: Synthetic oligonucleotide
aucugaugggcuuacugcc

SEQ ID NO: 238395 - RNA, 19 nt, Artificial Sequence
  Description of Artificial Sequence: Synthetic oligonucleotide
cauaugauaguuauagguc

SEQ ID NO: 238396 - RNA, 19 nt, Artificial Sequence
  Description of Artificial Sequence: Synthetic oligonucleotide
ugauguaggaaccauccac

SEQ ID NO: 238397 - RNA, 19 nt, Artificial Sequence
  Description of Artificial Sequence: Synthetic oligonucleotide
acugauguaggaaccaucc

SEQ ID NO: 238398 - RNA, 19 nt, Artificial Sequence
  Description of Artificial Sequence: Synthetic oligonucleotide
ugaggguucagcauuaaaa

SEQ ID NO: 238399 - RNA, 19 nt, Artificial Sequence
  Description of Artificial Sequence: Synthetic oligonucleotide
ugugaauuggaaaccgcag

SEQ ID NO: 238400 - RNA, 19 nt, Artificial Sequence
  Description of Artificial Sequence: Synthetic oligonucleotide
aaaagauuguguaccccgc

SEQ ID NO: 238401 - RNA, 19 nt, Artificial Sequence
  Description of Artificial Sequence: Synthetic oligonucleotide
ugaaaguucaaauguuaca

SEQ ID NO: 238402 - RNA, 19 nt, Artificial Sequence
  Description of Artificial Sequence: Synthetic oligonucleotide
auuaacugggaauaggaaa

SEQ ID NO: 238403 - RNA, 19 nt, Artificial Sequence
  Description of Artificial Sequence: Synthetic oligonucleotide
uaugauaguuauaggucag

SEQ ID NO: 238404 - RNA, 19 nt, Artificial Sequence
  Description of Artificial Sequence: Synthetic oligonucleotide
uauccuccauacuaaaucc

SEQ ID NO: 238405 - RNA, 19 nt, Artificial Sequence
  Description of Artificial Sequence: Synthetic oligonucleotide
cacuaggugacauggaucc

SEQ ID NO: 238406 - RNA, 19 nt, Artificial Sequence
  Description of Artificial Sequence: Synthetic oligonucleotide
gugcauaugauaguuauag

SEQ ID NO: 238407 - RNA, 19 nt, Artificial Sequence
  Description of Artificial Sequence: Synthetic oligonucleotide
aaugaugaccuagaguucu

SEQ ID NO: 238408 - RNA, 19 nt, Artificial Sequence
  Description of Artificial Sequence: Synthetic oligonucleotide
cauucuacaauccuaucug

SEQ ID NO: 238409 - RNA, 19 nt, Artificial Sequence
  Description of Artificial Sequence: Synthetic oligonucleotide
gaacucacaguauaucuug

SEQ ID NO: 238410 - RNA, 19 nt, Artificial Sequence
  Description of Artificial Sequence: Synthetic oligonucleotide
agauuuacaucuuucucca

SEQ ID NO: 238411 - RNA, 19 nt, Artificial Sequence
  Description of Artificial Sequence: Synthetic oligonucleotide
ucaaauguuacagcaaggu

SEQ ID NO: 238412 - RNA, 19 nt, Artificial Sequence
  Description of Artificial Sequence: Synthetic oligonucleotide
aguauaucuuguccaaaag

SEQ ID NO: 238413 - RNA, 19 nt, Artificial Sequence
  Description of Artificial Sequence: Synthetic oligonucleotide
aguuacugcugccuugccc

SEQ ID NO: 238414 - RNA, 19 nt, Artificial Sequence
  Description of Artificial Sequence: Synthetic oligonucleotide
auugcaaugcucaugacgu

SEQ ID NO: 238415 - RNA, 19 nt, Artificial Sequence
  Description of Artificial Sequence: Synthetic oligonucleotide
ugacauggauccacgagag

SEQ ID NO: 238416 - RNA, 19 nt, Artificial Sequence
  Description of Artificial Sequence: Synthetic oligonucleotide
aaacacgccagguauuaca

SEQ ID NO: 238417 - RNA, 19 nt, Artificial Sequence
  Description of Artificial Sequence: Synthetic oligonucleotide
uuaauggagaccacucaga

SEQ ID NO: 238418 - RNA, 19 nt, Artificial Sequence
  Description of Artificial Sequence: Synthetic oligonucleotide
agugaaauuuuguaacagu

SEQ ID NO: 238419 - RNA, 19 nt, Artificial Sequence
  Description of Artificial Sequence: Synthetic oligonucleotide
accgcagauacccuggagg

SEQ ID NO: 238420 - RNA, 19 nt, Artificial Sequence
  Description of Artificial Sequence: Synthetic oligonucleotide
guuacuaaccgaaacacca

SEQ ID NO: 238421 - RNA, 19 nt, Artificial Sequence
  Description of Artificial Sequence: Synthetic oligonucleotide
ugagguuacucucccaugu

SEQ ID NO: 238422 - RNA, 19 nt, Artificial Sequence
  Description of Artificial Sequence: Synthetic oligonucleotide
gaaucugaugggcuuacug

SEQ ID NO: 238423 - RNA, 19 nt, Artificial Sequence
  Description of Artificial Sequence: Synthetic oligonucleotide
ucaccacuaggugacaugg

SEQ ID NO: 238424 - RNA, 19 nt, Artificial Sequence
  Description of Artificial Sequence: Synthetic oligonucleotide
agugcuguuuccagaaugc

SEQ ID NO: 238425 - RNA, 19 nt, Artificial Sequence
  Description of Artificial Sequence: Synthetic oligonucleotide
aaggggacgaacucugcug

SEQ ID NO: 238426 - RNA, 19 nt, Artificial Sequence
  Description of Artificial Sequence: Synthetic oligonucleotide
gaaaccgagucugagguug

SEQ ID NO: 238427 - RNA, 19 nt, Artificial Sequence
  Description of Artificial Sequence: Synthetic oligonucleotide
uuacccugcagucaugagu

SEQ ID NO: 238428 - RNA, 19 nt, Artificial Sequence
  Description of Artificial Sequence: Synthetic oligonucleotide
uacuaaauccagcagccau

SEQ ID NO: 238429 - RNA, 19 nt, Artificial Sequence
  Description of Artificial Sequence: Synthetic oligonucleotide
caauuaauggagaccacuc

SEQ ID NO: 238430 - RNA, 19 nt, Artificial Sequence
  Description of Artificial Sequence: Synthetic oligonucleotide
caacuccugauuaacuggg

SEQ ID NO: 238431 - RNA, 19 nt, Artificial Sequence
  Description of Artificial Sequence: Synthetic oligonucleotide
  modified_base (9)..(9): a, c, u, g, unknown or other
ggcacaaungcacuggaug

SEQ ID NO: 238432 - RNA, 19 nt, Artificial Sequence
  Description of Artificial Sequence: Synthetic oligonucleotide
agauuagagguaaggaggg

SEQ ID NO: 238433 - RNA, 19 nt, Artificial Sequence
  Description of Artificial Sequence: Synthetic oligonucleotide
uuacaucuuucuccaaggc

SEQ ID NO: 238434 - RNA, 19 nt, Artificial Sequence
  Description of Artificial Sequence: Synthetic oligonucleotide
acaaugacccuuaacagca

SEQ ID NO: 238435 - RNA, 19 nt, Artificial Sequence
  Description of Artificial Sequence: Synthetic oligonucleotide
aguucgauaacuguauccu

SEQ ID NO: 238436 - RNA, 19 nt, Artificial Sequence
  Description of Artificial Sequence: Synthetic oligonucleotide
cacgggguccaauuaaugg

SEQ ID NO: 238437 - RNA, 19 nt, Artificial Sequence
  Description of Artificial Sequence: Synthetic oligonucleotide
cuacaauccuaucugcccc

SEQ ID NO: 238438 - RNA, 19 nt, Artificial Sequence
  Description of Artificial Sequence: Synthetic oligonucleotide
aagauuguguaccccgccu

SEQ ID NO: 238439 - RNA, 19 nt, Artificial Sequence
  Description of Artificial Sequence: Synthetic oligonucleotide
cacaaagagagaagaacug

SEQ ID NO: 238440 - RNA, 19 nt, Artificial Sequence
  Description of Artificial Sequence: Synthetic oligonucleotide
ugugagguuacucucccau

SEQ ID NO: 238441 - RNA, 19 nt, Artificial Sequence
  Description of Artificial Sequence: Synthetic oligonucleotide
agaaccuuagggaugcuuc

SEQ ID NO: 238442 - RNA, 19 nt, Artificial Sequence
  Description of Artificial Sequence: Synthetic oligonucleotide
aauggagaccacucagaga

SEQ ID NO: 238443 - RNA, 19 nt, Artificial Sequence
  Description of Artificial Sequence: Synthetic oligonucleotide
gcuucggagaaccuuaggg

SEQ ID NO: 238444 - RNA, 19 nt, Artificial Sequence
  Description of Artificial Sequence: Synthetic oligonucleotide
ugcacuuagaaccguuacu

SEQ ID NO: 238445 - RNA, 19 nt, Artificial Sequence
  Description of Artificial Sequence: Synthetic oligonucleotide
guuacugcugccuugccca

SEQ ID NO: 238446 - RNA, 19 nt, Artificial Sequence
  Description of Artificial Sequence: Synthetic oligonucleotide
caagauuuacaucuuucuc

SEQ ID NO: 238447 - RNA, 19 nt, Artificial Sequence
  Description of Artificial Sequence: Synthetic oligonucleotide
accguuacuaaccgaaaca

SEQ ID NO: 238448 - RNA, 19 nt, Artificial Sequence
  Description of Artificial Sequence: Synthetic oligonucleotide
ggagacauaggcuucaaca

SEQ ID NO: 238449 - RNA, 19 nt, Artificial Sequence
  Description of Artificial Sequence: Synthetic oligonucleotide
gagugcauguuucucaguc

SEQ ID NO: 238450 - RNA, 19 nt, Artificial Sequence
  Description of Artificial Sequence: Synthetic oligonucleotide
uaggugacauggauccacg

SEQ ID NO: 238451 - RNA, 19 nt, Artificial Sequence
  Description of Artificial Sequence: Synthetic oligonucleotide
ucgguacugguguacaccc

SEQ ID NO: 238452 - RNA, 19 nt, Artificial Sequence
  Description of Artificial Sequence: Synthetic oligonucleotide
aaucacgggguccaauuaa

SEQ ID NO: 238453 - RNA, 19 nt, Artificial Sequence
  Description of Artificial Sequence: Synthetic oligonucleotide
aucuaaaaccauaacagaa

SEQ ID NO: 238454 - RNA, 19 nt, Artificial Sequence
  Description of Artificial Sequence: Synthetic oligonucleotide
  modified_base (7)..(7): a, c, u, g, unknown or other
cacaaungcacuggauggg

SEQ ID NO: 238455 - RNA, 19 nt, Artificial Sequence
  Description of Artificial Sequence: Synthetic oligonucleotide
aguguuagggguaugggca

SEQ ID NO: 238456 - RNA, 19 nt, Artificial Sequence
  Description of Artificial Sequence: Synthetic oligonucleotide
gacccuuaacagcagggag

SEQ ID NO: 238457 - RNA, 19 nt, Artificial Sequence
  Description of Artificial Sequence: Synthetic oligonucleotide
aaacguggggcagacccac

SEQ ID NO: 238458 - RNA, 19 nt, Artificial Sequence
  Description of Artificial Sequence: Synthetic oligonucleotide
uuuagagagugcugaacuc

SEQ ID NO: 238459 - RNA, 19 nt, Artificial Sequence
  Description of Artificial Sequence: Synthetic oligonucleotide
gguguaaacacuccacuug

SEQ ID NO: 238460 - RNA, 19 nt, Artificial Sequence
  Description of Artificial Sequence: Synthetic oligonucleotide
ucauaucugcuggaaaagc

SEQ ID NO: 238461 - RNA, 19 nt, Artificial Sequence
  Description of Artificial Sequence: Synthetic oligonucleotide
aauaagcuggcaaccauau

SEQ ID NO: 238462 - RNA, 19 nt, Artificial Sequence
  Description of Artificial Sequence: Synthetic oligonucleotide
ugguagcuguaucuggaag

SEQ ID NO: 238463 - RNA, 19 nt, Artificial Sequence
  Description of Artificial Sequence: Synthetic oligonucleotide
acucccacgauguggguag

SEQ ID NO: 238464 - RNA, 19 nt, Artificial Sequence
  Description of Artificial Sequence: Synthetic oligonucleotide
uucggagaaccuuagggau

SEQ ID NO: 238465 - RNA, 19 nt, Artificial Sequence
  Description of Artificial Sequence: Synthetic oligonucleotide
aacacgccagguauuacag

SEQ ID NO: 238466 - RNA, 19 nt, Artificial Sequence
  Description of Artificial Sequence: Synthetic oligonucleotide
cuaaccgaaacaccauuug

SEQ ID NO: 238467 - RNA, 19 nt, Artificial Sequence
  Description of Artificial Sequence: Synthetic oligonucleotide
guagcuguaucuggaaggg

SEQ ID NO: 238468 - RNA, 19 nt, Artificial Sequence
  Description of Artificial Sequence: Synthetic oligonucleotide
gacaugaggaauccuugac

SEQ ID NO: 238469 - RNA, 19 nt, Artificial Sequence
  Description of Artificial Sequence: Synthetic oligonucleotide
gaaccuuagggaugcuucc

SEQ ID NO: 238470 - RNA, 19 nt, Artificial Sequence
  Description of Artificial Sequence: Synthetic oligonucleotide
uugugauucuguccgggga

SEQ ID NO: 238471 - RNA, 19 nt, Artificial Sequence
  Description of Artificial Sequence: Synthetic oligonucleotide
ucggccuugguuccagagg

SEQ ID NO: 238472 - RNA, 19 nt, Artificial Sequence
  Description of Artificial Sequence: Synthetic oligonucleotide
ggauugauucugaagaacc

SEQ ID NO: 238473 - RNA, 19 nt, Artificial Sequence
  Description of Artificial Sequence: Synthetic oligonucleotide
aaagguuccccagaccacu

SEQ ID NO: 238474 - RNA, 19 nt, Artificial Sequence
  Description of Artificial Sequence: Synthetic oligonucleotide
  modified_base (6)..(6): a, c, u, g, unknown or other
acaaungcacuggaugggg

SEQ ID NO: 238475 - RNA, 19 nt, Artificial Sequence
  Description of Artificial Sequence: Synthetic oligonucleotide
uccagggguguacaacagg

SEQ ID NO: 238476 - RNA, 19 nt, Artificial Sequence
  Description of Artificial Sequence: Synthetic oligonucleotide
aaaacacgccagguauuac

SEQ ID NO: 238477 - RNA, 19 nt, Artificial Sequence
  Description of Artificial Sequence: Synthetic oligonucleotide
caguguuagggguaugggc

SEQ ID NO: 238478 - RNA, 19 nt, Artificial Sequence
  Description of Artificial Sequence: Synthetic oligonucleotide
guuaacaaugacccuuaac

SEQ ID NO: 238479 - RNA, 19 nt, Artificial Sequence
  Description of Artificial Sequence: Synthetic oligonucleotide
cugauuaacugggaauagg

SEQ ID NO: 238480 - RNA, 19 nt, Artificial Sequence
  Description of Artificial Sequence: Synthetic oligonucleotide
ccauacuaaauccagcagc

SEQ ID NO: 238481 - RNA, 19 nt, Artificial Sequence
  Description of Artificial Sequence: Synthetic oligonucleotide
uacugcacaagugacuaca

SEQ ID NO: 238482 - RNA, 19 nt, Artificial Sequence
  Description of Artificial Sequence: Synthetic oligonucleotide
uguuacagcaagguguaaa

SEQ ID NO: 238483 - RNA, 19 nt, Artificial Sequence
  Description of Artificial Sequence: Synthetic oligonucleotide
auuggaaaccgcagauacc

SEQ ID NO: 238484 - RNA, 19 nt, Artificial Sequence
  Description of Artificial Sequence: Synthetic oligonucleotide
  modified_base (8)..(8): a, c, u, g, unknown or other
gcacaaungcacuggaugg

SEQ ID NO: 238485 - RNA, 19 nt, Artificial Sequence
  Description of Artificial Sequence: Synthetic oligonucleotide
ucugaguaggauguaucug

SEQ ID NO: 238486 - RNA, 19 nt, Artificial Sequence
  Description of Artificial Sequence: Synthetic oligonucleotide
uaaggagggagaacucaca

SEQ ID NO: 238487 - RNA, 19 nt, Artificial Sequence
  Description of Artificial Sequence: Synthetic oligonucleotide
uguccucugaaaggggacg

SEQ ID NO: 238488 - RNA, 19 nt, Artificial Sequence
  Description of Artificial Sequence: Synthetic oligonucleotide
acgggguccaauuaaugga

SEQ ID NO: 238489 - RNA, 19 nt, Artificial Sequence
  Description of Artificial Sequence: Synthetic oligonucleotide
uuugcucugugaagaguca

SEQ ID NO: 238490 - RNA, 19 nt, Artificial Sequence
  Description of Artificial Sequence: Synthetic oligonucleotide
acaagugacuacaggcuac

SEQ ID NO: 238491 - RNA, 19 nt, Artificial Sequence
  Description of Artificial Sequence: Synthetic oligonucleotide
cuccucggaagauugcugc

SEQ ID NO: 238492 - RNA, 19 nt, Artificial Sequence
  Description of Artificial Sequence: Synthetic oligonucleotide
uuauagucucugcuucaga

SEQ ID NO: 238493 - RNA, 19 nt, Artificial Sequence
  Description of Artificial Sequence: Synthetic oligonucleotide
uuauaggucaggguagaaa

SEQ ID NO: 238494 - RNA, 19 nt, Artificial Sequence
  Description of Artificial Sequence: Synthetic oligonucleotide
cacacugcuucggagaacc

SEQ ID NO: 238495 - RNA, 19 nt, Artificial Sequence
  Description of Artificial Sequence: Synthetic oligonucleotide
aacugugcauaugauaguu

SEQ ID NO: 238496 - RNA, 19 nt, Artificial Sequence
  Description of Artificial Sequence: Synthetic oligonucleotide
ggauccacgagagagauuc

SEQ ID NO: 238497 - RNA, 19 nt, Artificial Sequence
  Description of Artificial Sequence: Synthetic oligonucleotide
uuacuaaccgaaacaccau

SEQ ID NO: 238498 - RNA, 19 nt, Artificial Sequence
  Description of Artificial Sequence: Synthetic oligonucleotide
augauaguuauaggucagg

SEQ ID NO: 238499 - RNA, 19 nt, Artificial Sequence
  Description of Artificial Sequence: Synthetic oligonucleotide
agagggauugcaaugcuca

SEQ ID NO: 238500 - RNA, 19 nt, Artificial Sequence
  Description of Artificial Sequence: Synthetic oligonucleotide
uccugauuaacugggaaua

SEQ ID NO: 238501 - RNA, 19 nt, Artificial Sequence
  Description of Artificial Sequence: Synthetic oligonucleotide
agaaauaagcuggcaacca

SEQ ID NO: 238502 - RNA, 19 nt, Artificial Sequence
  Description of Artificial Sequence: Synthetic oligonucleotide
cuuacugccuccgaaugug

SEQ ID NO: 238503 - RNA, 19 nt, Artificial Sequence
  Description of Artificial Sequence: Synthetic oligonucleotide
cuccgaaugugauguagag

SEQ ID NO: 238504 - RNA, 19 nt, Artificial Sequence
  Description of Artificial Sequence: Synthetic oligonucleotide
gauugauucugaagaacca

SEQ ID NO: 238505 - RNA, 19 nt, Artificial Sequence
  Description of Artificial Sequence: Synthetic oligonucleotide
agaaccguuacuaaccgaa

SEQ ID NO: 238506 - RNA, 19 nt, Artificial Sequence
  Description of Artificial Sequence: Synthetic oligonucleotide
cuucggagaaccuuaggga

SEQ ID NO: 238507 - RNA, 19 nt, Artificial Sequence
  Description of Artificial Sequence: Synthetic oligonucleotide
aaaucacgggguccaauua

SEQ ID NO: 238508 - RNA, 19 nt, Artificial Sequence
  Description of Artificial Sequence: Synthetic oligonucleotide
uccguuugcgguacuccag

SEQ ID NO: 238509 - RNA, 19 nt, Artificial Sequence
  Description of Artificial Sequence: Synthetic oligonucleotide
uucaccacuaggugacaug

SEQ ID NO: 238510 - RNA, 19 nt, Artificial Sequence
  Description of Artificial Sequence: Synthetic oligonucleotide
accuuagggaugcuuccuc

SEQ ID NO: 238511 - RNA, 19 nt, Artificial Sequence
  Description of Artificial Sequence: Synthetic oligonucleotide
aguaguucgauaacuguau

SEQ ID NO: 238512 - RNA, 19 nt, Artificial Sequence
  Description of Artificial Sequence: Synthetic oligonucleotide
ugaccagacccauuccucu

SEQ ID NO: 238513 - RNA, 19 nt, Artificial Sequence
  Description of Artificial Sequence: Synthetic oligonucleotide
uaugcucggccuugguucc

SEQ ID NO: 238514 - RNA, 19 nt, Artificial Sequence
  Description of Artificial Sequence: Synthetic oligonucleotide
gcauaugauaguuauaggu

SEQ ID NO: 238515 - RNA, 19 nt, Artificial Sequence
  Description of Artificial Sequence: Synthetic oligonucleotide
aaguaacuaugcugagggu

SEQ ID NO: 238516 - RNA, 19 nt, Artificial Sequence
  Description of Artificial Sequence: Synthetic oligonucleotide
uucauaaagccauguucau

SEQ ID NO: 238517 - RNA, 19 nt, Artificial Sequence
  Description of Artificial Sequence: Synthetic oligonucleotide
gauaguuauaggucagggu

SEQ ID NO: 238518 - RNA, 19 nt, Artificial Sequence
  Description of Artificial Sequence: Synthetic oligonucleotide
gacucuuucucugugaggu

SEQ ID NO: 238519 - RNA, 19 nt, Artificial Sequence
  Description of Artificial Sequence: Synthetic oligonucleotide
uuaggacagcaacuccuga

SEQ ID NO: 238520 - RNA, 19 nt, Artificial Sequence
  Description of Artificial Sequence: Synthetic oligonucleotide
aggaaugagaugucagaaa

SEQ ID NO: 238521 - RNA, 19 nt, Artificial Sequence
  Description of Artificial Sequence: Synthetic oligonucleotide
accacuaggugacauggau

SEQ ID NO: 238522 - RNA, 19 nt, Artificial Sequence
  Description of Artificial Sequence: Synthetic oligonucleotide
uguguaccccgccugggcu

SEQ ID NO: 238523 - RNA, 19 nt, Artificial Sequence
  Description of Artificial Sequence: Synthetic oligonucleotide
cugugaauuggaaaccgca

SEQ ID NO: 238524 - RNA, 19 nt, Artificial Sequence
  Description of Artificial Sequence: Synthetic oligonucleotide
ucucagugcaguaguucga

SEQ ID NO: 238525 - RNA, 19 nt, Artificial Sequence
  Description of Artificial Sequence: Synthetic oligonucleotide
cacuggauggggagaagcc

SEQ ID NO: 238526 - RNA, 19 nt, Artificial Sequence
  Description of Artificial Sequence: Synthetic oligonucleotide
guucgauaacuguauccug

SEQ ID NO: 238527 - RNA, 19 nt, Artificial Sequence
  Description of Artificial Sequence: Synthetic oligonucleotide
guaacuaugcugaggguuc

SEQ ID NO: 238528 - RNA, 19 nt, Artificial Sequence
  Description of Artificial Sequence: Synthetic oligonucleotide
agugcauguuucucaguca

SEQ ID NO: 238529 - RNA, 19 nt, Artificial Sequence
  Description of Artificial Sequence: Synthetic oligonucleotide
aacauguuauggacaugag

SEQ ID NO: 238530 - RNA, 19 nt, Artificial Sequence
  Description of Artificial Sequence: Synthetic oligonucleotide
ggcuguaaacaguugcucc

SEQ ID NO: 238531 - RNA, 19 nt, Artificial Sequence
  Description of Artificial Sequence: Synthetic oligonucleotide
gguaugggcaacuuguuaa

SEQ ID NO: 238532 - RNA, 19 nt, Artificial Sequence
  Description of Artificial Sequence: Synthetic oligonucleotide
agucgguacugguguacac

SEQ ID NO: 238533 - RNA, 19 nt, Artificial Sequence
  Description of Artificial Sequence: Synthetic oligonucleotide
ucacgggguccaauuaaug

SEQ ID NO: 238534 - RNA, 19 nt, Artificial Sequence
  Description of Artificial Sequence: Synthetic oligonucleotide
agucacgaccacaagucuc

SEQ ID NO: 238535 - RNA, 19 nt, Artificial Sequence
  Description of Artificial Sequence: Synthetic oligonucleotide
ugcuucggagaaccuuagg

SEQ ID NO: 238536 - RNA, 19 nt, Artificial Sequence
  Description of Artificial Sequence: Synthetic oligonucleotide
ucuuacccugcagucauga

SEQ ID NO: 238537 - RNA, 19 nt, Artificial Sequence
  Description of Artificial Sequence: Synthetic oligonucleotide
cuuuagagagugcugaacu

SEQ ID NO: 238538 - RNA, 19 nt, Artificial Sequence
  Description of Artificial Sequence: Synthetic oligonucleotide
ugugcauaugauaguuaua

SEQ ID NO: 238539 - RNA, 19 nt, Artificial Sequence
  Description of Artificial Sequence: Synthetic oligonucleotide
aaccgcagauacccuggag

SEQ ID NO: 238540 - RNA, 19 nt, Artificial Sequence
  Description of Artificial Sequence: Synthetic oligonucleotide
uuguguaccccgccugggc

SEQ ID NO: 238541 - RNA, 19 nt, Artificial Sequence
  Description of Artificial Sequence: Synthetic oligonucleotide
cuaggugacauggauccac

SEQ ID NO: 238542 - RNA, 19 nt, Artificial Sequence
  Description of Artificial Sequence: Synthetic oligonucleotide
uagggguaugggcaacuug

SEQ ID NO: 238543 - RNA, 19 nt, Artificial Sequence
  Description of Artificial Sequence: Synthetic oligonucleotide
agggguaugggcaacuugu

SEQ ID NO: 238544 - RNA, 19 nt, Artificial Sequence
  Description of Artificial Sequence: Synthetic oligonucleotide
agggagaacucacaguaua

SEQ ID NO: 238545 - RNA, 19 nt, Artificial Sequence
  Description of Artificial Sequence: Synthetic oligonucleotide
uaauacccugcaguccccg

SEQ ID NO: 238546 - RNA, 19 nt, Artificial Sequence
  Description of Artificial Sequence: Synthetic oligonucleotide
guaugggcaacuuguuaac

SEQ ID NO: 238547 - RNA, 19 nt, Artificial Sequence
  Description of Artificial Sequence: Synthetic oligonucleotide
acguggggcagacccacac

SEQ ID NO: 238548 - RNA, 19 nt, Artificial Sequence
  Description of Artificial Sequence: Synthetic oligonucleotide
uguuuccagaaugcggcug

SEQ ID NO: 238549 - RNA, 19 nt, Artificial Sequence
  Description of Artificial Sequence: Synthetic oligonucleotide
agagucacuuccccaccag

SEQ ID NO: 238550 - RNA, 19 nt, Artificial Sequence
  Description of Artificial Sequence: Synthetic oligonucleotide
cagcaagguguaaacacuc

SEQ ID NO: 238551 - RNA, 19 nt, Artificial Sequence
  Description of Artificial Sequence: Synthetic oligonucleotide
uccaauuaauggagaccac

SEQ ID NO: 238552 - RNA, 19 nt, Artificial Sequence
  Description of Artificial Sequence: Synthetic oligonucleotide
agaccacuacugcacaagu

SEQ ID NO: 238553 - RNA, 19 nt, Artificial Sequence
  Description of Artificial Sequence: Synthetic oligonucleotide
gauuaacugggaauaggaa

SEQ ID NO: 238554 - RNA, 19 nt, Artificial Sequence
  Description of Artificial Sequence: Synthetic oligonucleotide
ugacccuuaacagcaggga

SEQ ID NO: 238555 - RNA, 19 nt, Artificial Sequence
  Description of Artificial Sequence: Synthetic oligonucleotide
aagaaacguggggcagacc

SEQ ID NO: 238556 - RNA, 19 nt, Artificial Sequence
  Description of Artificial Sequence: Synthetic oligonucleotide
agggauugauucugaagaa

SEQ ID NO: 238557 - RNA, 19 nt, Artificial Sequence
  Description of Artificial Sequence: Synthetic oligonucleotide
caugacguccaagacagca

SEQ ID NO: 238558 - RNA, 19 nt, Artificial Sequence
  Description of Artificial Sequence: Synthetic oligonucleotide
aggggacgaacucugcuga

SEQ ID NO: 238559 - RNA, 19 nt, Artificial Sequence
  Description of Artificial Sequence: Synthetic oligonucleotide
agaguggaaaucacggggu

SEQ ID NO: 238560 - RNA, 19 nt, Artificial Sequence
  Description of Artificial Sequence: Synthetic oligonucleotide
acagcaagguguaaacacu

SEQ ID NO: 238561 - RNA, 19 nt, Artificial Sequence
  Description of Artificial Sequence: Synthetic oligonucleotide
aaaccgcagauacccugga

SEQ ID NO: 238562 - RNA, 19 nt, Artificial Sequence
  Description of Artificial Sequence: Synthetic oligonucleotide
cucggaagauugcugccag

SEQ ID NO: 238563 - RNA, 19 nt, Artificial Sequence
  Description of Artificial Sequence: Synthetic oligonucleotide
aaaccgagucugagguugg

SEQ ID NO: 238564 - RNA, 19 nt, Artificial Sequence
  Description of Artificial Sequence: Synthetic oligonucleotide
cugcccacucucauguaag

SEQ ID NO: 238565 - RNA, 19 nt, Artificial Sequence
  Description of Artificial Sequence: Synthetic oligonucleotide
caaugaugaccuagaguuc

SEQ ID NO: 238566 - RNA, 19 nt, Artificial Sequence
  Description of Artificial Sequence: Synthetic oligonucleotide
uaugggcaacuuguuaacu

SEQ ID NO: 238567 - RNA, 19 nt, Artificial Sequence
  Description of Artificial Sequence: Synthetic oligonucleotide
agcaauaugcucggccuug

SEQ ID NO: 238568 - RNA, 19 nt, Artificial Sequence
  Description of Artificial Sequence: Synthetic oligonucleotide
auccaccuacugcugaugu

SEQ ID NO: 238569 - RNA, 19 nt, Artificial Sequence
  Description of Artificial Sequence: Synthetic oligonucleotide
ccagggguguacaacaggc

SEQ ID NO: 238570 - RNA, 19 nt, Artificial Sequence
  Description of Artificial Sequence: Synthetic oligonucleotide
agcagggagaaacuucuuu

SEQ ID NO: 238571 - RNA, 19 nt, Artificial Sequence
  Description of Artificial Sequence: Synthetic oligonucleotide
ccuuucaccacuaggugac

SEQ ID NO: 238572 - RNA, 19 nt, Artificial Sequence
  Description of Artificial Sequence: Synthetic oligonucleotide
uccucggaagauugcugcc

SEQ ID NO: 238573 - RNA, 19 nt, Artificial Sequence
  Description of Artificial Sequence: Synthetic oligonucleotide
cugagaaaccgagucugag

SEQ ID NO: 238574 - RNA, 19 nt, Artificial Sequence
  Description of Artificial Sequence: Synthetic oligonucleotide
aguuauaggucaggguaga

SEQ ID NO: 238575 - RNA, 19 nt, Artificial Sequence
  Description of Artificial Sequence: Synthetic oligonucleotide
ggaaaccgcagauacccug

SEQ ID NO: 238576 - RNA, 19 nt, Artificial Sequence
  Description of Artificial Sequence: Synthetic oligonucleotide
uagaaccguuacuaaccga

SEQ ID NO: 238577 - RNA, 19 nt, Artificial Sequence
  Description of Artificial Sequence: Synthetic oligonucleotide
auuguguaccccgccuggg

SEQ ID NO: 238578 - RNA, 19 nt, Artificial Sequence
  Description of Artificial Sequence: Synthetic oligonucleotide
gagaagaacugugcauaug

SEQ ID NO: 238579 - RNA, 19 nt, Artificial Sequence
  Description of Artificial Sequence: Synthetic oligonucleotide
ucggugccauucuacaauc

SEQ ID NO: 238580 - RNA, 19 nt, Artificial Sequence
  Description of Artificial Sequence: Synthetic oligonucleotide
aaccuuagggaugcuuccu

SEQ ID NO: 238581 - RNA, 19 nt, Artificial Sequence
  Description of Artificial Sequence: Synthetic oligonucleotide
agguuccccagaccacuac

SEQ ID NO: 238582 - RNA, 19 nt, Artificial Sequence
  Description of Artificial Sequence: Synthetic oligonucleotide
ugaugaccuagaguucuga

SEQ ID NO: 238583 - RNA, 19 nt, Artificial Sequence
  Description of Artificial Sequence: Synthetic oligonucleotide
gaaauaagcuggcaaccau

SEQ ID NO: 238584 - RNA, 19 nt, Artificial Sequence
  Description of Artificial Sequence: Synthetic oligonucleotide
ugcccacucucauguaagc

SEQ ID NO: 238585 - RNA, 19 nt, Artificial Sequence
  Description of Artificial Sequence: Synthetic oligonucleotide
guaucugguguggugacuc

SEQ ID NO: 238586 - RNA, 19 nt, Artificial Sequence
  Description of Artificial Sequence: Synthetic oligonucleotide
ggcagacccacacacaauc

SEQ ID NO: 238587 - RNA, 19 nt, Artificial Sequence
  Description of Artificial Sequence: Synthetic oligonucleotide
agucuugacuccugacccu

SEQ ID NO: 238588 - RNA, 19 nt, Artificial Sequence
  Description of Artificial Sequence: Synthetic oligonucleotide
gcuacaggcaaggauggag

SEQ ID NO: 238589 - RNA, 19 nt, Artificial Sequence
  Description of Artificial Sequence: Synthetic oligonucleotide
augacguccaagacagcag

SEQ ID NO: 238590 - RNA, 19 nt, Artificial Sequence
  Description of Artificial Sequence: Synthetic oligonucleotide
gguccaauuaauggagacc

SEQ ID NO: 238591 - RNA, 19 nt, Artificial Sequence
  Description of Artificial Sequence: Synthetic oligonucleotide
agggguaggcagcacuuga

SEQ ID NO: 238592 - RNA, 19 nt, Artificial Sequence
  Description of Artificial Sequence: Synthetic oligonucleotide
aggaagcagcuaugggcuc

SEQ ID NO: 238593 - RNA, 19 nt, Artificial Sequence
  Description of Artificial Sequence: Synthetic oligonucleotide
gucgguacugguguacacc

SEQ ID NO: 238594 - RNA, 19 nt, Artificial Sequence
  Description of Artificial Sequence: Synthetic oligonucleotide
cagaccacuacugcacaag

SEQ ID NO: 238595 - RNA, 19 nt, Artificial Sequence
  Description of Artificial Sequence: Synthetic oligonucleotide
gaguggaaaucacgggguc

SEQ ID NO: 238596 - RNA, 19 nt, Artificial Sequence
  Description of Artificial Sequence: Synthetic oligonucleotide
auaguccguaagucugaug

SEQ ID NO: 238597 - RNA, 19 nt, Artificial Sequence
  Description of Artificial Sequence: Synthetic oligonucleotide
auguggguagugcugugaa

SEQ ID NO: 238598 - RNA, 19 nt, Artificial Sequence
  Description of Artificial Sequence: Synthetic oligonucleotide
cacaguauaucuuguccaa

SEQ ID NO: 238599 - RNA, 19 nt, Artificial Sequence
  Description of Artificial Sequence: Synthetic oligonucleotide
gaaaucacgggguccaauu

SEQ ID NO: 238600 - RNA, 19 nt, Artificial Sequence
  Description of Artificial Sequence: Synthetic oligonucleotide
aggaagaagugccccugga

SEQ ID NO: 238601 - RNA, 19 nt, Artificial Sequence
  Description of Artificial Sequence: Synthetic oligonucleotide
acccuuaacagcagggaga

SEQ ID NO: 238602 - RNA, 19 nt, Artificial Sequence
  Description of Artificial Sequence: Synthetic oligonucleotide
ggaauccuugaccccaggc

SEQ ID NO: 238603 - RNA, 19 nt, Artificial Sequence
  Description of Artificial Sequence: Synthetic oligonucleotide
ggggaacugggaaagaaac

SEQ ID NO: 238604 - RNA, 19 nt, Artificial Sequence
  Description of Artificial Sequence: Synthetic oligonucleotide
cacgccagguauuacagua

SEQ ID NO: 238605 - RNA, 19 nt, Artificial Sequence
  Description of Artificial Sequence: Synthetic oligonucleotide
ccugcaguccccguaaagg

SEQ ID NO: 238606 - RNA, 19 nt, Artificial Sequence
  Description of Artificial Sequence: Synthetic oligonucleotide
aggcaguccugcucuuagg

SEQ ID NO: 238607 - RNA, 19 nt, Artificial Sequence
  Description of Artificial Sequence: Synthetic oligonucleotide
cuuguuaacaaugacccuu

SEQ ID NO: 238608 - RNA, 19 nt, Artificial Sequence
  Description of Artificial Sequence: Synthetic oligonucleotide
uguaccccgccugggcugg

SEQ ID NO: 238609 - RNA, 19 nt, Artificial Sequence
  Description of Artificial Sequence: Synthetic oligonucleotide
uuacugcugccuugcccag

SEQ ID NO: 238610 - RNA, 19 nt, Artificial Sequence
  Description of Artificial Sequence: Synthetic oligonucleotide
gacguccaagacagcagag

SEQ ID NO: 238611 - RNA, 19 nt, Artificial Sequence
  Description of Artificial Sequence: Synthetic oligonucleotide
gagcugguagcuguaucug

SEQ ID NO: 238612 - RNA, 19 nt, Artificial Sequence
  Description of Artificial Sequence: Synthetic oligonucleotide
aggaauccuugaccccagg

SEQ ID NO: 238613 - RNA, 19 nt, Artificial Sequence
  Description of Artificial Sequence: Synthetic oligonucleotide
aguccugucugagucuuga

SEQ ID NO: 238614 - RNA, 19 nt, Artificial Sequence
  Description of Artificial Sequence: Synthetic oligonucleotide
  modified_base (3)..(3): a, c, u, g, unknown or other
aungcacuggauggggaga

SEQ ID NO: 238615 - RNA, 19 nt, Artificial Sequence
  Description of Artificial Sequence: Synthetic oligonucleotide
acgauguggguagugcugu

SEQ ID NO: 238616 - RNA, 19 nt, Artificial Sequence
  Description of Artificial Sequence: Synthetic oligonucleotide
acuaaccgaaacaccauuu

SEQ ID NO: 238617 - RNA, 19 nt, Artificial Sequence
  Description of Artificial Sequence: Synthetic oligonucleotide
ugagugcauguuucucagu

SEQ ID NO: 238618 - RNA, 19 nt, Artificial Sequence
  Description of Artificial Sequence: Synthetic oligonucleotide
uauggacaugaggaauccu

SEQ ID NO: 238619 - RNA, 19 nt, Artificial Sequence
  Description of Artificial Sequence: Synthetic oligonucleotide
uguaucugguguggugacu

SEQ ID NO: 238620 - RNA, 19 nt, Artificial Sequence
  Description of Artificial Sequence: Synthetic oligonucleotide
aggaaccauccaccuacug

SEQ ID NO: 238621 - RNA, 19 nt, Artificial Sequence
  Description of Artificial Sequence: Synthetic oligonucleotide
uggaaucugaugggcuuac

SEQ ID NO: 238622 - RNA, 19 nt, Artificial Sequence
  Description of Artificial Sequence: Synthetic oligonucleotide
uuucaccacuaggugacau

SEQ ID NO: 238623 - RNA, 19 nt, Artificial Sequence
  Description of Artificial Sequence: Synthetic oligonucleotide
cauucuuacccugcaguca

SEQ ID NO: 238624 - RNA, 19 nt, Artificial Sequence
  Description of Artificial Sequence: Synthetic oligonucleotide
uucuuacccugcagucaug

SEQ ID NO: 238625 - RNA, 19 nt, Artificial Sequence
  Description of Artificial Sequence: Synthetic oligonucleotide
cuccagggguguacaacag

SEQ ID NO: 238626 - RNA, 19 nt, Artificial Sequence
  Description of Artificial Sequence: Synthetic oligonucleotide
aacuccugauuaacuggga

SEQ ID NO: 238627 - RNA, 19 nt, Artificial Sequence
  Description of Artificial Sequence: Synthetic oligonucleotide
gaauuggaaaccgcagaua

SEQ ID NO: 238628 - RNA, 19 nt, Artificial Sequence
  Description of Artificial Sequence: Synthetic oligonucleotide
guccccguaaagggcaggg

SEQ ID NO: 238629 - RNA, 19 nt, Artificial Sequence
  Description of Artificial Sequence: Synthetic oligonucleotide
acacaagucauugcacuua

SEQ ID NO: 238630 - RNA, 19 nt, Artificial Sequence
  Description of Artificial Sequence: Synthetic oligonucleotide
  modified_base (5)..(5): a, c, u, g, unknown or other
caaungcacuggaugggga

SEQ ID NO: 238631 - RNA, 19 nt, Artificial Sequence
  Description of Artificial Sequence: Synthetic oligonucleotide
agucacuuccccaccagaa

SEQ ID NO: 238632 - RNA, 19 nt, Artificial Sequence
  Description of Artificial Sequence: Synthetic oligonucleotide
ggcuuacugccuccgaaug

SEQ ID NO: 238633 - RNA, 19 nt, Artificial Sequence
  Description of Artificial Sequence: Synthetic oligonucleotide
ggagucguucaacugaugu

SEQ ID NO: 238634 - RNA, 19 nt, Artificial Sequence
  Description of Artificial Sequence: Synthetic oligonucleotide
cugcuucggagaaccuuag

SEQ ID NO: 238635 - RNA, 19 nt, Artificial Sequence
  Description of Artificial Sequence: Synthetic oligonucleotide
acguccaagacagcagaga

SEQ ID NO: 238636 - RNA, 19 nt, Artificial Sequence
  Description of Artificial Sequence: Synthetic oligonucleotide
uccccguaaagggcagggg

SEQ ID NO: 238637 - RNA, 19 nt, Artificial Sequence
  Description of Artificial Sequence: Synthetic oligonucleotide
gaagcccuaggaaaguccu

SEQ ID NO: 238638 - RNA, 19 nt, Artificial Sequence
  Description of Artificial Sequence: Synthetic oligonucleotide
ccuuagggaugcuuccucc

SEQ ID NO: 238639 - RNA, 19 nt, Artificial Sequence
  Description of Artificial Sequence: Synthetic oligonucleotide
ucauugcacuuagaaccgu

SEQ ID NO: 238640 - RNA, 19 nt, Artificial Sequence
  Description of Artificial Sequence: Synthetic oligonucleotide
  modified_base (2)..(2): a, c, u, g, unknown or other
ungcacuggauggggagaa

SEQ ID NO: 238641 - RNA, 19 nt, Artificial Sequence
  Description of Artificial Sequence: Synthetic oligonucleotide
ccccaaagaaacguggggc

SEQ ID NO: 238642 - RNA, 19 nt, Artificial Sequence
  Description of Artificial Sequence: Synthetic oligonucleotide
cugucggugccauucuaca

SEQ ID NO: 238643 - RNA, 19 nt, Artificial Sequence
  Description of Artificial Sequence: Synthetic oligonucleotide
cguuacuaaccgaaacacc

SEQ ID NO: 238644 - RNA, 19 nt, Artificial Sequence
  Description of Artificial Sequence: Synthetic oligonucleotide
gaguuacugcugccuugcc

SEQ ID NO: 238645 - RNA, 19 nt, Artificial Sequence
  Description of Artificial Sequence: Synthetic oligonucleotide
cacaagugacuacaggcua

SEQ ID NO: 238646 - RNA, 19 nt, Artificial Sequence
  Description of Artificial Sequence: Synthetic oligonucleotide
gggauugauucugaagaac

SEQ ID NO: 238647 - RNA, 19 nt, Artificial Sequence
  Description of Artificial Sequence: Synthetic oligonucleotide
aggugacauggauccacga

SEQ ID NO: 238648 - RNA, 19 nt, Artificial Sequence
  Description of Artificial Sequence: Synthetic oligonucleotide
uguuagggguaugggcaac

SEQ ID NO: 238649 - RNA, 19 nt, Artificial Sequence
  Description of Artificial Sequence: Synthetic oligonucleotide
cuugaccccaggcgcugcc

SEQ ID NO: 238650 - RNA, 19 nt, Artificial Sequence
  Description of Artificial Sequence: Synthetic oligonucleotide
ucaugacguccaagacagc

SEQ ID NO: 238651 - RNA, 19 nt, Artificial Sequence
  Description of Artificial Sequence: Synthetic oligonucleotide
  modified_base (14)..(14): a, c, u, g, unknown or other
caacaggcacaaungcacu

SEQ ID NO: 238652 - RNA, 19 nt, Artificial Sequence
  Description of Artificial Sequence: Synthetic oligonucleotide
acacgccagguauuacagu

SEQ ID NO: 238653 - RNA, 19 nt, Artificial Sequence
  Description of Artificial Sequence: Synthetic oligonucleotide
ggaagaagcgaugcuaaaa

SEQ ID NO: 238654 - RNA, 19 nt, Artificial Sequence
  Description of Artificial Sequence: Synthetic oligonucleotide
gaaacguggggcagaccca

SEQ ID NO: 238655 - RNA, 19 nt, Artificial Sequence
  Description of Artificial Sequence: Synthetic oligonucleotide
cacuuagaaccguuacuaa

SEQ ID NO: 238656 - RNA, 19 nt, Artificial Sequence
  Description of Artificial Sequence: Synthetic oligonucleotide
uguaucuggaagggcugua

SEQ ID NO: 238657 - RNA, 19 nt, Artificial Sequence
  Description of Artificial Sequence: Synthetic oligonucleotide
cagaacaguguuaggggua

SEQ ID NO: 238658 - RNA, 19 nt, Artificial Sequence
  Description of Artificial Sequence: Synthetic oligonucleotide
gcacuuagaaccguuacua

SEQ ID NO: 238659 - RNA, 19 nt, Artificial Sequence
  Description of Artificial Sequence: Synthetic oligonucleotide
gguagugcugugaauugga

SEQ ID NO: 238660 - RNA, 19 nt, Artificial Sequence
  Description of Artificial Sequence: Synthetic oligonucleotide
auacccugcaguccccgua

SEQ ID NO: 238661 - RNA, 19 nt, Artificial Sequence
  Description of Artificial Sequence: Synthetic oligonucleotide
ccccguaaagggcaggggc

SEQ ID NO: 238662 - RNA, 19 nt, Artificial Sequence
  Description of Artificial Sequence: Synthetic oligonucleotide
guguaccccgccugggcug

SEQ ID NO: 238663 - RNA, 19 nt, Artificial Sequence
  Description of Artificial Sequence: Synthetic oligonucleotide
ggagcugguagcuguaucu

SEQ ID NO: 238664 - RNA, 19 nt, Artificial Sequence
  Description of Artificial Sequence: Synthetic oligonucleotide
cuuuugggccacucucaca

SEQ ID NO: 238665 - RNA, 19 nt, Artificial Sequence
  Description of Artificial Sequence: Synthetic oligonucleotide
gagucgguacugguguaca

SEQ ID NO: 238666 - RNA, 19 nt, Artificial Sequence
  Description of Artificial Sequence: Synthetic oligonucleotide
gugcauguuucucagucau

SEQ ID NO: 238667 - RNA, 19 nt, Artificial Sequence
  Description of Artificial Sequence: Synthetic oligonucleotide
uccaccuacugcugauguu

SEQ ID NO: 238668 - RNA, 19 nt, Artificial Sequence
  Description of Artificial Sequence: Synthetic oligonucleotide
gucaugagugcauguuucu

SEQ ID NO: 238669 - RNA, 19 nt, Artificial Sequence
  Description of Artificial Sequence: Synthetic oligonucleotide
gcugggcugagaaaccgag

SEQ ID NO: 238670 - RNA, 19 nt, Artificial Sequence
  Description of Artificial Sequence: Synthetic oligonucleotide
caagugacuacaggcuaca

SEQ ID NO: 238671 - RNA, 19 nt, Artificial Sequence
  Description of Artificial Sequence: Synthetic oligonucleotide
aucacgggguccaauuaau

SEQ ID NO: 238672 - RNA, 19 nt, Artificial Sequence
  Description of Artificial Sequence: Synthetic oligonucleotide
accgagucugagguuggug

SEQ ID NO: 238673 - RNA, 19 nt, Artificial Sequence
  Description of Artificial Sequence: Synthetic oligonucleotide
gccccuggaaucugauggg

SEQ ID NO: 238674 - RNA, 19 nt, Artificial Sequence
  Description of Artificial Sequence: Synthetic oligonucleotide
caacuuguuaacucucaau

SEQ ID NO: 238675 - RNA, 19 nt, Artificial Sequence
  Description of Artificial Sequence: Synthetic oligonucleotide
gaaccguuacuaaccgaaa

SEQ ID NO: 238676 - RNA, 19 nt, Artificial Sequence
  Description of Artificial Sequence: Synthetic oligonucleotide
ccaccuacugcugauguuc

SEQ ID NO: 238677 - RNA, 19 nt, Artificial Sequence
  Description of Artificial Sequence: Synthetic oligonucleotide
gcugugaauuggaaaccgc

SEQ ID NO: 238678 - RNA, 19 nt, Artificial Sequence
  Description of Artificial Sequence: Synthetic oligonucleotide
uccuugaccccaggcgcug

SEQ ID NO: 238679 - RNA, 19 nt, Artificial Sequence
  Description of Artificial Sequence: Synthetic oligonucleotide
cuccugauuaacugggaau

SEQ ID NO: 238680 - RNA, 19 nt, Artificial Sequence
  Description of Artificial Sequence: Synthetic oligonucleotide
gcaauaugcucggccuugg

SEQ ID NO: 238681 - RNA, 19 nt, Artificial Sequence
  Description of Artificial Sequence: Synthetic oligonucleotide
ccacuaggugacauggauc

SEQ ID NO: 238682 - RNA, 19 nt, Artificial Sequence
  Description of Artificial Sequence: Synthetic oligonucleotide
cccaaagaaacguggggca

SEQ ID NO: 238683 - RNA, 19 nt, Artificial Sequence
  Description of Artificial Sequence: Synthetic oligonucleotide
cuuagggaugcuuccuccu

SEQ ID NO: 238684 - RNA, 19 nt, Artificial Sequence
  Description of Artificial Sequence: Synthetic oligonucleotide
uguuuccguuugcgguacu

SEQ ID NO: 238685 - RNA, 19 nt, Artificial Sequence
  Description of Artificial Sequence: Synthetic oligonucleotide
  modified_base (10)..(10): a, c, u, g, unknown or other
aggcacaaungcacuggau

SEQ ID NO: 238686 - RNA, 19 nt, Artificial Sequence
  Description of Artificial Sequence: Synthetic oligonucleotide
uccccucauuugagcaaac

SEQ ID NO: 238687 - RNA, 19 nt, Artificial Sequence
  Description of Artificial Sequence: Synthetic oligonucleotide
ccauucuacaauccuaucu

SEQ ID NO: 238688 - RNA, 19 nt, Artificial Sequence
  Description of Artificial Sequence: Synthetic oligonucleotide
acugugcauaugauaguua

SEQ ID NO: 238689 - RNA, 19 nt, Artificial Sequence
  Description of Artificial Sequence: Synthetic oligonucleotide
gcacuggauggggagaagc

SEQ ID NO: 238690 - RNA, 19 nt, Artificial Sequence
  Description of Artificial Sequence: Synthetic oligonucleotide
ccccagaccacuacugcac

SEQ ID NO: 238691 - RNA, 19 nt, Artificial Sequence
  Description of Artificial Sequence: Synthetic oligonucleotide
aguccccguaaagggcagg

SEQ ID NO: 238692 - RNA, 19 nt, Artificial Sequence
  Description of Artificial Sequence: Synthetic oligonucleotide
agacugggugagauguccu

SEQ ID NO: 238693 - RNA, 19 nt, Artificial Sequence
  Description of Artificial Sequence: Synthetic oligonucleotide
ugcggcuggcugcuauaau

SEQ ID NO: 238694 - RNA, 19 nt, Artificial Sequence
  Description of Artificial Sequence: Synthetic oligonucleotide
gccuccgaaugugauguag

SEQ ID NO: 238695 - RNA, 19 nt, Artificial Sequence
  Description of Artificial Sequence: Synthetic oligonucleotide
ucccacgauguggguagug

SEQ ID NO: 238696 - RNA, 19 nt, Artificial Sequence
  Description of Artificial Sequence: Synthetic oligonucleotide
cccuuucaccacuagguga

SEQ ID NO: 238697 - RNA, 19 nt, Artificial Sequence
  Description of Artificial Sequence: Synthetic oligonucleotide
ggcccuuucaccacuaggu

SEQ ID NO: 238698 - RNA, 19 nt, Artificial Sequence
  Description of Artificial Sequence: Synthetic oligonucleotide
gcuccuuuagagagugcug

SEQ ID NO: 238699 - RNA, 19 nt, Artificial Sequence
  Description of Artificial Sequence: Synthetic oligonucleotide
uggauccacgagagagauu

SEQ ID NO: 238700 - RNA, 19 nt, Artificial Sequence
  Description of Artificial Sequence: Synthetic oligonucleotide
cagccauaucugaguagga

SEQ ID NO: 238701 - RNA, 19 nt, Artificial Sequence
  Description of Artificial Sequence: Synthetic oligonucleotide
gauaguccguaagucugau

SEQ ID NO: 238702 - RNA, 19 nt, Artificial Sequence
  Description of Artificial Sequence: Synthetic oligonucleotide
gcggcuggcugcuauaaua

SEQ ID NO: 238703 - RNA, 19 nt, Artificial Sequence
  Description of Artificial Sequence: Synthetic oligonucleotide
acaauccuaucugccccau

SEQ ID NO: 238704 - RNA, 19 nt, Artificial Sequence
  Description of Artificial Sequence: Synthetic oligonucleotide
ggagucgguacugguguac

SEQ ID NO: 238705 - RNA, 19 nt, Artificial Sequence
  Description of Artificial Sequence: Synthetic oligonucleotide
cccggagucguucaacuga

SEQ ID NO: 238706 - RNA, 19 nt, Artificial Sequence
  Description of Artificial Sequence: Synthetic oligonucleotide
aggccggaggccagucacg

SEQ ID NO: 238707 - RNA, 19 nt, Artificial Sequence
  Description of Artificial Sequence: Synthetic oligonucleotide
caccacuaggugacaugga

SEQ ID NO: 238708 - RNA, 19 nt, Artificial Sequence
  Description of Artificial Sequence: Synthetic oligonucleotide
ccucugaaaggggacgaac

SEQ ID NO: 238709 - RNA, 19 nt, Artificial Sequence
  Description of Artificial Sequence: Synthetic oligonucleotide
ggguaugggcaacuuguua

SEQ ID NO: 238710 - RNA, 19 nt, Artificial Sequence
  Description of Artificial Sequence: Synthetic oligonucleotide
cauugcacuuagaaccguu

SEQ ID NO: 238711 - RNA, 19 nt, Artificial Sequence
  Description of Artificial Sequence: Synthetic oligonucleotide
cuccccucauuugagcaaa

SEQ ID NO: 238712 - RNA, 19 nt, Artificial Sequence
  Description of Artificial Sequence: Synthetic oligonucleotide
guuagggguaugggcaacu

SEQ ID NO: 238713 - RNA, 19 nt, Artificial Sequence
  Description of Artificial Sequence: Synthetic oligonucleotide
acacuccacuugaggaaga

SEQ ID NO: 238714 - RNA, 19 nt, Artificial Sequence
  Description of Artificial Sequence: Synthetic oligonucleotide
uggcaaccauauggaauuu

SEQ ID NO: 238715 - RNA, 19 nt, Artificial Sequence
  Description of Artificial Sequence: Synthetic oligonucleotide
ccaauuaauggagaccacu

SEQ ID NO: 238716 - RNA, 19 nt, Artificial Sequence
  Description of Artificial Sequence: Synthetic oligonucleotide
cauaucugaguaggaugua

SEQ ID NO: 238717 - RNA, 19 nt, Artificial Sequence
  Description of Artificial Sequence: Synthetic oligonucleotide
augcggcuggcugcuauaa

SEQ ID NO: 238718 - RNA, 19 nt, Artificial Sequence
  Description of Artificial Sequence: Synthetic oligonucleotide
ucacgaccacaagucucau

SEQ ID NO: 238719 - RNA, 19 nt, Artificial Sequence
  Description of Artificial Sequence: Synthetic oligonucleotide
gagaaccuuagggaugcuu

SEQ ID NO: 238720 - RNA, 19 nt, Artificial Sequence
  Description of Artificial Sequence: Synthetic oligonucleotide
cuguuuccagaaugcggcu

SEQ ID NO: 238721 - RNA, 19 nt, Artificial Sequence
  Description of Artificial Sequence: Synthetic oligonucleotide
caccuacugcugauguucu

SEQ ID NO: 238722 - RNA, 19 nt, Artificial Sequence
  Description of Artificial Sequence: Synthetic oligonucleotide
caaugcucaugacguccaa

SEQ ID NO: 238723 - RNA, 19 nt, Artificial Sequence
  Description of Artificial Sequence: Synthetic oligonucleotide
cagucacgaccacaagucu

SEQ ID NO: 238724 - RNA, 19 nt, Artificial Sequence
  Description of Artificial Sequence: Synthetic oligonucleotide
caaggccggaggccaguca

SEQ ID NO: 238725 - RNA, 19 nt, Artificial Sequence
  Description of Artificial Sequence: Synthetic oligonucleotide
cccugcaguccccguaaag

SEQ ID NO: 238726 - RNA, 19 nt, Artificial Sequence
  Description of Artificial Sequence: Synthetic oligonucleotide
cccuuaacagcagggagaa

SEQ ID NO: 238727 - RNA, 19 nt, Artificial Sequence
  Description of Artificial Sequence: Synthetic oligonucleotide
guagggguaggcagcacuu

SEQ ID NO: 238728 - RNA, 19 nt, Artificial Sequence
  Description of Artificial Sequence: Synthetic oligonucleotide
gcccacucucauguaagca

SEQ ID NO: 238729 - RNA, 19 nt, Artificial Sequence
  Description of Artificial Sequence: Synthetic oligonucleotide
gggcugagaaaccgagucu

SEQ ID NO: 238730 - RNA, 19 nt, Artificial Sequence
  Description of Artificial Sequence: Synthetic oligonucleotide
gaagcagcuaugggcucau

SEQ ID NO: 238731 - RNA, 19 nt, Artificial Sequence
  Description of Artificial Sequence: Synthetic oligonucleotide
ccaacauguuauggacaug

SEQ ID NO: 238732 - RNA, 19 nt, Artificial Sequence
  Description of Artificial Sequence: Synthetic oligonucleotide
cacucccacgaugugggua

SEQ ID NO: 238733 - RNA, 19 nt, Artificial Sequence
  Description of Artificial Sequence: Synthetic oligonucleotide
cggugccauucuacaaucc

SEQ ID NO: 238734 - RNA, 19 nt, Artificial Sequence
  Description of Artificial Sequence: Synthetic oligonucleotide
caauaugcucggccuuggu

SEQ ID NO: 238735 - RNA, 19 nt, Artificial Sequence
  Description of Artificial Sequence: Synthetic oligonucleotide
ggcaaccauauggaauuua

SEQ ID NO: 238736 - RNA, 19 nt, Artificial Sequence
  Description of Artificial Sequence: Synthetic oligonucleotide
gauccacgagagagauucu

SEQ ID NO: 238737 - RNA, 19 nt, Artificial Sequence
  Description of Artificial Sequence: Synthetic oligonucleotide
ggcacucccgggaggcagc

SEQ ID NO: 238738 - RNA, 19 nt, Artificial Sequence
  Description of Artificial Sequence: Synthetic oligonucleotide
cgguacugguguacacccc

SEQ ID NO: 238739 - RNA, 19 nt, Artificial Sequence
  Description of Artificial Sequence: Synthetic oligonucleotide
uaccccgccugggcuggcu

SEQ ID NO: 238740 - RNA, 19 nt, Artificial Sequence
  Description of Artificial Sequence: Synthetic oligonucleotide
cgcacggcacucccgggag

SEQ ID NO: 238741 - RNA, 19 nt, Artificial Sequence
  Description of Artificial Sequence: Synthetic oligonucleotide
cccuaggaaaguccugucu

SEQ ID NO: 238742 - RNA, 19 nt, Artificial Sequence
  Description of Artificial Sequence: Synthetic oligonucleotide
cacugcuucggagaaccuu

SEQ ID NO: 238743 - RNA, 19 nt, Artificial Sequence
  Description of Artificial Sequence: Synthetic oligonucleotide
ggcuucaacacaagucauu

SEQ ID NO: 238744 - RNA, 19 nt, Artificial Sequence
  Description of Artificial Sequence: Synthetic oligonucleotide
cguuugcgguacuccagca

SEQ ID NO: 238745 - RNA, 19 nt, Artificial Sequence
  Description of Artificial Sequence: Synthetic oligonucleotide
cggaggccagucacgacca

SEQ ID NO: 238746 - RNA, 19 nt, Artificial Sequence
  Description of Artificial Sequence: Synthetic oligonucleotide
cacgaccacaagucucauu

SEQ ID NO: 238747 - RNA, 19 nt, Artificial Sequence
  Description of Artificial Sequence: Synthetic oligonucleotide
ccggagucguucaacugau

SEQ ID NO: 238748 - RNA, 19 nt, Artificial Sequence
  Description of Artificial Sequence: Synthetic oligonucleotide
gcgguacuccagcaaggau

SEQ ID NO: 238749 - RNA, 19 nt, Artificial Sequence
  Description of Artificial Sequence: Synthetic oligonucleotide
caauccuaucugccccauu

SEQ ID NO: 238750 - RNA, 19 nt, Artificial Sequence
  Description of Artificial Sequence: Synthetic oligonucleotide
ccaaggccggaggccaguc

SEQ ID NO: 238751 - RNA, 19 nt, Artificial Sequence
  Description of Artificial Sequence: Synthetic oligonucleotide
ccguaagucugauggcaau

SEQ ID NO: 238752 - RNA, 19 nt, Artificial Sequence
  Description of Artificial Sequence: Synthetic oligonucleotide
gggguaugggcaacuuguu

SEQ ID NO: 238753 - RNA, 19 nt, Artificial Sequence
  Description of Artificial Sequence: Synthetic oligonucleotide
cccugucggugccauucua

SEQ ID NO: 238754 - RNA, 19 nt, Artificial Sequence
  Description of Artificial Sequence: Synthetic oligonucleotide
cucccacgauguggguagu

SEQ ID NO: 238755 - RNA, 19 nt, Artificial Sequence
  Description of Artificial Sequence: Synthetic oligonucleotide
ccacucccacgaugugggu

SEQ ID NO: 238756 - RNA, 19 nt, Artificial Sequence
  Description of Artificial Sequence: Synthetic oligonucleotide
cagcccugucggugccauu

SEQ ID NO: 238757 - RNA, 19 nt, Artificial Sequence
  Description of Artificial Sequence: Synthetic oligonucleotide
aaauggaucaguuagagcu

SEQ ID NO: 238758 - RNA, 19 nt, Artificial Sequence
  Description of Artificial Sequence: Synthetic oligonucleotide
aauacgguacuucuuauac

SEQ ID NO: 238759 - RNA, 19 nt, Artificial Sequence
  Description of Artificial Sequence: Synthetic oligonucleotide
aagauaaggauccaccucg

SEQ ID NO: 238760 - RNA, 19 nt, Artificial Sequence
  Description of Artificial Sequence: Synthetic oligonucleotide
aacgcaauaucauagaccu

SEQ ID NO: 238761 - RNA, 19 nt, Artificial Sequence
  Description of Artificial Sequence: Synthetic oligonucleotide
aaccauacaaguccccucc

SEQ ID NO: 238762 - RNA, 19 nt, Artificial Sequence
  Description of Artificial Sequence: Synthetic oligonucleotide
auagacuuaauguacguag

SEQ ID NO: 238763 - RNA, 19 nt, Artificial Sequence
  Description of Artificial Sequence: Synthetic oligonucleotide
uuuagggucauauacagaa

SEQ ID NO: 238764 - RNA, 19 nt, Artificial Sequence
  Description of Artificial Sequence: Synthetic oligonucleotide
accuaaaagauaaggaucc

SEQ ID NO: 238765 - RNA, 19 nt, Artificial Sequence
  Description of Artificial Sequence: Synthetic oligonucleotide
ucuucguaaaugauggugc

SEQ ID NO: 238766 - RNA, 19 nt, Artificial Sequence
  Description of Artificial Sequence: Synthetic oligonucleotide
cuuguuuagggucauauac

SEQ ID NO: 238767 - RNA, 19 nt, Artificial Sequence
  Description of Artificial Sequence: Synthetic oligonucleotide
uacacauaggcuaaagggc

SEQ ID NO: 238768 - RNA, 19 nt, Artificial Sequence
  Description of Artificial Sequence: Synthetic oligonucleotide
auaauucacacucaggggu

SEQ ID NO: 238769 - RNA, 19 nt, Artificial Sequence
  Description of Artificial Sequence: Synthetic oligonucleotide
agaacgaauagacuuaaug

SEQ ID NO: 238770 - RNA, 19 nt, Artificial Sequence
  Description of Artificial Sequence: Synthetic oligonucleotide
aacggaaacagucaccuga

SEQ ID NO: 238771 - RNA, 19 nt, Artificial Sequence
  Description of Artificial Sequence: Synthetic oligonucleotide
cucaagaucuuguuuaggg

SEQ ID NO: 238772 - RNA, 19 nt, Artificial Sequence
  Description of Artificial Sequence: Synthetic oligonucleotide
agcaacaauagacauacug

SEQ ID NO: 238773 - RNA, 19 nt, Artificial Sequence
  Description of Artificial Sequence: Synthetic oligonucleotide
acuguaggcuaccaagucc

SEQ ID NO: 238774 - RNA, 19 nt, Artificial Sequence
  Description of Artificial Sequence: Synthetic oligonucleotide
uaaggauccaccucguucc

SEQ ID NO: 238775 - RNA, 19 nt, Artificial Sequence
  Description of Artificial Sequence: Synthetic oligonucleotide
acaauagacauacuggcca

SEQ ID NO: 238776 - RNA, 19 nt, Artificial Sequence
  Description of Artificial Sequence: Synthetic oligonucleotide
uaccuaaaagauaaggauc

SEQ ID NO: 238777 - RNA, 19 nt, Artificial Sequence
  Description of Artificial Sequence: Synthetic oligonucleotide
cuugucuaucccauaaugc

SEQ ID NO: 238778 - RNA, 19 nt, Artificial Sequence
  Description of Artificial Sequence: Synthetic oligonucleotide
ucaucuaaaccaacaagcu

SEQ ID NO: 238779 - RNA, 19 nt, Artificial Sequence
  Description of Artificial Sequence: Synthetic oligonucleotide
caaucugaccauuagcagc

SEQ ID NO: 238780 - RNA, 19 nt, Artificial Sequence
  Description of Artificial Sequence: Synthetic oligonucleotide
aacccauucauguaacgga

SEQ ID NO: 238781 - RNA, 19 nt, Artificial Sequence
  Description of Artificial Sequence: Synthetic oligonucleotide
agaauuguccgucuaucuc

SEQ ID NO: 238782 - RNA, 19 nt, Artificial Sequence
  Description of Artificial Sequence: Synthetic oligonucleotide
agauagucaccacuugucg

SEQ ID NO: 238783 - RNA, 19 nt, Artificial Sequence
  Description of Artificial Sequence: Synthetic oligonucleotide
gagcuuaacauuuuguaga

SEQ ID NO: 238784 - RNA, 19 nt, Artificial Sequence
  Description of Artificial Sequence: Synthetic oligonucleotide
uacaguacaguucugcaaa

SEQ ID NO: 238785 - RNA, 19 nt, Artificial Sequence
  Description of Artificial Sequence: Synthetic oligonucleotide
uaagaaaccuucagguagc

SEQ ID NO: 238786 - RNA, 19 nt, Artificial Sequence
  Description of Artificial Sequence: Synthetic oligonucleotide
uauuacaagcccuguauac

SEQ ID NO: 238787 - RNA, 19 nt, Artificial Sequence
  Description of Artificial Sequence: Synthetic oligonucleotide
acgaauagacuuaauguac

SEQ ID NO: 238788 - RNA, 19 nt, Artificial Sequence
  Description of Artificial Sequence: Synthetic oligonucleotide
uuguccgucuaucucaacc

SEQ ID NO: 238789 - RNA, 19 nt, Artificial Sequence
  Description of Artificial Sequence: Synthetic oligonucleotide
auguaacggaaacagucac

SEQ ID NO: 238790 - RNA, 19 nt, Artificial Sequence
  Description of Artificial Sequence: Synthetic oligonucleotide
guaguuaggguccugcuug

SEQ ID NO: 238791 - RNA, 19 nt, Artificial Sequence
  Description of Artificial Sequence: Synthetic oligonucleotide
gaacgaauagacuuaaugu

SEQ ID NO: 238792 - RNA, 19 nt, Artificial Sequence
  Description of Artificial Sequence: Synthetic oligonucleotide
ugcuugagguaccuaaaag

SEQ ID NO: 238793 - RNA, 19 nt, Artificial Sequence
  Description of Artificial Sequence: Synthetic oligonucleotide
ucggcugaacgcaauauca

SEQ ID NO: 238794 - RNA, 19 nt, Artificial Sequence
  Description of Artificial Sequence: Synthetic oligonucleotide
uacaaaguaugaugggcag

SEQ ID NO: 238795 - RNA, 19 nt, Artificial Sequence
  Description of Artificial Sequence: Synthetic oligonucleotide
ugaacgcaauaucauagac

SEQ ID NO: 238796 - RNA, 19 nt, Artificial Sequence
  Description of Artificial Sequence: Synthetic oligonucleotide
ucagaaccauacaaguccc

SEQ ID NO: 238797 - RNA, 19 nt, Artificial Sequence
  Description of Artificial Sequence: Synthetic oligonucleotide
uaggcuaaagggcacagaa

SEQ ID NO: 238798 - RNA, 19 nt, Artificial Sequence
  Description of Artificial Sequence: Synthetic oligonucleotide
aucguggcaagguaguuag

SEQ ID NO: 238799 - RNA, 19 nt, Artificial Sequence
  Description of Artificial Sequence: Synthetic oligonucleotide
uggauuuacuucuccagca

SEQ ID NO: 238800 - RNA, 19 nt, Artificial Sequence
  Description of Artificial Sequence: Synthetic oligonucleotide
ucuucuuacguggggaggg

SEQ ID NO: 238801 - RNA, 19 nt, Artificial Sequence
  Description of Artificial Sequence: Synthetic oligonucleotide
ucgggugcuucucaagucg

SEQ ID NO: 238802 - RNA, 19 nt, Artificial Sequence
  Description of Artificial Sequence: Synthetic oligonucleotide
gaacccauucauguaacgg

SEQ ID NO: 238803 - RNA, 19 nt, Artificial Sequence
  Description of Artificial Sequence: Synthetic oligonucleotide
ucaguuagagcuuaacauu

SEQ ID NO: 238804 - RNA, 19 nt, Artificial Sequence
  Description of Artificial Sequence: Synthetic oligonucleotide
uggguguaaagcaacaaua

SEQ ID NO: 238805 - RNA, 19 nt, Artificial Sequence
  Description of Artificial Sequence: Synthetic oligonucleotide
cuacacacggaguaucucc

SEQ ID NO: 238806 - RNA, 19 nt, Artificial Sequence
  Description of Artificial Sequence: Synthetic oligonucleotide
acaagcccuguauacaauc

SEQ ID NO: 238807 - RNA, 19 nt, Artificial Sequence
  Description of Artificial Sequence: Synthetic oligonucleotide
aauguacguaggaagaagu

SEQ ID NO: 238808 - RNA, 19 nt, Artificial Sequence
  Description of Artificial Sequence: Synthetic oligonucleotide
uuuaugagaauuguccguc

SEQ ID NO: 238809 - RNA, 19 nt, Artificial Sequence
  Description of Artificial Sequence: Synthetic oligonucleotide
uggauagacgccuuuugug

SEQ ID NO: 238810 - RNA, 19 nt, Artificial Sequence
  Description of Artificial Sequence: Synthetic oligonucleotide
gguagacaaucuuagcugg

SEQ ID NO: 238811 - RNA, 19 nt, Artificial Sequence
  Description of Artificial Sequence: Synthetic oligonucleotide
gcaacaauagacauacugg

SEQ ID NO: 238812 - RNA, 19 nt, Artificial Sequence
  Description of Artificial Sequence: Synthetic oligonucleotide
uaauguacguaggaagaag

SEQ ID NO: 238813 - RNA, 19 nt, Artificial Sequence
  Description of Artificial Sequence: Synthetic oligonucleotide
agguaccuaaaagauaagg

SEQ ID NO: 238814 - RNA, 19 nt, Artificial Sequence
  Description of Artificial Sequence: Synthetic oligonucleotide
aaacaagacuccggcagcg

SEQ ID NO: 238815 - RNA, 19 nt, Artificial Sequence
  Description of Artificial Sequence: Synthetic oligonucleotide
aagcccuguauacaaucag

SEQ ID NO: 238816 - RNA, 19 nt, Artificial Sequence
  Description of Artificial Sequence: Synthetic oligonucleotide
acacgagauucacucgucc

SEQ ID NO: 238817 - RNA, 19 nt, Artificial Sequence
  Description of Artificial Sequence: Synthetic oligonucleotide
cugaccauuagcagcaaug

SEQ ID NO: 238818 - RNA, 19 nt, Artificial Sequence
  Description of Artificial Sequence: Synthetic oligonucleotide
uguuucaccaacccuccac

SEQ ID NO: 238819 - RNA, 19 nt, Artificial Sequence
  Description of Artificial Sequence: Synthetic oligonucleotide
cuugcggugcaccacacag

SEQ ID NO: 238820 - RNA, 19 nt, Artificial Sequence
  Description of Artificial Sequence: Synthetic oligonucleotide
uccuccgcuacacacacac

SEQ ID NO: 238821 - RNA, 19 nt, Artificial Sequence
  Description of Artificial Sequence: Synthetic oligonucleotide
gaaauggaucaguuagagc

SEQ ID NO: 238822 - RNA, 19 nt, Artificial Sequence
  Description of Artificial Sequence: Synthetic oligonucleotide
gagaaaugguuacaguaca

SEQ ID NO: 238823 - RNA, 19 nt, Artificial Sequence
  Description of Artificial Sequence: Synthetic oligonucleotide
uuucacagcacaguguuaa

SEQ ID NO: 238824 - RNA, 19 nt, Artificial Sequence
  Description of Artificial Sequence: Synthetic oligonucleotide
uuacaagcccuguauacaa

SEQ ID NO: 238825 - RNA, 19 nt, Artificial Sequence
  Description of Artificial Sequence: Synthetic oligonucleotide
auagcgaggggcaaccggc

SEQ ID NO: 238826 - RNA, 19 nt, Artificial Sequence
  Description of Artificial Sequence: Synthetic oligonucleotide
uguacguaggaagaaguaa

SEQ ID NO: 238827 - RNA, 19 nt, Artificial Sequence
  Description of Artificial Sequence: Synthetic oligonucleotide
uaaggggcaaacccaucag

SEQ ID NO: 238828 - RNA, 19 nt, Artificial Sequence
  Description of Artificial Sequence: Synthetic oligonucleotide
augaugggcagaaaauacg

SEQ ID NO: 238829 - RNA, 19 nt, Artificial Sequence
  Description of Artificial Sequence: Synthetic oligonucleotide
caacccuccacacacggag

SEQ ID NO: 238830 - RNA, 19 nt, Artificial Sequence
  Description of Artificial Sequence: Synthetic oligonucleotide
aaauacgguacuucuuaua

SEQ ID NO: 238831 - RNA, 19 nt, Artificial Sequence
  Description of Artificial Sequence: Synthetic oligonucleotide
agggguagacaaucuuagc

SEQ ID NO: 238832 - RNA, 19 nt, Artificial Sequence
  Description of Artificial Sequence: Synthetic oligonucleotide
uguccgucuaucucaaccu

SEQ ID NO: 238833 - RNA, 19 nt, Artificial Sequence
  Description of Artificial Sequence: Synthetic oligonucleotide
aaauuauuacaagcccugu

SEQ ID NO: 238834 - RNA, 19 nt, Artificial Sequence
  Description of Artificial Sequence: Synthetic oligonucleotide
cuaccaaguccaauacugc

SEQ ID NO: 238835 - RNA, 19 nt, Artificial Sequence
  Description of Artificial Sequence: Synthetic oligonucleotide
agacacgagauucacucgu

SEQ ID NO: 238836 - RNA, 19 nt, Artificial Sequence
  Description of Artificial Sequence: Synthetic oligonucleotide
agaacacuccacucucggg

SEQ ID NO: 238837 - RNA, 19 nt, Artificial Sequence
  Description of Artificial Sequence: Synthetic oligonucleotide
uacacacggaguaucucca

SEQ ID NO: 238838 - RNA, 19 nt, Artificial Sequence
  Description of Artificial Sequence: Synthetic oligonucleotide
cucaggaacggccuagccc

SEQ ID NO: 238839 - RNA, 19 nt, Artificial Sequence
  Description of Artificial Sequence: Synthetic oligonucleotide
uucauguaacggaaacagu

SEQ ID NO: 238840 - RNA, 19 nt, Artificial Sequence
  Description of Artificial Sequence: Synthetic oligonucleotide
gucuucguaaaugauggug

SEQ ID NO: 238841 - RNA, 19 nt, Artificial Sequence
  Description of Artificial Sequence: Synthetic oligonucleotide
gaauguggggcccaagcga

SEQ ID NO: 238842 - RNA, 19 nt, Artificial Sequence
  Description of Artificial Sequence: Synthetic oligonucleotide
uuaauguacguaggaagaa

SEQ ID NO: 238843 - RNA, 19 nt, Artificial Sequence
  Description of Artificial Sequence: Synthetic oligonucleotide
ucucgggugcuucucaagu

SEQ ID NO: 238844 - RNA, 19 nt, Artificial Sequence
  Description of Artificial Sequence: Synthetic oligonucleotide
agagguuuguacaaucaug

SEQ ID NO: 238845 - RNA, 19 nt, Artificial Sequence
  Description of Artificial Sequence: Synthetic oligonucleotide
accucguuccagucaaagg

SEQ ID NO: 238846 - RNA, 19 nt, Artificial Sequence
  Description of Artificial Sequence: Synthetic oligonucleotide
gccaagacuacacacggag

SEQ ID NO: 238847 - RNA, 19 nt, Artificial Sequence
  Description of Artificial Sequence: Synthetic oligonucleotide
caauagacauacuggccac

SEQ ID NO: 238848 - RNA, 19 nt, Artificial Sequence
  Description of Artificial Sequence: Synthetic oligonucleotide
gauagacgccuuuuguguc

SEQ ID NO: 238849 - RNA, 19 nt, Artificial Sequence
  Description of Artificial Sequence: Synthetic oligonucleotide
agggacucaucuaaaauca

SEQ ID NO: 238850 - RNA, 19 nt, Artificial Sequence
  Description of Artificial Sequence: Synthetic oligonucleotide
uuaugagaauuguccgucu

SEQ ID NO: 238851 - RNA, 19 nt, Artificial Sequence
  Description of Artificial Sequence: Synthetic oligonucleotide
cacgagauucacucguccc

SEQ ID NO: 238852 - RNA, 19 nt, Artificial Sequence
  Description of Artificial Sequence: Synthetic oligonucleotide
cauuguugaucucuccuuc

SEQ ID NO: 238853 - RNA, 19 nt, Artificial Sequence
  Description of Artificial Sequence: Synthetic oligonucleotide
gagauagucaccacuuguc

SEQ ID NO: 238854 - RNA, 19 nt, Artificial Sequence
  Description of Artificial Sequence: Synthetic oligonucleotide
uccagucaaaggaggugag

SEQ ID NO: 238855 - RNA, 19 nt, Artificial Sequence
  Description of Artificial Sequence: Synthetic oligonucleotide
uucaggccuacuacucucc

SEQ ID NO: 238856 - RNA, 19 nt, Artificial Sequence
  Description of Artificial Sequence: Synthetic oligonucleotide
ugagaauuguccgucuauc

SEQ ID NO: 238857 - RNA, 19 nt, Artificial Sequence
  Description of Artificial Sequence: Synthetic oligonucleotide
aguaugaugggcagaaaau

SEQ ID NO: 238858 - RNA, 19 nt, Artificial Sequence
  Description of Artificial Sequence: Synthetic oligonucleotide
cuguaggcuaccaagucca

SEQ ID NO: 238859 - RNA, 19 nt, Artificial Sequence
  Description of Artificial Sequence: Synthetic oligonucleotide
gcugaacgcaauaucauag

SEQ ID NO: 238860 - RNA, 19 nt, Artificial Sequence
  Description of Artificial Sequence: Synthetic oligonucleotide
gguaccuaaaagauaagga

SEQ ID NO: 238861 - RNA, 19 nt, Artificial Sequence
  Description of Artificial Sequence: Synthetic oligonucleotide
auacgguacuucuuauaca

SEQ ID NO: 238862 - RNA, 19 nt, Artificial Sequence
  Description of Artificial Sequence: Synthetic oligonucleotide
uagacaaucuuagcuggcu

SEQ ID NO: 238863 - RNA, 19 nt, Artificial Sequence
  Description of Artificial Sequence: Synthetic oligonucleotide
cuaucucaaccucaagauc

SEQ ID NO: 238864 - RNA, 19 nt, Artificial Sequence
  Description of Artificial Sequence: Synthetic oligonucleotide
agacuacacacggaguauc

SEQ ID NO: 238865 - RNA, 19 nt, Artificial Sequence
  Description of Artificial Sequence: Synthetic oligonucleotide
cguaggaagaaguaaaguc

SEQ ID NO: 238866 - RNA, 19 nt, Artificial Sequence
  Description of Artificial Sequence: Synthetic oligonucleotide
aguccauccuuuaugagaa

SEQ ID NO: 238867 - RNA, 19 nt, Artificial Sequence
  Description of Artificial Sequence: Synthetic oligonucleotide
ccagacacgagauucacuc

SEQ ID NO: 238868 - RNA, 19 nt, Artificial Sequence
  Description of Artificial Sequence: Synthetic oligonucleotide
gauucacucgucccagcac

SEQ ID NO: 238869 - RNA, 19 nt, Artificial Sequence
  Description of Artificial Sequence: Synthetic oligonucleotide
cuuacguggggagggaaag

SEQ ID NO: 238870 - RNA, 19 nt, Artificial Sequence
  Description of Artificial Sequence: Synthetic oligonucleotide
auacaaucagccaugugaa

SEQ ID NO: 238871 - RNA, 19 nt, Artificial Sequence
  Description of Artificial Sequence: Synthetic oligonucleotide
agaaccauacaaguccccu

SEQ ID NO: 238872 - RNA, 19 nt, Artificial Sequence
  Description of Artificial Sequence: Synthetic oligonucleotide
cgaauagacuuaauguacg

SEQ ID NO: 238873 - RNA, 19 nt, Artificial Sequence
  Description of Artificial Sequence: Synthetic oligonucleotide
ucuuacguggggagggaaa

SEQ ID NO: 238874 - RNA, 19 nt, Artificial Sequence
  Description of Artificial Sequence: Synthetic oligonucleotide
aguaacauucagacagcag

SEQ ID NO: 238875 - RNA, 19 nt, Artificial Sequence
  Description of Artificial Sequence: Synthetic oligonucleotide
gcuugucuaucccauaaug

SEQ ID NO: 238876 - RNA, 19 nt, Artificial Sequence
  Description of Artificial Sequence: Synthetic oligonucleotide
caaugcuugagguaccuaa

SEQ ID NO: 238877 - RNA, 19 nt, Artificial Sequence
  Description of Artificial Sequence: Synthetic oligonucleotide
ggguguaaagcaacaauag

SEQ ID NO: 238878 - RNA, 19 nt, Artificial Sequence
  Description of Artificial Sequence: Synthetic oligonucleotide
gguuguuuagccuggcgac

SEQ ID NO: 238879 - RNA, 19 nt, Artificial Sequence
  Description of Artificial Sequence: Synthetic oligonucleotide
augagaauuguccgucuau

SEQ ID NO: 238880 - RNA, 19 nt, Artificial Sequence
  Description of Artificial Sequence: Synthetic oligonucleotide
cagacacgagauucacucg

SEQ ID NO: 238881 - RNA, 19 nt, Artificial Sequence
  Description of Artificial Sequence: Synthetic oligonucleotide
cauugacacaugcucggug

SEQ ID NO: 238882 - RNA, 19 nt, Artificial Sequence
  Description of Artificial Sequence: Synthetic oligonucleotide
gaugacggaggucaaacau

SEQ ID NO: 238883 - RNA, 19 nt, Artificial Sequence
  Description of Artificial Sequence: Synthetic oligonucleotide
uggggcacgggacgggcgg

SEQ ID NO: 238884 - RNA, 19 nt, Artificial Sequence
  Description of Artificial Sequence: Synthetic oligonucleotide
aauguggggcccaagcgau

SEQ ID NO: 238885 - RNA, 19 nt, Artificial Sequence
  Description of Artificial Sequence: Synthetic oligonucleotide
aagacuacacacggaguau

SEQ ID NO: 238886 - RNA, 19 nt, Artificial Sequence
  Description of Artificial Sequence: Synthetic oligonucleotide
aaugcuugagguaccuaaa

SEQ ID NO: 238887 - RNA, 19 nt, Artificial Sequence
  Description of Artificial Sequence: Synthetic oligonucleotide
caagacuacacacggagua

SEQ ID NO: 238888 - RNA, 19 nt, Artificial Sequence
  Description of Artificial Sequence: Synthetic oligonucleotide
gguuacaguacaguucugc

SEQ ID NO: 238889 - RNA, 19 nt, Artificial Sequence
  Description of Artificial Sequence: Synthetic oligonucleotide
agguuuguacaaucaugcu

SEQ ID NO: 238890 - RNA, 19 nt, Artificial Sequence
  Description of Artificial Sequence: Synthetic oligonucleotide
gcuauaauucacacucagg

SEQ ID NO: 238891 - RNA, 19 nt, Artificial Sequence
  Description of Artificial Sequence: Synthetic oligonucleotide
gguguaaagcaacaauaga

SEQ ID NO: 238892 - RNA, 19 nt, Artificial Sequence
  Description of Artificial Sequence: Synthetic oligonucleotide
gguuuguacaaucaugcua

SEQ ID NO: 238893 - RNA, 19 nt, Artificial Sequence
  Description of Artificial Sequence: Synthetic oligonucleotide
ucuuauacaggaggcugaa

SEQ ID NO: 238894 - RNA, 19 nt, Artificial Sequence
  Description of Artificial Sequence: Synthetic oligonucleotide
agaugacggaggucaaaca

SEQ ID NO: 238895 - RNA, 19 nt, Artificial Sequence
  Description of Artificial Sequence: Synthetic oligonucleotide
ugcucagaaccuagacuga

SEQ ID NO: 238896 - RNA, 19 nt, Artificial Sequence
  Description of Artificial Sequence: Synthetic oligonucleotide
guaacggaaacagucaccu

SEQ ID NO: 238897 - RNA, 19 nt, Artificial Sequence
  Description of Artificial Sequence: Synthetic oligonucleotide
uuacguggggagggaaagg

SEQ ID NO: 238898 - RNA, 19 nt, Artificial Sequence
  Description of Artificial Sequence: Synthetic oligonucleotide
guacguaggaagaaguaaa

SEQ ID NO: 238899 - RNA, 19 nt, Artificial Sequence
  Description of Artificial Sequence: Synthetic oligonucleotide
cacauaggcuaaagggcac

SEQ ID NO: 238900 - RNA, 19 nt, Artificial Sequence
  Description of Artificial Sequence: Synthetic oligonucleotide
gacuccggcagcgacuacc

SEQ ID NO: 238901 - RNA, 19 nt, Artificial Sequence
  Description of Artificial Sequence: Synthetic oligonucleotide
gagaauuguccgucuaucu

SEQ ID NO: 238902 - RNA, 19 nt, Artificial Sequence
  Description of Artificial Sequence: Synthetic oligonucleotide
cugaacgcaauaucauaga

SEQ ID NO: 238903 - RNA, 19 nt, Artificial Sequence
  Description of Artificial Sequence: Synthetic oligonucleotide
acguaggaagaaguaaagu

SEQ ID NO: 238904 - RNA, 19 nt, Artificial Sequence
  Description of Artificial Sequence: Synthetic oligonucleotide
gguggucaaagguguuucg

SEQ ID NO: 238905 - RNA, 19 nt, Artificial Sequence
  Description of Artificial Sequence: Synthetic oligonucleotide
acggaaacagucaccugag

SEQ ID NO: 238906 - RNA, 19 nt, Artificial Sequence
  Description of Artificial Sequence: Synthetic oligonucleotide
ggucaaagguguuucggca

SEQ ID NO: 238907 - RNA, 19 nt, Artificial Sequence
  Description of Artificial Sequence: Synthetic oligonucleotide
guagacaaucuuagcuggc

SEQ ID NO: 238908 - RNA, 19 nt, Artificial Sequence
  Description of Artificial Sequence: Synthetic oligonucleotide
cagaaccuagacugaggug

SEQ ID NO: 238909 - RNA, 19 nt, Artificial Sequence
  Description of Artificial Sequence: Synthetic oligonucleotide
cucggcugaacgcaauauc

SEQ ID NO: 238910 - RNA, 19 nt, Artificial Sequence
  Description of Artificial Sequence: Synthetic oligonucleotide
ggcacauuaguucaagccu

SEQ ID NO: 238911 - RNA, 19 nt, Artificial Sequence
  Description of Artificial Sequence: Synthetic oligonucleotide
uaguuaggguccugcuugu

SEQ ID NO: 238912 - RNA, 19 nt, Artificial Sequence
  Description of Artificial Sequence: Synthetic oligonucleotide
guucauacacauaggcuaa

SEQ ID NO: 238913 - RNA, 19 nt, Artificial Sequence
  Description of Artificial Sequence: Synthetic oligonucleotide
uuuguacaaucaugcuaua

SEQ ID NO: 238914 - RNA, 19 nt, Artificial Sequence
  Description of Artificial Sequence: Synthetic oligonucleotide
aguccccagauggugcagg

SEQ ID NO: 238915 - RNA, 19 nt, Artificial Sequence
  Description of Artificial Sequence: Synthetic oligonucleotide
caaucuuagcuggcuggcc

SEQ ID NO: 238916 - RNA, 19 nt, Artificial Sequence
  Description of Artificial Sequence: Synthetic oligonucleotide
aacaagacuccggcagcga

SEQ ID NO: 238917 - RNA, 19 nt, Artificial Sequence
  Description of Artificial Sequence: Synthetic oligonucleotide
cugcccggucucuaguccc

SEQ ID NO: 238918 - RNA, 19 nt, Artificial Sequence
  Description of Artificial Sequence: Synthetic oligonucleotide
ggauagacgccuuuugugu

SEQ ID NO: 238919 - RNA, 19 nt, Artificial Sequence
  Description of Artificial Sequence: Synthetic oligonucleotide
agcuugucuaucccauaau

SEQ ID NO: 238920 - RNA, 19 nt, Artificial Sequence
  Description of Artificial Sequence: Synthetic oligonucleotide
cacacacuccgcccggccc

SEQ ID NO: 238921 - RNA, 19 nt, Artificial Sequence
  Description of Artificial Sequence: Synthetic oligonucleotide
cucgggugcuucucaaguc

SEQ ID NO: 238922 - RNA, 19 nt, Artificial Sequence
  Description of Artificial Sequence: Synthetic oligonucleotide
uccgagaggcggcgggacc

SEQ ID NO: 238923 - RNA, 19 nt, Artificial Sequence
  Description of Artificial Sequence: Synthetic oligonucleotide
cucucgggugcuucucaag

SEQ ID NO: 238924 - RNA, 19 nt, Artificial Sequence
  Description of Artificial Sequence: Synthetic oligonucleotide
ugcccggucucuagucccc

SEQ ID NO: 238925 - RNA, 19 nt, Artificial Sequence
  Description of Artificial Sequence: Synthetic oligonucleotide
agucaccacuugucgccag

SEQ ID NO: 238926 - RNA, 19 nt, Artificial Sequence
  Description of Artificial Sequence: Synthetic oligonucleotide
gccgccaagacuacacacg

SEQ ID NO: 238927 - RNA, 19 nt, Artificial Sequence
  Description of Artificial Sequence: Synthetic oligonucleotide
caccucguuccagucaaag

SEQ ID NO: 238928 - RNA, 19 nt, Artificial Sequence
  Description of Artificial Sequence: Synthetic oligonucleotide
acggagauagucaccacuu

SEQ ID NO: 238929 - RNA, 19 nt, Artificial Sequence
  Description of Artificial Sequence: Synthetic oligonucleotide
guuguuuagccuggcgaca

SEQ ID NO: 238930 - RNA, 19 nt, Artificial Sequence
  Description of Artificial Sequence: Synthetic oligonucleotide
agauagcgaggggcaaccg

SEQ ID NO: 238931 - RNA, 19 nt, Artificial Sequence
  Description of Artificial Sequence: Synthetic oligonucleotide
caguuagagcuuaacauuu

SEQ ID NO: 238932 - RNA, 19 nt, Artificial Sequence
  Description of Artificial Sequence: Synthetic oligonucleotide
augcucggugguuguuuag

SEQ ID NO: 238933 - RNA, 19 nt, Artificial Sequence
  Description of Artificial Sequence: Synthetic oligonucleotide
gacacgagauucacucguc

SEQ ID NO: 238934 - RNA, 19 nt, Artificial Sequence
  Description of Artificial Sequence: Synthetic oligonucleotide
caucagauuucaggccuac

SEQ ID NO: 238935 - RNA, 19 nt, Artificial Sequence
  Description of Artificial Sequence: Synthetic oligonucleotide
cuguuggaugucccagaug

SEQ ID NO: 238936 - RNA, 19 nt, Artificial Sequence
  Description of Artificial Sequence: Synthetic oligonucleotide
gcacauuaguucaagccuc

SEQ ID NO: 238937 - RNA, 19 nt, Artificial Sequence
  Description of Artificial Sequence: Synthetic oligonucleotide
gcucggugguuguuuagcc

SEQ ID NO: 238938 - RNA, 19 nt, Artificial Sequence
  Description of Artificial Sequence: Synthetic oligonucleotide
caaucagccaugugaaaau

SEQ ID NO: 238939 - RNA, 19 nt, Artificial Sequence
  Description of Artificial Sequence: Synthetic oligonucleotide
ggauuuacuucuccagcaa

SEQ ID NO: 238940 - RNA, 19 nt, Artificial Sequence
  Description of Artificial Sequence: Synthetic oligonucleotide
gguccuccgcuacacacac

SEQ ID NO: 238941 - RNA, 19 nt, Artificial Sequence
  Description of Artificial Sequence: Synthetic oligonucleotide
aacagucaccugaggccug

SEQ ID NO: 238942 - RNA, 19 nt, Artificial Sequence
  Description of Artificial Sequence: Synthetic oligonucleotide
accggggcgcucaggaacg

SEQ ID NO: 238943 - RNA, 19 nt, Artificial Sequence
  Description of Artificial Sequence: Synthetic oligonucleotide
gggaucaccacaacugauc

SEQ ID NO: 238944 - RNA, 19 nt, Artificial Sequence
  Description of Artificial Sequence: Synthetic oligonucleotide
cacuugucgccagaagguc

SEQ ID NO: 238945 - RNA, 19 nt, Artificial Sequence
  Description of Artificial Sequence: Synthetic oligonucleotide
caguggguguaaagcaaca

SEQ ID NO: 238946 - RNA, 19 nt, Artificial Sequence
  Description of Artificial Sequence: Synthetic oligonucleotide
aguuagagcuuaacauuuu

SEQ ID NO: 238947 - RNA, 19 nt, Artificial Sequence
  Description of Artificial Sequence: Synthetic oligonucleotide
aguccugcacagauagcga

SEQ ID NO: 238948 - RNA, 19 nt, Artificial Sequence
  Description of Artificial Sequence: Synthetic oligonucleotide
uucuuacguggggagggaa

SEQ ID NO: 238949 - RNA, 19 nt, Artificial Sequence
  Description of Artificial Sequence: Synthetic oligonucleotide
acucucgggugcuucucaa

SEQ ID NO: 238950 - RNA, 19 nt, Artificial Sequence
  Description of Artificial Sequence: Synthetic oligonucleotide
ggaucaguuagagcuuaac

SEQ ID NO: 238951 - RNA, 19 nt, Artificial Sequence
  Description of Artificial Sequence: Synthetic oligonucleotide
cacggaguaucuccaggca

SEQ ID NO: 238952 - RNA, 19 nt, Artificial Sequence
  Description of Artificial Sequence: Synthetic oligonucleotide
ggugccgccaagacuacac

SEQ ID NO: 238953 - RNA, 19 nt, Artificial Sequence
  Description of Artificial Sequence: Synthetic oligonucleotide
ggaacggccuagcccuccg

SEQ ID NO: 238954 - RNA, 19 nt, Artificial Sequence
  Description of Artificial Sequence: Synthetic oligonucleotide
cuggauagacgccuuuugu

SEQ ID NO: 238955 - RNA, 19 nt, Artificial Sequence
  Description of Artificial Sequence: Synthetic oligonucleotide
caggccuacuacucuccuc

SEQ ID NO: 238956 - RNA, 19 nt, Artificial Sequence
  Description of Artificial Sequence: Synthetic oligonucleotide
agcgaggggcaaccggccu

SEQ ID NO: 238957 - RNA, 19 nt, Artificial Sequence
  Description of Artificial Sequence: Synthetic oligonucleotide
ugucgccagaaggucugga

SEQ ID NO: 238958 - RNA, 19 nt, Artificial Sequence
  Description of Artificial Sequence: Synthetic oligonucleotide
cucgauggcccgaggcauc

SEQ ID NO: 238959 - RNA, 19 nt, Artificial Sequence
  Description of Artificial Sequence: Synthetic oligonucleotide
gggacucaucuaaaaucag

SEQ ID NO: 238960 - RNA, 19 nt, Artificial Sequence
  Description of Artificial Sequence: Synthetic oligonucleotide
gacuacacacggaguaucu

SEQ ID NO: 238961 - RNA, 19 nt, Artificial Sequence
  Description of Artificial Sequence: Synthetic oligonucleotide
aguucauggcguagacagu

SEQ ID NO: 238962 - RNA, 19 nt, Artificial Sequence
  Description of Artificial Sequence: Synthetic oligonucleotide
agucgccucugguggagaa

SEQ ID NO: 238963 - RNA, 19 nt, Artificial Sequence
  Description of Artificial Sequence: Synthetic oligonucleotide
augacagcuaaggggcaaa

SEQ ID NO: 238964 - RNA, 19 nt, Artificial Sequence
  Description of Artificial Sequence: Synthetic oligonucleotide
ggcugaacgcaauaucaua

SEQ ID NO: 238965 - RNA, 19 nt, Artificial Sequence
  Description of Artificial Sequence: Synthetic oligonucleotide
agcucggcugaacgcaaua

SEQ ID NO: 238966 - RNA, 19 nt, Artificial Sequence
  Description of Artificial Sequence: Synthetic oligonucleotide
aagcaacaauagacauacu

SEQ ID NO: 238967 - RNA, 19 nt, Artificial Sequence
  Description of Artificial Sequence: Synthetic oligonucleotide
gcgaaagcgcuugucgggc

SEQ ID NO: 238968 - RNA, 19 nt, Artificial Sequence
  Description of Artificial Sequence: Synthetic oligonucleotide
ccacaugagcuuuguggug

SEQ ID NO: 238969 - RNA, 19 nt, Artificial Sequence
  Description of Artificial Sequence: Synthetic oligonucleotide
gcgcuugucgggccgcacg

SEQ ID NO: 238970 - RNA, 19 nt, Artificial Sequence
  Description of Artificial Sequence: Synthetic oligonucleotide
cagagguuuguacaaucau

SEQ ID NO: 238971 - RNA, 19 nt, Artificial Sequence
  Description of Artificial Sequence: Synthetic oligonucleotide
caucguggcaagguaguua

SEQ ID NO: 238972 - RNA, 19 nt, Artificial Sequence
  Description of Artificial Sequence: Synthetic oligonucleotide
caagguaguuaggguccug

SEQ ID NO: 238973 - RNA, 19 nt, Artificial Sequence
  Description of Artificial Sequence: Synthetic oligonucleotide
uccuuccguuugccgugca

SEQ ID NO: 238974 - RNA, 19 nt, Artificial Sequence
  Description of Artificial Sequence: Synthetic oligonucleotide
gugccgccaagacuacaca

SEQ ID NO: 238975 - RNA, 19 nt, Artificial Sequence
  Description of Artificial Sequence: Synthetic oligonucleotide
cucggugguuguuuagccu

SEQ ID NO: 238976 - RNA, 19 nt, Artificial Sequence
  Description of Artificial Sequence: Synthetic oligonucleotide
ccagggguagacaaucuua

SEQ ID NO: 238977 - RNA, 19 nt, Artificial Sequence
  Description of Artificial Sequence: Synthetic oligonucleotide
cuucuuacguggggaggga

SEQ ID NO: 238978 - RNA, 19 nt, Artificial Sequence
  Description of Artificial Sequence: Synthetic oligonucleotide
gcgacaggugugcagggaa

SEQ ID NO: 238979 - RNA, 19 nt, Artificial Sequence
  Description of Artificial Sequence: Synthetic oligonucleotide
uccggcggguccuccgcua

SEQ ID NO: 238980 - RNA, 19 nt, Artificial Sequence
  Description of Artificial Sequence: Synthetic oligonucleotide
ggcccgaccaccaguuuca

SEQ ID NO: 238981 - RNA, 19 nt, Artificial Sequence
  Description of Artificial Sequence: Synthetic oligonucleotide
ccuaaaagauaaggaucca

SEQ ID NO: 238982 - RNA, 19 nt, Artificial Sequence
  Description of Artificial Sequence: Synthetic oligonucleotide
caggaacggccuagcccuc

SEQ ID NO: 238983 - RNA, 19 nt, Artificial Sequence
  Description of Artificial Sequence: Synthetic oligonucleotide
gaggugccgccaagacuac

SEQ ID NO: 238984 - RNA, 19 nt, Artificial Sequence
  Description of Artificial Sequence: Synthetic oligonucleotide
cgggugcuucucaagucgc

SEQ ID NO: 238985 - RNA, 19 nt, Artificial Sequence
  Description of Artificial Sequence: Synthetic oligonucleotide
cgaaagcgcuugucgggcc

SEQ ID NO: 238986 - RNA, 19 nt, Artificial Sequence
  Description of Artificial Sequence: Synthetic oligonucleotide
ccgucuaucucaaccucaa

SEQ ID NO: 238987 - RNA, 19 nt, Artificial Sequence
  Description of Artificial Sequence: Synthetic oligonucleotide
guagacaguccagggcgcu

SEQ ID NO: 238988 - RNA, 19 nt, Artificial Sequence
  Description of Artificial Sequence: Synthetic oligonucleotide
cgacaggugugcagggaac

SEQ ID NO: 238989 - RNA, 19 nt, Artificial Sequence
  Description of Artificial Sequence: Synthetic oligonucleotide
cggagauagucaccacuug

SEQ ID NO: 238990 - RNA, 19 nt, Artificial Sequence
  Description of Artificial Sequence: Synthetic oligonucleotide
guaggcuaccaaguccaau

SEQ ID NO: 238991 - RNA, 19 nt, Artificial Sequence
  Description of Artificial Sequence: Synthetic oligonucleotide
aggugccgccaagacuaca

SEQ ID NO: 238992 - RNA, 19 nt, Artificial Sequence
  Description of Artificial Sequence: Synthetic oligonucleotide
gcgcucaggaacggccuag

SEQ ID NO: 238993 - RNA, 19 nt, Artificial Sequence
  Description of Artificial Sequence: Synthetic oligonucleotide
cgcuugucgggccgcacgc

SEQ ID NO: 238994 - RNA, 19 nt, Artificial Sequence
  Description of Artificial Sequence: Synthetic oligonucleotide
cagaggcgaagcagugggu

SEQ ID NO: 238995 - RNA, 19 nt, Artificial Sequence
  Description of Artificial Sequence: Synthetic oligonucleotide
ccaggcgaaagcgcuuguc

SEQ ID NO: 238996 - RNA, 19 nt, Artificial Sequence
  Description of Artificial Sequence: Synthetic oligonucleotide
gcgcuucauauuuguagau

SEQ ID NO: 238997 - RNA, 19 nt, Artificial Sequence
  Description of Artificial Sequence: Synthetic oligonucleotide
ggauggcacaaaagcuuua

SEQ ID NO: 238998 - RNA, 19 nt, Artificial Sequence
  Description of Artificial Sequence: Synthetic oligonucleotide
guccagggcgcuucauauu

SEQ ID NO: 238999 - RNA, 19 nt, Artificial Sequence
  Description of Artificial Sequence: Synthetic oligonucleotide
gacgggcggggagcccggc

SEQ ID NO: 239000 - RNA, 19 nt, Artificial Sequence
  Description of Artificial Sequence: Synthetic oligonucleotide
ggcaaccggccuggacucc

SEQ ID NO: 239001 - RNA, 19 nt, Artificial Sequence
  Description of Artificial Sequence: Synthetic oligonucleotide
ggacgggcggggagcccgg

SEQ ID NO: 239002 - RNA, 19 nt, Artificial Sequence
  Description of Artificial Sequence: Synthetic oligonucleotide
ggugugcagggaacucgaa

SEQ ID NO: 239003 - RNA, 19 nt, Artificial Sequence
  Description of Artificial Sequence: Synthetic oligonucleotide
caaccggccuggacuccua

SEQ ID NO: 239004 - RNA, 19 nt, Artificial Sequence
  Description of Artificial Sequence: Synthetic oligonucleotide
ggaccggggcgcucaggaa

SEQ ID NO: 239005 - RNA, 19 nt, Artificial Sequence
  Description of Artificial Sequence: Synthetic oligonucleotide
ccacucucgggugcuucuc

SEQ ID NO: 239006 - RNA, 19 nt, Artificial Sequence
  Description of Artificial Sequence: Synthetic oligonucleotide
gcucggcugaacgcaauau

SEQ ID NO: 239007 - RNA, 19 nt, Artificial Sequence
  Description of Artificial Sequence: Synthetic oligonucleotide
gccagacacgagauucacu

SEQ ID NO: 239008 - RNA, 19 nt, Artificial Sequence
  Description of Artificial Sequence: Synthetic oligonucleotide
gucgccucugguggagaau

SEQ ID NO: 239009 - RNA, 19 nt, Artificial Sequence
  Description of Artificial Sequence: Synthetic oligonucleotide
ccauugacacaugcucggu

SEQ ID NO: 239010 - RNA, 19 nt, Artificial Sequence
  Description of Artificial Sequence: Synthetic oligonucleotide
cccagggguagacaaucuu

SEQ ID NO: 239011 - RNA, 19 nt, Artificial Sequence
  Description of Artificial Sequence: Synthetic oligonucleotide
ccgcagagccggccggaga

SEQ ID NO: 239012 - RNA, 19 nt, Artificial Sequence
  Description of Artificial Sequence: Synthetic oligonucleotide
cggucucuaguccccagau

SEQ ID NO: 239013 - RNA, 19 nt, Artificial Sequence
  Description of Artificial Sequence: Synthetic oligonucleotide
ccaucguggcaagguaguu

SEQ ID NO: 239014 - RNA, 19 nt, Artificial Sequence
  Description of Artificial Sequence: Synthetic oligonucleotide
cggcggguccuccgcuaca

SEQ ID NO: 239015 - RNA, 19 nt, Artificial Sequence
  Description of Artificial Sequence: Synthetic oligonucleotide
ccggcccgaccaccaguuu

SEQ ID NO: 239016 - RNA, 19 nt, Artificial Sequence
  Description of Artificial Sequence: Synthetic oligonucleotide
gaugauaugugucauaucc

SEQ ID NO: 239017 - RNA, 19 nt, Artificial Sequence
  Description of Artificial Sequence: Synthetic oligonucleotide
agauuuauacaccaaaggg

SEQ ID NO: 239018 - RNA, 19 nt, Artificial Sequence
  Description of Artificial Sequence: Synthetic oligonucleotide
aaagacucgaaacauaugu

SEQ ID NO: 239019 - RNA, 19 nt, Artificial Sequence
  Description of Artificial Sequence: Synthetic oligonucleotide
aaaagugggauuucaacuc

SEQ ID NO: 239020 - RNA, 19 nt, Artificial Sequence
  Description of Artificial Sequence: Synthetic oligonucleotide
uuuaucuaaaacaugggga

SEQ ID NO: 239021 - RNA, 19 nt, Artificial Sequence
  Description of Artificial Sequence: Synthetic oligonucleotide
acaugugacagauuuauac

SEQ ID NO: 239022 - RNA, 19 nt, Artificial Sequence
  Description of Artificial Sequence: Synthetic oligonucleotide
ucauagcgaaaccagaugg

SEQ ID NO: 239023 - RNA, 19 nt, Artificial Sequence
  Description of Artificial Sequence: Synthetic oligonucleotide
aaugguagggguuuaaaga

SEQ ID NO: 239024 - RNA, 19 nt, Artificial Sequence
  Description of Artificial Sequence: Synthetic oligonucleotide
aaggcggucucauauaaac

SEQ ID NO: 239025 - RNA, 19 nt, Artificial Sequence
  Description of Artificial Sequence: Synthetic oligonucleotide
agacucgaaacauaugucc

SEQ ID NO: 239026 - RNA, 19 nt, Artificial Sequence
  Description of Artificial Sequence: Synthetic oligonucleotide
aaauuggguaaacugaugu

SEQ ID NO: 239027 - RNA, 19 nt, Artificial Sequence
  Description of Artificial Sequence: Synthetic oligonucleotide
uccaugaacauucuggacc

SEQ ID NO: 239028 - RNA, 19 nt, Artificial Sequence
  Description of Artificial Sequence: Synthetic oligonucleotide
acaagcaaguuccagcugc

SEQ ID NO: 239029 - RNA, 19 nt, Artificial Sequence
  Description of Artificial Sequence: Synthetic oligonucleotide
ugauaugugucauauccgg

SEQ ID NO: 239030 - RNA, 19 nt, Artificial Sequence
  Description of Artificial Sequence: Synthetic oligonucleotide
gauaaugcgacccgugugg

SEQ ID NO: 239031 - RNA, 19 nt, Artificial Sequence
  Description of Artificial Sequence: Synthetic oligonucleotide
aauuuugccuagcuggauc

SEQ ID NO: 239032 - RNA, 19 nt, Artificial Sequence
  Description of Artificial Sequence: Synthetic oligonucleotide
ugagaauaccuuuauaaga

SEQ ID NO: 239033 - RNA, 19 nt, Artificial Sequence
  Description of Artificial Sequence: Synthetic oligonucleotide
aauuacaagcggcagagaa

SEQ ID NO: 239034 - RNA, 19 nt, Artificial Sequence
  Description of Artificial Sequence: Synthetic oligonucleotide
aaaagacuacagcuuuccc

SEQ ID NO: 239035 - RNA, 19 nt, Artificial Sequence
  Description of Artificial Sequence: Synthetic oligonucleotide
uuaucuaaaacauggggaa

SEQ ID NO: 239036 - RNA, 19 nt, Artificial Sequence
  Description of Artificial Sequence: Synthetic oligonucleotide
uggggcuaaggucauagcg

SEQ ID NO: 239037 - RNA, 19 nt, Artificial Sequence
  Description of Artificial Sequence: Synthetic oligonucleotide
aagacuacagcuuucccau

SEQ ID NO: 239038 - RNA, 19 nt, Artificial Sequence
  Description of Artificial Sequence: Synthetic oligonucleotide
auagcuuaaauucucggaa

SEQ ID NO: 239039 - RNA, 19 nt, Artificial Sequence
  Description of Artificial Sequence: Synthetic oligonucleotide
cugagaauaccuuuauaag

SEQ ID NO: 239040 - RNA, 19 nt, Artificial Sequence
  Description of Artificial Sequence: Synthetic oligonucleotide
gaugagagaugcucugugg

SEQ ID NO: 239041 - RNA, 19 nt, Artificial Sequence
  Description of Artificial Sequence: Synthetic oligonucleotide
aacgaguugguaugugcuc

SEQ ID NO: 239042 - RNA, 19 nt, Artificial Sequence
  Description of Artificial Sequence: Synthetic oligonucleotide
gaaggucccaccaauaaug

SEQ ID NO: 239043 - RNA, 19 nt, Artificial Sequence
  Description of Artificial Sequence: Synthetic oligonucleotide
aaguuuugcuaauuggaau

SEQ ID NO: 239044 - RNA, 19 nt, Artificial Sequence
  Description of Artificial Sequence: Synthetic oligonucleotide
aauucucggaaggaugggg

SEQ ID NO: 239045 - RNA, 19 nt, Artificial Sequence
  Description of Artificial Sequence: Synthetic oligonucleotide
uguaacaguguaugucggg

SEQ ID NO: 239046 - RNA, 19 nt, Artificial Sequence
  Description of Artificial Sequence: Synthetic oligonucleotide
uggaugucaagcccgacca

SEQ ID NO: 239047 - RNA, 19 nt, Artificial Sequence
  Description of Artificial Sequence: Synthetic oligonucleotide
uggggaauucagaaaagca

SEQ ID NO: 239048 - RNA, 19 nt, Artificial Sequence
  Description of Artificial Sequence: Synthetic oligonucleotide
aaacgaagcccaggcaugc

SEQ ID NO: 239049 - RNA, 19 nt, Artificial Sequence
  Description of Artificial Sequence: Synthetic oligonucleotide
uacugguaggaguaaacgc

SEQ ID NO: 239050 - RNA, 19 nt, Artificial Sequence
  Description of Artificial Sequence: Synthetic oligonucleotide
caaacgauugggcaucugc

SEQ ID NO: 239051 - RNA, 19 nt, Artificial Sequence
  Description of Artificial Sequence: Synthetic oligonucleotide
ugugucauauccggguucg

SEQ ID NO: 239052 - RNA, 19 nt, Artificial Sequence
  Description of Artificial Sequence: Synthetic oligonucleotide
uaaacgaagcccaggcaug

SEQ ID NO: 239053 - RNA, 19 nt, Artificial Sequence
  Description of Artificial Sequence: Synthetic oligonucleotide
uuggaugucaagcccgacc

SEQ ID NO: 239054 - RNA, 19 nt, Artificial Sequence
  Description of Artificial Sequence: Synthetic oligonucleotide
gucgauauggcccacuuca

SEQ ID NO: 239055 - RNA, 19 nt, Artificial Sequence
  Description of Artificial Sequence: Synthetic oligonucleotide
ugugcguggacacauggaa

SEQ ID NO: 239056 - RNA, 19 nt, Artificial Sequence
  Description of Artificial Sequence: Synthetic oligonucleotide
ugagcuguuagugugucca

SEQ ID NO: 239057 - RNA, 19 nt, Artificial Sequence
  Description of Artificial Sequence: Synthetic oligonucleotide
aagcccgaccaauucacag

SEQ ID NO: 239058 - RNA, 19 nt, Artificial Sequence
  Description of Artificial Sequence: Synthetic oligonucleotide
guaacaguguaugucgggg

SEQ ID NO: 239059 - RNA, 19 nt, Artificial Sequence
  Description of Artificial Sequence: Synthetic oligonucleotide
uuacaagcggcagagaauc

SEQ ID NO: 239060 - RNA, 19 nt, Artificial Sequence
  Description of Artificial Sequence: Synthetic oligonucleotide
guauuugacugugaugggg

SEQ ID NO: 239061 - RNA, 19 nt, Artificial Sequence
  Description of Artificial Sequence: Synthetic oligonucleotide
gauaugugucauauccggg

SEQ ID NO: 239062 - RNA, 19 nt, Artificial Sequence
  Description of Artificial Sequence: Synthetic oligonucleotide
aggggcaguuuacauacac

SEQ ID NO: 239063 - RNA, 19 nt, Artificial Sequence
  Description of Artificial Sequence: Synthetic oligonucleotide
gcuauugccacauagcaca

SEQ ID NO: 239064 - RNA, 19 nt, Artificial Sequence
  Description of Artificial Sequence: Synthetic oligonucleotide
cauugugccaaacgauugg

SEQ ID NO: 239065 - RNA, 19 nt, Artificial Sequence
  Description of Artificial Sequence: Synthetic oligonucleotide
aaugcgacccguguggcug

SEQ ID NO: 239066 - RNA, 19 nt, Artificial Sequence
  Description of Artificial Sequence: Synthetic oligonucleotide
acuagucccuaccagagaa

SEQ ID NO: 239067 - RNA, 19 nt, Artificial Sequence
  Description of Artificial Sequence: Synthetic oligonucleotide
auuuugccuagcuggaucu

SEQ ID NO: 239068 - RNA, 19 nt, Artificial Sequence
  Description of Artificial Sequence: Synthetic oligonucleotide
cauagcgaaaccagauggc

SEQ ID NO: 239069 - RNA, 19 nt, Artificial Sequence
  Description of Artificial Sequence: Synthetic oligonucleotide
ugucagugaauuuugccua

SEQ ID NO: 239070 - RNA, 19 nt, Artificial Sequence
  Description of Artificial Sequence: Synthetic oligonucleotide
ucaagcccgaccaauucac

SEQ ID NO: 239071 - RNA, 19 nt, Artificial Sequence
  Description of Artificial Sequence: Synthetic oligonucleotide
uggaguugucgauauggcc

SEQ ID NO: 239072 - RNA, 19 nt, Artificial Sequence
  Description of Artificial Sequence: Synthetic oligonucleotide
ugaaccuguagaguggcug

SEQ ID NO: 239073 - RNA, 19 nt, Artificial Sequence
  Description of Artificial Sequence: Synthetic oligonucleotide
uggacuagucccuaccaga

SEQ ID NO: 239074 - RNA, 19 nt, Artificial Sequence
  Description of Artificial Sequence: Synthetic oligonucleotide
gaaccuguagaguggcugc

SEQ ID NO: 239075 - RNA, 19 nt, Artificial Sequence
  Description of Artificial Sequence: Synthetic oligonucleotide
agacugacgucaauuuugc

SEQ ID NO: 239076 - RNA, 19 nt, Artificial Sequence
  Description of Artificial Sequence: Synthetic oligonucleotide
guacugguaggaguaaacg

SEQ ID NO: 239077 - RNA, 19 nt, Artificial Sequence
  Description of Artificial Sequence: Synthetic oligonucleotide
aaauucucggaaggauggg

SEQ ID NO: 239078 - RNA, 19 nt, Artificial Sequence
  Description of Artificial Sequence: Synthetic oligonucleotide
guucgugugggcuggggcg

SEQ ID NO: 239079 - RNA, 19 nt, Artificial Sequence
  Description of Artificial Sequence: Synthetic oligonucleotide
aggaguccaaaaugccagc

SEQ ID NO: 239080 - RNA, 19 nt, Artificial Sequence
  Description of Artificial Sequence: Synthetic oligonucleotide
gucacaugacccuaacccc

SEQ ID NO: 239081 - RNA, 19 nt, Artificial Sequence
  Description of Artificial Sequence: Synthetic oligonucleotide
uguaugucggcugcgugag

SEQ ID NO: 239082 - RNA, 19 nt, Artificial Sequence
  Description of Artificial Sequence: Synthetic oligonucleotide
uggauaccaagacaagauc

SEQ ID NO: 239083 - RNA, 19 nt, Artificial Sequence
  Description of Artificial Sequence: Synthetic oligonucleotide
aaggucccaccaauaaugg

SEQ ID NO: 239084 - RNA, 19 nt, Artificial Sequence
  Description of Artificial Sequence: Synthetic oligonucleotide
acugguaggaguaaacgcu

SEQ ID NO: 239085 - RNA, 19 nt, Artificial Sequence
  Description of Artificial Sequence: Synthetic oligonucleotide
auggaaaaccgacaucccu

SEQ ID NO: 239086 - RNA, 19 nt, Artificial Sequence
  Description of Artificial Sequence: Synthetic oligonucleotide
augauaugugucauauccg

SEQ ID NO: 239087 - RNA, 19 nt, Artificial Sequence
  Description of Artificial Sequence: Synthetic oligonucleotide
aaacgauugggcaucugcu

SEQ ID NO: 239088 - RNA, 19 nt, Artificial Sequence
  Description of Artificial Sequence: Synthetic oligonucleotide
agagaaucuggcuacccau

SEQ ID NO: 239089 - RNA, 19 nt, Artificial Sequence
  Description of Artificial Sequence: Synthetic oligonucleotide
ugagagcauagcuuaaauu

SEQ ID NO: 239090 - RNA, 19 nt, Artificial Sequence
  Description of Artificial Sequence: Synthetic oligonucleotide
acucgaaacauaugucccu

SEQ ID NO: 239091 - RNA, 19 nt, Artificial Sequence
  Description of Artificial Sequence: Synthetic oligonucleotide
cugggaacgaguugguaug

SEQ ID NO: 239092 - RNA, 19 nt, Artificial Sequence
  Description of Artificial Sequence: Synthetic oligonucleotide
aaccgacaucccugugucc

SEQ ID NO: 239093 - RNA, 19 nt, Artificial Sequence
  Description of Artificial Sequence: Synthetic oligonucleotide
aggucccaccaauaauggc

SEQ ID NO: 239094 - RNA, 19 nt, Artificial Sequence
  Description of Artificial Sequence: Synthetic oligonucleotide
ucauagaaugaggcagggg

SEQ ID NO: 239095 - RNA, 19 nt, Artificial Sequence
  Description of Artificial Sequence: Synthetic oligonucleotide
auaaugcgacccguguggc

SEQ ID NO: 239096 - RNA, 19 nt, Artificial Sequence
  Description of Artificial Sequence: Synthetic oligonucleotide
auggaguugucgauauggc

SEQ ID NO: 239097 - RNA, 19 nt, Artificial Sequence
  Description of Artificial Sequence: Synthetic oligonucleotide
uggguaaacugauguugag

SEQ ID NO: 239098 - RNA, 19 nt, Artificial Sequence
  Description of Artificial Sequence: Synthetic oligonucleotide
caaauuggguaaacugaug

SEQ ID NO: 239099 - RNA, 19 nt, Artificial Sequence
  Description of Artificial Sequence: Synthetic oligonucleotide
auaaucuauuugaacccag

SEQ ID NO: 239100 - RNA, 19 nt, Artificial Sequence
  Description of Artificial Sequence: Synthetic oligonucleotide
ucuuggaugucaagcccga

SEQ ID NO: 239101 - RNA, 19 nt, Artificial Sequence
  Description of Artificial Sequence: Synthetic oligonucleotide
cugguaggaguaaacgcug

SEQ ID NO: 239102 - RNA, 19 nt, Artificial Sequence
  Description of Artificial Sequence: Synthetic oligonucleotide
uaugucggcugcgugaggu

SEQ ID NO: 239103 - RNA, 19 nt, Artificial Sequence
  Description of Artificial Sequence: Synthetic oligonucleotide
cuuccguggugaugaaucc

SEQ ID NO: 239104 - RNA, 19 nt, Artificial Sequence
  Description of Artificial Sequence: Synthetic oligonucleotide
ugucaagcccgaccaauuc

SEQ ID NO: 239105 - RNA, 19 nt, Artificial Sequence
  Description of Artificial Sequence: Synthetic oligonucleotide
auggcggggauaaugcgac

SEQ ID NO: 239106 - RNA, 19 nt, Artificial Sequence
  Description of Artificial Sequence: Synthetic oligonucleotide
aagggacugguuucuguaa

SEQ ID NO: 239107 - RNA, 19 nt, Artificial Sequence
  Description of Artificial Sequence: Synthetic oligonucleotide
gaguugucgauauggccca

SEQ ID NO: 239108 - RNA, 19 nt, Artificial Sequence
  Description of Artificial Sequence: Synthetic oligonucleotide
auauccggguucguguggg

SEQ ID NO: 239109 - RNA, 19 nt, Artificial Sequence
  Description of Artificial Sequence: Synthetic oligonucleotide
augcaaggcggucucauau

SEQ ID NO: 239110 - RNA, 19 nt, Artificial Sequence
  Description of Artificial Sequence: Synthetic oligonucleotide
auagaaugaggcaggggug

SEQ ID NO: 239111 - RNA, 19 nt, Artificial Sequence
  Description of Artificial Sequence: Synthetic oligonucleotide
aguguaugucggcugcgug

SEQ ID NO: 239112 - RNA, 19 nt, Artificial Sequence
  Description of Artificial Sequence: Synthetic oligonucleotide
cuguguccucacaaaagug

SEQ ID NO: 239113 - RNA, 19 nt, Artificial Sequence
  Description of Artificial Sequence: Synthetic oligonucleotide
ggcggucucauauaaacga

SEQ ID NO: 239114 - RNA, 19 nt, Artificial Sequence
  Description of Artificial Sequence: Synthetic oligonucleotide
ugagcucuagguugggcau

SEQ ID NO: 239115 - RNA, 19 nt, Artificial Sequence
  Description of Artificial Sequence: Synthetic oligonucleotide
gagcguugcaggccaggcg

SEQ ID NO: 239116 - RNA, 19 nt, Artificial Sequence
  Description of Artificial Sequence: Synthetic oligonucleotide
gaaaucuguccaaguggcc

SEQ ID NO: 239117 - RNA, 19 nt, Artificial Sequence
  Description of Artificial Sequence: Synthetic oligonucleotide
cuuggaguaccucccuaug

SEQ ID NO: 239118 - RNA, 19 nt, Artificial Sequence
  Description of Artificial Sequence: Synthetic oligonucleotide
ucgaaacauaugucccucu

SEQ ID NO: 239119 - RNA, 19 nt, Artificial Sequence
  Description of Artificial Sequence: Synthetic oligonucleotide
auaacagaccagaggcguc

SEQ ID NO: 239120 - RNA, 19 nt, Artificial Sequence
  Description of Artificial Sequence: Synthetic oligonucleotide
acucauaugcaugccacau

SEQ ID NO: 239121 - RNA, 19 nt, Artificial Sequence
  Description of Artificial Sequence: Synthetic oligonucleotide
agguagcaguaccuuuggg

SEQ ID NO: 239122 - RNA, 19 nt, Artificial Sequence
  Description of Artificial Sequence: Synthetic oligonucleotide
gacugugauggggcuaagg

SEQ ID NO: 239123 - RNA, 19 nt, Artificial Sequence
  Description of Artificial Sequence: Synthetic oligonucleotide
gggguuuaaagauugucaa

SEQ ID NO: 239124 - RNA, 19 nt, Artificial Sequence
  Description of Artificial Sequence: Synthetic oligonucleotide
ggagccuacaagguagagg

SEQ ID NO: 239125 - RNA, 19 nt, Artificial Sequence
  Description of Artificial Sequence: Synthetic oligonucleotide
gauggcggggauaaugcga

SEQ ID NO: 239126 - RNA, 19 nt, Artificial Sequence
  Description of Artificial Sequence: Synthetic oligonucleotide
ggauaaugcgacccgugug

SEQ ID NO: 239127 - RNA, 19 nt, Artificial Sequence
  Description of Artificial Sequence: Synthetic oligonucleotide
agcccgaccaauucacagu

SEQ ID NO: 239128 - RNA, 19 nt, Artificial Sequence
  Description of Artificial Sequence: Synthetic oligonucleotide
guguaugucggcugcguga

SEQ ID NO: 239129 - RNA, 19 nt, Artificial Sequence
  Description of Artificial Sequence: Synthetic oligonucleotide
accgacaucccuguguccu

SEQ ID NO: 239130 - RNA, 19 nt, Artificial Sequence
  Description of Artificial Sequence: Synthetic oligonucleotide
aauggcaagugggucccga

SEQ ID NO: 239131 - RNA, 19 nt, Artificial Sequence
  Description of Artificial Sequence: Synthetic oligonucleotide
gucaucgacguagagcuca

SEQ ID NO: 239132 - RNA, 19 nt, Artificial Sequence
  Description of Artificial Sequence: Synthetic oligonucleotide
ggucccaccaauaauggca

SEQ ID NO: 239133 - RNA, 19 nt, Artificial Sequence
  Description of Artificial Sequence: Synthetic oligonucleotide
ccuuacguggucuuccaag

SEQ ID NO: 239134 - RNA, 19 nt, Artificial Sequence
  Description of Artificial Sequence: Synthetic oligonucleotide
aaacugauguugagacuga

SEQ ID NO: 239135 - RNA, 19 nt, Artificial Sequence
  Description of Artificial Sequence: Synthetic oligonucleotide
ggcaagugggucccgaaug

SEQ ID NO: 239136 - RNA, 19 nt, Artificial Sequence
  Description of Artificial Sequence: Synthetic oligonucleotide
acgaguugguaugugcuca

SEQ ID NO: 239137 - RNA, 19 nt, Artificial Sequence
  Description of Artificial Sequence: Synthetic oligonucleotide
guugguaugugcucagcua

SEQ ID NO: 239138 - RNA, 19 nt, Artificial Sequence
  Description of Artificial Sequence: Synthetic oligonucleotide
auuacaagcggcagagaau

SEQ ID NO: 239139 - RNA, 19 nt, Artificial Sequence
  Description of Artificial Sequence: Synthetic oligonucleotide
ccuaccagagaaaagacua

SEQ ID NO: 239140 - RNA, 19 nt, Artificial Sequence
  Description of Artificial Sequence: Synthetic oligonucleotide
uugucgauauggcccacuu

SEQ ID NO: 239141 - RNA, 19 nt, Artificial Sequence
  Description of Artificial Sequence: Synthetic oligonucleotide
ugucgauauggcccacuuc

SEQ ID NO: 239142 - RNA, 19 nt, Artificial Sequence
  Description of Artificial Sequence: Synthetic oligonucleotide
ugucggcugcgugaggucc

SEQ ID NO: 239143 - RNA, 19 nt, Artificial Sequence
  Description of Artificial Sequence: Synthetic oligonucleotide
gucaagcccgaccaauuca

SEQ ID NO: 239144 - RNA, 19 nt, Artificial Sequence
  Description of Artificial Sequence: Synthetic oligonucleotide
aggcggucucauauaaacg

SEQ ID NO: 239145 - RNA, 19 nt, Artificial Sequence
  Description of Artificial Sequence: Synthetic oligonucleotide
uccacaugugacagauuua

SEQ ID NO: 239146 - RNA, 19 nt, Artificial Sequence
  Description of Artificial Sequence: Synthetic oligonucleotide
cucgaaacauaugucccuc

SEQ ID NO: 239147 - RNA, 19 nt, Artificial Sequence
  Description of Artificial Sequence: Synthetic oligonucleotide
uggaggugagucuguccgc

SEQ ID NO: 239148 - RNA, 19 nt, Artificial Sequence
  Description of Artificial Sequence: Synthetic oligonucleotide
uccagugaguucggacagg

SEQ ID NO: 239149 - RNA, 19 nt, Artificial Sequence
  Description of Artificial Sequence: Synthetic oligonucleotide
gacccguguggcuguaggc

SEQ ID NO: 239150 - RNA, 19 nt, Artificial Sequence
  Description of Artificial Sequence: Synthetic oligonucleotide
ucgauauggcccacuucau

SEQ ID NO: 239151 - RNA, 19 nt, Artificial Sequence
  Description of Artificial Sequence: Synthetic oligonucleotide
uacaagcggcagagaaucu

SEQ ID NO: 239152 - RNA, 19 nt, Artificial Sequence
  Description of Artificial Sequence: Synthetic oligonucleotide
ggaaagagguagcugugga

SEQ ID NO: 239153 - RNA, 19 nt, Artificial Sequence
  Description of Artificial Sequence: Synthetic oligonucleotide
ggacuagucccuaccagag

SEQ ID NO: 239154 - RNA, 19 nt, Artificial Sequence
  Description of Artificial Sequence: Synthetic oligonucleotide
gcaaugccguuucuagggg

SEQ ID NO: 239155 - RNA, 19 nt, Artificial Sequence
  Description of Artificial Sequence: Synthetic oligonucleotide
ggggaauucagaaaagcaa

SEQ ID NO: 239156 - RNA, 19 nt, Artificial Sequence
  Description of Artificial Sequence: Synthetic oligonucleotide
uguugagacugacgucaau

SEQ ID NO: 239157 - RNA, 19 nt, Artificial Sequence
  Description of Artificial Sequence: Synthetic oligonucleotide
gaacgaguugguaugugcu

SEQ ID NO: 239158 - RNA, 19 nt, Artificial Sequence
  Description of Artificial Sequence: Synthetic oligonucleotide
uaugcaaggcggucucaua

SEQ ID NO: 239159 - RNA, 19 nt, Artificial Sequence
  Description of Artificial Sequence: Synthetic oligonucleotide
ugcaaggcggucucauaua

SEQ ID NO: 239160 - RNA, 19 nt, Artificial Sequence
  Description of Artificial Sequence: Synthetic oligonucleotide
cagagaaucuggcuaccca

SEQ ID NO: 239161 - RNA, 19 nt, Artificial Sequence
  Description of Artificial Sequence: Synthetic oligonucleotide
gaggaaggggcacccguga

SEQ ID NO: 239162 - RNA, 19 nt, Artificial Sequence
  Description of Artificial Sequence: Synthetic oligonucleotide
cugagcuguuagugugucc

SEQ ID NO: 239163 - RNA, 19 nt, Artificial Sequence
  Description of Artificial Sequence: Synthetic oligonucleotide
agacaagaucagugguggu

SEQ ID NO: 239164 - RNA, 19 nt, Artificial Sequence
  Description of Artificial Sequence: Synthetic oligonucleotide
gugcguggacacauggaag

SEQ ID NO: 239165 - RNA, 19 nt, Artificial Sequence
  Description of Artificial Sequence: Synthetic oligonucleotide
cucacaaaagugggauuuc

SEQ ID NO: 239166 - RNA, 19 nt, Artificial Sequence
  Description of Artificial Sequence: Synthetic oligonucleotide
ucaucgacguagagcucau

SEQ ID NO: 239167 - RNA, 19 nt, Artificial Sequence
  Description of Artificial Sequence: Synthetic oligonucleotide
cuguccgcuccaccaagag

SEQ ID NO: 239168 - RNA, 19 nt, Artificial Sequence
  Description of Artificial Sequence: Synthetic oligonucleotide
agacuacagcuuucccaug

SEQ ID NO: 239169 - RNA, 19 nt, Artificial Sequence
  Description of Artificial Sequence: Synthetic oligonucleotide
caaaaguaugcaaggcggu

SEQ ID NO: 239170 - RNA, 19 nt, Artificial Sequence
  Description of Artificial Sequence: Synthetic oligonucleotide
gugggucccgaaugcuggg

SEQ ID NO: 239171 - RNA, 19 nt, Artificial Sequence
  Description of Artificial Sequence: Synthetic oligonucleotide
ggaacgccaugacuccagg

SEQ ID NO: 239172 - RNA, 19 nt, Artificial Sequence
  Description of Artificial Sequence: Synthetic oligonucleotide
agucccuaccagagaaaag

SEQ ID NO: 239173 - RNA, 19 nt, Artificial Sequence
  Description of Artificial Sequence: Synthetic oligonucleotide
guggauaccaagacaagau

SEQ ID NO: 239174 - RNA, 19 nt, Artificial Sequence
  Description of Artificial Sequence: Synthetic oligonucleotide
acccguguggcuguaggca

SEQ ID NO: 239175 - RNA, 19 nt, Artificial Sequence
  Description of Artificial Sequence: Synthetic oligonucleotide
ucccgaaugcugggcaccc

SEQ ID NO: 239176 - RNA, 19 nt, Artificial Sequence
  Description of Artificial Sequence: Synthetic oligonucleotide
ccgcuaaggccuuggaacc

SEQ ID NO: 239177 - RNA, 19 nt, Artificial Sequence
  Description of Artificial Sequence: Synthetic oligonucleotide
agguggauaccaagacaag

SEQ ID NO: 239178 - RNA, 19 nt, Artificial Sequence
  Description of Artificial Sequence: Synthetic oligonucleotide
guugagacugacgucaauu

SEQ ID NO: 239179 - RNA, 19 nt, Artificial Sequence
  Description of Artificial Sequence: Synthetic oligonucleotide
aguugucgauauggcccac

SEQ ID NO: 239180 - RNA, 19 nt, Artificial Sequence
  Description of Artificial Sequence: Synthetic oligonucleotide
gggcuaaggucauagcgaa

SEQ ID NO: 239181 - RNA, 19 nt, Artificial Sequence
  Description of Artificial Sequence: Synthetic oligonucleotide
cuguguauuugacugugau

SEQ ID NO: 239182 - RNA, 19 nt, Artificial Sequence
  Description of Artificial Sequence: Synthetic oligonucleotide
ggaugauaugugucauauc

SEQ ID NO: 239183 - RNA, 19 nt, Artificial Sequence
  Description of Artificial Sequence: Synthetic oligonucleotide
gguaugugcucagcuaaca

SEQ ID NO: 239184 - RNA, 19 nt, Artificial Sequence
  Description of Artificial Sequence: Synthetic oligonucleotide
ggaacucagcagugggaac

SEQ ID NO: 239185 - RNA, 19 nt, Artificial Sequence
  Description of Artificial Sequence: Synthetic oligonucleotide
aguaugcaaggcggucuca

SEQ ID NO: 239186 - RNA, 19 nt, Artificial Sequence
  Description of Artificial Sequence: Synthetic oligonucleotide
cgacguagagcucauucac

SEQ ID NO: 239187 - RNA, 19 nt, Artificial Sequence
  Description of Artificial Sequence: Synthetic oligonucleotide
caaaccuccugaagucaaa

SEQ ID NO: 239188 - RNA, 19 nt, Artificial Sequence
  Description of Artificial Sequence: Synthetic oligonucleotide
cgaaacauaugucccucug

SEQ ID NO: 239189 - RNA, 19 nt, Artificial Sequence
  Description of Artificial Sequence: Synthetic oligonucleotide
gcggcagagaaucuggcua

SEQ ID NO: 239190 - RNA, 19 nt, Artificial Sequence
  Description of Artificial Sequence: Synthetic oligonucleotide
cuagucccuaccagagaaa

SEQ ID NO: 239191 - RNA, 19 nt, Artificial Sequence
  Description of Artificial Sequence: Synthetic oligonucleotide
gcaaggcggucucauauaa

SEQ ID NO: 239192 - RNA, 19 nt, Artificial Sequence
  Description of Artificial Sequence: Synthetic oligonucleotide
gugccaaacgauugggcau

SEQ ID NO: 239193 - RNA, 19 nt, Artificial Sequence
  Description of Artificial Sequence: Synthetic oligonucleotide
uccccgcuaaggccuugga

SEQ ID NO: 239194 - RNA, 19 nt, Artificial Sequence
  Description of Artificial Sequence: Synthetic oligonucleotide
cucugagaauaccuuuaua

SEQ ID NO: 239195 - RNA, 19 nt, Artificial Sequence
  Description of Artificial Sequence: Synthetic oligonucleotide
cacugugcguggacacaug

SEQ ID NO: 239196 - RNA, 19 nt, Artificial Sequence
  Description of Artificial Sequence: Synthetic oligonucleotide
gcucucucuggacaugaga

SEQ ID NO: 239197 - RNA, 19 nt, Artificial Sequence
  Description of Artificial Sequence: Synthetic oligonucleotide
agugggauuucaacucaua

SEQ ID NO: 239198 - RNA, 19 nt, Artificial Sequence
  Description of Artificial Sequence: Synthetic oligonucleotide
uggcggggauaaugcgacc

SEQ ID NO: 239199 - RNA, 19 nt, Artificial Sequence
  Description of Artificial Sequence: Synthetic oligonucleotide
ccgaccaauucacagugca

SEQ ID NO: 239200 - RNA, 19 nt, Artificial Sequence
  Description of Artificial Sequence: Synthetic oligonucleotide
caagcccgaccaauucaca

SEQ ID NO: 239201 - RNA, 19 nt, Artificial Sequence
  Description of Artificial Sequence: Synthetic oligonucleotide
ucccagucacaugacccua

SEQ ID NO: 239202 - RNA, 19 nt, Artificial Sequence
  Description of Artificial Sequence: Synthetic oligonucleotide
augucaagcccgaccaauu

SEQ ID NO: 239203 - RNA, 19 nt, Artificial Sequence
  Description of Artificial Sequence: Synthetic oligonucleotide
gcagagaaucuggcuaccc

SEQ ID NO: 239204 - RNA, 19 nt, Artificial Sequence
  Description of Artificial Sequence: Synthetic oligonucleotide
gcaaauuggguaaacugau

SEQ ID NO: 239205 - RNA, 19 nt, Artificial Sequence
  Description of Artificial Sequence: Synthetic oligonucleotide
guagaguggcugccuucuc

SEQ ID NO: 239206 - RNA, 19 nt, Artificial Sequence
  Description of Artificial Sequence: Synthetic oligonucleotide
cacaugugacagauuuaua

SEQ ID NO: 239207 - RNA, 19 nt, Artificial Sequence
  Description of Artificial Sequence: Synthetic oligonucleotide
caauaauggcacagaucgu

SEQ ID NO: 239208 - RNA, 19 nt, Artificial Sequence
  Description of Artificial Sequence: Synthetic oligonucleotide
ggggauaaugcgacccgug

SEQ ID NO: 239209 - RNA, 19 nt, Artificial Sequence
  Description of Artificial Sequence: Synthetic oligonucleotide
caaggcggucucauauaaa

SEQ ID NO: 239210 - RNA, 19 nt, Artificial Sequence
  Description of Artificial Sequence: Synthetic oligonucleotide
gggauaaugcgacccgugu

SEQ ID NO: 239211 - RNA, 19 nt, Artificial Sequence
  Description of Artificial Sequence: Synthetic oligonucleotide
gcaucgugccgccgagccg

SEQ ID NO: 239212 - RNA, 19 nt, Artificial Sequence
  Description of Artificial Sequence: Synthetic oligonucleotide
augcgacccguguggcugu

SEQ ID NO: 239213 - RNA, 19 nt, Artificial Sequence
  Description of Artificial Sequence: Synthetic oligonucleotide
ccuccgcuguccuugucug

SEQ ID NO: 239214 - RNA, 19 nt, Artificial Sequence
  Description of Artificial Sequence: Synthetic oligonucleotide
gccugcccaucucaucuug

SEQ ID NO: 239215 - RNA, 19 nt, Artificial Sequence
  Description of Artificial Sequence: Synthetic oligonucleotide
cacagaucguggugaugaa

SEQ ID NO: 239216 - RNA, 19 nt, Artificial Sequence
  Description of Artificial Sequence: Synthetic oligonucleotide
cgaguugguaugugcucag

SEQ ID NO: 239217 - RNA, 19 nt, Artificial Sequence
  Description of Artificial Sequence: Synthetic oligonucleotide
ggcuacccauaagagauua

SEQ ID NO: 239218 - RNA, 19 nt, Artificial Sequence
  Description of Artificial Sequence: Synthetic oligonucleotide
cgccgcguggguacgagcc

SEQ ID NO: 239219 - RNA, 19 nt, Artificial Sequence
  Description of Artificial Sequence: Synthetic oligonucleotide
agcgccgcguggguacgag

SEQ ID NO: 239220 - RNA, 19 nt, Artificial Sequence
  Description of Artificial Sequence: Synthetic oligonucleotide
ggcgucucuuccauggaaa

SEQ ID NO: 239221 - RNA, 19 nt, Artificial Sequence
  Description of Artificial Sequence: Synthetic oligonucleotide
guaccucccuaugcuucac

SEQ ID NO: 239222 - RNA, 19 nt, Artificial Sequence
  Description of Artificial Sequence: Synthetic oligonucleotide
ccaguguaugucggcugcg

SEQ ID NO: 239223 - RNA, 19 nt, Artificial Sequence
  Description of Artificial Sequence: Synthetic oligonucleotide
gcgucucuuccauggaaaa

SEQ ID NO: 239224 - RNA, 19 nt, Artificial Sequence
  Description of Artificial Sequence: Synthetic oligonucleotide
ugccggggaccuuguugau

SEQ ID NO: 239225 - RNA, 19 nt, Artificial Sequence
  Description of Artificial Sequence: Synthetic oligonucleotide
ugauggggcuaaggucaua

SEQ ID NO: 239226 - RNA, 19 nt, Artificial Sequence
  Description of Artificial Sequence: Synthetic oligonucleotide
guugucgauauggcccacu

SEQ ID NO: 239227 - RNA, 19 nt, Artificial Sequence
  Description of Artificial Sequence: Synthetic oligonucleotide
ccagugaguucggacagga

SEQ ID NO: 239228 - RNA, 19 nt, Artificial Sequence
  Description of Artificial Sequence: Synthetic oligonucleotide
gcggucucauauaaacgaa

SEQ ID NO: 239229 - RNA, 19 nt, Artificial Sequence
  Description of Artificial Sequence: Synthetic oligonucleotide
gcuaaggccuuggaaccaa

SEQ ID NO: 239230 - RNA, 19 nt, Artificial Sequence
  Description of Artificial Sequence: Synthetic oligonucleotide
ggaugucaagcccgaccaa

SEQ ID NO: 239231 - RNA, 19 nt, Artificial Sequence
  Description of Artificial Sequence: Synthetic oligonucleotide
ccggguucgugugggcugg

SEQ ID NO: 239232 - RNA, 19 nt, Artificial Sequence
  Description of Artificial Sequence: Synthetic oligonucleotide
gcacauugguggggaauuc

SEQ ID NO: 239233 - RNA, 19 nt, Artificial Sequence
  Description of Artificial Sequence: Synthetic oligonucleotide
ggaguaccucccuaugcuu

SEQ ID NO: 239234 - RNA, 19 nt, Artificial Sequence
  Description of Artificial Sequence: Synthetic oligonucleotide
ccuuggaguaccucccuau

SEQ ID NO: 239235 - RNA, 19 nt, Artificial Sequence
  Description of Artificial Sequence: Synthetic oligonucleotide
cuccguuguucagugggau

SEQ ID NO: 239236 - RNA, 19 nt, Artificial Sequence
  Description of Artificial Sequence: Synthetic oligonucleotide
gccuuacguggucuuccaa

SEQ ID NO: 239237 - RNA, 19 nt, Artificial Sequence
  Description of Artificial Sequence: Synthetic oligonucleotide
ccaaacgauugggcaucug

SEQ ID NO: 239238 - RNA, 19 nt, Artificial Sequence
  Description of Artificial Sequence: Synthetic oligonucleotide
ugcgacccguguggcugua

SEQ ID NO: 239239 - RNA, 19 nt, Artificial Sequence
  Description of Artificial Sequence: Synthetic oligonucleotide
cugugccuuacguggucuu

SEQ ID NO: 239240 - RNA, 19 nt, Artificial Sequence
  Description of Artificial Sequence: Synthetic oligonucleotide
gugauggggcuaaggucau

SEQ ID NO: 239241 - RNA, 19 nt, Artificial Sequence
  Description of Artificial Sequence: Synthetic oligonucleotide
gcgccgcguggguacgagc

SEQ ID NO: 239242 - RNA, 19 nt, Artificial Sequence
  Description of Artificial Sequence: Synthetic oligonucleotide
cgucaauuuugccuccgcu

SEQ ID NO: 239243 - RNA, 19 nt, Artificial Sequence
  Description of Artificial Sequence: Synthetic oligonucleotide
gggcaucgugccgccgagc

SEQ ID NO: 239244 - RNA, 19 nt, Artificial Sequence
  Description of Artificial Sequence: Synthetic oligonucleotide
gugucauauccggguucgu

SEQ ID NO: 239245 - RNA, 19 nt, Artificial Sequence
  Description of Artificial Sequence: Synthetic oligonucleotide
aucgugccgccgagccggu

SEQ ID NO: 239246 - RNA, 19 nt, Artificial Sequence
  Description of Artificial Sequence: Synthetic oligonucleotide
gcgacccguguggcuguag

SEQ ID NO: 239247 - RNA, 19 nt, Artificial Sequence
  Description of Artificial Sequence: Synthetic oligonucleotide
gcgugugggcacugugcgu

SEQ ID NO: 239248 - RNA, 19 nt, Artificial Sequence
  Description of Artificial Sequence: Synthetic oligonucleotide
cagcgccgcguggguacga

SEQ ID NO: 239249 - RNA, 19 nt, Artificial Sequence
  Description of Artificial Sequence: Synthetic oligonucleotide
caucgacguagagcucauu

SEQ ID NO: 239250 - RNA, 19 nt, Artificial Sequence
  Description of Artificial Sequence: Synthetic oligonucleotide
cggguucgugugggcuggg

SEQ ID NO: 239251 - RNA, 19 nt, Artificial Sequence
  Description of Artificial Sequence: Synthetic oligonucleotide
ccgagccggugggagcguu

SEQ ID NO: 239252 - RNA, 19 nt, Artificial Sequence
  Description of Artificial Sequence: Synthetic oligonucleotide
aggauuauauuucauaguc

SEQ ID NO: 239253 - RNA, 19 nt, Artificial Sequence
  Description of Artificial Sequence: Synthetic oligonucleotide
auuuaguaagaauugguuc

SEQ ID NO: 239254 - RNA, 19 nt, Artificial Sequence
  Description of Artificial Sequence: Synthetic oligonucleotide
uuuaguaagaauugguucu

SEQ ID NO: 239255 - RNA, 19 nt, Artificial Sequence
  Description of Artificial Sequence: Synthetic oligonucleotide
gaucuuuacgcucugagcc

SEQ ID NO: 239256 - RNA, 19 nt, Artificial Sequence
  Description of Artificial Sequence: Synthetic oligonucleotide
ugaaacaacucguucauag

SEQ ID NO: 239257 - RNA, 19 nt, Artificial Sequence
  Description of Artificial Sequence: Synthetic oligonucleotide
auaaugguuauccauuagg

SEQ ID NO: 239258 - RNA, 19 nt, Artificial Sequence
  Description of Artificial Sequence: Synthetic oligonucleotide
aaaguacauaucuugauaa

SEQ ID NO: 239259 - RNA, 19 nt, Artificial Sequence
  Description of Artificial Sequence: Synthetic oligonucleotide
uugacugauaauuguaagg

SEQ ID NO: 239260 - RNA, 19 nt, Artificial Sequence
  Description of Artificial Sequence: Synthetic oligonucleotide
uaaggaauugucacuaugc

SEQ ID NO: 239261 - RNA, 19 nt, Artificial Sequence
  Description of Artificial Sequence: Synthetic oligonucleotide
ucccucaaagucaugaacg

SEQ ID NO: 239262 - RNA, 19 nt, Artificial Sequence
  Description of Artificial Sequence: Synthetic oligonucleotide
caauagggcagcuugaagg

SEQ ID NO: 239263 - RNA, 19 nt, Artificial Sequence
  Description of Artificial Sequence: Synthetic oligonucleotide
uccauuuguaguuauagcu

SEQ ID NO: 239264 - RNA, 19 nt, Artificial Sequence
  Description of Artificial Sequence: Synthetic oligonucleotide
aguaagaauugguucuucc

SEQ ID NO: 239265 - RNA, 19 nt, Artificial Sequence
  Description of Artificial Sequence: Synthetic oligonucleotide
ucuacuguuuaacagggca

SEQ ID NO: 239266 - RNA, 19 nt, Artificial Sequence
  Description of Artificial Sequence: Synthetic oligonucleotide
uagaauaaccaaaagguau

SEQ ID NO: 239267 - RNA, 19 nt, Artificial Sequence
  Description of Artificial Sequence: Synthetic oligonucleotide
uuauauuucauaguccacc

SEQ ID NO: 239268 - RNA, 19 nt, Artificial Sequence
  Description of Artificial Sequence: Synthetic oligonucleotide
uauuuaugcuacuaacuag

SEQ ID NO: 239269 - RNA, 19 nt, Artificial Sequence
  Description of Artificial Sequence: Synthetic oligonucleotide
uuauauaugcacuugggua

SEQ ID NO: 239270 - RNA, 19 nt, Artificial Sequence
  Description of Artificial Sequence: Synthetic oligonucleotide
aacguauucauccuucacu

SEQ ID NO: 239271 - RNA, 19 nt, Artificial Sequence
  Description of Artificial Sequence: Synthetic oligonucleotide
uuauuuaugcuacuaacua

SEQ ID NO: 239272 - RNA, 19 nt, Artificial Sequence
  Description of Artificial Sequence: Synthetic oligonucleotide
uuuauauaugcacuugggu

SEQ ID NO: 239273 - RNA, 19 nt, Artificial Sequence
  Description of Artificial Sequence: Synthetic oligonucleotide
acugacaauauuuaacaug

SEQ ID NO: 239274 - RNA, 19 nt, Artificial Sequence
  Description of Artificial Sequence: Synthetic oligonucleotide
aaaacugacucacccaugu

SEQ ID NO: 239275 - RNA, 19 nt, Artificial Sequence
  Description of Artificial Sequence: Synthetic oligonucleotide
agaucuuaugaacagcguc

SEQ ID NO: 239276 - RNA, 19 nt, Artificial Sequence
  Description of Artificial Sequence: Synthetic oligonucleotide
guaacaauagggcagcuug

SEQ ID NO: 239277 - RNA, 19 nt, Artificial Sequence
  Description of Artificial Sequence: Synthetic oligonucleotide
ucagucuaaagguugcggg

SEQ ID NO: 239278 - RNA, 19 nt, Artificial Sequence
  Description of Artificial Sequence: Synthetic oligonucleotide
auuuaugcuacuaacuagg

SEQ ID NO: 239279 - RNA, 19 nt, Artificial Sequence
  Description of Artificial Sequence: Synthetic oligonucleotide
cuuuauauaugcacuuggg

SEQ ID NO: 239280 - RNA, 19 nt, Artificial Sequence
  Description of Artificial Sequence: Synthetic oligonucleotide
uguuaauccugagagauca

SEQ ID NO: 239281 - RNA, 19 nt, Artificial Sequence
  Description of Artificial Sequence: Synthetic oligonucleotide
uuauuuuaguugaagcacu

SEQ ID NO: 239282 - RNA, 19 nt, Artificial Sequence
  Description of Artificial Sequence: Synthetic oligonucleotide
ugaguaugcacaagcgacg

SEQ ID NO: 239283 - RNA, 19 nt, Artificial Sequence
  Description of Artificial Sequence: Synthetic oligonucleotide
aauauucauuauuuuaguu

SEQ ID NO: 239284 - RNA, 19 nt, Artificial Sequence
  Description of Artificial Sequence: Synthetic oligonucleotide
ugugguacagucaacguau

SEQ ID NO: 239285 - RNA, 19 nt, Artificial Sequence
  Description of Artificial Sequence: Synthetic oligonucleotide
aagcauuaggcagagcaac

SEQ ID NO: 239286 - RNA, 19 nt, Artificial Sequence
  Description of Artificial Sequence: Synthetic oligonucleotide
ugacugauaauuguaagga

SEQ ID NO: 239287 - RNA, 19 nt, Artificial Sequence
  Description of Artificial Sequence: Synthetic oligonucleotide
uuaaaacauagugaaguug

SEQ ID NO: 239288 - RNA, 19 nt, Artificial Sequence
  Description of Artificial Sequence: Synthetic oligonucleotide
uggagcauuacucugcagu

SEQ ID NO: 239289 - RNA, 19 nt, Artificial Sequence
  Description of Artificial Sequence: Synthetic oligonucleotide
cugaguaugcacaagcgac

SEQ ID NO: 239290 - RNA, 19 nt, Artificial Sequence
  Description of Artificial Sequence: Synthetic oligonucleotide
uuagaauaaccaaaaggua

SEQ ID NO: 239291 - RNA, 19 nt, Artificial Sequence
  Description of Artificial Sequence: Synthetic oligonucleotide
aguaugaauuuaauucacc

SEQ ID NO: 239292 - RNA, 19 nt, Artificial Sequence
  Description of Artificial Sequence: Synthetic oligonucleotide
gguagugcuguuaugaugg

SEQ ID NO: 239293 - RNA, 19 nt, Artificial Sequence
  Description of Artificial Sequence: Synthetic oligonucleotide
acuuggguagaucuuauga

SEQ ID NO: 239294 - RNA, 19 nt, Artificial Sequence
  Description of Artificial Sequence: Synthetic oligonucleotide
ucaucgacaccgaugccgg

SEQ ID NO: 239295 - RNA, 19 nt, Artificial Sequence
  Description of Artificial Sequence: Synthetic oligonucleotide
uguuaugaugguaguagcu

SEQ ID NO: 239296 - RNA, 19 nt, Artificial Sequence
  Description of Artificial Sequence: Synthetic oligonucleotide
acaguaacaauagggcagc

SEQ ID NO: 239297 - RNA, 19 nt, Artificial Sequence
  Description of Artificial Sequence: Synthetic oligonucleotide
agcuauuccaccuacggau

SEQ ID NO: 239298 - RNA, 19 nt, Artificial Sequence
  Description of Artificial Sequence: Synthetic oligonucleotide
uggguagaucuuaugaaca

SEQ ID NO: 239299 - RNA, 19 nt, Artificial Sequence
  Description of Artificial Sequence: Synthetic oligonucleotide
auuguaaggaauugucacu

SEQ ID NO: 239300 - RNA, 19 nt, Artificial Sequence
  Description of Artificial Sequence: Synthetic oligonucleotide
ugaaggaaccuuaaauguc

SEQ ID NO: 239301 - RNA, 19 nt, Artificial Sequence
  Description of Artificial Sequence: Synthetic oligonucleotide
uccugaguaugcacaagcg

SEQ ID NO: 239302 - RNA, 19 nt, Artificial Sequence
  Description of Artificial Sequence: Synthetic oligonucleotide
aguacauaucuugauaaug

SEQ ID NO: 239303 - RNA, 19 nt, Artificial Sequence
  Description of Artificial Sequence: Synthetic oligonucleotide
ugguuugaauugaaugucc

SEQ ID NO: 239304 - RNA, 19 nt, Artificial Sequence
  Description of Artificial Sequence: Synthetic oligonucleotide
aagucaugaacguauucau

SEQ ID NO: 239305 - RNA, 19 nt, Artificial Sequence
  Description of Artificial Sequence: Synthetic oligonucleotide
uuggguagaucuuaugaac

SEQ ID NO: 239306 - RNA, 19 nt, Artificial Sequence
  Description of Artificial Sequence: Synthetic oligonucleotide
  modified_base (2)..(2): a, c, u, g, unknown or other
cnguaauccguucugcugc

SEQ ID NO: 239307 - RNA, 19 nt, Artificial Sequence
  Description of Artificial Sequence: Synthetic oligonucleotide
ucgaugcacgauuacuugg

SEQ ID NO: 239308 - RNA, 19 nt, Artificial Sequence
  Description of Artificial Sequence: Synthetic oligonucleotide
acaugauuuaaacaguaua

SEQ ID NO: 239309 - RNA, 19 nt, Artificial Sequence
  Description of Artificial Sequence: Synthetic oligonucleotide
aauacuggccggcugacuu

SEQ ID NO: 239310 - RNA, 19 nt, Artificial Sequence
  Description of Artificial Sequence: Synthetic oligonucleotide
ugccgcaaaucaaagaccu

SEQ ID NO: 239311 - RNA, 19 nt, Artificial Sequence
  Description of Artificial Sequence: Synthetic oligonucleotide
aguguuaauccugagagau

SEQ ID NO: 239312 - RNA, 19 nt, Artificial Sequence
  Description of Artificial Sequence: Synthetic oligonucleotide
auuagacucagauggggcu

SEQ ID NO: 239313 - RNA, 19 nt, Artificial Sequence
  Description of Artificial Sequence: Synthetic oligonucleotide
uauaaccaaccauaugccu

SEQ ID NO: 239314 - RNA, 19 nt, Artificial Sequence
  Description of Artificial Sequence: Synthetic oligonucleotide
cauuagacucagauggggc

SEQ ID NO: 239315 - RNA, 19 nt, Artificial Sequence
  Description of Artificial Sequence: Synthetic oligonucleotide
uaugcacaagcgacggagg

SEQ ID NO: 239316 - RNA, 19 nt, Artificial Sequence
  Description of Artificial Sequence: Synthetic oligonucleotide
cucguucauagugauaugg

SEQ ID NO: 239317 - RNA, 19 nt, Artificial Sequence
  Description of Artificial Sequence: Synthetic oligonucleotide
uuuaugcuacuaacuaggu

SEQ ID NO: 239318 - RNA, 19 nt, Artificial Sequence
  Description of Artificial Sequence: Synthetic oligonucleotide
ucuguauggugacacauuu

SEQ ID NO: 239319 - RNA, 19 nt, Artificial Sequence
  Description of Artificial Sequence: Synthetic oligonucleotide
acugacucacccauguggc

SEQ ID NO: 239320 - RNA, 19 nt, Artificial Sequence
  Description of Artificial Sequence: Synthetic oligonucleotide
cauagacgggcauagauga

SEQ ID NO: 239321 - RNA, 19 nt, Artificial Sequence
  Description of Artificial Sequence: Synthetic oligonucleotide
gaucaauuccaggugaaac

SEQ ID NO: 239322 - RNA, 19 nt, Artificial Sequence
  Description of Artificial Sequence: Synthetic oligonucleotide
agagcaacacugcuuuuag

SEQ ID NO: 239323 - RNA, 19 nt, Artificial Sequence
  Description of Artificial Sequence: Synthetic oligonucleotide
agcauaaggggcugaguuc

SEQ ID NO: 239324 - RNA, 19 nt, Artificial Sequence
  Description of Artificial Sequence: Synthetic oligonucleotide
gguacuaguagcauuagac

SEQ ID NO: 239325 - RNA, 19 nt, Artificial Sequence
  Description of Artificial Sequence: Synthetic oligonucleotide
uccauagacgggcauagau

SEQ ID NO: 239326 - RNA, 19 nt, Artificial Sequence
  Description of Artificial Sequence: Synthetic oligonucleotide
caaacucccuauuacgaac

SEQ ID NO: 239327 - RNA, 19 nt, Artificial Sequence
  Description of Artificial Sequence: Synthetic oligonucleotide
ccuauuacgaacugcaaug

SEQ ID NO: 239328 - RNA, 19 nt, Artificial Sequence
  Description of Artificial Sequence: Synthetic oligonucleotide
ucguucauagugauaugga

SEQ ID NO: 239329 - RNA, 19 nt, Artificial Sequence
  Description of Artificial Sequence: Synthetic oligonucleotide
ugagacucaguuuuauuua

SEQ ID NO: 239330 - RNA, 19 nt, Artificial Sequence
  Description of Artificial Sequence: Synthetic oligonucleotide
aaguacauaucuugauaau

SEQ ID NO: 239331 - RNA, 19 nt, Artificial Sequence
  Description of Artificial Sequence: Synthetic oligonucleotide
aaagggcuuagaauaacca

SEQ ID NO: 239332 - RNA, 19 nt, Artificial Sequence
  Description of Artificial Sequence: Synthetic oligonucleotide
  modified_base (6)..(6): a, c, u, g, unknown or other
ugaccnguaauccguucug

SEQ ID NO: 239333 - RNA, 19 nt, Artificial Sequence
  Description of Artificial Sequence: Synthetic oligonucleotide
aaaagcgaucuccuccaga

SEQ ID NO: 239334 - RNA, 19 nt, Artificial Sequence
  Description of Artificial Sequence: Synthetic oligonucleotide
caagcgacggaggucaucg

SEQ ID NO: 239335 - RNA, 19 nt, Artificial Sequence
  Description of Artificial Sequence: Synthetic oligonucleotide
ggagcuauuccaccuacgg

SEQ ID NO: 239336 - RNA, 19 nt, Artificial Sequence
  Description of Artificial Sequence: Synthetic oligonucleotide
ugaacagcgucuccaggug

SEQ ID NO: 239337 - RNA, 19 nt, Artificial Sequence
  Description of Artificial Sequence: Synthetic oligonucleotide
uaaaacugacucacccaug

SEQ ID NO: 239338 - RNA, 19 nt, Artificial Sequence
  Description of Artificial Sequence: Synthetic oligonucleotide
gaguaugcacaagcgacgg

SEQ ID NO: 239339 - RNA, 19 nt, Artificial Sequence
  Description of Artificial Sequence: Synthetic oligonucleotide
aacccuuuaugaaaagaca

SEQ ID NO: 239340 - RNA, 19 nt, Artificial Sequence
  Description of Artificial Sequence: Synthetic oligonucleotide
gaauugucacuaugcacac

SEQ ID NO: 239341 - RNA, 19 nt, Artificial Sequence
  Description of Artificial Sequence: Synthetic oligonucleotide
agauuuaguaagaauuggu

SEQ ID NO: 239342 - RNA, 19 nt, Artificial Sequence
  Description of Artificial Sequence: Synthetic oligonucleotide
uucagauuauaaacaggau

SEQ ID NO: 239343 - RNA, 19 nt, Artificial Sequence
  Description of Artificial Sequence: Synthetic oligonucleotide
aagccguccauccaguguu

SEQ ID NO: 239344 - RNA, 19 nt, Artificial Sequence
  Description of Artificial Sequence: Synthetic oligonucleotide
cuccauuuguaguuauagc

SEQ ID NO: 239345 - RNA, 19 nt, Artificial Sequence
  Description of Artificial Sequence: Synthetic oligonucleotide
  modified_base (11)..(11): a, c, u, g, unknown or other
cuggcugaccnguaauccg

SEQ ID NO: 239346 - RNA, 19 nt, Artificial Sequence
  Description of Artificial Sequence: Synthetic oligonucleotide
ugaacguauucauccuuca

SEQ ID NO: 239347 - RNA, 19 nt, Artificial Sequence
  Description of Artificial Sequence: Synthetic oligonucleotide
ucaugaacguauucauccu

SEQ ID NO: 239348 - RNA, 19 nt, Artificial Sequence
  Description of Artificial Sequence: Synthetic oligonucleotide
uccaccuacggauccagga

SEQ ID NO: 239349 - RNA, 19 nt, Artificial Sequence
  Description of Artificial Sequence: Synthetic oligonucleotide
uaauccguucugcugcugu

SEQ ID NO: 239350 - RNA, 19 nt, Artificial Sequence
  Description of Artificial Sequence: Synthetic oligonucleotide
uuauccauuagggcuaaaa

SEQ ID NO: 239351 - RNA, 19 nt, Artificial Sequence
  Description of Artificial Sequence: Synthetic oligonucleotide
uuaugcuacuaacuaggua

SEQ ID NO: 239352 - RNA, 19 nt, Artificial Sequence
  Description of Artificial Sequence: Synthetic oligonucleotide
acuaacauacuugguggag

SEQ ID NO: 239353 - RNA, 19 nt, Artificial Sequence
  Description of Artificial Sequence: Synthetic oligonucleotide
agcgacggaggucaucgac

SEQ ID NO: 239354 - RNA, 19 nt, Artificial Sequence
  Description of Artificial Sequence: Synthetic oligonucleotide
acuaguagcauuagacuca

SEQ ID NO: 239355 - RNA, 19 nt, Artificial Sequence
  Description of Artificial Sequence: Synthetic oligonucleotide
acguauucauccuucacua

SEQ ID NO: 239356 - RNA, 19 nt, Artificial Sequence
  Description of Artificial Sequence: Synthetic oligonucleotide
augaccccuucauacauca

SEQ ID NO: 239357 - RNA, 19 nt, Artificial Sequence
  Description of Artificial Sequence: Synthetic oligonucleotide
cuacacaaagucacugcug

SEQ ID NO: 239358 - RNA, 19 nt, Artificial Sequence
  Description of Artificial Sequence: Synthetic oligonucleotide
aaacugacucacccaugug

SEQ ID NO: 239359 - RNA, 19 nt, Artificial Sequence
  Description of Artificial Sequence: Synthetic oligonucleotide
uggagcuauuccaccuacg

SEQ ID NO: 239360 - RNA, 19 nt, Artificial Sequence
  Description of Artificial Sequence: Synthetic oligonucleotide
acucccuauuacgaacugc

SEQ ID NO: 239361 - RNA, 19 nt, Artificial Sequence
  Description of Artificial Sequence: Synthetic oligonucleotide
cucccuauuacgaacugca

SEQ ID NO: 239362 - RNA, 19 nt, Artificial Sequence
  Description of Artificial Sequence: Synthetic oligonucleotide
aaacucccuauuacgaacu

SEQ ID NO: 239363 - RNA, 19 nt, Artificial Sequence
  Description of Artificial Sequence: Synthetic oligonucleotide
auuacgaacugcaauguuu

SEQ ID NO: 239364 - RNA, 19 nt, Artificial Sequence
  Description of Artificial Sequence: Synthetic oligonucleotide
aggugaauuucgauccagc

SEQ ID NO: 239365 - RNA, 19 nt, Artificial Sequence
  Description of Artificial Sequence: Synthetic oligonucleotide
  modified_base (4)..(4): a, c, u, g, unknown or other
accnguaauccguucugcu

SEQ ID NO: 239366 - RNA, 19 nt, Artificial Sequence
  Description of Artificial Sequence: Synthetic oligonucleotide
  modified_base (19)..(19): a, c, u, g, unknown or other
gguaguagcuggcugaccn

SEQ ID NO: 239367 - RNA, 19 nt, Artificial Sequence
  Description of Artificial Sequence: Synthetic oligonucleotide
aacucccuauuacgaacug

SEQ ID NO: 239368 - RNA, 19 nt, Artificial Sequence
  Description of Artificial Sequence: Synthetic oligonucleotide
agaauaaccaaaagguaua

SEQ ID NO: 239369 - RNA, 19 nt, Artificial Sequence
  Description of Artificial Sequence: Synthetic oligonucleotide
ugguacuaguagcauuaga

SEQ ID NO: 239370 - RNA, 19 nt, Artificial Sequence
  Description of Artificial Sequence: Synthetic oligonucleotide
gaacguauucauccuucac

SEQ ID NO: 239371 - RNA, 19 nt, Artificial Sequence
  Description of Artificial Sequence: Synthetic oligonucleotide
agccaugacuuaaaaguuc

SEQ ID NO: 239372 - RNA, 19 nt, Artificial Sequence
  Description of Artificial Sequence: Synthetic oligonucleotide
cccuucauacaucacaacc

SEQ ID NO: 239373 - RNA, 19 nt, Artificial Sequence
  Description of Artificial Sequence: Synthetic oligonucleotide
aucuuuacgcucugagcca

SEQ ID NO: 239374 - RNA, 19 nt, Artificial Sequence
  Description of Artificial Sequence: Synthetic oligonucleotide
cuuggguagaucuuaugaa

SEQ ID NO: 239375 - RNA, 19 nt, Artificial Sequence
  Description of Artificial Sequence: Synthetic oligonucleotide
uauuacgaacugcaauguu

SEQ ID NO: 239376 - RNA, 19 nt, Artificial Sequence
  Description of Artificial Sequence: Synthetic oligonucleotide
gacugauaauuguaaggaa

SEQ ID NO: 239377 - RNA, 19 nt, Artificial Sequence
  Description of Artificial Sequence: Synthetic oligonucleotide
caccuacggauccaggacc

SEQ ID NO: 239378 - RNA, 19 nt, Artificial Sequence
  Description of Artificial Sequence: Synthetic oligonucleotide
ucgacaccgaugccggcag

SEQ ID NO: 239379 - RNA, 19 nt, Artificial Sequence
  Description of Artificial Sequence: Synthetic oligonucleotide
gauccacguauccauccac

SEQ ID NO: 239380 - RNA, 19 nt, Artificial Sequence
  Description of Artificial Sequence: Synthetic oligonucleotide
agucaacguaucugcaacu

SEQ ID NO: 239381 - RNA, 19 nt, Artificial Sequence
  Description of Artificial Sequence: Synthetic oligonucleotide
acuaugcacacagauuagu

SEQ ID NO: 239382 - RNA, 19 nt, Artificial Sequence
  Description of Artificial Sequence: Synthetic oligonucleotide
auaaccaaccauaugccua

SEQ ID NO: 239383 - RNA, 19 nt, Artificial Sequence
  Description of Artificial Sequence: Synthetic oligonucleotide
gaggugaauuucgauccag

SEQ ID NO: 239384 - RNA, 19 nt, Artificial Sequence
  Description of Artificial Sequence: Synthetic oligonucleotide
cugcaucugccgaugacac

SEQ ID NO: 239385 - RNA, 19 nt, Artificial Sequence
  Description of Artificial Sequence: Synthetic oligonucleotide
uacgaacugcaauguuucc

SEQ ID NO: 239386 - RNA, 19 nt, Artificial Sequence
  Description of Artificial Sequence: Synthetic oligonucleotide
ucuccgucgaugcacgauu

SEQ ID NO: 239387 - RNA, 19 nt, Artificial Sequence
  Description of Artificial Sequence: Synthetic oligonucleotide
ugacucacccauguggcac

SEQ ID NO: 239388 - RNA, 19 nt, Artificial Sequence
  Description of Artificial Sequence: Synthetic oligonucleotide
guacuaguagcauuagacu

SEQ ID NO: 239389 - RNA, 19 nt, Artificial Sequence
  Description of Artificial Sequence: Synthetic oligonucleotide
guaagaauugguucuuccu

SEQ ID NO: 239390 - RNA, 19 nt, Artificial Sequence
  Description of Artificial Sequence: Synthetic oligonucleotide
ugucugcuaagagcaaggc

SEQ ID NO: 239391 - RNA, 19 nt, Artificial Sequence
  Description of Artificial Sequence: Synthetic oligonucleotide
uguaaggaauugucacuau

SEQ ID NO: 239392 - RNA, 19 nt, Artificial Sequence
  Description of Artificial Sequence: Synthetic oligonucleotide
agcauuagacucagauggg

SEQ ID NO: 239393 - RNA, 19 nt, Artificial Sequence
  Description of Artificial Sequence: Synthetic oligonucleotide
uuaguaagaauugguucuu

SEQ ID NO: 239394 - RNA, 19 nt, Artificial Sequence
  Description of Artificial Sequence: Synthetic oligonucleotide
gaaaauggcuagggcgucc

SEQ ID NO: 239395 - RNA, 19 nt, Artificial Sequence
  Description of Artificial Sequence: Synthetic oligonucleotide
auacaugauuuaaacagua

SEQ ID NO: 239396 - RNA, 19 nt, Artificial Sequence
  Description of Artificial Sequence: Synthetic oligonucleotide
agaauacuggccggcugac

SEQ ID NO: 239397 - RNA, 19 nt, Artificial Sequence
  Description of Artificial Sequence: Synthetic oligonucleotide
gaugagcuccauuuguagu

SEQ ID NO: 239398 - RNA, 19 nt, Artificial Sequence
  Description of Artificial Sequence: Synthetic oligonucleotide
ggugaauuucgauccagca

SEQ ID NO: 239399 - RNA, 19 nt, Artificial Sequence
  Description of Artificial Sequence: Synthetic oligonucleotide
ugccuaugugcaaccuugc

SEQ ID NO: 239400 - RNA, 19 nt, Artificial Sequence
  Description of Artificial Sequence: Synthetic oligonucleotide
aguucccgacacuggaaug

SEQ ID NO: 239401 - RNA, 19 nt, Artificial Sequence
  Description of Artificial Sequence: Synthetic oligonucleotide
uaaagguugcgggucugca

SEQ ID NO: 239402 - RNA, 19 nt, Artificial Sequence
  Description of Artificial Sequence: Synthetic oligonucleotide
caggugaaacaacucguuc

SEQ ID NO: 239403 - RNA, 19 nt, Artificial Sequence
  Description of Artificial Sequence: Synthetic oligonucleotide
  modified_base (5)..(5): a, c, u, g, unknown or other
gaccnguaauccguucugc

SEQ ID NO: 239404 - RNA, 19 nt, Artificial Sequence
  Description of Artificial Sequence: Synthetic oligonucleotide
caggugagcuaacuuugag

SEQ ID NO: 239405 - RNA, 19 nt, Artificial Sequence
  Description of Artificial Sequence: Synthetic oligonucleotide
augcacaagcgacggaggu

SEQ ID NO: 239406 - RNA, 19 nt, Artificial Sequence
  Description of Artificial Sequence: Synthetic oligonucleotide
acgguggaggugaauuucg

SEQ ID NO: 239407 - RNA, 19 nt, Artificial Sequence
  Description of Artificial Sequence: Synthetic oligonucleotide
cugccagaauacuggccgg

SEQ ID NO: 239408 - RNA, 19 nt, Artificial Sequence
  Description of Artificial Sequence: Synthetic oligonucleotide
ccauagacgggcauagaug

SEQ ID NO: 239409 - RNA, 19 nt, Artificial Sequence
  Description of Artificial Sequence: Synthetic oligonucleotide
gguaaucggggccccagcc

SEQ ID NO: 239410 - RNA, 19 nt, Artificial Sequence
  Description of Artificial Sequence: Synthetic oligonucleotide
auauggauucacacagaca

SEQ ID NO: 239411 - RNA, 19 nt, Artificial Sequence
  Description of Artificial Sequence: Synthetic oligonucleotide
auacuggccggcugacuug

SEQ ID NO: 239412 - RNA, 19 nt, Artificial Sequence
  Description of Artificial Sequence: Synthetic oligonucleotide
aauuucgauccagcauggu

SEQ ID NO: 239413 - RNA, 19 nt, Artificial Sequence
  Description of Artificial Sequence: Synthetic oligonucleotide
ucccuauuacgaacugcaa

SEQ ID NO: 239414 - RNA, 19 nt, Artificial Sequence
  Description of Artificial Sequence: Synthetic oligonucleotide
cuggccggcugacuugugg

SEQ ID NO: 239415 - RNA, 19 nt, Artificial Sequence
  Description of Artificial Sequence: Synthetic oligonucleotide
cauaaggggcugaguuccc

SEQ ID NO: 239416 - RNA, 19 nt, Artificial Sequence
  Description of Artificial Sequence: Synthetic oligonucleotide
cugauugcuggagcuauuc

SEQ ID NO: 239417 - RNA, 19 nt, Artificial Sequence
  Description of Artificial Sequence: Synthetic oligonucleotide
uggccggcugacuugugga

SEQ ID NO: 239418 - RNA, 19 nt, Artificial Sequence
  Description of Artificial Sequence: Synthetic oligonucleotide
ccuaugugcaaccuugcuc

SEQ ID NO: 239419 - RNA, 19 nt, Artificial Sequence
  Description of Artificial Sequence: Synthetic oligonucleotide
  modified_base (3)..(3): a, c, u, g, unknown or other
ccnguaauccguucugcug

SEQ ID NO: 239420 - RNA, 19 nt, Artificial Sequence
  Description of Artificial Sequence: Synthetic oligonucleotide
auagacgggcauagaugac

SEQ ID NO: 239421 - RNA, 19 nt, Artificial Sequence
  Description of Artificial Sequence: Synthetic oligonucleotide
acucguucauagugauaug

SEQ ID NO: 239422 - RNA, 19 nt, Artificial Sequence
  Description of Artificial Sequence: Synthetic oligonucleotide
gaaugaccccuucauacau

SEQ ID NO: 239423 - RNA, 19 nt, Artificial Sequence
  Description of Artificial Sequence: Synthetic oligonucleotide
ggaaugaccccuucauaca

SEQ ID NO: 239424 - RNA, 19 nt, Artificial Sequence
  Description of Artificial Sequence: Synthetic oligonucleotide
ccugaagccguccauccag

SEQ ID NO: 239425 - RNA, 19 nt, Artificial Sequence
  Description of Artificial Sequence: Synthetic oligonucleotide
uggguaaucggggccccag

SEQ ID NO: 239426 - RNA, 19 nt, Artificial Sequence
  Description of Artificial Sequence: Synthetic oligonucleotide
cacuaacauacuuggugga

SEQ ID NO: 239427 - RNA, 19 nt, Artificial Sequence
  Description of Artificial Sequence: Synthetic oligonucleotide
cauuacucugcaguguuaa

SEQ ID NO: 239428 - RNA, 19 nt, Artificial Sequence
  Description of Artificial Sequence: Synthetic oligonucleotide
guaacucugcacaaagacu

SEQ ID NO: 239429 - RNA, 19 nt, Artificial Sequence
  Description of Artificial Sequence: Synthetic oligonucleotide
ugcuguuaugaugguagua

SEQ ID NO: 239430 - RNA, 19 nt, Artificial Sequence
  Description of Artificial Sequence: Synthetic oligonucleotide
uccgucgaugcacgauuac

SEQ ID NO: 239431 - RNA, 19 nt, Artificial Sequence
  Description of Artificial Sequence: Synthetic oligonucleotide
accaaccauaugccuagaa

SEQ ID NO: 239432 - RNA, 19 nt, Artificial Sequence
  Description of Artificial Sequence: Synthetic oligonucleotide
caaaagcgaucuccuccag

SEQ ID NO: 239433 - RNA, 19 nt, Artificial Sequence
  Description of Artificial Sequence: Synthetic oligonucleotide
aucgacaccgaugccggca

SEQ ID NO: 239434 - RNA, 19 nt, Artificial Sequence
  Description of Artificial Sequence: Synthetic oligonucleotide
  modified_base (7)..(7): a, c, u, g, unknown or other
cugaccnguaauccguucu

SEQ ID NO: 239435 - RNA, 19 nt, Artificial Sequence
  Description of Artificial Sequence: Synthetic oligonucleotide
uucaguggguaaggauggc

SEQ ID NO: 239436 - RNA, 19 nt, Artificial Sequence
  Description of Artificial Sequence: Synthetic oligonucleotide
cugugguacagucaacgua

SEQ ID NO: 239437 - RNA, 19 nt, Artificial Sequence
  Description of Artificial Sequence: Synthetic oligonucleotide
cugacugaucgaugauguc

SEQ ID NO: 239438 - RNA, 19 nt, Artificial Sequence
  Description of Artificial Sequence: Synthetic oligonucleotide
acaagcgacggaggucauc

SEQ ID NO: 239439 - RNA, 19 nt, Artificial Sequence
  Description of Artificial Sequence: Synthetic oligonucleotide
agguugcgggucugcaaug

SEQ ID NO: 239440 - RNA, 19 nt, Artificial Sequence
  Description of Artificial Sequence: Synthetic oligonucleotide
gguugcgggucugcaaugg

SEQ ID NO: 239441 - RNA, 19 nt, Artificial Sequence
  Description of Artificial Sequence: Synthetic oligonucleotide
gacgggcauagaugacaug

SEQ ID NO: 239442 - RNA, 19 nt, Artificial Sequence
  Description of Artificial Sequence: Synthetic oligonucleotide
guaacaggugagcuaacuu

SEQ ID NO: 239443 - RNA, 19 nt, Artificial Sequence
  Description of Artificial Sequence: Synthetic oligonucleotide
gaguucccgacacuggaau

SEQ ID NO: 239444 - RNA, 19 nt, Artificial Sequence
  Description of Artificial Sequence: Synthetic oligonucleotide
cugcaguguuaauccugag

SEQ ID NO: 239445 - RNA, 19 nt, Artificial Sequence
  Description of Artificial Sequence: Synthetic oligonucleotide
gcucugucuuggguaaucg

SEQ ID NO: 239446 - RNA, 19 nt, Artificial Sequence
  Description of Artificial Sequence: Synthetic oligonucleotide
ggucacuaaggcaucugac

SEQ ID NO: 239447 - RNA, 19 nt, Artificial Sequence
  Description of Artificial Sequence: Synthetic oligonucleotide
aagcgacggaggucaucga

SEQ ID NO: 239448 - RNA, 19 nt, Artificial Sequence
  Description of Artificial Sequence: Synthetic oligonucleotide
cuauuacgaacugcaaugu

SEQ ID NO: 239449 - RNA, 19 nt, Artificial Sequence
  Description of Artificial Sequence: Synthetic oligonucleotide
cagucuaaagguugcgggu

SEQ ID NO: 239450 - RNA, 19 nt, Artificial Sequence
  Description of Artificial Sequence: Synthetic oligonucleotide
aggaugagcuccauuugua

SEQ ID NO: 239451 - RNA, 19 nt, Artificial Sequence
  Description of Artificial Sequence: Synthetic oligonucleotide
agacgggcauagaugacau

SEQ ID NO: 239452 - RNA, 19 nt, Artificial Sequence
  Description of Artificial Sequence: Synthetic oligonucleotide
cuuuccgaccagccaccug

SEQ ID NO: 239453 - RNA, 19 nt, Artificial Sequence
  Description of Artificial Sequence: Synthetic oligonucleotide
ggcgcuguaugucuccguc

SEQ ID NO: 239454 - RNA, 19 nt, Artificial Sequence
  Description of Artificial Sequence: Synthetic oligonucleotide
ccugaguaugcacaagcga

SEQ ID NO: 239455 - RNA, 19 nt, Artificial Sequence
  Description of Artificial Sequence: Synthetic oligonucleotide
cugacucacccauguggca

SEQ ID NO: 239456 - RNA, 19 nt, Artificial Sequence
  Description of Artificial Sequence: Synthetic oligonucleotide
ggauccacguauccaucca

SEQ ID NO: 239457 - RNA, 19 nt, Artificial Sequence
  Description of Artificial Sequence: Synthetic oligonucleotide
gcuagggcguccaugguga

SEQ ID NO: 239458 - RNA, 19 nt, Artificial Sequence
  Description of Artificial Sequence: Synthetic oligonucleotide
ccaccuacggauccaggac

SEQ ID NO: 239459 - RNA, 19 nt, Artificial Sequence
  Description of Artificial Sequence: Synthetic oligonucleotide
aaccaaccauaugccuaga

SEQ ID NO: 239460 - RNA, 19 nt, Artificial Sequence
  Description of Artificial Sequence: Synthetic oligonucleotide
gagccaugacuuaaaaguu

SEQ ID NO: 239461 - RNA, 19 nt, Artificial Sequence
  Description of Artificial Sequence: Synthetic oligonucleotide
ugucuccgucgaugcacga

SEQ ID NO: 239462 - RNA, 19 nt, Artificial Sequence
  Description of Artificial Sequence: Synthetic oligonucleotide
cagagcaacacugcuuuua

SEQ ID NO: 239463 - RNA, 19 nt, Artificial Sequence
  Description of Artificial Sequence: Synthetic oligonucleotide
caucgacaccgaugccggc

SEQ ID NO: 239464 - RNA, 19 nt, Artificial Sequence
  Description of Artificial Sequence: Synthetic oligonucleotide
cuucacuaacauacuuggu

SEQ ID NO: 239465 - RNA, 19 nt, Artificial Sequence
  Description of Artificial Sequence: Synthetic oligonucleotide
agacugauugcuggagcua

SEQ ID NO: 239466 - RNA, 19 nt, Artificial Sequence
  Description of Artificial Sequence: Synthetic oligonucleotide
  modified_base (16)..(16): a, c, u, g, unknown or other
aguagcuggcugaccngua

SEQ ID NO: 239467 - RNA, 19 nt, Artificial Sequence
  Description of Artificial Sequence: Synthetic oligonucleotide
gagcaacacugcuuuuagu

SEQ ID NO: 239468 - RNA, 19 nt, Artificial Sequence
  Description of Artificial Sequence: Synthetic oligonucleotide
ggcaucugacccaaacauc

SEQ ID NO: 239469 - RNA, 19 nt, Artificial Sequence
  Description of Artificial Sequence: Synthetic oligonucleotide
gucaaacaaagggcuuaga

SEQ ID NO: 239470 - RNA, 19 nt, Artificial Sequence
  Description of Artificial Sequence: Synthetic oligonucleotide
gcuauuccaccuacggauc

SEQ ID NO: 239471 - RNA, 19 nt, Artificial Sequence
  Description of Artificial Sequence: Synthetic oligonucleotide
caugaacguauucauccuu

SEQ ID NO: 239472 - RNA, 19 nt, Artificial Sequence
  Description of Artificial Sequence: Synthetic oligonucleotide
guaauccguucugcugcug

SEQ ID NO: 239473 - RNA, 19 nt, Artificial Sequence
  Description of Artificial Sequence: Synthetic oligonucleotide
  modified_base (8)..(8): a, c, u, g, unknown or other
gcugaccnguaauccguuc

SEQ ID NO: 239474 - RNA, 19 nt, Artificial Sequence
  Description of Artificial Sequence: Synthetic oligonucleotide
gugguacagucaacguauc

SEQ ID NO: 239475 - RNA, 19 nt, Artificial Sequence
  Description of Artificial Sequence: Synthetic oligonucleotide
cgacggaggucaucgacac

SEQ ID NO: 239476 - RNA, 19 nt, Artificial Sequence
  Description of Artificial Sequence: Synthetic oligonucleotide
cucuguauggugacacauu

SEQ ID NO: 239477 - RNA, 19 nt, Artificial Sequence
  Description of Artificial Sequence: Synthetic oligonucleotide
guagugcuguuaugauggu

SEQ ID NO: 239478 - RNA, 19 nt, Artificial Sequence
  Description of Artificial Sequence: Synthetic oligonucleotide
agcuccauuuguaguuaua

SEQ ID NO: 239479 - RNA, 19 nt, Artificial Sequence
  Description of Artificial Sequence: Synthetic oligonucleotide
ggggcgcuguaugucuccg

SEQ ID NO: 239480 - RNA, 19 nt, Artificial Sequence
  Description of Artificial Sequence: Synthetic oligonucleotide
gcgacggaggucaucgaca

SEQ ID NO: 239481 - RNA, 19 nt, Artificial Sequence
  Description of Artificial Sequence: Synthetic oligonucleotide
cuccgucgaugcacgauua

SEQ ID NO: 239482 - RNA, 19 nt, Artificial Sequence
  Description of Artificial Sequence: Synthetic oligonucleotide
acugauugcuggagcuauu

SEQ ID NO: 239483 - RNA, 19 nt, Artificial Sequence
  Description of Artificial Sequence: Synthetic oligonucleotide
gaauacuggccggcugacu

SEQ ID NO: 239484 - RNA, 19 nt, Artificial Sequence
  Description of Artificial Sequence: Synthetic oligonucleotide
aaucggggccccagccuuu

SEQ ID NO: 239485 - RNA, 19 nt, Artificial Sequence
  Description of Artificial Sequence: Synthetic oligonucleotide
ucggggccccagccuuuca

SEQ ID NO: 239486 - RNA, 19 nt, Artificial Sequence
  Description of Artificial Sequence: Synthetic oligonucleotide
gccuuuccgaccagccacc

SEQ ID NO: 239487 - RNA, 19 nt, Artificial Sequence
  Description of Artificial Sequence: Synthetic oligonucleotide
cuuugccuaugugcaaccu

SEQ ID NO: 239488 - RNA, 19 nt, Artificial Sequence
  Description of Artificial Sequence: Synthetic oligonucleotide
cccuauuacgaacugcaau

SEQ ID NO: 239489 - RNA, 19 nt, Artificial Sequence
  Description of Artificial Sequence: Synthetic oligonucleotide
gagcuaacuuugagaacuu

SEQ ID NO: 239490 - RNA, 19 nt, Artificial Sequence
  Description of Artificial Sequence: Synthetic oligonucleotide
gccuaugugcaaccuugcu

SEQ ID NO: 239491 - RNA, 19 nt, Artificial Sequence
  Description of Artificial Sequence: Synthetic oligonucleotide
cgaugcacgauuacuuggu

SEQ ID NO: 239492 - RNA, 19 nt, Artificial Sequence
  Description of Artificial Sequence: Synthetic oligonucleotide
ccgcaaaucaaagaccuuu

SEQ ID NO: 239493 - RNA, 19 nt, Artificial Sequence
  Description of Artificial Sequence: Synthetic oligonucleotide
gucuccgucgaugcacgau

SEQ ID NO: 239494 - RNA, 19 nt, Artificial Sequence
  Description of Artificial Sequence: Synthetic oligonucleotide
ccucaaagucaugaacgua

SEQ ID NO: 239495 - RNA, 19 nt, Artificial Sequence
  Description of Artificial Sequence: Synthetic oligonucleotide
cgucgaugcacgauuacuu

SEQ ID NO: 239496 - RNA, 19 nt, Artificial Sequence
  Description of Artificial Sequence: Synthetic oligonucleotide
ccgucgaugcacgauuacu

SEQ ID NO: 239497 - RNA, 19 nt, Artificial Sequence
  Description of Artificial Sequence: Synthetic oligonucleotide
caccuccauagacgggcau

SEQ ID NO: 239498 - RNA, 19 nt, Artificial Sequence
  Description of Artificial Sequence: Synthetic oligonucleotide
cacaagcgacggaggucau

SEQ ID NO: 239499 - RNA, 19 nt, Artificial Sequence
  Description of Artificial Sequence: Synthetic oligonucleotide
gggcgcuguaugucuccgu

SEQ ID NO: 239500 - RNA, 19 nt, Artificial Sequence
  Description of Artificial Sequence: Synthetic oligonucleotide
  modified_base (9)..(9): a, c, u, g, unknown or other
ggcugaccnguaauccguu

SEQ ID NO: 239501 - RNA, 19 nt, Artificial Sequence
  Description of Artificial Sequence: Synthetic oligonucleotide
gccgcaaaucaaagaccuu

SEQ ID NO: 239502 - RNA, 19 nt, Artificial Sequence
  Description of Artificial Sequence: Synthetic oligonucleotide
  modified_base (1)..(1): a, c, u, g, unknown or other
nguaauccguucugcugcu

SEQ ID NO: 239503 - RNA, 19 nt, Artificial Sequence
  Description of Artificial Sequence: Synthetic oligonucleotide
acaaucaccaaacaaaccc

SEQ ID NO: 239504 - RNA, 19 nt, Artificial Sequence
  Description of Artificial Sequence: Synthetic oligonucleotide
ugugacaugauuaggaucg

SEQ ID NO: 239505 - RNA, 19 nt, Artificial Sequence
  Description of Artificial Sequence: Synthetic oligonucleotide
acaagauuuguuuaaaggg

SEQ ID NO: 239506 - RNA, 19 nt, Artificial Sequence
  Description of Artificial Sequence: Synthetic oligonucleotide
uaaauaacguaaaauauga

SEQ ID NO: 239507 - RNA, 19 nt, Artificial Sequence
  Description of Artificial Sequence: Synthetic oligonucleotide
aacaagacaacauaauuca

SEQ ID NO: 239508 - RNA, 19 nt, Artificial Sequence
  Description of Artificial Sequence: Synthetic oligonucleotide
aucguagcaaauuaaacac

SEQ ID NO: 239509 - RNA, 19 nt, Artificial Sequence
  Description of Artificial Sequence: Synthetic oligonucleotide
uguuaaaaggaacugggag

SEQ ID NO: 239510 - RNA, 19 nt, Artificial Sequence
  Description of Artificial Sequence: Synthetic oligonucleotide
aauaacguaaaauaugauu

SEQ ID NO: 239511 - RNA, 19 nt, Artificial Sequence
  Description of Artificial Sequence: Synthetic oligonucleotide
ugcacaaagaucguaaucg

SEQ ID NO: 239512 - RNA, 19 nt, Artificial Sequence
  Description of Artificial Sequence: Synthetic oligonucleotide
ucaucuaaaucucuagggg

SEQ ID NO: 239513 - RNA, 19 nt, Artificial Sequence
  Description of Artificial Sequence: Synthetic oligonucleotide
aacacuuguaucugcgacc

SEQ ID NO: 239514 - RNA, 19 nt, Artificial Sequence
  Description of Artificial Sequence: Synthetic oligonucleotide
auaacguaaaauaugauug

SEQ ID NO: 239515 - RNA, 19 nt, Artificial Sequence
  Description of Artificial Sequence: Synthetic oligonucleotide
ugaucuacgagcacgagga

SEQ ID NO: 239516 - RNA, 19 nt, Artificial Sequence
  Description of Artificial Sequence: Synthetic oligonucleotide
ugaguagucaggcagacac

SEQ ID NO: 239517 - RNA, 19 nt, Artificial Sequence
  Description of Artificial Sequence: Synthetic oligonucleotide
aagaguuaagcuguccucc

SEQ ID NO: 239518 - RNA, 19 nt, Artificial Sequence
  Description of Artificial Sequence: Synthetic oligonucleotide
aauuguugcaacugagaag

SEQ ID NO: 239519 - RNA, 19 nt, Artificial Sequence
  Description of Artificial Sequence: Synthetic oligonucleotide
uguaacaagagugacagac

SEQ ID NO: 239520 - RNA, 19 nt, Artificial Sequence
  Description of Artificial Sequence: Synthetic oligonucleotide
auagggacaaguaaaagac

SEQ ID NO: 239521 - RNA, 19 nt, Artificial Sequence
  Description of Artificial Sequence: Synthetic oligonucleotide
uucagaaguaacauggucu

SEQ ID NO: 239522 - RNA, 19 nt, Artificial Sequence
  Description of Artificial Sequence: Synthetic oligonucleotide
ucuacccuuguuaauaugc

SEQ ID NO: 239523 - RNA, 19 nt, Artificial Sequence
  Description of Artificial Sequence: Synthetic oligonucleotide
gaaauuacaaucaccaaac

SEQ ID NO: 239524 - RNA, 19 nt, Artificial Sequence
  Description of Artificial Sequence: Synthetic oligonucleotide
acuauucaaaagcuaacuc

SEQ ID NO: 239525 - RNA, 19 nt, Artificial Sequence
  Description of Artificial Sequence: Synthetic oligonucleotide
acauucuacguacaugucg

SEQ ID NO: 239526 - RNA, 19 nt, Artificial Sequence
  Description of Artificial Sequence: Synthetic oligonucleotide
ugaacaaacaggcugcggu

SEQ ID NO: 239527 - RNA, 19 nt, Artificial Sequence
  Description of Artificial Sequence: Synthetic oligonucleotide
agguaaaccauccaagcag

SEQ ID NO: 239528 - RNA, 19 nt, Artificial Sequence
  Description of Artificial Sequence: Synthetic oligonucleotide
uuacaaucaccaaacaaac

SEQ ID NO: 239529 - RNA, 19 nt, Artificial Sequence
  Description of Artificial Sequence: Synthetic oligonucleotide
ucuacguacaugucgaaca

SEQ ID NO: 239530 - RNA, 19 nt, Artificial Sequence
  Description of Artificial Sequence: Synthetic oligonucleotide
aauaugauugagaauguga

SEQ ID NO: 239531 - RNA, 19 nt, Artificial Sequence
  Description of Artificial Sequence: Synthetic oligonucleotide
ucaaaaucuacccuuguua

SEQ ID NO: 239532 - RNA, 19 nt, Artificial Sequence
  Description of Artificial Sequence: Synthetic oligonucleotide
gauucaucuaaaucucuag

SEQ ID NO: 239533 - RNA, 19 nt, Artificial Sequence
  Description of Artificial Sequence: Synthetic oligonucleotide
uugaucuacgagcacgagg

SEQ ID NO: 239534 - RNA, 19 nt, Artificial Sequence
  Description of Artificial Sequence: Synthetic oligonucleotide
aaauuuaucagaagcugug

SEQ ID NO: 239535 - RNA, 19 nt, Artificial Sequence
  Description of Artificial Sequence: Synthetic oligonucleotide
uucaguuugaauguggagu

SEQ ID NO: 239536 - RNA, 19 nt, Artificial Sequence
  Description of Artificial Sequence: Synthetic oligonucleotide
aaagcaacaucuaaaggca

SEQ ID NO: 239537 - RNA, 19 nt, Artificial Sequence
  Description of Artificial Sequence: Synthetic oligonucleotide
aaugcugcacauaucggac

SEQ ID NO: 239538 - RNA, 19 nt, Artificial Sequence
  Description of Artificial Sequence: Synthetic oligonucleotide
uuuuaaguuuuacuucaug

SEQ ID NO: 239539 - RNA, 19 nt, Artificial Sequence
  Description of Artificial Sequence: Synthetic oligonucleotide
uuaauaugcacugcaucgg

SEQ ID NO: 239540 - RNA, 19 nt, Artificial Sequence
  Description of Artificial Sequence: Synthetic oligonucleotide
ugcaugucaagguacagga

SEQ ID NO: 239541 - RNA, 19 nt, Artificial Sequence
  Description of Artificial Sequence: Synthetic oligonucleotide
auaugauugagaaugugag

SEQ ID NO: 239542 - RNA, 19 nt, Artificial Sequence
  Description of Artificial Sequence: Synthetic oligonucleotide
uuugggaucauucaaccuu

SEQ ID NO: 239543 - RNA, 19 nt, Artificial Sequence
  Description of Artificial Sequence: Synthetic oligonucleotide
aauuaaacacuuguaucug

SEQ ID NO: 239544 - RNA, 19 nt, Artificial Sequence
  Description of Artificial Sequence: Synthetic oligonucleotide
aagugcauguuugaucuac

SEQ ID NO: 239545 - RNA, 19 nt, Artificial Sequence
  Description of Artificial Sequence: Synthetic oligonucleotide
ucuacgagcacgaggaccu

SEQ ID NO: 239546 - RNA, 19 nt, Artificial Sequence
  Description of Artificial Sequence: Synthetic oligonucleotide
agcuauaggauccauggcu

SEQ ID NO: 239547 - RNA, 19 nt, Artificial Sequence
  Description of Artificial Sequence: Synthetic oligonucleotide
auuagguuaagucuaguua

SEQ ID NO: 239548 - RNA, 19 nt, Artificial Sequence
  Description of Artificial Sequence: Synthetic oligonucleotide
auucaucuacaccugaaug

SEQ ID NO: 239549 - RNA, 19 nt, Artificial Sequence
  Description of Artificial Sequence: Synthetic oligonucleotide
aaagaucguaaucguagca

SEQ ID NO: 239550 - RNA, 19 nt, Artificial Sequence
  Description of Artificial Sequence: Synthetic oligonucleotide
ugcauguuugaucuacgag

SEQ ID NO: 239551 - RNA, 19 nt, Artificial Sequence
  Description of Artificial Sequence: Synthetic oligonucleotide
uaacugagauaacagcuca

SEQ ID NO: 239552 - RNA, 19 nt, Artificial Sequence
  Description of Artificial Sequence: Synthetic oligonucleotide
auaucggacaaaucacuuc

SEQ ID NO: 239553 - RNA, 19 nt, Artificial Sequence
  Description of Artificial Sequence: Synthetic oligonucleotide
accuacaugcaguaguuag

SEQ ID NO: 239554 - RNA, 19 nt, Artificial Sequence
  Description of Artificial Sequence: Synthetic oligonucleotide
aguuguaugccuuguuguc

SEQ ID NO: 239555 - RNA, 19 nt, Artificial Sequence
  Description of Artificial Sequence: Synthetic oligonucleotide
auuaggagagccuuuugca

SEQ ID NO: 239556 - RNA, 19 nt, Artificial Sequence
  Description of Artificial Sequence: Synthetic oligonucleotide
uaauguuggaaaagcuuug

SEQ ID NO: 239557 - RNA, 19 nt, Artificial Sequence
  Description of Artificial Sequence: Synthetic oligonucleotide
acaugcaguaguuagguaa

SEQ ID NO: 239558 - RNA, 19 nt, Artificial Sequence
  Description of Artificial Sequence: Synthetic oligonucleotide
uguaaccacugaauaaugu

SEQ ID NO: 239559 - RNA, 19 nt, Artificial Sequence
  Description of Artificial Sequence: Synthetic oligonucleotide
aaauuacaaucaccaaaca

SEQ ID NO: 239560 - RNA, 19 nt, Artificial Sequence
  Description of Artificial Sequence: Synthetic oligonucleotide
uuuugcaugucaagguaca

SEQ ID NO: 239561 - RNA, 19 nt, Artificial Sequence
  Description of Artificial Sequence: Synthetic oligonucleotide
acaauguaacaagagugac

SEQ ID NO: 239562 - RNA, 19 nt, Artificial Sequence
  Description of Artificial Sequence: Synthetic oligonucleotide
auuuaucagaagcugugca

SEQ ID NO: 239563 - RNA, 19 nt, Artificial Sequence
  Description of Artificial Sequence: Synthetic oligonucleotide
aaaucuacccuuguuaaua

SEQ ID NO: 239564 - RNA, 19 nt, Artificial Sequence
  Description of Artificial Sequence: Synthetic oligonucleotide
uuaguuaaguggaaaugau

SEQ ID NO: 239565 - RNA, 19 nt, Artificial Sequence
  Description of Artificial Sequence: Synthetic oligonucleotide
gaaagcuuccccaccauag

SEQ ID NO: 239566 - RNA, 19 nt, Artificial Sequence
  Description of Artificial Sequence: Synthetic oligonucleotide
aagucuguaugcuugucau

SEQ ID NO: 239567 - RNA, 19 nt, Artificial Sequence
  Description of Artificial Sequence: Synthetic oligonucleotide
ucgaaaauuuccuuuuaaa

SEQ ID NO: 239568 - RNA, 19 nt, Artificial Sequence
  Description of Artificial Sequence: Synthetic oligonucleotide
gcuaccuacauuuaccugc

SEQ ID NO: 239569 - RNA, 19 nt, Artificial Sequence
  Description of Artificial Sequence: Synthetic oligonucleotide
uaugauugagaaugugaga

SEQ ID NO: 239570 - RNA, 19 nt, Artificial Sequence
  Description of Artificial Sequence: Synthetic oligonucleotide
uucaagugucagaugagcu

SEQ ID NO: 239571 - RNA, 19 nt, Artificial Sequence
  Description of Artificial Sequence: Synthetic oligonucleotide
uacucucuuuuaaauuuag

SEQ ID NO: 239572 - RNA, 19 nt, Artificial Sequence
  Description of Artificial Sequence: Synthetic oligonucleotide
ggacaaaucacuucuguug

SEQ ID NO: 239573 - RNA, 19 nt, Artificial Sequence
  Description of Artificial Sequence: Synthetic oligonucleotide
ugucuaagacaaacuaaca

SEQ ID NO: 239574 - RNA, 19 nt, Artificial Sequence
  Description of Artificial Sequence: Synthetic oligonucleotide
ugguagugccucaaguucc

SEQ ID NO: 239575 - RNA, 19 nt, Artificial Sequence
  Description of Artificial Sequence: Synthetic oligonucleotide
aguuaaguggaaaugauua

SEQ ID NO: 239576 - RNA, 19 nt, Artificial Sequence
  Description of Artificial Sequence: Synthetic oligonucleotide
uugggaucauucaaccuug

SEQ ID NO: 239577 - RNA, 19 nt, Artificial Sequence
  Description of Artificial Sequence: Synthetic oligonucleotide
agggcgacaggacagucac

SEQ ID NO: 239578 - RNA, 19 nt, Artificial Sequence
  Description of Artificial Sequence: Synthetic oligonucleotide
agcacgaggaccuccuaac

SEQ ID NO: 239579 - RNA, 19 nt, Artificial Sequence
  Description of Artificial Sequence: Synthetic oligonucleotide
uguugcaacugagaagcgg

SEQ ID NO: 239580 - RNA, 19 nt, Artificial Sequence
  Description of Artificial Sequence: Synthetic oligonucleotide
ucaguuugaauguggagua

SEQ ID NO: 239581 - RNA, 19 nt, Artificial Sequence
  Description of Artificial Sequence: Synthetic oligonucleotide
uguucaagugucagaugag

SEQ ID NO: 239582 - RNA, 19 nt, Artificial Sequence
  Description of Artificial Sequence: Synthetic oligonucleotide
auguuggaaaagcuuuggg

SEQ ID NO: 239583 - RNA, 19 nt, Artificial Sequence
  Description of Artificial Sequence: Synthetic oligonucleotide
ucugcgaccucgaaaauuu

SEQ ID NO: 239584 - RNA, 19 nt, Artificial Sequence
  Description of Artificial Sequence: Synthetic oligonucleotide
gauaacugagauaacagcu

SEQ ID NO: 239585 - RNA, 19 nt, Artificial Sequence
  Description of Artificial Sequence: Synthetic oligonucleotide
caaagaucguaaucguagc

SEQ ID NO: 239586 - RNA, 19 nt, Artificial Sequence
  Description of Artificial Sequence: Synthetic oligonucleotide
cuuuugcaugucaagguac

SEQ ID NO: 239587 - RNA, 19 nt, Artificial Sequence
  Description of Artificial Sequence: Synthetic oligonucleotide
aaaaucuacccuuguuaau

SEQ ID NO: 239588 - RNA, 19 nt, Artificial Sequence
  Description of Artificial Sequence: Synthetic oligonucleotide
uguaucugcgaccucgaaa

SEQ ID NO: 239589 - RNA, 19 nt, Artificial Sequence
  Description of Artificial Sequence: Synthetic oligonucleotide
cuaacguggacagaaggag

SEQ ID NO: 239590 - RNA, 19 nt, Artificial Sequence
  Description of Artificial Sequence: Synthetic oligonucleotide
guaucugcgaccucgaaaa

SEQ ID NO: 239591 - RNA, 19 nt, Artificial Sequence
  Description of Artificial Sequence: Synthetic oligonucleotide
uuugcgugaacauggacuu

SEQ ID NO: 239592 - RNA, 19 nt, Artificial Sequence
  Description of Artificial Sequence: Synthetic oligonucleotide
guaaagugcauguuugauc

SEQ ID NO: 239593 - RNA, 19 nt, Artificial Sequence
  Description of Artificial Sequence: Synthetic oligonucleotide
augucaagguacaggaagc

SEQ ID NO: 239594 - RNA, 19 nt, Artificial Sequence
  Description of Artificial Sequence: Synthetic oligonucleotide
acauguauaagggugagua

SEQ ID NO: 239595 - RNA, 19 nt, Artificial Sequence
  Description of Artificial Sequence: Synthetic oligonucleotide
caugauuaggaucgccucc

SEQ ID NO: 239596 - RNA, 19 nt, Artificial Sequence
  Description of Artificial Sequence: Synthetic oligonucleotide
aucuacgagcacgaggacc

SEQ ID NO: 239597 - RNA, 19 nt, Artificial Sequence
  Description of Artificial Sequence: Synthetic oligonucleotide
auaugcacugcaucgggug

SEQ ID NO: 239598 - RNA, 19 nt, Artificial Sequence
  Description of Artificial Sequence: Synthetic oligonucleotide
uggacugugugauuguagu

SEQ ID NO: 239599 - RNA, 19 nt, Artificial Sequence
  Description of Artificial Sequence: Synthetic oligonucleotide
ugcgaccucgaaaauuucc

SEQ ID NO: 239600 - RNA, 19 nt, Artificial Sequence
  Description of Artificial Sequence: Synthetic oligonucleotide
caugcaucacagcugacac

SEQ ID NO: 239601 - RNA, 19 nt, Artificial Sequence
  Description of Artificial Sequence: Synthetic oligonucleotide
agguuaacuuugcugaaca

SEQ ID NO: 239602 - RNA, 19 nt, Artificial Sequence
  Description of Artificial Sequence: Synthetic oligonucleotide
augguuaacagggcgacag

SEQ ID NO: 239603 - RNA, 19 nt, Artificial Sequence
  Description of Artificial Sequence: Synthetic oligonucleotide
cugcauuuggagcugguag

SEQ ID NO: 239604 - RNA, 19 nt, Artificial Sequence
  Description of Artificial Sequence: Synthetic oligonucleotide
uuucugcguguucagaagu

SEQ ID NO: 239605 - RNA, 19 nt, Artificial Sequence
  Description of Artificial Sequence: Synthetic oligonucleotide
aaucuacccuuguuaauau

SEQ ID NO: 239606 - RNA, 19 nt, Artificial Sequence
  Description of Artificial Sequence: Synthetic oligonucleotide
guuguaugccuuguugucg

SEQ ID NO: 239607 - RNA, 19 nt, Artificial Sequence
  Description of Artificial Sequence: Synthetic oligonucleotide
ucagaaguaacauggucuu

SEQ ID NO: 239608 - RNA, 19 nt, Artificial Sequence
  Description of Artificial Sequence: Synthetic oligonucleotide
cauguuugaucuacgagca

SEQ ID NO: 239609 - RNA, 19 nt, Artificial Sequence
  Description of Artificial Sequence: Synthetic oligonucleotide
uuuacuggugugucuucag

SEQ ID NO: 239610 - RNA, 19 nt, Artificial Sequence
  Description of Artificial Sequence: Synthetic oligonucleotide
gcaacugagaagcggaagg

SEQ ID NO: 239611 - RNA, 19 nt, Artificial Sequence
  Description of Artificial Sequence: Synthetic oligonucleotide
aagaucguaaucguagcaa

SEQ ID NO: 239612 - RNA, 19 nt, Artificial Sequence
  Description of Artificial Sequence: Synthetic oligonucleotide
cauucuacguacaugucga

SEQ ID NO: 239613 - RNA, 19 nt, Artificial Sequence
  Description of Artificial Sequence: Synthetic oligonucleotide
ucguaaucguagcaaauua

SEQ ID NO: 239614 - RNA, 19 nt, Artificial Sequence
  Description of Artificial Sequence: Synthetic oligonucleotide
cacuaacguggacagaagg

SEQ ID NO: 239615 - RNA, 19 nt, Artificial Sequence
  Description of Artificial Sequence: Synthetic oligonucleotide
cucgauucaucuaaaucuc

SEQ ID NO: 239616 - RNA, 19 nt, Artificial Sequence
  Description of Artificial Sequence: Synthetic oligonucleotide
caaccuuguuaaaaggaac

SEQ ID NO: 239617 - RNA, 19 nt, Artificial Sequence
  Description of Artificial Sequence: Synthetic oligonucleotide
aaagcuaacucugcccugu

SEQ ID NO: 239618 - RNA, 19 nt, Artificial Sequence
  Description of Artificial Sequence: Synthetic oligonucleotide
gauguuucugcguguucag

SEQ ID NO: 239619 - RNA, 19 nt, Artificial Sequence
  Description of Artificial Sequence: Synthetic oligonucleotide
uggaguauuaggagagccu

SEQ ID NO: 239620 - RNA, 19 nt, Artificial Sequence
  Description of Artificial Sequence: Synthetic oligonucleotide
aggacgagcucucuucccg

SEQ ID NO: 239621 - RNA, 19 nt, Artificial Sequence
  Description of Artificial Sequence: Synthetic oligonucleotide
ucguagcaaauuaaacacu

SEQ ID NO: 239622 - RNA, 19 nt, Artificial Sequence
  Description of Artificial Sequence: Synthetic oligonucleotide
agaugguuaacagggcgac

SEQ ID NO: 239623 - RNA, 19 nt, Artificial Sequence
  Description of Artificial Sequence: Synthetic oligonucleotide
ucaugucgggacauccuag

SEQ ID NO: 239624 - RNA, 19 nt, Artificial Sequence
  Description of Artificial Sequence: Synthetic oligonucleotide
cauguauaagggugaguag

SEQ ID NO: 239625 - RNA, 19 nt, Artificial Sequence
  Description of Artificial Sequence: Synthetic oligonucleotide
gagauguuuccguguagcc

SEQ ID NO: 239626 - RNA, 19 nt, Artificial Sequence
  Description of Artificial Sequence: Synthetic oligonucleotide
aucugucuaagacaaacua

SEQ ID NO: 239627 - RNA, 19 nt, Artificial Sequence
  Description of Artificial Sequence: Synthetic oligonucleotide
ucugugacaugauuaggau

SEQ ID NO: 239628 - RNA, 19 nt, Artificial Sequence
  Description of Artificial Sequence: Synthetic oligonucleotide
agcugacaccuucaugucg

SEQ ID NO: 239629 - RNA, 19 nt, Artificial Sequence
  Description of Artificial Sequence: Synthetic oligonucleotide
acaugucgaacaccacucg

SEQ ID NO: 239630 - RNA, 19 nt, Artificial Sequence
  Description of Artificial Sequence: Synthetic oligonucleotide
aucuacaccugaaugaaca

SEQ ID NO: 239631 - RNA, 19 nt, Artificial Sequence
  Description of Artificial Sequence: Synthetic oligonucleotide
ugucgggacauccuaguuc

SEQ ID NO: 239632 - RNA, 19 nt, Artificial Sequence
  Description of Artificial Sequence: Synthetic oligonucleotide
aaaagcacccauccuccaa

SEQ ID NO: 239633 - RNA, 19 nt, Artificial Sequence
  Description of Artificial Sequence: Synthetic oligonucleotide
aacguggacagaaggagcu

SEQ ID NO: 239634 - RNA, 19 nt, Artificial Sequence
  Description of Artificial Sequence: Synthetic oligonucleotide
aacauggacuucacaguuc

SEQ ID NO: 239635 - RNA, 19 nt, Artificial Sequence
  Description of Artificial Sequence: Synthetic oligonucleotide
cuggugugucuucagacag

SEQ ID NO: 239636 - RNA, 19 nt, Artificial Sequence
  Description of Artificial Sequence: Synthetic oligonucleotide
uuaggagagccuuuugcau

SEQ ID NO: 239637 - RNA, 19 nt, Artificial Sequence
  Description of Artificial Sequence: Synthetic oligonucleotide
uuguaugccuuguugucgu

SEQ ID NO: 239638 - RNA, 19 nt, Artificial Sequence
  Description of Artificial Sequence: Synthetic oligonucleotide
ugcaucccuggcuaggacc

SEQ ID NO: 239639 - RNA, 19 nt, Artificial Sequence
  Description of Artificial Sequence: Synthetic oligonucleotide
uaagucuaguuagaaauuu

SEQ ID NO: 239640 - RNA, 19 nt, Artificial Sequence
  Description of Artificial Sequence: Synthetic oligonucleotide
cgaaaauuuccuuuuaaac

SEQ ID NO: 239641 - RNA, 19 nt, Artificial Sequence
  Description of Artificial Sequence: Synthetic oligonucleotide
aacaaacaggcugcggucu

SEQ ID NO: 239642 - RNA, 19 nt, Artificial Sequence
  Description of Artificial Sequence: Synthetic oligonucleotide
uaucuacacagcccauagc

SEQ ID NO: 239643 - RNA, 19 nt, Artificial Sequence
  Description of Artificial Sequence: Synthetic oligonucleotide
cacucgauucaucuaaauc

SEQ ID NO: 239644 - RNA, 19 nt, Artificial Sequence
  Description of Artificial Sequence: Synthetic oligonucleotide
agaucguaaucguagcaaa

SEQ ID NO: 239645 - RNA, 19 nt, Artificial Sequence
  Description of Artificial Sequence: Synthetic oligonucleotide
ucgauucaucuaaaucucu

SEQ ID NO: 239646 - RNA, 19 nt, Artificial Sequence
  Description of Artificial Sequence: Synthetic oligonucleotide
ugguuaacagggcgacagg

SEQ ID NO: 239647 - RNA, 19 nt, Artificial Sequence
  Description of Artificial Sequence: Synthetic oligonucleotide
caguucuugagaacacccc

SEQ ID NO: 239648 - RNA, 19 nt, Artificial Sequence
  Description of Artificial Sequence: Synthetic oligonucleotide
aucgccuccagguaaugcu

SEQ ID NO: 239649 - RNA, 19 nt, Artificial Sequence
  Description of Artificial Sequence: Synthetic oligonucleotide
agcgucucacuccugauaa

SEQ ID NO: 239650 - RNA, 19 nt, Artificial Sequence
  Description of Artificial Sequence: Synthetic oligonucleotide
caauguaacaagagugaca

SEQ ID NO: 239651 - RNA, 19 nt, Artificial Sequence
  Description of Artificial Sequence: Synthetic oligonucleotide
gucgggacauccuaguuca

SEQ ID NO: 239652 - RNA, 19 nt, Artificial Sequence
  Description of Artificial Sequence: Synthetic oligonucleotide
ucaggcagacacuauucaa

SEQ ID NO: 239653 - RNA, 19 nt, Artificial Sequence
  Description of Artificial Sequence: Synthetic oligonucleotide
uucaugucgggacauccua

SEQ ID NO: 239654 - RNA, 19 nt, Artificial Sequence
  Description of Artificial Sequence: Synthetic oligonucleotide
uaucagaagcugugcaccu

SEQ ID NO: 239655 - RNA, 19 nt, Artificial Sequence
  Description of Artificial Sequence: Synthetic oligonucleotide
cugguagugccucaaguuc

SEQ ID NO: 239656 - RNA, 19 nt, Artificial Sequence
  Description of Artificial Sequence: Synthetic oligonucleotide
gaaauuuaucagaagcugu

SEQ ID NO: 239657 - RNA, 19 nt, Artificial Sequence
  Description of Artificial Sequence: Synthetic oligonucleotide
ugucccuuccuggagcuag

SEQ ID NO: 239658 - RNA, 19 nt, Artificial Sequence
  Description of Artificial Sequence: Synthetic oligonucleotide
cacgaggaccuccuaaccc

SEQ ID NO: 239659 - RNA, 19 nt, Artificial Sequence
  Description of Artificial Sequence: Synthetic oligonucleotide
aggcacauguauaagggug

SEQ ID NO: 239660 - RNA, 19 nt, Artificial Sequence
  Description of Artificial Sequence: Synthetic oligonucleotide
uacccuuguuaauaugcac

SEQ ID NO: 239661 - RNA, 19 nt, Artificial Sequence
  Description of Artificial Sequence: Synthetic oligonucleotide
ugcuugucaugaagaaaca

SEQ ID NO: 239662 - RNA, 19 nt, Artificial Sequence
  Description of Artificial Sequence: Synthetic oligonucleotide
uaggaucgccuccagguaa

SEQ ID NO: 239663 - RNA, 19 nt, Artificial Sequence
  Description of Artificial Sequence: Synthetic oligonucleotide
agucaggcagacacuauuc

SEQ ID NO: 239664 - RNA, 19 nt, Artificial Sequence
  Description of Artificial Sequence: Synthetic oligonucleotide
acuaacguggacagaagga

SEQ ID NO: 239665 - RNA, 19 nt, Artificial Sequence
  Description of Artificial Sequence: Synthetic oligonucleotide
cuacguacaugucgaacac

SEQ ID NO: 239666 - RNA, 19 nt, Artificial Sequence
  Description of Artificial Sequence: Synthetic oligonucleotide
aauaugcacugcaucgggu

SEQ ID NO: 239667 - RNA, 19 nt, Artificial Sequence
  Description of Artificial Sequence: Synthetic oligonucleotide
cgcuuucauaacaagaugc

SEQ ID NO: 239668 - RNA, 19 nt, Artificial Sequence
  Description of Artificial Sequence: Synthetic oligonucleotide
ggcuuuguauuuuauuaac

SEQ ID NO: 239669 - RNA, 19 nt, Artificial Sequence
  Description of Artificial Sequence: Synthetic oligonucleotide
guaaucguagcaaauuaaa

SEQ ID NO: 239670 - RNA, 19 nt, Artificial Sequence
  Description of Artificial Sequence: Synthetic oligonucleotide
cugugacaugauuaggauc

SEQ ID NO: 239671 - RNA, 19 nt, Artificial Sequence
  Description of Artificial Sequence: Synthetic oligonucleotide
cucagcuauaggauccaug

SEQ ID NO: 239672 - RNA, 19 nt, Artificial Sequence
  Description of Artificial Sequence: Synthetic oligonucleotide
guggaguauuaggagagcc

SEQ ID NO: 239673 - RNA, 19 nt, Artificial Sequence
  Description of Artificial Sequence: Synthetic oligonucleotide
acauaucggacaaaucacu

SEQ ID NO: 239674 - RNA, 19 nt, Artificial Sequence
  Description of Artificial Sequence: Synthetic oligonucleotide
ucuacaccugaaugaacau

SEQ ID NO: 239675 - RNA, 19 nt, Artificial Sequence
  Description of Artificial Sequence: Synthetic oligonucleotide
ugcuaccuacauuuaccug

SEQ ID NO: 239676 - RNA, 19 nt, Artificial Sequence
  Description of Artificial Sequence: Synthetic oligonucleotide
ugauuaggaucgccuccag

SEQ ID NO: 239677 - RNA, 19 nt, Artificial Sequence
  Description of Artificial Sequence: Synthetic oligonucleotide
uucuacguacaugucgaac

SEQ ID NO: 239678 - RNA, 19 nt, Artificial Sequence
  Description of Artificial Sequence: Synthetic oligonucleotide
accucgaaaauuuccuuuu

SEQ ID NO: 239679 - RNA, 19 nt, Artificial Sequence
  Description of Artificial Sequence: Synthetic oligonucleotide
aaaccuacaugcaguaguu

SEQ ID NO: 239680 - RNA, 19 nt, Artificial Sequence
  Description of Artificial Sequence: Synthetic oligonucleotide
agaugcacaaagaucguaa

SEQ ID NO: 239681 - RNA, 19 nt, Artificial Sequence
  Description of Artificial Sequence: Synthetic oligonucleotide
gcagaucccgccuuuacug

SEQ ID NO: 239682 - RNA, 19 nt, Artificial Sequence
  Description of Artificial Sequence: Synthetic oligonucleotide
ucagguuaacuuugcugaa

SEQ ID NO: 239683 - RNA, 19 nt, Artificial Sequence
  Description of Artificial Sequence: Synthetic oligonucleotide
gcugacaccuucaugucgg

SEQ ID NO: 239684 - RNA, 19 nt, Artificial Sequence
  Description of Artificial Sequence: Synthetic oligonucleotide
ucccugauagugaucuguc

SEQ ID NO: 239685 - RNA, 19 nt, Artificial Sequence
  Description of Artificial Sequence: Synthetic oligonucleotide
augauuaggaucgccucca

SEQ ID NO: 239686 - RNA, 19 nt, Artificial Sequence
  Description of Artificial Sequence: Synthetic oligonucleotide
aacaagagugacagaccug

SEQ ID NO: 239687 - RNA, 19 nt, Artificial Sequence
  Description of Artificial Sequence: Synthetic oligonucleotide
uuugggcuuuguauuuuau

SEQ ID NO: 239688 - RNA, 19 nt, Artificial Sequence
  Description of Artificial Sequence: Synthetic oligonucleotide
uuaggaucgccuccaggua

SEQ ID NO: 239689 - RNA, 19 nt, Artificial Sequence
  Description of Artificial Sequence: Synthetic oligonucleotide
ucaaguucccgaggagaag

SEQ ID NO: 239690 - RNA, 19 nt, Artificial Sequence
  Description of Artificial Sequence: Synthetic oligonucleotide
gauuagguuaagucuaguu

SEQ ID NO: 239691 - RNA, 19 nt, Artificial Sequence
  Description of Artificial Sequence: Synthetic oligonucleotide
agcagaucccgccuuuacu

SEQ ID NO: 239692 - RNA, 19 nt, Artificial Sequence
  Description of Artificial Sequence: Synthetic oligonucleotide
cuuguguuagugcgccggc

SEQ ID NO: 239693 - RNA, 19 nt, Artificial Sequence
  Description of Artificial Sequence: Synthetic oligonucleotide
accaguagaacugcuagua

SEQ ID NO: 239694 - RNA, 19 nt, Artificial Sequence
  Description of Artificial Sequence: Synthetic oligonucleotide
ucccgcacuaacguggaca

SEQ ID NO: 239695 - RNA, 19 nt, Artificial Sequence
  Description of Artificial Sequence: Synthetic oligonucleotide
cugucugcgaguggggagg

SEQ ID NO: 239696 - RNA, 19 nt, Artificial Sequence
  Description of Artificial Sequence: Synthetic oligonucleotide
uugccccgcuuucauaaca

SEQ ID NO: 239697 - RNA, 19 nt, Artificial Sequence
  Description of Artificial Sequence: Synthetic oligonucleotide
aucguaaucguagcaaauu

SEQ ID NO: 239698 - RNA, 19 nt, Artificial Sequence
  Description of Artificial Sequence: Synthetic oligonucleotide
aagaugcacaaagaucgua

SEQ ID NO: 239699 - RNA, 19 nt, Artificial Sequence
  Description of Artificial Sequence: Synthetic oligonucleotide
ugcgcgcucgcuuuccaug

SEQ ID NO: 239700 - RNA, 19 nt, Artificial Sequence
  Description of Artificial Sequence: Synthetic oligonucleotide
uccucaucugaggacgagc

SEQ ID NO: 239701 - RNA, 19 nt, Artificial Sequence
  Description of Artificial Sequence: Synthetic oligonucleotide
aucuacccuuguuaauaug

SEQ ID NO: 239702 - RNA, 19 nt, Artificial Sequence
  Description of Artificial Sequence: Synthetic oligonucleotide
uagugccucaaguucccga

SEQ ID NO: 239703 - RNA, 19 nt, Artificial Sequence
  Description of Artificial Sequence: Synthetic oligonucleotide
acaccuucaugucgggaca

SEQ ID NO: 239704 - RNA, 19 nt, Artificial Sequence
  Description of Artificial Sequence: Synthetic oligonucleotide
aaagacuguggcugcucua

SEQ ID NO: 239705 - RNA, 19 nt, Artificial Sequence
  Description of Artificial Sequence: Synthetic oligonucleotide
cugcguguucagaaguaac

SEQ ID NO: 239706 - RNA, 19 nt, Artificial Sequence
  Description of Artificial Sequence: Synthetic oligonucleotide
ggcauaauaucuacacagc

SEQ ID NO: 239707 - RNA, 19 nt, Artificial Sequence
  Description of Artificial Sequence: Synthetic oligonucleotide
uguuagugcgccggcuugc

SEQ ID NO: 239708 - RNA, 19 nt, Artificial Sequence
  Description of Artificial Sequence: Synthetic oligonucleotide
cauccuaguucagacgcug

SEQ ID NO: 239709 - RNA, 19 nt, Artificial Sequence
  Description of Artificial Sequence: Synthetic oligonucleotide
uaaaagacuguggcugcuc

SEQ ID NO: 239710 - RNA, 19 nt, Artificial Sequence
  Description of Artificial Sequence: Synthetic oligonucleotide
uugcguugcgagcugucuc

SEQ ID NO: 239711 - RNA, 19 nt, Artificial Sequence
  Description of Artificial Sequence: Synthetic oligonucleotide
cucgcuuuccauggacugg

SEQ ID NO: 239712 - RNA, 19 nt, Artificial Sequence
  Description of Artificial Sequence: Synthetic oligonucleotide
guuugaucuacgagcacga

SEQ ID NO: 239713 - RNA, 19 nt, Artificial Sequence
  Description of Artificial Sequence: Synthetic oligonucleotide
uguggccguggacugugug

SEQ ID NO: 239714 - RNA, 19 nt, Artificial Sequence
  Description of Artificial Sequence: Synthetic oligonucleotide
gaacauggacuucacaguu

SEQ ID NO: 239715 - RNA, 19 nt, Artificial Sequence
  Description of Artificial Sequence: Synthetic oligonucleotide
acccugcacugcuaccuac

SEQ ID NO: 239716 - RNA, 19 nt, Artificial Sequence
  Description of Artificial Sequence: Synthetic oligonucleotide
ugcgagcugucuccaguug

SEQ ID NO: 239717 - RNA, 19 nt, Artificial Sequence
  Description of Artificial Sequence: Synthetic oligonucleotide
guaaccacugaauaauguu

SEQ ID NO: 239718 - RNA, 19 nt, Artificial Sequence
  Description of Artificial Sequence: Synthetic oligonucleotide
ucugcguguucagaaguaa

SEQ ID NO: 239719 - RNA, 19 nt, Artificial Sequence
  Description of Artificial Sequence: Synthetic oligonucleotide
uuugugcguaggaggcaca

SEQ ID NO: 239720 - RNA, 19 nt, Artificial Sequence
  Description of Artificial Sequence: Synthetic oligonucleotide
acgagcucucuucccgcac

SEQ ID NO: 239721 - RNA, 19 nt, Artificial Sequence
  Description of Artificial Sequence: Synthetic oligonucleotide
caaguaaaagacuguggcu

SEQ ID NO: 239722 - RNA, 19 nt, Artificial Sequence
  Description of Artificial Sequence: Synthetic oligonucleotide
auuuaccugcuagaaguaa

SEQ ID NO: 239723 - RNA, 19 nt, Artificial Sequence
  Description of Artificial Sequence: Synthetic oligonucleotide
gugacagaccugaaauuac

SEQ ID NO: 239724 - RNA, 19 nt, Artificial Sequence
  Description of Artificial Sequence: Synthetic oligonucleotide
guuaaguggaaaugauuau

SEQ ID NO: 239725 - RNA, 19 nt, Artificial Sequence
  Description of Artificial Sequence: Synthetic oligonucleotide
agagugcaucccuggcuag

SEQ ID NO: 239726 - RNA, 19 nt, Artificial Sequence
  Description of Artificial Sequence: Synthetic oligonucleotide
guuaagcuguccuccugca

SEQ ID NO: 239727 - RNA, 19 nt, Artificial Sequence
  Description of Artificial Sequence: Synthetic oligonucleotide
ugcuuguguuagugcgccg

SEQ ID NO: 239728 - RNA, 19 nt, Artificial Sequence
  Description of Artificial Sequence: Synthetic oligonucleotide
ggcagacacuauucaaaag

SEQ ID NO: 239729 - RNA, 19 nt, Artificial Sequence
  Description of Artificial Sequence: Synthetic oligonucleotide
ugauuagguuaagucuagu

SEQ ID NO: 239730 - RNA, 19 nt, Artificial Sequence
  Description of Artificial Sequence: Synthetic oligonucleotide
gcuuguguuagugcgccgg

SEQ ID NO: 239731 - RNA, 19 nt, Artificial Sequence
  Description of Artificial Sequence: Synthetic oligonucleotide
agaucccgccuuuacuggu

SEQ ID NO: 239732 - RNA, 19 nt, Artificial Sequence
  Description of Artificial Sequence: Synthetic oligonucleotide
ggacuucacaguucuugag

SEQ ID NO: 239733 - RNA, 19 nt, Artificial Sequence
  Description of Artificial Sequence: Synthetic oligonucleotide
ugccccgcuuucauaacaa

SEQ ID NO: 239734 - RNA, 19 nt, Artificial Sequence
  Description of Artificial Sequence: Synthetic oligonucleotide
aguggugacgcugcuugug

SEQ ID NO: 239735 - RNA, 19 nt, Artificial Sequence
  Description of Artificial Sequence: Synthetic oligonucleotide
gaucgccuccagguaaugc

SEQ ID NO: 239736 - RNA, 19 nt, Artificial Sequence
  Description of Artificial Sequence: Synthetic oligonucleotide
ugauuguaguggugacgcu

SEQ ID NO: 239737 - RNA, 19 nt, Artificial Sequence
  Description of Artificial Sequence: Synthetic oligonucleotide
gugcguaggaggcacaugu

SEQ ID NO: 239738 - RNA, 19 nt, Artificial Sequence
  Description of Artificial Sequence: Synthetic oligonucleotide
cagguuaacuuugcugaac

SEQ ID NO: 239739 - RNA, 19 nt, Artificial Sequence
  Description of Artificial Sequence: Synthetic oligonucleotide
uugucguugccccgcuuuc

SEQ ID NO: 239740 - RNA, 19 nt, Artificial Sequence
  Description of Artificial Sequence: Synthetic oligonucleotide
gaugcacaaagaucguaau

SEQ ID NO: 239741 - RNA, 19 nt, Artificial Sequence
  Description of Artificial Sequence: Synthetic oligonucleotide
gugcauguuugaucuacga

SEQ ID NO: 239742 - RNA, 19 nt, Artificial Sequence
  Description of Artificial Sequence: Synthetic oligonucleotide
ccagggugaaacauucuac

SEQ ID NO: 239743 - RNA, 19 nt, Artificial Sequence
  Description of Artificial Sequence: Synthetic oligonucleotide
gggguucaagucuguaugc

SEQ ID NO: 239744 - RNA, 19 nt, Artificial Sequence
  Description of Artificial Sequence: Synthetic oligonucleotide
guuagugcgccggcuugcg

SEQ ID NO: 239745 - RNA, 19 nt, Artificial Sequence
  Description of Artificial Sequence: Synthetic oligonucleotide
ccugauaacugagauaaca

SEQ ID NO: 239746 - RNA, 19 nt, Artificial Sequence
  Description of Artificial Sequence: Synthetic oligonucleotide
gcuugucaugaagaaacag

SEQ ID NO: 239747 - RNA, 19 nt, Artificial Sequence
  Description of Artificial Sequence: Synthetic oligonucleotide
caugucgaacaccacucga

SEQ ID NO: 239748 - RNA, 19 nt, Artificial Sequence
  Description of Artificial Sequence: Synthetic oligonucleotide
agagcugacuuugugcgua

SEQ ID NO: 239749 - RNA, 19 nt, Artificial Sequence
  Description of Artificial Sequence: Synthetic oligonucleotide
uccugauaacugagauaac

SEQ ID NO: 239750 - RNA, 19 nt, Artificial Sequence
  Description of Artificial Sequence: Synthetic oligonucleotide
aagcaacaucuaaaggcau

SEQ ID NO: 239751 - RNA, 19 nt, Artificial Sequence
  Description of Artificial Sequence: Synthetic oligonucleotide
ccagacaugauuagguuaa

SEQ ID NO: 239752 - RNA, 19 nt, Artificial Sequence
  Description of Artificial Sequence: Synthetic oligonucleotide
uuuagacauguaggaugac

SEQ ID NO: 239753 - RNA, 19 nt, Artificial Sequence
  Description of Artificial Sequence: Synthetic oligonucleotide
cacaaagaucguaaucgua

SEQ ID NO: 239754 - RNA, 19 nt, Artificial Sequence
  Description of Artificial Sequence: Synthetic oligonucleotide
uuguaucugcgaccucgaa

SEQ ID NO: 239755 - RNA, 19 nt, Artificial Sequence
  Description of Artificial Sequence: Synthetic oligonucleotide
gcuuucauaacaagaugca

SEQ ID NO: 239756 - RNA, 19 nt, Artificial Sequence
  Description of Artificial Sequence: Synthetic oligonucleotide
cuucaugcacgcugcaaaa

SEQ ID NO: 239757 - RNA, 19 nt, Artificial Sequence
  Description of Artificial Sequence: Synthetic oligonucleotide
gaucuacgagcacgaggac

SEQ ID NO: 239758 - RNA, 19 nt, Artificial Sequence
  Description of Artificial Sequence: Synthetic oligonucleotide
auccuaguucagacgcugg

SEQ ID NO: 239759 - RNA, 19 nt, Artificial Sequence
  Description of Artificial Sequence: Synthetic oligonucleotide
gaucccgccuuuacuggug

SEQ ID NO: 239760 - RNA, 19 nt, Artificial Sequence
  Description of Artificial Sequence: Synthetic oligonucleotide
gggugaaacauucuacgua

SEQ ID NO: 239761 - RNA, 19 nt, Artificial Sequence
  Description of Artificial Sequence: Synthetic oligonucleotide
cacuauucaaaagcuaacu

SEQ ID NO: 239762 - RNA, 19 nt, Artificial Sequence
  Description of Artificial Sequence: Synthetic oligonucleotide
guugccgugcagccugcgc

SEQ ID NO: 239763 - RNA, 19 nt, Artificial Sequence
  Description of Artificial Sequence: Synthetic oligonucleotide
auucuacguacaugucgaa

SEQ ID NO: 239764 - RNA, 19 nt, Artificial Sequence
  Description of Artificial Sequence: Synthetic oligonucleotide
ugugcguaggaggcacaug

SEQ ID NO: 239765 - RNA, 19 nt, Artificial Sequence
  Description of Artificial Sequence: Synthetic oligonucleotide
gagaguccaccaguagaac

SEQ ID NO: 239766 - RNA, 19 nt, Artificial Sequence
  Description of Artificial Sequence: Synthetic oligonucleotide
uuguugucguugccccgcu

SEQ ID NO: 239767 - RNA, 19 nt, Artificial Sequence
  Description of Artificial Sequence: Synthetic oligonucleotide
uuguguuagugcgccggcu

SEQ ID NO: 239768 - RNA, 19 nt, Artificial Sequence
  Description of Artificial Sequence: Synthetic oligonucleotide
gguuaacagggcgacagga

SEQ ID NO: 239769 - RNA, 19 nt, Artificial Sequence
  Description of Artificial Sequence: Synthetic oligonucleotide
uugcgagcugucuccaguu

SEQ ID NO: 239770 - RNA, 19 nt, Artificial Sequence
  Description of Artificial Sequence: Synthetic oligonucleotide
ugcuaguaaagugcauguu

SEQ ID NO: 239771 - RNA, 19 nt, Artificial Sequence
  Description of Artificial Sequence: Synthetic oligonucleotide
uaucugcgaccucgaaaau

SEQ ID NO: 239772 - RNA, 19 nt, Artificial Sequence
  Description of Artificial Sequence: Synthetic oligonucleotide
ugucguugccccgcuuuca

SEQ ID NO: 239773 - RNA, 19 nt, Artificial Sequence
  Description of Artificial Sequence: Synthetic oligonucleotide
gagcacgaggaccuccuaa

SEQ ID NO: 239774 - RNA, 19 nt, Artificial Sequence
  Description of Artificial Sequence: Synthetic oligonucleotide
uuagugcgccggcuugcgu

SEQ ID NO: 239775 - RNA, 19 nt, Artificial Sequence
  Description of Artificial Sequence: Synthetic oligonucleotide
ucugcgcgcucgcuuucca

SEQ ID NO: 239776 - RNA, 19 nt, Artificial Sequence
  Description of Artificial Sequence: Synthetic oligonucleotide
ugcguaggaggcacaugua

SEQ ID NO: 239777 - RNA, 19 nt, Artificial Sequence
  Description of Artificial Sequence: Synthetic oligonucleotide
cggguggucaguuguaugc

SEQ ID NO: 239778 - RNA, 19 nt, Artificial Sequence
  Description of Artificial Sequence: Synthetic oligonucleotide
cauuuaccugcuagaagua

SEQ ID NO: 239779 - RNA, 19 nt, Artificial Sequence
  Description of Artificial Sequence: Synthetic oligonucleotide
gcucgcuuuccauggacug

SEQ ID NO: 239780 - RNA, 19 nt, Artificial Sequence
  Description of Artificial Sequence: Synthetic oligonucleotide
gaugguuaacagggcgaca

SEQ ID NO: 239781 - RNA, 19 nt, Artificial Sequence
  Description of Artificial Sequence: Synthetic oligonucleotide
agacacuauucaaaagcua

SEQ ID NO: 239782 - RNA, 19 nt, Artificial Sequence
  Description of Artificial Sequence: Synthetic oligonucleotide
aucugcgaccucgaaaauu

SEQ ID NO: 239783 - RNA, 19 nt, Artificial Sequence
  Description of Artificial Sequence: Synthetic oligonucleotide
aaccuacaugcaguaguua

SEQ ID NO: 239784 - RNA, 19 nt, Artificial Sequence
  Description of Artificial Sequence: Synthetic oligonucleotide
cuaccuacauuuaccugcu

SEQ ID NO: 239785 - RNA, 19 nt, Artificial Sequence
  Description of Artificial Sequence: Synthetic oligonucleotide
acguggacagaaggagcuc

SEQ ID NO: 239786 - RNA, 19 nt, Artificial Sequence
  Description of Artificial Sequence: Synthetic oligonucleotide
acauguaggaugacuuguu

SEQ ID NO: 239787 - RNA, 19 nt, Artificial Sequence
  Description of Artificial Sequence: Synthetic oligonucleotide
cauaucggacaaaucacuu

SEQ ID NO: 239788 - RNA, 19 nt, Artificial Sequence
  Description of Artificial Sequence: Synthetic oligonucleotide
cugcuaccuacauuuaccu

SEQ ID NO: 239789 - RNA, 19 nt, Artificial Sequence
  Description of Artificial Sequence: Synthetic oligonucleotide
uuguugccgugcagccugc

SEQ ID NO: 239790 - RNA, 19 nt, Artificial Sequence
  Description of Artificial Sequence: Synthetic oligonucleotide
aggguagcuguuguccacu

SEQ ID NO: 239791 - RNA, 19 nt, Artificial Sequence
  Description of Artificial Sequence: Synthetic oligonucleotide
acauuugcgugaacaugga

SEQ ID NO: 239792 - RNA, 19 nt, Artificial Sequence
  Description of Artificial Sequence: Synthetic oligonucleotide
ggcacauguauaaggguga

SEQ ID NO: 239793 - RNA, 19 nt, Artificial Sequence
  Description of Artificial Sequence: Synthetic oligonucleotide
cagcagaucccgccuuuac

SEQ ID NO: 239794 - RNA, 19 nt, Artificial Sequence
  Description of Artificial Sequence: Synthetic oligonucleotide
uguaguggugacgcugcuu

SEQ ID NO: 239795 - RNA, 19 nt, Artificial Sequence
  Description of Artificial Sequence: Synthetic oligonucleotide
gcucuacagagaaagcuuc

SEQ ID NO: 239796 - RNA, 19 nt, Artificial Sequence
  Description of Artificial Sequence: Synthetic oligonucleotide
augucgggacauccuaguu

SEQ ID NO: 239797 - RNA, 19 nt, Artificial Sequence
  Description of Artificial Sequence: Synthetic oligonucleotide
uugugcguaggaggcacau

SEQ ID NO: 239798 - RNA, 19 nt, Artificial Sequence
  Description of Artificial Sequence: Synthetic oligonucleotide
guugcgagcugucuccagu

SEQ ID NO: 239799 - RNA, 19 nt, Artificial Sequence
  Description of Artificial Sequence: Synthetic oligonucleotide
cagacccacugucccuucc

SEQ ID NO: 239800 - RNA, 19 nt, Artificial Sequence
  Description of Artificial Sequence: Synthetic oligonucleotide
uguugccgugcagccugcg

SEQ ID NO: 239801 - RNA, 19 nt, Artificial Sequence
  Description of Artificial Sequence: Synthetic oligonucleotide
gccguggacugugugauug

SEQ ID NO: 239802 - RNA, 19 nt, Artificial Sequence
  Description of Artificial Sequence: Synthetic oligonucleotide
guugccccgcuuucauaac

SEQ ID NO: 239803 - RNA, 19 nt, Artificial Sequence
  Description of Artificial Sequence: Synthetic oligonucleotide
gaucguaaucguagcaaau

SEQ ID NO: 239804 - RNA, 19 nt, Artificial Sequence
  Description of Artificial Sequence: Synthetic oligonucleotide
ccugaaugaacauguuuaa

SEQ ID NO: 239805 - RNA, 19 nt, Artificial Sequence
  Description of Artificial Sequence: Synthetic oligonucleotide
gcgcgcucgcuuuccaugg

SEQ ID NO: 239806 - RNA, 19 nt, Artificial Sequence
  Description of Artificial Sequence: Synthetic oligonucleotide
ggacgagcucucuucccgc

SEQ ID NO: 239807 - RNA, 19 nt, Artificial Sequence
  Description of Artificial Sequence: Synthetic oligonucleotide
acauccuaguucagacgcu

SEQ ID NO: 239808 - RNA, 19 nt, Artificial Sequence
  Description of Artificial Sequence: Synthetic oligonucleotide
gcacgaggaccuccuaacc

SEQ ID NO: 239809 - RNA, 19 nt, Artificial Sequence
  Description of Artificial Sequence: Synthetic oligonucleotide
acccggcucccugauagug

SEQ ID NO: 239810 - RNA, 19 nt, Artificial Sequence
  Description of Artificial Sequence: Synthetic oligonucleotide
gcacauguauaagggugag

SEQ ID NO: 239811 - RNA, 19 nt, Artificial Sequence
  Description of Artificial Sequence: Synthetic oligonucleotide
gcuucccuacugcuuggag

SEQ ID NO: 239812 - RNA, 19 nt, Artificial Sequence
  Description of Artificial Sequence: Synthetic oligonucleotide
ccgcuuucauaacaagaug

SEQ ID NO: 239813 - RNA, 19 nt, Artificial Sequence
  Description of Artificial Sequence: Synthetic oligonucleotide
uguaugccuuguugucguu

SEQ ID NO: 239814 - RNA, 19 nt, Artificial Sequence
  Description of Artificial Sequence: Synthetic oligonucleotide
caugucgggacauccuagu

SEQ ID NO: 239815 - RNA, 19 nt, Artificial Sequence
  Description of Artificial Sequence: Synthetic oligonucleotide
cuucaugucgggacauccu

SEQ ID NO: 239816 - RNA, 19 nt, Artificial Sequence
  Description of Artificial Sequence: Synthetic oligonucleotide
ggguggucaguuguaugcc

SEQ ID NO: 239817 - RNA, 19 nt, Artificial Sequence
  Description of Artificial Sequence: Synthetic oligonucleotide
cugcgaccucgaaaauuuc

SEQ ID NO: 239818 - RNA, 19 nt, Artificial Sequence
  Description of Artificial Sequence: Synthetic oligonucleotide
cguaaucguagcaaauuaa

SEQ ID NO: 239819 - RNA, 19 nt, Artificial Sequence
  Description of Artificial Sequence: Synthetic oligonucleotide
uucccgcacuaacguggac

SEQ ID NO: 239820 - RNA, 19 nt, Artificial Sequence
  Description of Artificial Sequence: Synthetic oligonucleotide
ucguugccccgcuuucaua

SEQ ID NO: 239821 - RNA, 19 nt, Artificial Sequence
  Description of Artificial Sequence: Synthetic oligonucleotide
uguugucguugccccgcuu

SEQ ID NO: 239822 - RNA, 19 nt, Artificial Sequence
  Description of Artificial Sequence: Synthetic oligonucleotide
gcacaaagaucguaaucgu

SEQ ID NO: 239823 - RNA, 19 nt, Artificial Sequence
  Description of Artificial Sequence: Synthetic oligonucleotide
ggugacgcugcuuguguua

SEQ ID NO: 239824 - RNA, 19 nt, Artificial Sequence
  Description of Artificial Sequence: Synthetic oligonucleotide
uugcgugaacauggacuuc

SEQ ID NO: 239825 - RNA, 19 nt, Artificial Sequence
  Description of Artificial Sequence: Synthetic oligonucleotide
cucccugauagugaucugu

SEQ ID NO: 239826 - RNA, 19 nt, Artificial Sequence
  Description of Artificial Sequence: Synthetic oligonucleotide
ggaguauuaggagagccuu

SEQ ID NO: 239827 - RNA, 19 nt, Artificial Sequence
  Description of Artificial Sequence: Synthetic oligonucleotide
guugauguuucugcguguu

SEQ ID NO: 239828 - RNA, 19 nt, Artificial Sequence
  Description of Artificial Sequence: Synthetic oligonucleotide
ccuuuugcaugucaaggua

SEQ ID NO: 239829 - RNA, 19 nt, Artificial Sequence
  Description of Artificial Sequence: Synthetic oligonucleotide
accacucgauucaucuaaa

SEQ ID NO: 239830 - RNA, 19 nt, Artificial Sequence
  Description of Artificial Sequence: Synthetic oligonucleotide
caagagugacagaccugaa

SEQ ID NO: 239831 - RNA, 19 nt, Artificial Sequence
  Description of Artificial Sequence: Synthetic oligonucleotide
gcacuaacguggacagaag

SEQ ID NO: 239832 - RNA, 19 nt, Artificial Sequence
  Description of Artificial Sequence: Synthetic oligonucleotide
cagcccauagcaccaaaau

SEQ ID NO: 239833 - RNA, 19 nt, Artificial Sequence
  Description of Artificial Sequence: Synthetic oligonucleotide
aggaucgccuccagguaau

SEQ ID NO: 239834 - RNA, 19 nt, Artificial Sequence
  Description of Artificial Sequence: Synthetic oligonucleotide
gcccuguaaccacugaaua

SEQ ID NO: 239835 - RNA, 19 nt, Artificial Sequence
  Description of Artificial Sequence: Synthetic oligonucleotide
gugaguagucaggcagaca

SEQ ID NO: 239836 - RNA, 19 nt, Artificial Sequence
  Description of Artificial Sequence: Synthetic oligonucleotide
gccccgcuuucauaacaag

SEQ ID NO: 239837 - RNA, 19 nt, Artificial Sequence
  Description of Artificial Sequence: Synthetic oligonucleotide
gguggucaguuguaugccu

SEQ ID NO: 239838 - RNA, 19 nt, Artificial Sequence
  Description of Artificial Sequence: Synthetic oligonucleotide
cgugggagcaagaugguua

SEQ ID NO: 239839 - RNA, 19 nt, Artificial Sequence
  Description of Artificial Sequence: Synthetic oligonucleotide
gcaucggguggucaguugu

SEQ ID NO: 239840 - RNA, 19 nt, Artificial Sequence
  Description of Artificial Sequence: Synthetic oligonucleotide
gucugcgcgcucgcuuucc

SEQ ID NO: 239841 - RNA, 19 nt, Artificial Sequence
  Description of Artificial Sequence: Synthetic oligonucleotide
caucggguggucaguugua

SEQ ID NO: 239842 - RNA, 19 nt, Artificial Sequence
  Description of Artificial Sequence: Synthetic oligonucleotide
gccggcuugcguugcgagc

SEQ ID NO: 239843 - RNA, 19 nt, Artificial Sequence
  Description of Artificial Sequence: Synthetic oligonucleotide
gaguauuaggagagccuuu

SEQ ID NO: 239844 - RNA, 19 nt, Artificial Sequence
  Description of Artificial Sequence: Synthetic oligonucleotide
gggacaaguaaaagacugu

SEQ ID NO: 239845 - RNA, 19 nt, Artificial Sequence
  Description of Artificial Sequence: Synthetic oligonucleotide
gucaguuguaugccuuguu

SEQ ID NO: 239846 - RNA, 19 nt, Artificial Sequence
  Description of Artificial Sequence: Synthetic oligonucleotide
cgcacuaacguggacagaa

SEQ ID NO: 239847 - RNA, 19 nt, Artificial Sequence
  Description of Artificial Sequence: Synthetic oligonucleotide
gcgaccucgaaaauuuccu

SEQ ID NO: 239848 - RNA, 19 nt, Artificial Sequence
  Description of Artificial Sequence: Synthetic oligonucleotide
caccgcgggcucccggcgc

SEQ ID NO: 239849 - RNA, 19 nt, Artificial Sequence
  Description of Artificial Sequence: Synthetic oligonucleotide
agauaacagcucagcuaua

SEQ ID NO: 239850 - RNA, 19 nt, Artificial Sequence
  Description of Artificial Sequence: Synthetic oligonucleotide
ccaguagaacugcuaguaa

SEQ ID NO: 239851 - RNA, 19 nt, Artificial Sequence
  Description of Artificial Sequence: Synthetic oligonucleotide
gcguaggaggcacauguau

SEQ ID NO: 239852 - RNA, 19 nt, Artificial Sequence
  Description of Artificial Sequence: Synthetic oligonucleotide
cguugccccgcuuucauaa

SEQ ID NO: 239853 - RNA, 19 nt, Artificial Sequence
  Description of Artificial Sequence: Synthetic oligonucleotide
gucguugccccgcuuucau

SEQ ID NO: 239854 - RNA, 19 nt, Artificial Sequence
  Description of Artificial Sequence: Synthetic oligonucleotide
guuuuacuucaugcacgcu

SEQ ID NO: 239855 - RNA, 19 nt, Artificial Sequence
  Description of Artificial Sequence: Synthetic oligonucleotide
ggacuggcgcucugcuuca

SEQ ID NO: 239856 - RNA, 19 nt, Artificial Sequence
  Description of Artificial Sequence: Synthetic oligonucleotide
gcgagcugucuccaguugu

SEQ ID NO: 239857 - RNA, 19 nt, Artificial Sequence
  Description of Artificial Sequence: Synthetic oligonucleotide
gcgucucacuccugauaac

SEQ ID NO: 239858 - RNA, 19 nt, Artificial Sequence
  Description of Artificial Sequence: Synthetic oligonucleotide
uguuuccguguagcccauu

SEQ ID NO: 239859 - RNA, 19 nt, Artificial Sequence
  Description of Artificial Sequence: Synthetic oligonucleotide
gugaucugucuaagacaaa

SEQ ID NO: 239860 - RNA, 19 nt, Artificial Sequence
  Description of Artificial Sequence: Synthetic oligonucleotide
cuacgagcacgaggaccuc

SEQ ID NO: 239861 - RNA, 19 nt, Artificial Sequence
  Description of Artificial Sequence: Synthetic oligonucleotide
gcguguucagaaguaacau

SEQ ID NO: 239862 - RNA, 19 nt, Artificial Sequence
  Description of Artificial Sequence: Synthetic oligonucleotide
guaaaccauccaagcaguu

SEQ ID NO: 239863 - RNA, 19 nt, Artificial Sequence
  Description of Artificial Sequence: Synthetic oligonucleotide
ccgaggagaagcaaugguu

SEQ ID NO: 239864 - RNA, 19 nt, Artificial Sequence
  Description of Artificial Sequence: Synthetic oligonucleotide
guggucaguuguaugccuu

SEQ ID NO: 239865 - RNA, 19 nt, Artificial Sequence
  Description of Artificial Sequence: Synthetic oligonucleotide
ggaucgccuccagguaaug

SEQ ID NO: 239866 - RNA, 19 nt, Artificial Sequence
  Description of Artificial Sequence: Synthetic oligonucleotide
ccucgaaaauuuccuuuua

SEQ ID NO: 239867 - RNA, 19 nt, Artificial Sequence
  Description of Artificial Sequence: Synthetic oligonucleotide
guagucaggcagacacuau

SEQ ID NO: 239868 - RNA, 19 nt, Artificial Sequence
  Description of Artificial Sequence: Synthetic oligonucleotide
cuguguuggcuguggccgu

SEQ ID NO: 239869 - RNA, 19 nt, Artificial Sequence
  Description of Artificial Sequence: Synthetic oligonucleotide
gagaugcccugcagcagau

SEQ ID NO: 239870 - RNA, 19 nt, Artificial Sequence
  Description of Artificial Sequence: Synthetic oligonucleotide
caaacccggcucccugaua

SEQ ID NO: 239871 - RNA, 19 nt, Artificial Sequence
  Description of Artificial Sequence: Synthetic oligonucleotide
ccgccuuuacugguguguc

SEQ ID NO: 239872 - RNA, 19 nt, Artificial Sequence
  Description of Artificial Sequence: Synthetic oligonucleotide
cguugcgagcugucuccag

SEQ ID NO: 239873 - RNA, 19 nt, Artificial Sequence
  Description of Artificial Sequence: Synthetic oligonucleotide
cccggcucccugauaguga

SEQ ID NO: 239874 - RNA, 19 nt, Artificial Sequence
  Description of Artificial Sequence: Synthetic oligonucleotide
caguuugaauguggaguau

SEQ ID NO: 239875 - RNA, 19 nt, Artificial Sequence
  Description of Artificial Sequence: Synthetic oligonucleotide
ccaccgcgggcucccggcg

SEQ ID NO: 239876 - RNA, 19 nt, Artificial Sequence
  Description of Artificial Sequence: Synthetic oligonucleotide
cauggacuucacaguucuu

SEQ ID NO: 239877 - RNA, 19 nt, Artificial Sequence
  Description of Artificial Sequence: Synthetic oligonucleotide
aggcugcggucugcgcgcu

SEQ ID NO: 239878 - RNA, 19 nt, Artificial Sequence
  Description of Artificial Sequence: Synthetic oligonucleotide
gcggaagggccugaagagu

SEQ ID NO: 239879 - RNA, 19 nt, Artificial Sequence
  Description of Artificial Sequence: Synthetic oligonucleotide
cgccggcuugcguugcgag

SEQ ID NO: 239880 - RNA, 19 nt, Artificial Sequence
  Description of Artificial Sequence: Synthetic oligonucleotide
ccggcuugcguugcgagcu

SEQ ID NO: 239881 - RNA, 19 nt, Artificial Sequence
  Description of Artificial Sequence: Synthetic oligonucleotide
ggcuccgugggagcaagau

SEQ ID NO: 239882 - RNA, 19 nt, Artificial Sequence
  Description of Artificial Sequence: Synthetic oligonucleotide
caccuucaugucgggacau

SEQ ID NO: 239883 - RNA, 19 nt, Artificial Sequence
  Description of Artificial Sequence: Synthetic oligonucleotide
ccgaccagggugaaacauu

SEQ ID NO: 239884 - RNA, 19 nt, Artificial Sequence
  Description of Artificial Sequence: Synthetic oligonucleotide
ccggcucccugauagugau

SEQ ID NO: 239885 - RNA, 19 nt, Artificial Sequence
  Description of Artificial Sequence: Synthetic oligonucleotide
cgaguggggaggucaucaa

SEQ ID NO: 239886 - RNA, 19 nt, Artificial Sequence
  Description of Artificial Sequence: Synthetic oligonucleotide
cccgccuuuacuggugugu

SEQ ID NO: 239887 - RNA, 19 nt, Artificial Sequence
  Description of Artificial Sequence: Synthetic oligonucleotide
ggcuugcguugcgagcugu

SEQ ID NO: 239888 - RNA, 19 nt, Artificial Sequence
  Description of Artificial Sequence: Synthetic oligonucleotide
gcggucugcgcgcucgcuu

SEQ ID NO: 239889 - RNA, 19 nt, Artificial Sequence
  Description of Artificial Sequence: Synthetic oligonucleotide
ccaaacccggcucccugau

SEQ ID NO: 239890 - RNA, 19 nt, Artificial Sequence
  Description of Artificial Sequence: Synthetic oligonucleotide
cggcuugcguugcgagcug

SEQ ID NO: 239891 - RNA, 19 nt, Artificial Sequence
  Description of Artificial Sequence: Synthetic oligonucleotide
cccgaccagggugaaacau

SEQ ID NO: 239892 - RNA, 19 nt, Artificial Sequence
  Description of Artificial Sequence: Synthetic oligonucleotide
gccugcgcaugcugccgcu

SEQ ID NO: 239893 - RNA, 19 nt, Artificial Sequence
  Description of Artificial Sequence: Synthetic oligonucleotide
ccgcacuaacguggacaga

SEQ ID NO: 239894 - RNA, 19 nt, Artificial Sequence
  Description of Artificial Sequence: Synthetic oligonucleotide
ccgugggagcaagaugguu

SEQ ID NO: 239895 - RNA, 19 nt, Artificial Sequence
  Description of Artificial Sequence: Synthetic oligonucleotide
aagaauaaaagguacucgc

SEQ ID NO: 239896 - RNA, 19 nt, Artificial Sequence
  Description of Artificial Sequence: Synthetic oligonucleotide
uuuaauaaaguuccuauag

SEQ ID NO: 239897 - RNA, 19 nt, Artificial Sequence
  Description of Artificial Sequence: Synthetic oligonucleotide
ugauagauaaauauuaaca

SEQ ID NO: 239898 - RNA, 19 nt, Artificial Sequence
  Description of Artificial Sequence: Synthetic oligonucleotide
cuaauaggaaucuagagag

SEQ ID NO: 239899 - RNA, 19 nt, Artificial Sequence
  Description of Artificial Sequence: Synthetic oligonucleotide
aauaaguucaacauaauca

SEQ ID NO: 239900 - RNA, 19 nt, Artificial Sequence
  Description of Artificial Sequence: Synthetic oligonucleotide
aauauuacuugucaccuag

SEQ ID NO: 239901 - RNA, 19 nt, Artificial Sequence
  Description of Artificial Sequence: Synthetic oligonucleotide
aaauuaaagauuuccacgu

SEQ ID NO: 239902 - RNA, 19 nt, Artificial Sequence
  Description of Artificial Sequence: Synthetic oligonucleotide
auauauauuauauuuauau

SEQ ID NO: 239903 - RNA, 19 nt, Artificial Sequence
  Description of Artificial Sequence: Synthetic oligonucleotide
aauuagugaguuuucacag

SEQ ID NO: 239904 - RNA, 19 nt, Artificial Sequence
  Description of Artificial Sequence: Synthetic oligonucleotide
auauauuauauuuauauau

SEQ ID NO: 239905 - RNA, 19 nt, Artificial Sequence
  Description of Artificial Sequence: Synthetic oligonucleotide
uuuagauuugaaauucccg

SEQ ID NO: 239906 - RNA, 19 nt, Artificial Sequence
  Description of Artificial Sequence: Synthetic oligonucleotide
aaaauaucccacauagucc

SEQ ID NO: 239907 - RNA, 19 nt, Artificial Sequence
  Description of Artificial Sequence: Synthetic oligonucleotide
ucuaauaggaaucuagaga

SEQ ID NO: 239908 - RNA, 19 nt, Artificial Sequence
  Description of Artificial Sequence: Synthetic oligonucleotide
aauaggaaucuagagaggg

SEQ ID NO: 239909 - RNA, 19 nt, Artificial Sequence
  Description of Artificial Sequence: Synthetic oligonucleotide
uucaacauaaucaauguaa

SEQ ID NO: 239910 - RNA, 19 nt, Artificial Sequence
  Description of Artificial Sequence: Synthetic oligonucleotide
uaugccuuaguauugaagc

SEQ ID NO: 239911 - RNA, 19 nt, Artificial Sequence
  Description of Artificial Sequence: Synthetic oligonucleotide
uuacuugucaccuagcacc

SEQ ID NO: 239912 - RNA, 19 nt, Artificial Sequence
  Description of Artificial Sequence: Synthetic oligonucleotide
ugaaauuuagguuuggagu

SEQ ID NO: 239913 - RNA, 19 nt, Artificial Sequence
  Description of Artificial Sequence: Synthetic oligonucleotide
uugcuaagcagccauaggg

SEQ ID NO: 239914 - RNA, 19 nt, Artificial Sequence
  Description of Artificial Sequence: Synthetic oligonucleotide
cuguaaaagauacugagag

SEQ ID NO: 239915 - RNA, 19 nt, Artificial Sequence
  Description of Artificial Sequence: Synthetic oligonucleotide
uuagauuugaaauucccga

SEQ ID NO: 239916 - RNA, 19 nt, Artificial Sequence
  Description of Artificial Sequence: Synthetic oligonucleotide
uguugaaugacaugaauga

SEQ ID NO: 239917 - RNA, 19 nt, Artificial Sequence
  Description of Artificial Sequence: Synthetic oligonucleotide
uaaaguaccaaauacugaa

SEQ ID NO: 239918 - RNA, 19 nt, Artificial Sequence
  Description of Artificial Sequence: Synthetic oligonucleotide
augauagauaaauauuaac

SEQ ID NO: 239919 - RNA, 19 nt, Artificial Sequence
  Description of Artificial Sequence: Synthetic oligonucleotide
ugcaaaguaacuuaggcaa

SEQ ID NO: 239920 - RNA, 19 nt, Artificial Sequence
  Description of Artificial Sequence: Synthetic oligonucleotide
uuggcaauauucaugacga

SEQ ID NO: 239921 - RNA, 19 nt, Artificial Sequence
  Description of Artificial Sequence: Synthetic oligonucleotide
uuuaaugccgaauuuagau

SEQ ID NO: 239922 - RNA, 19 nt, Artificial Sequence
  Description of Artificial Sequence: Synthetic oligonucleotide
cuuuccuaaggcaagagag

SEQ ID NO: 239923 - RNA, 19 nt, Artificial Sequence
  Description of Artificial Sequence: Synthetic oligonucleotide
uauuccacuugauugacag

SEQ ID NO: 239924 - RNA, 19 nt, Artificial Sequence
  Description of Artificial Sequence: Synthetic oligonucleotide
uauauuauauuuauauaua

SEQ ID NO: 239925 - RNA, 19 nt, Artificial Sequence
  Description of Artificial Sequence: Synthetic oligonucleotide
uauauuuauauauauuaua

SEQ ID NO: 239926 - RNA, 19 nt, Artificial Sequence
  Description of Artificial Sequence: Synthetic oligonucleotide
aucaauguaauuuguagcu

SEQ ID NO: 239927 - RNA, 19 nt, Artificial Sequence
  Description of Artificial Sequence: Synthetic oligonucleotide
aauagauucucagcaaguc

SEQ ID NO: 239928 - RNA, 19 nt, Artificial Sequence
  Description of Artificial Sequence: Synthetic oligonucleotide
uaagaauaaaagguacucg

SEQ ID NO: 239929 - RNA, 19 nt, Artificial Sequence
  Description of Artificial Sequence: Synthetic oligonucleotide
aaaccaguaguuccuauug

SEQ ID NO: 239930 - RNA, 19 nt, Artificial Sequence
  Description of Artificial Sequence: Synthetic oligonucleotide
acauaaucaauguaauuug

SEQ ID NO: 239931 - RNA, 19 nt, Artificial Sequence
  Description of Artificial Sequence: Synthetic oligonucleotide
gaugcuaagaccuguaguc

SEQ ID NO: 239932 - RNA, 19 nt, Artificial Sequence
  Description of Artificial Sequence: Synthetic oligonucleotide
ugcuuaaauuguuugagug

SEQ ID NO: 239933 - RNA, 19 nt, Artificial Sequence
  Description of Artificial Sequence: Synthetic oligonucleotide
uuagguuuggaguuuauuc

SEQ ID NO: 239934 - RNA, 19 nt, Artificial Sequence
  Description of Artificial Sequence: Synthetic oligonucleotide
aagaccuguagucucugcg

SEQ ID NO: 239935 - RNA, 19 nt, Artificial Sequence
  Description of Artificial Sequence: Synthetic oligonucleotide
uguaauuuguagcuuacau

SEQ ID NO: 239936 - RNA, 19 nt, Artificial Sequence
  Description of Artificial Sequence: Synthetic oligonucleotide
uauuguuuguguucuauga

SEQ ID NO: 239937 - RNA, 19 nt, Artificial Sequence
  Description of Artificial Sequence: Synthetic oligonucleotide
uucuaauaggaaucuagag

SEQ ID NO: 239938 - RNA, 19 nt, Artificial Sequence
  Description of Artificial Sequence: Synthetic oligonucleotide
auaucuuugacugauguga

SEQ ID NO: 239939 - RNA, 19 nt, Artificial Sequence
  Description of Artificial Sequence: Synthetic oligonucleotide
aaccaguaguuccuauugc

SEQ ID NO: 239940 - RNA, 19 nt, Artificial Sequence
  Description of Artificial Sequence: Synthetic oligonucleotide
auauuauauuuauauauau

SEQ ID NO: 239941 - RNA, 19 nt, Artificial Sequence
  Description of Artificial Sequence: Synthetic oligonucleotide
uuuguguucuaugaaauga

SEQ ID NO: 239942 - RNA, 19 nt, Artificial Sequence
  Description of Artificial Sequence: Synthetic oligonucleotide
uaagugcucuuucuaauag

SEQ ID NO: 239943 - RNA, 19 nt, Artificial Sequence
  Description of Artificial Sequence: Synthetic oligonucleotide
auuacuugucaccuagcac

SEQ ID NO: 239944 - RNA, 19 nt, Artificial Sequence
  Description of Artificial Sequence: Synthetic oligonucleotide
aagauuuccacguggcaug

SEQ ID NO: 239945 - RNA, 19 nt, Artificial Sequence
  Description of Artificial Sequence: Synthetic oligonucleotide
ucuacucaaguauuguuug

SEQ ID NO: 239946 - RNA, 19 nt, Artificial Sequence
  Description of Artificial Sequence: Synthetic oligonucleotide
aauuaaagauuuccacgug

SEQ ID NO: 239947 - RNA, 19 nt, Artificial Sequence
  Description of Artificial Sequence: Synthetic oligonucleotide
uagguuuggaguuuauucc

SEQ ID NO: 239948 - RNA, 19 nt, Artificial Sequence
  Description of Artificial Sequence: Synthetic oligonucleotide
uaaacauauaugcagcgua

SEQ ID NO: 239949 - RNA, 19 nt, Artificial Sequence
  Description of Artificial Sequence: Synthetic oligonucleotide
uauauauuauauuuauaua

SEQ ID NO: 239950 - RNA, 19 nt, Artificial Sequence
  Description of Artificial Sequence: Synthetic oligonucleotide
uuauauuugccucaccaau

SEQ ID NO: 239951 - RNA, 19 nt, Artificial Sequence
  Description of Artificial Sequence: Synthetic oligonucleotide
uauuacuugucaccuagca

SEQ ID NO: 239952 - RNA, 19 nt, Artificial Sequence
  Description of Artificial Sequence: Synthetic oligonucleotide
uccacaguuaacugcaaag

SEQ ID NO: 239953 - RNA, 19 nt, Artificial Sequence
  Description of Artificial Sequence: Synthetic oligonucleotide
auauuuauauauauuauau

SEQ ID NO: 239954 - RNA, 19 nt, Artificial Sequence
  Description of Artificial Sequence: Synthetic oligonucleotide
uagauuugaaauucccgag

SEQ ID NO: 239955 - RNA, 19 nt, Artificial Sequence
  Description of Artificial Sequence: Synthetic oligonucleotide
aauguaaugguaaguguug

SEQ ID NO: 239956 - RNA, 19 nt, Artificial Sequence
  Description of Artificial Sequence: Synthetic oligonucleotide
uggaguuuauuccauaaau

SEQ ID NO: 239957 - RNA, 19 nt, Artificial Sequence
  Description of Artificial Sequence: Synthetic oligonucleotide
ucuagagagggcacaauca

SEQ ID NO: 239958 - RNA, 19 nt, Artificial Sequence
  Description of Artificial Sequence: Synthetic oligonucleotide
auauuugccucaccaauag

SEQ ID NO: 239959 - RNA, 19 nt, Artificial Sequence
  Description of Artificial Sequence: Synthetic oligonucleotide
aagagguucccaugccgcc

SEQ ID NO: 239960 - RNA, 19 nt, Artificial Sequence
  Description of Artificial Sequence: Synthetic oligonucleotide
gaauaaaagguacucgcuc

SEQ ID NO: 239961 - RNA, 19 nt, Artificial Sequence
  Description of Artificial Sequence: Synthetic oligonucleotide
aguucaacauaaucaaugu

SEQ ID NO: 239962 - RNA, 19 nt, Artificial Sequence
  Description of Artificial Sequence: Synthetic oligonucleotide
ucauguaugccuuaguauu

SEQ ID NO: 239963 - RNA, 19 nt, Artificial Sequence
  Description of Artificial Sequence: Synthetic oligonucleotide
guaccaaauacugaagggg

SEQ ID NO: 239964 - RNA, 19 nt, Artificial Sequence
  Description of Artificial Sequence: Synthetic oligonucleotide
uaccaaauacugaagggga

SEQ ID NO: 239965 - RNA, 19 nt, Artificial Sequence
  Description of Artificial Sequence: Synthetic oligonucleotide
cugguaaaguaccaaauac

SEQ ID NO: 239966 - RNA, 19 nt, Artificial Sequence
  Description of Artificial Sequence: Synthetic oligonucleotide
cuuuaagccaguucaggag

SEQ ID NO: 239967 - RNA, 19 nt, Artificial Sequence
  Description of Artificial Sequence: Synthetic oligonucleotide
aagaaguauuuacaccucu

SEQ ID NO: 239968 - RNA, 19 nt, Artificial Sequence
  Description of Artificial Sequence: Synthetic oligonucleotide
agaaaaggcucauauuuca

SEQ ID NO: 239969 - RNA, 19 nt, Artificial Sequence
  Description of Artificial Sequence: Synthetic oligonucleotide
ugcaagugcaaaauggaaa

SEQ ID NO: 239970 - RNA, 19 nt, Artificial Sequence
  Description of Artificial Sequence: Synthetic oligonucleotide
aacaaccucaaugaggcca

SEQ ID NO: 239971 - RNA, 19 nt, Artificial Sequence
  Description of Artificial Sequence: Synthetic oligonucleotide
ucaccuagcacccuaacua

SEQ ID NO: 239972 - RNA, 19 nt, Artificial Sequence
  Description of Artificial Sequence: Synthetic oligonucleotide
ugaaugucagcgauugucu

SEQ ID NO: 239973 - RNA, 19 nt, Artificial Sequence
  Description of Artificial Sequence: Synthetic oligonucleotide
agggcaagcacucaguugu

SEQ ID NO: 239974 - RNA, 19 nt, Artificial Sequence
  Description of Artificial Sequence: Synthetic oligonucleotide
acccuaacuauaugguacc

SEQ ID NO: 239975 - RNA, 19 nt, Artificial Sequence
  Description of Artificial Sequence: Synthetic oligonucleotide
aagaccgaugcuaagaccu

SEQ ID NO: 239976 - RNA, 19 nt, Artificial Sequence
  Description of Artificial Sequence: Synthetic oligonucleotide
aaugccaaggacauaagaa

SEQ ID NO: 239977 - RNA, 19 nt, Artificial Sequence
  Description of Artificial Sequence: Synthetic oligonucleotide
uucaucacucaucugucgc

SEQ ID NO: 239978 - RNA, 19 nt, Artificial Sequence
  Description of Artificial Sequence: Synthetic oligonucleotide
uuauauagaacucccucua

SEQ ID NO: 239979 - RNA, 19 nt, Artificial Sequence
  Description of Artificial Sequence: Synthetic oligonucleotide
accuacagcauauucccgg

SEQ ID NO: 239980 - RNA, 19 nt, Artificial Sequence
  Description of Artificial Sequence: Synthetic oligonucleotide
auaccuuucuuagaacagc

SEQ ID NO: 239981 - RNA, 19 nt, Artificial Sequence
  Description of Artificial Sequence: Synthetic oligonucleotide
uauauauauuauauuuaua

SEQ ID NO: 239982 - RNA, 19 nt, Artificial Sequence
  Description of Artificial Sequence: Synthetic oligonucleotide
ucagauaggcaucuucaca

SEQ ID NO: 239983 - RNA, 19 nt, Artificial Sequence
  Description of Artificial Sequence: Synthetic oligonucleotide
uuuuaaugccgaauuuaga

SEQ ID NO: 239984 - RNA, 19 nt, Artificial Sequence
  Description of Artificial Sequence: Synthetic oligonucleotide
aaggaaagggaauaccuuu

SEQ ID NO: 239985 - RNA, 19 nt, Artificial Sequence
  Description of Artificial Sequence: Synthetic oligonucleotide
uucuaugaaaugaacucuc

SEQ ID NO: 239986 - RNA, 19 nt, Artificial Sequence
  Description of Artificial Sequence: Synthetic oligonucleotide
gacauguuagcacugucac

SEQ ID NO: 239987 - RNA, 19 nt, Artificial Sequence
  Description of Artificial Sequence: Synthetic oligonucleotide
uaaugccgaauuuagauuu

SEQ ID NO: 239988 - RNA, 19 nt, Artificial Sequence
  Description of Artificial Sequence: Synthetic oligonucleotide
aaagcucugcuuuuguaaa

SEQ ID NO: 239989 - RNA, 19 nt, Artificial Sequence
  Description of Artificial Sequence: Synthetic oligonucleotide
ucaccaauagauucucagc

SEQ ID NO: 239990 - RNA, 19 nt, Artificial Sequence
  Description of Artificial Sequence: Synthetic oligonucleotide
aaagaaguauuuacaccuc

SEQ ID NO: 239991 - RNA, 19 nt, Artificial Sequence
  Description of Artificial Sequence: Synthetic oligonucleotide
aaacuuuaaaacacaggcu

SEQ ID NO: 239992 - RNA, 19 nt, Artificial Sequence
  Description of Artificial Sequence: Synthetic oligonucleotide
uauauuugccucaccaaua

SEQ ID NO: 239993 - RNA, 19 nt, Artificial Sequence
  Description of Artificial Sequence: Synthetic oligonucleotide
cauauucccggacauacug

SEQ ID NO: 239994 - RNA, 19 nt, Artificial Sequence
  Description of Artificial Sequence: Synthetic oligonucleotide
agcguauguauauauauua

SEQ ID NO: 239995 - RNA, 19 nt, Artificial Sequence
  Description of Artificial Sequence: Synthetic oligonucleotide
aagaagcuacacaguagcc

SEQ ID NO: 239996 - RNA, 19 nt, Artificial Sequence
  Description of Artificial Sequence: Synthetic oligonucleotide
uggauccacaguuaacugc

SEQ ID NO: 239997 - RNA, 19 nt, Artificial Sequence
  Description of Artificial Sequence: Synthetic oligonucleotide
uacagcauauucccggaca

SEQ ID NO: 239998 - RNA, 19 nt, Artificial Sequence
  Description of Artificial Sequence: Synthetic oligonucleotide
uucacucuuuccuaaggca

SEQ ID NO: 239999 - RNA, 19 nt, Artificial Sequence
  Description of Artificial Sequence: Synthetic oligonucleotide
acauauaugcagcguaugu

SEQ ID NO: 240000 - RNA, 19 nt, Artificial Sequence
  Description of Artificial Sequence: Synthetic oligonucleotide
cuaugaaaugaacucucag

SEQ ID NO: 240001 - RNA, 19 nt, Artificial Sequence
  Description of Artificial Sequence: Synthetic oligonucleotide
agauuugaaauucccgaga

SEQ ID NO: 240002 - RNA, 19 nt, Artificial Sequence
  Description of Artificial Sequence: Synthetic oligonucleotide
cacccuaacuauaugguac

SEQ ID NO: 240003 - RNA, 19 nt, Artificial Sequence
  Description of Artificial Sequence: Synthetic oligonucleotide
aaaguaccaaauacugaag

SEQ ID NO: 240004 - RNA, 19 nt, Artificial Sequence
  Description of Artificial Sequence: Synthetic oligonucleotide
uguucaauuuagugcaagu

SEQ ID NO: 240005 - RNA, 19 nt, Artificial Sequence
  Description of Artificial Sequence: Synthetic oligonucleotide
uuuccuaaggcaagagagu

SEQ ID NO: 240006 - RNA, 19 nt, Artificial Sequence
  Description of Artificial Sequence: Synthetic oligonucleotide
ucuuuccuaaggcaagaga

SEQ ID NO: 240007 - RNA, 19 nt, Artificial Sequence
  Description of Artificial Sequence: Synthetic oligonucleotide
guaagaauaaaagguacuc

SEQ ID NO: 240008 - RNA, 19 nt, Artificial Sequence
  Description of Artificial Sequence: Synthetic oligonucleotide
caugacgaguccuggaagc

SEQ ID NO: 240009 - RNA, 19 nt, Artificial Sequence
  Description of Artificial Sequence: Synthetic oligonucleotide
gauacugagagaguucuuc

SEQ ID NO: 240010 - RNA, 19 nt, Artificial Sequence
  Description of Artificial Sequence: Synthetic oligonucleotide
uuuagugcaagugcaaaau

SEQ ID NO: 240011 - RNA, 19 nt, Artificial Sequence
  Description of Artificial Sequence: Synthetic oligonucleotide
ucccugguagcauuccucg

SEQ ID NO: 240012 - RNA, 19 nt, Artificial Sequence
  Description of Artificial Sequence: Synthetic oligonucleotide
auugagggcucccauucuc

SEQ ID NO: 240013 - RNA, 19 nt, Artificial Sequence
  Description of Artificial Sequence: Synthetic oligonucleotide
uucccggacauacuggucu

SEQ ID NO: 240014 - RNA, 19 nt, Artificial Sequence
  Description of Artificial Sequence: Synthetic oligonucleotide
ucacucuuuccuaaggcaa

SEQ ID NO: 240015 - RNA, 19 nt, Artificial Sequence
  Description of Artificial Sequence: Synthetic oligonucleotide
uacuuggucacaacacuga

SEQ ID NO: 240016 - RNA, 19 nt, Artificial Sequence
  Description of Artificial Sequence: Synthetic oligonucleotide
ugccuuaguauugaagcag

SEQ ID NO: 240017 - RNA, 19 nt, Artificial Sequence
  Description of Artificial Sequence: Synthetic oligonucleotide
uccaaauaagauccauuuc

SEQ ID NO: 240018 - RNA, 19 nt, Artificial Sequence
  Description of Artificial Sequence: Synthetic oligonucleotide
ucugucgcaggcaaccuac

SEQ ID NO: 240019 - RNA, 19 nt, Artificial Sequence
  Description of Artificial Sequence: Synthetic oligonucleotide
gaaauuuagguuuggaguu

SEQ ID NO: 240020 - RNA, 19 nt, Artificial Sequence
  Description of Artificial Sequence: Synthetic oligonucleotide
cuucacucuuuccuaaggc

SEQ ID NO: 240021 - RNA, 19 nt, Artificial Sequence
  Description of Artificial Sequence: Synthetic oligonucleotide
aacauauaugcagcguaug

SEQ ID NO: 240022 - RNA, 19 nt, Artificial Sequence
  Description of Artificial Sequence: Synthetic oligonucleotide
uaguauugaagcagaugga

SEQ ID NO: 240023 - RNA, 19 nt, Artificial Sequence
  Description of Artificial Sequence: Synthetic oligonucleotide
uccucaauugcucggucca

SEQ ID NO: 240024 - RNA, 19 nt, Artificial Sequence
  Description of Artificial Sequence: Synthetic oligonucleotide
uuaaugccgaauuuagauu

SEQ ID NO: 240025 - RNA, 19 nt, Artificial Sequence
  Description of Artificial Sequence: Synthetic oligonucleotide
auuguacucuuuaagccag

SEQ ID NO: 240026 - RNA, 19 nt, Artificial Sequence
  Description of Artificial Sequence: Synthetic oligonucleotide
ugcagucaacaucagugca

SEQ ID NO: 240027 - RNA, 19 nt, Artificial Sequence
  Description of Artificial Sequence: Synthetic oligonucleotide
ucugcggacugugugagcc

SEQ ID NO: 240028 - RNA, 19 nt, Artificial Sequence
  Description of Artificial Sequence: Synthetic oligonucleotide
aguaagaauaaaagguacu

SEQ ID NO: 240029 - RNA, 19 nt, Artificial Sequence
  Description of Artificial Sequence: Synthetic oligonucleotide
auguaaugguaaguguugg

SEQ ID NO: 240030 - RNA, 19 nt, Artificial Sequence
  Description of Artificial Sequence: Synthetic oligonucleotide
caauauucaugacgagucc

SEQ ID NO: 240031 - RNA, 19 nt, Artificial Sequence
  Description of Artificial Sequence: Synthetic oligonucleotide
cuaagcagccauagggaag

SEQ ID NO: 240032 - RNA, 19 nt, Artificial Sequence
  Description of Artificial Sequence: Synthetic oligonucleotide
auuagugaguuuucacaga

SEQ ID NO: 240033 - RNA, 19 nt, Artificial Sequence
  Description of Artificial Sequence: Synthetic oligonucleotide
auuuagugcaagugcaaaa

SEQ ID NO: 240034 - RNA, 19 nt, Artificial Sequence
  Description of Artificial Sequence: Synthetic oligonucleotide
caacaucagugcaaagagg

SEQ ID NO: 240035 - RNA, 19 nt, Artificial Sequence
  Description of Artificial Sequence: Synthetic oligonucleotide
gcuuaaauuguuugagugc

SEQ ID NO: 240036 - RNA, 19 nt, Artificial Sequence
  Description of Artificial Sequence: Synthetic oligonucleotide
gcuaacaaccucaaugagg

SEQ ID NO: 240037 - RNA, 19 nt, Artificial Sequence
  Description of Artificial Sequence: Synthetic oligonucleotide
caugccgccguaaaaucag

SEQ ID NO: 240038 - RNA, 19 nt, Artificial Sequence
  Description of Artificial Sequence: Synthetic oligonucleotide
cugaaugucagcgauuguc

SEQ ID NO: 240039 - RNA, 19 nt, Artificial Sequence
  Description of Artificial Sequence: Synthetic oligonucleotide
agguuuggaguuuauucca

SEQ ID NO: 240040 - RNA, 19 nt, Artificial Sequence
  Description of Artificial Sequence: Synthetic oligonucleotide
ucgacuugacauguuagca

SEQ ID NO: 240041 - RNA, 19 nt, Artificial Sequence
  Description of Artificial Sequence: Synthetic oligonucleotide
uugccucaccaauagauuc

SEQ ID NO: 240042 - RNA, 19 nt, Artificial Sequence
  Description of Artificial Sequence: Synthetic oligonucleotide
cuggaagcauuugagaaac

SEQ ID NO: 240043 - RNA, 19 nt, Artificial Sequence
  Description of Artificial Sequence: Synthetic oligonucleotide
ggucauguucaauuuagug

SEQ ID NO: 240044 - RNA, 19 nt, Artificial Sequence
  Description of Artificial Sequence: Synthetic oligonucleotide
guuugggccaaaucugcag

SEQ ID NO: 240045 - RNA, 19 nt, Artificial Sequence
  Description of Artificial Sequence: Synthetic oligonucleotide
caccaauagauucucagca

SEQ ID NO: 240046 - RNA, 19 nt, Artificial Sequence
  Description of Artificial Sequence: Synthetic oligonucleotide
gauuaggcucugugggagg

SEQ ID NO: 240047 - RNA, 19 nt, Artificial Sequence
  Description of Artificial Sequence: Synthetic oligonucleotide
cauaagaagcuacacagua

SEQ ID NO: 240048 - RNA, 19 nt, Artificial Sequence
  Description of Artificial Sequence: Synthetic oligonucleotide
uuuauuccacuugauugac

SEQ ID NO: 240049 - RNA, 19 nt, Artificial Sequence
  Description of Artificial Sequence: Synthetic oligonucleotide
gugugagccauccaguuca

SEQ ID NO: 240050 - RNA, 19 nt, Artificial Sequence
  Description of Artificial Sequence: Synthetic oligonucleotide
ucuggguaguugaaaucca

SEQ ID NO: 240051 - RNA, 19 nt, Artificial Sequence
  Description of Artificial Sequence: Synthetic oligonucleotide
auuugccucaccaauagau

SEQ ID NO: 240052 - RNA, 19 nt, Artificial Sequence
  Description of Artificial Sequence: Synthetic oligonucleotide
ucaucacucaucugucgca

SEQ ID NO: 240053 - RNA, 19 nt, Artificial Sequence
  Description of Artificial Sequence: Synthetic oligonucleotide
ugacugaugugaguucggg

SEQ ID NO: 240054 - RNA, 19 nt, Artificial Sequence
  Description of Artificial Sequence: Synthetic oligonucleotide
cuaggagucaagaccgaug

SEQ ID NO: 240055 - RNA, 19 nt, Artificial Sequence
  Description of Artificial Sequence: Synthetic oligonucleotide
uuuccacguggcaugaauc

SEQ ID NO: 240056 - RNA, 19 nt, Artificial Sequence
  Description of Artificial Sequence: Synthetic oligonucleotide
aaacauauaugcagcguau

SEQ ID NO: 240057 - RNA, 19 nt, Artificial Sequence
  Description of Artificial Sequence: Synthetic oligonucleotide
cuauaugguaccucaacaa

SEQ ID NO: 240058 - RNA, 19 nt, Artificial Sequence
  Description of Artificial Sequence: Synthetic oligonucleotide
aguuccuauagaaaacuga

SEQ ID NO: 240059 - RNA, 19 nt, Artificial Sequence
  Description of Artificial Sequence: Synthetic oligonucleotide
auuuacacaccaaaccagu

SEQ ID NO: 240060 - RNA, 19 nt, Artificial Sequence
  Description of Artificial Sequence: Synthetic oligonucleotide
uuugccucaccaauagauu

SEQ ID NO: 240061 - RNA, 19 nt, Artificial Sequence
  Description of Artificial Sequence: Synthetic oligonucleotide
ugucgcaggcaaccuacag

SEQ ID NO: 240062 - RNA, 19 nt, Artificial Sequence
  Description of Artificial Sequence: Synthetic oligonucleotide
uuauuccacuugauugaca

SEQ ID NO: 240063 - RNA, 19 nt, Artificial Sequence
  Description of Artificial Sequence: Synthetic oligonucleotide
aaguuccuauagaaaacug

SEQ ID NO: 240064 - RNA, 19 nt, Artificial Sequence
  Description of Artificial Sequence: Synthetic oligonucleotide
auuccacuugauugacagg

SEQ ID NO: 240065 - RNA, 19 nt, Artificial Sequence
  Description of Artificial Sequence: Synthetic oligonucleotide
ugccucaccaauagauucu

SEQ ID NO: 240066 - RNA, 19 nt, Artificial Sequence
  Description of Artificial Sequence: Synthetic oligonucleotide
acuguaaaagauacugaga

SEQ ID NO: 240067 - RNA, 19 nt, Artificial Sequence
  Description of Artificial Sequence: Synthetic oligonucleotide
ugcuaagaccuguagucuc

SEQ ID NO: 240068 - RNA, 19 nt, Artificial Sequence
  Description of Artificial Sequence: Synthetic oligonucleotide
gaaauucccgagaauaugu

SEQ ID NO: 240069 - RNA, 19 nt, Artificial Sequence
  Description of Artificial Sequence: Synthetic oligonucleotide
cuuaaauuguuugagugcu

SEQ ID NO: 240070 - RNA, 19 nt, Artificial Sequence
  Description of Artificial Sequence: Synthetic oligonucleotide
augccuuaguauugaagca

SEQ ID NO: 240071 - RNA, 19 nt, Artificial Sequence
  Description of Artificial Sequence: Synthetic oligonucleotide
uccaaaccggccucuuucc

SEQ ID NO: 240072 - RNA, 19 nt, Artificial Sequence
  Description of Artificial Sequence: Synthetic oligonucleotide
auuccucgcgugcaagguc

SEQ ID NO: 240073 - RNA, 19 nt, Artificial Sequence
  Description of Artificial Sequence: Synthetic oligonucleotide
uccgaagguccaaaccggc

SEQ ID NO: 240074 - RNA, 19 nt, Artificial Sequence
  Description of Artificial Sequence: Synthetic oligonucleotide
agugcaagugcaaaaugga

SEQ ID NO: 240075 - RNA, 19 nt, Artificial Sequence
  Description of Artificial Sequence: Synthetic oligonucleotide
auuuccacguggcaugaau

SEQ ID NO: 240076 - RNA, 19 nt, Artificial Sequence
  Description of Artificial Sequence: Synthetic oligonucleotide
gcaauauucaugacgaguc

SEQ ID NO: 240077 - RNA, 19 nt, Artificial Sequence
  Description of Artificial Sequence: Synthetic oligonucleotide
ugucacuaugccugucacc

SEQ ID NO: 240078 - RNA, 19 nt, Artificial Sequence
  Description of Artificial Sequence: Synthetic oligonucleotide
caagaccgaugcuaagacc

SEQ ID NO: 240079 - RNA, 19 nt, Artificial Sequence
  Description of Artificial Sequence: Synthetic oligonucleotide
ccgccguaaaaucagauag

SEQ ID NO: 240080 - RNA, 19 nt, Artificial Sequence
  Description of Artificial Sequence: Synthetic oligonucleotide
guauaucuuugacugaugu

SEQ ID NO: 240081 - RNA, 19 nt, Artificial Sequence
  Description of Artificial Sequence: Synthetic oligonucleotide
gggaauaccuuucuuagaa

SEQ ID NO: 240082 - RNA, 19 nt, Artificial Sequence
  Description of Artificial Sequence: Synthetic oligonucleotide
aguccuggaagcauuugag

SEQ ID NO: 240083 - RNA, 19 nt, Artificial Sequence
  Description of Artificial Sequence: Synthetic oligonucleotide
uaaggcaagagaguccuua

SEQ ID NO: 240084 - RNA, 19 nt, Artificial Sequence
  Description of Artificial Sequence: Synthetic oligonucleotide
gucgcaggcaaccuacagc

SEQ ID NO: 240085 - RNA, 19 nt, Artificial Sequence
  Description of Artificial Sequence: Synthetic oligonucleotide
aaugccgaauuuagauuug

SEQ ID NO: 240086 - RNA, 19 nt, Artificial Sequence
  Description of Artificial Sequence: Synthetic oligonucleotide
accaauagauucucagcaa

SEQ ID NO: 240087 - RNA, 19 nt, Artificial Sequence
  Description of Artificial Sequence: Synthetic oligonucleotide
uaauauuacuugucaccua

SEQ ID NO: 240088 - RNA, 19 nt, Artificial Sequence
  Description of Artificial Sequence: Synthetic oligonucleotide
uuucaacacuugcaccaac

SEQ ID NO: 240089 - RNA, 19 nt, Artificial Sequence
  Description of Artificial Sequence: Synthetic oligonucleotide
uaacuauaugguaccucaa

SEQ ID NO: 240090 - RNA, 19 nt, Artificial Sequence
  Description of Artificial Sequence: Synthetic oligonucleotide
ugagaaacagagggugggc

SEQ ID NO: 240091 - RNA, 19 nt, Artificial Sequence
  Description of Artificial Sequence: Synthetic oligonucleotide
auauucccggacauacugg

SEQ ID NO: 240092 - RNA, 19 nt, Artificial Sequence
  Description of Artificial Sequence: Synthetic oligonucleotide
uaguccagcuuucccugag

SEQ ID NO: 240093 - RNA, 19 nt, Artificial Sequence
  Description of Artificial Sequence: Synthetic oligonucleotide
aguauuguuuguguucuau

SEQ ID NO: 240094 - RNA, 19 nt, Artificial Sequence
  Description of Artificial Sequence: Synthetic oligonucleotide
caccucucugguaaaguac

SEQ ID NO: 240095 - RNA, 19 nt, Artificial Sequence
  Description of Artificial Sequence: Synthetic oligonucleotide
cacguugcuacuguucagc

SEQ ID NO: 240096 - RNA, 19 nt, Artificial Sequence
  Description of Artificial Sequence: Synthetic oligonucleotide
cuuugacugaugugaguuc

SEQ ID NO: 240097 - RNA, 19 nt, Artificial Sequence
  Description of Artificial Sequence: Synthetic oligonucleotide
guauuuacaccucucuggu

SEQ ID NO: 240098 - RNA, 19 nt, Artificial Sequence
  Description of Artificial Sequence: Synthetic oligonucleotide
aaccuacagcauauucccg

SEQ ID NO: 240099 - RNA, 19 nt, Artificial Sequence
  Description of Artificial Sequence: Synthetic oligonucleotide
agcccugcagucaacauca

SEQ ID NO: 240100 - RNA, 19 nt, Artificial Sequence
  Description of Artificial Sequence: Synthetic oligonucleotide
uugggccaaaucugcagga

SEQ ID NO: 240101 - RNA, 19 nt, Artificial Sequence
  Description of Artificial Sequence: Synthetic oligonucleotide
ugcagcguauguauauaua

SEQ ID NO: 240102 - RNA, 19 nt, Artificial Sequence
  Description of Artificial Sequence: Synthetic oligonucleotide
uaagaccuguagucucugc

SEQ ID NO: 240103 - RNA, 19 nt, Artificial Sequence
  Description of Artificial Sequence: Synthetic oligonucleotide
auacugaaauuuagguuug

SEQ ID NO: 240104 - RNA, 19 nt, Artificial Sequence
  Description of Artificial Sequence: Synthetic oligonucleotide
ucucugcggacugugugag

SEQ ID NO: 240105 - RNA, 19 nt, Artificial Sequence
  Description of Artificial Sequence: Synthetic oligonucleotide
cccucuagaaauuuuauaa

SEQ ID NO: 240106 - RNA, 19 nt, Artificial Sequence
  Description of Artificial Sequence: Synthetic oligonucleotide
gccguaaaaucagauaggc

SEQ ID NO: 240107 - RNA, 19 nt, Artificial Sequence
  Description of Artificial Sequence: Synthetic oligonucleotide
guaaugguaaguguuggcu

SEQ ID NO: 240108 - RNA, 19 nt, Artificial Sequence
  Description of Artificial Sequence: Synthetic oligonucleotide
uucgggaagcccugcaguc

SEQ ID NO: 240109 - RNA, 19 nt, Artificial Sequence
  Description of Artificial Sequence: Synthetic oligonucleotide
aaaguccaaauaagaucca

SEQ ID NO: 240110 - RNA, 19 nt, Artificial Sequence
  Description of Artificial Sequence: Synthetic oligonucleotide
auccgaagguccaaaccgg

SEQ ID NO: 240111 - RNA, 19 nt, Artificial Sequence
  Description of Artificial Sequence: Synthetic oligonucleotide
gcgauugucucagaggugc

SEQ ID NO: 240112 - RNA, 19 nt, Artificial Sequence
  Description of Artificial Sequence: Synthetic oligonucleotide
ugccgaauuuagauuugaa

SEQ ID NO: 240113 - RNA, 19 nt, Artificial Sequence
  Description of Artificial Sequence: Synthetic oligonucleotide
uggcaauauucaugacgag

SEQ ID NO: 240114 - RNA, 19 nt, Artificial Sequence
  Description of Artificial Sequence: Synthetic oligonucleotide
gaguccucuauuaagugcu

SEQ ID NO: 240115 - RNA, 19 nt, Artificial Sequence
  Description of Artificial Sequence: Synthetic oligonucleotide
agagguucccaugccgccg

SEQ ID NO: 240116 - RNA, 19 nt, Artificial Sequence
  Description of Artificial Sequence: Synthetic oligonucleotide
gaugugaguucgggaagcc

SEQ ID NO: 240117 - RNA, 19 nt, Artificial Sequence
  Description of Artificial Sequence: Synthetic oligonucleotide
cuuucaguacagcaagaaa

SEQ ID NO: 240118 - RNA, 19 nt, Artificial Sequence
  Description of Artificial Sequence: Synthetic oligonucleotide
gguagcauuccucgcgugc

SEQ ID NO: 240119 - RNA, 19 nt, Artificial Sequence
  Description of Artificial Sequence: Synthetic oligonucleotide
acucuuuaagccaguucag

SEQ ID NO: 240120 - RNA, 19 nt, Artificial Sequence
  Description of Artificial Sequence: Synthetic oligonucleotide
ugaggauugagggcuccca

SEQ ID NO: 240121 - RNA, 19 nt, Artificial Sequence
  Description of Artificial Sequence: Synthetic oligonucleotide
guacucuuuaagccaguuc

SEQ ID NO: 240122 - RNA, 19 nt, Artificial Sequence
  Description of Artificial Sequence: Synthetic oligonucleotide
auugucucagaggugcuaa

SEQ ID NO: 240123 - RNA, 19 nt, Artificial Sequence
  Description of Artificial Sequence: Synthetic oligonucleotide
caucacucaucugucgcag

SEQ ID NO: 240124 - RNA, 19 nt, Artificial Sequence
  Description of Artificial Sequence: Synthetic oligonucleotide
augcagcguauguauauau

SEQ ID NO: 240125 - RNA, 19 nt, Artificial Sequence
  Description of Artificial Sequence: Synthetic oligonucleotide
uauuuacaccucucuggua

SEQ ID NO: 240126 - RNA, 19 nt, Artificial Sequence
  Description of Artificial Sequence: Synthetic oligonucleotide
cguaaaaucagauaggcau

SEQ ID NO: 240127 - RNA, 19 nt, Artificial Sequence
  Description of Artificial Sequence: Synthetic oligonucleotide
cacuugauugacaggagua

SEQ ID NO: 240128 - RNA, 19 nt, Artificial Sequence
  Description of Artificial Sequence: Synthetic oligonucleotide
guucuaugaaaugaacucu

SEQ ID NO: 240129 - RNA, 19 nt, Artificial Sequence
  Description of Artificial Sequence: Synthetic oligonucleotide
acaccucucugguaaagua

SEQ ID NO: 240130 - RNA, 19 nt, Artificial Sequence
  Description of Artificial Sequence: Synthetic oligonucleotide
uaacaaccucaaugaggcc

SEQ ID NO: 240131 - RNA, 19 nt, Artificial Sequence
  Description of Artificial Sequence: Synthetic oligonucleotide
uacaccucucugguaaagu

SEQ ID NO: 240132 - RNA, 19 nt, Artificial Sequence
  Description of Artificial Sequence: Synthetic oligonucleotide
ucgcgugcaaggucagcag

SEQ ID NO: 240133 - RNA, 19 nt, Artificial Sequence
  Description of Artificial Sequence: Synthetic oligonucleotide
ucccaugccgccguaaaau

SEQ ID NO: 240134 - RNA, 19 nt, Artificial Sequence
  Description of Artificial Sequence: Synthetic oligonucleotide
auaucccacauagucccug

SEQ ID NO: 240135 - RNA, 19 nt, Artificial Sequence
  Description of Artificial Sequence: Synthetic oligonucleotide
aguuaacugcaaaguaacu

SEQ ID NO: 240136 - RNA, 19 nt, Artificial Sequence
  Description of Artificial Sequence: Synthetic oligonucleotide
uaugcagcguauguauaua

SEQ ID NO: 240137 - RNA, 19 nt, Artificial Sequence
  Description of Artificial Sequence: Synthetic oligonucleotide
cugccgcaaaucgucaccg

SEQ ID NO: 240138 - RNA, 19 nt, Artificial Sequence
  Description of Artificial Sequence: Synthetic oligonucleotide
aguccuuaagauacuguau

SEQ ID NO: 240139 - RNA, 19 nt, Artificial Sequence
  Description of Artificial Sequence: Synthetic oligonucleotide
accggccucuuuccagagc

SEQ ID NO: 240140 - RNA, 19 nt, Artificial Sequence
  Description of Artificial Sequence: Synthetic oligonucleotide
cauucucacacaguugaga

SEQ ID NO: 240141 - RNA, 19 nt, Artificial Sequence
  Description of Artificial Sequence: Synthetic oligonucleotide
acuggcgaaaccugccaaa

SEQ ID NO: 240142 - RNA, 19 nt, Artificial Sequence
  Description of Artificial Sequence: Synthetic oligonucleotide
ccgaauuuagauuugaaau

SEQ ID NO: 240143 - RNA, 19 nt, Artificial Sequence
  Description of Artificial Sequence: Synthetic oligonucleotide
ggauccacaguuaacugca

SEQ ID NO: 240144 - RNA, 19 nt, Artificial Sequence
  Description of Artificial Sequence: Synthetic oligonucleotide
cauauaugcagcguaugua

SEQ ID NO: 240145 - RNA, 19 nt, Artificial Sequence
  Description of Artificial Sequence: Synthetic oligonucleotide
gccgaauuuagauuugaaa

SEQ ID NO: 240146 - RNA, 19 nt, Artificial Sequence
  Description of Artificial Sequence: Synthetic oligonucleotide
caaguauuguuuguguucu

SEQ ID NO: 240147 - RNA, 19 nt, Artificial Sequence
  Description of Artificial Sequence: Synthetic oligonucleotide
caaaguaacuuaggcaaaa

SEQ ID NO: 240148 - RNA, 19 nt, Artificial Sequence
  Description of Artificial Sequence: Synthetic oligonucleotide
cauuugagaaacagagggu

SEQ ID NO: 240149 - RNA, 19 nt, Artificial Sequence
  Description of Artificial Sequence: Synthetic oligonucleotide
ugagcgccucgucaaacuu

SEQ ID NO: 240150 - RNA, 19 nt, Artificial Sequence
  Description of Artificial Sequence: Synthetic oligonucleotide
aggucauccccagaauugu

SEQ ID NO: 240151 - RNA, 19 nt, Artificial Sequence
  Description of Artificial Sequence: Synthetic oligonucleotide
ccaguaguuccuauugcac

SEQ ID NO: 240152 - RNA, 19 nt, Artificial Sequence
  Description of Artificial Sequence: Synthetic oligonucleotide
gagucaagaccgaugcuaa

SEQ ID NO: 240153 - RNA, 19 nt, Artificial Sequence
  Description of Artificial Sequence: Synthetic oligonucleotide
uggcaugaauccacuucaa

SEQ ID NO: 240154 - RNA, 19 nt, Artificial Sequence
  Description of Artificial Sequence: Synthetic oligonucleotide
cagauuaggcucuguggga

SEQ ID NO: 240155 - RNA, 19 nt, Artificial Sequence
  Description of Artificial Sequence: Synthetic oligonucleotide
ucccggacauacuggucug

SEQ ID NO: 240156 - RNA, 19 nt, Artificial Sequence
  Description of Artificial Sequence: Synthetic oligonucleotide
guaguucugcuggaccuug

SEQ ID NO: 240157 - RNA, 19 nt, Artificial Sequence
  Description of Artificial Sequence: Synthetic oligonucleotide
gccgcaaaguccaaauaag

SEQ ID NO: 240158 - RNA, 19 nt, Artificial Sequence
  Description of Artificial Sequence: Synthetic oligonucleotide
uugccgcaaaguccaaaua

SEQ ID NO: 240159 - RNA, 19 nt, Artificial Sequence
  Description of Artificial Sequence: Synthetic oligonucleotide
agccacguugcuacuguuc

SEQ ID NO: 240160 - RNA, 19 nt, Artificial Sequence
  Description of Artificial Sequence: Synthetic oligonucleotide
ugugagccauccaguucac

SEQ ID NO: 240161 - RNA, 19 nt, Artificial Sequence
  Description of Artificial Sequence: Synthetic oligonucleotide
guagcauuccucgcgugca

SEQ ID NO: 240162 - RNA, 19 nt, Artificial Sequence
  Description of Artificial Sequence: Synthetic oligonucleotide
aggauugagggcucccauu

SEQ ID NO: 240163 - RNA, 19 nt, Artificial Sequence
  Description of Artificial Sequence: Synthetic oligonucleotide
ugccgccguaaaaucagau

SEQ ID NO: 240164 - RNA, 19 nt, Artificial Sequence
  Description of Artificial Sequence: Synthetic oligonucleotide
ggaguuuauuccauaaaua

SEQ ID NO: 240165 - RNA, 19 nt, Artificial Sequence
  Description of Artificial Sequence: Synthetic oligonucleotide
cuguagucucugcggacug

SEQ ID NO: 240166 - RNA, 19 nt, Artificial Sequence
  Description of Artificial Sequence: Synthetic oligonucleotide
guuuggaguuuauuccaua

SEQ ID NO: 240167 - RNA, 19 nt, Artificial Sequence
  Description of Artificial Sequence: Synthetic oligonucleotide
ugguagcauuccucgcgug

SEQ ID NO: 240168 - RNA, 19 nt, Artificial Sequence
  Description of Artificial Sequence: Synthetic oligonucleotide
augacgaguccuggaagca

SEQ ID NO: 240169 - RNA, 19 nt, Artificial Sequence
  Description of Artificial Sequence: Synthetic oligonucleotide
augccgaauuuagauuuga

SEQ ID NO: 240170 - RNA, 19 nt, Artificial Sequence
  Description of Artificial Sequence: Synthetic oligonucleotide
caauugcucgguccagguc

SEQ ID NO: 240171 - RNA, 19 nt, Artificial Sequence
  Description of Artificial Sequence: Synthetic oligonucleotide
ugaguucgggaagcccugc

SEQ ID NO: 240172 - RNA, 19 nt, Artificial Sequence
  Description of Artificial Sequence: Synthetic oligonucleotide
acuaggagucaagaccgau

SEQ ID NO: 240173 - RNA, 19 nt, Artificial Sequence
  Description of Artificial Sequence: Synthetic oligonucleotide
uagcauuccucgcgugcaa

SEQ ID NO: 240174 - RNA, 19 nt, Artificial Sequence
  Description of Artificial Sequence: Synthetic oligonucleotide
agauuuccacguggcauga

SEQ ID NO: 240175 - RNA, 19 nt, Artificial Sequence
  Description of Artificial Sequence: Synthetic oligonucleotide
gccacguugcuacuguuca

SEQ ID NO: 240176 - RNA, 19 nt, Artificial Sequence
  Description of Artificial Sequence: Synthetic oligonucleotide
gcagcguauguauauauau

SEQ ID NO: 240177 - RNA, 19 nt, Artificial Sequence
  Description of Artificial Sequence: Synthetic oligonucleotide
uucauucccuuugcauuuc

SEQ ID NO: 240178 - RNA, 19 nt, Artificial Sequence
  Description of Artificial Sequence: Synthetic oligonucleotide
ugacgaguccuggaagcau

SEQ ID NO: 240179 - RNA, 19 nt, Artificial Sequence
  Description of Artificial Sequence: Synthetic oligonucleotide
uccucgcgugcaaggucag

SEQ ID NO: 240180 - RNA, 19 nt, Artificial Sequence
  Description of Artificial Sequence: Synthetic oligonucleotide
cuugucaccuagcacccua

SEQ ID NO: 240181 - RNA, 19 nt, Artificial Sequence
  Description of Artificial Sequence: Synthetic oligonucleotide
cucgcgugcaaggucagca

SEQ ID NO: 240182 - RNA, 19 nt, Artificial Sequence
  Description of Artificial Sequence: Synthetic oligonucleotide
ccaccuucgacuugacaug

SEQ ID NO: 240183 - RNA, 19 nt, Artificial Sequence
  Description of Artificial Sequence: Synthetic oligonucleotide
aacucccucuagaaauuuu

SEQ ID NO: 240184 - RNA, 19 nt, Artificial Sequence
  Description of Artificial Sequence: Synthetic oligonucleotide
gcaagagaguccuuaagau

SEQ ID NO: 240185 - RNA, 19 nt, Artificial Sequence
  Description of Artificial Sequence: Synthetic oligonucleotide
gugcaagugcaaaauggaa

SEQ ID NO: 240186 - RNA, 19 nt, Artificial Sequence
  Description of Artificial Sequence: Synthetic oligonucleotide
ggcaauauucaugacgagu

SEQ ID NO: 240187 - RNA, 19 nt, Artificial Sequence
  Description of Artificial Sequence: Synthetic oligonucleotide
cuacauagagaaacugcau

SEQ ID NO: 240188 - RNA, 19 nt, Artificial Sequence
  Description of Artificial Sequence: Synthetic oligonucleotide
cuugccgcaaaguccaaau

SEQ ID NO: 240189 - RNA, 19 nt, Artificial Sequence
  Description of Artificial Sequence: Synthetic oligonucleotide
gucaccuagcacccuaacu

SEQ ID NO: 240190 - RNA, 19 nt, Artificial Sequence
  Description of Artificial Sequence: Synthetic oligonucleotide
agguacucgcucucuuuua

SEQ ID NO: 240191 - RNA, 19 nt, Artificial Sequence
  Description of Artificial Sequence: Synthetic oligonucleotide
gugaguucgggaagcccug

SEQ ID NO: 240192 - RNA, 19 nt, Artificial Sequence
  Description of Artificial Sequence: Synthetic oligonucleotide
gguacucgcucucuuuuaa

SEQ ID NO: 240193 - RNA, 19 nt, Artificial Sequence
  Description of Artificial Sequence: Synthetic oligonucleotide
gauugucucagaggugcua

SEQ ID NO: 240194 - RNA, 19 nt, Artificial Sequence
  Description of Artificial Sequence: Synthetic oligonucleotide
cgccguaaaaucagauagg

SEQ ID NO: 240195 - RNA, 19 nt, Artificial Sequence
  Description of Artificial Sequence: Synthetic oligonucleotide
guucccaugccgccguaaa

SEQ ID NO: 240196 - RNA, 19 nt, Artificial Sequence
  Description of Artificial Sequence: Synthetic oligonucleotide
ugccgcaaaucgucaccgu

SEQ ID NO: 240197 - RNA, 19 nt, Artificial Sequence
  Description of Artificial Sequence: Synthetic oligonucleotide
agcgauugucucagaggug

SEQ ID NO: 240198 - RNA, 19 nt, Artificial Sequence
  Description of Artificial Sequence: Synthetic oligonucleotide
caaaccaguaguuccuauu

SEQ ID NO: 240199 - RNA, 19 nt, Artificial Sequence
  Description of Artificial Sequence: Synthetic oligonucleotide
ccuaacuauaugguaccuc

SEQ ID NO: 240200 - RNA, 19 nt, Artificial Sequence
  Description of Artificial Sequence: Synthetic oligonucleotide
ucccgagaauauguccaaa

SEQ ID NO: 240201 - RNA, 19 nt, Artificial Sequence
  Description of Artificial Sequence: Synthetic oligonucleotide
ccgcaaaguccaaauaaga

SEQ ID NO: 240202 - RNA, 19 nt, Artificial Sequence
  Description of Artificial Sequence: Synthetic oligonucleotide
cucugcggacugugugagc

SEQ ID NO: 240203 - RNA, 19 nt, Artificial Sequence
  Description of Artificial Sequence: Synthetic oligonucleotide
cacucugaguuucaggauu

SEQ ID NO: 240204 - RNA, 19 nt, Artificial Sequence
  Description of Artificial Sequence: Synthetic oligonucleotide
ggcgaaaccugccaaacuu

SEQ ID NO: 240205 - RNA, 19 nt, Artificial Sequence
  Description of Artificial Sequence: Synthetic oligonucleotide
caggcaaccuacagcauau

SEQ ID NO: 240206 - RNA, 19 nt, Artificial Sequence
  Description of Artificial Sequence: Synthetic oligonucleotide
ggaaugaugccaucaugau

SEQ ID NO: 240207 - RNA, 19 nt, Artificial Sequence
  Description of Artificial Sequence: Synthetic oligonucleotide
ccgaugcuaagaccuguag

SEQ ID NO: 240208 - RNA, 19 nt, Artificial Sequence
  Description of Artificial Sequence: Synthetic oligonucleotide
cgccucgucaaacuuuugc

SEQ ID NO: 240209 - RNA, 19 nt, Artificial Sequence
  Description of Artificial Sequence: Synthetic oligonucleotide
gcaggcaaccuacagcaua

SEQ ID NO: 240210 - RNA, 19 nt, Artificial Sequence
  Description of Artificial Sequence: Synthetic oligonucleotide
ccagaauuguacucuuuaa

SEQ ID NO: 240211 - RNA, 19 nt, Artificial Sequence
  Description of Artificial Sequence: Synthetic oligonucleotide
agcgccucgucaaacuuuu

SEQ ID NO: 240212 - RNA, 19 nt, Artificial Sequence
  Description of Artificial Sequence: Synthetic oligonucleotide
gccuuaguauugaagcaga

SEQ ID NO: 240213 - RNA, 19 nt, Artificial Sequence
  Description of Artificial Sequence: Synthetic oligonucleotide
gcagucaacaucagugcaa

SEQ ID NO: 240214 - RNA, 19 nt, Artificial Sequence
  Description of Artificial Sequence: Synthetic oligonucleotide
gugguucagauuaggcucu

SEQ ID NO: 240215 - RNA, 19 nt, Artificial Sequence
  Description of Artificial Sequence: Synthetic oligonucleotide
cagcguauguauauauauu

SEQ ID NO: 240216 - RNA, 19 nt, Artificial Sequence
  Description of Artificial Sequence: Synthetic oligonucleotide
ccguaaaaucagauaggca

SEQ ID NO: 240217 - RNA, 19 nt, Artificial Sequence
  Description of Artificial Sequence: Synthetic oligonucleotide
ccuauugcacauguuaaua

SEQ ID NO: 240218 - RNA, 19 nt, Artificial Sequence
  Description of Artificial Sequence: Synthetic oligonucleotide
ccuacagcauauucccgga

SEQ ID NO: 240219 - RNA, 19 nt, Artificial Sequence
  Description of Artificial Sequence: Synthetic oligonucleotide
gcacccuaacuauauggua

SEQ ID NO: 240220 - RNA, 19 nt, Artificial Sequence
  Description of Artificial Sequence: Synthetic oligonucleotide
cagcgucagcauguccugc

SEQ ID NO: 240221 - RNA, 19 nt, Artificial Sequence
  Description of Artificial Sequence: Synthetic oligonucleotide
gauccacaguuaacugcaa

SEQ ID NO: 240222 - RNA, 19 nt, Artificial Sequence
  Description of Artificial Sequence: Synthetic oligonucleotide
cccgagaauauguccaaaa

SEQ ID NO: 240223 - RNA, 19 nt, Artificial Sequence
  Description of Artificial Sequence: Synthetic oligonucleotide
cacuggcgaaaccugccaa

SEQ ID NO: 240224 - RNA, 19 nt, Artificial Sequence
  Description of Artificial Sequence: Synthetic oligonucleotide
ccggacauacuggucuggg

SEQ ID NO: 240225 - RNA, 19 nt, Artificial Sequence
  Description of Artificial Sequence: Synthetic oligonucleotide
cccaugccgccguaaaauc

SEQ ID NO: 240226 - RNA, 19 nt, Artificial Sequence
  Description of Artificial Sequence: Synthetic oligonucleotide
ccaugccgccguaaaauca

SEQ ID NO: 240227 - RNA, 19 nt, Artificial Sequence
  Description of Artificial Sequence: Synthetic oligonucleotide
cacuugcaccaacuguaaa

SEQ ID NO: 240228 - RNA, 19 nt, Artificial Sequence
  Description of Artificial Sequence: Synthetic oligonucleotide
cugagcgccucgucaaacu

SEQ ID NO: 240229 - RNA, 19 nt, Artificial Sequence
  Description of Artificial Sequence: Synthetic oligonucleotide
ccacguugcuacuguucag

SEQ ID NO: 240230 - RNA, 19 nt, Artificial Sequence
  Description of Artificial Sequence: Synthetic oligonucleotide
acggggugguucagauuag

SEQ ID NO: 240231 - RNA, 19 nt, Artificial Sequence
  Description of Artificial Sequence: Synthetic oligonucleotide
accgaugcuaagaccugua

SEQ ID NO: 240232 - RNA, 19 nt, Artificial Sequence
  Description of Artificial Sequence: Synthetic oligonucleotide
guacucgcucucuuuuaau

SEQ ID NO: 240233 - RNA, 19 nt, Artificial Sequence
  Description of Artificial Sequence: Synthetic oligonucleotide
gacgaguccuggaagcauu

SEQ ID NO: 240234 - RNA, 19 nt, Artificial Sequence
  Description of Artificial Sequence: Synthetic oligonucleotide
cagggugaacuccucaauu

SEQ ID NO: 240235 - RNA, 19 nt, Artificial Sequence
  Description of Artificial Sequence: Synthetic oligonucleotide
cugucgcaggcaaccuaca

SEQ ID NO: 240236 - RNA, 19 nt, Artificial Sequence
  Description of Artificial Sequence: Synthetic oligonucleotide
gccgccguaaaaucagaua

SEQ ID NO: 240237 - RNA, 19 nt, Artificial Sequence
  Description of Artificial Sequence: Synthetic oligonucleotide
accuagcacccuaacuaua

SEQ ID NO: 240238 - RNA, 19 nt, Artificial Sequence
  Description of Artificial Sequence: Synthetic oligonucleotide
gagcgaucuccuguugcua

SEQ ID NO: 240239 - RNA, 19 nt, Artificial Sequence
  Description of Artificial Sequence: Synthetic oligonucleotide
ggaguaguuuuggcaguga

SEQ ID NO: 240240 - RNA, 19 nt, Artificial Sequence
  Description of Artificial Sequence: Synthetic oligonucleotide
ggcaugaauccacuucaau

SEQ ID NO: 240241 - RNA, 19 nt, Artificial Sequence
  Description of Artificial Sequence: Synthetic oligonucleotide
acgaguccuggaagcauuu

SEQ ID NO: 240242 - RNA, 19 nt, Artificial Sequence
  Description of Artificial Sequence: Synthetic oligonucleotide
ccuagcacccuaacuauau

SEQ ID NO: 240243 - RNA, 19 nt, Artificial Sequence
  Description of Artificial Sequence: Synthetic oligonucleotide
ggcucauauuucaacacuu

SEQ ID NO: 240244 - RNA, 19 nt, Artificial Sequence
  Description of Artificial Sequence: Synthetic oligonucleotide
cugcggacugugugagcca

SEQ ID NO: 240245 - RNA, 19 nt, Artificial Sequence
  Description of Artificial Sequence: Synthetic oligonucleotide
cauuccucgcgugcaaggu

SEQ ID NO: 240246 - RNA, 19 nt, Artificial Sequence
  Description of Artificial Sequence: Synthetic oligonucleotide
gcguauguauauauauuau

SEQ ID NO: 240247 - RNA, 19 nt, Artificial Sequence
  Description of Artificial Sequence: Synthetic oligonucleotide
ggaccuugacauccauuua

SEQ ID NO: 240248 - RNA, 19 nt, Artificial Sequence
  Description of Artificial Sequence: Synthetic oligonucleotide
augccgccguaaaaucaga

SEQ ID NO: 240249 - RNA, 19 nt, Artificial Sequence
  Description of Artificial Sequence: Synthetic oligonucleotide
gcagccacguugcuacugu

SEQ ID NO: 240250 - RNA, 19 nt, Artificial Sequence
  Description of Artificial Sequence: Synthetic oligonucleotide
caccuucgacuugacaugu

SEQ ID NO: 240251 - RNA, 19 nt, Artificial Sequence
  Description of Artificial Sequence: Synthetic oligonucleotide
ccugagcgccucgucaaac

SEQ ID NO: 240252 - RNA, 19 nt, Artificial Sequence
  Description of Artificial Sequence: Synthetic oligonucleotide
ccgagaauauguccaaaau

SEQ ID NO: 240253 - RNA, 19 nt, Artificial Sequence
  Description of Artificial Sequence: Synthetic oligonucleotide
gguuuggaguuuauuccau

SEQ ID NO: 240254 - RNA, 19 nt, Artificial Sequence
  Description of Artificial Sequence: Synthetic oligonucleotide
cccggacauacuggucugg

SEQ ID NO: 240255 - RNA, 19 nt, Artificial Sequence
  Description of Artificial Sequence: Synthetic oligonucleotide
aggcaaccuacagcauauu

SEQ ID NO: 240256 - RNA, 19 nt, Artificial Sequence
  Description of Artificial Sequence: Synthetic oligonucleotide
ccucaccaauagauucuca

SEQ ID NO: 240257 - RNA, 19 nt, Artificial Sequence
  Description of Artificial Sequence: Synthetic oligonucleotide
agguccaaaccggccucuu

SEQ ID NO: 240258 - RNA, 19 nt, Artificial Sequence
  Description of Artificial Sequence: Synthetic oligonucleotide
gcguagcaucugcagcguc

SEQ ID NO: 240259 - RNA, 19 nt, Artificial Sequence
  Description of Artificial Sequence: Synthetic oligonucleotide
ggucauccccagaauugua

SEQ ID NO: 240260 - RNA, 19 nt, Artificial Sequence
  Description of Artificial Sequence: Synthetic oligonucleotide
cgcucucuuuuaaugccga

SEQ ID NO: 240261 - RNA, 19 nt, Artificial Sequence
  Description of Artificial Sequence: Synthetic oligonucleotide
accuucgacuugacauguu

SEQ ID NO: 240262 - RNA, 19 nt, Artificial Sequence
  Description of Artificial Sequence: Synthetic oligonucleotide
ccuuaguauugaagcagau

SEQ ID NO: 240263 - RNA, 19 nt, Artificial Sequence
  Description of Artificial Sequence: Synthetic oligonucleotide
gccagagcgaucuccuguu

SEQ ID NO: 240264 - RNA, 19 nt, Artificial Sequence
  Description of Artificial Sequence: Synthetic oligonucleotide
gccgcaaaucgucaccguu

SEQ ID NO: 240265 - RNA, 19 nt, Artificial Sequence
  Description of Artificial Sequence: Synthetic oligonucleotide
cagugacugugggaaauuu

SEQ ID NO: 240266 - RNA, 19 nt, Artificial Sequence
  Description of Artificial Sequence: Synthetic oligonucleotide
cauacuggucuggguaguu

SEQ ID NO: 240267 - RNA, 19 nt, Artificial Sequence
  Description of Artificial Sequence: Synthetic oligonucleotide
caaccucaaugaggccaga

SEQ ID NO: 240268 - RNA, 19 nt, Artificial Sequence
  Description of Artificial Sequence: Synthetic oligonucleotide
cucggcagucuugccgcaa

SEQ ID NO: 240269 - RNA, 19 nt, Artificial Sequence
  Description of Artificial Sequence: Synthetic oligonucleotide
ccgcaaaucgucaccguuu

SEQ ID NO: 240270 - RNA, 19 nt, Artificial Sequence
  Description of Artificial Sequence: Synthetic oligonucleotide
cggcagucuugccgcaaag

SEQ ID NO: 240271 - RNA, 19 nt, Artificial Sequence
  Description of Artificial Sequence: Synthetic oligonucleotide
gcgaaaccugccaaacuuu

SEQ ID NO: 240272 - RNA, 19 nt, Artificial Sequence
  Description of Artificial Sequence: Synthetic oligonucleotide
ccucgcgugcaaggucagc

SEQ ID NO: 240273 - RNA, 19 nt, Artificial Sequence
  Description of Artificial Sequence: Synthetic oligonucleotide
ccucuauuaagugcucuuu

SEQ ID NO: 240274 - RNA, 19 nt, Artificial Sequence
  Description of Artificial Sequence: Synthetic oligonucleotide
gucuugccgcaaaguccaa

SEQ ID NO: 240275 - RNA, 19 nt, Artificial Sequence
  Description of Artificial Sequence: Synthetic oligonucleotide
cagccacguugcuacuguu

SEQ ID NO: 240276 - RNA, 19 nt, Artificial Sequence
  Description of Artificial Sequence: Synthetic oligonucleotide
cccuaacuauaugguaccu

SEQ ID NO: 240277 - RNA, 19 nt, Artificial Sequence
  Description of Artificial Sequence: Synthetic oligonucleotide
gcgccucgucaaacuuuug

SEQ ID NO: 240278 - RNA, 19 nt, Artificial Sequence
  Description of Artificial Sequence: Synthetic oligonucleotide
cgcaaaucgucaccguuuu

SEQ ID NO: 240279 - RNA, 19 nt, Artificial Sequence
  Description of Artificial Sequence: Synthetic oligonucleotide
gcggacugugugagccauc

SEQ ID NO: 240280 - RNA, 19 nt, Artificial Sequence
  Description of Artificial Sequence: Synthetic oligonucleotide
cgauugucucagaggugcu

SEQ ID NO: 240281 - RNA, 19 nt, Artificial Sequence
  Description of Artificial Sequence: Synthetic oligonucleotide
aucauauauaaucaaguac

SEQ ID NO: 240282 - RNA, 19 nt, Artificial Sequence
  Description of Artificial Sequence: Synthetic oligonucleotide
ucauuuaucaucgucagcc

SEQ ID NO: 240283 - RNA, 19 nt, Artificial Sequence
  Description of Artificial Sequence: Synthetic oligonucleotide
ucuaaaugggacauugagg

SEQ ID NO: 240284 - RNA, 19 nt, Artificial Sequence
  Description of Artificial Sequence: Synthetic oligonucleotide
accauuauacacaagaaac

SEQ ID NO: 240285 - RNA, 19 nt, Artificial Sequence
  Description of Artificial Sequence: Synthetic oligonucleotide
ucuuaagacacauaagucu

SEQ ID NO: 240286 - RNA, 19 nt, Artificial Sequence
  Description of Artificial Sequence: Synthetic oligonucleotide
auauaaaggaaaucugggg

SEQ ID NO: 240287 - RNA, 19 nt, Artificial Sequence
  Description of Artificial Sequence: Synthetic oligonucleotide
aaucuaauacucaggaaac

SEQ ID NO: 240288 - RNA, 19 nt, Artificial Sequence
  Description of Artificial Sequence: Synthetic oligonucleotide
cuguuaagcaccaucaacc

SEQ ID NO: 240289 - RNA, 19 nt, Artificial Sequence
  Description of Artificial Sequence: Synthetic oligonucleotide
auggaaacaauuucggcuc

SEQ ID NO: 240290 - RNA, 19 nt, Artificial Sequence
  Description of Artificial Sequence: Synthetic oligonucleotide
ucgaauguccaccacaagc

SEQ ID NO: 240291 - RNA, 19 nt, Artificial Sequence
  Description of Artificial Sequence: Synthetic oligonucleotide
caaauuaggucccacgugg

SEQ ID NO: 240292 - RNA, 19 nt, Artificial Sequence
  Description of Artificial Sequence: Synthetic oligonucleotide
uggauaaauacucuuacua

SEQ ID NO: 240293 - RNA, 19 nt, Artificial Sequence
  Description of Artificial Sequence: Synthetic oligonucleotide
aagucgaagacccaauacu

SEQ ID NO: 240294 - RNA, 19 nt, Artificial Sequence
  Description of Artificial Sequence: Synthetic oligonucleotide
caaugagucaguuccauag

SEQ ID NO: 240295 - RNA, 19 nt, Artificial Sequence
  Description of Artificial Sequence: Synthetic oligonucleotide
uccaauuuggcacuggcgu

SEQ ID NO: 240296 - RNA, 19 nt, Artificial Sequence
  Description of Artificial Sequence: Synthetic oligonucleotide
auuccuaauagauuuauuu

SEQ ID NO: 240297 - RNA, 19 nt, Artificial Sequence
  Description of Artificial Sequence: Synthetic oligonucleotide
acaauuucggcuccugacg

SEQ ID NO: 240298 - RNA, 19 nt, Artificial Sequence
  Description of Artificial Sequence: Synthetic oligonucleotide
gcuacucacucuuagaugg

SEQ ID NO: 240299 - RNA, 19 nt, Artificial Sequence
  Description of Artificial Sequence: Synthetic oligonucleotide
aggaaggcgauggugaucc

SEQ ID NO: 240300 - RNA, 19 nt, Artificial Sequence
  Description of Artificial Sequence: Synthetic oligonucleotide
agcaagguaagacuuuuag

SEQ ID NO: 240301 - RNA, 19 nt, Artificial Sequence
  Description of Artificial Sequence: Synthetic oligonucleotide
cagauugcaagcuccauag

SEQ ID NO: 240302 - RNA, 19 nt, Artificial Sequence
  Description of Artificial Sequence: Synthetic oligonucleotide
uuacauuauuccuaauaga

SEQ ID NO: 240303 - RNA, 19 nt, Artificial Sequence
  Description of Artificial Sequence: Synthetic oligonucleotide
ucuaguagcuuuucuuaag

SEQ ID NO: 240304 - RNA, 19 nt, Artificial Sequence
  Description of Artificial Sequence: Synthetic oligonucleotide
ugaaaugacccgagaaccc

SEQ ID NO: 240305 - RNA, 19 nt, Artificial Sequence
  Description of Artificial Sequence: Synthetic oligonucleotide
agucauuuaucaucgucag

SEQ ID NO: 240306 - RNA, 19 nt, Artificial Sequence
  Description of Artificial Sequence: Synthetic oligonucleotide
caguaggccgacaacagcg

SEQ ID NO: 240307 - RNA, 19 nt, Artificial Sequence
  Description of Artificial Sequence: Synthetic oligonucleotide
uggacaaaacuucauuuaa

SEQ ID NO: 240308 - RNA, 19 nt, Artificial Sequence
  Description of Artificial Sequence: Synthetic oligonucleotide
uacgguauugcugagcuca

SEQ ID NO: 240309 - RNA, 19 nt, Artificial Sequence
  Description of Artificial Sequence: Synthetic oligonucleotide
aacuggaguaugucagagg

SEQ ID NO: 240310 - RNA, 19 nt, Artificial Sequence
  Description of Artificial Sequence: Synthetic oligonucleotide
gacaccgcguguuuaaugc

SEQ ID NO: 240311 - RNA, 19 nt, Artificial Sequence
  Description of Artificial Sequence: Synthetic oligonucleotide
ucggggacagugaaugugg

SEQ ID NO: 240312 - RNA, 19 nt, Artificial Sequence
  Description of Artificial Sequence: Synthetic oligonucleotide
aauacagcgcaugacgcug

SEQ ID NO: 240313 - RNA, 19 nt, Artificial Sequence
  Description of Artificial Sequence: Synthetic oligonucleotide
guggcgaucaccucgucgg

SEQ ID NO: 240314 - RNA, 19 nt, Artificial Sequence
  Description of Artificial Sequence: Synthetic oligonucleotide
ugugguugguacuaauuac

SEQ ID NO: 240315 - RNA, 19 nt, Artificial Sequence
  Description of Artificial Sequence: Synthetic oligonucleotide
ugcacacucaaccuuuuac

SEQ ID NO: 240316 - RNA, 19 nt, Artificial Sequence
  Description of Artificial Sequence: Synthetic oligonucleotide
uggaggaccgaucauuugu

SEQ ID NO: 240317 - RNA, 19 nt, Artificial Sequence
  Description of Artificial Sequence: Synthetic oligonucleotide
agaacgaauauaaaggaaa

SEQ ID NO: 240318 - RNA, 19 nt, Artificial Sequence
  Description of Artificial Sequence: Synthetic oligonucleotide
gaucagcguagcuaggaag

SEQ ID NO: 240319 - RNA, 19 nt, Artificial Sequence
  Description of Artificial Sequence: Synthetic oligonucleotide
uguuaagcaccaucaaccu

SEQ ID NO: 240320 - RNA, 19 nt, Artificial Sequence
  Description of Artificial Sequence: Synthetic oligonucleotide
aaacuggaguaugucagag

SEQ ID NO: 240321 - RNA, 19 nt, Artificial Sequence
  Description of Artificial Sequence: Synthetic oligonucleotide
uacacaacccuauauuuua

SEQ ID NO: 240322 - RNA, 19 nt, Artificial Sequence
  Description of Artificial Sequence: Synthetic oligonucleotide
uuagguaaguaguccuugc

SEQ ID NO: 240323 - RNA, 19 nt, Artificial Sequence
  Description of Artificial Sequence: Synthetic oligonucleotide
caagaacgaauauaaagga

SEQ ID NO: 240324 - RNA, 19 nt, Artificial Sequence
  Description of Artificial Sequence: Synthetic oligonucleotide
aaacugagugaucagcgua

SEQ ID NO: 240325 - RNA, 19 nt, Artificial Sequence
  Description of Artificial Sequence: Synthetic oligonucleotide
gaugccaacgaacaccgca

SEQ ID NO: 240326 - RNA, 19 nt, Artificial Sequence
  Description of Artificial Sequence: Synthetic oligonucleotide
ggauaaauacucuuacuac

SEQ ID NO: 240327 - RNA, 19 nt, Artificial Sequence
  Description of Artificial Sequence: Synthetic oligonucleotide
uucacaaaacuggaguaug

SEQ ID NO: 240328 - RNA, 19 nt, Artificial Sequence
  Description of Artificial Sequence: Synthetic oligonucleotide
ucuaaccaaaguuguuuca

SEQ ID NO: 240329 - RNA, 19 nt, Artificial Sequence
  Description of Artificial Sequence: Synthetic oligonucleotide
aucagcguagcuaggaagg

SEQ ID NO: 240330 - RNA, 19 nt, Artificial Sequence
  Description of Artificial Sequence: Synthetic oligonucleotide
aggucguggugccagcugc

SEQ ID NO: 240331 - RNA, 19 nt, Artificial Sequence
  Description of Artificial Sequence: Synthetic oligonucleotide
cacugugaggcuuuuccgg

SEQ ID NO: 240332 - RNA, 19 nt, Artificial Sequence
  Description of Artificial Sequence: Synthetic oligonucleotide
aaccuuuuacaaggcaauc

SEQ ID NO: 240333 - RNA, 19 nt, Artificial Sequence
  Description of Artificial Sequence: Synthetic oligonucleotide
uugguacuaauuaccauuu

SEQ ID NO: 240334 - RNA, 19 nt, Artificial Sequence
  Description of Artificial Sequence: Synthetic oligonucleotide
aggcuuuuccggaacaccc

SEQ ID NO: 240335 - RNA, 19 nt, Artificial Sequence
  Description of Artificial Sequence: Synthetic oligonucleotide
gauacgguauugcugagcu

SEQ ID NO: 240336 - RNA, 19 nt, Artificial Sequence
  Description of Artificial Sequence: Synthetic oligonucleotide
agaucggggacagugaaug

SEQ ID NO: 240337 - RNA, 19 nt, Artificial Sequence
  Description of Artificial Sequence: Synthetic oligonucleotide
uacucaggaaacuggcccc

SEQ ID NO: 240338 - RNA, 19 nt, Artificial Sequence
  Description of Artificial Sequence: Synthetic oligonucleotide
aggacuagggugcaguggu

SEQ ID NO: 240339 - RNA, 19 nt, Artificial Sequence
  Description of Artificial Sequence: Synthetic oligonucleotide
cuagucuagaccaugugaa

SEQ ID NO: 240340 - RNA, 19 nt, Artificial Sequence
  Description of Artificial Sequence: Synthetic oligonucleotide
agacccacgugugagcgcc

SEQ ID NO: 240341 - RNA, 19 nt, Artificial Sequence
  Description of Artificial Sequence: Synthetic oligonucleotide
cauuuaucaucgucagccc

SEQ ID NO: 240342 - RNA, 19 nt, Artificial Sequence
  Description of Artificial Sequence: Synthetic oligonucleotide
aagaacgaauauaaaggaa

SEQ ID NO: 240343 - RNA, 19 nt, Artificial Sequence
  Description of Artificial Sequence: Synthetic oligonucleotide
aucacggugcagucauagc

SEQ ID NO: 240344 - RNA, 19 nt, Artificial Sequence
  Description of Artificial Sequence: Synthetic oligonucleotide
cauaagucuuagcugaaga

SEQ ID NO: 240345 - RNA, 19 nt, Artificial Sequence
  Description of Artificial Sequence: Synthetic oligonucleotide
gcugauacgguauugcuga

SEQ ID NO: 240346 - RNA, 19 nt, Artificial Sequence
  Description of Artificial Sequence: Synthetic oligonucleotide
gucuagaccaugugaacac

SEQ ID NO: 240347 - RNA, 19 nt, Artificial Sequence
  Description of Artificial Sequence: Synthetic oligonucleotide
caauuuggcacuggcgugg

SEQ ID NO: 240348 - RNA, 19 nt, Artificial Sequence
  Description of Artificial Sequence: Synthetic oligonucleotide
ucccacguggucuaugcca

SEQ ID NO: 240349 - RNA, 19 nt, Artificial Sequence
  Description of Artificial Sequence: Synthetic oligonucleotide
uggaaacaauuucggcucc

SEQ ID NO: 240350 - RNA, 19 nt, Artificial Sequence
  Description of Artificial Sequence: Synthetic oligonucleotide
ucacucuacucuucucucc

SEQ ID NO: 240351 - RNA, 19 nt, Artificial Sequence
  Description of Artificial Sequence: Synthetic oligonucleotide
agaccguggacaaaacuuc

SEQ ID NO: 240352 - RNA, 19 nt, Artificial Sequence
  Description of Artificial Sequence: Synthetic oligonucleotide
augacgcuggcccacucuc

SEQ ID NO: 240353 - RNA, 19 nt, Artificial Sequence
  Description of Artificial Sequence: Synthetic oligonucleotide
agucuagaccaugugaaca

SEQ ID NO: 240354 - RNA, 19 nt, Artificial Sequence
  Description of Artificial Sequence: Synthetic oligonucleotide
accuuuggaggaccgauca

SEQ ID NO: 240355 - RNA, 19 nt, Artificial Sequence
  Description of Artificial Sequence: Synthetic oligonucleotide
accucgucggggaagagcg

SEQ ID NO: 240356 - RNA, 19 nt, Artificial Sequence
  Description of Artificial Sequence: Synthetic oligonucleotide
cacucuacucuucucuccc

SEQ ID NO: 240357 - RNA, 19 nt, Artificial Sequence
  Description of Artificial Sequence: Synthetic oligonucleotide
gacccgagaacccucucug

SEQ ID NO: 240358 - RNA, 19 nt, Artificial Sequence
  Description of Artificial Sequence: Synthetic oligonucleotide
agauugucuacaaaccccu

SEQ ID NO: 240359 - RNA, 19 nt, Artificial Sequence
  Description of Artificial Sequence: Synthetic oligonucleotide
ggaagagcgugacauuccg

SEQ ID NO: 240360 - RNA, 19 nt, Artificial Sequence
  Description of Artificial Sequence: Synthetic oligonucleotide
ccaauacuugcaaauuagg

SEQ ID NO: 240361 - RNA, 19 nt, Artificial Sequence
  Description of Artificial Sequence: Synthetic oligonucleotide
uugcuagucuagaccaugu

SEQ ID NO: 240362 - RNA, 19 nt, Artificial Sequence
  Description of Artificial Sequence: Synthetic oligonucleotide
agauugcaagcuccauagg

SEQ ID NO: 240363 - RNA, 19 nt, Artificial Sequence
  Description of Artificial Sequence: Synthetic oligonucleotide
ugcuagucuagaccaugug

SEQ ID NO: 240364 - RNA, 19 nt, Artificial Sequence
  Description of Artificial Sequence: Synthetic oligonucleotide
auguguacugguagacacc

SEQ ID NO: 240365 - RNA, 19 nt, Artificial Sequence
  Description of Artificial Sequence: Synthetic oligonucleotide
agcauggacgugaaccucg

SEQ ID NO: 240366 - RNA, 19 nt, Artificial Sequence
  Description of Artificial Sequence: Synthetic oligonucleotide
acgugaaccucgcugggug

SEQ ID NO: 240367 - RNA, 19 nt, Artificial Sequence
  Description of Artificial Sequence: Synthetic oligonucleotide
gguaaguaguccuugccuc

SEQ ID NO: 240368 - RNA, 19 nt, Artificial Sequence
  Description of Artificial Sequence: Synthetic oligonucleotide
gacgacugaaacagcagac

SEQ ID NO: 240369 - RNA, 19 nt, Artificial Sequence
  Description of Artificial Sequence: Synthetic oligonucleotide
acagauugcaagcuccaua

SEQ ID NO: 240370 - RNA, 19 nt, Artificial Sequence
  Description of Artificial Sequence: Synthetic oligonucleotide
guugguacuaauuaccauu

SEQ ID NO: 240371 - RNA, 19 nt, Artificial Sequence
  Description of Artificial Sequence: Synthetic oligonucleotide
uagucuagaccaugugaac

SEQ ID NO: 240372 - RNA, 19 nt, Artificial Sequence
  Description of Artificial Sequence: Synthetic oligonucleotide
cuggguguucagaucgggg

SEQ ID NO: 240373 - RNA, 19 nt, Artificial Sequence
  Description of Artificial Sequence: Synthetic oligonucleotide
caauacuugcaaauuaggu

SEQ ID NO: 240374 - RNA, 19 nt, Artificial Sequence
  Description of Artificial Sequence: Synthetic oligonucleotide
ugaucagcguagcuaggaa

SEQ ID NO: 240375 - RNA, 19 nt, Artificial Sequence
  Description of Artificial Sequence: Synthetic oligonucleotide
uugaagucgaagacccaau

SEQ ID NO: 240376 - RNA, 19 nt, Artificial Sequence
  Description of Artificial Sequence: Synthetic oligonucleotide
uacugguagacaccauuau

SEQ ID NO: 240377 - RNA, 19 nt, Artificial Sequence
  Description of Artificial Sequence: Synthetic oligonucleotide
aguguaccugcuauaaacu

SEQ ID NO: 240378 - RNA, 19 nt, Artificial Sequence
  Description of Artificial Sequence: Synthetic oligonucleotide
ugacccgagaacccucucu

SEQ ID NO: 240379 - RNA, 19 nt, Artificial Sequence
  Description of Artificial Sequence: Synthetic oligonucleotide
auggcaacuugcuuugaau

SEQ ID NO: 240380 - RNA, 19 nt, Artificial Sequence
  Description of Artificial Sequence: Synthetic oligonucleotide
gcauacaagacaccgcgug

SEQ ID NO: 240381 - RNA, 19 nt, Artificial Sequence
  Description of Artificial Sequence: Synthetic oligonucleotide
uccggaacacccauagcua

SEQ ID NO: 240382 - RNA, 19 nt, Artificial Sequence
  Description of Artificial Sequence: Synthetic oligonucleotide
cacccauagcuaacugucg

SEQ ID NO: 240383 - RNA, 19 nt, Artificial Sequence
  Description of Artificial Sequence: Synthetic oligonucleotide
accgcaauacagcgcauga

SEQ ID NO: 240384 - RNA, 19 nt, Artificial Sequence
  Description of Artificial Sequence: Synthetic oligonucleotide
accacgccgaaagagaaga

SEQ ID NO: 240385 - RNA, 19 nt, Artificial Sequence
  Description of Artificial Sequence: Synthetic oligonucleotide
gagcgaucgaauguccacc

SEQ ID NO: 240386 - RNA, 19 nt, Artificial Sequence
  Description of Artificial Sequence: Synthetic oligonucleotide
gucauuuaucaucgucagc

SEQ ID NO: 240387 - RNA, 19 nt, Artificial Sequence
  Description of Artificial Sequence: Synthetic oligonucleotide
gaucgaauguccaccacaa

SEQ ID NO: 240388 - RNA, 19 nt, Artificial Sequence
  Description of Artificial Sequence: Synthetic oligonucleotide
uuuccggaacacccauagc

SEQ ID NO: 240389 - RNA, 19 nt, Artificial Sequence
  Description of Artificial Sequence: Synthetic oligonucleotide
guggacaaaacuucauuua

SEQ ID NO: 240390 - RNA, 19 nt, Artificial Sequence
  Description of Artificial Sequence: Synthetic oligonucleotide
caucacggugcagucauag

SEQ ID NO: 240391 - RNA, 19 nt, Artificial Sequence
  Description of Artificial Sequence: Synthetic oligonucleotide
cacgccgaaagagaagagc

SEQ ID NO: 240392 - RNA, 19 nt, Artificial Sequence
  Description of Artificial Sequence: Synthetic oligonucleotide
caccgcguguuuaaugcag

SEQ ID NO: 240393 - RNA, 19 nt, Artificial Sequence
  Description of Artificial Sequence: Synthetic oligonucleotide
acugugacgccuccugaga

SEQ ID NO: 240394 - RNA, 19 nt, Artificial Sequence
  Description of Artificial Sequence: Synthetic oligonucleotide
guguuuaaugcagugaccu

SEQ ID NO: 240395 - RNA, 19 nt, Artificial Sequence
  Description of Artificial Sequence: Synthetic oligonucleotide
agcgaucgaauguccacca

SEQ ID NO: 240396 - RNA, 19 nt, Artificial Sequence
  Description of Artificial Sequence: Synthetic oligonucleotide
acgccgaaagagaagagca

SEQ ID NO: 240397 - RNA, 19 nt, Artificial Sequence
  Description of Artificial Sequence: Synthetic oligonucleotide
ucaaugagucaguuccaua

SEQ ID NO: 240398 - RNA, 19 nt, Artificial Sequence
  Description of Artificial Sequence: Synthetic oligonucleotide
aucuaauacucaggaaacu

SEQ ID NO: 240399 - RNA, 19 nt, Artificial Sequence
  Description of Artificial Sequence: Synthetic oligonucleotide
cacugugacgccuccugag

SEQ ID NO: 240400 - RNA, 19 nt, Artificial Sequence
  Description of Artificial Sequence: Synthetic oligonucleotide
cuucgggagcgaucgaaug

SEQ ID NO: 240401 - RNA, 19 nt, Artificial Sequence
  Description of Artificial Sequence: Synthetic oligonucleotide
ugccguucccgcucgcggg

SEQ ID NO: 240402 - RNA, 19 nt, Artificial Sequence
  Description of Artificial Sequence: Synthetic oligonucleotide
gcuagucuagaccauguga

SEQ ID NO: 240403 - RNA, 19 nt, Artificial Sequence
  Description of Artificial Sequence: Synthetic oligonucleotide
gguaagacuuuuagguaag

SEQ ID NO: 240404 - RNA, 19 nt, Artificial Sequence
  Description of Artificial Sequence: Synthetic oligonucleotide
uacucuucucuccccgccu

SEQ ID NO: 240405 - RNA, 19 nt, Artificial Sequence
  Description of Artificial Sequence: Synthetic oligonucleotide
aacagcucacgacgguaaa

SEQ ID NO: 240406 - RNA, 19 nt, Artificial Sequence
  Description of Artificial Sequence: Synthetic oligonucleotide
ucuagaccaugugaacacu

SEQ ID NO: 240407 - RNA, 19 nt, Artificial Sequence
  Description of Artificial Sequence: Synthetic oligonucleotide
aucggggacagugaaugug

SEQ ID NO: 240408 - RNA, 19 nt, Artificial Sequence
  Description of Artificial Sequence: Synthetic oligonucleotide
auacgguauugcugagcuc

SEQ ID NO: 240409 - RNA, 19 nt, Artificial Sequence
  Description of Artificial Sequence: Synthetic oligonucleotide
aggaccgaucauuuguuuu

SEQ ID NO: 240410 - RNA, 19 nt, Artificial Sequence
  Description of Artificial Sequence: Synthetic oligonucleotide
gaaacugagugaucagcgu

SEQ ID NO: 240411 - RNA, 19 nt, Artificial Sequence
  Description of Artificial Sequence: Synthetic oligonucleotide
caauuucggcuccugacga

SEQ ID NO: 240412 - RNA, 19 nt, Artificial Sequence
  Description of Artificial Sequence: Synthetic oligonucleotide
ugugacgccuccugagaaa

SEQ ID NO: 240413 - RNA, 19 nt, Artificial Sequence
  Description of Artificial Sequence: Synthetic oligonucleotide
gccgcaaucaugccucgcg

SEQ ID NO: 240414 - RNA, 19 nt, Artificial Sequence
  Description of Artificial Sequence: Synthetic oligonucleotide
agaacccucucuggaacag

SEQ ID NO: 240415 - RNA, 19 nt, Artificial Sequence
  Description of Artificial Sequence: Synthetic oligonucleotide
cagacguggucgugcagcc

SEQ ID NO: 240416 - RNA, 19 nt, Artificial Sequence
  Description of Artificial Sequence: Synthetic oligonucleotide
cuugaagucgaagacccaa

SEQ ID NO: 240417 - RNA, 19 nt, Artificial Sequence
  Description of Artificial Sequence: Synthetic oligonucleotide
agcguagcuaggaaggcga

SEQ ID NO: 240418 - RNA, 19 nt, Artificial Sequence
  Description of Artificial Sequence: Synthetic oligonucleotide
gcuauaaacuauuggcaaa

SEQ ID NO: 240419 - RNA, 19 nt, Artificial Sequence
  Description of Artificial Sequence: Synthetic oligonucleotide
auaccuuuggaggaccgau

SEQ ID NO: 240420 - RNA, 19 nt, Artificial Sequence
  Description of Artificial Sequence: Synthetic oligonucleotide
ucguccuauguuucccacu

SEQ ID NO: 240421 - RNA, 19 nt, Artificial Sequence
  Description of Artificial Sequence: Synthetic oligonucleotide
gcaauacagcgcaugacgc

SEQ ID NO: 240422 - RNA, 19 nt, Artificial Sequence
  Description of Artificial Sequence: Synthetic oligonucleotide
caaucaugccucgcgggag

SEQ ID NO: 240423 - RNA, 19 nt, Artificial Sequence
  Description of Artificial Sequence: Synthetic oligonucleotide
ucgggagcgaucgaauguc

SEQ ID NO: 240424 - RNA, 19 nt, Artificial Sequence
  Description of Artificial Sequence: Synthetic oligonucleotide
gaaaugacccgagaacccu

SEQ ID NO: 240425 - RNA, 19 nt, Artificial Sequence
  Description of Artificial Sequence: Synthetic oligonucleotide
auacaagacaccgcguguu

SEQ ID NO: 240426 - RNA, 19 nt, Artificial Sequence
  Description of Artificial Sequence: Synthetic oligonucleotide
uccugacgacugaaacagc

SEQ ID NO: 240427 - RNA, 19 nt, Artificial Sequence
  Description of Artificial Sequence: Synthetic oligonucleotide
cagcguagcuaggaaggcg

SEQ ID NO: 240428 - RNA, 19 nt, Artificial Sequence
  Description of Artificial Sequence: Synthetic oligonucleotide
ggagcgaucgaauguccac

SEQ ID NO: 240429 - RNA, 19 nt, Artificial Sequence
  Description of Artificial Sequence: Synthetic oligonucleotide
ugguacuaauuaccauuuu

SEQ ID NO: 240430 - RNA, 19 nt, Artificial Sequence
  Description of Artificial Sequence: Synthetic oligonucleotide
ucgucggggaagagcguga

SEQ ID NO: 240431 - RNA, 19 nt, Artificial Sequence
  Description of Artificial Sequence: Synthetic oligonucleotide
caggcaccgagcuucuguc

SEQ ID NO: 240432 - RNA, 19 nt, Artificial Sequence
  Description of Artificial Sequence: Synthetic oligonucleotide
uccagaccguggacaaaac

SEQ ID NO: 240433 - RNA, 19 nt, Artificial Sequence
  Description of Artificial Sequence: Synthetic oligonucleotide
agcaccacgccgaaagaga

SEQ ID NO: 240434 - RNA, 19 nt, Artificial Sequence
  Description of Artificial Sequence: Synthetic oligonucleotide
cuaacugucguccuauguu

SEQ ID NO: 240435 - RNA, 19 nt, Artificial Sequence
  Description of Artificial Sequence: Synthetic oligonucleotide
ggauugcccagaaauccag

SEQ ID NO: 240436 - RNA, 19 nt, Artificial Sequence
  Description of Artificial Sequence: Synthetic oligonucleotide
acaccgcguguuuaaugca

SEQ ID NO: 240437 - RNA, 19 nt, Artificial Sequence
  Description of Artificial Sequence: Synthetic oligonucleotide
cugccguucccgcucgcgg

SEQ ID NO: 240438 - RNA, 19 nt, Artificial Sequence
  Description of Artificial Sequence: Synthetic oligonucleotide
gaacagcucacgacgguaa

SEQ ID NO: 240439 - RNA, 19 nt, Artificial Sequence
  Description of Artificial Sequence: Synthetic oligonucleotide
cagaccguggacaaaacuu

SEQ ID NO: 240440 - RNA, 19 nt, Artificial Sequence
  Description of Artificial Sequence: Synthetic oligonucleotide
ugccaacgaacaccgcaau

SEQ ID NO: 240441 - RNA, 19 nt, Artificial Sequence
  Description of Artificial Sequence: Synthetic oligonucleotide
gagacccacgugugagcgc

SEQ ID NO: 240442 - RNA, 19 nt, Artificial Sequence
  Description of Artificial Sequence: Synthetic oligonucleotide
agcgagaccugcagauggg

SEQ ID NO: 240443 - RNA, 19 nt, Artificial Sequence
  Description of Artificial Sequence: Synthetic oligonucleotide
gaccguggacaaaacuuca

SEQ ID NO: 240444 - RNA, 19 nt, Artificial Sequence
  Description of Artificial Sequence: Synthetic oligonucleotide
ggcgugguugaugccaacg

SEQ ID NO: 240445 - RNA, 19 nt, Artificial Sequence
  Description of Artificial Sequence: Synthetic oligonucleotide
cacguggucuaugccauuc

SEQ ID NO: 240446 - RNA, 19 nt, Artificial Sequence
  Description of Artificial Sequence: Synthetic oligonucleotide
ccaauuuggcacuggcgug

SEQ ID NO: 240447 - RNA, 19 nt, Artificial Sequence
  Description of Artificial Sequence: Synthetic oligonucleotide
ggguguucagaucggggac

SEQ ID NO: 240448 - RNA, 19 nt, Artificial Sequence
  Description of Artificial Sequence: Synthetic oligonucleotide
ccauuauacacaagaaacu

SEQ ID NO: 240449 - RNA, 19 nt, Artificial Sequence
  Description of Artificial Sequence: Synthetic oligonucleotide
augccaacgaacaccgcaa

SEQ ID NO: 240450 - RNA, 19 nt, Artificial Sequence
  Description of Artificial Sequence: Synthetic oligonucleotide
acgguauugcugagcucac

SEQ ID NO: 240451 - RNA, 19 nt, Artificial Sequence
  Description of Artificial Sequence: Synthetic oligonucleotide
cauacaagacaccgcgugu

SEQ ID NO: 240452 - RNA, 19 nt, Artificial Sequence
  Description of Artificial Sequence: Synthetic oligonucleotide
ggacgugaaccucgcuggg

SEQ ID NO: 240453 - RNA, 19 nt, Artificial Sequence
  Description of Artificial Sequence: Synthetic oligonucleotide
cguccuauguuucccacug

SEQ ID NO: 240454 - RNA, 19 nt, Artificial Sequence
  Description of Artificial Sequence: Synthetic oligonucleotide
ccagacguggucgugcagc

SEQ ID NO: 240455 - RNA, 19 nt, Artificial Sequence
  Description of Artificial Sequence: Synthetic oligonucleotide
caauacagcgcaugacgcu

SEQ ID NO: 240456 - RNA, 19 nt, Artificial Sequence
  Description of Artificial Sequence: Synthetic oligonucleotide
caaggccgcuucgggagcg

SEQ ID NO: 240457 - RNA, 19 nt, Artificial Sequence
  Description of Artificial Sequence: Synthetic oligonucleotide
caccgcaauacagcgcaug

SEQ ID NO: 240458 - RNA, 19 nt, Artificial Sequence
  Description of Artificial Sequence: Synthetic oligonucleotide
gcucagauugguuuucaua

SEQ ID NO: 240459 - RNA, 19 nt, Artificial Sequence
  Description of Artificial Sequence: Synthetic oligonucleotide
ugaaccucgcuggguguuc

SEQ ID NO: 240460 - RNA, 19 nt, Artificial Sequence
  Description of Artificial Sequence: Synthetic oligonucleotide
acaagacaccgcguguuua

SEQ ID NO: 240461 - RNA, 19 nt, Artificial Sequence
  Description of Artificial Sequence: Synthetic oligonucleotide
acacaacccuauauuuuaa

SEQ ID NO: 240462 - RNA, 19 nt, Artificial Sequence
  Description of Artificial Sequence: Synthetic oligonucleotide
ccuauguuucccacuguga

SEQ ID NO: 240463 - RNA, 19 nt, Artificial Sequence
  Description of Artificial Sequence: Synthetic oligonucleotide
gucccacguggucuaugcc

SEQ ID NO: 240464 - RNA, 19 nt, Artificial Sequence
  Description of Artificial Sequence: Synthetic oligonucleotide
ggguacaguaggccgacaa

SEQ ID NO: 240465 - RNA, 19 nt, Artificial Sequence
  Description of Artificial Sequence: Synthetic oligonucleotide
cugugacgccuccugagaa

SEQ ID NO: 240466 - RNA, 19 nt, Artificial Sequence
  Description of Artificial Sequence: Synthetic oligonucleotide
cuuagaugguccagaccgu

SEQ ID NO: 240467 - RNA, 19 nt, Artificial Sequence
  Description of Artificial Sequence: Synthetic oligonucleotide
ucggcuccugacgacugaa

SEQ ID NO: 240468 - RNA, 19 nt, Artificial Sequence
  Description of Artificial Sequence: Synthetic oligonucleotide
uugccuccauuugcuaguc

SEQ ID NO: 240469 - RNA, 19 nt, Artificial Sequence
  Description of Artificial Sequence: Synthetic oligonucleotide
caguuuacuccagacauuu

SEQ ID NO: 240470 - RNA, 19 nt, Artificial Sequence
  Description of Artificial Sequence: Synthetic oligonucleotide
cgcaaucaugccucgcggg

SEQ ID NO: 240471 - RNA, 19 nt, Artificial Sequence
  Description of Artificial Sequence: Synthetic oligonucleotide
ccgcaaucaugccucgcgg

SEQ ID NO: 240472 - RNA, 19 nt, Artificial Sequence
  Description of Artificial Sequence: Synthetic oligonucleotide
cccauagcuaacugucguc

SEQ ID NO: 240473 - RNA, 19 nt, Artificial Sequence
  Description of Artificial Sequence: Synthetic oligonucleotide
gcgugguugaugccaacga

SEQ ID NO: 240474 - RNA, 19 nt, Artificial Sequence
  Description of Artificial Sequence: Synthetic oligonucleotide
ccacaagcccaaagacagg

SEQ ID NO: 240475 - RNA, 19 nt, Artificial Sequence
  Description of Artificial Sequence: Synthetic oligonucleotide
accguggacaaaacuucau

SEQ ID NO: 240476 - RNA, 19 nt, Artificial Sequence
  Description of Artificial Sequence: Synthetic oligonucleotide
acgcuggcccacucucucu

SEQ ID NO: 240477 - RNA, 19 nt, Artificial Sequence
  Description of Artificial Sequence: Synthetic oligonucleotide
cuagaccaugugaacacuu

SEQ ID NO: 240478 - RNA, 19 nt, Artificial Sequence
  Description of Artificial Sequence: Synthetic oligonucleotide
gacccaauacuugcaaauu

SEQ ID NO: 240479 - RNA, 19 nt, Artificial Sequence
  Description of Artificial Sequence: Synthetic oligonucleotide
uguucagaucggggacagu

SEQ ID NO: 240480 - RNA, 19 nt, Artificial Sequence
  Description of Artificial Sequence: Synthetic oligonucleotide
ucaugccucgcgggaggcu

SEQ ID NO: 240481 - RNA, 19 nt, Artificial Sequence
  Description of Artificial Sequence: Synthetic oligonucleotide
guaagacuuuuagguaagu

SEQ ID NO: 240482 - RNA, 19 nt, Artificial Sequence
  Description of Artificial Sequence: Synthetic oligonucleotide
gguugguacuaauuaccau

SEQ ID NO: 240483 - RNA, 19 nt, Artificial Sequence
  Description of Artificial Sequence: Synthetic oligonucleotide
gaggaccgaucauuuguuu

SEQ ID NO: 240484 - RNA, 19 nt, Artificial Sequence
  Description of Artificial Sequence: Synthetic oligonucleotide
ggaacagcucacgacggua

SEQ ID NO: 240485 - RNA, 19 nt, Artificial Sequence
  Description of Artificial Sequence: Synthetic oligonucleotide
ccgcguguuuaaugcagug

SEQ ID NO: 240486 - RNA, 19 nt, Artificial Sequence
  Description of Artificial Sequence: Synthetic oligonucleotide
ggcaccgagcuucuguccu

SEQ ID NO: 240487 - RNA, 19 nt, Artificial Sequence
  Description of Artificial Sequence: Synthetic oligonucleotide
gcgagaccugcagaugggc

SEQ ID NO: 240488 - RNA, 19 nt, Artificial Sequence
  Description of Artificial Sequence: Synthetic oligonucleotide
gcauggacgugaaccucgc

SEQ ID NO: 240489 - RNA, 19 nt, Artificial Sequence
  Description of Artificial Sequence: Synthetic oligonucleotide
caugacgcuggcccacucu

SEQ ID NO: 240490 - RNA, 19 nt, Artificial Sequence
  Description of Artificial Sequence: Synthetic oligonucleotide
cuggcagugaaagcauagu

SEQ ID NO: 240491 - RNA, 19 nt, Artificial Sequence
  Description of Artificial Sequence: Synthetic oligonucleotide
cgccgaaagagaagagcac

SEQ ID NO: 240492 - RNA, 19 nt, Artificial Sequence
  Description of Artificial Sequence: Synthetic oligonucleotide
gcgaucgaauguccaccac

SEQ ID NO: 240493 - RNA, 19 nt, Artificial Sequence
  Description of Artificial Sequence: Synthetic oligonucleotide
ccacgccgaaagagaagag

SEQ ID NO: 240494 - RNA, 19 nt, Artificial Sequence
  Description of Artificial Sequence: Synthetic oligonucleotide
ccggaacacccauagcuaa

SEQ ID NO: 240495 - RNA, 19 nt, Artificial Sequence
  Description of Artificial Sequence: Synthetic oligonucleotide
gggagcgaucgaaugucca

SEQ ID NO: 240496 - RNA, 19 nt, Artificial Sequence
  Description of Artificial Sequence: Synthetic oligonucleotide
cccacgcagcucugaaaug

SEQ ID NO: 240497 - RNA, 19 nt, Artificial Sequence
  Description of Artificial Sequence: Synthetic oligonucleotide
gccaacgaacaccgcaaua

SEQ ID NO: 240498 - RNA, 19 nt, Artificial Sequence
  Description of Artificial Sequence: Synthetic oligonucleotide
cugcacacucaaccuuuua

SEQ ID NO: 240499 - RNA, 19 nt, Artificial Sequence
  Description of Artificial Sequence: Synthetic oligonucleotide
ccgcaauacagcgcaugac

SEQ ID NO: 240500 - RNA, 19 nt, Artificial Sequence
  Description of Artificial Sequence: Synthetic oligonucleotide
cgggagcgaucgaaugucc

SEQ ID NO: 240501 - RNA, 19 nt, Artificial Sequence
  Description of Artificial Sequence: Synthetic oligonucleotide
cgcauccugccguucccgc

SEQ ID NO: 240502 - RNA, 19 nt, Artificial Sequence
  Description of Artificial Sequence: Synthetic oligonucleotide
cauggacgugaaccucgcu

SEQ ID NO: 240503 - RNA, 19 nt, Artificial Sequence
  Description of Artificial Sequence: Synthetic oligonucleotide
ggaggaccgaucauuuguu

SEQ ID NO: 240504 - RNA, 19 nt, Artificial Sequence
  Description of Artificial Sequence: Synthetic oligonucleotide
cugcagguuggugauucau

SEQ ID NO: 240505 - RNA, 19 nt, Artificial Sequence
  Description of Artificial Sequence: Synthetic oligonucleotide
cacagauugcaagcuccau

SEQ ID NO: 240506 - RNA, 19 nt, Artificial Sequence
  Description of Artificial Sequence: Synthetic oligonucleotide
ccagaccguggacaaaacu

SEQ ID NO: 240507 - RNA, 19 nt, Artificial Sequence
  Description of Artificial Sequence: Synthetic oligonucleotide
gcaugacgcuggcccacuc

SEQ ID NO: 240508 - RNA, 19 nt, Artificial Sequence
  Description of Artificial Sequence: Synthetic oligonucleotide
cccacguggucuaugccau

SEQ ID NO: 240509 - RNA, 19 nt, Artificial Sequence
  Description of Artificial Sequence: Synthetic oligonucleotide
aggccgcuucgggagcgau

SEQ ID NO: 240510 - RNA, 19 nt, Artificial Sequence
  Description of Artificial Sequence: Synthetic oligonucleotide
ccguggacaaaacuucauu

SEQ ID NO: 240511 - RNA, 19 nt, Artificial Sequence
  Description of Artificial Sequence: Synthetic oligonucleotide
gguccagaccguggacaaa

SEQ ID NO: 240512 - RNA, 19 nt, Artificial Sequence
  Description of Artificial Sequence: Synthetic oligonucleotide
gcacggccuuccuccaacu

SEQ ID NO: 240513 - RNA, 19 nt, Artificial Sequence
  Description of Artificial Sequence: Synthetic oligonucleotide
gacccacgugugagcgccu

SEQ ID NO: 240514 - RNA, 19 nt, Artificial Sequence
  Description of Artificial Sequence: Synthetic oligonucleotide
cgugaaccucgcugggugu

SEQ ID NO: 240515 - RNA, 19 nt, Artificial Sequence
  Description of Artificial Sequence: Synthetic oligonucleotide
ccugcacacucaaccuuuu

SEQ ID NO: 240516 - RNA, 19 nt, Artificial Sequence
  Description of Artificial Sequence: Synthetic oligonucleotide
gcguagcuaggaaggcgau

SEQ ID NO: 240517 - RNA, 19 nt, Artificial Sequence
  Description of Artificial Sequence: Synthetic oligonucleotide
gcgccgcauccugccguuc

SEQ ID NO: 240518 - RNA, 19 nt, Artificial Sequence
  Description of Artificial Sequence: Synthetic oligonucleotide
ccgcuucgggagcgaucga

SEQ ID NO: 240519 - RNA, 19 nt, Artificial Sequence
  Description of Artificial Sequence: Synthetic oligonucleotide
ccacguggucuaugccauu

SEQ ID NO: 240520 - RNA, 19 nt, Artificial Sequence
  Description of Artificial Sequence: Synthetic oligonucleotide
gcgugacauuccgcuggau

SEQ ID NO: 240521 - RNA, 19 nt, Artificial Sequence
  Description of Artificial Sequence: Synthetic oligonucleotide
cgcaugacgcuggcccacu

SEQ ID NO: 240522 - RNA, 19 nt, Artificial Sequence
  Description of Artificial Sequence: Synthetic oligonucleotide
ucuuuuaugagacacacac

SEQ ID NO: 240523 - RNA, 19 nt, Artificial Sequence
  Description of Artificial Sequence: Synthetic oligonucleotide
ugacaauucuguaaggagg

SEQ ID NO: 240524 - RNA, 19 nt, Artificial Sequence
  Description of Artificial Sequence: Synthetic oligonucleotide
ugagaugacaguaaacugc

SEQ ID NO: 240525 - RNA, 19 nt, Artificial Sequence
  Description of Artificial Sequence: Synthetic oligonucleotide
uguauauuacagaugaccu

SEQ ID NO: 240526 - RNA, 19 nt, Artificial Sequence
  Description of Artificial Sequence: Synthetic oligonucleotide
uacccugaaacuuuuaggg

SEQ ID NO: 240527 - RNA, 19 nt, Artificial Sequence
  Description of Artificial Sequence: Synthetic oligonucleotide
uuaugagacacacacacac

SEQ ID NO: 240528 - RNA, 19 nt, Artificial Sequence
  Description of Artificial Sequence: Synthetic oligonucleotide
aucuuuacaagagugagac

SEQ ID NO: 240529 - RNA, 19 nt, Artificial Sequence
  Description of Artificial Sequence: Synthetic oligonucleotide
ucagaucccuguuagauag

SEQ ID NO: 240530 - RNA, 19 nt, Artificial Sequence
  Description of Artificial Sequence: Synthetic oligonucleotide
ucuauauccauguggagca

SEQ ID NO: 240531 - RNA, 19 nt, Artificial Sequence
  Description of Artificial Sequence: Synthetic oligonucleotide
aagccuaagucuuuuauga

SEQ ID NO: 240532 - RNA, 19 nt, Artificial Sequence
  Description of Artificial Sequence: Synthetic oligonucleotide
augagacacacacacacac

SEQ ID NO: 240533 - RNA, 19 nt, Artificial Sequence
  Description of Artificial Sequence: Synthetic oligonucleotide
uuagauaguacuuuacaaa

SEQ ID NO: 240534 - RNA, 19 nt, Artificial Sequence
  Description of Artificial Sequence: Synthetic oligonucleotide
uguuagauaguacuuuaca

SEQ ID NO: 240535 - RNA, 19 nt, Artificial Sequence
  Description of Artificial Sequence: Synthetic oligonucleotide
aguaccacauuuugaaccg

SEQ ID NO: 240536 - RNA, 19 nt, Artificial Sequence
  Description of Artificial Sequence: Synthetic oligonucleotide
aaguaauaguuucagacuu

SEQ ID NO: 240537 - RNA, 19 nt, Artificial Sequence
  Description of Artificial Sequence: Synthetic oligonucleotide
auaucggaagagcugaggg

SEQ ID NO: 240538 - RNA, 19 nt, Artificial Sequence
  Description of Artificial Sequence: Synthetic oligonucleotide
accacacacacacacacac

SEQ ID NO: 240539 - RNA, 19 nt, Artificial Sequence
  Description of Artificial Sequence: Synthetic oligonucleotide
cacacauacacacacacac

SEQ ID NO: 240540 - RNA, 19 nt, Artificial Sequence
  Description of Artificial Sequence: Synthetic oligonucleotide
uuacccugaaacuuuuagg

SEQ ID NO: 240541 - RNA, 19 nt, Artificial Sequence
  Description of Artificial Sequence: Synthetic oligonucleotide
ugcuuauucacacaucagu

SEQ ID NO: 240542 - RNA, 19 nt, Artificial Sequence
  Description of Artificial Sequence: Synthetic oligonucleotide
ugcccauagagaaugacug

SEQ ID NO: 240543 - RNA, 19 nt, Artificial Sequence
  Description of Artificial Sequence: Synthetic oligonucleotide
ucuagguucaaguaauagu

SEQ ID NO: 240544 - RNA, 19 nt, Artificial Sequence
  Description of Artificial Sequence: Synthetic oligonucleotide
uacacacacacacacacac

SEQ ID NO: 240545 - RNA, 19 nt, Artificial Sequence
  Description of Artificial Sequence: Synthetic oligonucleotide
acuauagcaagcucuccac

SEQ ID NO: 240546 - RNA, 19 nt, Artificial Sequence
  Description of Artificial Sequence: Synthetic oligonucleotide
ugaggaguaauuucauugc

SEQ ID NO: 240547 - RNA, 19 nt, Artificial Sequence
  Description of Artificial Sequence: Synthetic oligonucleotide
cauacacacacacacacac

SEQ ID NO: 240548 - RNA, 19 nt, Artificial Sequence
  Description of Artificial Sequence: Synthetic oligonucleotide
gagaugacaguaaacugcg

SEQ ID NO: 240549 - RNA, 19 nt, Artificial Sequence
  Description of Artificial Sequence: Synthetic oligonucleotide
aagauagcuaccaucaagu

SEQ ID NO: 240550 - RNA, 19 nt, Artificial Sequence
  Description of Artificial Sequence: Synthetic oligonucleotide
aacucucuugaccgugucc

SEQ ID NO: 240551 - RNA, 19 nt, Artificial Sequence
  Description of Artificial Sequence: Synthetic oligonucleotide
agugagaccaugcaugugu

SEQ ID NO: 240552 - RNA, 19 nt, Artificial Sequence
  Description of Artificial Sequence: Synthetic oligonucleotide
cacacagacacacacacac

SEQ ID NO: 240553 - RNA, 19 nt, Artificial Sequence
  Description of Artificial Sequence: Synthetic oligonucleotide
ugcaauugcuuauucacac

SEQ ID NO: 240554 - RNA, 19 nt, Artificial Sequence
  Description of Artificial Sequence: Synthetic oligonucleotide
gacacacacacacacacac

SEQ ID NO: 240555 - RNA, 19 nt, Artificial Sequence
  Description of Artificial Sequence: Synthetic oligonucleotide
ucagucuaggaucuugggc

SEQ ID NO: 240556 - RNA, 19 nt, Artificial Sequence
  Description of Artificial Sequence: Synthetic oligonucleotide
auaguuucagacuuacccu

SEQ ID NO: 240557 - RNA, 19 nt, Artificial Sequence
  Description of Artificial Sequence: Synthetic oligonucleotide
cacacacacacauacacac

SEQ ID NO: 240558 - RNA, 19 nt, Artificial Sequence
  Description of Artificial Sequence: Synthetic oligonucleotide
gagacacacacacacacac

SEQ ID NO: 240559 - RNA, 19 nt, Artificial Sequence
  Description of Artificial Sequence: Synthetic oligonucleotide
aauggcuagaagaaaagau

SEQ ID NO: 240560 - RNA, 19 nt, Artificial Sequence
  Description of Artificial Sequence: Synthetic oligonucleotide
cacacacacacacagacac

SEQ ID NO: 240561 - RNA, 19 nt, Artificial Sequence
  Description of Artificial Sequence: Synthetic oligonucleotide
cuugacgaaggguggaugg

SEQ ID NO: 240562 - RNA, 19 nt, Artificial Sequence
  Description of Artificial Sequence: Synthetic oligonucleotide
cuuccuugggguaagauga

SEQ ID NO: 240563 - RNA, 19 nt, Artificial Sequence
  Description of Artificial Sequence: Synthetic oligonucleotide
cacacacacacacacauac

SEQ ID NO: 240564 - RNA, 19 nt, Artificial Sequence
  Description of Artificial Sequence: Synthetic oligonucleotide
uaguuucagacuuacccug

SEQ ID NO: 240565 - RNA, 19 nt, Artificial Sequence
  Description of Artificial Sequence: Synthetic oligonucleotide
cacacacacacacacacag

SEQ ID NO: 240566 - RNA, 19 nt, Artificial Sequence
  Description of Artificial Sequence: Synthetic oligonucleotide
ugaccuguuccuaacuuca

SEQ ID NO: 240567 - RNA, 19 nt, Artificial Sequence
  Description of Artificial Sequence: Synthetic oligonucleotide
cacauacacacacacacac

SEQ ID NO: 240568 - RNA, 19 nt, Artificial Sequence
  Description of Artificial Sequence: Synthetic oligonucleotide
gguaagaugauuaggacac

SEQ ID NO: 240569 - RNA, 19 nt, Artificial Sequence
  Description of Artificial Sequence: Synthetic oligonucleotide
guuagauaguacuuuacaa

SEQ ID NO: 240570 - RNA, 19 nt, Artificial Sequence
  Description of Artificial Sequence: Synthetic oligonucleotide
cacacacacacacauacac

SEQ ID NO: 240571 - RNA, 19 nt, Artificial Sequence
  Description of Artificial Sequence: Synthetic oligonucleotide
cacacacacacacacagac

SEQ ID NO: 240572 - RNA, 19 nt, Artificial Sequence
  Description of Artificial Sequence: Synthetic oligonucleotide
aggaacccaacauugucag

SEQ ID NO: 240573 - RNA, 19 nt, Artificial Sequence
  Description of Artificial Sequence: Synthetic oligonucleotide
aaugugcaccacaucaguc

SEQ ID NO: 240574 - RNA, 19 nt, Artificial Sequence
  Description of Artificial Sequence: Synthetic oligonucleotide
augaccuguuccuaacuuc

SEQ ID NO: 240575 - RNA, 19 nt, Artificial Sequence
  Description of Artificial Sequence: Synthetic oligonucleotide
cuaagcagaguucaacuuc

SEQ ID NO: 240576 - RNA, 19 nt, Artificial Sequence
  Description of Artificial Sequence: Synthetic oligonucleotide
agacagacuauucuggaaa

SEQ ID NO: 240577 - RNA, 19 nt, Artificial Sequence
  Description of Artificial Sequence: Synthetic oligonucleotide
auagugguggagcucagca

SEQ ID NO: 240578 - RNA, 19 nt, Artificial Sequence
  Description of Artificial Sequence: Synthetic oligonucleotide
cacacacacacacacacac

SEQ ID NO: 240579 - RNA, 19 nt, Artificial Sequence
  Description of Artificial Sequence: Synthetic oligonucleotide
cacacacacauacacacac

SEQ ID NO: 240580 - RNA, 19 nt, Artificial Sequence
  Description of Artificial Sequence: Synthetic oligonucleotide
agaaaugaccuaaagagua

SEQ ID NO: 240581 - RNA, 19 nt, Artificial Sequence
  Description of Artificial Sequence: Synthetic oligonucleotide
cacacacagacacacacac

SEQ ID NO: 240582 - RNA, 19 nt, Artificial Sequence
  Description of Artificial Sequence: Synthetic oligonucleotide
uaugagacacacacacaca

SEQ ID NO: 240583 - RNA, 19 nt, Artificial Sequence
  Description of Artificial Sequence: Synthetic oligonucleotide
ugucucuauucucuagggc

SEQ ID NO: 240584 - RNA, 19 nt, Artificial Sequence
  Description of Artificial Sequence: Synthetic oligonucleotide
cacacacauacacacacac

SEQ ID NO: 240585 - RNA, 19 nt, Artificial Sequence
  Description of Artificial Sequence: Synthetic oligonucleotide
cacacacacagacacacac

SEQ ID NO: 240586 - RNA, 19 nt, Artificial Sequence
  Description of Artificial Sequence: Synthetic oligonucleotide
cuugggguaagaugauuag

SEQ ID NO: 240587 - RNA, 19 nt, Artificial Sequence
  Description of Artificial Sequence: Synthetic oligonucleotide
cuaguuaguccuccaaaac

SEQ ID NO: 240588 - RNA, 19 nt, Artificial Sequence
  Description of Artificial Sequence: Synthetic oligonucleotide
aaaagauagcuaccaucaa

SEQ ID NO: 240589 - RNA, 19 nt, Artificial Sequence
  Description of Artificial Sequence: Synthetic oligonucleotide
caagcuugacgaagggugg

SEQ ID NO: 240590 - RNA, 19 nt, Artificial Sequence
  Description of Artificial Sequence: Synthetic oligonucleotide
aagugucucaccccaucug

SEQ ID NO: 240591 - RNA, 19 nt, Artificial Sequence
  Description of Artificial Sequence: Synthetic oligonucleotide
cacacacacacacacacuc

SEQ ID NO: 240592 - RNA, 19 nt, Artificial Sequence
  Description of Artificial Sequence: Synthetic oligonucleotide
agcacuaguuuugaccaac

SEQ ID NO: 240593 - RNA, 19 nt, Artificial Sequence
  Description of Artificial Sequence: Synthetic oligonucleotide
accuguuccuaacuucagg

SEQ ID NO: 240594 - RNA, 19 nt, Artificial Sequence
  Description of Artificial Sequence: Synthetic oligonucleotide
ugacgccuccccuaaaagc

SEQ ID NO: 240595 - RNA, 19 nt, Artificial Sequence
  Description of Artificial Sequence: Synthetic oligonucleotide
ugagacacacacacacaca

SEQ ID NO: 240596 - RNA, 19 nt, Artificial Sequence
  Description of Artificial Sequence: Synthetic oligonucleotide
ccuaagucuuuuaugagac

SEQ ID NO: 240597 - RNA, 19 nt, Artificial Sequence
  Description of Artificial Sequence: Synthetic oligonucleotide
acacacacacacucuucac

SEQ ID NO: 240598 - RNA, 19 nt, Artificial Sequence
  Description of Artificial Sequence: Synthetic oligonucleotide
aaugcagggcuccccaaaa

SEQ ID NO: 240599 - RNA, 19 nt, Artificial Sequence
  Description of Artificial Sequence: Synthetic oligonucleotide
gaaaugaccuaaagaguac

SEQ ID NO: 240600 - RNA, 19 nt, Artificial Sequence
  Description of Artificial Sequence: Synthetic oligonucleotide
gguacuaccauccugcaua

SEQ ID NO: 240601 - RNA, 19 nt, Artificial Sequence
  Description of Artificial Sequence: Synthetic oligonucleotide
ccaagcuugacgaagggug

SEQ ID NO: 240602 - RNA, 19 nt, Artificial Sequence
  Description of Artificial Sequence: Synthetic oligonucleotide
gaggaguaauuucauugca

SEQ ID NO: 240603 - RNA, 19 nt, Artificial Sequence
  Description of Artificial Sequence: Synthetic oligonucleotide
auagagaaugacugaccga

SEQ ID NO: 240604 - RNA, 19 nt, Artificial Sequence
  Description of Artificial Sequence: Synthetic oligonucleotide
cuguuagauaguacuuuac

SEQ ID NO: 240605 - RNA, 19 nt, Artificial Sequence
  Description of Artificial Sequence: Synthetic oligonucleotide
cacacacacacagacacac

SEQ ID NO: 240606 - RNA, 19 nt, Artificial Sequence
  Description of Artificial Sequence: Synthetic oligonucleotide
auugcccauagagaaugac

SEQ ID NO: 240607 - RNA, 19 nt, Artificial Sequence
  Description of Artificial Sequence: Synthetic oligonucleotide
gaaccgacugacaauucug

SEQ ID NO: 240608 - RNA, 19 nt, Artificial Sequence
  Description of Artificial Sequence: Synthetic oligonucleotide
ugaccaacccuugauuucu

SEQ ID NO: 240609 - RNA, 19 nt, Artificial Sequence
  Description of Artificial Sequence: Synthetic oligonucleotide
uauuuugacgccuccccua

SEQ ID NO: 240610 - RNA, 19 nt, Artificial Sequence
  Description of Artificial Sequence: Synthetic oligonucleotide
gacacacacacacaauaaa

SEQ ID NO: 240611 - RNA, 19 nt, Artificial Sequence
  Description of Artificial Sequence: Synthetic oligonucleotide
aguuacaacgagauuuugu

SEQ ID NO: 240612 - RNA, 19 nt, Artificial Sequence
  Description of Artificial Sequence: Synthetic oligonucleotide
cauuaguaccacauuuuga

SEQ ID NO: 240613 - RNA, 19 nt, Artificial Sequence
  Description of Artificial Sequence: Synthetic oligonucleotide
uaaacugcggcugcuggac

SEQ ID NO: 240614 - RNA, 19 nt, Artificial Sequence
  Description of Artificial Sequence: Synthetic oligonucleotide
cuagaccagggucugugag

SEQ ID NO: 240615 - RNA, 19 nt, Artificial Sequence
  Description of Artificial Sequence: Synthetic oligonucleotide
acuuuuagggcuggcaaga

SEQ ID NO: 240616 - RNA, 19 nt, Artificial Sequence
  Description of Artificial Sequence: Synthetic oligonucleotide
acauuguggaccugaugcu

SEQ ID NO: 240617 - RNA, 19 nt, Artificial Sequence
  Description of Artificial Sequence: Synthetic oligonucleotide
gagaccaugcauguguaca

SEQ ID NO: 240618 - RNA, 19 nt, Artificial Sequence
  Description of Artificial Sequence: Synthetic oligonucleotide
aguuuugaccaacccuuga

SEQ ID NO: 240619 - RNA, 19 nt, Artificial Sequence
  Description of Artificial Sequence: Synthetic oligonucleotide
cagaguuuuggucaaugca

SEQ ID NO: 240620 - RNA, 19 nt, Artificial Sequence
  Description of Artificial Sequence: Synthetic oligonucleotide
gcauuaguaccacauuuug

SEQ ID NO: 240621 - RNA, 19 nt, Artificial Sequence
  Description of Artificial Sequence: Synthetic oligonucleotide
uuuggucaaugcaucuuua

SEQ ID NO: 240622 - RNA, 19 nt, Artificial Sequence
  Description of Artificial Sequence: Synthetic oligonucleotide
cuccaccacacacacacac

SEQ ID NO: 240623 - RNA, 19 nt, Artificial Sequence
  Description of Artificial Sequence: Synthetic oligonucleotide
gacgccuccccuaaaagca

SEQ ID NO: 240624 - RNA, 19 nt, Artificial Sequence
  Description of Artificial Sequence: Synthetic oligonucleotide
cuaguuuugaccaacccuu

SEQ ID NO: 240625 - RNA, 19 nt, Artificial Sequence
  Description of Artificial Sequence: Synthetic oligonucleotide
uccaccacacacacacaca

SEQ ID NO: 240626 - RNA, 19 nt, Artificial Sequence
  Description of Artificial Sequence: Synthetic oligonucleotide
aggugagcugucccuaaag

SEQ ID NO: 240627 - RNA, 19 nt, Artificial Sequence
  Description of Artificial Sequence: Synthetic oligonucleotide
ugauggcaugcuacuuucc

SEQ ID NO: 240628 - RNA, 19 nt, Artificial Sequence
  Description of Artificial Sequence: Synthetic oligonucleotide
cacacacacacaauaaaua

SEQ ID NO: 240629 - RNA, 19 nt, Artificial Sequence
  Description of Artificial Sequence: Synthetic oligonucleotide
uguugcccaggguacuacc

SEQ ID NO: 240630 - RNA, 19 nt, Artificial Sequence
  Description of Artificial Sequence: Synthetic oligonucleotide
acacacacacacaauaaau

SEQ ID NO: 240631 - RNA, 19 nt, Artificial Sequence
  Description of Artificial Sequence: Synthetic oligonucleotide
agcgcuuugacaaggcgug

SEQ ID NO: 240632 - RNA, 19 nt, Artificial Sequence
  Description of Artificial Sequence: Synthetic oligonucleotide
auuuugacgccuccccuaa

SEQ ID NO: 240633 - RNA, 19 nt, Artificial Sequence
  Description of Artificial Sequence: Synthetic oligonucleotide
auggucugaccauccuccg

SEQ ID NO: 240634 - RNA, 19 nt, Artificial Sequence
  Description of Artificial Sequence: Synthetic oligonucleotide
aggugcuuucgacagccug

SEQ ID NO: 240635 - RNA, 19 nt, Artificial Sequence
  Description of Artificial Sequence: Synthetic oligonucleotide
ugccaggguguagagauac

SEQ ID NO: 240636 - RNA, 19 nt, Artificial Sequence
  Description of Artificial Sequence: Synthetic oligonucleotide
cacagacacacacacacaa

SEQ ID NO: 240637 - RNA, 19 nt, Artificial Sequence
  Description of Artificial Sequence: Synthetic oligonucleotide
ggugagaugacaguaaacu

SEQ ID NO: 240638 - RNA, 19 nt, Artificial Sequence
  Description of Artificial Sequence: Synthetic oligonucleotide
gaacuagagcaaugugcac

SEQ ID NO: 240639 - RNA, 19 nt, Artificial Sequence
  Description of Artificial Sequence: Synthetic oligonucleotide
gagaaaugaccuaaagagu

SEQ ID NO: 240640 - RNA, 19 nt, Artificial Sequence
  Description of Artificial Sequence: Synthetic oligonucleotide
ucccuguuagauaguacuu

SEQ ID NO: 240641 - RNA, 19 nt, Artificial Sequence
  Description of Artificial Sequence: Synthetic oligonucleotide
cagacacacacacacaaua

SEQ ID NO: 240642 - RNA, 19 nt, Artificial Sequence
  Description of Artificial Sequence: Synthetic oligonucleotide
ucagccugaggaguaauuu

SEQ ID NO: 240643 - RNA, 19 nt, Artificial Sequence
  Description of Artificial Sequence: Synthetic oligonucleotide
cacacacacacacucuuca

SEQ ID NO: 240644 - RNA, 19 nt, Artificial Sequence
  Description of Artificial Sequence: Synthetic oligonucleotide
ucccgugucccgaauuggu

SEQ ID NO: 240645 - RNA, 19 nt, Artificial Sequence
  Description of Artificial Sequence: Synthetic oligonucleotide
ccaucaacccuacaucagc

SEQ ID NO: 240646 - RNA, 19 nt, Artificial Sequence
  Description of Artificial Sequence: Synthetic oligonucleotide
ucggcgugaggguagccac

SEQ ID NO: 240647 - RNA, 19 nt, Artificial Sequence
  Description of Artificial Sequence: Synthetic oligonucleotide
ugaaacuuuuagggcuggc

SEQ ID NO: 240648 - RNA, 19 nt, Artificial Sequence
  Description of Artificial Sequence: Synthetic oligonucleotide
gaacccaacauugucaguu

SEQ ID NO: 240649 - RNA, 19 nt, Artificial Sequence
  Description of Artificial Sequence: Synthetic oligonucleotide
cuaaaagcaauaccuuccu

SEQ ID NO: 240650 - RNA, 19 nt, Artificial Sequence
  Description of Artificial Sequence: Synthetic oligonucleotide
gagcagucgucuuccggug

SEQ ID NO: 240651 - RNA, 19 nt, Artificial Sequence
  Description of Artificial Sequence: Synthetic oligonucleotide
uccuaacuucaggaaaggu

SEQ ID NO: 240652 - RNA, 19 nt, Artificial Sequence
  Description of Artificial Sequence: Synthetic oligonucleotide
cgaauugguucuuucauuc

SEQ ID NO: 240653 - RNA, 19 nt, Artificial Sequence
  Description of Artificial Sequence: Synthetic oligonucleotide
uccuccgaggugcuuucga

SEQ ID NO: 240654 - RNA, 19 nt, Artificial Sequence
  Description of Artificial Sequence: Synthetic oligonucleotide
caucccuaguuaguccucc

SEQ ID NO: 240655 - RNA, 19 nt, Artificial Sequence
  Description of Artificial Sequence: Synthetic oligonucleotide
acacacacacacacucuuc

SEQ ID NO: 240656 - RNA, 19 nt, Artificial Sequence
  Description of Artificial Sequence: Synthetic oligonucleotide
ugucaguuacaacgagauu

SEQ ID NO: 240657 - RNA, 19 nt, Artificial Sequence
  Description of Artificial Sequence: Synthetic oligonucleotide
caugcuacuuuccacucua

SEQ ID NO: 240658 - RNA, 19 nt, Artificial Sequence
  Description of Artificial Sequence: Synthetic oligonucleotide
aagcuugacgaagggugga

SEQ ID NO: 240659 - RNA, 19 nt, Artificial Sequence
  Description of Artificial Sequence: Synthetic oligonucleotide
ccuuccuugggguaagaug

SEQ ID NO: 240660 - RNA, 19 nt, Artificial Sequence
  Description of Artificial Sequence: Synthetic oligonucleotide
cuuuuagggcuggcaagag

SEQ ID NO: 240661 - RNA, 19 nt, Artificial Sequence
  Description of Artificial Sequence: Synthetic oligonucleotide
gaugauuaggacacuggau

SEQ ID NO: 240662 - RNA, 19 nt, Artificial Sequence
  Description of Artificial Sequence: Synthetic oligonucleotide
agacacacacacacaauaa

SEQ ID NO: 240663 - RNA, 19 nt, Artificial Sequence
  Description of Artificial Sequence: Synthetic oligonucleotide
acacacacacacauacaca

SEQ ID NO: 240664 - RNA, 19 nt, Artificial Sequence
  Description of Artificial Sequence: Synthetic oligonucleotide
ggcauaucggaagagcuga

SEQ ID NO: 240665 - RNA, 19 nt, Artificial Sequence
  Description of Artificial Sequence: Synthetic oligonucleotide
aguaauaguuucagacuua

SEQ ID NO: 240666 - RNA, 19 nt, Artificial Sequence
  Description of Artificial Sequence: Synthetic oligonucleotide
guuuugaccaacccuugau

SEQ ID NO: 240667 - RNA, 19 nt, Artificial Sequence
  Description of Artificial Sequence: Synthetic oligonucleotide
uuccgucuguuguccaaac

SEQ ID NO: 240668 - RNA, 19 nt, Artificial Sequence
  Description of Artificial Sequence: Synthetic oligonucleotide
aguuucagacuuacccuga

SEQ ID NO: 240669 - RNA, 19 nt, Artificial Sequence
  Description of Artificial Sequence: Synthetic oligonucleotide
acacauacacacacacaca

SEQ ID NO: 240670 - RNA, 19 nt, Artificial Sequence
  Description of Artificial Sequence: Synthetic oligonucleotide
acauacacacacacacaca

SEQ ID NO: 240671 - RNA, 19 nt, Artificial Sequence
  Description of Artificial Sequence: Synthetic oligonucleotide
ccuguuccuaacuucagga

SEQ ID NO: 240672 - RNA, 19 nt, Artificial Sequence
  Description of Artificial Sequence: Synthetic oligonucleotide
ccaccacacacacacacac

SEQ ID NO: 240673 - RNA, 19 nt, Artificial Sequence
  Description of Artificial Sequence: Synthetic oligonucleotide
aacugccguuccaagucug

SEQ ID NO: 240674 - RNA, 19 nt, Artificial Sequence
  Description of Artificial Sequence: Synthetic oligonucleotide
gaccuguuccuaacuucag

SEQ ID NO: 240675 - RNA, 19 nt, Artificial Sequence
  Description of Artificial Sequence: Synthetic oligonucleotide
aucaacccuacaucagcua

SEQ ID NO: 240676 - RNA, 19 nt, Artificial Sequence
  Description of Artificial Sequence: Synthetic oligonucleotide
gaugaccuguuccuaacuu

SEQ ID NO: 240677 - RNA, 19 nt, Artificial Sequence
  Description of Artificial Sequence: Synthetic oligonucleotide
cacacacacacacacacau

SEQ ID NO: 240678 - RNA, 19 nt, Artificial Sequence
  Description of Artificial Sequence: Synthetic oligonucleotide
ucuccaccacacacacaca

SEQ ID NO: 240679 - RNA, 19 nt, Artificial Sequence
  Description of Artificial Sequence: Synthetic oligonucleotide
agacuuacccugaaacuuu

SEQ ID NO: 240680 - RNA, 19 nt, Artificial Sequence
  Description of Artificial Sequence: Synthetic oligonucleotide
cucaccccaucugaaauca

SEQ ID NO: 240681 - RNA, 19 nt, Artificial Sequence
  Description of Artificial Sequence: Synthetic oligonucleotide
acacacauacacacacaca

SEQ ID NO: 240682 - RNA, 19 nt, Artificial Sequence
  Description of Artificial Sequence: Synthetic oligonucleotide
gggucugugagagaucuca

SEQ ID NO: 240683 - RNA, 19 nt, Artificial Sequence
  Description of Artificial Sequence: Synthetic oligonucleotide
auacacacacacacacaca

SEQ ID NO: 240684 - RNA, 19 nt, Artificial Sequence
  Description of Artificial Sequence: Synthetic oligonucleotide
acacacacagacacacaca

SEQ ID NO: 240685 - RNA, 19 nt, Artificial Sequence
  Description of Artificial Sequence: Synthetic oligonucleotide
agcagucgucuuccggugu

SEQ ID NO: 240686 - RNA, 19 nt, Artificial Sequence
  Description of Artificial Sequence: Synthetic oligonucleotide
caucaacccuacaucagcu

SEQ ID NO: 240687 - RNA, 19 nt, Artificial Sequence
  Description of Artificial Sequence: Synthetic oligonucleotide
ugcaagugucucaccccau

SEQ ID NO: 240688 - RNA, 19 nt, Artificial Sequence
  Description of Artificial Sequence: Synthetic oligonucleotide
acacacacacacacagaca

SEQ ID NO: 240689 - RNA, 19 nt, Artificial Sequence
  Description of Artificial Sequence: Synthetic oligonucleotide
ccaacccuugauuucugug

SEQ ID NO: 240690 - RNA, 19 nt, Artificial Sequence
  Description of Artificial Sequence: Synthetic oligonucleotide
acacacacacacacacucu

SEQ ID NO: 240691 - RNA, 19 nt, Artificial Sequence
  Description of Artificial Sequence: Synthetic oligonucleotide
cucccgugucccgaauugg

SEQ ID NO: 240692 - RNA, 19 nt, Artificial Sequence
  Description of Artificial Sequence: Synthetic oligonucleotide
acacacacacauacacaca

SEQ ID NO: 240693 - RNA, 19 nt, Artificial Sequence
  Description of Artificial Sequence: Synthetic oligonucleotide
gagugagaccaugcaugug

SEQ ID NO: 240694 - RNA, 19 nt, Artificial Sequence
  Description of Artificial Sequence: Synthetic oligonucleotide
acacacacauacacacaca

SEQ ID NO: 240695 - RNA, 19 nt, Artificial Sequence
  Description of Artificial Sequence: Synthetic oligonucleotide
gugagagaucucacaguac

SEQ ID NO: 240696 - RNA, 19 nt, Artificial Sequence
  Description of Artificial Sequence: Synthetic oligonucleotide
agacacacacacacacaca

SEQ ID NO: 240697 - RNA, 19 nt, Artificial Sequence
  Description of Artificial Sequence: Synthetic oligonucleotide
gagcgcuuugacaaggcgu

SEQ ID NO: 240698 - RNA, 19 nt, Artificial Sequence
  Description of Artificial Sequence: Synthetic oligonucleotide
acacacacacacacauaca

SEQ ID NO: 240699 - RNA, 19 nt, Artificial Sequence
  Description of Artificial Sequence: Synthetic oligonucleotide
aggaaccgacugacaauuc

SEQ ID NO: 240700 - RNA, 19 nt, Artificial Sequence
  Description of Artificial Sequence: Synthetic oligonucleotide
gucccgaauugguucuuuc

SEQ ID NO: 240701 - RNA, 19 nt, Artificial Sequence
  Description of Artificial Sequence: Synthetic oligonucleotide
acacacacacacacacaca

SEQ ID NO: 240702 - RNA, 19 nt, Artificial Sequence
  Description of Artificial Sequence: Synthetic oligonucleotide
acacacacacacacacacu

SEQ ID NO: 240703 - RNA, 19 nt, Artificial Sequence
  Description of Artificial Sequence: Synthetic oligonucleotide
acacagacacacacacaca

SEQ ID NO: 240704 - RNA, 19 nt, Artificial Sequence
  Description of Artificial Sequence: Synthetic oligonucleotide
acagacacacacacacaau

SEQ ID NO: 240705 - RNA, 19 nt, Artificial Sequence
  Description of Artificial Sequence: Synthetic oligonucleotide
gucuuuuaugagacacaca

SEQ ID NO: 240706 - RNA, 19 nt, Artificial Sequence
  Description of Artificial Sequence: Synthetic oligonucleotide
ggaaccgacugacaauucu

SEQ ID NO: 240707 - RNA, 19 nt, Artificial Sequence
  Description of Artificial Sequence: Synthetic oligonucleotide
acacacacacacacacaga

SEQ ID NO: 240708 - RNA, 19 nt, Artificial Sequence
  Description of Artificial Sequence: Synthetic oligonucleotide
gucucaccccaucugaaau

SEQ ID NO: 240709 - RNA, 19 nt, Artificial Sequence
  Description of Artificial Sequence: Synthetic oligonucleotide
gcaagugucucaccccauc

SEQ ID NO: 240710 - RNA, 19 nt, Artificial Sequence
  Description of Artificial Sequence: Synthetic oligonucleotide
gaccaacccuugauuucug

SEQ ID NO: 240711 - RNA, 19 nt, Artificial Sequence
  Description of Artificial Sequence: Synthetic oligonucleotide
uccucccgugucccgaauu

SEQ ID NO: 240712 - RNA, 19 nt, Artificial Sequence
  Description of Artificial Sequence: Synthetic oligonucleotide
acacacacacacagacaca

SEQ ID NO: 240713 - RNA, 19 nt, Artificial Sequence
  Description of Artificial Sequence: Synthetic oligonucleotide
acacacagacacacacaca

SEQ ID NO: 240714 - RNA, 19 nt, Artificial Sequence
  Description of Artificial Sequence: Synthetic oligonucleotide
ccuguuagauaguacuuua

SEQ ID NO: 240715 - RNA, 19 nt, Artificial Sequence
  Description of Artificial Sequence: Synthetic oligonucleotide
caccacacacacacacaca

SEQ ID NO: 240716 - RNA, 19 nt, Artificial Sequence
  Description of Artificial Sequence: Synthetic oligonucleotide
gcacuaguuuugaccaacc

SEQ ID NO: 240717 - RNA, 19 nt, Artificial Sequence
  Description of Artificial Sequence: Synthetic oligonucleotide
uccuugggguaagaugauu

SEQ ID NO: 240718 - RNA, 19 nt, Artificial Sequence
  Description of Artificial Sequence: Synthetic oligonucleotide
ccgugucccgaauugguuc

SEQ ID NO: 240719 - RNA, 19 nt, Artificial Sequence
  Description of Artificial Sequence: Synthetic oligonucleotide
acacacacacagacacaca

SEQ ID NO: 240720 - RNA, 19 nt, Artificial Sequence
  Description of Artificial Sequence: Synthetic oligonucleotide
cuucccugccaagccuaag

SEQ ID NO: 240721 - RNA, 19 nt, Artificial Sequence
  Description of Artificial Sequence: Synthetic oligonucleotide
gcccauagagaaugacuga

SEQ ID NO: 240722 - RNA, 19 nt, Artificial Sequence
  Description of Artificial Sequence: Synthetic oligonucleotide
gcuuucgacagccuggauu

SEQ ID NO: 240723 - RNA, 19 nt, Artificial Sequence
  Description of Artificial Sequence: Synthetic oligonucleotide
gcuugacgaaggguggaug

SEQ ID NO: 240724 - RNA, 19 nt, Artificial Sequence
  Description of Artificial Sequence: Synthetic oligonucleotide
ugucccgaauugguucuuu

SEQ ID NO: 240725 - RNA, 19 nt, Artificial Sequence
  Description of Artificial Sequence: Synthetic oligonucleotide
ccuccgaggugcuuucgac

SEQ ID NO: 240726 - RNA, 19 nt, Artificial Sequence
  Description of Artificial Sequence: Synthetic oligonucleotide
auccuccgaggugcuuucg

SEQ ID NO: 240727 - RNA, 19 nt, Artificial Sequence
  Description of Artificial Sequence: Synthetic oligonucleotide
cucggcgugaggguagcca

SEQ ID NO: 240728 - RNA, 19 nt, Artificial Sequence
  Description of Artificial Sequence: Synthetic oligonucleotide
cacacacacacacacucuu

SEQ ID NO: 240729 - RNA, 19 nt, Artificial Sequence
  Description of Artificial Sequence: Synthetic oligonucleotide
ggcgugaggguagccacug

SEQ ID NO: 240730 - RNA, 19 nt, Artificial Sequence
  Description of Artificial Sequence: Synthetic oligonucleotide
ccucccgugucccgaauug

SEQ ID NO: 240731 - RNA, 19 nt, Artificial Sequence
  Description of Artificial Sequence: Synthetic oligonucleotide
cuguuguccaaacucucuu

SEQ ID NO: 240732 - RNA, 19 nt, Artificial Sequence
  Description of Artificial Sequence: Synthetic oligonucleotide
ccccaucccuaguuagucc

SEQ ID NO: 240733 - RNA, 19 nt, Artificial Sequence
  Description of Artificial Sequence: Synthetic oligonucleotide
accuuccuugggguaagau

SEQ ID NO: 240734 - RNA, 19 nt, Artificial Sequence
  Description of Artificial Sequence: Synthetic oligonucleotide
ccuccccuaaaagcaauac

SEQ ID NO: 240735 - RNA, 19 nt, Artificial Sequence
  Description of Artificial Sequence: Synthetic oligonucleotide
acacacacacacacacaua

SEQ ID NO: 240736 - RNA, 19 nt, Artificial Sequence
  Description of Artificial Sequence: Synthetic oligonucleotide
caggaaccgacugacaauu

SEQ ID NO: 240737 - RNA, 19 nt, Artificial Sequence
  Description of Artificial Sequence: Synthetic oligonucleotide
uuccggugucaggucugug

SEQ ID NO: 240738 - RNA, 19 nt, Artificial Sequence
  Description of Artificial Sequence: Synthetic oligonucleotide
gugagaccaugcaugugua

SEQ ID NO: 240739 - RNA, 19 nt, Artificial Sequence
  Description of Artificial Sequence: Synthetic oligonucleotide
cgcuuugacaaggcguggg

SEQ ID NO: 240740 - RNA, 19 nt, Artificial Sequence
  Description of Artificial Sequence: Synthetic oligonucleotide
ggaugaccuguuccuaacu

SEQ ID NO: 240741 - RNA, 19 nt, Artificial Sequence
  Description of Artificial Sequence: Synthetic oligonucleotide
uaccuuccuugggguaaga

SEQ ID NO: 240742 - RNA, 19 nt, Artificial Sequence
  Description of Artificial Sequence: Synthetic oligonucleotide
ggaaaggguuccugguuau

SEQ ID NO: 240743 - RNA, 19 nt, Artificial Sequence
  Description of Artificial Sequence: Synthetic oligonucleotide
gccccaucccuaguuaguc

SEQ ID NO: 240744 - RNA, 19 nt, Artificial Sequence
  Description of Artificial Sequence: Synthetic oligonucleotide
ccaucccuaguuaguccuc

SEQ ID NO: 240745 - RNA, 19 nt, Artificial Sequence
  Description of Artificial Sequence: Synthetic oligonucleotide
ccacacacacacacacaca

SEQ ID NO: 240746 - RNA, 19 nt, Artificial Sequence
  Description of Artificial Sequence: Synthetic oligonucleotide
cccaucccuaguuaguccu

SEQ ID NO: 240747 - RNA, 19 nt, Artificial Sequence
  Description of Artificial Sequence: Synthetic oligonucleotide
gcaugcuacuuuccacucu

SEQ ID NO: 240748 - RNA, 19 nt, Artificial Sequence
  Description of Artificial Sequence: Synthetic oligonucleotide
guaccacauuuugaaccgu

SEQ ID NO: 240749 - RNA, 19 nt, Artificial Sequence
  Description of Artificial Sequence: Synthetic oligonucleotide
cagucgucuuccgguguca

SEQ ID NO: 240750 - RNA, 19 nt, Artificial Sequence
  Description of Artificial Sequence: Synthetic oligonucleotide
ccgaggugcuuucgacagc

SEQ ID NO: 240751 - RNA, 19 nt, Artificial Sequence
  Description of Artificial Sequence: Synthetic oligonucleotide
cccgaauugguucuuucau

SEQ ID NO: 240752 - RNA, 19 nt, Artificial Sequence
  Description of Artificial Sequence: Synthetic oligonucleotide
ccugguuauuuugacgccu

SEQ ID NO: 240753 - RNA, 19 nt, Artificial Sequence
  Description of Artificial Sequence: Synthetic oligonucleotide
gcccucggcgugaggguag

SEQ ID NO: 240754 - RNA, 19 nt, Artificial Sequence
  Description of Artificial Sequence: Synthetic oligonucleotide
ccauguggagcagucgucu

SEQ ID NO: 240755 - RNA, 19 nt, Artificial Sequence
  Description of Artificial Sequence: Synthetic oligonucleotide
ccccuaaaagcaauaccuu

SEQ ID NO: 240756 - RNA, 19 nt, Artificial Sequence
  Description of Artificial Sequence: Synthetic oligonucleotide
gaggugcuuucgacagccu

SEQ ID NO: 240757 - RNA, 19 nt, Artificial Sequence
  Description of Artificial Sequence: Synthetic oligonucleotide
ccgucugggguuucagucu

SEQ ID NO: 240758 - RNA, 19 nt, Artificial Sequence
  Description of Artificial Sequence: Synthetic oligonucleotide
cccugagaagcucuucuau

SEQ ID NO: 240759 - RNA, 19 nt, Artificial Sequence
  Description of Artificial Sequence: Synthetic oligonucleotide
cgugucccgaauugguucu

SEQ ID NO: 240760 - RNA, 19 nt, Artificial Sequence
  Description of Artificial Sequence: Synthetic oligonucleotide
cccuguuagauaguacuuu

SEQ ID NO: 240761 - RNA, 19 nt, Artificial Sequence
  Description of Artificial Sequence: Synthetic oligonucleotide
ggccccaucccuaguuagu

SEQ ID NO: 240762 - RNA, 19 nt, Artificial Sequence
  Description of Artificial Sequence: Synthetic oligonucleotide
ccccaccccaugacagcca

SEQ ID NO: 240763 - RNA, 19 nt, Artificial Sequence
  Description of Artificial Sequence: Synthetic oligonucleotide
ccucggcgugaggguagcc

SEQ ID NO: 240764 - RNA, 19 nt, Artificial Sequence
  Description of Artificial Sequence: Synthetic oligonucleotide
cccgugucccgaauugguu

SEQ ID NO: 240765 - RNA, 19 nt, Artificial Sequence
  Description of Artificial Sequence: Synthetic oligonucleotide
gguuucagucuaggaucuu

SEQ ID NO: 240766 - RNA, 19 nt, Artificial Sequence
  Description of Artificial Sequence: Synthetic oligonucleotide
gugucccgaauugguucuu

SEQ ID NO: 240767 - RNA, 19 nt, Artificial Sequence
  Description of Artificial Sequence: Synthetic oligonucleotide
cgccuccccuaaaagcaau

SEQ ID NO: 240768 - RNA, 19 nt, Artificial Sequence
  Description of Artificial Sequence: Synthetic oligonucleotide
uauacuaucaaaauggaag

SEQ ID NO: 240769 - RNA, 19 nt, Artificial Sequence
  Description of Artificial Sequence: Synthetic oligonucleotide
gauuauacuaucaaaaugg

SEQ ID NO: 240770 - RNA, 19 nt, Artificial Sequence
  Description of Artificial Sequence: Synthetic oligonucleotide
uagaauagaggcccgagcg

SEQ ID NO: 240771 - RNA, 19 nt, Artificial Sequence
  Description of Artificial Sequence: Synthetic oligonucleotide
ucauaauucauguuggucu

SEQ ID NO: 240772 - RNA, 19 nt, Artificial Sequence
  Description of Artificial Sequence: Synthetic oligonucleotide
aaauaaaccgccccuacca

SEQ ID NO: 240773 - RNA, 19 nt, Artificial Sequence
  Description of Artificial Sequence: Synthetic oligonucleotide
aauagauuauacuaucaaa

SEQ ID NO: 240774 - RNA, 19 nt, Artificial Sequence
  Description of Artificial Sequence: Synthetic oligonucleotide
agugaaagagccucuuucc

SEQ ID NO: 240775 - RNA, 19 nt, Artificial Sequence
  Description of Artificial Sequence: Synthetic oligonucleotide
uuugaaucuacccacucca

SEQ ID NO: 240776 - RNA, 19 nt, Artificial Sequence
  Description of Artificial Sequence: Synthetic oligonucleotide
auuaagacggcugggagcc

SEQ ID NO: 240777 - RNA, 19 nt, Artificial Sequence
  Description of Artificial Sequence: Synthetic oligonucleotide
aaucccuuacuacccaccc

SEQ ID NO: 240778 - RNA, 19 nt, Artificial Sequence
  Description of Artificial Sequence: Synthetic oligonucleotide
uugucauaauucauguugg

SEQ ID NO: 240779 - RNA, 19 nt, Artificial Sequence
  Description of Artificial Sequence: Synthetic oligonucleotide
aaagaaacaguggagacga

SEQ ID NO: 240780 - RNA, 19 nt, Artificial Sequence
  Description of Artificial Sequence: Synthetic oligonucleotide
ugcuaaaccacuuuggccu

SEQ ID NO: 240781 - RNA, 19 nt, Artificial Sequence
  Description of Artificial Sequence: Synthetic oligonucleotide
aaauagauuauacuaucaa

SEQ ID NO: 240782 - RNA, 19 nt, Artificial Sequence
  Description of Artificial Sequence: Synthetic oligonucleotide
aaguuagugaaagagccuc

SEQ ID NO: 240783 - RNA, 19 nt, Artificial Sequence
  Description of Artificial Sequence: Synthetic oligonucleotide
uccuucucaagccauaccc

SEQ ID NO: 240784 - RNA, 19 nt, Artificial Sequence
  Description of Artificial Sequence: Synthetic oligonucleotide
ucaagccauacccugauug

SEQ ID NO: 240785 - RNA, 19 nt, Artificial Sequence
  Description of Artificial Sequence: Synthetic oligonucleotide
agugugauucuucucuggc

SEQ ID NO: 240786 - RNA, 19 nt, Artificial Sequence
  Description of Artificial Sequence: Synthetic oligonucleotide
ucagauauggccaggaaua

SEQ ID NO: 240787 - RNA, 19 nt, Artificial Sequence
  Description of Artificial Sequence: Synthetic oligonucleotide
guagacaaacuucuggccg

SEQ ID NO: 240788 - RNA, 19 nt, Artificial Sequence
  Description of Artificial Sequence: Synthetic oligonucleotide
auaaauaaaccgccccuac

SEQ ID NO: 240789 - RNA, 19 nt, Artificial Sequence
  Description of Artificial Sequence: Synthetic oligonucleotide
acuaucaaaauggaagagg

SEQ ID NO: 240790 - RNA, 19 nt, Artificial Sequence
  Description of Artificial Sequence: Synthetic oligonucleotide
uuacccacucuccuaaagg

SEQ ID NO: 240791 - RNA, 19 nt, Artificial Sequence
  Description of Artificial Sequence: Synthetic oligonucleotide
auacuaucaaaauggaaga

SEQ ID NO: 240792 - RNA, 19 nt, Artificial Sequence
  Description of Artificial Sequence: Synthetic oligonucleotide
acaaccagagcauaagucu

SEQ ID NO: 240793 - RNA, 19 nt, Artificial Sequence
  Description of Artificial Sequence: Synthetic oligonucleotide
ugaaaagccccauuuaaaa

SEQ ID NO: 240794 - RNA, 19 nt, Artificial Sequence
  Description of Artificial Sequence: Synthetic oligonucleotide
uccccuauugaaaagcccc

SEQ ID NO: 240795 - RNA, 19 nt, Artificial Sequence
  Description of Artificial Sequence: Synthetic oligonucleotide
auugggagguaauaggcag

SEQ ID NO: 240796 - RNA, 19 nt, Artificial Sequence
  Description of Artificial Sequence: Synthetic oligonucleotide
acggccaaaaccuggcucc

SEQ ID NO: 240797 - RNA, 19 nt, Artificial Sequence
  Description of Artificial Sequence: Synthetic oligonucleotide
caacccaugucccaaaagg

SEQ ID NO: 240798 - RNA, 19 nt, Artificial Sequence
  Description of Artificial Sequence: Synthetic oligonucleotide
caaacaggcuucuaagggg

SEQ ID NO: 240799 - RNA, 19 nt, Artificial Sequence
  Description of Artificial Sequence: Synthetic oligonucleotide
aauugauacaagauaggcu

SEQ ID NO: 240800 - RNA, 19 nt, Artificial Sequence
  Description of Artificial Sequence: Synthetic oligonucleotide
ugaacucaccaccaucccg

SEQ ID NO: 240801 - RNA, 19 nt, Artificial Sequence
  Description of Artificial Sequence: Synthetic oligonucleotide
agaauagaggcccgagcgc

SEQ ID NO: 240802 - RNA, 19 nt, Artificial Sequence
  Description of Artificial Sequence: Synthetic oligonucleotide
caagcuagcucuucaaccc

SEQ ID NO: 240803 - RNA, 19 nt, Artificial Sequence
  Description of Artificial Sequence: Synthetic oligonucleotide
uacacguuugguaucaaaa

SEQ ID NO: 240804 - RNA, 19 nt, Artificial Sequence
  Description of Artificial Sequence: Synthetic oligonucleotide
acgaguguagcaccguccc

SEQ ID NO: 240805 - RNA, 19 nt, Artificial Sequence
  Description of Artificial Sequence: Synthetic oligonucleotide
uaaaccgccccuaccauug

SEQ ID NO: 240806 - RNA, 19 nt, Artificial Sequence
  Description of Artificial Sequence: Synthetic oligonucleotide
aagaccgccuccaaauccc

SEQ ID NO: 240807 - RNA, 19 nt, Artificial Sequence
  Description of Artificial Sequence: Synthetic oligonucleotide
ucuuacuacccacccauca

SEQ ID NO: 240808 - RNA, 19 nt, Artificial Sequence
  Description of Artificial Sequence: Synthetic oligonucleotide
aaaucccuuacuacccacc

SEQ ID NO: 240809 - RNA, 19 nt, Artificial Sequence
  Description of Artificial Sequence: Synthetic oligonucleotide
uggggaaguaaagaaacag

SEQ ID NO: 240810 - RNA, 19 nt, Artificial Sequence
  Description of Artificial Sequence: Synthetic oligonucleotide
uauucguuccggcugcugc

SEQ ID NO: 240811 - RNA, 19 nt, Artificial Sequence
  Description of Artificial Sequence: Synthetic oligonucleotide
uuuggguggaaguuaguga

SEQ ID NO: 240812 - RNA, 19 nt, Artificial Sequence
  Description of Artificial Sequence: Synthetic oligonucleotide
uccagccuagaauugauac

SEQ ID NO: 240813 - RNA, 19 nt, Artificial Sequence
  Description of Artificial Sequence: Synthetic oligonucleotide
ugaaucuacccacuccagc

SEQ ID NO: 240814 - RNA, 19 nt, Artificial Sequence
  Description of Artificial Sequence: Synthetic oligonucleotide
uuaggggauaaauggggag

SEQ ID NO: 240815 - RNA, 19 nt, Artificial Sequence
  Description of Artificial Sequence: Synthetic oligonucleotide
uagugaaagagccucuuuc

SEQ ID NO: 240816 - RNA, 19 nt, Artificial Sequence
  Description of Artificial Sequence: Synthetic oligonucleotide
uggccaaaagcuuacuuga

SEQ ID NO: 240817 - RNA, 19 nt, Artificial Sequence
  Description of Artificial Sequence: Synthetic oligonucleotide
guaaagaaacaguggagac

SEQ ID NO: 240818 - RNA, 19 nt, Artificial Sequence
  Description of Artificial Sequence: Synthetic oligonucleotide
cuggacggaaacuggaagg

SEQ ID NO: 240819 - RNA, 19 nt, Artificial Sequence
  Description of Artificial Sequence: Synthetic oligonucleotide
uuacuacccacccaucaca

SEQ ID NO: 240820 - RNA, 19 nt, Artificial Sequence
  Description of Artificial Sequence: Synthetic oligonucleotide
ugugcgcugccacuggacg

SEQ ID NO: 240821 - RNA, 19 nt, Artificial Sequence
  Description of Artificial Sequence: Synthetic oligonucleotide
gauggaagggaugugcacc

SEQ ID NO: 240822 - RNA, 19 nt, Artificial Sequence
  Description of Artificial Sequence: Synthetic oligonucleotide
uuaccuuguucucucaaaa

SEQ ID NO: 240823 - RNA, 19 nt, Artificial Sequence
  Description of Artificial Sequence: Synthetic oligonucleotide
uuccuaggaauauccaccc

SEQ ID NO: 240824 - RNA, 19 nt, Artificial Sequence
  Description of Artificial Sequence: Synthetic oligonucleotide
uauccaccccaccacaacc

SEQ ID NO: 240825 - RNA, 19 nt, Artificial Sequence
  Description of Artificial Sequence: Synthetic oligonucleotide
aguaguaccgcaaggcccg

SEQ ID NO: 240826 - RNA, 19 nt, Artificial Sequence
  Description of Artificial Sequence: Synthetic oligonucleotide
cuggcuacgacucccaaac

SEQ ID NO: 240827 - RNA, 19 nt, Artificial Sequence
  Description of Artificial Sequence: Synthetic oligonucleotide
ucuccuaaagggguuaggc

SEQ ID NO: 240828 - RNA, 19 nt, Artificial Sequence
  Description of Artificial Sequence: Synthetic oligonucleotide
agaauugauacaagauagg

SEQ ID NO: 240829 - RNA, 19 nt, Artificial Sequence
  Description of Artificial Sequence: Synthetic oligonucleotide
ugcgugcuaaaccacuuug

SEQ ID NO: 240830 - RNA, 19 nt, Artificial Sequence
  Description of Artificial Sequence: Synthetic oligonucleotide
uccgaaccaaagcaugcag

SEQ ID NO: 240831 - RNA, 19 nt, Artificial Sequence
  Description of Artificial Sequence: Synthetic oligonucleotide
gaugauguggccauuaccu

SEQ ID NO: 240832 - RNA, 19 nt, Artificial Sequence
  Description of Artificial Sequence: Synthetic oligonucleotide
aaggguccuuuguacccgc

SEQ ID NO: 240833 - RNA, 19 nt, Artificial Sequence
  Description of Artificial Sequence: Synthetic oligonucleotide
aaacccuccauugggaggu

SEQ ID NO: 240834 - RNA, 19 nt, Artificial Sequence
  Description of Artificial Sequence: Synthetic oligonucleotide
ucacagauaggaagagaug

SEQ ID NO: 240835 - RNA, 19 nt, Artificial Sequence
  Description of Artificial Sequence: Synthetic oligonucleotide
uacuaucaaaauggaagag

SEQ ID NO: 240836 - RNA, 19 nt, Artificial Sequence
  Description of Artificial Sequence: Synthetic oligonucleotide
acaauuccccauucucugg

SEQ ID NO: 240837 - RNA, 19 nt, Artificial Sequence
  Description of Artificial Sequence: Synthetic oligonucleotide
aauaaaccgccccuaccau

SEQ ID NO: 240838 - RNA, 19 nt, Artificial Sequence
  Description of Artificial Sequence: Synthetic oligonucleotide
cuccaaacaggcuucuaag

SEQ ID NO: 240839 - RNA, 19 nt, Artificial Sequence
  Description of Artificial Sequence: Synthetic oligonucleotide
agggcgagaccucugguuc

SEQ ID NO: 240840 - RNA, 19 nt, Artificial Sequence
  Description of Artificial Sequence: Synthetic oligonucleotide
uucaguggaacacccugca

SEQ ID NO: 240841 - RNA, 19 nt, Artificial Sequence
  Description of Artificial Sequence: Synthetic oligonucleotide
uacuacccacccaucacag

SEQ ID NO: 240842 - RNA, 19 nt, Artificial Sequence
  Description of Artificial Sequence: Synthetic oligonucleotide
uuaggauaaccugcagggg

SEQ ID NO: 240843 - RNA, 19 nt, Artificial Sequence
  Description of Artificial Sequence: Synthetic oligonucleotide
gacuacggggugcaauugg

SEQ ID NO: 240844 - RNA, 19 nt, Artificial Sequence
  Description of Artificial Sequence: Synthetic oligonucleotide
uugaaucuacccacuccag

SEQ ID NO: 240845 - RNA, 19 nt, Artificial Sequence
  Description of Artificial Sequence: Synthetic oligonucleotide
cuuuguacccgcccgcagg

SEQ ID NO: 240846 - RNA, 19 nt, Artificial Sequence
  Description of Artificial Sequence: Synthetic oligonucleotide
ugcgcaguccccacagacg

SEQ ID NO: 240847 - RNA, 19 nt, Artificial Sequence
  Description of Artificial Sequence: Synthetic oligonucleotide
cugagaaauaaauaaagau

SEQ ID NO: 240848 - RNA, 19 nt, Artificial Sequence
  Description of Artificial Sequence: Synthetic oligonucleotide
caauuccccauucucuggg

SEQ ID NO: 240849 - RNA, 19 nt, Artificial Sequence
  Description of Artificial Sequence: Synthetic oligonucleotide
auugcuacagucgaggcua

SEQ ID NO: 240850 - RNA, 19 nt, Artificial Sequence
  Description of Artificial Sequence: Synthetic oligonucleotide
auucguuccggcugcugcg

SEQ ID NO: 240851 - RNA, 19 nt, Artificial Sequence
  Description of Artificial Sequence: Synthetic oligonucleotide
uuacuacccacccaucuua

SEQ ID NO: 240852 - RNA, 19 nt, Artificial Sequence
  Description of Artificial Sequence: Synthetic oligonucleotide
ucccuuacuacccacccau

SEQ ID NO: 240853 - RNA, 19 nt, Artificial Sequence
  Description of Artificial Sequence: Synthetic oligonucleotide
gugcuaaaccacuuuggcc

SEQ ID NO: 240854 - RNA, 19 nt, Artificial Sequence
  Description of Artificial Sequence: Synthetic oligonucleotide
cuaggaauauccaccccac

SEQ ID NO: 240855 - RNA, 19 nt, Artificial Sequence
  Description of Artificial Sequence: Synthetic oligonucleotide
cuuacuacccacccaucac

SEQ ID NO: 240856 - RNA, 19 nt, Artificial Sequence
  Description of Artificial Sequence: Synthetic oligonucleotide
auuccccauucucugggac

SEQ ID NO: 240857 - RNA, 19 nt, Artificial Sequence
  Description of Artificial Sequence: Synthetic oligonucleotide
uuuguacccgcccgcagga

SEQ ID NO: 240858 - RNA, 19 nt, Artificial Sequence
  Description of Artificial Sequence: Synthetic oligonucleotide
gaugucuuacccacucucc

SEQ ID NO: 240859 - RNA, 19 nt, Artificial Sequence
  Description of Artificial Sequence: Synthetic oligonucleotide
ggaaguuccaagucccggg

SEQ ID NO: 240860 - RNA, 19 nt, Artificial Sequence
  Description of Artificial Sequence: Synthetic oligonucleotide
caccccaccacaaccagag

SEQ ID NO: 240861 - RNA, 19 nt, Artificial Sequence
  Description of Artificial Sequence: Synthetic oligonucleotide
aguugaaaauacacguuug

SEQ ID NO: 240862 - RNA, 19 nt, Artificial Sequence
  Description of Artificial Sequence: Synthetic oligonucleotide
gaugggcagucuucagugg

SEQ ID NO: 240863 - RNA, 19 nt, Artificial Sequence
  Description of Artificial Sequence: Synthetic oligonucleotide
caaaauggaagaggauggg

SEQ ID NO: 240864 - RNA, 19 nt, Artificial Sequence
  Description of Artificial Sequence: Synthetic oligonucleotide
uucucaagccauacccuga

SEQ ID NO: 240865 - RNA, 19 nt, Artificial Sequence
  Description of Artificial Sequence: Synthetic oligonucleotide
ugucauaauucauguuggu

SEQ ID NO: 240866 - RNA, 19 nt, Artificial Sequence
  Description of Artificial Sequence: Synthetic oligonucleotide
aagagccucuuuccuagga

SEQ ID NO: 240867 - RNA, 19 nt, Artificial Sequence
  Description of Artificial Sequence: Synthetic oligonucleotide
uccauuaagacggcuggga

SEQ ID NO: 240868 - RNA, 19 nt, Artificial Sequence
  Description of Artificial Sequence: Synthetic oligonucleotide
acccacccaucacagauag

SEQ ID NO: 240869 - RNA, 19 nt, Artificial Sequence
  Description of Artificial Sequence: Synthetic oligonucleotide
uacggggugcaauuggacu

SEQ ID NO: 240870 - RNA, 19 nt, Artificial Sequence
  Description of Artificial Sequence: Synthetic oligonucleotide
uccaagagaugauguggcc

SEQ ID NO: 240871 - RNA, 19 nt, Artificial Sequence
  Description of Artificial Sequence: Synthetic oligonucleotide
cuuacccacucuccuaaag

SEQ ID NO: 240872 - RNA, 19 nt, Artificial Sequence
  Description of Artificial Sequence: Synthetic oligonucleotide
aguggagacgaguguagca

SEQ ID NO: 240873 - RNA, 19 nt, Artificial Sequence
  Description of Artificial Sequence: Synthetic oligonucleotide
acagggcgcccucaacucc

SEQ ID NO: 240874 - RNA, 19 nt, Artificial Sequence
  Description of Artificial Sequence: Synthetic oligonucleotide
aagcuagcucuucaaccca

SEQ ID NO: 240875 - RNA, 19 nt, Artificial Sequence
  Description of Artificial Sequence: Synthetic oligonucleotide
agacgaguguagcaccguc

SEQ ID NO: 240876 - RNA, 19 nt, Artificial Sequence
  Description of Artificial Sequence: Synthetic oligonucleotide
gcuaaguggaaguuccaag

SEQ ID NO: 240877 - RNA, 19 nt, Artificial Sequence
  Description of Artificial Sequence: Synthetic oligonucleotide
uggagacgaguguagcacc

SEQ ID NO: 240878 - RNA, 19 nt, Artificial Sequence
  Description of Artificial Sequence: Synthetic oligonucleotide
ggaacaauuccccauucuc

SEQ ID NO: 240879 - RNA, 19 nt, Artificial Sequence
  Description of Artificial Sequence: Synthetic oligonucleotide
augucuuacccacucuccu

SEQ ID NO: 240880 - RNA, 19 nt, Artificial Sequence
  Description of Artificial Sequence: Synthetic oligonucleotide
aacccaugucccaaaagga

SEQ ID NO: 240881 - RNA, 19 nt, Artificial Sequence
  Description of Artificial Sequence: Synthetic oligonucleotide
uggauugugaagguagaau

SEQ ID NO: 240882 - RNA, 19 nt, Artificial Sequence
  Description of Artificial Sequence: Synthetic oligonucleotide
caguuuccgaaccaaagca

SEQ ID NO: 240883 - RNA, 19 nt, Artificial Sequence
  Description of Artificial Sequence: Synthetic oligonucleotide
agaaacaguggagacgagu

SEQ ID NO: 240884 - RNA, 19 nt, Artificial Sequence
  Description of Artificial Sequence: Synthetic oligonucleotide
gaauagaggcccgagcgca

SEQ ID NO: 240885 - RNA, 19 nt, Artificial Sequence
  Description of Artificial Sequence: Synthetic oligonucleotide
auaaacacuugggguuggc

SEQ ID NO: 240886 - RNA, 19 nt, Artificial Sequence
  Description of Artificial Sequence: Synthetic oligonucleotide
cuaccauugaaggaggaga

SEQ ID NO: 240887 - RNA, 19 nt, Artificial Sequence
  Description of Artificial Sequence: Synthetic oligonucleotide
uggacggaaacuggaagga

SEQ ID NO: 240888 - RNA, 19 nt, Artificial Sequence
  Description of Artificial Sequence: Synthetic oligonucleotide
acggaaacuggaaggagag

SEQ ID NO: 240889 - RNA, 19 nt, Artificial Sequence
  Description of Artificial Sequence: Synthetic oligonucleotide
agaugcuuuccucuccccu

SEQ ID NO: 240890 - RNA, 19 nt, Artificial Sequence
  Description of Artificial Sequence: Synthetic oligonucleotide
ucuaagggguuuggacugg

SEQ ID NO: 240891 - RNA, 19 nt, Artificial Sequence
  Description of Artificial Sequence: Synthetic oligonucleotide
ggaagauucuucccuggcc

SEQ ID NO: 240892 - RNA, 19 nt, Artificial Sequence
  Description of Artificial Sequence: Synthetic oligonucleotide
gucauaauucauguugguc

SEQ ID NO: 240893 - RNA, 19 nt, Artificial Sequence
  Description of Artificial Sequence: Synthetic oligonucleotide
cucuccccuauugaaaagc

SEQ ID NO: 240894 - RNA, 19 nt, Artificial Sequence
  Description of Artificial Sequence: Synthetic oligonucleotide
aggaacaauuccccauucu

SEQ ID NO: 240895 - RNA, 19 nt, Artificial Sequence
  Description of Artificial Sequence: Synthetic oligonucleotide
ugucuguuuuggguggaag

SEQ ID NO: 240896 - RNA, 19 nt, Artificial Sequence
  Description of Artificial Sequence: Synthetic oligonucleotide
uagcucuucaacccauguc

SEQ ID NO: 240897 - RNA, 19 nt, Artificial Sequence
  Description of Artificial Sequence: Synthetic oligonucleotide
uucccuaggccccuccacu

SEQ ID NO: 240898 - RNA, 19 nt, Artificial Sequence
  Description of Artificial Sequence: Synthetic oligonucleotide
gacggaaacuggaaggaga

SEQ ID NO: 240899 - RNA, 19 nt, Artificial Sequence
  Description of Artificial Sequence: Synthetic oligonucleotide
gggaguugaaaauacacgu

SEQ ID NO: 240900 - RNA, 19 nt, Artificial Sequence
  Description of Artificial Sequence: Synthetic oligonucleotide
gucgagaggccauccacgc

SEQ ID NO: 240901 - RNA, 19 nt, Artificial Sequence
  Description of Artificial Sequence: Synthetic oligonucleotide
cuccccuauugaaaagccc

SEQ ID NO: 240902 - RNA, 19 nt, Artificial Sequence
  Description of Artificial Sequence: Synthetic oligonucleotide
gguccuuuguacccgcccg

SEQ ID NO: 240903 - RNA, 19 nt, Artificial Sequence
  Description of Artificial Sequence: Synthetic oligonucleotide
gaaccaaagcaugcagccc

SEQ ID NO: 240904 - RNA, 19 nt, Artificial Sequence
  Description of Artificial Sequence: Synthetic oligonucleotide
caaaucccuuacuacccac

SEQ ID NO: 240905 - RNA, 19 nt, Artificial Sequence
  Description of Artificial Sequence: Synthetic oligonucleotide
cuucggccuccaaacaggc

SEQ ID NO: 240906 - RNA, 19 nt, Artificial Sequence
  Description of Artificial Sequence: Synthetic oligonucleotide
aguugaacuguuucuccuu

SEQ ID NO: 240907 - RNA, 19 nt, Artificial Sequence
  Description of Artificial Sequence: Synthetic oligonucleotide
aguaccgcaaggcccggcu

SEQ ID NO: 240908 - RNA, 19 nt, Artificial Sequence
  Description of Artificial Sequence: Synthetic oligonucleotide
gacgaguguagcaccgucc

SEQ ID NO: 240909 - RNA, 19 nt, Artificial Sequence
  Description of Artificial Sequence: Synthetic oligonucleotide
uggccgcucaccuugcgga

SEQ ID NO: 240910 - RNA, 19 nt, Artificial Sequence
  Description of Artificial Sequence: Synthetic oligonucleotide
caugaauggagagacucca

SEQ ID NO: 240911 - RNA, 19 nt, Artificial Sequence
  Description of Artificial Sequence: Synthetic oligonucleotide
uggacuacggggugcaauu

SEQ ID NO: 240912 - RNA, 19 nt, Artificial Sequence
  Description of Artificial Sequence: Synthetic oligonucleotide
gacggcugggagccgagcc

SEQ ID NO: 240913 - RNA, 19 nt, Artificial Sequence
  Description of Artificial Sequence: Synthetic oligonucleotide
ggcuacagacaccucaggc

SEQ ID NO: 240914 - RNA, 19 nt, Artificial Sequence
  Description of Artificial Sequence: Synthetic oligonucleotide
uacuacccacccaucuuac

SEQ ID NO: 240915 - RNA, 19 nt, Artificial Sequence
  Description of Artificial Sequence: Synthetic oligonucleotide
gauccuucucaagccauac

SEQ ID NO: 240916 - RNA, 19 nt, Artificial Sequence
  Description of Artificial Sequence: Synthetic oligonucleotide
acccaucuuacuacccacc

SEQ ID NO: 240917 - RNA, 19 nt, Artificial Sequence
  Description of Artificial Sequence: Synthetic oligonucleotide
aaccagagcauaagucugu

SEQ ID NO: 240918 - RNA, 19 nt, Artificial Sequence
  Description of Artificial Sequence: Synthetic oligonucleotide
uucaacccaugucccaaaa

SEQ ID NO: 240919 - RNA, 19 nt, Artificial Sequence
  Description of Artificial Sequence: Synthetic oligonucleotide
guggagacgaguguagcac

SEQ ID NO: 240920 - RNA, 19 nt, Artificial Sequence
  Description of Artificial Sequence: Synthetic oligonucleotide
ugucuuacccacucuccua

SEQ ID NO: 240921 - RNA, 19 nt, Artificial Sequence
  Description of Artificial Sequence: Synthetic oligonucleotide
uguacccgcccgcaggaaa

SEQ ID NO: 240922 - RNA, 19 nt, Artificial Sequence
  Description of Artificial Sequence: Synthetic oligonucleotide
uaccgcaaggcccggcuga

SEQ ID NO: 240923 - RNA, 19 nt, Artificial Sequence
  Description of Artificial Sequence: Synthetic oligonucleotide
ggugaucucaguggcagag

SEQ ID NO: 240924 - RNA, 19 nt, Artificial Sequence
  Description of Artificial Sequence: Synthetic oligonucleotide
auacacguuugguaucaaa

SEQ ID NO: 240925 - RNA, 19 nt, Artificial Sequence
  Description of Artificial Sequence: Synthetic oligonucleotide
gacguguaaaggcggccac

SEQ ID NO: 240926 - RNA, 19 nt, Artificial Sequence
  Description of Artificial Sequence: Synthetic oligonucleotide
gcgcaguccccacagacgg

SEQ ID NO: 240927 - RNA, 19 nt, Artificial Sequence
  Description of Artificial Sequence: Synthetic oligonucleotide
guaguguuggggagcacug

SEQ ID NO: 240928 - RNA, 19 nt, Artificial Sequence
  Description of Artificial Sequence: Synthetic oligonucleotide
auaaaccgccccuaccauu

SEQ ID NO: 240929 - RNA, 19 nt, Artificial Sequence
  Description of Artificial Sequence: Synthetic oligonucleotide
gacagggcgcccucaacuc

SEQ ID NO: 240930 - RNA, 19 nt, Artificial Sequence
  Description of Artificial Sequence: Synthetic oligonucleotide
aggggauaaauggggagga

SEQ ID NO: 240931 - RNA, 19 nt, Artificial Sequence
  Description of Artificial Sequence: Synthetic oligonucleotide
gccuagaauugauacaaga

SEQ ID NO: 240932 - RNA, 19 nt, Artificial Sequence
  Description of Artificial Sequence: Synthetic oligonucleotide
cuacggggugcaauuggac

SEQ ID NO: 240933 - RNA, 19 nt, Artificial Sequence
  Description of Artificial Sequence: Synthetic oligonucleotide
cacgcugauggaagggaug

SEQ ID NO: 240934 - RNA, 19 nt, Artificial Sequence
  Description of Artificial Sequence: Synthetic oligonucleotide
gaacucaccaccaucccgu

SEQ ID NO: 240935 - RNA, 19 nt, Artificial Sequence
  Description of Artificial Sequence: Synthetic oligonucleotide
agacguguaaaggcggcca

SEQ ID NO: 240936 - RNA, 19 nt, Artificial Sequence
  Description of Artificial Sequence: Synthetic oligonucleotide
gggucaagguauguguggg

SEQ ID NO: 240937 - RNA, 19 nt, Artificial Sequence
  Description of Artificial Sequence: Synthetic oligonucleotide
cuuguuuuaggggauaaau

SEQ ID NO: 240938 - RNA, 19 nt, Artificial Sequence
  Description of Artificial Sequence: Synthetic oligonucleotide
caucccgugagguccaaga

SEQ ID NO: 240939 - RNA, 19 nt, Artificial Sequence
  Description of Artificial Sequence: Synthetic oligonucleotide
uaagacggcugggagccga

SEQ ID NO: 240940 - RNA, 19 nt, Artificial Sequence
  Description of Artificial Sequence: Synthetic oligonucleotide
aguuuccgaaccaaagcau

SEQ ID NO: 240941 - RNA, 19 nt, Artificial Sequence
  Description of Artificial Sequence: Synthetic oligonucleotide
acgcugauggaagggaugu

SEQ ID NO: 240942 - RNA, 19 nt, Artificial Sequence
  Description of Artificial Sequence: Synthetic oligonucleotide
gucuuacccacucuccuaa

SEQ ID NO: 240943 - RNA, 19 nt, Artificial Sequence
  Description of Artificial Sequence: Synthetic oligonucleotide
cagggguaguguuggggag

SEQ ID NO: 240944 - RNA, 19 nt, Artificial Sequence
  Description of Artificial Sequence: Synthetic oligonucleotide
caugucccaaaaggaagac

SEQ ID NO: 240945 - RNA, 19 nt, Artificial Sequence
  Description of Artificial Sequence: Synthetic oligonucleotide
cagggcgcccucaacuccc

SEQ ID NO: 240946 - RNA, 19 nt, Artificial Sequence
  Description of Artificial Sequence: Synthetic oligonucleotide
gaguccguucagguccugg

SEQ ID NO: 240947 - RNA, 19 nt, Artificial Sequence
  Description of Artificial Sequence: Synthetic oligonucleotide
caucuuacuacccacccau

SEQ ID NO: 240948 - RNA, 19 nt, Artificial Sequence
  Description of Artificial Sequence: Synthetic oligonucleotide
agauaggaagagaugcuuu

SEQ ID NO: 240949 - RNA, 19 nt, Artificial Sequence
  Description of Artificial Sequence: Synthetic oligonucleotide
gcuacagucgaggcuacag

SEQ ID NO: 240950 - RNA, 19 nt, Artificial Sequence
  Description of Artificial Sequence: Synthetic oligonucleotide
acuacccacccaucuuacu

SEQ ID NO: 240951 - RNA, 19 nt, Artificial Sequence
  Description of Artificial Sequence: Synthetic oligonucleotide
gacucagauauggccagga

SEQ ID NO: 240952 - RNA, 19 nt, Artificial Sequence
  Description of Artificial Sequence: Synthetic oligonucleotide
caggggacggccaaaaccu

SEQ ID NO: 240953 - RNA, 19 nt, Artificial Sequence
  Description of Artificial Sequence: Synthetic oligonucleotide
ccgaaccaaagcaugcagc

SEQ ID NO: 240954 - RNA, 19 nt, Artificial Sequence
  Description of Artificial Sequence: Synthetic oligonucleotide
gucagugccggccccggug

SEQ ID NO: 240955 - RNA, 19 nt, Artificial Sequence
  Description of Artificial Sequence: Synthetic oligonucleotide
guccguucagguccugggc

SEQ ID NO: 240956 - RNA, 19 nt, Artificial Sequence
  Description of Artificial Sequence: Synthetic oligonucleotide
cuacccacccaucuuacua

SEQ ID NO: 240957 - RNA, 19 nt, Artificial Sequence
  Description of Artificial Sequence: Synthetic oligonucleotide
cgugcuaaaccacuuuggc

SEQ ID NO: 240958 - RNA, 19 nt, Artificial Sequence
  Description of Artificial Sequence: Synthetic oligonucleotide
aucccuuacuacccaccca

SEQ ID NO: 240959 - RNA, 19 nt, Artificial Sequence
  Description of Artificial Sequence: Synthetic oligonucleotide
ccauuaagacggcugggag

SEQ ID NO: 240960 - RNA, 19 nt, Artificial Sequence
  Description of Artificial Sequence: Synthetic oligonucleotide
cuggccgcucaccuugcgg

SEQ ID NO: 240961 - RNA, 19 nt, Artificial Sequence
  Description of Artificial Sequence: Synthetic oligonucleotide
uggcuacgacucccaaacc

SEQ ID NO: 240962 - RNA, 19 nt, Artificial Sequence
  Description of Artificial Sequence: Synthetic oligonucleotide
cuacagucgaggcuacaga

SEQ ID NO: 240963 - RNA, 19 nt, Artificial Sequence
  Description of Artificial Sequence: Synthetic oligonucleotide
ccuaggaauauccacccca

SEQ ID NO: 240964 - RNA, 19 nt, Artificial Sequence
  Description of Artificial Sequence: Synthetic oligonucleotide
cugaccggaggugagccug

SEQ ID NO: 240965 - RNA, 19 nt, Artificial Sequence
  Description of Artificial Sequence: Synthetic oligonucleotide
acuggauugugaagguaga

SEQ ID NO: 240966 - RNA, 19 nt, Artificial Sequence
  Description of Artificial Sequence: Synthetic oligonucleotide
ucgagaggccauccacgcu

SEQ ID NO: 240967 - RNA, 19 nt, Artificial Sequence
  Description of Artificial Sequence: Synthetic oligonucleotide
uggaguccguucagguccu

SEQ ID NO: 240968 - RNA, 19 nt, Artificial Sequence
  Description of Artificial Sequence: Synthetic oligonucleotide
gccaaaagcuuacuugaga

SEQ ID NO: 240969 - RNA, 19 nt, Artificial Sequence
  Description of Artificial Sequence: Synthetic oligonucleotide
acuacggggugcaauugga

SEQ ID NO: 240970 - RNA, 19 nt, Artificial Sequence
  Description of Artificial Sequence: Synthetic oligonucleotide
gaaguuagugaaagagccu

SEQ ID NO: 240971 - RNA, 19 nt, Artificial Sequence
  Description of Artificial Sequence: Synthetic oligonucleotide
aaaccgccccuaccauuga

SEQ ID NO: 240972 - RNA, 19 nt, Artificial Sequence
  Description of Artificial Sequence: Synthetic oligonucleotide
cuucccuaggccccuccac

SEQ ID NO: 240973 - RNA, 19 nt, Artificial Sequence
  Description of Artificial Sequence: Synthetic oligonucleotide
ccggaggugagccugggag

SEQ ID NO: 240974 - RNA, 19 nt, Artificial Sequence
  Description of Artificial Sequence: Synthetic oligonucleotide
guccuuuguacccgcccgc

SEQ ID NO: 240975 - RNA, 19 nt, Artificial Sequence
  Description of Artificial Sequence: Synthetic oligonucleotide
acuacccacccaucacaga

SEQ ID NO: 240976 - RNA, 19 nt, Artificial Sequence
  Description of Artificial Sequence: Synthetic oligonucleotide
uagaggcccgagcgcaugu

SEQ ID NO: 240977 - RNA, 19 nt, Artificial Sequence
  Description of Artificial Sequence: Synthetic oligonucleotide
aagaaacaguggagacgag

SEQ ID NO: 240978 - RNA, 19 nt, Artificial Sequence
  Description of Artificial Sequence: Synthetic oligonucleotide
uccuuuguacccgcccgca

SEQ ID NO: 240979 - RNA, 19 nt, Artificial Sequence
  Description of Artificial Sequence: Synthetic oligonucleotide
agagaugauguggccauua

SEQ ID NO: 240980 - RNA, 19 nt, Artificial Sequence
  Description of Artificial Sequence: Synthetic oligonucleotide
gcccucaacuccccaaggg

SEQ ID NO: 240981 - RNA, 19 nt, Artificial Sequence
  Description of Artificial Sequence: Synthetic oligonucleotide
ccacccaucacagauagga

SEQ ID NO: 240982 - RNA, 19 nt, Artificial Sequence
  Description of Artificial Sequence: Synthetic oligonucleotide
cgggguuaggauaaccugc

SEQ ID NO: 240983 - RNA, 19 nt, Artificial Sequence
  Description of Artificial Sequence: Synthetic oligonucleotide
cucagauauggccaggaau

SEQ ID NO: 240984 - RNA, 19 nt, Artificial Sequence
  Description of Artificial Sequence: Synthetic oligonucleotide
ucuuacccacucuccuaaa

SEQ ID NO: 240985 - RNA, 19 nt, Artificial Sequence
  Description of Artificial Sequence: Synthetic oligonucleotide
uucggccuccaaacaggcu

SEQ ID NO: 240986 - RNA, 19 nt, Artificial Sequence
  Description of Artificial Sequence: Synthetic oligonucleotide
uacccacccaucacagaua

SEQ ID NO: 240987 - RNA, 19 nt, Artificial Sequence
  Description of Artificial Sequence: Synthetic oligonucleotide
uuaagacggcugggagccg

SEQ ID NO: 240988 - RNA, 19 nt, Artificial Sequence
  Description of Artificial Sequence: Synthetic oligonucleotide
cauaauucauguuggucuu

SEQ ID NO: 240989 - RNA, 19 nt, Artificial Sequence
  Description of Artificial Sequence: Synthetic oligonucleotide
aucuuacuacccacccauc

SEQ ID NO: 240990 - RNA, 19 nt, Artificial Sequence
  Description of Artificial Sequence: Synthetic oligonucleotide
ugcagaccagagccuguuc

SEQ ID NO: 240991 - RNA, 19 nt, Artificial Sequence
  Description of Artificial Sequence: Synthetic oligonucleotide
gcgggguuaggauaaccug

SEQ ID NO: 240992 - RNA, 19 nt, Artificial Sequence
  Description of Artificial Sequence: Synthetic oligonucleotide
gcgugcuaaaccacuuugg

SEQ ID NO: 240993 - RNA, 19 nt, Artificial Sequence
  Description of Artificial Sequence: Synthetic oligonucleotide
accggggucaagguaugug

SEQ ID NO: 240994 - RNA, 19 nt, Artificial Sequence
  Description of Artificial Sequence: Synthetic oligonucleotide
aaccgccccuaccauugaa

SEQ ID NO: 240995 - RNA, 19 nt, Artificial Sequence
  Description of Artificial Sequence: Synthetic oligonucleotide
gucaagguaugugugggua

SEQ ID NO: 240996 - RNA, 19 nt, Artificial Sequence
  Description of Artificial Sequence: Synthetic oligonucleotide
cuacccacccaucacagau

SEQ ID NO: 240997 - RNA, 19 nt, Artificial Sequence
  Description of Artificial Sequence: Synthetic oligonucleotide
aauagaggcccgagcgcau

SEQ ID NO: 240998 - RNA, 19 nt, Artificial Sequence
  Description of Artificial Sequence: Synthetic oligonucleotide
accgccccuaccauugaag

SEQ ID NO: 240999 - RNA, 19 nt, Artificial Sequence
  Description of Artificial Sequence: Synthetic oligonucleotide
agccuagaauugauacaag

SEQ ID NO: 241000 - RNA, 19 nt, Artificial Sequence
  Description of Artificial Sequence: Synthetic oligonucleotide
auagaggcccgagcgcaug

SEQ ID NO: 241001 - RNA, 19 nt, Artificial Sequence
  Description of Artificial Sequence: Synthetic oligonucleotide
uugcuacagucgaggcuac

SEQ ID NO: 241002 - RNA, 19 nt, Artificial Sequence
  Description of Artificial Sequence: Synthetic oligonucleotide
ccgccccuaccauugaagg

SEQ ID NO: 241003 - RNA, 19 nt, Artificial Sequence
  Description of Artificial Sequence: Synthetic oligonucleotide
gggccauugcuacagucga

SEQ ID NO: 241004 - RNA, 19 nt, Artificial Sequence
  Description of Artificial Sequence: Synthetic oligonucleotide
ccuauuuuaacagugugau

SEQ ID NO: 241005 - RNA, 19 nt, Artificial Sequence
  Description of Artificial Sequence: Synthetic oligonucleotide
gggauaaauggggaggaaa

SEQ ID NO: 241006 - RNA, 19 nt, Artificial Sequence
  Description of Artificial Sequence: Synthetic oligonucleotide
ggggacggccaaaaccugg

SEQ ID NO: 241007 - RNA, 19 nt, Artificial Sequence
  Description of Artificial Sequence: Synthetic oligonucleotide
guaccgcaaggcccggcug

SEQ ID NO: 241008 - RNA, 19 nt, Artificial Sequence
  Description of Artificial Sequence: Synthetic oligonucleotide
ggacggaaacuggaaggag

SEQ ID NO: 241009 - RNA, 19 nt, Artificial Sequence
  Description of Artificial Sequence: Synthetic oligonucleotide
ggguccuuuguacccgccc

SEQ ID NO: 241010 - RNA, 19 nt, Artificial Sequence
  Description of Artificial Sequence: Synthetic oligonucleotide
ggaagaccgccuccaaauc

SEQ ID NO: 241011 - RNA, 19 nt, Artificial Sequence
  Description of Artificial Sequence: Synthetic oligonucleotide
ggguuaggauaaccugcag

SEQ ID NO: 241012 - RNA, 19 nt, Artificial Sequence
  Description of Artificial Sequence: Synthetic oligonucleotide
ucccuaggccccuccacuu

SEQ ID NO: 241013 - RNA, 19 nt, Artificial Sequence
  Description of Artificial Sequence: Synthetic oligonucleotide
cccugcaaccucuggguag

SEQ ID NO: 241014 - RNA, 19 nt, Artificial Sequence
  Description of Artificial Sequence: Synthetic oligonucleotide
caauuggacucagagugcu

SEQ ID NO: 241015 - RNA, 19 nt, Artificial Sequence
  Description of Artificial Sequence: Synthetic oligonucleotide
uuccgagggcgagaccucu

SEQ ID NO: 241016 - RNA, 19 nt, Artificial Sequence
  Description of Artificial Sequence: Synthetic oligonucleotide
gggguuaggauaaccugca

SEQ ID NO: 241017 - RNA, 19 nt, Artificial Sequence
  Description of Artificial Sequence: Synthetic oligonucleotide
gcgcauguauucguuccgg

SEQ ID NO: 241018 - RNA, 19 nt, Artificial Sequence
  Description of Artificial Sequence: Synthetic oligonucleotide
caccacaaccagagcauaa

SEQ ID NO: 241019 - RNA, 19 nt, Artificial Sequence
  Description of Artificial Sequence: Synthetic oligonucleotide
cuagcucuucaacccaugu

SEQ ID NO: 241020 - RNA, 19 nt, Artificial Sequence
  Description of Artificial Sequence: Synthetic oligonucleotide
guauucguuccggcugcug

SEQ ID NO: 241021 - RNA, 19 nt, Artificial Sequence
  Description of Artificial Sequence: Synthetic oligonucleotide
ugucagugccggccccggu

SEQ ID NO: 241022 - RNA, 19 nt, Artificial Sequence
  Description of Artificial Sequence: Synthetic oligonucleotide
cuuacuacccacccaucuu

SEQ ID NO: 241023 - RNA, 19 nt, Artificial Sequence
  Description of Artificial Sequence: Synthetic oligonucleotide
gggacggccaaaaccuggc

SEQ ID NO: 241024 - RNA, 19 nt, Artificial Sequence
  Description of Artificial Sequence: Synthetic oligonucleotide
ccccuaccauugaaggagg

SEQ ID NO: 241025 - RNA, 19 nt, Artificial Sequence
  Description of Artificial Sequence: Synthetic oligonucleotide
ggagguagcaauuccuauu

SEQ ID NO: 241026 - RNA, 19 nt, Artificial Sequence
  Description of Artificial Sequence: Synthetic oligonucleotide
ggugucagugccggccccg

SEQ ID NO: 241027 - RNA, 19 nt, Artificial Sequence
  Description of Artificial Sequence: Synthetic oligonucleotide
cagauauggccaggaauaa

SEQ ID NO: 241028 - RNA, 19 nt, Artificial Sequence
  Description of Artificial Sequence: Synthetic oligonucleotide
guaguaccgcaaggcccgg

SEQ ID NO: 241029 - RNA, 19 nt, Artificial Sequence
  Description of Artificial Sequence: Synthetic oligonucleotide
cuggauugugaagguagaa

SEQ ID NO: 241030 - RNA, 19 nt, Artificial Sequence
  Description of Artificial Sequence: Synthetic oligonucleotide
ggguuuggacuggugcucc

SEQ ID NO: 241031 - RNA, 19 nt, Artificial Sequence
  Description of Artificial Sequence: Synthetic oligonucleotide
ccaagagaugauguggcca

SEQ ID NO: 241032 - RNA, 19 nt, Artificial Sequence
  Description of Artificial Sequence: Synthetic oligonucleotide
gaccggaggugagccuggg

SEQ ID NO: 241033 - RNA, 19 nt, Artificial Sequence
  Description of Artificial Sequence: Synthetic oligonucleotide
uaguaccgcaaggcccggc

SEQ ID NO: 241034 - RNA, 19 nt, Artificial Sequence
  Description of Artificial Sequence: Synthetic oligonucleotide
ccgcccgcaggaaauuggg

SEQ ID NO: 241035 - RNA, 19 nt, Artificial Sequence
  Description of Artificial Sequence: Synthetic oligonucleotide
acccugcaaccucugggua

SEQ ID NO: 241036 - RNA, 19 nt, Artificial Sequence
  Description of Artificial Sequence: Synthetic oligonucleotide
ggagagcuuggcuggacua

SEQ ID NO: 241037 - RNA, 19 nt, Artificial Sequence
  Description of Artificial Sequence: Synthetic oligonucleotide
cccgcccgcaggaaauugg

SEQ ID NO: 241038 - RNA, 19 nt, Artificial Sequence
  Description of Artificial Sequence: Synthetic oligonucleotide
ccgagggcgagaccucugg

SEQ ID NO: 241039 - RNA, 19 nt, Artificial Sequence
  Description of Artificial Sequence: Synthetic oligonucleotide
agagagcccuggaguacug

SEQ ID NO: 241040 - RNA, 19 nt, Artificial Sequence
  Description of Artificial Sequence: Synthetic oligonucleotide
gcaggcugagaaauaaaua

SEQ ID NO: 241041 - RNA, 19 nt, Artificial Sequence
  Description of Artificial Sequence: Synthetic oligonucleotide
cccacccaucuuacuaccc

SEQ ID NO: 241042 - RNA, 19 nt, Artificial Sequence
  Description of Artificial Sequence: Synthetic oligonucleotide
ggcuaaguggaaguuccaa

SEQ ID NO: 241043 - RNA, 19 nt, Artificial Sequence
  Description of Artificial Sequence: Synthetic oligonucleotide
cucgggcgggguuaggaua

SEQ ID NO: 241044 - RNA, 19 nt, Artificial Sequence
  Description of Artificial Sequence: Synthetic oligonucleotide
ccaaaucccuuacuaccca

SEQ ID NO: 241045 - RNA, 19 nt, Artificial Sequence
  Description of Artificial Sequence: Synthetic oligonucleotide
cagacucaauucuuccgau

SEQ ID NO: 241046 - RNA, 19 nt, Artificial Sequence
  Description of Artificial Sequence: Synthetic oligonucleotide
ggacuacggggugcaauug

SEQ ID NO: 241047 - RNA, 19 nt, Artificial Sequence
  Description of Artificial Sequence: Synthetic oligonucleotide
ggcgagaccucugguucag

SEQ ID NO: 241048 - RNA, 19 nt, Artificial Sequence
  Description of Artificial Sequence: Synthetic oligonucleotide
aggggacggccaaaaccug

SEQ ID NO: 241049 - RNA, 19 nt, Artificial Sequence
  Description of Artificial Sequence: Synthetic oligonucleotide
gggguuuggacuggugcuc

SEQ ID NO: 241050 - RNA, 19 nt, Artificial Sequence
  Description of Artificial Sequence: Synthetic oligonucleotide
agaccgccuccaaaucccu

SEQ ID NO: 241051 - RNA, 19 nt, Artificial Sequence
  Description of Artificial Sequence: Synthetic oligonucleotide
cuugcgcaguccccacaga

SEQ ID NO: 241052 - RNA, 19 nt, Artificial Sequence
  Description of Artificial Sequence: Synthetic oligonucleotide
ccacuccagccuagaauug

SEQ ID NO: 241053 - RNA, 19 nt, Artificial Sequence
  Description of Artificial Sequence: Synthetic oligonucleotide
acccgcccgcaggaaauug

SEQ ID NO: 241054 - RNA, 19 nt, Artificial Sequence
  Description of Artificial Sequence: Synthetic oligonucleotide
ccccuauugaaaagcccca

SEQ ID NO: 241055 - RNA, 19 nt, Artificial Sequence
  Description of Artificial Sequence: Synthetic oligonucleotide
agugccggccccgguggcu

SEQ ID NO: 241056 - RNA, 19 nt, Artificial Sequence
  Description of Artificial Sequence: Synthetic oligonucleotide
cccacuccagccuagaauu

SEQ ID NO: 241057 - RNA, 19 nt, Artificial Sequence
  Description of Artificial Sequence: Synthetic oligonucleotide
ggaacacccugcaaccucu

SEQ ID NO: 241058 - RNA, 19 nt, Artificial Sequence
  Description of Artificial Sequence: Synthetic oligonucleotide
uuguacccgcccgcaggaa

SEQ ID NO: 241059 - RNA, 19 nt, Artificial Sequence
  Description of Artificial Sequence: Synthetic oligonucleotide
ccuuacuacccacccaucu

SEQ ID NO: 241060 - RNA, 19 nt, Artificial Sequence
  Description of Artificial Sequence: Synthetic oligonucleotide
gagacgaguguagcaccgu

SEQ ID NO: 241061 - RNA, 19 nt, Artificial Sequence
  Description of Artificial Sequence: Synthetic oligonucleotide
gggcgagaccucugguuca

SEQ ID NO: 241062 - RNA, 19 nt, Artificial Sequence
  Description of Artificial Sequence: Synthetic oligonucleotide
cuacgacucccaaaccauu

SEQ ID NO: 241063 - RNA, 19 nt, Artificial Sequence
  Description of Artificial Sequence: Synthetic oligonucleotide
ggcgggguuaggauaaccu

SEQ ID NO: 241064 - RNA, 19 nt, Artificial Sequence
  Description of Artificial Sequence: Synthetic oligonucleotide
aggccuuccgagggcgaga

SEQ ID NO: 241065 - RNA, 19 nt, Artificial Sequence
  Description of Artificial Sequence: Synthetic oligonucleotide
cagagagcccuggaguacu

SEQ ID NO: 241066 - RNA, 19 nt, Artificial Sequence
  Description of Artificial Sequence: Synthetic oligonucleotide
gcuacgacucccaaaccau

SEQ ID NO: 241067 - RNA, 19 nt, Artificial Sequence
  Description of Artificial Sequence: Synthetic oligonucleotide
ggccauuaccuuguucucu

SEQ ID NO: 241068 - RNA, 19 nt, Artificial Sequence
  Description of Artificial Sequence: Synthetic oligonucleotide
cguuccggcugcugcgugc

SEQ ID NO: 241069 - RNA, 19 nt, Artificial Sequence
  Description of Artificial Sequence: Synthetic oligonucleotide
ggggucgagaggccaucca

SEQ ID NO: 241070 - RNA, 19 nt, Artificial Sequence
  Description of Artificial Sequence: Synthetic oligonucleotide
gggcgggguuaggauaacc

SEQ ID NO: 241071 - RNA, 19 nt, Artificial Sequence
  Description of Artificial Sequence: Synthetic oligonucleotide
ggguuggcaggaagaccgc

SEQ ID NO: 241072 - RNA, 19 nt, Artificial Sequence
  Description of Artificial Sequence: Synthetic oligonucleotide
ggcuggacuacggggugca

SEQ ID NO: 241073 - RNA, 19 nt, Artificial Sequence
  Description of Artificial Sequence: Synthetic oligonucleotide
cgcccgcaggaaauugggg

SEQ ID NO: 241074 - RNA, 19 nt, Artificial Sequence
  Description of Artificial Sequence: Synthetic oligonucleotide
uacccgcccgcaggaaauu

SEQ ID NO: 241075 - RNA, 19 nt, Artificial Sequence
  Description of Artificial Sequence: Synthetic oligonucleotide
ccauuaccuuguucucuca

SEQ ID NO: 241076 - RNA, 19 nt, Artificial Sequence
  Description of Artificial Sequence: Synthetic oligonucleotide
guuccggcugcugcgugcu

SEQ ID NO: 241077 - RNA, 19 nt, Artificial Sequence
  Description of Artificial Sequence: Synthetic oligonucleotide
acccuccauugggagguaa

SEQ ID NO: 241078 - RNA, 19 nt, Artificial Sequence
  Description of Artificial Sequence: Synthetic oligonucleotide
cccuuacuacccacccauc

SEQ ID NO: 241079 - RNA, 19 nt, Artificial Sequence
  Description of Artificial Sequence: Synthetic oligonucleotide
aacccuccauugggaggua

SEQ ID NO: 241080 - RNA, 19 nt, Artificial Sequence
  Description of Artificial Sequence: Synthetic oligonucleotide
guacccgcccgcaggaaau

SEQ ID NO: 241081 - RNA, 19 nt, Artificial Sequence
  Description of Artificial Sequence: Synthetic oligonucleotide
ggacuggauugugaaggua

SEQ ID NO: 241082 - RNA, 19 nt, Artificial Sequence
  Description of Artificial Sequence: Synthetic oligonucleotide
cuggacuacggggugcaau

SEQ ID NO: 241083 - RNA, 19 nt, Artificial Sequence
  Description of Artificial Sequence: Synthetic oligonucleotide
ggggauaaauggggaggaa

SEQ ID NO: 241084 - RNA, 19 nt, Artificial Sequence
  Description of Artificial Sequence: Synthetic oligonucleotide
ggcuucaugucuccccauu

SEQ ID NO: 241085 - RNA, 19 nt, Artificial Sequence
  Description of Artificial Sequence: Synthetic oligonucleotide
ccuauugaaaagccccauu

SEQ ID NO: 241086 - RNA, 19 nt, Artificial Sequence
  Description of Artificial Sequence: Synthetic oligonucleotide
gggcuaaguggaaguucca

SEQ ID NO: 241087 - RNA, 19 nt, Artificial Sequence
  Description of Artificial Sequence: Synthetic oligonucleotide
gguuuggacuggugcuccu

SEQ ID NO: 241088 - RNA, 19 nt, Artificial Sequence
  Description of Artificial Sequence: Synthetic oligonucleotide
ccgcucaccuugcggauga

SEQ ID NO: 241089 - RNA, 19 nt, Artificial Sequence
  Description of Artificial Sequence: Synthetic oligonucleotide
cugcgugcuaaaccacuuu

SEQ ID NO: 241090 - RNA, 19 nt, Artificial Sequence
  Description of Artificial Sequence: Synthetic oligonucleotide
gccucgggcgggguuagga

SEQ ID NO: 241091 - RNA, 19 nt, Artificial Sequence
  Description of Artificial Sequence: Synthetic oligonucleotide
cgacucccaaaccauuaaa

SEQ ID NO: 241092 - RNA, 19 nt, Artificial Sequence
  Description of Artificial Sequence: Synthetic oligonucleotide
cgagaccucugguucagcu

SEQ ID NO: 241093 - RNA, 19 nt, Artificial Sequence
  Description of Artificial Sequence: Synthetic oligonucleotide
cgccccuaccauugaagga

SEQ ID NO: 241094 - RNA, 19 nt, Artificial Sequence
  Description of Artificial Sequence: Synthetic oligonucleotide
accaucccgugagguccaa

SEQ ID NO: 241095 - RNA, 19 nt, Artificial Sequence
  Description of Artificial Sequence: Synthetic oligonucleotide
gcugaccggaggugagccu

SEQ ID NO: 241096 - RNA, 19 nt, Artificial Sequence
  Description of Artificial Sequence: Synthetic oligonucleotide
cccagacggggaccaccac

SEQ ID NO: 241097 - RNA, 19 nt, Artificial Sequence
  Description of Artificial Sequence: Synthetic oligonucleotide
gggccucgggcgggguuag

SEQ ID NO: 241098 - RNA, 19 nt, Artificial Sequence
  Description of Artificial Sequence: Synthetic oligonucleotide
cccgagcgcauguauucgu

SEQ ID NO: 241099 - RNA, 19 nt, Artificial Sequence
  Description of Artificial Sequence: Synthetic oligonucleotide
gaccgccuccaaaucccuu

SEQ ID NO: 241100 - RNA, 19 nt, Artificial Sequence
  Description of Artificial Sequence: Synthetic oligonucleotide
cccuauugaaaagccccau

SEQ ID NO: 241101 - RNA, 19 nt, Artificial Sequence
  Description of Artificial Sequence: Synthetic oligonucleotide
ccacacaccugugcugugu

SEQ ID NO: 241102 - RNA, 19 nt, Artificial Sequence
  Description of Artificial Sequence: Synthetic oligonucleotide
gggcgcccucaacucccca

SEQ ID NO: 241103 - RNA, 19 nt, Artificial Sequence
  Description of Artificial Sequence: Synthetic oligonucleotide
ccgcaaggcccggcugagc

SEQ ID NO: 241104 - RNA, 19 nt, Artificial Sequence
  Description of Artificial Sequence: Synthetic oligonucleotide
ggccucgggcgggguuagg

SEQ ID NO: 241105 - RNA, 19 nt, Artificial Sequence
  Description of Artificial Sequence: Synthetic oligonucleotide
ccgagcgcauguauucguu

SEQ ID NO: 241106 - RNA, 19 nt, Artificial Sequence
  Description of Artificial Sequence: Synthetic oligonucleotide
caccggggucaagguaugu

SEQ ID NO: 241107 - RNA, 19 nt, Artificial Sequence
  Description of Artificial Sequence: Synthetic oligonucleotide
ccucgggcgggguuaggau

SEQ ID NO: 241108 - RNA, 19 nt, Artificial Sequence
  Description of Artificial Sequence: Synthetic oligonucleotide
gcuggacuacggggugcaa

SEQ ID NO: 241109 - RNA, 19 nt, Artificial Sequence
  Description of Artificial Sequence: Synthetic oligonucleotide
cccuaggccccuccacuuu

SEQ ID NO: 241110 - RNA, 19 nt, Artificial Sequence
  Description of Artificial Sequence: Synthetic oligonucleotide
cgggcgggguuaggauaac

SEQ ID NO: 241111 - RNA, 19 nt, Artificial Sequence
  Description of Artificial Sequence: Synthetic oligonucleotide
aauaagacgaucuccaggg

SEQ ID NO: 241112 - RNA, 19 nt, Artificial Sequence
  Description of Artificial Sequence: Synthetic oligonucleotide
uuugguaucaguaauacaa

SEQ ID NO: 241113 - RNA, 19 nt, Artificial Sequence
  Description of Artificial Sequence: Synthetic oligonucleotide
cuauuaguaaucuuggucg

SEQ ID NO: 241114 - RNA, 19 nt, Artificial Sequence
  Description of Artificial Sequence: Synthetic oligonucleotide
ucuugcaucaguuaugugg

SEQ ID NO: 241115 - RNA, 19 nt, Artificial Sequence
  Description of Artificial Sequence: Synthetic oligonucleotide
auuacagugacauaaucag

SEQ ID NO: 241116 - RNA, 19 nt, Artificial Sequence
  Description of Artificial Sequence: Synthetic oligonucleotide
uuuauagaauauaaccuag

SEQ ID NO: 241117 - RNA, 19 nt, Artificial Sequence
  Description of Artificial Sequence: Synthetic oligonucleotide
acaauaaccuacuaggaag

SEQ ID NO: 241118 - RNA, 19 nt, Artificial Sequence
  Description of Artificial Sequence: Synthetic oligonucleotide
cuuauuaugaacuuuccuc

SEQ ID NO: 241119 - RNA, 19 nt, Artificial Sequence
  Description of Artificial Sequence: Synthetic oligonucleotide
agaauugucucugaggccc

SEQ ID NO: 241120 - RNA, 19 nt, Artificial Sequence
  Description of Artificial Sequence: Synthetic oligonucleotide
aacuguaagaucuagccaa

SEQ ID NO: 241121 - RNA, 19 nt, Artificial Sequence
  Description of Artificial Sequence: Synthetic oligonucleotide
uuagcggagauauuaauug

SEQ ID NO: 241122 - RNA, 19 nt, Artificial Sequence
  Description of Artificial Sequence: Synthetic oligonucleotide
uaauaagacgaucuccagg

SEQ ID NO: 241123 - RNA, 19 nt, Artificial Sequence
  Description of Artificial Sequence: Synthetic oligonucleotide
caugguaauaagauggugc

SEQ ID NO: 241124 - RNA, 19 nt, Artificial Sequence
  Description of Artificial Sequence: Synthetic oligonucleotide
ucuaugccuaauaagacga

SEQ ID NO: 241125 - RNA, 19 nt, Artificial Sequence
  Description of Artificial Sequence: Synthetic oligonucleotide
uuauuaugaacuuuccucu

SEQ ID NO: 241126 - RNA, 19 nt, Artificial Sequence
  Description of Artificial Sequence: Synthetic oligonucleotide
aauguauacacgguaaacu

SEQ ID NO: 241127 - RNA, 19 nt, Artificial Sequence
  Description of Artificial Sequence: Synthetic oligonucleotide
uaagaucuagccaaacuug

SEQ ID NO: 241128 - RNA, 19 nt, Artificial Sequence
  Description of Artificial Sequence: Synthetic oligonucleotide
uuaucuuaccacauguaca

SEQ ID NO: 241129 - RNA, 19 nt, Artificial Sequence
  Description of Artificial Sequence: Synthetic oligonucleotide
ggagauauuaauugaagag

SEQ ID NO: 241130 - RNA, 19 nt, Artificial Sequence
  Description of Artificial Sequence: Synthetic oligonucleotide
ugacuuaaugucugcaccg

SEQ ID NO: 241131 - RNA, 19 nt, Artificial Sequence
  Description of Artificial Sequence: Synthetic oligonucleotide
ucuagcucgagucauucgc

SEQ ID NO: 241132 - RNA, 19 nt, Artificial Sequence
  Description of Artificial Sequence: Synthetic oligonucleotide
ugcuuaagcuaaaacaaca

SEQ ID NO: 241133 - RNA, 19 nt, Artificial Sequence
  Description of Artificial Sequence: Synthetic oligonucleotide
ucuaauguauacacgguaa

SEQ ID NO: 241134 - RNA, 19 nt, Artificial Sequence
  Description of Artificial Sequence: Synthetic oligonucleotide
gauuacagaugaaaggucc

SEQ ID NO: 241135 - RNA, 19 nt, Artificial Sequence
  Description of Artificial Sequence: Synthetic oligonucleotide
uuaucaguuaucuuaccac

SEQ ID NO: 241136 - RNA, 19 nt, Artificial Sequence
  Description of Artificial Sequence: Synthetic oligonucleotide
ugaccuuuuaucaccagca

SEQ ID NO: 241137 - RNA, 19 nt, Artificial Sequence
  Description of Artificial Sequence: Synthetic oligonucleotide
ucaauauuggagguacucg

SEQ ID NO: 241138 - RNA, 19 nt, Artificial Sequence
  Description of Artificial Sequence: Synthetic oligonucleotide
auacacgguaaacuuuucc

SEQ ID NO: 241139 - RNA, 19 nt, Artificial Sequence
  Description of Artificial Sequence: Synthetic oligonucleotide
ugcgacauagacuaugcug

SEQ ID NO: 241140 - RNA, 19 nt, Artificial Sequence
  Description of Artificial Sequence: Synthetic oligonucleotide
agacuuaucaguuaucuua

SEQ ID NO: 241141 - RNA, 19 nt, Artificial Sequence
  Description of Artificial Sequence: Synthetic oligonucleotide
aucaauagcaagccuaugu

SEQ ID NO: 241142 - RNA, 19 nt, Artificial Sequence
  Description of Artificial Sequence: Synthetic oligonucleotide
uguaagaucuagccaaacu

SEQ ID NO: 241143 - RNA, 19 nt, Artificial Sequence
  Description of Artificial Sequence: Synthetic oligonucleotide
acagacguaacucuagucu

SEQ ID NO: 241144 - RNA, 19 nt, Artificial Sequence
  Description of Artificial Sequence: Synthetic oligonucleotide
uacagauuagaucaauguc

SEQ ID NO: 241145 - RNA, 19 nt, Artificial Sequence
  Description of Artificial Sequence: Synthetic oligonucleotide
ucuucaacugagcaggggu

SEQ ID NO: 241146 - RNA, 19 nt, Artificial Sequence
  Description of Artificial Sequence: Synthetic oligonucleotide
aaacuguaagaucuagcca

SEQ ID NO: 241147 - RNA, 19 nt, Artificial Sequence
  Description of Artificial Sequence: Synthetic oligonucleotide
uacacgguaaacuuuucca

SEQ ID NO: 241148 - RNA, 19 nt, Artificial Sequence
  Description of Artificial Sequence: Synthetic oligonucleotide
uaucuuaccacauguacau

SEQ ID NO: 241149 - RNA, 19 nt, Artificial Sequence
  Description of Artificial Sequence: Synthetic oligonucleotide
cagauuagaucaauguccc

SEQ ID NO: 241150 - RNA, 19 nt, Artificial Sequence
  Description of Artificial Sequence: Synthetic oligonucleotide
cauauugacuuaaugucug

SEQ ID NO: 241151 - RNA, 19 nt, Artificial Sequence
  Description of Artificial Sequence: Synthetic oligonucleotide
acuauuguuacaguguucu

SEQ ID NO: 241152 - RNA, 19 nt, Artificial Sequence
  Description of Artificial Sequence: Synthetic oligonucleotide
ugagacagucucaaguagc

SEQ ID NO: 241153 - RNA, 19 nt, Artificial Sequence
  Description of Artificial Sequence: Synthetic oligonucleotide
agccucagcacauauugac

SEQ ID NO: 241154 - RNA, 19 nt, Artificial Sequence
  Description of Artificial Sequence: Synthetic oligonucleotide
auauuggagguacucgagg

SEQ ID NO: 241155 - RNA, 19 nt, Artificial Sequence
  Description of Artificial Sequence: Synthetic oligonucleotide
aauacuuggugcaaugaca

SEQ ID NO: 241156 - RNA, 19 nt, Artificial Sequence
  Description of Artificial Sequence: Synthetic oligonucleotide
cugacuugauuauucacag

SEQ ID NO: 241157 - RNA, 19 nt, Artificial Sequence
  Description of Artificial Sequence: Synthetic oligonucleotide
acauagacuaugcugggug

SEQ ID NO: 241158 - RNA, 19 nt, Artificial Sequence
  Description of Artificial Sequence: Synthetic oligonucleotide
ggcauuucuauuuaaauga

SEQ ID NO: 241159 - RNA, 19 nt, Artificial Sequence
  Description of Artificial Sequence: Synthetic oligonucleotide
uguacauaaguaccaggga

SEQ ID NO: 241160 - RNA, 19 nt, Artificial Sequence
  Description of Artificial Sequence: Synthetic oligonucleotide
ucuuaccacauguacauaa

SEQ ID NO: 241161 - RNA, 19 nt, Artificial Sequence
  Description of Artificial Sequence: Synthetic oligonucleotide
ucacgaaucaucugggaac

SEQ ID NO: 241162 - RNA, 19 nt, Artificial Sequence
  Description of Artificial Sequence: Synthetic oligonucleotide
aucuagccaaacuugaaca

SEQ ID NO: 241163 - RNA, 19 nt, Artificial Sequence
  Description of Artificial Sequence: Synthetic oligonucleotide
uggugcaaugacaucauga

SEQ ID NO: 241164 - RNA, 19 nt, Artificial Sequence
  Description of Artificial Sequence: Synthetic oligonucleotide
gaacaugucucuucaggag

SEQ ID NO: 241165 - RNA, 19 nt, Artificial Sequence
  Description of Artificial Sequence: Synthetic oligonucleotide
uacuggaagaaccuuguaa

SEQ ID NO: 241166 - RNA, 19 nt, Artificial Sequence
  Description of Artificial Sequence: Synthetic oligonucleotide
gaucuagccaaacuugaac

SEQ ID NO: 241167 - RNA, 19 nt, Artificial Sequence
  Description of Artificial Sequence: Synthetic oligonucleotide
uuuggcaugacaugguaau

SEQ ID NO: 241168 - RNA, 19 nt, Artificial Sequence
  Description of Artificial Sequence: Synthetic oligonucleotide
ugugcgacauagacuaugc

SEQ ID NO: 241169 - RNA, 19 nt, Artificial Sequence
  Description of Artificial Sequence: Synthetic oligonucleotide
ugcaccgcaguauccaacg

SEQ ID NO: 241170 - RNA, 19 nt, Artificial Sequence
  Description of Artificial Sequence: Synthetic oligonucleotide
accuacaugccacuuugac

SEQ ID NO: 241171 - RNA, 19 nt, Artificial Sequence
  Description of Artificial Sequence: Synthetic oligonucleotide
auuuuguuaccuacaugcc

SEQ ID NO: 241172 - RNA, 19 nt, Artificial Sequence
  Description of Artificial Sequence: Synthetic oligonucleotide
ugaguguugguccaacuau

SEQ ID NO: 241173 - RNA, 19 nt, Artificial Sequence
  Description of Artificial Sequence: Synthetic oligonucleotide
auugguugcuuuauuacag

SEQ ID NO: 241174 - RNA, 19 nt, Artificial Sequence
  Description of Artificial Sequence: Synthetic oligonucleotide
ucuaugaccugggagcuag

SEQ ID NO: 241175 - RNA, 19 nt, Artificial Sequence
  Description of Artificial Sequence: Synthetic oligonucleotide
uuaacccaaauuagaauua

SEQ ID NO: 241176 - RNA, 19 nt, Artificial Sequence
  Description of Artificial Sequence: Synthetic oligonucleotide
agugcuuaagcuaaaacaa

SEQ ID NO: 241177 - RNA, 19 nt, Artificial Sequence
  Description of Artificial Sequence: Synthetic oligonucleotide
agucauucgcagaauacac

SEQ ID NO: 241178 - RNA, 19 nt, Artificial Sequence
  Description of Artificial Sequence: Synthetic oligonucleotide
ugugaaaguuuccuucgcu

SEQ ID NO: 241179 - RNA, 19 nt, Artificial Sequence
  Description of Artificial Sequence: Synthetic oligonucleotide
ucuaucuggauuguauucu

SEQ ID NO: 241180 - RNA, 19 nt, Artificial Sequence
  Description of Artificial Sequence: Synthetic oligonucleotide
cuuaucaauagcaagccua

SEQ ID NO: 241181 - RNA, 19 nt, Artificial Sequence
  Description of Artificial Sequence: Synthetic oligonucleotide
cuuggucgaaaagacauag

SEQ ID NO: 241182 - RNA, 19 nt, Artificial Sequence
  Description of Artificial Sequence: Synthetic oligonucleotide
agggucucuaucuggauug

SEQ ID NO: 241183 - RNA, 19 nt, Artificial Sequence
  Description of Artificial Sequence: Synthetic oligonucleotide
uaaaugcacuggcugauaa

SEQ ID NO: 241184 - RNA, 19 nt, Artificial Sequence
  Description of Artificial Sequence: Synthetic oligonucleotide
uaauguauacacgguaaac

SEQ ID NO: 241185 - RNA, 19 nt, Artificial Sequence
  Description of Artificial Sequence: Synthetic oligonucleotide
cuugcaucaguuaugugga

SEQ ID NO: 241186 - RNA, 19 nt, Artificial Sequence
  Description of Artificial Sequence: Synthetic oligonucleotide
uuggucgaaaagacauagg

SEQ ID NO: 241187 - RNA, 19 nt, Artificial Sequence
  Description of Artificial Sequence: Synthetic oligonucleotide
gacauagguugguaacagg

SEQ ID NO: 241188 - RNA, 19 nt, Artificial Sequence
  Description of Artificial Sequence: Synthetic oligonucleotide
agucagauacuuauguaag

SEQ ID NO: 241189 - RNA, 19 nt, Artificial Sequence
  Description of Artificial Sequence: Synthetic oligonucleotide
ugucuaauguauacacggu

SEQ ID NO: 241190 - RNA, 19 nt, Artificial Sequence
  Description of Artificial Sequence: Synthetic oligonucleotide
cuuaucaguuaucuuacca

SEQ ID NO: 241191 - RNA, 19 nt, Artificial Sequence
  Description of Artificial Sequence: Synthetic oligonucleotide
cccacuauuaguaaucuug

SEQ ID NO: 241192 - RNA, 19 nt, Artificial Sequence
  Description of Artificial Sequence: Synthetic oligonucleotide
gacaaucaaauaggaauug

SEQ ID NO: 241193 - RNA, 19 nt, Artificial Sequence
  Description of Artificial Sequence: Synthetic oligonucleotide
ucuaccugggaacgucuag

SEQ ID NO: 241194 - RNA, 19 nt, Artificial Sequence
  Description of Artificial Sequence: Synthetic oligonucleotide
ccugggaacgucuagcucg

SEQ ID NO: 241195 - RNA, 19 nt, Artificial Sequence
  Description of Artificial Sequence: Synthetic oligonucleotide
gaacaauugaaguuuucua

SEQ ID NO: 241196 - RNA, 19 nt, Artificial Sequence
  Description of Artificial Sequence: Synthetic oligonucleotide
aggucuagguuguuuucgg

SEQ ID NO: 241197 - RNA, 19 nt, Artificial Sequence
  Description of Artificial Sequence: Synthetic oligonucleotide
acauauugacuuaaugucu

SEQ ID NO: 241198 - RNA, 19 nt, Artificial Sequence
  Description of Artificial Sequence: Synthetic oligonucleotide
cauagacuaugcugggugc

SEQ ID NO: 241199 - RNA, 19 nt, Artificial Sequence
  Description of Artificial Sequence: Synthetic oligonucleotide
ucuagccaaacuugaacaa

SEQ ID NO: 241200 - RNA, 19 nt, Artificial Sequence
  Description of Artificial Sequence: Synthetic oligonucleotide
aagaucuagccaaacuuga

SEQ ID NO: 241201 - RNA, 19 nt, Artificial Sequence
  Description of Artificial Sequence: Synthetic oligonucleotide
aauaaccuacuaggaagug

SEQ ID NO: 241202 - RNA, 19 nt, Artificial Sequence
  Description of Artificial Sequence: Synthetic oligonucleotide
ugguaucaguaauacaaaa

SEQ ID NO: 241203 - RNA, 19 nt, Artificial Sequence
  Description of Artificial Sequence: Synthetic oligonucleotide
uccaacgcaguuuucugcu

SEQ ID NO: 241204 - RNA, 19 nt, Artificial Sequence
  Description of Artificial Sequence: Synthetic oligonucleotide
aggaacuacaaccucguuu

SEQ ID NO: 241205 - RNA, 19 nt, Artificial Sequence
  Description of Artificial Sequence: Synthetic oligonucleotide
cagacguaacucuagucug

SEQ ID NO: 241206 - RNA, 19 nt, Artificial Sequence
  Description of Artificial Sequence: Synthetic oligonucleotide
uccuccguaucacuacucc

SEQ ID NO: 241207 - RNA, 19 nt, Artificial Sequence
  Description of Artificial Sequence: Synthetic oligonucleotide
uuaguaaucuuggucgaaa

SEQ ID NO: 241208 - RNA, 19 nt, Artificial Sequence
  Description of Artificial Sequence: Synthetic oligonucleotide
gcggucuugguucaggugg

SEQ ID NO: 241209 - RNA, 19 nt, Artificial Sequence
  Description of Artificial Sequence: Synthetic oligonucleotide
aggcggugucccuuaaagc

SEQ ID NO: 241210 - RNA, 19 nt, Artificial Sequence
  Description of Artificial Sequence: Synthetic oligonucleotide
cugucagcggucuugguuc

SEQ ID NO: 241211 - RNA, 19 nt, Artificial Sequence
  Description of Artificial Sequence: Synthetic oligonucleotide
agggucaacaggcuuggug

SEQ ID NO: 241212 - RNA, 19 nt, Artificial Sequence
  Description of Artificial Sequence: Synthetic oligonucleotide
ugauuauucacagcaguuu

SEQ ID NO: 241213 - RNA, 19 nt, Artificial Sequence
  Description of Artificial Sequence: Synthetic oligonucleotide
ucagauagucuuucacagu

SEQ ID NO: 241214 - RNA, 19 nt, Artificial Sequence
  Description of Artificial Sequence: Synthetic oligonucleotide
uccguaucacuacuccuga

SEQ ID NO: 241215 - RNA, 19 nt, Artificial Sequence
  Description of Artificial Sequence: Synthetic oligonucleotide
gaaccgcuuaucaauagca

SEQ ID NO: 241216 - RNA, 19 nt, Artificial Sequence
  Description of Artificial Sequence: Synthetic oligonucleotide
guacucgagguauuuucag

SEQ ID NO: 241217 - RNA, 19 nt, Artificial Sequence
  Description of Artificial Sequence: Synthetic oligonucleotide
uagcggagauauuaauuga

SEQ ID NO: 241218 - RNA, 19 nt, Artificial Sequence
  Description of Artificial Sequence: Synthetic oligonucleotide
ccacuauuaguaaucuugg

SEQ ID NO: 241219 - RNA, 19 nt, Artificial Sequence
  Description of Artificial Sequence: Synthetic oligonucleotide
uuuccuccguaucacuacu

SEQ ID NO: 241220 - RNA, 19 nt, Artificial Sequence
  Description of Artificial Sequence: Synthetic oligonucleotide
caugacaugguaauaagau

SEQ ID NO: 241221 - RNA, 19 nt, Artificial Sequence
  Description of Artificial Sequence: Synthetic oligonucleotide
gcagccucagcacauauug

SEQ ID NO: 241222 - RNA, 19 nt, Artificial Sequence
  Description of Artificial Sequence: Synthetic oligonucleotide
cagucagauacuuauguaa

SEQ ID NO: 241223 - RNA, 19 nt, Artificial Sequence
  Description of Artificial Sequence: Synthetic oligonucleotide
uacuaggaaguguuaaauu

SEQ ID NO: 241224 - RNA, 19 nt, Artificial Sequence
  Description of Artificial Sequence: Synthetic oligonucleotide
augccuaauaagacgaucu

SEQ ID NO: 241225 - RNA, 19 nt, Artificial Sequence
  Description of Artificial Sequence: Synthetic oligonucleotide
agauacuuauguaagucaa

SEQ ID NO: 241226 - RNA, 19 nt, Artificial Sequence
  Description of Artificial Sequence: Synthetic oligonucleotide
acacgguaaacuuuuccaa

SEQ ID NO: 241227 - RNA, 19 nt, Artificial Sequence
  Description of Artificial Sequence: Synthetic oligonucleotide
uaguaaucuuggucgaaaa

SEQ ID NO: 241228 - RNA, 19 nt, Artificial Sequence
  Description of Artificial Sequence: Synthetic oligonucleotide
auaaccuacuaggaagugu

SEQ ID NO: 241229 - RNA, 19 nt, Artificial Sequence
  Description of Artificial Sequence: Synthetic oligonucleotide
cucaauauuggagguacuc

SEQ ID NO: 241230 - RNA, 19 nt, Artificial Sequence
  Description of Artificial Sequence: Synthetic oligonucleotide
aaguggauaugugcgacau

SEQ ID NO: 241231 - RNA, 19 nt, Artificial Sequence
  Description of Artificial Sequence: Synthetic oligonucleotide
guaagaucuagccaaacuu

SEQ ID NO: 241232 - RNA, 19 nt, Artificial Sequence
  Description of Artificial Sequence: Synthetic oligonucleotide
ggaacgucuagcucgaguc

SEQ ID NO: 241233 - RNA, 19 nt, Artificial Sequence
  Description of Artificial Sequence: Synthetic oligonucleotide
ugccuaauaagacgaucuc

SEQ ID NO: 241234 - RNA, 19 nt, Artificial Sequence
  Description of Artificial Sequence: Synthetic oligonucleotide
uguucugcucaaacaucca

SEQ ID NO: 241235 - RNA, 19 nt, Artificial Sequence
  Description of Artificial Sequence: Synthetic oligonucleotide
uaugccuaauaagacgauc

SEQ ID NO: 241236 - RNA, 19 nt, Artificial Sequence
  Description of Artificial Sequence: Synthetic oligonucleotide
cguaacucuagucugacac

SEQ ID NO: 241237 - RNA, 19 nt, Artificial Sequence
  Description of Artificial Sequence: Synthetic oligonucleotide
aacgcaguuuucugcuagu

SEQ ID NO: 241238 - RNA, 19 nt, Artificial Sequence
  Description of Artificial Sequence: Synthetic oligonucleotide
accuagauacaaugguaga

SEQ ID NO: 241239 - RNA, 19 nt, Artificial Sequence
  Description of Artificial Sequence: Synthetic oligonucleotide
ccgcuuaucaauagcaagc

SEQ ID NO: 241240 - RNA, 19 nt, Artificial Sequence
  Description of Artificial Sequence: Synthetic oligonucleotide
ccuaauaagacgaucucca

SEQ ID NO: 241241 - RNA, 19 nt, Artificial Sequence
  Description of Artificial Sequence: Synthetic oligonucleotide
guaccgucgacgcagggca

SEQ ID NO: 241242 - RNA, 19 nt, Artificial Sequence
  Description of Artificial Sequence: Synthetic oligonucleotide
uccuuagcggagauauuaa

SEQ ID NO: 241243 - RNA, 19 nt, Artificial Sequence
  Description of Artificial Sequence: Synthetic oligonucleotide
caacgcaguuuucugcuag

SEQ ID NO: 241244 - RNA, 19 nt, Artificial Sequence
  Description of Artificial Sequence: Synthetic oligonucleotide
cuacaaccucguuucuucc

SEQ ID NO: 241245 - RNA, 19 nt, Artificial Sequence
  Description of Artificial Sequence: Synthetic oligonucleotide
ccugcgaugcucauaaaug

SEQ ID NO: 241246 - RNA, 19 nt, Artificial Sequence
  Description of Artificial Sequence: Synthetic oligonucleotide
cacaauaaccuacuaggaa

SEQ ID NO: 241247 - RNA, 19 nt, Artificial Sequence
  Description of Artificial Sequence: Synthetic oligonucleotide
acuagucacuaauccauuu

SEQ ID NO: 241248 - RNA, 19 nt, Artificial Sequence
  Description of Artificial Sequence: Synthetic oligonucleotide
aagacucggaaccgcuuau

SEQ ID NO: 241249 - RNA, 19 nt, Artificial Sequence
  Description of Artificial Sequence: Synthetic oligonucleotide
uuuaagcgccuauggucca

SEQ ID NO: 241250 - RNA, 19 nt, Artificial Sequence
  Description of Artificial Sequence: Synthetic oligonucleotide
acaugguaauaagauggug

SEQ ID NO: 241251 - RNA, 19 nt, Artificial Sequence
  Description of Artificial Sequence: Synthetic oligonucleotide
ugcuuuggcaugacauggu

SEQ ID NO: 241252 - RNA, 19 nt, Artificial Sequence
  Description of Artificial Sequence: Synthetic oligonucleotide
uauacacgguaaacuuuuc

SEQ ID NO: 241253 - RNA, 19 nt, Artificial Sequence
  Description of Artificial Sequence: Synthetic oligonucleotide
cuaccugggaacgucuagc

SEQ ID NO: 241254 - RNA, 19 nt, Artificial Sequence
  Description of Artificial Sequence: Synthetic oligonucleotide
uucucccacuauuaguaau

SEQ ID NO: 241255 - RNA, 19 nt, Artificial Sequence
  Description of Artificial Sequence: Synthetic oligonucleotide
acagucagauacuuaugua

SEQ ID NO: 241256 - RNA, 19 nt, Artificial Sequence
  Description of Artificial Sequence: Synthetic oligonucleotide
gucuaauguauacacggua

SEQ ID NO: 241257 - RNA, 19 nt, Artificial Sequence
  Description of Artificial Sequence: Synthetic oligonucleotide
accgcaguauccaacgcag

SEQ ID NO: 241258 - RNA, 19 nt, Artificial Sequence
  Description of Artificial Sequence: Synthetic oligonucleotide
guaacucuagucugacaca

SEQ ID NO: 241259 - RNA, 19 nt, Artificial Sequence
  Description of Artificial Sequence: Synthetic oligonucleotide
aacgucuagcucgagucau

SEQ ID NO: 241260 - RNA, 19 nt, Artificial Sequence
  Description of Artificial Sequence: Synthetic oligonucleotide
uaccugggaacgucuagcu

SEQ ID NO: 241261 - RNA, 19 nt, Artificial Sequence
  Description of Artificial Sequence: Synthetic oligonucleotide
auccuuagcggagauauua

SEQ ID NO: 241262 - RNA, 19 nt, Artificial Sequence
  Description of Artificial Sequence: Synthetic oligonucleotide
gucuagcucgagucauucg

SEQ ID NO: 241263 - RNA, 19 nt, Artificial Sequence
  Description of Artificial Sequence: Synthetic oligonucleotide
auuauggcaguuggaagaa

SEQ ID NO: 241264 - RNA, 19 nt, Artificial Sequence
  Description of Artificial Sequence: Synthetic oligonucleotide
ugacuuuccuccguaucac

SEQ ID NO: 241265 - RNA, 19 nt, Artificial Sequence
  Description of Artificial Sequence: Synthetic oligonucleotide
augugcgacauagacuaug

SEQ ID NO: 241266 - RNA, 19 nt, Artificial Sequence
  Description of Artificial Sequence: Synthetic oligonucleotide
ggaaccgcuuaucaauagc

SEQ ID NO: 241267 - RNA, 19 nt, Artificial Sequence
  Description of Artificial Sequence: Synthetic oligonucleotide
gaggacacggugccuucag

SEQ ID NO: 241268 - RNA, 19 nt, Artificial Sequence
  Description of Artificial Sequence: Synthetic oligonucleotide
uccaacuauuucccaccac

SEQ ID NO: 241269 - RNA, 19 nt, Artificial Sequence
  Description of Artificial Sequence: Synthetic oligonucleotide
acuaauccauuuguuguau

SEQ ID NO: 241270 - RNA, 19 nt, Artificial Sequence
  Description of Artificial Sequence: Synthetic oligonucleotide
uaucaauagcaagccuaug

SEQ ID NO: 241271 - RNA, 19 nt, Artificial Sequence
  Description of Artificial Sequence: Synthetic oligonucleotide
agauuagaucaaugucccu

SEQ ID NO: 241272 - RNA, 19 nt, Artificial Sequence
  Description of Artificial Sequence: Synthetic oligonucleotide
aucuguggguaccgucgac

SEQ ID NO: 241273 - RNA, 19 nt, Artificial Sequence
  Description of Artificial Sequence: Synthetic oligonucleotide
acaaccucguuucuuccua

SEQ ID NO: 241274 - RNA, 19 nt, Artificial Sequence
  Description of Artificial Sequence: Synthetic oligonucleotide
gaacgucuagcucgaguca

SEQ ID NO: 241275 - RNA, 19 nt, Artificial Sequence
  Description of Artificial Sequence: Synthetic oligonucleotide
ugggaacaugucucuucag

SEQ ID NO: 241276 - RNA, 19 nt, Artificial Sequence
  Description of Artificial Sequence: Synthetic oligonucleotide
auagacuaugcugggugcu

SEQ ID NO: 241277 - RNA, 19 nt, Artificial Sequence
  Description of Artificial Sequence: Synthetic oligonucleotide
auaagacgaucuccagggu

SEQ ID NO: 241278 - RNA, 19 nt, Artificial Sequence
  Description of Artificial Sequence: Synthetic oligonucleotide
caaugucccucagauaguc

SEQ ID NO: 241279 - RNA, 19 nt, Artificial Sequence
  Description of Artificial Sequence: Synthetic oligonucleotide
uuguuaccuacaugccacu

SEQ ID NO: 241280 - RNA, 19 nt, Artificial Sequence
  Description of Artificial Sequence: Synthetic oligonucleotide
ugcauauuuggaggaacua

SEQ ID NO: 241281 - RNA, 19 nt, Artificial Sequence
  Description of Artificial Sequence: Synthetic oligonucleotide
gugcaaugacaucaugauc

SEQ ID NO: 241282 - RNA, 19 nt, Artificial Sequence
  Description of Artificial Sequence: Synthetic oligonucleotide
uagcaagccuaugugugac

SEQ ID NO: 241283 - RNA, 19 nt, Artificial Sequence
  Description of Artificial Sequence: Synthetic oligonucleotide
gacguaacucuagucugac

SEQ ID NO: 241284 - RNA, 19 nt, Artificial Sequence
  Description of Artificial Sequence: Synthetic oligonucleotide
gucccugcgaugcucauaa

SEQ ID NO: 241285 - RNA, 19 nt, Artificial Sequence
  Description of Artificial Sequence: Synthetic oligonucleotide
gcauauuuggaggaacuac

SEQ ID NO: 241286 - RNA, 19 nt, Artificial Sequence
  Description of Artificial Sequence: Synthetic oligonucleotide
cuucuacggaggacucucc

SEQ ID NO: 241287 - RNA, 19 nt, Artificial Sequence
  Description of Artificial Sequence: Synthetic oligonucleotide
ugaagacucggaaccgcuu

SEQ ID NO: 241288 - RNA, 19 nt, Artificial Sequence
  Description of Artificial Sequence: Synthetic oligonucleotide
gccuaauaagacgaucucc

SEQ ID NO: 241289 - RNA, 19 nt, Artificial Sequence
  Description of Artificial Sequence: Synthetic oligonucleotide
ggcaaacauacaacagacg

SEQ ID NO: 241290 - RNA, 19 nt, Artificial Sequence
  Description of Artificial Sequence: Synthetic oligonucleotide
cacgguaaacuuuuccaaa

SEQ ID NO: 241291 - RNA, 19 nt, Artificial Sequence
  Description of Artificial Sequence: Synthetic oligonucleotide
cacaaguggauaugugcga

SEQ ID NO: 241292 - RNA, 19 nt, Artificial Sequence
  Description of Artificial Sequence: Synthetic oligonucleotide
uggguaccgucgacgcagg

SEQ ID NO: 241293 - RNA, 19 nt, Artificial Sequence
  Description of Artificial Sequence: Synthetic oligonucleotide
agcggagauauuaauugaa

SEQ ID NO: 241294 - RNA, 19 nt, Artificial Sequence
  Description of Artificial Sequence: Synthetic oligonucleotide
auuaguaaucuuggucgaa

SEQ ID NO: 241295 - RNA, 19 nt, Artificial Sequence
  Description of Artificial Sequence: Synthetic oligonucleotide
guguugguccaacuauuuc

SEQ ID NO: 241296 - RNA, 19 nt, Artificial Sequence
  Description of Artificial Sequence: Synthetic oligonucleotide
cuagcucgagucauucgca

SEQ ID NO: 241297 - RNA, 19 nt, Artificial Sequence
  Description of Artificial Sequence: Synthetic oligonucleotide
ucccaccacaaguggauau

SEQ ID NO: 241298 - RNA, 19 nt, Artificial Sequence
  Description of Artificial Sequence: Synthetic oligonucleotide
ugggcugacuuuccuccgu

SEQ ID NO: 241299 - RNA, 19 nt, Artificial Sequence
  Description of Artificial Sequence: Synthetic oligonucleotide
uaccuacaugccacuuuga

SEQ ID NO: 241300 - RNA, 19 nt, Artificial Sequence
  Description of Artificial Sequence: Synthetic oligonucleotide
aacuagucacuaauccauu

SEQ ID NO: 241301 - RNA, 19 nt, Artificial Sequence
  Description of Artificial Sequence: Synthetic oligonucleotide
caccacaaguggauaugug

SEQ ID NO: 241302 - RNA, 19 nt, Artificial Sequence
  Description of Artificial Sequence: Synthetic oligonucleotide
gcggagauauuaauugaag

SEQ ID NO: 241303 - RNA, 19 nt, Artificial Sequence
  Description of Artificial Sequence: Synthetic oligonucleotide
cuuagcggagauauuaauu

SEQ ID NO: 241304 - RNA, 19 nt, Artificial Sequence
  Description of Artificial Sequence: Synthetic oligonucleotide
ucugcaccgcaguauccaa

SEQ ID NO: 241305 - RNA, 19 nt, Artificial Sequence
  Description of Artificial Sequence: Synthetic oligonucleotide
agcucgagucauucgcaga

SEQ ID NO: 241306 - RNA, 19 nt, Artificial Sequence
  Description of Artificial Sequence: Synthetic oligonucleotide
cacuaauccauuuguugua

SEQ ID NO: 241307 - RNA, 19 nt, Artificial Sequence
  Description of Artificial Sequence: Synthetic oligonucleotide
ugucagcggucuugguuca

SEQ ID NO: 241308 - RNA, 19 nt, Artificial Sequence
  Description of Artificial Sequence: Synthetic oligonucleotide
agugagagcucuguccaaa

SEQ ID NO: 241309 - RNA, 19 nt, Artificial Sequence
  Description of Artificial Sequence: Synthetic oligonucleotide
acucucccguguuucccag

SEQ ID NO: 241310 - RNA, 19 nt, Artificial Sequence
  Description of Artificial Sequence: Synthetic oligonucleotide
gucauucgcagaauacaca

SEQ ID NO: 241311 - RNA, 19 nt, Artificial Sequence
  Description of Artificial Sequence: Synthetic oligonucleotide
agacucggaaccgcuuauc

SEQ ID NO: 241312 - RNA, 19 nt, Artificial Sequence
  Description of Artificial Sequence: Synthetic oligonucleotide
uuccuccguaucacuacuc

SEQ ID NO: 241313 - RNA, 19 nt, Artificial Sequence
  Description of Artificial Sequence: Synthetic oligonucleotide
ugguaauaagauggugcau

SEQ ID NO: 241314 - RNA, 19 nt, Artificial Sequence
  Description of Artificial Sequence: Synthetic oligonucleotide
agacguaacucuagucuga

SEQ ID NO: 241315 - RNA, 19 nt, Artificial Sequence
  Description of Artificial Sequence: Synthetic oligonucleotide
aguuaucuuaccacaugua

SEQ ID NO: 241316 - RNA, 19 nt, Artificial Sequence
  Description of Artificial Sequence: Synthetic oligonucleotide
caaguggauaugugcgaca

SEQ ID NO: 241317 - RNA, 19 nt, Artificial Sequence
  Description of Artificial Sequence: Synthetic oligonucleotide
agcaagccuaugugugaca

SEQ ID NO: 241318 - RNA, 19 nt, Artificial Sequence
  Description of Artificial Sequence: Synthetic oligonucleotide
uugcaucaguuauguggac

SEQ ID NO: 241319 - RNA, 19 nt, Artificial Sequence
  Description of Artificial Sequence: Synthetic oligonucleotide
aguauccaacgcaguuuuc

SEQ ID NO: 241320 - RNA, 19 nt, Artificial Sequence
  Description of Artificial Sequence: Synthetic oligonucleotide
gacaugguaauaagauggu

SEQ ID NO: 241321 - RNA, 19 nt, Artificial Sequence
  Description of Artificial Sequence: Synthetic oligonucleotide
caggcucuaugccuaauaa

SEQ ID NO: 241322 - RNA, 19 nt, Artificial Sequence
  Description of Artificial Sequence: Synthetic oligonucleotide
uaagcgccuaugguccaca

SEQ ID NO: 241323 - RNA, 19 nt, Artificial Sequence
  Description of Artificial Sequence: Synthetic oligonucleotide
gacuaugcugggugcuguc

SEQ ID NO: 241324 - RNA, 19 nt, Artificial Sequence
  Description of Artificial Sequence: Synthetic oligonucleotide
cugcaccgcaguauccaac

SEQ ID NO: 241325 - RNA, 19 nt, Artificial Sequence
  Description of Artificial Sequence: Synthetic oligonucleotide
agaucuagccaaacuugaa

SEQ ID NO: 241326 - RNA, 19 nt, Artificial Sequence
  Description of Artificial Sequence: Synthetic oligonucleotide
auagucccugcgaugcuca

SEQ ID NO: 241327 - RNA, 19 nt, Artificial Sequence
  Description of Artificial Sequence: Synthetic oligonucleotide
ggugaagacucggaaccgc

SEQ ID NO: 241328 - RNA, 19 nt, Artificial Sequence
  Description of Artificial Sequence: Synthetic oligonucleotide
caccgcaguauccaacgca

SEQ ID NO: 241329 - RNA, 19 nt, Artificial Sequence
  Description of Artificial Sequence: Synthetic oligonucleotide
gguacucgagguauuuuca

SEQ ID NO: 241330 - RNA, 19 nt, Artificial Sequence
  Description of Artificial Sequence: Synthetic oligonucleotide
uuggcaugacaugguaaua

SEQ ID NO: 241331 - RNA, 19 nt, Artificial Sequence
  Description of Artificial Sequence: Synthetic oligonucleotide
uggugcauauuuggaggaa

SEQ ID NO: 241332 - RNA, 19 nt, Artificial Sequence
  Description of Artificial Sequence: Synthetic oligonucleotide
acuguaagaucuagccaaa

SEQ ID NO: 241333 - RNA, 19 nt, Artificial Sequence
  Description of Artificial Sequence: Synthetic oligonucleotide
gguaccgucgacgcagggc

SEQ ID NO: 241334 - RNA, 19 nt, Artificial Sequence
  Description of Artificial Sequence: Synthetic oligonucleotide
acuuuccuccguaucacua

SEQ ID NO: 241335 - RNA, 19 nt, Artificial Sequence
  Description of Artificial Sequence: Synthetic oligonucleotide
ggcugauaacugcauacaa

SEQ ID NO: 241336 - RNA, 19 nt, Artificial Sequence
  Description of Artificial Sequence: Synthetic oligonucleotide
uuauggcaguuggaagaaa

SEQ ID NO: 241337 - RNA, 19 nt, Artificial Sequence
  Description of Artificial Sequence: Synthetic oligonucleotide
guucucccacuauuaguaa

SEQ ID NO: 241338 - RNA, 19 nt, Artificial Sequence
  Description of Artificial Sequence: Synthetic oligonucleotide
gcucgagucauucgcagaa

SEQ ID NO: 241339 - RNA, 19 nt, Artificial Sequence
  Description of Artificial Sequence: Synthetic oligonucleotide
ugcauaggcggugucccuu

SEQ ID NO: 241340 - RNA, 19 nt, Artificial Sequence
  Description of Artificial Sequence: Synthetic oligonucleotide
cucagcacauauugacuua

SEQ ID NO: 241341 - RNA, 19 nt, Artificial Sequence
  Description of Artificial Sequence: Synthetic oligonucleotide
cuacuaggaaguguuaaau

SEQ ID NO: 241342 - RNA, 19 nt, Artificial Sequence
  Description of Artificial Sequence: Synthetic oligonucleotide
gcaugacaugguaauaaga

SEQ ID NO: 241343 - RNA, 19 nt, Artificial Sequence
  Description of Artificial Sequence: Synthetic oligonucleotide
cugggaacgucuagcucga

SEQ ID NO: 241344 - RNA, 19 nt, Artificial Sequence
  Description of Artificial Sequence: Synthetic oligonucleotide
ccuagauacaaugguagaa

SEQ ID NO: 241345 - RNA, 19 nt, Artificial Sequence
  Description of Artificial Sequence: Synthetic oligonucleotide
gguaacaggcauuucuauu

SEQ ID NO: 241346 - RNA, 19 nt, Artificial Sequence
  Description of Artificial Sequence: Synthetic oligonucleotide
aaccuacuaggaaguguua

SEQ ID NO: 241347 - RNA, 19 nt, Artificial Sequence
  Description of Artificial Sequence: Synthetic oligonucleotide
ccuacuaggaaguguuaaa

SEQ ID NO: 241348 - RNA, 19 nt, Artificial Sequence
  Description of Artificial Sequence: Synthetic oligonucleotide
gugcauauuuggaggaacu

SEQ ID NO: 241349 - RNA, 19 nt, Artificial Sequence
  Description of Artificial Sequence: Synthetic oligonucleotide
caacagacguaacucuagu

SEQ ID NO: 241350 - RNA, 19 nt, Artificial Sequence
  Description of Artificial Sequence: Synthetic oligonucleotide
caguauccaacgcaguuuu

SEQ ID NO: 241351 - RNA, 19 nt, Artificial Sequence
  Description of Artificial Sequence: Synthetic oligonucleotide
uaccgucgacgcagggcac

SEQ ID NO: 241352 - RNA, 19 nt, Artificial Sequence
  Description of Artificial Sequence: Synthetic oligonucleotide
cugacacaauaaccuacua

SEQ ID NO: 241353 - RNA, 19 nt, Artificial Sequence
  Description of Artificial Sequence: Synthetic oligonucleotide
ccccuugcaaaucacaacu

SEQ ID NO: 241354 - RNA, 19 nt, Artificial Sequence
  Description of Artificial Sequence: Synthetic oligonucleotide
accgucgacgcagggcaca

SEQ ID NO: 241355 - RNA, 19 nt, Artificial Sequence
  Description of Artificial Sequence: Synthetic oligonucleotide
gcuuaucaauagcaagccu

SEQ ID NO: 241356 - RNA, 19 nt, Artificial Sequence
  Description of Artificial Sequence: Synthetic oligonucleotide
cucuaccugggaacgucua

SEQ ID NO: 241357 - RNA, 19 nt, Artificial Sequence
  Description of Artificial Sequence: Synthetic oligonucleotide
gcaccgcaguauccaacgc

SEQ ID NO: 241358 - RNA, 19 nt, Artificial Sequence
  Description of Artificial Sequence: Synthetic oligonucleotide
ggucgaaaagacauagguu

SEQ ID NO: 241359 - RNA, 19 nt, Artificial Sequence
  Description of Artificial Sequence: Synthetic oligonucleotide
cggaaccgcuuaucaauag

SEQ ID NO: 241360 - RNA, 19 nt, Artificial Sequence
  Description of Artificial Sequence: Synthetic oligonucleotide
cuaugaccugggagcuaga

SEQ ID NO: 241361 - RNA, 19 nt, Artificial Sequence
  Description of Artificial Sequence: Synthetic oligonucleotide
gugcgacauagacuaugcu

SEQ ID NO: 241362 - RNA, 19 nt, Artificial Sequence
  Description of Artificial Sequence: Synthetic oligonucleotide
acgaaucaucugggaacau

SEQ ID NO: 241363 - RNA, 19 nt, Artificial Sequence
  Description of Artificial Sequence: Synthetic oligonucleotide
ccguaucacuacuccugac

SEQ ID NO: 241364 - RNA, 19 nt, Artificial Sequence
  Description of Artificial Sequence: Synthetic oligonucleotide
guagaucuguggguaccgu

SEQ ID NO: 241365 - RNA, 19 nt, Artificial Sequence
  Description of Artificial Sequence: Synthetic oligonucleotide
cuuaaagcacaggcucuau

SEQ ID NO: 241366 - RNA, 19 nt, Artificial Sequence
  Description of Artificial Sequence: Synthetic oligonucleotide
gaggaacuacaaccucguu

SEQ ID NO: 241367 - RNA, 19 nt, Artificial Sequence
  Description of Artificial Sequence: Synthetic oligonucleotide
cauaggcggugucccuuaa

SEQ ID NO: 241368 - RNA, 19 nt, Artificial Sequence
  Description of Artificial Sequence: Synthetic oligonucleotide
agcgagggugugggcugag

SEQ ID NO: 241369 - RNA, 19 nt, Artificial Sequence
  Description of Artificial Sequence: Synthetic oligonucleotide
acgucuagcucgagucauu

SEQ ID NO: 241370 - RNA, 19 nt, Artificial Sequence
  Description of Artificial Sequence: Synthetic oligonucleotide
gcaguauccaacgcaguuu

SEQ ID NO: 241371 - RNA, 19 nt, Artificial Sequence
  Description of Artificial Sequence: Synthetic oligonucleotide
cgagguauuuucaggucua

SEQ ID NO: 241372 - RNA, 19 nt, Artificial Sequence
  Description of Artificial Sequence: Synthetic oligonucleotide
cgucuagcucgagucauuc

SEQ ID NO: 241373 - RNA, 19 nt, Artificial Sequence
  Description of Artificial Sequence: Synthetic oligonucleotide
ccuuagcggagauauuaau

SEQ ID NO: 241374 - RNA, 19 nt, Artificial Sequence
  Description of Artificial Sequence: Synthetic oligonucleotide
caagccuaugugugacauu

SEQ ID NO: 241375 - RNA, 19 nt, Artificial Sequence
  Description of Artificial Sequence: Synthetic oligonucleotide
gggcugacuuuccuccgua

SEQ ID NO: 241376 - RNA, 19 nt, Artificial Sequence
  Description of Artificial Sequence: Synthetic oligonucleotide
ccuccguaucacuacuccu

SEQ ID NO: 241377 - RNA, 19 nt, Artificial Sequence
  Description of Artificial Sequence: Synthetic oligonucleotide
cccugcgaugcucauaaau

SEQ ID NO: 241378 - RNA, 19 nt, Artificial Sequence
  Description of Artificial Sequence: Synthetic oligonucleotide
ccaacgcaguuuucugcua

SEQ ID NO: 241379 - RNA, 19 nt, Artificial Sequence
  Description of Artificial Sequence: Synthetic oligonucleotide
ggcugacuuuccuccguau

SEQ ID NO: 241380 - RNA, 19 nt, Artificial Sequence
  Description of Artificial Sequence: Synthetic oligonucleotide
gcucuaccugggaacgucu

SEQ ID NO: 241381 - RNA, 19 nt, Artificial Sequence
  Description of Artificial Sequence: Synthetic oligonucleotide
ccaccacaaguggauaugu

SEQ ID NO: 241382 - RNA, 19 nt, Artificial Sequence
  Description of Artificial Sequence: Synthetic oligonucleotide
ccgucgacgcagggcacac

SEQ ID NO: 241383 - RNA, 19 nt, Artificial Sequence
  Description of Artificial Sequence: Synthetic oligonucleotide
cgcaguauccaacgcaguu

SEQ ID NO: 241384 - RNA, 19 nt, Artificial Sequence
  Description of Artificial Sequence: Synthetic oligonucleotide
ccgcaguauccaacgcagu

SEQ ID NO: 241385 - RNA, 19 nt, Artificial Sequence
  Description of Artificial Sequence: Synthetic oligonucleotide
cggagacauucugcuucuc

SEQ ID NO: 241386 - RNA, 19 nt, Artificial Sequence
  Description of Artificial Sequence: Synthetic oligonucleotide
cccguguuucccagcucau

SEQ ID NO: 241387 - RNA, 19 nt, Artificial Sequence
  Description of Artificial Sequence: Synthetic oligonucleotide
ucaauauuaguauugaggc

SEQ ID NO: 241388 - RNA, 19 nt, Artificial Sequence
  Description of Artificial Sequence: Synthetic oligonucleotide
auaauaaugcuauaaagga

SEQ ID NO: 241389 - RNA, 19 nt, Artificial Sequence
  Description of Artificial Sequence: Synthetic oligonucleotide
uuuuauacagacgagagga

SEQ ID NO: 241390 - RNA, 19 nt, Artificial Sequence
  Description of Artificial Sequence: Synthetic oligonucleotide
uauauagccagauaaugcc

SEQ ID NO: 241391 - RNA, 19 nt, Artificial Sequence
  Description of Artificial Sequence: Synthetic oligonucleotide
aaacuaacggucaacauuc

SEQ ID NO: 241392 - RNA, 19 nt, Artificial Sequence
  Description of Artificial Sequence: Synthetic oligonucleotide
aaggugaaauuacugcacc

SEQ ID NO: 241393 - RNA, 19 nt, Artificial Sequence
  Description of Artificial Sequence: Synthetic oligonucleotide
cagucuaagcauuugaucg

SEQ ID NO: 241394 - RNA, 19 nt, Artificial Sequence
  Description of Artificial Sequence: Synthetic oligonucleotide
aguacuauggcaacaaccc

SEQ ID NO: 241395 - RNA, 19 nt, Artificial Sequence
  Description of Artificial Sequence: Synthetic oligonucleotide
guuaguucuauauagccag

SEQ ID NO: 241396 - RNA, 19 nt, Artificial Sequence
  Description of Artificial Sequence: Synthetic oligonucleotide
ucauguauuauuccuagca

SEQ ID NO: 241397 - RNA, 19 nt, Artificial Sequence
  Description of Artificial Sequence: Synthetic oligonucleotide
ucauguacagagaacgacg

SEQ ID NO: 241398 - RNA, 19 nt, Artificial Sequence
  Description of Artificial Sequence: Synthetic oligonucleotide
aauuucuaaugaaucauac

SEQ ID NO: 241399 - RNA, 19 nt, Artificial Sequence
  Description of Artificial Sequence: Synthetic oligonucleotide
uuaguauugaggcaaguga

SEQ ID NO: 241400 - RNA, 19 nt, Artificial Sequence
  Description of Artificial Sequence: Synthetic oligonucleotide
auauaguuaaucuuaguga

SEQ ID NO: 241401 - RNA, 19 nt, Artificial Sequence
  Description of Artificial Sequence: Synthetic oligonucleotide
uggaguuaguucuauauag

SEQ ID NO: 241402 - RNA, 19 nt, Artificial Sequence
  Description of Artificial Sequence: Synthetic oligonucleotide
aggauuagcccauuaaaac

SEQ ID NO: 241403 - RNA, 19 nt, Artificial Sequence
  Description of Artificial Sequence: Synthetic oligonucleotide
gaugcaagcaguacuaugg

SEQ ID NO: 241404 - RNA, 19 nt, Artificial Sequence
  Description of Artificial Sequence: Synthetic oligonucleotide
aauguuaauuguuuucagu

SEQ ID NO: 241405 - RNA, 19 nt, Artificial Sequence
  Description of Artificial Sequence: Synthetic oligonucleotide
uaaauaacgguguuuaauc

SEQ ID NO: 241406 - RNA, 19 nt, Artificial Sequence
  Description of Artificial Sequence: Synthetic oligonucleotide
aucuuaggcacccggaugc

SEQ ID NO: 241407 - RNA, 19 nt, Artificial Sequence
  Description of Artificial Sequence: Synthetic oligonucleotide
uguauuauuccuagcaaac

SEQ ID NO: 241408 - RNA, 19 nt, Artificial Sequence
  Description of Artificial Sequence: Synthetic oligonucleotide
uauaguuaaucuuagugau

SEQ ID NO: 241409 - RNA, 19 nt, Artificial Sequence
  Description of Artificial Sequence: Synthetic oligonucleotide
uuaagacuggaugaaauag

SEQ ID NO: 241410 - RNA, 19 nt, Artificial Sequence
  Description of Artificial Sequence: Synthetic oligonucleotide
cauuugaucgucaaaauca

SEQ ID NO: 241411 - RNA, 19 nt, Artificial Sequence
  Description of Artificial Sequence: Synthetic oligonucleotide
auaagguaaggauuuagug

SEQ ID NO: 241412 - RNA, 19 nt, Artificial Sequence
  Description of Artificial Sequence: Synthetic oligonucleotide
aaccaaauaguuagagucc

SEQ ID NO: 241413 - RNA, 19 nt, Artificial Sequence
  Description of Artificial Sequence: Synthetic oligonucleotide
uaaaccagugugauagacg

SEQ ID NO: 241414 - RNA, 19 nt, Artificial Sequence
  Description of Artificial Sequence: Synthetic oligonucleotide
uuagcugauauaaccaucu

SEQ ID NO: 241415 - RNA, 19 nt, Artificial Sequence
  Description of Artificial Sequence: Synthetic oligonucleotide
ugaucaacucaguaagacg

SEQ ID NO: 241416 - RNA, 19 nt, Artificial Sequence
  Description of Artificial Sequence: Synthetic oligonucleotide
auagacguaaauuguuagg

SEQ ID NO: 241417 - RNA, 19 nt, Artificial Sequence
  Description of Artificial Sequence: Synthetic oligonucleotide
aaaggugaaauuacugcac

SEQ ID NO: 241418 - RNA, 19 nt, Artificial Sequence
  Description of Artificial Sequence: Synthetic oligonucleotide
gaguuaguucuauauagcc

SEQ ID NO: 241419 - RNA, 19 nt, Artificial Sequence
  Description of Artificial Sequence: Synthetic oligonucleotide
agcgcuaaauuucagaaga

SEQ ID NO: 241420 - RNA, 19 nt, Artificial Sequence
  Description of Artificial Sequence: Synthetic oligonucleotide
ugugauagacguaaauugu

SEQ ID NO: 241421 - RNA, 19 nt, Artificial Sequence
  Description of Artificial Sequence: Synthetic oligonucleotide
uagauauaguuaaucuuag

SEQ ID NO: 241422 - RNA, 19 nt, Artificial Sequence
  Description of Artificial Sequence: Synthetic oligonucleotide
ucuguuacuaaaggcaagg

SEQ ID NO: 241423 - RNA, 19 nt, Artificial Sequence
  Description of Artificial Sequence: Synthetic oligonucleotide
uguuagguaauccaggauu

SEQ ID NO: 241424 - RNA, 19 nt, Artificial Sequence
  Description of Artificial Sequence: Synthetic oligonucleotide
auugacuguauagauauag

SEQ ID NO: 241425 - RNA, 19 nt, Artificial Sequence
  Description of Artificial Sequence: Synthetic oligonucleotide
acucaguaagacgugagcc

SEQ ID NO: 241426 - RNA, 19 nt, Artificial Sequence
  Description of Artificial Sequence: Synthetic oligonucleotide
guagauuauucucuagccg

SEQ ID NO: 241427 - RNA, 19 nt, Artificial Sequence
  Description of Artificial Sequence: Synthetic oligonucleotide
gugugauagacguaaauug

SEQ ID NO: 241428 - RNA, 19 nt, Artificial Sequence
  Description of Artificial Sequence: Synthetic oligonucleotide
aguugcgugcucuagaaug

SEQ ID NO: 241429 - RNA, 19 nt, Artificial Sequence
  Description of Artificial Sequence: Synthetic oligonucleotide
auagagaucgguaacuuuc

SEQ ID NO: 241430 - RNA, 19 nt, Artificial Sequence
  Description of Artificial Sequence: Synthetic oligonucleotide
ucauauggcugauaguacc

SEQ ID NO: 241431 - RNA, 19 nt, Artificial Sequence
  Description of Artificial Sequence: Synthetic oligonucleotide
agguaauccaggauuagcc

SEQ ID NO: 241432 - RNA, 19 nt, Artificial Sequence
  Description of Artificial Sequence: Synthetic oligonucleotide
aacuauugacuguauagau

SEQ ID NO: 241433 - RNA, 19 nt, Artificial Sequence
  Description of Artificial Sequence: Synthetic oligonucleotide
aauaaaacgugguccaauu

SEQ ID NO: 241434 - RNA, 19 nt, Artificial Sequence
  Description of Artificial Sequence: Synthetic oligonucleotide
aucauaaaggugaaauuac

SEQ ID NO: 241435 - RNA, 19 nt, Artificial Sequence
  Description of Artificial Sequence: Synthetic oligonucleotide
agaucgguaacuuuccaug

SEQ ID NO: 241436 - RNA, 19 nt, Artificial Sequence
  Description of Artificial Sequence: Synthetic oligonucleotide
uauggaguuaguucuauau

SEQ ID NO: 241437 - RNA, 19 nt, Artificial Sequence
  Description of Artificial Sequence: Synthetic oligonucleotide
ucgguaacuuuccaugcgg

SEQ ID NO: 241438 - RNA, 19 nt, Artificial Sequence
  Description of Artificial Sequence: Synthetic oligonucleotide
cagacuaaaucccagauga

SEQ ID NO: 241439 - RNA, 19 nt, Artificial Sequence
  Description of Artificial Sequence: Synthetic oligonucleotide
uuauucucuagccgaauac

SEQ ID NO: 241440 - RNA, 19 nt, Artificial Sequence
  Description of Artificial Sequence: Synthetic oligonucleotide
ugauaguaccuacuucuag

SEQ ID NO: 241441 - RNA, 19 nt, Artificial Sequence
  Description of Artificial Sequence: Synthetic oligonucleotide
cccauuguaaaauaaauac

SEQ ID NO: 241442 - RNA, 19 nt, Artificial Sequence
  Description of Artificial Sequence: Synthetic oligonucleotide
uauguuacaaaggugcagu

SEQ ID NO: 241443 - RNA, 19 nt, Artificial Sequence
  Description of Artificial Sequence: Synthetic oligonucleotide
auacauuuauggucaagag

SEQ ID NO: 241444 - RNA, 19 nt, Artificial Sequence
  Description of Artificial Sequence: Synthetic oligonucleotide
uuugaucgucaaaaucagg

SEQ ID NO: 241445 - RNA, 19 nt, Artificial Sequence
  Description of Artificial Sequence: Synthetic oligonucleotide
ugaucgucaaaaucaggag

SEQ ID NO: 241446 - RNA, 19 nt, Artificial Sequence
  Description of Artificial Sequence: Synthetic oligonucleotide
uauuccuagcaaacacucg

SEQ ID NO: 241447 - RNA, 19 nt, Artificial Sequence
  Description of Artificial Sequence: Synthetic oligonucleotide
uuuauacagacgagaggag

SEQ ID NO: 241448 - RNA, 19 nt, Artificial Sequence
  Description of Artificial Sequence: Synthetic oligonucleotide
agugucggaaucauaaagg

SEQ ID NO: 241449 - RNA, 19 nt, Artificial Sequence
  Description of Artificial Sequence: Synthetic oligonucleotide
cuuagugaucauucaauac

SEQ ID NO: 241450 - RNA, 19 nt, Artificial Sequence
  Description of Artificial Sequence: Synthetic oligonucleotide
acgacgguagauuauucuc

SEQ ID NO: 241451 - RNA, 19 nt, Artificial Sequence
  Description of Artificial Sequence: Synthetic oligonucleotide
agcuaugcaaacuaacggu

SEQ ID NO: 241452 - RNA, 19 nt, Artificial Sequence
  Description of Artificial Sequence: Synthetic oligonucleotide
uggaauuucggugagugcu

SEQ ID NO: 241453 - RNA, 19 nt, Artificial Sequence
  Description of Artificial Sequence: Synthetic oligonucleotide
guuagaguccauguggagg

SEQ ID NO: 241454 - RNA, 19 nt, Artificial Sequence
  Description of Artificial Sequence: Synthetic oligonucleotide
uagacguaaauuguuaggu

SEQ ID NO: 241455 - RNA, 19 nt, Artificial Sequence
  Description of Artificial Sequence: Synthetic oligonucleotide
uagcaacaaauuaaaccag

SEQ ID NO: 241456 - RNA, 19 nt, Artificial Sequence
  Description of Artificial Sequence: Synthetic oligonucleotide
uuuauggucaagaguaguu

SEQ ID NO: 241457 - RNA, 19 nt, Artificial Sequence
  Description of Artificial Sequence: Synthetic oligonucleotide
cuaagcucagugcaaggcg

SEQ ID NO: 241458 - RNA, 19 nt, Artificial Sequence
  Description of Artificial Sequence: Synthetic oligonucleotide
aacgacgguagauuauucu

SEQ ID NO: 241459 - RNA, 19 nt, Artificial Sequence
  Description of Artificial Sequence: Synthetic oligonucleotide
gacguaaauuguuagguaa

SEQ ID NO: 241460 - RNA, 19 nt, Artificial Sequence
  Description of Artificial Sequence: Synthetic oligonucleotide
agcggucuaagcucagugc

SEQ ID NO: 241461 - RNA, 19 nt, Artificial Sequence
  Description of Artificial Sequence: Synthetic oligonucleotide
acaacaucggaaacuuucc

SEQ ID NO: 241462 - RNA, 19 nt, Artificial Sequence
  Description of Artificial Sequence: Synthetic oligonucleotide
guaacauucccaauuugag

SEQ ID NO: 241463 - RNA, 19 nt, Artificial Sequence
  Description of Artificial Sequence: Synthetic oligonucleotide
gguagauuauucucuagcc

SEQ ID NO: 241464 - RNA, 19 nt, Artificial Sequence
  Description of Artificial Sequence: Synthetic oligonucleotide
aguaccuacuucuaguuuu

SEQ ID NO: 241465 - RNA, 19 nt, Artificial Sequence
  Description of Artificial Sequence: Synthetic oligonucleotide
uaacuuuccaugcggaaau

SEQ ID NO: 241466 - RNA, 19 nt, Artificial Sequence
  Description of Artificial Sequence: Synthetic oligonucleotide
agauuacucucuuaaucug

SEQ ID NO: 241467 - RNA, 19 nt, Artificial Sequence
  Description of Artificial Sequence: Synthetic oligonucleotide
aaacacucgguccccucgg

SEQ ID NO: 241468 - RNA, 19 nt, Artificial Sequence
  Description of Artificial Sequence: Synthetic oligonucleotide
ugacuguauagauauaguu

SEQ ID NO: 241469 - RNA, 19 nt, Artificial Sequence
  Description of Artificial Sequence: Synthetic oligonucleotide
uuauggucaagaguaguug

SEQ ID NO: 241470 - RNA, 19 nt, Artificial Sequence
  Description of Artificial Sequence: Synthetic oligonucleotide
aaggcguucauguauuauu

SEQ ID NO: 241471 - RNA, 19 nt, Artificial Sequence
  Description of Artificial Sequence: Synthetic oligonucleotide
ugauagacguaaauuguua

SEQ ID NO: 241472 - RNA, 19 nt, Artificial Sequence
  Description of Artificial Sequence: Synthetic oligonucleotide
acugacggaaacuccaugu

SEQ ID NO: 241473 - RNA, 19 nt, Artificial Sequence
  Description of Artificial Sequence: Synthetic oligonucleotide
guaaauuguuagguaaucc

SEQ ID NO: 241474 - RNA, 19 nt, Artificial Sequence
  Description of Artificial Sequence: Synthetic oligonucleotide
ugcuauaaaggaauauuuu

SEQ ID NO: 241475 - RNA, 19 nt, Artificial Sequence
  Description of Artificial Sequence: Synthetic oligonucleotide
gacaacaucggaaacuuuc

SEQ ID NO: 241476 - RNA, 19 nt, Artificial Sequence
  Description of Artificial Sequence: Synthetic oligonucleotide
ucauaagguaaggauuuag

SEQ ID NO: 241477 - RNA, 19 nt, Artificial Sequence
  Description of Artificial Sequence: Synthetic oligonucleotide
augaaucauaccaagucag

SEQ ID NO: 241478 - RNA, 19 nt, Artificial Sequence
  Description of Artificial Sequence: Synthetic oligonucleotide
uaguuagaguccaugugga

SEQ ID NO: 241479 - RNA, 19 nt, Artificial Sequence
  Description of Artificial Sequence: Synthetic oligonucleotide
uagagaucgguaacuuucc

SEQ ID NO: 241480 - RNA, 19 nt, Artificial Sequence
  Description of Artificial Sequence: Synthetic oligonucleotide
ucagucuaagcauuugauc

SEQ ID NO: 241481 - RNA, 19 nt, Artificial Sequence
  Description of Artificial Sequence: Synthetic oligonucleotide
acgcaucccacccacuacc

SEQ ID NO: 241482 - RNA, 19 nt, Artificial Sequence
  Description of Artificial Sequence: Synthetic oligonucleotide
aucgguaacuuuccaugcg

SEQ ID NO: 241483 - RNA, 19 nt, Artificial Sequence
  Description of Artificial Sequence: Synthetic oligonucleotide
ucuuagugaucauucaaua

SEQ ID NO: 241484 - RNA, 19 nt, Artificial Sequence
  Description of Artificial Sequence: Synthetic oligonucleotide
ucuaagcucagugcaaggc

SEQ ID NO: 241485 - RNA, 19 nt, Artificial Sequence
  Description of Artificial Sequence: Synthetic oligonucleotide
agguucauaagguaaggau

SEQ ID NO: 241486 - RNA, 19 nt, Artificial Sequence
  Description of Artificial Sequence: Synthetic oligonucleotide
uuccaucuuaggcacccgg

SEQ ID NO: 241487 - RNA, 19 nt, Artificial Sequence
  Description of Artificial Sequence: Synthetic oligonucleotide
aagcggucuaagcucagug

SEQ ID NO: 241488 - RNA, 19 nt, Artificial Sequence
  Description of Artificial Sequence: Synthetic oligonucleotide
gugcucuagaaugauaucc

SEQ ID NO: 241489 - RNA, 19 nt, Artificial Sequence
  Description of Artificial Sequence: Synthetic oligonucleotide
uuauaagguucauaaggua

SEQ ID NO: 241490 - RNA, 19 nt, Artificial Sequence
  Description of Artificial Sequence: Synthetic oligonucleotide
gauaguaccuacuucuagu

SEQ ID NO: 241491 - RNA, 19 nt, Artificial Sequence
  Description of Artificial Sequence: Synthetic oligonucleotide
uuaaaccagugugauagac

SEQ ID NO: 241492 - RNA, 19 nt, Artificial Sequence
  Description of Artificial Sequence: Synthetic oligonucleotide
gaucaacucaguaagacgu

SEQ ID NO: 241493 - RNA, 19 nt, Artificial Sequence
  Description of Artificial Sequence: Synthetic oligonucleotide
aaacgugguccaauucagc

SEQ ID NO: 241494 - RNA, 19 nt, Artificial Sequence
  Description of Artificial Sequence: Synthetic oligonucleotide
uaaccccuaagaaacucga

SEQ ID NO: 241495 - RNA, 19 nt, Artificial Sequence
  Description of Artificial Sequence: Synthetic oligonucleotide
cuuauaagguucauaaggu

SEQ ID NO: 241496 - RNA, 19 nt, Artificial Sequence
  Description of Artificial Sequence: Synthetic oligonucleotide
ucaaacuauugacuguaua

SEQ ID NO: 241497 - RNA, 19 nt, Artificial Sequence
  Description of Artificial Sequence: Synthetic oligonucleotide
ccuacacuaauccugaaac

SEQ ID NO: 241498 - RNA, 19 nt, Artificial Sequence
  Description of Artificial Sequence: Synthetic oligonucleotide
auuugaucgucaaaaucag

SEQ ID NO: 241499 - RNA, 19 nt, Artificial Sequence
  Description of Artificial Sequence: Synthetic oligonucleotide
uucccaauuugagugucgg

SEQ ID NO: 241500 - RNA, 19 nt, Artificial Sequence
  Description of Artificial Sequence: Synthetic oligonucleotide
cuauugacuguauagauau

SEQ ID NO: 241501 - RNA, 19 nt, Artificial Sequence
  Description of Artificial Sequence: Synthetic oligonucleotide
ucuaaugugaagggucaug

SEQ ID NO: 241502 - RNA, 19 nt, Artificial Sequence
  Description of Artificial Sequence: Synthetic oligonucleotide
uuuggagugagcccucuua

SEQ ID NO: 241503 - RNA, 19 nt, Artificial Sequence
  Description of Artificial Sequence: Synthetic oligonucleotide
ugcacuugucucccgagcu

SEQ ID NO: 241504 - RNA, 19 nt, Artificial Sequence
  Description of Artificial Sequence: Synthetic oligonucleotide
agucuaagcauuugaucgu

SEQ ID NO: 241505 - RNA, 19 nt, Artificial Sequence
  Description of Artificial Sequence: Synthetic oligonucleotide
agaugcaagcaguacuaug

SEQ ID NO: 241506 - RNA, 19 nt, Artificial Sequence
  Description of Artificial Sequence: Synthetic oligonucleotide
aacugacggaaacuccaug

SEQ ID NO: 241507 - RNA, 19 nt, Artificial Sequence
  Description of Artificial Sequence: Synthetic oligonucleotide
gguacuucuggacuccccg

SEQ ID NO: 241508 - RNA, 19 nt, Artificial Sequence
  Description of Artificial Sequence: Synthetic oligonucleotide
gacgagaggagcgugcaag

SEQ ID NO: 241509 - RNA, 19 nt, Artificial Sequence
  Description of Artificial Sequence: Synthetic oligonucleotide
acagguaauggcagggugg

SEQ ID NO: 241510 - RNA, 19 nt, Artificial Sequence
  Description of Artificial Sequence: Synthetic oligonucleotide
agauauaguuaaucuuagu

SEQ ID NO: 241511 - RNA, 19 nt, Artificial Sequence
  Description of Artificial Sequence: Synthetic oligonucleotide
auaguuaaucuuagugauc

SEQ ID NO: 241512 - RNA, 19 nt, Artificial Sequence
  Description of Artificial Sequence: Synthetic oligonucleotide
acucagucuaagcauuuga

SEQ ID NO: 241513 - RNA, 19 nt, Artificial Sequence
  Description of Artificial Sequence: Synthetic oligonucleotide
aguuaguucuauauagcca

SEQ ID NO: 241514 - RNA, 19 nt, Artificial Sequence
  Description of Artificial Sequence: Synthetic oligonucleotide
aacgggguuucuccgccuc

SEQ ID NO: 241515 - RNA, 19 nt, Artificial Sequence
  Description of Artificial Sequence: Synthetic oligonucleotide
uauggcugauaguaccuac

SEQ ID NO: 241516 - RNA, 19 nt, Artificial Sequence
  Description of Artificial Sequence: Synthetic oligonucleotide
aucauuacauacauuguau

SEQ ID NO: 241517 - RNA, 19 nt, Artificial Sequence
  Description of Artificial Sequence: Synthetic oligonucleotide
caaacacucgguccccucg

SEQ ID NO: 241518 - RNA, 19 nt, Artificial Sequence
  Description of Artificial Sequence: Synthetic oligonucleotide
cccguuuauaucuacuucc

SEQ ID NO: 241519 - RNA, 19 nt, Artificial Sequence
  Description of Artificial Sequence: Synthetic oligonucleotide
uuaguucuauauagccaga

SEQ ID NO: 241520 - RNA, 19 nt, Artificial Sequence
  Description of Artificial Sequence: Synthetic oligonucleotide
aguuagaguccauguggag

SEQ ID NO: 241521 - RNA, 19 nt, Artificial Sequence
  Description of Artificial Sequence: Synthetic oligonucleotide
auaguaccuacuucuaguu

SEQ ID NO: 241522 - RNA, 19 nt, Artificial Sequence
  Description of Artificial Sequence: Synthetic oligonucleotide
guacagagaacgacgguag

SEQ ID NO: 241523 - RNA, 19 nt, Artificial Sequence
  Description of Artificial Sequence: Synthetic oligonucleotide
aucaauaaauaacgguguu

SEQ ID NO: 241524 - RNA, 19 nt, Artificial Sequence
  Description of Artificial Sequence: Synthetic oligonucleotide
gacggaaacuccaugucac

SEQ ID NO: 241525 - RNA, 19 nt, Artificial Sequence
  Description of Artificial Sequence: Synthetic oligonucleotide
accccuaagaaacucgaaa

SEQ ID NO: 241526 - RNA, 19 nt, Artificial Sequence
  Description of Artificial Sequence: Synthetic oligonucleotide
uccaucuuaggcacccgga

SEQ ID NO: 241527 - RNA, 19 nt, Artificial Sequence
  Description of Artificial Sequence: Synthetic oligonucleotide
aacgguguuuaaucauuaa

SEQ ID NO: 241528 - RNA, 19 nt, Artificial Sequence
  Description of Artificial Sequence: Synthetic oligonucleotide
accagugugauagacguaa

SEQ ID NO: 241529 - RNA, 19 nt, Artificial Sequence
  Description of Artificial Sequence: Synthetic oligonucleotide
ucuagccgaauacgggcug

SEQ ID NO: 241530 - RNA, 19 nt, Artificial Sequence
  Description of Artificial Sequence: Synthetic oligonucleotide
aggcguucauguauuauuc

SEQ ID NO: 241531 - RNA, 19 nt, Artificial Sequence
  Description of Artificial Sequence: Synthetic oligonucleotide
aaucccagaugaugucacu

SEQ ID NO: 241532 - RNA, 19 nt, Artificial Sequence
  Description of Artificial Sequence: Synthetic oligonucleotide
uugucucccgagcugggca

SEQ ID NO: 241533 - RNA, 19 nt, Artificial Sequence
  Description of Artificial Sequence: Synthetic oligonucleotide
cuaaagcggucuaagcuca

SEQ ID NO: 241534 - RNA, 19 nt, Artificial Sequence
  Description of Artificial Sequence: Synthetic oligonucleotide
cuaugcaaacuaacgguca

SEQ ID NO: 241535 - RNA, 19 nt, Artificial Sequence
  Description of Artificial Sequence: Synthetic oligonucleotide
uaacgguguuuaaucauua

SEQ ID NO: 241536 - RNA, 19 nt, Artificial Sequence
  Description of Artificial Sequence: Synthetic oligonucleotide
agacugcuaaccccuaaga

SEQ ID NO: 241537 - RNA, 19 nt, Artificial Sequence
  Description of Artificial Sequence: Synthetic oligonucleotide
aggugaaauuacugcacca

SEQ ID NO: 241538 - RNA, 19 nt, Artificial Sequence
  Description of Artificial Sequence: Synthetic oligonucleotide
gacgcaugggcgagcaugg

SEQ ID NO: 241539 - RNA, 19 nt, Artificial Sequence
  Description of Artificial Sequence: Synthetic oligonucleotide
uggcccauucaucaauuaa

SEQ ID NO: 241540 - RNA, 19 nt, Artificial Sequence
  Description of Artificial Sequence: Synthetic oligonucleotide
uguuuacaaaagguaaguu

SEQ ID NO: 241541 - RNA, 19 nt, Artificial Sequence
  Description of Artificial Sequence: Synthetic oligonucleotide
cucaguaagacgugagcca

SEQ ID NO: 241542 - RNA, 19 nt, Artificial Sequence
  Description of Artificial Sequence: Synthetic oligonucleotide
uggagugagcccucuuacc

SEQ ID NO: 241543 - RNA, 19 nt, Artificial Sequence
  Description of Artificial Sequence: Synthetic oligonucleotide
gucauguacagagaacgac

SEQ ID NO: 241544 - RNA, 19 nt, Artificial Sequence
  Description of Artificial Sequence: Synthetic oligonucleotide
caggauuagcccauuaaaa

SEQ ID NO: 241545 - RNA, 19 nt, Artificial Sequence
  Description of Artificial Sequence: Synthetic oligonucleotide
aguaagacgugagccagca

SEQ ID NO: 241546 - RNA, 19 nt, Artificial Sequence
  Description of Artificial Sequence: Synthetic oligonucleotide
aguucuauauagccagaua

SEQ ID NO: 241547 - RNA, 19 nt, Artificial Sequence
  Description of Artificial Sequence: Synthetic oligonucleotide
acagacgagaggagcgugc

SEQ ID NO: 241548 - RNA, 19 nt, Artificial Sequence
  Description of Artificial Sequence: Synthetic oligonucleotide
cauguauuauuccuagcaa

SEQ ID NO: 241549 - RNA, 19 nt, Artificial Sequence
  Description of Artificial Sequence: Synthetic oligonucleotide
cacucgguccccucggagg

SEQ ID NO: 241550 - RNA, 19 nt, Artificial Sequence
  Description of Artificial Sequence: Synthetic oligonucleotide
gagcaacgggguuucuccg

SEQ ID NO: 241551 - RNA, 19 nt, Artificial Sequence
  Description of Artificial Sequence: Synthetic oligonucleotide
agugcacuugucucccgag

SEQ ID NO: 241552 - RNA, 19 nt, Artificial Sequence
  Description of Artificial Sequence: Synthetic oligonucleotide
augcuauaaaggaauauuu

SEQ ID NO: 241553 - RNA, 19 nt, Artificial Sequence
  Description of Artificial Sequence: Synthetic oligonucleotide
gcugauaguaccuacuucu

SEQ ID NO: 241554 - RNA, 19 nt, Artificial Sequence
  Description of Artificial Sequence: Synthetic oligonucleotide
uacagagaacgacgguaga

SEQ ID NO: 241555 - RNA, 19 nt, Artificial Sequence
  Description of Artificial Sequence: Synthetic oligonucleotide
agacguaaauuguuaggua

SEQ ID NO: 241556 - RNA, 19 nt, Artificial Sequence
  Description of Artificial Sequence: Synthetic oligonucleotide
ugagugucggaaucauaaa

SEQ ID NO: 241557 - RNA, 19 nt, Artificial Sequence
  Description of Artificial Sequence: Synthetic oligonucleotide
ucggaaucauaaaggugaa

SEQ ID NO: 241558 - RNA, 19 nt, Artificial Sequence
  Description of Artificial Sequence: Synthetic oligonucleotide
cauaagguaaggauuuagu

SEQ ID NO: 241559 - RNA, 19 nt, Artificial Sequence
  Description of Artificial Sequence: Synthetic oligonucleotide
acgcuccagacuaaauccc

SEQ ID NO: 241560 - RNA, 19 nt, Artificial Sequence
  Description of Artificial Sequence: Synthetic oligonucleotide
uaaagcggucuaagcucag

SEQ ID NO: 241561 - RNA, 19 nt, Artificial Sequence
  Description of Artificial Sequence: Synthetic oligonucleotide
uguuacaaaggugcaguuu

SEQ ID NO: 241562 - RNA, 19 nt, Artificial Sequence
  Description of Artificial Sequence: Synthetic oligonucleotide
uggccuaaagcggucuaag

SEQ ID NO: 241563 - RNA, 19 nt, Artificial Sequence
  Description of Artificial Sequence: Synthetic oligonucleotide
cagauaaugccaaaucagu

SEQ ID NO: 241564 - RNA, 19 nt, Artificial Sequence
  Description of Artificial Sequence: Synthetic oligonucleotide
ggaguuaguucuauauagc

SEQ ID NO: 241565 - RNA, 19 nt, Artificial Sequence
  Description of Artificial Sequence: Synthetic oligonucleotide
aggagcgugcaaguccagc

SEQ ID NO: 241566 - RNA, 19 nt, Artificial Sequence
  Description of Artificial Sequence: Synthetic oligonucleotide
uuuggagcggaagggcggc

SEQ ID NO: 241567 - RNA, 19 nt, Artificial Sequence
  Description of Artificial Sequence: Synthetic oligonucleotide
cccucuuaccuuuaagaag

SEQ ID NO: 241568 - RNA, 19 nt, Artificial Sequence
  Description of Artificial Sequence: Synthetic oligonucleotide
uggcgugcuagagcaacgg

SEQ ID NO: 241569 - RNA, 19 nt, Artificial Sequence
  Description of Artificial Sequence: Synthetic oligonucleotide
auaacgguguuuaaucauu

SEQ ID NO: 241570 - RNA, 19 nt, Artificial Sequence
  Description of Artificial Sequence: Synthetic oligonucleotide
gcaacaaauuaaaccagug

SEQ ID NO: 241571 - RNA, 19 nt, Artificial Sequence
  Description of Artificial Sequence: Synthetic oligonucleotide
cugacggaaacuccauguc

SEQ ID NO: 241572 - RNA, 19 nt, Artificial Sequence
  Description of Artificial Sequence: Synthetic oligonucleotide
uaguaccuacuucuaguuu

SEQ ID NO: 241573 - RNA, 19 nt, Artificial Sequence
  Description of Artificial Sequence: Synthetic oligonucleotide
uacucagucuaagcauuug

SEQ ID NO: 241574 - RNA, 19 nt, Artificial Sequence
  Description of Artificial Sequence: Synthetic oligonucleotide
gugauccaggguuccgccg

SEQ ID NO: 241575 - RNA, 19 nt, Artificial Sequence
  Description of Artificial Sequence: Synthetic oligonucleotide
uuacucucuuaaucugaaa

SEQ ID NO: 241576 - RNA, 19 nt, Artificial Sequence
  Description of Artificial Sequence: Synthetic oligonucleotide
acuacccauuguaaaauaa

SEQ ID NO: 241577 - RNA, 19 nt, Artificial Sequence
  Description of Artificial Sequence: Synthetic oligonucleotide
aaagcggucuaagcucagu

SEQ ID NO: 241578 - RNA, 19 nt, Artificial Sequence
  Description of Artificial Sequence: Synthetic oligonucleotide
auucccaauuugagugucg

SEQ ID NO: 241579 - RNA, 19 nt, Artificial Sequence
  Description of Artificial Sequence: Synthetic oligonucleotide
acagagaacgacgguagau

SEQ ID NO: 241580 - RNA, 19 nt, Artificial Sequence
  Description of Artificial Sequence: Synthetic oligonucleotide
uaggcacccggaugcacgc

SEQ ID NO: 241581 - RNA, 19 nt, Artificial Sequence
  Description of Artificial Sequence: Synthetic oligonucleotide
cauggcgugcuagagcaac

SEQ ID NO: 241582 - RNA, 19 nt, Artificial Sequence
  Description of Artificial Sequence: Synthetic oligonucleotide
uuugcaguugcgugcucua

SEQ ID NO: 241583 - RNA, 19 nt, Artificial Sequence
  Description of Artificial Sequence: Synthetic oligonucleotide
gcucuagaaugauaucccc

SEQ ID NO: 241584 - RNA, 19 nt, Artificial Sequence
  Description of Artificial Sequence: Synthetic oligonucleotide
ucgaaacuugaagugccaa

SEQ ID NO: 241585 - RNA, 19 nt, Artificial Sequence
  Description of Artificial Sequence: Synthetic oligonucleotide
uaagaguuccuggguugcc

SEQ ID NO: 241586 - RNA, 19 nt, Artificial Sequence
  Description of Artificial Sequence: Synthetic oligonucleotide
caagggcccauggagggcc

SEQ ID NO: 241587 - RNA, 19 nt, Artificial Sequence
  Description of Artificial Sequence: Synthetic oligonucleotide
gugucggaaucauaaaggu

SEQ ID NO: 241588 - RNA, 19 nt, Artificial Sequence
  Description of Artificial Sequence: Synthetic oligonucleotide
cuaauccugaaacuggaau

SEQ ID NO: 241589 - RNA, 19 nt, Artificial Sequence
  Description of Artificial Sequence: Synthetic oligonucleotide
uggacuccccguuuauauc

SEQ ID NO: 241590 - RNA, 19 nt, Artificial Sequence
  Description of Artificial Sequence: Synthetic oligonucleotide
cuagccgaauacgggcugg

SEQ ID NO: 241591 - RNA, 19 nt, Artificial Sequence
  Description of Artificial Sequence: Synthetic oligonucleotide
ucccaauuugagugucgga

SEQ ID NO: 241592 - RNA, 19 nt, Artificial Sequence
  Description of Artificial Sequence: Synthetic oligonucleotide
auagccagauaaugccaaa

SEQ ID NO: 241593 - RNA, 19 nt, Artificial Sequence
  Description of Artificial Sequence: Synthetic oligonucleotide
ggcguucauguauuauucc

SEQ ID NO: 241594 - RNA, 19 nt, Artificial Sequence
  Description of Artificial Sequence: Synthetic oligonucleotide
ggucuaagcucagugcaag

SEQ ID NO: 241595 - RNA, 19 nt, Artificial Sequence
  Description of Artificial Sequence: Synthetic oligonucleotide
acguaaauuguuagguaau

SEQ ID NO: 241596 - RNA, 19 nt, Artificial Sequence
  Description of Artificial Sequence: Synthetic oligonucleotide
ugaacccggaaagacccaa

SEQ ID NO: 241597 - RNA, 19 nt, Artificial Sequence
  Description of Artificial Sequence: Synthetic oligonucleotide
auauggaguuaguucuaua

SEQ ID NO: 241598 - RNA, 19 nt, Artificial Sequence
  Description of Artificial Sequence: Synthetic oligonucleotide
ggaugcacgcuccagacua

SEQ ID NO: 241599 - RNA, 19 nt, Artificial Sequence
  Description of Artificial Sequence: Synthetic oligonucleotide
auaaugcuauaaaggaaua

SEQ ID NO: 241600 - RNA, 19 nt, Artificial Sequence
  Description of Artificial Sequence: Synthetic oligonucleotide
acccaauggagagaauccu

SEQ ID NO: 241601 - RNA, 19 nt, Artificial Sequence
  Description of Artificial Sequence: Synthetic oligonucleotide
acacucgguccccucggag

SEQ ID NO: 241602 - RNA, 19 nt, Artificial Sequence
  Description of Artificial Sequence: Synthetic oligonucleotide
gcgugcuagagcaacgggg

SEQ ID NO: 241603 - RNA, 19 nt, Artificial Sequence
  Description of Artificial Sequence: Synthetic oligonucleotide
auacagacgagaggagcgu

SEQ ID NO: 241604 - RNA, 19 nt, Artificial Sequence
  Description of Artificial Sequence: Synthetic oligonucleotide
cgguagauuauucucuagc

SEQ ID NO: 241605 - RNA, 19 nt, Artificial Sequence
  Description of Artificial Sequence: Synthetic oligonucleotide
guugcgugcucuagaauga

SEQ ID NO: 241606 - RNA, 19 nt, Artificial Sequence
  Description of Artificial Sequence: Synthetic oligonucleotide
gcuaugcaaacuaacgguc

SEQ ID NO: 241607 - RNA, 19 nt, Artificial Sequence
  Description of Artificial Sequence: Synthetic oligonucleotide
acacaguccgacgcauggg

SEQ ID NO: 241608 - RNA, 19 nt, Artificial Sequence
  Description of Artificial Sequence: Synthetic oligonucleotide
acaguccgacgcaugggcg

SEQ ID NO: 241609 - RNA, 19 nt, Artificial Sequence
  Description of Artificial Sequence: Synthetic oligonucleotide
agauuauucucuagccgaa

SEQ ID NO: 241610 - RNA, 19 nt, Artificial Sequence
  Description of Artificial Sequence: Synthetic oligonucleotide
agccgaauacgggcuggcc

SEQ ID NO: 241611 - RNA, 19 nt, Artificial Sequence
  Description of Artificial Sequence: Synthetic oligonucleotide
cauucccaauuugaguguc

SEQ ID NO: 241612 - RNA, 19 nt, Artificial Sequence
  Description of Artificial Sequence: Synthetic oligonucleotide
ggauucuauuacuugucaa

SEQ ID NO: 241613 - RNA, 19 nt, Artificial Sequence
  Description of Artificial Sequence: Synthetic oligonucleotide
uugcaguugcgugcucuag

SEQ ID NO: 241614 - RNA, 19 nt, Artificial Sequence
  Description of Artificial Sequence: Synthetic oligonucleotide
gucuaagcauuugaucguc

SEQ ID NO: 241615 - RNA, 19 nt, Artificial Sequence
  Description of Artificial Sequence: Synthetic oligonucleotide
uucauaagguaaggauuua

SEQ ID NO: 241616 - RNA, 19 nt, Artificial Sequence
  Description of Artificial Sequence: Synthetic oligonucleotide
uagagcaacgggguuucuc

SEQ ID NO: 241617 - RNA, 19 nt, Artificial Sequence
  Description of Artificial Sequence: Synthetic oligonucleotide
acuucguuauaaauuucua

SEQ ID NO: 241618 - RNA, 19 nt, Artificial Sequence
  Description of Artificial Sequence: Synthetic oligonucleotide
gagaucgguaacuuuccau

SEQ ID NO: 241619 - RNA, 19 nt, Artificial Sequence
  Description of Artificial Sequence: Synthetic oligonucleotide
ggagcgugcaaguccagca

SEQ ID NO: 241620 - RNA, 19 nt, Artificial Sequence
  Description of Artificial Sequence: Synthetic oligonucleotide
ugcgugcucuagaaugaua

SEQ ID NO: 241621 - RNA, 19 nt, Artificial Sequence
  Description of Artificial Sequence: Synthetic oligonucleotide
ccaacugacggaaacucca

SEQ ID NO: 241622 - RNA, 19 nt, Artificial Sequence
  Description of Artificial Sequence: Synthetic oligonucleotide
aacuaacggucaacauucu

SEQ ID NO: 241623 - RNA, 19 nt, Artificial Sequence
  Description of Artificial Sequence: Synthetic oligonucleotide
gcggucuaagcucagugca

SEQ ID NO: 241624 - RNA, 19 nt, Artificial Sequence
  Description of Artificial Sequence: Synthetic oligonucleotide
gaacgacgguagauuauuc

SEQ ID NO: 241625 - RNA, 19 nt, Artificial Sequence
  Description of Artificial Sequence: Synthetic oligonucleotide
ugucucccgagcugggcau

SEQ ID NO: 241626 - RNA, 19 nt, Artificial Sequence
  Description of Artificial Sequence: Synthetic oligonucleotide
auggcgugcuagagcaacg

SEQ ID NO: 241627 - RNA, 19 nt, Artificial Sequence
  Description of Artificial Sequence: Synthetic oligonucleotide
cacgcaucccacccacuac

SEQ ID NO: 241628 - RNA, 19 nt, Artificial Sequence
  Description of Artificial Sequence: Synthetic oligonucleotide
ggccuaaagcggucuaagc

SEQ ID NO: 241629 - RNA, 19 nt, Artificial Sequence
  Description of Artificial Sequence: Synthetic oligonucleotide
aagaguaguugagcugcuu

SEQ ID NO: 241630 - RNA, 19 nt, Artificial Sequence
  Description of Artificial Sequence: Synthetic oligonucleotide
ugguccaauucagcagugu

SEQ ID NO: 241631 - RNA, 19 nt, Artificial Sequence
  Description of Artificial Sequence: Synthetic oligonucleotide
ggcgugcuagagcaacggg

SEQ ID NO: 241632 - RNA, 19 nt, Artificial Sequence
  Description of Artificial Sequence: Synthetic oligonucleotide
ggagugagcccucuuaccu

SEQ ID NO: 241633 - RNA, 19 nt, Artificial Sequence
  Description of Artificial Sequence: Synthetic oligonucleotide
aguccgacgcaugggcgag

SEQ ID NO: 241634 - RNA, 19 nt, Artificial Sequence
  Description of Artificial Sequence: Synthetic oligonucleotide
ccauugcucaauauuagua

SEQ ID NO: 241635 - RNA, 19 nt, Artificial Sequence
  Description of Artificial Sequence: Synthetic oligonucleotide
ggcugauaguaccuacuuc

SEQ ID NO: 241636 - RNA, 19 nt, Artificial Sequence
  Description of Artificial Sequence: Synthetic oligonucleotide
aaccccuaagaaacucgaa

SEQ ID NO: 241637 - RNA, 19 nt, Artificial Sequence
  Description of Artificial Sequence: Synthetic oligonucleotide
gguucauaagguaaggauu

SEQ ID NO: 241638 - RNA, 19 nt, Artificial Sequence
  Description of Artificial Sequence: Synthetic oligonucleotide
caugggcgagcauggcgug

SEQ ID NO: 241639 - RNA, 19 nt, Artificial Sequence
  Description of Artificial Sequence: Synthetic oligonucleotide
aacuuuccaugcggaaaua

SEQ ID NO: 241640 - RNA, 19 nt, Artificial Sequence
  Description of Artificial Sequence: Synthetic oligonucleotide
agacgugagccagcaucuc

SEQ ID NO: 241641 - RNA, 19 nt, Artificial Sequence
  Description of Artificial Sequence: Synthetic oligonucleotide
uagccgaauacgggcuggc

SEQ ID NO: 241642 - RNA, 19 nt, Artificial Sequence
  Description of Artificial Sequence: Synthetic oligonucleotide
agcaguguucaagcgcuaa

SEQ ID NO: 241643 - RNA, 19 nt, Artificial Sequence
  Description of Artificial Sequence: Synthetic oligonucleotide
acuugucucccgagcuggg

SEQ ID NO: 241644 - RNA, 19 nt, Artificial Sequence
  Description of Artificial Sequence: Synthetic oligonucleotide
gggauuuggagugagcccu

SEQ ID NO: 241645 - RNA, 19 nt, Artificial Sequence
  Description of Artificial Sequence: Synthetic oligonucleotide
agucccauguggauuucaa

SEQ ID NO: 241646 - RNA, 19 nt, Artificial Sequence
  Description of Artificial Sequence: Synthetic oligonucleotide
caguccgacgcaugggcga

SEQ ID NO: 241647 - RNA, 19 nt, Artificial Sequence
  Description of Artificial Sequence: Synthetic oligonucleotide
gcuaaccccuaagaaacuc

SEQ ID NO: 241648 - RNA, 19 nt, Artificial Sequence
  Description of Artificial Sequence: Synthetic oligonucleotide
gugauagacguaaauuguu

SEQ ID NO: 241649 - RNA, 19 nt, Artificial Sequence
  Description of Artificial Sequence: Synthetic oligonucleotide
uuccgccggcuccucucag

SEQ ID NO: 241650 - RNA, 19 nt, Artificial Sequence
  Description of Artificial Sequence: Synthetic oligonucleotide
uuccuggguugccaacauu

SEQ ID NO: 241651 - RNA, 19 nt, Artificial Sequence
  Description of Artificial Sequence: Synthetic oligonucleotide
cucaggcggguacccgcgg

SEQ ID NO: 241652 - RNA, 19 nt, Artificial Sequence
  Description of Artificial Sequence: Synthetic oligonucleotide
gcuccuacacuaauccuga

SEQ ID NO: 241653 - RNA, 19 nt, Artificial Sequence
  Description of Artificial Sequence: Synthetic oligonucleotide
auacucagucuaagcauuu

SEQ ID NO: 241654 - RNA, 19 nt, Artificial Sequence
  Description of Artificial Sequence: Synthetic oligonucleotide
cguaaauuguuagguaauc

SEQ ID NO: 241655 - RNA, 19 nt, Artificial Sequence
  Description of Artificial Sequence: Synthetic oligonucleotide
agacuaaaucccagaugau

SEQ ID NO: 241656 - RNA, 19 nt, Artificial Sequence
  Description of Artificial Sequence: Synthetic oligonucleotide
cucuagccgaauacgggcu

SEQ ID NO: 241657 - RNA, 19 nt, Artificial Sequence
  Description of Artificial Sequence: Synthetic oligonucleotide
cuccucucaggcggguacc

SEQ ID NO: 241658 - RNA, 19 nt, Artificial Sequence
  Description of Artificial Sequence: Synthetic oligonucleotide
acgcaugggcgagcauggc

SEQ ID NO: 241659 - RNA, 19 nt, Artificial Sequence
  Description of Artificial Sequence: Synthetic oligonucleotide
cacccacuacccauuguaa

SEQ ID NO: 241660 - RNA, 19 nt, Artificial Sequence
  Description of Artificial Sequence: Synthetic oligonucleotide
cccacuacccauuguaaaa

SEQ ID NO: 241661 - RNA, 19 nt, Artificial Sequence
  Description of Artificial Sequence: Synthetic oligonucleotide
agacgagaggagcgugcaa

SEQ ID NO: 241662 - RNA, 19 nt, Artificial Sequence
  Description of Artificial Sequence: Synthetic oligonucleotide
guaccuacuucuaguuuua

SEQ ID NO: 241663 - RNA, 19 nt, Artificial Sequence
  Description of Artificial Sequence: Synthetic oligonucleotide
cauagagaucgguaacuuu

SEQ ID NO: 241664 - RNA, 19 nt, Artificial Sequence
  Description of Artificial Sequence: Synthetic oligonucleotide
caagacugcuaaccccuaa

SEQ ID NO: 241665 - RNA, 19 nt, Artificial Sequence
  Description of Artificial Sequence: Synthetic oligonucleotide
cuguauagauauaguuaau

SEQ ID NO: 241666 - RNA, 19 nt, Artificial Sequence
  Description of Artificial Sequence: Synthetic oligonucleotide
ccccguuuauaucuacuuc

SEQ ID NO: 241667 - RNA, 19 nt, Artificial Sequence
  Description of Artificial Sequence: Synthetic oligonucleotide
ccggaugcacgcuccagac

SEQ ID NO: 241668 - RNA, 19 nt, Artificial Sequence
  Description of Artificial Sequence: Synthetic oligonucleotide
agccaaccaaauaguuaga

SEQ ID NO: 241669 - RNA, 19 nt, Artificial Sequence
  Description of Artificial Sequence: Synthetic oligonucleotide
cgguguuuaaucauuaaau

SEQ ID NO: 241670 - RNA, 19 nt, Artificial Sequence
  Description of Artificial Sequence: Synthetic oligonucleotide
caucucuaaugugaagggu

SEQ ID NO: 241671 - RNA, 19 nt, Artificial Sequence
  Description of Artificial Sequence: Synthetic oligonucleotide
aaccagugugauagacgua

SEQ ID NO: 241672 - RNA, 19 nt, Artificial Sequence
  Description of Artificial Sequence: Synthetic oligonucleotide
cugaacccggaaagaccca

SEQ ID NO: 241673 - RNA, 19 nt, Artificial Sequence
  Description of Artificial Sequence: Synthetic oligonucleotide
guuccgccggcuccucuca

SEQ ID NO: 241674 - RNA, 19 nt, Artificial Sequence
  Description of Artificial Sequence: Synthetic oligonucleotide
gguaaggauuuagugcacu

SEQ ID NO: 241675 - RNA, 19 nt, Artificial Sequence
  Description of Artificial Sequence: Synthetic oligonucleotide
gaugcacgcuccagacuaa

SEQ ID NO: 241676 - RNA, 19 nt, Artificial Sequence
  Description of Artificial Sequence: Synthetic oligonucleotide
gcgcuaaauuucagaagac

SEQ ID NO: 241677 - RNA, 19 nt, Artificial Sequence
  Description of Artificial Sequence: Synthetic oligonucleotide
ccauguggauuucaaguua

SEQ ID NO: 241678 - RNA, 19 nt, Artificial Sequence
  Description of Artificial Sequence: Synthetic oligonucleotide
gagaugcaagcaguacuau

SEQ ID NO: 241679 - RNA, 19 nt, Artificial Sequence
  Description of Artificial Sequence: Synthetic oligonucleotide
gcaaacacucgguccccuc

SEQ ID NO: 241680 - RNA, 19 nt, Artificial Sequence
  Description of Artificial Sequence: Synthetic oligonucleotide
cagagaacgacgguagauu

SEQ ID NO: 241681 - RNA, 19 nt, Artificial Sequence
  Description of Artificial Sequence: Synthetic oligonucleotide
gccgaauacgggcuggccu

SEQ ID NO: 241682 - RNA, 19 nt, Artificial Sequence
  Description of Artificial Sequence: Synthetic oligonucleotide
augcacgcuccagacuaaa

SEQ ID NO: 241683 - RNA, 19 nt, Artificial Sequence
  Description of Artificial Sequence: Synthetic oligonucleotide
gcgagcauggcgugcuaga

SEQ ID NO: 241684 - RNA, 19 nt, Artificial Sequence
  Description of Artificial Sequence: Synthetic oligonucleotide
gcgugcucuagaaugauau

SEQ ID NO: 241685 - RNA, 19 nt, Artificial Sequence
  Description of Artificial Sequence: Synthetic oligonucleotide
cuggccuaaagcggucuaa

SEQ ID NO: 241686 - RNA, 19 nt, Artificial Sequence
  Description of Artificial Sequence: Synthetic oligonucleotide
agacaacaucggaaacuuu

SEQ ID NO: 241687 - RNA, 19 nt, Artificial Sequence
  Description of Artificial Sequence: Synthetic oligonucleotide
cgacgcaugggcgagcaug

SEQ ID NO: 241688 - RNA, 19 nt, Artificial Sequence
  Description of Artificial Sequence: Synthetic oligonucleotide
ggcggcauggcuucucccu

SEQ ID NO: 241689 - RNA, 19 nt, Artificial Sequence
  Description of Artificial Sequence: Synthetic oligonucleotide
cccggaaagacccaaggau

SEQ ID NO: 241690 - RNA, 19 nt, Artificial Sequence
  Description of Artificial Sequence: Synthetic oligonucleotide
cccaaguaccugugauuuc

SEQ ID NO: 241691 - RNA, 19 nt, Artificial Sequence
  Description of Artificial Sequence: Synthetic oligonucleotide
ccgaauacgggcuggccua

SEQ ID NO: 241692 - RNA, 19 nt, Artificial Sequence
  Description of Artificial Sequence: Synthetic oligonucleotide
gcaugggcgagcauggcgu

SEQ ID NO: 241693 - RNA, 19 nt, Artificial Sequence
  Description of Artificial Sequence: Synthetic oligonucleotide
gaauacgggcuggccuaaa

SEQ ID NO: 241694 - RNA, 19 nt, Artificial Sequence
  Description of Artificial Sequence: Synthetic oligonucleotide
gucaaacuauugacuguau

SEQ ID NO: 241695 - RNA, 19 nt, Artificial Sequence
  Description of Artificial Sequence: Synthetic oligonucleotide
cuccuacacuaauccugaa

SEQ ID NO: 241696 - RNA, 19 nt, Artificial Sequence
  Description of Artificial Sequence: Synthetic oligonucleotide
caaggcguucauguauuau

SEQ ID NO: 241697 - RNA, 19 nt, Artificial Sequence
  Description of Artificial Sequence: Synthetic oligonucleotide
cgguaacuuuccaugcgga

SEQ ID NO: 241698 - RNA, 19 nt, Artificial Sequence
  Description of Artificial Sequence: Synthetic oligonucleotide
guaagacgugagccagcau

SEQ ID NO: 241699 - RNA, 19 nt, Artificial Sequence
  Description of Artificial Sequence: Synthetic oligonucleotide
gggccuuauaagguucaua

SEQ ID NO: 241700 - RNA, 19 nt, Artificial Sequence
  Description of Artificial Sequence: Synthetic oligonucleotide
guccgacgcaugggcgagc

SEQ ID NO: 241701 - RNA, 19 nt, Artificial Sequence
  Description of Artificial Sequence: Synthetic oligonucleotide
cacccggaugcacgcucca

SEQ ID NO: 241702 - RNA, 19 nt, Artificial Sequence
  Description of Artificial Sequence: Synthetic oligonucleotide
gcuggccuaaagcggucua

SEQ ID NO: 241703 - RNA, 19 nt, Artificial Sequence
  Description of Artificial Sequence: Synthetic oligonucleotide
ccaucuuaggcacccggau

SEQ ID NO: 241704 - RNA, 19 nt, Artificial Sequence
  Description of Artificial Sequence: Synthetic oligonucleotide
caguugcgugcucuagaau

SEQ ID NO: 241705 - RNA, 19 nt, Artificial Sequence
  Description of Artificial Sequence: Synthetic oligonucleotide
cccaauggagagaauccuu

SEQ ID NO: 241706 - RNA, 19 nt, Artificial Sequence
  Description of Artificial Sequence: Synthetic oligonucleotide
ccacuacccauuguaaaau

SEQ ID NO: 241707 - RNA, 19 nt, Artificial Sequence
  Description of Artificial Sequence: Synthetic oligonucleotide
cggucuaagcucagugcaa

SEQ ID NO: 241708 - RNA, 19 nt, Artificial Sequence
  Description of Artificial Sequence: Synthetic oligonucleotide
gugagcccucuuaccuuua

SEQ ID NO: 241709 - RNA, 19 nt, Artificial Sequence
  Description of Artificial Sequence: Synthetic oligonucleotide
ccgccuucgccuccugcca

SEQ ID NO: 241710 - RNA, 19 nt, Artificial Sequence
  Description of Artificial Sequence: Synthetic oligonucleotide
ccgagggaacacaggcaua

SEQ ID NO: 241711 - RNA, 19 nt, Artificial Sequence
  Description of Artificial Sequence: Synthetic oligonucleotide
ccuucccggcgagcucccc

SEQ ID NO: 241712 - RNA, 19 nt, Artificial Sequence
  Description of Artificial Sequence: Synthetic oligonucleotide
ccgccccaaguaccuguga

SEQ ID NO: 241713 - RNA, 19 nt, Artificial Sequence
  Description of Artificial Sequence: Synthetic oligonucleotide
cgccccaaguaccugugau

SEQ ID NO: 241714 - RNA, 19 nt, Artificial Sequence
  Description of Artificial Sequence: Synthetic oligonucleotide
cgaauacgggcuggccuaa

SEQ ID NO: 241715 - RNA, 19 nt, Artificial Sequence
  Description of Artificial Sequence: Synthetic oligonucleotide
ccucugcgagagcuguauu

SEQ ID NO: 241716 - RNA, 19 nt, Artificial Sequence
  Description of Artificial Sequence: Synthetic oligonucleotide
uuuauuguccucacuaucg

SEQ ID NO: 241717 - RNA, 19 nt, Artificial Sequence
  Description of Artificial Sequence: Synthetic oligonucleotide
uuuaggggaaaacagacca

SEQ ID NO: 241718 - RNA, 19 nt, Artificial Sequence
  Description of Artificial Sequence: Synthetic oligonucleotide
acuaucggaguccucaucc

SEQ ID NO: 241719 - RNA, 19 nt, Artificial Sequence
  Description of Artificial Sequence: Synthetic oligonucleotide
agugcugccgaguacaccc

SEQ ID NO: 241720 - RNA, 19 nt, Artificial Sequence
  Description of Artificial Sequence: Synthetic oligonucleotide
ucaaaacacacucucagcu

SEQ ID NO: 241721 - RNA, 19 nt, Artificial Sequence
  Description of Artificial Sequence: Synthetic oligonucleotide
agguguaccauucaccugg

SEQ ID NO: 241722 - RNA, 19 nt, Artificial Sequence
  Description of Artificial Sequence: Synthetic oligonucleotide
ugauguagcauccuuuccc

SEQ ID NO: 241723 - RNA, 19 nt, Artificial Sequence
  Description of Artificial Sequence: Synthetic oligonucleotide
cugaaugucaccuaggaca

SEQ ID NO: 241724 - RNA, 19 nt, Artificial Sequence
  Description of Artificial Sequence: Synthetic oligonucleotide
ucgaccaucaccuccaccc

SEQ ID NO: 241725 - RNA, 19 nt, Artificial Sequence
  Description of Artificial Sequence: Synthetic oligonucleotide
uugcgcaucaaguugcugg

SEQ ID NO: 241726 - RNA, 19 nt, Artificial Sequence
  Description of Artificial Sequence: Synthetic oligonucleotide
uuuggggacuuaaaagggg

SEQ ID NO: 241727 - RNA, 19 nt, Artificial Sequence
  Description of Artificial Sequence: Synthetic oligonucleotide
gacuuaaagagguggaggc

SEQ ID NO: 241728 - RNA, 19 nt, Artificial Sequence
  Description of Artificial Sequence: Synthetic oligonucleotide
gauguagcauccuuucccg

SEQ ID NO: 241729 - RNA, 19 nt, Artificial Sequence
  Description of Artificial Sequence: Synthetic oligonucleotide
ucuagagcgugaucgacgg

SEQ ID NO: 241730 - RNA, 19 nt, Artificial Sequence
  Description of Artificial Sequence: Synthetic oligonucleotide
aaaacagaccacaccacac

SEQ ID NO: 241731 - RNA, 19 nt, Artificial Sequence
  Description of Artificial Sequence: Synthetic oligonucleotide
uuauuguccucacuaucgg

SEQ ID NO: 241732 - RNA, 19 nt, Artificial Sequence
  Description of Artificial Sequence: Synthetic oligonucleotide
uguaggggacuuaaagagg

SEQ ID NO: 241733 - RNA, 19 nt, Artificial Sequence
  Description of Artificial Sequence: Synthetic oligonucleotide
gguucuuacagauuacugg

SEQ ID NO: 241734 - RNA, 19 nt, Artificial Sequence
  Description of Artificial Sequence: Synthetic oligonucleotide
cuguaggggacuuaaagag

SEQ ID NO: 241735 - RNA, 19 nt, Artificial Sequence
  Description of Artificial Sequence: Synthetic oligonucleotide
agugacucaaguuucgcug

SEQ ID NO: 241736 - RNA, 19 nt, Artificial Sequence
  Description of Artificial Sequence: Synthetic oligonucleotide
gacagcaagaucucgacca

SEQ ID NO: 241737 - RNA, 19 nt, Artificial Sequence
  Description of Artificial Sequence: Synthetic oligonucleotide
uuuuaggggaaaacagacc

SEQ ID NO: 241738 - RNA, 19 nt, Artificial Sequence
  Description of Artificial Sequence: Synthetic oligonucleotide
aaguaguaaagggcgacgg

SEQ ID NO: 241739 - RNA, 19 nt, Artificial Sequence
  Description of Artificial Sequence: Synthetic oligonucleotide
uucgugguagggcagacug

SEQ ID NO: 241740 - RNA, 19 nt, Artificial Sequence
  Description of Artificial Sequence: Synthetic oligonucleotide
ugcaugaagaugcgggcgg

SEQ ID NO: 241741 - RNA, 19 nt, Artificial Sequence
  Description of Artificial Sequence: Synthetic oligonucleotide
ucaaccgagcccaucagug

SEQ ID NO: 241742 - RNA, 19 nt, Artificial Sequence
  Description of Artificial Sequence: Synthetic oligonucleotide
uuacgcuuagucagaaaag

SEQ ID NO: 241743 - RNA, 19 nt, Artificial Sequence
  Description of Artificial Sequence: Synthetic oligonucleotide
gauuacuggguaucgggag

SEQ ID NO: 241744 - RNA, 19 nt, Artificial Sequence
  Description of Artificial Sequence: Synthetic oligonucleotide
uguaccauucaccugggau

SEQ ID NO: 241745 - RNA, 19 nt, Artificial Sequence
  Description of Artificial Sequence: Synthetic oligonucleotide
uaggacaucacaacucucu

SEQ ID NO: 241746 - RNA, 19 nt, Artificial Sequence
  Description of Artificial Sequence: Synthetic oligonucleotide
uggcucuagagcgugaucg

SEQ ID NO: 241747 - RNA, 19 nt, Artificial Sequence
  Description of Artificial Sequence: Synthetic oligonucleotide
ucaugauugacugucuuga

SEQ ID NO: 241748 - RNA, 19 nt, Artificial Sequence
  Description of Artificial Sequence: Synthetic oligonucleotide
cuuaaccacacucuguaac

SEQ ID NO: 241749 - RNA, 19 nt, Artificial Sequence
  Description of Artificial Sequence: Synthetic oligonucleotide
cagauuacuggguaucggg

SEQ ID NO: 241750 - RNA, 19 nt, Artificial Sequence
  Description of Artificial Sequence: Synthetic oligonucleotide
uagagcgugaucgacgggg

SEQ ID NO: 241751 - RNA, 19 nt, Artificial Sequence
  Description of Artificial Sequence: Synthetic oligonucleotide
aguacucggauuuggaagu

SEQ ID NO: 241752 - RNA, 19 nt, Artificial Sequence
  Description of Artificial Sequence: Synthetic oligonucleotide
aaccacacucuguaacagg

SEQ ID NO: 241753 - RNA, 19 nt, Artificial Sequence
  Description of Artificial Sequence: Synthetic oligonucleotide
acagguguaccauucaccu

SEQ ID NO: 241754 - RNA, 19 nt, Artificial Sequence
  Description of Artificial Sequence: Synthetic oligonucleotide
gauuuggaagucccgucgg

SEQ ID NO: 241755 - RNA, 19 nt, Artificial Sequence
  Description of Artificial Sequence: Synthetic oligonucleotide
ucgacggggauucugcucc

SEQ ID NO: 241756 - RNA, 19 nt, Artificial Sequence
  Description of Artificial Sequence: Synthetic oligonucleotide
aacaggucaaccgagccca

SEQ ID NO: 241757 - RNA, 19 nt, Artificial Sequence
  Description of Artificial Sequence: Synthetic oligonucleotide
aagcaauuggcagucuggg

SEQ ID NO: 241758 - RNA, 19 nt, Artificial Sequence
  Description of Artificial Sequence: Synthetic oligonucleotide
guaccauucaccugggaug

SEQ ID NO: 241759 - RNA, 19 nt, Artificial Sequence
  Description of Artificial Sequence: Synthetic oligonucleotide
uugccuucaggcucuauag

SEQ ID NO: 241760 - RNA, 19 nt, Artificial Sequence
  Description of Artificial Sequence: Synthetic oligonucleotide
uacuuaggggagcugagga

SEQ ID NO: 241761 - RNA, 19 nt, Artificial Sequence
  Description of Artificial Sequence: Synthetic oligonucleotide
acucaaguuucgcuggcac

SEQ ID NO: 241762 - RNA, 19 nt, Artificial Sequence
  Description of Artificial Sequence: Synthetic oligonucleotide
caagcaauuggcagucugg

SEQ ID NO: 241763 - RNA, 19 nt, Artificial Sequence
  Description of Artificial Sequence: Synthetic oligonucleotide
guuacgcuuagucagaaaa

SEQ ID NO: 241764 - RNA, 19 nt, Artificial Sequence
  Description of Artificial Sequence: Synthetic oligonucleotide
caguacucggauuuggaag

SEQ ID NO: 241765 - RNA, 19 nt, Artificial Sequence
  Description of Artificial Sequence: Synthetic oligonucleotide
gaaaacagaccacaccaca

SEQ ID NO: 241766 - RNA, 19 nt, Artificial Sequence
  Description of Artificial Sequence: Synthetic oligonucleotide
auucugaccauccucguau

SEQ ID NO: 241767 - RNA, 19 nt, Artificial Sequence
  Description of Artificial Sequence: Synthetic oligonucleotide
ugaucgacggggauucugc

SEQ ID NO: 241768 - RNA, 19 nt, Artificial Sequence
  Description of Artificial Sequence: Synthetic oligonucleotide
ucuuacagauuacugggua

SEQ ID NO: 241769 - RNA, 19 nt, Artificial Sequence
  Description of Artificial Sequence: Synthetic oligonucleotide
agcagguucuuacagauua

SEQ ID NO: 241770 - RNA, 19 nt, Artificial Sequence
  Description of Artificial Sequence: Synthetic oligonucleotide
ggaguguuggccuucaccc

SEQ ID NO: 241771 - RNA, 19 nt, Artificial Sequence
  Description of Artificial Sequence: Synthetic oligonucleotide
gguaucaucagugaccacc

SEQ ID NO: 241772 - RNA, 19 nt, Artificial Sequence
  Description of Artificial Sequence: Synthetic oligonucleotide
agcaauuggcagucugggc

SEQ ID NO: 241773 - RNA, 19 nt, Artificial Sequence
  Description of Artificial Sequence: Synthetic oligonucleotide
aguguuggccuucacccuc

SEQ ID NO: 241774 - RNA, 19 nt, Artificial Sequence
  Description of Artificial Sequence: Synthetic oligonucleotide
uaccauucaccugggaugg

SEQ ID NO: 241775 - RNA, 19 nt, Artificial Sequence
  Description of Artificial Sequence: Synthetic oligonucleotide
guaguaaagggcgacggag

SEQ ID NO: 241776 - RNA, 19 nt, Artificial Sequence
  Description of Artificial Sequence: Synthetic oligonucleotide
ugcauuuuccuccgggcca

SEQ ID NO: 241777 - RNA, 19 nt, Artificial Sequence
  Description of Artificial Sequence: Synthetic oligonucleotide
uacagauuacuggguaucg

SEQ ID NO: 241778 - RNA, 19 nt, Artificial Sequence
  Description of Artificial Sequence: Synthetic oligonucleotide
acacucucagcucccgugc

SEQ ID NO: 241779 - RNA, 19 nt, Artificial Sequence
  Description of Artificial Sequence: Synthetic oligonucleotide
uacgcuuagucagaaaaga

SEQ ID NO: 241780 - RNA, 19 nt, Artificial Sequence
  Description of Artificial Sequence: Synthetic oligonucleotide
uggaguguuggccuucacc

SEQ ID NO: 241781 - RNA, 19 nt, Artificial Sequence
  Description of Artificial Sequence: Synthetic oligonucleotide
uuggggacuuaaaaggggu

SEQ ID NO: 241782 - RNA, 19 nt, Artificial Sequence
  Description of Artificial Sequence: Synthetic oligonucleotide
gcgggcacggcauagaugg

SEQ ID NO: 241783 - RNA, 19 nt, Artificial Sequence
  Description of Artificial Sequence: Synthetic oligonucleotide
cucuagagcgugaucgacg

SEQ ID NO: 241784 - RNA, 19 nt, Artificial Sequence
  Description of Artificial Sequence: Synthetic oligonucleotide
gcaauuggcagucugggcc

SEQ ID NO: 241785 - RNA, 19 nt, Artificial Sequence
  Description of Artificial Sequence: Synthetic oligonucleotide
uuugccuucaggcucuaua

SEQ ID NO: 241786 - RNA, 19 nt, Artificial Sequence
  Description of Artificial Sequence: Synthetic oligonucleotide
guuguugggagcuggacuc

SEQ ID NO: 241787 - RNA, 19 nt, Artificial Sequence
  Description of Artificial Sequence: Synthetic oligonucleotide
ggcuguuacgcuuagucag

SEQ ID NO: 241788 - RNA, 19 nt, Artificial Sequence
  Description of Artificial Sequence: Synthetic oligonucleotide
uccugcuaaccagagacag

SEQ ID NO: 241789 - RNA, 19 nt, Artificial Sequence
  Description of Artificial Sequence: Synthetic oligonucleotide
cucuccacgcuucagcugc

SEQ ID NO: 241790 - RNA, 19 nt, Artificial Sequence
  Description of Artificial Sequence: Synthetic oligonucleotide
gaugcgggcggucuugugc

SEQ ID NO: 241791 - RNA, 19 nt, Artificial Sequence
  Description of Artificial Sequence: Synthetic oligonucleotide
ucaccuaggacaucacaac

SEQ ID NO: 241792 - RNA, 19 nt, Artificial Sequence
  Description of Artificial Sequence: Synthetic oligonucleotide
ggucacgaaauccaagucc

SEQ ID NO: 241793 - RNA, 19 nt, Artificial Sequence
  Description of Artificial Sequence: Synthetic oligonucleotide
cucuauaggggacacagga

SEQ ID NO: 241794 - RNA, 19 nt, Artificial Sequence
  Description of Artificial Sequence: Synthetic oligonucleotide
ggauuuggaagucccgucg

SEQ ID NO: 241795 - RNA, 19 nt, Artificial Sequence
  Description of Artificial Sequence: Synthetic oligonucleotide
aggggacuuaaagaggugg

SEQ ID NO: 241796 - RNA, 19 nt, Artificial Sequence
  Description of Artificial Sequence: Synthetic oligonucleotide
ggaggcgucagccugacug

SEQ ID NO: 241797 - RNA, 19 nt, Artificial Sequence
  Description of Artificial Sequence: Synthetic oligonucleotide
uaaagggcgacggaggcgu

SEQ ID NO: 241798 - RNA, 19 nt, Artificial Sequence
  Description of Artificial Sequence: Synthetic oligonucleotide
uuuggaagucccgucggag

SEQ ID NO: 241799 - RNA, 19 nt, Artificial Sequence
  Description of Artificial Sequence: Synthetic oligonucleotide
cauugguaucaucagugac

SEQ ID NO: 241800 - RNA, 19 nt, Artificial Sequence
  Description of Artificial Sequence: Synthetic oligonucleotide
uggucucaggcaagaaucc

SEQ ID NO: 241801 - RNA, 19 nt, Artificial Sequence
  Description of Artificial Sequence: Synthetic oligonucleotide
uccuuaagugccagcggag

SEQ ID NO: 241802 - RNA, 19 nt, Artificial Sequence
  Description of Artificial Sequence: Synthetic oligonucleotide
ugucacuaccuccugcccu

SEQ ID NO: 241803 - RNA, 19 nt, Artificial Sequence
  Description of Artificial Sequence: Synthetic oligonucleotide
uguaguuuuggggacuuaa

SEQ ID NO: 241804 - RNA, 19 nt, Artificial Sequence
  Description of Artificial Sequence: Synthetic oligonucleotide
uucuuacagauuacugggu

SEQ ID NO: 241805 - RNA, 19 nt, Artificial Sequence
  Description of Artificial Sequence: Synthetic oligonucleotide
ugaccauccucguaucucu

SEQ ID NO: 241806 - RNA, 19 nt, Artificial Sequence
  Description of Artificial Sequence: Synthetic oligonucleotide
acguuggacucccagcauc

SEQ ID NO: 241807 - RNA, 19 nt, Artificial Sequence
  Description of Artificial Sequence: Synthetic oligonucleotide
uuggaagucccgucggagc

SEQ ID NO: 241808 - RNA, 19 nt, Artificial Sequence
  Description of Artificial Sequence: Synthetic oligonucleotide
gucgcuaggaacauccuug

SEQ ID NO: 241809 - RNA, 19 nt, Artificial Sequence
  Description of Artificial Sequence: Synthetic oligonucleotide
uuaggggaaaacagaccac

SEQ ID NO: 241810 - RNA, 19 nt, Artificial Sequence
  Description of Artificial Sequence: Synthetic oligonucleotide
cugcaaauaggcuggccag

SEQ ID NO: 241811 - RNA, 19 nt, Artificial Sequence
  Description of Artificial Sequence: Synthetic oligonucleotide
gcauagauggugcaugaag

SEQ ID NO: 241812 - RNA, 19 nt, Artificial Sequence
  Description of Artificial Sequence: Synthetic oligonucleotide
auagccucauccccaagcu

SEQ ID NO: 241813 - RNA, 19 nt, Artificial Sequence
  Description of Artificial Sequence: Synthetic oligonucleotide
ucacaacucucuguagggg

SEQ ID NO: 241814 - RNA, 19 nt, Artificial Sequence
  Description of Artificial Sequence: Synthetic oligonucleotide
ugcaaauaggcuggccagg

SEQ ID NO: 241815 - RNA, 19 nt, Artificial Sequence
  Description of Artificial Sequence: Synthetic oligonucleotide
aguaguggcgggcacggca

SEQ ID NO: 241816 - RNA, 19 nt, Artificial Sequence
  Description of Artificial Sequence: Synthetic oligonucleotide
uaccucguggcaguagugg

SEQ ID NO: 241817 - RNA, 19 nt, Artificial Sequence
  Description of Artificial Sequence: Synthetic oligonucleotide
uaaccacacucuguaacag

SEQ ID NO: 241818 - RNA, 19 nt, Artificial Sequence
  Description of Artificial Sequence: Synthetic oligonucleotide
agucugggccucugagucc

SEQ ID NO: 241819 - RNA, 19 nt, Artificial Sequence
  Description of Artificial Sequence: Synthetic oligonucleotide
ucuugccgggccuggaugc

SEQ ID NO: 241820 - RNA, 19 nt, Artificial Sequence
  Description of Artificial Sequence: Synthetic oligonucleotide
accuaggacaucacaacuc

SEQ ID NO: 241821 - RNA, 19 nt, Artificial Sequence
  Description of Artificial Sequence: Synthetic oligonucleotide
ucguagaggcgguuggagc

SEQ ID NO: 241822 - RNA, 19 nt, Artificial Sequence
  Description of Artificial Sequence: Synthetic oligonucleotide
acagauuacuggguaucgg

SEQ ID NO: 241823 - RNA, 19 nt, Artificial Sequence
  Description of Artificial Sequence: Synthetic oligonucleotide
aaguuucgcuggcacccuc

SEQ ID NO: 241824 - RNA, 19 nt, Artificial Sequence
  Description of Artificial Sequence: Synthetic oligonucleotide
uggacucuuggugacaggu

SEQ ID NO: 241825 - RNA, 19 nt, Artificial Sequence
  Description of Artificial Sequence: Synthetic oligonucleotide
uugaugcaggucugaaugu

SEQ ID NO: 241826 - RNA, 19 nt, Artificial Sequence
  Description of Artificial Sequence: Synthetic oligonucleotide
acaacucucuguaggggac

SEQ ID NO: 241827 - RNA, 19 nt, Artificial Sequence
  Description of Artificial Sequence: Synthetic oligonucleotide
uaucgggagaagaggcuga

SEQ ID NO: 241828 - RNA, 19 nt, Artificial Sequence
  Description of Artificial Sequence: Synthetic oligonucleotide
cuuaugcuccuuccucacg

SEQ ID NO: 241829 - RNA, 19 nt, Artificial Sequence
  Description of Artificial Sequence: Synthetic oligonucleotide
acaucacaacucucuguag

SEQ ID NO: 241830 - RNA, 19 nt, Artificial Sequence
  Description of Artificial Sequence: Synthetic oligonucleotide
acgcuuagucagaaaagac

SEQ ID NO: 241831 - RNA, 19 nt, Artificial Sequence
  Description of Artificial Sequence: Synthetic oligonucleotide
ugaggagcgggccucuagu

SEQ ID NO: 241832 - RNA, 19 nt, Artificial Sequence
  Description of Artificial Sequence: Synthetic oligonucleotide
acccgcugucacuaccucc

SEQ ID NO: 241833 - RNA, 19 nt, Artificial Sequence
  Description of Artificial Sequence: Synthetic oligonucleotide
uggcucaagcaguuccagg

SEQ ID NO: 241834 - RNA, 19 nt, Artificial Sequence
  Description of Artificial Sequence: Synthetic oligonucleotide
aucgacggggauucugcuc

SEQ ID NO: 241835 - RNA, 19 nt, Artificial Sequence
  Description of Artificial Sequence: Synthetic oligonucleotide
ucgugguagggcagacugg

SEQ ID NO: 241836 - RNA, 19 nt, Artificial Sequence
  Description of Artificial Sequence: Synthetic oligonucleotide
gcuuagucagaaaagacuc

SEQ ID NO: 241837 - RNA, 19 nt, Artificial Sequence
  Description of Artificial Sequence: Synthetic oligonucleotide
cacgaaauccaaguccaag

SEQ ID NO: 241838 - RNA, 19 nt, Artificial Sequence
  Description of Artificial Sequence: Synthetic oligonucleotide
cugauguagcauccuuucc

SEQ ID NO: 241839 - RNA, 19 nt, Artificial Sequence
  Description of Artificial Sequence: Synthetic oligonucleotide
agguccaguacucggauuu

SEQ ID NO: 241840 - RNA, 19 nt, Artificial Sequence
  Description of Artificial Sequence: Synthetic oligonucleotide
cuuuucuuaaccacacucu

SEQ ID NO: 241841 - RNA, 19 nt, Artificial Sequence
  Description of Artificial Sequence: Synthetic oligonucleotide
cucggauuuggaagucccg

SEQ ID NO: 241842 - RNA, 19 nt, Artificial Sequence
  Description of Artificial Sequence: Synthetic oligonucleotide
cugggagucgcuaggaaca

SEQ ID NO: 241843 - RNA, 19 nt, Artificial Sequence
  Description of Artificial Sequence: Synthetic oligonucleotide
uccauucaccugugaaagc

SEQ ID NO: 241844 - RNA, 19 nt, Artificial Sequence
  Description of Artificial Sequence: Synthetic oligonucleotide
ggagucgcuaggaacaucc

SEQ ID NO: 241845 - RNA, 19 nt, Artificial Sequence
  Description of Artificial Sequence: Synthetic oligonucleotide
cacacucucagcucccgug

SEQ ID NO: 241846 - RNA, 19 nt, Artificial Sequence
  Description of Artificial Sequence: Synthetic oligonucleotide
acguugucauccucuccgg

SEQ ID NO: 241847 - RNA, 19 nt, Artificial Sequence
  Description of Artificial Sequence: Synthetic oligonucleotide
uggaugcgcagcuuuugcu

SEQ ID NO: 241848 - RNA, 19 nt, Artificial Sequence
  Description of Artificial Sequence: Synthetic oligonucleotide
gugcaugaagaugcgggcg

SEQ ID NO: 241849 - RNA, 19 nt, Artificial Sequence
  Description of Artificial Sequence: Synthetic oligonucleotide
gaggcgucagccugacugc

SEQ ID NO: 241850 - RNA, 19 nt, Artificial Sequence
  Description of Artificial Sequence: Synthetic oligonucleotide
ucgcuaggaacauccuuga

SEQ ID NO: 241851 - RNA, 19 nt, Artificial Sequence
  Description of Artificial Sequence: Synthetic oligonucleotide
guacuuaggggagcugagg

SEQ ID NO: 241852 - RNA, 19 nt, Artificial Sequence
  Description of Artificial Sequence: Synthetic oligonucleotide
cuggaugcgcagcuuuugc

SEQ ID NO: 241853 - RNA, 19 nt, Artificial Sequence
  Description of Artificial Sequence: Synthetic oligonucleotide
ggugcaugaagaugcgggc

SEQ ID NO: 241854 - RNA, 19 nt, Artificial Sequence
  Description of Artificial Sequence: Synthetic oligonucleotide
agguucuuacagauuacug

SEQ ID NO: 241855 - RNA, 19 nt, Artificial Sequence
  Description of Artificial Sequence: Synthetic oligonucleotide
ugcugccgaguacacccgg

SEQ ID NO: 241856 - RNA, 19 nt, Artificial Sequence
  Description of Artificial Sequence: Synthetic oligonucleotide
ggggaaaacagaccacacc

SEQ ID NO: 241857 - RNA, 19 nt, Artificial Sequence
  Description of Artificial Sequence: Synthetic oligonucleotide
gguuggagccagaagagug

SEQ ID NO: 241858 - RNA, 19 nt, Artificial Sequence
  Description of Artificial Sequence: Synthetic oligonucleotide
guaaagggcgacggaggcg

SEQ ID NO: 241859 - RNA, 19 nt, Artificial Sequence
  Description of Artificial Sequence: Synthetic oligonucleotide
ucccgugcagacagggucu

SEQ ID NO: 241860 - RNA, 19 nt, Artificial Sequence
  Description of Artificial Sequence: Synthetic oligonucleotide
acggcauagauggugcaug

SEQ ID NO: 241861 - RNA, 19 nt, Artificial Sequence
  Description of Artificial Sequence: Synthetic oligonucleotide
uaggggacuuaaagaggug

SEQ ID NO: 241862 - RNA, 19 nt, Artificial Sequence
  Description of Artificial Sequence: Synthetic oligonucleotide
agauuacuggguaucggga

SEQ ID NO: 241863 - RNA, 19 nt, Artificial Sequence
  Description of Artificial Sequence: Synthetic oligonucleotide
uacacccgggucacgaaau

SEQ ID NO: 241864 - RNA, 19 nt, Artificial Sequence
  Description of Artificial Sequence: Synthetic oligonucleotide
cuuaagugccagcggagca

SEQ ID NO: 241865 - RNA, 19 nt, Artificial Sequence
  Description of Artificial Sequence: Synthetic oligonucleotide
guaucaucagugaccacca

SEQ ID NO: 241866 - RNA, 19 nt, Artificial Sequence
  Description of Artificial Sequence: Synthetic oligonucleotide
ugagugggcuguuacgcuu

SEQ ID NO: 241867 - RNA, 19 nt, Artificial Sequence
  Description of Artificial Sequence: Synthetic oligonucleotide
gucaccuaggacaucacaa

SEQ ID NO: 241868 - RNA, 19 nt, Artificial Sequence
  Description of Artificial Sequence: Synthetic oligonucleotide
uacucggauuuggaagucc

SEQ ID NO: 241869 - RNA, 19 nt, Artificial Sequence
  Description of Artificial Sequence: Synthetic oligonucleotide
ggagcuggacucuugguga

SEQ ID NO: 241870 - RNA, 19 nt, Artificial Sequence
  Description of Artificial Sequence: Synthetic oligonucleotide
gguacagagaggcauugaa

SEQ ID NO: 241871 - RNA, 19 nt, Artificial Sequence
  Description of Artificial Sequence: Synthetic oligonucleotide
cacgcagguuccugggagg

SEQ ID NO: 241872 - RNA, 19 nt, Artificial Sequence
  Description of Artificial Sequence: Synthetic oligonucleotide
acgcagguuccugggaggc

SEQ ID NO: 241873 - RNA, 19 nt, Artificial Sequence
  Description of Artificial Sequence: Synthetic oligonucleotide
ggugagcuuucccaagacc

SEQ ID NO: 241874 - RNA, 19 nt, Artificial Sequence
  Description of Artificial Sequence: Synthetic oligonucleotide
uccacauccuugucacggu

SEQ ID NO: 241875 - RNA, 19 nt, Artificial Sequence
  Description of Artificial Sequence: Synthetic oligonucleotide
agcuuucccaagaccuggc

SEQ ID NO: 241876 - RNA, 19 nt, Artificial Sequence
  Description of Artificial Sequence: Synthetic oligonucleotide
ucacggaguuggcugcugu

SEQ ID NO: 241877 - RNA, 19 nt, Artificial Sequence
  Description of Artificial Sequence: Synthetic oligonucleotide
caugcugcguuggaugaug

SEQ ID NO: 241878 - RNA, 19 nt, Artificial Sequence
  Description of Artificial Sequence: Synthetic oligonucleotide
acacccgggucacgaaauc

SEQ ID NO: 241879 - RNA, 19 nt, Artificial Sequence
  Description of Artificial Sequence: Synthetic oligonucleotide
augcgggcggucuugugca

SEQ ID NO: 241880 - RNA, 19 nt, Artificial Sequence
  Description of Artificial Sequence: Synthetic oligonucleotide
uguugcccuugaguacucg

SEQ ID NO: 241881 - RNA, 19 nt, Artificial Sequence
  Description of Artificial Sequence: Synthetic oligonucleotide
ggcggucuugugcaggagg

SEQ ID NO: 241882 - RNA, 19 nt, Artificial Sequence
  Description of Artificial Sequence: Synthetic oligonucleotide
agucgcuaggaacauccuu

SEQ ID NO: 241883 - RNA, 19 nt, Artificial Sequence
  Description of Artificial Sequence: Synthetic oligonucleotide
auggugcaugaagaugcgg

SEQ ID NO: 241884 - RNA, 19 nt, Artificial Sequence
  Description of Artificial Sequence: Synthetic oligonucleotide
gacugggaauauucucuuc

SEQ ID NO: 241885 - RNA, 19 nt, Artificial Sequence
  Description of Artificial Sequence: Synthetic oligonucleotide
uguuacgcuuagucagaaa

SEQ ID NO: 241886 - RNA, 19 nt, Artificial Sequence
  Description of Artificial Sequence: Synthetic oligonucleotide
gaagucccgucggagcugc

SEQ ID NO: 241887 - RNA, 19 nt, Artificial Sequence
  Description of Artificial Sequence: Synthetic oligonucleotide
ucacgaaauccaaguccaa

SEQ ID NO: 241888 - RNA, 19 nt, Artificial Sequence
  Description of Artificial Sequence: Synthetic oligonucleotide
gauucugaccauccucgua

SEQ ID NO: 241889 - RNA, 19 nt, Artificial Sequence
  Description of Artificial Sequence: Synthetic oligonucleotide
aguacucgcagcagguaca

SEQ ID NO: 241890 - RNA, 19 nt, Artificial Sequence
  Description of Artificial Sequence: Synthetic oligonucleotide
cugaccauccucguaucuc

SEQ ID NO: 241891 - RNA, 19 nt, Artificial Sequence
  Description of Artificial Sequence: Synthetic oligonucleotide
ggggacuuaaaaggggugc

SEQ ID NO: 241892 - RNA, 19 nt, Artificial Sequence
  Description of Artificial Sequence: Synthetic oligonucleotide
cacccacgcagguuccugg

SEQ ID NO: 241893 - RNA, 19 nt, Artificial Sequence
  Description of Artificial Sequence: Synthetic oligonucleotide
uaauggggcucugggaguc

SEQ ID NO: 241894 - RNA, 19 nt, Artificial Sequence
  Description of Artificial Sequence: Synthetic oligonucleotide
gcaucaaguugcuggguug

SEQ ID NO: 241895 - RNA, 19 nt, Artificial Sequence
  Description of Artificial Sequence: Synthetic oligonucleotide
gggacuuaaagagguggag

SEQ ID NO: 241896 - RNA, 19 nt, Artificial Sequence
  Description of Artificial Sequence: Synthetic oligonucleotide
cugccaguagaggucguag

SEQ ID NO: 241897 - RNA, 19 nt, Artificial Sequence
  Description of Artificial Sequence: Synthetic oligonucleotide
uuuucgugguagggcagac

SEQ ID NO: 241898 - RNA, 19 nt, Artificial Sequence
  Description of Artificial Sequence: Synthetic oligonucleotide
acacucaaggugucugcau

SEQ ID NO: 241899 - RNA, 19 nt, Artificial Sequence
  Description of Artificial Sequence: Synthetic oligonucleotide
ucacuaucggaguccucau

SEQ ID NO: 241900 - RNA, 19 nt, Artificial Sequence
  Description of Artificial Sequence: Synthetic oligonucleotide
uucugaccauccucguauc

SEQ ID NO: 241901 - RNA, 19 nt, Artificial Sequence
  Description of Artificial Sequence: Synthetic oligonucleotide
aggggagcugaggaucacg

SEQ ID NO: 241902 - RNA, 19 nt, Artificial Sequence
  Description of Artificial Sequence: Synthetic oligonucleotide
guacucgcagcagguacag

SEQ ID NO: 241903 - RNA, 19 nt, Artificial Sequence
  Description of Artificial Sequence: Synthetic oligonucleotide
gaguacacccgggucacga

SEQ ID NO: 241904 - RNA, 19 nt, Artificial Sequence
  Description of Artificial Sequence: Synthetic oligonucleotide
aggcgucagccugacugcc

SEQ ID NO: 241905 - RNA, 19 nt, Artificial Sequence
  Description of Artificial Sequence: Synthetic oligonucleotide
cuugcuccugcuuggugga

SEQ ID NO: 241906 - RNA, 19 nt, Artificial Sequence
  Description of Artificial Sequence: Synthetic oligonucleotide
cucuugccgggccuggaug

SEQ ID NO: 241907 - RNA, 19 nt, Artificial Sequence
  Description of Artificial Sequence: Synthetic oligonucleotide
acggaguuggcugcugucu

SEQ ID NO: 241908 - RNA, 19 nt, Artificial Sequence
  Description of Artificial Sequence: Synthetic oligonucleotide
uuggcucuagagcgugauc

SEQ ID NO: 241909 - RNA, 19 nt, Artificial Sequence
  Description of Artificial Sequence: Synthetic oligonucleotide
gagugguuccccugcugca

SEQ ID NO: 241910 - RNA, 19 nt, Artificial Sequence
  Description of Artificial Sequence: Synthetic oligonucleotide
gguacuuaggggagcugag

SEQ ID NO: 241911 - RNA, 19 nt, Artificial Sequence
  Description of Artificial Sequence: Synthetic oligonucleotide
cuagagcgugaucgacggg

SEQ ID NO: 241912 - RNA, 19 nt, Artificial Sequence
  Description of Artificial Sequence: Synthetic oligonucleotide
cugaggagcgggccucuag

SEQ ID NO: 241913 - RNA, 19 nt, Artificial Sequence
  Description of Artificial Sequence: Synthetic oligonucleotide
cacgccugggccugauggc

SEQ ID NO: 241914 - RNA, 19 nt, Artificial Sequence
  Description of Artificial Sequence: Synthetic oligonucleotide
gcugcugacgaaagccugg

SEQ ID NO: 241915 - RNA, 19 nt, Artificial Sequence
  Description of Artificial Sequence: Synthetic oligonucleotide
ucguaucucuuagcagugu

SEQ ID NO: 241916 - RNA, 19 nt, Artificial Sequence
  Description of Artificial Sequence: Synthetic oligonucleotide
gugaucgacggggauucug

SEQ ID NO: 241917 - RNA, 19 nt, Artificial Sequence
  Description of Artificial Sequence: Synthetic oligonucleotide
aggcgguuggagccagaag

SEQ ID NO: 241918 - RNA, 19 nt, Artificial Sequence
  Description of Artificial Sequence: Synthetic oligonucleotide
uuucgugguagggcagacu

SEQ ID NO: 241919 - RNA, 19 nt, Artificial Sequence
  Description of Artificial Sequence: Synthetic oligonucleotide
guaguuuuggggacuuaaa

SEQ ID NO: 241920 - RNA, 19 nt, Artificial Sequence
  Description of Artificial Sequence: Synthetic oligonucleotide
ggugacagguguaccauuc

SEQ ID NO: 241921 - RNA, 19 nt, Artificial Sequence
  Description of Artificial Sequence: Synthetic oligonucleotide
cucuccggaccaccuugcg

SEQ ID NO: 241922 - RNA, 19 nt, Artificial Sequence
  Description of Artificial Sequence: Synthetic oligonucleotide
guggcucaagcaguuccag

SEQ ID NO: 241923 - RNA, 19 nt, Artificial Sequence
  Description of Artificial Sequence: Synthetic oligonucleotide
caugauugacugucuugaa

SEQ ID NO: 241924 - RNA, 19 nt, Artificial Sequence
  Description of Artificial Sequence: Synthetic oligonucleotide
cucgcagcagguacagaga

SEQ ID NO: 241925 - RNA, 19 nt, Artificial Sequence
  Description of Artificial Sequence: Synthetic oligonucleotide
gauggaguguuggccuuca

SEQ ID NO: 241926 - RNA, 19 nt, Artificial Sequence
  Description of Artificial Sequence: Synthetic oligonucleotide
aguacacccgggucacgaa

SEQ ID NO: 241927 - RNA, 19 nt, Artificial Sequence
  Description of Artificial Sequence: Synthetic oligonucleotide
ugguguccucagauuuaac

SEQ ID NO: 241928 - RNA, 19 nt, Artificial Sequence
  Description of Artificial Sequence: Synthetic oligonucleotide
aacucucuguaggggacuu

SEQ ID NO: 241929 - RNA, 19 nt, Artificial Sequence
  Description of Artificial Sequence: Synthetic oligonucleotide
aguggcgggcacggcauag

SEQ ID NO: 241930 - RNA, 19 nt, Artificial Sequence
  Description of Artificial Sequence: Synthetic oligonucleotide
uaguuccuucagaguacuc

SEQ ID NO: 241931 - RNA, 19 nt, Artificial Sequence
  Description of Artificial Sequence: Synthetic oligonucleotide
gugcauucccagcuuguaa

SEQ ID NO: 241932 - RNA, 19 nt, Artificial Sequence
  Description of Artificial Sequence: Synthetic oligonucleotide
cacuaucggaguccucauc

SEQ ID NO: 241933 - RNA, 19 nt, Artificial Sequence
  Description of Artificial Sequence: Synthetic oligonucleotide
accauccucguaucucuua

SEQ ID NO: 241934 - RNA, 19 nt, Artificial Sequence
  Description of Artificial Sequence: Synthetic oligonucleotide
gguugagccagcagggaca

SEQ ID NO: 241935 - RNA, 19 nt, Artificial Sequence
  Description of Artificial Sequence: Synthetic oligonucleotide
ucucgaccaucaccuccac

SEQ ID NO: 241936 - RNA, 19 nt, Artificial Sequence
  Description of Artificial Sequence: Synthetic oligonucleotide
ggucaaccgagcccaucag

SEQ ID NO: 241937 - RNA, 19 nt, Artificial Sequence
  Description of Artificial Sequence: Synthetic oligonucleotide
aagggcgacggaggcguca

SEQ ID NO: 241938 - RNA, 19 nt, Artificial Sequence
  Description of Artificial Sequence: Synthetic oligonucleotide
gucccgucggagcugcuuc

SEQ ID NO: 241939 - RNA, 19 nt, Artificial Sequence
  Description of Artificial Sequence: Synthetic oligonucleotide
ccuuaagugccagcggagc

SEQ ID NO: 241940 - RNA, 19 nt, Artificial Sequence
  Description of Artificial Sequence: Synthetic oligonucleotide
gcgcaugcugcguuggaug

SEQ ID NO: 241941 - RNA, 19 nt, Artificial Sequence
  Description of Artificial Sequence: Synthetic oligonucleotide
gggcuguuacgcuuaguca

SEQ ID NO: 241942 - RNA, 19 nt, Artificial Sequence
  Description of Artificial Sequence: Synthetic oligonucleotide
cguuggacucccagcaucc

SEQ ID NO: 241943 - RNA, 19 nt, Artificial Sequence
  Description of Artificial Sequence: Synthetic oligonucleotide
caauuggcagucugggccu

SEQ ID NO: 241944 - RNA, 19 nt, Artificial Sequence
  Description of Artificial Sequence: Synthetic oligonucleotide
ggagccuuugcugcgcaug

SEQ ID NO: 241945 - RNA, 19 nt, Artificial Sequence
  Description of Artificial Sequence: Synthetic oligonucleotide
agcgugaucgacggggauu

SEQ ID NO: 241946 - RNA, 19 nt, Artificial Sequence
  Description of Artificial Sequence: Synthetic oligonucleotide
guacacccgggucacgaaa

SEQ ID NO: 241947 - RNA, 19 nt, Artificial Sequence
  Description of Artificial Sequence: Synthetic oligonucleotide
cuugccgggccuggaugcg

SEQ ID NO: 241948 - RNA, 19 nt, Artificial Sequence
  Description of Artificial Sequence: Synthetic oligonucleotide
gcgucagccugacugccag

SEQ ID NO: 241949 - RNA, 19 nt, Artificial Sequence
  Description of Artificial Sequence: Synthetic oligonucleotide
cuccugcuaaccagagaca

SEQ ID NO: 241950 - RNA, 19 nt, Artificial Sequence
  Description of Artificial Sequence: Synthetic oligonucleotide
uugcugcgcaugcugcguu

SEQ ID NO: 241951 - RNA, 19 nt, Artificial Sequence
  Description of Artificial Sequence: Synthetic oligonucleotide
gguguaccauucaccuggg

SEQ ID NO: 241952 - RNA, 19 nt, Artificial Sequence
  Description of Artificial Sequence: Synthetic oligonucleotide
acgaaagccuggguccaca

SEQ ID NO: 241953 - RNA, 19 nt, Artificial Sequence
  Description of Artificial Sequence: Synthetic oligonucleotide
caccuaggacaucacaacu

SEQ ID NO: 241954 - RNA, 19 nt, Artificial Sequence
  Description of Artificial Sequence: Synthetic oligonucleotide
ccaagaccuggccaaucag

SEQ ID NO: 241955 - RNA, 19 nt, Artificial Sequence
  Description of Artificial Sequence: Synthetic oligonucleotide
gaguguuggccuucacccu

SEQ ID NO: 241956 - RNA, 19 nt, Artificial Sequence
  Description of Artificial Sequence: Synthetic oligonucleotide
cuugcgcaucaaguugcug

SEQ ID NO: 241957 - RNA, 19 nt, Artificial Sequence
  Description of Artificial Sequence: Synthetic oligonucleotide
caugaagaugcgggcgguc

SEQ ID NO: 241958 - RNA, 19 nt, Artificial Sequence
  Description of Artificial Sequence: Synthetic oligonucleotide
ggcuaauggggcucuggga

SEQ ID NO: 241959 - RNA, 19 nt, Artificial Sequence
  Description of Artificial Sequence: Synthetic oligonucleotide
agagcgugaucgacgggga

SEQ ID NO: 241960 - RNA, 19 nt, Artificial Sequence
  Description of Artificial Sequence: Synthetic oligonucleotide
cacacucaaggugucugca

SEQ ID NO: 241961 - RNA, 19 nt, Artificial Sequence
  Description of Artificial Sequence: Synthetic oligonucleotide
ccacgcagguuccugggag

SEQ ID NO: 241962 - RNA, 19 nt, Artificial Sequence
  Description of Artificial Sequence: Synthetic oligonucleotide
guugcuggguugagccagc

SEQ ID NO: 241963 - RNA, 19 nt, Artificial Sequence
  Description of Artificial Sequence: Synthetic oligonucleotide
gaucgacggggauucugcu

SEQ ID NO: 241964 - RNA, 19 nt, Artificial Sequence
  Description of Artificial Sequence: Synthetic oligonucleotide
caggcucuauaggggacac

SEQ ID NO: 241965 - RNA, 19 nt, Artificial Sequence
  Description of Artificial Sequence: Synthetic oligonucleotide
ugguaucaucagugaccac

SEQ ID NO: 241966 - RNA, 19 nt, Artificial Sequence
  Description of Artificial Sequence: Synthetic oligonucleotide
ucuuagcaguguugcccuu

SEQ ID NO: 241967 - RNA, 19 nt, Artificial Sequence
  Description of Artificial Sequence: Synthetic oligonucleotide
gcucuauaggggacacagg

SEQ ID NO: 241968 - RNA, 19 nt, Artificial Sequence
  Description of Artificial Sequence: Synthetic oligonucleotide
ugggagucgcuaggaacau

SEQ ID NO: 241969 - RNA, 19 nt, Artificial Sequence
  Description of Artificial Sequence: Synthetic oligonucleotide
cauucaccugggauggagu

SEQ ID NO: 241970 - RNA, 19 nt, Artificial Sequence
  Description of Artificial Sequence: Synthetic oligonucleotide
ucccggugugguguccuca

SEQ ID NO: 241971 - RNA, 19 nt, Artificial Sequence
  Description of Artificial Sequence: Synthetic oligonucleotide
gggugagcuuucccaagac

SEQ ID NO: 241972 - RNA, 19 nt, Artificial Sequence
  Description of Artificial Sequence: Synthetic oligonucleotide
gugcugccgaguacacccg

SEQ ID NO: 241973 - RNA, 19 nt, Artificial Sequence
  Description of Artificial Sequence: Synthetic oligonucleotide
ggggacuuaaagaggugga

SEQ ID NO: 241974 - RNA, 19 nt, Artificial Sequence
  Description of Artificial Sequence: Synthetic oligonucleotide
acaagccguuccaccuggg

SEQ ID NO: 241975 - RNA, 19 nt, Artificial Sequence
  Description of Artificial Sequence: Synthetic oligonucleotide
cuuucccgguguggugucc

SEQ ID NO: 241976 - RNA, 19 nt, Artificial Sequence
  Description of Artificial Sequence: Synthetic oligonucleotide
ugcccugauguagcauccu

SEQ ID NO: 241977 - RNA, 19 nt, Artificial Sequence
  Description of Artificial Sequence: Synthetic oligonucleotide
cagcaagaucucgaccauc

SEQ ID NO: 241978 - RNA, 19 nt, Artificial Sequence
  Description of Artificial Sequence: Synthetic oligonucleotide
gaggcgguuggagccagaa

SEQ ID NO: 241979 - RNA, 19 nt, Artificial Sequence
  Description of Artificial Sequence: Synthetic oligonucleotide
ggcucuagagcgugaucga

SEQ ID NO: 241980 - RNA, 19 nt, Artificial Sequence
  Description of Artificial Sequence: Synthetic oligonucleotide
cucucagcucccgugcaga

SEQ ID NO: 241981 - RNA, 19 nt, Artificial Sequence
  Description of Artificial Sequence: Synthetic oligonucleotide
gugagugggcuguuacgcu

SEQ ID NO: 241982 - RNA, 19 nt, Artificial Sequence
  Description of Artificial Sequence: Synthetic oligonucleotide
gcaggcguggcacccgcug

SEQ ID NO: 241983 - RNA, 19 nt, Artificial Sequence
  Description of Artificial Sequence: Synthetic oligonucleotide
gcuguuacgcuuagucaga

SEQ ID NO: 241984 - RNA, 19 nt, Artificial Sequence
  Description of Artificial Sequence: Synthetic oligonucleotide
ggucuugugcaggaggucu

SEQ ID NO: 241985 - RNA, 19 nt, Artificial Sequence
  Description of Artificial Sequence: Synthetic oligonucleotide
gcgugaucgacggggauuc

SEQ ID NO: 241986 - RNA, 19 nt, Artificial Sequence
  Description of Artificial Sequence: Synthetic oligonucleotide
gcugcgcaugcugcguugg

SEQ ID NO: 241987 - RNA, 19 nt, Artificial Sequence
  Description of Artificial Sequence: Synthetic oligonucleotide
gagugggcuguuacgcuua

SEQ ID NO: 241988 - RNA, 19 nt, Artificial Sequence
  Description of Artificial Sequence: Synthetic oligonucleotide
gguccaguacucggauuug

SEQ ID NO: 241989 - RNA, 19 nt, Artificial Sequence
  Description of Artificial Sequence: Synthetic oligonucleotide
uacucgcagcagguacaga

SEQ ID NO: 241990 - RNA, 19 nt, Artificial Sequence
  Description of Artificial Sequence: Synthetic oligonucleotide
cgcuuagucagaaaagacu

SEQ ID NO: 241991 - RNA, 19 nt, Artificial Sequence
  Description of Artificial Sequence: Synthetic oligonucleotide
gcucuagagcgugaucgac

SEQ ID NO: 241992 - RNA, 19 nt, Artificial Sequence
  Description of Artificial Sequence: Synthetic oligonucleotide
gaccuccuuugugggaaga

SEQ ID NO: 241993 - RNA, 19 nt, Artificial Sequence
  Description of Artificial Sequence: Synthetic oligonucleotide
cuguuacgcuuagucagaa

SEQ ID NO: 241994 - RNA, 19 nt, Artificial Sequence
  Description of Artificial Sequence: Synthetic oligonucleotide
uucccggugugguguccuc

SEQ ID NO: 241995 - RNA, 19 nt, Artificial Sequence
  Description of Artificial Sequence: Synthetic oligonucleotide
cacucaaggugucugcauu

SEQ ID NO: 241996 - RNA, 19 nt, Artificial Sequence
  Description of Artificial Sequence: Synthetic oligonucleotide
guguaccauucaccuggga

SEQ ID NO: 241997 - RNA, 19 nt, Artificial Sequence
  Description of Artificial Sequence: Synthetic oligonucleotide
gacguuggacucccagcau

SEQ ID NO: 241998 - RNA, 19 nt, Artificial Sequence
  Description of Artificial Sequence: Synthetic oligonucleotide
ccucuccggaccaccuugc

SEQ ID NO: 241999 - RNA, 19 nt, Artificial Sequence
  Description of Artificial Sequence: Synthetic oligonucleotide
uaguggcgggcacggcaua

SEQ ID NO: 242000 - RNA, 19 nt, Artificial Sequence
  Description of Artificial Sequence: Synthetic oligonucleotide
caccugggauggaguguug

SEQ ID NO: 242001 - RNA, 19 nt, Artificial Sequence
  Description of Artificial Sequence: Synthetic oligonucleotide
cacccgcugucacuaccuc

SEQ ID NO: 242002 - RNA, 19 nt, Artificial Sequence
  Description of Artificial Sequence: Synthetic oligonucleotide
cccggugugguguccucag

SEQ ID NO: 242003 - RNA, 19 nt, Artificial Sequence
  Description of Artificial Sequence: Synthetic oligonucleotide
ggagugccuccauucaccu

SEQ ID NO: 242004 - RNA, 19 nt, Artificial Sequence
  Description of Artificial Sequence: Synthetic oligonucleotide
gggacuuaaaaggggugcu

SEQ ID NO: 242005 - RNA, 19 nt, Artificial Sequence
  Description of Artificial Sequence: Synthetic oligonucleotide
gguaucgggagaagaggcu

SEQ ID NO: 242006 - RNA, 19 nt, Artificial Sequence
  Description of Artificial Sequence: Synthetic oligonucleotide
gagaggcauugaaguagua

SEQ ID NO: 242007 - RNA, 19 nt, Artificial Sequence
  Description of Artificial Sequence: Synthetic oligonucleotide
guaguggcgggcacggcau

SEQ ID NO: 242008 - RNA, 19 nt, Artificial Sequence
  Description of Artificial Sequence: Synthetic oligonucleotide
ccgaguacacccgggucac

SEQ ID NO: 242009 - RNA, 19 nt, Artificial Sequence
  Description of Artificial Sequence: Synthetic oligonucleotide
gcaggcacgccugggccug

SEQ ID NO: 242010 - RNA, 19 nt, Artificial Sequence
  Description of Artificial Sequence: Synthetic oligonucleotide
gagucgcuaggaacauccu

SEQ ID NO: 242011 - RNA, 19 nt, Artificial Sequence
  Description of Artificial Sequence: Synthetic oligonucleotide
ggcauagauggugcaugaa

SEQ ID NO: 242012 - RNA, 19 nt, Artificial Sequence
  Description of Artificial Sequence: Synthetic oligonucleotide
cugcgcaugcugcguugga

SEQ ID NO: 242013 - RNA, 19 nt, Artificial Sequence
  Description of Artificial Sequence: Synthetic oligonucleotide
ccgguagauucugaccauc

SEQ ID NO: 242014 - RNA, 19 nt, Artificial Sequence
  Description of Artificial Sequence: Synthetic oligonucleotide
gcacggcauagauggugca

SEQ ID NO: 242015 - RNA, 19 nt, Artificial Sequence
  Description of Artificial Sequence: Synthetic oligonucleotide
cgggucacgaaauccaagu

SEQ ID NO: 242016 - RNA, 19 nt, Artificial Sequence
  Description of Artificial Sequence: Synthetic oligonucleotide
gagcgugaucgacggggau

SEQ ID NO: 242017 - RNA, 19 nt, Artificial Sequence
  Description of Artificial Sequence: Synthetic oligonucleotide
caacucucuguaggggacu

SEQ ID NO: 242018 - RNA, 19 nt, Artificial Sequence
  Description of Artificial Sequence: Synthetic oligonucleotide
ccuuucccggugugguguc

SEQ ID NO: 242019 - RNA, 19 nt, Artificial Sequence
  Description of Artificial Sequence: Synthetic oligonucleotide
ccgagcccaucagugacuc

SEQ ID NO: 242020 - RNA, 19 nt, Artificial Sequence
  Description of Artificial Sequence: Synthetic oligonucleotide
caaguuucgcuggcacccu

SEQ ID NO: 242021 - RNA, 19 nt, Artificial Sequence
  Description of Artificial Sequence: Synthetic oligonucleotide
cacggcauagauggugcau

SEQ ID NO: 242022 - RNA, 19 nt, Artificial Sequence
  Description of Artificial Sequence: Synthetic oligonucleotide
gcggucuugugcaggaggu

SEQ ID NO: 242023 - RNA, 19 nt, Artificial Sequence
  Description of Artificial Sequence: Synthetic oligonucleotide
cgcuaggaacauccuugac

SEQ ID NO: 242024 - RNA, 19 nt, Artificial Sequence
  Description of Artificial Sequence: Synthetic oligonucleotide
ggccgcaaugggccagaca

SEQ ID NO: 242025 - RNA, 19 nt, Artificial Sequence
  Description of Artificial Sequence: Synthetic oligonucleotide
caggcguggcacccgcugu

SEQ ID NO: 242026 - RNA, 19 nt, Artificial Sequence
  Description of Artificial Sequence: Synthetic oligonucleotide
ggcgucagccugacugcca

SEQ ID NO: 242027 - RNA, 19 nt, Artificial Sequence
  Description of Artificial Sequence: Synthetic oligonucleotide
agaggcgguuggagccaga

SEQ ID NO: 242028 - RNA, 19 nt, Artificial Sequence
  Description of Artificial Sequence: Synthetic oligonucleotide
cccuaccucguggcaguag

SEQ ID NO: 242029 - RNA, 19 nt, Artificial Sequence
  Description of Artificial Sequence: Synthetic oligonucleotide
ccacccacgcagguuccug

SEQ ID NO: 242030 - RNA, 19 nt, Artificial Sequence
  Description of Artificial Sequence: Synthetic oligonucleotide
gaccauccucguaucucuu

SEQ ID NO: 242031 - RNA, 19 nt, Artificial Sequence
  Description of Artificial Sequence: Synthetic oligonucleotide
caucagugaccaccacguu

SEQ ID NO: 242032 - RNA, 19 nt, Artificial Sequence
  Description of Artificial Sequence: Synthetic oligonucleotide
gggcggucuugugcaggag

SEQ ID NO: 242033 - RNA, 19 nt, Artificial Sequence
  Description of Artificial Sequence: Synthetic oligonucleotide
gcaugaagaugcgggcggu

SEQ ID NO: 242034 - RNA, 19 nt, Artificial Sequence
  Description of Artificial Sequence: Synthetic oligonucleotide
gcacccgcugucacuaccu

SEQ ID NO: 242035 - RNA, 19 nt, Artificial Sequence
  Description of Artificial Sequence: Synthetic oligonucleotide
gcccugauguagcauccuu

SEQ ID NO: 242036 - RNA, 19 nt, Artificial Sequence
  Description of Artificial Sequence: Synthetic oligonucleotide
gacggggauucugcuccau

SEQ ID NO: 242037 - RNA, 19 nt, Artificial Sequence
  Description of Artificial Sequence: Synthetic oligonucleotide
cgggcggucuugugcagga

SEQ ID NO: 242038 - RNA, 19 nt, Artificial Sequence
  Description of Artificial Sequence: Synthetic oligonucleotide
cgaguacacccgggucacg

SEQ ID NO: 242039 - RNA, 19 nt, Artificial Sequence
  Description of Artificial Sequence: Synthetic oligonucleotide
gcggggccgcaaugggcca

SEQ ID NO: 242040 - RNA, 19 nt, Artificial Sequence
  Description of Artificial Sequence: Synthetic oligonucleotide
cggucuugugcaggagguc

SEQ ID NO: 242041 - RNA, 19 nt, Artificial Sequence
  Description of Artificial Sequence: Synthetic oligonucleotide
ccugauggcggggccgcaa

SEQ ID NO: 242042 - RNA, 19 nt, Artificial Sequence
  Description of Artificial Sequence: Synthetic oligonucleotide
cccgguagauucugaccau

SEQ ID NO: 242043 - RNA, 19 nt, Artificial Sequence
  Description of Artificial Sequence: Synthetic oligonucleotide
gcgcaucaaguugcugggu

SEQ ID NO: 242044 - RNA, 19 nt, Artificial Sequence
  Description of Artificial Sequence: Synthetic oligonucleotide
cgaaagccuggguccacau

SEQ ID NO: 242045 - RNA, 19 nt, Artificial Sequence
  Description of Artificial Sequence: Synthetic oligonucleotide
cgacggggauucugcucca

SEQ ID NO: 242046 - RNA, 19 nt, Artificial Sequence
  Description of Artificial Sequence: Synthetic oligonucleotide
cgguuggagccagaagagu

SEQ ID NO: 242047 - RNA, 19 nt, Artificial Sequence
  Description of Artificial Sequence: Synthetic oligonucleotide
gcccuaccucguggcagua

SEQ ID NO: 242048 - RNA, 19 nt, Artificial Sequence
  Description of Artificial Sequence: Synthetic oligonucleotide
ggcuuagggugggguuguu

SEQ ID NO: 242049 - RNA, 19 nt, Artificial Sequence
  Description of Artificial Sequence: Synthetic oligonucleotide
cgggcacggcauagauggu

SEQ ID NO: 242050 - RNA, 19 nt, Artificial Sequence
  Description of Artificial Sequence: Synthetic oligonucleotide
cgugaucgacggggauucu

SEQ ID NO: 242051 - RNA, 19 nt, Artificial Sequence
  Description of Artificial Sequence: Synthetic oligonucleotide
cggaggcgucagccugacu

SEQ ID NO: 242052 - RNA, 19 nt, Artificial Sequence
  Description of Artificial Sequence: Synthetic oligonucleotide
acaauaaucauuuacaauc

SEQ ID NO: 242053 - RNA, 19 nt, Artificial Sequence
  Description of Artificial Sequence: Synthetic oligonucleotide
aauaaaguauguuuaacca

SEQ ID NO: 242054 - RNA, 19 nt, Artificial Sequence
  Description of Artificial Sequence: Synthetic oligonucleotide
uuuagaauuauuuugugga

SEQ ID NO: 242055 - RNA, 19 nt, Artificial Sequence
  Description of Artificial Sequence: Synthetic oligonucleotide
uuuaggauuaagaagcaag

SEQ ID NO: 242056 - RNA, 19 nt, Artificial Sequence
  Description of Artificial Sequence: Synthetic oligonucleotide
agaauuauuuuguggaucg

SEQ ID NO: 242057 - RNA, 19 nt, Artificial Sequence
  Description of Artificial Sequence: Synthetic oligonucleotide
ucuugaauuaauuuuguca

SEQ ID NO: 242058 - RNA, 19 nt, Artificial Sequence
  Description of Artificial Sequence: Synthetic oligonucleotide
uuaaauuuacuagacagcc

SEQ ID NO: 242059 - RNA, 19 nt, Artificial Sequence
  Description of Artificial Sequence: Synthetic oligonucleotide
uuaguuaugaauguguuca

SEQ ID NO: 242060 - RNA, 19 nt, Artificial Sequence
  Description of Artificial Sequence: Synthetic oligonucleotide
uuacaauccacauauauaa

SEQ ID NO: 242061 - RNA, 19 nt, Artificial Sequence
  Description of Artificial Sequence: Synthetic oligonucleotide
uuuacuuugcuccaucgag

SEQ ID NO: 242062 - RNA, 19 nt, Artificial Sequence
  Description of Artificial Sequence: Synthetic oligonucleotide
ugaugauuggauaaaagcu

SEQ ID NO: 242063 - RNA, 19 nt, Artificial Sequence
  Description of Artificial Sequence: Synthetic oligonucleotide
aguaccgagggucaaauac

SEQ ID NO: 242064 - RNA, 19 nt, Artificial Sequence
  Description of Artificial Sequence: Synthetic oligonucleotide
uuaagaagcaaguaccgag

SEQ ID NO: 242065 - RNA, 19 nt, Artificial Sequence
  Description of Artificial Sequence: Synthetic oligonucleotide
cuauaauugaguauguaug

SEQ ID NO: 242066 - RNA, 19 nt, Artificial Sequence
  Description of Artificial Sequence: Synthetic oligonucleotide
ucuauucuggccaacaugu

SEQ ID NO: 242067 - RNA, 19 nt, Artificial Sequence
  Description of Artificial Sequence: Synthetic oligonucleotide
ucagguguugaucagauuc

SEQ ID NO: 242068 - RNA, 19 nt, Artificial Sequence
  Description of Artificial Sequence: Synthetic oligonucleotide
ugaacauucaaacaucuua

SEQ ID NO: 242069 - RNA, 19 nt, Artificial Sequence
  Description of Artificial Sequence: Synthetic oligonucleotide
uugguauuaaacuuugucu

SEQ ID NO: 242070 - RNA, 19 nt, Artificial Sequence
  Description of Artificial Sequence: Synthetic oligonucleotide
gagaacuuaauacaccgag

SEQ ID NO: 242071 - RNA, 19 nt, Artificial Sequence
  Description of Artificial Sequence: Synthetic oligonucleotide
ugucuaauucagaauuucg

SEQ ID NO: 242072 - RNA, 19 nt, Artificial Sequence
  Description of Artificial Sequence: Synthetic oligonucleotide
auaaaguauguuuaaccag

SEQ ID NO: 242073 - RNA, 19 nt, Artificial Sequence
  Description of Artificial Sequence: Synthetic oligonucleotide
aauuauuuuguggaucguc

SEQ ID NO: 242074 - RNA, 19 nt, Artificial Sequence
  Description of Artificial Sequence: Synthetic oligonucleotide
agaauuucgguaaagauca

SEQ ID NO: 242075 - RNA, 19 nt, Artificial Sequence
  Description of Artificial Sequence: Synthetic oligonucleotide
uucgguaaagaucauucag

SEQ ID NO: 242076 - RNA, 19 nt, Artificial Sequence
  Description of Artificial Sequence: Synthetic oligonucleotide
ugauuuaaucuucucaccu

SEQ ID NO: 242077 - RNA, 19 nt, Artificial Sequence
  Description of Artificial Sequence: Synthetic oligonucleotide
uuuuggauggacagcauug

SEQ ID NO: 242078 - RNA, 19 nt, Artificial Sequence
  Description of Artificial Sequence: Synthetic oligonucleotide
gugaugauuggauaaaagc

SEQ ID NO: 242079 - RNA, 19 nt, Artificial Sequence
  Description of Artificial Sequence: Synthetic oligonucleotide
uaauugaguauguauguca

SEQ ID NO: 242080 - RNA, 19 nt, Artificial Sequence
  Description of Artificial Sequence: Synthetic oligonucleotide
ucuaauucagaauuucggu

SEQ ID NO: 242081 - RNA, 19 nt, Artificial Sequence
  Description of Artificial Sequence: Synthetic oligonucleotide
uaguaucagaccaugacac

SEQ ID NO: 242082 - RNA, 19 nt, Artificial Sequence
  Description of Artificial Sequence: Synthetic oligonucleotide
caauaaucauuuacaaucc

SEQ ID NO: 242083 - RNA, 19 nt, Artificial Sequence
  Description of Artificial Sequence: Synthetic oligonucleotide
uuaggauuaagaagcaagu

SEQ ID NO: 242084 - RNA, 19 nt, Artificial Sequence
  Description of Artificial Sequence: Synthetic oligonucleotide
uggauaauaaaguauguuu

SEQ ID NO: 242085 - RNA, 19 nt, Artificial Sequence
  Description of Artificial Sequence: Synthetic oligonucleotide
aacguaccaugucagacag

SEQ ID NO: 242086 - RNA, 19 nt, Artificial Sequence
  Description of Artificial Sequence: Synthetic oligonucleotide
uccacauauauaaaagggu

SEQ ID NO: 242087 - RNA, 19 nt, Artificial Sequence
  Description of Artificial Sequence: Synthetic oligonucleotide
agagacugcucacaauugc

SEQ ID NO: 242088 - RNA, 19 nt, Artificial Sequence
  Description of Artificial Sequence: Synthetic oligonucleotide
uaaacaaugcuucucuauc

SEQ ID NO: 242089 - RNA, 19 nt, Artificial Sequence
  Description of Artificial Sequence: Synthetic oligonucleotide
uguucauaaccugagaaga

SEQ ID NO: 242090 - RNA, 19 nt, Artificial Sequence
  Description of Artificial Sequence: Synthetic oligonucleotide
uuaauugcacucaucgaga

SEQ ID NO: 242091 - RNA, 19 nt, Artificial Sequence
  Description of Artificial Sequence: Synthetic oligonucleotide
aaauacuaucuugugcaac

SEQ ID NO: 242092 - RNA, 19 nt, Artificial Sequence
  Description of Artificial Sequence: Synthetic oligonucleotide
uaauucagaauuucgguaa

SEQ ID NO: 242093 - RNA, 19 nt, Artificial Sequence
  Description of Artificial Sequence: Synthetic oligonucleotide
gaacuuaauacaccgagga

SEQ ID NO: 242094 - RNA, 19 nt, Artificial Sequence
  Description of Artificial Sequence: Synthetic oligonucleotide
aguauguuuaaccaggauu

SEQ ID NO: 242095 - RNA, 19 nt, Artificial Sequence
  Description of Artificial Sequence: Synthetic oligonucleotide
uuaaggugaucgcagaagu

SEQ ID NO: 242096 - RNA, 19 nt, Artificial Sequence
  Description of Artificial Sequence: Synthetic oligonucleotide
aauugaguauguaugucag

SEQ ID NO: 242097 - RNA, 19 nt, Artificial Sequence
  Description of Artificial Sequence: Synthetic oligonucleotide
aauagucauagucucugga

SEQ ID NO: 242098 - RNA, 19 nt, Artificial Sequence
  Description of Artificial Sequence: Synthetic oligonucleotide
uaaaaguagcucuugguau

SEQ ID NO: 242099 - RNA, 19 nt, Artificial Sequence
  Description of Artificial Sequence: Synthetic oligonucleotide
uuauuguaguucaaauaca

SEQ ID NO: 242100 - RNA, 19 nt, Artificial Sequence
  Description of Artificial Sequence: Synthetic oligonucleotide
guaacaauaaucauuuaca

SEQ ID NO: 242101 - RNA, 19 nt, Artificial Sequence
  Description of Artificial Sequence: Synthetic oligonucleotide
ucauaauagucauagucuc

SEQ ID NO: 242102 - RNA, 19 nt, Artificial Sequence
  Description of Artificial Sequence: Synthetic oligonucleotide
uggaggagaacuuaauaca

SEQ ID NO: 242103 - RNA, 19 nt, Artificial Sequence
  Description of Artificial Sequence: Synthetic oligonucleotide
uauuuagaauuauuuugug

SEQ ID NO: 242104 - RNA, 19 nt, Artificial Sequence
  Description of Artificial Sequence: Synthetic oligonucleotide
uagacagccuauaauugag

SEQ ID NO: 242105 - RNA, 19 nt, Artificial Sequence
  Description of Artificial Sequence: Synthetic oligonucleotide
agucaugccacacaaagaa

SEQ ID NO: 242106 - RNA, 19 nt, Artificial Sequence
  Description of Artificial Sequence: Synthetic oligonucleotide
uuguguaacaauaaucauu

SEQ ID NO: 242107 - RNA, 19 nt, Artificial Sequence
  Description of Artificial Sequence: Synthetic oligonucleotide
ucaugccacacaaagaaaa

SEQ ID NO: 242108 - RNA, 19 nt, Artificial Sequence
  Description of Artificial Sequence: Synthetic oligonucleotide
uuagcuucgagauuuuaaa

SEQ ID NO: 242109 - RNA, 19 nt, Artificial Sequence
  Description of Artificial Sequence: Synthetic oligonucleotide
cuugguauuaaacuuuguc

SEQ ID NO: 242110 - RNA, 19 nt, Artificial Sequence
  Description of Artificial Sequence: Synthetic oligonucleotide
uuagagagcccguggacgg

SEQ ID NO: 242111 - RNA, 19 nt, Artificial Sequence
  Description of Artificial Sequence: Synthetic oligonucleotide
aaagcacggaaguaaacaa

SEQ ID NO: 242112 - RNA, 19 nt, Artificial Sequence
  Description of Artificial Sequence: Synthetic oligonucleotide
uccuccuaguaucagacca

SEQ ID NO: 242113 - RNA, 19 nt, Artificial Sequence
  Description of Artificial Sequence: Synthetic oligonucleotide
uucgagauuuuaaauuuac

SEQ ID NO: 242114 - RNA, 19 nt, Artificial Sequence
  Description of Artificial Sequence: Synthetic oligonucleotide
ugacuaaugcacauauaug

SEQ ID NO: 242115 - RNA, 19 nt, Artificial Sequence
  Description of Artificial Sequence: Synthetic oligonucleotide
ucgguaaagaucauucagu

SEQ ID NO: 242116 - RNA, 19 nt, Artificial Sequence
  Description of Artificial Sequence: Synthetic oligonucleotide
ugaaaauuuggcucaugca

SEQ ID NO: 242117 - RNA, 19 nt, Artificial Sequence
  Description of Artificial Sequence: Synthetic oligonucleotide
gucaaauacuaucuugugc

SEQ ID NO: 242118 - RNA, 19 nt, Artificial Sequence
  Description of Artificial Sequence: Synthetic oligonucleotide
cacggaaguaaacaaauac

SEQ ID NO: 242119 - RNA, 19 nt, Artificial Sequence
  Description of Artificial Sequence: Synthetic oligonucleotide
cuugaaaaggucuucucuc

SEQ ID NO: 242120 - RNA, 19 nt, Artificial Sequence
  Description of Artificial Sequence: Synthetic oligonucleotide
aucagaccaugacacaucg

SEQ ID NO: 242121 - RNA, 19 nt, Artificial Sequence
  Description of Artificial Sequence: Synthetic oligonucleotide
guauguuuaaccaggauuc

SEQ ID NO: 242122 - RNA, 19 nt, Artificial Sequence
  Description of Artificial Sequence: Synthetic oligonucleotide
gaccaugacacaucggaag

SEQ ID NO: 242123 - RNA, 19 nt, Artificial Sequence
  Description of Artificial Sequence: Synthetic oligonucleotide
uccauuagagagcccgugg

SEQ ID NO: 242124 - RNA, 19 nt, Artificial Sequence
  Description of Artificial Sequence: Synthetic oligonucleotide
ugaacugcuucauucgagc

SEQ ID NO: 242125 - RNA, 19 nt, Artificial Sequence
  Description of Artificial Sequence: Synthetic oligonucleotide
aucauaauagucauagucu

SEQ ID NO: 242126 - RNA, 19 nt, Artificial Sequence
  Description of Artificial Sequence: Synthetic oligonucleotide
acugcuaguaagaagacca

SEQ ID NO: 242127 - RNA, 19 nt, Artificial Sequence
  Description of Artificial Sequence: Synthetic oligonucleotide
cuuugcuccaucgagacug

SEQ ID NO: 242128 - RNA, 19 nt, Artificial Sequence
  Description of Artificial Sequence: Synthetic oligonucleotide
guauguuauaaauuugguc

SEQ ID NO: 242129 - RNA, 19 nt, Artificial Sequence
  Description of Artificial Sequence: Synthetic oligonucleotide
aguucaacauucaaacagg

SEQ ID NO: 242130 - RNA, 19 nt, Artificial Sequence
  Description of Artificial Sequence: Synthetic oligonucleotide
gucuagugggcucugaugc

SEQ ID NO: 242131 - RNA, 19 nt, Artificial Sequence
  Description of Artificial Sequence: Synthetic oligonucleotide
agucuaaauucuuagcuau

SEQ ID NO: 242132 - RNA, 19 nt, Artificial Sequence
  Description of Artificial Sequence: Synthetic oligonucleotide
uuaaacaaugcuucucuau

SEQ ID NO: 242133 - RNA, 19 nt, Artificial Sequence
  Description of Artificial Sequence: Synthetic oligonucleotide
auuagagagcccguggacg

SEQ ID NO: 242134 - RNA, 19 nt, Artificial Sequence
  Description of Artificial Sequence: Synthetic oligonucleotide
gauugcuucuucucguuug

SEQ ID NO: 242135 - RNA, 19 nt, Artificial Sequence
  Description of Artificial Sequence: Synthetic oligonucleotide
uuuaaccaggauucuauuc

SEQ ID NO: 242136 - RNA, 19 nt, Artificial Sequence
  Description of Artificial Sequence: Synthetic oligonucleotide
uaaauuuacuagacagccu

SEQ ID NO: 242137 - RNA, 19 nt, Artificial Sequence
  Description of Artificial Sequence: Synthetic oligonucleotide
gauaccguuugucauucug

SEQ ID NO: 242138 - RNA, 19 nt, Artificial Sequence
  Description of Artificial Sequence: Synthetic oligonucleotide
auaauugaguauguauguc

SEQ ID NO: 242139 - RNA, 19 nt, Artificial Sequence
  Description of Artificial Sequence: Synthetic oligonucleotide
guguucauaaccugagaag

SEQ ID NO: 242140 - RNA, 19 nt, Artificial Sequence
  Description of Artificial Sequence: Synthetic oligonucleotide
ugaucuuuccggagggucc

SEQ ID NO: 242141 - RNA, 19 nt, Artificial Sequence
  Description of Artificial Sequence: Synthetic oligonucleotide
gauuuaaucuucucaccuc

SEQ ID NO: 242142 - RNA, 19 nt, Artificial Sequence
  Description of Artificial Sequence: Synthetic oligonucleotide
uugaaaaggucuucucuca

SEQ ID NO: 242143 - RNA, 19 nt, Artificial Sequence
  Description of Artificial Sequence: Synthetic oligonucleotide
ggauuaagaagcaaguacc

SEQ ID NO: 242144 - RNA, 19 nt, Artificial Sequence
  Description of Artificial Sequence: Synthetic oligonucleotide
uucugcaauagguugacua

SEQ ID NO: 242145 - RNA, 19 nt, Artificial Sequence
  Description of Artificial Sequence: Synthetic oligonucleotide
ucuuucccguucucgaagg

SEQ ID NO: 242146 - RNA, 19 nt, Artificial Sequence
  Description of Artificial Sequence: Synthetic oligonucleotide
uucauucgagccuccagag

SEQ ID NO: 242147 - RNA, 19 nt, Artificial Sequence
  Description of Artificial Sequence: Synthetic oligonucleotide
uggacggguauuuagaauu

SEQ ID NO: 242148 - RNA, 19 nt, Artificial Sequence
  Description of Artificial Sequence: Synthetic oligonucleotide
auauaaaaggguugguuua

SEQ ID NO: 242149 - RNA, 19 nt, Artificial Sequence
  Description of Artificial Sequence: Synthetic oligonucleotide
gaguaacacugcuaguaag

SEQ ID NO: 242150 - RNA, 19 nt, Artificial Sequence
  Description of Artificial Sequence: Synthetic oligonucleotide
ucugcaauagguugacuaa

SEQ ID NO: 242151 - RNA, 19 nt, Artificial Sequence
  Description of Artificial Sequence: Synthetic oligonucleotide
ucaacugaugccugggaac

SEQ ID NO: 242152 - RNA, 19 nt, Artificial Sequence
  Description of Artificial Sequence: Synthetic oligonucleotide
uugugcaacucuuucuccc

SEQ ID NO: 242153 - RNA, 19 nt, Artificial Sequence
  Description of Artificial Sequence: Synthetic oligonucleotide
aaaggucaaagugugucca

SEQ ID NO: 242154 - RNA, 19 nt, Artificial Sequence
  Description of Artificial Sequence: Synthetic oligonucleotide
ucuuuaggauuaagaagca

SEQ ID NO: 242155 - RNA, 19 nt, Artificial Sequence
  Description of Artificial Sequence: Synthetic oligonucleotide
caaaguguguccaucauaa

SEQ ID NO: 242156 - RNA, 19 nt, Artificial Sequence
  Description of Artificial Sequence: Synthetic oligonucleotide
uaacacugcuaguaagaag

SEQ ID NO: 242157 - RNA, 19 nt, Artificial Sequence
  Description of Artificial Sequence: Synthetic oligonucleotide
cagccuauaauugaguaug

SEQ ID NO: 242158 - RNA, 19 nt, Artificial Sequence
  Description of Artificial Sequence: Synthetic oligonucleotide
uuucguuugcucagaacgu

SEQ ID NO: 242159 - RNA, 19 nt, Artificial Sequence
  Description of Artificial Sequence: Synthetic oligonucleotide
ucaauucaguguuuucucu

SEQ ID NO: 242160 - RNA, 19 nt, Artificial Sequence
  Description of Artificial Sequence: Synthetic oligonucleotide
uuuuguggaucgucuagug

SEQ ID NO: 242161 - RNA, 19 nt, Artificial Sequence
  Description of Artificial Sequence: Synthetic oligonucleotide
acugcuuuguaccucgggu

SEQ ID NO: 242162 - RNA, 19 nt, Artificial Sequence
  Description of Artificial Sequence: Synthetic oligonucleotide
auuauuuuguggaucgucu

SEQ ID NO: 242163 - RNA, 19 nt, Artificial Sequence
  Description of Artificial Sequence: Synthetic oligonucleotide
cauuguuggagccgggugc

SEQ ID NO: 242164 - RNA, 19 nt, Artificial Sequence
  Description of Artificial Sequence: Synthetic oligonucleotide
auugaagaacuguccacug

SEQ ID NO: 242165 - RNA, 19 nt, Artificial Sequence
  Description of Artificial Sequence: Synthetic oligonucleotide
acaagacuuggccucuaac

SEQ ID NO: 242166 - RNA, 19 nt, Artificial Sequence
  Description of Artificial Sequence: Synthetic oligonucleotide
uauucuggccaacauguua

SEQ ID NO: 242167 - RNA, 19 nt, Artificial Sequence
  Description of Artificial Sequence: Synthetic oligonucleotide
acuagauaccguuugucau

SEQ ID NO: 242168 - RNA, 19 nt, Artificial Sequence
  Description of Artificial Sequence: Synthetic oligonucleotide
ucgagauuuuaaauuuacu

SEQ ID NO: 242169 - RNA, 19 nt, Artificial Sequence
  Description of Artificial Sequence: Synthetic oligonucleotide
auagucauagucucuggaa

SEQ ID NO: 242170 - RNA, 19 nt, Artificial Sequence
  Description of Artificial Sequence: Synthetic oligonucleotide
uuucgguaaagaucauuca

SEQ ID NO: 242171 - RNA, 19 nt, Artificial Sequence
  Description of Artificial Sequence: Synthetic oligonucleotide
cugagucuaaauucuuagc

SEQ ID NO: 242172 - RNA, 19 nt, Artificial Sequence
  Description of Artificial Sequence: Synthetic oligonucleotide
ugcuuuguaccucggguca

SEQ ID NO: 242173 - RNA, 19 nt, Artificial Sequence
  Description of Artificial Sequence: Synthetic oligonucleotide
uaucuugugcaacucuuuc

SEQ ID NO: 242174 - RNA, 19 nt, Artificial Sequence
  Description of Artificial Sequence: Synthetic oligonucleotide
agaacuuaauacaccgagg

SEQ ID NO: 242175 - RNA, 19 nt, Artificial Sequence
  Description of Artificial Sequence: Synthetic oligonucleotide
ucacaauugcuucuccuuc

SEQ ID NO: 242176 - RNA, 19 nt, Artificial Sequence
  Description of Artificial Sequence: Synthetic oligonucleotide
ucauucgagccuccagagg

SEQ ID NO: 242177 - RNA, 19 nt, Artificial Sequence
  Description of Artificial Sequence: Synthetic oligonucleotide
acugcuucauucgagccuc

SEQ ID NO: 242178 - RNA, 19 nt, Artificial Sequence
  Description of Artificial Sequence: Synthetic oligonucleotide
ggcuaaacaagacuuggcc

SEQ ID NO: 242179 - RNA, 19 nt, Artificial Sequence
  Description of Artificial Sequence: Synthetic oligonucleotide
ucgagaacugccacuuuug

SEQ ID NO: 242180 - RNA, 19 nt, Artificial Sequence
  Description of Artificial Sequence: Synthetic oligonucleotide
ucgcagaaguuucauccag

SEQ ID NO: 242181 - RNA, 19 nt, Artificial Sequence
  Description of Artificial Sequence: Synthetic oligonucleotide
guuaaggugaucgcagaag

SEQ ID NO: 242182 - RNA, 19 nt, Artificial Sequence
  Description of Artificial Sequence: Synthetic oligonucleotide
agcuucgagauuuuaaauu

SEQ ID NO: 242183 - RNA, 19 nt, Artificial Sequence
  Description of Artificial Sequence: Synthetic oligonucleotide
uggcuugcuauuauuuugu

SEQ ID NO: 242184 - RNA, 19 nt, Artificial Sequence
  Description of Artificial Sequence: Synthetic oligonucleotide
uggucuucgaaucuucuuu

SEQ ID NO: 242185 - RNA, 19 nt, Artificial Sequence
  Description of Artificial Sequence: Synthetic oligonucleotide
auuguguaacaauaaucau

SEQ ID NO: 242186 - RNA, 19 nt, Artificial Sequence
  Description of Artificial Sequence: Synthetic oligonucleotide
cuaguaucagaccaugaca

SEQ ID NO: 242187 - RNA, 19 nt, Artificial Sequence
  Description of Artificial Sequence: Synthetic oligonucleotide
uugaucagauucuuggauu

SEQ ID NO: 242188 - RNA, 19 nt, Artificial Sequence
  Description of Artificial Sequence: Synthetic oligonucleotide
caagcuccaaccacacacg

SEQ ID NO: 242189 - RNA, 19 nt, Artificial Sequence
  Description of Artificial Sequence: Synthetic oligonucleotide
uguuaaggugaucgcagaa

SEQ ID NO: 242190 - RNA, 19 nt, Artificial Sequence
  Description of Artificial Sequence: Synthetic oligonucleotide
ucauuaaacaaugcuucuc

SEQ ID NO: 242191 - RNA, 19 nt, Artificial Sequence
  Description of Artificial Sequence: Synthetic oligonucleotide
gaacguaccaugucagaca

SEQ ID NO: 242192 - RNA, 19 nt, Artificial Sequence
  Description of Artificial Sequence: Synthetic oligonucleotide
ucguuugcucagaacgugc

SEQ ID NO: 242193 - RNA, 19 nt, Artificial Sequence
  Description of Artificial Sequence: Synthetic oligonucleotide
caauagguugacuaaugca

SEQ ID NO: 242194 - RNA, 19 nt, Artificial Sequence
  Description of Artificial Sequence: Synthetic oligonucleotide
aguaacacugcuaguaaga

SEQ ID NO: 242195 - RNA, 19 nt, Artificial Sequence
  Description of Artificial Sequence: Synthetic oligonucleotide
accaugacacaucggaaga

SEQ ID NO: 242196 - RNA, 19 nt, Artificial Sequence
  Description of Artificial Sequence: Synthetic oligonucleotide
uaauacaccgaggaucuuc

SEQ ID NO: 242197 - RNA, 19 nt, Artificial Sequence
  Description of Artificial Sequence: Synthetic oligonucleotide
agugauguauuugucucug

SEQ ID NO: 242198 - RNA, 19 nt, Artificial Sequence
  Description of Artificial Sequence: Synthetic oligonucleotide
guaagaagaccaccaaguc

SEQ ID NO: 242199 - RNA, 19 nt, Artificial Sequence
  Description of Artificial Sequence: Synthetic oligonucleotide
ugugcaacucuuucuccca

SEQ ID NO: 242200 - RNA, 19 nt, Artificial Sequence
  Description of Artificial Sequence: Synthetic oligonucleotide
cacaucggaagaacguacc

SEQ ID NO: 242201 - RNA, 19 nt, Artificial Sequence
  Description of Artificial Sequence: Synthetic oligonucleotide
cuaauucagaauuucggua

SEQ ID NO: 242202 - RNA, 19 nt, Artificial Sequence
  Description of Artificial Sequence: Synthetic oligonucleotide
agccgggugccuuagcuuc

SEQ ID NO: 242203 - RNA, 19 nt, Artificial Sequence
  Description of Artificial Sequence: Synthetic oligonucleotide
ucggaagaacguaccaugu

SEQ ID NO: 242204 - RNA, 19 nt, Artificial Sequence
  Description of Artificial Sequence: Synthetic oligonucleotide
cuagacagccuauaauuga

SEQ ID NO: 242205 - RNA, 19 nt, Artificial Sequence
  Description of Artificial Sequence: Synthetic oligonucleotide
ucauccagaaguugccuaa

SEQ ID NO: 242206 - RNA, 19 nt, Artificial Sequence
  Description of Artificial Sequence: Synthetic oligonucleotide
uaucagaccaugacacauc

SEQ ID NO: 242207 - RNA, 19 nt, Artificial Sequence
  Description of Artificial Sequence: Synthetic oligonucleotide
cuaaacuguucuuuagaga

SEQ ID NO: 242208 - RNA, 19 nt, Artificial Sequence
  Description of Artificial Sequence: Synthetic oligonucleotide
ugcuaguaagaagaccacc

SEQ ID NO: 242209 - RNA, 19 nt, Artificial Sequence
  Description of Artificial Sequence: Synthetic oligonucleotide
ggaagaacguaccauguca

SEQ ID NO: 242210 - RNA, 19 nt, Artificial Sequence
  Description of Artificial Sequence: Synthetic oligonucleotide
gaguaguuuacagggaaca

SEQ ID NO: 242211 - RNA, 19 nt, Artificial Sequence
  Description of Artificial Sequence: Synthetic oligonucleotide
auuaagaagcaaguaccga

SEQ ID NO: 242212 - RNA, 19 nt, Artificial Sequence
  Description of Artificial Sequence: Synthetic oligonucleotide
uggucuugacauauugauc

SEQ ID NO: 242213 - RNA, 19 nt, Artificial Sequence
  Description of Artificial Sequence: Synthetic oligonucleotide
ggaacauccagaaagguaa

SEQ ID NO: 242214 - RNA, 19 nt, Artificial Sequence
  Description of Artificial Sequence: Synthetic oligonucleotide
uugucuaauucagaauuuc

SEQ ID NO: 242215 - RNA, 19 nt, Artificial Sequence
  Description of Artificial Sequence: Synthetic oligonucleotide
augacacaucggaagaacg

SEQ ID NO: 242216 - RNA, 19 nt, Artificial Sequence
  Description of Artificial Sequence: Synthetic oligonucleotide
caguacuagauaccguuug

SEQ ID NO: 242217 - RNA, 19 nt, Artificial Sequence
  Description of Artificial Sequence: Synthetic oligonucleotide
guagcucuugguauuaaac

SEQ ID NO: 242218 - RNA, 19 nt, Artificial Sequence
  Description of Artificial Sequence: Synthetic oligonucleotide
ucgagacugacuguccaag

SEQ ID NO: 242219 - RNA, 19 nt, Artificial Sequence
  Description of Artificial Sequence: Synthetic oligonucleotide
acacaucggaagaacguac

SEQ ID NO: 242220 - RNA, 19 nt, Artificial Sequence
  Description of Artificial Sequence: Synthetic oligonucleotide
aauuucgguaaagaucauu

SEQ ID NO: 242221 - RNA, 19 nt, Artificial Sequence
  Description of Artificial Sequence: Synthetic oligonucleotide
auauauuguguaacaauaa

SEQ ID NO: 242222 - RNA, 19 nt, Artificial Sequence
  Description of Artificial Sequence: Synthetic oligonucleotide
acagccuauaauugaguau

SEQ ID NO: 242223 - RNA, 19 nt, Artificial Sequence
  Description of Artificial Sequence: Synthetic oligonucleotide
ucuaacucagaggggagaa

SEQ ID NO: 242224 - RNA, 19 nt, Artificial Sequence
  Description of Artificial Sequence: Synthetic oligonucleotide
auugaguauguaugucagu

SEQ ID NO: 242225 - RNA, 19 nt, Artificial Sequence
  Description of Artificial Sequence: Synthetic oligonucleotide
cauuaaacaaugcuucucu

SEQ ID NO: 242226 - RNA, 19 nt, Artificial Sequence
  Description of Artificial Sequence: Synthetic oligonucleotide
uuaauaggcucaucuucau

SEQ ID NO: 242227 - RNA, 19 nt, Artificial Sequence
  Description of Artificial Sequence: Synthetic oligonucleotide
uuuccauuagagagcccgu

SEQ ID NO: 242228 - RNA, 19 nt, Artificial Sequence
  Description of Artificial Sequence: Synthetic oligonucleotide
uucguuugcucagaacgug

SEQ ID NO: 242229 - RNA, 19 nt, Artificial Sequence
  Description of Artificial Sequence: Synthetic oligonucleotide
auuaaacaaugcuucucua

SEQ ID NO: 242230 - RNA, 19 nt, Artificial Sequence
  Description of Artificial Sequence: Synthetic oligonucleotide
cuucauucgagccuccaga

SEQ ID NO: 242231 - RNA, 19 nt, Artificial Sequence
  Description of Artificial Sequence: Synthetic oligonucleotide
gacagccuauaauugagua

SEQ ID NO: 242232 - RNA, 19 nt, Artificial Sequence
  Description of Artificial Sequence: Synthetic oligonucleotide
ucuacaucuuucagguguu

SEQ ID NO: 242233 - RNA, 19 nt, Artificial Sequence
  Description of Artificial Sequence: Synthetic oligonucleotide
uccuaguaucagaccauga

SEQ ID NO: 242234 - RNA, 19 nt, Artificial Sequence
  Description of Artificial Sequence: Synthetic oligonucleotide
uccaucgagacugacuguc

SEQ ID NO: 242235 - RNA, 19 nt, Artificial Sequence
  Description of Artificial Sequence: Synthetic oligonucleotide
gcaauagguugacuaaugc

SEQ ID NO: 242236 - RNA, 19 nt, Artificial Sequence
  Description of Artificial Sequence: Synthetic oligonucleotide
acaucggaagaacguacca

SEQ ID NO: 242237 - RNA, 19 nt, Artificial Sequence
  Description of Artificial Sequence: Synthetic oligonucleotide
accccggcgauccagguca

SEQ ID NO: 242238 - RNA, 19 nt, Artificial Sequence
  Description of Artificial Sequence: Synthetic oligonucleotide
cauuagagagcccguggac

SEQ ID NO: 242239 - RNA, 19 nt, Artificial Sequence
  Description of Artificial Sequence: Synthetic oligonucleotide
ucuuucguuugcucagaac

SEQ ID NO: 242240 - RNA, 19 nt, Artificial Sequence
  Description of Artificial Sequence: Synthetic oligonucleotide
aagugaugauuggauaaaa

SEQ ID NO: 242241 - RNA, 19 nt, Artificial Sequence
  Description of Artificial Sequence: Synthetic oligonucleotide
gaagucagcuuuggcagug

SEQ ID NO: 242242 - RNA, 19 nt, Artificial Sequence
  Description of Artificial Sequence: Synthetic oligonucleotide
agaagcaaguaccgagggu

SEQ ID NO: 242243 - RNA, 19 nt, Artificial Sequence
  Description of Artificial Sequence: Synthetic oligonucleotide
uagcuucgagauuuuaaau

SEQ ID NO: 242244 - RNA, 19 nt, Artificial Sequence
  Description of Artificial Sequence: Synthetic oligonucleotide
auguuaaggugaucgcaga

SEQ ID NO: 242245 - RNA, 19 nt, Artificial Sequence
  Description of Artificial Sequence: Synthetic oligonucleotide
cucuuucccguucucgaag

SEQ ID NO: 242246 - RNA, 19 nt, Artificial Sequence
  Description of Artificial Sequence: Synthetic oligonucleotide
uagcauguuuggcagcaaa

SEQ ID NO: 242247 - RNA, 19 nt, Artificial Sequence
  Description of Artificial Sequence: Synthetic oligonucleotide
ccuaguaucagaccaugac

SEQ ID NO: 242248 - RNA, 19 nt, Artificial Sequence
  Description of Artificial Sequence: Synthetic oligonucleotide
aucgagaacugccacuuuu

SEQ ID NO: 242249 - RNA, 19 nt, Artificial Sequence
  Description of Artificial Sequence: Synthetic oligonucleotide
aaguguccugaagucagcu

SEQ ID NO: 242250 - RNA, 19 nt, Artificial Sequence
  Description of Artificial Sequence: Synthetic oligonucleotide
cugcuuuguaccucggguc

SEQ ID NO: 242251 - RNA, 19 nt, Artificial Sequence
  Description of Artificial Sequence: Synthetic oligonucleotide
aggguugguuuauuguagu

SEQ ID NO: 242252 - RNA, 19 nt, Artificial Sequence
  Description of Artificial Sequence: Synthetic oligonucleotide
aacucagaggggagaauca

SEQ ID NO: 242253 - RNA, 19 nt, Artificial Sequence
  Description of Artificial Sequence: Synthetic oligonucleotide
aacaagacuuggccucuaa

SEQ ID NO: 242254 - RNA, 19 nt, Artificial Sequence
  Description of Artificial Sequence: Synthetic oligonucleotide
uaccgagggucaaauacua

SEQ ID NO: 242255 - RNA, 19 nt, Artificial Sequence
  Description of Artificial Sequence: Synthetic oligonucleotide
aggucaaaguguguccauc

SEQ ID NO: 242256 - RNA, 19 nt, Artificial Sequence
  Description of Artificial Sequence: Synthetic oligonucleotide
uagauaccguuugucauuc

SEQ ID NO: 242257 - RNA, 19 nt, Artificial Sequence
  Description of Artificial Sequence: Synthetic oligonucleotide
aggugaucgcagaaguuuc

SEQ ID NO: 242258 - RNA, 19 nt, Artificial Sequence
  Description of Artificial Sequence: Synthetic oligonucleotide
ucuagugggcucugaugcu

SEQ ID NO: 242259 - RNA, 19 nt, Artificial Sequence
  Description of Artificial Sequence: Synthetic oligonucleotide
cugggcuaaacaagacuug

SEQ ID NO: 242260 - RNA, 19 nt, Artificial Sequence
  Description of Artificial Sequence: Synthetic oligonucleotide
ugaucgcagaaguuucauc

SEQ ID NO: 242261 - RNA, 19 nt, Artificial Sequence
  Description of Artificial Sequence: Synthetic oligonucleotide
agcacggaaguaaacaaau

SEQ ID NO: 242262 - RNA, 19 nt, Artificial Sequence
  Description of Artificial Sequence: Synthetic oligonucleotide
aaccccaacuucaguuuuc

SEQ ID NO: 242263 - RNA, 19 nt, Artificial Sequence
  Description of Artificial Sequence: Synthetic oligonucleotide
caagacuuggccucuaacu

SEQ ID NO: 242264 - RNA, 19 nt, Artificial Sequence
  Description of Artificial Sequence: Synthetic oligonucleotide
uaaggugaucgcagaaguu

SEQ ID NO: 242265 - RNA, 19 nt, Artificial Sequence
  Description of Artificial Sequence: Synthetic oligonucleotide
acacacgcuccugucuugc

SEQ ID NO: 242266 - RNA, 19 nt, Artificial Sequence
  Description of Artificial Sequence: Synthetic oligonucleotide
uggaccccggcgauccagg

SEQ ID NO: 242267 - RNA, 19 nt, Artificial Sequence
  Description of Artificial Sequence: Synthetic oligonucleotide
uccugucuugcugaguaac

SEQ ID NO: 242268 - RNA, 19 nt, Artificial Sequence
  Description of Artificial Sequence: Synthetic oligonucleotide
agauucccagcggugaucu

SEQ ID NO: 242269 - RNA, 19 nt, Artificial Sequence
  Description of Artificial Sequence: Synthetic oligonucleotide
aagcacggaaguaaacaaa

SEQ ID NO: 242270 - RNA, 19 nt, Artificial Sequence
  Description of Artificial Sequence: Synthetic oligonucleotide
uuugcuccaucgagacuga

SEQ ID NO: 242271 - RNA, 19 nt, Artificial Sequence
  Description of Artificial Sequence: Synthetic oligonucleotide
cugcuaguaagaagaccac

SEQ ID NO: 242272 - RNA, 19 nt, Artificial Sequence
  Description of Artificial Sequence: Synthetic oligonucleotide
agaucauucaguggauaau

SEQ ID NO: 242273 - RNA, 19 nt, Artificial Sequence
  Description of Artificial Sequence: Synthetic oligonucleotide
cugucuugcugaguaacac

SEQ ID NO: 242274 - RNA, 19 nt, Artificial Sequence
  Description of Artificial Sequence: Synthetic oligonucleotide
cacugcuaguaagaagacc

SEQ ID NO: 242275 - RNA, 19 nt, Artificial Sequence
  Description of Artificial Sequence: Synthetic oligonucleotide
ugcgggcuugccuuuccag

SEQ ID NO: 242276 - RNA, 19 nt, Artificial Sequence
  Description of Artificial Sequence: Synthetic oligonucleotide
acacugcuaguaagaagac

SEQ ID NO: 242277 - RNA, 19 nt, Artificial Sequence
  Description of Artificial Sequence: Synthetic oligonucleotide
aguaguuuacagggaacau

SEQ ID NO: 242278 - RNA, 19 nt, Artificial Sequence
  Description of Artificial Sequence: Synthetic oligonucleotide
aagcaaguaccgaggguca

SEQ ID NO: 242279 - RNA, 19 nt, Artificial Sequence
  Description of Artificial Sequence: Synthetic oligonucleotide
guacuagauaccguuuguc

SEQ ID NO: 242280 - RNA, 19 nt, Artificial Sequence
  Description of Artificial Sequence: Synthetic oligonucleotide
cacucaucgagaacugcca

SEQ ID NO: 242281 - RNA, 19 nt, Artificial Sequence
  Description of Artificial Sequence: Synthetic oligonucleotide
accucuggucuucgaaucu

SEQ ID NO: 242282 - RNA, 19 nt, Artificial Sequence
  Description of Artificial Sequence: Synthetic oligonucleotide
caccucuggucuucgaauc

SEQ ID NO: 242283 - RNA, 19 nt, Artificial Sequence
  Description of Artificial Sequence: Synthetic oligonucleotide
cuagugggcucugaugcug

SEQ ID NO: 242284 - RNA, 19 nt, Artificial Sequence
  Description of Artificial Sequence: Synthetic oligonucleotide
aucaaagcacggaaguaaa

SEQ ID NO: 242285 - RNA, 19 nt, Artificial Sequence
  Description of Artificial Sequence: Synthetic oligonucleotide
ugcaagcuccaaccacaca

SEQ ID NO: 242286 - RNA, 19 nt, Artificial Sequence
  Description of Artificial Sequence: Synthetic oligonucleotide
gacacaucggaagaacgua

SEQ ID NO: 242287 - RNA, 19 nt, Artificial Sequence
  Description of Artificial Sequence: Synthetic oligonucleotide
acugaugccugggaaccug

SEQ ID NO: 242288 - RNA, 19 nt, Artificial Sequence
  Description of Artificial Sequence: Synthetic oligonucleotide
cuuuagagacaaaggucaa

SEQ ID NO: 242289 - RNA, 19 nt, Artificial Sequence
  Description of Artificial Sequence: Synthetic oligonucleotide
caaauacuaucuugugcaa

SEQ ID NO: 242290 - RNA, 19 nt, Artificial Sequence
  Description of Artificial Sequence: Synthetic oligonucleotide
cuuucccguucucgaaggc

SEQ ID NO: 242291 - RNA, 19 nt, Artificial Sequence
  Description of Artificial Sequence: Synthetic oligonucleotide
cuccuaguaucagaccaug

SEQ ID NO: 242292 - RNA, 19 nt, Artificial Sequence
  Description of Artificial Sequence: Synthetic oligonucleotide
ggauguuaaggugaucgca

SEQ ID NO: 242293 - RNA, 19 nt, Artificial Sequence
  Description of Artificial Sequence: Synthetic oligonucleotide
ccgagggucaaauacuauc

SEQ ID NO: 242294 - RNA, 19 nt, Artificial Sequence
  Description of Artificial Sequence: Synthetic oligonucleotide
gcuaaacaagacuuggccu

SEQ ID NO: 242295 - RNA, 19 nt, Artificial Sequence
  Description of Artificial Sequence: Synthetic oligonucleotide
gcacucaucgagaacugcc

SEQ ID NO: 242296 - RNA, 19 nt, Artificial Sequence
  Description of Artificial Sequence: Synthetic oligonucleotide
gguugacuaaugcacauau

SEQ ID NO: 242297 - RNA, 19 nt, Artificial Sequence
  Description of Artificial Sequence: Synthetic oligonucleotide
cagucaugccacacaaaga

SEQ ID NO: 242298 - RNA, 19 nt, Artificial Sequence
  Description of Artificial Sequence: Synthetic oligonucleotide
gguccuccuaguaucagac

SEQ ID NO: 242299 - RNA, 19 nt, Artificial Sequence
  Description of Artificial Sequence: Synthetic oligonucleotide
ccaagugaugauuggauaa

SEQ ID NO: 242300 - RNA, 19 nt, Artificial Sequence
  Description of Artificial Sequence: Synthetic oligonucleotide
caucgagacugacugucca

SEQ ID NO: 242301 - RNA, 19 nt, Artificial Sequence
  Description of Artificial Sequence: Synthetic oligonucleotide
ccuauaauugaguauguau

SEQ ID NO: 242302 - RNA, 19 nt, Artificial Sequence
  Description of Artificial Sequence: Synthetic oligonucleotide
guccuccuaguaucagacc

SEQ ID NO: 242303 - RNA, 19 nt, Artificial Sequence
  Description of Artificial Sequence: Synthetic oligonucleotide
accguuugucauucugcaa

SEQ ID NO: 242304 - RNA, 19 nt, Artificial Sequence
  Description of Artificial Sequence: Synthetic oligonucleotide
guaucagaccaugacacau

SEQ ID NO: 242305 - RNA, 19 nt, Artificial Sequence
  Description of Artificial Sequence: Synthetic oligonucleotide
gcuucgagauuuuaaauuu

SEQ ID NO: 242306 - RNA, 19 nt, Artificial Sequence
  Description of Artificial Sequence: Synthetic oligonucleotide
uucgagccuccagagggac

SEQ ID NO: 242307 - RNA, 19 nt, Artificial Sequence
  Description of Artificial Sequence: Synthetic oligonucleotide
ggggagaaucaaagcacgg

SEQ ID NO: 242308 - RNA, 19 nt, Artificial Sequence
  Description of Artificial Sequence: Synthetic oligonucleotide
aaguagcucuugguauuaa

SEQ ID NO: 242309 - RNA, 19 nt, Artificial Sequence
  Description of Artificial Sequence: Synthetic oligonucleotide
cauaaccugagaagaaauu

SEQ ID NO: 242310 - RNA, 19 nt, Artificial Sequence
  Description of Artificial Sequence: Synthetic oligonucleotide
gccucuaacucagagggga

SEQ ID NO: 242311 - RNA, 19 nt, Artificial Sequence
  Description of Artificial Sequence: Synthetic oligonucleotide
ucaaugcgggcuugccuuu

SEQ ID NO: 242312 - RNA, 19 nt, Artificial Sequence
  Description of Artificial Sequence: Synthetic oligonucleotide
gacccagauucccagcggu

SEQ ID NO: 242313 - RNA, 19 nt, Artificial Sequence
  Description of Artificial Sequence: Synthetic oligonucleotide
ggaguaguuuacagggaac

SEQ ID NO: 242314 - RNA, 19 nt, Artificial Sequence
  Description of Artificial Sequence: Synthetic oligonucleotide
auacaccgaggaucuuccu

SEQ ID NO: 242315 - RNA, 19 nt, Artificial Sequence
  Description of Artificial Sequence: Synthetic oligonucleotide
agccuauaauugaguaugu

SEQ ID NO: 242316 - RNA, 19 nt, Artificial Sequence
  Description of Artificial Sequence: Synthetic oligonucleotide
cucaaugcgggcuugccuu

SEQ ID NO: 242317 - RNA, 19 nt, Artificial Sequence
  Description of Artificial Sequence: Synthetic oligonucleotide
ccguuugucauucugcaaa

SEQ ID NO: 242318 - RNA, 19 nt, Artificial Sequence
  Description of Artificial Sequence: Synthetic oligonucleotide
acggguauuuagaauuauu

SEQ ID NO: 242319 - RNA, 19 nt, Artificial Sequence
  Description of Artificial Sequence: Synthetic oligonucleotide
ucucaccucuggucuucga

SEQ ID NO: 242320 - RNA, 19 nt, Artificial Sequence
  Description of Artificial Sequence: Synthetic oligonucleotide
agauaccguuugucauucu

SEQ ID NO: 242321 - RNA, 19 nt, Artificial Sequence
  Description of Artificial Sequence: Synthetic oligonucleotide
uuuguaccucgggucacuu

SEQ ID NO: 242322 - RNA, 19 nt, Artificial Sequence
  Description of Artificial Sequence: Synthetic oligonucleotide
cucuaacucagaggggaga

SEQ ID NO: 242323 - RNA, 19 nt, Artificial Sequence
  Description of Artificial Sequence: Synthetic oligonucleotide
guaccgagggucaaauacu

SEQ ID NO: 242324 - RNA, 19 nt, Artificial Sequence
  Description of Artificial Sequence: Synthetic oligonucleotide
uuggagccgggugccuuag

SEQ ID NO: 242325 - RNA, 19 nt, Artificial Sequence
  Description of Artificial Sequence: Synthetic oligonucleotide
gaauuauuuuguggaucgu

SEQ ID NO: 242326 - RNA, 19 nt, Artificial Sequence
  Description of Artificial Sequence: Synthetic oligonucleotide
cagcauuguuggagccggg

SEQ ID NO: 242327 - RNA, 19 nt, Artificial Sequence
  Description of Artificial Sequence: Synthetic oligonucleotide
ccaucgagacugacugucc

SEQ ID NO: 242328 - RNA, 19 nt, Artificial Sequence
  Description of Artificial Sequence: Synthetic oligonucleotide
cucaucgagaacugccacu

SEQ ID NO: 242329 - RNA, 19 nt, Artificial Sequence
  Description of Artificial Sequence: Synthetic oligonucleotide
aaacaagacuuggccucua

SEQ ID NO: 242330 - RNA, 19 nt, Artificial Sequence
  Description of Artificial Sequence: Synthetic oligonucleotide
agagagcccguggacgggu

SEQ ID NO: 242331 - RNA, 19 nt, Artificial Sequence
  Description of Artificial Sequence: Synthetic oligonucleotide
ccucuaacucagaggggag

SEQ ID NO: 242332 - RNA, 19 nt, Artificial Sequence
  Description of Artificial Sequence: Synthetic oligonucleotide
agguugacuaaugcacaua

SEQ ID NO: 242333 - RNA, 19 nt, Artificial Sequence
  Description of Artificial Sequence: Synthetic oligonucleotide
gagggucaaauacuaucuu

SEQ ID NO: 242334 - RNA, 19 nt, Artificial Sequence
  Description of Artificial Sequence: Synthetic oligonucleotide
auucgagccuccagaggga

SEQ ID NO: 242335 - RNA, 19 nt, Artificial Sequence
  Description of Artificial Sequence: Synthetic oligonucleotide
ucucgaaggcuugccucaa

SEQ ID NO: 242336 - RNA, 19 nt, Artificial Sequence
  Description of Artificial Sequence: Synthetic oligonucleotide
cauuuacaauccacauaua

SEQ ID NO: 242337 - RNA, 19 nt, Artificial Sequence
  Description of Artificial Sequence: Synthetic oligonucleotide
cagauucccagcggugauc

SEQ ID NO: 242338 - RNA, 19 nt, Artificial Sequence
  Description of Artificial Sequence: Synthetic oligonucleotide
cacaguccaguacuagaua

SEQ ID NO: 242339 - RNA, 19 nt, Artificial Sequence
  Description of Artificial Sequence: Synthetic oligonucleotide
guugccuaaagugcucccu

SEQ ID NO: 242340 - RNA, 19 nt, Artificial Sequence
  Description of Artificial Sequence: Synthetic oligonucleotide
ccauuagagagcccgugga

SEQ ID NO: 242341 - RNA, 19 nt, Artificial Sequence
  Description of Artificial Sequence: Synthetic oligonucleotide
gaucgucuagugggcucug

SEQ ID NO: 242342 - RNA, 19 nt, Artificial Sequence
  Description of Artificial Sequence: Synthetic oligonucleotide
ucccagcggugaucuuucc

SEQ ID NO: 242343 - RNA, 19 nt, Artificial Sequence
  Description of Artificial Sequence: Synthetic oligonucleotide
augcgggcuugccuuucca

SEQ ID NO: 242344 - RNA, 19 nt, Artificial Sequence
  Description of Artificial Sequence: Synthetic oligonucleotide
gaccccggcgauccagguc

SEQ ID NO: 242345 - RNA, 19 nt, Artificial Sequence
  Description of Artificial Sequence: Synthetic oligonucleotide
ccucucucuccaauaagga

SEQ ID NO: 242346 - RNA, 19 nt, Artificial Sequence
  Description of Artificial Sequence: Synthetic oligonucleotide
uugccucaaugcgggcuug

SEQ ID NO: 242347 - RNA, 19 nt, Artificial Sequence
  Description of Artificial Sequence: Synthetic oligonucleotide
gacaaaggucaaagugugu

SEQ ID NO: 242348 - RNA, 19 nt, Artificial Sequence
  Description of Artificial Sequence: Synthetic oligonucleotide
gacuguccaagugaugauu

SEQ ID NO: 242349 - RNA, 19 nt, Artificial Sequence
  Description of Artificial Sequence: Synthetic oligonucleotide
accugaaaauuuggcucau

SEQ ID NO: 242350 - RNA, 19 nt, Artificial Sequence
  Description of Artificial Sequence: Synthetic oligonucleotide
ggugaucgcagaaguuuca

SEQ ID NO: 242351 - RNA, 19 nt, Artificial Sequence
  Description of Artificial Sequence: Synthetic oligonucleotide
guggacggguauuuagaau

SEQ ID NO: 242352 - RNA, 19 nt, Artificial Sequence
  Description of Artificial Sequence: Synthetic oligonucleotide
guuggagccgggugccuua

SEQ ID NO: 242353 - RNA, 19 nt, Artificial Sequence
  Description of Artificial Sequence: Synthetic oligonucleotide
cgucuagugggcucugaug

SEQ ID NO: 242354 - RNA, 19 nt, Artificial Sequence
  Description of Artificial Sequence: Synthetic oligonucleotide
ggggcucuugaauuaauuu

SEQ ID NO: 242355 - RNA, 19 nt, Artificial Sequence
  Description of Artificial Sequence: Synthetic oligonucleotide
cgaggaucuuccuuaauua

SEQ ID NO: 242356 - RNA, 19 nt, Artificial Sequence
  Description of Artificial Sequence: Synthetic oligonucleotide
gacggguauuuagaauuau

SEQ ID NO: 242357 - RNA, 19 nt, Artificial Sequence
  Description of Artificial Sequence: Synthetic oligonucleotide
guccacugcuuuguaccuc

SEQ ID NO: 242358 - RNA, 19 nt, Artificial Sequence
  Description of Artificial Sequence: Synthetic oligonucleotide
cgagggucaaauacuaucu

SEQ ID NO: 242359 - RNA, 19 nt, Artificial Sequence
  Description of Artificial Sequence: Synthetic oligonucleotide
ggucuucgaaucuucuuuu

SEQ ID NO: 242360 - RNA, 19 nt, Artificial Sequence
  Description of Artificial Sequence: Synthetic oligonucleotide
cuugccucaaugcgggcuu

SEQ ID NO: 242361 - RNA, 19 nt, Artificial Sequence
  Description of Artificial Sequence: Synthetic oligonucleotide
accgagggucaaauacuau

SEQ ID NO: 242362 - RNA, 19 nt, Artificial Sequence
  Description of Artificial Sequence: Synthetic oligonucleotide
cugcaauagguugacuaau

SEQ ID NO: 242363 - RNA, 19 nt, Artificial Sequence
  Description of Artificial Sequence: Synthetic oligonucleotide
caaguaccgagggucaaau

SEQ ID NO: 242364 - RNA, 19 nt, Artificial Sequence
  Description of Artificial Sequence: Synthetic oligonucleotide
ccguggacggguauuuaga

SEQ ID NO: 242365 - RNA, 19 nt, Artificial Sequence
  Description of Artificial Sequence: Synthetic oligonucleotide
cacuggaggagaacuuaau

SEQ ID NO: 242366 - RNA, 19 nt, Artificial Sequence
  Description of Artificial Sequence: Synthetic oligonucleotide
caccgaggaucuuccuuaa

SEQ ID NO: 242367 - RNA, 19 nt, Artificial Sequence
  Description of Artificial Sequence: Synthetic oligonucleotide
gcuuuguaccucgggucac

SEQ ID NO: 242368 - RNA, 19 nt, Artificial Sequence
  Description of Artificial Sequence: Synthetic oligonucleotide
cggaagaacguaccauguc

SEQ ID NO: 242369 - RNA, 19 nt, Artificial Sequence
  Description of Artificial Sequence: Synthetic oligonucleotide
gagguggaccccggcgauc

SEQ ID NO: 242370 - RNA, 19 nt, Artificial Sequence
  Description of Artificial Sequence: Synthetic oligonucleotide
agcccguggacggguauuu

SEQ ID NO: 242371 - RNA, 19 nt, Artificial Sequence
  Description of Artificial Sequence: Synthetic oligonucleotide
gugaucgcagaaguuucau

SEQ ID NO: 242372 - RNA, 19 nt, Artificial Sequence
  Description of Artificial Sequence: Synthetic oligonucleotide
ggacggguauuuagaauua

SEQ ID NO: 242373 - RNA, 19 nt, Artificial Sequence
  Description of Artificial Sequence: Synthetic oligonucleotide
cuuuguaccucgggucacu

SEQ ID NO: 242374 - RNA, 19 nt, Artificial Sequence
  Description of Artificial Sequence: Synthetic oligonucleotide
ggaucgucuagugggcucu

SEQ ID NO: 242375 - RNA, 19 nt, Artificial Sequence
  Description of Artificial Sequence: Synthetic oligonucleotide
cuauucuggccaacauguu

SEQ ID NO: 242376 - RNA, 19 nt, Artificial Sequence
  Description of Artificial Sequence: Synthetic oligonucleotide
gagccgggugccuuagcuu

SEQ ID NO: 242377 - RNA, 19 nt, Artificial Sequence
  Description of Artificial Sequence: Synthetic oligonucleotide
cguggacggguauuuagaa

SEQ ID NO: 242378 - RNA, 19 nt, Artificial Sequence
  Description of Artificial Sequence: Synthetic oligonucleotide
ccguucucgaaggcuugcc

SEQ ID NO: 242379 - RNA, 19 nt, Artificial Sequence
  Description of Artificial Sequence: Synthetic oligonucleotide
acguaccaugucagacaga

SEQ ID NO: 242380 - RNA, 19 nt, Artificial Sequence
  Description of Artificial Sequence: Synthetic oligonucleotide
gcacggaaguaaacaaaua

SEQ ID NO: 242381 - RNA, 19 nt, Artificial Sequence
  Description of Artificial Sequence: Synthetic oligonucleotide
gagagcccguggacgggua

SEQ ID NO: 242382 - RNA, 19 nt, Artificial Sequence
  Description of Artificial Sequence: Synthetic oligonucleotide
ccuccuaguaucagaccau

SEQ ID NO: 242383 - RNA, 19 nt, Artificial Sequence
  Description of Artificial Sequence: Synthetic oligonucleotide
ccaguacuagauaccguuu

SEQ ID NO: 242384 - RNA, 19 nt, Artificial Sequence
  Description of Artificial Sequence: Synthetic oligonucleotide
ggugaucuuuccggagggu

SEQ ID NO: 242385 - RNA, 19 nt, Artificial Sequence
  Description of Artificial Sequence: Synthetic oligonucleotide
gagcccguggacggguauu

SEQ ID NO: 242386 - RNA, 19 nt, Artificial Sequence
  Description of Artificial Sequence: Synthetic oligonucleotide
caucgagaacugccacuuu

SEQ ID NO: 242387 - RNA, 19 nt, Artificial Sequence
  Description of Artificial Sequence: Synthetic oligonucleotide
cguucucgaaggcuugccu

SEQ ID NO: 242388 - RNA, 19 nt, Artificial Sequence
  Description of Artificial Sequence: Synthetic oligonucleotide
gccgggugccuuagcuucu

SEQ ID NO: 242389 - RNA, 19 nt, Artificial Sequence
  Description of Artificial Sequence: Synthetic oligonucleotide
ccgggugccuuagcuucuu

SEQ ID NO: 242390 - RNA, 19 nt, Artificial Sequence
  Description of Artificial Sequence: Synthetic oligonucleotide
ccccggcgauccaggucau

SEQ ID NO: 242391 - RNA, 19 nt, Artificial Sequence
  Description of Artificial Sequence: Synthetic oligonucleotide
auaaauacgucauagaaac

SEQ ID NO: 242392 - RNA, 19 nt, Artificial Sequence
  Description of Artificial Sequence: Synthetic oligonucleotide
auaaucuacacauugauuc

SEQ ID NO: 242393 - RNA, 19 nt, Artificial Sequence
  Description of Artificial Sequence: Synthetic oligonucleotide
uaaguagcuaacuuaaagg

SEQ ID NO: 242394 - RNA, 19 nt, Artificial Sequence
  Description of Artificial Sequence: Synthetic oligonucleotide
uguuuaaucuaacucuugg

SEQ ID NO: 242395 - RNA, 19 nt, Artificial Sequence
  Description of Artificial Sequence: Synthetic oligonucleotide
aaauacgucauagaaacag

SEQ ID NO: 242396 - RNA, 19 nt, Artificial Sequence
  Description of Artificial Sequence: Synthetic oligonucleotide
uucacaauucagcagagag

SEQ ID NO: 242397 - RNA, 19 nt, Artificial Sequence
  Description of Artificial Sequence: Synthetic oligonucleotide
aguacacacacacacacac

SEQ ID NO: 242398 - RNA, 19 nt, Artificial Sequence
  Description of Artificial Sequence: Synthetic oligonucleotide
ucagagauaagccaucaag

SEQ ID NO: 242399 - RNA, 19 nt, Artificial Sequence
  Description of Artificial Sequence: Synthetic oligonucleotide
auugcaaccccuucaaccc

SEQ ID NO: 242400 - RNA, 19 nt, Artificial Sequence
  Description of Artificial Sequence: Synthetic oligonucleotide
gagguuaugguuuaaggag

SEQ ID NO: 242401 - RNA, 19 nt, Artificial Sequence
  Description of Artificial Sequence: Synthetic oligonucleotide
uugaguuuaaauuuuauuu

SEQ ID NO: 242402 - RNA, 19 nt, Artificial Sequence
  Description of Artificial Sequence: Synthetic oligonucleotide
aauugauucaccauccauc

SEQ ID NO: 242403 - RNA, 19 nt, Artificial Sequence
  Description of Artificial Sequence: Synthetic oligonucleotide
ucaacuuauuagcaaagag

SEQ ID NO: 242404 - RNA, 19 nt, Artificial Sequence
  Description of Artificial Sequence: Synthetic oligonucleotide
aaaggcgcagauuuggguc

SEQ ID NO: 242405 - RNA, 19 nt, Artificial Sequence
  Description of Artificial Sequence: Synthetic oligonucleotide
cucguaaaggccuacagcc

SEQ ID NO: 242406 - RNA, 19 nt, Artificial Sequence
  Description of Artificial Sequence: Synthetic oligonucleotide
aucauuauaggacucaggu

SEQ ID NO: 242407 - RNA, 19 nt, Artificial Sequence
  Description of Artificial Sequence: Synthetic oligonucleotide
cauccgaccaucuucaggg

SEQ ID NO: 242408 - RNA, 19 nt, Artificial Sequence
  Description of Artificial Sequence: Synthetic oligonucleotide
cacaugagcacacacaugc

SEQ ID NO: 242409 - RNA, 19 nt, Artificial Sequence
  Description of Artificial Sequence: Synthetic oligonucleotide
gauaacagucauuuuacac

SEQ ID NO: 242410 - RNA, 19 nt, Artificial Sequence
  Description of Artificial Sequence: Synthetic oligonucleotide
uuacuuacuucccaguagc

SEQ ID NO: 242411 - RNA, 19 nt, Artificial Sequence
  Description of Artificial Sequence: Synthetic oligonucleotide
uuuaaucuaacucuugguu

SEQ ID NO: 242412 - RNA, 19 nt, Artificial Sequence
  Description of Artificial Sequence: Synthetic oligonucleotide
caugaguacacacacacac

SEQ ID NO: 242413 - RNA, 19 nt, Artificial Sequence
  Description of Artificial Sequence: Synthetic oligonucleotide
uauacugacuuacaauugu

SEQ ID NO: 242414 - RNA, 19 nt, Artificial Sequence
  Description of Artificial Sequence: Synthetic oligonucleotide
ugcaugaguacacacacac

SEQ ID NO: 242415 - RNA, 19 nt, Artificial Sequence
  Description of Artificial Sequence: Synthetic oligonucleotide
gucauuuuacaccacagug

SEQ ID NO: 242416 - RNA, 19 nt, Artificial Sequence
  Description of Artificial Sequence: Synthetic oligonucleotide
cugauaggcaguuauacug

SEQ ID NO: 242417 - RNA, 19 nt, Artificial Sequence
  Description of Artificial Sequence: Synthetic oligonucleotide
aauagcuggguaguauccc

SEQ ID NO: 242418 - RNA, 19 nt, Artificial Sequence
  Description of Artificial Sequence: Synthetic oligonucleotide
caagagucuaucuaggaac

SEQ ID NO: 242419 - RNA, 19 nt, Artificial Sequence
  Description of Artificial Sequence: Synthetic oligonucleotide
ugagguuaugguuuaagga

SEQ ID NO: 242420 - RNA, 19 nt, Artificial Sequence
  Description of Artificial Sequence: Synthetic oligonucleotide
aaugagucuuaaccacccc

SEQ ID NO: 242421 - RNA, 19 nt, Artificial Sequence
  Description of Artificial Sequence: Synthetic oligonucleotide
ugaguacacacacacacac

SEQ ID NO: 242422 - RNA, 19 nt, Artificial Sequence
  Description of Artificial Sequence: Synthetic oligonucleotide
aaaccugucaugggcaggc

SEQ ID NO: 242423 - RNA, 19 nt, Artificial Sequence
  Description of Artificial Sequence: Synthetic oligonucleotide
uacacacacacacacacac

SEQ ID NO: 242424 - RNA, 19 nt, Artificial Sequence
  Description of Artificial Sequence: Synthetic oligonucleotide
aauaaauacgucauagaaa

SEQ ID NO: 242425 - RNA, 19 nt, Artificial Sequence
  Description of Artificial Sequence: Synthetic oligonucleotide
gcaauuugaaugcacaggg

SEQ ID NO: 242426 - RNA, 19 nt, Artificial Sequence
  Description of Artificial Sequence: Synthetic oligonucleotide
acucguaaaggccuacagc

SEQ ID NO: 242427 - RNA, 19 nt, Artificial Sequence
  Description of Artificial Sequence: Synthetic oligonucleotide
gauuaugcagccugccugg

SEQ ID NO: 242428 - RNA, 19 nt, Artificial Sequence
  Description of Artificial Sequence: Synthetic oligonucleotide
auaucuuaguagugguagc

SEQ ID NO: 242429 - RNA, 19 nt, Artificial Sequence
  Description of Artificial Sequence: Synthetic oligonucleotide
aaacuaaagccagauacca

SEQ ID NO: 242430 - RNA, 19 nt, Artificial Sequence
  Description of Artificial Sequence: Synthetic oligonucleotide
cacagaacagacaucgagg

SEQ ID NO: 242431 - RNA, 19 nt, Artificial Sequence
  Description of Artificial Sequence: Synthetic oligonucleotide
aguuguaagucacaaacau

SEQ ID NO: 242432 - RNA, 19 nt, Artificial Sequence
  Description of Artificial Sequence: Synthetic oligonucleotide
ucuaucuaggaacaaggaa

SEQ ID NO: 242433 - RNA, 19 nt, Artificial Sequence
  Description of Artificial Sequence: Synthetic oligonucleotide
cauaucuuaguagugguag

SEQ ID NO: 242434 - RNA, 19 nt, Artificial Sequence
  Description of Artificial Sequence: Synthetic oligonucleotide
acgucauagaaacagccag

SEQ ID NO: 242435 - RNA, 19 nt, Artificial Sequence
  Description of Artificial Sequence: Synthetic oligonucleotide
aaauuggacagcugguaga

SEQ ID NO: 242436 - RNA, 19 nt, Artificial Sequence
  Description of Artificial Sequence: Synthetic oligonucleotide
aguugaaugcacagaaagc

SEQ ID NO: 242437 - RNA, 19 nt, Artificial Sequence
  Description of Artificial Sequence: Synthetic oligonucleotide
uacauauccggcuucacaa

SEQ ID NO: 242438 - RNA, 19 nt, Artificial Sequence
  Description of Artificial Sequence: Synthetic oligonucleotide
ggaacaagagucuaucuag

SEQ ID NO: 242439 - RNA, 19 nt, Artificial Sequence
  Description of Artificial Sequence: Synthetic oligonucleotide
auacgucauagaaacagcc

SEQ ID NO: 242440 - RNA, 19 nt, Artificial Sequence
  Description of Artificial Sequence: Synthetic oligonucleotide
agauuaugcagccugccug

SEQ ID NO: 242441 - RNA, 19 nt, Artificial Sequence
  Description of Artificial Sequence: Synthetic oligonucleotide
uauacuuaaguagcuaacu

SEQ ID NO: 242442 - RNA, 19 nt, Artificial Sequence
  Description of Artificial Sequence: Synthetic oligonucleotide
aguaucuuuaagccaagga

SEQ ID NO: 242443 - RNA, 19 nt, Artificial Sequence
  Description of Artificial Sequence: Synthetic oligonucleotide
ugcggagagagcaaccuag

SEQ ID NO: 242444 - RNA, 19 nt, Artificial Sequence
  Description of Artificial Sequence: Synthetic oligonucleotide
aaccuaguugaaugcacag

SEQ ID NO: 242445 - RNA, 19 nt, Artificial Sequence
  Description of Artificial Sequence: Synthetic oligonucleotide
guaucuuuaagccaaggaa

SEQ ID NO: 242446 - RNA, 19 nt, Artificial Sequence
  Description of Artificial Sequence: Synthetic oligonucleotide
ugauaggcaguuauacuga

SEQ ID NO: 242447 - RNA, 19 nt, Artificial Sequence
  Description of Artificial Sequence: Synthetic oligonucleotide
ugaccaauaaauaguccac

SEQ ID NO: 242448 - RNA, 19 nt, Artificial Sequence
  Description of Artificial Sequence: Synthetic oligonucleotide
gaguuacacaaccagauaa

SEQ ID NO: 242449 - RNA, 19 nt, Artificial Sequence
  Description of Artificial Sequence: Synthetic oligonucleotide
guuacuuacuucccaguag

SEQ ID NO: 242450 - RNA, 19 nt, Artificial Sequence
  Description of Artificial Sequence: Synthetic oligonucleotide
uacccugaguuacacaacc

SEQ ID NO: 242451 - RNA, 19 nt, Artificial Sequence
  Description of Artificial Sequence: Synthetic oligonucleotide
gagacacugaugcuugggg

SEQ ID NO: 242452 - RNA, 19 nt, Artificial Sequence
  Description of Artificial Sequence: Synthetic oligonucleotide
aagagucgugagcaguggg

SEQ ID NO: 242453 - RNA, 19 nt, Artificial Sequence
  Description of Artificial Sequence: Synthetic oligonucleotide
uccggcuucacaauucagc

SEQ ID NO: 242454 - RNA, 19 nt, Artificial Sequence
  Description of Artificial Sequence: Synthetic oligonucleotide
gugguuauccauugcaacc

SEQ ID NO: 242455 - RNA, 19 nt, Artificial Sequence
  Description of Artificial Sequence: Synthetic oligonucleotide
ggaacaaggaauguaaagc

SEQ ID NO: 242456 - RNA, 19 nt, Artificial Sequence
  Description of Artificial Sequence: Synthetic oligonucleotide
ucuaacucuugguuaauuc

SEQ ID NO: 242457 - RNA, 19 nt, Artificial Sequence
  Description of Artificial Sequence: Synthetic oligonucleotide
cuucaacccaccuggaccc

SEQ ID NO: 242458 - RNA, 19 nt, Artificial Sequence
  Description of Artificial Sequence: Synthetic oligonucleotide
uguaugucccuuucguccc

SEQ ID NO: 242459 - RNA, 19 nt, Artificial Sequence
  Description of Artificial Sequence: Synthetic oligonucleotide
uuacaauuguucuguuugc

SEQ ID NO: 242460 - RNA, 19 nt, Artificial Sequence
  Description of Artificial Sequence: Synthetic oligonucleotide
aguaugagguccccucucg

SEQ ID NO: 242461 - RNA, 19 nt, Artificial Sequence
  Description of Artificial Sequence: Synthetic oligonucleotide
uucagaccggccuugaggu

SEQ ID NO: 242462 - RNA, 19 nt, Artificial Sequence
  Description of Artificial Sequence: Synthetic oligonucleotide
uaugguuuaaggagacacu

SEQ ID NO: 242463 - RNA, 19 nt, Artificial Sequence
  Description of Artificial Sequence: Synthetic oligonucleotide
uacucguaaaggccuacag

SEQ ID NO: 242464 - RNA, 19 nt, Artificial Sequence
  Description of Artificial Sequence: Synthetic oligonucleotide
acaaggaauguaaagccuc

SEQ ID NO: 242465 - RNA, 19 nt, Artificial Sequence
  Description of Artificial Sequence: Synthetic oligonucleotide
ugucaugaugcucucucug

SEQ ID NO: 242466 - RNA, 19 nt, Artificial Sequence
  Description of Artificial Sequence: Synthetic oligonucleotide
uccuagaaaaggaccagac

SEQ ID NO: 242467 - RNA, 19 nt, Artificial Sequence
  Description of Artificial Sequence: Synthetic oligonucleotide
aguuacacaaccagauaac

SEQ ID NO: 242468 - RNA, 19 nt, Artificial Sequence
  Description of Artificial Sequence: Synthetic oligonucleotide
auugauuccuagaaaagga

SEQ ID NO: 242469 - RNA, 19 nt, Artificial Sequence
  Description of Artificial Sequence: Synthetic oligonucleotide
uuuuaguuguaagucacaa

SEQ ID NO: 242470 - RNA, 19 nt, Artificial Sequence
  Description of Artificial Sequence: Synthetic oligonucleotide
cauuuuacaccacagugca

SEQ ID NO: 242471 - RNA, 19 nt, Artificial Sequence
  Description of Artificial Sequence: Synthetic oligonucleotide
uacgucauagaaacagcca

SEQ ID NO: 242472 - RNA, 19 nt, Artificial Sequence
  Description of Artificial Sequence: Synthetic oligonucleotide
cacacacacacacacacac

SEQ ID NO: 242473 - RNA, 19 nt, Artificial Sequence
  Description of Artificial Sequence: Synthetic oligonucleotide
ugaauagcuggguaguauc

SEQ ID NO: 242474 - RNA, 19 nt, Artificial Sequence
  Description of Artificial Sequence: Synthetic oligonucleotide
cacacacacacacacacug

SEQ ID NO: 242475 - RNA, 19 nt, Artificial Sequence
  Description of Artificial Sequence: Synthetic oligonucleotide
agaacagacaucgagggau

SEQ ID NO: 242476 - RNA, 19 nt, Artificial Sequence
  Description of Artificial Sequence: Synthetic oligonucleotide
gaugcuuuguuucaacuua

SEQ ID NO: 242477 - RNA, 19 nt, Artificial Sequence
  Description of Artificial Sequence: Synthetic oligonucleotide
uaacucuugguuaauucua

SEQ ID NO: 242478 - RNA, 19 nt, Artificial Sequence
  Description of Artificial Sequence: Synthetic oligonucleotide
aauaguccacugccucaac

SEQ ID NO: 242479 - RNA, 19 nt, Artificial Sequence
  Description of Artificial Sequence: Synthetic oligonucleotide
auuauggccaaccacucua

SEQ ID NO: 242480 - RNA, 19 nt, Artificial Sequence
  Description of Artificial Sequence: Synthetic oligonucleotide
ugguuauccauugcaaccc

SEQ ID NO: 242481 - RNA, 19 nt, Artificial Sequence
  Description of Artificial Sequence: Synthetic oligonucleotide
uaucuuaguagugguagca

SEQ ID NO: 242482 - RNA, 19 nt, Artificial Sequence
  Description of Artificial Sequence: Synthetic oligonucleotide
cacauugauuccuagaaaa

SEQ ID NO: 242483 - RNA, 19 nt, Artificial Sequence
  Description of Artificial Sequence: Synthetic oligonucleotide
uucucaugcaugaguacac

SEQ ID NO: 242484 - RNA, 19 nt, Artificial Sequence
  Description of Artificial Sequence: Synthetic oligonucleotide
uuuaguuguaagucacaaa

SEQ ID NO: 242485 - RNA, 19 nt, Artificial Sequence
  Description of Artificial Sequence: Synthetic oligonucleotide
ucuaaauggcugaugcuuu

SEQ ID NO: 242486 - RNA, 19 nt, Artificial Sequence
  Description of Artificial Sequence: Synthetic oligonucleotide
cuaucuaggaacaaggaau

SEQ ID NO: 242487 - RNA, 19 nt, Artificial Sequence
  Description of Artificial Sequence: Synthetic oligonucleotide
ucaauugauucaccaucca

SEQ ID NO: 242488 - RNA, 19 nt, Artificial Sequence
  Description of Artificial Sequence: Synthetic oligonucleotide
ggguauugcccauaaacag

SEQ ID NO: 242489 - RNA, 19 nt, Artificial Sequence
  Description of Artificial Sequence: Synthetic oligonucleotide
acuuaaguagcuaacuuaa

SEQ ID NO: 242490 - RNA, 19 nt, Artificial Sequence
  Description of Artificial Sequence: Synthetic oligonucleotide
acaagagucuaucuaggaa

SEQ ID NO: 242491 - RNA, 19 nt, Artificial Sequence
  Description of Artificial Sequence: Synthetic oligonucleotide
ucaaacacagcugggcuga

SEQ ID NO: 242492 - RNA, 19 nt, Artificial Sequence
  Description of Artificial Sequence: Synthetic oligonucleotide
gucaauugauucaccaucc

SEQ ID NO: 242493 - RNA, 19 nt, Artificial Sequence
  Description of Artificial Sequence: Synthetic oligonucleotide
gagucuaucuaggaacaag

SEQ ID NO: 242494 - RNA, 19 nt, Artificial Sequence
  Description of Artificial Sequence: Synthetic oligonucleotide
ucugcguacugcuggagcu

SEQ ID NO: 242495 - RNA, 19 nt, Artificial Sequence
  Description of Artificial Sequence: Synthetic oligonucleotide
uaaauacgucauagaaaca

SEQ ID NO: 242496 - RNA, 19 nt, Artificial Sequence
  Description of Artificial Sequence: Synthetic oligonucleotide
cacacacacacacacuggc

SEQ ID NO: 242497 - RNA, 19 nt, Artificial Sequence
  Description of Artificial Sequence: Synthetic oligonucleotide
ugguuugccagucgcccgg

SEQ ID NO: 242498 - RNA, 19 nt, Artificial Sequence
  Description of Artificial Sequence: Synthetic oligonucleotide
uucaacuuauuagcaaaga

SEQ ID NO: 242499 - RNA, 19 nt, Artificial Sequence
  Description of Artificial Sequence: Synthetic oligonucleotide
gagggauucuucuggugag

SEQ ID NO: 242500 - RNA, 19 nt, Artificial Sequence
  Description of Artificial Sequence: Synthetic oligonucleotide
aacagggaauuauccccag

SEQ ID NO: 242501 - RNA, 19 nt, Artificial Sequence
  Description of Artificial Sequence: Synthetic oligonucleotide
ggagugaauagcuggguag

SEQ ID NO: 242502 - RNA, 19 nt, Artificial Sequence
  Description of Artificial Sequence: Synthetic oligonucleotide
gguauugcccauaaacagg

SEQ ID NO: 242503 - RNA, 19 nt, Artificial Sequence
  Description of Artificial Sequence: Synthetic oligonucleotide
agcaaugaaugucaggcuu

SEQ ID NO: 242504 - RNA, 19 nt, Artificial Sequence
  Description of Artificial Sequence: Synthetic oligonucleotide
acucagguacucguaaagg

SEQ ID NO: 242505 - RNA, 19 nt, Artificial Sequence
  Description of Artificial Sequence: Synthetic oligonucleotide
auacuuaaguagcuaacuu

SEQ ID NO: 242506 - RNA, 19 nt, Artificial Sequence
  Description of Artificial Sequence: Synthetic oligonucleotide
cauugcuuguggaugcaag

SEQ ID NO: 242507 - RNA, 19 nt, Artificial Sequence
  Description of Artificial Sequence: Synthetic oligonucleotide
gaauagcuggguaguaucc

SEQ ID NO: 242508 - RNA, 19 nt, Artificial Sequence
  Description of Artificial Sequence: Synthetic oligonucleotide
aagagucuaucuaggaaca

SEQ ID NO: 242509 - RNA, 19 nt, Artificial Sequence
  Description of Artificial Sequence: Synthetic oligonucleotide
agagucgugagcagugggc

SEQ ID NO: 242510 - RNA, 19 nt, Artificial Sequence
  Description of Artificial Sequence: Synthetic oligonucleotide
gauucaccauccaucuggg

SEQ ID NO: 242511 - RNA, 19 nt, Artificial Sequence
  Description of Artificial Sequence: Synthetic oligonucleotide
aaacagggaauuaucccca

SEQ ID NO: 242512 - RNA, 19 nt, Artificial Sequence
  Description of Artificial Sequence: Synthetic oligonucleotide
ggucaauugauucaccauc

SEQ ID NO: 242513 - RNA, 19 nt, Artificial Sequence
  Description of Artificial Sequence: Synthetic oligonucleotide
uaauucuaauucucuuuuc

SEQ ID NO: 242514 - RNA, 19 nt, Artificial Sequence
  Description of Artificial Sequence: Synthetic oligonucleotide
cugacugcuugcuaccagc

SEQ ID NO: 242515 - RNA, 19 nt, Artificial Sequence
  Description of Artificial Sequence: Synthetic oligonucleotide
ucuaggaacaaggaaugua

SEQ ID NO: 242516 - RNA, 19 nt, Artificial Sequence
  Description of Artificial Sequence: Synthetic oligonucleotide
gauaggcaguuauacugac

SEQ ID NO: 242517 - RNA, 19 nt, Artificial Sequence
  Description of Artificial Sequence: Synthetic oligonucleotide
ucgucccacggauucaucc

SEQ ID NO: 242518 - RNA, 19 nt, Artificial Sequence
  Description of Artificial Sequence: Synthetic oligonucleotide
agauaacagucauuuuaca

SEQ ID NO: 242519 - RNA, 19 nt, Artificial Sequence
  Description of Artificial Sequence: Synthetic oligonucleotide
guagucacuggaaacacca

SEQ ID NO: 242520 - RNA, 19 nt, Artificial Sequence
  Description of Artificial Sequence: Synthetic oligonucleotide
agcaaaagauccguccauc

SEQ ID NO: 242521 - RNA, 19 nt, Artificial Sequence
  Description of Artificial Sequence: Synthetic oligonucleotide
ggaauuauccccagccugg

SEQ ID NO: 242522 - RNA, 19 nt, Artificial Sequence
  Description of Artificial Sequence: Synthetic oligonucleotide
gagcaaccuaguugaaugc

SEQ ID NO: 242523 - RNA, 19 nt, Artificial Sequence
  Description of Artificial Sequence: Synthetic oligonucleotide
aguugccugcccuacugag

SEQ ID NO: 242524 - RNA, 19 nt, Artificial Sequence
  Description of Artificial Sequence: Synthetic oligonucleotide
ucguaaaggccuacagcca

SEQ ID NO: 242525 - RNA, 19 nt, Artificial Sequence
  Description of Artificial Sequence: Synthetic oligonucleotide
uuugccagucgcccggaca

SEQ ID NO: 242526 - RNA, 19 nt, Artificial Sequence
  Description of Artificial Sequence: Synthetic oligonucleotide
gaauuauccccagccuggg

SEQ ID NO: 242527 - RNA, 19 nt, Artificial Sequence
  Description of Artificial Sequence: Synthetic oligonucleotide
ggucauguagaaaccauag

SEQ ID NO: 242528 - RNA, 19 nt, Artificial Sequence
  Description of Artificial Sequence: Synthetic oligonucleotide
auuugaaugcacaggggca

SEQ ID NO: 242529 - RNA, 19 nt, Artificial Sequence
  Description of Artificial Sequence: Synthetic oligonucleotide
agacacugaugcuugggga

SEQ ID NO: 242530 - RNA, 19 nt, Artificial Sequence
  Description of Artificial Sequence: Synthetic oligonucleotide
cucaugcaugaguacacac

SEQ ID NO: 242531 - RNA, 19 nt, Artificial Sequence
  Description of Artificial Sequence: Synthetic oligonucleotide
aauuauccccagccuggga

SEQ ID NO: 242532 - RNA, 19 nt, Artificial Sequence
  Description of Artificial Sequence: Synthetic oligonucleotide
ugacugcuugcuaccagca

SEQ ID NO: 242533 - RNA, 19 nt, Artificial Sequence
  Description of Artificial Sequence: Synthetic oligonucleotide
gaagagucgugagcagugg

SEQ ID NO: 242534 - RNA, 19 nt, Artificial Sequence
  Description of Artificial Sequence: Synthetic oligonucleotide
uugaggugcugauuuccug

SEQ ID NO: 242535 - RNA, 19 nt, Artificial Sequence
  Description of Artificial Sequence: Synthetic oligonucleotide
guagcuaacuuaaaggggu

SEQ ID NO: 242536 - RNA, 19 nt, Artificial Sequence
  Description of Artificial Sequence: Synthetic oligonucleotide
uccgaccaucuucaggggc

SEQ ID NO: 242537 - RNA, 19 nt, Artificial Sequence
  Description of Artificial Sequence: Synthetic oligonucleotide
acacacacacacacuggcc

SEQ ID NO: 242538 - RNA, 19 nt, Artificial Sequence
  Description of Artificial Sequence: Synthetic oligonucleotide
uauccauugcaaccccuuc

SEQ ID NO: 242539 - RNA, 19 nt, Artificial Sequence
  Description of Artificial Sequence: Synthetic oligonucleotide
guagccguggaagaggaac

SEQ ID NO: 242540 - RNA, 19 nt, Artificial Sequence
  Description of Artificial Sequence: Synthetic oligonucleotide
guggccuuagugguuaucc

SEQ ID NO: 242541 - RNA, 19 nt, Artificial Sequence
  Description of Artificial Sequence: Synthetic oligonucleotide
cuggugcggauguaugucc

SEQ ID NO: 242542 - RNA, 19 nt, Artificial Sequence
  Description of Artificial Sequence: Synthetic oligonucleotide
auauccggcuucacaauuc

SEQ ID NO: 242543 - RNA, 19 nt, Artificial Sequence
  Description of Artificial Sequence: Synthetic oligonucleotide
gaaaaggaccagacagaag

SEQ ID NO: 242544 - RNA, 19 nt, Artificial Sequence
  Description of Artificial Sequence: Synthetic oligonucleotide
ugugagaagugggagugaa

SEQ ID NO: 242545 - RNA, 19 nt, Artificial Sequence
  Description of Artificial Sequence: Synthetic oligonucleotide
uguggagguuacuuacuuc

SEQ ID NO: 242546 - RNA, 19 nt, Artificial Sequence
  Description of Artificial Sequence: Synthetic oligonucleotide
uugauucaccauccaucug

SEQ ID NO: 242547 - RNA, 19 nt, Artificial Sequence
  Description of Artificial Sequence: Synthetic oligonucleotide
uggugcggauguauguccc

SEQ ID NO: 242548 - RNA, 19 nt, Artificial Sequence
  Description of Artificial Sequence: Synthetic oligonucleotide
acggauucaucccugucau

SEQ ID NO: 242549 - RNA, 19 nt, Artificial Sequence
  Description of Artificial Sequence: Synthetic oligonucleotide
aguaucccguggcacagga

SEQ ID NO: 242550 - RNA, 19 nt, Artificial Sequence
  Description of Artificial Sequence: Synthetic oligonucleotide
agggaauuauccccagccu

SEQ ID NO: 242551 - RNA, 19 nt, Artificial Sequence
  Description of Artificial Sequence: Synthetic oligonucleotide
ccuucaacccaccuggacc

SEQ ID NO: 242552 - RNA, 19 nt, Artificial Sequence
  Description of Artificial Sequence: Synthetic oligonucleotide
acaguaugagguccccucu

SEQ ID NO: 242553 - RNA, 19 nt, Artificial Sequence
  Description of Artificial Sequence: Synthetic oligonucleotide
cugggaacggcagccaucc

SEQ ID NO: 242554 - RNA, 19 nt, Artificial Sequence
  Description of Artificial Sequence: Synthetic oligonucleotide
uucagagauaagccaucaa

SEQ ID NO: 242555 - RNA, 19 nt, Artificial Sequence
  Description of Artificial Sequence: Synthetic oligonucleotide
uuccuagaaaaggaccaga

SEQ ID NO: 242556 - RNA, 19 nt, Artificial Sequence
  Description of Artificial Sequence: Synthetic oligonucleotide
aguuucaauuucuguggaa

SEQ ID NO: 242557 - RNA, 19 nt, Artificial Sequence
  Description of Artificial Sequence: Synthetic oligonucleotide
aacccagcagcuacauauc

SEQ ID NO: 242558 - RNA, 19 nt, Artificial Sequence
  Description of Artificial Sequence: Synthetic oligonucleotide
agguuaugguuuaaggaga

SEQ ID NO: 242559 - RNA, 19 nt, Artificial Sequence
  Description of Artificial Sequence: Synthetic oligonucleotide
aguucuggcgggauucccg

SEQ ID NO: 242560 - RNA, 19 nt, Artificial Sequence
  Description of Artificial Sequence: Synthetic oligonucleotide
cacacacacacacuggcca

SEQ ID NO: 242561 - RNA, 19 nt, Artificial Sequence
  Description of Artificial Sequence: Synthetic oligonucleotide
gaaugcacagaaagccaug

SEQ ID NO: 242562 - RNA, 19 nt, Artificial Sequence
  Description of Artificial Sequence: Synthetic oligonucleotide
ggcaguuauacugacuuac

SEQ ID NO: 242563 - RNA, 19 nt, Artificial Sequence
  Description of Artificial Sequence: Synthetic oligonucleotide
caaccacucuaggaggugg

SEQ ID NO: 242564 - RNA, 19 nt, Artificial Sequence
  Description of Artificial Sequence: Synthetic oligonucleotide
ggauucaucccugucauga

SEQ ID NO: 242565 - RNA, 19 nt, Artificial Sequence
  Description of Artificial Sequence: Synthetic oligonucleotide
cugcccuacugagagagag

SEQ ID NO: 242566 - RNA, 19 nt, Artificial Sequence
  Description of Artificial Sequence: Synthetic oligonucleotide
uuuacaccacagugcacau

SEQ ID NO: 242567 - RNA, 19 nt, Artificial Sequence
  Description of Artificial Sequence: Synthetic oligonucleotide
gggaaaggcgcagauuugg

SEQ ID NO: 242568 - RNA, 19 nt, Artificial Sequence
  Description of Artificial Sequence: Synthetic oligonucleotide
gugaggacuucagagauaa

SEQ ID NO: 242569 - RNA, 19 nt, Artificial Sequence
  Description of Artificial Sequence: Synthetic oligonucleotide
cacggauucaucccuguca

SEQ ID NO: 242570 - RNA, 19 nt, Artificial Sequence
  Description of Artificial Sequence: Synthetic oligonucleotide
uuaugcagccugccuggcu

SEQ ID NO: 242571 - RNA, 19 nt, Artificial Sequence
  Description of Artificial Sequence: Synthetic oligonucleotide
caaccuaguugaaugcaca

SEQ ID NO: 242572 - RNA, 19 nt, Artificial Sequence
  Description of Artificial Sequence: Synthetic oligonucleotide
ucucaugcaugaguacaca

SEQ ID NO: 242573 - RNA, 19 nt, Artificial Sequence
  Description of Artificial Sequence: Synthetic oligonucleotide
aagaggguggacacugccu

SEQ ID NO: 242574 - RNA, 19 nt, Artificial Sequence
  Description of Artificial Sequence: Synthetic oligonucleotide
ggagggauucuucugguga

SEQ ID NO: 242575 - RNA, 19 nt, Artificial Sequence
  Description of Artificial Sequence: Synthetic oligonucleotide
uuauaggacucagguacuc

SEQ ID NO: 242576 - RNA, 19 nt, Artificial Sequence
  Description of Artificial Sequence: Synthetic oligonucleotide
auuuuacaccacagugcac

SEQ ID NO: 242577 - RNA, 19 nt, Artificial Sequence
  Description of Artificial Sequence: Synthetic oligonucleotide
ugguccucuaagccaggca

SEQ ID NO: 242578 - RNA, 19 nt, Artificial Sequence
  Description of Artificial Sequence: Synthetic oligonucleotide
agcacacuagaugacuaca

SEQ ID NO: 242579 - RNA, 19 nt, Artificial Sequence
  Description of Artificial Sequence: Synthetic oligonucleotide
aucgagggauuacagcaau

SEQ ID NO: 242580 - RNA, 19 nt, Artificial Sequence
  Description of Artificial Sequence: Synthetic oligonucleotide
auuauaggacucagguacu

SEQ ID NO: 242581 - RNA, 19 nt, Artificial Sequence
  Description of Artificial Sequence: Synthetic oligonucleotide
cagaccggccuugaggugc

SEQ ID NO: 242582 - RNA, 19 nt, Artificial Sequence
  Description of Artificial Sequence: Synthetic oligonucleotide
acacacacacacacacugg

SEQ ID NO: 242583 - RNA, 19 nt, Artificial Sequence
  Description of Artificial Sequence: Synthetic oligonucleotide
gguaguaucccguggcaca

SEQ ID NO: 242584 - RNA, 19 nt, Artificial Sequence
  Description of Artificial Sequence: Synthetic oligonucleotide
gaaugcacaggggcagaag

SEQ ID NO: 242585 - RNA, 19 nt, Artificial Sequence
  Description of Artificial Sequence: Synthetic oligonucleotide
agcaaccuaguugaaugca

SEQ ID NO: 242586 - RNA, 19 nt, Artificial Sequence
  Description of Artificial Sequence: Synthetic oligonucleotide
agcccuucggggucagggg

SEQ ID NO: 242587 - RNA, 19 nt, Artificial Sequence
  Description of Artificial Sequence: Synthetic oligonucleotide
uagcuggguaguaucccgu

SEQ ID NO: 242588 - RNA, 19 nt, Artificial Sequence
  Description of Artificial Sequence: Synthetic oligonucleotide
uggccuuagugguuaucca

SEQ ID NO: 242589 - RNA, 19 nt, Artificial Sequence
  Description of Artificial Sequence: Synthetic oligonucleotide
agcaaauuggacagcuggu

SEQ ID NO: 242590 - RNA, 19 nt, Artificial Sequence
  Description of Artificial Sequence: Synthetic oligonucleotide
cagcacacuagaugacuac

SEQ ID NO: 242591 - RNA, 19 nt, Artificial Sequence
  Description of Artificial Sequence: Synthetic oligonucleotide
guguuuaaucuaacucuug

SEQ ID NO: 242592 - RNA, 19 nt, Artificial Sequence
  Description of Artificial Sequence: Synthetic oligonucleotide
cacagguguuuaaucuaac

SEQ ID NO: 242593 - RNA, 19 nt, Artificial Sequence
  Description of Artificial Sequence: Synthetic oligonucleotide
agacaucgagggauuacag

SEQ ID NO: 242594 - RNA, 19 nt, Artificial Sequence
  Description of Artificial Sequence: Synthetic oligonucleotide
acauauccggcuucacaau

SEQ ID NO: 242595 - RNA, 19 nt, Artificial Sequence
  Description of Artificial Sequence: Synthetic oligonucleotide
uguggugcggagagagcaa

SEQ ID NO: 242596 - RNA, 19 nt, Artificial Sequence
  Description of Artificial Sequence: Synthetic oligonucleotide
cuuaaguagcuaacuuaaa

SEQ ID NO: 242597 - RNA, 19 nt, Artificial Sequence
  Description of Artificial Sequence: Synthetic oligonucleotide
uggugcggagagagcaacc

SEQ ID NO: 242598 - RNA, 19 nt, Artificial Sequence
  Description of Artificial Sequence: Synthetic oligonucleotide
agcuggguaguaucccgug

SEQ ID NO: 242599 - RNA, 19 nt, Artificial Sequence
  Description of Artificial Sequence: Synthetic oligonucleotide
gagauuaugcagccugccu

SEQ ID NO: 242600 - RNA, 19 nt, Artificial Sequence
  Description of Artificial Sequence: Synthetic oligonucleotide
caguagucacuggaaacac

SEQ ID NO: 242601 - RNA, 19 nt, Artificial Sequence
  Description of Artificial Sequence: Synthetic oligonucleotide
guaaaggccuacagccaag

SEQ ID NO: 242602 - RNA, 19 nt, Artificial Sequence
  Description of Artificial Sequence: Synthetic oligonucleotide
ccuaguugaaugcacagaa

SEQ ID NO: 242603 - RNA, 19 nt, Artificial Sequence
  Description of Artificial Sequence: Synthetic oligonucleotide
accuaguugaaugcacaga

SEQ ID NO: 242604 - RNA, 19 nt, Artificial Sequence
  Description of Artificial Sequence: Synthetic oligonucleotide
ucgcccggacagcaaaaga

SEQ ID NO: 242605 - RNA, 19 nt, Artificial Sequence
  Description of Artificial Sequence: Synthetic oligonucleotide
augaguacacacacacaca

SEQ ID NO: 242606 - RNA, 19 nt, Artificial Sequence
  Description of Artificial Sequence: Synthetic oligonucleotide
cucccaucuaaauggcuga

SEQ ID NO: 242607 - RNA, 19 nt, Artificial Sequence
  Description of Artificial Sequence: Synthetic oligonucleotide
uagugguagcagagugccc

SEQ ID NO: 242608 - RNA, 19 nt, Artificial Sequence
  Description of Artificial Sequence: Synthetic oligonucleotide
aaaggaccagacagaagua

SEQ ID NO: 242609 - RNA, 19 nt, Artificial Sequence
  Description of Artificial Sequence: Synthetic oligonucleotide
uccguccaucacuggugcg

SEQ ID NO: 242610 - RNA, 19 nt, Artificial Sequence
  Description of Artificial Sequence: Synthetic oligonucleotide
gaggguggacacugccugc

SEQ ID NO: 242611 - RNA, 19 nt, Artificial Sequence
  Description of Artificial Sequence: Synthetic oligonucleotide
cuaguugaaugcacagaaa

SEQ ID NO: 242612 - RNA, 19 nt, Artificial Sequence
  Description of Artificial Sequence: Synthetic oligonucleotide
gcuaucucuccccagcaca

SEQ ID NO: 242613 - RNA, 19 nt, Artificial Sequence
  Description of Artificial Sequence: Synthetic oligonucleotide
ugccuccuccuccuccucc

SEQ ID NO: 242614 - RNA, 19 nt, Artificial Sequence
  Description of Artificial Sequence: Synthetic oligonucleotide
ugucaggcuuaaagauacu

SEQ ID NO: 242615 - RNA, 19 nt, Artificial Sequence
  Description of Artificial Sequence: Synthetic oligonucleotide
acacacacacacuggccaa

SEQ ID NO: 242616 - RNA, 19 nt, Artificial Sequence
  Description of Artificial Sequence: Synthetic oligonucleotide
ggaaaggcgcagauuuggg

SEQ ID NO: 242617 - RNA, 19 nt, Artificial Sequence
  Description of Artificial Sequence: Synthetic oligonucleotide
cuguggaaugagucuuaac

SEQ ID NO: 242618 - RNA, 19 nt, Artificial Sequence
  Description of Artificial Sequence: Synthetic oligonucleotide
gguuaugguuuaaggagac

SEQ ID NO: 242619 - RNA, 19 nt, Artificial Sequence
  Description of Artificial Sequence: Synthetic oligonucleotide
gggaacaagagucuaucua

SEQ ID NO: 242620 - RNA, 19 nt, Artificial Sequence
  Description of Artificial Sequence: Synthetic oligonucleotide
ggagguuacuuacuuccca

SEQ ID NO: 242621 - RNA, 19 nt, Artificial Sequence
  Description of Artificial Sequence: Synthetic oligonucleotide
uacugacugcuugcuacca

SEQ ID NO: 242622 - RNA, 19 nt, Artificial Sequence
  Description of Artificial Sequence: Synthetic oligonucleotide
cagacaucgagggauuaca

SEQ ID NO: 242623 - RNA, 19 nt, Artificial Sequence
  Description of Artificial Sequence: Synthetic oligonucleotide
uuucgucccacggauucau

SEQ ID NO: 242624 - RNA, 19 nt, Artificial Sequence
  Description of Artificial Sequence: Synthetic oligonucleotide
ugggagugaauagcugggu

SEQ ID NO: 242625 - RNA, 19 nt, Artificial Sequence
  Description of Artificial Sequence: Synthetic oligonucleotide
uccuccuccuccuccuccu

SEQ ID NO: 242626 - RNA, 19 nt, Artificial Sequence
  Description of Artificial Sequence: Synthetic oligonucleotide
gcacacuagaugacuacag

SEQ ID NO: 242627 - RNA, 19 nt, Artificial Sequence
  Description of Artificial Sequence: Synthetic oligonucleotide
ccugccauuauggccaacc

SEQ ID NO: 242628 - RNA, 19 nt, Artificial Sequence
  Description of Artificial Sequence: Synthetic oligonucleotide
aguguggccuuagugguua

SEQ ID NO: 242629 - RNA, 19 nt, Artificial Sequence
  Description of Artificial Sequence: Synthetic oligonucleotide
ucagaccggccuugaggug

SEQ ID NO: 242630 - RNA, 19 nt, Artificial Sequence
  Description of Artificial Sequence: Synthetic oligonucleotide
gcaugaagcucuuugggcu

SEQ ID NO: 242631 - RNA, 19 nt, Artificial Sequence
  Description of Artificial Sequence: Synthetic oligonucleotide
gaguacacacacacacaca

SEQ ID NO: 242632 - RNA, 19 nt, Artificial Sequence
  Description of Artificial Sequence: Synthetic oligonucleotide
aucccguggcacaggaggg

SEQ ID NO: 242633 - RNA, 19 nt, Artificial Sequence
  Description of Artificial Sequence: Synthetic oligonucleotide
guucuggcgggauucccga

SEQ ID NO: 242634 - RNA, 19 nt, Artificial Sequence
  Description of Artificial Sequence: Synthetic oligonucleotide
auaggcaguuauacugacu

SEQ ID NO: 242635 - RNA, 19 nt, Artificial Sequence
  Description of Artificial Sequence: Synthetic oligonucleotide
agaagaccccugggaacgg

SEQ ID NO: 242636 - RNA, 19 nt, Artificial Sequence
  Description of Artificial Sequence: Synthetic oligonucleotide
uucuggcgggauucccgag

SEQ ID NO: 242637 - RNA, 19 nt, Artificial Sequence
  Description of Artificial Sequence: Synthetic oligonucleotide
uuuuccugagaggccacuu

SEQ ID NO: 242638 - RNA, 19 nt, Artificial Sequence
  Description of Artificial Sequence: Synthetic oligonucleotide
gccucaacccagcagcuac

SEQ ID NO: 242639 - RNA, 19 nt, Artificial Sequence
  Description of Artificial Sequence: Synthetic oligonucleotide
ucgagggauuacagcaauu

SEQ ID NO: 242640 - RNA, 19 nt, Artificial Sequence
  Description of Artificial Sequence: Synthetic oligonucleotide
cuaauucucuuuuccuggu

SEQ ID NO: 242641 - RNA, 19 nt, Artificial Sequence
  Description of Artificial Sequence: Synthetic oligonucleotide
ccugcuuaguucaucauua

SEQ ID NO: 242642 - RNA, 19 nt, Artificial Sequence
  Description of Artificial Sequence: Synthetic oligonucleotide
gagugaauagcuggguagu

SEQ ID NO: 242643 - RNA, 19 nt, Artificial Sequence
  Description of Artificial Sequence: Synthetic oligonucleotide
ggacuggccuguaaaauca

SEQ ID NO: 242644 - RNA, 19 nt, Artificial Sequence
  Description of Artificial Sequence: Synthetic oligonucleotide
ccggacagcaaaagauccg

SEQ ID NO: 242645 - RNA, 19 nt, Artificial Sequence
  Description of Artificial Sequence: Synthetic oligonucleotide
gaacggcagccauccgacc

SEQ ID NO: 242646 - RNA, 19 nt, Artificial Sequence
  Description of Artificial Sequence: Synthetic oligonucleotide
cagcaauagagcccugcca

SEQ ID NO: 242647 - RNA, 19 nt, Artificial Sequence
  Description of Artificial Sequence: Synthetic oligonucleotide
aacagacaucgagggauua

SEQ ID NO: 242648 - RNA, 19 nt, Artificial Sequence
  Description of Artificial Sequence: Synthetic oligonucleotide
aggcgcagauuuggguccc

SEQ ID NO: 242649 - RNA, 19 nt, Artificial Sequence
  Description of Artificial Sequence: Synthetic oligonucleotide
acauaucuuaguaguggua

SEQ ID NO: 242650 - RNA, 19 nt, Artificial Sequence
  Description of Artificial Sequence: Synthetic oligonucleotide
caucgagggauuacagcaa

SEQ ID NO: 242651 - RNA, 19 nt, Artificial Sequence
  Description of Artificial Sequence: Synthetic oligonucleotide
cuccuccuccuccuccucc

SEQ ID NO: 242652 - RNA, 19 nt, Artificial Sequence
  Description of Artificial Sequence: Synthetic oligonucleotide
gaagaccccugggaacggc

SEQ ID NO: 242653 - RNA, 19 nt, Artificial Sequence
  Description of Artificial Sequence: Synthetic oligonucleotide
ccauccgaccaucuucagg

SEQ ID NO: 242654 - RNA, 19 nt, Artificial Sequence
  Description of Artificial Sequence: Synthetic oligonucleotide
gccacuuccccacaacaca

SEQ ID NO: 242655 - RNA, 19 nt, Artificial Sequence
  Description of Artificial Sequence: Synthetic oligonucleotide
ugcggauguaugucccuuu

SEQ ID NO: 242656 - RNA, 19 nt, Artificial Sequence
  Description of Artificial Sequence: Synthetic oligonucleotide
caauugauucaccauccau

SEQ ID NO: 242657 - RNA, 19 nt, Artificial Sequence
  Description of Artificial Sequence: Synthetic oligonucleotide
uucggggucaggggcuuug

SEQ ID NO: 242658 - RNA, 19 nt, Artificial Sequence
  Description of Artificial Sequence: Synthetic oligonucleotide
agagugcccaagccucccu

SEQ ID NO: 242659 - RNA, 19 nt, Artificial Sequence
  Description of Artificial Sequence: Synthetic oligonucleotide
agugaauagcuggguagua

SEQ ID NO: 242660 - RNA, 19 nt, Artificial Sequence
  Description of Artificial Sequence: Synthetic oligonucleotide
cuggaucacccagccacag

SEQ ID NO: 242661 - RNA, 19 nt, Artificial Sequence
  Description of Artificial Sequence: Synthetic oligonucleotide
guacacacacacacacaca

SEQ ID NO: 242662 - RNA, 19 nt, Artificial Sequence
  Description of Artificial Sequence: Synthetic oligonucleotide
ccuagaaaaggaccagaca

SEQ ID NO: 242663 - RNA, 19 nt, Artificial Sequence
  Description of Artificial Sequence: Synthetic oligonucleotide
ggaucacccagccacagau

SEQ ID NO: 242664 - RNA, 19 nt, Artificial Sequence
  Description of Artificial Sequence: Synthetic oligonucleotide
acacacacacacacacaca

SEQ ID NO: 242665 - RNA, 19 nt, Artificial Sequence
  Description of Artificial Sequence: Synthetic oligonucleotide
acacacacacacacacacu

SEQ ID NO: 242666 - RNA, 19 nt, Artificial Sequence
  Description of Artificial Sequence: Synthetic oligonucleotide
agagucuaucuaggaacaa

SEQ ID NO: 242667 - RNA, 19 nt, Artificial Sequence
  Description of Artificial Sequence: Synthetic oligonucleotide
ccagccuacccugaguuac

SEQ ID NO: 242668 - RNA, 19 nt, Artificial Sequence
  Description of Artificial Sequence: Synthetic oligonucleotide
gaguggggaacuucguuuu

SEQ ID NO: 242669 - RNA, 19 nt, Artificial Sequence
  Description of Artificial Sequence: Synthetic oligonucleotide
ggcgggauucccgagcagc

SEQ ID NO: 242670 - RNA, 19 nt, Artificial Sequence
  Description of Artificial Sequence: Synthetic oligonucleotide
gucgcccggacagcaaaag

SEQ ID NO: 242671 - RNA, 19 nt, Artificial Sequence
  Description of Artificial Sequence: Synthetic oligonucleotide
cugccauuauggccaacca

SEQ ID NO: 242672 - RNA, 19 nt, Artificial Sequence
  Description of Artificial Sequence: Synthetic oligonucleotide
caaugaaugucaggcuuaa

SEQ ID NO: 242673 - RNA, 19 nt, Artificial Sequence
  Description of Artificial Sequence: Synthetic oligonucleotide
aguuccaaauguggagguu

SEQ ID NO: 242674 - RNA, 19 nt, Artificial Sequence
  Description of Artificial Sequence: Synthetic oligonucleotide
uucgucccacggauucauc

SEQ ID NO: 242675 - RNA, 19 nt, Artificial Sequence
  Description of Artificial Sequence: Synthetic oligonucleotide
ccguccaucacuggugcgg

SEQ ID NO: 242676 - RNA, 19 nt, Artificial Sequence
  Description of Artificial Sequence: Synthetic oligonucleotide
cuggcgggauucccgagca

SEQ ID NO: 242677 - RNA, 19 nt, Artificial Sequence
  Description of Artificial Sequence: Synthetic oligonucleotide
agaccccugggaacggcag

SEQ ID NO: 242678 - RNA, 19 nt, Artificial Sequence
  Description of Artificial Sequence: Synthetic oligonucleotide
guacucguaaaggccuaca

SEQ ID NO: 242679 - RNA, 19 nt, Artificial Sequence
  Description of Artificial Sequence: Synthetic oligonucleotide
gauucccgagcagcggcca

SEQ ID NO: 242680 - RNA, 19 nt, Artificial Sequence
  Description of Artificial Sequence: Synthetic oligonucleotide
guggugcggagagagcaac

SEQ ID NO: 242681 - RNA, 19 nt, Artificial Sequence
  Description of Artificial Sequence: Synthetic oligonucleotide
uguggccuuagugguuauc

SEQ ID NO: 242682 - RNA, 19 nt, Artificial Sequence
  Description of Artificial Sequence: Synthetic oligonucleotide
guaugucccuuucguccca

SEQ ID NO: 242683 - RNA, 19 nt, Artificial Sequence
  Description of Artificial Sequence: Synthetic oligonucleotide
caucugcguacugcuggag

SEQ ID NO: 242684 - RNA, 19 nt, Artificial Sequence
  Description of Artificial Sequence: Synthetic oligonucleotide
gcaguuauacugacuuaca

SEQ ID NO: 242685 - RNA, 19 nt, Artificial Sequence
  Description of Artificial Sequence: Synthetic oligonucleotide
aaccugucaugggcaggcu

SEQ ID NO: 242686 - RNA, 19 nt, Artificial Sequence
  Description of Artificial Sequence: Synthetic oligonucleotide
cauuauggccaaccacucu

SEQ ID NO: 242687 - RNA, 19 nt, Artificial Sequence
  Description of Artificial Sequence: Synthetic oligonucleotide
cagagggucaguagucacu

SEQ ID NO: 242688 - RNA, 19 nt, Artificial Sequence
  Description of Artificial Sequence: Synthetic oligonucleotide
acccugaguuacacaacca

SEQ ID NO: 242689 - RNA, 19 nt, Artificial Sequence
  Description of Artificial Sequence: Synthetic oligonucleotide
gcaaauuggacagcuggua

SEQ ID NO: 242690 - RNA, 19 nt, Artificial Sequence
  Description of Artificial Sequence: Synthetic oligonucleotide
ggaaacaccaggcgggcau

SEQ ID NO: 242691 - RNA, 19 nt, Artificial Sequence
  Description of Artificial Sequence: Synthetic oligonucleotide
caguuccaaauguggaggu

SEQ ID NO: 242692 - RNA, 19 nt, Artificial Sequence
  Description of Artificial Sequence: Synthetic oligonucleotide
gggagugaauagcugggua

SEQ ID NO: 242693 - RNA, 19 nt, Artificial Sequence
  Description of Artificial Sequence: Synthetic oligonucleotide
gguguuuaaucuaacucuu

SEQ ID NO: 242694 - RNA, 19 nt, Artificial Sequence
  Description of Artificial Sequence: Synthetic oligonucleotide
cggauguaugucccuuucg

SEQ ID NO: 242695 - RNA, 19 nt, Artificial Sequence
  Description of Artificial Sequence: Synthetic oligonucleotide
gcccuucggggucaggggc

SEQ ID NO: 242696 - RNA, 19 nt, Artificial Sequence
  Description of Artificial Sequence: Synthetic oligonucleotide
cgucccacggauucauccc

SEQ ID NO: 242697 - RNA, 19 nt, Artificial Sequence
  Description of Artificial Sequence: Synthetic oligonucleotide
ggguaguaucccguggcac

SEQ ID NO: 242698 - RNA, 19 nt, Artificial Sequence
  Description of Artificial Sequence: Synthetic oligonucleotide
cauauccggcuucacaauu

SEQ ID NO: 242699 - RNA, 19 nt, Artificial Sequence
  Description of Artificial Sequence: Synthetic oligonucleotide
ggaccagacagaaguaucu

SEQ ID NO: 242700 - RNA, 19 nt, Artificial Sequence
  Description of Artificial Sequence: Synthetic oligonucleotide
gcggauguaugucccuuuc

SEQ ID NO: 242701 - RNA, 19 nt, Artificial Sequence
  Description of Artificial Sequence: Synthetic oligonucleotide
guuauccauugcaaccccu

SEQ ID NO: 242702 - RNA, 19 nt, Artificial Sequence
  Description of Artificial Sequence: Synthetic oligonucleotide
gguacucguaaaggccuac

SEQ ID NO: 242703 - RNA, 19 nt, Artificial Sequence
  Description of Artificial Sequence: Synthetic oligonucleotide
guuugccagucgcccggac

SEQ ID NO: 242704 - RNA, 19 nt, Artificial Sequence
  Description of Artificial Sequence: Synthetic oligonucleotide
ggaguucuggcgggauucc

SEQ ID NO: 242705 - RNA, 19 nt, Artificial Sequence
  Description of Artificial Sequence: Synthetic oligonucleotide
ggauucccgagcagcggcc

SEQ ID NO: 242706 - RNA, 19 nt, Artificial Sequence
  Description of Artificial Sequence: Synthetic oligonucleotide
cagccugccuggcuaucuc

SEQ ID NO: 242707 - RNA, 19 nt, Artificial Sequence
  Description of Artificial Sequence: Synthetic oligonucleotide
ccaacuagccagucucaga

SEQ ID NO: 242708 - RNA, 19 nt, Artificial Sequence
  Description of Artificial Sequence: Synthetic oligonucleotide
cccaacuagccagucucag

SEQ ID NO: 242709 - RNA, 19 nt, Artificial Sequence
  Description of Artificial Sequence: Synthetic oligonucleotide
cucagcccucuacacugga

SEQ ID NO: 242710 - RNA, 19 nt, Artificial Sequence
  Description of Artificial Sequence: Synthetic oligonucleotide
caagaaggaucugaccaau

SEQ ID NO: 242711 - RNA, 19 nt, Artificial Sequence
  Description of Artificial Sequence: Synthetic oligonucleotide
ugccagucgcccggacagc

SEQ ID NO: 242712 - RNA, 19 nt, Artificial Sequence
  Description of Artificial Sequence: Synthetic oligonucleotide
ggggcagaaguugccugcc

SEQ ID NO: 242713 - RNA, 19 nt, Artificial Sequence
  Description of Artificial Sequence: Synthetic oligonucleotide
ggauuacagcaauuugaau

SEQ ID NO: 242714 - RNA, 19 nt, Artificial Sequence
  Description of Artificial Sequence: Synthetic oligonucleotide
gggguggugagguuauggu

SEQ ID NO: 242715 - RNA, 19 nt, Artificial Sequence
  Description of Artificial Sequence: Synthetic oligonucleotide
ugccucaacccagcagcua

SEQ ID NO: 242716 - RNA, 19 nt, Artificial Sequence
  Description of Artificial Sequence: Synthetic oligonucleotide
ggggaacaagagucuaucu

SEQ ID NO: 242717 - RNA, 19 nt, Artificial Sequence
  Description of Artificial Sequence: Synthetic oligonucleotide
gcccggacagcaaaagauc

SEQ ID NO: 242718 - RNA, 19 nt, Artificial Sequence
  Description of Artificial Sequence: Synthetic oligonucleotide
cagucgcccggacagcaaa

SEQ ID NO: 242719 - RNA, 19 nt, Artificial Sequence
  Description of Artificial Sequence: Synthetic oligonucleotide
ggccuuagugguuauccau

SEQ ID NO: 242720 - RNA, 19 nt, Artificial Sequence
  Description of Artificial Sequence: Synthetic oligonucleotide
accggccuugaggugcuga

SEQ ID NO: 242721 - RNA, 19 nt, Artificial Sequence
  Description of Artificial Sequence: Synthetic oligonucleotide
gcaugaguacacacacaca

SEQ ID NO: 242722 - RNA, 19 nt, Artificial Sequence
  Description of Artificial Sequence: Synthetic oligonucleotide
gaacagacaucgagggauu

SEQ ID NO: 242723 - RNA, 19 nt, Artificial Sequence
  Description of Artificial Sequence: Synthetic oligonucleotide
gugcggagagagcaaccua

SEQ ID NO: 242724 - RNA, 19 nt, Artificial Sequence
  Description of Artificial Sequence: Synthetic oligonucleotide
gacccucucucugaccccu

SEQ ID NO: 242725 - RNA, 19 nt, Artificial Sequence
  Description of Artificial Sequence: Synthetic oligonucleotide
agguacucguaaaggccua

SEQ ID NO: 242726 - RNA, 19 nt, Artificial Sequence
  Description of Artificial Sequence: Synthetic oligonucleotide
ccagcacacuagaugacua

SEQ ID NO: 242727 - RNA, 19 nt, Artificial Sequence
  Description of Artificial Sequence: Synthetic oligonucleotide
ggugcggagagagcaaccu

SEQ ID NO: 242728 - RNA, 19 nt, Artificial Sequence
  Description of Artificial Sequence: Synthetic oligonucleotide
agaccggccuugaggugcu

SEQ ID NO: 242729 - RNA, 19 nt, Artificial Sequence
  Description of Artificial Sequence: Synthetic oligonucleotide
agucgcccggacagcaaaa

SEQ ID NO: 242730 - RNA, 19 nt, Artificial Sequence
  Description of Artificial Sequence: Synthetic oligonucleotide
ccacggauucaucccuguc

SEQ ID NO: 242731 - RNA, 19 nt, Artificial Sequence
  Description of Artificial Sequence: Synthetic oligonucleotide
ccccagcacacuagaugac

SEQ ID NO: 242732 - RNA, 19 nt, Artificial Sequence
  Description of Artificial Sequence: Synthetic oligonucleotide
ggugcggauguaugucccu

SEQ ID NO: 242733 - RNA, 19 nt, Artificial Sequence
  Description of Artificial Sequence: Synthetic oligonucleotide
cgucauagaaacagccagu

SEQ ID NO: 242734 - RNA, 19 nt, Artificial Sequence
  Description of Artificial Sequence: Synthetic oligonucleotide
ggggcguccugagcaaaga

SEQ ID NO: 242735 - RNA, 19 nt, Artificial Sequence
  Description of Artificial Sequence: Synthetic oligonucleotide
gccagucgcccggacagca

SEQ ID NO: 242736 - RNA, 19 nt, Artificial Sequence
  Description of Artificial Sequence: Synthetic oligonucleotide
gcaauagagcccugccauu

SEQ ID NO: 242737 - RNA, 19 nt, Artificial Sequence
  Description of Artificial Sequence: Synthetic oligonucleotide
gcgcagauuugggucccug

SEQ ID NO: 242738 - RNA, 19 nt, Artificial Sequence
  Description of Artificial Sequence: Synthetic oligonucleotide
gccuuagugguuauccauu

SEQ ID NO: 242739 - RNA, 19 nt, Artificial Sequence
  Description of Artificial Sequence: Synthetic oligonucleotide
cgggauucccgagcagcgg

SEQ ID NO: 242740 - RNA, 19 nt, Artificial Sequence
  Description of Artificial Sequence: Synthetic oligonucleotide
gguuugccagucgcccgga

SEQ ID NO: 242741 - RNA, 19 nt, Artificial Sequence
  Description of Artificial Sequence: Synthetic oligonucleotide
caaacacagcugggcugaa

SEQ ID NO: 242742 - RNA, 19 nt, Artificial Sequence
  Description of Artificial Sequence: Synthetic oligonucleotide
gugcggauguaugucccuu

SEQ ID NO: 242743 - RNA, 19 nt, Artificial Sequence
  Description of Artificial Sequence: Synthetic oligonucleotide
cgcccggacagcaaaagau

SEQ ID NO: 242744 - RNA, 19 nt, Artificial Sequence
  Description of Artificial Sequence: Synthetic oligonucleotide
gccuccuccuccuccuccu

SEQ ID NO: 242745 - RNA, 19 nt, Artificial Sequence
  Description of Artificial Sequence: Synthetic oligonucleotide
gaccggccuugaggugcug

SEQ ID NO: 242746 - RNA, 19 nt, Artificial Sequence
  Description of Artificial Sequence: Synthetic oligonucleotide
cgagggauuacagcaauuu

SEQ ID NO: 242747 - RNA, 19 nt, Artificial Sequence
  Description of Artificial Sequence: Synthetic oligonucleotide
gcggagagagcaaccuagu

SEQ ID NO: 242748 - RNA, 19 nt, Artificial Sequence
  Description of Artificial Sequence: Synthetic oligonucleotide
gguagccguggaagaggaa

SEQ ID NO: 242749 - RNA, 19 nt, Artificial Sequence
  Description of Artificial Sequence: Synthetic oligonucleotide
ccugcccuacugagagaga

SEQ ID NO: 242750 - RNA, 19 nt, Artificial Sequence
  Description of Artificial Sequence: Synthetic oligonucleotide
cccucugaagaggguacaa

SEQ ID NO: 242751 - RNA, 19 nt, Artificial Sequence
  Description of Artificial Sequence: Synthetic oligonucleotide
ccuccuccuccuccuccuc

SEQ ID NO: 242752 - RNA, 19 nt, Artificial Sequence
  Description of Artificial Sequence: Synthetic oligonucleotide
ggggaguucuggcgggauu

SEQ ID NO: 242753 - RNA, 19 nt, Artificial Sequence
  Description of Artificial Sequence: Synthetic oligonucleotide
cguccaucacuggugcgga

SEQ ID NO: 242754 - RNA, 19 nt, Artificial Sequence
  Description of Artificial Sequence: Synthetic oligonucleotide
ccagucgcccggacagcaa

SEQ ID NO: 242755 - RNA, 19 nt, Artificial Sequence
  Description of Artificial Sequence: Synthetic oligonucleotide
ggcagccauccgaccaucu

SEQ ID NO: 242756 - RNA, 19 nt, Artificial Sequence
  Description of Artificial Sequence: Synthetic oligonucleotide
ggccuacagccaagcuaga

SEQ ID NO: 242757 - RNA, 19 nt, Artificial Sequence
  Description of Artificial Sequence: Synthetic oligonucleotide
ccccucucgucugaacaua

SEQ ID NO: 242758 - RNA, 19 nt, Artificial Sequence
  Description of Artificial Sequence: Synthetic oligonucleotide
ccggccuugaggugcugau

SEQ ID NO: 242759 - RNA, 19 nt, Artificial Sequence
  Description of Artificial Sequence: Synthetic oligonucleotide
ggcgcagauuugggucccu

SEQ ID NO: 242760 - RNA, 19 nt, Artificial Sequence
  Description of Artificial Sequence: Synthetic oligonucleotide
cggcagccauccgaccauc

SEQ ID NO: 242761 - RNA, 19 nt, Artificial Sequence
  Description of Artificial Sequence: Synthetic oligonucleotide
ccucuacacuggagauuau

SEQ ID NO: 242762 - RNA, 19 nt, Artificial Sequence
  Description of Artificial Sequence: Synthetic oligonucleotide
aauaacguccaccaaaccc

SEQ ID NO: 242763 - RNA, 19 nt, Artificial Sequence
  Description of Artificial Sequence: Synthetic oligonucleotide
uauucaaggaagcagaacc

SEQ ID NO: 242764 - RNA, 19 nt, Artificial Sequence
  Description of Artificial Sequence: Synthetic oligonucleotide
agucgugauaaucauaacc

SEQ ID NO: 242765 - RNA, 19 nt, Artificial Sequence
  Description of Artificial Sequence: Synthetic oligonucleotide
uguaaucuauuccaaaucc

SEQ ID NO: 242766 - RNA, 19 nt, Artificial Sequence
  Description of Artificial Sequence: Synthetic oligonucleotide
acggcuuugacguuuaagc

SEQ ID NO: 242767 - RNA, 19 nt, Artificial Sequence
  Description of Artificial Sequence: Synthetic oligonucleotide
aucgacauaagcuaccaac

SEQ ID NO: 242768 - RNA, 19 nt, Artificial Sequence
  Description of Artificial Sequence: Synthetic oligonucleotide
acgauaaaagcauuguaac

SEQ ID NO: 242769 - RNA, 19 nt, Artificial Sequence
  Description of Artificial Sequence: Synthetic oligonucleotide
aaacaaauuuuguagggca

SEQ ID NO: 242770 - RNA, 19 nt, Artificial Sequence
  Description of Artificial Sequence: Synthetic oligonucleotide
ugugguuacauccagagua

SEQ ID NO: 242771 - RNA, 19 nt, Artificial Sequence
  Description of Artificial Sequence: Synthetic oligonucleotide
aguauaaccaguccucucg

SEQ ID NO: 242772 - RNA, 19 nt, Artificial Sequence
  Description of Artificial Sequence: Synthetic oligonucleotide
aaacuacuaagacaaagca

SEQ ID NO: 242773 - RNA, 19 nt, Artificial Sequence
  Description of Artificial Sequence: Synthetic oligonucleotide
aauugucacggcuuugacg

SEQ ID NO: 242774 - RNA, 19 nt, Artificial Sequence
  Description of Artificial Sequence: Synthetic oligonucleotide
auccugauaaaauucuugg

SEQ ID NO: 242775 - RNA, 19 nt, Artificial Sequence
  Description of Artificial Sequence: Synthetic oligonucleotide
ucuguaacuuuacugaacu

SEQ ID NO: 242776 - RNA, 19 nt, Artificial Sequence
  Description of Artificial Sequence: Synthetic oligonucleotide
aaccagaacuguccaaacc

SEQ ID NO: 242777 - RNA, 19 nt, Artificial Sequence
  Description of Artificial Sequence: Synthetic oligonucleotide
aagaacaaauugucacggc

SEQ ID NO: 242778 - RNA, 19 nt, Artificial Sequence
  Description of Artificial Sequence: Synthetic oligonucleotide
ugacguuuaagccaaacaa

SEQ ID NO: 242779 - RNA, 19 nt, Artificial Sequence
  Description of Artificial Sequence: Synthetic oligonucleotide
uccuauguaaucuauucca

SEQ ID NO: 242780 - RNA, 19 nt, Artificial Sequence
  Description of Artificial Sequence: Synthetic oligonucleotide
uuaacuguaccgcauuacc

SEQ ID NO: 242781 - RNA, 19 nt, Artificial Sequence
  Description of Artificial Sequence: Synthetic oligonucleotide
ugaucuucgccucaucggg

SEQ ID NO: 242782 - RNA, 19 nt, Artificial Sequence
  Description of Artificial Sequence: Synthetic oligonucleotide
uagagaauaacguccacca

SEQ ID NO: 242783 - RNA, 19 nt, Artificial Sequence
  Description of Artificial Sequence: Synthetic oligonucleotide
uagguuauuuucaauacaa

SEQ ID NO: 242784 - RNA, 19 nt, Artificial Sequence
  Description of Artificial Sequence: Synthetic oligonucleotide
auaaccaguccucucgagc

SEQ ID NO: 242785 - RNA, 19 nt, Artificial Sequence
  Description of Artificial Sequence: Synthetic oligonucleotide
uucuuaaaacuacuaagac

SEQ ID NO: 242786 - RNA, 19 nt, Artificial Sequence
  Description of Artificial Sequence: Synthetic oligonucleotide
ugacuugugauccucauau

SEQ ID NO: 242787 - RNA, 19 nt, Artificial Sequence
  Description of Artificial Sequence: Synthetic oligonucleotide
aacuguccaaaccaaaggu

SEQ ID NO: 242788 - RNA, 19 nt, Artificial Sequence
  Description of Artificial Sequence: Synthetic oligonucleotide
aggcguagaucccagaucg

SEQ ID NO: 242789 - RNA, 19 nt, Artificial Sequence
  Description of Artificial Sequence: Synthetic oligonucleotide
uuuaccagggcgaaucuca

SEQ ID NO: 242790 - RNA, 19 nt, Artificial Sequence
  Description of Artificial Sequence: Synthetic oligonucleotide
caugagauaagucacuuuc

SEQ ID NO: 242791 - RNA, 19 nt, Artificial Sequence
  Description of Artificial Sequence: Synthetic oligonucleotide
uauccugauaaaauucuug

SEQ ID NO: 242792 - RNA, 19 nt, Artificial Sequence
  Description of Artificial Sequence: Synthetic oligonucleotide
auagcugucacacaguuua

SEQ ID NO: 242793 - RNA, 19 nt, Artificial Sequence
  Description of Artificial Sequence: Synthetic oligonucleotide
aaguauccugauaaaauuc

SEQ ID NO: 242794 - RNA, 19 nt, Artificial Sequence
  Description of Artificial Sequence: Synthetic oligonucleotide
aacgaaugcauaaucuuuc

SEQ ID NO: 242795 - RNA, 19 nt, Artificial Sequence
  Description of Artificial Sequence: Synthetic oligonucleotide
ucgacauaagcuaccaacc

SEQ ID NO: 242796 - RNA, 19 nt, Artificial Sequence
  Description of Artificial Sequence: Synthetic oligonucleotide
ucauagguuauuuucaaua

SEQ ID NO: 242797 - RNA, 19 nt, Artificial Sequence
  Description of Artificial Sequence: Synthetic oligonucleotide
ugcaagcccaauaaugucc

SEQ ID NO: 242798 - RNA, 19 nt, Artificial Sequence
  Description of Artificial Sequence: Synthetic oligonucleotide
gauuuuaccuacgaagacc

SEQ ID NO: 242799 - RNA, 19 nt, Artificial Sequence
  Description of Artificial Sequence: Synthetic oligonucleotide
cugucuagcagcuuggcgc

SEQ ID NO: 242800 - RNA, 19 nt, Artificial Sequence
  Description of Artificial Sequence: Synthetic oligonucleotide
aacgauaaaagcauuguaa

SEQ ID NO: 242801 - RNA, 19 nt, Artificial Sequence
  Description of Artificial Sequence: Synthetic oligonucleotide
ugauagagaauaacgucca

SEQ ID NO: 242802 - RNA, 19 nt, Artificial Sequence
  Description of Artificial Sequence: Synthetic oligonucleotide
agucuuauucuuuggaaug

SEQ ID NO: 242803 - RNA, 19 nt, Artificial Sequence
  Description of Artificial Sequence: Synthetic oligonucleotide
cugaccagaaaguggaucc

SEQ ID NO: 242804 - RNA, 19 nt, Artificial Sequence
  Description of Artificial Sequence: Synthetic oligonucleotide
agaacaaauugucacggcu

SEQ ID NO: 242805 - RNA, 19 nt, Artificial Sequence
  Description of Artificial Sequence: Synthetic oligonucleotide
agaauaacguccaccaaac

SEQ ID NO: 242806 - RNA, 19 nt, Artificial Sequence
  Description of Artificial Sequence: Synthetic oligonucleotide
ucguaucuugccaguaucg

SEQ ID NO: 242807 - RNA, 19 nt, Artificial Sequence
  Description of Artificial Sequence: Synthetic oligonucleotide
uaccagaauagucaccacc

SEQ ID NO: 242808 - RNA, 19 nt, Artificial Sequence
  Description of Artificial Sequence: Synthetic oligonucleotide
uggaauggauccaacaaaa

SEQ ID NO: 242809 - RNA, 19 nt, Artificial Sequence
  Description of Artificial Sequence: Synthetic oligonucleotide
aucaagaucgacauaagcu

SEQ ID NO: 242810 - RNA, 19 nt, Artificial Sequence
  Description of Artificial Sequence: Synthetic oligonucleotide
uguagggcagauuucaaaa

SEQ ID NO: 242811 - RNA, 19 nt, Artificial Sequence
  Description of Artificial Sequence: Synthetic oligonucleotide
uugucuauuuccacuguug

SEQ ID NO: 242812 - RNA, 19 nt, Artificial Sequence
  Description of Artificial Sequence: Synthetic oligonucleotide
uggaacgauaaaagcauug

SEQ ID NO: 242813 - RNA, 19 nt, Artificial Sequence
  Description of Artificial Sequence: Synthetic oligonucleotide
ucaaccguaacuacauuuc

SEQ ID NO: 242814 - RNA, 19 nt, Artificial Sequence
  Description of Artificial Sequence: Synthetic oligonucleotide
guagaucuagagccaaucg

SEQ ID NO: 242815 - RNA, 19 nt, Artificial Sequence
  Description of Artificial Sequence: Synthetic oligonucleotide
uaccgcauuaccauucacc

SEQ ID NO: 242816 - RNA, 19 nt, Artificial Sequence
  Description of Artificial Sequence: Synthetic oligonucleotide
agccuggaacgauaaaagc

SEQ ID NO: 242817 - RNA, 19 nt, Artificial Sequence
  Description of Artificial Sequence: Synthetic oligonucleotide
aucguuuucaagcccucac

SEQ ID NO: 242818 - RNA, 19 nt, Artificial Sequence
  Description of Artificial Sequence: Synthetic oligonucleotide
agggugauaauaauaaucu

SEQ ID NO: 242819 - RNA, 19 nt, Artificial Sequence
  Description of Artificial Sequence: Synthetic oligonucleotide
acagcauacuccauacucc

SEQ ID NO: 242820 - RNA, 19 nt, Artificial Sequence
  Description of Artificial Sequence: Synthetic oligonucleotide
aaacuuaaaucuguucgcu

SEQ ID NO: 242821 - RNA, 19 nt, Artificial Sequence
  Description of Artificial Sequence: Synthetic oligonucleotide
aacaaauuuuguagggcag

SEQ ID NO: 242822 - RNA, 19 nt, Artificial Sequence
  Description of Artificial Sequence: Synthetic oligonucleotide
uaaccaguccucucgagca

SEQ ID NO: 242823 - RNA, 19 nt, Artificial Sequence
  Description of Artificial Sequence: Synthetic oligonucleotide
uagaucccagaucggaccg

SEQ ID NO: 242824 - RNA, 19 nt, Artificial Sequence
  Description of Artificial Sequence: Synthetic oligonucleotide
gagaauaacguccaccaaa

SEQ ID NO: 242825 - RNA, 19 nt, Artificial Sequence
  Description of Artificial Sequence: Synthetic oligonucleotide
uuuaccuacgaagaccucu

SEQ ID NO: 242826 - RNA, 19 nt, Artificial Sequence
  Description of Artificial Sequence: Synthetic oligonucleotide
acgacguuuggaaucaggc

SEQ ID NO: 242827 - RNA, 19 nt, Artificial Sequence
  Description of Artificial Sequence: Synthetic oligonucleotide
auagguuauuuucaauaca

SEQ ID NO: 242828 - RNA, 19 nt, Artificial Sequence
  Description of Artificial Sequence: Synthetic oligonucleotide
uguuuugaagaauguagau

SEQ ID NO: 242829 - RNA, 19 nt, Artificial Sequence
  Description of Artificial Sequence: Synthetic oligonucleotide
uuaccuacgaagaccucug

SEQ ID NO: 242830 - RNA, 19 nt, Artificial Sequence
  Description of Artificial Sequence: Synthetic oligonucleotide
gagggugauaauaauaauc

SEQ ID NO: 242831 - RNA, 19 nt, Artificial Sequence
  Description of Artificial Sequence: Synthetic oligonucleotide
augagauaagucacuuucc

SEQ ID NO: 242832 - RNA, 19 nt, Artificial Sequence
  Description of Artificial Sequence: Synthetic oligonucleotide
auaaaauucuugguuguca

SEQ ID NO: 242833 - RNA, 19 nt, Artificial Sequence
  Description of Artificial Sequence: Synthetic oligonucleotide
accgcauuaccauucaccu

SEQ ID NO: 242834 - RNA, 19 nt, Artificial Sequence
  Description of Artificial Sequence: Synthetic oligonucleotide
auagucgugauaaucauaa

SEQ ID NO: 242835 - RNA, 19 nt, Artificial Sequence
  Description of Artificial Sequence: Synthetic oligonucleotide
guuaccagaauagucacca

SEQ ID NO: 242836 - RNA, 19 nt, Artificial Sequence
  Description of Artificial Sequence: Synthetic oligonucleotide
gugauaaaugcauauccuc

SEQ ID NO: 242837 - RNA, 19 nt, Artificial Sequence
  Description of Artificial Sequence: Synthetic oligonucleotide
ucuuacugcauagccauca

SEQ ID NO: 242838 - RNA, 19 nt, Artificial Sequence
  Description of Artificial Sequence: Synthetic oligonucleotide
ucggguugaugauagagaa

SEQ ID NO: 242839 - RNA, 19 nt, Artificial Sequence
  Description of Artificial Sequence: Synthetic oligonucleotide
auaacguccaccaaacccu

SEQ ID NO: 242840 - RNA, 19 nt, Artificial Sequence
  Description of Artificial Sequence: Synthetic oligonucleotide
aguuacacuggaagugucc

SEQ ID NO: 242841 - RNA, 19 nt, Artificial Sequence
  Description of Artificial Sequence: Synthetic oligonucleotide
ucgcuuuaauuucuuaaaa

SEQ ID NO: 242842 - RNA, 19 nt, Artificial Sequence
  Description of Artificial Sequence: Synthetic oligonucleotide
agcccaauaauguccaaga

SEQ ID NO: 242843 - RNA, 19 nt, Artificial Sequence
  Description of Artificial Sequence: Synthetic oligonucleotide
acaugaacaagaaauugga

SEQ ID NO: 242844 - RNA, 19 nt, Artificial Sequence
  Description of Artificial Sequence: Synthetic oligonucleotide
auagccuuaacagcagcuc

SEQ ID NO: 242845 - RNA, 19 nt, Artificial Sequence
  Description of Artificial Sequence: Synthetic oligonucleotide
acuccauacuccuauguaa

SEQ ID NO: 242846 - RNA, 19 nt, Artificial Sequence
  Description of Artificial Sequence: Synthetic oligonucleotide
acacuggaaguguccaugg

SEQ ID NO: 242847 - RNA, 19 nt, Artificial Sequence
  Description of Artificial Sequence: Synthetic oligonucleotide
uggaggguagccauaucca

SEQ ID NO: 242848 - RNA, 19 nt, Artificial Sequence
  Description of Artificial Sequence: Synthetic oligonucleotide
uacuaagacaaagcacuag

SEQ ID NO: 242849 - RNA, 19 nt, Artificial Sequence
  Description of Artificial Sequence: Synthetic oligonucleotide
ugucauuauuguaaccaua

SEQ ID NO: 242850 - RNA, 19 nt, Artificial Sequence
  Description of Artificial Sequence: Synthetic oligonucleotide
caucaauugcucuuucauc

SEQ ID NO: 242851 - RNA, 19 nt, Artificial Sequence
  Description of Artificial Sequence: Synthetic oligonucleotide
auaagcuaccaacccuguc

SEQ ID NO: 242852 - RNA, 19 nt, Artificial Sequence
  Description of Artificial Sequence: Synthetic oligonucleotide
uguagaucuagagccaauc

SEQ ID NO: 242853 - RNA, 19 nt, Artificial Sequence
  Description of Artificial Sequence: Synthetic oligonucleotide
uuaaauucccugagagcau

SEQ ID NO: 242854 - RNA, 19 nt, Artificial Sequence
  Description of Artificial Sequence: Synthetic oligonucleotide
acgauagucgugauaauca

SEQ ID NO: 242855 - RNA, 19 nt, Artificial Sequence
  Description of Artificial Sequence: Synthetic oligonucleotide
caaccguaacuacauuucc

SEQ ID NO: 242856 - RNA, 19 nt, Artificial Sequence
  Description of Artificial Sequence: Synthetic oligonucleotide
uguaccgcauuaccauuca

SEQ ID NO: 242857 - RNA, 19 nt, Artificial Sequence
  Description of Artificial Sequence: Synthetic oligonucleotide
aguaucguuuucaagcccu

SEQ ID NO: 242858 - RNA, 19 nt, Artificial Sequence
  Description of Artificial Sequence: Synthetic oligonucleotide
aguuaccagaauagucacc

SEQ ID NO: 242859 - RNA, 19 nt, Artificial Sequence
  Description of Artificial Sequence: Synthetic oligonucleotide
guaacuacauuuccccaca

SEQ ID NO: 242860 - RNA, 19 nt, Artificial Sequence
  Description of Artificial Sequence: Synthetic oligonucleotide
caucggguugaugauagag

SEQ ID NO: 242861 - RNA, 19 nt, Artificial Sequence
  Description of Artificial Sequence: Synthetic oligonucleotide
guagccaaguuucucacaa

SEQ ID NO: 242862 - RNA, 19 nt, Artificial Sequence
  Description of Artificial Sequence: Synthetic oligonucleotide
agcuccacgagaaccacgg

SEQ ID NO: 242863 - RNA, 19 nt, Artificial Sequence
  Description of Artificial Sequence: Synthetic oligonucleotide
uugggauuuuaccuacgaa

SEQ ID NO: 242864 - RNA, 19 nt, Artificial Sequence
  Description of Artificial Sequence: Synthetic oligonucleotide
cuuucguggacuccugcac

SEQ ID NO: 242865 - RNA, 19 nt, Artificial Sequence
  Description of Artificial Sequence: Synthetic oligonucleotide
gcugguuguacccaucugc

SEQ ID NO: 242866 - RNA, 19 nt, Artificial Sequence
  Description of Artificial Sequence: Synthetic oligonucleotide
gauagagaauaacguccac

SEQ ID NO: 242867 - RNA, 19 nt, Artificial Sequence
  Description of Artificial Sequence: Synthetic oligonucleotide
acgaaugcauaaucuuuca

SEQ ID NO: 242868 - RNA, 19 nt, Artificial Sequence
  Description of Artificial Sequence: Synthetic oligonucleotide
acguuuaagccaaacaaau

SEQ ID NO: 242869 - RNA, 19 nt, Artificial Sequence
  Description of Artificial Sequence: Synthetic oligonucleotide
ucgugauaaucauaaccau

SEQ ID NO: 242870 - RNA, 19 nt, Artificial Sequence
  Description of Artificial Sequence: Synthetic oligonucleotide
cauuauuguaaccauaguu

SEQ ID NO: 242871 - RNA, 19 nt, Artificial Sequence
  Description of Artificial Sequence: Synthetic oligonucleotide
gacguuuaagccaaacaaa

SEQ ID NO: 242872 - RNA, 19 nt, Artificial Sequence
  Description of Artificial Sequence: Synthetic oligonucleotide
agcacuagcuuguacuuuu

SEQ ID NO: 242873 - RNA, 19 nt, Artificial Sequence
  Description of Artificial Sequence: Synthetic oligonucleotide
gaucggaccggccuucuca

SEQ ID NO: 242874 - RNA, 19 nt, Artificial Sequence
  Description of Artificial Sequence: Synthetic oligonucleotide
agguugcacacccgaguac

SEQ ID NO: 242875 - RNA, 19 nt, Artificial Sequence
  Description of Artificial Sequence: Synthetic oligonucleotide
gauugccccgagcuccacg

SEQ ID NO: 242876 - RNA, 19 nt, Artificial Sequence
  Description of Artificial Sequence: Synthetic oligonucleotide
gacgacguuuggaaucagg

SEQ ID NO: 242877 - RNA, 19 nt, Artificial Sequence
  Description of Artificial Sequence: Synthetic oligonucleotide
uagagccaaucguaucuug

SEQ ID NO: 242878 - RNA, 19 nt, Artificial Sequence
  Description of Artificial Sequence: Synthetic oligonucleotide
agaucuagagccaaucgua

SEQ ID NO: 242879 - RNA, 19 nt, Artificial Sequence
  Description of Artificial Sequence: Synthetic oligonucleotide
ccaguaucguuuucaagcc

SEQ ID NO: 242880 - RNA, 19 nt, Artificial Sequence
  Description of Artificial Sequence: Synthetic oligonucleotide
agccaaucguaucuugcca

SEQ ID NO: 242881 - RNA, 19 nt, Artificial Sequence
  Description of Artificial Sequence: Synthetic oligonucleotide
ccuacgaagaccucuguuc

SEQ ID NO: 242882 - RNA, 19 nt, Artificial Sequence
  Description of Artificial Sequence: Synthetic oligonucleotide
cgauaaaagcauuguaacc

SEQ ID NO: 242883 - RNA, 19 nt, Artificial Sequence
  Description of Artificial Sequence: Synthetic oligonucleotide
ggcuuugacguuuaagcca

SEQ ID NO: 242884 - RNA, 19 nt, Artificial Sequence
  Description of Artificial Sequence: Synthetic oligonucleotide
gaguauaaccaguccucuc

SEQ ID NO: 242885 - RNA, 19 nt, Artificial Sequence
  Description of Artificial Sequence: Synthetic oligonucleotide
guuggucugacgacguuug

SEQ ID NO: 242886 - RNA, 19 nt, Artificial Sequence
  Description of Artificial Sequence: Synthetic oligonucleotide
aucaugaggcguagauccc

SEQ ID NO: 242887 - RNA, 19 nt, Artificial Sequence
  Description of Artificial Sequence: Synthetic oligonucleotide
caugaggcguagaucccag

SEQ ID NO: 242888 - RNA, 19 nt, Artificial Sequence
  Description of Artificial Sequence: Synthetic oligonucleotide
ucauagccguaguagggau

SEQ ID NO: 242889 - RNA, 19 nt, Artificial Sequence
  Description of Artificial Sequence: Synthetic oligonucleotide
cuguaccgcauuaccauuc

SEQ ID NO: 242890 - RNA, 19 nt, Artificial Sequence
  Description of Artificial Sequence: Synthetic oligonucleotide
caguaucguuuucaagccc

SEQ ID NO: 242891 - RNA, 19 nt, Artificial Sequence
  Description of Artificial Sequence: Synthetic oligonucleotide
uacuccuauguaaucuauu

SEQ ID NO: 242892 - RNA, 19 nt, Artificial Sequence
  Description of Artificial Sequence: Synthetic oligonucleotide
cuugggauuuuaccuacga

SEQ ID NO: 242893 - RNA, 19 nt, Artificial Sequence
  Description of Artificial Sequence: Synthetic oligonucleotide
gccaaucguaucuugccag

SEQ ID NO: 242894 - RNA, 19 nt, Artificial Sequence
  Description of Artificial Sequence: Synthetic oligonucleotide
agaucgacauaagcuacca

SEQ ID NO: 242895 - RNA, 19 nt, Artificial Sequence
  Description of Artificial Sequence: Synthetic oligonucleotide
uuccacucaucagccgucg

SEQ ID NO: 242896 - RNA, 19 nt, Artificial Sequence
  Description of Artificial Sequence: Synthetic oligonucleotide
cccauaaguauccugauaa

SEQ ID NO: 242897 - RNA, 19 nt, Artificial Sequence
  Description of Artificial Sequence: Synthetic oligonucleotide
agagaauaacguccaccaa

SEQ ID NO: 242898 - RNA, 19 nt, Artificial Sequence
  Description of Artificial Sequence: Synthetic oligonucleotide
gcuaagacaauuucaauuu

SEQ ID NO: 242899 - RNA, 19 nt, Artificial Sequence
  Description of Artificial Sequence: Synthetic oligonucleotide
cucaucgggcccuuucgug

SEQ ID NO: 242900 - RNA, 19 nt, Artificial Sequence
  Description of Artificial Sequence: Synthetic oligonucleotide
guuacuguaguagccaagu

SEQ ID NO: 242901 - RNA, 19 nt, Artificial Sequence
  Description of Artificial Sequence: Synthetic oligonucleotide
ugguuguacccaucugccu

SEQ ID NO: 242902 - RNA, 19 nt, Artificial Sequence
  Description of Artificial Sequence: Synthetic oligonucleotide
gagcgauggguugggaacc

SEQ ID NO: 242903 - RNA, 19 nt, Artificial Sequence
  Description of Artificial Sequence: Synthetic oligonucleotide
auaaagccuggaacgauaa

SEQ ID NO: 242904 - RNA, 19 nt, Artificial Sequence
  Description of Artificial Sequence: Synthetic oligonucleotide
ugagccucuuggugguccc

SEQ ID NO: 242905 - RNA, 19 nt, Artificial Sequence
  Description of Artificial Sequence: Synthetic oligonucleotide
uuuuaccuacgaagaccuc

SEQ ID NO: 242906 - RNA, 19 nt, Artificial Sequence
  Description of Artificial Sequence: Synthetic oligonucleotide
uagucgugauaaucauaac

SEQ ID NO: 242907 - RNA, 19 nt, Artificial Sequence
  Description of Artificial Sequence: Synthetic oligonucleotide
cauagccguaguagggauc

SEQ ID NO: 242908 - RNA, 19 nt, Artificial Sequence
  Description of Artificial Sequence: Synthetic oligonucleotide
uucauacgcagugcuucug

SEQ ID NO: 242909 - RNA, 19 nt, Artificial Sequence
  Description of Artificial Sequence: Synthetic oligonucleotide
acuguaccgcauuaccauu

SEQ ID NO: 242910 - RNA, 19 nt, Artificial Sequence
  Description of Artificial Sequence: Synthetic oligonucleotide
agagcaucaauugcucuuu

SEQ ID NO: 242911 - RNA, 19 nt, Artificial Sequence
  Description of Artificial Sequence: Synthetic oligonucleotide
gauagucgugauaaucaua

SEQ ID NO: 242912 - RNA, 19 nt, Artificial Sequence
  Description of Artificial Sequence: Synthetic oligonucleotide
ugccccgagcuccacgaga

SEQ ID NO: 242913 - RNA, 19 nt, Artificial Sequence
  Description of Artificial Sequence: Synthetic oligonucleotide
ucgauugccccgagcucca

SEQ ID NO: 242914 - RNA, 19 nt, Artificial Sequence
  Description of Artificial Sequence: Synthetic oligonucleotide
gagagcaucaauugcucuu

SEQ ID NO: 242915 - RNA, 19 nt, Artificial Sequence
  Description of Artificial Sequence: Synthetic oligonucleotide
cguaacuacauuuccccac

SEQ ID NO: 242916 - RNA, 19 nt, Artificial Sequence
  Description of Artificial Sequence: Synthetic oligonucleotide
acgaccucgaccucucauu

SEQ ID NO: 242917 - RNA, 19 nt, Artificial Sequence
  Description of Artificial Sequence: Synthetic oligonucleotide
ggaggguagccauauccac

SEQ ID NO: 242918 - RNA, 19 nt, Artificial Sequence
  Description of Artificial Sequence: Synthetic oligonucleotide
cacggcuuugacguuuaag

SEQ ID NO: 242919 - RNA, 19 nt, Artificial Sequence
  Description of Artificial Sequence: Synthetic oligonucleotide
ggucugacgacguuuggaa

SEQ ID NO: 242920 - RNA, 19 nt, Artificial Sequence
  Description of Artificial Sequence: Synthetic oligonucleotide
guagccauauccaccucuc

SEQ ID NO: 242921 - RNA, 19 nt, Artificial Sequence
  Description of Artificial Sequence: Synthetic oligonucleotide
uaccuacgaagaccucugu

SEQ ID NO: 242922 - RNA, 19 nt, Artificial Sequence
  Description of Artificial Sequence: Synthetic oligonucleotide
accuacgaagaccucuguu

SEQ ID NO: 242923 - RNA, 19 nt, Artificial Sequence
  Description of Artificial Sequence: Synthetic oligonucleotide
agaucggaccggccuucuc

SEQ ID NO: 242924 - RNA, 19 nt, Artificial Sequence
  Description of Artificial Sequence: Synthetic oligonucleotide
gaacaaauugucacggcuu

SEQ ID NO: 242925 - RNA, 19 nt, Artificial Sequence
  Description of Artificial Sequence: Synthetic oligonucleotide
uguacccaucugccuuucu

SEQ ID NO: 242926 - RNA, 19 nt, Artificial Sequence
  Description of Artificial Sequence: Synthetic oligonucleotide
agaucccagaucggaccgg

SEQ ID NO: 242927 - RNA, 19 nt, Artificial Sequence
  Description of Artificial Sequence: Synthetic oligonucleotide
gaucgacauaagcuaccaa

SEQ ID NO: 242928 - RNA, 19 nt, Artificial Sequence
  Description of Artificial Sequence: Synthetic oligonucleotide
cugacgacguuuggaauca

SEQ ID NO: 242929 - RNA, 19 nt, Artificial Sequence
  Description of Artificial Sequence: Synthetic oligonucleotide
ucaucggguugaugauaga

SEQ ID NO: 242930 - RNA, 19 nt, Artificial Sequence
  Description of Artificial Sequence: Synthetic oligonucleotide
cgacauaagcuaccaaccc

SEQ ID NO: 242931 - RNA, 19 nt, Artificial Sequence
  Description of Artificial Sequence: Synthetic oligonucleotide
aucggaccggccuucucaa

SEQ ID NO: 242932 - RNA, 19 nt, Artificial Sequence
  Description of Artificial Sequence: Synthetic oligonucleotide
ggugauaaaugcauauccu

SEQ ID NO: 242933 - RNA, 19 nt, Artificial Sequence
  Description of Artificial Sequence: Synthetic oligonucleotide
gguuacauccagaguauaa

SEQ ID NO: 242934 - RNA, 19 nt, Artificial Sequence
  Description of Artificial Sequence: Synthetic oligonucleotide
cccugucugaaauauuuca

SEQ ID NO: 242935 - RNA, 19 nt, Artificial Sequence
  Description of Artificial Sequence: Synthetic oligonucleotide
gaucuagagccaaucguau

SEQ ID NO: 242936 - RNA, 19 nt, Artificial Sequence
  Description of Artificial Sequence: Synthetic oligonucleotide
gcuuugacguuuaagccaa

SEQ ID NO: 242937 - RNA, 19 nt, Artificial Sequence
  Description of Artificial Sequence: Synthetic oligonucleotide
guuuaccagggcgaaucuc

SEQ ID NO: 242938 - RNA, 19 nt, Artificial Sequence
  Description of Artificial Sequence: Synthetic oligonucleotide
ggaacgauaaaagcauugu

SEQ ID NO: 242939 - RNA, 19 nt, Artificial Sequence
  Description of Artificial Sequence: Synthetic oligonucleotide
caccuuguugaagcggcug

SEQ ID NO: 242940 - RNA, 19 nt, Artificial Sequence
  Description of Artificial Sequence: Synthetic oligonucleotide
cugagcgauggguugggaa

SEQ ID NO: 242941 - RNA, 19 nt, Artificial Sequence
  Description of Artificial Sequence: Synthetic oligonucleotide
ggugugaaguuauaacaau

SEQ ID NO: 242942 - RNA, 19 nt, Artificial Sequence
  Description of Artificial Sequence: Synthetic oligonucleotide
guaccgcauuaccauucac

SEQ ID NO: 242943 - RNA, 19 nt, Artificial Sequence
  Description of Artificial Sequence: Synthetic oligonucleotide
cggcuuugacguuuaagcc

SEQ ID NO: 242944 - RNA, 19 nt, Artificial Sequence
  Description of Artificial Sequence: Synthetic oligonucleotide
cucuuacugcauagccauc

SEQ ID NO: 242945 - RNA, 19 nt, Artificial Sequence
  Description of Artificial Sequence: Synthetic oligonucleotide
ccugauaaaauucuugguu

SEQ ID NO: 242946 - RNA, 19 nt, Artificial Sequence
  Description of Artificial Sequence: Synthetic oligonucleotide
cagcauacuccauacuccu

SEQ ID NO: 242947 - RNA, 19 nt, Artificial Sequence
  Description of Artificial Sequence: Synthetic oligonucleotide
uugccccgagcuccacgag

SEQ ID NO: 242948 - RNA, 19 nt, Artificial Sequence
  Description of Artificial Sequence: Synthetic oligonucleotide
cuuuuaacuguaccgcauu

SEQ ID NO: 242949 - RNA, 19 nt, Artificial Sequence
  Description of Artificial Sequence: Synthetic oligonucleotide
ugguuacauccagaguaua

SEQ ID NO: 242950 - RNA, 19 nt, Artificial Sequence
  Description of Artificial Sequence: Synthetic oligonucleotide
cagguugcacacccgagua

SEQ ID NO: 242951 - RNA, 19 nt, Artificial Sequence
  Description of Artificial Sequence: Synthetic oligonucleotide
cuucauacgcagugcuucu

SEQ ID NO: 242952 - RNA, 19 nt, Artificial Sequence
  Description of Artificial Sequence: Synthetic oligonucleotide
guugcacacccgaguacac

SEQ ID NO: 242953 - RNA, 19 nt, Artificial Sequence
  Description of Artificial Sequence: Synthetic oligonucleotide
ugacgacguuuggaaucag

SEQ ID NO: 242954 - RNA, 19 nt, Artificial Sequence
  Description of Artificial Sequence: Synthetic oligonucleotide
gguuguacccaucugccuu

SEQ ID NO: 242955 - RNA, 19 nt, Artificial Sequence
  Description of Artificial Sequence: Synthetic oligonucleotide
caucgggcccuuucgugga

SEQ ID NO: 242956 - RNA, 19 nt, Artificial Sequence
  Description of Artificial Sequence: Synthetic oligonucleotide
gccgucgucuggcuugugc

SEQ ID NO: 242957 - RNA, 19 nt, Artificial Sequence
  Description of Artificial Sequence: Synthetic oligonucleotide
auguagaucuagagccaau

SEQ ID NO: 242958 - RNA, 19 nt, Artificial Sequence
  Description of Artificial Sequence: Synthetic oligonucleotide
guuguuggucugacgacgu

SEQ ID NO: 242959 - RNA, 19 nt, Artificial Sequence
  Description of Artificial Sequence: Synthetic oligonucleotide
ucacggcuuugacguuuaa

SEQ ID NO: 242960 - RNA, 19 nt, Artificial Sequence
  Description of Artificial Sequence: Synthetic oligonucleotide
gugguuacauccagaguau

SEQ ID NO: 242961 - RNA, 19 nt, Artificial Sequence
  Description of Artificial Sequence: Synthetic oligonucleotide
caaucguaucuugccagua

SEQ ID NO: 242962 - RNA, 19 nt, Artificial Sequence
  Description of Artificial Sequence: Synthetic oligonucleotide
ucgggcccuuucguggacu

SEQ ID NO: 242963 - RNA, 19 nt, Artificial Sequence
  Description of Artificial Sequence: Synthetic oligonucleotide
uugucacggcuuugacguu

SEQ ID NO: 242964 - RNA, 19 nt, Artificial Sequence
  Description of Artificial Sequence: Synthetic oligonucleotide
ucggaccggccuucucaaa

SEQ ID NO: 242965 - RNA, 19 nt, Artificial Sequence
  Description of Artificial Sequence: Synthetic oligonucleotide
cguaguagggaucuucaua

SEQ ID NO: 242966 - RNA, 19 nt, Artificial Sequence
  Description of Artificial Sequence: Synthetic oligonucleotide
agcauacuccauacuccua

SEQ ID NO: 242967 - RNA, 19 nt, Artificial Sequence
  Description of Artificial Sequence: Synthetic oligonucleotide
gucugacgacguuuggaau

SEQ ID NO: 242968 - RNA, 19 nt, Artificial Sequence
  Description of Artificial Sequence: Synthetic oligonucleotide
gggugauaauaauaaucuu

SEQ ID NO: 242969 - RNA, 19 nt, Artificial Sequence
  Description of Artificial Sequence: Synthetic oligonucleotide
auccaucaugaggcguaga

SEQ ID NO: 242970 - RNA, 19 nt, Artificial Sequence
  Description of Artificial Sequence: Synthetic oligonucleotide
cuggaacgauaaaagcauu

SEQ ID NO: 242971 - RNA, 19 nt, Artificial Sequence
  Description of Artificial Sequence: Synthetic oligonucleotide
ccguaacuacauuucccca

SEQ ID NO: 242972 - RNA, 19 nt, Artificial Sequence
  Description of Artificial Sequence: Synthetic oligonucleotide
ggaggagggugauaauaau

SEQ ID NO: 242973 - RNA, 19 nt, Artificial Sequence
  Description of Artificial Sequence: Synthetic oligonucleotide
cccuuucguggacuccugc

SEQ ID NO: 242974 - RNA, 19 nt, Artificial Sequence
  Description of Artificial Sequence: Synthetic oligonucleotide
cgaccucucauuggaggcg

SEQ ID NO: 242975 - RNA, 19 nt, Artificial Sequence
  Description of Artificial Sequence: Synthetic oligonucleotide
cacuagcuuguacuuuuau

SEQ ID NO: 242976 - RNA, 19 nt, Artificial Sequence
  Description of Artificial Sequence: Synthetic oligonucleotide
gcuccacgagaaccacggc

SEQ ID NO: 242977 - RNA, 19 nt, Artificial Sequence
  Description of Artificial Sequence: Synthetic oligonucleotide
cccucgauugccccgagcu

SEQ ID NO: 242978 - RNA, 19 nt, Artificial Sequence
  Description of Artificial Sequence: Synthetic oligonucleotide
ccucgauugccccgagcuc

SEQ ID NO: 242979 - RNA, 19 nt, Artificial Sequence
  Description of Artificial Sequence: Synthetic oligonucleotide
ggguaccaacucauccuca

SEQ ID NO: 242980 - RNA, 19 nt, Artificial Sequence
  Description of Artificial Sequence: Synthetic oligonucleotide
ccaaucguaucuugccagu

SEQ ID NO: 242981 - RNA, 19 nt, Artificial Sequence
  Description of Artificial Sequence: Synthetic oligonucleotide
ccccagaauaagggaacuc

SEQ ID NO: 242982 - RNA, 19 nt, Artificial Sequence
  Description of Artificial Sequence: Synthetic oligonucleotide
uucgccucaucgggcccuu

SEQ ID NO: 242983 - RNA, 19 nt, Artificial Sequence
  Description of Artificial Sequence: Synthetic oligonucleotide
ccacgagaaccacggccuc

SEQ ID NO: 242984 - RNA, 19 nt, Artificial Sequence
  Description of Artificial Sequence: Synthetic oligonucleotide
ccagaucggaccggccuuc

SEQ ID NO: 242985 - RNA, 19 nt, Artificial Sequence
  Description of Artificial Sequence: Synthetic oligonucleotide
cacgagaaccacggccucu

SEQ ID NO: 242986 - RNA, 19 nt, Artificial Sequence
  Description of Artificial Sequence: Synthetic oligonucleotide
caccuucugugggaggccu

SEQ ID NO: 242987 - RNA, 19 nt, Artificial Sequence
  Description of Artificial Sequence: Synthetic oligonucleotide
ccccucgauugccccgagc

SEQ ID NO: 242988 - RNA, 19 nt, Artificial Sequence
  Description of Artificial Sequence: Synthetic oligonucleotide
cguaucuugccaguaucgu

SEQ ID NO: 242989 - RNA, 19 nt, Artificial Sequence
  Description of Artificial Sequence: Synthetic oligonucleotide
cgccucaucgggcccuuuc

SEQ ID NO: 242990 - RNA, 19 nt, Artificial Sequence
  Description of Artificial Sequence: Synthetic oligonucleotide
cgggcccuuucguggacuc

SEQ ID NO: 242991 - RNA, 19 nt, Artificial Sequence
  Description of Artificial Sequence: Synthetic oligonucleotide
ccucaucgggcccuuucgu

SEQ ID NO: 242992 - RNA, 19 nt, Artificial Sequence
  Description of Artificial Sequence: Synthetic oligonucleotide
cagaucggaccggccuucu

SEQ ID NO: 242993 - RNA, 19 nt, Artificial Sequence
  Description of Artificial Sequence: Synthetic oligonucleotide
ccguaguagggaucuucau

SEQ ID NO: 242994 - RNA, 19 nt, Artificial Sequence
  Description of Artificial Sequence: Synthetic oligonucleotide
ucgccucaucgggcccuuu

SEQ ID NO: 242995 - RNA, 19 nt, Artificial Sequence
  Description of Artificial Sequence: Synthetic oligonucleotide
cagccgucgucuggcuugu

SEQ ID NO: 242996 - RNA, 19 nt, Artificial Sequence
  Description of Artificial Sequence: Synthetic oligonucleotide
ggcauucggggaggagggu

SEQ ID NO: 242997 - RNA, 19 nt, Artificial Sequence
  Description of Artificial Sequence: Synthetic oligonucleotide
cgaagaccucuguuccaau

SEQ ID NO: 242998 - RNA, 19 nt, Artificial Sequence
  Description of Artificial Sequence: Synthetic oligonucleotide
gaaucuaugagccagcugc

SEQ ID NO: 242999 - RNA, 19 nt, Artificial Sequence
  Description of Artificial Sequence: Synthetic oligonucleotide
aaagguaguaaccuuguuc

SEQ ID NO: 243000 - RNA, 19 nt, Artificial Sequence
  Description of Artificial Sequence: Synthetic oligonucleotide
gauuuuaagaaugaugggg

SEQ ID NO: 243001 - RNA, 19 nt, Artificial Sequence
  Description of Artificial Sequence: Synthetic oligonucleotide
cuaauuuccaccaucacac

SEQ ID NO: 243002 - RNA, 19 nt, Artificial Sequence
  Description of Artificial Sequence: Synthetic oligonucleotide
cagauaauaccuuuuaugc

SEQ ID NO: 243003 - RNA, 19 nt, Artificial Sequence
  Description of Artificial Sequence: Synthetic oligonucleotide
uguacauuagagcaguaug

SEQ ID NO: 243004 - RNA, 19 nt, Artificial Sequence
  Description of Artificial Sequence: Synthetic oligonucleotide
aaugaugacacucgcuguc

SEQ ID NO: 243005 - RNA, 19 nt, Artificial Sequence
  Description of Artificial Sequence: Synthetic oligonucleotide
uuagguaguucaaacagug

SEQ ID NO: 243006 - RNA, 19 nt, Artificial Sequence
  Description of Artificial Sequence: Synthetic oligonucleotide
auaacuaauuuccaccauc

SEQ ID NO: 243007 - RNA, 19 nt, Artificial Sequence
  Description of Artificial Sequence: Synthetic oligonucleotide
aauaucacuggcuuuaaua

SEQ ID NO: 243008 - RNA, 19 nt, Artificial Sequence
  Description of Artificial Sequence: Synthetic oligonucleotide
ucaugggauaucaacaagc

SEQ ID NO: 243009 - RNA, 19 nt, Artificial Sequence
  Description of Artificial Sequence: Synthetic oligonucleotide
uauucacaccuauaggacg

SEQ ID NO: 243010 - RNA, 19 nt, Artificial Sequence
  Description of Artificial Sequence: Synthetic oligonucleotide
auauccucgggcuaaauug

SEQ ID NO: 243011 - RNA, 19 nt, Artificial Sequence
  Description of Artificial Sequence: Synthetic oligonucleotide
aaacuucuaaccacaauuc

SEQ ID NO: 243012 - RNA, 19 nt, Artificial Sequence
  Description of Artificial Sequence: Synthetic oligonucleotide
uaacuaauuuccaccauca

SEQ ID NO: 243013 - RNA, 19 nt, Artificial Sequence
  Description of Artificial Sequence: Synthetic oligonucleotide
ugguagaugguucagccgc

SEQ ID NO: 243014 - RNA, 19 nt, Artificial Sequence
  Description of Artificial Sequence: Synthetic oligonucleotide
ugacagaucuuucauacaa

SEQ ID NO: 243015 - RNA, 19 nt, Artificial Sequence
  Description of Artificial Sequence: Synthetic oligonucleotide
ugauuaauaaugucugccu

SEQ ID NO: 243016 - RNA, 19 nt, Artificial Sequence
  Description of Artificial Sequence: Synthetic oligonucleotide
agguguuuauuauuauuac

SEQ ID NO: 243017 - RNA, 19 nt, Artificial Sequence
  Description of Artificial Sequence: Synthetic oligonucleotide
cugagacugauuaauaaug

SEQ ID NO: 243018 - RNA, 19 nt, Artificial Sequence
  Description of Artificial Sequence: Synthetic oligonucleotide
cacgguauggugaugacag

SEQ ID NO: 243019 - RNA, 19 nt, Artificial Sequence
  Description of Artificial Sequence: Synthetic oligonucleotide
aacuaauuuccaccaucac

SEQ ID NO: 243020 - RNA, 19 nt, Artificial Sequence
  Description of Artificial Sequence: Synthetic oligonucleotide
cauuagagcaguaugguca

SEQ ID NO: 243021 - RNA, 19 nt, Artificial Sequence
  Description of Artificial Sequence: Synthetic oligonucleotide
ugagacugauuaauaaugu

SEQ ID NO: 243022 - RNA, 19 nt, Artificial Sequence
  Description of Artificial Sequence: Synthetic oligonucleotide
gacugauuaauaaugucug

SEQ ID NO: 243023 - RNA, 19 nt, Artificial Sequence
  Description of Artificial Sequence: Synthetic oligonucleotide
cugcgcauaugguagaugg

SEQ ID NO: 243024 - RNA, 19 nt, Artificial Sequence
  Description of Artificial Sequence: Synthetic oligonucleotide
ucuaagguuaaaccuugca

SEQ ID NO: 243025 - RNA, 19 nt, Artificial Sequence
  Description of Artificial Sequence: Synthetic oligonucleotide
aagguuaaaccuugcaaau

SEQ ID NO: 243026 - RNA, 19 nt, Artificial Sequence
  Description of Artificial Sequence: Synthetic oligonucleotide
uguguaaacaagggcgucg

SEQ ID NO: 243027 - RNA, 19 nt, Artificial Sequence
  Description of Artificial Sequence: Synthetic oligonucleotide
acacaguaaacaauugcgc

SEQ ID NO: 243028 - RNA, 19 nt, Artificial Sequence
  Description of Artificial Sequence: Synthetic oligonucleotide
ucuaagguagggauuguaa

SEQ ID NO: 243029 - RNA, 19 nt, Artificial Sequence
  Description of Artificial Sequence: Synthetic oligonucleotide
aagguugucccucgaguag

SEQ ID NO: 243030 - RNA, 19 nt, Artificial Sequence
  Description of Artificial Sequence: Synthetic oligonucleotide
agccaacugaguuucauug

SEQ ID NO: 243031 - RNA, 19 nt, Artificial Sequence
  Description of Artificial Sequence: Synthetic oligonucleotide
uuaguuuauggguagcuuu

SEQ ID NO: 243032 - RNA, 19 nt, Artificial Sequence
  Description of Artificial Sequence: Synthetic oligonucleotide
uuccuaauuacaaccacua

SEQ ID NO: 243033 - RNA, 19 nt, Artificial Sequence
  Description of Artificial Sequence: Synthetic oligonucleotide
uuuuaugcuggugacuccc

SEQ ID NO: 243034 - RNA, 19 nt, Artificial Sequence
  Description of Artificial Sequence: Synthetic oligonucleotide
uccacgaaguaguagauuu

SEQ ID NO: 243035 - RNA, 19 nt, Artificial Sequence
  Description of Artificial Sequence: Synthetic oligonucleotide
cuucuaaccacaauucuga

SEQ ID NO: 243036 - RNA, 19 nt, Artificial Sequence
  Description of Artificial Sequence: Synthetic oligonucleotide
augaugacggaacuggaga

SEQ ID NO: 243037 - RNA, 19 nt, Artificial Sequence
  Description of Artificial Sequence: Synthetic oligonucleotide
aauugcgccaagguuucgg

SEQ ID NO: 243038 - RNA, 19 nt, Artificial Sequence
  Description of Artificial Sequence: Synthetic oligonucleotide
uaagguagggauuguaaau

SEQ ID NO: 243039 - RNA, 19 nt, Artificial Sequence
  Description of Artificial Sequence: Synthetic oligonucleotide
gacugagucauugaucuug

SEQ ID NO: 243040 - RNA, 19 nt, Artificial Sequence
  Description of Artificial Sequence: Synthetic oligonucleotide
ucgggcuaaauugagaagu

SEQ ID NO: 243041 - RNA, 19 nt, Artificial Sequence
  Description of Artificial Sequence: Synthetic oligonucleotide
aaugaugggguggguuugc

SEQ ID NO: 243042 - RNA, 19 nt, Artificial Sequence
  Description of Artificial Sequence: Synthetic oligonucleotide
uuagaauugaguggacuga

SEQ ID NO: 243043 - RNA, 19 nt, Artificial Sequence
  Description of Artificial Sequence: Synthetic oligonucleotide
uguccuagauuuuaagaau

SEQ ID NO: 243044 - RNA, 19 nt, Artificial Sequence
  Description of Artificial Sequence: Synthetic oligonucleotide
cauugagugugacugaguc

SEQ ID NO: 243045 - RNA, 19 nt, Artificial Sequence
  Description of Artificial Sequence: Synthetic oligonucleotide
aaacaagggcgucgucagc

SEQ ID NO: 243046 - RNA, 19 nt, Artificial Sequence
  Description of Artificial Sequence: Synthetic oligonucleotide
uaaccugccaugaaauauc

SEQ ID NO: 243047 - RNA, 19 nt, Artificial Sequence
  Description of Artificial Sequence: Synthetic oligonucleotide
cuugguagaguaaccugcc

SEQ ID NO: 243048 - RNA, 19 nt, Artificial Sequence
  Description of Artificial Sequence: Synthetic oligonucleotide
agaaccgaugaacuuuaag

SEQ ID NO: 243049 - RNA, 19 nt, Artificial Sequence
  Description of Artificial Sequence: Synthetic oligonucleotide
aauaccuuuuaugcuggug

SEQ ID NO: 243050 - RNA, 19 nt, Artificial Sequence
  Description of Artificial Sequence: Synthetic oligonucleotide
gccgcuagaauuucgaugc

SEQ ID NO: 243051 - RNA, 19 nt, Artificial Sequence
  Description of Artificial Sequence: Synthetic oligonucleotide
uuccauuaguuuaugggua

SEQ ID NO: 243052 - RNA, 19 nt, Artificial Sequence
  Description of Artificial Sequence: Synthetic oligonucleotide
uucgggaucuguuagccuc

SEQ ID NO: 243053 - RNA, 19 nt, Artificial Sequence
  Description of Artificial Sequence: Synthetic oligonucleotide
uuagguguuuauuauuauu

SEQ ID NO: 243054 - RNA, 19 nt, Artificial Sequence
  Description of Artificial Sequence: Synthetic oligonucleotide
agccguuuccucuuacaac

SEQ ID NO: 243055 - RNA, 19 nt, Artificial Sequence
  Description of Artificial Sequence: Synthetic oligonucleotide
auugaguggacugaugccu

SEQ ID NO: 243056 - RNA, 19 nt, Artificial Sequence
  Description of Artificial Sequence: Synthetic oligonucleotide
gaugaugacggaacuggag

SEQ ID NO: 243057 - RNA, 19 nt, Artificial Sequence
  Description of Artificial Sequence: Synthetic oligonucleotide
uauccucgggcuaaauuga

SEQ ID NO: 243058 - RNA, 19 nt, Artificial Sequence
  Description of Artificial Sequence: Synthetic oligonucleotide
uauaggacgugcuuccauc

SEQ ID NO: 243059 - RNA, 19 nt, Artificial Sequence
  Description of Artificial Sequence: Synthetic oligonucleotide
acuucuaaccacaauucug

SEQ ID NO: 243060 - RNA, 19 nt, Artificial Sequence
  Description of Artificial Sequence: Synthetic oligonucleotide
aacaagggcgucgucagcu

SEQ ID NO: 243061 - RNA, 19 nt, Artificial Sequence
  Description of Artificial Sequence: Synthetic oligonucleotide
uacauuagagcaguauggu

SEQ ID NO: 243062 - RNA, 19 nt, Artificial Sequence
  Description of Artificial Sequence: Synthetic oligonucleotide
uaacaaggggucaaacaaa

SEQ ID NO: 243063 - RNA, 19 nt, Artificial Sequence
  Description of Artificial Sequence: Synthetic oligonucleotide
ccagauaauaccuuuuaug

SEQ ID NO: 243064 - RNA, 19 nt, Artificial Sequence
  Description of Artificial Sequence: Synthetic oligonucleotide
aguagccaacuaugaaagg

SEQ ID NO: 243065 - RNA, 19 nt, Artificial Sequence
  Description of Artificial Sequence: Synthetic oligonucleotide
ugggcugaugaaucuauga

SEQ ID NO: 243066 - RNA, 19 nt, Artificial Sequence
  Description of Artificial Sequence: Synthetic oligonucleotide
ugcugagacugauuaauaa

SEQ ID NO: 243067 - RNA, 19 nt, Artificial Sequence
  Description of Artificial Sequence: Synthetic oligonucleotide
cuaagguuaaaccuugcaa

SEQ ID NO: 243068 - RNA, 19 nt, Artificial Sequence
  Description of Artificial Sequence: Synthetic oligonucleotide
uacuccguggagaggcugg

SEQ ID NO: 243069 - RNA, 19 nt, Artificial Sequence
  Description of Artificial Sequence: Synthetic oligonucleotide
ugguagaguaaccugccau

SEQ ID NO: 243070 - RNA, 19 nt, Artificial Sequence
  Description of Artificial Sequence: Synthetic oligonucleotide
ucuaaccacaauucugaau

SEQ ID NO: 243071 - RNA, 19 nt, Artificial Sequence
  Description of Artificial Sequence: Synthetic oligonucleotide
auccauaacuaaauuacca

SEQ ID NO: 243072 - RNA, 19 nt, Artificial Sequence
  Description of Artificial Sequence: Synthetic oligonucleotide
cucuacuccguggagaggc

SEQ ID NO: 243073 - RNA, 19 nt, Artificial Sequence
  Description of Artificial Sequence: Synthetic oligonucleotide
ugaaucuaugagccagcug

SEQ ID NO: 243074 - RNA, 19 nt, Artificial Sequence
  Description of Artificial Sequence: Synthetic oligonucleotide
caugcauguaagugucucc

SEQ ID NO: 243075 - RNA, 19 nt, Artificial Sequence
  Description of Artificial Sequence: Synthetic oligonucleotide
ucuugcgucugcagggacc

SEQ ID NO: 243076 - RNA, 19 nt, Artificial Sequence
  Description of Artificial Sequence: Synthetic oligonucleotide
ggcugaugaaucuaugagc

SEQ ID NO: 243077 - RNA, 19 nt, Artificial Sequence
  Description of Artificial Sequence: Synthetic oligonucleotide
aacaaggggucaaacaaau

SEQ ID NO: 243078 - RNA, 19 nt, Artificial Sequence
  Description of Artificial Sequence: Synthetic oligonucleotide
guaguucaaacagugugug

SEQ ID NO: 243079 - RNA, 19 nt, Artificial Sequence
  Description of Artificial Sequence: Synthetic oligonucleotide
uuuaugcuggugacucccc

SEQ ID NO: 243080 - RNA, 19 nt, Artificial Sequence
  Description of Artificial Sequence: Synthetic oligonucleotide
uaagguugucccucgagua

SEQ ID NO: 243081 - RNA, 19 nt, Artificial Sequence
  Description of Artificial Sequence: Synthetic oligonucleotide
aagguuucgggaucuguua

SEQ ID NO: 243082 - RNA, 19 nt, Artificial Sequence
  Description of Artificial Sequence: Synthetic oligonucleotide
agccgcuagaauuucgaug

SEQ ID NO: 243083 - RNA, 19 nt, Artificial Sequence
  Description of Artificial Sequence: Synthetic oligonucleotide
gacgaugaaggacauccuc

SEQ ID NO: 243084 - RNA, 19 nt, Artificial Sequence
  Description of Artificial Sequence: Synthetic oligonucleotide
caggguauaccauuguaca

SEQ ID NO: 243085 - RNA, 19 nt, Artificial Sequence
  Description of Artificial Sequence: Synthetic oligonucleotide
auucuaagguuaaaccuug

SEQ ID NO: 243086 - RNA, 19 nt, Artificial Sequence
  Description of Artificial Sequence: Synthetic oligonucleotide
guccuagauuuuaagaaug

SEQ ID NO: 243087 - RNA, 19 nt, Artificial Sequence
  Description of Artificial Sequence: Synthetic oligonucleotide
guugugagccagcugucag

SEQ ID NO: 243088 - RNA, 19 nt, Artificial Sequence
  Description of Artificial Sequence: Synthetic oligonucleotide
agcuugguagaguaaccug

SEQ ID NO: 243089 - RNA, 19 nt, Artificial Sequence
  Description of Artificial Sequence: Synthetic oligonucleotide
guaaacaagggcgucguca

SEQ ID NO: 243090 - RNA, 19 nt, Artificial Sequence
  Description of Artificial Sequence: Synthetic oligonucleotide
gguagaguaaccugccaug

SEQ ID NO: 243091 - RNA, 19 nt, Artificial Sequence
  Description of Artificial Sequence: Synthetic oligonucleotide
ugugggcugaugaaucuau

SEQ ID NO: 243092 - RNA, 19 nt, Artificial Sequence
  Description of Artificial Sequence: Synthetic oligonucleotide
ugaugacggaacuggagau

SEQ ID NO: 243093 - RNA, 19 nt, Artificial Sequence
  Description of Artificial Sequence: Synthetic oligonucleotide
uucuaagguuaaaccuugc

SEQ ID NO: 243094 - RNA, 19 nt, Artificial Sequence
  Description of Artificial Sequence: Synthetic oligonucleotide
agacucagauaacuaauuu

SEQ ID NO: 243095 - RNA, 19 nt, Artificial Sequence
  Description of Artificial Sequence: Synthetic oligonucleotide
uaccuuuuaugcuggugac

SEQ ID NO: 243096 - RNA, 19 nt, Artificial Sequence
  Description of Artificial Sequence: Synthetic oligonucleotide
aguuuccuaauuacaacca

SEQ ID NO: 243097 - RNA, 19 nt, Artificial Sequence
  Description of Artificial Sequence: Synthetic oligonucleotide
acaauugcgccaagguuuc

SEQ ID NO: 243098 - RNA, 19 nt, Artificial Sequence
  Description of Artificial Sequence: Synthetic oligonucleotide
agacaagccaucauucaug

SEQ ID NO: 243099 - RNA, 19 nt, Artificial Sequence
  Description of Artificial Sequence: Synthetic oligonucleotide
cuagaauuucgaugcagga

SEQ ID NO: 243100 - RNA, 19 nt, Artificial Sequence
  Description of Artificial Sequence: Synthetic oligonucleotide
auaggacgugcuuccaucu

SEQ ID NO: 243101 - RNA, 19 nt, Artificial Sequence
  Description of Artificial Sequence: Synthetic oligonucleotide
uagaaacuucuaaccacaa

SEQ ID NO: 243102 - RNA, 19 nt, Artificial Sequence
  Description of Artificial Sequence: Synthetic oligonucleotide
aacgcccggaagcaauugu

SEQ ID NO: 243103 - RNA, 19 nt, Artificial Sequence
  Description of Artificial Sequence: Synthetic oligonucleotide
uccuaauuacaaccacuau

SEQ ID NO: 243104 - RNA, 19 nt, Artificial Sequence
  Description of Artificial Sequence: Synthetic oligonucleotide
auucacaccuauaggacgu

SEQ ID NO: 243105 - RNA, 19 nt, Artificial Sequence
  Description of Artificial Sequence: Synthetic oligonucleotide
cacuggcccuuucaaaucc

SEQ ID NO: 243106 - RNA, 19 nt, Artificial Sequence
  Description of Artificial Sequence: Synthetic oligonucleotide
uuucgaugcaggauuucuu

SEQ ID NO: 243107 - RNA, 19 nt, Artificial Sequence
  Description of Artificial Sequence: Synthetic oligonucleotide
ucuaggccuugucggaucu

SEQ ID NO: 243108 - RNA, 19 nt, Artificial Sequence
  Description of Artificial Sequence: Synthetic oligonucleotide
augacggaacuggagauga

SEQ ID NO: 243109 - RNA, 19 nt, Artificial Sequence
  Description of Artificial Sequence: Synthetic oligonucleotide
uugguagaguaaccugcca

SEQ ID NO: 243110 - RNA, 19 nt, Artificial Sequence
  Description of Artificial Sequence: Synthetic oligonucleotide
agaugguucagccgcuaga

SEQ ID NO: 243111 - RNA, 19 nt, Artificial Sequence
  Description of Artificial Sequence: Synthetic oligonucleotide
uccaggguauaccauugua

SEQ ID NO: 243112 - RNA, 19 nt, Artificial Sequence
  Description of Artificial Sequence: Synthetic oligonucleotide
aagacauacugggucaauu

SEQ ID NO: 243113 - RNA, 19 nt, Artificial Sequence
  Description of Artificial Sequence: Synthetic oligonucleotide
uuguacauuagagcaguau

SEQ ID NO: 243114 - RNA, 19 nt, Artificial Sequence
  Description of Artificial Sequence: Synthetic oligonucleotide
gaugacggaacuggagaug

SEQ ID NO: 243115 - RNA, 19 nt, Artificial Sequence
  Description of Artificial Sequence: Synthetic oligonucleotide
ugucggaucuguucccugu

SEQ ID NO: 243116 - RNA, 19 nt, Artificial Sequence
  Description of Artificial Sequence: Synthetic oligonucleotide
agccagguagacuuuuccu

SEQ ID NO: 243117 - RNA, 19 nt, Artificial Sequence
  Description of Artificial Sequence: Synthetic oligonucleotide
gaacuuuaagccagguaga

SEQ ID NO: 243118 - RNA, 19 nt, Artificial Sequence
  Description of Artificial Sequence: Synthetic oligonucleotide
cacgaaguaguagauuuuc

SEQ ID NO: 243119 - RNA, 19 nt, Artificial Sequence
  Description of Artificial Sequence: Synthetic oligonucleotide
ugaugacacucgcuguccu

SEQ ID NO: 243120 - RNA, 19 nt, Artificial Sequence
  Description of Artificial Sequence: Synthetic oligonucleotide
uaauuuccaccaucacacu

SEQ ID NO: 243121 - RNA, 19 nt, Artificial Sequence
  Description of Artificial Sequence: Synthetic oligonucleotide
aaucuaugagccagcugcu

SEQ ID NO: 243122 - RNA, 19 nt, Artificial Sequence
  Description of Artificial Sequence: Synthetic oligonucleotide
ccuggaaacgcccggaagc

SEQ ID NO: 243123 - RNA, 19 nt, Artificial Sequence
  Description of Artificial Sequence: Synthetic oligonucleotide
gaugguucagccgcuagaa

SEQ ID NO: 243124 - RNA, 19 nt, Artificial Sequence
  Description of Artificial Sequence: Synthetic oligonucleotide
caagaugggugcugggcac

SEQ ID NO: 243125 - RNA, 19 nt, Artificial Sequence
  Description of Artificial Sequence: Synthetic oligonucleotide
auacaaugacucagagacg

SEQ ID NO: 243126 - RNA, 19 nt, Artificial Sequence
  Description of Artificial Sequence: Synthetic oligonucleotide
agcacgguauggugaugac

SEQ ID NO: 243127 - RNA, 19 nt, Artificial Sequence
  Description of Artificial Sequence: Synthetic oligonucleotide
uccccgacggguccccugg

SEQ ID NO: 243128 - RNA, 19 nt, Artificial Sequence
  Description of Artificial Sequence: Synthetic oligonucleotide
uccucgggcuaaauugaga

SEQ ID NO: 243129 - RNA, 19 nt, Artificial Sequence
  Description of Artificial Sequence: Synthetic oligonucleotide
cucgggcuaaauugagaag

SEQ ID NO: 243130 - RNA, 19 nt, Artificial Sequence
  Description of Artificial Sequence: Synthetic oligonucleotide
uucuaaccacaauucugaa

SEQ ID NO: 243131 - RNA, 19 nt, Artificial Sequence
  Description of Artificial Sequence: Synthetic oligonucleotide
ugaguggacugaugccuug

SEQ ID NO: 243132 - RNA, 19 nt, Artificial Sequence
  Description of Artificial Sequence: Synthetic oligonucleotide
uacugucugcaauccgagc

SEQ ID NO: 243133 - RNA, 19 nt, Artificial Sequence
  Description of Artificial Sequence: Synthetic oligonucleotide
gaagccguuuccucuuaca

SEQ ID NO: 243134 - RNA, 19 nt, Artificial Sequence
  Description of Artificial Sequence: Synthetic oligonucleotide
guugcgggcgugucggaag

SEQ ID NO: 243135 - RNA, 19 nt, Artificial Sequence
  Description of Artificial Sequence: Synthetic oligonucleotide
auuaguuuauggguagcuu

SEQ ID NO: 243136 - RNA, 19 nt, Artificial Sequence
  Description of Artificial Sequence: Synthetic oligonucleotide
ugcgcauaugguagauggu

SEQ ID NO: 243137 - RNA, 19 nt, Artificial Sequence
  Description of Artificial Sequence: Synthetic oligonucleotide
auuuaagguugucccucga

SEQ ID NO: 243138 - RNA, 19 nt, Artificial Sequence
  Description of Artificial Sequence: Synthetic oligonucleotide
ggaucuguuagccucccuc

SEQ ID NO: 243139 - RNA, 19 nt, Artificial Sequence
  Description of Artificial Sequence: Synthetic oligonucleotide
gguuucggguuucagggac

SEQ ID NO: 243140 - RNA, 19 nt, Artificial Sequence
  Description of Artificial Sequence: Synthetic oligonucleotide
uugaguggacugaugccuu

SEQ ID NO: 243141 - RNA, 19 nt, Artificial Sequence
  Description of Artificial Sequence: Synthetic oligonucleotide
uuucgggaucuguuagccu

SEQ ID NO: 243142 - RNA, 19 nt, Artificial Sequence
  Description of Artificial Sequence: Synthetic oligonucleotide
cacgcagaguccccgcagg

SEQ ID NO: 243143 - RNA, 19 nt, Artificial Sequence
  Description of Artificial Sequence: Synthetic oligonucleotide
uugcgggcgugucggaagc

SEQ ID NO: 243144 - RNA, 19 nt, Artificial Sequence
  Description of Artificial Sequence: Synthetic oligonucleotide
uguaaacaagggcgucguc

SEQ ID NO: 243145 - RNA, 19 nt, Artificial Sequence
  Description of Artificial Sequence: Synthetic oligonucleotide
aaacgcccggaagcaauug

SEQ ID NO: 243146 - RNA, 19 nt, Artificial Sequence
  Description of Artificial Sequence: Synthetic oligonucleotide
ucacaccuauaggacgugc

SEQ ID NO: 243147 - RNA, 19 nt, Artificial Sequence
  Description of Artificial Sequence: Synthetic oligonucleotide
uucuaggccuugucggauc

SEQ ID NO: 243148 - RNA, 19 nt, Artificial Sequence
  Description of Artificial Sequence: Synthetic oligonucleotide
gguuucgggaucuguuagc

SEQ ID NO: 243149 - RNA, 19 nt, Artificial Sequence
  Description of Artificial Sequence: Synthetic oligonucleotide
ucuacuccguggagaggcu

SEQ ID NO: 243150 - RNA, 19 nt, Artificial Sequence
  Description of Artificial Sequence: Synthetic oligonucleotide
cacgagcgcagccacgcag

SEQ ID NO: 243151 - RNA, 19 nt, Artificial Sequence
  Description of Artificial Sequence: Synthetic oligonucleotide
aucguucacaggaaacaca

SEQ ID NO: 243152 - RNA, 19 nt, Artificial Sequence
  Description of Artificial Sequence: Synthetic oligonucleotide
ucgucagcucaguaacuau

SEQ ID NO: 243153 - RNA, 19 nt, Artificial Sequence
  Description of Artificial Sequence: Synthetic oligonucleotide
gcauaugguagaugguuca

SEQ ID NO: 243154 - RNA, 19 nt, Artificial Sequence
  Description of Artificial Sequence: Synthetic oligonucleotide
ucucuugcgucugcaggga

SEQ ID NO: 243155 - RNA, 19 nt, Artificial Sequence
  Description of Artificial Sequence: Synthetic oligonucleotide
guaaccugccaugaaauau

SEQ ID NO: 243156 - RNA, 19 nt, Artificial Sequence
  Description of Artificial Sequence: Synthetic oligonucleotide
aguggacugaugccuugaa

SEQ ID NO: 243157 - RNA, 19 nt, Artificial Sequence
  Description of Artificial Sequence: Synthetic oligonucleotide
aguuccgucccgagggcuc

SEQ ID NO: 243158 - RNA, 19 nt, Artificial Sequence
  Description of Artificial Sequence: Synthetic oligonucleotide
auccgagccaacugaguuu

SEQ ID NO: 243159 - RNA, 19 nt, Artificial Sequence
  Description of Artificial Sequence: Synthetic oligonucleotide
uucacaccuauaggacgug

SEQ ID NO: 243160 - RNA, 19 nt, Artificial Sequence
  Description of Artificial Sequence: Synthetic oligonucleotide
agguuaaaccuugcaaauu

SEQ ID NO: 243161 - RNA, 19 nt, Artificial Sequence
  Description of Artificial Sequence: Synthetic oligonucleotide
acgcccggaagcaauuguc

SEQ ID NO: 243162 - RNA, 19 nt, Artificial Sequence
  Description of Artificial Sequence: Synthetic oligonucleotide
gguauaccauuguacaggu

SEQ ID NO: 243163 - RNA, 19 nt, Artificial Sequence
  Description of Artificial Sequence: Synthetic oligonucleotide
acagaaccgaugaacuuua

SEQ ID NO: 243164 - RNA, 19 nt, Artificial Sequence
  Description of Artificial Sequence: Synthetic oligonucleotide
agguggcaagugaagacca

SEQ ID NO: 243165 - RNA, 19 nt, Artificial Sequence
  Description of Artificial Sequence: Synthetic oligonucleotide
ucccucgaguagagaagac

SEQ ID NO: 243166 - RNA, 19 nt, Artificial Sequence
  Description of Artificial Sequence: Synthetic oligonucleotide
gugcccggcgcacacgagc

SEQ ID NO: 243167 - RNA, 19 nt, Artificial Sequence
  Description of Artificial Sequence: Synthetic oligonucleotide
gucccucgaguagagaaga

SEQ ID NO: 243168 - RNA, 19 nt, Artificial Sequence
  Description of Artificial Sequence: Synthetic oligonucleotide
ugacggaacuggagaugaa

SEQ ID NO: 243169 - RNA, 19 nt, Artificial Sequence
  Description of Artificial Sequence: Synthetic oligonucleotide
cccucgaguagagaagacg

SEQ ID NO: 243170 - RNA, 19 nt, Artificial Sequence
  Description of Artificial Sequence: Synthetic oligonucleotide
ggcuaaauugagaaguagu

SEQ ID NO: 243171 - RNA, 19 nt, Artificial Sequence
  Description of Artificial Sequence: Synthetic oligonucleotide
cauuaguuuauggguagcu

SEQ ID NO: 243172 - RNA, 19 nt, Artificial Sequence
  Description of Artificial Sequence: Synthetic oligonucleotide
uaguaaccuuguucaguuu

SEQ ID NO: 243173 - RNA, 19 nt, Artificial Sequence
  Description of Artificial Sequence: Synthetic oligonucleotide
auccucgggcuaaauugag

SEQ ID NO: 243174 - RNA, 19 nt, Artificial Sequence
  Description of Artificial Sequence: Synthetic oligonucleotide
acgguauggugaugacaga

SEQ ID NO: 243175 - RNA, 19 nt, Artificial Sequence
  Description of Artificial Sequence: Synthetic oligonucleotide
gcugagacugauuaauaau

SEQ ID NO: 243176 - RNA, 19 nt, Artificial Sequence
  Description of Artificial Sequence: Synthetic oligonucleotide
uacgcggccgggccucccc

SEQ ID NO: 243177 - RNA, 19 nt, Artificial Sequence
  Description of Artificial Sequence: Synthetic oligonucleotide
ugguuuccgccgguucugc

SEQ ID NO: 243178 - RNA, 19 nt, Artificial Sequence
  Description of Artificial Sequence: Synthetic oligonucleotide
gguuuccgccgguucugcg

SEQ ID NO: 243179 - RNA, 19 nt, Artificial Sequence
  Description of Artificial Sequence: Synthetic oligonucleotide
gcguguagcuuugcagucg

SEQ ID NO: 243180 - RNA, 19 nt, Artificial Sequence
  Description of Artificial Sequence: Synthetic oligonucleotide
cuucucauugagugugacu

SEQ ID NO: 243181 - RNA, 19 nt, Artificial Sequence
  Description of Artificial Sequence: Synthetic oligonucleotide
ggcgucgucagcucaguaa

SEQ ID NO: 243182 - RNA, 19 nt, Artificial Sequence
  Description of Artificial Sequence: Synthetic oligonucleotide
agacgaugaaggacauccu

SEQ ID NO: 243183 - RNA, 19 nt, Artificial Sequence
  Description of Artificial Sequence: Synthetic oligonucleotide
cucuugcgucugcagggac

SEQ ID NO: 243184 - RNA, 19 nt, Artificial Sequence
  Description of Artificial Sequence: Synthetic oligonucleotide
gugggcugaugaaucuaug

SEQ ID NO: 243185 - RNA, 19 nt, Artificial Sequence
  Description of Artificial Sequence: Synthetic oligonucleotide
ugacacucgcuguccugua

SEQ ID NO: 243186 - RNA, 19 nt, Artificial Sequence
  Description of Artificial Sequence: Synthetic oligonucleotide
uggaaacgcccggaagcaa

SEQ ID NO: 243187 - RNA, 19 nt, Artificial Sequence
  Description of Artificial Sequence: Synthetic oligonucleotide
cagacaccccgcgcggucc

SEQ ID NO: 243188 - RNA, 19 nt, Artificial Sequence
  Description of Artificial Sequence: Synthetic oligonucleotide
caauugcgccaagguuucg

SEQ ID NO: 243189 - RNA, 19 nt, Artificial Sequence
  Description of Artificial Sequence: Synthetic oligonucleotide
guguaaacaagggcgucgu

SEQ ID NO: 243190 - RNA, 19 nt, Artificial Sequence
  Description of Artificial Sequence: Synthetic oligonucleotide
cauauccucgggcuaaauu

SEQ ID NO: 243191 - RNA, 19 nt, Artificial Sequence
  Description of Artificial Sequence: Synthetic oligonucleotide
uccugcgcauaugguagau

SEQ ID NO: 243192 - RNA, 19 nt, Artificial Sequence
  Description of Artificial Sequence: Synthetic oligonucleotide
gucuccuacagcacgguau

SEQ ID NO: 243193 - RNA, 19 nt, Artificial Sequence
  Description of Artificial Sequence: Synthetic oligonucleotide
ccaucguucacaggaaaca

SEQ ID NO: 243194 - RNA, 19 nt, Artificial Sequence
  Description of Artificial Sequence: Synthetic oligonucleotide
cagcacgcuuccugacuug

SEQ ID NO: 243195 - RNA, 19 nt, Artificial Sequence
  Description of Artificial Sequence: Synthetic oligonucleotide
caagggcgucgucagcuca

SEQ ID NO: 243196 - RNA, 19 nt, Artificial Sequence
  Description of Artificial Sequence: Synthetic oligonucleotide
uccacguugcgggcguguc

SEQ ID NO: 243197 - RNA, 19 nt, Artificial Sequence
  Description of Artificial Sequence: Synthetic oligonucleotide
gacggguccccuggcugcc

SEQ ID NO: 243198 - RNA, 19 nt, Artificial Sequence
  Description of Artificial Sequence: Synthetic oligonucleotide
ggaagccguuuccucuuac

SEQ ID NO: 243199 - RNA, 19 nt, Artificial Sequence
  Description of Artificial Sequence: Synthetic oligonucleotide
agacaccccgcgcggucca

SEQ ID NO: 243200 - RNA, 19 nt, Artificial Sequence
  Description of Artificial Sequence: Synthetic oligonucleotide
cuugcgucugcagggaccu

SEQ ID NO: 243201 - RNA, 19 nt, Artificial Sequence
  Description of Artificial Sequence: Synthetic oligonucleotide
gaccccagggcgcucuacu

SEQ ID NO: 243202 - RNA, 19 nt, Artificial Sequence
  Description of Artificial Sequence: Synthetic oligonucleotide
gguugugagccagcuguca

SEQ ID NO: 243203 - RNA, 19 nt, Artificial Sequence
  Description of Artificial Sequence: Synthetic oligonucleotide
acagcacgguauggugaug

SEQ ID NO: 243204 - RNA, 19 nt, Artificial Sequence
  Description of Artificial Sequence: Synthetic oligonucleotide
cuccugcgcauaugguaga

SEQ ID NO: 243205 - RNA, 19 nt, Artificial Sequence
  Description of Artificial Sequence: Synthetic oligonucleotide
auacgcggccgggccuccc

SEQ ID NO: 243206 - RNA, 19 nt, Artificial Sequence
  Description of Artificial Sequence: Synthetic oligonucleotide
cgcuagaauuucgaugcag

SEQ ID NO: 243207 - RNA, 19 nt, Artificial Sequence
  Description of Artificial Sequence: Synthetic oligonucleotide
gacacucgcuguccuguau

SEQ ID NO: 243208 - RNA, 19 nt, Artificial Sequence
  Description of Artificial Sequence: Synthetic oligonucleotide
ucgcggcgugccccgugcc

SEQ ID NO: 243209 - RNA, 19 nt, Artificial Sequence
  Description of Artificial Sequence: Synthetic oligonucleotide
ccacguugcgggcgugucg

SEQ ID NO: 243210 - RNA, 19 nt, Artificial Sequence
  Description of Artificial Sequence: Synthetic oligonucleotide
ccucaguuaguuucauuua

SEQ ID NO: 243211 - RNA, 19 nt, Artificial Sequence
  Description of Artificial Sequence: Synthetic oligonucleotide
ggguuucggguuucaggga

SEQ ID NO: 243212 - RNA, 19 nt, Artificial Sequence
  Description of Artificial Sequence: Synthetic oligonucleotide
gguggcaagugaagaccac

SEQ ID NO: 243213 - RNA, 19 nt, Artificial Sequence
  Description of Artificial Sequence: Synthetic oligonucleotide
gcacgguauggugaugaca

SEQ ID NO: 243214 - RNA, 19 nt, Artificial Sequence
  Description of Artificial Sequence: Synthetic oligonucleotide
gaaacgcccggaagcaauu

SEQ ID NO: 243215 - RNA, 19 nt, Artificial Sequence
  Description of Artificial Sequence: Synthetic oligonucleotide
ggucaauucuaagguuaaa

SEQ ID NO: 243216 - RNA, 19 nt, Artificial Sequence
  Description of Artificial Sequence: Synthetic oligonucleotide
ccacgcagaguccccgcag

SEQ ID NO: 243217 - RNA, 19 nt, Artificial Sequence
  Description of Artificial Sequence: Synthetic oligonucleotide
agggcgucgucagcucagu

SEQ ID NO: 243218 - RNA, 19 nt, Artificial Sequence
  Description of Artificial Sequence: Synthetic oligonucleotide
cauacgcggccgggccucc

SEQ ID NO: 243219 - RNA, 19 nt, Artificial Sequence
  Description of Artificial Sequence: Synthetic oligonucleotide
cccgcgcgguccaugcugc

SEQ ID NO: 243220 - RNA, 19 nt, Artificial Sequence
  Description of Artificial Sequence: Synthetic oligonucleotide
cugugggcugaugaaucua

SEQ ID NO: 243221 - RNA, 19 nt, Artificial Sequence
  Description of Artificial Sequence: Synthetic oligonucleotide
ggaaacgcccggaagcaau

SEQ ID NO: 243222 - RNA, 19 nt, Artificial Sequence
  Description of Artificial Sequence: Synthetic oligonucleotide
cgggccgucaggccgcucc

SEQ ID NO: 243223 - RNA, 19 nt, Artificial Sequence
  Description of Artificial Sequence: Synthetic oligonucleotide
ugccccgugcccggcgcac

SEQ ID NO: 243224 - RNA, 19 nt, Artificial Sequence
  Description of Artificial Sequence: Synthetic oligonucleotide
gcgcauaugguagaugguu

SEQ ID NO: 243225 - RNA, 19 nt, Artificial Sequence
  Description of Artificial Sequence: Synthetic oligonucleotide
acaccccgcgcgguccaug

SEQ ID NO: 243226 - RNA, 19 nt, Artificial Sequence
  Description of Artificial Sequence: Synthetic oligonucleotide
gcgugucggaagccguuuc

SEQ ID NO: 243227 - RNA, 19 nt, Artificial Sequence
  Description of Artificial Sequence: Synthetic oligonucleotide
gcgcucuacuccguggaga

SEQ ID NO: 243228 - RNA, 19 nt, Artificial Sequence
  Description of Artificial Sequence: Synthetic oligonucleotide
cuguccacguugcgggcgu

SEQ ID NO: 243229 - RNA, 19 nt, Artificial Sequence
  Description of Artificial Sequence: Synthetic oligonucleotide
gggccgucaggccgcuccc

SEQ ID NO: 243230 - RNA, 19 nt, Artificial Sequence
  Description of Artificial Sequence: Synthetic oligonucleotide
cagccgcuagaauuucgau

SEQ ID NO: 243231 - RNA, 19 nt, Artificial Sequence
  Description of Artificial Sequence: Synthetic oligonucleotide
uccgucccgagggcucuuu

SEQ ID NO: 243232 - RNA, 19 nt, Artificial Sequence
  Description of Artificial Sequence: Synthetic oligonucleotide
guuccgucccgagggcucu

SEQ ID NO: 243233 - RNA, 19 nt, Artificial Sequence
  Description of Artificial Sequence: Synthetic oligonucleotide
ggccgucaggccgcucccg

SEQ ID NO: 243234 - RNA, 19 nt, Artificial Sequence
  Description of Artificial Sequence: Synthetic oligonucleotide
ccuauaggacgugcuucca

SEQ ID NO: 243235 - RNA, 19 nt, Artificial Sequence
  Description of Artificial Sequence: Synthetic oligonucleotide
gcgugccccgugcccggcg

SEQ ID NO: 243236 - RNA, 19 nt, Artificial Sequence
  Description of Artificial Sequence: Synthetic oligonucleotide
guguagcuuugcagucgaa

SEQ ID NO: 243237 - RNA, 19 nt, Artificial Sequence
  Description of Artificial Sequence: Synthetic oligonucleotide
ccgcacccagacaccccgc

SEQ ID NO: 243238 - RNA, 19 nt, Artificial Sequence
  Description of Artificial Sequence: Synthetic oligonucleotide
caguuccgucccgagggcu

SEQ ID NO: 243239 - RNA, 19 nt, Artificial Sequence
  Description of Artificial Sequence: Synthetic oligonucleotide
ccggcgcacacgagcacga

SEQ ID NO: 243240 - RNA, 19 nt, Artificial Sequence
  Description of Artificial Sequence: Synthetic oligonucleotide
gcacgagcgcagccacgca

SEQ ID NO: 243241 - RNA, 19 nt, Artificial Sequence
  Description of Artificial Sequence: Synthetic oligonucleotide
ccgcuagaauuucgaugca

SEQ ID NO: 243242 - RNA, 19 nt, Artificial Sequence
  Description of Artificial Sequence: Synthetic oligonucleotide
uuccgucccgagggcucuu

SEQ ID NO: 243243 - RNA, 19 nt, Artificial Sequence
  Description of Artificial Sequence: Synthetic oligonucleotide
ccgucccgagggcucuuug

SEQ ID NO: 243244 - RNA, 19 nt, Artificial Sequence
  Description of Artificial Sequence: Synthetic oligonucleotide
gggaucuguuagccucccu

SEQ ID NO: 243245 - RNA, 19 nt, Artificial Sequence
  Description of Artificial Sequence: Synthetic oligonucleotide
gggcgucgucagcucagua

SEQ ID NO: 243246 - RNA, 19 nt, Artificial Sequence
  Description of Artificial Sequence: Synthetic oligonucleotide
ccgagccaacugaguuuca

SEQ ID NO: 243247 - RNA, 19 nt, Artificial Sequence
  Description of Artificial Sequence: Synthetic oligonucleotide
ggcgugucggaagccguuu

SEQ ID NO: 243248 - RNA, 19 nt, Artificial Sequence
  Description of Artificial Sequence: Synthetic oligonucleotide
cgucgucagcucaguaacu

SEQ ID NO: 243249 - RNA, 19 nt, Artificial Sequence
  Description of Artificial Sequence: Synthetic oligonucleotide
ucgggccgucaggccgcuc

SEQ ID NO: 243250 - RNA, 19 nt, Artificial Sequence
  Description of Artificial Sequence: Synthetic oligonucleotide
gacaccccgcgcgguccau

SEQ ID NO: 243251 - RNA, 19 nt, Artificial Sequence
  Description of Artificial Sequence: Synthetic oligonucleotide
cguugcgggcgugucggaa

SEQ ID NO: 243252 - RNA, 19 nt, Artificial Sequence
  Description of Artificial Sequence: Synthetic oligonucleotide
cggcgcacacgagcacgag

SEQ ID NO: 243253 - RNA, 19 nt, Artificial Sequence
  Description of Artificial Sequence: Synthetic oligonucleotide
gggcgugucggaagccguu

SEQ ID NO: 243254 - RNA, 19 nt, Artificial Sequence
  Description of Artificial Sequence: Synthetic oligonucleotide
ccgcgcgguccaugcugca

SEQ ID NO: 243255 - RNA, 19 nt, Artificial Sequence
  Description of Artificial Sequence: Synthetic oligonucleotide
aauagauauucauuaagcc

SEQ ID NO: 243256 - RNA, 19 nt, Artificial Sequence
  Description of Artificial Sequence: Synthetic oligonucleotide
aaauagauauucauuaagc

SEQ ID NO: 243257 - RNA, 19 nt, Artificial Sequence
  Description of Artificial Sequence: Synthetic oligonucleotide
uuagaaaggaaacaaaaca

SEQ ID NO: 243258 - RNA, 19 nt, Artificial Sequence
  Description of Artificial Sequence: Synthetic oligonucleotide
uuucauacugaauaaauag

SEQ ID NO: 243259 - RNA, 19 nt, Artificial Sequence
  Description of Artificial Sequence: Synthetic oligonucleotide
aucauauauacacacgugg

SEQ ID NO: 243260 - RNA, 19 nt, Artificial Sequence
  Description of Artificial Sequence: Synthetic oligonucleotide
aauggugacaccgagaugu

SEQ ID NO: 243261 - RNA, 19 nt, Artificial Sequence
  Description of Artificial Sequence: Synthetic oligonucleotide
aauaaagggcaacagucag

SEQ ID NO: 243262 - RNA, 19 nt, Artificial Sequence
  Description of Artificial Sequence: Synthetic oligonucleotide
uauuauuacaguauguuua

SEQ ID NO: 243263 - RNA, 19 nt, Artificial Sequence
  Description of Artificial Sequence: Synthetic oligonucleotide
uaacacguggaacauauag

SEQ ID NO: 243264 - RNA, 19 nt, Artificial Sequence
  Description of Artificial Sequence: Synthetic oligonucleotide
ugugaaaccaaugaguuca

SEQ ID NO: 243265 - RNA, 19 nt, Artificial Sequence
  Description of Artificial Sequence: Synthetic oligonucleotide
aacucgucauacuauaaag

SEQ ID NO: 243266 - RNA, 19 nt, Artificial Sequence
  Description of Artificial Sequence: Synthetic oligonucleotide
auuguuguaagguguuucc

SEQ ID NO: 243267 - RNA, 19 nt, Artificial Sequence
  Description of Artificial Sequence: Synthetic oligonucleotide
uauaguauaaagauuucau

SEQ ID NO: 243268 - RNA, 19 nt, Artificial Sequence
  Description of Artificial Sequence: Synthetic oligonucleotide
aaagguuaaaaccagucua

SEQ ID NO: 243269 - RNA, 19 nt, Artificial Sequence
  Description of Artificial Sequence: Synthetic oligonucleotide
auagauauucauuaagcca

SEQ ID NO: 243270 - RNA, 19 nt, Artificial Sequence
  Description of Artificial Sequence: Synthetic oligonucleotide
caucgcaccacgaagagcg

SEQ ID NO: 243271 - RNA, 19 nt, Artificial Sequence
  Description of Artificial Sequence: Synthetic oligonucleotide
agagagugaacucugagug

SEQ ID NO: 243272 - RNA, 19 nt, Artificial Sequence
  Description of Artificial Sequence: Synthetic oligonucleotide
acagccgugacucauagag

SEQ ID NO: 243273 - RNA, 19 nt, Artificial Sequence
  Description of Artificial Sequence: Synthetic oligonucleotide
ugguauuagagacacagac

SEQ ID NO: 243274 - RNA, 19 nt, Artificial Sequence
  Description of Artificial Sequence: Synthetic oligonucleotide
gaauggacaacaauaaacc

SEQ ID NO: 243275 - RNA, 19 nt, Artificial Sequence
  Description of Artificial Sequence: Synthetic oligonucleotide
auuagagacacagacacag

SEQ ID NO: 243276 - RNA, 19 nt, Artificial Sequence
  Description of Artificial Sequence: Synthetic oligonucleotide
acaacaguaacuuugguua

SEQ ID NO: 243277 - RNA, 19 nt, Artificial Sequence
  Description of Artificial Sequence: Synthetic oligonucleotide
aguauaaagauuucauacu

SEQ ID NO: 243278 - RNA, 19 nt, Artificial Sequence
  Description of Artificial Sequence: Synthetic oligonucleotide
guuauucauacaaucaagg

SEQ ID NO: 243279 - RNA, 19 nt, Artificial Sequence
  Description of Artificial Sequence: Synthetic oligonucleotide
agcuacauuguugaaauac

SEQ ID NO: 243280 - RNA, 19 nt, Artificial Sequence
  Description of Artificial Sequence: Synthetic oligonucleotide
ucgucauacuauaaagggg

SEQ ID NO: 243281 - RNA, 19 nt, Artificial Sequence
  Description of Artificial Sequence: Synthetic oligonucleotide
acaguauguuuacaguagc

SEQ ID NO: 243282 - RNA, 19 nt, Artificial Sequence
  Description of Artificial Sequence: Synthetic oligonucleotide
aauggacaacaauaaacca

SEQ ID NO: 243283 - RNA, 19 nt, Artificial Sequence
  Description of Artificial Sequence: Synthetic oligonucleotide
ugugaauggacaacaauaa

SEQ ID NO: 243284 - RNA, 19 nt, Artificial Sequence
  Description of Artificial Sequence: Synthetic oligonucleotide
acaucaaguuuguagcuac

SEQ ID NO: 243285 - RNA, 19 nt, Artificial Sequence
  Description of Artificial Sequence: Synthetic oligonucleotide
uaaaccacacaguucagca

SEQ ID NO: 243286 - RNA, 19 nt, Artificial Sequence
  Description of Artificial Sequence: Synthetic oligonucleotide
uguacagcaucgcaccacg

SEQ ID NO: 243287 - RNA, 19 nt, Artificial Sequence
  Description of Artificial Sequence: Synthetic oligonucleotide
gauuaaauagcugugucuc

SEQ ID NO: 243288 - RNA, 19 nt, Artificial Sequence
  Description of Artificial Sequence: Synthetic oligonucleotide
accgagauguccaacagcc

SEQ ID NO: 243289 - RNA, 19 nt, Artificial Sequence
  Description of Artificial Sequence: Synthetic oligonucleotide
cuaagaggugaucucaggg

SEQ ID NO: 243290 - RNA, 19 nt, Artificial Sequence
  Description of Artificial Sequence: Synthetic oligonucleotide
gcagcuaaagguuaaaacc

SEQ ID NO: 243291 - RNA, 19 nt, Artificial Sequence
  Description of Artificial Sequence: Synthetic oligonucleotide
aaaccaaugaguucaucaa

SEQ ID NO: 243292 - RNA, 19 nt, Artificial Sequence
  Description of Artificial Sequence: Synthetic oligonucleotide
uuggacaucucaaagucgu

SEQ ID NO: 243293 - RNA, 19 nt, Artificial Sequence
  Description of Artificial Sequence: Synthetic oligonucleotide
ucagcugaagggcaaacug

SEQ ID NO: 243294 - RNA, 19 nt, Artificial Sequence
  Description of Artificial Sequence: Synthetic oligonucleotide
aucauguccacacuaguug

SEQ ID NO: 243295 - RNA, 19 nt, Artificial Sequence
  Description of Artificial Sequence: Synthetic oligonucleotide
gauagguccaacugccccg

SEQ ID NO: 243296 - RNA, 19 nt, Artificial Sequence
  Description of Artificial Sequence: Synthetic oligonucleotide
ucuggauaugcucaguggu

SEQ ID NO: 243297 - RNA, 19 nt, Artificial Sequence
  Description of Artificial Sequence: Synthetic oligonucleotide
cuauaaguugauuggcugc

SEQ ID NO: 243298 - RNA, 19 nt, Artificial Sequence
  Description of Artificial Sequence: Synthetic oligonucleotide
acuuguuaacucgucauac

SEQ ID NO: 243299 - RNA, 19 nt, Artificial Sequence
  Description of Artificial Sequence: Synthetic oligonucleotide
aaacuggauucugaggugg

SEQ ID NO: 243300 - RNA, 19 nt, Artificial Sequence
  Description of Artificial Sequence: Synthetic oligonucleotide
cuaaagguuaaaaccaguc

SEQ ID NO: 243301 - RNA, 19 nt, Artificial Sequence
  Description of Artificial Sequence: Synthetic oligonucleotide
ggagacauuauuauuacag

SEQ ID NO: 243302 - RNA, 19 nt, Artificial Sequence
  Description of Artificial Sequence: Synthetic oligonucleotide
ucucucauuuccauggaga

SEQ ID NO: 243303 - RNA, 19 nt, Artificial Sequence
  Description of Artificial Sequence: Synthetic oligonucleotide
aguauguuuacaguagcag

SEQ ID NO: 243304 - RNA, 19 nt, Artificial Sequence
  Description of Artificial Sequence: Synthetic oligonucleotide
ucucaauuguguuucuuca

SEQ ID NO: 243305 - RNA, 19 nt, Artificial Sequence
  Description of Artificial Sequence: Synthetic oligonucleotide
aggaacuucaacugaaccu

SEQ ID NO: 243306 - RNA, 19 nt, Artificial Sequence
  Description of Artificial Sequence: Synthetic oligonucleotide
cacaccucgauuagaaagg

SEQ ID NO: 243307 - RNA, 19 nt, Artificial Sequence
  Description of Artificial Sequence: Synthetic oligonucleotide
uuaaauagcugugucucgc

SEQ ID NO: 243308 - RNA, 19 nt, Artificial Sequence
  Description of Artificial Sequence: Synthetic oligonucleotide
ucagucaacgugcuagacc

SEQ ID NO: 243309 - RNA, 19 nt, Artificial Sequence
  Description of Artificial Sequence: Synthetic oligonucleotide
cacacucacacacacacag

SEQ ID NO: 243310 - RNA, 19 nt, Artificial Sequence
  Description of Artificial Sequence: Synthetic oligonucleotide
gguacuauacaacuucucc

SEQ ID NO: 243311 - RNA, 19 nt, Artificial Sequence
  Description of Artificial Sequence: Synthetic oligonucleotide
ugcggaugguauuagagac

SEQ ID NO: 243312 - RNA, 19 nt, Artificial Sequence
  Description of Artificial Sequence: Synthetic oligonucleotide
agccgugacucauagagag

SEQ ID NO: 243313 - RNA, 19 nt, Artificial Sequence
  Description of Artificial Sequence: Synthetic oligonucleotide
ucccguugaugcaagaacc

SEQ ID NO: 243314 - RNA, 19 nt, Artificial Sequence
  Description of Artificial Sequence: Synthetic oligonucleotide
cauacuauaaagggguggc

SEQ ID NO: 243315 - RNA, 19 nt, Artificial Sequence
  Description of Artificial Sequence: Synthetic oligonucleotide
uacacucuacugcacaggc

SEQ ID NO: 243316 - RNA, 19 nt, Artificial Sequence
  Description of Artificial Sequence: Synthetic oligonucleotide
ucauagagagugaacucug

SEQ ID NO: 243317 - RNA, 19 nt, Artificial Sequence
  Description of Artificial Sequence: Synthetic oligonucleotide
cacucacacacacacaggg

SEQ ID NO: 243318 - RNA, 19 nt, Artificial Sequence
  Description of Artificial Sequence: Synthetic oligonucleotide
ugggcuaaugccaaaugga

SEQ ID NO: 243319 - RNA, 19 nt, Artificial Sequence
  Description of Artificial Sequence: Synthetic oligonucleotide
aucccguugaugcaagaac

SEQ ID NO: 243320 - RNA, 19 nt, Artificial Sequence
  Description of Artificial Sequence: Synthetic oligonucleotide
ucuaagaggugaucucagg

SEQ ID NO: 243321 - RNA, 19 nt, Artificial Sequence
  Description of Artificial Sequence: Synthetic oligonucleotide
aaaccagucuaagagguga

SEQ ID NO: 243322 - RNA, 19 nt, Artificial Sequence
  Description of Artificial Sequence: Synthetic oligonucleotide
aaagaggucaggguguugu

SEQ ID NO: 243323 - RNA, 19 nt, Artificial Sequence
  Description of Artificial Sequence: Synthetic oligonucleotide
cucacacacacacagggag

SEQ ID NO: 243324 - RNA, 19 nt, Artificial Sequence
  Description of Artificial Sequence: Synthetic oligonucleotide
cacacacucacacacacac

SEQ ID NO: 243325 - RNA, 19 nt, Artificial Sequence
  Description of Artificial Sequence: Synthetic oligonucleotide
uuucacaccucgauuagaa

SEQ ID NO: 243326 - RNA, 19 nt, Artificial Sequence
  Description of Artificial Sequence: Synthetic oligonucleotide
uauauacacacguggcagc

SEQ ID NO: 243327 - RNA, 19 nt, Artificial Sequence
  Description of Artificial Sequence: Synthetic oligonucleotide
ucgauuagaaaggaaacaa

SEQ ID NO: 243328 - RNA, 19 nt, Artificial Sequence
  Description of Artificial Sequence: Synthetic oligonucleotide
cacacaugauacuuugggg

SEQ ID NO: 243329 - RNA, 19 nt, Artificial Sequence
  Description of Artificial Sequence: Synthetic oligonucleotide
auaguauaaagauuucaua

SEQ ID NO: 243330 - RNA, 19 nt, Artificial Sequence
  Description of Artificial Sequence: Synthetic oligonucleotide
aaagucguugccuggcaca

SEQ ID NO: 243331 - RNA, 19 nt, Artificial Sequence
  Description of Artificial Sequence: Synthetic oligonucleotide
agguguacaguacaguaca

SEQ ID NO: 243332 - RNA, 19 nt, Artificial Sequence
  Description of Artificial Sequence: Synthetic oligonucleotide
ucauccucuaaaaucuuaa

SEQ ID NO: 243333 - RNA, 19 nt, Artificial Sequence
  Description of Artificial Sequence: Synthetic oligonucleotide
ucacacacacacagggagg

SEQ ID NO: 243334 - RNA, 19 nt, Artificial Sequence
  Description of Artificial Sequence: Synthetic oligonucleotide
cuaguugguucaaagggug

SEQ ID NO: 243335 - RNA, 19 nt, Artificial Sequence
  Description of Artificial Sequence: Synthetic oligonucleotide
gagauuaaauagcuguguc

SEQ ID NO: 243336 - RNA, 19 nt, Artificial Sequence
  Description of Artificial Sequence: Synthetic oligonucleotide
uguguacccucuauuguug

SEQ ID NO: 243337 - RNA, 19 nt, Artificial Sequence
  Description of Artificial Sequence: Synthetic oligonucleotide
ucucgcuuugugcagguca

SEQ ID NO: 243338 - RNA, 19 nt, Artificial Sequence
  Description of Artificial Sequence: Synthetic oligonucleotide
uagagagugaacucugagu

SEQ ID NO: 243339 - RNA, 19 nt, Artificial Sequence
  Description of Artificial Sequence: Synthetic oligonucleotide
ugcgagauugugaauggac

SEQ ID NO: 243340 - RNA, 19 nt, Artificial Sequence
  Description of Artificial Sequence: Synthetic oligonucleotide
aauccgccagugcagcagg

SEQ ID NO: 243341 - RNA, 19 nt, Artificial Sequence
  Description of Artificial Sequence: Synthetic oligonucleotide
cugggcuaaugccaaaugg

SEQ ID NO: 243342 - RNA, 19 nt, Artificial Sequence
  Description of Artificial Sequence: Synthetic oligonucleotide
uaacucgucauacuauaaa

SEQ ID NO: 243343 - RNA, 19 nt, Artificial Sequence
  Description of Artificial Sequence: Synthetic oligonucleotide
augugcaauguacaacauc

SEQ ID NO: 243344 - RNA, 19 nt, Artificial Sequence
  Description of Artificial Sequence: Synthetic oligonucleotide
ugaugcaagaaccgggaaa

SEQ ID NO: 243345 - RNA, 19 nt, Artificial Sequence
  Description of Artificial Sequence: Synthetic oligonucleotide
uacuauaaagggguggcug

SEQ ID NO: 243346 - RNA, 19 nt, Artificial Sequence
  Description of Artificial Sequence: Synthetic oligonucleotide
aacuauaaguugauuggcu

SEQ ID NO: 243347 - RNA, 19 nt, Artificial Sequence
  Description of Artificial Sequence: Synthetic oligonucleotide
acaauaaaccacacaguuc

SEQ ID NO: 243348 - RNA, 19 nt, Artificial Sequence
  Description of Artificial Sequence: Synthetic oligonucleotide
acagcaucgcaccacgaag

SEQ ID NO: 243349 - RNA, 19 nt, Artificial Sequence
  Description of Artificial Sequence: Synthetic oligonucleotide
aguuucuaaguucuccaca

SEQ ID NO: 243350 - RNA, 19 nt, Artificial Sequence
  Description of Artificial Sequence: Synthetic oligonucleotide
uuguaagguguuuccgagg

SEQ ID NO: 243351 - RNA, 19 nt, Artificial Sequence
  Description of Artificial Sequence: Synthetic oligonucleotide
uguagcuacauuguugaaa

SEQ ID NO: 243352 - RNA, 19 nt, Artificial Sequence
  Description of Artificial Sequence: Synthetic oligonucleotide
caccuuuuguccuucuagg

SEQ ID NO: 243353 - RNA, 19 nt, Artificial Sequence
  Description of Artificial Sequence: Synthetic oligonucleotide
aaccaaugaguucaucaau

SEQ ID NO: 243354 - RNA, 19 nt, Artificial Sequence
  Description of Artificial Sequence: Synthetic oligonucleotide
aaauaaacuauaaguugau

SEQ ID NO: 243355 - RNA, 19 nt, Artificial Sequence
  Description of Artificial Sequence: Synthetic oligonucleotide
uccugcgagauugugaaug

SEQ ID NO: 243356 - RNA, 19 nt, Artificial Sequence
  Description of Artificial Sequence: Synthetic oligonucleotide
acucgucauacuauaaagg

SEQ ID NO: 243357 - RNA, 19 nt, Artificial Sequence
  Description of Artificial Sequence: Synthetic oligonucleotide
aagagcgaugucuggcaag

SEQ ID NO: 243358 - RNA, 19 nt, Artificial Sequence
  Description of Artificial Sequence: Synthetic oligonucleotide
ugccuggcacaaaugacag

SEQ ID NO: 243359 - RNA, 19 nt, Artificial Sequence
  Description of Artificial Sequence: Synthetic oligonucleotide
auaagcaauagccccgggu

SEQ ID NO: 243360 - RNA, 19 nt, Artificial Sequence
  Description of Artificial Sequence: Synthetic oligonucleotide
ugaccagcguguuuucccg

SEQ ID NO: 243361 - RNA, 19 nt, Artificial Sequence
  Description of Artificial Sequence: Synthetic oligonucleotide
cagcuaaagguuaaaacca

SEQ ID NO: 243362 - RNA, 19 nt, Artificial Sequence
  Description of Artificial Sequence: Synthetic oligonucleotide
guuaugaaauguggcaucc

SEQ ID NO: 243363 - RNA, 19 nt, Artificial Sequence
  Description of Artificial Sequence: Synthetic oligonucleotide
aauagcugugucucgcuuu

SEQ ID NO: 243364 - RNA, 19 nt, Artificial Sequence
  Description of Artificial Sequence: Synthetic oligonucleotide
ucuauuguuguaagguguu

SEQ ID NO: 243365 - RNA, 19 nt, Artificial Sequence
  Description of Artificial Sequence: Synthetic oligonucleotide
uguuguagguucacacaug

SEQ ID NO: 243366 - RNA, 19 nt, Artificial Sequence
  Description of Artificial Sequence: Synthetic oligonucleotide
auauacacacguggcagcg

SEQ ID NO: 243367 - RNA, 19 nt, Artificial Sequence
  Description of Artificial Sequence: Synthetic oligonucleotide
uccacacacucacacacac

SEQ ID NO: 243368 - RNA, 19 nt, Artificial Sequence
  Description of Artificial Sequence: Synthetic oligonucleotide
aauagccccggguguuugg

SEQ ID NO: 243369 - RNA, 19 nt, Artificial Sequence
  Description of Artificial Sequence: Synthetic oligonucleotide
caguauaaggcccgggaag

SEQ ID NO: 243370 - RNA, 19 nt, Artificial Sequence
  Description of Artificial Sequence: Synthetic oligonucleotide
aaugacuugugaaaccaau

SEQ ID NO: 243371 - RNA, 19 nt, Artificial Sequence
  Description of Artificial Sequence: Synthetic oligonucleotide
uauuagagacacagacaca

SEQ ID NO: 243372 - RNA, 19 nt, Artificial Sequence
  Description of Artificial Sequence: Synthetic oligonucleotide
agagauuaaauagcugugu

SEQ ID NO: 243373 - RNA, 19 nt, Artificial Sequence
  Description of Artificial Sequence: Synthetic oligonucleotide
guuguagguucacacauga

SEQ ID NO: 243374 - RNA, 19 nt, Artificial Sequence
  Description of Artificial Sequence: Synthetic oligonucleotide
uuaacucgucauacuauaa

SEQ ID NO: 243375 - RNA, 19 nt, Artificial Sequence
  Description of Artificial Sequence: Synthetic oligonucleotide
aacuuguuaacucgucaua

SEQ ID NO: 243376 - RNA, 19 nt, Artificial Sequence
  Description of Artificial Sequence: Synthetic oligonucleotide
ucaacugaaccuagaacuu

SEQ ID NO: 243377 - RNA, 19 nt, Artificial Sequence
  Description of Artificial Sequence: Synthetic oligonucleotide
ugucaugacuggccaauca

SEQ ID NO: 243378 - RNA, 19 nt, Artificial Sequence
  Description of Artificial Sequence: Synthetic oligonucleotide
uauuguuguaagguguuuc

SEQ ID NO: 243379 - RNA, 19 nt, Artificial Sequence
  Description of Artificial Sequence: Synthetic oligonucleotide
agugaacucugagugguuc

SEQ ID NO: 243380 - RNA, 19 nt, Artificial Sequence
  Description of Artificial Sequence: Synthetic oligonucleotide
auaugcucagugguauccc

SEQ ID NO: 243381 - RNA, 19 nt, Artificial Sequence
  Description of Artificial Sequence: Synthetic oligonucleotide
uuuguucccucaucaguca

SEQ ID NO: 243382 - RNA, 19 nt, Artificial Sequence
  Description of Artificial Sequence: Synthetic oligonucleotide
aauaaacuauaaguugauu

SEQ ID NO: 243383 - RNA, 19 nt, Artificial Sequence
  Description of Artificial Sequence: Synthetic oligonucleotide
auagcugugucucgcuuug

SEQ ID NO: 243384 - RNA, 19 nt, Artificial Sequence
  Description of Artificial Sequence: Synthetic oligonucleotide
accacgaagagcgaugucu

SEQ ID NO: 243385 - RNA, 19 nt, Artificial Sequence
  Description of Artificial Sequence: Synthetic oligonucleotide
gacacagcgcuuagcaagg

SEQ ID NO: 243386 - RNA, 19 nt, Artificial Sequence
  Description of Artificial Sequence: Synthetic oligonucleotide
auggaaacuugcugcuuuc

SEQ ID NO: 243387 - RNA, 19 nt, Artificial Sequence
  Description of Artificial Sequence: Synthetic oligonucleotide
acacaguucagcagucacc

SEQ ID NO: 243388 - RNA, 19 nt, Artificial Sequence
  Description of Artificial Sequence: Synthetic oligonucleotide
aacuucucggcuccugcga

SEQ ID NO: 243389 - RNA, 19 nt, Artificial Sequence
  Description of Artificial Sequence: Synthetic oligonucleotide
guucccucaucagucaacg

SEQ ID NO: 243390 - RNA, 19 nt, Artificial Sequence
  Description of Artificial Sequence: Synthetic oligonucleotide
gacaccgagauguccaaca

SEQ ID NO: 243391 - RNA, 19 nt, Artificial Sequence
  Description of Artificial Sequence: Synthetic oligonucleotide
ucaggguuauucauacaau

SEQ ID NO: 243392 - RNA, 19 nt, Artificial Sequence
  Description of Artificial Sequence: Synthetic oligonucleotide
uguaggaguccguccagca

SEQ ID NO: 243393 - RNA, 19 nt, Artificial Sequence
  Description of Artificial Sequence: Synthetic oligonucleotide
uaaauagcugugucucgcu

SEQ ID NO: 243394 - RNA, 19 nt, Artificial Sequence
  Description of Artificial Sequence: Synthetic oligonucleotide
guugauuggcugccgagac

SEQ ID NO: 243395 - RNA, 19 nt, Artificial Sequence
  Description of Artificial Sequence: Synthetic oligonucleotide
uacagcaucgcaccacgaa

SEQ ID NO: 243396 - RNA, 19 nt, Artificial Sequence
  Description of Artificial Sequence: Synthetic oligonucleotide
auacacacguggcagcgca

SEQ ID NO: 243397 - RNA, 19 nt, Artificial Sequence
  Description of Artificial Sequence: Synthetic oligonucleotide
guagcuacauuguugaaau

SEQ ID NO: 243398 - RNA, 19 nt, Artificial Sequence
  Description of Artificial Sequence: Synthetic oligonucleotide
guaggaucagcuugcccag

SEQ ID NO: 243399 - RNA, 19 nt, Artificial Sequence
  Description of Artificial Sequence: Synthetic oligonucleotide
cagguguacaguacaguac

SEQ ID NO: 243400 - RNA, 19 nt, Artificial Sequence
  Description of Artificial Sequence: Synthetic oligonucleotide
uacccucuauuguuguaag

SEQ ID NO: 243401 - RNA, 19 nt, Artificial Sequence
  Description of Artificial Sequence: Synthetic oligonucleotide
cacacacacacagggaggg

SEQ ID NO: 243402 - RNA, 19 nt, Artificial Sequence
  Description of Artificial Sequence: Synthetic oligonucleotide
aaauagcugugucucgcuu

SEQ ID NO: 243403 - RNA, 19 nt, Artificial Sequence
  Description of Artificial Sequence: Synthetic oligonucleotide
acggggauagguccaacug

SEQ ID NO: 243404 - RNA, 19 nt, Artificial Sequence
  Description of Artificial Sequence: Synthetic oligonucleotide
acuaguugguucaaagggu

SEQ ID NO: 243405 - RNA, 19 nt, Artificial Sequence
  Description of Artificial Sequence: Synthetic oligonucleotide
gagauugugaauggacaac

SEQ ID NO: 243406 - RNA, 19 nt, Artificial Sequence
  Description of Artificial Sequence: Synthetic oligonucleotide
aggguuauucauacaauca

SEQ ID NO: 243407 - RNA, 19 nt, Artificial Sequence
  Description of Artificial Sequence: Synthetic oligonucleotide
guuaacucgucauacuaua

SEQ ID NO: 243408 - RNA, 19 nt, Artificial Sequence
  Description of Artificial Sequence: Synthetic oligonucleotide
uggagacauuauuauuaca

SEQ ID NO: 243409 - RNA, 19 nt, Artificial Sequence
  Description of Artificial Sequence: Synthetic oligonucleotide
agcuaaagguuaaaaccag

SEQ ID NO: 243410 - RNA, 19 nt, Artificial Sequence
  Description of Artificial Sequence: Synthetic oligonucleotide
ucauaaguuaguggcgccu

SEQ ID NO: 243411 - RNA, 19 nt, Artificial Sequence
  Description of Artificial Sequence: Synthetic oligonucleotide
guagcagguguacaguaca

SEQ ID NO: 243412 - RNA, 19 nt, Artificial Sequence
  Description of Artificial Sequence: Synthetic oligonucleotide
agcgaugucuggcaagaga

SEQ ID NO: 243413 - RNA, 19 nt, Artificial Sequence
  Description of Artificial Sequence: Synthetic oligonucleotide
ugggguucauccucuaaaa

SEQ ID NO: 243414 - RNA, 19 nt, Artificial Sequence
  Description of Artificial Sequence: Synthetic oligonucleotide
uuaugaaauguggcauccc

SEQ ID NO: 243415 - RNA, 19 nt, Artificial Sequence
  Description of Artificial Sequence: Synthetic oligonucleotide
gaugucuggcaagagauua

SEQ ID NO: 243416 - RNA, 19 nt, Artificial Sequence
  Description of Artificial Sequence: Synthetic oligonucleotide
ugguacuauacaacuucuc

SEQ ID NO: 243417 - RNA, 19 nt, Artificial Sequence
  Description of Artificial Sequence: Synthetic oligonucleotide
accaauccgccagugcagc

SEQ ID NO: 243418 - RNA, 19 nt, Artificial Sequence
  Description of Artificial Sequence: Synthetic oligonucleotide
ugcuagaccggguggacaa

SEQ ID NO: 243419 - RNA, 19 nt, Artificial Sequence
  Description of Artificial Sequence: Synthetic oligonucleotide
agaccuguacagcaucgca

SEQ ID NO: 243420 - RNA, 19 nt, Artificial Sequence
  Description of Artificial Sequence: Synthetic oligonucleotide
agcaucgcaccacgaagag

SEQ ID NO: 243421 - RNA, 19 nt, Artificial Sequence
  Description of Artificial Sequence: Synthetic oligonucleotide
acucugagugguucucguc

SEQ ID NO: 243422 - RNA, 19 nt, Artificial Sequence
  Description of Artificial Sequence: Synthetic oligonucleotide
ucucaggguacggggauag

SEQ ID NO: 243423 - RNA, 19 nt, Artificial Sequence
  Description of Artificial Sequence: Synthetic oligonucleotide
acccucuauuguuguaagg

SEQ ID NO: 243424 - RNA, 19 nt, Artificial Sequence
  Description of Artificial Sequence: Synthetic oligonucleotide
agcguguuuucccggagca

SEQ ID NO: 243425 - RNA, 19 nt, Artificial Sequence
  Description of Artificial Sequence: Synthetic oligonucleotide
uguuccgguggcucugugc

SEQ ID NO: 243426 - RNA, 19 nt, Artificial Sequence
  Description of Artificial Sequence: Synthetic oligonucleotide
gguuaaaaccagucuaaga

SEQ ID NO: 243427 - RNA, 19 nt, Artificial Sequence
  Description of Artificial Sequence: Synthetic oligonucleotide
caguuucuaaguucuccac

SEQ ID NO: 243428 - RNA, 19 nt, Artificial Sequence
  Description of Artificial Sequence: Synthetic oligonucleotide
uugauuggcugccgagaca

SEQ ID NO: 243429 - RNA, 19 nt, Artificial Sequence
  Description of Artificial Sequence: Synthetic oligonucleotide
uggauaugcucagugguau

SEQ ID NO: 243430 - RNA, 19 nt, Artificial Sequence
  Description of Artificial Sequence: Synthetic oligonucleotide
uuuucacaccucgauuaga

SEQ ID NO: 243431 - RNA, 19 nt, Artificial Sequence
  Description of Artificial Sequence: Synthetic oligonucleotide
acacacguggcagcgcagc

SEQ ID NO: 243432 - RNA, 19 nt, Artificial Sequence
  Description of Artificial Sequence: Synthetic oligonucleotide
uaugugcaauguacaacau

SEQ ID NO: 243433 - RNA, 19 nt, Artificial Sequence
  Description of Artificial Sequence: Synthetic oligonucleotide
ggauagguccaacugcccc

SEQ ID NO: 243434 - RNA, 19 nt, Artificial Sequence
  Description of Artificial Sequence: Synthetic oligonucleotide
auaaagggguggcugggaa

SEQ ID NO: 243435 - RNA, 19 nt, Artificial Sequence
  Description of Artificial Sequence: Synthetic oligonucleotide
auguuuacaguagcaggug

SEQ ID NO: 243436 - RNA, 19 nt, Artificial Sequence
  Description of Artificial Sequence: Synthetic oligonucleotide
aacugccaacuucucggcu

SEQ ID NO: 243437 - RNA, 19 nt, Artificial Sequence
  Description of Artificial Sequence: Synthetic oligonucleotide
cauuauuauuacaguaugu

SEQ ID NO: 243438 - RNA, 19 nt, Artificial Sequence
  Description of Artificial Sequence: Synthetic oligonucleotide
uauaaagggguggcuggga

SEQ ID NO: 243439 - RNA, 19 nt, Artificial Sequence
  Description of Artificial Sequence: Synthetic oligonucleotide
ugcucucaggguacgggga

SEQ ID NO: 243440 - RNA, 19 nt, Artificial Sequence
  Description of Artificial Sequence: Synthetic oligonucleotide
guugaugcaagaaccggga

SEQ ID NO: 243441 - RNA, 19 nt, Artificial Sequence
  Description of Artificial Sequence: Synthetic oligonucleotide
gaccuguacagcaucgcac

SEQ ID NO: 243442 - RNA, 19 nt, Artificial Sequence
  Description of Artificial Sequence: Synthetic oligonucleotide
uugaugcaagaaccgggaa

SEQ ID NO: 243443 - RNA, 19 nt, Artificial Sequence
  Description of Artificial Sequence: Synthetic oligonucleotide
caguauguuuacaguagca

SEQ ID NO: 243444 - RNA, 19 nt, Artificial Sequence
  Description of Artificial Sequence: Synthetic oligonucleotide
ggguuauucauacaaucaa

SEQ ID NO: 243445 - RNA, 19 nt, Artificial Sequence
  Description of Artificial Sequence: Synthetic oligonucleotide
cacgaagagcgaugucugg

SEQ ID NO: 243446 - RNA, 19 nt, Artificial Sequence
  Description of Artificial Sequence: Synthetic oligonucleotide
cuauguaggcagagcuuug

SEQ ID NO: 243447 - RNA, 19 nt, Artificial Sequence
  Description of Artificial Sequence: Synthetic oligonucleotide
ugcacucuuuguucccuca

SEQ ID NO: 243448 - RNA, 19 nt, Artificial Sequence
  Description of Artificial Sequence: Synthetic oligonucleotide
uaaguuaguggcgccugcu

SEQ ID NO: 243449 - RNA, 19 nt, Artificial Sequence
  Description of Artificial Sequence: Synthetic oligonucleotide
cucuauuguuguaaggugu

SEQ ID NO: 243450 - RNA, 19 nt, Artificial Sequence
  Description of Artificial Sequence: Synthetic oligonucleotide
uaaugccaaauggaaacuu

SEQ ID NO: 243451 - RNA, 19 nt, Artificial Sequence
  Description of Artificial Sequence: Synthetic oligonucleotide
caacagccgugacucauag

SEQ ID NO: 243452 - RNA, 19 nt, Artificial Sequence
  Description of Artificial Sequence: Synthetic oligonucleotide
gaucagcuugcccaggaua

SEQ ID NO: 243453 - RNA, 19 nt, Artificial Sequence
  Description of Artificial Sequence: Synthetic oligonucleotide
caacgugcuagaccgggug

SEQ ID NO: 243454 - RNA, 19 nt, Artificial Sequence
  Description of Artificial Sequence: Synthetic oligonucleotide
accaacuuguuaacucguc

SEQ ID NO: 243455 - RNA, 19 nt, Artificial Sequence
  Description of Artificial Sequence: Synthetic oligonucleotide
aacuucaacugaaccuaga

SEQ ID NO: 243456 - RNA, 19 nt, Artificial Sequence
  Description of Artificial Sequence: Synthetic oligonucleotide
aguaucagguccacauugu

SEQ ID NO: 243457 - RNA, 19 nt, Artificial Sequence
  Description of Artificial Sequence: Synthetic oligonucleotide
gucaugacuggccaaucaa

SEQ ID NO: 243458 - RNA, 19 nt, Artificial Sequence
  Description of Artificial Sequence: Synthetic oligonucleotide
gugaauggacaacaauaaa

SEQ ID NO: 243459 - RNA, 19 nt, Artificial Sequence
  Description of Artificial Sequence: Synthetic oligonucleotide
cguugaugcaagaaccggg

SEQ ID NO: 243460 - RNA, 19 nt, Artificial Sequence
  Description of Artificial Sequence: Synthetic oligonucleotide
uauacacacguggcagcgc

SEQ ID NO: 243461 - RNA, 19 nt, Artificial Sequence
  Description of Artificial Sequence: Synthetic oligonucleotide
cugcggaugguauuagaga

SEQ ID NO: 243462 - RNA, 19 nt, Artificial Sequence
  Description of Artificial Sequence: Synthetic oligonucleotide
augguacuauacaacuucu

SEQ ID NO: 243463 - RNA, 19 nt, Artificial Sequence
  Description of Artificial Sequence: Synthetic oligonucleotide
ucauccuuacugugggguu

SEQ ID NO: 243464 - RNA, 19 nt, Artificial Sequence
  Description of Artificial Sequence: Synthetic oligonucleotide
uacacacguggcagcgcag

SEQ ID NO: 243465 - RNA, 19 nt, Artificial Sequence
  Description of Artificial Sequence: Synthetic oligonucleotide
ucguugccuggcacaaaug

SEQ ID NO: 243466 - RNA, 19 nt, Artificial Sequence
  Description of Artificial Sequence: Synthetic oligonucleotide
aagcgcaccaugguacuau

SEQ ID NO: 243467 - RNA, 19 nt, Artificial Sequence
  Description of Artificial Sequence: Synthetic oligonucleotide
caguguaggaguccgucca

SEQ ID NO: 243468 - RNA, 19 nt, Artificial Sequence
  Description of Artificial Sequence: Synthetic oligonucleotide
ccucuauuguuguaaggug

SEQ ID NO: 243469 - RNA, 19 nt, Artificial Sequence
  Description of Artificial Sequence: Synthetic oligonucleotide
gcugcggaugguauuagag

SEQ ID NO: 243470 - RNA, 19 nt, Artificial Sequence
  Description of Artificial Sequence: Synthetic oligonucleotide
gagaccuguacagcaucgc

SEQ ID NO: 243471 - RNA, 19 nt, Artificial Sequence
  Description of Artificial Sequence: Synthetic oligonucleotide
uuguagguucacacaugau

SEQ ID NO: 243472 - RNA, 19 nt, Artificial Sequence
  Description of Artificial Sequence: Synthetic oligonucleotide
ugguauccccaccaccaau

SEQ ID NO: 243473 - RNA, 19 nt, Artificial Sequence
  Description of Artificial Sequence: Synthetic oligonucleotide
aacagccgugacucauaga

SEQ ID NO: 243474 - RNA, 19 nt, Artificial Sequence
  Description of Artificial Sequence: Synthetic oligonucleotide
caauccgccagugcagcag

SEQ ID NO: 243475 - RNA, 19 nt, Artificial Sequence
  Description of Artificial Sequence: Synthetic oligonucleotide
uguacccucuauuguugua

SEQ ID NO: 243476 - RNA, 19 nt, Artificial Sequence
  Description of Artificial Sequence: Synthetic oligonucleotide
agaccggguggacaacaug

SEQ ID NO: 243477 - RNA, 19 nt, Artificial Sequence
  Description of Artificial Sequence: Synthetic oligonucleotide
ugcccaggauaagcaauag

SEQ ID NO: 243478 - RNA, 19 nt, Artificial Sequence
  Description of Artificial Sequence: Synthetic oligonucleotide
ccugcgagauugugaaugg

SEQ ID NO: 243479 - RNA, 19 nt, Artificial Sequence
  Description of Artificial Sequence: Synthetic oligonucleotide
ugaggguuuccaagaccaa

SEQ ID NO: 243480 - RNA, 19 nt, Artificial Sequence
  Description of Artificial Sequence: Synthetic oligonucleotide
ggcaagggugaccagcgug

SEQ ID NO: 243481 - RNA, 19 nt, Artificial Sequence
  Description of Artificial Sequence: Synthetic oligonucleotide
acacucacacacacacagg

SEQ ID NO: 243482 - RNA, 19 nt, Artificial Sequence
  Description of Artificial Sequence: Synthetic oligonucleotide
gaagagcgaugucuggcaa

SEQ ID NO: 243483 - RNA, 19 nt, Artificial Sequence
  Description of Artificial Sequence: Synthetic oligonucleotide
uuccguucuggaugcuugu

SEQ ID NO: 243484 - RNA, 19 nt, Artificial Sequence
  Description of Artificial Sequence: Synthetic oligonucleotide
cagcaucgcaccacgaaga

SEQ ID NO: 243485 - RNA, 19 nt, Artificial Sequence
  Description of Artificial Sequence: Synthetic oligonucleotide
gguggacaacaugucaucc

SEQ ID NO: 243486 - RNA, 19 nt, Artificial Sequence
  Description of Artificial Sequence: Synthetic oligonucleotide
ggcaguauaaggcccggga

SEQ ID NO: 243487 - RNA, 19 nt, Artificial Sequence
  Description of Artificial Sequence: Synthetic oligonucleotide
cucauagagagugaacucu

SEQ ID NO: 243488 - RNA, 19 nt, Artificial Sequence
  Description of Artificial Sequence: Synthetic oligonucleotide
aaacuacagcuugcugcug

SEQ ID NO: 243489 - RNA, 19 nt, Artificial Sequence
  Description of Artificial Sequence: Synthetic oligonucleotide
caguaggaucagcuugccc

SEQ ID NO: 243490 - RNA, 19 nt, Artificial Sequence
  Description of Artificial Sequence: Synthetic oligonucleotide
cccguugaugcaagaaccg

SEQ ID NO: 243491 - RNA, 19 nt, Artificial Sequence
  Description of Artificial Sequence: Synthetic oligonucleotide
accagcguguuuucccgga

SEQ ID NO: 243492 - RNA, 19 nt, Artificial Sequence
  Description of Artificial Sequence: Synthetic oligonucleotide
uugccgaugcugcccuucu

SEQ ID NO: 243493 - RNA, 19 nt, Artificial Sequence
  Description of Artificial Sequence: Synthetic oligonucleotide
guuccgguggcucugugcu

SEQ ID NO: 243494 - RNA, 19 nt, Artificial Sequence
  Description of Artificial Sequence: Synthetic oligonucleotide
cagcguguuuucccggagc

SEQ ID NO: 243495 - RNA, 19 nt, Artificial Sequence
  Description of Artificial Sequence: Synthetic oligonucleotide
caggguaaacuggauucug

SEQ ID NO: 243496 - RNA, 19 nt, Artificial Sequence
  Description of Artificial Sequence: Synthetic oligonucleotide
cacuccacuuugucacagc

SEQ ID NO: 243497 - RNA, 19 nt, Artificial Sequence
  Description of Artificial Sequence: Synthetic oligonucleotide
agguugccgaugcugcccu

SEQ ID NO: 243498 - RNA, 19 nt, Artificial Sequence
  Description of Artificial Sequence: Synthetic oligonucleotide
gcugaggguuuccaagacc

SEQ ID NO: 243499 - RNA, 19 nt, Artificial Sequence
  Description of Artificial Sequence: Synthetic oligonucleotide
cauccuuacugugggguuc

SEQ ID NO: 243500 - RNA, 19 nt, Artificial Sequence
  Description of Artificial Sequence: Synthetic oligonucleotide
gaccggguggacaacaugu

SEQ ID NO: 243501 - RNA, 19 nt, Artificial Sequence
  Description of Artificial Sequence: Synthetic oligonucleotide
ucuuucggucacugaggaa

SEQ ID NO: 243502 - RNA, 19 nt, Artificial Sequence
  Description of Artificial Sequence: Synthetic oligonucleotide
uuguagcuacauuguugaa

SEQ ID NO: 243503 - RNA, 19 nt, Artificial Sequence
  Description of Artificial Sequence: Synthetic oligonucleotide
augguauuagagacacaga

SEQ ID NO: 243504 - RNA, 19 nt, Artificial Sequence
  Description of Artificial Sequence: Synthetic oligonucleotide
gugacucauagagagugaa

SEQ ID NO: 243505 - RNA, 19 nt, Artificial Sequence
  Description of Artificial Sequence: Synthetic oligonucleotide
uccguucuggaugcuugug

SEQ ID NO: 243506 - RNA, 19 nt, Artificial Sequence
  Description of Artificial Sequence: Synthetic oligonucleotide
gcuccugcgagauugugaa

SEQ ID NO: 243507 - RNA, 19 nt, Artificial Sequence
  Description of Artificial Sequence: Synthetic oligonucleotide
gcucacaacugccaacuuc

SEQ ID NO: 243508 - RNA, 19 nt, Artificial Sequence
  Description of Artificial Sequence: Synthetic oligonucleotide
uagaccggguggacaacau

SEQ ID NO: 243509 - RNA, 19 nt, Artificial Sequence
  Description of Artificial Sequence: Synthetic oligonucleotide
ccgugacucauagagagug

SEQ ID NO: 243510 - RNA, 19 nt, Artificial Sequence
  Description of Artificial Sequence: Synthetic oligonucleotide
accggguggacaacauguc

SEQ ID NO: 243511 - RNA, 19 nt, Artificial Sequence
  Description of Artificial Sequence: Synthetic oligonucleotide
gguauccccaccaccaauc

SEQ ID NO: 243512 - RNA, 19 nt, Artificial Sequence
  Description of Artificial Sequence: Synthetic oligonucleotide
acucacacacacacaggga

SEQ ID NO: 243513 - RNA, 19 nt, Artificial Sequence
  Description of Artificial Sequence: Synthetic oligonucleotide
aguggcgccugcuuccguu

SEQ ID NO: 243514 - RNA, 19 nt, Artificial Sequence
  Description of Artificial Sequence: Synthetic oligonucleotide
cuccaagcagucccaccac

SEQ ID NO: 243515 - RNA, 19 nt, Artificial Sequence
  Description of Artificial Sequence: Synthetic oligonucleotide
ccacgaagagcgaugucug

SEQ ID NO: 243516 - RNA, 19 nt, Artificial Sequence
  Description of Artificial Sequence: Synthetic oligonucleotide
gcugggcuaaugccaaaug

SEQ ID NO: 243517 - RNA, 19 nt, Artificial Sequence
  Description of Artificial Sequence: Synthetic oligonucleotide
cgucauacuauaaaggggu

SEQ ID NO: 243518 - RNA, 19 nt, Artificial Sequence
  Description of Artificial Sequence: Synthetic oligonucleotide
ggaggggaggugucccacg

SEQ ID NO: 243519 - RNA, 19 nt, Artificial Sequence
  Description of Artificial Sequence: Synthetic oligonucleotide
gcaguauaaggcccgggaa

SEQ ID NO: 243520 - RNA, 19 nt, Artificial Sequence
  Description of Artificial Sequence: Synthetic oligonucleotide
agucuucuauguaggcaga

SEQ ID NO: 243521 - RNA, 19 nt, Artificial Sequence
  Description of Artificial Sequence: Synthetic oligonucleotide
agucaacgugcuagaccgg

SEQ ID NO: 243522 - RNA, 19 nt, Artificial Sequence
  Description of Artificial Sequence: Synthetic oligonucleotide
gccaguaucagguccacau

SEQ ID NO: 243523 - RNA, 19 nt, Artificial Sequence
  Description of Artificial Sequence: Synthetic oligonucleotide
acgugcuagaccgggugga

SEQ ID NO: 243524 - RNA, 19 nt, Artificial Sequence
  Description of Artificial Sequence: Synthetic oligonucleotide
uagguccaacugccccgag

SEQ ID NO: 243525 - RNA, 19 nt, Artificial Sequence
  Description of Artificial Sequence: Synthetic oligonucleotide
gggucugcucacaacugcc

SEQ ID NO: 243526 - RNA, 19 nt, Artificial Sequence
  Description of Artificial Sequence: Synthetic oligonucleotide
cuagaccggguggacaaca

SEQ ID NO: 243527 - RNA, 19 nt, Artificial Sequence
  Description of Artificial Sequence: Synthetic oligonucleotide
ccguugaugcaagaaccgg

SEQ ID NO: 243528 - RNA, 19 nt, Artificial Sequence
  Description of Artificial Sequence: Synthetic oligonucleotide
cggaugguauuagagacac

SEQ ID NO: 243529 - RNA, 19 nt, Artificial Sequence
  Description of Artificial Sequence: Synthetic oligonucleotide
cugcacucuuuguucccuc

SEQ ID NO: 243530 - RNA, 19 nt, Artificial Sequence
  Description of Artificial Sequence: Synthetic oligonucleotide
cuaaugccaaauggaaacu

SEQ ID NO: 243531 - RNA, 19 nt, Artificial Sequence
  Description of Artificial Sequence: Synthetic oligonucleotide
gggcguggccaguaucagg

SEQ ID NO: 243532 - RNA, 19 nt, Artificial Sequence
  Description of Artificial Sequence: Synthetic oligonucleotide
caauagccccggguguuug

SEQ ID NO: 243533 - RNA, 19 nt, Artificial Sequence
  Description of Artificial Sequence: Synthetic oligonucleotide
gcaaggcuguccucuagga

SEQ ID NO: 243534 - RNA, 19 nt, Artificial Sequence
  Description of Artificial Sequence: Synthetic oligonucleotide
auaguggcugugauccuuu

SEQ ID NO: 243535 - RNA, 19 nt, Artificial Sequence
  Description of Artificial Sequence: Synthetic oligonucleotide
gggcuaaugccaaauggaa

SEQ ID NO: 243536 - RNA, 19 nt, Artificial Sequence
  Description of Artificial Sequence: Synthetic oligonucleotide
agaggugaucucaggguua

SEQ ID NO: 243537 - RNA, 19 nt, Artificial Sequence
  Description of Artificial Sequence: Synthetic oligonucleotide
ggcuaaugccaaauggaaa

SEQ ID NO: 243538 - RNA, 19 nt, Artificial Sequence
  Description of Artificial Sequence: Synthetic oligonucleotide
cauccucuaaaaucuuaau

SEQ ID NO: 243539 - RNA, 19 nt, Artificial Sequence
  Description of Artificial Sequence: Synthetic oligonucleotide
acacacucacacacacaca

SEQ ID NO: 243540 - RNA, 19 nt, Artificial Sequence
  Description of Artificial Sequence: Synthetic oligonucleotide
ccgagauguccaacagccg

SEQ ID NO: 243541 - RNA, 19 nt, Artificial Sequence
  Description of Artificial Sequence: Synthetic oligonucleotide
cauguccacacuaguuggu

SEQ ID NO: 243542 - RNA, 19 nt, Artificial Sequence
  Description of Artificial Sequence: Synthetic oligonucleotide
ucgcaccacgaagagcgau

SEQ ID NO: 243543 - RNA, 19 nt, Artificial Sequence
  Description of Artificial Sequence: Synthetic oligonucleotide
auguuccgguggcucugug

SEQ ID NO: 243544 - RNA, 19 nt, Artificial Sequence
  Description of Artificial Sequence: Synthetic oligonucleotide
cucaggguacggggauagg

SEQ ID NO: 243545 - RNA, 19 nt, Artificial Sequence
  Description of Artificial Sequence: Synthetic oligonucleotide
caucccguugaugcaagaa

SEQ ID NO: 243546 - RNA, 19 nt, Artificial Sequence
  Description of Artificial Sequence: Synthetic oligonucleotide
agcgcaccaugguacuaua

SEQ ID NO: 243547 - RNA, 19 nt, Artificial Sequence
  Description of Artificial Sequence: Synthetic oligonucleotide
ggauucugaggugguuuug

SEQ ID NO: 243548 - RNA, 19 nt, Artificial Sequence
  Description of Artificial Sequence: Synthetic oligonucleotide
caggguguuguagguucac

SEQ ID NO: 243549 - RNA, 19 nt, Artificial Sequence
  Description of Artificial Sequence: Synthetic oligonucleotide
caccaacuuguuaacucgu

SEQ ID NO: 243550 - RNA, 19 nt, Artificial Sequence
  Description of Artificial Sequence: Synthetic oligonucleotide
guaucagguccacauuguu

SEQ ID NO: 243551 - RNA, 19 nt, Artificial Sequence
  Description of Artificial Sequence: Synthetic oligonucleotide
gaggugaucucaggguuau

SEQ ID NO: 243552 - RNA, 19 nt, Artificial Sequence
  Description of Artificial Sequence: Synthetic oligonucleotide
uaguggcugugauccuuuu

SEQ ID NO: 243553 - RNA, 19 nt, Artificial Sequence
  Description of Artificial Sequence: Synthetic oligonucleotide
cgagauugugaauggacaa

SEQ ID NO: 243554 - RNA, 19 nt, Artificial Sequence
  Description of Artificial Sequence: Synthetic oligonucleotide
caccucgauuagaaaggaa

SEQ ID NO: 243555 - RNA, 19 nt, Artificial Sequence
  Description of Artificial Sequence: Synthetic oligonucleotide
gggauagguccaacugccc

SEQ ID NO: 243556 - RNA, 19 nt, Artificial Sequence
  Description of Artificial Sequence: Synthetic oligonucleotide
ggcaucccguugaugcaag

SEQ ID NO: 243557 - RNA, 19 nt, Artificial Sequence
  Description of Artificial Sequence: Synthetic oligonucleotide
gcgaugucuggcaagagau

SEQ ID NO: 243558 - RNA, 19 nt, Artificial Sequence
  Description of Artificial Sequence: Synthetic oligonucleotide
cagucaccuuuuguccuuc

SEQ ID NO: 243559 - RNA, 19 nt, Artificial Sequence
  Description of Artificial Sequence: Synthetic oligonucleotide
gcuaaagguuaaaaccagu

SEQ ID NO: 243560 - RNA, 19 nt, Artificial Sequence
  Description of Artificial Sequence: Synthetic oligonucleotide
cauccauaguggcugugau

SEQ ID NO: 243561 - RNA, 19 nt, Artificial Sequence
  Description of Artificial Sequence: Synthetic oligonucleotide
ggguuuccaagaccaaccu

SEQ ID NO: 243562 - RNA, 19 nt, Artificial Sequence
  Description of Artificial Sequence: Synthetic oligonucleotide
caggcugcggaugguauua

SEQ ID NO: 243563 - RNA, 19 nt, Artificial Sequence
  Description of Artificial Sequence: Synthetic oligonucleotide
gcaucgcaccacgaagagc

SEQ ID NO: 243564 - RNA, 19 nt, Artificial Sequence
  Description of Artificial Sequence: Synthetic oligonucleotide
cgcaccacgaagagcgaug

SEQ ID NO: 243565 - RNA, 19 nt, Artificial Sequence
  Description of Artificial Sequence: Synthetic oligonucleotide
caccacgaagagcgauguc

SEQ ID NO: 243566 - RNA, 19 nt, Artificial Sequence
  Description of Artificial Sequence: Synthetic oligonucleotide
ggcuccugcgagauuguga

SEQ ID NO: 243567 - RNA, 19 nt, Artificial Sequence
  Description of Artificial Sequence: Synthetic oligonucleotide
gaagcgcaccaugguacua

SEQ ID NO: 243568 - RNA, 19 nt, Artificial Sequence
  Description of Artificial Sequence: Synthetic oligonucleotide
cucaucagucaacgugcua

SEQ ID NO: 243569 - RNA, 19 nt, Artificial Sequence
  Description of Artificial Sequence: Synthetic oligonucleotide
gaaccgggaaagccauuuu

SEQ ID NO: 243570 - RNA, 19 nt, Artificial Sequence
  Description of Artificial Sequence: Synthetic oligonucleotide
cugcgagauugugaaugga

SEQ ID NO: 243571 - RNA, 19 nt, Artificial Sequence
  Description of Artificial Sequence: Synthetic oligonucleotide
ggaauccugccaguccaga

SEQ ID NO: 243572 - RNA, 19 nt, Artificial Sequence
  Description of Artificial Sequence: Synthetic oligonucleotide
cuguggagcuucaggguau

SEQ ID NO: 243573 - RNA, 19 nt, Artificial Sequence
  Description of Artificial Sequence: Synthetic oligonucleotide
guacagcaucgcaccacga

SEQ ID NO: 243574 - RNA, 19 nt, Artificial Sequence
  Description of Artificial Sequence: Synthetic oligonucleotide
guacggggauagguccaac

SEQ ID NO: 243575 - RNA, 19 nt, Artificial Sequence
  Description of Artificial Sequence: Synthetic oligonucleotide
cagcucaccccuugguccu

SEQ ID NO: 243576 - RNA, 19 nt, Artificial Sequence
  Description of Artificial Sequence: Synthetic oligonucleotide
ccggguggacaacauguca

SEQ ID NO: 243577 - RNA, 19 nt, Artificial Sequence
  Description of Artificial Sequence: Synthetic oligonucleotide
cuauuguuguaagguguuu

SEQ ID NO: 243578 - RNA, 19 nt, Artificial Sequence
  Description of Artificial Sequence: Synthetic oligonucleotide
aucgcaccacgaagagcga

SEQ ID NO: 243579 - RNA, 19 nt, Artificial Sequence
  Description of Artificial Sequence: Synthetic oligonucleotide
ccccgagauguuggcaagg

SEQ ID NO: 243580 - RNA, 19 nt, Artificial Sequence
  Description of Artificial Sequence: Synthetic oligonucleotide
cggguguuuggacaucuca

SEQ ID NO: 243581 - RNA, 19 nt, Artificial Sequence
  Description of Artificial Sequence: Synthetic oligonucleotide
gguacggggauagguccaa

SEQ ID NO: 243582 - RNA, 19 nt, Artificial Sequence
  Description of Artificial Sequence: Synthetic oligonucleotide
cccggagcaucuccaagca

SEQ ID NO: 243583 - RNA, 19 nt, Artificial Sequence
  Description of Artificial Sequence: Synthetic oligonucleotide
ggguacggggauaggucca

SEQ ID NO: 243584 - RNA, 19 nt, Artificial Sequence
  Description of Artificial Sequence: Synthetic oligonucleotide
ccacacacucacacacaca

SEQ ID NO: 243585 - RNA, 19 nt, Artificial Sequence
  Description of Artificial Sequence: Synthetic oligonucleotide
gcaagggaauccugccagu

SEQ ID NO: 243586 - RNA, 19 nt, Artificial Sequence
  Description of Artificial Sequence: Synthetic oligonucleotide
cgugacucauagagaguga

SEQ ID NO: 243587 - RNA, 19 nt, Artificial Sequence
  Description of Artificial Sequence: Synthetic oligonucleotide
ccaacagccgugacucaua

SEQ ID NO: 243588 - RNA, 19 nt, Artificial Sequence
  Description of Artificial Sequence: Synthetic oligonucleotide
gcgcaccaugguacuauac

SEQ ID NO: 243589 - RNA, 19 nt, Artificial Sequence
  Description of Artificial Sequence: Synthetic oligonucleotide
gcuagaccggguggacaac

SEQ ID NO: 243590 - RNA, 19 nt, Artificial Sequence
  Description of Artificial Sequence: Synthetic oligonucleotide
gccgagacagcaaggacuu

SEQ ID NO: 243591 - RNA, 19 nt, Artificial Sequence
  Description of Artificial Sequence: Synthetic oligonucleotide
gguguacaguacaguacau

SEQ ID NO: 243592 - RNA, 19 nt, Artificial Sequence
  Description of Artificial Sequence: Synthetic oligonucleotide
gcaccacgaagagcgaugu

SEQ ID NO: 243593 - RNA, 19 nt, Artificial Sequence
  Description of Artificial Sequence: Synthetic oligonucleotide
ccaauccgccagugcagca

SEQ ID NO: 243594 - RNA, 19 nt, Artificial Sequence
  Description of Artificial Sequence: Synthetic oligonucleotide
ccggguguuuggacaucuc

SEQ ID NO: 243595 - RNA, 19 nt, Artificial Sequence
  Description of Artificial Sequence: Synthetic oligonucleotide
cgugcuagaccggguggac

SEQ ID NO: 243596 - RNA, 19 nt, Artificial Sequence
  Description of Artificial Sequence: Synthetic oligonucleotide
ccgcccgccgcaucauguc

SEQ ID NO: 243597 - RNA, 19 nt, Artificial Sequence
  Description of Artificial Sequence: Synthetic oligonucleotide
cuccugcgagauugugaau

SEQ ID NO: 243598 - RNA, 19 nt, Artificial Sequence
  Description of Artificial Sequence: Synthetic oligonucleotide
ccacacuaguugguucaaa

SEQ ID NO: 243599 - RNA, 19 nt, Artificial Sequence
  Description of Artificial Sequence: Synthetic oligonucleotide
gccgugacucauagagagu

SEQ ID NO: 243600 - RNA, 19 nt, Artificial Sequence
  Description of Artificial Sequence: Synthetic oligonucleotide
gcuuccguucuggaugcuu

SEQ ID NO: 243601 - RNA, 19 nt, Artificial Sequence
  Description of Artificial Sequence: Synthetic oligonucleotide
ccgaggguggaggaagggu

SEQ ID NO: 243602 - RNA, 19 nt, Artificial Sequence
  Description of Artificial Sequence: Synthetic oligonucleotide
gcaauagccccggguguuu

SEQ ID NO: 243603 - RNA, 19 nt, Artificial Sequence
  Description of Artificial Sequence: Synthetic oligonucleotide
gccagcgccuucucucauu

SEQ ID NO: 243604 - RNA, 19 nt, Artificial Sequence
  Description of Artificial Sequence: Synthetic oligonucleotide
gccgcccgccgcaucaugu

SEQ ID NO: 243605 - RNA, 19 nt, Artificial Sequence
  Description of Artificial Sequence: Synthetic oligonucleotide
cccggguguuuggacaucu

SEQ ID NO: 243606 - RNA, 19 nt, Artificial Sequence
  Description of Artificial Sequence: Synthetic oligonucleotide
ccccuuguguacccucuau

SEQ ID NO: 243607 - RNA, 19 nt, Artificial Sequence
  Description of Artificial Sequence: Synthetic oligonucleotide
gcguguuuucccggagcau

SEQ ID NO: 243608 - RNA, 19 nt, Artificial Sequence
  Description of Artificial Sequence: Synthetic oligonucleotide
ccccggguguuuggacauc

SEQ ID NO: 243609 - RNA, 19 nt, Artificial Sequence
  Description of Artificial Sequence: Synthetic oligonucleotide
ccggcacacuggguucuuu

SEQ ID NO: 243610 - RNA, 19 nt, Artificial Sequence
  Description of Artificial Sequence: Synthetic oligonucleotide
ccgagacagcaaggacuuu

SEQ ID NO: 243611 - RNA, 19 nt, Artificial Sequence
  Description of Artificial Sequence: Synthetic oligonucleotide
cccggcacacuggguucuu

SEQ ID NO: 243612 - RNA, 19 nt, Artificial Sequence
  Description of Artificial Sequence: Synthetic oligonucleotide
aaggacaagaauuuucucc

SEQ ID NO: 243613 - RNA, 19 nt, Artificial Sequence
  Description of Artificial Sequence: Synthetic oligonucleotide
aaagaugauacccuggcgg

SEQ ID NO: 243614 - RNA, 19 nt, Artificial Sequence
  Description of Artificial Sequence: Synthetic oligonucleotide
uuaaauugacuucacagac

SEQ ID NO: 243615 - RNA, 19 nt, Artificial Sequence
  Description of Artificial Sequence: Synthetic oligonucleotide
cugaccaucucauagaggg

SEQ ID NO: 243616 - RNA, 19 nt, Artificial Sequence
  Description of Artificial Sequence: Synthetic oligonucleotide
ucuccauuagcucaaggcg

SEQ ID NO: 243617 - RNA, 19 nt, Artificial Sequence
  Description of Artificial Sequence: Synthetic oligonucleotide
aaagcguaugugcacaggg

SEQ ID NO: 243618 - RNA, 19 nt, Artificial Sequence
  Description of Artificial Sequence: Synthetic oligonucleotide
aguuccauuuauuaaauug

SEQ ID NO: 243619 - RNA, 19 nt, Artificial Sequence
  Description of Artificial Sequence: Synthetic oligonucleotide
auagcuuggguucaugccc

SEQ ID NO: 243620 - RNA, 19 nt, Artificial Sequence
  Description of Artificial Sequence: Synthetic oligonucleotide
uaagccgccccucaaaucg

SEQ ID NO: 243621 - RNA, 19 nt, Artificial Sequence
  Description of Artificial Sequence: Synthetic oligonucleotide
gagccgaggacuuagaucc

SEQ ID NO: 243622 - RNA, 19 nt, Artificial Sequence
  Description of Artificial Sequence: Synthetic oligonucleotide
acauaggccucuuaggggc

SEQ ID NO: 243623 - RNA, 19 nt, Artificial Sequence
  Description of Artificial Sequence: Synthetic oligonucleotide
uagauguuucccuugaugc

SEQ ID NO: 243624 - RNA, 19 nt, Artificial Sequence
  Description of Artificial Sequence: Synthetic oligonucleotide
auuaaauugacuucacaga

SEQ ID NO: 243625 - RNA, 19 nt, Artificial Sequence
  Description of Artificial Sequence: Synthetic oligonucleotide
uucacaugaccccugaugc

SEQ ID NO: 243626 - RNA, 19 nt, Artificial Sequence
  Description of Artificial Sequence: Synthetic oligonucleotide
agucaaacacugcagcucc

SEQ ID NO: 243627 - RNA, 19 nt, Artificial Sequence
  Description of Artificial Sequence: Synthetic oligonucleotide
aagcaguuuaaguccaugg

SEQ ID NO: 243628 - RNA, 19 nt, Artificial Sequence
  Description of Artificial Sequence: Synthetic oligonucleotide
ugauuuuacgguuuacaag

SEQ ID NO: 243629 - RNA, 19 nt, Artificial Sequence
  Description of Artificial Sequence: Synthetic oligonucleotide
uuagacuugucccuuuuag

SEQ ID NO: 243630 - RNA, 19 nt, Artificial Sequence
  Description of Artificial Sequence: Synthetic oligonucleotide
agcaguuuaaguccauggc

SEQ ID NO: 243631 - RNA, 19 nt, Artificial Sequence
  Description of Artificial Sequence: Synthetic oligonucleotide
aucuuuacccuucuucgcc

SEQ ID NO: 243632 - RNA, 19 nt, Artificial Sequence
  Description of Artificial Sequence: Synthetic oligonucleotide
gaacaucugucucugaucc

SEQ ID NO: 243633 - RNA, 19 nt, Artificial Sequence
  Description of Artificial Sequence: Synthetic oligonucleotide
aggacuuagauccuucaac

SEQ ID NO: 243634 - RNA, 19 nt, Artificial Sequence
  Description of Artificial Sequence: Synthetic oligonucleotide
gaugaugaacuccuagagg

SEQ ID NO: 243635 - RNA, 19 nt, Artificial Sequence
  Description of Artificial Sequence: Synthetic oligonucleotide
gauuuuacgguuuacaagu

SEQ ID NO: 243636 - RNA, 19 nt, Artificial Sequence
  Description of Artificial Sequence: Synthetic oligonucleotide
uuucaaacuccgauucucg

SEQ ID NO: 243637 - RNA, 19 nt, Artificial Sequence
  Description of Artificial Sequence: Synthetic oligonucleotide
ugcagguguagaaagguag

SEQ ID NO: 243638 - RNA, 19 nt, Artificial Sequence
  Description of Artificial Sequence: Synthetic oligonucleotide
aacuccgauucucggaagc

SEQ ID NO: 243639 - RNA, 19 nt, Artificial Sequence
  Description of Artificial Sequence: Synthetic oligonucleotide
uuagauguuucccuugaug

SEQ ID NO: 243640 - RNA, 19 nt, Artificial Sequence
  Description of Artificial Sequence: Synthetic oligonucleotide
gaguccaaggacuauguag

SEQ ID NO: 243641 - RNA, 19 nt, Artificial Sequence
  Description of Artificial Sequence: Synthetic oligonucleotide
ccuauuaggagcuacaggc

SEQ ID NO: 243642 - RNA, 19 nt, Artificial Sequence
  Description of Artificial Sequence: Synthetic oligonucleotide
aaagguaggguagauccgg

SEQ ID NO: 243643 - RNA, 19 nt, Artificial Sequence
  Description of Artificial Sequence: Synthetic oligonucleotide
acaagugcuuucaugaccc

SEQ ID NO: 243644 - RNA, 19 nt, Artificial Sequence
  Description of Artificial Sequence: Synthetic oligonucleotide
caaggagauauccucaucc

SEQ ID NO: 243645 - RNA, 19 nt, Artificial Sequence
  Description of Artificial Sequence: Synthetic oligonucleotide
aguauaggggaucuuguag

SEQ ID NO: 243646 - RNA, 19 nt, Artificial Sequence
  Description of Artificial Sequence: Synthetic oligonucleotide
uucuccauuagcucaaggc

SEQ ID NO: 243647 - RNA, 19 nt, Artificial Sequence
  Description of Artificial Sequence: Synthetic oligonucleotide
uuagcugccuugaugaaga

SEQ ID NO: 243648 - RNA, 19 nt, Artificial Sequence
  Description of Artificial Sequence: Synthetic oligonucleotide
uguaugcagacauaggccu

SEQ ID NO: 243649 - RNA, 19 nt, Artificial Sequence
  Description of Artificial Sequence: Synthetic oligonucleotide
agauccggauaucauaacg

SEQ ID NO: 243650 - RNA, 19 nt, Artificial Sequence
  Description of Artificial Sequence: Synthetic oligonucleotide
ugaagguauacugagugcc

SEQ ID NO: 243651 - RNA, 19 nt, Artificial Sequence
  Description of Artificial Sequence: Synthetic oligonucleotide
ucuuagaaagaucugugau

SEQ ID NO: 243652 - RNA, 19 nt, Artificial Sequence
  Description of Artificial Sequence: Synthetic oligonucleotide
auaggccccuauuaggagc

SEQ ID NO: 243653 - RNA, 19 nt, Artificial Sequence
  Description of Artificial Sequence: Synthetic oligonucleotide
uguaguauaggggaucuug

SEQ ID NO: 243654 - RNA, 19 nt, Artificial Sequence
  Description of Artificial Sequence: Synthetic oligonucleotide
auaacgaccacgaggaguc

SEQ ID NO: 243655 - RNA, 19 nt, Artificial Sequence
  Description of Artificial Sequence: Synthetic oligonucleotide
uuccauuuauuaaauugac

SEQ ID NO: 243656 - RNA, 19 nt, Artificial Sequence
  Description of Artificial Sequence: Synthetic oligonucleotide
uucucggaagccaucauac

SEQ ID NO: 243657 - RNA, 19 nt, Artificial Sequence
  Description of Artificial Sequence: Synthetic oligonucleotide
gauccuucaacgcacugug

SEQ ID NO: 243658 - RNA, 19 nt, Artificial Sequence
  Description of Artificial Sequence: Synthetic oligonucleotide
agacagaaugcacuccuac

SEQ ID NO: 243659 - RNA, 19 nt, Artificial Sequence
  Description of Artificial Sequence: Synthetic oligonucleotide
uguaagcaguuuaagucca

SEQ ID NO: 243660 - RNA, 19 nt, Artificial Sequence
  Description of Artificial Sequence: Synthetic oligonucleotide
auugcuuagggguaucuca

SEQ ID NO: 243661 - RNA, 19 nt, Artificial Sequence
  Description of Artificial Sequence: Synthetic oligonucleotide
auuacaaggagccauucuu

SEQ ID NO: 243662 - RNA, 19 nt, Artificial Sequence
  Description of Artificial Sequence: Synthetic oligonucleotide
aauaggccccuauuaggag

SEQ ID NO: 243663 - RNA, 19 nt, Artificial Sequence
  Description of Artificial Sequence: Synthetic oligonucleotide
ggacuuagauccuucaacg

SEQ ID NO: 243664 - RNA, 19 nt, Artificial Sequence
  Description of Artificial Sequence: Synthetic oligonucleotide
auguaugcagacauaggcc

SEQ ID NO: 243665 - RNA, 19 nt, Artificial Sequence
  Description of Artificial Sequence: Synthetic oligonucleotide
aucauaacgaccacgagga

SEQ ID NO: 243666 - RNA, 19 nt, Artificial Sequence
  Description of Artificial Sequence: Synthetic oligonucleotide
auccggauaucauaacgac

SEQ ID NO: 243667 - RNA, 19 nt, Artificial Sequence
  Description of Artificial Sequence: Synthetic oligonucleotide
gacauagaagcgcaccucc

SEQ ID NO: 243668 - RNA, 19 nt, Artificial Sequence
  Description of Artificial Sequence: Synthetic oligonucleotide
uucaaacuccgauucucgg

SEQ ID NO: 243669 - RNA, 19 nt, Artificial Sequence
  Description of Artificial Sequence: Synthetic oligonucleotide
ugagcuggccuuauaggag

SEQ ID NO: 243670 - RNA, 19 nt, Artificial Sequence
  Description of Artificial Sequence: Synthetic oligonucleotide
gugguaacggguuuggccc

SEQ ID NO: 243671 - RNA, 19 nt, Artificial Sequence
  Description of Artificial Sequence: Synthetic oligonucleotide
ugagguuagauguuucccu

SEQ ID NO: 243672 - RNA, 19 nt, Artificial Sequence
  Description of Artificial Sequence: Synthetic oligonucleotide
auauucaccugucuuggug

SEQ ID NO: 243673 - RNA, 19 nt, Artificial Sequence
  Description of Artificial Sequence: Synthetic oligonucleotide
aacgagugguuguggugcc

SEQ ID NO: 243674 - RNA, 19 nt, Artificial Sequence
  Description of Artificial Sequence: Synthetic oligonucleotide
ugcaccagagcaaacgaac

SEQ ID NO: 243675 - RNA, 19 nt, Artificial Sequence
  Description of Artificial Sequence: Synthetic oligonucleotide
auauuccucucucucaaug

SEQ ID NO: 243676 - RNA, 19 nt, Artificial Sequence
  Description of Artificial Sequence: Synthetic oligonucleotide
aucaggaagugguaacggg

SEQ ID NO: 243677 - RNA, 19 nt, Artificial Sequence
  Description of Artificial Sequence: Synthetic oligonucleotide
ucauuacuggaggagcugg

SEQ ID NO: 243678 - RNA, 19 nt, Artificial Sequence
  Description of Artificial Sequence: Synthetic oligonucleotide
auugacuucacagaccaga

SEQ ID NO: 243679 - RNA, 19 nt, Artificial Sequence
  Description of Artificial Sequence: Synthetic oligonucleotide
guaucucaaagacuggcug

SEQ ID NO: 243680 - RNA, 19 nt, Artificial Sequence
  Description of Artificial Sequence: Synthetic oligonucleotide
cuacagucgggcaagugag

SEQ ID NO: 243681 - RNA, 19 nt, Artificial Sequence
  Description of Artificial Sequence: Synthetic oligonucleotide
cauagcuuggguucaugcc

SEQ ID NO: 243682 - RNA, 19 nt, Artificial Sequence
  Description of Artificial Sequence: Synthetic oligonucleotide
uccggauaucauaacgacc

SEQ ID NO: 243683 - RNA, 19 nt, Artificial Sequence
  Description of Artificial Sequence: Synthetic oligonucleotide
cauucauggacccuuucac

SEQ ID NO: 243684 - RNA, 19 nt, Artificial Sequence
  Description of Artificial Sequence: Synthetic oligonucleotide
ugucguugaacuccagugu

SEQ ID NO: 243685 - RNA, 19 nt, Artificial Sequence
  Description of Artificial Sequence: Synthetic oligonucleotide
agcuuuaucccuacagucg

SEQ ID NO: 243686 - RNA, 19 nt, Artificial Sequence
  Description of Artificial Sequence: Synthetic oligonucleotide
gaucuuuacccuucuucgc

SEQ ID NO: 243687 - RNA, 19 nt, Artificial Sequence
  Description of Artificial Sequence: Synthetic oligonucleotide
gaacgagugguuguggugc

SEQ ID NO: 243688 - RNA, 19 nt, Artificial Sequence
  Description of Artificial Sequence: Synthetic oligonucleotide
gagagucaaggagauaucc

SEQ ID NO: 243689 - RNA, 19 nt, Artificial Sequence
  Description of Artificial Sequence: Synthetic oligonucleotide
aaaucgcuucuccacuucu

SEQ ID NO: 243690 - RNA, 19 nt, Artificial Sequence
  Description of Artificial Sequence: Synthetic oligonucleotide
ucagcauaaucaucauagc

SEQ ID NO: 243691 - RNA, 19 nt, Artificial Sequence
  Description of Artificial Sequence: Synthetic oligonucleotide
gauagugaguuuugaagaa

SEQ ID NO: 243692 - RNA, 19 nt, Artificial Sequence
  Description of Artificial Sequence: Synthetic oligonucleotide
gaucaggaagugguaacgg

SEQ ID NO: 243693 - RNA, 19 nt, Artificial Sequence
  Description of Artificial Sequence: Synthetic oligonucleotide
acggguuuggcccugcuug

SEQ ID NO: 243694 - RNA, 19 nt, Artificial Sequence
  Description of Artificial Sequence: Synthetic oligonucleotide
ugacaaaagagaucucauc

SEQ ID NO: 243695 - RNA, 19 nt, Artificial Sequence
  Description of Artificial Sequence: Synthetic oligonucleotide
ucauucauguugagaguca

SEQ ID NO: 243696 - RNA, 19 nt, Artificial Sequence
  Description of Artificial Sequence: Synthetic oligonucleotide
ucucggcuggcauuaagcc

SEQ ID NO: 243697 - RNA, 19 nt, Artificial Sequence
  Description of Artificial Sequence: Synthetic oligonucleotide
gcugaagguauacugagug

SEQ ID NO: 243698 - RNA, 19 nt, Artificial Sequence
  Description of Artificial Sequence: Synthetic oligonucleotide
aaacacugcagcucccgga

SEQ ID NO: 243699 - RNA, 19 nt, Artificial Sequence
  Description of Artificial Sequence: Synthetic oligonucleotide
gcgauagugaguuuugaag

SEQ ID NO: 243700 - RNA, 19 nt, Artificial Sequence
  Description of Artificial Sequence: Synthetic oligonucleotide
acgguuuacaagugcuuuc

SEQ ID NO: 243701 - RNA, 19 nt, Artificial Sequence
  Description of Artificial Sequence: Synthetic oligonucleotide
aucacgucugccuuugaca

SEQ ID NO: 243702 - RNA, 19 nt, Artificial Sequence
  Description of Artificial Sequence: Synthetic oligonucleotide
ucauacuuguagacauggc

SEQ ID NO: 243703 - RNA, 19 nt, Artificial Sequence
  Description of Artificial Sequence: Synthetic oligonucleotide
uuuaucccuacagucgggc

SEQ ID NO: 243704 - RNA, 19 nt, Artificial Sequence
  Description of Artificial Sequence: Synthetic oligonucleotide
aguccaaggacuauguaga

SEQ ID NO: 243705 - RNA, 19 nt, Artificial Sequence
  Description of Artificial Sequence: Synthetic oligonucleotide
agcauaaucaucauagcuu

SEQ ID NO: 243706 - RNA, 19 nt, Artificial Sequence
  Description of Artificial Sequence: Synthetic oligonucleotide
gaaagguaggguagauccg

SEQ ID NO: 243707 - RNA, 19 nt, Artificial Sequence
  Description of Artificial Sequence: Synthetic oligonucleotide
ucuuaggggcauuuggauc

SEQ ID NO: 243708 - RNA, 19 nt, Artificial Sequence
  Description of Artificial Sequence: Synthetic oligonucleotide
acauagaugaagccccgcu

SEQ ID NO: 243709 - RNA, 19 nt, Artificial Sequence
  Description of Artificial Sequence: Synthetic oligonucleotide
cugaagguauacugagugc

SEQ ID NO: 243710 - RNA, 19 nt, Artificial Sequence
  Description of Artificial Sequence: Synthetic oligonucleotide
auagaagcgcaccuccaug

SEQ ID NO: 243711 - RNA, 19 nt, Artificial Sequence
  Description of Artificial Sequence: Synthetic oligonucleotide
uucccuuccagaucucgcc

SEQ ID NO: 243712 - RNA, 19 nt, Artificial Sequence
  Description of Artificial Sequence: Synthetic oligonucleotide
aacuccuagagggagugga

SEQ ID NO: 243713 - RNA, 19 nt, Artificial Sequence
  Description of Artificial Sequence: Synthetic oligonucleotide
ucaaagcguaugugcacag

SEQ ID NO: 243714 - RNA, 19 nt, Artificial Sequence
  Description of Artificial Sequence: Synthetic oligonucleotide
acuugaucuucucucggcu

SEQ ID NO: 243715 - RNA, 19 nt, Artificial Sequence
  Description of Artificial Sequence: Synthetic oligonucleotide
cauuagcucaaggcgauag

SEQ ID NO: 243716 - RNA, 19 nt, Artificial Sequence
  Description of Artificial Sequence: Synthetic oligonucleotide
uaucccuacagucgggcaa

SEQ ID NO: 243717 - RNA, 19 nt, Artificial Sequence
  Description of Artificial Sequence: Synthetic oligonucleotide
uauaggggaucuuguaguc

SEQ ID NO: 243718 - RNA, 19 nt, Artificial Sequence
  Description of Artificial Sequence: Synthetic oligonucleotide
aagcguaugugcacagggg

SEQ ID NO: 243719 - RNA, 19 nt, Artificial Sequence
  Description of Artificial Sequence: Synthetic oligonucleotide
gagcuggccuuauaggagc

SEQ ID NO: 243720 - RNA, 19 nt, Artificial Sequence
  Description of Artificial Sequence: Synthetic oligonucleotide
cagcuuuaucccuacaguc

SEQ ID NO: 243721 - RNA, 19 nt, Artificial Sequence
  Description of Artificial Sequence: Synthetic oligonucleotide
gauccggauaucauaacga

SEQ ID NO: 243722 - RNA, 19 nt, Artificial Sequence
  Description of Artificial Sequence: Synthetic oligonucleotide
ugccuugaugaagacuugg

SEQ ID NO: 243723 - RNA, 19 nt, Artificial Sequence
  Description of Artificial Sequence: Synthetic oligonucleotide
agagacggagaacuguagu

SEQ ID NO: 243724 - RNA, 19 nt, Artificial Sequence
  Description of Artificial Sequence: Synthetic oligonucleotide
ucaaucguagccucccauc

SEQ ID NO: 243725 - RNA, 19 nt, Artificial Sequence
  Description of Artificial Sequence: Synthetic oligonucleotide
aaacuccgauucucggaag

SEQ ID NO: 243726 - RNA, 19 nt, Artificial Sequence
  Description of Artificial Sequence: Synthetic oligonucleotide
ucauucuugcccguuguac

SEQ ID NO: 243727 - RNA, 19 nt, Artificial Sequence
  Description of Artificial Sequence: Synthetic oligonucleotide
aagugagccgaggacuuag

SEQ ID NO: 243728 - RNA, 19 nt, Artificial Sequence
  Description of Artificial Sequence: Synthetic oligonucleotide
ugucaacuccccagccugg

SEQ ID NO: 243729 - RNA, 19 nt, Artificial Sequence
  Description of Artificial Sequence: Synthetic oligonucleotide
ucuacucaucagauccuga

SEQ ID NO: 243730 - RNA, 19 nt, Artificial Sequence
  Description of Artificial Sequence: Synthetic oligonucleotide
uugcauugacaaaaucaaa

SEQ ID NO: 243731 - RNA, 19 nt, Artificial Sequence
  Description of Artificial Sequence: Synthetic oligonucleotide
gaagguauacugagugccc

SEQ ID NO: 243732 - RNA, 19 nt, Artificial Sequence
  Description of Artificial Sequence: Synthetic oligonucleotide
acuccgauucucggaagcc

SEQ ID NO: 243733 - RNA, 19 nt, Artificial Sequence
  Description of Artificial Sequence: Synthetic oligonucleotide
ggagauauccucauccuug

SEQ ID NO: 243734 - RNA, 19 nt, Artificial Sequence
  Description of Artificial Sequence: Synthetic oligonucleotide
aggacuauguagaaagccu

SEQ ID NO: 243735 - RNA, 19 nt, Artificial Sequence
  Description of Artificial Sequence: Synthetic oligonucleotide
caucaaagcguaugugcac

SEQ ID NO: 243736 - RNA, 19 nt, Artificial Sequence
  Description of Artificial Sequence: Synthetic oligonucleotide
uagccucccaucauucaug

SEQ ID NO: 243737 - RNA, 19 nt, Artificial Sequence
  Description of Artificial Sequence: Synthetic oligonucleotide
gaucacgucugccuuugac

SEQ ID NO: 243738 - RNA, 19 nt, Artificial Sequence
  Description of Artificial Sequence: Synthetic oligonucleotide
uucugucaacuccccagcc

SEQ ID NO: 243739 - RNA, 19 nt, Artificial Sequence
  Description of Artificial Sequence: Synthetic oligonucleotide
uccauuagcucaaggcgau

SEQ ID NO: 243740 - RNA, 19 nt, Artificial Sequence
  Description of Artificial Sequence: Synthetic oligonucleotide
ugccauauucaccugucuu

SEQ ID NO: 243741 - RNA, 19 nt, Artificial Sequence
  Description of Artificial Sequence: Synthetic oligonucleotide
cugucaacuccccagccug

SEQ ID NO: 243742 - RNA, 19 nt, Artificial Sequence
  Description of Artificial Sequence: Synthetic oligonucleotide
ucuugcccguuguacacug

SEQ ID NO: 243743 - RNA, 19 nt, Artificial Sequence
  Description of Artificial Sequence: Synthetic oligonucleotide
cauagaugaagccccgcuc

SEQ ID NO: 243744 - RNA, 19 nt, Artificial Sequence
  Description of Artificial Sequence: Synthetic oligonucleotide
ucguugaacuccagugucu

SEQ ID NO: 243745 - RNA, 19 nt, Artificial Sequence
  Description of Artificial Sequence: Synthetic oligonucleotide
agugguuguggugccacgg

SEQ ID NO: 243746 - RNA, 19 nt, Artificial Sequence
  Description of Artificial Sequence: Synthetic oligonucleotide
cugaucaccaaugucaaaa

SEQ ID NO: 243747 - RNA, 19 nt, Artificial Sequence
  Description of Artificial Sequence: Synthetic oligonucleotide
agauuacaaggagccauuc

SEQ ID NO: 243748 - RNA, 19 nt, Artificial Sequence
  Description of Artificial Sequence: Synthetic oligonucleotide
uaugcagacauaggccucu

SEQ ID NO: 243749 - RNA, 19 nt, Artificial Sequence
  Description of Artificial Sequence: Synthetic oligonucleotide
uauacugagugcccugcuu

SEQ ID NO: 243750 - RNA, 19 nt, Artificial Sequence
  Description of Artificial Sequence: Synthetic oligonucleotide
uucuugguaagccgccccu

SEQ ID NO: 243751 - RNA, 19 nt, Artificial Sequence
  Description of Artificial Sequence: Synthetic oligonucleotide
ucgaaggaacgagugguug

SEQ ID NO: 243752 - RNA, 19 nt, Artificial Sequence
  Description of Artificial Sequence: Synthetic oligonucleotide
agcaguuacucagauggca

SEQ ID NO: 243753 - RNA, 19 nt, Artificial Sequence
  Description of Artificial Sequence: Synthetic oligonucleotide
cauuacuggaggagcuggc

SEQ ID NO: 243754 - RNA, 19 nt, Artificial Sequence
  Description of Artificial Sequence: Synthetic oligonucleotide
ccggauaucauaacgacca

SEQ ID NO: 243755 - RNA, 19 nt, Artificial Sequence
  Description of Artificial Sequence: Synthetic oligonucleotide
gucguugaacuccaguguc

SEQ ID NO: 243756 - RNA, 19 nt, Artificial Sequence
  Description of Artificial Sequence: Synthetic oligonucleotide
cagacauguucuugguaag

SEQ ID NO: 243757 - RNA, 19 nt, Artificial Sequence
  Description of Artificial Sequence: Synthetic oligonucleotide
ugcugaagguauacugagu

SEQ ID NO: 243758 - RNA, 19 nt, Artificial Sequence
  Description of Artificial Sequence: Synthetic oligonucleotide
agguuagauguuucccuug

SEQ ID NO: 243759 - RNA, 19 nt, Artificial Sequence
  Description of Artificial Sequence: Synthetic oligonucleotide
cugggacugugauuuuacg

SEQ ID NO: 243760 - RNA, 19 nt, Artificial Sequence
  Description of Artificial Sequence: Synthetic oligonucleotide
guauaggggaucuuguagu

SEQ ID NO: 243761 - RNA, 19 nt, Artificial Sequence
  Description of Artificial Sequence: Synthetic oligonucleotide
acuguaguauaggggaucu

SEQ ID NO: 243762 - RNA, 19 nt, Artificial Sequence
  Description of Artificial Sequence: Synthetic oligonucleotide
cuucaacgcacugugagca

SEQ ID NO: 243763 - RNA, 19 nt, Artificial Sequence
  Description of Artificial Sequence: Synthetic oligonucleotide
uuaucccuacagucgggca

SEQ ID NO: 243764 - RNA, 19 nt, Artificial Sequence
  Description of Artificial Sequence: Synthetic oligonucleotide
aagcucucacuuagcugcc

SEQ ID NO: 243765 - RNA, 19 nt, Artificial Sequence
  Description of Artificial Sequence: Synthetic oligonucleotide
ucccaucauucauggaccc

SEQ ID NO: 243766 - RNA, 19 nt, Artificial Sequence
  Description of Artificial Sequence: Synthetic oligonucleotide
ucauaacgaccacgaggag

SEQ ID NO: 243767 - RNA, 19 nt, Artificial Sequence
  Description of Artificial Sequence: Synthetic oligonucleotide
aaggcgauagugaguuuug

SEQ ID NO: 243768 - RNA, 19 nt, Artificial Sequence
  Description of Artificial Sequence: Synthetic oligonucleotide
uucaacgcacugugagcag

SEQ ID NO: 243769 - RNA, 19 nt, Artificial Sequence
  Description of Artificial Sequence: Synthetic oligonucleotide
agauccuucaacgcacugu

SEQ ID NO: 243770 - RNA, 19 nt, Artificial Sequence
  Description of Artificial Sequence: Synthetic oligonucleotide
uuacgguuuacaagugcuu

SEQ ID NO: 243771 - RNA, 19 nt, Artificial Sequence
  Description of Artificial Sequence: Synthetic oligonucleotide
ccccagauuacaaggagcc

SEQ ID NO: 243772 - RNA, 19 nt, Artificial Sequence
  Description of Artificial Sequence: Synthetic oligonucleotide
ucucucggcuggcauuaag

SEQ ID NO: 243773 - RNA, 19 nt, Artificial Sequence
  Description of Artificial Sequence: Synthetic oligonucleotide
uccuagagggaguggauuu

SEQ ID NO: 243774 - RNA, 19 nt, Artificial Sequence
  Description of Artificial Sequence: Synthetic oligonucleotide
uccgauucucggaagccau

SEQ ID NO: 243775 - RNA, 19 nt, Artificial Sequence
  Description of Artificial Sequence: Synthetic oligonucleotide
cuugcggcucuugcgaucc

SEQ ID NO: 243776 - RNA, 19 nt, Artificial Sequence
  Description of Artificial Sequence: Synthetic oligonucleotide
acuauguagaaagccugga

SEQ ID NO: 243777 - RNA, 19 nt, Artificial Sequence
  Description of Artificial Sequence: Synthetic oligonucleotide
uggcggcucaaucguagcc

SEQ ID NO: 243778 - RNA, 19 nt, Artificial Sequence
  Description of Artificial Sequence: Synthetic oligonucleotide
acggagaacuguaguauag

SEQ ID NO: 243779 - RNA, 19 nt, Artificial Sequence
  Description of Artificial Sequence: Synthetic oligonucleotide
ugaccaucucauagaggga

SEQ ID NO: 243780 - RNA, 19 nt, Artificial Sequence
  Description of Artificial Sequence: Synthetic oligonucleotide
caaacuccgauucucggaa

SEQ ID NO: 243781 - RNA, 19 nt, Artificial Sequence
  Description of Artificial Sequence: Synthetic oligonucleotide
uucuucgccucugaagacu

SEQ ID NO: 243782 - RNA, 19 nt, Artificial Sequence
  Description of Artificial Sequence: Synthetic oligonucleotide
uguucuugguaagccgccc

SEQ ID NO: 243783 - RNA, 19 nt, Artificial Sequence
  Description of Artificial Sequence: Synthetic oligonucleotide
uacagucgggcaagugagc

SEQ ID NO: 243784 - RNA, 19 nt, Artificial Sequence
  Description of Artificial Sequence: Synthetic oligonucleotide
caugaccccugaugcagcc

SEQ ID NO: 243785 - RNA, 19 nt, Artificial Sequence
  Description of Artificial Sequence: Synthetic oligonucleotide
cugagcacagagcccuagg

SEQ ID NO: 243786 - RNA, 19 nt, Artificial Sequence
  Description of Artificial Sequence: Synthetic oligonucleotide
caaucguagccucccauca

SEQ ID NO: 243787 - RNA, 19 nt, Artificial Sequence
  Description of Artificial Sequence: Synthetic oligonucleotide
agacggagaacuguaguau

SEQ ID NO: 243788 - RNA, 19 nt, Artificial Sequence
  Description of Artificial Sequence: Synthetic oligonucleotide
ucuucgccucugaagacuu

SEQ ID NO: 243789 - RNA, 19 nt, Artificial Sequence
  Description of Artificial Sequence: Synthetic oligonucleotide
ucucggaagccaucauacu

SEQ ID NO: 243790 - RNA, 19 nt, Artificial Sequence
  Description of Artificial Sequence: Synthetic oligonucleotide
auuuuacgguuuacaagug

SEQ ID NO: 243791 - RNA, 19 nt, Artificial Sequence
  Description of Artificial Sequence: Synthetic oligonucleotide
ucguagccucccaucauuc

SEQ ID NO: 243792 - RNA, 19 nt, Artificial Sequence
  Description of Artificial Sequence: Synthetic oligonucleotide
ucccuuccagaucucgccu

SEQ ID NO: 243793 - RNA, 19 nt, Artificial Sequence
  Description of Artificial Sequence: Synthetic oligonucleotide
aagccgccccucaaaucgc

SEQ ID NO: 243794 - RNA, 19 nt, Artificial Sequence
  Description of Artificial Sequence: Synthetic oligonucleotide
uggaucacgucugccuuug

SEQ ID NO: 243795 - RNA, 19 nt, Artificial Sequence
  Description of Artificial Sequence: Synthetic oligonucleotide
ccuuugacagaacauucug

SEQ ID NO: 243796 - RNA, 19 nt, Artificial Sequence
  Description of Artificial Sequence: Synthetic oligonucleotide
caaagcguaugugcacagg

SEQ ID NO: 243797 - RNA, 19 nt, Artificial Sequence
  Description of Artificial Sequence: Synthetic oligonucleotide
uucccuccuggcauccuca

SEQ ID NO: 243798 - RNA, 19 nt, Artificial Sequence
  Description of Artificial Sequence: Synthetic oligonucleotide
ugguaagccgccccucaaa

SEQ ID NO: 243799 - RNA, 19 nt, Artificial Sequence
  Description of Artificial Sequence: Synthetic oligonucleotide
aucguagccucccaucauu

SEQ ID NO: 243800 - RNA, 19 nt, Artificial Sequence
  Description of Artificial Sequence: Synthetic oligonucleotide
gguagauccggauaucaua

SEQ ID NO: 243801 - RNA, 19 nt, Artificial Sequence
  Description of Artificial Sequence: Synthetic oligonucleotide
gguuagauguuucccuuga

SEQ ID NO: 243802 - RNA, 19 nt, Artificial Sequence
  Description of Artificial Sequence: Synthetic oligonucleotide
aggguagauccggauauca

SEQ ID NO: 243803 - RNA, 19 nt, Artificial Sequence
  Description of Artificial Sequence: Synthetic oligonucleotide
agucgggcaagugagccga

SEQ ID NO: 243804 - RNA, 19 nt, Artificial Sequence
  Description of Artificial Sequence: Synthetic oligonucleotide
ucgccugccuucuuagaaa

SEQ ID NO: 243805 - RNA, 19 nt, Artificial Sequence
  Description of Artificial Sequence: Synthetic oligonucleotide
cuucuucgccucugaagac

SEQ ID NO: 243806 - RNA, 19 nt, Artificial Sequence
  Description of Artificial Sequence: Synthetic oligonucleotide
agcuacaggccugacuuca

SEQ ID NO: 243807 - RNA, 19 nt, Artificial Sequence
  Description of Artificial Sequence: Synthetic oligonucleotide
ugcccguuguacacuggga

SEQ ID NO: 243808 - RNA, 19 nt, Artificial Sequence
  Description of Artificial Sequence: Synthetic oligonucleotide
agggauccagacauguucu

SEQ ID NO: 243809 - RNA, 19 nt, Artificial Sequence
  Description of Artificial Sequence: Synthetic oligonucleotide
guccucugagcuuggagga

SEQ ID NO: 243810 - RNA, 19 nt, Artificial Sequence
  Description of Artificial Sequence: Synthetic oligonucleotide
caacgcacugugagcagac

SEQ ID NO: 243811 - RNA, 19 nt, Artificial Sequence
  Description of Artificial Sequence: Synthetic oligonucleotide
gacggagaacuguaguaua

SEQ ID NO: 243812 - RNA, 19 nt, Artificial Sequence
  Description of Artificial Sequence: Synthetic oligonucleotide
ccuucuucgccucugaaga

SEQ ID NO: 243813 - RNA, 19 nt, Artificial Sequence
  Description of Artificial Sequence: Synthetic oligonucleotide
gcuacccggcgccagaugc

SEQ ID NO: 243814 - RNA, 19 nt, Artificial Sequence
  Description of Artificial Sequence: Synthetic oligonucleotide
ggaacgagugguuguggug

SEQ ID NO: 243815 - RNA, 19 nt, Artificial Sequence
  Description of Artificial Sequence: Synthetic oligonucleotide
acgaggagucaaacacugc

SEQ ID NO: 243816 - RNA, 19 nt, Artificial Sequence
  Description of Artificial Sequence: Synthetic oligonucleotide
aacggguuuggcccugcuu

SEQ ID NO: 243817 - RNA, 19 nt, Artificial Sequence
  Description of Artificial Sequence: Synthetic oligonucleotide
auaggggaucuuguaguca

SEQ ID NO: 243818 - RNA, 19 nt, Artificial Sequence
  Description of Artificial Sequence: Synthetic oligonucleotide
ucugauccuuguggggcag

SEQ ID NO: 243819 - RNA, 19 nt, Artificial Sequence
  Description of Artificial Sequence: Synthetic oligonucleotide
aggaguccugagcuggccu

SEQ ID NO: 243820 - RNA, 19 nt, Artificial Sequence
  Description of Artificial Sequence: Synthetic oligonucleotide
gacuucacaugaccccuga

SEQ ID NO: 243821 - RNA, 19 nt, Artificial Sequence
  Description of Artificial Sequence: Synthetic oligonucleotide
gguauacugagugcccugc

SEQ ID NO: 243822 - RNA, 19 nt, Artificial Sequence
  Description of Artificial Sequence: Synthetic oligonucleotide
cgauagugaguuuugaaga

SEQ ID NO: 243823 - RNA, 19 nt, Artificial Sequence
  Description of Artificial Sequence: Synthetic oligonucleotide
cccuauuaggagcuacagg

SEQ ID NO: 243824 - RNA, 19 nt, Artificial Sequence
  Description of Artificial Sequence: Synthetic oligonucleotide
ccaugcagguguagaaagg

SEQ ID NO: 243825 - RNA, 19 nt, Artificial Sequence
  Description of Artificial Sequence: Synthetic oligonucleotide
ggagcuacaggccugacuu

SEQ ID NO: 243826 - RNA, 19 nt, Artificial Sequence
  Description of Artificial Sequence: Synthetic oligonucleotide
ccuucaacgcacugugagc

SEQ ID NO: 243827 - RNA, 19 nt, Artificial Sequence
  Description of Artificial Sequence: Synthetic oligonucleotide
cuugcccguuguacacugg

SEQ ID NO: 243828 - RNA, 19 nt, Artificial Sequence
  Description of Artificial Sequence: Synthetic oligonucleotide
ugguaacggguuuggcccu

SEQ ID NO: 243829 - RNA, 19 nt, Artificial Sequence
  Description of Artificial Sequence: Synthetic oligonucleotide
gaacuccuagagggagugg

SEQ ID NO: 243830 - RNA, 19 nt, Artificial Sequence
  Description of Artificial Sequence: Synthetic oligonucleotide
ucuugcgauccuuggccau

SEQ ID NO: 243831 - RNA, 19 nt, Artificial Sequence
  Description of Artificial Sequence: Synthetic oligonucleotide
uuggguucaugcccucuuu

SEQ ID NO: 243832 - RNA, 19 nt, Artificial Sequence
  Description of Artificial Sequence: Synthetic oligonucleotide
acccuggcggcucaaucgu

SEQ ID NO: 243833 - RNA, 19 nt, Artificial Sequence
  Description of Artificial Sequence: Synthetic oligonucleotide
cucggcuggcauuaagcca

SEQ ID NO: 243834 - RNA, 19 nt, Artificial Sequence
  Description of Artificial Sequence: Synthetic oligonucleotide
cuacccggcgccagaugcc

SEQ ID NO: 243835 - RNA, 19 nt, Artificial Sequence
  Description of Artificial Sequence: Synthetic oligonucleotide
ggaagugguaacggguuug

SEQ ID NO: 243836 - RNA, 19 nt, Artificial Sequence
  Description of Artificial Sequence: Synthetic oligonucleotide
aagguaggguagauccgga

SEQ ID NO: 243837 - RNA, 19 nt, Artificial Sequence
  Description of Artificial Sequence: Synthetic oligonucleotide
agugcuacccggcgccaga

SEQ ID NO: 243838 - RNA, 19 nt, Artificial Sequence
  Description of Artificial Sequence: Synthetic oligonucleotide
uggguaggagggacauaga

SEQ ID NO: 243839 - RNA, 19 nt, Artificial Sequence
  Description of Artificial Sequence: Synthetic oligonucleotide
gaguccucgcuccgccucc

SEQ ID NO: 243840 - RNA, 19 nt, Artificial Sequence
  Description of Artificial Sequence: Synthetic oligonucleotide
ggccugacuucacaugacc

SEQ ID NO: 243841 - RNA, 19 nt, Artificial Sequence
  Description of Artificial Sequence: Synthetic oligonucleotide
cuggcggcucaaucguagc

SEQ ID NO: 243842 - RNA, 19 nt, Artificial Sequence
  Description of Artificial Sequence: Synthetic oligonucleotide
gaccaucucauagagggau

SEQ ID NO: 243843 - RNA, 19 nt, Artificial Sequence
  Description of Artificial Sequence: Synthetic oligonucleotide
aggaagugguaacggguuu

SEQ ID NO: 243844 - RNA, 19 nt, Artificial Sequence
  Description of Artificial Sequence: Synthetic oligonucleotide
guaagccgccccucaaauc

SEQ ID NO: 243845 - RNA, 19 nt, Artificial Sequence
  Description of Artificial Sequence: Synthetic oligonucleotide
agaugauacccuggcggcu

SEQ ID NO: 243846 - RNA, 19 nt, Artificial Sequence
  Description of Artificial Sequence: Synthetic oligonucleotide
cauaacgaccacgaggagu

SEQ ID NO: 243847 - RNA, 19 nt, Artificial Sequence
  Description of Artificial Sequence: Synthetic oligonucleotide
gcaguuacucagauggcac

SEQ ID NO: 243848 - RNA, 19 nt, Artificial Sequence
  Description of Artificial Sequence: Synthetic oligonucleotide
aaucgcuucuccacuucuu

SEQ ID NO: 243849 - RNA, 19 nt, Artificial Sequence
  Description of Artificial Sequence: Synthetic oligonucleotide
gauggucugacuugaucuu

SEQ ID NO: 243850 - RNA, 19 nt, Artificial Sequence
  Description of Artificial Sequence: Synthetic oligonucleotide
cugaugccaggauggucug

SEQ ID NO: 243851 - RNA, 19 nt, Artificial Sequence
  Description of Artificial Sequence: Synthetic oligonucleotide
gagguuagauguuucccuu

SEQ ID NO: 243852 - RNA, 19 nt, Artificial Sequence
  Description of Artificial Sequence: Synthetic oligonucleotide
agaguccaaggacuaugua

SEQ ID NO: 243853 - RNA, 19 nt, Artificial Sequence
  Description of Artificial Sequence: Synthetic oligonucleotide
ggguaggagggacauagaa

SEQ ID NO: 243854 - RNA, 19 nt, Artificial Sequence
  Description of Artificial Sequence: Synthetic oligonucleotide
cuacaggguccacaccauc

SEQ ID NO: 243855 - RNA, 19 nt, Artificial Sequence
  Description of Artificial Sequence: Synthetic oligonucleotide
cuugcgauccuuggccauc

SEQ ID NO: 243856 - RNA, 19 nt, Artificial Sequence
  Description of Artificial Sequence: Synthetic oligonucleotide
ggcccuuuugagcuguuuc

SEQ ID NO: 243857 - RNA, 19 nt, Artificial Sequence
  Description of Artificial Sequence: Synthetic oligonucleotide
aacgcacugugagcagaca

SEQ ID NO: 243858 - RNA, 19 nt, Artificial Sequence
  Description of Artificial Sequence: Synthetic oligonucleotide
aggccugacuucacaugac

SEQ ID NO: 243859 - RNA, 19 nt, Artificial Sequence
  Description of Artificial Sequence: Synthetic oligonucleotide
uugcgauccuuggccaucu

SEQ ID NO: 243860 - RNA, 19 nt, Artificial Sequence
  Description of Artificial Sequence: Synthetic oligonucleotide
cccuuuugagcuguuuccg

SEQ ID NO: 243861 - RNA, 19 nt, Artificial Sequence
  Description of Artificial Sequence: Synthetic oligonucleotide
caugacccggcugaccauc

SEQ ID NO: 243862 - RNA, 19 nt, Artificial Sequence
  Description of Artificial Sequence: Synthetic oligonucleotide
guuacucagauggcacaga

SEQ ID NO: 243863 - RNA, 19 nt, Artificial Sequence
  Description of Artificial Sequence: Synthetic oligonucleotide
ugcuacccggcgccagaug

SEQ ID NO: 243864 - RNA, 19 nt, Artificial Sequence
  Description of Artificial Sequence: Synthetic oligonucleotide
guaugcagacauaggccuc

SEQ ID NO: 243865 - RNA, 19 nt, Artificial Sequence
  Description of Artificial Sequence: Synthetic oligonucleotide
ggcucaaucguagccuccc

SEQ ID NO: 243866 - RNA, 19 nt, Artificial Sequence
  Description of Artificial Sequence: Synthetic oligonucleotide
caugcagguguagaaaggu

SEQ ID NO: 243867 - RNA, 19 nt, Artificial Sequence
  Description of Artificial Sequence: Synthetic oligonucleotide
cucccggaagaugcaaaug

SEQ ID NO: 243868 - RNA, 19 nt, Artificial Sequence
  Description of Artificial Sequence: Synthetic oligonucleotide
ggcgauagugaguuuugaa

SEQ ID NO: 243869 - RNA, 19 nt, Artificial Sequence
  Description of Artificial Sequence: Synthetic oligonucleotide
cuacaggccugacuucaca

SEQ ID NO: 243870 - RNA, 19 nt, Artificial Sequence
  Description of Artificial Sequence: Synthetic oligonucleotide
uaacggguuuggcccugcu

SEQ ID NO: 243871 - RNA, 19 nt, Artificial Sequence
  Description of Artificial Sequence: Synthetic oligonucleotide
gccugacuucacaugaccc

SEQ ID NO: 243872 - RNA, 19 nt, Artificial Sequence
  Description of Artificial Sequence: Synthetic oligonucleotide
cccucauuacuggaggagc

SEQ ID NO: 243873 - RNA, 19 nt, Artificial Sequence
  Description of Artificial Sequence: Synthetic oligonucleotide
gagcuacaggccugacuuc

SEQ ID NO: 243874 - RNA, 19 nt, Artificial Sequence
  Description of Artificial Sequence: Synthetic oligonucleotide
cucggaagccaucauacuu

SEQ ID NO: 243875 - RNA, 19 nt, Artificial Sequence
  Description of Artificial Sequence: Synthetic oligonucleotide
aagacuucuugcggcucuu

SEQ ID NO: 243876 - RNA, 19 nt, Artificial Sequence
  Description of Artificial Sequence: Synthetic oligonucleotide
gcugaccaucucauagagg

SEQ ID NO: 243877 - RNA, 19 nt, Artificial Sequence
  Description of Artificial Sequence: Synthetic oligonucleotide
gcagcuuuaucccuacagu

SEQ ID NO: 243878 - RNA, 19 nt, Artificial Sequence
  Description of Artificial Sequence: Synthetic oligonucleotide
ccguuguacacugggacac

SEQ ID NO: 243879 - RNA, 19 nt, Artificial Sequence
  Description of Artificial Sequence: Synthetic oligonucleotide
cucuuaggggcauuuggau

SEQ ID NO: 243880 - RNA, 19 nt, Artificial Sequence
  Description of Artificial Sequence: Synthetic oligonucleotide
ggccuuauaggagcaggug

SEQ ID NO: 243881 - RNA, 19 nt, Artificial Sequence
  Description of Artificial Sequence: Synthetic oligonucleotide
uacccggcgccagaugccu

SEQ ID NO: 243882 - RNA, 19 nt, Artificial Sequence
  Description of Artificial Sequence: Synthetic oligonucleotide
ccucuuaggggcauuugga

SEQ ID NO: 243883 - RNA, 19 nt, Artificial Sequence
  Description of Artificial Sequence: Synthetic oligonucleotide
gcauuuggaucuuuacccu

SEQ ID NO: 243884 - RNA, 19 nt, Artificial Sequence
  Description of Artificial Sequence: Synthetic oligonucleotide
cauagaagcgcaccuccau

SEQ ID NO: 243885 - RNA, 19 nt, Artificial Sequence
  Description of Artificial Sequence: Synthetic oligonucleotide
cuccgauucucggaagcca

SEQ ID NO: 243886 - RNA, 19 nt, Artificial Sequence
  Description of Artificial Sequence: Synthetic oligonucleotide
cuucgccucugaagacuuc

SEQ ID NO: 243887 - RNA, 19 nt, Artificial Sequence
  Description of Artificial Sequence: Synthetic oligonucleotide
guuagauguuucccuugau

SEQ ID NO: 243888 - RNA, 19 nt, Artificial Sequence
  Description of Artificial Sequence: Synthetic oligonucleotide
guauacugagugcccugcu

SEQ ID NO: 243889 - RNA, 19 nt, Artificial Sequence
  Description of Artificial Sequence: Synthetic oligonucleotide
cauuuggaucuuuacccuu

SEQ ID NO: 243890 - RNA, 19 nt, Artificial Sequence
  Description of Artificial Sequence: Synthetic oligonucleotide
uaacgaccacgaggaguca

SEQ ID NO: 243891 - RNA, 19 nt, Artificial Sequence
  Description of Artificial Sequence: Synthetic oligonucleotide
agugagccgaggacuuaga

SEQ ID NO: 243892 - RNA, 19 nt, Artificial Sequence
  Description of Artificial Sequence: Synthetic oligonucleotide
agcgcaccuccaugagaga

SEQ ID NO: 243893 - RNA, 19 nt, Artificial Sequence
  Description of Artificial Sequence: Synthetic oligonucleotide
guaacggguuuggcccugc

SEQ ID NO: 243894 - RNA, 19 nt, Artificial Sequence
  Description of Artificial Sequence: Synthetic oligonucleotide
caaggcgauagugaguuuu

SEQ ID NO: 243895 - RNA, 19 nt, Artificial Sequence
  Description of Artificial Sequence: Synthetic oligonucleotide
acgaccacgaggagucaaa

SEQ ID NO: 243896 - RNA, 19 nt, Artificial Sequence
  Description of Artificial Sequence: Synthetic oligonucleotide
ccccuauuaggagcuacag

SEQ ID NO: 243897 - RNA, 19 nt, Artificial Sequence
  Description of Artificial Sequence: Synthetic oligonucleotide
gucaacuccccagccugga

SEQ ID NO: 243898 - RNA, 19 nt, Artificial Sequence
  Description of Artificial Sequence: Synthetic oligonucleotide
uuaggggcauuuggaucuu

SEQ ID NO: 243899 - RNA, 19 nt, Artificial Sequence
  Description of Artificial Sequence: Synthetic oligonucleotide
cucauucuugcccguugua

SEQ ID NO: 243900 - RNA, 19 nt, Artificial Sequence
  Description of Artificial Sequence: Synthetic oligonucleotide
guagaaagguaggguagau

SEQ ID NO: 243901 - RNA, 19 nt, Artificial Sequence
  Description of Artificial Sequence: Synthetic oligonucleotide
uuguggugccacgggcaaa

SEQ ID NO: 243902 - RNA, 19 nt, Artificial Sequence
  Description of Artificial Sequence: Synthetic oligonucleotide
gguaagccgccccucaaau

SEQ ID NO: 243903 - RNA, 19 nt, Artificial Sequence
  Description of Artificial Sequence: Synthetic oligonucleotide
caccugucuugguggccug

SEQ ID NO: 243904 - RNA, 19 nt, Artificial Sequence
  Description of Artificial Sequence: Synthetic oligonucleotide
cacuggacacaaauucuuu

SEQ ID NO: 243905 - RNA, 19 nt, Artificial Sequence
  Description of Artificial Sequence: Synthetic oligonucleotide
gcggcucaaucguagccuc

SEQ ID NO: 243906 - RNA, 19 nt, Artificial Sequence
  Description of Artificial Sequence: Synthetic oligonucleotide
guugccugggacugugauu

SEQ ID NO: 243907 - RNA, 19 nt, Artificial Sequence
  Description of Artificial Sequence: Synthetic oligonucleotide
gugagccgaggacuuagau

SEQ ID NO: 243908 - RNA, 19 nt, Artificial Sequence
  Description of Artificial Sequence: Synthetic oligonucleotide
cagugcuacccggcgccag

SEQ ID NO: 243909 - RNA, 19 nt, Artificial Sequence
  Description of Artificial Sequence: Synthetic oligonucleotide
gcgccagaugccuucuguc

SEQ ID NO: 243910 - RNA, 19 nt, Artificial Sequence
  Description of Artificial Sequence: Synthetic oligonucleotide
gguaacggguuuggcccug

SEQ ID NO: 243911 - RNA, 19 nt, Artificial Sequence
  Description of Artificial Sequence: Synthetic oligonucleotide
acgagugguuguggugcca

SEQ ID NO: 243912 - RNA, 19 nt, Artificial Sequence
  Description of Artificial Sequence: Synthetic oligonucleotide
cauauuccucucucucaau

SEQ ID NO: 243913 - RNA, 19 nt, Artificial Sequence
  Description of Artificial Sequence: Synthetic oligonucleotide
ggacugugauuuuacgguu

SEQ ID NO: 243914 - RNA, 19 nt, Artificial Sequence
  Description of Artificial Sequence: Synthetic oligonucleotide
cccucuuucaauccucugu

SEQ ID NO: 243915 - RNA, 19 nt, Artificial Sequence
  Description of Artificial Sequence: Synthetic oligonucleotide
uugcggcucuugcgauccu

SEQ ID NO: 243916 - RNA, 19 nt, Artificial Sequence
  Description of Artificial Sequence: Synthetic oligonucleotide
ccagauuacaaggagccau

SEQ ID NO: 243917 - RNA, 19 nt, Artificial Sequence
  Description of Artificial Sequence: Synthetic oligonucleotide
gcccucuuucaauccucug

SEQ ID NO: 243918 - RNA, 19 nt, Artificial Sequence
  Description of Artificial Sequence: Synthetic oligonucleotide
gaguccugagcuggccuua

SEQ ID NO: 243919 - RNA, 19 nt, Artificial Sequence
  Description of Artificial Sequence: Synthetic oligonucleotide
cugccauauucaccugucu

SEQ ID NO: 243920 - RNA, 19 nt, Artificial Sequence
  Description of Artificial Sequence: Synthetic oligonucleotide
caguuccauuuauuaaauu

SEQ ID NO: 243921 - RNA, 19 nt, Artificial Sequence
  Description of Artificial Sequence: Synthetic oligonucleotide
ggccccuauuaggagcuac

SEQ ID NO: 243922 - RNA, 19 nt, Artificial Sequence
  Description of Artificial Sequence: Synthetic oligonucleotide
uggcccuuuugagcuguuu

SEQ ID NO: 243923 - RNA, 19 nt, Artificial Sequence
  Description of Artificial Sequence: Synthetic oligonucleotide
ccgauucucggaagccauc

SEQ ID NO: 243924 - RNA, 19 nt, Artificial Sequence
  Description of Artificial Sequence: Synthetic oligonucleotide
aguccucgcuccgccuccu

SEQ ID NO: 243925 - RNA, 19 nt, Artificial Sequence
  Description of Artificial Sequence: Synthetic oligonucleotide
ggcgccagaugccuucugu

SEQ ID NO: 243926 - RNA, 19 nt, Artificial Sequence
  Description of Artificial Sequence: Synthetic oligonucleotide
guaagcaguuuaaguccau

SEQ ID NO: 243927 - RNA, 19 nt, Artificial Sequence
  Description of Artificial Sequence: Synthetic oligonucleotide
ggcggcucaaucguagccu

SEQ ID NO: 243928 - RNA, 19 nt, Artificial Sequence
  Description of Artificial Sequence: Synthetic oligonucleotide
gauacccuggcggcucaau

SEQ ID NO: 243929 - RNA, 19 nt, Artificial Sequence
  Description of Artificial Sequence: Synthetic oligonucleotide
ggccucuuaggggcauuug

SEQ ID NO: 243930 - RNA, 19 nt, Artificial Sequence
  Description of Artificial Sequence: Synthetic oligonucleotide
gucgggcaagugagccgag

SEQ ID NO: 243931 - RNA, 19 nt, Artificial Sequence
  Description of Artificial Sequence: Synthetic oligonucleotide
ccggucuugcuguucuuaa

SEQ ID NO: 243932 - RNA, 19 nt, Artificial Sequence
  Description of Artificial Sequence: Synthetic oligonucleotide
gcucccggaagaugcaaau

SEQ ID NO: 243933 - RNA, 19 nt, Artificial Sequence
  Description of Artificial Sequence: Synthetic oligonucleotide
cuggaucacgucugccuuu

SEQ ID NO: 243934 - RNA, 19 nt, Artificial Sequence
  Description of Artificial Sequence: Synthetic oligonucleotide
ccacgaggagucaaacacu

SEQ ID NO: 243935 - RNA, 19 nt, Artificial Sequence
  Description of Artificial Sequence: Synthetic oligonucleotide
cgaaggaacgagugguugu

SEQ ID NO: 243936 - RNA, 19 nt, Artificial Sequence
  Description of Artificial Sequence: Synthetic oligonucleotide
cggcucaaucguagccucc

SEQ ID NO: 243937 - RNA, 19 nt, Artificial Sequence
  Description of Artificial Sequence: Synthetic oligonucleotide
ggaucacgucugccuuuga

SEQ ID NO: 243938 - RNA, 19 nt, Artificial Sequence
  Description of Artificial Sequence: Synthetic oligonucleotide
cgggcaagugagccgagga

SEQ ID NO: 243939 - RNA, 19 nt, Artificial Sequence
  Description of Artificial Sequence: Synthetic oligonucleotide
ggguagauccggauaucau

SEQ ID NO: 243940 - RNA, 19 nt, Artificial Sequence
  Description of Artificial Sequence: Synthetic oligonucleotide
cccagauuacaaggagcca

SEQ ID NO: 243941 - RNA, 19 nt, Artificial Sequence
  Description of Artificial Sequence: Synthetic oligonucleotide
gcaagugagccgaggacuu

SEQ ID NO: 243942 - RNA, 19 nt, Artificial Sequence
  Description of Artificial Sequence: Synthetic oligonucleotide
cccuacagucgggcaagug

SEQ ID NO: 243943 - RNA, 19 nt, Artificial Sequence
  Description of Artificial Sequence: Synthetic oligonucleotide
gcucucacuuagcugccuu

SEQ ID NO: 243944 - RNA, 19 nt, Artificial Sequence
  Description of Artificial Sequence: Synthetic oligonucleotide
gucuugccaugcaggugua

SEQ ID NO: 243945 - RNA, 19 nt, Artificial Sequence
  Description of Artificial Sequence: Synthetic oligonucleotide
gccggucuugcuguucuua

SEQ ID NO: 243946 - RNA, 19 nt, Artificial Sequence
  Description of Artificial Sequence: Synthetic oligonucleotide
gccucccaucauucaugga

SEQ ID NO: 243947 - RNA, 19 nt, Artificial Sequence
  Description of Artificial Sequence: Synthetic oligonucleotide
cucuccaaauaggcaucau

SEQ ID NO: 243948 - RNA, 19 nt, Artificial Sequence
  Description of Artificial Sequence: Synthetic oligonucleotide
gcuuggguucaugcccucu

SEQ ID NO: 243949 - RNA, 19 nt, Artificial Sequence
  Description of Artificial Sequence: Synthetic oligonucleotide
cuguaguauaggggaucuu

SEQ ID NO: 243950 - RNA, 19 nt, Artificial Sequence
  Description of Artificial Sequence: Synthetic oligonucleotide
aggccccuauuaggagcua

SEQ ID NO: 243951 - RNA, 19 nt, Artificial Sequence
  Description of Artificial Sequence: Synthetic oligonucleotide
gugcuacccggcgccagau

SEQ ID NO: 243952 - RNA, 19 nt, Artificial Sequence
  Description of Artificial Sequence: Synthetic oligonucleotide
ccuagagggaguggauuuu

SEQ ID NO: 243953 - RNA, 19 nt, Artificial Sequence
  Description of Artificial Sequence: Synthetic oligonucleotide
cccaucauucauggacccu

SEQ ID NO: 243954 - RNA, 19 nt, Artificial Sequence
  Description of Artificial Sequence: Synthetic oligonucleotide
ggguuuggcccugcuugau

SEQ ID NO: 243955 - RNA, 19 nt, Artificial Sequence
  Description of Artificial Sequence: Synthetic oligonucleotide
ccauuagcucaaggcgaua

SEQ ID NO: 243956 - RNA, 19 nt, Artificial Sequence
  Description of Artificial Sequence: Synthetic oligonucleotide
cccuggcggcucaaucgua

SEQ ID NO: 243957 - RNA, 19 nt, Artificial Sequence
  Description of Artificial Sequence: Synthetic oligonucleotide
auauagguuacucaugucc

SEQ ID NO: 243958 - RNA, 19 nt, Artificial Sequence
  Description of Artificial Sequence: Synthetic oligonucleotide
uuaagaauuguuaaugacc

SEQ ID NO: 243959 - RNA, 19 nt, Artificial Sequence
  Description of Artificial Sequence: Synthetic oligonucleotide
aaacguauugaacacagca

SEQ ID NO: 243960 - RNA, 19 nt, Artificial Sequence
  Description of Artificial Sequence: Synthetic oligonucleotide
agaauuguuaaugaccucc

SEQ ID NO: 243961 - RNA, 19 nt, Artificial Sequence
  Description of Artificial Sequence: Synthetic oligonucleotide
uuugggaauacccugaaga

SEQ ID NO: 243962 - RNA, 19 nt, Artificial Sequence
  Description of Artificial Sequence: Synthetic oligonucleotide
uaagaauuguuaaugaccu

SEQ ID NO: 243963 - RNA, 19 nt, Artificial Sequence
  Description of Artificial Sequence: Synthetic oligonucleotide
aauucugauagcucccucg

SEQ ID NO: 243964 - RNA, 19 nt, Artificial Sequence
  Description of Artificial Sequence: Synthetic oligonucleotide
uauaccaugcacaggaugc

SEQ ID NO: 243965 - RNA, 19 nt, Artificial Sequence
  Description of Artificial Sequence: Synthetic oligonucleotide
aguaggaugauuuuaagaa

SEQ ID NO: 243966 - RNA, 19 nt, Artificial Sequence
  Description of Artificial Sequence: Synthetic oligonucleotide
aaggcucgggguuauaagc

SEQ ID NO: 243967 - RNA, 19 nt, Artificial Sequence
  Description of Artificial Sequence: Synthetic oligonucleotide
uucguugacauuauuaaac

SEQ ID NO: 243968 - RNA, 19 nt, Artificial Sequence
  Description of Artificial Sequence: Synthetic oligonucleotide
ugagccuaagucaaguagg

SEQ ID NO: 243969 - RNA, 19 nt, Artificial Sequence
  Description of Artificial Sequence: Synthetic oligonucleotide
aaacacuauuuguuaaagg

SEQ ID NO: 243970 - RNA, 19 nt, Artificial Sequence
  Description of Artificial Sequence: Synthetic oligonucleotide
uauagguuacucauguccc

SEQ ID NO: 243971 - RNA, 19 nt, Artificial Sequence
  Description of Artificial Sequence: Synthetic oligonucleotide
agguggagcaaacagaauc

SEQ ID NO: 243972 - RNA, 19 nt, Artificial Sequence
  Description of Artificial Sequence: Synthetic oligonucleotide
auguauaccaugcacagga

SEQ ID NO: 243973 - RNA, 19 nt, Artificial Sequence
  Description of Artificial Sequence: Synthetic oligonucleotide
auauauagguuacucaugu

SEQ ID NO: 243974 - RNA, 19 nt, Artificial Sequence
  Description of Artificial Sequence: Synthetic oligonucleotide
aaucaugggcuacugacug

SEQ ID NO: 243975 - RNA, 19 nt, Artificial Sequence
  Description of Artificial Sequence: Synthetic oligonucleotide
agaucugugcucuagggag

SEQ ID NO: 243976 - RNA, 19 nt, Artificial Sequence
  Description of Artificial Sequence: Synthetic oligonucleotide
ucuauauauagguuacuca

SEQ ID NO: 243977 - RNA, 19 nt, Artificial Sequence
  Description of Artificial Sequence: Synthetic oligonucleotide
uguuaaagggugcaguaca

SEQ ID NO: 243978 - RNA, 19 nt, Artificial Sequence
  Description of Artificial Sequence: Synthetic oligonucleotide
uggcuuaaagcaaagauua

SEQ ID NO: 243979 - RNA, 19 nt, Artificial Sequence
  Description of Artificial Sequence: Synthetic oligonucleotide
ucugauagcucccucggag

SEQ ID NO: 243980 - RNA, 19 nt, Artificial Sequence
  Description of Artificial Sequence: Synthetic oligonucleotide
aagauauaaauaacaguag

SEQ ID NO: 243981 - RNA, 19 nt, Artificial Sequence
  Description of Artificial Sequence: Synthetic oligonucleotide
auguaaacguauugaacac

SEQ ID NO: 243982 - RNA, 19 nt, Artificial Sequence
  Description of Artificial Sequence: Synthetic oligonucleotide
uguuaaugaccuccuaugc

SEQ ID NO: 243983 - RNA, 19 nt, Artificial Sequence
  Description of Artificial Sequence: Synthetic oligonucleotide
aaguaggaugauuuuaaga

SEQ ID NO: 243984 - RNA, 19 nt, Artificial Sequence
  Description of Artificial Sequence: Synthetic oligonucleotide
ucgucguccacgcagaacc

SEQ ID NO: 243985 - RNA, 19 nt, Artificial Sequence
  Description of Artificial Sequence: Synthetic oligonucleotide
uguaaagugcugaggagug

SEQ ID NO: 243986 - RNA, 19 nt, Artificial Sequence
  Description of Artificial Sequence: Synthetic oligonucleotide
gaugcgagacuccacauug

SEQ ID NO: 243987 - RNA, 19 nt, Artificial Sequence
  Description of Artificial Sequence: Synthetic oligonucleotide
uuguuaaugaccuccuaug

SEQ ID NO: 243988 - RNA, 19 nt, Artificial Sequence
  Description of Artificial Sequence: Synthetic oligonucleotide
ugucccuugacauucguug

SEQ ID NO: 243989 - RNA, 19 nt, Artificial Sequence
  Description of Artificial Sequence: Synthetic oligonucleotide
ugucacuuugggaauaccc

SEQ ID NO: 243990 - RNA, 19 nt, Artificial Sequence
  Description of Artificial Sequence: Synthetic oligonucleotide
ugugugauuuagaaaauau

SEQ ID NO: 243991 - RNA, 19 nt, Artificial Sequence
  Description of Artificial Sequence: Synthetic oligonucleotide
ucuucggugcccuaggcag

SEQ ID NO: 243992 - RNA, 19 nt, Artificial Sequence
  Description of Artificial Sequence: Synthetic oligonucleotide
ugacagacgagcaggcugg

SEQ ID NO: 243993 - RNA, 19 nt, Artificial Sequence
  Description of Artificial Sequence: Synthetic oligonucleotide
cuacauguaguauauugac

SEQ ID NO: 243994 - RNA, 19 nt, Artificial Sequence
  Description of Artificial Sequence: Synthetic oligonucleotide
uauauugacugaaaugcua

SEQ ID NO: 243995 - RNA, 19 nt, Artificial Sequence
  Description of Artificial Sequence: Synthetic oligonucleotide
uagguuaccaucgucgucc

SEQ ID NO: 243996 - RNA, 19 nt, Artificial Sequence
  Description of Artificial Sequence: Synthetic oligonucleotide
aucugaauuaggcuuaaga

SEQ ID NO: 243997 - RNA, 19 nt, Artificial Sequence
  Description of Artificial Sequence: Synthetic oligonucleotide
caaugaacuuaacaggccc

SEQ ID NO: 243998 - RNA, 19 nt, Artificial Sequence
  Description of Artificial Sequence: Synthetic oligonucleotide
aguuuaagaaagcuugggu

SEQ ID NO: 243999 - RNA, 19 nt, Artificial Sequence
  Description of Artificial Sequence: Synthetic oligonucleotide
aucuauauauagguuacuc

SEQ ID NO: 244000 - RNA, 19 nt, Artificial Sequence
  Description of Artificial Sequence: Synthetic oligonucleotide
aauaacaguagugagccua

SEQ ID NO: 244001 - RNA, 19 nt, Artificial Sequence
  Description of Artificial Sequence: Synthetic oligonucleotide
auacagguggagcaaacag

SEQ ID NO: 244002 - RNA, 19 nt, Artificial Sequence
  Description of Artificial Sequence: Synthetic oligonucleotide
aacguauugaacacagcag

SEQ ID NO: 244003 - RNA, 19 nt, Artificial Sequence
  Description of Artificial Sequence: Synthetic oligonucleotide
ucuccuagagcguugugcc

SEQ ID NO: 244004 - RNA, 19 nt, Artificial Sequence
  Description of Artificial Sequence: Synthetic oligonucleotide
caucccuucguccuggugg

SEQ ID NO: 244005 - RNA, 19 nt, Artificial Sequence
  Description of Artificial Sequence: Synthetic oligonucleotide
guaaacguauugaacacag

SEQ ID NO: 244006 - RNA, 19 nt, Artificial Sequence
  Description of Artificial Sequence: Synthetic oligonucleotide
acguauugaacacagcagu

SEQ ID NO: 244007 - RNA, 19 nt, Artificial Sequence
  Description of Artificial Sequence: Synthetic oligonucleotide
gaaucuauauauagguuac

SEQ ID NO: 244008 - RNA, 19 nt, Artificial Sequence
  Description of Artificial Sequence: Synthetic oligonucleotide
ucguugacauuauuaaaca

SEQ ID NO: 244009 - RNA, 19 nt, Artificial Sequence
  Description of Artificial Sequence: Synthetic oligonucleotide
uggcuaaguuaaaaguuag

SEQ ID NO: 244010 - RNA, 19 nt, Artificial Sequence
  Description of Artificial Sequence: Synthetic oligonucleotide
aacgcaagcugacuggacu

SEQ ID NO: 244011 - RNA, 19 nt, Artificial Sequence
  Description of Artificial Sequence: Synthetic oligonucleotide
uauaugugugauuuagaaa

SEQ ID NO: 244012 - RNA, 19 nt, Artificial Sequence
  Description of Artificial Sequence: Synthetic oligonucleotide
uuggcuuaaagcaaagauu

SEQ ID NO: 244013 - RNA, 19 nt, Artificial Sequence
  Description of Artificial Sequence: Synthetic oligonucleotide
gacaacgcaagcugacugg

SEQ ID NO: 244014 - RNA, 19 nt, Artificial Sequence
  Description of Artificial Sequence: Synthetic oligonucleotide
auuaugugcaaaacacuac

SEQ ID NO: 244015 - RNA, 19 nt, Artificial Sequence
  Description of Artificial Sequence: Synthetic oligonucleotide
aauguauaccaugcacagg

SEQ ID NO: 244016 - RNA, 19 nt, Artificial Sequence
  Description of Artificial Sequence: Synthetic oligonucleotide
cugcuugccacccucaugc

SEQ ID NO: 244017 - RNA, 19 nt, Artificial Sequence
  Description of Artificial Sequence: Synthetic oligonucleotide
acagaucugugcucuaggg

SEQ ID NO: 244018 - RNA, 19 nt, Artificial Sequence
  Description of Artificial Sequence: Synthetic oligonucleotide
uguaguauauugacugaaa

SEQ ID NO: 244019 - RNA, 19 nt, Artificial Sequence
  Description of Artificial Sequence: Synthetic oligonucleotide
guuuaagaaagcuugggua

SEQ ID NO: 244020 - RNA, 19 nt, Artificial Sequence
  Description of Artificial Sequence: Synthetic oligonucleotide
acaaugaacuuaacaggcc

SEQ ID NO: 244021 - RNA, 19 nt, Artificial Sequence
  Description of Artificial Sequence: Synthetic oligonucleotide
uggcucuuuaaauuguuac

SEQ ID NO: 244022 - RNA, 19 nt, Artificial Sequence
  Description of Artificial Sequence: Synthetic oligonucleotide
auggagaucgcucccuuuc

SEQ ID NO: 244023 - RNA, 19 nt, Artificial Sequence
  Description of Artificial Sequence: Synthetic oligonucleotide
uuuguuaaagggugcagua

SEQ ID NO: 244024 - RNA, 19 nt, Artificial Sequence
  Description of Artificial Sequence: Synthetic oligonucleotide
caacaugcuaugcacgggg

SEQ ID NO: 244025 - RNA, 19 nt, Artificial Sequence
  Description of Artificial Sequence: Synthetic oligonucleotide
uguuccaugggagaaggca

SEQ ID NO: 244026 - RNA, 19 nt, Artificial Sequence
  Description of Artificial Sequence: Synthetic oligonucleotide
ucacuuugggaauacccug

SEQ ID NO: 244027 - RNA, 19 nt, Artificial Sequence
  Description of Artificial Sequence: Synthetic oligonucleotide
agcuguaaaugaauucugc

SEQ ID NO: 244028 - RNA, 19 nt, Artificial Sequence
  Description of Artificial Sequence: Synthetic oligonucleotide
acuacaguuccccgucagc

SEQ ID NO: 244029 - RNA, 19 nt, Artificial Sequence
  Description of Artificial Sequence: Synthetic oligonucleotide
gucgauguaagccugaugu

SEQ ID NO: 244030 - RNA, 19 nt, Artificial Sequence
  Description of Artificial Sequence: Synthetic oligonucleotide
agacaggucacucuucuga

SEQ ID NO: 244031 - RNA, 19 nt, Artificial Sequence
  Description of Artificial Sequence: Synthetic oligonucleotide
uccacauugaagcacucua

SEQ ID NO: 244032 - RNA, 19 nt, Artificial Sequence
  Description of Artificial Sequence: Synthetic oligonucleotide
caauccaaaugccaacgcc

SEQ ID NO: 244033 - RNA, 19 nt, Artificial Sequence
  Description of Artificial Sequence: Synthetic oligonucleotide
caccacaacacccaggcug

SEQ ID NO: 244034 - RNA, 19 nt, Artificial Sequence
  Description of Artificial Sequence: Synthetic oligonucleotide
aagucaaguaggaugauuu

SEQ ID NO: 244035 - RNA, 19 nt, Artificial Sequence
  Description of Artificial Sequence: Synthetic oligonucleotide
gugagccuaagucaaguag

SEQ ID NO: 244036 - RNA, 19 nt, Artificial Sequence
  Description of Artificial Sequence: Synthetic oligonucleotide
agcaauccaugacagacga

SEQ ID NO: 244037 - RNA, 19 nt, Artificial Sequence
  Description of Artificial Sequence: Synthetic oligonucleotide
uuugaucacuugcuggggu

SEQ ID NO: 244038 - RNA, 19 nt, Artificial Sequence
  Description of Artificial Sequence: Synthetic oligonucleotide
uuggguauaugugugauuu

SEQ ID NO: 244039 - RNA, 19 nt, Artificial Sequence
  Description of Artificial Sequence: Synthetic oligonucleotide
ucuacaugcucagcagugg

SEQ ID NO: 244040 - RNA, 19 nt, Artificial Sequence
  Description of Artificial Sequence: Synthetic oligonucleotide
uaaagugcugaggagugug

SEQ ID NO: 244041 - RNA, 19 nt, Artificial Sequence
  Description of Artificial Sequence: Synthetic oligonucleotide
ugcgcacucaaucuugaac

SEQ ID NO: 244042 - RNA, 19 nt, Artificial Sequence
  Description of Artificial Sequence: Synthetic oligonucleotide
gaagccacgugcugugagg

SEQ ID NO: 244043 - RNA, 19 nt, Artificial Sequence
  Description of Artificial Sequence: Synthetic oligonucleotide
uuauaagcugcgcacucaa

SEQ ID NO: 244044 - RNA, 19 nt, Artificial Sequence
  Description of Artificial Sequence: Synthetic oligonucleotide
cauucguugacauuauuaa

SEQ ID NO: 244045 - RNA, 19 nt, Artificial Sequence
  Description of Artificial Sequence: Synthetic oligonucleotide
ugaccuccuaugcuacugg

SEQ ID NO: 244046 - RNA, 19 nt, Artificial Sequence
  Description of Artificial Sequence: Synthetic oligonucleotide
ugacucggauguuccaugg

SEQ ID NO: 244047 - RNA, 19 nt, Artificial Sequence
  Description of Artificial Sequence: Synthetic oligonucleotide
agacaacgcaagcugacug

SEQ ID NO: 244048 - RNA, 19 nt, Artificial Sequence
  Description of Artificial Sequence: Synthetic oligonucleotide
uaugugcaaaacacuacau

SEQ ID NO: 244049 - RNA, 19 nt, Artificial Sequence
  Description of Artificial Sequence: Synthetic oligonucleotide
ucggccggaauguauacca

SEQ ID NO: 244050 - RNA, 19 nt, Artificial Sequence
  Description of Artificial Sequence: Synthetic oligonucleotide
aaaacacuacauguaguau

SEQ ID NO: 244051 - RNA, 19 nt, Artificial Sequence
  Description of Artificial Sequence: Synthetic oligonucleotide
uaaacguauugaacacagc

SEQ ID NO: 244052 - RNA, 19 nt, Artificial Sequence
  Description of Artificial Sequence: Synthetic oligonucleotide
gauuccuugauagcagaug

SEQ ID NO: 244053 - RNA, 19 nt, Artificial Sequence
  Description of Artificial Sequence: Synthetic oligonucleotide
augaccaucccuucguccu

SEQ ID NO: 244054 - RNA, 19 nt, Artificial Sequence
  Description of Artificial Sequence: Synthetic oligonucleotide
uugaagcacucuaugacuu

SEQ ID NO: 244055 - RNA, 19 nt, Artificial Sequence
  Description of Artificial Sequence: Synthetic oligonucleotide
aucaaauaagauagcagcu

SEQ ID NO: 244056 - RNA, 19 nt, Artificial Sequence
  Description of Artificial Sequence: Synthetic oligonucleotide
gccuaagucaaguaggaug

SEQ ID NO: 244057 - RNA, 19 nt, Artificial Sequence
  Description of Artificial Sequence: Synthetic oligonucleotide
uccuugauagcagauguaa

SEQ ID NO: 244058 - RNA, 19 nt, Artificial Sequence
  Description of Artificial Sequence: Synthetic oligonucleotide
cacucaaucuugaacucug

SEQ ID NO: 244059 - RNA, 19 nt, Artificial Sequence
  Description of Artificial Sequence: Synthetic oligonucleotide
cuacaugcucagcaguggg

SEQ ID NO: 244060 - RNA, 19 nt, Artificial Sequence
  Description of Artificial Sequence: Synthetic oligonucleotide
uuuuguagauggagaucgc

SEQ ID NO: 244061 - RNA, 19 nt, Artificial Sequence
  Description of Artificial Sequence: Synthetic oligonucleotide
guauaccaugcacaggaug

SEQ ID NO: 244062 - RNA, 19 nt, Artificial Sequence
  Description of Artificial Sequence: Synthetic oligonucleotide
uuaccaucgucguccacgc

SEQ ID NO: 244063 - RNA, 19 nt, Artificial Sequence
  Description of Artificial Sequence: Synthetic oligonucleotide
caaaacacuacauguagua

SEQ ID NO: 244064 - RNA, 19 nt, Artificial Sequence
  Description of Artificial Sequence: Synthetic oligonucleotide
uaugugugauuuagaaaau

SEQ ID NO: 244065 - RNA, 19 nt, Artificial Sequence
  Description of Artificial Sequence: Synthetic oligonucleotide
ggcaacaugcuaugcacgg

SEQ ID NO: 244066 - RNA, 19 nt, Artificial Sequence
  Description of Artificial Sequence: Synthetic oligonucleotide
aguaagugaaacacugaug

SEQ ID NO: 244067 - RNA, 19 nt, Artificial Sequence
  Description of Artificial Sequence: Synthetic oligonucleotide
uuuguagauggagaucgcu

SEQ ID NO: 244068 - RNA, 19 nt, Artificial Sequence
  Description of Artificial Sequence: Synthetic oligonucleotide
auucguugacauuauuaaa

SEQ ID NO: 244069 - RNA, 19 nt, Artificial Sequence
  Description of Artificial Sequence: Synthetic oligonucleotide
uuuuagccauccaguaagu

SEQ ID NO: 244070 - RNA, 19 nt, Artificial Sequence
  Description of Artificial Sequence: Synthetic oligonucleotide
gacacuacaguuccccguc

SEQ ID NO: 244071 - RNA, 19 nt, Artificial Sequence
  Description of Artificial Sequence: Synthetic oligonucleotide
uaggagaccaugccccgcc

SEQ ID NO: 244072 - RNA, 19 nt, Artificial Sequence
  Description of Artificial Sequence: Synthetic oligonucleotide
acuggcuuaaauucugaua

SEQ ID NO: 244073 - RNA, 19 nt, Artificial Sequence
  Description of Artificial Sequence: Synthetic oligonucleotide
ucaugggcuacugacuggc

SEQ ID NO: 244074 - RNA, 19 nt, Artificial Sequence
  Description of Artificial Sequence: Synthetic oligonucleotide
aguacacacaucaguugac

SEQ ID NO: 244075 - RNA, 19 nt, Artificial Sequence
  Description of Artificial Sequence: Synthetic oligonucleotide
uggcuacugacccauugac

SEQ ID NO: 244076 - RNA, 19 nt, Artificial Sequence
  Description of Artificial Sequence: Synthetic oligonucleotide
cuuucuucggugcccuagg

SEQ ID NO: 244077 - RNA, 19 nt, Artificial Sequence
  Description of Artificial Sequence: Synthetic oligonucleotide
ucauuggacucuuggggcu

SEQ ID NO: 244078 - RNA, 19 nt, Artificial Sequence
  Description of Artificial Sequence: Synthetic oligonucleotide
cucggauguuccaugggag

SEQ ID NO: 244079 - RNA, 19 nt, Artificial Sequence
  Description of Artificial Sequence: Synthetic oligonucleotide
gaagcacucuaugacuuug

SEQ ID NO: 244080 - RNA, 19 nt, Artificial Sequence
  Description of Artificial Sequence: Synthetic oligonucleotide
caaccaaacggcuguguug

SEQ ID NO: 244081 - RNA, 19 nt, Artificial Sequence
  Description of Artificial Sequence: Synthetic oligonucleotide
cuacuggacacuacaguuc

SEQ ID NO: 244082 - RNA, 19 nt, Artificial Sequence
  Description of Artificial Sequence: Synthetic oligonucleotide
aaaugccaacgccggccac

SEQ ID NO: 244083 - RNA, 19 nt, Artificial Sequence
  Description of Artificial Sequence: Synthetic oligonucleotide
gggacaagcucagagaacc

SEQ ID NO: 244084 - RNA, 19 nt, Artificial Sequence
  Description of Artificial Sequence: Synthetic oligonucleotide
gugagggcgaagcugguug

SEQ ID NO: 244085 - RNA, 19 nt, Artificial Sequence
  Description of Artificial Sequence: Synthetic oligonucleotide
aagccugauguccaaucau

SEQ ID NO: 244086 - RNA, 19 nt, Artificial Sequence
  Description of Artificial Sequence: Synthetic oligonucleotide
aucccuucguccugguggg

SEQ ID NO: 244087 - RNA, 19 nt, Artificial Sequence
  Description of Artificial Sequence: Synthetic oligonucleotide
uacaugcucagcaguggga

SEQ ID NO: 244088 - RNA, 19 nt, Artificial Sequence
  Description of Artificial Sequence: Synthetic oligonucleotide
uuaaagggugcaguacaca

SEQ ID NO: 244089 - RNA, 19 nt, Artificial Sequence
  Description of Artificial Sequence: Synthetic oligonucleotide
ugauucucuaugguaugug

SEQ ID NO: 244090 - RNA, 19 nt, Artificial Sequence
  Description of Artificial Sequence: Synthetic oligonucleotide
gcuuccaauccacaggaag

SEQ ID NO: 244091 - RNA, 19 nt, Artificial Sequence
  Description of Artificial Sequence: Synthetic oligonucleotide
auagguuacucaugucccu

SEQ ID NO: 244092 - RNA, 19 nt, Artificial Sequence
  Description of Artificial Sequence: Synthetic oligonucleotide
gauguaagccugaugucca

SEQ ID NO: 244093 - RNA, 19 nt, Artificial Sequence
  Description of Artificial Sequence: Synthetic oligonucleotide
acgugggaugcucuugagg

SEQ ID NO: 244094 - RNA, 19 nt, Artificial Sequence
  Description of Artificial Sequence: Synthetic oligonucleotide
uggcuuucguugcuuaggu

SEQ ID NO: 244095 - RNA, 19 nt, Artificial Sequence
  Description of Artificial Sequence: Synthetic oligonucleotide
ugaacaccugcccucccga

SEQ ID NO: 244096 - RNA, 19 nt, Artificial Sequence
  Description of Artificial Sequence: Synthetic oligonucleotide
aguagugagccuaagucaa

SEQ ID NO: 244097 - RNA, 19 nt, Artificial Sequence
  Description of Artificial Sequence: Synthetic oligonucleotide
ucgccgguggccuuggccc

SEQ ID NO: 244098 - RNA, 19 nt, Artificial Sequence
  Description of Artificial Sequence: Synthetic oligonucleotide
uggcuuaaauucugauagc

SEQ ID NO: 244099 - RNA, 19 nt, Artificial Sequence
  Description of Artificial Sequence: Synthetic oligonucleotide
ggguauaugugugauuuag

SEQ ID NO: 244100 - RNA, 19 nt, Artificial Sequence
  Description of Artificial Sequence: Synthetic oligonucleotide
cacagaucugugcucuagg

SEQ ID NO: 244101 - RNA, 19 nt, Artificial Sequence
  Description of Artificial Sequence: Synthetic oligonucleotide
agagcguugugcccugcuc

SEQ ID NO: 244102 - RNA, 19 nt, Artificial Sequence
  Description of Artificial Sequence: Synthetic oligonucleotide
aagcacucuaugacuuugg

SEQ ID NO: 244103 - RNA, 19 nt, Artificial Sequence
  Description of Artificial Sequence: Synthetic oligonucleotide
uucguugcuuagguaaggc

SEQ ID NO: 244104 - RNA, 19 nt, Artificial Sequence
  Description of Artificial Sequence: Synthetic oligonucleotide
caguagugagccuaaguca

SEQ ID NO: 244105 - RNA, 19 nt, Artificial Sequence
  Description of Artificial Sequence: Synthetic oligonucleotide
uaacaggcccauugugugc

SEQ ID NO: 244106 - RNA, 19 nt, Artificial Sequence
  Description of Artificial Sequence: Synthetic oligonucleotide
uggucacagacagacguug

SEQ ID NO: 244107 - RNA, 19 nt, Artificial Sequence
  Description of Artificial Sequence: Synthetic oligonucleotide
ucggauguuccaugggaga

SEQ ID NO: 244108 - RNA, 19 nt, Artificial Sequence
  Description of Artificial Sequence: Synthetic oligonucleotide
ugcgagacuccacauugaa

SEQ ID NO: 244109 - RNA, 19 nt, Artificial Sequence
  Description of Artificial Sequence: Synthetic oligonucleotide
caagaagugcccuccucac

SEQ ID NO: 244110 - RNA, 19 nt, Artificial Sequence
  Description of Artificial Sequence: Synthetic oligonucleotide
accacaacacccaggcugg

SEQ ID NO: 244111 - RNA, 19 nt, Artificial Sequence
  Description of Artificial Sequence: Synthetic oligonucleotide
ccuaagucaaguaggauga

SEQ ID NO: 244112 - RNA, 19 nt, Artificial Sequence
  Description of Artificial Sequence: Synthetic oligonucleotide
guauugaacacagcaguga

SEQ ID NO: 244113 - RNA, 19 nt, Artificial Sequence
  Description of Artificial Sequence: Synthetic oligonucleotide
auagcagauguaaacguau

SEQ ID NO: 244114 - RNA, 19 nt, Artificial Sequence
  Description of Artificial Sequence: Synthetic oligonucleotide
cucgggguuauaagcugcg

SEQ ID NO: 244115 - RNA, 19 nt, Artificial Sequence
  Description of Artificial Sequence: Synthetic oligonucleotide
guaagccugauguccaauc

SEQ ID NO: 244116 - RNA, 19 nt, Artificial Sequence
  Description of Artificial Sequence: Synthetic oligonucleotide
ugggagcuguaaaugaauu

SEQ ID NO: 244117 - RNA, 19 nt, Artificial Sequence
  Description of Artificial Sequence: Synthetic oligonucleotide
ugugggagaugaccauccc

SEQ ID NO: 244118 - RNA, 19 nt, Artificial Sequence
  Description of Artificial Sequence: Synthetic oligonucleotide
ucccuugacauucguugac

SEQ ID NO: 244119 - RNA, 19 nt, Artificial Sequence
  Description of Artificial Sequence: Synthetic oligonucleotide
ucguugcuuagguaaggcu

SEQ ID NO: 244120 - RNA, 19 nt, Artificial Sequence
  Description of Artificial Sequence: Synthetic oligonucleotide
uuggaaagccucagucgcu

SEQ ID NO: 244121 - RNA, 19 nt, Artificial Sequence
  Description of Artificial Sequence: Synthetic oligonucleotide
ugugacgucugcagauuuc

SEQ ID NO: 244122 - RNA, 19 nt, Artificial Sequence
  Description of Artificial Sequence: Synthetic oligonucleotide
agcugauucucuaugguau

SEQ ID NO: 244123 - RNA, 19 nt, Artificial Sequence
  Description of Artificial Sequence: Synthetic oligonucleotide
aggcaggacgcccaauuug

SEQ ID NO: 244124 - RNA, 19 nt, Artificial Sequence
  Description of Artificial Sequence: Synthetic oligonucleotide
ggcaauccaaaugccaacg

SEQ ID NO: 244125 - RNA, 19 nt, Artificial Sequence
  Description of Artificial Sequence: Synthetic oligonucleotide
cuccuaugcuacuggacac

SEQ ID NO: 244126 - RNA, 19 nt, Artificial Sequence
  Description of Artificial Sequence: Synthetic oligonucleotide
cuuaacaggcccauugugu

SEQ ID NO: 244127 - RNA, 19 nt, Artificial Sequence
  Description of Artificial Sequence: Synthetic oligonucleotide
agugcugaagccucacuuu

SEQ ID NO: 244128 - RNA, 19 nt, Artificial Sequence
  Description of Artificial Sequence: Synthetic oligonucleotide
uccaaaugccaacgccggc

SEQ ID NO: 244129 - RNA, 19 nt, Artificial Sequence
  Description of Artificial Sequence: Synthetic oligonucleotide
ugcucuugaggcuguggca

SEQ ID NO: 244130 - RNA, 19 nt, Artificial Sequence
  Description of Artificial Sequence: Synthetic oligonucleotide
gaauucugcagcggucugc

SEQ ID NO: 244131 - RNA, 19 nt, Artificial Sequence
  Description of Artificial Sequence: Synthetic oligonucleotide
cagcuaacaguuuaagaaa

SEQ ID NO: 244132 - RNA, 19 nt, Artificial Sequence
  Description of Artificial Sequence: Synthetic oligonucleotide
aggcagagaaucuguguga

SEQ ID NO: 244133 - RNA, 19 nt, Artificial Sequence
  Description of Artificial Sequence: Synthetic oligonucleotide
guaguauauugacugaaau

SEQ ID NO: 244134 - RNA, 19 nt, Artificial Sequence
  Description of Artificial Sequence: Synthetic oligonucleotide
gaagccucacuuucuugca

SEQ ID NO: 244135 - RNA, 19 nt, Artificial Sequence
  Description of Artificial Sequence: Synthetic oligonucleotide
cagugguauggaugcagcc

SEQ ID NO: 244136 - RNA, 19 nt, Artificial Sequence
  Description of Artificial Sequence: Synthetic oligonucleotide
gggguuauaagcugcgcac

SEQ ID NO: 244137 - RNA, 19 nt, Artificial Sequence
  Description of Artificial Sequence: Synthetic oligonucleotide
auguaguauauugacugaa

SEQ ID NO: 244138 - RNA, 19 nt, Artificial Sequence
  Description of Artificial Sequence: Synthetic oligonucleotide
agaagguugccuagccuuc

SEQ ID NO: 244139 - RNA, 19 nt, Artificial Sequence
  Description of Artificial Sequence: Synthetic oligonucleotide
ugucagucuggcccaggca

SEQ ID NO: 244140 - RNA, 19 nt, Artificial Sequence
  Description of Artificial Sequence: Synthetic oligonucleotide
uguccaaucaugggcuacu

SEQ ID NO: 244141 - RNA, 19 nt, Artificial Sequence
  Description of Artificial Sequence: Synthetic oligonucleotide
uagugagccuaagucaagu

SEQ ID NO: 244142 - RNA, 19 nt, Artificial Sequence
  Description of Artificial Sequence: Synthetic oligonucleotide
ugaagaaagugggccgccc

SEQ ID NO: 244143 - RNA, 19 nt, Artificial Sequence
  Description of Artificial Sequence: Synthetic oligonucleotide
ucgauguaagccugauguc

SEQ ID NO: 244144 - RNA, 19 nt, Artificial Sequence
  Description of Artificial Sequence: Synthetic oligonucleotide
cugacucggauguuccaug

SEQ ID NO: 244145 - RNA, 19 nt, Artificial Sequence
  Description of Artificial Sequence: Synthetic oligonucleotide
acgcagaaccaucccaugu

SEQ ID NO: 244146 - RNA, 19 nt, Artificial Sequence
  Description of Artificial Sequence: Synthetic oligonucleotide
gcccaauuugaucacuugc

SEQ ID NO: 244147 - RNA, 19 nt, Artificial Sequence
  Description of Artificial Sequence: Synthetic oligonucleotide
ugacauucguugacauuau

SEQ ID NO: 244148 - RNA, 19 nt, Artificial Sequence
  Description of Artificial Sequence: Synthetic oligonucleotide
gguguagcuggcuacugac

SEQ ID NO: 244149 - RNA, 19 nt, Artificial Sequence
  Description of Artificial Sequence: Synthetic oligonucleotide
agucaaguaggaugauuuu

SEQ ID NO: 244150 - RNA, 19 nt, Artificial Sequence
  Description of Artificial Sequence: Synthetic oligonucleotide
uuguccugcuuuccuggga

SEQ ID NO: 244151 - RNA, 19 nt, Artificial Sequence
  Description of Artificial Sequence: Synthetic oligonucleotide
guuacucaugucccuugac

SEQ ID NO: 244152 - RNA, 19 nt, Artificial Sequence
  Description of Artificial Sequence: Synthetic oligonucleotide
auacaggcccuguggggag

SEQ ID NO: 244153 - RNA, 19 nt, Artificial Sequence
  Description of Artificial Sequence: Synthetic oligonucleotide
aaagugcugaggagugugu

SEQ ID NO: 244154 - RNA, 19 nt, Artificial Sequence
  Description of Artificial Sequence: Synthetic oligonucleotide
agggugagucuccuucuug

SEQ ID NO: 244155 - RNA, 19 nt, Artificial Sequence
  Description of Artificial Sequence: Synthetic oligonucleotide
acagacguuggugcccugg

SEQ ID NO: 244156 - RNA, 19 nt, Artificial Sequence
  Description of Artificial Sequence: Synthetic oligonucleotide
uuccugugaacucgccggu

SEQ ID NO: 244157 - RNA, 19 nt, Artificial Sequence
  Description of Artificial Sequence: Synthetic oligonucleotide
uccucggccggaauguaua

SEQ ID NO: 244158 - RNA, 19 nt, Artificial Sequence
  Description of Artificial Sequence: Synthetic oligonucleotide
uguuggugucagucuggcc

SEQ ID NO: 244159 - RNA, 19 nt, Artificial Sequence
  Description of Artificial Sequence: Synthetic oligonucleotide
agccacgugcugugagggc

SEQ ID NO: 244160 - RNA, 19 nt, Artificial Sequence
  Description of Artificial Sequence: Synthetic oligonucleotide
agccugauguccaaucaug

SEQ ID NO: 244161 - RNA, 19 nt, Artificial Sequence
  Description of Artificial Sequence: Synthetic oligonucleotide
ucguccacgcagaaccauc

SEQ ID NO: 244162 - RNA, 19 nt, Artificial Sequence
  Description of Artificial Sequence: Synthetic oligonucleotide
acuuugggaauacccugaa

SEQ ID NO: 244163 - RNA, 19 nt, Artificial Sequence
  Description of Artificial Sequence: Synthetic oligonucleotide
aagcugcgcacucaaucuu

SEQ ID NO: 244164 - RNA, 19 nt, Artificial Sequence
  Description of Artificial Sequence: Synthetic oligonucleotide
agucgcucccagacaacgc

SEQ ID NO: 244165 - RNA, 19 nt, Artificial Sequence
  Description of Artificial Sequence: Synthetic oligonucleotide
accuccuaugcuacuggac

SEQ ID NO: 244166 - RNA, 19 nt, Artificial Sequence
  Description of Artificial Sequence: Synthetic oligonucleotide
cugacugcuuuuguagaug

SEQ ID NO: 244167 - RNA, 19 nt, Artificial Sequence
  Description of Artificial Sequence: Synthetic oligonucleotide
uuccuugauagcagaugua

SEQ ID NO: 244168 - RNA, 19 nt, Artificial Sequence
  Description of Artificial Sequence: Synthetic oligonucleotide
ucuugaggcuguggcaucu

SEQ ID NO: 244169 - RNA, 19 nt, Artificial Sequence
  Description of Artificial Sequence: Synthetic oligonucleotide
gagccuaagucaaguagga

SEQ ID NO: 244170 - RNA, 19 nt, Artificial Sequence
  Description of Artificial Sequence: Synthetic oligonucleotide
augagcaauccaugacaga

SEQ ID NO: 244171 - RNA, 19 nt, Artificial Sequence
  Description of Artificial Sequence: Synthetic oligonucleotide
caugugguuuuccuccuca

SEQ ID NO: 244172 - RNA, 19 nt, Artificial Sequence
  Description of Artificial Sequence: Synthetic oligonucleotide
cacuacaguuccccgucag

SEQ ID NO: 244173 - RNA, 19 nt, Artificial Sequence
  Description of Artificial Sequence: Synthetic oligonucleotide
guuauaagcugcgcacuca

SEQ ID NO: 244174 - RNA, 19 nt, Artificial Sequence
  Description of Artificial Sequence: Synthetic oligonucleotide
uccuaugcuacuggacacu

SEQ ID NO: 244175 - RNA, 19 nt, Artificial Sequence
  Description of Artificial Sequence: Synthetic oligonucleotide
caggaugcgagacuccaca

SEQ ID NO: 244176 - RNA, 19 nt, Artificial Sequence
  Description of Artificial Sequence: Synthetic oligonucleotide
gguuauaagcugcgcacuc

SEQ ID NO: 244177 - RNA, 19 nt, Artificial Sequence
  Description of Artificial Sequence: Synthetic oligonucleotide
agugagccuaagucaagua

SEQ ID NO: 244178 - RNA, 19 nt, Artificial Sequence
  Description of Artificial Sequence: Synthetic oligonucleotide
uugugcccugcuccucggg

SEQ ID NO: 244179 - RNA, 19 nt, Artificial Sequence
  Description of Artificial Sequence: Synthetic oligonucleotide
gaccaucccuucguccugg

SEQ ID NO: 244180 - RNA, 19 nt, Artificial Sequence
  Description of Artificial Sequence: Synthetic oligonucleotide
gucgcucccagacaacgca

SEQ ID NO: 244181 - RNA, 19 nt, Artificial Sequence
  Description of Artificial Sequence: Synthetic oligonucleotide
acaacgcaagcugacugga

SEQ ID NO: 244182 - RNA, 19 nt, Artificial Sequence
  Description of Artificial Sequence: Synthetic oligonucleotide
augaacuuaacaggcccau

SEQ ID NO: 244183 - RNA, 19 nt, Artificial Sequence
  Description of Artificial Sequence: Synthetic oligonucleotide
aucgucguccacgcagaac

SEQ ID NO: 244184 - RNA, 19 nt, Artificial Sequence
  Description of Artificial Sequence: Synthetic oligonucleotide
cguugcuuagguaaggcuc

SEQ ID NO: 244185 - RNA, 19 nt, Artificial Sequence
  Description of Artificial Sequence: Synthetic oligonucleotide
agcguugugcccugcuccu

SEQ ID NO: 244186 - RNA, 19 nt, Artificial Sequence
  Description of Artificial Sequence: Synthetic oligonucleotide
cagacguuggugcccuggc

SEQ ID NO: 244187 - RNA, 19 nt, Artificial Sequence
  Description of Artificial Sequence: Synthetic oligonucleotide
cucagucgcucccagacaa

SEQ ID NO: 244188 - RNA, 19 nt, Artificial Sequence
  Description of Artificial Sequence: Synthetic oligonucleotide
auaacaguagugagccuaa

SEQ ID NO: 244189 - RNA, 19 nt, Artificial Sequence
  Description of Artificial Sequence: Synthetic oligonucleotide
gcaauccaaaugccaacgc

SEQ ID NO: 244190 - RNA, 19 nt, Artificial Sequence
  Description of Artificial Sequence: Synthetic oligonucleotide
gccggaauguauaccaugc

SEQ ID NO: 244191 - RNA, 19 nt, Artificial Sequence
  Description of Artificial Sequence: Synthetic oligonucleotide
uagagcguugugcccugcu

SEQ ID NO: 244192 - RNA, 19 nt, Artificial Sequence
  Description of Artificial Sequence: Synthetic oligonucleotide
gcugauucucuaugguaug

SEQ ID NO: 244193 - RNA, 19 nt, Artificial Sequence
  Description of Artificial Sequence: Synthetic oligonucleotide
ucacaccucugacucggau

SEQ ID NO: 244194 - RNA, 19 nt, Artificial Sequence
  Description of Artificial Sequence: Synthetic oligonucleotide
cuccuagagcguugugccc

SEQ ID NO: 244195 - RNA, 19 nt, Artificial Sequence
  Description of Artificial Sequence: Synthetic oligonucleotide
guugugcccugcuccucgg

SEQ ID NO: 244196 - RNA, 19 nt, Artificial Sequence
  Description of Artificial Sequence: Synthetic oligonucleotide
cgauguaagccugaugucc

SEQ ID NO: 244197 - RNA, 19 nt, Artificial Sequence
  Description of Artificial Sequence: Synthetic oligonucleotide
guagugagccuaagucaag

SEQ ID NO: 244198 - RNA, 19 nt, Artificial Sequence
  Description of Artificial Sequence: Synthetic oligonucleotide
ccugaagacgaggaacugg

SEQ ID NO: 244199 - RNA, 19 nt, Artificial Sequence
  Description of Artificial Sequence: Synthetic oligonucleotide
caaacggcuguguuggugu

SEQ ID NO: 244200 - RNA, 19 nt, Artificial Sequence
  Description of Artificial Sequence: Synthetic oligonucleotide
gucacuuugggaauacccu

SEQ ID NO: 244201 - RNA, 19 nt, Artificial Sequence
  Description of Artificial Sequence: Synthetic oligonucleotide
gucccuugacauucguuga

SEQ ID NO: 244202 - RNA, 19 nt, Artificial Sequence
  Description of Artificial Sequence: Synthetic oligonucleotide
gugcaguacacacaucagu

SEQ ID NO: 244203 - RNA, 19 nt, Artificial Sequence
  Description of Artificial Sequence: Synthetic oligonucleotide
gaagaaagugggccgcccu

SEQ ID NO: 244204 - RNA, 19 nt, Artificial Sequence
  Description of Artificial Sequence: Synthetic oligonucleotide
cguauugaacacagcagug

SEQ ID NO: 244205 - RNA, 19 nt, Artificial Sequence
  Description of Artificial Sequence: Synthetic oligonucleotide
cucgccgguggccuuggcc

SEQ ID NO: 244206 - RNA, 19 nt, Artificial Sequence
  Description of Artificial Sequence: Synthetic oligonucleotide
gaccuccuaugcuacugga

SEQ ID NO: 244207 - RNA, 19 nt, Artificial Sequence
  Description of Artificial Sequence: Synthetic oligonucleotide
cacgcagaaccaucccaug

SEQ ID NO: 244208 - RNA, 19 nt, Artificial Sequence
  Description of Artificial Sequence: Synthetic oligonucleotide
gacgucugcagauuucuuu

SEQ ID NO: 244209 - RNA, 19 nt, Artificial Sequence
  Description of Artificial Sequence: Synthetic oligonucleotide
caaaugccaacgccggcca

SEQ ID NO: 244210 - RNA, 19 nt, Artificial Sequence
  Description of Artificial Sequence: Synthetic oligonucleotide
agcaucugaauuaggcuua

SEQ ID NO: 244211 - RNA, 19 nt, Artificial Sequence
  Description of Artificial Sequence: Synthetic oligonucleotide
uagguuacucaugucccuu

SEQ ID NO: 244212 - RNA, 19 nt, Artificial Sequence
  Description of Artificial Sequence: Synthetic oligonucleotide
agacguuggugcccuggca

SEQ ID NO: 244213 - RNA, 19 nt, Artificial Sequence
  Description of Artificial Sequence: Synthetic oligonucleotide
agacagacguuggugcccu

SEQ ID NO: 244214 - RNA, 19 nt, Artificial Sequence
  Description of Artificial Sequence: Synthetic oligonucleotide
gcgcacucaaucuugaacu

SEQ ID NO: 244215 - RNA, 19 nt, Artificial Sequence
  Description of Artificial Sequence: Synthetic oligonucleotide
ccagugguauggaugcagc

SEQ ID NO: 244216 - RNA, 19 nt, Artificial Sequence
  Description of Artificial Sequence: Synthetic oligonucleotide
cggaauguauaccaugcac

SEQ ID NO: 244217 - RNA, 19 nt, Artificial Sequence
  Description of Artificial Sequence: Synthetic oligonucleotide
ugugugacgucugcagauu

SEQ ID NO: 244218 - RNA, 19 nt, Artificial Sequence
  Description of Artificial Sequence: Synthetic oligonucleotide
caaucaugggcuacugacu

SEQ ID NO: 244219 - RNA, 19 nt, Artificial Sequence
  Description of Artificial Sequence: Synthetic oligonucleotide
ggugcaguacacacaucag

SEQ ID NO: 244220 - RNA, 19 nt, Artificial Sequence
  Description of Artificial Sequence: Synthetic oligonucleotide
acacuacaguuccccguca

SEQ ID NO: 244221 - RNA, 19 nt, Artificial Sequence
  Description of Artificial Sequence: Synthetic oligonucleotide
cagucgagagcugucccug

SEQ ID NO: 244222 - RNA, 19 nt, Artificial Sequence
  Description of Artificial Sequence: Synthetic oligonucleotide
gguauaugugugauuuaga

SEQ ID NO: 244223 - RNA, 19 nt, Artificial Sequence
  Description of Artificial Sequence: Synthetic oligonucleotide
ucgggguuauaagcugcgc

SEQ ID NO: 244224 - RNA, 19 nt, Artificial Sequence
  Description of Artificial Sequence: Synthetic oligonucleotide
aggcucgggguuauaagcu

SEQ ID NO: 244225 - RNA, 19 nt, Artificial Sequence
  Description of Artificial Sequence: Synthetic oligonucleotide
auguaagccugauguccaa

SEQ ID NO: 244226 - RNA, 19 nt, Artificial Sequence
  Description of Artificial Sequence: Synthetic oligonucleotide
ucaugacuguggacuuguc

SEQ ID NO: 244227 - RNA, 19 nt, Artificial Sequence
  Description of Artificial Sequence: Synthetic oligonucleotide
gcacucuaugacuuuggca

SEQ ID NO: 244228 - RNA, 19 nt, Artificial Sequence
  Description of Artificial Sequence: Synthetic oligonucleotide
gcaacaugcuaugcacggg

SEQ ID NO: 244229 - RNA, 19 nt, Artificial Sequence
  Description of Artificial Sequence: Synthetic oligonucleotide
agccaugggacaagcucag

SEQ ID NO: 244230 - RNA, 19 nt, Artificial Sequence
  Description of Artificial Sequence: Synthetic oligonucleotide
aacucgccgguggccuugg

SEQ ID NO: 244231 - RNA, 19 nt, Artificial Sequence
  Description of Artificial Sequence: Synthetic oligonucleotide
guccacgcagaaccauccc

SEQ ID NO: 244232 - RNA, 19 nt, Artificial Sequence
  Description of Artificial Sequence: Synthetic oligonucleotide
cacgugggaugcucuugag

SEQ ID NO: 244233 - RNA, 19 nt, Artificial Sequence
  Description of Artificial Sequence: Synthetic oligonucleotide
ugacgucugcagauuucuu

SEQ ID NO: 244234 - RNA, 19 nt, Artificial Sequence
  Description of Artificial Sequence: Synthetic oligonucleotide
cucggccggaauguauacc

SEQ ID NO: 244235 - RNA, 19 nt, Artificial Sequence
  Description of Artificial Sequence: Synthetic oligonucleotide
ggcucgggguuauaagcug

SEQ ID NO: 244236 - RNA, 19 nt, Artificial Sequence
  Description of Artificial Sequence: Synthetic oligonucleotide
uggccaugacaaugaacuu

SEQ ID NO: 244237 - RNA, 19 nt, Artificial Sequence
  Description of Artificial Sequence: Synthetic oligonucleotide
cucuugaggcuguggcauc

SEQ ID NO: 244238 - RNA, 19 nt, Artificial Sequence
  Description of Artificial Sequence: Synthetic oligonucleotide
cugucacuuugggaauacc

SEQ ID NO: 244239 - RNA, 19 nt, Artificial Sequence
  Description of Artificial Sequence: Synthetic oligonucleotide
ucgcucccuuucuucggug

SEQ ID NO: 244240 - RNA, 19 nt, Artificial Sequence
  Description of Artificial Sequence: Synthetic oligonucleotide
cucaugccaggcggcagcc

SEQ ID NO: 244241 - RNA, 19 nt, Artificial Sequence
  Description of Artificial Sequence: Synthetic oligonucleotide
cgugcugugagggcgaagc

SEQ ID NO: 244242 - RNA, 19 nt, Artificial Sequence
  Description of Artificial Sequence: Synthetic oligonucleotide
gguggagcaaacagaaucu

SEQ ID NO: 244243 - RNA, 19 nt, Artificial Sequence
  Description of Artificial Sequence: Synthetic oligonucleotide
guaggagaccaugccccgc

SEQ ID NO: 244244 - RNA, 19 nt, Artificial Sequence
  Description of Artificial Sequence: Synthetic oligonucleotide
caucugaauuaggcuuaag

SEQ ID NO: 244245 - RNA, 19 nt, Artificial Sequence
  Description of Artificial Sequence: Synthetic oligonucleotide
uucggugcccuaggcagau

SEQ ID NO: 244246 - RNA, 19 nt, Artificial Sequence
  Description of Artificial Sequence: Synthetic oligonucleotide
agugggccgcccugacuug

SEQ ID NO: 244247 - RNA, 19 nt, Artificial Sequence
  Description of Artificial Sequence: Synthetic oligonucleotide
cugacccaggauuccuuga

SEQ ID NO: 244248 - RNA, 19 nt, Artificial Sequence
  Description of Artificial Sequence: Synthetic oligonucleotide
cugacccauugaccaggcc

SEQ ID NO: 244249 - RNA, 19 nt, Artificial Sequence
  Description of Artificial Sequence: Synthetic oligonucleotide
guccaaucaugggcuacug

SEQ ID NO: 244250 - RNA, 19 nt, Artificial Sequence
  Description of Artificial Sequence: Synthetic oligonucleotide
cauugaccaggccugcaua

SEQ ID NO: 244251 - RNA, 19 nt, Artificial Sequence
  Description of Artificial Sequence: Synthetic oligonucleotide
gugggagaugaccaucccu

SEQ ID NO: 244252 - RNA, 19 nt, Artificial Sequence
  Description of Artificial Sequence: Synthetic oligonucleotide
aggcagauggugggcacgu

SEQ ID NO: 244253 - RNA, 19 nt, Artificial Sequence
  Description of Artificial Sequence: Synthetic oligonucleotide
gugacgucugcagauuucu

SEQ ID NO: 244254 - RNA, 19 nt, Artificial Sequence
  Description of Artificial Sequence: Synthetic oligonucleotide
acgccggccacagccaugu

SEQ ID NO: 244255 - RNA, 19 nt, Artificial Sequence
  Description of Artificial Sequence: Synthetic oligonucleotide
uaccaucgucguccacgca

SEQ ID NO: 244256 - RNA, 19 nt, Artificial Sequence
  Description of Artificial Sequence: Synthetic oligonucleotide
aggcgaaggguggacccug

SEQ ID NO: 244257 - RNA, 19 nt, Artificial Sequence
  Description of Artificial Sequence: Synthetic oligonucleotide
ccucacuuucuugcaaccc

SEQ ID NO: 244258 - RNA, 19 nt, Artificial Sequence
  Description of Artificial Sequence: Synthetic oligonucleotide
agccuaagucaaguaggau

SEQ ID NO: 244259 - RNA, 19 nt, Artificial Sequence
  Description of Artificial Sequence: Synthetic oligonucleotide
cguccacgcagaaccaucc

SEQ ID NO: 244260 - RNA, 19 nt, Artificial Sequence
  Description of Artificial Sequence: Synthetic oligonucleotide
ccaguaagugaaacacuga

SEQ ID NO: 244261 - RNA, 19 nt, Artificial Sequence
  Description of Artificial Sequence: Synthetic oligonucleotide
gcucgggguuauaagcugc

SEQ ID NO: 244262 - RNA, 19 nt, Artificial Sequence
  Description of Artificial Sequence: Synthetic oligonucleotide
gugcucuagggagcuggag

SEQ ID NO: 244263 - RNA, 19 nt, Artificial Sequence
  Description of Artificial Sequence: Synthetic oligonucleotide
agcggucugcagcucugau

SEQ ID NO: 244264 - RNA, 19 nt, Artificial Sequence
  Description of Artificial Sequence: Synthetic oligonucleotide
ggcugguaccaaccaugag

SEQ ID NO: 244265 - RNA, 19 nt, Artificial Sequence
  Description of Artificial Sequence: Synthetic oligonucleotide
gccauccaguaagugaaac

SEQ ID NO: 244266 - RNA, 19 nt, Artificial Sequence
  Description of Artificial Sequence: Synthetic oligonucleotide
gcacgugggaugcucuuga

SEQ ID NO: 244267 - RNA, 19 nt, Artificial Sequence
  Description of Artificial Sequence: Synthetic oligonucleotide
accaaacggcuguguuggu

SEQ ID NO: 244268 - RNA, 19 nt, Artificial Sequence
  Description of Artificial Sequence: Synthetic oligonucleotide
ggaauacccugaagacgag

SEQ ID NO: 244269 - RNA, 19 nt, Artificial Sequence
  Description of Artificial Sequence: Synthetic oligonucleotide
gguugccuagccuuccugu

SEQ ID NO: 244270 - RNA, 19 nt, Artificial Sequence
  Description of Artificial Sequence: Synthetic oligonucleotide
ucccggggagucucccaac

SEQ ID NO: 244271 - RNA, 19 nt, Artificial Sequence
  Description of Artificial Sequence: Synthetic oligonucleotide
ccaagcucaugacugugga

SEQ ID NO: 244272 - RNA, 19 nt, Artificial Sequence
  Description of Artificial Sequence: Synthetic oligonucleotide
cucuaugacuuuggcagcu

SEQ ID NO: 244273 - RNA, 19 nt, Artificial Sequence
  Description of Artificial Sequence: Synthetic oligonucleotide
agaccaugccccgcccugu

SEQ ID NO: 244274 - RNA, 19 nt, Artificial Sequence
  Description of Artificial Sequence: Synthetic oligonucleotide
ggacacuacaguuccccgu

SEQ ID NO: 244275 - RNA, 19 nt, Artificial Sequence
  Description of Artificial Sequence: Synthetic oligonucleotide
gacauucguugacauuauu

SEQ ID NO: 244276 - RNA, 19 nt, Artificial Sequence
  Description of Artificial Sequence: Synthetic oligonucleotide
gacagacguuggugcccug

SEQ ID NO: 244277 - RNA, 19 nt, Artificial Sequence
  Description of Artificial Sequence: Synthetic oligonucleotide
gcugcugacccaggauucc

SEQ ID NO: 244278 - RNA, 19 nt, Artificial Sequence
  Description of Artificial Sequence: Synthetic oligonucleotide
ccaaacggcuguguuggug

SEQ ID NO: 244279 - RNA, 19 nt, Artificial Sequence
  Description of Artificial Sequence: Synthetic oligonucleotide
ccacagaucugugcucuag

SEQ ID NO: 244280 - RNA, 19 nt, Artificial Sequence
  Description of Artificial Sequence: Synthetic oligonucleotide
ucccagugguauggaugca

SEQ ID NO: 244281 - RNA, 19 nt, Artificial Sequence
  Description of Artificial Sequence: Synthetic oligonucleotide
guaaagugcugaggagugu

SEQ ID NO: 244282 - RNA, 19 nt, Artificial Sequence
  Description of Artificial Sequence: Synthetic oligonucleotide
gugggcacgugggaugcuc

SEQ ID NO: 244283 - RNA, 19 nt, Artificial Sequence
  Description of Artificial Sequence: Synthetic oligonucleotide
aguuccccgucagcucucu

SEQ ID NO: 244284 - RNA, 19 nt, Artificial Sequence
  Description of Artificial Sequence: Synthetic oligonucleotide
gcccuggcaacaugcuaug

SEQ ID NO: 244285 - RNA, 19 nt, Artificial Sequence
  Description of Artificial Sequence: Synthetic oligonucleotide
cuuggguauaugugugauu

SEQ ID NO: 244286 - RNA, 19 nt, Artificial Sequence
  Description of Artificial Sequence: Synthetic oligonucleotide
acgcccaauuugaucacuu

SEQ ID NO: 244287 - RNA, 19 nt, Artificial Sequence
  Description of Artificial Sequence: Synthetic oligonucleotide
ggcacgugggaugcucuug

SEQ ID NO: 244288 - RNA, 19 nt, Artificial Sequence
  Description of Artificial Sequence: Synthetic oligonucleotide
agauagcagcuaacaguuu

SEQ ID NO: 244289 - RNA, 19 nt, Artificial Sequence
  Description of Artificial Sequence: Synthetic oligonucleotide
gcaauccaugacagacgag

SEQ ID NO: 244290 - RNA, 19 nt, Artificial Sequence
  Description of Artificial Sequence: Synthetic oligonucleotide
cccucacaccucugacucg

SEQ ID NO: 244291 - RNA, 19 nt, Artificial Sequence
  Description of Artificial Sequence: Synthetic oligonucleotide
gcgaaggguggacccugag

SEQ ID NO: 244292 - RNA, 19 nt, Artificial Sequence
  Description of Artificial Sequence: Synthetic oligonucleotide
guuccccgucagcucucug

SEQ ID NO: 244293 - RNA, 19 nt, Artificial Sequence
  Description of Artificial Sequence: Synthetic oligonucleotide
gacgcccaauuugaucacu

SEQ ID NO: 244294 - RNA, 19 nt, Artificial Sequence
  Description of Artificial Sequence: Synthetic oligonucleotide
cccuucguccuggugggcc

SEQ ID NO: 244295 - RNA, 19 nt, Artificial Sequence
  Description of Artificial Sequence: Synthetic oligonucleotide
ccucggccggaauguauac

SEQ ID NO: 244296 - RNA, 19 nt, Artificial Sequence
  Description of Artificial Sequence: Synthetic oligonucleotide
cagucuggcccaggcaaga

SEQ ID NO: 244297 - RNA, 19 nt, Artificial Sequence
  Description of Artificial Sequence: Synthetic oligonucleotide
cagacaacgcaagcugacu

SEQ ID NO: 244298 - RNA, 19 nt, Artificial Sequence
  Description of Artificial Sequence: Synthetic oligonucleotide
ggguuauaagcugcgcacu

SEQ ID NO: 244299 - RNA, 19 nt, Artificial Sequence
  Description of Artificial Sequence: Synthetic oligonucleotide
cugcgcacucaaucuugaa

SEQ ID NO: 244300 - RNA, 19 nt, Artificial Sequence
  Description of Artificial Sequence: Synthetic oligonucleotide
acgugcugugagggcgaag

SEQ ID NO: 244301 - RNA, 19 nt, Artificial Sequence
  Description of Artificial Sequence: Synthetic oligonucleotide
cgggguuauaagcugcgca

SEQ ID NO: 244302 - RNA, 19 nt, Artificial Sequence
  Description of Artificial Sequence: Synthetic oligonucleotide
cgcccaauuugaucacuug

SEQ ID NO: 244303 - RNA, 19 nt, Artificial Sequence
  Description of Artificial Sequence: Synthetic oligonucleotide
ccggaauguauaccaugca

SEQ ID NO: 244304 - RNA, 19 nt, Artificial Sequence
  Description of Artificial Sequence: Synthetic oligonucleotide
agccauccaguaagugaaa

SEQ ID NO: 244305 - RNA, 19 nt, Artificial Sequence
  Description of Artificial Sequence: Synthetic oligonucleotide
ucccuucguccuggugggc

SEQ ID NO: 244306 - RNA, 19 nt, Artificial Sequence
  Description of Artificial Sequence: Synthetic oligonucleotide
gcugcgcacucaaucuuga

SEQ ID NO: 244307 - RNA, 19 nt, Artificial Sequence
  Description of Artificial Sequence: Synthetic oligonucleotide
ucggugcccuaggcagaug

SEQ ID NO: 244308 - RNA, 19 nt, Artificial Sequence
  Description of Artificial Sequence: Synthetic oligonucleotide
ugccccgcccugucacuuu

SEQ ID NO: 244309 - RNA, 19 nt, Artificial Sequence
  Description of Artificial Sequence: Synthetic oligonucleotide
ggcuuucguugcuuaggua

SEQ ID NO: 244310 - RNA, 19 nt, Artificial Sequence
  Description of Artificial Sequence: Synthetic oligonucleotide
gguggacccugaggugaag

SEQ ID NO: 244311 - RNA, 19 nt, Artificial Sequence
  Description of Artificial Sequence: Synthetic oligonucleotide
ggaugcgagacuccacauu

SEQ ID NO: 244312 - RNA, 19 nt, Artificial Sequence
  Description of Artificial Sequence: Synthetic oligonucleotide
ccguggcuucauuggacuc

SEQ ID NO: 244313 - RNA, 19 nt, Artificial Sequence
  Description of Artificial Sequence: Synthetic oligonucleotide
gcagcggucugcagcucug

SEQ ID NO: 244314 - RNA, 19 nt, Artificial Sequence
  Description of Artificial Sequence: Synthetic oligonucleotide
caugggcuacugacuggcu

SEQ ID NO: 244315 - RNA, 19 nt, Artificial Sequence
  Description of Artificial Sequence: Synthetic oligonucleotide
gccccgcccugucacuuug

SEQ ID NO: 244316 - RNA, 19 nt, Artificial Sequence
  Description of Artificial Sequence: Synthetic oligonucleotide
cuaagucaaguaggaugau

SEQ ID NO: 244317 - RNA, 19 nt, Artificial Sequence
  Description of Artificial Sequence: Synthetic oligonucleotide
ccaacgccggccacagcca

SEQ ID NO: 244318 - RNA, 19 nt, Artificial Sequence
  Description of Artificial Sequence: Synthetic oligonucleotide
ccaucccuucguccuggug

SEQ ID NO: 244319 - RNA, 19 nt, Artificial Sequence
  Description of Artificial Sequence: Synthetic oligonucleotide
ccuagccuuccugugaacu

SEQ ID NO: 244320 - RNA, 19 nt, Artificial Sequence
  Description of Artificial Sequence: Synthetic oligonucleotide
ggcuuaaagcaaagauuau

SEQ ID NO: 244321 - RNA, 19 nt, Artificial Sequence
  Description of Artificial Sequence: Synthetic oligonucleotide
gccuagccuuccugugaac

SEQ ID NO: 244322 - RNA, 19 nt, Artificial Sequence
  Description of Artificial Sequence: Synthetic oligonucleotide
ccuaugcuacuggacacua

SEQ ID NO: 244323 - RNA, 19 nt, Artificial Sequence
  Description of Artificial Sequence: Synthetic oligonucleotide
cuccucggccggaauguau

SEQ ID NO: 244324 - RNA, 19 nt, Artificial Sequence
  Description of Artificial Sequence: Synthetic oligonucleotide
ccacgcagaaccaucccau

SEQ ID NO: 244325 - RNA, 19 nt, Artificial Sequence
  Description of Artificial Sequence: Synthetic oligonucleotide
ccucagucgcucccagaca

SEQ ID NO: 244326 - RNA, 19 nt, Artificial Sequence
  Description of Artificial Sequence: Synthetic oligonucleotide
gucguccacgcagaaccau

SEQ ID NO: 244327 - RNA, 19 nt, Artificial Sequence
  Description of Artificial Sequence: Synthetic oligonucleotide
caugccccgcccugucacu

SEQ ID NO: 244328 - RNA, 19 nt, Artificial Sequence
  Description of Artificial Sequence: Synthetic oligonucleotide
gcgaagcugguuggcuuuc

SEQ ID NO: 244329 - RNA, 19 nt, Artificial Sequence
  Description of Artificial Sequence: Synthetic oligonucleotide
ccacgugcugugagggcga

SEQ ID NO: 244330 - RNA, 19 nt, Artificial Sequence
  Description of Artificial Sequence: Synthetic oligonucleotide
ccgcccugacuuguccugc

SEQ ID NO: 244331 - RNA, 19 nt, Artificial Sequence
  Description of Artificial Sequence: Synthetic oligonucleotide
cagcggucugcagcucuga

SEQ ID NO: 244332 - RNA, 19 nt, Artificial Sequence
  Description of Artificial Sequence: Synthetic oligonucleotide
ccccgcccugucacuuugg

SEQ ID NO: 244333 - RNA, 19 nt, Artificial Sequence
  Description of Artificial Sequence: Synthetic oligonucleotide
ggugcccuggcaacaugcu

SEQ ID NO: 244334 - RNA, 19 nt, Artificial Sequence
  Description of Artificial Sequence: Synthetic oligonucleotide
gcggucugcagcucugauu

SEQ ID NO: 244335 - RNA, 19 nt, Artificial Sequence
  Description of Artificial Sequence: Synthetic oligonucleotide
ccgcccugucacuuuggga

SEQ ID NO: 244336 - RNA, 19 nt, Artificial Sequence
  Description of Artificial Sequence: Synthetic oligonucleotide
ggcgaaggguggacccuga

SEQ ID NO: 244337 - RNA, 19 nt, Artificial Sequence
  Description of Artificial Sequence: Synthetic oligonucleotide
caacgccggccacagccau

SEQ ID NO: 244338 - RNA, 19 nt, Artificial Sequence
  Description of Artificial Sequence: Synthetic oligonucleotide
cuucggcuccucggccgga

SEQ ID NO: 244339 - RNA, 19 nt, Artificial Sequence
  Description of Artificial Sequence: Synthetic oligonucleotide
ccuucguccuggugggccu

SEQ ID NO: 244340 - RNA, 19 nt, Artificial Sequence
  Description of Artificial Sequence: Synthetic oligonucleotide
cacgugcugugagggcgaa

SEQ ID NO: 244341 - RNA, 19 nt, Artificial Sequence
  Description of Artificial Sequence: Synthetic oligonucleotide
agcuggcuacugacccauu

SEQ ID NO: 244342 - RNA, 19 nt, Artificial Sequence
  Description of Artificial Sequence: Synthetic oligonucleotide
cccuuucuucggugcccua

SEQ ID NO: 244343 - RNA, 19 nt, Artificial Sequence
  Description of Artificial Sequence: Synthetic oligonucleotide
cgcccugacuuguccugcu

SEQ ID NO: 244344 - RNA, 19 nt, Artificial Sequence
  Description of Artificial Sequence: Synthetic oligonucleotide
cggccggaauguauaccau

SEQ ID NO: 244345 - RNA, 19 nt, Artificial Sequence
  Description of Artificial Sequence: Synthetic oligonucleotide
ugcauauaaaccaucauag

SEQ ID NO: 244346 - RNA, 19 nt, Artificial Sequence
  Description of Artificial Sequence: Synthetic oligonucleotide
acauacuggauauauauuc

SEQ ID NO: 244347 - RNA, 19 nt, Artificial Sequence
  Description of Artificial Sequence: Synthetic oligonucleotide
uucaauaccagguaguugu

SEQ ID NO: 244348 - RNA, 19 nt, Artificial Sequence
  Description of Artificial Sequence: Synthetic oligonucleotide
uuuaccuugaguaaagguc

SEQ ID NO: 244349 - RNA, 19 nt, Artificial Sequence
  Description of Artificial Sequence: Synthetic oligonucleotide
ucuaauauggguacagccc

SEQ ID NO: 244350 - RNA, 19 nt, Artificial Sequence
  Description of Artificial Sequence: Synthetic oligonucleotide
cauacauacacacacacac

SEQ ID NO: 244351 - RNA, 19 nt, Artificial Sequence
  Description of Artificial Sequence: Synthetic oligonucleotide
acaaaugucaguccccacc

SEQ ID NO: 244352 - RNA, 19 nt, Artificial Sequence
  Description of Artificial Sequence: Synthetic oligonucleotide
ucuaacaggcacaucagag

SEQ ID NO: 244353 - RNA, 19 nt, Artificial Sequence
  Description of Artificial Sequence: Synthetic oligonucleotide
aaugguuaccuaucccagc

SEQ ID NO: 244354 - RNA, 19 nt, Artificial Sequence
  Description of Artificial Sequence: Synthetic oligonucleotide
uuuggauuaagcuuuguaa

SEQ ID NO: 244355 - RNA, 19 nt, Artificial Sequence
  Description of Artificial Sequence: Synthetic oligonucleotide
acuauaagaccauuaauga

SEQ ID NO: 244356 - RNA, 19 nt, Artificial Sequence
  Description of Artificial Sequence: Synthetic oligonucleotide
aaggacaccgcgaugauac

SEQ ID NO: 244357 - RNA, 19 nt, Artificial Sequence
  Description of Artificial Sequence: Synthetic oligonucleotide
uuaccuugaguaaagguca

SEQ ID NO: 244358 - RNA, 19 nt, Artificial Sequence
  Description of Artificial Sequence: Synthetic oligonucleotide
gaguguacuaacuugugcc

SEQ ID NO: 244359 - RNA, 19 nt, Artificial Sequence
  Description of Artificial Sequence: Synthetic oligonucleotide
uugucaguacugaagauug

SEQ ID NO: 244360 - RNA, 19 nt, Artificial Sequence
  Description of Artificial Sequence: Synthetic oligonucleotide
aguguacuaacuugugccc

SEQ ID NO: 244361 - RNA, 19 nt, Artificial Sequence
  Description of Artificial Sequence: Synthetic oligonucleotide
ugcgcuaacagauaagaca

SEQ ID NO: 244362 - RNA, 19 nt, Artificial Sequence
  Description of Artificial Sequence: Synthetic oligonucleotide
uacauacacacacacacac

SEQ ID NO: 244363 - RNA, 19 nt, Artificial Sequence
  Description of Artificial Sequence: Synthetic oligonucleotide
cugacauugauguuucucc

SEQ ID NO: 244364 - RNA, 19 nt, Artificial Sequence
  Description of Artificial Sequence: Synthetic oligonucleotide
aaaccaucauaggacaugg

SEQ ID NO: 244365 - RNA, 19 nt, Artificial Sequence
  Description of Artificial Sequence: Synthetic oligonucleotide
acuugugcccaaaugaugc

SEQ ID NO: 244366 - RNA, 19 nt, Artificial Sequence
  Description of Artificial Sequence: Synthetic oligonucleotide
aagauugcaggacugcgug

SEQ ID NO: 244367 - RNA, 19 nt, Artificial Sequence
  Description of Artificial Sequence: Synthetic oligonucleotide
agaauagugaaaacugcgc

SEQ ID NO: 244368 - RNA, 19 nt, Artificial Sequence
  Description of Artificial Sequence: Synthetic oligonucleotide
cucugaaagauucaauacc

SEQ ID NO: 244369 - RNA, 19 nt, Artificial Sequence
  Description of Artificial Sequence: Synthetic oligonucleotide
cuauaucuauuguaagugg

SEQ ID NO: 244370 - RNA, 19 nt, Artificial Sequence
  Description of Artificial Sequence: Synthetic oligonucleotide
uacacacacacacacacac

SEQ ID NO: 244371 - RNA, 19 nt, Artificial Sequence
  Description of Artificial Sequence: Synthetic oligonucleotide
ucuacaaggggacaagccu

SEQ ID NO: 244372 - RNA, 19 nt, Artificial Sequence
  Description of Artificial Sequence: Synthetic oligonucleotide
aguuuuauagaacacucau

SEQ ID NO: 244373 - RNA, 19 nt, Artificial Sequence
  Description of Artificial Sequence: Synthetic oligonucleotide
agaagaguguacuaacuug

SEQ ID NO: 244374 - RNA, 19 nt, Artificial Sequence
  Description of Artificial Sequence: Synthetic oligonucleotide
cauacacacacacacacac

SEQ ID NO: 244375 - RNA, 19 nt, Artificial Sequence
  Description of Artificial Sequence: Synthetic oligonucleotide
uugcauauaaaccaucaua

SEQ ID NO: 244376 - RNA, 19 nt, Artificial Sequence
  Description of Artificial Sequence: Synthetic oligonucleotide
uagucuaugaugcuguguc

SEQ ID NO: 244377 - RNA, 19 nt, Artificial Sequence
  Description of Artificial Sequence: Synthetic oligonucleotide
aguccuaccagcuuguaga

SEQ ID NO: 244378 - RNA, 19 nt, Artificial Sequence
  Description of Artificial Sequence: Synthetic oligonucleotide
caagcuaaaacuggaauag

SEQ ID NO: 244379 - RNA, 19 nt, Artificial Sequence
  Description of Artificial Sequence: Synthetic oligonucleotide
aauagugaaaacugcgcua

SEQ ID NO: 244380 - RNA, 19 nt, Artificial Sequence
  Description of Artificial Sequence: Synthetic oligonucleotide
auuaagcuuuguaaggucg

SEQ ID NO: 244381 - RNA, 19 nt, Artificial Sequence
  Description of Artificial Sequence: Synthetic oligonucleotide
uggcauacguaaaauauaa

SEQ ID NO: 244382 - RNA, 19 nt, Artificial Sequence
  Description of Artificial Sequence: Synthetic oligonucleotide
ugcgaguaggaucauggag

SEQ ID NO: 244383 - RNA, 19 nt, Artificial Sequence
  Description of Artificial Sequence: Synthetic oligonucleotide
agggaaucgacaccugggc

SEQ ID NO: 244384 - RNA, 19 nt, Artificial Sequence
  Description of Artificial Sequence: Synthetic oligonucleotide
cuugaggcaaaacuguuug

SEQ ID NO: 244385 - RNA, 19 nt, Artificial Sequence
  Description of Artificial Sequence: Synthetic oligonucleotide
ucaacuguacccuaacuua

SEQ ID NO: 244386 - RNA, 19 nt, Artificial Sequence
  Description of Artificial Sequence: Synthetic oligonucleotide
auaaggcaacauuacaaug

SEQ ID NO: 244387 - RNA, 19 nt, Artificial Sequence
  Description of Artificial Sequence: Synthetic oligonucleotide
acuuaguccuaccagcuug

SEQ ID NO: 244388 - RNA, 19 nt, Artificial Sequence
  Description of Artificial Sequence: Synthetic oligonucleotide
aagccuucuagcaaucacg

SEQ ID NO: 244389 - RNA, 19 nt, Artificial Sequence
  Description of Artificial Sequence: Synthetic oligonucleotide
uugacaugggugcaguaug

SEQ ID NO: 244390 - RNA, 19 nt, Artificial Sequence
  Description of Artificial Sequence: Synthetic oligonucleotide
cacauucccucuaacaggc

SEQ ID NO: 244391 - RNA, 19 nt, Artificial Sequence
  Description of Artificial Sequence: Synthetic oligonucleotide
gcaagcaaucccuugaccg

SEQ ID NO: 244392 - RNA, 19 nt, Artificial Sequence
  Description of Artificial Sequence: Synthetic oligonucleotide
aucuauuguaagugguagg

SEQ ID NO: 244393 - RNA, 19 nt, Artificial Sequence
  Description of Artificial Sequence: Synthetic oligonucleotide
aaaguuaaugggacccugg

SEQ ID NO: 244394 - RNA, 19 nt, Artificial Sequence
  Description of Artificial Sequence: Synthetic oligonucleotide
cacacacacacacacacag

SEQ ID NO: 244395 - RNA, 19 nt, Artificial Sequence
  Description of Artificial Sequence: Synthetic oligonucleotide
ggucagucaguuuugaaag

SEQ ID NO: 244396 - RNA, 19 nt, Artificial Sequence
  Description of Artificial Sequence: Synthetic oligonucleotide
accaucauaggacauggca

SEQ ID NO: 244397 - RNA, 19 nt, Artificial Sequence
  Description of Artificial Sequence: Synthetic oligonucleotide
uucaacuguacccuaacuu

SEQ ID NO: 244398 - RNA, 19 nt, Artificial Sequence
  Description of Artificial Sequence: Synthetic oligonucleotide
acuaacuugugcccaaaug

SEQ ID NO: 244399 - RNA, 19 nt, Artificial Sequence
  Description of Artificial Sequence: Synthetic oligonucleotide
ugaagauugcaggacugcg

SEQ ID NO: 244400 - RNA, 19 nt, Artificial Sequence
  Description of Artificial Sequence: Synthetic oligonucleotide
uuagacucccaccauguuc

SEQ ID NO: 244401 - RNA, 19 nt, Artificial Sequence
  Description of Artificial Sequence: Synthetic oligonucleotide
cuaaaacuggaauagucca

SEQ ID NO: 244402 - RNA, 19 nt, Artificial Sequence
  Description of Artificial Sequence: Synthetic oligonucleotide
acgaaggagguccuuagag

SEQ ID NO: 244403 - RNA, 19 nt, Artificial Sequence
  Description of Artificial Sequence: Synthetic oligonucleotide
acgugguaaauccuucugg

SEQ ID NO: 244404 - RNA, 19 nt, Artificial Sequence
  Description of Artificial Sequence: Synthetic oligonucleotide
ugacaaugguuaccuaucc

SEQ ID NO: 244405 - RNA, 19 nt, Artificial Sequence
  Description of Artificial Sequence: Synthetic oligonucleotide
aguaggaucauggaguccu

SEQ ID NO: 244406 - RNA, 19 nt, Artificial Sequence
  Description of Artificial Sequence: Synthetic oligonucleotide
aauauccuugaccacuuuu

SEQ ID NO: 244407 - RNA, 19 nt, Artificial Sequence
  Description of Artificial Sequence: Synthetic oligonucleotide
acaagcuaaaacuggaaua

SEQ ID NO: 244408 - RNA, 19 nt, Artificial Sequence
  Description of Artificial Sequence: Synthetic oligonucleotide
uaagugguagguagggugu

SEQ ID NO: 244409 - RNA, 19 nt, Artificial Sequence
  Description of Artificial Sequence: Synthetic oligonucleotide
auuuacucccagaagagug

SEQ ID NO: 244410 - RNA, 19 nt, Artificial Sequence
  Description of Artificial Sequence: Synthetic oligonucleotide
uuaagcuuuguaaggucgu

SEQ ID NO: 244411 - RNA, 19 nt, Artificial Sequence
  Description of Artificial Sequence: Synthetic oligonucleotide
ugugugucuacaaggggac

SEQ ID NO: 244412 - RNA, 19 nt, Artificial Sequence
  Description of Artificial Sequence: Synthetic oligonucleotide
aggagcuaaaaguggaaug

SEQ ID NO: 244413 - RNA, 19 nt, Artificial Sequence
  Description of Artificial Sequence: Synthetic oligonucleotide
cacacacacacacacacac

SEQ ID NO: 244414 - RNA, 19 nt, Artificial Sequence
  Description of Artificial Sequence: Synthetic oligonucleotide
uuaccuaucccagcuauga

SEQ ID NO: 244415 - RNA, 19 nt, Artificial Sequence
  Description of Artificial Sequence: Synthetic oligonucleotide
agaguuaggguggacuugg

SEQ ID NO: 244416 - RNA, 19 nt, Artificial Sequence
  Description of Artificial Sequence: Synthetic oligonucleotide
uuagcugcauaugaauagc

SEQ ID NO: 244417 - RNA, 19 nt, Artificial Sequence
  Description of Artificial Sequence: Synthetic oligonucleotide
ugcacgaaccuucacuaac

SEQ ID NO: 244418 - RNA, 19 nt, Artificial Sequence
  Description of Artificial Sequence: Synthetic oligonucleotide
aaacugcgcuaacagauaa

SEQ ID NO: 244419 - RNA, 19 nt, Artificial Sequence
  Description of Artificial Sequence: Synthetic oligonucleotide
uaacuugugcccaaaugau

SEQ ID NO: 244420 - RNA, 19 nt, Artificial Sequence
  Description of Artificial Sequence: Synthetic oligonucleotide
accuucacuaaccaugccu

SEQ ID NO: 244421 - RNA, 19 nt, Artificial Sequence
  Description of Artificial Sequence: Synthetic oligonucleotide
acauauguaagguccaguu

SEQ ID NO: 244422 - RNA, 19 nt, Artificial Sequence
  Description of Artificial Sequence: Synthetic oligonucleotide
caacuguacccuaacuuag

SEQ ID NO: 244423 - RNA, 19 nt, Artificial Sequence
  Description of Artificial Sequence: Synthetic oligonucleotide
gaugauacgcucugugaca

SEQ ID NO: 244424 - RNA, 19 nt, Artificial Sequence
  Description of Artificial Sequence: Synthetic oligonucleotide
augguuaccuaucccagcu

SEQ ID NO: 244425 - RNA, 19 nt, Artificial Sequence
  Description of Artificial Sequence: Synthetic oligonucleotide
cacguugcugugcaaauag

SEQ ID NO: 244426 - RNA, 19 nt, Artificial Sequence
  Description of Artificial Sequence: Synthetic oligonucleotide
caaugguuaccuaucccag

SEQ ID NO: 244427 - RNA, 19 nt, Artificial Sequence
  Description of Artificial Sequence: Synthetic oligonucleotide
uuggcauacguaaaauaua

SEQ ID NO: 244428 - RNA, 19 nt, Artificial Sequence
  Description of Artificial Sequence: Synthetic oligonucleotide
uagacuucagcaugcgugu

SEQ ID NO: 244429 - RNA, 19 nt, Artificial Sequence
  Description of Artificial Sequence: Synthetic oligonucleotide
cuaaaaguggaauggucca

SEQ ID NO: 244430 - RNA, 19 nt, Artificial Sequence
  Description of Artificial Sequence: Synthetic oligonucleotide
gcuauaucuauuguaagug

SEQ ID NO: 244431 - RNA, 19 nt, Artificial Sequence
  Description of Artificial Sequence: Synthetic oligonucleotide
gaauagugaaaacugcgcu

SEQ ID NO: 244432 - RNA, 19 nt, Artificial Sequence
  Description of Artificial Sequence: Synthetic oligonucleotide
ucacgguuuagucggcugc

SEQ ID NO: 244433 - RNA, 19 nt, Artificial Sequence
  Description of Artificial Sequence: Synthetic oligonucleotide
auuguaagugguagguagg

SEQ ID NO: 244434 - RNA, 19 nt, Artificial Sequence
  Description of Artificial Sequence: Synthetic oligonucleotide
caccccuucaacuguaccc

SEQ ID NO: 244435 - RNA, 19 nt, Artificial Sequence
  Description of Artificial Sequence: Synthetic oligonucleotide
uggcuauaucuauuguaag

SEQ ID NO: 244436 - RNA, 19 nt, Artificial Sequence
  Description of Artificial Sequence: Synthetic oligonucleotide
ucggcaagcaaucccuuga

SEQ ID NO: 244437 - RNA, 19 nt, Artificial Sequence
  Description of Artificial Sequence: Synthetic oligonucleotide
cagcuaugagauuuguaag

SEQ ID NO: 244438 - RNA, 19 nt, Artificial Sequence
  Description of Artificial Sequence: Synthetic oligonucleotide
agacuuaccaaggucauaa

SEQ ID NO: 244439 - RNA, 19 nt, Artificial Sequence
  Description of Artificial Sequence: Synthetic oligonucleotide
uaguccuaccagcuuguag

SEQ ID NO: 244440 - RNA, 19 nt, Artificial Sequence
  Description of Artificial Sequence: Synthetic oligonucleotide
gaaccuucacuaaccaugc

SEQ ID NO: 244441 - RNA, 19 nt, Artificial Sequence
  Description of Artificial Sequence: Synthetic oligonucleotide
gcuaaaaguggaauggucc

SEQ ID NO: 244442 - RNA, 19 nt, Artificial Sequence
  Description of Artificial Sequence: Synthetic oligonucleotide
cacuggagacuauaagacc

SEQ ID NO: 244443 - RNA, 19 nt, Artificial Sequence
  Description of Artificial Sequence: Synthetic oligonucleotide
ucauaugggcaagacacgu

SEQ ID NO: 244444 - RNA, 19 nt, Artificial Sequence
  Description of Artificial Sequence: Synthetic oligonucleotide
aucccuugaccgucaaugg

SEQ ID NO: 244445 - RNA, 19 nt, Artificial Sequence
  Description of Artificial Sequence: Synthetic oligonucleotide
gcuaaaacuggaauagucc

SEQ ID NO: 244446 - RNA, 19 nt, Artificial Sequence
  Description of Artificial Sequence: Synthetic oligonucleotide
cuggcuauaucuauuguaa

SEQ ID NO: 244447 - RNA, 19 nt, Artificial Sequence
  Description of Artificial Sequence: Synthetic oligonucleotide
uugaccacuuuuaccuuga

SEQ ID NO: 244448 - RNA, 19 nt, Artificial Sequence
  Description of Artificial Sequence: Synthetic oligonucleotide
cauauguaagguccaguuc

SEQ ID NO: 244449 - RNA, 19 nt, Artificial Sequence
  Description of Artificial Sequence: Synthetic oligonucleotide
agcuaaaaguggaaugguc

SEQ ID NO: 244450 - RNA, 19 nt, Artificial Sequence
  Description of Artificial Sequence: Synthetic oligonucleotide
gaaaacugcgcuaacagau

SEQ ID NO: 244451 - RNA, 19 nt, Artificial Sequence
  Description of Artificial Sequence: Synthetic oligonucleotide
uacguguuguagccuaaga

SEQ ID NO: 244452 - RNA, 19 nt, Artificial Sequence
  Description of Artificial Sequence: Synthetic oligonucleotide
acguguuguagccuaagaa

SEQ ID NO: 244453 - RNA, 19 nt, Artificial Sequence
  Description of Artificial Sequence: Synthetic oligonucleotide
gcaaauagaggguagaggu

SEQ ID NO: 244454 - RNA, 19 nt, Artificial Sequence
  Description of Artificial Sequence: Synthetic oligonucleotide
cuggacuuuagaaaucaga

SEQ ID NO: 244455 - RNA, 19 nt, Artificial Sequence
  Description of Artificial Sequence: Synthetic oligonucleotide
ccugcgaguaggaucaugg

SEQ ID NO: 244456 - RNA, 19 nt, Artificial Sequence
  Description of Artificial Sequence: Synthetic oligonucleotide
uggcuucuaauauggguac

SEQ ID NO: 244457 - RNA, 19 nt, Artificial Sequence
  Description of Artificial Sequence: Synthetic oligonucleotide
cauucccucuaacaggcac

SEQ ID NO: 244458 - RNA, 19 nt, Artificial Sequence
  Description of Artificial Sequence: Synthetic oligonucleotide
gcgcuaacagauaagacag

SEQ ID NO: 244459 - RNA, 19 nt, Artificial Sequence
  Description of Artificial Sequence: Synthetic oligonucleotide
gcacauucccucuaacagg

SEQ ID NO: 244460 - RNA, 19 nt, Artificial Sequence
  Description of Artificial Sequence: Synthetic oligonucleotide
ugucaguacugaagauugc

SEQ ID NO: 244461 - RNA, 19 nt, Artificial Sequence
  Description of Artificial Sequence: Synthetic oligonucleotide
cacacacacacacaguuga

SEQ ID NO: 244462 - RNA, 19 nt, Artificial Sequence
  Description of Artificial Sequence: Synthetic oligonucleotide
agccuucuagcaaucacgg

SEQ ID NO: 244463 - RNA, 19 nt, Artificial Sequence
  Description of Artificial Sequence: Synthetic oligonucleotide
uaaaaguggaaugguccac

SEQ ID NO: 244464 - RNA, 19 nt, Artificial Sequence
  Description of Artificial Sequence: Synthetic oligonucleotide
gggaaugaugcacauuccc

SEQ ID NO: 244465 - RNA, 19 nt, Artificial Sequence
  Description of Artificial Sequence: Synthetic oligonucleotide
cucugaauaaggcugauau

SEQ ID NO: 244466 - RNA, 19 nt, Artificial Sequence
  Description of Artificial Sequence: Synthetic oligonucleotide
uagcaaucacgguuuaguc

SEQ ID NO: 244467 - RNA, 19 nt, Artificial Sequence
  Description of Artificial Sequence: Synthetic oligonucleotide
agauucaauaccagguagu

SEQ ID NO: 244468 - RNA, 19 nt, Artificial Sequence
  Description of Artificial Sequence: Synthetic oligonucleotide
aucagagaguaggaauuuc

SEQ ID NO: 244469 - RNA, 19 nt, Artificial Sequence
  Description of Artificial Sequence: Synthetic oligonucleotide
acccuggcuauaucuauug

SEQ ID NO: 244470 - RNA, 19 nt, Artificial Sequence
  Description of Artificial Sequence: Synthetic oligonucleotide
aaccaucauaggacauggc

SEQ ID NO: 244471 - RNA, 19 nt, Artificial Sequence
  Description of Artificial Sequence: Synthetic oligonucleotide
aaucagagaguaggaauuu

SEQ ID NO: 244472 - RNA, 19 nt, Artificial Sequence
  Description of Artificial Sequence: Synthetic oligonucleotide
aucaccgucuacuguagaa

SEQ ID NO: 244473 - RNA, 19 nt, Artificial Sequence
  Description of Artificial Sequence: Synthetic oligonucleotide
ucuagcaaucacgguuuag

SEQ ID NO: 244474 - RNA, 19 nt, Artificial Sequence
  Description of Artificial Sequence: Synthetic oligonucleotide
ccuaacuuagacucccacc

SEQ ID NO: 244475 - RNA, 19 nt, Artificial Sequence
  Description of Artificial Sequence: Synthetic oligonucleotide
aagugguagguaggguguc

SEQ ID NO: 244476 - RNA, 19 nt, Artificial Sequence
  Description of Artificial Sequence: Synthetic oligonucleotide
aagcuaaaacuggaauagu

SEQ ID NO: 244477 - RNA, 19 nt, Artificial Sequence
  Description of Artificial Sequence: Synthetic oligonucleotide
agaggcuuccacugcccuc

SEQ ID NO: 244478 - RNA, 19 nt, Artificial Sequence
  Description of Artificial Sequence: Synthetic oligonucleotide
aacuuaguccuaccagcuu

SEQ ID NO: 244479 - RNA, 19 nt, Artificial Sequence
  Description of Artificial Sequence: Synthetic oligonucleotide
uccccaguagaguuagggu

SEQ ID NO: 244480 - RNA, 19 nt, Artificial Sequence
  Description of Artificial Sequence: Synthetic oligonucleotide
cugaaacacuagaagccuc

SEQ ID NO: 244481 - RNA, 19 nt, Artificial Sequence
  Description of Artificial Sequence: Synthetic oligonucleotide
accgcgaugauacgcucug

SEQ ID NO: 244482 - RNA, 19 nt, Artificial Sequence
  Description of Artificial Sequence: Synthetic oligonucleotide
aucacgguuuagucggcug

SEQ ID NO: 244483 - RNA, 19 nt, Artificial Sequence
  Description of Artificial Sequence: Synthetic oligonucleotide
uugaccgucaauggucugu

SEQ ID NO: 244484 - RNA, 19 nt, Artificial Sequence
  Description of Artificial Sequence: Synthetic oligonucleotide
acgucacaccccuucaacu

SEQ ID NO: 244485 - RNA, 19 nt, Artificial Sequence
  Description of Artificial Sequence: Synthetic oligonucleotide
ucaauaccagguaguuguc

SEQ ID NO: 244486 - RNA, 19 nt, Artificial Sequence
  Description of Artificial Sequence: Synthetic oligonucleotide
ucugagcacacaguauagu

SEQ ID NO: 244487 - RNA, 19 nt, Artificial Sequence
  Description of Artificial Sequence: Synthetic oligonucleotide
gucuacaaggggacaagcc

SEQ ID NO: 244488 - RNA, 19 nt, Artificial Sequence
  Description of Artificial Sequence: Synthetic oligonucleotide
aaugggacccuggcuauau

SEQ ID NO: 244489 - RNA, 19 nt, Artificial Sequence
  Description of Artificial Sequence: Synthetic oligonucleotide
gucaguacugaagauugca

SEQ ID NO: 244490 - RNA, 19 nt, Artificial Sequence
  Description of Artificial Sequence: Synthetic oligonucleotide
guaguugucuccaugcuua

SEQ ID NO: 244491 - RNA, 19 nt, Artificial Sequence
  Description of Artificial Sequence: Synthetic oligonucleotide
aacuguacccuaacuuaga

SEQ ID NO: 244492 - RNA, 19 nt, Artificial Sequence
  Description of Artificial Sequence: Synthetic oligonucleotide
uguaagugguagguagggu

SEQ ID NO: 244493 - RNA, 19 nt, Artificial Sequence
  Description of Artificial Sequence: Synthetic oligonucleotide
uuuagucggcugcagcauu

SEQ ID NO: 244494 - RNA, 19 nt, Artificial Sequence
  Description of Artificial Sequence: Synthetic oligonucleotide
ugucucuugugugucuaca

SEQ ID NO: 244495 - RNA, 19 nt, Artificial Sequence
  Description of Artificial Sequence: Synthetic oligonucleotide
uaaccaugccuccccuucu

SEQ ID NO: 244496 - RNA, 19 nt, Artificial Sequence
  Description of Artificial Sequence: Synthetic oligonucleotide
cacgugguaaauccuucug

SEQ ID NO: 244497 - RNA, 19 nt, Artificial Sequence
  Description of Artificial Sequence: Synthetic oligonucleotide
ggaauaguccaccuucaca

SEQ ID NO: 244498 - RNA, 19 nt, Artificial Sequence
  Description of Artificial Sequence: Synthetic oligonucleotide
aacugcgcuaacagauaag

SEQ ID NO: 244499 - RNA, 19 nt, Artificial Sequence
  Description of Artificial Sequence: Synthetic oligonucleotide
aaaacugcgcuaacagaua

SEQ ID NO: 244500 - RNA, 19 nt, Artificial Sequence
  Description of Artificial Sequence: Synthetic oligonucleotide
ugcguggugucacccugag

SEQ ID NO: 244501 - RNA, 19 nt, Artificial Sequence
  Description of Artificial Sequence: Synthetic oligonucleotide
agccugacaaugguuaccu

SEQ ID NO: 244502 - RNA, 19 nt, Artificial Sequence
  Description of Artificial Sequence: Synthetic oligonucleotide
ucaccgucuacuguagaaa

SEQ ID NO: 244503 - RNA, 19 nt, Artificial Sequence
  Description of Artificial Sequence: Synthetic oligonucleotide
auaucuauuguaaguggua

SEQ ID NO: 244504 - RNA, 19 nt, Artificial Sequence
  Description of Artificial Sequence: Synthetic oligonucleotide
ucacccugagaccauuguu

SEQ ID NO: 244505 - RNA, 19 nt, Artificial Sequence
  Description of Artificial Sequence: Synthetic oligonucleotide
gcaaguaggacuccucuga

SEQ ID NO: 244506 - RNA, 19 nt, Artificial Sequence
  Description of Artificial Sequence: Synthetic oligonucleotide
cugcgcuaacagauaagac

SEQ ID NO: 244507 - RNA, 19 nt, Artificial Sequence
  Description of Artificial Sequence: Synthetic oligonucleotide
caucauaggacauggcacu

SEQ ID NO: 244508 - RNA, 19 nt, Artificial Sequence
  Description of Artificial Sequence: Synthetic oligonucleotide
auacauacacacacacaca

SEQ ID NO: 244509 - RNA, 19 nt, Artificial Sequence
  Description of Artificial Sequence: Synthetic oligonucleotide
ccuucacuaaccaugccuc

SEQ ID NO: 244510 - RNA, 19 nt, Artificial Sequence
  Description of Artificial Sequence: Synthetic oligonucleotide
cucaugggugccucgagga

SEQ ID NO: 244511 - RNA, 19 nt, Artificial Sequence
  Description of Artificial Sequence: Synthetic oligonucleotide
ccccaguagaguuagggug

SEQ ID NO: 244512 - RNA, 19 nt, Artificial Sequence
  Description of Artificial Sequence: Synthetic oligonucleotide
caugcuuagacuucagcau

SEQ ID NO: 244513 - RNA, 19 nt, Artificial Sequence
  Description of Artificial Sequence: Synthetic oligonucleotide
ggucguaucucuucucuga

SEQ ID NO: 244514 - RNA, 19 nt, Artificial Sequence
  Description of Artificial Sequence: Synthetic oligonucleotide
uuccaaccugcacgaaccu

SEQ ID NO: 244515 - RNA, 19 nt, Artificial Sequence
  Description of Artificial Sequence: Synthetic oligonucleotide
augauacgcucugugacau

SEQ ID NO: 244516 - RNA, 19 nt, Artificial Sequence
  Description of Artificial Sequence: Synthetic oligonucleotide
guaaggucguaucucuucu

SEQ ID NO: 244517 - RNA, 19 nt, Artificial Sequence
  Description of Artificial Sequence: Synthetic oligonucleotide
gccucgaggacuuucagaa

SEQ ID NO: 244518 - RNA, 19 nt, Artificial Sequence
  Description of Artificial Sequence: Synthetic oligonucleotide
gguacagcccaacacugga

SEQ ID NO: 244519 - RNA, 19 nt, Artificial Sequence
  Description of Artificial Sequence: Synthetic oligonucleotide
uuguaaggucguaucucuu

SEQ ID NO: 244520 - RNA, 19 nt, Artificial Sequence
  Description of Artificial Sequence: Synthetic oligonucleotide
cuagcaaucacgguuuagu

SEQ ID NO: 244521 - RNA, 19 nt, Artificial Sequence
  Description of Artificial Sequence: Synthetic oligonucleotide
ucauaggacauggcacuuc

SEQ ID NO: 244522 - RNA, 19 nt, Artificial Sequence
  Description of Artificial Sequence: Synthetic oligonucleotide
uaagcuggcacuggacuuu

SEQ ID NO: 244523 - RNA, 19 nt, Artificial Sequence
  Description of Artificial Sequence: Synthetic oligonucleotide
ugcaggacugcgugguguc

SEQ ID NO: 244524 - RNA, 19 nt, Artificial Sequence
  Description of Artificial Sequence: Synthetic oligonucleotide
acacacacacacacaguug

SEQ ID NO: 244525 - RNA, 19 nt, Artificial Sequence
  Description of Artificial Sequence: Synthetic oligonucleotide
acgaaccuucacuaaccau

SEQ ID NO: 244526 - RNA, 19 nt, Artificial Sequence
  Description of Artificial Sequence: Synthetic oligonucleotide
acauacacacacacacaca

SEQ ID NO: 244527 - RNA, 19 nt, Artificial Sequence
  Description of Artificial Sequence: Synthetic oligonucleotide
cucuaacaggcacaucaga

SEQ ID NO: 244528 - RNA, 19 nt, Artificial Sequence
  Description of Artificial Sequence: Synthetic oligonucleotide
caaucacgguuuagucggc

SEQ ID NO: 244529 - RNA, 19 nt, Artificial Sequence
  Description of Artificial Sequence: Synthetic oligonucleotide
uaagaccauuaaugagaaa

SEQ ID NO: 244530 - RNA, 19 nt, Artificial Sequence
  Description of Artificial Sequence: Synthetic oligonucleotide
ugaccgucaauggucuguc

SEQ ID NO: 244531 - RNA, 19 nt, Artificial Sequence
  Description of Artificial Sequence: Synthetic oligonucleotide
ccgucaauggucugucugc

SEQ ID NO: 244532 - RNA, 19 nt, Artificial Sequence
  Description of Artificial Sequence: Synthetic oligonucleotide
gaacucaugggugccucga

SEQ ID NO: 244533 - RNA, 19 nt, Artificial Sequence
  Description of Artificial Sequence: Synthetic oligonucleotide
guacguguuguagccuaag

SEQ ID NO: 244534 - RNA, 19 nt, Artificial Sequence
  Description of Artificial Sequence: Synthetic oligonucleotide
ggcaagcaaucccuugacc

SEQ ID NO: 244535 - RNA, 19 nt, Artificial Sequence
  Description of Artificial Sequence: Synthetic oligonucleotide
auacacacacacacacaca

SEQ ID NO: 244536 - RNA, 19 nt, Artificial Sequence
  Description of Artificial Sequence: Synthetic oligonucleotide
gaguuaggguggacuuggg

SEQ ID NO: 244537 - RNA, 19 nt, Artificial Sequence
  Description of Artificial Sequence: Synthetic oligonucleotide
uccuaccagcuuguagagc

SEQ ID NO: 244538 - RNA, 19 nt, Artificial Sequence
  Description of Artificial Sequence: Synthetic oligonucleotide
auuugacaugggugcagua

SEQ ID NO: 244539 - RNA, 19 nt, Artificial Sequence
  Description of Artificial Sequence: Synthetic oligonucleotide
aucgacaccugggcuucac

SEQ ID NO: 244540 - RNA, 19 nt, Artificial Sequence
  Description of Artificial Sequence: Synthetic oligonucleotide
cacaagcuaaaacuggaau

SEQ ID NO: 244541 - RNA, 19 nt, Artificial Sequence
  Description of Artificial Sequence: Synthetic oligonucleotide
cacgaaccuucacuaacca

SEQ ID NO: 244542 - RNA, 19 nt, Artificial Sequence
  Description of Artificial Sequence: Synthetic oligonucleotide
ggcaauggcaagcaguuau

SEQ ID NO: 244543 - RNA, 19 nt, Artificial Sequence
  Description of Artificial Sequence: Synthetic oligonucleotide
gucguaucucuucucugaa

SEQ ID NO: 244544 - RNA, 19 nt, Artificial Sequence
  Description of Artificial Sequence: Synthetic oligonucleotide
gcacgaaccuucacuaacc

SEQ ID NO: 244545 - RNA, 19 nt, Artificial Sequence
  Description of Artificial Sequence: Synthetic oligonucleotide
cacacacacacacacaguu

SEQ ID NO: 244546 - RNA, 19 nt, Artificial Sequence
  Description of Artificial Sequence: Synthetic oligonucleotide
ggauuaagcuuuguaaggu

SEQ ID NO: 244547 - RNA, 19 nt, Artificial Sequence
  Description of Artificial Sequence: Synthetic oligonucleotide
gacauauguaagguccagu

SEQ ID NO: 244548 - RNA, 19 nt, Artificial Sequence
  Description of Artificial Sequence: Synthetic oligonucleotide
cuugaccgucaauggucug

SEQ ID NO: 244549 - RNA, 19 nt, Artificial Sequence
  Description of Artificial Sequence: Synthetic oligonucleotide
cuuaguccuaccagcuugu

SEQ ID NO: 244550 - RNA, 19 nt, Artificial Sequence
  Description of Artificial Sequence: Synthetic oligonucleotide
cugaggauaaaugcauugu

SEQ ID NO: 244551 - RNA, 19 nt, Artificial Sequence
  Description of Artificial Sequence: Synthetic oligonucleotide
gcgaugauacgcucuguga

SEQ ID NO: 244552 - RNA, 19 nt, Artificial Sequence
  Description of Artificial Sequence: Synthetic oligonucleotide
gugccucgaggacuuucag

SEQ ID NO: 244553 - RNA, 19 nt, Artificial Sequence
  Description of Artificial Sequence: Synthetic oligonucleotide
cacaccccuucaacuguac

SEQ ID NO: 244554 - RNA, 19 nt, Artificial Sequence
  Description of Artificial Sequence: Synthetic oligonucleotide
gacaccgcgaugauacgcu

SEQ ID NO: 244555 - RNA, 19 nt, Artificial Sequence
  Description of Artificial Sequence: Synthetic oligonucleotide
gggucauaugggcaagaca

SEQ ID NO: 244556 - RNA, 19 nt, Artificial Sequence
  Description of Artificial Sequence: Synthetic oligonucleotide
acacacacacacacacaca

SEQ ID NO: 244557 - RNA, 19 nt, Artificial Sequence
  Description of Artificial Sequence: Synthetic oligonucleotide
ggaaugaugcacauucccu

SEQ ID NO: 244558 - RNA, 19 nt, Artificial Sequence
  Description of Artificial Sequence: Synthetic oligonucleotide
ggacaccgcgaugauacgc

SEQ ID NO: 244559 - RNA, 19 nt, Artificial Sequence
  Description of Artificial Sequence: Synthetic oligonucleotide
acacacacacacacacagu

SEQ ID NO: 244560 - RNA, 19 nt, Artificial Sequence
  Description of Artificial Sequence: Synthetic oligonucleotide
auaccuggucagucaguuu

SEQ ID NO: 244561 - RNA, 19 nt, Artificial Sequence
  Description of Artificial Sequence: Synthetic oligonucleotide
cugcgaguaggaucaugga

SEQ ID NO: 244562 - RNA, 19 nt, Artificial Sequence
  Description of Artificial Sequence: Synthetic oligonucleotide
gcuaacagauaagacagau

SEQ ID NO: 244563 - RNA, 19 nt, Artificial Sequence
  Description of Artificial Sequence: Synthetic oligonucleotide
ugauacgcucugugacaua

SEQ ID NO: 244564 - RNA, 19 nt, Artificial Sequence
  Description of Artificial Sequence: Synthetic oligonucleotide
ccucagagcaaauuucuua

SEQ ID NO: 244565 - RNA, 19 nt, Artificial Sequence
  Description of Artificial Sequence: Synthetic oligonucleotide
acucugaauaaggcugaua

SEQ ID NO: 244566 - RNA, 19 nt, Artificial Sequence
  Description of Artificial Sequence: Synthetic oligonucleotide
cuggggucauaugggcaag

SEQ ID NO: 244567 - RNA, 19 nt, Artificial Sequence
  Description of Artificial Sequence: Synthetic oligonucleotide
uccaaccugcacgaaccuu

SEQ ID NO: 244568 - RNA, 19 nt, Artificial Sequence
  Description of Artificial Sequence: Synthetic oligonucleotide
ggaaucgacaccugggcuu

SEQ ID NO: 244569 - RNA, 19 nt, Artificial Sequence
  Description of Artificial Sequence: Synthetic oligonucleotide
uuaguccuaccagcuugua

SEQ ID NO: 244570 - RNA, 19 nt, Artificial Sequence
  Description of Artificial Sequence: Synthetic oligonucleotide
acguugcugugcaaauaga

SEQ ID NO: 244571 - RNA, 19 nt, Artificial Sequence
  Description of Artificial Sequence: Synthetic oligonucleotide
cccuaacuuagacucccac

SEQ ID NO: 244572 - RNA, 19 nt, Artificial Sequence
  Description of Artificial Sequence: Synthetic oligonucleotide
aguacguguuguagccuaa

SEQ ID NO: 244573 - RNA, 19 nt, Artificial Sequence
  Description of Artificial Sequence: Synthetic oligonucleotide
accugcgaguaggaucaug

SEQ ID NO: 244574 - RNA, 19 nt, Artificial Sequence
  Description of Artificial Sequence: Synthetic oligonucleotide
uaaugggacccuggcuaua

SEQ ID NO: 244575 - RNA, 19 nt, Artificial Sequence
  Description of Artificial Sequence: Synthetic oligonucleotide
cacgguuuagucggcugca

SEQ ID NO: 244576 - RNA, 19 nt, Artificial Sequence
  Description of Artificial Sequence: Synthetic oligonucleotide
acacacacacacaguugau

SEQ ID NO: 244577 - RNA, 19 nt, Artificial Sequence
  Description of Artificial Sequence: Synthetic oligonucleotide
gacuuaccaaggucauaau

SEQ ID NO: 244578 - RNA, 19 nt, Artificial Sequence
  Description of Artificial Sequence: Synthetic oligonucleotide
ccuggggucauaugggcaa

SEQ ID NO: 244579 - RNA, 19 nt, Artificial Sequence
  Description of Artificial Sequence: Synthetic oligonucleotide
cugcacgaaccuucacuaa

SEQ ID NO: 244580 - RNA, 19 nt, Artificial Sequence
  Description of Artificial Sequence: Synthetic oligonucleotide
ggggucauaugggcaagac

SEQ ID NO: 244581 - RNA, 19 nt, Artificial Sequence
  Description of Artificial Sequence: Synthetic oligonucleotide
caugggugccucgaggacu

SEQ ID NO: 244582 - RNA, 19 nt, Artificial Sequence
  Description of Artificial Sequence: Synthetic oligonucleotide
caauaccagguaguugucu

SEQ ID NO: 244583 - RNA, 19 nt, Artificial Sequence
  Description of Artificial Sequence: Synthetic oligonucleotide
ggcauacguaaaauauaaa

SEQ ID NO: 244584 - RNA, 19 nt, Artificial Sequence
  Description of Artificial Sequence: Synthetic oligonucleotide
ggugcaucaauaggagcua

SEQ ID NO: 244585 - RNA, 19 nt, Artificial Sequence
  Description of Artificial Sequence: Synthetic oligonucleotide
cagcggagagcugcaggug

SEQ ID NO: 244586 - RNA, 19 nt, Artificial Sequence
  Description of Artificial Sequence: Synthetic oligonucleotide
agccuuccuggggucauau

SEQ ID NO: 244587 - RNA, 19 nt, Artificial Sequence
  Description of Artificial Sequence: Synthetic oligonucleotide
ggacugcguggugucaccc

SEQ ID NO: 244588 - RNA, 19 nt, Artificial Sequence
  Description of Artificial Sequence: Synthetic oligonucleotide
caggagcuaaaaguggaau

SEQ ID NO: 244589 - RNA, 19 nt, Artificial Sequence
  Description of Artificial Sequence: Synthetic oligonucleotide
acccuaacuuagacuccca

SEQ ID NO: 244590 - RNA, 19 nt, Artificial Sequence
  Description of Artificial Sequence: Synthetic oligonucleotide
ccaccuguauacauacaua

SEQ ID NO: 244591 - RNA, 19 nt, Artificial Sequence
  Description of Artificial Sequence: Synthetic oligonucleotide
cacacacacacaguugauu

SEQ ID NO: 244592 - RNA, 19 nt, Artificial Sequence
  Description of Artificial Sequence: Synthetic oligonucleotide
gaccgucaauggucugucu

SEQ ID NO: 244593 - RNA, 19 nt, Artificial Sequence
  Description of Artificial Sequence: Synthetic oligonucleotide
agccuggacaaugccccuu

SEQ ID NO: 244594 - RNA, 19 nt, Artificial Sequence
  Description of Artificial Sequence: Synthetic oligonucleotide
caccgcgaugauacgcucu

SEQ ID NO: 244595 - RNA, 19 nt, Artificial Sequence
  Description of Artificial Sequence: Synthetic oligonucleotide
cuuagacucccaccauguu

SEQ ID NO: 244596 - RNA, 19 nt, Artificial Sequence
  Description of Artificial Sequence: Synthetic oligonucleotide
caaugccccuucccagugu

SEQ ID NO: 244597 - RNA, 19 nt, Artificial Sequence
  Description of Artificial Sequence: Synthetic oligonucleotide
gggugccucgaggacuuuc

SEQ ID NO: 244598 - RNA, 19 nt, Artificial Sequence
  Description of Artificial Sequence: Synthetic oligonucleotide
gcccucacgucacaccccu

SEQ ID NO: 244599 - RNA, 19 nt, Artificial Sequence
  Description of Artificial Sequence: Synthetic oligonucleotide
gccuucuagcaaucacggu

SEQ ID NO: 244600 - RNA, 19 nt, Artificial Sequence
  Description of Artificial Sequence: Synthetic oligonucleotide
cgcuaacagauaagacaga

SEQ ID NO: 244601 - RNA, 19 nt, Artificial Sequence
  Description of Artificial Sequence: Synthetic oligonucleotide
caaucccuugaccgucaau

SEQ ID NO: 244602 - RNA, 19 nt, Artificial Sequence
  Description of Artificial Sequence: Synthetic oligonucleotide
cgucaauggucugucugca

SEQ ID NO: 244603 - RNA, 19 nt, Artificial Sequence
  Description of Artificial Sequence: Synthetic oligonucleotide
guaggaucauggaguccuu

SEQ ID NO: 244604 - RNA, 19 nt, Artificial Sequence
  Description of Artificial Sequence: Synthetic oligonucleotide
gcguggugucacccugaga

SEQ ID NO: 244605 - RNA, 19 nt, Artificial Sequence
  Description of Artificial Sequence: Synthetic oligonucleotide
ccgcgaugauacgcucugu

SEQ ID NO: 244606 - RNA, 19 nt, Artificial Sequence
  Description of Artificial Sequence: Synthetic oligonucleotide
aaacauuaguguuaagugc

SEQ ID NO: 244607 - RNA, 19 nt, Artificial Sequence
  Description of Artificial Sequence: Synthetic oligonucleotide
aauuuugauguacucauac

SEQ ID NO: 244608 - RNA, 19 nt, Artificial Sequence
  Description of Artificial Sequence: Synthetic oligonucleotide
uguuagauaauccagacuc

SEQ ID NO: 244609 - RNA, 19 nt, Artificial Sequence
  Description of Artificial Sequence: Synthetic oligonucleotide
aauguuagauaauccagac

SEQ ID NO: 244610 - RNA, 19 nt, Artificial Sequence
  Description of Artificial Sequence: Synthetic oligonucleotide
aauacugggaucgugacuc

SEQ ID NO: 244611 - RNA, 19 nt, Artificial Sequence
  Description of Artificial Sequence: Synthetic oligonucleotide
gaugcaaauauuaaguagg

SEQ ID NO: 244612 - RNA, 19 nt, Artificial Sequence
  Description of Artificial Sequence: Synthetic oligonucleotide
uguguaauaccauagacgu

SEQ ID NO: 244613 - RNA, 19 nt, Artificial Sequence
  Description of Artificial Sequence: Synthetic oligonucleotide
auuuaaguggguuucgcgc

SEQ ID NO: 244614 - RNA, 19 nt, Artificial Sequence
  Description of Artificial Sequence: Synthetic oligonucleotide
uguaauauagaaaguggag

SEQ ID NO: 244615 - RNA, 19 nt, Artificial Sequence
  Description of Artificial Sequence: Synthetic oligonucleotide
aaaagugaaguucuggacu

SEQ ID NO: 244616 - RNA, 19 nt, Artificial Sequence
  Description of Artificial Sequence: Synthetic oligonucleotide
acugauuaaagcuccacac

SEQ ID NO: 244617 - RNA, 19 nt, Artificial Sequence
  Description of Artificial Sequence: Synthetic oligonucleotide
agcucguucauuuaagugg

SEQ ID NO: 244618 - RNA, 19 nt, Artificial Sequence
  Description of Artificial Sequence: Synthetic oligonucleotide
uauuaaguaggccauaaaa

SEQ ID NO: 244619 - RNA, 19 nt, Artificial Sequence
  Description of Artificial Sequence: Synthetic oligonucleotide
acaccuaauagauaccuac

SEQ ID NO: 244620 - RNA, 19 nt, Artificial Sequence
  Description of Artificial Sequence: Synthetic oligonucleotide
auaguguaggauuuaaaag

SEQ ID NO: 244621 - RNA, 19 nt, Artificial Sequence
  Description of Artificial Sequence: Synthetic oligonucleotide
caaccuguauucuagauag

SEQ ID NO: 244622 - RNA, 19 nt, Artificial Sequence
  Description of Artificial Sequence: Synthetic oligonucleotide
ugauauaccacacuaggaa

SEQ ID NO: 244623 - RNA, 19 nt, Artificial Sequence
  Description of Artificial Sequence: Synthetic oligonucleotide
ugcuauguaaauaucauua

SEQ ID NO: 244624 - RNA, 19 nt, Artificial Sequence
  Description of Artificial Sequence: Synthetic oligonucleotide
uuaagauguaaugaccugg

SEQ ID NO: 244625 - RNA, 19 nt, Artificial Sequence
  Description of Artificial Sequence: Synthetic oligonucleotide
aaagugaaguucuggacug

SEQ ID NO: 244626 - RNA, 19 nt, Artificial Sequence
  Description of Artificial Sequence: Synthetic oligonucleotide
agaauugguggcaauaugc

SEQ ID NO: 244627 - RNA, 19 nt, Artificial Sequence
  Description of Artificial Sequence: Synthetic oligonucleotide
uucacacggacaaagagca

SEQ ID NO: 244628 - RNA, 19 nt, Artificial Sequence
  Description of Artificial Sequence: Synthetic oligonucleotide
aacuuaaguccacaccugg

SEQ ID NO: 244629 - RNA, 19 nt, Artificial Sequence
  Description of Artificial Sequence: Synthetic oligonucleotide
uuauaaagaccuuggacca

SEQ ID NO: 244630 - RNA, 19 nt, Artificial Sequence
  Description of Artificial Sequence: Synthetic oligonucleotide
cuguguaauaccauagacg

SEQ ID NO: 244631 - RNA, 19 nt, Artificial Sequence
  Description of Artificial Sequence: Synthetic oligonucleotide
uguaauaccauagacguau

SEQ ID NO: 244632 - RNA, 19 nt, Artificial Sequence
  Description of Artificial Sequence: Synthetic oligonucleotide
agaguaaagacuacaaggg

SEQ ID NO: 244633 - RNA, 19 nt, Artificial Sequence
  Description of Artificial Sequence: Synthetic oligonucleotide
ucuagauagacaaguauaa

SEQ ID NO: 244634 - RNA, 19 nt, Artificial Sequence
  Description of Artificial Sequence: Synthetic oligonucleotide
uaucaguagaucaugggac

SEQ ID NO: 244635 - RNA, 19 nt, Artificial Sequence
  Description of Artificial Sequence: Synthetic oligonucleotide
auuaaugccagagcagugc

SEQ ID NO: 244636 - RNA, 19 nt, Artificial Sequence
  Description of Artificial Sequence: Synthetic oligonucleotide
ucaacaauaguguaggauu

SEQ ID NO: 244637 - RNA, 19 nt, Artificial Sequence
  Description of Artificial Sequence: Synthetic oligonucleotide
  modified_base (10)..(10): a, c, u, g, unknown or other
aacuuaugcnccaccauuc

SEQ ID NO: 244638 - RNA, 19 nt, Artificial Sequence
  Description of Artificial Sequence: Synthetic oligonucleotide
uaguagaauagugagacug

SEQ ID NO: 244639 - RNA, 19 nt, Artificial Sequence
  Description of Artificial Sequence: Synthetic oligonucleotide
caacguuaauguaauauag

SEQ ID NO: 244640 - RNA, 19 nt, Artificial Sequence
  Description of Artificial Sequence: Synthetic oligonucleotide
ucuaucaguagaucauggg

SEQ ID NO: 244641 - RNA, 19 nt, Artificial Sequence
  Description of Artificial Sequence: Synthetic oligonucleotide
guaaugaccugguuaaucc

SEQ ID NO: 244642 - RNA, 19 nt, Artificial Sequence
  Description of Artificial Sequence: Synthetic oligonucleotide
gauguaaugaccugguuaa

SEQ ID NO: 244643 - RNA, 19 nt, Artificial Sequence
  Description of Artificial Sequence: Synthetic oligonucleotide
ugagccaacguuaauguaa

SEQ ID NO: 244644 - RNA, 19 nt, Artificial Sequence
  Description of Artificial Sequence: Synthetic oligonucleotide
uccgauauagaaaauuuua

SEQ ID NO: 244645 - RNA, 19 nt, Artificial Sequence
  Description of Artificial Sequence: Synthetic oligonucleotide
acacugauauauauuauac

SEQ ID NO: 244646 - RNA, 19 nt, Artificial Sequence
  Description of Artificial Sequence: Synthetic oligonucleotide
acaggaauucaauacauau

SEQ ID NO: 244647 - RNA, 19 nt, Artificial Sequence
  Description of Artificial Sequence: Synthetic oligonucleotide
gacucuuaugcucacauga

SEQ ID NO: 244648 - RNA, 19 nt, Artificial Sequence
  Description of Artificial Sequence: Synthetic oligonucleotide
cuaacaauguuagauaauc

SEQ ID NO: 244649 - RNA, 19 nt, Artificial Sequence
  Description of Artificial Sequence: Synthetic oligonucleotide
uuugucacgaggcaccugu

SEQ ID NO: 244650 - RNA, 19 nt, Artificial Sequence
  Description of Artificial Sequence: Synthetic oligonucleotide
gugguuauaugcaugagcc

SEQ ID NO: 244651 - RNA, 19 nt, Artificial Sequence
  Description of Artificial Sequence: Synthetic oligonucleotide
cuuacugugauuuguuuuc

SEQ ID NO: 244652 - RNA, 19 nt, Artificial Sequence
  Description of Artificial Sequence: Synthetic oligonucleotide
ucagaucucggaaaguaac

SEQ ID NO: 244653 - RNA, 19 nt, Artificial Sequence
  Description of Artificial Sequence: Synthetic oligonucleotide
acguuaauguaauauagaa

SEQ ID NO: 244654 - RNA, 19 nt, Artificial Sequence
  Description of Artificial Sequence: Synthetic oligonucleotide
uuuuaucgccaaaagccgc

SEQ ID NO: 244655 - RNA, 19 nt, Artificial Sequence
  Description of Artificial Sequence: Synthetic oligonucleotide
uuuaaguggguuucgcgca

SEQ ID NO: 244656 - RNA, 19 nt, Artificial Sequence
  Description of Artificial Sequence: Synthetic oligonucleotide
uguauucuagauagacaag

SEQ ID NO: 244657 - RNA, 19 nt, Artificial Sequence
  Description of Artificial Sequence: Synthetic oligonucleotide
uccgauugcauagauguag

SEQ ID NO: 244658 - RNA, 19 nt, Artificial Sequence
  Description of Artificial Sequence: Synthetic oligonucleotide
uaugcaugagccaacguua

SEQ ID NO: 244659 - RNA, 19 nt, Artificial Sequence
  Description of Artificial Sequence: Synthetic oligonucleotide
aaugcucguuauuaaauua

SEQ ID NO: 244660 - RNA, 19 nt, Artificial Sequence
  Description of Artificial Sequence: Synthetic oligonucleotide
ugcaccuaguagaauagug

SEQ ID NO: 244661 - RNA, 19 nt, Artificial Sequence
  Description of Artificial Sequence: Synthetic oligonucleotide
auuucuacccacgagucag

SEQ ID NO: 244662 - RNA, 19 nt, Artificial Sequence
  Description of Artificial Sequence: Synthetic oligonucleotide
ugcaccgaaaaucucuccc

SEQ ID NO: 244663 - RNA, 19 nt, Artificial Sequence
  Description of Artificial Sequence: Synthetic oligonucleotide
aaccuauuucauauuacag

SEQ ID NO: 244664 - RNA, 19 nt, Artificial Sequence
  Description of Artificial Sequence: Synthetic oligonucleotide
ucuagccacagcauugcag

SEQ ID NO: 244665 - RNA, 19 nt, Artificial Sequence
  Description of Artificial Sequence: Synthetic oligonucleotide
auacuuaguccuuuuauau

SEQ ID NO: 244666 - RNA, 19 nt, Artificial Sequence
  Description of Artificial Sequence: Synthetic oligonucleotide
auuaagauguaaugaccug

SEQ ID NO: 244667 - RNA, 19 nt, Artificial Sequence
  Description of Artificial Sequence: Synthetic oligonucleotide
accuguauucuagauagac

SEQ ID NO: 244668 - RNA, 19 nt, Artificial Sequence
  Description of Artificial Sequence: Synthetic oligonucleotide
accaacacuaucuccuccg

SEQ ID NO: 244669 - RNA, 19 nt, Artificial Sequence
  Description of Artificial Sequence: Synthetic oligonucleotide
cauuuaaguggguuucgcg

SEQ ID NO: 244670 - RNA, 19 nt, Artificial Sequence
  Description of Artificial Sequence: Synthetic oligonucleotide
uauaagucagugggaaggg

SEQ ID NO: 244671 - RNA, 19 nt, Artificial Sequence
  Description of Artificial Sequence: Synthetic oligonucleotide
acaguacacguucagauau

SEQ ID NO: 244672 - RNA, 19 nt, Artificial Sequence
  Description of Artificial Sequence: Synthetic oligonucleotide
aguuacugaagacccaucu

SEQ ID NO: 244673 - RNA, 19 nt, Artificial Sequence
  Description of Artificial Sequence: Synthetic oligonucleotide
uuuaucgccaaaagccgca

SEQ ID NO: 244674 - RNA, 19 nt, Artificial Sequence
  Description of Artificial Sequence: Synthetic oligonucleotide
guaagugaccagcugacug

SEQ ID NO: 244675 - RNA, 19 nt, Artificial Sequence
  Description of Artificial Sequence: Synthetic oligonucleotide
  modified_base (17)..(17): a, c, u, g, unknown or other
agcagugaacuuaugcncc

SEQ ID NO: 244676 - RNA, 19 nt, Artificial Sequence
  Description of Artificial Sequence: Synthetic oligonucleotide
aagugcaucaauucugauu

SEQ ID NO: 244677 - RNA, 19 nt, Artificial Sequence
  Description of Artificial Sequence: Synthetic oligonucleotide
gauaucacaagucuggcau

SEQ ID NO: 244678 - RNA, 19 nt, Artificial Sequence
  Description of Artificial Sequence: Synthetic oligonucleotide
augcaaauauuaaguaggc

SEQ ID NO: 244679 - RNA, 19 nt, Artificial Sequence
  Description of Artificial Sequence: Synthetic oligonucleotide
gaaccaagcucucugugug

SEQ ID NO: 244680 - RNA, 19 nt, Artificial Sequence
  Description of Artificial Sequence: Synthetic oligonucleotide
agauguaaugaccugguua

SEQ ID NO: 244681 - RNA, 19 nt, Artificial Sequence
  Description of Artificial Sequence: Synthetic oligonucleotide
uggguuucgcgcauaaaca

SEQ ID NO: 244682 - RNA, 19 nt, Artificial Sequence
  Description of Artificial Sequence: Synthetic oligonucleotide
aaagacuacaaggguuuuc

SEQ ID NO: 244683 - RNA, 19 nt, Artificial Sequence
  Description of Artificial Sequence: Synthetic oligonucleotide
aagaucugcuagucugccg

SEQ ID NO: 244684 - RNA, 19 nt, Artificial Sequence
  Description of Artificial Sequence: Synthetic oligonucleotide
auagacguauaggagaucu

SEQ ID NO: 244685 - RNA, 19 nt, Artificial Sequence
  Description of Artificial Sequence: Synthetic oligonucleotide
uccgguuaaguucuccacc

SEQ ID NO: 244686 - RNA, 19 nt, Artificial Sequence
  Description of Artificial Sequence: Synthetic oligonucleotide
auaugcaugagccaacguu

SEQ ID NO: 244687 - RNA, 19 nt, Artificial Sequence
  Description of Artificial Sequence: Synthetic oligonucleotide
auacacagggcuaacaaug

SEQ ID NO: 244688 - RNA, 19 nt, Artificial Sequence
  Description of Artificial Sequence: Synthetic oligonucleotide
cuuagcucguucauuuaag

SEQ ID NO: 244689 - RNA, 19 nt, Artificial Sequence
  Description of Artificial Sequence: Synthetic oligonucleotide
aaugagggacuagcaauuc

SEQ ID NO: 244690 - RNA, 19 nt, Artificial Sequence
  Description of Artificial Sequence: Synthetic oligonucleotide
aacguuaauguaauauaga

SEQ ID NO: 244691 - RNA, 19 nt, Artificial Sequence
  Description of Artificial Sequence: Synthetic oligonucleotide
uuaagugcagcugaauuau

SEQ ID NO: 244692 - RNA, 19 nt, Artificial Sequence
  Description of Artificial Sequence: Synthetic oligonucleotide
agcacaauucugauauacc

SEQ ID NO: 244693 - RNA, 19 nt, Artificial Sequence
  Description of Artificial Sequence: Synthetic oligonucleotide
gacuacaaggguuuucuga

SEQ ID NO: 244694 - RNA, 19 nt, Artificial Sequence
  Description of Artificial Sequence: Synthetic oligonucleotide
aguaaugcucguuauuaaa

SEQ ID NO: 244695 - RNA, 19 nt, Artificial Sequence
  Description of Artificial Sequence: Synthetic oligonucleotide
uauuauacugaugcaaaua

SEQ ID NO: 244696 - RNA, 19 nt, Artificial Sequence
  Description of Artificial Sequence: Synthetic oligonucleotide
cuaucaguagaucauggga

SEQ ID NO: 244697 - RNA, 19 nt, Artificial Sequence
  Description of Artificial Sequence: Synthetic oligonucleotide
guuaauccacucuaaaucu

SEQ ID NO: 244698 - RNA, 19 nt, Artificial Sequence
  Description of Artificial Sequence: Synthetic oligonucleotide
caaauaaccuauuucauau

SEQ ID NO: 244699 - RNA, 19 nt, Artificial Sequence
  Description of Artificial Sequence: Synthetic oligonucleotide
caugcaccuaguagaauag

SEQ ID NO: 244700 - RNA, 19 nt, Artificial Sequence
  Description of Artificial Sequence: Synthetic oligonucleotide
uuagcucguucauuuaagu

SEQ ID NO: 244701 - RNA, 19 nt, Artificial Sequence
  Description of Artificial Sequence: Synthetic oligonucleotide
uguaaugaccugguuaauc

SEQ ID NO: 244702 - RNA, 19 nt, Artificial Sequence
  Description of Artificial Sequence: Synthetic oligonucleotide
uagcucguucauuuaagug

SEQ ID NO: 244703 - RNA, 19 nt, Artificial Sequence
  Description of Artificial Sequence: Synthetic oligonucleotide
uauauccucugguuuuagc

SEQ ID NO: 244704 - RNA, 19 nt, Artificial Sequence
  Description of Artificial Sequence: Synthetic oligonucleotide
ucggaaaguaacaguacau

SEQ ID NO: 244705 - RNA, 19 nt, Artificial Sequence
  Description of Artificial Sequence: Synthetic oligonucleotide
acguucagauaugugcugc

SEQ ID NO: 244706 - RNA, 19 nt, Artificial Sequence
  Description of Artificial Sequence: Synthetic oligonucleotide
uuaugcaagucagcuggcg

SEQ ID NO: 244707 - RNA, 19 nt, Artificial Sequence
  Description of Artificial Sequence: Synthetic oligonucleotide
ccuaguagaauagugagac

SEQ ID NO: 244708 - RNA, 19 nt, Artificial Sequence
  Description of Artificial Sequence: Synthetic oligonucleotide
uacuuaguccuuuuauauc

SEQ ID NO: 244709 - RNA, 19 nt, Artificial Sequence
  Description of Artificial Sequence: Synthetic oligonucleotide
auagugagacugauccugc

SEQ ID NO: 244710 - RNA, 19 nt, Artificial Sequence
  Description of Artificial Sequence: Synthetic oligonucleotide
agaucucggaaaguaacag

SEQ ID NO: 244711 - RNA, 19 nt, Artificial Sequence
  Description of Artificial Sequence: Synthetic oligonucleotide
uaaugaccugguuaaucca

SEQ ID NO: 244712 - RNA, 19 nt, Artificial Sequence
  Description of Artificial Sequence: Synthetic oligonucleotide
aucgccaaaagccgcagcu

SEQ ID NO: 244713 - RNA, 19 nt, Artificial Sequence
  Description of Artificial Sequence: Synthetic oligonucleotide
  modified_base (12)..(12): a, c, u, g, unknown or other
ugaacuuaugcnccaccau

SEQ ID NO: 244714 - RNA, 19 nt, Artificial Sequence
  Description of Artificial Sequence: Synthetic oligonucleotide
cuagauagacaaguauaag

SEQ ID NO: 244715 - RNA, 19 nt, Artificial Sequence
  Description of Artificial Sequence: Synthetic oligonucleotide
cuacccacgagucagaucu

SEQ ID NO: 244716 - RNA, 19 nt, Artificial Sequence
  Description of Artificial Sequence: Synthetic oligonucleotide
ugcagacgacuccugcacg

SEQ ID NO: 244717 - RNA, 19 nt, Artificial Sequence
  Description of Artificial Sequence: Synthetic oligonucleotide
gaaagugcaucaauucuga

SEQ ID NO: 244718 - RNA, 19 nt, Artificial Sequence
  Description of Artificial Sequence: Synthetic oligonucleotide
cagagcauuaugcaguuga

SEQ ID NO: 244719 - RNA, 19 nt, Artificial Sequence
  Description of Artificial Sequence: Synthetic oligonucleotide
auguuagauaauccagacu

SEQ ID NO: 244720 - RNA, 19 nt, Artificial Sequence
  Description of Artificial Sequence: Synthetic oligonucleotide
ucguaucuuucuacagucc

SEQ ID NO: 244721 - RNA, 19 nt, Artificial Sequence
  Description of Artificial Sequence: Synthetic oligonucleotide
acguauaggagaucuuccu

SEQ ID NO: 244722 - RNA, 19 nt, Artificial Sequence
  Description of Artificial Sequence: Synthetic oligonucleotide
ugacuggacaaccuguauu

SEQ ID NO: 244723 - RNA, 19 nt, Artificial Sequence
  Description of Artificial Sequence: Synthetic oligonucleotide
uuaugcaguugaacaugcc

SEQ ID NO: 244724 - RNA, 19 nt, Artificial Sequence
  Description of Artificial Sequence: Synthetic oligonucleotide
caagguaaagggcucacca

SEQ ID NO: 244725 - RNA, 19 nt, Artificial Sequence
  Description of Artificial Sequence: Synthetic oligonucleotide
uaucagggguuacaacugu

SEQ ID NO: 244726 - RNA, 19 nt, Artificial Sequence
  Description of Artificial Sequence: Synthetic oligonucleotide
gguuacaacugucccaacc

SEQ ID NO: 244727 - RNA, 19 nt, Artificial Sequence
  Description of Artificial Sequence: Synthetic oligonucleotide
gacuuauaaagaccuugga

SEQ ID NO: 244728 - RNA, 19 nt, Artificial Sequence
  Description of Artificial Sequence: Synthetic oligonucleotide
gaauugguggcaauaugca

SEQ ID NO: 244729 - RNA, 19 nt, Artificial Sequence
  Description of Artificial Sequence: Synthetic oligonucleotide
ggcaauaugcaacccuccg

SEQ ID NO: 244730 - RNA, 19 nt, Artificial Sequence
  Description of Artificial Sequence: Synthetic oligonucleotide
aagauagaauuuugaugua

SEQ ID NO: 244731 - RNA, 19 nt, Artificial Sequence
  Description of Artificial Sequence: Synthetic oligonucleotide
acacggacaaagagcaucg

SEQ ID NO: 244732 - RNA, 19 nt, Artificial Sequence
  Description of Artificial Sequence: Synthetic oligonucleotide
accagguauuuuguugggc

SEQ ID NO: 244733 - RNA, 19 nt, Artificial Sequence
  Description of Artificial Sequence: Synthetic oligonucleotide
uggcaauaugcaacccucc

SEQ ID NO: 244734 - RNA, 19 nt, Artificial Sequence
  Description of Artificial Sequence: Synthetic oligonucleotide
ccaaccuuaugcaagucag

SEQ ID NO: 244735 - RNA, 19 nt, Artificial Sequence
  Description of Artificial Sequence: Synthetic oligonucleotide
auaccuacacacaaucacu

SEQ ID NO: 244736 - RNA, 19 nt, Artificial Sequence
  Description of Artificial Sequence: Synthetic oligonucleotide
ucugcuagucugccgcaug

SEQ ID NO: 244737 - RNA, 19 nt, Artificial Sequence
  Description of Artificial Sequence: Synthetic oligonucleotide
guuacaacugucccaaccu

SEQ ID NO: 244738 - RNA, 19 nt, Artificial Sequence
  Description of Artificial Sequence: Synthetic oligonucleotide
guuucgcgcauaaacacac

SEQ ID NO: 244739 - RNA, 19 nt, Artificial Sequence
  Description of Artificial Sequence: Synthetic oligonucleotide
cauuaucagggguuacaac

SEQ ID NO: 244740 - RNA, 19 nt, Artificial Sequence
  Description of Artificial Sequence: Synthetic oligonucleotide
caaaggauaucacaagucu

SEQ ID NO: 244741 - RNA, 19 nt, Artificial Sequence
  Description of Artificial Sequence: Synthetic oligonucleotide
cugauauaccacacuagga

SEQ ID NO: 244742 - RNA, 19 nt, Artificial Sequence
  Description of Artificial Sequence: Synthetic oligonucleotide
guucagauaugugcugccg

SEQ ID NO: 244743 - RNA, 19 nt, Artificial Sequence
  Description of Artificial Sequence: Synthetic oligonucleotide
agguauuuuguugggcauc

SEQ ID NO: 244744 - RNA, 19 nt, Artificial Sequence
  Description of Artificial Sequence: Synthetic oligonucleotide
uuacugauuaaagcuccac

SEQ ID NO: 244745 - RNA, 19 nt, Artificial Sequence
  Description of Artificial Sequence: Synthetic oligonucleotide
aucauuaucagggguuaca

SEQ ID NO: 244746 - RNA, 19 nt, Artificial Sequence
  Description of Artificial Sequence: Synthetic oligonucleotide
cugauuaaagcuccacaca

SEQ ID NO: 244747 - RNA, 19 nt, Artificial Sequence
  Description of Artificial Sequence: Synthetic oligonucleotide
agugcaccgaaaaucucuc

SEQ ID NO: 244748 - RNA, 19 nt, Artificial Sequence
  Description of Artificial Sequence: Synthetic oligonucleotide
cucggaaaguaacaguaca

SEQ ID NO: 244749 - RNA, 19 nt, Artificial Sequence
  Description of Artificial Sequence: Synthetic oligonucleotide
ggaucagaguaccuuuuag

SEQ ID NO: 244750 - RNA, 19 nt, Artificial Sequence
  Description of Artificial Sequence: Synthetic oligonucleotide
caaccuuaugcaagucagc

SEQ ID NO: 244751 - RNA, 19 nt, Artificial Sequence
  Description of Artificial Sequence: Synthetic oligonucleotide
cagggguuacaacuguccc

SEQ ID NO: 244752 - RNA, 19 nt, Artificial Sequence
  Description of Artificial Sequence: Synthetic oligonucleotide
agggguuacaacuguccca

SEQ ID NO: 244753 - RNA, 19 nt, Artificial Sequence
  Description of Artificial Sequence: Synthetic oligonucleotide
ucagugucguaucuuucua

SEQ ID NO: 244754 - RNA, 19 nt, Artificial Sequence
  Description of Artificial Sequence: Synthetic oligonucleotide
accugguuaauccacucua

SEQ ID NO: 244755 - RNA, 19 nt, Artificial Sequence
  Description of Artificial Sequence: Synthetic oligonucleotide
aaagggaauuggagaucac

SEQ ID NO: 244756 - RNA, 19 nt, Artificial Sequence
  Description of Artificial Sequence: Synthetic oligonucleotide
uucuacaguccuccgguua

SEQ ID NO: 244757 - RNA, 19 nt, Artificial Sequence
  Description of Artificial Sequence: Synthetic oligonucleotide
ucccacaguacacguucag

SEQ ID NO: 244758 - RNA, 19 nt, Artificial Sequence
  Description of Artificial Sequence: Synthetic oligonucleotide
cugcuagucugccgcaugg

SEQ ID NO: 244759 - RNA, 19 nt, Artificial Sequence
  Description of Artificial Sequence: Synthetic oligonucleotide
uaugcaacccuccgauaua

SEQ ID NO: 244760 - RNA, 19 nt, Artificial Sequence
  Description of Artificial Sequence: Synthetic oligonucleotide
aaccaagcucucuguguga

SEQ ID NO: 244761 - RNA, 19 nt, Artificial Sequence
  Description of Artificial Sequence: Synthetic oligonucleotide
augcaacccuccgauauag

SEQ ID NO: 244762 - RNA, 19 nt, Artificial Sequence
  Description of Artificial Sequence: Synthetic oligonucleotide
uggccauuucuacccacga

SEQ ID NO: 244763 - RNA, 19 nt, Artificial Sequence
  Description of Artificial Sequence: Synthetic oligonucleotide
gguuauaugcaugagccaa

SEQ ID NO: 244764 - RNA, 19 nt, Artificial Sequence
  Description of Artificial Sequence: Synthetic oligonucleotide
uaucgccaaaagccgcagc

SEQ ID NO: 244765 - RNA, 19 nt, Artificial Sequence
  Description of Artificial Sequence: Synthetic oligonucleotide
uacugugauuuguuuucgu

SEQ ID NO: 244766 - RNA, 19 nt, Artificial Sequence
  Description of Artificial Sequence: Synthetic oligonucleotide
cugugcucauguugcauug

SEQ ID NO: 244767 - RNA, 19 nt, Artificial Sequence
  Description of Artificial Sequence: Synthetic oligonucleotide
cuuaaguccacaccuggua

SEQ ID NO: 244768 - RNA, 19 nt, Artificial Sequence
  Description of Artificial Sequence: Synthetic oligonucleotide
uuaucgccaaaagccgcag

SEQ ID NO: 244769 - RNA, 19 nt, Artificial Sequence
  Description of Artificial Sequence: Synthetic oligonucleotide
  modified_base (11)..(11): a, c, u, g, unknown or other
gaacuuaugcnccaccauu

SEQ ID NO: 244770 - RNA, 19 nt, Artificial Sequence
  Description of Artificial Sequence: Synthetic oligonucleotide
agacgacuccugcacgcuc

SEQ ID NO: 244771 - RNA, 19 nt, Artificial Sequence
  Description of Artificial Sequence: Synthetic oligonucleotide
aacgccuccuggugguaca

SEQ ID NO: 244772 - RNA, 19 nt, Artificial Sequence
  Description of Artificial Sequence: Synthetic oligonucleotide
uuucgcgcauaaacacaca

SEQ ID NO: 244773 - RNA, 19 nt, Artificial Sequence
  Description of Artificial Sequence: Synthetic oligonucleotide
auaucauuaucagggguua

SEQ ID NO: 244774 - RNA, 19 nt, Artificial Sequence
  Description of Artificial Sequence: Synthetic oligonucleotide
cuuucuacaguccuccggu

SEQ ID NO: 244775 - RNA, 19 nt, Artificial Sequence
  Description of Artificial Sequence: Synthetic oligonucleotide
uacugggaucgugacuccg

SEQ ID NO: 244776 - RNA, 19 nt, Artificial Sequence
  Description of Artificial Sequence: Synthetic oligonucleotide
agcaucggugucuuuggaa

SEQ ID NO: 244777 - RNA, 19 nt, Artificial Sequence
  Description of Artificial Sequence: Synthetic oligonucleotide
cacguucagauaugugcug

SEQ ID NO: 244778 - RNA, 19 nt, Artificial Sequence
  Description of Artificial Sequence: Synthetic oligonucleotide
ugaccugguuaauccacuc

SEQ ID NO: 244779 - RNA, 19 nt, Artificial Sequence
  Description of Artificial Sequence: Synthetic oligonucleotide
ggguuucgcgcauaaacac

SEQ ID NO: 244780 - RNA, 19 nt, Artificial Sequence
  Description of Artificial Sequence: Synthetic oligonucleotide
cuaagaacugaagacaaau

SEQ ID NO: 244781 - RNA, 19 nt, Artificial Sequence
  Description of Artificial Sequence: Synthetic oligonucleotide
cguguuguacucuagccac

SEQ ID NO: 244782 - RNA, 19 nt, Artificial Sequence
  Description of Artificial Sequence: Synthetic oligonucleotide
augcucguuauuaaauuaa

SEQ ID NO: 244783 - RNA, 19 nt, Artificial Sequence
  Description of Artificial Sequence: Synthetic oligonucleotide
caugauacacauaguuucu

SEQ ID NO: 244784 - RNA, 19 nt, Artificial Sequence
  Description of Artificial Sequence: Synthetic oligonucleotide
uaucauuaucagggguuac

SEQ ID NO: 244785 - RNA, 19 nt, Artificial Sequence
  Description of Artificial Sequence: Synthetic oligonucleotide
ucguucauuuaaguggguu

SEQ ID NO: 244786 - RNA, 19 nt, Artificial Sequence
  Description of Artificial Sequence: Synthetic oligonucleotide
acccacgagucagaucucg

SEQ ID NO: 244787 - RNA, 19 nt, Artificial Sequence
  Description of Artificial Sequence: Synthetic oligonucleotide
gaagcauaucuuucuguau

SEQ ID NO: 244788 - RNA, 19 nt, Artificial Sequence
  Description of Artificial Sequence: Synthetic oligonucleotide
caauaugcaacccuccgau

SEQ ID NO: 244789 - RNA, 19 nt, Artificial Sequence
  Description of Artificial Sequence: Synthetic oligonucleotide
cauggccauuucuacccac

SEQ ID NO: 244790 - RNA, 19 nt, Artificial Sequence
  Description of Artificial Sequence: Synthetic oligonucleotide
acuuaaguccacaccuggu

SEQ ID NO: 244791 - RNA, 19 nt, Artificial Sequence
  Description of Artificial Sequence: Synthetic oligonucleotide
accuaguagaauagugaga

SEQ ID NO: 244792 - RNA, 19 nt, Artificial Sequence
  Description of Artificial Sequence: Synthetic oligonucleotide
caacccuccgauauagaaa

SEQ ID NO: 244793 - RNA, 19 nt, Artificial Sequence
  Description of Artificial Sequence: Synthetic oligonucleotide
guaaugcucguuauuaaau

SEQ ID NO: 244794 - RNA, 19 nt, Artificial Sequence
  Description of Artificial Sequence: Synthetic oligonucleotide
acgacuccugcacgcucac

SEQ ID NO: 244795 - RNA, 19 nt, Artificial Sequence
  Description of Artificial Sequence: Synthetic oligonucleotide
aucauugggugggagcccu

SEQ ID NO: 244796 - RNA, 19 nt, Artificial Sequence
  Description of Artificial Sequence: Synthetic oligonucleotide
cgcauggccauuucuaccc

SEQ ID NO: 244797 - RNA, 19 nt, Artificial Sequence
  Description of Artificial Sequence: Synthetic oligonucleotide
cauuucuacccacgaguca

SEQ ID NO: 244798 - RNA, 19 nt, Artificial Sequence
  Description of Artificial Sequence: Synthetic oligonucleotide
ggauaucacaagucuggca

SEQ ID NO: 244799 - RNA, 19 nt, Artificial Sequence
  Description of Artificial Sequence: Synthetic oligonucleotide
ugcaacccuccgauauaga

SEQ ID NO: 244800 - RNA, 19 nt, Artificial Sequence
  Description of Artificial Sequence: Synthetic oligonucleotide
ccuccgauugcauagaugu

SEQ ID NO: 244801 - RNA, 19 nt, Artificial Sequence
  Description of Artificial Sequence: Synthetic oligonucleotide
uagacguauaggagaucuu

SEQ ID NO: 244802 - RNA, 19 nt, Artificial Sequence
  Description of Artificial Sequence: Synthetic oligonucleotide
gauuuaucauuggguggga

SEQ ID NO: 244803 - RNA, 19 nt, Artificial Sequence
  Description of Artificial Sequence: Synthetic oligonucleotide
gcagacgacuccugcacgc

SEQ ID NO: 244804 - RNA, 19 nt, Artificial Sequence
  Description of Artificial Sequence: Synthetic oligonucleotide
gaucugcuagucugccgca

SEQ ID NO: 244805 - RNA, 19 nt, Artificial Sequence
  Description of Artificial Sequence: Synthetic oligonucleotide
acucuuaugcucacaugau

SEQ ID NO: 244806 - RNA, 19 nt, Artificial Sequence
  Description of Artificial Sequence: Synthetic oligonucleotide
caguaaugcucguuauuaa

SEQ ID NO: 244807 - RNA, 19 nt, Artificial Sequence
  Description of Artificial Sequence: Synthetic oligonucleotide
cucuuaugcucacaugaua

SEQ ID NO: 244808 - RNA, 19 nt, Artificial Sequence
  Description of Artificial Sequence: Synthetic oligonucleotide
caguuacugaagacccauc

SEQ ID NO: 244809 - RNA, 19 nt, Artificial Sequence
  Description of Artificial Sequence: Synthetic oligonucleotide
ccaacguuaauguaauaua

SEQ ID NO: 244810 - RNA, 19 nt, Artificial Sequence
  Description of Artificial Sequence: Synthetic oligonucleotide
cugcauaacuuguaaacuu

SEQ ID NO: 244811 - RNA, 19 nt, Artificial Sequence
  Description of Artificial Sequence: Synthetic oligonucleotide
cacgagucagaucucggaa

SEQ ID NO: 244812 - RNA, 19 nt, Artificial Sequence
  Description of Artificial Sequence: Synthetic oligonucleotide
guacacguucagauaugug

SEQ ID NO: 244813 - RNA, 19 nt, Artificial Sequence
  Description of Artificial Sequence: Synthetic oligonucleotide
ggccauuucuacccacgag

SEQ ID NO: 244814 - RNA, 19 nt, Artificial Sequence
  Description of Artificial Sequence: Synthetic oligonucleotide
aggggagucuuaugccaga

SEQ ID NO: 244815 - RNA, 19 nt, Artificial Sequence
  Description of Artificial Sequence: Synthetic oligonucleotide
gacgacuccugcacgcuca

SEQ ID NO: 244816 - RNA, 19 nt, Artificial Sequence
  Description of Artificial Sequence: Synthetic oligonucleotide
gcaacccuccgauauagaa

SEQ ID NO: 244817 - RNA, 19 nt, Artificial Sequence
  Description of Artificial Sequence: Synthetic oligonucleotide
cccugcuauguaaauauca

SEQ ID NO: 244818 - RNA, 19 nt, Artificial Sequence
  Description of Artificial Sequence: Synthetic oligonucleotide
ucgugacuccguguuguac

SEQ ID NO: 244819 - RNA, 19 nt, Artificial Sequence
  Description of Artificial Sequence: Synthetic oligonucleotide
acgaugcuucaaugaaaau

SEQ ID NO: 244820 - RNA, 19 nt, Artificial Sequence
  Description of Artificial Sequence: Synthetic oligonucleotide
gaccugguuaauccacucu

SEQ ID NO: 244821 - RNA, 19 nt, Artificial Sequence
  Description of Artificial Sequence: Synthetic oligonucleotide
aaccuguauucuagauaga

SEQ ID NO: 244822 - RNA, 19 nt, Artificial Sequence
  Description of Artificial Sequence: Synthetic oligonucleotide
agacaaauacugggaucgu

SEQ ID NO: 244823 - RNA, 19 nt, Artificial Sequence
  Description of Artificial Sequence: Synthetic oligonucleotide
gggcuaacaauguuagaua

SEQ ID NO: 244824 - RNA, 19 nt, Artificial Sequence
  Description of Artificial Sequence: Synthetic oligonucleotide
uucuacccacgagucagau

SEQ ID NO: 244825 - RNA, 19 nt, Artificial Sequence
  Description of Artificial Sequence: Synthetic oligonucleotide
ccaugcaccuaguagaaua

SEQ ID NO: 244826 - RNA, 19 nt, Artificial Sequence
  Description of Artificial Sequence: Synthetic oligonucleotide
augcaccuaguagaauagu

SEQ ID NO: 244827 - RNA, 19 nt, Artificial Sequence
  Description of Artificial Sequence: Synthetic oligonucleotide
caaugagggacuagcaauu

SEQ ID NO: 244828 - RNA, 19 nt, Artificial Sequence
  Description of Artificial Sequence: Synthetic oligonucleotide
aaacuugggcauggacuua

SEQ ID NO: 244829 - RNA, 19 nt, Artificial Sequence
  Description of Artificial Sequence: Synthetic oligonucleotide
cacggacaaagagcaucgg

SEQ ID NO: 244830 - RNA, 19 nt, Artificial Sequence
  Description of Artificial Sequence: Synthetic oligonucleotide
gguuucgcgcauaaacaca

SEQ ID NO: 244831 - RNA, 19 nt, Artificial Sequence
  Description of Artificial Sequence: Synthetic oligonucleotide
cauagacguauaggagauc

SEQ ID NO: 244832 - RNA, 19 nt, Artificial Sequence
  Description of Artificial Sequence: Synthetic oligonucleotide
cgauugcauagauguagcc

SEQ ID NO: 244833 - RNA, 19 nt, Artificial Sequence
  Description of Artificial Sequence: Synthetic oligonucleotide
cugucccaaccuuaugcaa

SEQ ID NO: 244834 - RNA, 19 nt, Artificial Sequence
  Description of Artificial Sequence: Synthetic oligonucleotide
uccaccgaucaaguuccaa

SEQ ID NO: 244835 - RNA, 19 nt, Artificial Sequence
  Description of Artificial Sequence: Synthetic oligonucleotide
cuccgauauagaaaauuuu

SEQ ID NO: 244836 - RNA, 19 nt, Artificial Sequence
  Description of Artificial Sequence: Synthetic oligonucleotide
cacaccuaauagauaccua

SEQ ID NO: 244837 - RNA, 19 nt, Artificial Sequence
  Description of Artificial Sequence: Synthetic oligonucleotide
caccgaucaaguuccaaau

SEQ ID NO: 244838 - RNA, 19 nt, Artificial Sequence
  Description of Artificial Sequence: Synthetic oligonucleotide
gagccaacguuaauguaau

SEQ ID NO: 244839 - RNA, 19 nt, Artificial Sequence
  Description of Artificial Sequence: Synthetic oligonucleotide
cguucagauaugugcugcc

SEQ ID NO: 244840 - RNA, 19 nt, Artificial Sequence
  Description of Artificial Sequence: Synthetic oligonucleotide
gccaacguuaauguaauau

SEQ ID NO: 244841 - RNA, 19 nt, Artificial Sequence
  Description of Artificial Sequence: Synthetic oligonucleotide
gcugcauaacuuguaaacu

SEQ ID NO: 244842 - RNA, 19 nt, Artificial Sequence
  Description of Artificial Sequence: Synthetic oligonucleotide
acuccguguuguacucuag

SEQ ID NO: 244843 - RNA, 19 nt, Artificial Sequence
  Description of Artificial Sequence: Synthetic oligonucleotide
cccacgagucagaucucgg

SEQ ID NO: 244844 - RNA, 19 nt, Artificial Sequence
  Description of Artificial Sequence: Synthetic oligonucleotide
auguaaugaccugguuaau

SEQ ID NO: 244845 - RNA, 19 nt, Artificial Sequence
  Description of Artificial Sequence: Synthetic oligonucleotide
ccgauauagaaaauuuuau

SEQ ID NO: 244846 - RNA, 19 nt, Artificial Sequence
  Description of Artificial Sequence: Synthetic oligonucleotide
ccaccgaucaaguuccaaa

SEQ ID NO: 244847 - RNA, 19 nt, Artificial Sequence
  Description of Artificial Sequence: Synthetic oligonucleotide
agggaucagaguaccuuuu

SEQ ID NO: 244848 - RNA, 19 nt, Artificial Sequence
  Description of Artificial Sequence: Synthetic oligonucleotide
ccguguuguacucuagcca

SEQ ID NO: 244849 - RNA, 19 nt, Artificial Sequence
  Description of Artificial Sequence: Synthetic oligonucleotide
gucuuaugccagaauuggu

SEQ ID NO: 244850 - RNA, 19 nt, Artificial Sequence
  Description of Artificial Sequence: Synthetic oligonucleotide
guaauaccauagacguaua

SEQ ID NO: 244851 - RNA, 19 nt, Artificial Sequence
  Description of Artificial Sequence: Synthetic oligonucleotide
guguaauaccauagacgua

SEQ ID NO: 244852 - RNA, 19 nt, Artificial Sequence
  Description of Artificial Sequence: Synthetic oligonucleotide
agccaacguuaauguaaua

SEQ ID NO: 244853 - RNA, 19 nt, Artificial Sequence
  Description of Artificial Sequence: Synthetic oligonucleotide
aucugcuagucugccgcau

SEQ ID NO: 244854 - RNA, 19 nt, Artificial Sequence
  Description of Artificial Sequence: Synthetic oligonucleotide
cagggaucagaguaccuuu

SEQ ID NO: 244855 - RNA, 19 nt, Artificial Sequence
  Description of Artificial Sequence: Synthetic oligonucleotide
ccugguuaauccacucuaa

SEQ ID NO: 244856 - RNA, 19 nt, Artificial Sequence
  Description of Artificial Sequence: Synthetic oligonucleotide
gccagaggggagucuuaug

SEQ ID NO: 244857 - RNA, 19 nt, Artificial Sequence
  Description of Artificial Sequence: Synthetic oligonucleotide
cuccgauugcauagaugua

SEQ ID NO: 244858 - RNA, 19 nt, Artificial Sequence
  Description of Artificial Sequence: Synthetic oligonucleotide
ccauagacguauaggagau

SEQ ID NO: 244859 - RNA, 19 nt, Artificial Sequence
  Description of Artificial Sequence: Synthetic oligonucleotide
ccuccgauauagaaaauuu

SEQ ID NO: 244860 - RNA, 19 nt, Artificial Sequence
  Description of Artificial Sequence: Synthetic oligonucleotide
cuaucuccuccgauugcau

SEQ ID NO: 244861 - RNA, 19 nt, Artificial Sequence
  Description of Artificial Sequence: Synthetic oligonucleotide
caacacuaucuccuccgau

SEQ ID NO: 244862 - RNA, 19 nt, Artificial Sequence
  Description of Artificial Sequence: Synthetic oligonucleotide
ccccugcuauguaaauauc

SEQ ID NO: 244863 - RNA, 19 nt, Artificial Sequence
  Description of Artificial Sequence: Synthetic oligonucleotide
gguaagugaccagcugacu

SEQ ID NO: 244864 - RNA, 19 nt, Artificial Sequence
  Description of Artificial Sequence: Synthetic oligonucleotide
ccgcagaguccaccgauca

SEQ ID NO: 244865 - RNA, 19 nt, Artificial Sequence
  Description of Artificial Sequence: Synthetic oligonucleotide
cugcacgcucaccuuccua

SEQ ID NO: 244866 - RNA, 19 nt, Artificial Sequence
  Description of Artificial Sequence: Synthetic oligonucleotide
cagacgacuccugcacgcu

SEQ ID NO: 244867 - RNA, 19 nt, Artificial Sequence
  Description of Artificial Sequence: Synthetic oligonucleotide
cuccuccgauugcauagau

SEQ ID NO: 244868 - RNA, 19 nt, Artificial Sequence
  Description of Artificial Sequence: Synthetic oligonucleotide
ggcgggcugcauaacuugu

SEQ ID NO: 244869 - RNA, 19 nt, Artificial Sequence
  Description of Artificial Sequence: Synthetic oligonucleotide
ccgcacaaugagggacuag

SEQ ID NO: 244870 - RNA, 19 nt, Artificial Sequence
  Description of Artificial Sequence: Synthetic oligonucleotide
cccuccgauauagaaaauu

SEQ ID NO: 244871 - RNA, 19 nt, Artificial Sequence
  Description of Artificial Sequence: Synthetic oligonucleotide
gcgggcugcauaacuugua

SEQ ID NO: 244872 - RNA, 19 nt, Artificial Sequence
  Description of Artificial Sequence: Synthetic oligonucleotide
cccgcacaaugagggacua

SEQ ID NO: 244873 - RNA, 19 nt, Artificial Sequence
  Description of Artificial Sequence: Synthetic oligonucleotide
aaaucuucuaauuucaucc

SEQ ID NO: 244874 - RNA, 19 nt, Artificial Sequence
  Description of Artificial Sequence: Synthetic oligonucleotide
auaaacaacuuauuggggc

SEQ ID NO: 244875 - RNA, 19 nt, Artificial Sequence
  Description of Artificial Sequence: Synthetic oligonucleotide
aaugaguaaacaaagugac

SEQ ID NO: 244876 - RNA, 19 nt, Artificial Sequence
  Description of Artificial Sequence: Synthetic oligonucleotide
aguacuuacaaggucaucc

SEQ ID NO: 244877 - RNA, 19 nt, Artificial Sequence
  Description of Artificial Sequence: Synthetic oligonucleotide
uuuaagugaacacuugucc

SEQ ID NO: 244878 - RNA, 19 nt, Artificial Sequence
  Description of Artificial Sequence: Synthetic oligonucleotide
ucuuuuaccguucuuaucu

SEQ ID NO: 244879 - RNA, 19 nt, Artificial Sequence
  Description of Artificial Sequence: Synthetic oligonucleotide
aacucuagguuauuucugc

SEQ ID NO: 244880 - RNA, 19 nt, Artificial Sequence
  Description of Artificial Sequence: Synthetic oligonucleotide
uuaaccuuggcaaagggug

SEQ ID NO: 244881 - RNA, 19 nt, Artificial Sequence
  Description of Artificial Sequence: Synthetic oligonucleotide
aaauaaaucaaaugcacuu

SEQ ID NO: 244882 - RNA, 19 nt, Artificial Sequence
  Description of Artificial Sequence: Synthetic oligonucleotide
uuccaauagagcaaggcgg

SEQ ID NO: 244883 - RNA, 19 nt, Artificial Sequence
  Description of Artificial Sequence: Synthetic oligonucleotide
aaaguuagcauggaaaaug

SEQ ID NO: 244884 - RNA, 19 nt, Artificial Sequence
  Description of Artificial Sequence: Synthetic oligonucleotide
uauaaacaacuuauugggg

SEQ ID NO: 244885 - RNA, 19 nt, Artificial Sequence
  Description of Artificial Sequence: Synthetic oligonucleotide
aaccuaaauuuucagaggu

SEQ ID NO: 244886 - RNA, 19 nt, Artificial Sequence
  Description of Artificial Sequence: Synthetic oligonucleotide
ucuuuaaaugauuuuaauc

SEQ ID NO: 244887 - RNA, 19 nt, Artificial Sequence
  Description of Artificial Sequence: Synthetic oligonucleotide
aaagaauagccacaguggu

SEQ ID NO: 244888 - RNA, 19 nt, Artificial Sequence
  Description of Artificial Sequence: Synthetic oligonucleotide
aacuucuuuacaguccucc

SEQ ID NO: 244889 - RNA, 19 nt, Artificial Sequence
  Description of Artificial Sequence: Synthetic oligonucleotide
cucgucaguacuuacaagg

SEQ ID NO: 244890 - RNA, 19 nt, Artificial Sequence
  Description of Artificial Sequence: Synthetic oligonucleotide
acuauuuuggugcuuugac

SEQ ID NO: 244891 - RNA, 19 nt, Artificial Sequence
  Description of Artificial Sequence: Synthetic oligonucleotide
ucgaacuuuauaaagguuc

SEQ ID NO: 244892 - RNA, 19 nt, Artificial Sequence
  Description of Artificial Sequence: Synthetic oligonucleotide
uuguccuuauaucaaaacc

SEQ ID NO: 244893 - RNA, 19 nt, Artificial Sequence
  Description of Artificial Sequence: Synthetic oligonucleotide
auuuacaaaagcuccagcu

SEQ ID NO: 244894 - RNA, 19 nt, Artificial Sequence
  Description of Artificial Sequence: Synthetic oligonucleotide
ucaucaaauauccuuggcu

SEQ ID NO: 244895 - RNA, 19 nt, Artificial Sequence
  Description of Artificial Sequence: Synthetic oligonucleotide
aauuacuuggaauuguauu

SEQ ID NO: 244896 - RNA, 19 nt, Artificial Sequence
  Description of Artificial Sequence: Synthetic oligonucleotide
augguaaccuacuuaacuc

SEQ ID NO: 244897 - RNA, 19 nt, Artificial Sequence
  Description of Artificial Sequence: Synthetic oligonucleotide
aaaacagguuccaauagag

SEQ ID NO: 244898 - RNA, 19 nt, Artificial Sequence
  Description of Artificial Sequence: Synthetic oligonucleotide
uuacaagcuuucaugagug

SEQ ID NO: 244899 - RNA, 19 nt, Artificial Sequence
  Description of Artificial Sequence: Synthetic oligonucleotide
uccaucgaacuuuauaaag

SEQ ID NO: 244900 - RNA, 19 nt, Artificial Sequence
  Description of Artificial Sequence: Synthetic oligonucleotide
aaaauguugcagucagcuc

SEQ ID NO: 244901 - RNA, 19 nt, Artificial Sequence
  Description of Artificial Sequence: Synthetic oligonucleotide
guuccaauagagcaaggcg

SEQ ID NO: 244902 - RNA, 19 nt, Artificial Sequence
  Description of Artificial Sequence: Synthetic oligonucleotide
uccaauagagcaaggcggg

SEQ ID NO: 244903 - RNA, 19 nt, Artificial Sequence
  Description of Artificial Sequence: Synthetic oligonucleotide
ucuagguuauuucugcucu

SEQ ID NO: 244904 - RNA, 19 nt, Artificial Sequence
  Description of Artificial Sequence: Synthetic oligonucleotide
agcgcggccauacucaugc

SEQ ID NO: 244905 - RNA, 19 nt, Artificial Sequence
  Description of Artificial Sequence: Synthetic oligonucleotide
cuguugagaaaucuggucc

SEQ ID NO: 244906 - RNA, 19 nt, Artificial Sequence
  Description of Artificial Sequence: Synthetic oligonucleotide
uguuucaucaaauauccuu

SEQ ID NO: 244907 - RNA, 19 nt, Artificial Sequence
  Description of Artificial Sequence: Synthetic oligonucleotide
ugcuauugggaaaacaggu

SEQ ID NO: 244908 - RNA, 19 nt, Artificial Sequence
  Description of Artificial Sequence: Synthetic oligonucleotide
aguaaucccugauuguuuc

SEQ ID NO: 244909 - RNA, 19 nt, Artificial Sequence
  Description of Artificial Sequence: Synthetic oligonucleotide
uuggaauuguauuuguugu

SEQ ID NO: 244910 - RNA, 19 nt, Artificial Sequence
  Description of Artificial Sequence: Synthetic oligonucleotide
uaaccuacuuaacucuagg

SEQ ID NO: 244911 - RNA, 19 nt, Artificial Sequence
  Description of Artificial Sequence: Synthetic oligonucleotide
cucgcuauccccaaaggcc

SEQ ID NO: 244912 - RNA, 19 nt, Artificial Sequence
  Description of Artificial Sequence: Synthetic oligonucleotide
uuuuacaagcuuucaugag

SEQ ID NO: 244913 - RNA, 19 nt, Artificial Sequence
  Description of Artificial Sequence: Synthetic oligonucleotide
acaauguccgaauuuccuc

SEQ ID NO: 244914 - RNA, 19 nt, Artificial Sequence
  Description of Artificial Sequence: Synthetic oligonucleotide
acauucaaucacaaggcgc

SEQ ID NO: 244915 - RNA, 19 nt, Artificial Sequence
  Description of Artificial Sequence: Synthetic oligonucleotide
aaucccuuuggcucuuuuc

SEQ ID NO: 244916 - RNA, 19 nt, Artificial Sequence
  Description of Artificial Sequence: Synthetic oligonucleotide
ucuguaugcuccuauuagc

SEQ ID NO: 244917 - RNA, 19 nt, Artificial Sequence
  Description of Artificial Sequence: Synthetic oligonucleotide
cuugaucuaaguuguauuc

SEQ ID NO: 244918 - RNA, 19 nt, Artificial Sequence
  Description of Artificial Sequence: Synthetic oligonucleotide
uggugcuuugacaaaaugu

SEQ ID NO: 244919 - RNA, 19 nt, Artificial Sequence
  Description of Artificial Sequence: Synthetic oligonucleotide
uguugagaaaucugguccc

SEQ ID NO: 244920 - RNA, 19 nt, Artificial Sequence
  Description of Artificial Sequence: Synthetic oligonucleotide
cguauaaacaacuuauugg

SEQ ID NO: 244921 - RNA, 19 nt, Artificial Sequence
  Description of Artificial Sequence: Synthetic oligonucleotide
uugaaaucuguugagaaau

SEQ ID NO: 244922 - RNA, 19 nt, Artificial Sequence
  Description of Artificial Sequence: Synthetic oligonucleotide
agagccuucugguauguuc

SEQ ID NO: 244923 - RNA, 19 nt, Artificial Sequence
  Description of Artificial Sequence: Synthetic oligonucleotide
guacaggugacucaaacuc

SEQ ID NO: 244924 - RNA, 19 nt, Artificial Sequence
  Description of Artificial Sequence: Synthetic oligonucleotide
ucuaacucgggccccagca

SEQ ID NO: 244925 - RNA, 19 nt, Artificial Sequence
  Description of Artificial Sequence: Synthetic oligonucleotide
cuuuucggagccuggauag

SEQ ID NO: 244926 - RNA, 19 nt, Artificial Sequence
  Description of Artificial Sequence: Synthetic oligonucleotide
uuugaauucagggcaaccu

SEQ ID NO: 244927 - RNA, 19 nt, Artificial Sequence
  Description of Artificial Sequence: Synthetic oligonucleotide
aaacaacuuauuggggccg

SEQ ID NO: 244928 - RNA, 19 nt, Artificial Sequence
  Description of Artificial Sequence: Synthetic oligonucleotide
ucccucaacaaauuacuug

SEQ ID NO: 244929 - RNA, 19 nt, Artificial Sequence
  Description of Artificial Sequence: Synthetic oligonucleotide
uauuagcaacuuaaccuug

SEQ ID NO: 244930 - RNA, 19 nt, Artificial Sequence
  Description of Artificial Sequence: Synthetic oligonucleotide
ugauuguuucuucugcaac

SEQ ID NO: 244931 - RNA, 19 nt, Artificial Sequence
  Description of Artificial Sequence: Synthetic oligonucleotide
ugucuuuaagugaacacuu

SEQ ID NO: 244932 - RNA, 19 nt, Artificial Sequence
  Description of Artificial Sequence: Synthetic oligonucleotide
aauuguauuuguuguggua

SEQ ID NO: 244933 - RNA, 19 nt, Artificial Sequence
  Description of Artificial Sequence: Synthetic oligonucleotide
aacuuaaccuuggcaaagg

SEQ ID NO: 244934 - RNA, 19 nt, Artificial Sequence
  Description of Artificial Sequence: Synthetic oligonucleotide
aaaguaaucccugauuguu

SEQ ID NO: 244935 - RNA, 19 nt, Artificial Sequence
  Description of Artificial Sequence: Synthetic oligonucleotide
uuaucuuuuaccguucuua

SEQ ID NO: 244936 - RNA, 19 nt, Artificial Sequence
  Description of Artificial Sequence: Synthetic oligonucleotide
aaccuacuuaacucuaggu

SEQ ID NO: 244937 - RNA, 19 nt, Artificial Sequence
  Description of Artificial Sequence: Synthetic oligonucleotide
auugcuagcgcggccauac

SEQ ID NO: 244938 - RNA, 19 nt, Artificial Sequence
  Description of Artificial Sequence: Synthetic oligonucleotide
acuuauuggggccggcaac

SEQ ID NO: 244939 - RNA, 19 nt, Artificial Sequence
  Description of Artificial Sequence: Synthetic oligonucleotide
uggaauuguauuuguugug

SEQ ID NO: 244940 - RNA, 19 nt, Artificial Sequence
  Description of Artificial Sequence: Synthetic oligonucleotide
cucaaaaucuguugccggc

SEQ ID NO: 244941 - RNA, 19 nt, Artificial Sequence
  Description of Artificial Sequence: Synthetic oligonucleotide
acuuaaccuuggcaaaggg

SEQ ID NO: 244942 - RNA, 19 nt, Artificial Sequence
  Description of Artificial Sequence: Synthetic oligonucleotide
uuucagaggugcuuuccag

SEQ ID NO: 244943 - RNA, 19 nt, Artificial Sequence
  Description of Artificial Sequence: Synthetic oligonucleotide
uccgaauuuccucuuuuac

SEQ ID NO: 244944 - RNA, 19 nt, Artificial Sequence
  Description of Artificial Sequence: Synthetic oligonucleotide
guugaaauuugucauuuaa

SEQ ID NO: 244945 - RNA, 19 nt, Artificial Sequence
  Description of Artificial Sequence: Synthetic oligonucleotide
cucuguaugcuccuauuag

SEQ ID NO: 244946 - RNA, 19 nt, Artificial Sequence
  Description of Artificial Sequence: Synthetic oligonucleotide
uucguacacaagcacauua

SEQ ID NO: 244947 - RNA, 19 nt, Artificial Sequence
  Description of Artificial Sequence: Synthetic oligonucleotide
caauguacgcccauguguc

SEQ ID NO: 244948 - RNA, 19 nt, Artificial Sequence
  Description of Artificial Sequence: Synthetic oligonucleotide
ugguaaccuacuuaacucu

SEQ ID NO: 244949 - RNA, 19 nt, Artificial Sequence
  Description of Artificial Sequence: Synthetic oligonucleotide
cacaaggcgcacaaugucc

SEQ ID NO: 244950 - RNA, 19 nt, Artificial Sequence
  Description of Artificial Sequence: Synthetic oligonucleotide
uggacauucaauagaccuc

SEQ ID NO: 244951 - RNA, 19 nt, Artificial Sequence
  Description of Artificial Sequence: Synthetic oligonucleotide
uuccuucuaacucgggccc

SEQ ID NO: 244952 - RNA, 19 nt, Artificial Sequence
  Description of Artificial Sequence: Synthetic oligonucleotide
aagggcuguagucccguuc

SEQ ID NO: 244953 - RNA, 19 nt, Artificial Sequence
  Description of Artificial Sequence: Synthetic oligonucleotide
uguauuuguugugguaaag

SEQ ID NO: 244954 - RNA, 19 nt, Artificial Sequence
  Description of Artificial Sequence: Synthetic oligonucleotide
aucuuuuaccguucuuauc

SEQ ID NO: 244955 - RNA, 19 nt, Artificial Sequence
  Description of Artificial Sequence: Synthetic oligonucleotide
gugaugguaaccuacuuaa

SEQ ID NO: 244956 - RNA, 19 nt, Artificial Sequence
  Description of Artificial Sequence: Synthetic oligonucleotide
uucagaggugcuuuccagc

SEQ ID NO: 244957 - RNA, 19 nt, Artificial Sequence
  Description of Artificial Sequence: Synthetic oligonucleotide
uaucuuuuaccguucuuau

SEQ ID NO: 244958 - RNA, 19 nt, Artificial Sequence
  Description of Artificial Sequence: Synthetic oligonucleotide
ucaauagaccucucuuucu

SEQ ID NO: 244959 - RNA, 19 nt, Artificial Sequence
  Description of Artificial Sequence: Synthetic oligonucleotide
uuccaauuauucucaagaa

SEQ ID NO: 244960 - RNA, 19 nt, Artificial Sequence
  Description of Artificial Sequence: Synthetic oligonucleotide
ucuugaucuaaguuguauu

SEQ ID NO: 244961 - RNA, 19 nt, Artificial Sequence
  Description of Artificial Sequence: Synthetic oligonucleotide
auaaagguucuuaccuccc

SEQ ID NO: 244962 - RNA, 19 nt, Artificial Sequence
  Description of Artificial Sequence: Synthetic oligonucleotide
aaaaguuagcauggaaaau

SEQ ID NO: 244963 - RNA, 19 nt, Artificial Sequence
  Description of Artificial Sequence: Synthetic oligonucleotide
gacugacauugcuagcgcg

SEQ ID NO: 244964 - RNA, 19 nt, Artificial Sequence
  Description of Artificial Sequence: Synthetic oligonucleotide
auuagcaacuuaaccuugg

SEQ ID NO: 244965 - RNA, 19 nt, Artificial Sequence
  Description of Artificial Sequence: Synthetic oligonucleotide
aaaucuguugccggccauc

SEQ ID NO: 244966 - RNA, 19 nt, Artificial Sequence
  Description of Artificial Sequence: Synthetic oligonucleotide
cugucaaccguauaaacaa

SEQ ID NO: 244967 - RNA, 19 nt, Artificial Sequence
  Description of Artificial Sequence: Synthetic oligonucleotide
ucuaaguuguauucuucau

SEQ ID NO: 244968 - RNA, 19 nt, Artificial Sequence
  Description of Artificial Sequence: Synthetic oligonucleotide
uccaugcccaaacucaaaa

SEQ ID NO: 244969 - RNA, 19 nt, Artificial Sequence
  Description of Artificial Sequence: Synthetic oligonucleotide
agaugaaucucaggcuccc

SEQ ID NO: 244970 - RNA, 19 nt, Artificial Sequence
  Description of Artificial Sequence: Synthetic oligonucleotide
agugucaucccacuagaau

SEQ ID NO: 244971 - RNA, 19 nt, Artificial Sequence
  Description of Artificial Sequence: Synthetic oligonucleotide
cuuugcuggacauuuacaa

SEQ ID NO: 244972 - RNA, 19 nt, Artificial Sequence
  Description of Artificial Sequence: Synthetic oligonucleotide
accuacuuaacucuagguu

SEQ ID NO: 244973 - RNA, 19 nt, Artificial Sequence
  Description of Artificial Sequence: Synthetic oligonucleotide
aacaacuuauuggggccgg

SEQ ID NO: 244974 - RNA, 19 nt, Artificial Sequence
  Description of Artificial Sequence: Synthetic oligonucleotide
acauucaauagaccucucu

SEQ ID NO: 244975 - RNA, 19 nt, Artificial Sequence
  Description of Artificial Sequence: Synthetic oligonucleotide
ucauuugaauucagggcaa

SEQ ID NO: 244976 - RNA, 19 nt, Artificial Sequence
  Description of Artificial Sequence: Synthetic oligonucleotide
acacaagcacauuauuaca

SEQ ID NO: 244977 - RNA, 19 nt, Artificial Sequence
  Description of Artificial Sequence: Synthetic oligonucleotide
ucgucaguacuuacaaggu

SEQ ID NO: 244978 - RNA, 19 nt, Artificial Sequence
  Description of Artificial Sequence: Synthetic oligonucleotide
acaaugcacuauuuuggug

SEQ ID NO: 244979 - RNA, 19 nt, Artificial Sequence
  Description of Artificial Sequence: Synthetic oligonucleotide
uuggugcuuugacaaaaug

SEQ ID NO: 244980 - RNA, 19 nt, Artificial Sequence
  Description of Artificial Sequence: Synthetic oligonucleotide
agacguauauccuuuccau

SEQ ID NO: 244981 - RNA, 19 nt, Artificial Sequence
  Description of Artificial Sequence: Synthetic oligonucleotide
cuuucaugagugcagucuc

SEQ ID NO: 244982 - RNA, 19 nt, Artificial Sequence
  Description of Artificial Sequence: Synthetic oligonucleotide
aacuuauuggggccggcaa

SEQ ID NO: 244983 - RNA, 19 nt, Artificial Sequence
  Description of Artificial Sequence: Synthetic oligonucleotide
acauaggugaugguaaccu

SEQ ID NO: 244984 - RNA, 19 nt, Artificial Sequence
  Description of Artificial Sequence: Synthetic oligonucleotide
ucauugcuuaaagacaguc

SEQ ID NO: 244985 - RNA, 19 nt, Artificial Sequence
  Description of Artificial Sequence: Synthetic oligonucleotide
cugguauguucugaggugg

SEQ ID NO: 244986 - RNA, 19 nt, Artificial Sequence
  Description of Artificial Sequence: Synthetic oligonucleotide
uugcacuguauccuguccu

SEQ ID NO: 244987 - RNA, 19 nt, Artificial Sequence
  Description of Artificial Sequence: Synthetic oligonucleotide
ucgcuauccccaaaggccu

SEQ ID NO: 244988 - RNA, 19 nt, Artificial Sequence
  Description of Artificial Sequence: Synthetic oligonucleotide
uugaauucagggcaaccuu

SEQ ID NO: 244989 - RNA, 19 nt, Artificial Sequence
  Description of Artificial Sequence: Synthetic oligonucleotide
ugaacacuuguccuuguuu

SEQ ID NO: 244990 - RNA, 19 nt, Artificial Sequence
  Description of Artificial Sequence: Synthetic oligonucleotide
guucuuaccucccucgcac

SEQ ID NO: 244991 - RNA, 19 nt, Artificial Sequence
  Description of Artificial Sequence: Synthetic oligonucleotide
aauagaccucucuuucuuu

SEQ ID NO: 244992 - RNA, 19 nt, Artificial Sequence
  Description of Artificial Sequence: Synthetic oligonucleotide
uaggugaugguaaccuacu

SEQ ID NO: 244993 - RNA, 19 nt, Artificial Sequence
  Description of Artificial Sequence: Synthetic oligonucleotide
ugccuuaucuuuuaccguu

SEQ ID NO: 244994 - RNA, 19 nt, Artificial Sequence
  Description of Artificial Sequence: Synthetic oligonucleotide
guggacauucaauagaccu

SEQ ID NO: 244995 - RNA, 19 nt, Artificial Sequence
  Description of Artificial Sequence: Synthetic oligonucleotide
acugacauugcuagcgcgg

SEQ ID NO: 244996 - RNA, 19 nt, Artificial Sequence
  Description of Artificial Sequence: Synthetic oligonucleotide
auaucaaaaccuaaauuuu

SEQ ID NO: 244997 - RNA, 19 nt, Artificial Sequence
  Description of Artificial Sequence: Synthetic oligonucleotide
aaauuacuuggaauuguau

SEQ ID NO: 244998 - RNA, 19 nt, Artificial Sequence
  Description of Artificial Sequence: Synthetic oligonucleotide
uuccuaaauucaagaagaa

SEQ ID NO: 244999 - RNA, 19 nt, Artificial Sequence
  Description of Artificial Sequence: Synthetic oligonucleotide
aauguacgcccauguguca

SEQ ID NO: 245000 - RNA, 19 nt, Artificial Sequence
  Description of Artificial Sequence: Synthetic oligonucleotide
agauccaugcccaaacuca

SEQ ID NO: 245001 - RNA, 19 nt, Artificial Sequence
  Description of Artificial Sequence: Synthetic oligonucleotide
ucguacacaagcacauuau

SEQ ID NO: 245002 - RNA, 19 nt, Artificial Sequence
  Description of Artificial Sequence: Synthetic oligonucleotide
uccucgcuauccccaaagg

SEQ ID NO: 245003 - RNA, 19 nt, Artificial Sequence
  Description of Artificial Sequence: Synthetic oligonucleotide
accguucuuaucuucugcu

SEQ ID NO: 245004 - RNA, 19 nt, Artificial Sequence
  Description of Artificial Sequence: Synthetic oligonucleotide
ugcacuguauccuguccug

SEQ ID NO: 245005 - RNA, 19 nt, Artificial Sequence
  Description of Artificial Sequence: Synthetic oligonucleotide
uuuuaccguucuuaucuuc

SEQ ID NO: 245006 - RNA, 19 nt, Artificial Sequence
  Description of Artificial Sequence: Synthetic oligonucleotide
aucagacguauauccuuuc

SEQ ID NO: 245007 - RNA, 19 nt, Artificial Sequence
  Description of Artificial Sequence: Synthetic oligonucleotide
gggacugacauugcuagcg

SEQ ID NO: 245008 - RNA, 19 nt, Artificial Sequence
  Description of Artificial Sequence: Synthetic oligonucleotide
acaaggcgcacaauguccg

SEQ ID NO: 245009 - RNA, 19 nt, Artificial Sequence
  Description of Artificial Sequence: Synthetic oligonucleotide
gacguauauccuuuccauc

SEQ ID NO: 245010 - RNA, 19 nt, Artificial Sequence
  Description of Artificial Sequence: Synthetic oligonucleotide
acaagcuuucaugagugca

SEQ ID NO: 245011 - RNA, 19 nt, Artificial Sequence
  Description of Artificial Sequence: Synthetic oligonucleotide
aacuuuucggagccuggau

SEQ ID NO: 245012 - RNA, 19 nt, Artificial Sequence
  Description of Artificial Sequence: Synthetic oligonucleotide
uuccaucgaacuuuauaaa

SEQ ID NO: 245013 - RNA, 19 nt, Artificial Sequence
  Description of Artificial Sequence: Synthetic oligonucleotide
ugacuugaacuuaucuuuu

SEQ ID NO: 245014 - RNA, 19 nt, Artificial Sequence
  Description of Artificial Sequence: Synthetic oligonucleotide
caccuuuggugauaaggag

SEQ ID NO: 245015 - RNA, 19 nt, Artificial Sequence
  Description of Artificial Sequence: Synthetic oligonucleotide
cucuagguuauuucugcuc

SEQ ID NO: 245016 - RNA, 19 nt, Artificial Sequence
  Description of Artificial Sequence: Synthetic oligonucleotide
ugaugguaaccuacuuaac

SEQ ID NO: 245017 - RNA, 19 nt, Artificial Sequence
  Description of Artificial Sequence: Synthetic oligonucleotide
uucgcgagcuaccccaacu

SEQ ID NO: 245018 - RNA, 19 nt, Artificial Sequence
  Description of Artificial Sequence: Synthetic oligonucleotide
acaaaauguugcagucagc

SEQ ID NO: 245019 - RNA, 19 nt, Artificial Sequence
  Description of Artificial Sequence: Synthetic oligonucleotide
uacuuacaaggucauccaa

SEQ ID NO: 245020 - RNA, 19 nt, Artificial Sequence
  Description of Artificial Sequence: Synthetic oligonucleotide
agcaauguacgcccaugug

SEQ ID NO: 245021 - RNA, 19 nt, Artificial Sequence
  Description of Artificial Sequence: Synthetic oligonucleotide
gacauaggugaugguaacc

SEQ ID NO: 245022 - RNA, 19 nt, Artificial Sequence
  Description of Artificial Sequence: Synthetic oligonucleotide
ccuauuagcaacuuaaccu

SEQ ID NO: 245023 - RNA, 19 nt, Artificial Sequence
  Description of Artificial Sequence: Synthetic oligonucleotide
cacgucguccccauccucc

SEQ ID NO: 245024 - RNA, 19 nt, Artificial Sequence
  Description of Artificial Sequence: Synthetic oligonucleotide
auagagcaaggcgggauuc

SEQ ID NO: 245025 - RNA, 19 nt, Artificial Sequence
  Description of Artificial Sequence: Synthetic oligonucleotide
aaaaucuguugccggccau

SEQ ID NO: 245026 - RNA, 19 nt, Artificial Sequence
  Description of Artificial Sequence: Synthetic oligonucleotide
caacuuaaccuuggcaaag

SEQ ID NO: 245027 - RNA, 19 nt, Artificial Sequence
  Description of Artificial Sequence: Synthetic oligonucleotide
gccgaugacaugcuauugg

SEQ ID NO: 245028 - RNA, 19 nt, Artificial Sequence
  Description of Artificial Sequence: Synthetic oligonucleotide
acagagccgagcaauaacu

SEQ ID NO: 245029 - RNA, 19 nt, Artificial Sequence
  Description of Artificial Sequence: Synthetic oligonucleotide
uuaccucccucgcacuuca

SEQ ID NO: 245030 - RNA, 19 nt, Artificial Sequence
  Description of Artificial Sequence: Synthetic oligonucleotide
ucggcaacuuucuuccuaa

SEQ ID NO: 245031 - RNA, 19 nt, Artificial Sequence
  Description of Artificial Sequence: Synthetic oligonucleotide
accauugcuuugcuggaca

SEQ ID NO: 245032 - RNA, 19 nt, Artificial Sequence
  Description of Artificial Sequence: Synthetic oligonucleotide
guaaccuacuuaacucuag

SEQ ID NO: 245033 - RNA, 19 nt, Artificial Sequence
  Description of Artificial Sequence: Synthetic oligonucleotide
guacuuacaaggucaucca

SEQ ID NO: 245034 - RNA, 19 nt, Artificial Sequence
  Description of Artificial Sequence: Synthetic oligonucleotide
ucgaacuuuucggagccug

SEQ ID NO: 245035 - RNA, 19 nt, Artificial Sequence
  Description of Artificial Sequence: Synthetic oligonucleotide
gagaaaucuggucccucac

SEQ ID NO: 245036 - RNA, 19 nt, Artificial Sequence
  Description of Artificial Sequence: Synthetic oligonucleotide
gcgggauucaaaguaaucc

SEQ ID NO: 245037 - RNA, 19 nt, Artificial Sequence
  Description of Artificial Sequence: Synthetic oligonucleotide
ugguauguucugagguggc

SEQ ID NO: 245038 - RNA, 19 nt, Artificial Sequence
  Description of Artificial Sequence: Synthetic oligonucleotide
acuuuucggagccuggaua

SEQ ID NO: 245039 - RNA, 19 nt, Artificial Sequence
  Description of Artificial Sequence: Synthetic oligonucleotide
uagguaucaucuuccuuuc

SEQ ID NO: 245040 - RNA, 19 nt, Artificial Sequence
  Description of Artificial Sequence: Synthetic oligonucleotide
ccguauaaacaacuuauug

SEQ ID NO: 245041 - RNA, 19 nt, Artificial Sequence
  Description of Artificial Sequence: Synthetic oligonucleotide
uuguuucaucaaauauccu

SEQ ID NO: 245042 - RNA, 19 nt, Artificial Sequence
  Description of Artificial Sequence: Synthetic oligonucleotide
uuuagugguggcguccuuc

SEQ ID NO: 245043 - RNA, 19 nt, Artificial Sequence
  Description of Artificial Sequence: Synthetic oligonucleotide
uucaugagugcagucucac

SEQ ID NO: 245044 - RNA, 19 nt, Artificial Sequence
  Description of Artificial Sequence: Synthetic oligonucleotide
uuugcaccuuuggugauaa

SEQ ID NO: 245045 - RNA, 19 nt, Artificial Sequence
  Description of Artificial Sequence: Synthetic oligonucleotide
ugcacuauuuuggugcuuu

SEQ ID NO: 245046 - RNA, 19 nt, Artificial Sequence
  Description of Artificial Sequence: Synthetic oligonucleotide
caugugucagucucaucuc

SEQ ID NO: 245047 - RNA, 19 nt, Artificial Sequence
  Description of Artificial Sequence: Synthetic oligonucleotide
cugaaacuuccugaucgcc

SEQ ID NO: 245048 - RNA, 19 nt, Artificial Sequence
  Description of Artificial Sequence: Synthetic oligonucleotide
ucggagccuggauagacau

SEQ ID NO: 245049 - RNA, 19 nt, Artificial Sequence
  Description of Artificial Sequence: Synthetic oligonucleotide
aguucguacacaagcacau

SEQ ID NO: 245050 - RNA, 19 nt, Artificial Sequence
  Description of Artificial Sequence: Synthetic oligonucleotide
cacagagccgagcaauaac

SEQ ID NO: 245051 - RNA, 19 nt, Artificial Sequence
  Description of Artificial Sequence: Synthetic oligonucleotide
cucaacaaauuacuuggaa

SEQ ID NO: 245052 - RNA, 19 nt, Artificial Sequence
  Description of Artificial Sequence: Synthetic oligonucleotide
caguucguacacaagcaca

SEQ ID NO: 245053 - RNA, 19 nt, Artificial Sequence
  Description of Artificial Sequence: Synthetic oligonucleotide
cuauuagcaacuuaaccuu

SEQ ID NO: 245054 - RNA, 19 nt, Artificial Sequence
  Description of Artificial Sequence: Synthetic oligonucleotide
gguuccaauagagcaaggc

SEQ ID NO: 245055 - RNA, 19 nt, Artificial Sequence
  Description of Artificial Sequence: Synthetic oligonucleotide
ccgaugacaugcuauuggg

SEQ ID NO: 245056 - RNA, 19 nt, Artificial Sequence
  Description of Artificial Sequence: Synthetic oligonucleotide
acucuguaugcuccuauua

SEQ ID NO: 245057 - RNA, 19 nt, Artificial Sequence
  Description of Artificial Sequence: Synthetic oligonucleotide
gcuucugucaaccguauaa

SEQ ID NO: 245058 - RNA, 19 nt, Artificial Sequence
  Description of Artificial Sequence: Synthetic oligonucleotide
caucaaauauccuuggcuu

SEQ ID NO: 245059 - RNA, 19 nt, Artificial Sequence
  Description of Artificial Sequence: Synthetic oligonucleotide
ucucuucgcgagcuacccc

SEQ ID NO: 245060 - RNA, 19 nt, Artificial Sequence
  Description of Artificial Sequence: Synthetic oligonucleotide
aaaguacaaugcacuauuu

SEQ ID NO: 245061 - RNA, 19 nt, Artificial Sequence
  Description of Artificial Sequence: Synthetic oligonucleotide
ugcuagcgcggccauacuc

SEQ ID NO: 245062 - RNA, 19 nt, Artificial Sequence
  Description of Artificial Sequence: Synthetic oligonucleotide
acaacuuauuggggccggc

SEQ ID NO: 245063 - RNA, 19 nt, Artificial Sequence
  Description of Artificial Sequence: Synthetic oligonucleotide
cagacguauauccuuucca

SEQ ID NO: 245064 - RNA, 19 nt, Artificial Sequence
  Description of Artificial Sequence: Synthetic oligonucleotide
guacacaagcacauuauua

SEQ ID NO: 245065 - RNA, 19 nt, Artificial Sequence
  Description of Artificial Sequence: Synthetic oligonucleotide
cucuucgcgagcuacccca

SEQ ID NO: 245066 - RNA, 19 nt, Artificial Sequence
  Description of Artificial Sequence: Synthetic oligonucleotide
agcaguucguacacaagca

SEQ ID NO: 245067 - RNA, 19 nt, Artificial Sequence
  Description of Artificial Sequence: Synthetic oligonucleotide
cugacauugcuagcgcggc

SEQ ID NO: 245068 - RNA, 19 nt, Artificial Sequence
  Description of Artificial Sequence: Synthetic oligonucleotide
ccuacuuaacucuagguua

SEQ ID NO: 245069 - RNA, 19 nt, Artificial Sequence
  Description of Artificial Sequence: Synthetic oligonucleotide
ccuuauaucaaaaccuaaa

SEQ ID NO: 245070 - RNA, 19 nt, Artificial Sequence
  Description of Artificial Sequence: Synthetic oligonucleotide
uauccuguccugccuuauc

SEQ ID NO: 245071 - RNA, 19 nt, Artificial Sequence
  Description of Artificial Sequence: Synthetic oligonucleotide
caaaguacaaugcacuauu

SEQ ID NO: 245072 - RNA, 19 nt, Artificial Sequence
  Description of Artificial Sequence: Synthetic oligonucleotide
cgggauucaaaguaauccc

SEQ ID NO: 245073 - RNA, 19 nt, Artificial Sequence
  Description of Artificial Sequence: Synthetic oligonucleotide
ucgcgagcuaccccaacuc

SEQ ID NO: 245074 - RNA, 19 nt, Artificial Sequence
  Description of Artificial Sequence: Synthetic oligonucleotide
ggugauaaggagucucaga

SEQ ID NO: 245075 - RNA, 19 nt, Artificial Sequence
  Description of Artificial Sequence: Synthetic oligonucleotide
uaaucccugauuguuucuu

SEQ ID NO: 245076 - RNA, 19 nt, Artificial Sequence
  Description of Artificial Sequence: Synthetic oligonucleotide
cuuauuggggccggcaaca

SEQ ID NO: 245077 - RNA, 19 nt, Artificial Sequence
  Description of Artificial Sequence: Synthetic oligonucleotide
gguaucaucuuccuuucua

SEQ ID NO: 245078 - RNA, 19 nt, Artificial Sequence
  Description of Artificial Sequence: Synthetic oligonucleotide
agcaucccucaacaaauua

SEQ ID NO: 245079 - RNA, 19 nt, Artificial Sequence
  Description of Artificial Sequence: Synthetic oligonucleotide
cugauuguuucuucugcaa

SEQ ID NO: 245080 - RNA, 19 nt, Artificial Sequence
  Description of Artificial Sequence: Synthetic oligonucleotide
caauguccgaauuuccucu

SEQ ID NO: 245081 - RNA, 19 nt, Artificial Sequence
  Description of Artificial Sequence: Synthetic oligonucleotide
ggcugaaugaguaaacaaa

SEQ ID NO: 245082 - RNA, 19 nt, Artificial Sequence
  Description of Artificial Sequence: Synthetic oligonucleotide
uuuggcucuuuucggcauu

SEQ ID NO: 245083 - RNA, 19 nt, Artificial Sequence
  Description of Artificial Sequence: Synthetic oligonucleotide
caugaauaagggcuguagu

SEQ ID NO: 245084 - RNA, 19 nt, Artificial Sequence
  Description of Artificial Sequence: Synthetic oligonucleotide
guauauccuuuccaucgaa

SEQ ID NO: 245085 - RNA, 19 nt, Artificial Sequence
  Description of Artificial Sequence: Synthetic oligonucleotide
uucuuaccucccucgcacu

SEQ ID NO: 245086 - RNA, 19 nt, Artificial Sequence
  Description of Artificial Sequence: Synthetic oligonucleotide
ccgggacugacauugcuag

SEQ ID NO: 245087 - RNA, 19 nt, Artificial Sequence
  Description of Artificial Sequence: Synthetic oligonucleotide
agagccgaugacaugcuau

SEQ ID NO: 245088 - RNA, 19 nt, Artificial Sequence
  Description of Artificial Sequence: Synthetic oligonucleotide
gauccaugcccaaacucaa

SEQ ID NO: 245089 - RNA, 19 nt, Artificial Sequence
  Description of Artificial Sequence: Synthetic oligonucleotide
ggggagagggacucauuag

SEQ ID NO: 245090 - RNA, 19 nt, Artificial Sequence
  Description of Artificial Sequence: Synthetic oligonucleotide
cugaucgccuucugcagca

SEQ ID NO: 245091 - RNA, 19 nt, Artificial Sequence
  Description of Artificial Sequence: Synthetic oligonucleotide
gcaauguacgcccaugugu

SEQ ID NO: 245092 - RNA, 19 nt, Artificial Sequence
  Description of Artificial Sequence: Synthetic oligonucleotide
gccucgaacuuuucggagc

SEQ ID NO: 245093 - RNA, 19 nt, Artificial Sequence
  Description of Artificial Sequence: Synthetic oligonucleotide
gcaguucguacacaagcac

SEQ ID NO: 245094 - RNA, 19 nt, Artificial Sequence
  Description of Artificial Sequence: Synthetic oligonucleotide
ccucgaacuuuucggagcc

SEQ ID NO: 245095 - RNA, 19 nt, Artificial Sequence
  Description of Artificial Sequence: Synthetic oligonucleotide
gcaucccucaacaaauuac

SEQ ID NO: 245096 - RNA, 19 nt, Artificial Sequence
  Description of Artificial Sequence: Synthetic oligonucleotide
cuaaguuguauucuucauu

SEQ ID NO: 245097 - RNA, 19 nt, Artificial Sequence
  Description of Artificial Sequence: Synthetic oligonucleotide
ggaucuuaggcccuucucu

SEQ ID NO: 245098 - RNA, 19 nt, Artificial Sequence
  Description of Artificial Sequence: Synthetic oligonucleotide
gaucuuaggcccuucucuu

SEQ ID NO: 245099 - RNA, 19 nt, Artificial Sequence
  Description of Artificial Sequence: Synthetic oligonucleotide
uuuucggagccuggauaga

SEQ ID NO: 245100 - RNA, 19 nt, Artificial Sequence
  Description of Artificial Sequence: Synthetic oligonucleotide
cauccucgucaguacuuac

SEQ ID NO: 245101 - RNA, 19 nt, Artificial Sequence
  Description of Artificial Sequence: Synthetic oligonucleotide
ucucagcggcaugaauaag

SEQ ID NO: 245102 - RNA, 19 nt, Artificial Sequence
  Description of Artificial Sequence: Synthetic oligonucleotide
ccaugugucagucucaucu

SEQ ID NO: 245103 - RNA, 19 nt, Artificial Sequence
  Description of Artificial Sequence: Synthetic oligonucleotide
ggacugacauugcuagcgc

SEQ ID NO: 245104 - RNA, 19 nt, Artificial Sequence
  Description of Artificial Sequence: Synthetic oligonucleotide
cuagaauccucuugaucua

SEQ ID NO: 245105 - RNA, 19 nt, Artificial Sequence
  Description of Artificial Sequence: Synthetic oligonucleotide
ccgaauuuccucuuuuaca

SEQ ID NO: 245106 - RNA, 19 nt, Artificial Sequence
  Description of Artificial Sequence: Synthetic oligonucleotide
ccggcaacagggcugaaug

SEQ ID NO: 245107 - RNA, 19 nt, Artificial Sequence
  Description of Artificial Sequence: Synthetic oligonucleotide
ucgaacacgucguccccau

SEQ ID NO: 245108 - RNA, 19 nt, Artificial Sequence
  Description of Artificial Sequence: Synthetic oligonucleotide
guugccggccaucagaauu

SEQ ID NO: 245109 - RNA, 19 nt, Artificial Sequence
  Description of Artificial Sequence: Synthetic oligonucleotide
ccucgcuauccccaaaggc

SEQ ID NO: 245110 - RNA, 19 nt, Artificial Sequence
  Description of Artificial Sequence: Synthetic oligonucleotide
cuucugucaaccguauaaa

SEQ ID NO: 245111 - RNA, 19 nt, Artificial Sequence
  Description of Artificial Sequence: Synthetic oligonucleotide
gcaacuuaaccuuggcaaa

SEQ ID NO: 245112 - RNA, 19 nt, Artificial Sequence
  Description of Artificial Sequence: Synthetic oligonucleotide
uccuucuaacucgggcccc

SEQ ID NO: 245113 - RNA, 19 nt, Artificial Sequence
  Description of Artificial Sequence: Synthetic oligonucleotide
cucgcacuucauguccagg

SEQ ID NO: 245114 - RNA, 19 nt, Artificial Sequence
  Description of Artificial Sequence: Synthetic oligonucleotide
gguacaggugacucaaacu

SEQ ID NO: 245115 - RNA, 19 nt, Artificial Sequence
  Description of Artificial Sequence: Synthetic oligonucleotide
ucuucgcgagcuaccccaa

SEQ ID NO: 245116 - RNA, 19 nt, Artificial Sequence
  Description of Artificial Sequence: Synthetic oligonucleotide
auccucgucaguacuuaca

SEQ ID NO: 245117 - RNA, 19 nt, Artificial Sequence
  Description of Artificial Sequence: Synthetic oligonucleotide
agaggaucuuaggcccuuc

SEQ ID NO: 245118 - RNA, 19 nt, Artificial Sequence
  Description of Artificial Sequence: Synthetic oligonucleotide
ggacauucaauagaccucu

SEQ ID NO: 245119 - RNA, 19 nt, Artificial Sequence
  Description of Artificial Sequence: Synthetic oligonucleotide
cucuuuuacaagcuuucau

SEQ ID NO: 245120 - RNA, 19 nt, Artificial Sequence
  Description of Artificial Sequence: Synthetic oligonucleotide
agccgaugacaugcuauug

SEQ ID NO: 245121 - RNA, 19 nt, Artificial Sequence
  Description of Artificial Sequence: Synthetic oligonucleotide
cagccucgaacuuuucgga

SEQ ID NO: 245122 - RNA, 19 nt, Artificial Sequence
  Description of Artificial Sequence: Synthetic oligonucleotide
aggcgcacaauguccgaau

SEQ ID NO: 245123 - RNA, 19 nt, Artificial Sequence
  Description of Artificial Sequence: Synthetic oligonucleotide
gguucuuaccucccucgca

SEQ ID NO: 245124 - RNA, 19 nt, Artificial Sequence
  Description of Artificial Sequence: Synthetic oligonucleotide
cucccucgcacuucauguc

SEQ ID NO: 245125 - RNA, 19 nt, Artificial Sequence
  Description of Artificial Sequence: Synthetic oligonucleotide
uugcuuugcuggacauuua

SEQ ID NO: 245126 - RNA, 19 nt, Artificial Sequence
  Description of Artificial Sequence: Synthetic oligonucleotide
cuuugcuggucacuaucaa

SEQ ID NO: 245127 - RNA, 19 nt, Artificial Sequence
  Description of Artificial Sequence: Synthetic oligonucleotide
uacgcccaugugucagucu

SEQ ID NO: 245128 - RNA, 19 nt, Artificial Sequence
  Description of Artificial Sequence: Synthetic oligonucleotide
ccugaucgccuucugcagc

SEQ ID NO: 245129 - RNA, 19 nt, Artificial Sequence
  Description of Artificial Sequence: Synthetic oligonucleotide
ccgagucagaggaucuuag

SEQ ID NO: 245130 - RNA, 19 nt, Artificial Sequence
  Description of Artificial Sequence: Synthetic oligonucleotide
auguccgaauuuccucuuu

SEQ ID NO: 245131 - RNA, 19 nt, Artificial Sequence
  Description of Artificial Sequence: Synthetic oligonucleotide
caugguccacagagccgag

SEQ ID NO: 245132 - RNA, 19 nt, Artificial Sequence
  Description of Artificial Sequence: Synthetic oligonucleotide
gcacaauguccgaauuucc

SEQ ID NO: 245133 - RNA, 19 nt, Artificial Sequence
  Description of Artificial Sequence: Synthetic oligonucleotide
uagcgcggccauacucaug

SEQ ID NO: 245134 - RNA, 19 nt, Artificial Sequence
  Description of Artificial Sequence: Synthetic oligonucleotide
cgaacuuuucggagccugg

SEQ ID NO: 245135 - RNA, 19 nt, Artificial Sequence
  Description of Artificial Sequence: Synthetic oligonucleotide
guaaucccugauuguuucu

SEQ ID NO: 245136 - RNA, 19 nt, Artificial Sequence
  Description of Artificial Sequence: Synthetic oligonucleotide
caucagacguauauccuuu

SEQ ID NO: 245137 - RNA, 19 nt, Artificial Sequence
  Description of Artificial Sequence: Synthetic oligonucleotide
caccauugcuuugcuggac

SEQ ID NO: 245138 - RNA, 19 nt, Artificial Sequence
  Description of Artificial Sequence: Synthetic oligonucleotide
caacuuauuggggccggca

SEQ ID NO: 245139 - RNA, 19 nt, Artificial Sequence
  Description of Artificial Sequence: Synthetic oligonucleotide
uugcuagcgcggccauacu

SEQ ID NO: 245140 - RNA, 19 nt, Artificial Sequence
  Description of Artificial Sequence: Synthetic oligonucleotide
uugcaccuuuggugauaag

SEQ ID NO: 245141 - RNA, 19 nt, Artificial Sequence
  Description of Artificial Sequence: Synthetic oligonucleotide
cucggcaacuuucuuccua

SEQ ID NO: 245142 - RNA, 19 nt, Artificial Sequence
  Description of Artificial Sequence: Synthetic oligonucleotide
gcuagcgcggccauacuca

SEQ ID NO: 245143 - RNA, 19 nt, Artificial Sequence
  Description of Artificial Sequence: Synthetic oligonucleotide
uguugccggccaucagaau

SEQ ID NO: 245144 - RNA, 19 nt, Artificial Sequence
  Description of Artificial Sequence: Synthetic oligonucleotide
gcggcaugaauaagggcug

SEQ ID NO: 245145 - RNA, 19 nt, Artificial Sequence
  Description of Artificial Sequence: Synthetic oligonucleotide
agggcaaccuucacagcaa

SEQ ID NO: 245146 - RNA, 19 nt, Artificial Sequence
  Description of Artificial Sequence: Synthetic oligonucleotide
cuucgcgagcuaccccaac

SEQ ID NO: 245147 - RNA, 19 nt, Artificial Sequence
  Description of Artificial Sequence: Synthetic oligonucleotide
gcuguagucccguucuucu

SEQ ID NO: 245148 - RNA, 19 nt, Artificial Sequence
  Description of Artificial Sequence: Synthetic oligonucleotide
gcacuauuuuggugcuuug

SEQ ID NO: 245149 - RNA, 19 nt, Artificial Sequence
  Description of Artificial Sequence: Synthetic oligonucleotide
ccgagcaauaacuucuuua

SEQ ID NO: 245150 - RNA, 19 nt, Artificial Sequence
  Description of Artificial Sequence: Synthetic oligonucleotide
ccaucaagaugcuuuugaa

SEQ ID NO: 245151 - RNA, 19 nt, Artificial Sequence
  Description of Artificial Sequence: Synthetic oligonucleotide
ccucgucaguacuuacaag

SEQ ID NO: 245152 - RNA, 19 nt, Artificial Sequence
  Description of Artificial Sequence: Synthetic oligonucleotide
uggcgcccauucacuuuug

SEQ ID NO: 245153 - RNA, 19 nt, Artificial Sequence
  Description of Artificial Sequence: Synthetic oligonucleotide
gguaaccuacuuaacucua

SEQ ID NO: 245154 - RNA, 19 nt, Artificial Sequence
  Description of Artificial Sequence: Synthetic oligonucleotide
cugccuuaucuuuuaccgu

SEQ ID NO: 245155 - RNA, 19 nt, Artificial Sequence
  Description of Artificial Sequence: Synthetic oligonucleotide
cgucaguacuuacaagguc

SEQ ID NO: 245156 - RNA, 19 nt, Artificial Sequence
  Description of Artificial Sequence: Synthetic oligonucleotide
auacccucuugcacuguau

SEQ ID NO: 245157 - RNA, 19 nt, Artificial Sequence
  Description of Artificial Sequence: Synthetic oligonucleotide
gcuauccccaaaggccucc

SEQ ID NO: 245158 - RNA, 19 nt, Artificial Sequence
  Description of Artificial Sequence: Synthetic oligonucleotide
gcgcccauucacuuuugca

SEQ ID NO: 245159 - RNA, 19 nt, Artificial Sequence
  Description of Artificial Sequence: Synthetic oligonucleotide
cuuuuaccguucuuaucuu

SEQ ID NO: 245160 - RNA, 19 nt, Artificial Sequence
  Description of Artificial Sequence: Synthetic oligonucleotide
cucgaacacgucgucccca

SEQ ID NO: 245161 - RNA, 19 nt, Artificial Sequence
  Description of Artificial Sequence: Synthetic oligonucleotide
ggagagggacucauuaggu

SEQ ID NO: 245162 - RNA, 19 nt, Artificial Sequence
  Description of Artificial Sequence: Synthetic oligonucleotide
cuuaucuuuuaccguucuu

SEQ ID NO: 245163 - RNA, 19 nt, Artificial Sequence
  Description of Artificial Sequence: Synthetic oligonucleotide
ugaucgccuucugcagcaa

SEQ ID NO: 245164 - RNA, 19 nt, Artificial Sequence
  Description of Artificial Sequence: Synthetic oligonucleotide
acccgacggugcuguccgg

SEQ ID NO: 245165 - RNA, 19 nt, Artificial Sequence
  Description of Artificial Sequence: Synthetic oligonucleotide
uuaaucccuuuggcucuuu

SEQ ID NO: 245166 - RNA, 19 nt, Artificial Sequence
  Description of Artificial Sequence: Synthetic oligonucleotide
agccgagcaauaacuucuu

SEQ ID NO: 245167 - RNA, 19 nt, Artificial Sequence
  Description of Artificial Sequence: Synthetic oligonucleotide
gccuuaucuuuuaccguuc

SEQ ID NO: 245168 - RNA, 19 nt, Artificial Sequence
  Description of Artificial Sequence: Synthetic oligonucleotide
gggugcuucugucaaccgu

SEQ ID NO: 245169 - RNA, 19 nt, Artificial Sequence
  Description of Artificial Sequence: Synthetic oligonucleotide
cguauauccuuuccaucga

SEQ ID NO: 245170 - RNA, 19 nt, Artificial Sequence
  Description of Artificial Sequence: Synthetic oligonucleotide
cuccuucggcccugggaga

SEQ ID NO: 245171 - RNA, 19 nt, Artificial Sequence
  Description of Artificial Sequence: Synthetic oligonucleotide
cagagccgagcaauaacuu

SEQ ID NO: 245172 - RNA, 19 nt, Artificial Sequence
  Description of Artificial Sequence: Synthetic oligonucleotide
cuaacucgggccccagcau

SEQ ID NO: 245173 - RNA, 19 nt, Artificial Sequence
  Description of Artificial Sequence: Synthetic oligonucleotide
gcuauugggaaaacagguu

SEQ ID NO: 245174 - RNA, 19 nt, Artificial Sequence
  Description of Artificial Sequence: Synthetic oligonucleotide
gguauguucugagguggcu

SEQ ID NO: 245175 - RNA, 19 nt, Artificial Sequence
  Description of Artificial Sequence: Synthetic oligonucleotide
gucaucccacuagaauccu

SEQ ID NO: 245176 - RNA, 19 nt, Artificial Sequence
  Description of Artificial Sequence: Synthetic oligonucleotide
gcaacagggcugaaugagu

SEQ ID NO: 245177 - RNA, 19 nt, Artificial Sequence
  Description of Artificial Sequence: Synthetic oligonucleotide
augcacuauuuuggugcuu

SEQ ID NO: 245178 - RNA, 19 nt, Artificial Sequence
  Description of Artificial Sequence: Synthetic oligonucleotide
cccgacggugcuguccggg

SEQ ID NO: 245179 - RNA, 19 nt, Artificial Sequence
  Description of Artificial Sequence: Synthetic oligonucleotide
cagagccgaugacaugcua

SEQ ID NO: 245180 - RNA, 19 nt, Artificial Sequence
  Description of Artificial Sequence: Synthetic oligonucleotide
gcauccucgucaguacuua

SEQ ID NO: 245181 - RNA, 19 nt, Artificial Sequence
  Description of Artificial Sequence: Synthetic oligonucleotide
ccuuaucuuuuaccguucu

SEQ ID NO: 245182 - RNA, 19 nt, Artificial Sequence
  Description of Artificial Sequence: Synthetic oligonucleotide
guucguacacaagcacauu

SEQ ID NO: 245183 - RNA, 19 nt, Artificial Sequence
  Description of Artificial Sequence: Synthetic oligonucleotide
gcgagcuaccccaacuccu

SEQ ID NO: 245184 - RNA, 19 nt, Artificial Sequence
  Description of Artificial Sequence: Synthetic oligonucleotide
gccgagucagaggaucuua

SEQ ID NO: 245185 - RNA, 19 nt, Artificial Sequence
  Description of Artificial Sequence: Synthetic oligonucleotide
ggcgcacaauguccgaauu

SEQ ID NO: 245186 - RNA, 19 nt, Artificial Sequence
  Description of Artificial Sequence: Synthetic oligonucleotide
gcgcacaauguccgaauuu

SEQ ID NO: 245187 - RNA, 19 nt, Artificial Sequence
  Description of Artificial Sequence: Synthetic oligonucleotide
cauugcuagcgcggccaua

SEQ ID NO: 245188 - RNA, 19 nt, Artificial Sequence
  Description of Artificial Sequence: Synthetic oligonucleotide
ccgacggugcuguccggga

SEQ ID NO: 245189 - RNA, 19 nt, Artificial Sequence
  Description of Artificial Sequence: Synthetic oligonucleotide
cucgaacuuuucggagccu

SEQ ID NO: 245190 - RNA, 19 nt, Artificial Sequence
  Description of Artificial Sequence: Synthetic oligonucleotide
cgcuauccccaaaggccuc

SEQ ID NO: 245191 - RNA, 19 nt, Artificial Sequence
  Description of Artificial Sequence: Synthetic oligonucleotide
cuuuagugguggcguccuu

SEQ ID NO: 245192 - RNA, 19 nt, Artificial Sequence
  Description of Artificial Sequence: Synthetic oligonucleotide
cucugccgagucagaggau

SEQ ID NO: 245193 - RNA, 19 nt, Artificial Sequence
  Description of Artificial Sequence: Synthetic oligonucleotide
ccguucuuaucuucugcuu

SEQ ID NO: 245194 - RNA, 19 nt, Artificial Sequence
  Description of Artificial Sequence: Synthetic oligonucleotide
cccaaaggccuccguuccu

SEQ ID NO: 245195 - RNA, 19 nt, Artificial Sequence
  Description of Artificial Sequence: Synthetic oligonucleotide
gccggcaacagggcugaau

SEQ ID NO: 245196 - RNA, 19 nt, Artificial Sequence
  Description of Artificial Sequence: Synthetic oligonucleotide
cccugggagacccgacggu

SEQ ID NO: 245197 - RNA, 19 nt, Artificial Sequence
  Description of Artificial Sequence: Synthetic oligonucleotide
gggcuguagucccguucuu

SEQ ID NO: 245198 - RNA, 19 nt, Artificial Sequence
  Description of Artificial Sequence: Synthetic oligonucleotide
ggucccucacagagccgau

SEQ ID NO: 245199 - RNA, 19 nt, Artificial Sequence
  Description of Artificial Sequence: Synthetic oligonucleotide
gcgcggccauacucaugcu

SEQ ID NO: 245200 - RNA, 19 nt, Artificial Sequence
  Description of Artificial Sequence: Synthetic oligonucleotide
cggcaugaauaagggcugu

SEQ ID NO: 245201 - RNA, 19 nt, Artificial Sequence
  Description of Artificial Sequence: Synthetic oligonucleotide
ccguucuucuggcgcccau

SEQ ID NO: 245202 - RNA, 19 nt, Artificial Sequence
  Description of Artificial Sequence: Synthetic oligonucleotide
ggccggcaacagggcugaa

SEQ ID NO: 245203 - RNA, 19 nt, Artificial Sequence
  Description of Artificial Sequence: Synthetic oligonucleotide
aauuugagaaaaccggucc

SEQ ID NO: 245204 - RNA, 19 nt, Artificial Sequence
  Description of Artificial Sequence: Synthetic oligonucleotide
aacacugugcuauuaagac

SEQ ID NO: 245205 - RNA, 19 nt, Artificial Sequence
  Description of Artificial Sequence: Synthetic oligonucleotide
cugaauuugagaaaaccgg

SEQ ID NO: 245206 - RNA, 19 nt, Artificial Sequence
  Description of Artificial Sequence: Synthetic oligonucleotide
aggaauguuauuuccgagc

SEQ ID NO: 245207 - RNA, 19 nt, Artificial Sequence
  Description of Artificial Sequence: Synthetic oligonucleotide
gauacaugaguucuggccc

SEQ ID NO: 245208 - RNA, 19 nt, Artificial Sequence
  Description of Artificial Sequence: Synthetic oligonucleotide
uuaggauugauccugcagu

SEQ ID NO: 245209 - RNA, 19 nt, Artificial Sequence
  Description of Artificial Sequence: Synthetic oligonucleotide
uauacauacucguagcucu

SEQ ID NO: 245210 - RNA, 19 nt, Artificial Sequence
  Description of Artificial Sequence: Synthetic oligonucleotide
ugaauuucacccuuguaca

SEQ ID NO: 245211 - RNA, 19 nt, Artificial Sequence
  Description of Artificial Sequence: Synthetic oligonucleotide
uuauagacuuaaaauccag

SEQ ID NO: 245212 - RNA, 19 nt, Artificial Sequence
  Description of Artificial Sequence: Synthetic oligonucleotide
auagacuuaaaauccagga

SEQ ID NO: 245213 - RNA, 19 nt, Artificial Sequence
  Description of Artificial Sequence: Synthetic oligonucleotide
aauguuauuuccgagccca

SEQ ID NO: 245214 - RNA, 19 nt, Artificial Sequence
  Description of Artificial Sequence: Synthetic oligonucleotide
uagaaugguauucuggcca

SEQ ID NO: 245215 - RNA, 19 nt, Artificial Sequence
  Description of Artificial Sequence: Synthetic oligonucleotide
uaaguuuuggcugaauuug

SEQ ID NO: 245216 - RNA, 19 nt, Artificial Sequence
  Description of Artificial Sequence: Synthetic oligonucleotide
ugaauuugagaaaaccggu

SEQ ID NO: 245217 - RNA, 19 nt, Artificial Sequence
  Description of Artificial Sequence: Synthetic oligonucleotide
uucacccuuguacacaggg

SEQ ID NO: 245218 - RNA, 19 nt, Artificial Sequence
  Description of Artificial Sequence: Synthetic oligonucleotide
uggagugucacucacaauu

SEQ ID NO: 245219 - RNA, 19 nt, Artificial Sequence
  Description of Artificial Sequence: Synthetic oligonucleotide
uguuagguagauaaccaac

SEQ ID NO: 245220 - RNA, 19 nt, Artificial Sequence
  Description of Artificial Sequence: Synthetic oligonucleotide
uccacaaggucccacaaca

SEQ ID NO: 245221 - RNA, 19 nt, Artificial Sequence
  Description of Artificial Sequence: Synthetic oligonucleotide
auguuguagaucuccgagc

SEQ ID NO: 245222 - RNA, 19 nt, Artificial Sequence
  Description of Artificial Sequence: Synthetic oligonucleotide
auaaccaaccacacggucc

SEQ ID NO: 245223 - RNA, 19 nt, Artificial Sequence
  Description of Artificial Sequence: Synthetic oligonucleotide
guuauuuccgagcccacgg

SEQ ID NO: 245224 - RNA, 19 nt, Artificial Sequence
  Description of Artificial Sequence: Synthetic oligonucleotide
uagacuuaaaauccaggac

SEQ ID NO: 245225 - RNA, 19 nt, Artificial Sequence
  Description of Artificial Sequence: Synthetic oligonucleotide
aauacuggcagcggccagc

SEQ ID NO: 245226 - RNA, 19 nt, Artificial Sequence
  Description of Artificial Sequence: Synthetic oligonucleotide
uuagguagauaaccaacca

SEQ ID NO: 245227 - RNA, 19 nt, Artificial Sequence
  Description of Artificial Sequence: Synthetic oligonucleotide
cuaucuucucccuugggag

SEQ ID NO: 245228 - RNA, 19 nt, Artificial Sequence
  Description of Artificial Sequence: Synthetic oligonucleotide
gaagcaugaggccaucucc

SEQ ID NO: 245229 - RNA, 19 nt, Artificial Sequence
  Description of Artificial Sequence: Synthetic oligonucleotide
uguauacauacucguagcu

SEQ ID NO: 245230 - RNA, 19 nt, Artificial Sequence
  Description of Artificial Sequence: Synthetic oligonucleotide
caaacucuagcugaggugc

SEQ ID NO: 245231 - RNA, 19 nt, Artificial Sequence
  Description of Artificial Sequence: Synthetic oligonucleotide
acggaugcgcuucacaagg

SEQ ID NO: 245232 - RNA, 19 nt, Artificial Sequence
  Description of Artificial Sequence: Synthetic oligonucleotide
aaggcgaauggcaucacgg

SEQ ID NO: 245233 - RNA, 19 nt, Artificial Sequence
  Description of Artificial Sequence: Synthetic oligonucleotide
uccuccacuucaucgaagg

SEQ ID NO: 245234 - RNA, 19 nt, Artificial Sequence
  Description of Artificial Sequence: Synthetic oligonucleotide
agacuccauuuacaaaugc

SEQ ID NO: 245235 - RNA, 19 nt, Artificial Sequence
  Description of Artificial Sequence: Synthetic oligonucleotide
ugugcauagcacaaguuua

SEQ ID NO: 245236 - RNA, 19 nt, Artificial Sequence
  Description of Artificial Sequence: Synthetic oligonucleotide
aaguaagccuuccuguacu

SEQ ID NO: 245237 - RNA, 19 nt, Artificial Sequence
  Description of Artificial Sequence: Synthetic oligonucleotide
aagcaugaggccaucuccc

SEQ ID NO: 245238 - RNA, 19 nt, Artificial Sequence
  Description of Artificial Sequence: Synthetic oligonucleotide
uucccuuauagacuuaaaa

SEQ ID NO: 245239 - RNA, 19 nt, Artificial Sequence
  Description of Artificial Sequence: Synthetic oligonucleotide
cuuuuagucucugaaggcc

SEQ ID NO: 245240 - RNA, 19 nt, Artificial Sequence
  Description of Artificial Sequence: Synthetic oligonucleotide
uuacauugugcucaguuuu

SEQ ID NO: 245241 - RNA, 19 nt, Artificial Sequence
  Description of Artificial Sequence: Synthetic oligonucleotide
guagauaaccaaccacacg

SEQ ID NO: 245242 - RNA, 19 nt, Artificial Sequence
  Description of Artificial Sequence: Synthetic oligonucleotide
acaaaugcagaggucaguc

SEQ ID NO: 245243 - RNA, 19 nt, Artificial Sequence
  Description of Artificial Sequence: Synthetic oligonucleotide
aguguguacggaaugcccc

SEQ ID NO: 245244 - RNA, 19 nt, Artificial Sequence
  Description of Artificial Sequence: Synthetic oligonucleotide
uccgaaacaggaauguuau

SEQ ID NO: 245245 - RNA, 19 nt, Artificial Sequence
  Description of Artificial Sequence: Synthetic oligonucleotide
guuagguagauaaccaacc

SEQ ID NO: 245246 - RNA, 19 nt, Artificial Sequence
  Description of Artificial Sequence: Synthetic oligonucleotide
cauguugccguguaguaug

SEQ ID NO: 245247 - RNA, 19 nt, Artificial Sequence
  Description of Artificial Sequence: Synthetic oligonucleotide
gacacucgccagcagaggg

SEQ ID NO: 245248 - RNA, 19 nt, Artificial Sequence
  Description of Artificial Sequence: Synthetic oligonucleotide
acaccauucacaccaaagu

SEQ ID NO: 245249 - RNA, 19 nt, Artificial Sequence
  Description of Artificial Sequence: Synthetic oligonucleotide
uagguagauaaccaaccac

SEQ ID NO: 245250 - RNA, 19 nt, Artificial Sequence
  Description of Artificial Sequence: Synthetic oligonucleotide
aaaccgguccagcacacca

SEQ ID NO: 245251 - RNA, 19 nt, Artificial Sequence
  Description of Artificial Sequence: Synthetic oligonucleotide
aagcguacuccauuggggu

SEQ ID NO: 245252 - RNA, 19 nt, Artificial Sequence
  Description of Artificial Sequence: Synthetic oligonucleotide
aacaugaugaacagagggu

SEQ ID NO: 245253 - RNA, 19 nt, Artificial Sequence
  Description of Artificial Sequence: Synthetic oligonucleotide
agugucacucacaauuccc

SEQ ID NO: 245254 - RNA, 19 nt, Artificial Sequence
  Description of Artificial Sequence: Synthetic oligonucleotide
auacucguagcucugggcu

SEQ ID NO: 245255 - RNA, 19 nt, Artificial Sequence
  Description of Artificial Sequence: Synthetic oligonucleotide
acgaccaagccugagacuc

SEQ ID NO: 245256 - RNA, 19 nt, Artificial Sequence
  Description of Artificial Sequence: Synthetic oligonucleotide
ggaauguuauuuccgagcc

SEQ ID NO: 245257 - RNA, 19 nt, Artificial Sequence
  Description of Artificial Sequence: Synthetic oligonucleotide
cuuaggauugauccugcag

SEQ ID NO: 245258 - RNA, 19 nt, Artificial Sequence
  Description of Artificial Sequence: Synthetic oligonucleotide
uguacuugcugccauucuc

SEQ ID NO: 245259 - RNA, 19 nt, Artificial Sequence
  Description of Artificial Sequence: Synthetic oligonucleotide
cuaaagugucccuaaguuc

SEQ ID NO: 245260 - RNA, 19 nt, Artificial Sequence
  Description of Artificial Sequence: Synthetic oligonucleotide
uuuagucucugaaggccag

SEQ ID NO: 245261 - RNA, 19 nt, Artificial Sequence
  Description of Artificial Sequence: Synthetic oligonucleotide
ggauacaugaguucuggcc

SEQ ID NO: 245262 - RNA, 19 nt, Artificial Sequence
  Description of Artificial Sequence: Synthetic oligonucleotide
ugacgaccaagccugagac

SEQ ID NO: 245263 - RNA, 19 nt, Artificial Sequence
  Description of Artificial Sequence: Synthetic oligonucleotide
agaauuugugacagacucc

SEQ ID NO: 245264 - RNA, 19 nt, Artificial Sequence
  Description of Artificial Sequence: Synthetic oligonucleotide
agaaaaccgguccagcaca

SEQ ID NO: 245265 - RNA, 19 nt, Artificial Sequence
  Description of Artificial Sequence: Synthetic oligonucleotide
agauugugaguuuccacug

SEQ ID NO: 245266 - RNA, 19 nt, Artificial Sequence
  Description of Artificial Sequence: Synthetic oligonucleotide
aaggucccacaacacauug

SEQ ID NO: 245267 - RNA, 19 nt, Artificial Sequence
  Description of Artificial Sequence: Synthetic oligonucleotide
gcuauuaagacccagagau

SEQ ID NO: 245268 - RNA, 19 nt, Artificial Sequence
  Description of Artificial Sequence: Synthetic oligonucleotide
agcguguggagauugugag

SEQ ID NO: 245269 - RNA, 19 nt, Artificial Sequence
  Description of Artificial Sequence: Synthetic oligonucleotide
cacuguuagguagauaacc

SEQ ID NO: 245270 - RNA, 19 nt, Artificial Sequence
  Description of Artificial Sequence: Synthetic oligonucleotide
caugugcacuguuagguag

SEQ ID NO: 245271 - RNA, 19 nt, Artificial Sequence
  Description of Artificial Sequence: Synthetic oligonucleotide
acuugccaggaaaucaucc

SEQ ID NO: 245272 - RNA, 19 nt, Artificial Sequence
  Description of Artificial Sequence: Synthetic oligonucleotide
aagugcgugggcuggcagg

SEQ ID NO: 245273 - RNA, 19 nt, Artificial Sequence
  Description of Artificial Sequence: Synthetic oligonucleotide
ugggacaaugggcucauga

SEQ ID NO: 245274 - RNA, 19 nt, Artificial Sequence
  Description of Artificial Sequence: Synthetic oligonucleotide
agaguccaggaacuaagag

SEQ ID NO: 245275 - RNA, 19 nt, Artificial Sequence
  Description of Artificial Sequence: Synthetic oligonucleotide
guugccguguaguaugugc

SEQ ID NO: 245276 - RNA, 19 nt, Artificial Sequence
  Description of Artificial Sequence: Synthetic oligonucleotide
gaggacaguacagcuaagg

SEQ ID NO: 245277 - RNA, 19 nt, Artificial Sequence
  Description of Artificial Sequence: Synthetic oligonucleotide
uccuuucacaacucgcugc

SEQ ID NO: 245278 - RNA, 19 nt, Artificial Sequence
  Description of Artificial Sequence: Synthetic oligonucleotide
augacuccgaaacaggaau

SEQ ID NO: 245279 - RNA, 19 nt, Artificial Sequence
  Description of Artificial Sequence: Synthetic oligonucleotide
agguagauaaccaaccaca

SEQ ID NO: 245280 - RNA, 19 nt, Artificial Sequence
  Description of Artificial Sequence: Synthetic oligonucleotide
ucacucacaauucccuaga

SEQ ID NO: 245281 - RNA, 19 nt, Artificial Sequence
  Description of Artificial Sequence: Synthetic oligonucleotide
aguugcggucucuaaagug

SEQ ID NO: 245282 - RNA, 19 nt, Artificial Sequence
  Description of Artificial Sequence: Synthetic oligonucleotide
cuaugugccgaccuacagc

SEQ ID NO: 245283 - RNA, 19 nt, Artificial Sequence
  Description of Artificial Sequence: Synthetic oligonucleotide
agugcgcccuuuuagucuc

SEQ ID NO: 245284 - RNA, 19 nt, Artificial Sequence
  Description of Artificial Sequence: Synthetic oligonucleotide
cacacgcuagaugagaagc

SEQ ID NO: 245285 - RNA, 19 nt, Artificial Sequence
  Description of Artificial Sequence: Synthetic oligonucleotide
ucuccgagcugccgaagcg

SEQ ID NO: 245286 - RNA, 19 nt, Artificial Sequence
  Description of Artificial Sequence: Synthetic oligonucleotide
uagaucuccgagcugccga

SEQ ID NO: 245287 - RNA, 19 nt, Artificial Sequence
  Description of Artificial Sequence: Synthetic oligonucleotide
gaguuuaaguaugauuuca

SEQ ID NO: 245288 - RNA, 19 nt, Artificial Sequence
  Description of Artificial Sequence: Synthetic oligonucleotide
gaauguuauuuccgagccc

SEQ ID NO: 245289 - RNA, 19 nt, Artificial Sequence
  Description of Artificial Sequence: Synthetic oligonucleotide
gaauuugagaaaaccgguc

SEQ ID NO: 245290 - RNA, 19 nt, Artificial Sequence
  Description of Artificial Sequence: Synthetic oligonucleotide
agagcagaaugucacugcu

SEQ ID NO: 245291 - RNA, 19 nt, Artificial Sequence
  Description of Artificial Sequence: Synthetic oligonucleotide
ugagccaguggacaggaua

SEQ ID NO: 245292 - RNA, 19 nt, Artificial Sequence
  Description of Artificial Sequence: Synthetic oligonucleotide
uugaguguguacggaaugc

SEQ ID NO: 245293 - RNA, 19 nt, Artificial Sequence
  Description of Artificial Sequence: Synthetic oligonucleotide
gucaaagacacucgccagc

SEQ ID NO: 245294 - RNA, 19 nt, Artificial Sequence
  Description of Artificial Sequence: Synthetic oligonucleotide
ggagaaguaagccuuccug

SEQ ID NO: 245295 - RNA, 19 nt, Artificial Sequence
  Description of Artificial Sequence: Synthetic oligonucleotide
ggugauaccuauccugucc

SEQ ID NO: 245296 - RNA, 19 nt, Artificial Sequence
  Description of Artificial Sequence: Synthetic oligonucleotide
ugacuccgaaacaggaaug

SEQ ID NO: 245297 - RNA, 19 nt, Artificial Sequence
  Description of Artificial Sequence: Synthetic oligonucleotide
uuauuuccgagcccacgga

SEQ ID NO: 245298 - RNA, 19 nt, Artificial Sequence
  Description of Artificial Sequence: Synthetic oligonucleotide
gauaaccaaccacacgguc

SEQ ID NO: 245299 - RNA, 19 nt, Artificial Sequence
  Description of Artificial Sequence: Synthetic oligonucleotide
auggucaaagacacucgcc

SEQ ID NO: 245300 - RNA, 19 nt, Artificial Sequence
  Description of Artificial Sequence: Synthetic oligonucleotide
uugccguguaguaugugcu

SEQ ID NO: 245301 - RNA, 19 nt, Artificial Sequence
  Description of Artificial Sequence: Synthetic oligonucleotide
cauauucaaaagguuuuac

SEQ ID NO: 245302 - RNA, 19 nt, Artificial Sequence
  Description of Artificial Sequence: Synthetic oligonucleotide
auaccuauccuguccacaa

SEQ ID NO: 245303 - RNA, 19 nt, Artificial Sequence
  Description of Artificial Sequence: Synthetic oligonucleotide
cagaggucagucacaacag

SEQ ID NO: 245304 - RNA, 19 nt, Artificial Sequence
  Description of Artificial Sequence: Synthetic oligonucleotide
ucaucauguugccguguag

SEQ ID NO: 245305 - RNA, 19 nt, Artificial Sequence
  Description of Artificial Sequence: Synthetic oligonucleotide
agaccaaggaugcuccugu

SEQ ID NO: 245306 - RNA, 19 nt, Artificial Sequence
  Description of Artificial Sequence: Synthetic oligonucleotide
gcagaggucagucacaaca

SEQ ID NO: 245307 - RNA, 19 nt, Artificial Sequence
  Description of Artificial Sequence: Synthetic oligonucleotide
uuaaggacagggaguuuaa

SEQ ID NO: 245308 - RNA, 19 nt, Artificial Sequence
  Description of Artificial Sequence: Synthetic oligonucleotide
gagcccacggaauguacag

SEQ ID NO: 245309 - RNA, 19 nt, Artificial Sequence
  Description of Artificial Sequence: Synthetic oligonucleotide
uacggaaugccccgagucu

SEQ ID NO: 245310 - RNA, 19 nt, Artificial Sequence
  Description of Artificial Sequence: Synthetic oligonucleotide
ugaguguguacggaaugcc

SEQ ID NO: 245311 - RNA, 19 nt, Artificial Sequence
  Description of Artificial Sequence: Synthetic oligonucleotide
ugccaccugagauggagcc

SEQ ID NO: 245312 - RNA, 19 nt, Artificial Sequence
  Description of Artificial Sequence: Synthetic oligonucleotide
agugucccuaaguuccauc

SEQ ID NO: 245313 - RNA, 19 nt, Artificial Sequence
  Description of Artificial Sequence: Synthetic oligonucleotide
gaggguggcuaaaaggcag

SEQ ID NO: 245314 - RNA, 19 nt, Artificial Sequence
  Description of Artificial Sequence: Synthetic oligonucleotide
guguguacggaaugccccg

SEQ ID NO: 245315 - RNA, 19 nt, Artificial Sequence
  Description of Artificial Sequence: Synthetic oligonucleotide
uauuuccgagcccacggaa

SEQ ID NO: 245316 - RNA, 19 nt, Artificial Sequence
  Description of Artificial Sequence: Synthetic oligonucleotide
uacauacucguagcucugg

SEQ ID NO: 245317 - RNA, 19 nt, Artificial Sequence
  Description of Artificial Sequence: Synthetic oligonucleotide
aauucccuagaaugguauu

SEQ ID NO: 245318 - RNA, 19 nt, Artificial Sequence
  Description of Artificial Sequence: Synthetic oligonucleotide
cagauggcuccaauacugg

SEQ ID NO: 245319 - RNA, 19 nt, Artificial Sequence
  Description of Artificial Sequence: Synthetic oligonucleotide
aagaccaaggaugcuccug

SEQ ID NO: 245320 - RNA, 19 nt, Artificial Sequence
  Description of Artificial Sequence: Synthetic oligonucleotide
gagaaguaagccuuccugu

SEQ ID NO: 245321 - RNA, 19 nt, Artificial Sequence
  Description of Artificial Sequence: Synthetic oligonucleotide
ccgggcuugaauuucaccc

SEQ ID NO: 245322 - RNA, 19 nt, Artificial Sequence
  Description of Artificial Sequence: Synthetic oligonucleotide
gagccguuggcucagaagu

SEQ ID NO: 245323 - RNA, 19 nt, Artificial Sequence
  Description of Artificial Sequence: Synthetic oligonucleotide
aaguuuuggcugaauuuga

SEQ ID NO: 245324 - RNA, 19 nt, Artificial Sequence
  Description of Artificial Sequence: Synthetic oligonucleotide
auacaugaguucuggccca

SEQ ID NO: 245325 - RNA, 19 nt, Artificial Sequence
  Description of Artificial Sequence: Synthetic oligonucleotide
agucuggcgagguggaacu

SEQ ID NO: 245326 - RNA, 19 nt, Artificial Sequence
  Description of Artificial Sequence: Synthetic oligonucleotide
uacauugugcucaguuuua

SEQ ID NO: 245327 - RNA, 19 nt, Artificial Sequence
  Description of Artificial Sequence: Synthetic oligonucleotide
auaguguggagcgugugga

SEQ ID NO: 245328 - RNA, 19 nt, Artificial Sequence
  Description of Artificial Sequence: Synthetic oligonucleotide
ucuagcugaggugccugcg

SEQ ID NO: 245329 - RNA, 19 nt, Artificial Sequence
  Description of Artificial Sequence: Synthetic oligonucleotide
uccacacgcuagaugagaa

SEQ ID NO: 245330 - RNA, 19 nt, Artificial Sequence
  Description of Artificial Sequence: Synthetic oligonucleotide
cacggaauguacaguuccc

SEQ ID NO: 245331 - RNA, 19 nt, Artificial Sequence
  Description of Artificial Sequence: Synthetic oligonucleotide
ugacgcaucuguauacaua

SEQ ID NO: 245332 - RNA, 19 nt, Artificial Sequence
  Description of Artificial Sequence: Synthetic oligonucleotide
guacaugagccaucagccc

SEQ ID NO: 245333 - RNA, 19 nt, Artificial Sequence
  Description of Artificial Sequence: Synthetic oligonucleotide
gaguguguacggaaugccc

SEQ ID NO: 245334 - RNA, 19 nt, Artificial Sequence
  Description of Artificial Sequence: Synthetic oligonucleotide
acgcuagaugagaagcacc

SEQ ID NO: 245335 - RNA, 19 nt, Artificial Sequence
  Description of Artificial Sequence: Synthetic oligonucleotide
caaugacuccgaaacagga

SEQ ID NO: 245336 - RNA, 19 nt, Artificial Sequence
  Description of Artificial Sequence: Synthetic oligonucleotide
gagcaagaugggacaaugg

SEQ ID NO: 245337 - RNA, 19 nt, Artificial Sequence
  Description of Artificial Sequence: Synthetic oligonucleotide
aguccuuucacaacucgcu

SEQ ID NO: 245338 - RNA, 19 nt, Artificial Sequence
  Description of Artificial Sequence: Synthetic oligonucleotide
auggugugcgagccguugg

SEQ ID NO: 245339 - RNA, 19 nt, Artificial Sequence
  Description of Artificial Sequence: Synthetic oligonucleotide
guauacauacucguagcuc

SEQ ID NO: 245340 - RNA, 19 nt, Artificial Sequence
  Description of Artificial Sequence: Synthetic oligonucleotide
agcaugacgaugccuccug

SEQ ID NO: 245341 - RNA, 19 nt, Artificial Sequence
  Description of Artificial Sequence: Synthetic oligonucleotide
uguacggaaugccccgagu

SEQ ID NO: 245342 - RNA, 19 nt, Artificial Sequence
  Description of Artificial Sequence: Synthetic oligonucleotide
accaucgaguccugacgac

SEQ ID NO: 245343 - RNA, 19 nt, Artificial Sequence
  Description of Artificial Sequence: Synthetic oligonucleotide
acggccaugccaagguucc

SEQ ID NO: 245344 - RNA, 19 nt, Artificial Sequence
  Description of Artificial Sequence: Synthetic oligonucleotide
ugucccuaaguuccaucac

SEQ ID NO: 245345 - RNA, 19 nt, Artificial Sequence
  Description of Artificial Sequence: Synthetic oligonucleotide
acucacaauucccuagaau

SEQ ID NO: 245346 - RNA, 19 nt, Artificial Sequence
  Description of Artificial Sequence: Synthetic oligonucleotide
gaugcgcuucacaagguca

SEQ ID NO: 245347 - RNA, 19 nt, Artificial Sequence
  Description of Artificial Sequence: Synthetic oligonucleotide
gauugauccugcaguaguc

SEQ ID NO: 245348 - RNA, 19 nt, Artificial Sequence
  Description of Artificial Sequence: Synthetic oligonucleotide
ucagugcgcccuuuuaguc

SEQ ID NO: 245349 - RNA, 19 nt, Artificial Sequence
  Description of Artificial Sequence: Synthetic oligonucleotide
caccugcaagccuaugugc

SEQ ID NO: 245350 - RNA, 19 nt, Artificial Sequence
  Description of Artificial Sequence: Synthetic oligonucleotide
gaggggacuugccuuagca

SEQ ID NO: 245351 - RNA, 19 nt, Artificial Sequence
  Description of Artificial Sequence: Synthetic oligonucleotide
auugauccugcaguaguca

SEQ ID NO: 245352 - RNA, 19 nt, Artificial Sequence
  Description of Artificial Sequence: Synthetic oligonucleotide
caaggcgaauggcaucacg

SEQ ID NO: 245353 - RNA, 19 nt, Artificial Sequence
  Description of Artificial Sequence: Synthetic oligonucleotide
ucguuccagaagugcgugg

SEQ ID NO: 245354 - RNA, 19 nt, Artificial Sequence
  Description of Artificial Sequence: Synthetic oligonucleotide
gugauaccuauccugucca

SEQ ID NO: 245355 - RNA, 19 nt, Artificial Sequence
  Description of Artificial Sequence: Synthetic oligonucleotide
gugucccuaaguuccauca

SEQ ID NO: 245356 - RNA, 19 nt, Artificial Sequence
  Description of Artificial Sequence: Synthetic oligonucleotide
uccugucuuaggauugauc

SEQ ID NO: 245357 - RNA, 19 nt, Artificial Sequence
  Description of Artificial Sequence: Synthetic oligonucleotide
guacggaaugccccgaguc

SEQ ID NO: 245358 - RNA, 19 nt, Artificial Sequence
  Description of Artificial Sequence: Synthetic oligonucleotide
guuaaggacagggaguuua

SEQ ID NO: 245359 - RNA, 19 nt, Artificial Sequence
  Description of Artificial Sequence: Synthetic oligonucleotide
agugcgugggcuggcaggg

SEQ ID NO: 245360 - RNA, 19 nt, Artificial Sequence
  Description of Artificial Sequence: Synthetic oligonucleotide
gauaccuauccuguccaca

SEQ ID NO: 245361 - RNA, 19 nt, Artificial Sequence
  Description of Artificial Sequence: Synthetic oligonucleotide
cuagcugaggugccugcgc

SEQ ID NO: 245362 - RNA, 19 nt, Artificial Sequence
  Description of Artificial Sequence: Synthetic oligonucleotide
agccuaugugccgaccuac

SEQ ID NO: 245363 - RNA, 19 nt, Artificial Sequence
  Description of Artificial Sequence: Synthetic oligonucleotide
uuucccuuauagacuuaaa

SEQ ID NO: 245364 - RNA, 19 nt, Artificial Sequence
  Description of Artificial Sequence: Synthetic oligonucleotide
gagagcucuuggcuggcug

SEQ ID NO: 245365 - RNA, 19 nt, Artificial Sequence
  Description of Artificial Sequence: Synthetic oligonucleotide
cccuagaaugguauucugg

SEQ ID NO: 245366 - RNA, 19 nt, Artificial Sequence
  Description of Artificial Sequence: Synthetic oligonucleotide
gaaagaguccaggaacuaa

SEQ ID NO: 245367 - RNA, 19 nt, Artificial Sequence
  Description of Artificial Sequence: Synthetic oligonucleotide
cccucaauuaacuuuaaaa

SEQ ID NO: 245368 - RNA, 19 nt, Artificial Sequence
  Description of Artificial Sequence: Synthetic oligonucleotide
ccaaugacuccgaaacagg

SEQ ID NO: 245369 - RNA, 19 nt, Artificial Sequence
  Description of Artificial Sequence: Synthetic oligonucleotide
gagaagcaccaucgagucc

SEQ ID NO: 245370 - RNA, 19 nt, Artificial Sequence
  Description of Artificial Sequence: Synthetic oligonucleotide
cucgucguuccagaagugc

SEQ ID NO: 245371 - RNA, 19 nt, Artificial Sequence
  Description of Artificial Sequence: Synthetic oligonucleotide
gaagugcgugggcuggcag

SEQ ID NO: 245372 - RNA, 19 nt, Artificial Sequence
  Description of Artificial Sequence: Synthetic oligonucleotide
gcaccaucgaguccugacg

SEQ ID NO: 245373 - RNA, 19 nt, Artificial Sequence
  Description of Artificial Sequence: Synthetic oligonucleotide
caguagucaccaugugccc

SEQ ID NO: 245374 - RNA, 19 nt, Artificial Sequence
  Description of Artificial Sequence: Synthetic oligonucleotide
ggaguuuaaguaugauuuc

SEQ ID NO: 245375 - RNA, 19 nt, Artificial Sequence
  Description of Artificial Sequence: Synthetic oligonucleotide
uugacgcaucuguauacau

SEQ ID NO: 245376 - RNA, 19 nt, Artificial Sequence
  Description of Artificial Sequence: Synthetic oligonucleotide
uccgggcuugaauuucacc

SEQ ID NO: 245377 - RNA, 19 nt, Artificial Sequence
  Description of Artificial Sequence: Synthetic oligonucleotide
ucauguugccguguaguau

SEQ ID NO: 245378 - RNA, 19 nt, Artificial Sequence
  Description of Artificial Sequence: Synthetic oligonucleotide
ucccucaauuaacuuuaaa

SEQ ID NO: 245379 - RNA, 19 nt, Artificial Sequence
  Description of Artificial Sequence: Synthetic oligonucleotide
cuccgaaacaggaauguua

SEQ ID NO: 245380 - RNA, 19 nt, Artificial Sequence
  Description of Artificial Sequence: Synthetic oligonucleotide
cagcggggagccaucauac

SEQ ID NO: 245381 - RNA, 19 nt, Artificial Sequence
  Description of Artificial Sequence: Synthetic oligonucleotide
gggaguuuaaguaugauuu

SEQ ID NO: 245382 - RNA, 19 nt, Artificial Sequence
  Description of Artificial Sequence: Synthetic oligonucleotide
agauggagccaaggaguac

SEQ ID NO: 245383 - RNA, 19 nt, Artificial Sequence
  Description of Artificial Sequence: Synthetic oligonucleotide
aggauugauccugcaguag

SEQ ID NO: 245384 - RNA, 19 nt, Artificial Sequence
  Description of Artificial Sequence: Synthetic oligonucleotide
acauaggggaucagcacca

SEQ ID NO: 245385 - RNA, 19 nt, Artificial Sequence
  Description of Artificial Sequence: Synthetic oligonucleotide
ugauaccuauccuguccac

SEQ ID NO: 245386 - RNA, 19 nt, Artificial Sequence
  Description of Artificial Sequence: Synthetic oligonucleotide
ccgaccuacagcagcaggg

SEQ ID NO: 245387 - RNA, 19 nt, Artificial Sequence
  Description of Artificial Sequence: Synthetic oligonucleotide
gguagauaaccaaccacac

SEQ ID NO: 245388 - RNA, 19 nt, Artificial Sequence
  Description of Artificial Sequence: Synthetic oligonucleotide
ccacggaauguacaguucc

SEQ ID NO: 245389 - RNA, 19 nt, Artificial Sequence
  Description of Artificial Sequence: Synthetic oligonucleotide
ggagauugugaguuuccac

SEQ ID NO: 245390 - RNA, 19 nt, Artificial Sequence
  Description of Artificial Sequence: Synthetic oligonucleotide
uacuugcugccauucucgu

SEQ ID NO: 245391 - RNA, 19 nt, Artificial Sequence
  Description of Artificial Sequence: Synthetic oligonucleotide
acaacacauugggugucgg

SEQ ID NO: 245392 - RNA, 19 nt, Artificial Sequence
  Description of Artificial Sequence: Synthetic oligonucleotide
cccgaggagaacaugauga

SEQ ID NO: 245393 - RNA, 19 nt, Artificial Sequence
  Description of Artificial Sequence: Synthetic oligonucleotide
ugacgaugccuccugucuu

SEQ ID NO: 245394 - RNA, 19 nt, Artificial Sequence
  Description of Artificial Sequence: Synthetic oligonucleotide
ucgaguccugacgaccaag

SEQ ID NO: 245395 - RNA, 19 nt, Artificial Sequence
  Description of Artificial Sequence: Synthetic oligonucleotide
uccccagacggccuucccu

SEQ ID NO: 245396 - RNA, 19 nt, Artificial Sequence
  Description of Artificial Sequence: Synthetic oligonucleotide
augcgcuucacaaggucag

SEQ ID NO: 245397 - RNA, 19 nt, Artificial Sequence
  Description of Artificial Sequence: Synthetic oligonucleotide
caucgaguccugacgacca

SEQ ID NO: 245398 - RNA, 19 nt, Artificial Sequence
  Description of Artificial Sequence: Synthetic oligonucleotide
gucucuaaagugucccuaa

SEQ ID NO: 245399 - RNA, 19 nt, Artificial Sequence
  Description of Artificial Sequence: Synthetic oligonucleotide
acggaauguacaguuccca

SEQ ID NO: 245400 - RNA, 19 nt, Artificial Sequence
  Description of Artificial Sequence: Synthetic oligonucleotide
gaccguuguguaguagagc

SEQ ID NO: 245401 - RNA, 19 nt, Artificial Sequence
  Description of Artificial Sequence: Synthetic oligonucleotide
guuagggaucuuggaaaug

SEQ ID NO: 245402 - RNA, 19 nt, Artificial Sequence
  Description of Artificial Sequence: Synthetic oligonucleotide
guugcggucucuaaagugu

SEQ ID NO: 245403 - RNA, 19 nt, Artificial Sequence
  Description of Artificial Sequence: Synthetic oligonucleotide
cagaaagaguccaggaacu

SEQ ID NO: 245404 - RNA, 19 nt, Artificial Sequence
  Description of Artificial Sequence: Synthetic oligonucleotide
uguagacaacagccuccac

SEQ ID NO: 245405 - RNA, 19 nt, Artificial Sequence
  Description of Artificial Sequence: Synthetic oligonucleotide
guggagauugugaguuucc

SEQ ID NO: 245406 - RNA, 19 nt, Artificial Sequence
  Description of Artificial Sequence: Synthetic oligonucleotide
aaggaguacacuggcucuu

SEQ ID NO: 245407 - RNA, 19 nt, Artificial Sequence
  Description of Artificial Sequence: Synthetic oligonucleotide
ugucgggaccagcggggag

SEQ ID NO: 245408 - RNA, 19 nt, Artificial Sequence
  Description of Artificial Sequence: Synthetic oligonucleotide
gaugaacagaggguggcua

SEQ ID NO: 245409 - RNA, 19 nt, Artificial Sequence
  Description of Artificial Sequence: Synthetic oligonucleotide
cauggcgagcugacaggcc

SEQ ID NO: 245410 - RNA, 19 nt, Artificial Sequence
  Description of Artificial Sequence: Synthetic oligonucleotide
ugccguguaguaugugcuc

SEQ ID NO: 245411 - RNA, 19 nt, Artificial Sequence
  Description of Artificial Sequence: Synthetic oligonucleotide
aguaagccuuccuguacuu

SEQ ID NO: 245412 - RNA, 19 nt, Artificial Sequence
  Description of Artificial Sequence: Synthetic oligonucleotide
acacucgccagcagagggg

SEQ ID NO: 245413 - RNA, 19 nt, Artificial Sequence
  Description of Artificial Sequence: Synthetic oligonucleotide
uguggccagggcugauacc

SEQ ID NO: 245414 - RNA, 19 nt, Artificial Sequence
  Description of Artificial Sequence: Synthetic oligonucleotide
gaccaaggaugcuccugug

SEQ ID NO: 245415 - RNA, 19 nt, Artificial Sequence
  Description of Artificial Sequence: Synthetic oligonucleotide
cugacgaccaagccugaga

SEQ ID NO: 245416 - RNA, 19 nt, Artificial Sequence
  Description of Artificial Sequence: Synthetic oligonucleotide
auguuauuuccgagcccac

SEQ ID NO: 245417 - RNA, 19 nt, Artificial Sequence
  Description of Artificial Sequence: Synthetic oligonucleotide
auacauacucguagcucug

SEQ ID NO: 245418 - RNA, 19 nt, Artificial Sequence
  Description of Artificial Sequence: Synthetic oligonucleotide
caugcacagcuagauggug

SEQ ID NO: 245419 - RNA, 19 nt, Artificial Sequence
  Description of Artificial Sequence: Synthetic oligonucleotide
cccuugggaggacauaggg

SEQ ID NO: 245420 - RNA, 19 nt, Artificial Sequence
  Description of Artificial Sequence: Synthetic oligonucleotide
guauucuggccauggcaga

SEQ ID NO: 245421 - RNA, 19 nt, Artificial Sequence
  Description of Artificial Sequence: Synthetic oligonucleotide
ugccgaagcguacuccauu

SEQ ID NO: 245422 - RNA, 19 nt, Artificial Sequence
  Description of Artificial Sequence: Synthetic oligonucleotide
guaagccuuccuguacuug

SEQ ID NO: 245423 - RNA, 19 nt, Artificial Sequence
  Description of Artificial Sequence: Synthetic oligonucleotide
ccaggaucccucaauuaac

SEQ ID NO: 245424 - RNA, 19 nt, Artificial Sequence
  Description of Artificial Sequence: Synthetic oligonucleotide
guguacggaaugccccgag

SEQ ID NO: 245425 - RNA, 19 nt, Artificial Sequence
  Description of Artificial Sequence: Synthetic oligonucleotide
agacacucgccagcagagg

SEQ ID NO: 245426 - RNA, 19 nt, Artificial Sequence
  Description of Artificial Sequence: Synthetic oligonucleotide
uguguacggaaugccccga

SEQ ID NO: 245427 - RNA, 19 nt, Artificial Sequence
  Description of Artificial Sequence: Synthetic oligonucleotide
ugggcacauggcgagcuga

SEQ ID NO: 245428 - RNA, 19 nt, Artificial Sequence
  Description of Artificial Sequence: Synthetic oligonucleotide
caccaucgaguccugacga

SEQ ID NO: 245429 - RNA, 19 nt, Artificial Sequence
  Description of Artificial Sequence: Synthetic oligonucleotide
augcacagcuagauggugu

SEQ ID NO: 245430 - RNA, 19 nt, Artificial Sequence
  Description of Artificial Sequence: Synthetic oligonucleotide
cacuugccaggaaaucauc

SEQ ID NO: 245431 - RNA, 19 nt, Artificial Sequence
  Description of Artificial Sequence: Synthetic oligonucleotide
gccgaagcguacuccauug

SEQ ID NO: 245432 - RNA, 19 nt, Artificial Sequence
  Description of Artificial Sequence: Synthetic oligonucleotide
uggcuaaaaggcagcuguu

SEQ ID NO: 245433 - RNA, 19 nt, Artificial Sequence
  Description of Artificial Sequence: Synthetic oligonucleotide
gucguuccagaagugcgug

SEQ ID NO: 245434 - RNA, 19 nt, Artificial Sequence
  Description of Artificial Sequence: Synthetic oligonucleotide
cuugacgcaucuguauaca

SEQ ID NO: 245435 - RNA, 19 nt, Artificial Sequence
  Description of Artificial Sequence: Synthetic oligonucleotide
uacucguagcucugggcuu

SEQ ID NO: 245436 - RNA, 19 nt, Artificial Sequence
  Description of Artificial Sequence: Synthetic oligonucleotide
acacgcuagaugagaagca

SEQ ID NO: 245437 - RNA, 19 nt, Artificial Sequence
  Description of Artificial Sequence: Synthetic oligonucleotide
cacucucuccccagacggc

SEQ ID NO: 245438 - RNA, 19 nt, Artificial Sequence
  Description of Artificial Sequence: Synthetic oligonucleotide
acaucgcuccuccggugug

SEQ ID NO: 245439 - RNA, 19 nt, Artificial Sequence
  Description of Artificial Sequence: Synthetic oligonucleotide
cgaagcguacuccauuggg

SEQ ID NO: 245440 - RNA, 19 nt, Artificial Sequence
  Description of Artificial Sequence: Synthetic oligonucleotide
cugugcuauuaagacccag

SEQ ID NO: 245441 - RNA, 19 nt, Artificial Sequence
  Description of Artificial Sequence: Synthetic oligonucleotide
caugccaagguuccgggcu

SEQ ID NO: 245442 - RNA, 19 nt, Artificial Sequence
  Description of Artificial Sequence: Synthetic oligonucleotide
acauugugcucaguuuuaa

SEQ ID NO: 245443 - RNA, 19 nt, Artificial Sequence
  Description of Artificial Sequence: Synthetic oligonucleotide
gacgaugccuccugucuua

SEQ ID NO: 245444 - RNA, 19 nt, Artificial Sequence
  Description of Artificial Sequence: Synthetic oligonucleotide
ggauugauccugcaguagu

SEQ ID NO: 245445 - RNA, 19 nt, Artificial Sequence
  Description of Artificial Sequence: Synthetic oligonucleotide
aggaugcuccuguggccag

SEQ ID NO: 245446 - RNA, 19 nt, Artificial Sequence
  Description of Artificial Sequence: Synthetic oligonucleotide
ugcauagcacaaguuuauu

SEQ ID NO: 245447 - RNA, 19 nt, Artificial Sequence
  Description of Artificial Sequence: Synthetic oligonucleotide
cucuaaagugucccuaagu

SEQ ID NO: 245448 - RNA, 19 nt, Artificial Sequence
  Description of Artificial Sequence: Synthetic oligonucleotide
guggagcguguggagauug

SEQ ID NO: 245449 - RNA, 19 nt, Artificial Sequence
  Description of Artificial Sequence: Synthetic oligonucleotide
agugcaccaugcacuuggg

SEQ ID NO: 245450 - RNA, 19 nt, Artificial Sequence
  Description of Artificial Sequence: Synthetic oligonucleotide
augccuccugucuuaggau

SEQ ID NO: 245451 - RNA, 19 nt, Artificial Sequence
  Description of Artificial Sequence: Synthetic oligonucleotide
cauugugcucaguuuuaaa

SEQ ID NO: 245452 - RNA, 19 nt, Artificial Sequence
  Description of Artificial Sequence: Synthetic oligonucleotide
agaaagaguccaggaacua

SEQ ID NO: 245453 - RNA, 19 nt, Artificial Sequence
  Description of Artificial Sequence: Synthetic oligonucleotide
cgcaucuguauacauacuc

SEQ ID NO: 245454 - RNA, 19 nt, Artificial Sequence
  Description of Artificial Sequence: Synthetic oligonucleotide
ugggugcuccugucgugcc

SEQ ID NO: 245455 - RNA, 19 nt, Artificial Sequence
  Description of Artificial Sequence: Synthetic oligonucleotide
gggauacaugaguucuggc

SEQ ID NO: 245456 - RNA, 19 nt, Artificial Sequence
  Description of Artificial Sequence: Synthetic oligonucleotide
ugcaagccuaugugccgac

SEQ ID NO: 245457 - RNA, 19 nt, Artificial Sequence
  Description of Artificial Sequence: Synthetic oligonucleotide
gccaugccaagguuccggg

SEQ ID NO: 245458 - RNA, 19 nt, Artificial Sequence
  Description of Artificial Sequence: Synthetic oligonucleotide
augugcacuguuagguaga

SEQ ID NO: 245459 - RNA, 19 nt, Artificial Sequence
  Description of Artificial Sequence: Synthetic oligonucleotide
uguugccguguaguaugug

SEQ ID NO: 245460 - RNA, 19 nt, Artificial Sequence
  Description of Artificial Sequence: Synthetic oligonucleotide
caggaucccucaauuaacu

SEQ ID NO: 245461 - RNA, 19 nt, Artificial Sequence
  Description of Artificial Sequence: Synthetic oligonucleotide
agccguuggcucagaaguc

SEQ ID NO: 245462 - RNA, 19 nt, Artificial Sequence
  Description of Artificial Sequence: Synthetic oligonucleotide
uggcgagguggaacuccag

SEQ ID NO: 245463 - RNA, 19 nt, Artificial Sequence
  Description of Artificial Sequence: Synthetic oligonucleotide
uccggugugcugucacaaa

SEQ ID NO: 245464 - RNA, 19 nt, Artificial Sequence
  Description of Artificial Sequence: Synthetic oligonucleotide
agcguacuccauugggguu

SEQ ID NO: 245465 - RNA, 19 nt, Artificial Sequence
  Description of Artificial Sequence: Synthetic oligonucleotide
gugugcgagccguuggcuc

SEQ ID NO: 245466 - RNA, 19 nt, Artificial Sequence
  Description of Artificial Sequence: Synthetic oligonucleotide
auagcacuuuucccuuaua

SEQ ID NO: 245467 - RNA, 19 nt, Artificial Sequence
  Description of Artificial Sequence: Synthetic oligonucleotide
ggagugucacucacaauuc

SEQ ID NO: 245468 - RNA, 19 nt, Artificial Sequence
  Description of Artificial Sequence: Synthetic oligonucleotide
ugcagaggucagucacaac

SEQ ID NO: 245469 - RNA, 19 nt, Artificial Sequence
  Description of Artificial Sequence: Synthetic oligonucleotide
gaucuccgagcugccgaag

SEQ ID NO: 245470 - RNA, 19 nt, Artificial Sequence
  Description of Artificial Sequence: Synthetic oligonucleotide
uccuguacuugcugccauu

SEQ ID NO: 245471 - RNA, 19 nt, Artificial Sequence
  Description of Artificial Sequence: Synthetic oligonucleotide
ucccacuugccaggaaauc

SEQ ID NO: 245472 - RNA, 19 nt, Artificial Sequence
  Description of Artificial Sequence: Synthetic oligonucleotide
gucgugcccgaggagaaca

SEQ ID NO: 245473 - RNA, 19 nt, Artificial Sequence
  Description of Artificial Sequence: Synthetic oligonucleotide
agguuccgggcuugaauuu

SEQ ID NO: 245474 - RNA, 19 nt, Artificial Sequence
  Description of Artificial Sequence: Synthetic oligonucleotide
ggaucccucaauuaacuuu

SEQ ID NO: 245475 - RNA, 19 nt, Artificial Sequence
  Description of Artificial Sequence: Synthetic oligonucleotide
ucgccacucucuccccaga

SEQ ID NO: 245476 - RNA, 19 nt, Artificial Sequence
  Description of Artificial Sequence: Synthetic oligonucleotide
gccguguaguaugugcucc

SEQ ID NO: 245477 - RNA, 19 nt, Artificial Sequence
  Description of Artificial Sequence: Synthetic oligonucleotide
aaccgguccagcacaccau

SEQ ID NO: 245478 - RNA, 19 nt, Artificial Sequence
  Description of Artificial Sequence: Synthetic oligonucleotide
gcguacuccauugggguug

SEQ ID NO: 245479 - RNA, 19 nt, Artificial Sequence
  Description of Artificial Sequence: Synthetic oligonucleotide
ugcgcgccugucccacuug

SEQ ID NO: 245480 - RNA, 19 nt, Artificial Sequence
  Description of Artificial Sequence: Synthetic oligonucleotide
acgaugccuccugucuuag

SEQ ID NO: 245481 - RNA, 19 nt, Artificial Sequence
  Description of Artificial Sequence: Synthetic oligonucleotide
caucgcuccuccggugugc

SEQ ID NO: 245482 - RNA, 19 nt, Artificial Sequence
  Description of Artificial Sequence: Synthetic oligonucleotide
agggcugaacaagccucag

SEQ ID NO: 245483 - RNA, 19 nt, Artificial Sequence
  Description of Artificial Sequence: Synthetic oligonucleotide
gccguuggcucagaagucc

SEQ ID NO: 245484 - RNA, 19 nt, Artificial Sequence
  Description of Artificial Sequence: Synthetic oligonucleotide
caagccuaugugccgaccu

SEQ ID NO: 245485 - RNA, 19 nt, Artificial Sequence
  Description of Artificial Sequence: Synthetic oligonucleotide
uccugacgaccaagccuga

SEQ ID NO: 245486 - RNA, 19 nt, Artificial Sequence
  Description of Artificial Sequence: Synthetic oligonucleotide
ggcgagguggaacuccaga

SEQ ID NO: 245487 - RNA, 19 nt, Artificial Sequence
  Description of Artificial Sequence: Synthetic oligonucleotide
cuccugucgugcccgagga

SEQ ID NO: 245488 - RNA, 19 nt, Artificial Sequence
  Description of Artificial Sequence: Synthetic oligonucleotide
gguggcuaaaaggcagcug

SEQ ID NO: 245489 - RNA, 19 nt, Artificial Sequence
  Description of Artificial Sequence: Synthetic oligonucleotide
ucacaacucgcugcagcuu

SEQ ID NO: 245490 - RNA, 19 nt, Artificial Sequence
  Description of Artificial Sequence: Synthetic oligonucleotide
cuguucaaacacugugcua

SEQ ID NO: 245491 - RNA, 19 nt, Artificial Sequence
  Description of Artificial Sequence: Synthetic oligonucleotide
aucgaguccugacgaccaa

SEQ ID NO: 245492 - RNA, 19 nt, Artificial Sequence
  Description of Artificial Sequence: Synthetic oligonucleotide
gccaguggacaggauagug

SEQ ID NO: 245493 - RNA, 19 nt, Artificial Sequence
  Description of Artificial Sequence: Synthetic oligonucleotide
agaggacaguacagcuaag

SEQ ID NO: 245494 - RNA, 19 nt, Artificial Sequence
  Description of Artificial Sequence: Synthetic oligonucleotide
cauaggggaucagcaccac

SEQ ID NO: 245495 - RNA, 19 nt, Artificial Sequence
  Description of Artificial Sequence: Synthetic oligonucleotide
ggcaucacggaugcgcuuc

SEQ ID NO: 245496 - RNA, 19 nt, Artificial Sequence
  Description of Artificial Sequence: Synthetic oligonucleotide
acuccgaaacaggaauguu

SEQ ID NO: 245497 - RNA, 19 nt, Artificial Sequence
  Description of Artificial Sequence: Synthetic oligonucleotide
gccaaggcgaauggcauca

SEQ ID NO: 245498 - RNA, 19 nt, Artificial Sequence
  Description of Artificial Sequence: Synthetic oligonucleotide
gagcaguugcggucucuaa

SEQ ID NO: 245499 - RNA, 19 nt, Artificial Sequence
  Description of Artificial Sequence: Synthetic oligonucleotide
ccacacgcuagaugagaag

SEQ ID NO: 245500 - RNA, 19 nt, Artificial Sequence
  Description of Artificial Sequence: Synthetic oligonucleotide
acucguagcucugggcuuu

SEQ ID NO: 245501 - RNA, 19 nt, Artificial Sequence
  Description of Artificial Sequence: Synthetic oligonucleotide
ugcgcccuuuuagucucug

SEQ ID NO: 245502 - RNA, 19 nt, Artificial Sequence
  Description of Artificial Sequence: Synthetic oligonucleotide
gacgaccaagccugagacu

SEQ ID NO: 245503 - RNA, 19 nt, Artificial Sequence
  Description of Artificial Sequence: Synthetic oligonucleotide
cagaagugcgugggcuggc

SEQ ID NO: 245504 - RNA, 19 nt, Artificial Sequence
  Description of Artificial Sequence: Synthetic oligonucleotide
cgaccguuguguaguagag

SEQ ID NO: 245505 - RNA, 19 nt, Artificial Sequence
  Description of Artificial Sequence: Synthetic oligonucleotide
auguugccguguaguaugu

SEQ ID NO: 245506 - RNA, 19 nt, Artificial Sequence
  Description of Artificial Sequence: Synthetic oligonucleotide
uggagcaguugcggucucu

SEQ ID NO: 245507 - RNA, 19 nt, Artificial Sequence
  Description of Artificial Sequence: Synthetic oligonucleotide
gugccgaccuacagcagca

SEQ ID NO: 245508 - RNA, 19 nt, Artificial Sequence
  Description of Artificial Sequence: Synthetic oligonucleotide
cacucacaauucccuagaa

SEQ ID NO: 245509 - RNA, 19 nt, Artificial Sequence
  Description of Artificial Sequence: Synthetic oligonucleotide
agcccacggaauguacagu

SEQ ID NO: 245510 - RNA, 19 nt, Artificial Sequence
  Description of Artificial Sequence: Synthetic oligonucleotide
cugucgugcccgaggagaa

SEQ ID NO: 245511 - RNA, 19 nt, Artificial Sequence
  Description of Artificial Sequence: Synthetic oligonucleotide
ccagccgaccguuguguag

SEQ ID NO: 245512 - RNA, 19 nt, Artificial Sequence
  Description of Artificial Sequence: Synthetic oligonucleotide
ccgaagcguacuccauugg

SEQ ID NO: 245513 - RNA, 19 nt, Artificial Sequence
  Description of Artificial Sequence: Synthetic oligonucleotide
cagugcgcccuuuuagucu

SEQ ID NO: 245514 - RNA, 19 nt, Artificial Sequence
  Description of Artificial Sequence: Synthetic oligonucleotide
cgagguggaacuccagaug

SEQ ID NO: 245515 - RNA, 19 nt, Artificial Sequence
  Description of Artificial Sequence: Synthetic oligonucleotide
ccguuguguaguagagcag

SEQ ID NO: 245516 - RNA, 19 nt, Artificial Sequence
  Description of Artificial Sequence: Synthetic oligonucleotide
ggaaguccuuucacaacuc

SEQ ID NO: 245517 - RNA, 19 nt, Artificial Sequence
  Description of Artificial Sequence: Synthetic oligonucleotide
caguuaaggacagggaguu

SEQ ID NO: 245518 - RNA, 19 nt, Artificial Sequence
  Description of Artificial Sequence: Synthetic oligonucleotide
gaccacccgcuccucgcca

SEQ ID NO: 245519 - RNA, 19 nt, Artificial Sequence
  Description of Artificial Sequence: Synthetic oligonucleotide
uguggagcguguggagauu

SEQ ID NO: 245520 - RNA, 19 nt, Artificial Sequence
  Description of Artificial Sequence: Synthetic oligonucleotide
ccauugaguguguacggaa

SEQ ID NO: 245521 - RNA, 19 nt, Artificial Sequence
  Description of Artificial Sequence: Synthetic oligonucleotide
gguuccgggcuugaauuuc

SEQ ID NO: 245522 - RNA, 19 nt, Artificial Sequence
  Description of Artificial Sequence: Synthetic oligonucleotide
ggaguacacuggcucuuga

SEQ ID NO: 245523 - RNA, 19 nt, Artificial Sequence
  Description of Artificial Sequence: Synthetic oligonucleotide
ccaugcacuugggugcucc

SEQ ID NO: 245524 - RNA, 19 nt, Artificial Sequence
  Description of Artificial Sequence: Synthetic oligonucleotide
cacucgccagcagagggga

SEQ ID NO: 245525 - RNA, 19 nt, Artificial Sequence
  Description of Artificial Sequence: Synthetic oligonucleotide
uggcaucacggaugcgcuu

SEQ ID NO: 245526 - RNA, 19 nt, Artificial Sequence
  Description of Artificial Sequence: Synthetic oligonucleotide
gcccaugaaacaggagaug

SEQ ID NO: 245527 - RNA, 19 nt, Artificial Sequence
  Description of Artificial Sequence: Synthetic oligonucleotide
acgcaucuguauacauacu

SEQ ID NO: 245528 - RNA, 19 nt, Artificial Sequence
  Description of Artificial Sequence: Synthetic oligonucleotide
ccaugccaagguuccgggc

SEQ ID NO: 245529 - RNA, 19 nt, Artificial Sequence
  Description of Artificial Sequence: Synthetic oligonucleotide
gcaugugcacuguuaggua

SEQ ID NO: 245530 - RNA, 19 nt, Artificial Sequence
  Description of Artificial Sequence: Synthetic oligonucleotide
cgagccguuggcucagaag

SEQ ID NO: 245531 - RNA, 19 nt, Artificial Sequence
  Description of Artificial Sequence: Synthetic oligonucleotide
ggucucuaaagugucccua

SEQ ID NO: 245532 - RNA, 19 nt, Artificial Sequence
  Description of Artificial Sequence: Synthetic oligonucleotide
caccagaauuugugacaga

SEQ ID NO: 245533 - RNA, 19 nt, Artificial Sequence
  Description of Artificial Sequence: Synthetic oligonucleotide
aggcacgcugggccaugug

SEQ ID NO: 245534 - RNA, 19 nt, Artificial Sequence
  Description of Artificial Sequence: Synthetic oligonucleotide
gccauugaguguguacgga

SEQ ID NO: 245535 - RNA, 19 nt, Artificial Sequence
  Description of Artificial Sequence: Synthetic oligonucleotide
cacaucgcuccuccggugu

SEQ ID NO: 245536 - RNA, 19 nt, Artificial Sequence
  Description of Artificial Sequence: Synthetic oligonucleotide
ccugucgugcccgaggaga

SEQ ID NO: 245537 - RNA, 19 nt, Artificial Sequence
  Description of Artificial Sequence: Synthetic oligonucleotide
ugccugcgcgccuguccca

SEQ ID NO: 245538 - RNA, 19 nt, Artificial Sequence
  Description of Artificial Sequence: Synthetic oligonucleotide
accaugcacuugggugcuc

SEQ ID NO: 245539 - RNA, 19 nt, Artificial Sequence
  Description of Artificial Sequence: Synthetic oligonucleotide
ccauucucgucguuccaga

SEQ ID NO: 245540 - RNA, 19 nt, Artificial Sequence
  Description of Artificial Sequence: Synthetic oligonucleotide
cccacaacacauugggugu

SEQ ID NO: 245541 - RNA, 19 nt, Artificial Sequence
  Description of Artificial Sequence: Synthetic oligonucleotide
ccccgagucuccaggauga

SEQ ID NO: 245542 - RNA, 19 nt, Artificial Sequence
  Description of Artificial Sequence: Synthetic oligonucleotide
gaccagcggggagccauca

SEQ ID NO: 245543 - RNA, 19 nt, Artificial Sequence
  Description of Artificial Sequence: Synthetic oligonucleotide
gcgagguggaacuccagau

SEQ ID NO: 245544 - RNA, 19 nt, Artificial Sequence
  Description of Artificial Sequence: Synthetic oligonucleotide
gcgagcugacaggccaagg

SEQ ID NO: 245545 - RNA, 19 nt, Artificial Sequence
  Description of Artificial Sequence: Synthetic oligonucleotide
gcacagcuagauggugugc

SEQ ID NO: 245546 - RNA, 19 nt, Artificial Sequence
  Description of Artificial Sequence: Synthetic oligonucleotide
ggaacuccagauggcucca

SEQ ID NO: 245547 - RNA, 19 nt, Artificial Sequence
  Description of Artificial Sequence: Synthetic oligonucleotide
ggcgagcugacaggccaag

SEQ ID NO: 245548 - RNA, 19 nt, Artificial Sequence
  Description of Artificial Sequence: Synthetic oligonucleotide
ccagaauuugugacagacu

SEQ ID NO: 245549 - RNA, 19 nt, Artificial Sequence
  Description of Artificial Sequence: Synthetic oligonucleotide
gcaagccuaugugccgacc

SEQ ID NO: 245550 - RNA, 19 nt, Artificial Sequence
  Description of Artificial Sequence: Synthetic oligonucleotide
cagccgaccguuguguagu

SEQ ID NO: 245551 - RNA, 19 nt, Artificial Sequence
  Description of Artificial Sequence: Synthetic oligonucleotide
ccgaggagaacaugaugaa

SEQ ID NO: 245552 - RNA, 19 nt, Artificial Sequence
  Description of Artificial Sequence: Synthetic oligonucleotide
cucgccagcagaggggacu

SEQ ID NO: 245553 - RNA, 19 nt, Artificial Sequence
  Description of Artificial Sequence: Synthetic oligonucleotide
agccgaccguuguguagua

SEQ ID NO: 245554 - RNA, 19 nt, Artificial Sequence
  Description of Artificial Sequence: Synthetic oligonucleotide
gcaucacggaugcgcuuca

SEQ ID NO: 245555 - RNA, 19 nt, Artificial Sequence
  Description of Artificial Sequence: Synthetic oligonucleotide
aagccucagugcgcccuuu

SEQ ID NO: 245556 - RNA, 19 nt, Artificial Sequence
  Description of Artificial Sequence: Synthetic oligonucleotide
ccacaucgcuccuccggug

SEQ ID NO: 245557 - RNA, 19 nt, Artificial Sequence
  Description of Artificial Sequence: Synthetic oligonucleotide
ccgagcccacggaauguac

SEQ ID NO: 245558 - RNA, 19 nt, Artificial Sequence
  Description of Artificial Sequence: Synthetic oligonucleotide
cacuccggcccagcaugac

SEQ ID NO: 245559 - RNA, 19 nt, Artificial Sequence
  Description of Artificial Sequence: Synthetic oligonucleotide
aggugccugcgcgccuguc

SEQ ID NO: 245560 - RNA, 19 nt, Artificial Sequence
  Description of Artificial Sequence: Synthetic oligonucleotide
gggcacauggcgagcugac

SEQ ID NO: 245561 - RNA, 19 nt, Artificial Sequence
  Description of Artificial Sequence: Synthetic oligonucleotide
ccugacgaccaagccugag

SEQ ID NO: 245562 - RNA, 19 nt, Artificial Sequence
  Description of Artificial Sequence: Synthetic oligonucleotide
cucguagcucugggcuuuc

SEQ ID NO: 245563 - RNA, 19 nt, Artificial Sequence
  Description of Artificial Sequence: Synthetic oligonucleotide
augggacaaugggcucaug

SEQ ID NO: 245564 - RNA, 19 nt, Artificial Sequence
  Description of Artificial Sequence: Synthetic oligonucleotide
cgcccuuuuagucucugaa

SEQ ID NO: 245565 - RNA, 19 nt, Artificial Sequence
  Description of Artificial Sequence: Synthetic oligonucleotide
ccgagcugccgaagcguac

SEQ ID NO: 245566 - RNA, 19 nt, Artificial Sequence
  Description of Artificial Sequence: Synthetic oligonucleotide
gccuaugugccgaccuaca

SEQ ID NO: 245567 - RNA, 19 nt, Artificial Sequence
  Description of Artificial Sequence: Synthetic oligonucleotide
cgagcccacggaauguaca

SEQ ID NO: 245568 - RNA, 19 nt, Artificial Sequence
  Description of Artificial Sequence: Synthetic oligonucleotide
gucuggcgagguggaacuc

SEQ ID NO: 245569 - RNA, 19 nt, Artificial Sequence
  Description of Artificial Sequence: Synthetic oligonucleotide
agccuccacugagaagaua

SEQ ID NO: 245570 - RNA, 19 nt, Artificial Sequence
  Description of Artificial Sequence: Synthetic oligonucleotide
ccagcggggagccaucaua

SEQ ID NO: 245571 - RNA, 19 nt, Artificial Sequence
  Description of Artificial Sequence: Synthetic oligonucleotide
ugcgagccguuggcucaga

SEQ ID NO: 245572 - RNA, 19 nt, Artificial Sequence
  Description of Artificial Sequence: Synthetic oligonucleotide
caccaaagucuggcgaggu

SEQ ID NO: 245573 - RNA, 19 nt, Artificial Sequence
  Description of Artificial Sequence: Synthetic oligonucleotide
ccaugaaacaggagaugau

SEQ ID NO: 245574 - RNA, 19 nt, Artificial Sequence
  Description of Artificial Sequence: Synthetic oligonucleotide
cguguggagauugugaguu

SEQ ID NO: 245575 - RNA, 19 nt, Artificial Sequence
  Description of Artificial Sequence: Synthetic oligonucleotide
cagcaugacgaugccuccu

SEQ ID NO: 245576 - RNA, 19 nt, Artificial Sequence
  Description of Artificial Sequence: Synthetic oligonucleotide
gcgcccuuuuagucucuga

SEQ ID NO: 245577 - RNA, 19 nt, Artificial Sequence
  Description of Artificial Sequence: Synthetic oligonucleotide
gugcacuguuagguagaua

SEQ ID NO: 245578 - RNA, 19 nt, Artificial Sequence
  Description of Artificial Sequence: Synthetic oligonucleotide
cugccgaagcguacuccau

SEQ ID NO: 245579 - RNA, 19 nt, Artificial Sequence
  Description of Artificial Sequence: Synthetic oligonucleotide
ggugugcgagccguuggcu

SEQ ID NO: 245580 - RNA, 19 nt, Artificial Sequence
  Description of Artificial Sequence: Synthetic oligonucleotide
caucagcccagggguccca

SEQ ID NO: 245581 - RNA, 19 nt, Artificial Sequence
  Description of Artificial Sequence: Synthetic oligonucleotide
gccauguguccuggcuuca

SEQ ID NO: 245582 - RNA, 19 nt, Artificial Sequence
  Description of Artificial Sequence: Synthetic oligonucleotide
ggaccagcggggagccauc

SEQ ID NO: 245583 - RNA, 19 nt, Artificial Sequence
  Description of Artificial Sequence: Synthetic oligonucleotide
caagccucagugcgcccuu

SEQ ID NO: 245584 - RNA, 19 nt, Artificial Sequence
  Description of Artificial Sequence: Synthetic oligonucleotide
gccaagguuccgggcuuga

SEQ ID NO: 245585 - RNA, 19 nt, Artificial Sequence
  Description of Artificial Sequence: Synthetic oligonucleotide
gcgagccguuggcucagaa

SEQ ID NO: 245586 - RNA, 19 nt, Artificial Sequence
  Description of Artificial Sequence: Synthetic oligonucleotide
ccguuggcucagaaguccu

SEQ ID NO: 245587 - RNA, 19 nt, Artificial Sequence
  Description of Artificial Sequence: Synthetic oligonucleotide
cugcgcgccugucccacuu

SEQ ID NO: 245588 - RNA, 19 nt, Artificial Sequence
  Description of Artificial Sequence: Synthetic oligonucleotide
ccccagacggccuucccuu

SEQ ID NO: 245589 - RNA, 19 nt, Artificial Sequence
  Description of Artificial Sequence: Synthetic oligonucleotide
cguacuccauugggguuga

SEQ ID NO: 245590 - RNA, 19 nt, Artificial Sequence
  Description of Artificial Sequence: Synthetic oligonucleotide
cgagcugccgaagcguacu

SEQ ID NO: 245591 - RNA, 19 nt, Artificial Sequence
  Description of Artificial Sequence: Synthetic oligonucleotide
ccgaaacaggaauguuauu

SEQ ID NO: 245592 - RNA, 19 nt, Artificial Sequence
  Description of Artificial Sequence: Synthetic oligonucleotide
gugcgcccuuuuagucucu

SEQ ID NO: 245593 - RNA, 19 nt, Artificial Sequence
  Description of Artificial Sequence: Synthetic oligonucleotide
cguguaguaugugcuccuu

SEQ ID NO: 245594 - RNA, 19 nt, Artificial Sequence
  Description of Artificial Sequence: Synthetic oligonucleotide
cgggaccagcggggagcca

SEQ ID NO: 245595 - RNA, 19 nt, Artificial Sequence
  Description of Artificial Sequence: Synthetic oligonucleotide
uauauauuaugcuagaugg

SEQ ID NO: 245596 - RNA, 19 nt, Artificial Sequence
  Description of Artificial Sequence: Synthetic oligonucleotide
ugagauaagaaccuaaugc

SEQ ID NO: 245597 - RNA, 19 nt, Artificial Sequence
  Description of Artificial Sequence: Synthetic oligonucleotide
aaggccaaaggauuuaaac

SEQ ID NO: 245598 - RNA, 19 nt, Artificial Sequence
  Description of Artificial Sequence: Synthetic oligonucleotide
aaguauugccaauggaagc

SEQ ID NO: 245599 - RNA, 19 nt, Artificial Sequence
  Description of Artificial Sequence: Synthetic oligonucleotide
acaagaguuaccuaaagug

SEQ ID NO: 245600 - RNA, 19 nt, Artificial Sequence
  Description of Artificial Sequence: Synthetic oligonucleotide
uguacuaucaugacuagcu

SEQ ID NO: 245601 - RNA, 19 nt, Artificial Sequence
  Description of Artificial Sequence: Synthetic oligonucleotide
uccauuaauauaaaguaga

SEQ ID NO: 245602 - RNA, 19 nt, Artificial Sequence
  Description of Artificial Sequence: Synthetic oligonucleotide
caagauuucacuauguaac

SEQ ID NO: 245603 - RNA, 19 nt, Artificial Sequence
  Description of Artificial Sequence: Synthetic oligonucleotide
agaaccgugagauaagaac

SEQ ID NO: 245604 - RNA, 19 nt, Artificial Sequence
  Description of Artificial Sequence: Synthetic oligonucleotide
aaggacaagcuacauuacc

SEQ ID NO: 245605 - RNA, 19 nt, Artificial Sequence
  Description of Artificial Sequence: Synthetic oligonucleotide
aaauaagacuguccacucc

SEQ ID NO: 245606 - RNA, 19 nt, Artificial Sequence
  Description of Artificial Sequence: Synthetic oligonucleotide
uauauugauaggaaaccag

SEQ ID NO: 245607 - RNA, 19 nt, Artificial Sequence
  Description of Artificial Sequence: Synthetic oligonucleotide
aagaguuaccuaaagugcc

SEQ ID NO: 245608 - RNA, 19 nt, Artificial Sequence
  Description of Artificial Sequence: Synthetic oligonucleotide
aggccaaaggauuuaaacc

SEQ ID NO: 245609 - RNA, 19 nt, Artificial Sequence
  Description of Artificial Sequence: Synthetic oligonucleotide
aaaagaacugcaauggaag

SEQ ID NO: 245610 - RNA, 19 nt, Artificial Sequence
  Description of Artificial Sequence: Synthetic oligonucleotide
aauaagacuguccacuccu

SEQ ID NO: 245611 - RNA, 19 nt, Artificial Sequence
  Description of Artificial Sequence: Synthetic oligonucleotide
aacucaauaggccauuaug

SEQ ID NO: 245612 - RNA, 19 nt, Artificial Sequence
  Description of Artificial Sequence: Synthetic oligonucleotide
uuuaagguuacucugucuc

SEQ ID NO: 245613 - RNA, 19 nt, Artificial Sequence
  Description of Artificial Sequence: Synthetic oligonucleotide
uugacugugagaaaaggga

SEQ ID NO: 245614 - RNA, 19 nt, Artificial Sequence
  Description of Artificial Sequence: Synthetic oligonucleotide
uacauuaccaaaauagcuc

SEQ ID NO: 245615 - RNA, 19 nt, Artificial Sequence
  Description of Artificial Sequence: Synthetic oligonucleotide
caauaggccauuaugagug

SEQ ID NO: 245616 - RNA, 19 nt, Artificial Sequence
  Description of Artificial Sequence: Synthetic oligonucleotide
uuauucaguauauauuaug

SEQ ID NO: 245617 - RNA, 19 nt, Artificial Sequence
  Description of Artificial Sequence: Synthetic oligonucleotide
uuaagugcaagcauuguuc

SEQ ID NO: 245618 - RNA, 19 nt, Artificial Sequence
  Description of Artificial Sequence: Synthetic oligonucleotide
guauauauuaugcuagaug

SEQ ID NO: 245619 - RNA, 19 nt, Artificial Sequence
  Description of Artificial Sequence: Synthetic oligonucleotide
acuacaguacuguugaucu

SEQ ID NO: 245620 - RNA, 19 nt, Artificial Sequence
  Description of Artificial Sequence: Synthetic oligonucleotide
agggaccauaucuagaugg

SEQ ID NO: 245621 - RNA, 19 nt, Artificial Sequence
  Description of Artificial Sequence: Synthetic oligonucleotide
agccuuguggaauaacucc

SEQ ID NO: 245622 - RNA, 19 nt, Artificial Sequence
  Description of Artificial Sequence: Synthetic oligonucleotide
agugcaagcauuguucugc

SEQ ID NO: 245623 - RNA, 19 nt, Artificial Sequence
  Description of Artificial Sequence: Synthetic oligonucleotide
acaaacgagagcgauuucc

SEQ ID NO: 245624 - RNA, 19 nt, Artificial Sequence
  Description of Artificial Sequence: Synthetic oligonucleotide
uccauugaucuccauauug

SEQ ID NO: 245625 - RNA, 19 nt, Artificial Sequence
  Description of Artificial Sequence: Synthetic oligonucleotide
aguuugacuaacacaaggc

SEQ ID NO: 245626 - RNA, 19 nt, Artificial Sequence
  Description of Artificial Sequence: Synthetic oligonucleotide
uugacuaacacaaggcacu

SEQ ID NO: 245627 - RNA, 19 nt, Artificial Sequence
  Description of Artificial Sequence: Synthetic oligonucleotide
ggagauagguuuuagcugg

SEQ ID NO: 245628 - RNA, 19 nt, Artificial Sequence
  Description of Artificial Sequence: Synthetic oligonucleotide
aaccuaaugcuacucuuag

SEQ ID NO: 245629 - RNA, 19 nt, Artificial Sequence
  Description of Artificial Sequence: Synthetic oligonucleotide
caaguuaagacaauguaca

SEQ ID NO: 245630 - RNA, 19 nt, Artificial Sequence
  Description of Artificial Sequence: Synthetic oligonucleotide
cuugacugugagaaaaggg

SEQ ID NO: 245631 - RNA, 19 nt, Artificial Sequence
  Description of Artificial Sequence: Synthetic oligonucleotide
ucugguuagauuccauugc

SEQ ID NO: 245632 - RNA, 19 nt, Artificial Sequence
  Description of Artificial Sequence: Synthetic oligonucleotide
ucuucaacugugacgcugg

SEQ ID NO: 245633 - RNA, 19 nt, Artificial Sequence
  Description of Artificial Sequence: Synthetic oligonucleotide
uccacuaccaagccaacgc

SEQ ID NO: 245634 - RNA, 19 nt, Artificial Sequence
  Description of Artificial Sequence: Synthetic oligonucleotide
cuuggaaggaguaucuccc

SEQ ID NO: 245635 - RNA, 19 nt, Artificial Sequence
  Description of Artificial Sequence: Synthetic oligonucleotide
aaaaccccaaucugcacug

SEQ ID NO: 245636 - RNA, 19 nt, Artificial Sequence
  Description of Artificial Sequence: Synthetic oligonucleotide
uaaggugucaggaaaguau

SEQ ID NO: 245637 - RNA, 19 nt, Artificial Sequence
  Description of Artificial Sequence: Synthetic oligonucleotide
ugaagaucuuugaugcuag

SEQ ID NO: 245638 - RNA, 19 nt, Artificial Sequence
  Description of Artificial Sequence: Synthetic oligonucleotide
acuagagcucauuauuuuc

SEQ ID NO: 245639 - RNA, 19 nt, Artificial Sequence
  Description of Artificial Sequence: Synthetic oligonucleotide
ucugugucagguuacugag

SEQ ID NO: 245640 - RNA, 19 nt, Artificial Sequence
  Description of Artificial Sequence: Synthetic oligonucleotide
ucagagacaagauuucacu

SEQ ID NO: 245641 - RNA, 19 nt, Artificial Sequence
  Description of Artificial Sequence: Synthetic oligonucleotide
gauaagaaccuaaugcuac

SEQ ID NO: 245642 - RNA, 19 nt, Artificial Sequence
  Description of Artificial Sequence: Synthetic oligonucleotide
cauccccucaaauuuaagg

SEQ ID NO: 245643 - RNA, 19 nt, Artificial Sequence
  Description of Artificial Sequence: Synthetic oligonucleotide
acuaaggugggaaacacuc

SEQ ID NO: 245644 - RNA, 19 nt, Artificial Sequence
  Description of Artificial Sequence: Synthetic oligonucleotide
gaguugugaagguacaggc

SEQ ID NO: 245645 - RNA, 19 nt, Artificial Sequence
  Description of Artificial Sequence: Synthetic oligonucleotide
gaaccgugagauaagaacc

SEQ ID NO: 245646 - RNA, 19 nt, Artificial Sequence
  Description of Artificial Sequence: Synthetic oligonucleotide
uauuaugcuagaugguaca

SEQ ID NO: 245647 - RNA, 19 nt, Artificial Sequence
  Description of Artificial Sequence: Synthetic oligonucleotide
uucugguuagauuccauug

SEQ ID NO: 245648 - RNA, 19 nt, Artificial Sequence
  Description of Artificial Sequence: Synthetic oligonucleotide
augagugugaacccaucac

SEQ ID NO: 245649 - RNA, 19 nt, Artificial Sequence
  Description of Artificial Sequence: Synthetic oligonucleotide
ugcuuauacauuaccaaaa

SEQ ID NO: 245650 - RNA, 19 nt, Artificial Sequence
  Description of Artificial Sequence: Synthetic oligonucleotide
ccaucuuuaagcuagguac

SEQ ID NO: 245651 - RNA, 19 nt, Artificial Sequence
  Description of Artificial Sequence: Synthetic oligonucleotide
aucuagauggcugguaagc

SEQ ID NO: 245652 - RNA, 19 nt, Artificial Sequence
  Description of Artificial Sequence: Synthetic oligonucleotide
agauuucacuauguaaccc

SEQ ID NO: 245653 - RNA, 19 nt, Artificial Sequence
  Description of Artificial Sequence: Synthetic oligonucleotide
ugugagagcacugaucagc

SEQ ID NO: 245654 - RNA, 19 nt, Artificial Sequence
  Description of Artificial Sequence: Synthetic oligonucleotide
uacuaucaugacuagcuug

SEQ ID NO: 245655 - RNA, 19 nt, Artificial Sequence
  Description of Artificial Sequence: Synthetic oligonucleotide
uuucucgaagcuuggauac

SEQ ID NO: 245656 - RNA, 19 nt, Artificial Sequence
  Description of Artificial Sequence: Synthetic oligonucleotide
ucaauaggccauuaugagu

SEQ ID NO: 245657 - RNA, 19 nt, Artificial Sequence
  Description of Artificial Sequence: Synthetic oligonucleotide
aaagagggagaaccgugag

SEQ ID NO: 245658 - RNA, 19 nt, Artificial Sequence
  Description of Artificial Sequence: Synthetic oligonucleotide
gccauuaugagugugaacc

SEQ ID NO: 245659 - RNA, 19 nt, Artificial Sequence
  Description of Artificial Sequence: Synthetic oligonucleotide
uuuaagugcaagcauuguu

SEQ ID NO: 245660 - RNA, 19 nt, Artificial Sequence
  Description of Artificial Sequence: Synthetic oligonucleotide
uuacccucaguauauuuca

SEQ ID NO: 245661 - RNA, 19 nt, Artificial Sequence
  Description of Artificial Sequence: Synthetic oligonucleotide
aagaaccuaaugcuacucu

SEQ ID NO: 245662 - RNA, 19 nt, Artificial Sequence
  Description of Artificial Sequence: Synthetic oligonucleotide
uaugagugugaacccauca

SEQ ID NO: 245663 - RNA, 19 nt, Artificial Sequence
  Description of Artificial Sequence: Synthetic oligonucleotide
ccuuaaaugccacugaagc

SEQ ID NO: 245664 - RNA, 19 nt, Artificial Sequence
  Description of Artificial Sequence: Synthetic oligonucleotide
uccuuaaaugccacugaag

SEQ ID NO: 245665 - RNA, 19 nt, Artificial Sequence
  Description of Artificial Sequence: Synthetic oligonucleotide
uaagaaacuaaggugggaa

SEQ ID NO: 245666 - RNA, 19 nt, Artificial Sequence
  Description of Artificial Sequence: Synthetic oligonucleotide
cucuaaggaguugugaagg

SEQ ID NO: 245667 - RNA, 19 nt, Artificial Sequence
  Description of Artificial Sequence: Synthetic oligonucleotide
aggagauagguuuuagcug

SEQ ID NO: 245668 - RNA, 19 nt, Artificial Sequence
  Description of Artificial Sequence: Synthetic oligonucleotide
guugaaguguauuuucaac

SEQ ID NO: 245669 - RNA, 19 nt, Artificial Sequence
  Description of Artificial Sequence: Synthetic oligonucleotide
caggcaagcucuuuguugc

SEQ ID NO: 245670 - RNA, 19 nt, Artificial Sequence
  Description of Artificial Sequence: Synthetic oligonucleotide
uugcuuauacauuaccaaa

SEQ ID NO: 245671 - RNA, 19 nt, Artificial Sequence
  Description of Artificial Sequence: Synthetic oligonucleotide
uggaauaacuccugaagau

SEQ ID NO: 245672 - RNA, 19 nt, Artificial Sequence
  Description of Artificial Sequence: Synthetic oligonucleotide
uuuguugcuuccauugauc

SEQ ID NO: 245673 - RNA, 19 nt, Artificial Sequence
  Description of Artificial Sequence: Synthetic oligonucleotide
auacauuaccaaaauagcu

SEQ ID NO: 245674 - RNA, 19 nt, Artificial Sequence
  Description of Artificial Sequence: Synthetic oligonucleotide
ugugaacccaucacaguca

SEQ ID NO: 245675 - RNA, 19 nt, Artificial Sequence
  Description of Artificial Sequence: Synthetic oligonucleotide
aacgagagcgauuuccaau

SEQ ID NO: 245676 - RNA, 19 nt, Artificial Sequence
  Description of Artificial Sequence: Synthetic oligonucleotide
uuuaaagagggagaaccgu

SEQ ID NO: 245677 - RNA, 19 nt, Artificial Sequence
  Description of Artificial Sequence: Synthetic oligonucleotide
gauagcagaucuugcagca

SEQ ID NO: 245678 - RNA, 19 nt, Artificial Sequence
  Description of Artificial Sequence: Synthetic oligonucleotide
aguauugccaauggaagcu

SEQ ID NO: 245679 - RNA, 19 nt, Artificial Sequence
  Description of Artificial Sequence: Synthetic oligonucleotide
aaguuaagacaauguacaa

SEQ ID NO: 245680 - RNA, 19 nt, Artificial Sequence
  Description of Artificial Sequence: Synthetic oligonucleotide
aagaaacuaaggugggaaa

SEQ ID NO: 245681 - RNA, 19 nt, Artificial Sequence
  Description of Artificial Sequence: Synthetic oligonucleotide
ugaggaagguuauucagua

SEQ ID NO: 245682 - RNA, 19 nt, Artificial Sequence
  Description of Artificial Sequence: Synthetic oligonucleotide
ugagaauuugaauuaucuu

SEQ ID NO: 245683 - RNA, 19 nt, Artificial Sequence
  Description of Artificial Sequence: Synthetic oligonucleotide
uggacuagagcucauuauu

SEQ ID NO: 245684 - RNA, 19 nt, Artificial Sequence
  Description of Artificial Sequence: Synthetic oligonucleotide
ugcuagaaaucccuggcaa

SEQ ID NO: 245685 - RNA, 19 nt, Artificial Sequence
  Description of Artificial Sequence: Synthetic oligonucleotide
uagguuagguucauauaac

SEQ ID NO: 245686 - RNA, 19 nt, Artificial Sequence
  Description of Artificial Sequence: Synthetic oligonucleotide
accuaaugcuacucuuagc

SEQ ID NO: 245687 - RNA, 19 nt, Artificial Sequence
  Description of Artificial Sequence: Synthetic oligonucleotide
agcaucguaaguagucucc

SEQ ID NO: 245688 - RNA, 19 nt, Artificial Sequence
  Description of Artificial Sequence: Synthetic oligonucleotide
uuggauaccugagaauuug

SEQ ID NO: 245689 - RNA, 19 nt, Artificial Sequence
  Description of Artificial Sequence: Synthetic oligonucleotide
cuaaggugggaaacacucg

SEQ ID NO: 245690 - RNA, 19 nt, Artificial Sequence
  Description of Artificial Sequence: Synthetic oligonucleotide
gauagguuuuagcuggguc

SEQ ID NO: 245691 - RNA, 19 nt, Artificial Sequence
  Description of Artificial Sequence: Synthetic oligonucleotide
aacccuguuuccccaauga

SEQ ID NO: 245692 - RNA, 19 nt, Artificial Sequence
  Description of Artificial Sequence: Synthetic oligonucleotide
uggaugcacaaguuaagac

SEQ ID NO: 245693 - RNA, 19 nt, Artificial Sequence
  Description of Artificial Sequence: Synthetic oligonucleotide
uuaagguuacucugucucu

SEQ ID NO: 245694 - RNA, 19 nt, Artificial Sequence
  Description of Artificial Sequence: Synthetic oligonucleotide
caaggagauagguuuuagc

SEQ ID NO: 245695 - RNA, 19 nt, Artificial Sequence
  Description of Artificial Sequence: Synthetic oligonucleotide
auaagaaccuaaugcuacu

SEQ ID NO: 245696 - RNA, 19 nt, Artificial Sequence
  Description of Artificial Sequence: Synthetic oligonucleotide
gugagauaagaaccuaaug

SEQ ID NO: 245697 - RNA, 19 nt, Artificial Sequence
  Description of Artificial Sequence: Synthetic oligonucleotide
ucuugaccagccuugugga

SEQ ID NO: 245698 - RNA, 19 nt, Artificial Sequence
  Description of Artificial Sequence: Synthetic oligonucleotide
acuaucaugacuagcuuga

SEQ ID NO: 245699 - RNA, 19 nt, Artificial Sequence
  Description of Artificial Sequence: Synthetic oligonucleotide
gugucaggaaaguaucugc

SEQ ID NO: 245700 - RNA, 19 nt, Artificial Sequence
  Description of Artificial Sequence: Synthetic oligonucleotide
gaacccaucacagucaaaa

SEQ ID NO: 245701 - RNA, 19 nt, Artificial Sequence
  Description of Artificial Sequence: Synthetic oligonucleotide
uaucuagauggcugguaag

SEQ ID NO: 245702 - RNA, 19 nt, Artificial Sequence
  Description of Artificial Sequence: Synthetic oligonucleotide
aagauggacacuauuuaaa

SEQ ID NO: 245703 - RNA, 19 nt, Artificial Sequence
  Description of Artificial Sequence: Synthetic oligonucleotide
uguauugccuccacagcaa

SEQ ID NO: 245704 - RNA, 19 nt, Artificial Sequence
  Description of Artificial Sequence: Synthetic oligonucleotide
uaagcaagccaaugaggug

SEQ ID NO: 245705 - RNA, 19 nt, Artificial Sequence
  Description of Artificial Sequence: Synthetic oligonucleotide
ucguaaguagucucccuug

SEQ ID NO: 245706 - RNA, 19 nt, Artificial Sequence
  Description of Artificial Sequence: Synthetic oligonucleotide
gaaccuagggaauuccaga

SEQ ID NO: 245707 - RNA, 19 nt, Artificial Sequence
  Description of Artificial Sequence: Synthetic oligonucleotide
aguuaccuaaagugccagg

SEQ ID NO: 245708 - RNA, 19 nt, Artificial Sequence
  Description of Artificial Sequence: Synthetic oligonucleotide
auguacuaucaugacuagc

SEQ ID NO: 245709 - RNA, 19 nt, Artificial Sequence
  Description of Artificial Sequence: Synthetic oligonucleotide
gaccaagaaauaaacccug

SEQ ID NO: 245710 - RNA, 19 nt, Artificial Sequence
  Description of Artificial Sequence: Synthetic oligonucleotide
uaccuaaagugccaggaua

SEQ ID NO: 245711 - RNA, 19 nt, Artificial Sequence
  Description of Artificial Sequence: Synthetic oligonucleotide
auugacaaggccaaaggau

SEQ ID NO: 245712 - RNA, 19 nt, Artificial Sequence
  Description of Artificial Sequence: Synthetic oligonucleotide
agguagguuagguucauau

SEQ ID NO: 245713 - RNA, 19 nt, Artificial Sequence
  Description of Artificial Sequence: Synthetic oligonucleotide
uaggccauuaugaguguga

SEQ ID NO: 245714 - RNA, 19 nt, Artificial Sequence
  Description of Artificial Sequence: Synthetic oligonucleotide
auuucacuauguaacccgg

SEQ ID NO: 245715 - RNA, 19 nt, Artificial Sequence
  Description of Artificial Sequence: Synthetic oligonucleotide
uaagguuacucugucucug

SEQ ID NO: 245716 - RNA, 19 nt, Artificial Sequence
  Description of Artificial Sequence: Synthetic oligonucleotide
agauaaguuaaaauggcua

SEQ ID NO: 245717 - RNA, 19 nt, Artificial Sequence
  Description of Artificial Sequence: Synthetic oligonucleotide
aagagggagaaccgugaga

SEQ ID NO: 245718 - RNA, 19 nt, Artificial Sequence
  Description of Artificial Sequence: Synthetic oligonucleotide
ugacaaacgagagcgauuu

SEQ ID NO: 245719 - RNA, 19 nt, Artificial Sequence
  Description of Artificial Sequence: Synthetic oligonucleotide
acucgagagcugcugauug

SEQ ID NO: 245720 - RNA, 19 nt, Artificial Sequence
  Description of Artificial Sequence: Synthetic oligonucleotide
gcuauauugauaggaaacc

SEQ ID NO: 245721 - RNA, 19 nt, Artificial Sequence
  Description of Artificial Sequence: Synthetic oligonucleotide
aaacccuguuuccccaaug

SEQ ID NO: 245722 - RNA, 19 nt, Artificial Sequence
  Description of Artificial Sequence: Synthetic oligonucleotide
uagucucccuugacaaacg

SEQ ID NO: 245723 - RNA, 19 nt, Artificial Sequence
  Description of Artificial Sequence: Synthetic oligonucleotide
aaccccaaucugcacugag

SEQ ID NO: 245724 - RNA, 19 nt, Artificial Sequence
  Description of Artificial Sequence: Synthetic oligonucleotide
uuaagaaacuaagguggga

SEQ ID NO: 245725 - RNA, 19 nt, Artificial Sequence
  Description of Artificial Sequence: Synthetic oligonucleotide
cccuugacaaacgagagcg

SEQ ID NO: 245726 - RNA, 19 nt, Artificial Sequence
  Description of Artificial Sequence: Synthetic oligonucleotide
agaugggcaaggcaaacau

SEQ ID NO: 245727 - RNA, 19 nt, Artificial Sequence
  Description of Artificial Sequence: Synthetic oligonucleotide
aggugauuuacugcagaac

SEQ ID NO: 245728 - RNA, 19 nt, Artificial Sequence
  Description of Artificial Sequence: Synthetic oligonucleotide
uaccugagaauuugaauua

SEQ ID NO: 245729 - RNA, 19 nt, Artificial Sequence
  Description of Artificial Sequence: Synthetic oligonucleotide
aaggaguaucucccaucuc

SEQ ID NO: 245730 - RNA, 19 nt, Artificial Sequence
  Description of Artificial Sequence: Synthetic oligonucleotide
gugggaaacacucgagagc

SEQ ID NO: 245731 - RNA, 19 nt, Artificial Sequence
  Description of Artificial Sequence: Synthetic oligonucleotide
aaaagggaccauaucuaga

SEQ ID NO: 245732 - RNA, 19 nt, Artificial Sequence
  Description of Artificial Sequence: Synthetic oligonucleotide
gcaaggcaaacauuaaggc

SEQ ID NO: 245733 - RNA, 19 nt, Artificial Sequence
  Description of Artificial Sequence: Synthetic oligonucleotide
ucuagauggcugguaagca

SEQ ID NO: 245734 - RNA, 19 nt, Artificial Sequence
  Description of Artificial Sequence: Synthetic oligonucleotide
aguuaagacaauguacaaa

SEQ ID NO: 245735 - RNA, 19 nt, Artificial Sequence
  Description of Artificial Sequence: Synthetic oligonucleotide
uaucccacuacaguacugu

SEQ ID NO: 245736 - RNA, 19 nt, Artificial Sequence
  Description of Artificial Sequence: Synthetic oligonucleotide
acuaccaagccaacgcagg

SEQ ID NO: 245737 - RNA, 19 nt, Artificial Sequence
  Description of Artificial Sequence: Synthetic oligonucleotide
acuagcuugaggaagguua

SEQ ID NO: 245738 - RNA, 19 nt, Artificial Sequence
  Description of Artificial Sequence: Synthetic oligonucleotide
guaaagcacagaugaaguc

SEQ ID NO: 245739 - RNA, 19 nt, Artificial Sequence
  Description of Artificial Sequence: Synthetic oligonucleotide
uuuggggauuuccuggaau

SEQ ID NO: 245740 - RNA, 19 nt, Artificial Sequence
  Description of Artificial Sequence: Synthetic oligonucleotide
aaguaagucugcagccgac

SEQ ID NO: 245741 - RNA, 19 nt, Artificial Sequence
  Description of Artificial Sequence: Synthetic oligonucleotide
cagagaaaucugcuuauuc

SEQ ID NO: 245742 - RNA, 19 nt, Artificial Sequence
  Description of Artificial Sequence: Synthetic oligonucleotide
uauugccaauggaagcuac

SEQ ID NO: 245743 - RNA, 19 nt, Artificial Sequence
  Description of Artificial Sequence: Synthetic oligonucleotide
ucccuugacaaacgagagc

SEQ ID NO: 245744 - RNA, 19 nt, Artificial Sequence
  Description of Artificial Sequence: Synthetic oligonucleotide
uuucacuauguaacccgga

SEQ ID NO: 245745 - RNA, 19 nt, Artificial Sequence
  Description of Artificial Sequence: Synthetic oligonucleotide
gcuccauuaauauaaagua

SEQ ID NO: 245746 - RNA, 19 nt, Artificial Sequence
  Description of Artificial Sequence: Synthetic oligonucleotide
uuaccuaaagugccaggau

SEQ ID NO: 245747 - RNA, 19 nt, Artificial Sequence
  Description of Artificial Sequence: Synthetic oligonucleotide
uccacucccaaaacagaac

SEQ ID NO: 245748 - RNA, 19 nt, Artificial Sequence
  Description of Artificial Sequence: Synthetic oligonucleotide
cucccuugacaaacgagag

SEQ ID NO: 245749 - RNA, 19 nt, Artificial Sequence
  Description of Artificial Sequence: Synthetic oligonucleotide
guuaccuaaagugccagga

SEQ ID NO: 245750 - RNA, 19 nt, Artificial Sequence
  Description of Artificial Sequence: Synthetic oligonucleotide
ggauuuaaacccaaaguca

SEQ ID NO: 245751 - RNA, 19 nt, Artificial Sequence
  Description of Artificial Sequence: Synthetic oligonucleotide
agaaccuaaugcuacucuu

SEQ ID NO: 245752 - RNA, 19 nt, Artificial Sequence
  Description of Artificial Sequence: Synthetic oligonucleotide
cugagaauuugaauuaucu

SEQ ID NO: 245753 - RNA, 19 nt, Artificial Sequence
  Description of Artificial Sequence: Synthetic oligonucleotide
agaaccuagggaauuccag

SEQ ID NO: 245754 - RNA, 19 nt, Artificial Sequence
  Description of Artificial Sequence: Synthetic oligonucleotide
ggauagcagaucuugcagc

SEQ ID NO: 245755 - RNA, 19 nt, Artificial Sequence
  Description of Artificial Sequence: Synthetic oligonucleotide
agaucuugcagcaucguaa

SEQ ID NO: 245756 - RNA, 19 nt, Artificial Sequence
  Description of Artificial Sequence: Synthetic oligonucleotide
gaaguuugacuaacacaag

SEQ ID NO: 245757 - RNA, 19 nt, Artificial Sequence
  Description of Artificial Sequence: Synthetic oligonucleotide
cugcugauugacaaggcca

SEQ ID NO: 245758 - RNA, 19 nt, Artificial Sequence
  Description of Artificial Sequence: Synthetic oligonucleotide
aaacgagagcgauuuccaa

SEQ ID NO: 245759 - RNA, 19 nt, Artificial Sequence
  Description of Artificial Sequence: Synthetic oligonucleotide
cuguauugccuccacagca

SEQ ID NO: 245760 - RNA, 19 nt, Artificial Sequence
  Description of Artificial Sequence: Synthetic oligonucleotide
uuuuaagugcaagcauugu

SEQ ID NO: 245761 - RNA, 19 nt, Artificial Sequence
  Description of Artificial Sequence: Synthetic oligonucleotide
ggugauuuacugcagaacu

SEQ ID NO: 245762 - RNA, 19 nt, Artificial Sequence
  Description of Artificial Sequence: Synthetic oligonucleotide
accaagccaacgcaggcca

SEQ ID NO: 245763 - RNA, 19 nt, Artificial Sequence
  Description of Artificial Sequence: Synthetic oligonucleotide
guagucucccuugacaaac

SEQ ID NO: 245764 - RNA, 19 nt, Artificial Sequence
  Description of Artificial Sequence: Synthetic oligonucleotide
agcucauuauuuuccugca

SEQ ID NO: 245765 - RNA, 19 nt, Artificial Sequence
  Description of Artificial Sequence: Synthetic oligonucleotide
ugccaauggaagcuacacu

SEQ ID NO: 245766 - RNA, 19 nt, Artificial Sequence
  Description of Artificial Sequence: Synthetic oligonucleotide
uguaacccggacuggacua

SEQ ID NO: 245767 - RNA, 19 nt, Artificial Sequence
  Description of Artificial Sequence: Synthetic oligonucleotide
uauugccuccacagcaaga

SEQ ID NO: 245768 - RNA, 19 nt, Artificial Sequence
  Description of Artificial Sequence: Synthetic oligonucleotide
ggagcaaugcuuuaagaaa

SEQ ID NO: 245769 - RNA, 19 nt, Artificial Sequence
  Description of Artificial Sequence: Synthetic oligonucleotide
cauguacuaucaugacuag

SEQ ID NO: 245770 - RNA, 19 nt, Artificial Sequence
  Description of Artificial Sequence: Synthetic oligonucleotide
gcucuuucaagucucagga

SEQ ID NO: 245771 - RNA, 19 nt, Artificial Sequence
  Description of Artificial Sequence: Synthetic oligonucleotide
aguauauauuaugcuagau

SEQ ID NO: 245772 - RNA, 19 nt, Artificial Sequence
  Description of Artificial Sequence: Synthetic oligonucleotide
cacuaccaagccaacgcag

SEQ ID NO: 245773 - RNA, 19 nt, Artificial Sequence
  Description of Artificial Sequence: Synthetic oligonucleotide
acgagagcgauuuccaauu

SEQ ID NO: 245774 - RNA, 19 nt, Artificial Sequence
  Description of Artificial Sequence: Synthetic oligonucleotide
uugccaauggaagcuacac

SEQ ID NO: 245775 - RNA, 19 nt, Artificial Sequence
  Description of Artificial Sequence: Synthetic oligonucleotide
uuaugagugugaacccauc

SEQ ID NO: 245776 - RNA, 19 nt, Artificial Sequence
  Description of Artificial Sequence: Synthetic oligonucleotide
ggaauacccaaauguauuc

SEQ ID NO: 245777 - RNA, 19 nt, Artificial Sequence
  Description of Artificial Sequence: Synthetic oligonucleotide
cuaccaagccaacgcaggc

SEQ ID NO: 245778 - RNA, 19 nt, Artificial Sequence
  Description of Artificial Sequence: Synthetic oligonucleotide
aucugccuacaaauaaaac

SEQ ID NO: 245779 - RNA, 19 nt, Artificial Sequence
  Description of Artificial Sequence: Synthetic oligonucleotide
caaagcacacaggggauag

SEQ ID NO: 245780 - RNA, 19 nt, Artificial Sequence
  Description of Artificial Sequence: Synthetic oligonucleotide
ugaaaaccccaaucugcac

SEQ ID NO: 245781 - RNA, 19 nt, Artificial Sequence
  Description of Artificial Sequence: Synthetic oligonucleotide
aggugggaaacacucgaga

SEQ ID NO: 245782 - RNA, 19 nt, Artificial Sequence
  Description of Artificial Sequence: Synthetic oligonucleotide
gauaggcuuuuguggcucc

SEQ ID NO: 245783 - RNA, 19 nt, Artificial Sequence
  Description of Artificial Sequence: Synthetic oligonucleotide
guaagcaagccaaugaggu

SEQ ID NO: 245784 - RNA, 19 nt, Artificial Sequence
  Description of Artificial Sequence: Synthetic oligonucleotide
uuuucugguuagauuccau

SEQ ID NO: 245785 - RNA, 19 nt, Artificial Sequence
  Description of Artificial Sequence: Synthetic oligonucleotide
gaguuaccuaaagugccag

SEQ ID NO: 245786 - RNA, 19 nt, Artificial Sequence
  Description of Artificial Sequence: Synthetic oligonucleotide
aauccacucccaaaacaga

SEQ ID NO: 245787 - RNA, 19 nt, Artificial Sequence
  Description of Artificial Sequence: Synthetic oligonucleotide
aaaucccuggcaaggagau

SEQ ID NO: 245788 - RNA, 19 nt, Artificial Sequence
  Description of Artificial Sequence: Synthetic oligonucleotide
uugauggaucugaugugaa

SEQ ID NO: 245789 - RNA, 19 nt, Artificial Sequence
  Description of Artificial Sequence: Synthetic oligonucleotide
aucguaaguagucucccuu

SEQ ID NO: 245790 - RNA, 19 nt, Artificial Sequence
  Description of Artificial Sequence: Synthetic oligonucleotide
ucauccccucaaauuuaag

SEQ ID NO: 245791 - RNA, 19 nt, Artificial Sequence
  Description of Artificial Sequence: Synthetic oligonucleotide
acaagcuacauuacccuca

SEQ ID NO: 245792 - RNA, 19 nt, Artificial Sequence
  Description of Artificial Sequence: Synthetic oligonucleotide
caaacgagagcgauuucca

SEQ ID NO: 245793 - RNA, 19 nt, Artificial Sequence
  Description of Artificial Sequence: Synthetic oligonucleotide
uucaagucucaggaauacc

SEQ ID NO: 245794 - RNA, 19 nt, Artificial Sequence
  Description of Artificial Sequence: Synthetic oligonucleotide
uugacaaacgagagcgauu

SEQ ID NO: 245795 - RNA, 19 nt, Artificial Sequence
  Description of Artificial Sequence: Synthetic oligonucleotide
ugacuaacacaaggcacug

SEQ ID NO: 245796 - RNA, 19 nt, Artificial Sequence
  Description of Artificial Sequence: Synthetic oligonucleotide
cugguaagcaagccaauga

SEQ ID NO: 245797 - RNA, 19 nt, Artificial Sequence
  Description of Artificial Sequence: Synthetic oligonucleotide
aaggugggaaacacucgag

SEQ ID NO: 245798 - RNA, 19 nt, Artificial Sequence
  Description of Artificial Sequence: Synthetic oligonucleotide
acuggacuagagcucauua

SEQ ID NO: 245799 - RNA, 19 nt, Artificial Sequence
  Description of Artificial Sequence: Synthetic oligonucleotide
cuuggcucuuuuguauucc

SEQ ID NO: 245800 - RNA, 19 nt, Artificial Sequence
  Description of Artificial Sequence: Synthetic oligonucleotide
ucccucuacagugcuaggc

SEQ ID NO: 245801 - RNA, 19 nt, Artificial Sequence
  Description of Artificial Sequence: Synthetic oligonucleotide
guaaguagucucccuugac

SEQ ID NO: 245802 - RNA, 19 nt, Artificial Sequence
  Description of Artificial Sequence: Synthetic oligonucleotide
ccaaauguauucuggcuug

SEQ ID NO: 245803 - RNA, 19 nt, Artificial Sequence
  Description of Artificial Sequence: Synthetic oligonucleotide
augggcaaggcaaacauua

SEQ ID NO: 245804 - RNA, 19 nt, Artificial Sequence
  Description of Artificial Sequence: Synthetic oligonucleotide
ggaaacacucgagagcugc

SEQ ID NO: 245805 - RNA, 19 nt, Artificial Sequence
  Description of Artificial Sequence: Synthetic oligonucleotide
aacuaaggugggaaacacu

SEQ ID NO: 245806 - RNA, 19 nt, Artificial Sequence
  Description of Artificial Sequence: Synthetic oligonucleotide
cacaaagaguuaagguguc

SEQ ID NO: 245807 - RNA, 19 nt, Artificial Sequence
  Description of Artificial Sequence: Synthetic oligonucleotide
guuacucugucucugguau

SEQ ID NO: 245808 - RNA, 19 nt, Artificial Sequence
  Description of Artificial Sequence: Synthetic oligonucleotide
cugguaucccacuacagua

SEQ ID NO: 245809 - RNA, 19 nt, Artificial Sequence
  Description of Artificial Sequence: Synthetic oligonucleotide
gaaaccaguaaagcacaga

SEQ ID NO: 245810 - RNA, 19 nt, Artificial Sequence
  Description of Artificial Sequence: Synthetic oligonucleotide
caguauauauuaugcuaga

SEQ ID NO: 245811 - RNA, 19 nt, Artificial Sequence
  Description of Artificial Sequence: Synthetic oligonucleotide
uugaccagccuuguggaau

SEQ ID NO: 245812 - RNA, 19 nt, Artificial Sequence
  Description of Artificial Sequence: Synthetic oligonucleotide
gcauuagccuuccaagggc

SEQ ID NO: 245813 - RNA, 19 nt, Artificial Sequence
  Description of Artificial Sequence: Synthetic oligonucleotide
cuacucuuagcucuuggaa

SEQ ID NO: 245814 - RNA, 19 nt, Artificial Sequence
  Description of Artificial Sequence: Synthetic oligonucleotide
uuaaggugucaggaaagua

SEQ ID NO: 245815 - RNA, 19 nt, Artificial Sequence
  Description of Artificial Sequence: Synthetic oligonucleotide
ucgagagcugcugauugac

SEQ ID NO: 245816 - RNA, 19 nt, Artificial Sequence
  Description of Artificial Sequence: Synthetic oligonucleotide
gcauguacuaucaugacua

SEQ ID NO: 245817 - RNA, 19 nt, Artificial Sequence
  Description of Artificial Sequence: Synthetic oligonucleotide
guuugugagagcacugauc

SEQ ID NO: 245818 - RNA, 19 nt, Artificial Sequence
  Description of Artificial Sequence: Synthetic oligonucleotide
gguuagauuccauugcucu

SEQ ID NO: 245819 - RNA, 19 nt, Artificial Sequence
  Description of Artificial Sequence: Synthetic oligonucleotide
caggcggcgaggaugaaca

SEQ ID NO: 245820 - RNA, 19 nt, Artificial Sequence
  Description of Artificial Sequence: Synthetic oligonucleotide
gggcaaggcaaacauuaag

SEQ ID NO: 245821 - RNA, 19 nt, Artificial Sequence
  Description of Artificial Sequence: Synthetic oligonucleotide
agaguuaccuaaagugcca

SEQ ID NO: 245822 - RNA, 19 nt, Artificial Sequence
  Description of Artificial Sequence: Synthetic oligonucleotide
aacaacucaauaggccauu

SEQ ID NO: 245823 - RNA, 19 nt, Artificial Sequence
  Description of Artificial Sequence: Synthetic oligonucleotide
aaguaucugccuacaaaua

SEQ ID NO: 245824 - RNA, 19 nt, Artificial Sequence
  Description of Artificial Sequence: Synthetic oligonucleotide
uggggauuuccuggaauga

SEQ ID NO: 245825 - RNA, 19 nt, Artificial Sequence
  Description of Artificial Sequence: Synthetic oligonucleotide
gcugcugauugacaaggcc

SEQ ID NO: 245826 - RNA, 19 nt, Artificial Sequence
  Description of Artificial Sequence: Synthetic oligonucleotide
ugggcaaggcaaacauuaa

SEQ ID NO: 245827 - RNA, 19 nt, Artificial Sequence
  Description of Artificial Sequence: Synthetic oligonucleotide
guuagauuccauugcucua

SEQ ID NO: 245828 - RNA, 19 nt, Artificial Sequence
  Description of Artificial Sequence: Synthetic oligonucleotide
caagccaacgcaggccacg

SEQ ID NO: 245829 - RNA, 19 nt, Artificial Sequence
  Description of Artificial Sequence: Synthetic oligonucleotide
caacugugacgcuggggcc

SEQ ID NO: 245830 - RNA, 19 nt, Artificial Sequence
  Description of Artificial Sequence: Synthetic oligonucleotide
gugauuuacugcagaacuc

SEQ ID NO: 245831 - RNA, 19 nt, Artificial Sequence
  Description of Artificial Sequence: Synthetic oligonucleotide
aguaagucugcagccgacu

SEQ ID NO: 245832 - RNA, 19 nt, Artificial Sequence
  Description of Artificial Sequence: Synthetic oligonucleotide
uaaacccuguuuccccaau

SEQ ID NO: 245833 - RNA, 19 nt, Artificial Sequence
  Description of Artificial Sequence: Synthetic oligonucleotide
ggugucaggaaaguaucug

SEQ ID NO: 245834 - RNA, 19 nt, Artificial Sequence
  Description of Artificial Sequence: Synthetic oligonucleotide
agucucccuugacaaacga

SEQ ID NO: 245835 - RNA, 19 nt, Artificial Sequence
  Description of Artificial Sequence: Synthetic oligonucleotide
ccauuaugagugugaaccc

SEQ ID NO: 245836 - RNA, 19 nt, Artificial Sequence
  Description of Artificial Sequence: Synthetic oligonucleotide
cuagauggcugguaagcaa

SEQ ID NO: 245837 - RNA, 19 nt, Artificial Sequence
  Description of Artificial Sequence: Synthetic oligonucleotide
gaugugaaguucuguacuu

SEQ ID NO: 245838 - RNA, 19 nt, Artificial Sequence
  Description of Artificial Sequence: Synthetic oligonucleotide
guuuguuugugagagcacu

SEQ ID NO: 245839 - RNA, 19 nt, Artificial Sequence
  Description of Artificial Sequence: Synthetic oligonucleotide
ccuaaugcuacucuuagcu

SEQ ID NO: 245840 - RNA, 19 nt, Artificial Sequence
  Description of Artificial Sequence: Synthetic oligonucleotide
ugaccagccuuguggaaua

SEQ ID NO: 245841 - RNA, 19 nt, Artificial Sequence
  Description of Artificial Sequence: Synthetic oligonucleotide
agguuacucugucucuggu

SEQ ID NO: 245842 - RNA, 19 nt, Artificial Sequence
  Description of Artificial Sequence: Synthetic oligonucleotide
uucucgaagcuuggauacc

SEQ ID NO: 245843 - RNA, 19 nt, Artificial Sequence
  Description of Artificial Sequence: Synthetic oligonucleotide
gaaccuaaugcuacucuua

SEQ ID NO: 245844 - RNA, 19 nt, Artificial Sequence
  Description of Artificial Sequence: Synthetic oligonucleotide
cagcaucguaaguagucuc

SEQ ID NO: 245845 - RNA, 19 nt, Artificial Sequence
  Description of Artificial Sequence: Synthetic oligonucleotide
gcggcgaggaugaacaaag

SEQ ID NO: 245846 - RNA, 19 nt, Artificial Sequence
  Description of Artificial Sequence: Synthetic oligonucleotide
caucuuuaagcuagguacu

SEQ ID NO: 245847 - RNA, 19 nt, Artificial Sequence
  Description of Artificial Sequence: Synthetic oligonucleotide
auaucuugaccagccuugu

SEQ ID NO: 245848 - RNA, 19 nt, Artificial Sequence
  Description of Artificial Sequence: Synthetic oligonucleotide
uuccauugaucuccauauu

SEQ ID NO: 245849 - RNA, 19 nt, Artificial Sequence
  Description of Artificial Sequence: Synthetic oligonucleotide
agugucucguucauccccu

SEQ ID NO: 245850 - RNA, 19 nt, Artificial Sequence
  Description of Artificial Sequence: Synthetic oligonucleotide
gcuaggcaggccaaguaag

SEQ ID NO: 245851 - RNA, 19 nt, Artificial Sequence
  Description of Artificial Sequence: Synthetic oligonucleotide
gagcgauuuccaauugcuc

SEQ ID NO: 245852 - RNA, 19 nt, Artificial Sequence
  Description of Artificial Sequence: Synthetic oligonucleotide
aucuuuaagcuagguacuu

SEQ ID NO: 245853 - RNA, 19 nt, Artificial Sequence
  Description of Artificial Sequence: Synthetic oligonucleotide
aagccaacgcaggccacga

SEQ ID NO: 245854 - RNA, 19 nt, Artificial Sequence
  Description of Artificial Sequence: Synthetic oligonucleotide
guaacccggacuggacuag

SEQ ID NO: 245855 - RNA, 19 nt, Artificial Sequence
  Description of Artificial Sequence: Synthetic oligonucleotide
cacgacacaggcggcgagg

SEQ ID NO: 245856 - RNA, 19 nt, Artificial Sequence
  Description of Artificial Sequence: Synthetic oligonucleotide
gcuacucuuagcucuugga

SEQ ID NO: 245857 - RNA, 19 nt, Artificial Sequence
  Description of Artificial Sequence: Synthetic oligonucleotide
gugaacccaucacagucaa

SEQ ID NO: 245858 - RNA, 19 nt, Artificial Sequence
  Description of Artificial Sequence: Synthetic oligonucleotide
cugagaaguuccucauuaa

SEQ ID NO: 245859 - RNA, 19 nt, Artificial Sequence
  Description of Artificial Sequence: Synthetic oligonucleotide
ggagguucagugcgaagca

SEQ ID NO: 245860 - RNA, 19 nt, Artificial Sequence
  Description of Artificial Sequence: Synthetic oligonucleotide
gccaaugagguguguagca

SEQ ID NO: 245861 - RNA, 19 nt, Artificial Sequence
  Description of Artificial Sequence: Synthetic oligonucleotide
guaucccacuacaguacug

SEQ ID NO: 245862 - RNA, 19 nt, Artificial Sequence
  Description of Artificial Sequence: Synthetic oligonucleotide
cauuagccuuccaagggcu

SEQ ID NO: 245863 - RNA, 19 nt, Artificial Sequence
  Description of Artificial Sequence: Synthetic oligonucleotide
ccuuguggaauaacuccug

SEQ ID NO: 245864 - RNA, 19 nt, Artificial Sequence
  Description of Artificial Sequence: Synthetic oligonucleotide
gggaccauaucuagauggc

SEQ ID NO: 245865 - RNA, 19 nt, Artificial Sequence
  Description of Artificial Sequence: Synthetic oligonucleotide
gguagguuagguucauaua

SEQ ID NO: 245866 - RNA, 19 nt, Artificial Sequence
  Description of Artificial Sequence: Synthetic oligonucleotide
cgaagcuuggauaccugag

SEQ ID NO: 245867 - RNA, 19 nt, Artificial Sequence
  Description of Artificial Sequence: Synthetic oligonucleotide
agaacagaugaaagaccaa

SEQ ID NO: 245868 - RNA, 19 nt, Artificial Sequence
  Description of Artificial Sequence: Synthetic oligonucleotide
ggcauguacuaucaugacu

SEQ ID NO: 245869 - RNA, 19 nt, Artificial Sequence
  Description of Artificial Sequence: Synthetic oligonucleotide
aaaccccaaucugcacuga

SEQ ID NO: 245870 - RNA, 19 nt, Artificial Sequence
  Description of Artificial Sequence: Synthetic oligonucleotide
aggccauuaugagugugaa

SEQ ID NO: 245871 - RNA, 19 nt, Artificial Sequence
  Description of Artificial Sequence: Synthetic oligonucleotide
ugugacgcuggggccagaa

SEQ ID NO: 245872 - RNA, 19 nt, Artificial Sequence
  Description of Artificial Sequence: Synthetic oligonucleotide
acugugacgcuggggccag

SEQ ID NO: 245873 - RNA, 19 nt, Artificial Sequence
  Description of Artificial Sequence: Synthetic oligonucleotide
cauuggaaucaaaggcucu

SEQ ID NO: 245874 - RNA, 19 nt, Artificial Sequence
  Description of Artificial Sequence: Synthetic oligonucleotide
cuagcuugaggaagguuau

SEQ ID NO: 245875 - RNA, 19 nt, Artificial Sequence
  Description of Artificial Sequence: Synthetic oligonucleotide
aggcaagcucuuuguugcu

SEQ ID NO: 245876 - RNA, 19 nt, Artificial Sequence
  Description of Artificial Sequence: Synthetic oligonucleotide
agcaagccaaugaggugug

SEQ ID NO: 245877 - RNA, 19 nt, Artificial Sequence
  Description of Artificial Sequence: Synthetic oligonucleotide
uaacccggacuggacuaga

SEQ ID NO: 245878 - RNA, 19 nt, Artificial Sequence
  Description of Artificial Sequence: Synthetic oligonucleotide
ggaucugaugugaaguucu

SEQ ID NO: 245879 - RNA, 19 nt, Artificial Sequence
  Description of Artificial Sequence: Synthetic oligonucleotide
uggcagaaccuagggaauu

SEQ ID NO: 245880 - RNA, 19 nt, Artificial Sequence
  Description of Artificial Sequence: Synthetic oligonucleotide
acaacucaauaggccauua

SEQ ID NO: 245881 - RNA, 19 nt, Artificial Sequence
  Description of Artificial Sequence: Synthetic oligonucleotide
ggaaaguaucugccuacaa

SEQ ID NO: 245882 - RNA, 19 nt, Artificial Sequence
  Description of Artificial Sequence: Synthetic oligonucleotide
gaacugcaauggaagggaa

SEQ ID NO: 245883 - RNA, 19 nt, Artificial Sequence
  Description of Artificial Sequence: Synthetic oligonucleotide
auagcagaucuugcagcau

SEQ ID NO: 245884 - RNA, 19 nt, Artificial Sequence
  Description of Artificial Sequence: Synthetic oligonucleotide
accccaaucugcacugagu

SEQ ID NO: 245885 - RNA, 19 nt, Artificial Sequence
  Description of Artificial Sequence: Synthetic oligonucleotide
cagaucuugcagcaucgua

SEQ ID NO: 245886 - RNA, 19 nt, Artificial Sequence
  Description of Artificial Sequence: Synthetic oligonucleotide
acgacacaggcggcgagga

SEQ ID NO: 245887 - RNA, 19 nt, Artificial Sequence
  Description of Artificial Sequence: Synthetic oligonucleotide
agccagucagucuguccaa

SEQ ID NO: 245888 - RNA, 19 nt, Artificial Sequence
  Description of Artificial Sequence: Synthetic oligonucleotide
cuaggcaggccaaguaagu

SEQ ID NO: 245889 - RNA, 19 nt, Artificial Sequence
  Description of Artificial Sequence: Synthetic oligonucleotide
gggagaaccgugagauaag

SEQ ID NO: 245890 - RNA, 19 nt, Artificial Sequence
  Description of Artificial Sequence: Synthetic oligonucleotide
guuuggggauuuccuggaa

SEQ ID NO: 245891 - RNA, 19 nt, Artificial Sequence
  Description of Artificial Sequence: Synthetic oligonucleotide
acaaggcacuggaugcaca

SEQ ID NO: 245892 - RNA, 19 nt, Artificial Sequence
  Description of Artificial Sequence: Synthetic oligonucleotide
gguuacucugucucuggua

SEQ ID NO: 245893 - RNA, 19 nt, Artificial Sequence
  Description of Artificial Sequence: Synthetic oligonucleotide
gccgacuugacauuggcuu

SEQ ID NO: 245894 - RNA, 19 nt, Artificial Sequence
  Description of Artificial Sequence: Synthetic oligonucleotide
cuggacuagagcucauuau

SEQ ID NO: 245895 - RNA, 19 nt, Artificial Sequence
  Description of Artificial Sequence: Synthetic oligonucleotide
guauugccaauggaagcua

SEQ ID NO: 245896 - RNA, 19 nt, Artificial Sequence
  Description of Artificial Sequence: Synthetic oligonucleotide
caagccaaugaggugugua

SEQ ID NO: 245897 - RNA, 19 nt, Artificial Sequence
  Description of Artificial Sequence: Synthetic oligonucleotide
gguaucccacuacaguacu

SEQ ID NO: 245898 - RNA, 19 nt, Artificial Sequence
  Description of Artificial Sequence: Synthetic oligonucleotide
ggccauuaugagugugaac

SEQ ID NO: 245899 - RNA, 19 nt, Artificial Sequence
  Description of Artificial Sequence: Synthetic oligonucleotide
gguuuuagcugggucucca

SEQ ID NO: 245900 - RNA, 19 nt, Artificial Sequence
  Description of Artificial Sequence: Synthetic oligonucleotide
cuuggauaccugagaauuu

SEQ ID NO: 245901 - RNA, 19 nt, Artificial Sequence
  Description of Artificial Sequence: Synthetic oligonucleotide
guacuaucaugacuagcuu

SEQ ID NO: 245902 - RNA, 19 nt, Artificial Sequence
  Description of Artificial Sequence: Synthetic oligonucleotide
auaagacuguccacuccuu

SEQ ID NO: 245903 - RNA, 19 nt, Artificial Sequence
  Description of Artificial Sequence: Synthetic oligonucleotide
guaagucugcagccgacuu

SEQ ID NO: 245904 - RNA, 19 nt, Artificial Sequence
  Description of Artificial Sequence: Synthetic oligonucleotide
accgugagauaagaaccua

SEQ ID NO: 245905 - RNA, 19 nt, Artificial Sequence
  Description of Artificial Sequence: Synthetic oligonucleotide
cauuacccucaguauauuu

SEQ ID NO: 245906 - RNA, 19 nt, Artificial Sequence
  Description of Artificial Sequence: Synthetic oligonucleotide
caaagggccaaggagcaau

SEQ ID NO: 245907 - RNA, 19 nt, Artificial Sequence
  Description of Artificial Sequence: Synthetic oligonucleotide
cucuuagcucuuggaagga

SEQ ID NO: 245908 - RNA, 19 nt, Artificial Sequence
  Description of Artificial Sequence: Synthetic oligonucleotide
caucguaaguagucucccu

SEQ ID NO: 245909 - RNA, 19 nt, Artificial Sequence
  Description of Artificial Sequence: Synthetic oligonucleotide
gagggagaaccgugagaua

SEQ ID NO: 245910 - RNA, 19 nt, Artificial Sequence
  Description of Artificial Sequence: Synthetic oligonucleotide
cagaaccaaaauugcuuau

SEQ ID NO: 245911 - RNA, 19 nt, Artificial Sequence
  Description of Artificial Sequence: Synthetic oligonucleotide
ccuagggaauuccagauuu

SEQ ID NO: 245912 - RNA, 19 nt, Artificial Sequence
  Description of Artificial Sequence: Synthetic oligonucleotide
cagucagucuguccaauuu

SEQ ID NO: 245913 - RNA, 19 nt, Artificial Sequence
  Description of Artificial Sequence: Synthetic oligonucleotide
augcacaaguuaagacaau

SEQ ID NO: 245914 - RNA, 19 nt, Artificial Sequence
  Description of Artificial Sequence: Synthetic oligonucleotide
ggcuggauuauaggcaugu

SEQ ID NO: 245915 - RNA, 19 nt, Artificial Sequence
  Description of Artificial Sequence: Synthetic oligonucleotide
cucguucauccccucaaau

SEQ ID NO: 245916 - RNA, 19 nt, Artificial Sequence
  Description of Artificial Sequence: Synthetic oligonucleotide
ccgugagauaagaaccuaa

SEQ ID NO: 245917 - RNA, 19 nt, Artificial Sequence
  Description of Artificial Sequence: Synthetic oligonucleotide
ccacuaccaagccaacgca

SEQ ID NO: 245918 - RNA, 19 nt, Artificial Sequence
  Description of Artificial Sequence: Synthetic oligonucleotide
caacucaauaggccauuau

SEQ ID NO: 245919 - RNA, 19 nt, Artificial Sequence
  Description of Artificial Sequence: Synthetic oligonucleotide
cguaaguagucucccuuga

SEQ ID NO: 245920 - RNA, 19 nt, Artificial Sequence
  Description of Artificial Sequence: Synthetic oligonucleotide
cugcaguaauuccaagguu

SEQ ID NO: 245921 - RNA, 19 nt, Artificial Sequence
  Description of Artificial Sequence: Synthetic oligonucleotide
ccaauggaagcuacacucu

SEQ ID NO: 245922 - RNA, 19 nt, Artificial Sequence
  Description of Artificial Sequence: Synthetic oligonucleotide
gcagcaucguaaguagucu

SEQ ID NO: 245923 - RNA, 19 nt, Artificial Sequence
  Description of Artificial Sequence: Synthetic oligonucleotide
gcuagaugguacacagcaa

SEQ ID NO: 245924 - RNA, 19 nt, Artificial Sequence
  Description of Artificial Sequence: Synthetic oligonucleotide
ggaccauaucuagauggcu

SEQ ID NO: 245925 - RNA, 19 nt, Artificial Sequence
  Description of Artificial Sequence: Synthetic oligonucleotide
gugacgcuggggccagaaa

SEQ ID NO: 245926 - RNA, 19 nt, Artificial Sequence
  Description of Artificial Sequence: Synthetic oligonucleotide
aggcggcgaggaugaacaa

SEQ ID NO: 245927 - RNA, 19 nt, Artificial Sequence
  Description of Artificial Sequence: Synthetic oligonucleotide
cgugagauaagaaccuaau

SEQ ID NO: 245928 - RNA, 19 nt, Artificial Sequence
  Description of Artificial Sequence: Synthetic oligonucleotide
gcaggccaaguaagucugc

SEQ ID NO: 245929 - RNA, 19 nt, Artificial Sequence
  Description of Artificial Sequence: Synthetic oligonucleotide
ccaagccaacgcaggccac

SEQ ID NO: 245930 - RNA, 19 nt, Artificial Sequence
  Description of Artificial Sequence: Synthetic oligonucleotide
ggcggcgaggaugaacaaa

SEQ ID NO: 245931 - RNA, 19 nt, Artificial Sequence
  Description of Artificial Sequence: Synthetic oligonucleotide
ccauaucuugaccagccuu

SEQ ID NO: 245932 - RNA, 19 nt, Artificial Sequence
  Description of Artificial Sequence: Synthetic oligonucleotide
ccacgacacaggcggcgag

SEQ ID NO: 245933 - RNA, 19 nt, Artificial Sequence
  Description of Artificial Sequence: Synthetic oligonucleotide
cggcgaggaugaacaaagc

SEQ ID NO: 245934 - RNA, 19 nt, Artificial Sequence
  Description of Artificial Sequence: Synthetic oligonucleotide
cacugagugauaggcuuuu

SEQ ID NO: 245935 - RNA, 19 nt, Artificial Sequence
  Description of Artificial Sequence: Synthetic oligonucleotide
caagguagguuagguucau

SEQ ID NO: 245936 - RNA, 19 nt, Artificial Sequence
  Description of Artificial Sequence: Synthetic oligonucleotide
ggccaaggagcaaugcuuu

SEQ ID NO: 245937 - RNA, 19 nt, Artificial Sequence
  Description of Artificial Sequence: Synthetic oligonucleotide
cugugagaaaagggaccau

SEQ ID NO: 245938 - RNA, 19 nt, Artificial Sequence
  Description of Artificial Sequence: Synthetic oligonucleotide
gcagaucuugcagcaucgu

SEQ ID NO: 245939 - RNA, 19 nt, Artificial Sequence
  Description of Artificial Sequence: Synthetic oligonucleotide
cugcagccgacuugacauu

SEQ ID NO: 245940 - RNA, 19 nt, Artificial Sequence
  Description of Artificial Sequence: Synthetic oligonucleotide
cccuggcaaggagauaggu

SEQ ID NO: 245941 - RNA, 19 nt, Artificial Sequence
  Description of Artificial Sequence: Synthetic oligonucleotide
aauauuggcacccagacuc

SEQ ID NO: 245942 - RNA, 19 nt, Artificial Sequence
  Description of Artificial Sequence: Synthetic oligonucleotide
uccuuaaugaccacaaugg

SEQ ID NO: 245943 - RNA, 19 nt, Artificial Sequence
  Description of Artificial Sequence: Synthetic oligonucleotide
cugaagauuguucagaggc

SEQ ID NO: 245944 - RNA, 19 nt, Artificial Sequence
  Description of Artificial Sequence: Synthetic oligonucleotide
ucuagguucucacacagug

SEQ ID NO: 245945 - RNA, 19 nt, Artificial Sequence
  Description of Artificial Sequence: Synthetic oligonucleotide
gauggagccaaccuggcgg

SEQ ID NO: 245946 - RNA, 19 nt, Artificial Sequence
  Description of Artificial Sequence: Synthetic oligonucleotide
aaggauuaugggcugggac

SEQ ID NO: 245947 - RNA, 19 nt, Artificial Sequence
  Description of Artificial Sequence: Synthetic oligonucleotide
gauguuacugcucugcagc

SEQ ID NO: 245948 - RNA, 19 nt, Artificial Sequence
  Description of Artificial Sequence: Synthetic oligonucleotide
uccgccaguacccagaugc

SEQ ID NO: 245949 - RNA, 19 nt, Artificial Sequence
  Description of Artificial Sequence: Synthetic oligonucleotide
gguacugccacacacaggg

SEQ ID NO: 245950 - RNA, 19 nt, Artificial Sequence
  Description of Artificial Sequence: Synthetic oligonucleotide
agagauuucacuccaggag

SEQ ID NO: 245951 - RNA, 19 nt, Artificial Sequence
  Description of Artificial Sequence: Synthetic oligonucleotide
augagaucaagcaaugugc

SEQ ID NO: 245952 - RNA, 19 nt, Artificial Sequence
  Description of Artificial Sequence: Synthetic oligonucleotide
ucuuaugcaccacuccucg

SEQ ID NO: 245953 - RNA, 19 nt, Artificial Sequence
  Description of Artificial Sequence: Synthetic oligonucleotide
cauguaguuggccagacag

SEQ ID NO: 245954 - RNA, 19 nt, Artificial Sequence
  Description of Artificial Sequence: Synthetic oligonucleotide
ugcauugucaauccgcuca

SEQ ID NO: 245955 - RNA, 19 nt, Artificial Sequence
  Description of Artificial Sequence: Synthetic oligonucleotide
agugcauucauuaagggcu

SEQ ID NO: 245956 - RNA, 19 nt, Artificial Sequence
  Description of Artificial Sequence: Synthetic oligonucleotide
aauaccugggcgauguugg

SEQ ID NO: 245957 - RNA, 19 nt, Artificial Sequence
  Description of Artificial Sequence: Synthetic oligonucleotide
cacaguguggcuaucacgc

SEQ ID NO: 245958 - RNA, 19 nt, Artificial Sequence
  Description of Artificial Sequence: Synthetic oligonucleotide
ucgcccacuauccagauca

SEQ ID NO: 245959 - RNA, 19 nt, Artificial Sequence
  Description of Artificial Sequence: Synthetic oligonucleotide
uggacuacauaguugaccu

SEQ ID NO: 245960 - RNA, 19 nt, Artificial Sequence
  Description of Artificial Sequence: Synthetic oligonucleotide
uagguucucacacagugug

SEQ ID NO: 245961 - RNA, 19 nt, Artificial Sequence
  Description of Artificial Sequence: Synthetic oligonucleotide
uucaagucaagcagguugc

SEQ ID NO: 245962 - RNA, 19 nt, Artificial Sequence
  Description of Artificial Sequence: Synthetic oligonucleotide
ugaaagggugcccacacca

SEQ ID NO: 245963 - RNA, 19 nt, Artificial Sequence
  Description of Artificial Sequence: Synthetic oligonucleotide
uuugaucccgcaucaacag

SEQ ID NO: 245964 - RNA, 19 nt, Artificial Sequence
  Description of Artificial Sequence: Synthetic oligonucleotide
aagcuguugcgauugaacu

SEQ ID NO: 245965 - RNA, 19 nt, Artificial Sequence
  Description of Artificial Sequence: Synthetic oligonucleotide
uccagaucauagcagcccg

SEQ ID NO: 245966 - RNA, 19 nt, Artificial Sequence
  Description of Artificial Sequence: Synthetic oligonucleotide
uuucuuuugaucccgcauc

SEQ ID NO: 245967 - RNA, 19 nt, Artificial Sequence
  Description of Artificial Sequence: Synthetic oligonucleotide
ucucugaucuggaacuggg

SEQ ID NO: 245968 - RNA, 19 nt, Artificial Sequence
  Description of Artificial Sequence: Synthetic oligonucleotide
guaauauuggcacccagac

SEQ ID NO: 245969 - RNA, 19 nt, Artificial Sequence
  Description of Artificial Sequence: Synthetic oligonucleotide
acagagauuucacuccagg

SEQ ID NO: 245970 - RNA, 19 nt, Artificial Sequence
  Description of Artificial Sequence: Synthetic oligonucleotide
ucucgcucgaggcagugcg

SEQ ID NO: 245971 - RNA, 19 nt, Artificial Sequence
  Description of Artificial Sequence: Synthetic oligonucleotide
aggagugacccuuucacag

SEQ ID NO: 245972 - RNA, 19 nt, Artificial Sequence
  Description of Artificial Sequence: Synthetic oligonucleotide
ugaggauugucucguaggc

SEQ ID NO: 245973 - RNA, 19 nt, Artificial Sequence
  Description of Artificial Sequence: Synthetic oligonucleotide
accgauggcacgcacugcc

SEQ ID NO: 245974 - RNA, 19 nt, Artificial Sequence
  Description of Artificial Sequence: Synthetic oligonucleotide
aguaguguaggcucaauaa

SEQ ID NO: 245975 - RNA, 19 nt, Artificial Sequence
  Description of Artificial Sequence: Synthetic oligonucleotide
guugcgauugaacuggaug

SEQ ID NO: 245976 - RNA, 19 nt, Artificial Sequence
  Description of Artificial Sequence: Synthetic oligonucleotide
ugaucccgcaucaacagca

SEQ ID NO: 245977 - RNA, 19 nt, Artificial Sequence
  Description of Artificial Sequence: Synthetic oligonucleotide
ugcacagagauuucacucc

SEQ ID NO: 245978 - RNA, 19 nt, Artificial Sequence
  Description of Artificial Sequence: Synthetic oligonucleotide
ugagaucaagcaaugugcu

SEQ ID NO: 245979 - RNA, 19 nt, Artificial Sequence
  Description of Artificial Sequence: Synthetic oligonucleotide
agcagaugagcucaucuag

SEQ ID NO: 245980 - RNA, 19 nt, Artificial Sequence
  Description of Artificial Sequence: Synthetic oligonucleotide
ucugcauugucaauccgcu

SEQ ID NO: 245981 - RNA, 19 nt, Artificial Sequence
  Description of Artificial Sequence: Synthetic oligonucleotide
uuaugcaccacuccucgac

SEQ ID NO: 245982 - RNA, 19 nt, Artificial Sequence
  Description of Artificial Sequence: Synthetic oligonucleotide
ugucaauccgcucagcaua

SEQ ID NO: 245983 - RNA, 19 nt, Artificial Sequence
  Description of Artificial Sequence: Synthetic oligonucleotide
uacauaguugaccuugguc

SEQ ID NO: 245984 - RNA, 19 nt, Artificial Sequence
  Description of Artificial Sequence: Synthetic oligonucleotide
uuaacaccuucacagcaga

SEQ ID NO: 245985 - RNA, 19 nt, Artificial Sequence
  Description of Artificial Sequence: Synthetic oligonucleotide
uucuuuugaucccgcauca

SEQ ID NO: 245986 - RNA, 19 nt, Artificial Sequence
  Description of Artificial Sequence: Synthetic oligonucleotide
auccgcucagcauacucgc

SEQ ID NO: 245987 - RNA, 19 nt, Artificial Sequence
  Description of Artificial Sequence: Synthetic oligonucleotide
cuuguuagucagcugcagg

SEQ ID NO: 245988 - RNA, 19 nt, Artificial Sequence
  Description of Artificial Sequence: Synthetic oligonucleotide
agaucacuuaagccacugc

SEQ ID NO: 245989 - RNA, 19 nt, Artificial Sequence
  Description of Artificial Sequence: Synthetic oligonucleotide
aguggacagucucugaucu

SEQ ID NO: 245990 - RNA, 19 nt, Artificial Sequence
  Description of Artificial Sequence: Synthetic oligonucleotide
aacaggucacccugggcag

SEQ ID NO: 245991 - RNA, 19 nt, Artificial Sequence
  Description of Artificial Sequence: Synthetic oligonucleotide
uggucaacuucagagacug

SEQ ID NO: 245992 - RNA, 19 nt, Artificial Sequence
  Description of Artificial Sequence: Synthetic oligonucleotide
guuggucaacuucagagac

SEQ ID NO: 245993 - RNA, 19 nt, Artificial Sequence
  Description of Artificial Sequence: Synthetic oligonucleotide
ugaagauuguucagaggcu

SEQ ID NO: 245994 - RNA, 19 nt, Artificial Sequence
  Description of Artificial Sequence: Synthetic oligonucleotide
auugucaauccgcucagca

SEQ ID NO: 245995 - RNA, 19 nt, Artificial Sequence
  Description of Artificial Sequence: Synthetic oligonucleotide
ucaucuaguaguguaggcu

SEQ ID NO: 245996 - RNA, 19 nt, Artificial Sequence
  Description of Artificial Sequence: Synthetic oligonucleotide
cuuaagccacugcugacgg

SEQ ID NO: 245997 - RNA, 19 nt, Artificial Sequence
  Description of Artificial Sequence: Synthetic oligonucleotide
acuuaagccacugcugacg

SEQ ID NO: 245998 - RNA, 19 nt, Artificial Sequence
  Description of Artificial Sequence: Synthetic oligonucleotide
acauaggauccugaaaggg

SEQ ID NO: 245999 - RNA, 19 nt, Artificial Sequence
  Description of Artificial Sequence: Synthetic oligonucleotide
aagauguuacugcucugca

SEQ ID NO: 246000 - RNA, 19 nt, Artificial Sequence
  Description of Artificial Sequence: Synthetic oligonucleotide
uggccuuuauggcagggag

SEQ ID NO: 246001 - RNA, 19 nt, Artificial Sequence
  Description of Artificial Sequence: Synthetic oligonucleotide
ugccuuccguacaaaaucc

SEQ ID NO: 246002 - RNA, 19 nt, Artificial Sequence
  Description of Artificial Sequence: Synthetic oligonucleotide
ucccgcaucaacagcaaug

SEQ ID NO: 246003 - RNA, 19 nt, Artificial Sequence
  Description of Artificial Sequence: Synthetic oligonucleotide
cacaggggcuccaugauag

SEQ ID NO: 246004 - RNA, 19 nt, Artificial Sequence
  Description of Artificial Sequence: Synthetic oligonucleotide
gaggucaccuaacagguca

SEQ ID NO: 246005 - RNA, 19 nt, Artificial Sequence
  Description of Artificial Sequence: Synthetic oligonucleotide
acacaguguggcuaucacg

SEQ ID NO: 246006 - RNA, 19 nt, Artificial Sequence
  Description of Artificial Sequence: Synthetic oligonucleotide
uauacaugcugggacaccu

SEQ ID NO: 246007 - RNA, 19 nt, Artificial Sequence
  Description of Artificial Sequence: Synthetic oligonucleotide
guuagucagcugcaggucc

SEQ ID NO: 246008 - RNA, 19 nt, Artificial Sequence
  Description of Artificial Sequence: Synthetic oligonucleotide
guauaaggugcugaaguag

SEQ ID NO: 246009 - RNA, 19 nt, Artificial Sequence
  Description of Artificial Sequence: Synthetic oligonucleotide
aagagcacccuguggucuc

SEQ ID NO: 246010 - RNA, 19 nt, Artificial Sequence
  Description of Artificial Sequence: Synthetic oligonucleotide
uaauauuggcacccagacu

SEQ ID NO: 246011 - RNA, 19 nt, Artificial Sequence
  Description of Artificial Sequence: Synthetic oligonucleotide
uugggcauguaguuggcca

SEQ ID NO: 246012 - RNA, 19 nt, Artificial Sequence
  Description of Artificial Sequence: Synthetic oligonucleotide
agauguuacugcucugcag

SEQ ID NO: 246013 - RNA, 19 nt, Artificial Sequence
  Description of Artificial Sequence: Synthetic oligonucleotide
aagaagguccacagcuccc

SEQ ID NO: 246014 - RNA, 19 nt, Artificial Sequence
  Description of Artificial Sequence: Synthetic oligonucleotide
acaaggcaaggauuauggg

SEQ ID NO: 246015 - RNA, 19 nt, Artificial Sequence
  Description of Artificial Sequence: Synthetic oligonucleotide
uuugcacugaggaggcagc

SEQ ID NO: 246016 - RNA, 19 nt, Artificial Sequence
  Description of Artificial Sequence: Synthetic oligonucleotide
acgcucucauacuuguugg

SEQ ID NO: 246017 - RNA, 19 nt, Artificial Sequence
  Description of Artificial Sequence: Synthetic oligonucleotide
agggacagcgucaagcugg

SEQ ID NO: 246018 - RNA, 19 nt, Artificial Sequence
  Description of Artificial Sequence: Synthetic oligonucleotide
uggauggcgaaaucuguca

SEQ ID NO: 246019 - RNA, 19 nt, Artificial Sequence
  Description of Artificial Sequence: Synthetic oligonucleotide
uccaaucaggcugucgagg

SEQ ID NO: 246020 - RNA, 19 nt, Artificial Sequence
  Description of Artificial Sequence: Synthetic oligonucleotide
agggagucuagguucucac

SEQ ID NO: 246021 - RNA, 19 nt, Artificial Sequence
  Description of Artificial Sequence: Synthetic oligonucleotide
ugaguggacagucucugau

SEQ ID NO: 246022 - RNA, 19 nt, Artificial Sequence
  Description of Artificial Sequence: Synthetic oligonucleotide
gauggcgaaaucugucaug

SEQ ID NO: 246023 - RNA, 19 nt, Artificial Sequence
  Description of Artificial Sequence: Synthetic oligonucleotide
uaugcaccacuccucgacc

SEQ ID NO: 246024 - RNA, 19 nt, Artificial Sequence
  Description of Artificial Sequence: Synthetic oligonucleotide
auuaacaccuucacagcag

SEQ ID NO: 246025 - RNA, 19 nt, Artificial Sequence
  Description of Artificial Sequence: Synthetic oligonucleotide
acagcgaccgauggcacgc

SEQ ID NO: 246026 - RNA, 19 nt, Artificial Sequence
  Description of Artificial Sequence: Synthetic oligonucleotide
auaggauccugaaagggug

SEQ ID NO: 246027 - RNA, 19 nt, Artificial Sequence
  Description of Artificial Sequence: Synthetic oligonucleotide
ugccagagaucucuagacc

SEQ ID NO: 246028 - RNA, 19 nt, Artificial Sequence
  Description of Artificial Sequence: Synthetic oligonucleotide
ucagggacagcgucaagcu

SEQ ID NO: 246029 - RNA, 19 nt, Artificial Sequence
  Description of Artificial Sequence: Synthetic oligonucleotide
uuguugauggacugugggu

SEQ ID NO: 246030 - RNA, 19 nt, Artificial Sequence
  Description of Artificial Sequence: Synthetic oligonucleotide
cuugaggauugucucguag

SEQ ID NO: 246031 - RNA, 19 nt, Artificial Sequence
  Description of Artificial Sequence: Synthetic oligonucleotide
uaucacgcucucauacuug

SEQ ID NO: 246032 - RNA, 19 nt, Artificial Sequence
  Description of Artificial Sequence: Synthetic oligonucleotide
uuccuggacuacauaguug

SEQ ID NO: 246033 - RNA, 19 nt, Artificial Sequence
  Description of Artificial Sequence: Synthetic oligonucleotide
auacucgcccacuauccag

SEQ ID NO: 246034 - RNA, 19 nt, Artificial Sequence
  Description of Artificial Sequence: Synthetic oligonucleotide
uguugauggacuguggguu

SEQ ID NO: 246035 - RNA, 19 nt, Artificial Sequence
  Description of Artificial Sequence: Synthetic oligonucleotide
aguaauauuggcacccaga

SEQ ID NO: 246036 - RNA, 19 nt, Artificial Sequence
  Description of Artificial Sequence: Synthetic oligonucleotide
uccgccaauaccugggcga

SEQ ID NO: 246037 - RNA, 19 nt, Artificial Sequence
  Description of Artificial Sequence: Synthetic oligonucleotide
gcuguugcgauugaacugg

SEQ ID NO: 246038 - RNA, 19 nt, Artificial Sequence
  Description of Artificial Sequence: Synthetic oligonucleotide
ucaccuaacaggucacccu

SEQ ID NO: 246039 - RNA, 19 nt, Artificial Sequence
  Description of Artificial Sequence: Synthetic oligonucleotide
cucaucuaguaguguaggc

SEQ ID NO: 246040 - RNA, 19 nt, Artificial Sequence
  Description of Artificial Sequence: Synthetic oligonucleotide
gacccuuucacagaugcuc

SEQ ID NO: 246041 - RNA, 19 nt, Artificial Sequence
  Description of Artificial Sequence: Synthetic oligonucleotide
cagacucuacccaggacag

SEQ ID NO: 246042 - RNA, 19 nt, Artificial Sequence
  Description of Artificial Sequence: Synthetic oligonucleotide
uguagccacgaucccgaag

SEQ ID NO: 246043 - RNA, 19 nt, Artificial Sequence
  Description of Artificial Sequence: Synthetic oligonucleotide
cauuaacaccuucacagca

SEQ ID NO: 246044 - RNA, 19 nt, Artificial Sequence
  Description of Artificial Sequence: Synthetic oligonucleotide
ugacgggugcuccaagucu

SEQ ID NO: 246045 - RNA, 19 nt, Artificial Sequence
  Description of Artificial Sequence: Synthetic oligonucleotide
uguguugaguggacagucu

SEQ ID NO: 246046 - RNA, 19 nt, Artificial Sequence
  Description of Artificial Sequence: Synthetic oligonucleotide
cagugugccauaguagucc

SEQ ID NO: 246047 - RNA, 19 nt, Artificial Sequence
  Description of Artificial Sequence: Synthetic oligonucleotide
aauggcuuccuggacuaca

SEQ ID NO: 246048 - RNA, 19 nt, Artificial Sequence
  Description of Artificial Sequence: Synthetic oligonucleotide
uggaacugggcuucauucu

SEQ ID NO: 246049 - RNA, 19 nt, Artificial Sequence
  Description of Artificial Sequence: Synthetic oligonucleotide
uugaucccgcaucaacagc

SEQ ID NO: 246050 - RNA, 19 nt, Artificial Sequence
  Description of Artificial Sequence: Synthetic oligonucleotide
guagcauacucuuugaguu

SEQ ID NO: 246051 - RNA, 19 nt, Artificial Sequence
  Description of Artificial Sequence: Synthetic oligonucleotide
gagagccuaggagugaccc

SEQ ID NO: 246052 - RNA, 19 nt, Artificial Sequence
  Description of Artificial Sequence: Synthetic oligonucleotide
uuccgccaauaccugggcg

SEQ ID NO: 246053 - RNA, 19 nt, Artificial Sequence
  Description of Artificial Sequence: Synthetic oligonucleotide
agugaagauguuacugcuc

SEQ ID NO: 246054 - RNA, 19 nt, Artificial Sequence
  Description of Artificial Sequence: Synthetic oligonucleotide
cuuccguacaaaauccaca

SEQ ID NO: 246055 - RNA, 19 nt, Artificial Sequence
  Description of Artificial Sequence: Synthetic oligonucleotide
ggagucuagguucucacac

SEQ ID NO: 246056 - RNA, 19 nt, Artificial Sequence
  Description of Artificial Sequence: Synthetic oligonucleotide
auaccugggcgauguuggc

SEQ ID NO: 246057 - RNA, 19 nt, Artificial Sequence
  Description of Artificial Sequence: Synthetic oligonucleotide
ggugcucgacacuucaggg

SEQ ID NO: 246058 - RNA, 19 nt, Artificial Sequence
  Description of Artificial Sequence: Synthetic oligonucleotide
ugcuacuggggugagacuc

SEQ ID NO: 246059 - RNA, 19 nt, Artificial Sequence
  Description of Artificial Sequence: Synthetic oligonucleotide
agacuguuuugggagcuac

SEQ ID NO: 246060 - RNA, 19 nt, Artificial Sequence
  Description of Artificial Sequence: Synthetic oligonucleotide
guagagcauguccuggccc

SEQ ID NO: 246061 - RNA, 19 nt, Artificial Sequence
  Description of Artificial Sequence: Synthetic oligonucleotide
uuggucaacuucagagacu

SEQ ID NO: 246062 - RNA, 19 nt, Artificial Sequence
  Description of Artificial Sequence: Synthetic oligonucleotide
aguuccgccaauaccuggg

SEQ ID NO: 246063 - RNA, 19 nt, Artificial Sequence
  Description of Artificial Sequence: Synthetic oligonucleotide
ccguuggucaacuucagag

SEQ ID NO: 246064 - RNA, 19 nt, Artificial Sequence
  Description of Artificial Sequence: Synthetic oligonucleotide
cacagccaccugaagauug

SEQ ID NO: 246065 - RNA, 19 nt, Artificial Sequence
  Description of Artificial Sequence: Synthetic oligonucleotide
gauuucacuccaggagggg

SEQ ID NO: 246066 - RNA, 19 nt, Artificial Sequence
  Description of Artificial Sequence: Synthetic oligonucleotide
acaggcuugguggggagac

SEQ ID NO: 246067 - RNA, 19 nt, Artificial Sequence
  Description of Artificial Sequence: Synthetic oligonucleotide
ugguagacagaagccagug

SEQ ID NO: 246068 - RNA, 19 nt, Artificial Sequence
  Description of Artificial Sequence: Synthetic oligonucleotide
uccacgcuccucuuggcca

SEQ ID NO: 246069 - RNA, 19 nt, Artificial Sequence
  Description of Artificial Sequence: Synthetic oligonucleotide
ugaccagaggaggugcuag

SEQ ID NO: 246070 - RNA, 19 nt, Artificial Sequence
  Description of Artificial Sequence: Synthetic oligonucleotide
uuaagccacugcugacggg

SEQ ID NO: 246071 - RNA, 19 nt, Artificial Sequence
  Description of Artificial Sequence: Synthetic oligonucleotide
uuuauggcagggagccaga

SEQ ID NO: 246072 - RNA, 19 nt, Artificial Sequence
  Description of Artificial Sequence: Synthetic oligonucleotide
uugucaauccgcucagcau

SEQ ID NO: 246073 - RNA, 19 nt, Artificial Sequence
  Description of Artificial Sequence: Synthetic oligonucleotide
ugcgauugaacuggauggc

SEQ ID NO: 246074 - RNA, 19 nt, Artificial Sequence
  Description of Artificial Sequence: Synthetic oligonucleotide
agugcgggguggcaggcuc

SEQ ID NO: 246075 - RNA, 19 nt, Artificial Sequence
  Description of Artificial Sequence: Synthetic oligonucleotide
ucgguggagagcaggcgcc

SEQ ID NO: 246076 - RNA, 19 nt, Artificial Sequence
  Description of Artificial Sequence: Synthetic oligonucleotide
cugaguggccaaacugagg

SEQ ID NO: 246077 - RNA, 19 nt, Artificial Sequence
  Description of Artificial Sequence: Synthetic oligonucleotide
uggggugagacuccgcaau

SEQ ID NO: 246078 - RNA, 19 nt, Artificial Sequence
  Description of Artificial Sequence: Synthetic oligonucleotide
caccuaacaggucacccug

SEQ ID NO: 246079 - RNA, 19 nt, Artificial Sequence
  Description of Artificial Sequence: Synthetic oligonucleotide
ggcgcaugcaccuggagug

SEQ ID NO: 246080 - RNA, 19 nt, Artificial Sequence
  Description of Artificial Sequence: Synthetic oligonucleotide
cucuuaugcaccacuccuc

SEQ ID NO: 246081 - RNA, 19 nt, Artificial Sequence
  Description of Artificial Sequence: Synthetic oligonucleotide
ucguugggaaugucuuucc

SEQ ID NO: 246082 - RNA, 19 nt, Artificial Sequence
  Description of Artificial Sequence: Synthetic oligonucleotide
aaggggaguuccaugcuca

SEQ ID NO: 246083 - RNA, 19 nt, Artificial Sequence
  Description of Artificial Sequence: Synthetic oligonucleotide
cagaucauagcagcccggg

SEQ ID NO: 246084 - RNA, 19 nt, Artificial Sequence
  Description of Artificial Sequence: Synthetic oligonucleotide
cacuguguugagaggcagg

SEQ ID NO: 246085 - RNA, 19 nt, Artificial Sequence
  Description of Artificial Sequence: Synthetic oligonucleotide
ggcuaucacgcucucauac

SEQ ID NO: 246086 - RNA, 19 nt, Artificial Sequence
  Description of Artificial Sequence: Synthetic oligonucleotide
gacagcgucaagcuggggu

SEQ ID NO: 246087 - RNA, 19 nt, Artificial Sequence
  Description of Artificial Sequence: Synthetic oligonucleotide
gaggauugucucguaggcc

SEQ ID NO: 246088 - RNA, 19 nt, Artificial Sequence
  Description of Artificial Sequence: Synthetic oligonucleotide
agcucaucuaguaguguag

SEQ ID NO: 246089 - RNA, 19 nt, Artificial Sequence
  Description of Artificial Sequence: Synthetic oligonucleotide
agcaggcgccaguagaugu

SEQ ID NO: 246090 - RNA, 19 nt, Artificial Sequence
  Description of Artificial Sequence: Synthetic oligonucleotide
gccaauguagcagaugagc

SEQ ID NO: 246091 - RNA, 19 nt, Artificial Sequence
  Description of Artificial Sequence: Synthetic oligonucleotide
ucguaggccugguauacau

SEQ ID NO: 246092 - RNA, 19 nt, Artificial Sequence
  Description of Artificial Sequence: Synthetic oligonucleotide
agucaagcagguugcuacu

SEQ ID NO: 246093 - RNA, 19 nt, Artificial Sequence
  Description of Artificial Sequence: Synthetic oligonucleotide
guaggcucaauaaggucug

SEQ ID NO: 246094 - RNA, 19 nt, Artificial Sequence
  Description of Artificial Sequence: Synthetic oligonucleotide
cagagauuucacuccagga

SEQ ID NO: 246095 - RNA, 19 nt, Artificial Sequence
  Description of Artificial Sequence: Synthetic oligonucleotide
ugacugagcccacuguguu

SEQ ID NO: 246096 - RNA, 19 nt, Artificial Sequence
  Description of Artificial Sequence: Synthetic oligonucleotide
uguugcuugcagccucugu

SEQ ID NO: 246097 - RNA, 19 nt, Artificial Sequence
  Description of Artificial Sequence: Synthetic oligonucleotide
acagcgucaagcugggguu

SEQ ID NO: 246098 - RNA, 19 nt, Artificial Sequence
  Description of Artificial Sequence: Synthetic oligonucleotide
cauaggauccugaaagggu

SEQ ID NO: 246099 - RNA, 19 nt, Artificial Sequence
  Description of Artificial Sequence: Synthetic oligonucleotide
gucaccuaacaggucaccc

SEQ ID NO: 246100 - RNA, 19 nt, Artificial Sequence
  Description of Artificial Sequence: Synthetic oligonucleotide
gacgggugcuccaagucug

SEQ ID NO: 246101 - RNA, 19 nt, Artificial Sequence
  Description of Artificial Sequence: Synthetic oligonucleotide
cucguugggaaugucuuuc

SEQ ID NO: 246102 - RNA, 19 nt, Artificial Sequence
  Description of Artificial Sequence: Synthetic oligonucleotide
guguugaguggacagucuc

SEQ ID NO: 246103 - RNA, 19 nt, Artificial Sequence
  Description of Artificial Sequence: Synthetic oligonucleotide
gccuuuauggcagggagcc

SEQ ID NO: 246104 - RNA, 19 nt, Artificial Sequence
  Description of Artificial Sequence: Synthetic oligonucleotide
uccguacaaaauccacauc

SEQ ID NO: 246105 - RNA, 19 nt, Artificial Sequence
  Description of Artificial Sequence: Synthetic oligonucleotide
gauggcacgcacugccuuc

SEQ ID NO: 246106 - RNA, 19 nt, Artificial Sequence
  Description of Artificial Sequence: Synthetic oligonucleotide
cauucauuaagggcuguca

SEQ ID NO: 246107 - RNA, 19 nt, Artificial Sequence
  Description of Artificial Sequence: Synthetic oligonucleotide
caugcaccuggaguggugc

SEQ ID NO: 246108 - RNA, 19 nt, Artificial Sequence
  Description of Artificial Sequence: Synthetic oligonucleotide
caauccgcucagcauacuc

SEQ ID NO: 246109 - RNA, 19 nt, Artificial Sequence
  Description of Artificial Sequence: Synthetic oligonucleotide
aggggaguuccaugcucac

SEQ ID NO: 246110 - RNA, 19 nt, Artificial Sequence
  Description of Artificial Sequence: Synthetic oligonucleotide
ggauuaugggcugggaccc

SEQ ID NO: 246111 - RNA, 19 nt, Artificial Sequence
  Description of Artificial Sequence: Synthetic oligonucleotide
uugaguggacagucucuga

SEQ ID NO: 246112 - RNA, 19 nt, Artificial Sequence
  Description of Artificial Sequence: Synthetic oligonucleotide
uguccuuaaugaccacaau

SEQ ID NO: 246113 - RNA, 19 nt, Artificial Sequence
  Description of Artificial Sequence: Synthetic oligonucleotide
uccauguggccaagaacau

SEQ ID NO: 246114 - RNA, 19 nt, Artificial Sequence
  Description of Artificial Sequence: Synthetic oligonucleotide
augagcucaucuaguagug

SEQ ID NO: 246115 - RNA, 19 nt, Artificial Sequence
  Description of Artificial Sequence: Synthetic oligonucleotide
cacagcgaccgauggcacg

SEQ ID NO: 246116 - RNA, 19 nt, Artificial Sequence
  Description of Artificial Sequence: Synthetic oligonucleotide
caaucaggcugucgaggcc

SEQ ID NO: 246117 - RNA, 19 nt, Artificial Sequence
  Description of Artificial Sequence: Synthetic oligonucleotide
acugagcggcgcaugcacc

SEQ ID NO: 246118 - RNA, 19 nt, Artificial Sequence
  Description of Artificial Sequence: Synthetic oligonucleotide
cccaaggggaguuccaugc

SEQ ID NO: 246119 - RNA, 19 nt, Artificial Sequence
  Description of Artificial Sequence: Synthetic oligonucleotide
cacagagauuucacuccag

SEQ ID NO: 246120 - RNA, 19 nt, Artificial Sequence
  Description of Artificial Sequence: Synthetic oligonucleotide
cuucuaagauuucuggccu

SEQ ID NO: 246121 - RNA, 19 nt, Artificial Sequence
  Description of Artificial Sequence: Synthetic oligonucleotide
gguuccguuucuuuugauc

SEQ ID NO: 246122 - RNA, 19 nt, Artificial Sequence
  Description of Artificial Sequence: Synthetic oligonucleotide
agauuguucagaggcucca

SEQ ID NO: 246123 - RNA, 19 nt, Artificial Sequence
  Description of Artificial Sequence: Synthetic oligonucleotide
agcgucaagcugggguugc

SEQ ID NO: 246124 - RNA, 19 nt, Artificial Sequence
  Description of Artificial Sequence: Synthetic oligonucleotide
uggggcgcucacuggaggc

SEQ ID NO: 246125 - RNA, 19 nt, Artificial Sequence
  Description of Artificial Sequence: Synthetic oligonucleotide
gguagagcauguccuggcc

SEQ ID NO: 246126 - RNA, 19 nt, Artificial Sequence
  Description of Artificial Sequence: Synthetic oligonucleotide
uugagcagugugccauagu

SEQ ID NO: 246127 - RNA, 19 nt, Artificial Sequence
  Description of Artificial Sequence: Synthetic oligonucleotide
gcucaucuaguaguguagg

SEQ ID NO: 246128 - RNA, 19 nt, Artificial Sequence
  Description of Artificial Sequence: Synthetic oligonucleotide
ucuaguaguguaggcucaa

SEQ ID NO: 246129 - RNA, 19 nt, Artificial Sequence
  Description of Artificial Sequence: Synthetic oligonucleotide
cugaaagggugcccacacc

SEQ ID NO: 246130 - RNA, 19 nt, Artificial Sequence
  Description of Artificial Sequence: Synthetic oligonucleotide
caugauagggcuggcagaa

SEQ ID NO: 246131 - RNA, 19 nt, Artificial Sequence
  Description of Artificial Sequence: Synthetic oligonucleotide
uccgcucagcauacucgcc

SEQ ID NO: 246132 - RNA, 19 nt, Artificial Sequence
  Description of Artificial Sequence: Synthetic oligonucleotide
gaagccagugugccaaugu

SEQ ID NO: 246133 - RNA, 19 nt, Artificial Sequence
  Description of Artificial Sequence: Synthetic oligonucleotide
caagucuggcuggugcugc

SEQ ID NO: 246134 - RNA, 19 nt, Artificial Sequence
  Description of Artificial Sequence: Synthetic oligonucleotide
agagccuaggagugacccu

SEQ ID NO: 246135 - RNA, 19 nt, Artificial Sequence
  Description of Artificial Sequence: Synthetic oligonucleotide
ugguugggacugagcggcg

SEQ ID NO: 246136 - RNA, 19 nt, Artificial Sequence
  Description of Artificial Sequence: Synthetic oligonucleotide
uguugcgauugaacuggau

SEQ ID NO: 246137 - RNA, 19 nt, Artificial Sequence
  Description of Artificial Sequence: Synthetic oligonucleotide
ugaccuuggucuggaugag

SEQ ID NO: 246138 - RNA, 19 nt, Artificial Sequence
  Description of Artificial Sequence: Synthetic oligonucleotide
caccucuggugcucgacac

SEQ ID NO: 246139 - RNA, 19 nt, Artificial Sequence
  Description of Artificial Sequence: Synthetic oligonucleotide
agggucgguggagagcagg

SEQ ID NO: 246140 - RNA, 19 nt, Artificial Sequence
  Description of Artificial Sequence: Synthetic oligonucleotide
guggcuaucacgcucucau

SEQ ID NO: 246141 - RNA, 19 nt, Artificial Sequence
  Description of Artificial Sequence: Synthetic oligonucleotide
agguucucacacagugugg

SEQ ID NO: 246142 - RNA, 19 nt, Artificial Sequence
  Description of Artificial Sequence: Synthetic oligonucleotide
cccgcaucaacagcaaugg

SEQ ID NO: 246143 - RNA, 19 nt, Artificial Sequence
  Description of Artificial Sequence: Synthetic oligonucleotide
guuccgccaauaccugggc

SEQ ID NO: 246144 - RNA, 19 nt, Artificial Sequence
  Description of Artificial Sequence: Synthetic oligonucleotide
aggcugucgaggccaccac

SEQ ID NO: 246145 - RNA, 19 nt, Artificial Sequence
  Description of Artificial Sequence: Synthetic oligonucleotide
ggcucuuaugcaccacucc

SEQ ID NO: 246146 - RNA, 19 nt, Artificial Sequence
  Description of Artificial Sequence: Synthetic oligonucleotide
cugaucaccagaaggugcu

SEQ ID NO: 246147 - RNA, 19 nt, Artificial Sequence
  Description of Artificial Sequence: Synthetic oligonucleotide
cugacgggugcuccaaguc

SEQ ID NO: 246148 - RNA, 19 nt, Artificial Sequence
  Description of Artificial Sequence: Synthetic oligonucleotide
guuucuuuugaucccgcau

SEQ ID NO: 246149 - RNA, 19 nt, Artificial Sequence
  Description of Artificial Sequence: Synthetic oligonucleotide
agagcacccuguggucucc

SEQ ID NO: 246150 - RNA, 19 nt, Artificial Sequence
  Description of Artificial Sequence: Synthetic oligonucleotide
ugcugacgggugcuccaag

SEQ ID NO: 246151 - RNA, 19 nt, Artificial Sequence
  Description of Artificial Sequence: Synthetic oligonucleotide
gcauacucgcccacuaucc

SEQ ID NO: 246152 - RNA, 19 nt, Artificial Sequence
  Description of Artificial Sequence: Synthetic oligonucleotide
cagcaauggaaaacagcca

SEQ ID NO: 246153 - RNA, 19 nt, Artificial Sequence
  Description of Artificial Sequence: Synthetic oligonucleotide
aggucaccuaacaggucac

SEQ ID NO: 246154 - RNA, 19 nt, Artificial Sequence
  Description of Artificial Sequence: Synthetic oligonucleotide
gugcucgacacuucaggga

SEQ ID NO: 246155 - RNA, 19 nt, Artificial Sequence
  Description of Artificial Sequence: Synthetic oligonucleotide
ugccccaaaguugcugucu

SEQ ID NO: 246156 - RNA, 19 nt, Artificial Sequence
  Description of Artificial Sequence: Synthetic oligonucleotide
cacgcacugccuuccguac

SEQ ID NO: 246157 - RNA, 19 nt, Artificial Sequence
  Description of Artificial Sequence: Synthetic oligonucleotide
caucaggcugaucaccaga

SEQ ID NO: 246158 - RNA, 19 nt, Artificial Sequence
  Description of Artificial Sequence: Synthetic oligonucleotide
cuggugcucgacacuucag

SEQ ID NO: 246159 - RNA, 19 nt, Artificial Sequence
  Description of Artificial Sequence: Synthetic oligonucleotide
aucuaguaguguaggcuca

SEQ ID NO: 246160 - RNA, 19 nt, Artificial Sequence
  Description of Artificial Sequence: Synthetic oligonucleotide
gucaauccgcucagcauac

SEQ ID NO: 246161 - RNA, 19 nt, Artificial Sequence
  Description of Artificial Sequence: Synthetic oligonucleotide
gcgauugaacuggauggcg

SEQ ID NO: 246162 - RNA, 19 nt, Artificial Sequence
  Description of Artificial Sequence: Synthetic oligonucleotide
acgaucccgaaggucuggg

SEQ ID NO: 246163 - RNA, 19 nt, Artificial Sequence
  Description of Artificial Sequence: Synthetic oligonucleotide
acagcgcucugcagauugc

SEQ ID NO: 246164 - RNA, 19 nt, Artificial Sequence
  Description of Artificial Sequence: Synthetic oligonucleotide
cuacuggggugagacuccg

SEQ ID NO: 246165 - RNA, 19 nt, Artificial Sequence
  Description of Artificial Sequence: Synthetic oligonucleotide
ccguacaaaauccacaucu

SEQ ID NO: 246166 - RNA, 19 nt, Artificial Sequence
  Description of Artificial Sequence: Synthetic oligonucleotide
ggagacaaggcaaggauua

SEQ ID NO: 246167 - RNA, 19 nt, Artificial Sequence
  Description of Artificial Sequence: Synthetic oligonucleotide
ucuuuugaucccgcaucaa

SEQ ID NO: 246168 - RNA, 19 nt, Artificial Sequence
  Description of Artificial Sequence: Synthetic oligonucleotide
cauacucgcccacuaucca

SEQ ID NO: 246169 - RNA, 19 nt, Artificial Sequence
  Description of Artificial Sequence: Synthetic oligonucleotide
cuaagauuucuggccuuuc

SEQ ID NO: 246170 - RNA, 19 nt, Artificial Sequence
  Description of Artificial Sequence: Synthetic oligonucleotide
gucuccaaucaggcugucg

SEQ ID NO: 246171 - RNA, 19 nt, Artificial Sequence
  Description of Artificial Sequence: Synthetic oligonucleotide
ggcacagcgaccgauggca

SEQ ID NO: 246172 - RNA, 19 nt, Artificial Sequence
  Description of Artificial Sequence: Synthetic oligonucleotide
auacugcagcucuggcucu

SEQ ID NO: 246173 - RNA, 19 nt, Artificial Sequence
  Description of Artificial Sequence: Synthetic oligonucleotide
gcaaggauuaugggcuggg

SEQ ID NO: 246174 - RNA, 19 nt, Artificial Sequence
  Description of Artificial Sequence: Synthetic oligonucleotide
auacaugcugggacaccuc

SEQ ID NO: 246175 - RNA, 19 nt, Artificial Sequence
  Description of Artificial Sequence: Synthetic oligonucleotide
gcagcuaaagguggggcgc

SEQ ID NO: 246176 - RNA, 19 nt, Artificial Sequence
  Description of Artificial Sequence: Synthetic oligonucleotide
agagcaggcgccaguagau

SEQ ID NO: 246177 - RNA, 19 nt, Artificial Sequence
  Description of Artificial Sequence: Synthetic oligonucleotide
agcucccauuugcacugag

SEQ ID NO: 246178 - RNA, 19 nt, Artificial Sequence
  Description of Artificial Sequence: Synthetic oligonucleotide
gaucccgaaggucuggguu

SEQ ID NO: 246179 - RNA, 19 nt, Artificial Sequence
  Description of Artificial Sequence: Synthetic oligonucleotide
uucuggccuuucugcacga

SEQ ID NO: 246180 - RNA, 19 nt, Artificial Sequence
  Description of Artificial Sequence: Synthetic oligonucleotide
ucuugaggauugucucgua

SEQ ID NO: 246181 - RNA, 19 nt, Artificial Sequence
  Description of Artificial Sequence: Synthetic oligonucleotide
agacucuacccaggacagg

SEQ ID NO: 246182 - RNA, 19 nt, Artificial Sequence
  Description of Artificial Sequence: Synthetic oligonucleotide
uguugcgcagagccacaua

SEQ ID NO: 246183 - RNA, 19 nt, Artificial Sequence
  Description of Artificial Sequence: Synthetic oligonucleotide
gccagagaucucuagaccu

SEQ ID NO: 246184 - RNA, 19 nt, Artificial Sequence
  Description of Artificial Sequence: Synthetic oligonucleotide
guugggacugagcggcgca

SEQ ID NO: 246185 - RNA, 19 nt, Artificial Sequence
  Description of Artificial Sequence: Synthetic oligonucleotide
gaagagcacccuguggucu

SEQ ID NO: 246186 - RNA, 19 nt, Artificial Sequence
  Description of Artificial Sequence: Synthetic oligonucleotide
gagccaaccuggcggguga

SEQ ID NO: 246187 - RNA, 19 nt, Artificial Sequence
  Description of Artificial Sequence: Synthetic oligonucleotide
agccucuguguugagugga

SEQ ID NO: 246188 - RNA, 19 nt, Artificial Sequence
  Description of Artificial Sequence: Synthetic oligonucleotide
uggcgaaaucugucaugac

SEQ ID NO: 246189 - RNA, 19 nt, Artificial Sequence
  Description of Artificial Sequence: Synthetic oligonucleotide
gcauggaccugcucugggc

SEQ ID NO: 246190 - RNA, 19 nt, Artificial Sequence
  Description of Artificial Sequence: Synthetic oligonucleotide
caggcgccaguagauguag

SEQ ID NO: 246191 - RNA, 19 nt, Artificial Sequence
  Description of Artificial Sequence: Synthetic oligonucleotide
cacacacaggggcuccaug

SEQ ID NO: 246192 - RNA, 19 nt, Artificial Sequence
  Description of Artificial Sequence: Synthetic oligonucleotide
cugcauugucaauccgcuc

SEQ ID NO: 246193 - RNA, 19 nt, Artificial Sequence
  Description of Artificial Sequence: Synthetic oligonucleotide
uugcuacuggggugagacu

SEQ ID NO: 246194 - RNA, 19 nt, Artificial Sequence
  Description of Artificial Sequence: Synthetic oligonucleotide
agggagagcuccacagucu

SEQ ID NO: 246195 - RNA, 19 nt, Artificial Sequence
  Description of Artificial Sequence: Synthetic oligonucleotide
gacuguuuugggagcuaca

SEQ ID NO: 246196 - RNA, 19 nt, Artificial Sequence
  Description of Artificial Sequence: Synthetic oligonucleotide
uggucaggucaaagagauc

SEQ ID NO: 246197 - RNA, 19 nt, Artificial Sequence
  Description of Artificial Sequence: Synthetic oligonucleotide
augcucugugccucacggu

SEQ ID NO: 246198 - RNA, 19 nt, Artificial Sequence
  Description of Artificial Sequence: Synthetic oligonucleotide
gauguugcgcagagccaca

SEQ ID NO: 246199 - RNA, 19 nt, Artificial Sequence
  Description of Artificial Sequence: Synthetic oligonucleotide
augauagggcuggcagaag

SEQ ID NO: 246200 - RNA, 19 nt, Artificial Sequence
  Description of Artificial Sequence: Synthetic oligonucleotide
ggcaaggauuaugggcugg

SEQ ID NO: 246201 - RNA, 19 nt, Artificial Sequence
  Description of Artificial Sequence: Synthetic oligonucleotide
cacgaucccgaaggucugg

SEQ ID NO: 246202 - RNA, 19 nt, Artificial Sequence
  Description of Artificial Sequence: Synthetic oligonucleotide
gggacugagcggcgcaugc

SEQ ID NO: 246203 - RNA, 19 nt, Artificial Sequence
  Description of Artificial Sequence: Synthetic oligonucleotide
agcuaaagguggggcgcuc

SEQ ID NO: 246204 - RNA, 19 nt, Artificial Sequence
  Description of Artificial Sequence: Synthetic oligonucleotide
ugggacugagcggcgcaug

SEQ ID NO: 246205 - RNA, 19 nt, Artificial Sequence
  Description of Artificial Sequence: Synthetic oligonucleotide
acgcacugccuuccguaca

SEQ ID NO: 246206 - RNA, 19 nt, Artificial Sequence
  Description of Artificial Sequence: Synthetic oligonucleotide
gucucguaggccugguaua

SEQ ID NO: 246207 - RNA, 19 nt, Artificial Sequence
  Description of Artificial Sequence: Synthetic oligonucleotide
uauuggcacccagacucua

SEQ ID NO: 246208 - RNA, 19 nt, Artificial Sequence
  Description of Artificial Sequence: Synthetic oligonucleotide
caucuacuucuguagcaua

SEQ ID NO: 246209 - RNA, 19 nt, Artificial Sequence
  Description of Artificial Sequence: Synthetic oligonucleotide
ucccgaaggucuggguugu

SEQ ID NO: 246210 - RNA, 19 nt, Artificial Sequence
  Description of Artificial Sequence: Synthetic oligonucleotide
ucacgcucucauacuuguu

SEQ ID NO: 246211 - RNA, 19 nt, Artificial Sequence
  Description of Artificial Sequence: Synthetic oligonucleotide
cuuccuggacuacauaguu

SEQ ID NO: 246212 - RNA, 19 nt, Artificial Sequence
  Description of Artificial Sequence: Synthetic oligonucleotide
ugagcggcgcaugcaccug

SEQ ID NO: 246213 - RNA, 19 nt, Artificial Sequence
  Description of Artificial Sequence: Synthetic oligonucleotide
uggcuaucacgcucucaua

SEQ ID NO: 246214 - RNA, 19 nt, Artificial Sequence
  Description of Artificial Sequence: Synthetic oligonucleotide
cucacuggaggcccaaggu

SEQ ID NO: 246215 - RNA, 19 nt, Artificial Sequence
  Description of Artificial Sequence: Synthetic oligonucleotide
auggcuuccuggacuacau

SEQ ID NO: 246216 - RNA, 19 nt, Artificial Sequence
  Description of Artificial Sequence: Synthetic oligonucleotide
aggcgccaguagauguagc

SEQ ID NO: 246217 - RNA, 19 nt, Artificial Sequence
  Description of Artificial Sequence: Synthetic oligonucleotide
ucaauccgcucagcauacu

SEQ ID NO: 246218 - RNA, 19 nt, Artificial Sequence
  Description of Artificial Sequence: Synthetic oligonucleotide
ugguuccguuucuuuugau

SEQ ID NO: 246219 - RNA, 19 nt, Artificial Sequence
  Description of Artificial Sequence: Synthetic oligonucleotide
uggguggaugcuggaggga

SEQ ID NO: 246220 - RNA, 19 nt, Artificial Sequence
  Description of Artificial Sequence: Synthetic oligonucleotide
acgggugcuccaagucugg

SEQ ID NO: 246221 - RNA, 19 nt, Artificial Sequence
  Description of Artificial Sequence: Synthetic oligonucleotide
gacuucaguucuugaggau

SEQ ID NO: 246222 - RNA, 19 nt, Artificial Sequence
  Description of Artificial Sequence: Synthetic oligonucleotide
cuaucacgcucucauacuu

SEQ ID NO: 246223 - RNA, 19 nt, Artificial Sequence
  Description of Artificial Sequence: Synthetic oligonucleotide
cuguuuccucugagaugag

SEQ ID NO: 246224 - RNA, 19 nt, Artificial Sequence
  Description of Artificial Sequence: Synthetic oligonucleotide
aucccgcaucaacagcaau

SEQ ID NO: 246225 - RNA, 19 nt, Artificial Sequence
  Description of Artificial Sequence: Synthetic oligonucleotide
ggucgguggagagcaggcg

SEQ ID NO: 246226 - RNA, 19 nt, Artificial Sequence
  Description of Artificial Sequence: Synthetic oligonucleotide
acucgcccacuauccagau

SEQ ID NO: 246227 - RNA, 19 nt, Artificial Sequence
  Description of Artificial Sequence: Synthetic oligonucleotide
ggcugucgaggccaccacc

SEQ ID NO: 246228 - RNA, 19 nt, Artificial Sequence
  Description of Artificial Sequence: Synthetic oligonucleotide
cucuggugcucgacacuuc

SEQ ID NO: 246229 - RNA, 19 nt, Artificial Sequence
  Description of Artificial Sequence: Synthetic oligonucleotide
uggguggcuugugguagac

SEQ ID NO: 246230 - RNA, 19 nt, Artificial Sequence
  Description of Artificial Sequence: Synthetic oligonucleotide
gggagucuagguucucaca

SEQ ID NO: 246231 - RNA, 19 nt, Artificial Sequence
  Description of Artificial Sequence: Synthetic oligonucleotide
ugauggacuguggguucaa

SEQ ID NO: 246232 - RNA, 19 nt, Artificial Sequence
  Description of Artificial Sequence: Synthetic oligonucleotide
agcuccgccaguacccaga

SEQ ID NO: 246233 - RNA, 19 nt, Artificial Sequence
  Description of Artificial Sequence: Synthetic oligonucleotide
gcuacuggggugagacucc

SEQ ID NO: 246234 - RNA, 19 nt, Artificial Sequence
  Description of Artificial Sequence: Synthetic oligonucleotide
ggccuuuauggcagggagc

SEQ ID NO: 246235 - RNA, 19 nt, Artificial Sequence
  Description of Artificial Sequence: Synthetic oligonucleotide
aguugaccuuggucuggau

SEQ ID NO: 246236 - RNA, 19 nt, Artificial Sequence
  Description of Artificial Sequence: Synthetic oligonucleotide
ggcucaauaaggucuguuu

SEQ ID NO: 246237 - RNA, 19 nt, Artificial Sequence
  Description of Artificial Sequence: Synthetic oligonucleotide
uaggcucaauaaggucugu

SEQ ID NO: 246238 - RNA, 19 nt, Artificial Sequence
  Description of Artificial Sequence: Synthetic oligonucleotide
cccaaauagaggaggaggu

SEQ ID NO: 246239 - RNA, 19 nt, Artificial Sequence
  Description of Artificial Sequence: Synthetic oligonucleotide
gggguugccuggcuggauc

SEQ ID NO: 246240 - RNA, 19 nt, Artificial Sequence
  Description of Artificial Sequence: Synthetic oligonucleotide
caaggauuaugggcuggga

SEQ ID NO: 246241 - RNA, 19 nt, Artificial Sequence
  Description of Artificial Sequence: Synthetic oligonucleotide
aggcucaauaaggucuguu

SEQ ID NO: 246242 - RNA, 19 nt, Artificial Sequence
  Description of Artificial Sequence: Synthetic oligonucleotide
gcccucaauuaggaugggg

SEQ ID NO: 246243 - RNA, 19 nt, Artificial Sequence
  Description of Artificial Sequence: Synthetic oligonucleotide
cucucgcucgaggcagugc

SEQ ID NO: 246244 - RNA, 19 nt, Artificial Sequence
  Description of Artificial Sequence: Synthetic oligonucleotide
acccuccacaaaggcacug

SEQ ID NO: 246245 - RNA, 19 nt, Artificial Sequence
  Description of Artificial Sequence: Synthetic oligonucleotide
uugggacugagcggcgcau

SEQ ID NO: 246246 - RNA, 19 nt, Artificial Sequence
  Description of Artificial Sequence: Synthetic oligonucleotide
gcuaucacgcucucauacu

SEQ ID NO: 246247 - RNA, 19 nt, Artificial Sequence
  Description of Artificial Sequence: Synthetic oligonucleotide
ggucaccuaacaggucacc

SEQ ID NO: 246248 - RNA, 19 nt, Artificial Sequence
  Description of Artificial Sequence: Synthetic oligonucleotide
caguacccagaugccguug

SEQ ID NO: 246249 - RNA, 19 nt, Artificial Sequence
  Description of Artificial Sequence: Synthetic oligonucleotide
ccaagaacaucugccgguc

SEQ ID NO: 246250 - RNA, 19 nt, Artificial Sequence
  Description of Artificial Sequence: Synthetic oligonucleotide
aaggugccagagaucucua

SEQ ID NO: 246251 - RNA, 19 nt, Artificial Sequence
  Description of Artificial Sequence: Synthetic oligonucleotide
ggaggcuucuaagauuucu

SEQ ID NO: 246252 - RNA, 19 nt, Artificial Sequence
  Description of Artificial Sequence: Synthetic oligonucleotide
cgauugaacuggauggcga

SEQ ID NO: 246253 - RNA, 19 nt, Artificial Sequence
  Description of Artificial Sequence: Synthetic oligonucleotide
cagcgucaagcugggguug

SEQ ID NO: 246254 - RNA, 19 nt, Artificial Sequence
  Description of Artificial Sequence: Synthetic oligonucleotide
ccaugauagggcuggcaga

SEQ ID NO: 246255 - RNA, 19 nt, Artificial Sequence
  Description of Artificial Sequence: Synthetic oligonucleotide
cuguugcgauugaacugga

SEQ ID NO: 246256 - RNA, 19 nt, Artificial Sequence
  Description of Artificial Sequence: Synthetic oligonucleotide
cuacauaguugaccuuggu

SEQ ID NO: 246257 - RNA, 19 nt, Artificial Sequence
  Description of Artificial Sequence: Synthetic oligonucleotide
gauuguucagaggcuccau

SEQ ID NO: 246258 - RNA, 19 nt, Artificial Sequence
  Description of Artificial Sequence: Synthetic oligonucleotide
cucgcccacuauccagauc

SEQ ID NO: 246259 - RNA, 19 nt, Artificial Sequence
  Description of Artificial Sequence: Synthetic oligonucleotide
cugagcggcgcaugcaccu

SEQ ID NO: 246260 - RNA, 19 nt, Artificial Sequence
  Description of Artificial Sequence: Synthetic oligonucleotide
gccucacggucauccuugg

SEQ ID NO: 246261 - RNA, 19 nt, Artificial Sequence
  Description of Artificial Sequence: Synthetic oligonucleotide
accccaaggggaguuccau

SEQ ID NO: 246262 - RNA, 19 nt, Artificial Sequence
  Description of Artificial Sequence: Synthetic oligonucleotide
ggucaacuucagagacugg

SEQ ID NO: 246263 - RNA, 19 nt, Artificial Sequence
  Description of Artificial Sequence: Synthetic oligonucleotide
gggucgguggagagcaggc

SEQ ID NO: 246264 - RNA, 19 nt, Artificial Sequence
  Description of Artificial Sequence: Synthetic oligonucleotide
gcauucauuaagggcuguc

SEQ ID NO: 246265 - RNA, 19 nt, Artificial Sequence
  Description of Artificial Sequence: Synthetic oligonucleotide
ggcauguaguuggccagac

SEQ ID NO: 246266 - RNA, 19 nt, Artificial Sequence
  Description of Artificial Sequence: Synthetic oligonucleotide
ucauagcagcccgggccuc

SEQ ID NO: 246267 - RNA, 19 nt, Artificial Sequence
  Description of Artificial Sequence: Synthetic oligonucleotide
cuggggugagacuccgcaa

SEQ ID NO: 246268 - RNA, 19 nt, Artificial Sequence
  Description of Artificial Sequence: Synthetic oligonucleotide
ggaccccaaggggaguucc

SEQ ID NO: 246269 - RNA, 19 nt, Artificial Sequence
  Description of Artificial Sequence: Synthetic oligonucleotide
gguugggacugagcggcgc

SEQ ID NO: 246270 - RNA, 19 nt, Artificial Sequence
  Description of Artificial Sequence: Synthetic oligonucleotide
ccaggcaaagggagaagga

SEQ ID NO: 246271 - RNA, 19 nt, Artificial Sequence
  Description of Artificial Sequence: Synthetic oligonucleotide
guggccaaacugaggaccu

SEQ ID NO: 246272 - RNA, 19 nt, Artificial Sequence
  Description of Artificial Sequence: Synthetic oligonucleotide
gcagugugccauaguaguc

SEQ ID NO: 246273 - RNA, 19 nt, Artificial Sequence
  Description of Artificial Sequence: Synthetic oligonucleotide
ccuaggagugacccuuuca

SEQ ID NO: 246274 - RNA, 19 nt, Artificial Sequence
  Description of Artificial Sequence: Synthetic oligonucleotide
caaccuggcgggugaaggu

SEQ ID NO: 246275 - RNA, 19 nt, Artificial Sequence
  Description of Artificial Sequence: Synthetic oligonucleotide
ggagaugcacagagauuuc

SEQ ID NO: 246276 - RNA, 19 nt, Artificial Sequence
  Description of Artificial Sequence: Synthetic oligonucleotide
gggcauggaccugcucugg

SEQ ID NO: 246277 - RNA, 19 nt, Artificial Sequence
  Description of Artificial Sequence: Synthetic oligonucleotide
ccugguauacaugcuggga

SEQ ID NO: 246278 - RNA, 19 nt, Artificial Sequence
  Description of Artificial Sequence: Synthetic oligonucleotide
gccaauaccugggcgaugu

SEQ ID NO: 246279 - RNA, 19 nt, Artificial Sequence
  Description of Artificial Sequence: Synthetic oligonucleotide
gcauguaguuggccagaca

SEQ ID NO: 246280 - RNA, 19 nt, Artificial Sequence
  Description of Artificial Sequence: Synthetic oligonucleotide
agaugccguuggucaacuu

SEQ ID NO: 246281 - RNA, 19 nt, Artificial Sequence
  Description of Artificial Sequence: Synthetic oligonucleotide
cauagcagcccgggccuca

SEQ ID NO: 246282 - RNA, 19 nt, Artificial Sequence
  Description of Artificial Sequence: Synthetic oligonucleotide
cuagcuucuugagcagugu

SEQ ID NO: 246283 - RNA, 19 nt, Artificial Sequence
  Description of Artificial Sequence: Synthetic oligonucleotide
ggauggcgaaaucugucau

SEQ ID NO: 246284 - RNA, 19 nt, Artificial Sequence
  Description of Artificial Sequence: Synthetic oligonucleotide
gcgcaugcaccuggagugg

SEQ ID NO: 246285 - RNA, 19 nt, Artificial Sequence
  Description of Artificial Sequence: Synthetic oligonucleotide
ggagagccuaggagugacc

SEQ ID NO: 246286 - RNA, 19 nt, Artificial Sequence
  Description of Artificial Sequence: Synthetic oligonucleotide
cucguaggccugguauaca

SEQ ID NO: 246287 - RNA, 19 nt, Artificial Sequence
  Description of Artificial Sequence: Synthetic oligonucleotide
cugaguccugaguggccaa

SEQ ID NO: 246288 - RNA, 19 nt, Artificial Sequence
  Description of Artificial Sequence: Synthetic oligonucleotide
gauguuggccugggaggcu

SEQ ID NO: 246289 - RNA, 19 nt, Artificial Sequence
  Description of Artificial Sequence: Synthetic oligonucleotide
cguaggccugguauacaug

SEQ ID NO: 246290 - RNA, 19 nt, Artificial Sequence
  Description of Artificial Sequence: Synthetic oligonucleotide
cagggucgguggagagcag

SEQ ID NO: 246291 - RNA, 19 nt, Artificial Sequence
  Description of Artificial Sequence: Synthetic oligonucleotide
ccacgcuccucuuggccac

SEQ ID NO: 246292 - RNA, 19 nt, Artificial Sequence
  Description of Artificial Sequence: Synthetic oligonucleotide
gcacgcacugccuuccgua

SEQ ID NO: 246293 - RNA, 19 nt, Artificial Sequence
  Description of Artificial Sequence: Synthetic oligonucleotide
ccacgaucccgaaggucug

SEQ ID NO: 246294 - RNA, 19 nt, Artificial Sequence
  Description of Artificial Sequence: Synthetic oligonucleotide
ccgccaguacccagaugcc

SEQ ID NO: 246295 - RNA, 19 nt, Artificial Sequence
  Description of Artificial Sequence: Synthetic oligonucleotide
ugucuccaaucaggcuguc

SEQ ID NO: 246296 - RNA, 19 nt, Artificial Sequence
  Description of Artificial Sequence: Synthetic oligonucleotide
ggggcgcucacuggaggcc

SEQ ID NO: 246297 - RNA, 19 nt, Artificial Sequence
  Description of Artificial Sequence: Synthetic oligonucleotide
gccuuguuagucagcugca

SEQ ID NO: 246298 - RNA, 19 nt, Artificial Sequence
  Description of Artificial Sequence: Synthetic oligonucleotide
auguagcagaugagcucau

SEQ ID NO: 246299 - RNA, 19 nt, Artificial Sequence
  Description of Artificial Sequence: Synthetic oligonucleotide
uacccaggacaggcuuggu

SEQ ID NO: 246300 - RNA, 19 nt, Artificial Sequence
  Description of Artificial Sequence: Synthetic oligonucleotide
cugucgaggccaccaccaa

SEQ ID NO: 246301 - RNA, 19 nt, Artificial Sequence
  Description of Artificial Sequence: Synthetic oligonucleotide
gggcgcucacuggaggccc

SEQ ID NO: 246302 - RNA, 19 nt, Artificial Sequence
  Description of Artificial Sequence: Synthetic oligonucleotide
gcugacgggugcuccaagu

SEQ ID NO: 246303 - RNA, 19 nt, Artificial Sequence
  Description of Artificial Sequence: Synthetic oligonucleotide
cauuugcacugaggaggca

SEQ ID NO: 246304 - RNA, 19 nt, Artificial Sequence
  Description of Artificial Sequence: Synthetic oligonucleotide
caguagauguagccacgau

SEQ ID NO: 246305 - RNA, 19 nt, Artificial Sequence
  Description of Artificial Sequence: Synthetic oligonucleotide
ccaaauagaggaggaggua

SEQ ID NO: 246306 - RNA, 19 nt, Artificial Sequence
  Description of Artificial Sequence: Synthetic oligonucleotide
gccuaggagugacccuuuc

SEQ ID NO: 246307 - RNA, 19 nt, Artificial Sequence
  Description of Artificial Sequence: Synthetic oligonucleotide
agcggcgcaugcaccugga

SEQ ID NO: 246308 - RNA, 19 nt, Artificial Sequence
  Description of Artificial Sequence: Synthetic oligonucleotide
cacccuguggucuccuguu

SEQ ID NO: 246309 - RNA, 19 nt, Artificial Sequence
  Description of Artificial Sequence: Synthetic oligonucleotide
gcggcgcaugcaccuggag

SEQ ID NO: 246310 - RNA, 19 nt, Artificial Sequence
  Description of Artificial Sequence: Synthetic oligonucleotide
ggcccucaauuaggauggg

SEQ ID NO: 246311 - RNA, 19 nt, Artificial Sequence
  Description of Artificial Sequence: Synthetic oligonucleotide
cagacuguuuugggagcua

SEQ ID NO: 246312 - RNA, 19 nt, Artificial Sequence
  Description of Artificial Sequence: Synthetic oligonucleotide
agccuaggagugacccuuu

SEQ ID NO: 246313 - RNA, 19 nt, Artificial Sequence
  Description of Artificial Sequence: Synthetic oligonucleotide
caggcuugguggggagaca

SEQ ID NO: 246314 - RNA, 19 nt, Artificial Sequence
  Description of Artificial Sequence: Synthetic oligonucleotide
gcacagcgaccgauggcac

SEQ ID NO: 246315 - RNA, 19 nt, Artificial Sequence
  Description of Artificial Sequence: Synthetic oligonucleotide
gcucucgcucgaggcagug

SEQ ID NO: 246316 - RNA, 19 nt, Artificial Sequence
  Description of Artificial Sequence: Synthetic oligonucleotide
cagcuaaagguggggcgcu

SEQ ID NO: 246317 - RNA, 19 nt, Artificial Sequence
  Description of Artificial Sequence: Synthetic oligonucleotide
cagcgcucugcagauugcu

SEQ ID NO: 246318 - RNA, 19 nt, Artificial Sequence
  Description of Artificial Sequence: Synthetic oligonucleotide
gcgucaagcugggguugcc

SEQ ID NO: 246319 - RNA, 19 nt, Artificial Sequence
  Description of Artificial Sequence: Synthetic oligonucleotide
ggacaccucuggugcucga

SEQ ID NO: 246320 - RNA, 19 nt, Artificial Sequence
  Description of Artificial Sequence: Synthetic oligonucleotide
cucuagaccuuuggccuuu

SEQ ID NO: 246321 - RNA, 19 nt, Artificial Sequence
  Description of Artificial Sequence: Synthetic oligonucleotide
ggguggcuugugguagaca

SEQ ID NO: 246322 - RNA, 19 nt, Artificial Sequence
  Description of Artificial Sequence: Synthetic oligonucleotide
ggcacgcacugccuuccgu

SEQ ID NO: 246323 - RNA, 19 nt, Artificial Sequence
  Description of Artificial Sequence: Synthetic oligonucleotide
gugugccaauguagcagau

SEQ ID NO: 246324 - RNA, 19 nt, Artificial Sequence
  Description of Artificial Sequence: Synthetic oligonucleotide
ccgcaucaacagcaaugga

SEQ ID NO: 246325 - RNA, 19 nt, Artificial Sequence
  Description of Artificial Sequence: Synthetic oligonucleotide
cagcgaccgauggcacgca

SEQ ID NO: 246326 - RNA, 19 nt, Artificial Sequence
  Description of Artificial Sequence: Synthetic oligonucleotide
ccuuuauggcagggagcca

SEQ ID NO: 246327 - RNA, 19 nt, Artificial Sequence
  Description of Artificial Sequence: Synthetic oligonucleotide
caccacuggucaggucaaa

SEQ ID NO: 246328 - RNA, 19 nt, Artificial Sequence
  Description of Artificial Sequence: Synthetic oligonucleotide
gccaaacugaggaccuguu

SEQ ID NO: 246329 - RNA, 19 nt, Artificial Sequence
  Description of Artificial Sequence: Synthetic oligonucleotide
cggcgcaugcaccuggagu

SEQ ID NO: 246330 - RNA, 19 nt, Artificial Sequence
  Description of Artificial Sequence: Synthetic oligonucleotide
cgcucacuggaggcccaag

SEQ ID NO: 246331 - RNA, 19 nt, Artificial Sequence
  Description of Artificial Sequence: Synthetic oligonucleotide
gcagggagccagacuguuu

SEQ ID NO: 246332 - RNA, 19 nt, Artificial Sequence
  Description of Artificial Sequence: Synthetic oligonucleotide
cagugcgggguggcaggcu

SEQ ID NO: 246333 - RNA, 19 nt, Artificial Sequence
  Description of Artificial Sequence: Synthetic oligonucleotide
gcgcucacuggaggcccaa

SEQ ID NO: 246334 - RNA, 19 nt, Artificial Sequence
  Description of Artificial Sequence: Synthetic oligonucleotide
ccgccaauaccugggcgau

SEQ ID NO: 246335 - RNA, 19 nt, Artificial Sequence
  Description of Artificial Sequence: Synthetic oligonucleotide
cgcaugcaccuggaguggu

SEQ ID NO: 246336 - RNA, 19 nt, Artificial Sequence
  Description of Artificial Sequence: Synthetic oligonucleotide
aaauauacacucuaagguc

SEQ ID NO: 246337 - RNA, 19 nt, Artificial Sequence
  Description of Artificial Sequence: Synthetic oligonucleotide
ucuaccugaaccccgaugg

SEQ ID NO: 246338 - RNA, 19 nt, Artificial Sequence
  Description of Artificial Sequence: Synthetic oligonucleotide
ucucagaugacuuacagcu

SEQ ID NO: 246339 - RNA, 19 nt, Artificial Sequence
  Description of Artificial Sequence: Synthetic oligonucleotide
agaagaaacccagagaccc

SEQ ID NO: 246340 - RNA, 19 nt, Artificial Sequence
  Description of Artificial Sequence: Synthetic oligonucleotide
aauaggaguauagaagugg

SEQ ID NO: 246341 - RNA, 19 nt, Artificial Sequence
  Description of Artificial Sequence: Synthetic oligonucleotide
uaaaucucgaugcuguccg

SEQ ID NO: 246342 - RNA, 19 nt, Artificial Sequence
  Description of Artificial Sequence: Synthetic oligonucleotide
agaugaacggcuuugaugu

SEQ ID NO: 246343 - RNA, 19 nt, Artificial Sequence
  Description of Artificial Sequence: Synthetic oligonucleotide
augcccuugagucauaccc

SEQ ID NO: 246344 - RNA, 19 nt, Artificial Sequence
  Description of Artificial Sequence: Synthetic oligonucleotide
augacuuacagcuggaguc

SEQ ID NO: 246345 - RNA, 19 nt, Artificial Sequence
  Description of Artificial Sequence: Synthetic oligonucleotide
ugauuuaaaauugagugcu

SEQ ID NO: 246346 - RNA, 19 nt, Artificial Sequence
  Description of Artificial Sequence: Synthetic oligonucleotide
ugauguaguacguggaggg

SEQ ID NO: 246347 - RNA, 19 nt, Artificial Sequence
  Description of Artificial Sequence: Synthetic oligonucleotide
ucuuauaugccacuaggca

SEQ ID NO: 246348 - RNA, 19 nt, Artificial Sequence
  Description of Artificial Sequence: Synthetic oligonucleotide
acggcuuugauguaguacg

SEQ ID NO: 246349 - RNA, 19 nt, Artificial Sequence
  Description of Artificial Sequence: Synthetic oligonucleotide
aggaccaucacuuugugug

SEQ ID NO: 246350 - RNA, 19 nt, Artificial Sequence
  Description of Artificial Sequence: Synthetic oligonucleotide
augaacauugcuucaagag

SEQ ID NO: 246351 - RNA, 19 nt, Artificial Sequence
  Description of Artificial Sequence: Synthetic oligonucleotide
uuauaugccacuaggcaug

SEQ ID NO: 246352 - RNA, 19 nt, Artificial Sequence
  Description of Artificial Sequence: Synthetic oligonucleotide
aaacaagcuaguccccagc

SEQ ID NO: 246353 - RNA, 19 nt, Artificial Sequence
  Description of Artificial Sequence: Synthetic oligonucleotide
aguugaggcacacagaggu

SEQ ID NO: 246354 - RNA, 19 nt, Artificial Sequence
  Description of Artificial Sequence: Synthetic oligonucleotide
uaugcuauucacacacccg

SEQ ID NO: 246355 - RNA, 19 nt, Artificial Sequence
  Description of Artificial Sequence: Synthetic oligonucleotide
aauaccuugggaauaggag

SEQ ID NO: 246356 - RNA, 19 nt, Artificial Sequence
  Description of Artificial Sequence: Synthetic oligonucleotide
uuugauguaguacguggag

SEQ ID NO: 246357 - RNA, 19 nt, Artificial Sequence
  Description of Artificial Sequence: Synthetic oligonucleotide
aauauacacucuaaggucu

SEQ ID NO: 246358 - RNA, 19 nt, Artificial Sequence
  Description of Artificial Sequence: Synthetic oligonucleotide
cucaguacugcucuggacg

SEQ ID NO: 246359 - RNA, 19 nt, Artificial Sequence
  Description of Artificial Sequence: Synthetic oligonucleotide
aaauugagugcuuucuccu

SEQ ID NO: 246360 - RNA, 19 nt, Artificial Sequence
  Description of Artificial Sequence: Synthetic oligonucleotide
uggacggugacugagauga

SEQ ID NO: 246361 - RNA, 19 nt, Artificial Sequence
  Description of Artificial Sequence: Synthetic oligonucleotide
uggagcacgguaaccaugg

SEQ ID NO: 246362 - RNA, 19 nt, Artificial Sequence
  Description of Artificial Sequence: Synthetic oligonucleotide
auaaaucucgaugcugucc

SEQ ID NO: 246363 - RNA, 19 nt, Artificial Sequence
  Description of Artificial Sequence: Synthetic oligonucleotide
agggacauaaaucucgaug

SEQ ID NO: 246364 - RNA, 19 nt, Artificial Sequence
  Description of Artificial Sequence: Synthetic oligonucleotide
cauacguacagacaccgcc

SEQ ID NO: 246365 - RNA, 19 nt, Artificial Sequence
  Description of Artificial Sequence: Synthetic oligonucleotide
uuugucgcggcucauugcc

SEQ ID NO: 246366 - RNA, 19 nt, Artificial Sequence
  Description of Artificial Sequence: Synthetic oligonucleotide
gggaaaaggggcuagauug

SEQ ID NO: 246367 - RNA, 19 nt, Artificial Sequence
  Description of Artificial Sequence: Synthetic oligonucleotide
aaggucuaugugcauaugu

SEQ ID NO: 246368 - RNA, 19 nt, Artificial Sequence
  Description of Artificial Sequence: Synthetic oligonucleotide
aaagccgugggauguuggg

SEQ ID NO: 246369 - RNA, 19 nt, Artificial Sequence
  Description of Artificial Sequence: Synthetic oligonucleotide
cauuuuacagaggaggaag

SEQ ID NO: 246370 - RNA, 19 nt, Artificial Sequence
  Description of Artificial Sequence: Synthetic oligonucleotide
gcguuuauuaaauauacac

SEQ ID NO: 246371 - RNA, 19 nt, Artificial Sequence
  Description of Artificial Sequence: Synthetic oligonucleotide
auaccuugggaauaggagu

SEQ ID NO: 246372 - RNA, 19 nt, Artificial Sequence
  Description of Artificial Sequence: Synthetic oligonucleotide
aaccaguagccaucucugc

SEQ ID NO: 246373 - RNA, 19 nt, Artificial Sequence
  Description of Artificial Sequence: Synthetic oligonucleotide
gaugaaaauuacaacagaa

SEQ ID NO: 246374 - RNA, 19 nt, Artificial Sequence
  Description of Artificial Sequence: Synthetic oligonucleotide
cucggaaugggacucagag

SEQ ID NO: 246375 - RNA, 19 nt, Artificial Sequence
  Description of Artificial Sequence: Synthetic oligonucleotide
aucacuuugugugugagca

SEQ ID NO: 246376 - RNA, 19 nt, Artificial Sequence
  Description of Artificial Sequence: Synthetic oligonucleotide
agcgaagacgccuccaggg

SEQ ID NO: 246377 - RNA, 19 nt, Artificial Sequence
  Description of Artificial Sequence: Synthetic oligonucleotide
uguaguacguggagggacc

SEQ ID NO: 246378 - RNA, 19 nt, Artificial Sequence
  Description of Artificial Sequence: Synthetic oligonucleotide
gauggaauuggggugcggg

SEQ ID NO: 246379 - RNA, 19 nt, Artificial Sequence
  Description of Artificial Sequence: Synthetic oligonucleotide
cuaggacuucuucagagag

SEQ ID NO: 246380 - RNA, 19 nt, Artificial Sequence
  Description of Artificial Sequence: Synthetic oligonucleotide
uaggaguauagaagugggg

SEQ ID NO: 246381 - RNA, 19 nt, Artificial Sequence
  Description of Artificial Sequence: Synthetic oligonucleotide
aaaucucgaugcuguccgc

SEQ ID NO: 246382 - RNA, 19 nt, Artificial Sequence
  Description of Artificial Sequence: Synthetic oligonucleotide
accaguagccaucucugcg

SEQ ID NO: 246383 - RNA, 19 nt, Artificial Sequence
  Description of Artificial Sequence: Synthetic oligonucleotide
uacacucuaaggucuaugu

SEQ ID NO: 246384 - RNA, 19 nt, Artificial Sequence
  Description of Artificial Sequence: Synthetic oligonucleotide
auaggaguauagaaguggg

SEQ ID NO: 246385 - RNA, 19 nt, Artificial Sequence
  Description of Artificial Sequence: Synthetic oligonucleotide
acugcuucgccagucgucc

SEQ ID NO: 246386 - RNA, 19 nt, Artificial Sequence
  Description of Artificial Sequence: Synthetic oligonucleotide
cacaccuagauauaguaca

SEQ ID NO: 246387 - RNA, 19 nt, Artificial Sequence
  Description of Artificial Sequence: Synthetic oligonucleotide
gcuuugauguaguacgugg

SEQ ID NO: 246388 - RNA, 19 nt, Artificial Sequence
  Description of Artificial Sequence: Synthetic oligonucleotide
uccuauugaugacaguuuc

SEQ ID NO: 246389 - RNA, 19 nt, Artificial Sequence
  Description of Artificial Sequence: Synthetic oligonucleotide
cacacgugcuccaaggacc

SEQ ID NO: 246390 - RNA, 19 nt, Artificial Sequence
  Description of Artificial Sequence: Synthetic oligonucleotide
uaaacaagcuaguccccag

SEQ ID NO: 246391 - RNA, 19 nt, Artificial Sequence
  Description of Artificial Sequence: Synthetic oligonucleotide
aacuuguauuccuauugau

SEQ ID NO: 246392 - RNA, 19 nt, Artificial Sequence
  Description of Artificial Sequence: Synthetic oligonucleotide
gucgcuguugucuccauag

SEQ ID NO: 246393 - RNA, 19 nt, Artificial Sequence
  Description of Artificial Sequence: Synthetic oligonucleotide
uuagagccuggucugggcc

SEQ ID NO: 246394 - RNA, 19 nt, Artificial Sequence
  Description of Artificial Sequence: Synthetic oligonucleotide
uuugguagcgggacugggc

SEQ ID NO: 246395 - RNA, 19 nt, Artificial Sequence
  Description of Artificial Sequence: Synthetic oligonucleotide
auuccuauugaugacaguu

SEQ ID NO: 246396 - RNA, 19 nt, Artificial Sequence
  Description of Artificial Sequence: Synthetic oligonucleotide
uacguggagggaccggugg

SEQ ID NO: 246397 - RNA, 19 nt, Artificial Sequence
  Description of Artificial Sequence: Synthetic oligonucleotide
ugguaugccaaaucaucug

SEQ ID NO: 246398 - RNA, 19 nt, Artificial Sequence
  Description of Artificial Sequence: Synthetic oligonucleotide
guaaccauggcuuccccac

SEQ ID NO: 246399 - RNA, 19 nt, Artificial Sequence
  Description of Artificial Sequence: Synthetic oligonucleotide
ugggcguuuauuaaauaua

SEQ ID NO: 246400 - RNA, 19 nt, Artificial Sequence
  Description of Artificial Sequence: Synthetic oligonucleotide
uuagcggggaggcugggga

SEQ ID NO: 246401 - RNA, 19 nt, Artificial Sequence
  Description of Artificial Sequence: Synthetic oligonucleotide
uugguagcgggacugggcu

SEQ ID NO: 246402 - RNA, 19 nt, Artificial Sequence
  Description of Artificial Sequence: Synthetic oligonucleotide
gaauuugguagcgggacug

SEQ ID NO: 246403 - RNA, 19 nt, Artificial Sequence
  Description of Artificial Sequence: Synthetic oligonucleotide
cacauacguacagacaccg

SEQ ID NO: 246404 - RNA, 19 nt, Artificial Sequence
  Description of Artificial Sequence: Synthetic oligonucleotide
ugggccuaggccuuugcag

SEQ ID NO: 246405 - RNA, 19 nt, Artificial Sequence
  Description of Artificial Sequence: Synthetic oligonucleotide
ucgucguccuguaaacaag

SEQ ID NO: 246406 - RNA, 19 nt, Artificial Sequence
  Description of Artificial Sequence: Synthetic oligonucleotide
augggcguuuauuaaauau

SEQ ID NO: 246407 - RNA, 19 nt, Artificial Sequence
  Description of Artificial Sequence: Synthetic oligonucleotide
ggagacuccucucagauga

SEQ ID NO: 246408 - RNA, 19 nt, Artificial Sequence
  Description of Artificial Sequence: Synthetic oligonucleotide
acggugacugagaugaacg

SEQ ID NO: 246409 - RNA, 19 nt, Artificial Sequence
  Description of Artificial Sequence: Synthetic oligonucleotide
agauugugguauuuaaauu

SEQ ID NO: 246410 - RNA, 19 nt, Artificial Sequence
  Description of Artificial Sequence: Synthetic oligonucleotide
acucaguacugcucuggac

SEQ ID NO: 246411 - RNA, 19 nt, Artificial Sequence
  Description of Artificial Sequence: Synthetic oligonucleotide
gaauaggaguauagaagug

SEQ ID NO: 246412 - RNA, 19 nt, Artificial Sequence
  Description of Artificial Sequence: Synthetic oligonucleotide
ugcuauucacacacccgcc

SEQ ID NO: 246413 - RNA, 19 nt, Artificial Sequence
  Description of Artificial Sequence: Synthetic oligonucleotide
gagguugcgcuugaucugg

SEQ ID NO: 246414 - RNA, 19 nt, Artificial Sequence
  Description of Artificial Sequence: Synthetic oligonucleotide
agagauugggaugaaaauu

SEQ ID NO: 246415 - RNA, 19 nt, Artificial Sequence
  Description of Artificial Sequence: Synthetic oligonucleotide
aacuucaugcugauguccu

SEQ ID NO: 246416 - RNA, 19 nt, Artificial Sequence
  Description of Artificial Sequence: Synthetic oligonucleotide
gaaccaguagccaucucug

SEQ ID NO: 246417 - RNA, 19 nt, Artificial Sequence
  Description of Artificial Sequence: Synthetic oligonucleotide
cuggguaucggagucagug

SEQ ID NO: 246418 - RNA, 19 nt, Artificial Sequence
  Description of Artificial Sequence: Synthetic oligonucleotide
ugucugaugaguugcucaa

SEQ ID NO: 246419 - RNA, 19 nt, Artificial Sequence
  Description of Artificial Sequence: Synthetic oligonucleotide
guauuccuauugaugacag

SEQ ID NO: 246420 - RNA, 19 nt, Artificial Sequence
  Description of Artificial Sequence: Synthetic oligonucleotide
aucucgaugcuguccgcac

SEQ ID NO: 246421 - RNA, 19 nt, Artificial Sequence
  Description of Artificial Sequence: Synthetic oligonucleotide
uuuguggccuuagagccug

SEQ ID NO: 246422 - RNA, 19 nt, Artificial Sequence
  Description of Artificial Sequence: Synthetic oligonucleotide
uugggaauaggaguauaga

SEQ ID NO: 246423 - RNA, 19 nt, Artificial Sequence
  Description of Artificial Sequence: Synthetic oligonucleotide
aaaagccgugggauguugg

SEQ ID NO: 246424 - RNA, 19 nt, Artificial Sequence
  Description of Artificial Sequence: Synthetic oligonucleotide
ugaacggcuuugauguagu

SEQ ID NO: 246425 - RNA, 19 nt, Artificial Sequence
  Description of Artificial Sequence: Synthetic oligonucleotide
agauugggaugaaaauuac

SEQ ID NO: 246426 - RNA, 19 nt, Artificial Sequence
  Description of Artificial Sequence: Synthetic oligonucleotide
cuccuuuguggccuuagag

SEQ ID NO: 246427 - RNA, 19 nt, Artificial Sequence
  Description of Artificial Sequence: Synthetic oligonucleotide
ugggacucagagcucguca

SEQ ID NO: 246428 - RNA, 19 nt, Artificial Sequence
  Description of Artificial Sequence: Synthetic oligonucleotide
aaaggguaugaaccagaaa

SEQ ID NO: 246429 - RNA, 19 nt, Artificial Sequence
  Description of Artificial Sequence: Synthetic oligonucleotide
acacaccuagauauaguac

SEQ ID NO: 246430 - RNA, 19 nt, Artificial Sequence
  Description of Artificial Sequence: Synthetic oligonucleotide
acacauacguacagacacc

SEQ ID NO: 246431 - RNA, 19 nt, Artificial Sequence
  Description of Artificial Sequence: Synthetic oligonucleotide
aaguuguuguuguccgcca

SEQ ID NO: 246432 - RNA, 19 nt, Artificial Sequence
  Description of Artificial Sequence: Synthetic oligonucleotide
ucuaaggucuaugugcaua

SEQ ID NO: 246433 - RNA, 19 nt, Artificial Sequence
  Description of Artificial Sequence: Synthetic oligonucleotide
uaccccaagagccgguggc

SEQ ID NO: 246434 - RNA, 19 nt, Artificial Sequence
  Description of Artificial Sequence: Synthetic oligonucleotide
ugacuuacagcuggaguca

SEQ ID NO: 246435 - RNA, 19 nt, Artificial Sequence
  Description of Artificial Sequence: Synthetic oligonucleotide
gacuggacaaaggugcggc

SEQ ID NO: 246436 - RNA, 19 nt, Artificial Sequence
  Description of Artificial Sequence: Synthetic oligonucleotide
gacgcugcucgcuuggcug

SEQ ID NO: 246437 - RNA, 19 nt, Artificial Sequence
  Description of Artificial Sequence: Synthetic oligonucleotide
ucggaaugggacucagagc

SEQ ID NO: 246438 - RNA, 19 nt, Artificial Sequence
  Description of Artificial Sequence: Synthetic oligonucleotide
agucauacccacaggaaca

SEQ ID NO: 246439 - RNA, 19 nt, Artificial Sequence
  Description of Artificial Sequence: Synthetic oligonucleotide
ugagcacuuagcggggagg

SEQ ID NO: 246440 - RNA, 19 nt, Artificial Sequence
  Description of Artificial Sequence: Synthetic oligonucleotide
ccacgugucacacugggcg

SEQ ID NO: 246441 - RNA, 19 nt, Artificial Sequence
  Description of Artificial Sequence: Synthetic oligonucleotide
augaacggcuuugauguag

SEQ ID NO: 246442 - RNA, 19 nt, Artificial Sequence
  Description of Artificial Sequence: Synthetic oligonucleotide
agacaacuccuuggaagcc

SEQ ID NO: 246443 - RNA, 19 nt, Artificial Sequence
  Description of Artificial Sequence: Synthetic oligonucleotide
ugcccuugagucauaccca

SEQ ID NO: 246444 - RNA, 19 nt, Artificial Sequence
  Description of Artificial Sequence: Synthetic oligonucleotide
agagguugcgcuugaucug

SEQ ID NO: 246445 - RNA, 19 nt, Artificial Sequence
  Description of Artificial Sequence: Synthetic oligonucleotide
agagguuguucucuuuggu

SEQ ID NO: 246446 - RNA, 19 nt, Artificial Sequence
  Description of Artificial Sequence: Synthetic oligonucleotide
cuuugauguaguacgugga

SEQ ID NO: 246447 - RNA, 19 nt, Artificial Sequence
  Description of Artificial Sequence: Synthetic oligonucleotide
agacaccgccaccuguccc

SEQ ID NO: 246448 - RNA, 19 nt, Artificial Sequence
  Description of Artificial Sequence: Synthetic oligonucleotide
gucagaagaaacccagaga

SEQ ID NO: 246449 - RNA, 19 nt, Artificial Sequence
  Description of Artificial Sequence: Synthetic oligonucleotide
cagaauaccuugggaauag

SEQ ID NO: 246450 - RNA, 19 nt, Artificial Sequence
  Description of Artificial Sequence: Synthetic oligonucleotide
cuuagagccuggucugggc

SEQ ID NO: 246451 - RNA, 19 nt, Artificial Sequence
  Description of Artificial Sequence: Synthetic oligonucleotide
aagccaugagggccgguug

SEQ ID NO: 246452 - RNA, 19 nt, Artificial Sequence
  Description of Artificial Sequence: Synthetic oligonucleotide
uacguacagacaccgccac

SEQ ID NO: 246453 - RNA, 19 nt, Artificial Sequence
  Description of Artificial Sequence: Synthetic oligonucleotide
uggcucgucacuucacucu

SEQ ID NO: 246454 - RNA, 19 nt, Artificial Sequence
  Description of Artificial Sequence: Synthetic oligonucleotide
acguacagacaccgccacc

SEQ ID NO: 246455 - RNA, 19 nt, Artificial Sequence
  Description of Artificial Sequence: Synthetic oligonucleotide
cuuauaugccacuaggcau

SEQ ID NO: 246456 - RNA, 19 nt, Artificial Sequence
  Description of Artificial Sequence: Synthetic oligonucleotide
caucacuuugugugugagc

SEQ ID NO: 246457 - RNA, 19 nt, Artificial Sequence
  Description of Artificial Sequence: Synthetic oligonucleotide
uggguuugguggacaaaca

SEQ ID NO: 246458 - RNA, 19 nt, Artificial Sequence
  Description of Artificial Sequence: Synthetic oligonucleotide
acucuaaggucuaugugca

SEQ ID NO: 246459 - RNA, 19 nt, Artificial Sequence
  Description of Artificial Sequence: Synthetic oligonucleotide
acacugggcggucggguac

SEQ ID NO: 246460 - RNA, 19 nt, Artificial Sequence
  Description of Artificial Sequence: Synthetic oligonucleotide
cuggccacgguggugaccc

SEQ ID NO: 246461 - RNA, 19 nt, Artificial Sequence
  Description of Artificial Sequence: Synthetic oligonucleotide
caucugcuggguccgaccc

SEQ ID NO: 246462 - RNA, 19 nt, Artificial Sequence
  Description of Artificial Sequence: Synthetic oligonucleotide
uugucgcggcucauugccg

SEQ ID NO: 246463 - RNA, 19 nt, Artificial Sequence
  Description of Artificial Sequence: Synthetic oligonucleotide
agucaacuuguauuccuau

SEQ ID NO: 246464 - RNA, 19 nt, Artificial Sequence
  Description of Artificial Sequence: Synthetic oligonucleotide
guagguguccugugcagac

SEQ ID NO: 246465 - RNA, 19 nt, Artificial Sequence
  Description of Artificial Sequence: Synthetic oligonucleotide
auuuuacagaggaggaagu

SEQ ID NO: 246466 - RNA, 19 nt, Artificial Sequence
  Description of Artificial Sequence: Synthetic oligonucleotide
caccacgugucacacuggg

SEQ ID NO: 246467 - RNA, 19 nt, Artificial Sequence
  Description of Artificial Sequence: Synthetic oligonucleotide
gaagacgccuccagggcag

SEQ ID NO: 246468 - RNA, 19 nt, Artificial Sequence
  Description of Artificial Sequence: Synthetic oligonucleotide
ugucgcggcucauugccgc

SEQ ID NO: 246469 - RNA, 19 nt, Artificial Sequence
  Description of Artificial Sequence: Synthetic oligonucleotide
cuuugucgcggcucauugc

SEQ ID NO: 246470 - RNA, 19 nt, Artificial Sequence
  Description of Artificial Sequence: Synthetic oligonucleotide
cacgugucacacugggcgg

SEQ ID NO: 246471 - RNA, 19 nt, Artificial Sequence
  Description of Artificial Sequence: Synthetic oligonucleotide
cagaaagcuacuggccacg

SEQ ID NO: 246472 - RNA, 19 nt, Artificial Sequence
  Description of Artificial Sequence: Synthetic oligonucleotide
ucggaaccggagguggugg

SEQ ID NO: 246473 - RNA, 19 nt, Artificial Sequence
  Description of Artificial Sequence: Synthetic oligonucleotide
ugucccuuguucacucuuc

SEQ ID NO: 246474 - RNA, 19 nt, Artificial Sequence
  Description of Artificial Sequence: Synthetic oligonucleotide
ugcagucaacuuguauucc

SEQ ID NO: 246475 - RNA, 19 nt, Artificial Sequence
  Description of Artificial Sequence: Synthetic oligonucleotide
uggguaucggagucagugu

SEQ ID NO: 246476 - RNA, 19 nt, Artificial Sequence
  Description of Artificial Sequence: Synthetic oligonucleotide
ggugcggccaaugacagac

SEQ ID NO: 246477 - RNA, 19 nt, Artificial Sequence
  Description of Artificial Sequence: Synthetic oligonucleotide
agcacgguaaccauggcuu

SEQ ID NO: 246478 - RNA, 19 nt, Artificial Sequence
  Description of Artificial Sequence: Synthetic oligonucleotide
gcucagaauaccuugggaa

SEQ ID NO: 246479 - RNA, 19 nt, Artificial Sequence
  Description of Artificial Sequence: Synthetic oligonucleotide
cuauucacacacccgccuc

SEQ ID NO: 246480 - RNA, 19 nt, Artificial Sequence
  Description of Artificial Sequence: Synthetic oligonucleotide
ccuauugaugacaguuucc

SEQ ID NO: 246481 - RNA, 19 nt, Artificial Sequence
  Description of Artificial Sequence: Synthetic oligonucleotide
cugccguggacugucgucg

SEQ ID NO: 246482 - RNA, 19 nt, Artificial Sequence
  Description of Artificial Sequence: Synthetic oligonucleotide
gucauacccacaggaacag

SEQ ID NO: 246483 - RNA, 19 nt, Artificial Sequence
  Description of Artificial Sequence: Synthetic oligonucleotide
cacuuagcggggaggcugg

SEQ ID NO: 246484 - RNA, 19 nt, Artificial Sequence
  Description of Artificial Sequence: Synthetic oligonucleotide
cugucgucguccuguaaac

SEQ ID NO: 246485 - RNA, 19 nt, Artificial Sequence
  Description of Artificial Sequence: Synthetic oligonucleotide
uccuguaaacaagcuaguc

SEQ ID NO: 246486 - RNA, 19 nt, Artificial Sequence
  Description of Artificial Sequence: Synthetic oligonucleotide
auggccucggaaugggacu

SEQ ID NO: 246487 - RNA, 19 nt, Artificial Sequence
  Description of Artificial Sequence: Synthetic oligonucleotide
acagcuggagucauuggca

SEQ ID NO: 246488 - RNA, 19 nt, Artificial Sequence
  Description of Artificial Sequence: Synthetic oligonucleotide
guaucggagucaguguccc

SEQ ID NO: 246489 - RNA, 19 nt, Artificial Sequence
  Description of Artificial Sequence: Synthetic oligonucleotide
gguacagucugggagacuc

SEQ ID NO: 246490 - RNA, 19 nt, Artificial Sequence
  Description of Artificial Sequence: Synthetic oligonucleotide
agaauaccuugggaauagg

SEQ ID NO: 246491 - RNA, 19 nt, Artificial Sequence
  Description of Artificial Sequence: Synthetic oligonucleotide
auacacucuaaggucuaug

SEQ ID NO: 246492 - RNA, 19 nt, Artificial Sequence
  Description of Artificial Sequence: Synthetic oligonucleotide
gaaaagccgugggauguug

SEQ ID NO: 246493 - RNA, 19 nt, Artificial Sequence
  Description of Artificial Sequence: Synthetic oligonucleotide
uaccugaaccccgauggac

SEQ ID NO: 246494 - RNA, 19 nt, Artificial Sequence
  Description of Artificial Sequence: Synthetic oligonucleotide
ccaagcuagaacaggcccc

SEQ ID NO: 246495 - RNA, 19 nt, Artificial Sequence
  Description of Artificial Sequence: Synthetic oligonucleotide
ugcuuacacacaaggcaua

SEQ ID NO: 246496 - RNA, 19 nt, Artificial Sequence
  Description of Artificial Sequence: Synthetic oligonucleotide
ugggcggucggguacugcu

SEQ ID NO: 246497 - RNA, 19 nt, Artificial Sequence
  Description of Artificial Sequence: Synthetic oligonucleotide
aggggcuagauugugguau

SEQ ID NO: 246498 - RNA, 19 nt, Artificial Sequence
  Description of Artificial Sequence: Synthetic oligonucleotide
aguacguggagggaccggu

SEQ ID NO: 246499 - RNA, 19 nt, Artificial Sequence
  Description of Artificial Sequence: Synthetic oligonucleotide
auacguacagacaccgcca

SEQ ID NO: 246500 - RNA, 19 nt, Artificial Sequence
  Description of Artificial Sequence: Synthetic oligonucleotide
gacggugacugagaugaac

SEQ ID NO: 246501 - RNA, 19 nt, Artificial Sequence
  Description of Artificial Sequence: Synthetic oligonucleotide
cugugcagacucaguacug

SEQ ID NO: 246502 - RNA, 19 nt, Artificial Sequence
  Description of Artificial Sequence: Synthetic oligonucleotide
uccgcacucucuguggcug

SEQ ID NO: 246503 - RNA, 19 nt, Artificial Sequence
  Description of Artificial Sequence: Synthetic oligonucleotide
ucauugccgccuuggauuu

SEQ ID NO: 246504 - RNA, 19 nt, Artificial Sequence
  Description of Artificial Sequence: Synthetic oligonucleotide
caucucugcggcaggcccc

SEQ ID NO: 246505 - RNA, 19 nt, Artificial Sequence
  Description of Artificial Sequence: Synthetic oligonucleotide
agccgugggauguugggaa

SEQ ID NO: 246506 - RNA, 19 nt, Artificial Sequence
  Description of Artificial Sequence: Synthetic oligonucleotide
caaaggguaugaaccagaa

SEQ ID NO: 246507 - RNA, 19 nt, Artificial Sequence
  Description of Artificial Sequence: Synthetic oligonucleotide
ggagagauugggaugaaaa

SEQ ID NO: 246508 - RNA, 19 nt, Artificial Sequence
  Description of Artificial Sequence: Synthetic oligonucleotide
cuggagcacgguaaccaug

SEQ ID NO: 246509 - RNA, 19 nt, Artificial Sequence
  Description of Artificial Sequence: Synthetic oligonucleotide
guaguacguggagggaccg

SEQ ID NO: 246510 - RNA, 19 nt, Artificial Sequence
  Description of Artificial Sequence: Synthetic oligonucleotide
acgugcuccaaggaccauc

SEQ ID NO: 246511 - RNA, 19 nt, Artificial Sequence
  Description of Artificial Sequence: Synthetic oligonucleotide
ggugacugagaugaacggc

SEQ ID NO: 246512 - RNA, 19 nt, Artificial Sequence
  Description of Artificial Sequence: Synthetic oligonucleotide
gggacucagagcucgucag

SEQ ID NO: 246513 - RNA, 19 nt, Artificial Sequence
  Description of Artificial Sequence: Synthetic oligonucleotide
cagagcucgucaguguccc

SEQ ID NO: 246514 - RNA, 19 nt, Artificial Sequence
  Description of Artificial Sequence: Synthetic oligonucleotide
gcugaguucugccgcacag

SEQ ID NO: 246515 - RNA, 19 nt, Artificial Sequence
  Description of Artificial Sequence: Synthetic oligonucleotide
ugucccgacgggaggacau

SEQ ID NO: 246516 - RNA, 19 nt, Artificial Sequence
  Description of Artificial Sequence: Synthetic oligonucleotide
gaccaucacuuugugugug

SEQ ID NO: 246517 - RNA, 19 nt, Artificial Sequence
  Description of Artificial Sequence: Synthetic oligonucleotide
uucuucggaaccggaggug

SEQ ID NO: 246518 - RNA, 19 nt, Artificial Sequence
  Description of Artificial Sequence: Synthetic oligonucleotide
cucgaugcuguccgcacuc

SEQ ID NO: 246519 - RNA, 19 nt, Artificial Sequence
  Description of Artificial Sequence: Synthetic oligonucleotide
cugguaugccaaaucaucu

SEQ ID NO: 246520 - RNA, 19 nt, Artificial Sequence
  Description of Artificial Sequence: Synthetic oligonucleotide
uucggaaccggagguggug

SEQ ID NO: 246521 - RNA, 19 nt, Artificial Sequence
  Description of Artificial Sequence: Synthetic oligonucleotide
guaccccaagagccggugg

SEQ ID NO: 246522 - RNA, 19 nt, Artificial Sequence
  Description of Artificial Sequence: Synthetic oligonucleotide
uaaggucuaugugcauaug

SEQ ID NO: 246523 - RNA, 19 nt, Artificial Sequence
  Description of Artificial Sequence: Synthetic oligonucleotide
aagccgugggauguuggga

SEQ ID NO: 246524 - RNA, 19 nt, Artificial Sequence
  Description of Artificial Sequence: Synthetic oligonucleotide
cagaugggcguuuauuaaa

SEQ ID NO: 246525 - RNA, 19 nt, Artificial Sequence
  Description of Artificial Sequence: Synthetic oligonucleotide
uucgccagucguccucuac

SEQ ID NO: 246526 - RNA, 19 nt, Artificial Sequence
  Description of Artificial Sequence: Synthetic oligonucleotide
agcucgucagugucccuug

SEQ ID NO: 246527 - RNA, 19 nt, Artificial Sequence
  Description of Artificial Sequence: Synthetic oligonucleotide
gugagcacuuagcggggag

SEQ ID NO: 246528 - RNA, 19 nt, Artificial Sequence
  Description of Artificial Sequence: Synthetic oligonucleotide
ugauggaauuggggugcgg

SEQ ID NO: 246529 - RNA, 19 nt, Artificial Sequence
  Description of Artificial Sequence: Synthetic oligonucleotide
gugacugagaugaacggcu

SEQ ID NO: 246530 - RNA, 19 nt, Artificial Sequence
  Description of Artificial Sequence: Synthetic oligonucleotide
cacgcgccagacaaaagga

SEQ ID NO: 246531 - RNA, 19 nt, Artificial Sequence
  Description of Artificial Sequence: Synthetic oligonucleotide
gcuuugucgcggcucauug

SEQ ID NO: 246532 - RNA, 19 nt, Artificial Sequence
  Description of Artificial Sequence: Synthetic oligonucleotide
ugucgucguccuguaaaca

SEQ ID NO: 246533 - RNA, 19 nt, Artificial Sequence
  Description of Artificial Sequence: Synthetic oligonucleotide
ugugggccuaggccuuugc

SEQ ID NO: 246534 - RNA, 19 nt, Artificial Sequence
  Description of Artificial Sequence: Synthetic oligonucleotide
accugaaccccgauggacu

SEQ ID NO: 246535 - RNA, 19 nt, Artificial Sequence
  Description of Artificial Sequence: Synthetic oligonucleotide
ugaggcuuugucgcggcuc

SEQ ID NO: 246536 - RNA, 19 nt, Artificial Sequence
  Description of Artificial Sequence: Synthetic oligonucleotide
uaguacguggagggaccgg

SEQ ID NO: 246537 - RNA, 19 nt, Artificial Sequence
  Description of Artificial Sequence: Synthetic oligonucleotide
accacgugucacacugggc

SEQ ID NO: 246538 - RNA, 19 nt, Artificial Sequence
  Description of Artificial Sequence: Synthetic oligonucleotide
ugcuucgccagucguccuc

SEQ ID NO: 246539 - RNA, 19 nt, Artificial Sequence
  Description of Artificial Sequence: Synthetic oligonucleotide
caccuagauauaguacaug

SEQ ID NO: 246540 - RNA, 19 nt, Artificial Sequence
  Description of Artificial Sequence: Synthetic oligonucleotide
gacugcaaucuggaggcca

SEQ ID NO: 246541 - RNA, 19 nt, Artificial Sequence
  Description of Artificial Sequence: Synthetic oligonucleotide
cuggcucgucacuucacuc

SEQ ID NO: 246542 - RNA, 19 nt, Artificial Sequence
  Description of Artificial Sequence: Synthetic oligonucleotide
gggcucagaauaccuuggg

SEQ ID NO: 246543 - RNA, 19 nt, Artificial Sequence
  Description of Artificial Sequence: Synthetic oligonucleotide
ccacuaggcaugaugaaca

SEQ ID NO: 246544 - RNA, 19 nt, Artificial Sequence
  Description of Artificial Sequence: Synthetic oligonucleotide
gaaugcagucaacuuguau

SEQ ID NO: 246545 - RNA, 19 nt, Artificial Sequence
  Description of Artificial Sequence: Synthetic oligonucleotide
ggguaucggagucaguguc

SEQ ID NO: 246546 - RNA, 19 nt, Artificial Sequence
  Description of Artificial Sequence: Synthetic oligonucleotide
acaccuagauauaguacau

SEQ ID NO: 246547 - RNA, 19 nt, Artificial Sequence
  Description of Artificial Sequence: Synthetic oligonucleotide
cuaaggucuaugugcauau

SEQ ID NO: 246548 - RNA, 19 nt, Artificial Sequence
  Description of Artificial Sequence: Synthetic oligonucleotide
gguaucggagucagugucc

SEQ ID NO: 246549 - RNA, 19 nt, Artificial Sequence
  Description of Artificial Sequence: Synthetic oligonucleotide
cacugcuucgccagucguc

SEQ ID NO: 246550 - RNA, 19 nt, Artificial Sequence
  Description of Artificial Sequence: Synthetic oligonucleotide
gagcacgguaaccauggcu

SEQ ID NO: 246551 - RNA, 19 nt, Artificial Sequence
  Description of Artificial Sequence: Synthetic oligonucleotide
cagguaccccaagagccgg

SEQ ID NO: 246552 - RNA, 19 nt, Artificial Sequence
  Description of Artificial Sequence: Synthetic oligonucleotide
cagacaccgccaccugucc

SEQ ID NO: 246553 - RNA, 19 nt, Artificial Sequence
  Description of Artificial Sequence: Synthetic oligonucleotide
agacgcugcucgcuuggcu

SEQ ID NO: 246554 - RNA, 19 nt, Artificial Sequence
  Description of Artificial Sequence: Synthetic oligonucleotide
ccgauggacuggaauuugg

SEQ ID NO: 246555 - RNA, 19 nt, Artificial Sequence
  Description of Artificial Sequence: Synthetic oligonucleotide
gcagcgaagacgccuccag

SEQ ID NO: 246556 - RNA, 19 nt, Artificial Sequence
  Description of Artificial Sequence: Synthetic oligonucleotide
cuuagcggggaggcugggg

SEQ ID NO: 246557 - RNA, 19 nt, Artificial Sequence
  Description of Artificial Sequence: Synthetic oligonucleotide
cugauggaauuggggugcg

SEQ ID NO: 246558 - RNA, 19 nt, Artificial Sequence
  Description of Artificial Sequence: Synthetic oligonucleotide
ggucaagugacuugcccaa

SEQ ID NO: 246559 - RNA, 19 nt, Artificial Sequence
  Description of Artificial Sequence: Synthetic oligonucleotide
agugucccgacgggaggac

SEQ ID NO: 246560 - RNA, 19 nt, Artificial Sequence
  Description of Artificial Sequence: Synthetic oligonucleotide
ccagaaagcuacuggccac

SEQ ID NO: 246561 - RNA, 19 nt, Artificial Sequence
  Description of Artificial Sequence: Synthetic oligonucleotide
ugcgggguacagucuggga

SEQ ID NO: 246562 - RNA, 19 nt, Artificial Sequence
  Description of Artificial Sequence: Synthetic oligonucleotide
cuggacggugacugagaug

SEQ ID NO: 246563 - RNA, 19 nt, Artificial Sequence
  Description of Artificial Sequence: Synthetic oligonucleotide
gguuugguggacaaacaaa

SEQ ID NO: 246564 - RNA, 19 nt, Artificial Sequence
  Description of Artificial Sequence: Synthetic oligonucleotide
gucggguacugcuguccag

SEQ ID NO: 246565 - RNA, 19 nt, Artificial Sequence
  Description of Artificial Sequence: Synthetic oligonucleotide
ugccgccuuggauuuggcu

SEQ ID NO: 246566 - RNA, 19 nt, Artificial Sequence
  Description of Artificial Sequence: Synthetic oligonucleotide
gggcggccaagcuagaaca

SEQ ID NO: 246567 - RNA, 19 nt, Artificial Sequence
  Description of Artificial Sequence: Synthetic oligonucleotide
ggguuugguggacaaacaa

SEQ ID NO: 246568 - RNA, 19 nt, Artificial Sequence
  Description of Artificial Sequence: Synthetic oligonucleotide
ucccgacgggaggacaugc

SEQ ID NO: 246569 - RNA, 19 nt, Artificial Sequence
  Description of Artificial Sequence: Synthetic oligonucleotide
cugaaccccgauggacugg

SEQ ID NO: 246570 - RNA, 19 nt, Artificial Sequence
  Description of Artificial Sequence: Synthetic oligonucleotide
ugcucuggacggugacuga

SEQ ID NO: 246571 - RNA, 19 nt, Artificial Sequence
  Description of Artificial Sequence: Synthetic oligonucleotide
gggacuggacaaaggugcg

SEQ ID NO: 246572 - RNA, 19 nt, Artificial Sequence
  Description of Artificial Sequence: Synthetic oligonucleotide
auauacacucuaaggucua

SEQ ID NO: 246573 - RNA, 19 nt, Artificial Sequence
  Description of Artificial Sequence: Synthetic oligonucleotide
cagucaacuuguauuccua

SEQ ID NO: 246574 - RNA, 19 nt, Artificial Sequence
  Description of Artificial Sequence: Synthetic oligonucleotide
ggcucagaauaccuuggga

SEQ ID NO: 246575 - RNA, 19 nt, Artificial Sequence
  Description of Artificial Sequence: Synthetic oligonucleotide
acacgugcuccaaggacca

SEQ ID NO: 246576 - RNA, 19 nt, Artificial Sequence
  Description of Artificial Sequence: Synthetic oligonucleotide
gguaugaaccagaaagcua

SEQ ID NO: 246577 - RNA, 19 nt, Artificial Sequence
  Description of Artificial Sequence: Synthetic oligonucleotide
cgucguccuguaaacaagc

SEQ ID NO: 246578 - RNA, 19 nt, Artificial Sequence
  Description of Artificial Sequence: Synthetic oligonucleotide
uccgccauggcagcccaaa

SEQ ID NO: 246579 - RNA, 19 nt, Artificial Sequence
  Description of Artificial Sequence: Synthetic oligonucleotide
gcgaagacgccuccagggc

SEQ ID NO: 246580 - RNA, 19 nt, Artificial Sequence
  Description of Artificial Sequence: Synthetic oligonucleotide
cucugcggcaggccccagg

SEQ ID NO: 246581 - RNA, 19 nt, Artificial Sequence
  Description of Artificial Sequence: Synthetic oligonucleotide
cuuguccccugcgucugag

SEQ ID NO: 246582 - RNA, 19 nt, Artificial Sequence
  Description of Artificial Sequence: Synthetic oligonucleotide
cuaggccuuugcagcucag

SEQ ID NO: 246583 - RNA, 19 nt, Artificial Sequence
  Description of Artificial Sequence: Synthetic oligonucleotide
gugcgggguacagucuggg

SEQ ID NO: 246584 - RNA, 19 nt, Artificial Sequence
  Description of Artificial Sequence: Synthetic oligonucleotide
gaugaacggcuuugaugua

SEQ ID NO: 246585 - RNA, 19 nt, Artificial Sequence
  Description of Artificial Sequence: Synthetic oligonucleotide
ggcuuugauguaguacgug

SEQ ID NO: 246586 - RNA, 19 nt, Artificial Sequence
  Description of Artificial Sequence: Synthetic oligonucleotide
gggugcgggguacagucug

SEQ ID NO: 246587 - RNA, 19 nt, Artificial Sequence
  Description of Artificial Sequence: Synthetic oligonucleotide
cuggcagcaccagccuucc

SEQ ID NO: 246588 - RNA, 19 nt, Artificial Sequence
  Description of Artificial Sequence: Synthetic oligonucleotide
ccaaaggguaugaaccaga

SEQ ID NO: 246589 - RNA, 19 nt, Artificial Sequence
  Description of Artificial Sequence: Synthetic oligonucleotide
ggcguuuauuaaauauaca

SEQ ID NO: 246590 - RNA, 19 nt, Artificial Sequence
  Description of Artificial Sequence: Synthetic oligonucleotide
uggccucggaaugggacuc

SEQ ID NO: 246591 - RNA, 19 nt, Artificial Sequence
  Description of Artificial Sequence: Synthetic oligonucleotide
gguugcgcuugaucugggc

SEQ ID NO: 246592 - RNA, 19 nt, Artificial Sequence
  Description of Artificial Sequence: Synthetic oligonucleotide
ccacacgugcuccaaggac

SEQ ID NO: 246593 - RNA, 19 nt, Artificial Sequence
  Description of Artificial Sequence: Synthetic oligonucleotide
gcccuugagucauacccac

SEQ ID NO: 246594 - RNA, 19 nt, Artificial Sequence
  Description of Artificial Sequence: Synthetic oligonucleotide
ccagucguccucuaccuga

SEQ ID NO: 246595 - RNA, 19 nt, Artificial Sequence
  Description of Artificial Sequence: Synthetic oligonucleotide
ggccuugcuucaccugggg

SEQ ID NO: 246596 - RNA, 19 nt, Artificial Sequence
  Description of Artificial Sequence: Synthetic oligonucleotide
cacacacccgccuccugca

SEQ ID NO: 246597 - RNA, 19 nt, Artificial Sequence
  Description of Artificial Sequence: Synthetic oligonucleotide
gucaacuuguauuccuauu

SEQ ID NO: 246598 - RNA, 19 nt, Artificial Sequence
  Description of Artificial Sequence: Synthetic oligonucleotide
gggagacuccucucagaug

SEQ ID NO: 246599 - RNA, 19 nt, Artificial Sequence
  Description of Artificial Sequence: Synthetic oligonucleotide
cggugacugagaugaacgg

SEQ ID NO: 246600 - RNA, 19 nt, Artificial Sequence
  Description of Artificial Sequence: Synthetic oligonucleotide
ggggcggccaagcuagaac

SEQ ID NO: 246601 - RNA, 19 nt, Artificial Sequence
  Description of Artificial Sequence: Synthetic oligonucleotide
ggguaugaaccagaaagcu

SEQ ID NO: 246602 - RNA, 19 nt, Artificial Sequence
  Description of Artificial Sequence: Synthetic oligonucleotide
gcagucaacuuguauuccu

SEQ ID NO: 246603 - RNA, 19 nt, Artificial Sequence
  Description of Artificial Sequence: Synthetic oligonucleotide
acgugucacacugggcggu

SEQ ID NO: 246604 - RNA, 19 nt, Artificial Sequence
  Description of Artificial Sequence: Synthetic oligonucleotide
cuaccugaaccccgaugga

SEQ ID NO: 246605 - RNA, 19 nt, Artificial Sequence
  Description of Artificial Sequence: Synthetic oligonucleotide
gucgcggcucauugccgcc

SEQ ID NO: 246606 - RNA, 19 nt, Artificial Sequence
  Description of Artificial Sequence: Synthetic oligonucleotide
gugggccuaggccuuugca

SEQ ID NO: 246607 - RNA, 19 nt, Artificial Sequence
  Description of Artificial Sequence: Synthetic oligonucleotide
gacuggcucgucacuucac

SEQ ID NO: 246608 - RNA, 19 nt, Artificial Sequence
  Description of Artificial Sequence: Synthetic oligonucleotide
cgcgccagacaaaaggaug

SEQ ID NO: 246609 - RNA, 19 nt, Artificial Sequence
  Description of Artificial Sequence: Synthetic oligonucleotide
cugcucgcuuggcugccag

SEQ ID NO: 246610 - RNA, 19 nt, Artificial Sequence
  Description of Artificial Sequence: Synthetic oligonucleotide
gagacuccucucagaugac

SEQ ID NO: 246611 - RNA, 19 nt, Artificial Sequence
  Description of Artificial Sequence: Synthetic oligonucleotide
cuuuguggccuuagagccu

SEQ ID NO: 246612 - RNA, 19 nt, Artificial Sequence
  Description of Artificial Sequence: Synthetic oligonucleotide
gaacggcuuugauguagua

SEQ ID NO: 246613 - RNA, 19 nt, Artificial Sequence
  Description of Artificial Sequence: Synthetic oligonucleotide
ccuaggacuucuucagaga

SEQ ID NO: 246614 - RNA, 19 nt, Artificial Sequence
  Description of Artificial Sequence: Synthetic oligonucleotide
acuuagcggggaggcuggg

SEQ ID NO: 246615 - RNA, 19 nt, Artificial Sequence
  Description of Artificial Sequence: Synthetic oligonucleotide
gcuauucacacacccgccu

SEQ ID NO: 246616 - RNA, 19 nt, Artificial Sequence
  Description of Artificial Sequence: Synthetic oligonucleotide
aucucugcggcaggcccca

SEQ ID NO: 246617 - RNA, 19 nt, Artificial Sequence
  Description of Artificial Sequence: Synthetic oligonucleotide
caagcuagaacaggccccu

SEQ ID NO: 246618 - RNA, 19 nt, Artificial Sequence
  Description of Artificial Sequence: Synthetic oligonucleotide
cgggaggacaugcugugag

SEQ ID NO: 246619 - RNA, 19 nt, Artificial Sequence
  Description of Artificial Sequence: Synthetic oligonucleotide
ccaucacuuugugugugag

SEQ ID NO: 246620 - RNA, 19 nt, Artificial Sequence
  Description of Artificial Sequence: Synthetic oligonucleotide
accccaagagccgguggca

SEQ ID NO: 246621 - RNA, 19 nt, Artificial Sequence
  Description of Artificial Sequence: Synthetic oligonucleotide
ggucggguacugcugucca

SEQ ID NO: 246622 - RNA, 19 nt, Artificial Sequence
  Description of Artificial Sequence: Synthetic oligonucleotide
agguugcgcuugaucuggg

SEQ ID NO: 246623 - RNA, 19 nt, Artificial Sequence
  Description of Artificial Sequence: Synthetic oligonucleotide
gacuccucucagaugacuu

SEQ ID NO: 246624 - RNA, 19 nt, Artificial Sequence
  Description of Artificial Sequence: Synthetic oligonucleotide
guggacugucgucguccug

SEQ ID NO: 246625 - RNA, 19 nt, Artificial Sequence
  Description of Artificial Sequence: Synthetic oligonucleotide
cuuccccacacgugcucca

SEQ ID NO: 246626 - RNA, 19 nt, Artificial Sequence
  Description of Artificial Sequence: Synthetic oligonucleotide
gguucaaguucugcucaca

SEQ ID NO: 246627 - RNA, 19 nt, Artificial Sequence
  Description of Artificial Sequence: Synthetic oligonucleotide
ggccuugaggugguagagc

SEQ ID NO: 246628 - RNA, 19 nt, Artificial Sequence
  Description of Artificial Sequence: Synthetic oligonucleotide
ccgacgggaggacaugcug

SEQ ID NO: 246629 - RNA, 19 nt, Artificial Sequence
  Description of Artificial Sequence: Synthetic oligonucleotide
ccguggacugucgucgucc

SEQ ID NO: 246630 - RNA, 19 nt, Artificial Sequence
  Description of Artificial Sequence: Synthetic oligonucleotide
acgcgccagacaaaaggau

SEQ ID NO: 246631 - RNA, 19 nt, Artificial Sequence
  Description of Artificial Sequence: Synthetic oligonucleotide
gggcugauuccaccacgug

SEQ ID NO: 246632 - RNA, 19 nt, Artificial Sequence
  Description of Artificial Sequence: Synthetic oligonucleotide
ggagcacgguaaccauggc

SEQ ID NO: 246633 - RNA, 19 nt, Artificial Sequence
  Description of Artificial Sequence: Synthetic oligonucleotide
accggugguggggucuucu

SEQ ID NO: 246634 - RNA, 19 nt, Artificial Sequence
  Description of Artificial Sequence: Synthetic oligonucleotide
ucgcggcucauugccgccu

SEQ ID NO: 246635 - RNA, 19 nt, Artificial Sequence
  Description of Artificial Sequence: Synthetic oligonucleotide
ggaccaucacuuugugugu

SEQ ID NO: 246636 - RNA, 19 nt, Artificial Sequence
  Description of Artificial Sequence: Synthetic oligonucleotide
uggauuuggcuggcuucuu

SEQ ID NO: 246637 - RNA, 19 nt, Artificial Sequence
  Description of Artificial Sequence: Synthetic oligonucleotide
cacacugggcggucgggua

SEQ ID NO: 246638 - RNA, 19 nt, Artificial Sequence
  Description of Artificial Sequence: Synthetic oligonucleotide
cagcacgcgccagacaaaa

SEQ ID NO: 246639 - RNA, 19 nt, Artificial Sequence
  Description of Artificial Sequence: Synthetic oligonucleotide
gggguacagucugggagac

SEQ ID NO: 246640 - RNA, 19 nt, Artificial Sequence
  Description of Artificial Sequence: Synthetic oligonucleotide
cacuaggcaugaugaacau

SEQ ID NO: 246641 - RNA, 19 nt, Artificial Sequence
  Description of Artificial Sequence: Synthetic oligonucleotide
agccccugguaugccaaau

SEQ ID NO: 246642 - RNA, 19 nt, Artificial Sequence
  Description of Artificial Sequence: Synthetic oligonucleotide
cccaaagggaaaaggggcu

SEQ ID NO: 246643 - RNA, 19 nt, Artificial Sequence
  Description of Artificial Sequence: Synthetic oligonucleotide
cauuggcauccuggguauc

SEQ ID NO: 246644 - RNA, 19 nt, Artificial Sequence
  Description of Artificial Sequence: Synthetic oligonucleotide
gucccgacgggaggacaug

SEQ ID NO: 246645 - RNA, 19 nt, Artificial Sequence
  Description of Artificial Sequence: Synthetic oligonucleotide
gucguccuguaaacaagcu

SEQ ID NO: 246646 - RNA, 19 nt, Artificial Sequence
  Description of Artificial Sequence: Synthetic oligonucleotide
gugaccccugugugagcuc

SEQ ID NO: 246647 - RNA, 19 nt, Artificial Sequence
  Description of Artificial Sequence: Synthetic oligonucleotide
ggcugaaugcagucaacuu

SEQ ID NO: 246648 - RNA, 19 nt, Artificial Sequence
  Description of Artificial Sequence: Synthetic oligonucleotide
cauugccgccuuggauuug

SEQ ID NO: 246649 - RNA, 19 nt, Artificial Sequence
  Description of Artificial Sequence: Synthetic oligonucleotide
gcgccagacaaaaggaugu

SEQ ID NO: 246650 - RNA, 19 nt, Artificial Sequence
  Description of Artificial Sequence: Synthetic oligonucleotide
cuucggaaccggagguggu

SEQ ID NO: 246651 - RNA, 19 nt, Artificial Sequence
  Description of Artificial Sequence: Synthetic oligonucleotide
gacuuacagcuggagucau

SEQ ID NO: 246652 - RNA, 19 nt, Artificial Sequence
  Description of Artificial Sequence: Synthetic oligonucleotide
caagccugacuggcucguc

SEQ ID NO: 246653 - RNA, 19 nt, Artificial Sequence
  Description of Artificial Sequence: Synthetic oligonucleotide
cugggcggucggguacugc

SEQ ID NO: 246654 - RNA, 19 nt, Artificial Sequence
  Description of Artificial Sequence: Synthetic oligonucleotide
ggccaaugacagacaacuc

SEQ ID NO: 246655 - RNA, 19 nt, Artificial Sequence
  Description of Artificial Sequence: Synthetic oligonucleotide
cggccaaugacagacaacu

SEQ ID NO: 246656 - RNA, 19 nt, Artificial Sequence
  Description of Artificial Sequence: Synthetic oligonucleotide
cugugggccuaggccuuug

SEQ ID NO: 246657 - RNA, 19 nt, Artificial Sequence
  Description of Artificial Sequence: Synthetic oligonucleotide
acugggcggucggguacug

SEQ ID NO: 246658 - RNA, 19 nt, Artificial Sequence
  Description of Artificial Sequence: Synthetic oligonucleotide
aggggcggccaagcuagaa

SEQ ID NO: 246659 - RNA, 19 nt, Artificial Sequence
  Description of Artificial Sequence: Synthetic oligonucleotide
aggcugccguggacugucg

SEQ ID NO: 246660 - RNA, 19 nt, Artificial Sequence
  Description of Artificial Sequence: Synthetic oligonucleotide
gagggaccggugguggggu

SEQ ID NO: 246661 - RNA, 19 nt, Artificial Sequence
  Description of Artificial Sequence: Synthetic oligonucleotide
gccucggaaugggacucag

SEQ ID NO: 246662 - RNA, 19 nt, Artificial Sequence
  Description of Artificial Sequence: Synthetic oligonucleotide
cgaagacgccuccagggca

SEQ ID NO: 246663 - RNA, 19 nt, Artificial Sequence
  Description of Artificial Sequence: Synthetic oligonucleotide
gcucgucacuucacucuug

SEQ ID NO: 246664 - RNA, 19 nt, Artificial Sequence
  Description of Artificial Sequence: Synthetic oligonucleotide
gggcagcgaagacgccucc

SEQ ID NO: 246665 - RNA, 19 nt, Artificial Sequence
  Description of Artificial Sequence: Synthetic oligonucleotide
guccgcacucucuguggcu

SEQ ID NO: 246666 - RNA, 19 nt, Artificial Sequence
  Description of Artificial Sequence: Synthetic oligonucleotide
gugucccgacgggaggaca

SEQ ID NO: 246667 - RNA, 19 nt, Artificial Sequence
  Description of Artificial Sequence: Synthetic oligonucleotide
gcggccaaugacagacaac

SEQ ID NO: 246668 - RNA, 19 nt, Artificial Sequence
  Description of Artificial Sequence: Synthetic oligonucleotide
cuuacacacaaggcauauu

SEQ ID NO: 246669 - RNA, 19 nt, Artificial Sequence
  Description of Artificial Sequence: Synthetic oligonucleotide
cggagucagugucccgacg

SEQ ID NO: 246670 - RNA, 19 nt, Artificial Sequence
  Description of Artificial Sequence: Synthetic oligonucleotide
cagggacauaaaucucgau

SEQ ID NO: 246671 - RNA, 19 nt, Artificial Sequence
  Description of Artificial Sequence: Synthetic oligonucleotide
ucucugcggcaggccccag

SEQ ID NO: 246672 - RNA, 19 nt, Artificial Sequence
  Description of Artificial Sequence: Synthetic oligonucleotide
ggccuaggccuuugcagcu

SEQ ID NO: 246673 - RNA, 19 nt, Artificial Sequence
  Description of Artificial Sequence: Synthetic oligonucleotide
ggcggucggguacugcugu

SEQ ID NO: 246674 - RNA, 19 nt, Artificial Sequence
  Description of Artificial Sequence: Synthetic oligonucleotide
ggucgcuguugucuccaua

SEQ ID NO: 246675 - RNA, 19 nt, Artificial Sequence
  Description of Artificial Sequence: Synthetic oligonucleotide
ggcagcgaagacgccucca

SEQ ID NO: 246676 - RNA, 19 nt, Artificial Sequence
  Description of Artificial Sequence: Synthetic oligonucleotide
gugcggccaaugacagaca

SEQ ID NO: 246677 - RNA, 19 nt, Artificial Sequence
  Description of Artificial Sequence: Synthetic oligonucleotide
ggcucgucacuucacucuu

SEQ ID NO: 246678 - RNA, 19 nt, Artificial Sequence
  Description of Artificial Sequence: Synthetic oligonucleotide
gggcggucggguacugcug

SEQ ID NO: 246679 - RNA, 19 nt, Artificial Sequence
  Description of Artificial Sequence: Synthetic oligonucleotide
cccuugagucauacccaca

SEQ ID NO: 246680 - RNA, 19 nt, Artificial Sequence
  Description of Artificial Sequence: Synthetic oligonucleotide
cucgucagugucccuuguu

SEQ ID NO: 246681 - RNA, 19 nt, Artificial Sequence
  Description of Artificial Sequence: Synthetic oligonucleotide
cgauggacuggaauuuggu

SEQ ID NO: 246682 - RNA, 19 nt, Artificial Sequence
  Description of Artificial Sequence: Synthetic oligonucleotide
ggggcuagauugugguauu

SEQ ID NO: 246683 - RNA, 19 nt, Artificial Sequence
  Description of Artificial Sequence: Synthetic oligonucleotide
caggagagauugggaugaa

SEQ ID NO: 246684 - RNA, 19 nt, Artificial Sequence
  Description of Artificial Sequence: Synthetic oligonucleotide
gcggcucauugccgccuug

SEQ ID NO: 246685 - RNA, 19 nt, Artificial Sequence
  Description of Artificial Sequence: Synthetic oligonucleotide
gccguggacugucgucguc

SEQ ID NO: 246686 - RNA, 19 nt, Artificial Sequence
  Description of Artificial Sequence: Synthetic oligonucleotide
aggcuuugucgcggcucau

SEQ ID NO: 246687 - RNA, 19 nt, Artificial Sequence
  Description of Artificial Sequence: Synthetic oligonucleotide
cuucgccagucguccucua

SEQ ID NO: 246688 - RNA, 19 nt, Artificial Sequence
  Description of Artificial Sequence: Synthetic oligonucleotide
gaccggugguggggucuuc

SEQ ID NO: 246689 - RNA, 19 nt, Artificial Sequence
  Description of Artificial Sequence: Synthetic oligonucleotide
cugcuucgccagucguccu

SEQ ID NO: 246690 - RNA, 19 nt, Artificial Sequence
  Description of Artificial Sequence: Synthetic oligonucleotide
caguacugcucuggacggu

SEQ ID NO: 246691 - RNA, 19 nt, Artificial Sequence
  Description of Artificial Sequence: Synthetic oligonucleotide
cacugggcggucggguacu

SEQ ID NO: 246692 - RNA, 19 nt, Artificial Sequence
  Description of Artificial Sequence: Synthetic oligonucleotide
ggccucggaaugggacuca

SEQ ID NO: 246693 - RNA, 19 nt, Artificial Sequence
  Description of Artificial Sequence: Synthetic oligonucleotide
guucugccgcacagacgcu

SEQ ID NO: 246694 - RNA, 19 nt, Artificial Sequence
  Description of Artificial Sequence: Synthetic oligonucleotide
gcucgucagugucccuugu

SEQ ID NO: 246695 - RNA, 19 nt, Artificial Sequence
  Description of Artificial Sequence: Synthetic oligonucleotide
gggaccggugguggggucu

SEQ ID NO: 246696 - RNA, 19 nt, Artificial Sequence
  Description of Artificial Sequence: Synthetic oligonucleotide
gcagcacgcgccagacaaa

SEQ ID NO: 246697 - RNA, 19 nt, Artificial Sequence
  Description of Artificial Sequence: Synthetic oligonucleotide
cgugucacacugggcgguc

SEQ ID NO: 246698 - RNA, 19 nt, Artificial Sequence
  Description of Artificial Sequence: Synthetic oligonucleotide
ggaaccggagguggugguu

SEQ ID NO: 246699 - RNA, 19 nt, Artificial Sequence
  Description of Artificial Sequence: Synthetic oligonucleotide
ggccacgguggugaccccu

SEQ ID NO: 246700 - RNA, 19 nt, Artificial Sequence
  Description of Artificial Sequence: Synthetic oligonucleotide
ggacggugacugagaugaa

SEQ ID NO: 246701 - RNA, 19 nt, Artificial Sequence
  Description of Artificial Sequence: Synthetic oligonucleotide
cccgacgggaggacaugcu

SEQ ID NO: 246702 - RNA, 19 nt, Artificial Sequence
  Description of Artificial Sequence: Synthetic oligonucleotide
cguggacugucgucguccu

SEQ ID NO: 246703 - RNA, 19 nt, Artificial Sequence
  Description of Artificial Sequence: Synthetic oligonucleotide
ggggugcgggguacagucu

SEQ ID NO: 246704 - RNA, 19 nt, Artificial Sequence
  Description of Artificial Sequence: Synthetic oligonucleotide
ggguacagucugggagacu

SEQ ID NO: 246705 - RNA, 19 nt, Artificial Sequence
  Description of Artificial Sequence: Synthetic oligonucleotide
ggaccggugguggggucuu

SEQ ID NO: 246706 - RNA, 19 nt, Artificial Sequence
  Description of Artificial Sequence: Synthetic oligonucleotide
cacgugcuccaaggaccau

SEQ ID NO: 246707 - RNA, 19 nt, Artificial Sequence
  Description of Artificial Sequence: Synthetic oligonucleotide
ccggugguggggucuucuu

SEQ ID NO: 246708 - RNA, 19 nt, Artificial Sequence
  Description of Artificial Sequence: Synthetic oligonucleotide
ucuaaauacaugaagcagg

SEQ ID NO: 246709 - RNA, 19 nt, Artificial Sequence
  Description of Artificial Sequence: Synthetic oligonucleotide
uguaucaacacucagguug

SEQ ID NO: 246710 - RNA, 19 nt, Artificial Sequence
  Description of Artificial Sequence: Synthetic oligonucleotide
agaacuuacauuuccagcg

SEQ ID NO: 246711 - RNA, 19 nt, Artificial Sequence
  Description of Artificial Sequence: Synthetic oligonucleotide
auaggauucggauaucacc

SEQ ID NO: 246712 - RNA, 19 nt, Artificial Sequence
  Description of Artificial Sequence: Synthetic oligonucleotide
aauaaacgugaucaauaac

SEQ ID NO: 246713 - RNA, 19 nt, Artificial Sequence
  Description of Artificial Sequence: Synthetic oligonucleotide
uaaacgugaucaauaacgg

SEQ ID NO: 246714 - RNA, 19 nt, Artificial Sequence
  Description of Artificial Sequence: Synthetic oligonucleotide
uauucuugcagcaaagucu

SEQ ID NO: 246715 - RNA, 19 nt, Artificial Sequence
  Description of Artificial Sequence: Synthetic oligonucleotide
gaaacuucuacugauguag

SEQ ID NO: 246716 - RNA, 19 nt, Artificial Sequence
  Description of Artificial Sequence: Synthetic oligonucleotide
aaauaagccuggcucgacc

SEQ ID NO: 246717 - RNA, 19 nt, Artificial Sequence
  Description of Artificial Sequence: Synthetic oligonucleotide
aaagccauguuagcuaggc

SEQ ID NO: 246718 - RNA, 19 nt, Artificial Sequence
  Description of Artificial Sequence: Synthetic oligonucleotide
aacgugaucaauaacggug

SEQ ID NO: 246719 - RNA, 19 nt, Artificial Sequence
  Description of Artificial Sequence: Synthetic oligonucleotide
ucuagagaugaagugacgg

SEQ ID NO: 246720 - RNA, 19 nt, Artificial Sequence
  Description of Artificial Sequence: Synthetic oligonucleotide
gauagaagcacggagggcc

SEQ ID NO: 246721 - RNA, 19 nt, Artificial Sequence
  Description of Artificial Sequence: Synthetic oligonucleotide
gaugacaccguauuuaaga

SEQ ID NO: 246722 - RNA, 19 nt, Artificial Sequence
  Description of Artificial Sequence: Synthetic oligonucleotide
uucacagauagaagcacgg

SEQ ID NO: 246723 - RNA, 19 nt, Artificial Sequence
  Description of Artificial Sequence: Synthetic oligonucleotide
cuaacuugcaaauggaguc

SEQ ID NO: 246724 - RNA, 19 nt, Artificial Sequence
  Description of Artificial Sequence: Synthetic oligonucleotide
ucacuuauuaucucuuuug

SEQ ID NO: 246725 - RNA, 19 nt, Artificial Sequence
  Description of Artificial Sequence: Synthetic oligonucleotide
caugccgacacacaaagag

SEQ ID NO: 246726 - RNA, 19 nt, Artificial Sequence
  Description of Artificial Sequence: Synthetic oligonucleotide
ugaucaauaacgguguuac

SEQ ID NO: 246727 - RNA, 19 nt, Artificial Sequence
  Description of Artificial Sequence: Synthetic oligonucleotide
acugucgccgcucuaacac

SEQ ID NO: 246728 - RNA, 19 nt, Artificial Sequence
  Description of Artificial Sequence: Synthetic oligonucleotide
gacgguaccagggugaagg

SEQ ID NO: 246729 - RNA, 19 nt, Artificial Sequence
  Description of Artificial Sequence: Synthetic oligonucleotide
uguaagaccccuaagcgua

SEQ ID NO: 246730 - RNA, 19 nt, Artificial Sequence
  Description of Artificial Sequence: Synthetic oligonucleotide
aacugcuuaacacagucua

SEQ ID NO: 246731 - RNA, 19 nt, Artificial Sequence
  Description of Artificial Sequence: Synthetic oligonucleotide
ugaggugccguaaauccag

SEQ ID NO: 246732 - RNA, 19 nt, Artificial Sequence
  Description of Artificial Sequence: Synthetic oligonucleotide
acagauagaagcacggagg

SEQ ID NO: 246733 - RNA, 19 nt, Artificial Sequence
  Description of Artificial Sequence: Synthetic oligonucleotide
acagggguaauuuaaacuu

SEQ ID NO: 246734 - RNA, 19 nt, Artificial Sequence
  Description of Artificial Sequence: Synthetic oligonucleotide
ugaaucaugccuuucucuc

SEQ ID NO: 246735 - RNA, 19 nt, Artificial Sequence
  Description of Artificial Sequence: Synthetic oligonucleotide
aacgugagagagcuggaug

SEQ ID NO: 246736 - RNA, 19 nt, Artificial Sequence
  Description of Artificial Sequence: Synthetic oligonucleotide
cauccgagaacucaucugc

SEQ ID NO: 246737 - RNA, 19 nt, Artificial Sequence
  Description of Artificial Sequence: Synthetic oligonucleotide
uucuguuuuggaugcagcc

SEQ ID NO: 246738 - RNA, 19 nt, Artificial Sequence
  Description of Artificial Sequence: Synthetic oligonucleotide
acuagccuugcuugcauac

SEQ ID NO: 246739 - RNA, 19 nt, Artificial Sequence
  Description of Artificial Sequence: Synthetic oligonucleotide
uguaacgucucgugguuag

SEQ ID NO: 246740 - RNA, 19 nt, Artificial Sequence
  Description of Artificial Sequence: Synthetic oligonucleotide
ccgaauacaacauccaucc

SEQ ID NO: 246741 - RNA, 19 nt, Artificial Sequence
  Description of Artificial Sequence: Synthetic oligonucleotide
uauuuaagauggaguagga

SEQ ID NO: 246742 - RNA, 19 nt, Artificial Sequence
  Description of Artificial Sequence: Synthetic oligonucleotide
auaucaccaauuugcugac

SEQ ID NO: 246743 - RNA, 19 nt, Artificial Sequence
  Description of Artificial Sequence: Synthetic oligonucleotide
gaauaugguggccacccag

SEQ ID NO: 246744 - RNA, 19 nt, Artificial Sequence
  Description of Artificial Sequence: Synthetic oligonucleotide
aaacgugaucaauaacggu

SEQ ID NO: 246745 - RNA, 19 nt, Artificial Sequence
  Description of Artificial Sequence: Synthetic oligonucleotide
gugaugagaguccacagac

SEQ ID NO: 246746 - RNA, 19 nt, Artificial Sequence
  Description of Artificial Sequence: Synthetic oligonucleotide
ugcaauaggccaauucuuc

SEQ ID NO: 246747 - RNA, 19 nt, Artificial Sequence
  Description of Artificial Sequence: Synthetic oligonucleotide
ugguuagcaaaccggauau

SEQ ID NO: 246748 - RNA, 19 nt, Artificial Sequence
  Description of Artificial Sequence: Synthetic oligonucleotide
gaaaccaccgcuccgcuga

SEQ ID NO: 246749 - RNA, 19 nt, Artificial Sequence
  Description of Artificial Sequence: Synthetic oligonucleotide
cauggcuaugccuaacuug

SEQ ID NO: 246750 - RNA, 19 nt, Artificial Sequence
  Description of Artificial Sequence: Synthetic oligonucleotide
guagguuguaucaacacuc

SEQ ID NO: 246751 - RNA, 19 nt, Artificial Sequence
  Description of Artificial Sequence: Synthetic oligonucleotide
cacacuagugaauggaguc

SEQ ID NO: 246752 - RNA, 19 nt, Artificial Sequence
  Description of Artificial Sequence: Synthetic oligonucleotide
uaucccgagagaauauggu

SEQ ID NO: 246753 - RNA, 19 nt, Artificial Sequence
  Description of Artificial Sequence: Synthetic oligonucleotide
agguaugggaucuuccuga

SEQ ID NO: 246754 - RNA, 19 nt, Artificial Sequence
  Description of Artificial Sequence: Synthetic oligonucleotide
guaucaacacucagguugg

SEQ ID NO: 246755 - RNA, 19 nt, Artificial Sequence
  Description of Artificial Sequence: Synthetic oligonucleotide
gaaccauggaagauccagg

SEQ ID NO: 246756 - RNA, 19 nt, Artificial Sequence
  Description of Artificial Sequence: Synthetic oligonucleotide
uuacuguaagaccccuaag

SEQ ID NO: 246757 - RNA, 19 nt, Artificial Sequence
  Description of Artificial Sequence: Synthetic oligonucleotide
gaggcaucgcuucuggggc

SEQ ID NO: 246758 - RNA, 19 nt, Artificial Sequence
  Description of Artificial Sequence: Synthetic oligonucleotide
auucaagucagucccuggu

SEQ ID NO: 246759 - RNA, 19 nt, Artificial Sequence
  Description of Artificial Sequence: Synthetic oligonucleotide
uagguuguaucaacacuca

SEQ ID NO: 246760 - RNA, 19 nt, Artificial Sequence
  Description of Artificial Sequence: Synthetic oligonucleotide
ggauggagagcaauaaacg

SEQ ID NO: 246761 - RNA, 19 nt, Artificial Sequence
  Description of Artificial Sequence: Synthetic oligonucleotide
uucuuaugaggcuccacgu

SEQ ID NO: 246762 - RNA, 19 nt, Artificial Sequence
  Description of Artificial Sequence: Synthetic oligonucleotide
agucacccuagcuugacgu

SEQ ID NO: 246763 - RNA, 19 nt, Artificial Sequence
  Description of Artificial Sequence: Synthetic oligonucleotide
acgugagagagcuggauga

SEQ ID NO: 246764 - RNA, 19 nt, Artificial Sequence
  Description of Artificial Sequence: Synthetic oligonucleotide
ugacaccguauuuaagaug

SEQ ID NO: 246765 - RNA, 19 nt, Artificial Sequence
  Description of Artificial Sequence: Synthetic oligonucleotide
ucacccuagcuugacgucg

SEQ ID NO: 246766 - RNA, 19 nt, Artificial Sequence
  Description of Artificial Sequence: Synthetic oligonucleotide
guaacgugcucccagcaac

SEQ ID NO: 246767 - RNA, 19 nt, Artificial Sequence
  Description of Artificial Sequence: Synthetic oligonucleotide
auaucccgagagaauaugg

SEQ ID NO: 246768 - RNA, 19 nt, Artificial Sequence
  Description of Artificial Sequence: Synthetic oligonucleotide
cuugcacacuagugaaugg

SEQ ID NO: 246769 - RNA, 19 nt, Artificial Sequence
  Description of Artificial Sequence: Synthetic oligonucleotide
aauaugguggccacccagu

SEQ ID NO: 246770 - RNA, 19 nt, Artificial Sequence
  Description of Artificial Sequence: Synthetic oligonucleotide
gauaucccgagagaauaug

SEQ ID NO: 246771 - RNA, 19 nt, Artificial Sequence
  Description of Artificial Sequence: Synthetic oligonucleotide
gaagaagggugguagucuc

SEQ ID NO: 246772 - RNA, 19 nt, Artificial Sequence
  Description of Artificial Sequence: Synthetic oligonucleotide
gagaugaagugacgguacc

SEQ ID NO: 246773 - RNA, 19 nt, Artificial Sequence
  Description of Artificial Sequence: Synthetic oligonucleotide
cuaucccauccccaguugg

SEQ ID NO: 246774 - RNA, 19 nt, Artificial Sequence
  Description of Artificial Sequence: Synthetic oligonucleotide
uaugccuaacuugcaaaug

SEQ ID NO: 246775 - RNA, 19 nt, Artificial Sequence
  Description of Artificial Sequence: Synthetic oligonucleotide
accuguaacgucucguggu

SEQ ID NO: 246776 - RNA, 19 nt, Artificial Sequence
  Description of Artificial Sequence: Synthetic oligonucleotide
cauaggauucggauaucac

SEQ ID NO: 246777 - RNA, 19 nt, Artificial Sequence
  Description of Artificial Sequence: Synthetic oligonucleotide
cuuaugaggcuccacguga

SEQ ID NO: 246778 - RNA, 19 nt, Artificial Sequence
  Description of Artificial Sequence: Synthetic oligonucleotide
cuguuuuggaugcagccuc

SEQ ID NO: 246779 - RNA, 19 nt, Artificial Sequence
  Description of Artificial Sequence: Synthetic oligonucleotide
auauucugcaagucccugu

SEQ ID NO: 246780 - RNA, 19 nt, Artificial Sequence
  Description of Artificial Sequence: Synthetic oligonucleotide
uaacgugcucccagcaacc

SEQ ID NO: 246781 - RNA, 19 nt, Artificial Sequence
  Description of Artificial Sequence: Synthetic oligonucleotide
ggggaauagggguagauca

SEQ ID NO: 246782 - RNA, 19 nt, Artificial Sequence
  Description of Artificial Sequence: Synthetic oligonucleotide
gaagccuagguaugggauc

SEQ ID NO: 246783 - RNA, 19 nt, Artificial Sequence
  Description of Artificial Sequence: Synthetic oligonucleotide
augacaccguauuuaagau

SEQ ID NO: 246784 - RNA, 19 nt, Artificial Sequence
  Description of Artificial Sequence: Synthetic oligonucleotide
gaacuuacauuuccagcga

SEQ ID NO: 246785 - RNA, 19 nt, Artificial Sequence
  Description of Artificial Sequence: Synthetic oligonucleotide
acgguguuacuuucuaaca

SEQ ID NO: 246786 - RNA, 19 nt, Artificial Sequence
  Description of Artificial Sequence: Synthetic oligonucleotide
auacugucgccgcucuaac

SEQ ID NO: 246787 - RNA, 19 nt, Artificial Sequence
  Description of Artificial Sequence: Synthetic oligonucleotide
uuagcuaggcaaguccaga

SEQ ID NO: 246788 - RNA, 19 nt, Artificial Sequence
  Description of Artificial Sequence: Synthetic oligonucleotide
auaugcuaaaugauucuga

SEQ ID NO: 246789 - RNA, 19 nt, Artificial Sequence
  Description of Artificial Sequence: Synthetic oligonucleotide
cuuacuguaagaccccuaa

SEQ ID NO: 246790 - RNA, 19 nt, Artificial Sequence
  Description of Artificial Sequence: Synthetic oligonucleotide
caucuuucucauagucccg

SEQ ID NO: 246791 - RNA, 19 nt, Artificial Sequence
  Description of Artificial Sequence: Synthetic oligonucleotide
gguuggugcguauguagcg

SEQ ID NO: 246792 - RNA, 19 nt, Artificial Sequence
  Description of Artificial Sequence: Synthetic oligonucleotide
uguuuuggaugcagccucu

SEQ ID NO: 246793 - RNA, 19 nt, Artificial Sequence
  Description of Artificial Sequence: Synthetic oligonucleotide
caauaacgguguuacuuuc

SEQ ID NO: 246794 - RNA, 19 nt, Artificial Sequence
  Description of Artificial Sequence: Synthetic oligonucleotide
gaaugugaggucuguaggu

SEQ ID NO: 246795 - RNA, 19 nt, Artificial Sequence
  Description of Artificial Sequence: Synthetic oligonucleotide
cucgcagugcaguugugac

SEQ ID NO: 246796 - RNA, 19 nt, Artificial Sequence
  Description of Artificial Sequence: Synthetic oligonucleotide
auaacgguguuacuuucua

SEQ ID NO: 246797 - RNA, 19 nt, Artificial Sequence
  Description of Artificial Sequence: Synthetic oligonucleotide
caucgggcuaucacagggg

SEQ ID NO: 246798 - RNA, 19 nt, Artificial Sequence
  Description of Artificial Sequence: Synthetic oligonucleotide
uccaaaagacuaucccauc

SEQ ID NO: 246799 - RNA, 19 nt, Artificial Sequence
  Description of Artificial Sequence: Synthetic oligonucleotide
aacgucucgugguuagcaa

SEQ ID NO: 246800 - RNA, 19 nt, Artificial Sequence
  Description of Artificial Sequence: Synthetic oligonucleotide
uucaagucagucccugguu

SEQ ID NO: 246801 - RNA, 19 nt, Artificial Sequence
  Description of Artificial Sequence: Synthetic oligonucleotide
ggugccguaaauccagccc

SEQ ID NO: 246802 - RNA, 19 nt, Artificial Sequence
  Description of Artificial Sequence: Synthetic oligonucleotide
gacccgaaucuucaaguga

SEQ ID NO: 246803 - RNA, 19 nt, Artificial Sequence
  Description of Artificial Sequence: Synthetic oligonucleotide
ggaucucacagcucaucgg

SEQ ID NO: 246804 - RNA, 19 nt, Artificial Sequence
  Description of Artificial Sequence: Synthetic oligonucleotide
agcaggcgugaugagaguc

SEQ ID NO: 246805 - RNA, 19 nt, Artificial Sequence
  Description of Artificial Sequence: Synthetic oligonucleotide
cugguaacgugcucccagc

SEQ ID NO: 246806 - RNA, 19 nt, Artificial Sequence
  Description of Artificial Sequence: Synthetic oligonucleotide
gcucuuuagccaugcauag

SEQ ID NO: 246807 - RNA, 19 nt, Artificial Sequence
  Description of Artificial Sequence: Synthetic oligonucleotide
agcuggaugacaccguauu

SEQ ID NO: 246808 - RNA, 19 nt, Artificial Sequence
  Description of Artificial Sequence: Synthetic oligonucleotide
cucgacccgaaucuucaag

SEQ ID NO: 246809 - RNA, 19 nt, Artificial Sequence
  Description of Artificial Sequence: Synthetic oligonucleotide
ugaggcuccacgugaacuu

SEQ ID NO: 246810 - RNA, 19 nt, Artificial Sequence
  Description of Artificial Sequence: Synthetic oligonucleotide
ugguaacgugcucccagca

SEQ ID NO: 246811 - RNA, 19 nt, Artificial Sequence
  Description of Artificial Sequence: Synthetic oligonucleotide
uaacaaggcuucacccacu

SEQ ID NO: 246812 - RNA, 19 nt, Artificial Sequence
  Description of Artificial Sequence: Synthetic oligonucleotide
gcccgaugaaguuagagga

SEQ ID NO: 246813 - RNA, 19 nt, Artificial Sequence
  Description of Artificial Sequence: Synthetic oligonucleotide
aucgggcuaucacaggggu

SEQ ID NO: 246814 - RNA, 19 nt, Artificial Sequence
  Description of Artificial Sequence: Synthetic oligonucleotide
guuagcuaggcaaguccag

SEQ ID NO: 246815 - RNA, 19 nt, Artificial Sequence
  Description of Artificial Sequence: Synthetic oligonucleotide
gauagccaguacuucccga

SEQ ID NO: 246816 - RNA, 19 nt, Artificial Sequence
  Description of Artificial Sequence: Synthetic oligonucleotide
ggauaucaccaauuugcug

SEQ ID NO: 246817 - RNA, 19 nt, Artificial Sequence
  Description of Artificial Sequence: Synthetic oligonucleotide
aaacgugagagagcuggau

SEQ ID NO: 246818 - RNA, 19 nt, Artificial Sequence
  Description of Artificial Sequence: Synthetic oligonucleotide
uaugaggcuccacgugaac

SEQ ID NO: 246819 - RNA, 19 nt, Artificial Sequence
  Description of Artificial Sequence: Synthetic oligonucleotide
acgugaucaauaacggugu

SEQ ID NO: 246820 - RNA, 19 nt, Artificial Sequence
  Description of Artificial Sequence: Synthetic oligonucleotide
guaagcgggaggauaggug

SEQ ID NO: 246821 - RNA, 19 nt, Artificial Sequence
  Description of Artificial Sequence: Synthetic oligonucleotide
gaagggugguagucucugc

SEQ ID NO: 246822 - RNA, 19 nt, Artificial Sequence
  Description of Artificial Sequence: Synthetic oligonucleotide
ugucgccgcucuaacacuc

SEQ ID NO: 246823 - RNA, 19 nt, Artificial Sequence
  Description of Artificial Sequence: Synthetic oligonucleotide
ucuuacuguaagaccccua

SEQ ID NO: 246824 - RNA, 19 nt, Artificial Sequence
  Description of Artificial Sequence: Synthetic oligonucleotide
acucaagaguuccccauuu

SEQ ID NO: 246825 - RNA, 19 nt, Artificial Sequence
  Description of Artificial Sequence: Synthetic oligonucleotide
agaugaagugacgguacca

SEQ ID NO: 246826 - RNA, 19 nt, Artificial Sequence
  Description of Artificial Sequence: Synthetic oligonucleotide
ucuagagccuggguggaaa

SEQ ID NO: 246827 - RNA, 19 nt, Artificial Sequence
  Description of Artificial Sequence: Synthetic oligonucleotide
uggaguccaaaagacuauc

SEQ ID NO: 246828 - RNA, 19 nt, Artificial Sequence
  Description of Artificial Sequence: Synthetic oligonucleotide
cucaucgggcuaucacagg

SEQ ID NO: 246829 - RNA, 19 nt, Artificial Sequence
  Description of Artificial Sequence: Synthetic oligonucleotide
gaaugcaguauugguuuuc

SEQ ID NO: 246830 - RNA, 19 nt, Artificial Sequence
  Description of Artificial Sequence: Synthetic oligonucleotide
agucccuguaccucccacu

SEQ ID NO: 246831 - RNA, 19 nt, Artificial Sequence
  Description of Artificial Sequence: Synthetic oligonucleotide
ugcagcuaacucugaugga

SEQ ID NO: 246832 - RNA, 19 nt, Artificial Sequence
  Description of Artificial Sequence: Synthetic oligonucleotide
acuuacauuuccagcgacu

SEQ ID NO: 246833 - RNA, 19 nt, Artificial Sequence
  Description of Artificial Sequence: Synthetic oligonucleotide
ucgcagugcaguugugacu

SEQ ID NO: 246834 - RNA, 19 nt, Artificial Sequence
  Description of Artificial Sequence: Synthetic oligonucleotide
uacugucgccgcucuaaca

SEQ ID NO: 246835 - RNA, 19 nt, Artificial Sequence
  Description of Artificial Sequence: Synthetic oligonucleotide
gaagugacgguaccagggu

SEQ ID NO: 246836 - RNA, 19 nt, Artificial Sequence
  Description of Artificial Sequence: Synthetic oligonucleotide
cccaugccgacacacaaag

SEQ ID NO: 246837 - RNA, 19 nt, Artificial Sequence
  Description of Artificial Sequence: Synthetic oligonucleotide
ccuagguaugggaucuucc

SEQ ID NO: 246838 - RNA, 19 nt, Artificial Sequence
  Description of Artificial Sequence: Synthetic oligonucleotide
guaugccagggucacaugu

SEQ ID NO: 246839 - RNA, 19 nt, Artificial Sequence
  Description of Artificial Sequence: Synthetic oligonucleotide
cagucacccuagcuugacg

SEQ ID NO: 246840 - RNA, 19 nt, Artificial Sequence
  Description of Artificial Sequence: Synthetic oligonucleotide
uggcuaugccuaacuugca

SEQ ID NO: 246841 - RNA, 19 nt, Artificial Sequence
  Description of Artificial Sequence: Synthetic oligonucleotide
gcuaggcaaguccagagaa

SEQ ID NO: 246842 - RNA, 19 nt, Artificial Sequence
  Description of Artificial Sequence: Synthetic oligonucleotide
cauucaaauaagccuggcu

SEQ ID NO: 246843 - RNA, 19 nt, Artificial Sequence
  Description of Artificial Sequence: Synthetic oligonucleotide
acgucucgugguuagcaaa

SEQ ID NO: 246844 - RNA, 19 nt, Artificial Sequence
  Description of Artificial Sequence: Synthetic oligonucleotide
guaccagggugaagguugg

SEQ ID NO: 246845 - RNA, 19 nt, Artificial Sequence
  Description of Artificial Sequence: Synthetic oligonucleotide
gacucucgcagugcaguug

SEQ ID NO: 246846 - RNA, 19 nt, Artificial Sequence
  Description of Artificial Sequence: Synthetic oligonucleotide
ggcguugucucuccaaguc

SEQ ID NO: 246847 - RNA, 19 nt, Artificial Sequence
  Description of Artificial Sequence: Synthetic oligonucleotide
cuguaagaccccuaagcgu

SEQ ID NO: 246848 - RNA, 19 nt, Artificial Sequence
  Description of Artificial Sequence: Synthetic oligonucleotide
uaacucugauggagguauc

SEQ ID NO: 246849 - RNA, 19 nt, Artificial Sequence
  Description of Artificial Sequence: Synthetic oligonucleotide
auacacccaaacacaguga

SEQ ID NO: 246850 - RNA, 19 nt, Artificial Sequence
  Description of Artificial Sequence: Synthetic oligonucleotide
cagccgcaaacuucuugag

SEQ ID NO: 246851 - RNA, 19 nt, Artificial Sequence
  Description of Artificial Sequence: Synthetic oligonucleotide
gaauagggguagaucaccu

SEQ ID NO: 246852 - RNA, 19 nt, Artificial Sequence
  Description of Artificial Sequence: Synthetic oligonucleotide
gcucaucgggcuaucacag

SEQ ID NO: 246853 - RNA, 19 nt, Artificial Sequence
  Description of Artificial Sequence: Synthetic oligonucleotide
gccuaacuugcaaauggag

SEQ ID NO: 246854 - RNA, 19 nt, Artificial Sequence
  Description of Artificial Sequence: Synthetic oligonucleotide
uggagguauccaugcuggu

SEQ ID NO: 246855 - RNA, 19 nt, Artificial Sequence
  Description of Artificial Sequence: Synthetic oligonucleotide
ucgauguucugggcgaguu

SEQ ID NO: 246856 - RNA, 19 nt, Artificial Sequence
  Description of Artificial Sequence: Synthetic oligonucleotide
gcuuaggaagacaauucuc

SEQ ID NO: 246857 - RNA, 19 nt, Artificial Sequence
  Description of Artificial Sequence: Synthetic oligonucleotide
cuaugccuaacuugcaaau

SEQ ID NO: 246858 - RNA, 19 nt, Artificial Sequence
  Description of Artificial Sequence: Synthetic oligonucleotide
ccgaaucuucaagugauug

SEQ ID NO: 246859 - RNA, 19 nt, Artificial Sequence
  Description of Artificial Sequence: Synthetic oligonucleotide
gucacccuagcuugacguc

SEQ ID NO: 246860 - RNA, 19 nt, Artificial Sequence
  Description of Artificial Sequence: Synthetic oligonucleotide
gugaucaauaacgguguua

SEQ ID NO: 246861 - RNA, 19 nt, Artificial Sequence
  Description of Artificial Sequence: Synthetic oligonucleotide
ccuaacuugcaaauggagu

SEQ ID NO: 246862 - RNA, 19 nt, Artificial Sequence
  Description of Artificial Sequence: Synthetic oligonucleotide
caaaccggauaucccgaga

SEQ ID NO: 246863 - RNA, 19 nt, Artificial Sequence
  Description of Artificial Sequence: Synthetic oligonucleotide
guaacgucucgugguuagc

SEQ ID NO: 246864 - RNA, 19 nt, Artificial Sequence
  Description of Artificial Sequence: Synthetic oligonucleotide
acgguaccagggugaaggu

SEQ ID NO: 246865 - RNA, 19 nt, Artificial Sequence
  Description of Artificial Sequence: Synthetic oligonucleotide
acaggcuucgagggaagau

SEQ ID NO: 246866 - RNA, 19 nt, Artificial Sequence
  Description of Artificial Sequence: Synthetic oligonucleotide
ccagcgacugacaguaguc

SEQ ID NO: 246867 - RNA, 19 nt, Artificial Sequence
  Description of Artificial Sequence: Synthetic oligonucleotide
ggcgugaugagaguccaca

SEQ ID NO: 246868 - RNA, 19 nt, Artificial Sequence
  Description of Artificial Sequence: Synthetic oligonucleotide
guccauggguaagcgggag

SEQ ID NO: 246869 - RNA, 19 nt, Artificial Sequence
  Description of Artificial Sequence: Synthetic oligonucleotide
uaagaccccuaagcguaaa

SEQ ID NO: 246870 - RNA, 19 nt, Artificial Sequence
  Description of Artificial Sequence: Synthetic oligonucleotide
ucauacugucgccgcucua

SEQ ID NO: 246871 - RNA, 19 nt, Artificial Sequence
  Description of Artificial Sequence: Synthetic oligonucleotide
cuagugaauggagucuucu

SEQ ID NO: 246872 - RNA, 19 nt, Artificial Sequence
  Description of Artificial Sequence: Synthetic oligonucleotide
gguaacgugcucccagcaa

SEQ ID NO: 246873 - RNA, 19 nt, Artificial Sequence
  Description of Artificial Sequence: Synthetic oligonucleotide
ggaaaccaccgcuccgcug

SEQ ID NO: 246874 - RNA, 19 nt, Artificial Sequence
  Description of Artificial Sequence: Synthetic oligonucleotide
gcaggcgugaugagagucc

SEQ ID NO: 246875 - RNA, 19 nt, Artificial Sequence
  Description of Artificial Sequence: Synthetic oligonucleotide
caguuggauucaaggcaca

SEQ ID NO: 246876 - RNA, 19 nt, Artificial Sequence
  Description of Artificial Sequence: Synthetic oligonucleotide
cacccuagcuugacgucga

SEQ ID NO: 246877 - RNA, 19 nt, Artificial Sequence
  Description of Artificial Sequence: Synthetic oligonucleotide
acagcucaucgggcuauca

SEQ ID NO: 246878 - RNA, 19 nt, Artificial Sequence
  Description of Artificial Sequence: Synthetic oligonucleotide
caccgcuccgcugagguaa

SEQ ID NO: 246879 - RNA, 19 nt, Artificial Sequence
  Description of Artificial Sequence: Synthetic oligonucleotide
ugcguauguagcggccuuu

SEQ ID NO: 246880 - RNA, 19 nt, Artificial Sequence
  Description of Artificial Sequence: Synthetic oligonucleotide
ccauucaaauaagccuggc

SEQ ID NO: 246881 - RNA, 19 nt, Artificial Sequence
  Description of Artificial Sequence: Synthetic oligonucleotide
caaagucagccgcaaacuu

SEQ ID NO: 246882 - RNA, 19 nt, Artificial Sequence
  Description of Artificial Sequence: Synthetic oligonucleotide
caggugccuugcacacuag

SEQ ID NO: 246883 - RNA, 19 nt, Artificial Sequence
  Description of Artificial Sequence: Synthetic oligonucleotide
ggcugcaugggcugacaga

SEQ ID NO: 246884 - RNA, 19 nt, Artificial Sequence
  Description of Artificial Sequence: Synthetic oligonucleotide
ggcuuggaagugguaugcc

SEQ ID NO: 246885 - RNA, 19 nt, Artificial Sequence
  Description of Artificial Sequence: Synthetic oligonucleotide
aggcgugaugagaguccac

SEQ ID NO: 246886 - RNA, 19 nt, Artificial Sequence
  Description of Artificial Sequence: Synthetic oligonucleotide
ggguaagcgggaggauagg

SEQ ID NO: 246887 - RNA, 19 nt, Artificial Sequence
  Description of Artificial Sequence: Synthetic oligonucleotide
cucucgcagugcaguugug

SEQ ID NO: 246888 - RNA, 19 nt, Artificial Sequence
  Description of Artificial Sequence: Synthetic oligonucleotide
cgacccgaaucuucaagug

SEQ ID NO: 246889 - RNA, 19 nt, Artificial Sequence
  Description of Artificial Sequence: Synthetic oligonucleotide
ggaagugguaugccagggu

SEQ ID NO: 246890 - RNA, 19 nt, Artificial Sequence
  Description of Artificial Sequence: Synthetic oligonucleotide
ccguaaauccagcccucac

SEQ ID NO: 246891 - RNA, 19 nt, Artificial Sequence
  Description of Artificial Sequence: Synthetic oligonucleotide
gcuaucacagggguaauuu

SEQ ID NO: 246892 - RNA, 19 nt, Artificial Sequence
  Description of Artificial Sequence: Synthetic oligonucleotide
gcguauguagcggccuuug

SEQ ID NO: 246893 - RNA, 19 nt, Artificial Sequence
  Description of Artificial Sequence: Synthetic oligonucleotide
cgugaugagaguccacaga

SEQ ID NO: 246894 - RNA, 19 nt, Artificial Sequence
  Description of Artificial Sequence: Synthetic oligonucleotide
gguuagcaaaccggauauc

SEQ ID NO: 246895 - RNA, 19 nt, Artificial Sequence
  Description of Artificial Sequence: Synthetic oligonucleotide
gccuggcucgacccgaauc

SEQ ID NO: 246896 - RNA, 19 nt, Artificial Sequence
  Description of Artificial Sequence: Synthetic oligonucleotide
accaaacgugagagagcug

SEQ ID NO: 246897 - RNA, 19 nt, Artificial Sequence
  Description of Artificial Sequence: Synthetic oligonucleotide
ggcaucgcuucuggggccc

SEQ ID NO: 246898 - RNA, 19 nt, Artificial Sequence
  Description of Artificial Sequence: Synthetic oligonucleotide
gugacgguaccagggugaa

SEQ ID NO: 246899 - RNA, 19 nt, Artificial Sequence
  Description of Artificial Sequence: Synthetic oligonucleotide
gaggggaauagggguagau

SEQ ID NO: 246900 - RNA, 19 nt, Artificial Sequence
  Description of Artificial Sequence: Synthetic oligonucleotide
caagucccuguaccuccca

SEQ ID NO: 246901 - RNA, 19 nt, Artificial Sequence
  Description of Artificial Sequence: Synthetic oligonucleotide
gguaagcgggaggauaggu

SEQ ID NO: 246902 - RNA, 19 nt, Artificial Sequence
  Description of Artificial Sequence: Synthetic oligonucleotide
cgguguuacuuucuaacaa

SEQ ID NO: 246903 - RNA, 19 nt, Artificial Sequence
  Description of Artificial Sequence: Synthetic oligonucleotide
ccuggcucgacccgaaucu

SEQ ID NO: 246904 - RNA, 19 nt, Artificial Sequence
  Description of Artificial Sequence: Synthetic oligonucleotide
ccgcucuaacacuccauca

SEQ ID NO: 246905 - RNA, 19 nt, Artificial Sequence
  Description of Artificial Sequence: Synthetic oligonucleotide
cagcgacugacaguagucu

SEQ ID NO: 246906 - RNA, 19 nt, Artificial Sequence
  Description of Artificial Sequence: Synthetic oligonucleotide
acccuagcuugacgucgau

SEQ ID NO: 246907 - RNA, 19 nt, Artificial Sequence
  Description of Artificial Sequence: Synthetic oligonucleotide
cguaaauccagcccucacu

SEQ ID NO: 246908 - RNA, 19 nt, Artificial Sequence
  Description of Artificial Sequence: Synthetic oligonucleotide
cuggaaugugaggucugua

SEQ ID NO: 246909 - RNA, 19 nt, Artificial Sequence
  Description of Artificial Sequence: Synthetic oligonucleotide
cugucgccgcucuaacacu

SEQ ID NO: 246910 - RNA, 19 nt, Artificial Sequence
  Description of Artificial Sequence: Synthetic oligonucleotide
cuguaacgucucgugguua

SEQ ID NO: 246911 - RNA, 19 nt, Artificial Sequence
  Description of Artificial Sequence: Synthetic oligonucleotide
cgugagagagcuggaugac

SEQ ID NO: 246912 - RNA, 19 nt, Artificial Sequence
  Description of Artificial Sequence: Synthetic oligonucleotide
gccgacacacaaagaggca

SEQ ID NO: 246913 - RNA, 19 nt, Artificial Sequence
  Description of Artificial Sequence: Synthetic oligonucleotide
ggauaucccgagagaauau

SEQ ID NO: 246914 - RNA, 19 nt, Artificial Sequence
  Description of Artificial Sequence: Synthetic oligonucleotide
cggauaucccgagagaaua

SEQ ID NO: 246915 - RNA, 19 nt, Artificial Sequence
  Description of Artificial Sequence: Synthetic oligonucleotide
ggugcguauguagcggccu

SEQ ID NO: 246916 - RNA, 19 nt, Artificial Sequence
  Description of Artificial Sequence: Synthetic oligonucleotide
gccguaaauccagcccuca

SEQ ID NO: 246917 - RNA, 19 nt, Artificial Sequence
  Description of Artificial Sequence: Synthetic oligonucleotide
cccuagcuugacgucgaug

SEQ ID NO: 246918 - RNA, 19 nt, Artificial Sequence
  Description of Artificial Sequence: Synthetic oligonucleotide
gcgacucucgcagugcagu

SEQ ID NO: 246919 - RNA, 19 nt, Artificial Sequence
  Description of Artificial Sequence: Synthetic oligonucleotide
gugcguauguagcggccuu

SEQ ID NO: 246920 - RNA, 19 nt, Artificial Sequence
  Description of Artificial Sequence: Synthetic oligonucleotide
gggguaauuuaaacuugau

SEQ ID NO: 246921 - RNA, 19 nt, Artificial Sequence
  Description of Artificial Sequence: Synthetic oligonucleotide
ccaugccgacacacaaaga

SEQ ID NO: 246922 - RNA, 19 nt, Artificial Sequence
  Description of Artificial Sequence: Synthetic oligonucleotide
cccagucacccuagcuuga

SEQ ID NO: 246923 - RNA, 19 nt, Artificial Sequence
  Description of Artificial Sequence: Synthetic oligonucleotide
gcuccacgugaacuucugu

SEQ ID NO: 246924 - RNA, 19 nt, Artificial Sequence
  Description of Artificial Sequence: Synthetic oligonucleotide
ccggauaucccgagagaau

SEQ ID NO: 246925 - RNA, 19 nt, Artificial Sequence
  Description of Artificial Sequence: Synthetic oligonucleotide
ggcuaucacagggguaauu

SEQ ID NO: 246926 - RNA, 19 nt, Artificial Sequence
  Description of Artificial Sequence: Synthetic oligonucleotide
gcaacccacuuuguccauu

SEQ ID NO: 246927 - RNA, 19 nt, Artificial Sequence
  Description of Artificial Sequence: Synthetic oligonucleotide
gcguagggauggagagcaa

SEQ ID NO: 246928 - RNA, 19 nt, Artificial Sequence
  Description of Artificial Sequence: Synthetic oligonucleotide
gcaguggggcagagaacuu

SEQ ID NO: 246929 - RNA, 19 nt, Artificial Sequence
  Description of Artificial Sequence: Synthetic oligonucleotide
cggaaaccaccgcuccgcu

SEQ ID NO: 246930 - RNA, 19 nt, Artificial Sequence
  Description of Artificial Sequence: Synthetic oligonucleotide
cgacucucgcagugcaguu

SEQ ID NO: 246931 - RNA, 19 nt, Artificial Sequence
  Description of Artificial Sequence: Synthetic oligonucleotide
agcuuuaacaauuacagcc

SEQ ID NO: 246932 - RNA, 19 nt, Artificial Sequence
  Description of Artificial Sequence: Synthetic oligonucleotide
uggaauaucaguuugacug

SEQ ID NO: 246933 - RNA, 19 nt, Artificial Sequence
  Description of Artificial Sequence: Synthetic oligonucleotide
uuuguuauuaagcauauac

SEQ ID NO: 246934 - RNA, 19 nt, Artificial Sequence
  Description of Artificial Sequence: Synthetic oligonucleotide
auauuaggaaaguugagcc

SEQ ID NO: 246935 - RNA, 19 nt, Artificial Sequence
  Description of Artificial Sequence: Synthetic oligonucleotide
aaauuuauauccuuugcag

SEQ ID NO: 246936 - RNA, 19 nt, Artificial Sequence
  Description of Artificial Sequence: Synthetic oligonucleotide
uauaugaccagucacuggg

SEQ ID NO: 246937 - RNA, 19 nt, Artificial Sequence
  Description of Artificial Sequence: Synthetic oligonucleotide
uauacagucauacaaaagu

SEQ ID NO: 246938 - RNA, 19 nt, Artificial Sequence
  Description of Artificial Sequence: Synthetic oligonucleotide
uauauagauagcaagaaaa

SEQ ID NO: 246939 - RNA, 19 nt, Artificial Sequence
  Description of Artificial Sequence: Synthetic oligonucleotide
auagauagcaagaaaaggc

SEQ ID NO: 246940 - RNA, 19 nt, Artificial Sequence
  Description of Artificial Sequence: Synthetic oligonucleotide
uuaucuaugugcaugugag

SEQ ID NO: 246941 - RNA, 19 nt, Artificial Sequence
  Description of Artificial Sequence: Synthetic oligonucleotide
auggauaaaaguuucuggg

SEQ ID NO: 246942 - RNA, 19 nt, Artificial Sequence
  Description of Artificial Sequence: Synthetic oligonucleotide
uauggauaaaaguuucugg

SEQ ID NO: 246943 - RNA, 19 nt, Artificial Sequence
  Description of Artificial Sequence: Synthetic oligonucleotide
ucgagcauuaaauagauuc

SEQ ID NO: 246944 - RNA, 19 nt, Artificial Sequence
  Description of Artificial Sequence: Synthetic oligonucleotide
gaugcucaaaauaaggugg

SEQ ID NO: 246945 - RNA, 19 nt, Artificial Sequence
  Description of Artificial Sequence: Synthetic oligonucleotide
acuacaucuauuucccugc

SEQ ID NO: 246946 - RNA, 19 nt, Artificial Sequence
  Description of Artificial Sequence: Synthetic oligonucleotide
uaauuauucaccauccccu

SEQ ID NO: 246947 - RNA, 19 nt, Artificial Sequence
  Description of Artificial Sequence: Synthetic oligonucleotide
aaauaagguggagaguugc

SEQ ID NO: 246948 - RNA, 19 nt, Artificial Sequence
  Description of Artificial Sequence: Synthetic oligonucleotide
auuaaauagauuccagcag

SEQ ID NO: 246949 - RNA, 19 nt, Artificial Sequence
  Description of Artificial Sequence: Synthetic oligonucleotide
aaaguugagccuugcauag

SEQ ID NO: 246950 - RNA, 19 nt, Artificial Sequence
  Description of Artificial Sequence: Synthetic oligonucleotide
gacaugaagacaugggacg

SEQ ID NO: 246951 - RNA, 19 nt, Artificial Sequence
  Description of Artificial Sequence: Synthetic oligonucleotide
aauauccaggcaguaaggc

SEQ ID NO: 246952 - RNA, 19 nt, Artificial Sequence
  Description of Artificial Sequence: Synthetic oligonucleotide
auuauuauuauuauuauua

SEQ ID NO: 246953 - RNA, 19 nt, Artificial Sequence
  Description of Artificial Sequence: Synthetic oligonucleotide
auuauuauuauuauuauuu

SEQ ID NO: 246954 - RNA, 19 nt, Artificial Sequence
  Description of Artificial Sequence: Synthetic oligonucleotide
aaaucgaaagaacccgggg

SEQ ID NO: 246955 - RNA, 19 nt, Artificial Sequence
  Description of Artificial Sequence: Synthetic oligonucleotide
ugugauauguuguaagaca

SEQ ID NO: 246956 - RNA, 19 nt, Artificial Sequence
  Description of Artificial Sequence: Synthetic oligonucleotide
gauauuaggaaaguugagc

SEQ ID NO: 246957 - RNA, 19 nt, Artificial Sequence
  Description of Artificial Sequence: Synthetic oligonucleotide
cuaauuauucaccaucccc

SEQ ID NO: 246958 - RNA, 19 nt, Artificial Sequence
  Description of Artificial Sequence: Synthetic oligonucleotide
ugcaaauugaacucuggcc

SEQ ID NO: 246959 - RNA, 19 nt, Artificial Sequence
  Description of Artificial Sequence: Synthetic oligonucleotide
aacuacaucuauuucccug

SEQ ID NO: 246960 - RNA, 19 nt, Artificial Sequence
  Description of Artificial Sequence: Synthetic oligonucleotide
uuauauccaugacuguugg

SEQ ID NO: 246961 - RNA, 19 nt, Artificial Sequence
  Description of Artificial Sequence: Synthetic oligonucleotide
agcaauaugacucuaguua

SEQ ID NO: 246962 - RNA, 19 nt, Artificial Sequence
  Description of Artificial Sequence: Synthetic oligonucleotide
uuuaucuaugugcauguga

SEQ ID NO: 246963 - RNA, 19 nt, Artificial Sequence
  Description of Artificial Sequence: Synthetic oligonucleotide
gguuauaggaguuugugag

SEQ ID NO: 246964 - RNA, 19 nt, Artificial Sequence
  Description of Artificial Sequence: Synthetic oligonucleotide
augcuuagaucccugaggg

SEQ ID NO: 246965 - RNA, 19 nt, Artificial Sequence
  Description of Artificial Sequence: Synthetic oligonucleotide
cucuaguuaauucuguagc

SEQ ID NO: 246966 - RNA, 19 nt, Artificial Sequence
  Description of Artificial Sequence: Synthetic oligonucleotide
agcguauauagauagcaag

SEQ ID NO: 246967 - RNA, 19 nt, Artificial Sequence
  Description of Artificial Sequence: Synthetic oligonucleotide
auauggaacccaaaugucc

SEQ ID NO: 246968 - RNA, 19 nt, Artificial Sequence
  Description of Artificial Sequence: Synthetic oligonucleotide
uauuauuauuauuauuuau

SEQ ID NO: 246969 - RNA, 19 nt, Artificial Sequence
  Description of Artificial Sequence: Synthetic oligonucleotide
uguggggauauuaggaaag

SEQ ID NO: 246970 - RNA, 19 nt, Artificial Sequence
  Description of Artificial Sequence: Synthetic oligonucleotide
cauuaaauagauuccagca

SEQ ID NO: 246971 - RNA, 19 nt, Artificial Sequence
  Description of Artificial Sequence: Synthetic oligonucleotide
ugaaguauaugaccaguca

SEQ ID NO: 246972 - RNA, 19 nt, Artificial Sequence
  Description of Artificial Sequence: Synthetic oligonucleotide
auaguuuugagaauucauc

SEQ ID NO: 246973 - RNA, 19 nt, Artificial Sequence
  Description of Artificial Sequence: Synthetic oligonucleotide
uuugugauauguuguaaga

SEQ ID NO: 246974 - RNA, 19 nt, Artificial Sequence
  Description of Artificial Sequence: Synthetic oligonucleotide
ucuaguuaauucuguagca

SEQ ID NO: 246975 - RNA, 19 nt, Artificial Sequence
  Description of Artificial Sequence: Synthetic oligonucleotide
uauuggagcguauauagau

SEQ ID NO: 246976 - RNA, 19 nt, Artificial Sequence
  Description of Artificial Sequence: Synthetic oligonucleotide
uguccaagaacaaauuuau

SEQ ID NO: 246977 - RNA, 19 nt, Artificial Sequence
  Description of Artificial Sequence: Synthetic oligonucleotide
uaaugcauagagauacuga

SEQ ID NO: 246978 - RNA, 19 nt, Artificial Sequence
  Description of Artificial Sequence: Synthetic oligonucleotide
uguaucuggcuccuaauac

SEQ ID NO: 246979 - RNA, 19 nt, Artificial Sequence
  Description of Artificial Sequence: Synthetic oligonucleotide
uuauuauuauuauuauuau

SEQ ID NO: 246980 - RNA, 19 nt, Artificial Sequence
  Description of Artificial Sequence: Synthetic oligonucleotide
uucuauaagcagucgagca

SEQ ID NO: 246981 - RNA, 19 nt, Artificial Sequence
  Description of Artificial Sequence: Synthetic oligonucleotide
auuauuugccuguuggaca

SEQ ID NO: 246982 - RNA, 19 nt, Artificial Sequence
  Description of Artificial Sequence: Synthetic oligonucleotide
auaggaguuugugagcugc

SEQ ID NO: 246983 - RNA, 19 nt, Artificial Sequence
  Description of Artificial Sequence: Synthetic oligonucleotide
gcaaauugaacucuggccc

SEQ ID NO: 246984 - RNA, 19 nt, Artificial Sequence
  Description of Artificial Sequence: Synthetic oligonucleotide
auaggucccauugagcccc

SEQ ID NO: 246985 - RNA, 19 nt, Artificial Sequence
  Description of Artificial Sequence: Synthetic oligonucleotide
uuauuauuauuauuauuua

SEQ ID NO: 246986 - RNA, 19 nt, Artificial Sequence
  Description of Artificial Sequence: Synthetic oligonucleotide
aagacauauaugaaagcug

SEQ ID NO: 246987 - RNA, 19 nt, Artificial Sequence
  Description of Artificial Sequence: Synthetic oligonucleotide
gaguuugugagcugccugg

SEQ ID NO: 246988 - RNA, 19 nt, Artificial Sequence
  Description of Artificial Sequence: Synthetic oligonucleotide
caugcuuagaucccugagg

SEQ ID NO: 246989 - RNA, 19 nt, Artificial Sequence
  Description of Artificial Sequence: Synthetic oligonucleotide
ucucuuauccaaauagaaa

SEQ ID NO: 246990 - RNA, 19 nt, Artificial Sequence
  Description of Artificial Sequence: Synthetic oligonucleotide
auauagauagcaagaaaag

SEQ ID NO: 246991 - RNA, 19 nt, Artificial Sequence
  Description of Artificial Sequence: Synthetic oligonucleotide
uguuuaucuaugugcaugu

SEQ ID NO: 246992 - RNA, 19 nt, Artificial Sequence
  Description of Artificial Sequence: Synthetic oligonucleotide
uuuccgagcacacuucucu

SEQ ID NO: 246993 - RNA, 19 nt, Artificial Sequence
  Description of Artificial Sequence: Synthetic oligonucleotide
uauuauuauuauuauuauu

SEQ ID NO: 246994 - RNA, 19 nt, Artificial Sequence
  Description of Artificial Sequence: Synthetic oligonucleotide
ucauuauuauuauuauuau

SEQ ID NO: 246995 - RNA, 19 nt, Artificial Sequence
  Description of Artificial Sequence: Synthetic oligonucleotide
gagacagaucaggagaugg

SEQ ID NO: 246996 - RNA, 19 nt, Artificial Sequence
  Description of Artificial Sequence: Synthetic oligonucleotide
aaguauaugaccagucacu

SEQ ID NO: 246997 - RNA, 19 nt, Artificial Sequence
  Description of Artificial Sequence: Synthetic oligonucleotide
uuaaugugagacagaucag

SEQ ID NO: 246998 - RNA, 19 nt, Artificial Sequence
  Description of Artificial Sequence: Synthetic oligonucleotide
auagcaauaugacucuagu

SEQ ID NO: 246999 - RNA, 19 nt, Artificial Sequence
  Description of Artificial Sequence: Synthetic oligonucleotide
ugggaaucugacaaaacau

SEQ ID NO: 247000 - RNA, 19 nt, Artificial Sequence
  Description of Artificial Sequence: Synthetic oligonucleotide
ucauaguauuauauccaug

SEQ ID NO: 247001 - RNA, 19 nt, Artificial Sequence
  Description of Artificial Sequence: Synthetic oligonucleotide
uguugauacagaugugugu

SEQ ID NO: 247002 - RNA, 19 nt, Artificial Sequence
  Description of Artificial Sequence: Synthetic oligonucleotide
ucagacacggguauuuggu

SEQ ID NO: 247003 - RNA, 19 nt, Artificial Sequence
  Description of Artificial Sequence: Synthetic oligonucleotide
cucggcaauaucauuucgg

SEQ ID NO: 247004 - RNA, 19 nt, Artificial Sequence
  Description of Artificial Sequence: Synthetic oligonucleotide
ucuauaagcagucgagcau

SEQ ID NO: 247005 - RNA, 19 nt, Artificial Sequence
  Description of Artificial Sequence: Synthetic oligonucleotide
uuaauucuguagcaaguau

SEQ ID NO: 247006 - RNA, 19 nt, Artificial Sequence
  Description of Artificial Sequence: Synthetic oligonucleotide
gcaagaaaaggcaacaucc

SEQ ID NO: 247007 - RNA, 19 nt, Artificial Sequence
  Description of Artificial Sequence: Synthetic oligonucleotide
uguagguccacgugugucc

SEQ ID NO: 247008 - RNA, 19 nt, Artificial Sequence
  Description of Artificial Sequence: Synthetic oligonucleotide
caaauuuauauccuuugca

SEQ ID NO: 247009 - RNA, 19 nt, Artificial Sequence
  Description of Artificial Sequence: Synthetic oligonucleotide
uguuggaauaucaguuuga

SEQ ID NO: 247010 - RNA, 19 nt, Artificial Sequence
  Description of Artificial Sequence: Synthetic oligonucleotide
uacuucauaguauuauauc

SEQ ID NO: 247011 - RNA, 19 nt, Artificial Sequence
  Description of Artificial Sequence: Synthetic oligonucleotide
gaaaucgaaagaacccggg

SEQ ID NO: 247012 - RNA, 19 nt, Artificial Sequence
  Description of Artificial Sequence: Synthetic oligonucleotide
aucuaugugcaugugagug

SEQ ID NO: 247013 - RNA, 19 nt, Artificial Sequence
  Description of Artificial Sequence: Synthetic oligonucleotide
gucucucgcggucauaucg

SEQ ID NO: 247014 - RNA, 19 nt, Artificial Sequence
  Description of Artificial Sequence: Synthetic oligonucleotide
uauuauauccaugacuguu

SEQ ID NO: 247015 - RNA, 19 nt, Artificial Sequence
  Description of Artificial Sequence: Synthetic oligonucleotide
augaagacaugggacgugc

SEQ ID NO: 247016 - RNA, 19 nt, Artificial Sequence
  Description of Artificial Sequence: Synthetic oligonucleotide
acacacucagggaauaagc

SEQ ID NO: 247017 - RNA, 19 nt, Artificial Sequence
  Description of Artificial Sequence: Synthetic oligonucleotide
gauagcaagaaaaggcaac

SEQ ID NO: 247018 - RNA, 19 nt, Artificial Sequence
  Description of Artificial Sequence: Synthetic oligonucleotide
ucggcaauaucauuucgga

SEQ ID NO: 247019 - RNA, 19 nt, Artificial Sequence
  Description of Artificial Sequence: Synthetic oligonucleotide
gaaaguugagccuugcaua

SEQ ID NO: 247020 - RNA, 19 nt, Artificial Sequence
  Description of Artificial Sequence: Synthetic oligonucleotide
ucucuguagguccacgugu

SEQ ID NO: 247021 - RNA, 19 nt, Artificial Sequence
  Description of Artificial Sequence: Synthetic oligonucleotide
ugacuguuggaauaucagu

SEQ ID NO: 247022 - RNA, 19 nt, Artificial Sequence
  Description of Artificial Sequence: Synthetic oligonucleotide
ucucucgcggucauaucgg

SEQ ID NO: 247023 - RNA, 19 nt, Artificial Sequence
  Description of Artificial Sequence: Synthetic oligonucleotide
agcagaguguuuccucacc

SEQ ID NO: 247024 - RNA, 19 nt, Artificial Sequence
  Description of Artificial Sequence: Synthetic oligonucleotide
ggaauaucaguuugacugg

SEQ ID NO: 247025 - RNA, 19 nt, Artificial Sequence
  Description of Artificial Sequence: Synthetic oligonucleotide
uuggacaacggacucuaca

SEQ ID NO: 247026 - RNA, 19 nt, Artificial Sequence
  Description of Artificial Sequence: Synthetic oligonucleotide
uauaccaguguaucuggcu

SEQ ID NO: 247027 - RNA, 19 nt, Artificial Sequence
  Description of Artificial Sequence: Synthetic oligonucleotide
uuacauuuguucagugagu

SEQ ID NO: 247028 - RNA, 19 nt, Artificial Sequence
  Description of Artificial Sequence: Synthetic oligonucleotide
ucugccuauuucuacuucu

SEQ ID NO: 247029 - RNA, 19 nt, Artificial Sequence
  Description of Artificial Sequence: Synthetic oligonucleotide
uuuugagaauucauccauc

SEQ ID NO: 247030 - RNA, 19 nt, Artificial Sequence
  Description of Artificial Sequence: Synthetic oligonucleotide
aauuauucaccauccccuu

SEQ ID NO: 247031 - RNA, 19 nt, Artificial Sequence
  Description of Artificial Sequence: Synthetic oligonucleotide
auacugaaguauaugacca

SEQ ID NO: 247032 - RNA, 19 nt, Artificial Sequence
  Description of Artificial Sequence: Synthetic oligonucleotide
aguauaugaccagucacug

SEQ ID NO: 247033 - RNA, 19 nt, Artificial Sequence
  Description of Artificial Sequence: Synthetic oligonucleotide
gucauaucgguauccuggg

SEQ ID NO: 247034 - RNA, 19 nt, Artificial Sequence
  Description of Artificial Sequence: Synthetic oligonucleotide
uauugccaagccuuauuug

SEQ ID NO: 247035 - RNA, 19 nt, Artificial Sequence
  Description of Artificial Sequence: Synthetic oligonucleotide
uuugccuguuggacaacgg

SEQ ID NO: 247036 - RNA, 19 nt, Artificial Sequence
  Description of Artificial Sequence: Synthetic oligonucleotide
ugguauaugaucugauaua

SEQ ID NO: 247037 - RNA, 19 nt, Artificial Sequence
  Description of Artificial Sequence: Synthetic oligonucleotide
aaugggcauuuauuauuug

SEQ ID NO: 247038 - RNA, 19 nt, Artificial Sequence
  Description of Artificial Sequence: Synthetic oligonucleotide
uauaggaggagugguauaa

SEQ ID NO: 247039 - RNA, 19 nt, Artificial Sequence
  Description of Artificial Sequence: Synthetic oligonucleotide
aguccugugcccgaacacc

SEQ ID NO: 247040 - RNA, 19 nt, Artificial Sequence
  Description of Artificial Sequence: Synthetic oligonucleotide
acggguauuuggucguggc

SEQ ID NO: 247041 - RNA, 19 nt, Artificial Sequence
  Description of Artificial Sequence: Synthetic oligonucleotide
uggaacuugggaagggaga

SEQ ID NO: 247042 - RNA, 19 nt, Artificial Sequence
  Description of Artificial Sequence: Synthetic oligonucleotide
acaucuauuucccugcaua

SEQ ID NO: 247043 - RNA, 19 nt, Artificial Sequence
  Description of Artificial Sequence: Synthetic oligonucleotide
aguacuucauaguauuaua

SEQ ID NO: 247044 - RNA, 19 nt, Artificial Sequence
  Description of Artificial Sequence: Synthetic oligonucleotide
uauuuggucguggcgaucu

SEQ ID NO: 247045 - RNA, 19 nt, Artificial Sequence
  Description of Artificial Sequence: Synthetic oligonucleotide
uuaggaaaguugagccuug

SEQ ID NO: 247046 - RNA, 19 nt, Artificial Sequence
  Description of Artificial Sequence: Synthetic oligonucleotide
cugauauaaauaaugcaua

SEQ ID NO: 247047 - RNA, 19 nt, Artificial Sequence
  Description of Artificial Sequence: Synthetic oligonucleotide
gcagucgagcauuaaauag

SEQ ID NO: 247048 - RNA, 19 nt, Artificial Sequence
  Description of Artificial Sequence: Synthetic oligonucleotide
uggagaguugcuuccugag

SEQ ID NO: 247049 - RNA, 19 nt, Artificial Sequence
  Description of Artificial Sequence: Synthetic oligonucleotide
ucucgcuucaguucuucug

SEQ ID NO: 247050 - RNA, 19 nt, Artificial Sequence
  Description of Artificial Sequence: Synthetic oligonucleotide
agagauacugaaguauaug

SEQ ID NO: 247051 - RNA, 19 nt, Artificial Sequence
  Description of Artificial Sequence: Synthetic oligonucleotide
ccauaggucccauugagcc

SEQ ID NO: 247052 - RNA, 19 nt, Artificial Sequence
  Description of Artificial Sequence: Synthetic oligonucleotide
uuguuuggcacaggaaacc

SEQ ID NO: 247053 - RNA, 19 nt, Artificial Sequence
  Description of Artificial Sequence: Synthetic oligonucleotide
gugacaugaagacauggga

SEQ ID NO: 247054 - RNA, 19 nt, Artificial Sequence
  Description of Artificial Sequence: Synthetic oligonucleotide
uuaagcauauacagucaua

SEQ ID NO: 247055 - RNA, 19 nt, Artificial Sequence
  Description of Artificial Sequence: Synthetic oligonucleotide
uucguguccagugucguug

SEQ ID NO: 247056 - RNA, 19 nt, Artificial Sequence
  Description of Artificial Sequence: Synthetic oligonucleotide
aggcauauaccaguguauc

SEQ ID NO: 247057 - RNA, 19 nt, Artificial Sequence
  Description of Artificial Sequence: Synthetic oligonucleotide
cacccuugaaaacucuggg

SEQ ID NO: 247058 - RNA, 19 nt, Artificial Sequence
  Description of Artificial Sequence: Synthetic oligonucleotide
agcucggcaauaucauuuc

SEQ ID NO: 247059 - RNA, 19 nt, Artificial Sequence
  Description of Artificial Sequence: Synthetic oligonucleotide
acggacucuacauagcaau

SEQ ID NO: 247060 - RNA, 19 nt, Artificial Sequence
  Description of Artificial Sequence: Synthetic oligonucleotide
ucuauaggaggagugguau

SEQ ID NO: 247061 - RNA, 19 nt, Artificial Sequence
  Description of Artificial Sequence: Synthetic oligonucleotide
guuugacugguauaugauc

SEQ ID NO: 247062 - RNA, 19 nt, Artificial Sequence
  Description of Artificial Sequence: Synthetic oligonucleotide
cugaaguauaugaccaguc

SEQ ID NO: 247063 - RNA, 19 nt, Artificial Sequence
  Description of Artificial Sequence: Synthetic oligonucleotide
gucccauugagccccgugg

SEQ ID NO: 247064 - RNA, 19 nt, Artificial Sequence
  Description of Artificial Sequence: Synthetic oligonucleotide
uggaagguagguguuugag

SEQ ID NO: 247065 - RNA, 19 nt, Artificial Sequence
  Description of Artificial Sequence: Synthetic oligonucleotide
ugacucuaguuaauucugu

SEQ ID NO: 247066 - RNA, 19 nt, Artificial Sequence
  Description of Artificial Sequence: Synthetic oligonucleotide
uuggaauaucaguuugacu

SEQ ID NO: 247067 - RNA, 19 nt, Artificial Sequence
  Description of Artificial Sequence: Synthetic oligonucleotide
cacguggugagcucgcccg

SEQ ID NO: 247068 - RNA, 19 nt, Artificial Sequence
  Description of Artificial Sequence: Synthetic oligonucleotide
auagauuccagcagagugu

SEQ ID NO: 247069 - RNA, 19 nt, Artificial Sequence
  Description of Artificial Sequence: Synthetic oligonucleotide
aagcagucgagcauuaaau

SEQ ID NO: 247070 - RNA, 19 nt, Artificial Sequence
  Description of Artificial Sequence: Synthetic oligonucleotide
uaacaauuacagccuuugu

SEQ ID NO: 247071 - RNA, 19 nt, Artificial Sequence
  Description of Artificial Sequence: Synthetic oligonucleotide
uugccuguuggacaacgga

SEQ ID NO: 247072 - RNA, 19 nt, Artificial Sequence
  Description of Artificial Sequence: Synthetic oligonucleotide
ugagggauauggaacccaa

SEQ ID NO: 247073 - RNA, 19 nt, Artificial Sequence
  Description of Artificial Sequence: Synthetic oligonucleotide
guauauagauagcaagaaa

SEQ ID NO: 247074 - RNA, 19 nt, Artificial Sequence
  Description of Artificial Sequence: Synthetic oligonucleotide
gguucuauaagcagucgag

SEQ ID NO: 247075 - RNA, 19 nt, Artificial Sequence
  Description of Artificial Sequence: Synthetic oligonucleotide
cauaggucccauugagccc

SEQ ID NO: 247076 - RNA, 19 nt, Artificial Sequence
  Description of Artificial Sequence: Synthetic oligonucleotide
ggggauauuaggaaaguug

SEQ ID NO: 247077 - RNA, 19 nt, Artificial Sequence
  Description of Artificial Sequence: Synthetic oligonucleotide
guucuauaagcagucgagc

SEQ ID NO: 247078 - RNA, 19 nt, Artificial Sequence
  Description of Artificial Sequence: Synthetic oligonucleotide
augacuguuggaauaucag

SEQ ID NO: 247079 - RNA, 19 nt, Artificial Sequence
  Description of Artificial Sequence: Synthetic oligonucleotide
uuguggggauauuaggaaa

SEQ ID NO: 247080 - RNA, 19 nt, Artificial Sequence
  Description of Artificial Sequence: Synthetic oligonucleotide
uuggucguggcgaucuugu

SEQ ID NO: 247081 - RNA, 19 nt, Artificial Sequence
  Description of Artificial Sequence: Synthetic oligonucleotide
ucggccgaaguuaucugug

SEQ ID NO: 247082 - RNA, 19 nt, Artificial Sequence
  Description of Artificial Sequence: Synthetic oligonucleotide
ucuggaauacacuguccaa

SEQ ID NO: 247083 - RNA, 19 nt, Artificial Sequence
  Description of Artificial Sequence: Synthetic oligonucleotide
ugauauguuguaagacaua

SEQ ID NO: 247084 - RNA, 19 nt, Artificial Sequence
  Description of Artificial Sequence: Synthetic oligonucleotide
gcaggaaaucgaaagaacc

SEQ ID NO: 247085 - RNA, 19 nt, Artificial Sequence
  Description of Artificial Sequence: Synthetic oligonucleotide
acucuacauagcaauauga

SEQ ID NO: 247086 - RNA, 19 nt, Artificial Sequence
  Description of Artificial Sequence: Synthetic oligonucleotide
augacucuaguuaauucug

SEQ ID NO: 247087 - RNA, 19 nt, Artificial Sequence
  Description of Artificial Sequence: Synthetic oligonucleotide
acaacggacucuacauagc

SEQ ID NO: 247088 - RNA, 19 nt, Artificial Sequence
  Description of Artificial Sequence: Synthetic oligonucleotide
caugacuguuggaauauca

SEQ ID NO: 247089 - RNA, 19 nt, Artificial Sequence
  Description of Artificial Sequence: Synthetic oligonucleotide
cagucgagcauuaaauaga

SEQ ID NO: 247090 - RNA, 19 nt, Artificial Sequence
  Description of Artificial Sequence: Synthetic oligonucleotide
uauccaugacuguuggaau

SEQ ID NO: 247091 - RNA, 19 nt, Artificial Sequence
  Description of Artificial Sequence: Synthetic oligonucleotide
aaguauuggagcguauaua

SEQ ID NO: 247092 - RNA, 19 nt, Artificial Sequence
  Description of Artificial Sequence: Synthetic oligonucleotide
ugggacgugcuauggauaa

SEQ ID NO: 247093 - RNA, 19 nt, Artificial Sequence
  Description of Artificial Sequence: Synthetic oligonucleotide
aguugagccuugcauaguu

SEQ ID NO: 247094 - RNA, 19 nt, Artificial Sequence
  Description of Artificial Sequence: Synthetic oligonucleotide
uuuauauccuuugcagcau

SEQ ID NO: 247095 - RNA, 19 nt, Artificial Sequence
  Description of Artificial Sequence: Synthetic oligonucleotide
ggaaaucgaaagaacccgg

SEQ ID NO: 247096 - RNA, 19 nt, Artificial Sequence
  Description of Artificial Sequence: Synthetic oligonucleotide
uauaggaguuugugagcug

SEQ ID NO: 247097 - RNA, 19 nt, Artificial Sequence
  Description of Artificial Sequence: Synthetic oligonucleotide
uaucuaugugcaugugagu

SEQ ID NO: 247098 - RNA, 19 nt, Artificial Sequence
  Description of Artificial Sequence: Synthetic oligonucleotide
gaauagucauccccagauc

SEQ ID NO: 247099 - RNA, 19 nt, Artificial Sequence
  Description of Artificial Sequence: Synthetic oligonucleotide
gacaugggacgugcuaugg

SEQ ID NO: 247100 - RNA, 19 nt, Artificial Sequence
  Description of Artificial Sequence: Synthetic oligonucleotide
uaacaucuauaggaggagu

SEQ ID NO: 247101 - RNA, 19 nt, Artificial Sequence
  Description of Artificial Sequence: Synthetic oligonucleotide
ugcauaaaaugaugcucaa

SEQ ID NO: 247102 - RNA, 19 nt, Artificial Sequence
  Description of Artificial Sequence: Synthetic oligonucleotide
uuauauccuuugcagcauu

SEQ ID NO: 247103 - RNA, 19 nt, Artificial Sequence
  Description of Artificial Sequence: Synthetic oligonucleotide
ccuugcauaguuuugagaa

SEQ ID NO: 247104 - RNA, 19 nt, Artificial Sequence
  Description of Artificial Sequence: Synthetic oligonucleotide
gggauauuaggaaaguuga

SEQ ID NO: 247105 - RNA, 19 nt, Artificial Sequence
  Description of Artificial Sequence: Synthetic oligonucleotide
guuuugagaauucauccau

SEQ ID NO: 247106 - RNA, 19 nt, Artificial Sequence
  Description of Artificial Sequence: Synthetic oligonucleotide
gacauauaugaaagcugug

SEQ ID NO: 247107 - RNA, 19 nt, Artificial Sequence
  Description of Artificial Sequence: Synthetic oligonucleotide
aguugcuuccugagaaagg

SEQ ID NO: 247108 - RNA, 19 nt, Artificial Sequence
  Description of Artificial Sequence: Synthetic oligonucleotide
uggugaaccgggugggccc

SEQ ID NO: 247109 - RNA, 19 nt, Artificial Sequence
  Description of Artificial Sequence: Synthetic oligonucleotide
cucuguagguccacgugug

SEQ ID NO: 247110 - RNA, 19 nt, Artificial Sequence
  Description of Artificial Sequence: Synthetic oligonucleotide
uauaagcagucgagcauua

SEQ ID NO: 247111 - RNA, 19 nt, Artificial Sequence
  Description of Artificial Sequence: Synthetic oligonucleotide
uccggccuugcuuaaugug

SEQ ID NO: 247112 - RNA, 19 nt, Artificial Sequence
  Description of Artificial Sequence: Synthetic oligonucleotide
agccuugcauaguuuugag

SEQ ID NO: 247113 - RNA, 19 nt, Artificial Sequence
  Description of Artificial Sequence: Synthetic oligonucleotide
agcagucgagcauuaaaua

SEQ ID NO: 247114 - RNA, 19 nt, Artificial Sequence
  Description of Artificial Sequence: Synthetic oligonucleotide
gcaauaugacucuaguuaa

SEQ ID NO: 247115 - RNA, 19 nt, Artificial Sequence
  Description of Artificial Sequence: Synthetic oligonucleotide
guacacagagugguguugc

SEQ ID NO: 247116 - RNA, 19 nt, Artificial Sequence
  Description of Artificial Sequence: Synthetic oligonucleotide
ggugcaggucuucccaucg

SEQ ID NO: 247117 - RNA, 19 nt, Artificial Sequence
  Description of Artificial Sequence: Synthetic oligonucleotide
uggguucuauaagcagucg

SEQ ID NO: 247118 - RNA, 19 nt, Artificial Sequence
  Description of Artificial Sequence: Synthetic oligonucleotide
gcaagucccagcuuucacc

SEQ ID NO: 247119 - RNA, 19 nt, Artificial Sequence
  Description of Artificial Sequence: Synthetic oligonucleotide
aacuugguauguagcugag

SEQ ID NO: 247120 - RNA, 19 nt, Artificial Sequence
  Description of Artificial Sequence: Synthetic oligonucleotide
ucauaucgguauccugggu

SEQ ID NO: 247121 - RNA, 19 nt, Artificial Sequence
  Description of Artificial Sequence: Synthetic oligonucleotide
gacgugcuauggauaaaag

SEQ ID NO: 247122 - RNA, 19 nt, Artificial Sequence
  Description of Artificial Sequence: Synthetic oligonucleotide
uuuuccgagcacacuucuc

SEQ ID NO: 247123 - RNA, 19 nt, Artificial Sequence
  Description of Artificial Sequence: Synthetic oligonucleotide
cacacccuugaaaacucug

SEQ ID NO: 247124 - RNA, 19 nt, Artificial Sequence
  Description of Artificial Sequence: Synthetic oligonucleotide
ggagcguauauagauagca

SEQ ID NO: 247125 - RNA, 19 nt, Artificial Sequence
  Description of Artificial Sequence: Synthetic oligonucleotide
acaugaagacaugggacgu

SEQ ID NO: 247126 - RNA, 19 nt, Artificial Sequence
  Description of Artificial Sequence: Synthetic oligonucleotide
cauaucgguauccugggua

SEQ ID NO: 247127 - RNA, 19 nt, Artificial Sequence
  Description of Artificial Sequence: Synthetic oligonucleotide
caccauugacauacuugcc

SEQ ID NO: 247128 - RNA, 19 nt, Artificial Sequence
  Description of Artificial Sequence: Synthetic oligonucleotide
guuaauucuguagcaagua

SEQ ID NO: 247129 - RNA, 19 nt, Artificial Sequence
  Description of Artificial Sequence: Synthetic oligonucleotide
cacacacucagggaauaag

SEQ ID NO: 247130 - RNA, 19 nt, Artificial Sequence
  Description of Artificial Sequence: Synthetic oligonucleotide
uccaugacuguuggaauau

SEQ ID NO: 247131 - RNA, 19 nt, Artificial Sequence
  Description of Artificial Sequence: Synthetic oligonucleotide
ugaagacaugggacgugcu

SEQ ID NO: 247132 - RNA, 19 nt, Artificial Sequence
  Description of Artificial Sequence: Synthetic oligonucleotide
gacucuaguuaauucugua

SEQ ID NO: 247133 - RNA, 19 nt, Artificial Sequence
  Description of Artificial Sequence: Synthetic oligonucleotide
ucuguagguccacgugugu

SEQ ID NO: 247134 - RNA, 19 nt, Artificial Sequence
  Description of Artificial Sequence: Synthetic oligonucleotide
aggaacauccucugcugaa

SEQ ID NO: 247135 - RNA, 19 nt, Artificial Sequence
  Description of Artificial Sequence: Synthetic oligonucleotide
agcauuguugggaaguaaa

SEQ ID NO: 247136 - RNA, 19 nt, Artificial Sequence
  Description of Artificial Sequence: Synthetic oligonucleotide
caacggacucuacauagca

SEQ ID NO: 247137 - RNA, 19 nt, Artificial Sequence
  Description of Artificial Sequence: Synthetic oligonucleotide
ggauauuaggaaaguugag

SEQ ID NO: 247138 - RNA, 19 nt, Artificial Sequence
  Description of Artificial Sequence: Synthetic oligonucleotide
uccagugucguugggguau

SEQ ID NO: 247139 - RNA, 19 nt, Artificial Sequence
  Description of Artificial Sequence: Synthetic oligonucleotide
aagcacguggugagcucgc

SEQ ID NO: 247140 - RNA, 19 nt, Artificial Sequence
  Description of Artificial Sequence: Synthetic oligonucleotide
agucgagcauuaaauagau

SEQ ID NO: 247141 - RNA, 19 nt, Artificial Sequence
  Description of Artificial Sequence: Synthetic oligonucleotide
uuagaucccugagggauau

SEQ ID NO: 247142 - RNA, 19 nt, Artificial Sequence
  Description of Artificial Sequence: Synthetic oligonucleotide
aguuugacugguauaugau

SEQ ID NO: 247143 - RNA, 19 nt, Artificial Sequence
  Description of Artificial Sequence: Synthetic oligonucleotide
cuaguuaauucuguagcaa

SEQ ID NO: 247144 - RNA, 19 nt, Artificial Sequence
  Description of Artificial Sequence: Synthetic oligonucleotide
cugccuauuucuacuucuc

SEQ ID NO: 247145 - RNA, 19 nt, Artificial Sequence
  Description of Artificial Sequence: Synthetic oligonucleotide
ugucaccauugacauacuu

SEQ ID NO: 247146 - RNA, 19 nt, Artificial Sequence
  Description of Artificial Sequence: Synthetic oligonucleotide
ggaguuugugagcugccug

SEQ ID NO: 247147 - RNA, 19 nt, Artificial Sequence
  Description of Artificial Sequence: Synthetic oligonucleotide
ggaauaagcucugggaauc

SEQ ID NO: 247148 - RNA, 19 nt, Artificial Sequence
  Description of Artificial Sequence: Synthetic oligonucleotide
cauuauuauuauuauuauu

SEQ ID NO: 247149 - RNA, 19 nt, Artificial Sequence
  Description of Artificial Sequence: Synthetic oligonucleotide
ccuaauuauucaccauccc

SEQ ID NO: 247150 - RNA, 19 nt, Artificial Sequence
  Description of Artificial Sequence: Synthetic oligonucleotide
acgugugucccagugccag

SEQ ID NO: 247151 - RNA, 19 nt, Artificial Sequence
  Description of Artificial Sequence: Synthetic oligonucleotide
aauaucaguuugacuggua

SEQ ID NO: 247152 - RNA, 19 nt, Artificial Sequence
  Description of Artificial Sequence: Synthetic oligonucleotide
cagacacggguauuugguc

SEQ ID NO: 247153 - RNA, 19 nt, Artificial Sequence
  Description of Artificial Sequence: Synthetic oligonucleotide
agugucguugggguauuug

SEQ ID NO: 247154 - RNA, 19 nt, Artificial Sequence
  Description of Artificial Sequence: Synthetic oligonucleotide
cauagagauacugaaguau

SEQ ID NO: 247155 - RNA, 19 nt, Artificial Sequence
  Description of Artificial Sequence: Synthetic oligonucleotide
ucuucguguccagugucgu

SEQ ID NO: 247156 - RNA, 19 nt, Artificial Sequence
  Description of Artificial Sequence: Synthetic oligonucleotide
aucgguauccuggguaaca

SEQ ID NO: 247157 - RNA, 19 nt, Artificial Sequence
  Description of Artificial Sequence: Synthetic oligonucleotide
agcucgcggcuucuucucg

SEQ ID NO: 247158 - RNA, 19 nt, Artificial Sequence
  Description of Artificial Sequence: Synthetic oligonucleotide
guuuaucuaugugcaugug

SEQ ID NO: 247159 - RNA, 19 nt, Artificial Sequence
  Description of Artificial Sequence: Synthetic oligonucleotide
gcguauauagauagcaaga

SEQ ID NO: 247160 - RNA, 19 nt, Artificial Sequence
  Description of Artificial Sequence: Synthetic oligonucleotide
aaguugagccuugcauagu

SEQ ID NO: 247161 - RNA, 19 nt, Artificial Sequence
  Description of Artificial Sequence: Synthetic oligonucleotide
gguaucagaucacccagaa

SEQ ID NO: 247162 - RNA, 19 nt, Artificial Sequence
  Description of Artificial Sequence: Synthetic oligonucleotide
ugucgcgguccucuggcuc

SEQ ID NO: 247163 - RNA, 19 nt, Artificial Sequence
  Description of Artificial Sequence: Synthetic oligonucleotide
acucggccgaaguuaucug

SEQ ID NO: 247164 - RNA, 19 nt, Artificial Sequence
  Description of Artificial Sequence: Synthetic oligonucleotide
gaagcucgcggcuucuucu

SEQ ID NO: 247165 - RNA, 19 nt, Artificial Sequence
  Description of Artificial Sequence: Synthetic oligonucleotide
gugauauguuguaagacau

SEQ ID NO: 247166 - RNA, 19 nt, Artificial Sequence
  Description of Artificial Sequence: Synthetic oligonucleotide
ggcucuuaugcaguccagg

SEQ ID NO: 247167 - RNA, 19 nt, Artificial Sequence
  Description of Artificial Sequence: Synthetic oligonucleotide
auuggagcguauauagaua

SEQ ID NO: 247168 - RNA, 19 nt, Artificial Sequence
  Description of Artificial Sequence: Synthetic oligonucleotide
agacagaucaggagauggu

SEQ ID NO: 247169 - RNA, 19 nt, Artificial Sequence
  Description of Artificial Sequence: Synthetic oligonucleotide
ggguucuauaagcagucga

SEQ ID NO: 247170 - RNA, 19 nt, Artificial Sequence
  Description of Artificial Sequence: Synthetic oligonucleotide
cuuaugcaguccaggcuga

SEQ ID NO: 247171 - RNA, 19 nt, Artificial Sequence
  Description of Artificial Sequence: Synthetic oligonucleotide
ggguauuuggucguggcga

SEQ ID NO: 247172 - RNA, 19 nt, Artificial Sequence
  Description of Artificial Sequence: Synthetic oligonucleotide
gagcguauauagauagcaa

SEQ ID NO: 247173 - RNA, 19 nt, Artificial Sequence
  Description of Artificial Sequence: Synthetic oligonucleotide
gcgaucuuguuuuccgagc

SEQ ID NO: 247174 - RNA, 19 nt, Artificial Sequence
  Description of Artificial Sequence: Synthetic oligonucleotide
gcucaaaauaagguggaga

SEQ ID NO: 247175 - RNA, 19 nt, Artificial Sequence
  Description of Artificial Sequence: Synthetic oligonucleotide
accgggugggcccugcccu

SEQ ID NO: 247176 - RNA, 19 nt, Artificial Sequence
  Description of Artificial Sequence: Synthetic oligonucleotide
cucagggaauaagcucugg

SEQ ID NO: 247177 - RNA, 19 nt, Artificial Sequence
  Description of Artificial Sequence: Synthetic oligonucleotide
guauuggagcguauauaga

SEQ ID NO: 247178 - RNA, 19 nt, Artificial Sequence
  Description of Artificial Sequence: Synthetic oligonucleotide
cuguagguccacguguguc

SEQ ID NO: 247179 - RNA, 19 nt, Artificial Sequence
  Description of Artificial Sequence: Synthetic oligonucleotide
uggaacccaaauguccuuu

SEQ ID NO: 247180 - RNA, 19 nt, Artificial Sequence
  Description of Artificial Sequence: Synthetic oligonucleotide
gaauaucaguuugacuggu

SEQ ID NO: 247181 - RNA, 19 nt, Artificial Sequence
  Description of Artificial Sequence: Synthetic oligonucleotide
gugcccgaacaccuucucc

SEQ ID NO: 247182 - RNA, 19 nt, Artificial Sequence
  Description of Artificial Sequence: Synthetic oligonucleotide
uggggauauuaggaaaguu

SEQ ID NO: 247183 - RNA, 19 nt, Artificial Sequence
  Description of Artificial Sequence: Synthetic oligonucleotide
gcucggcaauaucauuucg

SEQ ID NO: 247184 - RNA, 19 nt, Artificial Sequence
  Description of Artificial Sequence: Synthetic oligonucleotide
cagcaggaaaucgaaagaa

SEQ ID NO: 247185 - RNA, 19 nt, Artificial Sequence
  Description of Artificial Sequence: Synthetic oligonucleotide
gacacggguauuuggucgu

SEQ ID NO: 247186 - RNA, 19 nt, Artificial Sequence
  Description of Artificial Sequence: Synthetic oligonucleotide
ggguaacaagugcacagca

SEQ ID NO: 247187 - RNA, 19 nt, Artificial Sequence
  Description of Artificial Sequence: Synthetic oligonucleotide
gugucguugggguauuugu

SEQ ID NO: 247188 - RNA, 19 nt, Artificial Sequence
  Description of Artificial Sequence: Synthetic oligonucleotide
cucugucgcgguccucugg

SEQ ID NO: 247189 - RNA, 19 nt, Artificial Sequence
  Description of Artificial Sequence: Synthetic oligonucleotide
cucggcagcauuguuggga

SEQ ID NO: 247190 - RNA, 19 nt, Artificial Sequence
  Description of Artificial Sequence: Synthetic oligonucleotide
cuuagaucccugagggaua

SEQ ID NO: 247191 - RNA, 19 nt, Artificial Sequence
  Description of Artificial Sequence: Synthetic oligonucleotide
gguauaaagcacaucacuu

SEQ ID NO: 247192 - RNA, 19 nt, Artificial Sequence
  Description of Artificial Sequence: Synthetic oligonucleotide
ggugagcucgcccgaagac

SEQ ID NO: 247193 - RNA, 19 nt, Artificial Sequence
  Description of Artificial Sequence: Synthetic oligonucleotide
ucucgcggucauaucggua

SEQ ID NO: 247194 - RNA, 19 nt, Artificial Sequence
  Description of Artificial Sequence: Synthetic oligonucleotide
caaguauuggagcguauau

SEQ ID NO: 247195 - RNA, 19 nt, Artificial Sequence
  Description of Artificial Sequence: Synthetic oligonucleotide
ucccagugccaggaguagc

SEQ ID NO: 247196 - RNA, 19 nt, Artificial Sequence
  Description of Artificial Sequence: Synthetic oligonucleotide
cacggguauuuggucgugg

SEQ ID NO: 247197 - RNA, 19 nt, Artificial Sequence
  Description of Artificial Sequence: Synthetic oligonucleotide
caguguaucuggcuccuaa

SEQ ID NO: 247198 - RNA, 19 nt, Artificial Sequence
  Description of Artificial Sequence: Synthetic oligonucleotide
guuuuccgagcacacuucu

SEQ ID NO: 247199 - RNA, 19 nt, Artificial Sequence
  Description of Artificial Sequence: Synthetic oligonucleotide
ucucugucgcgguccucug

SEQ ID NO: 247200 - RNA, 19 nt, Artificial Sequence
  Description of Artificial Sequence: Synthetic oligonucleotide
accaucggggaagcucgcg

SEQ ID NO: 247201 - RNA, 19 nt, Artificial Sequence
  Description of Artificial Sequence: Synthetic oligonucleotide
accagucacugggaaauaa

SEQ ID NO: 247202 - RNA, 19 nt, Artificial Sequence
  Description of Artificial Sequence: Synthetic oligonucleotide
aucuauaggaggaguggua

SEQ ID NO: 247203 - RNA, 19 nt, Artificial Sequence
  Description of Artificial Sequence: Synthetic oligonucleotide
cccagaacugggguuauag

SEQ ID NO: 247204 - RNA, 19 nt, Artificial Sequence
  Description of Artificial Sequence: Synthetic oligonucleotide
ggagaguugcuuccugaga

SEQ ID NO: 247205 - RNA, 19 nt, Artificial Sequence
  Description of Artificial Sequence: Synthetic oligonucleotide
uaucgguauccuggguaac

SEQ ID NO: 247206 - RNA, 19 nt, Artificial Sequence
  Description of Artificial Sequence: Synthetic oligonucleotide
caugggacgugcuauggau

SEQ ID NO: 247207 - RNA, 19 nt, Artificial Sequence
  Description of Artificial Sequence: Synthetic oligonucleotide
cucgcggucauaucgguau

SEQ ID NO: 247208 - RNA, 19 nt, Artificial Sequence
  Description of Artificial Sequence: Synthetic oligonucleotide
gagugguauaaagcacauc

SEQ ID NO: 247209 - RNA, 19 nt, Artificial Sequence
  Description of Artificial Sequence: Synthetic oligonucleotide
uuaugcaguccaggcugac

SEQ ID NO: 247210 - RNA, 19 nt, Artificial Sequence
  Description of Artificial Sequence: Synthetic oligonucleotide
auaggaggagugguauaaa

SEQ ID NO: 247211 - RNA, 19 nt, Artificial Sequence
  Description of Artificial Sequence: Synthetic oligonucleotide
cgugcuauggauaaaaguu

SEQ ID NO: 247212 - RNA, 19 nt, Artificial Sequence
  Description of Artificial Sequence: Synthetic oligonucleotide
ccgcuuuuggugucucucg

SEQ ID NO: 247213 - RNA, 19 nt, Artificial Sequence
  Description of Artificial Sequence: Synthetic oligonucleotide
gaaaggucaaugggcauuu

SEQ ID NO: 247214 - RNA, 19 nt, Artificial Sequence
  Description of Artificial Sequence: Synthetic oligonucleotide
ggaauacacuguccaagaa

SEQ ID NO: 247215 - RNA, 19 nt, Artificial Sequence
  Description of Artificial Sequence: Synthetic oligonucleotide
cuauaggaggagugguaua

SEQ ID NO: 247216 - RNA, 19 nt, Artificial Sequence
  Description of Artificial Sequence: Synthetic oligonucleotide
gggcauuuauuauuugccu

SEQ ID NO: 247217 - RNA, 19 nt, Artificial Sequence
  Description of Artificial Sequence: Synthetic oligonucleotide
cuugcauaguuuugagaau

SEQ ID NO: 247218 - RNA, 19 nt, Artificial Sequence
  Description of Artificial Sequence: Synthetic oligonucleotide
uccugagguagaggaacau

SEQ ID NO: 247219 - RNA, 19 nt, Artificial Sequence
  Description of Artificial Sequence: Synthetic oligonucleotide
uccggguagcuggaaaauu

SEQ ID NO: 247220 - RNA, 19 nt, Artificial Sequence
  Description of Artificial Sequence: Synthetic oligonucleotide
cgaaguuaucugugcauug

SEQ ID NO: 247221 - RNA, 19 nt, Artificial Sequence
  Description of Artificial Sequence: Synthetic oligonucleotide
ugucucucgcggucauauc

SEQ ID NO: 247222 - RNA, 19 nt, Artificial Sequence
  Description of Artificial Sequence: Synthetic oligonucleotide
gcacaggaaaccuaauuau

SEQ ID NO: 247223 - RNA, 19 nt, Artificial Sequence
  Description of Artificial Sequence: Synthetic oligonucleotide
ccggcacucacagugguag

SEQ ID NO: 247224 - RNA, 19 nt, Artificial Sequence
  Description of Artificial Sequence: Synthetic oligonucleotide
ucgcggucauaucgguauc

SEQ ID NO: 247225 - RNA, 19 nt, Artificial Sequence
  Description of Artificial Sequence: Synthetic oligonucleotide
cuauaagcagucgagcauu

SEQ ID NO: 247226 - RNA, 19 nt, Artificial Sequence
  Description of Artificial Sequence: Synthetic oligonucleotide
cggguagcuggaaaauucc

SEQ ID NO: 247227 - RNA, 19 nt, Artificial Sequence
  Description of Artificial Sequence: Synthetic oligonucleotide
auaagcagucgagcauuaa

SEQ ID NO: 247228 - RNA, 19 nt, Artificial Sequence
  Description of Artificial Sequence: Synthetic oligonucleotide
ggcauauaccaguguaucu

SEQ ID NO: 247229 - RNA, 19 nt, Artificial Sequence
  Description of Artificial Sequence: Synthetic oligonucleotide
gagaaaggucaaugggcau

SEQ ID NO: 247230 - RNA, 19 nt, Artificial Sequence
  Description of Artificial Sequence: Synthetic oligonucleotide
uucucccgcuuuugguguc

SEQ ID NO: 247231 - RNA, 19 nt, Artificial Sequence
  Description of Artificial Sequence: Synthetic oligonucleotide
cugagggauauggaaccca

SEQ ID NO: 247232 - RNA, 19 nt, Artificial Sequence
  Description of Artificial Sequence: Synthetic oligonucleotide
ggacgugcuauggauaaaa

SEQ ID NO: 247233 - RNA, 19 nt, Artificial Sequence
  Description of Artificial Sequence: Synthetic oligonucleotide
gcuuagaucccugagggau

SEQ ID NO: 247234 - RNA, 19 nt, Artificial Sequence
  Description of Artificial Sequence: Synthetic oligonucleotide
gcacaaaugucauaaucuu

SEQ ID NO: 247235 - RNA, 19 nt, Artificial Sequence
  Description of Artificial Sequence: Synthetic oligonucleotide
agcucgcccgaagacuuca

SEQ ID NO: 247236 - RNA, 19 nt, Artificial Sequence
  Description of Artificial Sequence: Synthetic oligonucleotide
ugaaccgggugggcccugc

SEQ ID NO: 247237 - RNA, 19 nt, Artificial Sequence
  Description of Artificial Sequence: Synthetic oligonucleotide
agcacucggccgaaguuau

SEQ ID NO: 247238 - RNA, 19 nt, Artificial Sequence
  Description of Artificial Sequence: Synthetic oligonucleotide
gagcagcaagcaucauuaa

SEQ ID NO: 247239 - RNA, 19 nt, Artificial Sequence
  Description of Artificial Sequence: Synthetic oligonucleotide
caggcauauaccaguguau

SEQ ID NO: 247240 - RNA, 19 nt, Artificial Sequence
  Description of Artificial Sequence: Synthetic oligonucleotide
ggucccauugagccccgug

SEQ ID NO: 247241 - RNA, 19 nt, Artificial Sequence
  Description of Artificial Sequence: Synthetic oligonucleotide
uuacagccuuuguucucuu

SEQ ID NO: 247242 - RNA, 19 nt, Artificial Sequence
  Description of Artificial Sequence: Synthetic oligonucleotide
ucucccgcuuuuggugucu

SEQ ID NO: 247243 - RNA, 19 nt, Artificial Sequence
  Description of Artificial Sequence: Synthetic oligonucleotide
ggaagcucgcggcuucuuc

SEQ ID NO: 247244 - RNA, 19 nt, Artificial Sequence
  Description of Artificial Sequence: Synthetic oligonucleotide
acacacacucagggaauaa

SEQ ID NO: 247245 - RNA, 19 nt, Artificial Sequence
  Description of Artificial Sequence: Synthetic oligonucleotide
ccggccuugcuuaauguga

SEQ ID NO: 247246 - RNA, 19 nt, Artificial Sequence
  Description of Artificial Sequence: Synthetic oligonucleotide
cgagcacacuucucugucg

SEQ ID NO: 247247 - RNA, 19 nt, Artificial Sequence
  Description of Artificial Sequence: Synthetic oligonucleotide
acguggugagcucgcccga

SEQ ID NO: 247248 - RNA, 19 nt, Artificial Sequence
  Description of Artificial Sequence: Synthetic oligonucleotide
cguugggguauuugucucc

SEQ ID NO: 247249 - RNA, 19 nt, Artificial Sequence
  Description of Artificial Sequence: Synthetic oligonucleotide
ucccgcuuuuggugucucu

SEQ ID NO: 247250 - RNA, 19 nt, Artificial Sequence
  Description of Artificial Sequence: Synthetic oligonucleotide
cguauauagauagcaagaa

SEQ ID NO: 247251 - RNA, 19 nt, Artificial Sequence
  Description of Artificial Sequence: Synthetic oligonucleotide
cuugggcacaaaugucaua

SEQ ID NO: 247252 - RNA, 19 nt, Artificial Sequence
  Description of Artificial Sequence: Synthetic oligonucleotide
cucggccgaaguuaucugu

SEQ ID NO: 247253 - RNA, 19 nt, Artificial Sequence
  Description of Artificial Sequence: Synthetic oligonucleotide
auuuggucguggcgaucuu

SEQ ID NO: 247254 - RNA, 19 nt, Artificial Sequence
  Description of Artificial Sequence: Synthetic oligonucleotide
guaaagcaaucuucugcuu

SEQ ID NO: 247255 - RNA, 19 nt, Artificial Sequence
  Description of Artificial Sequence: Synthetic oligonucleotide
gcaaguauuggagcguaua

SEQ ID NO: 247256 - RNA, 19 nt, Artificial Sequence
  Description of Artificial Sequence: Synthetic oligonucleotide
cucgcccgaagacuucaga

SEQ ID NO: 247257 - RNA, 19 nt, Artificial Sequence
  Description of Artificial Sequence: Synthetic oligonucleotide
acacggguauuuggucgug

SEQ ID NO: 247258 - RNA, 19 nt, Artificial Sequence
  Description of Artificial Sequence: Synthetic oligonucleotide
cggguauuuggucguggcg

SEQ ID NO: 247259 - RNA, 19 nt, Artificial Sequence
  Description of Artificial Sequence: Synthetic oligonucleotide
guauuuggucguggcgauc

SEQ ID NO: 247260 - RNA, 19 nt, Artificial Sequence
  Description of Artificial Sequence: Synthetic oligonucleotide
gcacguggugagcucgccc

SEQ ID NO: 247261 - RNA, 19 nt, Artificial Sequence
  Description of Artificial Sequence: Synthetic oligonucleotide
augggacgugcuauggaua

SEQ ID NO: 247262 - RNA, 19 nt, Artificial Sequence
  Description of Artificial Sequence: Synthetic oligonucleotide
ggacaacggacucuacaua

SEQ ID NO: 247263 - RNA, 19 nt, Artificial Sequence
  Description of Artificial Sequence: Synthetic oligonucleotide
ggagaacuccuugcaugug

SEQ ID NO: 247264 - RNA, 19 nt, Artificial Sequence
  Description of Artificial Sequence: Synthetic oligonucleotide
ccgagcacacuucucuguc

SEQ ID NO: 247265 - RNA, 19 nt, Artificial Sequence
  Description of Artificial Sequence: Synthetic oligonucleotide
guuggacaacggacucuac

SEQ ID NO: 247266 - RNA, 19 nt, Artificial Sequence
  Description of Artificial Sequence: Synthetic oligonucleotide
gugagcucgcccgaagacu

SEQ ID NO: 247267 - RNA, 19 nt, Artificial Sequence
  Description of Artificial Sequence: Synthetic oligonucleotide
guggggauauuaggaaagu

SEQ ID NO: 247268 - RNA, 19 nt, Artificial Sequence
  Description of Artificial Sequence: Synthetic oligonucleotide
agcaaguauuggagcguau

SEQ ID NO: 247269 - RNA, 19 nt, Artificial Sequence
  Description of Artificial Sequence: Synthetic oligonucleotide
gguauuuggucguggcgau

SEQ ID NO: 247270 - RNA, 19 nt, Artificial Sequence
  Description of Artificial Sequence: Synthetic oligonucleotide
cacuguccaagaacaaauu

SEQ ID NO: 247271 - RNA, 19 nt, Artificial Sequence
  Description of Artificial Sequence: Synthetic oligonucleotide
cacgugugucccagugcca

SEQ ID NO: 247272 - RNA, 19 nt, Artificial Sequence
  Description of Artificial Sequence: Synthetic oligonucleotide
ggacucuacauagcaauau

SEQ ID NO: 247273 - RNA, 19 nt, Artificial Sequence
  Description of Artificial Sequence: Synthetic oligonucleotide
cccgcuuuuggugucucuc

SEQ ID NO: 247274 - RNA, 19 nt, Artificial Sequence
  Description of Artificial Sequence: Synthetic oligonucleotide
ggucguggcgaucuuguuu

SEQ ID NO: 247275 - RNA, 19 nt, Artificial Sequence
  Description of Artificial Sequence: Synthetic oligonucleotide
cgaagacuucagacacggg

SEQ ID NO: 247276 - RNA, 19 nt, Artificial Sequence
  Description of Artificial Sequence: Synthetic oligonucleotide
cagcauuguugggaaguaa

SEQ ID NO: 247277 - RNA, 19 nt, Artificial Sequence
  Description of Artificial Sequence: Synthetic oligonucleotide
cggccgaaguuaucugugc

SEQ ID NO: 247278 - RNA, 19 nt, Artificial Sequence
  Description of Artificial Sequence: Synthetic oligonucleotide
gccuguuggacaacggacu

SEQ ID NO: 247279 - RNA, 19 nt, Artificial Sequence
  Description of Artificial Sequence: Synthetic oligonucleotide
gagcucgcccgaagacuuc

SEQ ID NO: 247280 - RNA, 19 nt, Artificial Sequence
  Description of Artificial Sequence: Synthetic oligonucleotide
cucucgcggucauaucggu

SEQ ID NO: 247281 - RNA, 19 nt, Artificial Sequence
  Description of Artificial Sequence: Synthetic oligonucleotide
ccuggguaacaagugcaca

SEQ ID NO: 247282 - RNA, 19 nt, Artificial Sequence
  Description of Artificial Sequence: Synthetic oligonucleotide
cgcccgaagacuucagaca

SEQ ID NO: 247283 - RNA, 19 nt, Artificial Sequence
  Description of Artificial Sequence: Synthetic oligonucleotide
agauuccagcagaguguuu

SEQ ID NO: 247284 - RNA, 19 nt, Artificial Sequence
  Description of Artificial Sequence: Synthetic oligonucleotide
cuucguguccagugucguu

SEQ ID NO: 247285 - RNA, 19 nt, Artificial Sequence
  Description of Artificial Sequence: Synthetic oligonucleotide
gcucgcccgaagacuucag

SEQ ID NO: 247286 - RNA, 19 nt, Artificial Sequence
  Description of Artificial Sequence: Synthetic oligonucleotide
ccucucuguagguccacgu

SEQ ID NO: 247287 - RNA, 19 nt, Artificial Sequence
  Description of Artificial Sequence: Synthetic oligonucleotide
gucgagcauuaaauagauu

SEQ ID NO: 247288 - RNA, 19 nt, Artificial Sequence
  Description of Artificial Sequence: Synthetic oligonucleotide
acccagaacugggguuaua

SEQ ID NO: 247289 - RNA, 19 nt, Artificial Sequence
  Description of Artificial Sequence: Synthetic oligonucleotide
gcggucauaucgguauccu

SEQ ID NO: 247290 - RNA, 19 nt, Artificial Sequence
  Description of Artificial Sequence: Synthetic oligonucleotide
cggacucuacauagcaaua

SEQ ID NO: 247291 - RNA, 19 nt, Artificial Sequence
  Description of Artificial Sequence: Synthetic oligonucleotide
gggacgugcuauggauaaa

SEQ ID NO: 247292 - RNA, 19 nt, Artificial Sequence
  Description of Artificial Sequence: Synthetic oligonucleotide
ccgaaguuaucugugcauu

SEQ ID NO: 247293 - RNA, 19 nt, Artificial Sequence
  Description of Artificial Sequence: Synthetic oligonucleotide
cggggaagcucgcggcuuc

SEQ ID NO: 247294 - RNA, 19 nt, Artificial Sequence
  Description of Artificial Sequence: Synthetic oligonucleotide
ccccuuggagccaugucuu

SEQ ID NO: 247295 - RNA, 19 nt, Artificial Sequence
  Description of Artificial Sequence: Synthetic oligonucleotide
cggcaauaucauuucggau

SEQ ID NO: 247296 - RNA, 19 nt, Artificial Sequence
  Description of Artificial Sequence: Synthetic oligonucleotide
cacccagaacugggguuau

SEQ ID NO: 247297 - RNA, 19 nt, Artificial Sequence
  Description of Artificial Sequence: Synthetic oligonucleotide
ccuccccggcacggaggag

SEQ ID NO: 247298 - RNA, 19 nt, Artificial Sequence
  Description of Artificial Sequence: Synthetic oligonucleotide
cagugucguugggguauuu

SEQ ID NO: 247299 - RNA, 19 nt, Artificial Sequence
  Description of Artificial Sequence: Synthetic oligonucleotide
ccagugucguugggguauu

SEQ ID NO: 247300 - RNA, 19 nt, Artificial Sequence
  Description of Artificial Sequence: Synthetic oligonucleotide
ugaauuuuaaccauaauaa

SEQ ID NO: 247301 - RNA, 19 nt, Artificial Sequence
  Description of Artificial Sequence: Synthetic oligonucleotide
aauuauacuagaaucaggg

SEQ ID NO: 247302 - RNA, 19 nt, Artificial Sequence
  Description of Artificial Sequence: Synthetic oligonucleotide
aauaaauucagacccacug

SEQ ID NO: 247303 - RNA, 19 nt, Artificial Sequence
  Description of Artificial Sequence: Synthetic oligonucleotide
aagacaaguacuuuaauga

SEQ ID NO: 247304 - RNA, 19 nt, Artificial Sequence
  Description of Artificial Sequence: Synthetic oligonucleotide
aaaacuuuccuugaauccc

SEQ ID NO: 247305 - RNA, 19 nt, Artificial Sequence
  Description of Artificial Sequence: Synthetic oligonucleotide
aaaguuaccacuugcagcu

SEQ ID NO: 247306 - RNA, 19 nt, Artificial Sequence
  Description of Artificial Sequence: Synthetic oligonucleotide
uguauuaggagauauugag

SEQ ID NO: 247307 - RNA, 19 nt, Artificial Sequence
  Description of Artificial Sequence: Synthetic oligonucleotide
ucuaaugacggcaagugag

SEQ ID NO: 247308 - RNA, 19 nt, Artificial Sequence
  Description of Artificial Sequence: Synthetic oligonucleotide
uaaaucgauagcaaaaucu

SEQ ID NO: 247309 - RNA, 19 nt, Artificial Sequence
  Description of Artificial Sequence: Synthetic oligonucleotide
aaaauuaauacugacugca

SEQ ID NO: 247310 - RNA, 19 nt, Artificial Sequence
  Description of Artificial Sequence: Synthetic oligonucleotide
uauacuagaaucaggguca

SEQ ID NO: 247311 - RNA, 19 nt, Artificial Sequence
  Description of Artificial Sequence: Synthetic oligonucleotide
gaaaucauuccccacaaag

SEQ ID NO: 247312 - RNA, 19 nt, Artificial Sequence
  Description of Artificial Sequence: Synthetic oligonucleotide
ucuuaauuccuggagaugg

SEQ ID NO: 247313 - RNA, 19 nt, Artificial Sequence
  Description of Artificial Sequence: Synthetic oligonucleotide
aguaucguugcuuccaacc

SEQ ID NO: 247314 - RNA, 19 nt, Artificial Sequence
  Description of Artificial Sequence: Synthetic oligonucleotide
acauaaaacagugagauca

SEQ ID NO: 247315 - RNA, 19 nt, Artificial Sequence
  Description of Artificial Sequence: Synthetic oligonucleotide
uuauacuagaaucaggguc

SEQ ID NO: 247316 - RNA, 19 nt, Artificial Sequence
  Description of Artificial Sequence: Synthetic oligonucleotide
uaccuaauuauucaugugc

SEQ ID NO: 247317 - RNA, 19 nt, Artificial Sequence
  Description of Artificial Sequence: Synthetic oligonucleotide
uguucuuauaguaucguug

SEQ ID NO: 247318 - RNA, 19 nt, Artificial Sequence
  Description of Artificial Sequence: Synthetic oligonucleotide
aaaaugaagucauguagug

SEQ ID NO: 247319 - RNA, 19 nt, Artificial Sequence
  Description of Artificial Sequence: Synthetic oligonucleotide
uauauguuaaccaaacgau

SEQ ID NO: 247320 - RNA, 19 nt, Artificial Sequence
  Description of Artificial Sequence: Synthetic oligonucleotide
aaagcuuaauuccagcugu

SEQ ID NO: 247321 - RNA, 19 nt, Artificial Sequence
  Description of Artificial Sequence: Synthetic oligonucleotide
aagacuauuucuccuguuc

SEQ ID NO: 247322 - RNA, 19 nt, Artificial Sequence
  Description of Artificial Sequence: Synthetic oligonucleotide
uauauaauggugaaaggau

SEQ ID NO: 247323 - RNA, 19 nt, Artificial Sequence
  Description of Artificial Sequence: Synthetic oligonucleotide
uggccuaaaguucuaaagg

SEQ ID NO: 247324 - RNA, 19 nt, Artificial Sequence
  Description of Artificial Sequence: Synthetic oligonucleotide
uucacaauccuuaaccuca

SEQ ID NO: 247325 - RNA, 19 nt, Artificial Sequence
  Description of Artificial Sequence: Synthetic oligonucleotide
ucccuaaucucuaaugacg

SEQ ID NO: 247326 - RNA, 19 nt, Artificial Sequence
  Description of Artificial Sequence: Synthetic oligonucleotide
uggauuacuggcuacauga

SEQ ID NO: 247327 - RNA, 19 nt, Artificial Sequence
  Description of Artificial Sequence: Synthetic oligonucleotide
uucccauuuaaaucgauag

SEQ ID NO: 247328 - RNA, 19 nt, Artificial Sequence
  Description of Artificial Sequence: Synthetic oligonucleotide
ugaaguuagguucaugugu

SEQ ID NO: 247329 - RNA, 19 nt, Artificial Sequence
  Description of Artificial Sequence: Synthetic oligonucleotide
auaacaucaccuccaagac

SEQ ID NO: 247330 - RNA, 19 nt, Artificial Sequence
  Description of Artificial Sequence: Synthetic oligonucleotide
ucuaguaugcugaauguac

SEQ ID NO: 247331 - RNA, 19 nt, Artificial Sequence
  Description of Artificial Sequence: Synthetic oligonucleotide
gaaaacuuuccuugaaucc

SEQ ID NO: 247332 - RNA, 19 nt, Artificial Sequence
  Description of Artificial Sequence: Synthetic oligonucleotide
uaucgaagaacccagcaca

SEQ ID NO: 247333 - RNA, 19 nt, Artificial Sequence
  Description of Artificial Sequence: Synthetic oligonucleotide
guauauguuaaccaaacga

SEQ ID NO: 247334 - RNA, 19 nt, Artificial Sequence
  Description of Artificial Sequence: Synthetic oligonucleotide
aacauaugcucuaguaugc

SEQ ID NO: 247335 - RNA, 19 nt, Artificial Sequence
  Description of Artificial Sequence: Synthetic oligonucleotide
ucaauuauacuagaaucag

SEQ ID NO: 247336 - RNA, 19 nt, Artificial Sequence
  Description of Artificial Sequence: Synthetic oligonucleotide
ugcucuaguaugcugaaug

SEQ ID NO: 247337 - RNA, 19 nt, Artificial Sequence
  Description of Artificial Sequence: Synthetic oligonucleotide
uuauggugaaguuagguuc

SEQ ID NO: 247338 - RNA, 19 nt, Artificial Sequence
  Description of Artificial Sequence: Synthetic oligonucleotide
ugcauaauggaauggauaa

SEQ ID NO: 247339 - RNA, 19 nt, Artificial Sequence
  Description of Artificial Sequence: Synthetic oligonucleotide
acaucuauuggcucugugg

SEQ ID NO: 247340 - RNA, 19 nt, Artificial Sequence
  Description of Artificial Sequence: Synthetic oligonucleotide
ucuaaaggcugccuggucc

SEQ ID NO: 247341 - RNA, 19 nt, Artificial Sequence
  Description of Artificial Sequence: Synthetic oligonucleotide
cuugucuuggauuacuggc

SEQ ID NO: 247342 - RNA, 19 nt, Artificial Sequence
  Description of Artificial Sequence: Synthetic oligonucleotide
uuacaaaagcuuaauucca

SEQ ID NO: 247343 - RNA, 19 nt, Artificial Sequence
  Description of Artificial Sequence: Synthetic oligonucleotide
auaucgaagaacccagcac

SEQ ID NO: 247344 - RNA, 19 nt, Artificial Sequence
  Description of Artificial Sequence: Synthetic oligonucleotide
uaaaauuaauacugacugc

SEQ ID NO: 247345 - RNA, 19 nt, Artificial Sequence
  Description of Artificial Sequence: Synthetic oligonucleotide
uggauaauaccauuuccag

SEQ ID NO: 247346 - RNA, 19 nt, Artificial Sequence
  Description of Artificial Sequence: Synthetic oligonucleotide
uguucgucuucuaaaacug

SEQ ID NO: 247347 - RNA, 19 nt, Artificial Sequence
  Description of Artificial Sequence: Synthetic oligonucleotide
uucguucauccacaaaugg

SEQ ID NO: 247348 - RNA, 19 nt, Artificial Sequence
  Description of Artificial Sequence: Synthetic oligonucleotide
uacaaaagcuuaauuccag

SEQ ID NO: 247349 - RNA, 19 nt, Artificial Sequence
  Description of Artificial Sequence: Synthetic oligonucleotide
aacauaaaacagugagauc

SEQ ID NO: 247350 - RNA, 19 nt, Artificial Sequence
  Description of Artificial Sequence: Synthetic oligonucleotide
aaaugaagucauguagugg

SEQ ID NO: 247351 - RNA, 19 nt, Artificial Sequence
  Description of Artificial Sequence: Synthetic oligonucleotide
auauugagggacuagaguu

SEQ ID NO: 247352 - RNA, 19 nt, Artificial Sequence
  Description of Artificial Sequence: Synthetic oligonucleotide
cuuguauuaggagauauug

SEQ ID NO: 247353 - RNA, 19 nt, Artificial Sequence
  Description of Artificial Sequence: Synthetic oligonucleotide
uaccuucaaagucugaggc

SEQ ID NO: 247354 - RNA, 19 nt, Artificial Sequence
  Description of Artificial Sequence: Synthetic oligonucleotide
aguacuguaguuuuauuaa

SEQ ID NO: 247355 - RNA, 19 nt, Artificial Sequence
  Description of Artificial Sequence: Synthetic oligonucleotide
agaaaguuaccacuugcag

SEQ ID NO: 247356 - RNA, 19 nt, Artificial Sequence
  Description of Artificial Sequence: Synthetic oligonucleotide
aaguacuguaguuuuauua

SEQ ID NO: 247357 - RNA, 19 nt, Artificial Sequence
  Description of Artificial Sequence: Synthetic oligonucleotide
guguuaauauuccacuagg

SEQ ID NO: 247358 - RNA, 19 nt, Artificial Sequence
  Description of Artificial Sequence: Synthetic oligonucleotide
uugcagauugacauaacca

SEQ ID NO: 247359 - RNA, 19 nt, Artificial Sequence
  Description of Artificial Sequence: Synthetic oligonucleotide
uuguggaucuuuaaaauua

SEQ ID NO: 247360 - RNA, 19 nt, Artificial Sequence
  Description of Artificial Sequence: Synthetic oligonucleotide
uguuaauauuccacuagga

SEQ ID NO: 247361 - RNA, 19 nt, Artificial Sequence
  Description of Artificial Sequence: Synthetic oligonucleotide
uugacauaaguuuuggaau

SEQ ID NO: 247362 - RNA, 19 nt, Artificial Sequence
  Description of Artificial Sequence: Synthetic oligonucleotide
uguguuuacaagcaauaau

SEQ ID NO: 247363 - RNA, 19 nt, Artificial Sequence
  Description of Artificial Sequence: Synthetic oligonucleotide
uuacuaugcauccucauuu

SEQ ID NO: 247364 - RNA, 19 nt, Artificial Sequence
  Description of Artificial Sequence: Synthetic oligonucleotide
uauuugacauaaguuuugg

SEQ ID NO: 247365 - RNA, 19 nt, Artificial Sequence
  Description of Artificial Sequence: Synthetic oligonucleotide
cugguaauaauaucgaaga

SEQ ID NO: 247366 - RNA, 19 nt, Artificial Sequence
  Description of Artificial Sequence: Synthetic oligonucleotide
cuagaguuacuaugcaucc

SEQ ID NO: 247367 - RNA, 19 nt, Artificial Sequence
  Description of Artificial Sequence: Synthetic oligonucleotide
uauaauggugaaaggauuu

SEQ ID NO: 247368 - RNA, 19 nt, Artificial Sequence
  Description of Artificial Sequence: Synthetic oligonucleotide
auaaccugacguuauccuc

SEQ ID NO: 247369 - RNA, 19 nt, Artificial Sequence
  Description of Artificial Sequence: Synthetic oligonucleotide
auaauaucgaagaacccag

SEQ ID NO: 247370 - RNA, 19 nt, Artificial Sequence
  Description of Artificial Sequence: Synthetic oligonucleotide
uuuaaaucgauagcaaaau

SEQ ID NO: 247371 - RNA, 19 nt, Artificial Sequence
  Description of Artificial Sequence: Synthetic oligonucleotide
auaacauggccuaaaguuc

SEQ ID NO: 247372 - RNA, 19 nt, Artificial Sequence
  Description of Artificial Sequence: Synthetic oligonucleotide
acaauccuuaaccucaugu

SEQ ID NO: 247373 - RNA, 19 nt, Artificial Sequence
  Description of Artificial Sequence: Synthetic oligonucleotide
uuguauuaggagauauuga

SEQ ID NO: 247374 - RNA, 19 nt, Artificial Sequence
  Description of Artificial Sequence: Synthetic oligonucleotide
auggccuaaaguucuaaag

SEQ ID NO: 247375 - RNA, 19 nt, Artificial Sequence
  Description of Artificial Sequence: Synthetic oligonucleotide
cuaaugacggcaagugagg

SEQ ID NO: 247376 - RNA, 19 nt, Artificial Sequence
  Description of Artificial Sequence: Synthetic oligonucleotide
aaucgauagcaaaaucuuc

SEQ ID NO: 247377 - RNA, 19 nt, Artificial Sequence
  Description of Artificial Sequence: Synthetic oligonucleotide
aaccaaacgaucaauugca

SEQ ID NO: 247378 - RNA, 19 nt, Artificial Sequence
  Description of Artificial Sequence: Synthetic oligonucleotide
aggcaaauggugcauaaug

SEQ ID NO: 247379 - RNA, 19 nt, Artificial Sequence
  Description of Artificial Sequence: Synthetic oligonucleotide
auaaauucagacccacugu

SEQ ID NO: 247380 - RNA, 19 nt, Artificial Sequence
  Description of Artificial Sequence: Synthetic oligonucleotide
cacaaggaagacuaucugc

SEQ ID NO: 247381 - RNA, 19 nt, Artificial Sequence
  Description of Artificial Sequence: Synthetic oligonucleotide
ucguucauccacaaauggc

SEQ ID NO: 247382 - RNA, 19 nt, Artificial Sequence
  Description of Artificial Sequence: Synthetic oligonucleotide
uguccauaccuaauuauuc

SEQ ID NO: 247383 - RNA, 19 nt, Artificial Sequence
  Description of Artificial Sequence: Synthetic oligonucleotide
uccuugaaucccaugacac

SEQ ID NO: 247384 - RNA, 19 nt, Artificial Sequence
  Description of Artificial Sequence: Synthetic oligonucleotide
gcuggcuugaauuuuaacc

SEQ ID NO: 247385 - RNA, 19 nt, Artificial Sequence
  Description of Artificial Sequence: Synthetic oligonucleotide
uuaaaucgauagcaaaauc

SEQ ID NO: 247386 - RNA, 19 nt, Artificial Sequence
  Description of Artificial Sequence: Synthetic oligonucleotide
ucggaauuucucaucagcu

SEQ ID NO: 247387 - RNA, 19 nt, Artificial Sequence
  Description of Artificial Sequence: Synthetic oligonucleotide
gaguucucuuuccagauac

SEQ ID NO: 247388 - RNA, 19 nt, Artificial Sequence
  Description of Artificial Sequence: Synthetic oligonucleotide
uuaaccucauguccaaacu

SEQ ID NO: 247389 - RNA, 19 nt, Artificial Sequence
  Description of Artificial Sequence: Synthetic oligonucleotide
aacauaggacugaaccacc

SEQ ID NO: 247390 - RNA, 19 nt, Artificial Sequence
  Description of Artificial Sequence: Synthetic oligonucleotide
ccgauuaaagccaagcugg

SEQ ID NO: 247391 - RNA, 19 nt, Artificial Sequence
  Description of Artificial Sequence: Synthetic oligonucleotide
uuuugugcccuucucaaau

SEQ ID NO: 247392 - RNA, 19 nt, Artificial Sequence
  Description of Artificial Sequence: Synthetic oligonucleotide
uccgccaugauggagguag

SEQ ID NO: 247393 - RNA, 19 nt, Artificial Sequence
  Description of Artificial Sequence: Synthetic oligonucleotide
aaauuaauacugacugcag

SEQ ID NO: 247394 - RNA, 19 nt, Artificial Sequence
  Description of Artificial Sequence: Synthetic oligonucleotide
uauaguaucguugcuucca

SEQ ID NO: 247395 - RNA, 19 nt, Artificial Sequence
  Description of Artificial Sequence: Synthetic oligonucleotide
guauauaauggugaaagga

SEQ ID NO: 247396 - RNA, 19 nt, Artificial Sequence
  Description of Artificial Sequence: Synthetic oligonucleotide
aacgaucaauugcaccuuc

SEQ ID NO: 247397 - RNA, 19 nt, Artificial Sequence
  Description of Artificial Sequence: Synthetic oligonucleotide
uugacauaaccacuuucug

SEQ ID NO: 247398 - RNA, 19 nt, Artificial Sequence
  Description of Artificial Sequence: Synthetic oligonucleotide
auauguuaaccaaacgauc

SEQ ID NO: 247399 - RNA, 19 nt, Artificial Sequence
  Description of Artificial Sequence: Synthetic oligonucleotide
gaauggauaauaccauuuc

SEQ ID NO: 247400 - RNA, 19 nt, Artificial Sequence
  Description of Artificial Sequence: Synthetic oligonucleotide
gacugaaccaccuuacguc

SEQ ID NO: 247401 - RNA, 19 nt, Artificial Sequence
  Description of Artificial Sequence: Synthetic oligonucleotide
aguuagguucauguguagc

SEQ ID NO: 247402 - RNA, 19 nt, Artificial Sequence
  Description of Artificial Sequence: Synthetic oligonucleotide
uuuggaaucugaguuugcc

SEQ ID NO: 247403 - RNA, 19 nt, Artificial Sequence
  Description of Artificial Sequence: Synthetic oligonucleotide
auuauggugaaguuagguu

SEQ ID NO: 247404 - RNA, 19 nt, Artificial Sequence
  Description of Artificial Sequence: Synthetic oligonucleotide
agcccugguaauaauaucg

SEQ ID NO: 247405 - RNA, 19 nt, Artificial Sequence
  Description of Artificial Sequence: Synthetic oligonucleotide
uucagccgaaugaagauaa

SEQ ID NO: 247406 - RNA, 19 nt, Artificial Sequence
  Description of Artificial Sequence: Synthetic oligonucleotide
ucccauuuaaaucgauagc

SEQ ID NO: 247407 - RNA, 19 nt, Artificial Sequence
  Description of Artificial Sequence: Synthetic oligonucleotide
cuuaaccucauguccaaac

SEQ ID NO: 247408 - RNA, 19 nt, Artificial Sequence
  Description of Artificial Sequence: Synthetic oligonucleotide
uaucguugcuuccaaccag

SEQ ID NO: 247409 - RNA, 19 nt, Artificial Sequence
  Description of Artificial Sequence: Synthetic oligonucleotide
ucucuaaugacggcaagug

SEQ ID NO: 247410 - RNA, 19 nt, Artificial Sequence
  Description of Artificial Sequence: Synthetic oligonucleotide
cuaauuauucaugugcauc

SEQ ID NO: 247411 - RNA, 19 nt, Artificial Sequence
  Description of Artificial Sequence: Synthetic oligonucleotide
guaacaugggcacagggga

SEQ ID NO: 247412 - RNA, 19 nt, Artificial Sequence
  Description of Artificial Sequence: Synthetic oligonucleotide
aaacccaggacuccuaauu

SEQ ID NO: 247413 - RNA, 19 nt, Artificial Sequence
  Description of Artificial Sequence: Synthetic oligonucleotide
ggauaauaccauuuccagg

SEQ ID NO: 247414 - RNA, 19 nt, Artificial Sequence
  Description of Artificial Sequence: Synthetic oligonucleotide
auuuaaaucgauagcaaaa

SEQ ID NO: 247415 - RNA, 19 nt, Artificial Sequence
  Description of Artificial Sequence: Synthetic oligonucleotide
uugucuuggauuacuggcu

SEQ ID NO: 247416 - RNA, 19 nt, Artificial Sequence
  Description of Artificial Sequence: Synthetic oligonucleotide
guuagguucauguguagca

SEQ ID NO: 247417 - RNA, 19 nt, Artificial Sequence
  Description of Artificial Sequence: Synthetic oligonucleotide
ucuuguucgucuucuaaaa

SEQ ID NO: 247418 - RNA, 19 nt, Artificial Sequence
  Description of Artificial Sequence: Synthetic oligonucleotide
auuauacuagaaucagggu

SEQ ID NO: 247419 - RNA, 19 nt, Artificial Sequence
  Description of Artificial Sequence: Synthetic oligonucleotide
aaauggugcauaauggaau

SEQ ID NO: 247420 - RNA, 19 nt, Artificial Sequence
  Description of Artificial Sequence: Synthetic oligonucleotide
ucaggauagaagucaauua

SEQ ID NO: 247421 - RNA, 19 nt, Artificial Sequence
  Description of Artificial Sequence: Synthetic oligonucleotide
accaacugcuaacaugauc

SEQ ID NO: 247422 - RNA, 19 nt, Artificial Sequence
  Description of Artificial Sequence: Synthetic oligonucleotide
aucaauugcaccuucccua

SEQ ID NO: 247423 - RNA, 19 nt, Artificial Sequence
  Description of Artificial Sequence: Synthetic oligonucleotide
cauaaaaguauauaauggu

SEQ ID NO: 247424 - RNA, 19 nt, Artificial Sequence
  Description of Artificial Sequence: Synthetic oligonucleotide
aaaaugcuauccucaacuu

SEQ ID NO: 247425 - RNA, 19 nt, Artificial Sequence
  Description of Artificial Sequence: Synthetic oligonucleotide
uauaagcuccccugguaag

SEQ ID NO: 247426 - RNA, 19 nt, Artificial Sequence
  Description of Artificial Sequence: Synthetic oligonucleotide
ugagaucagaucagcaaaa

SEQ ID NO: 247427 - RNA, 19 nt, Artificial Sequence
  Description of Artificial Sequence: Synthetic oligonucleotide
uaaucucuaaugacggcaa

SEQ ID NO: 247428 - RNA, 19 nt, Artificial Sequence
  Description of Artificial Sequence: Synthetic oligonucleotide
ugauuauggugaaguuagg

SEQ ID NO: 247429 - RNA, 19 nt, Artificial Sequence
  Description of Artificial Sequence: Synthetic oligonucleotide
uaauaucgaagaacccagc

SEQ ID NO: 247430 - RNA, 19 nt, Artificial Sequence
  Description of Artificial Sequence: Synthetic oligonucleotide
gauuaaagccaagcugggg

SEQ ID NO: 247431 - RNA, 19 nt, Artificial Sequence
  Description of Artificial Sequence: Synthetic oligonucleotide
augacggcaagugaggaag

SEQ ID NO: 247432 - RNA, 19 nt, Artificial Sequence
  Description of Artificial Sequence: Synthetic oligonucleotide
agacuauuucuccuguucu

SEQ ID NO: 247433 - RNA, 19 nt, Artificial Sequence
  Description of Artificial Sequence: Synthetic oligonucleotide
aucgauagcaaaaucuuca

SEQ ID NO: 247434 - RNA, 19 nt, Artificial Sequence
  Description of Artificial Sequence: Synthetic oligonucleotide
uccagauacucucgaagga

SEQ ID NO: 247435 - RNA, 19 nt, Artificial Sequence
  Description of Artificial Sequence: Synthetic oligonucleotide
uggcaacagagcaacaccu

SEQ ID NO: 247436 - RNA, 19 nt, Artificial Sequence
  Description of Artificial Sequence: Synthetic oligonucleotide
uagugggugaaguuuuccc

SEQ ID NO: 247437 - RNA, 19 nt, Artificial Sequence
  Description of Artificial Sequence: Synthetic oligonucleotide
aaguuagguucauguguag

SEQ ID NO: 247438 - RNA, 19 nt, Artificial Sequence
  Description of Artificial Sequence: Synthetic oligonucleotide
caacagagcaacaccuugc

SEQ ID NO: 247439 - RNA, 19 nt, Artificial Sequence
  Description of Artificial Sequence: Synthetic oligonucleotide
uuauaguaucguugcuucc

SEQ ID NO: 247440 - RNA, 19 nt, Artificial Sequence
  Description of Artificial Sequence: Synthetic oligonucleotide
aacugcuaacaugaucauc

SEQ ID NO: 247441 - RNA, 19 nt, Artificial Sequence
  Description of Artificial Sequence: Synthetic oligonucleotide
caacauaggacugaaccac

SEQ ID NO: 247442 - RNA, 19 nt, Artificial Sequence
  Description of Artificial Sequence: Synthetic oligonucleotide
auaccuaauuauucaugug

SEQ ID NO: 247443 - RNA, 19 nt, Artificial Sequence
  Description of Artificial Sequence: Synthetic oligonucleotide
uuuaaacgguuuugugccc

SEQ ID NO: 247444 - RNA, 19 nt, Artificial Sequence
  Description of Artificial Sequence: Synthetic oligonucleotide
uagguucauguguagcaag

SEQ ID NO: 247445 - RNA, 19 nt, Artificial Sequence
  Description of Artificial Sequence: Synthetic oligonucleotide
cuuacgucggaauuucuca

SEQ ID NO: 247446 - RNA, 19 nt, Artificial Sequence
  Description of Artificial Sequence: Synthetic oligonucleotide
uuggauuacuggcuacaug

SEQ ID NO: 247447 - RNA, 19 nt, Artificial Sequence
  Description of Artificial Sequence: Synthetic oligonucleotide
aacuuguauuaggagauau

SEQ ID NO: 247448 - RNA, 19 nt, Artificial Sequence
  Description of Artificial Sequence: Synthetic oligonucleotide
uauugagggacuagaguua

SEQ ID NO: 247449 - RNA, 19 nt, Artificial Sequence
  Description of Artificial Sequence: Synthetic oligonucleotide
ccaacugcuaacaugauca

SEQ ID NO: 247450 - RNA, 19 nt, Artificial Sequence
  Description of Artificial Sequence: Synthetic oligonucleotide
uguauaagcuccccuggua

SEQ ID NO: 247451 - RNA, 19 nt, Artificial Sequence
  Description of Artificial Sequence: Synthetic oligonucleotide
cuucacaauccuuaaccuc

SEQ ID NO: 247452 - RNA, 19 nt, Artificial Sequence
  Description of Artificial Sequence: Synthetic oligonucleotide
uucuugaacccaaggcaug

SEQ ID NO: 247453 - RNA, 19 nt, Artificial Sequence
  Description of Artificial Sequence: Synthetic oligonucleotide
gauauugagggacuagagu

SEQ ID NO: 247454 - RNA, 19 nt, Artificial Sequence
  Description of Artificial Sequence: Synthetic oligonucleotide
aacccaaggcaugaggugu

SEQ ID NO: 247455 - RNA, 19 nt, Artificial Sequence
  Description of Artificial Sequence: Synthetic oligonucleotide
cauggugaguucucuuucc

SEQ ID NO: 247456 - RNA, 19 nt, Artificial Sequence
  Description of Artificial Sequence: Synthetic oligonucleotide
acccacuguauuaugcacc

SEQ ID NO: 247457 - RNA, 19 nt, Artificial Sequence
  Description of Artificial Sequence: Synthetic oligonucleotide
cauuuaaaucgauagcaaa

SEQ ID NO: 247458 - RNA, 19 nt, Artificial Sequence
  Description of Artificial Sequence: Synthetic oligonucleotide
agugguuuaaacgguuuug

SEQ ID NO: 247459 - RNA, 19 nt, Artificial Sequence
  Description of Artificial Sequence: Synthetic oligonucleotide
uaggacugaaccaccuuac

SEQ ID NO: 247460 - RNA, 19 nt, Artificial Sequence
  Description of Artificial Sequence: Synthetic oligonucleotide
aucguugcuuccaaccagc

SEQ ID NO: 247461 - RNA, 19 nt, Artificial Sequence
  Description of Artificial Sequence: Synthetic oligonucleotide
ugacguuauccucuggcuc

SEQ ID NO: 247462 - RNA, 19 nt, Artificial Sequence
  Description of Artificial Sequence: Synthetic oligonucleotide
uccauaccuaauuauucau

SEQ ID NO: 247463 - RNA, 19 nt, Artificial Sequence
  Description of Artificial Sequence: Synthetic oligonucleotide
ugagcaacauaugcucuag

SEQ ID NO: 247464 - RNA, 19 nt, Artificial Sequence
  Description of Artificial Sequence: Synthetic oligonucleotide
cagacccacuguauuaugc

SEQ ID NO: 247465 - RNA, 19 nt, Artificial Sequence
  Description of Artificial Sequence: Synthetic oligonucleotide
aacgguuuugugcccuucu

SEQ ID NO: 247466 - RNA, 19 nt, Artificial Sequence
  Description of Artificial Sequence: Synthetic oligonucleotide
gauuugggaaagcuuuaca

SEQ ID NO: 247467 - RNA, 19 nt, Artificial Sequence
  Description of Artificial Sequence: Synthetic oligonucleotide
guacugguuuggcugaaag

SEQ ID NO: 247468 - RNA, 19 nt, Artificial Sequence
  Description of Artificial Sequence: Synthetic oligonucleotide
caucuauuggcucugugga

SEQ ID NO: 247469 - RNA, 19 nt, Artificial Sequence
  Description of Artificial Sequence: Synthetic oligonucleotide
gauaacccugucucccucc

SEQ ID NO: 247470 - RNA, 19 nt, Artificial Sequence
  Description of Artificial Sequence: Synthetic oligonucleotide
uaggagauauugagggacu

SEQ ID NO: 247471 - RNA, 19 nt, Artificial Sequence
  Description of Artificial Sequence: Synthetic oligonucleotide
aggacugaaccaccuuacg

SEQ ID NO: 247472 - RNA, 19 nt, Artificial Sequence
  Description of Artificial Sequence: Synthetic oligonucleotide
cuaaucucuaaugacggca

SEQ ID NO: 247473 - RNA, 19 nt, Artificial Sequence
  Description of Artificial Sequence: Synthetic oligonucleotide
ggauagaagucaauuauac

SEQ ID NO: 247474 - RNA, 19 nt, Artificial Sequence
  Description of Artificial Sequence: Synthetic oligonucleotide
ccuaaaguucuaaaggcug

SEQ ID NO: 247475 - RNA, 19 nt, Artificial Sequence
  Description of Artificial Sequence: Synthetic oligonucleotide
ugggauaacccugucuccc

SEQ ID NO: 247476 - RNA, 19 nt, Artificial Sequence
  Description of Artificial Sequence: Synthetic oligonucleotide
gaacccaaggcaugaggug

SEQ ID NO: 247477 - RNA, 19 nt, Artificial Sequence
  Description of Artificial Sequence: Synthetic oligonucleotide
auuccacuaggaguaaaag

SEQ ID NO: 247478 - RNA, 19 nt, Artificial Sequence
  Description of Artificial Sequence: Synthetic oligonucleotide
agauauugagggacuagag

SEQ ID NO: 247479 - RNA, 19 nt, Artificial Sequence
  Description of Artificial Sequence: Synthetic oligonucleotide
cauaccuaauuauucaugu

SEQ ID NO: 247480 - RNA, 19 nt, Artificial Sequence
  Description of Artificial Sequence: Synthetic oligonucleotide
uggugaguucucuuuccag

SEQ ID NO: 247481 - RNA, 19 nt, Artificial Sequence
  Description of Artificial Sequence: Synthetic oligonucleotide
auggcaguagagguucagc

SEQ ID NO: 247482 - RNA, 19 nt, Artificial Sequence
  Description of Artificial Sequence: Synthetic oligonucleotide
aaaguacuguaguuuuauu

SEQ ID NO: 247483 - RNA, 19 nt, Artificial Sequence
  Description of Artificial Sequence: Synthetic oligonucleotide
uuagagcuggcuugaauuu

SEQ ID NO: 247484 - RNA, 19 nt, Artificial Sequence
  Description of Artificial Sequence: Synthetic oligonucleotide
ugaaccaccuuacgucgga

SEQ ID NO: 247485 - RNA, 19 nt, Artificial Sequence
  Description of Artificial Sequence: Synthetic oligonucleotide
cuauuggcucuguggaacc

SEQ ID NO: 247486 - RNA, 19 nt, Artificial Sequence
  Description of Artificial Sequence: Synthetic oligonucleotide
uaauacugacugcaguguu

SEQ ID NO: 247487 - RNA, 19 nt, Artificial Sequence
  Description of Artificial Sequence: Synthetic oligonucleotide
ugauggagguagaaaguua

SEQ ID NO: 247488 - RNA, 19 nt, Artificial Sequence
  Description of Artificial Sequence: Synthetic oligonucleotide
ucuuggauuacuggcuaca

SEQ ID NO: 247489 - RNA, 19 nt, Artificial Sequence
  Description of Artificial Sequence: Synthetic oligonucleotide
accuaauuauucaugugca

SEQ ID NO: 247490 - RNA, 19 nt, Artificial Sequence
  Description of Artificial Sequence: Synthetic oligonucleotide
cuaguaugcugaauguaca

SEQ ID NO: 247491 - RNA, 19 nt, Artificial Sequence
  Description of Artificial Sequence: Synthetic oligonucleotide
acauucagccgaaugaaga

SEQ ID NO: 247492 - RNA, 19 nt, Artificial Sequence
  Description of Artificial Sequence: Synthetic oligonucleotide
ugaaucccaugacacaauu

SEQ ID NO: 247493 - RNA, 19 nt, Artificial Sequence
  Description of Artificial Sequence: Synthetic oligonucleotide
gugagaucagaucagcaaa

SEQ ID NO: 247494 - RNA, 19 nt, Artificial Sequence
  Description of Artificial Sequence: Synthetic oligonucleotide
uuaaacgguuuugugcccu

SEQ ID NO: 247495 - RNA, 19 nt, Artificial Sequence
  Description of Artificial Sequence: Synthetic oligonucleotide
cccuaaucucuaaugacgg

SEQ ID NO: 247496 - RNA, 19 nt, Artificial Sequence
  Description of Artificial Sequence: Synthetic oligonucleotide
cauaauggaauggauaaua

SEQ ID NO: 247497 - RNA, 19 nt, Artificial Sequence
  Description of Artificial Sequence: Synthetic oligonucleotide
ugacggcaagugaggaagg

SEQ ID NO: 247498 - RNA, 19 nt, Artificial Sequence
  Description of Artificial Sequence: Synthetic oligonucleotide
gccgaaugaagauaaacuc

SEQ ID NO: 247499 - RNA, 19 nt, Artificial Sequence
  Description of Artificial Sequence: Synthetic oligonucleotide
aaccugacguuauccucug

SEQ ID NO: 247500 - RNA, 19 nt, Artificial Sequence
  Description of Artificial Sequence: Synthetic oligonucleotide
auucagacccacuguauua

SEQ ID NO: 247501 - RNA, 19 nt, Artificial Sequence
  Description of Artificial Sequence: Synthetic oligonucleotide
uacuaugcauccucauuuc

SEQ ID NO: 247502 - RNA, 19 nt, Artificial Sequence
  Description of Artificial Sequence: Synthetic oligonucleotide
uggaauggauaauaccauu

SEQ ID NO: 247503 - RNA, 19 nt, Artificial Sequence
  Description of Artificial Sequence: Synthetic oligonucleotide
aaaggguauuuccuuccuu

SEQ ID NO: 247504 - RNA, 19 nt, Artificial Sequence
  Description of Artificial Sequence: Synthetic oligonucleotide
gggacuagaguuacuaugc

SEQ ID NO: 247505 - RNA, 19 nt, Artificial Sequence
  Description of Artificial Sequence: Synthetic oligonucleotide
gaaguuagguucaugugua

SEQ ID NO: 247506 - RNA, 19 nt, Artificial Sequence
  Description of Artificial Sequence: Synthetic oligonucleotide
ugaacaggccgccgguccc

SEQ ID NO: 247507 - RNA, 19 nt, Artificial Sequence
  Description of Artificial Sequence: Synthetic oligonucleotide
uuagguucauguguagcaa

SEQ ID NO: 247508 - RNA, 19 nt, Artificial Sequence
  Description of Artificial Sequence: Synthetic oligonucleotide
guaucguugcuuccaacca

SEQ ID NO: 247509 - RNA, 19 nt, Artificial Sequence
  Description of Artificial Sequence: Synthetic oligonucleotide
guauaagcuccccugguaa

SEQ ID NO: 247510 - RNA, 19 nt, Artificial Sequence
  Description of Artificial Sequence: Synthetic oligonucleotide
acauaacaucaccuccaag

SEQ ID NO: 247511 - RNA, 19 nt, Artificial Sequence
  Description of Artificial Sequence: Synthetic oligonucleotide
acgaucaauugcaccuucc

SEQ ID NO: 247512 - RNA, 19 nt, Artificial Sequence
  Description of Artificial Sequence: Synthetic oligonucleotide
ugcccucucaacaguggcc

SEQ ID NO: 247513 - RNA, 19 nt, Artificial Sequence
  Description of Artificial Sequence: Synthetic oligonucleotide
guaagcuggccauggugag

SEQ ID NO: 247514 - RNA, 19 nt, Artificial Sequence
  Description of Artificial Sequence: Synthetic oligonucleotide
cuuggggccgcauauuuga

SEQ ID NO: 247515 - RNA, 19 nt, Artificial Sequence
  Description of Artificial Sequence: Synthetic oligonucleotide
ggugaaaggauuugggaaa

SEQ ID NO: 247516 - RNA, 19 nt, Artificial Sequence
  Description of Artificial Sequence: Synthetic oligonucleotide
acgguuuugugcccuucuc

SEQ ID NO: 247517 - RNA, 19 nt, Artificial Sequence
  Description of Artificial Sequence: Synthetic oligonucleotide
caucuguacucuuugcaga

SEQ ID NO: 247518 - RNA, 19 nt, Artificial Sequence
  Description of Artificial Sequence: Synthetic oligonucleotide
uaaguugcaggugguggug

SEQ ID NO: 247519 - RNA, 19 nt, Artificial Sequence
  Description of Artificial Sequence: Synthetic oligonucleotide
gacguuauccucuggcucu

SEQ ID NO: 247520 - RNA, 19 nt, Artificial Sequence
  Description of Artificial Sequence: Synthetic oligonucleotide
agcacaguccuucaacaua

SEQ ID NO: 247521 - RNA, 19 nt, Artificial Sequence
  Description of Artificial Sequence: Synthetic oligonucleotide
acuccuaauuucaucaaau

SEQ ID NO: 247522 - RNA, 19 nt, Artificial Sequence
  Description of Artificial Sequence: Synthetic oligonucleotide
gcuugucuuggauuacugg

SEQ ID NO: 247523 - RNA, 19 nt, Artificial Sequence
  Description of Artificial Sequence: Synthetic oligonucleotide
gauuauggugaaguuaggu

SEQ ID NO: 247524 - RNA, 19 nt, Artificial Sequence
  Description of Artificial Sequence: Synthetic oligonucleotide
uuacuggcuacaugacaac

SEQ ID NO: 247525 - RNA, 19 nt, Artificial Sequence
  Description of Artificial Sequence: Synthetic oligonucleotide
augacaaccuggugaauuu

SEQ ID NO: 247526 - RNA, 19 nt, Artificial Sequence
  Description of Artificial Sequence: Synthetic oligonucleotide
cacgucuggguggauaucc

SEQ ID NO: 247527 - RNA, 19 nt, Artificial Sequence
  Description of Artificial Sequence: Synthetic oligonucleotide
caggugaacaggccgccgg

SEQ ID NO: 247528 - RNA, 19 nt, Artificial Sequence
  Description of Artificial Sequence: Synthetic oligonucleotide
aaacgguuuugugcccuuc

SEQ ID NO: 247529 - RNA, 19 nt, Artificial Sequence
  Description of Artificial Sequence: Synthetic oligonucleotide
aucacgucuggguggauau

SEQ ID NO: 247530 - RNA, 19 nt, Artificial Sequence
  Description of Artificial Sequence: Synthetic oligonucleotide
uguagugggugaaguuuuc

SEQ ID NO: 247531 - RNA, 19 nt, Artificial Sequence
  Description of Artificial Sequence: Synthetic oligonucleotide
auaguaucguugcuuccaa

SEQ ID NO: 247532 - RNA, 19 nt, Artificial Sequence
  Description of Artificial Sequence: Synthetic oligonucleotide
auacuagaaucagggucac

SEQ ID NO: 247533 - RNA, 19 nt, Artificial Sequence
  Description of Artificial Sequence: Synthetic oligonucleotide
cugaaccaccuuacgucgg

SEQ ID NO: 247534 - RNA, 19 nt, Artificial Sequence
  Description of Artificial Sequence: Synthetic oligonucleotide
agguguuaauauuccacua

SEQ ID NO: 247535 - RNA, 19 nt, Artificial Sequence
  Description of Artificial Sequence: Synthetic oligonucleotide
uugaaucccaugacacaau

SEQ ID NO: 247536 - RNA, 19 nt, Artificial Sequence
  Description of Artificial Sequence: Synthetic oligonucleotide
gacuccuaauuucaucaaa

SEQ ID NO: 247537 - RNA, 19 nt, Artificial Sequence
  Description of Artificial Sequence: Synthetic oligonucleotide
uccgguuccauggcaguag

SEQ ID NO: 247538 - RNA, 19 nt, Artificial Sequence
  Description of Artificial Sequence: Synthetic oligonucleotide
augacacaauucagguggc

SEQ ID NO: 247539 - RNA, 19 nt, Artificial Sequence
  Description of Artificial Sequence: Synthetic oligonucleotide
auggugaguucucuuucca

SEQ ID NO: 247540 - RNA, 19 nt, Artificial Sequence
  Description of Artificial Sequence: Synthetic oligonucleotide
uucagacccacuguauuau

SEQ ID NO: 247541 - RNA, 19 nt, Artificial Sequence
  Description of Artificial Sequence: Synthetic oligonucleotide
aaccaccuuacgucggaau

SEQ ID NO: 247542 - RNA, 19 nt, Artificial Sequence
  Description of Artificial Sequence: Synthetic oligonucleotide
acaugguuuggguuuguuu

SEQ ID NO: 247543 - RNA, 19 nt, Artificial Sequence
  Description of Artificial Sequence: Synthetic oligonucleotide
uccagugguuuaaacgguu

SEQ ID NO: 247544 - RNA, 19 nt, Artificial Sequence
  Description of Artificial Sequence: Synthetic oligonucleotide
accaaacgaucaauugcac

SEQ ID NO: 247545 - RNA, 19 nt, Artificial Sequence
  Description of Artificial Sequence: Synthetic oligonucleotide
gugaacaggccgccggucc

SEQ ID NO: 247546 - RNA, 19 nt, Artificial Sequence
  Description of Artificial Sequence: Synthetic oligonucleotide
cuagaaucagggucacuca

SEQ ID NO: 247547 - RNA, 19 nt, Artificial Sequence
  Description of Artificial Sequence: Synthetic oligonucleotide
gcuuccgccaugauggagg

SEQ ID NO: 247548 - RNA, 19 nt, Artificial Sequence
  Description of Artificial Sequence: Synthetic oligonucleotide
augauggagguagaaaguu

SEQ ID NO: 247549 - RNA, 19 nt, Artificial Sequence
  Description of Artificial Sequence: Synthetic oligonucleotide
cagccgaaugaagauaaac

SEQ ID NO: 247550 - RNA, 19 nt, Artificial Sequence
  Description of Artificial Sequence: Synthetic oligonucleotide
ggguggauauccuccaggc

SEQ ID NO: 247551 - RNA, 19 nt, Artificial Sequence
  Description of Artificial Sequence: Synthetic oligonucleotide
uguaaacaccaguccccga

SEQ ID NO: 247552 - RNA, 19 nt, Artificial Sequence
  Description of Artificial Sequence: Synthetic oligonucleotide
uucuaaaggcugccugguc

SEQ ID NO: 247553 - RNA, 19 nt, Artificial Sequence
  Description of Artificial Sequence: Synthetic oligonucleotide
cuaaaggcugccuggucca

SEQ ID NO: 247554 - RNA, 19 nt, Artificial Sequence
  Description of Artificial Sequence: Synthetic oligonucleotide
uccuuaaccucauguccaa

SEQ ID NO: 247555 - RNA, 19 nt, Artificial Sequence
  Description of Artificial Sequence: Synthetic oligonucleotide
cccauuuaaaucgauagca

SEQ ID NO: 247556 - RNA, 19 nt, Artificial Sequence
  Description of Artificial Sequence: Synthetic oligonucleotide
accaccuuacgucggaauu

SEQ ID NO: 247557 - RNA, 19 nt, Artificial Sequence
  Description of Artificial Sequence: Synthetic oligonucleotide
acaaauggcaacagagcaa

SEQ ID NO: 247558 - RNA, 19 nt, Artificial Sequence
  Description of Artificial Sequence: Synthetic oligonucleotide
uggggccgcauauuugaca

SEQ ID NO: 247559 - RNA, 19 nt, Artificial Sequence
  Description of Artificial Sequence: Synthetic oligonucleotide
uagaguuacuaugcauccu

SEQ ID NO: 247560 - RNA, 19 nt, Artificial Sequence
  Description of Artificial Sequence: Synthetic oligonucleotide
gaguaaaagcugguugauc

SEQ ID NO: 247561 - RNA, 19 nt, Artificial Sequence
  Description of Artificial Sequence: Synthetic oligonucleotide
ccauaccuaauuauucaug

SEQ ID NO: 247562 - RNA, 19 nt, Artificial Sequence
  Description of Artificial Sequence: Synthetic oligonucleotide
gggaacauacuguuugauc

SEQ ID NO: 247563 - RNA, 19 nt, Artificial Sequence
  Description of Artificial Sequence: Synthetic oligonucleotide
uucccauaaccugacguua

SEQ ID NO: 247564 - RNA, 19 nt, Artificial Sequence
  Description of Artificial Sequence: Synthetic oligonucleotide
uuugugcccuucucaaauu

SEQ ID NO: 247565 - RNA, 19 nt, Artificial Sequence
  Description of Artificial Sequence: Synthetic oligonucleotide
auaccauuuccaggaagca

SEQ ID NO: 247566 - RNA, 19 nt, Artificial Sequence
  Description of Artificial Sequence: Synthetic oligonucleotide
guagugggugaaguuuucc

SEQ ID NO: 247567 - RNA, 19 nt, Artificial Sequence
  Description of Artificial Sequence: Synthetic oligonucleotide
cauaaccugacguuauccu

SEQ ID NO: 247568 - RNA, 19 nt, Artificial Sequence
  Description of Artificial Sequence: Synthetic oligonucleotide
aggauagaagucaauuaua

SEQ ID NO: 247569 - RNA, 19 nt, Artificial Sequence
  Description of Artificial Sequence: Synthetic oligonucleotide
auguccauaccuaauuauu

SEQ ID NO: 247570 - RNA, 19 nt, Artificial Sequence
  Description of Artificial Sequence: Synthetic oligonucleotide
aucuuggggccgcauauuu

SEQ ID NO: 247571 - RNA, 19 nt, Artificial Sequence
  Description of Artificial Sequence: Synthetic oligonucleotide
uaguaucguugcuuccaac

SEQ ID NO: 247572 - RNA, 19 nt, Artificial Sequence
  Description of Artificial Sequence: Synthetic oligonucleotide
ucguugcuuccaaccagcu

SEQ ID NO: 247573 - RNA, 19 nt, Artificial Sequence
  Description of Artificial Sequence: Synthetic oligonucleotide
ucugcacaaggaagacuau

SEQ ID NO: 247574 - RNA, 19 nt, Artificial Sequence
  Description of Artificial Sequence: Synthetic oligonucleotide
cauaggccgcuugucuugg

SEQ ID NO: 247575 - RNA, 19 nt, Artificial Sequence
  Description of Artificial Sequence: Synthetic oligonucleotide
auuggcucuguggaaccug

SEQ ID NO: 247576 - RNA, 19 nt, Artificial Sequence
  Description of Artificial Sequence: Synthetic oligonucleotide
agguucauguguagcaaga

SEQ ID NO: 247577 - RNA, 19 nt, Artificial Sequence
  Description of Artificial Sequence: Synthetic oligonucleotide
cucuaaugacggcaaguga

SEQ ID NO: 247578 - RNA, 19 nt, Artificial Sequence
  Description of Artificial Sequence: Synthetic oligonucleotide
cacuuucuguaagguaacc

SEQ ID NO: 247579 - RNA, 19 nt, Artificial Sequence
  Description of Artificial Sequence: Synthetic oligonucleotide
gacauaaguuuuggaaucu

SEQ ID NO: 247580 - RNA, 19 nt, Artificial Sequence
  Description of Artificial Sequence: Synthetic oligonucleotide
aucaucacgucugggugga

SEQ ID NO: 247581 - RNA, 19 nt, Artificial Sequence
  Description of Artificial Sequence: Synthetic oligonucleotide
acauaggacugaaccaccu

SEQ ID NO: 247582 - RNA, 19 nt, Artificial Sequence
  Description of Artificial Sequence: Synthetic oligonucleotide
ucagccgaaugaagauaaa

SEQ ID NO: 247583 - RNA, 19 nt, Artificial Sequence
  Description of Artificial Sequence: Synthetic oligonucleotide
ugacacaauucagguggca

SEQ ID NO: 247584 - RNA, 19 nt, Artificial Sequence
  Description of Artificial Sequence: Synthetic oligonucleotide
ucuguggaaccugucugau

SEQ ID NO: 247585 - RNA, 19 nt, Artificial Sequence
  Description of Artificial Sequence: Synthetic oligonucleotide
ccuaaucucuaaugacggc

SEQ ID NO: 247586 - RNA, 19 nt, Artificial Sequence
  Description of Artificial Sequence: Synthetic oligonucleotide
uauuggcucuguggaaccu

SEQ ID NO: 247587 - RNA, 19 nt, Artificial Sequence
  Description of Artificial Sequence: Synthetic oligonucleotide
uggcauaacauggccuaaa

SEQ ID NO: 247588 - RNA, 19 nt, Artificial Sequence
  Description of Artificial Sequence: Synthetic oligonucleotide
uaggccgcuugucuuggau

SEQ ID NO: 247589 - RNA, 19 nt, Artificial Sequence
  Description of Artificial Sequence: Synthetic oligonucleotide
caacaguggccuguauaag

SEQ ID NO: 247590 - RNA, 19 nt, Artificial Sequence
  Description of Artificial Sequence: Synthetic oligonucleotide
gugcauaauggaauggaua

SEQ ID NO: 247591 - RNA, 19 nt, Artificial Sequence
  Description of Artificial Sequence: Synthetic oligonucleotide
uugcaccuucccuaaucuc

SEQ ID NO: 247592 - RNA, 19 nt, Artificial Sequence
  Description of Artificial Sequence: Synthetic oligonucleotide
cauggccuaaaguucuaaa

SEQ ID NO: 247593 - RNA, 19 nt, Artificial Sequence
  Description of Artificial Sequence: Synthetic oligonucleotide
ccauaaccugacguuaucc

SEQ ID NO: 247594 - RNA, 19 nt, Artificial Sequence
  Description of Artificial Sequence: Synthetic oligonucleotide
uuggggccgcauauuugac

SEQ ID NO: 247595 - RNA, 19 nt, Artificial Sequence
  Description of Artificial Sequence: Synthetic oligonucleotide
aaguuaccacuugcagcug

SEQ ID NO: 247596 - RNA, 19 nt, Artificial Sequence
  Description of Artificial Sequence: Synthetic oligonucleotide
aaauggcaacagagcaaca

SEQ ID NO: 247597 - RNA, 19 nt, Artificial Sequence
  Description of Artificial Sequence: Synthetic oligonucleotide
acuuguauuaggagauauu

SEQ ID NO: 247598 - RNA, 19 nt, Artificial Sequence
  Description of Artificial Sequence: Synthetic oligonucleotide
guuaaccaaacgaucaauu

SEQ ID NO: 247599 - RNA, 19 nt, Artificial Sequence
  Description of Artificial Sequence: Synthetic oligonucleotide
aaucuuggggccgcauauu

SEQ ID NO: 247600 - RNA, 19 nt, Artificial Sequence
  Description of Artificial Sequence: Synthetic oligonucleotide
auguagugggugaaguuuu

SEQ ID NO: 247601 - RNA, 19 nt, Artificial Sequence
  Description of Artificial Sequence: Synthetic oligonucleotide
caccuuacgucggaauuuc

SEQ ID NO: 247602 - RNA, 19 nt, Artificial Sequence
  Description of Artificial Sequence: Synthetic oligonucleotide
uaaacgguuuugugcccuu

SEQ ID NO: 247603 - RNA, 19 nt, Artificial Sequence
  Description of Artificial Sequence: Synthetic oligonucleotide
ggauuugggaaagcuuuac

SEQ ID NO: 247604 - RNA, 19 nt, Artificial Sequence
  Description of Artificial Sequence: Synthetic oligonucleotide
cauucagccgaaugaagau

SEQ ID NO: 247605 - RNA, 19 nt, Artificial Sequence
  Description of Artificial Sequence: Synthetic oligonucleotide
gguuuggagcauccgguuc

SEQ ID NO: 247606 - RNA, 19 nt, Artificial Sequence
  Description of Artificial Sequence: Synthetic oligonucleotide
cgauuaaagccaagcuggg

SEQ ID NO: 247607 - RNA, 19 nt, Artificial Sequence
  Description of Artificial Sequence: Synthetic oligonucleotide
gaggcccucgccaggaauc

SEQ ID NO: 247608 - RNA, 19 nt, Artificial Sequence
  Description of Artificial Sequence: Synthetic oligonucleotide
uuggcauaacauggccuaa

SEQ ID NO: 247609 - RNA, 19 nt, Artificial Sequence
  Description of Artificial Sequence: Synthetic oligonucleotide
cacaauccuuaaccucaug

SEQ ID NO: 247610 - RNA, 19 nt, Artificial Sequence
  Description of Artificial Sequence: Synthetic oligonucleotide
caguggccuguauaagcuc

SEQ ID NO: 247611 - RNA, 19 nt, Artificial Sequence
  Description of Artificial Sequence: Synthetic oligonucleotide
ccauuuaaaucgauagcaa

SEQ ID NO: 247612 - RNA, 19 nt, Artificial Sequence
  Description of Artificial Sequence: Synthetic oligonucleotide
aagcuuaauuccagcugua

SEQ ID NO: 247613 - RNA, 19 nt, Artificial Sequence
  Description of Artificial Sequence: Synthetic oligonucleotide
cugacguuauccucuggcu

SEQ ID NO: 247614 - RNA, 19 nt, Artificial Sequence
  Description of Artificial Sequence: Synthetic oligonucleotide
ccguaacaugggcacaggg

SEQ ID NO: 247615 - RNA, 19 nt, Artificial Sequence
  Description of Artificial Sequence: Synthetic oligonucleotide
ucucaacaguggccuguau

SEQ ID NO: 247616 - RNA, 19 nt, Artificial Sequence
  Description of Artificial Sequence: Synthetic oligonucleotide
cgaucaucacgucugggug

SEQ ID NO: 247617 - RNA, 19 nt, Artificial Sequence
  Description of Artificial Sequence: Synthetic oligonucleotide
caugcauauuucuucccau

SEQ ID NO: 247618 - RNA, 19 nt, Artificial Sequence
  Description of Artificial Sequence: Synthetic oligonucleotide
gacggcaagugaggaagga

SEQ ID NO: 247619 - RNA, 19 nt, Artificial Sequence
  Description of Artificial Sequence: Synthetic oligonucleotide
ggacugaaccaccuuacgu

SEQ ID NO: 247620 - RNA, 19 nt, Artificial Sequence
  Description of Artificial Sequence: Synthetic oligonucleotide
aguucucuuuccagauacu

SEQ ID NO: 247621 - RNA, 19 nt, Artificial Sequence
  Description of Artificial Sequence: Synthetic oligonucleotide
caccuugccaugcauauuu

SEQ ID NO: 247622 - RNA, 19 nt, Artificial Sequence
  Description of Artificial Sequence: Synthetic oligonucleotide
accuacuacuugagaaaga

SEQ ID NO: 247623 - RNA, 19 nt, Artificial Sequence
  Description of Artificial Sequence: Synthetic oligonucleotide
cuucccauaaccugacguu

SEQ ID NO: 247624 - RNA, 19 nt, Artificial Sequence
  Description of Artificial Sequence: Synthetic oligonucleotide
acggcaagugaggaaggaa

SEQ ID NO: 247625 - RNA, 19 nt, Artificial Sequence
  Description of Artificial Sequence: Synthetic oligonucleotide
gcuucccauaaccugacgu

SEQ ID NO: 247626 - RNA, 19 nt, Artificial Sequence
  Description of Artificial Sequence: Synthetic oligonucleotide
guggccuguauaagcuccc

SEQ ID NO: 247627 - RNA, 19 nt, Artificial Sequence
  Description of Artificial Sequence: Synthetic oligonucleotide
ggauuacuggcuacaugac

SEQ ID NO: 247628 - RNA, 19 nt, Artificial Sequence
  Description of Artificial Sequence: Synthetic oligonucleotide
aacauggccuaaaguucua

SEQ ID NO: 247629 - RNA, 19 nt, Artificial Sequence
  Description of Artificial Sequence: Synthetic oligonucleotide
aggccgcuugucuuggauu

SEQ ID NO: 247630 - RNA, 19 nt, Artificial Sequence
  Description of Artificial Sequence: Synthetic oligonucleotide
ggccgcauauuugacauaa

SEQ ID NO: 247631 - RNA, 19 nt, Artificial Sequence
  Description of Artificial Sequence: Synthetic oligonucleotide
uacuagaaucagggucacu

SEQ ID NO: 247632 - RNA, 19 nt, Artificial Sequence
  Description of Artificial Sequence: Synthetic oligonucleotide
cucuaguaugcugaaugua

SEQ ID NO: 247633 - RNA, 19 nt, Artificial Sequence
  Description of Artificial Sequence: Synthetic oligonucleotide
acauggccuaaaguucuaa

SEQ ID NO: 247634 - RNA, 19 nt, Artificial Sequence
  Description of Artificial Sequence: Synthetic oligonucleotide
acguuauccucuggcucug

SEQ ID NO: 247635 - RNA, 19 nt, Artificial Sequence
  Description of Artificial Sequence: Synthetic oligonucleotide
cccaggacuccuaauuuca

SEQ ID NO: 247636 - RNA, 19 nt, Artificial Sequence
  Description of Artificial Sequence: Synthetic oligonucleotide
ccuuuccacaaauagcaua

SEQ ID NO: 247637 - RNA, 19 nt, Artificial Sequence
  Description of Artificial Sequence: Synthetic oligonucleotide
gcgaucaucacgucugggu

SEQ ID NO: 247638 - RNA, 19 nt, Artificial Sequence
  Description of Artificial Sequence: Synthetic oligonucleotide
cuggaagcauuacagcuuu

SEQ ID NO: 247639 - RNA, 19 nt, Artificial Sequence
  Description of Artificial Sequence: Synthetic oligonucleotide
cuguauaagcuccccuggu

SEQ ID NO: 247640 - RNA, 19 nt, Artificial Sequence
  Description of Artificial Sequence: Synthetic oligonucleotide
agccuucguucauccacaa

SEQ ID NO: 247641 - RNA, 19 nt, Artificial Sequence
  Description of Artificial Sequence: Synthetic oligonucleotide
ggaaucuuggggccgcaua

SEQ ID NO: 247642 - RNA, 19 nt, Artificial Sequence
  Description of Artificial Sequence: Synthetic oligonucleotide
gcucuaguaugcugaaugu

SEQ ID NO: 247643 - RNA, 19 nt, Artificial Sequence
  Description of Artificial Sequence: Synthetic oligonucleotide
gcagauugacauaaccacu

SEQ ID NO: 247644 - RNA, 19 nt, Artificial Sequence
  Description of Artificial Sequence: Synthetic oligonucleotide
ggccgcuugucuuggauua

SEQ ID NO: 247645 - RNA, 19 nt, Artificial Sequence
  Description of Artificial Sequence: Synthetic oligonucleotide
ccgccggucccgauuaaag

SEQ ID NO: 247646 - RNA, 19 nt, Artificial Sequence
  Description of Artificial Sequence: Synthetic oligonucleotide
ggggccgcauauuugacau

SEQ ID NO: 247647 - RNA, 19 nt, Artificial Sequence
  Description of Artificial Sequence: Synthetic oligonucleotide
cacaauucagguggcacau

SEQ ID NO: 247648 - RNA, 19 nt, Artificial Sequence
  Description of Artificial Sequence: Synthetic oligonucleotide
ucacgucuggguggauauc

SEQ ID NO: 247649 - RNA, 19 nt, Artificial Sequence
  Description of Artificial Sequence: Synthetic oligonucleotide
cagcuuagagcuggcuuga

SEQ ID NO: 247650 - RNA, 19 nt, Artificial Sequence
  Description of Artificial Sequence: Synthetic oligonucleotide
acgucuggguggauauccu

SEQ ID NO: 247651 - RNA, 19 nt, Artificial Sequence
  Description of Artificial Sequence: Synthetic oligonucleotide
gaaccaccuuacgucggaa

SEQ ID NO: 247652 - RNA, 19 nt, Artificial Sequence
  Description of Artificial Sequence: Synthetic oligonucleotide
gcccugguaauaauaucga

SEQ ID NO: 247653 - RNA, 19 nt, Artificial Sequence
  Description of Artificial Sequence: Synthetic oligonucleotide
aggcccucgccaggaaucu

SEQ ID NO: 247654 - RNA, 19 nt, Artificial Sequence
  Description of Artificial Sequence: Synthetic oligonucleotide
ccgcauauuugacauaagu

SEQ ID NO: 247655 - RNA, 19 nt, Artificial Sequence
  Description of Artificial Sequence: Synthetic oligonucleotide
cucugauuauggugaaguu

SEQ ID NO: 247656 - RNA, 19 nt, Artificial Sequence
  Description of Artificial Sequence: Synthetic oligonucleotide
augcucuaguaugcugaau

SEQ ID NO: 247657 - RNA, 19 nt, Artificial Sequence
  Description of Artificial Sequence: Synthetic oligonucleotide
auccgguuccauggcagua

SEQ ID NO: 247658 - RNA, 19 nt, Artificial Sequence
  Description of Artificial Sequence: Synthetic oligonucleotide
caucacgucuggguggaua

SEQ ID NO: 247659 - RNA, 19 nt, Artificial Sequence
  Description of Artificial Sequence: Synthetic oligonucleotide
accuuacgucggaauuucu

SEQ ID NO: 247660 - RNA, 19 nt, Artificial Sequence
  Description of Artificial Sequence: Synthetic oligonucleotide
ccggucccgauuaaagcca

SEQ ID NO: 247661 - RNA, 19 nt, Artificial Sequence
  Description of Artificial Sequence: Synthetic oligonucleotide
cgccggucccgauuaaagc

SEQ ID NO: 247662 - RNA, 19 nt, Artificial Sequence
  Description of Artificial Sequence: Synthetic oligonucleotide
caucucuggaaagcaacau

SEQ ID NO: 247663 - RNA, 19 nt, Artificial Sequence
  Description of Artificial Sequence: Synthetic oligonucleotide
ggcaaaccuucacaauccu

SEQ ID NO: 247664 - RNA, 19 nt, Artificial Sequence
  Description of Artificial Sequence: Synthetic oligonucleotide
cuccgcgaucaucacgucu

SEQ ID NO: 247665 - RNA, 19 nt, Artificial Sequence
  Description of Artificial Sequence: Synthetic oligonucleotide
ccuaauuauucaugugcau

SEQ ID NO: 247666 - RNA, 19 nt, Artificial Sequence
  Description of Artificial Sequence: Synthetic oligonucleotide
ggaguaaaagcugguugau

SEQ ID NO: 247667 - RNA, 19 nt, Artificial Sequence
  Description of Artificial Sequence: Synthetic oligonucleotide
cccuccgcgaucaucacgu

SEQ ID NO: 247668 - RNA, 19 nt, Artificial Sequence
  Description of Artificial Sequence: Synthetic oligonucleotide
gccgcauauuugacauaag

SEQ ID NO: 247669 - RNA, 19 nt, Artificial Sequence
  Description of Artificial Sequence: Synthetic oligonucleotide
agcuuagagcuggcuugaa

SEQ ID NO: 247670 - RNA, 19 nt, Artificial Sequence
  Description of Artificial Sequence: Synthetic oligonucleotide
ggucccgauuaaagccaag

SEQ ID NO: 247671 - RNA, 19 nt, Artificial Sequence
  Description of Artificial Sequence: Synthetic oligonucleotide
ccgcgaucaucacgucugg

SEQ ID NO: 247672 - RNA, 19 nt, Artificial Sequence
  Description of Artificial Sequence: Synthetic oligonucleotide
cccagucaucaaugcuccc

SEQ ID NO: 247673 - RNA, 19 nt, Artificial Sequence
  Description of Artificial Sequence: Synthetic oligonucleotide
gcuuagagcuggcuugaau

SEQ ID NO: 247674 - RNA, 19 nt, Artificial Sequence
  Description of Artificial Sequence: Synthetic oligonucleotide
cgguuuugugcccuucuca

SEQ ID NO: 247675 - RNA, 19 nt, Artificial Sequence
  Description of Artificial Sequence: Synthetic oligonucleotide
cccguaacaugggcacagg

SEQ ID NO: 247676 - RNA, 19 nt, Artificial Sequence
  Description of Artificial Sequence: Synthetic oligonucleotide
ucaucacgucuggguggau

SEQ ID NO: 247677 - RNA, 19 nt, Artificial Sequence
  Description of Artificial Sequence: Synthetic oligonucleotide
gguacugguuuggcugaaa

SEQ ID NO: 247678 - RNA, 19 nt, Artificial Sequence
  Description of Artificial Sequence: Synthetic oligonucleotide
ccccugguaaguugcaggu

SEQ ID NO: 247679 - RNA, 19 nt, Artificial Sequence
  Description of Artificial Sequence: Synthetic oligonucleotide
gaaggacauucagccgaau

SEQ ID NO: 247680 - RNA, 19 nt, Artificial Sequence
  Description of Artificial Sequence: Synthetic oligonucleotide
ggguuuggagcauccgguu

SEQ ID NO: 247681 - RNA, 19 nt, Artificial Sequence
  Description of Artificial Sequence: Synthetic oligonucleotide
cccucucaacaguggccug

SEQ ID NO: 247682 - RNA, 19 nt, Artificial Sequence
  Description of Artificial Sequence: Synthetic oligonucleotide
guggugcaguguugcugua

SEQ ID NO: 247683 - RNA, 19 nt, Artificial Sequence
  Description of Artificial Sequence: Synthetic oligonucleotide
cgcgaucaucacgucuggg

SEQ ID NO: 247684 - RNA, 19 nt, Artificial Sequence
  Description of Artificial Sequence: Synthetic oligonucleotide
ccgguuccauggcaguaga

SEQ ID NO: 247685 - RNA, 19 nt, Artificial Sequence
  Description of Artificial Sequence: Synthetic oligonucleotide
caccaacugcuaacaugau

SEQ ID NO: 247686 - RNA, 19 nt, Artificial Sequence
  Description of Artificial Sequence: Synthetic oligonucleotide
ggcaacagagcaacaccuu

SEQ ID NO: 247687 - RNA, 19 nt, Artificial Sequence
  Description of Artificial Sequence: Synthetic oligonucleotide
ccuccgcgaucaucacguc

SEQ ID NO: 247688 - RNA, 19 nt, Artificial Sequence
  Description of Artificial Sequence: Synthetic oligonucleotide
gggccgcauauuugacaua

SEQ ID NO: 247689 - RNA, 19 nt, Artificial Sequence
  Description of Artificial Sequence: Synthetic oligonucleotide
ccaccuuacgucggaauuu

SEQ ID NO: 247690 - RNA, 19 nt, Artificial Sequence
  Description of Artificial Sequence: Synthetic oligonucleotide
ccgccaugauggagguaga

SEQ ID NO: 247691 - RNA, 19 nt, Artificial Sequence
  Description of Artificial Sequence: Synthetic oligonucleotide
gccgccggucccgauuaaa

SEQ ID NO: 247692 - RNA, 19 nt, Artificial Sequence
  Description of Artificial Sequence: Synthetic oligonucleotide
cggucccgauuaaagccaa

SEQ ID NO: 247693 - RNA, 19 nt, Artificial Sequence
  Description of Artificial Sequence: Synthetic oligonucleotide
ccgcuugucuuggauuacu

SEQ ID NO: 247694 - RNA, 19 nt, Artificial Sequence
  Description of Artificial Sequence: Synthetic oligonucleotide
cguugcuuccaaccagcuu

SEQ ID NO: 247695 - RNA, 19 nt, Artificial Sequence
  Description of Artificial Sequence: Synthetic oligonucleotide
ggcccucgccaggaaucuu

SEQ ID NO: 247696 - RNA, 19 nt, Artificial Sequence
  Description of Artificial Sequence: Synthetic oligonucleotide
aacuaaaugaaccaccucc

SEQ ID NO: 247697 - RNA, 19 nt, Artificial Sequence
  Description of Artificial Sequence: Synthetic oligonucleotide
aaacauaucauauacaccu

SEQ ID NO: 247698 - RNA, 19 nt, Artificial Sequence
  Description of Artificial Sequence: Synthetic oligonucleotide
aguauacugacucucaggc

SEQ ID NO: 247699 - RNA, 19 nt, Artificial Sequence
  Description of Artificial Sequence: Synthetic oligonucleotide
uauuacuaaagcuaaagug

SEQ ID NO: 247700 - RNA, 19 nt, Artificial Sequence
  Description of Artificial Sequence: Synthetic oligonucleotide
uguuuauauaccaacagca

SEQ ID NO: 247701 - RNA, 19 nt, Artificial Sequence
  Description of Artificial Sequence: Synthetic oligonucleotide
ucucgagaaacacugaggg

SEQ ID NO: 247702 - RNA, 19 nt, Artificial Sequence
  Description of Artificial Sequence: Synthetic oligonucleotide
uuuagcuguacaaauaucu

SEQ ID NO: 247703 - RNA, 19 nt, Artificial Sequence
  Description of Artificial Sequence: Synthetic oligonucleotide
aaagcucuugaagauaugc

SEQ ID NO: 247704 - RNA, 19 nt, Artificial Sequence
  Description of Artificial Sequence: Synthetic oligonucleotide
aucauuaucagcuacuaug

SEQ ID NO: 247705 - RNA, 19 nt, Artificial Sequence
  Description of Artificial Sequence: Synthetic oligonucleotide
uguacaaauaucuuucuca

SEQ ID NO: 247706 - RNA, 19 nt, Artificial Sequence
  Description of Artificial Sequence: Synthetic oligonucleotide
aagaaaacgcuacuugcac

SEQ ID NO: 247707 - RNA, 19 nt, Artificial Sequence
  Description of Artificial Sequence: Synthetic oligonucleotide
agucuuaguauacugacuc

SEQ ID NO: 247708 - RNA, 19 nt, Artificial Sequence
  Description of Artificial Sequence: Synthetic oligonucleotide
aagguaaucaaccuaggcu

SEQ ID NO: 247709 - RNA, 19 nt, Artificial Sequence
  Description of Artificial Sequence: Synthetic oligonucleotide
uuaaaggaguguaaugggg

SEQ ID NO: 247710 - RNA, 19 nt, Artificial Sequence
  Description of Artificial Sequence: Synthetic oligonucleotide
uuaucauacaaaucgggag

SEQ ID NO: 247711 - RNA, 19 nt, Artificial Sequence
  Description of Artificial Sequence: Synthetic oligonucleotide
ucuggugauaucauuauca

SEQ ID NO: 247712 - RNA, 19 nt, Artificial Sequence
  Description of Artificial Sequence: Synthetic oligonucleotide
uguuaucauacaaaucggg

SEQ ID NO: 247713 - RNA, 19 nt, Artificial Sequence
  Description of Artificial Sequence: Synthetic oligonucleotide
acguauagucuccaaaucc

SEQ ID NO: 247714 - RNA, 19 nt, Artificial Sequence
  Description of Artificial Sequence: Synthetic oligonucleotide
acauucaucguccaagacg

SEQ ID NO: 247715 - RNA, 19 nt, Artificial Sequence
  Description of Artificial Sequence: Synthetic oligonucleotide
uuugacucauacaaauggg

SEQ ID NO: 247716 - RNA, 19 nt, Artificial Sequence
  Description of Artificial Sequence: Synthetic oligonucleotide
gaaacaaguacgucagucg

SEQ ID NO: 247717 - RNA, 19 nt, Artificial Sequence
  Description of Artificial Sequence: Synthetic oligonucleotide
uuugacucaauuucuaucu

SEQ ID NO: 247718 - RNA, 19 nt, Artificial Sequence
  Description of Artificial Sequence: Synthetic oligonucleotide
aaauccauuggacugacaa

SEQ ID NO: 247719 - RNA, 19 nt, Artificial Sequence
  Description of Artificial Sequence: Synthetic oligonucleotide
aacauauacucuuucagau

SEQ ID NO: 247720 - RNA, 19 nt, Artificial Sequence
  Description of Artificial Sequence: Synthetic oligonucleotide
cauucaucguccaagacgc

SEQ ID NO: 247721 - RNA, 19 nt, Artificial Sequence
  Description of Artificial Sequence: Synthetic oligonucleotide
ucaaauguucaucauacuc

SEQ ID NO: 247722 - RNA, 19 nt, Artificial Sequence
  Description of Artificial Sequence: Synthetic oligonucleotide
gauaacacccuuuccagcc

SEQ ID NO: 247723 - RNA, 19 nt, Artificial Sequence
  Description of Artificial Sequence: Synthetic oligonucleotide
uaaucuggaacaaacuucu

SEQ ID NO: 247724 - RNA, 19 nt, Artificial Sequence
  Description of Artificial Sequence: Synthetic oligonucleotide
agagaugauuacuauuuac

SEQ ID NO: 247725 - RNA, 19 nt, Artificial Sequence
  Description of Artificial Sequence: Synthetic oligonucleotide
cagaauaagguuuacauca

SEQ ID NO: 247726 - RNA, 19 nt, Artificial Sequence
  Description of Artificial Sequence: Synthetic oligonucleotide
uggacugacaaucacuuug

SEQ ID NO: 247727 - RNA, 19 nt, Artificial Sequence
  Description of Artificial Sequence: Synthetic oligonucleotide
uuagaaagugaaacggugc

SEQ ID NO: 247728 - RNA, 19 nt, Artificial Sequence
  Description of Artificial Sequence: Synthetic oligonucleotide
  modified_base (9)..(9): a, c, u, g, unknown or other
ucauacucnguuaaugucu

SEQ ID NO: 247729 - RNA, 19 nt, Artificial Sequence
  Description of Artificial Sequence: Synthetic oligonucleotide
uaaacuaaaugaaccaccu

SEQ ID NO: 247730 - RNA, 19 nt, Artificial Sequence
  Description of Artificial Sequence: Synthetic oligonucleotide
ucagcuacuaugcacauau

SEQ ID NO: 247731 - RNA, 19 nt, Artificial Sequence
  Description of Artificial Sequence: Synthetic oligonucleotide
uauucuuacguauagucuc

SEQ ID NO: 247732 - RNA, 19 nt, Artificial Sequence
  Description of Artificial Sequence: Synthetic oligonucleotide
ucaacuugcaaucaauauc

SEQ ID NO: 247733 - RNA, 19 nt, Artificial Sequence
  Description of Artificial Sequence: Synthetic oligonucleotide
aagaacuugcuacuccagg

SEQ ID NO: 247734 - RNA, 19 nt, Artificial Sequence
  Description of Artificial Sequence: Synthetic oligonucleotide
ucuaauccauccuucauca

SEQ ID NO: 247735 - RNA, 19 nt, Artificial Sequence
  Description of Artificial Sequence: Synthetic oligonucleotide
aaggaagccucauucauca

SEQ ID NO: 247736 - RNA, 19 nt, Artificial Sequence
  Description of Artificial Sequence: Synthetic oligonucleotide
cauucugucauaucuagac

SEQ ID NO: 247737 - RNA, 19 nt, Artificial Sequence
  Description of Artificial Sequence: Synthetic oligonucleotide
cauaaucugagugacaaag

SEQ ID NO: 247738 - RNA, 19 nt, Artificial Sequence
  Description of Artificial Sequence: Synthetic oligonucleotide
uucagacauaagcaaaucc

SEQ ID NO: 247739 - RNA, 19 nt, Artificial Sequence
  Description of Artificial Sequence: Synthetic oligonucleotide
ugauaccucauacccaccg

SEQ ID NO: 247740 - RNA, 19 nt, Artificial Sequence
  Description of Artificial Sequence: Synthetic oligonucleotide
uacacuucuauuauuugac

SEQ ID NO: 247741 - RNA, 19 nt, Artificial Sequence
  Description of Artificial Sequence: Synthetic oligonucleotide
gucuuauacugccagaucc

SEQ ID NO: 247742 - RNA, 19 nt, Artificial Sequence
  Description of Artificial Sequence: Synthetic oligonucleotide
cuuauuacuaaagcuaaag

SEQ ID NO: 247743 - RNA, 19 nt, Artificial Sequence
  Description of Artificial Sequence: Synthetic oligonucleotide
  modified_base (3)..(3): a, c, u, g, unknown or other
ucnguuaaugucuguaaca

SEQ ID NO: 247744 - RNA, 19 nt, Artificial Sequence
  Description of Artificial Sequence: Synthetic oligonucleotide
gauguugccgaacaggaac

SEQ ID NO: 247745 - RNA, 19 nt, Artificial Sequence
  Description of Artificial Sequence: Synthetic oligonucleotide
acauaaacuaaaugaacca

SEQ ID NO: 247746 - RNA, 19 nt, Artificial Sequence
  Description of Artificial Sequence: Synthetic oligonucleotide
aacggugccauguuuauau

SEQ ID NO: 247747 - RNA, 19 nt, Artificial Sequence
  Description of Artificial Sequence: Synthetic oligonucleotide
aauggaauggaaauccuca

SEQ ID NO: 247748 - RNA, 19 nt, Artificial Sequence
  Description of Artificial Sequence: Synthetic oligonucleotide
aaucaaccuaggcugacug

SEQ ID NO: 247749 - RNA, 19 nt, Artificial Sequence
  Description of Artificial Sequence: Synthetic oligonucleotide
uacuauuuacuuauuacua

SEQ ID NO: 247750 - RNA, 19 nt, Artificial Sequence
  Description of Artificial Sequence: Synthetic oligonucleotide
accucauacccaccgaugc

SEQ ID NO: 247751 - RNA, 19 nt, Artificial Sequence
  Description of Artificial Sequence: Synthetic oligonucleotide
cugagugacaauguuaucc

SEQ ID NO: 247752 - RNA, 19 nt, Artificial Sequence
  Description of Artificial Sequence: Synthetic oligonucleotide
uuaguauacugacucucag

SEQ ID NO: 247753 - RNA, 19 nt, Artificial Sequence
  Description of Artificial Sequence: Synthetic oligonucleotide
ucggccggaaacaaguacg

SEQ ID NO: 247754 - RNA, 19 nt, Artificial Sequence
  Description of Artificial Sequence: Synthetic oligonucleotide
aaucugagugacaaagagg

SEQ ID NO: 247755 - RNA, 19 nt, Artificial Sequence
  Description of Artificial Sequence: Synthetic oligonucleotide
guaauaaucuggaacaaac

SEQ ID NO: 247756 - RNA, 19 nt, Artificial Sequence
  Description of Artificial Sequence: Synthetic oligonucleotide
aacuugcuacuccaggauc

SEQ ID NO: 247757 - RNA, 19 nt, Artificial Sequence
  Description of Artificial Sequence: Synthetic oligonucleotide
uugacucauacaaauggga

SEQ ID NO: 247758 - RNA, 19 nt, Artificial Sequence
  Description of Artificial Sequence: Synthetic oligonucleotide
aaagugguaaucuggugau

SEQ ID NO: 247759 - RNA, 19 nt, Artificial Sequence
  Description of Artificial Sequence: Synthetic oligonucleotide
uugaacauuucccuucaug

SEQ ID NO: 247760 - RNA, 19 nt, Artificial Sequence
  Description of Artificial Sequence: Synthetic oligonucleotide
uaguauacugacucucagg

SEQ ID NO: 247761 - RNA, 19 nt, Artificial Sequence
  Description of Artificial Sequence: Synthetic oligonucleotide
ugagugacaaagagguugc

SEQ ID NO: 247762 - RNA, 19 nt, Artificial Sequence
  Description of Artificial Sequence: Synthetic oligonucleotide
ugguauuugugcuuggaga

SEQ ID NO: 247763 - RNA, 19 nt, Artificial Sequence
  Description of Artificial Sequence: Synthetic oligonucleotide
uuaaaggaagccucauuca

SEQ ID NO: 247764 - RNA, 19 nt, Artificial Sequence
  Description of Artificial Sequence: Synthetic oligonucleotide
aacauuucccuucaugaua

SEQ ID NO: 247765 - RNA, 19 nt, Artificial Sequence
  Description of Artificial Sequence: Synthetic oligonucleotide
cauauaaauaagcugggga

SEQ ID NO: 247766 - RNA, 19 nt, Artificial Sequence
  Description of Artificial Sequence: Synthetic oligonucleotide
uuacguauagucuccaaau

SEQ ID NO: 247767 - RNA, 19 nt, Artificial Sequence
  Description of Artificial Sequence: Synthetic oligonucleotide
ucacuuagcugaauagcag

SEQ ID NO: 247768 - RNA, 19 nt, Artificial Sequence
  Description of Artificial Sequence: Synthetic oligonucleotide
acucauacaaaugggauca

SEQ ID NO: 247769 - RNA, 19 nt, Artificial Sequence
  Description of Artificial Sequence: Synthetic oligonucleotide
agugauuaggggaaagaac

SEQ ID NO: 247770 - RNA, 19 nt, Artificial Sequence
  Description of Artificial Sequence: Synthetic oligonucleotide
acuauuuacuuauuacuaa

SEQ ID NO: 247771 - RNA, 19 nt, Artificial Sequence
  Description of Artificial Sequence: Synthetic oligonucleotide
guacgcugggcccagagcg

SEQ ID NO: 247772 - RNA, 19 nt, Artificial Sequence
  Description of Artificial Sequence: Synthetic oligonucleotide
ucgagaaacacugagggau

SEQ ID NO: 247773 - RNA, 19 nt, Artificial Sequence
  Description of Artificial Sequence: Synthetic oligonucleotide
uguacuuaacacuguuggc

SEQ ID NO: 247774 - RNA, 19 nt, Artificial Sequence
  Description of Artificial Sequence: Synthetic oligonucleotide
uugccgaacaggaacccgg

SEQ ID NO: 247775 - RNA, 19 nt, Artificial Sequence
  Description of Artificial Sequence: Synthetic oligonucleotide
uacagaggcaucucgagaa

SEQ ID NO: 247776 - RNA, 19 nt, Artificial Sequence
  Description of Artificial Sequence: Synthetic oligonucleotide
uuaacugggugaugaaaug

SEQ ID NO: 247777 - RNA, 19 nt, Artificial Sequence
  Description of Artificial Sequence: Synthetic oligonucleotide
uauccuccaaaccacggga

SEQ ID NO: 247778 - RNA, 19 nt, Artificial Sequence
  Description of Artificial Sequence: Synthetic oligonucleotide
ucauucaucagaguccaug

SEQ ID NO: 247779 - RNA, 19 nt, Artificial Sequence
  Description of Artificial Sequence: Synthetic oligonucleotide
aaaggaagccucauucauc

SEQ ID NO: 247780 - RNA, 19 nt, Artificial Sequence
  Description of Artificial Sequence: Synthetic oligonucleotide
auuagaaagugaaacggug

SEQ ID NO: 247781 - RNA, 19 nt, Artificial Sequence
  Description of Artificial Sequence: Synthetic oligonucleotide
aaagagguugcaagcuccc

SEQ ID NO: 247782 - RNA, 19 nt, Artificial Sequence
  Description of Artificial Sequence: Synthetic oligonucleotide
gcaaauuagaaagugaaac

SEQ ID NO: 247783 - RNA, 19 nt, Artificial Sequence
  Description of Artificial Sequence: Synthetic oligonucleotide
acucaguauacauaaacua

SEQ ID NO: 247784 - RNA, 19 nt, Artificial Sequence
  Description of Artificial Sequence: Synthetic oligonucleotide
ucgacucugguauuugugc

SEQ ID NO: 247785 - RNA, 19 nt, Artificial Sequence
  Description of Artificial Sequence: Synthetic oligonucleotide
uacuaugcacauauaaaua

SEQ ID NO: 247786 - RNA, 19 nt, Artificial Sequence
  Description of Artificial Sequence: Synthetic oligonucleotide
acuugcaccaguaagacaa

SEQ ID NO: 247787 - RNA, 19 nt, Artificial Sequence
  Description of Artificial Sequence: Synthetic oligonucleotide
uaaauaagcuggggaaagg

SEQ ID NO: 247788 - RNA, 19 nt, Artificial Sequence
  Description of Artificial Sequence: Synthetic oligonucleotide
cuguuugggucuuauacug

SEQ ID NO: 247789 - RNA, 19 nt, Artificial Sequence
  Description of Artificial Sequence: Synthetic oligonucleotide
ugguaaucuggugauauca

SEQ ID NO: 247790 - RNA, 19 nt, Artificial Sequence
  Description of Artificial Sequence: Synthetic oligonucleotide
ugaaguagcauugggaaua

SEQ ID NO: 247791 - RNA, 19 nt, Artificial Sequence
  Description of Artificial Sequence: Synthetic oligonucleotide
agaacuugcuacuccagga

SEQ ID NO: 247792 - RNA, 19 nt, Artificial Sequence
  Description of Artificial Sequence: Synthetic oligonucleotide
acaaguacgucagucgcac

SEQ ID NO: 247793 - RNA, 19 nt, Artificial Sequence
  Description of Artificial Sequence: Synthetic oligonucleotide
ugacucauacaaaugggau

SEQ ID NO: 247794 - RNA, 19 nt, Artificial Sequence
  Description of Artificial Sequence: Synthetic oligonucleotide
aaccacgggaaaccucccc

SEQ ID NO: 247795 - RNA, 19 nt, Artificial Sequence
  Description of Artificial Sequence: Synthetic oligonucleotide
uacgucagucgcacgauag

SEQ ID NO: 247796 - RNA, 19 nt, Artificial Sequence
  Description of Artificial Sequence: Synthetic oligonucleotide
agaugauuacuauuuacuu

SEQ ID NO: 247797 - RNA, 19 nt, Artificial Sequence
  Description of Artificial Sequence: Synthetic oligonucleotide
ucuagucauuccagcaucc

SEQ ID NO: 247798 - RNA, 19 nt, Artificial Sequence
  Description of Artificial Sequence: Synthetic oligonucleotide
gacgcuuucgcccuccagc

SEQ ID NO: 247799 - RNA, 19 nt, Artificial Sequence
  Description of Artificial Sequence: Synthetic oligonucleotide
ugcaccaguaagacaaucu

SEQ ID NO: 247800 - RNA, 19 nt, Artificial Sequence
  Description of Artificial Sequence: Synthetic oligonucleotide
ucuugauauacagaggcau

SEQ ID NO: 247801 - RNA, 19 nt, Artificial Sequence
  Description of Artificial Sequence: Synthetic oligonucleotide
acauaucauauacaccuga

SEQ ID NO: 247802 - RNA, 19 nt, Artificial Sequence
  Description of Artificial Sequence: Synthetic oligonucleotide
auuugcugugaguucagug

SEQ ID NO: 247803 - RNA, 19 nt, Artificial Sequence
  Description of Artificial Sequence: Synthetic oligonucleotide
ugcaaauuagaaagugaaa

SEQ ID NO: 247804 - RNA, 19 nt, Artificial Sequence
  Description of Artificial Sequence: Synthetic oligonucleotide
ucucaaguugagucaaaug

SEQ ID NO: 247805 - RNA, 19 nt, Artificial Sequence
  Description of Artificial Sequence: Synthetic oligonucleotide
gacucauacaaaugggauc

SEQ ID NO: 247806 - RNA, 19 nt, Artificial Sequence
  Description of Artificial Sequence: Synthetic oligonucleotide
uuugcacauacaaguauau

SEQ ID NO: 247807 - RNA, 19 nt, Artificial Sequence
  Description of Artificial Sequence: Synthetic oligonucleotide
agcuacuaugcacauauaa

SEQ ID NO: 247808 - RNA, 19 nt, Artificial Sequence
  Description of Artificial Sequence: Synthetic oligonucleotide
  modified_base (4)..(4): a, c, u, g, unknown or other
cucnguuaaugucuguaac

SEQ ID NO: 247809 - RNA, 19 nt, Artificial Sequence
  Description of Artificial Sequence: Synthetic oligonucleotide
cucaaguugagucaaaugu

SEQ ID NO: 247810 - RNA, 19 nt, Artificial Sequence
  Description of Artificial Sequence: Synthetic oligonucleotide
auaucuagacuuugaacau

SEQ ID NO: 247811 - RNA, 19 nt, Artificial Sequence
  Description of Artificial Sequence: Synthetic oligonucleotide
ugaaacggugccauguuua

SEQ ID NO: 247812 - RNA, 19 nt, Artificial Sequence
  Description of Artificial Sequence: Synthetic oligonucleotide
  modified_base (8)..(8): a, c, u, g, unknown or other
cauacucnguuaaugucug

SEQ ID NO: 247813 - RNA, 19 nt, Artificial Sequence
  Description of Artificial Sequence: Synthetic oligonucleotide
ucguccaagacgcuuucgc

SEQ ID NO: 247814 - RNA, 19 nt, Artificial Sequence
  Description of Artificial Sequence: Synthetic oligonucleotide
aauauucacucaguauaca

SEQ ID NO: 247815 - RNA, 19 nt, Artificial Sequence
  Description of Artificial Sequence: Synthetic oligonucleotide
aauccauuggacugacaau

SEQ ID NO: 247816 - RNA, 19 nt, Artificial Sequence
  Description of Artificial Sequence: Synthetic oligonucleotide
uauuugacucaauuucuau

SEQ ID NO: 247817 - RNA, 19 nt, Artificial Sequence
  Description of Artificial Sequence: Synthetic oligonucleotide
ugauaacacccuuuccagc

SEQ ID NO: 247818 - RNA, 19 nt, Artificial Sequence
  Description of Artificial Sequence: Synthetic oligonucleotide
uggguguucgauuugggau

SEQ ID NO: 247819 - RNA, 19 nt, Artificial Sequence
  Description of Artificial Sequence: Synthetic oligonucleotide
ugcuauccuccaaaccacg

SEQ ID NO: 247820 - RNA, 19 nt, Artificial Sequence
  Description of Artificial Sequence: Synthetic oligonucleotide
acuguuggccagaauaagg

SEQ ID NO: 247821 - RNA, 19 nt, Artificial Sequence
  Description of Artificial Sequence: Synthetic oligonucleotide
aagugaaacggugccaugu

SEQ ID NO: 247822 - RNA, 19 nt, Artificial Sequence
  Description of Artificial Sequence: Synthetic oligonucleotide
uuaccaaggcaccaucagu

SEQ ID NO: 247823 - RNA, 19 nt, Artificial Sequence
  Description of Artificial Sequence: Synthetic oligonucleotide
aaucgggaggcugaggugu

SEQ ID NO: 247824 - RNA, 19 nt, Artificial Sequence
  Description of Artificial Sequence: Synthetic oligonucleotide
ucuuaguauacugacucuc

SEQ ID NO: 247825 - RNA, 19 nt, Artificial Sequence
  Description of Artificial Sequence: Synthetic oligonucleotide
uguucgauuugggaucagg

SEQ ID NO: 247826 - RNA, 19 nt, Artificial Sequence
  Description of Artificial Sequence: Synthetic oligonucleotide
cuugauauacagaggcauc

SEQ ID NO: 247827 - RNA, 19 nt, Artificial Sequence
  Description of Artificial Sequence: Synthetic oligonucleotide
uccucugauaccucauacc

SEQ ID NO: 247828 - RNA, 19 nt, Artificial Sequence
  Description of Artificial Sequence: Synthetic oligonucleotide
uuagcuguacaaauaucuu

SEQ ID NO: 247829 - RNA, 19 nt, Artificial Sequence
  Description of Artificial Sequence: Synthetic oligonucleotide
uguuugggucuuauacugc

SEQ ID NO: 247830 - RNA, 19 nt, Artificial Sequence
  Description of Artificial Sequence: Synthetic oligonucleotide
ucagaucuuuuccuuugca

SEQ ID NO: 247831 - RNA, 19 nt, Artificial Sequence
  Description of Artificial Sequence: Synthetic oligonucleotide
gauggcggcaggccuaccg

SEQ ID NO: 247832 - RNA, 19 nt, Artificial Sequence
  Description of Artificial Sequence: Synthetic oligonucleotide
uccucguauucucuugaag

SEQ ID NO: 247833 - RNA, 19 nt, Artificial Sequence
  Description of Artificial Sequence: Synthetic oligonucleotide
ugucaugucuagucauucc

SEQ ID NO: 247834 - RNA, 19 nt, Artificial Sequence
  Description of Artificial Sequence: Synthetic oligonucleotide
uacguauagucuccaaauc

SEQ ID NO: 247835 - RNA, 19 nt, Artificial Sequence
  Description of Artificial Sequence: Synthetic oligonucleotide
cugaauaguccacagcauc

SEQ ID NO: 247836 - RNA, 19 nt, Artificial Sequence
  Description of Artificial Sequence: Synthetic oligonucleotide
aaacauucacuaaucuccu

SEQ ID NO: 247837 - RNA, 19 nt, Artificial Sequence
  Description of Artificial Sequence: Synthetic oligonucleotide
guuaucauacaaaucggga

SEQ ID NO: 247838 - RNA, 19 nt, Artificial Sequence
  Description of Artificial Sequence: Synthetic oligonucleotide
cuuguauccuggguguucg

SEQ ID NO: 247839 - RNA, 19 nt, Artificial Sequence
  Description of Artificial Sequence: Synthetic oligonucleotide
auuaacugggugaugaaau

SEQ ID NO: 247840 - RNA, 19 nt, Artificial Sequence
  Description of Artificial Sequence: Synthetic oligonucleotide
cacuuuguaauaaucugga

SEQ ID NO: 247841 - RNA, 19 nt, Artificial Sequence
  Description of Artificial Sequence: Synthetic oligonucleotide
aucuggugauaucauuauc

SEQ ID NO: 247842 - RNA, 19 nt, Artificial Sequence
  Description of Artificial Sequence: Synthetic oligonucleotide
ucagucgcacgauagugac

SEQ ID NO: 247843 - RNA, 19 nt, Artificial Sequence
  Description of Artificial Sequence: Synthetic oligonucleotide
aacaaggcagguacaaaca

SEQ ID NO: 247844 - RNA, 19 nt, Artificial Sequence
  Description of Artificial Sequence: Synthetic oligonucleotide
aaaucgggaggcugaggug

SEQ ID NO: 247845 - RNA, 19 nt, Artificial Sequence
  Description of Artificial Sequence: Synthetic oligonucleotide
uaacugauguugcuauccu

SEQ ID NO: 247846 - RNA, 19 nt, Artificial Sequence
  Description of Artificial Sequence: Synthetic oligonucleotide
uccauuggacugacaauca

SEQ ID NO: 247847 - RNA, 19 nt, Artificial Sequence
  Description of Artificial Sequence: Synthetic oligonucleotide
uuggagauauucuuacgua

SEQ ID NO: 247848 - RNA, 19 nt, Artificial Sequence
  Description of Artificial Sequence: Synthetic oligonucleotide
uauuaacugggugaugaaa

SEQ ID NO: 247849 - RNA, 19 nt, Artificial Sequence
  Description of Artificial Sequence: Synthetic oligonucleotide
uccuauccccacaagguuc

SEQ ID NO: 247850 - RNA, 19 nt, Artificial Sequence
  Description of Artificial Sequence: Synthetic oligonucleotide
aagccugcaagaugcuucu

SEQ ID NO: 247851 - RNA, 19 nt, Artificial Sequence
  Description of Artificial Sequence: Synthetic oligonucleotide
auguugccgaacaggaacc

SEQ ID NO: 247852 - RNA, 19 nt, Artificial Sequence
  Description of Artificial Sequence: Synthetic oligonucleotide
agaggaaucuucaucgcug

SEQ ID NO: 247853 - RNA, 19 nt, Artificial Sequence
  Description of Artificial Sequence: Synthetic oligonucleotide
aacauaucauauacaccug

SEQ ID NO: 247854 - RNA, 19 nt, Artificial Sequence
  Description of Artificial Sequence: Synthetic oligonucleotide
  modified_base (15)..(15): a, c, u, g, unknown or other
uguucaucauacucnguua

SEQ ID NO: 247855 - RNA, 19 nt, Artificial Sequence
  Description of Artificial Sequence: Synthetic oligonucleotide
gagcagucuuaguauacug

SEQ ID NO: 247856 - RNA, 19 nt, Artificial Sequence
  Description of Artificial Sequence: Synthetic oligonucleotide
uucuuauuaacugggugau

SEQ ID NO: 247857 - RNA, 19 nt, Artificial Sequence
  Description of Artificial Sequence: Synthetic oligonucleotide
auaucauauacaccugauu

SEQ ID NO: 247858 - RNA, 19 nt, Artificial Sequence
  Description of Artificial Sequence: Synthetic oligonucleotide
cuaaagugguaaucuggug

SEQ ID NO: 247859 - RNA, 19 nt, Artificial Sequence
  Description of Artificial Sequence: Synthetic oligonucleotide
  modified_base (5)..(5): a, c, u, g, unknown or other
acucnguuaaugucuguaa

SEQ ID NO: 247860 - RNA, 19 nt, Artificial Sequence
  Description of Artificial Sequence: Synthetic oligonucleotide
gagaugauuacuauuuacu

SEQ ID NO: 247861 - RNA, 19 nt, Artificial Sequence
  Description of Artificial Sequence: Synthetic oligonucleotide
cauacaaaucgggaggcug

SEQ ID NO: 247862 - RNA, 19 nt, Artificial Sequence
  Description of Artificial Sequence: Synthetic oligonucleotide
aaacgcuacuugcaccagu

SEQ ID NO: 247863 - RNA, 19 nt, Artificial Sequence
  Description of Artificial Sequence: Synthetic oligonucleotide
ucaaccuaggcugacugaa

SEQ ID NO: 247864 - RNA, 19 nt, Artificial Sequence
  Description of Artificial Sequence: Synthetic oligonucleotide
uaucauuaucagcuacuau

SEQ ID NO: 247865 - RNA, 19 nt, Artificial Sequence
  Description of Artificial Sequence: Synthetic oligonucleotide
gucaugucuagucauucca

SEQ ID NO: 247866 - RNA, 19 nt, Artificial Sequence
  Description of Artificial Sequence: Synthetic oligonucleotide
uuauacugccagaucccac

SEQ ID NO: 247867 - RNA, 19 nt, Artificial Sequence
  Description of Artificial Sequence: Synthetic oligonucleotide
cuuuagcuguacaaauauc

SEQ ID NO: 247868 - RNA, 19 nt, Artificial Sequence
  Description of Artificial Sequence: Synthetic oligonucleotide
uagcauugggaauauccaa

SEQ ID NO: 247869 - RNA, 19 nt, Artificial Sequence
  Description of Artificial Sequence: Synthetic oligonucleotide
acuaaaugaaccaccuccu

SEQ ID NO: 247870 - RNA, 19 nt, Artificial Sequence
  Description of Artificial Sequence: Synthetic oligonucleotide
ugaucaggcugcccagucc

SEQ ID NO: 247871 - RNA, 19 nt, Artificial Sequence
  Description of Artificial Sequence: Synthetic oligonucleotide
ggaucauacacuucuauua

SEQ ID NO: 247872 - RNA, 19 nt, Artificial Sequence
  Description of Artificial Sequence: Synthetic oligonucleotide
cauacaggacacuggcuug

SEQ ID NO: 247873 - RNA, 19 nt, Artificial Sequence
  Description of Artificial Sequence: Synthetic oligonucleotide
gaucuggagagaugauuac

SEQ ID NO: 247874 - RNA, 19 nt, Artificial Sequence
  Description of Artificial Sequence: Synthetic oligonucleotide
agugguaaucuggugauau

SEQ ID NO: 247875 - RNA, 19 nt, Artificial Sequence
  Description of Artificial Sequence: Synthetic oligonucleotide
auacagaggcaucucgaga

SEQ ID NO: 247876 - RNA, 19 nt, Artificial Sequence
  Description of Artificial Sequence: Synthetic oligonucleotide
agaugcuucuuacauucau

SEQ ID NO: 247877 - RNA, 19 nt, Artificial Sequence
  Description of Artificial Sequence: Synthetic oligonucleotide
uauccuggguguucgauuu

SEQ ID NO: 247878 - RNA, 19 nt, Artificial Sequence
  Description of Artificial Sequence: Synthetic oligonucleotide
ugacaaucacuuuguaaua

SEQ ID NO: 247879 - RNA, 19 nt, Artificial Sequence
  Description of Artificial Sequence: Synthetic oligonucleotide
acaaggcagguacaaacaa

SEQ ID NO: 247880 - RNA, 19 nt, Artificial Sequence
  Description of Artificial Sequence: Synthetic oligonucleotide
uugcugugaguucagugau

SEQ ID NO: 247881 - RNA, 19 nt, Artificial Sequence
  Description of Artificial Sequence: Synthetic oligonucleotide
uggaccuggcuuaguacgc

SEQ ID NO: 247882 - RNA, 19 nt, Artificial Sequence
  Description of Artificial Sequence: Synthetic oligonucleotide
aaaugggaucauacacuuc

SEQ ID NO: 247883 - RNA, 19 nt, Artificial Sequence
  Description of Artificial Sequence: Synthetic oligonucleotide
uggagagaugauuacuauu

SEQ ID NO: 247884 - RNA, 19 nt, Artificial Sequence
  Description of Artificial Sequence: Synthetic oligonucleotide
ugauuaggggaaagaacuu

SEQ ID NO: 247885 - RNA, 19 nt, Artificial Sequence
  Description of Artificial Sequence: Synthetic oligonucleotide
accaucucccucauaggac

SEQ ID NO: 247886 - RNA, 19 nt, Artificial Sequence
  Description of Artificial Sequence: Synthetic oligonucleotide
ugagcagucuuaguauacu

SEQ ID NO: 247887 - RNA, 19 nt, Artificial Sequence
  Description of Artificial Sequence: Synthetic oligonucleotide
acacggggcuguuuggguc

SEQ ID NO: 247888 - RNA, 19 nt, Artificial Sequence
  Description of Artificial Sequence: Synthetic oligonucleotide
aucgcuguccgugucugac

SEQ ID NO: 247889 - RNA, 19 nt, Artificial Sequence
  Description of Artificial Sequence: Synthetic oligonucleotide
auuggacugacaaucacuu

SEQ ID NO: 247890 - RNA, 19 nt, Artificial Sequence
  Description of Artificial Sequence: Synthetic oligonucleotide
cugagcagucuuaguauac

SEQ ID NO: 247891 - RNA, 19 nt, Artificial Sequence
  Description of Artificial Sequence: Synthetic oligonucleotide
cuuacguauagucuccaaa

SEQ ID NO: 247892 - RNA, 19 nt, Artificial Sequence
  Description of Artificial Sequence: Synthetic oligonucleotide
cucgacucugguauuugug

SEQ ID NO: 247893 - RNA, 19 nt, Artificial Sequence
  Description of Artificial Sequence: Synthetic oligonucleotide
aacaaguacgucagucgca

SEQ ID NO: 247894 - RNA, 19 nt, Artificial Sequence
  Description of Artificial Sequence: Synthetic oligonucleotide
cuacuugcaccaguaagac

SEQ ID NO: 247895 - RNA, 19 nt, Artificial Sequence
  Description of Artificial Sequence: Synthetic oligonucleotide
gcagucuuaguauacugac

SEQ ID NO: 247896 - RNA, 19 nt, Artificial Sequence
  Description of Artificial Sequence: Synthetic oligonucleotide
  modified_base (6)..(6): a, c, u, g, unknown or other
uacucnguuaaugucugua

SEQ ID NO: 247897 - RNA, 19 nt, Artificial Sequence
  Description of Artificial Sequence: Synthetic oligonucleotide
acuaaucuccugagcaguc

SEQ ID NO: 247898 - RNA, 19 nt, Artificial Sequence
  Description of Artificial Sequence: Synthetic oligonucleotide
uaguacgcugggcccagag

SEQ ID NO: 247899 - RNA, 19 nt, Artificial Sequence
  Description of Artificial Sequence: Synthetic oligonucleotide
agucgcacgauagugacuu

SEQ ID NO: 247900 - RNA, 19 nt, Artificial Sequence
  Description of Artificial Sequence: Synthetic oligonucleotide
cacuuagcugaauagcaga

SEQ ID NO: 247901 - RNA, 19 nt, Artificial Sequence
  Description of Artificial Sequence: Synthetic oligonucleotide
aaaacgcuacuugcaccag

SEQ ID NO: 247902 - RNA, 19 nt, Artificial Sequence
  Description of Artificial Sequence: Synthetic oligonucleotide
gucuagucauuccagcauc

SEQ ID NO: 247903 - RNA, 19 nt, Artificial Sequence
  Description of Artificial Sequence: Synthetic oligonucleotide
ggugccauguuuauauacc

SEQ ID NO: 247904 - RNA, 19 nt, Artificial Sequence
  Description of Artificial Sequence: Synthetic oligonucleotide
cucauacccaccgaugcug

SEQ ID NO: 247905 - RNA, 19 nt, Artificial Sequence
  Description of Artificial Sequence: Synthetic oligonucleotide
gauguacuguuaucauaca

SEQ ID NO: 247906 - RNA, 19 nt, Artificial Sequence
  Description of Artificial Sequence: Synthetic oligonucleotide
uacaaaucgggaggcugag

SEQ ID NO: 247907 - RNA, 19 nt, Artificial Sequence
  Description of Artificial Sequence: Synthetic oligonucleotide
  modified_base (11)..(11): a, c, u, g, unknown or other
caucauacucnguuaaugu

SEQ ID NO: 247908 - RNA, 19 nt, Artificial Sequence
  Description of Artificial Sequence: Synthetic oligonucleotide
auggcggcaggccuaccgg

SEQ ID NO: 247909 - RNA, 19 nt, Artificial Sequence
  Description of Artificial Sequence: Synthetic oligonucleotide
uacccaccgaugcugcuga

SEQ ID NO: 247910 - RNA, 19 nt, Artificial Sequence
  Description of Artificial Sequence: Synthetic oligonucleotide
acuugcuacuccaggaucu

SEQ ID NO: 247911 - RNA, 19 nt, Artificial Sequence
  Description of Artificial Sequence: Synthetic oligonucleotide
uagucauuccagcauccuu

SEQ ID NO: 247912 - RNA, 19 nt, Artificial Sequence
  Description of Artificial Sequence: Synthetic oligonucleotide
auaacacccuuuccagccu

SEQ ID NO: 247913 - RNA, 19 nt, Artificial Sequence
  Description of Artificial Sequence: Synthetic oligonucleotide
ggaaacaaguacgucaguc

SEQ ID NO: 247914 - RNA, 19 nt, Artificial Sequence
  Description of Artificial Sequence: Synthetic oligonucleotide
accacgggaaaccucccca

SEQ ID NO: 247915 - RNA, 19 nt, Artificial Sequence
  Description of Artificial Sequence: Synthetic oligonucleotide
ucguccucagacaggugga

SEQ ID NO: 247916 - RNA, 19 nt, Artificial Sequence
  Description of Artificial Sequence: Synthetic oligonucleotide
auaucauuaucagcuacua

SEQ ID NO: 247917 - RNA, 19 nt, Artificial Sequence
  Description of Artificial Sequence: Synthetic oligonucleotide
ucuagacuuugaacauuuc

SEQ ID NO: 247918 - RNA, 19 nt, Artificial Sequence
  Description of Artificial Sequence: Synthetic oligonucleotide
ucgcacgauagugacuugc

SEQ ID NO: 247919 - RNA, 19 nt, Artificial Sequence
  Description of Artificial Sequence: Synthetic oligonucleotide
uucucaaguugagucaaau

SEQ ID NO: 247920 - RNA, 19 nt, Artificial Sequence
  Description of Artificial Sequence: Synthetic oligonucleotide
agugagucugcucucucuu

SEQ ID NO: 247921 - RNA, 19 nt, Artificial Sequence
  Description of Artificial Sequence: Synthetic oligonucleotide
ucaccuuccuggguuagcu

SEQ ID NO: 247922 - RNA, 19 nt, Artificial Sequence
  Description of Artificial Sequence: Synthetic oligonucleotide
ugacaugauggcggcaggc

SEQ ID NO: 247923 - RNA, 19 nt, Artificial Sequence
  Description of Artificial Sequence: Synthetic oligonucleotide
uaaucaaccuaggcugacu

SEQ ID NO: 247924 - RNA, 19 nt, Artificial Sequence
  Description of Artificial Sequence: Synthetic oligonucleotide
uugacucaauuucuaucuu

SEQ ID NO: 247925 - RNA, 19 nt, Artificial Sequence
  Description of Artificial Sequence: Synthetic oligonucleotide
caagggcuuucuaauucug

SEQ ID NO: 247926 - RNA, 19 nt, Artificial Sequence
  Description of Artificial Sequence: Synthetic oligonucleotide
ucucgacucugguauuugu

SEQ ID NO: 247927 - RNA, 19 nt, Artificial Sequence
  Description of Artificial Sequence: Synthetic oligonucleotide
uacuugcaccaguaagaca

SEQ ID NO: 247928 - RNA, 19 nt, Artificial Sequence
  Description of Artificial Sequence: Synthetic oligonucleotide
ucuuacguauagucuccaa

SEQ ID NO: 247929 - RNA, 19 nt, Artificial Sequence
  Description of Artificial Sequence: Synthetic oligonucleotide
gguugcaagcuccccauug

SEQ ID NO: 247930 - RNA, 19 nt, Artificial Sequence
  Description of Artificial Sequence: Synthetic oligonucleotide
gaaaccuccccaccaucuc

SEQ ID NO: 247931 - RNA, 19 nt, Artificial Sequence
  Description of Artificial Sequence: Synthetic oligonucleotide
auagcucccauaacugaug

SEQ ID NO: 247932 - RNA, 19 nt, Artificial Sequence
  Description of Artificial Sequence: Synthetic oligonucleotide
caaccuaggcugacugaag

SEQ ID NO: 247933 - RNA, 19 nt, Artificial Sequence
  Description of Artificial Sequence: Synthetic oligonucleotide
  modified_base (7)..(7): a, c, u, g, unknown or other
auacucnguuaaugucugu

SEQ ID NO: 247934 - RNA, 19 nt, Artificial Sequence
  Description of Artificial Sequence: Synthetic oligonucleotide
aucaaccuaggcugacuga

SEQ ID NO: 247935 - RNA, 19 nt, Artificial Sequence
  Description of Artificial Sequence: Synthetic oligonucleotide
agugaaacggugccauguu

SEQ ID NO: 247936 - RNA, 19 nt, Artificial Sequence
  Description of Artificial Sequence: Synthetic oligonucleotide
gagagaugauuacuauuua

SEQ ID NO: 247937 - RNA, 19 nt, Artificial Sequence
  Description of Artificial Sequence: Synthetic oligonucleotide
guugccgaacaggaacccg

SEQ ID NO: 247938 - RNA, 19 nt, Artificial Sequence
  Description of Artificial Sequence: Synthetic oligonucleotide
cuagaaagcucucucgacu

SEQ ID NO: 247939 - RNA, 19 nt, Artificial Sequence
  Description of Artificial Sequence: Synthetic oligonucleotide
aacgcuacuugcaccagua

SEQ ID NO: 247940 - RNA, 19 nt, Artificial Sequence
  Description of Artificial Sequence: Synthetic oligonucleotide
uguugccgaacaggaaccc

SEQ ID NO: 247941 - RNA, 19 nt, Artificial Sequence
  Description of Artificial Sequence: Synthetic oligonucleotide
ugggucuuauacugccaga

SEQ ID NO: 247942 - RNA, 19 nt, Artificial Sequence
  Description of Artificial Sequence: Synthetic oligonucleotide
aagcucucucgacucuggu

SEQ ID NO: 247943 - RNA, 19 nt, Artificial Sequence
  Description of Artificial Sequence: Synthetic oligonucleotide
caaaucgggaggcugaggu

SEQ ID NO: 247944 - RNA, 19 nt, Artificial Sequence
  Description of Artificial Sequence: Synthetic oligonucleotide
uaucagcuacuaugcacau

SEQ ID NO: 247945 - RNA, 19 nt, Artificial Sequence
  Description of Artificial Sequence: Synthetic oligonucleotide
uucugaaacaaggcaggua

SEQ ID NO: 247946 - RNA, 19 nt, Artificial Sequence
  Description of Artificial Sequence: Synthetic oligonucleotide
cugacaugauggcggcagg

SEQ ID NO: 247947 - RNA, 19 nt, Artificial Sequence
  Description of Artificial Sequence: Synthetic oligonucleotide
auauaccaacagcaauaaa

SEQ ID NO: 247948 - RNA, 19 nt, Artificial Sequence
  Description of Artificial Sequence: Synthetic oligonucleotide
ucauacaaaucgggaggcu

SEQ ID NO: 247949 - RNA, 19 nt, Artificial Sequence
  Description of Artificial Sequence: Synthetic oligonucleotide
cucugauaccucauaccca

SEQ ID NO: 247950 - RNA, 19 nt, Artificial Sequence
  Description of Artificial Sequence: Synthetic oligonucleotide
uucaucguccaagacgcuu

SEQ ID NO: 247951 - RNA, 19 nt, Artificial Sequence
  Description of Artificial Sequence: Synthetic oligonucleotide
uguauccuggguguucgau

SEQ ID NO: 247952 - RNA, 19 nt, Artificial Sequence
  Description of Artificial Sequence: Synthetic oligonucleotide
agaauaagguuuacaucau

SEQ ID NO: 247953 - RNA, 19 nt, Artificial Sequence
  Description of Artificial Sequence: Synthetic oligonucleotide
aaguagcauugggaauauc

SEQ ID NO: 247954 - RNA, 19 nt, Artificial Sequence
  Description of Artificial Sequence: Synthetic oligonucleotide
cauuaucagcuacuaugca

SEQ ID NO: 247955 - RNA, 19 nt, Artificial Sequence
  Description of Artificial Sequence: Synthetic oligonucleotide
ugcccauccucguauucuc

SEQ ID NO: 247956 - RNA, 19 nt, Artificial Sequence
  Description of Artificial Sequence: Synthetic oligonucleotide
ggguguucgauuugggauc

SEQ ID NO: 247957 - RNA, 19 nt, Artificial Sequence
  Description of Artificial Sequence: Synthetic oligonucleotide
cacuguuggccagaauaag

SEQ ID NO: 247958 - RNA, 19 nt, Artificial Sequence
  Description of Artificial Sequence: Synthetic oligonucleotide
caaguacgucagucgcacg

SEQ ID NO: 247959 - RNA, 19 nt, Artificial Sequence
  Description of Artificial Sequence: Synthetic oligonucleotide
ucugagugacaaagagguu

SEQ ID NO: 247960 - RNA, 19 nt, Artificial Sequence
  Description of Artificial Sequence: Synthetic oligonucleotide
cgauuugggaucagguucc

SEQ ID NO: 247961 - RNA, 19 nt, Artificial Sequence
  Description of Artificial Sequence: Synthetic oligonucleotide
gccagaauaagguuuacau

SEQ ID NO: 247962 - RNA, 19 nt, Artificial Sequence
  Description of Artificial Sequence: Synthetic oligonucleotide
augauggcggcaggccuac

SEQ ID NO: 247963 - RNA, 19 nt, Artificial Sequence
  Description of Artificial Sequence: Synthetic oligonucleotide
cagugaucaggcugcccag

SEQ ID NO: 247964 - RNA, 19 nt, Artificial Sequence
  Description of Artificial Sequence: Synthetic oligonucleotide
auacccaccgaugcugcug

SEQ ID NO: 247965 - RNA, 19 nt, Artificial Sequence
  Description of Artificial Sequence: Synthetic oligonucleotide
acgucagucgcacgauagu

SEQ ID NO: 247966 - RNA, 19 nt, Artificial Sequence
  Description of Artificial Sequence: Synthetic oligonucleotide
guaaucaaccuaggcugac

SEQ ID NO: 247967 - RNA, 19 nt, Artificial Sequence
  Description of Artificial Sequence: Synthetic oligonucleotide
cuuaguacgcugggcccag

SEQ ID NO: 247968 - RNA, 19 nt, Artificial Sequence
  Description of Artificial Sequence: Synthetic oligonucleotide
cauaucauauacaccugau

SEQ ID NO: 247969 - RNA, 19 nt, Artificial Sequence
  Description of Artificial Sequence: Synthetic oligonucleotide
acuuauuacuaaagcuaaa

SEQ ID NO: 247970 - RNA, 19 nt, Artificial Sequence
  Description of Artificial Sequence: Synthetic oligonucleotide
gugguaaucuggugauauc

SEQ ID NO: 247971 - RNA, 19 nt, Artificial Sequence
  Description of Artificial Sequence: Synthetic oligonucleotide
cucgagaaacacugaggga

SEQ ID NO: 247972 - RNA, 19 nt, Artificial Sequence
  Description of Artificial Sequence: Synthetic oligonucleotide
caguauacauaaacuaaau

SEQ ID NO: 247973 - RNA, 19 nt, Artificial Sequence
  Description of Artificial Sequence: Synthetic oligonucleotide
gcuccguugauguugccga

SEQ ID NO: 247974 - RNA, 19 nt, Artificial Sequence
  Description of Artificial Sequence: Synthetic oligonucleotide
cauccucguauucucuuga

SEQ ID NO: 247975 - RNA, 19 nt, Artificial Sequence
  Description of Artificial Sequence: Synthetic oligonucleotide
gugauaucauuaucagcua

SEQ ID NO: 247976 - RNA, 19 nt, Artificial Sequence
  Description of Artificial Sequence: Synthetic oligonucleotide
caggaacccggucaaagaa

SEQ ID NO: 247977 - RNA, 19 nt, Artificial Sequence
  Description of Artificial Sequence: Synthetic oligonucleotide
agguggaccuggcuuagua

SEQ ID NO: 247978 - RNA, 19 nt, Artificial Sequence
  Description of Artificial Sequence: Synthetic oligonucleotide
gcagaauauucacucagua

SEQ ID NO: 247979 - RNA, 19 nt, Artificial Sequence
  Description of Artificial Sequence: Synthetic oligonucleotide
cuuucgcccuccagcugcc

SEQ ID NO: 247980 - RNA, 19 nt, Artificial Sequence
  Description of Artificial Sequence: Synthetic oligonucleotide
uccgucuuucagugucaug

SEQ ID NO: 247981 - RNA, 19 nt, Artificial Sequence
  Description of Artificial Sequence: Synthetic oligonucleotide
uucaccuuccuggguuagc

SEQ ID NO: 247982 - RNA, 19 nt, Artificial Sequence
  Description of Artificial Sequence: Synthetic oligonucleotide
cagugauuaggggaaagaa

SEQ ID NO: 247983 - RNA, 19 nt, Artificial Sequence
  Description of Artificial Sequence: Synthetic oligonucleotide
uaccggcaccgguugcagg

SEQ ID NO: 247984 - RNA, 19 nt, Artificial Sequence
  Description of Artificial Sequence: Synthetic oligonucleotide
ggagagaugauuacuauuu

SEQ ID NO: 247985 - RNA, 19 nt, Artificial Sequence
  Description of Artificial Sequence: Synthetic oligonucleotide
ggaucuggagagaugauua

SEQ ID NO: 247986 - RNA, 19 nt, Artificial Sequence
  Description of Artificial Sequence: Synthetic oligonucleotide
gaaacggugccauguuuau

SEQ ID NO: 247987 - RNA, 19 nt, Artificial Sequence
  Description of Artificial Sequence: Synthetic oligonucleotide
gucagucgcacgauaguga

SEQ ID NO: 247988 - RNA, 19 nt, Artificial Sequence
  Description of Artificial Sequence: Synthetic oligonucleotide
agacgcuuucgcccuccag

SEQ ID NO: 247989 - RNA, 19 nt, Artificial Sequence
  Description of Artificial Sequence: Synthetic oligonucleotide
aagacgcuuucgcccucca

SEQ ID NO: 247990 - RNA, 19 nt, Artificial Sequence
  Description of Artificial Sequence: Synthetic oligonucleotide
uuggacugacaaucacuuu

SEQ ID NO: 247991 - RNA, 19 nt, Artificial Sequence
  Description of Artificial Sequence: Synthetic oligonucleotide
uugcaccaguaagacaauc

SEQ ID NO: 247992 - RNA, 19 nt, Artificial Sequence
  Description of Artificial Sequence: Synthetic oligonucleotide
guugcaagcuccccauugu

SEQ ID NO: 247993 - RNA, 19 nt, Artificial Sequence
  Description of Artificial Sequence: Synthetic oligonucleotide
cuuagcugaauagcagaaa

SEQ ID NO: 247994 - RNA, 19 nt, Artificial Sequence
  Description of Artificial Sequence: Synthetic oligonucleotide
caugcccauccucguauuc

SEQ ID NO: 247995 - RNA, 19 nt, Artificial Sequence
  Description of Artificial Sequence: Synthetic oligonucleotide
aguacgucagucgcacgau

SEQ ID NO: 247996 - RNA, 19 nt, Artificial Sequence
  Description of Artificial Sequence: Synthetic oligonucleotide
guaaucuggugauaucauu

SEQ ID NO: 247997 - RNA, 19 nt, Artificial Sequence
  Description of Artificial Sequence: Synthetic oligonucleotide
auccucguauucucuugaa

SEQ ID NO: 247998 - RNA, 19 nt, Artificial Sequence
  Description of Artificial Sequence: Synthetic oligonucleotide
uuguauccuggguguucga

SEQ ID NO: 247999 - RNA, 19 nt, Artificial Sequence
  Description of Artificial Sequence: Synthetic oligonucleotide
guaagacaaucuugguccu

SEQ ID NO: 248000 - RNA, 19 nt, Artificial Sequence
  Description of Artificial Sequence: Synthetic oligonucleotide
cauuucccuucaugauaac

SEQ ID NO: 248001 - RNA, 19 nt, Artificial Sequence
  Description of Artificial Sequence: Synthetic oligonucleotide
agugaucaggcugcccagu

SEQ ID NO: 248002 - RNA, 19 nt, Artificial Sequence
  Description of Artificial Sequence: Synthetic oligonucleotide
ucucucgacucugguauuu

SEQ ID NO: 248003 - RNA, 19 nt, Artificial Sequence
  Description of Artificial Sequence: Synthetic oligonucleotide
caagacgcuuucgcccucc

SEQ ID NO: 248004 - RNA, 19 nt, Artificial Sequence
  Description of Artificial Sequence: Synthetic oligonucleotide
cuaaagcuaaagugguaau

SEQ ID NO: 248005 - RNA, 19 nt, Artificial Sequence
  Description of Artificial Sequence: Synthetic oligonucleotide
gucaaauguucaucauacu

SEQ ID NO: 248006 - RNA, 19 nt, Artificial Sequence
  Description of Artificial Sequence: Synthetic oligonucleotide
gcuguuugggucuuauacu

SEQ ID NO: 248007 - RNA, 19 nt, Artificial Sequence
  Description of Artificial Sequence: Synthetic oligonucleotide
cgcuacuugcaccaguaag

SEQ ID NO: 248008 - RNA, 19 nt, Artificial Sequence
  Description of Artificial Sequence: Synthetic oligonucleotide
gguaaucaaccuaggcuga

SEQ ID NO: 248009 - RNA, 19 nt, Artificial Sequence
  Description of Artificial Sequence: Synthetic oligonucleotide
auacugacucucaggccca

SEQ ID NO: 248010 - RNA, 19 nt, Artificial Sequence
  Description of Artificial Sequence: Synthetic oligonucleotide
gacugacaaucacuuugua

SEQ ID NO: 248011 - RNA, 19 nt, Artificial Sequence
  Description of Artificial Sequence: Synthetic oligonucleotide
caugauggcggcaggccua

SEQ ID NO: 248012 - RNA, 19 nt, Artificial Sequence
  Description of Artificial Sequence: Synthetic oligonucleotide
aagugguaaucuggugaua

SEQ ID NO: 248013 - RNA, 19 nt, Artificial Sequence
  Description of Artificial Sequence: Synthetic oligonucleotide
gcucucucgacucugguau

SEQ ID NO: 248014 - RNA, 19 nt, Artificial Sequence
  Description of Artificial Sequence: Synthetic oligonucleotide
cuccauuccuauccccaca

SEQ ID NO: 248015 - RNA, 19 nt, Artificial Sequence
  Description of Artificial Sequence: Synthetic oligonucleotide
agccugcaaauuagaaagu

SEQ ID NO: 248016 - RNA, 19 nt, Artificial Sequence
  Description of Artificial Sequence: Synthetic oligonucleotide
ggaguguaauggggaagag

SEQ ID NO: 248017 - RNA, 19 nt, Artificial Sequence
  Description of Artificial Sequence: Synthetic oligonucleotide
cuaccggcaccgguugcag

SEQ ID NO: 248018 - RNA, 19 nt, Artificial Sequence
  Description of Artificial Sequence: Synthetic oligonucleotide
ggcauuaaaggaguguaau

SEQ ID NO: 248019 - RNA, 19 nt, Artificial Sequence
  Description of Artificial Sequence: Synthetic oligonucleotide
ccuauccccacaagguuca

SEQ ID NO: 248020 - RNA, 19 nt, Artificial Sequence
  Description of Artificial Sequence: Synthetic oligonucleotide
guauagucuccaaauccau

SEQ ID NO: 248021 - RNA, 19 nt, Artificial Sequence
  Description of Artificial Sequence: Synthetic oligonucleotide
acgcuacuugcaccaguaa

SEQ ID NO: 248022 - RNA, 19 nt, Artificial Sequence
  Description of Artificial Sequence: Synthetic oligonucleotide
gucccaucggccggaaaca

SEQ ID NO: 248023 - RNA, 19 nt, Artificial Sequence
  Description of Artificial Sequence: Synthetic oligonucleotide
gaaguagcauugggaauau

SEQ ID NO: 248024 - RNA, 19 nt, Artificial Sequence
  Description of Artificial Sequence: Synthetic oligonucleotide
cacuaaucuccugagcagu

SEQ ID NO: 248025 - RNA, 19 nt, Artificial Sequence
  Description of Artificial Sequence: Synthetic oligonucleotide
ucccaucggccggaaacaa

SEQ ID NO: 248026 - RNA, 19 nt, Artificial Sequence
  Description of Artificial Sequence: Synthetic oligonucleotide
cggugccauguuuauauac

SEQ ID NO: 248027 - RNA, 19 nt, Artificial Sequence
  Description of Artificial Sequence: Synthetic oligonucleotide
guauccuggguguucgauu

SEQ ID NO: 248028 - RNA, 19 nt, Artificial Sequence
  Description of Artificial Sequence: Synthetic oligonucleotide
cucauaggacaucaugcuu

SEQ ID NO: 248029 - RNA, 19 nt, Artificial Sequence
  Description of Artificial Sequence: Synthetic oligonucleotide
ccaaaccacgggaaaccuc

SEQ ID NO: 248030 - RNA, 19 nt, Artificial Sequence
  Description of Artificial Sequence: Synthetic oligonucleotide
cugagggauguacuguuau

SEQ ID NO: 248031 - RNA, 19 nt, Artificial Sequence
  Description of Artificial Sequence: Synthetic oligonucleotide
caccucauugaugucugaa

SEQ ID NO: 248032 - RNA, 19 nt, Artificial Sequence
  Description of Artificial Sequence: Synthetic oligonucleotide
gggaucauacacuucuauu

SEQ ID NO: 248033 - RNA, 19 nt, Artificial Sequence
  Description of Artificial Sequence: Synthetic oligonucleotide
acggugccauguuuauaua

SEQ ID NO: 248034 - RNA, 19 nt, Artificial Sequence
  Description of Artificial Sequence: Synthetic oligonucleotide
caccgguugcaggcaacag

SEQ ID NO: 248035 - RNA, 19 nt, Artificial Sequence
  Description of Artificial Sequence: Synthetic oligonucleotide
ggccaagaaucuggaacug

SEQ ID NO: 248036 - RNA, 19 nt, Artificial Sequence
  Description of Artificial Sequence: Synthetic oligonucleotide
gggaaaccuccccaccauc

SEQ ID NO: 248037 - RNA, 19 nt, Artificial Sequence
  Description of Artificial Sequence: Synthetic oligonucleotide
guacgucagucgcacgaua

SEQ ID NO: 248038 - RNA, 19 nt, Artificial Sequence
  Description of Artificial Sequence: Synthetic oligonucleotide
cuggguuagcugcuuuucu

SEQ ID NO: 248039 - RNA, 19 nt, Artificial Sequence
  Description of Artificial Sequence: Synthetic oligonucleotide
cuaaucuccugagcagucu

SEQ ID NO: 248040 - RNA, 19 nt, Artificial Sequence
  Description of Artificial Sequence: Synthetic oligonucleotide
ggccagaauaagguuuaca

SEQ ID NO: 248041 - RNA, 19 nt, Artificial Sequence
  Description of Artificial Sequence: Synthetic oligonucleotide
gcuuaguacgcugggccca

SEQ ID NO: 248042 - RNA, 19 nt, Artificial Sequence
  Description of Artificial Sequence: Synthetic oligonucleotide
ccaaauccauuggacugac

SEQ ID NO: 248043 - RNA, 19 nt, Artificial Sequence
  Description of Artificial Sequence: Synthetic oligonucleotide
uuaguacgcugggcccaga

SEQ ID NO: 248044 - RNA, 19 nt, Artificial Sequence
  Description of Artificial Sequence: Synthetic oligonucleotide
gcuuguauccuggguguuc

SEQ ID NO: 248045 - RNA, 19 nt, Artificial Sequence
  Description of Artificial Sequence: Synthetic oligonucleotide
caggcccauuguacuuaac

SEQ ID NO: 248046 - RNA, 19 nt, Artificial Sequence
  Description of Artificial Sequence: Synthetic oligonucleotide
gugaaacggugccauguuu

SEQ ID NO: 248047 - RNA, 19 nt, Artificial Sequence
  Description of Artificial Sequence: Synthetic oligonucleotide
cgucagucgcacgauagug

SEQ ID NO: 248048 - RNA, 19 nt, Artificial Sequence
  Description of Artificial Sequence: Synthetic oligonucleotide
ggccuaccggcaccgguug

SEQ ID NO: 248049 - RNA, 19 nt, Artificial Sequence
  Description of Artificial Sequence: Synthetic oligonucleotide
ccaucggccggaaacaagu

SEQ ID NO: 248050 - RNA, 19 nt, Artificial Sequence
  Description of Artificial Sequence: Synthetic oligonucleotide
agguugcaagcuccccauu

SEQ ID NO: 248051 - RNA, 19 nt, Artificial Sequence
  Description of Artificial Sequence: Synthetic oligonucleotide
gguaaucuggugauaucau

SEQ ID NO: 248052 - RNA, 19 nt, Artificial Sequence
  Description of Artificial Sequence: Synthetic oligonucleotide
cuagucauuccagcauccu

SEQ ID NO: 248053 - RNA, 19 nt, Artificial Sequence
  Description of Artificial Sequence: Synthetic oligonucleotide
gggucuuauacugccagau

SEQ ID NO: 248054 - RNA, 19 nt, Artificial Sequence
  Description of Artificial Sequence: Synthetic oligonucleotide
aggccuaccggcaccgguu

SEQ ID NO: 248055 - RNA, 19 nt, Artificial Sequence
  Description of Artificial Sequence: Synthetic oligonucleotide
cacggggcuguuugggucu

SEQ ID NO: 248056 - RNA, 19 nt, Artificial Sequence
  Description of Artificial Sequence: Synthetic oligonucleotide
cauugucuguugauaucuu

SEQ ID NO: 248057 - RNA, 19 nt, Artificial Sequence
  Description of Artificial Sequence: Synthetic oligonucleotide
cuccguugauguugccgaa

SEQ ID NO: 248058 - RNA, 19 nt, Artificial Sequence
  Description of Artificial Sequence: Synthetic oligonucleotide
guguucgauuugggaucag

SEQ ID NO: 248059 - RNA, 19 nt, Artificial Sequence
  Description of Artificial Sequence: Synthetic oligonucleotide
cauuuuccaugcccauccu

SEQ ID NO: 248060 - RNA, 19 nt, Artificial Sequence
  Description of Artificial Sequence: Synthetic oligonucleotide
gcgugcgccaccaccuggc

SEQ ID NO: 248061 - RNA, 19 nt, Artificial Sequence
  Description of Artificial Sequence: Synthetic oligonucleotide
gucugacaugauggcggca

SEQ ID NO: 248062 - RNA, 19 nt, Artificial Sequence
  Description of Artificial Sequence: Synthetic oligonucleotide
cauacccaccgaugcugcu

SEQ ID NO: 248063 - RNA, 19 nt, Artificial Sequence
  Description of Artificial Sequence: Synthetic oligonucleotide
gucauugggucaagggcuu

SEQ ID NO: 248064 - RNA, 19 nt, Artificial Sequence
  Description of Artificial Sequence: Synthetic oligonucleotide
cugcugaagcuuguauccu

SEQ ID NO: 248065 - RNA, 19 nt, Artificial Sequence
  Description of Artificial Sequence: Synthetic oligonucleotide
cauuugcugugaguucagu

SEQ ID NO: 248066 - RNA, 19 nt, Artificial Sequence
  Description of Artificial Sequence: Synthetic oligonucleotide
gccgaacaggaacccgguc

SEQ ID NO: 248067 - RNA, 19 nt, Artificial Sequence
  Description of Artificial Sequence: Synthetic oligonucleotide
gcaccgguugcaggcaaca

SEQ ID NO: 248068 - RNA, 19 nt, Artificial Sequence
  Description of Artificial Sequence: Synthetic oligonucleotide
cagucgcacgauagugacu

SEQ ID NO: 248069 - RNA, 19 nt, Artificial Sequence
  Description of Artificial Sequence: Synthetic oligonucleotide
cagcuacuaugcacauaua

SEQ ID NO: 248070 - RNA, 19 nt, Artificial Sequence
  Description of Artificial Sequence: Synthetic oligonucleotide
ggccggaaacaaguacguc

SEQ ID NO: 248071 - RNA, 19 nt, Artificial Sequence
  Description of Artificial Sequence: Synthetic oligonucleotide
ccacuuucacuuagcugaa

SEQ ID NO: 248072 - RNA, 19 nt, Artificial Sequence
  Description of Artificial Sequence: Synthetic oligonucleotide
gccuaccggcaccgguugc

SEQ ID NO: 248073 - RNA, 19 nt, Artificial Sequence
  Description of Artificial Sequence: Synthetic oligonucleotide
caggccuaccggcaccggu

SEQ ID NO: 248074 - RNA, 19 nt, Artificial Sequence
  Description of Artificial Sequence: Synthetic oligonucleotide
ccuaccggcaccgguugca

SEQ ID NO: 248075 - RNA, 19 nt, Artificial Sequence
  Description of Artificial Sequence: Synthetic oligonucleotide
cucauacaaaugggaucau

SEQ ID NO: 248076 - RNA, 19 nt, Artificial Sequence
  Description of Artificial Sequence: Synthetic oligonucleotide
gggcuguuugggucuuaua

SEQ ID NO: 248077 - RNA, 19 nt, Artificial Sequence
  Description of Artificial Sequence: Synthetic oligonucleotide
cucauucaucagaguccau

SEQ ID NO: 248078 - RNA, 19 nt, Artificial Sequence
  Description of Artificial Sequence: Synthetic oligonucleotide
cucucucgacucugguauu

SEQ ID NO: 248079 - RNA, 19 nt, Artificial Sequence
  Description of Artificial Sequence: Synthetic oligonucleotide
gcaggccuaccggcaccgg

SEQ ID NO: 248080 - RNA, 19 nt, Artificial Sequence
  Description of Artificial Sequence: Synthetic oligonucleotide
cucccucauaggacaucau

SEQ ID NO: 248081 - RNA, 19 nt, Artificial Sequence
  Description of Artificial Sequence: Synthetic oligonucleotide
acggggcuguuugggucuu

SEQ ID NO: 248082 - RNA, 19 nt, Artificial Sequence
  Description of Artificial Sequence: Synthetic oligonucleotide
cacuuucacuuagcugaau

SEQ ID NO: 248083 - RNA, 19 nt, Artificial Sequence
  Description of Artificial Sequence: Synthetic oligonucleotide
cggccggaaacaaguacgu

SEQ ID NO: 248084 - RNA, 19 nt, Artificial Sequence
  Description of Artificial Sequence: Synthetic oligonucleotide
cagguggaccuggcuuagu

SEQ ID NO: 248085 - RNA, 19 nt, Artificial Sequence
  Description of Artificial Sequence: Synthetic oligonucleotide
cuauccccacaagguucau

SEQ ID NO: 248086 - RNA, 19 nt, Artificial Sequence
  Description of Artificial Sequence: Synthetic oligonucleotide
cggaaacaaguacgucagu

SEQ ID NO: 248087 - RNA, 19 nt, Artificial Sequence
  Description of Artificial Sequence: Synthetic oligonucleotide
uauuggaccauuaaggagg

SEQ ID NO: 248088 - RNA, 19 nt, Artificial Sequence
  Description of Artificial Sequence: Synthetic oligonucleotide
acaacgauugaucaaauac

SEQ ID NO: 248089 - RNA, 19 nt, Artificial Sequence
  Description of Artificial Sequence: Synthetic oligonucleotide
aacugaucguaccaaaucc

SEQ ID NO: 248090 - RNA, 19 nt, Artificial Sequence
  Description of Artificial Sequence: Synthetic oligonucleotide
uucuauuggaccauuaagg

SEQ ID NO: 248091 - RNA, 19 nt, Artificial Sequence
  Description of Artificial Sequence: Synthetic oligonucleotide
uucucuuacacaaacaacc

SEQ ID NO: 248092 - RNA, 19 nt, Artificial Sequence
  Description of Artificial Sequence: Synthetic oligonucleotide
auaaguguacaauaaaguc

SEQ ID NO: 248093 - RNA, 19 nt, Artificial Sequence
  Description of Artificial Sequence: Synthetic oligonucleotide
cauccuuuuauucagacgg

SEQ ID NO: 248094 - RNA, 19 nt, Artificial Sequence
  Description of Artificial Sequence: Synthetic oligonucleotide
gaaacuaaggccuuugcag

SEQ ID NO: 248095 - RNA, 19 nt, Artificial Sequence
  Description of Artificial Sequence: Synthetic oligonucleotide
ugagacuaagcuuacaaca

SEQ ID NO: 248096 - RNA, 19 nt, Artificial Sequence
  Description of Artificial Sequence: Synthetic oligonucleotide
aaguuaaagaggccccucc

SEQ ID NO: 248097 - RNA, 19 nt, Artificial Sequence
  Description of Artificial Sequence: Synthetic oligonucleotide
agaucgauugacuaaaucu

SEQ ID NO: 248098 - RNA, 19 nt, Artificial Sequence
  Description of Artificial Sequence: Synthetic oligonucleotide
aaggcauuggcucucaaug

SEQ ID NO: 248099 - RNA, 19 nt, Artificial Sequence
  Description of Artificial Sequence: Synthetic oligonucleotide
aaauucuuggacgauugac

SEQ ID NO: 248100 - RNA, 19 nt, Artificial Sequence
  Description of Artificial Sequence: Synthetic oligonucleotide
gaauauaagucucaggaga

SEQ ID NO: 248101 - RNA, 19 nt, Artificial Sequence
  Description of Artificial Sequence: Synthetic oligonucleotide
uauguggaaagaaacuaag

SEQ ID NO: 248102 - RNA, 19 nt, Artificial Sequence
  Description of Artificial Sequence: Synthetic oligonucleotide
aaaacuucgcuuaaucauc

SEQ ID NO: 248103 - RNA, 19 nt, Artificial Sequence
  Description of Artificial Sequence: Synthetic oligonucleotide
ucucuuacacaaacaaccg

SEQ ID NO: 248104 - RNA, 19 nt, Artificial Sequence
  Description of Artificial Sequence: Synthetic oligonucleotide
uauucucuaauuauugggu

SEQ ID NO: 248105 - RNA, 19 nt, Artificial Sequence
  Description of Artificial Sequence: Synthetic oligonucleotide
gacuaaaucuuguuggggc

SEQ ID NO: 248106 - RNA, 19 nt, Artificial Sequence
  Description of Artificial Sequence: Synthetic oligonucleotide
uugucaacauucauuagca

SEQ ID NO: 248107 - RNA, 19 nt, Artificial Sequence
  Description of Artificial Sequence: Synthetic oligonucleotide
aaacuaucugcaaaggguc

SEQ ID NO: 248108 - RNA, 19 nt, Artificial Sequence
  Description of Artificial Sequence: Synthetic oligonucleotide
ucuauuggaccauuaagga

SEQ ID NO: 248109 - RNA, 19 nt, Artificial Sequence
  Description of Artificial Sequence: Synthetic oligonucleotide
ucaaauugagaaccacggg

SEQ ID NO: 248110 - RNA, 19 nt, Artificial Sequence
  Description of Artificial Sequence: Synthetic oligonucleotide
aguucuuaaguuaaagagg

SEQ ID NO: 248111 - RNA, 19 nt, Artificial Sequence
  Description of Artificial Sequence: Synthetic oligonucleotide
aacuuuucaagugggauug

SEQ ID NO: 248112 - RNA, 19 nt, Artificial Sequence
  Description of Artificial Sequence: Synthetic oligonucleotide
aaggguuaacaauuuuguc

SEQ ID NO: 248113 - RNA, 19 nt, Artificial Sequence
  Description of Artificial Sequence: Synthetic oligonucleotide
cuuaaguuaaagaggcccc

SEQ ID NO: 248114 - RNA, 19 nt, Artificial Sequence
  Description of Artificial Sequence: Synthetic oligonucleotide
ucgccuaauacauucaucu

SEQ ID NO: 248115 - RNA, 19 nt, Artificial Sequence
  Description of Artificial Sequence: Synthetic oligonucleotide
aucaaauugagaaccacgg

SEQ ID NO: 248116 - RNA, 19 nt, Artificial Sequence
  Description of Artificial Sequence: Synthetic oligonucleotide
aguugggccccucaaaugg

SEQ ID NO: 248117 - RNA, 19 nt, Artificial Sequence
  Description of Artificial Sequence: Synthetic oligonucleotide
acauucaucuaucuuagga

SEQ ID NO: 248118 - RNA, 19 nt, Artificial Sequence
  Description of Artificial Sequence: Synthetic oligonucleotide
aaaccagcuuccguaaagc

SEQ ID NO: 248119 - RNA, 19 nt, Artificial Sequence
  Description of Artificial Sequence: Synthetic oligonucleotide
uuggguacuucacacagug

SEQ ID NO: 248120 - RNA, 19 nt, Artificial Sequence
  Description of Artificial Sequence: Synthetic oligonucleotide
uuucaagugggauugccug

SEQ ID NO: 248121 - RNA, 19 nt, Artificial Sequence
  Description of Artificial Sequence: Synthetic oligonucleotide
aacgauugaucaaauacug

SEQ ID NO: 248122 - RNA, 19 nt, Artificial Sequence
  Description of Artificial Sequence: Synthetic oligonucleotide
aaaggguuaacaauuuugu

SEQ ID NO: 248123 - RNA, 19 nt, Artificial Sequence
  Description of Artificial Sequence: Synthetic oligonucleotide
ucaagacaacgauugauca

SEQ ID NO: 248124 - RNA, 19 nt, Artificial Sequence
  Description of Artificial Sequence: Synthetic oligonucleotide
ucagacggauaaaugguag

SEQ ID NO: 248125 - RNA, 19 nt, Artificial Sequence
  Description of Artificial Sequence: Synthetic oligonucleotide
uggaacagcaaacuaucug

SEQ ID NO: 248126 - RNA, 19 nt, Artificial Sequence
  Description of Artificial Sequence: Synthetic oligonucleotide
aguaaccacaacaacacag

SEQ ID NO: 248127 - RNA, 19 nt, Artificial Sequence
  Description of Artificial Sequence: Synthetic oligonucleotide
uccuccagucuccaaaccg

SEQ ID NO: 248128 - RNA, 19 nt, Artificial Sequence
  Description of Artificial Sequence: Synthetic oligonucleotide
aggagcaagcgauugucgc

SEQ ID NO: 248129 - RNA, 19 nt, Artificial Sequence
  Description of Artificial Sequence: Synthetic oligonucleotide
  modified_base (14)..(14): a, c, u, g, unknown or other
agcagauaaauucnguuuu

SEQ ID NO: 248130 - RNA, 19 nt, Artificial Sequence
  Description of Artificial Sequence: Synthetic oligonucleotide
uuuaacgcaagacugucuu

SEQ ID NO: 248131 - RNA, 19 nt, Artificial Sequence
  Description of Artificial Sequence: Synthetic oligonucleotide
aauucuuggacgauugacu

SEQ ID NO: 248132 - RNA, 19 nt, Artificial Sequence
  Description of Artificial Sequence: Synthetic oligonucleotide
agugaguucuauuggacca

SEQ ID NO: 248133 - RNA, 19 nt, Artificial Sequence
  Description of Artificial Sequence: Synthetic oligonucleotide
uuccguaaagcgcuuagca

SEQ ID NO: 248134 - RNA, 19 nt, Artificial Sequence
  Description of Artificial Sequence: Synthetic oligonucleotide
auagucuauccacagugag

SEQ ID NO: 248135 - RNA, 19 nt, Artificial Sequence
  Description of Artificial Sequence: Synthetic oligonucleotide
aagacaacgauugaucaaa

SEQ ID NO: 248136 - RNA, 19 nt, Artificial Sequence
  Description of Artificial Sequence: Synthetic oligonucleotide
aauauccgagagcuguuug

SEQ ID NO: 248137 - RNA, 19 nt, Artificial Sequence
  Description of Artificial Sequence: Synthetic oligonucleotide
uuuugauugucuccgacuu

SEQ ID NO: 248138 - RNA, 19 nt, Artificial Sequence
  Description of Artificial Sequence: Synthetic oligonucleotide
ugcaacaagaaguaucaaa

SEQ ID NO: 248139 - RNA, 19 nt, Artificial Sequence
  Description of Artificial Sequence: Synthetic oligonucleotide
aaaaucgcaguacuuuaau

SEQ ID NO: 248140 - RNA, 19 nt, Artificial Sequence
  Description of Artificial Sequence: Synthetic oligonucleotide
ugucuuaagacagagggua

SEQ ID NO: 248141 - RNA, 19 nt, Artificial Sequence
  Description of Artificial Sequence: Synthetic oligonucleotide
cuauuggaccauuaaggag

SEQ ID NO: 248142 - RNA, 19 nt, Artificial Sequence
  Description of Artificial Sequence: Synthetic oligonucleotide
uuuauucagacggauaaau

SEQ ID NO: 248143 - RNA, 19 nt, Artificial Sequence
  Description of Artificial Sequence: Synthetic oligonucleotide
aacuaucugcaaagggucc

SEQ ID NO: 248144 - RNA, 19 nt, Artificial Sequence
  Description of Artificial Sequence: Synthetic oligonucleotide
auauccgagagcuguuugg

SEQ ID NO: 248145 - RNA, 19 nt, Artificial Sequence
  Description of Artificial Sequence: Synthetic oligonucleotide
uccgauaaugcuucaugag

SEQ ID NO: 248146 - RNA, 19 nt, Artificial Sequence
  Description of Artificial Sequence: Synthetic oligonucleotide
uuuucacagauuguuauaa

SEQ ID NO: 248147 - RNA, 19 nt, Artificial Sequence
  Description of Artificial Sequence: Synthetic oligonucleotide
caaauugagaaccacggga

SEQ ID NO: 248148 - RNA, 19 nt, Artificial Sequence
  Description of Artificial Sequence: Synthetic oligonucleotide
uuuucaagugggauugccu

SEQ ID NO: 248149 - RNA, 19 nt, Artificial Sequence
  Description of Artificial Sequence: Synthetic oligonucleotide
aucaauauccgagagcugu

SEQ ID NO: 248150 - RNA, 19 nt, Artificial Sequence
  Description of Artificial Sequence: Synthetic oligonucleotide
uguuccuagucuucccugg

SEQ ID NO: 248151 - RNA, 19 nt, Artificial Sequence
  Description of Artificial Sequence: Synthetic oligonucleotide
ucuuaguccuugaaacggc

SEQ ID NO: 248152 - RNA, 19 nt, Artificial Sequence
  Description of Artificial Sequence: Synthetic oligonucleotide
ucuguuggauagucuaucc

SEQ ID NO: 248153 - RNA, 19 nt, Artificial Sequence
  Description of Artificial Sequence: Synthetic oligonucleotide
aacuaaggccuuugcagug

SEQ ID NO: 248154 - RNA, 19 nt, Artificial Sequence
  Description of Artificial Sequence: Synthetic oligonucleotide
accuguucguuacaacuac

SEQ ID NO: 248155 - RNA, 19 nt, Artificial Sequence
  Description of Artificial Sequence: Synthetic oligonucleotide
ucguauguggaaagaaacu

SEQ ID NO: 248156 - RNA, 19 nt, Artificial Sequence
  Description of Artificial Sequence: Synthetic oligonucleotide
aaauugagaaccacgggaa

SEQ ID NO: 248157 - RNA, 19 nt, Artificial Sequence
  Description of Artificial Sequence: Synthetic oligonucleotide
uggguauugacaccugaga

SEQ ID NO: 248158 - RNA, 19 nt, Artificial Sequence
  Description of Artificial Sequence: Synthetic oligonucleotide
auaaagugaaacugaucgu

SEQ ID NO: 248159 - RNA, 19 nt, Artificial Sequence
  Description of Artificial Sequence: Synthetic oligonucleotide
uaaaaucgcaguacuuuaa

SEQ ID NO: 248160 - RNA, 19 nt, Artificial Sequence
  Description of Artificial Sequence: Synthetic oligonucleotide
ugacuaaaucuuguugggg

SEQ ID NO: 248161 - RNA, 19 nt, Artificial Sequence
  Description of Artificial Sequence: Synthetic oligonucleotide
ucgauugacuaaaucuugu

SEQ ID NO: 248162 - RNA, 19 nt, Artificial Sequence
  Description of Artificial Sequence: Synthetic oligonucleotide
uuaaagaggccccuccauc

SEQ ID NO: 248163 - RNA, 19 nt, Artificial Sequence
  Description of Artificial Sequence: Synthetic oligonucleotide
aagacugucuuaguccuug

SEQ ID NO: 248164 - RNA, 19 nt, Artificial Sequence
  Description of Artificial Sequence: Synthetic oligonucleotide
cuuacuuuaacgcaagacu

SEQ ID NO: 248165 - RNA, 19 nt, Artificial Sequence
  Description of Artificial Sequence: Synthetic oligonucleotide
uguaguuggggagggauug

SEQ ID NO: 248166 - RNA, 19 nt, Artificial Sequence
  Description of Artificial Sequence: Synthetic oligonucleotide
ugugucacuccacuaauuu

SEQ ID NO: 248167 - RNA, 19 nt, Artificial Sequence
  Description of Artificial Sequence: Synthetic oligonucleotide
ucugacggaaauagucgcc

SEQ ID NO: 248168 - RNA, 19 nt, Artificial Sequence
  Description of Artificial Sequence: Synthetic oligonucleotide
aauugcuucauggcacaag

SEQ ID NO: 248169 - RNA, 19 nt, Artificial Sequence
  Description of Artificial Sequence: Synthetic oligonucleotide
cuugaaacggcuggaacag

SEQ ID NO: 248170 - RNA, 19 nt, Artificial Sequence
  Description of Artificial Sequence: Synthetic oligonucleotide
gucgcuaaaaucaaauuga

SEQ ID NO: 248171 - RNA, 19 nt, Artificial Sequence
  Description of Artificial Sequence: Synthetic oligonucleotide
aacggcuggaacagcaaac

SEQ ID NO: 248172 - RNA, 19 nt, Artificial Sequence
  Description of Artificial Sequence: Synthetic oligonucleotide
gaucguaccaaauccuguc

SEQ ID NO: 248173 - RNA, 19 nt, Artificial Sequence
  Description of Artificial Sequence: Synthetic oligonucleotide
aagacaacuguaaaguauu

SEQ ID NO: 248174 - RNA, 19 nt, Artificial Sequence
  Description of Artificial Sequence: Synthetic oligonucleotide
acuuuaacgcaagacuguc

SEQ ID NO: 248175 - RNA, 19 nt, Artificial Sequence
  Description of Artificial Sequence: Synthetic oligonucleotide
accucugacggaaauaguc

SEQ ID NO: 248176 - RNA, 19 nt, Artificial Sequence
  Description of Artificial Sequence: Synthetic oligonucleotide
ucuuaagacagaggguacc

SEQ ID NO: 248177 - RNA, 19 nt, Artificial Sequence
  Description of Artificial Sequence: Synthetic oligonucleotide
cacgcuacaguuucuaguc

SEQ ID NO: 248178 - RNA, 19 nt, Artificial Sequence
  Description of Artificial Sequence: Synthetic oligonucleotide
ugucuccgacuuuucaggg

SEQ ID NO: 248179 - RNA, 19 nt, Artificial Sequence
  Description of Artificial Sequence: Synthetic oligonucleotide
aggcauuggcucucaaugg

SEQ ID NO: 248180 - RNA, 19 nt, Artificial Sequence
  Description of Artificial Sequence: Synthetic oligonucleotide
ugaucguaccaaauccugu

SEQ ID NO: 248181 - RNA, 19 nt, Artificial Sequence
  Description of Artificial Sequence: Synthetic oligonucleotide
acggauaaaugguaguuaa

SEQ ID NO: 248182 - RNA, 19 nt, Artificial Sequence
  Description of Artificial Sequence: Synthetic oligonucleotide
aucgaaaccagcuuccgua

SEQ ID NO: 248183 - RNA, 19 nt, Artificial Sequence
  Description of Artificial Sequence: Synthetic oligonucleotide
uucgcuuaaucaucuguac

SEQ ID NO: 248184 - RNA, 19 nt, Artificial Sequence
  Description of Artificial Sequence: Synthetic oligonucleotide
cucugacggaaauagucgc

SEQ ID NO: 248185 - RNA, 19 nt, Artificial Sequence
  Description of Artificial Sequence: Synthetic oligonucleotide
uggcuaaccucacuagggc

SEQ ID NO: 248186 - RNA, 19 nt, Artificial Sequence
  Description of Artificial Sequence: Synthetic oligonucleotide
acuaucugcaaaggguccg

SEQ ID NO: 248187 - RNA, 19 nt, Artificial Sequence
  Description of Artificial Sequence: Synthetic oligonucleotide
agcgcuuagcaucauacau

SEQ ID NO: 248188 - RNA, 19 nt, Artificial Sequence
  Description of Artificial Sequence: Synthetic oligonucleotide
caaacuaucugcaaagggu

SEQ ID NO: 248189 - RNA, 19 nt, Artificial Sequence
  Description of Artificial Sequence: Synthetic oligonucleotide
uuggacgauugacucagca

SEQ ID NO: 248190 - RNA, 19 nt, Artificial Sequence
  Description of Artificial Sequence: Synthetic oligonucleotide
aagcgauugucgcuaaaau

SEQ ID NO: 248191 - RNA, 19 nt, Artificial Sequence
  Description of Artificial Sequence: Synthetic oligonucleotide
ucauugaaugaacuucgua

SEQ ID NO: 248192 - RNA, 19 nt, Artificial Sequence
  Description of Artificial Sequence: Synthetic oligonucleotide
aaugaacuucguaugugga

SEQ ID NO: 248193 - RNA, 19 nt, Artificial Sequence
  Description of Artificial Sequence: Synthetic oligonucleotide
uucaagugggauugccugc

SEQ ID NO: 248194 - RNA, 19 nt, Artificial Sequence
  Description of Artificial Sequence: Synthetic oligonucleotide
agucucaggagaaauguug

SEQ ID NO: 248195 - RNA, 19 nt, Artificial Sequence
  Description of Artificial Sequence: Synthetic oligonucleotide
uaccuagacuuaaaaccug

SEQ ID NO: 248196 - RNA, 19 nt, Artificial Sequence
  Description of Artificial Sequence: Synthetic oligonucleotide
ucucagaucgauugacuaa

SEQ ID NO: 248197 - RNA, 19 nt, Artificial Sequence
  Description of Artificial Sequence: Synthetic oligonucleotide
aguucuauuggaccauuaa

SEQ ID NO: 248198 - RNA, 19 nt, Artificial Sequence
  Description of Artificial Sequence: Synthetic oligonucleotide
gauacucucagcugccguc

SEQ ID NO: 248199 - RNA, 19 nt, Artificial Sequence
  Description of Artificial Sequence: Synthetic oligonucleotide
guucaugcuguguagcaac

SEQ ID NO: 248200 - RNA, 19 nt, Artificial Sequence
  Description of Artificial Sequence: Synthetic oligonucleotide
uucagacggauaaauggua

SEQ ID NO: 248201 - RNA, 19 nt, Artificial Sequence
  Description of Artificial Sequence: Synthetic oligonucleotide
cugaucguaccaaauccug

SEQ ID NO: 248202 - RNA, 19 nt, Artificial Sequence
  Description of Artificial Sequence: Synthetic oligonucleotide
uuauccaacuugagauuac

SEQ ID NO: 248203 - RNA, 19 nt, Artificial Sequence
  Description of Artificial Sequence: Synthetic oligonucleotide
ucgaccaaggccagcuuug

SEQ ID NO: 248204 - RNA, 19 nt, Artificial Sequence
  Description of Artificial Sequence: Synthetic oligonucleotide
aaacuucgcuuaaucaucu

SEQ ID NO: 248205 - RNA, 19 nt, Artificial Sequence
  Description of Artificial Sequence: Synthetic oligonucleotide
cuaucuuaggaaggcauug

SEQ ID NO: 248206 - RNA, 19 nt, Artificial Sequence
  Description of Artificial Sequence: Synthetic oligonucleotide
cuggguauugacaccugag

SEQ ID NO: 248207 - RNA, 19 nt, Artificial Sequence
  Description of Artificial Sequence: Synthetic oligonucleotide
cagaguaccuguucgacca

SEQ ID NO: 248208 - RNA, 19 nt, Artificial Sequence
  Description of Artificial Sequence: Synthetic oligonucleotide
aauagucgccuuccagcca

SEQ ID NO: 248209 - RNA, 19 nt, Artificial Sequence
  Description of Artificial Sequence: Synthetic oligonucleotide
auucagacggauaaauggu

SEQ ID NO: 248210 - RNA, 19 nt, Artificial Sequence
  Description of Artificial Sequence: Synthetic oligonucleotide
ggcaacacuacacagugca

SEQ ID NO: 248211 - RNA, 19 nt, Artificial Sequence
  Description of Artificial Sequence: Synthetic oligonucleotide
ucgcaguacuuuaaucugu

SEQ ID NO: 248212 - RNA, 19 nt, Artificial Sequence
  Description of Artificial Sequence: Synthetic oligonucleotide
auugucgcuaaaaucaaau

SEQ ID NO: 248213 - RNA, 19 nt, Artificial Sequence
  Description of Artificial Sequence: Synthetic oligonucleotide
cuaggggacaugugagggg

SEQ ID NO: 248214 - RNA, 19 nt, Artificial Sequence
  Description of Artificial Sequence: Synthetic oligonucleotide
aauggcgcccucaacauuu

SEQ ID NO: 248215 - RNA, 19 nt, Artificial Sequence
  Description of Artificial Sequence: Synthetic oligonucleotide
gaauaaacauccaaccagu

SEQ ID NO: 248216 - RNA, 19 nt, Artificial Sequence
  Description of Artificial Sequence: Synthetic oligonucleotide
ugguucaugcuguguagca

SEQ ID NO: 248217 - RNA, 19 nt, Artificial Sequence
  Description of Artificial Sequence: Synthetic oligonucleotide
cuuuucaagugggauugcc

SEQ ID NO: 248218 - RNA, 19 nt, Artificial Sequence
  Description of Artificial Sequence: Synthetic oligonucleotide
augaacuucguauguggaa

SEQ ID NO: 248219 - RNA, 19 nt, Artificial Sequence
  Description of Artificial Sequence: Synthetic oligonucleotide
uccguaaagcgcuuagcau

SEQ ID NO: 248220 - RNA, 19 nt, Artificial Sequence
  Description of Artificial Sequence: Synthetic oligonucleotide
cucaaaugguucaaccaca

SEQ ID NO: 248221 - RNA, 19 nt, Artificial Sequence
  Description of Artificial Sequence: Synthetic oligonucleotide
gguuucuuacuuuaacgca

SEQ ID NO: 248222 - RNA, 19 nt, Artificial Sequence
  Description of Artificial Sequence: Synthetic oligonucleotide
aucgauugacuaaaucuug

SEQ ID NO: 248223 - RNA, 19 nt, Artificial Sequence
  Description of Artificial Sequence: Synthetic oligonucleotide
ccuaauacauucaucuauc

SEQ ID NO: 248224 - RNA, 19 nt, Artificial Sequence
  Description of Artificial Sequence: Synthetic oligonucleotide
uaguuaacauugugauucu

SEQ ID NO: 248225 - RNA, 19 nt, Artificial Sequence
  Description of Artificial Sequence: Synthetic oligonucleotide
ugccauccggaaagaaaag

SEQ ID NO: 248226 - RNA, 19 nt, Artificial Sequence
  Description of Artificial Sequence: Synthetic oligonucleotide
gacucagcaggagugcugc

SEQ ID NO: 248227 - RNA, 19 nt, Artificial Sequence
  Description of Artificial Sequence: Synthetic oligonucleotide
aacuucgcuuaaucaucug

SEQ ID NO: 248228 - RNA, 19 nt, Artificial Sequence
  Description of Artificial Sequence: Synthetic oligonucleotide
guauugacaccugagacua

SEQ ID NO: 248229 - RNA, 19 nt, Artificial Sequence
  Description of Artificial Sequence: Synthetic oligonucleotide
ggugaucgaaaccagcuuc

SEQ ID NO: 248230 - RNA, 19 nt, Artificial Sequence
  Description of Artificial Sequence: Synthetic oligonucleotide
aucguaccaaauccugucu

SEQ ID NO: 248231 - RNA, 19 nt, Artificial Sequence
  Description of Artificial Sequence: Synthetic oligonucleotide
acagaggguaccacuagag

SEQ ID NO: 248232 - RNA, 19 nt, Artificial Sequence
  Description of Artificial Sequence: Synthetic oligonucleotide
uacggugaagcuuuaucuu

SEQ ID NO: 248233 - RNA, 19 nt, Artificial Sequence
  Description of Artificial Sequence: Synthetic oligonucleotide
ucuacaguauaggcaaguc

SEQ ID NO: 248234 - RNA, 19 nt, Artificial Sequence
  Description of Artificial Sequence: Synthetic oligonucleotide
ccgguuucuuacuuuaacg

SEQ ID NO: 248235 - RNA, 19 nt, Artificial Sequence
  Description of Artificial Sequence: Synthetic oligonucleotide
ccucugacggaaauagucg

SEQ ID NO: 248236 - RNA, 19 nt, Artificial Sequence
  Description of Artificial Sequence: Synthetic oligonucleotide
acuaagcuuacaacagcag

SEQ ID NO: 248237 - RNA, 19 nt, Artificial Sequence
  Description of Artificial Sequence: Synthetic oligonucleotide
cugcucgccuaauacauuc

SEQ ID NO: 248238 - RNA, 19 nt, Artificial Sequence
  Description of Artificial Sequence: Synthetic oligonucleotide
gcaacaagaaguaucaaaa

SEQ ID NO: 248239 - RNA, 19 nt, Artificial Sequence
  Description of Artificial Sequence: Synthetic oligonucleotide
gacggaaauagucgccuuc

SEQ ID NO: 248240 - RNA, 19 nt, Artificial Sequence
  Description of Artificial Sequence: Synthetic oligonucleotide
agccaggcgauacucucag

SEQ ID NO: 248241 - RNA, 19 nt, Artificial Sequence
  Description of Artificial Sequence: Synthetic oligonucleotide
ucaccgguuucuuacuuua

SEQ ID NO: 248242 - RNA, 19 nt, Artificial Sequence
  Description of Artificial Sequence: Synthetic oligonucleotide
cauuaaggagguaauuucu

SEQ ID NO: 248243 - RNA, 19 nt, Artificial Sequence
  Description of Artificial Sequence: Synthetic oligonucleotide
gauagucuauccacaguga

SEQ ID NO: 248244 - RNA, 19 nt, Artificial Sequence
  Description of Artificial Sequence: Synthetic oligonucleotide
guacauaaguguacaauaa

SEQ ID NO: 248245 - RNA, 19 nt, Artificial Sequence
  Description of Artificial Sequence: Synthetic oligonucleotide
aaucuguuggauagucuau

SEQ ID NO: 248246 - RNA, 19 nt, Artificial Sequence
  Description of Artificial Sequence: Synthetic oligonucleotide
ucgaaaccagcuuccguaa

SEQ ID NO: 248247 - RNA, 19 nt, Artificial Sequence
  Description of Artificial Sequence: Synthetic oligonucleotide
gugaucgaaaccagcuucc

SEQ ID NO: 248248 - RNA, 19 nt, Artificial Sequence
  Description of Artificial Sequence: Synthetic oligonucleotide
acugaucguaccaaauccu

SEQ ID NO: 248249 - RNA, 19 nt, Artificial Sequence
  Description of Artificial Sequence: Synthetic oligonucleotide
acggugaagcuuuaucuua

SEQ ID NO: 248250 - RNA, 19 nt, Artificial Sequence
  Description of Artificial Sequence: Synthetic oligonucleotide
auuacagagcaagacuuua

SEQ ID NO: 248251 - RNA, 19 nt, Artificial Sequence
  Description of Artificial Sequence: Synthetic oligonucleotide
cuacggugaagcuuuaucu

SEQ ID NO: 248252 - RNA, 19 nt, Artificial Sequence
  Description of Artificial Sequence: Synthetic oligonucleotide
ucguuacaacuacaaggaa

SEQ ID NO: 248253 - RNA, 19 nt, Artificial Sequence
  Description of Artificial Sequence: Synthetic oligonucleotide
cagaucgauugacuaaauc

SEQ ID NO: 248254 - RNA, 19 nt, Artificial Sequence
  Description of Artificial Sequence: Synthetic oligonucleotide
ugccgucauccgauaaugc

SEQ ID NO: 248255 - RNA, 19 nt, Artificial Sequence
  Description of Artificial Sequence: Synthetic oligonucleotide
ggcauuggcucucaauggc

SEQ ID NO: 248256 - RNA, 19 nt, Artificial Sequence
  Description of Artificial Sequence: Synthetic oligonucleotide
uaaagcgcuuagcaucaua

SEQ ID NO: 248257 - RNA, 19 nt, Artificial Sequence
  Description of Artificial Sequence: Synthetic oligonucleotide
ucguaccaaauccugucuu

SEQ ID NO: 248258 - RNA, 19 nt, Artificial Sequence
  Description of Artificial Sequence: Synthetic oligonucleotide
guuggauagucuauccaca

SEQ ID NO: 248259 - RNA, 19 nt, Artificial Sequence
  Description of Artificial Sequence: Synthetic oligonucleotide
uaaguuaaagaggccccuc

SEQ ID NO: 248260 - RNA, 19 nt, Artificial Sequence
  Description of Artificial Sequence: Synthetic oligonucleotide
guauguggaaagaaacuaa

SEQ ID NO: 248261 - RNA, 19 nt, Artificial Sequence
  Description of Artificial Sequence: Synthetic oligonucleotide
uccuuuuauucagacggau

SEQ ID NO: 248262 - RNA, 19 nt, Artificial Sequence
  Description of Artificial Sequence: Synthetic oligonucleotide
cucgccuaauacauucauc

SEQ ID NO: 248263 - RNA, 19 nt, Artificial Sequence
  Description of Artificial Sequence: Synthetic oligonucleotide
caguggcuaaccucacuag

SEQ ID NO: 248264 - RNA, 19 nt, Artificial Sequence
  Description of Artificial Sequence: Synthetic oligonucleotide
cgguuucuuacuuuaacgc

SEQ ID NO: 248265 - RNA, 19 nt, Artificial Sequence
  Description of Artificial Sequence: Synthetic oligonucleotide
ccguaaagcgcuuagcauc

SEQ ID NO: 248266 - RNA, 19 nt, Artificial Sequence
  Description of Artificial Sequence: Synthetic oligonucleotide
cauccuuaacagcucucug

SEQ ID NO: 248267 - RNA, 19 nt, Artificial Sequence
  Description of Artificial Sequence: Synthetic oligonucleotide
cuguucguuacaacuacaa

SEQ ID NO: 248268 - RNA, 19 nt, Artificial Sequence
  Description of Artificial Sequence: Synthetic oligonucleotide
gugucacuccacuaauuuc

SEQ ID NO: 248269 - RNA, 19 nt, Artificial Sequence
  Description of Artificial Sequence: Synthetic oligonucleotide
aaccuguucguuacaacua

SEQ ID NO: 248270 - RNA, 19 nt, Artificial Sequence
  Description of Artificial Sequence: Synthetic oligonucleotide
ugcucgccuaauacauuca

SEQ ID NO: 248271 - RNA, 19 nt, Artificial Sequence
  Description of Artificial Sequence: Synthetic oligonucleotide
ucagaucgauugacuaaau

SEQ ID NO: 248272 - RNA, 19 nt, Artificial Sequence
  Description of Artificial Sequence: Synthetic oligonucleotide
agacggauaaaugguaguu

SEQ ID NO: 248273 - RNA, 19 nt, Artificial Sequence
  Description of Artificial Sequence: Synthetic oligonucleotide
uguguagcaacaggguauu

SEQ ID NO: 248274 - RNA, 19 nt, Artificial Sequence
  Description of Artificial Sequence: Synthetic oligonucleotide
ucgucacuauacagcucag

SEQ ID NO: 248275 - RNA, 19 nt, Artificial Sequence
  Description of Artificial Sequence: Synthetic oligonucleotide
caagacaacgauugaucaa

SEQ ID NO: 248276 - RNA, 19 nt, Artificial Sequence
  Description of Artificial Sequence: Synthetic oligonucleotide
cucagaucgauugacuaaa

SEQ ID NO: 248277 - RNA, 19 nt, Artificial Sequence
  Description of Artificial Sequence: Synthetic oligonucleotide
gacgauugacucagcagga

SEQ ID NO: 248278 - RNA, 19 nt, Artificial Sequence
  Description of Artificial Sequence: Synthetic oligonucleotide
agguagcagccuaucagag

SEQ ID NO: 248279 - RNA, 19 nt, Artificial Sequence
  Description of Artificial Sequence: Synthetic oligonucleotide
agacucuugcuugucuuga

SEQ ID NO: 248280 - RNA, 19 nt, Artificial Sequence
  Description of Artificial Sequence: Synthetic oligonucleotide
acgauugaucaaauacuga

SEQ ID NO: 248281 - RNA, 19 nt, Artificial Sequence
  Description of Artificial Sequence: Synthetic oligonucleotide
gcuacggugaagcuuuauc

SEQ ID NO: 248282 - RNA, 19 nt, Artificial Sequence
  Description of Artificial Sequence: Synthetic oligonucleotide
agcuuuuauccaacuugag

SEQ ID NO: 248283 - RNA, 19 nt, Artificial Sequence
  Description of Artificial Sequence: Synthetic oligonucleotide
  modified_base (8)..(8): a, c, u, g, unknown or other
agguccanagaagcaagaa

SEQ ID NO: 248284 - RNA, 19 nt, Artificial Sequence
  Description of Artificial Sequence: Synthetic oligonucleotide
uacaggcuacggugaagcu

SEQ ID NO: 248285 - RNA, 19 nt, Artificial Sequence
  Description of Artificial Sequence: Synthetic oligonucleotide
guuuacaggcuacggugaa

SEQ ID NO: 248286 - RNA, 19 nt, Artificial Sequence
  Description of Artificial Sequence: Synthetic oligonucleotide
uauugacaccugagacuaa

SEQ ID NO: 248287 - RNA, 19 nt, Artificial Sequence
  Description of Artificial Sequence: Synthetic oligonucleotide
aagucucaggagaaauguu

SEQ ID NO: 248288 - RNA, 19 nt, Artificial Sequence
  Description of Artificial Sequence: Synthetic oligonucleotide
gaucgaaaccagcuuccgu

SEQ ID NO: 248289 - RNA, 19 nt, Artificial Sequence
  Description of Artificial Sequence: Synthetic oligonucleotide
  modified_base (9)..(9): a, c, u, g, unknown or other
gagguccanagaagcaaga

SEQ ID NO: 248290 - RNA, 19 nt, Artificial Sequence
  Description of Artificial Sequence: Synthetic oligonucleotide
uaguuggggagggauuguc

SEQ ID NO: 248291 - RNA, 19 nt, Artificial Sequence
  Description of Artificial Sequence: Synthetic oligonucleotide
cuuaguccuugaaacggcu

SEQ ID NO: 248292 - RNA, 19 nt, Artificial Sequence
  Description of Artificial Sequence: Synthetic oligonucleotide
gccuaauacauucaucuau

SEQ ID NO: 248293 - RNA, 19 nt, Artificial Sequence
  Description of Artificial Sequence: Synthetic oligonucleotide
guuaaagaggccccuccau

SEQ ID NO: 248294 - RNA, 19 nt, Artificial Sequence
  Description of Artificial Sequence: Synthetic oligonucleotide
ggaaguuaccuagacuuaa

SEQ ID NO: 248295 - RNA, 19 nt, Artificial Sequence
  Description of Artificial Sequence: Synthetic oligonucleotide
agacugucuuaguccuuga

SEQ ID NO: 248296 - RNA, 19 nt, Artificial Sequence
  Description of Artificial Sequence: Synthetic oligonucleotide
aaccucugacggaaauagu

SEQ ID NO: 248297 - RNA, 19 nt, Artificial Sequence
  Description of Artificial Sequence: Synthetic oligonucleotide
ugacggaaauagucgccuu

SEQ ID NO: 248298 - RNA, 19 nt, Artificial Sequence
  Description of Artificial Sequence: Synthetic oligonucleotide
guccacuaauucacagcag

SEQ ID NO: 248299 - RNA, 19 nt, Artificial Sequence
  Description of Artificial Sequence: Synthetic oligonucleotide
ggcacgcuacaguuucuag

SEQ ID NO: 248300 - RNA, 19 nt, Artificial Sequence
  Description of Artificial Sequence: Synthetic oligonucleotide
cuuuaacgcaagacugucu

SEQ ID NO: 248301 - RNA, 19 nt, Artificial Sequence
  Description of Artificial Sequence: Synthetic oligonucleotide
aaccgaauuccaggagcaa

SEQ ID NO: 248302 - RNA, 19 nt, Artificial Sequence
  Description of Artificial Sequence: Synthetic oligonucleotide
acaguauaggcaagucuuu

SEQ ID NO: 248303 - RNA, 19 nt, Artificial Sequence
  Description of Artificial Sequence: Synthetic oligonucleotide
auccaacuugagauuacaa

SEQ ID NO: 248304 - RNA, 19 nt, Artificial Sequence
  Description of Artificial Sequence: Synthetic oligonucleotide
caucuaucuuaggaaggca

SEQ ID NO: 248305 - RNA, 19 nt, Artificial Sequence
  Description of Artificial Sequence: Synthetic oligonucleotide
caggcuacggugaagcuuu

SEQ ID NO: 248306 - RNA, 19 nt, Artificial Sequence
  Description of Artificial Sequence: Synthetic oligonucleotide
cgucauccgauaaugcuuc

SEQ ID NO: 248307 - RNA, 19 nt, Artificial Sequence
  Description of Artificial Sequence: Synthetic oligonucleotide
aguuaacauugugauucuu

SEQ ID NO: 248308 - RNA, 19 nt, Artificial Sequence
  Description of Artificial Sequence: Synthetic oligonucleotide
caacaucuacugguucaug

SEQ ID NO: 248309 - RNA, 19 nt, Artificial Sequence
  Description of Artificial Sequence: Synthetic oligonucleotide
cugucuuaagacagagggu

SEQ ID NO: 248310 - RNA, 19 nt, Artificial Sequence
  Description of Artificial Sequence: Synthetic oligonucleotide
guacuuuaaucuguuggau

SEQ ID NO: 248311 - RNA, 19 nt, Artificial Sequence
  Description of Artificial Sequence: Synthetic oligonucleotide
agaguaccuguucgaccaa

SEQ ID NO: 248312 - RNA, 19 nt, Artificial Sequence
  Description of Artificial Sequence: Synthetic oligonucleotide
cagacggauaaaugguagu

SEQ ID NO: 248313 - RNA, 19 nt, Artificial Sequence
  Description of Artificial Sequence: Synthetic oligonucleotide
cgauugaucaaauacugau

SEQ ID NO: 248314 - RNA, 19 nt, Artificial Sequence
  Description of Artificial Sequence: Synthetic oligonucleotide
agcugccgucauccgauaa

SEQ ID NO: 248315 - RNA, 19 nt, Artificial Sequence
  Description of Artificial Sequence: Synthetic oligonucleotide
cggauaaaugguaguuaac

SEQ ID NO: 248316 - RNA, 19 nt, Artificial Sequence
  Description of Artificial Sequence: Synthetic oligonucleotide
gucgccuuccagccagaga

SEQ ID NO: 248317 - RNA, 19 nt, Artificial Sequence
  Description of Artificial Sequence: Synthetic oligonucleotide
uagucgccuuccagccaga

SEQ ID NO: 248318 - RNA, 19 nt, Artificial Sequence
  Description of Artificial Sequence: Synthetic oligonucleotide
gccauccggaaagaaaaga

SEQ ID NO: 248319 - RNA, 19 nt, Artificial Sequence
  Description of Artificial Sequence: Synthetic oligonucleotide
gcuacaguuucuagucaca

SEQ ID NO: 248320 - RNA, 19 nt, Artificial Sequence
  Description of Artificial Sequence: Synthetic oligonucleotide
augcaacaagaaguaucaa

SEQ ID NO: 248321 - RNA, 19 nt, Artificial Sequence
  Description of Artificial Sequence: Synthetic oligonucleotide
cuuggguacuucacacagu

SEQ ID NO: 248322 - RNA, 19 nt, Artificial Sequence
  Description of Artificial Sequence: Synthetic oligonucleotide
ccuuuuauucagacggaua

SEQ ID NO: 248323 - RNA, 19 nt, Artificial Sequence
  Description of Artificial Sequence: Synthetic oligonucleotide
gccgucauccgauaaugcu

SEQ ID NO: 248324 - RNA, 19 nt, Artificial Sequence
  Description of Artificial Sequence: Synthetic oligonucleotide
gcacgcuacaguuucuagu

SEQ ID NO: 248325 - RNA, 19 nt, Artificial Sequence
  Description of Artificial Sequence: Synthetic oligonucleotide
gcaacuuuucaagugggau

SEQ ID NO: 248326 - RNA, 19 nt, Artificial Sequence
  Description of Artificial Sequence: Synthetic oligonucleotide
gcugccauccggaaagaaa

SEQ ID NO: 248327 - RNA, 19 nt, Artificial Sequence
  Description of Artificial Sequence: Synthetic oligonucleotide
gcgauacucucagcugccg

SEQ ID NO: 248328 - RNA, 19 nt, Artificial Sequence
  Description of Artificial Sequence: Synthetic oligonucleotide
cauuggcucucaauggcuu

SEQ ID NO: 248329 - RNA, 19 nt, Artificial Sequence
  Description of Artificial Sequence: Synthetic oligonucleotide
ggcaacuuuucaaguggga

SEQ ID NO: 248330 - RNA, 19 nt, Artificial Sequence
  Description of Artificial Sequence: Synthetic oligonucleotide
cguauguggaaagaaacua

SEQ ID NO: 248331 - RNA, 19 nt, Artificial Sequence
  Description of Artificial Sequence: Synthetic oligonucleotide
ccuguucguuacaacuaca

SEQ ID NO: 248332 - RNA, 19 nt, Artificial Sequence
  Description of Artificial Sequence: Synthetic oligonucleotide
cccuaaccaaaggcaacag

SEQ ID NO: 248333 - RNA, 19 nt, Artificial Sequence
  Description of Artificial Sequence: Synthetic oligonucleotide
gcuaaccucacuagggcau

SEQ ID NO: 248334 - RNA, 19 nt, Artificial Sequence
  Description of Artificial Sequence: Synthetic oligonucleotide
gcaauggcgcccucaacau

SEQ ID NO: 248335 - RNA, 19 nt, Artificial Sequence
  Description of Artificial Sequence: Synthetic oligonucleotide
guugggccccucaaauggu

SEQ ID NO: 248336 - RNA, 19 nt, Artificial Sequence
  Description of Artificial Sequence: Synthetic oligonucleotide
guaguuggggagggauugu

SEQ ID NO: 248337 - RNA, 19 nt, Artificial Sequence
  Description of Artificial Sequence: Synthetic oligonucleotide
caauauccgagagcuguuu

SEQ ID NO: 248338 - RNA, 19 nt, Artificial Sequence
  Description of Artificial Sequence: Synthetic oligonucleotide
uuggaccauuaaggaggua

SEQ ID NO: 248339 - RNA, 19 nt, Artificial Sequence
  Description of Artificial Sequence: Synthetic oligonucleotide
gcugccgucauccgauaau

SEQ ID NO: 248340 - RNA, 19 nt, Artificial Sequence
  Description of Artificial Sequence: Synthetic oligonucleotide
gcauuggcucucaauggcu

SEQ ID NO: 248341 - RNA, 19 nt, Artificial Sequence
  Description of Artificial Sequence: Synthetic oligonucleotide
gcucgccuaauacauucau

SEQ ID NO: 248342 - RNA, 19 nt, Artificial Sequence
  Description of Artificial Sequence: Synthetic oligonucleotide
gccaggcgauacucucagc

SEQ ID NO: 248343 - RNA, 19 nt, Artificial Sequence
  Description of Artificial Sequence: Synthetic oligonucleotide
ccgucauccgauaaugcuu

SEQ ID NO: 248344 - RNA, 19 nt, Artificial Sequence
  Description of Artificial Sequence: Synthetic oligonucleotide
ggucaccgguuucuuacuu

SEQ ID NO: 248345 - RNA, 19 nt, Artificial Sequence
  Description of Artificial Sequence: Synthetic oligonucleotide
gauugccugcucgccuaau

SEQ ID NO: 248346 - RNA, 19 nt, Artificial Sequence
  Description of Artificial Sequence: Synthetic oligonucleotide
auggcgcccucaacauuuu

SEQ ID NO: 248347 - RNA, 19 nt, Artificial Sequence
  Description of Artificial Sequence: Synthetic oligonucleotide
caauggcgcccucaacauu

SEQ ID NO: 248348 - RNA, 19 nt, Artificial Sequence
  Description of Artificial Sequence: Synthetic oligonucleotide
cgccuaauacauucaucua

SEQ ID NO: 248349 - RNA, 19 nt, Artificial Sequence
  Description of Artificial Sequence: Synthetic oligonucleotide
cgauacucucagcugccgu

SEQ ID NO: 248350 - RNA, 19 nt, Artificial Sequence
  Description of Artificial Sequence: Synthetic oligonucleotide
aggcuacggugaagcuuua

SEQ ID NO: 248351 - RNA, 19 nt, Artificial Sequence
  Description of Artificial Sequence: Synthetic oligonucleotide
ggcuacggugaagcuuuau

SEQ ID NO: 248352 - RNA, 19 nt, Artificial Sequence
  Description of Artificial Sequence: Synthetic oligonucleotide
ccacggcauuacagagcaa

SEQ ID NO: 248353 - RNA, 19 nt, Artificial Sequence
  Description of Artificial Sequence: Synthetic oligonucleotide
uugacuauccucuagaucu

SEQ ID NO: 248354 - RNA, 19 nt, Artificial Sequence
  Description of Artificial Sequence: Synthetic oligonucleotide
auuggaacuaaacauaguc

SEQ ID NO: 248355 - RNA, 19 nt, Artificial Sequence
  Description of Artificial Sequence: Synthetic oligonucleotide
aaauuaucguaguaaguac

SEQ ID NO: 248356 - RNA, 19 nt, Artificial Sequence
  Description of Artificial Sequence: Synthetic oligonucleotide
ugaauguagacuuugcucc

SEQ ID NO: 248357 - RNA, 19 nt, Artificial Sequence
  Description of Artificial Sequence: Synthetic oligonucleotide
aagaauacauuaugggcac

SEQ ID NO: 248358 - RNA, 19 nt, Artificial Sequence
  Description of Artificial Sequence: Synthetic oligonucleotide
aauuaucguaguaaguacc

SEQ ID NO: 248359 - RNA, 19 nt, Artificial Sequence
  Description of Artificial Sequence: Synthetic oligonucleotide
uguacucugauuuuacacg

SEQ ID NO: 248360 - RNA, 19 nt, Artificial Sequence
  Description of Artificial Sequence: Synthetic oligonucleotide
ucauacuuaaaacaccgcc

SEQ ID NO: 248361 - RNA, 19 nt, Artificial Sequence
  Description of Artificial Sequence: Synthetic oligonucleotide
uuaaccaucauaacuuuug

SEQ ID NO: 248362 - RNA, 19 nt, Artificial Sequence
  Description of Artificial Sequence: Synthetic oligonucleotide
acauuaugggcaccgaugc

SEQ ID NO: 248363 - RNA, 19 nt, Artificial Sequence
  Description of Artificial Sequence: Synthetic oligonucleotide
uucuaaauugcccacaguc

SEQ ID NO: 248364 - RNA, 19 nt, Artificial Sequence
  Description of Artificial Sequence: Synthetic oligonucleotide
cauacuuaaaacaccgccg

SEQ ID NO: 248365 - RNA, 19 nt, Artificial Sequence
  Description of Artificial Sequence: Synthetic oligonucleotide
uuugugcuaucacacaagg

SEQ ID NO: 248366 - RNA, 19 nt, Artificial Sequence
  Description of Artificial Sequence: Synthetic oligonucleotide
ucugcuacuauuauuugga

SEQ ID NO: 248367 - RNA, 19 nt, Artificial Sequence
  Description of Artificial Sequence: Synthetic oligonucleotide
accaagaauacauuauggg

SEQ ID NO: 248368 - RNA, 19 nt, Artificial Sequence
  Description of Artificial Sequence: Synthetic oligonucleotide
aacucauuacuauaaauua

SEQ ID NO: 248369 - RNA, 19 nt, Artificial Sequence
  Description of Artificial Sequence: Synthetic oligonucleotide
ucuaaauugcccacagucc

SEQ ID NO: 248370 - RNA, 19 nt, Artificial Sequence
  Description of Artificial Sequence: Synthetic oligonucleotide
uuauucuucgccccgcgcg

SEQ ID NO: 248371 - RNA, 19 nt, Artificial Sequence
  Description of Artificial Sequence: Synthetic oligonucleotide
auaaagauuccccagccug

SEQ ID NO: 248372 - RNA, 19 nt, Artificial Sequence
  Description of Artificial Sequence: Synthetic oligonucleotide
uuauugguguuugacaccg

SEQ ID NO: 248373 - RNA, 19 nt, Artificial Sequence
  Description of Artificial Sequence: Synthetic oligonucleotide
gaagucaugaugugcacag

SEQ ID NO: 248374 - RNA, 19 nt, Artificial Sequence
  Description of Artificial Sequence: Synthetic oligonucleotide
cuuagcucccuccagaugc

SEQ ID NO: 248375 - RNA, 19 nt, Artificial Sequence
  Description of Artificial Sequence: Synthetic oligonucleotide
ucugauuuuacacgcuucc

SEQ ID NO: 248376 - RNA, 19 nt, Artificial Sequence
  Description of Artificial Sequence: Synthetic oligonucleotide
uuugacucugaacucauac

SEQ ID NO: 248377 - RNA, 19 nt, Artificial Sequence
  Description of Artificial Sequence: Synthetic oligonucleotide
uccguuuauauguauuggg

SEQ ID NO: 248378 - RNA, 19 nt, Artificial Sequence
  Description of Artificial Sequence: Synthetic oligonucleotide
ucaccguuaaccaucauaa

SEQ ID NO: 248379 - RNA, 19 nt, Artificial Sequence
  Description of Artificial Sequence: Synthetic oligonucleotide
uucagaauuucaaacugca

SEQ ID NO: 248380 - RNA, 19 nt, Artificial Sequence
  Description of Artificial Sequence: Synthetic oligonucleotide
aaauuacuguuacaguacu

SEQ ID NO: 248381 - RNA, 19 nt, Artificial Sequence
  Description of Artificial Sequence: Synthetic oligonucleotide
uauuaguucuucaaugaaa

SEQ ID NO: 248382 - RNA, 19 nt, Artificial Sequence
  Description of Artificial Sequence: Synthetic oligonucleotide
aaaauucugcuguaaggga

SEQ ID NO: 248383 - RNA, 19 nt, Artificial Sequence
  Description of Artificial Sequence: Synthetic oligonucleotide
ugagaaaugaucucuccac

SEQ ID NO: 248384 - RNA, 19 nt, Artificial Sequence
  Description of Artificial Sequence: Synthetic oligonucleotide
ugacgauuggaacuaaaca

SEQ ID NO: 248385 - RNA, 19 nt, Artificial Sequence
  Description of Artificial Sequence: Synthetic oligonucleotide
uacauuaugggcaccgaug

SEQ ID NO: 248386 - RNA, 19 nt, Artificial Sequence
  Description of Artificial Sequence: Synthetic oligonucleotide
agucauacuuaaaacaccg

SEQ ID NO: 248387 - RNA, 19 nt, Artificial Sequence
  Description of Artificial Sequence: Synthetic oligonucleotide
augugcacaggcuguaucc

SEQ ID NO: 248388 - RNA, 19 nt, Artificial Sequence
  Description of Artificial Sequence: Synthetic oligonucleotide
cuuaaaacaccgccgacag

SEQ ID NO: 248389 - RNA, 19 nt, Artificial Sequence
  Description of Artificial Sequence: Synthetic oligonucleotide
ugguacaaaacacuuugca

SEQ ID NO: 248390 - RNA, 19 nt, Artificial Sequence
  Description of Artificial Sequence: Synthetic oligonucleotide
uuuaaugggaugacuugug

SEQ ID NO: 248391 - RNA, 19 nt, Artificial Sequence
  Description of Artificial Sequence: Synthetic oligonucleotide
uuggaacuaaacauagucu

SEQ ID NO: 248392 - RNA, 19 nt, Artificial Sequence
  Description of Artificial Sequence: Synthetic oligonucleotide
ugaacuacauugacaaaac

SEQ ID NO: 248393 - RNA, 19 nt, Artificial Sequence
  Description of Artificial Sequence: Synthetic oligonucleotide
ucguuguucaaguugaaaa

SEQ ID NO: 248394 - RNA, 19 nt, Artificial Sequence
  Description of Artificial Sequence: Synthetic oligonucleotide
uuuugugcuaucacacaag

SEQ ID NO: 248395 - RNA, 19 nt, Artificial Sequence
  Description of Artificial Sequence: Synthetic oligonucleotide
agaaaugaucucuccacag

SEQ ID NO: 248396 - RNA, 19 nt, Artificial Sequence
  Description of Artificial Sequence: Synthetic oligonucleotide
accguuaaccaucauaacu

SEQ ID NO: 248397 - RNA, 19 nt, Artificial Sequence
  Description of Artificial Sequence: Synthetic oligonucleotide
aauuuugugcuaucacaca

SEQ ID NO: 248398 - RNA, 19 nt, Artificial Sequence
  Description of Artificial Sequence: Synthetic oligonucleotide
agccagguaacauggacac

SEQ ID NO: 248399 - RNA, 19 nt, Artificial Sequence
  Description of Artificial Sequence: Synthetic oligonucleotide
uaguuguaaacaugguuag

SEQ ID NO: 248400 - RNA, 19 nt, Artificial Sequence
  Description of Artificial Sequence: Synthetic oligonucleotide
aaagauuccccagccugcc

SEQ ID NO: 248401 - RNA, 19 nt, Artificial Sequence
  Description of Artificial Sequence: Synthetic oligonucleotide
uggaaaauccaagucacug

SEQ ID NO: 248402 - RNA, 19 nt, Artificial Sequence
  Description of Artificial Sequence: Synthetic oligonucleotide
ggacucuaaacauugaggc

SEQ ID NO: 248403 - RNA, 19 nt, Artificial Sequence
  Description of Artificial Sequence: Synthetic oligonucleotide
uuauuuggaagucuuccuc

SEQ ID NO: 248404 - RNA, 19 nt, Artificial Sequence
  Description of Artificial Sequence: Synthetic oligonucleotide
auuaucguaguaaguaccg

SEQ ID NO: 248405 - RNA, 19 nt, Artificial Sequence
  Description of Artificial Sequence: Synthetic oligonucleotide
agcaguuuggauuuacuga

SEQ ID NO: 248406 - RNA, 19 nt, Artificial Sequence
  Description of Artificial Sequence: Synthetic oligonucleotide
uuaaugggaugacuugugc

SEQ ID NO: 248407 - RNA, 19 nt, Artificial Sequence
  Description of Artificial Sequence: Synthetic oligonucleotide
uguauuggguguugcgugg

SEQ ID NO: 248408 - RNA, 19 nt, Artificial Sequence
  Description of Artificial Sequence: Synthetic oligonucleotide
cugaacacucccuaguccc

SEQ ID NO: 248409 - RNA, 19 nt, Artificial Sequence
  Description of Artificial Sequence: Synthetic oligonucleotide
uaaggaauauuauguaaaa

SEQ ID NO: 248410 - RNA, 19 nt, Artificial Sequence
  Description of Artificial Sequence: Synthetic oligonucleotide
auacuuaaaacaccgccga

SEQ ID NO: 248411 - RNA, 19 nt, Artificial Sequence
  Description of Artificial Sequence: Synthetic oligonucleotide
ugauuuuacacgcuuccuc

SEQ ID NO: 248412 - RNA, 19 nt, Artificial Sequence
  Description of Artificial Sequence: Synthetic oligonucleotide
gaggacucuaaacauugag

SEQ ID NO: 248413 - RNA, 19 nt, Artificial Sequence
  Description of Artificial Sequence: Synthetic oligonucleotide
aagcuaaggcagcuguuuc

SEQ ID NO: 248414 - RNA, 19 nt, Artificial Sequence
  Description of Artificial Sequence: Synthetic oligonucleotide
ugucuacauguuuuggucc

SEQ ID NO: 248415 - RNA, 19 nt, Artificial Sequence
  Description of Artificial Sequence: Synthetic oligonucleotide
ucguaguaaguaccgauga

SEQ ID NO: 248416 - RNA, 19 nt, Artificial Sequence
  Description of Artificial Sequence: Synthetic oligonucleotide
auuauuuggaagucuuccu

SEQ ID NO: 248417 - RNA, 19 nt, Artificial Sequence
  Description of Artificial Sequence: Synthetic oligonucleotide
acuuuugcauagcaguuug

SEQ ID NO: 248418 - RNA, 19 nt, Artificial Sequence
  Description of Artificial Sequence: Synthetic oligonucleotide
aguaaguaccgaugaggac

SEQ ID NO: 248419 - RNA, 19 nt, Artificial Sequence
  Description of Artificial Sequence: Synthetic oligonucleotide
uuuagagccccgcugaaua

SEQ ID NO: 248420 - RNA, 19 nt, Artificial Sequence
  Description of Artificial Sequence: Synthetic oligonucleotide
uuuggauuuacugaaugau

SEQ ID NO: 248421 - RNA, 19 nt, Artificial Sequence
  Description of Artificial Sequence: Synthetic oligonucleotide
auaguuguaaacaugguua

SEQ ID NO: 248422 - RNA, 19 nt, Artificial Sequence
  Description of Artificial Sequence: Synthetic oligonucleotide
cuuccguuuauauguauug

SEQ ID NO: 248423 - RNA, 19 nt, Artificial Sequence
  Description of Artificial Sequence: Synthetic oligonucleotide
auguuuuggucccaauuag

SEQ ID NO: 248424 - RNA, 19 nt, Artificial Sequence
  Description of Artificial Sequence: Synthetic oligonucleotide
ucaagguuccugaagcuaa

SEQ ID NO: 248425 - RNA, 19 nt, Artificial Sequence
  Description of Artificial Sequence: Synthetic oligonucleotide
uguuugacaccgagaauug

SEQ ID NO: 248426 - RNA, 19 nt, Artificial Sequence
  Description of Artificial Sequence: Synthetic oligonucleotide
uuacuguuacaguacuuug

SEQ ID NO: 248427 - RNA, 19 nt, Artificial Sequence
  Description of Artificial Sequence: Synthetic oligonucleotide
uugcauagcaguuuggauu

SEQ ID NO: 248428 - RNA, 19 nt, Artificial Sequence
  Description of Artificial Sequence: Synthetic oligonucleotide
aggcuuguuguccagagcu

SEQ ID NO: 248429 - RNA, 19 nt, Artificial Sequence
  Description of Artificial Sequence: Synthetic oligonucleotide
auuauucuucgccccgcgc

SEQ ID NO: 248430 - RNA, 19 nt, Artificial Sequence
  Description of Artificial Sequence: Synthetic oligonucleotide
guacucugauuuuacacgc

SEQ ID NO: 248431 - RNA, 19 nt, Artificial Sequence
  Description of Artificial Sequence: Synthetic oligonucleotide
agagaguaugaaaugaaug

SEQ ID NO: 248432 - RNA, 19 nt, Artificial Sequence
  Description of Artificial Sequence: Synthetic oligonucleotide
ucuugguuuaagguuuccg

SEQ ID NO: 248433 - RNA, 19 nt, Artificial Sequence
  Description of Artificial Sequence: Synthetic oligonucleotide
uuuugcauagcaguuugga

SEQ ID NO: 248434 - RNA, 19 nt, Artificial Sequence
  Description of Artificial Sequence: Synthetic oligonucleotide
guaugaaaugaauguagac

SEQ ID NO: 248435 - RNA, 19 nt, Artificial Sequence
  Description of Artificial Sequence: Synthetic oligonucleotide
uggugagaaggcaauaaaa

SEQ ID NO: 248436 - RNA, 19 nt, Artificial Sequence
  Description of Artificial Sequence: Synthetic oligonucleotide
ucaucuuuauugguguuug

SEQ ID NO: 248437 - RNA, 19 nt, Artificial Sequence
  Description of Artificial Sequence: Synthetic oligonucleotide
caucauuauauugaccaag

SEQ ID NO: 248438 - RNA, 19 nt, Artificial Sequence
  Description of Artificial Sequence: Synthetic oligonucleotide
agaagagaguaugaaauga

SEQ ID NO: 248439 - RNA, 19 nt, Artificial Sequence
  Description of Artificial Sequence: Synthetic oligonucleotide
ugucuguauccuuugacuc

SEQ ID NO: 248440 - RNA, 19 nt, Artificial Sequence
  Description of Artificial Sequence: Synthetic oligonucleotide
uugugcuaucacacaaggg

SEQ ID NO: 248441 - RNA, 19 nt, Artificial Sequence
  Description of Artificial Sequence: Synthetic oligonucleotide
ucccaauuagccuagcaau

SEQ ID NO: 248442 - RNA, 19 nt, Artificial Sequence
  Description of Artificial Sequence: Synthetic oligonucleotide
uagcauuugguccaucuau

SEQ ID NO: 248443 - RNA, 19 nt, Artificial Sequence
  Description of Artificial Sequence: Synthetic oligonucleotide
aggacucuaaacauugagg

SEQ ID NO: 248444 - RNA, 19 nt, Artificial Sequence
  Description of Artificial Sequence: Synthetic oligonucleotide
uuccguuuauauguauugg

SEQ ID NO: 248445 - RNA, 19 nt, Artificial Sequence
  Description of Artificial Sequence: Synthetic oligonucleotide
ugaauacugcaguucuugc

SEQ ID NO: 248446 - RNA, 19 nt, Artificial Sequence
  Description of Artificial Sequence: Synthetic oligonucleotide
uuauccgcucagcagugag

SEQ ID NO: 248447 - RNA, 19 nt, Artificial Sequence
  Description of Artificial Sequence: Synthetic oligonucleotide
ugaacacucccuagucccg

SEQ ID NO: 248448 - RNA, 19 nt, Artificial Sequence
  Description of Artificial Sequence: Synthetic oligonucleotide
uauccugugaucaccguua

SEQ ID NO: 248449 - RNA, 19 nt, Artificial Sequence
  Description of Artificial Sequence: Synthetic oligonucleotide
uggcccaugauuauucuuc

SEQ ID NO: 248450 - RNA, 19 nt, Artificial Sequence
  Description of Artificial Sequence: Synthetic oligonucleotide
auguauuggguguugcgug

SEQ ID NO: 248451 - RNA, 19 nt, Artificial Sequence
  Description of Artificial Sequence: Synthetic oligonucleotide
agagcauuuaccaacucca

SEQ ID NO: 248452 - RNA, 19 nt, Artificial Sequence
  Description of Artificial Sequence: Synthetic oligonucleotide
uugacaccgagaauuggcu

SEQ ID NO: 248453 - RNA, 19 nt, Artificial Sequence
  Description of Artificial Sequence: Synthetic oligonucleotide
cugacgauuggaacuaaac

SEQ ID NO: 248454 - RNA, 19 nt, Artificial Sequence
  Description of Artificial Sequence: Synthetic oligonucleotide
uuucuucucuucuucuucu

SEQ ID NO: 248455 - RNA, 19 nt, Artificial Sequence
  Description of Artificial Sequence: Synthetic oligonucleotide
uaucguaguaaguaccgau

SEQ ID NO: 248456 - RNA, 19 nt, Artificial Sequence
  Description of Artificial Sequence: Synthetic oligonucleotide
ugcguggaagggauguagg

SEQ ID NO: 248457 - RNA, 19 nt, Artificial Sequence
  Description of Artificial Sequence: Synthetic oligonucleotide
ugccacaucagacggugcc

SEQ ID NO: 248458 - RNA, 19 nt, Artificial Sequence
  Description of Artificial Sequence: Synthetic oligonucleotide
acucuuugacucugaacuc

SEQ ID NO: 248459 - RNA, 19 nt, Artificial Sequence
  Description of Artificial Sequence: Synthetic oligonucleotide
ugcauagcaguuuggauuu

SEQ ID NO: 248460 - RNA, 19 nt, Artificial Sequence
  Description of Artificial Sequence: Synthetic oligonucleotide
ugguuuaagguuuccguuc

SEQ ID NO: 248461 - RNA, 19 nt, Artificial Sequence
  Description of Artificial Sequence: Synthetic oligonucleotide
uauauguauuggguguugc

SEQ ID NO: 248462 - RNA, 19 nt, Artificial Sequence
  Description of Artificial Sequence: Synthetic oligonucleotide
cuauguuuggggugcauuc

SEQ ID NO: 248463 - RNA, 19 nt, Artificial Sequence
  Description of Artificial Sequence: Synthetic oligonucleotide
gagaugucaagggauuucc

SEQ ID NO: 248464 - RNA, 19 nt, Artificial Sequence
  Description of Artificial Sequence: Synthetic oligonucleotide
uuggauuuacugaaugauu

SEQ ID NO: 248465 - RNA, 19 nt, Artificial Sequence
  Description of Artificial Sequence: Synthetic oligonucleotide
acuuaaaacaccgccgaca

SEQ ID NO: 248466 - RNA, 19 nt, Artificial Sequence
  Description of Artificial Sequence: Synthetic oligonucleotide
uauccgcucagcagugagg

SEQ ID NO: 248467 - RNA, 19 nt, Artificial Sequence
  Description of Artificial Sequence: Synthetic oligonucleotide
acucuaaacauugaggcuu

SEQ ID NO: 248468 - RNA, 19 nt, Artificial Sequence
  Description of Artificial Sequence: Synthetic oligonucleotide
ugauaguuguaaacauggu

SEQ ID NO: 248469 - RNA, 19 nt, Artificial Sequence
  Description of Artificial Sequence: Synthetic oligonucleotide
uuugcauagcaguuuggau

SEQ ID NO: 248470 - RNA, 19 nt, Artificial Sequence
  Description of Artificial Sequence: Synthetic oligonucleotide
gucuacauguuuugguccc

SEQ ID NO: 248471 - RNA, 19 nt, Artificial Sequence
  Description of Artificial Sequence: Synthetic oligonucleotide
gcuacuauuauuuggaagu

SEQ ID NO: 248472 - RNA, 19 nt, Artificial Sequence
  Description of Artificial Sequence: Synthetic oligonucleotide
uauauugaccaagagcauu

SEQ ID NO: 248473 - RNA, 19 nt, Artificial Sequence
  Description of Artificial Sequence: Synthetic oligonucleotide
uauucuucgccccgcgcgc

SEQ ID NO: 248474 - RNA, 19 nt, Artificial Sequence
  Description of Artificial Sequence: Synthetic oligonucleotide
augguuagaggagccgucc

SEQ ID NO: 248475 - RNA, 19 nt, Artificial Sequence
  Description of Artificial Sequence: Synthetic oligonucleotide
ccugugaucaccguuaacc

SEQ ID NO: 248476 - RNA, 19 nt, Artificial Sequence
  Description of Artificial Sequence: Synthetic oligonucleotide
gacaccgagaauuggcuuc

SEQ ID NO: 248477 - RNA, 19 nt, Artificial Sequence
  Description of Artificial Sequence: Synthetic oligonucleotide
agcauuuaccaacuccaca

SEQ ID NO: 248478 - RNA, 19 nt, Artificial Sequence
  Description of Artificial Sequence: Synthetic oligonucleotide
guauccuuugacuccagca

SEQ ID NO: 248479 - RNA, 19 nt, Artificial Sequence
  Description of Artificial Sequence: Synthetic oligonucleotide
aggaaauuuccgaggaggg

SEQ ID NO: 248480 - RNA, 19 nt, Artificial Sequence
  Description of Artificial Sequence: Synthetic oligonucleotide
aacacucccuagucccgcg

SEQ ID NO: 248481 - RNA, 19 nt, Artificial Sequence
  Description of Artificial Sequence: Synthetic oligonucleotide
ugaucaccguuaaccauca

SEQ ID NO: 248482 - RNA, 19 nt, Artificial Sequence
  Description of Artificial Sequence: Synthetic oligonucleotide
ugcuaucacacaagggcac

SEQ ID NO: 248483 - RNA, 19 nt, Artificial Sequence
  Description of Artificial Sequence: Synthetic oligonucleotide
ggugcuaugacacuggacu

SEQ ID NO: 248484 - RNA, 19 nt, Artificial Sequence
  Description of Artificial Sequence: Synthetic oligonucleotide
ucuuuaucauuguucucuc

SEQ ID NO: 248485 - RNA, 19 nt, Artificial Sequence
  Description of Artificial Sequence: Synthetic oligonucleotide
aaauugcccacaguccuca

SEQ ID NO: 248486 - RNA, 19 nt, Artificial Sequence
  Description of Artificial Sequence: Synthetic oligonucleotide
aagagaguaugaaaugaau

SEQ ID NO: 248487 - RNA, 19 nt, Artificial Sequence
  Description of Artificial Sequence: Synthetic oligonucleotide
ucuggauagcucucuuagc

SEQ ID NO: 248488 - RNA, 19 nt, Artificial Sequence
  Description of Artificial Sequence: Synthetic oligonucleotide
uguauccuuugacuccagc

SEQ ID NO: 248489 - RNA, 19 nt, Artificial Sequence
  Description of Artificial Sequence: Synthetic oligonucleotide
ucuuccguuuauauguauu

SEQ ID NO: 248490 - RNA, 19 nt, Artificial Sequence
  Description of Artificial Sequence: Synthetic oligonucleotide
cuauuauuuggaagucuuc

SEQ ID NO: 248491 - RNA, 19 nt, Artificial Sequence
  Description of Artificial Sequence: Synthetic oligonucleotide
uugguuuaagguuuccguu

SEQ ID NO: 248492 - RNA, 19 nt, Artificial Sequence
  Description of Artificial Sequence: Synthetic oligonucleotide
guaaguaccgaugaggacu

SEQ ID NO: 248493 - RNA, 19 nt, Artificial Sequence
  Description of Artificial Sequence: Synthetic oligonucleotide
uuuacuucaucugcucuuc

SEQ ID NO: 248494 - RNA, 19 nt, Artificial Sequence
  Description of Artificial Sequence: Synthetic oligonucleotide
aucaccguuaaccaucaua

SEQ ID NO: 248495 - RNA, 19 nt, Artificial Sequence
  Description of Artificial Sequence: Synthetic oligonucleotide
uuuguugcccuuucggguu

SEQ ID NO: 248496 - RNA, 19 nt, Artificial Sequence
  Description of Artificial Sequence: Synthetic oligonucleotide
uuagccuagcaauggcaca

SEQ ID NO: 248497 - RNA, 19 nt, Artificial Sequence
  Description of Artificial Sequence: Synthetic oligonucleotide
uacuauuauuuggaagucu

SEQ ID NO: 248498 - RNA, 19 nt, Artificial Sequence
  Description of Artificial Sequence: Synthetic oligonucleotide
cauacugcauuauugcaaa

SEQ ID NO: 248499 - RNA, 19 nt, Artificial Sequence
  Description of Artificial Sequence: Synthetic oligonucleotide
uuaugggcaccgaugcaac

SEQ ID NO: 248500 - RNA, 19 nt, Artificial Sequence
  Description of Artificial Sequence: Synthetic oligonucleotide
ucggguugcguccaccaca

SEQ ID NO: 248501 - RNA, 19 nt, Artificial Sequence
  Description of Artificial Sequence: Synthetic oligonucleotide
auuaugggcaccgaugcaa

SEQ ID NO: 248502 - RNA, 19 nt, Artificial Sequence
  Description of Artificial Sequence: Synthetic oligonucleotide
cuuugacuccagcacacug

SEQ ID NO: 248503 - RNA, 19 nt, Artificial Sequence
  Description of Artificial Sequence: Synthetic oligonucleotide
uaaauugcccacaguccuc

SEQ ID NO: 248504 - RNA, 19 nt, Artificial Sequence
  Description of Artificial Sequence: Synthetic oligonucleotide
caagggauuuccauuucuc

SEQ ID NO: 248505 - RNA, 19 nt, Artificial Sequence
  Description of Artificial Sequence: Synthetic oligonucleotide
gaauauuauguaaaacagu

SEQ ID NO: 248506 - RNA, 19 nt, Artificial Sequence
  Description of Artificial Sequence: Synthetic oligonucleotide
aauacauuaugggcaccga

SEQ ID NO: 248507 - RNA, 19 nt, Artificial Sequence
  Description of Artificial Sequence: Synthetic oligonucleotide
aagcgguuuugacacucug

SEQ ID NO: 248508 - RNA, 19 nt, Artificial Sequence
  Description of Artificial Sequence: Synthetic oligonucleotide
uguugcguggaagggaugu

SEQ ID NO: 248509 - RNA, 19 nt, Artificial Sequence
  Description of Artificial Sequence: Synthetic oligonucleotide
acuauuauuuggaagucuu

SEQ ID NO: 248510 - RNA, 19 nt, Artificial Sequence
  Description of Artificial Sequence: Synthetic oligonucleotide
ucuugacuauccucuagau

SEQ ID NO: 248511 - RNA, 19 nt, Artificial Sequence
  Description of Artificial Sequence: Synthetic oligonucleotide
agaauacauuaugggcacc

SEQ ID NO: 248512 - RNA, 19 nt, Artificial Sequence
  Description of Artificial Sequence: Synthetic oligonucleotide
uacuuaaaacaccgccgac

SEQ ID NO: 248513 - RNA, 19 nt, Artificial Sequence
  Description of Artificial Sequence: Synthetic oligonucleotide
ugugaucaccguuaaccau

SEQ ID NO: 248514 - RNA, 19 nt, Artificial Sequence
  Description of Artificial Sequence: Synthetic oligonucleotide
cacacaagggcacgaacug

SEQ ID NO: 248515 - RNA, 19 nt, Artificial Sequence
  Description of Artificial Sequence: Synthetic oligonucleotide
ugggcaccgaugcaacugc

SEQ ID NO: 248516 - RNA, 19 nt, Artificial Sequence
  Description of Artificial Sequence: Synthetic oligonucleotide
guaggaagcagucauacuu

SEQ ID NO: 248517 - RNA, 19 nt, Artificial Sequence
  Description of Artificial Sequence: Synthetic oligonucleotide
aaccggucccuucucagau

SEQ ID NO: 248518 - RNA, 19 nt, Artificial Sequence
  Description of Artificial Sequence: Synthetic oligonucleotide
gaagagaguaugaaaugaa

SEQ ID NO: 248519 - RNA, 19 nt, Artificial Sequence
  Description of Artificial Sequence: Synthetic oligonucleotide
agggucuuuaaugggauga

SEQ ID NO: 248520 - RNA, 19 nt, Artificial Sequence
  Description of Artificial Sequence: Synthetic oligonucleotide
cauuacuauaaauuacugu

SEQ ID NO: 248521 - RNA, 19 nt, Artificial Sequence
  Description of Artificial Sequence: Synthetic oligonucleotide
agaguaugaaaugaaugua

SEQ ID NO: 248522 - RNA, 19 nt, Artificial Sequence
  Description of Artificial Sequence: Synthetic oligonucleotide
ucauacacuuucccucuuc

SEQ ID NO: 248523 - RNA, 19 nt, Artificial Sequence
  Description of Artificial Sequence: Synthetic oligonucleotide
ucucggacagccagguaac

SEQ ID NO: 248524 - RNA, 19 nt, Artificial Sequence
  Description of Artificial Sequence: Synthetic oligonucleotide
uuucggguugcguccacca

SEQ ID NO: 248525 - RNA, 19 nt, Artificial Sequence
  Description of Artificial Sequence: Synthetic oligonucleotide
ugauuauucuucgccccgc

SEQ ID NO: 248526 - RNA, 19 nt, Artificial Sequence
  Description of Artificial Sequence: Synthetic oligonucleotide
augucaagggauuuccauu

SEQ ID NO: 248527 - RNA, 19 nt, Artificial Sequence
  Description of Artificial Sequence: Synthetic oligonucleotide
aucguaguaaguaccgaug

SEQ ID NO: 248528 - RNA, 19 nt, Artificial Sequence
  Description of Artificial Sequence: Synthetic oligonucleotide
uuaucguaguaaguaccga

SEQ ID NO: 248529 - RNA, 19 nt, Artificial Sequence
  Description of Artificial Sequence: Synthetic oligonucleotide
uuugcucccucugaacaga

SEQ ID NO: 248530 - RNA, 19 nt, Artificial Sequence
  Description of Artificial Sequence: Synthetic oligonucleotide
aacgaauuuuguugcccuu

SEQ ID NO: 248531 - RNA, 19 nt, Artificial Sequence
  Description of Artificial Sequence: Synthetic oligonucleotide
aauuuccgaggagggcaac

SEQ ID NO: 248532 - RNA, 19 nt, Artificial Sequence
  Description of Artificial Sequence: Synthetic oligonucleotide
gaaagcgguuuugacacuc

SEQ ID NO: 248533 - RNA, 19 nt, Artificial Sequence
  Description of Artificial Sequence: Synthetic oligonucleotide
ucuuucucggaggaguguc

SEQ ID NO: 248534 - RNA, 19 nt, Artificial Sequence
  Description of Artificial Sequence: Synthetic oligonucleotide
ucugacgauuggaacuaaa

SEQ ID NO: 248535 - RNA, 19 nt, Artificial Sequence
  Description of Artificial Sequence: Synthetic oligonucleotide
ugcccuuucggguugcguc

SEQ ID NO: 248536 - RNA, 19 nt, Artificial Sequence
  Description of Artificial Sequence: Synthetic oligonucleotide
cucuaaacauugaggcuuc

SEQ ID NO: 248537 - RNA, 19 nt, Artificial Sequence
  Description of Artificial Sequence: Synthetic oligonucleotide
aacauagucuuuacuucau

SEQ ID NO: 248538 - RNA, 19 nt, Artificial Sequence
  Description of Artificial Sequence: Synthetic oligonucleotide
ucuucucuucuucuucuuu

SEQ ID NO: 248539 - RNA, 19 nt, Artificial Sequence
  Description of Artificial Sequence: Synthetic oligonucleotide
gugaucaccguuaaccauc

SEQ ID NO: 248540 - RNA, 19 nt, Artificial Sequence
  Description of Artificial Sequence: Synthetic oligonucleotide
uuagagccccgcugaauac

SEQ ID NO: 248541 - RNA, 19 nt, Artificial Sequence
  Description of Artificial Sequence: Synthetic oligonucleotide
gagggcaacuuucuuuauc

SEQ ID NO: 248542 - RNA, 19 nt, Artificial Sequence
  Description of Artificial Sequence: Synthetic oligonucleotide
uuucuuccggucuggccca

SEQ ID NO: 248543 - RNA, 19 nt, Artificial Sequence
  Description of Artificial Sequence: Synthetic oligonucleotide
caccgaugcaacugcauuc

SEQ ID NO: 248544 - RNA, 19 nt, Artificial Sequence
  Description of Artificial Sequence: Synthetic oligonucleotide
ugguguugcacugugcuuu

SEQ ID NO: 248545 - RNA, 19 nt, Artificial Sequence
  Description of Artificial Sequence: Synthetic oligonucleotide
gaugucaagggauuuccau

SEQ ID NO: 248546 - RNA, 19 nt, Artificial Sequence
  Description of Artificial Sequence: Synthetic oligonucleotide
uugcguccaccacaaaauc

SEQ ID NO: 248547 - RNA, 19 nt, Artificial Sequence
  Description of Artificial Sequence: Synthetic oligonucleotide
cuacuauuauuuggaaguc

SEQ ID NO: 248548 - RNA, 19 nt, Artificial Sequence
  Description of Artificial Sequence: Synthetic oligonucleotide
acacucccuagucccgcgc

SEQ ID NO: 248549 - RNA, 19 nt, Artificial Sequence
  Description of Artificial Sequence: Synthetic oligonucleotide
cagguaacauggacacugc

SEQ ID NO: 248550 - RNA, 19 nt, Artificial Sequence
  Description of Artificial Sequence: Synthetic oligonucleotide
acaugguuagaggagccgu

SEQ ID NO: 248551 - RNA, 19 nt, Artificial Sequence
  Description of Artificial Sequence: Synthetic oligonucleotide
caugguuagaggagccguc

SEQ ID NO: 248552 - RNA, 19 nt, Artificial Sequence
  Description of Artificial Sequence: Synthetic oligonucleotide
ucucauguacucugauuuu

SEQ ID NO: 248553 - RNA, 19 nt, Artificial Sequence
  Description of Artificial Sequence: Synthetic oligonucleotide
uuagcucccuccagaugcu

SEQ ID NO: 248554 - RNA, 19 nt, Artificial Sequence
  Description of Artificial Sequence: Synthetic oligonucleotide
cgauuggaacuaaacauag

SEQ ID NO: 248555 - RNA, 19 nt, Artificial Sequence
  Description of Artificial Sequence: Synthetic oligonucleotide
gacucuaaacauugaggcu

SEQ ID NO: 248556 - RNA, 19 nt, Artificial Sequence
  Description of Artificial Sequence: Synthetic oligonucleotide
ucuauguuuggggugcauu

SEQ ID NO: 248557 - RNA, 19 nt, Artificial Sequence
  Description of Artificial Sequence: Synthetic oligonucleotide
ugguuagaggagccguccu

SEQ ID NO: 248558 - RNA, 19 nt, Artificial Sequence
  Description of Artificial Sequence: Synthetic oligonucleotide
ggcccaugauuauucuucg

SEQ ID NO: 248559 - RNA, 19 nt, Artificial Sequence
  Description of Artificial Sequence: Synthetic oligonucleotide
ucagacggugccagcagua

SEQ ID NO: 248560 - RNA, 19 nt, Artificial Sequence
  Description of Artificial Sequence: Synthetic oligonucleotide
acgaacugucacaaggcug

SEQ ID NO: 248561 - RNA, 19 nt, Artificial Sequence
  Description of Artificial Sequence: Synthetic oligonucleotide
uccggucuggcccaugauu

SEQ ID NO: 248562 - RNA, 19 nt, Artificial Sequence
  Description of Artificial Sequence: Synthetic oligonucleotide
agguaacauggacacugcu

SEQ ID NO: 248563 - RNA, 19 nt, Artificial Sequence
  Description of Artificial Sequence: Synthetic oligonucleotide
ggguugauaguuguaaaca

SEQ ID NO: 248564 - RNA, 19 nt, Artificial Sequence
  Description of Artificial Sequence: Synthetic oligonucleotide
accgaugcaacugcauuca

SEQ ID NO: 248565 - RNA, 19 nt, Artificial Sequence
  Description of Artificial Sequence: Synthetic oligonucleotide
aguuguaaacaugguuaga

SEQ ID NO: 248566 - RNA, 19 nt, Artificial Sequence
  Description of Artificial Sequence: Synthetic oligonucleotide
ucccuagucccgcgcaaug

SEQ ID NO: 248567 - RNA, 19 nt, Artificial Sequence
  Description of Artificial Sequence: Synthetic oligonucleotide
cuugguguugcacugugcu

SEQ ID NO: 248568 - RNA, 19 nt, Artificial Sequence
  Description of Artificial Sequence: Synthetic oligonucleotide
caucagacggugccagcag

SEQ ID NO: 248569 - RNA, 19 nt, Artificial Sequence
  Description of Artificial Sequence: Synthetic oligonucleotide
ucggugagcucuuuauauu

SEQ ID NO: 248570 - RNA, 19 nt, Artificial Sequence
  Description of Artificial Sequence: Synthetic oligonucleotide
guagggacaggugcuauga

SEQ ID NO: 248571 - RNA, 19 nt, Artificial Sequence
  Description of Artificial Sequence: Synthetic oligonucleotide
ucccuccagaugcugguaa

SEQ ID NO: 248572 - RNA, 19 nt, Artificial Sequence
  Description of Artificial Sequence: Synthetic oligonucleotide
aaaacacuuugcagcuggu

SEQ ID NO: 248573 - RNA, 19 nt, Artificial Sequence
  Description of Artificial Sequence: Synthetic oligonucleotide
acaguacuuugcaaauuca

SEQ ID NO: 248574 - RNA, 19 nt, Artificial Sequence
  Description of Artificial Sequence: Synthetic oligonucleotide
caagggcacgaacugucac

SEQ ID NO: 248575 - RNA, 19 nt, Artificial Sequence
  Description of Artificial Sequence: Synthetic oligonucleotide
aaagcgguuuugacacucu

SEQ ID NO: 248576 - RNA, 19 nt, Artificial Sequence
  Description of Artificial Sequence: Synthetic oligonucleotide
ccccauauaaggaauauua

SEQ ID NO: 248577 - RNA, 19 nt, Artificial Sequence
  Description of Artificial Sequence: Synthetic oligonucleotide
uucuuccguuuauauguau

SEQ ID NO: 248578 - RNA, 19 nt, Artificial Sequence
  Description of Artificial Sequence: Synthetic oligonucleotide
auucuucgccccgcgcgcc

SEQ ID NO: 248579 - RNA, 19 nt, Artificial Sequence
  Description of Artificial Sequence: Synthetic oligonucleotide
ugacuauccucuagaucuu

SEQ ID NO: 248580 - RNA, 19 nt, Artificial Sequence
  Description of Artificial Sequence: Synthetic oligonucleotide
cuuuaaugggaugacuugu

SEQ ID NO: 248581 - RNA, 19 nt, Artificial Sequence
  Description of Artificial Sequence: Synthetic oligonucleotide
cacugugcuuugcaccggc

SEQ ID NO: 248582 - RNA, 19 nt, Artificial Sequence
  Description of Artificial Sequence: Synthetic oligonucleotide
ugacaccgagaauuggcuu

SEQ ID NO: 248583 - RNA, 19 nt, Artificial Sequence
  Description of Artificial Sequence: Synthetic oligonucleotide
uucggguugcguccaccac

SEQ ID NO: 248584 - RNA, 19 nt, Artificial Sequence
  Description of Artificial Sequence: Synthetic oligonucleotide
ggauagcucucuuagcaaa

SEQ ID NO: 248585 - RNA, 19 nt, Artificial Sequence
  Description of Artificial Sequence: Synthetic oligonucleotide
uuuauccgcucagcaguga

SEQ ID NO: 248586 - RNA, 19 nt, Artificial Sequence
  Description of Artificial Sequence: Synthetic oligonucleotide
agucuggauagcucucuua

SEQ ID NO: 248587 - RNA, 19 nt, Artificial Sequence
  Description of Artificial Sequence: Synthetic oligonucleotide
caccguuaaccaucauaac

SEQ ID NO: 248588 - RNA, 19 nt, Artificial Sequence
  Description of Artificial Sequence: Synthetic oligonucleotide
gcuaucacacaagggcacg

SEQ ID NO: 248589 - RNA, 19 nt, Artificial Sequence
  Description of Artificial Sequence: Synthetic oligonucleotide
ucuaaacauugaggcuuca

SEQ ID NO: 248590 - RNA, 19 nt, Artificial Sequence
  Description of Artificial Sequence: Synthetic oligonucleotide
uuagaggagccguccuuuu

SEQ ID NO: 248591 - RNA, 19 nt, Artificial Sequence
  Description of Artificial Sequence: Synthetic oligonucleotide
auuuccgaggagggcaacu

SEQ ID NO: 248592 - RNA, 19 nt, Artificial Sequence
  Description of Artificial Sequence: Synthetic oligonucleotide
gccgacagaagagaguaug

SEQ ID NO: 248593 - RNA, 19 nt, Artificial Sequence
  Description of Artificial Sequence: Synthetic oligonucleotide
uucuucucuucuucuucuu

SEQ ID NO: 248594 - RNA, 19 nt, Artificial Sequence
  Description of Artificial Sequence: Synthetic oligonucleotide
acaccgagaauuggcuuca

SEQ ID NO: 248595 - RNA, 19 nt, Artificial Sequence
  Description of Artificial Sequence: Synthetic oligonucleotide
agcgguuuugacacucuga

SEQ ID NO: 248596 - RNA, 19 nt, Artificial Sequence
  Description of Artificial Sequence: Synthetic oligonucleotide
caccgccgacagaagagag

SEQ ID NO: 248597 - RNA, 19 nt, Artificial Sequence
  Description of Artificial Sequence: Synthetic oligonucleotide
uuuccgaggagggcaacuu

SEQ ID NO: 248598 - RNA, 19 nt, Artificial Sequence
  Description of Artificial Sequence: Synthetic oligonucleotide
cgaugcaacugcauucagg

SEQ ID NO: 248599 - RNA, 19 nt, Artificial Sequence
  Description of Artificial Sequence: Synthetic oligonucleotide
auacugcauuauugcaaaa

SEQ ID NO: 248600 - RNA, 19 nt, Artificial Sequence
  Description of Artificial Sequence: Synthetic oligonucleotide
agguuuccguucuuuccaa

SEQ ID NO: 248601 - RNA, 19 nt, Artificial Sequence
  Description of Artificial Sequence: Synthetic oligonucleotide
guugcguccaccacaaaau

SEQ ID NO: 248602 - RNA, 19 nt, Artificial Sequence
  Description of Artificial Sequence: Synthetic oligonucleotide
agggcacgaacugucacaa

SEQ ID NO: 248603 - RNA, 19 nt, Artificial Sequence
  Description of Artificial Sequence: Synthetic oligonucleotide
cucggugagcucuuuauau

SEQ ID NO: 248604 - RNA, 19 nt, Artificial Sequence
  Description of Artificial Sequence: Synthetic oligonucleotide
uucucggaggaguguccac

SEQ ID NO: 248605 - RNA, 19 nt, Artificial Sequence
  Description of Artificial Sequence: Synthetic oligonucleotide
cugguaacacuguggucca

SEQ ID NO: 248606 - RNA, 19 nt, Artificial Sequence
  Description of Artificial Sequence: Synthetic oligonucleotide
accagucuggauagcucuc

SEQ ID NO: 248607 - RNA, 19 nt, Artificial Sequence
  Description of Artificial Sequence: Synthetic oligonucleotide
ucggacagccagguaacau

SEQ ID NO: 248608 - RNA, 19 nt, Artificial Sequence
  Description of Artificial Sequence: Synthetic oligonucleotide
guccaucuauguuuggggu

SEQ ID NO: 248609 - RNA, 19 nt, Artificial Sequence
  Description of Artificial Sequence: Synthetic oligonucleotide
acacucucggacagccagg

SEQ ID NO: 248610 - RNA, 19 nt, Artificial Sequence
  Description of Artificial Sequence: Synthetic oligonucleotide
cuuucggguugcguccacc

SEQ ID NO: 248611 - RNA, 19 nt, Artificial Sequence
  Description of Artificial Sequence: Synthetic oligonucleotide
gguuuaagguuuccguucu

SEQ ID NO: 248612 - RNA, 19 nt, Artificial Sequence
  Description of Artificial Sequence: Synthetic oligonucleotide
gcacgaacugucacaaggc

SEQ ID NO: 248613 - RNA, 19 nt, Artificial Sequence
  Description of Artificial Sequence: Synthetic oligonucleotide
gauuggaacuaaacauagu

SEQ ID NO: 248614 - RNA, 19 nt, Artificial Sequence
  Description of Artificial Sequence: Synthetic oligonucleotide
gggucacacucucggacag

SEQ ID NO: 248615 - RNA, 19 nt, Artificial Sequence
  Description of Artificial Sequence: Synthetic oligonucleotide
gguguugcacugugcuuug

SEQ ID NO: 248616 - RNA, 19 nt, Artificial Sequence
  Description of Artificial Sequence: Synthetic oligonucleotide
gacggugccagcaguaagu

SEQ ID NO: 248617 - RNA, 19 nt, Artificial Sequence
  Description of Artificial Sequence: Synthetic oligonucleotide
auccugugaucaccguuaa

SEQ ID NO: 248618 - RNA, 19 nt, Artificial Sequence
  Description of Artificial Sequence: Synthetic oligonucleotide
cauuaugggcaccgaugca

SEQ ID NO: 248619 - RNA, 19 nt, Artificial Sequence
  Description of Artificial Sequence: Synthetic oligonucleotide
gcgcaaugagcucacagaa

SEQ ID NO: 248620 - RNA, 19 nt, Artificial Sequence
  Description of Artificial Sequence: Synthetic oligonucleotide
acaccgccgacagaagaga

SEQ ID NO: 248621 - RNA, 19 nt, Artificial Sequence
  Description of Artificial Sequence: Synthetic oligonucleotide
uucuucgccccgcgcgcca

SEQ ID NO: 248622 - RNA, 19 nt, Artificial Sequence
  Description of Artificial Sequence: Synthetic oligonucleotide
guaccgaugaggacucuaa

SEQ ID NO: 248623 - RNA, 19 nt, Artificial Sequence
  Description of Artificial Sequence: Synthetic oligonucleotide
ccuagucccgcgcaaugag

SEQ ID NO: 248624 - RNA, 19 nt, Artificial Sequence
  Description of Artificial Sequence: Synthetic oligonucleotide
ggagaugucaagggauuuc

SEQ ID NO: 248625 - RNA, 19 nt, Artificial Sequence
  Description of Artificial Sequence: Synthetic oligonucleotide
ucggaggaguguccacauc

SEQ ID NO: 248626 - RNA, 19 nt, Artificial Sequence
  Description of Artificial Sequence: Synthetic oligonucleotide
cguaguaaguaccgaugag

SEQ ID NO: 248627 - RNA, 19 nt, Artificial Sequence
  Description of Artificial Sequence: Synthetic oligonucleotide
cugcuacuauuauuuggaa

SEQ ID NO: 248628 - RNA, 19 nt, Artificial Sequence
  Description of Artificial Sequence: Synthetic oligonucleotide
cuuccggucuggcccauga

SEQ ID NO: 248629 - RNA, 19 nt, Artificial Sequence
  Description of Artificial Sequence: Synthetic oligonucleotide
cuaucacacaagggcacga

SEQ ID NO: 248630 - RNA, 19 nt, Artificial Sequence
  Description of Artificial Sequence: Synthetic oligonucleotide
cugccacaucagacggugc

SEQ ID NO: 248631 - RNA, 19 nt, Artificial Sequence
  Description of Artificial Sequence: Synthetic oligonucleotide
gcccuuucggguugcgucc

SEQ ID NO: 248632 - RNA, 19 nt, Artificial Sequence
  Description of Artificial Sequence: Synthetic oligonucleotide
uguugcccuuucggguugc

SEQ ID NO: 248633 - RNA, 19 nt, Artificial Sequence
  Description of Artificial Sequence: Synthetic oligonucleotide
gcuguaagggagaccaaga

SEQ ID NO: 248634 - RNA, 19 nt, Artificial Sequence
  Description of Artificial Sequence: Synthetic oligonucleotide
cucaagguuccugaagcua

SEQ ID NO: 248635 - RNA, 19 nt, Artificial Sequence
  Description of Artificial Sequence: Synthetic oligonucleotide
ccccuggacguuugggugg

SEQ ID NO: 248636 - RNA, 19 nt, Artificial Sequence
  Description of Artificial Sequence: Synthetic oligonucleotide
ucccgcgcaaugagcucac

SEQ ID NO: 248637 - RNA, 19 nt, Artificial Sequence
  Description of Artificial Sequence: Synthetic oligonucleotide
gggugcauucgggaggcag

SEQ ID NO: 248638 - RNA, 19 nt, Artificial Sequence
  Description of Artificial Sequence: Synthetic oligonucleotide
ccugccacaucagacggug

SEQ ID NO: 248639 - RNA, 19 nt, Artificial Sequence
  Description of Artificial Sequence: Synthetic oligonucleotide
ggucccaauuagccuagca

SEQ ID NO: 248640 - RNA, 19 nt, Artificial Sequence
  Description of Artificial Sequence: Synthetic oligonucleotide
acucccuagucccgcgcaa

SEQ ID NO: 248641 - RNA, 19 nt, Artificial Sequence
  Description of Artificial Sequence: Synthetic oligonucleotide
uucugacgauuggaacuaa

SEQ ID NO: 248642 - RNA, 19 nt, Artificial Sequence
  Description of Artificial Sequence: Synthetic oligonucleotide
cacgaacugucacaaggcu

SEQ ID NO: 248643 - RNA, 19 nt, Artificial Sequence
  Description of Artificial Sequence: Synthetic oligonucleotide
uuccggucuggcccaugau

SEQ ID NO: 248644 - RNA, 19 nt, Artificial Sequence
  Description of Artificial Sequence: Synthetic oligonucleotide
gucccgcgcaaugagcuca

SEQ ID NO: 248645 - RNA, 19 nt, Artificial Sequence
  Description of Artificial Sequence: Synthetic oligonucleotide
ccguuuauauguauugggu

SEQ ID NO: 248646 - RNA, 19 nt, Artificial Sequence
  Description of Artificial Sequence: Synthetic oligonucleotide
accgccgacagaagagagu

SEQ ID NO: 248647 - RNA, 19 nt, Artificial Sequence
  Description of Artificial Sequence: Synthetic oligonucleotide
caggugcuaugacacugga

SEQ ID NO: 248648 - RNA, 19 nt, Artificial Sequence
  Description of Artificial Sequence: Synthetic oligonucleotide
cuuugacucugaacucaua

SEQ ID NO: 248649 - RNA, 19 nt, Artificial Sequence
  Description of Artificial Sequence: Synthetic oligonucleotide
uagcucccuccagaugcug

SEQ ID NO: 248650 - RNA, 19 nt, Artificial Sequence
  Description of Artificial Sequence: Synthetic oligonucleotide
cgaacugucacaaggcugu
